United States Patent Application Publication US 2005/0228172 A9 - sequence listing, part 38

SEQ ID NO: 136780 - DNA, 497 bp, Homo sapiens
tgaggaccagagaggtaaaataactcacctaaggtcacacagctaataaagtgcagagctaggatcagaacccagatggtgtagctccagaacccacatcctaactaccatgtctgctaccctttggaaatgaatgaatggtgtgtcttaatgcaccaggtccaatcatagcccttttccatacaccagctcacttaccactggggagagtcctgtgacgtagacaagcgaatacccccattttacggaagaccaacctgggagataagtcacacaccacatccctcacatggtacaggctccatgtaccataactggaccaggatagcaccaaggacattgcctcctgaataaggatgctgtgactcagaaaatgcttatttctytctatgccaaaactcaatttctacaaattcattttggatctatcagtacacacctagaatgcccaagaggtctcttgcctctttccccactctgggcctcagtttcctcaa

SEQ ID NO: 136781 - DNA, 497 bp, Homo sapiens
tgaggaccagagaggtaaaataactcacctaaggtcacacagctaataaagtgcagagctaggatcagaacccagatggtgtagctccagaacccacatcctaactaccatgtctgctaccctttggaaatgaatgaatggtgtgtcttaatgcaccaggtccaatcatagcccttttccatacaccagctcacttaccactggggagagtcctgtgacgtagacaagcgaatacccccattttacggaagaccaacctgggagataagtcacacaccacatccctcacatggtacaggctccatgtaccataactggaccaggatagcaccaaggacattgcctcctgaataaggatgctgtgactcagaaaatgcttatttctttctatgccraaactcaatttctacaaattcattttggatctatcagtacacacctagaatgcccaagaggtctcttgcctctttccccactctgggcctcagtttcctcaa

SEQ ID NO: 136782 - DNA, 472 bp, Homo sapiens
cttttttttttttttttttttgcatgttaccttttggtttttgttcttatgaaaataataatataaagatatgtttttatagttacaattagtgtacacrtgatttttggaattctaatctctttctgcccaataatgtatcaaatttccccaatgttttgcccagattttacaccagaaattttaaattaagacagcctaacatttcatcatgactggaggtccccagcgcctgggccatgaacaggtacaggtctgtggcccattaggaactaggccatacagcaggaggtgagcagcaggtgagtgaaagaaagttcatctgtatttacagccactccccattgctcaccttagcgcctgagctccacctcttttcagatcagcaacggcatcagattctcataggagcataaaccttattgtgaactgtgcatgtgaaggatctaggttgcatgctccttataagaat

SEQ ID NO: 136783 - DNA, 444 bp, Homo sapiens
tccacagtggggccatgtcctgataaacccatcataagtcaaaaatatcacaagtcaagatgcatttaatgccctgataaaaccgatagctttaaaaattaagttgaaccattcacttccagatgctcctcaacttacgatgggttacatcctccttgtaaagttgaaaaaatcttaagtcaaatcattgtaagttggggacaaactttatgtaacggtaggacctcaaataatgtcattttgctcaacattgtttcatcataacgtcgatgagaaaaaagaatcaattcctgctgggccactacctgtgtggagtcagcacgttcaccccatgtctgtgtgagttttctctggggactccaatttcttctcatatccccgagctgtgcacrtggggtgaattggtgtgtctgcattgtcccagcatgagtgaatgtgggtgtg

SEQ ID NO: 136784 - DNA, 509 bp, Homo sapiens
aacagcatagcagttggtaagtaatgtgttttaggtgctggtgtactagactgtattacattgtgattatcagtttcctccttcccttggctatcagaaaacctatcacaatattagcaatggctatttcacattactgtacttccacttatttccttagaaactgagggatctcttttggtgtcatgtactaaatgtgcacttaaccacagctatattatagctaacacctattgtcatagctacagtgaataacacattaaaacacaaaggaggccacaattatttgctcacattctgcaaagtctgattcamagacaactacacttaagatcatagttatgcttctaatttcatctatatttcctcacctcttctagagagagcctatcttcatcgtttttatatctgtaatatgtgcattaactggcattgcttcaactcagttttctgagaaactctcaaatgttttttaaaatatgagctatttccttaaccccaaacttgaa

SEQ ID NO: 136785 - DNA, 581 bp, Homo sapiens
gtagtctgtgtgtaacgatataatacttagaaatggcctgacacttgctttatggtctagtttaaatctgtaactgtcctgtgtgtgcttgaaaagaatgtgtattgtccagatgtcttaaatattcaatgtgcatttagaacaggcttgttaattgttattaaaatctgtactcctgatttttgtgtgtgtgtggtttatcaatttctgagcragacatgaaaatattctgctttgatgtgacatttgtcaatttctccttataattccacctacttttatatatttgatgctctctatattttttctctctctatagagaattcttatatcttcctggagaattgaatcttttaacaatatgtagcaagcctctgcccatttctgtcttttaaaatctctgctaatgagtttttcttaaagtctgttttgttcatgttaatatagctaccccagctttcttttggttagtattttccttgtatagctttttccaccttgttactttcaacttttctgtctttaagttttagctatctctcctgtgaacagcaaatagatagattctatttgtgtttaat

SEQ ID NO: 136786 - DNA, 473 bp, Homo sapiens
ggtcgtagcctcccgatgtcaccaaacttggccaaaccccagcagtcctgtggcttcaatccccatacactgtgtctccgttttccccttgggtgcagacgctttcattgctctcctcgcccagtggtctttstcacccttccccttcactctggcaaatctcaggcctggatgactgattgatctgggatacaactatggagacctctcctccacccatttggaactctaaactcagcaggaacttagctcttccccctattcaggtagggccagtacctgtcccatactctgtcaccaggacaggactgcattgccagctatggcattgcacctgcagctccaccccttgctctggggccatttatgtacagaagagcctcttctttctgataatgttggtacattaaatgtgtactgtaatgagatgaaattgacttttatatcttggtaagacttttcatttaaatttt

SEQ ID NO: 136787 - DNA, 626 bp, Homo sapiens
ttctcatcttccagaagcatctagatcaatacttattgataggtyaaaagatgaaatctaaacctgaaaaatgcaaaaatatattatcatgtcacttagaaataaaacaattcaaaatgcttgcctcaggagaagaggactcagaagtgagcaagattggagcagaagtctgatgttttttattataaaccttgtagaacattttactttcaaaaatatgtacatgaattactttgataaaaataaagatttaaatagaatataaaaatgagaactctagtgagccatgctagatgatgtggagaacatattgaccaaataagtcagtccaaatggctcagaaccaaaatcagctaaaagacctgctccatctactgcctctaggtccaaacccaagtcttggatatgtccacactcaccagaaagccacaaaagggagcttaagaaacacagaaacatcttgcatttgctccattgctctggcctttccaggaccatgtggctgccacatgggagagagagaagtggggagaaaaggttcaagccaaaagccttctcactgggggagcagtccccagccctcatacttcatccatgtgggctagacatttagtctggcacactgt

SEQ ID NO: 136788 - DNA, 626 bp, Homo sapiens
ttctcatcttccagaagcatctagatcaatacttattgataggttaaaagatgaaatctaaacctgaaaaatgcaaaaatatattatcatgtcacttagaaataaaacaattcaaaatgcttgcctcaggagaagaggactcagaagtgagcaagattggagcagaagtctgatgttttttattataaaccttgtagaacattttactttcaaaaatatgtacatgaattactttgataaaaataaagatttaaatagaatawaaaaatgagaactctagtgagccatgctagatgatgtggagaacatattgaccaaataagtcagtccaaatggctcagaaccaaaatcagctaaaagacctgctccatctactgcctctaggtccaaacccaagtcttggatatgtccacactcaccagaaagccacaaaagggagcttaagaaacacagaaacatcttgcatttgctccattgctctggcctttccaggaccatgtggctgccacatgggagagagagaagtggggagaaaaggttcaagccaaaagccttctcactgggggagcagtccccagccctcatacttcatccatgtgggctagacatttagtctggcacactgt

SEQ ID NO: 136789 - DNA, 565 bp, Homo sapiens
atatcaagcaggtacccagctgctgggctaagaaggaagggtgggcaaggggtcagggctgggattttcttttcccagccctgtcccccagcatggtcagtattatctcggaacctgagcaggaccaagcctccggtgctgtgcctggcctcgtgcgctgtgtggctctaagaaggtagggcctgaccagagtcctcaggacccgtgtgggaaggcactgagctagaaaaaaatacaccagttgacaaacagatgggaaattagaaaagaagtagaaatttcctgtaaccaaaaacaaataagagcctgaaactgaaagttgaggctttttcctttggaaaagatgtcccagcactgacttttttccatgactggccattaaagaggcaggctggcggggaaggggatgtttccagggctggccccacccagcrtagtgacaaagcacagccgctgtttcaagcttggggagaattttggtgcatccggcctaatgcagtgactcatgcctgtaatcccagcactttgggaggccatagtgggaggactgcttcaagtcaggaat

SEQ ID NO: 136790 - DNA, 565 bp, Homo sapiens
atatcaagcaggtacccagctgctgggctaagaaggaagggtgggcaaggggtcagggctgggattttcttttcccagccctgtcccccagcatggtcagtattatctcggaacctgagcaggaccaagcctccggtgctgtgcctggcctcgtgcgctgtgtggctctaagaaggtagggcctgaccagagtcctcaggacccgtgtgggaaggcactgagctagaaaaaaatacaccagttgacaaacagatgggaaattagaaaagaagtagaaatttcctgtaaccaaaaacaaataagagcctgaaactgaaagttgaggctttttcctttggaaaagatgtcccagcactgacttttttccatgactggccattaaagaggcaggctggcggggaaggggatgtttccagggctggccccacccagcgtagtgacaaagcacagccgctgtttcaagcttggggagaattttggtgcatccrgcctaatgcagtgactcatgcctgtaatcccagcactttgggaggccatagtgggaggactgcttcaagtcaggaat

SEQ ID NO: 136791 - DNA, 568 bp, Homo sapiens
tgtggttcctaccagcaggtaaaaatagagatagccattgcattactctgttataacactgctataaagaactgccagggcagatcatgagatcaggagttagagaccagcctggccaacacggtgaaaccccgcctttactaaaaatacaaaaattagctggccatggtggcaggcacctataatctcagctactcaggaagctgaggcaggagaatcgtttgaacccaggaggcggaggttgcggtgagccgagattgcggcattgcactccagcctgggcgacaaggcgagactctgtctcaaaaaacaaaacaaaacaaaacaaaaaaaactgccaagactgggtaacttataaagaraagaggtttaattgcctcagcctcttcagccagttccactgaagaggcctcaggaaacttacaatcgtggcagaaggggaagcaggcacatcttacatggcaggaggtgagagagagagcgagaggagggcagagaagagaggagacaggagaagggtggagagagagacagggaaagagagcaggaaaaactatcatttataaaa

SEQ ID NO: 136792 - DNA, 588 bp, Homo sapiens
gggtctaaaatgcttatgcacaagtgtcaaaaacagctgtgcacagagggtcaaaaatgcttgtgcacaagagtcaaaaatgtgtrtgcaggtgagatgcgttttcccacttcattccccttcattcacgcacacttttgactttctcccatattcttctaaacagcttccgccacaatgactgtctgtgaagtcattaaggcagatgttggcaggtgactcaaatcttggtggatggagctaaactatgtgcctttcttatgactcccaggggacagccacaaagtgaggacttcgtggaagtgaaggccagctatagtagatctttgtacactcactactctgttgctgcgctgtcaagatattctccaaatagggggtgtgatctgcaggtgctccgctatcccagcacaccacagccccaagcccgggtcagcctgcaggatggaggatgcgctgcagacatatagcccccaggctgccctggggtcgacgcccccgcctcctggcctccagaaagacaattctagggcatagtctcatggctcctcaaatgcgtctccagcatgatggagccctaatagttgg

SEQ ID NO: 136793 - DNA, 567 bp, Homo sapiens
attagtttttacaaaagggaggtgttttggtggatagatggcttaaatagtttgcagggcttgtggaccaattaaggtctgttgaatayggctttagaaaagagagctcaacctgtgtcccctgaaagtaatttgtatcatagttggaaagatacaatgcattacaaccaagcaagtcttataaacatcctgaggtttatattgattatgaatattgccacaggtgggacaggtgcaatgcccagtttgtcttggcagacttggcttatgcctgttatcctagcatgattaagagtgtcccgtttcactctaaaaggtgtcctaaatggatgatgaatgatttggtctttttattaatgaagtaagagggaaggattattcctaactgggtagactgtagatttgtgtaactaaaagggaatgagttggtgatggacttattttctaaatatattcttgctgataatttcttaagggaccaatacagaatagtaaatttcaaggactgtcacttttactgaatttttgacccaattatgatgcaattatattttttgtgtcatgttc

SEQ ID NO: 136794 - DNA, 567 bp, Homo sapiens
attagtttttacaaaagggaggtgttttggtggatagatggcttaaatagtttgcagggcttgtggaccaattaaggtctgttgaatacggctttagaaaagagagctcaacctgtgtcccctgaaagtaatttgtatcatagttggaaagatacaatgcattacaaccaagcaagtcttataaacrtcctgaggtttatattgattatgaatattgccacaggtgggacaggtgcaatgcccagtttgtcttggcagacttggcttatgcctgttatcctagcatgattaagagtgtcccgtttcactctaaaaggtgtcctaaatggatgatgaatgatttggtctttttattaatgaagtaagagggaaggattattcctaactgggtagactgtagatttgtgtaactaaaagggaatgagttggtgatggacttattttctaaatatattcttgctgataatttcttaagggaccaatacagaatagtaaatttcaaggactgtcacttttactgaatttttgacccaattatgatgcaattatattttttgtgtcatgttc

SEQ ID NO: 136795 - DNA, 567 bp, Homo sapiens
attagtttttacaaaagggaggtgttttggtggatagatggcttaaatagtttgcagggcttgtggaccaattaaggtctgttgaatacggctttagaaaagagagctcaacctgtgtcccctgaaagtaatttgtatcatagttggaaagatacaatgcattacaaccaagcaagtcttataaacatcctgaggtttatattgattatgaatattgccacaggtgggacaggtgcaatgcccagtttgtcttggcagacttggcytatgcctgttatcctagcatgattaagagtgtcccgtttcactctaaaaggtgtcctaaatggatgatgaatgatttggtctttttattaatgaagtaagagggaaggattattcctaactgggtagactgtagatttgtgtaactaaaagggaatgagttggtgatggacttattttctaaatatattcttgctgataatttcttaagggaccaatacagaatagtaaatttcaaggactgtcacttttactgaatttttgacccaattatgatgcaattatattttttgtgtcatgttc

SEQ ID NO: 136796 - DNA, 550 bp, Homo sapiens
ttcagccagattccatgggctggatcagggtcacgtgggctggactcggagtgtgtcgtcctcggatgactaaggctttgttccggcctgaccttgcctgcctggctctcttcccttgggaaaattctcttccaagaggctcgtctgtcaatcccccctcagaatgggcttcagccgggcagtctcaccagtttatcagacaagccctgtcttgcccccatgtcacrggtgcagcttttcctcatgacatgacccctccctacacaagtcttctgcccttaacctgagggggagtttctctcctccccacgtaggccacgaagtggagcagctgccctctcttcacttcacctccatgctcccaaacaacattgtcgcttttaagacagtcaccactgagaacgctgggcaagtcccagaggcttacgaaattttacagagcgcatccttagacctgcagactacggggggaataaagcctctccttcagtttgcagatggaactgaaagaatttctacacagtaaacagattcacctgaactggccgag

SEQ ID NO: 136797 - DNA, 517 bp, Homo sapiens
aagtggaataagaacagagaatgggcactatgctagagaatgctgaggggcrtgtcagttatctattgcagtgtaacaaataatcccaaacttagtaactttaaacaacaaacatctattatctcagtttctgtgacccagaatatgggacaggcttaactgggtggttctgactcaagggcttttatgaagcttcagtccagctgttgcccctggctgagatctcatctaaggctcaaccggggctgaaggatctgcttgtaaactcacccatgtggttgttgacaagcctgagattctcatgggttgttggattaaggggctcagctctttgctaggtgttggggaaggtctccttcagttcctcaacattggagcctcttcactgattagctcataacatagcagctgccttatcctagagcaggtgatccaagggaaagagcaagagggcaagagagagtgtgcgtccaagaaggaagctgcagtctttttataacctaatcttgaaaatggc

SEQ ID NO: 136798 - DNA, 574 bp, Homo sapiens
cagcaaagcttgcaataactcatcggtgtcattcgttagtcttgggtcagaaaaaattgttggtgataattgtgataattttaattgtttcattttcattctttagttgttctgtttgctccttctgttccaaaygtaaatacgttttcccccttttgagagaaggaaatgtgtgtattgtgacattccaaaaatctctacctaagagacagatgggagccaagagaacaagtagaaaggaataaattcagttaaggaagaatatgaaggcataggggtagaaggaggagaagaaattggaatgaaagggagaaagcttctgaagtctttttcaaatcagaaatagtgtgggatggccttttgctcatctcttcaatgaaggccattttttttccccagaatttcttttaggagcatctcactgctatcagaagtaagtcagtttgtctggttctaaaaccagctttttccaattgtgtatggtaatacatcagcttaggcattttcaaaagatccccattttggccactgctgcttttgaccatcccgggttacatgggtccacttatctaag

SEQ ID NO: 136799 - DNA, 575 bp, Homo sapiens
aggtgccaaaaatacagaatggaaaaaggttagaagtttcagtaagtggtgttaagaaaatgacatccacatgcagaacaatgaaattgaattattatctsacaccatacacaaaaatcaactcaaaatagattatagactaaacttgaagacctgaaactaaatctcctaaaagaaaacacaagggaaaagtttcatgacattaatcctggcaatgatcttttggatatcacaccaaaagcaaaggcaacaaaagcaaaaataatcaaatgtgactatatatgcacaggaaaggaaacagttaacaaaatgaaaaggcaacctacagaatagaagaactatttacaaattatgtatctgataagaggttaaaattcaaaacatgtaagaagctgttacgactgaatagcaaacaagaaataacctgattttgaaaaataaccatagaatctaaatagatatttctccaagaaagacatacaaattgtcaacagtatctgaaaaattgatcaaacaccattaatcattagaaaatgtaaatgaaaaatataatgagatatcaccacatacctatt

SEQ ID NO: 136800 - DNA, 575 bp, Homo sapiens
aggtgccaaaaatacagaatggaaaaaggttagaagtttcagtaagtggtgttaagaaaatgacatccacatgcagaacaatgaaattgaattattatctgacaccatacacaaaaatcaactcaaaatagattatagactaaacttgaagacctgaaactaaatctcctaaaagaaaacacaagggaaaagtttcatgacattaatcctggcaatgatcttttggatatcacaccaaaagcaaaggcaacaaaagcaaaaataatcraatgtgactatatatgcacaggaaaggaaacagttaacaaaatgaaaaggcaacctacagaatagaagaactatttacaaattatgtatctgataagaggttaaaattcaaaacatgtaagaagctgttacgactgaatagcaaacaagaaataacctgattttgaaaaataaccatagaatctaaatagatatttctccaagaaagacatacaaattgtcaacagtatctgaaaaattgatcaaacaccattaatcattagaaaatgtaaatgaaaaatataatgagatatcaccacatacctatt

SEQ ID NO: 136801 - DNA, 575 bp, Homo sapiens
aggtgccaaaaatacagaatggaaaaaggttagaagtttcagtaagtggtgttaagaaaatgacatccacatgcagaacaatgaaattgaattattatctgacaccatacacaaaaatcaactcaaaatagattatagactaaacttgaagacctgaaactaaatctcctaaaagaaaacacaagggaaaagtttcatgacattaatcctggcaatgatcttttggatatcacaccaaaagcaaaggcaacaaaagcaaaaataatcaaatgtgactatatatgcacaggaaaggaaacwgttaacaaaatgaaaaggcaacctacagaatagaagaactatttacaaattatgtatctgataagaggttaaaattcaaaacatgtaagaagctgttacgactgaatagcaaacaagaaataacctgattttgaaaaataaccatagaatctaaatagatatttctccaagaaagacatacaaattgtcaacagtatctgaaaaattgatcaaacaccattaatcattagaaaatgtaaatgaaaaatataatgagatatcaccacatacctatt

SEQ ID NO: 136802 - DNA, 575 bp, Homo sapiens
aggtgccaaaaatacagaatggaaaaaggttagaagtttcagtaagtggtgttaagaaaatgacatccacatgcagaacaatgaaattgaattattatctgacaccatacacaaaaatcaactcaaaatagattatagactaaacttgaagacctgaaactaaatctcctaaaagaaaacacaagggaaaagtttcatgacattaatcctggcaatgatcttttggatatcacaccaaaagcaaaggcaacaaaagcaaaaataatcaaatgtgactatatatgcacaggaaaggaaacagttaacaaaatgaaaaggcaacctacagaatagaagaamtatttacaaattatgtatctgataagaggttaaaattcaaaacatgtaagaagctgttacgactgaatagcaaacaagaaataacctgattttgaaaaataaccatagaatctaaatagatatttctccaagaaagacatacaaattgtcaacagtatctgaaaaattgatcaaacaccattaatcattagaaaatgtaaatgaaaaatataatgagatatcaccacatacctatt

SEQ ID NO: 136803 - DNA, 368 bp, Homo sapiens
gagtaaataaggtgttcagttttaatggagtcctctaagccctgggcctggaggttccagatgagacattcgagagtggtgtctccaggtggttttaaagagccttgccccatactggtgactggaagggtgagaaatttagaggaggggagtgagtaccccattcctccctggataagggacataggagagccagggcatccctgcagatctttgctgtcccctggaggccagagtggccagagcagctggagcagcaagctttctgagggcrtcccctgagaaagtgggctgcggtcacctggtgaccagggagacctctcacccagcgctgggattttctggaaccagaagaaacagagaggaat

SEQ ID NO: 136804 - DNA, 368 bp, Homo sapiens
gagtaaataaggtgttcagttttaatggagtcctctaagccctgggcctggaggttccagatgagacattcgagagtggtgtctccaggtggttttaaagagccttgccccatactggtgactggaagggtgagaaatttagaggaggggagtgagtaccccattcctccctggataagggacataggagagccagggcatccctgcagatctttgctgtcccctggaggccagagtggccagagcagctggagcagcaagctttctgagggcatcccctgagaargtgggctgcggtcacctggtgaccagggagacctctcacccagcgctgggattttctggaaccagaagaaacagagaggaat

SEQ ID NO: 136805 - DNA, 539 bp, Homo sapiens
aataattgagaaactcttccatggccttgctggagactgatattcaaacagaagaagctcaaagaactcctgggagatttattgcaaaaagtcatcaccaaggcatatattcattaagctatctaaaatcaatatgaaagaaagaaytccaagagcagtaaaacaaaagcatcaggtaacctataaaggaaaacccatcatactaacaggagacttctcaacagaaactttataagccagaaggaaatagggtcctatctttagcttccttaaacagaataactgtcagccaataatcttgtatccagcaaaacaaagtttcttaaatgaaggagaaataaaatcatttccagtcaaacaaatgctgaggaaatttgttactatcaggccagttgtacaagaaatgttaaaagaagtccaaaaccttgaaacaaaacttgatatgtaccaaaataaaacctcttgaaagcataaaactgaaaaagcctataaaacaataacaaaacaacaaaaagccaagtatctaggtgattagtctg

SEQ ID NO: 136806 - DNA, 539 bp, Homo sapiens
aataattgagaaactcttccatggccttgctggagactgatattcaaacagaagaagctcaaagaactcctgggagatttattgcaaaaagtcatcaccaaggcatatattcattaagctatctaaaatcaatatgaaagaaagaactccaagagcagtaaaacaaaagcatcaggtaacctataaaggaaaacccatcatactaacaggagacttctcaacagaaactttataagccagaaggaaatrgggtcctatctttagcttccttaaacagaataactgtcagccaataatcttgtatccagcaaaacaaagtttcttaaatgaaggagaaataaaatcatttccagtcaaacaaatgctgaggaaatttgttactatcaggccagttgtacaagaaatgttaaaagaagtccaaaaccttgaaacaaaacttgatatgtaccaaaataaaacctcttgaaagcataaaactgaaaaagcctataaaacaataacaaaacaacaaaaagccaagtatctaggtgattagtctg

SEQ ID NO: 136807 - DNA, 539 bp, Homo sapiens
aataattgagaaactcttccatggccttgctggagactgatattcaaacagaagaagctcaaagaactcctgggagatttattgcaaaaagtcatcaccaaggcatatattcattaagctatctaaaatcaatatgaaagaaagaactccaagagcagtaaaacaaaagcatcaggtaacctataaaggaaaacccatcatactaacaggagacttctcaacagaaactttataagccagaaggaaatagggtcctatctttagcttccttaaacagaataactgtcagccaataatcttgtatccagcaaaacaaagtttcwtaaatgaaggagaaataaaatcatttccagtcaaacaaatgctgaggaaatttgttactatcaggccagttgtacaagaaatgttaaaagaagtccaaaaccttgaaacaaaacttgatatgtaccaaaataaaacctcttgaaagcataaaactgaaaaagcctataaaacaataacaaaacaacaaaaagccaagtatctaggtgattagtctg

SEQ ID NO: 136808 - DNA, 539 bp, Homo sapiens
aataattgagaaactcttccatggccttgctggagactgatattcaaacagaagaagctcaaagaactcctgggagatttattgcaaaaagtcatcaccaaggcatatattcattaagctatctaaaatcaatatgaaagaaagaactccaagagcagtaaaacaaaagcatcaggtaacctataaaggaaaacccatcatactaacaggagacttctcaacagaaactttataagccagaaggaaatagggtcctatctttagcttccttaaacagaataactgtcagccaataatcttgtatccagcaaaacaaagtttcttaaatgaaggagaaataaaatcatttccagtcaaacaaatgctgaggaaatttgttactatcaggccagtwgtacaagaaatgttaaaagaagtccaaaaccttgaaacaaaacttgatatgtaccaaaataaaacctcttgaaagcataaaactgaaaaagcctataaaacaataacaaaacaacaaaaagccaagtatctaggtgattagtctg

SEQ ID NO: 136809 - DNA, 357 bp, Homo sapiens
ccctagaggggactctgtgtgtgggctctggccccacatttcccttctacaatgcactagcagagtttctgcatgaggactccacctctgcaccagacttcttcctggacatccaggcatttccatacacactctgaaatctaggcagtggttccctaacctcatttcttgacctctgcacacccacaggtccaacaccatgtgaaagctctcaaggcttggggctttcaccctctgaagcaacarcctgagctgtactttggctccttttagccacagctgaagtggctgggacacagggcaccaattcccaaagctgcgcacaacatggggaccctggacctgacccagaatgcc

SEQ ID NO: 136810 - DNA, 576 bp, Homo sapiens
agaagtaaatgaaattcaaacaaacataaaatacaaaagatcaatgaaacaaaaagctattgttccttgaaaagataaacaaaattgatagaccattagcaaaattagctaagaaaagaagaaattcatataaactgaattataagtgaaactggggacattccaaatgacaccacaaaaacacaaaatatcatttgagactgctatgaacactattatatacacaaactggaaaacttagaggaaatggataaattcctggaaacgtgtattagtctgttctcacactgctracaaagacatacccaagactgggtaatttatataggaaagaggttaaattgattcacagttccacatggctgtggaagccttacaatcatggtgaaaggtgaatgaggactaaagtcatgtcttacacggtgtcaggcaagagagcatgtgcaggggaactcccctttataaaaccatcaaatcctgtgagacttattcactatcatgagaacagcatgggaaaaacccaccccaatggttcaattacctcctattgggtccatcccataacacatgtgaatt

SEQ ID NO: 136811 - DNA, 557 bp, Homo sapiens
tgtgtggcgacgcagagccaaaccatatcaacatgtacccccctagattatatcaggaagatatataatctcttaatctcttagaagattaataacaagcagtgagattgaatcagtaataaaaaattaccaaccaaaaaagccaaggccagatggarttaaagctgaatcctatcaggtgttcaaagaggaattggtatcaatcctactaaaactattccaaaagattaagaaagatggaatccttcccaattcattctatgaagccagtattactctgataccaaaatcagaagaggatataacaaaataagaaaactagaaaccaacatccttgatgaacatacatgcaaattctcaacaaattactagctagcctaatcaaacagcaaaccaaaaagataatatacaatcatcagtgggtttcatcccagggatgcaggggtggtttaacatacacaagtcaataaatgcaatactcacataaacagaattaaaaacaaaaactatatgataatctcaacagatacagaataagcattcaaaaaaatccagca

SEQ ID NO: 136812 - DNA, 557 bp, Homo sapiens
tgtgtggcgacgcagagccaaaccatatcaacatgtacccccctagattatatcaggaagatatataatctcttaatctcttagaagattaataacaagcagtgagattgaatcagtaataaaaaattaccaaccaaaaaagccaaggccagatggaattaaagctgaatcctatcaggtgttcaaagaggaattggtatcaatcctactaaaactattccaaaagattaagaaagatggaatccttcccaattcattctatgaagccagtattactctgataccaaaatcagaagaggatatarcaaaataagaaaactagaaaccaacatccttgatgaacatacatgcaaattctcaacaaattactagctagcctaatcaaacagcaaaccaaaaagataatatacaatcatcagtgggtttcatcccagggatgcaggggtggtttaacatacacaagtcaataaatgcaatactcacataaacagaattaaaaacaaaaactatatgataatctcaacagatacagaataagcattcaaaaaaatccagca

SEQ ID NO: 136813 - DNA, 557 bp, Homo sapiens
tgtgtggcgacgcagagccaaaccatatcaacatgtacccccctagattatatcaggaagatatataatctcttaatctcttagaagattaataacaagcagtgagattgaatcagtaataaaaaattaccaaccaaaaaagccaaggccagatggaattaaagctgaatcctatcaggtgttcaaagaggaattggtatcaatcctactaaaactattccaaaagattaagaaagatggaatccttcccaattcattctatgaagccagtattactctgataccaaaatcagaagaggatataacaaaataagaaaactagaaaccaacatccttgatgaacatacatgcaaattctcaacaaattactagctagcctaatcaaacagcaaaccaaaaagataatatacaatcatcagtgggtttcatcccagggatgcaggggtggtttaacatacacaagtcaataaatgcaatactcacataaacagaattaaaaasaaaaactatatgataatctcaacagatacagaataagcattcaaaaaaatccagca

SEQ ID NO: 136814 - DNA, 457 bp, Homo sapiens
ccttttcctttttatctctttatgaaaattctttggcagattttcaccatttatctttggagaattctaaaaattacagagttacaaagggattaagtgagagagttgtcctgatttttaaagaggataaaatattggatcgwagaaactacagtacacttagcactaatgcctaggaaatatctgaaattgagtattcaatacatcagtttaaagatctaaaaaaaaaataccctaaacaatgaaatgacttactcatttcattttttttcatcaaacatcaataaaactgacatgtttggaatagcatgtccaatgccgcagtacttttctataggtactgatcctttcatcttttacatgtttatcacagaagctgccttgtaaccatgttatacaaatgttagattttttttgaccactgttttattcaacaataaacaaatgagccaatctg

SEQ ID NO: 136815 - DNA, 533 bp, Homo sapiens
agtctaaacatatacataaggaagagagtaaattgccacaaaaacataacattacaaaaactatgaagcaattttagaattcctgagtgggagtagaaaggaaattacaatgtagtaaatttcattgtattctgcatttatgagattttggaatgtttccaaaatctatattattctggcaacatccttaacaacttggaatcaatggtaaattatgtaaatatgattgaatcatcagtaaattgcaacttgatcagatatagctgtgtggtaataygagtataactgttaactaccctgactatattttattatatacccaagagccaagattctcacatatgttgcattttttcaatcattttgttagaggattgatattaaatcatacctcttccctttttttttcttttttttaaaggaagtctacctatgtggcataatgagacctactcactcattcagctcaatgttctactgacatctgaataatagtatgccttctctgttacatttattaactaaaattggga

SEQ ID NO: 136816 - DNA, 533 bp, Homo sapiens
agtctaaacatatacataaggaagagagtaaattgccacaaaaacataacattacaaaaactatgaagcaattttagaattcctgagtgggagtagaaaggaaattacaatgtagtaaatttcattgtattctgcatttatgagattttggaatgtttccaaaatctatattattctggcaacatccttaacaacttggaatcaatggtaaattatgtaaatatgattgaatcatcagtaaattgcaacttgatcagatatagctgtgtggtaatatgagtataactgttaactaccctgactatattttattatatacccaagagccaagattctcacawatgttgcattttttcaatcattttgttagaggattgatattaaatcatacctcttccctttttttttcttttttttaaaggaagtctacctatgtggcataatgagacctactcactcattcagctcaatgttctactgacatctgaataatagtatgccttctctgttacatttattaactaaaattggga

SEQ ID NO: 136817 - DNA, 533 bp, Homo sapiens
agtctaaacatatacataaggaagagagtaaattgccacaaaaacataacattacaaaaactatgaagcaattttagaattcctgagtgggagtagaaaggaaattacaatgtagtaaatttcattgtattctgcatttatgagattttggaatgtttccaaaatctatattattctggcaacatccttaacaacttggaatcaatggtaaattatgtaaatatgattgaatcatcagtaaattgcaacttgatcagatatagctgtgtggtaatatgagtataactgttaactaccctgactatattttattatatacccaagagccaagattctcacatatgttgcattttttcaatcattttgttagaggattgatrttaaatcatacctcttccctttttttttcttttttttaaaggaagtctacctatgtggcataatgagacctactcactcattcagctcaatgttctactgacatctgaataatagtatgccttctctgttacatttattaactaaaattggga

SEQ ID NO: 136818 - DNA, 390 bp, Homo sapiens
tattattctaattttagtatttataaatactagtatgtgtaaatgccattttcctcatcaatcctattcttaatgactctccagttatttgtaygttgctaccttcatttcctaaaaccaatgacaaaagaatcatttgagaatcatttgagaatcaatagcccttcttctaaatatcaatggtgatgatgttatctttccataggtccatgaggatgttgatgataagcacttctctgatgatattgagtatccctctacatattccataaaaatgccaggtaaactagttggcctccttctacatgattttctcggacaggcagaatctccttggtacccgcaccatcaacttgagtatagttgccaagtaccctgacaagctggttg

SEQ ID NO: 136819 - DNA, 390 bp, Homo sapiens
tattattctaattttagtatttataaatactagtatgtgtaaatgccattttcctcatcaatcctattcttaatgactctccagttatttgtacgttgctaccttcatttcctaaaaccaatgacaaaagaatcatttgagaatcatttgagaatcaatagcccttcttctaaatatcaatggtgatgatgttatctttccataggtcsatgaggatgttgatgataagcacttctctgatgatattgagtatccctctacatattccataaaaatgccaggtaaactagttggcctccttctacatgattttctcggacaggcagaatctccttggtacccgcaccatcaacttgagtatagttgccaagtaccctgacaagctggttg

SEQ ID NO: 136820 - DNA, 390 bp, Homo sapiens
tattattctaattttagtatttataaatactagtatgtgtaaatgccattttcctcatcaatcctattcttaatgactctccagttatttgtacgttgctaccttcatttcctaaaaccaatgacaaaagaatcatttgagaatcatttgagaatcaatagcccttcttctaaatatcaatggtgatgatgttatctttccataggtccatgaggatgttgatgataagcacttctctgatgatattgagtatccctctacatattccataaaaatgccaggtaaactagttggcctccttctacatgattttctcggacaggcagaatctccttggtacccscaccatcaacttgagtatagttgccaagtaccctgacaagctggttg

SEQ ID NO: 136821 - DNA, 390 bp, Homo sapiens
tattattctaattttagtatttataaatactagtatgtgtaaatgccattttcctcatcaatcctattcttaatgactctccagttatttgtacgttgctaccttcatttcctaaaaccaatgacaaaagaatcatttgagaatcatttgagaatcaatagcccttcttctaaatatcaatggtgatgatgttatctttccataggtccatgaggatgttgatgataagcacttctctgatgatattgagtatccctctacatattccataaaaatgccaggtaaactagttggcctccttctacatgattttctcggacaggcagaatctccttggtacccgcaccatcaacttgagtatagktgccaagtaccctgacaagctggttg

SEQ ID NO: 136822 - DNA, 590 bp, Homo sapiens
acagaacactcagaaaactcactgcaatattcatgccaaaaccagaagatgcctgtattaatagaagctgggaagactctgcttctctgacaatttgacaactgatatttaaaagtgtttaaacataaggaaaattttcagattcattttcaaaaatgttttaattacgggtagtataagagctgagattttctcttacagcaaaaacaacaaaatgtttttatcaactagaagggtgcgataatggaactacttttcataatttaagctgctttttcttatraaatgccagaagagctttgtctctgtgattttaaattgtatgaaatgtaattttttttaagaggtagataatacatcaccaatcttagtatatttttaattaacttgaaatttaaaactcctcaaattttaaactactttatttaggtatgattgatatgtaaacagccatacatacttaatggatataattcaatgaagtggaggatatgtataaccccatgaagtcattaccgctgtcaaggccatagacatatttggcattactcctagtactaaaaatcctagccagaacaacctctgaaagt

SEQ ID NO: 136823 - DNA, 590 bp, Homo sapiens
acagaacactcagaaaactcactgcaatattcatgccaaaaccagaagatgcctgtattaatagaagctgggaagactctgcttctctgacaatttgacaactgatatttaaaagtgtttaaacataaggaaaattttcagattcattttcaaaaatgttttaattacgggtagtataagagctgagattttctcttacagcaaaaacaacaaaatgtttttatcaactagaagggtgcgataatggaactacttttcataatttaagctgctttttcttataaaatgccagaagagctttgtctctgtgattttaaattgtatgaaatgtaattttttttaagaggtagataatacatcaccaatcttagtatatttttaattaacttgaaatttaaaactcctcaaattttaaactactttatttaggtatgattgatatgtaaacagccatacatacttaatggatataattcaatgaagtggaggatatgtataaccccatgaagtcattaccrctgtcaaggccatagacatatttggcattactcctagtactaaaaatcctagccagaacaacctctgaaagt

SEQ ID NO: 136824 - DNA, 590 bp, Homo sapiens
acagaacactcagaaaactcactgcaatattcatgccaaaaccagaagatgcctgtattaatagaagctgggaagactctgcttctctgacaatttgacaactgatatttaaaagtgtttaaacataaggaaaattttcagattcattttcaaaaatgttttaattacgggtagtataagagctgagattttctcttacagcaaaaacaacaaaatgtttttatcaactagaagggtgcgataatggaactacttttcataatttaagctgctttttcttataaaatgccagaagagctttgtctctgtgattttaaattgtatgaaatgtaattttttttaagaggtagataatacatcaccaatcttagtatatttttaattaacttgaaatttaaaactcctcaaattttaaactactttatttaggtatgattgatatgtaaacagccatacatacttaatggatataattcaatgaagtggaggatatgtataaccccatgaagtcattaccgctrtcaaggccatagacatatttggcattactcctagtactaaaaatcctagccagaacaacctctgaaagt

SEQ ID NO: 136825 - DNA, 590 bp, Homo sapiens
acagaacactcagaaaactcactgcaatattcatgccaaaaccagaagatgcctgtattaatagaagctgggaagactctgcttctctgacaatttgacaactgatatttaaaagtgtttaaacataaggaaaattttcagattcattttcaaaaatgttttaattacgggtagtataagagctgagattttctcttacagcaaaaacaacaaaatgtttttatcaactagaagggtgcgataatggaactacttttcataatttaagctgctttttcttataaaatgccagaagagctttgtctctgtgattttaaattgtatgaaatgtaattttttttaagaggtagataatacatcaccaatcttagtatatttttaattaacttgaaatttaaaactcctcaaattttaaactactttatttaggtatgattgatatgtaaacagccatacatacttaatggatataattcaatgaagtggaggatatgtataaccccatgaagtcattaccgctgtcaaggccatagacatatttggcattactcctagtactaaaaatcstagccagaacaacctctgaaagt

SEQ ID NO: 136826 - DNA, 406 bp, Homo sapiens
gagcagggttagctatgcttgtatcagacaaaatggatttcaagacaaaaattgtaagaagagacaaagaaggaaactatgaaatgataaaagggtcaattcagcaagaagayacggcaacttaaaaaatacaggcacccaacagtggagcacacagatatataagtcaaatattttcaacaataatagtgggagatttcaacactctactttcagcactggatacatctttcatacagaaaatcaacaaagaatcaccaaatttagtctgcagtgtagaccaaattgacctaatagatatttacagaacattatatgcaatgacaaatgaaaacacacttttcctcagcatgtggctcactctcaaggacataccatacgttagatcagaacacaagtcttaaaa

SEQ ID NO: 136827 - DNA, 591 bp, Homo sapiens
ttggtcaaaagtggctttttgtttccacaaggggaaagactggctatgtaattataattttttccttatttattttacttaaagctggtagagtctaagtattgtatgaagtgcccatgattctgtcagtaaatttgagcatatttttatcagttaatgtcattttaactggtccttttgtttgtttctatttttaaggtgaattttaaattatatctgaaatcagtaagataccttgagaaaaactgcaatgagaggaggtaaatatccttttcaggaggaactgatatctctggctaaatatttgtccttttattatggcwtctaaatcagttattttcttcagctttaatttcataaaattaaaaaactatataaaaaattcctgtagttgttggaataattaaaaattctggtgcagtggtggtataccaatctttagaattcttaagaattctaatgtttcaagttgaggccatgcttgggaaaatcatgtcatagcatttatgttattttcagatatcattttttaccttggaaagaagtaataatgttcatcataaccctaacagcctggatagtgagctaaac

SEQ ID NO: 136828 - DNA, 591 bp, Homo sapiens
ttggtcaaaagtggctttttgtttccacaaggggaaagactggctatgtaattataattttttccttatttattttacttaaagctggtagagtctaagtattgtatgaagtgcccatgattctgtcagtaaatttgagcatatttttatcagttaatgtcattttaactggtccttttgtttgtttctatttttaaggtgaattttaaattatatctgaaatcagtaagataccttgagaaaaactgcaatgagaggaggtaaatatccttttcaggaggaactgatatctctggctaaatatttgtccttttattatggcatctaaatcagttattttcttcagctttaatttcataaaattaaaaaactatataaaaaattcctgtagttgttggaataattaaaaattctggtgcagtggtggtataccaatctttagaattcttaagaattctaatgtttcaagttgaggycatgcttgggaaaatcatgtcatagcatttatgttattttcagatatcattttttaccttggaaagaagtaataatgttcatcataaccctaacagcctggatagtgagctaaac

SEQ ID NO: 136829 - DNA, 379 bp, Homo sapiens
tagaactgtccactcttcatgaaacctaagcagaaaaatacaaaaatttacctgtttcactgaatcatcattatgttttctctgattaacctgtcttttgctatagaggcctcagccatgaaccaatcaatargcaaaataaagatatctttccttccctatcggtgttatggctaagaactctgagtaaccatgagtttcaaagctttctacttgtgattttttgaaaaaaattatagctttacatttaggtttatgattcattttgagataatctttgtacagtatgtgaggctcaagtcaatgatcgtttattttctttgcatatgaatgtctttcaacattattgttgaaaagaccatctttgctccactgaaaa

SEQ ID NO: 136830 - DNA, 379 bp, Homo sapiens
tagaactgtccactcttcatgaaacctaagcagaaaaatacaaaaatttacctgtttcactgaatcatcattatgttttctctgattaacctgtcttttgctatagaggcctcagccatgaaccaatcaataagcaaaataaagatatctttccttccctatcrgtgttatggctaagaactctgagtaaccatgagtttcaaagctttctacttgtgattttttgaaaaaaattatagctttacatttaggtttatgattcattttgagataatctttgtacagtatgtgaggctcaagtcaatgatcgtttattttctttgcatatgaatgtctttcaacattattgttgaaaagaccatctttgctccactgaaaa

SEQ ID NO: 136831 - DNA, 379 bp, Homo sapiens
tagaactgtccactcttcatgaaacctaagcagaaaaatacaaaaatttacctgtttcactgaatcatcattatgttttctctgattaacctgtcttttgctatagaggcctcagccatgaaccaatcaataagcaaaataaagatatctttccttccctatcggtgttatggctaagaactctgagtaaccatgagtttcaaagctttctacttgtgattttttgaaaaaaattatagctttacatttaggtttatgattcattttgagataatctttgtacagtatgtgaggctcaagtcaatgatcrtttattttctttgcatatgaatgtctttcaacattattgttgaaaagaccatctttgctccactgaaaa

SEQ ID NO: 136832 - DNA, 496 bp, Homo sapiens
gtatttcttccaagtccctgatcattcaaccagactatctgagttcccctttcagcagaagatggatgtgctcactgcctcctgaagcatttagaataactaatgctttgccagatatttggggaatctttaattcagtcaayttaacaccgaaaatcaactaccattgtatttgttgattcgtttctcattcaagttatgaatgctctggttctaagtaaaataaatgttttttaattgtagtatggacatttgagatcttatattaggggattctggatcttatttaaatgtcctattttggcaggcaattatcctgttcaagtttagaccaaaggtcttctctcacttttgtaagctgttattccaaaggcactttctttttcagagcccttgagttaatatttaaatctgcttcataaacgtgctactcaaagtccatggaaattatggatggaatcttacattgtagtttggttttcaaccttttggtgtg

SEQ ID NO: 136833 - DNA, 496 bp, Homo sapiens
gtatttcttccaagtccctgatcattcaaccagactatctgagttcccctttcagcagaagatggatgtgctcactgcctcctgaagcatttagaataactaatgctttgccagatatttggggaatctttaattcagtcaacttaacaccgaaaatcaactacyattgtatttgttgattcgtttctcattcaagttatgaatgctctggttctaagtaaaataaatgttttttaattgtagtatggacatttgagatcttatattaggggattctggatcttatttaaatgtcctattttggcaggcaattatcctgttcaagtttagaccaaaggtcttctctcacttttgtaagctgttattccaaaggcactttctttttcagagcccttgagttaatatttaaatctgcttcataaacgtgctactcaaagtccatggaaattatggatggaatcttacattgtagtttggttttcaaccttttggtgtg

SEQ ID NO: 136834 - DNA, 496 bp, Homo sapiens
gtatttcttccaagtccctgatcattcaaccagactatctgagttcccctttcagcagaagatggatgtgctcactgcctcctgaagcatttagaataactaatgctttgccagatatttggggaatctttaattcagtcaacttaacaccgaaaatcaactaccattgtatttgttgattcgtttctcattcaagttatgaatgctctggttctaagtaaaataaatgttttttaattgtagtatggacatttgagatcttatattaggggattctggatcttatttaaatgtcctattttggcaggcaattatcctgttcaagtttagaccaaaggtcttckctcacttttgtaagctgttattccaaaggcactttctttttcagagcccttgagttaatatttaaatctgcttcataaacgtgctactcaaagtccatggaaattatggatggaatcttacattgtagtttggttttcaaccttttggtgtg

SEQ ID NO: 136835 - DNA, 496 bp, Homo sapiens
gtatttcttccaagtccctgatcattcaaccagactatctgagttcccctttcagcagaagatggatgtgctcactgcctcctgaagcatttagaataactaatgctttgccagatatttggggaatctttaattcagtcaacttaacaccgaaaatcaactaccattgtatttgttgattcgtttctcattcaagttatgaatgctctggttctaagtaaaataaatgttttttaattgtagtatggacatttgagatcttatattaggggattctggatcttatttaaatgtcctattttggcaggcaattatcctgttcaagtttagaccaaaggtcttctytcacttttgtaagctgttattccaaaggcactttctttttcagagcccttgagttaatatttaaatctgcttcataaacgtgctactcaaagtccatggaaattatggatggaatcttacattgtagtttggttttcaaccttttggtgtg

SEQ ID NO: 136836 - DNA, 327 bp, Homo sapiens
gtcaagggatatagtctatctccccgagccttgcatatcaactggccttgtgacttatttgcagaacagaatgcaatagaaggaacttgggtaaattctaaacctaggactcaacagtcgttccctgttycctctatcttgaaactctgccaccctgaggacaagcccaggctagcctgctggagggtgattgattatataaaggaaactcagtatagcagagccgacatcctgaagacttctgtgggagcagatgcctagctgaaacacagctgacaagagagtcatgaaaaagtcaaaaggatcacctgctaagtccattttaaa

SEQ ID NO: 136837 - DNA, 327 bp, Homo sapiens
gtcaagggatatagtctatctccccgagccttgcatatcaactggccttgtgacttatttgcagaacagaatgcaatagaaggaacttgggtaaattctaaacctaggactcaacagtcgttccctgtttcctctatcttgaaactctgccaccctgaggacaagcccaggctagcctgctggagggtgattgattatataaaggaaactcagtatagcagagccgacatcctgaagacttctgtgggagcagatgcctagctgaarcacagctgacaagagagtcatgaaaaagtcaaaaggatcacctgctaagtccattttaaa

SEQ ID NO: 136838 - DNA, 327 bp, Homo sapiens
gtcaagggatatagtctatctccccgagccttgcatatcaactggccttgtgacttatttgcagaacagaatgcaatagaaggaacttgggtaaattctaaacctaggactcaacagtcgttccctgtttcctctatcttgaaactctgccaccctgaggacaagcccaggctagcctgctggagggtgattgattatataaaggaaactcagtatagcagagccgacatcctgaagacttctgtgggagcagatgcctagctgaaacacagctgacaagagagtcatgaaaaagycaaaaggatcacctgctaagtccattttaaa

SEQ ID NO: 136839 - DNA, 425 bp, Homo sapiens
caggcatctgacattgtgattggaaaataatcttcatttgattgaattttccttcccttttggtcaactgtgctaacaccacagcagcctccatgagagagacaaattagccagtcacattracatatgccagcataattgggatgccaaaagcaatactaactgcagtaataactgaggatgcaatcactgacaaagtcattcctcctgtgatagccaaatttctcttgtgttggaggtttgctttcctttatccatgcagtgaatcttcctgtcaacataaacaggaatgctgatgaccatttcaggaatagcagtggtagcaatgaaagatatccccactggagctccaattaatgcacacagctgccaagtaattttcttacagcttcttgccccagaatctgaagccagaaggtttttga

SEQ ID NO: 136840 - DNA, 425 bp, Homo sapiens
caggcatctgacattgtgattggaaaataatcttcatttgattgaattttccttcccttttggtcaactgtgctaacaccacagcagcctccatgagagagacaaattagccagtcacattaacatatgccagcataattgggatgccaaaagcaatactaactgcagtaataactgaggatgcaatcrctgacaaagtcattcctcctgtgatagccaaatttctcttgtgttggaggtttgctttcctttatccatgcagtgaatcttcctgtcaacataaacaggaatgctgatgaccatttcaggaatagcagtggtagcaatgaaagatatccccactggagctccaattaatgcacacagctgccaagtaattttcttacagcttcttgccccagaatctgaagccagaaggtttttga

SEQ ID NO: 136841 - DNA, 425 bp, Homo sapiens
caggcatctgacattgtgattggaaaataatcttcatttgattgaattttccttcccttttggtcaactgtgctaacaccacagcagcctccatgagagagacaaattagccagtcacattaacatatgccagcataattgggatgccaaaagcaatactaactgcagtaataactgaggatgcaatcactgacaaagtcattcctcctgtgatagccaaatttctcttgtgttggaggtttgctttcctttatccrtgcagtgaatcttcctgtcaacataaacaggaatgctgatgaccatttcaggaatagcagtggtagcaatgaaagatatccccactggagctccaattaatgcacacagctgccaagtaattttcttacagcttcttgccccagaatctgaagccagaaggtttttga

SEQ ID NO: 136842 - DNA, 273 bp, Homo sapiens
catttattcaatttcaaattctggcttcggcaccttttgtctttaagacagactgcccctcggctgggrcagagaagttcatatggacacctgggcccagtgcacccttgggctctagaggtcaagggggaaatctgcaatatgatagtgagggaagtcatagtcatctgaagtgatgtctagcacatcatctcactgcatatcatcactctccaaaccactgtggatcatcttgggttaggccaagctgatgtatgaaagtttgacgaccag

SEQ ID NO: 136843 - DNA, 273 bp, Homo sapiens
catttattcaatttcaaattctggcttcggcaccttttgtctttaagacagactgcccctcggctgggacagagaagttcatatggacacctgggcccagtgcacccttgggctctagaggtcaagggggaaatctgcaatatgatagtragggaagtcatagtcatctgaagtgatgtctagcacatcatctcactgcatatcatcactctccaaaccactgtggatcatcttgggttaggccaagctgatgtatgaaagtttgacgaccag

SEQ ID NO: 136844 - DNA, 273 bp, Homo sapiens
catttattcaatttcaaattctggcttcggcaccttttgtctttaagacagactgcccctcggctgggacagagaagttcatatggacacctgggcccagtgcacccttgggctctagaggtcaagggggaaatctgcaatatgatagtgagggargtcatagtcatctgaagtgatgtctagcacatcatctcactgcatatcatcactctccaaaccactgtggatcatcttgggttaggccaagctgatgtatgaaagtttgacgaccag

SEQ ID NO: 136845 - DNA, 273 bp, Homo sapiens
catttattcaatttcaaattctggcttcggcaccttttgtctttaagacagactgcccctcggctgggacagagaagttcatatggacacctgggcccagtgcacccttgggctctagaggtcaagggggaaatctgcaatatgatagtgagggaagtcatagtcatctgaagtgatgtctagcacatcatctcactgcatatcatcactctccaraccactgtggatcatcttgggttaggccaagctgatgtatgaaagtttgacgaccag

SEQ ID NO: 136846 - DNA, 645 bp, Homo sapiens
gaaacacacataaacacatttacagaaatacacgtaatatgttatcagtttatatatatgtgtgtgtatacatatatgtatatagattttgtatatgtattctgtatataaattctgtatatatatacactatatatttacacatatagtatatataatatatgtttatatatataaaacttgatgaatgttgtttaatcaccagttttcataaggtgggaaacatatatgtatatgtacatacacaacacacatacacatatatatacacatatacagacatatatrtatgtaatttttctattgcaacataaagaaaatacagcacttcctttttcactgatggcaaaattaaagtgatttcaaactgggaaagaaaaataggtagaatgtattgttgtgatattgagtatgtggttctttttatttcttaaaagtgattcattgaagggacagctgtaaacaagggaaaactacttgaagctgcagccctttaacagggaaacactgagtgaatgtcctgtaataatttgaatttctctgtaaggttcaatgagctcgagaatagcagttcatgtttaattcgtaaggtaagaggtaaatcacaggcagatgaaaaagctttctaccttcatgcaattgaaa

SEQ ID NO: 136847 - DNA, 540 bp, Homo sapiens
gtttctgttaaccacaactaaaagtggttacctgaactgatactctctataagcatatatgatcaaatgtataaagagagmccaagaactcaaaaatatgggaaaacaattagagaactggaaaaaaagataagcaagcatgaagttggaccattgtccctggactttgccctaactcatacattcaggatgagtcatgttaggaaaaataatttcaaaattatttaacttaagaataaaagtttaaaataaattttcaaatttcaaaacaaaattatttacacaacagagacaatcaaggtggggtagtgatcagaagctcctctgctgctattagaactgcactgactcgaaggctcgaaagagagagagagcgagaacaacactttagataaaaaagaattcaataacaccatgaaacaaacatgttctggaacatatttagtggcaataagtattccatctaaaacatttgtgtttcacatacttttgaaatgagaggttgtaaaactgcgttacctgaaaaagaattttctacag

SEQ ID NO: 136848 - DNA, 519 bp, Homo sapiens
tttttttggggaaaacagaaacctctatgaattttctatgctagtcaaagctatgaaggatatttgggacttttttttctaaactttatgtgaaaatcccagaataaacatttactattaggagagtcaaatcatttattttcacatgaaagagattaagtaaagcagaatctttgatggtctgctgtgaattcttcgcrgtgattgagaaatttctgaaaaccacttccaaatcaattataatattaagtaaactttggctttaggagtaagagagagaaggtctgcgtccatgttgggaaagaatagatatgcccacaataattagtctattacttgtttgaaaagggtgatttcctcgtcatttcaaagtattaagcaaataaggacatattgagtatgtaattcatggaaaaataagaaacttcttacagtatgattcctaaaggattatgatgcattatcatttggagttgttatgaagcttatctttttggggtttccaattttaatttccat

SEQ ID NO: 136849 - DNA, 516 bp, Homo sapiens
caagaatttgattctctcttagaacctccagaaggaatgcaattctgctaacaccttgattttagcccagtgagatgcactgtggatttcttacctttagaactgtaagataacaaacgagttgttttaagccactgaatttgtggtaatctttcatagcagcaagaggaaackaatacaatacttaataaatgtactatcagtaaccctcacaaccacaaataattgagaaagtctacctgagcaagatgaatatacaaaactacaccagaacagattacaaagcacatagctttaattacactttgctgtgaacggtacagcctcatatatcaaggcaagaaaacaaaaacaaaaacaagaattgtaataaatattccagtttccctgctttacttttgaaaaataaacgtttttgaaaaaataaatcaagcatgtaaagttccctcaattcccacttttaagcagagaatgcccattagtgagcttgtggttatgctgtttgtatattttccc

SEQ ID NO: 136850 - DNA, 472 bp, Homo sapiens
tagcccagtgagatgcactgtggatttcttacctttagaactgtaagataacaaacgagttgttttaagccactgaatttgtggtaatctttcatagcagcaagaggaaactaatacaatacttaataaatgtactatcagtaaccctcacaaccacaaataattgagaaagtctacctgagcaagatgaatatacaaaactacaccagaacagattacaaagcacatagctttaattacactttgctgtgaacggtacagcctcatatmtcaaggcaagaaaacaaaaacaaaaacaagaattgtaataaatattccagtttccctgctttacttttgaaaaataaacgtttttgaaaaaataaatcaagcatgtaaagttccctcaattcccacttttaagcagagaatgcccattagtgagcttgtggttatgctgtttgtatattttccccctcttgctaagaatctt

SEQ ID NO: 136851 - DNA, 516 bp, Homo sapiens
caagaatttgattctctcttagaacctccagaaggaatgcaattctgctaacaccttgattttagcccagtgagatgcactgtggatttcttacctttagaactgtaagataacaaacgagttgttttaagccactgaatttgtggtaatctttcatagcagcaagaggaaactaatacaatacttaataaatgtactatcagtaaccctcacaaccacaaataattgagaaagtctacctgagcaagatgaatatacaaaactacaccagaacagattacaaagcacatagctttaattacactttgctgtgaacggtacagcctcatatatcaaggcaagaaaacaaaaacaaaaacaagaattgtaataaatattccagtttccctgctttacttttgaaaaataaaygtttttgaaaaaataaatcaagcatgtaaagttccctcaattcccacttttaagcagagaatgcccattagtgagcttgtggttatgctgtttgtatattttccc

SEQ ID NO: 136852 - DNA, 613 bp, Homo sapiens
gtataagtttcttgattgactaatagggttagtgtgaacatcaaatcaagttaagacttggaagaatataatgtatttcataaaagctgggcattgctgttattggctttgaccatttcgtcccttacatgtggttgcttaccatatagccctataagcatatctgactagtgcctgaaagataacaagtccaatactttttgtctcaaaaaaagggattttgctctttattttaaaagcattatcaattgttccagccactctgaccacaggcctgmgtagaatctttatcttttacctctctctgaccctccacatgccagtcggttgtctagtatttcactctatattactggcatctttggacctcctacctccatctccatcccactacctctaaccaagttcacatcagcaccaccctcccttatcctatgggaacgttctcttaacctactttctctaatttctttctctctatttttaaactaaatgcttctcaatcagggagacttattctgatctggttgagctagacatgatatttccctgtctctaagccataaaacatttgggtttcattttccatttttttttttcacttccacactcc

SEQ ID NO: 136853 - DNA, 538 bp, Homo sapiens
gttttttctatttcagaaactctttatatagccttgatatgatctttttgtcagattgtctgtggcttgctttttatactatgtctggagtcttttggtgaacaggtgctcctgtttttctcagatttttctttacaacttgtttagtttaacaaatctttgcttcctcaaaggtacaaaatattctacaggctgrccaggcacggtggctcacgcctgtaatcccagcactttgggaggccaaggtgggcacatcacaaggtcaggagagtgagaccatcctggccaacatggtaaaaccccgtctctactaaaaatacaaaaattagccaggcgtagtggcgcgagcctctagtcccagctacttgggaggccgaggcaggagaatagcttgaactcgggaggcggaggttgcagtgagccgagatcatgccactgcactccagtctgggtgacaagagcgaaactctgtctctaaataaataaatacagttctacaagtttttattttacagttcacatttacgcctgcaataca

SEQ ID NO: 136854 - DNA, 538 bp, Homo sapiens
gttttttctatttcagaaactctttatatagccttgatatgatctttttgtcagattgtctgtggcttgctttttatactatgtctggagtcttttggtgaacaggtgctcctgtttttctcagatttttctttacaacttgtttagtttaacaaatctttgcttcctcaaaggtacaaaatattctacaggctgaccaggcayggtggctcacgcctgtaatcccagcactttgggaggccaaggtgggcacatcacaaggtcaggagagtgagaccatcctggccaacatggtaaaaccccgtctctactaaaaatacaaaaattagccaggcgtagtggcgcgagcctctagtcccagctacttgggaggccgaggcaggagaatagcttgaactcgggaggcggaggttgcagtgagccgagatcatgccactgcactccagtctgggtgacaagagcgaaactctgtctctaaataaataaatacagttctacaagtttttattttacagttcacatttacgcctgcaataca

SEQ ID NO: 136855 - DNA, 708 bp, Homo sapiens
tttattttcatgtttggctaggagcatttcaatcttgtctactgcagggcttggtaaactttttcttaaaggttcagaaagcaaatatgtcagtcttatgggccattcagtctctgtaacaactattatctctgctactatagtatgacagcagccatggacaatattaaaatcaatgagcatatctgtgttctactaaaattttacgtacaaaatcaagtggttgacctggaagtcagagtttgtggacatctggtttattgaataacagacctrttgtctaaagaaaccacagaatgatttgaaaaatatgaacttattgtgagtagaatttaaatgtattaattttggtttaatttgcagatgtttctttgaagaattcatgtattgtaaatatgaaaaacaaatctgtacaagtcctctttcacatttttgataatttcaaaatacttagaagattgtttaattcctttaatttactggtaaatagacaaccaaacaaaaaaacaacagtaacaaaaacctttcggagtatttgggatcagaaacagttttgtttcagaatccctgtatagcagctcagaacctgttgtagaaaagggagaccaataaacagaataccaagtatgtttgtgtggataagagaagaagacatagtgtgagcatcgcaccaggccatgcaggccattggtgctgtgtgtaaaaagc

SEQ ID NO: 136856 - DNA, 708 bp, Homo sapiens
tttattttcatgtttggctaggagcatttcaatcttgtctactgcagggcttggtaaactttttcttaaaggttcagaaagcaaatatgtcagtcttatgggccattcagtctctgtaacaactattatctctgctactatagtatgacagcagccatggacaatattaaaatcaatgagcatatctgtgttctactaaaattttacgtacaaaatcaagtggttgacctggaagtcagagtttgtggacatctggtttattgaataacagacctgttgtctaaagaaaccacagaatgatttgaaaaatatgaacttattgtgagtagaatttaaatgtattaattttggtttaatttgcagatgtttctttgaagaattcatgtattgtaaatatgaaaaacaaatctgtacaagtcctctttcacatttttgatartttcaaaatacttagaagattgtttaattcctttaatttactggtaaatagacaaccaaacaaaaaaacaacagtaacaaaaacctttcggagtatttgggatcagaaacagttttgtttcagaatccctgtatagcagctcagaacctgttgtagaaaagggagaccaataaacagaataccaagtatgtttgtgtggataagagaagaagacatagtgtgagcatcgcaccaggccatgcaggccattggtgctgtgtgtaaaaagc

SEQ ID NO: 136857 - DNA, 708 bp, Homo sapiens
tttattttcatgtttggctaggagcatttcaatcttgtctactgcagggcttggtaaactttttcttaaaggttcagaaagcaaatatgtcagtcttatgggccattcagtctctgtaacaactattatctctgctactatagtatgacagcagccatggacaatattaaaatcaatgagcatatctgtgttctactaaaattttacgtacaaaatcaagtggttgacctggaagtcagagtttgtggacatctggtttattgaataacagacctgttgtctaaagaaaccacagaatgatttgaaaaatatgaacttattgtgagtagaatttaaatgtattaattttggtttaatttgcagatgtttctttgaagaattcatgtattgtaaatatgaaaaacaaatctgtacaagtcctctttcacatttttgataatttcaaaatacttagaagattgtttaattcctttaayttactggtaaatagacaaccaaacaaaaaaacaacagtaacaaaaacctttcggagtatttgggatcagaaacagttttgtttcagaatccctgtatagcagctcagaacctgttgtagaaaagggagaccaataaacagaataccaagtatgtttgtgtggataagagaagaagacatagtgtgagcatcgcaccaggccatgcaggccattggtgctgtgtgtaaaaagc

SEQ ID NO: 136858 - DNA, 509 bp, Homo sapiens
ttaatttcttatagttccagaaggcaaaactaggattgtggtgatgtgtattgaaagggaggagagaggcagcaagagatctgggagaattagttagcaggcttttttagtagtctgggagagatgaggatagcttgaattaggatgataattgtggagatgggctcagtggatgggatttgagaccagcaggcctyagttaatagattgaaagtgagggagaaagaaatttgaaagatgatttctggattacattcctgggttgtgccagataaggaccagagctcttttggttttaacatatcaggcttaaagtacctttggagctttcaggtagaagttcctgtaagcaattagatacatggttctgaaattcagaggaagagtattggctgtaaatggaaaactggaatctcccatacaggtaattggaactataggtatggatgaaattgcctaggtgagggaatataacttgggggaaaaaaggcctaggatggaaccacaat

SEQ ID NO: 136859 - DNA, 529 bp, Homo sapiens
tgttaatggataactactattagtctcaaaattctaggcatttctataaaacattggtcaatgtgactagtaagttaacgggaccaaggtttcaaagatcaatactgaaccttgataaataataagaggaaatgtaactccacaaaatgtttctgattaagtttgtgcccatgcaaaattaacataaatttcttaactcaagaatgaggaatattaaagcaatgtattttttcaacataaagcatgcattttctaatacattcttaaacatttcaaaattttaaaagttcgaattctaatcaagtagctattaatgcagtctaaccagtgccccaaatcagacatggaacacacacttgttactgtcacggaaataattcatgggagtgctactaaagatatatgagacttcaactcttgaccacatcactttttctccaaaactttagaacttgtttgcaaaarctaaatggtataaaacacattttaaaatgtcacccaattctcaaatgtcactgaaagaaaatgc

SEQ ID NO: 136860 - DNA, 505 bp, Homo sapiens
tagaacgttgaactgtgtctgsaaataaccatgtgtgccctgggaaatgggcagtgttctttgagatgttcagctttacgtttgtgttttcaaaaggctagacattttctgatgctgggagagggtatcatctatgtttgtttcattttggaaatgtgtacctatgttcttgcttgcaaatagaaagtatttttataattaaaaatatttataaataaatattaataaatatcttctgtaggttaagaatttcccatgttcgcattatttctttttaccttctttcctgtgaaagagaatgaatgagttcaaaccgatttctcagtagcaataaggaaagaataacctcaattcagtattctgaacaagaactccaattagtttaacaattgaatcaaccagttcctttaagattttcatttgctcattggcgttgaaactaaacattggttttgacattccttaaatataccctactcctactgtactatataccatatttttt

SEQ ID NO: 136861 - DNA, 664 bp, Homo sapiens
ctcactctccccaagcacagattcccagtaacttaggatttctgtcaattattacattctcccatctcaaaaagcctcccagccctctgaatttatgacatttggttttgatttgttttagctgcaaaatacctctgtgatcataaagtaattggctcttgttaacataaaaacttaaaacttgctttgttttttttttaagtattggttatatacttaataaagtagttcttargttctcacctatctttttctgccagaatagaaaaaattattctggaattaccagaacaaaggcaacaaaagaaatagtaggcccttttatcagattccgcagataaactttaattagtcttgtgctatctatttatagcaaaattaggtatttaaaggcagtaactcaaatctgaatacatattacaggaaatctatttctgtagtagttcctacatttcttttttatgagttaaaacatttcatgactatttaaagtatatagaagaattttaaaaaatgtacagagatgggtagtgtaaaactctacacatattagatgagtcagactctttcactaagtactggtagaggcaatcaacactgtaactctgaatcatagccctcttttggacaaaggaaaagtagctcggagctctgagactagact

SEQ ID NO: 136862 - DNA, 535 bp, Homo sapiens
atatactttccaaacattcatttcatacttttttgtggcygctctaatgtgtttgtgccactttataaaatattagagaggaatgaaattatcatggctattaacacagggcaattaagcaacatctttcctcataaagtaaaaaccactctcaaaatttcattccaatgaataattgttgagcccatattcaatggagaacagctaataattgtccttccctcatccttaaacaatttcctcccctcagccaggatctatgcctcctttggaaatatcctatgcttctctagatttctaaaattattccatcttctgtaatttagtggtgaacttgtgctatagctcagaaccttcttagaaaataggagataccaggtggacactcatggctaataaaaaaatattgcttcattttctaagttaacaacttaacaacaacaacagggagaaaagagattgcctttaacttccatgttagattttatagctgactgcatctcagaatattgtcataataagcagttattgtcat

SEQ ID NO: 136863 - DNA, 562 bp, Homo sapiens
tcatgctcttccctttctctagaatattctataaaattcacccactgcttcatttcttttaggaattgtrtcaaattcttaccactgttaattaagtggccacaattctacattcaaatgagataatcagataccgccatcaaaccctcagttgcattgtattggttttctttgtttagtcagtatttgtgttacctgttttctcagattcttcttccacaaggagtattttttctacaatattctgatatgcattcctccccacgttctttctagtacttctttgttcatattttattttctgagtcaagctcattatgtgtattttttattatgtagctggcttttccccatgaatttagtgagatttactttatttaatcttctacagaataagatatagtactcctaacctctttttttcattcctgtctgtgtaatttcacaataaatgttgtgtttccaaaaagccctctcagagtcctgcactgttagcacttcttttagctgctggttcttctcttatatctggtaaatccctgctcatcagttcgtggaatat

SEQ ID NO: 136864 - DNA, 562 bp, Homo sapiens
tcatgctcttccctttctctagaatattctataaaattcacccactgcttcatttcttttaggaattgtatcaaattcttaccactgttaattaagtggccacaattctacattcaaatgagataatcagataccgccatcaaaccctcagttgcattgtattggttttctttgtttagtcagtatttgtgttacctgttttctcagattcttcttccacaaggagtattttttctacaatattctgatatgcattcctccccacgttctttctagtacttctttgttcatattttattttctgagtcaagctcattatgtgtattttttattatgtagctggcttttccccrtgaatttagtgagatttactttatttaatcttctacagaataagatatagtactcctaacctctttttttcattcctgtctgtgtaatttcacaataaatgttgtgtttccaaaaagccctctcagagtcctgcactgttagcacttcttttagctgctggttcttctcttatatctggtaaatccctgctcatcagttcgtggaatat

SEQ ID NO: 136865 - DNA, 571 bp, Homo sapiens
tatgatgggggtagagagggtatgtgacagtaaattctaaagacaggcctcttggccattggggatgagtggatcctgtgctgtgcacatgarggtctggtctggcccttctgaagagttgcggatattagtacagggagacttcctaatacaaaaggctttgctatggataattttgcccttgcaagggaaccagacagattggtattttccctggcataaatacagatgtacttcaaaggggaatacattactaattggcaattctttctggctctatggaaagtggattggttctagctgagcttcatgagttttatcttaggcagagagtagttgtttggtcccagcagatcccactgtattgttgagatttgtgtctcttgtctcacagaccctgttttccataggaactggaaatgagcaatcctgcctaggtggcttaagttagaccatcaggtaacaaaggaatgtcagagaaaaggagcaacaaagaggcaaggatgacattgcctgtttatgtcaccaaccaaggttgctgcagcctgatgcaagacagacttccccttgg

SEQ ID NO: 136866 - DNA, 571 bp, Homo sapiens
tatgatgggggtagagagggtatgtgacagtaaattctaaagacaggcctcttggccattggggatgagtggatcctgtgctgtgcacatgagggtctggtctggcccttctgaagagttgcggatattagtacagggagacttcctaatacaaaaggctttgctatggataattttgcccttgcaagggaaccagacagattggtattttccctggcataaatacagatgtacttcaaaggggaatacattactaattggcaattctttctggctctatggaaagtggattggttctagctgagcttcatgagttttatcttaggcagagagtagttgtttggtcccagcagatcccactgtattgttgagatttgtgtctcttgtctcacagaccctgttttccataggaactggaaakgagcaatcctgcctaggtggcttaagttagaccatcaggtaacaaaggaatgtcagagaaaaggagcaacaaagaggcaaggatgacattgcctgtttatgtcaccaaccaaggttgctgcagcctgatgcaagacagacttccccttgg

SEQ ID NO: 136867 - DNA, 604 bp, Homo sapiens
tgccatattcaaataggactaattttccagctgttctggtgaaaattgcacaacagtcccctcttcatgtctgattttggctttgctcattcacaaactctattatttttctatttgtcattccaattccacagttttgtttacatttattgtttattgtcatctcttctttcattctccccatcctttggtattaatttcctctctgcttctttattgtaattttgttgggacattgggaaagagcagaaatcagtccatgtgttcaatacactgtgcattccaatacccttagtatggagacaaattccttatcacagtttataacaggtcctacagatgatcttttagtttatgcctctttcaatataagtgtgttcaagtgactttacaaggcagactgctattacctgtgttcctaattttatctgaagaatatgctgctgtcttttcttccctggctgcattaaatgtaacatgacaatgacttgataatcacatggttattttttacaamgttattgagtaaacatctagaaacaattttaaatgttgaatacatttttatactctaatactctaacaaatgtaattttttaaaaac

SEQ ID NO: 136868 - DNA, 570 bp, Homo sapiens
atcacatggttattttttacaacgttattgagtaaacatctagaaacaattttaaatgttgaatacatttttatactctaatactctaacaaatgtaattttttaaaaacaaatgtacattgtttcaagtctattacttatccatctttggaactgccaaagcaaatctctccatattataaaaaaaaaacttttgtgacttctagtaaacagacatagaaacagaagtttatgatatgatacataaaagagtttgyatttatcttacatttttactaactttattttttagctaagcttttgtctatatttgcatattcttgattgaaacatgcctttgtacatttgtattgagcaattaaaggcttttttaactagtcaacctaacaacattgacatatggcttttctcagattggaatgatctacaaagcttctgaagcttgaactttggggtccttcatgtgcacaggccctttccaagaccctgtttagagtgaatagaatacagacatttagaaggttcatgaactagcagtggtcttctttatgccaactcctttactcaagc

SEQ ID NO: 136869 - DNA, 550 bp, Homo sapiens
ttggccagcttttattcccttatttggccctgcccacatcccgatgattggtatattttgcagagtgctgattggtccattttgcagagtgctgatttgtccattttacaggctgctgattggtgcgtttgcaatcttttagttagacacagagtgctgattggttcatttttacagagtgctgatttgtgcattcacaatcctttagctagacagagagcactgattggwgcatttttatagagtgctgattggtgcatgtacaatcctttagctagacacagagggctcatgggtgcattgttacagagtgtggattggtgcatttacagtcctttaactagacccagagcactgattggtgcatttacaatcatctagctagtcagaaaagttctccaagtccacagtggacccaggaagtccacctggcatcacttctcagtaatgtgaaagcctaatgatttaccatgagaactctcatataattgccctgtttgataagagaaatgagcaggaggaaggttgtggtgaaggactctgctgaagc

SEQ ID NO: 136870 - DNA, 553 bp, Homo sapiens
ttcagttattcttctaggaaaaatttttaatcactcccacttacaatgagtggccacaattatatatcccaataagatagtcaggaacccacataaaagcctcaagggtattgcactgatctatttcttagtacatgtgctgtctcccagattcttcttccamacagaaattttttttatttttgcaatattctgaaactaatttctcaagactcgctttctaaaatgtatttgttgacattttctgttctaaataatcttccctgtgtttatttttcatcttatgtctggcttctttataaatacattttgggaattttcttaaatcgactcttctaagtaagcatctataattcttcttactcctttcattttatgtttgtttttaaaatttggatcaatatactgtatttccaaagtatttttactgagtttgtgttggtagctctcttttcatccactgacttctctgttatatcaagtagtttctgcccatcatttcatctttttatggaaaatgcaggttagtcagtattaacagctgccacttatc

SEQ ID NO: 136871 - DNA, 399 bp, Homo sapiens
gcactcactgagaggctcttgatgtatgtcttacagtgactcccaaacccaggcaaaaatmtttctacccaaaagctgcaaatctatgattctgcaaggacaggacaggattttgcctgccttgttctctaacaatgtgtttctcattcagccaattttgacgctgactggcaaactggccaccaactctcttaacaaccacataagcgacttttttgttgttgttcattagtctgtttccaattcacagaacataaagggcatggataatagcaggtcttccataactatttgttaaatgaattagtgctaacttagttggcagtcccactagcagcacacaaaaggagaaaatgaattaggcttgactgtgaaacaagtatcagagcaagaaaagaa

SEQ ID NO: 136872 - DNA, 531 bp, Homo sapiens
aaacagaattaaaaacaaaatcgaaagatcatcttgatagatacagaaaaggcatttgacaaaatcattttatgaataaaactcagaaaaatcagcatacaaggatcgtacctcaatgtagtaaaagccatctatgacaaacccacaaccaagttaatactgaatgaggaaaaattgaaagcattctctctgagaactggaacaagacaaggatacccactttcaccacttttattcaatatagtactggaagttttagccagagcaattagacaagagaaagaaataaagggcatccagattggtaaagaacaacacaaactgtcactgtttgctgatgatatgattgtatacctagaaaaccctaaagactcctccaaraagctcctagatctcataaatgaattcagcaaagtttcaggatacaaaattaatgtgtgcaaaccagtagccttcctataccccaacagcgaccaaactgagaatcaaatcaagaactcaactccttttacaatagctgcagatgtatat

SEQ ID NO: 136873 - DNA, 480 bp, Homo sapiens
aataaataagtttctttctaaatcataaacacatttacacaggattctccagwcctgtctttcttttcatctttacacaaaatatactcattagaatatgagcatctttgggatgcccatgttttcctcccacagagaggataggtaatcttacttttctccaatttgttttagtagtgtgtgtggaggtacttatccaggatttgataatgcactacttggtcctattcagttggctctctttacagagaagcacccatttttttcttgggtgccacatagcagacacagtaaatttattatcttttcaaattcttcacctgcctcgtcaggcctggaagagcatatagctcagcccctgctcactcctataatttctgttttatttatgaactttaaaaatacttactaatgagaataaaaagaatgaacaatgcctttgattttggtatttttgtggagccccctctaaactgcagg

SEQ ID NO: 136874 - DNA, 506 bp, Homo sapiens
gaggtaataaaaaactcttttctgaataaataagtttctttctaaatcataaacacatttacacaggattctccagtcctgtctttcttttcatctttacacaaaatatactcattagaatatgagcatctttgggatgcccatgttttcctcccacagagaggataggtaatcttacttttctccaatttgttttagtagtgtgtgtggaggtacttatccaggatttgataatgcactacttggtcctattcagttggctctctttacagagaagcayccatttttttcttgggtgccacatagcagacacagtaaatttattatcttttcaaattcttcacctgcctcgtcaggcctggaagagcatatagctcagcccctgctcactcctataatttctgttttatttatgaactttaaaaatacttactaatgagaataaaaagaatgaacaatgcctttgattttggtatttttgtggagccccctctaaactgcagggc

SEQ ID NO: 136875 - DNA, 528 bp, Homo sapiens
aagatcttgaagattccactttaaaaaagcgtcatgatgtagtaacagctctggtctgcagctcctagcaagatcaatgcagaaggcagttgatttctgcatttccaactgagctacccagctcatctcactgggactggttagatagtgggtgcagcccatggaggacaagcagaagcaaggtagggtgtcgcctcactccggaagtgcaaggagttgggaaactccctcccctagcaaagggaagccatgacagactgtgccatgaggaacagtgcattccagcccagatactacrctttttccacggtcttcacaacccacagaccaggagattccctccggtgcctatgcgaccagggccctgggtttcaagcacaaaactgggtggccatttgggcagactccaagctagctgcaggagtttcctttctaaccccaagggcacctggaatgccagcaagacagaacagttcactcccctggaaagggagttgaagccagggagccaagtggtctagctcagtg

SEQ ID NO: 136876 - DNA, 498 bp, Homo sapiens
ctcctagaggatgtccccattccttgccagatgccccctccatgctcaacccaacatcgtgccctgaaaccttctttgtcttttgtgagacagtgtctcactctgctacccaggctgcagttcagtggtgctatcacagctcactgcagcctcaacctctcgagctcaagtgatcctcccacttccgcctcctcagtgtctgggaccactgacacgtgacaccacatccggctaacttttgtatattttgtagagatgggatttcactatattgtccaggtgggtctcaaactcctgggctcaagcaatctgcctgcttctcaaagtgctgggactacaggtaagtcccactgttcctggtctgaatctttcttgagctcctaatccctgacgcctccgacctctactcccagatttaaaggayttatggcatgcccattggctaagctctctttgttaaggcaactgtgccatgtgacgtgacctaatcacaggagt

SEQ ID NO: 136877 - DNA, 560 bp, Homo sapiens
  misc_feature (1)...(560): n = A,T,C or G
aatttagtacaatttcctttaccacaagagatagtcttttctttaaaaaatctacataagacaataaggtcatgaaaaatattgagttcttagagtcatgtttaaaacaarcttcaggatgggtatagtagcccacacctgtaatcccagcactgtgggagaccaaggcaggaggattacttgaggccaggggtttgaaaccaggctaggcaacatagagacccccatctctataaaaataaaaataaaaataaaaataaaaaaattagccaggggtggtggcacatgcctatagtcctagctcctcagggggctggggccaaaggatggcttgagccaggtgttgaggctgcagtgagacatgtttgcaccactgcactccagncctgggccaacnaggtcaagaccttgtctctcaaatataaataaataagtaaataaataggacgaattgcaatatttgacggtttgaatccctgaaaagattaagaaatgagtattctttattacttctcactttccctccctccatcctgacttcttagttatattgttttatt

SEQ ID NO: 136878 - DNA, 550 bp, Homo sapiens
cgggcgtgacagtgcatgcctgtagtcctagctacttgggaggctgaggcgggagaatcacttgagcccaggaattggaggctgcagtaagatatgattgtgccacttcacttcagcttgggtgacacagtgagactttgtctcaaaaaacaaaaaacaaaactaaacaaaaaacaccacgttgaggagggacacaacaccaaccttgctcaaagcacttagcggtggaaatggagtagaaagtggacagtaacagcctcacctgctcaccttccaccagtcttggtccccaggcacccacaggactcccaacaataacaaaggactcaggtaccttctcttctgtccccattatacctgacagcacctgtagcccacaacaggcagattgtcaagcttggaacctttctgttttttccacagtcactttatattgtttattattacaaagctaacaattcttgttgtacaataagatataaattagatcaaaatctgccacrtgaaaggtatctctcaaatcttcaccttcaccctgagataggccacc

SEQ ID NO: 136879 - DNA, 470 bp, Homo sapiens
gaattctttcagctcagacgctgtggctgtgaatttctatctgttgggacaagagcatccaggttggatgtggggtccctggaagattggtcccatggccyatttgctgggcaagctggagcaagttacttaacctttctgtgcttcagcttctcccttgatcactgattcctttccttttcaagggcaagaggacagagggaaagttcctctgtataaaggtctcaaaggtaaacacttacaaggggtcaatcaaggggcggttaggtgttggggctgcagtagggagaggttaggacagcgagacacatagagccatgtccctttacagaggacagtgtgccccagctccagccagggggaatgtgacctcccagtgtgagaccctctctggtctccagtgctccagtgatttgtcatcttggccagggttgatgagtctgagaacttaggtaagatgctctgttgta

SEQ ID NO: 136880 - DNA, 538 bp, Homo sapiens
ctcaataaacatcggttaattcattaccaagtgaaatgaacaaaatatctgagaagcataagaagaagaagaggaaaaatgctaaatgatcacccgtgctgtgcaggcatggggctggggagcatcgcagtagctctgacagtgggctcttgtaatgatcgtgactgaggagctctgggagaccttgctcaaagtgcatacagtgkctgcgggtggtggctcatgcttgtaatcccagcactttgggaggcctaggcaggcggatcacctgaggtcaggagtttgagacctgcctggccaacatgatgaaaattcttttctactaaaaatacaaaaattacctgggcgtggtgccatatgcctgtaatcccagctactcaaaaggctgaggcaggagaattgcttgaacctaggaggtggaggctgcagtgagccaaggtcacaccactgcactccagcctcggtgacagagtgagactccaactcaaaaaaacaaaaaacacacacaaaaaagtgcattcgggcatatggcccctct

SEQ ID NO: 136881 - DNA, 555 bp, Homo sapiens
tttgacttgtccagaatgtcgtttaagggattcattccatgtgtagcttcctgtgtctgacctttttcattgtgcatagtgcttttgagattcacccatgttgtgtatacagtagtttgctccttttgattgccaagtaatatttcactgtggtagtcagttcttgcattgccatagagaaatacttgagactggataatttataaagaaaataagtctaattggttcacagttccacaggctgtacakgaagcatggtggtatctgcttggcttctggggaggcctcaggaaacttacaatcatggcagaaggcaaagagtaagccagcactttacatggccggaacaggaggaagagagcaaggggagaggtgctatatgcctttaaacaaccagatctctcaagaacttactcactatcttgatgacagtaccaaggaggaaatccacccccgcaatccaatcatctcccatcaggctccacctccaacactggggattacatttgaacatgagatttgggtggggacacagatccaaatcatatcagtatg

SEQ ID NO: 136882 - DNA, 555 bp, Homo sapiens
tttgacttgtccagaatgtcgtttaagggattcattccatgtgtagcttcctgtgtctgacctttttcattgtgcatagtgcttttgagattcacccatgttgtgtatacagtagtttgctccttttgattgccaagtaatatttcactgtggtagtcagttcttgcattgccatagagaaatacttgagactggataatttataaagaaaataagtctaattggttcacagttccacaggctgtacatgaagcatggtggtatctgcttggcttctggggaggcctcaggaaacttacaatcatggcagaaggcaaagagtaagccagcactttacatggccggaacaggaggaagagagcaaggggagaggtgctatatgcctttaaacaaccagatytctcaagaacttactcactatcttgatgacagtaccaaggaggaaatccacccccgcaatccaatcatctcccatcaggctccacctccaacactggggattacatttgaacatgagatttgggtggggacacagatccaaatcatatcagtatg

SEQ ID NO: 136883 - DNA, 512 bp, Homo sapiens
ggtgctgggtgtgcaaagcagactcagattgcagactgattgcaagttggcattgcttgagcagggtgcaggtggccagggagcagggaagagggtgcccgaggagcaaggcatttcactaagtggatatttatagcagggctcctggaataaatgatccaaggagagggcaggaggggtgagcttgctggaggttggccaagtcttgggtgctggatcctgccaagctgcaatcgcagtggctcgcttcgctccagaagcctggctgcccagtggtggggaagatggggaatgcttgttagggtatcaggtgggggcagcttcacttctccactcttacactcttacatatggaccttgaatcaattgtgaattgttcattatctgtggcctttcatttccttaatgttaaaatgtcacgatggtccaayagatagtgagcaccatgaacatcatttgtgtgtcttttaaaatttttattctttgtagagacagggtctcactatgttacc

SEQ ID NO: 136884 - DNA, 618 bp, Homo sapiens
gtaaaacataccagatttcaaagacttggtacacacacacacacacacacacacacacacacacacacacacagagagagaatgtaggatatcccattaatacttttatattgattatatggtagtctgggtgcacatatgataataagtggcctgtaatctcagcactktgggaggctaaggcaggaggattgcttgagcccaggagtttgagaccagctagggcaacatagtaagaccccatctctacaaaaaataaaaaatcagccaggcatagaggcaggtgcctgtagtctcagctacttgggaggctgaggcaagaggattgcttgagcctgggaggttgaggctgcagtgagctggagtcacaccactgcactccagcctgggcaacagagtgagaccctgtctcaaaaaataaaaataagtaaaaaattaatacttcgtatatactgggttaaattgattatattattaaagcacattttagtttttttttttaaactttgcttttaaatatggctactagaaaattaaaaattgtgcaggaggttcacattatatttctaagcaacagcactgttctagaacaggggtttgtaaactgcagcccttggg

SEQ ID NO: 136885 - DNA, 345 bp, Homo sapiens
acttctggacatgctctggcttgcagaaacactctttgccaagccccggagggcaccctaaccccctcaaaaccccaaaatatgatctatgagccacctatgaacacagattctggggttctkcctgcagaaaatggagcccacgaatcacttttggcaagaccccccactgccaacccctcggtgactccaatgtgctacaatttaagagtagtagatatggagacagctggatatgggttgaaactggagacttccagtttcattgctgtgggctcagtggcaagggacttaaatcctctgagctctctcacctgcaaaataagaatgctactagaagtgctc

SEQ ID NO: 136886 - DNA, 533 bp, Homo sapiens
ggtatggagggttttcctgttcaaaaatgcttccctcacaaagattcaggataaaaaagtccaccatgtgttggtgatttctctgggtcttagtaggccctgtgaaagtgtgaatacaccttcttggagcatacaatattatgccccaaaatgtggttggtgagctgtaacttctacaagatgctaatayggagatgatggtatgatataaagtgttcctgggttagtaagtgtggttaaacacatttttaaaggtttgttcactgcaggacttctcaaggcctttgatatgcgcaagtaccttgtgagtctgcaagaggaggatggcatctcctcaccttgaccacaacccccatgtgggagtaccttggcaggccggcattaaactgcgcatgctatgggaaatagtgtcttaggagggtctgagaacaaaggtgacagatggaagggatggacagagaaagggtaccagggaaaggaacagaaaatagaggaaggggagcagacactcctaatgacttgggcaaagagaa

SEQ ID NO: 136887 - DNA, 584 bp, Homo sapiens
ccctccactgggaacccactctcaatccattccctggctctcctgccacgccctctcccacccacttttcacatctcatatgggcataaccctcttcccaccgcatgacgtattctcagagcaccagcctctaagactagcctagaatgcttcctttgtgactccatgctgccatcaggtactcagatccacctttcactgagcactgcataattaaactctgtccccacctaagactgtgacatttcttaagatacggcattactctgtcttcatgtctaccacatgcgtaatacacacagaakgggctcagtagatagctctaaggagcaaggataaagactggatcacaacatgaaaactgtgattataacaagacagacacaggctagaaatccagaagagctccagggaataaggagaatgggagtgaggctcttccagagtaggccctaagacccttctggctctgcagaagctcagcattagctagagattaaaggggactaaagaaagtaactgcgaaaccccacacgtttctgcttcccaacaaaggggcaagagcgaattcaggctcatgccca

SEQ ID NO: 136888 - DNA, 289 bp, Homo sapiens
gagtgcagctgtctcagtgaagggagggacaggggacccagtggtggcctcagggctcagtctgtcttctctattrtatctcctggctctacttggtttcattcccccagcaagctcttgagcacacagctgcctacatcagtggtctcacatcctcctagctcagcctgcccactggcaagagctatggttgccagataaatataggatgcccaattaactttgaattttggatacataacaatgaatataataaaaatgtattctttgttatctgatatttaaaatt

SEQ ID NO: 136889 - DNA, 435 bp, Homo sapiens
catgtcccagtacacgaaagggattcacagggcaacctaggatttgagtgggaaggaggccttgaatgagagtgatggtttcagattgacattggttttgttggctggaaagagatcctgattcttttatctgtggaattttctttgtagtcccagtatcagagtgtggctaatgtctccaaagctttaccgagaagctgtatgatgataaagcctttgagtaaggctgtccataggcttttgctgactgttgaatttccatggtctgctcatccaagaatttcactatgtggggtagcttgaaggagagggagattctggggaaatgackgcctgagtttttatttgcttgtttcacttcagcagaggagtgagaaaagtaagtggcacattgagtttgtgtatagaaggagctgtttatctgatggaaaggcc

SEQ ID NO: 136890 - DNA, 560 bp, Homo sapiens
ttcagaagccatgacctctgggaagctctgcccccatatctcagatacccacaatcactcctagcatttacacatcacattgagcacaggacacattttgggtcagaagttttccaaaggggtgaagcgtgaaatgcaatgaaggttgaagtcccttggaaataagctttgcactgcagacacacagataaatgaggacttgccagttctcagcagctctggatgacccttcgcattgctgttggtctaatccattgttgagatgaactgtggggatggtagtacttctaattaattttcagtagaacatctttatgcccatgagctccttttaatagcacatcacctctataatctatgcttctactcttaagcatctgtacttaagayatgcatgatgtgtttgctacctggatatcatctatatggagttggggattgggtcaccattatattcctagtacctcagagctgcacaggagatcctctgtaaatttttattaaatggaattgagtggaatttttttcttcaaaatacttttcttatagaaaacagcatt

SEQ ID NO: 136891 - DNA, 582 bp, Homo sapiens
tgggtaaattcctctgtgacctggattctgggaagactttaacaatgactgcaaaatctacaggcaataaagagaaagataaataagtttgactacaacttatttatcaacaacaaaaaaaaacttttgtaagccaaaaacacatcataagcaaagccaaaagacaaatgataaaataggagaaaatatttgtgacacatagtacacatgaagaattaataatctccaatatacaaagaactttttaaaattgaggagaaacycccaaaattgctataggaacaaaatgagcaaaaaagttgacaattcacaaaaaagaataaaaaatggcttttaaacataagatgtacaacttcataataagcaaaatgcaaattaaactataatgagataccatttcacacccatcagagtggcaaaaactaaaagcttaaccttgcactctgttggtgaggctatgggaaaagggacactcttattcattgattgtgggaatgcaaaatggggcaatctctatggaagttaatttgcatttaccctttgatccagcaatcttacttctaagaattcaaccctgaagat

SEQ ID NO: 136892 - DNA, 606 bp, Homo sapiens
ctttgttaggtctgccgggtgaagagaaggcagctgctgcttcaacaggtacctctgaccaggaagcagcagtttcttccagctccttatgtggacctggattctgccaggacacgaacaaacaaacaacaacaaaaccccatcatttatacsgggtcaaaacagggttcacatggtgaactcatctgcagagtctaaattctgagatgcttaccaactttggaaccacccagaagatcaagggggagatgagcagttttgaatttatgactgtcctgacacatccaggacagtttcaagccagcattaccctaaggtgacccagcttgcagtaatgaaagagactagactccacgagcacttggcattaggaatgatgattgactccattttagtaacctgatgttttgttggtattgatagctctggatttttttttaagcatatttatcgtctaccttagtttattcactaagggcactgaatttaggttagaacagcatcccaggtttgaattgcatgcctactccatatttgctctgtgactttaagccagttacttagcctctttgagtatagttttcctcatttctaacatgagaatac

SEQ ID NO: 136893 - DNA, 548 bp, Homo sapiens
ggaatagttctgttttcttttcttggctcagattctacaacttcatggtggaaattttatccttgaacttctaatgtcattttatgtttatcttaagtttctatttttatactttagtataattttagagtgttgccagtttcatagcatattaattactttctttttagaagattatatttaaaaataaaattagtaattaaagcacaatttgattataatagcattctatttcctgattttgaatttatcatgaaattgataaaaattataacttgcagctgtttacaaacacttgtatatattacactttttcctagttaggacatatttatttctcaagcagacttttaaaaaatgtttttatctttaaaaaaaaraaaactttgaggttcagagttacacgtgcaggtttcttatataggtaaacttctgccacaggagtttgttgtacagattatttagccacctgggtactaagcccagtgcccagtagttatttttttctgatcttctccttccttccagccacctctttgtgtccatgc

SEQ ID NO: 136894 - DNA, 526 bp, Homo sapiens
ccctgtaccctggctgtgtctcatttctcagtcatgaaaagtcaggaggtggccacatggtttgtggtttgtgatggaggaaaggtagctgagttacttgtcctttctgccctccaggctcctctgtcttttggagcatagtcagtttacagcactctgtctctccattctggttccttctccccacagagtcttcagtgactaagcctcacttaatgtaaccagcagcccccattcaagttatttagctattaacagagattacagtcatcaatgaaagtggcagcattttatccctggttgtgtgaaggaggttttcatgtaggtcatgagccttcccaatactagaytgagtcattaggaaggtggcaggcttatttgttcatggttaaaggtgctcttgggtttttcttgatatctgatctttaaacagtgatgtgagctagagctggctcccaaaagccaatggtagcatctctttccaactctgagctcagtgacatcatgttgatggcttaaaaccagc

SEQ ID NO: 136895 - DNA, 426 bp, Homo sapiens
gaattcagcaccttcaactgaaatatccagactctcacattgggactgactaggcaaacaacccgacctgtggggaatgaagaaaagcaggctggggcgacagccacctgggaacagcatgaagccaaaggaagcagtgagtgatcccacccaggaaaccatgcttctcccacagatttttgcaacctgcagatcaggacatcccttcattagcccaagccaccagggtctcgggtctgactcacagargtgtgtggagtccctgcagagcagccactcaggcaaacacagagacccagttttgctggccctgggattcccagcgaggtggaatgtcaatccctacatacccctaggaggcgggctctatccagggagccaagcagtgtcattctgcgggccccacttcaacggcaccttacaagt

SEQ ID NO: 136896 - DNA, 494 bp, Homo sapiens
attaaggttaaatgaggtcaaaagggtggaccactatttcgatagggctggttcctcataagaagaaaacacacaagagtgctccctctctgccatgtgaggacatggtgagaaggaggccctctaaaagctaggaagagatctcttaacaggaaccaaattggcaccttgatcttgtacttccyaacacctttaactgtgagaaaataaattcctattatttaagccactcagcctgtgatactttgttatggcagcctgagctgacaaagaataggacagcttgagcaaaatgaagaagtgaccattttagaggatttcatcaagactatgaacattttgtacttcagtgataattctgatctctaaaatttttgtaaatttagaaatgcaaatttttaaaatttcgaattagctggcacaccaaagcagcagccgggcataatggaaagggcaggtcctacccacggtttgctgtgtgaccttgcgcaagc

SEQ ID NO: 136897 - DNA, 494 bp, Homo sapiens
attaaggttaaatgaggtcaaaagggtggaccactatttcgatagggctggttcctcataagaagaaaacacacaagagtgctccctctctgccatgtgaggacatggtgagaaggaggccctctaaaagctaggaagagatctcttaacaggaaccaaattggcaccttgatcttgtacttcccamcacctttaactgtgagaaaataaattcctattatttaagccactcagcctgtgatactttgttatggcagcctgagctgacaaagaataggacagcttgagcaaaatgaagaagtgaccattttagaggatttcatcaagactatgaacattttgtacttcagtgataattctgatctctaaaatttttgtaaatttagaaatgcaaatttttaaaatttcgaattagctggcacaccaaagcagcagccgggcataatggaaagggcaggtcctacccacggtttgctgtgtgaccttgcgcaagc

SEQ ID NO: 136898 - DNA, 514 bp, Homo sapiens
caactcagaatcagctgtttctttaagagactctggaatcttttagtgcaaatggtgttttaagaccacaatctgaatgtgattttctgtttgtcagttctgtttgccatacttctgtttgccagttcgccagtatactccctgctccagtgactggtatgaagtagctgctgctaaaaaaaaaaaaaaaaaaaaaraaagcacgtattaaatgcattccacagcagaactgtggttacttcatctacagtttctaaatctcagtcagtcatctgtctatctctgcatgtgagtgtgagaccgtgatggccaacaaaacatttccatgggtcaagtgttctgctgtcactatgttaattttgctttacattcattaccatcattgaatcttcataaccactcctgaggtgttcatatttatcctcattttacaaatgaggatactaaggctcagagaagtgaagtgactcacctaaggtcacacagataataagagacagagctgagtggcaaa

SEQ ID NO: 136899 - DNA, 514 bp, Homo sapiens
caactcagaatcagctgtttctttaagagactctggaatcttttagtgcaaatggtgttttaagaccacaatctgaatgtgattttctgtttgtcagttctgtttgccatacttctgtttgccagttcgccagtatactccctgctccagtgactggtatgaagtagctgctgctaaaaaaaaaaaaaaaaaaaaaamaagcacgtattaaatgcattccacagcagaactgtggttacttcatctacagtttctaaatctcagtcagtcatctgtctatctctgcatgtgagtgtgagaccgtgatggccaacaaaacatttccatgggtcaagtgttctgctgtcactatgttaattttgctttacattcattaccatcattgaatcttcataaccactcctgaggtgttcatatttatcctcattttacaaatgaggatactaaggctcagagaagtgaagtgactcacctaaggtcacacagataataagagacagagctgagtggcaaa

SEQ ID NO: 136900 - DNA, 408 bp, Homo sapiens
ttgttcatttttgccccaactcagaatcagctgtttctttaagagactctggaatcttttagtgcaaatggtgttttaagaccacaatctgaatgtgattttctgtttgtcagttctgtttgccatacttctgtttgccagttcgccagtatactccctgctccagtgactggtatgaagtagctgctgctaaaaaaaaaaaaaaaaaaaaaaaaagcmcgtattaaatgcattccacagcagaactgtggttacttcatctacagtttctaaatctcagtcagtcatctgtctatctctgcatgtgagtgtgagaccgtgatggccaacaaaacatttccatgggtcaagtgttctgctgtcactatgttaattttgctttacattcattaccatcattgaatcttc

SEQ ID NO: 136901 - DNA, 501 bp, Homo sapiens
caactcagaatcagctgtttctttaagagactctggaatcttttagtgcaaatggtgttttaagaccacaatctgaatgtgattttctgtttgtcagttctgtttgccatacttctgtttgccagttcgccagtatactccctgctccagtgactggtatgaagtagctgctgctaaaaaaaaaaaaaaaaaaaaaaaaagcaygtattaaatgcattccacagcagaactgtggttacttcatctacagtttctaaatctcagtcagtcatctgtctatctctgcatgtgagtgtgagaccgtgatggccaacaaaacatttccatgggtcaagtgttctgctgtcactatgttaattttgctttacattcattaccatcattgaatcttcataaccactcctgaggtgttcatatttatcctcattttacaaatgaggatactaaggctcagagaagtgaagtgactcacctaaggtcacacagataataagagacaga

SEQ ID NO: 136902 - DNA, 408 bp, Homo sapiens
ttgttcatttttgccccaactcagaatcagctgtttctttaagagactctggaatcttttagtgcaaatggtgttttaagaccacaatctgaatgtgattttctgtttgtcagttctgtttgccatacttctgtttgccagttcgccagtatactccctgctccagtgactggtatgaagtagctgctgctaaaaaaaaaaaaaaaaaaaaaaaaagcacgtwttaaatgcattccacagcagaactgtggttacttcatctacagtttctaaatctcagtcagtcatctgtctatctctgcatgtgagtgtgagaccgtgatggccaacaaaacatttccatgggtcaagtgttctgctgtcactatgttaattttgctttacattcattaccatcattgaatcttc

SEQ ID NO: 136903 - DNA, 629 bp, Homo sapiens
gtgtgttttcatttgcatgatggtgtctattttcccaatttaatcatagcattcatttgcatagggatttaaattttgtgaagtacttctatgctggaatctcttttggtcttaacaatcttacaaaatagcttggccaaggattatgattcttaatttacagttagggaaccaaagctcagccagagaaatagcttaagcaaagcctgtggctagattatgacccagctaagggttgggttcagcccttctcactccatacctagctccatctccactggtttgcacctgaccccattcccccatcacctacccctgtgtggggttcagggcatatgcttaggaaagggaagaggagcagaaggaaccagaggaagaatgtagaagaaatgaaggggaaggagaggcaagtcaaaaacggggacagggagaagagaggttattgataaagaggagagattcaaaaasataggaaagagattgtgagggtagaggaagaagctgagccacctggtatgaagctcaaaaagtcagtgctgtcctattgaatggaagggtatatgggtaatttttcatgctgaattctctttaaggaaaaggtagagtcttcctgccctggtgtaaggagc

SEQ ID NO: 136904 - DNA, 368 bp, Homo sapiens
agatctttaagcaagccttggaaggatatccagtggctcacgaccaagcccttaggactggtggaggaaragaagcctgcacagctcccaagaggaagtggtcatcagaaaggccagagattcaggtgcttaaattattcaggcaggaggtaggcaaagttcaggtgaaaacagtctgttgtggatgctactagtggcatcaccacaccaggacatttgccacctcaaccctggaccctcaatgtcttcagtttcagtataaataacctctgatcatctctgccccacaaagactagaagttctagtctgagagcacgtaattggctgagaactagaagagaggatatctgagccctttcccccaaat

SEQ ID NO: 136905 - DNA, 502 bp, Homo sapiens
gaattcccagtcttcatagaggttactgtcttacatatctgagagcattcaatcctagctttgtaggcattttagaaaatacttctgccagcatccaaggaagaaggttgsggttcaaatctgttaaactcataggtcaagtgttttctaaactgcagaacaccatgaaaatttgatttttatataatcacaatacccccaggcccataaaatctgtgacttcactgaagtgatgctgctgttcacccaatctcaaaaataattcctttcaaatgtgtctttcttgaaccaaaccctggggttaactctcctattgacccatgggtgaaggtgattaaccctcaaatttgtcaactctgtgtaaatacaaacgtaactggcttctaatgctaagtaaataaaagaggatagacgtacacttttcagtgtgtgatactaaggaaagcctaatcaagagaaaagaaagaaatctctggcaccatctcaaagagggacccctgtt

SEQ ID NO: 136906 - DNA, 578 bp, Homo sapiens
aaccagttgtaaaagtgcccaagggaagcagcctttttttgctagaagaatggccaagagtatccctgtcaccttgtagatagtgaccttaagcacgggcaaaggagcgttgggccaagggtgtggaagctgctcattcttcagtattaattcccaaggccttgctcttatacattataaatcctggactattctggaaaaataacacccaatctctaaggtcctttcctgctcgaaaatcctgtgattctgtggcagccacaacatgttttaaagagcgatgccagcagggagaggaaagtcttagggttttgttttgctagagctgcctaagtggctgatgaagtaattatgagcacagcttccattcgttgagcactggccgrggcaccgtgctgagggcgatagacctgtgaggaaattactagtctcattggactgatgaggaggcggagggtcagaggggttgatatatatgagtagtaatggaatggctgagagcttgggggtagcagtcagactgctgggcccagtgctggctatgcctcgtactctttgtagttatgggaattattatt

SEQ ID NO: 136907 - DNA, 447 bp, Homo sapiens
tttcagttatgcttcctttgaaaccaggcaatagatacttattacctttaaagtccctaactaaaaactcattgaaatgtcagaaatgtcctgtaatttcctggatgaggaaatagaaagatattcagagagttgttaaaagctgtaggtgcaagyggcattacaaatcaggttagatccagaaattaccagttctctatattgtcctctagaaagcagccatttccattaatttacaagaaaaattttgttaatataaaaatagaaagtgcaccagatgaaacagatgtatttaacagaagagtggtgtggagagaaaagcactggaaccccagacatggtttttaatcctgaaatcactgtttttatgctccatgatgccaggcaagtccctttcatttgggtcttgttttcctcagcctctatggggagttcagcattctcttc

SEQ ID NO: 136908 - DNA, 543 bp, Homo sapiens
ttgctctgatggatctgggcaaagcaaattgaaaacctttgggaaaggattcaccattctagatgccattaagaacattcatgattaatggaaggaggtcaaaatatcaacattaccaggagtttggaagatgttggttccaaccctcatggatgactttgagagattcaagacttcagtggaggaagtaactgcagatgtggtggaaatagcataagaactagaagtggagcctaaagatgrgactgaatttctgcaatcttattataaaacttgatcagatgaggagttgcttcttatggatgagcaaagaaactggtttcttgaggtggaatctattccaggtgaagacactgtgaaccttgttgaaatgacaacaaaggatatatgatattacataaatttagttgatgaagcaaggacaaagtttcagaagactgactctacttttgaaagaaatttctactgtgggtaaaatgctatcaaacagtgccacaaactaaagagaaatcttttgtgaaagtcaataaatgcagtaaactt

SEQ ID NO: 136909 - DNA, 515 bp, Homo sapiens
atgatcatgttgttctgcaagaccacacttgccggaggaacaamtagagtgttcctggagataactgctggagtccaggatagcttccaagaagctgtctccatctacagtgagtaacagtgaaccaggactgtcatcagacagctaggagcaatctcactgcactcaatgcctcatttgctatgctcatgtgtccatttattcattcactcattcattcaagtatttctacctgctaaggcgctgtggaagatacaggcttcagcaatgtgtggcatggtccataatccatgggagaaacatacatacatacaaatgatagtggagccattgttctctctttccttcttcccccttctccccttccccccttcccaatgccctttccctctggaaaactgaaatatctattgtattggtaggtaattgattctcaattttcttccatgagttctaatgtcttttgctttttggttagtagcaagagtgaagacattcaatgagaaattttagaa

SEQ ID NO: 136910 - DNA, 516 bp, Homo sapiens
gatcatgttgttctgcaagaccacacttgccggaggaacaactagagtgttcctggagataactgctggagtccaggatagcttccaagaagctgtctccawctacagtgagtaacagtgaaccaggactgtcatcagacagctaggagcaatctcactgcactcaatgcctcatttgctatgctcatgtgtccatttattcattcactcattcattcaagtatttctacctgctaaggcgctgtggaagatacaggcttcagcaatgtgtggcatggtccataatccatgggagaaacatacatacatacaaatgatagtggagccattgttctctctttccttcttcccccttctccccttccccccttcccaatgccctttccctctggaaaactgaaatatctattgtattggtaggtaattgattctcaattttcttccatgagttctaatgtcttttgctttttggttagtagcaagagtgaagacattcaatgagaaattttagaattc

SEQ ID NO: 136911 - DNA, 491 bp, Homo sapiens
aggaattccagtactatgttgaataagagtggtaagaatgggcattcttgtcttgttctagttcttagagaagaaattttcagtttttccccattcagtataatattagctgtgagtttgtcatatatggcctttattgtattgaggtacattttctctatacgtaatttttggagggttttttttttaatcatgaagggatgttgaattttataaaatgctttctctgcatctattgagatgattttttatacttcattcttttgacataatatatcacatttatagatttgcatatgctaaactatccttgcatccctggaataaatcccactagatcatgatgaatgatctttttaatgtgctgttggactcagtttactagtattgtgttgaggatttttgcatctatgttctttagggacattgtcctatagtttwcttatattgttgttgtgttcttgtctggttttggtatcaggatgagctgg

SEQ ID NO: 136912 - DNA, 578 bp, Homo sapiens
actaaaaaagtgttaggaaaggagacctgcagagaggaggagtatgagaagtgaagcttaatgtagccttgggacctgcatgcatgctagaatttgaactattacttaaagatacatattggactttttttttctcttttttttgagacaatttccctctgtcacccaggctggagtgcagtgacacaatcttggctcactgcaacctctgcctcmcaggctcaagtgattctcatgcctcagcctcccaagtagctgggattacatgcgtctgccaccactcccggctaattttttttttttttttttgtatttttagtagagacggggttttaccctgttagccaggttggtctcgaactcctgacctcaagtgatccgcctgcctcggcctcccaaggccgggcgcatgagccaccgcgcctagcccatattgggcatttaataaaaatttgttgaacagatgaatggggaaccattagaagattttaaggagcagcagcatagtagacctattgcagcaggccaggtaataaacagtgagggcctagactaaggctgtggcagtgagaccaggg

SEQ ID NO: 136913 - DNA, 520 bp, Homo sapiens
tgtgcaaatatgatgggcctggacaggtgagcaaatgatgcagggaactgatgtatctagaagtttgacaagccactatgtgtcacaggtatcatttgtcttctatgccrtcccaattctccctttcaatgttccgcttggtcttcccctccagacagtcctccatgtgctcagagcctgaaatcagtgcctgctcacccagtctatcctttaaactcacactttcccagctccccatccaaacttaattgtcttacgttctctcctgtcacagtcctatatggtgtttggcaaaatatacacataattcaaaattagattaacaaattaactgttgaacatatgattgacttttaccagcaatcctccattctgcaatggctttctaatttaaaaggtgctcttagaaccaaaaataccctgttccaaacgaatgaaacagataaaatgtcaggcagcactgatagattatagggagcagtgggaatattctggggagagacactgtccctctaaatga

SEQ ID NO: 136914 - DNA, 578 bp, Homo sapiens
aaacaagctggtgtatgcatgttttaccaccctctgagaaagtctaaatagaataccttaagcgaactctttccttgtgtttgagaagataaaatctaaaaatgaaatgagaatatcagaataatataagctgcttccaaatttgtgtttagaatgtcagataacctaacattgtgatgttaggggtacatgtatcacccacaaaccttcccacacctcaaattgactgtcttcagccaaaaaaaggcctaagtaaaaaagctagctaagttatattgataaaatatgaagtcatcagtcctcaggtaatttagttcatctgggataaaaatttatttcatttatgccttctcaatatggcaagtagcttatgcagaatcttcaaaatcagactgcatttgtcacagaagaccacctgatygagaagggtgggttgaaacaagaactctaccactccccctggggtgaccttaggcaagactaaacttttctaaaccacagttccctcacctgtcaagtaggtctagagaccaggaatctctgcctgtggagagctaatgagttcatgtatataatat

SEQ ID NO: 136915 - DNA, 578 bp, Homo sapiens
aaacaagctggtgtatgcatgttttaccaccctctgagaaagtctaaatagaataccttaagcgaactctttccttgtgtttgagaagataaaatctaaaaatgaaatgagaatatcagaataatataagctgcttccaaatttgtgtttagaatgtcagataacctaacattgtgatgttaggggtacatgtatcacccacaaaccttcccacacctcaaattgactgtcttcagccaaaaaaaggcctaagtaaaaaagctagctaagttatattgataaaatatgaagtcatcagtcctcaggtaatttagttcatctgggataaaaatttatttcatttatgccttctcaatatggcaagtagcttatgcagaatcttcaaaatcagactgcatttgtcacagaagaccacctgattgagaagggtgggttgaaacawgaactctaccactccccctggggtgaccttaggcaagactaaacttttctaaaccacagttccctcacctgtcaagtaggtctagagaccaggaatctctgcctgtggagagctaatgagttcatgtatataatat

SEQ ID NO: 136916 - DNA, 491 bp, Homo sapiens
ctgaaaatgtttgggaacactgcaaatgcaaatgacaacacagatgctcttataattcacagtgatagtagcaggtgggattccagcccacttggggcgacaggccagctagagagcacgtgtgggatcactctttccctgcatattcctggttggtttcagcagcccaagatcctctgtggagaggacggtgctcaccttggtcacagtggatgccgtacttgccctcggtgcaggtctcgcaggctgtgccgctgaagccctccccacactcacacacacctgtgccattcactccatccaaacagatgccattaccaaagcagacattctgggcattccctggrcagggctggcattgggggccaaagaagccggcacagcattctctcgtctgaaacagaaggacaaagcttgacaacgcacttctatcctctggtgttgtccagcctcggtgtagaaatcctgctgtgggtgacttcttgtgcacc

SEQ ID NO: 136917 - DNA, 459 bp, Homo sapiens
ctgagtccttcaggatgctgtcaagcagggaatgtgagagggaggagaagaggaaattgtgttggctggtgtcacagtgattgctgtgtgccagacattgttctaaatgctttatgcagcagccccacgaggtgggtatattatcaccataaccaatgtatgattagggcactaaggcaaggaaacgtaaaccaccttgtacaaggtcacacagctgatgtggcagaaccatgatttgttctacatgtttaatcaccattctatgattgtctcagcccagggaaagagaaggaagagggaaaagaargggaaattagacacatgggtaggagccaaaagaagccctcaaatcacccatcccgggaatcctgtgacccacacctggttaattatcctgagattcccaaaaggactgtagtgctccttcctcagtgacctcagaattccttcatatagcta

SEQ ID NO: 136918 - DNA, 537 bp, Homo sapiens
tgtaaaggagagataaaaagtgttttgccctctagccaagatgtttcaggtgccaggaattctgcccaatgagtagacaaaaggaatgctcagctgaatctaacaccaagctatttgtagaataaagctggatttcattaaaaatgcctactcagcaagaaatccacagggtgcagcagaaacacctctctctcccactgggagagcatttttttaactactagaaatcataaacgggtattttgaaagcttgttttgttagttctgcttgctccaccttggccagaatcaattttatcaaggtcccccattagtcatggcggggtccatggaggcatttccaaatggttctcactgatttatcctactgaaagtttttagggacttactrttgttatctcttttctaaaattgtcacttcccaaagcaccactttctgttggaaaaattctaggagttgttggatctgttgaaactatgatgcaaattttcaattatctagatagctattcaagaaagatctatacctagctgccg

SEQ ID NO: 136919 - DNA, 504 bp, Homo sapiens
  misc_feature (1)...(504): n = A,T,C or G
gtctaatcctagaataagccatgcctgcagagatccctttaaatagacaatagtgtttaacctccatagaattgttattccagaactatatctcagctggcactagaaactcttctaaggaactcatcattttatctcctacaaggatattgtgggaaatgttccttgctgcattatactgcctttgccacaggcatttctacatctgcaatatctccaataaatatgctaagcctgagcaatgggtttgctttaaatccacacatactgtgcattttgtaactcatgatctctcccttcctgcattgactgctaggatactcagtgataagttttaggtatacttctagcatgtgcctargccttaatatttatttcatctactacttcacttctgatatcactttagatatttccnccgtatgttcattgttctctgattttttcatccagttcttacaattaaaaataatcataattaagttttatgctacctagaaagcc

SEQ ID NO: 136920 - DNA, 534 bp, Homo sapiens
aattcggaacatgttgtgtaggggctgctgtgaaaaaagtctacagagtgaattaaggcaaagttggcyaggagtcaagcttagaaatctccagtttggtacccccgctccccgccggagtgtccaatttggtttcatggccaaatctcgatgtccagttgtgatagcatcagtagctctgcctgctgctggcaaccttgattatccttaatggggtgcagtgcacaataggcaaatggtggtgggaagcaggttgtagagaatgttcagagtaaattgctggcatggcctgccatttgctactgagacccagatgttttgacgcctcccttatgtgagcagtgggcctgttataaggaacagggctgtccagaaagtcctcttctcaataatagaaataacacgtagttacactaccatttattacattcttaccatgaaccaggtcctgtgatatagactttatatgctttgtctcagtcctacagtaagtgtgaggtaaggggttattactgtcagcattttacagatgca

SEQ ID NO: 136921 - DNA, 532 bp, Homo sapiens
ctgtgaaaaaagtctacagagtgaattaaggcaaagttggctaggagtcaagcttagaaatctccagtttggtacccccgctccccgccggagtgtccaatttggtttcatggccaaatctcgatgtccagttgtgatagcatcagtagctctgcctgctgctggcaaccttgaktatccttaatggggtgcagtgcacaataggcaaatggtggtgggaagcaggttgtagagaatgttcagagtaaattgctggcatggcctgccatttgctactgagacccagatgttttgacgcctcccttatgtgagcagtgggcctgttataaggaacagggctgtccagaaagtcctcttctcaataatagaaataacacgtagttacactaccatttattacattcttaccatgaaccaggtcctgtgatatagactttatatgctttgtctcagtcctacagtaagtgtgaggtaaggggttattactgtcagcattttacagatgcatactgggtatgagtggtcagaattc

SEQ ID NO: 136922 - DNA, 510 bp, Homo sapiens
aatgagggtatgacagatagacaggagggtaagacaggttggttagaaactttgcttctgaggctgcttctgaggccttcactttggggtatcattttctgagccccaacagcaggaaagaataaataataggaaattagaaaacagtattgacatagatatttcctgaattctaaagtgattcattgtttaaaaaataacattttattggaattaattgcagaatatctttcagtctgttggtaatgcgattaagttgcagaatatctttcaatctgttggtaatgtgattggaatgatgagttaggagtcaactaaccatttcaaacaaattaactttttgttgaaattktttaaaaagactgggtgtattgataaactgatgtgggatatgataagatttctcttcaaataatctgatcaatcttttattctttaattcatagtacccccccccaatttttctcctttttcgccttttttcctctttgcctttgttaaatgcccagg

SEQ ID NO: 136923 - DNA, 531 bp, Homo sapiens
agcagacagctgagaggagagcaatccaggaagaggaatccccagggggatgtgtcaggagtatttgagatcagttgtgtctggagcactggaggctggtggacataagggcaaagagtgtagccagggtgrgggcagatcacataggccttaaaggattaccgtaaggagttgggcttgttaagtaaaaactatggaaggccattgttttggactaacctcctgcactaggtcccagctgaccagaccaaaccaaaatggaatctgtcgtattaaagttccatgtcctcaaaccaaaactaagttgttatctgacctttgagactcctggagacagagttaacagccaaattcccaaacatgacagtttcagttggcgtaataatgcagacagtaaccatgctcatgataatgaagttccccgttttaatcattattaaaaagtaacctgaagaaaactgatgtcaaccaccctgttccggccgcatatagaaagtaactttgaaatgatgaatctggccctgtgcagtg

SEQ ID NO: 136924 - DNA, 531 bp, Homo sapiens
agcagacagctgagaggagagcaatccaggaagaggaatccccagggggatgtgtcaggagtatttgagatcagttgtgtctggagcactggaggctggtggacataagggcaaagagtgtagccagggtgagggcagatcacataggccttaaaggattaccgtaaggagttgggcttgttaagtaaaaactatggaaggccattgttttggactaacctcctgcactaggtcccagctgaccagaccaaaccaaaatggaatctgtcgtattaaagttccatgtcctcaaaccaaaactaagttgttatctgacctttgagactcctggagacagagttaacagccaaattcccaaacatgacagtttcagttggcgtaataatgcagacagtaaccatgctcakgataatgaagttccccgttttaatcattattaaaaagtaacctgaagaaaactgatgtcaaccaccctgttccggccgcatatagaaagtaactttgaaatgatgaatctggccctgtgcagtg

SEQ ID NO: 136925 - DNA, 517 bp, Homo sapiens
ctagtcttgaactcctgggctcaagcgatctgcccgccttggcctcccaaagtgctgggattacaggcatgagctactgtgcttgggttaatttataaatttttttgtagagatgagggctcactaagttgcccagccttaaattttctaatagtcaacattaaagccctaaagagaaacaagtgaaattaatttgaatgatgtatttatttaacccaaaatataaacaaattatctcaagatgtaatcaacataacaatgagatattttgtttatttttattttttattttttaaagtattttttatttcaataggttttgggggaacagatagtgtttgattacatgcataagttctttagtggygatttctgagattttggtgcacccatcacccaagcagtgtacactatacaattattaattattaatgagatattttacattccgttatttgtactgtctttgaaatctgacatgtgctttatgcttgtacttctcagttcagactagtca

SEQ ID NO: 136926 - DNA, 587 bp, Homo sapiens
atttcactatttctgaatatttgatgttgttaatattattgtaatgaactttttacattttattttcaaatttttattgctagtatatagaaatacaatagattttatatattgactttgtatccagtgaccttgataacttcatttattttttctattagcttataggtaattttgcatttttatgtagaaaataatatttatatgaataatgatatatttatttttccttactgacttctatatcttttatttcttgttcttacttttacattgactaagctcttcagtaaaaccttgagtagaagtgatactggattcttgtcttagccccaaactcaagagaaagagttcagtattttaccaataagtgtaatgctagctgtaggttctttayagaaactctatagcagattaagctggtgccctcttgtttttagtctgatgagaattttttcttttttattgtgaatgagttttgaattttatcaaaatctattaaaagggtatttttctcttttattctattaatatggtgaattacattgatgatacttttattcttggaataaactctgcttgttaat

SEQ ID NO: 136927 - DNA, 585 bp, Homo sapiens
tttacacaatagaatcggccatgcagcagtgagaatgtatacctaccaccacaagcatcgacacaggcaaaagtccaaaaaatattgcacaargaaagcaagccacagaagaaaacgtgtggtcataaattcaaaacaaggcaacgtcttgtcttgtgacatagacattcacagtcaaacaataaagaaaagtaagaaaatggccagaggcagtggtaatgcctgtaatcccaacactttgggaggccaaggcaggcagatcacttgaggtcaggagttcgagaccagaggcagtctggccaacatggtgaaagtccatctctacaaaaaatacaaaaattagctgggcgtggtggcaggtgcctataatcccagatacttgggaggctgaggcaggaggatcgtttgaacccaggaggtagaggttgcagtgagccgagattgcgccactgcactccagcctgggcaacagagcgagactctgtctcaaaaaaaaaaaaaaaaaattaagaaaagtaagaaaatgagccaggcacggtggctcgcgcctgtaatcccagcactttgggaggccaaggtgggtgg

SEQ ID NO: 136928 - DNA, 585 bp, Homo sapiens
tttacacaatagaatcggccatgcagcagtgagaatgtatacctaccaccacaagcatcgacacaggcaaaagtccaaaaaatattgcacaaagaaagcaagccacagaagaaaacgtgtggtcataaattcaaaacaaggcaacgtcttgtcttgtgacatagacattcacagtcaaacaataaagaaaagtaagaaaatggccagaggcagtggtaatgcctgtaatcccaacactttgggaggccaaggcaggcagatcacttgaggtcaggagttcgagaccagaggcagtctggccaacatggtgaaagtccatctctacaaaaaatacaaaaattagctgggcgtggtggcaggtgcctataatcccagatacttgggaggctgaggcaggaggatygtttgaacccaggaggtagaggttgcagtgagccgagattgcgccactgcactccagcctgggcaacagagcgagactctgtctcaaaaaaaaaaaaaaaaaattaagaaaagtaagaaaatgagccaggcacggtggctcgcgcctgtaatcccagcactttgggaggccaaggtgggtgg

SEQ ID NO: 136929 - DNA, 522 bp, Homo sapiens
cctgcctgccctgccggtgggtgcagacatgtggaaaccagatggaaagggggcccatgggcccaatcagactcttggaggtgatgagaatgccccgaagccagaaacagctggctagaagagacgggtgtagcttgggaattctrgtgtgggtaaaacagaaacccccctgggcaccaacccttccacggcattcagagtccctttcacccacacctctattgttcctccttttctccatgtagccattgcagtaccaccattccacactgaggctcagagaagcaagtcagcctgctcaggatcatgaagctggaaagtgatgaaatcaaccaccttaaaacaactccccacaggtgggggcaaggctgacccctttaagcaaacctcctttgtgtagaagcagcagctggagaaacagctgccagatggaacactggccttcactttccagctgggagccatccagctctatgcagctttactggaggagttccttggaggaaaagctcctccatggga

SEQ ID NO: 136930 - DNA, 522 bp, Homo sapiens
cctgcctgccctgccggtgggtgcagacatgtggaaaccagatggaaagggggcccatgggcccaatcagactcttggaggtgatgagaatgccccgaagccagaaacagctggctagaagagacgggtgtagcttgggaattctggtgtgggtaaaacagaaacccccctgggcaccaacccttccacggcattcagagtccctttcacccacacctctattgttcctccttttctccatgtagccattgcrgtaccaccattccacactgaggctcagagaagcaagtcagcctgctcaggatcatgaagctggaaagtgatgaaatcaaccaccttaaaacaactccccacaggtgggggcaaggctgacccctttaagcaaacctcctttgtgtagaagcagcagctggagaaacagctgccagatggaacactggccttcactttccagctgggagccatccagctctatgcagctttactggaggagttccttggaggaaaagctcctccatggga

SEQ ID NO: 136931 - DNA, 376 bp, Homo sapiens
tgctctcttatttctttgcatgtgcagggggtagagagaatgctgttggtgccaatgttgggcaatatctgctcacaagaggaaccacatgtcagtaggtacactactgcctctcagcccacactgactggttgttggggacctttgtgtgactgattacaaatgacagctcctttcagcagctggttcttcaggaaagagactcaatgattgcctctagctgcatgtcccttaccctcaccattgcaccagtacacatttcagtccataatatcttgttgctgggatccctgagttccaggaagcaacttgctcatgagtagggtgtgaaccccaggcagctccygtgatactggcattcacacagccccctagg

SEQ ID NO: 136932 - DNA, 630 bp, Homo sapiens
agttggcccctcccatcaaacaaagaaagcacatcttgagattgaattttccaatcttgaggaaagtgggggctcagagccagggttcatttgacttamaaaaatacagaaatgtgatatttcttggaaccagaacagaggaaacacatatgaaaatattgacgatttattacatacatttaagtcttctttgttcagctcagggctggggtggctgggagtatgagcttcagatccaggaagattggtttggatccagcctctgccacttgctctctagaataatactcaaaacatttcactcctccaagcttcagtgtccttataaaaaaaatggggaaaacaatactggccccatgacattgtgtgaagattgaataatacgtaataagctatattagaattgcttgtcaaggtgtgtggcacatggtatgtgctcagtcaatagcctctgtgtgtagtaacggctctggtggtaattttgctagctgagggtaatggtaataattgtgacaacaacaagtattttatccccattttatagatgaagacataggctcagggaaaaaaatccccaagagtcaccagttagcttgcctacctcaagacacatcctaagacctggcccat

SEQ ID NO: 136933 - DNA, 630 bp, Homo sapiens
agttggcccctcccatcaaacaaagaaagcacatcttgagattgaattttccaatcttgaggaaagtgggggctcagagccagggttcatttgacttacaaaaatacagaaatgtgatatttcttggaaccagaacagaggaaacacatatgaaaatattgacgatttattacatacatttaagtcttctttgttcagctcagggctggggtggctgggagtatgagcttcagatccaggaagattggtttggatccagcctctgccacttgctctctagaataatactcaaaacatttcactcctccaagcttcagtgtccttataaaaaaaatggggaaaacaatactggccccatgacattgtgtgaagattgaataataygtaataagctatattagaattgcttgtcaaggtgtgtggcacatggtatgtgctcagtcaatagcctctgtgtgtagtaacggctctggtggtaattttgctagctgagggtaatggtaataattgtgacaacaacaagtattttatccccattttatagatgaagacataggctcagggaaaaaaatccccaagagtcaccagttagcttgcctacctcaagacacatcctaagacctggcccat

SEQ ID NO: 136934 - DNA, 630 bp, Homo sapiens
agttggcccctcccatcaaacaaagaaagcacatcttgagattgaattttccaatcttgaggaaagtgggggctcagagccagggttcatttgacttacaaaaatacagaaatgtgatatttcttggaaccagaacagaggaaacacatatgaaaatattgacgatttattacatacatttaagtcttctttgttcagctcagggctggggtggctgggagtatgagcttcagatccaggaagattggtttggatccagcctctgccacttgctctctagaataatactcaaaacatttcactcctccaagcttcagtgtccttataaaaaaaatggggaaaacaatactggccccatgacattgtgtgaagattgaataatacgtaataagctatattagaattgcttgtcaaggtgtgtggcacatggtatgtgctcagtcaatagcctctgtgtgtagtaacggctctggtggtaattttgctagctgagggtaatggtaataattgtgayaacaacaagtattttatccccattttatagatgaagacataggctcagggaaaaaaatccccaagagtcaccagttagcttgcctacctcaagacacatcctaagacctggcccat

SEQ ID NO: 136935 - DNA, 573 bp, Homo sapiens
ttttcccaagaaaggaactcagataagataaacgtaactttttcaagtttttaagactaggaggatcagtttctatgcttattcaaagaaactataaacatcaactctatgagacaactggataggttttcagggttcaacttaggtaaatcaattaatgtgatacattttacatcaacagaatgaaggagaaaactaygtaatcatctcaacagatgcagaaaaagcatttgaaaaaatttaacatcctttatcataaaaatgctcaacaaatcaggtgtagaaggaatgtatttcaaaacagttaaggccatatatgacaaatgcacagctaccatcatactgaatggggaaaattttaaagcttttcctctaagatcttgtacaagacaaggatgcccactttcactactcttattcaagatagtattagaaattcaagccagggcaaccagtcaagagaaagaaataaagagtatccaaattggaaaggaggaaataaaattatccctgtttgcagacaacacaatcttgtatatagaaaattctaagtactccaccaaaaaacactta

SEQ ID NO: 136936 - DNA, 573 bp, Homo sapiens
ttttcccaagaaaggaactcagataagataaacgtaactttttcaagtttttaagactaggaggatcagtttctatgcttattcaaagaaactataaacatcaactctatgagacaactggataggttttcagggttcaacttaggtaaatcaattaatgtgatacattttacatcaacagaatgaaggagaaaactacgtaatcatctcaacagatgcagaaaaagcatttgaaaaaatttaacatcctttatcataaaaatgctcaacaaatcaggtgtagaaggaatgtatttcaaaacagttaaggccrtatatgacaaatgcacagctaccatcatactgaatggggaaaattttaaagcttttcctctaagatcttgtacaagacaaggatgcccactttcactactcttattcaagatagtattagaaattcaagccagggcaaccagtcaagagaaagaaataaagagtatccaaattggaaaggaggaaataaaattatccctgtttgcagacaacacaatcttgtatatagaaaattctaagtactccaccaaaaaacactta

SEQ ID NO: 136937 - DNA, 434 bp, Homo sapiens
aacagttaaggccatatatgacaaatgcacagctaccatcatactgaatggggaaaattttaaagcttttcctctaagatcttgtacaagacaaggatgcccactttcactactcttattcaagatagtattaraaattcaagccagggcaaccagtcaagagaaagaaataaagagtatccaaattggaaaggaggaaataaaattatccctgtttgcagacaacacaatcttgtatatagaaaattctaagtactccaccaaaaaacacttaaatctagtaaatgaattcagtaaagttgcaaaatacaaaatcaacatgcaaaaatcagtagcatttctataaatcaataatgggctagctgagaaagaaataaaaaaatcagtccgatttacaatggctacaaaaagtgaaatatctaggagtaagttga

SEQ ID NO: 136938 - DNA, 654 bp, Homo sapiens
gcctatgatgattattctatgcctgtctcatcattttatgatggatgtgtgaaagataggtaagttgtttctttagtttcaaaggacttcaaatcaagacaaactgtactcaaggagttgtatttgcagcgagacctgatttaaacgacaagattctagacttcaaactaatgctgtgatgagatgaagctttggtagacttaggatacaattagtgaggtgtgtgcattacttggagccagagagcagtctacagtaactggcctctaagaaggaccccaatgaacattacctcctggtattcatgcactggtgtagtttccccyctcagtgtaccacggttcatctatatgaccagtagaatatgccagtagtgatggtatgtcatttctaagatgacactttttcgcactcaagggttagccttctgggaaacatagggtttgggatttgaaaatttagaaactgaagcaacttttattctggtagttacaagctctcattactgcttctctctatatatttctaataataattaatttaattaaatatcttcttattctcaccatacaattttttcatattttactattggtaatgattttaactactacagaagtggtctatatctatctgcctatttatctacatctc

SEQ ID NO: 136939 - DNA, 635 bp, Homo sapiens
ctttgtatcagttgatcggactacttccatttgtgttttgtttattgcaggactggggtggagagactaaatacccctagcactgagtcacctccttcctcttttctcatttagaatgtttgtcaaatgtcttctttgggcacctcacagggccaggcacaaggggaaggggtatttgcagctgacttcaatccaaagctgaatgtggatgttggcacctgctgctccctctctccagacatctccctgtatctttgcttatttggtttcatatttattgaccatcaaccaccccccatccctgtagaacgagaagctcatgagaacaggggtcttgttctctagcttttgtttctccaccgagaagagtgcctggaaacagagtcaatgctcaataaacatttatggaacaaatgaatcctccagcagcgtgtcctcaaatcagccctcttctctctgacgggagctaccatctgtgccccctttaccagtgatctcacttttctagggcaggagctgtactcagttcacatctctgttcccagggtgcartccagggctgggcacagaggaggattgggtacaaggatgaagagagaggcagagacctcgagcagacaccagaccatctgtgc

SEQ ID NO: 136940 - DNA, 609 bp, Homo sapiens
agacataaacttagcaaatatggccgtggtagtttgggttgtttcctctttgttgtaaaattacatctcaggccctttgccataggacttcacaaaggctcccactagagtgtgaggagtaaacactccagtccctttkctgtttggtgtggccatgtgaccatgagctaagatgaagggagccacagctttacgtgtgcttacaggtttgatatggcttttgtgtttctttcccactcatgggaagtatatttccctggaaagtgatatggaacagacatgaattcacctgaaagtctggagtccaggtgactgctgctgagtccaggctcgctcagctgaaatcagccaaagctcaacaaactggaagatacagagcagaaaataaaacatttattgttgtaagccctgagagggagatttactattgtgttagctgactgatacaatatcaatgattaatagaaaaggtataagaaattaacaaatcaggaaagaaaagagattattatactaaaatagatagtactaacattataaaattataccatctacagtagattttatagcaatacattagaaaactagttaaaatacataatattataa

SEQ ID NO: 136941 - DNA, 582 bp, Homo sapiens
aagctttagatttagtgggggacccagtcaaaccatatcaccttcttcaagtctttcactcaaatgctactgtctccgtcatgccttccttatttccctacttaaaattatatctcctcctcgtgttctttatttgctttgtctgctttactttcctccatagcacttagcaacacttaacatattatgtagtttaattatttatgttgttacacatctccttccaagagaatgtaagctccaaaaaggcatatttttctttattttctttttttcactgctatatccgcagtgtctacaatacaatgtggtacaaggtaggagcttaatgtgaatgaatgaatgttagtcgtattaccttttaaatttaccttattttytaattttctacattttccacattccttcatcctttccaccttcctacatcctgtgggatgtgcatacagaaagcagcaacattaaggtaaaaagttcaacctttggattaatatttaaatcttgagacagttttgcttttctgttgcctttagcaaaaccacattcctgctgctgtcagttatgatgcactgagaaaacttc

SEQ ID NO: 136942 - DNA, 582 bp, Homo sapiens
aagctttagatttagtgggggacccagtcaaaccatatcaccttcttcaagtctttcactcaaatgctactgtctccgtcatgccttccttatttccctacttaaaattatatctcctcctcgtgttctttatttgctttgtctgctttactttcctccatagcacttagcaacacttaacatattatgtagtttaattatttatgttgttacacatctccttccaagagaatgtaagctccaaaaaggcatatttttctttattttctttttttcactgctatatccgcagtgtctacaatacaatgtggtacaaggtaggagcttaatgtgaatgaatgaatgttagtcgtattaccttttaaatttaccttattttttaattttctacattttccacattccttcatcctttccaccttcctacatcctgtgggatgtgcatacagaaagcagcaacattaaggtaaaaagttyaacctttggattaatatttaaatcttgagacagttttgcttttctgttgcctttagcaaaaccacattcctgctgctgtcagttatgatgcactgagaaaacttc

SEQ ID NO: 136943 - DNA, 582 bp, Homo sapiens
aagctttagatttagtgggggacccagtcaaaccatatcaccttcttcaagtctttcactcaaatgctactgtctccgtcatgccttccttatttccctacttaaaattatatctcctcctcgtgttctttatttgctttgtctgctttactttcctccatagcacttagcaacacttaacatattatgtagtttaattatttatgttgttacacatctccttccaagagaatgtaagctccaaaaaggcatatttttctttattttctttttttcactgctatatccgcagtgtctacaatacaatgtggtacaaggtaggagcttaatgtgaatgaatgaatgttagtcgtattaccttttaaatttaccttattttttaattttctacattttccacattccttcatcctttccaccttcctacatcctgtgggatgtgcatacagaaagcagcaacattaaggtaaaaagttcaacctttggattaatatttaaatcttgagacwgttttgcttttctgttgcctttagcaaaaccacattcctgctgctgtcagttatgatgcactgagaaaacttc

SEQ ID NO: 136944 - DNA, 582 bp, Homo sapiens
aagctttagatttagtgggggacccagtcaaaccatatcaccttcttcaagtctttcactcaaatgctactgtctccgtcatgccttccttatttccctacttaaaattatatctcctcctcgtgttctttatttgctttgtctgctttactttcctccatagcacttagcaacacttaacatattatgtagtttaattatttatgttgttacacatctccttccaagagaatgtaagctccaaaaaggcatatttttctttattttctttttttcactgctatatccgcagtgtctacaatacaatgtggtacaaggtaggagcttaatgtgaatgaatgaatgttagtcgtattaccttttaaatttaccttattttttaattttctacattttccacattccttcatcctttccaccttcctacatcctgtgggatgtgcatacagaaagcagcaacattaaggtaaaaagttcaacctttggattaatatttaaatcttgagacagttttgyttttctgttgcctttagcaaaaccacattcctgctgctgtcagttatgatgcactgagaaaacttc

SEQ ID NO: 136945 - DNA, 359 bp, Homo sapiens
ttcaaaaagctgtgggacaggagggaatggggatggtattcaatggtaccacatccaagcaagtcttgtatggttaaaacaaatcaatataataacatgaaattttacacagaaacctatctgattataaactgtatgcttaccataatcaacactgatgtacattgttttaaaaatacttaatagtgttctttgtttaaccaaataatagaggtattaactagtttcctagtgctgccaaaagaaattgctacaaaatttgtggcttaaaatagtaaaaaaaraaaaaaaattctcaattatagaggccagaagaccaaaatcaaggtggaggcagagccatacatcctctgacggct

SEQ ID NO: 136946 - DNA, 182 bp, Homo sapiens
ggatggccatggcaccctgagtctgtgtttagggaggacggccycttagaggtggaacaagatggctgggggaatacaccgtgtaggagaaaggacagagtggatggattgatcctttctagaaggagacaggtcacgtcattgtgtgtttgtagggagtggtgggatcatgttgtgctggt

SEQ ID NO: 136947 - DNA, 182 bp, Homo sapiens
ggatggccatggcaccctgagtctgtgtttagggaggacggcctcttagaggtggaacaagatggctgggggratacaccgtgtaggagaaaggacagagtggatggattgatcctttctagaaggagacaggtcacgtcattgtgtgtttgtagggagtggtgggatcatgttgtgctggt

SEQ ID NO: 136948 - DNA, 453 bp, Homo sapiens
attccccatctggtccagttccttcacttacagatggcagcagtgaggccttggggtagaaggatcctccaaagtcacacagagtgcctgcctcctggtcccctcagctctgcctctgcagcccactgcctgcccagtgccatcaggatgagcagtaccggccaagcataatgacagagagaggcagatttcagggaagccctgactgtgtggagctaaggacacagtggagattctctggcactctgaggtctctgtggcaggcctggtcaggctctccakgtggtcagagggcccagtggtgccccagcacggtggtgcccaagccaaccctgtgactgacatgtacgattcactcctttgagtctttggatgccaactcagccccctgacctggaggcagccggccaaggcctctagggaagagccccccactgcagacatgacccgagt

SEQ ID NO: 136949 - DNA, 453 bp, Homo sapiens
attccccatctggtccagttccttcacttacagatggcagcagtgaggccttggggtagaaggatcctccaaagtcacacagagtgcctgcctcctggtcccctcagctctgcctctgcagcccactgcctgcccagtgccatcaggatgagcagtaccggccaagcataatgacagagagaggcagatttcagggaagccctgactgtgtggagctaaggacacagtggagattctctggcactctgaggtctctgtggcaggcctggtcaggctctccaggtggtcakagggcccagtggtgccccagcacggtggtgcccaagccaaccctgtgactgacatgtacgattcactcctttgagtctttggatgccaactcagccccctgacctggaggcagccggccaaggcctctagggaagagccccccactgcagacatgacccgagt

SEQ ID NO: 136950 - DNA, 569 bp, Homo sapiens
gctccttgtgcccctcatgttggagtggtcataggcatttttaggatctggcttggcatgagacagctttatgtagtttacagtcacttctgtgtgtggttgcattactgctagtcttccagcgtaggaatggcttccaggaatattgttctgattcagccagcagggtcggagatgatatctaaataataaacatttccccaacacctgytttcagaaatatgtcagcagtggaggagaaacaagtatggagccagaaactagtctatggaaaactctctcccccatcatatgtatagagttttaagcatgtgagcctgttcacatccatgcctatttaaaatggaagttctctcctgtagagaacatactcaatagtgcaatatagacacttataacacacacatataaatatgtcttttttgagcaatttcagtaaatgtattttgttagagctcctgtgtagtaaggcagaactagaggagtattgcaaatagaagtatgcttttgtgtgaaatgagatgtcttatgcatctcactgtatctgattgcatcttagcttgtctgat

SEQ ID NO: 136951 - DNA, 522 bp, Homo sapiens
cccatcagcagctagggtcttagagccaaaccagtgaacaaccatgagtccacacaaagagggctaatcactcgggttggcacagtcagtgaggtggcatcagagcctggggtataggcaagatgccgtagtggctcgatctgccatgggcagatccagatgttgagtgtcagggaaccctctccctagaggagggttggcgatgaacatggatcctccaaaccaccctaatgcaggtgcctgtaggccatcactgcccctgagggttagggytggggttagggttaggtacgttagcgtgatgacatggcacacctggtcctatacctacacccttctcctcaccagctctgtatcctttattaacacacatggatggcattgttgggagcagcaggaactgcatgtgaatcaaatgccatgtgctttccattgtttcacccatcacagtccccaggggtaggtatattcacaccccaaaattcacttctattatgtgagccagggaagcagtataataga

SEQ ID NO: 136952 - DNA, 516 bp, Homo sapiens
acagatggataaactgcctcgtctgatcttgtggcccccacccgggaactgacgaagcgcaagaagacagcttcgactccctgtgakttcatccctgaccaaccagcactcctggctcactggcttccccctaccaagttatgcttaaaaattctgctccccgaattctcgaggagactgatttgagtgataataaaactccagtctcccgcacagccggctctgcgtgaattactcttcttctattgcaattcccctgtcttgatcaatcggctctgtcgaggcagcaggcaaggtgaaccccttgggtggttacaattttgctccttcaacaaaactccaagttcctctttgatagtggcaaacaccagttgccgtattttctactgttactggcacaaaaagtccctgttcacagccctgctggacgtaagggcccaggtgctaaaaagttaccccccacctcaccccagcctcatcagcgggactggatactggcagtgggcagaggaatga

SEQ ID NO: 136953 - DNA, 516 bp, Homo sapiens
acagatggataaactgcctcgtctgatcttgtggcccccacccgggaactgacgaagcgcaagaagacagcttcgactccctgtgatttcatccctgaccaaccagcactcctggctcactggcttccccctaccaagttatgcttaaaaattctgctccccgaattctcgaggagactgatttgagtgataataaaactccagtctcccgcacagccggctctgcgtgaattactcttcttctattgcaattcccctgtcttgatcaatcggctctgtcgaggcagcaggcaaggtgaaccccttgggtggttacaattttgctccttcaacaaaactccaagttcctctttgatagtggcaaacaccagttgccgtattttctactgttactggcacaaaaagtccctgttcacagccctgctggacgtaagggcccaggtgctaaaaagttaccccccacctcaccccagcctcatcagcgggrctggatactggcagtgggcagaggaatga

SEQ ID NO: 136954 - DNA, 292 bp, Homo sapiens
cagaaccatgccctgtgcctgagtgggctggcactctctgcgtcacaataatgctatgaggaacatgctatgatatatccccatcatcacagctgtgactgaccctcactcatagatggaggtgctgggctgggaacacagccacctggttggacctcatctgagcaggactgaccagggcaacrctgggtcctgggcaaagcatctctgtggccgcatcttcctggggagtctccagacccaggttccccttctcctaatgtcccctccgataatcaagttcccccagatc

SEQ ID NO: 136955 - DNA, 292 bp, Homo sapiens
cagaaccatgccctgtgcctgagtgggctggcactctctgcgtcacaataatgctatgaggaacatgctatgatatatccccatcatcacagctgtgactgaccctcactcatagatggaggtgctgggctgggaacacagccacctggttggacctcatctgagcaggactgaccagggcaacgctgggtcctgggcaaarcatctctgtggccgcatcttcctggggagtctccagacccaggttccccttctcctaatgtcccctccgataatcaagttcccccagatc

SEQ ID NO: 136956 - DNA, 644 bp, Homo sapiens
gaattctgctatttatgccaagatgaaaaattatgtttccagtgtctcagcgtggcatgatctcccgcactgtggagacataaacgcagtggagaatcacacccgtagcccaggcacctcagtggtgtctcagatggaggccaggcagatttgagttcaccatgggacaattaccaaatatagtaggggacaaacagagtgagagctgatagatatgacaaacctcagaaatagccctacaaggagtgtggaccctacmtgacagataaattaatatgcacttcaaaagagggtataatgaaggaatgaatgaaaattatataattaaattaataaacaaaaataactatagagctaataaaatagaatactggttctttgtaagagacataaacttagcagatatggccatggtagtttgggttgtttcctccatgttgtaaaattacatctcaggccctttgccataggacttcacaaaggctcccactggagtgtgaggagtaaacactccagcccctttgctgtttggtgtggccatgtgaccctgagctgaaacgaagggagcagcagcttaacgtgtgcttacaggtttgctatggcctttgtgtttctttcccaatcatgagaagtatgtatccctg

SEQ ID NO: 136957 - DNA, 532 bp, Homo sapiens
ttcaaggtttcccaaggcaggtctgacaaataccaccttataattcccagacaccctgcgcagtaccctccacactctcattttttttttcctgcccatcagattagaaggacaagggattcttccttatgtcttgcaaatggggcaatggagaaaytggggggagcactttgacccaggtcaaggtcgggccaaggtcacgccataaatcagtgacacaatcaacaggacaaactctgagcttacagcacaatgctctctccattaccccacctgcatagcttctgctgtaaaacagaggtggccagacctgcctctcagggctgctgcaaggtgtcagagagctaacacacctgaaaccacttttgactgtaatggtgctattcattcattcattcattcagtcagtcagtcagtcagtcagtcagtgttgatcctggacataccatgtcccaagccatgttagctcttatttaagggctgctataggagtatagaaagtagctgagaattagaaactgttcacagcctt

SEQ ID NO: 136958 - DNA, 453 bp, Homo sapiens
tagaaggacaagggattcttccttatgtcttgcaaatggggcaatggagaaactggggggagcactttgacccaggtcaaggtcgggccaaggtcacgccataaatcagtgacacaatcaacaggacaaactctgagcttacagcacaatgctctctccattaccccacctgcatagcttctgctgtaaaacagaggtggccagacctgcctctcagggctgctgcaaggtgtcagagagctaacacacctgaaaccacttttgactgtaatggtgctattcattcattcattcaktcagtcagtcagtcagtcagtcagtcagtgttgatcctggacataccatgtcccaagccatgttagctcttatttaagggctgctataggagtatagaaagtagctgagaattagaaactgttcacagccttgccacttgacagctgtttgatcttg

SEQ ID NO: 136959 - DNA, 546 bp, Homo sapiens
ctgccttggaacagacctggggagagagaaaaagatgcaggctcgaggaaaccagctgcttgtggctttgctgtaaactgcagtccacctgtaggtttggaatatctgctagtgagccgccaccctcggctttatttcccaaggctgtgccctggtcaggggctggcaagaggacctggtgatggttctgagtggctggactgaacctggctctaggcactggtgtttgmtgcctttggattatttgcctttgcaaataatctctgtgtgctgttggtaaagatggagcattttataatgttagagagctgccgtggggtgggagcctgactcctcttctggttttgccatttaggagctgtgtggtctggggcaaatcatgtttgccttttgggcctcaatttcctcatctgtaacctgggatcaggatatctttcctgagactgtagtgaagtcaaagataggccccatgaggcctggccacagaagattccacacatggctcttctttcattaataaatatgaccacagttgtagaacaacag

SEQ ID NO: 136960 - DNA, 509 bp, Homo sapiens
gctttgctgtaaactgcagtccacctgtaggtttggaatatctgctagtgagccgccaccctcggctttatttcccaaggctgtgccctggtcaggggctggcaagaggacctggtgatggttctgagtggctggactgaacctggctctaggcactggtgtttgctgcctttggattatttgcctttgcaaataatctctgtgtgctgttggtaaagatggagcattttataatgttagagagctgccgtggggtgggrgcctgactcctcttctggttttgccatttaggagctgtgtggtctggggcaaatcatgtttgccttttgggcctcaatttcctcatctgtaacctgggatcaggatatctttcctgagactgtagtgaagtcaaagataggccccatgaggcctggccacagaagattccacacatggctcttctttcattaataaatatgaccacagttgtagaacaacagccaaattatgaattaatgatttattgc

SEQ ID NO: 136961 - DNA, 509 bp, Homo sapiens
caccctgggtaagtcagctatgccacagtcacagccttgcttgggaaggagtcgactatgagacttggggtcaatgaacttgaacactttgaagctccagggccctggaatcctctgggcctgccgaaatgattgttttccagctgtgaaaggctaacgcactgcccgggcttgaagttaaggtagaggcctctgtcttacaagacaatgtgctaccgatgcaacatctactccagcttccctcccagacactggaccaagccactgcacaaaccaggagggtaagtgccgagccttcagagggaggaaaggaagtttgtgcaggacacaccaccaaccaggcaggtccatgagtggatgcagggcacactgaggggctgaataaggagcagtggaataaaaaascaaatgagcgagagtttatcaacatagggcttctcccttaacagaggatttcacaccctgcatggaccctgagatgtgtgctgcctggtggctcctggaagctt

SEQ ID NO: 136962 - DNA, 602 bp, Homo sapiens
cggctgagctgatgtggcttctgctgcactcactggactggcctttcttcagtatggagcacaccctggactccttgccccttgggtccatggcacgtcctctccgtctcctggagcttgttcctcacccatcctcctttgcaggagcttcttctgagaggccttccctggatatctgctcaaagctcttccttcctctttgttctttgtctcacaacattcagttctgttctttctttgcacatattcctatttgtaagtgcatatttatatgttgtgttactaacataaaggctgtctgctccactcagmtgggagctctgggagagcaggaagccagtctcccgtttactgttgtctgccatgtccccagcaccaggctctcaaaaatatttgttgaatgagtgaatgaatgaatcacaaggcgagatttgagggaactgactttctgctgtatccattgtcctagtgaccttggagcatgaggatatatttttctgccttacaatgcacacttctgaaatcaggatggctcttaccattgtggcatatgtttgatgaggcagtatttttcctccaggaagcttctaacttagtgattc

SEQ ID NO: 136963 - DNA, 556 bp, Homo sapiens
gtcatcaagccttatctcaaggacacttgctggaaagagtcaggcatctcagaggcatgttcagggagaggagacactgttagcagacagccctgtcctttgtgtctgggataaggagaaagaagggagaagagggaagctaggcctggaagatagtggtgcgtagcgaaatgaaccaagaagtggaggcaaactggcttggtctaaatttaggtttcatcactttgtacttgtgtgatcttggccaaattcggtcccatctctgaacgtcaggtttctcatctattaaaatggaatagtggtatcgtaaaagrtgctatcggtgctttgtccatatctcttggcaatcaccgttcctgtgtacccaacctggagacttctgacacaagcacctgtggatatttgtctaagggctttcaggttgttttgagtatgtgtgtacatggcacaggccaggcattgtggggggagttaatccattctcccaactgggagcaaccttcaacccatgactggcaggagttggaggatacatcccccagctccttcatccctc

SEQ ID NO: 136964 - DNA, 569 bp, Homo sapiens
gtcatcaagccttatctcaaggacacttgctggaaagagtcaggcatctcagaggcatgttcagggagaggagacactgttagcagacagccctgtcctttgtgtctgggataaggagaaagaagggagaagagggaagctaggcctggaagatagtggtgcgtagcgaaatgaaccaagaagtggaggcaaactggcttggtctaaatttaggtttcatcactttgtacttgtgtgatcttggccaaattcggtcccatctctgaacgtcaggtttctcatctattaaaatggaatagtggtatcgtaaaagatgctatcggtgctttgtccatatctcttggcaatcaccgttcctgtgtacccaacctggagacttctgacacaagcacctgtggatatttgtctaagggctttcaggttgttttgagtatgtgtgtacrtggcacaggccaggcattgtggggggagttaatccattctcccaactgggagcaaccttcaacccatgactggcaggagttggaggatacatcccccagctccttcatccctcagtggggtgactg

SEQ ID NO: 136965 - DNA, 626 bp, Homo sapiens
ccacccaccaagctgtttggattctttctctgtatgagttctgacatatacctcctgtgcatcccatcaccactgccctcgttcaggccatcatccgcttccctggtgcattgctttcatctcctggccactcttctagctcctagtctgctctccacatagccagtggaggctccttctgaatcgcagttctgatggaatccccccttaatgaacattcaatggcttcctatggtttacagaataaaatttgaacttttctgtctgcccgggggtccattgtgatttggagaaagtcctaattgaactttctcactttattttcaactctcttcttctatgttcccactgctccacccagcctgaactactctggagtttgggaccactccctcagtgaaccatccaagccctttcacctcttgtctctttgtgtatgtttagagaacagattaaatatcacatygttcttctctcacctcccataacaatctgatccatgttctgggagagctatagaggctttttgactttgtattgcagtgatgagtagggagtcagcttcatgcctcctgtattaatgctgtgtctggccaagatgtttctgacatccgagtgtggtgcta

SEQ ID NO: 136966 - DNA, 540 bp, Homo sapiens
ctattaggttggacaattccaacctattagtggaaactccaaggatgtaccagagggaaatgggcagagacaggtagtggtgggcaccaamaggcagtcctggcaggattgtgtgcctgtgggctcgtgtgggatgtggtaagcaggtggctgagatgacaggaatctttagtgtagctgattagaaggatgctggtgagtgaccaagatgaagaagatgggaggagagcaagtctgggtgctggatcaggtgttaagtttgagaaatgtgaagtttgaagtggggctcccatgcagatgctccatcagacagatgaaagtgtgaaacttgtgcatggaaacaaatcttggatatctctcatattgagctgattgttggtccccaagaaaaagatgtgttgcctgaaaggatgtggagatggaagatcagagagctaagacagagtttcagggaaaagagatatcttttgaagatttagacaagaattgtagcccatggaaagaggagattgcttcaagataaagcagagaccaggagag

SEQ ID NO: 136967 - DNA, 452 bp, Homo sapiens
cccttacccactgccatatccaagccctctatcaaatcccagtcctagagtctgccaccaggaagccttccatgattgctccaggccgccaagctgtccctctcctgtgaatggcaataaaactttctatctgtcccacttacttcagacttatgacatacatgtcttattctcatttcgttagttatctttcatgtaggctcactgaatgctgacctgggctgtaagctccagggcagcagggactctgtttgattctcctctgagwccccagggcattgcatatgtcttatcacaaagtggtactccacatatatttgctgtttgcctcaattgggcagataggccctgccaatttaaactcaaaggagaaagattgtataaattcgtccacaactgaattctaggatgtctacaaagaaatgcaggttatttcttttgtgcacatgaac

SEQ ID NO: 136968 - DNA, 441 bp, Homo sapiens
agccctctatcaaatcccagtcctagagtctgccaccaggaagccttccatgattgctccaggccgccaagctgtccctctcctgtgaatggcaataaaactttctatctgtcccacttacttcagacttatgacatacatgtcttattctcatttcgttagttatctttcatgtaggctcactgaatgctgacctgggctgtaagctccagggcagcagggactctgtttgattctcctctgagaccccagggcattgcatatgtcttatcacaaagtggtactccacatatatttgctgtttgcctcaattgggcagataggccctgccaatttaaactcaaaggagaragattgtataaattcgtccacaactgaattctaggatgtctacaaagaaatgcaggttatttcttttgtgcacatgaacagagacttacc

SEQ ID NO: 136969 - DNA, 452 bp, Homo sapiens
actgccatatccaagccctctatcaaatcccagtcctagagtctgccaccaggaagccttccatgattgctccaggccgccaagctgtccctctcctgtgaatggcaataaaactttctatctgtcccacttacttcagacttatgacatacatgtcttattctcatttcgttagttatctttcatgtaggctcactgaatgctgacctgggctgtaagctccagggcagcagggactctgtttgattctcctctgagaccccagggcattgcatatgtcttatcacaaagtggtactccacatatatttgctgtttgcctcaattgggcagataggccctgccaatttaaactcaaaggagaaagattgtataaattcgtccacaactgaattytaggatgtctacaaagaaatgcaggttatttcttttgtgcacatgaacagagactta

SEQ ID NO: 136970 - DNA, 541 bp, Homo sapiens
gcctccagccaccctgccacacctccagctaccctgccacataccccctgttctagccacatgaatcccctcaccataaagcacttatatctgtggagaggagacataaaagcaggagacctttctgtttttataaaacattactgtgcacctataatttgccatggggtgggcaatatcaaggaatccaagtcctggctgccractctgaggaaaggattaatatctcactctgcctgggactccagcaatgcaagaataaagagatccatggctggtcatggtggctcacacttgttttcccagcacttttggaggctgaggcaggcagaccacttaatctctggagttcgagaccagcctaggcaatacagtgagtccccatctctataaaagaactttaaaaattagctgagcttggtgacatgcacctgtagttccagctacttggaaaactgaggagggaggatgacttaagcccaggagttcaaggttacagtgaggagtgactgcaccactgcactccagcctagacgacaga

SEQ ID NO: 136971 - DNA, 466 bp, Homo sapiens
gaattctagggccagttctgcaactgtccagctatgtaatcttgtaaactcacaaccgtaatggccaccatttcctatttgtataatgaaggagtctggattgaatcagccctaaaattttcacagactctaaaaatttggcagtctcagagtttgcgctgatagaatttgatgtttacagattgaaggtgaagttcaagtcaataagcaaaacatttattttttttaagtgttggtcagcattagaagagaaaccatctgttgactacagtagcaggattcatttctgcaactgctgagagacaaaaagcagatgaaaaatatgtaaaaagatgaagcatgccatgaaaattacttgttcgggaatttaccatctatgtgcccagamttccttcctggaatctccacccatgagtacaactgcttgctgggcatccccttttggatatcctgcaggaacctccag

SEQ ID NO: 136972 - DNA, 538 bp, Homo sapiens
gcagtgagccaagatcatgctactgcactccaacctagaggacagagtatgactttgtctcaaaagaacccaaaaaccaaaaaagtatctgtctaaatgttttacccattttaaaaaaattgagttgtttgttttgtttttagtgaattgtgagagttctttctatattctggttgtaagctctttatcagatgtatgttktgcaagtactttctcccagtctgtggcttgccttttcctttgggttggagatgggccacttactctctgggcgaccttggacaagtgactgcgacttagcttctctaagccttgttttcctcatgtgtaaaataagaatttaaaatgttgcttaggggtcccagcagctcaggcagccagaggagctgcagcagccaggcagcactgcttctccaaggctcccggcaccgctcgctgcaggcacctggcacgcaccctctccgccaccaagacacccaaaaggaaggtcagctcagcttagccaaagggtggtgaaggaagagcccaagagaagacc

SEQ ID NO: 136973 - DNA, 538 bp, Homo sapiens
gcagtgagccaagatcatgctactgcactccaacctagaggacagagtatgactttgtctcaaaagaacccaaaaaccaaaaaagtatctgtctaaatgttttacccattttaaaaaaattgagttgtttgttttgtttttagtgaattgtgagagttctttctatattctggttgtaagctctttatcagatgtatgttttgcaagtackttctcccagtctgtggcttgccttttcctttgggttggagatgggccacttactctctgggcgaccttggacaagtgactgcgacttagcttctctaagccttgttttcctcatgtgtaaaataagaatttaaaatgttgcttaggggtcccagcagctcaggcagccagaggagctgcagcagccaggcagcactgcttctccaaggctcccggcaccgctcgctgcaggcacctggcacgcaccctctccgccaccaagacacccaaaaggaaggtcagctcagcttagccaaagggtggtgaaggaagagcccaagagaagacc

SEQ ID NO: 136974 - DNA, 603 bp, Homo sapiens
caagatcctgtaaaagcagtggagcttgggggtgaataacggccaaaggagcagatgagcaccagacttgatcccaggctgtctatattctttacagaaaagggggcagacctaggggaatatagcaagcaaggggccccattacactttgccccatttcacttcctgctcaagcagtgctcttacagggaagtggctctggacgggccactgctgatccaccctaccctcaaaccactctttccctctctgccagcaattgaaaagccacacatggctcttctaacacagactgcctcacaagttgggtcaattcaggtcctccgggaagcagatggcaggatggagttagaaatgcaaagagatttattaggggaaatgactgtgaagattgaaagggaagaaggagcaggaggaggcagaaagagccttcaaactgcaatgcagtcctgatccttgcaaaaggagatggggaaggaargaggtgtgtgtgggtacggagagcctcagagcagtacagcccccggaaaatctcagccagcccaagagggagctctagaaccaagatcactcattagagaaatcctgcattgcacagaaatt

SEQ ID NO: 136975 - DNA, 523 bp, Homo sapiens
gagagttctagaatagttctcattcttatgtgtatcaaaattaatcttcattctttaaaaatgttttttaacagagtccaactacgtgatgagctggcactggacagaagacagactgcttaattatgtggaggacacacgagtcccagaactatcagaaagcttttttccttaagactgtagtatcttaaacaattatggaggtggtgagaaatagttgttagaaagcaaaactaagtatcataagatccaaattcaactcctggcttcaacaatatctgtgtgatcttgagtgagctgctctttctcattgagctgcacaagaaaatgttgttaatcctccctcactaaccagttcccaagttttatggtatggtttcattcaatgttgaaatttctaagctctttttaaaaaatgataaaataaatatgtttaatmgttgagcttattcaatatacctgaagatcaagagaaattgccaatgagacagccaagaaggatgaacatattaaataaggtaga

SEQ ID NO: 136976 - DNA, 603 bp, Homo sapiens
ctacccccaaaaacctgatcaacttgagcataggttctcatccaaaccaagaggttttcaaggaggagagagggcacaattacagattgttaattactcgaaggcaataggaattaaccggacctccccagggcacagacagtaaggagtagggcagggaaggaaaagcagtttgggggggcacagctacaactgaacataaagatactcagaaactccacaattcattttaaataatccttggccaggtgcggtggctcatgcctatcatcccgcactctgggaggccaaggtgggtggatcccttgagcccaggagtctgagaccagcctgggcaacatggtgaaacccatctctacaaaaaaaaatacaaaaatttgctgggcatggtggcacatgtctgtggtccgagctacytgggaggctgaggtaggaggatggcttgagtccaggaggcagatgttacagtgaaccaagatcatgccatagtgagactctgtctcaaaaaaaaaaaaaaaaaggaatcctttacctttaggctttcaaacccaggtacatttgaagggaagagggagattgtttccatgctagatacattcaccc

SEQ ID NO: 136977 - DNA, 532 bp, Homo sapiens
gaaaatccagtcacatgggaaataattacaggaaccagggaggccttatcttagtgaagtcaccacttgggggacacaattgcccccttcagatactaaagggttgctayataaaagacacaagactgagaagcagaattttagggaggcaaatttaacccaatttacatcaaacttgctaagatttattaagcagttaaaccaggcactgttctgaacattttacatgtactgcagatagtccccgacttataatggtttaacttatgatttttcaacttcacaacggtgcaaaagccataggaatgcagcacactccttgacttaccatgaggctacatctggataaacccatcctaagttgaaactaccatgttttgacttagaatggatttatctggaaataaccccatcctaagtcaaggagcatctgtattgctgtcctggccaacagaggagaatcctgaaacagaaaggtcaggggacttgcccaggaaactcacctagtaagggcagagtcagggctggaacc

SEQ ID NO: 136978 - DNA, 448 bp, Homo sapiens
taattcaatcatgtattagttcgattttgttttgtttggttcagattgtatgttccaaaaaagaagctgaaatttatactttaagtaaatggatgttttcgttggctggcaagcagaaacatgscattttgaaggatggagcaatgccatctggagtatgattctgtgtccagagagaggacagatgagagtactttgtcccagagagaataggtgttgggaaaatgagtgttgctcaagaaggaaggcagagtcactcacagcaaacattacattttttgttgcctcagagatttggtttctcaatgtctgatacgcctgacttacaaagaattctctgaattttgtgtatatatatcacagagaggattctgaacccacatccgctatatcttcttcagttgtaacataaacctccatctctttaacaaaatccagggaacagaat

SEQ ID NO: 136979 - DNA, 522 bp, Homo sapiens
actggttagtatgaaaataaatgggtagatacagagttaagcagtgtgaaaaccatacaaacccatgctaatacaatgagaaatcatcgaagagagtggttatagtaccagctaattttatggaaagaaacatctttgagcagcctaaatcatggcttctcaactttgccactactaacattttgggtcgatgattctttgttgtggaaggtggtccagtgcattgtaaaatgtttagaagaatccctaagcactatctacttgatgtcagtagcaacacacctattctccatcctgttatgacaaccaataatattttaggacattgcctaatttcctgtggggaggggagcaaaattaaccctggttgaaaaccaccggtctagagcatagaattctagtcagagaacasattccagctgcaaaaaaatacatagtattcctaggatgttctcaaaatgctagtactagctggtaatacggaagtgccaagagtttcacaaagcataagggaaggtgagt

SEQ ID NO: 136980 - DNA, 191 bp, Homo sapiens
tataaatgtgagccaagtgataagaacacatggactcatagaggagaacaccacacactcggacctacctgagagtagcgggtgggaaaasggagaggttgaggaaaagtaactaatgggtactaagcttaatacccgggtgacaacataacctgtacaacaaatccccatgacacgagtttacctgtata

SEQ ID NO: 136981 - DNA, 191 bp, Homo sapiens
tataaatgtgagccaagtgataagaacacatggactcatagaggagaacaccacacactcggacctacctgagagtagcgggtgggaaaacggagaggttsaggaaaagtaactaatgggtactaagcttaatacccgggtgacaacataacctgtacaacaaatccccatgacacgagtttacctgtata

SEQ ID NO: 136982 - DNA, 544 bp, Homo sapiens
gaattcactttctgctgtgggatttctcagacaatgttgtgtggattgttgtargcattttgcttgttactcataaatgcactgtctagacacatcgagaagttagcatccatgaggctatgcttgaaaaatggaactcctagagctgatggatacatatttcccccgttgtttcacttcagtgaatggtcatatagtattccatcacctaacttaataatgtgttctagattttactctctctccctatagcacccatcctgtttcttattcttactccacaatacactcccaacttaaacacacagtctcttctttaggtgttgggggttgggagttattacaagatgacatggtgtatgcatttatttctttgtctacgttgattgcactgatttacagtctcaccagcagttcataaaatccttccttgcagctaagatatgggcacaagactaaaatttatatctttagctgatatctcattcctgaacactcatctcatttgcgactgccttgaatatcaaataggcatctcaacctt

SEQ ID NO: 136983 - DNA, 434 bp, Homo sapiens
atgtgcacacacttttaatttatatttttctcattctgagtgataatgcagcaaaatytaaagagattacactataattatgtttaaaatcttacttgtacttttgaaacaaatcacaggttgagtcatgataacaggacaaaatatacttagctgctgaatataaacaaagtatacagaagcgtaaatcttgcgagcacaaaagtgttaaaaacagcaagatctagaggctcaagtacaagagagatatattataccaagagcagtaatctcaaaaatttatatcccaaatgtgtagacttgatcttattttcagtcagtgtgttctgtatggaagatgaacatgctcctgacaacggagtatgatttagaaaactatatcctgcacagagggatataaaatgtgattatatactgcacttctgtgcaaaatt

SEQ ID NO: 136984 - DNA, 434 bp, Homo sapiens
atgtgcacacacttttaatttatatttttctcattctgagtgataatgcagcaaaatttaaagagattacactataattatgtttaaaaycttacttgtacttttgaaacaaatcacaggttgagtcatgataacaggacaaaatatacttagctgctgaatataaacaaagtatacagaagcgtaaatcttgcgagcacaaaagtgttaaaaacagcaagatctagaggctcaagtacaagagagatatattataccaagagcagtaatctcaaaaatttatatcccaaatgtgtagacttgatcttattttcagtcagtgtgttctgtatggaagatgaacatgctcctgacaacggagtatgatttagaaaactatatcctgcacagagggatataaaatgtgattatatactgcacttctgtgcaaaatt

SEQ ID NO: 136985 - DNA, 434 bp, Homo sapiens
atgtgcacacacttttaatttatatttttctcattctgagtgataatgcagcaaaatttaaagagattacactataattatgtttaaaatcttacttgtacttttgaaacaaatcacaggttgartcatgataacaggacaaaatatacttagctgctgaatataaacaaagtatacagaagcgtaaatcttgcgagcacaaaagtgttaaaaacagcaagatctagaggctcaagtacaagagagatatattataccaagagcagtaatctcaaaaatttatatcccaaatgtgtagacttgatcttattttcagtcagtgtgttctgtatggaagatgaacatgctcctgacaacggagtatgatttagaaaactatatcctgcacagagggatataaaatgtgattatatactgcacttctgtgcaaaatt

SEQ ID NO: 136986 - DNA, 434 bp, Homo sapiens
atgtgcacacacttttaatttatatttttctcattctgagtgataatgcagcaaaatttaaagagattacactataattatgtttaaaatcttacttgtacttttgaaacaaatcacaggttgagtcatgataacaggacaaaatatacttagctgctgaatataaacaaagtatacagaagcgtaaatcttgcgagcacaaaagtgttaaaaacagcaagatctagaggctcaagtacaagagagatatattataccaagagcagtaatctcaaaaatttatatcccaaatgtgtagacttgaycttattttcagtcagtgtgttctgtatggaagatgaacatgctcctgacaacggagtatgatttagaaaactatatcctgcacagagggatataaaatgtgattatatactgcacttctgtgcaaaatt

SEQ ID NO: 136987 - DNA, 596 bp, Homo sapiens
aatcttgcgagcacaaaagtgttaaaaacagcaagatctagaggctcaagtacaagagagatatattataccaagagcagtaatctcaaaaatttatatcccaaatgtgtagacttgatcttattttcagtcagtgtgttctgtatggaagatgaacatgctcctgacaacggagtatgatttagaaaactatatcctgcacagagggatataaaatgtgattatatactgcacttctgtgcaaaattttaaacagaatttaatcartcactttgaaacctagatgtatttgtggaacaatgacatcactttgaaattatgtgtagtttgtaaatgcacaaaattaataatgtattttgtgtaaatggattactttggaaagaaactcataagaactacattatcagacaaaacattctttgaaaatgtgtgtgctacaaggcaatttgccatttcattttaatagaatgttccatgctgaaaatgtctaactgctcagaagtggaataggagtgtaaatttattatctgagaaaagaaaattaattgacacaggccaaaaatgtaatggaattagacccatgtgccttagtgaga

SEQ ID NO: 136988 - DNA, 609 bp, Homo sapiens
tagtgagaacttaggaactcgatctgggctctatggagtgayaaaattatgcaaaaaaaaaatgaagtatgtcatttttgcacaaagctcaggatttctcaaaggaatattacataaaataatgaagtctcctttatctccaagacagtccagtcttagaacgcaatggaacatgccatttgaaataaaaaacaaattttgtttttgttttgttttgttatgtttggtgctattttaagtatttaacattcataaagagagaattagcaattaatgagataaagtttaaaaaaaatcgagatcaggacaaggtaaaaaaaaatcattcagtcttgcaaatctgttatttaataggtcatgttttaagaactgggaatacagatactacgtgtattttaaatagaaaatttgaaatgtacaagaagtcatttttaaatatagtcactctgctataaagtcaatctctaaaactcaatctttgtgtctaactgaaactgtaccctgtgaacaacatctccccattccctatcccttgcctccagcattaactagcattctactctctacttttaagggtttgccttttttcgattgctaaaaagtctattt

SEQ ID NO: 136989 - DNA, 609 bp, Homo sapiens
tagtgagaacttaggaactcgatctgggctctatggagtgacaaaattatgcaaaaaaaaaatgaagtatgtcatttttgcacaaagctcaggatttctcaaaggaatattacataaaataatgaagtctcctttatctccaagacagtccagtcttagaacgcaatggaacatgccatttgaaataaaaaacaaattttgtttttgttttgttttgttatgtttggtgctattttaagtatttaacattcataaagagagaattagcaattaatgagataaagtttaaaaaaaatcgagatcaggacaaggtaaaaaaaaatcattcagtcttgcaaatctgttatttaataggtcatgttttaagaactgggaatacagatactrcgtgtattttaaatagaaaatttgaaatgtacaagaagtcatttttaaatatagtcactctgctataaagtcaatctctaaaactcaatctttgtgtctaactgaaactgtaccctgtgaacaacatctccccattccctatcccttgcctccagcattaactagcattctactctctacttttaagggtttgccttttttcgattgctaaaaagtctattt

SEQ ID NO: 136990 - DNA, 609 bp, Homo sapiens
tagtgagaacttaggaactcgatctgggctctatggagtgacaaaattatgcaaaaaaaaaatgaagtatgtcatttttgcacaaagctcaggatttctcaaaggaatattacataaaataatgaagtctcctttatctccaagacagtccagtcttagaacgcaatggaacatgccatttgaaataaaaaacaaattttgtttttgttttgttttgttatgtttggtgctattttaagtatttaacattcataaagagagaattagcaattaatgagataaagtttaaaaaaaatcgagatcaggacaaggtaaaaaaaaatcattcagtcttgcaaatctgttatttaataggtcatgttttaagaactgggaatacagatactaygtgtattttaaatagaaaatttgaaatgtacaagaagtcatttttaaatatagtcactctgctataaagtcaatctctaaaactcaatctttgtgtctaactgaaactgtaccctgtgaacaacatctccccattccctatcccttgcctccagcattaactagcattctactctctacttttaagggtttgccttttttcgattgctaaaaagtctattt

SEQ ID NO: 136991 - DNA, 616 bp, Homo sapiens
ctgttacaggtatataaatacagatataaatgcaggtatgggtaaaattatggctatgggtcccagccttaaattcttatttttttataactaattgatgttcagggatagatttatgtgatctgctcatttgcaggggcccatcacttgggctaattctttggtgtcattcgtrtcaagttttaaataatttttgagtaagatgtcctatatgttaattttgcactgaacactgcaaattttgtagctgttcctgttaatttgttaatgaaatttctctttagaaactattaaattaataagacaataattaagcaaataattattaaattttacatggtaacactagcaatattaactcccattttctatcactttaattcaggccatcctttagaggtttaagtataatccattcttatgtcctacacaactgagtgtgtagtaccagtatgtaatcctaatgtaatggcacaccccagatgacctttttgtgtgttggcatggtttttcagtttaagcaaaagtttaattgattgaaacttgaagttcacatttttttttctacacaccaatattgaagagaagtcctacaaaatacttattctatggaaaa

SEQ ID NO: 136992 - DNA, 601 bp, Homo sapiens
gcaggtatgggtaaaattatggctatgggtcccagccttaaattcttatttttttataactaattgatgttcagggatagatttatgtgatctgctcatttgcaggggcccatcacttgggctaattctttggtgtcattcgtatcaagttttaaataatttttgagkaagatgtcctatatgttaattttgcactgaacactgcaaattttgtagctgttcctgttaatttgttaatgaaatttctctttagaaactattaaattaataagacaataattaagcaaataattattaaattttacatggtaacactagcaatattaactcccattttctatcactttaattcaggccatcctttagaggtttaagtataatccattcttatgtcctacacaactgagtgtgtagtaccagtatgtaatcctaatgtaatggcacaccccagatgacctttttgtgtgttggcatggtttttcagtttaagcaaaagtttaattgattgaaacttgaagttcacatttttttttctacacaccaatattgaagagaagtcctacaaaatacttattctatggaaaaaaacaaagtccacttt

SEQ ID NO: 136993 - DNA, 547 bp, Homo sapiens
atctaaatactgttacaggtatataaatacagatataaatgcaggtatgggtaaaattatggctatgggtcccagccttaaattcttatttttttataactaattgatgttcagggatagatttatgtgatctgctcatttgcaggggcccatcacttgggctaattctttggtgtcattcgtatcaagttttaaataatttttgagtaagatgtcctatatkttaattttgcactgaacactgcaaattttgtagctgttcctgttaatttgttaatgaaatttctctttagaaactattaaattaataagacaataattaagcaaataattattaaattttacatggtaacactagcaatattaactcccattttctatcactttaattcaggccatcctttagaggtttaagtataatccattcttatgtcctacacaactgagtgtgtagtaccagtatgtaatcctaatgtaatggcacaccccagatgacctttttgtgtgttggcatggtttttcagtttaagcaaaagtttaattgatt

SEQ ID NO: 136994 - DNA, 616 bp, Homo sapiens
ctgttacaggtatataaatacagatataaatgcaggtatgggtaaaattatggctatgggtcccagccttaaattcttatttttttataactaattgatgttcagggatagatttatgtgatctgctcatttgcaggggcccatcacttgggctaattctttggtgtcattcgtatcaagttttaaataatttttgagtaagatgtcctatatgttaattttgcactgaacactgcaaattttgtagctgttcctgttaatttgttaatgaaatttctctttagaaactattaaattaataagacaataattaagcaaataattattaaattttacatggtaacactagcaatattaactcccattttctatcactttaattcaggccatcctttagaggtttaagtataatccattcttatgtcctacacaactgagtgtgtagtaccagtaygtaatcctaatgtaatggcacaccccagatgacctttttgtgtgttggcatggtttttcagtttaagcaaaagtttaattgattgaaacttgaagttcacatttttttttctacacaccaatattgaagagaagtcctacaaaatacttattctatggaaaa

SEQ ID NO: 136995 - DNA, 439 bp, Homo sapiens
cctgtaggaaaaacaaaataagcccctggagtccaaaagatttggatccaaactttgaagaaggatggggaagtgtttaggaaagtgcttccctgtgtaaaacttagctggtaagtaccatatttcactgaaattgctgttataataattgaaacagattattattggaaaaacaacatcagcaaaactaaamcctagatgagtttaaataagtgccagccatttttctcctgtggggatttagagttgaagtgggtatcttcgattacttttctttatcctcattcttattcttataatttttcctaataagtcacctaagaagggcatttaaataagtgctagccttttttctcctatggggatttagagttgaagtggatgtcttcaattacttttcttctctattctcgttcttattcttataatttttcctaat

SEQ ID NO: 136996 - DNA, 437 bp, Homo sapiens
tgtaggaaaaacaaaataagcccctggagtccaaaagatttggatccaaactttgaagaaggatggggaagtgtttaggaaagtgcttccctgtgtaaaacttagctggtaagtaccatatttcactgaaattgctgttataataattgaaacagattattattggaaaaacaacatcagcaaaactaaaccctagatgagtttaaataagtgccagccatttttctcctgtggggatttagagttgaagtgggtatcttcgattacttttctttatcctcattcttattcttataatttttcctaataagtcacctaagaagggcatttaaataagtgctagccttttttctcctakggggatttagagttgaagtggatgtcttcaattacttttcttctctattctcgttcttattcttataatttttcctaat

SEQ ID NO: 136997 - DNA, 574 bp, Homo sapiens
gcctcaaaaaaaaaaaaaaaaaaaaaaaaatcataagattccatgcaaattatttttccagagctgcttctaacagcgtttagttcaagcagcggtcagtaaagtatggccctggactgtccagccctcaagctaagaatggttttcacattttttaaagcaacagagactcagtggcctacaaagctaaaatatttactgtgttcttttacagaaaacaaactatttctatgacaaaatacttttgaatcataagctcatcatgccctttattctagtttacatcagtcttcataggactcccaagtcatccctcattgacctaaaaactgtcctcatggttgtaagccctccctccctycctccatccatctctccctctctctttttctccttccctctctcccttccttccttttctttcataaagaaaagaggtttagttgactcacggttctgcaggctttacaggaagcatggtgctggcatctgctcggcttttagggaggcctcaggaaactaaaatcatggcagaaggtgagcacacatgtcacatgatgaaagcagaaacaag

SEQ ID NO: 136998 - DNA, 533 bp, Homo sapiens
caaacccctccgtgagtgacagagatctcttcctgcctgactgccttcaagctgagacactggaattttttttctgccttttgacttcaattaaaacattggcttttcctgggtcttgagcctgcccgtctttagactagaactagaagctatcctgggtctacagtttgccaactgcatacctttggactagtcagcctttataattgtgtgagccaattccttataacaaatctttatatatcgatatatagagatatatattgatatatatatatatacctatatagagagatatatctatatatctatatagatatctatacctatatagagagataygtctatatccatatatagatatatagagatccatatatatcctctatatatggatacatctatatatagagagatctctctaaatatctctatatctataactatatctacatctacatctatagctatatcaacatccaatttgttctttttctctgagaacacctactgataaataagtttctaagttt

SEQ ID NO: 136999 - DNA, 533 bp, Homo sapiens
caaacccctccgtgagtgacagagatctcttcctgcctgactgccttcaagctgagacactggaattttttttctgccttttgacttcaattaaaacattggcttttcctgggtcttgagcctgcccgtctttagactagaactagaagctatcctgggtctacagtttgccaactgcatacctttggactagtcagcctttataattgtgtgagccaattccttataacaaatctttatatatcgatatatagagatatatattgatatatatatatatacctatatagagagatatatctatatatctatatagatatctatacctatatagagagatatrtctatatccatatatagatatatagagatccatatatatcctctatatatggatacatctatatatagagagatctctctaaatatctctatatctataactatatctacatctacatctatagctatatcaacatccaatttgttctttttctctgagaacacctactgataaataagtttctaagttt

SEQ ID NO: 137000 - DNA, 451 bp, Homo sapiens
ctttatctcaaatgtttacacatactagggaaaagcatctgcagtttctgaactctttgtgaatcagtatcactttttcatgttacttcagagatcaatattcagtgcattggttttatttaccatcttttctcccagttgatcttgtaatcatcagaaagggaaaaaaaaatctccttcacaaagccctttgcgacaaacttatgtaaataataatctaaggacagctagaaaaaaaatacaccatacaggggaatagatccaaaattgatatctgcctcacctgtatcacctattgtattagtaactggaaaggtaaataaatagcagagactagaatgtttccaaacgtagtmgtgaaaactactcccctcctccccccatataacactacaacaggttactttggttacaggatatgacaatagctctgcaatatcagaaaaatgcc

SEQ ID NO: 137001 - DNA, 618 bp, Homo sapiens
ttggtccttctttgtgtgtgcctgcttccctcttgactttatccaccatgttttgacacagcacaagaggcttcatcagaagctgagaagatgcaggtgcccttgtacaacmtgcagaactgtgagccacataaacctcttttctttataacctcagaaatttcttcatagcaacacaaaatgaactaagacaagcactttggaaaacaatgaaacattgttttgtaagattgaacaaatacatttgctaccttccaacaatttctctcctaagcccatgcaccagacaaacttttgtgtacatgcaccagaagacaatgcaagaatgttcatagaagccttgctcataatagcatgtaatgaagtacttttgtccttggggattagtcatatgctctatctctgaatgaactattattgaactagttaacatgttattttcctaggaaaagatatgaaaaagtggttttctctatcttattaatagtaaaacaatttggactggtatgaggcaagagtgtggcttttgtgattgcatcatgtctttagacaaaatgttttttaatgctaagttctaactcttgaaatcaacatggttgatgtcctcacagtttagca

SEQ ID NO: 137002 - DNA, 499 bp, Homo sapiens
caactactgtgcttgcaagaagaagaatcagatacaagtcctgatcttcaggaacttgaagtccagactgaaaaccaagatttcaaaaaaaaattagctaacctcctttcaattaaaataacaatataaaattctagctgaaggaatactacaaatttctttgcctagtgagtggaacagacatattctgtgacttcaaaagagagaacatgtrgtggattagggatgttagcaaagagattggaaagatagcaacaaatttttaaagaattaggaaattgacaaagaatcagaaagtttacagattatagatttaacaatgaatttgatggttgaggggagaatggaggtaatttcatattggagtttggatagaagcaggaaatagaggcctagatggaagaattgtcagaaaaatgataagaaaagtatgctaggagacataactgaaagcagtttaatttcagattctgaagagggttgactattaggctaagga

SEQ ID NO: 137003 - DNA, 254 bp, Homo sapiens
tgaattccagggagttgctaggattttagaaacctgcttgaaagactattggcattttaytgggtagcatagtcatattttttcctttacattcatcaagtctattcctttcactaaaaaataatcattagtttatattttttcttttatggttttatttacaaactttttaagtccatatgtactgtgttgcaactagaaatcactttacccagaactctgagatgagcatggtgaacaggtttattaggaaa

SEQ ID NO: 137004 - DNA, 470 bp, Homo sapiens
cccacttatcaagttgtttatttacttcttaaggatagctaggtgcctggaattacccttgagggaactcaagattttcctttattttcatgctagttgttggggtggtactcacaggcccctatgaggggttcctgccctgtttcacttctcccaactgtaagytgggaacactgttctagaatgataagtatatccaagtgaatcaagttttaacaatttgtatttagcagtagctaaaatgtattgggagcttaatatgttcaaggagctatgcaaaattgctttatatgtattaactaacttaatcctcattaacagtcctatgaagtaagtgctaccattgtctccttcttataaatgcagagagggaagcttagatggttaaaatcactttttcagggtcacatattttcaaaggtagccccaggtaagttcaatgcatatccttggttaaaaactactcgtct

SEQ ID NO: 137005 - DNA, 470 bp, Homo sapiens
cccacttatcaagttgtttatttacttcttaaggatagctaggtgcctggaattacccttgagggaactcaagattttcctttattttcatgctagttgttggggtggtactcacaggcccctatgaggggttcctgccctgtttcacttctcccaactgtaagttgggaacactgttctagaatgataagtatatccaagtgaatcaagttttaacaatttgtatttagcagtagctaaaatgtattgggagcttaatatgttcaaggarctatgcaaaattgctttatatgtattaactaacttaatcctcattaacagtcctatgaagtaagtgctaccattgtctccttcttataaatgcagagagggaagcttagatggttaaaatcactttttcagggtcacatattttcaaaggtagccccaggtaagttcaatgcatatccttggttaaaaactactcgtct

SEQ ID NO: 137006 - DNA, 504 bp, Homo sapiens
tcattttgctatcttataaaatgaaactgggagaaaaagtttaatgttagtcatatctatgtaatatggttaaattgctttaggacaatgaaattaatatgctttactatccccacaactgattgtgttaagggtcgtttgatccacagtgatgcagcaaaattctgtttttgagacaggcctccatggctggttcaactgtagtyattttagttgtgaaaacacagtttcagtctccatgacctaactaatacacatggttgaggcaattgtccgagtactctaattcagagaaaacattggcttttctggaaattacctgggtcatctgacatgtgttttgcttaaactagttcaataatttttccaattctctactttggccagaaagatacaatctacaatgcctggacacaaaatataaactatatatggggaattttcttaactatagggctttaaatagtttttttttttttctgagctgacaggtgcagtctcacc

SEQ ID NO: 137007 - DNA, 556 bp, Homo sapiens
tggtggatttggggttaggattaaatgagttaaaacatacaatgaagttaaaacaaggcctgacgcatagtaagtactcaatttcagctctaacctttattattattgtgagaatttacagaattgcctttatttcatcctttgctattagtttatcctgggtaatttttataaaatgtacattcatgtgatttatttgtctataaaagataaaaattcaaccaaaactggcttaagtatgggaaggaatttattgtctcttgtaaatcaagcaatttaggagcataacagcatcagatatggcttgrtacagagcccaagagaacaaatgatgtcaccagaactcaatttttttctgtacatttctcagctatgttgcttctatgtttctctattctctgtgatttatttcttatggttgaaagactactgtcatgagctcttggaactgcatgattctaggttaaaatccagttgaaaagtgagcatctttattctagtatttccaaagaaaatgccactcttattggagtaggttagtccatgtgcttagctt

SEQ ID NO: 137008 - DNA, 548 bp, Homo sapiens
gtgacagctgtgtggtttccagggcaagagtttacttggatggcgagagaaaatacttcttgataaataatgtgtttttatgactcctgtttctgggaaacctgatacatacaacgcacctacaagtatttgaggtcaagtttcaactgtgtttttrttaaatatttgactgttttgtgtgtgtgattgtaattgactgagtttgaaacctgagtgattaaggagcttgtctgtaagaaggttgcttctctatctctcttcttctttttttctcttctttctctctctctatctctccttctatatttttatataatgttaagttttgtaattagctgattctgctttctcatgctccttaattttgatttcttagaaagatgaagcattggaaagcactgcatagctccatgttatcaatcaattaatgtcttcagtcctttaatgtcctctggacagctgggatgcttgggagaagactgttgacaagtcttgtacgtgtggaagacaccattttacttactttccctttattatggaaggaacac

SEQ ID NO: 137009 - DNA, 557 bp, Homo sapiens
cctactgactaagtgagccactaagtgggcccctaagtgggccacttagtcagatccctactgagtgtgcagtattaatgtgcaatgtgcaaatttgggaagggaaattcagacaggcagtatagcgaaggaaaatgacgtgggaagcaccagctctgaaagtcccagcctagcaccgtggagtgggaggtcctgctgctggagccatacagagcttgattctaatctcagctttgctcctcatagggtggaggctttgaagccacatttcttggatccaaatcaggctttcactacttattttgtaaacttggkcagctttctggtgtttcttatcttaggaatggagacaataatactacctgatgcgtagtatcgtgaggactaaatgagatatgatgtacaatgttgggaaggcgctggtgcattttatgtcttcagtaaatattagctattattctatgagtgaccttagaaatgaccagtcacatgactgccccctattcactgtccacacatgtaaaaggggaaaagataattgttacaaggattcatag

SEQ ID NO: 137010 - DNA, 595 bp, Homo sapiens
ggaaactctggtactgtgctgcaagtagtacagattggtagaaacacaatggaaaaaggaagtgggcattatttactataattgagtgtttgcatattctatgattcatcaagtctactccagggtacattcccttgagaaattcttacgtatttgcatcaagatacatacacaagaacggtcctaaaactcttgtccctagctatcccaaactggaattttggaaacaacaaagtgtccatcaacagtaggatgaatacattttggtatgtatctccaaagtaatactacacagcaataaaaataattaaactacatagaacaagatggtcagctcttaaactacatagaacaagacggtcagctcttaaaaacaaactattcagtgaaataagaaaagatgacaaaataaatataaatccatttcatatggttcaaaaatgagccctatgcactagaatacagagtttagtaatgcttaccattaaagtaaacttytcagactatttacttataagcaggtagcaaatattaaaaaaaattttgaacacaagggaaaggtagagatctattcaaacacttattcctcatatgt

SEQ ID NO: 137011 - DNA, 582 bp, Homo sapiens
gaattcaggtgtgagtctaatgcatgactgagacactgaggctgggaagccagggatcaagaccatgcaggaggaagacgatgaggtcacgggggctggggtgggaagtccatgctgaaactgggaatgaagccagtggctggggctcttcttttggggagagtgggtctgcttctggagaggaacagatgaaactagcagcaccggggtctctggcataggtgtgatctggcttgaatgggatccacccacaacagacccacagccagtacaacatggtaagtaaaagcaagcacctctaagtcaatgggaatggctctgaatcctggctcacccacttgctagttgtgtgactcttaagtaaaagttcttagaacagtgtctaacacatgataagtgctcaataaatgttagtttttcttggtaaacattagcacgatgcttgctatttatttgtgaactgtctacaacatgcccaggtcagttctagaccttgcaagggggctacagggaagcatacacgtgttgaccgcatacaggrctttacatctatccatggagaaatgtatatttcactgaata

SEQ ID NO: 137012 - DNA, 333 bp, Homo sapiens
tttgccccatccaggactggcaaattagctttactcaacatgccctgagtcagataactaaaatacctcttagtctaggtagatactttcactggataggtagaggcctttcctacagggtctgagaaggccaccacagtcatttcttctgttctgtcggacataattcctcagtttagccttcccacctcaatacagtctgawaacagatgagcctttattagtcaaatcagctaagcagtttttcaggctcttagtattcagtgaaacctttatatcccttacggtcctccatcttcaagaaaagtagaatggactaaaggtcttttaaaa

SEQ ID NO: 137013 - DNA, 609 bp, Homo sapiens
ctacactgtgaatcacttttcttcctgtggttaaaactgagatcttcrggttcaaagcaaagaagtagaaagcagaaaacctgaaatgacaggtaaataaatgcatacagttaactgttgattaatcttctcaggtgcaggccttcctctgcactttttatggtacatcaatcaaccaactatttctggcgacccttaacttttcccaatggctcataaaaacttttccttcctggtttgagagctttcataaaatcagactgtttcttccttgagacttcacatctcaccataaaattgacacctaagaggagtttaaacttgctcattaaatgtaatactacttcatttctcttcttttaggcagagttttgaggtgggaaagaacatgagtaatcaacccaactattcttcttttagtgactatcatagaggttctccttttcttcaaaaaatggagaaaagtttggacacctctcaaatctgaaagcagtagcagatagtggaaacttaggatttgttgaagttatacagaacaacttctattcagttttgaacatatgtacttcaaccattgatgactcccagagatggtgaaatagccacaag

SEQ ID NO: 137014 - DNA, 509 bp, Homo sapiens
gtgaagctttgatctcgggtgaaaaggtgggtaagagattggagtccgatgctccttaacttctcacccctagcctccctcccactcacaccaaagctcatcacagaactctgggactctgatgaacacattttgaaaatgtggtccaatctctgtgtggcacagaagaagaaacaggaccagaaagarcaagagactgaacagaattactcatcagttagagatggagcaaagattagaatccaaggactcatcacggacaaccaggcttttaaaaatagcatctgaaccttggctctgaaacttactggctgcttgatactaggtagatctctcagcctgtctgtgctccagtttcgtcatctataatgtggggatagtaacagtacttgccatttaggggtttctaagggctaaattgaaagaggcaatacatataaaacatttagcatagtgcccagtaatagcatgggtttaataaatatcagttattagtatgcttattattg

SEQ ID NO: 137015 - DNA, 399 bp, Homo sapiens
acttctccgtctcactcaaagactcagcaaggtcccagcttgaaagagtgcatgggcactgtcactcgtgstagagcagaaagccaaagatggtgcagagtatcataattaaacaggaggactcaagagtcaggccacttgaatttgaatcctgagtctatgacttactagctgcgtgactttaggcaagttgcttcacctttctgaacttcagttttccactgtgcaaaatgagaacagtaagagcttctttactgggttactattaaggtaatgcaactgtcttatacaggaagaaacttaatgtgtactcaataaatagtaaaagttattgtttttttaatgcagtgtgattatatgctgcccagatataaaaagaggcaaatcatagaggtgaaa

SEQ ID NO: 137016 - DNA, 394 bp, Homo sapiens
tgaactcaacaagggccatgtgatttgttttgggtcactactcggcaggtggaactaacacgtgtcacttgccagcagatttaagagccaacacatttttcactatgtcttttctcctctcgtctgccatgagatkggcaatgttccacttagaggttctcccatctgccaggtcccagagtgaagaaggcatggagcagaggcactgccaacccaccacggatgtgcaacatgaggaagaaatagacatttgctgtcagaggccatggaaccttgggggttgtttgttacggtagctaaacctagcctgttgtaactggcacagcatcttgccttaacccactctaggcccaatgggaaaacgtaatcagcagagaaggactgtgataggggc

SEQ ID NO: 137017 - DNA, 389 bp, Homo sapiens
tgtgatttgttttgggtcactactcggcaggtggaactaacacgtgtcacttgccagcagatttaagagccaacacatttttcactatgtcttttctcctctcgtctgccatgagattggcaatgttccacttagaggttctcccatctgccaggtcccagagtgaagawggcatggagcagaggcactgccaacccaccacggatgtgcaacatgaggaagaaatagacatttgctgtcagaggccatggaaccttgggggttgtttgttacggtagctaaacctagcctgttgtaactggcacagcatcttgccttaacccactctaggcccaatgggaaaacgtaatcagcagagaaggactgtgataggggcttccgaagtccca

SEQ ID NO: 137018 - DNA, 504 bp, Homo sapiens
catttctgatttgttttcatagcagccacgctcatatgtgccaggaattgtgcgagacacaataaagtgtagagctctccccacccccattcccacctccaaccctctccaggtttctcgggtctccacctgcagagccagtcataggaaatcttttctaaggcaactcgaggagtagaaaaggaggcgacacattcagcataatgaagcccrggtgttgggaggtgcccacatctggcctcctgaaaggtctcactgttgttcagatgctttcccaggaaatgggatggaggcttcttttcttcacggtccgaggggtcccaactcccctccacatctatccgggtagccagatgccatgaaagcagtgaaaactggcctaaggctgagaacatatggtcacaggtaggtctggggagcagagcgggcagaggaaagactgctggatacactgaggtgggtcatccaggaccaagaagccaggccagagagagggagcctctg

SEQ ID NO: 137019 - DNA, 504 bp, Homo sapiens
catttctgatttgttttcatagcagccacgctcatatgtgccaggaattgtgcgagacacaataaagtgtagagctctccccacccccattcccacctccaaccctctccaggtttctcgggtctccacctgcagagccagtcataggaaatcttttctaaggcaactcgaggagtagaaaaggaggcgacacattcagcataatgaagcccgggtgttgggaggtgcccacatctggcctcctgaaaggtctcactgttgttcagatgctttcccaggaaatgggatggaggcttcttttcttcacggtccgaggggtcccaactcccctccacatctatccgggtagccagatgccatgaaagcagtgaaaactggccyaaggctgagaacatatggtcacaggtaggtctggggagcagagcgggcagaggaaagactgctggatacactgaggtgggtcatccaggaccaagaagccaggccagagagagggagcctctg

SEQ ID NO: 137020 - DNA, 504 bp, Homo sapiens
catttctgatttgttttcatagcagccacgctcatatgtgccaggaattgtgcgagacacaataaagtgtagagctctccccacccccattcccacctccaaccctctccaggtttctcgggtctccacctgcagagccagtcataggaaatcttttctaaggcaactcgaggagtagaaaaggaggcgacacattcagcataatgaagcccgggtgttgggaggtgcccacatctggcctcctgaaaggtctcactgttgttcagatgctttcccaggaaatgggatggaggcttcttttcttcacggtccgaggggtcccaactcccctccacatctatccgggtagccagatgccatgaaagcagtgaaaactggcctaaggckgagaacatatggtcacaggtaggtctggggagcagagcgggcagaggaaagactgctggatacactgaggtgggtcatccaggaccaagaagccaggccagagagagggagcctctg

SEQ ID NO: 137021 - DNA, 504 bp, Homo sapiens
catttctgatttgttttcatagcagccacgctcatatgtgccaggaattgtgcgagacacaataaagtgtagagctctccccacccccattcccacctccaaccctctccaggtttctcgggtctccacctgcagagccagtcataggaaatcttttctaaggcaactcgaggagtagaaaaggaggcgacacattcagcataatgaagcccgggtgttgggaggtgcccacatctggcctcctgaaaggtctcactgttgttcagatgctttcccaggaaatgggatggaggcttcttttcttcacggtccgaggggtcccaactcccctccacatctatccgggtagccagatgccatgaaagcagtgaaaactggcctaaggctgagaasatatggtcacaggtaggtctggggagcagagcgggcagaggaaagactgctggatacactgaggtgggtcatccaggaccaagaagccaggccagagagagggagcctctg

SEQ ID NO: 137022 - DNA, 504 bp, Homo sapiens
tgggtattgtggcacacgcctgtaatcccagctatttaggaggctgaggcaggagaactgcttgaacccaggaggtggatgttgcagtgagccgagattgcaccattgcactccagcctgggcaacagagtgagcctccatctcaaaaaaaaaaaaaaaaagtttcccaaatgccagccatttgagtaccaccttgatttttatttttaccatatctacctataatctacataattactttcataatgttatttttartggacttgcccttttatttatgtagacaattctgaaatcttttttgagataggatctcactgtctcaggctggtctcaaattcctgggctcaagcgatcttcccaccttaacctcttgagtagctgagattacaggcaaacgccactgcctccggcctagataattcttttagaaagaaatctcatatcactgataaatggaaaacttgcgattactctgtaattggaagacaactttgcaaacaa

SEQ ID NO: 137023 - DNA, 513 bp, Homo sapiens
cttagggcaggtaggtagtggctaattatattgccccacattgcgggctacacataggtatgggcacatggtccagcttggcttcccatgggaccaccatctaggtgactatgataagctcaaagawgagcatgtgaattgaggtatgccagtgtgaaccccacatatctgaggcaggtctcagtcaactcagaaagtttattttgccaaagttaaggatgtgcgcctgtaacccagcctcaggaggtcctgatgacatgtgccaaggtggtcagggcaaagcttggtttaataaattttagggagacgtgagacatcaatcaatgaatgtaagatatatattggttccatccagaaaggtggaacaacttgaagcagggagggggcttccaggtcatacataggtagataagagacaaatggttgcattcttttgagtttctgtttagcctctccaaaggtggcaatcggacatacatttatctcagtgagcagggggatgactttgaattc

SEQ ID NO: 137024 - DNA, 474 bp, Homo sapiens
attcacatagggccgggcatggtggctcacacctgtaatcccagcactttgggaggccgagamgggtgaatcacgaggtcaagagatcaagaccatcctagccaacatggtgaaaccctgtctctacttaaaaaaaaaaaatacaaaaattgactgggcatggtggtgcatgcctgtagtcccagctactgggagggctgaggcaggagaatcgctttaacaggggaggcagaggttgcagtgagccaagattgtgccaacaatctggcaacagagtgagattccgtctcaaaaaaaaaaaattcccataggaacagctcttaggcagccctgactcctccaacatttgccccaaatacctcataaggactgactctgtactcctctaaattccttactacccttgccactcccatcccttctcctttccaggactaaatcagtaacgatactcgatgctaggcatatgtgcca

SEQ ID NO: 137025 - DNA, 443 bp, Homo sapiens
gtggaagttggtgccttttgaccaacctctctcaatagtttgaagaagaattttcactattgcagaaagggggatgtgagactttgcaactcacttagtcataatgtggctgcctctgttccaactatcacatccaactcacttgggaatggtttttgcaagggtcatgaaccggtgtactgcacgctgaatctggctcatagatgcattttgtttcaccagtacagcatttttaaatgcttgaattttaatgtctttagacagcatgcattttcaaawtcactacagctgtccccactctgttatcccatatctagggtgattcatacatttatgttaatgatatggtttctgtgagtatttgagatcatggtgctcaaatacagactttttatttgtttgtttgtttattttgtattgaccagaagctcagcagatcctaa

SEQ ID NO: 137026 - DNA, 475 bp, Homo sapiens
acaccagctagtgccggaacccactcccgcttacagacttgggtaattacaggtcaggacgggacaggtctttgcttgctgcaaaaagggacaggcaatgtggctagctgctaaggagggaatttcctgggttcaggcggttaggcctgaacttgtctggtagggtgtttctcacagccgagacccactggawttttccactctgactagggttgcgaaatggcaggggtttacaacatggtgcagcttggaataacaactatgtgctgggcagtagaaatgaaaagtgcctagacacatcccttggctgctcgaaatctagaggggaagagacacagacaagttgtggtctaataaaaaaaaaattggtttttggccaggcatggtggcttatgcctataatcccagcactttgggagactgaggtgggaggatcacctgaagtcaggagttcgagaccagcctggccaacatg

SEQ ID NO: 137027 - DNA, 583 bp, Homo sapiens
gatggtttatgcctaataggagaataatatggcctagtgtaaggtgagattctgaatgtcaaggactgtaatttttgttttcctttcattgaaaagtacaacaatataaaatgcacatctgcttttctatatgtattgccatatttcaaaattcagatttaaagtcaataaggtgatggcactttaatataaaggaaataaaatgttgttgttcctattaatggtcctcactggagaagttctatagttctccttggatgatttaaggaagttagactgagaataccacaaaagagcagaaacatgtttccttaaaaggtatagtcttagrctggttgcgttcttcatcatggtacaaataaaagataatttctacctatactttagtcattctacaattaacttttggcaatgaaatcccagttatatttacttttttaaaatgtcatttttttgcaatatgactgttcatgaaggaaaaaaatgtaaattaaattaaaaaaatattttgactgtcctgggtttctcttagtgtctattcatatttatatatttttaaaaagattttaaaagatcatggtaa

SEQ ID NO: 137028 - DNA, 644 bp, Homo sapiens
tttgctaatataaacaatgctgctgtgaacattcttgaacaaaaatgtgtcttttcacgcttgtgtgagaataactgtagtataaatacctgtgttcagaattgctaaatcaaagtgaatgtacatttgcagttgtgatagtgtctgcctttcagaaaggttaaaccacacaattatggggcactatatagttactgagcatatttgctgtagattgtgtgatcttttataaaaatgatacaagtgtgatcttttataaaaatgatacaagatcattgtgatttttctgaatttttttttccagaggaagtktaaaaatcccacaaaatcccagtactcagggataatacttccaaagatatttctgaattttgcatactgatatatgtatgcagttttatatgctgttctataacctgttttttagcttaataaatgttatctttaatattaccaattatagctctttaatttcaatagctgcatactcttctactgatggagttttatgttgcttccagtttttcagtatgataaaaaatgtttctgtaaacattctttctaataagtgttttcatttgttcctgattatctttagaggtggcttggtagatcaaatgacagcatggcttttcttttttctc

SEQ ID NO: 137029 - DNA, 483 bp, Homo sapiens
gcagagtggtagcctcaatgataaacatggaaaatactatagtatagcctgcctttgctggtgagtggcaattagccctggtggaactgccatcaataaaccaagtgtgatcaggatgagaaataggaaagaaggaaatatggggaaatggagtgactrtcacatggatgagagatacagtcatggggatcaggtgtggtatccggaataatgtgggaggccagattgaagtctgggccaggagcaatggtaattgtgggagactcaacaaagagggagtatagctgaaggagctgaggggcagaaagtatatgcatcaagtgtgaggaggaaaatagattttgaaagttatgagaactgtagagagtaagtggagcatagcttgtgattttgagggcctctaaaagtattaaagcagtggcagccgccacacgcagacatggctaggctaaaacagtaaggtcaagttgtttggacagaaag

SEQ ID NO: 137030 - DNA, 483 bp, Homo sapiens
gcagagtggtagcctcaatgataaacatggaaaatactatagtatagcctgcctttgctggtgagtggcaattagccctggtggaactgccatcaataaaccaagtgtgatcaggatgagaaataggaaagaaggaaatatggggaaatggagtgactgtcacatggatgagagatacagtcatggggatcaggtgtggtatccggaataatgtgggaggccagattgaagtctgggccaggagcaatggtaattgtgggagactcaacaaagagrgagtatagctgaaggagctgaggggcagaaagtatatgcatcaagtgtgaggaggaaaatagattttgaaagttatgagaactgtagagagtaagtggagcatagcttgtgattttgagggcctctaaaagtattaaagcagtggcagccgccacacgcagacatggctaggctaaaacagtaaggtcaagttgtttggacagaaag

SEQ ID NO: 137031 - DNA, 405 bp, Homo sapiens
gaaggggtctcagcttcatctagttgtaccagcaccatttattgaaaagcctactctttcccccactgaattgtcttagcacaattggctgtaaacgtaatgttttatttttggcctctcaattccattctattggtttgtatgtctatttttaatgtcttgatttttatgtcttgattactgtagttgtgtagtgagtttkgtgataagtgtgaatcctccaatggtttttctttctcaagattattttggctatttgaagttctttacatatccatatgaattttaggatccgcttgtcaatttatgcaaagaaggcaactgaaattttgatagaaattgcattcgatctatcactaacttgatttaaacttttaactatttataaatatgatatgtagatct

SEQ ID NO: 137032 - DNA, 551 bp, Homo sapiens
tgtaaacaaccactcatacctacataatgaaactgccaaatgacaaagttcacggagctttcatgtaggtgaacatctcgaggtaacgggacggtggtatgctaggaggtttatgtgcctggagagggaatgacggctctgcatccccttcccttctttgccctatgcatctcttacatttggttgttcctgagtttcatcctttataataaactagtaatggtaagtaaagtgcctttctgagtaatgcgagctattctagtgaactgccaaacctgagcagcgagttgygggaatgtccgatttatagatggtcagtcagaagtacaggtcgcccggaacttgtgttggtgtctgacgtgggggtagtcttctgggactaagctttttaacctgtaggaactgactataactccaggtagatagcatcagaattgaatagaattattggacacccagctgatgtcagagagttggagaagtagtacacctccctaatttagtctttatatgccagccagaatgctcttttgataatagaagttaggtta

SEQ ID NO: 137033 - DNA, 551 bp, Homo sapiens
tgtaaacaaccactcatacctacataatgaaactgccaaatgacaaagttcacggagctttcatgtaggtgaacatctcgaggtaacgggacggtggtatgctaggaggtttatgtgcctggagagggaatgacggctctgcatccccttcccttctttgccctatgcatctcttacatttggttgttcctgagtttcatcctttataataaactagtaatggtaagtaaagtgcctttctgagtaatgcgagctattctagtgaactgccaaacctgagcagcgagttgcgggaatgtccgatttatagatggtcagtcagaagtacaggtcgccckgaacttgtgttggtgtctgacgtgggggtagtcttctgggactaagctttttaacctgtaggaactgactataactccaggtagatagcatcagaattgaatagaattattggacacccagctgatgtcagagagttggagaagtagtacacctccctaatttagtctttatatgccagccagaatgctcttttgataatagaagttaggtta

SEQ ID NO: 137034 - DNA, 477 bp, Homo sapiens
agggtttgtttgaatgggtgaaagaatatgagaataatttgtaggtttccgtcgtaatcggtagagaggatattagtatcattgaccaaggcagagaagattgaggaggaaagattgattgactgattgattgaytgattgatccatctgtctgtccatctgtccatttaccctgtgcttattgagtacctattatggcccaggtactattcgcttgacccagtaagcaaactttggtcaacagagggaatgactgtaccaagcccagtttgatatctatcactcatattagttcttgtggcccagcctctattggaatcatgtcagaatagtgtgcagagtcaggggtgctacaaacctagagaagggagtgctgtttggaaacaactcacagactgaattgagtctgtatccatcatctcagatggggatgagcttgtctcctaaaaaaaaatctcctaaagtcatgatacgcct

SEQ ID NO: 137035 - DNA, 438 bp, Homo sapiens
aatttctaagcctaaaataaaccaaatgaactcaattactttttttaaaccataaataaaatgtcatgttacagaggtgagataaattctgacaatgtcttaagcctggtgaaaactcttcaaaaattctaaaagttccaaagtcataagtcattttaaaattacgatgagtttgaggattgccaagggccatgagtctgtgtgagctgagaattgtaccagataatataacatttaattagttccaggaagttctgaactcaaaaagaacattcaggtcagaaagaagggagtagttactaatccctagggaaagaaaaagttgagactgacattttttttcaggctttctaaaattaaccagctttcccagagtcagcacaggygttattgtacttggaggttaaggtgctaagtctcctattcatcacggcatct

SEQ ID NO: 137036 - DNA, 644 bp, Homo sapiens
acccttgcatagctctcccgggttcctcgctctgcctcaggttgggatgtaaaatacagaagaaaaacccaagagtagaaccttacttttccttttacttgcagaggggacagaaagagaaacaaaacaggttctttcatattcttgattaggcattttcttgcctaaaagtggtatgttctgccttcctaaataattttgctttattttaaatctaaagtatacaaggaagtccctatcacccttgacttgatattgtgtagtaaagagagttcataatagctaacagcctgaactttggagagggaaccacctgtatcctgactgccactcgctggccgagtgatcacaggccagcaacagaccagtgttggatcagtttcttcaaatgaacaaaaacaacccactttataatatagtggagaggactaagtgaaagaamgtatgttattcttcaagcacaatgacttgatttttgaccagattcctataagctggagcccagaaaggtctcaggtagggatctctggataatattttgcctggaagaacattccagccaatagcacgctatgaaacttctataatgattcattactggtcagcacgttcttccaacactcagcacatgttcctatcctgac

SEQ ID NO: 137037 - DNA, 644 bp, Homo sapiens
acccttgcatagctctcccgggttcctcgctctgcctcaggttgggatgtaaaatacagaagaaaaacccaagagtagaaccttacttttccttttacttgcagaggggacagaaagagaaacaaaacaggttctttcatattcttgattaggcattttcttgcctaaaagtggtatgttctgccttcctaaataattttgctttattttaaatctaaagtatacaaggaagtccctatcacccttgacttgatattgtgtagtaaagagagttcataatagctaacagcctgaactttggagagggaaccacctgtatcctgactgccactcgctggccgagtgatcacaggccagcaacagaccagtgttggatcagtttcttcaaatgaacaaaaacaacccactttataatatagtggagaggactaagtgaaagaaagtatgttattcttcaagcacaatgacttgatttytgaccagattcctataagctggagcccagaaaggtctcaggtagggatctctggataatattttgcctggaagaacattccagccaatagcacgctatgaaacttctataatgattcattactggtcagcacgttcttccaacactcagcacatgttcctatcctgac

SEQ ID NO: 137038 - DNA, 414 bp, Homo sapiens
cacagtgcctatagttcacactattgtattgtgcacttgaacatgcagatctcaagttaggggttctttccacaaaagcagggaagggacaggaagaaacttttggaggtgatggatatgtttccttctttgattgtggtgattctttcacaggtatatgcatgtgttcaaaaccatcagattctatacattaagtataaacagtttttatataatcattatacttcagtaaagctgttagattttttaaaccataaataaaactaataaggtctctcatgtgaaaacaggggaagaatatttgacatgaagccactatgtgaactgtctgaaatctcatgtctgctactcaactaccctaccagagtcagactcccaggatccayagagagctttctgcctcctccttcaaat

SEQ ID NO: 137039 - DNA, 571 bp, Homo sapiens
tcctctccctggaatgctcttcgtccagatcttcatatggcaggtttcctttgtcatttgggcttcatttcaacagtcatctcgcaggccttccttgagcacccaaatctatgytgttccttctacccttcagtcactatcacatatatcatgttaccaggtgtttttttcaacatggctaaattatcttttcttcttcttaatttttggtttcctccattagaatgtaaactcttgaagtcgggggccttgtctgcctagctcttttttttttttttttttttttttgagacagagtcttgtactgtctcccaggctggagtgcaatggcatgatctcggctcacttcaacctccccctcccaggttcaagcaattctcctgccttagcctcccgagtagctgggattacaggtgcccaccaccacgcccagctaattttttgtatttttaatagagatggggtttcactatgttggccaggctggtctcgaactactgacctcgtgatctgcctgcctcggcctcccaaagtactgggattacaggcatgagccaccgagcccagcctc

SEQ ID NO: 137040 - DNA, 602 bp, Homo sapiens
tttagaactactttaaaacaaaaccatgtacaagcctatccatattctttcagtttcattgtggctggatactatgttgccttgaattttacctgttacttgcccagcttctggatttccagtatcagaacattagaggttcatattttccatacaaaaatagaaaaagtcataatggcgtgaaagtccctgggagattcaccctttcttctagtgtggtgtctcagcaagttcccaggcatatcacaggatgggaaggatggggaaatactcacctagggcacttacaaggagataagaatgggagggcagagggagttggtcaccacgcttgaacaaagggagaaaaatawgtacacctctcatgagtcatcagtgaaagtatccagcatgctcagggggcctcctgaactttgaaacttggatttaatccagacatgaaatatggaaagtcactctttatgcaatgctttcatcaccacctccgttttgcctctctttcatctcagttaagagatacaagacaggttcttgtaatgactgcctgtgattgccatgctaacaaaactatttacatggaaattaggaatcccatgtagaat

SEQ ID NO: 137041 - DNA, 562 bp, Homo sapiens
ggtcttcttatttaagttatcatatgaccttggaccccaaaactacttctttatccataaattgtaatagaaacatcctcccttttttcttttcccaaataatgtgacattcagtctttcactggtcatgaaacatttttgaaatatgccaagtgttatataaatgtaaggtagtattatccattgctaatcctgttttaaggactttcatgygttcagaggttttactaagtgttatcatgtcatattttctcagtggctctgtttcagtaaaaaagcactagatctaaatgtaactgaattaattaaagcttggtttttgcttgtttggttagtagaatttacccatattatatctgtgcacacgttctctgtgcctatcctcttttccatctgcttcatatcccttggacttcacaaaagaaaggatggaaatgataaaaagaggccacagacaagtttattgggatttttttggtggtggggggaggtgacaaattttcaaaatctccaatcctgtttcagtttctcctagaaacagctggaaaaatgacaaccctat

SEQ ID NO: 137042 - DNA, 644 bp, Homo sapiens
acccttgcatagctctcccgggttcctcgctctgcctcaggttgggatgtaaaatacagaagaaaaacccaagagtagaaccttacttttccttttacttgcagaggggacagaaagagaaacaaaacaggttctttcatattcttgattaggcattttcttgcctaaaagtggtatgttctgccttcctaaataattttgctttattttaaatctaaagtatacaaggaagtccctatcacccttgacttgatattgtgtagtaaagagagttcataatagctaacagcctgaactttggagagggaaccacctgtatcctgactgccactcgctggccgagtgatcacaggccagcaacagaccagtrttggatcagtttcttcaaatgaacaaaaacaacccactttataatatagtggagaggactaagtgaaagaaagtatgttattcttcaagcacaatgacttgatttttgaccagattcctataagctggagcccagaaaggtctcaggtagggatctctggataatattttgcctggaagaacattccagccaatagcacgctatgaaacttctataatgattcattactggtcagcacgttcttccaacactcagcacatgttcctatcctgac

SEQ ID NO: 137043 - DNA, 587 bp, Homo sapiens
gagcatttaaaataatatggtcctcattttaattacatcatttatttctactactcagcagcacacatataaacaaggggaagaaaggggagcaactgccctgagtgggctcaaccatacacaaattggtcaatggcaaacacatttaagcagaatgttgggggagggggccggtggtatttccttggattttaggcacttkgggcaagaatctaaccaggaaccaagataaaaatattaagagttggaaaaggagctaagtttatgtttctacatcacttttcttcaagttactcaaagtgtttggttcaaaataccagaagatttggtgacatgggtgaaaggatatttcagatgctaaaaatgaaatacttgaaaataatgtagtttattcatagagtgaagaactaacaagaatatgtctttttcaccaaaaaaacccctcacattcctcctccctcttctagtccctggatgattctatttaaacatttgtaaattttaaacattttataaacagttttaaatactggtgcaggattgagttgctagttactttgtaactagtaaacatttggccacatttt

SEQ ID NO: 137044 - DNA, 612 bp, Homo sapiens
tgaaattgttgaatcccattgtctatgttgaatcccatcttgccaactgttgtgacagcttgatgaccaaaactaatgaatgtggaatattggagggggagttggagtacgaagtagcggttctggcctctgaaatgttgccccatttgaagtgtttattgtctagaattgcaattttcctccacaaaataatstttcaatagtttgtaatgaaacacatcaccatgtgttatttggtcaaagtagactgtaataatttgagtttattttgatgtaaggtaaaaaaaaaatgccctttggctttgattgctgatagtgttttcctctttcttttgtagtcatgtggtcaagacatttgtaggacagaggaagagaagaaagtgtcacattgtattgtttctttcctgttgcctgagatgaagattgcagttatttggttgtagctataaatgacaatgagttgagtaggtttgtctttaagaattaaatcttaatttttttctttcttgtggatgataagctactgattttctgtagttgtgctaatacttatttagaggaatatacaaattttaaaaaacttgctttgtttgtattttagtttccttttgc

SEQ ID NO: 137045 - DNA, 612 bp, Homo sapiens
tgaaattgttgaatcccattgtctatgttgaatcccatcttgccaactgttgtgacagcttgatgaccaaaactaatgaatgtggaatattggagggggagttggagtacgaagtagcggttctggcctctgaaatgttgccccatttgaagtgtttattgtctagaattgcaattttcctccacaaaataatctttcaatagtttgtaatgaaacacatcaccatgtgttatttggtcaaagtagactgtaataatttgagtttattttgatgtaaggtaaaaaaaaaatgccctttggctttgattgctgatagtgttttcctctttcttttgtagtcatgtggwcaagacatttgtaggacagaggaagagaagaaagtgtcacattgtattgtttctttcctgttgcctgagatgaagattgcagttatttggttgtagctataaatgacaatgagttgagtaggtttgtctttaagaattaaatcttaatttttttctttcttgtggatgataagctactgattttctgtagttgtgctaatacttatttagaggaatatacaaattttaaaaaacttgctttgtttgtattttagtttccttttgc

SEQ ID NO: 137046 - DNA, 470 bp, Homo sapiens
gaaaagtacacaaatcagctaattaccacaaaggagacataagcatgcaacttcccaatctacaaggcttctggagggggtgtgtcagtttgaatccccgaccaaactctcaaaacacaattaggcttatgcagcaccaaatttatttagcttaaaaaaaagatgcagatcaaggactaactgcagcatcatcacagagacttcaggtgttcagatgcagcttctgatgccccaaatcaccatacatagttgcagtttggttacaaatttgatgaaaggctgacasaaatggattatatcagcataagaaagcaaccaagcctgggaccttgaacttaaataccttgttgtgtatccccattcttttgcctttaaattataagttatacagtgaacagtctaatggccattcatacaccagtgttcaatatatagcaggccctgagaaaccttttctatcttcagagttg

SEQ ID NO: 137047 - DNA, 561 bp, Homo sapiens
taatttacatctgtttttaaatttcattttctaatgattgctggcataggaaagcaattcttttttttacagacaggatcttgctatgttgtccaggctggtctcaaattctgaggctcaagtgatcctcccacctkggcctttcaaagtgctgggaatgcatgcttgagccacggcgccggtcctaattttggatatattggaccttgaaagcagaaatgttcaacatatttttatatatgtaattatgtcatttacaaataacagtatggtttcctccactcttattcttttgacctttttttccttttttcttcccttattacactgatcataacctccaggtagtatttaatacaagtagcattagggggtattactataacattcctgatgtttcaaggaaaacttttaacattttctatcaagtataatttgctgtaggtttctgtgtgtgcatgctttcttcttgacaaatgaagaaatctactttgttctcagctttctattagttatttttaaaactagtgtgaatgagtgtttaattttattaaatgcttt

SEQ ID NO: 137048 - DNA, 561 bp, Homo sapiens
taatttacatctgtttttaaatttcattttctaatgattgctggcataggaaagcaattcttttttttacagacaggatcttgctatgttgtccaggctggtctcaaattctgaggctcaagtgatcctcccacctgggcctttcaaagtgctgggaatgcatgcttgagccacggcgccggtcctaattttkgatatattggaccttgaaagcagaaatgttcaacatatttttatatatgtaattatgtcatttacaaataacagtatggtttcctccactcttattcttttgacctttttttccttttttcttcccttattacactgatcataacctccaggtagtatttaatacaagtagcattagggggtattactataacattcctgatgtttcaaggaaaacttttaacattttctatcaagtataatttgctgtaggtttctgtgtgtgcatgctttcttcttgacaaatgaagaaatctactttgttctcagctttctattagttatttttaaaactagtgtgaatgagtgtttaattttattaaatgcttt

SEQ ID NO: 137049 - DNA, 561 bp, Homo sapiens
taatttacatctgtttttaaatttcattttctaatgattgctggcataggaaagcaattcttttttttacagacaggatcttgctatgttgtccaggctggtctcaaattctgaggctcaagtgatcctcccacctgggcctttcaaagtgctgggaatgcatgcttgagccacggcgccggtcctaattttggatatattggaccttgaaagcagaaatgttcaacatatttttatatatgtaattatgtcatttacaaataacagtatkgtttcctccactcttattcttttgacctttttttccttttttcttcccttattacactgatcataacctccaggtagtatttaatacaagtagcattagggggtattactataacattcctgatgtttcaaggaaaacttttaacattttctatcaagtataatttgctgtaggtttctgtgtgtgcatgctttcttcttgacaaatgaagaaatctactttgttctcagctttctattagttatttttaaaactagtgtgaatgagtgtttaattttattaaatgcttt

SEQ ID NO: 137050 - DNA, 561 bp, Homo sapiens
taatttacatctgtttttaaatttcattttctaatgattgctggcataggaaagcaattcttttttttacagacaggatcttgctatgttgtccaggctggtctcaaattctgaggctcaagtgatcctcccacctgggcctttcaaagtgctgggaatgcatgcttgagccacggcgccggtcctaattttggatatattggaccttgaaagcagaaatgttcaacatatttttatatatgtaattatgtcatttacaaataacagtatggtttcctccactcttattcttttgacctttttttccttttttcttcccttattacactgatcataacctccaggtagtatttaatacaagtagcattagkgggtattactataacattcctgatgtttcaaggaaaacttttaacattttctatcaagtataatttgctgtaggtttctgtgtgtgcatgctttcttcttgacaaatgaagaaatctactttgttctcagctttctattagttatttttaaaactagtgtgaatgagtgtttaattttattaaatgcttt

SEQ ID NO: 137051 - DNA, 599 bp, Homo sapiens
atatttaatgactgttccactggatttcagacttgcatggggcctgtcccccttttttggccactttctccctttggaatgggaacatttatcccatggctgtactcccattgtatcttggaagtaactaacttgttttttattttacagggtcatagatggaaggggctgccttgtctcagatgagactttggacttggacttttgggttaatgctggaatgagttaagacttgaggaattgttgggaaggwatgattggttttgaaaacttgccttgtcttggatgagactttgccttggacttttcagttattgttggaatgagttaagactttggtgtatgttgagaaggcataattcattttgaaatgtataaaatacatgagatttgggaggggccaggggcagaatgatatggtttggctctgtgtccccagacaaatctcatcttgaattttaatccccatgtgtaagggagggacctgtaatcccccacgtgttggtggagagaggtgatcggatcatgggggcagtttcccccctactgttctcgtgatagtgagtgagttctcacaagatctgatcgttttataagta

SEQ ID NO: 137052 - DNA, 599 bp, Homo sapiens
atatttaatgactgttccactggatttcagacttgcatggggcctgtcccccttttttggccactttctccctttggaatgggaacatttatcccatggctgtactcccattgtatcttggaagtaactaacttgttttttattttacagggtcatagatggaaggggctgccttgtctcagatgagactttggacttggacttttgggttaatgctggaatgagttaagacttgaggaattgttgggaaggaawgattggttttgaaaacttgccttgtcttggatgagactttgccttggacttttcagttattgttggaatgagttaagactttggtgtatgttgagaaggcataattcattttgaaatgtataaaatacatgagatttgggaggggccaggggcagaatgatatggtttggctctgtgtccccagacaaatctcatcttgaattttaatccccatgtgtaagggagggacctgtaatcccccacgtgttggtggagagaggtgatcggatcatgggggcagtttcccccctactgttctcgtgatagtgagtgagttctcacaagatctgatcgttttataagta

SEQ ID NO: 137053 - DNA, 599 bp, Homo sapiens
atatttaatgactgttccactggatttcagacttgcatggggcctgtcccccttttttggccactttctccctttggaatgggaacatttatcccatggctgtactcccattgtatcttggaagtaactaacttgttttttattttacagggtcatagatggaaggggctgccttgtctcagatgagactttggacttggacttttgggttaatgctggaatgagttaagacttgaggaattgttgggaaggaatgattggttttgaaaacttgccttgtcttggatgagactttgccttggacttttcagttattgttggaatgagttaagactttggtgtatgttgagaaggcataattcattttgaaatgtataaaatacatgagatttgggaggggccaggggcagaatgatatggtttggctctgtgtccccagacaaatctcatcttgaattttaatccccatgtgtaagggagggacctgtaatcccccacgtgttggtggagrgaggtgatcggatcatgggggcagtttcccccctactgttctcgtgatagtgagtgagttctcacaagatctgatcgttttataagta

SEQ ID NO: 137054 - DNA, 619 bp, Homo sapiens
caaccttcctttcctgcatgttgcaaaaaaacataatctctttattcaaggctaattccttccttagtgtttttgaatcccttccttcctattttctactgttgcctaagttatttaccttctagtgtgctttaaaaagtttttctgtttactttgttttcattaatgtcagtaatatctgaacaaatgttctctgaaaactcaaatgaaagtaaagatcttctttgaccagtctgacattttcacttctttccagaggtaactgacattatattttttaatatcctctgtcataagttttccatgaatttgtgcatatgaatatgcatgcaaagayatgtacaggtttatgctttagatatgtgggctaattatttattttccaactatttataaaagaaaactttaatagtattcgttggagagctttccatgactgtgtatagatctatttcattctttgtacttttgataagaactgctttttaaaaatctgtcccctattgatggtcctttagtttctttgtaacttttgatataatttcaaacttgcaggaaagtggtaggaaaaatataaagaatttttgtatacctttcacctaaattcactgatggttaa

SEQ ID NO: 137055 - DNA, 625 bp, Homo sapiens
caattcagctactgatacttgtgtatgcttcacgaagttctcatgctgtgtttttcagctctatcagattatttatgttcctctctaaactgattattatagttagcagctcctctaactttttatcaagtttcttaagttctttgcattgggttacaacatgctcctttacctcagcagagttttttattacccatcttctgaaacttacttctatcaattcatccatctcatgctccttccagttctgcatccttgctagagaggcactgcaatcatttggaggagaagaggcagtctggccttttgggttttcagcatttaatcattgattctttctcagcttcatgagtttgtctagttttgatctttgaggctgctgctttggatgggctttttgtggggacttttttttgttgatgctsttatgctttgtttttctttcaagggtcaggtctctgttctgtaggactgctatggtttgctgggggttcacttcaggccctgttcatctggttcgctactgtgcctggagatgtcactcaaggaagctggagaacagcaaagatgggtgcctcctccttctgggatctctgacctcaagtaacaccaacctgatgccagt

SEQ ID NO: 137056 - DNA, 575 bp, Homo sapiens
acagaaaaatcaattgtattctatatatcagcaaaaataattataaattaaaaatgtttaaaagatataatttacaatagcataaaaaatcaaatatctaggagtaaatttaatagaagatataaaagactcttacagagaaatttattataaagatattttaaaagaccaaaacaaagggatatattataytcatagatcagatgattccataatgtaaagatgtcatttctcatctatttgatctataaagtcagtataatccctttcaatcttccagcagatctttcggggacattgaaaagatagcttaaacatttttaaagaactgcaaaaggccaagaatgccaagacgattttaaaggaaaaaatgttaagatatttcactttctgatctcaaaacttattacaaaggtagaatgagtaacaacagcgtgacactgccaaaggtatagaaaccaaaggaacagaagagagaggcctgaagcagatacttatttttggacatttgctttataacacatgtagccttgaggagaagtagggaaaatgaatactttttcaatagatggtat

SEQ ID NO: 137057 - DNA, 575 bp, Homo sapiens
acagaaaaatcaattgtattctatatatcagcaaaaataattataaattaaaaatgtttaaaagatataatttacaatagcataaaaaatcaaatatctaggagtaaatttaatagaagatataaaagactcttacagagaaatttattataaagatattttaaaagaccaaaacaaagggatatattatattcatagatcagatgattccrtaatgtaaagatgtcatttctcatctatttgatctataaagtcagtataatccctttcaatcttccagcagatctttcggggacattgaaaagatagcttaaacatttttaaagaactgcaaaaggccaagaatgccaagacgattttaaaggaaaaaatgttaagatatttcactttctgatctcaaaacttattacaaaggtagaatgagtaacaacagcgtgacactgccaaaggtatagaaaccaaaggaacagaagagagaggcctgaagcagatacttatttttggacatttgctttataacacatgtagccttgaggagaagtagggaaaatgaatactttttcaatagatggtat

SEQ ID NO: 137058 - DNA, 597 bp, Homo sapiens
aatataatctcagtcagtttgacgtatcttaggattcaaccagagtcatgttttagtttcaggggccttcagggataagtcctccggcatgtgcgtttgcttcttggagtaatgatctaaactggaacctgttgaactggccacatttttgtctgggttttcttttcttttcttttcttttcttttctttttttttttgagatggagtttcgctyttgttgccaggctggagtacaatggtgtgatctcagcccactccacttcccgggatcaaacagttctcctgcctcagcctcccaagtagctgggattacaggcatctaccacctctcctggctaattttttgtatttttagtagagatgggatttcaccaggttggccaggctggtctctgtaggagattggtcaggatggtgggaaaaattatagggaaagatgcaaaccttctgggaaggaccagctaatttagctgccttcagctaaattctcttcagagcaaagggtagataacaagggaatgtaaaggaacttatgtagataaatttgtttacttaagtctccagaaacctaccttcaatcatttgtgtgcaggact

SEQ ID NO: 137059 - DNA, 482 bp, Homo sapiens
tattttctcaaatcagatattgaaaattttatctttagaagtatgatttagatctttaaaaaatcttctatgtccctacttgaatatatggwatacagttataaatgctttcatgtccttgtctgataattctaacatctgtgtccattctgggtcagttttgattgatcattctcattatggatcacattttcttgcttctttgcatgacttttttatgatattctggacattttaaattgtcttgctggatactatatatttttgtattcctatcaatattcatggactttgttctgtgatgcagttaacttagtaggaaacaattggatcctttttagtcttaattttaagatttgttatgcaagacctgagtagtgcttagtctagggcttattttcgattgctgaggcaagatccttctgtgtatctatttaatcaattgtgaagttttaaaaatctgtctgtgggaacatgctcta

SEQ ID NO: 137060 - DNA, 498 bp, Homo sapiens
tactagaaaaaaacataggtcagttatatacttttaacttggggaaaagctttcaacatatggcatcgaaaagttraaaccacacagaaaagaggatagattgaaaatataaagatttaaaagtaaaccacgaaaccactaaagttaaaaggataaaagttttaaaaaaagtaaaaaggacaaattgggggatattcaatagccttgatatagaaatgactcatacatacaaacaagaaaaagaaaatgccttatagaacaaaaataagatatttgcaaaaggagatattcaaaagtttcccccaaaaaacaacagatgaaaaatgttcaaactcactagtaatctaaacaaattaaaataggtagctatcattctttacttaccagatcaaacaaagatttaaaaagaatacagtaatgccagcgttagtgaaggactagaagaacagactcttaagtactacctgtatatgagtggtttagaagaccaatttgtaa

SEQ ID NO: 137061 - DNA, 627 bp, Homo sapiens
ccatgctttgcatcatcagatcagcttgaggaaagaatgtatgagagcataaacagggaccratatgggcaaggggaaggcatatttgtttcctgtttgcagatgatatttggaaacaaaacaaatattcctgtttatcattgactacttaggagaggtatatttgtttattgtttatatacatttttattttggaataattttagatttacaaaaaagttccaaagataatgcagagaaacactgtacctttcatccaatttccctttacataggaagtgtcatacatatgtcaaaaccaagaaatcaacattggtaacattactactaactaaattccagcttttatattgcatttgtttttttctatctgcagctttaaatctcagtaggaagaattgtataaaacaataagatatcaaagcaattttaaacagataacctctatcttgtagagagtagggatagagatgaaagatagcatgaggcaaagtggtgatattaatccagcaacttacttttcctaccatggatttttagatgaactttgatcattctgatgcagatcaaagggtacctcctctgcgaagacttccctggtctgacaccaaaaatgctgatattgga

SEQ ID NO: 137062 - DNA, 627 bp, Homo sapiens
ccatgctttgcatcatcagatcagcttgaggaaagaatgtatgagagcataaacagggaccgatatgggcaaggggaaggcatatttgtttcctgtttgcaratgatatttggaaacaaaacaaatattcctgtttatcattgactacttaggagaggtatatttgtttattgtttatatacatttttattttggaataattttagatttacaaaaaagttccaaagataatgcagagaaacactgtacctttcatccaatttccctttacataggaagtgtcatacatatgtcaaaaccaagaaatcaacattggtaacattactactaactaaattccagcttttatattgcatttgtttttttctatctgcagctttaaatctcagtaggaagaattgtataaaacaataagatatcaaagcaattttaaacagataacctctatcttgtagagagtagggatagagatgaaagatagcatgaggcaaagtggtgatattaatccagcaacttacttttcctaccatggatttttagatgaactttgatcattctgatgcagatcaaagggtacctcctctgcgaagacttccctggtctgacaccaaaaatgctgatattgga

SEQ ID NO: 137063 - DNA, 623 bp, Homo sapiens
gattaattaaggcttgaacagatgtgaagtgtgcagaatgcactattttctgttagtaattaaagagggtatgtgtgtacgtgagagagaaagaaaaatagagacaatccgagacaaagcagtcagacgtgcttggcacyggacatgtgacattttcttcagtagaactaactgctgataactctgctgacactactctattttctcctccacccatgccagacagaataattgcttgaaatgggccaagcagtccaacctttctttcttttttggtctgatttatgataggcccaggaatatacaaaaacatgttcttggatcagtgggttcaaacgacccatctctctgaacactcgaaagtcaaactggactgtgtaaatggtttttaagctgcctggcaggaaggccaagtttgcagactggagctctattagttgtccagccccctggtagtattgtcatcagcgaattgatagccaagagagacactggctgcgcaactgccaaggagaaattgtcatgggaatgcctttaagactggaaagtgaatgaaacatcagtctggtttgagtttaatttggagaatatttgtttcagtttgaactaaatcttttgctttt

SEQ ID NO: 137064 - DNA, 623 bp, Homo sapiens
gattaattaaggcttgaacagatgtgaagtgtgcagaatgcactattttctgttagtaattaaagagggtatgtgtgtacgtgagagagaaagaaaaatagagacaatccgagacaaagcagtcagacgtgcttggcactggacatgtgacattttcttcagtagaactaactgctgataactctgctgacactactctattttctcctccacccatgccagacagaataattgcttgaaatgggccaagcagtccaacctttctttcttttttggtctgatttatgataggcccaggaatatacaaaaacatgttcttggatcagtgrgttcaaacgacccatctctctgaacactcgaaagtcaaactggactgtgtaaatggtttttaagctgcctggcaggaaggccaagtttgcagactggagctctattagttgtccagccccctggtagtattgtcatcagcgaattgatagccaagagagacactggctgcgcaactgccaaggagaaattgtcatgggaatgcctttaagactggaaagtgaatgaaacatcagtctggtttgagtttaatttggagaatatttgtttcagtttgaactaaatcttttgctttt

SEQ ID NO: 137065 - DNA, 620 bp, Homo sapiens
gctacccaagtatgcaaatcacctaacagcttagttctgtcaacctaaataacagggagtggctctctaatagaaaaagatatttatttgggaatagagcagtttcatgggaatatgtgtggtacagcaaatgacatgcatattcaggcaggtaaaggaagacaaaggtttttaaaggaaaaaaataaggagggttgcgcaattgttttaaaataattatctttggctgcaaagatcaataacaarggtgacaccagtctgaggctggacgggcagttgatgagcagatgtccttgcagaagtatttttttttgtgtgtgtaaggttgtgatggctgttggtcaaggctgtggtttgtgcagtctttttgtgataatttttgttatcaggcataaaagcatgagaaccctcttttcatgaccttccccagctctatttgtcagtgtttttttcccttctcacattagtgactccattttgattttgataactttcacagttcccagaggaaactatcaaccaggcaaaagaaacaagcatgttatgtacctaaagagagagatgaaagaaagaggaagctgatgcccacggttcaactaaaaaggaaaatgtattaggtg

SEQ ID NO: 137066 - DNA, 383 bp, Homo sapiens
ggctcctggcattggggaatgctctagatcccttgagatgcatgcagggccatgaggcactggtccttgtggtaaggtgggacagcctggaggtaaggatggaggagagagagtacatggtgtgcaggagccttcttkggggatgcaggctgcctcctgcagtacacttgggagtttttgcaggcagttcatgtagaaatgaacttcaagggaagcctttcaaggtaaaaagaaattcagtttgctgtctgttatggtttgggtctgtgttcctgcccaaatctcatgtcaaattgtaatccccaatattggaggtggagcctggtgggaggtgattagatcacggaggcagaaatcccctttggtgctgttctcatgacagt

SEQ ID NO: 137067 - DNA, 383 bp, Homo sapiens
ggctcctggcattggggaatgctctagatcccttgagatgcatgcagggccatgaggcactggtccttgtggtaaggtgggacagcctggaggtaaggatggaggagagagagtacatggtgtgcaggagccttctttggggatgcaggctgcctcctgcagtacacwtgggagtttttgcaggcagttcatgtagaaatgaacttcaagggaagcctttcaaggtaaaaagaaattcagtttgctgtctgttatggtttgggtctgtgttcctgcccaaatctcatgtcaaattgtaatccccaatattggaggtggagcctggtgggaggtgattagatcacggaggcagaaatcccctttggtgctgttctcatgacagt

SEQ ID NO: 137068 - DNA, 383 bp, Homo sapiens
ggctcctggcattggggaatgctctagatcccttgagatgcatgcagggccatgaggcactggtccttgtggtaaggtgggacagcctggaggtaaggatggaggagagagagtacatggtgtgcaggagccttctttggggatgcaggctgcctcctgcagtacacttgggagtttttgcaggcagttcatgtagaaatgaacttcaagggaagcctttcaaggtaaaaagaaattcagtttgctgtctgttatggtttgggtctgtgttcctgcccaaatctcatgtcaaattgtaatccccaatattggaggtggagcctggtgggaggtgattrgatcacggaggcagaaatcccctttggtgctgttctcatgacagt

SEQ ID NO: 137069 - DNA, 576 bp, Homo sapiens
tcagtaatgtttaccaaaagaggcaatgcagaatctattaaaaatgagagatctcccccaagagatttctgggctgcaccctggttgattctgataatcatccagactagggagccactggcctatgtaaaaatctctgcatccccaacaacctagttggggattaatcctatagacagtgagtacttgaaaattagaacatctgaccttcttaatctttcctggaaggaaggagactaaaatgaagtgagccagtggtgtgcatacrctgttctgcaaggtgataacatctagggaccggagaaagagcctttatccttttacaggaggctgtaagacaatagaaaccaagcttgttaaccaataaatagacgagaagccttgggacaaaggccttctttttggtaaaaatcagaagtgagcaggaaggactcaccctgaaattctcaaacgtggagaattggagaatgagttgtctcagggtgcacatagctggacggtagtctccatcttagggcagatggtaacagtccttctctcttcatgcggctcctatatgccgagtgcaggcacttc

SEQ ID NO: 137070 - DNA, 576 bp, Homo sapiens
tcagtaatgtttaccaaaagaggcaatgcagaatctattaaaaatgagagatctcccccaagagatttctgggctgcaccctggttgattctgataatcatccagactagggagccactggcctatgtaaaaatctctgcatccccaacaacctagttggggattaatcctatagacagtgagtacttgaaaattagaacatctgaccttcttaatctttcctggaaggaaggagactaaaatgaagtgagccagtggtgtgcatacactgttctgcaaggtgataacatctagggaccggagaaagagcctttatccttttacaggaggctgtaagayaatagaaaccaagcttgttaaccaataaatagacgagaagccttgggacaaaggccttctttttggtaaaaatcagaagtgagcaggaaggactcaccctgaaattctcaaacgtggagaattggagaatgagttgtctcagggtgcacatagctggacggtagtctccatcttagggcagatggtaacagtccttctctcttcatgcggctcctatatgccgagtgcaggcacttc

SEQ ID NO: 137071 - DNA, 576 bp, Homo sapiens
tcagtaatgtttaccaaaagaggcaatgcagaatctattaaaaatgagagatctcccccaagagatttctgggctgcaccctggttgattctgataatcatccagactagggagccactggcctatgtaaaaatctctgcatccccaacaacctagttggggattaatcctatagacagtgagtacttgaaaattagaacatctgaccttcttaatctttcctggaaggaaggagactaaaatgaagtgagccagtggtgtgcatacactgttctgcaaggtgataacatctagggaccggagaaagagcctttatccttttacaggaggctgtaagacaatagaaaccaagcttgttaaccaataaatagacgagaagccttgggacaaaggccttctttttggtaaaaatcagaagtgagcaggaaggactcaccctgaaattctcaaacgtggagaattggagartgagttgtctcagggtgcacatagctggacggtagtctccatcttagggcagatggtaacagtccttctctcttcatgcggctcctatatgccgagtgcaggcacttc

SEQ ID NO: 137072 - DNA, 620 bp, Homo sapiens
atgattggtataactttataataaagccttgaaatcaggtagtgtttgttctccaacttcattctttctcaaagttgtttaggttattttaagtcctttgtatttctatgcaaatttgagagtcagtttgttaatttttattaaaaatastactgggattttgatttggattatgttgaatctatagaccaatttggggagcactgatatgctaatattaggttggtggaaaagcaactgcaccttttgctattacttttaatgatatgtcttttcatttatttagatcctttaaaatttaccttagcaatattttgtagttttttgtgtttaggttattcacatcttttgttggatttatttccaagtatttcatatttttgatgctattttaagtggtaaagtttttaaattttgatgtctgatttttcatttttaatataaagaaatacaattgcttttttgtatgttgttcttatctctaaccttgttaaatgcacttgttagttcaagtaggtcttgtgcagatccactggatattctatgcggacaattatttcatccatgaataaagacagcattgcttcccttttaatacatatgtcttttttttttttttt

SEQ ID NO: 137073 - DNA, 667 bp, Homo sapiens
tcttttttcttttttcttggtgataatactttcaaacttctgtgacaaaaaccagatgaaatgagagatgccacatgtgaagggraggaaggaacagaggccattcctctcctcacagaccccagagaaatgagagccattcaactccttggatctttgatctgatgaagtcgaggctgagttcttaagaccaggtgaatgcagtttgaaaattactgctgtaaagaaaaaaacaaatcatcccattaaaaagtgggcaactgatatgaatagatatttctcaaaagaagatatacaaatgacaaaaaaaagtatgaaaagatgctcaaaattactaatcattagggaaatgcaaattaaaaccacaatgagacaccacctcactccagccagaatggccattattaaaaaggcaaaaaacaatagatgttggcatagacgtggatgtggtgaatatggaatgcttatacactgctggtggaaatgtatactagtacaactggaaaacagtgcagagatttctcaaagaaataaaagcagatctaacattccatccagcaattccactaccgtgtatctatccaaaggaaaagaagtcatcatatcaaaaagacaccagtacacatatgtttattgcagcacaatttacggttgcaaagatatggaa

SEQ ID NO: 137074 - DNA, 667 bp, Homo sapiens
tcttttttcttttttcttggtgataatactttcaaacttctgtgacaaaaaccagatgaaatgagagatgccacatgtgaagggaaggaaggaacagaggccattcctctcctcacagaccccagagaaatgagagccattcaactccttggatctttgatctgatgaagtcgaggctgagttcttaagaccaggtgaatgcagtttgaaaattactgctgtaaagaaaaaaacaaatcatcccattaaaaagtgggcaactgatatgaatagatatttctcaaaagaagatatacaaatgacaaaaaaaagtatgaaaagatgctcaaaattactaatcattagggaaatgcaaattaaaaccacaatragacaccacctcactccagccagaatggccattattaaaaaggcaaaaaacaatagatgttggcatagacgtggatgtggtgaatatggaatgcttatacactgctggtggaaatgtatactagtacaactggaaaacagtgcagagatttctcaaagaaataaaagcagatctaacattccatccagcaattccactaccgtgtatctatccaaaggaaaagaagtcatcatatcaaaaagacaccagtacacatatgtttattgcagcacaatttacggttgcaaagatatggaa

SEQ ID NO: 137075 - DNA, 371 bp, Homo sapiens
ttcaggggttcaaaaggggaccccaaatcaggttcaaagacacattccaggtatcactctaattcaatagttatgtattgtaaaccatgctgattaaaaataccctaacaattcaaactcttcaatcccttggtgactagtcactcagtctatagattaaaatagtgcawatgtctgaaggaagtatcacctgtctccttttgtgttttccagcctaatatgaataaccaatatccttttctatttcagaaggctacactatcttcctaacaaaaaaatttctgaaagtgtagcttgtgaggatcttagaatttaagcttcatccctttggcttttcatggtgatttctttttgaggtccattataactca

SEQ ID NO: 137076 - DNA, 371 bp, Homo sapiens
ttcaggggttcaaaaggggaccccaaatcaggttcaaagacacattccaggtatcactctaattcaatagttatgtattgtaaaccatgctgattaaaaataccctaacaattcaaactcttcaatcccttggtgactagtcactcagtctatagattaaaatagtgcaaatgtctgaaggaagtatcacctgtctccttttgtgttttccagcctaatatgaataaccaatatccttttctatttcagaaggctacactatcttcctaacaaaaaaatttctgaaagtgtagcttgtgaggatcttagaatttaagcttcatccctttggctttycatggtgatttctttttgaggtccattataactca

SEQ ID NO: 137077 - DNA, 548 bp, Homo sapiens
gttaggagtagtctggattaagatatattcacagatccatgaataggaaaattaaataaaaatctgtcaaaaagtagaccttgaacacactatgtttatgtgatttttaagacataaacaaaaaatgcaaaaaaaaatttctcatttccagtaaattaaggtatagaatacaaaaaaaaaaaaaaaaaaaaaagagctggaagggcttacaagttccatagtgcccttctaattctctgagacctgacgtcaaagttttatgcacagattgatactcattttcaaaaatgtcctggatttcctgctaaagtttatagtaactaatttcagagcaaaacttttttatttataacaaattttcttaagtctagccaaaamccttctggatgtattcacacagggccaccacactgtactactgacatagtagtctaggtgaagggtgctcccagagttgtgttgtataccacctgtacagctgtatgcagcagccctgatttactctaccttcaatgaagaagaaaaccaactgatcaggagagaaaata

SEQ ID NO: 137078 - DNA, 520 bp, Homo sapiens
gaggtaatggaatcatgagggcttgtctttcccatgctatkctcgtgatagcgaataagtctcatgagatctgatgggtttatcaggggtttctgcttttgcttctttctcattttcttttgttgccatgatgtaagcagtgtctttcacctgccatgattctgaggcctcccgagccgtgtggaactgtaagtccaattaaacctctttttcttcccagtcttgggtatgtctttatcagcagcatgaaaacggactaatacactgttcttgtctattattttttattaaccttaaacaccacttttctcctcttagatcacagggattccagaatacagccatgttacagctcttgaatttgtatctaccccattgaagagactagcctagactgaacaagaatctctcagcctcatttccacattctccaaagaaaggtccaggcaactgtgacttaggggcagacagggtcatgttgtataagtgtggcttgtggagctagtgggctgaggaattc

SEQ ID NO: 137079 - DNA, 520 bp, Homo sapiens
gaggtaatggaatcatgagggcttgtctttcccatgctattctcgtgatagcgaataagtctcatgagatctgatgggtttatcaggggtttctgcttttgcttctttctcattttcttttgttgccatgatgtaagcagtgtctttcacctgcyatgattctgaggcctcccgagccgtgtggaactgtaagtccaattaaacctctttttcttcccagtcttgggtatgtctttatcagcagcatgaaaacggactaatacactgttcttgtctattattttttattaaccttaaacaccacttttctcctcttagatcacagggattccagaatacagccatgttacagctcttgaatttgtatctaccccattgaagagactagcctagactgaacaagaatctctcagcctcatttccacattctccaaagaaaggtccaggcaactgtgacttaggggcagacagggtcatgttgtataagtgtggcttgtggagctagtgggctgaggaattc

SEQ ID NO: 137080 - DNA, 382 bp, Homo sapiens
aacaggcatgtgcagtggttaattactatatacatatatagcacacatatatatacacatacacatatagacatatatayacacgcatatatatgcatatgtgtatatatacacacatatttatatgcatatgtgtgtgtatatatatacactttcccttttaaaaaaattaaaacaatttaaaaaattttaattgacagagatgttcaaagtgtacaatgtgaagatttaatatgcatatatagtgtaataattacattaatcaaattaattaacacttatcaccacccatgctgtacctcagatccccaaaacttatccatcttataacggaacatttgtagcccttgaccaacatctccctacttcccctaccctgtca

SEQ ID NO: 137081 - DNA, 581 bp, Homo sapiens
gcctttctcacattaaatgctcaataagtgtttggttaaattgaagttttgaggccaggtcagtgtggctcacacctgtaatcacagcactttgggaggccaaggtgggaggataatttgagctcaggggtttgagaccagcctgggcaacatagtgaaagcctgtctccactaaaaatacaaaaattagccaggcgtggtggtgcatgcctgtaatcccagctactygggaggctgaagcaggagaatcacttgaatccgggagttggaggttgcagtgagccgagatcacaccactgcactccagcctgggtgacagtgagactctgtctcaaaaagaaaaaaaaattgaaattttgtagatgctttattcaaaactgtttttcattgtctctgcttagttacccttgcttctcatttttttgtccatataaggtctttccccgccgccccccacatatagtggtgtagttgcaaatttgttctagaatattatctgaaattttatggtttgaatataatttttacataggacctatgtaaatttaaagattctgatccataaagaatattctagtagt

SEQ ID NO: 137082 - DNA, 526 bp, Homo sapiens
caattaggagctagtggaaggggaggttgtgattgtgtgaggtatccaaggaagcaggagggatatacgtagggaaagagcaaataagaaggtaaagagggtgctctggaagacaagattattttatctagtctgagttaaaggtaggagtaaattgctgtcaaaaggaaggaagattgaagaaagaaggttgatgtgattaggattttcatcctggtaggagctacagtatatagtcctattgcaaagagtatggttagtatgctgttttcacttaccttttttaaggaggaaggggtttttccacaggatcagtggtaggagcctttttagtctgggatgtttccttctgaaataggagatgtaagtcctccaatggttcacaggtgtatcgagggtggtctggctgatcttgggactcctgagctgagggtcctgcmggttcctcaggggatgtccaaagtttaactcgggtgtggtgagtccaagattccactcctgccaccttaactgcagtgggggtaga

SEQ ID NO: 137083 - DNA, 526 bp, Homo sapiens
caattaggagctagtggaaggggaggttgtgattgtgtgaggtatccaaggaagcaggagggatatacgtagggaaagagcaaataagaaggtaaagagggtgctctggaagacaagattattttatctagtctgagttaaaggtaggagtaaattgctgtcaaaaggaaggaagattgaagaaagaaggttgatgtgattaggattttcatcctggtaggagctacagtatatagtcctattgcaaagagtatggttagtatgctgttttcacttaccttttttaaggaggaaggggtttttccacaggatcagtggtaggagcctttttagtctgggatgtttccttctgaaataggagatgtaagtcctccaatggttcacaggtgtatcgagggtggtctggctgatcttgggactcctgagctgagggtcctgcaggttcctcaggggatgtccaaagtttaactcgggtgtgrtgagtccaagattccactcctgccaccttaactgcagtgggggtaga

SEQ ID NO: 137084 - DNA, 477 bp, Homo sapiens
cccttccaaattgtccttccaatgcccagacttcagggttgattccctcttcaagtaggggacaacaaatgggtaacttgttccccatattcatgtagataatagctccagctatctctccaattaaggtcgaaggtttgccctagaccctgtaggacatctatgtacctatcaggawcatctgaaaacttacccaggtctgccttgatctgctttaaatcagagagggagaaggggacatgtacctgggttgggccaaattcccctccccctacagcttgaaggggacataaccgatagcctgggggtttttgtggtcctttggagatttcttggcttatttccttctgggcaggggagatttgaggaggcttatcattaataggaaggggatctatagggagcctaagatacgggtgtaagctgagaggtcctcctgtgggatgtaaattgcaagctttgcatagttgtgtattt

SEQ ID NO: 137085 - DNA, 477 bp, Homo sapiens
cccttccaaattgtccttccaatgcccagacttcagggttgattccctcttcaagtaggggacaacaaatgggtaacttgttccccatattcatgtagataatagctccagctatctctccaattaaggtcgaaggtttgccctagaccctgtaggacatctatgtacctatcaggatcatctgaaaacttacccaggtctgccttgatctgctttaaatcagagagggagaaggggacatgtacctgggttgggccaaattcccctccccctacagcttgaaggggacataaccratagcctgggggtttttgtggtcctttggagatttcttggcttatttccttctgggcaggggagatttgaggaggcttatcattaataggaaggggatctatagggagcctaagatacgggtgtaagctgagaggtcctcctgtgggatgtaaattgcaagctttgcatagttgtgtattt

SEQ ID NO: 137086 - DNA, 393 bp, Homo sapiens
ataagtgctcaacttatgtgtcatctttctaaggtggactgaaacacagatgtactgaagtgagcaagctctttaatccctaaagtaaagtaatactttctcagaaatartgttttccaataattcacagcagaagtttttatcaccaccttttatatctgggttcggtaggtgtgtaactttttcaaaggctaggatcaaatctgagtggacaaagatgtaatggagacagagttttatatcttcttgcctttaacaccacttacagtttgggaaggaagccttaattctgtcaatattccattccagtatgtagtgctataattgaaagttaaactggaggtaggcaaaatttaggatattgcaggccacttcattaaacttgttaattat

SEQ ID NO: 137087 - DNA, 354 bp, Homo sapiens
ctggcttcatcccattgacttcctgttcatgtccagtgatagagaaagcacctttgcatcaaacattaaatataagtacttcattgtaatacagataatttatccttgaatgaatcattgtcttgatcctcagttttgaactaattaccagctggagagaagagattatccttactgagtagggcaattcaggaactcttcttcaaatggaagtcaatattcaaactctagtgctattatatagcggggaaagtttgggataggtgttgaggatttaarcaaatgtttaatatattttacccctttaatgacttcacatccaaacttagcttcttcccaactagatacacaccc

SEQ ID NO: 137088 - DNA, 496 bp, Homo sapiens
gaatagcaccaagggatggtggatctagcatgctggagtctgtaggatggtggcctccttcccacagctccactagccagtgcctcagtggggactctgcrtggggccttcaacaccacatttctgcttcacactgtcttagtatagattctctgtgagggttttgcccctgcaagccggcttctgcctggatgcccaggctttccaatacattctacaaaatctaggcagaggatgccaagcctcctttactcttgcatcttgtgcacctgcaggcttaatgacatctggaaaccactaaggcttatggcttgtgccctctggagcagcaacctgggctataacagggaccctgtgagctgaggcttcagccagtatagcctgtatgggagagcagtgttttgaggatgcacacaacagtggggacttgggcctaactacaaaaccattctttcctcctgggcctctgggcttatgatgtgaggggctgccacaa

SEQ ID NO: 137089 - DNA, 491 bp, Homo sapiens
gaatagcaccaagggatggtggatctagcatgctggagtctgtaggatggtggcctccttcccacagctccactagccagtgcctcagtggggactctgcgtggggccttcaacaccacatttctgcttcacactgtcttagtatagattctctgtgagggttttgcccctgcaagccggcttctgcctggatgcccaggctttccaatacattctacaaaatctaggcagaggatgccaagcctcctttactcttgcatcytgtgcacctgcaggcttaatgacatctggaaaccactaaggcttatggcttgtgccctctggagcagcaacctgggctataacagggaccctgtgagctgaggcttcagccagtatagcctgtatgggagagcagtgttttgaggatgcacacaacagtggggacttgggcctaactacaaaaccattctttcctcctgggcctctgggcttatgatgtgaggggctgc

SEQ ID NO: 137090 - DNA, 494 bp, Homo sapiens
tctctcacttctttcttcataaaacaatctaacacagtgacctctttaaaaggggccaaagcaagactcctattttgtgtggtcaaytgtcttaagttacaggcatacctggcagatattgtggatttggtttcggacaaccacaataaaattgatatcacaacaaagtgagtcacacaaattttttggtttcccagttcatataaaagttatgtttccataatactatagtctattaagtgtgcaatggcatgtgtgaaaaaacaatgtacataccttaatttaaaaatctttattgctaaaacatgctaacaatcatcggagccttcaccaagtcataattttcttcctggtggagcgtctttgccttgatgttgactgctgctgactgattagggtagtggttgctgaaggttggggtggctgtgacaatgtcttaaaataagacaacaattaaatttgccacataaattgactctttcacaaaagatttc

SEQ ID NO: 137091 - DNA, 575 bp, Homo sapiens
ttgttttgggtggggggtatcttgaggagtgagcacaaatggggcttttgtgtgctgatkatggtctgagcactggttgctttggtaggcttgctttgtgaaagtttattgagctgtacgctgatttgagcacttctctacttctttgttaagctcattaaggagtaggacaatacagaacaaatggttcttctcattgactttcaagtgaaatatgagactgggtatctctagtggtttgttaaggaaagcattgttaggctggcaactttttttttttctgcatccactgtattgtagtgttgatttggattttattgggtttcagtctccaaataaaccaataaggggtcaaacatccaacagatcagtggcaatcagcaacagaacaaaaacaacaaacagcaaagcaaaacaccatcaacactgcagtgctataggactgcatttgattgaaaaaagaatcctcatgctccactaagccagaaaaagctaccagtataaggcattgtttccaagaaaacttaagaggaaagtgaaagctaaacattgctatcactgaagccaatgttatc

SEQ ID NO: 137092 - DNA, 592 bp, Homo sapiens
tttggtcttttcacatagtcccatatttcttggaggctttgttcatttctttttactctttttttctctaaactggcatagaggtatcttttttttggtttttgtatttaaaaatattctgaatttcttattttttaaatgagattttttttatcataaatacctgcattggtagcttgacttgaaaattaggtagatttgataacactggatccacactcttgcatggcatccatctcctgtaactgagtactggctgttacagactgtattaggccctctttaccaagattggtagcctgcttagaccttgtagaaatttgagtttgtaatttctggtgcataaggaatatatattcattatgtaacacaaaaggctttttgattcagaaatttatattctggtctaattgattctttctaaacttcaakggcggttaagatataggctgttgattgggcatgcctataaaagtaagctagtcgcaactcgtctctaagcattttagcttgaaacactctccaaattattgataaactatcttgtgtttaaagaccattaaagaagggacatttttctttttgaagatgg

SEQ ID NO: 137093 - DNA, 496 bp, Homo sapiens
tttccaatatggatgtcttttatatcttgtcaaatttcttgagcacttttattatgaaagggttttggattgtattaaatcactttttgcctctagtgagataattatgtaatcttttttttgtaaatattattttacatttattgattttcgtatgttatacctaccttgcattcttgggataaatcccacttggtcatrctgcataatctttcttatatgctgctggattctgtatgctaacattgtgttaaagatttttgtgtctgtataaacaatatcgttctatagtatccttgtgatatctctgtctggttttggtatcagagtaacagcagcttcatagaacaatttgggaagtattccttcctttactaatttttggaagagtttatgaagtgttgatgtttctgcctttatttttctttacttcttttcttctctgatctttccttctatttgcttattctggttttagtttgttctcctctttcta

SEQ ID NO: 137094 - DNA, 501 bp, Homo sapiens
cagtttgattaaacagacagaagagtaatcaatggaacaagtttttttttaaatttattatttatttatttattttttgagacagtctcgctcttgcccaggctggagtacaatggcatgatcttggctcactgcaacctctgcttcccargttcaagcgattctcctgcctcagcctcctgagtagctgggattacaggcatacaccaccacgcttggctaattttgtatttttagtagagacggggtttctccatgttggtcaggctggtctcgaactcccgacctcaggtgatctgcctgccttggcctcccaaagtgctgggattacaggtgtgagccaccactctcggcctggaacaagtttttaaaataaatggtgatttacagagacagatctggcaatggcacacaaactggactgaagtttgtaggttaccagaggtcaggagtctgtttgtagagctgtggcaaatagcagtggagatgtcactgaactgc

SEQ ID NO: 137095 - DNA, 547 bp, Homo sapiens
attttcgtgaccttgaacatgaaatgaaatgaaatggtgatgccacttctcaagagagctgtgtttaagatgtgcttgttcatgaaagagaatcatcagagttccccaagggctyaaccttcatccgcttttcaaagagaaaggctgcctccttcccctcacacagaaagctctccccaggttcctttccctctcctcttcccaccgctttcctgcacaacagccaatttttaaaatcttttgagtcttgtggtgtagatgcaccatctatagttcaataacatggtaactttctctctttttcacttttctcccctgccacctcaccagtttctattgtattcctataatgaagagcgaaatgttgaaattgtgtgcacgaattgctaattcaactgttgctcacaagttgggtgcatgtttgggaaatcttagtatctatagcagaatccggatgagtgttggatgtagtttgatggcaatagaaacttttttcctttatgtaggatttcgttaaggaagagtcaaagaagtgtctaccccataa

SEQ ID NO: 137096 - DNA, 310 bp, Homo sapiens
ttaattacaattgctgcttgctcagatttttctggagataggataggacagcccagatttcatccaaatcccagaggaacatttcctctagaaaccggaccctgccacatcagacatgacaaggcttccaagcagtggacaaggcaaccatccaggagactggcagtcactggctggctctgccaacaccccaygcagctgtcagcatgacaggacagaaaggggcagccctcctacagcccccagcagaagccacacattgtatggtggggcaggagccactggaagcaggacagggctatttcaaact

SEQ ID NO: 137097 - DNA, 552 bp, Homo sapiens
gtgcttgatgtctttatccaccctcctagttccccacttctctatcttgttttgagccccaggaggctgacctgtatggactgcagcagtgagggctcccaggccctcagtttctggctgagtttggcaccaggaagcactggcagcagatcgaagggaggaaggagaatgaggtccaggtatttatttcctggcttcctccctgcttgatcgtggtgtgctggccatctcctgcaactgaaggtctcagctcctgtcactccaygtggctttgtctctggattccactgcttacgcctagggtaggagcagtgccctgctattcctagctctgagataatacactgtgacttatggtctttcctacatcctgcccatacctttgtaaatagtcccttaattaaactctcctcaaataacccaatttgagagtgccatctgtttcctgctggaaccctaactgatagaagttgtcctttgaataaatgctattggtggaagagtactgaaggacttcaccatgacccccagaacccagcagcaagcaatgcc

SEQ ID NO: 137098 - DNA, 524 bp, Homo sapiens
tgcagcctcccgtggattaattatgcattctgaccttctggggtgtagcctgcctggcaaccagcaactarggtccagctctttgtcgtgtttaacagaaatgttgaaaacagacataaattcacctaagtaatgatttagagttccagagagtaaggaaagaagcacgatctttgatttcaaaagtgttccatcactacagttttctattttagttcatgctttccttcattttatttttaattgcttggagtgtttgcatgaggaacacatttctattttacttgccttctatgatttctcttatgttcctcacttggggcttgatcctgtaacatgcgctgcacagcagcaactccctctggatggaacagtagtggttttgtgtcactgcttgttgaagatcaggccttcagagccacagacctggggggaacaggagtgtgtgtgacagcattggcagagaactgctggcttcacaaactgctactgtgtctttaaataggggataaacatcgggagca

SEQ ID NO: 137099 - DNA, 573 bp, Homo sapiens
acgtgaatcttgcatttatttcagctatagtccattcttattatactggagccctattggggtagtagcaaaatatggggggaaggggcatattgttaaatctcagtctttcaattggcctgtgtctttgggctgtgaccttcacaagctccagtggcatagcttcaccacccctacttagacragaaaggaaggctggaagaggctagagtgagagggatgtcctttcactagtgagataaggttctggtattttcccttgacattgggcctttgttagggagaacgctcttggtgtatatcacaatgagtactcttcccctccccctgccaaggccacagaggatctttcttggatctttaccgtgagaacctgctggacttcctggaggtaaaacccacaaaagtgtgagtgtcccttgtgatggttaatactatcaacttgattagattgaaggatgaaaagtattgatcctggctgtatctgtgaagatgttgccaaaggagattaacatttgagtcagtgggctgggaaaggcagacccagccttaatctgggtggccactatcagc

SEQ ID NO: 137100 - DNA, 573 bp, Homo sapiens
acgtgaatcttgcatttatttcagctatagtccattcttattatactggagccctattggggtagtagcaaaatatggggggaaggggcatattgttaaatctcagtctttcaattggcctgtgtctttgggctgtgaccttcacaagctccagtggcatagcttcaccacccctacttagacgagaaaggaaggctggaagaggctagagtgagagggatgtcctttcactagtgagataaggttctggtattttcccttgacattgggcctttgttagggagaacgctcttggtgtatatcacaatgagtactcttcccctccccctgccaaggccacagaggatctttcttggatctttaccgtgagaacctgctggacttcctggaggtaaaacccacraaagtgtgagtgtcccttgtgatggttaatactatcaacttgattagattgaaggatgaaaagtattgatcctggctgtatctgtgaagatgttgccaaaggagattaacatttgagtcagtgggctgggaaaggcagacccagccttaatctgggtggccactatcagc

SEQ ID NO: 137101 - DNA, 426 bp, Homo sapiens
gtctcatttccaatcatttctcagatgcatttgtttggacttagaaatatatgcagtcctttgtgtctacattttctacgtacattgttgccttttgtgtctttgttctctatgtactttttggcatgtactctccacgscataatttgtaaatgccctggtcttgcggtcctatagggcagtagatatgcttcatttatcagatcaaacaatcttagtaatggtgattttaggaataaaataccaaacaaagaatccctccattttagtgacttcaatgcctcaaatagatttgaagttctggaacaggcctaagtgcttctcagtcttctccaagttctctggagggaagagggatcaagtcagctgaatatagtcagaaaatatatgttgacagttttctccggagatgcactatatggcaag

SEQ ID NO: 137102 - DNA, 409 bp, Homo sapiens
tcatttctcagatgcatttgtttggacttagaaatatatgcagtcctttgtgtctacattttctacgtacattgttgccttttgtgtctttgttctctatgtactttttggcatgtactctccacggcataatttgtaaatgccctggtcttgcggtcctatagggcagtagatatgcttcatttatcagatcaaacaawcttagtaatggtgattttaggaataaaataccaaacaaagaatccctccattttagtgacttcaatgcctcaaatagatttgaagttctggaacaggcctaagtgcttctcagtcttctccaagttctctggagggaagagggatcaagtcagctgaatatagtcagaaaatatatgttgacagttttctccggagatgcactatatgg

SEQ ID NO: 137103 - DNA, 350 bp, Homo sapiens
  misc_feature (1)...(350): n = A,T,C or G
taactattactgctgttacttcccccaagntaaantnntccctctaaannnaaataaaaawttttcaagctgtaatttaagctctctgctgcctcatgacttcaattccatcagagttacgcattgtttcctctgtacatctttgctctgcttccattgctaattccctagtaaagtgttgtatattcaaagttccaaagaaacagaatatccaagacatcaccaatcatccaaaacacagtgtaggaggccacagttaagagaagcaagaccattagctctttttataggctcgagaacaacaggatgctttggtcctgtatcagcaggacgctttttgggtagatcct

SEQ ID NO: 137104 - DNA, 350 bp, Homo sapiens
  misc_feature (1)...(350): n = A,T,C or G
taactattactgctgttacttcccccaagntaaantnntccctctaaannnaaataaaaaattttmaagctgtaatttaagctctctgctgcctcatgacttcaattccatcagagttacgcattgtttcctctgtacatctttgctctgcttccattgctaattccctagtaaagtgttgtatattcaaagttccaaagaaacagaatatccaagacatcaccaatcatccaaaacacagtgtaggaggccacagttaagagaagcaagaccattagctctttttataggctcgagaacaacaggatgctttggtcctgtatcagcaggacgctttttgggtagatcct

SEQ ID NO: 137105 - DNA, 401 bp, Homo sapiens
tctagatttagatttactacttttcctaatacacacccacacacatatatgtatgtgtgtgtgtgtgtgtgtgtgtgtgtgtgtgtatactgtatttgtctcatagtggctggagcacattactaccaacttagtggattaaaacaccacaaatctactatcttacagttctgcaagtaaagactaaaatagagtcacataggtgaaaatcaagagcttctactctcttgaggctgcttggattcttggctataacccctttctccatcttgaaattctgtcactccaacctckgctttcataacacatctcccatctccttcctaactcgaaggcatcttctcagtcttacaagaactccacttgggttcacatttggaacacccaaataacccatctta

SEQ ID NO: 137106 - DNA, 545 bp, Homo sapiens
atatattttaaattattaaaattctgaactaatgggtaatcaactgtacaacccgaattgctgatttgcatacagctgaagtccctcctcaaaacttctgtaatacatgwaacttaggcaaatggttgggtcattaccatatattactttatatttttatttatcagtatatgtgattacagttatgcttatgttaattgatatgtatatgtacattgtattattctgttacatagcacagcattttgtactcaaaaagtgaccaataataataagctacatactttgggaagcattgcaggctagtcgtacagttttgttttgtttttttccctgcagcctgacaacctttttagtcattcactaaacctctctcagcttcagtttcttcatctgcaacatatagcaaataataaaacttaactcagatggttctagtgtgaaataatacagagtaaatgtgccaccaaatacaaaccaatggcttgattgacataactcactgctaattttcttgaaatgattcaaagtattttccagacaag

SEQ ID NO: 137107 - DNA, 435 bp, Homo sapiens
cacttacattagccagtccaaaaaaaaaatctaacctaaagcctatttttaaataaagtgttgaatatcacatgtaaattattaaatactgaatgtgaaaaacggaatgggtatatgggtaataaaagcattgtttctactgaatgtttatcacttttgtaccatgatraagctgtaaagttgtaccattgtaaatctgggaccatctgtgttacattcaagagaaaagctcagtcgaactaataaataaatcaaaatttcttctgattatttaggtgttttttcctgttagataattaagacatccaactgttgcttgctgcttcaccacacagaccatacacagatacaaatacacactccatgaatgagcatatgtgcttgtttaaagagacatactaaccaaacagttgtatgctgccgtgatattgatta

SEQ ID NO: 137108 - DNA, 561 bp, Homo sapiens
gtgcatttataataaaattttaaaacttgacccacaaatctctacttgtccttctagttttatttcatttgtctctcgtcaatctctacattctgatcaccacaatcttttaattcatctgaaagctaagctctctcttaatttacattctctatacttgcaattttgtctacctagaagtgtcttcttccatctttggattgttattgcaaatccattgaatagttctcatctgaattgtttcttccttgggatgacttataaacacttcatcctacagccaaatcagaagaccaatatcaaaatctttcatcacatcctaaatttgcttatatgtaattatatggcaagaatctctttgtctttataatcatkattcacttatctatgttttttaaaaactcttctaggtggtgatgctaagctccgtaatgttgggctttgttacctgtctcaactatcttccacacctaccacagtacctgctacatagatgtattcaatatatatttttagaattagtaaatgatgagcaagcgtgtacttttgttctctttcatt

SEQ ID NO: 137109 - DNA, 565 bp, Homo sapiens
cattatgcaagtacatatcctctttaagaattcctgttatagtgaaagcattaaaataattgaacacgtacagagaccatatactttgtgatctttttaaaaaagtattcaaaatatatttctgtgtgcaaaacattttcataatggtcttgtttaaatgaaagtatttagaatagcacattgtaaaattatgctgcagagcacaagtatttttctctttagaagacacataataaaatagaatcatcagtgttttttcataaacatgaatctttagagtgttacttgatcctgcayaataagggtacttttttgcttaatgtaagcatagtatactaattcttttaaacttcagaaagcatatttacagtctaggcagatgggacatgaaggtcacacagcatgagcagtgaaatatctcatttacctagagttctagagagaattttaggaactcttatttattatcagtgcataaacaagagtaaactctacaaaactgtttgcaaaactctcctctttctactcagaaggctttccctagaataatcattatggagtctgt

SEQ ID NO: 137110 - DNA, 524 bp, Homo sapiens
gcccctaccctgtcaatgattatggagcgataagggacacggcatcttcagggarctgaagggctctcggctggaagaggaaactgcagactgtgtggcctcaggggcaggacgcaggctgcctcacggaagctctatgcagaccgatgccagctcacggggaggaggaacctctgcctatcagagtgtccatccataggcctggccaccttggggccacctcccatctctcctctgtcagctctctggtccctcgttccagctaacacacctcccatctctgggggtgtgttagcaggggtggcttgaccccagccgttccattccagaaacaaagggcaggtgtaggtttttccagttagttgttagagtttttttgggaccctgcagactggcgtctagagcagctgtgacctgaggtggctgccaaagggctccaggtgtttgccagatgataggggtgtggtctgagggtccagccctgatgggtgcctgtgccctgacacacgaggcctcacctcatt

SEQ ID NO: 137111 - DNA, 524 bp, Homo sapiens
gcccctaccctgtcaatgattatggagcgataagggacacggcatcttcagggagctgaagggctctcggctggaagaggaaactgcagactgtgtggcctcaggggcaggacgcaggctgcctcacggaagctctatgcagaccgatgccagctcacggggaggaggaacctctgcctatcagagtgtccatccataggsctggccaccttggggccacctcccatctctcctctgtcagctctctggtccctcgttccagctaacacacctcccatctctgggggtgtgttagcaggggtggcttgaccccagccgttccattccagaaacaaagggcaggtgtaggtttttccagttagttgttagagtttttttgggaccctgcagactggcgtctagagcagctgtgacctgaggtggctgccaaagggctccaggtgtttgccagatgataggggtgtggtctgagggtccagccctgatgggtgcctgtgccctgacacacgaggcctcacctcatt

SEQ ID NO: 137112 - DNA, 608 bp, Homo sapiens
gaaagtactttattagcagttattctttacatcactaaactcctgtctctcaccccaggcagctttaagatgcagctcagctctcaaccttgcctatgactgggtaggaaattaccctgtctggagggagaatgactcctgagtcattctcagtcttcctccccagctgctgcgagttcatttgttttaactttccctctcccaagataacatattccrggggccagtgaaaagaaaatgtggtgttggaaggtcttttaagtgggaacattcttggttgtgaggctgagctgttcaggaagaccttgatgctttcctggttcacaaagccgagaggtgatgaggctatagtggcactttggatttgggggtgataagactgttttttgtaaaacactggaattctctgtgattatcagttggggaattcatcatggtatttatctggagaggaaagaaggcaaaatggacttcacaacagtcaactgggtcactcgttgtcaagcaatcacttagcatgtgctctgaccattgagtgtcattgctattagccacttaatccccacaagaggccatgctctaggtcaccctcattttagagataaagt

SEQ ID NO: 137113 - DNA, 523 bp, Homo sapiens
taaaaaatcaataaagttgataaatatctagctagattgatcagggatttaaaaaatgttaccaatattggggataaaaataggaattgggaataaatctatacagagtatagaattataaagttgayaggaaatattatgaacaattttatgccaataaatttgataaatgaaatggacaaatttctggaaaaacacaagtcataaaactaacacaagaaggcagataaaatattaatagccctatgtctactaaagaaattgaatttgtaattttaatttgtacctttcctgcaaagcaaatttcaggtgcaaagaggttcactggtgaatttcaccaaacatttaagaaagacatagtaccattcaaacacaacttaaatagaaggggtaggactgtttctcaagttattttattaaatcagttttactccgataacaaaaacagaaaaattacaaaaatagaaaattacaaataaaaatcccacataaacatgcaaattttttttttctgagagatgac

SEQ ID NO: 137114 - DNA, 523 bp, Homo sapiens
taaaaaatcaataaagttgataaatatctagctagattgatcagggatttaaaaaatgttaccaatattggggataaaaataggaattgggaataaatctatacagagtatagaattataaagttgataggaaatattatgaacaattttatgccaataaatttgataaatgaaatggacaaatttctggaaaaacacaagtcataaaactaacacaagaaggcagataaaatattaatagccctatgtctactaaagaaattgaatttgtaattttaatttgtacctttcctgcaaagcaaatttcaggtgcaaagaggttcactggtgaatttcaccaaacatttaagaaagacatagtaccattcaaacacaacttaaatagaaggggtaggactgtttctcaagttaytttattaaatcagttttactccgataacaaaaacagaaaaattacaaaaatagaaaattacaaataaaaatcccacataaacatgcaaattttttttttctgagagatgac

SEQ ID NO: 137115 - DNA, 523 bp, Homo sapiens
taaaaaatcaataaagttgataaatatctagctagattgatcagggatttaaaaaatgttaccaatattggggataaaaataggaattgggaataaatctatacagagtatagaattataaagttgataggaaatattatgaacaattttatgccaataaatttgataaatgaaatggacaaatttctggaaaaacacaagtcataaaactaacacaagaaggcagataaaatattaatagccctatgtctactaaagaaattgaatttgtaattttaatttgtacctttcctgcaaagcaaatttcaggtgcaaagaggttcactggtgaatttcaccaaacatttaagaaagacatagtaccattcaaacacaacttaaatagaaggggtaggactgtttctcaagttattttattaaatcagttttactccgataacaaaaacagaaaaattacaaaaatagaaaattacaaataaaaatcccayataaacatgcaaattttttttttctgagagatgac

SEQ ID NO: 137116 - DNA, 531 bp, Homo sapiens
cttgccttcatgcagattacattctgaggtatgtatgtgtgtatgtgagtgtgggggtatatgcacacatgcgtaggaaartaagcaataaataagtaaaaaaacacatttaccttctcctggataccctttcctggatgtctgtgggcacccctcaaacttaacatgccatttctgtatcaccaaactatcaccttctccggccacctctgcttgccagcatgcattcatcagacattgtttaccactgccacccctccaccagtttgcaaagtacctctactcaccactgagtcttctcaatgcttacatccctgtggctctaagtagctcttcttcagcctgctgggattctttatctgaaattcccgagtctgcccaaaaatcctgctgcctgatcccagcatggacctctgagctgttaagcagtctcctgttcactctgtctacactctcccaaccaattctccttttcttaaggcccaaaatgctactgcctcttccttctcagcaggtgactttccctccact

SEQ ID NO: 137117 - DNA, 531 bp, Homo sapiens
cttgccttcatgcagattacattctgaggtatgtatgtgtgtatgtgagtgtgggggtatatgcacacatgcgtaggaaaataagcaataaataagtaaaaaaacacatttaccttctcctggataccctttcctggatgtctgtgggcacccctcaaacttaacatgccatttctgtatcaccaaactatcaccttctccggccacctctgcttgccagcatgcattcatcagacattgtttaccactgccacccctccaccagtttgcaaagtacctctactcaccactgagtcttctcaatgcttacatccctgtggctctaagtagctcttcttcagcctgctgggattctttatctgaaattcccragtctgcccaaaaatcctgctgcctgatcccagcatggacctctgagctgttaagcagtctcctgttcactctgtctacactctcccaaccaattctccttttcttaaggcccaaaatgctactgcctcttccttctcagcaggtgactttccctccact

SEQ ID NO: 137118 - DNA, 568 bp, Homo sapiens
tctgatgaaagttgtgaatgtatactgttgtcccttccatgtgaatgtgaactctttctgattctctttcttgattgagatggaaatgaacatattcaccagattaatggcttcataacatgtacctgaattcaatttttttttgagacggaatctcactctgtcacccaggctggagtgcagtggggcgygatcttggctcacacaacctttgcctcccaggtgaagtgattctcctgcctcagcctcctgagtagctgggattacaggcatgagccaccatgcctggccagtttttgtatttttaacagagatggggtttatcatgttgaccaagctggtctcaaactcctgacttcaaatgatccaccaacctcagcctcccaaatgctgggactgtaggcatgagccactttgcctggctccctgaattcatattaatcttctctagcagcaataccacacctagcaaggaagctgcaatggggctactagttgttgcacttctggtagtttccatggggaacagactggtgaattaaatgggactataataggaatgatcatc

SEQ ID NO: 137119 - DNA, 568 bp, Homo sapiens
tctgatgaaagttgtgaatgtatactgttgtcccttccatgtgaatgtgaactctttctgattctctttcttgattgagatggaaatgaacatattcaccagattaatggcttcataacatgtacctgaattcaatttttttttgagacggaatctcactctgtcacccaggctggagtgcagtggggcgcgatcttggctcacacaacctttgcctcccaggtgaagtgattctcctgcctcagcctcctgagtagctgggattacaggcrtgagccaccatgcctggccagtttttgtatttttaacagagatggggtttatcatgttgaccaagctggtctcaaactcctgacttcaaatgatccaccaacctcagcctcccaaatgctgggactgtaggcatgagccactttgcctggctccctgaattcatattaatcttctctagcagcaataccacacctagcaaggaagctgcaatggggctactagttgttgcacttctggtagtttccatggggaacagactggtgaattaaatgggactataataggaatgatcatc

SEQ ID NO: 137120 - DNA, 568 bp, Homo sapiens
tctgatgaaagttgtgaatgtatactgttgtcccttccatgtgaatgtgaactctttctgattctctttcttgattgagatggaaatgaacatattcaccagattaatggcttcataacatgtacctgaattcaatttttttttgagacggaatctcactctgtcacccaggctggagtgcagtggggcgcgatcttggctcacacaacctttgcctcccaggtgaagtgattctcctgcctcagcctcctgagtagctgggattacaggcatgagccaccatgcctggccagtttttgtwtttttaacagagatggggtttatcatgttgaccaagctggtctcaaactcctgacttcaaatgatccaccaacctcagcctcccaaatgctgggactgtaggcatgagccactttgcctggctccctgaattcatattaatcttctctagcagcaataccacacctagcaaggaagctgcaatggggctactagttgttgcacttctggtagtttccatggggaacagactggtgaattaaatgggactataataggaatgatcatc

SEQ ID NO: 137121 - DNA, 568 bp, Homo sapiens
agagctctgatgaaagttgtgaatgtatactgttgtcccttccatgtgaatgtgaactctttctgattctctttcttgattgagatggaaatgaacatattcaccagattaatggcttcataacatgtacctgaattcaatttttttttgagacggaatctcactctgtcacccaggctggagtgcagtggggcgcgatcttggctcacacaacctttgcctcccaggtgaagtgattctcctgcctcagcctcctgagtagctgggattacaggcatgagccaccatgcctggccagtttttgtatttttaacagagatggggtttatcatgttgaccaagctggtctcaaactcctgacttcaaatgatccaccaacctcagcctcccaaatgctgggactgtaggcatgagccaytttgcctggctccctgaattcatattaatcttctctagcagcaataccacacctagcaaggaagctgcaatggggctactagttgttgcacttctggtagtttccatggggaacagactggtgaattaaatgggactataataggaatga

SEQ ID NO: 137122 - DNA, 538 bp, Homo sapiens
ttccatgtgaatgtgaactctttctgattctctttcttgattgagatggaaatgaacatattcaccagattaatggcttcataacatgtacctgaattcaatttttttttgagacggaatctcactctgtcacccaggctggagtgcagtggggcgcgatcttggctcacacaacctttgcctcccaggtgaagtgattctcctgcctcagcctcctgagtagctgggattacaggcatgagccaccatgcctggccagtttttgtatttttaacagagatggggtttatcatgttgaccaagctggtctcaaactcctgacttcaaatgatccaccaacctcagcctcccaaatgctgggactgtaggcatgagccacttygcctggctccctgaattcatattaatcttctctagcagcaataccacacctagcaaggaagctgcaatggggctactagttgttgcacttctggtagtttccatggggaacagactggtgaattaaatgggactataataggaatgatcatccatg

SEQ ID NO: 137123 - DNA, 450 bp, Homo sapiens
attcccctcaggcattagtggaaagtctaagtcactctaatcaaagagcctccctgccactgccatccccctcttagtatctgccctaggaaagggaagaaaaataaagaataagcattctatgctgatggcccaacacagtgctaaacatggaactcagccctaaaggaggggccttccttacacaagcctgtaaggggagaacagacatagacttcagaaggtgattctccaggtgacgaggatgggttcaccaatggcctctgactggtgggggggtctcctgctttaaggcctctgctgtgatcgtgtgtgaagggataagttctccctcaytggaacaaaatcacatttctgcagctcttgttgccccttccttggaaggaagccatccccttagaaggagaagccatctccactctgacataccttgatggatgtgaaactcct

SEQ ID NO: 137124 - DNA, 263 bp, Homo sapiens
tcacaggccttgtgcaaggcccctcctctcygaagccattttcctacacatcgggctggagtaattgggagccgaaagatggcaggcagaataaaaaggctcattaggtgagagtaataaaacaaaacaaaacaaaacaaaaatgagtgcaaggggaagaggaaaggctgggggtgggagcagatgttgtcctgcctcttggaagtccttttactttcttgggcataggaggaaaagaaatggccttctagaataaattttgc

SEQ ID NO: 137125 - DNA, 570 bp, Homo sapiens
agtgagggattacagacaggggtaccagttaggtgaagaggaagagactgaactaagatggtggcactgggaatggagaataaatcacagataagagagaaagaacaaaccaataaaacatgacgactgccttgatgctggaaagagattagtcagagtctgccctgtctgaggggtactgataataycagtgtcagaagtggaaatgttctagagggagagctgggttttggaagattattaagcctataatttaaaacagttgattcctatagggttaaggcacttaataactaaataacttaacaaatgtttggacactgatgatgagccaagcactaggtcaggtacaggtgacagaatggtgaatgggaaagacatggcccctgttttcacaggcctcgagagtttgtgagagaagaaaggcattgcataagtagtaagataacactgatgagctttatgctcgtagaaatacagagtactatgggagcatatgctagcagcatatacagcgggtagtctgggacttcttcgaggaagttaacatttaagcaatgggtcatgtta

SEQ ID NO: 137126 - DNA, 220 bp, Homo sapiens
ccaggcagaaatttgaagtgggtgagcttttcttgttttgagatagactaagtaatgaccaaatcctcatttaacttgaatctattttccctgttttataacaagcactgtgstatgcacacagggaaatttcaatccatgggagagttagctgacaaattataatgtccaaaaatatacataaatcattcacttgattcactcacctggcctctgtcta

SEQ ID NO: 137127 - DNA, 529 bp, Homo sapiens
agccctcttggtgtcagaagaaacctcaaagactacctgtgcaaagctacctgtgtaaagaagccaaaatttaattagagtagactgcagattaatttatgttctagaatattttctaaaacaatagagcaattagctggcaattagtggagcctawtagcttggagtgataacagtgacagaaggcttaacagaaagatcatggaaagagaaacttgagagagccttgctaaagccactggcatcccagggtgactatgcacgtgaccaaggctacactctgcagagtaggatcagaggcttcatgctgtggggcaatttgtaaaaactgtaatatctgcaaagtgcaataaagtgaaatgcaataaaacaaggtatacctgtatttacacagtgaaataatgtttggcaataaaacagaatgaggtactgatatatgcttaaacatgagagaactttgaagacatttgctaagtgaaaagctagtcatgaaagagtttatattgtatgattccacttttaaaaaata

SEQ ID NO: 137128 - DNA, 503 bp, Homo sapiens
gttgtttaatcatatgtagaggaagtcaaagaagtttatagacctaatttgaagaaatacttcttatcattaatattgttgtttttaagattaaggtcagaaaacaaatgtcaaaatttttaaaaacaggtgaaatgaagtgactattactgaccagcttctaaagaaacttttatggtgtagyattctggtggcacagagaaaaggaaatcccattcatgaagtatattctactgctgagaaatcaaaatgccaagtgcacaaaagctactcctgtatgaagaaaacaaaacaaacaaacaaaaaaaaaaaacaaggcctagagggagatattccgggggaaggacagtccctgacatgaccaatacccactgttagtctgagaagggagacagcacagcatgaaggctggattcagccagacctggcttcaagtcctggctctcactttttagttgtgagacttttgatcaggtgtttggtctctgaatctcaacttcctc

SEQ ID NO: 137129 - DNA, 641 bp, Homo sapiens
ttcctaccctcttcaatgcagcttcttatttctgtgctgcactcaggtgctatcatctctcacctggatcccttagctcttgtggaggtattttcaggcatggatagttgttcaaattaatgtttttgcaagagggtgagagctgggaagtcttattttctcatcttgctgacagcactcactggcattttcctttaaaaagcaattatcttcatcttagtcatactcgtatccaatctgatgaggaagatctcctgaggggttagaggcctagagaggggcaatattttcccctttggcccacccctcccaccaactgtggtagcagctccaggtccttcctactgtgggtgtgccacctggagaaatgttaaagaacagaatcttagtggataattgattgacttcttacagcttttatcatttggtcagtgccattatkgtatctattaagtgttataatgtaaatatctgttggtctctttctctcaatttggataaaatgaaaacttcattattgaatagtttcattacttaaatatatagttttgttatttattacttaaactaggctataaaaaattattcaatggaattcctagggattttgttgagatatttaaaatacatatcatacatac

SEQ ID NO: 137130 - DNA, 446 bp, Homo sapiens
gctagggtcagccaggcccaacagggtcatcaagacagggttagagaagatccttttttagatttagtgtcattagtacttgacttgatttcatattaaagccstttaatgaaatgcttattatctgtaatgaacttttgtttccatgcatgatactgacaagaagctcttgaattcatggcctggttgttaaaattcatgatgttttcaagcagcagtcctagagtctgcaccagcggaccgagcaggagtggaaagctcccctgcagcggacaccacagaactttcaccttgcagatccccctcaactcctcggcacctccgctatcgacagcctggaggtaagagctcaagagggactcagaaatagaaacgtgaaaaatgatttctagcttctgaacctttcctttgcctaattgtttcactgccaaaataatttttttagt

SEQ ID NO: 137131 - DNA, 504 bp, Homo sapiens
gtaatttttagtaacatcacattttgagttggatgatggtggtttttatgtcttacagatgagtcttccctttaaatgctgcaaagtgctgcatagtagatgttaaatgaaagtcagaaagaatcaaatgtgctgcaaataattgaaggtaagaaacaacaaatatttcccttcaaaaatgttaataaaagtgtattttctcctacctttctcaaagccagttctcaagacatctaatgaaaacgagtcttgtttacgtaatgcagggataggcagactctgaagagccacatggtaaatatttaagctttgtaggtcacacaggtctgtgccacctatttgtcaccttctgtttatttaagaaacttcaaaatgtraaagtcattcttaacatgcagggtgtaaaaaaacaggtgtgattattggtcataatgaaaatgtagtaggccactaattgaggaatggtcagaattacattttttctctttcctgcatgatgggcca

SEQ ID NO: 137132 - DNA, 504 bp, Homo sapiens
gtaatttttagtaacatcacattttgagttggatgatggtggtttttatgtcttacagatgagtcttccctttaaatgctgcaaagtgctgcatagtagatgttaaatgaaagtcagaaagaatcaaatgtgctgcaaataattgaaggtaagaaacaacaaatatttcccttcaaaaatgttaataaaagtgtattttctcctacctttctcaaagccagttctcaagacatctaatgaaaacgagtcttgtttacgtaatgcagggataggcagactctgaagagccacatggtaaatatttaagctttgtaggtcacacaggtctgtgccacctatttgtcaccttctgtttatttaagaaacttcaaaatgtgaaagtcattcttaacatgcagggtgtamaaaaacaggtgtgattattggtcataatgaaaatgtagtaggccactaattgaggaatggtcagaattacattttttctctttcctgcatgatgggcca

SEQ ID NO: 137133 - DNA, 636 bp, Homo sapiens
gtgggctgataaccatttaccctggcaaggaaataactgacatcaggtgagtcggagagaatgccaagttagcttcccccaggggaggaggctaggccattaacactgtgagtrcacggaacacccaagtttgtggaggaaccctgttctaaagctgaaaccactacttatcacaggagtgtctcatgtccagaaacctaagactctgactcccttcttgagagtttttatttgtatgaaaatatagcgtccccttcaaaattcatactgaaacttaatctccattgtggtggaagtaggaggtggagccttttaggaggtaattaagagggatccaccctcatgaatggattagtgccttatgaaagggctgaagagaatgagcttaaggccctttttgcctttctgtcccttctaccaagtgaggacagagcgtttttcccctcctgaggatgcagcaacaaagcccatcttggaagcagagactgggccctcatcagaaaccaaacattgatcttagacttcccagaccctagagcaatgacaaaataaatttctgttctttgtatattagccacatgggctaagtccagcagctcacacaatcttactccatctctatctcccaaatgcaag

SEQ ID NO: 137134 - DNA, 636 bp, Homo sapiens
gtgggctgataaccatttaccctggcaaggaaataactgacatcaggtgagtcggagagaatgccaagttagcttcccccaggggaggaggctaggccattaacactgtgagtacacggaacacccaagtttgtggaggaaccctgttctaaagctgaaaccactacttatcacaggagtgtctcatgtccagaaacctaagactctgactcccttcttgagagtttttatttgtatgaaaatatagcgtccccttcaaaattcatactgaaacttaatctccattgtggtggaagtaggaggtggagccttttaggaggtaattaagagggatccaccctcatgaatggattagtgccttatgaaagggctgaagagaatgagcttaaggccctttttgcctttctgtcccttctaccaagtgaggacagagcgtttttcccctcctgaggatgcagcaacaaagcccatcttggaagcagagactgggccctcatcagaaascaaacattgatcttagacttcccagaccctagagcaatgacaaaataaatttctgttctttgtatattagccacatgggctaagtccagcagctcacacaatcttactccatctctatctcccaaatgcaag

SEQ ID NO: 137135 - DNA, 550 bp, Homo sapiens
gttgtagtataaattggtttaatgtatctcagagacagcatttgtgtctctttctctctaaagtcaaatcagcatttgagagctccttgtaggcttagaccaataagaagaacctgatggacagaaaacagtttcttgagcatttgggggcaaatttaaaatactagggtggcctccccaaaaggtttgtgttagttgacayggtgagccttacataataaaaatcaggccaccaaacggcttgttcatgtgtaaaatgtcaggagcctaggcacagagattcctgttagtgctgggattttgtttcacggatatttagtaaaaacaaaaacaaaaaacagcagtttaattgatttggtatcaggacttgttaatgtgtggcaattgaggttcatcaatattaacataaaatagtcatcttggaataataaaggactacaaaaatataaacaatgaggcttctgtgctaatttatgcaaccaactctttctgtgcctcagtttcccacctttgaattaggagtaatttttaacatttacgtcaagggcat

SEQ ID NO: 137136 - DNA, 425 bp, Homo sapiens
gtcagagatctatcctgaaccagtcattcattcatttaccaagcacgattttatttaacttaacccttactatgtgccaactctgcaccaagaagaatgaggaagaccctattatcaagggagggcattkccacgcaagtaatagataaacatggggtagagaaagcatgggtgatgcctcagggactagataaactaagccttgtggggcaggaagtttcgaggagaactccaagctgaagaaactggatattcaaggacctagaggcaggtagagggccaggcacacaagaggcccttgataaatagtttattcactgaatacaaggacctgtgggctgcatcacatagaccagtggttctcaaaatatggtccccagaccaacagcttcagcatcatctgggacctcgttagaaatgcaaat

SEQ ID NO: 137137 - DNA, 425 bp, Homo sapiens
gtcagagatctatcctgaaccagtcattcattcatttaccaagcacgattttatttaacttaacccttactatgtgccaactctgcaccaagaagaatgaggaagaccctattatcaagggagggcattgscacgcaagtaatagataaacatggggtagagaaagcatgggtgatgcctcagggactagataaactaagccttgtggggcaggaagtttcgaggagaactccaagctgaagaaactggatattcaaggacctagaggcaggtagagggccaggcacacaagaggcccttgataaatagtttattcactgaatacaaggacctgtgggctgcatcacatagaccagtggttctcaaaatatggtccccagaccaacagcttcagcatcatctgggacctcgttagaaatgcaaat

SEQ ID NO: 137138 - DNA, 450 bp, Homo sapiens
actgagtggggaatgaggagttgtctatccaaccacttgcaaaatactagggttcatcctgtgtgcattgctcatcacacacattcattccacaaacactaatggagcatgactgtagataaaatamcatttcagacagtggaacaagagaagaaaactcagtttcctaacttaaaatccagaataataccaactagactaagttgcctcttgtccaggaaagtttatgccacaaatcaaaataaaggcaggtctttaggagaacctcattgctatcagagatgctctaaacttgtaggagcctatcaattaagtgtttagcactcaggtgttggtttatttggatcttgggcttgatgtgatgatttcttcttgagaaaacttgtttgggattccagctgttgggatcaaatccacagggataagagaagtcaacttccttcctcgctt

SEQ ID NO: 137139 - DNA, 618 bp, Homo sapiens
tacctcttaaaaatccttcagtttgtagaactagcagggcatttcacaaacaggcccaaaatgctcttatagagcctcaaaggatgaactccatgtcatctccaaccaggtattcaagagcagacaacttaacagacagtatacatcatccaaagaaagtttgcagaaagtttggctgtgcagttccaaaaattaaacccaaagtgttgcattacattttattctgaaagaagtataagagcctctgaataatgacttcctatgctgaaaaagaacttttccatttttcctgacccatgacttgatatcagacaaaaagcgtatcaggtgaaggaaacgctatttgcctgagtggttccatttttgtcaccatccaccttcctctaccttactgccaaacacacatgtggactttgaacaaagaaaattttcctttctgagtgtttcctccccttctagggaatacgccacgatgagkaaagcagtgtttggcattagtgggctccattaatactggctatgaaacataccagtcatgggatctaggacaagtttttatttctgtaccaaaatgttttcatcttaaaaaagaaaaataacattacttccataatagag

SEQ ID NO: 137140 - DNA, 431 bp, Homo sapiens
caagcataattgtgaagcagggtttcactttcacagcctcatcaacattttccttccactctgccttcactccaaacacacacaacaccctcaaatattctgagatctatcattttacaggagagagggacaaaaaattaaatctcagataattcccattaagacgttagacatttgtcatmttgttttccctgggccttaagagaaggcaatgcacactgagttaagttaaagcagagggatgactgcctagtagtaagattgcaatcattgcatgtgataggcagaggaagaatataagtcaggaccctcctgacttataccccacgattttggaggatcatgcctaggttatattaaataacttttagggtactgggacagtgaaactgaatccagcaagagcttaggagcagaaaagaagtccagag

SEQ ID NO: 137141 - DNA, 472 bp, Homo sapiens
tgcagtgtcgtgagaagccagaatcttgtcagaaaagagagactgttggctatagaaatgtctgaagtgttttttcaaaaccgaatacctgagattaaatgtaaactgctccacctcctcccactgataccttttgttacaaatcttcaggaaacctagaatggaacaacacagcaagggctgctgcctgggcattagaaatagaacaccacacccaatggctaaagctggtggccagagataagaacttagaggcatctctcctgcctagcmgactgggccctgtgttttcccgccacttcctttaaataaaccattcaggcacttgcctgtaaactgaaagtgatccatattctgctagctgccactctctctttctctctgcctgacctttcattcctgccttgcgtgaccgagggatggagggctgccctccagattcattgcaccctccctgcccaaggccttaagc

SEQ ID NO: 137142 - DNA, 472 bp, Homo sapiens
tgcagtgtcgtgagaagccagaatcttgtcagaaaagagagactgttggctatagaaatgtctgaagtgttttttcaaaaccgaatacctgagattaaatgtaaactgctccacctcctcccactgataccttttgttacaaatcttcaggaaacctagaatggaacaacacagcaagggctgctgcctgggcattagaaatagaacaccacacccaatggctaaagctggtggccagagataagaacttagaggcatctctcctgcctagcagactgggccctgtgttttcccgccacttcctttaaataaaccattcaggcacttgcctgtaaactgaaagtgayccatattctgctagctgccactctctctttctctctgcctgacctttcattcctgccttgcgtgaccgagggatggagggctgccctccagattcattgcaccctccctgcccaaggccttaagc

SEQ ID NO: 137143 - DNA, 513 bp, Homo sapiens
aaacaacaataaatggccaaccatgttcttcaggcatataattttctttcttcctaaagtggacactccctgggaaaatacaaataacttctaatttcaaatcctttcaacacaaaaggaaagtaggccaccttgaccagagcacaaaataatcttttccaagaggacttgaatgagtacctcattctccaagggaaaaatacataccaggattttttactactttattttgtttgatttttaaatactttttatagccatgaaaaaaaaaaacatattgatgaattgatttttccaaaacaaatcagcatgtcttttaaatttagcatgaacgtggcttcccagctgcaatatttttgagagtggttaagggacttgcttggagggcgttgcccartgttttcagctcaggggtaatagttccactcacgaggcattgatcttacactctaaagtcaccaaaacaccaactgtttctgtcctactagaacatattatagggataaagaattc

SEQ ID NO: 137144 - DNA, 530 bp, Homo sapiens
gaatggggtgtgtgtgtgtgtgtgtgtgtgtgcacccatgtacacttgtggtgtgtggagaggcagggcagggaaattttagaagcactgattaagatctggaagagaggcattacgtagagaaggcctaaagctattagccctgctcctttttggtacaagagcatgaattaggtcataacacaaatcttgcccttttatttttctttttggtcactctgcaatatacacctattaggattcaatytgagttcagtttaaagaaagagaaagttgggaaataggtggtacccacttcctaaccactctgagtagcaccctttccccaatgtttatccctagtggaagcttgatactgaataaataaaagagaatctccacatctatcataagtatcttatagaaagcccaagaataaaggaaatcctttgcttctgtcagaggcatgtgaaccagagcaactccatcttaaatgggagctggataaaattaggctgaaacctactgggctgcattcccagatggttaat

SEQ ID NO: 137145 - DNA, 564 bp, Homo sapiens
ttcattataacataaagtatgttagcatactattgggagcaaagaagaaatttgagtcaaaatgttaaataggtgtagatgtttttcaagtaacagtttgtacttgatcaaaaagatcattcagaagagcatgatgtagtagtcaaggctgtgggttttcaaatactttggactactgtatataggacaactttgaagggctaactatagattggtgaaaaaattactaaaaccataaattcttcctgagccatggaatataattctttaaaatggaatttggctagatcatctataagatccttttcaaatctgacattttatactcttatactaaagtaagagaaaagaaaacttgcaatacatttctttaacaaaaacatttctgctcttaaaatggtgtgctctgatagtcttatttctagatgattctttcatggtcatggaagtatataaaatatttacctttcaaatttaacagaaaaaaatgaacaatgtaatgaggtttaaaggagaatataattaatgaaygaatatctatcaaatatttattatgcagcaaac

SEQ ID NO: 137146 - DNA, 452 bp, Homo sapiens
ctcagttgtaagcatttggagtgagttggagtaggtagaaaagtcttcaggaaggacacaggttattatcaaaaccttaagtaatacccgagatttaaaaagcagagccaatgattgagtcatttctaaaactggaaagagcacargcaaaggcgtagagataggccaaaaaattgctgtgcaagagacactttggaggctaattgaatatgacatctgctagtcactcagatcagcagacccgacctagggataagaggaaggacggctgtatctgtcaggagagtgaaacttagcgcagtgagaaataaactcaggtagcttgagtagcatgttagttttctattcctgtttacatttatggaggttttagggaagaatgctattccttaccttttccagcttctccaggctgcccacattctttgccttccaaagatgccatgtcttaa

SEQ ID NO: 137147 - DNA, 518 bp, Homo sapiens
tacccacatatgcaaagtataatatttaaataagtttttagtggagaaaatacaaagtaagactttattatcagtattttgattcaattgcagaacttaaaawaaaaaactctaagtctatatttgaaagagtaaatactttgtggaaaagcatttaaaaattataataaattaacagttaattttccaatgttttatactttttgaacaaatattaaaagtcaaaacctaatctgttggataaaaataataacctaaagcattttagaatcctttgtcaatatatgcatgctcagagcctttctgaaacttggattaatgtttactcacagtatttatcactaaggtatgttggaataacattggagctaaaaaaagggatacagaatagcatttgcataagaagtattcttatcaaaatcaaaaataatattaaaattgatatttattacccatcataattgaagtagaaatgacacaggatttttcttagccactttgccagccagagacctcca

SEQ ID NO: 137148 - DNA, 446 bp, Homo sapiens
taatgactatcctattggatttcagacttgcacgggtcctgtagccccttcattctggccaatttctccagttttgaatgattatatttgccaaatgcctgtatctcattgcatctaggaagtaactaacttgcgtttggttttgtaggcttatgagcagaagggacttgccttgtctcagatgaggcttggactgtggacttttgaattaatgctgaaatgagttaaaactttggggyactgtcgggagggcatgactggttttgaaatatgaggacgtgagatttgggaggtgccaggggtggaatgatatggtttggctgtgtcctcacccaaatttcatcttgaatgggagttcccatcatctccacgtgtcaagggagggaccggtgggaggtaattgaatcatggggatggttacttccatgctgttctcatgatagtga

SEQ ID NO: 137149 - DNA, 440 bp, Homo sapiens
tggagtcaaaggagatcattttggaactttaaggtttaatgactatcctattggatttcagacttgcacgggtcctgtagccccttcattctggccaatttctccagttttgaatgattatatttgccaaatgcctgtatctcattgcatctaggaagtaactaacttgcgtttggttttgtaggcttatgagcagaagggacttgccttgtctcagatgaggcttggactgtggacttttgaattaatgctgaaatgagttaaaactttggggcactgtcgggagggcatgaytggttttgaaatatgaggacgtgagatttgggaggtgccaggggtggaatgatatggtttggctgtgtcctcacccaaatttcatcttgaatgggagttcccatcatctccacgtgtcaagggagggaccggtgggaggtaattga

SEQ ID NO: 137150 - DNA, 440 bp, Homo sapiens
tggagtcaaaggagatcattttggaactttaaggtttaatgactatcctattggatttcagacttgcacgggtcctgtagccccttcattctggccaatttctccagttttgaatgattatatttgccaaatgcctgtatctcattgcatctaggaagtaactaacttgcgtttggttttgtaggcttatgagcagaagggacttgccttgtctcagatgaggcttggactgtggacttttgaattaatgctgaaatgagttaaaactttggggcactgtcgggagggcatgactggttttgaaatatgaggacrtgagatttgggaggtgccaggggtggaatgatatggtttggctgtgtcctcacccaaatttcatcttgaatgggagttcccatcatctccacgtgtcaagggagggaccggtgggaggtaattga

SEQ ID NO: 137151 - DNA, 634 bp, Homo sapiens
atatgtaagaatggcaccattttttgtataacatgtgcacgcacacacgtttatgtagcaggaataaaacattttttgtctgttttttaatcgactgacattaaggtttctgsctgtgtttagaaaaattccttacataagacgggtacatagacagataatcaaagaccagtagtatctcccctgaatttggaaatagcaggaagttaagaagcaaaagaaaataaaataagaaattgatagaagaaacagacatacagagtaaaaagagggagaatatggcaagaaacaagaactgataacatgtggagaaagaacagggttattaaacgttcaattttgaatagttcaccttgttacaaccctctcctcaccactatggctactccaacattcactaaagtctacaatacaaacaaaggctttgtgagagtgacactgggtaaactgagccaaggagctacatttcacctctgaataggcaggaagcagagaacagagaacattcagggaaggtaagagtttagcagtataagaactccaagaaagaggttaccctaaccaagaaacttccaaagcatatttgataatcaccttgacataattttatttaaatctcaaaagacagagcaac

SEQ ID NO: 137152 - DNA, 536 bp, Homo sapiens
aaagttttaaagatttttccatagaaaaagaaaaaaagaaagaaagttctgaggaatgctttgactccaagagatgtcaattggtgcttacctgaacacatacttgggttgaggggtacagctggcaggggggcatgaataacttttgaacacatctatacaagttactttaagccacaagccccgctcattgctgcctcaacccacaaaataaaaaagcaaagatagataacatttaaagtaagrtaaatgataaaggggcagtatcttgaatccatcatcgactgtttcctatgcttgtaagccacagattttggagtgggagtacaattattagaagatttttatgtttctcttcattgagctgaggatcaatagcatatgaactgaagggacagttttgccagagttagagcattttaataaatatcaacttggtaagccctggtggaaatttgaattgctatttacagatgtataaagtaaaaagaaaaaaaatgctattatttagaattgtatttgagtgttggacaccc

SEQ ID NO: 137153 - DNA, 536 bp, Homo sapiens
aaagttttaaagatttttccatagaaaaagaaaaaaagaaagaaagttctgaggaatgctttgactccaagagatgtcaattggtgcttacctgaacacatacttgggttgaggggtacagctggcaggggggcatgaataacttttgaacacatctatacaagttactttaagccacaagccccgctcattgctgcctcaacccacaaaataaaaaagcaaagatagataacatttaaagtaaggtaaatgataaaggggcagtatcttgaatccatcatcgactgtttcctatgcttgtaagccacagattttggagtgggagtacaattattagaagatttttatgtttctcttcattgagctgaggatcaatagcatatgaactgaagggacagttttgccagagttagagcrttttaataaatatcaacttggtaagccctggtggaaatttgaattgctatttacagatgtataaagtaaaaagaaaaaaaatgctattatttagaattgtatttgagtgttggacaccc

SEQ ID NO: 137154 - DNA, 389 bp, Homo sapiens
tagttacctttaaataattgaaatgcccaaccattctcctgaccccataactttaggtcagcccagtatattttaaaaacatcaaactactatccaatttaaactgcttccagggcctgggacacatgacataggtaagggaagttaagaagaaaaacttagtcttatatgggtggaggattatactgtggtaccctctgaatggctgyttagtcattgctgttttctctctcattgggtgattttatggattctacagagatgcttctgatgaggctctcccactgtagctctcacaatgctggcactggctggccatttacaactcctcctctgttgaaatagttacacacttcaatgtggttctcttgagtggaattttttttaaa

SEQ ID NO: 137155 - DNA, 491 bp, Homo sapiens
atttactttggctatatgatggaaattcttagcttttctcccatgatggaataaatatcataaactcaattaaacgtctaagattccaaaggaggcatactcatctacaatattttccaagcctcaatgggcaaagctacccaaattgggtgtaatgggcattcctgatatcaataatggcctccctctttttatcctaaagccatctttctctctactctcaagttcacttaaaatatttcacaaggatttcctatacagatgactaacagtttttgaacacacactatgtataaagcactaggtcacacaagttatgttatttaattcacataaccrtgtgacatgggcatgcatactttcattttactgatggaaactgaggccaagaaaaatggagtttttgtacaagattaccaggtaattggctgagccaagctatgaacctatatcgatcaaccttatacaaactctcattggatagaaaatgg

SEQ ID NO: 137156 - DNA, 491 bp, Homo sapiens
atttactttggctatatgatggaaattcttagcttttctcccatgatggaataaatatcataaactcaattaaacgtctaagattccaaaggaggcatactcatctacaatattttccaagcctcaatgggcaaagctacccaaattgggtgtaatgggcattcctgatatcaataatggcctccctctttttatcctaaagccatctttctctctactctcaagttcacttaaaatatttcacaaggatttcctatacagatgactaacagtttttgaacacacactatgtataaagcactaggtcacacaagttatgttatttaattcacataaccgtgtgacaygggcatgcatactttcattttactgatggaaactgaggccaagaaaaatggagtttttgtacaagattaccaggtaattggctgagccaagctatgaacctatatcgatcaaccttatacaaactctcattggatagaaaatgg

SEQ ID NO: 137157 - DNA, 560 bp, Homo sapiens
caggtgtcttcgtccacttgcattgctagaaaggaatgcctgagactaggtcatttataaagaaaagaggttcatttggctcacagttctgtgggctgtacaagaagcatagtgtcaatttctgcttctggcaggaccttaggaagcttacaattacgcagaataggaaggaggagttggcatatcacatggcaagagcgggagcaagagaaagggggaggtgcctggctctttytaacaatcagccattgtgtgaactaatagagcaagaactcactgattacctcggggagggcagcacgccattcatgaggtatccttccccacgacacaaatgcatcccactaggcccacctccaacattgggggtcacatttcaacatgagaattgaagggaacaaatatccaaattatatgaacaggtttcagggattagtaagaggacaccttggggggaggggcttattttgtcttccacagtgaaacagagagtaaaagtgaaaaaagggacacagaaatttgtaaaattcacattaacattattcaccaaaagcacctgc

SEQ ID NO: 137158 - DNA, 569 bp, Homo sapiens
tccacttgcattgctagaaaggaatgcctgagactaggtcatttataaagaaaagaggttcatttggctcacagttctgtgggctgtacaagaagcatagtgtcaatttctgcttctggcaggaccttaggaagcttacaattacgcagaataggaaggaggagttggcatatcacatggcaagagcgggagcaagagaaagggggaggtgcctggctctttttaacaatcagccattgtgtgaactaatagagcaagaactcactgattacctcggggagggcagcacgccattcatgaggtatcctyccccacgacacaaatgcatcccactaggcccacctccaacattgggggtcacatttcaacatgagaattgaagggaacaaatatccaaattatatgaacaggtttcagggattagtaagaggacaccttggggggaggggcttattttgtcttccacagtgaaacagagagtaaaagtgaaaaaagggacacagaaatttgtaaaattcacattaacattattcaccaaaagcacctgcaccactacctactatttgagc

SEQ ID NO: 137159 - DNA, 617 bp, Homo sapiens
gaagatactggactaattaagaccaattctggcaacatcatcagtgccattcagtggcctgtggcagcaacgtcttaaccaagctgttcatataaaaactttgtgaggtcctgccactgctagtttcctatagtccctccttttccatgccaggctgtccagtcttaccattgatgttgtgagctctgaatatcactccatttccttgtctgcttgaattcattgaattcataagtatcagtttctggtatctgagccaagaactgtactggattcacctacctcacaagggcttctgtgcagattccattaaattagagatggggaaaaagaaatgcttcattcatttaaatgttatgtyggggaaaagagattaaaagtaactgcagcacataagatccagcaatcctcctcctagctatttacccaactgatttgaaaacttaaccaaaacctgaacacatatgtttaaagcaacttctgtaatcattaccaaattctggcagcaatcaaggtgtccatcaataggtgaatggataagcaaactgtggtacacccatgcaatgggatactattcagcaatgaacaggaattaactattaagttaagcaaagaca

SEQ ID NO: 137160 - DNA, 560 bp, Homo sapiens
caggtgtcttcgtccacttgcattgctagaaaggaatgcctgagactaggtcatttataaagaaaagaggttcatttggctcacagttctgtgggctgtacaagaagcatagtgtcaatttctgcttctggcaggaccttaggaagcttacaattacgcagaataggaaggaggagttggcatatcacatggcaagagcgggagcaagagaaagggggaggtgcctggctctttttaacaatcagccattgtgtgaactaatagagcaagaactcactgattacctcggggagggcagcacgccattcatgaggtatccttccccacgacacaaatgcatcccactaggcccacctccaacattgggggtcacatttcaacatragaattgaagggaacaaatatccaaattatatgaacaggtttcagggattagtaagaggacaccttggggggaggggcttattttgtcttccacagtgaaacagagagtaaaagtgaaaaaagggacacagaaatttgtaaaattcacattaacattattcaccaaaagcacctgc

SEQ ID NO: 137161 - DNA, 570 bp, Homo sapiens
ccacttgcattgctagaaaggaatgcctgagactaggtcatttataaagaaaagaggttcatttggctcacagttctgtgggctgtacaagaagcatagtgtcaatttctgcttctggcaggaccttaggaagcttacaattacgcagaataggaaggaggagttggcatatcacatggcaagagcgggagcaagagaaagggggaggtgcctggctctttttaacaatcagccattgtgtgaactaatagagcaagaactcactgattacctcggggagggcagcacgccattcatgaggtatccttccccacgacacaaatgcatcccactaggcccacctccaacattgggggtcacatttcaacatgagaattgaagggaacaaatatccaaattatatgaacaggtttcagggattagtawgaggacaccttggggggaggggcttattttgtcttccacagtgaaacagagagtaaaagtgaaaaaagggacacagaaatttgtaaaattcacattaacattattcaccaaaagcacctgcaccactacctactatttgagcac

SEQ ID NO: 137162 - DNA, 610 bp, Homo sapiens
cgcctactcattctgtgaccttaggcaagtttcttcatgctttgagcctcaggttcctcttctgtaaaatacgtaactcctactatgcaaggtcatttgggagagtcaatgagaaaatacgtacagcaatacttaatactacttaatgcagtggctgatacgtaacgtatgctcagaacacgttggcctgtatgttcaaaacgtgttgacctgagataggtgaaattgatggtgtttctaacctttgataacaggagtgggcttcrctatcaccttgcttctttgagggtgaggatattgtgcttagcaaaatcctcaaaatttgagaccactcattctaatattggcttttctcagtttaaaaaaaaaaggaaagatgtttactttccccctggaattatagaatcacaaattgttagacgtggaagggactttgaaggtggtaatgccagcccctgctcatttttgtagctataatgggtattccagcactttgggaggccaaggtaggaggatcacttgaactagggagtttgagaccagcctgggcaacataggaagaccctgtctctacaaaaaatacaaaaatttttctgtggtaccaacaata

SEQ ID NO: 137163 - DNA, 561 bp, Homo sapiens
attctaaaggcttgaccttgatactccattgaggacatggctttcctccttaaataagactttctgttccaagagtttgaaaaacacctgcttttcagtttaagagttggagaagtggaagggagcttggagaaaatccattaagaatgagaaagtcaaccattggggaggggttgtgtctttccagtcacagagaaaactggaagaaccattggaactctgttaaatacctgcatggaaacatgaatatgcaaaaacatttattgcaaccctttttataacaccaaaaaaggctctaaaagtccaagaatatggtattgcttaaataaatcagggtagaaaaattatatgtrataatacttacaggcaaatttaaaaattatattttagaagaatctttgattacaggctgacttgcacataatgctagagaacagataaaataggattccaattttataaaaatagcctgtgtcccagctgagcctgaacctctgggatttagacccgtctttgcatgttagagaaactctttaagcaagtgcttaattgcatgagttt

SEQ ID NO: 137164 - DNA, 510 bp, Homo sapiens
agattgtaagtgtactcatcataaaaaatgataaatttgttacaaatttagccaggcatggtggcagttgcctgtaatcccagctactctggagtctgaagcaggagaattgcttgaacccgggaagcagaggttgcagcgagccaagatcacgccactgcactctccaacctgggtgacagcaagactctgtctcaaaaaaaaaaaaaaagataaatttgtgagataaggcaaatgttaattagctcaatttagccatttcrcaaggtgaacaaattttaaaacatgtcatacatcataactacatactattttatttgtcaattaaataaaaaagtaagtaattttttaaatgttttataagccagggagctttcatcttctctttctttaatctctgtcatttgattttacagtaagaatgtaagcaaaaacagaacgatgcaattgtattacataatatatttactagtttgctctatttttattttttgtggagatggggtctct

SEQ ID NO: 137165 - DNA, 628 bp, Homo sapiens
atattaaatacttgaaatttactaaaagagtagatcttaaatgttctaaccacgtacacacaaagtggggtgtgaatattaggcagtgaataagttaattagcttgattgtggtaatcatttcacaatgtatacacacatccaaacatcacattgtacattgtaaatatgtacaatttttgttaattataccacaataaagccaggggtggtgggggaagaaagtttagttacttctttgtaaaatgggtttgtggaattgcaaaagaaatagacataatatgtgtaaagcatctatacagcaaactggcaaacactaaatgggtttgtggaattgcaaaagaartagacataatatgtgtaaagcatctatacagcaaactggcaaacactaaatgataaaagagtaaataataactattattataatgatccaatattgttattaaaagaggatttttcacatatctttgtctggaaatccaggatgagatgagatactaaaatgtatatgagcaaaagaaaatctatgagaaagattgagtcatgctgaacacttggatccaagtgaaatttagatttgtgtaggaagagaacttcttttgagcttctctcttattatccccaaa

SEQ ID NO: 137166 - DNA, 207 bp, Homo sapiens
ggaaatagcaacaaaaattaaaaactgcagaaaacttactaatttttaaactacttttaagtgtagttttctatgtgctcttcacaaattactcaaagatraaccaggacaggaattattaaagtctttttaatagatggggaaaataagactcagtaaaaaagagacttagctaaagtcacataacctagtggaccaagtagtatt

SEQ ID NO: 137167 - DNA, 572 bp, Homo sapiens
ctggaagacttttcagagaggtaacgagataaagtacagcattttccaaatttatgagattaggaaaaccttctttacaagggaatttcatgagagtaacattctgggaagcacacttgagaaatgctgttaagtctaaactatatggaataaatgtattttgcaagaagtttgattaatgacttgattgaatacyagtgtttgggccagtgagatatggtaccagaattcatgcaaaataatttattcaatgaaaaatatttcattttaattctgtacttttgaaaaaaatatttttaaactcctaaagatgggaaatttggacgggaatgagctactacatgtggcaggcataagttattcaatttatagagtccctcatttcatttttacaagaactctataagatatgtattgttctctctacttttcatatgaaggaaacaaaaactcgagctatttaagtgacttacccaaaaaactaatggtagaacttcttcttcttctcagacttttggctaagatcaaatgtaaaaaaaactaatggtaaggccagagtttgagaccaggcc

SEQ ID NO: 137168 - DNA, 572 bp, Homo sapiens
ctggaagacttttcagagaggtaacgagataaagtacagcattttccaaatttatgagattaggaaaaccttctttacaagggaatttcatgagagtaacattctgggaagcacacttgagaaatgctgttaagtctaaactatatggaataaatgtattttgcaagaagtttgattaatgacttgattgaatactagtgtttgggccagtgagatatggtaccagaattcatgcaaaataatttattcaatgaaaaatatttcattttaattctgtacttttgaaaaaaatatttttaaactcctaaagatgggaaatttggacrggaatgagctactacatgtggcaggcataagttattcaatttatagagtccctcatttcatttttacaagaactctataagatatgtattgttctctctacttttcatatgaaggaaacaaaaactcgagctatttaagtgacttacccaaaaaactaatggtagaacttcttcttcttctcagacttttggctaagatcaaatgtaaaaaaaactaatggtaaggccagagtttgagaccaggcc

SEQ ID NO: 137169 - DNA, 576 bp, Homo sapiens
cctggtttccccttccttctgttgggctgaagagttttcctcaagccttctcaggaagaaggcccaattaacatcactcattcttgtgccactaaaacctgcacaatgatttgaaaaaaacaccyctaatttgaagctgttaatacagctgtaattttatttcttgaacattgcctcttatagggtactgccaatctatgaaaacaaaccagtaatagcaccatttgaaaaccacccagggtcaattgtcctcttttcttttttctaaataacctattaaaagactcctagcagctataactataactaaagaactagcagtgcctattatgcctgggtagtagtagtggtagcacagcaccagtcccagaaatattccaaaccaatagtctagcaattttccatgcccagggtactcaatctgagaaagagtttggctgttcgtaaatgaagaagtgaaaggtttttatatctatgatttttcagaatgcaaaattttaaagacaatttctgtccactaccatgagatgcataattttaatatttgatttctggagtatttttggccttgacata

SEQ ID NO: 137170 - DNA, 603 bp, Homo sapiens
ctacagcccataggcaacttaggtattcctagagcaatatttctatacgtagcataaatgattgtgaaggcctgttggattttttgcatgaaacgtgtcggaatgtgttttgaaagctatttctcattactagccttacaaagtgcattaaacattcagaatcaccgttattctraaatatactttttacacagtacaaagaaagccaatctaatctgtccaggaaaaagggggaagaaactcttaagggagaaaatacctacaagaaatattaaagccagtgcaaccagatcagtatgagcaatttaattatttgatggcaacctttcactagtgtttcattttcagtagcgaatggtactgtgagcaattttggctcccccaaaaatgttttattttatttattttcagggccaccttctgaacagttgagaacagaacacttatgggcacaatttagaatatattaggtaaaacagaaacagacttaaaatactggcttgatcaataaaaagtgttaaataagaaaataagtgggtatttttgctttgttttgtgttgtttgcgcagaaatactgaattttttatcagaaagaggatact

SEQ ID NO: 137171 - DNA, 603 bp, Homo sapiens
ctacagcccataggcaacttaggtattcctagagcaatatttctatacgtagcataaatgattgtgaaggcctgttggattttttgcatgaaacgtgtcggaatgtgttttgaaagctatttctcattactagccttacaaagtgcattaaacattcagaatcaccgttattctaaaatatactttttacacagtacaaagaaagccaatctaatctgtccaggaaaaagggggaagaaactcttaagggagaaaatacctacaagaaatattaaagccagtgcaaccagatsagtatgagcaatttaattatttgatggcaacctttcactagtgtttcattttcagtagcgaatggtactgtgagcaattttggctcccccaaaaatgttttattttatttattttcagggccaccttctgaacagttgagaacagaacacttatgggcacaatttagaatatattaggtaaaacagaaacagacttaaaatactggcttgatcaataaaaagtgttaaataagaaaataagtgggtatttttgctttgttttgtgttgtttgcgcagaaatactgaattttttatcagaaagaggatact

SEQ ID NO: 137172 - DNA, 334 bp, Homo sapiens
gcttatggacaaagcagtctaacagattccagatgtaggaaagggctcttttcttttgcaaaatggaagaaggtccattgcaaaagggcaggctggacagaagaaccagtatgtatactaccacaggaatatgccttttagaaaagagaatctagaaattgattcaatgaaaactacctgtgcccaagtacatcttagaaagcctctgtgtgttgccctccccacctgactcagatcaggacaygctaccccaaactataacaccttggcatttgagaaaacagcagaagcaagaaagcccctctcatctcccaaccctctgtcattttctcct

SEQ ID NO: 137173 - DNA, 517 bp, Homo sapiens
gactaggtgtgtagtaggctataccatttaggtttaagtacactttgcaacatttgracaatgatgaagtcacctaccacacgtttctcatatcctcaccattaagtgacacatgattgcagtcacttgattgacacttcctccttcccagtctcactcttcctagtccatcacgattgttccctaaaaccacttcccaatataaattacatgctaatagcatttttgcaaagattttcatggcataccaaacaaaaatgtatataaaagcagagaaaaaactgaatacaggttattcttattttcatggtgaattctgaatattctaagttttcaacactgaacatgcaataacattttcatccaaaaatgttgtacaaaactaatgctttcaaaatttctaaggatttgattataatgccttgaattagcagcaaaggctctagaaacatgaagataaattagtatctgaatgtgttaacactaggtttctggttaaatggagtatattctcatc

SEQ ID NO: 137174 - DNA, 534 bp, Homo sapiens
gatatcacttcctacagattcatgttgatagagagccagaggaattaccaaaataatatggagaaatagccaacccagtagttcagatctggkactaagtgttatacttttctggtgtccacctaatctcacccctagtcctactaaggtcctctccagaaggcaggtctgctccgacaagcccacacatcatgaagaggaggcttcctctcactctcttacttctaaccttgggctgatttatttgctcaacttctctagctttctttagaaaagaagttacataagtaagaactttcttctgctcaggacacattgactacaacaaagctattttagattcctaaaatattttgagagggtgcttactaaaagttaaacattaaatatcattatgtcttttatttttctttcaaggagtgaaaaataatatgaggctgaatagcctatcaaaatatcaattttttttgttctcccatccatagaaattttctccctccatcccaagcaggtttctaagcttatgttttccct

SEQ ID NO: 137175 - DNA, 534 bp, Homo sapiens
gatatcacttcctacagattcatgttgatagagagccagaggaattaccaaaataatatggagaaatagccaacccagtagttcagatctgggactaagtgttatacttttctggtgtccacctaatctcacccctagtcctactaaggtcctctccagaaggcaggtctgctccgacaagcccacacatcatgaagaggaggcttcctctcactctcttacttctaaccttgggctgatttatttgctcaacttctctagctttctttagaaaagaagttacataagtaagaactttcttctgctcaggacacattgactacaacaaagctattttagattcctaaaatattttgagagrgtgcttactaaaagttaaacattaaatatcattatgtcttttatttttctttcaaggagtgaaaaataatatgaggctgaatagcctatcaaaatatcaattttttttgttctcccatccatagaaattttctccctccatcccaagcaggtttctaagcttatgttttccct

SEQ ID NO: 137176 - DNA, 632 bp, Homo sapiens
atatctgagaaatacaggatgatgtaaaaagaccaaacatatgatttgttggcatccctgagagggagggagggaaggagggagggagggagggaggaagggagggagggagagagagcaacctagaaaacatgcttgagaacatcgtccacaaaaatttctgcaaccttgtgagagagattgactttgcaaattgcaagaaatcagagaacccttgcaagataggatacaagatatttgcccccaagtcagatggttatcaaattctccaaagtcaacatgaaagaaaaaatattaaagggagctagagacaaggtgcaggtcacctacaaaatgaaccccattaggctaacagtggatctttcagcagaaattctacaaaccagaaaagaygggggtacctatattcagcattcttaaaaaaaagaaattccaatcaagaatttcaaatccagcttcataagcaaatgctaacggaatttgttaccaccagacttgccttactagagttccctaaaggagtgctaaacataaaaatgaaagaccattacctgccaccacaaaaacatacttaataactgactgacactataaagcaactatacaatcaagtctacataacaaccagctaa

SEQ ID NO: 137177 - DNA, 582 bp, Homo sapiens
ttaccaccaaccccacaggaatatagaaatctctcagagactgttatgaacacctatatgcacacacactagaaaacctagaagaaacggataaattcctcaaaattacaaccttccaaaattgaacgaggaataaactgaaaagttggaaacgtcaataatgagttccaaaattgaatcagtaataaaaaagcttaccaastagtaaaagctctggaactgacaggttcacagcaaaattctaccagacatacaaagaagagttggtaccaatcttatttaaactattccaaaaagttgaggagggactcctacctaactcattctatgaggtcagtgtaattctgattccaaaacctgacagagactcaatgaaaaaagcaaacttcaagccaatatccctgagaaacatatatacaaaaatctttaacaaaatactagcaaatcaagtccagtggcactcaaacatcaaatctattacaattaagtaggctttatggctggaatgcaaggttggttcaatatacacatatcaataaatggattcatcatgtaaacagaacaaaaagcaaaaactatatg

SEQ ID NO: 137178 - DNA, 582 bp, Homo sapiens
ttaccaccaaccccacaggaatatagaaatctctcagagactgttatgaacacctatatgcacacacactagaaaacctagaagaaacggataaattcctcaaaattacaaccttccaaaattgaacgaggaataaactgaaaagttggaaacgtcaataatgagttccaaaattgaatcagtaataaaaaagcttaccaagtagtaaaagctctggaactgacaggttcacagcaaaattctaccagacatacaaagaagagttggtaccaatcttawttaaactattccaaaaagttgaggagggactcctacctaactcattctatgaggtcagtgtaattctgattccaaaacctgacagagactcaatgaaaaaagcaaacttcaagccaatatccctgagaaacatatatacaaaaatctttaacaaaatactagcaaatcaagtccagtggcactcaaacatcaaatctattacaattaagtaggctttatggctggaatgcaaggttggttcaatatacacatatcaataaatggattcatcatgtaaacagaacaaaaagcaaaaactatatg

SEQ ID NO: 137179 - DNA, 582 bp, Homo sapiens
ttaccaccaaccccacaggaatatagaaatctctcagagactgttatgaacacctatatgcacacacactagaaaacctagaagaaacggataaattcctcaaaattacaaccttccaaaattgaacgaggaataaactgaaaagttggaaacgtcaataatgagttccaaaattgaatcagtaataaaaaagcttaccaagtagtaaaagctctggaactgacaggttcacagcaaaattctaccagacatacaaagaagagttggtaccaatcttatttaaactattccaaaaagttgaggagggactcctacctaacycattctatgaggtcagtgtaattctgattccaaaacctgacagagactcaatgaaaaaagcaaacttcaagccaatatccctgagaaacatatatacaaaaatctttaacaaaatactagcaaatcaagtccagtggcactcaaacatcaaatctattacaattaagtaggctttatggctggaatgcaaggttggttcaatatacacatatcaataaatggattcatcatgtaaacagaacaaaaagcaaaaactatatg

SEQ ID NO: 137180 - DNA, 582 bp, Homo sapiens
ttaccaccaaccccacaggaatatagaaatctctcagagactgttatgaacacctatatgcacacacactagaaaacctagaagaaacggataaattcctcaaaattacaaccttccaaaattgaacgaggaataaactgaaaagttggaaacgtcaataatgagttccaaaattgaatcagtaataaaaaagcttaccaagtagtaaaagctctggaactgacaggttcacagcaaaattctaccagacatacaaagaagagttggtaccaatcttatttaaactattccaaaaagttgaggagggactcctacctaactcattctatgaggtcagtgtaattctgattccaaaacctgacagagrctcaatgaaaaaagcaaacttcaagccaatatccctgagaaacatatatacaaaaatctttaacaaaatactagcaaatcaagtccagtggcactcaaacatcaaatctattacaattaagtaggctttatggctggaatgcaaggttggttcaatatacacatatcaataaatggattcatcatgtaaacagaacaaaaagcaaaaactatatg

SEQ ID NO: 137181 - DNA, 516 bp, Homo sapiens
gatatgaaaaaaaaaaaaacaacagtagaatgtgatatcctagaagtcaagtgaggaaagtaatttaaaaagaaaatgtaataaatcaaccgctgatggttaaraaagaaaataactgaaaatagatttactcacatggaagtcactggtgactttggcaaaatgcatctgtggagtggtgggtcaaagtgttgagtagggtaggttcaagagagaatgagtattgttttaagccagtacatttcaagataatttctcatacattaaaagccagtacatttcaggataatttctcatacattaaaagttaactgatacaaagagtgtggtatcaagaaagtttttttgaaagtgagaaacttcaatatattttatgctgataacaatattcataaataaaaaagaaaaattgctggagtgaagtctttgagcaagaaagatgaaatccagtacacaggtgaaaatgttgacctttgatagatatgtggataattctttggcagtaacaggaaaaaa

SEQ ID NO: 137182 - DNA, 580 bp, Homo sapiens
attgcgtaaggattccaactagaggtatttatgaagacgacttcatggaggtggtgaaatttaagatatgtgttgaagaatgagctaaatttaatgagaacrattaaaacaaacaagaaatattttattaggcagcgcttcataaacataactctgtggaatgacagtaactcagaccaggatgtgttatgttatattaagaaacaaaggtggcatagcagcaaatgacaatgtttaagtattatttttcttatataatttatctcaatataataatattttcttacttgcttcaaaggtgtggaaaaagtatacatgcaaagtaactactaatgaaagtttgtgaagatgttaaaatcaacaaattcatcacccttatcttaagaatatttttccctttgctaatgttgacatctttacttaattcttgtatttctctctttccttttattgccaaaaattttaaataaatgagctatattcagttcttcagtagcaatactttattattgcacatgtattttaatggccccttatttgtcaaattcaaaggttttcatctattctcatttttcttcac

SEQ ID NO: 137183 - DNA, 616 bp, Homo sapiens
tagaatgttcactggaagattaacagttgtcaagaaagaacaaaattttgcagtcaccatccaatctagcttccttgmagtatgtatgagccactggtaaaacatatttgagaaaccaatcagaaaagatatccctggagatccatgcctttttgttagcataataatggactcctggaaaactgagtacacaagcttttgtctatcatggcaagttacacttatgcaatgcctgctgcattggcatatcccaacacagttattctgttattggcatccttcattactgtaggttgtctcatcagctgtagtcagtgtcttcctggggcaataacaccaaaacagtgatatttcttcagcattatagacttgacatggagtcaaaatttcatcagcaatgaccctggcaaatttgtcaataaatttctcctctatttcaagatcagtagatgctttgttaccagatctttaaaaatttaatgctatgtcttttttaaaaacttctacagccagcctattgaacgttcatacttccctttatcagttcatcatgatagatctttgcttgtttcatgatcagcatatcattaagtgtcatgtgttcactgtgacactg

SEQ ID NO: 137184 - DNA, 543 bp, Homo sapiens
ctggtgccactcttgtacagcctgcagaatatgagccaattaaacctcttctttataaattacccagtctcaggtatttctttacagtgattcaggaacagagtaacacagtggaaacttgccattggccaatatggcctgcacacctgccattttatttccctttgagagcatgcttagatgggggaatctgggcctgygcaaaaaaaaagacatatcatcattgaaggggctgggagagtcttttttatcttagggacactgaataaactccactgtgtgcctgtgcttagactgtgacctgtcacagaaggtcaggcatggaactttacaattgtggcatcaggtcagcattcaggtaatttcagatttgggggcatttgatattggattttggattagagatgcttaacctgtgtaaaaaagaaaccactatctccctctccctcattgcttagttagaaagtcaataagcagatggattattattattattattattttgaggcagagtctcaccctactgcctaggctggagggcag

SEQ ID NO: 137185 - DNA, 607 bp, Homo sapiens
tggtacctgtttttacaattgatgaacctacactgacatgtcattattattcaaagtccatagttttcattagggctcattcttgatgtatagttcatgggctttgacaaatgtataataacatgcatttacctttatagtatcacacagaatagttttaatgacttaaaaattgtctatgctttgcctacttatttattcctccccaacaacctctggcaaccactgatcttttcattgactctataggtttgccttttccagaatgtcatatagttagaattataaagtatgtagcctttttcagactggcttccttcacttagtaacatgcatttaagattgctttcatgtcttttcatgttttgatagctcatttattttcagtgctaaatagtyttccaatttctggatgtgccaccgttcatttacctgttaatttactaactggcattttggttattttcaagttttggcaataacgaataaagctgctataaatattcatgtacaagtttttgtgtgggtatgaattttcaacttatttgattaaataacaatgggtccaattgctggattgtatggtaagttttgtaagaaagagctg

SEQ ID NO: 137186 - DNA, 585 bp, Homo sapiens
tgttgagagcctctaaaaaacttttagttcagcaaatgtatttctcagttccaagacttctgtttgacttttaaaagttatttcgatctctttgttaaatttttccgataaatttttgagctgtttttgtgttacattggagatcactgagtgtattagtctattcttgcattgctataaagaaacaccggagactgcataatttataaagacaagaggtttaattggctcatggttctgcaggatttacargaagcatggtatggcatctgcttggcttctggtgaagcttcagggaattttaaataatggcagaaggccaagtgggagaaggcactttacacatggtgaaagcaggagtgagagagaatggaggaaggaggtgccacacacttttaaatgaccagatcttgtgagaactcactatcatgaagacagcactaagctacgagaaatctgcccccatgatccaaacacctcccaccaggccccacttccagcattggagattacaatataatatgataattggttggggacaaatatctaaacttgatatttgaggaaactgagtttccttaaaac

SEQ ID NO: 137187 - DNA, 585 bp, Homo sapiens
tgttgagagcctctaaaaaacttttagttcagcaaatgtatttctcagttccaagacttctgtttgacttttaaaagttatttcgatctctttgttaaatttttccgataaatttttgagctgtttttgtgttacattggagatcactgagtgtattagtctattcttgcattgctataaagaaacaccggagactgcataatttataaagacaagaggtttaattggctcatggttctgcaggatttacaggaagcatggtatggcatctgcttggcttctggtgaagcttcagggaattttaaataatggcagaaggccaagtgggagaaggcactttacacatggtgaaagcaggagtgagagagaatggaggaaggaggtgccacacacttttaaatgaccagatcttgtgagaactcactatcatraagacagcactaagctacgagaaatctgcccccatgatccaaacacctcccaccaggccccacttccagcattggagattacaatataatatgataattggttggggacaaatatctaaacttgatatttgaggaaactgagtttccttaaaac

SEQ ID NO: 137188 - DNA, 474 bp, Homo sapiens
tggataataaatatcctcatgatttcagcttcttttagttttattttgttagagttaagagcaccataactgttttatgtcgaattatgccactcyataaatttgttctttcccactccaacttatgtttgtctacctgaacctgatctatatattaatcaaagtccaatgacatttttgacacctgaaaacctcattccaagggaagagagccctactctagttcattaacctttattgtctatagcattagttcaaacatctcccagcacatcagaaccatttaggaacttaaaatatccagcttcccaggctctgcttcagacgtattaaatcagtcgctgaaaggaaaaaaatctggaaattgcatttttaagaagatacttgcatgattgttgtggtcatctatatttaggaaacactgatctacattgcattaatacttagtttgcatgcttattttctaacgtcata

SEQ ID NO: 137189 - DNA, 481 bp, Homo sapiens
taataaatatcctcatgatttcagcttcttttagttttattttgttagagttaagagcaccataactgttttatgtcgaattatgccactctataaatttgttctttcccactccaacttatgtttgtctacctgaacctgatctatatattaatcaaagtccaatgacatttttgacacctgaaaacctcattccaagggaagagagccctactctagttcattaacctttattgtctatagcattagttcaaacatctcccagcacatcagaaccatttaggaacttaaaatatccagcttcccaggctctgcttcagacgtattaaatcagtcgctgaaaggaaaaaaatctggaaattgcatttttaagaagatacttgcatgattgttgtggtcatctatatttaggaaacactgatctacattgcattaatacttagtttgcatgcttattttstaacgtcataatcagagattt

SEQ ID NO: 137190 - DNA, 634 bp, Homo sapiens
aactggttaatgttaaaaaaaatctattgaactttgcatttgatctttagcattgagatgtggttgtgggcacatacataaaatgagatattctcatttaggttaatagaagtggtattgtaaccactaaacatggctatgagaaatcttctcatgatgccttcagtaaaaactaaaaattgtatcctaaataattgaagaaatattartgattcatgcaggttagaacacttgaaaggctccacttgtcctttacaacaccacctcttctgattgtcaggggcttgcatttctttcaaattaccagtgtgattttccaaggacatgcacctcatgcagatttatctatttattaatgactcagcaagtaatatcccaaaaaatgacaatcttgcctattacataatgacatttctccctttcagagcaaagtattttatattttcatttggccatactgaaggataggttaccaaatgatggataaagtctaggttcaaattctaaaagctttcaatatttgcaagtaaacaatttaattttgtactaccaaaaagaattgttctgcttttagggcgactcactgtctgctaagatggaaagagatagaagtaatataatatatcagaagcag

SEQ ID NO: 137191 - DNA, 572 bp, Homo sapiens
gaagtgccattcttgttatatcatattaagatctggctgaggtagcgcttgtcagagtctccagtgtaaatttaccttttcttcctttctatactcttattctttgtaagtaagtcactaagtgcagyctacacttaaatggtggagagttaagctccttgatggggcagggtctacataagttatttgaaattctgtatgggagatctagttcttttatggaaaatttatttttcctttaccaaatattaaaaaattattaatttctattctattctattataaggtaatggcaaaatggtctctacttcttgcaaattatggcttcagtaggggttcaaaaatatgattaatttttgtaaatgttttaaggacattcaaaaagattatacatgctctatttcttagatacaagaaacttattgttactcaagtattttatgaccttttgcaatatttgattacttgatatgtcattttaaattaagtatgtaaagtctcaacattattataatgtttatgagttcttacattttagtggttattcatttatgtatctttacttagtgtta

SEQ ID NO: 137192 - DNA, 558 bp, Homo sapiens
aggaaagggtaggtatatgtaaaataggtgaaaggtgaggaccaattggaggaaagcacaccaaacaggaagacaagttctcagtctggtctgaggaattaacttgtggcttggctttcaggctttaaactctttggcttggaggtggggtttcactggaatcctacccctatttgcctatgcatttggctgcctcctgctgctctcacaattttagagctgtaaaatatatgaagagatttattctgagccaaatgtgaagaccataacccatgacacagctactaccaagaaaggggtcccaacccagactccaagagagggttcttggatctcgcacaagaaagaattcagggtgagtccatagagtaaagtgaaagcaagtttactaagaaagtaaagaaataaaagaatgactactccataggcagagcagccygagggcagctggttgcccatttttacggttatttcttgattacatgctaaacaaggggtggattattcatgagttttccaggaaagaagtgggcaattcccagaactgagggttattcc

SEQ ID NO: 137193 - DNA, 460 bp, Homo sapiens
tggcatccttttgaggggtgttataaaattagtaatgatttttcctctatttctactagtaaatgactgtcagagtaatgctcttttaattcttcagtatgatattctcttcttaatgttttgcatatatcattctttgaggaaatctctgcctttctttatctctatccatcctcaaattaggagatctttattcagataatgtttaccagcagggttgtgtatttttcttatggcgcttctcactgtttgctaaattcttgtatcaaatcaaccacaaaaaagtagctcatttcccaatgccttacagatttcagtactgaggttcttaaatcctcctgcctggaaacttcacattcgagyggatttcaaatgtaaaaattataacccttgcatgtatttctttcaggctctttcttttttagcttttctaagaatacattcttttctaggagagatg

SEQ ID NO: 137194 - DNA, 449 bp, Homo sapiens
aagaattcagctgccaggagcagacccccattgggacccgaacgagggaccagacatggagaggctaagacggtactgtgagggattaatagaaggtctaaagaaaggggctcaaaaggctacaaatgtaaataaggtttctaaggtcatccaaggaaaagaggagagtccagcacaattctatgaaagactgtgtgaggcttaccgtatgtacactccctttgatccagatagccctgaaaatcagtgcaygatttacatggccttagttagtcaaagtgcagaagatatcaggagaaaattgcagaaacaggttgggtttgcgggtatgaatacctcacagttactggaaatagccaatcaagtgtttgtaaatagagatgcaataagccacagataaagccgtaaggaaggcgaatgccaggccaggtgaaatgccaacttactgg

SEQ ID NO: 137195 - DNA, 446 bp, Homo sapiens
gaattcagctgccaggagcagacccccattgggacccgaacgagggaccagacatggagaggctaagacggtactgtgagggattaatagaaggtctaaagaaaggggctcaaaaggctacaaatgtaaataaggtttctaaggtcatccaaggaaaagaggagagtccagcacaattctatgaaagactgtgtgaggcttaccgtatgtacactccctttgatccagatagccctgaaaatcagtgcatgatttacatggccttagttagtcaaagtgcagaagatatcaggagaaaattgcagaaacaggttgggtttgcrggtatgaatacctcacagttactggaaatagccaatcaagtgtttgtaaatagagatgcaataagccacagataaagccgtaaggaaggcgaatgccaggccaggtgaaatgccaacttactg

SEQ ID NO: 137196 - DNA, 451 bp, Homo sapiens
gcagacccccattgggacccgaacgagggaccagacatggagaggctaagacggtactgtgagggattaatagaaggtctaaagaaaggggctcaaaaggctacaaatgtaaataaggtttctaaggtcatccaaggaaaagaggagagtccagcacaattctatgaaagactgtgtgaggcttaccgtatgtacactccctttgatccagatagccctgaaaatcagtgcatgatttacatggccttagttagtcaaagtgcagaagatatcaggagaaaattgcagaaacaggttgggtttgcgggtatgaatacctcacagttactggaaatagccaatcaagtgtttgtaaatagagatgcaataagccacagakaaagccgtaaggaaggcgaatgccaggccaggtgaaatgccaacttactggctgtggccattaggggaattc

SEQ ID NO: 137197 - DNA, 493 bp, Homo sapiens
ggcttgtatgaggtctcccctgtggtagagctcatgctttaagttccagtcaaagatttatttaacaatatttcttggtttgttttctatctaaaatgtggaaacttgtgttctcactttggtacaatgttacagaagattagcattgcccccttcataataaggcatacaaatgtatgagattttagaactaaacattcctatgaccataaaaaccacaatctcaaatatatcacatcagcaacatattgaaactrtacaccatgacagaataggataaatctcagaaacacaagggtgattccagatgaacaaatcaattaaaatgctataactccaaaagagattacataaaatcacttcagtatctatggaagagccatttgaaatattttaataccaatttaaaattatactgtcagaataggaagagaagaatatgtcatgagcataagagagtgtggctcttggagtagtgattaagaaactaggc

SEQ ID NO: 137198 - DNA, 446 bp, Homo sapiens
ggatgtagattgaacagtcatcagtggatgggtttgagttattatagaagtcaggaaaagcaaggagcgtcacccagagcgacttgctgagttagctaagaagggaaggtgaaacccaggaagatcccaacatttaaaattcacatggagtagaggtgctcaacaggaagccaaagttaaaagattgggaaacacaaagatgagcaaggaacatcatttcctagaagcaaaaggagcaaagaattccaacaagaagtaaggtactaacaatgccatgcacggttcagagaaccagcaaggtaaggaccaaagattgcactgggtcaataatcagcaaaccgtcagtgacatggttaggctttgtgtccccacccaaatctcatctkgaattttaatccccaggtgttgagggagagacctagtgggaagtgattggattatgggag

SEQ ID NO: 137199 - DNA, 446 bp, Homo sapiens
ggatgtagattgaacagtcatcagtggatgggtttgagttattatagaagtcaggaaaagcaaggagcgtcacccagagcgacttgctgagttagctaagaagggaaggtgaaacccaggaagatcccaacatttaaaattcacatggagtagaggtgctcaacaggaagccaaagttaaaagattgggaaacacaaagatgagcaaggaacatcatttcctagaagcaaaaggagcaaagaattccaacaagaagtaaggtactaacaatgccatgcacggttcagagaaccagcaaggtaaggaccaaagattgcactgggtcaataatcagcaaaccgtcagtgacatggttaggctttgtgtccccacccaaatctcatcttgaattttaatccccaggtgtygagggagagacctagtgggaagtgattggattatgggag

SEQ ID NO: 137200 - DNA, 509 bp, Homo sapiens
actttccttaattcaccactagtctccaaatcacagaaatttttatgtggatctaatctttttacttttgcctgccgtttgtattccaaattcctcccaacgtctacctattcacaagctccamtaaatgcatatattcaaaatatataaaaaacaaatttaattactctgagctcttggatggcagagtaactatgcatatttacttcttgttactgttagagtaggaaaatggcataatggtgataatataaactgactcaaaagacagtgaattaattcctcagagggtgggttcctcacagtgtaacatatttgaatcatctgaagggtcttcctcatgttcattaataaatggaagatgctttggaatctcatagaagacatgaagagctacctaggctttgaagaaattacgagacaagatctaagatacaaacttttaggtgtaagatgcacaagtactggggatgaaatgcacagcatgttaatttcattgtgataatcat

SEQ ID NO: 137201 - DNA, 426 bp, Homo sapiens
tctttgattttatttctgttttcacatggcctacagctataacggttcctacctacagcaaatttcagcaaatgaaaggactgagtagtactttttagagcctcctgggtggctcttttatgtaggaacaattctaacctggatccatctggaggaagtcatggtgggtgaccagggtccaccactgccctttccaccctctttgtcactgtggtcaccaagctcacctctctattccctgttctgatgaggagggcctggccttctaggcacaatcttagttggaaaaccttttatcactcaatagatgcttggcagcctttgctctccctgcagccttagaacgcgagtttagtaggggtttagggcagcccatcacagaaacamcatgtctcacccagccttccaccaggaaggtaatgtgaa

SEQ ID NO: 137202 - DNA, 419 bp, Homo sapiens
tgagaattcagttctagtgaagctcttcactacacagcgattgagaaatcaaggctgttggctgcttggacatctttaatgtgmggcttccaggtaggtcattctgagtgttgccatcacagtcaacctaaactgggaaagagaatggaggagtgcacgtgcaaatcatttatggtccagatttggaggtggtacacatcacctctgctaacatgtcaaaggagagagctcaatcatatgccacgcctaactgctatgtagttttgggccagaagaaggggaatatgtattttggtggacagctaactgacttaactgctaacacccctttatggctttatttgctgatggagaatgattccagaagaaaaaagcatcctacctttacttaccacagattctgtccactaaataatcat

SEQ ID NO: 137203 - DNA, 419 bp, Homo sapiens
tgagaattcagttctagtgaagctcttcactacacagcgattgagaaatcaaggctgttggctgcttggacatctttaatgtgcggcttccaggtaggtcattctgagtgttgccatcacagtcaacctaaactgggaaagagaatggaggagtgcacgtgcaaatcatttrtggtccagatttggaggtggtacacatcacctctgctaacatgtcaaaggagagagctcaatcatatgccacgcctaactgctatgtagttttgggccagaagaaggggaatatgtattttggtggacagctaactgacttaactgctaacacccctttatggctttatttgctgatggagaatgattccagaagaaaaaagcatcctacctttacttaccacagattctgtccactaaataatcat

SEQ ID NO: 137204 - DNA, 419 bp, Homo sapiens
tgagaattcagttctagtgaagctcttcactacacagcgattgagaaatcaaggctgttggctgcttggacatctttaatgtgcggcttccaggtaggtcattctgagtgttgccatcacagtcaacctaaactgggaaagagaatggaggagtgcacgtgcaaatcatttatggtccagatttggaggtggtacacatcacctctgctaacatgtcaaaggrgagagctcaatcatatgccacgcctaactgctatgtagttttgggccagaagaaggggaatatgtattttggtggacagctaactgacttaactgctaacacccctttatggctttatttgctgatggagaatgattccagaagaaaaaagcatcctacctttacttaccacagattctgtccactaaataatcat

SEQ ID NO: 137205 - DNA, 419 bp, Homo sapiens
tgagaattcagttctagtgaagctcttcactacacagcgattgagaaatcaaggctgttggctgcttggacatctttaatgtgcggcttccaggtaggtcattctgagtgttgccatcacagtcaacctaaactgggaaagagaatggaggagtgcacgtgcaaatcatttatggtccagatttggaggtggtacacatcacctctgctaacatgtcaaaggagagagctcaatcatatgccacgcctaactgctatgtagttttgggccagaagaaggggaatatgtattttggtggacagctarctgacttaactgctaacacccctttatggctttatttgctgatggagaatgattccagaagaaaaaagcatcctacctttacttaccacagattctgtccactaaataatcat

SEQ ID NO: 137206 - DNA, 435 bp, Homo sapiens
tctgatgcaaagaatgtatcttgatatgttttcagctgccaagctttcaaaatatgcccagaatttttccccactactaggtttgtctagtttttgtcgatagtggtgattaactttttgtgtcatcacttgtataaattaactctaaattaaaagaaaatcttttttgttcttcctaaacaaaagtttaatttttatgacctttgctaccttttagataatggccagttgattgtattttttatagactctgaatctttatttcaatatctgaagactagrcagaggatacacaaaaaaagactacattcaagtaacagaaaaaatactagacttataaattagttttcaaactccccaatagttcttcataaatagttggattaaacaatactatttttttggtttctacctaaccttgttccttctttaact

SEQ ID NO: 137207 - DNA, 596 bp, Homo sapiens
aatataattatgcatactatagaaacgatagccacctaaagcatagtactgcccagtggaagaaggtggtatttatcctagatgacgaattacccccttagataataaatctgagagagctttgtgaaggatgacttagaagaaagacaagagtttccattgggaagctagagagcagtgtagaaaattattgtggtaagtttatttatgttaccattttgggcttttatgagaaatcctaaaagccacatctctggagctggaaacttggcagaaagacaaaataaartgtcccatttctatccaaggagttactaacatgatggccacgggagtcattctctttccagaaatgattgagccaaatgtattgtgattagaagagagaaacaaacctagaatccagtcaagatgactctcttgtctctcatttgctgccaacttgcagcacctgctgggaagcccaatgctttgcctcattttcatcagggcttggctaatagaccagcaagctatgcaaagtcaagctctgaatggccttgtttgagaagaattgaagacaggaaagaagaaatcttcaggtcacggattctatt

SEQ ID NO: 137208 - DNA, 608 bp, Homo sapiens
ctgaggcaggaggatctcttgaggccaggagtttgagaccagcctgggcaacatagtgagacccccatctctacaaaaaataaaataaactatttggacgtagtggcacttgcctgtagtctcaggtactaggactggagtgggaggattgcttgaacccaggagttcggggttataatgagctatatgtttctgtcactgcactccagttttggtgacagagtgagatcctgtctcaaaaaaaaccaaaccaaacaacaacaacaacatagctgtgaaagaatgtgtgaataaatatggctaaatcaggccttctcttttcagcctgctttttgtttgtttgtttgtttttgttttcttgatagaaattaaggcagagatagagctcagatatatgattttgagaatcaccatccaaatgtttttggaagatgtacttatawctcttaggcctggctcatagtaattattaatgaaatagtttttgagcagtgaatgattagaagaaggtagatggaagggagatacatattaaggatctttgcaggcttttctgaaccgttaacttcagggcctttagctcagctctgaacatttattaggtatat

SEQ ID NO: 137209 - DNA, 187 bp, Homo sapiens
ttctagtttttgtaaggacgctagttaatttrtaaggtgcttagaatatatgattttcagtatatcatttttttcccctataactaaatggggaggaggagtgacttcgtaaagaaaacaagagactggctttgtatatattatacatactgttttgcagcctaaataagtttgcagagtatatgta

SEQ ID NO: 137210 - DNA, 478 bp, Homo sapiens
ggaagggttttaagtagggcagcggtaaagatcaagtattcccaatgggaatggtttgaaatccaggagcacatcaggattccctgggaaggcttttcttttatgtcctctttctctggttctgggactatgccagaatcttggggtagcctagatagtttcagaaactgtatttaaagccagtgccttctctgccctatcccaattttaatatatctaatcaggggacataggatataaagttggggaatcatctayaacatattgtcttagtctgtttggtcttctatgacaaactaccataaactgagtagcttacaaataataaaaattgatttctcatggttctaaaagcctggaaggccaagatcaaatattcattgcctggtgagggtcctcttccaggtttgtagactgttctcgctgtaaactcacatggtagaagtggcaagtgagctttcccactcatgaggcctcc

SEQ ID NO: 137211 - DNA, 478 bp, Homo sapiens
ggaagggttttaagtagggcagcggtaaagatcaagtattcccaatgggaatggtttgaaatccaggagcacatcaggattccctgggaaggcttttcttttatgtcctctttctctggttctgggactatgccagaatcttggggtagcctagatagtttcagaaactgtatttaaagccagtgccttctctgccctatcccaattttaatatatctaatcaggggacataggatataaagttggggaatcatctataacataytgtcttagtctgtttggtcttctatgacaaactaccataaactgagtagcttacaaataataaaaattgatttctcatggttctaaaagcctggaaggccaagatcaaatattcattgcctggtgagggtcctcttccaggtttgtagactgttctcgctgtaaactcacatggtagaagtggcaagtgagctttcccactcatgaggcctcc

SEQ ID NO: 137212 - DNA, 539 bp, Homo sapiens
caattagctttcaacctttttgtattttaactaactgagaagcgtaagcagtcatcaatgtgttcaaccttgtataacgctacccaattagtttctccattaccgaaggtaaccagtttaggtattaaaccaaaaaagaagaaaaattcatgcatggcttaaaccaataacaacactttttgatatgcaaacacttgctcacttttcaaaccccccctcagaagatgattggctccttaagaacctagaatagatgtgattcagcatctcccctgcaggttgcagyggactgatagaagggaaaggccgggtgagtcggacactgcagaatttatcatcccattctcatacttattagctgtgtgactttggatgatttactcagcctttctgtgctgctctgtcatctaggatgcagatataagaacagctacttgtcacgagtttgtaagacttaatatacttaaagtatatgatctagtgaacattcaaacaagatttgctgaattaataaaacgaaggatgtaaaatattatgct

SEQ ID NO: 137213 - DNA, 611 bp, Homo sapiens
cttgaatgagcattggaggcagccaggcagtacctatcagatacatttaacaaagagattgaaataattaaaaagaatcaagaagaaattctggagttgaaaatgcatttyacaaactgaagaatgcatcagaatcttaatagcagaatttatgaagcagaagaaagagttaatgagcttgaagacaggctatttgaaaatacagtcagaagagacaaaataaaagaataaaaaagaatgaagcatgcctacaagatctagaaaattgtttcaaatggcaaatctaagagttattggacctaaagagaaggcagagagagagatggaaagtttatttaaggaataaaacagagcacttcccaaacctaaagaaaaatatcaaaacccaagtacaagaaggttatagaacatcaaacagatttaacccaaagaagactacctaaaagcacttaataaacaaactcccaaagatcaatgataaagaaaaaaaaaatcctaaaagcaacaagagaaaagaaaaaacaacataaaatggagcttcaatacatctgacagcagacttctcagtggaaaccatacaggccaggaaagagtggcataacatatttaca

SEQ ID NO: 137214 - DNA, 579 bp, Homo sapiens
ggttgtaggaactgatacctatgaaggattaagccatcaacctgagtttccaagccaggaagtgagaaatcaaatcccaaaacatctagcccccatgccataggatacccatgctatgggtatgaggtaggatacgtaacactacctcatgagatggaggaagcggcactgcacagtactattgagaggaatccggggctcaggggctatcccagattcaatgtgttaggatactcctgacccagcttgttagctgctccttgctaatcagtaactactagatcaaaaagaaaagaagattataacaattagttaattataaagtggaaaataagggctctatctataataaaatataataaaatataattatataattatattttatataattatataattataaaattataattattatatattatatttatataattatataattataattattatataaatataatatataawtataattatatatattatatataatataatatataaaaatataattatatattatatataatataatatatataataatataataaaaaaataaaaatataa

SEQ ID NO: 137215 - DNA, 500 bp, Homo sapiens
cttcgctcctctgcacctgagcaattcatttgctgccaagaatctaagaatctccaaagatttttctccctaaatatatgaaaatattttaagtaaaaagcaagccattgagattttgacttgggtaggcctgagggatgcaggtagattcttagctsggccataagccccccactctagcgtccctgtaaactgcagcaccagaagcattgaagtgatgtgccattccaaacccgatatgcaggacatggggaatgcacccctggattcatcagtccaggaagaccagcaacgccctgccatggatgaatgccctaatgtgtaagcagattgtcatcatcagaatgaaagatgtacagtattcaaagtctttcaaatatctgatcaaataatcctcatggccaatctcttgaattgtgttgttttattcaaaatgaagacatttctccagtttctgtcagttagaagctgtaagttagagtaaaaacatcccctaagaa

SEQ ID NO: 137216 - DNA, 644 bp, Homo sapiens
atgaaatttaagacacactgaaagctttttctagagaagcaataaacgtcccagacctgttggccaaacctttaacatcctcaagaccttgaactgttgacctcacattttcactctgctatctaagtcacacttcgctcctctgcacctgagcaattcatttgctgccaagaatctaagaatctccaaagatttttctccctaaatatatgaaaatattttaagtaaaaagcaagccattgagattttgacttgggtaggcctgagggatgcaggtagattcttagctcggccataagccccccrctctagcgtccctgtaaactgcagcaccagaagcattgaagtgatgtgccattccaaacccgatatgcaggacatggggaatgcacccctggattcatcagtccaggaagaccagcaacgccctgccatggatgaatgccctaatgtgtaagcagattgtcatcatcagaatgaaagatgtacagtattcaaagtctttcaaatatctgatcaaataatcctcatggccaatctcttgaattgtgttgttttattcaaaatgaagacatttctccagtttctgtcagttagaagctgtaagttagagtaaaaacatcccctaagaagctaaagaattc

SEQ ID NO: 137217 - DNA, 644 bp, Homo sapiens
atgaaatttaagacacactgaaagctttttctagagaagcaataaacgtcccagacctgttggccaaacctttaacatcctcaagaccttgaactgttgacctcacattttcactctgctatctaagtcacacttcgctcctctgcacctgagcaattcatttgctgccaagaatctaagaatctccaaagatttttctccctaaatatatgaaaatattttaagtaaaaagcaagccattgagattttgacttgggtaggcctgagggatgcaggtagattcttagctcggccataagccccccactctagsgtccctgtaaactgcagcaccagaagcattgaagtgatgtgccattccaaacccgatatgcaggacatggggaatgcacccctggattcatcagtccaggaagaccagcaacgccctgccatggatgaatgccctaatgtgtaagcagattgtcatcatcagaatgaaagatgtacagtattcaaagtctttcaaatatctgatcaaataatcctcatggccaatctcttgaattgtgttgttttattcaaaatgaagacatttctccagtttctgtcagttagaagctgtaagttagagtaaaaacatcccctaagaagctaaagaattc

SEQ ID NO: 137218 - DNA, 407 bp, Homo sapiens
ggtaaccccttttgctcttccgactggatcctcataggattttcatgtgtctctgaccttgtgtttttcaagatgtgtctggctgtgcattttgccattcattttgcctggaacaacatgaacttttttgagccctacactcagttttgctttgttttccagctttagaaagatctrtatacttatgtgctcattattgaggacgtataatattaaatgagtagtgtctagcattaaaagagataagctgagagtttatacaactgttgaaaccataaaatgacaaagacaattactctaaaaactatatatgcatatgtatctttagctaaatgaggttaataaaaatggtatgcttcatattgttcacaataatttcaaggatcagaaagggaagaagtggcgga

SEQ ID NO: 137219 - DNA, 407 bp, Homo sapiens
ggtaaccccttttgctcttccgactggatcctcataggattttcatgtgtctctgaccttgtgtttttcaagatgtgtctggctgtgcattttgccattcattttgcctggaacaacatgaacttttttgagccctacactcagttttgctttgttttccagctttagaaagatctatatacttatgtgctcattattgaggacgtataatattaaatgagtagtgtctagcattaaaaragataagctgagagtttatacaactgttgaaaccataaaatgacaaagacaattactctaaaaactatatatgcatatgtatctttagctaaatgaggttaataaaaatggtatgcttcatattgttcacaataatttcaaggatcagaaagggaagaagtggcgga

SEQ ID NO: 137220 - DNA, 574 bp, Homo sapiens
agacggtgttccataaatgaacgcatgagctctcaaaagaagcatgcattgtttctatcacatgtgctagatatattattgatgcctcatgcatgcgcattacaggaccttgaactcggaagagggaagatagctcaaaggtgtattcctggatgcagtccaaattctgaatggttcccagtgtatttaagtgacaggctggccctgcacaatcgctgtggacacatgttatcccaacatttactagagcttggaggctgaggcaccttcacatgtcttaccagaggcagattccctgcttcacaggggctggcttcactagctgatttccctgacagccttgacttgtcaatggcaaagggaaatgcarcccatctggatataggcagtaatcgcccatttttagggctccaaatttgcagacgttaagacctgtgggtacaagtgacctgcacagcgaaggtggagaagaacaggccatggccacatagtgggaacgtgggagggaccccggcacccctgatgagtggaggcttgctggaactgcacagactctgggaacgggaaagaattc

SEQ ID NO: 137221 - DNA, 538 bp, Homo sapiens
aatgtaagacttgctgggttttggggttactcccaatttaacaacagtacctaggatgctgaggtgatcaaatttcaaagcaattctggcggcttatgtttcagattgcagggtcaggccaccaaagcaatgmtgataaagcatgataggtacacgatgaagacaaaatgtttttaataacaaatacctaacttgggcagaaaagagtcaaaacctacgcagagtatttactcttgctttatctttgtagctaaggtatactatctttaatgaagcctctctctttttattctagtccataatttaagagttatgttcacaaaaaccaatttcagtaataccaacttggttaaggtttaacaccacaacataacaccccaggtaaaaccaacattttcagatggctgggctgaaactgcattgtggtgcttcaatattgtgaatggcacactaccagattcacttcctcaaattgtctgtactacactcttcaacttgagtcggattacagactcaaacctaagacctgaaactataa

SEQ ID NO: 137222 - DNA, 523 bp, Homo sapiens
ctgggttttggggttactcccaatttaacaacagtacctaggatgctgaggtgatcaaatttcaaagcaattctggcggcttatgtttcagattgcagggtcaggccaccaaagcaatgatgataaagcatgataggtacacgatgaagacaaaatgtttttaataacaaatacctaacttgggcagaaaagagtcaaaacctacgcagagtatttactcttgctttatctttgtagctaaggtatactatctttaatgaagcctctctctttttattctagtccataatttaagagttatgttcacaaaaaccaatttcagtaataccaacttggttaaggtttaacaccacaacataacaccccargtaaaaccaacattttcagatggctgggctgaaactgcattgtggtgcttcaatattgtgaatggcacactaccagattcacttcctcaaattgtctgtactacactcttcaacttgagtcggattacagactcaaacctaagacctgaaactat

SEQ ID NO: 137223 - DNA, 247 bp, Homo sapiens
agttatatcccatcatttttcagttaagaagactgaggccctcagaaaaggttatattacccaccaaagaccttcccagacatgcgtgaacaagacatgaactgattccctcggtccttctctcctccgcaggaaagtgcctgccctctagtcttagagtcaccctggcacygcagagacaacaactggccatgatttaagatgagctttgtatcacagagcagtgtgtgactcgaaatgtattatt

SEQ ID NO: 137224 - DNA, 471 bp, Homo sapiens
aaatactgaaaggggcatctccagtgactgtggttgagctgaatggtattttcaagctaactactagtgataccaatagtgacaccaatgctgctttttttttttttttttttgagatggaggctctctctgttgcccaggctggagtgcggtggcgtgatctcggctcactgcaacctctacttcctgagttcaagttctacttcctgaggttactctgcctcagcctcctgagtagctgggattacaggaacctgccaccacactyggctaatttttgtatttttagtagagatggggtttcgccatcttggccaggctggtctggaactcctgacctcatgatccacccaccttgggctcccaaaatgctgggattaacaggagtgagccaccacacacggcccaatgctgcttcttttaagacctccctgattgtccctgtgtggtctcttgcaataccgacagctc

SEQ ID NO: 137225 - DNA, 557 bp, Homo sapiens
actcttgttcttaattacccctggtggaaaaatggctttaggatgaaaacaacatgttagcacagggctcagcagctacaggccctcagtaytgggggcaggggtcagaaactccgtggggtggtgatctcacgggcctcggctctgaaaacccctcagcaaatgactgcccctcaatatggagcttgcaacgttgtccccagaacacacaggccccagctgcacacccaccatcacctgaagggcagcaggcccactaatcagcctgaggtccaacctcactattggttttcagcaaatcaacctgcctctgtttgcccttttccaccgaaaaatgcctaagtgaacacagaaaaggctcccattttctgaactggggactctaataggaaagaatcattgtaagtgtgaattccaccaagacagaagagcaggactgccctgagttcaagggaaagtccaaaagcctcagggacaacatggaaatatcgatgcacagatggcacagggcactgaggatgtgtccgtgcataggtgacacgaggccctgcggtaca

SEQ ID NO: 137226 - DNA, 329 bp, Homo sapiens
ttctagaaaagggtaacttaacaaaattaatctagaggaaagcataaaaattgttcttagggaatcaggaaggtttctctaagcaagatattaaaggaaataggaaagcagtgattttataaaaatacyaaaaatgtctgtagggcaaaacagactaaatacaacgttaaaaatcgtagagagacaaaatcgattgcttttttaccttttagggtgacaaatatttttaagatcttggtagcacgattgttggtgagcatgaggacaagcaggcaatcttacattctgggaaatgtaaactgaggccccactcaggaggcagccccagg

SEQ ID NO: 137227 - DNA, 495 bp, Homo sapiens
gtctggtgggggtggggagctgaaatacaaactgctaggggtgtattttttgtttggtttcgttttactgaaaagtttgacttttaagacaacacagaacgagtagattaaattcagacattaacacaytggtcatgtgaaatggctaaatgaactacctaaataatctcctgtcagaaacatgaaccataggccctttcctaggatctaagcatcattagacctatatagcttcacctttcacatacaccattcattcttacattcaatgaacaattactgagtgcttacaaagtactaattgtacaaagtggtagacattagggctataattgttaacagagctttgctagtctacaaacaatttacactctagtgatgaatagtaaaactttttaaaaagcattaatgataacaatgtaataagattataactgggttatgatctaggtacaatgggaacacaggccaggagcacctaacgaacaaatgcag

SEQ ID NO: 137228 - DNA, 409 bp, Homo sapiens
aaccatatgccaataaatccgaaaatytagaagaaatggataaattcctaaacacacacaatccaccaagattgaaccacgaagaaatccaaaacctgaacagaccaataacaagtaacgagattgaagccataataaagtctcccagcaaagaaaagcccaggacccaatagcttcactgctgaatcctaccaaacatttaaagaactagacccattttcctcaaactattctgggaaaaaaaaaaaaaaaaaaaaaaggagaatacttccaaactcattctacgaggccagtattaccctgataccagaatgagacaaattcatatcaaataaagaaaattagaggccaatatctcttgatgaatattgatgcgaaaatcctcagcaaaatactagcaaactgaatt

SEQ ID NO: 137229 - DNA, 409 bp, Homo sapiens
aaccatatgccaataaatccgaaaatctagaagaaatggataaattcctaaacacacacaatccaccaagattgaaccmcgaagaaatccaaaacctgaacagaccaataacaagtaacgagattgaagccataataaagtctcccagcaaagaaaagcccaggacccaatagcttcactgctgaatcctaccaaacatttaaagaactagacccattttcctcaaactattctgggaaaaaaaaaaaaaaaaaaaaaaggagaatacttccaaactcattctacgaggccagtattaccctgataccagaatgagacaaattcatatcaaataaagaaaattagaggccaatatctcttgatgaatattgatgcgaaaatcctcagcaaaatactagcaaactgaatt

SEQ ID NO: 137230 - DNA, 409 bp, Homo sapiens
aaccatatgccaataaatccgaaaatctagaagaaatggataaattcctaaacacacacaatccaccaagattgaaccacgaagaaatccaaaacctgaacagaccaataacaagtaacgagattgaagccataataaagtctcccagcaaagaaaagcccaggacccaatagcttcactgctgaatcctaccaaacatttaaagaactagacccattttcctcaaactattytgggaaaaaaaaaaaaaaaaaaaaaaggagaatacttccaaactcattctacgaggccagtattaccctgataccagaatgagacaaattcatatcaaataaagaaaattagaggccaatatctcttgatgaatattgatgcgaaaatcctcagcaaaatactagcaaactgaatt

SEQ ID NO: 137231 - DNA, 284 bp, Homo sapiens
tgcattgtcaaggaaatgagctccaaaggaacttycttttagcatagagaaagctgctgtttttatttacttgcattttgcatatgaatatattttaatttagtttcaacaggtaactgaattagaaagtgaaattataaagtcatttctccaagaaagaaggtagagcttataaatattagtaatcttagctgggcacgatgacttacgcctgtaatcccagcactttgggaggctgatgcgggccaatcacctgaggtcaggagtttgtgaccagcctggcc

SEQ ID NO: 137232 - DNA, 462 bp, Homo sapiens
atgcagtctattgctgagcaaaacatcgttatgcagtgcatgaytgtacatgattttgtttggttttattaattgcactggttaaaataatatatgtgtaatgtcaagatctactgttactgatgttttacctctttgagtgaagtgtagaaaacttgtttccatatgagtctctttactatcactactttttagatataattatcttaaatacttcctctatgttccttgagcatctaaccagataggtcattaatttttgcttcaactattagaaatggcttaaaaacttaagagaagtttgattatacattatatttatgcttaattttacccacttagatggatgtttgtaaaagctgcaaaccttcttcttttatcatttcttttctgtttagagaacttattctttaaaggtaagtttgttagcaacacattaccttagcattctttcattagaca

SEQ ID NO: 137233 - DNA, 462 bp, Homo sapiens
atgcagtctattgctgagcaaaacatcgttatgcagtgcatgactgtacatgattttgtttggttttattaattgcactggttaaaataatatatgtgtaatgtcaagatctactgttamtgatgttttacctctttgagtgaagtgtagaaaacttgtttccatatgagtctctttactatcactactttttagatataattatcttaaatacttcctctatgttccttgagcatctaaccagataggtcattaatttttgcttcaactattagaaatggcttaaaaacttaagagaagtttgattatacattatatttatgcttaattttacccacttagatggatgtttgtaaaagctgcaaaccttcttcttttatcatttcttttctgtttagagaacttattctttaaaggtaagtttgttagcaacacattaccttagcattctttcattagaca

SEQ ID NO: 137234 - DNA, 462 bp, Homo sapiens
atgcagtctattgctgagcaaaacatcgttatgcagtgcatgactgtacatgattttgtttggttttattaattgcactggttaaaataatatatgtgtaatgtcaagatctactgttactgatgttttacctctttgagtgaagtgtagaaaacttgtttccatatgagtctctttactatcactactttttagatataattatcttaaatacttcctctatgttccttgagcatctaaccagataggtcattaatttttgcttcaactattagaaatggcttaaaaacttaagagaagtttgattatacattatatttatgcttaattttacccayttagatggatgtttgtaaaagctgcaaaccttcttcttttatcatttcttttctgtttagagaacttattctttaaaggtaagtttgttagcaacacattaccttagcattctttcattagaca

SEQ ID NO: 137235 - DNA, 520 bp, Homo sapiens
gcttaaaaacttaagagaagtttgattatacattatatttatgcttaattttacccacttagatggatgtttgtaaaagctgmaaaccttcttcttttatcatttcttttctgtttagagaacttattctttaaaggtaagtttgttagcaacacattaccttagcattctttcattagacaatgttttctatgtcactttaatgcctgaagaatattattgctgggtattgaatttacagttcacagttctgttctttcagtacttcaaaaatattatctgtttccttccaaccttcatggtttcagatggaaaatctgctgtggtttacattattgtttttctgtaagaaatgtgccatttttctctgtttgctttcaagatttttaattttttttttcatttccagaaattgaatgtatttgggtgtattctatttagggtttgctctgtttcttgaatatttaggtttatgtcttccatctaatttgggaaggttgaagtcattattttttaatag

SEQ ID NO: 137236 - DNA, 520 bp, Homo sapiens
gcttaaaaacttaagagaagtttgattatacattatatttatgcttaattttacccacttagatggatgtttgtaaaagctgcaaaccttcttcttttatcatttcttttctgtttagagaacttattctttaaaggtaagtttgttagcaacacattaccttagcattctttcattagacaatgttttctatgtcactttaatgcctgaagaatattattgctgggtattgaatttacagttcacagttctgttctttcagtacttcaaaaatattatctgtttccttccaaccttcatggtttcagatggaaaatctgctgtggtttacattattgtttttctgtaagaaatgtgccatttttctctgtttgctttcaagatttttaattttttttttcatttccagaaattgaatgtatttgggtgtattctatttagggtttgctctgtttcttgaatatttargtttatgtcttccatctaatttgggaaggttgaagtcattattttttaatag

SEQ ID NO: 137237 - DNA, 395 bp, Homo sapiens
atagatctaaatactgttacaggtatataaatacagatataaatgcaggtatgggtaaaattatggctatgggtcccagccttaaattcttatttttttataactaattgatgttcagggatagatttatgtgatctgctcatttgcaggggcccatcacttggctaattctttggtgtcattcgtrtcaagttttaaataatttttgaggaagatgtcctatattttaattttgcactgaacactgcaaattttgtagctgttcctgttaatttgttaatgaaatttctctttagaaactattaaattaataagacaataattaagcaaataattattaaattttacatggtaacactagcaatattaactctcattttctatcactttaattc

SEQ ID NO: 137238 - DNA, 395 bp, Homo sapiens
atagatctaaatactgttacaggtatataaatacagatataaatgcaggtatgggtaaaattatggctatgggtcccagccttaaattcttatttttttataactaattgatgttcagggatagatttatgtgatctgctcatttgcaggggcccatcacttggctaattctttggtgtcattcgtgtcaagttttaaataatttttgaggaagatgtcctatatkttaattttgcactgaacactgcaaattttgtagctgttcctgttaatttgttaatgaaatttctctttagaaactattaaattaataagacaataattaagcaaataattattaaattttacatggtaacactagcaatattaactctcattttctatcactttaattc

SEQ ID NO: 137239 - DNA, 616 bp, Homo sapiens
ctgttacaggtatataaatacagatataaatgcaggtatgggtaaaattatggctatgggtcccagccttaaattcttatttttttataactaattgatgttcagggatagatttatgtgatctgctcatttgcaggggcccatcacttggctaattctttggtgtcattcgtgtcaagttttaaataatttttgaggaagatgtcctatattttaattttgcactgaacactgcaaattttgtagctgttcctgttaatttgttaatgaaatttctctttagaaactattaaattaataagacaataattaagcaaataattattaaattttacatggtaacactagcaatattaactcycattttctatcactttaattcaggccatcctttagaggattaagtataatccattcttatgtcctacacaactgagtgtgtagtaccagtacgtaatcctaatgtaatggcacaccccagatgacctttttgtgtgttggcatggtttttcagtttaagcaaaagtttaattgattgaaacttgaagttcacatttttttttctacacaccaatattgaagagaagtcctacaaaatacttattctatggaaaaa

SEQ ID NO: 137240 - DNA, 616 bp, Homo sapiens
ctgttacaggtatataaatacagatataaatgcaggtatgggtaaaattatggctatgggtcccagccttaaattcttatttttttataactaattgatgttcagggatagatttatgtgatctgctcatttgcaggggcccatcacttggctaattctttggtgtcattcgtgtcaagttttaaataatttttgaggaagatgtcctatattttaattttgcactgaacactgcaaattttgtagctgttcctgttaatttgttaatgaaatttctctttagaaactattaaattaataagacaataattaagcaaataattattaaattttacatggtaacactagcaatattaactctcattttctatcactttaattcaggccatcctttagaggwttaagtataatccattcttatgtcctacacaactgagtgtgtagtaccagtacgtaatcctaatgtaatggcacaccccagatgacctttttgtgtgttggcatggtttttcagtttaagcaaaagtttaattgattgaaacttgaagttcacatttttttttctacacaccaatattgaagagaagtcctacaaaatacttattctatggaaaaa

SEQ ID NO: 137241 - DNA, 398 bp, Homo sapiens
agatttagatttactacttttcctaatacacacccacacacatatatgtatgtgtgtgtgtgtgtgtgtgtgtgtgtgtgtgtatactgtatttgtctcatagtggctggagcacattactaccaacttagtggattaaaacaccacaaatctactatcttacagttctgcaagtaaagactaaaatagagtcacataggtgaaratcaagagcttctactctcttgaggctgcttggattcttggctataacccctttctccatcttgaaattctgtcactccaacctctgctttcataacacatctcccatctccttcctaactcgaaggcatcttctcagtcttacaagaactccacttgggttcacatttggaacacccaaataacccatctta

SEQ ID NO: 137242 - DNA, 398 bp, Homo sapiens
agatttagatttactacttttcctaatacacacccacacacatatatgtatgtgtgtgtgtgtgtgtgtgtgtgtgtgtgtgtatactgtatttgtctcatagtggctggagcacattactaccaacttagtggattaaaacaccacaaatctactatcttacagttctgcaagtaaagactaaaatagagtcacataggtgaaaatcaagagcttctactctcttgaggctgcttggattcttggctataacccctttctccawcttgaaattctgtcactccaacctctgctttcataacacatctcccatctccttcctaactcgaaggcatcttctcagtcttacaagaactccacttgggttcacatttggaacacccaaataacccatctta

SEQ ID NO: 137243 - DNA, 398 bp, Homo sapiens
agatttagatttactacttttcctaatacacacccacacacatatatgtatgtgtgtgtgtgtgtgtgtgtgtgtgtgtgtgtatactgtatttgtctcatagtggctggagcacattactaccaacttagtggattaaaacaccacaaatctactatcttacagttctgcaagtaaagactaaaatagagtcacataggtgaaaatcaagagcttctactctcttgaggctgcttggattcttggctataacccctttctccatcttgaaatyctgtcactccaacctctgctttcataacacatctcccatctccttcctaactcgaaggcatcttctcagtcttacaagaactccacttgggttcacatttggaacacccaaataacccatctta

SEQ ID NO: 137244 - DNA, 398 bp, Homo sapiens
agatttagatttactacttttcctaatacacacccacacacatatatgtatgtgtgtgtgtgtgtgtgtgtgtgtgtgtgtgtatactgtatttgtctcatagtggctggagcacattactaccaacttagtggattaaaacaccacaaatctactatcttacagttctgcaagtaaagactaaaatagagtcacataggtgaaaatcaagagcttctactctcttgaggctgcttggattcttggctataacccctttctccatcttgaaattctgtcactccaacctctgctttcatracacatctcccatctccttcctaactcgaaggcatcttctcagtcttacaagaactccacttgggttcacatttggaacacccaaataacccatctta

SEQ ID NO: 137245 - DNA, 253 bp, Homo sapiens
aattcagtctttttgataattttatatatatagaaggtatgatatttatattacatttaaaatttagtacaacttttattaaagtrtacatattatttatacaatgcttttttcttttctatatctatacagcttacccatttttgagaaggctgcatttttttctataacatgtatatgttgtactttacttgtctatatccccattaagagatatgttgcttccaggtttcattattataaatactgtttc

SEQ ID NO: 137246 - DNA, 253 bp, Homo sapiens
aattcagtctttttgataattttatatatatagaaggtatgatatttatattacatttaaaatttagtacaacttttattaaagtgtacatattatttrtacaatgcttttttcttttctatatctatacagcttacccatttttgagaaggctgcatttttttctataacatgtatatgttgtactttacttgtctatatccccattaagagatatgttgcttccaggtttcattattataaatactgtttc

SEQ ID NO: 137247 - DNA, 253 bp, Homo sapiens
aattcagtctttttgataattttatatatatagaaggtatgatatttatattacatttaaaatttagtacaacttttattaaagtgtacatattatttatacaatgcttttttcttttctatatctatacagcttacccatttttkagaaggctgcatttttttctataacatgtatatgttgtactttacttgtctatatccccattaagagatatgttgcttccaggtttcattattataaatactgtttc

SEQ ID NO: 137248 - DNA, 253 bp, Homo sapiens
aattcagtctttttgataattttatatatatagaaggtatgatatttatattacatttaaaatttagtacaacttttattaaagtgtacatattatttatacaatgcttttttcttttctatatctatacagcttacccatttttgagaaggctgcatttttttctataacatgtrtatgttgtactttacttgtctatatccccattaagagatatgttgcttccaggtttcattattataaatactgtttc

SEQ ID NO: 137249 - DNA, 587 bp, Homo sapiens
aggtcccacagtggagaggcctccaggggaggcaccagtcaagtgatgctgatctgtgtgtgagcatggccctgcagcccttactgaaactgccattagaggactatgcactagtgtggggagggcagctctccctgtgggacccacttggtcaagtctttgtcattgtttatggatgggcccaaaaatcacatataggattgagtctggggctgaactctttactgctctgtctgtattccctgtcttggttgacacctaatacatgactaagaaactaagaaatcattttagacgtcgtttttgtgtctgtgttttatgctttgttggcttgaaaacttcatccaataaaactttagttatttttattaccatttcttcctttatgaccccacagcatcctccatgtgccagggtccaaatcatctttaacccggactattstatcagtacccaaatatattctttcatcaaaatatattctttctcttctctggctgtaatctcattcatttccaggctacttcttttcaaactaaaaagcaaatataatcacactattctctttcttcaaacactttcccaat

SEQ ID NO: 137250 - DNA, 573 bp, Homo sapiens
aactaaacaaaacaaaaacaaaatttgttttttatttcaaatggcatgttccattgcgttctaagactggactgtcttggagataaaggagacttcattattttatgtaatattcctttgagaaatcctgagctttgtgcaaaaatgacatacttcattttttttttgcataattttgtcactccatagagcccagatcgagttcctaagttctcactaaggcacatgggtctaattccattacatttttggcctgtgtcaattaattttcttttctcagataataaatttacactcctattccacttctgagcagttagacattttcagcatggaacattctattaaaatgaaatggcaaattgccttgtagcacacamattttcaaagaatgttttgtctgataatgtagttcttatgagtttctttccaaagtaatccatttacacaaaatacattactaattttgtgcatttacaaactacacataatttcaaagtgatgtcattgttccacaaatacatctaggtttcaaagtgattgattaaattctgtttaaaattttgcacagaa

SEQ ID NO: 137251 - DNA, 573 bp, Homo sapiens
aactaaacaaaacaaaaacaaaatttgttttttatttcaaatggcatgttccattgcgttctaagactggactgtcttggagataaaggagacttcattattttatgtaatattcctttgagaaatcctgagctttgtgcaaaaatgacatacttcattttttttttgcataattttgtcactccatagagcccagatcgagttcctaagttctcactaaggcacatgggtctaattccattacatttttggcctgtgtcaattaattttcttttctcagataataaatttacactcctattccacttctgagcagttagacattttcagcatggaacattctattaaaatgaaatggcaaattgccttgtagcacacaaattttcaaagaatgttttgtctgataatgtagttcttatgagtttctttccaaagtaatccatttacacaaaatacattaytaattttgtgcatttacaaactacacataatttcaaagtgatgtcattgttccacaaatacatctaggtttcaaagtgattgattaaattctgtttaaaattttgcacagaa

SEQ ID NO: 137252 - DNA, 573 bp, Homo sapiens
aactaaacaaaacaaaaacaaaatttgttttttatttcaaatggcatgttccattgcgttctaagactggactgtcttggagataaaggagacttcattattttatgtaatattcctttgagaaatcctgagctttgtgcaaaaatgacatacttcattttttttttgcataattttgtcactccatagagcccagatcgagttcctaagttctcactaaggcacatgggtctaattccattacatttttggcctgtgtcaattaattttcttttctcagataataaatttacactcctattccacttctgagcagttagacattttcagcatggaacattctattaaaatgaaatggcaaattgccttgtagcacacaaattttcaaagaatgttttgtctgataatgtagttcttatgagtttctttccaaagtaatccatttacacaaaatacattactaattttgtgcatttacaaactacacataatttcaaagtgatgtcattgttccacaaatacatctaggtttcaaagtgaytgattaaattctgtttaaaattttgcacagaa

SEQ ID NO: 137253 - DNA, 537 bp, Homo sapiens
gaattctcttttacttactaaggttgagatgcctatttgatattcaaggcagtygcaaatgagatgagtgttcaggaatgagatatcagctaaagatataaattttagtcttgtgcccatatcttagctgcaaggaaggattttatgaactgctggtgagactgtaaatcagtgcaatcaacgtagacaaagaaataaatgcatacaccatgtcatcttgtaataactcccaacccccaacacctaaagaagagactgtgtgtttaagttgggagtgtattgtggagtaagaataagaaacaggatgggtgctatagggagagagagtaaaatctagaacacattattaagttaggtgatggaatactatatgaccattcactgaagtgaaacaacgggggaaatatgtatccatcagctctaggagttccatttttcaagcatagcctcatggatgctaacttctcgatgtgtctagacagtgcatttatgagtaacaagcaaaatgcctacaacaatccacacaacattgtctga

SEQ ID NO: 137254 - DNA, 536 bp, Homo sapiens
gaattctcttttacttactaaggttgagatgcctatttgatattcaaggcagtcgcaaatgagatgagtgttcaggaatgagatrtcagctaaagatataaattttagtcttgtgcccatatcttagctgcaaggaaggattttatgaactgctggtgagactgtaaatcagtgcaatcaacgtagacaaagaaataaatgcatacaccatgtcatcttgtaataactcccaacccccaacacctaaagaagagactgtgtgtttaagttgggagtgtattgtggagtaagaataagaaacaggatgggtgctatagggagagagagtaaaatctagaacacattattaagttaggtgatggaatactatatgaccattcactgaagtgaaacaacgggggaaatatgtatccatcagctctaggagttccatttttcaagcatagcctcatggatgctaacttctcgatgtgtctagacagtgcatttatgagtaacaagcaaaatgcctacaacaatccacacaacattgtctg

SEQ ID NO: 137255 - DNA, 443 bp, Homo sapiens
gatataaattttagtcttgtgcccatatcttagctgcaaggaaggattttatgaactgctggtgagactgtaaatcagtgcaatcaacgtagacaaagaaataaatgcatacaccatgtcatcttgtaataactcccaacccccaacacctaaagaagagactgtgtgtttaagttgggagtgtattgtggagtaagaataagaaacaggatgggtgctatagggagagagagtaaaatctakaacacattattaagttaggtgatggaatactatatgaccattcactgaagtgaaacaacgggggaaatatgtatccatcagctctaggagttccatttttcaagcatagcctcatggatgctaacttctcgatgtgtctagacagtgcatttatgagtaacaagcaaaatgcctacaacaatccacacaacattgtctga

SEQ ID NO: 137256 - DNA, 443 bp, Homo sapiens
gatataaattttagtcttgtgcccatatcttagctgcaaggaaggattttatgaactgctggtgagactgtaaatcagtgcaatcaacgtagacaaagaaataaatgcatacaccatgtcatcttgtaataactcccaacccccaacacctaaagaagagactgtgtgtttaagttgggagtgtattgtggagtaagaataagaaacaggatgggtgctatagggagagagagtaaaatctagaacacattattaagttaggtgatggaatactatatgaccattcactgaagtgaaacaacgggggaaatatgtatccatcagctctaggagttccatttttcaagcatagcctcatggatgctaacttctcratgtgtctagacagtgcatttatgagtaacaagcaaaatgcctacaacaatccacacaacattgtctga

SEQ ID NO: 137257 - DNA, 203 bp, Homo sapiens
tatacaggtaaactcgtgtcatggggatttgttgtacaggttatgttgtcacccgggtattaagcttagtacccattagttacttttyctgaacctctcccttttcccacccgctactctcaggtaggtccgagtgtgtggtgttctcctctatgagtccatgtgttcttatcacttggctcacatttataaataagaacatg

SEQ ID NO: 137258 - DNA, 565 bp, Homo sapiens
gaagtaagaaaagaaaagggattctacatcttgagtgagaaattgccttataaaaatgaacaaatagaggctggrtgcagtggctcacacctgtagtcccagcactttgggaggctgaggcaggcagatcactttaggtcaggagttcaaacccagcctggcccacatggtgaaaacccatctctactaaaaatgcaaaaattagccaagtgtggtggcacgcacctgtaatttcagctacttgggaggctgaagaagaagaattgcttgaacccaggaggcggatgctgcagtgcactgagatcacgccactgcactccatccagcctgggtgacagagcaagactcctccgtctcaaaaagcaacaacaataacaacaaaaacaaatagaataagtgaagagatttgatcttataattggttggaatatcccataacactgcactgtttatgtttgcacaataatgaaagttcattgagtacatgttcactgacatatatggatcctcagaaatatatatcttaaacatatatataagtatatataaatgtatactcatacgc

SEQ ID NO: 137259 - DNA, 565 bp, Homo sapiens
gaagtaagaaaagaaaagggattctacatcttgagtgagaaattgccttataaaaatgaacaaatagaggctggatgcagtggctcacacctgtagtcccagcactttgggaggctgaggcaggcagatcactttaggtcaggagttcaaacccagcctggcccacatggtgaaaacccatctctactaaaaatgcaaaaattagccaagtgtggtggcacgcacctgtaatttcagctacttgggaggctgaagaagaagaattgcttgaacccaggaggcggatgytgcagtgcactgagatcacgccactgcactccatccagcctgggtgacagagcaagactcctccgtctcaaaaagcaacaacaataacaacaaaaacaaatagaataagtgaagagatttgatcttataattggttggaatatcccataacactgcactgtttatgtttgcacaataatgaaagttcattgagtacatgttcactgacatatatggatcctcagaaatatatatcttaaacatatatataagtatatataaatgtatactcatacgc

SEQ ID NO: 137260 - DNA, 565 bp, Homo sapiens
gaagtaagaaaagaaaagggattctacatcttgagtgagaaattgccttataaaaatgaacaaatagaggctggatgcagtggctcacacctgtagtcccagcactttgggaggctgaggcaggcagatcactttaggtcaggagttcaaacccagcctggcccacatggtgaaaacccatctctactaaaaatgcaaaaattagccaagtgtggtggcacgcacctgtaatttcagctacttgggaggctgaagaagaagaattgcttgaacccaggaggcggatgctgcagtgcactgagatcacgccactgcactccatccagcctgggtgacagagcaagactcctccgtctcaaaaagcaacaacaataacaacaaaaacaaatagaataartgaagagatttgatcttataattggttggaatatcccataacactgcactgtttatgtttgcacaataatgaaagttcattgagtacatgttcactgacatatatggatcctcagaaatatatatcttaaacatatatataagtatatataaatgtatactcatacgc

SEQ ID NO: 137261 - DNA, 470 bp, Homo sapiens
tgaggcccaagtcatttgctttaacataagggctggcaaattactgtttctaatctctactttaaactatggagaagtatggaatatcacatagataagctaatttcaggagggggtaatttaacaacacgtgtaattggtttggggaaaaaaggtaaatagcaagtgtctgattgttagcttggttgatttaaatcagtatagatttaggaaragcgtacaatctgctgagcattctaaacatctgaaacatcccaacacaaaaaaagtacatttgaggtgatggatatcctaattactctgattcgatcattatacttttaatgcatgtatcaaaaatcccaccaatcccataaatatgtacaattattatatatcaacgaaaataaataaatagataacgtctgaaacaggcaccactgcctcagtgaggtatgaactccagcccttaccagaaattgtcccacagg

SEQ ID NO: 137262 - DNA, 594 bp, Homo sapiens
  misc_feature (1)...(594): n = A,T,C or G
gctttggttatcaagcnnngccaaggggcaatcattctacaagccatagaccccaccgctcacagccctcctgtccaagctctgccattcccctaacgggcatgacaattacttcttaaagtatcctcctttgaggaagacgccctataagaaagcatcaaaaggggctccctgaacagagtagagggtagggatgggtgcccaccatcctggtgtgtggctctgggtggctcttctttcctgcagtgacatctccctcctgtctgcccagracatatctctcttcctttaggactcctctctaccactaccaccccttggacatctttccctcctccagttggattctccctctttctttttacttctgcacagctcgtactctgttataactgctgcatggggttcctccccctatgagaagggctcactcacctgtggcacactcacctgtacattcccagctccaagacctggacaaacagcggtcgttcaggtcaaactcatgaatgaggccgggtgcagtggctcacacctgtaatcccagcactttgggacaccaaggcaggtggatcacttgagcccaggaggtca

SEQ ID NO: 137263 - DNA, 594 bp, Homo sapiens
  misc_feature (1)...(594): n = A,T,C or G
gctttggttatcaagcnnngccaaggggcaatcattctacaagccatagaccccaccgctcacagccctcctgtccaagctctgccattcccctaacgggcatgacaattacttcttaaagtatcctcctttgaggaagacgccctataagaaagcatcaaaaggggctccctgaacagagtagagggtagggatgggtgcccaccatcctggtgtgtggctctgggtggctcttctttcctgcagtgacatctccctcctgtctgcccaggacatatctctcttcctttaggactcctctctaccaytaccaccccttggacatctttccctcctccagttggattctccctctttctttttacttctgcacagctcgtactctgttataactgctgcatggggttcctccccctatgagaagggctcactcacctgtggcacactcacctgtacattcccagctccaagacctggacaaacagcggtcgttcaggtcaaactcatgaatgaggccgggtgcagtggctcacacctgtaatcccagcactttgggacaccaaggcaggtggatcacttgagcccaggaggtca

SEQ ID NO: 137264 - DNA, 616 bp, Homo sapiens
gctgtgtgatcttgtactggtttcttaacctctctggtctcaggtattgatgttgaaaatgagaaactaagagtatcgctctcacytagtttgtcgaaggcctgtaagagctgaaggtaggacgtacttagagcatagtgtgtgcgggaaaaaatgtttataaaaaataaggccgagcccatgttcgaatcatttgtacacatggattttttttctctcttcatggattacagctttcttcagggaaagagactttctcacttccttctctgcgtcaccactggagccttaaacgttatacacttagttaccaggagacagtgaagtcaacagctgcccaagtccctgtatccacagagtccctgtatacacagcaggcaccagcccatatttatggaatgaattaatacgtatttgtacaatagccttagttgtatccagttggaagtcaacttatggaaggaattgcaaatttttgaagaaacttattttggtacttttatgtgtacagatattaaaaagagcctcattggaaacaatttatctgaaagtggttcacaaggaaatttccttaataaagaaacaagagtgacttccaatcagtgtgtcaagtgtt

SEQ ID NO: 137265 - DNA, 584 bp, Homo sapiens
atgtaattataataatatgtagaattttcttttatgggtgttgcttctaatatatataaatacaacttatttttgtatggtgacatttatcttaaaaccttgccaaattaacttactagtcttctagagtttttatttgtttgtttttttgtaggggtggtggggagtagaattctgaggayttctaccaaaaaaaatatgtttatctgaataaatagttttacttcaaactttacctttttctcttccaattgcactagcttggacctcaaatataatattctattgaagtagtgggagcagatatccttgccttattcctggatcttaaagtgaaagcattcagtttttcatcaataaaaatgacatcagctgtagttttttcatagatgtggtttgtcaaattaagaaaattccctttctttcttactttgctgagagatttatttttctttttttaattatgaatggacagtgaatgttgtcaaatacttaatctacctttattgagatgactgtatgattttttctcattaatatctaaatgtggctacttccactaatcaagcagctaatgttaagct

SEQ ID NO: 137266 - DNA, 468 bp, Homo sapiens
gcacatagcttagtagcatctgcagcaatttaataatcattcatgataataatagcttgactccataatttaagaaaaatgcaacctgcttttcaagaaaggaggaaacattgcytaatttgaggacatgaactcaagcaccaagggacttctggtacagtatcactcagatgcatgtgcttctgagttcccactggattttctcaaaaaaaaaaaaaatagaaataagcaacatttgaaacagaatacagaacatgtgcatcagttgtgtcttcatagtttagacagtgctagcatttataagatatcaccatcttgcttttgaactgaataatatatatctcaaccaggactctgaaaaccctagggtaaaaatttaagagaatatttgtggcatcctccaccttttaagctgtttcttctaatatctcaaaataatatttagtaaaaaaagaaaattacaaaaat

SEQ ID NO: 137267 - DNA, 547 bp, Homo sapiens
cacaaataatagagtcaaagtttttcttacaagttcttttggttaacattacattatgattaacttgttttgtagtattattattactatgttagttaccagcttactgctaagaatatcattgtagagttcttaaattgagtattacgtgtaagtccttttgggacctataagactcataggatattttttacactaactctaccagcaaccacaagttccccaaaagtatgtttaaatttaaaggtggttaggagaaaggatytatagaaaatatgtaagaaaatgctggtcatatcataaaagcccaaggaagaatgcagttttctttgtgttcctccacacttctccatactaaacaaaaatgtataagaaggtactcaccccatggtttatggttatgccatcctatttacagcaagagccctgtatctctaggcacggatgatactacagcagccaacaatcagagtccccactcaagtcagctgaagaagccaagacaagtgactctgacgaggtttaaaatacttctccaactagatcc

SEQ ID NO: 137268 - DNA, 547 bp, Homo sapiens
cacaaataatagagtcaaagtttttcttacaagttcttttggttaacattacattatgattaacttgttttgtagtattattattactatgttagttaccagcttactgctaagaatatcattgtagagttcttaaattgagtattacgtgtaagtccttttgggacctataagactcataggatattttttacactaactctaccagcaaccacaagttccccaaaagtatgtttaaatttaaaggtggttaggagaaaggatctatagaaaatatgtaagaaaatgctggycatatcataaaagcccaaggaagaatgcagttttctttgtgttcctccacacttctccatactaaacaaaaatgtataagaaggtactcaccccatggtttatggttatgccatcctatttacagcaagagccctgtatctctaggcacggatgatactacagcagccaacaatcagagtccccactcaagtcagctgaagaagccaagacaagtgactctgacgaggtttaaaatacttctccaactagatcc

SEQ ID NO: 137269 - DNA, 547 bp, Homo sapiens
cacaaataatagagtcaaagtttttcttacaagttcttttggttaacattacattatgattaacttgttttgtagtattattattactatgttagttaccagcttactgctaagaatatcattgtagagttcttaaattgagtattacgtgtaagtccttttgggacctataagactcataggatattttttacactaactctaccagcaaccacaagttccccaaaagtatgtttaaatttaaaggtggttaggagaaaggatctatagaaaatatgtaagaaaatgctggtcatatcataaaagcccaaggaagaatgcagttttctttgtgttcctccacacttctccatactaaacaaaaatgtataagaaggtactcaccccatggtttatggttatgccatcctatttacagcaagagccctgtatctctaggcacggatgatactacagcagccaacaatcagagtycccactcaagtcagctgaagaagccaagacaagtgactctgacgaggtttaaaatacttctccaactagatcc

SEQ ID NO: 137270 - DNA, 541 bp, Homo sapiens
agtattttctccctctctctctctcttccccccgccaaccctctttctctttttccatccttccctttcatcccttctccatctctgtttcacttttgctgcgtttctttttggaaagctggtcacttgatctttagagtttccctgcttggtaatgtgattctttaaaaaaaaaaaaaaaacacaaaacttttaagttcagaggtacatgggcaagtttgctacacaaacttctgtgatggggctttgttgtacaggttatttcatcacccaggtattaagcctagtacccataagttatttttcctkatcttctctctccttcctcccaacctccaccctcttataggccccagtgtgtgttgttcctctctgtgtccatgtattctcatcacttagtgagaacatgtggtatttggttttctgttcctgcgttagtttgctaaggaaaatggcctacagctccatccatgtcccttcataggacatgatctcatttctttttatggctacatagtattgcatggtgtatatgtacatt

SEQ ID NO: 137271 - DNA, 494 bp, Homo sapiens
aggtgcttcacccactacaatctcctctctatattttggtttattatgtagtctcaagcttcagcctaaatatcttctgtattttcatttggctctaagttagggttaagtgcctactgtgagctaaatgtttatgtctctcccaaattcatatgttgaaacctaatcaccaatgtgatgttattaggaggtggggcctttgggaggtgattctgtcatgaaggatgaaccttcatgaatgggattcatgcctttataaaagacaccctagaaagcttctttgtcccttccaccatgtgcagacacagctagaaagtgccatccatgaatcaaaaagcagcccctcagcaggcattgaatctgctgacacatttatcttggactttccagcctccagaaccatgagaaataaatttctgttgtttataagccactcagtawaagaaattttgttacatcagactgaaaggtctaagatagtgcctgtgtttcag

SEQ ID NO: 137272 - DNA, 560 bp, Homo sapiens
cattagtgtctgtgaaaaaaatttaaaaccgtatgtgaatttttgctctcagcaatggtgggtcagacaagcctccaggtaagaaaaataaaaacaaactcaataaaataaaaaaaatctatttgaacaaatcagagagttatcaggtgtgatggtaatattgagtgtcaacttgattggattgaaggatgtaaagtattgttcctgggtgtgtctgtgagggcgttgccaaaggagattaacgatgaactgggagatgcagacccaccctcaatcagctgccagcatggctaggataaaagcaggcagaagaaygtggaaagactagactggctaagtcttctggtctccatctttctcctgtgctgcctttgaacatcagactccaagttcttcagctttccgactcttggacttacactagtgatttgccaggggctcttgggtctttggccacagactgaaggctgcattatcggcttccctacttttgaggtttgagaactcagactggcttcctggctcctcagcttgcaggtggccttttgtggaacttcacc

SEQ ID NO: 137273 - DNA, 576 bp, Homo sapiens
ttcaacattcttcttaagactttttttagtagtatttatcaacaagtataatctgtcattataaaaagtttcaggagaaatgtcctttagattattttttggtggccaaaagcaaacctttctgtggttatatttccagaaccaactcacctatcaaacagttctcctcctgtgacgagttctaggaccagactgatttctgtaggggtttcaaatatctctttaagttttatctagggaaagatataaaaaaaagaatatcacaaatttcttattccatctttcttggaaatagctaayactatggctaaaacaacattctgcagtagtaatatgttggatcactgttaataaagtttcctcattcttttatcagctagctatttctcactctctttctgggttgttgattttatcagttacctcatttttttcaaagttcctataaaatgtttacatttttccttttgtcagttgaaagatgtctgccttggaaacactttctaacttttctaaaacatcccaacttctgaattgttcaaaaatcaaaaacaaaaacaacacaacttcctaaac

SEQ ID NO: 137274 - DNA, 525 bp, Homo sapiens
tagaggagaggatgaatatatgatctgtacattttaatacctgacagttaatatgaggccattatataacagggaagactcactgtgagcagagaaaagcaacctaactctagtgactgtacatcaaattgataggctctggagcttttgcagcaaaggagtaaaggaagacgcacatcttgatacatccagtgctaacccaggaactttggaggctgtttcagcagtcttccacggacactaaaccatagctactctgcatgattcagaccatgtattgatcaaagctctttcagtttcaagtaacaaacacgcagctcaaactcacgtaataagtcccaaatggtaatttattggcacatgtaactgggaagtcagagtagatctatctgcagacataaccaaattgagaggttgagactcagataatctctctctcccctgtgcacgtttgtgtctttgtctatgtctctcctttccaaayggcatgaaacatggccacagaagctccaagtctgtatttct

SEQ ID NO: 137275 - DNA, 411 bp, Homo sapiens
tatagcaacagaaaatggactaagacaccaggtaaactaaattgacagcagtggactcatagtcttgcttctctaatttatggtgtattattgctcatcagaaagaaccttgtctccatttatttgtcattgctcttgttactaacatgaagtggatagccatcaaatggattgggcacctggggtttttctgtaatgccttgtcctagctcctttacttaaacggccctaartattctaatggtctttgatatactttttgaagcttatacacagaaaaaaatttaaaatttaataaaagaaattatacaggtttttatagtttcaagactccatgacactcaagatttcttaaaactgaaagaaatcccaattttcctgtctgtccccatggtaggggagaaagaagta

SEQ ID NO: 137276 - DNA, 513 bp, Homo sapiens
acttggaaaaatataaattattaatgcacaggtgaagttactgaccttctaaatccactgcagcaagtactgatactcctgctcactcttctcccccatttcaggctatagagcttytatagctgccagatagaaatcccgtacttttccttccaacagcacaccttgcgtttaatttgagtgttccatcatttgtatcaaacacaacagagtgattaaaagagaatgaaatgatagagattagaaaatgataatggtgagaattgggaatgtactatccattctcaaagaagcaactatgatatccttggtaagcagaaaagaattctatggatgtagctgtggatattttgacttgcctctgtgccctccatgggcacagagcctggctgggtctttactcctcatatttcccaagaaggtgccagcatcagcatggtcttatgaaaaagaaactgattaacaaagagagaattaatgttaagcctcccaaattattttttaagattcatg

SEQ ID NO: 137277 - DNA, 561 bp, Homo sapiens
gaagagattagattggagcacaaaagtaaaaagggaagctcctgagtctgcacactctggccaagcagaacctggggatcttgaccttggccctacagacaggctgaactgtttgcattgtccagagaagctgattgggcaggactgaggatgaatgaagaaattactccatcctcaggcaaagaggtgagctctttcactaggatgaggaagctgaaaatatcattatgaaagatggctgtgctttagatgacagtatatactttatatattaaataatattaaaaaataagagtagayatttggaatgtactggagaaagaaaagagttttgggatgcaagtaaaaggtatgtcaaacatgacaaagagtgaaaatttgtagtttttccttggaaaaatttacattcaccaatgtataaatgattcctaaagcaaatatgcattaaagtagaatgaggaattaaaaaatataaaagctccaatcttaccttaccatttagtctttaaaaaaatgcaataaccaaaatctcaaattcccttttaaaagagacaaagactg

SEQ ID NO: 137278 - DNA, 591 bp, Homo sapiens
tgacttcttcagtacaagaatcactaatactaagtggaaaaaaaggaaacaaacaacccaaaaggcacttcaatccattttcctctcttgtttacagttaacaccatgaaagctttatcctcattaatggcacaatgagacaaatggatattgttacaggaaatatccagggttttttcaatacaataaaaagtggttcagttatcattttctattttctggcacttcaatacatttataacagtgagtcactgatgtttgtcataacatttagagagtgcaagatcttgaaatgctttctgaatagccagaagaaatgctcaattatgcgaacagggtctcaatgttgaattatgtttytccacagacttctcattatgagaaagctcacgtatctgaaatgttgaaataccagaatgaataataatatactacaataattgtttagttttgccatatttgattttcctctctcccccaacctgtgcatacacaaaccattttttttgttgttgtttaaccatttgaaagtaaattgcagactttatgatgctggctgatatgtaatttaatgcattccaattctttgaa

SEQ ID NO: 137279 - DNA, 446 bp, Homo sapiens
gccattaaataccatgttatctacttgctctaatttatgttatatgatattagaagtggaaccagaatacttcttcctccaattaaccagttaattgtttagattcatgtaactatttaaagaaattggtgatttttaaaatatgacatatatcccttgtgctttgaagaacatcattaagtaaaaagaccacccatagaatgggagaagacatttacaaatcatatatttggtaagggatttgtacctakaatacataaagaatgcttacaactaaattacaaaaagtcacatcacacaatttaaaaatggaaaggatttgaatagttattcctccaaagaaagttttattttttactctctaaatattctaagaaaataatgaattgtacactttaaacaggtgagttttatggtacataaattaagccccaatatagctatga

SEQ ID NO: 137280 - DNA, 433 bp, Homo sapiens
aggagcagtagaatatctgttagagccagattgtaaagatgttagttaaggtatctggactccaagctgttcagtgaaaatgcatgtgcaaaatagtgtccttggcctcagtccaaaagttctgatttataaggttattttgctacaacctttctaaggatcagtttgagaaccagagtacaatgcaaggacactaatgaagtacactgtgtgtctttgtgtcmtgagcaactgaatgaacccacacaaaatttttgtgagaaaggccaattgcagcacttctgtttattcataaatggctttgcaaagtgttcaagaagataataatggcaactgtccaggtatattggagaagaaaacagtcaaatctacaaaaatctcccaagtctacattcattgcacagtgctttggaaatggctaggtatttttttc

SEQ ID NO: 137281 - DNA, 599 bp, Homo sapiens
aaaaatatagtaattcatgtgctttattatgttaatcacacttgcttaaaacattgtatttcatcctccaattagctacatatactcacaaaaaaaccactaaaatatttacagtaatgcaatggagtcaaattttatatttcataatacatttattattaaagtaaaataagctttataagcagcatattgagggatccaagatgatatatatgcacagcattgcaatacaagtggaaaaagataatgtcatatatccaatcttttgtgtttggttgtttgtttatcaataccttttggatttcaagtacaaaggacagagtttatcatactgtctattgcacwtaatcaactttgtttaatgaaagtttcctttcttgctttattcatttatctttaattcattcatttatgttaatatatatcactttcctttgcttcttcctcaggcaacaattataatgtatttaattttatttgaaattcttttagaaaatgcaaattgtataatgtgaagatattttaatttacttaaatgctattatatatgtcattatagttctcatttttttcactaaggtttattcttaaagaccaat

SEQ ID NO: 137282 - DNA, 605 bp, Homo sapiens
tttgtataaatgttactttgttacaagcgtgtatttggttactaagagaaatgataacgctccttatttgccctgggaaaaggaactgagccaaaagtgtacttctgaaaaggaaagttttctgccagccattagaaatgttctacaaagattccaaagtttctgtagtgacaggatgatgttcagcaggaacattctcttgtttgggtttggagaatgtagtcagggataattcagagcaactaaaattayagatggataagaaccttggaaggtgaaaacatatctcattcattatataaacaaaagtgaagggtgttgaggtaaatgggctagaatttgttgcaaccaaaatcttcataactttgctaaaaaatccagttccttcatgcaaatgtgtctatctacagctccccctgctcctttggactctttaacattgacaaaatttacatccatacaatggaatcaaaatagggttctgcacattctctgaacactgctcaacataatcccatttggtttgtggatagtccataaagaagtcaatatgtttctgtaatttatagagatgtcagctccacgaactttgttggagccttgag

SEQ ID NO: 137283 - DNA, 605 bp, Homo sapiens
tttgtataaatgttactttgttacaagcgtgtatttggttactaagagaaatgataacgctccttatttgccctgggaaaaggaactgagccaaaagtgtacttctgaaaaggaaagttttctgccagccattagaaatgttctacaaagattccaaagtttctgtagtgacaggatgatgttcagcaggaacattctcttgtttgggtttggagaatgtagtcagggataattcagagcaactaaaattatagatggmtaagaaccttggaaggtgaaaacatatctcattcattatataaacaaaagtgaagggtgttgaggtaaatgggctagaatttgttgcaaccaaaatcttcataactttgctaaaaaatccagttccttcatgcaaatgtgtctatctacagctccccctgctcctttggactctttaacattgacaaaatttacatccatacaatggaatcaaaatagggttctgcacattctctgaacactgctcaacataatcccatttggtttgtggatagtccataaagaagtcaatatgtttctgtaatttatagagatgtcagctccacgaactttgttggagccttgag

SEQ ID NO: 137284 - DNA, 596 bp, Homo sapiens
atcaaaaaacagaatgtttatactcttctcaaggtaaggatggacataaacttcccttgtaacacctgctgcttaattactctggccaaattcctggtaattttttctttgcttgttaaatgtagtgttctttaaattttaaaataatgaagcaaccartagttgtctagggttaagattttgacaagagggaaaacatgtgtggaagactaaaaagccaatctgtgtaaaagggacaacagcctggaaagtaaagcaagactctgaggatccatttagcagtgaacattccccagtttctgctctgtgatgcagctgagccctgtactacataggcaattaaaattataaatggtccacccagctatgtctccttctgagaactacatcatgccctgctgccatgcatggcaaaccctattccattcattccaattttcaccgtaactgaggagcagacccagaaaaagagaggccactgggtttccgctccaacctgctggcattctgaatcgcttgcccaaagttctgaggtcattcaagagaattcagccataaaacaaatcattcactgcggttgcctaagggcaataaaa

SEQ ID NO: 137285 - DNA, 596 bp, Homo sapiens
atcaaaaaacagaatgtttatactcttctcaaggtaaggatggacataaacttcccttgtaacacctgctgcttaattactctggccaaattcctggtaattttttctttgcttgttaaatgtagtgttctttaaattttaaaataatgaagcaaccagtagttgtctagggttaagattttgacaagagggaaaacatgtgtggaagactaaaaagccaatctgtgtaaaagggacaacagcctggaaagtaaagcaagactctgaggatccatttagcagtgaacattccccagtttctgctctgtgatgcagctgagccctgtactacataggcaattaaaattataaatgrtccacccagctatgtctccttctgagaactacatcatgccctgctgccatgcatggcaaaccctattccattcattccaattttcaccgtaactgaggagcagacccagaaaaagagaggccactgggtttccgctccaacctgctggcattctgaatcgcttgcccaaagttctgaggtcattcaagagaattcagccataaaacaaatcattcactgcggttgcctaagggcaataaaa

SEQ ID NO: 137286 - DNA, 602 bp, Homo sapiens
ttgtttattgaatagatgaataaaacgatgcttacatttaccttctgcttgcttgggcaaatagagacttggacrtaatcctgtaaacttcatcttggaggtgaatgtgggtggatttacatcaatggattgtgtctattgacatttagggaaaaggttgaattcagctacttgaagtaaagatataacttaaaataaatccactggtaaattgtgttgttagataagcacaagtaccaaaactattcctgctagagcctaggaatgaataaaccttctcttatatcaggtaacttaattcccacatatgcagagtgagccaggaataggtgatatggattaagaatgtccttcttccatgtcctatccttgtcctgctgtgccttgagagctctcgggccatttgcttttatacaaaggataaataataggcattctaagaggatgatacgtgatatgtggttacctttgcctattatttttaaatttggtgttatcaacagtgtacacaaagtcttccttaatggtagaaataaggccaatagatttcattgttgtaaattatccactgtggagatatttctattcatatttataattta

SEQ ID NO: 137287 - DNA, 602 bp, Homo sapiens
ttgtttattgaatagatgaataaaacgatgcttacatttaccttctgcttgcttgggcaaatagagacttggacataatcctgtaaacttcatcttggaggtgaatgtgggtggatttacatcaatggattgtgtctattgacatttagggaaaaggttgaattcagctacttgaagtaaagatataacttaaaataaatccactggtaaattgtgttgttagataagcacaagtaccaaaactattcctgctagagcctargaatgaataaaccttctcttatatcaggtaacttaattcccacatatgcagagtgagccaggaataggtgatatggattaagaatgtccttcttccatgtcctatccttgtcctgctgtgccttgagagctctcgggccatttgcttttatacaaaggataaataataggcattctaagaggatgatacgtgatatgtggttacctttgcctattatttttaaatttggtgttatcaacagtgtacacaaagtcttccttaatggtagaaataaggccaatagatttcattgttgtaaattatccactgtggagatatttctattcatatttataattta

SEQ ID NO: 137288 - DNA, 587 bp, Homo sapiens
tatggtttaggagtcatgcagctggaggatgcaagattctgaatttccccaaattgctcctaggataataatataactattgtaaaatctaagatcagtgcttgagatatttttgagaccttgtactcagtggatcagctggcaccactcagctcaataaactggctcatctggtcttgtggcctccacccaggaaccgastcagcagcttcgactccctatgatttcatctccaacccaaccaatcagcactccccacttttcaaaactctacccactaaattatccttaaaactctgattcccaagttttttggaagacttatttgagtaataataaaactccagtatcctgcacagccagctctgcatgaattaaactctttctctattacgattcccctgtcttcataaagtggctctgtctaggcagtgggcaaggtgaacccactgggcagccaccttgccatggaaatatttaataatattatagtagtataatattataagtgtcttggtttgagagaatgattttagcttggtcctaagaaattgatgcatgttcttgtccaaaggaagtaaaaactc

SEQ ID NO: 137289 - DNA, 455 bp, Homo sapiens
gaattcaatccataattgaggctctggatttattagagggtggagatcagccacctgtcacatcctggtttcagagcagcctagaaattgattcctctgtagcatgttagagagacacaatattttgagccaaagtttatttaaaattctttactttgcatttcttgcttgttttctggtttattttatacttttttactatatacaccttctgctttctctccactgatcckttatctctctatcactccttattcttctcttactcctatccacattttctatatacacagtgacctgttcaattattaacaggacctaccaagttaaaaagcagcaggaagaataatcaaagttcaagcaatccatacatggcacatctcagattttactctaggaatccttaaatgctgcacaatttttttaaaaagattatctgtaaaaattaggattct

SEQ ID NO: 137290 - DNA, 612 bp, Homo sapiens
gtggtatgacttatatagctgggtcacaagaagcctaactgatttcacctgggagcctaagcttccaagtaatgtctaaacctttgagataactacactgaacatccttgtcttattcccattcttatggtgaaaatgctcaatatttcaccattaagtgtaatactagctataggtttttcctccatggtgtttattgagtttgactgaataacagtctttcccaaagatcttcacattctaattcctgggacctataaatatattaccttatgtggcagatgagactttgcagatgtgattaagctaagaattttgagttagaaaaattattctgaattattcatgtaggttcaatgtaatgaataagtttgttaaaaratggaagtagaaggatcaaataatatatatatatatgtgacagaactagaggtcagagtgatgtgctttgaaaatggagagaacctgggaaccaaggaatgcaggtagccattagaagctggaaacataaagaaaacctccaaaggttccagaaggaacacggccctgctgacaccttctttttagacttctgacgtccaaaactatgagaataaatttgtattgttttaa

SEQ ID NO: 137291 - DNA, 498 bp, Homo sapiens
gaagcacaacattcaggttattatatgaattctactgatttttaaatattggcaatttactgacaaaaaaaatcctgcaacaaccaaacaaaacacatctgtgagaggtattcattccccaaccaccaggmtaagtgtattggataactcttgcttttcaacttacatcttctacacccagcaatattctggatgttgctcaggaaatcagcccctctgaggggaacctgatgtatttttgttcagcagcactgagtagatttcacttttccatccagggcttttctgacccctcagcatgctacacttaaatcagtcacccagtgttagagtctgggtagttggaaatgcaagtggagcacacattgaccattgcggtacctaagctagttgataatcactctcctttttgtgtcattggtggaatgatctcaaagctcacatacatggatcatctacagtcacccacagtggtggacaaaggctgagaacacatcc

SEQ ID NO: 137292 - DNA, 619 bp, Homo sapiens
tctttagttgagtgctgtggctcgatggtgagtgttcaaaatgataacttataagaatgcctgtttccatgcaaaacagaagttctaatacattcctgccttkgtttataacttaggagaaagaaacctttcacttaaccaacactgtgtaagtgagcaatacaggtgtcacttggtaactctgcgaagtcgtctgctttatttaaagatgattgaatctttgttacagataattatcacagtgaagacaaaaattttaattcttacagagaatttgcagattcttgacatactggtccaagaactctgagaaatgttgagtttcacaggataaactaaatttgcttttttaggagatttgggttcaagtcgagccctgtctctaaccagctattgaagtctgggcaagtgttcacatctttgggcatctgttttctcatctataaaatgatcctacgaattccacttacctcacaggctctctgaaagtaaagagagtctgaaggtacttaacaatcctcacagtgcttacaaatggaacacacaatcataacggcagtggcaagtggctggtgatttatctccaagtgccttaaagtgttctggtcaaccatccctg

SEQ ID NO: 137293 - DNA, 369 bp, Homo sapiens
gtcagtgagttctttacatttctcctcactagatctactagctttgaaatggcggagactttacatgttacaagttatggcccagtaacttagcacagtgcttgcctyatagctgacatttattgcacaatgtcattaatctctctgaataaaaacacccattctgtatctgcacagaattgcctacatttggcatttagaaaacttagcttacatttgtcagtttttacagcatagcttctgagtctagaagcacagatagacacattttttaaaactgttatattgcctcacccttgaaagtatagtctttttgaactaatgaatttagatcagtgtttctcagaatttaatgggcataacagtatc

SEQ ID NO: 137294 - DNA, 570 bp, Homo sapiens
gaaggaaacttttccatttgtgcttttaaaagaatttctgagccccctctttttgttttatcctgacacatcaatcaggaaatgtgattataattcagaaagaattagacacttaaccatatacttaagtaagaggtttgactgggccactggctttgaggttcaagtggcagttacaaaatcaaaatcaggagacakaaagaacaaggttaccattacagcgggcactgagagactcacacaagtgcccgaggggagttaatatggttaaggttacccatgttttgcaccatctcataaaacattctgtcttgagtattacttctatttacaagaatgggctaattcatttatgtcaaatgtggcttttggatattcaattttttttaatgtcaccaaaattatctcagaggagcagctctgacaggtcaatcattgcagatggtaagtgctttgttaattatacagaaatttagaaaccactgtagaatgtcttgcctcaggagaaatttctctcttcctgtttgagagctgcttccctctacagaattaattttatgtttgtgaaca

SEQ ID NO: 137295 - DNA, 572 bp, Homo sapiens
attgtaaatacaaaattgcatgcaggattgtgtaaagacaatgccaggttggactgccagaatgagccaacagcgtgtgacgtgcttccccctgcagagagcctatgaatggatgtgcggtcagggaggtttcacatcaccaagattcctatcccagaaaagcagatgttcatggctctgggaatggaatgcgacccttgtgaagagcctataaackgatgcatgaggggcacctgtccatatggataagttaggactataaatgccctcatcttgccacggctcttctaggcctctttagggttaaggcatactcccttctgagaatttttggtttaaccggttgtctagcttcacatcctgtttctatggaatgtttgtaaccagcttttgctgcaactgttactgctgattaatatctgctatggaaagactgtttctgttttaaggctctgttagaaaaactgatgcacacactatattgtaaattcttatctctgtatagtgtacttctgcatacagaggttatgttaaagaattacttcatccccatgtaaccgtctcacttcata

SEQ ID NO: 137296 - DNA, 568 bp, Homo sapiens
tttttttacaggtaagaggataggaaatgtaacaaaagtagtttatgatatatgatatgtagagtgggtgagttttccaaatacatgttcaacaagcctttaaaacagccagccacatattaggatgtatagataatctcctgagaaatatctttactaagaagaaaagtcaaaagtttgacagatatctaactatagatgtcatacatgtccctgtcagttgtaaaaagtaagaatgtttattgcaaacacagtatctgataaaatgtctgaaaaatgtttgaaagactaacagctgacaaacaaagcaatgtgcaagtaagatctgctgctgaaaggatagtaaaagaagtgctatatttgaacaccataagcgagagagttgggagaatgaggaaatataaagtatctgcaatcacaaggtacctattaggcctgattctgccattttctaggattgggactttgcctcagtcattaacctctctgagcttatttctcttttgtaaacaaacaaataaatgacmgaaaatagtcatattatactcagggactgagttacttaaga

SEQ ID NO: 137297 - DNA, 579 bp, Homo sapiens
ggactttaaacccctgtggtgctctgttgatgaatataaacatgaacatagactagacaaatacatgcactataggtttggccttattttagaaattttttwaaaattattttcactaataatgtgactttttattagcattgaaaaatataatcgatattttaaaagagcttattctttgaaattatctgaatcatgaagctattttgcagctatcttcttatgaagaaaagatatcttcaaatggatgaaattagagttgaaacaaataatgaactgaaagaaggaattagtgactaagtaaagtcattgcttgtcctacagaaaattcaagaatgtgttcacccttaagataattaaaaatgtaaacatggatattacccattttggccattaaatgcatttcttcttttattagaaagtagaagccaaaaataatataaaatagaaaaataatctcaactctgagaattaacttggtaggtcagccctacgttacagaaaatgtaatgaacaattggcagtcatccaagggatttaggtggtactcaaccaaataatctaatacaaagataatgc

SEQ ID NO: 137298 - DNA, 579 bp, Homo sapiens
ggactttaaacccctgtggtgctctgttgatgaatataaacatgaacatagactagacaaatacatgcactataggtttggccttattttagaaatttttttaaaattattttcactaataatgtgactttttattagcattgaaaaatataatcgatattttaaaagagcttattctttgaaattatctgaatcatgaagctattttgcagctatcttcttatgaagaaaagatatcttcaaatggatgaaattagagttgaaacaaataatgaactgaaagaaggaattagtgactaagtaaagtcaytgcttgtcctacagaaaattcaagaatgtgttcacccttaagataattaaaaatgtaaacatggatattacccattttggccattaaatgcatttcttcttttattagaaagtagaagccaaaaataatataaaatagaaaaataatctcaactctgagaattaacttggtaggtcagccctacgttacagaaaatgtaatgaacaattggcagtcatccaagggatttaggtggtactcaaccaaataatctaatacaaagataatgc

SEQ ID NO: 137299 - DNA, 579 bp, Homo sapiens
ggactttaaacccctgtggtgctctgttgatgaatataaacatgaacatagactagacaaatacatgcactataggtttggccttattttagaaatttttttaaaattattttcactaataatgtgactttttattagcattgaaaaatataatcgatattttaaaagagcttattctttgaaattatctgaatcatgaagctattttgcagctatcttcttatgaagaaaagatatcttcaaatggatgaaattagagttgaaacaaataatgaactgaaagaaggaattagtgactaagtaaagtcattgcttgtcctacagaaaattcaagaatgtgttcacccttaagataattaaaaatgtaaacatggatattacccattttggccattaaatgcatttcttcttttaytagaaagtagaagccaaaaataatataaaatagaaaaataatctcaactctgagaattaacttggtaggtcagccctacgttacagaaaatgtaatgaacaattggcagtcatccaagggatttaggtggtactcaaccaaataatctaatacaaagataatgc

SEQ ID NO: 137300 - DNA, 519 bp, Homo sapiens
tttttttttaatcagtcttacagagtctattctgttagttctaaggtctctgttttaatgttaatgctggtcagatgtgtctgaattccaaggggagaaagctgtaatgaggcatgtcctaccacccattcccatcatggcccaaattcgtgtttcgggtttactttagaatgcccttggctgacagaaggggtctattcagttggctggggggcttagaattttgtttttgatktacaccttttagcaaaggtttgtctttaattgtcactctttgcctacccagtatttgagtggttcctgttgattctggagacttcagtcctcaagatattagatccaaagtgtgatattgttaggtcaaaagcagtgaagtagtggcagccaagattctccatgactgccatagtccactccttcccagttccccactccattacctctactcattcctcgatatggacagtagatgttttctccatcttatgtaaagagttatgtaaactgggctccaggaca

SEQ ID NO: 137301 - DNA, 431 bp, Homo sapiens
ggaaaaaatccagacttcacaatctcaaaaatactcccaactttgctccatcccctacctgcaccccgagactctagtgagattttttgtaaatagtgttctccattaactttaagccatcagttctcaactggggatgattttgcctcccaggggatatttggccatgtctggcaacatttctggttgtcatgactggggctgctcctggcatctagagggtagaagtcaggaatgctgctaaacatcctataatgcacaggacagcctcctcccctaataaagactgtccagaatcaacagattattttaataatattttgragagccactaattagcaatatctcagttagtgctacgaagaagcttcccaaactctgaacccttctggttatgtttttactctcttgattgccagtgttcttgcagg

SEQ ID NO: 137302 - DNA, 606 bp, Homo sapiens
ggtttgaatactttttaaaatagatcttttccttcccagggatagctcctgtatcctttctgtctcattttgtgtcctgatagtttggtttggattcagtcagagtgctcactctctggctttctgcatgctgtggggtgcagattgtctgttctgtgctcagaagcagccaattgtcaggttggggctcaagcatttgtagttgactgaagagaaatttgggtatcctgggcatcccattttcagctggcaccgtgccgactgttgccagtgctaagggggtttgtctaagttctctttcctattgtcttgctagtggagagaagtcccatctcagtattacctgcccagagtcatggattcgcaggtacatgatcaaagtcatatcatttttatgggcaactggagayaggagttttcacaagtatcattcttactgcctatagcaatgatgatctttgctttccttctctttggctgtctttggagttgattttggatcatgggagctgcatcttctgcaccctctatgggggtgtttcctgtgtccacgattaagccgtaaaatatgtttattcattatgagtcacattttggaaaaagtgt

SEQ ID NO: 137303 - DNA, 606 bp, Homo sapiens
ggtttgaatactttttaaaatagatcttttccttcccagggatagctcctgtatcctttctgtctcattttgtgtcctgatagtttggtttggattcagtcagagtgctcactctctggctttctgcatgctgtggggtgcagattgtctgttctgtgctcagaagcagccaattgtcaggttggggctcaagcatttgtagttgactgaagagaaatttgggtatcctgggcatcccattttcagctggcaccgtgccgactgttgccagtgctaagggggtttgtctaagttctctttcctattgtcttgctagtggagagaagtcccatctcagtattacctgcccagagtcatggattcgcaggtacatgatcaaagtcatatcatttttatgggcaactggagacaggagttttcacaagtatcattcttactgcytatagcaatgatgatctttgctttccttctctttggctgtctttggagttgattttggatcatgggagctgcatcttctgcaccctctatgggggtgtttcctgtgtccacgattaagccgtaaaatatgtttattcattatgagtcacattttggaaaaagtgt

SEQ ID NO: 137304 - DNA, 606 bp, Homo sapiens
ggtttgaatactttttaaaatagatcttttccttcccagggatagctcctgtatcctttctgtctcattttgtgtcctgatagtttggtttggattcagtcagagtgctcactctctggctttctgcatgctgtggggtgcagattgtctgttctgtgctcagaagcagccaattgtcaggttggggctcaagcatttgtagttgactgaagagaaatttgggtatcctgggcatcccattttcagctggcaccgtgccgactgttgccagtgctaagggggtttgtctaagttctctttcctattgtcttgctagtggagagaagtcccatctcagtattacctgcccagagtcatggattcgcaggtacatgatcaaagtcatatcatttttatgggcaactggagacaggagttttcacaagtatcattcttactgcctatagcaatgatgatctttgctttccttctctttggctgtctttggagttgattttggatcatgggagctgcatcttctgcaccctctatgggggtgtttcctgtgtccacgattaagccgtaaaatakgtttattcattatgagtcacattttggaaaaagtgt

SEQ ID NO: 137305 - DNA, 430 bp, Homo sapiens
gcagtggttttctcttggattctctgctgtgggccccatgatcaggtgtcctgtgactttccctggctcacaagattctagccacgttttctcccttgcagtttctcaagtgtaacaggtgtggtttcccttttggtctttgcactgaccctttcctccatgaaaatgtttctcccccagataacttcatgattaattccttcacctcctttctcagcaaggtccacacmacccgtccaatttaaaattgttgtacatcccttctccagtcccagtcactctggtgtcccatttcttcacaaagcttccaactcctaacatgagaaagcatttgcttatctaccgtgttgtcggtggctatctgagccctccagaaagtaaactcactgtggccagagatcttttcatgatttttccattgatggatccc

SEQ ID NO: 137306 - DNA, 526 bp, Homo sapiens
gcacagggagcacctctcctctcctcaaagcaggcgagggggccggggcaggctacccggtgctctccgcaccaaagcaatgcactttaattcctgcagacacacacacacacacacacacacacacacacacacacacacacacgttatacttttgtttctgaatgtaagaaatggtgtgtgcttattatayagataaattaaaaaataagaaaatatttataatatacatattttgagaagccaaaaaatatatttctttattaaaatcttattttggtcacccaaagctgcatttttctctcctaaccttgaaggcattgtgatgccccacatcggagctgctccaggggacggtgctggcctccctggtagttggggcagggtggagggacaggaggacctggcctagagaagagacatctcacgaagacaaaaaaggttacggtaccaaaaaggggataaatacgatctacaaagaaattgccttgttgaagactagaaaacaactagggaaaaaatgtgg

SEQ ID NO: 137307 - DNA, 611 bp, Homo sapiens
agaagcctctcctctcttcttaagaaaaaaagaaaaaaagaaagaaaagaaaattttcagcatgatgattattcagaaaacgattattcatcatttttcatgaatagaaagacaacattcttcattatccagttcaaatttgttttgcaagtaagaagtgtaaaagttactttaaacataaaatctttataaaaaaaagtctaggtagttgaaaaaaataaaccayaaggctagcagtatgcacttcattataaaggtcacctgtatagtttatacatagatcaaatcttatttagttaaaatgctaaatacatgaaatttcttttttaaatatatctgtctaatttgtacatgtgtgcttatccctatttagtactatcgtttgtgtgtggtattgatgagatcctgcgtttctttctttcaacttcacttatggtattgaaatgaaactttatggtataaacagaagacgctgctttggcatgcatttggggagagggtttaatcccttgtaatgtgttacttgaatcaaacacttgacataatttaacagcagccatgttctcccagcatgtaagttaatacctgggtgtaaggtcatgtctgtgtac

SEQ ID NO: 137308 - DNA, 527 bp, Homo sapiens
gctcgctaacatactctcctgggcccaaggggcccaaggtcttccaggcttgcaccattgacatgtggagaaaaggaagctgtgggtgagccaagcccctcatcaggggagaattactcaaagctactcctcctttacaactcctaacctagtgaygaattagtaatattgtgttggctgagcgattctcaaagctcctcctaacttaatgaattaataataccgttttagatgcaaatggcagcttgttatcttcctaggctgttggctccagtctgattttcctattgaataattactagtagaaccttgtcatctacaaatataacactggccaagttaaacgtgcatggcttatatttttaaatctgctcaggcatgatttggaagcacgtgctttgagcttggtaaggaggaatgggctcccataggtaatgacagaccaaaggtgattccttggcatccattatctcaagtgccttgctgtggtcagtgctgctgcacagtcaaccattcttgtagcggga

SEQ ID NO: 137309 - DNA, 527 bp, Homo sapiens
gctcgctaacatactctcctgggcccaaggggcccaaggtcttccaggcttgcaccattgacatgtggagaaaaggaagctgtgggtgagccaagcccctcatcaggggagaattactcaaagctactcctcctttacaactcctaacctagtgatgaattagtaatattgtgttggctgagcgattctcaaagctcctcctaacttaatgaattaataataccgtkttagatgcaaatggcagcttgttatcttcctaggctgttggctccagtctgattttcctattgaataattactagtagaaccttgtcatctacaaatataacactggccaagttaaacgtgcatggcttatatttttaaatctgctcaggcatgatttggaagcacgtgctttgagcttggtaaggaggaatgggctcccataggtaatgacagaccaaaggtgattccttggcatccattatctcaagtgccttgctgtggtcagtgctgctgcacagtcaaccattcttgtagcggga

SEQ ID NO: 137310 - DNA, 527 bp, Homo sapiens
gctcgctaacatactctcctgggcccaaggggcccaaggtcttccaggcttgcaccattgacatgtggagaaaaggaagctgtgggtgagccaagcccctcatcaggggagaattactcaaagctactcctcctttacaactcctaacctagtgatgaattagtaatattgtgttggctgagcgattctcaaagctcctcctaacttaatgaattaataataccgttttagatgcaaatgrcagcttgttatcttcctaggctgttggctccagtctgattttcctattgaataattactagtagaaccttgtcatctacaaatataacactggccaagttaaacgtgcatggcttatatttttaaatctgctcaggcatgatttggaagcacgtgctttgagcttggtaaggaggaatgggctcccataggtaatgacagaccaaaggtgattccttggcatccattatctcaagtgccttgctgtggtcagtgctgctgcacagtcaaccattcttgtagcggga

SEQ ID NO: 137311 - DNA, 451 bp, Homo sapiens
gttgatgacttccaaatctacattgctacttatctttccccctgtcttaggtttatcctgtggtcatacaaatwcagtgccttaaacactgaacttcatttttgtctccaccttgctcttgctatcaatttttccctgcatgtcaaagttactcttcttttcatcacccaaacttgaaacctcagagatatccttgattcctctctttgcttcatcttacatgcacagtcaccaagtcctatctcttcattcttagaaatgtcttttggaggctcactttaccactttcactgctcccacactaagccaagctttcatcatctcttgcctggcctattaaattagcctccagccttcggtccttttgaatttcattctgtcttctttaacactattgcaataaaattgttagacatcaatttcattatgctattccaattgtttaaatacc

SEQ ID NO: 137312 - DNA, 451 bp, Homo sapiens
gttgatgacttccaaatctacattgctacttatctttccccctgtcttaggtttatcctgtggtcatacaaatacagtgccttaaacactgaacttcatttttgtctccaccttgctcttgctatcaatttttccctgcatgtcaaagttactcttcttttcatcacccaaacttgaaacctcagagatatccttgattcctctctttgcttcatctyacatgcacagtcaccaagtcctatctcttcattcttagaaatgtcttttggaggctcactttaccactttcactgctcccacactaagccaagctttcatcatctcttgcctggcctattaaattagcctccagccttcggtccttttgaatttcattctgtcttctttaacactattgcaataaaattgttagacatcaatttcattatgctattccaattgtttaaatacc

SEQ ID NO: 137313 - DNA, 564 bp, Homo sapiens
tctcgtttcttgacttattcacatgccttattgaagtcatgcattgaaacatggaacaaatatcgaacgtatgcaaattacttagcaagtgaaggttttttgagtgtgtgtgtttttaaatcaaacagaaacaattatattgagattgaaacagcacttgagttaaccaagtaccttgctgaagaagatgaaattatagtatggcatacagtcttggtaaacttggtaaccagggatcttgtttctgaggtgaacatctatgatatatactcattattaaaggtaatttcattctttcttatgtagtttttaaataaatcctctcttcttcttttcatattttagccagcatctgtgagacaggtcttttccaaagtaatagtcttagttccatatatatatatatatatatatggaartatatacatttccttaacaagggctgattgatcttagaagaaaataccttagtcatagacctggtctaggagatgagtgaggtttggaagggtacttcattcttggtgaagtgacagtatgtcctaagaaaccagaagtggatgg

SEQ ID NO: 137314 - DNA, 621 bp, Homo sapiens
atttagtcattgtgtgaacagcatagactgtacttacacaaacctagatggtagagcctactacacacctgggctctatggtatagtctattgctcctaggttacaaacctgtacagcatgctactgaatactggaagcagtagtaacacagcgacaagtatttgtgtatttaaacatatctaaacatagaaaagataatgtgctaaaaggcattgtgctacaatgttacaatgactatgacattgmcaggggataggaattttgtagctcctttttaatcttgtaggacctccctcatacatattgtccattgttgactgaaacattgttatgtggctcatagctgtactataattgatgaatataaacaggcacatcatcatcacccaaagtccccagtttacaacagggttcactcttggtgttgcacattctacgggtgttgatgtattaatgtataatgatgcatattcaccattgtagcatcatacagaatactttcatccttccctctgcccatagtcagttgcttttttatgaaaatgtttgaataatctacttcttattccagaagatttcattttatttttgtttttgctttttaatgtgtagagtttttg

SEQ ID NO: 137315 - DNA, 621 bp, Homo sapiens
atttagtcattgtgtgaacagcatagactgtacttacacaaacctagatggtagagcctactacacacctgggctctatggtatagtctattgctcctaggttacaaacctgtacagcatgctactgaatactggaagcagtagtaacacagcgacaagtatttgtgtatttaaacatatctaaacatagaaaagataatgtgctaaaaggcattgtgctacaatgttacaatgactatgacattgayaggggataggaattttgtagctcctttttaatcttgtaggacctccctcatacatattgtccattgttgactgaaacattgttatgtggctcatagctgtactataattgatgaatataaacaggcacatcatcatcacccaaagtccccagtttacaacagggttcactcttggtgttgcacattctacgggtgttgatgtattaatgtataatgatgcatattcaccattgtagcatcatacagaatactttcatccttccctctgcccatagtcagttgcttttttatgaaaatgtttgaataatctacttcttattccagaagatttcattttatttttgtttttgctttttaatgtgtagagtttttg

SEQ ID NO: 137316 - DNA, 621 bp, Homo sapiens
atttagtcattgtgtgaacagcatagactgtacttacacaaacctagatggtagagcctactacacacctgggctctatggtatagtctattgctcctaggttacaaacctgtacagcatgctactgaatactggaagcagtagtaacacagcgacaagtatttgtgtatttaaacatatctaaacatagaaaagataatgtgctaaaaggcattgtgctacaatgttacaatgactatgacattgacaggggataggaattttgtagctcctttttaatcttgtaggacctccctcatacatattgtccattgttgactgaaacattgttatgtggctcatagctgtactataattgatgaatataaacaggcacatcatyatcacccaaagtccccagtttacaacagggttcactcttggtgttgcacattctacgggtgttgatgtattaatgtataatgatgcatattcaccattgtagcatcatacagaatactttcatccttccctctgcccatagtcagttgcttttttatgaaaatgtttgaataatctacttcttattccagaagatttcattttatttttgtttttgctttttaatgtgtagagtttttg

SEQ ID NO: 137317 - DNA, 367 bp, Homo sapiens
aagtattatttatttcttcacaaggttgatgttttccttcacttcccccaacacatacccccatttttagagaaatgttacctccttttataaataagttcagagagaagttttgacctgctcaactagaagtagtacaacgaagtagggaagagatgtgatcagcaggaaaattcttctacctgctgagtgtcttctgtgggtgatataccatattgagctatgtgctatatatgccttgtctcagcctcaaaatacccctatgaggcagygtgtccagtaggcttcagttagaaaaacagaaaccagactaattttgtttgtttgttttagcaaagagatttcaatgttaaggatttgttaaaca

SEQ ID NO: 137318 - DNA, 584 bp, Homo sapiens
tcctcctatcatccttcaacaaataggtgcttggaaaggatggccttcaagcaaagatcacagattaaacagaaagaaccagaatgggatctctacaaaggtatcaggaaaatcaaatagctggtaagggacacatagaagaacaaatatactacaaagcagaataaaagaccaaaaaaacttctccatgaaacaaaaacattaagaaaacacttcttctttgaaacaagtgatcaaatcaaagatagagatatgataaaaggagagatgatacaaagctgggcaggcagggaagaacctaatgagatttatatcccgaaatgctcacattaaggggaaaaaaagaatgaaaactaatgagctaaacatacctcttagaacaacagaacatgaaaatatacccaaagttcttagaagaatatgacatagaaaaaaaaacaagaaagctaaaacttagttctttgagaagatgagaaatctctgagagaaaaggtacaaataaacagtwttatgaatacattagataattacagatgctgcagacatcaatgataacatgatgatataatgaacaaatttatgcc

SEQ ID NO: 137319 - DNA, 440 bp, Homo sapiens
agaattcttctattccccttgattgttttttacatttttattttatgagtgttatactatttctttattcagaaagaatggcccaacttgagaaaatgtacaccatcttttgaaacttaattagattaaatcgtttatgtctttgtgtaaaacatatatactttcatgcctttatggtgamagttacagaaagttcattttggggaaatgtaaaacagataaaactatctggttcttactattaatacatttatttgtttaatagcaacaaatagagcggcagttaaaatgcttggcatttcgaaaccctggaccacaggtagcagactttaatcctgaaacaaggcagcagaaaaagaaagcccggatgtcaaagatgaatgaatatttttctaccaaatacaagtaagattctgacttattgtatttgatctgtggga

SEQ ID NO: 137320 - DNA, 533 bp, Homo sapiens
catttctgtcagagctgtaacagttctcttcccactgaataaacctcacatgatcctcttggtgattcaggtcagacaaaatgtcaaactcctaaygctaagtgctttcacattaaaaattcatatcaaatcaccaagtaaaatccaaacaagaagtcagacatgtaaacaattcacaaaaaagagttgcactgactattatagaatataggtgcactgtagctgtggaaaaaaaggtttggcaacaggtcagagcactttgtcctttatcctggcatttacactgtcatttcctattttaaaatcagtaggccatgctggactcaagccgtgtgtgtgtgtgtgtgtgtgtgtgtgtgtgttttgtgtgtgtgtatgtaagataatatatcactagtatcgccccaagtaattagcaatcatttggttctacaagttcaacatggccttttgttttaaagcataaagtgtgtgggcagagggagtatttgcttaaaaagaaaacaaaacaaaacactgacaggtattcttcc

SEQ ID NO: 137321 - DNA, 428 bp, Homo sapiens
gagattctaaggtgcaacagagaaatggcagggaggagaggaaaaaaggaaagagggggagggggaagggagaaggagagagtgtgctacccattaactgtgtgtctcctagggcaagttacttaacctccctactatagtgtgaatgtatcctgcaaaagttcatttgttggaaacttaatcatatttttaacagtattaagaggtggggcctttagaaggtgagggcctttaggccgttagggctttaccctcatgagcagattaatgtcattatcaccagagtaggttaatgattttgggagtgggckcctaacaaaagggtaagtctggctgttattttttctctgtgttgagtgcttgcttctgctttccactttctgctttccacccttctgccacaagatgtatcttaccagatgcaggtg

SEQ ID NO: 137322 - DNA, 469 bp, Homo sapiens
gctggtctcaaactcctaacctcaagtattctgcctgcctcagccccaacaaagtgctgggattacaggtatgagccacygtggccggcctaaagtttacatttttaaattctaacccccaatatgacggtattaggatgtggagcctttgggaactaattaatgaggttgtgagggtggagcatcatgaatgggattagtgcccttttttaagggacctacagcactctcccatcctctttctgccaagtggggataggacacgtagtcagctgtcgataacctggaagagagctctcaccagaatctgatcatcctaacaccctagtctcagacttctagcctccagagctgtgaaaaaggaatttctggtgttaaagccacccagtctatgataatttgttgtagtagcctggaccaatgaagatggcctctttatatgtgttgtggcacctgtgtcttcatcagg

SEQ ID NO: 137323 - DNA, 469 bp, Homo sapiens
gctggtctcaaactcctaacctcaagtattctgcctgcctcagccccaacaaagtgctgggattacaggtatgagccactgtggccggcctaaagtttacatttttaaattctaacccccaatatgacggtattaggatgtggagcctttgggarctaattaatgaggttgtgagggtggagcatcatgaatgggattagtgcccttttttaagggacctacagcactctcccatcctctttctgccaagtggggataggacacgtagtcagctgtcgataacctggaagagagctctcaccagaatctgatcatcctaacaccctagtctcagacttctagcctccagagctgtgaaaaaggaatttctggtgttaaagccacccagtctatgataatttgttgtagtagcctggaccaatgaagatggcctctttatatgtgttgtggcacctgtgtcttcatcagg

SEQ ID NO: 137324 - DNA, 469 bp, Homo sapiens
gctggtctcaaactcctaacctcaagtattctgcctgcctcagccccaacaaagtgctgggattacaggtatgagccactgtggccggcctaaagtttacatttttaaattctaacccccaatatgacggtattaggatgtggagcctttgggaactaattaatgaggttgtgagggtggagcatcatgaatgggattagtgcccttttttaagggacctacagcactctcccatcctctttctgccmagtggggataggacacgtagtcagctgtcgataacctggaagagagctctcaccagaatctgatcatcctaacaccctagtctcagacttctagcctccagagctgtgaaaaaggaatttctggtgttaaagccacccagtctatgataatttgttgtagtagcctggaccaatgaagatggcctctttatatgtgttgtggcacctgtgtcttcatcagg

SEQ ID NO: 137325 - DNA, 567 bp, Homo sapiens
taaagatccttgttaatcacagctgcaaagttccttttgccatgtaaaggtaacatggtcacagattctggggattaggatgtggacgtctttggggagccattattcagccttccactggccaaggaaagcctcactgaggagctatttgatgagggtcctgaggggatgagggagggaactgggtaaatagccgggggagcatgctctaagaagagggaatagtgggtgagagtctgggaagtttgaggaaccgcatgaggccaatgtggctgcagcagagggartgatggggagagtggcgagggcagggccagaggcaggatggggactctgttacgtggcatctcataggctggtgtagggacttagctttacttgtaatgcagtggggatccacagaacccactgagtacagggttccagatctatacttaggagaagcatctaacccagacttagagggtggtggagttaaacgaatcttctcagaggaaggaaaatgtaagctgagacatgccagcttctgggagaaattagaattaattacaaaagcatttattgagt

SEQ ID NO: 137326 - DNA, 385 bp, Homo sapiens
ggtgtccaagagccccaagtgagcagaggcagagatgggagcaggagacgtggggttaaggtccaattctccagacacagagcccaagacagggattcgggggcaagcagtttatccggggagtgttttcaggagaaaggggaaggaggagctgagcaaggatggggagaagcttcacactggtcccttggggagttctgggctcaaatgtagcacagagatagccccaccttgatgtgaggaatgaagcagttctctagaggggggccataatcagatgccagttgctcttggccgtcacggggagcagctggggagggaygtggccaccagaaaagaaatttcagtggggcaccaagaggagggtggggaggcagcaagcaga

SEQ ID NO: 137327 - DNA, 497 bp, Homo sapiens
atttttacatcgacttccgtggcaaccttattcacaatagctaaaatgtgagagcatccactgatggatgaataagcaagatgtgctacgtacgtatgtataataggctattgttcagccttaggaaatcctgacatacattacaacatggatgaattttgaggatattatgccatgtgaaacaagcgagtcacaaaagacaaacactgtacgattctatttgtatgaggtacttatattcaaattcatagagacaatagaatggtggttgttgggcttgagggaaggggaaaatggggagttgtttaatgggtatggagtttcagttttacaagaggaaaagaattgcagrgttggatggtggtgatggttgtacaacattatgagtgtgtttaaagacactgaactgtacacttaaaatgacttagatggtaaattttatgttgtgtgtgtgtgtgtgtttttttttcccaagatggagtcctgctctgtcaccc

SEQ ID NO: 137328 - DNA, 429 bp, Homo sapiens
cagggcttatatatcacagggaaagggtatacatgctctatgcaagacaattaaaggcagccctccagaacaggcaagaatgctacatgcatcataacctataatttgtgcaataacatcaaggctgacatgttcttacgctaaagacagtaaataaagtgagaatcaggaggttttcacaggaccagggctaatcagaagtcaacagggcagattagcatctgtattagttcattctcacattgctatgaagaaatacctgaggccggatwatttataaagaaaagaggtttaattgactcacggttccagatggctggagaggcctcaagaaacagacaatcatggcggaaggcacctcttcacggggcagtaggagagagaatgagtacaagcaggggaaatgccagacacttacaaaaccatcag

SEQ ID NO: 137329 - DNA, 493 bp, Homo sapiens
gtatagaaattgtagcttctgtagtaacaaaagagagccatcaatagagaagattataccactaaaatctagaacaaggaagacaggtcaatgtcttagtgtagagatgattcttaaacatctctgaggttagttttagtgactaggctttaaatgaactagaaattaaattaattgcctatgcatagtaatacccactgctcagacattgctatctcagatgtcacacttctagccctgctcaatagcctgtcctttcttcttacccatgtagactcttttcctaaccagactttgaggcagtcaacacttgcactgtccaatacagtggccatgagccacaggcaactattaagaccttgaaatatgastagtccaaattaagatatgctataagttacacttattttacaaatacaaacagtttgagcatccctaattgaaaaatccaaaatcctaaatgctccaaactccaaaactttctggaaaccga

SEQ ID NO: 137330 - DNA, 444 bp, Homo sapiens
aataatctagacttttctcagcccacattgagctggctccttcctttcggcttgcctgtctgtacctgtctttctccctccctccctgcctccctccctccctccatatatatatatacacccaaaggaatataaatcattctgccataaagacacatgcacacatatgtttgttgcggcactgtttgcaatagcaaagacatggaacaaactcaaatgcctccctctctccctccctccctccctccctccctyccttccttctacccttcctcccttcctctcttcctttcttatttacttccttccctgcctccctccctcccttcttccatccttccttttcttctcctattttttccttccgttctctcatttttgttcattttttccagatgtttttcctgcatttatttgtccaagatgactctctcctaacccaag

SEQ ID NO: 137331 - DNA, 617 bp, Homo sapiens
gacgctccatccctacagtgtagatgggactatgttaggtggacttggtgactgtagcttcgttaacctctggcataatgcttaaaaaaaagaatatgtaataattattcagggatttggtataaatgtccatcatcctttcaatcattcatttagtcattgtttattgcatatgctggcctagtttttaggcactcagaatcaatgtaagctttggttttgttaggataataaagataataaatgaataaagaaacaaacaaatatgataacttaagataatcttaagtacatatgataagcagaataatggctctaaaagatatccacattctaatgtgtaggatccgtagatatgttactttacatgacaaaggggactttgcagatgtcactaaggtttagaaytttaaaatggggagattatcttgcattaacctgaatctgagtctttaaagactgagaatctttcttggctgcagtcagaggtagatataactataaaataaaggatcagagagatgcagcattgttggcttttaatacagagaaaagggtctgggagccaaggtttgtggatggctttgaagaactagtcaagacagaaaaatggctta

SEQ ID NO: 137332 - DNA, 551 bp, Homo sapiens
gaactactttttgttataaacaagcatcacacttaagaaattcagacttacacaaagttcagaatccattaaatttagagttcataagccaagaaattaacataaaacctatcacaataaaactactgaccatcaagaccaacttgaagaagcaaatctctaactactcttgaggaatactttggtagctcagaatgcacagagctaccacagataaaaaattctgccacatatcaaaacaccataaacaattacacactacacagggaataattcactatgatggaaagtcctgtttatttttcaaataagaagattatcatcctgggaatctgagataatagaacaatctggaggaatgggaatataacaaaatagtatgttagaagatagaaaattatagcagaatgaatagaaacccyagtgaaataacagaatgctacacaaacttaagctagtttgtagaagaacaaaaaaggatttctaaaaatgaaaaatatacagatattgatattaaaaactcagtggaggggataagcagcagattaggt

SEQ ID NO: 137333 - DNA, 473 bp, Homo sapiens
tgaaaactagggttccaagaaattaggtaccttgctcatttattaaggagcagagccaaaaatgtgactttaggacaaattcatatgctcatgtcacacattttttaaatgcgtctttatagtcagttagccactttgagttttttagaaattccagaagagtgtgaggatcatatacactgcctttttcttttctatctctacttttaagtatatactagtgttccaaaccctatttcagaatggatattgagccaatatttgagaagccaatgagtcccaagcattgcatttgatgtgatgatttttaaaaatgaggttaggcagagtttctgcccacaggagcatattatttctttttagtcagttcgtaacacatgctgcttttttgtaggtactcattgaatgcrtcaacatttttagttgccttattaggctttctaaaagtcaaggctttgaaatttaactcttag

SEQ ID NO: 137334 - DNA, 560 bp, Homo sapiens
acaaacattttcacattcctctcctgaaattttggtctgctaggtctgtagtgggatctctgtttttagaatactccccgaaggaattctaatgtaagcagttatggactattatttgtaagactttgtttgaagccatatagtcccttcagatccttaaattcatctgctacaaaagagtttggaaacaaaaaataaagaaaaactgaagattgaaggaggataattaccatagcaatattgatgtgttcatgaagaaagaagatggaaaaggatgactgagaatttttcactgaaattttaacaactaatgtyatgttaggaggagctataatgtataaacatttggaggtgtggggagatttttttaatttattaaataaacaaacatatgtttagtgtttactcagattgactgttgaaggggatttagaatgtgtaaactatatggtgtttgggaaaattacactttcaacgcaagggtaacaagtaagtttcaactcatgtgctaacacaatttaattggcagaggttgcctggaatgctatgtagacagattg

SEQ ID NO: 137335 - DNA, 642 bp, Homo sapiens
attcaaaataatccaggaaaataattaatatgttatataaaatgtaaatttcaaagaagtaaattttatagtatataaaaacattcagttgataatcgaaagaaacttctcccacattttttttttattttaatagttttggggaataggtggtatttggttgcatggatatgttctttagtggtgatttctgagattttggtgcacctgtcacccgagcagtgtgtactatacccaatgtatagtcttttacccctcacmctcttccttcccttcccccggaacacttgtatgttcccactgataaatgggaacatacaatgtctggttttccattcctgagttacaccacttggaataatggtctcaacttcatccaggttgctacaaatgcttttattttcttcctttttatggtggagtaatattccatgctatatatataccacattttctttatccactcatcagttactgggcatttaggatggttctatatttttagcaattgtgttgctataaacatgcatatgcaaatgtcttttttttttttgtaaaatgacttcctttcctttgggtaggtacgcagtagtgggattgctggatcaaatagtagttatatttttagttcgttaaggaatc

SEQ ID NO: 137336 - DNA, 608 bp, Homo sapiens
agatttgttcctttttgcttgttctttttactttggctatgtggggtcttttcttggtttcatacaaattttaggatttttttttccagttcagtgaagaatgatcatggtattttgatgggaatatcattgtatttgtagattgcgtttggcatcatggtcattttcacaatattgattctacccatctgtgagcatgggatgcatttccatttgtttgtgttgtctatgatttctttcagcagtgtcttgtagttttccttgtagtgatctttagtctccttgactaggtatattcctaagtattttatttatttatttattttggcagctgttgtaaaaggggttgaactcttgattgattctcagtttggttgttgttggtatatagcagtggtactgatttgtgtacactgatttcatatcctgaaactttactgaatacatttatcagatttaggagctgtttgtatgaatcttcaggktttgctagctatgtgatcatatcactagcaaacagtgacagtttggctttccctttcctaatttggatgtcctttctttctttctcttgtctaattgttatggctaggacttccagtacaatg

SEQ ID NO: 137337 - DNA, 479 bp, Homo sapiens
gatttggtgtgtgagtatggtggaagagaagagagacatgccaggaaaagatgcaagaagaaaatacaccttaaaacttattatctctaggtggttgagatgccaacagatcctttaaatttttcttcttttatacttctctgtttcttctatattttctccaacaaacatgttacttttcaaacaaggaaaattcatagtccccattatagagaggctcattaacctgccctagggtcttccgtgagtcagaagtgaaatcaaaaataaagaccatggttctcaaaagcctagttcatcacacaagctgcctacatgtgtgctgtggtaactctagaatagtggtccttaactggggtgattttgccccrcagggacgatttccatgtttagagacatttttgtttgtggtaacgggggaaggtggatgctactggcatctagtggaggggccaaggatgctactaaatatcctacaa

SEQ ID NO: 137338 - DNA, 459 bp, Homo sapiens
tctatgattccatcttctttttcctttatctctcaggaaacgctttgtctcttcagagatttttggttcaagtctcatgtttgagaaaatgcaataaacacttttgtgtcctaggacagaaagctggtgacaaagaagagcatttcaagctgccccatctaattgtgtcaacagaggggtttccccccgcccyggcctctggggaagagtcctgcctccagccttctgtgcacccctccccattccttccccacgcccgcataaataatttttaaaaagagttggaagcaaaggaggctgtagagtcagcttgagactgctcaagaggggacttggagcaggcgcgtctcgcagtaactgtgcctatcgtcgcgtgtaatcgctgccatgtgtctctgtcaagaacttgagcagccttcagcaaggtccctggaaactcccctgtcaggaccctctggg

SEQ ID NO: 137339 - DNA, 459 bp, Homo sapiens
tctatgattccatcttctttttcctttatctctcaggaaacgctttgtctcttcagagatttttggttcaagtctcatgtttgagaaaatgcaataaacacttttgtgtcctaggacagaaagctggtgacaaagaagagcatttcaagctgccccatctaattgtgtcaacagaggggtttccccccgccccggcctctggggaagagtcctgcctccagccttctgtgcacccctccccattccttccccacgcccgcataaataatttttaaaaagagttggaagcaaaggaggctgtagagtcagcttgagactgctcaagaggggacttggagcaggcgcgtctcgcagtaactgtgcctawcgtcgcgtgtaatcgctgccatgtgtctctgtcaagaacttgagcagccttcagcaaggtccctggaaactcccctgtcaggaccctctggg

SEQ ID NO: 137340 - DNA, 561 bp, Homo sapiens
ctctcattctcccaggattgaggtgcttcattgccttaaaaaagaagagctaattgttttttcattcaacaaacaagtactgagcatctcctctaagctagaagtgagggctggggagaattcaatagacatgttcctgtattctagtaggagaagcagaaaaatgagcctgcaagaaaaaatgytctctcacagaaggaaggtgctgtgggaaggccgagtgggaggacctgactaatgcagggatggacagcaagggctcccctggtgatgcggcctttggcttagacctaaatgatgagcgggaggtggctagggaagagggggttagagcagcatcccccagggagaggaaatggaatgtgagaagacccagaggcagatgtgaggagctgaaagtggcttagtgggctggagcacagagaggaggtggcaaaggagaaggcaggaaggcaatacaggggcctggtcaagcagctaacagctgaattgctgcgagcacttactatttgctgtattaaacattttctctgtgtaacaggatgttggggaacctcattc

SEQ ID NO: 137341 - DNA, 561 bp, Homo sapiens
ctctcattctcccaggattgaggtgcttcattgccttaaaaaagaagagctaattgttttttcattcaacaaacaagtactgagcatctcctctaagctagaagtgagggctggggagaattcaatagacatgttcctgtattctagtaggagaagcagaaaaatgagcctgcaagaaaaaatgctctctcacagaaggaaggtgctgtgggaaggccgagtgggaggacctgactaatgcagggatggacagcaagggctcccctggtgatgcggcctttggcttagacctaaatgatgagcgggaggtggctagggaagagggggttagagcagcatcccccagggagaggaaatggaatgtgagaagacccagaggcmgatgtgaggagctgaaagtggcttagtgggctggagcacagagaggaggtggcaaaggagaaggcaggaaggcaatacaggggcctggtcaagcagctaacagctgaattgctgcgagcacttactatttgctgtattaaacattttctctgtgtaacaggatgttggggaacctcattc

SEQ ID NO: 137342 - DNA, 540 bp, Homo sapiens
aaaacacacatacaaataaactaacaaaaagcccacagtgcaaagcattcctactgagaggcaagacacacatttaggcaaataaggggacaaaaatgatctatctcagtcatgtccagaacctgctgggcttgtgactgggcttggagaggttctgtacagagaaatgacactttgaagtggtgcttgggcctttggtgtttgctgggaagcttgcagaacaaactgcctcctagcatctgatgggaggggctggcaaaggttacgataggtcagctgtgagtggaggtttggatttcagaacagagcagtagatgggaactattattctctatatttatttatatatacatatatgtaattatatatcatttatttacatttattataaatatgtgcacatctctttctctctctctctctctctctatatatatatatatgtatacatatatatatatrtgtatatatatatatatatatatacatatatatatatatatatatatatacatatatatatatgtatgttttctcctc

SEQ ID NO: 137343 - DNA, 477 bp, Homo sapiens
cagttactactgcataatatacatccagcacatatttgttgaatattgttgaataagtgatttcaaagtcacttatttagcccagcctggttcatagacagatatatgttttgtcagttaaggtaaataatagctggcatacctattttcaatgataaaaatgaaagtagattttataaattcattgtctctttttattccctgaacatggtctggtttagaattgcacatgaaaaattatgaagtgagcttagcatctcatgttacccattatgctttctctttctcacyttctttaatttcttagagttcttatggcctctttaatttttttctaatcaaagaaaatgaggtgagaagtcactttcacttgggtgcggatgaaccaatatcatctctcctaaagcaatagatctatttataggaatctcagctttaaatagcatgagtgataataattcataaatcagtcagact

SEQ ID NO: 137344 - DNA, 483 bp, Homo sapiens
tgggctaagtgaaatgtatatattctgacttttaaaaaattttaggtgtggaaaattcttattttgttagtaggagtagacaatgtaartggaggaactctcaaaagtcttctaaaatgaagatgggatagatcctaaaatggtagagtaagaacaatcttttaaaattatccatagcaggaaacaggaaaaattattagaatcctaccatcttttatagcactatgaagttctggcctctatgaaatagaagcagaaagtcattaggaagacagaggttgagatggaaaggtaacataatgatagaagtagtaatgagaagtgttaagtgtgtagtgaagggtagagctgataccatcaaagaattaaatcagtgatggaggatcacttgcagaagctctccaagatcagagagaataaagagagaccaataaaaagaataagtgggtaaataatacatatagaggaaaagaacttgtagaa

SEQ ID NO: 137345 - DNA, 537 bp, Homo sapiens
ctttattcagatgtcagctttttcatttgtatccttaaaaggtccatctaactgcctaaaactcaaactcatgatcttttttttttttttttccaacttttattaagttctggggttacatatgcaggatgtgcaggtttgttacatgggtaaacgtgctgcacagatcaacccatcaccttggtattaagcccagcatccattagctattcttcctgatgcyctccctccccagcacccccaatagggcccagtgtgagttgttccccctgacgtgtctgtgtattctcatcattcagctctgttagcctcaccaaactgacataggaacagaaaaccaaacacggcatgttctcacttataagcggggagtgaacaatgagaacaaactcagattttacactttgctgttcattctcaatttgcagaacctggtttctttccaatattctttttctctgttaatgacactcccttctgtaatctgagtcagagccctaggagtcattcttgacacctccctcttttcttcacccc

SEQ ID NO: 137346 - DNA, 537 bp, Homo sapiens
ctttattcagatgtcagctttttcatttgtatccttaaaaggtccatctaactgcctaaaactcaaactcatgatcttttttttttttttttccaacttttattaagttctggggttacatatgcaggatgtgcaggtttgttacatgggtaaacgtgctgcacagatcaacccatcaccttggtattaagcccagcatccattagctattcttcctgatgctctccctccccagcacccccaatagggcccagtgtgasttgttccccctgacgtgtctgtgtattctcatcattcagctctgttagcctcaccaaactgacataggaacagaaaaccaaacacggcatgttctcacttataagcggggagtgaacaatgagaacaaactcagattttacactttgctgttcattctcaatttgcagaacctggtttctttccaatattctttttctctgttaatgacactcccttctgtaatctgagtcagagccctaggagtcattcttgacacctccctcttttcttcacccc

SEQ ID NO: 137347 - DNA, 537 bp, Homo sapiens
ctttattcagatgtcagctttttcatttgtatccttaaaaggtccatctaactgcctaaaactcaaactcatgatcttttttttttttttttccaacttttattaagttctggggttacatatgcaggatgtgcaggtttgttacatgggtaaacgtgctgcacagatcaacccatcaccttggtattaagcccagcatccattagctattcttcctgatgctctccctccccagcacccccaatagggcccagtgtgagttgttccccctgacgtgtctgtgtattctcatcattcagctctgttagcctcaccaaactgacayaggaacagaaaaccaaacacggcatgttctcacttataagcggggagtgaacaatgagaacaaactcagattttacactttgctgttcattctcaatttgcagaacctggtttctttccaatattctttttctctgttaatgacactcccttctgtaatctgagtcagagccctaggagtcattcttgacacctccctcttttcttcacccc

SEQ ID NO: 137348 - DNA, 506 bp, Homo sapiens
cccatcagggcagtccacagaccaaggcatggcagctgaattcatgctgaatcatcataaataggaatatacattaatcaaaagcagraaaactgggaatttgaagacctaggtacctctgaagctcaggccatacagtagtaaatcttactcctcggaccaaaaaaaaaaaaaagaaagcaagcagaaaagggagtttgttgttaccaaggttgattaaactgtttgttgatgaagaaacctctgaaatggagtcaacttgtttctgtgtctgtgcttcagagactcacctgaggggtaagtctgtgaaaagagataatagcttattcactacagggtcaagcgactaggaaagatagtaaacaactaccataaatgagtgtcatagggaagaaatctccgaagctcggtgtcaggtttcaggtgttccagcgttgtatttcccacagtaagaactataatgaccaaaagaagtgaggccgaagttctttcaggtacaaaatgag

SEQ ID NO: 137349 - DNA, 506 bp, Homo sapiens
cccatcagggcagtccacagaccaaggcatggcagctgaattcatgctgaatcatcataaataggaatatacattaatcaaaagcagaaaaactgggaatttgaagacctaggtacctctgaagctcaggccatacagtagtaaatcttactcctcggaccaaaaaaaaaaaaaagaaagcaagcagaaaagggagtttgttgttaccaaggttgattaaactgtttgttgatgaagaaacctctgaaatggagtcaacttgtttctgtgtctgtgcttcagagactcacctgaggggtaagtctgtgaaaagagataatagcttattcactacagggtcaagcgactaggaaagatagtaaacaactaccataaatgagtgtcatagggaagaaatctccgaagctcggtgtcaggtttcaggtgttccagcgttgtatttcccacagtaagaactataatgaccaaaagaagtgaggcygaagttctttcaggtacaaaatgag

SEQ ID NO: 137350 - DNA, 441 bp, Homo sapiens
agactccagtaggtatggttaaggaagggcttgcaccgtctttccctcaaccccaggcagtacagcttatagcaatgaaagtractcccttgcttctgcttaaggagaggagagcaaagtgtatggaggactttgtcttgtctctttaggtaccagtgcagccacagtaggatagggcactgagcagactcatgagcccccctctccaaaccctagctcccagacaacgtgcatcttagataccacctcaaccacagtgaggtagagaaacaagctgggcatttgggtcctcaaattcaggcctagactcgtggacaacatttctgatcctgtcctgggcaagaaaggagcccactgccctgaagagtgagtcccaggcagcattcaccacaagctgatgaaagagcccttgggctttaagcaaacattgccagtagcctg

SEQ ID NO: 137351 - DNA, 391 bp, Homo sapiens
aggaacaaaaaccatatgatcgtttcagttgatactaaaacagaatctgataaagtttaataccctttcatgataaatgtttcgggaagtcagggaccctgaatggagggactggctgaagctgcagcagaagaacataaattgtgaagatttcatggacattwattagttccccaaattaatacttttataatttcttacgactgtctttactgcaatctctgaacataaattgtgaagatttcatggacattgatcacttccccaatcaatactcttgtaatttcctatccctgtctttaatctcttaatcctgtcatcttaagctaaggatgtatgtcacctcaggaccctgtgatgattgtgttatctgtacaaattgtttgtaaaa

SEQ ID NO: 137352 - DNA, 563 bp, Homo sapiens
tgccgacacttagcgaaaatagaaaagaacccacgttgaaatattgggggctggttcccctgatagattaaaaaccctaaaaaattgggtatagaaggaatatatctcaacataatcaaagctgtatatgacagacccaaagctagtatcatattgcaagaggaaaaataaaaagccatttctttcaaatctagaacatgacaaggatgccttctttcataactgttatttaagacagtactggaagtcttagctagaacaatcagacaagagaaaggaatacagggcactcaaattgaaaaggaaaaagtcaaatcatccttgtttgcagatgatataatcttatatttggaaaaacctaaagaatccacaagaaaactattaaaactggtaaaacaaattragtaaagttgcaggatataaaatcaatacacaaaaatcattagcatttctacatgccaacagtgaacaaactgaaaaacagaaataaaaaggtaatcccatttacaatagccacaaataaaattaaatacctaggaattagccatgaaagtgaaagatct

SEQ ID NO: 137353 - DNA, 507 bp, Homo sapiens
gaattcaagcaatgcttccacctcagtctcccaagtagctgggactacagggcgtgcctttcttagagcagtcctggtgccactaaaagctgcattttcaatatgagataaaaatgtattttacaaaaagtgcaaggtcttcatgtctgctggcattgctgcaacagtggcttgtgtgagagatcactttttacggcaatacccaatttattggagagacaaactgctcaagcaaggatgattagcattctatggcatttyaaaaggatacttgcaatgcttgaccttaccacaatagcaacaggaggtagctacaaaattattacaatagtagagtatggtaccacagttaattttatgtagttataatttaatactgcatctttatgtttgttcacatttctctggactgtgaatggcactatgcatggtctgtgtttgtgcagattttgattaatgttaactttttgtaatagatttgtatatatcttatggtagtaaataaat

SEQ ID NO: 137354 - DNA, 417 bp, Homo sapiens
tacaacctatgtaaatgaagtagtggcccaccatcagttcgattagttgtgggaggggacaaatcagaggctgaagtgaagttacaaagttatactcctatgcaaatgaagacttggcccatgaccagcctgattggttgtgggaggggaccagtcagaggtactttcaatttttcatctgccacgcagaaaaagcagggaggcgggcaaggttgcaaagggagaagcctctggtccttttgttacttgggcatggaaaattggggttttccttttgatttagttctaggaattcaacatgaattggccttaggttccctgcctccagaccctattttcttgcctcagttggtctcartatcccctcaagatatttattcacactggattgtcctactagtttcttctcaaaaatct

SEQ ID NO: 137355 - DNA, 329 bp, Homo sapiens
tggggatgtcctttgtgctctcacagcaccgtgaacacactacttccactcatcctccacgctgtcatgaccatggtgtctgtgagcctgtctttccccgacagtgagctyctctgaggctctatgtgtcacatggacagagtgatggttgtgggctgaatgcgaccaaagtgtcacttccctcacccctaatagacattatcttgccttatctatcttgccaaatctgacatgttttagtccccaattcaaactggctctttttgaggaacttacagtgaattctcaaccctctgtccctgcccttcctcctctgggcctcctcctct

SEQ ID NO: 137356 - DNA, 590 bp, Homo sapiens
ttagcatccagtagataaacagcaacttccgtttactacataaactttattttcacagattactgctgaagcaaaatattgatayatctctaagacattaagcatatcacaagaccacttatgttcttcatgggctttcaattaagaaatgacttgaaaaatcaggccttgaaaggagttctgatgctcctaattagcatcagaactgctctgatgggcttaagccatcctgagagtcctagcttgcttcctacccgaagtctcttctcatgaatcctatgcttccaagtcaaacagataaagcatcactaaatcaaatacaaacttcaacactcttaacatttaggtgtacatctcatctgaaaatcattcaaaagctcaggtcatctacaagaaatcttttctttgcattttagtatcaaaaaattgaaagaaggaaaagaataggagaaagccatttattttcatagaatgtaatttattttcaagaatgtaacattggtttatcagttacataagtacatttaatgcgtcatccatgccaggtacataatttttaaccaactaaaacacattacaagtggagaaat

SEQ ID NO: 137357 - DNA, 590 bp, Homo sapiens
ttagcatccagtagataaacagcaacttccgtttactacataaactttattttcacagattactgctgaagcaaaatattgatacatctctaagacattaagcatatcacaagaccacttatgttcttcatgggctttcaattaagaaatgacttgaaaaatcaggccttgaaaggagttctkatgctcctaattagcatcagaactgctctgatgggcttaagccatcctgagagtcctagcttgcttcctacccgaagtctcttctcatgaatcctatgcttccaagtcaaacagataaagcatcactaaatcaaatacaaacttcaacactcttaacatttaggtgtacatctcatctgaaaatcattcaaaagctcaggtcatctacaagaaatcttttctttgcattttagtatcaaaaaattgaaagaaggaaaagaataggagaaagccatttattttcatagaatgtaatttattttcaagaatgtaacattggtttatcagttacataagtacatttaatgcgtcatccatgccaggtacataatttttaaccaactaaaacacattacaagtggagaaat

SEQ ID NO: 137358 - DNA, 590 bp, Homo sapiens
ttagcatccagtagataaacagcaacttccgtttactacataaactttattttcacagattactgctgaagcaaaatattgatacatctctaagacattaagcatatcacaagaccacttatgttcttcatgggctttcaattaagaaatgacttgaaaaatcaggccttgaaaggagttctgatgctcctaattagcatcagaactgctctgatgggcttaagccatcctgagagtcctagcttgcttcctaccsgaagtctcttctcatgaatcctatgcttccaagtcaaacagataaagcatcactaaatcaaatacaaacttcaacactcttaacatttaggtgtacatctcatctgaaaatcattcaaaagctcaggtcatctacaagaaatcttttctttgcattttagtatcaaaaaattgaaagaaggaaaagaataggagaaagccatttattttcatagaatgtaatttattttcaagaatgtaacattggtttatcagttacataagtacatttaatgcgtcatccatgccaggtacataatttttaaccaactaaaacacattacaagtggagaaat

SEQ ID NO: 137359 - DNA, 606 bp, Homo sapiens
accatgcaattgtgctaggtacagaagatggaaaaaatattcttgaggtgggagaaacatgttaacagataaattacagcagacagacttgatagatgggggtaaaagttattaggaacagaaggcctaattttccctagaaaaggtagtatttgagatgggtctcaacagaagagtaaagagtaaatattctttgctgggggaaggggatggagacaaaacaaaaagaacaacccgtgcaacaacagaggcagtaaagaattattyagtgtggcagtgatgtggaagacagagacaagagccaagactagcaatttggtttggaagcagatgagggtctttgtaaaacaagtgaaggagtttggatttttctttttgtagacaacagggagggaagagatgttattaggcaggcaaacaatgagagcagctttcatttttgaggatgatgactctggcagcagggtggaagataaacagcagtagagagaaactggaggcagaaaattaactcaagaggtacttatgactcaatgaggaccttaggtcagaagtgattaaacagccaaagtcagtgaccggagcatggttttggggagagcctgg

SEQ ID NO: 137360 - DNA, 407 bp, Homo sapiens
gggtcaggagattttctcttgaacccattccaccagggcttttggtctgacacacagagctgcatggtcttggcagagcaactactcaggcacaaacagaatctcaggagccttagatactctggctccgggatctctggcaaaggtgaaagctactcagaaaatgcaagaatttggacctctgtaaacacccctaggaagaaagctgaatccatggggctgagcagcatcagtctgtggaccccactttcatagagcttcacaggataagacccactggctttgaattccagccactccccagcaatggcattgcatctacctgggatgggtcagagttcctggaggcaggggcrggctgccatatttgctgtttggatgactcagtcattccagcctgtgggttt

SEQ ID NO: 137361 - DNA, 285 bp, Homo sapiens
tgcacttgttccattctggaatgatttctgtaacaaaaaacccccattccccagaaaaaatatattttaaaaatacacccagaacttttttttttttttttttaatactttaagttctgggacacatgtgcagaacgtgcaggtttgatatataggcatacatgtgccatggtgttttgctgcacccatcaacctgtcatctgggttttaagccccacatgcattaggtatttgtgctaaygatctctgtctccttgtccccaccccctgacaggacccagtgta

SEQ ID NO: 137362 - DNA, 526 bp, Homo sapiens
tcaagggatcttggtactttcctacgttcgggacacattgtaggtctgggaagtggttttggcccgaacccacagttggaaccttatctatcagtcagggagtgcgccgagccagtgaggaacaaggtgataagtacaactgagaagcacccggggttcatggaactctgttgagggacttttccagaaaagcagaaggcagataagggtaggcatttctctacctgcaggacagaaatgagtgcagtggaaggggaagcaggacatcaggacaccagctcagggagcctctgttgggcagcagagggcctgggcccgccgggagccttcaagttggtatcctggagggactggtggtggaggtccaggaagtgtgctggactaaagtagaaacaccagaacactagtaatttccttggggcctcacagaaagatactggagagggtggaactttgggaggagtttggggctgtgygagggtgactcatttttacctatgtgcaataggtgggcttaggggtttgt

SEQ ID NO: 137363 - DNA, 467 bp, Homo sapiens
caacagttacgtgacatctcctattcgaacttaaatccgcttaataaaatcatggcgattacttattttgtgacaggtacttgtgctaggtgttgagcccaaagtagtggcacagacctaatccctgtcctcaagtaacttaccaatgattcacaatctatttgtttaacagtgtaagagggggcagctccgagtggattactttatgactccctacctcagagaagattatagtccagaattttaatgctctcattcagggctgatgatgatgcagaggcataaataaaaggaaacactagtttgcgattggatgggggagaaaagggaggaaagtcatgtgrggagggagggagcttgttgtgaagctgggaaatggaagggtggaaaccatatctaggatggctttctggaaaaatagttgcaaaaattttcatcaccacggagtcctgttcttattcctatgc

SEQ ID NO: 137364 - DNA, 467 bp, Homo sapiens
caacagttacgtgacatctcctattcgaacttaaatccgcttaataaaatcatggcgattacttattttgtgacaggtacttgtgctaggtgttgagcccaaagtagtggcacagacctaatccctgtcctcaagtaacttaccaatgattcacaatctatttgtttaacagtgtaagagggggcagctccgagtggattactttatgactccctacctcagagaagattatagtccagaattttaatgctctcattcagggctgatgatgatgcagaggcataaataaaaggaaacactagtttgcgattggatgggggagaaaagggaggaaagtcatgtgaggagggagggagcttgttgtgaagctgggaaatggaagggtggaaaccatatctaggatggctttctggaaaaatagttgcaaarattttcatcaccacggagtcctgttcttattcctatgc

SEQ ID NO: 137365 - DNA, 512 bp, Homo sapiens
aaaagaatgttagcccatgttactttgcagtgcttttctgtccatttagtaatgttggcaacagtgatccagcttgcgagccccaaggttacatctatagccccagcatgggacgggagacctgctgggtgtggggaagaaggagagccattcccacagtagcctgacacccctgaacacagggcttcctgggtgtacatccctgggatgtatccactcagtcccctrtggacatgattctttaggattgcagcctgactttcatttctttccaatggagaaagagttctattttcattgttacatatgtgattatgaacatttccaacaaaacatagcaaataaaattatccctttaacctcacatctgtccctcctccctcccactcagtgatatcattgttaatggtttgccatgcattttttccagactttctggacatagaaaataaattttcaaaaaaaaaaggtgtatattacatatggtactctgtagtctctttttttctgaa

SEQ ID NO: 137366 - DNA, 535 bp, Homo sapiens
agttgtgccttttaaaagaatgttagcccatgttactttgcagtgcttttctgtccatttagtaatgttggcaacagtgatccagcttgcgagccccaaggttacatctatagccccagcatgggacgggagacctgctgggtgtggggaagaaggagagccattcccacagtagcctgacacccctgaacacagggcttcctgggtgtacatccctgggatgtatccactcagtcccctgtggacatgattctttaggattgcagcctgactttcatttctttccaatggagaaagagttctattttcattgttacatatgtgattatgaacatttccaacaaaacatagcaaataaaattatccctttaacctcacatctgtccctcctccctcccactcagtgatatcattgttaatggtttgccatgcattttttccagactttctggacatwgaaaataaattttcaaaaaaaaaaggtgtatattacatatggtactctgtagtctctttttttctgaacatatttagg

SEQ ID NO: 137367 - DNA, 468 bp, Homo sapiens
tgagtagtgtgcattgtacctaatatgttgtttttttattcctagccccccttccaccctcccccttctgagtctccaaggtccattacgttactctgtatgcctttgcatactcatggcttagctcccacttataagtaagaacatgctgtttttggttttccactcctgtgttacttcacttagaataatggcctccagctccatccaagttgtggcaaaagacattatttcattccttttaatggctgagtagtgttccatggtgcatatatcccacattatctactcattagctgatgggcacttaggttggttccacatgttggcaattgcgatttgtgctgctataaacayacatgtgcgagtgtctttttcacataatgacttctttccctttgggtagatacccagtattgagattgctagattgaatggtagatctacttttggctctgtaaggaattc

SEQ ID NO: 137368 - DNA, 507 bp, Homo sapiens
ggagggacctggtaggaggtaattgaatcagccaggcaggtcttttccrtgctgttttcatggtagtgaataagtctcatgagatctgatggctttaaaaaggggagtttccctgcacaagtgctcttttgtctgccaccatgtgagatgtgccttttatcttccaccatgattgggaggactccccagccaagtggaactgtaagtccaataggcctctttgttttgtacattgtccagtctcaggtatgtgtttcttagcagcaggaaaatggactaatccactgcccctgggaaaatcctgttggaacaactgctaatgaaataggctttctcacaaatctcaggcccatcgcccccgtccagggcactggctttaagtgactcaaaggaatcaattctgtcaaatgatccttcaaaatcaaaacccatttttccagatttatgttacattcatgcagtgatgcatttgtgtagccattaaatgatatttatgatgatttttaa

SEQ ID NO: 137369 - DNA, 430 bp, Homo sapiens
taataattgccctgcactcatgagccggagtgagtggggctggaataacactggcgttggagtcagacaggtccatgctggggccttgcctctgttggagacacactagctgggtgagctacatggagctcctattttctcatctgtaaaatggggacaatgcaatccattgaataggttttggtaaggattaaataaattctcagtatgatgcctargatctagcaggagttcaatgtacattgcatatctctcacaattaatattccactctctcactccccttcacaccaataatttctgtccctttaaaaaaatatgttatagtgaccctggctgctgagaagactctatttgagtatgtgaccatggactagctaataaagagataaaagtgtaggagttcctggttaagtagagattgagagtc

SEQ ID NO: 137370 - DNA, 425 bp, Homo sapiens
attgccctgcactcatgagccggagtgagtggggctggaataacactggcgttggagtcagacaggtccatgctggggccttgcctctgttggagacacactagctgggtgagctacatggagctcctattttctcatctgtaaaatggggacaatgcaatccattgaataggttttggtaaggattaaataaattctcagtatgatgcctaggatctagcaggasttcaatgtacattgcatatctctcacaattaatattccactctctcactccccttcacaccaataatttctgtccctttaaaaaaatatgttatagtgaccctggctgctgagaagactctatttgagtatgtgaccatggactagctaataaagagataaaagtgtaggagttcctggttaagtagagattgagagtc

SEQ ID NO: 137371 - DNA, 604 bp, Homo sapiens
ggaaatgctgcttcctgaagctttacgactaatataatttcacagctccaattacaaatgagaaaaattatttcatctacaaacaggagccagacatttctgagaaatcatggttaaagagaagacagagtaccttctgaaaaacaggccatgttattaatggtctcttcagtgaaaatcttgctgactctccacaccatgagcctccatcttatggggatgctggttttgagaatctgtaaagcagctgcctttcaggttgataaaccattgcttctcctagtgcctggtctgcagctcccacagcctcagtactctgtgagcaaggcaaacacccactgtctttccacctagcaaatatatccttcctcctgcaacttcctcggaacctatgttttrtagaatcctagaattttgcatgtggccttaataatcattcagttcatcccttcatctgatactttacctcttccttgtgcctatctatagacagcaacctactacttgtatacttctaggaatggagaacttactgccagactttcccgtgaaaaatctactagcttagttcaattttaagtgggatttaaagtctggtgactta

SEQ ID NO: 137372 - DNA, 494 bp, Homo sapiens
taccattttcaaatttctatggtatataacaatcaatagactctttacaatttatattaaaatattaggctggtgcaaaagtaattgcggtttttgccattaatggtaaatactgcagttacttttgcaccaaactactaattttaagaaagatttttaaaactctagatcaagctaatttctatgtagaccttcatattccctatggaagtgctgtgggttaaatgtagacagcaaagattgatagtataattaaaatcatgagcacattttcgaactattaaagacattagagatcaactagcytaagctgctcacattttagaggtttgaaaaattgaggtccagaaatattaaatgactttttaggttataaagtacagtgctgggcccccaaaaacatgaactctccatgccattttactgaattttttcctattacaacttgtatgtattttaaaaattatattgaccgagtcacaagtatcttgaag

SEQ ID NO: 137373 - DNA, 616 bp, Homo sapiens
atggagcactgcctagatcctgaatatctgggtcctgttttctccactgccrctaattaactgtaatattggacaagttatttcagcagttggccttttcagagtcttaatggatgaaaagaaagctcatttccagctagaagtctccaggaactgtctataaattattttgagggactttacaaatcagacacgaatacagatgatgatccatctttatttccatagtataaagcacagtgtcaggaacatagtaatacagttcagtaaatgtgggatgaaagaataaatgaataagtggtcgggacatacaatcattaaatacctttataattctaagaatatgtaatgatatagccatgcaagcaatcaagtacatgtctcaaaacctatcctttgatgccactattcatcaatctcaaatatcgaactacataggaacaatgcctttgtagtttgttatttgcgcagtcaatagaaaatactgttatgttgtggtcttcattcttatggtgatcttgaagaatttaaattgtaagtccctacaatctaggtttaatatccaaatagttaaagatttgcaaaaagaggatacagatataacataattgaacaa

SEQ ID NO: 137374 - DNA, 462 bp, Homo sapiens
gctttctggttgatacttgttgtgctaagtactttctaatgcattatctaatttaaatctgaagcaactcttacatgggtattattagtgtatcaatttacccaaaaaaggaaaggaatgcttaaaacaaagtgataatctcaggacctgggaagtgatagcaytggaatttgaactcaggaatatcttatgccaatgactttgatattaactaaaatataattattacaagacatttatgaaaattttgtatatattccctttcagcacatataatttctatattttccagaaaaactgctgatgctaacagacaatttagtttctctgtagggaatctgtcatttctttctagtagttttaaagagtgctcagtgttccttaatgatctgaagttttaccacaaagataatatctaactggggacttagtcttgcctctttgggacttgaaggttcactt

SEQ ID NO: 137375 - DNA, 585 bp, Homo sapiens
ttgactccgcatcggtaggctactgagctggagtcaccccacagacctcaccctgccttatacccaaggacgccagcaaaatagagactagaaaataaaatgctaatgcctcaacctctgccagcccatcagctctagtttttaaaattaaatccagaatgttgttgctgaaatgtttgagatattactttctgggttttagtgagatttctttaatgcccatcgattgctgggtaataacttgtacctatatgtctcatttcaattacctatttaaaattcgctgaaccataaatctattaccagagctatgggaatttagtttagagttcctgtgactttgaaaaaccattgatccccrtatgctccaagtggctgcatgtcaagcctttatagtgggggttaactcattttgcggcttccttaatggctgtgagtttacgttttattgcatatctattatttgggctgggctgtgatgaatggtttggctgtctggttcaaaacaagtccaaggcgacagcagaatctaatttgctttaaaaatgatgattataaagctttccaaataataatccaggaacg

SEQ ID NO: 137376 - DNA, 597 bp, Homo sapiens
aatagaaatcagtgactaaaaagctgaccaaagaatctccatacatttggagacttaaatgtgtaattatgctgggcgcggtgtctcatgcctgtaatcccagcactttgggaggccaaggcaggcggatcacttgaggtcaggagtctgagaccagcctggacaacatggtaaaaccccatctctactaaaaatatgaaaattagctgggctcagtggcatgcgcctgtagtcccasctactcgggaggctgaggcaggagaatcgcttgaacccaggagtggaggctgcagtgagccgagatcgtgccactgcactccagcctgggcgacaaagcaagactccatctcaaaaaaaaaaaaaaaggtctgattaatccagaactcaaagaagaaatcataatggaaattagaaaatatttccagttaaattaccagagatataactatacatatacatacatatatcttgatatgcatagatatatcaaatcataaatatactagttgatatattagagatatatatcagagctttatactgcacatgaagtaatagaaatgtatacattacaaaagaatgcctacattagaaaag

SEQ ID NO: 137377 - DNA, 570 bp, Homo sapiens
tataaccttcttgactgaaaatattttaaacagatacaccttactattttgtctggattctctccttctataacataaatgaggagccataatcaatcagacaccagggtggtgaggggagcatgagcaggactgcttagcagaactgtgagaaataaatatctgttatttaagccacccaatctatggtattctgttacggctgcctgagcagactaaaatcaagagaatcccaggccaagaggccatgcaaaatctaggtggtgrgtaccagcagtgtcactgacacagtagcagagctgaaagccctgtccaagcagcctcatcatcttctcactggcctcaccctatttctcaaaatcacttgcttgccagagaagagctttttttctattccagaaatcagttggcagtatttagaggaaaagctttctcttgaatttagctacctttctgatactgacaaaattatcgatcccatattctaaccagcttgaggaaattcatttattacaagctgtgtattccttcactgttggaggactgtcatgccttcatcaaagaacaaga

SEQ ID NO: 137378 - DNA, 570 bp, Homo sapiens
tataaccttcttgactgaaaatattttaaacagatacaccttactattttgtctggattctctccttctataacataaatgaggagccataatcaatcagacaccagggtggtgaggggagcatgagcaggactgcttagcagaactgtgagaaataaatatctgttatttaagccacccaatctatggtattctgttacggctgcctgagcagactaaaatcaagagaatcccaggccaagaggccatgcaaaatctaggtggtgggtaccagcagtgtcactgacacagtagcagagctgaaagccctgtccaagcagcctcatcatcttctcactggcctcaccctatttctcaaaatcacttgcttgccagagaagagctttttttctattccagaaatcagttggcagtatttagaggaaaagctttctcttgaatttagctacctttctgatactgayaaaattatcgatcccatattctaaccagcttgaggaaattcatttattacaagctgtgtattccttcactgttggaggactgtcatgccttcatcaaagaacaaga

SEQ ID NO: 137379 - DNA, 597 bp, Homo sapiens
tatacatgtttatattttgtttaaatatatatctatactttgaatatataaacatttataccttgtttaaatatataaatatttagattagattttgtttaaatatatttagattttgtttaaatgtatgaatattcatatttcatttaaatataagcgsggcttttttttgaaaagcaaatgaatgaggagcacaaacttcaggaccatgcttgcttctggcaggcagcaggacggggtgggcgggggagcaactgtatcagtcctgattggataataggttcatgtatattcattttattatgttttacaacttatatatatattacaaatatcattcagtatattcaatatgatcactaacatgtacctaaggaacatatacaggtaggccgacagacagacagacctgcccactgacagaacccagggataggttgttgaaagagagcacgatattctctcagattccctcttgttgtccaaagactacagttcggaccatgaggataagatttaaatcttattctggataatgcaaagagtttccaaatcttgaaacatttttgggtttacacctaagtcaccagaatatgc

SEQ ID NO: 137380 - DNA, 597 bp, Homo sapiens
tatacatgtttatattttgtttaaatatatatctatactttgaatatataaacatttataccttgtttaaatatataaatatttagattagattttgtttaaatatatttagattttgtttaaatgtatgaatattcatatttcatttaaatataagcgcggcttttttttgaaaagcaaatgaatgaggagcacaaacttcaggaccatgcttgcttctggcaggcagcaggacggggtgggcgggggagcaactgtatcagtcctgattggataataggttcatgtatattcattttattatgttttacaacttatatatatattacaaatatcattcagtatattcaatatgatcactaacatgtacctaaggaacatatacaggtaggccgacagacagacagacctgcccactgacagaacccagggataggttgttgaaagagagcacgatattctctcagattccctcttgttgtccaaagactacagttyggaccatgaggataagatttaaatcttattctggataatgcaaagagtttccaaatcttgaaacatttttgggtttacacctaagtcaccagaatatgc

SEQ ID NO: 137381 - DNA, 581 bp, Homo sapiens
gagtcaaattcagactcctaaaacccactgctaatgccaggtgctaaatcattcaaaaatatatctttaaaaagtttacttccacaaaaatgaaatacatcaattaaagtgaaaacaacatcccattgcttaagacagatttggttgggttccccacagttttaaaattgatctttttttctcatagaaaatacagtgctttagagttcccaagacacagaaggttagagtatcacataatttaagatcatttgagaagaaatacattatttaaagaaaacgtaatgtccttgaaaatcattttaacccccagagcaacaaataaaagggaaaaaaaaacaaaattttaatgacattaataaatgggtcataaattccaatgaattataatgcaaaagcaacaagtaattctgaacttaaagaacaggacagtcatttttgtcaaagaaaatacatgcatggaatgcagatgccacaaacaggagatgaaataaaacagataaggagaaggctgtatctaggctgaatggctggccaatgttttcctctccrtcagtataaataaaatggatggaagaaaa

SEQ ID NO: 137382 - DNA, 444 bp, Homo sapiens
tccattttatcatctttatgcctttgtgtcctcatagcttcactgccacttataagtgagaacatacgatatttggttttccattcctgagttacttcacttagaataatggtctccaactccatccaggttgtggcaaatactgttatttcattcctttttatggctgagtagtattccatggtatatatatacaccacccrttgattgatgggcatttgggctggttctatatttttgagattgtgaattttgctgctataaacatgcatctgcaagtgtcttttttgtataatgactccttttccactggggacatattcagtagtaggtttattggatcaaatggtagatctacttttagttctttaagaaatatccatactgttttccatagtggttgtactagtttacattcttaccagcagtgtgaaagtgttctgt

SEQ ID NO: 137383 - DNA, 366 bp, Homo sapiens
aataaaatgatagtactaacttcttacttatcaataattatcttgaatgtaaatagattaaattcttcaatcaaaagagagagtgaataaatgatttttttaagtgacccaactgtatgctgctaagagagactcacttcaactttataactgaaagtcatatggaaagaaagtgaaaggatgaaaaaagataaaccatgtaaataaaaaccaagagagcaggagtgcctatacttayatcagataaaataaactttaagtcaaaacttcaaaaagagacaaaattgctatgtaaccatcagggaatcaattcatcaagaagatataacaattgtgaatacatacgcaaccaacatctgagcactt

SEQ ID NO: 137384 - DNA, 516 bp, Homo sapiens
catttctaattgtgtttattttgatgtttcctctttttttctttattagtctagctagtgacctatctttcttwtcaattttttcaagaaaaccaactactggatttattgaccttttgaatgattttttttgtgtcttgatttccttcagttcagctctgattttggttatttcttgtcttttgatagcttggagtggatttgttcttgcttctctaattttttccattgtgatgttaggttgttaatttgagatctttctaatgttttgatgtgggcatttagtgctatgaattcccctcttaacactgcacaagagttctgaattaggttgagctggctgaaatgacagaaatgcaattcagaatatggacagaaacaaagatcatgaagattcaggagaacaacaaaacccaatccaagacaactaagaatcaaaataaaacaatacaggagtggaaggatgaaatagctggtataaaacaacttaatggatctgacagagctgaataacac

SEQ ID NO: 137385 - DNA, 516 bp, Homo sapiens
catttctaattgtgtttattttgatgtttcctctttttttctttattagtctagctagtgacctatctttcttttcaattttttcaagaaaaccaactactggatttattgaccttttgaatgattttttttgtgtcttgatttccttcagttcagctctgattttggttatttcttgtcttttgatagcttggagtggatttgttcttgcttctctaattttttccattgtgatgttaggttgttaatttgagatctttctaatgttttgatgtgggcatttagtgctatgaattcccctcttaacactgcacaagagttctgaattaggttgagctggctgaaatgacagaaatgcaattcagaatatggacagaaacaaagatcatgaagattcargagaacaacaaaacccaatccaagacaactaagaatcaaaataaaacaatacaggagtggaaggatgaaatagctggtataaaacaacttaatggatctgacagagctgaataacac

SEQ ID NO: 137386 - DNA, 422 bp, Homo sapiens
tcattttgggtagtattgggtatcactttgatgtttggcagcattcctggtctgtgcccatttaatgccaggtagcacccttctcctctcccccaaattctaacaaccamaaatctttccaggtgttgtcgagtgtccccagcagtggcgggggcgggaaggagattgagaacctctactctaggagaaaagccaagctagtgtgagaggaagatgctgtgcttgagaatactctgtatgtcatctagcgattagggtttttattttttcattttaatttcccttcagttggaaaagttaggttttaagactgggggctcctaatgacttgtaataaaagaaatctgtgtataagccccttctccaagttatgttttcagtcgtattgatcagtttcctttgttctgcccccacgccaatcc

SEQ ID NO: 137387 - DNA, 422 bp, Homo sapiens
tcattttgggtagtattgggtatcactttgatgtttggcagcattcctggtctgtgcccatttaatgccaggtagcacccttctcctctcccccaaattctaacaaccaaaaatctttccaggtgttgtcgagtgtccccagcagtggcgggggcgggaaggagattgagaacctctrctctaggagaaaagccaagctagtgtgagaggaagatgctgtgcttgagaatactctgtatgtcatctagcgattagggtttttattttttcattttaatttcccttcagttggaaaagttaggttttaagactgggggctcctaatgacttgtaataaaagaaatctgtgtataagccccttctccaagttatgttttcagtcgtattgatcagtttcctttgttctgcccccacgccaatcc

SEQ ID NO: 137388 - DNA, 592 bp, Homo sapiens
atatattcacatatacatatacatgagaatatatatatacacacacacacactctgttggtgcagaagctacaagtgtaaagtttgttggatgtaatcatcattaaagatgttcagaaatacagaattccctgtacatatcaaaatcaygtagcaaaagcagttttcatcaagactggacttttaaggaagcatttcaacttctctgagatttttgtttggtattacatatcttactctaatgcttttgctcttatgagtgcttaaaaggaaaaataacagccaaatcttggggaagggggtggtggtgacgaaagagacaaaagtgtcaactctcatgagtgacacagcgatgacgtgaacaagtggaaacctttgtgaaggaacaaaggtcttctccaccattggaagtcaaaagaatgtcttggttagaatcagaatcagacaaatacttgctttagttttcagtccattaaaaagacagctctcaaaataaataaataaatatgtttttaaaaagcattcttccacatctttatttacattctccttcaccaacctaaagggcaaacaaatagagaaaatgcttttag

SEQ ID NO: 137389 - DNA, 469 bp, Homo sapiens
ccgagacctcttggggttcatgctgttctacaaagaggcgtaagtagaagagttagagagacgctgaggaggcgagggctggctggctctgtgcttgctacgtttgtgctccaatctgcccctcttgggttcctgtctatctccctcctcctcctggaataaatatcttaggttcctttttacaatctcaccagtcgatgkcatgcaaagtcaatagtgtctgcttttatcaaatgcctaaaatggaagcagacagctttcccatagaagcccggactggccagtttcctggggcaatattctattttgccttgcctgtgtatgtctcatcagacatccttagtagtcaggagctcagtctactaagtggatgttatcaaatgtattgcttatctatttttcttttttatccccaattttttttttttttttgagacagagtcttgctctgttgcccagggtacagtgc

SEQ ID NO: 137390 - DNA, 469 bp, Homo sapiens
ccgagacctcttggggttcatgctgttctacaaagaggcgtaagtagaagagttagagagacgctgaggaggcgagggctggctggctctgtgcttgctacgtttgtgctccaatctgcccctcttgggttcctgtctatctccctcctcctcctggaataaatatcttaggttcctttttacaatctcaccagtcgatggcatgcaaagtcaatagtgtctgcttttatcaaatgcctaaaatggaagcagacagctttcccatagaagcccggactggccagtttcctggggcaatattcyattttgccttgcctgtgtatgtctcatcagacatccttagtagtcaggagctcagtctactaagtggatgttatcaaatgtattgcttatctatttttcttttttatccccaattttttttttttttttgagacagagtcttgctctgttgcccagggtacagtgc

SEQ ID NO: 137391 - DNA, 514 bp, Homo sapiens
atcttcagtcaaaaataaagaggaaacaacactcattatgatctgtagaggaaaaaaacctggaagaaatttagcaatatgttaacagtagatatctagataatgggttttctaggtgggttttcatttttttccttgaacctcattgtattttcccaatgtgcattttttgctttaatcatcagaggaaaatgttatttttttaagagttgaaagaatctggtctgagggcaaccagccagcttgtgaaaaaatagtttttgccactggacagtttccatatgtgcagcagcaattactgctctgttaccatcagatcrtcttaatcctattgactgaaatgccaaagtaatactattaatttactacataacagataaattactaagagcatagtagaactacctgagattgctgtggtactcttctagggtcagagtgggtggcccttctagattccaatataaagcacaaaaagcttctggaagttcatatattcatcccccatcacaaa

SEQ ID NO: 137392 - DNA, 546 bp, Homo sapiens
gcttgactgttctgcaagcctttttcctttgtttgcctcactctcctgatactctttgcctacctggtaaattagtcattctttatggcccagtttaattatcctgagtcatgtgaaatgtyttcaatttataccatctcccacctccagacagagttaatcaggctcttttgtatgctcccacaacactttgcacctatcctactttaattatagtaatagtggttttcctgctttttacacttgttgcttgccatatgcaatgccaactatatgccctctcccttttaatacttatgataatctgtcaggaagggataattataattcccatttaacagatgaggaaaatcgaggcttagcaattttaaaaataatcttgctccaaggcatacacatagcaagtagtataactaggatttcggaatatgtatgattgattcccaagctagagtttttttttttttttttttttttgagatggagtctcactcttttgcccaggccggagtgcagtggcactacctctgctcaatgcaagctcca

SEQ ID NO: 137393 - DNA, 548 bp, Homo sapiens
ttttttttttttgagacagagcctcaccctgttgcccagtcttgagtgcagtggcatgatcacagctcactgcagccttgacctcctaaggctcaggtgatcttcctgcctcagccccctgctccaggagtagctggaactacaagcatgtgccaccatgccctgcaatttttttttttttttttttttttagtagagacaggatttcaccatttgcccaggctggtctcgaactcccgggctcaagcaatctgcgcaccttggcctcccaaagtgctgrgattacaggtataagccactgcatgtggcctcccttgtacatttctgtttcaacttttaccttcctcttgctgcacagactcaaagagagtcccagaaaaggtcagataaaggacaggcagtctcagccctctccttgtcaggactggatagagacccctgttgctttgctggctgcctctctgctctcaggtctgttagctccggtgaataaagccaggtcctgggaggtaggcagttaggcctggggactccagctgtttatagag

SEQ ID NO: 137394 - DNA, 439 bp, Homo sapiens
gcaacttggacggagctggaggccattatcctaagtaaagtaattcaggaatggataccaaatatcatatgttctcacttatgagtagatgcyaagctatgatgatgcaaagacataagaatgatatagctttccctctccctctccctccacggtctccctctgatgccgagccaaagctggactgtactgctgccatctcggctcactgcaacctccctgcctgattctcttgcctcagcctgccgagtgcctgcgattgcaggtgcgcgccgccacgactgactggttttcgtgtttttttggtggagacggggtttcgctgtgttggccgggctggtctccagctcctaaccacgagtgatccgccagcctcggcctcccgaggtgccgggattgcagacggagtctggttcactcagtgctcaatggtgcccag

SEQ ID NO: 137395 - DNA, 581 bp, Homo sapiens
caataactctgtctaaaaagaaaacttgtcccgtgtgattacaaaaacaggaaaaggctccaagctaggaaatgagatttgaggtatggagaacattctcacctgatggaagcatcctgttcctgtacaggaggaggagctggtgcaagccctaggccacatatgtcacagttgttttggaccctccgtagcttttatactcataaaatattaaagttgcccctttcatatttgggtcattgaaagagcccaccgtactctaggttcctgctcactatgcacaacatctcagaagatggcgtacaaaactatttttctaactatagcacrggtaatgtgggggtggggaggcttgggatatacctaaatgtggcaaatgatttatcttccaccttgagggatgaaaaggaaactatgcacttgaattttaattaaaattttaatttaattcattggatagcttgtgccagaaagaacagtcaatattcaagaagcaaaactgacgattagctcagtttcgggcctccctgtcgggggagttttcttgtctggaacacaaacacctacaagtagagtgtgag

SEQ ID NO: 137396 - DNA, 457 bp, Homo sapiens
ttcccattgtcttggtgaataacacctggctttcatgctaatcttattattaaactgccacttggccacatccttgttttttttccccttaatatgtaatatgctttattattctttacatggtcagatggaaaaaatttcaaatgtttacattctgcttcccttttgataataaattcaatttttaaatcatttctctcttctcacaatttactataagcatttaagagaagctacacagaaccccgaatgctttgctgcttaaagatttcttctgccaaatattctagttaactttcttgagttctgccttccacaaggccctaggacagggacataattcagccaagttcttcgccactttgtaacaaggatgggctttcctccagttttcaataccttgttcctcattttccctctgagacttgcatcaraatagtccttactgtcacgacct

SEQ ID NO: 137397 - DNA, 577 bp, Homo sapiens
catttcaggaaggctgcacgaaggggagatgggatttgctagaagaaagggaaggatggtgaggctgacagcagaggcaaaggcacagagatggggaaggggcagctgcatgtgagccaggatgaacactaaggcagggtgaccgaaagtaaagcgcgtgtctgcctgctggcacttccaccgggattctgggtagcatatagacttggtattaaatgatgtagaattgtgttgtgagaaaagttattttcttttcaattctcttttaattcatctgattatgtcagggagaaagactcatgtgtgcgctaatatattttttaaagcctcaatattcctctcaacctttttttttaagcaaaaaatgcaagtttttgkttcagagacatcatcaagtaacagtgtctcttaaatttaataactttggcttgttcttgtatttattttgaggtttccttctatttatggcaagtgatataatttttccatttgtatagtaatgtgaggtttcctctttaagtaattttaaatggaaatgtatcattttaaattaaagtactaagtaaataacaatgca

SEQ ID NO: 137398 - DNA, 436 bp, Homo sapiens
ttagttgttgcctgaataacttgggtctttttttttttttcattttgttattgttttacaggtcctgtaagatttgtgctttaaggaggttttattttggtgtatttcaagcatttgtttcaagatttagagttccttttagcagtgcctgtagtactggtgtggtagttggtgaattctctcagcatttgtttgtctgaaaaggactgtatctttcctttatttatgaagcttaattttgctggatacaaaattcttggctgataatcattttgtttaaagaggcaaaatataagacaccaatcccttctagcttgtaragtttctgctgagaaatctgatgttaatttgatagattttcctttgtaggttacctgatgcttttgcttgaataagtacttcggtttcttaggtggtaggtgggaccatagaggct

SEQ ID NO: 137399 - DNA, 436 bp, Homo sapiens
ttagttgttgcctgaataacttgggtctttttttttttttcattttgttattgttttacaggtcctgtaagatttgtgctttaaggaggttttattttggtgtatttcaagcatttgtttcaagatttagagttccttttagcagtgcctgtagtactggtgtggtagttggtgaattctctcagcatttgtttgtctgaaaaggactgtatctttcctttatttatgaagcttaattttgctggatacaaaattcttggctgataatcattttgtttaaagaggcaaaatataagacaccaatcccttctagcttgtagagtttctgctgaraaatctgatgttaatttgatagattttcctttgtaggttacctgatgcttttgcttgaataagtacttcggtttcttaggtggtaggtgggaccatagaggct

SEQ ID NO: 137400 - DNA, 615 bp, Homo sapiens
tgctagctgcgtggtggtgggcaagtttattagtctttaaacctcaattttctcatctgtaacatagagacaacaatggaacctgcctcaaagatgtgtcagggagattcagtaagatcacgcatttaaattcatcacagtgcctgacacagtaaatattcaaaacattgatggctttgaacaaagttattattgttagcatcattattatcatcctgattgttagggtatgaggggtctaataaatcgtaactctttggcttgagttctgtgtcagaaatctgcattaagaaataagacaaagaaataaatcagaagtgagatcaaaatgccacttttactacyggaaagctaacactggaggatgtagcctgaatggacagaataacaaagccctgctactccatcctggccggcacaagctcctttcttgggaaaacctacttttgtacaattcactgccaagacgatgggtgtgagttctctgtaggtcacctggcccaataaggaagagaaacaattgtagagctttgtatacctgtcctcaaatccttatttataagctcctctctgcaaagagtgcagagatcagggagtggggagggttgagatggg

SEQ ID NO: 137401 - DNA, 321 bp, Homo sapiens
cctgtttgcctgggtatcaccagcagaggctgcagaacagcaaagattgctgcttgttccttcctctggaagcttcatcccagaggggcacccaccagatgccagccagagctctcctgtatgaggtgtctgtccacccctgctgggatktgtctcccagtcaggaggcacagaggtcggggacccacttgaggaggcagtctgtcccttagcagagcttgagcactgtgctcggagatctgctgcttttttcggagccagcaggcaggaacgtttaagtctgctgaagctgcacccacagccacctcttcccctaggtgc

SEQ ID NO: 137402 - DNA, 584 bp, Homo sapiens
tgaggtttagagagaaaaagggacttgctgaaaattacatgattattaacaataggtgcaagataggacttagaattccagactgccagtctaktgtttttctggtgtatatctgaatgaagcattagaaaaaagactgctcctctttcccaggaaaggcttaaataatctagtttgattatgtaagtttggtttgtttctgtgaatttctaccctcaagagtaacccaactgagcaagaaaagtgacgattcttgctttcaagttatgatgctttccatgagactgagtctgaaaggagattgtggtaaagtgaagtcctgacctgccatgtgctgagtgttcctagcctggttccaagcaccactctggacgtacacagatagatgcttgacaggtatttggtgaatttgatgtgcaacacatgtttggtaaataaaaatttcatatatcatttgcttttgcctgttttgacacagaagaaacttcggaataataaagctgatttgggaaaggtagagagaactggaagtatctctagacagaatgtaaaagatatagaccagaaagaaatgggaagtggca

SEQ ID NO: 137403 - DNA, 584 bp, Homo sapiens
tgaggtttagagagaaaaagggacttgctgaaaattacatgattattaacaataggtgcaagataggacttagaattccagactgccagtctattgtttttctggtgtatatctgaatgaagcattagaaaaaagactgctcctctttcccaggaaaggcttaaataatctagtttgattatgtaagtttggtttgtttctgtgaatttctaccctcaagagtaacccaactgagcaagaaaagtgacgattcttgctttcaagttatgatgctttccatgagactgagtctgaaaggagattgtggtaaagtgaagtcctgacctgccatgtgctgagtgttcctagcctggttccaagcaccactctggacgtacacagatagatgcttgacaggtatttggtgaatttgatgtgcaacacatgtttggtaaataaaaatttcatatatcatttgcttttgcctgttttgacacagaagaaacttcggaataataaagctgatttgggaaaggtagagagaactggaagtatctctagacagamtgtaaaagatatagaccagaaagaaatgggaagtggca

SEQ ID NO: 137404 - DNA, 520 bp, Homo sapiens
ctaaaggggctggctcttagtcctctcggtctgtggtgcaacagggctcctgggctctgctcatcctagctgtcagattaatggcagggacttctgcagtgatctcagccacacatgctgcctcttctatgtgacccagaacagagctcagagtgaggtcgtattgatttcatgagaagctgggcctgcatcttttctttcactctaggtttgttggctcctgcctgtaagatggctgaaggctatcatttttgtgtggaggattaattagaatagatttctttgacttgggatgccaataaaacctgtggtctccagctattgatttatgwtgctaagcaggaagtgttggtccctgaacaggccccaagaaagtagtggtattgggcattttgatgctcgggtggttaattgtggcaaactggaaaagaataagaacacataggagctttggggggtaccgtggtggaagggagattggtacaagggccaccctgattcagtgaatgaaaagagaatc

SEQ ID NO: 137405 - DNA, 520 bp, Homo sapiens
ctaaaggggctggctcttagtcctctcggtctgtggtgcaacagggctcctgggctctgctcatcctagctgtcagattaatggcagggacttctgcagtgatctcagccacacatgctgcctcttctatgtgacccagaacagagctcagagtgaggtcgtattgatttcatgagaagctgggcctgcatcttttctttcactctaggtttgttggctcctgcctgtaagatggctgaaggctatcatttttgtgtggaggattaattagaatagatttctttgacttgggatgccaataaaacctgtggtctccagctattgatttatgatgctaagcaggaagtgttggtccctgaacaggccccaagaaagtagtggtattggrcattttgatgctcgggtggttaattgtggcaaactggaaaagaataagaacacataggagctttggggggtaccgtggtggaagggagattggtacaagggccaccctgattcagtgaatgaaaagagaatc

SEQ ID NO: 137406 - DNA, 463 bp, Homo sapiens
agttttctacactattagctagttgattctttaggacacaggaaggagaagaaagggtttcatcagcgttaccaagtggtttccagttgatcgatttgtgtggtgatcaggttgtgggaagtgtttgctttttcctaggtgaggcaattatcctttccatatctgtaagattagagccaccccctcccatgtccacatcacagggccaattggaggactgagtgggagaatayataagaaaagtgccaagtgttacataaacactagcattctttccatcaagaggagaaaattgtttttgtgggagaaaatgggtcctggccaagcatttttgcagggtgatgagcataaactcaacactaagtggagtagatagttcaaggtgccgagataagtcaagccaatgatttcaaggggttgggaaaacctcacagggcaacatgtccttgccagctcacttgaa

SEQ ID NO: 137407 - DNA, 556 bp, Homo sapiens
gtgacttcatctacctttcaaggaatgtatagctggcccattttacgggggaggaaactgaggctcagcaagaagaaacttgcccaaagccccaccgtaaagtgttaaagctgggaggtgggccaaagaaagcctctccctgtgctctgctgccgacggagaggaccagccccaggcttcatgggaggtgatgaaggaagtcagcctggggagactgtggagtctggcatgcagccaggcccttgctctggggcccccaacccagccctcaaagtgggaggtggtgcctgctgagaaaaaaaggaaggaagaacccgagagaggaagytgaataggaatgggttggggcagggtctcctgcctccggtcagagatgagggtccaggtggaggatgtcgagggacctggctcaacctcagggttccgctcaactcaaagttgggacgaggccctggcaggaaaagctctagaacctgtcaggccctgcaaagctgaaggatgcatccaacaggaccagatctttgttgttcctgccacagggaggctcgttccatcc

SEQ ID NO: 137408 - DNA, 591 bp, Homo sapiens
taccacatgttctcattcatatgtgggaggtaaaaaagttgacttcatacaagcgttgagtagaagagtggttcttagaagctgggaagggtaatgggtaaagggaatagagaaaggttggttaatggataaaaaaattacagttaggctgggtgtggtggctcacgcctataattccagtactttgtgaggccgaggtgggtggatcacttgaggtcaggagttcaagaccaacctgaccaaaatggtgaaactccttctctactaaaaatacaaaaattagctgggcactgtgatgggcgcctgtaatcccacctactcrggaggctgaggcaggagaattgcttgaacctggcaggtggaggttgcagcgagttgagattatgccactgcactccaacctgggtgacagagtgagactctgtctcaaaaaaaaaaaaaaaaaaaattacagctagatgggaggaacaagtcctagtgttctgtagcactgtagggtgagaacagttaacaattacttattatatattttcaaatagccagaagagacaattttggatgttcccaatacaaagaaatgataaatgtttg

SEQ ID NO: 137409 - DNA, 591 bp, Homo sapiens
taccacatgttctcattcatatgtgggaggtaaaaaagttgacttcatacaagcgttgagtagaagagtggttcttagaagctgggaagggtaatgggtaaagggaatagagaaaggttggttaatggataaaaaaattacagttaggctgggtgtggtggctcacgcctataattccagtactttgtgaggccgaggtgggtggatcacttgaggtcaggagttcaagaccaacctgaccaaaatggtgaaactccttctctactaaaaatacaaaaattagctgggcactgtgatgggcgcctgtaatcccacctactcaggaggctgaggcaggagaattgcttgaacctggcaggtggaggttgcagcgagttgagattatgccactgcactccaacctgggtgacagagtragactctgtctcaaaaaaaaaaaaaaaaaaaattacagctagatgggaggaacaagtcctagtgttctgtagcactgtagggtgagaacagttaacaattacttattatatattttcaaatagccagaagagacaattttggatgttcccaatacaaagaaatgataaatgtttg

SEQ ID NO: 137410 - DNA, 584 bp, Homo sapiens
tcccttgccaacctctccctacccagctgctgttactctctgccttactcccctcacctagcgtaccccagcccttcagctttctgtcacttcctccaatttgccattgtctttctacagtctgtgcaattgttcctcctgatacttggcayggtgatgtctcctgtgttcccccagctaaccttcatttgtgtcttggggggtctgtctcagataaacttctttcttacctgctctcattacaccctaaactccttcgctcttatccctagaattatttgtgtataaacttgtccatctctgtcttccctattagaccaaagttctggagaggcagtgccatgtctggttgttctgtgcatctcacatttatggaatgaatatagactctccttccacctctttatatacctcttcctggagagaaatggaactgcctgctattccctgcacacacctcagagtccttgaatgcatgaattctgccattgtctgcctaggtttaaagcctccctctacccattcctggctgtactgcattggatgggtcactttacctctctgggtcttaatttcttcagctg

SEQ ID NO: 137411 - DNA, 584 bp, Homo sapiens
tcccttgccaacctctccctacccagctgctgttactctctgccttactcccctcacctagcgtaccccagcccttcagctttctgtcacttcctccaatttgccattgtctttctacagtctgtgcaattgttcctcctgatacttggcacggtgatgtctcctgtgttcccccagctaaccttcatttgtgtcttggggggtctgtctcmgataaacttctttcttacctgctctcattacaccctaaactccttcgctcttatccctagaattatttgtgtataaacttgtccatctctgtcttccctattagaccaaagttctggagaggcagtgccatgtctggttgttctgtgcatctcacatttatggaatgaatatagactctccttccacctctttatatacctcttcctggagagaaatggaactgcctgctattccctgcacacacctcagagtccttgaatgcatgaattctgccattgtctgcctaggtttaaagcctccctctacccattcctggctgtactgcattggatgggtcactttacctctctgggtcttaatttcttcagctg

SEQ ID NO: 137412 - DNA, 598 bp, Homo sapiens
tttgtattacaaacaattcagttctacagttttagatcatttcaaatgtataattaaattgttattgactacaggtttatttttataataataaaaattatatacaattataaacaaaatttacacatttttgagtcctgaataaatactttaaaaaatttcttatatatttttctttgaatatgtggcctctctgcttgcaaacacatacagacttttagttttgatttacatagagttaaatgtacacatctgttartctaaatataaaccttaggtgtaagaaaattaataaggtgtctaattttctttttgattcttttttttgacagagttttgccctgttgcctaggctggagtgcagcggtgtgatatcggctcgctgcaacctctgcttcgcagggtcaagcaattttcctgtctcagtctcctgagtagctaggactacaggcccaggccaccacacctggacaatttttgtatttttagtacagacagggtttcatcatattggtcaggctagtcttgaactcctgacctcaggtgatccacccacctcagcctccgaaagtactagaattacaggcatgagccacca

SEQ ID NO: 137413 - DNA, 392 bp, Homo sapiens
gaattctctgatggttggttaggtataatttgcgcccaaagactttgtcacattcattacatttgtaaggtttctctccagtatggattagaagatgggccataaggcccggacgcttgtgaaatgctcttccacattcgttacatttgtagggcttctctgtactatgaattatttgatgccgtgcaaggtatgaaagcagactaaagaccttgccacattcattacatttgtaaggtttttccgccgtgtgacttctctgatgattggttagagaaaatttgtgcctgaagttcttgccacactcattacatttgtaaggtttctctccagtatggattacaagatgggtagtaagtccygaacactctctaaaagctttgccacattcg

SEQ ID NO: 137414 - DNA, 416 bp, Homo sapiens
atttgatcctccagatcctaaaagaaaagcatggctaatatcctcttttcaccactttggaaagtgasgatcagagaggtaaagacacctaccaaagcaagcaccgagggagtgtgggatccaaagccagctgctctgatggcaggacagactgtgaaactctcccctcatttcttcatcaccacgaggcctctcctattattaatagctcccagcactgtcacaagaatggaatgagctcatgagtgtgagagtgggaggaaatgctttcatgagggggagagtgactaatggtcccacgggggacctttcttcctggatagaggcagaacaggtagggacagggcgaggttgaggagcaggagctcccttagcctgttctgttctgaggccctacataactgagacgaggtcta

SEQ ID NO: 137415 - DNA, 432 bp, Homo sapiens
atgttgggacctcatttgatcctccagatcctaaaagaaaagcatggctaatatcctcttttcaccactttggaaagtgacgatcaragaggtaaagacacctaccaaagcaagcaccgagggagtgtgggatccaaagccagctgctctgatggcaggacagactgtgaaactctcccctcatttcttcatcaccacgaggcctctcctattattaatagctcccagcactgtcacaagaatggaatgagctcatgagtgtgagagtgggaggaaatgctttcatgagggggagagtgactaatggtcccacgggggacctttcttcctggatagaggcagaacaggtagggacagggcgaggttgaggagcaggagctcccttagcctgttctgttctgaggccctacataactgagacgaggtctacaa

SEQ ID NO: 137416 - DNA, 416 bp, Homo sapiens
atttgatcctccagatcctaaaagaaaagcatggctaatatcctcttttcaccactttggaaagtgacgatcagagaggtaaagacasctaccaaagcaagcaccgagggagtgtgggatccaaagccagctgctctgatggcaggacagactgtgaaactctcccctcatttcttcatcaccacgaggcctctcctattattaatagctcccagcactgtcacaagaatggaatgagctcatgagtgtgagagtgggaggaaatgctttcatgagggggagagtgactaatggtcccacgggggacctttcttcctggatagaggcagaacaggtagggacagggcgaggttgaggagcaggagctcccttagcctgttctgttctgaggccctacataactgagacgaggtcta

SEQ ID NO: 137417 - DNA, 416 bp, Homo sapiens
atttgatcctccagatcctaaaagaaaagcatggctaatatcctcttttcaccactttggaaagtgacgatcagagaggtaaagacacctaccaaagcaagcaccgagggagtgtgggatccaaagccagctgctctgatggcaggacagactgtgaaactctcccctcatttcttcatcaccacgaggcctctcctattattaatagctcccagcactgtcacaagaatggaatgagctcatgagtgtgagagtgggaggaaatgctttcatgagggggagagtgactaatggtcccacgggggacctttcttcctggatagaggcagaacaggtagggacagggcgaggttgaggagcaggagctcccttagcctgttctgttctgaggycctacataactgagacgaggtcta

SEQ ID NO: 137418 - DNA, 400 bp, Homo sapiens
atttctaaaaaatatgagaatgagtttttgcagctgtcattacccacccaacttgagaaaacacacattagggaaaaaccttatatrtgtaaagggtgtggcaaagcctttagagtgtcttcaagtcttattaaccatcagatggtacatactacagagaaaccttacaaatgcaatgaatgtggcaaagcctttcatcggggctcactactaactatacatcagatagtccatacaagggggaagccatatcaatgtggtgtatgtggcaagatcttcagacaaaattcagatcttgtaaatcaccggagaagtcacactggagagaaaccgtacaaatgtaatgaatgtggcaagtcctttagtcaaagttacaaccttgcaatacatcagagaattc

SEQ ID NO: 137419 - DNA, 544 bp, Homo sapiens
gatgggagggagggaaggaaggatggagacacaagagggggagtggatatggggaaggagtcaaatttgtttatgggattgagaggtgaagccggctaggcttctgggtcgggtggggacttgaacttttctgtctagctaaaggattgtaaacgtaccaatcagcactctgtgtctagctaarggattgtaaatgcaccaatcagcactctgtgtctagctaaaggtttgtaaatgcaccaatcagcgctctgtgtctagctaatcaggtaggggacttggagaattttctgtctagctaaaggattgtaaatgcaccaatcagcactttgtgtctagctaaagttttgtaaatgcaccaatcagcactctgtcaaaatggacaaatcagcactctaaaacggaacaatcagcactctgtaaaatggaccaatcagctctctgtaaaatagaccaatcagcaggatgtgggtggggccaaataagggaataaaaggccacccgagccagcagcagcaacccactcaggttcccttccacgctg

SEQ ID NO: 137420 - DNA, 474 bp, Homo sapiens
gtgcacttgtagtctcagctacttgggaggctgaagtaggaggattgcttgagcctgggaggtccaggctgcagtgagccgtgatcaggccactgcattccagcctgcgtgtcacagcaagactgtctcaaaaaacaaacaaaaacaagtaatgtacttgaatcatcctgaaaccatccccacccctggtccgtggaaaaattgtcttccatgaaaccagtccctgctgccaaaaaggttggtgaccggtaaagttaattcacaccctgacttctgggtgacagggcaaagttcctcccttatcctcagcttctraatctctgaatgggatgttgggggccacagtagcctccttgcaggggagtgacctccctgggaccgttagagatggactcagatggacctgttgcccaggttggagtgcagtagtgtgatcacagctcactgcagccttgaactgggatcaagagatct

SEQ ID NO: 137421 - DNA, 476 bp, Homo sapiens
tttatattaggaaatctattaaacatagatgtcggataataccattgttaaatatttaatgttagtctagaagccctggtcaatagaataagatttaaaaccgaaacaagaggtatgattttagacataatttttttcatgcttccagaactgagcagacataatttttttaaatgaccataatttgtagaggacgaaattgcacacaatgaataaaacaatttaaaaacctaccaatcaatttcactaaagtatctggattcagggtaaatatgctattcatagtagccataactaacacaacaaaactctgtgatacagaaatcaggaaccatcgtcacaaaaataatacaggataaagatgaagaaaggacaatataaaagatttgaacaaattggctgggcgcrgtggctcatgcctgtcatcccagcactttgggaggccgaagtgggcagatgacttgaggccaggaatt

SEQ ID NO: 137422 - DNA, 482 bp, Homo sapiens
aatgaaagcaccaactgagttcttatacaagaaactaaaacccatggcacagatagttctcacggttttgcacccaaacgctccctgccagggagggctgtctgctccggggtgtgagggttctcccgggaggcctgaaatacgacggtgctgggtattgtggtgggttccattccatccctggtcctgccccgggcgctcctgaacgaggagcagaggctggggcccaagtgacccctcctctcctctcctctcctggagragagtaagccgtagcaccccaggactggctggggctcggacggagccggcgggcatcgtctgcacctctgcaccctgcaatcgccgcctagagcctccatgcattgaaggagcagcctgcaccccagcacccgttcgcctgcctggagaagtcccccaggagccggcgggaggcccgaggcagccccgggggtcccgcgccccaggccaccccctgaaga

SEQ ID NO: 137423 - DNA, 482 bp, Homo sapiens
aatgaaagcaccaactgagttcttatacaagaaactaaaacccatggcacagatagttctcacggttttgcacccaaacgctccctgccagggagggctgtctgctccggggtgtgagggttctcccgggaggcctgaaatacgacggtgctgggtattgtggtgggttccattccatccctggtcctgccccgggcgctcctgaacgaggagcagaggctggggcccaagtgacccctcctctcctctcctctcctggaggagagtaagccgtagcaccccaggactggctggggctcggacggagcsggcgggcatcgtctgcacctctgcaccctgcaatcgccgcctagagcctccatgcattgaaggagcagcctgcaccccagcacccgttcgcctgcctggagaagtcccccaggagccggcgggaggcccgaggcagccccgggggtcccgcgccccaggccaccccctgaaga

SEQ ID NO: 137424 - DNA, 518 bp, Homo sapiens
ttggagtcccaaaatatccaaattccagaatcttttcagactcctggaaatgaatcctttgggcatcagagaaacgtggggaactgggccagctcccccattctacagacaaggaaactgaagcttagagaaaaacttcccaaggggtcagggccaaggcagtcctggtcttctgtggactctctcttagcagtgagaactgatagggttttgcccaccaaatgcctmaatcccgcaggcccagctcaccaccccaactcagcccacttcatgggaagctggtggcagtgggggtacgggggcagattgtcccttgggtgaacttctttgtccagtgctcaagtccccagcctgccccgctcaggcttcaccccagttttatttttctgccaggtccaggtgtgttagggccgcttaccttccttcccgaggccccaccggggcagtttcactttctgttctactaggtttcatttcctgcccccaggcccccaaagctgaggacccagacacctggg

SEQ ID NO: 137425 - DNA, 518 bp, Homo sapiens
ttggagtcccaaaatatccaaattccagaatcttttcagactcctggaaatgaatcctttgggcatcagagaaacgtggggaactgggccagctcccccattctacagacaaggaaactgaagcttagagaaaaacttcccaaggggtcagggccaaggcagtcctggtcttctgtggactctctcttagcagtgagaactgatagggttttgcccaccaaatgcctcaatcccgcaggcccagctcaccaccccaactcagcccacttcatgggaagctggtggcagtgggggtacgggggcagattgtcccttgggtgaacttctttgtccagtgctcaagtccccagcctgccccgctcaggcttcaccccagttttatttttctgccaggtccaggtgtgttagggccgcktaccttccttcccgaggccccaccggggcagtttcactttctgttctactaggtttcatttcctgcccccaggcccccaaagctgaggacccagacacctggg

SEQ ID NO: 137426 - DNA, 630 bp, Homo sapiens
gatgagaaagtgagttattaggacaaagtcgctggggtagacccaagcttagtgtgttctgaaaacagaaggccagcttggccagggcaagtagggagtgggaggtcattgagggtcccaggcgctgacccgatgagagggcggttctgattttcccttcagcaagctctgcatggctgtggggagagggaacgagcrggggtcgcctgcggtcgagtgtggggggcctgccgtcaagtggtggtcatgcaggcagaaggggtgggatggttatgtttggggaggtcagcggtgcctgggtcggggtgggaggcctgataagtccctagatttctggtggtgctgggttggaggagaactcaggcctctggccgaactgtgctgtcacagctgggctgggagggtcctgaggaccacagccctccatcctgaatccagggatgtctgttgagtaagcactagcagctggggacaaggtggacagggagtttaccatccagacaggtcccttcagggtgggcctggaaatggcaggctcctccctgaggtgagagtcggggtcactgtggccagggctagtccctcaggcagagcaagtgctggagccggctcagcgggaactcgctcatt

SEQ ID NO: 137427 - DNA, 516 bp, Homo sapiens
acttcatcataggtttctgatatgaacactataggtttttatttctgtcaccacttctcactgaatacctgaattctactattagagattcatgtctttggagttgccactttcaaaatggaaacctcttcctctaggagggaaaaataagaatgatacctctgaggtatgtaggaaatgcaaataaatgctctgaacgtcttctctatcctgggcactatattttatttaacttrtcagaacaattttgtgaggcaggcattgtttccatcatcttagagataaagttcagaaatgttaggttccattaaattaaaaaagttaagcatatggcaattcaatttgaatccccccggaggggttggttcagtaggaagtaacggcccaaaccctggcacaggctcaaccacttaccaaccatctgccctcagtttactctgctgtaaaatggagagagaacattaggatgtcaagtcctccccagtttgaatatcctaatattcttggaatgaagga

SEQ ID NO: 137428 - DNA, 516 bp, Homo sapiens
acttcatcataggtttctgatatgaacactataggtttttatttctgtcaccacttctcactgaatacctgaattctactattagagattcatgtctttggagttgccactttcaaaatggaaacctcttcctctaggagggaaaaataagaatgatacctctgaggtatgtaggaaatgcaaataaatgctctgaacgtcttctctatcctgggcactatattttatttaacttatcagaacaattttgtgaggcaggcattgtttccatcatcttagagayaaagttcagaaatgttaggttccattaaattaaaaaagttaagcatatggcaattcaatttgaatccccccggaggggttggttcagtaggaagtaacggcccaaaccctggcacaggctcaaccacttaccaaccatctgccctcagtttactctgctgtaaaatggagagagaacattaggatgtcaagtcctccccagtttgaatatcctaatattcttggaatgaagga

SEQ ID NO: 137429 - DNA, 516 bp, Homo sapiens
acttcatcataggtttctgatatgaacactataggtttttatttctgtcaccacttctcactgaatacctgaattctactattagagattcatgtctttggagttgccactttcaaaatggaaacctcttcctctaggagggaaaaataagaatgatacctctgaggtatgtaggaaatgcaaataaatgctctgaacgtcttctctatcctgggcactatattttatttaacttatcagaacaattttgtgaggcaggcattgtttccatcatcttagagataaagttcagaaatgttaggttccattaaattaaaaaagttaagcatatggcaattcaattygaatccccccggaggggttggttcagtaggaagtaacggcccaaaccctggcacaggctcaaccacttaccaaccatctgccctcagtttactctgctgtaaaatggagagagaacattaggatgtcaagtcctccccagtttgaatatcctaatattcttggaatgaagga

SEQ ID NO: 137430 - DNA, 418 bp, Homo sapiens
cttcagaagtgaaggagaaagaaagacaaagattctcagacaaacaaacattgagggaatttgctaccagaaaacctgccttgaaagaaatgttaaaagttcttcagagatataaagagaggaagcacattagaaaaagagtaagtaggcccggcatggtggctcacacctgtaatcccagcactatgggaggccgaggygggcagatcacctgaggtcaggagttcgagaccagcctggccaacatggtgaaaccctgtctctactaaaaatacaaaaattagctgggcatggtggtgtgcgcctataatcccagctactgaggcagctgaggcaggagaatcacttgaacctgggacgtggaggttgcagtgagctgagatcacaccactacactccagcctgagtgacagggcaa

SEQ ID NO: 137431 - DNA, 412 bp, Homo sapiens
tgaatgtaaataaaatgaaagcatgtgaaatgtgttcaggagcttatgaagtcccctgaacccgatcacttttccagaggatragcagtgaatttcagcatcgtcaacagcatatattggcattcttgcagttgcccgcaggaggatatagtttatcagactttattcttccaagctacggagccccagaggagggaggagtctggggaagctggtcgaacagactagggaaaaaaagctgcagtggcctccctatcgtggggaattgctgtagcctgctacatggtagtcctacgatcctaacttggccaagattcttgtttgggttcaagagctgggtcaggagtcttcccaaagtgctgcacttgctgttccattctatgttcaatggaatacagcacaagatagaaga

SEQ ID NO: 137432 - DNA, 445 bp, Homo sapiens
aataacaatgaatggggaggagttggggtccttgggtaccaaaccatgggaggctcatcccccagacaggagagcygcgtggcctctgtgattgcttcttccttggttttgtgctgtagaattttactggtcaggcatggtgatttacgcttgtaatcccagcacttttggaggctgagccaggaggactgcttgaacccaggagttcgagaccagcctgggcaacatagcaagaccccatctctgcaataaataaagacacaaaaattagctgggcatggtggcgtgcacctgtagtcccagctacttgggaggctgaggcaagaggatcacttgagcctgggaggtcaagactgcagtgagccgtgattgtgccactgcactccagcctgggtgacagaatgagaccctatctaaaaataaaataaaataaaataaaaataaa

SEQ ID NO: 137433 - DNA, 445 bp, Homo sapiens
aataacaatgaatggggaggagttggggtccttgggtaccaaaccatgggaggctcatcccccagacaggagagccgcgtggcctctgtgattgcttcttccttggttttgtgctgtagaattttactggtcaggcatggtgatttacgcttgtaatcccagcacttttggaggctgagccaggaggactgcttgaacccaggagttcgagaccagcctgggcaacatagcaagaccccatctctgcaataaataaagacacaaaaattagctgggcatggtggcgtgcacctgtagtcccagctacttgggaggctgaggcaagaggatcacttgagcctgggaggtcaagactgcagtgagccgtgattgtgccactgcactccagcctgggtgacagaatgagaccctatctaaaaawaaaataaaataaaataaaaataaa

SEQ ID NO: 137434 - DNA, 472 bp, Homo sapiens
gcctgtgctgcatcagcttcacacctagagaagagagtgaaagagaagggagagccgtccttttgggctgccttgaaataaaggttgacccatgggttcatgtattgtcattcattctcattttctcttcctctctttctctctctcccctgccccttaagttagcttttctacaccctacctggataaggataagaaatagaaggaggggacactttaggatgctacaaaataaaatacaacaacaacaacaataacagcagcagcaacaacaacaacagcaacaaaaggggaagaaacaaatctggccactgcacattcctccttggcaacaaaaagccgcggatgcaaaaagctgcccttcactgcatagacagaasagggcgcgctcgagctatgaatctcggaaattactcaaaccatcagcctctgcaagaagcaaagtggacggccgggcgcggtggctcactcc

SEQ ID NO: 137435 - DNA, 376 bp, Homo sapiens
attgagatctttctagcttcttaatgtagcatatagcactagaaacttcctytgagcactgttgtagctgtgtcccagagattctgggatgttgtatgtttgttttcattagtttcaaataattttttgttatttctgccttgaatttcagtctttacccaaaagtcatttggaagcaggttgtttaatttccatgatgactctaggccgggcatggtggctcatgcctgtaatcccagccacttgggaggctgaggcaggagaatcgcttgaatccaggaggcagaggtttcagtgagccaagatcacgccactgcactccagcccgggcgacagagtgaggctgcgtctcaaaaaaaaaaaaaaaaaaaattgc

SEQ ID NO: 137436 - DNA, 361 bp, Homo sapiens
tctagcttcttaatgtagcatatagcactagaaacttcctctgagcactgttgtagctgtgtcccagagattctgggatgttgtatgtttgttttcattagtttcaaataattttttgttatttctgccttgaatttcagtctttacccaaaagtcatttggaagcaggttgtttaatttccatgatgactctaggccgggcatggtggctcatgcctgtaatcccagccacttgggaggctgaggcaggagaatcgcttgaatccaggaggcagaggtttcagtgagccaagatsacgccactgcactccagcccgggcgacagagtgaggctgcgtctcaaaaaaaaaaaaaaaaaaaa

SEQ ID NO: 137437 - DNA, 361 bp, Homo sapiens
tctagcttcttaatgtagcatatagcactagaaacttcctctgagcactgttgtagctgtgtcccagagattctgggatgttgtatgtttgttttcattagtttcaaataattttttgttatttctgccttgaatttcagtctttacccaaaagtcatttggaagcaggttgtttaatttccatgatgactctaggccgggcatggtggctcatgcctgtaatcccagccacttgggaggctgaggcaggagaatcgcttgaatccaggaggcagaggtttcagtgagccaagatcacgccactgcacyccagcccgggcgacagagtgaggctgcgtctcaaaaaaaaaaaaaaaaaaaa

SEQ ID NO: 137438 - DNA, 529 bp, Homo sapiens
gcgaaaaccacatctctaccaaaaatacaaacattagcaggttgtgatagtgagtgcctgtagtcccagctacttgggaggctaaggcatgagcatcgcttgaacccaggagacagaggttgcagtaagctgagattgtgccactgcactccagcctgggtgtcagagggaaactctgtctcaaaataaagaaataaagaaatggaaataaaaataataaagtggggatgaggataacacctacttgtaaggttgtttcttgaggggatccagaaagtaaccatatctgaagaactcaggactgtcctgggttgtgtaattgactggaataaatggcggatgggatggtgttgggaaattgattccgactratgggcaaggtttgtgctcagcacatccctggtctcacaccaatcctaggagttagtcccatttttctgacgcagtagttgaggcttaaagaagttcagtcacatgcccaaggccacagttcctgaaaagctgggccaagacttgaactgagatcttt

SEQ ID NO: 137439 - DNA, 446 bp, Homo sapiens
ctttcctattgtaagcaccggctttctccctggtctccctgcttgccctcttattccccctccgatcttttcttcccatgtcagccaaagggattccaggaaagggcaaagawgattaagttttttccttcctaagatccttcggccatgtgacttgatgcaatgtatgatcctgtgttgaatcctgggctggggaaaacattgctataaaggattttattgagacaaacagatttgaatttgtggattaaacaattgtattattgtatcaacgtttcatttcctgtttctgattcttgttctggattttttaaagagcatgtctttgtttttagtaacgtcatgctgaaggatttagggatcaagggacacgacgtcttccactgcctctcaaatgttcagaaaagaaacatacagcagaggtggccaaatgttactgacttgcg

SEQ ID NO: 137440 - DNA, 443 bp, Homo sapiens
ttcctaagtttctctttcctattgtaagcaccggctttctccctggtctccctgcttgccctcttattccccctccgatcttttcttcccatgtcagccaaagggattccaggaaagggcaaagatgattaagttttttccttcctaagatccttcggccatgtgacttgatgcaatgtatgatcctgtgttgaatcctgggctggggaaaacattgctataaaggattttattgagacaaacagatttgaatttgtggattaaacaattgtattattgtatcaaygtttcatttcctgtttctgattcttgttctggattttttaaagagcatgtctttgtttttagtaacgtcatgctgaaggatttagggatcaagggacacgacgtcttccactgcctctcaaatgttcagaaaagaaacatacagcagaggtggccaa

SEQ ID NO: 137441 - DNA, 561 bp, Homo sapiens
aggctgaaattgccaaaaatcagacacaagctcttatgtgagtggatgacctacaataattggtgcacactcagcctcaccaggtatctataaagtaagggcattgattgggaaagattgggagcatgtaacttgacatggggatgtgtgggaggatcctgatgaagctgggaacactgagctcttaaaccctgatgagccctttttgcgagagaaaatggcctccctacccctcatggtggcaacatcttcttccccaccaaggctgctttcagcctttgtaccttttttctgaggacattcaccatgcattgcctgaggaaacaacaatggcctcctctgaggcagatgcgaggcaaggcaatgctgattcttctcaggwtcctcccccaccacccttctttgcctctagacctgtaactagactcaagtcccagtggctgctagaggtgatgtgacccgtgaggaggtgcgctgcactccaaaagaactgctgaggcataattatgacattattgtctatatttggagattatgatttaaggagatgtgtatgggtgc

SEQ ID NO: 137442 - DNA, 425 bp, Homo sapiens
gtctgttctcacgctgctaataaagaaatacccgagactgggtaatttatgaagacaaagaggtttaatggacacagttccatggggtcgtgtcccccgtgcttctgccacagggccatatagacagctcttatcgcggagttttcctgcctcaaatccttcagtgtcccctgcactggcccgcaccttttttaaagtcctcaccgcaaggttgattcccgccctgggagcttcccatctrctccgctccctcgtcagctcctggagcgcagcgacgcagccccagtcccagggaggccgtgaactcttcctggtcctgggatcctgcagaccctgcccctctcctgactttctcctgcctttttcctccttgatcgggggcccttctgctccccaggcctccccttctcctgatatcgagtgtg

SEQ ID NO: 137443 - DNA, 515 bp, Homo sapiens
ctagggtattttcatgaataaactgatgtagattgtttcgatcaggccttatggaaataggaaaagcacaaggtcctaagggctctccagctatggcagcagagtgtaacattctttgtactggggtctctatttctgctactgaaggaggtggtacagatgttgctgcaactggagggggtggtaaaaaccaatttttatcctccctctcctgttttttgttttcaattggatctgtgggkgggacaacagattctttcagatttttagactcagcctgctgcccagcagaataatgagataatggcagaacagtacgaaccagactccacgtgaagatagaagaatcaactttaagacctttttgatgagcctcttttaatccttttcctgctgtgtcccaattttccacatcaagagtgcctgcctgtggaaaccatgggccatgcatcataatctcctgcagaagcttaatgtctgtgaattaacctgagttccaggctgtctcaatagaa

SEQ ID NO: 137444 - DNA, 605 bp, Homo sapiens
atcagaattcacaccttgcacaacatcagaaaattcatactggacagaaaccttacaataacaaagaatgtgrgaaagtctttagtcaccatgcctaccttgcacagcataggaaaattcatactggagagaagccttacaaatgtagtgaatgtggcaaagcatttagtgtgtgttccagtcttactgctcatcttgtaatccatactggagagaaaccttatgattgtaaggaatgtggcaaggtcttcaggcataagtcttccctaaccactcatcagacagttcatactggagagagaccatacaaatgtaatgaatgtggcaaggggtttagtcgaattgcattccttgcaaggcatcggaaagttcatactggagagaaaccttacaaatgtaatgagtgtggcaaggtctttattggcaattcacgccttgcacgacataggaaaattcatactggggggaggcgttacaaatgtaatgaatgtggcaaagcatttagaacgtgttcagatctcactgcccatcttctaatccatactggagagaaaccttacgaatgtatagactgtggcaaggtcttcaggcacaagtcttcccta

SEQ ID NO: 137445 - DNA, 580 bp, Homo sapiens
actttgcacaacatcaacgaatccatactggagagaagccttacaaatataatgaatgtggcaaagtcttcaatcagaattcacaccttgcacaacatcagaaaattcatactggacagaaaccttacaataacaaagaatgtgggaaagtctttagtcaccatgcctaccttgcacagcataggaaaattcatactggagagaagccttacaaatgtagtgmatgtggcaaagcatttagtgtgtgttccagtcttactgctcatcttgtaatccatactggagagaaaccttatgattgtaaggaatgtggcaaggtcttcaggcataagtcttccctaaccactcatcagacagttcatactggagagagaccatacaaatgtaatgaatgtggcaaggggtttagtcgaattgcattccttgcaaggcatcggaaagttcatactggagagaaaccttacaaatgtaatgagtgtggcaaggtctttattggcaattcacgccttgcacgacataggaaaattcatactggggggaggcgttacaaatgtaatgaatgtggcaaagcatttagaac

SEQ ID NO: 137446 - DNA, 577 bp, Homo sapiens
actttgcacaacatcaacgaatccatactggagagaagccttacaaatataatgaatgtggcaaagtcttcaatcagaattcacaccttgcacaacatcagaaaattcatactggacagaaaccttacaataacaaagaatgtgggaaagtctttagtcaccatgcctaccttgcacagcataggaaaattcatactggagagaagccttacaaatgtagtgaatgtggcaaagcatttagtgtgtgttccagtcttactgctcatcttgtaatccatactggagagaaaccttatgattgtaaggaatgtggcaaggtcttcaggcataagtcttccctaaccactcatcagacagttcatactggagagagaccatacaaatgtaatgaatgtggcaaggggtttagtcgaattgcattccttgcaaggcatcggaaagttcatactggwgagaaaccttacaaatgtaatgagtgtggcaaggtctttattggcaattcacgccttgcacgacataggaaaattcatactggggggaggcgttacaaatgtaatgaatgtggcaaagcatttag

SEQ ID NO: 137447 - DNA, 485 bp, Homo sapiens
ttataaaaagtgaaaagacaacccatggaatgggcaaaaatatttgcaaatcatgtatctaataagggtctaatacccagaaaacataaagagcttttacaactcaaccaaaagacaacccaattaacaagcgggaaaggattttaacagacatttcttcaaaggagatacacaaatggccgataattacatgaaaagatgctcaacatcatttatctttagggaaatgcgattagcgacaatgagataaccacttcatagccactcggatggctgtgatgaaagagatggaaagcaacaagtgtttacagggatktggagaaattagaaccttcatacagtgctggtgggaaagtaaaatggtacagttcttttggaaaacattttggcaattcctcaaatgttaaacacgtatttaccataattgtgatatttcactcctaagtatgtatctaggagaaatgaaaacatttgcccatgcaaaa

SEQ ID NO: 137448 - DNA, 542 bp, Homo sapiens
atggtaggtggtcatggtacagtgggtagctagtcagacatgagcagggaagcagcagcccccatccccccaccaccaccaggaatgccagggcactaccaggtcatgttytggcagttgttaatggtctgaaataattggtctcagccagtgccagggaaaggcaggcttacaacagatagacacacctgagggcgagcacagttgctcatgcctgtaatcccagtttgggaggccgaggtgggtggatcatgagatcaagggtttgagaccagcttggccaacatagtgaaaccccgtctctgctataaatacaaaaattagccaggcatggtgatgaactcctgtagtcccaactactcgggaagctgaggcaggagactcgcttgaacccaggaggcagaggttgaggtgagctgagattgtgccactgcactccagcctgggaaacagagcaagaattcgtctcaagaaaaaaaaaaaaaaaaaaaaaaaaaaaaaaaaaaagacaccctaaactggtcatcaacagcttaccagta

SEQ ID NO: 137449 - DNA, 542 bp, Homo sapiens
atggtaggtggtcatggtacagtgggtagctagtcagacatgagcagggaagcagcagcccccatccccccaccaccaccaggaatgccagggcactaccaggtcatgttctggcagttgttaatggtctgaaataattggtytcagccagtgccagggaaaggcaggcttacaacagatagacacacctgagggcgagcacagttgctcatgcctgtaatcccagtttgggaggccgaggtgggtggatcatgagatcaagggtttgagaccagcttggccaacatagtgaaaccccgtctctgctataaatacaaaaattagccaggcatggtgatgaactcctgtagtcccaactactcgggaagctgaggcaggagactcgcttgaacccaggaggcagaggttgaggtgagctgagattgtgccactgcactccagcctgggaaacagagcaagaattcgtctcaagaaaaaaaaaaaaaaaaaaaaaaaaaaaaaaaaaaagacaccctaaactggtcatcaacagcttaccagta

SEQ ID NO: 137450 - DNA, 630 bp, Homo sapiens
tgtcaagccacccagatttggatttattacaataggtaatgctaattaccctaattaatacaagcaactgcttgtatctgctgagagagatacatcaatattctaatgraaaaatcaacaaaccatcttgccgggtggggccaggcaaatgagtctactgttgtgtgagggaaacacagaaatgaatggagctctagctgtattcagccactcgaaagtagcttgatttctggagttgctggattcttactctttgtccacgtaaaaatagagggacatgaataatctttctagttaatcacatattttcaccaataaaaacattgcatctaacatcatttatgctaattaatgaaccctctagcgtgaatatctgataacatcattctaagtatatttgctgccacttggaacgtcatagtaaagttcttcaaataatcactaatcagtctggattcctgcctaagacagaggtgaagttccaaatatctaaccactggcatggcacaatcaccaagagatgaaaatagctgtaaattcttatgccagagcggtgccttctagcctggattacttcaagtgttaactaagctcccccagggtagagattaaagtaattcgtagagtcac

SEQ ID NO: 137451 - DNA, 642 bp, Homo sapiens
tagaagccgagatttacaaaacacagatctcataaaggacttgcatccagaacatacaaamaacactcaaaattcaatcataagaaaataaacatcccaatgttttttgtttcttttttttgagacagagtcttcctctgtcacccagggtggagtgcagtggtgcgatcttggctcatggtaacctccctctctgagggtaaagtgattctcgtgcctcagcctcccaagtagctgagactacaggcacgcgccaccaagcccggctaatttttgtattttttgtagagctggggttttgccatgttggccaggctggtctcaaacgcctggcttcaagtgatctgcccaccttggccttccaaagtgctgggattacaggcatgggccaccatgcccggcaaacatcccaagttttaaaaatcagccaaacatttaaacaaagatttcaccaaagaaaagatggcaaataaataaattttttaaatgttcaatataattagtcattagagaaatgcaaactaaaactgtgatgacatactattacatgcttattagaatagaatcactaaaacaaaaccaaaaaaaaactctaccaagtgttgtagaggattaggagcagctagaacattcgtacattgt

SEQ ID NO: 137452 - DNA, 642 bp, Homo sapiens
tagaagccgagatttacaaaacacagatctcataaaggacttgcatccagaacatacaaaaaacactcaaaattcaatcataagaaaataaacatcccaatgttttttgtttcttttttttgagacagagtcttcctctgtcacccagggtggagtgcagtggtgcgatcttggctcatggtaacctccctctctgagggtaaagtgattctcgtgcctcagcctcccaagtagctgagactacaggcacgcgccaccaagcccggctaatttttgtattttttgtagagctggggttttgccatgttggccaggctggtctcaaacgcctggcttcaagtgatctgcccaccttggccttccaaagtgctgggattacaggcatgggccaccatgcccggcaaacatcccaagttttaaaaatcagccaaacatttaaacaaagatttcaccaaagaaaagatggcaaataaataaattttttaaatgttcaatataattagtcattagagaaatgcaaactaaaactgtgatgacatactattacatgcttattakaatagaatcactaaaacaaaaccaaaaaaaaactctaccaagtgttgtagaggattaggagcagctagaacattcgtacattgt

SEQ ID NO: 137453 - DNA, 435 bp, Homo sapiens
cgggtatacatccaaaagtattaaaatcaggatcttgaagatctgtgttcactgcascattattcaaaatagccaagattagaaacaacctaaatgtccatccacagatgaatggatacaacaaacatgtggtatatatgtacaagcaacagtcatcaatttagcctttaaacaagaaggaaattctgtcatctgtgacaatataaatgagcctgaaggacattattctaagttaaataatccctgttatagaaagattaatactgctagattccactcattgaggtatttacaatagtcaaatccatagaaacaaagagcacaatggtagttgccaagagctgggggaaaggaaaaatggaaagtagttggttaatgagtataaagttttgttatgcaagatgaatatgttctggagatctgctgtacaacctg

SEQ ID NO: 137454 - DNA, 435 bp, Homo sapiens
cgggtatacatccaaaagtattaaaatcaggatcttgaagatctgtgttcactgcaccattattcaaaatagccaagattagaaacaacctaaatgtccatccacagatgaatggatacaacaaacatgtggtatatatgtacaagcaacagtcatcaatttagcctttaaacaagaaggaaattctgtcatctgtgacaatataaatgagcctgaaggacattattctaagttaaataatccctgttatagaaagattaatactgctagattccactcattgaggtatttacaatagtcaaatycatagaaacaaagagcacaatggtagttgccaagagctgggggaaaggaaaaatggaaagtagttggttaatgagtataaagttttgttatgcaagatgaatatgttctggagatctgctgtacaacctg

SEQ ID NO: 137455 - DNA, 621 bp, Homo sapiens
tggtcttggaaaaaaattttgagtactacctcactaggacatgcaaccaaagtggaaaaaaaaaataactggtaaatgggattacgtcaagttaaaaagcttctacacagcgcaggaaacaatgaacaaaatgaagacacaacctacagaattggagaaaatatttgcaaactacctcacctgacaaaggattaataaccagaatatatagggagctcaaacaacttcataggaaaaaatctaataatccaacttaaaaatgatcaaaagatttgaatagacatttctaaaaagaagacatacaaatggtgaacagggatatgacaaaggtgctcaagatcatcggacatcagaaaaatgcacattaaaactacaatgagatatcatctcaccccagttaaaatggcttgtatccaaaagacaggcaataataaatgatgacaaggatatggagaaaaggaaacccttgcacaytgttggtgggaatgtaaattagtacaaccactatggagaacagattggaggtttctcaaaaaattaaaaattgaactctcatatgatccagcaatcccactgctgagtatacaccataaggaaacgaaattcgtaacggagctatct

SEQ ID NO: 137456 - DNA, 518 bp, Homo sapiens
accatcccagatgcctgaataataaacagttttattgtatgccactgaattgttgtggctgttgttagaaagcaatggraaatcaatatgtatgtgttggaactggtcagctgtagccagtaagagcatgggaggtaatatctgtaatatctaaatgtctaactgggcagcatgtatggactagccactgtatactatttggttggagtttatgaactagtcagtttgacaggtctttttttccttcttttattttttcctgaaatctcaaagtaatttaaaacagtgagagtcttctgagttataattgtctgctttgttcaggatgtctgaaggtagctttggatgacttatctaatcatcttgttgaagcttgtctgtgtacatcttcatctggccagtttttaataaagcagtacactcatactggtcagcctactaagattgctaaattaatctggagcagtcagtgggtctgagatggcagtgtttttggacttatgttacacagaagaatc

SEQ ID NO: 137457 - DNA, 552 bp, Homo sapiens
gaactttgttgcatgcatatctataaatgcttaacagacatttcactctcatttatcccaaaacatctatcccatttttcaattcacactccaaacccattacgcttgcatttcctctcagttaaatttaatgtcatctacacaaccatccttcatctcttacttactttatgcacccgatcaagtatcgattcatggaaattctmatttctgtatctcaaatccatccccctttccactcacttctacatctgtcataagccggaccctggcagaattcacatgcaattatctctaaatggtctcccagcctctagttctaaatcatctcaaaattctgcagtagaagattttcagacctttagcaaataccttactgttttatgcctacttaaatttttttaatggctcactgaaataattagagtaagtggaaaatggttttatacagttctccatgatctgtttagcaaaacactgtgttgccctggggtcaaattgcctgggttcttaatccatcctctatgtcattagctttgtgaagttatgtaa

SEQ ID NO: 137458 - DNA, 531 bp, Homo sapiens
ttgttcctagtgttgtattgtttttttaagcaaattacttactgtatttttatggcaggagggagaaaaagtgttacaacggtttctaatgaagtccggtatttaaatgataaatgactaatgtgtttagtagagacaaaataaaccaataaatgattgttctttgccatttatgcaggaaactacccttttctcaacataaacaaacaaaggctaatttagaaatgctttattgmaaaatacacttatcttcatataaaattacagtagcagtatcttgagaggttttgtaagtatttttgcagaacactattctaattgaacagtataagttccatatttctctcagagcaatatgaaattacctagtaactttgtttatactgattcaatttacaattgaattttctccctaataagattattaatttgacttgaaaactgctggaacaatagtgattaataaagatatgtatagataattcaaaaaaaaaaaactcgtcacctacactttcttcttattccactgca

SEQ ID NO: 137459 - DNA, 581 bp, Homo sapiens
ggcgggcacttgcagtcccagctgctcaggaggctgaggcaggagaatggcgtgagcccaggaggcagagcttgcagtgagccgagatggtgtcactgcactccagcctgggtgacagagcaaaactctgtctcaaaaaaaaaaaaaaattccatcatatatgtgcattttctttataacaggtaacatcattcatacagtcagggaagaacaagcttttacaataaatggcgtgagattaacagtaaatctaaataaaaaaatgtgaaactttatctctacctcatacagtaatcccccttccgtatgtgtggcttcctaytccagaatttcagttgcccatgatgaacctccatccaaaaatattcaatggaaacttccagaaataaactatttgtaagttttaaatagcgtgcagttctgggtagcatgatgaaatctcatgctgttcctcccaggatgtgaataatccctttgtctggtatatccacaatttagatgctccctgtccatgagtcatttgggagctgactcagttgtcaggttgactgtcgcagatcatcacagtgcttatgttcaag

SEQ ID NO: 137460 - DNA, 528 bp, Homo sapiens
agctcctatgcacaggcaggtagtcctgacatgtggctgagtctggggtttttatgcgctcagaatcgaggaagtgcatgctgattggtccatgggtgggcccaggaagagcactatctgactrgctgaaaggcatcaaggaagttatcacactgggccatgaaatccacccagaattggcagcccagcccccagggttcaggccatctctggcttaaggtttgggcctcactggggacccactccttcccgcctaggagcctgtctgcctcctgccaccattgtcagcaagtctaaggatgagataaagaggatgatctgagaggagccacaatacacagcaaaaagtatcgcatgattttgccaatttctatcaatagaaacccagagaatgtgtgtaggaatggatcttatggttatcctagtcactttgtgttgctgtaacagaataccacagaaatgataatacatgaagaagtttagagtctggcagagagtatggtgagaagtcaagcagggaagctccct

SEQ ID NO: 137461 - DNA, 420 bp, Homo sapiens
agtacatgataaaaagtagagttagaraattagccagtttgtaaacatctttttgttataattgatagaaaagatgcatcttggacaagggattgttaaataatttctgagcagtatatgtgagaacttgtggattaggttggcagtagaggggcaaaaggaagcacaaagggagagaagtatgagatgtgttcttatttacattctgacaaaagctattgatgtatgtgcatgtctttggctggactataggaatacattaagtaatcaatgaaataataccttcttgctaatattttaatggtaaggtctcataataaattttcttaaaacattatacttagtatatcctgttgctttgtgtttcattttaaattgagctttaagggaatgcggtattttaatcagaattctgccaat

SEQ ID NO: 137462 - DNA, 404 bp, Homo sapiens
tctggaggtgacagtacatgataaaaagtagagttagagaattagccagtttgtaaacatctttttgttataattgatagaaaagatgcatcttggacaagggattgttaaatratttctgagcagtatatgtgagaacttgtggattaggttggcagtagaggggcaaaaggaagcacaaagggagagaagtatgagatgtgttcttatttacattctgacaaaagctattgatgtatgtgcatgtctttggctggactataggaatacattaagtaatcaatgaaataataccttcttgctaatattttaatggtaaggtctcataataaattttcttaaaacattatacttagtatatcctgttgctttgtgtttcattttaaattgagctttaagggaat

SEQ ID NO: 137463 - DNA, 606 bp, Homo sapiens
ggagttaaaatttttgaaaccatctattgtgttgtggcagagtttaacgataatactataattcaggaaaatttgtcatttataaaattaatccaaaattaatagttctatttttaacactaatagaaaaataatgagaatatacccttcacaattgcaactacaagagagaaaatatccagtaataaatttcttctatcagaagaaaactttataacacttttgtttacttcctcaatgaataaaagtgtttccaccacgaaatgcttcaaggatgctgagcgcttccttcatgaatttatttctcacatctttgataaagggcacattctgttgactctcctggaagacacaggaagggggtaggtggggaggacttgcaatatccttcacaatatttcttcacaatattaagaaagaaaagtcttaatattgtgaatatgtcaattcatataaaataatctatyggttgactatatctagttaaatactactaaataactttagatttctattttgtacatggtagggggtggaatttgacaaaatgatttgaaacccagatatcagttagagctttctaaaccttttagctatgtttagaat

SEQ ID NO: 137464 - DNA, 538 bp, Homo sapiens
aacacacgcccaccttcttcagagcttaaggaatagaatgagtttataaatgttatgggagtaattctactaacttaaatacaatgttttaagtgatttcttctttattaggatttcatatggcttaagaaaaaacttttgatttaaaaatttttgagggtatacttagctatagggcaaatgcaccttgaaagcagcagaaactattagtacttttctctatttacagcaagccagagacagtctttggctgctctgggtatagatagcatctacgtttcaaccttatttctgaagagacatatgcaagattctgtaacctatatgatgtcamatcagtctgtacaaaatcctcagtcatattaccaaaaagtctatgcaaagctgtatgatacaggccataagatagagacaacacaagtatccttgatggtatcctgagaaaaagtgtaacgtactacacaagcagcttttgtaatgcccatgtctggtaggtactcagcattcaaaactaacagtaattactgccaaagcccgc

SEQ ID NO: 137465 - DNA, 564 bp, Homo sapiens
cagtctgctaatgttttattgaggatttttgcattaatgttcattagagattggcttgtagtttttttttcttgtgatctctgtgtctgggttaggtatcaaggtgatgctggcctcataaaatgtgtttggaaatattccctccaattctatttttgkaagagttaaaaaagtattgttattcttctttgaacatttggtagaattcagctgtgaagccatctggtcctgggctattctttgttgggaagttttttattgtttcttcaatatctttatttgttatttttctctttaagctttgtagtccttacttatcttggtaagttgtattcttctaggaatttatccctttcctttaggttgtccaatttgttggcatataattgtacatgatagtcccttatgatcctttttatttctgagacatctgttgtcatttcttcacgttaatttttgattgtatttatttgtgtcttctctctttttccttagttagactagctaaaggtttaccaattttgtttacctttttaaaacaaccgttagttttattgattcttt

SEQ ID NO: 137466 - DNA, 620 bp, Homo sapiens
tgtttggaaatattccctccaattctatttttgtaagagttaaaaaagtattgttattcttctttgaacatttggtagaattcagctgtgaagccatctggtcctgggctattctttgttgggaagttttttattgtttcttcaatatctttatttgttatttttctctttaagctttgtagtccttacttatcttggtaagttgtattcttctaggaatttatccctttcctttaggttgtccaatttgttggcatataattgtacatgatagtcccttatgatcctttttatttctgagacatctgttgtcatttcttcacgttaatttttgattgtatttatttgtgtcttctctctttttccttagttagactagctaaaggtttaccaattttgtttacctttttaaaacaaccgttagttttattgattctttttgtggctttttgttttctatttgatttaattctgctccaatttttgttatttccttcattctgttaatattgggtcraatttgttcttcttttttagatcctttaggcatattgttagactgtttatttgagactttttttttcttttttagcataggcatttattgctagaaatttccc

SEQ ID NO: 137467 - DNA, 425 bp, Homo sapiens
aactgtgactgaggtatttatagctcactgaatggccatgtgcttcctacattaccagtgccattgctgttaggtgggaacacatgatgagttcttctcaatgaactgtgaatagtaatgacctttcatacttctaagacagaataagagaaggcttgagttctccattctcttccctcctttgatgtagmaattatggagtttttaaaattggcaacgtttttgaatcattcatgtacaataaattgtgtataaagtagacaatctggtgactgttgtatatacctgtgaaaatatcatcacaatcaaaatagtgaacatacccatcactccctagagctacctcctgtccctttgtaatccattcctctcttaatctccaaatctaaatccatagggaacaaattatggtctttctgtcacca

SEQ ID NO: 137468 - DNA, 575 bp, Homo sapiens
tttttaatagactagactggatagtggtatcctcaattctgctgacatttcattggtttgaattcaatcatatgatgacatgtacatgcaaggaagtctggaaaatgtagctttagctatgaggataagaaaaaagttgtgaatgttgatgagcattttataatctctgctataccatcacttgttaacgtgctttaatgcagagttattaggcctaaaaatccaatgtaatattacgtagccacgtaaaatcagtggttctggttgcttgcaggatcaacataaaatttggcctaaatatgtaatttccatgtgaacggcttctgttttcatccagtatcaaacttgaacaatagatgaactgagcacctctttgatttcttcagtaaataatcccatcataccaccacattaacaagcaatgtagaagtgatctacartttcataggagtggcagacaacattcaccatacagcaaacggctcaataaatcttcatcacacattttcattctcttccaaagtcttctttcaactgtgtggccatttgaagacttaaaaaaaaacttttccagc

SEQ ID NO: 137469 - DNA, 452 bp, Homo sapiens
taactttggattattaaatgggatataagtaggaactattaaagaaaaaatcaataaactggatttcaacagaataaaaaacttttgctctttaaaagatactgttatggctkggcacggtggctcatgtttgtaatctcagcactttggggggccaaggcgggtggattgcttgagcccaggaccaagctcagaccagcctgagcaacatgataaaaccctgtctatacaaaaattagctgagtgtggtgatacatgcctgtagtgccagctacttgggaggctgacacaggaggctcacttgaacctgggaggtggaggctgcagtgagctgagatcacgccactgcactccagcctggacaacagagtgagaccctgtctcaaaaaaaaaaaaaaaaggatactattaggaaaatgaaaaagacaagcaacagattgggaaaataatat

SEQ ID NO: 137470 - DNA, 452 bp, Homo sapiens
taactttggattattaaatgggatataagtaggaactattaaagaaaaaatcaataaactggatttcaacagaataaaaaacttttgctctttaaaagatactgttatggctgggcacggtggctcatgtttgtaatctcagcactttggggggccmaggcgggtggattgcttgagcccaggaccaagctcagaccagcctgagcaacatgataaaaccctgtctatacaaaaattagctgagtgtggtgatacatgcctgtagtgccagctacttgggaggctgacacaggaggctcacttgaacctgggaggtggaggctgcagtgagctgagatcacgccactgcactccagcctggacaacagagtgagaccctgtctcaaaaaaaaaaaaaaaaggatactattaggaaaatgaaaaagacaagcaacagattgggaaaataatat

SEQ ID NO: 137471 - DNA, 452 bp, Homo sapiens
taactttggattattaaatgggatataagtaggaactattaaagaaaaaatcaataaactggatttcaacagaataaaaaacttttgctctttaaaagatactgttatggctgggcacggtggctcatgtttgtaatctcagcactttggggggccaaggcgggtggattgcttgagcccaggaccaagctcagaccagcctgagcaacatgataaaaccctgtctatacaaaaattagctgagtgtggtgatacatgcctgtagtsccagctacttgggaggctgacacaggaggctcacttgaacctgggaggtggaggctgcagtgagctgagatcacgccactgcactccagcctggacaacagagtgagaccctgtctcaaaaaaaaaaaaaaaaggatactattaggaaaatgaaaaagacaagcaacagattgggaaaataatat

SEQ ID NO: 137472 - DNA, 617 bp, Homo sapiens
agccaggtactaaccacggagaaagagaagtcatatactggcatttatgataaagcaagaaaaaagaagaccacttcaaatacacctccgattactggggcaatatacaaagaacacaagccattagtgttaagaccagtctacataggaacagtacaatataaaattaagatgtttaattcggttaaagaagaattaattcctctacarttttatggaacattgccaaagggttatgtaattaaagaaatacattataggaaagggaaagatgcatccattagtctagagccagatttggacaatagtggttctaatacagtgtccaaaacacgcaaattagtagcccaaagcatagaggataaagtaaaagaggtttttccaccctggagaggcgcactctccaaaggatcagagtccctaaccttaatgttcagtcatgaagatcaaaagaaaatttatgctgattctcccctaaatgccacatctgcattggagcacacagttccctcttattcaagtagtggcagagcagaacaaggaatacagctcaggcattcacagtcagtgccacaacagccagaagatgaagcaaaaccacatgaagtggaacctcc

SEQ ID NO: 137473 - DNA, 617 bp, Homo sapiens
agccaggtactaaccacggagaaagagaagtcatatactggcatttatgataaagcaagaaaaaagaagaccacttcaaatacacctccgattactggggcaatatacaaagaacacaagccattagtgttaagaccagtctacataggaacagtacaatataaaattaagatgtttaattcggttaaagaagaattaattcctctacaattttatggaacattgccaaagggttatgtaattaaagaaatacattataggaaagggaaagatgcatccattagtctagagccagatttggacaatagtggttctaatacagtgtccaaaacacgcaaattagtagcccaaagcatagaggataaagtaaaagaggtttttccaccctggagaggcgcactctccaaaggatcagagtccctaaccttaatgttcagtcatgaagatcaaaagaaaatttatgctgattctcccctaaatgccacatctgcattggagcacacagttccctcttattcaagtagtgrcagagcagaacaaggaatacagctcaggcattcacagtcagtgccacaacagccagaagatgaagcaaaaccacatgaagtggaacctcc

SEQ ID NO: 137474 - DNA, 586 bp, Homo sapiens
gtaaaacacttaagactgtattgcttgatagaatctttctaactagaggatataggaatgaaatttccaatattaccagttgcctaagaatagattttagacatatatttcaagactttaaagctttaaatccttttttggatagagtgagaggccctgccttatgcaaaccaccactaccaacaccagcttcattttgaacaatttttttcactttcattctgtatgttaataattttttaacttatgtagagctctattccccgataggttgctttctgcaatggagagcactgcttctttagagaaaatgcctgctgcgttttcccttttygaacattatgatgacagctcggcaagaagtgaccagatgttaaaacaagtggctggtaagcattttaatatattaattacctagatgaaatatggcagtttttgcttgtttgttttgtatgtaatgatatatacaaaagattttgagtgtaaagacatgtaactggaaaaagaaaagtattagttgtaaaatgttacagctagactctgaaattgagcatgggaggaacatcccatttctgtgcatttccat

SEQ ID NO: 137475 - DNA, 473 bp, Homo sapiens
cctgggtcacatctggctaatgccttccattcaagtcccagctcaattgtcaccttttctgtgaaggctttcttgactagtactccctcctctttgaccccatagccctctgttcatatttctgtatggtgctcatcccgtgataggatttaagggaaactacaaatgycacccctccactgtgcttttggaatcaattgagaaatgcacatgagtctgagagatggagctcacaatatcagcttcattacttaacagataaagctggacatggaaaagcgatgcacctgcagccaaacgagcttcctaatatgccacacaaccccagtacgctcaccctgtctttgtcctgacttattcacctggtcacccggagctgctggagcacttcaggcctcccatgacagagtaaatctcttgtcacacagaggagaatgcatgcgtgcatacctgctaagaggaagctgttttca

SEQ ID NO: 137476 - DNA, 473 bp, Homo sapiens
cctgggtcacatctggctaatgccttccattcaagtcccagctcaattgtcaccttttctgtgaaggctttcttgactagtactccctcctctttgaccccatagccctctgttcatatttctgtatggtgctcatcccgtgataggatttaagggaaactacaaatgccacccctccactgtgcttttggaatcaattgagaaatgcacatgagtctgagagatggagctcacaatatcagcttcattacttaacagataaagctggacatggaaaagcgatgcacctgcagccaaacgagcttcctaatatgccacacamccccagtacgctcaccctgtctttgtcctgacttattcacctggtcacccggagctgctggagcacttcaggcctcccatgacagagtaaatctcttgtcacacagaggagaatgcatgcgtgcatacctgctaagaggaagctgttttca

SEQ ID NO: 137477 - DNA, 593 bp, Homo sapiens
ccaaaaagaaaaaagaaaaaaaaagataacaactttccattggctatttggtatagacaagagttaaattcctatggcatatttctggttgcaaaaacgtcaccaaacttctaaacaaagaccaaaacatttccagtgttaaacattgaaataaatgtgagctatacatccatttaagaaatattaataggccgggagcggtggctcatgcctgtaatcccagcactttgggaggccgaggcaggcggatcacttgaagtcaggagtttgagaccagcctggccaacgtggtgaaaccctgtctctaccaaacatacaaaaattagccgggcgtggtggtgtgcacctgtagtcccagtactcgggaggctggcaggagaattgcttgaacccgggaagtggaggttgcagtgagccaagatcgtgccactgcacttcagcctgggtgacaagagtgaaactccatccaaaaaaatattaataaaaacgagtaagataattattcacccacttataccacttcagggttaygggtggtcagaacctatcctaacagctcaggctgcaagattggaaccagccctggccaggac

SEQ ID NO: 137478 - DNA, 672 bp, Homo sapiens
tggacacttctgtatcaaaataaataaaaatgaaagacatttagcaatattaaaataaccttgttacattaattgaatatttaattcacaataatccagttgaatgctaaatgaaagagagcaccgcaaaagatcactttacaaacgatacttcaagagatttgaaataaaatggaacaaattaatgccagagtataaatcagattactgaatgagacaaaagttatagcattaaaataatgatattatgcagtcctatccagagatatgaaactatggtagttttcttagttcacatatcatccagtatatataagagttgctgagtaaagaactttgcaatatgcaacttttttatcccatgacaaaatttgcaagtacagcattagaaatcaaaaggacaaacaaagtgataaagttcattacagtggcaaaagtccatgttttctcccttataacttaatgagaaaagagacaaaatagtcatgaagtaaggcaaactttaagktcagtttgctctgtttaaattcaagcatcaacacttatcagagatgtgatcttgaactattaatgtatgatgtagtccagttttcttacctgtagaaataagaaaatcatacaacgtatctcataagatgattataaaggttaataaatgtgttaatatatgca

SEQ ID NO: 137479 - DNA, 428 bp, Homo sapiens
tgtctttagaccgtgaggaggtgaaaataaaaataaactgcttttgtgagacatgtggccagaaattaaaactagtaagtccatctaggcccagtgactatcatggaagaggtgaacatgtaagattttaagggctaattctgagggatataattagctcaggatttttctataaattaaacattaatgtcaatagcacactgatggaaggccagcatttggacctctgtgttggaataagagggttctcttggarcattaatctgatctttaatttaaaaaattataaaatttgtataaaatttttacagtatggtcaaactttttacagtatggtcaaaaggctgatgctttcataaaaattgctagcccagtatgaagcagagcaggagttgattgcatggactgaggtaatggaggactgaaat

SEQ ID NO: 137480 - DNA, 612 bp, Homo sapiens
cttggcattctcccaaaacactacaatccatgctgtgattctctaaatgggactcacccaagactctatacagaatctatcagtgccgctgatacttctaatactcttttatttgatggatcacaaagcaggacagcttgtaccacagcttgaacctgatgcagagakgtcttttgctccaagacccactcaacattggcagccttatgggttacctgataaatgggttaagcagcatagccaattgtgatatacgtttcctccaaaatccaaggagacaaatcaagacttttgcatttttcaaaattgcagatggtacaggaagcctcttacttaaaaatgacacccattgacccttggaattcagatgtcttagataatcaactcacttctcaactctactatgacagagaaaggaaattgacgtagctctgcagcaggacaccaagcatgatcttagcctaacttaaattatcattcttttctaacttacagaaataagttgcataatagatgccaagattttcattatttcaataaagacgccacacctggagcataagccatgattagcatcaccacctacgaatggtatcatggtaattctttata

SEQ ID NO: 137481 - DNA, 650 bp, Homo sapiens
ttataccatttatatataaaataattattgatttgtagggcttaagaatgccaatttaatttgtcctcagatatttctctcacacttttttttttttttgcctctctgtcacacatttttgcctaccaatgggttattttaacatttcgtagtgttcactcttgtatttacttatatattcttttggatatcacttttaatagttttcttggtggtcactgtaaatattaaaatatacaagcagtttatatcagttatcagtattttgcctgtttgaataaatatttgaaccttacttttctttggttattctactcccttaatttttaaatataagtgmatcagtaatattctctctgtatatcaaacacctcaatagtagatgttataatttgtgcttcaacaatcaagtatgctgtaagacagttatgagaaggatattctagttatctatatttttactaattcctgtattctagtcttctatcttttctggtttcaagccataatctcttatcatttctttatatttgaaaagcttcctttagccatttttcaagatatatgtctgctgccaacaaattctctaactcttccttcatttaaaaatgtaattgttttattctttcttgaagaatagtttaattggg

SEQ ID NO: 137482 - DNA, 654 bp, Homo sapiens
tgtcattaaattttttctatgaatacttgaaaatgttaggccatgttcttccagcaccatggtttcacaagagaaatctaagctcattcaaattgatatcctcttataagtagtgtcatttctccctgagtgcattaaaattttagaattatgttggcatggatttctgtgggtttgtcctatgtgggagttgctcagttttggtgatgtattagtttatgttttctggcacaaatgggaaaatttcaacttttttttaatacattttgtactccattctttctccttctgatactctgatgatataaatttagatattttcttaatttatcataagtcccttataggtgatgttatttttaatgatattttattcctgttgttaagattgagtaaattctatttatttgtctttatgttttctgattctattgtctctaacattgagcccctccattgagttttcatttcagttaatgtatttttttaaattctgacatctatcccattttttamaactttagtctatatgctgaaaattttttaattgtttcaagaaaatcagtaattttttgttgaataatgttatggtggatttttagaaaactttgtcaaatactttcaattcatctgtactgacacaattgtcttgtc

SEQ ID NO: 137483 - DNA, 654 bp, Homo sapiens
tgtcattaaattttttctatgaatacttgaaaatgttaggccatgttcttccagcaccatggtttcacaagagaaatctaagctcattcaaattgatatcctcttataagtagtgtcatttctccctgagtgcattaaaattttagaattatgttggcatggatttctgtgggtttgtcctatgtgggagttgctcagttttggtgatgtattagtttatgttttctggcacaaatgggaaaatttcaacttttttttaatacattttgtactccattctttctccttctgatactctgatgatataaatttagatattttcttaatttatcataagtcccttataggtgatgttatttttaatgatattttattcctgttgttaagattgagtaaattctatttatttgtctttatgttttctgattctattgtctctaacattgagcccctccattgagttttcatttcagttaatgtatttttttaaattctgacatctatcccattttttaaaactttrgtctatatgctgaaaattttttaattgtttcaagaaaatcagtaattttttgttgaataatgttatggtggatttttagaaaactttgtcaaatactttcaattcatctgtactgacacaattgtcttgtc

SEQ ID NO: 137484 - DNA, 624 bp, Homo sapiens
attatgtgagacaatttctcttaataaatcaatcaatctctctctctcwcacacacacacacatacacaccacacactcctttatctatctggatctctctctcattctctccctccctctgtatatatcctgttggttctatttctctggagaagtctgaataatacaatcctgaaccatacatgctattggggtgtgtgtgtgtgtgtgtgtgtgtgtgtgtctgcctgtgtatgggcttgtggtttaaatattattattttttggtttattggaagtgcttctttttatcaaatactcccctttttttgtgtgtgttcatttgcactgtaaaaattttttcatagattgtaatttgatgaggaacttagtccattttgagcacacaataaatatttaataaaatacttggagcaaaaataaaatttacatatttttgaatgctccttttatgtccatagttgtatagacaatgattaattcatcaagattataagaagtaacttgtcacctgagaggtagttctggacatataatttatatgttttttccatagtgataagaaatttttagtttactgagaacattctatcacttgaagtcttgggatgggtcatctgact

SEQ ID NO: 137485 - DNA, 479 bp, Homo sapiens
gtattaaaaaatcattcaccgtgatcatgtaggattcatccctgggatgcaagcatggttcaacatatacaaatcaataaatgtgatacctcacattaacagaatgaaggacaaatactgtatgatcatctcaacaaatgcagaaaaggcatttgatgaaattcaacattccttcaccataaaaagtctcaacaaattaggcatagatggaatgtacctcaacataataaagkctgtatatgacaaacccacagccaatacactgaacaaggaaaagttgaaagctttttttctaagatctggaatgagataaggatgtccattttccctactcttattaaacattgtactagaagttctagccagagaaattaggcaagataaagaaataaaaagctctaaatgggaaagaagaagtgaaactgtccctctttgcagatgacatgatcttatgtatagagaagaccgtagatgccact

SEQ ID NO: 137486 - DNA, 587 bp, Homo sapiens
actcatgtaaaatatttgaatgtttttctgtgtttttaaattttaccttttctaataacttgtctatgtaagcgttttgtccatttttctctatgcaccataaaatgtttttgtcrtattttgtattcgttctttatatgttaaacgatattaatctttgtctgtctgtagatatttgtccccaggctgcattttaactttggttgttgtttcgacagaaagaaacgttttaaaaaaatgtgttgtataatgtttgttttgtgtatgatttattctattaagaaaaacttaaaagtaattatgctggggtgaatgggtgtgaatgaggagaatcttcttgttttatggctttaccaatatatacttttctaattctttaatccatttggagttaaagttatgttggtgtgtagtatgaattaagctagaaattgattttctcttctaatttgctaaccaactgtcctaatgttatctgttgaataattcatccattccccatttatccaagatgtcttttttatcataaattaagtttttatacattccaaggctatctgttctgttctattgatcttcctgtccat

SEQ ID NO: 137487 - DNA, 587 bp, Homo sapiens
actcatgtaaaatatttgaatgtttttctgtgtttttaaattttaccttttctaataacttgtctatgtaagcgttttgtccatttttctctatgcaccataaaatgtttttgtcgtattttgtattcgttctttatatgttaaacgatattaatctttgtctgtctgtagatatttgtccccaggctgcattttaactttggttgttgtttygacagaaagaaacgttttaaaaaaatgtgttgtataatgtttgttttgtgtatgatttattctattaagaaaaacttaaaagtaattatgctggggtgaatgggtgtgaatgaggagaatcttcttgttttatggctttaccaatatatacttttctaattctttaatccatttggagttaaagttatgttggtgtgtagtatgaattaagctagaaattgattttctcttctaatttgctaaccaactgtcctaatgttatctgttgaataattcatccattccccatttatccaagatgtcttttttatcataaattaagtttttatacattccaaggctatctgttctgttctattgatcttcctgtccat

SEQ ID NO: 137488 - DNA, 631 bp, Homo sapiens
taataacgtcaagggctttccatctaccaagcaccattctaataccttaactcatttacttctcaaaaatgccctatgcagtaggtactaatattaaacactccaccttttttttttctttgacagagaagggaactaaggcactgaacaggtaagtaacttgcccaaggtcacatagctgataaatggtgaggcccacttggattggtaggatgaggttagatttacaagacccttaatactggatgaaaagsgggagtgacggtgggcggcagacgattccccatccctttgcttgctccctggccacctctcaggtgttctgttgttaaacacctctgctcacagatatttagaggaaggcaggaaacaaaaaagttctgtttgtctttgaggagcaacttaccaggcaaggaaatagagagtcattttgctaaaagaagatgccggggtgaacagcggatttccttaatgtgagctcgcccagtttttcattagcaggaatgattgaaagccagatggagtccttatgcccaataaatgatgcttcctcaagctcaccaagctgggggtagtgtgttaacgtgtttggaaaagcacagttcacagggtatgcccatggaggaagcag

SEQ ID NO: 137489 - DNA, 631 bp, Homo sapiens
taataacgtcaagggctttccatctaccaagcaccattctaataccttaactcatttacttctcaaaaatgccctatgcagtaggtactaatattaaacactccaccttttttttttctttgacagagaagggaactaaggcactgaacaggtaagtaacttgcccaaggtcacatagctgataaatggtgaggcccacttggattggtaggatgaggttagatttacaagacccttaatactggatgaaaaggkggagtgacggtgggcggcagacgattccccatccctttgcttgctccctggccacctctcaggtgttctgttgttaaacacctctgctcacagatatttagaggaaggcaggaaacaaaaaagttctgtttgtctttgaggagcaacttaccaggcaaggaaatagagagtcattttgctaaaagaagatgccggggtgaacagcggatttccttaatgtgagctcgcccagtttttcattagcaggaatgattgaaagccagatggagtccttatgcccaataaatgatgcttcctcaagctcaccaagctgggggtagtgtgttaacgtgtttggaaaagcacagttcacagggtatgcccatggaggaagcag

SEQ ID NO: 137490 - DNA, 631 bp, Homo sapiens
taataacgtcaagggctttccatctaccaagcaccattctaataccttaactcatttacttctcaaaaatgccctatgcagtaggtactaatattaaacactccaccttttttttttctttgacagagaagggaactaaggcactgaacaggtaagtaacttgcccaaggtcacatagctgataaatggtgaggcccacttggattggtaggatgaggttagatttacaagacccttaatactggatgaaaagggggagtgacggtgggcggcagacgattccccatccctttgcttgctccctggccacctctcaggtgttctgttgttaaacacctctgctcacagatatttagaggaagrcaggaaacaaaaaagttctgtttgtctttgaggagcaacttaccaggcaaggaaatagagagtcattttgctaaaagaagatgccggggtgaacagcggatttccttaatgtgagctcgcccagtttttcattagcaggaatgattgaaagccagatggagtccttatgcccaataaatgatgcttcctcaagctcaccaagctgggggtagtgtgttaacgtgtttggaaaagcacagttcacagggtatgcccatggaggaagcag

SEQ ID NO: 137491 - DNA, 631 bp, Homo sapiens
taataacgtcaagggctttccatctaccaagcaccattctaataccttaactcatttacttctcaaaaatgccctatgcagtaggtactaatattaaacactccaccttttttttttctttgacagagaagggaactaaggcactgaacaggtaagtaacttgcccaaggtcacatagctgataaatggtgaggcccacttggattggtaggatgaggttagatttacaagacccttaatactggatgaaaagggggagtgacggtgggcggcagacgattccccatccctttgcttgctccctggccacctctcaggtgttctgttgttaaacacctctgctcacagatatttagaggaaggcaggaaacaaaaaagttctgtttgtctttgaggagcaacttaccaggcaaggaaatagagastcattttgctaaaagaagatgccggggtgaacagcggatttccttaatgtgagctcgcccagtttttcattagcaggaatgattgaaagccagatggagtccttatgcccaataaatgatgcttcctcaagctcaccaagctgggggtagtgtgttaacgtgtttggaaaagcacagttcacagggtatgcccatggaggaagcag

SEQ ID NO: 137492 - DNA, 469 bp, Homo sapiens
ttcataatacctactacaaaggttttgtgtgataaataaatgagaaactatgatgacggaagatatacctgcaaaagtacctaaacatttggtacataatgggcattccaatgttaatgcatattaattagattcattgtggtctatagagtttatagagtggtagagatgttaacttttctatatttattgtaaccccaaatattgacaacattgacataaatgtataattgagcttaggcatccatgaaagtggaaatgaraacaatttcatttccttaatttcatattatgaattattagagtttatttcctcaaatgaggacttttggtgtttatattagtcataaagttattgatattgatgaaagagttggagtcagtgttgagtttaataaaaacacccgaaccttggttttggactttgtacaaaatcgagaagaaaggatcaggccactatagtagtaat

SEQ ID NO: 137493 - DNA, 645 bp, Homo sapiens
caagctgaactttgatgcagctgtaagagtgcttgatataaggctgttggagaataagttgctttcattctgctgaaccataaaggactcatcactgaggacacaaaggtgaaggcccagcagccaaatgtgtgaaagttagagctagaaaactgagtttcaaaatgctcacatcaacattcagaatgttaacttcttccctactcctcttcctctaggattgtgtcagtcatagactaactgctggaataagccgttgcaaatgtctggttatttctcactcatgtctgagtttaacgcagattggtgggagagtgggaaagggagggaaaggagcctgctctaagcagtcattcaaggatccaggattcctctgtcttgtggccccaccatatccaagacasggagtcaaacttttttgtactatggacctatttaacagcctgatgaagcttaaggacctccctcagaatagtatatttaaatgtataacatgaattacttggcactacaaaaccaataatattcaaatattgttatctaaatatttaagaaattgtgatataggtgcttccttattagaataagatccagaggcaagtgtaagtaataaccacagtgtcccagtagtgatgatcacacagc

SEQ ID NO: 137494 - DNA, 587 bp, Homo sapiens
cattgtgattgcatgctcagagcatcattcagcatctctgaaaagtagcacttgaaaaagtgtctttacatgatgtctaagaaaagtagaataaaacaccttctgaaggtcattgatcatgttacttgggggaaaagctctaataactggaacttgtcaggcaggatgaagcactagcctcctttggcatcaagttcataagagatggtgaggcggtggatatataattgaggcaaaaggaataacaggtaactccatcctgttttaaaagccatagataactgacatgggacttgattgaaaaaaaatcgaatactgcacggcagacttccctagctactgtaagactataccattaccaaaattgtgaatatatatttcttcattttcccacaacttaaaatggatcgttaagtayttataaaggggaaaaataataaaaaatttagttgaatatttgtcaactaaagcagtgatttatttcattctatctgagaacagctttttgaaacagagatatcattttagttgtgttgatcttgccctgctcttgttaatgccatttgggtagatccataagtagtgat

SEQ ID NO: 137495 - DNA, 386 bp, Homo sapiens
  misc_feature (1)...(386): n = A,T,C or G
atgttttttttttctttcagtcattcattgaacacactaaatgagccccagtggagtcaatattgaaactgcacaataaccgtgtacactttggatctgtcctctttctaggatggtccatggtcccatgtcactgtgatgacctacttcagagtgctgctggcatcttagaggacaggttttagtaactagcaaagtcatggaccaataggaaggcctgagaggaatgtgtaagaaaagcaatagaagaatggaacttggtgggccatgagtacaaacatctcatttttttaaaacaactaaaaaaggaggcagggcacagggatgagattgatcacttttcntggactacnacgtgcaygtacttcacagcattgtgctataga

SEQ ID NO: 137496 - DNA, 549 bp, Homo sapiens
tagactttttgataagaacttttctttttcccacttaggttttcaaacaatagcagatttcatagttttaatatgaacaaagtctgctcgatccttcaaagttacattaaaaagacaatgctgatctacctaagtttgtaaacaggtaattttagaaacattatggtagctgtaaaatattttttcaattgtttttatcattgctatagttttggctgattagtcaataacttagcaaaccttgaggttcacaaagttgtaaaattctgaattgaggcttcaggaaatttatttggttttcatcagcatacaartagataattgctcgttttgggacagaaatactttacaactaaagtactttccctcggaggaaatcgtactgtcatttgtttttattttcaaaatgaaaacaaatggcactataattcctaagggcaaaaatgacttcagtctatttcttttcctatacactctcatttattcatttttagttagatggaatatagatatagtccccacccaccccccatccccatgacttccact

SEQ ID NO: 137497 - DNA, 634 bp, Homo sapiens
tgtgttgcctccttctcatccacttcaaaactagaaaaatatctattatataaaggtataagtctgagccaggcagactatccagagataaaatatataagctttagggaggctgaggtgggcggatcgcttgaggccaggagttcaagaccagcctggctaacatgatgaaaccccatctgtactaaaaatacaaaaattggctgggcatggtggcacacacctgtaatcccagcactagggaggctgaggcacaagaatcacttgaacccagaggtggaggttgtagtgagctgagatcacgccactgcatgccagcctgggtgacagagcaagactctgtctcgaaaaaatatatatatatacgtgtgtgtgtgtgtgtgtgtgtgtgtgtgtgtgtgtgtgtgtatatataatagatatataagctttagacttatatatgtaagtttaacatatatataagctttatatatatgtataataaattatatatgtaatatgtatataaagcttatatatatatataagctttaactataccaagtatatcctttggggtctwagctctattccatatagctgaacttgccatatctattaatttacagatatatgacattggtgcaaaagg

SEQ ID NO: 137498 - DNA, 435 bp, Homo sapiens
ggctctgcagccatcgacctgggttctgaggagctcgatctkgtctttctacttctaaaaggttgggatgaaggaccctggccacagaagtaaagccagaattatccttgcttcttgctgtgtatttcaggactcctccattgctcttgctgttcattcaacaaacattgagcatctactttgagcctgatgcatgtctaagcactgaggaaataacaatgaaaaactgacaaaaatccttgctctcgtggagttttccttctccaaggggagtcagtatgaagaaaaacatatactatatgaaatggtgataatgctgtggagaaaaactaagcactgaaggggagaagtttgcagtttaaaatagggtggccaggccgggtgcgatggttcacgcctgtaatcccaggcatggtgatttgggaggccgagcgg

SEQ ID NO: 137499 - DNA, 435 bp, Homo sapiens
ggctctgcagccatcgacctgggttctgaggagctcgatcttgtctttctacttctaaaaggttgggatgaaggaccctggccacagaagtaaagccagaattatccttgcttcttgctgtgtatttcaggactcctccattgctcttgctgttcattcaacaaacattgagcatctactttgagcctgatgcatgtctaagcactgaggaaataacaatgaaaaactgwcaaaaatccttgctctcgtggagttttccttctccaaggggagtcagtatgaagaaaaacatatactatatgaaatggtgataatgctgtggagaaaaactaagcactgaaggggagaagtttgcagtttaaaatagggtggccaggccgggtgcgatggttcacgcctgtaatcccaggcatggtgatttgggaggccgagcgg

SEQ ID NO: 137500 - DNA, 354 bp, Homo sapiens
cgctttaagctgtgtaatgctaatcatctctgagtgagcagttcatctctccagtaaattgcgtattgcagtaaaaagttctctctcatggttctcacgtattttccatcatgtttagtgcaatactgcaaaactttaataacactatggcatccatacgaagcaccactggtgatgctggaagtgttcccatgaagcaaagtcatgacattacaagaaaaagttgaactgcttgatatgtaccatagactgaggcctgcmgctgaggttgcctggtatttcagacagacaattcatcttgtaaacagacaatgtaaacttatggtatggacatagtacattactgtgaatgta

SEQ ID NO: 137501 - DNA, 661 bp, Homo sapiens
agaatgtgaactaaggtttaattttataccgtcagattgtataaccaaagtatattccattattccatactgctatcccaagactaatttctaagcaagttaaaatattattaaagttttggtaaaaatgaggagaaaactgtctgaagccaagacaaatatgcttttatcagtggattatgttaaagttttcctctttcttttgtaagaagtgctaaacatcaggcatgtaagacgtgtgcttattttcccctcttttatggtgggagcttaataaaagaacacctttagaaaagaaaataattatatgtaacaaaatatagaaccagattctcctggcaattaatcacctaatgcmgacctataagctgtttctgacagatccaaaggttttgcttgaattgttgagtaagatgtgcctgggctggcttatgagaagagattctatgcttaaagtcttggaaagtattttcacatatatttacatatactgaggtatatatgtatacataaacactgcaaatggatttctgcattatacacacacacacacacacacatacacccatgtatgaaaatgcagaactcatttattattgctcaaaaatgtagaaagaaataaaagaggccttcctttccagcaacagggagctatttatca

SEQ ID NO: 137502 - DNA, 405 bp, Homo sapiens
agatacagttgtctcctccagctgctgtaccagtttagactacatcgtcacctacctcttcaagcacatagcaaaagagggcaagaagccacttcgatgcagagaggctacccaggctggtcagagactattacattttatgcagcaaaacccagatgtcctgcagcaggtaactggtggttgatcacctggcttaagaaacaagtgttcccagaagccatacctggcccygaatttatcttagagcagctggtcttgccaagactttttatactggtaaaaaatatatatatatattgtctgggagtattttccctgaacgtggagggaaaacacaggccttaggattacccaccctcaagaaatacctgggttgttcatctcacctcagtggagctagaattc

SEQ ID NO: 137503 - DNA, 501 bp, Homo sapiens
tagttaaagttctactgattactaagagattcttatacatatatgctgtttatttcctttaaataagagaggaaataaaaactaatcactggctacaggcagaggaagcagggcagtgtggtccaaacaggaaacactgctgagcaaaacaatgatgtgggttgttgaacccctgtccaaagaaggctggsttggtgagtataagagaaaggctttggaaggagaggcataaacagcgagtaactcttccatgttacctcctgtgccaggccttttaccagaatagctcaattagccttcttaatcccaactaggcagataagtcagtaggtatttagtagtcctaattttatacaaaagaaaactagccacaaagaggtatatatagtattttagctgaaggtcatgaagtcggtaagtattggtaacaggattagtactgagatcttgcaaatctgaaaactgtgctttttctaatataccatgctgtttttgaaaaaa

SEQ ID NO: 137504 - DNA, 501 bp, Homo sapiens
tagttaaagttctactgattactaagagattcttatacatatatgctgtttatttcctttaaataagagaggaaataaaaactaatcactggctacaggcagaggaagcagggcagtgtggtccaaacaggaaacactgctgagcaaaacaatgatgtgggttgttgaacccctgtccaaagaaggctgggttggtgagtataagagaaaggctttggaaggagaggcataaacagcgagtaactmttccatgttacctcctgtgccaggccttttaccagaatagctcaattagccttcttaatcccaactaggcagataagtcagtaggtatttagtagtcctaattttatacaaaagaaaactagccacaaagaggtatatatagtattttagctgaaggtcatgaagtcggtaagtattggtaacaggattagtactgagatcttgcaaatctgaaaactgtgctttttctaatataccatgctgtttttgaaaaaa

SEQ ID NO: 137505 - DNA, 437 bp, Homo sapiens
gtttgactctgcaaatttcttctactgtggattttccttctacaatattaatagttacaacagattgctgtcttcccacagcagggactttggcaccaaaaagagctatgatggcagatgtactctcacctctcccacatgtagcacttatttcatgaggaaagttytaggattcaaaattaaagaagcaatgggttttgaagaatgagcctcataccagctgcttagcaacaactcaccattctttattctttataatcctaatgaaaaagaattagtactccatttaagactgctattaatacatgataatgttgctttcccttgggatagcccatattatacagtgctggcatggtaacactctttggtgcttgagtcgtctctatacatttgtggtcaatggctgtttataggctgggtgcatagatggagtt

SEQ ID NO: 137506 - DNA, 493 bp, Homo sapiens
tatgcttcatgaagttctcatgctatgtttttcagctccaacaggtcatttatwttcccctctaaactggttattctagttagctgttcctgtaaccttttatcaaggttcttaacttccttatattggaatagaacatgcttatttagcttagaggagtttgttattacccaccttctgaagcctacttctgtcaatttgtcaatctcattctccatccagttttgtgcccttgctggagaggagttgcaatcatttggaggagaagaggcattctgggttttggaattttcagggtttttgtgctgttttttcctcactttcgtggatttatctacttttgatctttgagaatggcgacctttggattgagtttttgtgtggatttgggttttgagtttttgttgatgttgttgttgttgctttctgtttgttagtttttcttctagtagtcagggctttcttctgcagatctgctgtagtttcctggagg

SEQ ID NO: 137507 - DNA, 493 bp, Homo sapiens
tatgcttcatgaagttctcatgctatgtttttcagctccaacaggtcatttattttcccctctaaactggttattctagttagctgttcctgtaaccttttatcaaggttcttaacttccttatattggaatagaacatgcttatttagcttagaggartttgttattacccaccttctgaagcctacttctgtcaatttgtcaatctcattctccatccagttttgtgcccttgctggagaggagttgcaatcatttggaggagaagaggcattctgggttttggaattttcagggtttttgtgctgttttttcctcactttcgtggatttatctacttttgatctttgagaatggcgacctttggattgagtttttgtgtggatttgggttttgagtttttgttgatgttgttgttgttgctttctgtttgttagtttttcttctagtagtcagggctttcttctgcagatctgctgtagtttcctggagg

SEQ ID NO: 137508 - DNA, 493 bp, Homo sapiens
tatgcttcatgaagttctcatgctatgtttttcagctccaacaggtcatttattttcccctctaaactggttattctagttagctgttcctgtaaccttttatcaaggttcttaacttccttatattggaatagaacatgcttatttagcttagaggagtttgttattacccaccttctgaagcctacttctgtcaatttgtcaatctcattctccatccagttttgtgcccttgctggagaggagttgcaatcatttggaggagaagaggcattctgggttttggaattttcagggtttttgtgctgttttttcctcactttcgtggatttatctacttttgatctttgagaatggygacctttggattgagtttttgtgtggatttgggttttgagtttttgttgatgttgttgttgttgctttctgtttgttagtttttcttctagtagtcagggctttcttctgcagatctgctgtagtttcctggagg

SEQ ID NO: 137509 - DNA, 603 bp, Homo sapiens
gtcatggtattgataattatgtaagatatacatatgtatcaccatcttataaatgagaataagaaagtaacaaaactagggaagatttttttccatgaaagagataatggtccagtgctggatgcaccccctctgcttagcaggtgtgygataactcttctaagacaaatgactgatgatgattgattatataaattagattaggacgccacttatttaacccagtaacactgttttacagatgtggaagacaggatctgaaggtattaaagaacttggtctaaggacacacagttagagccaacagtagtctttttcctttaacttccaccctttatgatttggtccctgcacaccttttatgtttattctaatgtttcccacttctacccattatcctgttgttgtccaccacatctccagataaatcagacttctactttttggagccctgtgatttccatacccatgtcttcctaactgtagcagataccttcacctagaaaacatctgccctcacttttccttttggaaacctaaccctgaagctgatcagatcccaacatctatggctggttggctgtggtgctcagctccttgctc

SEQ ID NO: 137510 - DNA, 603 bp, Homo sapiens
gtcatggtattgataattatgtaagatatacatatgtatcaccatcttataaatgagaataagaaagtaacaaaactagggaagatttttttccatgaaagagataatggtccagtgctggatgcaccccctctgcttagcaggtgtgtgataactcttctaagacaaatgactgatgatgattgattatataaattagattaggacgccacttatttaacccagtaacactgttttacagatgtggaagacaggatctgaaggtattaaagaacttggtctaaggacacacagttagagccaacagtagtctttttcctttaacttccaccctttatgatttggtccctgcacaccttttatgtttattctaatgtttcccacttctacccattatcctgtkgttgtccaccacatctccagataaatcagacttctactttttggagccctgtgatttccatacccatgtcttcctaactgtagcagataccttcacctagaaaacatctgccctcacttttccttttggaaacctaaccctgaagctgatcagatcccaacatctatggctggttggctgtggtgctcagctccttgctc

SEQ ID NO: 137511 - DNA, 603 bp, Homo sapiens
gtcatggtattgataattatgtaagatatacatatgtatcaccatcttataaatgagaataagaaagtaacaaaactagggaagatttttttccatgaaagagataatggtccagtgctggatgcaccccctctgcttagcaggtgtgtgataactcttctaagacaaatgactgatgatgattgattatataaattagattaggacgccacttatttaacccagtaacactgttttacagatgtggaagacaggatctgaaggtattaaagaacttggtctaaggacacacagttagagccaacagtagtctttttcctttaacttccaccctttatgatttggtccctgcacaccttttatgtttattctaatgtttcccacttctacccattatcctgttgttgtccaccacatctccagataaaycagacttctactttttggagccctgtgatttccatacccatgtcttcctaactgtagcagataccttcacctagaaaacatctgccctcacttttccttttggaaacctaaccctgaagctgatcagatcccaacatctatggctggttggctgtggtgctcagctccttgctc

SEQ ID NO: 137512 - DNA, 568 bp, Homo sapiens
tgtttttagtagcagggagtccaatcagtagaatgctcctgcaatggtttggggattttctcaggaggttagaggcacagtaatttcctaatagtaaagagacagagatgttaagtgtttttaggattgcctaagacagtcacagtgaacaagtataattaaagactgattctttgatcaataattataataaattagagtaacaatgttttaaataattgtttcttttgagcatttgcattattttgaaaaatcatttcttgtcttccttggtaataaaaaagaacattagtaaaattgcaatgttttgccagtcrttttaaaaagtgaattatagctctgccatctccgaggtattttcagccaatttctacaatttatttgggaagcataaaccaaaaaaaaaaaaaagccatattttcaactacacaatcaggaaaggaagatcacttaataacatttttctccctcaatcagtgctaggctacatcattactcattggtaataagtggcatgttcctgttttttgcctctatctttattttcttgtttgttacaaacagagcg

SEQ ID NO: 137513 - DNA, 620 bp, Homo sapiens
  misc_feature (1)...(620): n = A,T,C or G
gatatgcagttttgtctgttttaaaaattttgcctaattgccttagcagaaaccataagttgtgacangnctngttccagnnaattcaatttctatttcaaacattatcactattctttctgttttagttaaaatattttggctatttaccaatcttatggataaaataaagggaaacataaggcaaacaattcaactgtggaagaaattgaactgaaaatgtgtaacctcctaggttcacttctttcttagctattctcatagtgtttctcatcacaggtgagttcttaacatagattttcttttagtcaaaatatggttttatttcaagaatctcaaaggaattatcccaaaccctttgatggcagtgaagacagcaaaaaattgttcatcataacagtttcacagaactcaatcctaagtaccttaatgaagaakagaatttaaagattttttttcagtctttgctgggaaaacatcccacacactgacatgactgggtagagggaattactgtgattttgcttctcactgtaccaaagccttatttcttccaagacaagcaaaggaacagaggaataaagcaacattggtaaatagattgaagagataaatgctga

SEQ ID NO: 137514 - DNA, 498 bp, Homo sapiens
cctggtgaacccgagctatacaaggctgactgatgtgtagggctggccagattactgggatgataggggatttgcacagaaatgacagtgggggttgctgatattggcagagtacctcctgggcaatgggaggagggaggctgcctcttccagccagggaaggggagggaaggatgggacgaactgtaccttcaggaaaacagggtggaggtttcattaagrgcagaagagaaatcaccaactccctcaccagataatggttttgacatttgttttgaatttgcccaactgacttgcccttgtgactgaagccaagaatcacagactcttggaagtgagcagaactagcaaagcaaatcacaaacaatttgtttagcatttcctctgtgattcccccatatcccgacaactctcctggagtactccccatacactgcaggaggcttatctccttataaagtagcccctagagggaagctgtgctttttaggaaacact

SEQ ID NO: 137515 - DNA, 426 bp, Homo sapiens
ttattcattcaacaaacttctattaaatgtcaggcactgttctacatgttaaagtgtcatggggagcaaatcagataaagtcacttccttaatatcgtatgcaattttactgaggggaaacagctaataaaaaagaaaataatttagagcagtgataagcattagagaaaaaaatcaagtggggaatgaaggaagggatgttgtatttagcctcgtcgagggaggcctygctaagccagggataaatcacagataataaaaaaaagccagccatgcaaaggtaaaattggatgtaagagctataggaagggaaccgacttggagtgttcaggggcaggatggaagccagcacagccgggcacagggaggtgaggctagaaactcaggcagaggccaaagcaggtggctccttggaagacagagtgg

SEQ ID NO: 137516 - DNA, 598 bp, Homo sapiens
atcattccttctgttgtgagagcacttaaaatctatttcttagcaattttcaagaatatagtaagtttttactaactaaaatcaccatgttgtatgatagatctctttgtcttattcctctggtctaactaaaattttgtatcctttgatcaacatctctccaacctactccccatacacgcctaccaactctagccccaaatcactattctattctctacttctatgagttcaactattttagattccacatataagttagatcatgtggtacctgtctttctgtgcctggcttattctctaaacgtagtgtagtcaaaatttatccatgtccaaaattttcttctttttaaggctctttttaaagaccraatagtatttcagacacacgcctacacaacacacacacacacacacacacacacagaggaacttcaaaaaattagtgaaaaattaaattaaaggataaaaattaaaaatataaactttgtttctcaatgtaagctccatcaagttcaattaactttgtaattgatgacatcagccattaagtcaatttctaaagaactgaaggtcctggaaatttaatcatgtcagt

SEQ ID NO: 137517 - DNA, 605 bp, Homo sapiens
ctcccttttcgtagacagttgcagcatgagaagctgaaggaattttatgaagtagacattggagcctcccagtgattgccccttcggggttttgcagcaggcatatgctatttgcttggtccagagtgaagcgcctctacttttctggagaactgttccttcccagctacaataaggaggctcaaggcagagcgggtgtcattcatttgtttaatgtagttgctgtcttggtatccatttttagtcctaataaaagttatttgaaacccggttgtaccatgtgtcactttgggcctaattaaaacttcccctacccatggggttgtttgcagcataacccacttgttcctcatcccactgaccaaaaatctaacacacccacagctactgaycatgagaaaaccaatgatcaacaccagagtcatggaaatgagctccccttcacgcatgatttctttaaaggagccaacctgcagcttccctgcaggagagtctgaaaaactcccaggaatttaacaaaggcagagtctcacaggcctcaggcctctctcttccctgctgtctgagcttcctgcctcctccagacctcctgctgtcctctcagc

SEQ ID NO: 137518 - DNA, 477 bp, Homo sapiens
gccttctttctgggcatgcagcatgactgcatttcccagaattctttgcagtgggctgtgatcatgtgactgagctctagccaatgaaatgagacagaagtgatgagtacctcttcaaggactttcataataaacttccatgctgccttcacattccctctcttctccttctctgttagttgaataaaaacgagccagataaaaatctctgagaccctagcagatggcagagccacaggatggcagaaaatgtggtccttgggtcaccgtgtgggaggcactcaatcacttctgtctcattccgttggatagaactcagtcrcataaccacagcccacagcaagggagtctgggaaactggatcatgagtcactgtgtgaaaggctgccccataatcgtactcactgaataaaaaatgactttggattgtgtaaattcactgagattttaggattttttttttaaacagcagtcaaa

SEQ ID NO: 137519 - DNA, 560 bp, Homo sapiens
tattttaaaaagcattctgttgttttaaggagctgacctctcttccacagttcttgggaccaactttcttctttctacatcagtaaatacttttccctctacttggtgttccagaaatattggttgaaatatcttgtttctgaattgtccctcctttctttctatttttaaaattcatttttctctctttaggggaagaggtggggagacagagagacagaggggggaggaatatgaatataatatatgaatgtgtttactctgctcaaaaaccttcagtagcagatttaatcaatggaatgttgatgaatgaatgggtcccttagggagccatgtctttttctccttccatgggaagacagctctcggttttcatctgtttttgaagggggattatgacccatggcagtgtcagctagccrtaccccaaagcctgtgcctccttctgtggtgtgaagctggctggccagggatatgtttccctttacctccagatgtggccatgtgaaaagttttttggcagtgctgcatgagcagagtaatgatgtaggtggacaggt

SEQ ID NO: 137520 - DNA, 546 bp, Homo sapiens
tctcactcataggtgggaattgaacaatgagaacacttggacacagggcagggaacatcacacactgggccctgtcatagggttgggggggctgggggagggatagcattaggagatatacctaatgtaaatgacgagttaatgggtgcatcacaccaacatggcacakgtatacatatgtaacaaacctccatgttgtgcacttgtaccctagaacttataagtataataaaaacaacttataggtacaataaaaaatccactcagaaaacattttgtaagttttttaatgctttttggaggatttcaggctatgagggatggtaactttgcacactgcacagctgcctaccgtaaatatcttctcttttctttcttaacctgctttccttcacctttttctcccacccgccttcagagcaaacctgttctcctctttggtgcagagctcatttccactgttcctctccctcagcattaaggctgtacagctcccaccctcagcatctgaaggtatttccaacaaatgccacccttccttcccct

SEQ ID NO: 137521 - DNA, 529 bp, Homo sapiens
agtacaggtccaagtttggagctggtgatgaatgctgtcattttggtgtctgagtgggcctctggcctgactagcccacaggaagcaacaagtgggccaaagcaggggcccgaaaggctgggtttttggaagtggagaaccaagcaagcattacgggcaaggggtgttgtacatgcagtggtgttttatggagattgatagggtttagtgtgttgggtattcccagggggagagaragatggatgatgagagagacaggcttggaaccaaggtgctgtatggcataccccaggccagggactgccaggcgtgaggcttcccctcctcagccccatatgcaaccctggcacgtgttcccttggacttctcaatcctagcacagacactaatcaagttaggactagagttcctgaaagataaccttcatgggttatctttcatgggatctgcactttctttaaggggagagaatgctttcatgtcctccttcaattctcctgcttctggctttgaacttgagctgctcctt

SEQ ID NO: 137522 - DNA, 524 bp, Homo sapiens
tgtacatgcagtggtgttttatggagattgatagggtttagtgtgttgggtattcccagggggagagaaagatggatgatgagagagacaggcttggaaccaaggtgctgtatggcataccccaggccagggactgccaggcgtgaggcttcccctcctcagccccatatgcaaccctggcacgtgttcccttggacttctcaatcctagcacagacactaatcaagttaggactagagttcctgaaagataaccttcatgggttatctttcatgggatctgcactttctttaaggggagagaatgcttycatgtcctccttcaattctcctgcttctggctttgaacttgagctgctcctttctctaatagaacccaggaaaaggaacactttgatttttcatagcaggaggggcaggtccagcctgatttatttatttactttttcacatgaggggtgtgcttttttgccttgttttgaaatcaacaagaatgcacaacaaacccaagccttggagacagtg

SEQ ID NO: 137523 - DNA, 649 bp, Homo sapiens
ctaagttatattttaaagtggatagagtgaaaaagagaactcctgtttcccagagttatagcctgacccaaagcctgtggattgtgtgataacctctgaaatgtaataacccctgacacttgctttttaaaagagaaaattcacattctccttttctccccaccttcaggaaatatatatgtatggtttgctatgaaattacaagtggaaaagaagttttagatgacagattaactcttgggaaaatttttaaaaagcaactcttaaaatagtctttctggcaagctgagaatatagcctacttataaggccagtgaggaatatttttaaaaataatttcagcctttattttagattcagcgggtacatgtgcagattgttacataggtatactgcgtgatgctaaggttggggtatgatggatcccatcacccaggtagygagcacaggcccaatagggagtttctcaaccctttcccccaaccttgtattccccaatttctatgtcatttttatgtccgtgagtacccaggtttagctctcacttataagtgagaacgtgtggtattggttttctgtttactcgttaattgcttaggataatggcctctggctgcatccgtgttgctgcacagaacatgatttaatt

SEQ ID NO: 137524 - DNA, 615 bp, Homo sapiens
aagttaaccagccagtgtttctaagcttgcctttctaaattgcttactgctcagaagccatagccccaagagggttatgatttgggtatatctctctcaaacttggctgcaggcttttctgattcatgcagtgactcagcaggttagcagcaagaggtgagtgctgtagagtttgcttyttccctcatctcttgccattccccttcttttagtgttctccatagctatgagttcccaagcccttgaaagtgtgtctctcctcctgtctggtgaaagggactttaatggcacatccccaaaagtttgatatctgcccctatagtaagggggtcactgggaagtgtagagaacaaaacatgcctggatagctgctttagtggggggagaagaggtgctgctgcatgagggacatgtgttcttccagacattgttgaggtggaaaaaacatgaatgtttcctatggatgaggatcagacttgtcaggtaaataccactgttgatgagaaaagacaaactctataaaatatttgaggaggtttttactgagccaaatataagtgaccattgcccaggatacagcatcaagctgttctgagaacatgtggccaaggtgat

SEQ ID NO: 137525 - DNA, 615 bp, Homo sapiens
aagttaaccagccagtgtttctaagcttgcctttctaaattgcttactgctcagaagccatagccccaagagggttatgatttgggtatatctctctcaaacttggctgcaggcttttctgattcatgcagtgactcagcaggttagcagcaagaggtgagtgctgtagagtttgcttcttccctcatctcttgccattccccttcttttagtgttctccatagctatgagttcccaagcccttgaaagtgtgtctctcctcctgtctggtgaaagggactttaatggcacatccccaaaagtttgatatctgcccctatagtaagggggtcactggraagtgtagagaacaaaacatgcctggatagctgctttagtggggggagaagaggtgctgctgcatgagggacatgtgttcttccagacattgttgaggtggaaaaaacatgaatgtttcctatggatgaggatcagacttgtcaggtaaataccactgttgatgagaaaagacaaactctataaaatatttgaggaggtttttactgagccaaatataagtgaccattgcccaggatacagcatcaagctgttctgagaacatgtggccaaggtgat

SEQ ID NO: 137526 - DNA, 471 bp, Homo sapiens
cttttttttgtgtaaaattcccgattaaacggtgtaaattatgtttgcaaaaagaaggtgaattgctgaacaaacgtatgataattagccatggctgtgacttgccgatagttttgtttgtttgtttgttttgagatggaatctcactctgtcacccaggctggagtgcagtggcatgatctgcaagctcactgcaagctctgcctcctaggctaattttttgtatttttagtggagaccgggtttcactgtgttagccaggatggtctcgatctcctgacctcgtgatccgcccatctcagcctcccaaagtgctgggattacaggyatgagccaccacacccggccttgccgatagagttttaagtatctcaacctgcacggaagactgcatagattattttagaatctggaacaaataaaaagtcattcctctttgcaaagttattctgtgcataaaataaataaatg

SEQ ID NO: 137527 - DNA, 471 bp, Homo sapiens
cttttttttgtgtaaaattcccgattaaacggtgtaaattatgtttgcaaaaagaaggtgaattgctgaacaaacgtatgataattagccatggctgtgacttgccgatagttttgtttgtttgtttgttttgagatggaatctcactctgtcacccaggctggagtgcagtggcatgatctgcaagctcactgcaagctctgcctcctaggctaattttttgtatttttagtggagaccgggtttcactgtgttagccaggatggtctcgatctcctgacctcgtgatccgcccatctcagcctcccaaagtgctgggattacaggtatgagccaccacrcccggccttgccgatagagttttaagtatctcaacctgcacggaagactgcatagattattttagaatctggaacaaataaaaagtcattcctctttgcaaagttattctgtgcataaaataaataaatg

SEQ ID NO: 137528 - DNA, 479 bp, Homo sapiens
ctagcatggcctgtgctgctgttggtcctactgggaacgcaggtagagtctccatggtcaggatgccgtgwtctgttgtggtgctgaggcctgtaagcacttggctagaagttaggccagggaagctcacactgaccttggtatttgaaggtcccagaatgaggttgttgaggtagaacagagatgggagaacatgcccttggagctggactcaacaagaaggcccctctgggggaagctgaggttggacaggaagggcgtgtgccctcactgacttgctcacaggcttggggttcatctgttttggtttttgcttttttacattatattaacatggaaataaaaggtgttccctgggatgctcccggcttctctgctcagtagctttgtggctctgagtaaaatgaacttgcctgtgttgaaatatcctaatttttaaacttacttcatagggactgaggaattacgacttttatcaa

SEQ ID NO: 137529 - DNA, 477 bp, Homo sapiens
agcatggcctgtgctgctgttggtcctactgggaacgcaggtagagtctccatggtcaggatgccgtgttctgttgtggtgctgaggcctgtaagcacttggctagaagttaggccagggaagctcacactgaccttggtatttgaaggtcccagaatgaggttgttgaggtagaacagagatgggagaacatgcccttggagctggactcaacaagaaggcccctctgggggaagctgaggttggacaggaagggcgtgtgccctcactgacttgctcacaggcttggggttcatctgttttggtttttgcttttttacattatattaacatggaaataaaaggtgttccctgggatgctcccggcttctctgctcagtagctttgtggctctgagtaaaatgaacttgcctgtgttgaaatatcctaatttttaaacttacttcatagggrctgaggaattacgacttttatcaa

SEQ ID NO: 137530 - DNA, 620 bp, Homo sapiens
aaagttaaaataaaacatccaaatcatggcgtggtaagtacgatttgcaatatgggatgaatatttaaggtgaagcaaagtagctgtggctacttggggccaaaagcttcccagatgctcctgctctaagcacatgatgttttttggggaaagtggtagcaggtagarggtggcagaaagtgtgagaagcacttgttgtaggtgacccagacatgcctcttgaattgaattcggtgatctgcttcttcagctgctttcttgtccctgcccagcaggatgccaggaaacacatagccctgtagaaaatcactggagaagaggatgattggagttcttcatttcttaaaaaacagtttaggttttccctgtctgccctagggcccatgtcttgctggaaaatacgctacttagaaattaaggcctctgggttcaatttttggccccagtgttgacctctgtgtaagcctggcaggatgtctcatttctgggtcaccttttccttgccaacataatgaggtatgtagaccaaatcattgctaagagccttctaactctaagacactaggtttagtcagccaaaagcatgtgattttcccagatttcccaaactccttgtacct

SEQ ID NO: 137531 - DNA, 620 bp, Homo sapiens
aaagttaaaataaaacatccaaatcatggcgtggtaagtacgatttgcaatatgggatgaatatttaaggtgaagcaaagtagctgtggctacttggggccaaaagcttcccagatgctcctgctctaagcacatgatgttttttggggaaagtggtagcaggtagaaggtggcagaaagtgtgagaagcacttgttgtaggtgacccagacatgcctcttgaattgaattcggtgatctgcttcttcagctgctttcttgtccctgcccagcaggatgccaggaaacacatagccctgtagaaaatcactggagaagaggatgattggagttcttcatttcttaaaaaacagtttaggttttccctgtctgccctagggcccatgtcttgctggaaaataygctacttagaaattaaggcctctgggttcaatttttggccccagtgttgacctctgtgtaagcctggcaggatgtctcatttctgggtcaccttttccttgccaacataatgaggtatgtagaccaaatcattgctaagagccttctaactctaagacactaggtttagtcagccaaaagcatgtgattttcccagatttcccaaactccttgtacct

SEQ ID NO: 137532 - DNA, 614 bp, Homo sapiens
gggtaaactactaagaagagtgtttacacagataaaaagaaattgactaacattttgwgttttgacttcccaatctctttttttaaacattaatgatttcagagaggaatgtttggaagacacatcattgattatatgctgtacaaagtgatgctctttttattgtaaagcagtgagtcaatgaagatttactgggatctgccaagccaatattctagtggccaaatgtgcagacatttgcagaagcccactctacttccattggcccaggaagcctagcaaccaacggggagttagctgtaccctttgctgatatgcactagtggtatggaggacttattaagaaaaagagagagccttttataattgacaatagcgcttaccttttaaaatgttaaacatactataccatatttttctaagttcagtagtcttactttgggacacagaaatgcatcactatttaaaactcacctatccagcaaccttaactatctggaacatatatgagatccaggaagcaaggtaaataggtttttgagcaaaatagatataacaaaatctatttacctacaggtttggtaggaaattccttcagtcatcactcagaacct

SEQ ID NO: 137533 - DNA, 629 bp, Homo sapiens
tcaagttacagtgaaggatctgggagatgtgtgttcccatcccacaatttacagcctccagtgagagttgcccatgggacaattatttgcattagaacacaaagaacagctgggagaggaagaagaattatatctgggacagactcctgagcaaaggagaaaggggtcaagcccagtttctcagagagaacctccccagggggatcaggarcatacccagaagccagagaagatgctgggatgccatactggaaaccagttgaaacttggtgaggagagacatttctagggggcacctgcttgatgcctctcagctgcaccccaacttttctccaagtggaattataccaatccttgagagagagggtgattaaaaattgagactatataccatcctttctgtgctaattcaggagatgtaacactggaggggagggcctatctcctctcagtccgctaaatgtgaacttccccagcaataatgtcctcaccgagatagctttaagattaatccttagaacagaggagaccatggcagtagcagctcctgttcagaccctgcagagatggagtctggagcctacagcagccacagaaatacttgaaaagggatcaagaagagcgatgga

SEQ ID NO: 137534 - DNA, 629 bp, Homo sapiens
tcaagttacagtgaaggatctgggagatgtgtgttcccatcccacaatttacagcctccagtgagagttgcccatgggacaattatttgcattagaacacaaagaacagctgggagaggaagaagaattatatctgggacagactcctgagcaaaggagaaaggggtcaagcccagtttctcagagagaacctccccagggggatcaggaacatacccagaagccagagaagatgctgggatgccatactggaaaccagttgaaacttggtgaggagagacatttctagggggcacctgcttgatgcctctcagctgcaccccaacttttctccaagtggaattataccaatccttgagagagagggwgattaaaaattgagactatataccatcctttctgtgctaattcaggagatgtaacactggaggggagggcctatctcctctcagtccgctaaatgtgaacttccccagcaataatgtcctcaccgagatagctttaagattaatccttagaacagaggagaccatggcagtagcagctcctgttcagaccctgcagagatggagtctggagcctacagcagccacagaaatacttgaaaagggatcaagaagagcgatgga

SEQ ID NO: 137535 - DNA, 629 bp, Homo sapiens
tcaagttacagtgaaggatctgggagatgtgtgttcccatcccacaatttacagcctccagtgagagttgcccatgggacaattatttgcattagaacacaaagaacagctgggagaggaagaagaattatatctgggacagactcctgagcaaaggagaaaggggtcaagcccagtttctcagagagaacctccccagggggatcaggaacatacccagaagccagagaagatgctgggatgccatactggaaaccagttgaaacttggtgaggagagacatttctagggggcacctgcttgatgcctctcagctgcaccccaacttttctccaagtggaattataccaatccttgagagagagggtgattaaaaattgagactatatascatcctttctgtgctaattcaggagatgtaacactggaggggagggcctatctcctctcagtccgctaaatgtgaacttccccagcaataatgtcctcaccgagatagctttaagattaatccttagaacagaggagaccatggcagtagcagctcctgttcagaccctgcagagatggagtctggagcctacagcagccacagaaatacttgaaaagggatcaagaagagcgatgga

SEQ ID NO: 137536 - DNA, 629 bp, Homo sapiens
tcaagttacagtgaaggatctgggagatgtgtgttcccatcccacaatttacagcctccagtgagagttgcccatgggacaattatttgcattagaacacaaagaacagctgggagaggaagaagaattatatctgggacagactcctgagcaaaggagaaaggggtcaagcccagtttctcagagagaacctccccagggggatcaggaacatacccagaagccagagaagatgctgggatgccatactggaaaccagttgaaacttggtgaggagagacatttctagggggcacctgcttgatgcctctcagctgcaccccaacttttctccaagtggaattataccaatccttgagagagagggtgattaaaaattgagactatataccatcctttctgtgctaattcaggagatgtaacactggaggggagggcctatctcctctcagtccgctaartgtgaacttccccagcaataatgtcctcaccgagatagctttaagattaatccttagaacagaggagaccatggcagtagcagctcctgttcagaccctgcagagatggagtctggagcctacagcagccacagaaatacttgaaaagggatcaagaagagcgatgga

SEQ ID NO: 137537 - DNA, 524 bp, Homo sapiens
taaagaaaattccaacataatgattaaaaattacatagctgattatatrtacatgtgtagctaaatctattttttacatgaattttgcttcaataaaataatttgttaagcataccactgaatgtgactcataggtcagaaaatgatttgtccttagactttatgtactaatttttagttctgaaaaatgtagtcatcatatgtaaaagaaaaaatatattagcttttgaattagactgtccttaaggtagactggcccaaaattgacttcaagtggaccagattggtacaatgcagggctatatctgcagaatgtggcagaactcagatggtgaacaactggggtgctactgtcagggcaagactctgtaaaaccagcatgatgctggccattgagccattcctttctgccagtccttgccaaggtagattgcttccagttttgagagactggttagacttacaggtgtaaagtgatagtgaccacagctataaaaacaaaggaagtaccaggacaaggagtt

SEQ ID NO: 137538 - DNA, 560 bp, Homo sapiens
tgttagcataaacatgataggtgtttatgtttttcaaaagcaaaaatccgtatagttggtccagggctaatatatggtttaatagtgacagggcagtggtaacctgtcttcaagatggcccccaataattcctgcctccttctgttcatacatttgtgtagcccctctcacgatgtatgaaggtaaatacagacaaatatttttacttatattgtgtgatgattgattttatgtgtcaagctgggctaagggatgcctagatagctggtgaaacattatttctaggtgagtttgtgaggctgtttctgggaaggattagcactgaatcagcagattgagtgaggaagattgccctccccaatgtgggcagccatcatccagtccagtgagggyccactgggatacagcaaaatgggggagcaagggtggactccctctcacttttgagctgatatattcatctttttctcccctcagacattggagcagctcctggttcttaagcttttagactcagggacttaaactagcaccccctgccctccgacacctactccccc

SEQ ID NO: 137539 - DNA, 512 bp, Homo sapiens
agaaacccttttgtttaattaggtctcatttgtcaatttttcattttgttgcaattgctgttgaaaactttgtcattaattgtttcccaaggctgatgtccagaatggtgtttcctaggtcttcttctaggattcttacagtttgaagtcttacatttgaatgtttagacatctggagttaactttatatatggtaaaatgtaggaacccagtttcattctttggcatgtagccagccagtaatcacagcaacatttattgaatagagagtcctttcytcaatgcttatttttgtcaactttatagaagatcagatggctgtaggtttgtggttttgtttctgggttctctattctgttccattggagtacatgtactttcatactattaccatggtgttttggttactgtagctttatagtatagtttgaagtcacttaatttgatgcctctggctttgttatttttgcttagaattgttttggctatttgagctcttttgctttcatatg

SEQ ID NO: 137540 - DNA, 512 bp, Homo sapiens
agaaacccttttgtttaattaggtctcatttgtcaatttttcattttgttgcaattgctgttgaaaactttgtcattaattgtttcccaaggctgatgtccagaatggtgtttcctaggtcttcttctaggattcttacagtttgaagtcttacatttgaatgtttagacatctggagttaactttatatatggtaaaatgtaggaacccagtttcattctttggcatgtagccagccagtaatcacagcaacatttattgaatagagagtcctttcctcaatgcttatttttgtcaactttatagaagatcagatggctgtaggtttgtggttttgtttctgggttctctattmtgttccattggagtacatgtactttcatactattaccatggtgttttggttactgtagctttatagtatagtttgaagtcacttaatttgatgcctctggctttgttatttttgcttagaattgttttggctatttgagctcttttgctttcatatg

SEQ ID NO: 137541 - DNA, 512 bp, Homo sapiens
agaaacccttttgtttaattaggtctcatttgtcaatttttcattttgttgcaattgctgttgaaaactttgtcattaattgtttcccaaggctgatgtccagaatggtgtttcctaggtcttcttctaggattcttacagtttgaagtcttacatttgaatgtttagacatctggagttaactttatatatggtaaaatgtaggaacccagtttcattctttggcatgtagccagccagtaatcacagcaacatttattgaatagagagtcctttcctcaatgcttatttttgtcaactttatagaagatcagatggctgtaggtttgtggttttgtttctgggttctctattctgttccattggagtacrtgtactttcatactattaccatggtgttttggttactgtagctttatagtatagtttgaagtcacttaatttgatgcctctggctttgttatttttgcttagaattgttttggctatttgagctcttttgctttcatatg

SEQ ID NO: 137542 - DNA, 405 bp, Homo sapiens
tttgatagcagtaacattgaatttgtagattgctttgggaagtatggacattttaatgatattgattcttctgatgcattagcayggatatttttctattcatttgtgtcatgttattctttccacaagtgttttatacttttccttgtagagatttttcacctccttggatagatatatttctagttatttaattctttttgtgactattaaaaatagaattgtgttcttaatttgactctcagtttaaacattatcagtgtacagaaatgctactgattttttaaaatttattttgtatactgaaacttaaccgatgttgttttacaggtatggaagccttttcatggagtttttaaggtttcctaggtaaataataatattatcagtaataagaaataattt

SEQ ID NO: 137543 - DNA, 405 bp, Homo sapiens
tttgatagcagtaacattgaatttgtagattgctttgggaagtatggacattttaatgatattgattcttctgatgcattagcacggatatttttctattcatttgtgtcatgttattctttccacaagtgttttatacttttccttgtagagatttttcacctccttggatagatatatttctagttatttaattctttttgtgactattaaaaatagaattgtgttcttaatttgactctcagtttaaacattatcagtgtacagaaatgctactgattttttaaaatttattttgtatactgaaacttaacygatgttgttttacaggtatggaagccttttcatggagtttttaaggtttcctaggtaaataataatattatcagtaataagaaataattt

SEQ ID NO: 137544 - DNA, 405 bp, Homo sapiens
tttgatagcagtaacattgaatttgtagattgctttgggaagtatggacattttaatgatattgattcttctgatgcattagcacggatatttttctattcatttgtgtcatgttattctttccacaagtgttttatacttttccttgtagagatttttcacctccttggatagatatatttctagttatttaattctttttgtgactattaaaaatagaattgtgttcttaatttgactctcagtttaaacattatcagtgtacagaaatgctactgattttttaaaatttattttgtatactgaaacttaaccgawgttgttttacaggtatggaagccttttcatggagtttttaaggtttcctaggtaaataataatattatcagtaataagaaataattt

SEQ ID NO: 137545 - DNA, 570 bp, Homo sapiens
ggtgtgttggattttacataatgcttttattgmatttgttgagattatcatgtagtttttgttttcaattctgcttaagtggtgaatcacatttattaatttgcatatgatgaaccaacttgaatcccaggaacgaaacctacttgactgtagtgaattaactttttgatgtgctgctagattctgtttgctagtatttgctagtatttttttttttgagttttgcatctgtcttcatcaggaatatttgtctgtaattattattttttctttttgatttttcagatttcggtgtcaggatgatactggtattgtagaatgagttaaggagcagtgtctccttctcaatgttttggaataatttcagcagaattggtaccagctcttatttgtacatctggtagaatttggctgtgaattcatgtggtccaattccttctttgttttttttttttcttttggattggtagtttggttggttttcttctattactgaatcaatagcagaactcattattggtctgttccttgttttaatttcctgattcaatcttgggaagatgtgtgttt

SEQ ID NO: 137546 - DNA, 570 bp, Homo sapiens
ggtgtgttggattttacataatgcttttattgcatttgttgagattatcatgtagtttttgttttcaattctgcttawgtggtgaatcacatttattaatttgcatatgatgaaccaacttgaatcccaggaacgaaacctacttgactgtagtgaattaactttttgatgtgctgctagattctgtttgctagtatttgctagtatttttttttttgagttttgcatctgtcttcatcaggaatatttgtctgtaattattattttttctttttgatttttcagatttcggtgtcaggatgatactggtattgtagaatgagttaaggagcagtgtctccttctcaatgttttggaataatttcagcagaattggtaccagctcttatttgtacatctggtagaatttggctgtgaattcatgtggtccaattccttctttgttttttttttttcttttggattggtagtttggttggttttcttctattactgaatcaatagcagaactcattattggtctgttccttgttttaatttcctgattcaatcttgggaagatgtgtgttt

SEQ ID NO: 137547 - DNA, 527 bp, Homo sapiens
aatgccaagaggagtttggcaggggacggtcagaggggagttcagccactggacagccaaactccaggggaagatcatcttcccactcaatctgtcttccagctccccatccatcctgctgagagccacccccaccactcaataaaaccccacattccagccccagtcaggggcttataatagataaaactcccatctccctgggacagagcacctgggggaaggggcggctgtgggcacagcttcagcaggcagaaattcctgcctgctggctctgaagagagcagtggatctcccarcgcaggctcgagctctgctaagggacagactgcctcctcaagtgggtccctgacccccgtgcctcaggtctgggagacacctcccagcaggggtcgacagacacctcatacaggagagctctggctggcatctagcaggtgcccctctgggacgaagcttccagagaaagaagccggcagcaatctttgctgttttgcagcctctgctggtgatacccctggcaaaca

SEQ ID NO: 137548 - DNA, 527 bp, Homo sapiens
aatgccaagaggagtttggcaggggacggtcagaggggagttcagccactggacagccaaactccaggggaagatcatcttcccactcaatctgtcttccagctccccatccatcctgctgagagccacccccaccactcaataaaaccccacattccagccccagtcaggggcttataatagataaaactcccatctccctgggacagagcacctgggggaaggggcggctgtgggcacagcttcagcaggcagaaattcctgcctgctggctctgaagagagcagtggatctcccaacgcaggctcgagctctgctaagggacagactgcctcctcaagtgggtccctgacccccgtgcctcmggtctgggagacacctcccagcaggggtcgacagacacctcatacaggagagctctggctggcatctagcaggtgcccctctgggacgaagcttccagagaaagaagccggcagcaatctttgctgttttgcagcctctgctggtgatacccctggcaaaca

SEQ ID NO: 137549 - DNA, 527 bp, Homo sapiens
aatgccaagaggagtttggcaggggacggtcagaggggagttcagccactggacagccaaactccaggggaagatcatcttcccactcaatctgtcttccagctccccatccatcctgctgagagccacccccaccactcaataaaaccccacattccagccccagtcaggggcttataatagataaaactcccatctccctgggacagagcacctgggggaaggggcggctgtgggcacagcttcagcaggcagaaattcctgcctgctggctctgaagagagcagtggatctcccaacgcaggctcgagctctgctaagggacagactgcctcctcaagtgggtccctgacccccgtgcctcakgtctgggagacacctcccagcaggggtcgacagacacctcatacaggagagctctggctggcatctagcaggtgcccctctgggacgaagcttccagagaaagaagccggcagcaatctttgctgttttgcagcctctgctggtgatacccctggcaaaca

SEQ ID NO: 137550 - DNA, 532 bp, Homo sapiens
tattacttagccataagaaactaatatatgctacaatggggatgaacctcaaaagtattataagtgtaagaagacataaaaggtgtataattccatgtatatgaaatatccagaataggtatatccacaaatgcagaaagcaggttggtagtacccctttctggggaaagagaaaaatgaagagtaactgtttaatgggtacaggtttttatttgggggtgatgaagctattttggaaaaaggcagaggtggtcatayaacactgtgaaggtactaaatgccactaatttgttcaccttaaaatgatcaattttgtcatgtgaatttaacctctgtaacacagggtacttcaaaaaatagaccttcaataaatgtttgtagaatgaatgaacaataaacaaaggaatgtatgtggtcttggcaaacggctcatactgaaaggtggtctatgaaacgagactttgtaagtggagatggtgttgaccagcagagtctaaaatgattcttagtggccttggctcggttttattat

SEQ ID NO: 137551 - DNA, 532 bp, Homo sapiens
tattacttagccataagaaactaatatatgctacaatggggatgaacctcaaaagtattataagtgtaagaagacataaaaggtgtataattccatgtatatgaaatatccagaataggtatatccacaaatgcagaaagcaggttggtagtacccctttctggggaaagagaaaaatgaagagtaactgtttaatgggtacaggtttttatttgggggtgatgaagctattttggaaaaaggcagaggtggtcatataacactgtgaaggtactaaatgccactaatttgttcaccttaaaatgatcaattttgtcatgtgaatttaacctctrtaacacagggtacttcaaaaaatagaccttcaataaatgtttgtagaatgaatgaacaataaacaaaggaatgtatgtggtcttggcaaacggctcatactgaaaggtggtctatgaaacgagactttgtaagtggagatggtgttgaccagcagagtctaaaatgattcttagtggccttggctcggttttattat

SEQ ID NO: 137552 - DNA, 557 bp, Homo sapiens
accttctgtgtctgtggatttgcctattctggacaattatatcaatggagagtcatgcattgcatggtcttttattcatttatttattttttgagacrgagtctcgctccgtcgcccaggctggagtgcagtggtgcgatctcggctcactgcaacctctgcctcctgggttaagtgattctcctgccttagcctccccagtagtggggattacaggcatgcgccaccacacctagctaatttttgtatttttagtagaggcagggttttgccatgttggtcaggctggtcttgaactcctgacctcaggtgatccacccgactcaacctcccaaagggctgggatcacaggcgtgagccaccatgcccggcctacgttgccttttgtgtctgcttctttcatttagcatattgttctccaggtttatccacctggcagtatgcgtccatacttcctattcatggctgaatactattccattggatgcatatgccacattttgtgcatccatttttcagttgattgatctttggattgtctgcaccttttagctact

SEQ ID NO: 137553 - DNA, 557 bp, Homo sapiens
accttctgtgtctgtggatttgcctattctggacaattatatcaatggagagtcatgcattgcatggtcttttattcatttatttattttttgagacagagtctcgctccgtcgcccaggctggagtgcagtggtgcgatctcggctcactgcaacctctgcctcctgggttaagtgattctcctgccttagcctccccagtagtggggattacaggcatgcgccaccacacctagctaatttttgtatttttagtagaggcagggttttgccatgttggtcaggctggtcttgaactcctgacctcaggtgatccacccgactcaacctcccaaagkgctgggatcacaggcgtgagccaccatgcccggcctacgttgccttttgtgtctgcttctttcatttagcatattgttctccaggtttatccacctggcagtatgcgtccatacttcctattcatggctgaatactattccattggatgcatatgccacattttgtgcatccatttttcagttgattgatctttggattgtctgcaccttttagctact

SEQ ID NO: 137554 - DNA, 358 bp, Homo sapiens
ataccctacctggtagagctggaaaacagttaatgatcacaggcttggaacacaaaatcaacctcctgtaacaaatttagtttatgactttaaaaggaaaaatggacttttctacaataaacattcaaacaaacatggttcaaacaaacatggtttccaataataaatgtttttaaatctcaaggtcataataaatcagtcctgggactcttaaagcaaactttyttatagtataggaaaatgctttcctattttataatcaaaattagaaggaaactagactctatgttgacaagagacaaacttacacatagactttaagttaattctttagggtagttgccttaatagccattga

SEQ ID NO: 137555 - DNA, 358 bp, Homo sapiens
ataccctacctggtagagctggaaaacagttaatgatcacaggcttggaacacaaaatcaacctcctgtaacaaatttagtttatgactttaaaaggaaaaatggacttttctacaataaacattcaaacaaacatggttcaaacaaacatggtttccaataataaatgtttttaaatctcaaggtcataataaatcagtcctgggactcttaaagcaaacttttttatagtataggaaartgctttcctattttataatcaaaattagaaggaaactagactctatgttgacaagagacaaacttacacatagactttaagttaattctttagggtagttgccttaatagccattga

SEQ ID NO: 137556 - DNA, 586 bp, Homo sapiens
tatcagcagctggcaggaaatgtttatagaagaagcctttctttctgtttttaatagcctcctaggctgcaacctcccaaatgagaaccttgttaaccagaaggactgtaggctactgatttatatttcagtcataccgagaggaggaaaaattacaaaggkagaaagaaaaatgccaatgtacacatggactagttccgacatcttctctgataaagaatgtatatatctattcaggctctggatgctaagggattccttccagatctcagtatttgacctcttacttttgggtcacgtggattcttcgtgcctcttgtgggcttgctgaaagcaaaagtaacaatttcatactcttgccattgaaacaaggggtctattacttttaaatcataagggcacttgtttcaacagaaatgttagtatcttggtgaagatggggtctaagttcttggtggcttctgaggatggcgaagggctcaccttctgtcatcccgaaccatcactgatgggacagtgtctctccatgtgtagctatgcaaaggccacagaacaaatgggtaaaaatatttggtggtcagaattc

SEQ ID NO: 137557 - DNA, 615 bp, Homo sapiens
gaattcttcctcttttgcagatttcttcccctaattgtcctgttttgtgctgtcacccctgtgctctccctcctccccagttatcagcagctggcaggaaatgtttatagaagaagcctttctttctgtttttaatagcctcctaggctgcaacctcccaaatgagaaccttgttaaccagaaggactgtaggctactgatttatatttcagtcataccgagaggaggaaaaattacaaaggtagaaagaaaaatgccaatgtacacatggactagttccgacatcttctctgatraagaatgtatatatctattcaggctctggatgctaagggattccttccagatctcagtatttgacctcttacttttgggtcacgtggattcttcgtgcctcttgtgggcttgctgaaagcaaaagtaacaatttcatactcttgccattgaaacaaggggtctattacttttaaatcataagggcacttgtttcaacagaaatgttagtatcttggtgaagatggggtctaagttcttggtggcttctgaggatggcgaagggctcaccttctgtcatcccgaaccatcactgatgggacagtgtctctccatgtgtag

SEQ ID NO: 137558 - DNA, 579 bp, Homo sapiens
tattgctgagacctaaagctgcttatcatgaactgagttttgtctcatcagccatgttattaagtcatatttgtacaaaggtaattcatcatttaactcaaacttaagtagttccagaaagcccaggaacagattcccaygacaactacctctgccacactgttacctaactgtagtctatacctagagctttaagaatgctctcctaaagtcaatttacataaaaagaagaaacttcgggctggttcacaaatgagtcttcacaatgtgtgtgtattaattagatgattaatggagatgcgtagtagtcccttttatgaatgatccaaaaatataatacttaaaaaaaaaacttcacaatgagaagggttatgatgaatagactttctatctacattgtatggattacaggtagtttagggttttcatttacattaatttctgtattatgaatgatttcaaggccatttcatcaaggtctggactaaacaagatggaacaattgaaaaatgtcagagaataaatttattatgtacccatgagagaggtatgaactatgaagatttttatttacaataa

SEQ ID NO: 137559 - DNA, 518 bp, Homo sapiens
tctctctttaagacaatctgcaacagcataggaaaggtgactttgtgtttttatctgtcacactttscattcattgagacattcatactgaggccacacttcctccagaatactcccagctagtgaattactgagctttgcaggagtattagagccaggtcactgctgcccaacacattcactccagcatttgttactgttagtcttttttgtaacagtcataattacagatgtgaggtgatatctcattgtggttttgatttacactaatttgatgatcagtaattttgagcatttttacatataacttttgggcacttgtatatcttcttttgataaatgtctatttagtggttttgctaatttttaaaataaaattattcatttttcattttggggttttttgctattgagttcctatatattatggatattaacctttggcagatacattataatctgtgatatttttctgccattctgaaggttgtctcttcactctgttaattattttcttt

SEQ ID NO: 137560 - DNA, 518 bp, Homo sapiens
tctctctttaagacaatctgcaacagcataggaaaggtgactttgtgtttttatctgtcacactttccattcattragacattcatactgaggccacacttcctccagaatactcccagctagtgaattactgagctttgcaggagtattagagccaggtcactgctgcccaacacattcactccagcatttgttactgttagtcttttttgtaacagtcataattacagatgtgaggtgatatctcattgtggttttgatttacactaatttgatgatcagtaattttgagcatttttacatataacttttgggcacttgtatatcttcttttgataaatgtctatttagtggttttgctaatttttaaaataaaattattcatttttcattttggggttttttgctattgagttcctatatattatggatattaacctttggcagatacattataatctgtgatatttttctgccattctgaaggttgtctcttcactctgttaattattttcttt

SEQ ID NO: 137561 - DNA, 500 bp, Homo sapiens
gtctgttcatattgtattctgcttttttttttctttttcccagacaggatctctgtctgtcacccagattggagtacagtggcatgatcatagctcactgcagcctygaactcctgggctcaagcaatcctcttgcttcagcctcttgagaagctaggactataggtgtgtcctaccatgcctgactattttttacatttttttaaacaaaacaaaaatggggtctttctgtattgcccaggctggtctcaaactcttggcctcaagtgaacatcctgccttggcctccccaagtgctgagattgcaggcattaatcaccttgtccagtctgttctgttcattttaaacagagttaaaataagcagttaaattttgttgagtttttagtaatgtttgtatatcctagatatgtctttttccaaatatatgaaaaacacatattttcttctgttttgtggcttgcctttttattcccttaatgttgtttaaataacaaagg

SEQ ID NO: 137562 - DNA, 522 bp, Homo sapiens
aataaataaataataacacaaataaaaatttaacctgactaaaaaaaatgagcaaaggaactgaatagatatttctacaaagaagtcatacaaattggaaatatatatataagacgatgttctgcatcactagtcatcaaggaaactcaaatcaaaccacaataagatatcacctcacacctgttagaatggctcttacataaaaggcagataaaaagtattggtaagggtgtggagaaaaaggaaactttgtacactattagtgggaatataaaatggtatagccactgtaaaaaawgtgtgcaatttactttaaaaattaaactagaactaccatatgatccaaaaatcccattttggggtatatattttaaaaaattaaaattactgtctcaaaaaatatctgtactccatgctgagttcagtattatttacaatagtaaaaatataaaacaaactaatggtccctcaacagacaaatgaataaagaaattggtatataaagacgatagaacattcaac

SEQ ID NO: 137563 - DNA, 608 bp, Homo sapiens
tctatttttatataggctgacaagtccagktttatcaataatggcagtcataacattataaacatgtagacatttttccagaggaatttatgactgctctaactttcaaataaaaataaaagaaataaaaatcacattccctgttttcataggatgaaaaattagttattatttctttcactggaagaaaatgaattttcaaattttctctaacatctagttgtttacagcgactagaaagagaactaaaggagaagatcttgaaataagaaagacagaaaagagagaaaaggaaggacttgagaattctaagagcacagggttaccttaggacaaaaatgactgacagaagaattagaagataatataaagaaccagggaagtaaggagacctttgttgaagagacagcaaattcattttgggaacaggaggtctgggctcccctatagagagtgatgataaaggcaggaacagatcaataaaagatttgagacctgagggatggctagcattttgatttgtgggacaatttcactcagaaagtttgtgagataaaatcaatattatttacataaactgtcatatgtggaagttgagttggtcccat

SEQ ID NO: 137564 - DNA, 608 bp, Homo sapiens
tctatttttatataggctgacaagtccaggtttatcaataatggcagtcataacattataaacatgtagamatttttccagaggaatttatgactgctctaactttcaaataaaaataaaagaaataaaaatcacattccctgttttcataggatgaaaaattagttattatttctttcactggaagaaaatgaattttcaaattttctctaacatctagttgtttacagcgactagaaagagaactaaaggagaagatcttgaaataagaaagacagaaaagagagaaaaggaaggacttgagaattctaagagcacagggttaccttaggacaaaaatgactgacagaagaattagaagataatataaagaaccagggaagtaaggagacctttgttgaagagacagcaaattcattttgggaacaggaggtctgggctcccctatagagagtgatgataaaggcaggaacagatcaataaaagatttgagacctgagggatggctagcattttgatttgtgggacaatttcactcagaaagtttgtgagataaaatcaatattatttacataaactgtcatatgtggaagttgagttggtcccat

SEQ ID NO: 137565 - DNA, 647 bp, Homo sapiens
atttttcttaggtgtcaactaaagattcctttgatctgaaccgagtggaagagcaaaaagattatagacaggagttcttagtcaattgagagaccctaggtcacacatgaaaatatagctttaaactgaaaatgttgcaaaggcaatttgttctgcctcttctctcagaatatttatctgaaccattgagtctggaggtctctgcaacaatcctattggaaatctgcattatatctttagcagagaggaggcatgtgatgatatgtagtattggttgggtcatactgaggggaattgagtgacagytgggcctcaagtttatcacctctgtggtctaattggctattggtaaagtggtccctgtttgcagatgagttcagaggtgaacaggacaagccataggcatctggcaccctaccgttcattttgctattcttgattatatcagtcagtatttaggatgaatttgccacggaaacatttgggagactctttggctttataactcaataaagggattatcaatgatggtggtaactaattctagttttttagtgcttaccagataccaggtattctcctaagtagcatacatatgttaaatcatttaattctgttatcaaccctataaaataagtatttattct

SEQ ID NO: 137566 - DNA, 507 bp, Homo sapiens
gtagaacagaggtcctcaataaatgctgatgattgtgataaagatttacataacagcatgctgcaagtgtaagcctcctgctaaaaaagcagatataataataatacataatgcactggataggttgtttagcattagcaatttacagcttcagagaaatggctcgtaaaatgttrgggctaggaagaatattaaagacaatagacactctagctccctcatttgcagatactaaaacaggttttaaaaaaatataatgccttccccaaagtactatatagttatttcatatgaatgttatataaacttagatttttaaaaaatatattgagaaggttagtacttgtttttagaacgattctttttttttttttggaggtaggattaaatatctgatttgaggctcatcagttcaatttttttacacaagtaatggatgttacaggaaaagtgtacagtctgggccttgctgacattgcctcacagggtagccgtttacaccgagcc

SEQ ID NO: 137567 - DNA, 694 bp, Homo sapiens
atacagataacaccatagtttgcttatccatatatgacagacatttgagtttttctcagtttttggttattcaaaaaaaaaatgcaatgaacatttgtttactggtctttttatgcacatatggttgcatttaccttgggtaaatatctcagagtagaatggctaacktgtaaaataggtgtatgtttaactttttaagaaactaccaaagcaaccgcaccattttacattcccaccagcagtgtatgagatttctagttccttcacaacccttccaatacctgttatagtcagttttgaaaattttaggcattctaatagatgtgtagtggtatctcattgtggttttaatttgcatttccttaaagactgataatactgaacattttttcagatgtttatttgccatcagcatatcttctttggtgaagcatctattcaaatctttggcccattttttaactgagttgttttcttattattaagttttgaaagcttttttgtatattctagatatagaagtctttgaccagatacatgatttgcaaatattttctccagctgtggcttgtcttttcattctcttaatagtgtctttagaaaaacattaatttttaattttgaagaaatacagattatcaatttgttcttaaggattgtgcttttggtgttagaatctttgcctttaaaaaaa

SEQ ID NO: 137568 - DNA, 484 bp, Homo sapiens
aatttgatgtctttactgatagagatagaaaattgcttgcactttttaaagagcaccccacacctcactagtgttgcaggacttttccttagttcagctaaagacgggcttcttgtctgtcccatggccatgaaaatttaggctcgcagacagtttaaagggtaaataaagcagggttttatcgggtgaaaaytgttcgaatcccaggttccacacagaaggaggaagggcgaggctcctccccactgcaaagggtgtgaacttcccaagtctcctccccagtgggcaggctggttggagtttcaccagagaccttgtcctacctggctgtctcattcccctctctaaagaagtatatctaactgtcgttaggttaagcataaggacaaagaccaatcttaactgcttcctgctgacagggggcactgttttggggaactggcagtcagagctccctcagaggccaatctaagggtcgccagca

SEQ ID NO: 137569 - DNA, 571 bp, Homo sapiens
cactctaaaggagcctgggctttgggtctgctctttggagaattcctcaggaaactggtgctaaaacaaggggtcacatttcatcgccttttgccagagatatagtgtggtgtggtatggagacacagggctcaacttttggttcacactctgaggctttggacaggctttggcacttcatttttctaatcctctatttcctaatctgtaacatgaagatacaaatacccaataggtttattgtgggggataaatgacatcacctacgtgagatgtctaacatcatgttaagcacacrgaagaaattcttcaaaggtttgctaaatttgaattataaaatatccaggatcttaatccacagagaagagatacattaaaaatgatagacagggtaatatagtggaaaaacaataggctttagtttcagaagagttgagtacctgtctctgtcatcaactagctgtgtaaccttgggtaagttaagtaacttactacttaacctccctcatccatcatttcctgagttggaaaatgagaaaaatattgtccatcacatagggttactagacag

SEQ ID NO: 137570 - DNA, 599 bp, Homo sapiens
agatataggaaagttgaaataatctatccccagcagacctgtattataagaaatgtaaagaaagttcttaaagcagaagtaaaatgatattagaagacaatttggaaytaaaagacttgagaatggtaattacttgggtaaatatagacattttcttatctaaatttcttagaagcataattgcttgcttaaataaaaaataataacagtgtagtgtgcactttatggcatctatagaagttaaatgtataacaacaatagtacagtggccagaaagggagaaaggaagcatactgctgaaaggcttttatactatacatggagtgatatgctatcacttgaaggtagactgtgataattttaagatatataatataattctctgatatcataccatgaagaaactaaccacctgcttgtttacagttgattaaattgaactcccttctaacttgggaagggcaactgtatatcttgattgaaactggcacacattctgagtacgagtttgccttatagagtgtttgattcaccaacacaagattgtgcattacatcacatttgaccatgggacccactttcctacaagggagatacaa

SEQ ID NO: 137571 - DNA, 559 bp, Homo sapiens
aacaaatggtgtcagtgtcagcactgagcaatacctagcttcaagaccagagctcacacatttcttaaagcaacataatctaagaaaatactagtgtcagggaatcccttatcctccggctgacttactacatgaatctacacaaatcatatggtctcttaagtgtcaagtatttcatcattaaacggaaagctggtcacttctctcacagggatatcagaatatttttaaatgaactcaggtcaccttgaaaaaggactagttttaaaatacraagaattattataaatgacaactgctgaaaaaacgaaaaactttgcttaaaaagtccatcttaaaacaatttttaaaggctatataagaccataaattaccaccaaacctaacctagtacgctcaggatattaaaataagcatgttcaactgaacagttagttgtcagccttctataaaggttcctagtcaattatttcccattcatttttatggcaagtaaatgtgataaacagaattaaagttacatttctctaaaaggaattactgtttacctcacactccc

SEQ ID NO: 137572 - DNA, 544 bp, Homo sapiens
catagtgcagaaaaaaatgaacctcctccttctcagggtttgcgggtcaaattggtcccaatggcttaggatgcatttcaagggtgagcctgttgatacctgagggtttcccatctgaaagacaaaaccacccgtggttttgtttgtttctacccccagcccaagaacccacaaaggtccctggaccctgctgattggaatagttgcactcaccgatgcrgtagcagaaacacctcttgcccaagaacctgcaacggtccctggaccctgatgatcagaatggttgcactcaccaatgcagcaatagaaacacctcttgcccaagaacccacaatggccttggaccctgttgataggaatagttgcgctcactgatgcagcagcagaaacacctgttgcccaagagctcacaacagtctctgtaccctgctgataggaatagttgcgctcactgacacagcagcagaaacactagttttcctcctagaccacaaggaggaccaaaggcagttggatttagtggcccttactgaagcattcttga

SEQ ID NO: 137573 - DNA, 544 bp, Homo sapiens
catagtgcagaaaaaaatgaacctcctccttctcagggtttgcgggtcaaattggtcccaatggcttaggatgcatttcaagggtgagcctgttgatacctgagggtttcccatctgaaagacaaaaccacccgtggttttgtttgtttctacccccagcccaagaacccacaaaggtccctggaccctgctgattggaatagttgcactcaccgatgcggtagcagaaacacctcttgcccaagaacctgcaacggtccctggaccctgatgatcagaatgsttgcactcaccaatgcagcaatagaaacacctcttgcccaagaacccacaatggccttggaccctgttgataggaatagttgcgctcactgatgcagcagcagaaacacctgttgcccaagagctcacaacagtctctgtaccctgctgataggaatagttgcgctcactgacacagcagcagaaacactagttttcctcctagaccacaaggaggaccaaaggcagttggatttagtggcccttactgaagcattcttga

SEQ ID NO: 137574 - DNA, 579 bp, Homo sapiens
acttgtcactctgagttattaggtttctattttatcaagaatttaatgtgcactttgggaggccgaggtgggcggatcataaggtcaggagatcaagaccatcctggctaacacggtgaaaccccgtctctactaaaaatataaaaaattagccgggcgaggtggcaggcgcgtrtagtcccagctactcgggaggctgaggcaggagaatggcgtgaaccccggggggcggagtgtgcagtgagccgagattgcgccactgcactccagcctgggcaacagcgagactccgtctcaaaaaaaaaaaaaaaaaaaaaaaaagaatttaatgtcttgttgaaaagacaattaagcaaacaatcccatcaacaataacaataaaaatagtaacatttaatcatattaaatttaggaatgaatttaaccaaatagttaaaaaacttatatacagaaaattatacaatgttaatgaaggaaattacaaaatacacagatgaatggattagattagtgttcatgaattagaataactgatttttttaaagacacaatttccaattccaaagcaagttagtgttg

SEQ ID NO: 137575 - DNA, 579 bp, Homo sapiens
acttgtcactctgagttattaggtttctattttatcaagaatttaatgtgcactttgggaggccgaggtgggcggatcataaggtcaggagatcaagaccatcctggctaacacggtgaaaccccgtctctactaaaaatataaaaaattagccgggcgaggtggcaggcgcgtatagtcccagctactcgggaggctgaggcaggagaatggcgtgaaccccggggggcggagtgtgcagtgagccgagattgcgccactgcactccagcctgggcracagcgagactccgtctcaaaaaaaaaaaaaaaaaaaaaaaaagaatttaatgtcttgttgaaaagacaattaagcaaacaatcccatcaacaataacaataaaaatagtaacatttaatcatattaaatttaggaatgaatttaaccaaatagttaaaaaacttatatacagaaaattatacaatgttaatgaaggaaattacaaaatacacagatgaatggattagattagtgttcatgaattagaataactgatttttttaaagacacaatttccaattccaaagcaagttagtgttg

SEQ ID NO: 137576 - DNA, 408 bp, Homo sapiens
atctttactttacacacacacacagtcacactcacattcacttatgcatgcgtacacacaaaagaacaaaaaaagtaagtatatgtggtgttggatatgttaattagtttgactgtagtgaatatttcataatgtacatgtatttcaaatcatcaagttttacaccttaattatatacaattttaagttgccaactacacctcatattgaaaaacaatttattgccttgttaagtgtattattccattttcacactgctgataaagacatacctgagactgggcaatttacaatagaaggagatttaatggwattacagttccacatggttggggaagcttcaaaatcatggtggaaggtgaaaggcacgtctcacagggtggcagacaagagaagagagtttgtgta

SEQ ID NO: 137577 - DNA, 570 bp, Homo sapiens
attgataacacaggatttaccctcttaacaaattttaagtgtatagtacagtattagctataagcacagtgttatacactagtgcttatagtctagtatgtgtagtctagtatagtctagtagtatagatctctagtatgtataatactaatattgcataactgaaacttcataccaggaagctaactgtagtaraaatgattttggaaagggtatctctatatagttcacaaggatattaaaagaaagagaagattgccatgagattaaaaacaagggcttatgcaattatatctgcattaaaaaaaaagcaacaaacaatgtaaaaaaagcaaacaacatttgaggagtttcttttgaaatgttgttttttgtctcttttaaatgataaaacggcatgagcctgtttctaatctcatgataatcttcattatttttcttctaatatctctgtgaatatagacagatatattttctaaagtcattttcactatatctgccttctacatgaagaggatttgagagttattaagagtttaccagacagtctgacacagtcaacaatgtcac

SEQ ID NO: 137578 - DNA, 568 bp, Homo sapiens
atttcataatttcatgacatattaagaactactaatgtaaactatagaagaattactaaacagtctgtttctttaaattaatcatatgcaatgtttgycacaatgaattttaaaccatccaatattctagattcaataaattatagtaccaattttgggtcatgcatgcatttgtttctaccaacaaaatatttcattccaagaattcctaaatttgaaatgacaatttgttagtttggaaaataaatattttatgacctccattaataatcagtatagaaatgaaaaaatagtttcttttattatttatatatatatatatatgaaaaaatacacacattcacagcaatttctgtaccagatattttgatggggagtttctgggaaagattttactgacagaattatttatgatgataaaagataactgattttatctcttgctcctagaggtaatatcagaatcttgaatgctttgaatactatgtaatttggggatctttaatatttctttttctgttttagcggattaattcctagtaaagagtaattggtgagcaaaatgaag

SEQ ID NO: 137579 - DNA, 446 bp, Homo sapiens
ggggtgggaattggtttactatcacacactgagattatatatgaatttactctggactgaggattcaytgggggacgagtagcaagtagtaatttcatgtctagtaaaatagatcactaacacatgcaggtgtgattactgatactttagactctctaataattgaagtctggttctcaatgatttacctgtcaggtgaattgtgggtaaaggcaaaaagaatatggaataggtagcagaagaatgaaatggcaagtaccaaaatttgaccatttgaccagattttgcaaaaggtatgagtgaatgaggactggaagagttaggtgtctttacaagcactttttttcttgttcctattactctgccatctaaagtgcttacattaatagtggttaaacatatttatagttactattaaatatcatctaatggcagagtttgaaaga

SEQ ID NO: 137580 - DNA, 516 bp, Homo sapiens
gagaagaggctatgcttagtgctgtatatgrcatagtaatatatacattaaagatgaaatcaaaagaaaaactaaagtgggagggaggattactcaatttgtgatattgaagctaaatgtaaatcttccttttgttactctttccatcttgtattcattaaaaggaaatatgatataacaataaaacatcaaaagtacagaaagttaccaatttaaatcacatagtatgctaattactttttaagttttgaaattgtctgtttacaaaacactttgccaatattttggtattagttataacaatggttttaatttcatctttatcctcatcaatttaacagaaaaaaagtaaattagcaaactagtaaaagagttaaaatattcaaggctgaatttttcacaaacattccagccacactttgcagacattattttcccccaaatatagcaaataaatatatgccaaaatacaggagtgaaacttaccagatgtccaacagcctcaagccagacaga

SEQ ID NO: 137581 - DNA, 516 bp, Homo sapiens
gagaagaggctatgcttagtgctgtatatggcatagtaatatatacattaaagatgaaatcaaaagaaaaactaaagtgggagggaggattactcaatttgtgatattgaagctaaatgtaaatcttccttttgttactctttccatcttgtattcattaaaaggaaatatgatataacaataaaacatcaaaagtacagaaagttaccaatttaaatcacatagtatgctaattactttttaagttttgaaattgtctgtttacaaaacactttgccaatattttggtattagttataacaatggttttaatttcatctttatcctcatcaatttaacagaaaaaaagtaaattagcaaactagtaaaagagttaaaatattcaaggctgaatttttcacaaacattccagccacacttygcagacattattttcccccaaatatagcaaataaatatatgccaaaatacaggagtgaaacttaccagatgtccaacagcctcaagccagacaga

SEQ ID NO: 137582 - DNA, 515 bp, Homo sapiens
attctaagacttaaggagagagatgctggtcacgtgaggactggggagatggagcattactggctgaggaaacaccatgtgaaagggccaggaagaagaaaagaactctgtgtgtatgaagaattgaaaacagtttttgtggctagagcagagtaatgtgaagagacatgagagagcttgggtagatggggccatgcaaaaaaagcacaagtttattctagatgaaatgagaaaccgtcgaaatagttcaagaagcagaatgctgtgatcagatccacacttttaggagtgttactgttctgtaaattagagaataaatgactkgatataagtaaagcaattaatccatttataagagtgataaattaatagcggcgaaggatgatttacagctaagactaggtgtggccagtggagatgaaagaaaatgagaataagaacagcagaatattgtattgctgcatttagaagatgaaactgttagggactgttgaatgataagctgggaggaatgt

SEQ ID NO: 137583 - DNA, 471 bp, Homo sapiens
tatcttcccttagatttaaccacctcctggctccctctaatgtcaagtgaaaccctcatagctgtataaagttaagttccacctctaaaaaaccctggccagttaagaaagatttaaaaaattgactacctgagggtttttctttatataacgaatctgccttcccagcctttctctctgtgtgctactaactgaaagattatagagatctattattctacataattaatgaaaagatcaaatttcaaaaggacatataatagtgccatggccagccttaaaaattctcttggctaaattaagagagagaraaaaaaatctgacctaaacagttaaaactcccaccatggcttaggtttgctatctggtcagggaacaagggccacttaaccttatggcacaatagctaaaattcaattctgcactttcactgctatggcaaggatttgattgctggtcagtgaaccagca

SEQ ID NO: 137584 - DNA, 451 bp, Homo sapiens
tgctggtttagggactcaggatgggctaagagtgaaaagacccaggctttagtccctactgctctgcttctgacttgtgtgacctcagagcctcaatttcctccaatgtaaaatgggtaatgggaccaggtcagtggtttttaatctttagtgggcattagagttctctagggaacttgttaaagctgcagatgtctgggagtcccagagagtctgctttaaaatgtctgtagaggaggctggcgtctgcactttaaaactctccccaccccaactctggtggggttctgatgccagagtatctggacatactttgaaaaattcaggggccaaatactctaaakaaaggttattctctggaaaaaaaaaaaaagttcgcggtaggcagagggtaacagaatgggaaaatgaaagggtcaaggaagtacagagaaggatggtttcagtgtgt

SEQ ID NO: 137585 - DNA, 578 bp, Homo sapiens
ctctgggaggaaaaagtatggaggtgcctaaggttaggttaggaggtggtacattcacccaggacaatggcatcctctctttggtgagatcatgctggtactccttggacaatatcaattatgtcatccatcgtggaatgtgagaggcttccagagccaggtagaggctgactgacagttgcaaattcccttctagatcccactcttagagagaaaaggattcgcccagatagcccatgatgacttgtgggatggagccagggctggccttctgggtatgcggtgtgtgcagtggcacatggccctgtgctcaggcctcatgcttggtctaatgctctgctgttgccttcttgaaactcttcatacttttctctttgaatttgtgttttggttttctgagcacagaattctggtgggccttctatgcgtgggagttaagtgaracaaggcacaaagcaagagcaacgtaagtgtgttatgtgtattgagtgagtaagctgagaccacactttccctttgaaccagaacttgctttaaatgcagaaagaaggcaacggtgttctaagaaacatgaagga

SEQ ID NO: 137586 - DNA, 449 bp, Homo sapiens
caagactctgtctctaaatacataagtaaaactgccattagataatgtaaagatgaacggtataattacaatttttaatttttctttactgagatttaccttaagtggcaagtaaaaaataccatgccaagttgacagaaagcaccaaacctcagaagaaaggaaagagctatatattttagtaccttcaggggcattttttcctgctctttttttttttgagacacagtctcactttgtctcccaggctggactgcagtggaacaatcttggctcactgcagccttgacctcccaggttcaagtgatcctcctgcctcagtcccctaggtagctgggactacaagtgtgtgccaccatgcccagctaattttttttttttttttttgkattttaggtagtggctgggtttttccatgttgcccaggctttgcttttcgatcaagagac

SEQ ID NO: 137587 - DNA, 584 bp, Homo sapiens
cttgtccttcccaaataataattgttccatgccgacttaagtctggaattttttcttcttgaacttagtagtgtcaagacattgtctcttcactttgcttagataatctttattagggagctcmcctgtctggaagttttaaaataaaattacctgtaaaaatgtgtaacctggccggacacggtggctcacacctgttatctcaacactttgggagtctgaggtgggcggatcatgaggtcaggaatttgagaccagcctgaccaacatggtgaaaccccatctctactaaaaatacaaaaatcagccaggcttggtggcaggtgcctgtaatcccagctactcaggaggctgaagcaggagaattgcttgaacctgggaggcagagagcagtgagcccagatcatgccattgcactccagcctgggtgacagagcgaaactccatctcaaaagaaaaacagaaaaaggatgtgtaacctttccatagagtttcagctttccagtcttcttgatattctgttccccaaactgtaagcacatctttctgtgcgtttgaattgtttcttcgagtcaactgattgt

SEQ ID NO: 137588 - DNA, 591 bp, Homo sapiens
gtcttcaaaagttttcatgtgattggattaggcccactcactatggagagtaatcagctttactcaaaatctattgatttaaatgttaatcatatctaaaaaataccttcatagcaacatctagactggtgtctgaccaaatgactggccactatcacctagttgacacacaaaattcaccatcacaggctttgagtcatttattcagtgtcactgaacctcagttttctcatctgtaagagtgggttattattataccttcctcagagggctgcggtgaaaatcaaattggataaataygtaaaccatctaacacagcatctggcaaattgaaggcaataaattcaagctactcttgttttgtctagaagagatgcctaagacagtcttctggaatccagcccatgcccttccatgtacccccatcccctgtcttacaagggctggaaggttctaaattacttttttagactcccttggagctagagagatttaggctgagatacattcaggcaattttagaaggaagaagttaacaagaaggggcagatgtggttgcagtagccagacaccaagttccagttgttggtc

SEQ ID NO: 137589 - DNA, 518 bp, Homo sapiens
atgaacccaaagttgagcccaaagttgaaggttaagaaaacagagacagatggaccaggaaacatgaagacggacaggatatgactgctgcaggcagggagggaaacacatccttagcgttttaataacaacctcatcaagtgcctgctgcggatgtttcacatgtgatcttatttaatcctcacaacaaccctataaactaggattattaataccattttactaacgacaaaactgaggtttggagagattaagagacttcctccgggatcctggcacaagcatggatcccccgggatccatgaggtgaatctagagagtgtgagtgcagagcctggcttggaacaygctgttgattctgggcatgttcaaaggtgttacaccaaagaagcagataaaaaccagtttggaaaataacaagttttggaaattctgggttaatcaaagtgaaacaggttggatgttttgtgtgcttgttttctgctgcagaacttctcagagcctttaatgatgctacc

SEQ ID NO: 137590 - DNA, 589 bp, Homo sapiens
gtgaatttattctgcagataaagtggtaaaataggtaattgggatgtggaaggaatgaaaggataaaggtctgtctgtctgtctgtctgtctgcgcgtatgcwcatacgccttttttttttttttttttttttgagacagaatctcattccgtcaccaggctggagtgcagtggcgtgatctcagctcgctgtaacctctacctcctgggttcatgcaattctcctgcctcagcctcgtgagtagctgggactacatgtgcgccaccatgcccagttaatttttgtatttttagtagagacggggtttcaccattttggccaggatggtctccatctcttgacctcgtgatctgcctgcctcggcctcccacagtgctgggattacaggcgtaagcaaccacgcctggcccatatgcatgtgttttaccacctaccctgagcccagcatcttgcttggtactgctttctgcgtccttgtcttatctgtgtccacgctctgaggtggatattattattcccaatttctataggtagaaattaaggataaaagagatgaagttacaatcctccagtagttcacaaaactga

SEQ ID NO: 137591 - DNA, 589 bp, Homo sapiens
gtgaatttattctgcagataaagtggtaaaataggtaattgggatgtggaaggaatgaaaggataaaggtctgtctgtctgtctgtctgtctgcgcgtatgcacatacgccttttttttttttttttttttttgagacagaatctcattccgtcaccaggctggagtgcagtggcgtgatctcagctcgctgtaacctctacctcctgggttcatgcaattctcctgcctcagcctcgtgagtagctgggactacatgtgcgccaccatgcccagttaatttttgtatttttagtagagacggggtttcaccattttggccaggatggtctccatctcttgacctcgtgatctgcctgcctcgkcctcccacagtgctgggattacaggcgtaagcaaccacgcctggcccatatgcatgtgttttaccacctaccctgagcccagcatcttgcttggtactgctttctgcgtccttgtcttatctgtgtccacgctctgaggtggatattattattcccaatttctataggtagaaattaaggataaaagagatgaagttacaatcctccagtagttcacaaaactga

SEQ ID NO: 137592 - DNA, 589 bp, Homo sapiens
gtgaatttattctgcagataaagtggtaaaataggtaattgggatgtggaaggaatgaaaggataaaggtctgtctgtctgtctgtctgtctgcgcgtatgcacatacgccttttttttttttttttttttttgagacagaatctcattccgtcaccaggctggagtgcagtggcgtgatctcagctcgctgtaacctctacctcctgggttcatgcaattctcctgcctcagcctcgtgagtagctgggactacatgtgcgccaccatgcccagttaatttttgtatttttagtagagacggggtttcaccattttggccaggatggtctccatctcttgacctcgtgatctgcctgcctcggcctcccacagtgctgggattacaggcgtragcaaccacgcctggcccatatgcatgtgttttaccacctaccctgagcccagcatcttgcttggtactgctttctgcgtccttgtcttatctgtgtccacgctctgaggtggatattattattcccaatttctataggtagaaattaaggataaaagagatgaagttacaatcctccagtagttcacaaaactga

SEQ ID NO: 137593 - DNA, 566 bp, Homo sapiens
agggatgactccacacaggatgtccatggccccagtcagaagtggctactacagaggtccagggcccctcggtctcaccccacaagccagtcgtagtacagcccygtcccatcagggcaggcatcatcctgcagaccatcaggcctgctccgggcatttgagccacatgtggtgctctccctctaacaattatggctcttaattgagcacttactttttgacaggctctgtgcctggcactgtacaaggggaccccgggaaaaggttcctctttcttttgttctcttccactctcatactcgtgtgtgtgtgtgtgtgtgtgtgtgtgtgtgtgtgtgtgtgtgtctgtgtctgtgtttgtggtaggaggtggaggaaggcattgtgaagggttggaatcagggatccttaatgacccacacagaactgcagtgcgttactagttcaggttctccaagaagcagatgccatgactggattaaaccagagaggactgcattgagggaaacacctatgagaggctgggaacgctgcctgaccaccatgcaagttctatcccagtgcct

SEQ ID NO: 137594 - DNA, 447 bp, Homo sapiens
cctgcagaccatcaggcctgctccgggcatttgagccacatgtggtgctctccctctaacaattatggctcttaattgagcacttactttttgacaggctctgtgcctggcactgtacaaggggaccccgggaaaaggttcctctttcttttgttctcttccactctcatactcrtgtgtgtgtgtgtgtgtgtgtgtgtgtgtgtgtgtgtgtgtgtctgtgtctgtgtttgtggtaggaggtggaggaaggcattgtgaagggttggaatcagggatccttaatgacccacacagaactgcagtgcgttactagttcaggttctccaagaagcagatgccatgactggattaaaccagagaggactgcattgagggaaacacctatgagaggctgggaacgctgcctgaccaccatgcaagttctatcccagtgcctatgaaggt

SEQ ID NO: 137595 - DNA, 535 bp, Homo sapiens
tccagcctgggtgactctgtctcaaaaataaaagaattctggactgtaatttttaaaatttaaaataaacatacacactcttttacacaataatttcacttttgagaaatgatacaaattatagacaaattttccttttaaaattatttgtaatagaaagaaactamgtgtatctatttagattatagtaattcctttcattataatatgtagcctttgattatgtcaaggagcaatttttaaagacacgaaaatgtgctttattctttgttaactaaaatatatatcaagattataatatctcatataagtgaaatatatattacataaaagactggatttatttctaaataaggccatgattattattaaagggcatgtataattatggctaagattgcaggttccagagtgaattggagcctcagcccagccacacaacacctatgatctcagacaaattactttgtctccattttctaaactccccagtggggataaggatggtacttacaaagtatctacctagtaagtg

SEQ ID NO: 137596 - DNA, 578 bp, Homo sapiens
gactggtcttgaactcctcaccttgtgatccacccaccccagcctcccaaagtgctaggattacaggcttgagccaccacgcccggccaagataggcattattttatacacacacatacacacacacacacagacacacacacacacagacacacacacacacacacagataaatgattaactgaaagttaaagaattagcctcaaatcacacagtgaggaactggctatgctaatatcctagccccaggggccctgattctgagccttgttctctttctgattcagcttggtatttcaatgaaagatcagagttaccatgtaactgaaagacatggaaataaagcaacaggtgggaacataagtgacgggaaaactagtctttggataactctaaaaaccaggattgattttcacagaagcgctaggttgataaaaacccacatgcatccctatcacactttcagatgacggtgtgtatctgatgttactgttccctggatgttcccagactaaggctcttcyaataggccacaaagtagtatccatcaagaatggctttaaaattaaaacacaaag

SEQ ID NO: 137597 - DNA, 596 bp, Homo sapiens
aacattataagaatggaattttacagactaatctcactattgaccagaagcagcaagaatattaaatatcttagcaaactaaatccagttaggtatttttaaaaatatagcataaacacaktgggtttataccaagaatgcaaggatgataaacattttaaaatccattattgagactgaaaaatgtagatcaaaaacaattaacttaagacatacagtaaatgtatttaattaaatacaataaacattcaaaataaagcttttttttaactataaagagcaaaactttttcttattgtaataaaaagtaaaaacttatgacaaactcaatatttaattatagaaagataaagtaatttttttaaagtaagtggcaagaacaaaatgttttctctcactatatgtttttagttcttttctgggtgtctaagacagcactgtgaagtaagaataaagaagaaaatattaaggacctgaacagtcgatatattgtatgcatggaaagccctagagaaactagagctaaatttctgaagttaataaaaatattagaatgttgatagttgtaaaatcaatatataaaaatggattgcatt

SEQ ID NO: 137598 - DNA, 624 bp, Homo sapiens
  misc_feature (1)...(624): n = A,T,C or G
gaaaacaaacaaagaagtagtcacagtactaacatttaaaacccagaggaggaactcacatgttggtgtttcagttttgacagacctactaggatgaactatcctgagagggctgttgcagagggtgttgatttcagcaaggcatttgaaatcattagatttttttttaaaggataaagcagaaataaatttaaattcatgggcacctaaggaagatgtatttggacctctgtgctgttctttggtgtgccagaagcagttctatcacttcctcactgtagytgaagagtggattcagtgttatcccacagaactcacgtgaaactgggcagtacacaagagcaggtgttttggacgtgtctcatcatagctgctttaagaggaaaaatgataataaatgcgtgtattccctgcccatgnatttttgttgctaaaattgttttttaaaattgtctttccctgggaaacctaagtagagtatctccacgtctgttttaggcagcttctttttggtttgcatgcaatttttattttaaaaaagtgaaaattaggatttatagaatcatgaagtaagtatgactcatgcattcatcatccaccatccctcttagttctgattaaaag

SEQ ID NO: 137599 - DNA, 624 bp, Homo sapiens
  misc_feature (1)...(624): n = A,T,C or G
gaaaacaaacaaagaagtagtcacagtactaacatttaaaacccagaggaggaactcacatgttggtgtttcagttttgacagacctactaggatgaactatcctgagagggctgttgcagagggtgttgatttcagcaaggcatttgaaatcattagatttttttttaaaggataaagcagaaataaatttaaattcatgggcacctaaggaagatgtatttggacctctgtgctgttctttggtgtgccagaagcagttctatcacttcctcactgtagttgaagagtggattcagtgttatcccacagaactcacgtgaaactgggcagtacacaagagcaggtgttttggacgtgtctcatcatagctgctttaagaggaaaaatgataataaatgcgtgtattccctgcccatgnatttttgttgctaaaattgttttttaaaattgtctttccctgggaaacctaagtagagtatctccacgtctgttttaggcagcttctttttggtttgcatgcaatttttatttwaaaaaagtgaaaattaggatttatagaatcatgaagtaagtatgactcatgcattcatcatccaccatccctcttagttctgattaaaag

SEQ ID NO: 137600 - DNA, 329 bp, Homo sapiens
tgggactgagctgtacacaggttgatttctctccaaggctgtcattgcttgcagctagctgtgtgaatgattttccagttcctcacttataaattgaggacttgggattaggacagttaagaatcatccaaccrtaattgtctaaacttctgctgctgcctcaggtcatccaaccctgtaagccagcaggtgaagaagcagattctccaaagcaatgcctgaactcaacacaacttgctcctcaagtggcattccttcttgtattcttctatccagtggctacggctgaagttttcatttagagagctcaactagctgagtgatgtaca

SEQ ID NO: 137601 - DNA, 329 bp, Homo sapiens
tgggactgagctgtacacaggttgatttctctccaaggctgtcattgcttgcagctagctgtgtgaatgattttccagttcctcacttataaattgaggacttgggattaggacagttaagaatcatccaaccgtaattgtctaaacttctgctgctgcctcaggtcatccaaccctktaagccagcaggtgaagaagcagattctccaaagcaatgcctgaactcaacacaacttgctcctcaagtggcattccttcttgtattcttctatccagtggctacggctgaagttttcatttagagagctcaactagctgagtgatgtaca

SEQ ID NO: 137602 - DNA, 423 bp, Homo sapiens
ccctctttcattttaaatattgattgatactggcaaatgtctgcagtcaaaagaaggaaatctgttggaattatttactattatagcactaataaccatgtaataaccatgcattaaatgtttgctaaaaaaggttttgactaccacattctgtgtgactaacagcatttcatggcaagggaaggtaacatttgagacccaaataactgacttttatttccaggagcaggaaggagttaataatcattctttgtaatttgtgagcattattttatgacattgataatgggcagtggtgtagattatcatttttcttggargaaaagtaagtttaggccttccttaaaaacagtatgtattcactgcataaactagaacaacacattgggttatgaataatttataaataataaaatgaaatct

SEQ ID NO: 137603 - DNA, 305 bp, Homo sapiens
cttgccatcacacttcctgcttgctataggaattttgggattgtcctgttctatccatcagaaactattatcagtatatagtctttatgtaggacagaakgtatgtaccttccaaagacaaaatttttcagatttgataaacaagaattttccgatgggatgaaaaagacaatatgttgttcttggcaagggctcaggtgagataatggggcagggaaggtgtgtggggcctggggtgcagtgtcttggcaggtctgtttgaggacaggaagtagggaagatatgccctggggtacaccttcaga

SEQ ID NO: 137604 - DNA, 492 bp, Homo sapiens
ggtttgtagtagattgaggaagagaacccatatcttctagctcagagaacattgtattttcccatatgctcctgttaaccacgggaaaataatgtcacattgttaccagtggtgaatacctacaggtctgcagcaatttggttcttgcctcctaggaggaaagagtttgactgaagggcataggcagaggaagagattgaggcaagttttagagcaggagtracagtttattgaaaagttttagagcaggaggaagtgacagagcggagctagcgcgtcaaaggtacctctatggttttcctcgctttcttgagctgggaaatggccactgtgtagtcgcaatggaaataaatccccggaactgcgattcagtgtgtgaggaatttgaatttagagtttaatttctcagagtattctctccaggaagaatttttacagtatctcaaagatttcacttgactccttgatcctacataaacccaaggagaaaag

SEQ ID NO: 137605 - DNA, 578 bp, Homo sapiens
atcatcatttagtcatcctttattattggtctttaggttgctcctaaacctttgttgttgtwttgaacatatttttaaaaattcattcaacaaacatttatttgtgccaaacacgttttggggatagtgcagtgaaccaagaaaaaaattccctactattatggagttgagttgtatctctatttgtagaaagtgaaattctttacatatgcctagttcaaagggcatatgcatgttaaggttttgtatggatatcttcaagttatgtttgttataatctcatttggggataagaaaaggagagtagatgctgacctgcgatttgggtatttccaatagaatactgttgatcaaactgtcttgaaactggagcagtaataataatacttagtatattttgtttgtttgagacaaggtctcactctgtcgcccaggctggagtgcagtggtgtgatcacaactcactgcagcctcgacctcctgggctcaatggatctgcccacctcagcctctcgagtagctgggactataggccatgccaccacacccggctaaattttgtatatatatattgtttt

SEQ ID NO: 137606 - DNA, 578 bp, Homo sapiens
atcatcatttagtcatcctttattattggtctttaggttgctcctaaacctttgttgttgtattgaacatatttttaaaaattcattcaacaaacatttatttgtgccaaacacgttttggggatagtgcagtgaaccaagaaaaaaattccctactattatggagttgagttgtatctctatttgtagaaagtgaaattctttacatatgcstagttcaaagggcatatgcatgttaaggttttgtatggatatcttcaagttatgtttgttataatctcatttggggataagaaaaggagagtagatgctgacctgcgatttgggtatttccaatagaatactgttgatcaaactgtcttgaaactggagcagtaataataatacttagtatattttgtttgtttgagacaaggtctcactctgtcgcccaggctggagtgcagtggtgtgatcacaactcactgcagcctcgacctcctgggctcaatggatctgcccacctcagcctctcgagtagctgggactataggccatgccaccacacccggctaaattttgtatatatatattgtttt

SEQ ID NO: 137607 - DNA, 549 bp, Homo sapiens
aactatacatgtgttttaagttagtgtgttttaagttagtgtgactatgcaaatacaaattattttaataattatggcagaacagatataacctatccacaattttttctgatggtgcattgagtataagtaatccctctaggttcatctctggcctaaccctcattcttgggctcatctartatactagaccttctctccaagacccatggacatgattgcttgtataattgaatactatcctcttatcccacagtgataaaaatatttttttcttttcttctgaggtatggcctcttgttaaattaccaagtagtaggtatacatctttggggcataagtagaagagatcatcttcaataatctcagcagtattattcaacttaagatgcttgagtctagttgtgaaatgtcaacacatttaaatccaagcactagggatttgtaaagcagaaaagaccttgactccatgtagtcatatattactgcagaagatgttctgcacttttgtgaagggaatttgaccatctgtttttcctttcattttat

SEQ ID NO: 137608 - DNA, 401 bp, Homo sapiens
aacccacacatatatggttaggtgatttttataaaggtgccaagaccattcaatggggaaagtagtctttttgacaaatggtgttggaaaaactggatatacacatgcataagaaaaaagtttgacctttaccttaaatcatatataaaaattaaataaaaccatcaaaaatctaaattaaaacctaaaattataaaactcttggaagataaaatatgaggagatccttatgacattgggtttggcagtaatttcttggatatgacatcaaaaccacagtccacaaaagaaaaaaataaattggactatatcaaaatttaaaacttctctgcaaaggacataaycaaaagagtgaaaagccaacccatgaaatgggagaaaacatttgcaaatcatatatc

SEQ ID NO: 137609 - DNA, 578 bp, Homo sapiens
tgggaacctaaaaatcatcatttaccaagtaatgctttgcagcttgccattgctcatctaaatactgtggtgaaacatactactgactaggagcccctaattggcttggctcataatgagacatactgctcccagtttaaaacccagtgccacactttgtagtttcctactactgggtgaaagaaagggaaggtgaaaactccgaggcttgaaagtgtcccttcagggcttcatgagaagtccttgaaataaactcatagwggatgggggaaaagcaatctgttatgatttaaaatattctaatcaatgacacctttacgactggagacacatgtggacaccctaaacaatctatggcctgttgaatttcatcaaccctaagtgattattagaatattttgagtttgcttaaaaatattccagcagaggggaaaaatatagaggtggggaatatgtgaaactagaatggtagaatgtggatctttattgaggatgggagagaaatagatgagtgttcattatactattctctccactttggtggaggcttgaaattttccatactgaaaaaaaactca

SEQ ID NO: 137610 - DNA, 591 bp, Homo sapiens
tccaaaatgtctagcagagttctttgtactccggcaaatatttattaattattattttagacaccaaattgactaggctgtaccatgaatggaagttcatggtatctacaaatagttaccagtgatttagatgcaacatcgggggaattatttttctaaagatttggctttaattcttctgctttttaacttgatttaatgtaacggggataaygaaatcatgatcccagcattttaagagtactggtttagatttaaatttagaatttaaatccataaattcattattacgttaacaaatctttattaagcacttattctaagtcaggccttgttcttcaaagacaaagcgtggtcccttatggagcttccacacaggtggcgaatgcagcagaggagtcgccttcacacagtggcaggtgaccgccactgagtactcactacatgcccggcacagtttacatggtttatatgccctgactcatcacattctcacaataattctatggggtaggcactgtaatcatctatatcttacaggtgtaaagactgaggcatagaggcatgcattacagtgcccaaagttacata

SEQ ID NO: 137611 - DNA, 507 bp, Homo sapiens
catttatttactaccataagatatatacaaatctattacaaaaagttaacattaatcaaaatctgcacaaacacagaccatgcatagtgccattcacagtccagagaaatgtgaacaaacataaagatgcagtattaaattataactacataaaattaactgtggtaccatactctactattgtaataattttgtagctacctcctgttgctattgtggtaaggtcaagcattgcaagtatccttttaaaatgccatagaatgctaatcatccttgcttgagcagtttgtctctccaataaattgggtattgccgtaaaaagtgatctctcacacaagccactgttgcagcaatgccagcagacatgaagaccttgcactttttgtaaaatacatttttatctcatattgaaaatgcagcttttagtggcaccaggaytgctctaagaaaggcacgccctgtagtcccagctacttgggagactgaggtggaagcattgcttgaatt

SEQ ID NO: 137612 - DNA, 546 bp, Homo sapiens
gtgattcctagtaatataattatgtgttaattcagtaaaggtaggtgaaatacgttttggaatttttattccagcatgaatgaatgaatgttgtttggggttcatactagagagtatcattggtcttggcacacctggaaaagtatctaaaataattattcacaagtaattatataatttttcaacaagaacttactgttagcgtcctggcatcagggatacatcaygtggcatcagtttattcacctattgaatagacctgacttcaaaaaataaaaactgaaaacttgtatttctttgtttttttttccctaggttttttaaagtattattcttagattttaccaatatagaatgaaattgtgtgcatgcgatactacgtgattacatttaaaaagaaatctttgtcacatcttgttccagctccatattgcatagcatctggtgtcatgacttcagagatattgtgtgtttgcatgtgatagactgaaaagacctaaactgtccagttctaagcagtagtcttcctttctaattactgatttt

SEQ ID NO: 137613 - DNA, 530 bp, Homo sapiens
agtattttatcattaagtatgatgctgtaagtttttaatagattctttccattaaatagaagaagttycattttatttctcctctactaagagttttaatcatgaatacatattgattttgtcaaatatgttgtgtcaattaagatcacacggttttagtttttcagttggttagtattattaattacattaattgattttcaagtgttaaacaaacattgaactcctggaaggaattctacttgattataataccttactttctatataaatgtattgttagatttaatttccaaatctttcttgagaatagttgcctctatgtttagcagagatattggcctctagtttgcttttattatactctttttgtctagttttggtgtttgggtaatgataacttcataaaacggtatggatgtttcttctatattctccaatatcaattgtataaaattgatagtattttttccttaaatgtttggtagaattcatcaacaaagccatctgaggaattctttctaggaatg

SEQ ID NO: 137614 - DNA, 471 bp, Homo sapiens
tcttttactgcaaattggactggaaactcaggaagtagctgttttaatcttagggctcaccttatatcttgtccttcaggaatcactatcttgtgtttscttgttttataagatctgtaaatcattctgtcatatttttttttggtttcttacttaagagggaaggataaatttaacacttcttactccactgtggctgataatggaaaattttctactcttttagttctaaacttatcttttgttttacataaaatgttcagccctttctcaaagtggaagtatcgtattatactccctacaacaatgcatcaaagcttatgatcctcaccaacatttaatattgccagttcttataaatttagccatttgagtgggtattttcttattatggttttaaattttatttctatgatgaccaatgttccctggtgtttcatatgcatattggacatttgtatatcttctttt

SEQ ID NO: 137615 - DNA, 611 bp, Homo sapiens
acatttggaaaattttggggctatttgaaattagaagctaggtaatccagttttagtgtctgtgtttgtattataatctcccttccccatcaccactgctctcagttatctaaaatctgtgtattttagaataagtatttggaatttatttggaatagatagagttgtaataactatctttccaatgctgtcccattatgttttatcttcacctctttctttgtcttagatgctctttatgctaatttatattctactgcatgttctagctaaccaccttttayccctaaggccacttgagggcaagaccccatacaactcattaaaaaaaaatttcgatacttttattttagattcagtgagtaaatgtgcaggtttgttacatgggtatattatgtgatgctgaggtttggagtacaaaagatctcatcactcaggtagtgagcatagtacctaacagtttttcaacacttggccccatcgctccctctcccctctagatgtccctagtgtctattgtctacagctttatggccatgagtaccccatgtttagatcccacttataagtgagaacatgcagtattgggttttctgttcctgcattgattc

SEQ ID NO: 137616 - DNA, 586 bp, Homo sapiens
ataatcttgccttgtaagaaaacagaagcaggccgggcgcggtggcccacgcctgtaaccccaacactgggaggctgaggtgggtggatcacctgaggtcaggatatccagaccagcctggccaacatggtgaaactctgtctctactaataacacaaacattagctgggtgtggtggtgcatgcctgtaatcccaactactggggaggctgaggcaggagaatcatttgaacccgggagacggaggttgcagtgattcgagactgcgccattgcactccagcatgggtgataatagcgaaactctgtctccaaaaaaaaaaaaaaaaaaaagaaagaaagaaagaaaaggaaacagaaacaacccacaacccaaggggaacttccttctcttccttctacaaatctaccaagcctcctgcatctgctttccctcctgtaaaaaaggaraaagtacccacatggctatcatttttcactacatggtagaaaccatccccttttaccttttcattaattttcttctacattaattatgtatttttattattaatgtcttatgtaataaaccgctttctattggttta

SEQ ID NO: 137617 - DNA, 500 bp, Homo sapiens
agtactatttcatatttttgctgtcattgtaaatggttttttttattaaactgtcaattatgtgtacatattactatatacatgtattatatacatatatatacatatattatgtgtatatattacatatacacaacatatacaatgtatatattacatatacacataattgtatgtgttgtaaagtagaggttaaattgttgtatattgttattattacttctgaaatattcaatgaatttaacagttaacttatctgacaataggaatgtctttgtgtgaagattgatatttagaatgcccattcatttcatagatacagaggactcttcttgggatgctttggcagtttgtatctgaaaaaaattttccattctatctaagttttataattaattaaaacaaatatgttaataatagtttttattagttttttaatgtttgtagtattgatagtaatgtcycccttttcacttctgctattggtaatttatttcatt

SEQ ID NO: 137618 - DNA, 634 bp, Homo sapiens
aaagtggtggagatgtagacttgaagatgcctagaaagaaagggtcgactgatttacatgagaaagacaattatttctgggagaagacaacagaatgtaggcaaaaatagagatatccaggtgaagcagcaataagcaggatttgggcaagaggtgtccaaagattttaagaaatatttgctttatgttgcatgatataatttttctttcaaatatagcctcttatcaaagacatttttcaaagctttttcaatcaaatgcacagagttctagatctttaatgttgcaaagaggaaaaagaaatgtccatgatatataattttagtgcatttaggaatcctaaaatttgcttcaaaggaataatctaaaaagggaatgaattagacccatatttacgttgccatggttaaacctcaaaaacataatgttgagtgaaaaaaagtaagttacagaatatctaattctgtagacattcatccaaaagtataattcatccaaaagtcaaaaacatgactgtcatacaaatatgaagtgaacatgtatcaaatattttgtttaacatatcartgagggcagcagtaacatattaaaacaggttcaaagagatttttttaaaatcagacatatatgaata

SEQ ID NO: 137619 - DNA, 614 bp, Homo sapiens
tagttttacttatcgggacaggagacagaatgattaaaatgatcattatccaaactttaatatctagcctgtagaattttccttctctacaaatattttacttagcattgttgactggtttgaatgtctgaaatagattagggccatgaaattcattatgcactaaataatatgagatttaaaaatgttatttgctctaatgtacaataagaaaattgtaacgggattcttaaatgtttaggtagtctaaatgttacatatgagaactgcaattaaatgtaacatcgttacatataattgcataatcgtggactatgagcacatttaatatatttgaaattattttatgtggagcttccataagtaaaaacgactaaagcttgcccaggtgttcaagttttgcccttaattctctctcacactgatgaaccatattctccctcagtcttctccatctcarttaatgccaccatatacccatttgcttctaaaatcttgaagtcttctttgtgttcttttcccctttattccactcagttccatttttcagcaaatcccgttggctccgctgccaaaacataacagctcttcaatcaccctatctaaatcaccat

SEQ ID NO: 137620 - DNA, 490 bp, Homo sapiens
aaaaaggcagtattactgatattacagaaatacaaagaatcatgtgagactattgtgagctagaatatgccaacaaatttgggaacacaaaagaaaaagataaattcctggataaatacaacataacaaaattaaattgtgaagaaatagaaatttggacagaccaataaagggtgaggacatttaataaataatagaaacattttcaatcagaaaaagaatcccaggacctgatggcttmactgctgagtttcccaaacatttaaaaaagaactacttccaattctcctcaaactattccggaaaattgaggaggaagaaatacttttaaattcattttacaagaacagcatcaccctgattccaaaatcaggcaaagatacattcaaaaaagaaaactacaaaccaacatccttaatgaatatagatgcaaaaattttgaagatactagtaagtcaaattcaacagtacatccaaaagataatttaat

SEQ ID NO: 137621 - DNA, 552 bp, Homo sapiens
caccaaggtgctacctctaagaatctgaaaaaaccagtgttattggctttggtgcccaagcctctttgaatacctggaaaatgttcccaagaaggatkggcataaacaagcccagattgtgaagactaaaataaatacctaactctttaatacccaggcaccagtgaatatccacaacatcaagaccatccagaaaatgtgaccccatcaaatgaactaaataaaacatcagagaccaatattggaaaaatagagatatgtgatctttcagacagagaattcaaaatagctattttgaggaaacttaaagaaattcaagacaacacaaaaaaggaattcagaattctttcagataaatttaacaaagagattgagataataaaaagaattgagcagaaattctagagtggaaaaatgcaattggcatactacagaatgcatcagagtctattaataacagaattgagcaagcagaagaaataactagtggacttgatgaaagcctattggaaaatacatattcagaggagacaaaagagaaaaacaaataat

SEQ ID NO: 137622 - DNA, 552 bp, Homo sapiens
caccaaggtgctacctctaagaatctgaaaaaaccagtgttattggctttggtgcccaagcctctttgaatacctggaaaatgttcccaagaaggatgkgcataaacaagcccagattgtgaagactaaaataaatacctaactctttaatacccaggcaccagtgaatatccacaacatcaagaccatccagaaaatgtgaccccatcaaatgaactaaataaaacatcagagaccaatattggaaaaatagagatatgtgatctttcagacagagaattcaaaatagctattttgaggaaacttaaagaaattcaagacaacacaaaaaaggaattcagaattctttcagataaatttaacaaagagattgagataataaaaagaattgagcagaaattctagagtggaaaaatgcaattggcatactacagaatgcatcagagtctattaataacagaattgagcaagcagaagaaataactagtggacttgatgaaagcctattggaaaatacatattcagaggagacaaaagagaaaaacaaataat

SEQ ID NO: 137623 - DNA, 595 bp, Homo sapiens
agatcttatccaagatcaccaaggtgctacctctaagaatctgaaaaaaccagtgttattggctttggtgcccaagcctctttgaatacctggaaaatgttcccaagaaggatgggcataaacaagcccagattgtgaagactaaaataaatacctaactctttaatacccaggcaccagtgaatatccacaacatcaagaccatccagaaaatgtgaccccatcaaatgaactaaataaaacatcagagaccaatattggaaaaatagagatatgtgatctttcagacagagaattcaaaatagctattttgaggaaacttaaagaaattcaagacaacacaaaaaaggaattcagaattctttcagataaatttaacaaagagattgagataataaaaagaattgagcagaaattctagagtggaaaaatgcaattggcatactacagaatgcatcagagtctattartaacagaattgagcaagcagaagaaataactagtggacttgatgaaagcctattggaaaatacatattcagaggagacaaaagagaaaaacaaataatgaaggatatctacaaaatctagaatta

SEQ ID NO: 137624 - DNA, 611 bp, Homo sapiens
cacaagaggtaagtaaacaggattgcagacacaacaggggctagtaagtgacctgcccaaaacgaggtggcggcacaatttagaaaggaatccctgctctagctctgcaaagatcattagctggataatggtaatgcagatgaggaattatttctctttaaaatgtgctcaaatgcttttgcccacacctaggactcaggcattgcacaacttcagaggacataatttacattttaagaagtatgttcctggaggtgctattgacattgaatacaagggaaactgtgttacttggagctataaaacatcaaatgctctaccatatgcctaatatcagagcagccaaaaggcataaatgggytggccctcagggatggagaaggcataagcatcccagaggccagaaacaggataaaaaaaattctccctggagcttggttaggtctaagaggctcagattcctggaggcagcccccatggcaggacctagaattgagaaattagccagaatctgaatattttggtcagagtccaaggttaaggactccttgatctctcatctagatttttcaatacccttgaaaactagaacccaaattatgctgtaaatt

SEQ ID NO: 137625 - DNA, 570 bp, Homo sapiens
ggatcttctttctcttactctactatctacagaaaagtttagctttaccaatattgggggaaaatagagacagaaatcaggtaagaaaaccctagtgtgatgattaaagttgtgtcaacgtggctaggccataatatccagtttgtggtcaaataccagtctagatgtttctgtgaagctatttttcagatgtaactaaatcagtagattttgagtaaagtagatcaccccccatgatgtgagtggtcctcatctaatcaattaaaagcctgcggatggaagactgaggtcccaagggaaaaaacatctgtcaccaggctgcctttagactcaagactgcaatagtaactcttccctgggtctccagtatctgaaatgccagcgtgccttgaaaatatcaggctggccagygcccacaattccatgagccaattccttaaaataaaactctatctacctatctatccatctacacatcgtatttgttctatctcaagagccctgattaatacactcagaaagattgactttgttttattaatgttgctcttcccatttttgtaactcaat

SEQ ID NO: 137626 - DNA, 412 bp, Homo sapiens
atcaaaataatagaatcttaaccagtcttatttctctttgaaagttgttataaatcacacaaactcaagaattatagttattcmtccacaagcaaaggactgacatggatgcaaatatgttgtaaagttattttacaggaggaaatttggaaacacgtgtgcatttaacatgtggtgctagctgttatatattgccctctaatagacagactgtggatatgttatgagaacagatggttttccacctaaagacattaatcttaagaaaaaacaaccatccatcagttaaacaagcaggtggtactttcctgatctctctgcccctgactctctaccttcagaggaaagaccagtataatttttcttaaaatgaccttatgaaggcaaaataaaaactgcttaataaagaagc

SEQ ID NO: 137627 - DNA, 575 bp, Homo sapiens
ttgtggcatggcaactacaatggtttgaatatgtgtttctccaaaatttatatattaaaatctaatcaccaaggtcgtgatattcaaagttgtagcttttaggtgattaggtgatgagggctctacccacatgaatgatatgaatccctttattgaaaaagctggagataactagctaggttgtttgcctttcctccttctgccatgtgaggaggcagcaacaaggtgtcatcttggaagcagagaacagccctcaccagacaccaaatctgctggtgccttgatcttsgacttcccagtccctgggaagtgagaagtaaatttctgttatttataaattacccagtctgtgctgttttgttatagaagcacaaattaactaattcagtgactatactgcctatagttaataagtcctctattatatacttgaaaattgctaagaaagtagatcttaagtgttcttacctcatatgcaaaaaaggtaactctgtgaggtgacagatatggtaactagcttgattgtagtaatcacttgacaatgtacaccaaaacatcacattgtatactatcaa

SEQ ID NO: 137628 - DNA, 616 bp, Homo sapiens
agcatccagaatgcccttctactatataacatgtcagagtaacagatggcatactccgtaaagaaaatgaacgtaaataagtcaagtaaaaaaaacctaccttttttgatagaaaatacattttgtataagaagttaatcttatttattgcccacctggacaggtaatgtattcaggtttttccaatctattcctttgtgataaaacagacttgaaactctcatcatgagtgctagcacttctcaaatccgtctgcatttaatttgttctcatcatatttatcactcatttatagaattttttgtttctaattaacagaatttgcctcctgttcttatactgtactaatagcaggaaactttccattgtaagcartgacctaagccttgaaaaaatatgacaatgtgattatgattctctagtcagttatacgtcacccatatacagtgtttctctaagtatagatttataaataaaatgtgttttttgaaacattttattttaaaaattttacattttctgataatcagttacaaatattgaaacatgcaatgcttctccttactataataaatttacaaaagacatttatctacataatgttaatatccatttt

SEQ ID NO: 137629 - DNA, 616 bp, Homo sapiens
agcatccagaatgcccttctactatataacatgtcagagtaacagatggcatactccgtaaagaaaatgaacgtaaataagtcaagtaaaaaaaacctaccttttttgatagaaaatacattttgtataagaagttaatcttatttattgcccacctggacaggtaatgtattcaggtttttccaatctattcctttgtgataaaacagacttgaaactctcatcatgagtgctagcacttctcaaatccgtctgcatttaatttgttctcatcatatttatcactcatttatagaattttttgtttctaattaacagaatttgcctcctgttcttatactgtactaatagcaggaaactttccattgtaagcaatgacctaagccttgaaaaaatatgacaatgtgattatgattctctagtcagttatacgtyacccatatacagtgtttctctaagtatagatttataaataaaatgtgttttttgaaacattttattttaaaaattttacattttctgataatcagttacaaatattgaaacatgcaatgcttctccttactataataaatttacaaaagacatttatctacataatgttaatatccatttt

SEQ ID NO: 137630 - DNA, 563 bp, Homo sapiens
ctagggagtgaactgggagaccgatgtcctttcttccacatcagtaatgttgactaggttattcatgccaaaagttttcaaatagcagtcygaaaggcaccagaaatgaaatacttttcatgaacaatacatagttatgaaacctcagaaaatggttcttttatggtgcttattaaattttaatcacattaacatggctcaatactttaacgggttgtgaactccctgaaaatagaaccatgtttcattcatctttgtattcccagaatctaattttgtgttggctgtatagtatcattaaacatgttcattctttatttaatgaactttagtgaataataaaaacatttgttttatattgacaaatgataattattttgaatatacatagttcatatttttacatgcttaatatatatcatcatatagccttaggcatgtttactcctttgaccatcgcaaccacttgctctattattaataatctctgttttgcacgtgagaagcacagagtggctaggtaactcctctaaggtcggtcacttggccaagttctaatctta

SEQ ID NO: 137631 - DNA, 567 bp, Homo sapiens
gatgtcctttcttccacatcagtaatgttgactaggttattcatgccaaaagttttcaaatagcagtctgaaaggcaccagaaatgaaatacttttcatgaacaatacatagttatgaaacctcagaaaatggttcttttatggtgcttattaaattttaatcacattaacatggctsaatactttaacgggttgtgaactccctgaaaatagaaccatgtttcattcatctttgtattcccagaatctaattttgtgttggctgtatagtatcattaaacatgttcattctttatttaatgaactttagtgaataataaaaacatttgttttatattgacaaatgataattattttgaatatacatagttcatatttttacatgcttaatatatatcatcatatagccttaggcatgtttactcctttgaccatcgcaaccacttgctctattattaataatctctgttttgcacgtgagaagcacagagtggctaggtaactcctctaaggtcggtcacttggccaagttctaatcttaccggaatttgaatttgaattttgtag

SEQ ID NO: 137632 - DNA, 547 bp, Homo sapiens
tttggctttaatcattaacttcagctttcaatctcctctcctttatccccatcagaaaacttctcaagcctctagtctggcatggagattagcrttgaggcctgttggttcaattagcctctgtgcttcattatgatccatgacataatgacatgatgtgatttgccccagtgcactctgaagtgacttgctgctgtggttccgcaaggcagaaagaatttttgagaggccccattcttgttgacatcacactttctaaaacaccagatttcccactgattttgtagaaaattagtttacatatgactatctccaccaataggcacacatgtatgtgtacatacatataggcctgctggcctaaattgaacatcttaattattctcttattttgtaggaatcactgaatacatttttggttccacttttgtttgactcaaaagtgcgcatgtgtgagcgtatgtgtggggaagatgaaggagggcagatggaaaatgtgttctttaagatattcctgaaataaatgcaactatgtttgttgctttcc

SEQ ID NO: 137633 - DNA, 547 bp, Homo sapiens
tttggctttaatcattaacttcagctttcaatctcctctcctttatccccatcagaaaacttctcaagcctctagtctggcatggagattagcgttgaggcctgttggttcaattagcctctgtgcttcattatgatccatgacataatgacatgatgtgatttgccccagtgcactctgaagtgacttgctgctgtggttccgcaaggcagaaagaatttttgagaggccccattcttgttgacatcacactttctaaaacaccagatttcccactgattttgtagaaaattagtttacatatgactatctccaccaataggcacacrtgtatgtgtacatacatataggcctgctggcctaaattgaacatcttaattattctcttattttgtaggaatcactgaatacatttttggttccacttttgtttgactcaaaagtgcgcatgtgtgagcgtatgtgtggggaagatgaaggagggcagatggaaaatgtgttctttaagatattcctgaaataaatgcaactatgtttgttgctttcc

SEQ ID NO: 137634 - DNA, 547 bp, Homo sapiens
tttggctttaatcattaacttcagctttcaatctcctctcctttatccccatcagaaaacttctcaagcctctagtctggcatggagattagcgttgaggcctgttggttcaattagcctctgtgcttcattatgatccatgacataatgacatgatgtgatttgccccagtgcactctgaagtgacttgctgctgtggttccgcaaggcagaaagaatttttgagaggccccattcttgttgacatcacactttctaaaacaccagatttcccactgattttgtagaaaattagtttacatatgactatctccaccaataggcacacatgtatgtgtacatacatataggcctgctggcctaaattgaacatcttaattattctcttattttgtaggaatcactgaatacatttttggttccacttttgtttgactcaaaagtgcgcatgtgtgagcgtrtgtgtggggaagatgaaggagggcagatggaaaatgtgttctttaagatattcctgaaataaatgcaactatgtttgttgctttcc

SEQ ID NO: 137635 - DNA, 575 bp, Homo sapiens
attgccaatggtgtgagtcccagtccaaggacggaaggctggtgtctcaamtcaagcagtcaggcaaagaatgtaaccttcctttgcctgattgttctattcaggccctcaactgcttggatgaggcccacccacattggaaagggccattcattttattcagtccattgatttaaatgctaatctcttctagaaacaccctcacagacacattcaggaataaaggttaaccagatatctgggcctcctggcccagtcaagttgatacataaaattaactatcacagatggcattgagctcactagacaccactcaacatcctgtctggacacccagctccagacaggatgctgggaaggactgatgttgagtggtagttttgcaggatatcagatcacttttctttagttaactgcctttttcctgtactaccactttaaatccaggaagtttttctcagttgctctcttatcttaattgcatatttttcataagggcttattgttcaaacatagccctaagatcctatagatttattattactcttctttttgtccttatttgttatttctca

SEQ ID NO: 137636 - DNA, 476 bp, Homo sapiens
tttttaattaataatataaaatctcccacctatatttacaacttctaggaaagagagggaggaagcatatcttagatacaactcccaaattgtgcttttatattactctggggcgatacataataactccattgccacrtagtttgcatatttattgcagaagacccattctgagcagtatttagcattcggtcagaaagagctccaactgaaaggaaaaagaacacctttgcctttgaagtaagagtaactatttaaaggtagtagaaaatgtctttctagactagactacccctagacattgtaaaagccctggaaattatccctaggaaagagagctataaaaaaatgaagtttgctggttgtgtttccatttaaggtctgggtgtggttgtagcaactgactccttgtggctacgcctttgcagagactgcttttaaagtataaatacaaaggaaattagagacttaaaacc

SEQ ID NO: 137637 - DNA, 591 bp, Homo sapiens
ccatttaaggtctgggtgtggttgtagcaactgactccttgtggctacgcctttgcagagactgcttttaaagtataaatacaaaggaaattagagacttaaaaccagtcaaaaatgtgttctttttaggaatgaaaggcctttaagtgatctaagatgctttttctgtaaagcagtaggtttctttgaatacaagaacacatggcaaaggctatggttctaagactggggaaaaggactttgtaaacacactcagagaaatgtcaggataatacctccaggggacttcggccaagatttgtttattggatttccacaattgaaccaatcatgattaaattgccttagggcaaaagttcaaagggctaacaatcagaatgcataaaaagtagaacaactggcatatattaaaataaacaagatgtcatgtaaagagatgtgtctttcaattctttacagttcggcttgtagaaggtcattaaacaaggawtaatgtggggaacaaagaatcccacaaacaagagccatccacaaagtctaattccttcttgagttctttacagatgaaatgtggtaactgttagctagagc

SEQ ID NO: 137638 - DNA, 616 bp, Homo sapiens
tccagtcagggtgacagagaccctgtccaaaaaaaaaaaagaagaagaaaggaaaagaaaagaaagaaagaggcaaactatggtctgtttggggatacagaaagaaaggcacagtctctgccctttgggaccttaccatctaccagcaaaagtggggaatgcaaacaaaaatgtcaataagaacatcaatattaatgttctttgtggccaaatcacattctaggctcaaatactagatctactttcaaagatttgctgccaagttggctttattttcccttatatttgcacaattgatattttttatttaaatgaagaatatagttctattttctttttttcctattttctaaaatggctgagattattgaaatmatttttagattcaattttacatatctctcgatgtgttatttcttccagaataaagtcatcctcagtcacattaggtatgccttcactgtgcatagtgaagacatttcatgtgatagaggacaaagctaaggacagtgagctgtgacctctgctaatgtcccccctcagtgttaaccttatgctacatgatatagtgcttggagtttaatgaatgatttcatatgtctcatttagtctcaca

SEQ ID NO: 137639 - DNA, 578 bp, Homo sapiens
tcaacctattataaactcttagagcacttattatagtgaatcctattgtactttctttctttttttcctcccaaaagaatactggagtcatttatttccttgcaggagcactgtggatgtctttgtaagtctgatagcattatctgacaaataatcaatgtttggctgtaacccgagggcctccagagctagaggacattagtcagcatggtatcatggagaaggaggcaaatccagcataaattgttttctgtgctgaaattatcaggtgatttttgcccaggactttccatcataacacttcctataggattagatttgaagctcagaattattttgattattcatcatgtcatcttttgtatctcgacagcttttctttcacaaacttattatagcaaaagcccagctgaatgtttcccgacatgtatcagtaaagtgacagaacagctctatrtccttatgctcttcattttgcagagaggttaaagtgaccttttaacagacccacaataaaattggaatatgaaaagagtgtgaggcccaggtataaaacacgctccaacctagctgacata

SEQ ID NO: 137640 - DNA, 527 bp, Homo sapiens
caacatctccattaagcagagtaggcacagtgcaagggcccacgatagtgttgaagttcataaaaaatgttttagtttcatttaaaatctggaaaaaattaacttttaggtcaagaacatgttaayctattcatctttgtatgaacgcagttgtaaaatataattctaatatgattttaggaaggaagaggtccatgaaggcaaaattggctaggacccataaaagtcacaaggtagtcctgattgtccttaatcatggccagctatgtgatttgtatgttttttatgcaaaataaaaaatgcagggcctcttgttcaaaatattataaatttcaaggtggtgacggtagagcattaaaccaagcatggggccctctgagcatggtaccctgtgcaacctgtcttgagaggtggctgatgggaaccatatttttgttagaatctaatatttcatgagccaagcccagagtcttcatctctacttttgacccaactttctgcatttctaatccctttcttcctccgtg

SEQ ID NO: 137641 - DNA, 527 bp, Homo sapiens
caacatctccattaagcagagtaggcacagtgcaagggcccacgatagtgttgaagttcataaaaaatgttttagtttcatttaaaatctggaaaaaattaacttttaggtcaagaacatgttaacctattcatctttgtatgaacgcagttgtaaaatataattctaatatgattttaggaaggaagaggtccatgaaggcaaaattggctaggacccataaaagtcacaaggtagtcctgattgtccttaatcatggccagctatgtgatttgtatgttttttatgcaaaataaaaaatgcagggcctcttgttcaaaatattataaatttcaaggtggtgacggtagagcattaaaccaagcatggggccctctgagcatggtaccctgtgcaacctgtcttgagaggtggctgatgggmaccatatttttgttagaatctaatatttcatgagccaagcccagagtcttcatctctacttttgacccaactttctgcatttctaatccctttcttcctccgtg

SEQ ID NO: 137642 - DNA, 527 bp, Homo sapiens
caacatctccattaagcagagtaggcacagtgcaagggcccacgatagtgttgaagttcataaaaaatgttttagtttcatttaaaatctggaaaaaattaacttttaggtcaagaacatgttaacctattcatctttgtatgaacgcagttgtaaaatataattctaatatgattttaggaaggaagaggtccatgaaggcaaaattggctaggacccataaaagtcacaaggtagtcctgattgtccttaatcatggccagctatgtgatttgtatgttttttatgcaaaataaaaaatgcagggcctcttgttcaaaatattataaatttcaaggtggtgacggtagagcattaaaccaagcatggggccctctgagcatggtaccctgtgcaacctgtcttgagaggtggctgatgggaaccatatttttgttagaatctaatatttcatgagccaagcccagagtcttcatctctacttttgacccractttctgcatttctaatccctttcttcctccgtg

SEQ ID NO: 137643 - DNA, 559 bp, Homo sapiens
aaatctaactgtccatgaaggcctacttcataatgacaaacaatggcattttcccagaaaaatggaggaatagaaagcccctgagttgctaaggaagaagtactcgtggaaatgccaggtcctaaccattgctcattcagaagctgcaactaatattaagaaaattacaatgtggaagcttgggccttgtccattcaaattcataactacaaactcaaatcacttctttaaaagctatagctgtagcttataagagctagtagtgagttattaagtcatatgattttttttggtgatggtacattcaaatgtgagtgtgcgttgtcagcakcacatttcaaaaaaagtgacattaactcatcacattttcttaaataaaatgtgcttgatatctccacaaatggggcaaaggagaaggaaatcccaatgattccaagcagtgaattctccgctacttctctgctacatcatcaaaatgtaagttacaatcagatttagcttgattttaggggaaaaatataactggatattttctgcacctgagcatatttgcaaattc

SEQ ID NO: 137644 - DNA, 559 bp, Homo sapiens
aaatctaactgtccatgaaggcctacttcataatgacaaacaatggcattttcccagaaaaatggaggaatagaaagcccctgagttgctaaggaagaagtactcgtggaaatgccaggtcctaaccattgctcattcagaagctgcaactaatattaagaaaattacaatgtggaagcttgggccttgtccattcaaattcataactacaaactcaaatcacttctttaaaagctatagctgtagcttataagagctagtagtgagttattaagtcatatgattttttttggtgatggtacattcaaatgtgagtgtgcgttgtcagcagcacatttcaaaaaaagtgacattaactcatcacattttcttaaataaaatgtgcttgatatctccacaaatggggcaaaggagaaggaaatcccaatgattccaagcagtgaattctccgctacttctctgctacrtcatcaaaatgtaagttacaatcagatttagcttgattttaggggaaaaatataactggatattttctgcacctgagcatatttgcaaattc

SEQ ID NO: 137645 - DNA, 490 bp, Homo sapiens
gcatgactaacacataggctgccaggggaactgagtgtattatgtatgaccctgctgtaattgtaaggaaatgatattcatttaagtggatgwttatcacagttaaaggtgcacctaatgaaacaaaggtcataagcctaaaaacacaaggttatagcccttttatcgcaccacttctctctctgtttgaaaagacctggcctttattcacagctgtttttctaacacctgtgtgctctgtttatgcagccttaaagagttcctgtcacccatatttaaatgccaaaaggactattatattaaatgttcttctaagattatttccacacatctgggaaatatcagacagcatgctgcaatatatatcaattcaggctagagtttttagctaccgatatttggttagctgaggagtatcccttcctcccaccaccagccacatttctctctatgggaaatgtctaacactacattaagtgagaactggctt

SEQ ID NO: 137646 - DNA, 536 bp, Homo sapiens
atttgatgtctcatatagaacttttctccctaaatgctaagaattactcagaattgtattttatatggactaacaaaaaataatttgacgcctctcaaacttacggacttaggagtaattcagcctatgaaaagtaggtttcctggcttctaatctaatcgtgttcagatagatacatttgggcaaagcagcctttttttcttttttctcagacagggtctcactctgttacccaggctagagtgcagctgtgcgatcaggtctcactgcagcctcaaactcctgggctcaactgattctccaacctcagcctgccatgtagctggaactacagtcatgcaccaccacgcctggctaattttttgttttttcttgtttagtttttgcagagatkatgtctcactatgtcttgaactcctggcgccagttttctcaagtgatcatcctgccttggcctcctaaaggaggcaaacttatgtttgttttgttttgttttgttttgttttgttttgttttgttttgtttgagacagagtc

SEQ ID NO: 137647 - DNA, 420 bp, Homo sapiens
acttaacttaaaagttccaaagttcaaatccaaagtttcatctgagactcaaggccaagttccttccactgatgaacctataaaatcaaatacaaatcaaagaaatcactttcttccaagataagatggtattataggcattggrtaaacatttccattccaaaagggagaaattggccaaaaagaaaggggtaataggccccatgcaagtctggaacccagcagggcaggcgttaaatcttaaagctccaaaataatctcctttgatcccatgtcctgcatccagagcacactggtgcaaggtgtgggttcccaaggccttgggcagctctgcttctgtggctttgcagggtgaagcccctgtggatgctgtcatgaattggaggtgtgtacctgcaggttttccaggctcaggatgca

SEQ ID NO: 137648 - DNA, 598 bp, Homo sapiens
ttagtgaggttttttttgacacttaaaatggaattattacttttattgacaatttagggatataatggacattttcacagaacaaaaatgagacagtcccaagacaatggagtataaaagtatagcacacaggttaatactcttcactctcatcctttccctcagcactatctgctccaacctcctcrtaatccttttcaagggcagccatgtcctcaggggctccagaaaactcttcttcctccatcccctcacccacgtaccagtgaacaaaggcatgctttgcatacatcaggtcaaagttttggtccaggtgagcccaggcctcagcgacagctgtggtgttgttcaacatgcacacaactttctgtactttggctaggtctccactaggcaccacagtgggaggttggtagttaataccaaccctgaagccagtggggcactaatccacaaactggatagtacacttggtcttgatggtggcaatggcagcattgacatctttgggaaccatgtcaccatggtatgacagacagcaagccatgtatttaccatggtgagggtcacatttcactacctggatggctggctcaaa

SEQ ID NO: 137649 - DNA, 598 bp, Homo sapiens
ttagtgaggttttttttgacacttaaaatggaattattacttttattgacaatttagggatataatggacattttcacagaacaaaaatgagacagtcccaagacaatggagtataaaagtatagcacacaggttaatactcttcactctcatcctttccctcagcactatctgctccaacctcctcataatccttttcaagggcagccatgtcctcaggggctycagaaaactcttcttcctccatcccctcacccacgtaccagtgaacaaaggcatgctttgcatacatcaggtcaaagttttggtccaggtgagcccaggcctcagcgacagctgtggtgttgttcaacatgcacacaactttctgtactttggctaggtctccactaggcaccacagtgggaggttggtagttaataccaaccctgaagccagtggggcactaatccacaaactggatagtacacttggtcttgatggtggcaatggcagcattgacatctttgggaaccatgtcaccatggtatgacagacagcaagccatgtatttaccatggtgagggtcacatttcactacctggatggctggctcaaa

SEQ ID NO: 137650 - DNA, 438 bp, Homo sapiens
gtttaaattgtaggaaaaggaaaggaggtgatattacgaatataagctcattttctcaggctgcrtgaacttggagttttaaaaggggtcatataaatggtaataacccatattttttggcttttgatccttctggctattaccaacctctatgtcctttctagccaaccccagtggggttccccagggtgcggtcgtctgtgcctgctagttctatcaaccacccgtgaatttctgactgttatttcccccccgcgcctgcttctggccctcatgtttgattaggcgcgctggcttcgagaggggtgatagcctttgctctcagtcagtaccctctcctggtaccatttatgctatgcctctgatttctttcttggagttcttgatgtaagctgggtggaagtgggataatgccttcttctcccttggggatacacg

SEQ ID NO: 137651 - DNA, 534 bp, Homo sapiens
taggtattattattgttgtcaatgttgcattaagattaggctggcataaaacattagaatctgttcagtgcatggaacaattacattaaacacaagagtatactctatcacctactcaagaataggrtaaagaaataaccatgaaaccaggtggtaagagtttctacagcactgattgcaaatatttatctttgtggccccagtaattttgagagctgtacatagtgggtcctcaataaatgctgaataaatgaatgttttattttgctgatttttaaaagatttttctacttataaaaaataaaaggaaagtacacaacaaaacctttcacccatttattgtgcctttatgtttctgggctaaggcttatggatggtcttcaggttggggatagaagagtcctagttatcatttggctagattacttgggaataaataatggttttgaattttgacttggctacttcaaaatgcctagatcaggtaagcaagagttaatgtgatgtgtataccaaaagaactagtcttagatg

SEQ ID NO: 137652 - DNA, 534 bp, Homo sapiens
taggtattattattgttgtcaatgttgcattaagattaggctggcataaaacattagaatctgttcagtgcatggaacaattacattaaacacaagagtatactctatcacctactcaagaataggataaagaaataaccatgaaaccaggtggtaagagtttctacagcactgattgcaaatatttatctttgtggccccagtaattttgagagctgtacatagtgggtcctcaataaatgytgaataaatgaatgttttattttgctgatttttaaaagatttttctacttataaaaaataaaaggaaagtacacaacaaaacctttcacccatttattgtgcctttatgtttctgggctaaggcttatggatggtcttcaggttggggatagaagagtcctagttatcatttggctagattacttgggaataaataatggttttgaattttgacttggctacttcaaaatgcctagatcaggtaagcaagagttaatgtgatgtgtataccaaaagaactagtcttagatg

SEQ ID NO: 137653 - DNA, 485 bp, Homo sapiens
atttaccatattgtgtggttctgcagaggctgccatgctattatatatacttttatcttgggtaaaactctgtggctgctgctgccacaattactcaaagacccaatgtgtcaaaaaaataatcgaaatagcaaagtgagagtcaagagtttttccgttgtttcttgaagtcttagaaagattktttcctttgtattccctatattcagaatataaaagcctctcagaaatccaatctttactaggtcaaacatttcaaaatggagtaaaattattttgcagttgcttctcagtttaaggcatgtgctttaggaacttccaatcttcctcctatttatgaataagaaaaacaaaacaaaaaactaagtaaatgccatataatcccagctacattgtcctcatgtaaacatcctaacacagcatgatggaaaaagttccaaattgtgatctcagagatctgagttccagccctagttttgtgaaaa

SEQ ID NO: 137654 - DNA, 485 bp, Homo sapiens
atttaccatattgtgtggttctgcagaggctgccatgctattatatatacttttatcttgggtaaaactctgtggctgctgctgccacaattactcaaagacccaatgtgtcaaaaaaataatcgaaatagcaaagtgagagtcaagagtttttccgttgtttcttgaagtcttagaaagattgtttcctttgtattccctatattcagaatataaaagcctctcagaaatccaatctttactasgtcaaacatttcaaaatggagtaaaattattttgcagttgcttctcagtttaaggcatgtgctttaggaacttccaatcttcctcctatttatgaataagaaaaacaaaacaaaaaactaagtaaatgccatataatcccagctacattgtcctcatgtaaacatcctaacacagcatgatggaaaaagttccaaattgtgatctcagagatctgagttccagccctagttttgtgaaaa

SEQ ID NO: 137655 - DNA, 485 bp, Homo sapiens
atttaccatattgtgtggttctgcagaggctgccatgctattatatatacttttatcttgggtaaaactctgtggctgctgctgccacaattactcaaagacccaatgtgtcaaaaaaataatcgaaatagcaaagtgagagtcaagagtttttccgttgtttcttgaagtcttagaaagattgtttcctttgtattccctatattcagaatataaaagcctctcagaaatccaatctttactaggtcaaacatttcaaaakggagtaaaattattttgcagttgcttctcagtttaaggcatgtgctttaggaacttccaatcttcctcctatttatgaataagaaaaacaaaacaaaaaactaagtaaatgccatataatcccagctacattgtcctcatgtaaacatcctaacacagcatgatggaaaaagttccaaattgtgatctcagagatctgagttccagccctagttttgtgaaaa

SEQ ID NO: 137656 - DNA, 577 bp, Homo sapiens
gtgaggacaatgaggagcaagctcccagctgacccacagagagcatgcactaggagcaggaaaccttggttgttttaagycactgagatttttatgggttatttgttaacaatagaataagcaagcttattcttgattgacatagtctctaaagagtgtaatggtgatgaatgagggaaagtttcatacttaagaagatcttttttcttaaattaaaattttacagacctttctatagatagatgttaaaactacttttaggggaagcaagcttcctatcagtgggaatattgaaatgtggactgggcaacctcttgatggaggttgctatagaaattgaagaataaatggtggttagagaatttcaaagttcattctagtttaaaggtatttagatttgcattcctgagggtaactctcgcaccttacatttttgcagcaggtatagtttataaaatgctttctccagtgttaacttatttgctctcctgtgaatagcaagaaattttatctactgtgccttccatggagacttgcacaggtgttaagaaaaatgtattttgtaggagaagcaaga

SEQ ID NO: 137657 - DNA, 577 bp, Homo sapiens
gtgaggacaatgaggagcaagctcccagctgacccacagagagcatgcactaggagcaggaaaccttggttgttttaagccactgagatttttatgggttatttgttaacaatagaataagcaagcttattcttgattgacatagtctctaaagagtgtaatggtgatgaatgagggaaagtttcatacttaagaagatcttttttcttaaattaaaattttacagacctttctatagatagatgttaaaactacttttaggggaagcaagcttcctatcagtgggaatattgaaatgtggactgggcaacctcttgatggaggtygctatagaaattgaagaataaatggtggttagagaatttcaaagttcattctagtttaaaggtatttagatttgcattcctgagggtaactctcgcaccttacatttttgcagcaggtatagtttataaaatgctttctccagtgttaacttatttgctctcctgtgaatagcaagaaattttatctactgtgccttccatggagacttgcacaggtgttaagaaaaatgtattttgtaggagaagcaaga

SEQ ID NO: 137658 - DNA, 577 bp, Homo sapiens
gtgaggacaatgaggagcaagctcccagctgacccacagagagcatgcactaggagcaggaaaccttggttgttttaagccactgagatttttatgggttatttgttaacaatagaataagcaagcttattcttgattgacatagtctctaaagagtgtaatggtgatgaatgagggaaagtttcatacttaagaagatcttttttcttaaattaaaattttacagacctttctatagatagatgttaaaactacttttaggggaagcaagcttcctatcagtgggaatattgaaatgtggactgggcaacctcttgatggaggttgctatagaaatkgaagaataaatggtggttagagaatttcaaagttcattctagtttaaaggtatttagatttgcattcctgagggtaactctcgcaccttacatttttgcagcaggtatagtttataaaatgctttctccagtgttaacttatttgctctcctgtgaatagcaagaaattttatctactgtgccttccatggagacttgcacaggtgttaagaaaaatgtattttgtaggagaagcaaga

SEQ ID NO: 137659 - DNA, 577 bp, Homo sapiens
gtgaggacaatgaggagcaagctcccagctgacccacagagagcatgcactaggagcaggaaaccttggttgttttaagccactgagatttttatgggttatttgttaacaatagaataagcaagcttattcttgattgacatagtctctaaagagtgtaatggtgatgaatgagggaaagtttcatacttaagaagatcttttttcttaaattaaaattttacagacctttctatagatagatgttaaaactacttttaggggaagcaagcttcctatcagtgggaatattgaaatgtggactgggcaacctcttgatggaggttgctatagaaattgaagaataaatggtggttagagaatttcaaagttcattctagtttaaaggtatttagatttgcattcctgagggtaactctcgcaccttacatttttgcagcaggtatagtttataaaatgctttctccagtgttaacttatttgctctcctgtgaatagcawgaaattttatctactgtgccttccatggagacttgcacaggtgttaagaaaaatgtattttgtaggagaagcaaga

SEQ ID NO: 137660 - DNA, 501 bp, Homo sapiens
attttattgctaagtagtattcaaagtaagaaagtaccacagtttgtttaataattcaccscttgaagggcatctgagttgtttctagtttttggctattatgaacaagctgttatgtaggtttttgtatgcaggtttttcatttctttgggataaatgcccaataatgtaattgctgggtaataaggtagttatatgtttcagctgccatacttttggctataacattttacatttctagcagcaatgtatgaatgatccaacatcctcatcaatatttgatgttgtcacttttttattgtagtcattccaatagttgtgtagtgatacactgtggttttactttgccttttcctaatggataatgatattgaatatcatttcatgtgcttagcctcccgagtacctaggaccagagccatgtgctaccacccccagctaatttttaaaaatttcttttgtagagaagtgttcttgctatgttgtccaggttggtctgga

SEQ ID NO: 137661 - DNA, 501 bp, Homo sapiens
attttattgctaagtagtattcaaagtaagaaagtaccacagtttgtttaataattcaccccttgaagggcatctgagttgtttytagtttttggctattatgaacaagctgttatgtaggtttttgtatgcaggtttttcatttctttgggataaatgcccaataatgtaattgctgggtaataaggtagttatatgtttcagctgccatacttttggctataacattttacatttctagcagcaatgtatgaatgatccaacatcctcatcaatatttgatgttgtcacttttttattgtagtcattccaatagttgtgtagtgatacactgtggttttactttgccttttcctaatggataatgatattgaatatcatttcatgtgcttagcctcccgagtacctaggaccagagccatgtgctaccacccccagctaatttttaaaaatttcttttgtagagaagtgttcttgctatgttgtccaggttggtctgga

SEQ ID NO: 137662 - DNA, 501 bp, Homo sapiens
attttattgctaagtagtattcaaagtaagaaagtaccacagtttgtttaataattcaccccttgaagggcatctgagttgtttctagtttttggctattatgaacaagctgttatgtaggtttttgtatgcaggtttttcatttctttgggataaatgcccaataatgtaattgctgggtaataaggtagttatatgtttcagctgccatacttttggctataacattttacatttctagcagcaatgtatgaatgatccaacatcctcatcaatatttgatgttgtcacttttttattgtagtcattccaatagttgtgtagtgatacactgtggttttactttgccttttcctaatggataatgatattgaatatcatttcatgtgcttagcctcccgagtacctaggaccagagccatgtgctaccacccccagctaatttttaaaaatttcttttgtagagaagkgttcttgctatgttgtccaggttggtctgga

SEQ ID NO: 137663 - DNA, 581 bp, Homo sapiens
tatttctgttatgctttttaaaagttcatatctttgtaggtacatactgctgcattcaaggagaaatgacataatgtctggaatttgctttaaaatacagcaagtcccccactcctctatctcaaacacctaaataaaaagaaatgaacaaaagactaaaagtctgtgtgtgtggtggttggaacaagaatggcagaatactgataactgttgaaactggattatgtgtacatgaarctgcattcctattatacaattctctctactttagtctgaaaatttctaccacccaaaaaaatgctctttggcccctcttttttagggattctttaagaaactggagatttaatctcatcagcaaatttttacaaggctacatttgccctatcttcattctccttctgcctggggacagtctgcagtgccctttcaaatttgggcccatcttggtcctctgggtatttctactgcttttttaatgcagtgatttctgggagtccccctcatacttgtcaactaatagtcccactggactggggccactgccccaaataaggtgtctctaattttagattggaatc

SEQ ID NO: 137664 - DNA, 581 bp, Homo sapiens
tatttctgttatgctttttaaaagttcatatctttgtaggtacatactgctgcattcaaggagaaatgacataatgtctggaatttgctttaaaatacagcaagtcccccactcctctatctcaaacacctaaataaaaagaaatgaacaaaagactaaaagtctgtgtgtgtggtggttggaacaagaatggcagaatactgataactgttgaaactggattatgtgtacatgaaactgcattcctattatacaattctctctactttagtctgaaaatttctaccacccaaaaaaatgctctttggcccctcttttttagggattctttaagaaactggagatttaatctcatcagcaawtttttacaaggctacatttgccctatcttcattctccttctgcctggggacagtctgcagtgccctttcaaatttgggcccatcttggtcctctgggtatttctactgcttttttaatgcagtgatttctgggagtccccctcatacttgtcaactaatagtcccactggactggggccactgccccaaataaggtgtctctaattttagattggaatc

SEQ ID NO: 137665 - DNA, 438 bp, Homo sapiens
ttgctctttattattaaaaatacttgtagaccctaagaagatcccacaaagtagtagataggtgatcgggaattgtcagcctggcattaagatgtgttaatcagcaagatagataataggcctttaggtaaataagaggtgattttatgtactttgatgactagtaattactttttaaatcagatatatccttttatttgaaggtaaaatttaaatacttargttattgtatgctctatgtcttgactatgatgccttttataataatttctaaaggcttaatttaagaatacagaatataaaatacatagcaacctagtttgataggctgttagctcaaatagagttgagaacactaagtccttcttttctttcagttcttgatggtgctatccactcattcttatcacccaatcttatattctgactttcagcaaa

SEQ ID NO: 137666 - DNA, 453 bp, Homo sapiens
ggcatttattactaaaaattatattgcaaaatcttatctttgaaactacctaaattgtagyacctagttgactgtattttaattaaatggcatctttctgaattaacttaaacaaaaaccctgtcttcatattgctttatttgtatttttgtttttgagacaaggtcttgctctgtcacccaagctggaatgcagtggcgtgatcataactcactgttgcctgcaactcctgggctcaagcaatcctccagcctcagcctcccaaatagctgggactacaggtgtgcaccaccacacttggctaattttttaattatttttttttttttagagatggggtcttgctgtgttgcccaggccggttcatattgctttaatgctctacaacaaacgttacaaggtttaagagtggacaatcctcacaaggctggcttaaagtccaaaccaaaactc

SEQ ID NO: 137667 - DNA, 392 bp, Homo sapiens
taaaagaaatggtcattccagtgggaatacacatgggcatattcagggagataaaggaagacaataaggctttttaaatgaaaaatgaagagggttacacaggtcatttttagacaattatccttggctagaagsatcaataacaagggtgacatcagtccaaggtaggataggcagttgctggacagatatcctcacagaagtattcttttgtgtaagggtgcagtggcctaaccaaggttgtagtttttacagtcttacgtaatagttcttgttattagggatactgtgtgagaacctcccttcaccgccttccctggctccactgatcagggttttaacacaggtaactccattttgattctgacaactttcgtaaccttatactgaca

SEQ ID NO: 137668 - DNA, 581 bp, Homo sapiens
gaccttaggaggaagtggaagggacagggatgcatttgtgaggaagttacatttcagttgaaactcaaagcatgagtggtagttaacattagttaaaattatggtggttgcctcaacatgttaaacatagtttccttatcacctagcagttctatctttaggtataaacccaagataaataaacacatacatccatacaaaagcttgtacatgaatgcccatagcrgcattgttcataatagtcaaaaaatgaaagtaactcaaatgtccatcaacttgtgaatggataaactaaatgtggtatatccatacaataggatattacgtgatgactaagaacaaaacactgatccacggtacaacatggatgaaccttgaaaacattatgataagtaaaagaagtcataaacaaaatacgacatattggataatcctatttgtttgaatgtctgcaataggagacagaagagagatgcaaagtagattaatgatttcctagggttgagggaaaatggaaagtgaaagcttataggtaaaagggttttttaaagggtgataaaaacgttttgaaatagatgtaa

SEQ ID NO: 137669 - DNA, 536 bp, Homo sapiens
tacctggcacagaatgatctgttagtgctatcyaattagctgatcactgctaagaaggctcagtgtgaattataatgatggtaatgattatctgggggaaacaatcggtatctacttctctcttctgaaaaaaaaaaaaaaatctcagtcctggtgatcagaggccttttccaagaccccacagcttcctttatcatttttctcaggggcccaagaagattctggtggctcctcagaaatcacagtttttctaagacccaggatacaggtgagtggcctggcaatttaacgtggaatttaaggaatcatccacagcccacagcccctctgggacactatgagggtcagtgctgcctcctcttttttgactgcttcatttccaggccagtgttccaggagagactccttactttgtggaatgtatgtgtgtctctgtgtgtgtgtgtgtgtgtgtgtgcgcgtgtatgtgtgtgtatttcccttctaccctgtgccatttctcctttgatcctttgattccatttccctatttagat

SEQ ID NO: 137670 - DNA, 621 bp, Homo sapiens
aatatctccaatagattttatcccaatatacctatatataagcccttggttgaataattccttgttaaaggattttagattagaatcggagttttaaatgctgaaccacaaaggagttgttgaaacctccataagcagctaaaatctagttctcacttcacaagaaatttggccaaggaagatattaaatagagtggtgtcaccagtcagagttgatgaaatgcgagcacagagatggtacctatcaagagggaaattagaataaatgaatattaaaatatttaaatctataataatgtgttcaaaacacagttctgaagaacgttattactggaagtgagaaaccagtgctaagtcacttacattcttttctaagcaagctccttccctccatttcaactcattaggataatgttagcttcaagtgtaatggtgtaattttaactgtactgtacacaaattactctggttcttgcactgacaaggtttagcaataatcccccttggtacagcgttagcaattgctacaatgctagaaaaacaaaaaagaatgggrcatttagaaataagaaatatatacttaagaaaaccagtaggttatttaccaagggcagagaagaa

SEQ ID NO: 137671 - DNA, 527 bp, Homo sapiens
tgggcatatgaaaaaatcatactgtttaaactggcaactagtattttcttaactagagaatctatagctttctggtctaggttcctggtcatttatgaaaacatttctaagatctgaaataaccctgggactgggtcttttcaagaatcaagcatacaactatgtaatttgaaggctttagttgtttataacacaggctgtgcagtcagatcrgtggggaaatcccagctctgtcactaagagctgtgtaactttgggcaagtaacctgacctctgagagcatagctgtctgcacctgtaaaagagagatcagaaaaatgtctatcacacataacccttaaggagacaagttatatgaaggcaaggtgcccagcacatagtgtcagtcaatagtattcatcattaatgtgtgtgctaatttgcaaaaagactcccttctcagctcagtgtttgggaaagccacagcataaatgagaaatccagggactggggtggggaaaggaagtgctggatggagggtgggaggg

SEQ ID NO: 137672 - DNA, 444 bp, Homo sapiens
ttttagcagtcactgggctgttccatagtgctttgcacacatggctaaactacctccctgggcaatgcctcctcaagggcaaagaccttagctggtgctcaataaatgcttactgagtgattagtaaagatactaagtggactaatacatttggatttaaaaaaaataaacacaacaatgtgtcaactggtctggggaagtgtgacctaacagaaaattactgaagagaatgtggtcrcaatcaataggaaacaccaggagacttcaggagcagtggttctcaaccaagaaccatcttgccccgcactgggcctttggtaatgttttggttttcacaactgaggttgtactactggtatctagtgggtagaggctgggatgctgctgaatatcctgtactgcacagaacaggcccccacaataacaaattatttagccccaatt

SEQ ID NO: 137673 - DNA, 387 bp, Homo sapiens
ttattttaaattatatttggcttaaaaaacccactgtgtttccaattctgaaagcaaacaaaagtgtagttatctgaaaatacagagaaaaggctgtgctctctaaatcatgctattatctgtagggttttgttttgttttgttttgtttttttgttaccacraacactacctagcatactgttagacaaggtaagttatccagatagcctactcgactctgagtgaatttctattctaaaaaaccaaatattggtgtgtatctaactgatgttcaaacgaagtacaaacaatttcagatgtaagatatttaaagacataaaatgatcctgttaagggtatatacagttaatatgctagaagattcatgagttttattgataacatg

SEQ ID NO: 137674 - DNA, 532 bp, Homo sapiens
catattccgccatgatacttactttgagtattattactggcgtaagatcatttgccccctagactaagtgcctccatacctctatttcccagtctctttgcctaattagtggcacataaaagacatttgataaaaatgtgctaactaaataggtaaaaaccattcccaccactcagctacagctctctcagacactaaaattctcttcrtagatgaaaaggtgtttgttaacctttaaacaaatattcttgtaatacattaaataaaacatcatccatatcatcctctgtcatgttctaaatttctcatacctttctggtttggcaaaaatacaaaaattaacttagatttcactcagggaagaaaccaccatttcctaaagaaaccttctcattagaatactgtccttttgtctttgtttcaagtagctgaatttgcaatacattaatagtttaagaaaaaaaaaagacatgttttcattatttaaaaccatgcctggcatttgggtgtaaagcaagagataaaataggcg

SEQ ID NO: 137675 - DNA, 515 bp, Homo sapiens
caatatactatactcattgggtcagaggatggaatactcttatcggatacagtatttctcaatctttgaaaatctctttcaactttcatcattcaactttcagtgccataagcatatgtagggacaatagttgagctctgccctagaaagcatattgaaatacatgagagtgacttttgtcctaggagtcattgatctcayctttaatttttaaagagtaaatcactcaccagtgctgtcctgtgtgcttagtaacacattatttgtgacaccgtttgcaagcgtgtgtcatgacctatggtcaagagctactggtccaaatggaagactgaagagcatcctaggaaagtcaagctgcctcttgcaagtcccaccacctccatccagcggcctgctttgggggccctgccctttgctgattagactcatgcttcactactggtagtgaaaaggaatcggtataccaagtcctctttgaaggtgtggtgggacagagggagctggaaatcgaattc

SEQ ID NO: 137676 - DNA, 576 bp, Homo sapiens
agggcaagtacaaagagctattactggcagtatctttggcagacattgccaattgtayacccaatgtctaaccttcaacctttattaacagaatcttacttgtaccagggccagcagtgacgtcagcaataaactacatttattgtccctctttctagattgaaatgcctatgtggaaaacagtttcaagagacagattcaggtggtaagtgcgactccccttctctttctccttcctgctgcccggtgtgaagacatggctgaatctgcaaaaagcaccaggcaactctgagggaaggaccaagagaatcatggaacccttcactctgaattctttgcatggataaataagtgccataaaccacccacttccagacttatcatgacataaggatccttattatgtatatgtttctatttttcaaatctctatttattgcagtaaaacatgatttgtaactaatacactgctcttttgaacgatctttcaggtgagtcagttactaaattaaataaaaatctatactagcagaaaaatggaagacccatctatataaggaggagatacaagaactc

SEQ ID NO: 137677 - DNA, 566 bp, Homo sapiens
catgagaattactttaaacttcatgaaaatcttatggcttaatatttactcaactttagagctacagcagaagaattcttatcttctaattgaaatccaaacatcacaaatattactaaaatcaagtccagaaccatcactttcagttagttaatactgtacatgcaagtcttttgcatttttcaaaacactttaatatatcttactagatcctaacagcaaccctacatgattaataggcatgagaacccatcttacagattaagaagtgaggttcacagaaatcaaggatgttgtgtcccagggacattacacatgcagggtagctttgggatttgaacctaggtttaattcatgtgttttctccattctatgttaacaatctgaactgaacttttttttattggaggccraaagggagagataataaatataacagttttccttggaaaactatacattggtcatgtgcactccacttaggatgtccatatttgaatttacagtcaaatgatggttatatgttgaaagcagagaatagtatccagtgatttctcaaccataaa

SEQ ID NO: 137678 - DNA, 523 bp, Homo sapiens
atattcaatgaataaggcacaataattcaccaaatccatatccctttctttgactcaaatctatcctatctgccacatcagtttaggacaacagaaagtgtttgtcagaataaagatcttaaatatcccccccatcctcttatcaactacataytactttacaggtgaacaaaaaaccttggggaaaaacagtaatcaatgaacttttttttttttttgagacagagtctcgctctatcgcccaggctggagtacaatggtgtgatctcggctcactgcaacctccgcttcctgggttcaagcatttctcctgcctcagcctcccaagtagctgggattacaggtgcctgccaccatgcccagttaatttttttctttttttttttttttttttgtatttttagtagagacggggttttgccatgttggccagcctggtctcgaactcctgacctcaggtggtccacccacctcggcctcccaaagtgctgggattacaggcatgagccactgtgcccgacct

SEQ ID NO: 137679 - DNA, 570 bp, Homo sapiens
gtgaacttctaagatataagaagagagggactggtgttgtacatacatagtaaaatattataaacatatttatatgaaaggtttcacaaaaaggaaactacgggcaatgtaggaagaattagatggacatacctgaataataagaatcaatatacctgtgataggtatgtctaaggtcccccctattgatgttcacagcctggtatttatagcctaataatgattctttctctttsaatagctttcttctaccaaacagtatacctcaatgtgtagtaaaatgtcacttagacattagattataagagactgacttttgcttgctagcatacattctctctttctggctttcattaaaaagttgccatttgaggaagtccatatgacaagaaactgagggtagtctcaggccttcagtcagtttgaaactgatgccctcagtccaagtactcaaaaagaacccaaactatgtaaatgaccttggaagtaagttctcacctgtggagccttcagatgagactccatctcttgatgacaccttgattgcagcctcatgaaagacactaaatt

SEQ ID NO: 137680 - DNA, 395 bp, Homo sapiens
gaggatagcaaatgtcatccaccaggaatagcagttctaacacttctgcccactgcatcttgggctccggtttcaacaattgcctgaatccgatgtgagagaacacacttacatgcagcaagttatatgaatttaggtttatttcttacagataggcagcaagagacaaaaaaaatcctagactccattgtgagtcagtcccctcaggctggaaaaagctgttcagagtggatggagtcttgactgagcatgaccccctttgagtgaaaggcagcctgcctttcaagtatataacccaggttatatacttcaggggcggtgtgactcrctggacaaagcttcgaagcgcatcttgctttcaggggaaacagaaggaaagcccaggatgtcccagg

SEQ ID NO: 137681 - DNA, 385 bp, Homo sapiens
aatatttcccctaccatacatctcaccaccaaaccaacaaggcttcaatataacagtgaattacatattttaaaagattaaagaaacaaattctacaagaagagtacatatgaaaacgcaagagaaaaaataaaaatatgaacactagaaagatyttaaatccttacctatatctttaacaagcattaaacagagcaaaatctctggctaaatttacatacctcatcacattatgtgtcaaattacttcacttcctgttgtcttgtgcagcatgtatggatttcaacaataatatctaaggcataaagaaaaacaagagaaaaaaacaatttgggaagacaactccatgatgaaaacaagacttagataagacatagctgttgaa

SEQ ID NO: 137682 - DNA, 317 bp, Homo sapiens
taaagattttgtcaggggtatgtatttttgaaaatatttactatgcrttatcaaactaattaagtaatttccttcaccaccagttgcgggtgagtgaccgactttcttcagaatcttatgcaggttaacgtcttcatactttatttgcattttagttgcattgtgaagctattctttaatactagatatgtatgacttataaagtattggttaccagttgtttcatatgtgacagatatctcaaatagtagtatatattttcatactgcttaattagtcttagacagaattgtatagttttgcatggtcaaatgtat

SEQ ID NO: 137683 - DNA, 317 bp, Homo sapiens
taaagattttgtcaggggtatgtatttttgaaaatatttactatgcgttatcaaactaattaagtaatttccttcaccaccagttgcgggtgagtgmccgactttcttcagaatcttatgcaggttaacgtcttcatactttatttgcattttagttgcattgtgaagctattctttaatactagatatgtatgacttataaagtattggttaccagttgtttcatatgtgacagatatctcaaatagtagtatatattttcatactgcttaattagtcttagacagaattgtatagttttgcatggtcaaatgtat

SEQ ID NO: 137684 - DNA, 508 bp, Homo sapiens
agttccctttctctctttcttgctctccatttctgtgttaatgttttaactatggccaaccacaacctcatgccaagttttgtacattcattaatgcragtgagattttctggtctcagatcacatataataatgtcaaagtccttttcctaaactactgaaaaccttagcacaagtcctattttgtagcttcctccttctccttcttccatatcactgacagttttacaaaagtggcagctccaggaagctgtcaaaatttgcctccacattttgaggggataaaagaaatttccttagatcctgatattaaattatgagcctcgctaagccctcagagacctaatgggagatttgaccctggttaccattctggaataaaactcctccaaagtttttgctgaaaattatgaaactcacaagattattcctatgtaacattataagggtagttttggttggtttgtctttcacttttggactacagagaaagttataatccattgcg

SEQ ID NO: 137685 - DNA, 508 bp, Homo sapiens
agttccctttctctctttcttgctctccatttctgtgttaatgttttaactatggccaaccacaacctcatgccaagttttgtacattcattaatgcgagtgagattttctggtctcagatcacatataataatgtcaaagtccttttcctaaactactgaaaaccttagcacaagtcctattttgtagcttcctccttctccttcttccatatcactgacagttttacaaaagtggcagctccaggaagctgtcaaaatttgcctccacattttgaggggataaaagaaattkccttagatcctgatattaaattatgagcctcgctaagccctcagagacctaatgggagatttgaccctggttaccattctggaataaaactcctccaaagtttttgctgaaaattatgaaactcacaagattattcctatgtaacattataagggtagttttggttggtttgtctttcacttttggactacagagaaagttataatccattgcg

SEQ ID NO: 137686 - DNA, 508 bp, Homo sapiens
agttccctttctctctttcttgctctccatttctgtgttaatgttttaactatggccaaccacaacctcatgccaagttttgtacattcattaatgcgagtgagattttctggtctcagatcacatataataatgtcaaagtccttttcctaaactactgaaaaccttagcacaagtcctattttgtagcttcctccttctccttcttccatatcactgacagttttacaaaagtggcagctccaggaagctgtcaaaatttgcctccacattttgaggggataaaagaaatttccttagatmctgatattaaattatgagcctcgctaagccctcagagacctaatgggagatttgaccctggttaccattctggaataaaactcctccaaagtttttgctgaaaattatgaaactcacaagattattcctatgtaacattataagggtagttttggttggtttgtctttcacttttggactacagagaaagttataatccattgcg

SEQ ID NO: 137687 - DNA, 520 bp, Homo sapiens
agaaataagaaatatagtcacgagtcacttcatgacagggatatgttctgagaaatgcattgttacgcaattttgttgttgtgcaaacatcgtggagtatacttatgcaaacctagatggtatatagcctactacacacctaggctatatggtacagcctattgctcctagactgaaaacccgcacagcatgttactgtactaaatagtgtaaggaaatagtaacacaatggtaagtatttgtgtgatataaatttttcagctcctttataatcttatgtataagcatatgatacacctatgtataagcattttgtcattgatcaaaatgtcattatgttgtgtacaactgcatatacgttttatagttgaaagcttsaggttatgttagttaactctcctggtgtcaagatatacacaggtccacctgaatccagagcccacactttcaaataggttgataatagaaatttttttaattagccacattaaaaaggagaacaaaaacaactatagctgac

SEQ ID NO: 137688 - DNA, 557 bp, Homo sapiens
tatatgtttgctatatggatatatgttttaaaatacatatacatatatatakagagagagtaaagatgtaatgtagaaattttccagattttaaaaattaaatatattttttagtttttttcaatgtattaataataaggtcatatcatttttaataaatagttagaatgcttttggtactggttcattaactgataattctctgatatatatattgttgctatctgcagtagagtgacaatagaaggttaaaaatgagacaaagagaaaaacaaaacatattctgacttgatcttcatgtacagaaaggagtggttagtatcaaaatcttctactagccctttataggcctgaatgtgtcattttgatatgcttgttcaccgaatctgcctggtgaccacatggtatctggctaatgtttcaaaacaaagactcatccactgaatgatataattcctgttttattatcctgcttctagaattcttgcttttgaaataggtcttgcaggttatattcacaagcaaaagcaaggcatcacttaatggttaccaatagc

SEQ ID NO: 137689 - DNA, 557 bp, Homo sapiens
tatatgtttgctatatggatatatgttttaaaatacatatacatatatatagagagagagtaaagatgtaatgtagaaattttccagattttaaaaattaaatatattttttagtttttttcaatgtattaataataaggtcatatcatttttaataaatagttagaatgcttttggtactggttcattaactgataattctctgatatatatattgttgctatctgcagtagagtgacaatagaaggttaaaaatgagacaaagagaaaaacaaaacatattctgacttgatcttcatgtacagaaaggagtggttagtatcaaaatcttctactagccctttataggcctgaatgtgtcattttgatatgcttgttcaccgaatctgcctggtgaccacatggtatctggctaatgtttcaaaacaaagactcatccactgaatgatataattsctgttttattatcctgcttctagaattcttgcttttgaaataggtcttgcaggttatattcacaagcaaaagcaaggcatcacttaatggttaccaatagc

SEQ ID NO: 137690 - DNA, 550 bp, Homo sapiens
tttgcaaattcaactctgttagagcgataccagcttcataccatcccacagaatcaggagagattttcttgaaactgcttcacagcccagcttctctctcttcacttccacttccatctctgcccagcaagtgttgatcccaagagcatttcctaataaactccttggaaattaatctgtctctgtctcagagtttgtgtctcaggagatcaaacctataaaagtgttccagaatgaacaaggaggttatcaaaaaaaaatacaggcataaaaacaatctgttaatctttgattggcgtrtaactctgagacaattctccccatgtaaataatgcctaggtgtgctacatttagtatatgaagaaaaggtaaagactcagttatagggcagaacacaggtggctcacgcaagtcatctcagcactgtaggaggccaagacgggaggattgcttgagcccgggagttccagacccgccttggcaacacagtgagacccagtttcataaacaaacaaacaaacaaaaaaagcaaaaaagcacccagttgtag

SEQ ID NO: 137691 - DNA, 545 bp, Homo sapiens
ggaattcaattttgttggctatttctgacattcacaagtagacgtaccagaagaaataaaatctaagaagagtttatcttctacacaagttatttccagcatctggcagttcatagcacaaagtaaacttctgcatatgtttgtcagaataaactaaatcgtcttgttaatatactattgacactgattttcttaagaatgtagtaaaaaagtaaatcattcattaaaaaaaggaaaaaatagagaatggttaagaccatgaagttgtaactgaggaagatatttagattttataagataaggaacgattttagtttattcagtcattacaatggttcaactgcatgcatatattaaaatattattattatgaacatttaaaaatgtayacaaaaataaaacagtaaacagtttaatgtatttagctcccagcttcaagaataatcaacatattctccaaatttgtttcatattcttctccacttttttcatcttggactagatgtttgaagaaaatcctagatgtcatgctgatatggttttaa

SEQ ID NO: 137692 - DNA, 591 bp, Homo sapiens
catttgaaataatccagtcagacaaagaataaaaactaattaaaaagattgcagaaaacctacgtttgacttgggggataccaaaaagtgaacaaatttttaaaatttggaagttccaaagargaagaaatgaacaaaggcagacaaaaacctatttagttaaacaacagctgaaaactttttacgtctacatcaagagatataaaaattcaggtgacaggaagcttaaagattccaaaataaattcaatccaaaaaagtcttatgcaaggcacataatagtgaaagtgtccaaagtaaaagacaaagagagaattctaaagccagcaagagaaaaaacttcaagtcacatatgagggaatgtctatcagattaacagcagttttctcagtagaaaaccttacaggccaggagagaatgggatgatatattcaatgtgccgaaagaaagaaaactgctagccaacaatactatacttggcaaagctattcttcagaaatgaaagagaaataacatctttcctagataaacaaaaggtgagagaattcatcaccacttgactgaccctacgtgaaatgctcaagctgttaag

SEQ ID NO: 137693 - DNA, 591 bp, Homo sapiens
catttgaaataatccagtcagacaaagaataaaaactaattaaaaagattgcagaaaacctacgtttgacttgggggataccaaaaagtgaacaaatttttaaaatttggaagttccaaagaagaagaaatgaacaaaggcagacaaaaacctatttagttaaacaacagctgaaaactttttacgtctacatcaagagatataaaaattcagrtgacaggaagcttaaagattccaaaataaattcaatccaaaaaagtcttatgcaaggcacataatagtgaaagtgtccaaagtaaaagacaaagagagaattctaaagccagcaagagaaaaaacttcaagtcacatatgagggaatgtctatcagattaacagcagttttctcagtagaaaaccttacaggccaggagagaatgggatgatatattcaatgtgccgaaagaaagaaaactgctagccaacaatactatacttggcaaagctattcttcagaaatgaaagagaaataacatctttcctagataaacaaaaggtgagagaattcatcaccacttgactgaccctacgtgaaatgctcaagctgttaag

SEQ ID NO: 137694 - DNA, 591 bp, Homo sapiens
catttgaaataatccagtcagacaaagaataaaaactaattaaaaagattgcagaaaacctacgtttgacttgggggataccaaaaagtgaacaaatttttaaaatttggaagttccaaagaagaagaaatgaacaaaggcagacaaaaacctatttagttaaacaacagctgaaaactttttacgtctacatcaagagatataaaaattcaggtgacaggaagcttaaagattccaaaataaattcaatccaaaaaagtcttatgcaaggcacataatagtgaaagtgtccaaagtaaaagacaaagagagaattctaaagccagcaagagaaaaaacttcaagtcacatatgagggaatgtctatcagattaacagcagttttctcagtagaaaaccttacaggccaggagagaatgggatgatatattcaatgtgccgaaagaaagaaaactgctagccaacaatactatacttggcaaagctattcttcagaaatgaaagagaaataacatctttcctagataaacaaaaggtgagagaattcatcaccacttgactgaccctaygtgaaatgctcaagctgttaag

SEQ ID NO: 137695 - DNA, 547 bp, Homo sapiens
acatctaggcagaaaacaaagaaacattagacttaatctgcattttaaaccaaatggactaaacagatatttatagaacatttcatccaacagctacagcacattcttctcatcagaacaggaaatattctttaaaataaagcattctttaaaatagagcatatgttaggccacaaaacaaatccaacaaattttaagaaattaaaatcaaatcaaatatcttctcagaacacaacagaataccaataccaaattaatactaaaaatttaataccaaaaagaactttggaagctgtacaaattcatggaaattacataacatgctctggagcaactattaactctttattaagcaggaagtcaaaaagtgtcttaaatgaaaatgggaacataacataccaaaatctagaggacacagcaaaagcwctgataagagtagagtttatagcaacaaacacctacatcgaaaagtggaacaaatacacaattatgcacctcaaaaactagaaaagcaagaataaaccaaaccctaaatcagaaagaaata

SEQ ID NO: 137696 - DNA, 573 bp, Homo sapiens
aaaatcttagaaacagtatttagatggttacttccttttaattatatttgtaatgtgtctgctactagttgctttgttcttgagatcctggcttctgtggtcattgctacatagagacctggatccttgactgcagtatctcagatgctttactgttttatttttattttattttgtattttagtctatttccttatattcttcattagagatctgggagatcttatatgacagttactatttttggaggtatctgtagtattgttggcatgacttatgtcttgtaacagtcacctgagatgctgagagaataccgaggacagcaaagtaaggcagggaaaasataaaagtaatataaggggaaaaagcaagatgtaagaagcaacacagcaggtttcctgtaaaaactatattagacactaaccccacattttactttcagctagataaatatacctctgatgtgtaatgagggagttggagaaatagcctcgtcagttccctagaggatttccttactgtcaaggagagggttcgtactttaacaacatgcattgctggctcgcctgtgcc

SEQ ID NO: 137697 - DNA, 595 bp, Homo sapiens
aatagtttgtgcagaggtacttttgaactatgtaaatagttcaaattttcaatttgctatgtatatcagtatggattagtggtttctggttttattcaatagattataatctatctttatcattacttattttgatgctcaaattatctcagatttggtcaatgggagttcctttaaactgtcttctgtgyctatttgatatggtcttatcattcctcgagagcttctttactttctggaataaaaagatgttccagattcactctactttccctccccagtcctggaatcagccatttttcaaaaaaaccctgattccttttggttgaaactaagagtactgtcagctgtcagacacttcagggagtgccccagctacacatagccaccttgctcaaggttacactctaccctgtgcagcccgattaaggcaggtgtaaaagtatggccctgaatatgcctcctgcaaaacccaaaatacagtggaagctaagacctagtcactagttgtattcgttggttttggggtgttgctcctcccaggccttctcagcaggcagaactacttaacgtgtgcctgtgtgtgtacatgaac

SEQ ID NO: 137698 - DNA, 595 bp, Homo sapiens
aatagtttgtgcagaggtacttttgaactatgtaaatagttcaaattttcaatttgctatgtatatcagtatggattagtggtttctggttttattcaatagattataatctatctttatcattacttattttgatgctcaaattatctcagatttggtcaatgggagttcctttaaactgtcttctgtgcctatttgatatggtcttatcattcctcgagagcttctttactttctggaataaaaagatgttccagaytcactctactttccctccccagtcctggaatcagccatttttcaaaaaaaccctgattccttttggttgaaactaagagtactgtcagctgtcagacacttcagggagtgccccagctacacatagccaccttgctcaaggttacactctaccctgtgcagcccgattaaggcaggtgtaaaagtatggccctgaatatgcctcctgcaaaacccaaaatacagtggaagctaagacctagtcactagttgtattcgttggttttggggtgttgctcctcccaggccttctcagcaggcagaactacttaacgtgtgcctgtgtgtgtacatgaac

SEQ ID NO: 137699 - DNA, 335 bp, Homo sapiens
actccagtctcagcaacaggaccagaccctatctttaaaaaaaaaaaaaaaatggagttacatttttaatattaggaaaaaaagctttaagattgtttaaaagtrttacagggaaaaggaggggcatttgaaaatgataaaaggaattcactgtaaatgctgaacctgtaagcacctaatgagacagcttgaaaatacataaacaaaaacatgagaaaaaaatgttcaagagaaataaaataatcataatgagagaattttatacaactctctcagaaagtgagaaatcaaatgtataaaaaatttgaagacagaagatttaaatatcacaatag

SEQ ID NO: 137700 - DNA, 584 bp, Homo sapiens
ataaattctgctcttgtgatgttttctcttcagtgaaaataaataggacagactatccattttgaaaatgttcagcatttcagaataggtaatgccttgtgagtatccacctaaacaagggttcttttaggtcaattttcttgagtttaaaggggtcctgagatcaaaatgtttgaaaaccactgttttagcagattgagaagaaaggaaacagagaggtaaggtaaggtgctgaagatgaggagatgctgggagcaggggaagagtaggagattggagaaatgtggggaatatttgagttagttcctaaggggaatgtgagggatatgacgactgagaacaggcagaactgctaggtagcatcgagagtactgctaactcaagttgaagaccatcaatttatagtgaaccaaatcactggattaaacattttattaactttattatgaaatgtaatatacatattaaaatgtatgtacatatatatttatgattaacaggcataaaacaaccccawtaaaaagggggcaaaggacatgaacaaacacttttcaaaagaagacatatatgcagcgaatgtgaaa

SEQ ID NO: 137701 - DNA, 471 bp, Homo sapiens
agttttttatacctattcttctaaactcaagaccctaggcaatttatgctccaatgatcaccaagggcctcttctgtagatggacttaaatactccctgtatgcctcaacaacctgtgcatcatatgcttggggaaagtaaaaattggtttcatcacatattagagttgaatgtytccattaaaaatttaaacaaatggattcaaacatttatccacacgaatgcatataatacagatttaatacatttactcatcagtgtttttcaacagagagaaggaggtaaaagtactaaagaacaatttgcaataggcactgaaacagccttcagtgatcttaactaaggcttcatactttcaagacactggcaaactattcactaagaattactgatcaggtcccaggtttgtaaacaagaagctgagagcaagtctgaagtgatatatgggcattattgaaacacctgttttcc

SEQ ID NO: 137702 - DNA, 420 bp, Homo sapiens
ggaaaacagaagtatatttcaaaagcaaggtaaataatgatgagggcctgtttctgcgccctcagatagttgaccatccagtctggaaaccccagcatctccatttgtgcatagtgcacaatcaacctttaacccactgtaatgaattcaccatgtagtattgcaaaatgtgccagacctaaccttggaatgtccccctaaagcwgatggaagctagaagagaaaaagctcggaagttccatccatcccccaccctctgcccattgcctccccaattgcctaagtgtgcttcctgaaaacactttctgaatgcccagaccaacccatatctggctatgctctggaaccagcttgcttctctggccttgggtggctctgccacgctatgtccattgctcatttttcctgcctctgcccact

SEQ ID NO: 137703 - DNA, 452 bp, Homo sapiens
aaagttatcccaggaattggttccaagaggtggaagagctagtgatggttcccagggagaagcaattgaccagtgggccagaaggaggcagcaatacaaagaaggcaaaaaacccggttcagcagcagggagcttatttgccagcaatatcacagaagaatccagtgagtagacagccagcttcttttccaaaaccatagcaaatgcgacaacttactgaaacgtaaccaatctcccatccctatatttccagaacataaactcttgcttgaacacggcaatatagtgattataagcttttatataaaacatatttttggaatcatcaactattatctgctaaggaatttcaacttggtaaattactktcttgaaaacacataactgcctgctaagggctgcttttctcttgatactaaaaaaactagcgatagggtcctttattgaattaa

SEQ ID NO: 137704 - DNA, 386 bp, Homo sapiens
aatagatttacactgcagcaggaagaattttggttaaagatatgggagaccttattaaaaatgagttagccttgaaatggtttattagatccttttttargccttaagaatattaggtattttgcagtaagtgcaggtgctagaaaactatgggataaaataaataacctctggaaaggcccctcccatcttccaatgcctaagtccttaggcttaggctatttttggtttcctttctgagatggctcagaaaggagcctatacaatgaaagtaaaagcagctcttgatttcttttttcccctcactactccaggatctgtttttgccacaacttcataagtatttcaattacttgttctctcaacaatcctgcagagaagctctg

SEQ ID NO: 137705 - DNA, 386 bp, Homo sapiens
aatagatttacactgcagcaggaagaattttggttaaagatatgggagaccttattaaaaatgagttagccttgaaatggtttattagatccttttttaggccttaagaatattaggtrttttgcagtaagtgcaggtgctagaaaactatgggataaaataaataacctctggaaaggcccctcccatcttccaatgcctaagtccttaggcttaggctatttttggtttcctttctgagatggctcagaaaggagcctatacaatgaaagtaaaagcagctcttgatttcttttttcccctcactactccaggatctgtttttgccacaacttcataagtatttcaattacttgttctctcaacaatcctgcagagaagctctg

SEQ ID NO: 137706 - DNA, 618 bp, Homo sapiens
tatgtagagaatcaattgaagtgggacaagagtggaatggaaatactacttagaaagctagtaccagtatgggcaagaggtgatagcagtcgggtcccaggtaagagtaacaaacaaagtagatagatgtccagatatacttaagagctagaatcaataggatttggtgatggattaaatgtggcagcatgtcttagtttcttcaggctgctataacaaaacagcatcaactagrtggtctataaacaacggaaatttatttctcacagttctgaaggctgagaagtccaagatcaaggcactgtcagatccagtgtctggcaagagcccacttcctggttcatagatggctgtcttttcactgtgtctttacgtggtggaaaggtcaagggagtatctggaatttctttttataaaggctataaactcatttatgagggcttcaccctcatgacttaagcaccaaaggcctcacctccaaatgtactcccttttgcaattaggtttcaacaaatgaaattgggggaggttggggcggggacaaactttccatttatagcacagtgaaagggtaaataagaaggaagtttctggcaaaagtaattgattggataatgt

SEQ ID NO: 137707 - DNA, 580 bp, Homo sapiens
gctcatttcctcacaaaatggtatacaagcaaaagtaattatcaattgtcttctctacatattttggctctgtgcctttgggaaaatttggattgtttgagcttaaatgtactgccaggtaccctgtaactgtcctttcagaacaataacaagcatcatcattgacaaacaacaggacttgtgtttcattttacctggaacacaacgttgagcacacwcattcatctctccaatgtgtcatcctaatgagcctcaatatttttaagaggcatttattctgctaatgcactcagagtctgaagcaaagtggaaaaaatgaacacccaaactcccagcaggctcccatttcgcagcaaagaacacagcaaactctgccttctgaaatcatttgccctgccatgttaaaactaaagagcaaaaatgaaaccaaacaaagaagaggaactggcaagtacaggcagggcattctgataaagagataaagcacagtgctcccagcctcaggtcacagttcccagagttccctcccagttcccaggcctgtggaggaagggctgccctccagagaagagaattttaa

SEQ ID NO: 137708 - DNA, 529 bp, Homo sapiens
cccttacaaaacaggctgtttctattcaaccccaaattcwtagttttaaacagctgatagcaggatgggaattaaggtaaacaaaacaattaaacctccaaagtagtcactgactgggacttttagtataaaatatcactataaacgtctgaactcctttaattaccaaatcaattaagctaattttcaagggactgttttcatagacagaaagaaaatgcttgggatcgaatccacagattactccaaattcagaactgttagcaaagtgcttttaaacccctggggcccagagactgccactgattacaagaggttaaaaatagtaatgacagccactaggtggcttttcttatcccaaaaggtcagaggccctacttgaacagaaaagtcctaattaaagagctgcaaaaactggtctattaaatagcttaaatataataacagcaaaagcagcagctgtcattcagtgagagcagctcttgtactaggcactctgttgagtgcttttacttattatttcatttaa

SEQ ID NO: 137709 - DNA, 536 bp, Homo sapiens
gtattttctcctgtgcaaggatatgaaggtcacccacttagccaactcttcagttcatgcgaaaatgcatttagaagcagcaactaaggcaatataaaagtgaagatgaattgaagttatttatattcagtaaaaatctgttgtaggagtaaggtaagaaaaatgtgtctccacagcaggaatgctttatacacggttaaggaaaacccaygagccacaaaccactaaccaagattacaaactcacttcattccagaagctgctgagacaggtaaggggcggatgaaggatggtaagtatgtgcctaaggtgcttccaaagcggaagcaccaaagtgactgagaaaaaaacttgaaacaagtatataggtatactacctcaaagtgataaccagtgggaaaagaagaattcgatgagctcatgtttatgcttactcaacagattagttttggtttaaatttgaatcacagaataaagaagcatcttactctacagattagttttggtttaaatttgaatcacagaataaagaagca

SEQ ID NO: 137710 - DNA, 536 bp, Homo sapiens
gtattttctcctgtgcaaggatatgaaggtcacccacttagccaactcttcagttcatgcgaaaatgcatttagaagcagcaactaaggcaatataaaagtgaagatgaattgaagttatttatattcagtaaaaatctgttgtaggagtaaggtaagaaaaatgtgtctccacagcaggaatgctttatacacggttaaggaaaacccatgagccacaaaccactaaccaagattacaaactcacttcattccagaagctgctgagacaggtaaggggyggatgaaggatggtaagtatgtgcctaaggtgcttccaaagcggaagcaccaaagtgactgagaaaaaaacttgaaacaagtatataggtatactacctcaaagtgataaccagtgggaaaagaagaattcgatgagctcatgtttatgcttactcaacagattagttttggtttaaatttgaatcacagaataaagaagcatcttactctacagattagttttggtttaaatttgaatcacagaataaagaagca

SEQ ID NO: 137711 - DNA, 536 bp, Homo sapiens
gtattttctcctgtgcaaggatatgaaggtcacccacttagccaactcttcagttcatgcgaaaatgcatttagaagcagcaactaaggcaatataaaagtgaagatgaattgaagttatttatattcagtaaaaatctgttgtaggagtaaggtaagaaaaatgtgtctccacagcaggaatgctttatacacggttaaggaaaacccatgagccacaaaccactaaccaagattacaaactcacttcattccagaagctgctgagacaggtaaggggcggatgaaggatggtaagtatgtgcctaaggtgcttccaaagcrgaagcaccaaagtgactgagaaaaaaacttgaaacaagtatataggtatactacctcaaagtgataaccagtgggaaaagaagaattcgatgagctcatgtttatgcttactcaacagattagttttggtttaaatttgaatcacagaataaagaagcatcttactctacagattagttttggtttaaatttgaatcacagaataaagaagca

SEQ ID NO: 137712 - DNA, 393 bp, Homo sapiens
gctagtagataaattaccagaatggagactgaagtcaggaaaaccagtgtggaagcaattcaatttgtccaggtatagatgataaaggactgaacttaccatgaatgtggagcggtagaaatgactgggctttattcgtttttgcctttattgaacactcacagtgggccaagcactgtgtttgttattagagatacaaaaatttaagctcatgacctaccacccatggcttcctatagatgaaccaagtaagccaatactgatacggtttggatttgtgttctcacccaaatctcatgttgaattgtaatcctcaatgttggargagggcctgatgggaggtgattagatcatgcgggcagacgttccccttgtgatagtgagttctcatga

SEQ ID NO: 137713 - DNA, 589 bp, Homo sapiens
tagatgtacgtgtgtttgtgtgtgtgtgtttgtgtataatgtgcaattgtgacaaaaaaggaaggcagtgtcctcataaaatatggaactctacaataacagaataaataagatagcagtctgaagactttatggagctaaacaaaagcatcattattactcttttgtaggccctgagtttcctcatctacagaattcaacaaatggttaatgacattttctacrtaccagacacgtttctgaattctgaagatacaaaagtaggcaagatagacaaagttcttccctctaggagcttacatttaggtagagaagcatttttaaacccacaaaataattgcacagatccgacccgacgatgtacaaagaaagcttttgaaagttatcgagactatatcaatgtctggtactgttgcagtgagatgccagaggcagaaatgagaacttgatttgagaatatctaaaaaatgtctggcagaaggcagagaaatgcactagtgtgggcaaatacaaattgtttttgtttctattgggttttcctttgggataaattcctggaaattttttctaaacttgtgcacagtaaaag

SEQ ID NO: 137714 - DNA, 428 bp, Homo sapiens
tcaatgtgatcctttcatgaagaactgattttttcctcctccaaattgcttctcttctgtttggttgatgtgcacttcattcttctccaacctgagaggaaggctgatcatagggattgccacaggggtccattccctctaactcctgtgggattcagcccatagggaacacaggmagatctgaggagtggggagagtgaggctagggtattttttcccctctttcctctctagtaaggtggacccaggctgtcagcctccctccatggcagaccacaccccctgccaggcagtccctccccggcccctcttggcttaggggtgctaactatcttcagcgaccacttgctccaggttactgcactatgccttagggtttccctacactctgccctgatagaatgattcttcttgctgtctctttcaca

SEQ ID NO: 137715 - DNA, 467 bp, Homo sapiens
aatgaagtggaaaggtaagagtcattggctcaaaccaccccaggtgcacagacacaggcacgtgcacacacacacactcgcacacagtcacactctctcacactgacacagcctccttcctgccttcacctcacatctcagtccccagcctgcctgccatattcctcccatcactgcagggagtcccagccggccccacaggggaagcccccrccccagcctgcacagaacagccccgtgctctctgggcacacagcagctgcagccgtcctggcccaggacctctggggtctctgccaccattccagtaggtcatgctgctcaggggggccagatggccaaaccaggtagggcccagtggacataagcccagtgacacggccgacattattcagggagggtgtgtgagggaggctgctcgtgctgggaagaaggagcacccacacctcatggctcggagctgcttg

SEQ ID NO: 137716 - DNA, 451 bp, Homo sapiens
aaaatgaagtggaaaggtaagagtcattggctcaaaccaccccaggtgcacagacacaggcacgtgcacacacacacactcgcacacagtcacactctctcacactgacacagcctccttcctgccttcacctcacatctcagtccccagcctgcctgccatattcctcccatcactgcagggagtcccagccggccccacaggggaagcccccgccccagcctgcacagaacagccccgtgctctctgggcacacagcagctgcagccgtcctggccyaggacctctggggtctctgccaccattccagtaggtcatgctgctcaggggggccagatggccaaaccaggtagggcccagtggacataagcccagtgacacggccgacattattcagggagggtgtgtgagggaggctgctcgtgctgggaagaaggagcacccacacctc

SEQ ID NO: 137717 - DNA, 458 bp, Homo sapiens
agaaaatgaagtggaaaggtaagagtcattggctcaaaccaccccaggtgcacagacacaggcacgtgcacacacacacactcgcacacagtcacactctctcacactgacacagcctccttcctgccttcacctcacatctcagtccccagcctgcctgccatattcctcccatcactgcagggagtcccagccggccccacaggggaagcccccgccccagcctgcacagaacagccccgtgctctctgggcacacagcagctgcagccgtcctggcccaggacctctggggtctctgccaccattycagtaggtcatgctgctcaggggggccagatggccaaaccaggtagggcccagtggacataagcccagtgacacggccgacattattcagggagggtgtgtgagggaggctgctcgtgctgggaagaaggagcacccacacctcatggc

SEQ ID NO: 137718 - DNA, 437 bp, Homo sapiens
aagtggaaaggtaagagtcattggctcaaaccaccccaggtgcacagacacaggcacgtgcacacacacacactcgcacacagtcacactctctcacactgacacagcctccttcctgccttcacctcacatctcagtccccagcctgcctgccatattcctcccatcactgcagggagtcccagccggccccacaggggaagcccccgccccagcctgcacagaacagccccgtgctctctgggcacacagcagctgcagccgtcctggcccaggacctctggggtctctgccaccattccagtaggtcatgctgctcaggggggccagatgkccaaaccaggtagggcccagtggacataagcccagtgacacggccgacattattcagggagggtgtgtgagggaggctgctcgtgctgggaagaaggagcacc

SEQ ID NO: 137719 - DNA, 452 bp, Homo sapiens
tgaagtggaaaggtaagagtcattggctcaaaccaccccaggtgcacagacacaggcacgtgcacacacacacactcgcacacagtcacactctctcacactgacacagcctccttcctgccttcacctcacatctcagtccccagcctgcctgccatattcctcccatcactgcagggagtcccagccggccccacaggggaagcccccgccccagcctgcacagaacagccccgtgctctctgggcacacagcagctgcagccgtcctggcccaggacctctggggtctctgccaccattccagtaggtcatgctgctcaggggggccagatggccaaaccaggtagggcccagtggacataagcccagtgacacggccgacattattcagggagggtgtgtgagggaggctgctygtgctgggaagaaggagcacccacacctcatggc

SEQ ID NO: 137720 - DNA, 538 bp, Homo sapiens
tgaataaggcacaataattcaccaaatccatatccctttctttgactcaaatctatcctatctgccacatcagtttaggacaacagaaagtgtttgtcagaataaagatcttaaatatcccccccatcctcttatcaactacatattactttacaggtgaacaaaaaaccttggggaaaaacagtaatcaatgaacttttttttttttttgagacagagtctcgctctatcgcccaggctggagtacaatggtgtgatctcggctcactgcaacctccgcttcctgggttcaagcatttctcctgcctcagcctcccaagtagctgggattacaggtgcctgccaccatgcccagttaatttttttctttttttttttttttttttgkatttttagtagagacggggttttgccatgttggccagcctggtctcgaactcctgacctcaggtggtccacccacctcggcctcccaaagtgctgggattacaggcatgagccactgtgcccgacctgcatgtgtatttaataagaaggc

SEQ ID NO: 137721 - DNA, 538 bp, Homo sapiens
tattcaatgaataaggcacaataattcaccaaatccatatccctttctttgactcaaatctatcctatctgccacatcagtttaggacaacagaaagtgtttgtcagaataaagatcttaaatatcccccccatcctcttatcaactacatattactttacaggtgaacaaaaaaccttggggaaaaacagtaatcaatgaacttttttttttttttgagacagagtctcgctctatcgcccaggctggagtacaatggtgtgatctcggctcactgcaacctccgcttcctgggttcaagcatttctcctgcctcagcctcccaagtagctgggattacaggtgcctgccaccatgcccagttaatttttttctttttttttttttttttttgtatttttagtagagacggggttttgccatgttgsccagcctggtctcgaactcctgacctcaggtggtccacccacctcggcctcccaaagtgctgggattacaggcatgagccactgtgcccgacctgcatgtgtatttaata

SEQ ID NO: 137722 - DNA, 538 bp, Homo sapiens
tattcaatgaataaggcacaataattcaccaaatccatatccctttctttgactcaaatctatcctatctgccacatcagtttaggacaacagaaagtgtttgtcagaataaagatcttaaatatcccccccatcctcttatcaactacatattactttacaggtgaacaaaaaaccttggggaaaaacagtaatcaatgaacttttttttttttttgagacagagtctcgctctatcgcccaggctggagtacaatggtgtgatctcggctcactgcaacctccgcttcctgggttcaagcatttctcctgcctcagcctcccaagtagctgggattacaggtgcctgccaccatgcccagttaatttttttctttttttttttttttttttgtatttttagtagagacggggttttgccatgttggccagcctggtctcgaactcctgacctcaggtggtccacccacctcggcctcccaaagtgctgggattacaggcrtgagccactgtgcccgacctgcatgtgtatttaata

SEQ ID NO: 137723 - DNA, 596 bp, Homo sapiens
atcagctaacttgaagacaaccgaaattatccagtctgaggaccagaaaaaaaaaaaaagaatgaaagaggataaacrgagcttgaaaggtttgttagacaccatcaagggtaccaacatatgcaacataggagtctccaaagtagaagagaaaaggaaagaggcagaaaaaatacagtgttcccccattatcagcagttgtgttttctgcactttcagttacctctgggcaaccacagtccaataatattaaatggaaaattccagaaataattcacaagttttaaattgtgtgtagttctgagtagcatgatgaaatgtcattctgccctgctctgcccacccaggacatgaatgatccctttgtccagcatatccatgcagtatacactatctgcccattaatgtacaggaaaaaacatagtgtatacagggtttggtactatctacagtttcagatacttactgagagtcttggaacgtattccccacagataatgggggagcaggagactactctatttaaagaaataatggctgaaaactttccaaatctaattaaaggaatgaatctacacatccaaggagctcaacga

SEQ ID NO: 137724 - DNA, 464 bp, Homo sapiens
  misc_feature (1)...(464): n = A,T,C or G
aatacaacctaaaagaaaatgaagtggaaaggtaagagtcattggctcaaaccaccccaggtgcacagacacaggcaygtgcacacacacacactcgcacacagtcacactctctcacactgacacagcctccttcctgccttcacctcacatctcagtccccagcctgcctgccatattcctcccatcactgcagggagtcccagccggccccacaggggaagcccccaccccagcctgcacagaacagccccgtgctctctgggcacacagcagctgcagccgtcctggcccacggacctctggggtctctgcgcaccattccagtagtcatgctgctcaggggggccagattgcccaaccaggtttggcccagtggacatagccccgtgacacggccgacattattcagggaggtgtgtgaggaagctgctcgtgctgggaagaaggagcacnccacacct

SEQ ID NO: 137725 - DNA, 545 bp, Homo sapiens
tgtttttatcaacctgaaggcagtcaatattcaatgaataaggcacaataattcaccaaatccatwtccctttctttgactcaaatctatcctatctgccacatcagtttaggacaacagaaagtgtttgtcagaataaagatcttaaatatcccccccatcctcttatcaactacatattactttacaggtgaacaaaaaaccttggggaaaaacagtaatcaatgaacttttttttttttttgagacagagtctcgctctatcgcccaggctggagtacaatggtgtgatctcggctcactgcaacctccgcttcctgggttcaagcatttctcctgcctcagcctcccaagtagctgggattacaggtgcctgccaccatgcccagttaatttttttctttttttttttttttttttgtatttttagtagagacggggttttgccatgttggccagcctggtctcgaactcctgacctcaggtggtccacccacctcggcctcccaaagtgctgggattacaggcatgagccactgtgcccg

SEQ ID NO: 137726 - DNA, 440 bp, Homo sapiens
atgcctccagatttgttctttttgattagtcttccttggctatctggggtcttttttggttccatatgaattttaggattgttttttttctagttctgtgaagaaagatgattctgctttgaggggaattgcattgaatttgtgtattgctttggcagtgtggtcattttcacaatagtaattctacccattcacaggcctgggatgtgtttcyatttatttgcattttctatgttcactttcagcaggtttttgtagtttccatgtagagatatttcaccttttgtgttaggtatattcctaagttgttttttttttctttcacctgttgcaaaaggggttgacttcttcatttgattctcagcttggtcattgttggcacatagcaatgttactgatttgtgtccattgattttgtatcctgaaactttactgaattc

SEQ ID NO: 137727 - DNA, 440 bp, Homo sapiens
atgcctccagatttgttctttttgattagtcttccttggctatctggggtcttttttggttccatatgaattttaggattgttttttttctagttctgtgaagaaagatgattctgctttgaggggaattgcattgaatttgtgtattgctttggcagtgtggtcattttcacaatagtaattctacccattcacaggcctgggatgtgtttccatttatttgcrttttctatgttcactttcagcaggtttttgtagtttccatgtagagatatttcaccttttgtgttaggtatattcctaagttgttttttttttctttcacctgttgcaaaaggggttgacttcttcatttgattctcagcttggtcattgttggcacatagcaatgttactgatttgtgtccattgattttgtatcctgaaactttactgaattc

SEQ ID NO: 137728 - DNA, 440 bp, Homo sapiens
atgcctccagatttgttctttttgattagtcttccttggctatctggggtcttttttggttccatatgaattttaggattgttttttttctagttctgtgaagaaagatgattctgctttgaggggaattgcattgaatttgtgtattgctttggcagtgtggtcattttcacaatagtaattctacccattcacaggcctgggatgtgtttccatttatttgcattttctatgttcactttcagcaggtttttgtagtttccatgtagagatatttcaccttttgtgttaggtatattcctaagttgttttttttttctttcasctgttgcaaaaggggttgacttcttcatttgattctcagcttggtcattgttggcacatagcaatgttactgatttgtgtccattgattttgtatcctgaaactttactgaattc

SEQ ID NO: 137729 - DNA, 614 bp, Homo sapiens
ctcagaggctggttattctagcagtgaagttgtcacatgggcagactcaggacctctggttatccaggatgttgcaggaggtggaataagctcttgttttctccttcctaggagcagggttgttctgtcatgagttgctgtcatgtcctgagctgactggcctccagccaggaggtggcacttttgagacagcagcggagttgtcacctgttctgtggaatttgcagtggcctatggcatcttccaaaggccctgtgactttttgttttttctggtatgctgctgtggtggttcctggagtgaaaggccacagtatgagtctccacatgctgttctgtctctccatgtgggagctgcatatcagacctgtctcccatctgccatcaaccttcagaacctgtcttaggcactggtgtagggcaggtctcacacggtgggtggaggsactgctttgcatcgtcccagtggcaaagagtcatggtcctttacacgagaagcttcttacgtgtgccactgcacataacgcaggagtacttagacaacctcccaggagctgctggtctacaagtttttgagacatgtgtgccccacagcagtggtgctgacacgatgcg

SEQ ID NO: 137730 - DNA, 614 bp, Homo sapiens
ctcagaggctggttattctagcagtgaagttgtcacatgggcagactcaggacctctggttatccaggatgttgcaggaggtggaataagctcttgttttctccttcctaggagcagggttgttctgtcatgagttgctgtcatgtcctgagctgactggcctccagccaggaggtggcacttttgagacagcagcggagttgtcacctgttctgtggaatttgcagtggcctatggcatcttccaaaggccctgtgactttttgttttttctggtatgctgctgtggtggttcctggagtgaaaggccacagtatgagtctccacatgctgttctgtctctccatgtgggagctgcatatcagacctgtctcccatctgccatcaaccttcagaacctgtcttaggcactggtgtagggcaggtctcacacggtgggtggaggcactgctttgcatygtcccagtggcaaagagtcatggtcctttacacgagaagcttcttacgtgtgccactgcacataacgcaggagtacttagacaacctcccaggagctgctggtctacaagtttttgagacatgtgtgccccacagcagtggtgctgacacgatgcg

SEQ ID NO: 137731 - DNA, 460 bp, Homo sapiens
tgacatcctcttatttgcatggacattgaacttctcttttagctttggccactactaagatcaaagacaaaatttcacctcaactgtggcacatttgtggaaatctattgcttgtatgtagatctctagtctaatattgttttccatttcatctatattttcccttattctgattgtctattagtatatacattattgtaagctgcttcaaatatttgtggaataaagcaaacatcataaatgaattaataattctgcttttttaatgtctgctcaatcaccaaaaaaggctgtttccctaatgtggggaacatattgattccctgccaaaccaaacttgatgatttgcaagcaacatgttcttagaaaacatttactgagtactattcaatattactattgaatagtatgactattgaattacargaaatatgatacttaataaaagtcctacagaaaa

SEQ ID NO: 137732 - DNA, 323 bp, Homo sapiens
gtgagaatatacccaacatgaggaaacagggttagagatttacagatatttgcatgcttttctttccggcaaatgcaaatttcttaaggaaataaaaagatctaaamattgcaccatgtcaaatgaaaatgagtgcaggtgagagcaagatttgcctgttgcaatatctttgcctctcacttagggaacaagagagcttctttttttacattttcccctttttttccaaagctattttagccaaaggaatttttaaaaggagtctcaaaatcaaccttattttaaaaagttaattttaaaaagataaattcttgctactcacc

SEQ ID NO: 137733 - DNA, 474 bp, Homo sapiens
ggcaaacaagttcttcaatcctataactgaaattgtgtgaagattgcctaaaatgcctacatgaactgatttttaaaataagtgaaacaacgaagaaagccaataaaactagactatcgaaaaataattttataatatacctttcataatattaaatattagaatagtttttttataaaataaaaattgtgacaatggtggataaattttgtgataattttgtcatttccatgatttattaaggttagccttgatggatatcttatttagagttttttcaacatataaggaaaaactgattaaggagtaaatatgatgaattgtatttatgatgaagagcacggtttagacactatgctggtagctaattataagcctgtataattttataatgaatatgaacaaaarcaaaagagatggcattaagaatataaatacatcaataattattagtgaaatcaaatttgccttttt

SEQ ID NO: 137734 - DNA, 413 bp, Homo sapiens
ctgtctttccaactctgagagggacttggtttcttacttgcttagtcatgtctttggaacattctgattctgcccggctgtttcctatgttctcgtccttcttggatctcgacccactgactctgatgttcccaattggtccagaattttgcactgacctactgtttgatatgcctccctctcagggcttgtcataaccacagtaatattccttccctttgtagctgggctcttgatcaaggtctccrtaaccccccattaccatatttctcaccagcttcagtctccatgggctcttgatattaaatctgtggccattattgataagctgcattgcctaaattgtctttataaatgcattctcctaacctcttcaaaattatagaaggttacctcttgctcccatacgacca

SEQ ID NO: 137735 - DNA, 396 bp, Homo sapiens
accctagagcttaacaataagtatatgcattcattgaataggaacatagtccctcttcatttacacatggtaattttcacagattatagaccatattaatttcagccttttttttaggaaaagaagttgttctgatgtttttttgtatagtctgttgaactgaaaactatcatgtatttacttggaattatttagaacaaataaagattattttmttgtatggagatcgaagactcacaatgttactttaccaaaagagtagttactaaaacatctactttgaaaatacacattattgactgactcttagagcccatgaggctacaagcaatttcaatctattagaactcagtgatttcctaggcagcaggagaataactgactagagttactact

SEQ ID NO: 137736 - DNA, 607 bp, Homo sapiens
attcaaactcaggacatcaaggaaataggagagtccccaaggcacttataaggtgaagagttggggaaagggaacaggtatttatagtacctttcaaaacatacaaacaaggttgtagctgataactgctagacttggtagaaaaagtaattttggataatattttgtgttccaaggaaattatacaaaccaataactaagtctcttgtgaaaaaaaaagtgaccaaatcttgcaaggcaagtctgtatgctgaggaaggtttcttatcaatcgtaatttatttgctataggaagtaaactttcttcagctaatcataattgtccactaactttccattsttacttaactatttcttaggtaaaacatttgtaacttgtagaaaataaatattatttctatcataatgagcaagtccccatactagtacataacatacttttacaataaacatgtgcatcacagaaatattctgagttgaaaagctctgattgatatacctaaggatttgcctatgcactgtttttatgtacacacacacaaaaacacacacacacacactccacattgaaacaagactgtgccaaagtaagaatgttataagcaaa

SEQ ID NO: 137737 - DNA, 607 bp, Homo sapiens
attcaaactcaggacatcaaggaaataggagagtccccaaggcacttataaggtgaagagttggggaaagggaacaggtatttatagtacctttcaaaacatacaaacaaggttgtagctgataactgctagacttggtagaaaaagtaattttggataatattttgtgttccaaggaaattatacaaaccaataactaagtctcttgtgaaaaaaaaagtgaccaaatcttgcaaggcaagtctgtatgctgaggaaggtttcttatcaatcgtaatttatttgctataggaagtaaactttcttcagctaatcataattgtccactaactttccattcttacttaactatttcttaggtaaaacatttgtaacttgtagaaaataaatattatttctatcataatgagcaagtccccatactagtacataacatacttttacaataaayatgtgcatcacagaaatattctgagttgaaaagctctgattgatatacctaaggatttgcctatgcactgtttttatgtacacacacacaaaaacacacacacacacactccacattgaaacaagactgtgccaaagtaagaatgttataagcaaa

SEQ ID NO: 137738 - DNA, 607 bp, Homo sapiens
attcaaactcaggacatcaaggaaataggagagtccccaaggcacttataaggtgaagagttggggaaagggaacaggtatttatagtacctttcaaaacatacaaacaaggttgtagctgataactgctagacttggtagaaaaagtaattttggataatattttgtgttccaaggaaattatacaaaccaataactaagtctcttgtgaaaaaaaaagtgaccaaatcttgcaaggcaagtctgtatgctgaggaaggtttcttatcaatcgtaatttatttgctataggaagtaaactttcttcagctaatcataattgtccactaactttccattcttacttaactatttcttaggtaaaacatttgtaacttgtagaaaataaatattatttctatcataatgagcaagtccccatactagtacataacatacttttacaataaacatgtgcatcacagaaatattctgagttgaaaagctctgattgatatacctaaggatttgcctatgcactgtttttatgtacacacacacaaaaamacacacacacacactccacattgaaacaagactgtgccaaagtaagaatgttataagcaaa

SEQ ID NO: 137739 - DNA, 487 bp, Homo sapiens
acttactggggaactggacttgtaccacctgccatttggccaatgttgagaagtgagaggaaggggtttcagataattcaaatcagccaatctacctcaatggaggctaccttctttttcttattgttctaaactaggtgtacataccttttcctaactaatacaccttagattagagctatcaagcaatgttcttttactttctcctattatacctggccctctcttcttacaagctttctaagaatgtatttcctttgcctattgtgtcaactaaaagagaattgggtaggatgaraagaactacatgaaaataaactgcctagatttatgaaaataaatatatgcaaagttttacacttacccaaaattcttaatttaagccagctaagaaacttcaattctgtgggctagtggcaaactggagtccatatggagtttctcaattggtctttcgagtaggtggaatataaatatcatgacagca

SEQ ID NO: 137740 - DNA, 486 bp, Homo sapiens
catagagagtattccctatgtcctcattttcttttctgcaaaggcattcataacatataatcccagagacacatttctttctttctcttcagygcttaatgccgactgctaccttcttgaaactcttccttcagtctgttaaactctgtcttctggtttctcccatctctgtatgaaaggtccatatcagaattcttgtccttaaatacatgctatcttagagtcatatccttggccccctgttttttcactctaaaactctctacagataatctaatctaaatctgtggctttcatctaccactatgtatggctgactaccaaatttctatcttcaattaagtagcaatccattttctactgggtagatacaattgactgtcatatatttatcttgaactcaaagtcctgtgcttaattcatcatctcgtaccctttcccaaattttctccttcaacctacataaattataccatccagtcaccc

SEQ ID NO: 137741 - DNA, 368 bp, Homo sapiens
gacaaaataaaaaagaataagaaatgatggagaacatttacaggatatagaaaatagcctcaaaagggaaaatctaaaagttattggccttaaagagaaggtatagaaagagagagagagatattggggtaaygagtttattcacaaggataataacagtgaatttcccaaacctagagaaagatattaacattcaaatacaagaatgttgtagaacatctagccgatttaacccaaagaagactacctgaaggcatttaataattaaactcccaaaggttaaggataaagaaaggatcctaaaagcagcaagagaaaagaaacaaataacatacaatggagtccaatatgtctggcaacagacttct

SEQ ID NO: 137742 - DNA, 368 bp, Homo sapiens
gacaaaataaaaaagaataagaaatgatggagaacatttacaggatatagaaaatagcctcaaaagggaaaatctaaaagttattggccttaaagagaaggtatagaaagagagagagagatattggggtaacgagtttattcacaaggataataacagtgaatttcccaaacctagagaaagatattaacattcaaatacaagaatgttgtagaacatctagccgatttaasccaaagaagactacctgaaggcatttaataattaaactcccaaaggttaaggataaagaaaggatcctaaaagcagcaagagaaaagaaacaaataacatacaatggagtccaatatgtctggcaacagacttct

SEQ ID NO: 137743 - DNA, 608 bp, Homo sapiens
acaaagtgatactgtgccttcttttttcagctctctgatgagttgaccagagtgtggagactgtccaatcagggtgctgtagtgtgacaagctccagctctgggaaccagtgggatgggtttggatcccaactctgacatctgctaataggatgtatttatttgtcaaacatatctaccattttaataggcaacatatattcctttattttcattgcaattactgatatttttgtataatttccacatgcttattttttccagggattaatatttgctacttcttcacgttatttttatttttcttggtgtttttcctaacctggtgaatgctttctgccctttttctacttctttcaagttagaaatttttttatattcscactttaaaaaagtgctactatgtattttactaattattgcttgagcaatttagtgccatgggagggaggtgcaggatgcatttaaagttactttttgtatttaatttgcaaataaagaatatttgtatatcaataaatattgtacatataagtaaaaaaactgacaataacagtgatgccaaaagcatgcataaaaaggctataattagctttatcccctggatga

SEQ ID NO: 137744 - DNA, 608 bp, Homo sapiens
acaaagtgatactgtgccttcttttttcagctctctgatgagttgaccagagtgtggagactgtccaatcagggtgctgtagtgtgacaagctccagctctgggaaccagtgggatgggtttggatcccaactctgacatctgctaataggatgtatttatttgtcaaacatatctaccattttaataggcaacatatattcctttattttcattgcaattactgatatttttgtataatttccacatgcttattttttccagggattaatatttgctacttcttcacgttatttttatttttcttggtgtttttcctaacctggtgaatgctttctgccctttttctacttctttcaagttagaaatttttttatattcccactttaaaaaagtgctactatgtattttactaattattgcttgagcaatttagtgccatgggagggaggtgcaggatgcatttaaagttactttttgtatttaatttgcaaataaagaatatttgtatatcaataaatattgtacatataagtawaaaaactgacaataacagtgatgccaaaagcatgcataaaaaggctataattagctttatcccctggatga

SEQ ID NO: 137745 - DNA, 594 bp, Homo sapiens
cacaggggactgagtagagtgattattgtaaataaatatggcactagckgtggtttcaaggcagggcatgactcaatgaataaatcttcattcttacatggcaaatgcagtttatactgatgaaggtggtaattaatcaggtgtttgttatcacctgggaccagaaaatcagcctgttaatggtgagaatggaaaaatgttgtctctgcctttcataaatactaaaagaataaggagtaaaaatatcctatctaatggcttcttctcagagcaaaaggcaattaatagcgaaatgaagaaaaattcccaaacagcttgcctgcttacaaagataagggaattcagtatcactttgtgagcatagcagtattcttctctgtgacctcatacaataagaagagaatattacccaaagtccaggacatcacctgtccaattgtcattaccattcacgccactgcctacttttgtgacacagagttgttccttgtgaggcaccatgaacagaaaataaacccagaggtaattcttctctcagagagcaaaatcagcaatcttcctgactttggtcatgtcataccagtagactaaaca

SEQ ID NO: 137746 - DNA, 594 bp, Homo sapiens
cacaggggactgagtagagtgattattgtaaataaatatggcactagctgtggtttcaaggcagggcatgactcaatgaataaatcttcattcttacatggcaaatgcagtttatactgatgaaggtggtaattaatcaggtgtttgttatcacctgggaccagaaaatcagcctgttaatggtgagaatggaaaaatgttgtctctgcctttcataaayactaaaagaataaggagtaaaaatatcctatctaatggcttcttctcagagcaaaaggcaattaatagcgaaatgaagaaaaattcccaaacagcttgcctgcttacaaagataagggaattcagtatcactttgtgagcatagcagtattcttctctgtgacctcatacaataagaagagaatattacccaaagtccaggacatcacctgtccaattgtcattaccattcacgccactgcctacttttgtgacacagagttgttccttgtgaggcaccatgaacagaaaataaacccagaggtaattcttctctcagagagcaaaatcagcaatcttcctgactttggtcatgtcataccagtagactaaaca

SEQ ID NO: 137747 - DNA, 536 bp, Homo sapiens
tacagaagagtgctttataactccctaattctaagagtctctcatcctcatcccacgttttcagcatatctcatttggctccgtagtaaccatttgccccaggcagcagcaaattgttcatttccctttcactatttttgagtgatgccctctgcctagtagctagttttctgctctgagagacttccaaattaggtgaaacaaaracgagcttcttgcttctgtctttccggtagccccaaaactggtcaaaacaaatatgcaattctttgagaacaaggtctgctctgctccctctggaaccacggactggaaacacagatcgctgtatttaaggctactgccaagctggggttgggggcagggacaaaggaaagctaaactgctgcaaaacttattttctaaatccactgattcttgattcagcacttgcttgctctaaacctttgaacctttgactatttttcagtttcaacaaagttgattgacagtttttgatttttgctttttgtgtgtgtgtgcatgttgtttctgcg

SEQ ID NO: 137748 - DNA, 584 bp, Homo sapiens
tgtaagttttattcaggttttctattttttcttgaattagttttggtaacttctaactttgtcagactttgggtggattagactcgatattggttagaacctaataaaaccttgctgcagtttcatcagaggtccactcatagtttgtcctgaaagttgggagaggagaaattctcctaatgagcaaatctttggtcattcacgttatatggaaagagaagcagactagtgacagaatgtatgcagaatcatggggtgtggcaaatagcttagcaggtttttggaaagtctgcaaaaaaaaaatgagactaagaacaagaatgtctggggaaccacatgtcaattaacctacaggagtggacatgatatatgatctttgtagtatatgataatacccaacaaraggcatgtgccattgacaatgcactaaacaaccagacagaaacaatgactcagccatttgatgtaagaaagtctcaatggcccctttagtcctgaaaggataagtgcataataataaggttgttatagtggcaagggtggtcatgaatgaacctagtgacatagattccaactcactaagg

SEQ ID NO: 137749 - DNA, 512 bp, Homo sapiens
tttttaggttattaatttgaataaataattattttaaaggggatagaagaaatactgtaaatatcagcaatgctactaaatattcctcaagatgaggttttaaagtgaagtatttggcatttagtaaatgattactaatctttctattcattccacatatttcgataattaataaagrtgaccatttgactgaaaaaagacttccaatttcaagtcagagtcagttaaatacagttgttaaaaatcatgaagcacactcttagtgtaattatttatcagatgacaactaaagtagccacactgtggcaaaatgatttcgtaaggggcttctgctctttaaacactaaggcaaattgattccttaggaaggaaagcaattttaaagaacttgtaagtcaagcagtgaggagaaagttgacccctcctatatctagagaatggcattggtgaaaggatattcacagatatgagaaataattaatgatgaaatgaaagatttgagtctgaatgga

SEQ ID NO: 137750 - DNA, 512 bp, Homo sapiens
tttttaggttattaatttgaataaataattattttaaaggggatagaagaaatactgtaaatatcagcaatgctactaaatattcctcaagatgaggttttaaagtgaagtatttggcatttagtaaatgattactaatctttctattcattccacatatttcgataattaataaaggtgaccatttgactgaaaaaagacttccaatttcaagtcagagtcagttaaatacagttgttaaaaatcatgaagcacactcttagtgtaattatttatcagatgacaactaaagtagccacactgtggcaaaatgatttcgtaaggggcttctgctctttaaacactaaggcaaattgattccttaggaaggaaagcaattttaaagaacttrtaagtcaagcagtgaggagaaagttgacccctcctatatctagagaatggcattggtgaaaggatattcacagatatgagaaataattaatgatgaaatgaaagatttgagtctgaatgga

SEQ ID NO: 137751 - DNA, 550 bp, Homo sapiens
atttaagggcccttgcagagataaggagaattaagacatctcatctattactgcagtaccagttatttcttagactaaygctagtgcttcttgctatttttttataaagcaataaaagtagaattataccataagtaaaaaattggcaaacatagaataagataccaaaaataagtgttactggctttctgaggagctgaattatttaaccagagaaccatgggcggaatgtttgggaatggataacacagtccggtggcaaatgcattacagatcagtggagaagagaggtaacacaggcatgggcacaagccattaattacccagaggggcagctagtaacagggaaacactgccccctcagctggtgtgactaatttaaagtactaagaatatattaacaaaactaataaatctgaagctaatttacgtgatgaaaaaagagaggctgttatcttttcccattaaaatcaaagactttagagaccggttctttacattagattttactgatgactgatacggtattcgttttcttaaggggatttat

SEQ ID NO: 137752 - DNA, 603 bp, Homo sapiens
ctcagtctcaggtggttctttagagcaatgtaagaatggactaatacagtcagtgagctttcagactgactctcaaataatttataaatttccagctatttatattgtattgacatttgtgaatggcaccttttctcactatattgttattgctagtctataggaaagcattgtttctttattttcctttttaaattttattttcaagatgtagagcaaaaatttatgttactgggtttttgattgttctgatacacagacattgtgaagtaatcaccacaattaagctaattaacatatccattacttcatgtatgawgttgtgtgtgtgatgggaagacttatgacctactctttcagcaagtttcaaatatacattattaactatggttaccatgctgtacatttaatctcaagaatttgttaatcttataaatgaaagtttttactctttgacctatatcttcccattgcccccacactcaaacccatagcaatcatctttctactctttttctaagggtccaatttctttaaattacacatataaaagagatcatgcagcatttttctttctgtgtctagcttattttacttggcata

SEQ ID NO: 137753 - DNA, 492 bp, Homo sapiens
ctcagttgcccaggctggagtgcagtggcgtgatctcagttcactgcaacctctgcctcctgggttcaagccattctcctgcctcaacctcccaagtaggtgggattacaggcatccgccaccatgcctggctaatttgatgtatttttagtagagaacgtgtttcgtcatgttggccaggctggtcttgaactcctgacctcaggtgatccacctgcctcagcctcccaaagtgmtgggacaggtgtcagccacagctcccggccaagaaatctttttttgaagtgtttaatccttgtccaagttcacttcagaacaaaagttagagcagagagaatggattgtcagcaaagtcttcgaggaaaaactaacttacatatttcttagaatatttagctcacagacagctctcagacttcattttatttggatgacaaccttctaaagaggaaggcatcactcctgttttcaatcatgaaaccaggaattcag

SEQ ID NO: 137754 - DNA, 555 bp, Homo sapiens
gaattccttttgcattttaaatcagtacagataagtgaatgttccataagaagtctttttttttttttttttaagacagagtattgctcagttgcccaggctggagtgcagtggcgtgatctcagttcactgcaacctctgcctcctgggttcaagccattctcctgcctcaacctcccaagtaggtgggattacaggcatccgccaccatgcctggctaatttgatgtatttttagtagagaacgtgtttcgtcatgttggccaggctggtcttgaactcctgacctcaggtgatccacctgcctcagcctcccaaagtgctgggacaggtgtcagccacagctcccggccaagaaatctttttttgaagtgtttaatccttgtccaagttcacttcaraacaaaagttagagcagagagaatggattgtcagcaaagtcttcgaggaaaaactaacttacatatttcttagaatatttagctcacagacagctctcagacttcattttatttggatgacaaccttctaaagaggaaggcatcactcctgtttt

SEQ ID NO: 137755 - DNA, 513 bp, Homo sapiens
gtgaatgttccataagaagtctttttttttttttttttaagacagagtattgctcagttgcccaggctggagtgcagtggcgtgatctcagttcactgcaacctctgcctcctgggttcaagccattctcctgcctcaacctcccaagtaggtgggattacaggcatccgccaccatgcctggctaatttgatgtatttttagtagagaacgtgtttcgtcatgttggccaggctggtcttgaactcctgacctcaggtgatccacctgcctcagcctcccaaagtgctgggacaggtgtcagccacagctcccggccaagaaatctttttttgaagtgtttaatccttgtccaagttcacttcagaacaaaagttagagcagagagaatggattgtcagcaaagtcttcraggaaaaactaacttacatatttcttagaatatttagctcacagacagctctcagacttcattttatttggatgacaaccttctaaagaggaaggcatcact

SEQ ID NO: 137756 - DNA, 558 bp, Homo sapiens
gtttccatatgcatcatatggagcaagtatgaactcattaaaccatcaaattatcctatttatgaaaagaaaagtagattctatgtaaaatagcaaacaagacagaacagtatacaaaaagagctcaattgtgctggaggaatgctcatagagttggcaatcttgaccgtcatgaagggtagccatcctgccctggtgggcctgccaaaactttctaaaagaggtgaaagtatgaaaaatgtaaaaccytcactatttatttatacctgattatatcatatacttaggaaagtccaaataatcaatagaaaaaatctttaagaacaaattttcaaaaaaaaatgtggtttcatggcaggttacataatatacactgaaaatcaatagcttttctgtaaactggcaaaaaatgtacaacatcattgggggaaaattcatggtagcatcaaatattataatatgcctagcatagacataacagaaaaggtgaaagaaacataaaaacaaaatgtagaattgttattggaagagtgaaaacaaaaggaaaacattttatgc

SEQ ID NO: 137757 - DNA, 558 bp, Homo sapiens
gtttccatatgcatcatatggagcaagtatgaactcattaaaccatcaaattatcctatttatgaaaagaaaagtagattctatgtaaaatagcaaacaagacagaacagtatacaaaaagagctcaattgtgctggaggaatgctcatagagttggcaatcttgaccgtcatgaagggtagccatcctgccctggtgggcctgccaaaactttctaaaagaggtgaaagtatgaaaaatgtaaaaccttcactatttatttatacctgattatatcatatacttaggaaagtccaaataatcaatagaaaaaatctttaagaacaaattttcaaaaaaaaatgyggtttcatggcaggttacataatatacactgaaaatcaatagcttttctgtaaactggcaaaaaatgtacaacatcattgggggaaaattcatggtagcatcaaatattataatatgcctagcatagacataacagaaaaggtgaaagaaacataaaaacaaaatgtagaattgttattggaagagtgaaaacaaaaggaaaacattttatgc

SEQ ID NO: 137758 - DNA, 527 bp, Homo sapiens
agcccaaagcaccataaatttgaattggcattaccatgctgatttattcaatattagaaaggtagctaatttttacatgaaaagtgaaaagrgaatttatgcaagacatttataacttcagataaaaaagaaaaataaatataaaactgataaatagcgttatctaaatgtttgtttgaggctctatgatttatcagcatatgagtcttaaatcagagccacagagagagtgaagtgtccaagtgttggcttaggggtgagggttttgatttgtgcatgtcctctatatcataattatgactagattgacaagtcctgggtatattcaaacctcagttttaaatatgaagccgaatttattcacagaggtttgggaaacagattaagttaataccagaaaaagtccttcttaaattacaataagtaaatgtagtgagttttttattcccaagcaagtctacagtgtggttactctaagtgttgattctttgaatatcttttgaattccaaatacaagatacaccagt

SEQ ID NO: 137759 - DNA, 327 bp, Homo sapiens
attatgctcatatctgcttggggatgactattctacttatgataacagcacataatggcagttaatatkttaagcaattacttatcatgtaccttattctgctaagtgcttcacatgtattaacttatttattccaatgttgactcaataaggtaggcatttgattgtcggggacatctcagacttagagatgttaagtagcttcccaaagattagctggaactgtaacaagcggtctaacccacactaacagttcagaaacccattgcttccaagctctaggaatatttatttccactgttttaatgaaggctatataatcaggaa

SEQ ID NO: 137760 - DNA, 571 bp, Homo sapiens
actcaaaatagactttatttccttgatgaattcaaaagcaagaggcagwttcaagattgtttagagttcatattcaaagccagtccggttttggtttcaaagatgaacagctgttcaacaaataagtttattcaaattatttggttttttgaaatagattacaattcaaagagaatacaaaatggcaaaatcctaccaacccaaaaggctcacaggaaagacagcttgctagatacggactttgaagctaaattttatataagtgatatccatccccacccactcctagctattatagtacctcaaacaactcctttgagtcttttacctgattctttctattttagccacagcttccaaaaacataaattcggcaaagtattttaagcactttttattgacctttgtaccaaatggatcccaggtccacattttataattagacgacctgggacaagttatttaaaacagaggtaacgccccagtggaattaggttgctgtgagtattaacaagatgatatctgcagaagtactttcttcaattctaaaacaatatacaaatgtaaatgg

SEQ ID NO: 137761 - DNA, 571 bp, Homo sapiens
actcaaaatagactttatttccttgatgaattcaaaagcaagaggcagattcaagattgtttagagttcwtattcaaagccagtccggttttggtttcaaagatgaacagctgttcaacaaataagtttattcaaattatttggttttttgaaatagattacaattcaaagagaatacaaaatggcaaaatcctaccaacccaaaaggctcacaggaaagacagcttgctagatacggactttgaagctaaattttatataagtgatatccatccccacccactcctagctattatagtacctcaaacaactcctttgagtcttttacctgattctttctattttagccacagcttccaaaaacataaattcggcaaagtattttaagcactttttattgacctttgtaccaaatggatcccaggtccacattttataattagacgacctgggacaagttatttaaaacagaggtaacgccccagtggaattaggttgctgtgagtattaacaagatgatatctgcagaagtactttcttcaattctaaaacaatatacaaatgtaaatgg

SEQ ID NO: 137762 - DNA, 511 bp, Homo sapiens
tgatggttagtacatgtctgtagcttaatatcaccctaccagggactgacaacttttgctcccctgtctctacatctgactcccgaacaaaaccccatgtccccttcattcaatgcatcaattgctttaagtcctttaagtcttgtttattttttcatctataatgacatgacagaactgtatttaaaatatacatgcatttatgtagtgaagagtaaaatgtctgccaattgaaaaagtttgaatactttcaataaaaaatttygaaaattcttccttgacaatggacatttttcctatacttctttttttaaaatagtgtgattattttgaaggtaacttgcttcttactaagagtacaattatgcttctggtttatctgcatgccctttacattttcagttaacttatactgatcaccttttatgtagagactatgtttagcaggttaaataaaatatctttaatttacaaagttacataatgatgttcagacaggttaaaaaatgtg

SEQ ID NO: 137763 - DNA, 572 bp, Homo sapiens
atattctgaagggcatcaaagtattatagttaaagaaattaacccaagatctcggctgaatgtattttatgcatctaacttcttcttctctcttaaagtcctactgcttttttttctttctggaaatcccttttcataatatccaacttttagaagattttttcacttctagacttcttaacgtattgcatcttaaatctctctgtgaaacaggaaactcacccatacttttaagttgataacacytttaaaaacataatacttgaagaccatacagaactcctcacatgtcgatggaaattcattctttgtagcatctaaagtactttgatttgctgcccactttcctgtgttaccgaagttcaacatggtgaaacagtgcagtatttggagtcagaattcatcaaccaggggcttccgctaggacggatgttgctcttggtcatccccgcttcaggtggtgacttctccatggtttcacctcttgtcagtctcacaggaggggtgacaatgggagatgactttctcgtttgcaagcttccttcccagcacgcagtcagattttccaagac

SEQ ID NO: 137764 - DNA, 458 bp, Homo sapiens
tgctgtgatgattaatactgtcaattttgaccctcaagagaaccctgatgaacacacataccagatgcaatgtgaacctacccacagcagtggaagctatgaagagtcctgttagattctgaaacactatgattcatagaaacccagaaaacacatagttgaaagtagaaaattaatgcagtgttttctcagcctggcctaaggctttaaacatcatctatatgctgatgatttccaaggctttcatctccaactctgccctccccactgagcactagattaatctaggcaaytgcctacttcccatctccactgggtatttacttactagacttctctaagttcacacacccagaataaaatctggcatttctcccattattcccattccaccactctccacctttcctctctcccaggtggccttatctttgtaaatggtaccaccagcaacccag

SEQ ID NO: 137765 - DNA, 500 bp, Homo sapiens
tcttaagatattatgctgtgatgattaatactgtcaattttgaccctcaagagaaccctgatgaacacacataccagatgcaatgtgaacctacccacagcagtggaagctatgaagagtcctgttagattctgaaacactatgattcatagaaacccagaaaacacatagttgaaagtagaaaattaatgcagtgttttctcagcctggcctaaggctttaaacatcatctatatgctgatgatttccaaggctttcatctccaactctgccctccccactgagcactagattaatctaggcaattgcctacttcccatctccactgggtatttacttactagacytctctaagttcacacacccagaataaaatctggcatttctcccattattcccattccaccactctccacctttcctctctcccaggtggccttatctttgtaaatggtaccaccagcaacccagttgtagggaacatacagaaaagattctag

SEQ ID NO: 137766 - DNA, 458 bp, Homo sapiens
tgctgtgatgattaatactgtcaattttgaccctcaagagaaccctgatgaacacacataccagatgcaatgtgaacctacccacagcagtggaagctatgaagagtcctgttagattctgaaacactatgattcatagaaacccagaaaacacatagttgaaagtagaaaattaatgcagtgttttctcagcctggcctaaggctttaaacatcatctatatgctgatgatttccaaggctttcatctccaactctgccctccccactgagcactagattaatctaggcaattgcctacttcccatctccactgggtatttacttactagacttctctaagttcacacacccagaataaaatctggcatttckcccattattcccattccaccactctccacctttcctctctcccaggtggccttatctttgtaaatggtaccaccagcaacccag

SEQ ID NO: 137767 - DNA, 504 bp, Homo sapiens
tgctcagtacattatttaattttgacttgcttataaatttatatcacatgaaaacaaactcaaagataacatactgtttttcacttttgaaaatcatgaatgttaggcatatgataattttaataacaagcatatgattattttattccgcttacttktacaacataatttgggtgccatttcttcaggagaaaacatttgtcatttggaatgctctgtttcagtccttaagcttctacgtataattacagcatattattcataaacggagtccccaatgaaaataggattaagttccaaaagtttgcttttaagttagttgcttctaagtcttagacactgtcttgaataaaatttttgtagagatttgatattccctattaagttttaagggcctttcccactctgacttctactctttcctccctgactaatttgacctgcaaactctcatcttaaaatagtacctctcacatatgtgtaagttttcattacagattgttc

SEQ ID NO: 137768 - DNA, 425 bp, Homo sapiens
caaaagtgattcattttgtagaaaacagtaacacttttcatamcgatgccaccatctaaatattcatcaagagttcatcactaaaatccaccctttggagcaacatgtacaaaacagtattctgggaaagacacattacaacaaggaccacaggcaggacagatattctgacatccttacacatatagtatacctatatgatttttgtgttatagtctttgaatgttctattggtctcatttaccatagtgattctaatccttaaaaaaacacatttcctagttactatagctatacccagtgctcatggggcagttactcccaatcagacacaaggatgtggacctgaactaggtgtaagcttccatgcccatatatatcccaatgggacaaaaccagagcattagctataatttaaggacaca

SEQ ID NO: 137769 - DNA, 541 bp, Homo sapiens
ttggaagatgtatataaatatatakgtatatgttatgtatattatgtgtgtgtgtacatctctctctttcaattttatcacaatatgcattattgatatgcatgcatagatttccaggggaactgcagagaaggaagagtactttaattctttccaatgtgtttctcaaaggtcttctgatatctgatctttctagggctgatgaagcaacattctcctttctgttattctgtaggtacaagtccaagcgctcatgttaatcacatcgttgaacgctactcctgtggctgactccagctacacgccatgacagaagacatgtggcccagaattgagtgtggaagagccaaaaagggaatgaataacttataaactgcagccctgccaaagtgaaaagaaggcaagttttctgccaggaagcagaaatcaagatcagcatggaaatggaagtcatggctaatgagaaaatgctatattacattaaaaaatatttattgattaatttgaataagtacattagcataaacaaactcaggaattc

SEQ ID NO: 137770 - DNA, 566 bp, Homo sapiens
gtgtcttctccattagaagaactgattggaagatgtatataaatatatatgtatatgttatgtatattatgtgtgtgtgtacatctctctctttcaattttatcacaatatgcattattgatatgcatgcatagatttccaggggaactgcagagaaggaagagtactttaattctttccaatgtgtttctcaaaggtcttctgatatctgatctttctagggctgatgaagcaacattctcctttctgttattctgtaggtacaagtccaagcgctcatgttaatcacatcgttgaacgctactcctgtggctgactccagctacacgccatgacagaagacatgtggcccagaattgagtgtggaagagccaaaaagggaatgaataacttataaactgcagccctgccaaagtgaaaagaagscaagttttctgccaggaagcagaaatcaagatcagcatggaaatggaagtcatggctaatgagaaaatgctatattacattaaaaaatatttattgattaatttgaataagtacattagcataaacaaactcaggaattc

SEQ ID NO: 137771 - DNA, 566 bp, Homo sapiens
tatattgggaataaaaagagattttctaaggtcggactgtatcattatattatttattatttattgcattctaagtgtgtgttcttcagtatgaagaataaagggatgcaaagttatttccccaaagatttttaaatctattttgattttaaagtagcaaagcagaaacaatattaaaatttcagaaatcactggtcagtctaagatagagaacactcatttttgcctgcatgttcatttctgagctaaaatactagctttattgcacttaagaaagacagctgatattccacctattccacatttcttaaataagatatatacttccaaagatttcgtttcctctataagcacctaatcctcttyagaaattctaagctattataaaaatggagtcagaaatgttagcttctgtaaaatgtcatccataagaaactacaggtggaacacaaggaaatgataacatatgagctttttgagtacttttggtctttatattcagtaagtccaggaaacaataaatattagtaaacaatattgtactcattttaacataaacttattct

SEQ ID NO: 137772 - DNA, 572 bp, Homo sapiens
tgcacctgggggtctgggtctgcgacactcatttccaatgaatggtccctcccgtccatcagcctcagtgggagctgggagctgcctccctcctcagtcacagctgtctgctctgcctggttcttatggcttttcgggagaactaattgctgggaattttggcatctaagtttcagctgagagggaaaagtaaaggtctggattgtgcatatctgaacagacacttgtgacccctggaaacctcatgstgaggagacatttctattgcaggggaggcacatgtttttggtccttgatttgcgaacttaggtgattaaccctcacgtgtgtttcgcccttagtgcaggaaagaatgaaagagcatacccctattaagtactttgtttatgcattaaaaattaaaaatgtgtcctggcatgtgtacacatgtgtgcatggcagggagatggtgtggggctggagcacaggcagagaatagcattggcttgggaatggagagccactgtgacatatttaaccctgatcatcacttcatgtcactttaatgttcagggaagacagcatcatagcac

SEQ ID NO: 137773 - DNA, 569 bp, Homo sapiens
gaactcactgcatggcttccgcacctcctgtctcctcttcacctaacctcagtcactttagcatgattgctccacttaaacttattgtccaggccactggtgaccaccatttgttcaagaccagtggtcactcctttaccctcttctcactatgactctacagcatgtgactatgttggccactatcccacttataccttcttctcttggcttctattgaaccattctctctggcttttcccctattgtggtgaattcttataattttttgttgctttggcatcaattttaaatttagattggtcttactcatgcaaagcctaatcatgtttgacacagtttccatcccccctacctccttgcagtttctcaaggtggtcaatcaagacatctgccttgtatactgccttctggtaaccacctccctgtrggacagctggatacaccctactaatccccacaccctgcatagactgcacaggtatcccacccacactgaccttctctcagtcacagcatgatgccatagggcatgtgcctgcttgttctaaacccaccgattagaaacc

SEQ ID NO: 137774 - DNA, 549 bp, Homo sapiens
tctgttatttcatgggttctgatgagttgcctcttctaccccatcctaacttctgtcctggtcagggctctctgggagagtggctgccttggtaggaataaactagayacaggtcagatgagagccacaagggcatgtgccaggataaacaagcttcccgtgagagggacacctggccacaggctaaacacttaggtatcaggctgtctgtgaggtcaaagaaggatcccatgaaaggcacatgggaaaaacccacaaccacatccccaggatccccgtcagggcagggctagagtttacagccactatcatgagagggaactcaagactaaattaggaaaaaacaaatcatctatataactggttgatttttctcagtgacttgggcttcttcatcttcctctattcctgctcaaatgttagtgtgctttgaggtttggtcctggaccctttttatcttttctaatcccactctctccttggggcatctcatctggtcctgtagcttgaaataggaactatatgctgatgactttcaagttcacatct

SEQ ID NO: 137775 - DNA, 395 bp, Homo sapiens
taaccttcaatttgttacagatataaatggatacctcggttcagtaaacacatcactagtgccataggaggtatatgtatctgcaactgtgctcatggtaatatactattaaatatgcatgatcagtaactttaacattttgaagtcagccccatgaaagtaagttcaaaatgcctttccccccsattaaaaggcatagtggcctatctgtgattacatttgcaggaagaaaaatatgatggcaatcacagaagacttgagttttgtttctatatgtgacaaatatcacaagaatgtttaatgaaacaaaagggctcattttagaattgctttttattgggtttattttactggtatcaaatgatgtcaaattgtcttgaatcttttaactagat

SEQ ID NO: 137776 - DNA, 603 bp, Homo sapiens
ttgtacttaaattttaagctaagatatagaaatacatactataccctgttccttcaataaaccatgcatgtaatagatacttaaagctcctttactttccaaacgggaggataacaatgaaacactcctttcatatgaatctttaagtttttcttttgtaattcttattttaaaggcaatttcaattacatcaggatgctaaatcaatgggataaacagaaaggatgttgtaagtttttctccttctaaaagaaagtagctaacagagtggacaaacaccagatccctaagcagccwttgggccacctgtggctccttcacccatgtacttaggaaacagaaatcatttcataacgtcctccagtattaaaaagctagttgtccatcaacacaaaatgttgcctatgctgcacctcccccagctcctatcacgcatcttcctttgcagcaggctccacgtctccaagtctcagacaataacagtcctcctccagcctcagccttcatcaccctgttctcccaacaactgctactgttgctgtttcccattacaaaattcagctttttcttaggtccctcagtagaatttttgcttcatatcaa

SEQ ID NO: 137777 - DNA, 587 bp, Homo sapiens
cttctacctggctacctcccactacagacgctgaacatccacacattggctttcccaggctctcctgtgactggaaagggtgatggaacaagatgtgaatgaagtcagcctcaggaaggaacggcctctgtggtaagyagcttttaatgtcctaataaaaaggagcagatactgttcgtgggacacttctactttgctacttattctgcttgccttgaatgtagatgaaatggctggatctgcagcagcctccttaagagggtgacagcaaagccaatgggctcctccagacatgagtcctgattttattaattggccagaccaaagccagcagcccccatgtctggacttccttttatgtgaagcaaataaattcccatttgtttaatcctctgtagtctggttttctgtttattggagccaaatataaggctgactcatatatttggaacagcccaattgagtcagtaaacacagccttgcctatgctgtaggatacgcttctgttaacatggagtttgctcagtgagtttggtgtgaagcaaatgaataaattgagaccacctacaaaagctatgtatgtggca

SEQ ID NO: 137778 - DNA, 688 bp, Homo sapiens
tgtgcacctgcaggcttgtggaagtggccaaggcattgggcttgcaccctctgaagccaaggcccaagctataccttggtcccttttagccacatttagagcggctgggttgcagggcaccaagtcccaggttgcatggagcaggggggtggtggtcccagctcacaaaaccattttttcctcctaggcctccagtcttttgatgagagagactgctggaaagatctctgacatgccctggagacatttttcccattgtcttggtgactaatgtttacctcctcattacttatgcaaatttctgcagcaggcttgaatttctcctcagaaaatgagtttttcttgtatatcacatcatcagcctgcaaattttctaaacatttatgctctgcttcccttttaaacataaggttcarttgcaaaccatatctttgtgaatacataaaactgaatgcttttgacagcacctgaatcacatcttgaacactttgcttcttagaaatttcttccaccagatgccctaaatcatctctcaagcacaaaaatccacaaatctctagggcaggggcaaaataccaccagtctctttgctaaaacacagcaagagtcccccttatttcagttccaaacaaggcacttgcaaagaaaaaaatattgaccatcctatctattattaaatacagggttt

SEQ ID NO: 137779 - DNA, 593 bp, Homo sapiens
ttatggcagccctagaaaactagtaactaagaaaccctgaacccaagcaatgttctctggaccagcatggatctcatggacatactgtcagtgcccttctgttactccaataccaatgcatgcccatgaaagagaatggcattagggacctgtgtctgacaggccctgggatccttcaaagacgaatattgcatttgtgcctgggtttgcttatacccattgtgaatcattagtaaaatttagtgtttgatagtgtctacgattcctaggaatctgccttaacaagtcaaccctttgttgtatttcaagatgtgtcttacaagcatttaaaagttaacatatttaaaactgaaaccatcatttcagacctgcaaacatacatctcaataaatagctctgtgtyactttctggggctgctgtaaagaagttggcacctgggctgtaataaactgggtggcttaaacagaaatttatgcttacagttctggatcctagaagtactaaattaagctgtaaacagggtgttagtctctaaagactctagtgtaaaattagttccatacctctctctcagcttccagtgctgctggca

SEQ ID NO: 137780 - DNA, 593 bp, Homo sapiens
ttatggcagccctagaaaactagtaactaagaaaccctgaacccaagcaatgttctctggaccagcatggatctcatggacatactgtcagtgcccttctgttactccaataccaatgcatgcccatgaaagagaatggcattagggacctgtgtctgacaggccctgggatccttcaaagacgaatattgcatttgtgcctgggtttgcttatacccattgtgaatcattagtaaaatttagtgtttgatagtgtctacgattcctaggaatctgccttaacaagtcaaccctttgttgtatttcaagatgtgtcttacaagcatttaaaagttaacatatttaaaactgaaaccatcatttcagacctgcaaacatacatctcaataaatagctctgtgttactttctggggctgctgtaaagaagttggcacctgggctgtaataaactgggtggcttaaacagaaatttatgcttacagttctggatcctagaagtactaaattaagctgtaaacagggtgttagtctctaaagactctagtgtaaaatyagttccatacctctctctcagcttccagtgctgctggca

SEQ ID NO: 137781 - DNA, 527 bp, Homo sapiens
aatactgtgccaattaaaattctcatcaactttgtgtgagaactcctgtttcttcacaacttcagtaatatgtgaacttgggattggtttgatatgcagcaatagaaagctggaagagcaacagagataatctatctatgaggtgtcatggtaggagttgtaaacagataaagcagtggcagtggggagakaaacattcaataacaaaagaagaaagttttatagacttaacaggatgcatatgtcttcaaattcagagaaagataaatggcaaacaacaacagcttgaggcacatgaattggaaatttattaccttgtagatagaagataaaaagatttagtgtagaaggatagaaaataaattatccatctgcctactgaaagaatcaattttatctgagatttgtttggagaagcttatagaatagagtgctttcaacgttactttcatcctgtacttcagccagtcaaaatattagttaatgctgagagattatagacgttttaagattcagaacataccatg

SEQ ID NO: 137782 - DNA, 527 bp, Homo sapiens
aatactgtgccaattaaaattctcatcaactttgtgtgagaactcctgtttcttcacaacttcagtaatatgtgaacttgggattggtttgatatgcagcaatagaaagctggaagagcaacagagataatctatctatgaggtgtcatggtaggagttgtaaacagataaagcagtggcagtggggagagaaacattcaataacaaaagaagaaagttttatagacttaacaggatgcatatgtcttcaaattcagagaaagataaatggcaaacaacaacagcttgaggcacatgaattggaaatttattaccttgtagatagaagataaaaagatttagtgtagaaggatagaaaataaattatccatctgcctactgaaagaatcaattttatctgagatttgtttggagaagcttatagaatagagtgctttcaaygttactttcatcctgtacttcagccagtcaaaatattagttaatgctgagagattatagacgttttaagattcagaacataccatg

SEQ ID NO: 137783 - DNA, 382 bp, Homo sapiens
caaggatgaagttgggccatgagtctgtagaggcttaagtccagttcagaattgtaaggcagactcaggaataaaagtcagatctattacaatagacaataataagaaatttatcatatgattaagatcaattgcatgaacaaaatatgtgtaactgggtactccacataaaaaagaggcaaaaaaaaaaaaaacaaaaaaaacaaaaacaaaacaaaagcatttccccaatacaaaacaatttgctcaggatcagatgctggtgagtcaatcacactggattctcagcaagagacaaagaagagctggaagatattcgttataaaatttwaaaaaaatttaccttcaataaaggatagtgacttcagcaaaaaagaaaaag

SEQ ID NO: 137784 - DNA, 382 bp, Homo sapiens
caaggatgaagttgggccatgagtctgtagaggcttaagtccagttcagaattgtaaggcagactcaggaataaaagtcagatctattacaatagacaataataagaaatttatcatatgattaagatcaattgcatgaacaaaatatgtgtaactgggtactccacataaaaaagaggcaaaaaaaaaaaaaacaaaaaaaacaaaaacaaaacaaaagcatttccccaatacaaaacaatttgctcaggatcagatgctggtgagtcaatcacactggattctcagcaagagacaaagaagagctggaagatattcgttataaaatttawaaaaaatttaccttcaataaaggatagtgacttcagcaaaaaagaaaaag

SEQ ID NO: 137785 - DNA, 483 bp, Homo sapiens
agaaaggagagactgttcagctggccagagcatttgagcaaatgcggacagtcaatacagcagcagatgccaccgccagcttgccttgacacatarttccctgctccggaacaattttattgactttacagtggaggggtctttcatggtttctccagtgttttcgacttttgttacaggccagaggcaagatctaataaattgaaagaggcagaagtgttgtatttcaaatagatgtccttatgttttgcaaattgcaaaatgaaagagtgggttattttaaagagcttcacagccccttccctctcaccatggattttttttttaaacatttaagggcattacagagacaacatgataaatgtccaaaggtagggaggagaaaaaatacaaagaaaaagaaatctgaagaagatcttgaatataaagttaaagaaggaatatagagatgaagattcccttttattactcatccttgatatt

SEQ ID NO: 137786 - DNA, 477 bp, Homo sapiens
tgcctagctattttcttaaattatctatagagacagggtctccgtgtttcccaggctagtctcaaactcctgggctcaagcggtcctcccttctcagcctcccagagtgctgagattacaggtgtgagccatggcacctggccaagagatttccctaagtcaatatttctaacagatttcttctyagatcatgtgctatactaatgtacattgtaagtctgttaacatgggtggctttttttttatgtgtagccttttcattttcttaatggaccacctaatatcggtagaaattacaatttggaaaatgcttttctaaattttatttttagggtattcaattggtcaatatgctataatcatagttcttaattatccaatcttaattcatgtagataaatttatctactcagagatgatgaacactgtggataaaagatattagaacagctcacctttatatatatataaaattta

SEQ ID NO: 137787 - DNA, 477 bp, Homo sapiens
tgcctagctattttcttaaattatctatagagacagggtctccgtgtttcccaggctagtctcaaactcctgggctcaagcggtcctcccttctcagcctcccagagtgctgagattacaggtgtgagccatggcacctggccaagagatttccctaagtcaatatttctaacagatttcttctcagatcatgtgctatactaatgtacattgtaagtctgttaacatgggtggctttttttttatgtgtagccttttcattttcttaatggaccacctaatawcggtagaaattacaatttggaaaatgcttttctaaattttatttttagggtattcaattggtcaatatgctataatcatagttcttaattatccaatcttaattcatgtagataaatttatctactcagagatgatgaacactgtggataaaagatattagaacagctcacctttatatatatataaaattta

SEQ ID NO: 137788 - DNA, 477 bp, Homo sapiens
tgcctagctattttcttaaattatctatagagacagggtctccgtgtttcccaggctagtctcaaactcctgggctcaagcggtcctcccttctcagcctcccagagtgctgagattacaggtgtgagccatggcacctggccaagagatttccctaagtcaatatttctaacagatttcttctcagatcatgtgctatactaatgtacattgtaagtctgttaacatgggtggctttttttttatgtgtagccttttcattttcttaatggaccacctaatatckgtagaaattacaatttggaaaatgcttttctaaattttatttttagggtattcaattggtcaatatgctataatcatagttcttaattatccaatcttaattcatgtagataaatttatctactcagagatgatgaacactgtggataaaagatattagaacagctcacctttatatatatataaaattta

SEQ ID NO: 137789 - DNA, 477 bp, Homo sapiens
tgcctagctattttcttaaattatctatagagacagggtctccgtgtttcccaggctagtctcaaactcctgggctcaagcggtcctcccttctcagcctcccagagtgctgagattacaggtgtgagccatggcacctggccaagagatttccctaagtcaatatttctaacagatttcttctcagatcatgtgctatactaatgtacattgtaagtctgttaacatgggtggctttttttttatgtgtagccttttcattttcttaatggaccacctaatatcggtagaaattacaatttggaaaatgcttttctaaattttatttttagggtrttcaattggtcaatatgctataatcatagttcttaattatccaatcttaattcatgtagataaatttatctactcagagatgatgaacactgtggataaaagatattagaacagctcacctttatatatatataaaattta

SEQ ID NO: 137790 - DNA, 574 bp, Homo sapiens
acttttgtcactctgggtgtctcaagagcatccctagaagacgtattcggaaggggtagaaccagcaagcttttgtcacccattgtattttgggtttgtttataatcagaaaacaaaagacttaacagaattcttaaactaagcgcagacctttgtcacatatccagtgcccacgatagaagtcagatttatagaatcctgattgctgcctaattcatagacaaattcaaagttcagttatcagagaagtgagaaatgcttattgaggaagcagtcatagtgtctctcaactcttgtctctttgtcttgtatttctgggcagaaattgtgcaattcatgagaaacagagccctcaaatgtttacaagttctaattaaatttgacaaagttggtttgcttttcttttaacttaattagcatgagttccgtaaaatggagcaaaatacaaaataaattctaggaaaaacaaacacacatatttgtttacaaaaagtgaaactatccatacaaagaagcggtgtggaaaggctgccagttkaaacaatgtagctaatataatctaatcttgccccac

SEQ ID NO: 137791 - DNA, 626 bp, Homo sapiens
caaaacagttttcaaataatagaacaagattagaagatttttactacctgattttacaacttactcttaagctatagtaaacaagttaatgtagtattagcataagggtagacacaaagatctatagaacagaatagagactgtattagtctgttctcacactgctaataaagatatacgcaagactagatcatttaaaaaggagaaagatttaactgatttacagttccatatgtctcagaaggcctcgcaatcatggcagaaggcaagaaggagcaaagtcacatcttacatggtggcaggcaagagagaacatgtgcaggggaactcccatttataaaagcataagatcttgtgagacttgctcaccactacgtgaacagttttggggaaactgctcccatgattcaattatctccactcagccctgcccttgacaagtaaggattactataattcaaggtgagatttaggtagagacacagccaaaccayatcagagactatagaggtaaacatacacatagggtcaattgattttggaaaagtgtgccaaagtaattcaatagggatcagatagacttcaacactgttgctggagtaattgtatacctttatgcaaaaaaa

SEQ ID NO: 137792 - DNA, 385 bp, Homo sapiens
ggttttgatgaaaatgctcatgtgatatggacaatgaaaaaccaggctgaggtgggctcagatggagataggaacttattagaaactggagcaaaggttactcttgctatgctttagcaaagagactaatggcgattttctctgccctagagatctgtggagctttgaacttgagagagatggtttagtgtatctggcagaagaaattcmtaaacagcaaagcattcaagatgtgacctggcttttcctaaaagcatacagttatacgcattcacaaagagaagattcgaaattgaaacttaggtttaaaagggaaaaaacataacagtttggaaatttgcagcctggccatactgtattaaaaaaaggaacaaacatatttttt

SEQ ID NO: 137793 - DNA, 647 bp, Homo sapiens
attgcaactcctgcttttttctgtttttcatttgcttgataaatgttcctccatcgctttattttgagcctgtggtgtgtctttgcatgtgagctggaactcttgagcatagcacacctctgggtcttgtwttttatctagcttgccactctgtgtgttttaattggggtatttagcccattcacatttcaggttagtgttgttatatgtgaatttgatcctgtcatgatgctagctgtttattttacagaccggttgatgtggttgcttcatagtgtcactgatctgtgtactttggtgtgtttttgtagtggctggtaaaagttttttctttccatatttagtgcttccttcaagggctcttgtaatgcgggtatggtggtaatgaattccccctgcatttgctcatctaaaaagaatcttatttctccattgcttataatatggtttggttctgtgtcctcatccaaatctcatcttgaattgtaatccccatgtgttgaacaaaggacctgatgggaggtgattggatcgcgggggtggtttcctccatgctgttcttgtgatagtgagtgagttctcatgagatctgatggtttgaaattgtttggcattttcccctctcactctctctcttttctgtcacc

SEQ ID NO: 137794 - DNA, 601 bp, Homo sapiens
tgtgttatctactcgtcagactctctagcaagcaactttttcctctctgacaggacaatactgtttttatttttggttcagtattatcatgataagtaactctgtccaggatattcattcatttattcatatgtcaagtacttggtatttgcaagatactctctcaggacttactattacttactccttatgactctgtgcttcaagaagcacagggaagtgaaataccacttcccttatttcctcaaacacaggatcacacgagccagcatttgcttaacaaattgtatttgtttaaatttgtaaaaacaaaaataaattgttttatttcacaaatttgtactatttgtatttgcttaacaaatcccattcattaacttattaaaacttcacaaaaatcctatgtggggattttacagctataaaaactaaaactgagagaggttagccagccattgatcataaagctaagtgaacaggattcatactcaggaatcctgattctgcacttacttaccrctacactacagctacctccaaagagtccacacagacccaatgtataagcatggagtataccagacccacagctttcttctaa

SEQ ID NO: 137795 - DNA, 449 bp, Homo sapiens
gtgggaggcctaggggccgagtctccctggtcgggtgggaggcctaggggccgagtctgcctggtcgggtgggaggcctaggggccgaatctgcctggtctgctgggaggcctaggggccgaatctscctggtggggcgggaggcctaggggccgaatctgcctggtggggcgggaggcctaggggccgaatctgcctggtcgggcgggaggcctaggggcggagtctgcctggtcggctgggaggcctaggggctgtgcagagcagcaggcagtggaagccacgaaccaccccgctcgcccacactagtccctgacaagtcattagaattcacgtctgcgcaggccctgaggctgcacagttttatccaatttccataagagctgggcttttgaattttttcccacagctgaaattgctgctgccttgctggtgattctgcaaaaaaa

SEQ ID NO: 137796 - DNA, 449 bp, Homo sapiens
gtgggaggcctaggggccgagtctccctggtcgggtgggaggcctaggggccgagtctgcctggtcgggtgggaggcctaggggccgaatctgcctggtctgctgggaggcctaggggccgaatctgcctggtggggcgggaggcctaggggccgaatctgcctggtggggcgggaggcctaggggccgaatctgcctggtcgggcgggaggcctaggggcggagtctgcctggtcggctgggaggcctaggggctgtgcagagcagcaggcagtggaagccacgaaccaccccgctcgcccacactagtccctgacaagtcattagaattcacgtctgcrcaggccctgaggctgcacagttttatccaatttccataagagctgggcttttgaattttttcccacagctgaaattgctgctgccttgctggtgattctgcaaaaaaa

SEQ ID NO: 137797 - DNA, 404 bp, Homo sapiens
gtaagaagctttaccattactagacccatctgtaaaaacattctctgcatcttcatttggtttaaatttagttattttagggagaatccaattagytaatttcaaaaattgaaacagtttcattttaggaaaatatcaagaatacccacaaagtcagctaaatgggtttgccaagtaagactatttaaaaaatcttgctgtatttgtgccttcgtgagagggacaattttttcaggatcatatccatgtaatttaacaatccaagttctcccatttcctatcatagtagcaatttgatccaaataaggagttagagtccatgaattagtatgtggaagaaaaagccattctacaagatcttgctcttgaacaataacaccagtagctgaatgtggagttggaaa

SEQ ID NO: 137798 - DNA, 646 bp, Homo sapiens
ccaatttagttcatcatctctagtctgaatgaataccatattccccagcccatcaggagagggtaaggtttggttctacatttggagttgggttgtctgggtttgtgccaaggccttgctgcttcttactgtatattaaagggcttgtccttgtcccaaacccctggctgcaagtgcatggtctgctccctttctctgctggaatcctaatcttcctttgtggctcagtttgcctcccctcttccatgcagcctccctgacccagctagttcacattgctttcatgatcctctgaaacacattggtacctgtgtattaacagtaccatgtcctagttagaaaacttctatcagaccagattaattcatttagcaaatgtttaccaagctctttcctrgggactgggaaaatactgtggaacaggacatataagaaaacttatattctaattgtgtgtgtgtctgtgtgtgtgtctatgagagagagaggtagttaacaatcacataagtacataagcaatcaagaaggtatctagtgataagtgctatgatgaagatttaacggtgatggacttgaaagtatttgatggtctattttgggttagctgtgcagaaaaggattttccaaagagggaacatttaaactg

SEQ ID NO: 137799 - DNA, 646 bp, Homo sapiens
ccaatttagttcatcatctctagtctgaatgaataccatattccccagcccatcaggagagggtaaggtttggttctacatttggagttgggttgtctgggtttgtgccaaggccttgctgcttcttactgtatattaaagggcttgtccttgtcccaaacccctggctgcaagtgcatggtctgctccctttctctgctggaatcctaatcttcctttgtggctcagtttgcctcccctcttccatgcagcctccctgacccagctagttcacattgctttcatgatcctctgaaacacattggtacctgtgtattaacagtaccatgtcctagttagaaaacttctatcagaccagattaattcatttagcaaatgtttaccaagctctttcctagggactgggaaaatactgtggaacaggacatataagaaaacttatattctaattgtgtgtgtgtctrtgtgtgtgtctatgagagagagaggtagttaacaatcacataagtacataagcaatcaagaaggtatctagtgataagtgctatgatgaagatttaacggtgatggacttgaaagtatttgatggtctattttgggttagctgtgcagaaaaggattttccaaagagggaacatttaaactg

SEQ ID NO: 137800 - DNA, 646 bp, Homo sapiens
ccaatttagttcatcatctctagtctgaatgaataccatattccccagcccatcaggagagggtaaggtttggttctacatttggagttgggttgtctgggtttgtgccaaggccttgctgcttcttactgtatattaaagggcttgtccttgtcccaaacccctggctgcaagtgcatggtctgctccctttctctgctggaatcctaatcttcctttgtggctcagtttgcctcccctcttccatgcagcctccctgacccagctagttcacattgctttcatgatcctctgaaacacattggtacctgtgtattaacagtaccatgtcctagttagaaaacttctatcagaccagattaattcatttagcaaatgtttaccaagctctttcctagggactgggaaaatactgtggaacaggacatataagaaaacttatattctaattgtgtgtgtgtctgtgtgtgtgtctatgagagagagaggtagttaacaatcacataagtacataagcaatcaagaaggtatctagtgataaktgctatgatgaagatttaacggtgatggacttgaaagtatttgatggtctattttgggttagctgtgcagaaaaggattttccaaagagggaacatttaaactg

SEQ ID NO: 137801 - DNA, 603 bp, Homo sapiens
aagctttgcggctaaggacagtatctctatgtaaaaatccactccagggggtcactgactgcctctggggtcaggaaatggctctctgaagagcttgctgggctttgtggttggatgccagggctgaggattgcattaagttcttcgaataagcctgtagtttggcaaaaaggctttcctcctgggcagctgaataatttttagatgatctagctggcacatcgtggaaacacgctaatgagtcaggagtgatctgactccycccctcaccccacacccccgttgctcaagggtagagaatttccagggaagccagtgaaagatttatgagactaatcccggaaatatttcttccccatctattcttctcagcaggggtgccagcagccctgggtctggagtgtgaggggtagagagggcaaattagaaggggacaaaaacgctgacttctgccttcaagtgctagagaaatcggcgactatagaaaccacctaattagggttccactgtcaataaaatattcaggtctttttttggaatgtgcctgcctgcaggccccacagagcttcatggatgaatttgaggaggcttggagcattgtgg

SEQ ID NO: 137802 - DNA, 573 bp, Homo sapiens
tgttatgtaaagtctatcttatcagttatctcagtgtggcttgtggtttagtttcagatgtcaaamaaactgacagcaggtacccttcctagaggaaacaataattaccagacctaacttagaaaattctggaagccagaaaatacatagctttgttagtccgttttcatgctgctgataaagacatacccaagactgggcaatttacataagaaggagatttaattggacttacagttccacatggcaagggaagcctcataatcatggtggaaggcaaagaggaacaagtcaggtcttttgtggaaagcagcaggcaaagagcacttgtgcagggaaactctgccttacgaagccatcagatctcgtgagacttattccctatcatgagaacagcacgggaaagacctacaccccatgattcaattacctcccactgggtccctcccacaacatgtggaaattcaagatgagatttgggtagggacacagccaaaccatatcaatagccaagatcatagttaatacttatcgatatatatcccatttagtttaaagtgattagctacatag

SEQ ID NO: 137803 - DNA, 551 bp, Homo sapiens
atggaggatttagaggagagaatttcaagtaatacagcataatggagaggagatttgcccaggtaagaggaaataccattactaagggattgcagagcttggtagaatgtggtctaaaatctagaaagatcaatgatcacagataatgtatttcgaacttacattttgaaaatcaccctatattcaatgaaaaagctatccagagattttatgtcgacatctcttccttcatttaaaatttcacttttggatttctgaaaaagtcctcatgtaataatttctttttttcttttcatttcaattatctyctagagtgacaatcactttaagtctcacattgacaatgtctcagtttgtttgtaccgctctaacacaatacctgatactgggtaaatttagagagcacagatttcttttcttactgttcttgaggctgagaagtgcaagttcaagtcactggcaggtttggttgtcagatgaaagctgctttctgcttccaagatggtgccttatggctgcatcctctggaggggaaaaactctatgtcctta

SEQ ID NO: 137804 - DNA, 525 bp, Homo sapiens
cttcaaaagaaagctagaatatcccttcaacagcaaaaataatatctgttatttcacccttttatctccagcaccaaagaattacaacattatttgcagaacaaaacaattctatttcatagaggtaaccttggcatcagtgtaagtccaggcaaaaatggagacgggctttggaaaaygagagttttcactgatattggacaaatgtctagtgtgattgcctagcccataaaaggcattttataaacacttgttgaagaattgaatgacctatgtaagagaaagaggagagtcacagataatggatatttcacagccattatatggtggggtaaaatccaaaatattcctaagggttctcaaagggccagtgtagatggcagcaaagtcattgcatattgccacatggctttaaaagtgccaaagtgatccataccagaggttataaagtaaacaacaacagctatggcttcaggcaaaacaagggctatcaacaaagaagccaggaagctcttcaaggacagc

SEQ ID NO: 137805 - DNA, 525 bp, Homo sapiens
cttcaaaagaaagctagaatatcccttcaacagcaaaaataatatctgttatttcacccttttatctccagcaccaaagaattacaacattatttgcagaacaaaacaattctatttcatagaggtaaccttggcatcagtgtaagtccaggcaaaaatggagacgggctttggaaaatgagagttttcactgatattggacaaatgtctagtgtgattgcctagcccataaaaggcattttataaayacttgttgaagaattgaatgacctatgtaagagaaagaggagagtcacagataatggatatttcacagccattatatggtggggtaaaatccaaaatattcctaagggttctcaaagggccagtgtagatggcagcaaagtcattgcatattgccacatggctttaaaagtgccaaagtgatccataccagaggttataaagtaaacaacaacagctatggcttcaggcaaaacaagggctatcaacaaagaagccaggaagctcttcaaggacagc

SEQ ID NO: 137806 - DNA, 397 bp, Homo sapiens
gggaggggtactgtggattaaagaataaataattgatcaggctatttgaagacaaaccttgtcatatcccacaatcattatttcttttactatcacatgctgctttaaataaaatggacccattatttgaacaggttgtagagcaagagtttctactcccaccacttacaccacccagacataataaactagcttgctggaatacacgcatagactcgtttttgtgtatttcatttaaaaaattgtaaatttttaaaattacaatatacaaaaaaaattaaattgacacctgtagagtaaggaagtaaraattactagcacatttaatttgtgaaaaacaatcagctattttttttctgaagctgctcaggtgtacatgtagacatcaaaagactga

SEQ ID NO: 137807 - DNA, 587 bp, Homo sapiens
tccaggatataacaatgctttgaatcagtgatcagtatataatgctgttttttccatagcccacattcatgcatataagagtcaagagctgagggggtatagtagtgaatatcttactattacccctagcaatctctcaagaaattgtttgcttcctatcttgcaatgtkgactcttttgttttagaaacaatatttctcagtgagggaaggatttctccaaggtacataaaaatgttaatgaaaaactaaagtttccattaaactgatagttgaggctaccacctggccatatcgtgatgtttgtgacagttatctatcaggaaaagaaggaggttaacatagtggttgcagtgattcattctgaatctacagaggaacttgggttcctgctttacaatagaagtggagagaacatctggaattcaggaggtctgctagggcctctcttagaaatattttttcctaaaataaatgccaaaagaaaacattaacatctcagtataggcatgactactaattactcagatgctgtagaaatgaggatttgggtcactctactagcaaggaaccatgccaagctaacat

SEQ ID NO: 137808 - DNA, 587 bp, Homo sapiens
tccaggatataacaatgctttgaatcagtgatcagtatataatgctgttttttccatagcccacattcatgcatataagagtcaagagctgagggggtatagtagtgaatatcttactattacccctagcaatctctcaagaaattgtttgcttcctatcttgcaatgttgactcttttgttttagaaacaatatttctcagtgagggaaggatttctccaaggtacataaaaatgttaatgaaaaactaaagtttccattaaactgatagttgaggctaccacctggccatatcgtgatgtttgtgacagttatctatcaggaaaagaaggaggttaacatartggttgcagtgattcattctgaatctacagaggaacttgggttcctgctttacaatagaagtggagagaacatctggaattcaggaggtctgctagggcctctcttagaaatattttttcctaaaataaatgccaaaagaaaacattaacatctcagtataggcatgactactaattactcagatgctgtagaaatgaggatttgggtcactctactagcaaggaaccatgccaagctaacat

SEQ ID NO: 137809 - DNA, 447 bp, Homo sapiens
  misc_feature (1)...(447): n = A,T,C or G
nnnnnnnnnnnnnnnnnnnnnnnntttatgagatgatatcttgttctgtcaccaggctggaatgcagtggcacgatcctggctcactgcaaccttggcctcctgggttcaagtgattctcctgcctcagcctcccaagtagctgggactacaggcatgcaccaccacgcctggctaatttttgtatttttagtagagatggggtttcaccatgttggccaggctgaccttgatctcctgacctcgtaatcygcccgcctctgcctcccaaagtgctgggattacaggcatgagccaccgcgcctggcctccccaacatgttttaaataggttctgtgcctcgcaattcttttagttataatgcactcttatgcagcagcctgagtgatacgggcaggtgctggaaagcctatcgttaggtctgagtctgctagtgagctttttgctc

SEQ ID NO: 137810 - DNA, 591 bp, Homo sapiens
ttgtcaaaatccaacgggccatgaagcaaaatccccatcagggctactgtaggactataatggccatcgacagagctcccatgtttcagtattggatggtatcttagagctagcctagtccaactctctccttttcctgatgatgaaaccaaaaatcagaagtgttaaattctttgccaagattatacagttggtaagagacagaaccaaaactgctggagtttttttttttttttttttttttgagtcacttttgagtattctttcrttataaagatgccaatacatactatgtctgatatgcaaatggatatgtcaaaagtaaaacaatttcaggaaactctttaatgctggatatttaacattaggtaaaagagggaggagtgtgttgacttcaaagaatgtcacaaattactaggcaggataagcctatgggtgcacctaggaaaacaaattcttccctttgttcttcagggaattgactggcatcctccccaaggaacttgtgcactggactataaggagacctaacaaatattaaggaaaaaaaaaacatttctatttcaagctgcagctccaatatccaaacaa

SEQ ID NO: 137811 - DNA, 551 bp, Homo sapiens
gagggactttcctgtatcgttatacaatcacacaaagagtggacagggtttgacaatacaggaagagcacacctctctctctatttaattccctcatgtttctgactccgtgagtttgaaaaacacttcattttgtaggaacttcctaaataaaactctgtactttgcttgtgcaagaagaaacagaatgtaattctatttctatttctagagccagtgcaaacacgtatttgttgmatgttgttgaagagagtgtaaaatgatgcagatggttgtggtcaagtgtcttagtgtcttccctttccacctaggattttgctgctttttttcttgaccttgacttggccacctttgtgctgcttacagggaattttccagacaaagcctagtgattggctattcgtgaattagagacacaaaacgctttaaatttatcttgtctatttccagaaagatgcaatatagatggaggaaaatgtcatgtgtgaagacatttgcttcatctagatagtcaatttagtctttaaaatgtgcatacattaacaaataaa

SEQ ID NO: 137812 - DNA, 583 bp, Homo sapiens
ccctgtagacttgaatacctaagaaataaggctttgtcaagtagaattggtactcagcaagtgtagatacctcctgctagtgtagatggtttagttacagtgggaagtatgtgggcacaccaggttctaagactggcctgaggactctgataacactttgtaaatatcaccagctgtgtctaaattagcctcctgtagtgtgggaagctgagtcgtgaagcaactgtttgggcagtgataaccctataatttttaacagacatatcaatgttatgtcctagagaatgttaacatgtatataaagggtaaatgtatacccaagtctgctccacatgcagagrggcataaatgctgcccagagcctcttaagatgctgctatgattcatctatgaatgcaggttcacttactgagtgttacttttatgcatgtaggtaaaagtgtacatcccacttagtcttcatcctcccaggagcctgctgcagtaggtattattttctctgttttagagatgaagaatctgaggctcacaccatttaaatgacttgcttatgagatctaaaactctgtcacctcgctacaat

SEQ ID NO: 137813 - DNA, 597 bp, Homo sapiens
ctgggaagaaatacagctcagctttaaaagaaacttcatggttgggcaccatgactcattctggtaatcctaacacttggtgaggcagaggcgggtggactgcttgagcccaggagttccagaccagcctgggccacatggtgagaccccgtctctacaaaaagtacaaaaagtagctgggcatggtggtacacacctatagtcctagctactyaggaggctgaggtgtgaggatcccttgggctcaggaggttgaagctgcagtgagctgtgattgattccaccactgcactccagcttgagtgacagagagaatccccatctcaaataaaataaagaaacttcattatacttgggataaaaactgatgtgcgagaagaaatatttccaagaaatctggaatacattaaaactcaggaaagagaggccatgggatcagtcttctctgcaggctgggctggtccctactcagtgctccttttctgccctcacgtgcttgtgttttgttgtaatccaccgtaccactggctgccagagaagctgcagcattatttagcaatgttttacagaggagaggggctaaaatgcatgactgta

SEQ ID NO: 137814 - DNA, 597 bp, Homo sapiens
ctgggaagaaatacagctcagctttaaaagaaacttcatggttgggcaccatgactcattctggtaatcctaacacttggtgaggcagaggcgggtggactgcttgagcccaggagttccagaccagcctgggccacatggtgagaccccgtctctacaaaaagtacaaaaagtagctgggcatggtggtacacacctatagtcctagctacttaggaggctgaggtgtgaggatcccttgggctcaggaggttgaagctgcagtgagctgtgattgattccaccactgcactccagcttgagtgacagagagaatccccatctcaaataaaataaagaaacttcattayacttgggataaaaactgatgtgcgagaagaaatatttccaagaaatctggaatacattaaaactcaggaaagagaggccatgggatcagtcttctctgcaggctgggctggtccctactcagtgctccttttctgccctcacgtgcttgtgttttgttgtaatccaccgtaccactggctgccagagaagctgcagcattatttagcaatgttttacagaggagaggggctaaaatgcatgactgta

SEQ ID NO: 137815 - DNA, 594 bp, Homo sapiens
ttttgcactgtcacaaggactccagctccctgagaacctacatccattttggctgttctgttctgtttaccaacgggaaacatagctgttgctacttcttttctttaaatagacaggttaacaaaatcaagactggaactgttgggtagacacagtccttcatccaaatataattcttgcatttttactgcactgataaagaacaaatagaaaaactggtatcatgcaactttcaactattataattattataaagacaggaaaactcacttcttttttacagcttttcaaatttgagcagtatactataaaaactgtggtttctggaaactagcaaagcagttacaaatcttatgatagcattgaaatatttcttaatatggccaaaatttttatggaagtacattttggttctatttctaaaaaaaagaaaaagaaaaaaacattcggttaagaaagatcaatktattcagtggaaaaatacagatcattccttttgaagttggcagtgccttttatttgatgataccaaaccaacatctatactttacttcccagtctctctcttatcttaggtgtctcaaaggacctgaa

SEQ ID NO: 137816 - DNA, 543 bp, Homo sapiens
gtctctttttcaacttaagcctcaatttgtccttctatggtttcttttctttaagtctgcccttgatgttgggagaagatcaggaaaggatgaaatggaggattaaagagaagagactcctccattttagatccttacacaaaagattttagtgaggatttcacatatttagatgcttacagttgctttttgtcttttaaggtttactctctccttagatattctcagaggccagtggaatgataggctctttgcatttcttaattcacagatcttcataacagccctagaagtaattcctactacctgcgaytgacagggaaaacaatgactctcagagaagttggtaacttccaaggtcacaaagtgagtctcctgtgactggcttcaggaaccaaaacctttcaatcatatgactcaaaattagccactaggtcccttattcattcaactgtgcagtatttttatggccactttaaaggatctggatcattaataacgagttttattgtttcgtatttacattaacaaagaatgactgta

SEQ ID NO: 137817 - DNA, 543 bp, Homo sapiens
gtctctttttcaacttaagcctcaatttgtccttctatggtttcttttctttaagtctgcccttgatgttgggagaagatcaggaaaggatgaaatggaggattaaagagaagagactcctccattttagatccttacacaaaagattttagtgaggatttcacatatttagatgcttacagttgctttttgtcttttaaggtttactctctccttagatattctcagaggccagtggaatgataggctctttgcatttcttaattcacagatcttcataacagccctagaagtaattcctactacctgcgactgacagggaaaacaatgactctcagagaagttrgtaacttccaaggtcacaaagtgagtctcctgtgactggcttcaggaaccaaaacctttcaatcatatgactcaaaattagccactaggtcccttattcattcaactgtgcagtatttttatggccactttaaaggatctggatcattaataacgagttttattgtttcgtatttacattaacaaagaatgactgta

SEQ ID NO: 137818 - DNA, 522 bp, Homo sapiens
ggtcacttctggcatccttctaaacatcaatgttgtaaatctatcaaatgaagataatagaacttacttcacagtgattatgatgttcacagtgttgtgatgatcaaataatggttatcatcatttatcaaatatggataaygaaattcgcaggttattgcaaagattaaataatatattgcatgcaaaaattattttgtaaagagctaatgaaatgttaggtactgttattcttattagttgaaaaggagtggtttgttttgcagttcttgcctgcctgtttacccagttactaaaaggagcaaattggcagatggtagagttgtgggtcaggaaatattcaatggagtaataagcaataccctcaaatccactctcatatataactttggatcaaatcccatataatggggcatccaagtccagaatccgaaactcaagaacgcagggagcacagctctgccaggttctcattcaccactagcaggatacgcacagggatctgaagtcatgcttttcctg

SEQ ID NO: 137819 - DNA, 522 bp, Homo sapiens
ggtcacttctggcatccttctaaacatcaatgttgtaaatctatcaaatgaagataatagaacttacttcacagtgattatgatgttcacagtgttgtgatgatcaaataatggttatcatcatttatcaaatatggataatgaaattcgcaggttattgcaaagattaaataatatattgcatgcaaaaattattttgtaaagagctaatgaaatgttaggtactrttattcttattagttgaaaaggagtggtttgttttgcagttcttgcctgcctgtttacccagttactaaaaggagcaaattggcagatggtagagttgtgggtcaggaaatattcaatggagtaataagcaataccctcaaatccactctcatatataactttggatcaaatcccatataatggggcatccaagtccagaatccgaaactcaagaacgcagggagcacagctctgccaggttctcattcaccactagcaggatacgcacagggatctgaagtcatgcttttcctg

SEQ ID NO: 137820 - DNA, 634 bp, Homo sapiens
agatggtagagttgtgggtcaggaaatattcaatggagtaataagcaataccctcaaatccactctcatatataactttggatcaaatcccatataatggggcatccaagtccagaatccgaaactcaagaacgcagggagcacagctctgccaggttctcattcaccactagcaggatacgcacagggatctgaagtcatgcttttcctggagctcctgctatgaagcctagcctgacaaacggtggtggtgctattctgtaatttaaatagactccaaggacaagagttgctaaagtagctaaaccaaagtaattctccaggaggccttgttgtccgtgccctgatcttttggtattgtcaaatggttattgaaatcattgcttcaagcagagcaagagacagcgacagctaaaatcctgctgttcccagggagaccaagggagctttagagagttctggagttggggttttctaacataaccttgccctattttactttcctctgccaactatggaaacttaatggcaaccagttcattttgtcaaatgcaaaayaagaataaatttagttctttagtctatgattttagcaatcaatttcagtgtcagtgtccaaaaaacaaatatatga

SEQ ID NO: 137821 - DNA, 289 bp, Homo sapiens
ttaaggtaacgtttaaaatgatttgtggcaaagagcatcttttctagaaatgaaacacatcaacatctttgtctggttcagttttagaaagatcagttctccatttgccactgcctattacgagaatttagaatgacaatgaaattgatgctgctggatttcagactgctggttgcccaaccttttcaaaagctctcttcgtcctgaacattttaaacattcctgraaggtcatcagactcgttccagagattatttctacctttggtctttcttcccatgttacgttt

SEQ ID NO: 137822 - DNA, 490 bp, Homo sapiens
tgcaatatcttcttaagagctcggcgaaaatggttttcattttcttcttagattcttttaagaggtgccacattgtaaatgatcataatggcacaaaatgtgaattcatgtggaaaaaacaggcattaatgattctgaatacagaaaagctggattctgaagggaagaagtcttaactaatttacttcaaagtattttccttatgatgtatgaaaaagaatgataagataaaaatctatttaattaagaccaaaaacatctctgtaggtttaaaataaaatttgtatgtggtaagaaagcattgtgtcayggttacttatgggcattttttcttggttagtgatacataaaataatggtatatacaatcaatgctgtcttaggttcaattaaagatgatgtgactcctacatctactttatttcctagggcctttttttccaagtgatatgttccatccactgggagcaattttcagctggccagacacc

SEQ ID NO: 137823 - DNA, 384 bp, Homo sapiens
cctctggtgtaattttgtgagctgccagacacagacaagtatgtttatcacttgaatggcaagcttcagcgttagagttgctctatttatacaytgctttgcagacaatcctgatgcttttacataattggtgagctccactagcttagcaggcaagtaaataagatggtaaacaatactcttttttctgcacaggcttgtgatgaattctcaagccagctttgcttgcaattagtctggataacttacatattttacattacatgagatgacagttggttttattgcttttcccctaaaagtcgggccttgctgtgacagctacttcacaagcacaggggagcctgctgggcaatgggaagggcaaaggatggcaaattggtc

SEQ ID NO: 137824 - DNA, 563 bp, Homo sapiens
tcttcaggcattgccaaatgtcccctgggaccaaaactgtgtctggttgagaaccactattctatatgattccagaatcttaagtcttggcctttctccagagctgtagtcctataactccagctttctgttaagcattccacttctgtgtcctcatcaccatcaactcaatataactaaaaccattgtcttccaaactagcttggcccttctctctccctcccatcctttcctcctttcttccttctttccttcctctctccctccctcccctccttccttccctcctccctcccgttcttcctgttaaatgttccttcatacctaatccgtgatcagcattgatatatagttctacccctttatctctgacatccagtttctcattgctggggccaactgaaggttactgacctacttcaagcccytcttcacaaatggtaccttgactacggaactattcttctaactcatctcccttctccaggctatgtccagctcttctcctgtactgtaaaactgaattcatccccatgaactttattatccaatttctctgctgt

SEQ ID NO: 137825 - DNA, 378 bp, Homo sapiens
tctttaatactcttagagaattggaataggccaatgaagtttctgttactgaaaaaaaatgcaatggcataaacctattgcacactggaggtcacccttgctatttacaatttttctacaattttacaaaacaaaagtagaccctgcatgattttaatgcacactacagttttcatgatacttttggtataaatacatggatgttatatgtcttctgtgtatagttagtcgtattaagtgcaattaaggaacccattatgaaaatcttatggctgtctgatttttctgatgaaataagcaaatsacaagaagcttttcaaaacaaacttaggagccttcactttcattatatattatacataatggtttttgaaaatc

SEQ ID NO: 137826 - DNA, 578 bp, Homo sapiens
ttatgaggtatacatagcaatgaaatgctcagggcagggaagaatttagcaacatcccaaagatgcaacttgataaacattagaaattagaataaaatgaatgaaaatattcaaaattaacaacaaacaattctcaggaaaactgctcctaaaagcagttggcagtgaatctgcaaaggttaggctctcatcttccgaaacaaaaacacatacgcatattttttttctagccaatatcctttgtagtgaaaagtggaagattacaatcaagttttattgaaacacagtgtatccttaaaagaagttgctgccagcttggccattttcaactggagaaatactgaaatgatggacagagagatgagtgagatacagaggtagatgaacgtgcttgaggttttatgaggaaatgcaatacacaggaaacaaaaaaawacatagaaataaaagatgattatggaatgtggatccattgattgcttttgagagagaacacaataaaaaatggtgttcatgggcactgtattcgcttactagggctgccataacaaagtagtatgactgggtggattaaacaa

SEQ ID NO: 137827 - DNA, 378 bp, Homo sapiens
cagcaaaaaattgttcttacaacctatgagcatttctattcagtcagcacattgactgaaatatctcactgttgttgagaaataaaaataatactagtggacattatagataatgccagtgagcagagctgaaaatatcaaagcattattagctgttatgtttatactgtaaatggataaaaattattttttaatcaacaaacatttragtacctacactgtgcaggcacagaattactgtgatgtttgtggttaatgctgcactttgaagggatcttcttacaccagctactcgctatcaaataaaatacaacatagaagaatccagggccacgtaaagttattatgaacaccgcccaccaaagcacgattaggtat

SEQ ID NO: 137828 - DNA, 571 bp, Homo sapiens
gaatccagggccacgtaaagttattatgaacaccgcccaccaaagcacgattaggtatcatcatgcttattaagcaggcattgaagcaaatgttcagagggattaaataacataaccaagtgtccttctaatcattttttgtgtgtagatatatttccaactagaatgyatgacttttgagggtatgaagaatgaattacactaaaaagggaaaaaaacaataaaagacatcccattgacattcaatgtgtgtgttaattgaattatgacttgtaagttatatcttctgactgtctcatctgactcttggatcacagattcagtcttctccatgcaagaatgtatctggcctttgtctgttgcttcttttcctcctgtaaatcccctttaacatatcccatgtatattatcaactccatcccttttgacttgaatacatgactcatacttagcattgttttccctattttcctttaaaggcaatcaaaagtagagtttcacatttattaggtttgtcttcagaggtttcaagcactggataattccctcctcaggttcactccccattgta

SEQ ID NO: 137829 - DNA, 452 bp, Homo sapiens
tcatggtgtaagtttcagtccaggtctgagtccaaaggcaggaaaggaccaatgtcccagctcaaagacattcaggcaggaaaacagtaaattctttcttagcccttttgttccattcagtccctccatggactggatgaggcccacccatgctggggagcgcagtctgctctgttcactgcagcaattcaaatattaacttcatccagaaacaccctcacagacctacccacagtaatgtttaatctcattgcccagccaagttgtcatataaaattaaccatctcatgctgcatttctcatggcccctyggccacctcttttgtgggcttctagggagactgattctcgttttggctgcaaaaggaatcatgggtgacttaggattagtcctctgggtttgggagactctaagtagtattgaaacatctgtagaagaaattgaaacagga

SEQ ID NO: 137830 - DNA, 537 bp, Homo sapiens
gtgtttgaagggatacctggaattaattgggtaaatcctgagactagtgcctgacccacataagcattataggagggccataatcaccctcatagcaaagatgactctcatgatggccctcatgatggtgataatcggattatgtagaaacctttaagargaagaaaaattagaggtgcattaatgactgttctagcccagctaacacaaagtgataaagttgtttgtttgtttgttttatttttgagaccgagtctcactctgttgcccaggctggagtgcagtggtgcaatctctgctcactgcaaccttcgcctcctgggttcaagcaattctcctgcctcagcctcccgagtagctgggattacactaccgagtagctgggcgcccactaccacacccagctaatttttgcgttgttagtagagatgggctttcaccatgttggccaggctggtctcgaactcctgacctcatgtgacccccccacctctgcctcccaaagggctgggattacaggtatgagccaccgtgccc

SEQ ID NO: 137831 - DNA, 430 bp, Homo sapiens
gaagttaagtcattgcaattgtggcaaacactacaaagaaaagccaggatagtttgtaatagatgagaatggcaggacctgaataggagtggtcaagggggcctctctgagccctggaaggcaagagtgagcctctgtgcaataagcaggagtaaggatgagcaaagcctgaggaaagacagagtctagtgtgctcaaggaggcaggagcctccaagggtggctggagcagggaaggagggtggacagaggcaagtcaaggagtccagcggttatgtgggcagattgttaatccagaagattccattagatctaattttctcccgagtctgctcctgtccgttactaaaaaaacaacatggcacaggagcttaatgaggaacattgcccataytgatggcatttatactccctcctttagaagtggtttt

SEQ ID NO: 137832 - DNA, 388 bp, Homo sapiens
agccaatgcgtaagtttcaggttaaggagagggaactgaagttttacccttgaacgcctcaaatatattttagtttgaaaaacttaaaagagatgtccgtttgcacaaaggtaacataaggtcatttaacacataaacccccaactgtcactggcctaacacaacagaagcttatttctccttcacactctagtccaataccaggtgttttcattggcrcgccttccatgtgctcactcaggttcccagccccctccagcaaggactgtgccctttttcggttgctcagagaattctgcattcaatcctgggaggggatagggaaagattcaatcatgtggaaggctccctgcatgggcctggaagtgctgagtgtcactaggtcact

SEQ ID NO: 137833 - DNA, 443 bp, Homo sapiens
gctagcattaacaagctgttcaaccggtgccatgtggcgtaaggcctcagccgtacaaaaacactcttcccaggcagaacattccaaaactcagcatttgcttcccaagaactagccaacggtcagtcctgaaaatagtcatttctggggaatgtgcagggtttgagaaactcaggcctccttccttctcatctcccttctgtatttctcaaggcacctggtctcttctctactcctcacacagtcctcaaaacagaagtcattctcttttatctcaatacctcaaacagtccataygtaagatgtttgttagtaggaatgttttgggagcagcagcaatgttcaatatctaggacaatacacaaaacttcttaagaatgagcactaaaccttgttgcattcagagatcttttgccattaccataccaagtgacttccatggg

SEQ ID NO: 137834 - DNA, 266 bp, Homo sapiens
ccattctgccacatggaactatgggattttatttgctttatttgtctatttatataaagttatttgtttgttaagctacaatagcctrtgaatacaaacacaataacatctcttttgtgtttcaaactaaataagccctgtctcagtagcagaatatgtagtagtccttgtgagacctgtgatgtttcactaaattgtccaagaacatcaagggttatttggtccaaaatgttcgttcctcctatcatggccttggttctttcctc

SEQ ID NO: 137835 - DNA, 500 bp, Homo sapiens
aagcttgccttatggtagtgagcttccaggcactcttggagaagaggatattccaaaggtaatttcacctttctttcttcccctaccttcacaggccctgcctttgaatattattattattattatttttagtttcattaaaacatatattccaccactacatcagaatgcttattaacgttgccaggcaaagtaactgctgggtattaatctcttggaggcctggaccatatacttgtccagacttgtcttctcactacagctcactaaccaaaaccaataccaaggacayagtgtccttcaattcaattacagaaagttcctgggctgctaactctaaaaggatcaagtgctttaaatatttctgcaggcaataagcatggctcatgtaatgagctttttttgtatgtgtgtcatatttgtataatgtgcccctgtgtcttagaaaaaaagaactgaaacagggctgctgccttgtacaactccattggatgcattca

SEQ ID NO: 137836 - DNA, 540 bp, Homo sapiens
atagcatttatcataattaaacatcaaaaatacattaaaaacatgtgaatagggttgtatgtttttctgttgtaggctccaatatggcttaacatggaactatcagttcttgttttcatttaaaatgttattttgttctttatggatttttgcrttaatttagatttaaaaaaatattatattaaaatattatttatcttgacgactgagtttttgtgccccgccccttatattttctgcttgaggttagtgtttcgcttgccttaacctattcctggcctggtcccaaccctctatcccaacaaactataatacaaaaactgctacaggaatgaaaactatgctgactacgctagaggagacattcaaatccaactaatttctccacaatccaagtgagtccaggaagcaacatgtcaagtggggcagggaatgtgagctttagggctagacagatctggaattaaatcctgccttgcctccttatcagtctgagtaattacttacccagtctgagcctgttgtcttatttttaaaagg

SEQ ID NO: 137837 - DNA, 577 bp, Homo sapiens
tcggccttaaacatttgtgccataatggaaaatatctatctattttcaaatcctgtttttctcatagygtaaactcacatttgatgtgtttttatgaaggaaagtaaccaagaaacctctaggaattagtgaaaaaagaacttttttgaggcgtgttactatactgctgtaagttatttattatataaagtattgtaaatagaatagttttgaagatatgaaatatggctatttttaatggtgacagttatgacttttagtcactattaaattggggttacctataataatacaatttgtagttgtttccaggtttggctaataatcattccttaacctagaattcagatgatcctggaattaaggcaggtcagaggactataatgatagaattaaattagtgtcactaaaaactgtcccaaagtgctgcttcctaataggaattcattaacctaaaacaagatgttactattatatcgatatactatgaatgctatttctagaaaaagtctagtgccaaatttgtcttattaaataaaaacaacgtaggagcagcttttcttctagtttgatgtca

SEQ ID NO: 137838 - DNA, 462 bp, Homo sapiens
tgtctccccaaagctgcagcggaaggtgactacttcgtgtgcggtcctgtccacggtgccctgggccgggtagacagtcactgaggcgcgagcagaacggggagtggttccagcgcccaaagtggactggagccgggaagggctcaccagtcgcgtttcccaaagaaatcccgcaatttgctytaggagctgcccgcgcctttgacattcaggaacccgaagtccctagacccgccgagccgcgagcgggttcccacgcgcgaccacagcccccttccatcctgcaacgaattacgagagtcaggtccccgctccccaccgggcgaccccgcgtccctagcccagccgcagctggcacgcgtgggcacctgcgagtcacgcctcggtccgcctggccggagccagggagtgtctccaaagtggccgcgaggccgcggccgaaacccgggcgggggcgaattc

SEQ ID NO: 137839 - DNA, 556 bp, Homo sapiens
gcttccatcgccagaagtacctggcctctgccgagagggcggcgctcgccaagtccctcaaaatgacggacgcgcaggtcaagacctggttccaaaaccggaggaccaagtggcggtgagagaggcctgacccggcccaccttacacctgcccttcacctgtcccgccccgagccgcagcctcgcactagccctattttaaggctatccactacccccgcccccctctgcctcccccaaacacacccccaccccgccttcgcagattgtacctcttcctttcacccttctcgctggcctgtgcttctctctccatcgtggtctcccacgccttggtttctcctccatccccatccccatctttcgtgagcccctccamctctctccccgtgttttgtacggtctcctgcgttcacttgatttcctctcacccacccccgccccaaacacacacgcacacacacacacacacacgcgcacacacacgggcctctcgcactctccttctcctccttcttccagcccgccctctcggattttcaacaatcctcgtggac

SEQ ID NO: 137840 - DNA, 511 bp, Homo sapiens
caataaggcctacttgattgtggtatattaactttttgatataccgcttcattgaatgtgctagtatttttgttaagaatttttgtggaatacacaggaatattggcctgtcatctttttttttttttcattgggtctgccagatatttcaatraggctgattctggcttcatagaatgagttagggaggagtctttctcccttgatttttgggaatagtttcagtaggactggtaccagctcttaattgtagatctagaaaaattaactgttagtccaccttgtctggggtttttttcattggtatgttttttgttttttggttttttactgactcaagttcagaactcaatattagtctgttcagtttcaatttcttcttgatttaaatttgggagattgtgtgtttccaaaaatgtatccatattatctagattttctagtttgtgggcatagaggtgttcataatagtctctgaggatttttggtatttataaggtatcagttgtaa

SEQ ID NO: 137841 - DNA, 589 bp, Homo sapiens
tgctaacactacttttatcatttctactaccaagattatctcatagttctgacttaaggatatagttactgtattcattataaagtctacagtgatatgttttatgtggtttaggcatgttttgaagagcctcacagatttctagatctatgagcaatcctgagcattcctcaccgttggcatgcatgttaaggacaataaattgaatagcccacactactttctggttgctagcacctggtaactttaaactccctgcccatgccatctcattcattgcctttaacatattctttttggaagacaaatrtttactgagtgtgtactaaatactaggtgtgaattaaatggtgttgaacaaaaaaaaggtatttatagtcggaaaagagacaacaaacaagttaataaatacctcgttgataatggtaaacatgaagaataaaaacgaagtgttatcataaaagaggcagtttatggggaggggttatttgagtcataacaatcaataaagtcatcttagataagaagacagttgaacaaagagctaaataaagtgagacaacaattactcccataaagagaaggggag

SEQ ID NO: 137842 - DNA, 599 bp, Homo sapiens
atcctctaatttggtgcttttacggctttttgttgcaaatgatcagtatacgtattgctaatagttcctttgtagattacatattgcatatgtcaataaaatgtgtagaatacatattgtatatgtcgaaatttatatgtcatttagaaatgactatatctgattatacctatgtataaatttcagttaaacttttkcctcctggtcagagtagttctacataaaactcctcactttgcaaacttgtaaggccatttaaaatcaacattctgacatattattttaacactgctctgttttcatttttaagtgacattttaacatagcaacgacaaaaaaatactgcttaaataaaattatttaaagctctttattgtggtccatttcccattctttatcttaaaatacaatttagtgatgagtgttataaaattttatgcatttaaaaataattaatgtagagtaatttttaggatattaaatcaataaatactctgttttaaataaacaatattatcagttatattcaagaaataaaattcataaataaaaatgtattagaagaaaatcatgattcacaatgtatgtaattgccattt

SEQ ID NO: 137843 - DNA, 525 bp, Homo sapiens
tttccatctccctgggctacaattttaacctgcatttgtggggatttttaatcaaatgtttctctctgctcccttttgcatttcccagttctagcatttcagagaagagatttagcctcggtcaagatgctttaaaagtcagtatctgtaagtcttagacggacacaggatcttagctcagctttcatagaattcgtttctactcagttgttatgacagataagaaggaactggaagmcttgctaagaaactaggaccagtatagagctgctatgtaggtatttaaagcatctagatcatctgcgcatctgggttgcaaggaataggtcacagaactagtggcttccagggcagagaaaaaatacaaatataataagatcagaagctgcatgcacaccaggtggaaggagtcatttctcaacattgaggtaaaagtttagcatattacaaaatgagactgaaaccctcccaaaacactaatgctagcttggacttaggtgaagatgattatgtctactccaaatt

SEQ ID NO: 137844 - DNA, 525 bp, Homo sapiens
tttccatctccctgggctacaattttaacctgcatttgtggggatttttaatcaaatgtttctctctgctcccttttgcatttcccagttctagcatttcagagaagagatttagcctcggtcaagatgctttaaaagtcagtatctgtaagtcttagacggacacaggatcttagctcagctttcatagaattcgtttctactcagttgttatgacagataagaaggaactggaagccttgctaagaaactaggaccagtatagagctgctatgtaggtatttaaagcatctagatcatctgygcatctgggttgcaaggaataggtcacagaactagtggcttccagggcagagaaaaaatacaaatataataagatcagaagctgcatgcacaccaggtggaaggagtcatttctcaacattgaggtaaaagtttagcatattacaaaatgagactgaaaccctcccaaaacactaatgctagcttggacttaggtgaagatgattatgtctactccaaatt

SEQ ID NO: 137845 - DNA, 579 bp, Homo sapiens
tgccagggattaaaggcaagaataatgaatggggaggctggaaaggatgtggacctggctgaagcattattgcttgaagataattaaatgtagttgaaaaaaatggttttcgacacccacaggtcaactagaagcatactaaccactttcttggtcttattwtctggtaagagaaattatagattaaggaatatccttcactcatggatgcttcaaagaaattcatattatgctaagagagcaaaaggacagcaaaaaaaataataataattgacaatgctcagtgatgaaatgaaggaattgttttaatgcaaagagggccagacatcagagaagagtttgagacataagtcggttatggaagtttcatttcattatggggattacatgtggtgaaagaggaaagatgtatgacgctgcctgtataaaagagtcttatggccatttcatcaacatctgattacattagtcctagtcccagtagaaatttccatctctgtcaaacttgcaatgatgaagaaaactgactgattgagacaagtgagaattacagtaaaaacagtgttataattagagatt

SEQ ID NO: 137846 - DNA, 360 bp, Homo sapiens
agataagctgactaccaagttcagcaacctaattgtgaaagttttgcattttttagaatataatttagttgaaacagctttctttttataaggaatttaaagaaatattcacatttcatttctttggactgtcagtctgaacttgcaaatcaaaagaaattctgaaagtcgagtctgattgtctaaaaccaagtrttcaaaattatggaaatacacctccaaagaaatgaaggagaaatcataatgaagctgctttctcctttgaatatattcttctaaaatgttacaaaatagaatatataataacttaaaatattcttatttaagtttgaaaaattctgctacctcaagtaatcagaa

SEQ ID NO: 137847 - DNA, 510 bp, Homo sapiens
gagatcttcttgaaattcatttatatttttaatgcacgatggtttgagagtgtgcttgctatgattcaaattgttttgaatttgttgagactgtttatgaacaagaaagtggtcaatcttagaatacattctatgtggagatgagaagaatgtccattctgtggatgttgagaggagtgttctgtagatgtctactaggtctatttgctcagatgtcaaatctaagtccagaatttctttgtcagttttctgcctcaatgatgtacctggcactgccagtgggttgttgaagtctcccagtcacagatatttgtgatatctaagtctttttatagtccaagaatacttgttttatgaatcttgatgttccagtgttgggtgcatagaaatttaggtatttaggctagttaaataaaagtgttcttgttggattttaccctttacattatgtaacgtttctttttttgtccatctttaawttttattcttctaaaatatgtttcatattat

SEQ ID NO: 137848 - DNA, 561 bp, Homo sapiens
cccatcatgacaatctgtctacacawgggcttcactttcacagtgtttctcattgctccttaccacctgcctgaatgttggtgaacgtcttaaagtctctgagacttcatttcattgtctgcaaaatgggagtcattgtatctacctcatagctatgtcatgatgactgtggcagactgcactaccgttcacaggtacccctccccacaggaagattgcctccaacctgtcggctcagatgagcttgtgtgacttcttatagccaataaaacatgagcagaagagaaaagaatcacttctgggcagaagctttcagagccagagagtagttcaccatgcccttttctccttccctctgttccttcagcccagatctcagattacagctgcagctaaccattggtggatatgtatcatgagtgagaaatccttacatttgagagctctgggaatgaacacactttaggtaatgttaagttattattttctttgatttacgataaaataaatacaaatagtagcagctttgatcattgatttaacaaatattattaggcacat

SEQ ID NO: 137849 - DNA, 410 bp, Homo sapiens
gaattccaaaatgtgcccccctggccagggctgtgtgtggcctgggaagggaaccctggctggatgtcagtcctgctcacctctcctggggtgcttcctacaaggcacacaggacttcagctgtgtctgmgcaccatgccatgcagctgccgggtcttatggcctcggaatacaccatcaagcatcaagtcactggatcatggcgatgagtgttttagcatcaaatttctccctgaaggggttggatgaagtcgctttctcagtagcaatatatgagagtgtaaaccaaaaataaaattctaagccccccaccacccaaccatctgaatagacctctcctgtcagccagggcactccaaagttaacctgaaaaatgggttcagtccctgatgggaagtgggggtcggaca

SEQ ID NO: 137850 - DNA, 551 bp, Homo sapiens
tacccaggctttctggtcttaggatttctgctgaaataaatatcccaagacaatatgataaaggtggaatgagatatcaaggtcttgggagtccttttctgccaaatctctgctgcatgaccccgagcgataggcttaacctctgaacctcagttttctcatcctgaaaatgggaatcacatcatctggctcgcaggagatctgcagagtctctgcaccatgcctggtccatagctggtgttctggattaacaacaatgcttatctggtgatgatgagaatagcaagagtaataggaagaaaaccggcagcatttgttaaacttcaatcaaagacgacttcagagacctaagctgtccactacagtggttgccggccacatgtggcacttgagsacttgaaatgtgcctggcccaagttgaagtgtgctatgaagataaaatacacctcggattttaatgaccgagtatggaaaatgcatgtcaaagaccttattcgtaattggtatattgacatactaggcagggctctccagagggacagaaccaatag

SEQ ID NO: 137851 - DNA, 551 bp, Homo sapiens
tacccaggctttctggtcttaggatttctgctgaaataaatatcccaagacaatatgataaaggtggaatgagatatcaaggtcttgggagtccttttctgccaaatctctgctgcatgaccccgagcgataggcttaacctctgaacctcagttttctcatcctgaaaatgggaatcacatcatctggctcgcaggagatctgcagagtctctgcaccatgcctggtccatagctggtgttctggattaacaacaatgcttatctggtgatgatgagaatagcaagagtaataggaagaaaaccggcagcatttgttaaacttcaatcaaagacgacttcagagacctaagctgtccactacagtggttgccggccacatgtggcacttgaggacttgaaatgtgcctggcccaagttgaagtgtgctatgaagataaaatacacctcggattttaatgaccgagtatggaaaaygcatgtcaaagaccttattcgtaattggtatattgacatactaggcagggctctccagagggacagaaccaatag

SEQ ID NO: 137852 - DNA, 564 bp, Homo sapiens
atttcccaaatgattagtgatgctgagcatttttttcacgaacttgtttgccatttgtctgtcttctttagagagatagctgttcacgtcttttgcccatttgtcttctttagagagatggctgttcacgtcttttgcccatttgtcytctttagagagatggctgttcacgtcttttgcccatagttattagattgatgcaaaagtaattgtgattttgccattaaaagcaatatttgtcattatgcagtattattaattataggcacaatgccacacagcagatctctagaacctatcttgcgtaactgaaactttatacccatggtacaatatctccccatttccctgtcctcctaacccccagcaactatccttctactctctgcttctatgagtgtggttattttaagtacttcatatgtaagtggaatcatgcagtatttctccttctgcgtggtatatatttaaatgcaatattcagccttacaaaagaaggaaatcctgccccacacaacaacacaaatgaacctggaggacagtatgctgggtgaaataagccag

SEQ ID NO: 137853 - DNA, 537 bp, Homo sapiens
aactacttttgctgcatctcataggttttgatatgttctgttttcattgtcgtttgtctcaagatactctttatttcctttttgatttcttctttgactcattggttgttcacgagcatatggtttaagttccacttatttttttaatgttccaagattcttcctgttattgatttctagtttcatattgttgtagtcagaagcattactagatatgatttcagtcctcttgaatttgctgagacttgttttgtggtctaataaatggtctatcctggagagtgtttcatgtgcacaagagaataatgtatattctactgctcttggattgaaagttttatatatgtctgctaggtcatttggtataaagtgcagttcaaatccaatatttcttcatyaattttccatctggttggtctatccattgttgaaagtggggttattggtgtcccctattattattgcattgctatctatttcttccttcatatttggtaatgttcaatttatatatttaggtgctcagatactgggtac

SEQ ID NO: 137854 - DNA, 558 bp, Homo sapiens
ttcccctgttttaattttcaaagtctaaattctcagagttgggatcatggagatcaactacgccagcccttatctgattcatagaaaccatctctcctgataagccaacacctcccatgggaatcagttaagcaacgtggtctaagccccatagattcccaagggggtgatatcttggatgactggccaagattttaaattgagaaatgtagatttcacatcccagctctctaggcacttaaatgagcaatcacatgaaatcccggaactcccttgacactaaataaggayccttaacatttagatagcacttgagagtttgcagaagatgtttacatcaatgttctcatctgattctcactgtagacacaggaaggatatttcctgctttgcagattagaatactaataggactcagagaatttatgggatttgtccaaagtcacaaactaataaagtcttctaactccagcctacttctgcagatgtacaaaaacacttactgaagtaactgtattagttcgttttcatgctgctgataaagacatacccaagact

SEQ ID NO: 137855 - DNA, 425 bp, Homo sapiens
atcagcagcattggcttcaccttggagcttattagagactcagaagctcaagcctctacccagacctattgaattagaatttgcattttaaccagatccccacataattagcatacatggtgaagtctgaaagcactgctctgcatggacttgagcccaagttttcaggacaaacacacactaggcacaaaggcgattatcaarctactcaggtaatgcaaactggaattagctgccacttatacttgagccaggtgactggaggagaggaagcctgagaacatgtcatcagtttagaacatcatctggcagtaacccagtgaatgccaaattgtctctttctctgtattgatataattaccaacatgaggaaaagcaggttctttcttcagataaagtaaccttgttatgtatcagcctgtgct

SEQ ID NO: 137856 - DNA, 604 bp, Homo sapiens
atatattttagaactacacattataagcctcaaattaattgctgatattgtcagttatattttaaggaagttaagatatattttaatttgatgttgtcagttatattttaaggaagttatattttaaggaagttaagaaattagaaaaaaaggtagtttatattgactttctatgacatggaactacagaaatttgaccacctggctggtcaaactagtctaaatgtgttcccgtacatgactatcattccacatacgtgcctctctgataacctctacagtgacatttagctcattcctttagtcaaagtgcaactcctttaaagatcagaatctcttatggcaaaggccatcatataacttattatctaaactgggacacgttgacagttttaataattatgtaagcacaagagtcatgcaatatgacatatggtcaccctacttatrtcgtgctggtaaggaaatagtcataagatggttccctgcttggagctctggaggaaggaaaggaaaggaaagcaattctaatacttctttaaactacttgtactcagcatgttataggaaagtctgttactgttttttctttaaagaaacagag

SEQ ID NO: 137857 - DNA, 581 bp, Homo sapiens
gaaattttatatatttagggtatattaatttctcataccctttttggcagtaaactttgatagaaaaataatatacatgctgcagtaaggacagaggaaaatgtgataaaatcttattgaacaaagaggcagaacacacacagtacaaacttcagctgcatcataattttacaaagggccaaaactaaaaataattaaaattaaaaatttaatgctttttaaaatattcactattgaaaatattagtacatgcttattgtaacaattaagacaaaaataaaaaataattcttactttcatctccaactatatttctrtcaccatcaagatacattattttaacagtttaatgtacatccttcccctgagacacatttaaattaaaagtatacttttaattatatattcattcaatactaaatgaattaaaacttaacactgaattcctttttaccatttactcaggctaaggctgttttttttttttaaaaaaaaatcctagctttctataaagtatttgaagatgattattttattaaaaagaaagaaaaaagggattcaaatgcaaatgatctttcatt

SEQ ID NO: 137858 - DNA, 604 bp, Homo sapiens
tgcagctgagaagatcccaagtatggagaggtcagtgaggaatgacttcaaagtctaaccaagaactaacaagtagctgaagcatcattgcagtgagaatggagaaaaaggggcagatcgaaaaactaataataatcacaataagagctaacatctattggtgtctactatgtaccctgcactgttctgagcctaagtcattagcttatttaatcttcacgacattcctataaagtaagttttatcatttcagttttacagttgcaaaatctgagaaactgattaaaaatcacctgaggtcacccatttagtggctcatctctgggtctagagtcttattgcttaatcattctataatactgctctcctgcagaaataagattgacataacttggccactggttaataatcctctcagggagtcactggttgtataygtaataaaaaataataagttgataaataaaatatgtaacaagtaaaataaatatgcccagcttacctacagcatttgctcaactctttagaaatgcgttaccaaatgaacaagtccaccaatcaaatagccattcctctcagccccacctgccattgattgtgctgt

SEQ ID NO: 137859 - DNA, 577 bp, Homo sapiens
cagggctctgttaactttcaacaaaagatttataaagcttaccagttgtgatgggtaggacttctcctgctagtcaatcaagtaacttgttagctcatcatgctcgtagtgaagccacccagaaggatggaaatggaggagagtgattgaatttacacagctgttctgttaccttccctggaccactgaaatttgcttcatttgattacatccctattcaatataaaagcaaatctcatgcatttgaaatgcacagtacttaaaatataacatgtaamcttttgaccaaatattaattgaaatcctttgtgttgtattatggtttcatgcgaactctcagaaaattgtattcatggccattttgatagacaaatttaagaaagttcttaaaaggagccttgtttttttaaaaaaaaaccactacagtaaacccatgttcatatttcagatagccctttggtccttgtgcctggctacccactgaaatatcagagagaaaaaaaaatatgcagggcacagttctaaccagataaaagtgaagaacaaaagaaatttctggtagaaatatggatggaca

SEQ ID NO: 137860 - DNA, 501 bp, Homo sapiens
tctttgcccttggtcactggttggccttctggtcatcgtctctcagagatgccattctgacttcaagaagggtgacttccatattatcaagcacagcttcctgacttcccatggtccagaatctgattttggctttwtctcacatgcactgatttacagacttgattagtcaacttaaacctccagctaaacagaaactgccagcagcatacaaagagcagctatcttccctggcccctgctttattctgatggaggtttcagaagtatgggggttcaataaggcctggattaaaaccactggagagcactgagaatattacagtgtccctagatcatgtgggattcaaaattaaaacagttttaaagaataagtataaagtaatccaactaaattatcgtttttatcatgatgatgattttggtgttttctcaaacacaattttaattcaaatactttctcaaaatgctgtcattttttttgacatctttgtttgctggt

SEQ ID NO: 137861 - DNA, 238 bp, Homo sapiens
aaggaccacctcaggtccagagtttactgaggactttcataaagctttttttgagaatatatgtgtattactcaagattctctagaggaacagaccaatgggctctaacttatctatctatctatctattatctattatctatctatcatctatatatgtacatatatamgtatatctatctatactgagaattataaggaattggcttacatgattgtgatggctgagcagtaccaa

SEQ ID NO: 137862 - DNA, 238 bp, Homo sapiens
aaggaccacctcaggtccagagtttactgaggactttcataaagctttttttgagaatatatgtgtattactcaagattctctagaggaacagaccaatgggctctaacttatctatctatctatctattatctattatctatctatcatctatatatgtacatatatacstatatctatctatactgagaattataaggaattggcttacatgattgtgatggctgagcagtaccaa

SEQ ID NO: 137863 - DNA, 490 bp, Homo sapiens
aggctgtagtgcaattaaatagtgttttctgatgcacaggagcagaaaggatgtcaaatgctgtgtttcacttctgaagaatctgcayggagccctaggatctctttgccatgataaataagacttccacgttttgcacatagatttttgacaaagattgaaaaatcataaatagtgctgacatcattatatatataaatatataatataatatatatgtaaatattggcaaaccccaaggaaaataatacataattcatataccccttttgggcctcaaaaaatattttaaaaattaaaaaaattttagctgttccttacactgactttctttcatagtaacaaccaccactcatgttaggcccactgaataaaattccatatgtaaaacattaggcatattataaaggaaataaacatcttagtaagaaaactatatattgcaagtttcaatgactggatcagatctgtaaaacagcttttaccatag

SEQ ID NO: 137864 - DNA, 382 bp, Homo sapiens
agatttaccactatgcaacatatccaagtaacaaaattacacttgtacaccttaaatttataaagattaaaaaaaaaagaccagagtgataatagtcattgacatagaataaaaatatggtgtgacaaaatattttgttttgttttctcagagtgactgtactaaaacgtacaaagaggaaaaaaatgccatttgcatacagaaaaaagtgacattttctattaartgtaaaattttaaagtttgtcataatactccttaagtaaaagtattaaccctctaaaagattgattgctgtccattcttctttgtaccttcacatgcttatttcatcattcatttctcagtaatgttctattcaaagaagaataaatagtaatcaa

SEQ ID NO: 137865 - DNA, 382 bp, Homo sapiens
agatttaccactatgcaacatatccaagtaacaaaattacacttgtacaccttaaatttataaagattaaaaaaaaaagaccagagtgataatagtcattgacatagaataaaaatatggtgtgacaaaatattttgttttgttttctcagagtgactgtactaaaacgtacaaagaggaaaaaaatgccatttgcatacagaaaaaagtgacattttctattaaatgtaaaattttaaagtttgtcataatactccttaagtaaaagtattaaccytctaaaagattgattgctgtccattcttctttgtaccttcacatgcttatttcatcattcatttctcagtaatgttctattcaaagaagaataaatagtaatcaa

SEQ ID NO: 137866 - DNA, 397 bp, Homo sapiens
catatttaatgtaaatagggttgatatataatggacagcaactatatcaagcatgggacacaaaagttgaacaatttgcttcaacatagtctttaatggaccctctcagaaaaaaaaaaaaagtggagcttatagttcaaaagccaaaagagatgaaaattcagattagtgtaaagaaagcaaatcctggtatgttgaaagagactactgaggttaagggtgttggtgcattagcaagaaagattttttttgttttagtcacttcagctatgttttgaagattcataattttttgrcatgaaaagaatgtcatgagagtggggacatgaaggtaaagatatttcatatggtcaagcgtgacaaaaatggaaatgaactggaggtggttatgactggc

SEQ ID NO: 137867 - DNA, 479 bp, Homo sapiens
gtggaacatttgttaaaattaagaacaaatggtcataaattattaagtctttgttcagattttctttctaataccctttcttttctaaaatcccatccaggataccacattccacttacttgacatgtctctgtaggccactgttagcagccagtctctcagacttctcttgttttagatgacattgaccgttttgagggatattaaccaggtattctgtaggatttccccaatatatttttttttsatgattaagagtatatgctagcaacatggtttatgatcatgtcagtgttggccataagcccatgtttgaggtagtgttggtcagggttttccgttgtaaggttgccttactctttcaggaatgaggaaatatgccctccactccttgagggtagagtatctacataaattatttggaactctaccaacttccacaatgttccatttttttttcacatggaacagcacaggat

SEQ ID NO: 137868 - DNA, 594 bp, Homo sapiens
gcctcatttcaagttccttctcccattctgcttccatggataaggccttgtcaccaaatttkttgttgttgttgttgttgagacggagtctcgtcctgttgcccaggctggagtgcaatgacatgatctcagctcactgcaacctccgcctcccaggttcaagcaattctcctgcctcagcctcccaagtagcgggcattacaggcacctgccaccatgctcagctaatttttgtacttttagtagtgatggggtttcaccatattggccaggctggtctcgaactcctgacctcaggtgatctgcccacctcccaaagtgctgggattacacgtgtgagccactgcgcctggccactaaataacatttctttcaaggagataaggcatattccttagatacttaccttagtaaacccagaatagtgggttttgcttccctcctagcctgcagaattattcagccaagtcatatcttcctgtggaaactagagggcacccacctttgtgatactaaaaagccagcctcctatggcccatactttttcactctcttcctgaatttaacctctgcgtgcccccacatgaaatgtgg

SEQ ID NO: 137869 - DNA, 594 bp, Homo sapiens
gcctcatttcaagttccttctcccattctgcttccatggataaggccttgtcaccaaattttttgttgttgttgttgttgagacggagtctcgtcctgtygcccaggctggagtgcaatgacatgatctcagctcactgcaacctccgcctcccaggttcaagcaattctcctgcctcagcctcccaagtagcgggcattacaggcacctgccaccatgctcagctaatttttgtacttttagtagtgatggggtttcaccatattggccaggctggtctcgaactcctgacctcaggtgatctgcccacctcccaaagtgctgggattacacgtgtgagccactgcgcctggccactaaataacatttctttcaaggagataaggcatattccttagatacttaccttagtaaacccagaatagtgggttttgcttccctcctagcctgcagaattattcagccaagtcatatcttcctgtggaaactagagggcacccacctttgtgatactaaaaagccagcctcctatggcccatactttttcactctcttcctgaatttaacctctgcgtgcccccacatgaaatgtgg

SEQ ID NO: 137870 - DNA, 616 bp, Homo sapiens
tttttcataaaaacacaatgtaaaaaagaaactagctaaccataaaagaagcagataacaaatctaagaacagaccacatataattctcctattaatttcatttgtaagaagcctgaaaaaagaagaatttcaatattgtgtgtttttaaaatttctattttaaattaagcaattatgaattcagaaactataaacatatgcgctgacaactacaaatatcaactatttagttttcctttaaataatatgttgttatgttataaatgtcatggaaccaggaattgaaacagttcactgtacattcctggaaataaacttcaaagcacatctggtttacatttaactagttatgtcactggaaacacaatctaaaccacagtgcttgctgtaaaaattttaactttcacagactctcakagctcaaacaaaaaaagtaaaataaagtttctgtaacttcaatctgaaatatagaagaactttactctctttattattagtgctatttgttatatatttaaaatactctgaaaacatgattgacaaacaaaattagtgcacaagacaaatatacaagaaaaagctaagatttgcaatgaatctgctaataattccctg

SEQ ID NO: 137871 - DNA, 426 bp, Homo sapiens
tgactccatgtggagcaaagagtgtctgtttacctaataygtgacaagtatatatttcagcccatgtggggaaacaggcccatgtgcaagtgggtgtgcacagaggacatagtacctagtggggaagcgagggatctgcagcagctcagtgagatttggaagatgcacatgggctctcagtgaagaggcctcccagacaggaattaaacttcattaagtacaggacagaagttactgaaagggtagatattattaggaacatttttgtatcatgattctgatagtctcagaattaaaggagaccactaaatgtaggtgtcttaatcactgaatataaaagatgctgattatctaatatgtgaaaattcttagcctttatggcaggggaagaacgtagatacgataaataaattctcagtaacttgg

SEQ ID NO: 137872 - DNA, 305 bp, Homo sapiens
tgaagaggcctcccagacaggaattaaacttcattaagtacaggacagaagttactgaaagggtagatattattaggaacatttttgtatcatgattckgatagtctcagaattaaaggagaccactaaatgtaggtgtcttaatcactgaatataaaagatgctgattatctaatatgtgaaaattcttagcctttatggcaggggaagaacgtagatacgataaataaattctcagtaacttggctacataagatgtaactataactgctattttatttctatatacaagagactggaattct

SEQ ID NO: 137873 - DNA, 616 bp, Homo sapiens
tttttcataaaaacacaatgtaaaaaagaaactagctaaccataaaagaagcagataacaaatctaagracagaccacatataattctcctattaatttcatttgtaagaagcctgaaaaaagaagaatttcaatattgtgtgtttttaaaatttctattttaaattaagcaattatgaattcagaaactataaacatatgcgctgacaactacaaatatcaactatttagttttcctttaaataatatgttgttatgttataaatgtcatggaaccaggaattgaaacagttcactgtacattcctggaaataaacttcaaagcacatctggtttacatttaactagttatgtcactggaaacacaatctaaaccacagtgcttgctgtaaaaattttaactttcacagactctcagagctcaaacaaaaaaagtaaaataaagtttctgtaacttcaatctgaaatatagaagaactttactctctttattattagtgctatttgttatatatttaaaatactctgaaaacatgattgacaaacaaaattagtgcacaagacaaatatacaagaaaaagctaagatttgcaatgaatctgctaataattccctg

SEQ ID NO: 137874 - DNA, 432 bp, Homo sapiens
gacagaattggaaataacacagggtacctatgagataaactgagtatagagttcaaatgccaaagccttattttcttgtctacatttctacacatctgctctcctgactgctgttgacatttgcataatttttgagtgtctttcaaggaattttaaggttggataattaatcaaatcagtaagamtcactcagaatgggacaaatcaaagtttcattgcttttttgaaaactgtttatctgcatgtgaagtggtacctaagaggcaaatggggcagagctgctaacagactgtagacagactcatttccaagaccacgtgattatttcaatgttgactgaggtctgcaaaagctgtgcagaagtatttgcttcttttttattttcaagctctaacagaccattaagttgcactaaattttggaatcattaat

SEQ ID NO: 137875 - DNA, 552 bp, Homo sapiens
tggttctgttaattgtgtatattatgtttattaatttacatacattaagccattcttgcatccctagtatgaatccagttaatcatagtgagtgatctttttaatgggttgttaaatttagtttgctggtgtttggatgtaatctcatttgtctaytttgttgaatgtgcttttgggaccatgtccagaaaatcactgcccaaaccaatgtcaaatagctattcccctaagttttcttctaatacttttacagtttcatgttttatagtaactatttaatccattttgagttgctttttgtttatgatgtgggatcagaatccaattttattcttctaaatgtggatatctagtttgtctagcaccatttattgaagagaccagttgtttcccattttgcattcttggcaacttcgcctaagatcaattttgcataaatgtgtagatttatttctgaactgtctactgtgttccattggtctaccgtcttttttatgctggtatcatactgatttgattaccatagcttcatagtatattttaatattgggt

SEQ ID NO: 137876 - DNA, 572 bp, Homo sapiens
ttttttgggtatagaattaaaaaaaggggaattctagaaaaccaaaaagtacttgagagcattatagagagagaataacttaaaaaacaaccccatgaaattatttaccagttcctaggctcaactcaaattgcagatgcatagtgcttttctaaaacagcatgccaaaaaccctaagaattagaataaaggatatactctactgcctaggttttagactggatgtcacctacagagctacagatcataatggtgcagcaaagtctttgaaaatggaatagtggacctacaggaggctaaatataacttatagcttggacccartgattgtcacctgaaacagaaaatgtcaacatttttcataaaatttaaacaagacataaagtctcataacataatactcaggtgtccacaaatataattcaaaattcatcatagaaagaactaggaagatctcaaattacccatgaaaaggcattcaatacatttcaatgccaagatggcagagattttggaaatatatgttaaaaagttgaagctattataaatgtgccaagaagtaatggcaaaca

SEQ ID NO: 137877 - DNA, 430 bp, Homo sapiens
catcatcatcgcagccttttgccatcatttgccagtaggagagctctcttctttatttgctgtaaattyctttcagggtcatgccagctagccatttcaagccaagtgtttgcattttctgatctcactcaaagatcatgtgagcaagaagtcagggaaagctctgtatctaaaacaagtctcaattcttcagtttctcactccatgggatccttggattcggaagtcctcagcaatggctcagagatggaaaaggaaaaggggcatagtctatggactagaaagtactgggatgtttcacatgaagtttgtaattttaaggatattggggtggtatggatggtcaggagaaggtggggctggggaaggaaagtgagtgtacaaacaggagggtgaggcagttgtaagtttcatacttttttattgcctt

SEQ ID NO: 137878 - DNA, 456 bp, Homo sapiens
gccttttgccatcatttgccagtaggagagctctcttctttatttgctgtaaatttctttcagggtcatgccagctagccatttcaagccaagtgtttgcattttctgatctcactcaaagatcatgtgagcaagaagtcagggaaagctctgtatctaaaacaagtctcaattcttcagtttctcactccatgggatccttggattcggaagtcctcagcaatggctcagagatggaaaaggaaaaggsgcatagtctatggactagaaagtactgggatgtttcacatgaagtttgtaattttaaggatattggggtggtatggatggtcaggagaaggtggggctggggaaggaaagtgagtgtacaaacaggagggtgaggcagttgtaagtttcatacttttttattgcctttatctaaagagtccttttggaggcaattctagagttcga

SEQ ID NO: 137879 - DNA, 456 bp, Homo sapiens
gccttttgccatcatttgccagtaggagagctctcttctttatttgctgtaaatttctttcagggtcatgccagctagccatttcaagccaagtgtttgcattttctgatctcactcaaagatcatgtgagcaagaagtcagggaaagctctgtatctaaaacaagtctcaattcttcagtttctcactccatgggatccttggattcggaagtcctcagcaatggctcagagatggaaaaggaaaaggggcatagtctatggactagraagtactgggatgtttcacatgaagtttgtaattttaaggatattggggtggtatggatggtcaggagaaggtggggctggggaaggaaagtgagtgtacaaacaggagggtgaggcagttgtaagtttcatacttttttattgcctttatctaaagagtccttttggaggcaattctagagttcga

SEQ ID NO: 137880 - DNA, 421 bp, Homo sapiens
aatgacagagatttattctcacacatatctggaggccagtattccaaaatcaaggtgtcagcagggctgttccccttccataagctcaagaggagaatctgtcccttgcctttttcagtttgtggtggctgctggcaacccttggcttatggccacatcattcccgtctccgtcgcctctgtggtcacrgtgcctcttcctccttctgtgctgaaccttcctggatctctctcatatggggatacttgtgattacatttatggcccactaggataatccagactggaaaaagggcatgctccttgcttaggatccttcctggtccttagacatgtttcactcattcacgtctcctaaggcttttggcttgactttgccacctaggctcttagctctgccatttggtcacagctaaaaaata

SEQ ID NO: 137881 - DNA, 485 bp, Homo sapiens
aagacaaaaatacactgaggcccaagtcatttgctttaacataagggctggcaaattactgtttctaatctctactttaaactatggagaagtatggaatatcacatagataagctaatttcaggagggggtaatttaacaacaygtgtaattggtttggggaaaaaaggtaaatagcaagtgtctgattgttagcttggttgatttaaatcagtatagatttaggaaaagcgtacaatctgctgagcattctaaacatctgaaacatcccaacacaaaaaaagtacatttgaggtgatggatatcctaattactctgattcgatcattatacttttaatgcatgtatcaaaaatcccaccaatcccataaatatgtacaattattatatatcaacgaaaataaataaatagataacgtctgaaacaggcaccactgcctcagtgaggtatgaactctagcccttaccagaaattgtcccacagg

SEQ ID NO: 137882 - DNA, 429 bp, Homo sapiens
gaacatgaaggcagaccaggagcgtgaccactgaagcacagcatcacagggagacaggcctctggataactgcaggtggkcctgagtcaggccctccacaagaggtggaggagtagagtcttctctaaactcccccagggaaagggagactccctttcccggtctgctaaatagcgggtgtttttccctgacactaacgctaccgctagaccacggtccacttggcaacgggcgtcttcccacacgctggcgttacccctagaccaaggagccctctggtggccctgtctgggcgtaacagaaggctcgcgctcttgtcttctggtcacttttcactatgtctcctcagctcctatctctgtatggcctggcttttcctaggttatgattatagagcgaggattattataatattggaataaagagtaa

SEQ ID NO: 137883 - DNA, 429 bp, Homo sapiens
gaacatgaaggcagaccaggagcgtgaccactgaagcacagcatcacagggagacaggcctctggataactgcaggtgggmctgagtcaggccctccacaagaggtggaggagtagagtcttctctaaactcccccagggaaagggagactccctttcccggtctgctaaatagcgggtgtttttccctgacactaacgctaccgctagaccacggtccacttggcaacgggcgtcttcccacacgctggcgttacccctagaccaaggagccctctggtggccctgtctgggcgtaacagaaggctcgcgctcttgtcttctggtcacttttcactatgtctcctcagctcctatctctgtatggcctggcttttcctaggttatgattatagagcgaggattattataatattggaataaagagtaa

SEQ ID NO: 137884 - DNA, 484 bp, Homo sapiens
gattatatatgaatatcattaatcattagtttgtagcaattactctttattccaatattataataatcctcgctctataatcataacctaggaaaagccaggccatacagagataggagctgaggggacacagtgagaagtgaccagaagacaagagtgcgagccttctgttatgcccggacagggccaccagagggctccttggtctagyggtgacgccagcgtctgggaagacgcccgttgccaggcggaccgtggtctagcggtagcataagtgtcaagggaaaacacccgctacttagcagactggggaagggagtctccctttccccgggggagtttagagaagactctgctcctccacctcttgtggagggcctgacatcagtcaggctcgcccgcagttatccggaggcctaaccgtctccctgtgatgctgtgcttcggtggtcatgctcctagtccgccttcatgttccatcctg

SEQ ID NO: 137885 - DNA, 608 bp, Homo sapiens
aatatcacagtacctagcacaaagaaagtcttcaataaatttgtttcctttccttcctactcaaaccaactggtcttgtgttccactgtagggtggacgytatttggttcatatgtctgttcaacatctattcttcttcctgaaaacaacctgatttccttttggtagatttatctatgctgtacagttctggtggggctgtacattggtagccttattctctgtggacttgatccaaacttgtcccgttaattcctttacccttaggcctaagaaaagacacatggatagaaaaaaaaaatggtgtctgtatagccagagctgctcttgcatctggtcctgattcctctctggcatccagacttgggtttccagcctctggtccattccataaagtgcttgttatccctttaatacattccctatattgcttaagtaacccgaattgtttcctgttacttgcaaatgaagactcttatctgagaagtattcccctgtgaatctttgaagtctcattacattttaccttgttttgttgtaatttgtatatttgcaaggccagatgctatcttttaaaagtctgttcacatatttttttctcccacaag

SEQ ID NO: 137886 - DNA, 568 bp, Homo sapiens
gcgttttctagcctcacttctgcttaaacatgcaaaactatcacttaggatggagtctgatagatggagattgcacagtgttatcagatgagactattctaaggtgaagtcagttaccattagcattaagcaagtcgtctttacattgtacccaaattcttttttttttttttttttttgagacggagtcttgctctttcacccaggctggagtacagtggcgccatctcgtctcactgcaacctccgcytcctgggttcaagcgattcttctgtctcagcctcccgagtagctgggactacaggtgcatgccaccatgcctggctaattttttgtatttttagtagagacggagtttcgccgtgttagccaggatggtcttgatctcctgacctcgtgttccacccgccttggtcttccaaagtgctaggattacaggtgtgagccactgtgcctggcctcccaaattctaaagttgtattttgagtctcttacctcttatgtcctctgtagagatgatgaacagctggtcggtatcctctttataataacccttcaagtaggaaaa

SEQ ID NO: 137887 - DNA, 560 bp, Homo sapiens
tctgccatcagatttcccgaacactcctaaagaagatgaaggaagttttgtttgttgttcaaatctttaatgtgtacaggagggcaggaggggctttgactcgaggttgccctacttcttagaggcaaatattccagaagttccaggagagtttttggacatctgatctagaggcaaatcctctaagggtttattttctatccctgattcctgaaggtttgagaggaaaagtaaagatgaaggggcgtgaaggacgaaaacaggaaattagcactctgaatccctctagaaaractatcatctggagcttccaaatgttttcacatctgaaggaaggaaaattccatctcttttactttgaggggtcagaatcatgctttactttatcatgagaaatgatgggctgatgccgtgaagggaatgagtgtggatggaagcgtgtaaaaagtttcaggttccctgagtccccgagttcctcccgagcaggattgggtggacatccgtgacgggcagcaggtgccctctcctgcagttctgcagtttgtcttccagaggaattc

SEQ ID NO: 137888 - DNA, 560 bp, Homo sapiens
tctgccatcagatttcccgaacactcctaaagaagatgaaggaagttttgtttgttgttcaaatctttaatgtgtacaggagggcaggaggggctttgactcgaggttgccctacttcttagaggcaaatattccagaagttccaggagagtttttggacatctgatctagaggcaaatcctctaagggtttattttctatccctgattcctgaaggtttgagaggaaaagtaaagatgaaggggcgtgaaggacgaaaacaggaaattagcactctgaatccctctagaaaaactatcatctggagcttccaaatgttttcacatctgaaggaaggaaaattccatctcttttactttgaggggtcagaatcatgctttactttatcatgagaaatgatgggctgatgccgtgaagggaatgagtgtggatggaagcgtgtaaaaagtttcaggttccctgagtccccgagttcctcccgagcaggattgggtggacatccgtgacgggcagcaggtgccctctcctgcagttctgcagyttgtcttccagaggaattc

SEQ ID NO: 137889 - DNA, 634 bp, Homo sapiens
ttctcaggattcagattaataaagaataaagatttttaaaatagtagctaaatattaattttgagtaaacctatattgtcaaaaatttggggaaagaaatccaacacagagtgaaagcccaaatgtcacagaaactaggagacaatgtagaagatgtatccaaataattcaacttgtgctatgaataagttttttttgwttttttgtttttttgttttttttgagatggagtcttgctccatcgcccaggctcgatctcggctcactggctcactgcaacctccgcctcctgggttcaagtgattctcctgcctcagcctcccgagtagctaggattacaggcacctgccaccacacctggataatatttgtatttttttttagtagagatggggtttcaccatcttggcaaggctggtctcaaactcctgacctcgtgatttacccgcctccgcctcccagagtgttaggattgcaggcgtgagccaccgcgcctggtctatgaataagattttaagagatgatctcatagttttgagggataattctagctagggaaaatgaaatgggttttatgtaagattgtgcacagaagttgtggtaagacatagagtgaacaacaacaacaacaaca

SEQ ID NO: 137890 - DNA, 577 bp, Homo sapiens
tttttaaattaaaatgtaatggtcaattaagttgatattccaaattactaaatgaatcttcacaattgtgaaaaataaacaccattttattccttgtgaaaaataaatactatgtctgctgtgtctgggtattgggtttctcttcataaaataaatgtggtttaacaaccagatattaaaatcaaataggtaaattctattcaattctcattactaattgggatatagttaattgattattgatccatgataagcagggattattcyggactttgaacttatgtataacaaaataaagtgctataaagattctctaacagaatagtagggacatttgctatgcttcttgttattttaatttctctcctgagcagtattgcaattctacctaaataattcagtcacaagtgtctcttcaagttatagagaagctagatgacaattattatgactttttttccttcttggggaacagtacaacatttcgcttattacataaaacaatatttgtaaatctctgatagtttcagtcaagaatgaccaaccaaatttcaaattgcattattgcgaaaaacaa

SEQ ID NO: 137891 - DNA, 624 bp, Homo sapiens
gtaaaccacataacatgggaatcacacttacatatatacttgattgaaaaataatgtccacaggaaaacttacgtattaatgtttatagaatctttattcttaatctccaaaaattggtggaaaaaacctagatttttaatagatgaatagataaacagattgtgatagattcctataattgaacattactcagtaattaaatgaaattagctaccaagtcacccaaagacaaaaggaaatttaaattcaaaaatgctaagggagagcatcttttctgaaaaggctacatattgaatgatttaagttatatgacattctgcaataggcaamactttgcatatagtaaaagatgagtggtttccagtggtttgaaaagacaagaaggatgaacaggtgaagcaaaggagacattttgggcagtgacaccattttgtataatactgcaatggtagatacatgacattatgcacttaccaaacccacagaactttatataaaggcttattatgaatgaaccttaatgtatacaaattaaaagaaaaaaacatttagtaggtaggagctggaaagatggcttcaggaaagaattcaggctgtaacaagataatctaactgtattataa

SEQ ID NO: 137892 - DNA, 609 bp, Homo sapiens
agaggagttctattctcctctatgcagcaccactaagagttggctgctttacagtgagccacagcttctttcagatggtgctctgctaagataacaggatgctctctctggagtaatatctgctcccaaccggtgtttcttcagggccaggatgtgtaagaggctcattctgttgagaattcctgctttagtagcatccctagtcagctcccttaactgtacccacatcctctgttaagtccttcccaatgattgcatttgagtacrtcatctggttcctgaaaataccttgacagaattagggaaaggtgaatagatcatgctgctcccatggaataaagtatcatatcatgaagtcatcaaaaaatctatgtattgttgtcaccctttcatcaaataaatatgaagtgtctactgattttctaggcatttttcttggtggacagaacagcagactccttgaggagttttcactctagaaacatagtctacatacataaccagagagtttgtgacacatccctggatagaatactgcccctagaagtcatttattgaataatatttaatctactgagaaaatgaaagaaaaactttgatttatatagc

SEQ ID NO: 137893 - DNA, 571 bp, Homo sapiens
gagatgataataatagtcatttattagtgttataactagcatttattaagcacrggccaggccttgtcctaagtgcctcacagtttgcagtggccatttatttgttaaaataatcaatttggaggtcattagattaaggcagctccagggccctgggtctctacatgagtaaacctaaacccaactcaatgtaaatggtcatatcctaggaatacaaaacttgagcatacccagtcaaaaactggcacctaaagtttaactaggaactttaaggcacttttttagtttaattagtcaaatattttcttttcctgacttctgcaaacatttgtaaaagttttctccttgcacccagtcagtgaaatccaactgcttgaggtctggtgctgcctgatccatgaattgctgtctgctaaaataaactctttagaattttaatatgcctacatttatcttttaacatactctattcacaaacaaccctaggtctccctctttccgaacataggatgaggcttcaccagcatctcgctattatatgtggctatttggccattgaagtttgagtgaa

SEQ ID NO: 137894 - DNA, 559 bp, Homo sapiens
cacattagaagaaacagtccatcttcaaatatgcccattgttctagtaatgccattatgacaatttctaacttaaattcaaaattcaatgcaagattatacattttcttaaataggcatttcatgttagtttctttattctcaaacagtttctcagactaatggaaactgrcaagataattttatgaaaatctaaaggactttgaaagtcacagtgatcttctaaaggaggactacagttggggagcttacatgaccagacagaaaaataaaaccataatgcctcaataattaaggcagtttggtattgacatcaaatataattgaccgttttgttttcaataagtaacattctacaaagtatattaaaattttatatagagatatatatgtgtgcgtgtgtgtgtgtgtatatatatatatatatatatatggcactaaataataaccaggagcaaacaaagactggaaagattacaagcaaatagaggataaaaagaattctacattaatttctttgagggaatacttcatttcatgtgtcatgtaaaatatgaagt

SEQ ID NO: 137895 - DNA, 559 bp, Homo sapiens
cacattagaagaaacagtccatcttcaaatatgcccattgttctagtaatgccattatgacaatttctaacttaaattcaaaattcaatgcaagattatacattttcttaaataggcatttcatgttagtttctttattctcaaacagtttctcagactaatggaaactgacaagataattttatgaaaatctaaaggactttgaaagtcacagtgatcttctaaaggaggactacarttggggagcttacatgaccagacagaaaaataaaaccataatgcctcaataattaaggcagtttggtattgacatcaaatataattgaccgttttgttttcaataagtaacattctacaaagtatattaaaattttatatagagatatatatgtgtgcgtgtgtgtgtgtgtatatatatatatatatatatatggcactaaataataaccaggagcaaacaaagactggaaagattacaagcaaatagaggataaaaagaattctacattaatttctttgagggaatacttcatttcatgtgtcatgtaaaatatgaagt

SEQ ID NO: 137896 - DNA, 567 bp, Homo sapiens
acttaaattcaaaattcaatgcaagattatacattttcttaaataggcatttcatgttagtttctttattctcaaacagtttctcagactaatggaaactgacaagataattttatgaaaatctaaaggactttgaaagtcacagtgatcttctaaaggaggactacagttggggagcttacatgaccagacagaaaaataaaaccataatgcctcaataattaaggcagtttggtattgacatcaaatataattgacsgttttgttttcaataagtaacattctacaaagtatattaaaattttatatagagatatatatgtgtgcgtgtgtgtgtgtgtatatatatatatatatatatatggcactaaataataaccaggagcaaacaaagactggaaagattacaagcaaatagaggataaaaagaattctacattaatttctttgagggaatacttcatttcatgtgtcatgtaaaatatgaagtttaagaattaagggtcaggattcaaggctgccatattggttaacaattgaaaggagaaagatccaggaatggaggaa

SEQ ID NO: 137897 - DNA, 567 bp, Homo sapiens
acttaaattcaaaattcaatgcaagattatacattttcttaaataggcatttcatgttagtttctttattctcaaacagtttctcagactaatggaaactgacaagataattttatgaaaatctaaaggactttgaaagtcacagtgatcttctaaaggaggactacagttggggagcttacatgaccagacagaaaaataaaaccataatgcctcaataattaaggcagtttggtattgacatcaaatataattgaccgttttgttttcaataagtaacattctacaaagtatattaaaattttatatagagatatatatgtgtgcgtgtgtgtgtgtrtatatatatatatatatatatatggcactaaataataaccaggagcaaacaaagactggaaagattacaagcaaatagaggataaaaagaattctacattaatttctttgagggaatacttcatttcatgtgtcatgtaaaatatgaagtttaagaattaagggtcaggattcaaggctgccatattggttaacaattgaaaggagaaagatccaggaatggaggaa

SEQ ID NO: 137898 - DNA, 567 bp, Homo sapiens
acttaaattcaaaattcaatgcaagattatacattttcttaaataggcatttcatgttagtttctttattctcaaacagtttctcagactaatggaaactgacaagataattttatgaaaatctaaaggactttgaaagtcacagtgatcttctaaaggaggactacagttggggagcttacatgaccagacagaaaaataaaaccataatgcctcaataattaaggcagtttggtattgacatcaaatataattgaccgttttgttttcaataagtaacattctacaaagtatattaaaattttatatagagatatatatgtgtgcgtgtgtgtgtgtgtatatatatatatatatatatatggcactaaataataaccaggagcaaacaaagactggaaagattacaagcaaatagaggataaaaagaattctacattaatttctttgagggaatacttcatttcatrtgtcatgtaaaatatgaagtttaagaattaagggtcaggattcaaggctgccatattggttaacaattgaaaggagaaagatccaggaatggaggaa

SEQ ID NO: 137899 - DNA, 567 bp, Homo sapiens
acttaaattcaaaattcaatgcaagattatacattttcttaaataggcatttcatgttagtttctttattctcaaacagtttctcagactaatggaaactgacaagataattttatgaaaatctaaaggactttgaaagtcacagtgatcttctaaaggaggactacagttggggagcttacatgaccagacagaaaaataaaaccataatgcctcaataattaaggcagtttggtattgacatcaaatataattgaccgttttgttttcaataagtaacattctacaaagtatattaaaattttatatagagatatatatgtgtgcgtgtgtgtgtgtgtatatatatatatatatatatatggcactaaataataaccaggagcaaacaaagactggaaagattacaagcaaatagaggataaaaagaattctacattaatttctttgagggaatacttcatttcatgtgtcatgtaaaatatgaagtttaagaattaagggtcaggattcaaggctgccatattrgttaacaattgaaaggagaaagatccaggaatggaggaa

SEQ ID NO: 137900 - DNA, 361 bp, Homo sapiens
gttttttgaaaaaaattaatgatagatgggctgcaagctagattaaaaaagaagaaaagagaaaaaatccaaattaacacaattagatatgacaaaggggatgttatcactgaccccacagaaataaaaatagccaccagaaaccgctatgaacacctgtaggcacacaaactaaaaaacccagaagagatggacaaattcctggacacatacaccctatcaatactgaactaggaagaacataatttcctaaacagacygataatgaattctgaaattgaatcagtaataaatagcctaccaaccaaagcaaagccaagacctgagggagtcacagccaaattctactatatgtacaaag

SEQ ID NO: 137901 - DNA, 619 bp, Homo sapiens
tagtaaagtgatcaataattagctattcctattatgttttgactgagagccacacaaagaaaagaggaagaaggtttaagagcttgggtgctgtccagcatggtatgaagagggagggtgcacaggaaggggaattttaaaagtggtgataatagaaggctataaacaaacttttctaaattcatcatctctcaaagggctaattcaaggggttgrtatcttgtgctaatgcattctacaagaacatcatacctggttgggtttgatggctcacaccagtaatcttagcactttgggaggctgagacgggcagatcacttgagtccaggagttcgagaccagcctgggcaacatggtaaaatcccgtctctacaaaatagacaaaaattagctgggtgtggtggcatatgcttgtagtcccagtcacttgtggggctgaggtgggaggattgcttgagccagagaagttgaggctgcagtgagctgtgattacaccactgaactccagcctgggtactgatatggttttgctgtgtccccacccaaatctcatcttaaattgcagctccccaaattcccacgtgttttgggaggggagccggtgggagacagttaaatc

SEQ ID NO: 137902 - DNA, 554 bp, Homo sapiens
tttataaagggcagttcccctgaacacgctctcttgcctgctgccatgtaagacgtgcttttgctgtgccttcaccctccaccatgattgtgaggcctccccagccatgtggaactatcaattcatttaacttattctttgtaaattaccctgtcttgggtatttcttcatagcagtatgaacatggactaacacaccttataagaggagggaagatttgagatgcacagacacaaagatacaggggcagggttgggggaggggaatggcatactgaagacaaagatacagattggaatgaatgatatgttcacaagtcaaggaacaycaaggattgcccatcgctatgggaaactaggagaatggcttggaacaccttctccttcagagcttccagaaggtatcaaccttggcaataccttacttgcagacttcttgactctccagctctgagagaaaaaatttctgttgtttcaagccatcacatttgtagtaatttgtgacgggatcctcaggaaactaatgcaatatgtaatgggtttattgtttatttt

SEQ ID NO: 137903 - DNA, 386 bp, Homo sapiens
atctatgtcaaatctctatctatctatctatctatctatctatctatctatctatctatctatctattytattggtttttatttcattggagaaccatcactgatatagaaatgaatttgcatagaagttggctaaggttaggagtatagtctgtgccaatagaaaataaatcttccctatggaaagttcactaaagccatttaaggaccaaatccattaacttgatctcacggggctgatagagggaaggagagccccaaagtggagtcttagaccaggagggttcttggctttgcccaggaaataattcaagggtgagctggtggtgctaaacactgacttttattgaagtggcatgcataaatgcattgtcaacagtgatttc

SEQ ID NO: 137904 - DNA, 303 bp, Homo sapiens
ttactacttagatacttgaagttttatttccattatcaaagttctaatcaatttgaagttgatttttatatatttgtatatcatttaaaacaatatccaaatataagcattccaggtatacttttacattttatatatatactgaatttttaatttttaattgttaatttttgtgggtacatatcatgtgtatgtgtttatgyatatgatatacttaatatgagatttttgacataggcatacaaagtgtataaatcacatcagggtaaattgaggtattcatcacttcaagcatatatgctg

SEQ ID NO: 137905 - DNA, 584 bp, Homo sapiens
ttgtaaatttggtgttcctaatgggagagtgatctgtggaagtttctatgcagctctcttgcttgacctcctttatgctgataattttttaacgactttctgtgttaaagaaaactatctttcttaactgatatgacataagatataattccagagaaccacatcattttatgggcttctatacaactctactgaaagtggactgcaatagtaatgcaacagtgtctttcttactatagtttcatatgatttctagtatctgaaatggtaaatcatcaccaccaatttatcctgttcagaagcactcctatttcttttcygcataatatttataattggaatatcaatttctatgtaaacttctactgggattttgaatggaattccattaaatctataggtcaactatgagataattagtacttttagagtattaaatctttttactcattaatattttgcagttctgtaatgttcctttatagaatataatggattttttcataaaattattgtacatagatggttataatgatttctatgtatttaaaataatttagcctttcatatgtaaaggatcttat

SEQ ID NO: 137906 - DNA, 392 bp, Homo sapiens
ttagcctttcatatgtaaaggatcttatctttaaatgatagttttactttttgatattgaatttagcccataatttatagactaaaacctcccactctcttttatgaatcagtcaaattaattttccaccagttgcccagtatttatgtaattaatataaatgtatatatatagagatgtctcataaaatcatgcaagctctcagttccttgactgcattttctaamtggatatggtctccatttcaatccagataccaatggccgtatccaaaacctagaagttttgaatgccatctgtaaaagtgataataatttaaaatatgataatggctattgtgtctggagtttattccttctggtgggttcttggtcttgctgacctcaagaatg

SEQ ID NO: 137907 - DNA, 487 bp, Homo sapiens
tgttcatttaatatcttcacctttaataatttaataattgagttttgtatttttcttacacacccactgcaaggggcctctatattcacaaacatctatgtctcctttactgaatcatcatcctcactaataaagtgcctaccttctatagcaaactaatgtacttccaattaaaaaaaaaagagagaagcttccataatccataggccctacagctgtttcaacttttgtacaggcaaactccaatggctttttttttttttttttttttcagatgaattctcactttgtcacccaggccagagtgcggtggcamaatctcggctcattgcaaactccgcctcctgggttcaaatgattgtcctgcctcagcctccagactagctgggatttaggcacacaccaccatgcctggctaatttttatatttttaccagagatagggtttcaccatagtggccaggctggtctcaaactcctgacctca

SEQ ID NO: 137908 - DNA, 528 bp, Homo sapiens
agatctctagagcagggggacaaggccaccagtctctttgccaaagcatagcaagagggacctttgctcctgttctcaatagttcattatttccatctgggaacaccttagcctgtactttactgtccatatcactattagcattttggtcaaaaccattcaacaggtctctaggaagttccaaacattccctcatgtttctgcctttttctggttcctccaaactgttctaatctttgcccattacccagttccaaagtcatttccgcatttccaggtatctttttatcagtatccgacttctctagtagcaattttctgtattartctgttcaaacactgctataaagaactacctgagactgggtaatttatgaagaaaagaggtttaattggctcacagtactacaggctgtacagaaagcatggctggggagggcttaggaaacttcaatcatggtggaagggcgggagagaagcaaacacctcttcacatggcaacaggagaaagataatgaaggagaaagt

SEQ ID NO: 137909 - DNA, 511 bp, Homo sapiens
tctctttgccaaagcatagcaagagggacctttgctcctgttctcaatagttcattatttccatctgggaacaccttagcctgtactttactgtccatatcactattagcattttggtcaaaaccattcaacaggtctctaggaagttccaaacattccctcatgtttctgcctttttctggttcctccaaactgttctaatctttgcccattacccagttccaaagtcatttccgcatttccaggtatctttttatcagtatccgacttctctagtagcaattttctgtattagtctgttcaaacactgctataaagaactacctgagactgggtaatttatgaagaaaagaggyttaattggctcacagtactacaggctgtacagaaagcatggctggggagggcttaggaaacttcaatcatggtggaagggcgggagagaagcaaacacctcttcacatggcaacaggagaaagataatgaaggagaaagtactacgcacttttaa

SEQ ID NO: 137910 - DNA, 533 bp, Homo sapiens
aggataaaatgcgtttctgtcacatactcatttttctctgtttttgaaaatgtagattatttgaaaacaactaagaaatatttatatttacaaaagagttgataaatgcacattgtatatgcagaacaaattatagaagtaaaattagtattgatcataattaagtataattaataatgaattaatgattatagtgggcagacaaaaaatgtgtgtgacctaaggcttataagcagttagcattttagaaaatgtcttaaaattatggacttyaatatactattcattaatttgctttttgttcagtaactattttttaagtcacttactatataggatgtacataagacttatttttgaatttatattaaccttataataaatagaactatgtttttatttaggtaaatatttttaagttaaggaaatacataccttttgtattaaaattgcatgcataattttaaatgtaatatataaatttacttttatagttgtctactgagaacgtcataaaaatagcatttgattca

SEQ ID NO: 137911 - DNA, 398 bp, Homo sapiens
cacaccaccatgccagctaatttttgtgtrtgtgtgtgagggtgggtattttctgtaaagatggggttttaccatgttacccaggccggtctcgaactcctgggctcaagggattcacttgcctcagcctcccaaagtgttgggattacaggtgtgagccagctcccctggcctgattttttttcctatgtattttaaacatacttcaaatccttaggtatacatggctgcattttataacttttacattctgctgatgtgtcagccctacttcttgacaaatgtattttggttctctgcaaatcatccctaagagatttctggacatctgcagaggatgtttcagatacactcaaagacaaattttattctgcttgttgctccagtcctgattcatg

SEQ ID NO: 137912 - DNA, 401 bp, Homo sapiens
ttcaaatgcccccattgccacagcatagtgagtagttggatcattttaaaggatgtatttataaatgaataacggtgaatatgattttcttgtgttgtctatatttctgcctgtttttgtcatgtgtaaatttttagcttcaaaaccttgcaaatattaaatatatctataagtatttcataaacccagctagatagtgaccatatcttcaggatggacccataagcaactttaatttttttcatatatatagtgacaatattagagtagtcacttaagtagttatcatattcatataaaatatattattttrtaattagtttgcatctttttatgttttccacgctagtgtgcaatccgcttgaaagcaatgtatgtgagtttagtttactaatgcgctt

SEQ ID NO: 137913 - DNA, 401 bp, Homo sapiens
ttcaaatgcccccattgccacagcatagtgagtagttggatcattttaaaggatgtatttataaatgaataacggtgaatatgattttcttgtgttgtctatatttctgcctgtttttgtcatgtgtaaatttttagcttcaaaaccttgcaaatattaaatatatctataagtatttcataaacccagctagatagtgaccatatcttcaggatggacccataagcaactttaatttttttcatatatatagtgacaatattagagtagtcacttaagtagttatcatattcatataaaatatattattttgtaattagtttgcatctttttatgttttccamgctagtgtgcaatccgcttgaaagcaatgtatgtgagtttagtttactaatgcgctt

SEQ ID NO: 137914 - DNA, 438 bp, Homo sapiens
aacaccatatactcttacttataaaagggagctaaactttgggarcacagaacacaaagatggcaacaactaacactgggcatgccaaaaacggggagaaagggaggagacaaagggttaaaaaaactgcttatcaggtactaggttcactacttcagcaatgggatcatagaagcccaaacctcagcatcatgaaatatacccatgtaacaaagtgctaggattcagtgctgcacctgaatctaaaattttaaaaagtaaaattaaattaaaaaaagttgtattccatatcatgttaaataatagatatagtccacatttaaagtataatgtttctattctttgcaggtagaattttttatctgtaattgttaagtggctttttttttaatgattagagtttcatttacagtaatgtgtaaagacaaattttacaca

SEQ ID NO: 137915 - DNA, 620 bp, Homo sapiens
gccaatagtgcaaccttcagcctgtggcagaaggaccgagagtccctggtaaatcactggtctaagtccaagagtccaaaacctgaagaacttggggtctgatgtttgagggaaggaaatatccatccagcacaagggaatgatgaaggcaggaagactcagtgagcttattccttccacgttcctctgcctgcttttgtcctagccacgctggcagctgattagatggtgcccacccagactgagggtgagtctgmctctcccattctactgactcaaatgttaatctgctttggcaacaccctcacggacacacccaggaacaatgatttgcatccttcagtccaatcaagttgacactcagtattaaccatcacaagtctaccctttgtcaacttgaacccacacacatctcctgaaatcatacataatcaccaaatgaagacaataataaggtcataattatgcctaacatagtacagttatccttcttacaaccagaagcacactaatcattaacctaaatgctattatataaagttaacaacatttaaatgctgatatgaagtcaataaatcttatgtcacatgataaagaaaaaaaggaaataaagatatttt

SEQ ID NO: 137916 - DNA, 575 bp, Homo sapiens
caattacacttctcatttggttcttggaaacacatctacgaggtacaattttaagaagctctgccttgtcctttgaatgtaaagtgggcttcctcatagcctggtggctagatgagttctgaatgtgactcagtgaggatacttgatcatcacatatgttggtagatttcaggcattccatcttcttgctctctgagttagttaatagctatcatagagcgttgagaaactgtgagaagatctggattcctgtcttgactccaatagaaatcataggaaagattatatcaatgttttccatctataaatagatgtctatgcatctatagttttcaaactttgtagatgatcaggacactttgtcaaataaaatcttatgtggaatctcaatagattacatcaagaaaatggtggttgatgccaacagcttatctttagtcctaacgaaaccacgtagcactacgaagaatagcatgagractataagtttatataatgcctaaattctcttttatatttaaaattcaggttttccagggtttatcaaaagttgcaatggtagttcccagtgaacc

SEQ ID NO: 137917 - DNA, 374 bp, Homo sapiens
caatagaaatcataggaaagattatatcaatgttttccatctataaatagatgtctatgcatctatagttttcaaactttgtagatgatcaggacactttgtcaaataaaatcttatgtggaatctcaatagattacatcaagaaaatggtggttgatgccaacagcttatctttagtcctaacgaaaccacgtagcactacgaagaatagcatgagaactataagtttatataatgcctaaattctcttttatatttaaaattcaggttttccagggtttatcaaargttgcaatggtagttcccagtgaacccatttctaaaagagatttctgattacagattctaattatgtcacacctaaaaatctatcc

SEQ ID NO: 137918 - DNA, 545 bp, Homo sapiens
ctctctttccagcaagggcaagcacatgaacattaagccaggccaggcatgctggctcacgcctataatcccaacacttttgggaggccgaggtgggaggattgcttgaggtcaggagttcgaaaccagcctgatcaacacagcaagaccccgtctctaaaaaaaaaatttaaaaattagctaartatggtggtgcatacctgtagtcccagctactccagaggctgaggcaggaggacaccttgagcctgggaggtcgaggttgcagtgagctgtgatggtgctactgcactccagcctgggtgacagagtaagaccctgtctcaaaaataaataaagccaaaaccagacttagattggttcttcatgcagaccatgaaacacaagccaagcagagatggggcaggggtgtggtccatgagccaaggtctgtcatggaaagggaaagctgcaacttcagagttctcccttgaagcaggcctcataaccccataatcagagtaagcagttgccaggatgagtagtctcctacctcgttcagggtc

SEQ ID NO: 137919 - DNA, 493 bp, Homo sapiens
aggttattctcttagtggttaccttggagattacaaataacatcttaaacttataacaattaaatttggataatagtttcaatagaatataaatactctgttcctatacatcttcatccctcctctttacattattattgtcacagattacattttataccttatgtgcccattaacatagacttacaattattgttgtatacattagtttcttaaatcaggtaggaaaaagggagaagttacaaaccaaaccaaaagtataaaccaaaaccaatccaaaccaaaggaagttacaaaccaaggaaaaataatattggcttttatatttatctatgtagttacctttaccagtgttagtgttatttcwtcttacagcttcaagttactgtcttgtgtgtgtgtgtgtgtgtgtgtgtgtgtgtgtgtgtgtatccagcctgttagcatttctagggcaggtctatttgtaatgatctccctcagcttttgtttt

SEQ ID NO: 137920 - DNA, 429 bp, Homo sapiens
tcatcagatttgggaagcctttagccacaatttctttaaatatgtttttctgcccctttctcttccttcttctgtaattcctataatgcatagttatagttgatgacatcccataaatccttcaggctctatttattttccttcattcatttttatttatgttcctcagactggatactttcaattgtcttatcttcatgtttrccgatcctttcttctgcctactcaaatctgctgtagaatgcttccagtaagtttttcattttaagttattgtatttttcagttccaagaccagtttggttcctttcttataatttctcattattgatattctcattttttagacattattttctcaatttcctttggttttttaatccatggtttcttttagctcattaaatgtgtctaagataattgatttaat

SEQ ID NO: 137921 - DNA, 429 bp, Homo sapiens
tcatcagatttgggaagcctttagccacaatttctttaaatatgtttttctgcccctttctcttccttcttctgtaattcctataatgcatagttatagttgatgacatcccataaatccttcaggctctatttattttccttcattcatttttatttatgttcctcagactggatactttcaattgtcttatcttcatgtttgccgatsctttcttctgcctactcaaatctgctgtagaatgcttccagtaagtttttcattttaagttattgtatttttcagttccaagaccagtttggttcctttcttataatttctcattattgatattctcattttttagacattattttctcaatttcctttggttttttaatccatggtttcttttagctcattaaatgtgtctaagataattgatttaat

SEQ ID NO: 137922 - DNA, 429 bp, Homo sapiens
tcatcagatttgggaagcctttagccacaatttctttaaatatgtttttctgcccctttctcttccttcttctgtaattcctataatgcatagttatagttgatgacatcccataaatccttcaggctctatttattttccttcattcatttttatttatgttcctcagactggatactttcaattgtcttatcttcatgtttgccgatcctttcttctgcctactcaaatctgctgtagaatgcttccagtaagtttttcattttaagttattgtatttttcagttccaagaccagtttggttcctttcttataatttctcattattgatattctcattttttagacattattttctcaatttcctttggttttttaatccatggtttmttttagctcattaaatgtgtctaagataattgatttaat

SEQ ID NO: 137923 - DNA, 522 bp, Homo sapiens
aacctgttttgtcagcaaggtctttataacctgtatcttgtgctgacctcctatttcatcctgtgacttagaatgccttaacaatctgggaatgcagcccagtaggtctcagcctcattttatccagcctctattcaagatggagttgctgtggttcaaacatctctgacaggctcatgctcaccagtctcctctaaagcacctcaggtgctttctctgctctgcctagtaagattgccttcctccaagttctgccttctgaaattcattgaaatctctcgttgctactctctcctcatttgcctttgtccttattgttttatacctttttaaattgcttcactttcatggtggcagtgtamccacctgagagattcttcatgcccactgcacaaataaagaccacagcattgcagtaaagaaagagtttaactgacaagaggccagccacgccacacaggagacagagttgttactcaaatcaatctcctcagaaattgggggacaagggtttttaagggt

SEQ ID NO: 137924 - DNA, 519 bp, Homo sapiens
aagttacttttttttgcctttagaggcatatcaaatctgtatttgattaaatcaacaattttctaaagatatttggtggktgagacaaaagtagaaaacaaacatgacctatttgacagagtaaaaaagaagagattataaaaataaaagcatgctgaaaactgtaagagggtaagtgaaataaaagggagagatcattggctcaaacgcagaagttttgttattttattgccgtattttccaacgtttgcaaaaaactgagtgaagatattaccccagagcaaaaaaaagagtttcagattttctgagagtaacttaagttaattttctcaagtttttttttaatatcccatttgtctcttaggtaaaatccaacatcccttcaacagagtgctctgatgttcatttctgataatgtgtgtaaaataaccacacatattaaatatctctgtccccagagacactttaggtattcaatggagcttagttttatcttggataagatttattggaattaaa

SEQ ID NO: 137925 - DNA, 519 bp, Homo sapiens
aagttacttttttttgcctttagaggcatatcaaatctgtatttgattaaatcaacaattttctaaagatatttggtggttgagacaaaagtagaaaacaaamatgacctatttgacagagtaaaaaagaagagattataaaaataaaagcatgctgaaaactgtaagagggtaagtgaaataaaagggagagatcattggctcaaacgcagaagttttgttattttattgccgtattttccaacgtttgcaaaaaactgagtgaagatattaccccagagcaaaaaaaagagtttcagattttctgagagtaacttaagttaattttctcaagtttttttttaatatcccatttgtctcttaggtaaaatccaacatcccttcaacagagtgctctgatgttcatttctgataatgtgtgtaaaataaccacacatattaaatatctctgtccccagagacactttaggtattcaatggagcttagttttatcttggataagatttattggaattaaa

SEQ ID NO: 137926 - DNA, 519 bp, Homo sapiens
aagttacttttttttgcctttagaggcatatcaaatctgtatttgattaaatcaacaattttctaaagatatttggtggttgagacaaaagtagaaaacaaacatgacctatttgacagagtaaaaaagaagagattataaaaataaaagcatgctgaaaactgtaagagggtaagtgaaataaaagggagagatcattggctcaaacgcagaagttttgttattttattgccgtattttccaacgtttgcaaaaaactgagtgaagatattaccccagagcaaaaaaaagagtttcagattttctgagagtaacttaarttaattttctcaagtttttttttaatatcccatttgtctcttaggtaaaatccaacatcccttcaacagagtgctctgatgttcatttctgataatgtgtgtaaaataaccacacatattaaatatctctgtccccagagacactttaggtattcaatggagcttagttttatcttggataagatttattggaattaaa

SEQ ID NO: 137927 - DNA, 576 bp, Homo sapiens
  misc_feature (1)...(576): n = A,T,C or G
ttctggcttaagtaaggtggaaatgccagcagaaggaaaaacaacaccattgcccagagataaacaagacagtattgaattcacaaggtttctcttagcaagncccccaagttaaaataaaaccttggaaaaattactttcccttataactgagtcggctcgctcacagggcaaactgctcttcttgatagttttcagcaaatcagtttgccagggaggggaaaataaaacaaaacaaatttgtacatgtttttcttttccattgacttttttgttcatttgtaactctccatttccctttgaagaaatctacatgtgactaatttctcttatgtatgactaattcagttgtaggtttaactaaattaaacatctatttcttcttaatactacttggaaaaakaaaaattttattttttattgtcatctgagaaatcagatcttgaatttttccttaataaaaaggctcttagtgactttataataatcaatagtcttacaacatatataataaaaatctctatatgcaatttactatattcctcaagtagctcatttgtgcaactacaaaatata

SEQ ID NO: 137928 - DNA, 549 bp, Homo sapiens
aaaatcattgtatgtttatacatgcaataatggtttagcctactgttcccaggctacaacctgtagagaatgttaatgtactgaatactgtaggcaactgtaatacaatgataggtatttgtgtatttaaatatatgtaagcatacaaaggcacagtaaggatacagtataaaagmcaaaaaaaaaaaaaggtacattttcatagtgcattctactaagccagtcttgctttgctataaagaaataccgaagactgggtaattgatatagaaaagaggtttaattgactcacagcttcttcgggctgtgcaagcatggtgctgccatagcttggtttctggggaggctttggggagcttttattcagggaagaaggagaacccggagcttgtgcattacatggtgaaagcaggagcaagagagagagtagtaggtgggggaggtgtcacacacttttaaatgacgagatcccatgtgaactcagagcaagagctcacttaccatcaccgggggaatggcacaagccattcatgagggatctgcccccac

SEQ ID NO: 137929 - DNA, 549 bp, Homo sapiens
aaaatcattgtatgtttatacatgcaataatggtttagcctactgttcccaggctacaacctgtagagaatgttaatgtactgaatactgtaggcaactgtaatacaatgataggtatttgtgtatttaaatatatgtaagcatacaaaggcacagtaaggatacagtataaaagacaaaaaaaaaaaaaggtacattttcatagtgcattctactaagccagtcttgctttgctataaagaaataccgaagactgggtaattgatatagaaaagaggtttaattgactcacagcttcttcgggctgtgcaagcatggtgctgccatagcttggtttctggggaggctttggggagcttttattcagggaagaaggagaacccggagcttgtgcattacatggtgaaagcaggagcaagagagagagtagtaggtgggggaggtgtcacacacttttaaatgacragatcccatgtgaactcagagcaagagctcacttaccatcaccgggggaatggcacaagccattcatgagggatctgcccccac

SEQ ID NO: 137930 - DNA, 591 bp, Homo sapiens
ctcagcatctagaacagcatctgacacatagtaggtgcttaggtgctcagtaaatttttgttggatgcaataattgttaaatggatgagtgaatgtgaggtgctaaggatacaaagataagctacaaatccctgccatcgatgagctcagtattgggttcatatttacatcctttctccacttgaagaaattaaaattgatggcagatgtgaattaggcaaggttctcacattcacagatcgaaaatgtacaaacatattggcccctcaattgtttttgtaaacatctggtaaatcaaatttatctagtaggactcatgagaacaaccactttaaaattctgtgtcttcttaaaaaccaatctgtcactaytggccagaacaagcaacattacttctctctgtttgatggtggagccaggtgtctagaagtaacttaataactgagaggtgacttttctcaagaaaaaaaaaatgatgcacctttaaatgcttctgactgcaaggacaacaagatttatggtttaaccaacgtgtaaaatacctcactttataagtgattccctgaagagttggagaacactcaataaccc

SEQ ID NO: 137931 - DNA, 436 bp, Homo sapiens
acaaacacaaggtaagcaacaaataataaatacttcctacacagggcgactaggtttctatttgaaaataatcttcatacctgtaattaaccttcttaagagaatggcattcaagcattcttacaaacctcacaagctcatcacaagatacatctagcatttaaagaaatggaatctatgaagaagcaccaccgactaaactttgcagaaaaatctgtttttatcacagttggtgggaaaaaaatttcattaagtattcaaaagatgttcaccagtttagactagtttataaggttcttcataatcaagccccatatgcctttctagctttatctcaagacrctatgctcacttcacactttttatacagtcaacatctttaccagacttctcaccatttcccccaaagcatcatgatttttacatgtccatgctt

SEQ ID NO: 137932 - DNA, 577 bp, Homo sapiens
aatcctttccttactgaaagtgttcactgtgctacagtgatctgtcccacaaaacagggaccaagaaaaacctaatcctaccaactacacctctcctggttatagcactgtgactcagagccaagcaagaacataaccaagtacaaaagaatccctcacttcaaagacacacatgcagtgcccattttttccataaaattgtattttttaaataagtctttaaaaaggcttattttcccattttttaattaacctgtgaaagattaatcataccttttgatggaggtaacagccactkaaagagtccaatatgaaggatttagtatgagcccctaaattttgccccaaaacatctactcttggtatatgttgacacctaaaatttttagaatcatagtaatagaaataataacgatgactaaaattattgagctcttatcatgggcttagtatacatgctaggtgctttgctatgccctttacgtgaatcatctcaatttcagcctcagttacaactctttgaggttgtgcagcattttaggtagatcacagatggcagaaaagaaagataaacaca

SEQ ID NO: 137933 - DNA, 645 bp, Homo sapiens
ccttgattgttacaattaaaatatatcttttgaagcatgctgatttgcatttcttttgcccttttgtctgagtttctggtagcagcctgacacagaaccaggaacactgatattgccccagccactggcaagctctaggatcttgtgtagagatcatatggtaaggaaaatgaatgtggactttggagccaaaaaaattcatgccagctactaactgtgtggccttgatgaaatttacttcacctttctgagtgtccatttcccaatctgtaaaaggagtataataatctctatcttgcaaagttagggtgagratggaattaggtgacatgtataaacagtctacagtagtaggtgctcaatgaatggcatttatatcatcatcaccattatcatcatcatcatcatcaccatgagttattactgtctcaaggttggactagattagctttaaacctataagcacctttgtctgatatcttgtgagcctatttatgaccacatcttcatatgtataacagaaaattcgttgtttggaaattttgactcaatttatttggtttcaaataattggttactatctcactctctgagatattctagagcaatgtctccttgactcagtcatgcacttatccattattg

SEQ ID NO: 137934 - DNA, 361 bp, Homo sapiens
aataacggtactaatttttgaaagaaagagctacagaaatatttagaaatatactaacattagcaaaaaagaatgatagaaaatatttagtattattattgaackcaagaagttaaaaaataacaaatgaataaacataaagaaagcattggaaagttataagaaacaagcagaagttaataaaataaacaatgttggggtttttttttttttttttggatatgaggtcttactctgtagtccaggttggagtgcagtggtgtgatgtcagctcactgcaacctctgcctcctggactcaagggatcctcccacctcagcctcaaaagcagttgggacttacaggcatgagccaccacccc

SEQ ID NO: 137935 - DNA, 361 bp, Homo sapiens
aataacggtactaatttttgaaagaaagagctacagaaatatttagaaatatactaacattagcaaaaaagaatgatagaaaatatttagtattattattgaactcaagaagttaaaaaataacaaatgaataaacataaagaaagcattggaaagttataagaaacaagcagaagttaataaaataaacaatgttggggtttttttttttttttttggatatgaggtcttactctgtagtccaggttggartgcagtggtgtgatgtcagctcactgcaacctctgcctcctggactcaagggatcctcccacctcagcctcaaaagcagttgggacttacaggcatgagccaccacccc

SEQ ID NO: 137936 - DNA, 499 bp, Homo sapiens
  misc_feature (1)...(499): n = A,T,C or G
aatgttatttttatatcctttgctgcaaaattctattatattcacaaataataactaaatgcctcaaataaataacttaaatactccaatgaaagaactgataaaagaataattcatctacatgtagatttaatgacataaaatgaccattcttaaaatgggtgttgtatttccttttaatgaccgatactcaartatgatagctaacagaattttggagagtaattatgaaagaaataatcatgcttatttatggtacgcatatatacattatatgtaaagagctttggtctcctgcttcctgatantatggtctcacattatctgagttcaaataacccacaatantcagtattgtatctcgtgaatcttagtattctcttacatgngtaaaatatgtagtaataataataacgacaccaaattacctgggttaatgttgagtaaataaatgagacaatgtaaatgctctttaaatggcaaatccatcaagaatata

SEQ ID NO: 137937 - DNA, 638 bp, Homo sapiens
gtggtttcactgaatacatcttaactgcatatacggacatcttgccccaagatttaagagctgtggaacttaaaaaaaaactaaacaatttgttctacacaatttacttaaaagttaaactaagtatgtatagtaaaaggtcctccaaaaatttagaatattaaattatttttagaaggcagatgtccttgtcttattctcattctatccacttcatctacaataaataaagtcttaaatttgaaatgcaaaacaatatatcttacttttaaaaatgaatcaaactggtttttggaatgcagtacaaggataattagtgttcttatgtgttccayccagcacttcattttttgatttcttaagaactgttgaaagtgaactaattactcatatgaaaaaaactgctgccaaaccaacaaggatcttatattcactacctcaaaccgtgcccatgaaaactaatgtttcagttcctagcaggatggactgcttcgtcattattcttcaacaccggggaggagagttaattcaacctcacttcccccttttatttttatcagactttcctagttttcttctcactcatctttttatttctaggactgtctaggacttggccaaatgttcaatgaattggg

SEQ ID NO: 137938 - DNA, 535 bp, Homo sapiens
tatggaactgtggtaatataagagagaattaaagcttagagttaattagaatagaaatttaggagtacagagaaatataaatatccctaagatgttttaaaagtggaatagaaagggactagcaactgacttaatgtggaaagagagggtgaacaagttgaagatgactcctgtttctgacttgtgagatttaagtggattactgtagaaattgccatgagggaatggaagaaaaaagctgatgtgaatcaagaaaagataaattcaataaaagaaatgtgaaattgagatgactgtgggaaatcaaaatagaaataccaaaaggtagtttgatataagtagtagkacattcatctcaatttgatcaagacagcgatggtttattcttgctgtttttaagtggagcactatctttcactcttacaaatcttactttgaatgatgaattaaatagtataaggctctgaagctgtagaaatctatctgtaatagaggtatagatttttcagttaaaaatagatagaggctaaatctg

SEQ ID NO: 137939 - DNA, 568 bp, Homo sapiens
tgtgcgatagatggctcttattattttgaggtattttccttcaactctttgttgagggtttttaatatgaaggaatgttgaattttatcaacagccttttcagcatctattacaatgactgtgtagtttttgtttttacttctctttatgtgatgaatcatatttattgatttgtgtatgatgaaacaaccttgcatccaagaataaagcctacttgatcatggaggaatagctttttgatgtgttgctggattagatttgcaagtacttcgttgaggatttttacatctctattmatcagggatattggcctgaagttttcttttttcttgttgtgtctctgctaggttttgctatcaaaattttgctggcttcacagaatgagttagggagatgtcctgcctccttgatgtttttggaatcgttgcaatgggactgctacttgctcttctttgtgtatctgttagaatttggctgtgaatccattatgtccagggctttttcgggtttgtagggtttttattacagattcaattttggaacttaatcttggtcagctgaagtactg

SEQ ID NO: 137940 - DNA, 537 bp, Homo sapiens
aattacaggtaatagttttaaagcaatatttctcttataaacatctgtggcattataatacaaaattgacttgatatttagatttttgttgattttgaaaagttcatcctagataaaaatgcaacttttatacaactaaatgaggtttctctttaagcaaaatgcatcagatagaaataatttccaattacatatttagagtactcatgaaagacaatttattttcttttgtttactctgatttcattttactagaaggtcatcagaagaaaagccacaatatgttgttacaaaaaatttgatgctgacaagaatgaaaaattatctttaaaatgtattttcatggatcataaatcctcttcaattttagctgcaaactatagaataatatgaagtgaatatgtctaatttgttaaggaatmttggtaataaataggactatgatagagtaatatgagttagcactgaagaacgaaaaaagttaggttgtataaaagctcagtattcgggataaatattttaactcaataatactaa

SEQ ID NO: 137941 - DNA, 537 bp, Homo sapiens
aattacaggtaatagttttaaagcaatatttctcttataaacatctgtggcattataatacaaaattgacttgatatttagatttttgttgattttgaaaagttcatcctagataaaaatgcaacttttatacaactaaatgaggtttctctttaagcaaaatgcatcagatagaaataatttccaattacatatttagagtactcatgaaagacaatttattttcttttgtttactctgatttcattttactagaaggtcatcagaagaaaagccacaatatgttgttacaaaaaatttgatgctgacaagaatgaaaaattatctttaaaatgtattttcatggatcataaatcctcttcaattttagctgcaaactatagaataatatgaagtgaatatgtctaatttgttaaggaatcttggtaataaataggactatgatagagtaatatgagttagcactgaagaacgaaaaaagttaggttgtataaaagctcagyattcgggataaatattttaactcaataatactaa

SEQ ID NO: 137942 - DNA, 631 bp, Homo sapiens
gctttataagttgttgctatacctttcaatttagaaaaatgtagtcctaaaaaggagaaaatgacatttcagaataactgtttcattatacagggtaggattgaacaaaattggcataagtctrtggaagaaaaccagagagaaaaggaagaacaaaccttaaatacagaagatataaatttactgagtgttacagaaaatagaaaataagtcaacacaagagccactaaaaatatttgagacaatgtggctatggtaaatatgacataaataaataaaaataaagctattttatctttaccaatctgatattcctacatctattttactaaagtaaaaggatcttatttatagtaggtagaaaggaaatgttaacagaatgtttaacatttatgtagtataaattaacgttattgtaatgattattaattaaatctttttgcagtgctccaaataaaagtataataaatgcagcaagtttttagaaagtgagctattatataggtatgttgccctgtatttattttgtcctttataattgttttctagctttttaatttctccatatgatagtttatttttacaataatgaatttagttgtgtaattcaaatataaatagagacatggaa

SEQ ID NO: 137943 - DNA, 631 bp, Homo sapiens
gctttataagttgttgctatacctttcaatttagaaaaatgtagtcctaaaaaggagaaaatgacatttcagaataactgtttcattatacagggtaggattgaacaaaattggcataagtctgtggaagaaaaccagagagaaaaggaagaacaaaccttaaatacagaagwtataaatttactgagtgttacagaaaatagaaaataagtcaacacaagagccactaaaaatatttgagacaatgtggctatggtaaatatgacataaataaataaaaataaagctattttatctttaccaatctgatattcctacatctattttactaaagtaaaaggatcttatttatagtaggtagaaaggaaatgttaacagaatgtttaacatttatgtagtataaattaacgttattgtaatgattattaattaaatctttttgcagtgctccaaataaaagtataataaatgcagcaagtttttagaaagtgagctattatataggtatgttgccctgtatttattttgtcctttataattgttttctagctttttaatttctccatatgatagtttatttttacaataatgaatttagttgtgtaattcaaatataaatagagacatggaa

SEQ ID NO: 137944 - DNA, 473 bp, Homo sapiens
tttcaacttacattagctacataggtaattattctgttgatgttttggcacaaaatttagaacgcttcctatttgatcatatgacccagaatattcttccagctgtaataaataatatctatttgtgctatttactccctcacatggtattatatatatatataattatattttgcatttgatctatattgatwacatttaaattttgttccatatacagcacatgaagataattggcattgtaagataatatgctctttgtatatttgatggcatttaaatttagttctctacacagaagataaaaataattagcattataaaatcacataccctttttgaagaacagaatatacgatactagtgtatttaccatgatgattagttgaacaggtgcattaatattggtcatgaaaatgttggctataaatcagaggagaaatcattttaaatacataaaatatttgattaat

SEQ ID NO: 137945 - DNA, 432 bp, Homo sapiens
taaattttacatgtagtacattcatttactattgctggttataaattactaaaacttagcagcttaaaaaaatttacatttcttttttttttaatttcmcttttattttaggttcagggatacatgcgcaggtttaatatataggtaaatttgtgtcatggagatttggtatagaaattatttcatcacgcaggtactaagcctagtacccattagttaattttcctgatcctctccctcctcccactctctcctctctgaggccccagtgtgtgttgttcccctttacgtgtccatgtgttctcatcatttagctcccacttataagtgagaacatatgatatttagttttttgttccagcgttagtttgctaaggataatggcttccagctccatccatgttcctgcaaaggacatgaactcattccttt

SEQ ID NO: 137946 - DNA, 434 bp, Homo sapiens
ttgtatttcctttacccaattttttcctaatggcaatatattgcaaaaactatagtctgacatcacaaccagactattgtcattaatatagttagcatgtagaatgttttcgctagcataaagacttcttctattgcccttttatagatgcatccatctcacttctgttccacgcgtttctttcatcactcagaataattctctggagattcactcacgttgtttsgtgtatcaacagatcattctatgaaattattgaatagcattccattttgtagttataccatagtttctttagcagttcagctgttgaaaaacatctagttgtttccagtttttggctattacaaataaaactgctataaacatttgtgtataggtttttgtgaacataattttttaatttgttttctggaataaatgcttagcagtgc

SEQ ID NO: 137947 - DNA, 570 bp, Homo sapiens
ttgtattgcaccttgaatagcagcccagccacaataagataggaaactgggcaaagtcatgaggcccccattccaggcccaaggtcactgacatttcaagacacatcctggaacgaaagagaaaccagtgccttgatgagaaggaccaagtcctagcaggattcatcacctactgactaaagagcccttggacccctaataaccatcagcgatacccaggtattaygccatgggccttgggctctgagatgtgctggctttaggggtgacctagcatatgcccagctgtggtggctatgccgaaagactccttctgtttgaaagaagcaaaagaaaaagtaaaggggactttgtcttgcaccttaggtaccagcctgaacacagtggatagggcaacaagcaggcccttggggtccttaagtccaggcctaggctcttggatagtatttctggacctgcgatgggccagaggagggccaactgcactgaatggggagcccttggctttaagtgaacaacagtggtgacctggtaaaaccctctgtgggacagtagtggctgtggccacaa

SEQ ID NO: 137948 - DNA, 451 bp, Homo sapiens
ctataaattctcaagctttcttcattcctttgcattctttcattttttctctaactgtatattttaaaataacctagttttgagttcagagagtttttcttctgcttgataattctgctcttgataatctctattgcattttttacttgaatcatcatrtttttttcatctccatggtttcattttgttttaattaccatctttggttttttattttttcatttactatttttctaatattattgaatcctttctttttattttcttgaagtttgttatcttctttaaaacaattattttgaattttttttgtcagcctatttatatatcttcatttttggggggtggggtgtggctgcctattgggagattattgtagtgttttggtgtttgctctggtttgaatatttgtcccctccaaaactcatgttaaaatttggtcactgtcgtg

SEQ ID NO: 137949 - DNA, 586 bp, Homo sapiens
ttagataggtaagatacctcaaagtggatatccagaatgttaaaagtgaagaaataartaaataaaattgaaaatctggtcagggattcataagtgagaagataaagtaagatcggctatgtgaaaacaactgatgaagctgagtttgccagatgttcaggttttgcccatttgagcttatttcattgcagcactgttttctgtgctgatagagcactgatagagacactgcctcacactgtgacaccttggcagtaaagcagctgcccccttttcattttacagcacctctgtacctgtagcttaatacaagcaagcttaaaatggcacactagacatatgaacatggtgcaaggttgtatattcttataaagcattatttcttcggacattaatgcattatcagttttcaggcatcactgcaaagaacaatattccaacacagattttcacagcttttcaccaaggtggatatttgcttaaatgattttttcattgaatatgtacaattcttatattgtgaactatgtattttttcttcttattttagtacaaaaattatttgtgtcatttatgtgacatgtgt

SEQ ID NO: 137950 - DNA, 532 bp, Homo sapiens
tttagagatgtctgaataattaaacagtcaattcaaaaatttctcacagattagttgattatgactctctctgataaaattgttatgaaaattgaaacaatgtatttcaaaaatgaattttgcctggcagaataatgattttgatggtttttattttttattttttttgagatggagtctcgctctgtggaccaggatggagtgcagtggcgcgatctcggctcactacaagctctgcctcccatgttcatgccattctcctgcctcagcctccccagtagctgggactacaggcatccgccaccgcgcccagctaattttttgtatttttagtagagacggggtttcaccrtgttagccaggatggtctcgatctcctgacctcgtgatccgcccgcctcggcctcccaaagtgctgggattacaggcgtggccaccgcgcctggcctgacctgttcttcataagtattccctaaacactctttccaccttcccccaacactaccagttttattagagtaactgaacctca

SEQ ID NO: 137951 - DNA, 532 bp, Homo sapiens
tttagagatgtctgaataattaaacagtcaattcaaaaatttctcacagattagttgattatgactctctctgataaaattgttatgaaaattgaaacaatgtatttcaaaaatgaattttgcctggcagaataatgattttgatggtttttattttttattttttttgagatggagtctcgctctgtggaccaggatggagtgcagtggcgcgatctcggctcactacaagctctgcctcccatgttcatgccattctcctgcctcagcctccccagtagctgggactacaggcatccgccaccgcgcccagctaattttttgtatttttagtagagacggggtttcaccgtgttagccaggatggtctcgatctcctgacctcgtgatccgcccgcctcggcctcccaaagtgctgggattacaggcgtggccaccgcgcctggcctgacctgttcttsataagtattccctaaacactctttccaccttcccccaacactaccagttttattagagtaactgaacctca

SEQ ID NO: 137952 - DNA, 356 bp, Homo sapiens
tagatatctgccctcaatttagagcttctttcttctgctaaatacccagcatcacattgagaaattactcctcttttgttggtttgctaagtataatttattaygagtaggtggtgatttttaaaaatcatttagccttttttattgcctcattaagacaagtatataatgaatctcatttaatgtgttaatgcattcatttatatatggaatctcccttccataatgtgcaggtacttaatgcattgctgacaccactctcttaatatttaaaaaataatgagggactacatttctggtcgagattggtccactcttttccattgcagtagtgttcttcttcgggttttgtagaa

SEQ ID NO: 137953 - DNA, 638 bp, Homo sapiens
aattatgaagataaaattttaaaatattatttaaaataacattaattgcataaaattttttgaaattgataatttagaaaaatgtgaatcctctatgaaaatatattatccttttaacatttataaaattataaaatggagaaatacctcccattgtagactacaagatttaatcctctacatgtcaatttcctccaaattgaaagagattttcagtgcaatgacaaagagaatcccaggaaagcctaatctggggaaaagtggtaaaggagagaattttacaaactgattttaaaatgtatatggtaatgcagaaattaccagcaatcgggaaaattmtgaagaagacatttattggaaatacactaacagataagatttctaataaatcaaggcagaattaacctgactccaacaagatcacaacggagaaagaaaactacagggccgtatccctgatgaacaaaggtacaaaaatcctcaagtaaatactagcaaaataaattcaaacacttattcaaagatcattcactataatcaagtgctattaatcataaggatgcagggatgattccatgtatacaaatctcttaatgcaatatatcacattaccagaatgaagaacaaaaactaagaat

SEQ ID NO: 137954 - DNA, 457 bp, Homo sapiens
ctggttcatctatcctccaactgttgtaaaaagtgtatggtgatgatttataattgcataatggcttactcctccagtaagaaccatcctatatagaaggtatcttgcctgagagattagtcaccaacaaccagccagtggtgaataaatgaattaataaattactttcatgagagtacaaagggcccatactacaaatgagtaaatatgtaagtatgtaaaattcataaaaaatttctgggatatataagtaattattccctggtacataaataataacactatctttgaatgtggaaaggtgaaatatgttatggcaatcatcaaacacatcaaccacagtttttctcactttaagtgacacagttcatgggcttcccagatgagttctcatgactatttctatcccaatgcacacacttttttaatagkctgaacataacttttatgatgaaat

SEQ ID NO: 137955 - DNA, 544 bp, Homo sapiens
ctgctgataaagacatacccaagagtagacactacacaaaagaaagasgtttaatggacttaccattctacatggctgtcaaggcctcacaatcatggcagtaggcaaggaggagcaagccatgtcttatatggatggcagcagggcaagagagcttgtgcagggaaactcccctttttaaaaccatcagatcacttgagacttactcactaccatgagaatagtatgagggaaaacacccccatgattcaattgtctcccactgggtttctcccacaacacatgggagctctgagaagaaggccaccatcctccagactccagaatggtagatcaacacacagctttcactgtgcacctggaaaagctacagccactcatcaccagcccataaaagcagccaggagaggggctataccctgcaaagcactagacagtgcaccaggagggactctctttggggcctctgaccccatgtatccctcccacactgcactagcaaagattctccaagagggtcctgcccctgcagcaaactgcctgg

SEQ ID NO: 137956 - DNA, 608 bp, Homo sapiens
tacaaagccccagattttgctcctgtgaatacataaagagaaaccctcagctcttgcatgttaggggttcctgaaaacaaaatccagaatctaatcctgtttgggtmtgagctatagcacaaaaggaatttcaaaatgcttaaggtctcttacgttaaaatagagcattaattttataagagtaaagccttgaaaaatgggatgggtatgtaggtaaattcaaatgaaaccaaagaacttaagcttataaactattctgattttatttcaccagttaaagcatctctttgatgattaccctctatgatcttaatcttcctttgtctgcaaaaaaaaatataataactttccgtaaaataattgctttgtaaaacactgatgatcctttgcaggatttatcccctcattagtttcctatggcttcagtaacaaattacaacaaactcagtgacttaaaacaatacaaatttatcatcttatagtcttagaagtcagagttcaaaatgggtcctatttggctaaaatctatgtatctcagcaggtctccatgtcttctgggagctctaggagagaatttatttccttacattttccacctcctagaggct

SEQ ID NO: 137957 - DNA, 410 bp, Homo sapiens
tcatgagaaatatatccccttgatccaatcagctcctaccaggccccacttccaatactggtgattacaattcaacatgagatttggggtggggacccatatccaaactatatcatggggtcttgctatgttgcccaggctggtcttgaattcctgggctcaagcaatcctcctgcctcagcctcccaaaatgctggtattacaggtatgagccactgtgcctggccaagaggattcttttataagggcactaatcctcatgatctaatcatccccaaaggccctaacwctaataccatcacattggtgattaggtattccacttatgaattttgaagagaaaccaacatttagaccatagcaactgggctctccagccatggaaaatgggttagggaaaatatgagaac

SEQ ID NO: 137958 - DNA, 570 bp, Homo sapiens
cacaatttttacaggcttccttgtctccacactcaggaaacgggtagatcaagaagcagattaggtgctcattcatgcagcaagcagtttttgagtgcctactctgtgccaggtactcctagagcaataggatgatgaaattacagtccccatcactggggagccatgctgcagtgaagaagatgtttattgattcactcactcactcactctcattcatttggtcaattatcacccatttgccagggtctccacatgcaggttctgtgctgggctctgaagcacagagctgggaacagggcagggagcctactgcagaggtcaggctggagtcccttgaggcctcarcctctttctgatgtgtcttcccacttcctgtcacttggcctcagtctctccatctgaacgtcaaggggtcacttgagctggtctccaagctccaggcccacaccaacattccagatttctcagctaggatggacaaatgctgagtgacacccccatccctgctcccagcccacacactcacttgaagcgccagcatcgatcggcttggagctcattagcggc

SEQ ID NO: 137959 - DNA, 570 bp, Homo sapiens
cacaatttttacaggcttccttgtctccacactcaggaaacgggtagatcaagaagcagattaggtgctcattcatgcagcaagcagtttttgagtgcctactctgtgccaggtactcctagagcaataggatgatgaaattacagtccccatcactggggagccatgctgcagtgaagaagatgtttattgattcactcactcactcactctcattcatttggtcaattatcacccatttgccagggtctccacatgcaggttctgtgctgggctctgaagcacagagctgggaacagggcagggagcctactgcagaggtcaggctggagtcccttgaggcctcagcctctttctgatgtgtcttcccacttcctgtcacttggcctcagtctctccatctgaaygtcaaggggtcacttgagctggtctccaagctccaggcccacaccaacattccagatttctcagctaggatggacaaatgctgagtgacacccccatccctgctcccagcccacacactcacttgaagcgccagcatcgatcggcttggagctcattagcggc

SEQ ID NO: 137960 - DNA, 570 bp, Homo sapiens
cacaatttttacaggcttccttgtctccacactcaggaaacgggtagatcaagaagcagattaggtgctcattcatgcagcaagcagtttttgagtgcctactctgtgccaggtactcctagagcaataggatgatgaaattacagtccccatcactggggagccatgctgcagtgaagaagatgtttattgattcactcactcactcactctcattcatttggtcaattatcacccatttgccagggtctccacatgcaggttctgtgctgggctctgaagcacagagctgggaacagggcagggagcctactgcagaggtcaggctggagtcccttgaggcctcagcctctttctgatgtgtcttcccacttcctgtcacttggcctcagtctctccatctgaacgtcaaggggtcacttgagctggtctccaagctccwggcccacaccaacattccagatttctcagctaggatggacaaatgctgagtgacacccccatccctgctcccagcccacacactcacttgaagcgccagcatcgatcggcttggagctcattagcggc

SEQ ID NO: 137961 - DNA, 503 bp, Homo sapiens
ggatagagggctgtgtttttgaagtgccttaaatagaagctttgtcaaatctcccagccctcaccgatgggcrtctgtcaagttcaagtctgccatttttgtatttttacagacgtgtgtgggtttcactgggaattggaagcataaagttgtggagtggagaattagtttactctttaaaatacttctctggatctccagagttattttaccccagactaaaagcaattttctgtagtatatttagggtgaagaaggatgcccaaaaagggtattgctgatgatcttctgagaatgagtaggttctagcgtttcctctgctttgatttgtaggtcttcacctagtatcttgacattgacagccattcgccaccatgtccttggaactatcaccaccgacaaaatgatggatgtcactgtgactatcaagtaagatgagcgttctgcagtgggccgagagtggcgggagagggtgtggatgaggcctggggagtctctaatag

SEQ ID NO: 137962 - DNA, 374 bp, Homo sapiens
aagacacttggattagttactgaggaaccggagacaggatccctttcccaagaattctgtaaccccaggatagagggctgtgtttttgaagtgccttaaatagaagctttgtcaaatctcccagccctcaccgatgggcatctgtcaagttcaagtctgccatttttgtatttttacagamgtgtgtgggtttcactgggaattggaagcataaagttgtggagtggagaattagtttactctttaaaatacttctctggatctccagagttattttaccccagactaaaagcaattttctgtagtatatttagggtgaagaaggatgcccaaaaagggtattgctgatgatcttctgagaatgagtaggttct

SEQ ID NO: 137963 - DNA, 697 bp, Homo sapiens
tagataggtaatcataaaaagggcactttatggactgatcccattttaattgaagtaggaaagttgtcatatgagaataacttacacacttacaaagatgactaaattgttacaatgtgccagagataacactggaaatagacatgaagtaacccaggatccgttccttaccaggggcacagattttggaattctggtggcagaaactgtttttggacacaatcctggactgtttttttattatctaaatcatgtttattttcaataaatattttgatattaatattgtaatcacttaataaatgtcttaactaaattgagcataaaaatcttactatattccaaacccaagcataagtatctccttgtatctgttgttattaattattccaacttcttagaagtaaaataattgaagaatagagagagcaatgtgaaagtgtctttaatttactgtatttttcatcaactgtaagtcttctctcccttttctaatcagaattataaaagtaacttttttttgactaatctgactctaatttttggcgggcaatttcatatatgttacaatttccataactcctcttatttaaaaaataacccttaaccctaagcattcctaaccttcaagcagacaaaactttctgtgtaccatcgtccaactggyaaacacatctccatgtactgatgccgtttg

SEQ ID NO: 137964 - DNA, 580 bp, Homo sapiens
tacttggaatattaagtattaataatatttttggaatacattaattaatttacaagaataatgttttctataaaacttaactcttctggctttcaaataaataaactcttcctctttgtaagtactaaattccccatgaaagcttttggtcccaccttcttattttctttgtgaccttaatatattaagcatgtctctcttatttgctttctcaagttgtctttttcaactagttctttcccttatctacagaaatatactctttaacaccatttattaaaacaaagggttgaaatctctgatgctcagagtatgcagaatattartttctctctctctctctctttttccttttctgccaaatttcttatagaaaataatcatcgctttctatgaatcttttcattgctgagggttccaagctggtgagcacaacaagcccgggaaatccatgcaatcttacatattggtgccactggaaatttatgatctgcaggcacagctggggcctcagggaagctctgccaaccttctccttctccttggtcaacttaccctgtaatggaactcagtacctatt

SEQ ID NO: 137965 - DNA, 584 bp, Homo sapiens
tgaactggcctttgaaaacacacatttctatgtcaaccaatttgaatcttttttatraactggagatgatttttgtggattacttatgtaattttaagaaactggtaaaaaaaatcaaagataagcacctaaatgcaaaagataaacagaaaatattcatattgcctatgtaaacacacaaaagtatgataactagtatattatctctttgtattcaattccttgataaggtttgactgtgaccctacccaaatctcatcttgaattgtagctatccataatccccatgtgtcatgggagagatctgatgggaggtaattgaatcatgggtgggatttttccatgcttttctcatgatagtgaataaatctcatgagaactgatgggttttataaagggcagtttccctgcacacgctctcttgccttctgctacgtaagacatgtctttgctcttccttcaccttccaccatgattgtgaggcctctctagctatgtggaactgtgagtccattaaacctttttttttttccaataaatcacccagtctcaggtatgtctttattagaagcatgagaatagac

SEQ ID NO: 137966 - DNA, 529 bp, Homo sapiens
catcacaaaacattgctacttttattagactggtttagatatgtctaaacaaaagtaaacttttgctatagatgcttgcattatatacaattggttttgatagatcttcagtaatgaagggaaggttatgttttcactgttttttttttttcttttttctttttttttagacagaatcttgctctattgccgggctagagtatagtggtgcgatctcagctcaatgcaacctccacctcctgggttcaagcaattcttctgcctcagcctcctgagtagctgggactacaagcacacgcctccatgccyagctaagttttgtaattttagtagagacggcgtttcaccatgttggccaggatggtctcgacttcttgacctcatgatctgcctgcctcagcctcccaaagtgctgggattacaggcataaaccaccatacctggccatgttttcactgttataaatagtgcctctgttactgttgttttgctttagctctactttaagttaataatgatgcaccatgta

SEQ ID NO: 137967 - DNA, 557 bp, Homo sapiens
cttttctggaatagttcatttattatcctttttacattgtaaatattgatataaacatcttaattttattcatgtaaataggcatgtccattttgttttatattttgacctcaaatgatattcattcttttattctttgcatttttatagcagtatatttgtaagaactgatacaataaacaatgcttaattaaaattttatattaatcaaaagttcatatcgatattgttactttaaaatgtcacagatttttatatataaaccaaaagcttttggggtcctaagtatagttaaaatytttaaatgttattatacatatgacatacactaatcattttaactcctaattaacattttcataaagaaaagtgtcttgaatatatgaagtacattagaggttaagactaatattatgccaattgattcatctctccttgtttgccaaaattgcagatcacacatttgcaaatggcacattcaaataaagataacaattcaacaaagctttggtatttgaactacttttgaattagttaatactagtttttacaaacta

SEQ ID NO: 137968 - DNA, 357 bp, Homo sapiens
tactgtttgaagtaaaggcaatgtttgctcaaataatggatttgcacagtattttgacaagaataaacttccctcatgcttctggtgctgtaggcctgaacggtgcctgggagtcagtactgtgcttctgaactacttcttatgaacaggaaggaaatggttataatggtggtttaagcaggagcttgctaaaagtcagttagcctatggcactacaaattattataataggcaacgattttcagaaaagrctttcaacttagagaaaatagacagcacagaacatccactggtcacaaaagcttggattgttctaacttcatagttcagaaaacccaaggaggaggctctagcttc

SEQ ID NO: 137969 - DNA, 349 bp, Homo sapiens
aagaataaacacaaccatgaagtaatttactatgsaaggaagaccaagttgagtttgaaaatctctgtattggagatttaactcatacgtgacttcagagaagttatttaacttatttaagccttagtttactaaactcaaatttggaagcactgaactattttaatgtctaaactgtccaaatatgtatttttttattaaacctaataaactgcctaaaagttttatgtctaacttttagtgtctgaattagtttatgctaatacctacatagtgtaaaaatttaccaaaagctttgttgtctcaattgttttgactatattatgtggtggacttcttagagaggcta

SEQ ID NO: 137970 - DNA, 659 bp, Homo sapiens
gtgtacccacaggtaaaattccatcgaggtgtagactcaaggtttgtgccctttactttttgtaacatgtcttaattaaaaatgtaacaaattaaaaaaaaacatacygttttgtagaagtttccttagaagtgaagttagtaaataaattgaagaatgattgtcctctggtttgttcaaagctttgccacgtgttatctaccaaaatactaccaaaatatcagagcttccaatacaaaacagttgggccagtgtttggctattgcagtcttgattttttcattaagtgcaggaatctaactccttcattatatattatattgcactatatgcattgcattattttatatgtttattgtaagtctactgtgaagtggaatgtatttacatattaaaatatgtgcctttataataatacattccttttatttctctttcataatttgagcatcctgttgactttctgaaattgagcatagacatatattttgtagtaagatagataaggggctgttatggtttggatctgtgtcttcaccaaatcacatgtcaaattgtaattcccaaagttggaggtgggcctaatgggaggtaattgaattgtgggagcaaatttctcatgaggggtttagcatgatccacttggtgctgtcattgtg

SEQ ID NO: 137971 - DNA, 640 bp, Homo sapiens
gtgttataatgggaatgtagataaggagctgattattttggcttccagttttaaaaaatacattaaactgcttcttgctttatctaaagaatgcatacaaatacaattttcatattaaagatttgaaaatcatgtaaagctatacgtacaatcatgtgctacgtagtggtatttcagtcaacaatggatcacatgtatgacggtggtcccataagattatagtagaacatatatagaaacctgatatgtcacagttgatattggcattgcagaacaagtaggggaaattgatattcagcaatggycctgagacatttggttttccatattaaaaatatataaataaaaatatctattccatctaggtcggtgtaagcacactctatgataagtggcatgactgagtcatgtgctacataacaatgttttggtccatgatgaaccacatctatgatggtgatactatgagattataatggaactgctattgcccctgaagactttccaatgggacaagatgtagaggtggatgacagtgatattgatgatcctgaccctgtgtaggcctaggctaatggtgtgttttagttttaaacaaaaattttaaaaagtaaaacaaaaaaaattagaagaaaaagtt

SEQ ID NO: 137972 - DNA, 296 bp, Homo sapiens
tataaaagtgagagtttcttataaaatccaatcaatatttatatttgtatgaaaagcattgaagaagcaaagttgtcaagcctctacctttctgacatttataatccagatggggagataagatataaacatatggaacattttatgacaaaagacaatataactagcttttcaaaaaaactttcaaagagatttyactgtctgtatatgattaattcttcataaaattccctgtagaaattatattgctggagaatttcagaggagaaatttacttccactggagagaactggtg

SEQ ID NO: 137973 - DNA, 499 bp, Homo sapiens
tctgttttcagagttcttccagagcaaagtgaatctctaattgtaatattgggcatccactcatcttgctccttatttttaatcattatgcttctagcgttttaagattaagcatgatcctggcttttggttatatatgctattatcttaatttagtaactagacatttttactataytgacttaagtcagaaatcaataactttttaaaccgatttttataaagtagtttttataaatgaattttgccatttagatgactatattataaaattcattttataaaatcattttttgccatttatttggatgactatatgatgaacattattaacagaattcttaattttgagccatccttgccttcctgaaaatatgaactttgttttttatggtggcaatgatatgctaactttacaaataatttgggaaacatttctttttttttttttcatgtgttctggtatagtttaaatagcatggaatttttatcccttgga

SEQ ID NO: 137974 - DNA, 565 bp, Homo sapiens
ctgaaatctaaggcccccctgaggacatctgagtcaccccaaataatcagaagaatttctattctggtaaaatgttcactctcccaaacttgcttcacctttatggcagttagaagctcattaaaaagcttctgtttttacatagcatatagaggccmtatacatttacctgctctacctttcgaaacctcattgcataacataaaatgaagaaaaaaaaaccctttgctttgtattagtttactgaagcttctataacatgaccacacatttggtggcttaaaacagtaataattaactccctcacaattctggaagccagaagtctgaaataaatatcactaggaagaaatcaagatgccagcagggccacgagccctctggaagaggggaagctgttcctcaccatttccagcttctgatggctgccagtattcctcggtgtgggggtgcattattccaacctacctttgtggtcccattttcttatccctttctgcctgctacaaatctccacctgtctctctttgatgaggattcttgttattgcatttggagccctgca

SEQ ID NO: 137975 - DNA, 508 bp, Homo sapiens
gttgaagtctgtgaaaaaaatgcaccctcccagcaatatatagttggaaaacggaagagtattttaatagccctttgagataattgcagattgaaactacactccaacttgaaaaggagtagtttcttaaaggtcaattgcaaggcagaatctgaaaccacatcaatgaactttttgactctattacagtaaagtctgtcctgcactttgaatatatttttacccrtgcatggaattttgtagcatcatgcatttatcatttggaaaacctttgttcacagagttataaagatctcccaaatgttgacaaatttcgttacataatatcaaaaaattacacttgttaatattaccactaatctcatcagaaaatttggtaattactggaaagctcttaagttcctagttgccaatacaagttttccaaattctgattttttgaaagcttgcattttatcattaccagtaaggccactttatttattttcaaaaaatgtctggcaaatac

SEQ ID NO: 137976 - DNA, 673 bp, Homo sapiens
gagaagaaaataaaaaatacacagattgaaaaggaagaaataaaattgccttcattcacagatgatgtaattatctatgtagaaattcagaaaaagtcaacaaaaaaactggaactaataagtaaactatagcaagatagcaggatatgaggttaatatgcaaaagtcaattgctttcctatatatcagaaatgaacaagtaaaaattttcattggcaaattaaattaaaaacataatrccattggcattggcaccaaaaaaggaaaatatttaggaataaatctaacaaaacatatacaaaatccttatgaagagaactacaaaactgttgaaaaaaaatcaaagaaaagcaaaataactgcagacaaattccacaatcataaatagaaagacttgatattgtccagatgtcagttcttttcaaataatttacagattcaatgcaatcccagtaaaaattctagccaattattttgtgaatattaccaacctgattctgaaggttttatggagaggcaaaacatccaaaatagccagcacaatattgaagacagaaataaagttggaggactaatacaatccaacttcaagacactataaggcaacagtaatcaagatagtgtgatactggcaaaataataaatagatcagtggagcagaatggggagtcta

SEQ ID NO: 137977 - DNA, 673 bp, Homo sapiens
gagaagaaaataaaaaatacacagattgaaaaggaagaaataaaattgccttcattcacagatgatgtaattatctatgtagaaattcagaaaaagtcaacaaaaaaactggaactaataagtaaactatagcaagatagcaggatatgaggttaatatgcaaaagtcaattgctttcctatatatcagaaatgaacaagtaaaaattttcattggcaaattaaattaaaaacataataccattggcattggcacyaaaaaaggaaaatatttaggaataaatctaacaaaacatatacaaaatccttatgaagagaactacaaaactgttgaaaaaaaatcaaagaaaagcaaaataactgcagacaaattccacaatcataaatagaaagacttgatattgtccagatgtcagttcttttcaaataatttacagattcaatgcaatcccagtaaaaattctagccaattattttgtgaatattaccaacctgattctgaaggttttatggagaggcaaaacatccaaaatagccagcacaatattgaagacagaaataaagttggaggactaatacaatccaacttcaagacactataaggcaacagtaatcaagatagtgtgatactggcaaaataataaatagatcagtggagcagaatggggagtcta

SEQ ID NO: 137978 - DNA, 490 bp, Homo sapiens
gttttgttttattttttccctgagcatttacatattttacttactacttgcttgcatggtttccgaggagaaattagatttgattgttacctttgctcttctataggtgttttccccctctggctcctttcaggattttttctcttattattaactttctgtaatttgaataagttatgactaggtataatgttttattttaaaattttgttttgttgtgtgtgtgtgtctgtctgtggtatttatcctgtttgatattctctcagcctctttgattagtggttttgtgtcttgtattaatttgatggcatctctcagtcattactgtttcaaatatttctcctgttgtttttcctctttcttttttttctggagtttctcatgcacatgtgttgcattgtttrtagctgttccagtttttaaatattctgatctggtttttgtttgtgtgttagttttttaatcttttttatctttgcttttttttttt

SEQ ID NO: 137979 - DNA, 399 bp, Homo sapiens
catctctgccaacatccaacatccctgtctggttttcatgcttactgtgtctcttcaaatgtttttttttctttaatttgccttgtaatcttttcttgaaagctgcgcatgatgtaccaggtaaaaggaactagtgtatacaggactttactaatgtggtaggaaggtgtaggggaagaagaagcattttatagtyctctgagtagtgctcagtctttcagttagcctgtgcctctgggttgtggacttcacaggtatttctcagtcttcctcccccttaggtgagacaggggtctagagtgagctggagttgggtatttccttcctcccagtagaagactagaaggggcttgagttgaacattttttcttcttccaagtcagttatgatatgatagaa

SEQ ID NO: 137980 - DNA, 367 bp, Homo sapiens
aacaggcatgtgcagtggttaattactatatacatatatagcacacatatatatacacatacacatatagacatatatacacacgcatatatatgcatatgtgtatatatacacacatatttatatgcatatgtgtgtgtatatatatacactttcccttttaaaaaaattaaaacaatttaaaaaattttaattgacagagatgttcaaagtgtacaatgtgaagatttaatatgcatatatagtgtaatmattacattaatcaaattaattaacacttatcaccacccatgctgtacctcagatccccaaaacttatccatcttataatggaacatttgtagcccttgaccaacatctccctact

SEQ ID NO: 137981 - DNA, 367 bp, Homo sapiens
aacaggcatgtgcagtggttaattactatatacatatatagcacacatatatatacacatacacatatagacatatatacacacgcatatatatgcatatgtgtatatatacacacatatttatatgcatatgtgtgtgtatatatatacactttcccttttaaaaaaattaaaacaatttaaaaaattttaattgacagagatgttcaaagtgtacaatgtgaagatttaatatgcatatatagtgtaataattacattaatcaaattaattaacacttatcaccacccatgctgtacctcagatccccaaaacttatccatcttataayggaacatttgtagcccttgaccaacatctccctact

SEQ ID NO: 137982 - DNA, 580 bp, Homo sapiens
ctgctttaccgtccttttctgataattccatcatcttggccatcctgtggttggcctctcagggttgtctttttctcttgagaataggtgacattttctgtatgctgaaaacttttggatcatatcctaaagatgatgactgatgtgttgtggaacctctggatattrcatatttctttgaatagagttgatttcttttgttacaacaggcaattaacttaactagacaaaaactgtgactgctgcctcttgggcagcagctccaacctcattgtggttgtcttattcttattgagactgcttggaagcttgccctcacatgtgtggttcggtggtcagccagagatttgggaagagtttgtacagggaatttagagcttcccatttctggctctccacatcttgggattcggccctcatgctggaagccatgaaaataggaactccacccagtgctgttttcttctctcagtgtcaacttccagaatccacctgttctgtgtcttcaaggagttggttttcttgtttttgttttcatctggaatttacagttgttacatgtcagagacttagactgttg

SEQ ID NO: 137983 - DNA, 484 bp, Homo sapiens
cctccaactccaccccagctgctagatgccaatccatttctaacctacctgaggctgtgatgcagctaaagcctccctaggcagaggagtaggagcttcataccagtcttgagagatcccaagctactgaaaatcttaaggggagccacctcaatccctggagcttagttggcttcatattgcctcaaattccagggatatgaaaatatccctgcctccttaaaggatcagtaaatccataagctcatctctatcagttagccattctcaaagcctgctgtcataggctgaataattttatagttttcttagttctttgaggtatagaaagctctagaagaggtgcccagagtcactctgggacaaatataagggcctaaggcagacttgaagacaggtgtcctgaaccraaaggaaatgccagactaaagaaaggttctgttcattgcggcaggcttcctgagaatgccttttttcctgcgga

SEQ ID NO: 137984 - DNA, 603 bp, Homo sapiens
gcctcttttaatgtaattaagcatattaatgaaggaagaaatatcataatcatctcaatagaagggtaaaaagcccttgaaaaatttaacatattttgataataaaaattttttarcaaaaatagaaaaggggagtatttgataaaggatagctagcaaaatttaagagcaaacattatactctatggtattaccttcaaagagaaaacaaaaatgctggtcatcatgacatctattcaccaaggtactggaggtcctagacaatggtgttagacaagaaaaagaaatgaaagatataaaaattggaaaagcaagaaaatgcttttgattatttttctgacaatgtacatatacaagagaaactgtcaaataattcaagtaatgcaactgttggataaaagattgttgtaggttgcgttccctgggaagctgactctaagaaggagattagtgtgcagagcttattaagtagtgctcttaatatcaatgcctgtgaaaagaaagggaacgaagcagaatcgggcagagggagaagttgagctgtaatgcaattctaaagtaggccctagaaaaccccatggggagatctgaagctggcaagtc

SEQ ID NO: 137985 - DNA, 444 bp, Homo sapiens
aattttttcttttctttgttattcttaccttattatgctgattgggttctccagtacaatgttgaaaggaatttttgatataargcatctttgttttgttcttgatctcaaaacaaaacaaaaaaatgaaatttttaacaattaaatagaatgtttgctatggattttttgtagatgccttttattcagctaagacatatctcttctatttccagtttcttaagcaatttttttctgtgtgtgtggaaaacttgatcaaatgctgtttctggatctataacattccacacttgatctgtcaataccctggattacactgaatgagttttcactgttgaaccaaccttgtgtcataaagccaggcctaatttattcagaatgtttcatgctttttagtgctttactaggaaatcattcttttcatatttaatgcagttgctgatg

SEQ ID NO: 137986 - DNA, 593 bp, Homo sapiens
tggatttatttttatttctcctgcttgaaattggttgcacttttgaacctgaatagttaggtaaattatgacaaaatagcttgtgagatgaggaagagttgaaaatatgatatcacaatgaaagaaataaccatatttggaaggtgtctgctggagaggtaggrgttgaaaccgtcagggccaggtgcttagaaaataagcaacatggagcagatgcaatttcagagttggtgttggtcacacctgaaggaaactcagaggctgtgtgaaatgtaaattacctttcttttcaacatctcactgaattcctattacaaagttataaaagcgagaatccagtaacaagagatttctaagattaattcttgaagtccatcaccatggtgaaaactctgaagaataagcttgaaccttagggtcacaattgcaatttaaattttttctgacgttaaaaagaaggttgaattttcagctgtgtcacaaaatttgagtatatgtattgaaaataggtataaaaatgacagcgtcaagcaaatgaaatctgttatcttcacagaaggcaacatatataaaatatagacaccttaaaactc

SEQ ID NO: 137987 - DNA, 534 bp, Homo sapiens
cctgccactttgaacacagcccttcttggccactatgtgcctgcaggttgcccattcccagactggactcagtctgcaggtctcacctccccagttattctcagcagctcaaagtgtgtgaaagcaagctcatcagattgtatgkcacataaaataaaagcattctgtggttcaatcccaccaccctaccccaccccacatccacttgtttctattaattattgtgtgccccagtcagttgtgacgtgagctctcattctgcctctggctatcaccccttaatgtgaagggcactccagcaggaatgttaatttttgacgttcagaactgtggctctggaatgaacttctataatcccaggagaactaataaggtgtcctatcaggtctcccaatctcagtaagatgttccttccagtcaaacatgttggaagaagaaaacttataaatcgatgaacaatattccaggattggcacatacaatcaccatgtgaagtcttcgccagttcttcccacttgtgaacagatatttccc

SEQ ID NO: 137988 - DNA, 459 bp, Homo sapiens
tagtatatctatacacacacacactatatatatatatatatatatatatatatatatatatatatatatgcatkcatttccctaaatgtaacttattacttctggttattaaagtcaggatattttgctaaagcaaatttgatgaaccaaaattcagatgaaacaaactgccaaaagcagcagctcagataaaagtcccactaattacagaaagcaagttttccatttttttcctgtaaagctcaacaccaagcagtttaatatttaacagaagtgcaagcatcatgccatggtcaacatgtaggggaatcccatcttttgcacttgaaactagcagttggttttaagtgttggaagtaacaacacaccatttcaagatgagctttattcctgacactctcaagttcatcctgtgtgattctagagccaatcacacccctttcctctgggccagacgct

SEQ ID NO: 137989 - DNA, 550 bp, Homo sapiens
acgtgcactatggtggtttgctgcacagatcatcccattacccaggaattaagcccagcatccattagctattcttcttaatgctctccctcctcccacaccctacactctgacaggccccaggatgtattgttctcccctcatttgcccatatgttctcatctttcttcttccatttatgagtgagaacacatrgtatttggttttcttttcctgcattagtttgctaaggataatggcctccagctctatccatgtccctgcaaaggacattatcttgttcctttttatgtttgcatagtataccaatgtgaatatgtaccacattttctttacccagtctaacatcgatgggcatttaggttgattccatgtcttttttatagtaaacagtgctgcaatgaacatacacatgcatgtatctttataatataagaatttatattcctttgggtatatatccagtaatggaattcctgggccaaatggtatttctgtttttaggtctttaaggaatcaccaaactgtcttgcacaagggttgaactaat

SEQ ID NO: 137990 - DNA, 550 bp, Homo sapiens
acgtgcactatggtggtttgctgcacagatcatcccattacccaggaattaagcccagcatccattagctattcttcttaatgctctccctcctcccacaccctacactctgacaggccccaggatgtattgttctcccctcatttgcccatatgttctcatctttcttcttccatttatgagtgagaacacatagtatttggttttcttttcctgcattagtttgctaaggataatggcctccagctctatccatgtccctgcaaaggacattatcttgttcctttttatgtttgcatagtataccaatgtgaatatgtaccacattttctttacccagtctaacatcgatgggcatttaggttgattccatgtcttttttatagtaaacagtgctgcaatgaacatacacatgcatgtatctttataatatargaatttatattcctttgggtatatatccagtaatggaattcctgggccaaatggtatttctgtttttaggtctttaaggaatcaccaaactgtcttgcacaagggttgaactaat

SEQ ID NO: 137991 - DNA, 550 bp, Homo sapiens
acgtgcactatggtggtttgctgcacagatcatcccattacccaggaattaagcccagcatccattagctattcttcttaatgctctccctcctcccacaccctacactctgacaggccccaggatgtattgttctcccctcatttgcccatatgttctcatctttcttcttccatttatgagtgagaacacatagtatttggttttcttttcctgcattagtttgctaaggataatggcctccagctctatccatgtccctgcaaaggacattatcttgttcctttttatgtttgcatagtataccaatgtgaatatgtaccacattttctttacccagtctaacatcgatgggcatttaggttgattccatgtcttttttatagtaaacagtgctgcaatgaacatacacatgcatgtatctttataatataagaattyatattcctttgggtatatatccagtaatggaattcctgggccaaatggtatttctgtttttaggtctttaaggaatcaccaaactgtcttgcacaagggttgaactaat

SEQ ID NO: 137992 - DNA, 499 bp, Homo sapiens
ggtgaaaccaacatatctaataaaaatacaaaaatagcaggcatgggtggtgcatgcctataaatcccagctactcaggaggctgaggcaggagaatcgcttgagcccagggaggcagaggttgcagtgaactgrgatcatgccactgccattccagcttgggtgaccgagcaagacttggtcaaaaaacaaacaaaaaaaaaatcacttgcgtcagctttgtgagaaaactgaatcagaacttttacaaatctatgcctctcgtcaataaacttctgctataaatctgacttaatatatacagaaagatccatgatcatcacaatactttggtatacttcaaagtcaaatcattttttcaggaaggaaaaatttatgacataagtagactttggaccctattttgtccaaatctttcaaaaactaagaaacatttttctcaaggggaaaaggagagaagtttttatatgttgctttatgcagtttccattttgaattc

SEQ ID NO: 137993 - DNA, 466 bp, Homo sapiens
cccatttccaggtcatagttctggtaactgcctctttgttctccacctttctccctatacraaggagctgctccttggtgacccagctctgtggtgtcacgagggtcctacctattccggggctgctcaatctgtggtcttattcacacatctttagcatctcctgagaacttgttaaaaatgcagagtcttgagccccaccccggacctacttactgaatctgcaactgtgagggggtgagactgaagaaactgtgcgttagcaagttgttctgctgattcttttgcacggtaaaatttgagaagcctacacagcccactctctcagcgtcttccagtgattttgcaagcaccatcgattcttgtattaagttcctgtctgcttaatatacctagaatggtccccacacggaactctggctgcctgtgtcaggattctagggttcaactagcagggtttgaattc

SEQ ID NO: 137994 - DNA, 466 bp, Homo sapiens
cccatttccaggtcatagttctggtaactgcctctttgttctccacctttctccctatacaaaggagctgctccttggtgacccagctctgtggtgtcacgagggtcctacctattccggggctgctcaatctgtggtcttattcacacatctttagcatctcctgagaacttgttaaaaatgcagagtcttgagccccaccccggacctacttactgaatctgcaactgtgagggggtgagactgaagaaactgtgcgttagcaagttgttctgctgattcttttgcacggtaaaatttgagaagcctacacagcccactctctcagcgtcttccagtgattttgcaagcaccatcgattcttgtattaagttcctgtctgcttaatatacctagaatggtccccacacggaactctggctgccygtgtcaggattctagggttcaactagcagggtttgaattc

SEQ ID NO: 137995 - DNA, 423 bp, Homo sapiens
tgatactgcattgtgatgtgtgatttatctcacataggtaaatatttcttttgattcagcagattgcaaacactgttttagtagaatctgtggaggtacatttggraacctattcaggcctatggtgaaaaacagtatacattcagaaaaaaacctgaaagaacatatctgtgaaactgatttttgatgtgtggattcatctcacagagataaacatttctttagatacagcagtgttgaaatattctttaaatagaatctgtgaagagacatttgtaagaccatggaggcctaagttgaaaaacagaatatcaccagataaaaactacaaagaaactatctgggacatttctttgtgatgtgtggtttcccccacagagttaaaccttctttcgatttagcacgttataaacactcttttac

SEQ ID NO: 137996 - DNA, 666 bp, Homo sapiens
tgtttatatagtcaatatctctatctcaattggatctatctcaactgcttctaaacaagccaccatagtctctcccatttcaacaatctcttccaagtaccacttcatttcttcttttcatatttttgaaaacttttgaaaaactacctattttcctcctccatttcttgttcattccattctagtggacatggaatctgttcctcctccaaaacggaatttggtcacccttaaattactaaacccaaaacaatatgttgtctttatctttacctctctgtggcatttaatgataagaccactactttcttctcttttacccttctttcttgaattcagtcaaacaacgtacttacatttttygtcttattctccatcttagaaaccacctcagctttctccattcagctataaaattgtgcttttcctcaaagattaatctgcctctcctctcactctatactatctctgttagctaattttatttgtgcacattgcttatactgggcattatatacacatatgcatgtgtgtacatgtgcacacacacactgtatgtggacatgtatatatatatgtgtgtgtgtgtatatatagtatatatataaattacaataacataaaggtggcattttaaattagtggaaattaccctgatttgatcac

SEQ ID NO: 137997 - DNA, 561 bp, Homo sapiens
gagaactgcatcaaaaatagccagaaacttgtccatctgtgaattagggtgtggccatgtatacacaaacatgggtggaccaaagaacaaaaggaccgctgtgctgtgagctgaaagagtggaaagggccttggatgaaccacctgaggaatgtttccaaacagtaaacaggatgaagacgtaggagattagaagtatgaagaaagtacccacacagataaacccactgttaacagtgrccatgaactgcaatctgtaggtgtcggtacaggctagtctgagaagctgaggaaggtcacagtagaagctgtccaacacattagggccacagaagggtaaattaacaagaaatgccagttggaacagggagtgactgacaacaagggtccaggcaacagccagaaatgaaaggcacattcttgggctcataatggtcagatagtggaggggcttaatagggccacataactgtcaaaggccatggctatgagcagcaccatctccacaccaccaatgacgtggatgaagaagatttgagcgatgcagcctccaaaggagatg

SEQ ID NO: 137998 - DNA, 607 bp, Homo sapiens
tttttgggttatctttacaacagcaccccactctaccagtaccaatgtactgtattagtctgttttcatgctgctgataaagacatacctgagactgagtgatttatgaagaaaaagacacttaatggactcacatttccaggtggatggggaggcctcacaatcatggtggaaggcaaaaggcacatctctacatgatggcagacaagacagaatgagagctgagtgaaaggggaacccccttayaaaatcatcagctcttgtgagacttattcaagaccacgagaacagtatgggggaaatactcctgtgattcagttatctcccgttggatccctcccacaagacacggaaattatgggagctacaattcaagatgagatttgggtggggacacagccaaaccatattgctgctgaatagatcatgtagacaggctctcaaactacacggagagcaagagaggcccaccttaccacaacatttcatccaatccactaataaaacaggcacatcactgaaaccaccttcaactctccagactacccagctgccagctgaataccacagatggctacagttaataccacatggagcagaatcatgt

SEQ ID NO: 137999 - DNA, 343 bp, Homo sapiens
acatagtatcgaatcaagtttataattttaaaataattgggagattttgttgtttaacacttgttttcactataagactgtaattacatgcaagtaagaaccatgcctgtttgttcactcctgccacagtcagaatagtgcctggaatatgcagtaagggctgaacaaacactaaataaatgaacaagtgaataaatggatattgtctcatttttagaacagagtactraagggatcatgaacactatctggtatgtcacgtaggtaatttacaagggctacaatttcagctcagatttaccttttcctggatacaggtcttgataggtctcttgatgtcatt

SEQ ID NO: 138000 - DNA, 601 bp, Homo sapiens
tgtcggtacaggctagtctgagaagctgaggaaggtcacagtagaagctgtccaacacattagggccacagaagggtaaattaacaagaaatgccagttggaacagggagtgactgacaacaagggtccaggcaacagccagaaatgaaaggcacattcttgggctcataatggtcagatagtggaggggcttaatagggccacataactgtcaaaggccatggctatgagcagcaccatctccacaccaccaatgacgtggatgaagaagatttgagcgatgcagcctccaaaggagatgactttgcgctttctgaacaggtcataaatcatcttgggagaagtgacagagcaggctcctaagtcaatgaaggagagactgrccagtagaaagtacatgggggagtgtaagtgagggtcagtggtcacagaaaacacaatgaggatgtttccagtaatgcttgccacatagagcacagaggaaaacactaggaggaggagctggatctcccatgaatgagtgagtcccagaaacaaaaactcagataccactgagtgattctctccatccattggtccagccaactgggctgtggctaaa

SEQ ID NO: 138001 - DNA, 566 bp, Homo sapiens
  misc_feature (1)...(566): n = A,T,C or G
taaaacaagtaaatgtttgcctatggtctgagattctaatccacggagttcattctaatccacattcaacactatcatgtaccagtgggcctcataacccacctagccctgtgatttttcaggttcacttttctaaacttgtgaattaaatatttattttcttagttcagaagaggaaaaaaactcttgtaattgttgcccatttcaggagaaatcttgcatatgaaaacaagagataaatatacacaactgaggrctgtggtttaaacaaaatcttgagaatgttttttgaccttatacatttgtgctttagtataacaaaatgatatagacaaaggtaacttttaatagaaccagtcactaaattaaaaaaatgacaaattcttctgcttagctaagcaacagagaaggtaaaatactaattcaattcatcaatttaagcaatactcattaagagccaagtatgtgcttactgaataagctgctaaggtttggtggttacagagtgtgcggtgaaatgatgtctacatcacannnnnnnnnnnnnnnnnnnnnnnnnnnnnnnn

SEQ ID NO: 138002 - DNA, 601 bp, Homo sapiens
tgtcggtacaggctagtctgagaagctgaggaaggtcacagtagaagctgtccaacacattagggccacagaagggtaaattaacaagaaatgccagttggaacagggagtgactgacaacaagggtccaggcaacagccagaaatgaaaggcacattcttgggctcataatggtcagatagtggaggggcttaatagggccacataactgtcaaaggccatggctatgagcagcaccatctccacaccaccaatgacgtggatgaagaagatttgagcgatgcagcctccaaaggagatgactttgcgctttctgaacaggtcataaatcatcttgggagaagtgacagagcaggctcctaagtcaatgaaggagagactgaccagtagaaagtacatgggggagtgtaagtgagggtcagtggtcacagaaaayacaatgaggatgtttccagtaatgcttgccacatagagcacagaggaaaacactaggaggaggagctggatctcccatgaatgagtgagtcccagaaacaaaaactcagataccactgagtgattctctccatccattggtccagccaactgggctgtggctaaa

SEQ ID NO: 138003 - DNA, 498 bp, Homo sapiens
tagcagcaacatgggtagcgtattcaaacttgaaaagactttaaatatttgtattattagatgtagattatgaaacacatattttaatgtggttaatttttttaaggaatcaaaactatgagtaaagaccaagaaaattgtgctggatggccacttccaccatggctcccctcctatttaagtctgggtactgtgtcacccgaagtcttcaggcacattgttccaggtytgggtttgcctatgaaagaaactcatgagagctggaagtgaggagtgaagaggaggtcttcacataaagcaggcttaaggattagacatagcaggtttgacagatgtgatggcttgcagaatcctttatgagctcccactgtccatctggataagatttacagacctttcagaaattcctataagcttgggttctgtgcccactctctagactgtcaggctaagatctctgatataaaacagacctcttctgattttgtctagctgctt

SEQ ID NO: 138004 - DNA, 498 bp, Homo sapiens
tagcagcaacatgggtagcgtattcaaacttgaaaagactttaaatatttgtattattagatgtagattatgaaacacatattttaatgtggttaatttttttaaggaatcaaaactatgagtaaagaccaagaaaattgtgctggatggccacttccaccatggctcccctcctatttaagtctgggtactgtgtcacccgaagtcttcaggcacattgttccaggtttgggtttgcctatgaaagaaactcatgagagctggaagtgaggagtgaagaggaggtcttcamataaagcaggcttaaggattagacatagcaggtttgacagatgtgatggcttgcagaatcctttatgagctcccactgtccatctggataagatttacagacctttcagaaattcctataagcttgggttctgtgcccactctctagactgtcaggctaagatctctgatataaaacagacctcttctgattttgtctagctgctt

SEQ ID NO: 138005 - DNA, 566 bp, Homo sapiens
ttacacataatgattagggaaatgtctcatattctatatatatagacagaaagagagaaaatatatgagggagaraaggaatctttccatctcctttgagttccacggtgttgagagtcaggacaactgcaattgcttcatcatgcctgcttgcaattatagggcttttgaaccatttgttccctccttagatatcctcatttttttcagattcttgcttagaagtcactcctccgtggacctcctctgacatattaaacattgcagtccattataagctgcaagaggacagggatttttgcctgttttattccctactgtatcaccaggggctacagcaatatctgacaaacagtgggcatgtaatgaatatttgttaagtgaagtaataaattcaatcaaatcacaccacctgtttaaagcacttcattggcttcacattgcacttagaataaagagaaattctttttatacaatataagttcctgcagaatgcagacactttctacttctccagcctcttttcgactcctctcctactagcttctgtatttaagccacattag

SEQ ID NO: 138006 - DNA, 436 bp, Homo sapiens
agagaaggaatctttccatctcctttgagttccayggtgttgagagtcaggacaactgcaattgcttcatcatgcctgcttgcaattatagggcttttgaaccatttgttccctccttagatatcctcatttttttcagattcttgcttagaagtcactcctccgtggacctcctctgacatattaaacattgcagtccattataagctgcaagaggacagggatttttgcctgttttattccctactgtatcaccaggggctacagcaatatctgacaaacagtgggcatgtaatgaatatttgttaagtgaagtaataaattcaatcaaatcacaccacctgtttaaagcacttcattggcttcacattgcacttagaataaagagaaattctttttatacaatataagttcctgcagaatgcagacactttct

SEQ ID NO: 138007 - DNA, 436 bp, Homo sapiens
agagaaggaatctttccatctcctttgagttccacggtgttgagagtcaggamaactgcaattgcttcatcatgcctgcttgcaattatagggcttttgaaccatttgttccctccttagatatcctcatttttttcagattcttgcttagaagtcactcctccgtggacctcctctgacatattaaacattgcagtccattataagctgcaagaggacagggatttttgcctgttttattccctactgtatcaccaggggctacagcaatatctgacaaacagtgggcatgtaatgaatatttgttaagtgaagtaataaattcaatcaaatcacaccacctgtttaaagcacttcattggcttcacattgcacttagaataaagagaaattctttttatacaatataagttcctgcagaatgcagacactttct

SEQ ID NO: 138008 - DNA, 436 bp, Homo sapiens
agagaaggaatctttccatctcctttgagttccacggtgttgagagtcaggacaactrcaattgcttcatcatgcctgcttgcaattatagggcttttgaaccatttgttccctccttagatatcctcatttttttcagattcttgcttagaagtcactcctccgtggacctcctctgacatattaaacattgcagtccattataagctgcaagaggacagggatttttgcctgttttattccctactgtatcaccaggggctacagcaatatctgacaaacagtgggcatgtaatgaatatttgttaagtgaagtaataaattcaatcaaatcacaccacctgtttaaagcacttcattggcttcacattgcacttagaataaagagaaattctttttatacaatataagttcctgcagaatgcagacactttct

SEQ ID NO: 138009 - DNA, 566 bp, Homo sapiens
ttacacataatgattagggaaatgtctcatattctatatatatagacagaaagagagaaaatatatgagggagagaaggaatctttccatctcctttgagttccacggtgttgagagtcaggacaactgcaattgcttcatcatgcctgcttgcaattatagggcttttgaaccatttgttccctccttagatatcctcatttttktcagattcttgcttagaagtcactcctccgtggacctcctctgacatattaaacattgcagtccattataagctgcaagaggacagggatttttgcctgttttattccctactgtatcaccaggggctacagcaatatctgacaaacagtgggcatgtaatgaatatttgttaagtgaagtaataaattcaatcaaatcacaccacctgtttaaagcacttcattggcttcacattgcacttagaataaagagaaattctttttatacaatataagttcctgcagaatgcagacactttctacttctccagcctcttttcgactcctctcctactagcttctgtatttaagccacattag

SEQ ID NO: 138010 - DNA, 566 bp, Homo sapiens
ttacacataatgattagggaaatgtctcatattctatatatatagacagaaagagagaaaatatatgagggagagaaggaatctttccatctcctttgagttccacggtgttgagagtcaggacaactgcaattgcttcatcatgcctgcttgcaattatagggcttttgaaccatttgttccctccttagatatcctcatttttttcagattcttgcttagaagtcactcctccgtggacctcctctgacatattaaacattgcagtccattataagctgcaagaggacagggatttttgcctgttttattccctactgtatcaccaggggctasagcaatatctgacaaacagtgggcatgtaatgaatatttgttaagtgaagtaataaattcaatcaaatcacaccacctgtttaaagcacttcattggcttcacattgcacttagaataaagagaaattctttttatacaatataagttcctgcagaatgcagacactttctacttctccagcctcttttcgactcctctcctactagcttctgtatttaagccacattag

SEQ ID NO: 138011 - DNA, 436 bp, Homo sapiens
agagaaggaatctttccatctcctttgagttccacggtgttgagagtcaggacaactgcaattgcttcatcatgcctgcttgcaattatagggcttttgaaccatttgttccctccttagatatcctcatttttttcagattcttgcttagaagtcactcctccgtggacctcctctgacatattaaacattgcagtccattataagctgcaagaggacagggatttttgcctgttttattccctactgtatcaccaggggctacagcaatatctgacaaacagtgggcatgtaatgaatatttgttaagtgaagtaataaattcaatcaaatcacaycacctgtttaaagcacttcattggcttcacattgcacttagaataaagagaaattctttttatacaatataagttcctgcagaatgcagacactttct

SEQ ID NO: 138012 - DNA, 544 bp, Homo sapiens
tatacaatctttcacaattacgaagccctaaatggcttcccatcctgcartgatttcataaggagcctatgccacctgtcatgtaaggctttttccatgcctaataaatatgttttggagggatttcaccagagtttttgctaagatgcataaaatggccacagaggttgtgagaaatctctgcagtttctctttgtctatacacatgaaagtattgaagaccagcacttggattagttaagataatgttttaattcatcactgtctcctcctccccttggtaccagcttttatgttcattgcattccccacccttttaagtactcagtacctcctgcatggtaacctattctgatatttgatattatcatgcttaatttgactgaatccatttggatattttatctttaagaaatttgtagttttatacttttaatttatgataaaattagattaatatcaaacattaacaagtgacttttaggaaggtatatgagctttcttattgacttcaaactataaagtacaaactgtgacactagaa

SEQ ID NO: 138013 - DNA, 544 bp, Homo sapiens
tatacaatctttcacaattacgaagccctaaatggcttcccatcctgcagtgatttcataaggagcctatgccacctgtcatgtaaggctttttccatgcctaataaatatgttttggagggatttcaccagwgtttttgctaagatgcataaaatggccacagaggttgtgagaaatctctgcagtttctctttgtctatacacatgaaagtattgaagaccagcacttggattagttaagataatgttttaattcatcactgtctcctcctccccttggtaccagcttttatgttcattgcattccccacccttttaagtactcagtacctcctgcatggtaacctattctgatatttgatattatcatgcttaatttgactgaatccatttggatattttatctttaagaaatttgtagttttatacttttaatttatgataaaattagattaatatcaaacattaacaagtgacttttaggaaggtatatgagctttcttattgacttcaaactataaagtacaaactgtgacactagaa

SEQ ID NO: 138014 - DNA, 585 bp, Homo sapiens
acctcaatcattttcctatagtagaaagtagttcctgaaaacacttaatagagattattttagaagttgctgaggtacaaataaaactgctatgctgacatacttttttgcaccaacaastccagttcttctgacacaaaggaccatcttcctagtgccataatttatcttagaccccaaaactcacagaggcacacatcatatctctaatacttgctcaccaccactggcatgagtctctctctatcctcttctacgtgaagtgattatactgtcacctctggagctaactgtccacagtctcaagatgcacacttttacaaccagaagcctatggactgggtgagggagcagaaacagccacaggtactgcccatcagggtaatgtaagtcagcgtgcaaacaactgatcagatgaacatgaatagcaaggtgccgaggcactgggaagagggaccggaaaactctataactgttgaaaaagactcaagcccttgggaagggaaatgcctacgaaattatataaagaccattttatccaagttggtcatcattcagatgaaaaccatgaggcccagaaaagta

SEQ ID NO: 138015 - DNA, 585 bp, Homo sapiens
acctcaatcattttcctatagtagaaagtagttcctgaaaacacttaatagagattattttagaagttgctgaggtacaaataaaactgctatgctgacatacttttttgcaccaacaactccagttcttctgacacaaaggaccatcttcctagtgccataatttatcttagaccccaaaactcacagaggcacacatcatatctctaatacttgctcaccaccactggcatgagtctctctctatcctcttctacgtgaagtgattatactgtcacctctggagctaactgtccacagtctcaagatgcacacttttacaaccagaagcctatggactgggtgagggagcagaaacagccacaggtactgcccatcagggtaatgtaagtcagcrtgcaaacaactgatcagatgaacatgaatagcaaggtgccgaggcactgggaagagggaccggaaaactctataactgttgaaaaagactcaagcccttgggaagggaaatgcctacgaaattatataaagaccattttatccaagttggtcatcattcagatgaaaaccatgaggcccagaaaagta

SEQ ID NO: 138016 - DNA, 666 bp, Homo sapiens
tgtttatatagtcaatatctctatctcaattggatctatctcaactgcttctaaacaagccaccayagtctctcccatttcaacaatctcttccaagtaccacttcatttcttcttttcatatttttgaaaacttttgaaaaactacctattttcctcctccatttcttgttcattccattctagtggacatggaatctgttcctcctccaaaacggaatttggtcacccttaaattactaaacccaaaacaatatgttgtctttatctttacctctctgtggcatttaatgataagaccactactttcttctcttttacccttctttcttgaattcagtcaaacaacgtacttacattttttgtcttattctccatcttagaaaccacctcagctttctccattcagctataaaattgtgcttttcctcaaagattaatctgcctctcctctcactctatactatctctgttagctaattttatttgtgcacattgcttatactgggcattatatacacatatgcatgtgtgtacatgtgcacacacacactgtatgtggacatgtatatatatatgtgtgtgtgtgtatatatagtatatatataaattacaataacataaaggtggcattttaaattagtggaaattaccctgatttgatcac

SEQ ID NO: 138017 - DNA, 550 bp, Homo sapiens
ttgggtaaatctcatcaatacttgaacaaatgcaaaattagagcttctttatcatgaaacacgatgtaattcttgaagaagatgccatttcttttttttctttttttttttaagataagagtctttctcttgtcacccaggctggagtgcaatggtgygattttggctcactgcaaccttcaccttctgggtccaagcaattctcctgcctcagcctcccgagtagctgggattacaggtgcccgccaccatacccagctaatttttgtatttttagtagagatgggatttcaccatattggccaggctcctctggagctcctgacctcaggcaatctgcctgcctcagcctcccaaaattcaaggagtacagatgtgaacaaccacgcccggcctccatttcttttttgtagtctttaataaacagctgctatcattgcagacttgctgtttaggcacttaggaatttttcactagaaggcatgtaaataaagaccatgggcaattgtaatgaatttcgccttcattctttgactacatgactgtcccc

SEQ ID NO: 138018 - DNA, 550 bp, Homo sapiens
ttgggtaaatctcatcaatacttgaacaaatgcaaaattagagcttctttatcatgaaacacgatgtaattcttgaagaagatgccatttcttttttttctttttttttttaagataagagtctttctcttgtcacccaggctggagtgcaatggtgcgattttggctcactgcaaccttcaccttctgggtycaagcaattctcctgcctcagcctcccgagtagctgggattacaggtgcccgccaccatacccagctaatttttgtatttttagtagagatgggatttcaccatattggccaggctcctctggagctcctgacctcaggcaatctgcctgcctcagcctcccaaaattcaaggagtacagatgtgaacaaccacgcccggcctccatttcttttttgtagtctttaataaacagctgctatcattgcagacttgctgtttaggcacttaggaatttttcactagaaggcatgtaaataaagaccatgggcaattgtaatgaatttcgccttcattctttgactacatgactgtcccc

SEQ ID NO: 138019 - DNA, 550 bp, Homo sapiens
ttgggtaaatctcatcaatacttgaacaaatgcaaaattagagcttctttatcatgaaacacgatgtaattcttgaagaagatgccatttcttttttttctttttttttttaagataagagtctttctcttgtcacccaggctggagtgcaatggtgcgattttggctcactgcaaccttcaccttctgggtccaagcaattctcctgcctcagcctcccgagtagctgggattacaggtgcccgccaccatacccagctaatttttgtatttttagtagagatgggrtttcaccatattggccaggctcctctggagctcctgacctcaggcaatctgcctgcctcagcctcccaaaattcaaggagtacagatgtgaacaaccacgcccggcctccatttcttttttgtagtctttaataaacagctgctatcattgcagacttgctgtttaggcacttaggaatttttcactagaaggcatgtaaataaagaccatgggcaattgtaatgaatttcgccttcattctttgactacatgactgtcccc

SEQ ID NO: 138020 - DNA, 550 bp, Homo sapiens
ttgggtaaatctcatcaatacttgaacaaatgcaaaattagagcttctttatcatgaaacacgatgtaattcttgaagaagatgccatttcttttttttctttttttttttaagataagagtctttctcttgtcacccaggctggagtgcaatggtgcgattttggctcactgcaaccttcaccttctgggtccaagcaattctcctgcctcagcctcccgagtagctgggattacaggtgcccgccaccatacccagctaatttttgtatttttagtagagatgggatttcaccatrttggccaggctcctctggagctcctgacctcaggcaatctgcctgcctcagcctcccaaaattcaaggagtacagatgtgaacaaccacgcccggcctccatttcttttttgtagtctttaataaacagctgctatcattgcagacttgctgtttaggcacttaggaatttttcactagaaggcatgtaaataaagaccatgggcaattgtaatgaatttcgccttcattctttgactacatgactgtcccc

SEQ ID NO: 138021 - DNA, 536 bp, Homo sapiens
cacttgagcagcggtctccaaccacagggccacagagctggaggtgagcagcaggcgagtgaagggaaacttcatctgtatttctagcccctcccatcgcttgcatgaccacctgagctccatgtcctgtcagatcagcagcagcattagattgtcataggagcacaaactctgttgtgaagtgtgcatgcgagggatctaggttgtgtactccttatgagaatctaatgcctgatattctgttactgtctcccatcaccccaggtggacagtctagttgcaggaaaacaagctcagagatcccactgagtctacattatagtgagttgtagaatcatttcattatatattactatgtagtaataatagaaataaagtgcacaatatatgtaatgcacttgaatcatcctgaaattattccctcattcccagtctgtggaaaaattgtcttccacacgttcactctgttttttggtagaggcagrgtcttaatatattgcccagtctgatctcaaactcctggcctcaagtaatat

SEQ ID NO: 138022 - DNA, 614 bp, Homo sapiens
gatctcaccattacactccagcctgggtgacaagagcaaaactgcatctcaaaaaaaaaaaaaaaagggggtgaacttgaaggcaggtcctgtgtccatcttttcagattctgtatcccagcacttaggacatagacaaacacgaagatgacaatcaatatttgccaaaatgaaaaaacaaaagaaacatgtaacatcatgtaaaagaagctggttaggtggagaaatttatttaccatagtcttgcttgtggatccagtagtgacttttacagtttatatctaaatagaagctggaggctttgttggggactcataggcataaaatattatttattatagagttaaatgctacaaagacaaatctaattaataggcctattttcctttttaaattctactcataatttcttcatagtttttatgataaaaggttggattttgattagaactcccatgmttttgtgtcagaattaaaactggtattagaataaataattcaaaagctagagaaagagtacaatgagaagccatgagttgcatttgaattataatattatgtcttacagatttggggtatatgctaaagttaccaaagttgtagaaaataaggcc

SEQ ID NO: 138023 - DNA, 651 bp, Homo sapiens
aattaaaactggtattagaataaataattcaaaagctagagaaagagtacaatgagaagccatgagttgcatttgaattataatattatgtcttacagatttggggtatatgctaaagttaccaaagttgtagaaaataaggccgggcattgtggctcacatctgtaattccagcactttgggaggccgaggtrgatggatcatttgaggtcaggagttcgagaccagcctggccaacatggtgaaactccgtctgtactaatagtacaaaaattagccaggcgtgatggtgtgcacctgtagtccttgctactcagaaagctgaggcaggagaatcgcttgtacccaggaggcagaggttgcagtgagcagagattgtgccactgcactccagcctgggtgacagagtgctatgagtcaccacacctggtatgagccaccgtgcctggcccacaatgacttttacacatgttgttaaaccatcttacagattttataatttgggggaagaaaagttttactaaattgtcttttaatggaaactctacaagaaccagaatctttgctttgttcacttatgtatccattcctaggcctagaaaaatgtctgacacatagcggcaattattcattgaataaatggacccagcg

SEQ ID NO: 138024 - DNA, 651 bp, Homo sapiens
aattaaaactggtattagaataaataattcaaaagctagagaaagagtacaatgagaagccatgagttgcatttgaattataatattatgtcttacagatttggggtatatgctaaagttaccaaagttgtagaaaataaggccgggcattgtggctcacatctgtaattccagcactttgggaggccgaggtagayggatcatttgaggtcaggagttcgagaccagcctggccaacatggtgaaactccgtctgtactaatagtacaaaaattagccaggcgtgatggtgtgcacctgtagtccttgctactcagaaagctgaggcaggagaatcgcttgtacccaggaggcagaggttgcagtgagcagagattgtgccactgcactccagcctgggtgacagagtgctatgagtcaccacacctggtatgagccaccgtgcctggcccacaatgacttttacacatgttgttaaaccatcttacagattttataatttgggggaagaaaagttttactaaattgtcttttaatggaaactctacaagaaccagaatctttgctttgttcacttatgtatccattcctaggcctagaaaaatgtctgacacatagcggcaattattcattgaataaatggacccagcg

SEQ ID NO: 138025 - DNA, 430 bp, Homo sapiens
aagtcacttttcagagtagtaagttagtgacctagtaaccttccctctaatgaccagtagtttttttttctgaataccattatgaactcatagattattgtttgcatttgatgtatttcaggccattgcagtctttattgttttggatgcttacattgtctcatctaggttaataattatctcttcaagttgactttcatgtctttttgacgtgatcctgttggactttgatggcttycttgctttctggcaaaacagatgttccaggatcaatatactgcaccatacatggagtcagccgtttctctagggaaccttgattccttttagtagagaacgcagtttgaggtcttggactgaatgacttttgtgaacctcctctcctgagactacagcctgcatccctgcatatagcccgtttggagctctt

SEQ ID NO: 138026 - DNA, 548 bp, Homo sapiens
acatgctgtatttggttttctgttcctgtgttggtttgctgagaatgatggtttccagcttcatccatgtccctgcaaaggacatgaactcattttttagggctgcatagtattccacagtgtatatgtgccacattttctttatccagtctatgaytgatgggcatttgggttggttccaagtctttgctattgtgaatagtgctgcaataaacatacgtgtgcatgtatctttatagtagaataacttataatccttttcagtgaccctgtgtggctagtagctaccacatgtaaaagcagagatttggatattaagaaaattgtgtcattattattgggaatatagagttaatctctaagctgtagcttttttcctactctttatctttagccaaatccttcttgcaacattaactcaaagaatgtgcaggagaatctaagatgaatggatatcctgctggtatgttttgtactgaactaaaaacctgtacctggttgtcaagattactgagcaacccaatgtttctcatactttgcagctaatt

SEQ ID NO: 138027 - DNA, 442 bp, Homo sapiens
ggaggcagcttctgtatgacaagcaggatagggctagctagctaggcttggtgggcttcctgtgaattggctaatctgaacaatttatctaggaggcactaggacacccctagttgtctggtacctgtcccagcaatgatgcttaacaaccgcaaagggtgagaacctaataaaggaagtggttggagtatggacataatcagctgctaagaaaggaaagtgaccastcctggccggggtcaaaactgtgtcaaagcagcattttaaaaaattgcattacaacaaactgcacatgtactccttaatctaaaataagtaagttgaaattctttttaaacattatattacaagaagctcctctcttgatggcatcacactaatgactgcttgcattcaggtataatccctgtttcttactatactgtctttagaattagataca

SEQ ID NO: 138028 - DNA, 531 bp, Homo sapiens
tgtgaattccaggtcggcatgcctgagctatatgacagtgactgggtcaaatgatttcatctgtctgagccccaatctcctcaaaattaagttgaggtctctttgcccattgggataacactacctacttcatacttttgtttgtttttgtgaaaagtaaatgaaatgatgtttgtaagaggatggtgctgtgtctggccagtagtcagtattgagcgcatgtaaaaaagaagaaacactaaacttctctttgtaataaattaattccagatacatgtttttggagactgactatgaggggaggtccacaggctmtttgactaggggagaaggtccattattgttgcttctccaggttcacttgagataaaaacaagtagagaaggcttcagtttcacagagggtccagcaatgcagtgaatcttgaatgttgaaacagtaagagttctgaacagcttatctaacagattcagtgtggcagagctaaggggggaattccatgcatgctcagggctgcttcttcaaaatcta

SEQ ID NO: 138029 - DNA, 609 bp, Homo sapiens
tgcttgtcaaaagaatgtgttctacgaagggtgataaaacaatatctgggtccaggtgaaatgctggggtcacctgccacatgtaagggagaaaaacaatgctctgttacatttcccatcaggtaatgatggagaaccatgcatgtcttcatttagcaaaayagctgaagcttcttttcatgtcttcaggatggtccatgagttaactccaaggctcacttatggtattgcgaagagcccagaaaaaaaaaattctctgtttaaaagccttccttcaacagctccatagttactttaaaaatgcaaactttaacatccctccctgtctaactctatattcgacactccccttatttcacctccttcgcaacttgcctgcttcacaagttggtcatgcgttaccttctccagaaggctttcctgcagtgtgaccctcctatatatttatttaatgtttattgggagcctaatactgtacatggaggtactgtcctagtgccaggacactgttttgtttgcttgttttgtttactactaaacaaaacagtcaagattcctctcttaatgaggccgactaaagagaaaaaataaaaacaaatgtaaacacac

SEQ ID NO: 138030 - DNA, 590 bp, Homo sapiens
ggcaaaaaccctaaggtgagaagatcctgaatacttgcagaggagcaagaggaggagagtgactacagccttctggtgagagagaagggctgtaaggaagtggaggccaaattgcgtaaaatagaccattgtggggaatggaaaakacttcaggttttgtttaaacttggggaaatcactggaaggtttgcactaagtagctaagattcaacattatcttatttgcttttcacatttaatactctgtgcaacacacaatatagggaagccagggttgaaaatctttcctctatcatttccaagcaaagtggtcttgggcaagttacttcagctcattatgttttaatttccccttacagagatttcatcagttctaatactttgtctatatttatcaatagtattttgctttgcaactttcttttggattcataatctatttaatctcaccatgccctctatattaaaggatgagtgggaagtgggagtcccttgtagatattaccaattaatgtgaaggtttaaaaaaaaatgtcctatgtggattttgtccaaatctcattcaagttcacggcagtgaaaccagtaaa

SEQ ID NO: 138031 - DNA, 341 bp, Homo sapiens
gtttctaaggtacccactctgtggcattttgctgtggcagccaaaatggaccaaggcagatggttattatctcagtaatataatatattagtacttacctagcctatctcaattattcccaggtattgttgtaggatctactagtatctattggtattaatctatttttaaaatcttataattacctctattttattaatgaggtaacagattcagagatagagaggtcaaaccagaattaaaatttattttcaacagacctcaaagcctgtgctcacaccttgtgckgactcttgtggctctaagtcccaaatgctttttcaatcacttgcctgttctct

SEQ ID NO: 138032 - DNA, 236 bp, Homo sapiens
gaaattaacaaacatgtattgagtgcctaccacatgaaaagtatagtgacagcagcaggaaaaattcagaggaagaaaaatgggtgtccttgttctcagagtttgaacagtctagtaagagagaaaaggmggttttggttagcacctaaacaaaaggcataggatgttatgtgatgcaaaggaagaaagggaggaaaggaaccagcatttattaagcccctcccttatgctgagca

SEQ ID NO: 138033 - DNA, 597 bp, Homo sapiens
aaataactcatgtgtatctaaacaaatgtatttaagaggaaacattgtattattgttatgcaaactttctcatggcatggaagataactgtacaaataaatacatggaaagaaaataactttattaaattcttactagacacatttgctgctgaagactttaagcttgagatcttatttccatttcaaaaaaggggattttatagtggttagacatttaatcccaaactgggtcttatctcatcagaatgaataataaaaattttgccaatacctcttggggatccacaattatttaccaagcatctacaacatatcaggctctgtactaggctctggggtaccttgtaaaaagaaatgtctttgctcctaatggccytcattctaaatagaaaaatagattgaaaataaaacatggaaaagagaagaaatcacaaacaaaaaaatacatacttggcaaataataatagaagagcaatatggcagacagggattagggggctgcttcaaattggatggtcagagaaacagccagctaagagggaaggaatttcaaacagagggacaactctgcgcacatcacactcttagtatttca

SEQ ID NO: 138034 - DNA, 329 bp, Homo sapiens
agatcataaatagggttattaaaagatcacaattaaattagaaatataaatggatcattagaaatacttaacgtttgtttcaatgttaagaatcaaacccagaattaaaaaaaaatctttttttatttcaaagattgcttcttatattgaagctcatattaaagcaacagtacaatgttcataaaatataagtgtgatgccgtaacattttcttacatgtcagaatactgatatttataygtatactaaaataagaactttaaaattgtacaaatagatacattaaaaatgacatagaaatagggcgtctctcactgaaacaagacagt

SEQ ID NO: 138035 - DNA, 559 bp, Homo sapiens
taataattttaggttaaatttgattccattcataaagctacttagcacagttgccagcctgttggcgatgctcagtaaatattaattcttttctggaagttcttctctttgagcagtagactaatgaggaagagaaactcattggcaaaggaggaaagtgaattcttggaaatgtcattgtagctctgaatgtaattgcctatgcagaaggactcttcattcaaaggtaagaaaatatttcatattcttcagtcctggacaatatatttcccatgacaagaaaatgtttttcaagcatcttggtttttgatcttgacaccagtgttctcatccttggccacagatatgtaaccagttgcatgttttcccccacttaggccaaaacttgcaaatagggccattaattaccagaatatgtcatgcacaaagtgtagtgtttctattaatggaaaaacaaattcaggcttctaagttttagtccaacctggactcctaattgcatgctgcttttacttgtacmctttttcattatactaatacaatataaaagttcctaata

SEQ ID NO: 138036 - DNA, 612 bp, Homo sapiens
gttcacaaatatgaatgcagattagtgaggactgaccgattatggagaatatatgtcgtataaaggattcgtttttatattgtattaggtaggcacttataaattgttcatgcacaaacaataattttaggatactacaagactttgtttggatttggtggcccacaaccakcaagtttgtgatcttcattaggttatgtgaaatgttaaaagccagctgagaaagaagatctgaaatggttattttcctttccaccctgatatccaacagttttgtaattctctgataaaatttcaggatcccgagaagcacatctttaggcacaggcaatttcctagagtccttcaaattatgccctgcttgtaatctctggtgtggataaaagaacacagaatgcacacttgggctgcaataccccaagggtcttggctcatcactgaatcttagtttcccaccagccgcttgaaaaaccttgcttaatagagctaagcagccagagtcctaaaagttagccatcttgctgaatgagccagaatccttttagggaaaaataagatgtggcaaagacaaatgactgaagtccagggcaccttgtccttatattccagtgg

SEQ ID NO: 138037 - DNA, 542 bp, Homo sapiens
gccagtgttattgaacggaaatctttaattgaaccagggctgctccatgtggagcaggggtaactcatgggcagtgtgcccagagtcaacaatatatgggctgctggcaaacttatttatactcatgtaaacccactttcaagtacatgtaaactgagggatgatcaatgcaaattgtgggttggttgtttagaactttctagaaaaggggaagtaacttctaggttattgccatgaaaaaaggtggtaacttctgggtttgtgccatggcatttgtaaaccgccatggtgctggtggagtatcttatgctaattagcagygagggcagttgaggattgctttcatcgccatctgctggttcctgtggtatcttcactttgtcaggacaagatcctattttggttagcaaagttgtgactacaaagtaagtccagctgatctcctgcctcactattattcacagaaacatatatgatcctggaggacattatgttaagtaaaaaaaggcacagaaagataaacatcacatgttctcactcaa

SEQ ID NO: 138038 - DNA, 451 bp, Homo sapiens
agactgcataattgccagtgacgtgaaaaagaacactgtgagaggtcaaacttgggagcagtagtagaaacagaaaacttgagaggtttttgtgttttagtcactttgttgttaagtcttgaacaaattcatggcacatatttgctctccatgtctgttgaacaaatttaaattaattacattgacttggacaacctaaaggtaattttattttagagaacattagtaatacagttcaattcaccaaacctgcatacataataaaatcaacaagaaaagaattcttagaaatatagattcctgaggtctctcaggcattgattcagtaagctggaacccaggaacctgtaatttgaataatcacactggtcagttttattcaactatcctggyagttgccatgtggatataatctagtcaaagtgactagatttgagctttggggacaaag

SEQ ID NO: 138039 - DNA, 574 bp, Homo sapiens
agttgctaaggatgctgtagtgcacaggagagtatccaaaacaaagaactgtccaacctagaatgccaataatggtgctactgagaaatcttgttgtagcctrtattctaaaaatcccaacttttgtgaatctctgattcctcctttgttaaaggggagaatcatatctatgtcgaagccgtgatagtcaaaatcaaaatagatggtgacattcataacaatgcctgcacatggttaagaactttaatattttagatattagctggaaaatttcatctttgttttagtctttttttaatgtggttttagaaagaccacttaatagaaaagatatgatggttagatagtctggtgaaatttcataggggaatcaattaggaagattttatatatatatatatagggtctaagcaataaataatgctcatctgaactagtgaggtacaagaatcagaaaaaaaaggagcactagcctttcatacccacctaatattactggctcacccacattgattagaatgtgaagtttttatttatttatttattttttacttttgaaacttcatcttttatt

SEQ ID NO: 138040 - DNA, 574 bp, Homo sapiens
agttgctaaggatgctgtagtgcacaggagagtatccaaaacaaagaactgtccaacctagaatgccaataatggtgctactgagaaatcttgttgtagcctgtattctaaaaatcccaacttttgtgaatctctgattcctcctttgttaaaggggagaatcatatctatgtcgaagccgtgatagtcaaaatcaaaatagatggtgacattcataacaatgcctgyacatggttaagaactttaatattttagatattagctggaaaatttcatctttgttttagtctttttttaatgtggttttagaaagaccacttaatagaaaagatatgatggttagatagtctggtgaaatttcataggggaatcaattaggaagattttatatatatatatatagggtctaagcaataaataatgctcatctgaactagtgaggtacaagaatcagaaaaaaaaggagcactagcctttcatacccacctaatattactggctcacccacattgattagaatgtgaagtttttatttatttatttattttttacttttgaaacttcatcttttatt

SEQ ID NO: 138041 - DNA, 574 bp, Homo sapiens
agttgctaaggatgctgtagtgcacaggagagtatccaaaacaaagaactgtccaacctagaatgccaataatggtgctactgagaaatcttgttgtagcctgtattctaaaaatcccaacttttgtgaatctctgattcctcctttgttaaaggggagaatcatatctatgtcgaagccgtgatagtcaaaatcaaaatagatggtgacattcataacaatgcctgcacatggttaagaactttaatattttagatattagctggaaaatttcatctttgttttagtctttttttaatgtggttttagaaagaccacttaatagaaaagatatgatggttagatagtctggtgaaatttcataggggaatcaattaggaagawtttatatatatatatatagggtctaagcaataaataatgctcatctgaactagtgaggtacaagaatcagaaaaaaaaggagcactagcctttcatacccacctaatattactggctcacccacattgattagaatgtgaagtttttatttatttatttattttttacttttgaaacttcatcttttatt

SEQ ID NO: 138042 - DNA, 571 bp, Homo sapiens
tttgactgaaaaaaaattcaagataatcctcttagatattgycagtgaactataattaactaatcaactttagaaaaacaatacatgagcaaaaggaggagttcaacaaacaatttttggaaacctacagctgaagaattaattttattctcattaattttattagctcaaaaatttaatagactatttcaacagcagactcagtgatacagaagaaaaaaatgagttcaaagacaggtaataagaaattgtcaagtcagaaagggaaaaagaaaaaagtttgaattagattgaagaaagtctatggaactttgagacaccatcaacccaaacaagtttaactacaacacaattgtaattagcacagcatggtacagacatgaaaacaaaaacaaagtagactcatggaacagaataggaagccaggaataaacctacatatttaaggtcaacaaatcattggcaaaagccaagaattcacaatgaggaaagaataatctcttcaattaatggtgttagtaatactgcatatccatatgcagaagaacagtgctggactcctaccttaagc

SEQ ID NO: 138043 - DNA, 607 bp, Homo sapiens
gtcttcccatttttccattctgctgctaaaaaattaatagccaccaaagaataacctcactaatggaagcaataattggtagaatttacagtgggggggggggaaagattgagaaattaagatttgttttaataatattttacatgaaataggattcatccaagtagaaataatttcagaaaataaaagcgaagtaaatggcaaatagcttaacagcttattaacagcttaataacaaatagctaaaatgtgccatttagaacattttaatttgctaaaaaccaacactgttgtcatacttctgatggcttgtttgtagtaggtatttcctcaggattaaaccttttggggggttgaaactatggaattaaaaataacctggratcaaaaggaagagcctgaaggaagagcaggaatgaaggtggatgggtcaattcagaaaagattcattcattccaccaagttggtcaactagcattagtagggaatcagcgcagacggggaggaagctgcctatcctttggaaagtgctggggctctggtttcaggcagacatggattaaaattttgctttgccctttattaaccatttgtgtttcagcaagtc

SEQ ID NO: 138044 - DNA, 607 bp, Homo sapiens
gtcttcccatttttccattctgctgctaaaaaattaatagccaccaaagaataacctcactaatggaagcaataattggtagaatttacagtgggggggggggaaagattgagaaattaagatttgttttaataatattttacatgaaataggattcatccaagtagaaataatttcagaaaataaaagcgaagtaaatggcaaatagcttaacagcttattaacagcttaataacaaatagctaaaatgtgccatttagaacattttaatttgctaaaaaccaacactgttgtcatacttctgatggcttgtttgtagtaggtatttcctcaggattaaaccttttggggggttgaaactatggaattaaaaataacctgggatcaaaaggaagagcctgaaggaagagcaggaatgaaggtggatgggtcaattcagaaaagattcattcattccaccaagttggtcaactagcattagtagggaatcagcgcagacggggaggaagctgcctatcctttggaaagtgctggggctctggtttcaggcagacatggrttaaaattttgctttgccctttattaaccatttgtgtttcagcaagtc

SEQ ID NO: 138045 - DNA, 596 bp, Homo sapiens
  misc_feature (1)...(596): n = A,T,C or G
aatgtgctgggtactgagatcagtggttgggatacagggatgaagggttcacaccatccctgccttcacgaacacagcagcctgaggtttaatttcatggacacaggagcctgaggtttaatttcatagatgcagcagcttgaagtttaatttatggacacagcagcctgaggtttaatttatgaacatgggagcctggggtttaatttcagccagatrgttaacatcaaggtagctccaggcaccaaatctgcctgaccccttgagaaatcagctgtgtcaactaaagatcctcccctcttcctcagctcctgggaaaacccaggcaatccttaactcacggaggcaaagtcgaccaacaaaacccgtggagtgaaatcccttccatctcactctaggcagaggcaggnttctttcagcactgcctacctgtcagcccagcctagcacttaaacacatgggctctgtattcaagagagtgcacatgccagctcttcctctctataagctgtgtgacctggaataagttacttaacctctctgtgtctcagtttcctctgttaaaatgaggtgcgatagtatcttatagacaatgt

SEQ ID NO: 138046 - DNA, 596 bp, Homo sapiens
  misc_feature (1)...(596): n = A,T,C or G
aatgtgctgggtactgagatcagtggttgggatacagggatgaagggttcacaccatccctgccttcacgaacacagcagcctgaggtttaatttcatggacacaggagcctgaggtttaatttcatagatgcagcagcttgaagtttaatttatggacacagcagcctgaggtttaatttatgaacatgggagcctggggtttaatttcagccagatagttaacatcaaggtagctccaggcaccaaatctgcctgaccccttgagaaatcagctgtgtcaactaaagatcctcccctcttcctcagctcctgggaaaacccaggcaatccttaactcacggaggcaaagtcgaccaacaaaacccgtggagtgaaatcccttccatctcactctaggcagaggcaggnttctttcagcactgcctacctgtcagcccagcctagcacttaaacacatgggctctgtattcaagagagtgcacatgccagctcttcctctctataagctgtgtgacctggaataagttacttaacctctctgygtctcagtttcctctgttaaaatgaggtgcgatagtatcttatagacaatgt

SEQ ID NO: 138047 - DNA, 541 bp, Homo sapiens
gaaggtcgacccccaggagagatgctggatttagcaaatacaaattttatctggcaaaccttacttcccaggaacccctgagttctcctacagaaagttctaaacattccagggaattaattacaccagtgaggctgaaagccaggatttgagttgattaggagacacgtccagtcaggaatgcattaagaacgggaaatattttaagcctcaagagcagcagctaaaaggagccctgttctctagagcccatccccacgatgagaaaaaggctgtwttcagtgcagacctggaccccccttcacagggccaaacagaggccagtctactccctgtccctgatacaaactggtccccgataaaaactggtctaatatttgcatacaacctatgctcactcagggtccctccccagccatgcgaccccacagcatggggagacaattagacccagaggtctgggcttgtggaggaggaccagcagagagaccaacctgcctctgccttcctctgccagggagagcaggagacaggtggtgga

SEQ ID NO: 138048 - DNA, 541 bp, Homo sapiens
gaaggtcgacccccaggagagatgctggatttagcaaatacaaattttatctggcaaaccttacttcccaggaacccctgagttctcctacagaaagttctaaacattccagggaattaattacaccagtgaggctgaaagccaggatttgagttgattaggagacacgtccagtcaggaatgcattaagaacgggaaatattttaagcctcaagagcagcagctaaaaggagccctgttctctagagcccatccccacgatgagaaaaaggctgttttcagtgcagacctggaccccccttcacagggccaaacagaggccagtctactccctgtccctgatacaaactggtcccygataaaaactggtctaatatttgcatacaacctatgctcactcagggtccctccccagccatgcgaccccacagcatggggagacaattagacccagaggtctgggcttgtggaggaggaccagcagagagaccaacctgcctctgccttcctctgccagggagagcaggagacaggtggtgga

SEQ ID NO: 138049 - DNA, 548 bp, Homo sapiens
tgatggaactatctgctgggtccagcgtggcagccattagctgggtgtgtctgcggtcctggctcttgacctgcctctgatgtgaactaacttacsattaaacacacccagtggctgctgggttggacagcgtcacaaatggcagctcccgctgtgcccctcggaaagagctggaagctgctgcctgatttaggaacctcgtcctcccttcgagggggggatcatgggtgatacggcccagtgacagtggcgggggcgtggagggtgtggggtgggtggcggagaggccgtggccagctgcctcccatctcctacctcatcttggaggaagcttcctctgcaccaggaggccccagagaatggggttaggagcgcgccccctcaacccgagctctgaccggtgagcggtattcggatgaggctctgcgcgctggaggtccgcacctgacaccacagccctgaacttgctcgcaacgcctgccactctggccaccaggacaggatgaggagcccagcctgggggctgcggggctgggcgctcccctgac

SEQ ID NO: 138050 - DNA, 548 bp, Homo sapiens
tgatggaactatctgctgggtccagcgtggcagccattagctgggtgtgtctgcggtcctggctcttgacctgcctctgatgtgaactaacttaccattaaacacacccagtggctgctgggttggacagcgtcacaaatggcagctcccgctgtgcccctcggaaagagctggaagctgctgcctgatttaggaacctcgtcctcccttcgagggggggatcatgggtgatacggcccagtgacagtggcgggggcgtggagggtgtggggtgggtggcggagaggccgtggccagctgcctcccatctcctacctcatcttggaggaagcttcctctgcaccaggaggccccagagaatggggttaggagcgcgccccctcaacccgagctctgaccggtgagcggtattcggatgaggctctgcgcgctggaggtccgcacctgacaccacagccctgaacttgctcgcaaygcctgccactctggccaccaggacaggatgaggagcccagcctgggggctgcggggctgggcgctcccctgac

SEQ ID NO: 138051 - DNA, 495 bp, Homo sapiens
aaaggctccttcactttccagcttcaattttccaatctatataaagggcacagtcatagttcattattagtcatgaacttcaagaactacatggagttcttgtgggaattatataasgtcacataaataaaggcacttagcgcagattcaggaacatattagtttttgttttggtaaatgccatttattattatcaataacaatagcacctagcagccccttccccagtagtttccctgccccagcagtccctgccctagcagtgcattctagtcaattgcagacactggttttcccctttagacctacagatgtttcctatgagactactgaaagcttctccaggactgaatttcttcccttattctctcccatttcccacccatggagaagttagacaacgttcagttacttgtaattatccatcaacccatcactcactatgcaccaagcattgggtcatgcattgagaatccataaatcaataagacccag

SEQ ID NO: 138052 - DNA, 405 bp, Homo sapiens
tgtttctcctgtcttctctggtttactcaaccctttataaaagcacgacagcccygctcagtgtccaacaacattctatcaaggaagcccagtcagactgaggcatttggggctgccgtgtgtctgccaaggccacatctggattctgttaagtttcattcactggcctttttttggaccccaggccattctattggtgaccaccctgtatctgtaggagatgcctttgcctcgtaggttctttcctgttttctggaaatgaatagctaagaacagtgattcgggtaagattacttgggagatccagcagaggcagaagctaaagaccatgttctgtgccctgtcctgggggcctgggaagctacaagggaacagacagaagcgcaagttaatgtgcctgagtga

SEQ ID NO: 138053 - DNA, 405 bp, Homo sapiens
tgtttctcctgtcttctctggtttactcaaccctttataaaagcacgacagccccgctcagtgtccaacaacattctatcaaggaagcccagtcagactgaggcatttggggctgccrtgtgtctgccaaggccacatctggattctgttaagtttcattcactggcctttttttggaccccaggccattctattggtgaccaccctgtatctgtaggagatgcctttgcctcgtaggttctttcctgttttctggaaatgaatagctaagaacagtgattcgggtaagattacttgggagatccagcagaggcagaagctaaagaccatgttctgtgccctgtcctgggggcctgggaagctacaagggaacagacagaagcgcaagttaatgtgcctgagtga

SEQ ID NO: 138054 - DNA, 405 bp, Homo sapiens
tgtttctcctgtcttctctggtttactcaaccctttataaaagcacgacagccccgctcagtgtccaacaacattctatcaaggaagcccagtcagactgaggcatttggggctgccgtgtgtctgccaaggccacatctggattctgttaagtttcattcactggcctttttttggaccccaggccattctattggtgaccaccctgtatctgtaggagatgcctttgcctcgtaggttctttcctgttttctggaaatgaatagctaagaacagtgattcsggtaagattacttgggagatccagcagaggcagaagctaaagaccatgttctgtgccctgtcctgggggcctgggaagctacaagggaacagacagaagcgcaagttaatgtgcctgagtga

SEQ ID NO: 138055 - DNA, 414 bp, Homo sapiens
tctcctgtcttctctggtttactcaaccctttataaaagcacgacagccccgctcagtgtccaacaacattctatcaaggaagcccagtcagactgaggcatttggggctgccgtgtgtctgccaaggccacatctggattctgttaagtttcattcactggcctttttttggaccccaggccattctattggtgaccaccctgtatctgtaggagatgcctttgcctcgtaggttctttcctgttttctggaaatgaatagctaagaacagtgattcgggtaagattacttgggagatccagcagaggcagaagctaragaccatgttctgtgccctgtcctgggggcctgggaagctacaagggaacagacagaagcgcaagttaatgtgcctgagtgacccaatgtgaggg

SEQ ID NO: 138056 - DNA, 414 bp, Homo sapiens
tctcctgtcttctctggtttactcaaccctttataaaagcacgacagccccgctcagtgtccaacaacattctatcaaggaagcccagtcagactgaggcatttggggctgccgtgtgtctgccaaggccacatctggattctgttaagtttcattcactggcctttttttggaccccaggccattctattggtgaccaccctgtatctgtaggagatgcctttgcctcgtaggttctttcctgttttctggaaatgaatagctaagaacagtgattcgggtaagattacttgggagatccagcagaggcagaagctaaagaccatgttcygtgccctgtcctgggggcctgggaagctacaagggaacagacagaagcgcaagttaatgtgcctgagtgacccaatgtgaggg

SEQ ID NO: 138057 - DNA, 414 bp, Homo sapiens
tctcctgtcttctctggtttactcaaccctttataaaagcacgacagccccgctcagtgtccaacaacattctatcaaggaagcccagtcagactgaggcatttggggctgccgtgtgtctgccaaggccacatctggattctgttaagtttcattcactggcctttttttggaccccaggccattctattggtgaccaccctgtatctgtaggagatgcctttgcctcgtaggttctttcctgttttctggaaatgaatagctaagaacagtgattcgggtaagattacttgggagatccagcagaggcagaagctaaagaccatgttctgtgccctgtcctgggggcctgggaagctacaagggaacagacagaagcgcamgttaatgtgcctgagtgacccaatgtgaggg

SEQ ID NO: 138058 - DNA, 553 bp, Homo sapiens
ccaccagcgttgagcatcccgtgttgatgacagcgaccaccakgggtcaacgtcctcttcacaatcctgtgtcagagcatcacttgactgatttcattagcaacttcccaggagaatcagcttacaaaatacttgtcccattttccatgcagatgtaacccatctattttactgaagaaatgggaagagctgaatgctgaatacactgaatgtctgcaggttgtgcaagtttgtgactttatcactttctaatttctgatctgtgtggaccactctacagatttttctcactggtgtgatcagccttctggatgtcaaatataatagactttcaacaatataaaagtcaacacaagctcctcatggtttcagtgctcagtgatgactctaaacttacacaatgtgtttctttattagttttgttttctggtatctctactcggcatcttcaccacacccattttatgtttcttatacaggtaattgataattttaaaatttattggtgcttactttaattaaataagcagacagtatcttagaatttaaaaaa

SEQ ID NO: 138059 - DNA, 553 bp, Homo sapiens
ccaccagcgttgagcatcccgtgttgatgacagcgaccaccatgggtcaacgtcctcttcacaatcctgtgtcagagcatcacttgactgatttcattagcaacttcccaggagaatcagcttacaaaatacttgtcccattttccatgcagatgtaacccatctattttactgaagaaatgggaagagctgaatgctgaatacactgaatgtctgcaggttgtgcaagtttgtgactttatcactttctaatttctgatctgtgtggaccactctacagatttttctcactggtgtgatcagccttctggatgtcaaatataatagactttcaayaatataaaagtcaacacaagctcctcatggtttcagtgctcagtgatgactctaaacttacacaatgtgtttctttattagttttgttttctggtatctctactcggcatcttcaccacacccattttatgtttcttatacaggtaattgataattttaaaatttattggtgcttactttaattaaataagcagacagtatcttagaatttaaaaaa

SEQ ID NO: 138060 - DNA, 442 bp, Homo sapiens
tcggtttctcttgccacatgtatgatgaaaatttgaagaatgtttctttccttctccataatcataggctgcgatggactggaggtcctggtacataagaataaatgtgtctccagtaggaacagaattagtcccataaaataattgtgctgccgtggttctcatactgttggaacagctgaccaagaaagtgttgtaacagctgcagtgtttattgattcctatcatatttggggctacattcgcagctaccaagggaaagagagagaagtaattctggcctagatagagtctatagattttttttttctttccttcaaactgaggtttaaaaaaatcacatcaactaaaatgcagatgatgatcaaatgatcaaggacaayagccattaaatgtttcaggtgtgttttaacccaaagtcacacaacatgtgagaacatga

SEQ ID NO: 138061 - DNA, 430 bp, Homo sapiens
gccacatgtatgatgaaaatttgaagaatgtttctttccttctccataatcataggctgcgatggactggaggtcctggtacataagaataaatgtgtctccagtaggaacagaattagtcccataaaataattgtgctgccgtggttctcatactgttggaacagctgaccaagaaagtgttgtaacagctgcagtgtttattgattcctatcatatttggggctacattcgcagctaccaagggaaagagagagaagtaattctggcctagatagagtctatagattttttttttctttccttcaaactgaggtttaaaaaaatcacatcaactaaaatgcagatgatgatcaaatgatcaaggacaatagccattaaatgtttcaggtgtgttttaacccaaagtcrcacaacatgtgagaacatga

SEQ ID NO: 138062 - DNA, 329 bp, Homo sapiens
tctttgctgccatctactcatcaaaaaaaacagctctttgttcatcataacaaagagccatactcttccaagcctaggcccttagaraaaaccctcaccaatcaccccatcagtgattgtggatctctcaaaaacttcataataacttcataatattcaaacttctgtctttgttcttagtggcccccaggttttagagcatgttgggttgtggcaggactcctaagtaggggaggtagaaactatttactcaagcagcctcttgaacaggtacaccattcaatacagttttattattgaggtatgattcatcagaataatgtcagttc

SEQ ID NO: 138063 - DNA, 567 bp, Homo sapiens
agctcataattgtgtgatggaaaatataaacctaaatatatacaatttttgtaaaaagtatttagcagttcattaaaccaaggattaaatgcagactgtataaagttatctaataacttatttggtgagggtggggatatcatgagatgcatgcaaaaaagaatgaagtaactttcctcatttgcatataagatgttaccattcactaaagacctttaatttaaaaaaatcaattttcattgtgacccaggttttttcttcctgacaagcaaataacccagataattcttttctttccttggttgataaagattttccccaaacttcagctcagttcaggcacacactgtccctgaatgggctatttacccacagatgggtacacacacctgtcaacatggagtgactctttcgatcagacaaactacacctttactcamgtggattcttccctcagacaaacacatattccccacatggactctttcctcagaccaccacgtatgtccttacatttactctttcctctggtaatgacatttcctcatgtggactcttggtctcaga

SEQ ID NO: 138064 - DNA, 501 bp, Homo sapiens
tattttccaagtaatactagcaatgatctctcaggacaatttttaaaataggttatttatatattctcttgattaaaaataatactattattaaaatagtaaaattataaaaatcacacctgtaatcccagaactttgggaggctaaggcaggcagatcacttgagctcaggacttttagaacagcctggcagcacagtgaggtcttttctatacaaaaataataataataaatacctgggtatggttccacctgtggtagcagctacttgaaaggctgaggtgggaggatcccttaagcctgggaggttaatgmtgcagtgagctgtgattgtgccactgcactccagtctcgttgacagagtgagaccctatttaaagaaaatgtatatcctcaatataaactgtttcaatgattagagttttgtatttttgtgctgtaatagtcaaacaattgtacatgttttttaacattaactcagcgtatacatggcattttgtt

SEQ ID NO: 138065 - DNA, 613 bp, Homo sapiens
ctgtttcaatgattagagttttgtatttttgtgctgtaatagtcaaacaattgtacatgttttttaacattaactcagcgtatacatggcattttgtttctttttctttcatctgctgtttttggaaattaaacacgactttaaatgctcttgttctccattttggttggcttcaggtgtcctgtttttcagactgtttctccatcttccctttttctttgaaagtattttaccttcctcagtctccatgaaggaaaaagaaagtcactttactttctgacctccaagtctggtgaatcagttcccttgtcttcataatcactgaagccaaccaagtttagaggataatggctctccttagaatatgctcatctacctgcagactctgccctactcacccttttccagggtcctgcagtccatcccctcatttccctaagtaccacagagtgggctctgcagctcctgctgccctctgtgtgttcagmcctggggctcattatgttttgatgatgaagtccaaatccccatgtgcttggaccctctgagaccaccctctaggaagatgccattgtgagtgagccctgaaaataatgggctgtgttcagtttca

SEQ ID NO: 138066 - DNA, 548 bp, Homo sapiens
tgaaaataatgggctgtgttcagtttcattatcctggatgttctctatcataaaggaatattgacaaataaatactagagtttgtattgaatattcatgccatcaaagttctcttttttcatttttcaaatgaaacaattttatctttcctggtttgaaaactacaatctaaatttaacaaataatgtaatacaatgtttgtcttattagttattcaatttattaaaarcagactgatatttaaagttaataccattgcacgtttgagtgacatatttggcaagaacagcatttacattcagctttaacaaaacatgtatttaaatatatttgtctttttagtattggaataggcagacatacacgtagaagagcattattttctactacaacctcaaactgcaaacacagtttaaattcaattaagtaattaaaaaatatgaaacaaataggtgtgctattttggtgtttagatatacattcacttttgcatgggcatatgtatgtgtctttgctgggctgttgtgtatgtatgtgtgtttgtagaa

SEQ ID NO: 138067 - DNA, 548 bp, Homo sapiens
tgaaaataatgggctgtgttcagtttcattatcctggatgttctctatcataaaggaatattgacaaataaatactagagtttgtattgaatattcatgccatcaaagttctcttttttcatttttcaaatgaaacaattttatctttcctggtttgaaaactacaatctaaatttaacaaataatgtaatacaatgtttgtcttattagttattcaatttattaaaagcagactgatatttaaagttaataccattgcacrtttgagtgacatatttggcaagaacagcatttacattcagctttaacaaaacatgtatttaaatatatttgtctttttagtattggaataggcagacatacacgtagaagagcattattttctactacaacctcaaactgcaaacacagtttaaattcaattaagtaattaaaaaatatgaaacaaataggtgtgctattttggtgtttagatatacattcacttttgcatgggcatatgtatgtgtctttgctgggctgttgtgtatgtatgtgtgtttgtagaa

SEQ ID NO: 138068 - DNA, 551 bp, Homo sapiens
aatgagggcataagcttctttggtcaaagtggggtgaggatgtggaattgatcctgtgctgtgtaaactgtcacagagtcaccttcttcaccggtagtgttagaagagcctgtaaaagttgttggaatccaactggagtcccttgtgttcaaaccctgacaaatggagctgrggaaggccatttatggaagcttctcatgcacatacccctgagaacaagacctagctttataacactccaaaaaaccacaaattgaacaaaggcaaccacaacaataaaagaattacttatatccctaagaacaacagctagctttataacactcagaatagccacaactgtgcacaaaggcaaccacaacaacaaaataattacttatatccctaacaacaagagctagttttataacactcagaaaagccacaaccttgcacaaaggcaaccacaacaataaaagaattacttctgtgaaaatatctgcacagcaactgcctgtccaaccttacactgatgtcaaccttgttattgatgcttctagcctgggatcgtt

SEQ ID NO: 138069 - DNA, 577 bp, Homo sapiens
ttgtttagaagcattttttcagaacttctataggtcaacctttcagaaattcctcattatcaacagtcaaatacagatgtattttctttggctctcgcaacaggcttagaggaatttctagtctgttcttgtgacgtttcattatatgcatcttttgctcaggcctgttaaacctactcaacgtgtgtatcttctactccatgtctttattcttactgttgtcttaacatgaaatccttgcaacccaattcatagtttttgtwctttggaaaaatccagattatgtatcatcaatacatattttttctctattgagattttcctgtttttatgtatcacagccagaagtaatcactgcatagagtatttctgcagaaagatggaagagttctattttaacacaatatttactatacacccagcaaaggtctaggtatttatagatactattttatatattcatcccatcaatgctatgaagaaatattaataaacccattatatatgctaaaaggtagcgacacatatatgccacatgtgcaggttttctcaggtattattagctagggaagctgtg

SEQ ID NO: 138070 - DNA, 560 bp, Homo sapiens
agtacagaaaattgtagcaccataaagttttacgggagcacagccacacctgttgctttatctgtggttactttttgtgctacagcagcagagttgagtatttccaacagactgcgtggcctgaaagactcaaatgttcactctctggcacttgaggaagagcttgctggctgctgggcttcccctgcttcggggcttctccccttgtcacactctcactttgtcattttgttctgccatggtgatcatttcactcttgttgtttgagccttgcaatttataatgttgttcagatgtttatttgaatgaaatatttgtctttcatgtaartctaagtatttcctaatttaaaattaatatttaagtgtatgattttttatagtgaatgatgttttaaaacacagttcctaagaagccagaatctacggctgatgaagaaaaaattggaaacgaagagagtgatttagaagaagcctgcattttgcctcatagtccaataaatgtggacaagagacccattgcaattaaatcacccaaggtgcagtgttttctgtgattct

SEQ ID NO: 138071 - DNA, 560 bp, Homo sapiens
agtacagaaaattgtagcaccataaagttttacgggagcacagccacacctgttgctttatctgtggttactttttgtgctacagcagcagagttgagtatttccaacagactgcgtggcctgaaagactcaaatgttcactctctggcacttgaggaagagcttgctggctgctgggcttcccctgcttcggggcttctccccttgtcacactctcactttgtcattttgttctgccatggtgatcatttcactcttgttgtttgagccttgcaatttataatgttgttcagatgtttatttgaatgaaatatttgtctttcatgtaaatctaagtatttcctaatttaaaattaatrtttaagtgtatgattttttatagtgaatgatgttttaaaacacagttcctaagaagccagaatctacggctgatgaagaaaaaattggaaacgaagagagtgatttagaagaagcctgcattttgcctcatagtccaataaatgtggacaagagacccattgcaattaaatcacccaaggtgcagtgttttctgtgattct

SEQ ID NO: 138072 - DNA, 611 bp, Homo sapiens
tattttcatcataggaatgataaaagcatgagagtacagttgtattaaaatgtgcttgtatcacaagcacaggtgctaaaaaggaggggaaaacatccttactgatattttcaatgtatgttttacttttcatcaacatgaacctcaacttgatatgatgcagattgaaggaaatcacccataattccatatgaaraaggcctgtgatattttatgggaaaataaatagagaaaatgctaacggaaactctgttaagcatgaagctttatggagcaaacacaaatccagtggtgaaagatacacactcgagttctgtttgttgtcttggaacaatacggtttagaggtgactggcgggtgaggagaacatatgcgagttcaccaaagagaaaagctgaatgaggcaatgcctcttcctgaccatatctcttactcagataactatagaatttattgtccagtaaagggtatattaaaaaatcatattaaaagtcatgcagtgaagttgtccagggaaatcaagacttaacagtctcactctgacaataatgaacagggggattccctcaagatagactaggacatgaccccacactggcaggtagtagtac

SEQ ID NO: 138073 - DNA, 393 bp, Homo sapiens
tgactggcgggtgaggagaacatatgcgagttcaccaaagagaaaagctgaatgaggcaatgcctcttcctgaccatatctcttactcagataactatagaatttattgtccagtaaagggtatattaaaaaatcatattaaaagtcatgcagtgaagttgtccagggaaatcaagacttaacagtctcactctgacaataatgaacagggggattccctcaagatagactaggacatgaccccacactggcaggtagtagtacsagaaaagaacgcatggaaaatctttaccttatgcttgaggtagggaccaggctaaagtgaaagccagacctaaaattctatctaaaataaatccacaattgaagaaaatatgtggtgtacaggcatag

SEQ ID NO: 138074 - DNA, 284 bp, Homo sapiens
ctaggttatccagtagattttgaaatgttatgattaaatatctacttctcaagcattcatctttgcaaatgaaacwatcccaagctcttataaagcacatcatataaagggcagattagtcaatatatggttcagaaataattatgtaatatttataagaaaattaaaaatttagatccttaactcagataacaataatccaaattaaaatttgatttcattacataatttaaaatgacaccagaatactagtaaaatgtagctaagtttatataatctttttt

SEQ ID NO: 138075 - DNA, 284 bp, Homo sapiens
ctaggttatccagtagattttgaaatgttatgattaaatatctacttctcaagcattcatctttgcaaatgaaactatcccaagctcttataawgcacatcatataaagggcagattagtcaatatatggttcagaaataattatgtaatatttataagaaaattaaaaatttagatccttaactcagataacaataatccaaattaaaatttgatttcattacataatttaaaatgacaccagaatactagtaaaatgtagctaagtttatataatctttttt

SEQ ID NO: 138076 - DNA, 571 bp, Homo sapiens
ggggcatgattaaactaatttaaagcataataacatggagaaatattgcgaaacatacattttactgaattaattgttaatatctaatcattatgtgagaacaaaattaaagagtagctacacaggcgcacacccacacacaactgcaatattgtcaaataaacgatgttcagctacactagaaatcacamctgtgtttttttccacagaagagcaaagattaaaaacacaatattatttattgtacatatggaggtaaagatactcaaaatattacccaaaaatgcatttttttttgagatggagttttgcttttattgcccaggctagagtgcaatggcacaatcttggctcactgcaacctcagcctcccagggtcaagtaattctcctagctcagcctcccaagtagctgagattacaggcatgcaccaccacactcggctaattttttgcatttagtagagacggggtttcaccatgtaggtcaggctggtctccaactcctgacttcaggtgatctacccacttcagcctcccaaagtgttgggattacaggcgtgcgcctggcc

SEQ ID NO: 138077 - DNA, 571 bp, Homo sapiens
ggggcatgattaaactaatttaaagcataataacatggagaaatattgcgaaacatacattttactgaattaattgttaatatctaatcattatgtgagaacaaaattaaagagtagctacacaggcgcacacccacacacaactgcaatattgtcaaataaacgatgttcagctacactagaaatcacacctgtgtttttttccacagaagagcaaagattaaaaacacaatattatttattgtacatatggaggtaaagatactcaaaatattacccaaaaatgcatttttttttgagatggagttttgcttttattgcccaggctagagtgcaatggcacaatcttggctcactgcaacctcagcctcccagggtcaagtaattctcctagctcagcctcccaagtagctgagattacaggcatgcaccaccacactcggctaattttttgcatttagtagagacggggtttcaccatgtaggtcaggctggtctccaactcctgacttcwggtgatctacccacttcagcctcccaaagtgttgggattacaggcgtgcgcctggcc

SEQ ID NO: 138078 - DNA, 571 bp, Homo sapiens
ggggcatgattaaactaatttaaagcataataacatggagaaatattgcgaaacatacattttactgaattaattgttaatatctaatcattatgtgagaacaaaattaaagagtagctacacaggcgcacacccacacacaactgcaatattgtcaaataaacgatgttcagctacactagaaatcacacctgtgtttttttccacagaagagcaaagattaaaaacacaatattatttattgtacatatggaggtaaagatactcaaaatattacccaaaaatgcatttttttttgagatggagttttgcttttattgcccaggctagagtgcaatggcacaatcttggctcactgcaacctcagcctcccagggtcaagtaattctcctagctcagcctcccaagtagctgagattacaggcatgcaccaccacactcggctaattttttgcatttagtagagacggggtttcaccatgtaggtcaggctggtctccaactcctgacttcaggygatctacccacttcagcctcccaaagtgttgggattacaggcgtgcgcctggcc

SEQ ID NO: 138079 - DNA, 257 bp, Homo sapiens
tttcaccatgtaggtcaggctggtctccaactcctgacttcaggtgatctacccacttcagcctcccaaagtgttgggattacaggcgtgcgcctggscagctttttgacatatttcaagatggctactcggaagactggagatagcttcttctacaaaaatagctgaaaagctgtgtttgttggggagatttgtatttgtagagaaaatctgcattgatatagacaggctttccctgagatactcccttgtctggg

SEQ ID NO: 138080 - DNA, 257 bp, Homo sapiens
tttcaccatgtaggtcaggctggtctccaactcctgacttcaggtgatctacccacttcagcctcccaaagtgttgggattacaggcgtgcgcctggccagctttttgacatatttcaagatggctactcggaagactggagatagcttcttctacaaraatagctgaaaagctgtgtttgttggggagatttgtatttgtagagaaaatctgcattgatatagacaggctttccctgagatactcccttgtctggg

SEQ ID NO: 138081 - DNA, 287 bp, Homo sapiens
tgctgtgcttcttatccttcttgtggagatttcagattatctgaattgcttttctwtcttaagaaaaaacgcaacaattctcccacctgagaggcatgtaaactgtagtaagttagcagaaccaatccgtaaagtttttacattgtttgttgcaaaatgcagcgctggtgtctccatcactaaccttttctatccctcattgctctttctttgactgcaataggatacctgtaggcaaatctgtattcccgagacagagtgcccttttggtgagctataagcacact

SEQ ID NO: 138082 - DNA, 287 bp, Homo sapiens
tgctgtgcttcttatccttcttgtggagatttcagattatctgaattgcttttctatcttaagaaaaaacgcaacaattctcccacctgagaggcatgtaaactgtagtaagttagcagaaccaatccgtaaagtttttacattgtttgttgcaaaatgcagcgctggtgtctccatcactaaccttttctatccctcrttgctctttctttgactgcaataggatacctgtaggcaaatctgtattcccgagacagagtgcccttttggtgagctataagcacact

SEQ ID NO: 138083 - DNA, 287 bp, Homo sapiens
tgctgtgcttcttatccttcttgtggagatttcagattatctgaattgcttttctatcttaagaaaaaacgcaacaattctcccacctgagaggcatgtaaactgtagtaagttagcagaaccaatccgtaaagtttttacattgtttgttgcaaaatgcagcgctggtgtctccatcactaaccttttctatccctcattrctctttctttgactgcaataggatacctgtaggcaaatctgtattcccgagacagagtgcccttttggtgagctataagcacact

SEQ ID NO: 138084 - DNA, 436 bp, Homo sapiens
aaatgaattttatgtgggctttttcatgaaaatgttcctaaggtattttatttttttattgtggtaaaatacacataacataaaatgtactcggttaaccattttaagtgtacagttcagtggtactaaatatagtcataacattgtgcagccgtccctaccatccatctccataattcgtttcatcttgtaaaactgaaactctatacccattaaacaatacttccccatttcttcctccccccagcttctggcaacaatcattgtaccatcyctataatgctaatcaagcatagtggctgtgtttcttgcttcctctagtccgcaggtagcatacaaatgtaataaactacttattcatgtcacatcaatttattttctgccttataccaagcttgtgggattctcttcaatacaagcattctttaatactttt

SEQ ID NO: 138085 - DNA, 350 bp, Homo sapiens
tgacagtcctgtattacttcaagtacttcctggccctcttctcatgtgtctttactgccttttatgtatgtgttagatgttcaacaaattctctttcttaaactgaatttaagccgtggagcagtgttttgttgaacaataamtatgatataggacactcttcctccttttcatgtatgatcctgttcatgaaaaagagaaattctttcattgtgctagaagcttaaaataatgaaaatgccactttctacattaaacagaaactgaagggaatcaaggtgaattgcatgagacatagaaaacaagtgggaaagaaatctagtataatttgccctttgtgtacctttatt

SEQ ID NO: 138086 - DNA, 596 bp, Homo sapiens
atttcactttgtcatagtgtataattcttttatatgttgctagatctgatttgttagtatttttwaaggaagtttgcatttatacttatagtagttttatttttctatgctatttggactaatttttgtatcaaggtaacactggccccacagaataaattgggaagtgaatatttctcttttttaaaaaagctagtcaagaagtaatatcaattattcaacactaacaaatattattattataaattattaatttctctaattttaattttcttccttctgcttgctttaggtttagtttgctaatcgttccagtgccttaatgtggaacgtcatcttatctcatcctttcatttgtcttttcattttgtaaatagtgtcttgttagcatcaggtgagctccccaggttggtagtactccatgtttgttgctgtacaacagtgacaggtaatatgtcctgaagacaatggaaacttaacattcaaaatctcctagattccaccttatatgatatgtctcttctattggtcctaatttctaccctttctctattataaaccatgagtacagtggcattcaatgagttctgtgagtc

SEQ ID NO: 138087 - DNA, 596 bp, Homo sapiens
atttcactttgtcatagtgtataattcttttatatgttgctagatctgatttgttagtatttttaaaggaagtttgcatttatacttatagtagttttatttttctatgctatttggactaatttttgtatcaargtaacactggccccacagaataaattgggaagtgaatatttctcttttttaaaaaagctagtcaagaagtaatatcaattattcaacactaacaaatattattattataaattattaatttctctaattttaattttcttccttctgcttgctttaggtttagtttgctaatcgttccagtgccttaatgtggaacgtcatcttatctcatcctttcatttgtcttttcattttgtaaatagtgtcttgttagcatcaggtgagctccccaggttggtagtactccatgtttgttgctgtacaacagtgacaggtaatatgtcctgaagacaatggaaacttaacattcaaaatctcctagattccaccttatatgatatgtctcttctattggtcctaatttctaccctttctctattataaaccatgagtacagtggcattcaatgagttctgtgagtc

SEQ ID NO: 138088 - DNA, 596 bp, Homo sapiens
atttcactttgtcatagtgtataattcttttatatgttgctagatctgatttgttagtatttttaaaggaagtttgcatttatacttatagtagttttatttttctatgctatttggactaatttttgtatcaaggtaacactggccccacagaataaattgggaagtgaatatttctcttttttaaaaaagctagtcaagaagtaatatcaattattcaacactaacaaatattattrttataaattattaatttctctaattttaattttcttccttctgcttgctttaggtttagtttgctaatcgttccagtgccttaatgtggaacgtcatcttatctcatcctttcatttgtcttttcattttgtaaatagtgtcttgttagcatcaggtgagctccccaggttggtagtactccatgtttgttgctgtacaacagtgacaggtaatatgtcctgaagacaatggaaacttaacattcaaaatctcctagattccaccttatatgatatgtctcttctattggtcctaatttctaccctttctctattataaaccatgagtacagtggcattcaatgagttctgtgagtc

SEQ ID NO: 138089 - DNA, 413 bp, Homo sapiens
aaatcacatttttgaaccttgatgcttgaagtgtagcttgggtaacagatgggctttaagccaattttggcatgcaaggggttgagtttattaggcatcagcacygctgaaaatcgtggggatgcaggcttaatttcaacactattctaaatacttgaaagatattatataagtctttaataaactcctgtgtctacaaatggttcacattaactcaatatccatgattaaacatctacaaaatcaaggcactgttatttagtggagacttgctggctattctatgagaggaggtattgttattgtaatctcgtcatctcataaaattgtatcatattactcataaccagcccttcatatcctattcctattttggtattttaaaataagatatctttgaaactcttgaattc

SEQ ID NO: 138090 - DNA, 413 bp, Homo sapiens
aaatcacatttttgaaccttgatgcttgaagtgtagcttgggtaacagatgggctttaagccaattttggcatgcaaggggttgagtttattaggcatcagcactgctgaaaatcgtggggatgcaggcttaatttcaacactattctaaatacttgaaagatattatataagtctttaataaactcctgtgtctacaaatggttcacattaactcaatatccatgattaaacatctayaaaatcaaggcactgttatttagtggagacttgctggctattctatgagaggaggtattgttattgtaatctcgtcatctcataaaattgtatcatattactcataaccagcccttcatatcctattcctattttggtattttaaaataagatatctttgaaactcttgaattc

SEQ ID NO: 138091 - DNA, 384 bp, Homo sapiens
cacaatcatattatactctggtgaaattatctcatatattcctatcgcatttaaaattaattcagaatcatcccatgattatcaaaaccctacatgctcttccacaacatggtttacttccaagatatctcttcaacatttttttcactgtactgaattggtgactaatagtcatatttttgtttttgctcaaaaagtcttgacttgtaartttctcagtttctcctttatccacaggtaactctttcctcataaggtgaattgcttgcttccttgagttctgctctcaaagatacccttcattttctacctaatattaataactttaatcattcattattccattactatgctctatagtgtatacaatttctgttctttgtc

SEQ ID NO: 138092 - DNA, 384 bp, Homo sapiens
cacaatcatattatactctggtgaaattatctcatatattcctatcgcatttaaaattaattcagaatcatcccatgattatcaaaaccctacatgctcttccacaacatggtttacttccaagatatctcttcaacatttttttcactgtactgaattggtgactaatagtcatatttttgtttttgctcaaaaagtcttgacttgtaagtttytcagtttctcctttatccacaggtaactctttcctcataaggtgaattgcttgcttccttgagttctgctctcaaagatacccttcattttctacctaatattaataactttaatcattcattattccattactatgctctatagtgtatacaatttctgttctttgtc

SEQ ID NO: 138093 - DNA, 524 bp, Homo sapiens
ggatggaatagggttccaaacctgacaacaatgaaagacccaaactaacttcaaagtcatgactttatttttatagcaacgaggttgccaagaactgagtcaaaatgtgagggaaaacaagcacctgcaaggmgaaagaggacggatgcacttacataggacagacgcaaataggcaccaccatgacaagtaaagctggaataatcaataaattcctaaacacaaagtggggctggtgagattgggagacggctgacagctgcagaagttgggaaagatccatcatcttgaaaactttttccccacaaacccactgcgatctctcaagcaattggtaaggaatccaagagagtctgtatatgacacagatcagggagagcagaacacttgggaggtgaccaggtcttgggggccgagcccttatgaatgggattagtgcctttataaaagaagctcaatggagttgttgtgtgccttccactatgtgaggacatagaaagcaggcaccacctatgaaccatgaa

SEQ ID NO: 138094 - DNA, 524 bp, Homo sapiens
ggatggaatagggttccaaacctgacaacaatgaaagacccaaactaacttcaaagtcatgactttatttttatagcaacgaggttgccaagaactgagtcaaaatgtgagggaaaacaagcacctgcaaggcgaargaggacggatgcacttacataggacagacgcaaataggcaccaccatgacaagtaaagctggaataatcaataaattcctaaacacaaagtggggctggtgagattgggagacggctgacagctgcagaagttgggaaagatccatcatcttgaaaactttttccccacaaacccactgcgatctctcaagcaattggtaaggaatccaagagagtctgtatatgacacagatcagggagagcagaacacttgggaggtgaccaggtcttgggggccgagcccttatgaatgggattagtgcctttataaaagaagctcaatggagttgttgtgtgccttccactatgtgaggacatagaaagcaggcaccacctatgaaccatgaa

SEQ ID NO: 138095 - DNA, 536 bp, Homo sapiens
ttccaaacctgacaacaatgaaagacccaaactaacttcaaagtcatgactttatttttatagcaacgaggttgccaagaactgagtcaaaatgtgagggaaaacaagcacctgcaaggcgaaagaggacrgatgcacttacataggacagacgcaaataggcaccaccatgacaagtaaagctggaataatcaataaattcctaaacacaaagtggggctggtgagattgggagacggctgacagctgcagaagttgggaaagatccatcatcttgaaaactttttccccacaaacccactgcgatctctcaagcaattggtaaggaatccaagagagtctgtatatgacacagatcagggagagcagaacacttgggaggtgaccaggtcttgggggccgagcccttatgaatgggattagtgcctttataaaagaagctcaatggagttgttgtgtgccttccactatgtgaggacatagaaagcaggcaccacctatgaaccatgaaatgggctctcatcaacactgaattt

SEQ ID NO: 138096 - DNA, 536 bp, Homo sapiens
ttccaaacctgacaacaatgaaagacccaaactaacttcaaagtcatgactttatttttatagcaacgaggttgccaagaactgagtcaaaatgtgagggaaaacaagcacctgcaaggcgaaagaggacggatgcacttacrtaggacagacgcaaataggcaccaccatgacaagtaaagctggaataatcaataaattcctaaacacaaagtggggctggtgagattgggagacggctgacagctgcagaagttgggaaagatccatcatcttgaaaactttttccccacaaacccactgcgatctctcaagcaattggtaaggaatccaagagagtctgtatatgacacagatcagggagagcagaacacttgggaggtgaccaggtcttgggggccgagcccttatgaatgggattagtgcctttataaaagaagctcaatggagttgttgtgtgccttccactatgtgaggacatagaaagcaggcaccacctatgaaccatgaaatgggctctcatcaacactgaattt

SEQ ID NO: 138097 - DNA, 534 bp, Homo sapiens
tggaatagggttccaaacctgacaacaatgaaagacccaaactaacttcaaagtcatgactttatttttatagcaacgaggttgccaagaactgagtcaaaatgtgagggaaaacaagcacctgcaaggcgaaagaggacggatgcacttacatagracagacgcaaataggcaccaccatgacaagtaaagctggaataatcaataaattcctaaacacaaagtggggctggtgagattgggagacggctgacagctgcagaagttgggaaagatccatcatcttgaaaactttttccccacaaacccactgcgatctctcaagcaattggtaaggaatccaagagagtctgtatatgacacagatcagggagagcagaacacttgggaggtgaccaggtcttgggggccgagcccttatgaatgggattagtgcctttataaaagaagctcaatggagttgttgtgtgccttccactatgtgaggacatagaaagcaggcaccacctatgaaccatgaaatgggctctcatc

SEQ ID NO: 138098 - DNA, 524 bp, Homo sapiens
ggatggaatagggttccaaacctgacaacaatgaaagacccaaactaacttcaaagtcatgactttatttttatagcaacgaggttgccaagaactgagtcaaaatgtgagggaaaacaagcacctgcaaggcgaaagaggacggatgcacttacataggacagamgcaaataggcaccaccatgacaagtaaagctggaataatcaataaattcctaaacacaaagtggggctggtgagattgggagacggctgacagctgcagaagttgggaaagatccatcatcttgaaaactttttccccacaaacccactgcgatctctcaagcaattggtaaggaatccaagagagtctgtatatgacacagatcagggagagcagaacacttgggaggtgaccaggtcttgggggccgagcccttatgaatgggattagtgcctttataaaagaagctcaatggagttgttgtgtgccttccactatgtgaggacatagaaagcaggcaccacctatgaaccatgaa

SEQ ID NO: 138099 - DNA, 512 bp, Homo sapiens
aactaacttcaaagtcatgactttatttttatagcaacgaggttgccaagaactgagtcaaaatgtgagggaaaacaagcacctgcaaggcgaaagaggacggatgcacttacataggacagacgcaaatagrcaccaccatgacaagtaaagctggaataatcaataaattcctaaacacaaagtggggctggtgagattgggagacggctgacagctgcagaagttgggaaagatccatcatcttgaaaactttttccccacaaacccactgcgatctctcaagcaattggtaaggaatccaagagagtctgtatatgacacagatcagggagagcagaacacttgggaggtgaccaggtcttgggggccgagcccttatgaatgggattagtgcctttataaaagaagctcaatggagttgttgtgtgccttccactatgtgaggacatagaaagcaggcaccacctatgaaccatgaaatgggctctcatcaacactgaatttgtgag

SEQ ID NO: 138100 - DNA, 534 bp, Homo sapiens
tggaatagggttccaaacctgacaacaatgaaagacccaaactaacttcaaagtcatgactttatttttatagcaacgaggttgccaagaactgagtcaaaatgtgagggaaaacaagcacctgcaaggcgaaagaggacggatgcacttacataggacagacgcaaataggcaccaccatgacaagtaaagctggaataatcaataaattcctaaasacaaagtggggctggtgagattgggagacggctgacagctgcagaagttgggaaagatccatcatcttgaaaactttttccccacaaacccactgcgatctctcaagcaattggtaaggaatccaagagagtctgtatatgacacagatcagggagagcagaacacttgggaggtgaccaggtcttgggggccgagcccttatgaatgggattagtgcctttataaaagaagctcaatggagttgttgtgtgccttccactatgtgaggacatagaaagcaggcaccacctatgaaccatgaaatgggctctcatc

SEQ ID NO: 138101 - DNA, 536 bp, Homo sapiens
ttccaaacctgacaacaatgaaagacccaaactaacttcaaagtcatgactttatttttatagcaacgaggttgccaagaactgagtcaaaatgtgagggaaaacaagcacctgcaaggcgaaagaggacggatgcacttacataggacagacgcaaataggcaccaccatgacaagtaaagctggaataatcaataaattcctaaacacaaagtggggctggtgagattgggagacggctgacagctgcagaagttgggaaagatccatcatcttgaaaactttttccccacaaacccactgygatctctcaagcaattggtaaggaatccaagagagtctgtatatgacacagatcagggagagcagaacacttgggaggtgaccaggtcttgggggccgagcccttatgaatgggattagtgcctttataaaagaagctcaatggagttgttgtgtgccttccactatgtgaggacatagaaagcaggcaccacctatgaaccatgaaatgggctctcatcaacactgaattt

SEQ ID NO: 138102 - DNA, 541 bp, Homo sapiens
agggttccaaacctgacaacaatgaaagacccaaactaacttcaaagtcatgactttatttttatagcaacgaggttgccaagaactgagtcaaaatgtgagggaaaacaagcacctgcaaggcgaaagaggacggatgcacttacataggacagacgcaaataggcaccaccatgacaagtaaagctggaataatcaataaattcctaaacacaaagtggggctggtgagattgggagacggctgacagctgcagaagttgggaaagatccatcatcttgaaaactttttccccacaaacccactgcgatctctcaagcaaytggtaaggaatccaagagagtctgtatatgacacagatcagggagagcagaacacttgggaggtgaccaggtcttgggggccgagcccttatgaatgggattagtgcctttataaaagaagctcaatggagttgttgtgtgccttccactatgtgaggacatagaaagcaggcaccacctatgaaccatgaaatgggctctcatcaacactgaatttg

SEQ ID NO: 138103 - DNA, 512 bp, Homo sapiens
aactaacttcaaagtcatgactttatttttatagcaacgaggttgccaagaactgagtcaaaatgtgagggaaaacaagcacctgcaaggcgaaagaggacggatgcacttacataggacagacgcaaataggcaccaccatgacaagtaaagctggaataatcaataaattcctaaacacaaagtggggctggtgagattgggagacggctgacagctgcagaagttgggaaagatccatcatcttgaaaactttttccccacaaacccactgcgatctctcaagcaattggtaaggaatccaagagagtctgtatatgacacagatcagggagagcagaacacttgggaggtgaccrggtcttgggggccgagcccttatgaatgggattagtgcctttataaaagaagctcaatggagttgttgtgtgccttccactatgtgaggacatagaaagcaggcaccacctatgaaccatgaaatgggctctcatcaacactgaatttgtgag

SEQ ID NO: 138104 - DNA, 555 bp, Homo sapiens
gctggtggggcctcctacagcctggaggtctgagtgactatgtagagcagaatgccctgctgaytcagtggttcatgtagtataattgagaaataaaattttcttgtgttaaactacggagatttgagggctgtttgttactggactaaaacctggctcatcctgactgactgaggcatgcagctgtttattggcacttgtccagtggactcaaaatccctaagcccttctctgaggcattttttttcatgctgcagtgagaacagctctaaaattccttaacaacctagtaccacttaccattagtgaactgctaaaattagaaaagacagcttctgataaaggggtgataaaagaactgagagggagagaccaaatgattttggcttgtctcctgttaataagttcgtagaccattaccattctaagcaggcaactgctttatctctaggtgtctggggagttggttatttcttctttctgaacaaggaggatcatttggataacaaatgaataagtcagctggacaatatttgaggatcccagaaaacaaaa

SEQ ID NO: 138105 - DNA, 555 bp, Homo sapiens
gctggtggggcctcctacagcctggaggtctgagtgactatgtagagcagaatgccctgctgattcagtggttcatgtagtataattgagaaataaaattttcttgtgttaaactayggagatttgagggctgtttgttactggactaaaacctggctcatcctgactgactgaggcatgcagctgtttattggcacttgtccagtggactcaaaatccctaagcccttctctgaggcattttttttcatgctgcagtgagaacagctctaaaattccttaacaacctagtaccacttaccattagtgaactgctaaaattagaaaagacagcttctgataaaggggtgataaaagaactgagagggagagaccaaatgattttggcttgtctcctgttaataagttcgtagaccattaccattctaagcaggcaactgctttatctctaggtgtctggggagttggttatttcttctttctgaacaaggaggatcatttggataacaaatgaataagtcagctggacaatatttgaggatcccagaaaacaaaa

SEQ ID NO: 138106 - DNA, 554 bp, Homo sapiens
ctggtggggcctcctacagcctggaggtctgagtgactatgtagagcagaatgccctgctgattcagtggttcatgtagtataattgagaaataaaattttcttgtgttaaactacggagatttgagggctgtttgttactggactaaaacctggctcatcctgactgactgaggcatgcagctgtttattggcacttgtccagtggactcaaaatccctaagcccttctctgaggcattttttttcatgctgcagtgagaacagctctaaaattccttaacaacctagtaccacttaccattagtgaactgctaaaattagaaaagacagcttctgataaaggggtgataaaagaactgagagggagagaccaaatrattttggcttgtctcctgttaataagttcgtagaccattaccattctaagcaggcaactgctttatctctaggtgtctggggagttggttatttcttctttctgaacaaggaggatcatttggataacaaatgaataagtcagctggacaatatttgaggatcccagaaaacaaaa

SEQ ID NO: 138107 - DNA, 397 bp, Homo sapiens
cttcctcacattcagctcaagcctgtaaatccttcgtataaattctgcctgctccttgataccaatctgttctcctccaagtaaatcttttaaagacaatactccagcagcaccgggagaacatttcctgcaaaatcatgcccggaagcccctgttagcatgcaaatatgcccctttgcagcatgttctgattgtaactcgtgatgcacagtgcagagaattaagccgggtcccttcctcatcagtcaccatttaatggagactgaatggttgtggatacytttgttagggtcatcaagaaggtttgccatgcttggcttggtaaggaggaggttgtgtgctcctgtaagacaaacctagcactttataggctcccaaaagcccatggtagttacag

SEQ ID NO: 138108 - DNA, 505 bp, Homo sapiens
tgcttttccaccctttgtgactcagagttctgtaaaagcttccgccctaggattggactccaaatccataatatagcctggggttcttccagactcagtcctttgcttcccctcctgccttgcatcagaaatattctctggtccatccacaccaagcaagaatggcgagtaacatgtttactatgggccagctaacattttacacacattttctccttcattcaaactaccaggagtgccttcaraacagacatgaacgtttttgcctttgagcttgaaagtcctccatgttccctttctcaatcactcctactcacccctcaaaaccccattcaggcacactctcctctgtcaagcagttaagagcataaaccctgaatccagctgcctatctaggtttgcatcctcctctgcctcttacttgctgtgtgttcttgagcaggttgcttcacttctctgtgcatcggtttccttttaaaacatgggatgatgataatatttacct

SEQ ID NO: 138109 - DNA, 506 bp, Homo sapiens
tggttgctaaactcagcaagcaagcaagcaaacaaacaaacaaaacaacccaaccccaaataaacttctcagctccatgtaaacagattccgctgccactgaggaaattctgttacggttttcctgggcagattgagattctagatagtgtttgggggcttttaagaatttagcctaataaggggtgttagctaatgataaggaaggagatcaggcttgggaactccaccctgggcagctctgaaattactggccctggagctggcagaactccrgaagtccaggttcattagttctgtctgcccagcaatgatggcagcagtaggaataataatctctcgtattcacagagggctttactcgttctcattttcgccctctcttgctctgtgcagccattgcatgctggagtttatagtattacagctctgccctggctggttgtctgacttggccaaccctctttacttgtttgagcctcattttcctaatttataaaatggagc

SEQ ID NO: 138110 - DNA, 551 bp, Homo sapiens
cttatcttatgggttgttgtgaaaagtgaggtttagatcagaagaggcatagagttggtggtgggctgttaaatcagctctttgaaacagaagccctgatgtgtagtgtttgtcaatttccaaggtatacacagtccttccatggtggattccaagcagccaatgtgacatcactgagtagatttgggaagrgatatgtgccatctacttttctgtgcagctgtgagctgactccagcacattctgttaaacctcttacactaactctgccttattagtcagtggcttcccgatgtggtgctgagaaagattctgaggctgtgtctgggaacagaggaagggggtaattaaattcattatggctgtctgccatggctgatggaggagagatggcacatatatgtagggacttattatccctggatttatgagactgtatgcaaaagtcctttcagggtttgacacccagtaggcattcaaccaatggtacatattgcaactgggtgaagtgacaaggatcgtttcttgtttttcatacattggcacttgct

SEQ ID NO: 138111 - DNA, 551 bp, Homo sapiens
cttatcttatgggttgttgtgaaaagtgaggtttagatcagaagaggcatagagttggtggtgggctgttaaatcagctctttgaaacagaagccctgatgtgtagtgtttgtcaatttccaaggtatacacagtccttccatggtggattccaagcagccaatgtgacatcactgagtagatttgggaagagatatgtgccatctacttttctgtgcagctgtgagctgactccagcacattctgttaaacctcttamactaactctgccttattagtcagtggcttcccgatgtggtgctgagaaagattctgaggctgtgtctgggaacagaggaagggggtaattaaattcattatggctgtctgccatggctgatggaggagagatggcacatatatgtagggacttattatccctggatttatgagactgtatgcaaaagtcctttcagggtttgacacccagtaggcattcaaccaatggtacatattgcaactgggtgaagtgacaaggatcgtttcttgtttttcatacattggcacttgct

SEQ ID NO: 138112 - DNA, 551 bp, Homo sapiens
cttatcttatgggttgttgtgaaaagtgaggtttagatcagaagaggcatagagttggtggtgggctgttaaatcagctctttgaaacagaagccctgatgtgtagtgtttgtcaatttccaaggtatacacagtccttccatggtggattccaagcagccaatgtgacatcactgagtagatttgggaagagatatgtgccatctacttttctgtgcagctgtgagctgactccagcacattctgttaaacctcttacactaactctgcyttattagtcagtggcttcccgatgtggtgctgagaaagattctgaggctgtgtctgggaacagaggaagggggtaattaaattcattatggctgtctgccatggctgatggaggagagatggcacatatatgtagggacttattatccctggatttatgagactgtatgcaaaagtcctttcagggtttgacacccagtaggcattcaaccaatggtacatattgcaactgggtgaagtgacaaggatcgtttcttgtttttcatacattggcacttgct

SEQ ID NO: 138113 - DNA, 379 bp, Homo sapiens
caccactatctagggaaaccagtctccatgtctctgagaaattagggctcagaggacaaaggatgaccagggttatgtctttccactacttgtgagccaagagctaaaggaactgtaagctccatgccataaaggttttgaaagagcraacttctggaactcccactttatggacctagtatgatttcactccttacctaaacatatccttgctgagctgacacaatgcctgcaaccttccattcttgctgatggctgtcttagagtttgggctggaagaacaattgcagtgcctctacctcaacctccttcttttcagatgtgcaaactatggccacaagagacaaatccttagagcaagatagatgagacaccagag

SEQ ID NO: 138114 - DNA, 458 bp, Homo sapiens
tgaattcaagagatgctgcaggaaaaggcagtgtgattgttcaagctcatcccaagtgagaggacttggccagcctgtctagatgattgaatccctttcttgatgaatgycctggatgttggggttttatgtacttcattttatgcgactggaggagggagctagggacactccctgcccaggtcttcatgaagctccaaggtgagaatcactgccagatgatttctgaccatcttgttcttttaggagctaagctctacctctcatttgtatggttctggactcatgcaacccttacaaatccagggaggatgaattttccatcagagtcataaaagacttcaggcaggaaggacctaggggattggcaagacagtccttacccatggagctccactagcagaaggaaagtctactcatgtctgattctacaatcctgtctgccttaaggtgattca

SEQ ID NO: 138115 - DNA, 501 bp, Homo sapiens
gccccttccttggacttcacagccagcaatgggcagttgaatccttctctccgctcatcactccaacttactctcctgcctccctcttccacatttagggtcccttctgattacattgggcccactttgatgatccagaataatctctgtattttaaggtcggctgactagcaaacttaatttcatcttaatttccctttgccatataatgcagtatattcacaggttctggggattaagatgtggatgtctttgggaggccattgttctgcctcccataccatctaacattctaggaggaagcacaggaaaataaatagaacccatggatgtgggggaggagtggcaggtgagaggccaggctttgtgatttgaaaagcygtggtggatggtggtgataagaggaggggctttctggagctgactgcctggcttggaatctcccattgtgctcttgcatatagacatcttcaagcctcagtttcctcacctgtaaatgga

SEQ ID NO: 138116 - DNA, 394 bp, Homo sapiens
tcctgagaataactctatccatgttacccaatgtgccaagcataggtacatcctacctctctattgccctggtagcctccccaaggtcagagctggctctgtccatccctcttctgtgtattctatcccacccctgcctgcctaccacatcaagctggcaggtgggtgggagaagccaggagggacactggacagggctaggccttggcaggccacctgcctccgtttcctgcctctgatcactgcactgggtgcactggctgctgatagtccctgtttctttagtacgytccctgtctcactggtttggaggcattctttccctctggtcctgtttgtaccttttaggatgactgccaatctctccaacatcctgtgtgttttcagacacata

SEQ ID NO: 138117 - DNA, 549 bp, Homo sapiens
aatttttgtctccctgctataaaaattctaattcttctcaagaccatatgggctgcagaggagacgcactggctaaagaacccaaagggtaacatttcaagaaccttgctggtgacctgggtcagttcctggaagctgaagatcctgtcctctaagccttttaattgctgaactaatgactgaatgcctgccttgttcaacaccacagccgctgcagggtctgtctaggaattggtgaaccaagcagaaaattccagggcacaggctgctgtgggctccagcrtagaagactgtgctcccatagactgtcagagcgagacgggctgcagactaccatgtttgtagttccagccctggtatggctctgttcaaacacctggggcctgcggagggggcggtggggagagtgggacagagaccccagcacaggccaggaggaggcccccggctggcactggcgcagctccagcacctccaacaaagatattcttgctgaactccaatccccctccccagggtgcatcctgatctcagagacacgaggctatg

SEQ ID NO: 138118 - DNA, 426 bp, Homo sapiens
aaggctgtatcttggaaatcatggtgcccacaacaggccatgcagagcctgatgtcccagtcttgaagctggaaracatagccatattgaacctataagagccaatccctagaccaaaagtatcatcatagatgcacagggaggctgtgatcccatctggtctctgtttttagagatgaaagagttgagattccctctcagaaacctggagcaatacttccttgattttgttaggcccttcagcattccagccatgggtactgggaacactgggtacaaaatgcccccatcccatcagagggaacaaagggggtctaagcacaacacacaagcagacattgaaacatccaactggcccagaaacagctcatttggggcagcttctgagaagcagttccagactgtaattggtaagaacttctgggt

SEQ ID NO: 138119 - DNA, 524 bp, Homo sapiens
tcttggaaatcatggtgcccacaacaggccatgcagagcctgatgtcccagtcttgaagctggaaaacatagccatattgaacctataagagccaatccctagaccaaaagtatcatcatagatgcacagggaggctgtgatcccatctggtctctgtttttagagatgaaagagttgagattccctctcagaaacctggagcaatacttccttgattttgttaggcccttcagcattccagccatgggtactgggaacactgggtacaaaatgcccccatcccatcagagggaacaaagggggtctaagcacaacacacaagcagacattgaaacatccaactggcccagaaacagctcatttggggcagcttctgagaagcagttccagactgtaattggtaagaacttctgggtgggcacccaggttgctgttgctgttgaggagggttgtggagttcactccagaagagcrccttgggttctgcacacagagcttgcagtagcttgtataatggtgccag

SEQ ID NO: 138120 - DNA, 571 bp, Homo sapiens
attttcacgagcaacaggaaatcttgggacagattgttcaagtatggatctataggagacattgtcatcaatacctcacactcctctctttttgacccgttgttcttagcatatttctctcaacctcatgcttacaagttaactcttgtccatattcatcttcctcacacttaaataccttgatcatattccatacggaaagaaataggggaaaatgaaggccaaatatatgttcatactcatcaaactgacactatgaacaaaatctgggtcctgttaataaggaaaaaaggcagtgcatacatcagtaagcaatggtcaacatattttctaccaaagttgggtcaatagcaataaaaataaattcttattaattaattcaatatataaaaattatttgcaataaaaatgatayatgatccaaatgaggtaagggctgaaaggttgcacaagtctaaaaaagagagagactacattgagaaaatattcacaggaaaaataatgcatgagctgaatattaaaggtcaggaaaaagttaactaggaggagtgacaagaaatatattacaaac

SEQ ID NO: 138121 - DNA, 595 bp, Homo sapiens
caggtccttttaagtcaaaaccctcccacagacaaatgctacaatgtttttaatctctaagtctcttcccatttcacgggcataacttgcaggagacaagcatggcttgactacttacagagttattttcatgaccaacatcttcagcatccatcacactgctgttaaataaataaaataaactgtagtttagatacagtcacttagagttggagctgaaaatatagagtctattactggaatttgttgaaatggtaaaaattttaaaagttatggaatatacatgaggcttactgaggaaataatttctcttgctctgtctccatatatacrtgtctgtgtgtgtattacacatgtatacctatttctctctccgtgtgtattatacatatatactacaaacacacacacacacacacacacacacacaaatatatatataggggtgactttggggagcacttggcctcaggctatttcttgcgagtattctaaatgtgcaacaatctcaaaagcagtaaggcatcctctttaatttctgccgcagtagaattgtcccaaatcgtcttttcaggcaagcatcccgcctgaaaag

SEQ ID NO: 138122 - DNA, 595 bp, Homo sapiens
caggtccttttaagtcaaaaccctcccacagacaaatgctacaatgtttttaatctctaagtctcttcccatttcacgggcataacttgcaggagacaagcatggcttgactacttacagagttattttcatgaccaacatcttcagcatccatcacactgctgttaaataaataaaataaactgtagtttagatacagtcacttagagttggagctgaaaatatagagtctattactggaatttgttgaaatggtaaaaattttaaaagttatggaatatacatgaggcttactgaggaaataatttctcttgctctgtctccatatatacatgtctgtgtgtgtattacacatgtatacctatttctctctcygtgtgtattatacatatatactacaaacacacacacacacacacacacacacacaaatatatatataggggtgactttggggagcacttggcctcaggctatttcttgcgagtattctaaatgtgcaacaatctcaaaagcagtaaggcatcctctttaatttctgccgcagtagaattgtcccaaatcgtcttttcaggcaagcatcccgcctgaaaag

SEQ ID NO: 138123 - DNA, 578 bp, Homo sapiens
cctgaagaccaaaaaatatataaactctaattaatgtacagtgtaatattttacaaactcttctatttaataggaccatatttacctgagatgattacctgatgcattatactcaatataaatatagaaaatgattttgtttttaaaataagaaatttgtcttctctgcatatatatgtgtaatttatgtttatattaaggttgcatcactgtataatgttttgaaataaaactttaacatattctgtgaaaatacatatttaaagtgaagaaaagaattaatttgcatgcaaatgggactaaaacatgatatatgagaggactgcaaccctgcctttaagatttgcttgtgacatttgtgttttaacaggcaattaaaatttaatttgtcctatgatgaaaagcaaatccttttatcctatttcagcagtctgaaaaggtacagactctattacaraagaagactgtggctaaaggtttcttgtgcccttgtgaccccgcggtatgaaattgatgataatccaatcaaggattgacataaaaataagtctgcacgtaaacgattatgagtggaaaga

SEQ ID NO: 138124 - DNA, 589 bp, Homo sapiens
attcctaggattttgtccatttcatctaaggttatatcatttgttgtcatagtttttaataatattcttttgtagttttttttttctgttaggttggtagtaatattcccaacttaatttctgattttagttgttttttgtttgtttgttttgtggtcagtctaaccaatggcttgtcatttattttatcttttcaaagaattaacatttttgtttttttttaatgacaaacttttgattttgtctttttatttgatatatcttgttaagtgatcaccacgatcaagtgagtttacatatccatcaccattcatggttacctctgtgtgtgtgtgtgtgtgtgtgtgtgtgtgtgtgtgtgktaaaaaaaattaaggtctactttcttagtaaatttcaagtgtataataaggtattattactgtagtcatcacgatgtacattagtcccccataattattcatcttacagctcaaaggttgtatcattaaccaccatctcccaataactcctaccctctcaaactctgatgaccaccactctactctttgtttctacaggttcaaattgtagactccacaagtaagtg

SEQ ID NO: 138125 - DNA, 580 bp, Homo sapiens
ttatcatcattctgaagtctgactatcttcaccttatgaaattttgtaatctgagtcttcaaagagtgaagggttatctttatgctgaagacaaaaagctgttttaaggctctgaagtcacacagggcactaactcatctatgttgtcagacaaacagctgttatccatatctgtggaaaggcaacaactgatgttttctgacatggtgttatgtttacataacatggagtaatgagtgttccatgttgagaatgaagccatgtcaagggggcactaaagtgacacyactggtcttatggaatcacagaatcttggaactggaaaagttattgggctattaagcaaaagaactcaatagatcatggaatcaaacttaaatgtgcagttgcaattttattggtttcagagcatctgacttgaaggggtaaactaaaatatcacagtgatgtccttaacaggactatttgcatcatgggaggaaatgttggggaaaaaactacaatggaacagtctaagtcaatgagtagtagaggagtggaaatctgagtacagactacatggtaagtagactcagctctt

SEQ ID NO: 138126 - DNA, 646 bp, Homo sapiens
ccacagttcttcagtatgtgttgcacacatgaatctaggatatcagtaaaatacatatgactcagcaacgcccatatccatttggaakcagctgagatggggcgttgctgcaaaatcagaagttttaattctctgtgtcaataatgtttcttattaatggatttacctgcgagaagaatgtgaaatagtttttgacgtctagacttaatttagatatccattatatttctgtccaataaaatgttatacacgtgtccatcaataccaaataagaattctttttctaaaaggtgttctctttattagtatgattatctgtaccttctatctggctatttcagtttctagtttgttttttagatattttttggtcccatttgccaaacaatatatttgctagcagaaagatattcttagtgcccagattctgatgcttttatctgaataggtatgctaactttattgaagattttatatttgtttgttttattttgaaagacaaattatgctgacttttttcttctttgaaattttgttgttagctcatcaactttattttgctcaaattgagagtggcagttactactctttaattgcttgatttctttttggcacaataagggcagaataggataaatgtgttaga

SEQ ID NO: 138127 - DNA, 646 bp, Homo sapiens
ccacagttcttcagtatgtgttgcacacatgaatctaggatatcagtaaaatacatatgactcagcaacgcccatatccatttggaatcagctgagatggggcgttgctgcaaaatcagaagttttaattctctgtgtcaataatgtttcttattaatggatttacctgcgagaagaatgtgaaatagtttttgacgtctagacttaatttagatatccattatatttctstccaataaaatgttatacacgtgtccatcaataccaaataagaattctttttctaaaaggtgttctctttattagtatgattatctgtaccttctatctggctatttcagtttctagtttgttttttagatattttttggtcccatttgccaaacaatatatttgctagcagaaagatattcttagtgcccagattctgatgcttttatctgaataggtatgctaactttattgaagattttatatttgtttgttttattttgaaagacaaattatgctgacttttttcttctttgaaattttgttgttagctcatcaactttattttgctcaaattgagagtggcagttactactctttaattgcttgatttctttttggcacaataagggcagaataggataaatgtgttaga

SEQ ID NO: 138128 - DNA, 560 bp, Homo sapiens
ctaggccagtctctctttttcacgtttttctgcctgctttatattcgytaggagttgattagattgtgtccaccagattaagggtgggtctgacttgcccagcccactgactcaaatgttaatctcttttggcaacaccctcacagacacacccaggatcagtacttcatatcctttaatccaatcaagttgacagtattaactatcacagctattgacaatgagaatgcatagctatgtaataaattaatatttatatctggtagtataagaggtatttattttcttttaccaaaattttcaggttttgtgatgctgtcacgtaagttatcatgattacttgtatgagaaaatcagctttttcaatgttgttatacacagaaaaagttcatttgtttatgaaaacatgttctagaaatagatttgtcttactcagttcaaaatatgagtgtatagtaatttcattacctgtttcatcacctacaataatttcacttttatctagcagaactaggttaggtccaaaatcatcaacctgcttataaaacactttctactgt

SEQ ID NO: 138129 - DNA, 572 bp, Homo sapiens
cttgtttctcagccttcagcagcccacttcttttcctttcttaccacaggtacttcgtaytatttacaaacctaagtttccttgtcaataggaagtaataataatttaataaaccttttttttttttcagacaggttcttgtctccctctcttggccatgctagaatgtaatggcgctgtctcggctcactgaaaccgccgcatcccaagctcaaatgatcctcctgcctcagcctcccaagtagctgagactaaaggcacgtgccaccatgctcagctaatttttgtattttttgtagagatgaggtttggctatgttgctcaggctggttccaaactcctggactcaagggatccacctgccttggcctcccaaagtgctgggattataggcatgcgccattgcaccaggccctaataaaacttctgataacttttttgaggattaattaatttgaataatataaataaaatgtgggcacaatatctgacatataataatagttcatacattagttgctcttcaccccctaaaatctaaaaaacatcctcccatcaccaccaagagaaaa

SEQ ID NO: 138130 - DNA, 548 bp, Homo sapiens
tcaatgaatacaggagtgcagaactctctttaaaataataatataatttactttggacatatttccagaagtggaattgctggaacatagagtagtctatttttaaatttttgagaaacttctgtattgttttctatgaggactgtaccaatttacattcctgtcaacagtaaaaaggttatttttctccacatccttatgatagctttagatttttataatagctttcctaatatgtattaagtcatatctcacagtggttttcatttgcarttccctgatgattagagatattgagctacccttttacacagatgttggccacttttatgtcttctttgaaaaaatgttattcaggtcctttgctttttattatttactgttatttgttatttactatttgttatttatttattttttgatattatttatttatttactattgacttatatgaattccatatatattttggatactaaccccttatccgatatatggtatgcaaatatcttctcctattccatatatttcttttcagtttgttgat

SEQ ID NO: 138131 - DNA, 577 bp, Homo sapiens
ccaggactacaggtgtttgccaccatgcccagctaatttttaatttttttgtagagatggggtcttgctatattgcccaggctggtctcgaactcctaggctcaagcaatcctcccaccttcgcctcccaaggtgctaggaacaggtgtgagccaccgtgctcagacctcctcacaagtcataagtgatactggtgttactggtcttgtatttatatgctggagctactgaataagaaaatagaaaaataataaagataatacaactgagtataattcaaatatccggagaagaacatcagataaaatgtaaattttcaaaacttagagaaaaataacatctagycccagattttaagaattgtaaaaatatcagatgaaacagatgcattcttagattttaaaatatgggaggaatacatgacacttcaactttattcaagagaaattacccagaacttatcctaaaagtcatcaggtaatgctaaatattcgaagctaatgaccattattttcaaaaagggtattgacaatgacagccaattatcatccagtattgccctggacattttagccag

SEQ ID NO: 138132 - DNA, 577 bp, Homo sapiens
ccaggactacaggtgtttgccaccatgcccagctaatttttaatttttttgtagagatggggtcttgctatattgcccaggctggtctcgaactcctaggctcaagcaatcctcccaccttcgcctcccaaggtgctaggaacaggtgtgagccaccgtgctcagacctcctcacaagtcataagtgatactggtgttactggtcttgtatttatatgctggagctactgaataagaaaatagaaaaataataaagataatacaactgagtataattcaaatatccggagaagaacatcagataaaatgtaaattttcaaaacttagagaaaaataacatctagtcccagattttaagaattgtaaaaatatcagatgaaacagatgcattcttagattttaaaatatgggaggaatacatgacacttcaactttattcaagagaaattacccagaacttatcctaaaagtcatcaggtaaygctaaatattcgaagctaatgaccattattttcaaaaagggtattgacaatgacagccaattatcatccagtattgccctggacattttagccag

SEQ ID NO: 138133 - DNA, 656 bp, Homo sapiens
gctggtttatagaaaccactcaccaagtggtaaagaaacttcctgtcatagctgctaccttttgcttatcaatctgctggctcctgtgttaggaaagcatattggaaccagagagagtgtccccatcctcctgctctttagttcagtactgtgcccatcagataccttctatgcacaaaccctaacttagagctagatggtaaaggagaaatgtttagattccaattccagtattattaggaaggagctgtaatataatacctgattactagcacagacaatggtatgctagagttagttataccagcttggaagagatcattatgtgcatttcttatcagctccacattcrgtggcatcttgtagatagcttgagattggctaataaggaagtgtctaaacaacagaaatcaacaaatattataatttggtgcttcttgttgttgttgttggagagccagtttattagcacaccactggatacagcccacttcacagagaacaaacatactataaaagaaagaattcaattaaaaaactcattgaaatgcataaataaatggaatagttcttttttcaaaattatcagctgtagaatctggcagtatacattccattctctaccatttcctagctttgtgacatacaatataatc

SEQ ID NO: 138134 - DNA, 518 bp, Homo sapiens
atcagttagaacacctttgttcatcttacctagtactacctttataaaaccgttacwacttttaaaacatgataataaattaatgatgaagttcaatggcttttccataaagcctcatcattatttccatagatgtcaaaattcccagcaaagcgtctggcacatcatagattacaatcaatcaatcaatataatgaaaattcactgaatgaataaacaaatgatgatatgattccaaaggataagagaggacctacccttaaaataatcatttgtcaaatgtttgcttggtcaaagctgttgacttggccaagttgaaggtttttagacaagatctttaattatcagttaattaggatgtggctggcttcaaggtccttgggcaacctattagtaggctaaagacaaaagtgtctcctaaccagcacacgccttttctgtctttctaaaattccaaaaaccatttgacaagctgttaacttctgtagctctccacacctgggcaattagatcaactt

SEQ ID NO: 138135 - DNA, 351 bp, Homo sapiens
atttcttcaaggaggttaatttctctgtgcttaaactgaatcgggaacattttggcagaggcagagtttacatttcaagtcctaactcacagtgtggggtagcctcagatgatatttcagatcattaacaagcaacagcattttcatttttccaatattatttatgygtgataagaaaactccagcacttgtatcacccttagcattttactgtgagctttcacagggatgatcccatttaattgtaagcataaaatacagtgcatgcacaaaaatgcctcaaaattgtcagaaccctcctatatagtctgatgtataaaattgctcaggcatgttggtgggggagtgtca

SEQ ID NO: 138136 - DNA, 466 bp, Homo sapiens
cagtcagtcgtaggtttggtctttttacataacctcacatttctcaaaggttttgttcattccttttcattcytttttctctaatgttgtgtgcctgttttttttcaggaaaatagtcttgaagctctgagattctttcttctgcttgttctatttggttcttgacacttgtgattgcattgcaaagttctcatgttgtgttttttcaactctatcagggcatttattttcttccataaactgtttattctggttatcggctcctgtaatgttttatcatggttcttagcttctttgcattgggttagaacatgctcctttagcttagtgaagttcactattacccaccttctgaagcctgcttctgtcaattaatccaccccagtctcagcccagttctgtgtccttgctggagaggtgttgcgatcatttggaggagaagaggcactctggctttttgagtttt

SEQ ID NO: 138137 - DNA, 466 bp, Homo sapiens
cagtcagtcgtaggtttggtctttttacataacctcacatttctcaaaggttttgttcattccttttcattcctttttctctaatgttgtgtgcctgttttwtttcaggaaaatagtcttgaagctctgagattctttcttctgcttgttctatttggttcttgacacttgtgattgcattgcaaagttctcatgttgtgttttttcaactctatcagggcatttattttcttccataaactgtttattctggttatcggctcctgtaatgttttatcatggttcttagcttctttgcattgggttagaacatgctcctttagcttagtgaagttcactattacccaccttctgaagcctgcttctgtcaattaatccaccccagtctcagcccagttctgtgtccttgctggagaggtgttgcgatcatttggaggagaagaggcactctggctttttgagtttt

SEQ ID NO: 138138 - DNA, 563 bp, Homo sapiens
ccctggctggagttgctgaaattctggtggggaagcccctcctgatgatgagggatggatcagggtcccacttaaagtagcagtctggccaaatctggcacagccactgtgctgcactgtggggaattcctctccatccaaaccacccagtttccttggcaccggtgggggaaaacagttgactggagctgcagagatggcagccacccctccccctggaaattggttatcttakgcagtctccagcctgctgctactggccagccagggattccaagccagtggatcttagctggtaaggttctgtgggagcagggcctgttgaatgatgccacttggctccctggcttcagctgccttcttgcctcaccagaagtcccagggctggagtatccaaaacaactcccctgtctcattggctgcccgagcagccactgagagtctgcacagctctgtgtttgggacccaaggccctggtggcatgggctcaggaggggatctcctgatcaacgagttgcaaagatgcatgggaaatgtgtgctttcccaggtggggtagcacac

SEQ ID NO: 138139 - DNA, 582 bp, Homo sapiens
atgaatccctggctggagttgctgaaattctggtggggaagcccctcctgatgatgagggatggatcagggtcccacttaaagtagcagtctggccaaatctggcacagccactgtgctgcactgtggggaattcctctccatccaaaccacccagtttccttggcaccggtgggggaaaacagttgactggagctgcagagatggcagccacccctccccctggaaattggttatcttaggcagtctccagcctgctgctactggccagccagggattccaagccagtggatcttagctggtaaggttctgtgggagcagggcctrttgaatgatgccacttggctccctggcttcagctgccttcttgcctcaccagaagtcccagggctggagtatccaaaacaactcccctgtctcattggctgcccgagcagccactgagagtctgcacagctctgtgtttgggacccaaggccctggtggcatgggctcaggaggggatctcctgatcaacgagttgcaaagatgcatgggaaatgtgtgctttcccaggtggggtagcacactcactcactgcct

SEQ ID NO: 138140 - DNA, 581 bp, Homo sapiens
tgaatccctggctggagttgctgaaattctggtggggaagcccctcctgatgatgagggatggatcagggtcccacttaaagtagcagtctggccaaatctggcacagccactgtgctgcactgtggggaattcctctccatccaaaccacccagtttccttggcaccggtgggggaaaacagttgactggagctgcagagatggcagccacccctccccctggaaattggttatcttaggcagtctccagcctgctgctactggccagccagggattccaagccagtggatcttagctggtaaggttctgtgggagcagggcctgttgaatgatgccacttggctccctggcttcagctgccttcttgcctcaccagaagtcccagggctggagtatccaaaacaactcccctgtctcattggctgcccgagcagccactgagagtctgcrcagctctgtgtttgggacccaaggccctggtggcatgggctcaggaggggatctcctgatcaacgagttgcaaagatgcatgggaaatgtgtgctttcccaggtggggtagcacactcactcactgcct

SEQ ID NO: 138141 - DNA, 450 bp, Homo sapiens
cacctaactctcaaatataatcttccaaaaagcaatcctttacaaggcgactctgaaagactctttgtgctagcaaacaatacccaaagtgtgccttccagagagacaatatagtaaagcagcayattaatcttgccccaaatcctatttcatgtcttccggacattgcagaggggagatgggtggaaacaatggatccattgagaattacaggctgacctccaactgagacctctacctgggtgactacatttggatggagaacaagtactttggccctagccacattttgtttcctgttccctgactgaggttggctgcagttcagttatgaactctgctagcaagaccgtgacactggaaaagacgttaaaagtgcccacccattcaggatttaattaatggttgcacaggaaccaacttcttcccactcggcagagaggaaagggt

SEQ ID NO: 138142 - DNA, 560 bp, Homo sapiens
tgttaggattaaatgagataacatatataaatagttcagtacaatacctgattcccattaaacactaatatgtggttgcttattaccaaaaggtataaagacaatttttttttctgggcgtggtggtgggcacctgtaatcccagctacttgggaggctgaggcaggaaaatcgcttgaacctgggaggcggaggttgcagggtgttgagatcctatcattgcactccagcctgggcaacaagagtgaaactctgtctcaaaaaaagaacaaaatatctttttttctgtcacgtattttatctgcatctattccattttccattcttaatcataattttttgtttgctaaatagcaataaattatataaaaattctcttaactataaagatacgcatatgaacttatgtagacacacatgtaatcacagaygcagggaaaaatacagtattttcagatcaattggacataactttgcccagttcttattctccactggtttaatgattcaaaatttcaaaaagccaagaacaattactttttatttttttcatgttttcc

SEQ ID NO: 138143 - DNA, 600 bp, Homo sapiens
aagcttcccaagtagcagggactataggcaagtgccaccaagcccagctaatttttgtatttttagtagagacggggttttccaccatgctggccaggctggtctcraattcctgagctcaagtgatctgcctgcttcggcctcccaaagtactgggattacaggtgtgatccaccgggcccagcctttggtgatttgcatattatgatttattaatattaacatagcacctttttcttaaggtgagggcctacagaacaaaggtcttgggcccacctcccttgtgcctctatgtggtttttcccattaaacattgggactttggtaggggggtgaggtaggggcaggatttagatgccaagaaaagactctgaccattagcaaaattaaatgatttgtttttaaaaaatgtcacatctaatccaagatcaatgtctgatcctccctatgtagcctgggagctaccatggaattcagtgtccagggaaataccctaaaatggtgctttagggatcccctaaggatattgttgtaccactagtaccgctggttctgattgagaagggctgtcagaggggagcattaagggagggtgtgctg

SEQ ID NO: 138144 - DNA, 483 bp, Homo sapiens
ttgcttgaagccaaggagttcaagaacaggtaacacagcgagaccctatctctacaaaagcttaaacaggcttggtggtgcgtgcctgtagtcccagcactttgggaggttgaaggaggaggatcgcttcaacccaaggagtttgaggctgtagtgtgctgtgattatgccactgcactccatcctgggccacagagctaggccctgtctctaaaaaagaaaaagttatttcattccacaataatttattsattactagatatggggaacaggagactctggggatgtagagataaataaaccagagttgtatttctttaaaaatttacagtccaggcggggcacagtggctcatgcctgtaatcccatcactttgagaggccaaggtgggtggatcccttgaggtcagaagttcaagactagcctggccaacgtggtgaaaccttgggactactaaaaatacaaaaatttgctgggcgtggt

SEQ ID NO: 138145 - DNA, 483 bp, Homo sapiens
ttgcttgaagccaaggagttcaagaacaggtaacacagcgagaccctatctctacaaaagcttaaacaggcttggtggtgcgtgcctgtagtcccagcactttgggaggttgaaggaggaggatcgcttcaacccaaggagtttgaggctgtagtgtgctgtgattatgccactgcactccatcctgggccacagagctaggccctgtctctaaaaaagaaaaagttatttcattccacaataatttattcaytactagatatggggaacaggagactctggggatgtagagataaataaaccagagttgtatttctttaaaaatttacagtccaggcggggcacagtggctcatgcctgtaatcccatcactttgagaggccaaggtgggtggatcccttgaggtcagaagttcaagactagcctggccaacgtggtgaaaccttgggactactaaaaatacaaaaatttgctgggcgtggt

SEQ ID NO: 138146 - DNA, 565 bp, Homo sapiens
agaataaactgttttatacaagtaatttgaatatgtgtgtttccccccagcatcacgggaaaacactttctcaaaagccccatatacaagacttctatttagaaagtgtcttaactttaactggtctctaacacgcaaataaatacagaatggcaaattatcggctgggcatggtggctcatgcctgtaatccaagyactgtgggaggccaaggcgggcagatcacctgaggtcaggggttcgagaccagcctggccaacatggtgaaaccccatctctactaaaaatgcaaaaattagctgggcgtggtggcttgtgcctgtaacccaaactactcaggaggctgaggcaggggaattgcttgaaccagggaggcagaggttgcagtgagccaagatcatgtcactgcactccagcctgggcgacagagtgagaccctatctcaaaaaaaaaaaaaaaaaaaaaaaaaaaaaaaaaaagaatggcaaattatctccagtccaaacttaactcccaggtaaactgactgactcctattactaaaagcaacaaacagcaaacaggg

SEQ ID NO: 138147 - DNA, 565 bp, Homo sapiens
agaataaactgttttatacaagtaatttgaatatgtgtgtttccccccagcatcacgggaaaacactttctcaaaagccccatatacaagacttctatttagaaagtgtcttaactttaactggtctctaacacgcaaataaatacagaatggcaaattatcggctgggcatggtggctcatgcctgtaatccaagtactgtgggaggccaaggcgggcagatcacctgaggtcaggggttcgagaccagcctggccaacatggtgaaaccccatctctactaaaaatgcaaaaattagctgggcgtggtggcttgtgcctgtaacccaaactactcaggaggctgaggcaggggaatygcttgaaccagggaggcagaggttgcagtgagccaagatcatgtcactgcactccagcctgggcgacagagtgagaccctatctcaaaaaaaaaaaaaaaaaaaaaaaaaaaaaaaaaaagaatggcaaattatctccagtccaaacttaactcccaggtaaactgactgactcctattactaaaagcaacaaacagcaaacaggg

SEQ ID NO: 138148 - DNA, 538 bp, Homo sapiens
gctccctccttgttccaacccccttgggacatctgttttttcaggtgttgtcaggagcttgtcaaggtcaggaaggtaacaggaggagcctggtctggttggtgggtatattcatctgctgcagctgccataacaaagtgccacaaactggatggcttaagacggggtccccaacccccctgggccacggaccactatgagtccctggcctattaggaaccaggcggcaccgcaggaggtgagccaccagcgaagcttcatctgtatttacagctgctccctatcgctgcattaccacctgagctcagcctcctgttagatcagggggcattagatcctcacaggagccgaaccctattgtgaactgtgcacgcaagggaactaggctgtgctccttaygagaatcgaatgcctgatgatgggaggtggagctgagttgctgatgctagtgctgagagtggctgcaaatacggattaacattagcagagaggtttcactgcacagaggccatcataaatcaattgcttgcagactcat

SEQ ID NO: 138149 - DNA, 563 bp, Homo sapiens
atttatcagaaatgacagctcctcctctgtcgctgtgtctacgtgtgctggcttggtaagtacaccccagtctgagttgagctccctctttcgtgttttgtgtaacttgaatgaacagatgtctgcaatataaatgctcttccagccaactccacacattcacactgtcagccttgatacttctaatattctcaattgaattaatctaatstgctcccagaaaaagaaaatataatagaactttaattaccatttagaacaatcttttgatgtttaatggtctgggacttttcattctccatgtttgagatgatccccaaggaaattaacttgatggatgccattcgctttgtaatgtcccgggagaccaggcattctataaatctaacaagcttcatgcgtctacatggctttgaaatgggaaaactgtatttcaatgcgaaattgcattcagcagcactggtaagatcaaccttcactttgctgaagggaggccttttgtcttctttgaactaatctgttgctggtgtcctgctcacataagacatccttttagaatgtgg

SEQ ID NO: 138150 - DNA, 370 bp, Homo sapiens
ttccagttgctccaaatcctcctgaagacttgatattgcctrtttttccattttagctgttctgattgatagttgtgaagtagtaccacattatgggtgtagtttgcattgttctgatggttaatgaaattgaaagcacttttttgtttacattttcttagacttgctcagcttctttggttaatcaggggttcataactcctctgaaattaattagcatctatagtaatagattcagaatcatagatgattcaagagttcagaaaaggaacaagcctttaacaggcttgttggagagactcatcgagttaacatgccaggagagacagccacccttctcctattaatacagagaccgagaagagatgaa

SEQ ID NO: 138151 - DNA, 370 bp, Homo sapiens
ttccagttgctccaaatcctcctgaagacttgatattgcctatttttccattttagctgttctgattgatagktgtgaagtagtaccacattatgggtgtagtttgcattgttctgatggttaatgaaattgaaagcacttttttgtttacattttcttagacttgctcagcttctttggttaatcaggggttcataactcctctgaaattaattagcatctatagtaatagattcagaatcatagatgattcaagagttcagaaaaggaacaagcctttaacaggcttgttggagagactcatcgagttaacatgccaggagagacagccacccttctcctattaatacagagaccgagaagagatgaa

SEQ ID NO: 138152 - DNA, 319 bp, Homo sapiens
tctgaacattcagtaggtcctgggtagagcctagggattcaagtttaataaaggaaagaaaagcttcacctatgggggactcagagtcattgtcctcaaggtgtctgaacaggaccttcagtggaaacgagactgcctgaacctctctgggagagttgtttttgctttgtggaatgcatcayaccatgtaagtgtgactgtcaatgcacagactagcattacctggtaggtattctaaggagggaagtggggtggctagtgtgaatcaaaatgtagagattgttcttgtttatatattgtaagactttcagtagtaagt

SEQ ID NO: 138153 - DNA, 485 bp, Homo sapiens
aattccaaaaatgcactgggatggccacagctgcccagctctgggctccagagagggtctgtgggctccagcagtgtctcacaggtccagctggtgccgcatgaagtgggggcaccagcaccttccgtgggactcacttgaatgtctgttttccccaagtacatccccctggggaatgggcagggcccrcagcaccgcgctccttcacaggtgggagaactggggcgggaggaggatgctggagcgctgaggtcagagccagtctctggcgtccgagtcgtggctttgccacttcctcagccagatgacctttgcagagtttctcttccctaaagcaagaacacaaaaacctccctcgcaggatgtttgtgatgctaaaacaggcaaagcacacgcaggcacagcacaatgcctggcacacagtgagtgctctgtaaggtcagcagctgtcatcaccacttagtactgaccagcacgcgacagct

SEQ ID NO: 138154 - DNA, 477 bp, Homo sapiens
tttcttccccccccccatgttttagctaaactttatctgtttaggagtaggttgcaggaagcttctaccatcaaatagtaagtagcagccacagacaatatctaaatagatcatattattgrcttgttattttaaaagttggcttcttctacttcctttctaagtagaaagacctttactttagcctgaaaaactaaattctaaacctagttacatcatttattttctgtgtgattttaagtgaattatttaactttactgaacttcattttcctcctacttaaaagggaggaaattataataagggatttgatatgagaattaaaggaaagagtacagataaagtgcctaggagagtatctgggcccataattggggcttagtaagtgtcagccctctttttttgtgtggaaaggaattaagctagctggtgattatttggctactgcatttgaaggcagtaaaaccaaagtctga

SEQ ID NO: 138155 - DNA, 555 bp, Homo sapiens
taaataaaggactgtgttcataaaaaggcttgtccaagaacattctcagctactatttgattcatagaagccaaagactagatactatttaaacgtcctgcaaaaggtgaatgtgcaagcagattagattttgctgtattcatacaatggaactccattcatcaataaagaagaatgaactattgatacacacaaaaacatggatgactgaaaaacatgccgaacaaaagagtacattctgtatggttccayttatatgaaatttaagagaataggcaacactcacctattggtgaccgaaatcagaatggtggttgccctaagaagggaattgactgcaaaaggggacaggggaactttttggagtgatggaaatattctgccttgaatgtggtggtgtttatagtggtgtatatatctgccaaaatgcatggaacagtacacttaaaatgaatgcatattattgtataaatcatacctctgtaaagttgatttttaaaatggcatcggggcaattcttggtgactcctacttgttaattgttatttgttactt

SEQ ID NO: 138156 - DNA, 555 bp, Homo sapiens
taaataaaggactgtgttcataaaaaggcttgtccaagaacattctcagctactatttgattcatagaagccaaagactagatactatttaaacgtcctgcaaaaggtgaatgtgcaagcagattagattttgctgtattcatacaatggaactccattcatcaataaagaagaatgaactattgatacacacaaaaacatggatgactgaaaaacatgccgaacaaaagagtacattctgtatggttccatttatatgaaatttaagagaataggcaacactcacctattggtgaccgaaatcagaatggtggttgccctaagaagggaattgactgcaaaaggggacaggggaactttttggagtgatggaaatattctgccttgaatgtggtggtgtttatagtggtgtatatatctgccaaaatgcatggaacagtacacttaaaatgaatkcatattattgtataaatcatacctctgtaaagttgatttttaaaatggcatcggggcaattcttggtgactcctacttgttaattgttatttgttactt

SEQ ID NO: 138157 - DNA, 554 bp, Homo sapiens
ttcccaaccacgagttttctgtgtcttcagcatgccagacttgatctctgttctcatccaaagtgttgaagaaaatgagttacgaatctttctaatggttctgttatctggaaagactcaaagcaggattccctctgtaacaagtggagagagcgcccatttgattattctgcactttagaaatgcttactgactccatgagtgagctgatgctgtttgtcagagggtcccaagcgctgtcacagactgatcgagacttctgtgctggttattttactaagctagaagtgagcagctgaacaaatgcatcctctttagctgaccctgtacctcagtagccagcacagttactgtcacatagcaggagctcagtttttaatgtttattcatagacccactgagagtttgaagctragtagaaatcgtggggaagatatttaaattcttgtgaatgttctcaggcctatcattctagagagcattgtattggaaggatagcaggatcggtgtatatttcttctgtcaatcaagaaaaatgacgagacaagtctcaa

SEQ ID NO: 138158 - DNA, 273 bp, Homo sapiens
agtgatgagcccaaccgtggtgctcatgtcccccactgtcagagcactactgtgtgctcagcaycgactttctctgtgcctgccttgttcatcccagcagacagtgctgggcacagcctaggtcctcagacaacataagtccatgggacaactatctgagcacacactatggtcaggatactgctctaggtgcttgaggcacattggtggagaaacgagacaaaatccctgccctcctggagcttacagtctagacaatatttttaaatgagt

SEQ ID NO: 138159 - DNA, 641 bp, Homo sapiens
aaagaagcagcccggccaggatcaggcacagcagctgtgctgtgttatgggggactcctcctggtccctggtgccagcaggctagagcggccaactcaaaccacagatagagtggctgccctcccccgggaactcrgtccatctccggctgtctccagcctgctgccactggccagctggaattccaagccaatgggacttgtgaggtgctgtgggagtggggcctcagaatgatgtcacttggctccctggattcagcccccttcctaggggaatgcacggatgtatctcccgctttgctggaattttcggggcagaggatgcaaaactcctgggctttcacgcatgccccagtgagccagcgagcattccgcccagactccacacagctctgtgcttcagacccaaggccatggctgagctcaccagggggcctcctgatctgcaggttgcaaagatccgtgggagaagcatggtttcccaggcagagtcgcacaatcactcaccgcctcccttggctgtgagtggggtcgcccctagctccgtgccacacctgggtgggccatcgccccacttgcttttccttactccctgtgggtcgagctgtctggctagtcagtcccaatgcaagaacctggata

SEQ ID NO: 138160 - DNA, 407 bp, Homo sapiens
gtaaacatggtcatatcattttccttatggtgtagttcactctctaagaaagctggtcatcttagaaccagggaaaaaaattcacattttggagactatttcaatttacggctggacgttttcaaagtatgactttgcgaaaaaaaaaaaagttcaaattgattcattgtgactggatcacttattctaatgattgcttgyctttattttgtttcccagcattcctttcagctacgatacaacagaagcaaatatttgccactggaaaaaatattcaaagacactcttaggttaatctatagctgatgacagtcagtctagtctacatagcaagcagcttcaagatatgattacttagctaagcgggaaatgggacgtgactgctgcctcattcccacgcctctctg

SEQ ID NO: 138161 - DNA, 588 bp, Homo sapiens
tcgcggccgggcgccgtggctcacgcctgtaatcccggcactttgggaggccgagacgggtggatcatgaggtcaggaaatcgagaccatcatggcttacaaggtgaaacccagtctctactaaaaaaaaatacaaaaaaattagccggacttggtggcggcagcctgcagtcycagctactcgggaggccgggacaggagaatgacatgaacccgggaggcggagcttgctgtgagctgagatcgcgccactgcactccagcctgggcgacagagcgagactccgcctcaaaaaagaaaaaagaagaagaacaagaagaatcgcaacctaatttagtatagaaacaaactgtaaatctgacttgggaatgtatcatggtaacaaatagcggcggttcagccaatcacatcagccgagtgtcagtcaatggccggcagccagctgttcaaaacaagttccaagaaggcaaatccgggctgtaaccaggtctgtaaccaatccagccacctctatacctcacttctgtcttctgtatgtcactttttttctctggctataaatataacccgcacatgttgtgtggcaga

SEQ ID NO: 138162 - DNA, 588 bp, Homo sapiens
tcgcggccgggcgccgtggctcacgcctgtaatcccggcactttgggaggccgagacgggtggatcatgaggtcaggaaatcgagaccatcatggcttacaaggtgaaacccagtctctactaaaaaaaaatacaaaaaaattagccggacttggtggcggcagcctgcagtctcagctactcgggaggccgggacaggagaatgrcatgaacccgggaggcggagcttgctgtgagctgagatcgcgccactgcactccagcctgggcgacagagcgagactccgcctcaaaaaagaaaaaagaagaagaacaagaagaatcgcaacctaatttagtatagaaacaaactgtaaatctgacttgggaatgtatcatggtaacaaatagcggcggttcagccaatcacatcagccgagtgtcagtcaatggccggcagccagctgttcaaaacaagttccaagaaggcaaatccgggctgtaaccaggtctgtaaccaatccagccacctctatacctcacttctgtcttctgtatgtcactttttttctctggctataaatataacccgcacatgttgtgtggcaga

SEQ ID NO: 138163 - DNA, 591 bp, Homo sapiens
cttgtaaagagtcgcggccgggcgccgtggctcacgcctgtaatcccggcactttgggaggccgagacgggtggatcatgaggtcaggaaatcgagaccatcatggcttacaaggtgaaacccagtctctactaaaaaaaaatacaaaaaaattagccggacttggtggcggcagcctgcagtctcagctactcgggaggccgggacaggagaatgacatgaacccgggaggcggagcttgctgtgagctgagatcgcgccactgcactccagcctgggcgacagagcgagactccgcctcaaaaaagaaaaaagaagaagaacaagaagaatcgcaacctaatttagtatagaaacaaactgtaaatctgacttgggaatgtatcatggtaacaaatagcggcggttcagccaatcacatcagccgagtgtcagtcaatggccggcagccagctgttcaaaacaagttccaagaaggcaaatccgggctgtaaccaggtctgtaaccaatccagccacctctatacctcacttctgtyttctgtatgtcactttttttctctggctataaatataacccgcacatgttgt

SEQ ID NO: 138164 - DNA, 329 bp, Homo sapiens
ttaacagttgtgccctacaaaagacattaagctgaaattaattaaaaatcatttacggtcatgattaggtcataaaaaattgtcaaacataacaattcttcaaaaaaagctaaaaagtatattttaaaaayattgttgatggaaaaaagagtgcaaaagtagataggaaaattatgtacaaaactaaaaacagaggagaaattaaaagtcaaataattgcatcaaactggaaacctagaaaaaatgggtgatttcctagtaaaaatacacattaacaaaatgggcactgaaataaggcaactatgaatataccaattagcatagaaaag

SEQ ID NO: 138165 - DNA, 329 bp, Homo sapiens
ttaacagttgtgccctacaaaagacattaagctgaaattaattaaaaatcatttacggtcatgattaggtcataaaaaattgtcaaacataacaattcttcaaaaaaagctaaaaagtatattttaaaaacattgttgatggaaaaaagagtgcaaaagtagataggaaaattatgtacaaaactaaaaacagaggagaaattaaaagtcaaataattgcatcaaactggaaacctagaaaaaatgggtgatttcctagtaaaaatacacattaacaaaatgggcmctgaaataaggcaactatgaatataccaattagcatagaaaag

SEQ ID NO: 138166 - DNA, 441 bp, Homo sapiens
ctagagttcaacgggtctcaggggctctgcctgaggactgyccttcaaccaggtattcgtaatttccccaagacccaggcttgctgagtcactcagttacctgaatgcctttttcacaaagggatgactgtgctgctccgtcttccttcttttttgtttgcgaggccacagggaaatctggatcctctggtgaaaaagcaaatccagttgctgctgctgctgctgctgctgctgctgctgctgccggttcttgtaaatgtcctcacttggtttctgggcagcaacttccttgacttgcctggggagcggatctgagctgcatttaccaggccatgcccaggggaagtgatcagtgtgggaccgtgaagctggatttccccaggagctccctccaagcttctgggatgatgataagactcgggatgaaccaaggatctcgaa

SEQ ID NO: 138167 - DNA, 440 bp, Homo sapiens
tagagttcaacgggtctcaggggctctgcctgaggactgcccttcaaccaggtattcgtaatttccccaagacccaggcttgctgagtcactcagttacctgaatgcytttttcacaaagggatgactgtgctgctccgtcttccttcttttttgtttgcgaggccacagggaaatctggatcctctggtgaaaaagcaaatccagttgctgctgctgctgctgctgctgctgctgctgctgccggttcttgtaaatgtcctcacttggtttctgggcagcaacttccttgacttgcctggggagcggatctgagctgcatttaccaggccatgcccaggggaagtgatcagtgtgggaccgtgaagctggatttccccaggagctccctccaagcttctgggatgatgataagactcgggatgaaccaaggatctcgaa

SEQ ID NO: 138168 - DNA, 428 bp, Homo sapiens
aggggctctgcctgaggactgcccttcaaccaggtattcgtaatttccccaagacccaggcttgctgagtcactcagttacctgaatgcctttttcacaaaggratgactgtgctgctccgtcttccttcttttttgtttgcgaggccacagggaaatctggatcctctggtgaaaaagcaaatccagttgctgctgctgctgctgctgctgctgctgctgctgccggttcttgtaaatgtcctcacttggtttctgggcagcaacttccttgacttgcctggggagcggatctgagctgcatttaccaggccatgcccaggggaagtgatcagtgtgggaccgtgaagctggatttccccaggagctccctccaagcttctgggatgatgataagactcgggatgaaccaaggatctcgaaccatgg

SEQ ID NO: 138169 - DNA, 412 bp, Homo sapiens
gggtctcaggggctctgcctgaggactgcccttcaaccaggtattcgtaatttccccaagacccaggcttgctgagtcactcagttacctgaatgcctttttcacaaagggatgactgtgctgctccgtcttcsttcttttttgtttgcgaggccacagggaaatctggatcctctggtgaaaaagcaaatccagttgctgctgctgctgctgctgctgctgctgctgctgccggttcttgtaaatgtcctcacttggtttctgggcagcaacttccttgacttgcctggggagcggatctgagctgcatttaccaggccatgcccaggggaagtgatcagtgtgggaccgtgaagctggatttccccaggagctccctccaagcttctgggatgatgataagactcgggat

SEQ ID NO: 138170 - DNA, 440 bp, Homo sapiens
tagagttcaacgggtctcaggggctctgcctgaggactgcccttcaaccaggtattcgtaatttccccaagacccaggcttgctgagtcactcagttacctgaatgcctttttcacaaagggatgactgtgctgctccgtcttccttcttttttgtttgcraggccacagggaaatctggatcctctggtgaaaaagcaaatccagttgctgctgctgctgctgctgctgctgctgctgctgccggttcttgtaaatgtcctcacttggtttctgggcagcaacttccttgacttgcctggggagcggatctgagctgcatttaccaggccatgcccaggggaagtgatcagtgtgggaccgtgaagctggatttccccaggagctccctccaagcttctgggatgatgataagactcgggatgaaccaaggatctcgaa

SEQ ID NO: 138171 - DNA, 359 bp, Homo sapiens
aagacccaggcttgctgagtcactcagttacctgaatgcctttttcacaaagggatgactgtgctgctccgtcttccttcttttttgtttgcgaggccacagggaaatctggatcctytggtgaaaaagcaaatccagttgctgctgctgctgctgctgctgctgctgctgctgccggttcttgtaaatgtcctcacttggtttctgggcagcaacttccttgacttgcctggggagcggatctgagctgcatttaccaggccatgcccaggggaagtgatcagtgtgggaccgtgaagctggatttccccaggagctccctccaagcttctgggatgatgataagactcgggatgaac

SEQ ID NO: 138172 - DNA, 416 bp, Homo sapiens
gggtctcaggggctctgcctgaggactgcccttcaaccaggtattcgtaatttccccaagacccaggcttgctgagtcactcagttacctgaatgcctttttcacaaagggatgactgtgctgctccgtcttccttcttttttgtttgcgaggccacagggaaatctggatcctctggtgaaaaagcaaatccagttgctgctgctgctgctgctgctgctgcygctgctgccggttcttgtaaatgtcctcacttggtttctgggcagcaacttccttgacttgcctggggagcggatctgagctgcatttaccaggccatgcccaggggaagtgatcagtgtgggaccgtgaagctggatttccccaggagctccctccaagcttctgggatgatgataagactcgggatgaac

SEQ ID NO: 138173 - DNA, 440 bp, Homo sapiens
tagagttcaacgggtctcaggggctctgcctgaggactgcccttcaaccaggtattcgtaatttccccaagacccaggcttgctgagtcactcagttacctgaatgcctttttcacaaagggatgactgtgctgctccgtcttccttcttttttgtttgcgaggccacagggaaatctggatcctctggtgaaaaagcaaatccagttgctgctgctgctgctgctgctgctgctgctgcygccggttcttgtaaatgtcctcacttggtttctgggcagcaacttccttgacttgcctggggagcggatctgagctgcatttaccaggccatgcccaggggaagtgatcagtgtgggaccgtgaagctggatttccccaggagctccctccaagcttctgggatgatgataagactcgggatgaaccaaggatctcgaa

SEQ ID NO: 138174 - DNA, 435 bp, Homo sapiens
ttcaacgggtctcaggggctctgcctgaggactgcccttcaaccaggtattcgtaatttccccaagacccaggcttgctgagtcactcagttacctgaatgcctttttcacaaagggatgactgtgctgctccgtcttccttcttttttgtttgcgaggccacagggaaatctggatcctctggtgaaaaagcaaatccagttgctgctgctgctgctgctgctgctgctgctgctgccrgttcttgtaaatgtcctcacttggtttctgggcagcaacttccttgacttgcctggggagcggatctgagctgcatttaccaggccatgcccaggggaagtgatcagtgtgggaccgtgaagctggatttccccaggagctccctccaagcttctgggatgatgataagactcgggatgaaccaaggatctcgaa

SEQ ID NO: 138175 - DNA, 420 bp, Homo sapiens
tcaggggctctgcctgaggactgcccttcaaccaggtattcgtaatttccccaagacccaggcttgctgagtcactcagttacctgaatgcctttttcacaaagggatgactgtgctgctccgtcttccttcttttttgtttgcgaggccacagggaaatctggatcctctggtgaaaaagcaaatccagttgctgctgctgctgctgctgctgctgctgctgctgccggttcttgtaaatgtcctcacttggtttctgggcagcaacttccttgacttgcctggggagcggatctgagctgcatttaccaggccatgcccaggggaagtgatcagtgtgggaccgtgaagctggatttccccaggagctccctccaascttctgggatgatgataagactcgggatgaaccaaggatct

SEQ ID NO: 138176 - DNA, 437 bp, Homo sapiens
gggtctcaggggctctgcctgaggactgcccttcaaccaggtattcgtaatttccccaagacccaggcttgctgagtcactcagttacctgaatgcctttttcacaaagggatgactgtgctgctccgtcttccttcttttttgtttgcgaggccacagggaaatctggatcctctggtgaaaaagcaaatccagttgctgctgctgctgctgctgctgctgctgctgctgccggttcttgtaaatgtcctcacttggtttctgggcagcaacttccttgacttgcctggggagcggatctgagctgcatttaccaggccatgcccaggggaagtgatcagtgtgggaccgtgaagctggatttccccaggagctccctccaagcttctgggatgatgataagactygggatgaaccaaggatctcgaaccatggga

SEQ ID NO: 138177 - DNA, 282 bp, Homo sapiens
ggaaatgagactgcagatacgtgctaaagaggctggaggaacagtgaccccagtacaagtttatggatcttatccacaatctaaagaaatggaggccaaatggcttttgaaattctaaratacatgcagaggaagagtaatgcttcatgggagagccagactcttactggcagtgacgctacacggtagagctctgttcctcctgcccatgtctgtggttggggctggggtagtgcataaacatgacgctgatgaggcccaagcattgttggaaaagaattc

SEQ ID NO: 138178 - DNA, 587 bp, Homo sapiens
aagctattttaaatactctacatttaccctcaaagactgacataacttagaataacttttataacagcaaggatgagaactaaaacttaaattgtaaatacaattttatttataaaaacaaagttagcttcaaatattttatgaactagtagaattttaaccttttgtcacatttcccagcaaagtaaataattctttttttcacttctagtctgtcagaagaaaagtcttagctgaaatggccagaaactctgaggcacactccggaggctgcttccggggcacctcggcacggccgcttttccatcccggccctcacttgatgcggtccagcagggttgaaattgtttgaaatgcttgttcccagtgcggtaaagaaatagcacttgaatgtaaatttaatttcctcagcaaggccatttttatttttttttaatttctgcagaaagtgtacactcgccagcagttttgccacaacagtatactgagcaaaggagacagggtcatttataacctgaygcatccaccctactgctgtgtccagtttccagtggctggaacgggacctcacattctgtatttgtccc

SEQ ID NO: 138179 - DNA, 397 bp, Homo sapiens
ctgtcctccacccatcctggctataagctatttattttctttgggtgtgggtcacatttttctaaagagtctttctctgtcttcttcttataccctcacttttagcagtatgctgtacacagtaggtgcttaataaagatcattaatagtaacatgtcttctagttaaggtatgatgctatgtcatgggagttaattctgggtgaatgctttggagagtgctgaaggctcactcacaattgctaaagattgacaccatgtacagtgcaagaaaaataattaagaaaacaggatctgggtggggcctagtggctcatttctgtaatcccagaactttggaaggtcaaggyaggggaatcgtttgagctcaggagttagagactggcctgggcaacata

SEQ ID NO: 138180 - DNA, 481 bp, Homo sapiens
tttaaaaacatgaagtgatattcatgataaactggtgtagggaaaaccaagtggctgaataatatagtagatagatttaaaccaacagatacagtgatctggaaagacattgctatcagcaacttattcagatctcacaacaaatctacgggtgatactactgttatctttgatttatagataaacaaatgaagcaatttacagacaggtaaaacgccctagctaaggtcatagctattcartaaaatggagcgggtaagggggctatcagggcttttaaaatataatccactttgttttatatttttcttgaatgaactgtaattttttatgaagctaaaaaggatcacaaaaacttttttaagaaaccaataaaaaccatggacccacgggttcttgacatttgcctctggccacttccccttctaaacttcacagcacatcttctagctcccttcctcatgcgccttcctcttccact

SEQ ID NO: 138181 - DNA, 445 bp, Homo sapiens
cattcagtcttgcccaggtgtaccactgctatgttayggtcattgatatataaagtgtttttcaaagatatcatttcaacaagtcctgataacatatgtgtgcttgaaaaagtttactaaaaatgttacaaaagacaatttcccttctactggctactagctagatgactttgagaaatttacttctctgaatctgtttcttcatctataaaatgggtataataattgtttcttaaagggttgtagtgaggcttacttggcacaaggtttgtaagcacttattaatgttcctaccacataaaaggagctaaacactagtaatcccatttactttccttctagtgattaatttgaaaagtatcctactcagattaaaaaggaaaaaagataatattggtttcattataaaatgaaaatcagagtaagtcaaaccccagtgaaatgg

SEQ ID NO: 138182 - DNA, 448 bp, Homo sapiens
actgaaaaacttccatgaaatggcttacatacaagactgaaactaactcactgatcctactgttacacaaatgtgcactatttattaatgagtgacaaagaacgagaaagtaacatttctatttcctatggggctaagcatattcaatttgttcatttaataaataaatgagcatctgatactggaaattgaaagtgccttgatcccccaaatccaaactctatgtcctgctatggctgataaaatatgagccaggttgctgagttcctctcttgtaatgcattgaatcaaccagttgggaatcggtgaactygtgcaaatggttctactttttaaaatcaaaaaccaacaatgaatactcttttgaaggtggtttttgtttataataaaattaatccactttgtctaacatagaaacctgttcattgcagatgttcagatctttact

SEQ ID NO: 138183 - DNA, 173 bp, Homo sapiens
aaggcagtatcttagttgtttccttcagtaaatattgtaaacgtaccccactgccccattaaaccaccagttgataaaagacattataggaaaatcactaaatttccaatttatattaataagtcaaaagaattcaaaatggctktgcttaagaccaccaaatttaatataac

SEQ ID NO: 138184 - DNA, 582 bp, Homo sapiens
ctagaaaagatggtatatttgaaagtgttttgaaaactcaaaaaacactaaagacatttaatgtaatattactatggcaccaaatttcttaaatataacttattttaactttaggaatctaaaaccatttttatttaccttaattctattttgaatatattctcaagataatatgattatttcttttgtttctattacacatataaatatttactattgagactagttcattcaaaatatttactattcttgccaatgaattgcttttggcagaataatttctttcttaaaatcttgatgaatagtatttggttgcacttataatagctcagttaattaaaaacacacacacacacacaaaatgcgagacctgcaatgtgtacatctacactaagccaccatataatgatgagacattcatgaacagcagtgacacatttattcacactaagaaaggacaggacaggacaggacaggacaggacaggacaggayaggataggataggacaggacatgatgctagttaaatacatggaagaatatgtaggattccgtaagttttaatgcaaagaacatggact

SEQ ID NO: 138185 - DNA, 511 bp, Homo sapiens
ttctcctgtttaaaatgctttttggcacttagggttttgagactcgtaatcacgccttttcaccttaaattataaagcccttttatggctgttactggactttctagggaggcctgatgcagtgaagcctgaagttcctgcttaaggctttgagcatagagggtttctaacaaaaggtactaaaatctactgcaaaacagatgatttttcattcaggaacatgtattcgtgaagaccacactgactgaagtgaccttagtgtttctaagtcaggttgtgctgatctgtctctcttagcagcttctggagatctaaaacagtcgtctagcaygataaatctctgcactctgcattgttgaggcagacactgtcacggtggaagtaaatgagcatgatttatatttacaattcagaaacttttcttttaaatggaagcaaagctgggactatgtctattatgcctaaagactgcagcaatattgcaagtaactacaaggcacttatttacata

SEQ ID NO: 138186 - DNA, 450 bp, Homo sapiens
ggctggggcatgaattgccagataattctctgttaaggataggttttagtaatgaaaaaaaaaaaaaaaaaaatatatatatatatatatatatatatttgcattatatatacaggcttgtcattgtcatatatatatattacattgtcatatatatcattgtcatatatatgacaatgacaaacctatatatatagaatacaacsttgggtatcaaaagatggagccttgcaaaaagcccagggctagttaaatgtattagagtaaaaatcccgactttgtttagaggctgttctctagttttcctgtcaagaaggaactattggacaagaatgaaaagtaaagactacatagaatttagtgagagatttacataaaatggaagtgtcttctagaaataagacttgatgtcagtgattgggatttatccatataaagacatgagggtca

SEQ ID NO: 138187 - DNA, 450 bp, Homo sapiens
ggctggggcatgaattgccagataattctctgttaaggataggttttagtaatgaaaaaaaaaaaaaaaaaaatatatatatatatatatatatatatttgcattatatatacaggcttgtcattgtcatatatatatattacattgtcatatatatcattgtcatatatatgacaatgacaaacctatatatatagaatacaacgttgggtatcaaaagatggagccttgcaaaaagcccagggctagttaartgtattagagtaaaaatcccgactttgtttagaggctgttctctagttttcctgtcaagaaggaactattggacaagaatgaaaagtaaagactacatagaatttagtgagagatttacataaaatggaagtgtcttctagaaataagacttgatgtcagtgattgggatttatccatataaagacatgagggtca

SEQ ID NO: 138188 - DNA, 605 bp, Homo sapiens
gtcttcagttttttttaatggtgaacactttctgtcaataacaaagtttattccatgggagttacayagggagttttcacccagaacaattttagtaattatttcagttttctcaatgtaattccgttgctctgtggatcagcaaggctcacttcaattatacagttcttaaggtcatcagatacaattttggtttttgagtccttgcaactagtatcttcctgatatgttaaatgttaaacatagtttgtgctttacattacaccaatcttagaatataaattttttttttagtcttggcttctcttatgctgacttttcttaagttgcttttccttctctactgccacagtactgatcagagacccaaagggcagcgaacgtattttaacctaattccagatatcccaaccaccataaaaactgtatccaaagaaataaaatgtatttgaagaaaacaacatttaaaatcctctcttgaaattgtggcatagcacttatgttgaaacaggatttttttttcttttcttaatctcactttaaaatgttatcctttttgaatttgatttatgtagctgctggatgaaggagctcttttaaataat

SEQ ID NO: 138189 - DNA, 605 bp, Homo sapiens
gtcttcagttttttttaatggtgaacactttctgtcaataacaaagtttattccatgggagttacacagggagttttcacccagaacaattttagtaattatttcagttttctcaatgtaattccgttgctctgtggatcagcaaggctcacttcaattatacagttcttaaggtcatcagatacaattttggtttttgagtccttgcaactagtatcttcctgatatkttaaatgttaaacatagtttgtgctttacattacaccaatcttagaatataaattttttttttagtcttggcttctcttatgctgacttttcttaagttgcttttccttctctactgccacagtactgatcagagacccaaagggcagcgaacgtattttaacctaattccagatatcccaaccaccataaaaactgtatccaaagaaataaaatgtatttgaagaaaacaacatttaaaatcctctcttgaaattgtggcatagcacttatgttgaaacaggatttttttttcttttcttaatctcactttaaaatgttatcctttttgaatttgatttatgtagctgctggatgaaggagctcttttaaataat

SEQ ID NO: 138190 - DNA, 605 bp, Homo sapiens
gtcttcagttttttttaatggtgaacactttctgtcaataacaaagtttattccatgggagttacacagggagttttcacccagaacaattttagtaattatttcagttttctcaatgtaattccgttgctctgtggatcagcaaggctcacttcaattatacagttcttaaggtcatcagatacaattttggtttttgagtccttgcaactagtatcttcctgatatgttaaatgttaaacatagtttgtgctttacattacaccaatcttagaatataaattttttttttagtcttggcttctcttatgctgactttkcttaagttgcttttccttctctactgccacagtactgatcagagacccaaagggcagcgaacgtattttaacctaattccagatatcccaaccaccataaaaactgtatccaaagaaataaaatgtatttgaagaaaacaacatttaaaatcctctcttgaaattgtggcatagcacttatgttgaaacaggatttttttttcttttcttaatctcactttaaaatgttatcctttttgaatttgatttatgtagctgctggatgaaggagctcttttaaataat

SEQ ID NO: 138191 - DNA, 607 bp, Homo sapiens
gacaaagcaaatcttggggtgtgcaagaaacctccagtagtgtggattgaatacacagggaaaagctcagacatagagactgactgaaaatgggaaacagaaattcaaggcctatgggataaaggaaagagggagccaaagagactccctctgacattcccccagatagtcctttggggagaatgtttcaggtttggagggacaaccctcaaatcagggacacggagaagcaaaagatggtaaagactgctatttaatctggtccaaagaccccattcataagccttcagtcttttggcctaagtttggctcaggtgaggattgggagtgccaacctttaattatgtgaataataaaaccccattttcacaagagaagataagttaygatctctgctggatcaagaaattagcccccatgttccctctcaaagaggaagaaaaaaaggctagtaaaaagcccttgcccagtgaaaagccctgggaccccctatcatgcttgtctcctccatatgtctcacaaaataagggacaggaagatcaagagcagtaggagggttagaagaagaaagacctggagaccatgggggagccaaaccaactactcc

SEQ ID NO: 138192 - DNA, 607 bp, Homo sapiens
gacaaagcaaatcttggggtgtgcaagaaacctccagtagtgtggattgaatacacagggaaaagctcagacatagagactgactgaaaatgggaaacagaaattcaaggcctatgggataaaggaaagagggagccaaagagactccctctgacattcccccagatagtcctttggggagaatgtttcaggtttggagggacaaccctcaaatcagggacacggagaagcaaaagatggtaaagactgctatttaatctggtccaaagaccccattcataagccttcagtcttttggcctaagtttggctcaggtgaggattgggagtgccaacctttaattatgtgaataataaaaccccattttcacaagagaagataagttacgatctctgctggatcaagaaattagcccccatgttccctctcaaagaggaagaaaaaaagkctagtaaaaagcccttgcccagtgaaaagccctgggaccccctatcatgcttgtctcctccatatgtctcacaaaataagggacaggaagatcaagagcagtaggagggttagaagaagaaagacctggagaccatgggggagccaaaccaactactcc

SEQ ID NO: 138193 - DNA, 626 bp, Homo sapiens
tttagcaaaaagaataagactggaataatcacattacctgacttcaaattatattagagagctatagtaacaaaaccagcatggtactggcataaaaacagacatgtagaccaatggaacagaatggagaacctagaaacaaatccgtacatctacagtgaagtctttggacaatggtgcccaaggatatacactgggtaggagacagtctcttcaataaatggtgcagggaaaactggctatccatatgcagaagaaaaactagatccctatctcttgccatataaaaaataaaataaatatggtttaaagacttayatctaagatctcaaactatgaaactactcaaagaaaatgttggagataccctccaggacattgatccaggtaaagatgtcttgaataatacctcattagtacaagcaaccaaagcaaaaatggacaaatgggatcacatcaagttaaaaagcttctgcacagcaaaggaaacaatcaataaatagcatgcagaatgggagaaaatattttcaaactgtccatccaagaagggattaataaccagaatatgtaaagggctcaaacaactcagtagcaaataaacaaataatccagttcaaaaatgggca

SEQ ID NO: 138194 - DNA, 537 bp, Homo sapiens
gtgatttacatatcacagctacagtgttagtatattctgtatttgtctgtgtacttactgctaccagtgagttttgtatcttcatacttcttatttcttattaacatcctttttacagattaaagaactccctttagcatttcttgtaagacaggtctaatgttgacaaaattcaacagcttttacttccctgagaaagcatttttttctcctttatatttaaaggatattttcactggatataatattctaggataaaaggkttttttttgttttgttttgttttgtttttcctgaagcactttgaatgtgtcattccactctctcctggatggtaaggttttcactgagaagtctgctgccagacatatgggatctcctttatacattgttcgtttcttttatcttgttgcttttaaaatcatatctttatttttgggagtttgattattagatgtcttgaggtagtcttatttgggttaagcctggttggtgttctatgaacttcttgtatattgatatctttctccaagtttt

SEQ ID NO: 138195 - DNA, 606 bp, Homo sapiens
ttttataacagaatattttttgtttttttacaaacagaatattaatagacaagtgtcttagtcttattcacctccacggacacatcataggtaaaagaaagttatctaactactaaatccacaacataaattagtcctaatagcagaaggaatttttcaaatatagagaattaaaaatatttacttcctaatttgcaggtatgggataacacagtgaaccattattttcccaatgactaatgactgatgacrcaaaaatcatacctaggtaaaagattcattcaaagtgcaaaatagcccaatgaatcttaatgttatagcatatgaaaagttcatcgctgaacagatcccaaattgcaactaagctttaagaaaatatttcttattgatttttgatagaatatcaaaggaaactttgcacaattatctgcaaaggctatcaaaatactcctttcatttttctgcttcatatctgcatagaaatgtattttcttcatatttgtcaacaaaaactacgtatcacaaaagcttgattccagaaatagatataaaaatccagctatcccctattcagacgtactttaaagagataagcaagttgtaaaa

SEQ ID NO: 138196 - DNA, 540 bp, Homo sapiens
ctgtcctcttctgtttctttattgaataaaaggcactccaattctttaaagaatttttagggcaggatgtggctatgggtaaaaacatgctatccaagataacagtgctcatgtgcttaaaacatccttcttttcgtggaccacattcagggcttcaaaataatgtgccacctaaaattacattatccaagaaacagaagtgcttagcccagcaaaaagaagacacatgaggttctattagcggaatacaaagagttaaagagtagtcttgtgataagcaaatttaatttaatccactaagctctaggatagccccagaaccactgtggttcaggaagtcaagattttactatkaattggaaaaagacttttgcaaaatgaaggtattgccttgtaagtgaagaggatcagaatacgctacctcccaaaatgctgctttaaacatgagaattattttgaggtgaaggcaattaagaatcaacagatacagttagagtgttccttatctgattaaaagaagaaacttctcaaagttgaaga

SEQ ID NO: 138197 - DNA, 540 bp, Homo sapiens
ctgtcctcttctgtttctttattgaataaaaggcactccaattctttaaagaatttttagggcaggatgtggctatgggtaaaaacatgctatccaagataacagtgctcatgtgcttaaaacatccttcttttcgtggaccacattcagggcttcaaaataatgtgccacctaaaattacattatccaagaaacagaagtgcttagcccagcaaaaagaagacacatgaggttctattagcggaatacaaagagttaaagagtagtcttgtgataagcaaatttaatttaatccactaagctctaggatagccccagaaccactgtggttcaggaagtcaagattttactatgaattggaaaaagacttttgcaaaatgaaggtattgccttgtaagtgaagaggatcagaatacgctacctcccaaaatgctgctttaaacatgagaattattttgaggtgaaggcaattaagaatcaacagatacagttagagtgttccytatctgattaaaagaagaaacttctcaaagttgaaga

SEQ ID NO: 138198 - DNA, 621 bp, Homo sapiens
tgtcaggagctgatttttaatgataaagctgcagatgggctaaataaaagccaaattagtcctacaatcaggtattaygtttttaaaccaagttgactgaattgatagtggacttgggaaatcttccccagcagaatctagatgagtggcacagaattgaaatctctttctttcccaccatttccctttaagtgctctgctcctttgtaaacagttaaagatttgaaagagaatctgatattcccaaggcattaggaagaaaggatttaatcccttcaatttggggcttaatcctgttaaagaaaatgtaagtgaaaatggaaggctggagagaatgattgctttttgtacagttaaataaggtcacaatattcttatgtactttgttttacaactgtgttttcattttttcaaatgtctggtcacttagcaaagttatttactatttactgtgtacatagaaagctttattatgtgtggtgtatctaatttttttttgctgaaatacattatggtcaatcaagccaaccttgcatgtacagaattttttttttccaaataaattagttgttttcttatttttttggtttagtatgttgaaataaactattgtagcttcat

SEQ ID NO: 138199 - DNA, 601 bp, Homo sapiens
catttggttgtaaataagagaaaaccactcacagtcamctaagcaaacaagtgttagagggaatccaaaaatatcatggacccctgggggaagaggtacaaccagaatagggcaataggaagtcatcaggcactaagaatggtttctctctcctctagtctgaactattaaagcaggataatctttattttctttgcacttaggtttcattcttgttcattctctacaaaccaactttctccgctgatgacctagacatagcattcccaggctcccattttcccagatcaggaatttcattataaatcccaattacaaatccctgcttagagaagggttgagtcagttgtaccacatggtccagttaactatagctgagggaacaggcatgcggctttttaatgtctaagagggtattttgttcctagaaaatgaaatgccctcattgagttgaacagactaaatttgttttaacaatcccatttacaattcaaattcctttaaacaacttaatagcatttatacatttaaaaaaatgattcttttaagcagcattgcaaatgcttgaccccattagcataaaccttcccaagtgcttaaa

SEQ ID NO: 138200 - DNA, 373 bp, Homo sapiens
tatatagcaataatacaatattacaaacattatgcatcacaaayaattatgaataaaacttcaaccttatttagatttaactagttttacatgtacttgtctatgtgtgtattgagttctatgcaagtttatcacatgtaaatatgtgtgacgactaccacagtcaatacacagaacatttccatcacagggattcttcatactacccattttagacatagttacctcctttcatctcccctccctaaaccctggaagcaactactatattctttatttctataattttgttattttaagaatgttaaattaattgaatcatatagtaagtaaacttgaggttgattttaatcactaagtagagttagattga

SEQ ID NO: 138201 - DNA, 373 bp, Homo sapiens
tatatagcaataatacaatattacaaacattatgcatcacaaacaattatgaataaaacttcaaccttatttagatttaactagttttacatgtacttgtctatgtgtgtattgagttctatgcaagtttatcacatgtaaatatgtgtgacgactaccacagtcaatacacagaacatttccatcacagggattcttcatactacccattttagacatagttacctcctttcatctcccctccctaaaccctggaagcaactamtatattctttatttctataattttgttattttaagaatgttaaattaattgaatcatatagtaagtaaacttgaggttgattttaatcactaagtagagttagattga

SEQ ID NO: 138202 - DNA, 434 bp, Homo sapiens
caggctgtttctccgaggaaaggacttttacatcttttggttctaaatgatcatcctttctctaaaggtagcattcagacaaatactaaatttcaacattatgcattacctaatgtatttctatttcatatataatgtttatgccttagtctgtatagcataagtataaatataaaatagcataatataatatactattacatgtttagatgtaacttctgttatatagwtggcacattatttgctaatgaagggtaaattacttaatattttatatttgtacaattgaataaaaattgacaaaaaataagaatgaatttgttgctttatctagagtaagtgaatatttgtgctaaagaagaattttttaggaaatacaacttaggcagattccaaataaacaaagattataatttcacaatattatttaaaat

SEQ ID NO: 138203 - DNA, 518 bp, Homo sapiens
caaagataacaaagtctaaatttaatctaccacattgttttttttttttttttgccccaactctcttaaatatagaacaaatcacagaagcaatgagaaattaaaaagtagataatagactcttcagaaatgtgcaattttatgggtatttttcaacttgactctacttattgctgaagattcaggccacgttttcttcagcagagtcagaagaccaaggcctagcttaatttatattttgttaggcaataaaatgctctacatctaaacaaataaaccaagcaaaacacaaacaagcaaaacagcctcggcatcttgagtctttgttcacttaatggatatttgttggatagctactctrtgactcattgggcaacatgcaaactttatatgacatgctgtggtatgttaaaatacagcatttaaaaaaatgcttaatgactgtatcaagtatttttgttacattgtacaagtaaatatagaattgaaatacaaacaagtaatagactattagctta

SEQ ID NO: 138204 - DNA, 619 bp, Homo sapiens
cttctctctaccttcaacaggtagcagcaatcctagtctcataataaccaaggtcaataacatttgtaagcataataacttctttcttctactcctgatctactgttataagaagctcaatatgactgggagatcactttcaacataagtttagtggaacccctaccatgtcttctgatagaagaattatccctctctgagaaccaggagaggttcattggtttcaaaaattaggagaaagggaagcttatatttctcaggtaaatcacaaggaagaatgatgagcaaggactcttttcctttcaactctgggttgaagacacaagcattacactgatcagggacgtaccaccctataattagttcaaagaatatacaacatctctggaaacagctgttctatcctatagttaatccaatggagccaacatgctggggcatctcctcaaaggaaagaacaagcagttgcatcttccagttcctaccatcaataaagaggcacatgacttggtaggcctgtttgggttttatagacagtgtayatcacaaaaagaaacattacaaaattgcttcaacttatttgctgagtaacttgaaaggctaccagacttaagtggca

SEQ ID NO: 138205 - DNA, 370 bp, Homo sapiens
agtttgaggagaagggcaggtgaaggtcaaagcacttagggtagcacrtggcacacagcatgcaatgccagctgttggtattattgtttttattattaatcctaaggacaattggaagtcactgagggaataaatcaggggagcaattgatgagatttccatttaggatatttaaaaaggcacttcttaaggatggtagcttggtgatttactgagatatggagaggcagagaaaccaattgtttccctgtactctaagaatattctaggtgggtctggaagggaagtagacttcccttttctgtaggcactaatattctaagtccagagagcctaatacgtatcctgacactttttcttttttaatttt

SEQ ID NO: 138206 - DNA, 392 bp, Homo sapiens
ctggcattttttaagacatggagaagtataggtgccaggctaagtatgagtttgaggagaagggcaggtgaaggtcaaagcacttagggtagcacatggcacacagcatgcaatgccagctgttggtattattgtttttattattaatcctaaggacaattggaagtcactgagggaataaatcaggggagcaattgatgagatttccatttaggatatttaaaaaggcacttcttaaggatggtagcttggtgatttactgagatatggagaggcagagaaaccaattgtttccctrtactctaagaatattctaggtgggtctggaagggaagtagacttcccttttctgtaggcactaatattctaagtccagagagcctaatacgtat

SEQ ID NO: 138207 - DNA, 602 bp, Homo sapiens
gcaactagttgaggctctcctacagaatgctatattcatcctcttcaggaacacttcttaaatttgatttcaatttaattgatgcagggagttttcctttgagtttgatcttgctatgyatgacattgccttcagccaacttagggatctcccaagatctccacaattgtcatgtagttatatcagcaaatgaattattgaacttcatgattaaaatatttcctgtttagcaaattcagttttacattttcattttctcctcccacagtttttattatgaagcaaaaaaaaggttttcatttattttaattataacaatactcattataagattaagtgaagaatactataactattaaaattcaattgctattaagttacaaggtctttaactgttacacatttacgtactggttaaggtagggagctttcatttatgtgactgggtataaactgagaccctcagcttttgatcaggcagcagtgatatatgccaatttccgtctggttagttttggagtttgctttcatattccattaaatagggtgacacatccggcctatgatgtgacagatgacctttctgaagatcatggcaccta

SEQ ID NO: 138208 - DNA, 602 bp, Homo sapiens
gcaactagttgaggctctcctacagaatgctatattcatcctcttcaggaacacttcttaaatttgatttcaatttaattgatgcagggagttttcctttgagtttgatcttgctatgtatgacattgccttcagccaacttagggatctcccaagatctccacaattgtcatgtagttatatcagcaaatgaattmttgaacttcatgattaaaatatttcctgtttagcaaattcagttttacattttcattttctcctcccacagtttttattatgaagcaaaaaaaaggttttcatttattttaattataacaatactcattataagattaagtgaagaatactataactattaaaattcaattgctattaagttacaaggtctttaactgttacacatttacgtactggttaaggtagggagctttcatttatgtgactgggtataaactgagaccctcagcttttgatcaggcagcagtgatatatgccaatttccgtctggttagttttggagtttgctttcatattccattaaatagggtgacacatccggcctatgatgtgacagatgacctttctgaagatcatggcaccta

SEQ ID NO: 138209 - DNA, 602 bp, Homo sapiens
gcaactagttgaggctctcctacagaatgctatattcatcctcttcaggaacacttcttaaatttgatttcaatttaattgatgcagggagttttcctttgagtttgatcttgctatgtatgacattgccttcagccaacttagggatctcccaagatctccacaattgtcatgtagttatatcagcaaatgaattattgaacttcatgattaaaatatttcctgtttagcaaattcagttttacattttcattttctcctcccacagtttttattatgaagcaaaaaaaaggttttcatttattttaattataacartactcattataagattaagtgaagaatactataactattaaaattcaattgctattaagttacaaggtctttaactgttacacatttacgtactggttaaggtagggagctttcatttatgtgactgggtataaactgagaccctcagcttttgatcaggcagcagtgatatatgccaatttccgtctggttagttttggagtttgctttcatattccattaaatagggtgacacatccggcctatgatgtgacagatgacctttctgaagatcatggcaccta

SEQ ID NO: 138210 - DNA, 570 bp, Homo sapiens
aaggagtgagattagtggatcatatggttagagtatgtttagttttgtaaggaactgccaaactgtcttctaaaatgactactaatttgcattcccatcagcaatgaatgaaagttcctgtggcttcacgccctcaccagcacttggtgctgtcagcsttctggatctgggccattctaataggtgaataataataaatcattgttatctgaatttgcattttcctgataacatataatgtagagcatcttttcatatacctgtttgtcatcatatatcttctttggtaaaatgtctgtttagatctttggttcattttttaaattgtattgtttattttcttattgttgagttttaagagttcttaatatactttggataacagtcctttatcaggtatgtgttctgcaaatattttctcccaacctgtgatttgtcttctcattctcttgagtattttaactttataaaataatttcttgcttatttgaaatcaggcaagaaaagcctattagaggttgaaagagaaatataatacacagccttttaggatattaacattgaatgtgg

SEQ ID NO: 138211 - DNA, 561 bp, Homo sapiens
tgaaacccagttcttttagtaatgagctgtatatccttaggtagcaaatggctttacctctttgagtttgctttctttaggtgtaaagtggattattggtttaaacaagatcagtagaataataatcaaattgttagtatctatgaagctttctttgcatcccgtattgcctgaggggcttcaatcttgtgattctcctgtgcgtagacgtattcttattgtagtcatttgatagataaggaaactgtgattcagaaaagttaagcaatttgcttaaggtcacctggctagtaaaaggcagagtcagctttccagtctgggcagtctaaccccagaggcagtgctcttaaaagccaatacgtcgtgtgcctgggatagagtggatactacacgaatgatagcaatgaacaatacttgggaataaatgaaggctatggagagactggttggtcayggaaatgtgtgaggtgttggtgggctttagttttgggatacgagttgggcaggaagaccacaaccctcctgcctatcccagccagacacgctgttgccgtgactggc

SEQ ID NO: 138212 - DNA, 391 bp, Homo sapiens
gaattctaccaagcatttaaagaagaaattacactaaatctctgtaatctcttttagaatatagaggcagagggaatgcttcctaactcattctatgatgccagcattaccctaacaccaaaaccagatgagatcattataaggaaagaaaactaaaacccaatagttcatgaacataggtgcaaaaatcctcaatgaaatatcagcaaattggatataacaatgygtaaaaagaattatacaccattatcaggtaggatttttttcccagatatgcaaggcttgttcagcattcaaaaatgaatttatataatcaattacatcaacaggctaaaaaaggaaaattccacaattaataaatacagaaaaaacatctgacaaaacccattca

SEQ ID NO: 138213 - DNA, 198 bp, Homo sapiens
gagcaagcagcttagaagacgtttttgaagatactgtccctgaaaacttctccaacctygctagagaggtcaacattcaaattcagaaaattcagagagctccactgagatactgtacgagataactatccacaagacatatagttatctgatttttcaagctcaatgcaaaagaaaagaaatgaaaggcaagtagtg

SEQ ID NO: 138214 - DNA, 508 bp, Homo sapiens
acccatccatctgaaattgtttctgttattgaatccaagaattcatgcagtccaaacacattaaacttaacatttttcttgttatggaaatcggaatgcaggatttatcaaatccttctttggaatgctggccctttacagctaacaagctaagatagacagtttgtctgccttcttggatgataaatcgtaaatactcaagacccagtattttagacacctgtgcttcaagtattacaaggcattttgagagatcacctggcccatctttctcctccttccccatcgaaatcctctttgtcataatctgatagcaaagataatttactcttggaagaaaaaaagtacaaagagggactattttctaactgggtgtgagttgggaakatccttctgtttgttttggtaatttaatttccaaaatatgcacagttctccttcagtatgcagacattgaataaaggcccattttccacctgagttaacatgcccctgcaggtcagtttct

SEQ ID NO: 138215 - DNA, 580 bp, Homo sapiens
atgctctcctgtttcctagtgataaaaagatgaagctacagacttcaactgtacttcgtgatgccgtgggatctgagttgccatatgtaaagagacagagcctggggaattgtgagaggaagtttctstagtcttatcctcagtcagctggaagatgatcaacttacatatgccctgcgctagtaaagaagcagacttccaagcgtcagaagctctgtttcctatgccatggctatctgctaagagatctcccattgcaaatcatggtccagcatccagcaagtgtggtgtgatgggcacaggggaaatttcgatcatgttaagatggcattatgaataaggaatctgagaatgcatgaattctgttttgtcaatcaccactttcactgcagggttactgaagggacctcacataccagaggcaaagaaaacggtaatcaaaattgccaccacttaagctggtgcatagtcacctcatgagagctatccttatagatggattggagcagtcagctcaggctccaggcatcccctaagcaggcttctgtctcccctaattttcaatcttaccattaccatc

SEQ ID NO: 138216 - DNA, 549 bp, Homo sapiens
gaagaaaaatgaaaacacaatgtattgaattgtgtgggatcctgttaaagcagtactcagagaaaaatttatagcactaaataattttattagtaaagaagaacgatcttaaatyaatttctactcttccgcctaaagatacttaaaaaagaccaaattaaccctaaataagcagaaaaagggaaatagtaaagatctgagaagaaatcaagaaaaatgaaaacagtagagaaaaacaataaaacaaatatctgattttttaaagaaggctggggaatatctagttttatgagttttttttttttttaaataacatgagtgagtattgaatttggtcttttctgcatcatataatttttcatttttaggttgttaagatgaattgtattgattacatttcaaatggcaaaaattttacatttcttgttgtgcaggcctgttggttatgcattctctcagcagtcttttgtataagtaagcctttatttaattttcatttttaaaagatattttcagttactaaagaatttgaggttgacaggtttttcc

SEQ ID NO: 138217 - DNA, 634 bp, Homo sapiens
tgttgtgattatctttacatactcctaagggtagtcacccagcctgggactaacagtttaccccagcatgaggttcaggatggaatgcatacaggacagaatgtcagtgtgcttcctggactcttgatcacctgagtttctggttgtagaacaagtatcctgaaatcacaagctgtgttrgcattctggaaatgctagagagagcactatggcttgtttcaaaattgatagcagtataaccagctgggatctgaacagaatcccactcactgcagcctgggctgggctgactcagctgaaactgcattttctgggtctctggtgctatcagaaacaggaggtactcatctctagtgcaatgggcaaaacatgtcacctgaagtccagaggtctgagttaaagtctcaacacaattgttaatagcaggatgcaaatgggtaagcaacgtaatccatccgggtctcagtttcatcacctgtgaataaacctgaggtttattaatgatcctaacctcaaagaattgttaagaagatcaaattacaatctgtaatgtgatataacatagtgtctaaaagcacagatttttgaagccaaatccttatttattgagtaaacaaatatttattgacaccta

SEQ ID NO: 138218 - DNA, 634 bp, Homo sapiens
tgttgtgattatctttacatactcctaagggtagtcacccagcctgggactaacagtttaccccagcatgaggttcaggatggaatgcatacaggacagaatgtcagtgtgcttcctggactcttgatcacctgagtttctggttgtagaacaagtatcctgaaatcacaagctgtgttggcattctggaaatgctagagagagcactatggcttgtttcaaaattgatagcagtataaccagctgggatctgaacagaatcccactcactgcagcctgggctgggctgactcagctgaaactgcattttctgggtctctggtgctatcagaaacaggaggtactcatctctagtgcaatgggcaaaacatgtcacctgaagtccagaggtctgagttaaagtctcaacacaattgttaatagcaggatgcaaatgggtaagcaacgtaatccatccgggtctcagtttcatcacctgtgaataaacctgaggtttattaatgatcctaacckcaaagaattgttaagaagatcaaattacaatctgtaatgtgatataacatagtgtctaaaagcacagatttttgaagccaaatccttatttattgagtaaacaaatatttattgacaccta

SEQ ID NO: 138219 - DNA, 586 bp, Homo sapiens
ttaagtaagatggttccttggggtcaacacctgtggaagagaaggaaaggaagcaggattgtttaaagcaagaaatttgggctctgatgcagtcccagtaaaattcgcagttgaccccacaggaagttctggtgctggcatgattcttcagagttgtacaggttggaggtagagggccaaggttttataccccatatgaattagttattggatgaccctcatccccaagaagtggacataaccttggacaagatggatctcttcaattcctggaggggttgacagctgagagctttgcaccagcagcactcccactagctggacgtgcatgcccttccaatgcataatattacctatgatactctcctgtgggatttagctstttgtagcatcaatgcaaaatacttattttaagagtttccaacatcactgcatttagctttagaaaattgtaccatcactgtcatatttctcaactgtctcttcaaggacatgggggtcatatcattctgggtcttttctttcttgggttccattagaaatgcagaaatctctggttgacaagaatggccacatggctagcaaa

SEQ ID NO: 138220 - DNA, 407 bp, Homo sapiens
tcttttcaccccagtggaaggattcccaccctagggctatggagatgactgaatgcataacaccggacactggacaaatagcatcaacagcattttattagtcatatatgctcatttagggggttgtagttgggaaaagagtgaacaaccagggtcagtgagaggtgggctttgtagtatcaagagggtgtggtgcccctcggttcccataggaggatatgattggcttatttgaataattccatgggctggccaggaactggaagctactactcwggaatcaggaagaacagcatctggtctcccttgatcagtaggaccttacctgtgggggcagtgttgggagggtaatttgtgattggtcatttgaagccctcctggtttcagatgtcaaaggggcacataat

SEQ ID NO: 138221 - DNA, 473 bp, Homo sapiens
tgttagctttttttaagcaagtcaagcaccatttttataaagcagtaacattaaagtatctgaaaaaataatttatgtaaaacaaaatagtaaatatttttgtgtattttgttattctaatattacagagaagaaacagagatgtagtggtgtgacttataccaactcacgtagtggcagtgtggcactctakgacctgtggctccaagtaaaatattatatactgtgttatcctacattttcatggaattaaaaacccacatgataagaagcatgttttagggaacaagatgataagtttaatttggagagagtgtgggacttctaggaaagatctccagttggtagttggatacaccggtttgtattcaaggagtaaagcaggctggaagctatatttgaaaatataacaaagactgggtgttgagatcaccctgctttgggaaaccagcaaatagaacagtatctgaaga

SEQ ID NO: 138222 - DNA, 569 bp, Homo sapiens
tagaaatcactgtgcattaccttcttcttcaaatcggacagatccccaatttgagccmcctctgaattaaggtgtggttaaatctgagaatgagtgtgtgagtgtgtgtgagagagtgtctgtgtgtatacgttgtgtacatatacacacaaacacacagtttgtgtacatatatataacatatatgtacatatatatgtaatatatatgcttgtgtacatgtatatgtaactatttcttataaaatgctattgaaaatgagcaataattgatttgagcaattttttttataacttaatgtagccttacataatctctatgctaagtttgatatttcacagtcaaaatcaaatgtacaaaattaaagagcaaaacaaatagcaattacataagaaatgacttagcagctgtcagcttatgcaagaaatggcagtgcaccaattaccttggcatccatgaagctgttactatggctgttgttgcctctgtctctgctgaggttaacagcaatcataagacacttttttggttcatttactcaggctgttgattaacacagattcaatgcc

SEQ ID NO: 138223 - DNA, 561 bp, Homo sapiens
attaaatcaccagtacttttgtttgtatgcatagacttataaaacaatctagataagaaataacaacaacaacaacaacaacaaactctgtcaatattaaggcttgagacttgcagacagacaactgtgataggcaatatattatccatgaagttcatgataaggaacaaaacaaaaaaayagagtcactactcatttattcatttatcctactagaaatgagcattcactaaaaaattctgcccctgccaaataacaatctcttgtttcaagtgatttagtggacttctttatcataaatgtatctccttatctgtttacttaactttagctgaattacaaggatttaagtagctgtgaaacttgtattgaacaaatcaggtagttgcttttcataaaccattgcagttctaccatactctgaccatatgataagacccagtgaaaatttaaaaaagaaaaaaatgaggaaaactaagaaataattagtagcttatatctaggctacacatttaatgtgagtataaaaatgtgtaatggcatccactaatatacatttgg

SEQ ID NO: 138224 - DNA, 474 bp, Homo sapiens
ggtgcctgcctgcttccccttcaccttctaccattattgtaagcttcttgaggcctccccagccatgtggawctgtgagtcaattaaacatcttttgtttacaagttacccagtctcagaggtagtatcttcattgcagtgtaagaatggactaatacactatgcaaagcaaattgtcaggcatattaataattagaaagtcataaccaatttagtaaaactacaaaatatcaagaacaaaagagaatgttaaaaatgaatcagaggaaaaagagagattgccttcaaaagaatgatacattgatgtcaggtttcacaattacagaaaaggccatttgatgtggaattatctttaaaactgtgacggaaactaaccattggtcttgaattgcataccttataagctatcatttgagcacaaagccaaaggaaaaactttgttttaaatattactcgtatattttgtagctgcat

SEQ ID NO: 138225 - DNA, 474 bp, Homo sapiens
ggtgcctgcctgcttccccttcaccttctaccattattgtaagcttcttgaggcctccccagccatgtggaactgtgagtcaattaaacatcttttgtttacaagttacccagtctcagaggtagtatcttcattgcagtgtaagaatggactaatacactatgcaaagcaaattgtcaggcatattaataattagaaagtcataaccaatttagtaaaactacaaaatatcaagaacaaaagagaatgttaaaaatgaatcagaggaaaaagagagattgccttcaaaagaatgatacattgatgtcaggtttcacaattacagaaaaggccatttgatgtggaattatctttaaaactgtgacggaaactaaccattggtcttgaattgcataccttataarctatcatttgagcacaaagccaaaggaaaaactttgttttaaatattactcgtatattttgtagctgcat

SEQ ID NO: 138226 - DNA, 504 bp, Homo sapiens
tttctctcatgttagctttttataaattctaacacgaatagtaaaatgttcagtattttcaccttatttttatttcttttacttctcttatgggtattccaaggacaggattcaatattaaatatggcttttgttttatatgtagattgagttctctgtgtcaaggcccacttatttagagggaaaatgggattctatttttggaattaaattgttggcccttaatcagtctagcacgtttccatacttcagcactgttgacattttggactggatgattctttgtcttggaaactgttctgtgtgttgcaggatatttagcagcatttatcaagagcgtctactyaccagatgccagcagcactcctctgatatgacaaccaaaaatataccaaaagtgcaaaatcaccccagttgagaacaactagactctagtagtttagttcaaatataaaatgaagcttgatggtgggatcaatttgatgacaatgagaaaaaaaagtt

SEQ ID NO: 138227 - DNA, 551 bp, Homo sapiens
cacttcaaaagttgaacgaattgggctacaaagtgttgcttcatctgccatattcacctggcctcttgccaaccaaccaatgactacttcttaaagcaccttcacaactttttgcaggaaaaacacttccacaaccagcaggatgcaaaaaataaaaaaataaaaaaaaaaaaaggtgcttttcaagagttcattgaatcccaaagcatggattcttacactccagggataaacaaacattttttgttggcaaaaacgtgttgattgtaatggtttctattttggttaataaagatgtgtttaatcctagttataatgattaaaaattcacaagcmaaaaccgcaattacttttgcatcaacctatttgaagaataatagtattctaaatgctccttgaagcacaaactaatagttaagagagaccaggggatccaaacttaagtatatttcacattaaaatcttgttcttttactgtacccaatgtttatggccaatattccaactatttattctcttaatcgtttccatttgtcaagtaaaatcaattt

SEQ ID NO: 138228 - DNA, 455 bp, Homo sapiens
acacctttgtggtaagcagtttcaactgccaaaattttcctgctagtacatacgacataagactatacttccataagcctttggtcagtaaggaatgagctctgcagctatactttcctgaactaactcttaggatataaggatgttcatttatttttagtctatatataggtatcaaggcaaacactttcatgtttggaacattcttagaaaccattttttattttctctccactctgatagtctgttaaaaggctttatctgttatagtagtggaattaattatacatggcatggttaatccagcagctgctatggagcawacaagttcttgtaatccttcacaaacagtgaattataaagtttttgaaagtcaaaacagaatttctactaatcacagagagagcttcacagttagatggggcaacgaacatttaatttgaggcaaaatttaa

SEQ ID NO: 138229 - DNA, 534 bp, Homo sapiens
gtgttgcctgggtgctcattcagagagaggctgtcatctgggagcccgtgtccctgtgtcctcaagggtcatggcttgttcctggtcagtcctatctgaccgaagcctcgcctgtctgcccttctctgaccggttcctacccacctggccggggccagtgcscctttttaaccctacccgttgatcatttcaagaaacctctgtttactgtgtggcacccaggcaaaacatgctccacaaattcaacttgtatatttggcagattaaacttgacattatcgaaaaaaaataaaaataaaaaagtcaaaagaaatagaaaaagaatgataaaaaatagagaatgcatatgagatctagaaaatagcctcaaaagtgcaaatataacaatgattaccttaaaaagagagcagagaaaagataggggtataaagtttattcaaacattaacagagaactttgcaaacctagcaaaacatattaatatccaggtgcaagaagaccaacaatcaacaaacagactcaatccaaataaga

SEQ ID NO: 138230 - DNA, 534 bp, Homo sapiens
gtgttgcctgggtgctcattcagagagaggctgtcatctgggagcccgtgtccctgtgtcctcaagggtcatggcttgttcctggtcagtcctatctgaccgaagcctcgcctgtctgcccttctctgaccggttcctacccacctggccggggccagtgcgcctttttaaccctacccgttgatcatttcaagaaacctctgtttactgtgtggcacccaggcaaaacatgctccacaaattcaacttgtatatttggcagattaaacttgacattatcgaaaaaaaataaarataaaaaagtcaaaagaaatagaaaaagaatgataaaaaatagagaatgcatatgagatctagaaaatagcctcaaaagtgcaaatataacaatgattaccttaaaaagagagcagagaaaagataggggtataaagtttattcaaacattaacagagaactttgcaaacctagcaaaacatattaatatccaggtgcaagaagaccaacaatcaacaaacagactcaatccaaataaga

SEQ ID NO: 138231 - DNA, 464 bp, Homo sapiens
ggtgccatctccttcctctgggatctgacctcaagagacacctgaggaggcactctgactgccacagctgggtgttgggctgtgggaacaagtcttgggaccaggccttccagcctccctggctccaacaggggaaaaatgcagcctggaactatagaaatgggtgccgcccttcccccgcccagggatcttagcatgttaggcagttttaagtcccagcgctgtctgctgcccctccctcaaggatctcaaatggcttggacagcaggcagccatagtgggtgctggtcaccccttcccctgggagttcagtaggcttaagcagattccagctgaaaggctgcaagaatttgtgcatttyggggttgggacaccaggccccagtggcatggattcatgagtgggatcttttgatccgttagctgcgcagttccatggaaaaagcagtttcccctgttgagtag

SEQ ID NO: 138232 - DNA, 571 bp, Homo sapiens
tactgaacacaccatgccaatccctttacagagtgtctctagctaccttggagctacagtggcagagttgaacatttgcaacagagtctagaaccaaaacaaaaattcttactatctggtctttccagaaaaagttttccatcactgctttccattttcttatgaaaatggaaatttttatctcatttgagattcacaacatttctatagcgtatgtggtattcacctctagcatgttgcaaataacaagatctacgctctgtattgtgtaaatttaaaaaactaaagctttgatttyaagtgatgttgtcagggttttttatacaacttcttgacttcagactcaataacttctcactacaattgtgtcttcttccatcaaataatctcagagaattcctactttattttataaaagttctgtgaacactacaccctctaggtaacttcagtttcagagaattatgacccaatgtgcaacttcactaatacaagctaataacgtctacatgattcaaaattattctacattaggtactctttgaaaggggataaacagggggcaacccaa

SEQ ID NO: 138233 - DNA, 548 bp, Homo sapiens
cttagctgtgaccacatatgctgctgttaggctgctttacattaagtgaaagtgctacaaacacttacgaaatctaactacaaacttactttattaaaaatatactacttttagaactagaataaataagaatagaaatagaatgtttgattaaactaaatagtttaagcatgaaggtggaagatccacgtttaatgcacttgttacctttttgaatcctactttctttttaaatatggcttcttctttacattcactgcagtgagctacagcctagatttttaattttatcacatcagttccttgaactgatatgttactctgtaaatagtttatgaaattctttcaaagaatttcataaactatttcacgttaatggaagctaattcctcctagacagttttgcaattggtttctcaagctaaatatattgtttgatttttttaatayaacaaataaagttataacacctacttcaggttctttgatgatctctccattacgcaaaataaaacagaatgtctaaatacccaaagaacaaataaatt

SEQ ID NO: 138234 - DNA, 453 bp, Homo sapiens
tttgctgaaggactctgtgcatatttgggcatgccttcaatactcaaacaaacaatttacatctttacctaactctttacttcttactttctcagagcctcaagctcagttggagttaaaagattagggtcatctcaggttcttcccaggcatgtgcatgattgtaacctctagatttccaggaatatgtcacaamttttcagagcccctatggacatctaaatgcctcagcttctctttttttcaattttttttagtctattgtttgttccaactattatccattgcctcaggcagctttgatgttaagatgtttgacaaaccagcagcctccccatccccagaaacttttagcactggatcaaataagcataagtcttctgattgggatctaccagggaatgacagacaggtcacatgatgaatattctttgggaattcagcttggaaaga

SEQ ID NO: 138235 - DNA, 453 bp, Homo sapiens
tttgctgaaggactctgtgcatatttgggcatgccttcaatactcaaacaaacaatttacatctttacctaactctttacttcttactttctcagagcctcaagctcagttggagttaaaagattagggtcatctcaggttcttcccaggcatgtgcatgattgtaacctctagatttccaggaatatgtcacaaattttcagagcccctatggacatctaaatgcctcagcttctctttttttcaattttttttagtctattgtttgttccaactattatccattgcctcaggcagctttgatgttaagatgtttgacaaaccagcagcctccccatccccagaaamttttagcactggatcaaataagcataagtcttctgattgggatctaccagggaatgacagacaggtcacatgatgaatattctttgggaattcagcttggaaaga

SEQ ID NO: 138236 - DNA, 601 bp, Homo sapiens
atgaaaacttcaaattaatgatgtatataattataggtacatacacatgtataaatatacatgtattttctaaggagaaacacaagatctctggaatagacctttatgtagtttcagggcatctgagaagtgcaagttcctcacacgcaaattccccacgaggtgacacagtgaaggccaaatacactttcatgtccagctggatttgtcccacaggagaggaactcaaaaattctgagactgagattragaccctatattcggtgactgaaatatctgttccagtttccatctagagagagagagagagagagagagaaagagagagagagagaaacctttatcttctaaggtaaataaataccctttactatagatcagtaactgctcctttcatcatcatcttctcttttgcaaataagagcatttattgtggttaatagctttctattcatcatcatatttttgatatgtggaagacaaataacttgattttatttcacagttctctgtaacaaaaggagtctcaactggactcagtgtcagtcacaatatactgaaccctgagtgttttgtggccataaatggagaagaattttag

SEQ ID NO: 138237 - DNA, 523 bp, Homo sapiens
tgcaccaactcgtctctctacatctgtggtgatgcacatcctcctttccagcccctacttaccctttcctcagaggtcactcttattctgaattgtgtgttacctatctgcctgctttatcacacatgtgcatacattgtttgctttcacttagttttgaatgttataaacaggtatcatactgtctgcatttttggacacttgtttatttcactcaagattacattcttaagatttatctgtgctattgtgtgtaactgtagatcaagttaatgtttactgctgtgtaatatcccattatgtgactatataataaatttttatttattattccactaatggtctttcaagttctcttccccattttttgcttttatgacacttcactatgaaaattcaagaacatatagaaattggatacctgggtcacaagataaatgttaagcctcacaaaataakgccaaattgttttccaatcttttaatctgtatttttcaattacccttacagcgagtaggtaagt

SEQ ID NO: 138238 - DNA, 314 bp, Homo sapiens
aagcttcacctcactgcaacatgtgaagactggccagcatctcctaaagaatctgatgaggaaacagattgctcactttcaggtggtacaagaggcttaatgttggcaaacatgcagctgaytgctaacgctcaccctttgccaccacctccagcaacaagaaaaaaattaggactcctgcatactcccactgcggattagtttttatttgtggtcttttatttctttttaatgtagtcaagatagtctgatgttccctgtatacaaatattgggggagaggttacacaaagtgtgagttacctcaggccaaac

SEQ ID NO: 138239 - DNA, 576 bp, Homo sapiens
ggaagcttcacctcactgcaacatgtgaagactggccagcatctcctaaagaatctgatgaggaaacagattgctcactttcaggtggtacaagaggcttaatgttggcaaacatgcagctgattgctaacgctcaccctttgccaccacctccagcaacaagaaaaaaattaggactcctgcatactcccactgcggattagtttttatttgtggtcttttatttctttttaatgtagtcaagatagtctgatgttccctgtatacaaatattgggggagaggttacacaaagtgtgagttacctcaggccaaacctaaaatagccctggttctcccatccccaacttcaaagtcagccccattctccctgcttcttcttctgcggtgactctgcagtagtcacaggccaacagcctgggtggtccccccatacccaagcattccctgagccagggagcaaccacataccctcaatctggggtagggtaggcaggggagaaaaagatagagctgataaacacacyctggcttccctgaactcccctttggggaaagtcaacaatatacaagctga

SEQ ID NO: 138240 - DNA, 571 bp, Homo sapiens
acacactctgcccatgagcaagaaggcagtgtcaaaatgtcatctgtgctggtatatataatttttaattctctgggaaaaaaattgtttctcttcatctgttaaaaatttaaagtgaattgaaaactccctgggaatgcaacctctgtatgattgacagtgacaagcacacataccttgaaagctccactgtaatgtttatgcttaataaaaacaaatactgtggcatctgagagtagcctagtcagccatgcagctctctacctggcgtcttgtaaattaatctggrtgtttatgctgtagatcattcatgatgaacacattgctatagcaacatgcttttcttccattttttcctgttaattacactaacatcactatcagctactaaatctttgaattactaatgaatgtatgtgaaaagcaatgtcttgataacacattttcaatatgtccttatcctcaaagaaaagatgcatgtaatttgattacttttaatttattgttaaaatttgtcaatacaatgttaatccatactgaaatttgaacatgctgaaggatacaagaggtg

SEQ ID NO: 138241 - DNA, 585 bp, Homo sapiens
ggtgagtttaacaatccaaaataaatgtgacaaactaaaagtgaaaagtcccatgaacatctgagtaaaagtagaaaaagcccttcacaaaacccagcatccattttctcataaaagctttcagcaagctaggagtagaaggcttcytcctcaccctggtaatatgtatttgtgaaaaaaaacatgcaacaagtaatatcacagttatggtgaaagatgaaatgctttcccattaaaatgagtagtaagatatggatgtgtggcacagctgattggaatataaaattgtgtgaccattttggaagataatttttctcttttttaaaaagttaaacctcacacctgtaatcccagcactttgggaggccgaggcaggtggatcacgaggccaggagatcgagaccacggtaaaaccctatctctactaaaaatacaaaaaattagccaggcatggtggtgggcgcctgtggtcccagctacttgagaggctgaggcaggagaatggcgtgaacccaggaggccgagcttgcagtgagccgagatcactccactgcactccagcctggatgacagagtgagacactg

SEQ ID NO: 138242 - DNA, 585 bp, Homo sapiens
ggtgagtttaacaatccaaaataaatgtgacaaactaaaagtgaaaagtcccatgaacatctgagtaaaagtagaaaaagcccttcacaaaacccagcatccattttctcataaaagctttcagcaagctaggagtagaaggcttcctcctcaccctggtaatatgtatttgtgaaaaaaaacatgcaacaagtaatatcacagttatggtgaaagatgaaatgctttcccattaaaatgagtagtaagatatggatgtgtggcacagctgattggaatataaaattgtgtgaccattttggaagataatttttctcttttttaaaaagttaaacctcacacctgtaatcccagcactttgggaggccgaggcaggtggatcacgaggccaggagatcgagaccacggtaaaaccctatctctactaaaaatacaaaaaattagccaggcatggtggtgggcgcctgtggtcccagctacttgagaggctgaggcaggagaatggcgtgaacccaggaggccgagcttgcagtgagccsagatcactccactgcactccagcctggatgacagagtgagacactg

SEQ ID NO: 138243 - DNA, 444 bp, Homo sapiens
cctttgggggaaggtgttggagaaatacggctttttccctacgcatgtcttcaacctccagatgctgagttcttaccctctcccagagtcctgtagaaaacrcagagatgaagtcctcaacgagctcctggcctcggaggagagagaaggctgcacatggatcatgataacataaggttgaaatgcaaaagtaccataaaacagtaaaatattagggggaccaagaggacaggggttgccctgcaggaagggagaccccacaggcttggcagaggagacgcccacctgaaatgcatctgcatggcaggcagagagggctcagagaacaagaacagagcacttctgaaactgggattgaggaaagaaaagtcaccaggatggaagaataagcatagttcagcagcaaggttctgtggtggttaatttcatgtgccaactttactg

SEQ ID NO: 138244 - DNA, 595 bp, Homo sapiens
gaattcctttgggggaaggtgttggagaaatacggctttttccctacgcatgtcttcaacctccagatgctgagttcttaccctctcccagagtcctgtagaaaacacagagatgaagtcctcaacgagctcctggcctcggaggagagagaaggctgcacatggatcatgataacataaggttgaaatgcaaaagtaccataaaacagtaaaatattagggggaccaagaggacaggggttgccctgcaggaagggaraccccacaggcttggcagaggagacgcccacctgaaatgcatctgcatggcaggcagagagggctcagagaacaagaacagagcacttctgaaactgggattgaggaaagaaaagtcaccaggatggaagaataagcatagttcagcagcaaggttctgtggtggttaatttcatgtgccaactttactgggttgcgagatgcccagacatttggccaaacattatactaggtgtgtctgtgagggtgtttccagagaggattggcatttgaatctctgaactgagtaaagcaaatgtagatgggcctcacccaatccattgagggcatgaataga

SEQ ID NO: 138245 - DNA, 444 bp, Homo sapiens
cctttgggggaaggtgttggagaaatacggctttttccctacgcatgtcttcaacctccagatgctgagttcttaccctctcccagagtcctgtagaaaacacagagatgaagtcctcaacgagctcctggcctcggaggagagagaaggctgcacatggatcatgataacataaggttgaaatgcaaaagtaccataaaacagtaaaatattagggggaccaagaggacaggggttgccctgcaggaagggagaccccacaggcttggcagaggagaygcccacctgaaatgcatctgcatggcaggcagagagggctcagagaacaagaacagagcacttctgaaactgggattgaggaaagaaaagtcaccaggatggaagaataagcatagttcagcagcaaggttctgtggtggttaatttcatgtgccaactttactg

SEQ ID NO: 138246 - DNA, 416 bp, Homo sapiens
caccacacatacttatcattttttgtggtgaaaacatttgaagtctatctcttggtaattttgaaatacacagtacattgttattgcctatagtcactatgttgtgtgatagatttcaaaaacttgaaatatatttcctgtctaatcraaactttgtacactttgaccaacatgtcaccattctccccccataacccccaccaccaatttctggtaccaccattgtactatttgcatgagtttcactttttaaaattccacatataagtgagattacatagtatttgtcttcctgtgcctaccttatttctcttagcatgatgtcctccaagtgttattataaatgacagcattttcttctttttgaaggttgaatagtattcagcatatatgtaccacattttctttactctttt

SEQ ID NO: 138247 - DNA, 544 bp, Homo sapiens
ttgaaatcggtctgttgaagacagatctgcatttccatgttcattgcagcattgtttattcacaatttccaacatatagaaacaaccataatgtccattgatagatgaatggataaaagaaatgtgtcatatacatacaatggaatattgtttaatgttaagaagaaagaaatcctgccacttgtgtcaacatggatgaacctggaagaccttatgctaagggaaataaaccagtcacagaaggacacataccacatgataccactttatatgatttgggtgtgtccccacccaaatttcatcttgaattgtagttttcataattctcatgtgtgatgggaaggaccagcgggaagtaattgaatcatggaagcagttttcsccatgctattctcatgatagtgagtaagttctcaggagatctgaagattttataaagggcttcctccttcacttggctctcattcttctccttcctgccatcaaatgaagaatgaggtgttttcttccccttccatcataattgtcagttttctgaggcttt

SEQ ID NO: 138248 - DNA, 486 bp, Homo sapiens
aattccatctgcaaccttagtgcctcatttccatgtaatgtaacatgttcatagactctgaggatttggccaaggatatctttgagaggccattattctacctatcacctcgtccatctgatagcagtttactctgccatcaaggaaagtacatgaagaagaagagkaggaagaggaggaagttctcagcatccaatctttataaactcaaatccataaagtaaagaataatggcttgtttttctaattgacctttgttgggccttacatattagactgtatagagaacataggctacacttgtatttgtgcaaccaaatacaccttgcctcaaaagagcaatggatataaacatatctaattgaaaaaaactttatccatttcacacttttaaggctgaccaaataagtttattctgtgaacctacagatataaaaaatcagtcaaaacccaaaaatttttaattgaataactgcttttagtatt

SEQ ID NO: 138249 - DNA, 403 bp, Homo sapiens
ctgcgatagtcattagactacatatttggctgttctgtggcactggaaaatccccatggaaaaaagatggaaataacaaataataatyctataaaattcaattagaataaatgtaggtactcagatcacttccctggtcatctctgtcctcttccacagataaaatacaaatacattaaactccacttagtatgagagcatctctgataataacctgttatattgtctcagtaattatgtgaggagtgagagtagcttaatttcaaacatctgacctatttgaagctgcagataaaaatgatatcaattgaaagttgggtcatgagtacatctactctgccaaatgaaccaagttgcttttaaatttataataggaaaataagatttacattatttagccaca

SEQ ID NO: 138250 - DNA, 636 bp, Homo sapiens
gccggctggatggcttggctcatgaccacctcgccgggcgccggccgctccatggccagggcgagagcgctacgcctgcggcccccgacaccccaccatgcccgctccgcccgccccgccctccccgcccagctccagagggcactggcgccgcccgcccgggccgcgaacccctggccgccaggtggtgggagctgcgagtgagggggcccgcactgtcatcccaggactatcgcgagtgggggaaaaccagcgctctcgggtctcaggagaagtctgggaagtgcgcggggagggggctcccgggtagacaggtctggaaggcggctccccgagagccggagcgcgaggaacagcttttgasataaaaaagctgttacactttctagagctgctatcagtgactgtacaaagcagtcctcattagggaaacagtgtctccagaaaacctccagcatctaatggattggtggatgtctgactgtcaggggaggctgctccagggagcacatttacgatggagaactggaaacccggagaagtggagcaagcagctgaggtgataggagccgataagcgacccgatcacctggctggaacccagggctcctgactgtccggaatagcacgaagaag

SEQ ID NO: 138251 - DNA, 416 bp, Homo sapiens
acaaattcactgctgtgttttcttatctttattatctcctgtttagatgtcttcagattatggtttcatatcttttgttggtttcatactaattttcattttactattcttgtgtttttctgaatggtccctttcttccttattacaactgaaaatgtmttctgcatgcatgaacatttgtacctccatttctctctggtgtcaaagatttttactattatgcttgaataaaaggtcgagtttcatttgtgttcagagacatttttgaagataagcagaatgtgaagccagcttgattttaaaagtttgtacacaggagcaggaaagctgatccaaaaaagtgtgggaagttccacaatcactagaataacgagaaaatctttaaaatgctggagtgggaaggggaactggacagt

SEQ ID NO: 138252 - DNA, 409 bp, Homo sapiens
tggtacacaaattcactgctgtgttttcttatctttattatctcctgtttagatgtcttcagattatggtttcatatcttttgttggtttcatactaattttcattttactattcttgtgtttttctgaatggtccctttcttccttattacaactgaaaatgtattctgcatgcatgaacatttgtacctccatttctctctggtgtcaaagatttttactattatgcttgaataaaaggtcgagtttcatttgtgttyagagacatttttgaagataagcagaatgtgaagccagcttgattttaaaagtttgtacacaggagcaggaaagctgatccaaaaaagtgtgggaagttccacaatcactagaataacgagaaaatctttaaaatgctggagtgggaagg

SEQ ID NO: 138253 - DNA, 456 bp, Homo sapiens
gcaaactttcttttccatctgcttatgaatttggttgcttgagctatttaagttttcttttcctaaaagaaagacaaaggaagtagaacaatcgaatacagaagaaaaaactatacatacttctatttttataactctcattccgtttttttcttgtcatatcatcattcccataaagaaaatggtgcttcaaacatgtgattgtgaataagtaatcccaaagattttggaatatttccttatgtacaacttgatttaaatatacattattttcttactcttcaaaatggtcaataatatcactcagctctctacttcatcttttaaatgtaatttttagggcttttaaaattacttttmtgtgcatggtttcctgaggaaccgcttaataaaatatttatgtttctaaataggggattgttatttgaaaatttattaatcatctttatcattttg

SEQ ID NO: 138254 - DNA, 515 bp, Homo sapiens
acttcctcctgctccagccttgtaaarcccagcttgcgtcccctttgccttctgccatgactgtgtttcctgaggcctccccagaagcagatgctgccatgcttcctgtacagcctgcagaaccatgagtcaattattcttttctttataaattacccagtctcggatatttccttatagcagtgtgagaacaaactaatacagagggtttatcttgaatttactgtggcagcattcttggctttctactaggggaatagagagaactgggaagatgagatgatatgtgtctacccaaaagcagaagaatctagaacaaaagcattcatatcctttatcctttcattaagcatttcctcagtattgctctgagctgagagccaggactacttttctagttgcaaaggccacattttaaataaaaaagagcatggtaggcattcaaaataacaaatggaaactttctgtgtttagcatttgaacttaaatgatggactgctacaatgtggctatgg

SEQ ID NO: 138255 - DNA, 566 bp, Homo sapiens
ttaatgacgtattggatgcttaaacgtttacgaggatagacctcaygttaaacgttcttaccacaaaaagaaaagcaaaagagatacatcaaaacttttggaggtgatggaaatatctattacattgattatggtgatgatttcacaggtttatgaatatgtccaaactgatcaaattgtattaaatgtgtgcaggttttgcatatcagttatacctcaaaaaagcttttaaaataattttgatagtatataataaattggccgtaattttttaaaaaaacgcaatttttaaattctgagaactggaaaagtgccattcttatttactgagaaaaggaagagtgaggaacaaacagggaagaaaaataaagcgtttggttttggacatgttaaatttgaggcatccaagagaataaataaaggaggcagatggatctaagagccttaagttcagaggaaagactggagaaactaaattgtgagtcataagtgtaaaggtggaatataaacaaggagaaagtctaggatcacctaaggaatgggggtagataattgaaagaagatat

SEQ ID NO: 138256 - DNA, 526 bp, Homo sapiens
gtccttgacaccttaggctcttcagaaacaatggttttgttgaggatggggaacagggaatgccgattttatatacatggtacacagagaggggtgtcacttcagaaaatcttccagcatgttcttcagaatattaatttatatgcgaggtgaggttgggaatgaaaagaacaggtcagcacytttttttttcctagaacatacaaaagaacatggtggactttcagggagtgcaatggaaggtgaatatttccttaagggtccccgagaaatgggagtgaggggaggggacacaatggctttttgagcttacttttaccttctgatactagtcaaggtccagaaccagccaccagccaaatttctatctgggtgcgggccactgaaaatccttgttaaaaaccagatcacaaatctggggctcttggtcccattggagaaggaaggaagagcctcaaaataagtgtgcacccatgcacatattcaggaacagcttgtttagtctttacactttgcctgaaagttg

SEQ ID NO: 138257 - DNA, 526 bp, Homo sapiens
gtccttgacaccttaggctcttcagaaacaatggttttgttgaggatggggaacagggaatgccgattttatatacatggtacacagagaggggtgtcacttcagaaaatcttccagcatgttcttcagaatattaatttatatgcgaggtgaggttgggaatgaaaagaacaggtcagcactttttttttycctagaacatacaaaagaacatggtggactttcagggagtgcaatggaaggtgaatatttccttaagggtccccgagaaatgggagtgaggggaggggacacaatggctttttgagcttacttttaccttctgatactagtcaaggtccagaaccagccaccagccaaatttctatctgggtgcgggccactgaaaatccttgttaaaaaccagatcacaaatctggggctcttggtcccattggagaaggaaggaagagcctcaaaataagtgtgcacccatgcacatattcaggaacagcttgtttagtctttacactttgcctgaaagttg

SEQ ID NO: 138258 - DNA, 526 bp, Homo sapiens
gtccttgacaccttaggctcttcagaaacaatggttttgttgaggatggggaacagggaatgccgattttatatacatggtacacagagaggggtgtcacttcagaaaatcttccagcatgttcttcagaatattaatttatatgcgaggtgaggttgggaatgaaaagaacaggtcagcacttttttttttcctagaacatacaaaagaacatggtggactttcagggagtgcaatggaaggtgaatatttccttaagggtccccgagaaatgggagtgaggggaggggacacaatggctttttgagcttacttttaccttctgatactagtcaaggtccagaaccagccaccagccaaatttctatctgggtgcgggccactgaaaatccttgttaaaaaccagatcacaaatctggggctcttggtcccattggagaaggaaggaagagcctcaaaataagtgtgcayccatgcacatattcaggaacagcttgtttagtctttacactttgcctgaaagttg

SEQ ID NO: 138259 - DNA, 565 bp, Homo sapiens
tcgggttgtcacaacttgggggatagggttaacaattactgagtagagtccagggatgcgtttaacctcctacaacacacaggacggcctccaacaacaaagaattactcagcaatggtaccaggtttgagaaaccctggtctagctagaaatarcagttgcgaatcacaagcagctcccatttccttattatttggccattcatacacaaagctaaacaggcaacatctcattcagtaatttttccccaattgttagcactggctttaaactgttgtccaacaagcaacaagtcatttacccctaagccacaatgggaaaagttagcaaagacagaattctacttagtgataaggaggccaaacaatttagctgtccttggggaatatatcacttccacactcgctgtttctattctaacaggacattaattacagcattttcttcactggacaatttaacaaaaggatgctccattacaagacatgagagagagaaaggggagctgggatctatgttaagagtatgtctacaattaatacctcactatttaacctctctgact

SEQ ID NO: 138260 - DNA, 565 bp, Homo sapiens
tcgggttgtcacaacttgggggatagggttaacaattactgagtagagtccagggatgcgtttaacctcctacaacacacaggacggcctccaacaacaaagaattactcagcaatggtaccaggtttgagaaaccctggtctagctagaaatagcagttgcgaatcacaagcagctcccatttccttattatttggcyattcatacacaaagctaaacaggcaacatctcattcagtaatttttccccaattgttagcactggctttaaactgttgtccaacaagcaacaagtcatttacccctaagccacaatgggaaaagttagcaaagacagaattctacttagtgataaggaggccaaacaatttagctgtccttggggaatatatcacttccacactcgctgtttctattctaacaggacattaattacagcattttcttcactggacaatttaacaaaaggatgctccattacaagacatgagagagagaaaggggagctgggatctatgttaagagtatgtctacaattaatacctcactatttaacctctctgact

SEQ ID NO: 138261 - DNA, 565 bp, Homo sapiens
tcgggttgtcacaacttgggggatagggttaacaattactgagtagagtccagggatgcgtttaacctcctacaacacacaggacggcctccaacaacaaagaattactcagcaatggtaccaggtttgagaaaccctggtctagctagaaatagcagttgcgaatcacaagcagctcccatttccttattatttggccattcatacacaaagctaaacaggcaacatctcattcagtaatttttccccaattgttagcactggctttaaactgttgtccaacaagcaacaagtcatttacccctaagccacaaygggaaaagttagcaaagacagaattctacttagtgataaggaggccaaacaatttagctgtccttggggaatatatcacttccacactcgctgtttctattctaacaggacattaattacagcattttcttcactggacaatttaacaaaaggatgctccattacaagacatgagagagagaaaggggagctgggatctatgttaagagtatgtctacaattaatacctcactatttaacctctctgact

SEQ ID NO: 138262 - DNA, 594 bp, Homo sapiens
cttgcctctttgttaacttttatttattaaatgttggagccaggattcaaaactgaagtaattccagggcacatgctcttgtaattatactacactgcctctcaaatgggaggcagagaatgagccaacaaaggaaaccaaaaataatggtttcagcacaacagactcagaagacccaaggagaaggcatccaacactatggaaaagactaaaagtccccactgatcaccaagtctgctgatcaacaggtcacgggagattgcatttccctttagagtgatttattgaaaaamagaaaaaaaaggttacacaaaaggacaatttcatccatcctgaaatgagcccgggcactaacaatgtccgaaaggattatgcagacaatattaaaaaatatttttcattacaggatttacataaggagacatatgcttcctctttaagaaactacccacagaatacacaactcactgtgggaaaagggcaagcaaagtgtatttatggtttggtttttaaatgtaactatcatagaaaacataagaaatctatgctttggcatttccagagagcagctgctgagaaggcaatgagggtggg

SEQ ID NO: 138263 - DNA, 548 bp, Homo sapiens
aagccctcatgaggactcctaatctccagaaactttaagacaataaatttgtgttaagttgctatgtttgtggtaatktgttacagcagcaatagaaaacttatacagagactgaggaggttcacctgtgatcaatgtagaagtcatttgcttactcgctcattagcagaagggctggtatttacgacaaaattagagactttccagagagatatagaaatgatcacagatcatgcttactcccagattccaagggaaagaacccacaaagttgcactagaagcaaagatgagttggttagaaacggagatatgatggtaaatgttaaacaaccagcactccaggaagagggaaaaataaatttaaaaccttgattagtagaatttgacaatttccatgtgtgattgctcctaacatggccagtatcaaacaagcggctcacaaaattcctgcaaatttaacaataagctcgcataagccagtgtgcactggctccggcacaccaccgggatcataaagcaaatggaggaagttgtcttgagggaatt

SEQ ID NO: 138264 - DNA, 548 bp, Homo sapiens
aagccctcatgaggactcctaatctccagaaactttaagacaataaatttgtgttaagttgctatgtttgtggtaatttgttacagcagcaatagaaaacttatacagagactgaggaggttcacctgtgatcaatgtagaagtcatttgcttactcgctcattagcagaagggctggtatttacgacaaaattagagactttccagagagatatagaaatgatcacagatcatgcttactcccagattccaagggaaagaacccacaaagttgcactagaagcaaagatgagttggttagaaacggagatatgmtggtaaatgttaaacaaccagcactccaggaagagggaaaaataaatttaaaaccttgattagtagaatttgacaatttccatgtgtgattgctcctaacatggccagtatcaaacaagcggctcacaaaattcctgcaaatttaacaataagctcgcataagccagtgtgcactggctccggcacaccaccgggatcataaagcaaatggaggaagttgtcttgagggaatt

SEQ ID NO: 138265 - DNA, 548 bp, Homo sapiens
aagccctcatgaggactcctaatctccagaaactttaagacaataaatttgtgttaagttgctatgtttgtggtaatttgttacagcagcaatagaaaacttatacagagactgaggaggttcacctgtgatcaatgtagaagtcatttgcttactcgctcattagcagaagggctggtatttacgacaaaattagagactttccagagagatatagaaatgatcacagatcatgcttactcccagattccaagggaaagaacccacaaagttgcactagaagcaaagatgagttggttagaaacggagatatgatggtaaatgttaaacaaccagcactccaggaagagggaaaaataaatttaaaaccttgattagtagaatttgacaatttccatgtgtgattgctcctaacatggccagtatcaaacaagcggctcacaaaattcctgcaaatttaacaataagctcgcataagccagtgtgcactggctccggcrcaccaccgggatcataaagcaaatggaggaagttgtcttgagggaatt

SEQ ID NO: 138266 - DNA, 434 bp, Homo sapiens
tcaaattcatgttataaggatatgcgtgatgagagatattgctgctgccatctttggaaaatcaatctgctatgatccaccctctggccacaattcacatccctcccatatgcaataatcctctctctaatatccccaaatctattagtgcagcagcacaaaatccaggatcgaaatcaggttatctgttatctaaatcaggtccaggttcagacaagacttctcakgtgaggttcctaggattcagctcctcgcacaccattcctctgaatctgaagacctgtaaacactcactccacaggcccatgcataacagtggggcggcacaggacaacttctacagatattttcatttaaaaagggagaaaatgtgaggcacacatcaggtgctgatgcatagcagttctgcaatttagccagtacttgtttctagt

SEQ ID NO: 138267 - DNA, 468 bp, Homo sapiens
aaagttagccatgctcatgctccgctgagatgtcatctctcattaaagtctaaatcagctcagagaacacaccacatttattattttttataaaatcgtgtgattctggaggagccaacagtatctttgggataaacacactgattaaaaacatacttttaaaatgtctctttttctaacccagtggaccaaatatataaattagagctattctggtctactgagtactgtaaatgtatatttagatgtaacaaaatatcagttggaaatatctttggaaagtaattactctgcatatacgcggaatgtcttaaatgcttaaagcaattgcctcattttaaagacataacttacatagagaggcacaaatattaattaccaagcttgaaccttgcttgtaaatktactgcctagagtgaatatttatagattaaggcacaaatatcaaaaaataagatagaatgatgg

SEQ ID NO: 138268 - DNA, 453 bp, Homo sapiens
tttcttttgggtaagtaggtaagagtagaatggctggatcataaggtaaaagtaaaaggtttactttttaaagaaactgtcaaaccatcttccaaagtggttgtaccattttacattcccgtcagcagattatgaatgttctggttctcccagatccttgccaacactggctatggtcagtctgctaactttcaacytgtttaaatttagtggcatattactaaatgcgtagtggtatatcactgtgatttcaatctgtatttcctaatgactgatgatcttgaacatctttttatgtgcttatttgccactcataggtatatatccaagagaaatgaaagactatgctcacaaaaggacacatacaaaaatatttatggaagttttattcatagtagttcccaaatggaaacgaacctaatgtacattaacaggaatcacaaaacaaactgt

SEQ ID NO: 138269 - DNA, 395 bp, Homo sapiens
ttgtctacaagaagaacagagcacggtaagtttaggaatccattccccgtgaggcatccaccttcagcatgaggccaccatccctcagtgacctcccagaatccatcagctcactccacctcaagatgtaactcaattagaggataaagtcccttctctcctatttcaggttaattgggtctgtgccagagttcacatattcttgttttcrcatctctattgattaatgggcaaatcattggtaatagacacacactgcatactatgagtatttgagacgtgagctgtaaataaatgctcataattagtacttgagaaagattggacagccataagatatacaaagcacttggaaaatgtgaggtgcaatttttccttgtccaagcaattttcaa

SEQ ID NO: 138270 - DNA, 395 bp, Homo sapiens
ttgtctacaagaagaacagagcacggtaagtttaggaatccattccccgtgaggcatccaccttcagcatgaggccaccatccctcagtgacctcccagaatccatcagctcactccacctcaagatgtaactcaattagaggataaagtcccttctctcctatttcaggttaattgggtctgtgccagagttcacatattcttgttttcgcatctctattgattaatgggcaaatcattggtaatagacacacactgcatactatgagtatttgagacgtgagctgtaaataaatgctcataattagtacttgagaaagattggacagccataagatatacaaascacttggaaaatgtgaggtgcaatttttccttgtccaagcaattttcaa

SEQ ID NO: 138271 - DNA, 552 bp, Homo sapiens
gttcctctcttctttagtttgcacatcggcaaaatgttgatggtcatttcagggggcttttattagccctctaataatttgaacatacttggcactctctagaacgttgtaaaaatatcagttatcggttctgttattagttcacccagctatctttaaactggtcccctctttttcaaattctctctgaacttcaaggtcaaagtcattccacctgctaagggaaacctcccacctcaactckttaagatctcccccgactctgttcatagcccttgctgcttggctcacactccgttggtgattggaatagcagccatatagggttttttgttgtgtgtatgcatgttcagttatatgcagtttcattatgtgcagatttgtgtctttgctaccacattcaagaccctgaatgaggatctcgtgttgcccttttatagtcacacccacttcctttcacctcttctctgtcccaacccctgtcaaccactcatctgttatccatttctaaatagttatcattaaaaaatgttatatgaatggaatcttata

SEQ ID NO: 138272 - DNA, 550 bp, Homo sapiens
gatctttttaagcagcaagtaactaaaagctattcatcgatttataaactaggattaagtggaaactgagaagtcatctttttccagtgctttgaattttaatataaggaaagggaagcatagacaggttaggtacttgtttatgctcatactgtgttagttgcagaccagggttgagactggactctggcttccagttcagtttcctgccattgtatcggtgggatgccatgtagtgtaatggattagagtacatcatccgaagtcctgtgacctggrctgtgaactgagatcagagaaaagatacttaacttctgtgactttccttttccttacctgtaaaagggaataacaatagttcctatctcaaaaggttgttgtgaaaattaaatgagatgcagtgcaaaaagtcttagcacagataaggcaccttactacatgcctatcatatagtaaggtctcaacaaatgttagctattattattattatttaaaaaatatttttagatttctggctagatgtttttgtgtttttttcttagaatgcaac

SEQ ID NO: 138273 - DNA, 351 bp, Homo sapiens
ttctttgtgtgctctggatacaagtcctttgttagatatgtattttgctaatattttatcccaggttgtggtttatcttttcactctctgaacagtgtttttgtgaagtagaacttttgaattttggattagatttgwatgaaatccaattttcaccttttctttgatagatcatggttaaggtgctgtgtctaagaaatctttgcctaatctaagattgtggagactttatcctatgttttatcttagaagttttatagttttaattttaacatttaggtggataatacattttaactcaatttttataggggatgggaaggatgagttgagggttttttggcatataga

SEQ ID NO: 138274 - DNA, 524 bp, Homo sapiens
tgcatcctgatgatgcgatagagaagaaaaacctattttctggggagaaattcaaactggctggagaaatttgcataagtaacaaggtaccaaatgttaattgccaagcagtgggaaaaatgtctccaggccatgtcacagaccttcatggcagccctttccatcacaggcctggagacctaggagggaaaaatgctattgtgrgcccatcctcgggccctctttctctatgaagccttggaacatggtgtcctctatctcagctgcttcagcttcagccatggctaaaaggggccaacatacagctcaggctgttgatacagagggtgcaagccccaagccttggtgacttacatgtggttttgggcctgtgggtacacagaagtcaagaattgaggcttgggaacctccacctagatttcagaggatgtatggaaatgcctggatgtccaggcagaagtttgctgcagggacagagccctcatggagaacctctgctagggcagtgtagaagggcaaagtgg

SEQ ID NO: 138275 - DNA, 534 bp, Homo sapiens
aaatgaaatgcactagcaagttatgaaaagaaatggatgaaatctaaatgcatattaccaagtgaaagaagccctctgaaaaggctacatactgtataatttcaacaggtgatattctggaaagagccaaactatctggatagtaaaaagatcagtggctgccatgggctggtggggagggcaggatgaatagaaggagaacagagattttttagggctgtgaaagtatgctgtatgatattacaatggtggatacacagcactatacrtttgttaaacaccatacaatatacaacaccaagagggaacatcagtgtaaacttcaggctttgggtgattatgatgtgtcaaagtaggttcatcaattgtaacaaatgtaccagtctgatggggctgttgataatgggaaaggctgtgcatgtgtgaggtcagtgggtatatgggaaacctcggtacctgcctctcatttttactgtgaacctaaaactgctctaaaaaatagtgtttaatttaaaaaaatagtttttttggtaa

SEQ ID NO: 138276 - DNA, 546 bp, Homo sapiens
ttataaaacttaagacaacatctgcaaagtatttggcacatagtaggtcttcaaaataattcttgtttatcccaccatcagccaccattctcttcattactgtatacacactaatttttttgagagtaggagttatacatcttttgtgtcttttattatttttgacagggtaagtaatagatattattagaasaaaataataaaatgatgaatgctgacgatataaatcaggtatgagtagattggcctacttacaggcctgcccaaacaacataatttgattactctagcaatcaaacaggaagtaatggaaactttggttaacttgggagtttatgtatttaaaaagggcagcacttctcagctctagaaaatagaagttaagcaggaatgtgggcctagggttgcttaatgccctaagttttttttttaaagatgccagaaatctggatttttatgccaaatatgaaaaagcattgtgtaggtcaagaaaaacaaatctgtgttgcaactctgaagttgatgagccatgttcaggcaagagct

SEQ ID NO: 138277 - DNA, 535 bp, Homo sapiens
cccaagttttgccttcccactargagtaagccagctgaagttgattctgaacaaggaacactctgagtagcccatccaggttccacacaatgaaatagcagagggaaccagtgcccagcacttggccaaaaaaagaactagactaggtggtttttttttttaattttatactcttttttatttttaattttgtggtacatagtaggtatatatatttatggggtacatgagatgttttgagggggatagttaatgagtacaaaaaatagaatgaggtttcttaacctcagcattattgacattttagcccagataattatttgttgtaggggtttgttctgtgcattacaggatggttagcacatccattgcttttacctaaatgtcaatagtagttctccagtcctgagttgtgacacttaaaagtgtctccagacattgccacatgtcccccaggaagggaaaggggcaaaatcactcccagctgagaatcactgcactaggctgaaatgaaagaaaaaagataaatcgtctt

SEQ ID NO: 138278 - DNA, 535 bp, Homo sapiens
cccaagttttgccttcccactaagagtaagccagctgaagttgattctgaacaaggaacactctgagtagcccatccaggttccacacaatgaaatagcagagggaaccagtgcccagcacttggccaaaaaaagaactagactaggtggtttttttttttaattttatactcttttttatttttaattttgtggtacatagtaggtatatatatttatggggtacatgagatgtttygagggggatagttaatgagtacaaaaaatagaatgaggtttcttaacctcagcattattgacattttagcccagataattatttgttgtaggggtttgttctgtgcattacaggatggttagcacatccattgcttttacctaaatgtcaatagtagttctccagtcctgagttgtgacacttaaaagtgtctccagacattgccacatgtcccccaggaagggaaaggggcaaaatcactcccagctgagaatcactgcactaggctgaaatgaaagaaaaaagataaatcgtctt

SEQ ID NO: 138279 - DNA, 622 bp, Homo sapiens
tatataaatacatattcattttagcaaatgttagctcatgaaagtatgagaaaagtcgtcacttaaaaacttctactgaaacaaccattatcaacacttctgtgaccatttttttctgcatttctttatacaaactagacattcacatatttacatttatatggatgagatcatagtttatctgttttatcatggatatactttgtattgcttttgttgagagtggagtagagaaatactgagcacatatatctgttgaaagaactatcaaatggaggaagacaaatgagagatccaagagaagagacatggagatatagtcagcaaaatccagaatatggaaatctctgcagaacaaattaccagtttcttyaaccaataaattgcacaggaaatttgtcaatggacatatcaaccaaatgcaatatgcataccttgttaggatagtgattggaataaataatttaaaaaattagaataatgtagaatatttaagtcctgacaggataattgacataaaagaaaactattacataaatggcctgatggagctgaaaaacacaacacgagaacttcacaatgcaaccacaagtatcaacagctgaatagaccaagcaaaggg

SEQ ID NO: 138280 - DNA, 498 bp, Homo sapiens
gacctgagacaagctatttaacctttctgtggctgagtttttttgcctatgggatgggtataatgatagtaactacctaccagaacttctgtaagaatgggctgatggaacacatgagaccatccgcagagctgggcacagcacaagtgctcacagttagagttgttgctgttgctatagtaattggtattattattattagcagcagcagcacttgagcttcagaatatcccagtgaggccaccacagaagcagatcagaggttagaatctgcttcgaaaatgagggaacagggtaataaggctcagagaggggaagcatattgcccaagattacccagcagagggcctgaaatgagagggctcattttattgtgtgaattccagaaaactgctcttttcatacaaacatcacctccaagaaaagcaraaggttggggagtttgcaactgttctgcccaaagcctcaggatatccatttaccccaaggccaggcatc

SEQ ID NO: 138281 - DNA, 587 bp, Homo sapiens
aggcttgtccaaagcaattcccagctagtacactgttttttccttatatttgtctttactttatgaggctaggggatggctgttggacaatatgggagaaacaaagccctcaaccctcaccacctttggtgtggccactgctatccactataactcctaatatactctgcattctttaggctgtggccacactgaattgcttactttccagaatgcatctcactcttcctcctgtaatcactccatctcctgtttgatctgaaagcttcttaatcccatctctatttcaggcaagatttgaagtccccctcataccatagacaaaaattggctcaaaataaatcaaagacctaaatgtaagagctaacacataaaacttagaagcaaacattatgggtaaatatttgtatcctggattaggcaatgctttattgcatatgacaccaaaagtgcaaacaacaacaacaacaaaaatgaataaactggactttataaaaattaaaaacttttgtgcttcaaaggacactatcaagaaagtgaaaagacaaccaatccrctgaataagagagactatttacaaattatag

SEQ ID NO: 138282 - DNA, 619 bp, Homo sapiens
gggtgcacttgaatctttgctcaacacttatctatgtatgcataaggtgaaaccacatgagaccaggaaagaatgatgcctcttttttttcctattattagtattttactttattcaccattgtatacataaggagagaatgatttctgaagaaagaacaattacctgagagccttaagattaaactcccagaggtcacctggggccaaggattattcgaattccttccaatcacagtggagagatcatgttgaacacaagcagcactcaagtagaccttatgagggtcatacatttagaagtgcagctaatgaccaggtgcagtggctcatgcctgtaatcccagcactttgggaggcagaggtgggtggatcacctgaggtcaggagttcaagaccaacctggccaacatggtgaaactcggactctactaaaaatacaaaaattagccaggcatggtggcatgtgcctgcaatcccagctactcaggaggctaaggcatgagaatcacctgaaccagggaggaggaggttgcagtgagccaagaccacgccactgcactccagcctgggtggcagagtgaaagtatgtctcmaaaaaaaaaaaaaaagtgcagcta

SEQ ID NO: 138283 - DNA, 615 bp, Homo sapiens
gaaacggcgtcatgcccagccacttcagccgaggctccaagagtgtggcccgccgggtcctccaagccctggaggggctgaaaatggtggaaaaggaccaagatgggtaagcagggtagrgggggctgcattgatggagtagccttgaggcccggtcatcaattccccaacgaatggtcctgcatagtctgcccagcccctcaggcccctcctatcagaggcaggcaggaggggattctgcagaaaagcaaacagcacggggcctcaccccgacctctctggctgactagcccaggctccaggagggtaatttagcgactatctgctttcattagcctgctcgttaacttttcccaattgatttttcggggcttttgatctaaatgcttgcacaaacaacaccccgtcagctcccaggggggctcccactactgcccccagctcgttagaatgcacctgactagggccctcagtgggacttggctggcggcaggtggcttcttgagaagcctggctcacagccaggagggaaggggctgagaacaggacctgtgctcactggggcctgcatgacccttccctccccacagcggccgcaaactgacacctcaggga

SEQ ID NO: 138284 - DNA, 391 bp, Homo sapiens
attctgcagaaaagcaaacagcacggggcctcaccccgacctctctggctgactagcccaggctccaggagggtaatttagcgactatctgctttcattagcctgctcgttaacttttcccaattgatttttyggggcttttgatctaaatgcttgcacaaacaacaccccgtcagctcccaggggggctcccactactgcccccagctcgttagaatgcacctgactagggccctcagtgggacttggctggcggcaggtggcttcttgagaagcctggctcacagccaggagggaaggggctgagaacaggacctgtgctcactggggcctgcatgacccttccctccccacagcggccgcaaactgacacctcagggacaaagagatc

SEQ ID NO: 138285 - DNA, 430 bp, Homo sapiens
gtgtacaggatggaacatgaaggcggactaggagcatgaccactgaagcacagcatcacagggagacggttaggcctccggataactgtgggcaagcctgactgatgtcaggccctccacaagaggtggaggagtagagtcttctctaaactccccgggggaaagggagactccctttcccggtccactaagtagcaggtgtttttccttgacactaaggctaccgctagactagacttcccagacgctggcgtcaccgctagaccaaggaaccctctggtggccctgtcygggcataacagaaggctcgcactcttgtcttctggtcactactcactgtgtcccctcagctcctatctctctatggcccggttttttctaggttatgattacagagcgaggattattataatactggaataaagagtaa

SEQ ID NO: 138286 - DNA, 456 bp, Homo sapiens
aacatgaaggcggactaggagcatgaccactgaagcacagcatcacagggagacggttaggcctccggataactgtgggcaagcctgactgatgtcaggccctccacaagaggtggaggagtagagtcttctctaaactccccgggggaaagggagactccctttcccggtccactaagtagcaggtgtttttccttgacactaaggctaccgctagactagacttcccagacgctggcgtcaccgctagaccaaggaaccctctggtggccctgtccgggcataacagaaggctcgcactcttgtcttctggtcactactcactgtgtcccctcagctcctatctctctatggcccggttttttctaggttatgattacagagcgaggattattataatactggaataaagagtaattgctacaaactratgactaatgatattcatatataatc

SEQ ID NO: 138287 - DNA, 523 bp, Homo sapiens
caaggtgagggttgaataagatcagaactgagaagaggttagaaaggttcttatttgactggactgccataagatggcttcgttctctatgtccttggctgaatcattgtagtggaattttaagtctctacagaggtctcactgcaggacccatcaacttcaatcctaacatgcgggactgcttctctttcagctgactaatctagatctccttcaatttcagcttctgacaatatggcttctgacaatatgcccatagcaatgtactcctgggctccccttcccctgacaggctgccctctgggcaggatccctttaaaatgacctcaggctaacgtctttaccacaggtttcacagccagccctggggctcacttccrtttgccctgctgtgggaggtgatacagtttatccagactccgccctccatcctacaaccctaggcctccttaattccctcagtaatagatcaggacttttgtcattgtcttgaagcaaaaaatcatactctccaaggggtttt

SEQ ID NO: 138288 - DNA, 574 bp, Homo sapiens
tttccctcagtatccagaagagttaggctttgaaaaggaacaggtagaaaaggggcttcctaaaaccagaatcaccatacacagtctctctctctctctcactctctgtctctctctctcttcaaattggtctcttggaggagaaagctttaaatatggtttgagattggtgytttaaattatattgcagttgtgaaatctgcccaagggatctgctacccagtgagaaagaatgtaggacacctacagaagatatgggagatcacaatgctgattcatgttgaaccccactgaattaaaattcctcagtaaaccagttgtctcactatttctaaaaatgttgctatggagagggacgccgtggctcacacctgtaatcccagctctttgggaggccgaggcaggcagatcacctgaagtcaagagttcaagaacagtttggccaacatggcaaaacattgtctctattaaaaagacaaaaattaggcgggcgtggtagcatgtccctgtagtcccagctattcgggaggctgaggcaggaggattgctggaaccttggaggcagaagttgcag

SEQ ID NO: 138289 - DNA, 574 bp, Homo sapiens
tttccctcagtatccagaagagttaggctttgaaaaggaacaggtagaaaaggggcttcctaaaaccagaatcaccatacacagtctctctctctctctcactctctgtctctctctctcttcaaattggtctcttggaggagaaagctttaaatatggtttgagattggtgttttaaattatattgcagttgtgaaatctgcccaagggatctgctacccagtgagaaagaatgtaggacacctacagaagatatgggagatcacaatgctgattcatgttgaaccccactgaattaaaattcctcagtaaaccagttgtctcactatttctaaaaatgttgctatggagagggacgccgtggctcacacctgtaatcccagctctttgggaggccgaggcaggcagatcacctgaagtcaagagttcaagaacagtttggccaacatggcaaaacrttgtctctattaaaaagacaaaaattaggcgggcgtggtagcatgtccctgtagtcccagctattcgggaggctgaggcaggaggattgctggaaccttggaggcagaagttgcag

SEQ ID NO: 138290 - DNA, 619 bp, Homo sapiens
gactgacctcttttactacctggagacacatggtttaaacatatgctaccagttcagccatgttttacatgcatttggttttttttttttttttttttttttcacagaaatgaaaatggagtagaacatctactcccatttcccatgcaaaatgttattcaataataaaaaacgtgaatacatacataagcacgattattaatcatgagctgttaccaaaaatgattcaaactatcatgccacttggcatctccttaataccatatttatcatcagatatttctgtcaccaaagcattcaaattgtcarataaaaatctctgcctgggggaaatataaactatggcttcttgtaatgaatgaaaatgaaatgattccccacagtttattgccagactcactggaaataaaaattactaattaaataatcttagtttaaaataggtctgggtctgtcaagcacttttcttcattgtggtacaaaatgaggatgtcctacggaaaagtttcatattaacactttgataaatcagattacaattctgaaaagcacttttataatcgagtttttcccccactttaatatctgagtaatcttatctttaggataaatggagata

SEQ ID NO: 138291 - DNA, 473 bp, Homo sapiens
catgtacacacaagagtgggcctttgccacagtgagtttaaagtgtgttccttgcagcctttgccacatcactaaaaatgggcaaatcatattttcttaaaggaattaattgggactgaacaatggctcattgggtttgggtttcttgcctgaaaaaatatgacataaatttggtttcataaaaaaaattctgttaccttgctactcaacgtgtggtctctggatgggcagcaytggcatgacctggggactggttagaaatgcagaatatatggatttctttctcactccaggaatatccaagatgatctcactaaaggatgtactgactcagaatctgcattttaacaagatgtccaggtaattcatatgcacactgacttttgtaggacaccactgttggagaatataagatttctgttttgatcccacagatattttaaatctcactatttcattagaattatgctaac

SEQ ID NO: 138292 - DNA, 405 bp, Homo sapiens
gagccttagcctccccctgccttactacacaaaatgtttcctaaaaaatwataattgtttttaaaggaagggaaaaaaataaagacccatagcaatccccattatattttaaagtattagtccattaggcatacctaactttttaaagtttgtaaagtatgtcctgaaacgcctcatctgatcttaacacacatctgtttagagaagcaggacaaaggattgttaatcacagtttttaaagaagtgttatttccacactcaacagtgtcaaggtctcagtgcttgttgaagtgaactgaattactggatgagaaaccttaggcacagatccattaaatgccgaatgacgcttcatcaacttaccaagatagagttgtatcagaaactcaggtccaaccagaattc

SEQ ID NO: 138293 - DNA, 617 bp, Homo sapiens
gatatagtgagatgcaatacaaacactgtatagcaataagtctgctaagatttactggatcttaataactggagtaaacaaactggattaaattgccaaaataaggaaaatatctctgttaggaaaattaatggtactaaagcaaatgttggttgcttcaaaaaatacaccaacatagaatatgaaaatgtgattcttaaaataggctcacttgactgtacaaattactttaattcttaaaatgtattgggcttattaaaaattggctatttaatagtaaattttatttgcttgaaaatcaatccttttttaggcaacacaaataaatttaggaagagaaacagatataaagtatgcgctttaacctataggcaacctcttgaaatgaataaaaagctcacagttgtctctttgcagggacttgttctcctatttttaattaagtggtattgttttagatttggtaaaggtttttcctcacttcagggttacactaaaaagcggagcacacacgcacttttagttttcttyacagttatttgaacaaaataatttcaggccactgcagcaaagatagtttgtaaattgtgatgccagaaatgtaagaacaactacca

SEQ ID NO: 138294 - DNA, 525 bp, Homo sapiens
taaaaataaaaaaataaaataaaaataacaaccacagaaacccaaaccaaacaaagaaaacaaaaagccccaaagatcaacctttcagcctgaggctgctcataatacacattgcaaagatcttcattcctctcttaaaaatgtaaaagagggaaatgacacaggttatttaacatattgtccttgggctttgatataatttgcttgtgaagagttgataggcaagacctgttttctaattaggtaaatttgaaaaagcccmaaatgagctaatctcgctggttctagctgaatctttggtttagctcctgagttgctggaacttgcattctaatttagttctatcttcccagtaaaactgtcctgagaggtcctggactgtcgccccacagtgcaatggtcctaggaaagtgatagggcaccaaacagcttcaacacctaccaaatcagttagcggaacgttgcaattaatggtcctttcctaaagattaataatgaatatcagtgcattaagacgtagattat

SEQ ID NO: 138295 - DNA, 374 bp, Homo sapiens
agctttctgtgcctagatttctccacctgaataatggggataagaacaatactggttagacggaattacagtcaatacatgcagagcagttgaaactgcagcacatagtgctgaagtgctaactgttagatcttaaagctaatacataacactacggacaatgaaactaatttctaacctaaatatggaaaatatataactttttctacaattaagtctaactacattcaattagttttaagcaacaacaacaaactmccttaaatagaaatggttttaaattaatagcctcttcaaaaaagtaaacctttcagaatcagaccacgtggcttagtactgtcacattttcaacacaaggaggttttcagtgaggc

SEQ ID NO: 138296 - DNA, 374 bp, Homo sapiens
agctttctgtgcctagatttctccacctgaataatggggataagaacaatactggttagacggaattacagtcaatacatgcagagcagttgaaactgcagcacatagtgctgaagtgctaactgttagatcttaaagctaatacataacactacggacaatgaaactaatttctaacctaaatatggaaaatatataactttttctacaattaagtctaactacattcaattagttttaagcaacaacaacaaactcccttaaatagaaatggttttaaattaatagcctcttcaaaaaagtaarcctttcagaatcagaccacgtggcttagtactgtcacattttcaacacaaggaggttttcagtgaggc

SEQ ID NO: 138297 - DNA, 537 bp, Homo sapiens
catcatgatccacctgcctcagcctcccaaattgctgggattacaggtttgggccaccatgcccagtcccagatgcagctttttaaaaatacagagcaactgctatatggttcatcatgtattccaaagaatctagagttaagatctaaaacacagctttttagagaaaaaaggcaagcaatacaatatgcactaccactactataactgtggtaaatgaccaaataatttcagacaaaacatacttttcaggacagaagcattaagacatctttacttaatgcatagtgcttttttaatttaaaaagaaacatctgtttaaaaacacacaactatgtatgaaaaactcatttctaataaacaattcaaatagaaatyataattttccacctgggatcatagtttaaaaaatatcattagaaaaagaaatatattaatgtccagatataattagctttaaagaggtgtatggtaagaatgggaatatagtttagtatatattggcatgtagtatttttcttcaacagaaaaggctaa

SEQ ID NO: 138298 - DNA, 366 bp, Homo sapiens
cttagcactataaacttcctttgagcactgttctagctgtgtcccagagattctgggatgttgtatgtttgttttcattagtttcaaataatttttttatttctgccttaatttcagtctttacccaaaagtcatytggaagcaggttgtttaatttccatgttgactctaggccgggcatggtggctcatgcctgtaatcccagccacttgggaggctgaggcaggagaatcgcttgactccaggaggcagaggtgtcagtgagccaagatcacgccactgcactccagcccgggcaacagagtgaggctgcgagcccgggcggcagagtgaggctgcgtctcaaaaaaaaaaaaaaaaaaaaaa

SEQ ID NO: 138299 - DNA, 372 bp, Homo sapiens
gatgtagccacttagcactataaacttcctttgagcactgttctagctgtgtcccagagattctgggatgttgtatgtttgttttcattagtttcaaataatttttttatttctgccttaatttcagtctttacccaaaagtcatttggaagcaggttgtttaatttccatgttgactytaggccgggcatggtggctcatgcctgtaatcccagccacttgggaggctgaggcaggagaatcgcttgactccaggaggcagaggtgtcagtgagccaagatcacgccactgcactccagcccgggcaacagagtgaggctgcgagcccgggcggcagagtgaggctgcgtctcaaaaaaaaaaaaaaaaaa

SEQ ID NO: 138300 - DNA, 343 bp, Homo sapiens
atgcaaacttaagaaggggcaattttttttttttttttttttttgagacgcagcctcactctgtcgcccgggctggagtgcagtggcgtgatcttggctcactgaaacctctgcctcctggattcaagcgattctcctgcctcagcctcccaagtggctgggattacaggcatgagccaccatgcctggcctagagtcggcatggaaattaaacaacctgcttccaaatgacttttgggtaaagactgaaattaaggcagaaataaaaaaattatytgaaactaatgaaaacaaacatacaacatcccagaatctctgggacacagctagaacagtgctcaaa

SEQ ID NO: 138301 - DNA, 344 bp, Homo sapiens
taaatgcaaacttaagaaggggcaattttttttttttttttttttttttgagacgcagcctcactctgtcgcccgggctggagtgcagtggcgtgatcttggctcactgaaacctctgcctcctggattcaagcgattctcctgcctcagcctcccaagtggctgggattacaggcatgagccaccatgcccggcctagagtcatcatggaaattaaacaacctgcttccaaatgacttttgggtaaagactgaaattaaggcagaaataaaaaaattatytgaaactaatgaaaacaaacatacaacatcccagaatctctgggacacagctagaacagtgct

SEQ ID NO: 138302 - DNA, 374 bp, Homo sapiens
ttgagatctttctagcttcttagtgtagccctttagcactagaaacttcctttgagcactgttctagctgtgtcccagagattctgggatgttgtatgtttgttttcattagtttcagataatttttttatttctgccttaatttcagtctttacccaaaagtcatttggaagcaggttgtttaatttccatgmtgactctaggccgggcatggtggctcatgcctgtaatcccagccacttgggaggctgaggcaggagaatcgcttgaatccaggaggcagaggtttcagtgagccaagatcacgccactgcactccagcccgggcgacagagtgaggctgcgtctcaaaaaaaaaaaaaaaaaaaaaaaaa

SEQ ID NO: 138303 - DNA, 374 bp, Homo sapiens
ttgagatctttctagcttcttagtgtagccctttagcactagaaacttcctttgagcactgttctagctgtgtcccagagattctgggatgttgtatgtttgttttcattagtttcagataatttttttatttctgccttaatttcagtctttacccaaaagtcatttggaagcaggttgtttaatttccatgaygactctaggccgggcatggtggctcatgcctgtaatcccagccacttgggaggctgaggcaggagaatcgcttgaatccaggaggcagaggtttcagtgagccaagatcacgccactgcactccagcccgggcgacagagtgaggctgcgtctcaaaaaaaaaaaaaaaaaaaaaaaaa

SEQ ID NO: 138304 - DNA, 374 bp, Homo sapiens
ttgagatctttctagcttcttagtgtagccctttagcactagaaacttcctttgagcactgttctagctgtgtcccagagattctgggatgttgtatgtttgttttcattagtttcagataatttttttatttctgccttaatttcagtctttacccaaaagtcatttggaagcaggttgtttaatttccatgatgactctaggccrggcatggtggctcatgcctgtaatcccagccacttgggaggctgaggcaggagaatcgcttgaatccaggaggcagaggtttcagtgagccaagatcacgccactgcactccagcccgggcgacagagtgaggctgcgtctcaaaaaaaaaaaaaaaaaaaaaaaaa

SEQ ID NO: 138305 - DNA, 518 bp, Homo sapiens
gtgaataaacctgaggataacagtaataaacgtttaaactgtatttttcagtgttgtaattgtcttttggggttcatgtcatttttatatgagatgaccacttaattttaaaaattcattgcagacatgcaagtttgatgtacacttcaacaatataaataacggacygttaggtaaaatttaaatatttcttttcatcccccagtcccactccagtgtaaagttgacagtttagtgttcatttttcaaaatcttgcaaatgcacttctagacacatacaagtacacgtaaagtttttttttttgagggaggctataccatataccaaacatgtttgcataccgcttgcttattgacttaattacatatgttggacatttttactttttacatataggtctccctaatactttttaaaaggctaactggtatctcgtgagtttgaatgggctataatttattctattccctttttgaaagacatttaattgcagtttctttttgctattacaaatgat

SEQ ID NO: 138306 - DNA, 559 bp, Homo sapiens
cagaactttgatggttttccatctcagaataaaacgcacatttcagccaggcactgtggctcatgcctgtaatcccagcactttgggtggccaaggcaggtggatcacgtggtcaggagtttgagaccagcctgaccaatatggtgaaaccctgtctctactaaaaatacaaaaattagccgggcatggtggcacacgcctacagtcccagctactgggaggctgaggcaggagaatcacttgaacccgtgaggtggaagttgcagtgagccgagatcaagcccctgcactccagcctgggcgacagagcaagactcgccctcaaaaaaaaaaaagttaaaacactgttaattagcacctatgtttttgccagtatgttaagattattattattttyatattccttttctctttagctgttgctaacagcctcttttgattcagatactttaaaggatcataacttgttactgaatttataaattatatgggtgaatgtgggtttgtactcttacgtatgttaatatatatctgtctgtgattagacaggtaacatata

SEQ ID NO: 138307 - DNA, 596 bp, Homo sapiens
attcactctactctgagctttgccgttaatgaacttggcaatgttagccaagtgacttcacctttctgggtgtcagttactcaactatraaacatgaacataggataaatgatcttcaggcccacttcactttaaccatctatttttctgtagttctagcctttgttctgctttgttgttctacatttcttttttttttttttcatgtgttccaattgattttttttgagatggagtcttgctctgtcacccaggctggagtgtggtgacgtgatctcaactcactgcaacctccacctcccaggttcaagctattcccaattcctccacctaattttttgtatttttggtagagatggggttttgccatgttggccaggctggtctcaaacttcagacctcaggtgatccacctgcctcagcctctcaaagtgctgggattacaggcgtgagccagtagcctccaattgatattttgaggtcctaaaataaaacagttaatttaaacgtaaatttgaaggaagaaatgctccttaagttaaagaacaaagaattgtcaggtatacgtttatggaaaagtatattttggtgtcaag

SEQ ID NO: 138308 - DNA, 539 bp, Homo sapiens
gtcttttatataacttttgtcatctttctggagtcccattttgaatgcagatccaaaatgtgagaacaaaacttctgattagatttgaygagtagaccagcataactcacattcgatttgcagtctgctgtaggcttcatttttcctgagacatacttgtacctagtaagtggcttttctgttcatgtgataggctctgtgcttctgactcatagcatgccttaactgtctttattgaactttgttccactttaatgaacaattaactagttggcttcaataactagttactgcacccaaataattttccttataaacctattcgtaagtccatcttacattctttgatgaaaatattaagtaatacctcaattatgactaagctgggggctatagaaggacaggcactcactaatacatatgccttccaagttggttctgaacattgagaatcctatttttgcaaggaatgactagccagttttgcaatccctagcaatactcagtagtttctcgtctggtatctctttgggacagaa

SEQ ID NO: 138309 - DNA, 539 bp, Homo sapiens
tatcattcatctttacatccccacatctagcccagtccctcgcatgcagtttagtaacaagtaaatgtttgcttgcttcatttgaaattaataaaaatttattgaagtttatttcctccttgttctttgcggttttgttttgttttgtttttgtttttgtttgagacagagtctcgctctgttgccagcctggagtgcagtggcataatctcagctcactgcagtctccgcctctcaggttcaagcggttctcctgcctcagcctcctgagtaactgggactacaggcamgcgctaccaagcccaactaatttttgtatttttagtagagacggggtttcaccatgttggccaggatggtctccatctcttgacctcgtgatctgcccgcctccgtgtcccaaagtgctgattacaggtgtgagccaccatgcctggcctatttcctcctttttctttcaatgaaagttagctctgtaaaaatttcagagtgtctttatgactatttcccttggagacatcccagcagtgtgaagttat

SEQ ID NO: 138310 - DNA, 560 bp, Homo sapiens
tgtctacttagctgtgtccattttttctttcataaattacttatccttgttttttgttcatttttcccttaaggtactcacttcttactggtttatgagattttttatttattaaggatgtgagcactttgttttgtatgttacaaatattttgcctagtttttgtactttgattttgtttgcagtgttttttggcatacataatttaaaaaataattatagtcaaatctagtaatcatttagtctatgatttttttctttgttgagatttgaaagacctgcatcaaccctacattatataaattttccttccttgtgcgactgtgwtgtaagagggagtaatcaggcaaaggctttatgttgcttagcttaaataaattataaggaattgcctttgttggactgtggttcttatttataatgacttacttacaaatatcttatatgtatgattggctgttttacctcagactggggagggctgtcctgaagcacaagaagtgtcctcccacattctgttctttcttccttgttacttactctctgccatggtagaagtg

SEQ ID NO: 138311 - DNA, 453 bp, Homo sapiens
aactgtggcctgctgcctatttttttttttttttctctttagagacagggtgtcactctgttacccaggctggagtgcagtgtgcaaccttgaactcctgggctcaagcaatcctcctgcctcagcctcccaaagcgctgggattgcagacatgagccacagcacctagcctgctgtgtatttctgtacagctcacaagctaagaatggtttttatatttttatatggttaaaaaaagaatttaaaaagaataatattctatgacattaaaataatatgaaatttamattttagtgttcattaatgatgcactattggaacaaacccacactcattaatttacatattatctaggctgttttcatgctgcagtggcaaagttgagtggttttgacagagacttatgatgcccaaagcctgaaatatttactatctggctctttaagaaaatgt

SEQ ID NO: 138312 - DNA, 264 bp, Homo sapiens
ctggcatctggcaggcccccgtatgatgaagcttccagaggargaaacaggcagcaatctttgttgttctgcagcctccgctggtgatatccaggcaaacagagtctggagtggccctctagcaaactccagcaaacctccaacagaagggcctgattgttagaaggaaaactaacaaacagaaaggaatagcaccaacatcgccagcaactggacagagaatgagtttgatgaattgacagaagtaggctttagaaggtgggt

SEQ ID NO: 138313 - DNA, 588 bp, Homo sapiens
ggctgtacccgttagtgtgaagagagccacactttctcaaaggaagacaaaaggggcaagtcatccattttattagactaatttttagagcggttttgtgttcactgcaaaattgaacagaaagtacagagagttcccatatatccctggtacccctccacacacagcctctcccactatcaacatcaggcaccagagtggtacttttgttacaaaaataaacctacacttaacacatcattatcacccaaagtctacagtttacattaggattcactcttggtgttgtacattctatgggttttgtataatgacatctatccaccattagagtatcayatgcagtaatttgttactgcatatgatactctattactctattatgcagtttattactgcatatgatactctgtgacatccaccaattttcatgggttactatattcatttgctaggtcactcataataaattaccacaaactttgtggcttaaagcagcagaagtttattctctcacagacagaatccaaattcacagaggccatccaaaatcaaggtgttgggaaggtcattccccctcccaaagct

SEQ ID NO: 138314 - DNA, 508 bp, Homo sapiens
tgcaataattgttagaaatatataataaatatacattttaaaagagtaaacaacagaaataaaataaaatcattaggtgtttttgaatygcatttttgtggcagcccaggaagctgacgctaactgactggccagcagatgtccagggtgaaagacaagctgggccattggccctctgtcctgtgtcatttccaaggctcaggccatggcctcacacagagagctcccagcactcccgcatctttctggctctctctaaagagctgattcctctgaaaattccccttcccagggcttttgtgccctcccttctccaagttccagttctagaagataagaggtttccagaatccagacactttgagaatcctgcagtgctgtcagaggcccaaaatgtcatcctctatccagctgtgaacagaagattctcgaacacctactcgccttgcccactctcccagaggagatgacgccccttccagactcagttgagtctggagcctggatt

SEQ ID NO: 138315 - DNA, 508 bp, Homo sapiens
tgcaataattgttagaaatatataataaatatacattttaaaagagtaaacaacagaaataaaataaaatcattaggtgtttttgaatcgcatttttgtggcagcccaggaarctgacgctaactgactggccagcagatgtccagggtgaaagacaagctgggccattggccctctgtcctgtgtcatttccaaggctcaggccatggcctcacacagagagctcccagcactcccgcatctttctggctctctctaaagagctgattcctctgaaaattccccttcccagggcttttgtgccctcccttctccaagttccagttctagaagataagaggtttccagaatccagacactttgagaatcctgcagtgctgtcagaggcccaaaatgtcatcctctatccagctgtgaacagaagattctcgaacacctactcgccttgcccactctcccagaggagatgacgccccttccagactcagttgagtctggagcctggatt

SEQ ID NO: 138316 - DNA, 508 bp, Homo sapiens
tgcaataattgttagaaatatataataaatatacattttaaaagagtaaacaacagaaataaaataaaatcattaggtgtttttgaatcgcatttttgtggcagcccaggaagctgaygctaactgactggccagcagatgtccagggtgaaagacaagctgggccattggccctctgtcctgtgtcatttccaaggctcaggccatggcctcacacagagagctcccagcactcccgcatctttctggctctctctaaagagctgattcctctgaaaattccccttcccagggcttttgtgccctcccttctccaagttccagttctagaagataagaggtttccagaatccagacactttgagaatcctgcagtgctgtcagaggcccaaaatgtcatcctctatccagctgtgaacagaagattctcgaacacctactcgccttgcccactctcccagaggagatgacgccccttccagactcagttgagtctggagcctggatt

SEQ ID NO: 138317 - DNA, 494 bp, Homo sapiens
caacacaatttataaaatgcctgggttgtayccatgaagagcttttaatatatgcagattcaacagtggggcttgaatcatttctgaggtgcattctgacacctggccacaggtcctgttgctgtccataccctgctggtcagaaccaccgagccctctgctcgttacatccccttgcctcccctccgctgccacccagttctagctgcatggatagtttgaatttggctcctgtgtggcagcagagggacactgcaggtgtggaaaagagatattcaaggagaactccagctgaggatgttggctggatgcagccagaagatagcaaaggctgaaataaacaaagaccagcaacagagagcaggcacaggctgtttactcattacttatagcatgggaggcagtagcagtcagtggtgtttggcagagactgaagggaggcagaggatcagggaagcttcacagtggcaaagtgggaggctgcaggtgtgccc

SEQ ID NO: 138318 - DNA, 494 bp, Homo sapiens
caacacaatttataaaatgcctgggttgtacccatgaagagcttttaatatatgcagattcaacagtggggcttgaatcatttctgaggtgcattctgacacctggccacaggtcctgttgctgtccataccctgctggtcagaaccaccragccctctgctcgttacatccccttgcctcccctccgctgccacccagttctagctgcatggatagtttgaatttggctcctgtgtggcagcagagggacactgcaggtgtggaaaagagatattcaaggagaactccagctgaggatgttggctggatgcagccagaagatagcaaaggctgaaataaacaaagaccagcaacagagagcaggcacaggctgtttactcattacttatagcatgggaggcagtagcagtcagtggtgtttggcagagactgaagggaggcagaggatcagggaagcttcacagtggcaaagtgggaggctgcaggtgtgccc

SEQ ID NO: 138319 - DNA, 494 bp, Homo sapiens
caacacaatttataaaatgcctgggttgtacccatgaagagcttttaatatatgcagattcaacagtggggcttgaatcatttctgaggtgcattctgacacctggccacaggtcctgttgctgtccataccctgctggtcagaaccaccgagccctctgctcgttacatccccttgcctcccctccgctgccacccagttctagctgcatggatagtttgaatttggctcctgtgtggcagcagagggacactgcaggtgtggaaaagagatattcaaggagaactccagctgaggatgttggctggatgcagccagaagatagcaaaggctgaaataaacaaagaccagcaacagagagcaggcacaggctgtttactcattacttatagcatgggaggcagtagcagtcagtggtgtttggcagagactgaagggagrcagaggatcagggaagcttcacagtggcaaagtgggaggctgcaggtgtgccc

SEQ ID NO: 138320 - DNA, 538 bp, Homo sapiens
ctcacaatgatcattaatacacactttcagactcgtggtttttgaaaagttattgtcaagataacccattctaattgtgaatgaagagaagagaaaagtgggtagaatggaaaggagaaactggaaacgatcaaatgggagaggacaaaattattagctccctggactgggtagattttgagaactggagtaagacgaacatcggcgygatccatgaggtttttagcactgtgatgacctcagtagcatctccacccatggatacgcctcaaacccagtctgtgtccttgggcctcacccaatgctcagtggcagcctccagaaagcatcatagctctacttaaatggaaaagaaacaattaaactatcacctcctaatgaatgcatggaggtctacttctcaggagttacgatttcccaggcctggaacaaaatttcagctcaggtaaatattaagaagatgaagttttaccatgagcacctgtagggcagagtctctccccagctttcataacacgcagcagtgtttgcatactgc

SEQ ID NO: 138321 - DNA, 538 bp, Homo sapiens
ctcacaatgatcattaatacacactttcagactcgtggtttttgaaaagttattgtcaagataacccattctaattgtgaatgaagagaagagaaaagtgggtagaatggaaaggagaaactggaaacgatcaaatgggagaggacaaaattattagctccctggactgggtagattttgagaactggagtaagacgaacatcggcgcgatccatgaggtttttagcastgtgatgacctcagtagcatctccacccatggatacgcctcaaacccagtctgtgtccttgggcctcacccaatgctcagtggcagcctccagaaagcatcatagctctacttaaatggaaaagaaacaattaaactatcacctcctaatgaatgcatggaggtctacttctcaggagttacgatttcccaggcctggaacaaaatttcagctcaggtaaatattaagaagatgaagttttaccatgagcacctgtagggcagagtctctccccagctttcataacacgcagcagtgtttgcatactgc

SEQ ID NO: 138322 - DNA, 538 bp, Homo sapiens
ctcacaatgatcattaatacacactttcagactcgtggtttttgaaaagttattgtcaagataacccattctaattgtgaatgaagagaagagaaaagtgggtagaatggaaaggagaaactggaaacgatcaaatgggagaggacaaaattattagctccctggactgggtagattttgagaactggagtaagacgaacatcggcgcgatccatgaggtttttagcactgtgatgacctcagtagcatctccacccatggatacgcctcaaacccagtctgtgtccttgggcctcacccaatgctcagtggcagcctccagaaagcatcatagctctacttaaatggaaaagaaacaattaaactatcacctcctaatgaatgcatggaggtctacttctcaggagttacgatttcccaggcctggmacaaaatttcagctcaggtaaatattaagaagatgaagttttaccatgagcacctgtagggcagagtctctccccagctttcataacacgcagcagtgtttgcatactgc

SEQ ID NO: 138323 - DNA, 623 bp, Homo sapiens
aatacagaaggtgggactcagagggaaaatcaggaaccacacttttagtgctggacacagctcagcagtataaaagtcacataaaatattaagctgaacttgagatttttttttttaatgttgtgaaatctgttgacatatgagactcaatgggacacaaaaaacggaaaggattaatacctcttttaatggaaaaatctcccctgacggaacagaagcaagccctaggacctgataaactgaatcccacattcatctttctgcaaaggaccttaggttgtaaatcacaagtgtctaggctgaaaagttcaatcagtcaagatgcggtggtaatgggtcaaggtcatgcatcaatccaaagacagactggttagttttactccacagtcaaaggttatgccccatccggatgataaaatctgtgctcttctcaggagcaaggaggtggctggcctgatagagcctgtcacagcaagggacaaaactactataaagacagagcttcccacccaagccagcatgccagccacccatggaagtcctacctgtgccacaaggtcagactcagggtccctgtttcagwcagcttaggctgccgtaacagaatgccacagactgagtgg

SEQ ID NO: 138324 - DNA, 550 bp, Homo sapiens
ttatacctaatgtagatgatgggttgatgtgtgcagcaaactgtcatggcacktgtatacctatgtaacaaacctgcacgttctgtgcatgtatcccagaacttaaagtataattgtaaaaaaggaataaataaataaataatagaatgctaccagcccctgcaagcaagctgcctgctcacttctagtcattaacccctccttctcttccttctagtcattaacccctcagagtaactactattctgattaccaatggcatagtttagttctgcctgggtttttttgctttatataaactgtctcattaagtatttaaaaaattagattgtggaaaaaggtatgccagatagatgattgatgactgattgatagtgataaagtcatacattcatgacagaattatgtaaaatggcacaaaaaattccaatgataacaaaatgctccatccacattgtgaaatattattcaatcaaaaaataattttccatagtagtccccccttaccaggagtttcactttctgcagttttggttacccatggtcaacc

SEQ ID NO: 138325 - DNA, 550 bp, Homo sapiens
ttatacctaatgtagatgatgggttgatgtgtgcagcaaactgtcatggcacttgtatacctatgtaacaaacctgcacgttctgtgcatgtatcccagaacttaaagtataattgtaaaaaaggaataaataaataaataatagaatgctaccagcccctgcaagcaagctgcctgctcacttctagtcattaacccctccttctcttccttctagtcattaacccctcagagtaactactattctgattaccaatggcatagtttagttctgcctgggtttttttgctttatataaactgtctcattaagtatttaaaaaattagattgtggaaaaaggtatgccagatagatgattgatgactgattgatagtgataaagtcatacattcatgacagaattatgtaaaatggcacaaaaaattccaatrataacaaaatgctccatccacattgtgaaatattattcaatcaaaaaataattttccatagtagtccccccttaccaggagtttcactttctgcagttttggttacccatggtcaacc

SEQ ID NO: 138326 - DNA, 415 bp, Homo sapiens
agaattcattgctaacagattcgctcttaaaaaatgactcaaggaagttcttcaraccagagggaaatgataccagaaggaaatctggattgtcaggagcaaaggaagagaaacagaaatggcaaatatctggcaaatatgaaagactattagtctcctcttgggttcttcaaaacatgcacgacaattgaagataaaaatgctaacattgtttgccggggtttttgttgtatgcagacataatatataaccatcacatgaacagaggagggtgaaggggcctgcgtgttggcgaagttagaatataactttgtgaatgggaaagatattcatgctgtagataagaattgggagcagggagaatgttctccagacgagagccagtcctgtgaccaaaaggcctattctcaccttc

SEQ ID NO: 138327 - DNA, 438 bp, Homo sapiens
  misc_feature (1)...(438): n = A,T,C or G
caacagttactatagtcaataataatttaattgtacatttttaaatnnnnnnnnnnnnnnnnnnnnnnnnnnnnnnnnnnnnnnnnnnnnnnnnnnnnnnnnnnnnnnnnnnnnnnnnnnnnnnnnnnnnnnnnnnnnnnnnnnnnatatgccccacaaatatatacactactatgaaccccacaaatattaaaaattaaaaagaaacagagctaaaagaaataaaacaatccacaatccagttggaaatttcaagactttgaattgacagaaaaagcagactgcaaattattaagtacatagaagacttgaacaccactatcaaygaacatgacctaattggcactacagattacttcactcaacaaaagcaaggcacattcttttcaagtgcatgcaaaacaccaaagtggattacttgtggaccataaaacatgt

SEQ ID NO: 138328 - DNA, 505 bp, Homo sapiens
cttcaagtcagggacacggaactaaggctccagatttcacaagtctcatttgtctktgatccctgaagcaaccactttcctattaaggtaaattgaagaaaccataaaattaatccggtaacaacatgggagccagcgagaattcctacctcattactggaagggataggtttctgccctgcggcatggaattcgattaccttatcacagctgcataattgtaaatattttcattggttatacaactgctgtgtcttttctgagaaactcagccccaatgtgtaacaccctggattccacggggcagcaaattccacacactgcacccatgttgtgagcggagattttcgggctgaccaaaacttgaggcgaactgagtctccatcttaacactcaaacacacttcatggcggcctggaaacaaggcaatcattatgaagcttcagcccagttcttctgaaaccaacgtattgggcctgcttcattgtctctctaggggctaatc

SEQ ID NO: 138329 - DNA, 528 bp, Homo sapiens
gagcttcaagtcagggacacggaactaaggctccagatttcacaagtctcatttgtctgtgatccctgaagcaaccactttcctattaaggtaaattgaagaaaccataaaattaatccggtaacaacatgggagccagcgagaattcctacctcattactggaagggataggtttctgccctgcggcatggaattcgattaccttatcacagctgcataattgtaaatattttcattggttatacaactgctgtgtcttttctgagaaactcagccccaatgtgtaacaccctggattccacggggcagcaaattccacacactgcacccatgttgtgagcggagattttcgggctgaccaaaacttgaggcgaactgagtctccatcttaacactcaaacacacttcatggcggcctggaaacaaggcaatcattrtgaagcttcagcccagttcttctgaaaccaacgtattgggcctgcttcattgtctctctaggggctaatcacaaacatgtgggaagggaa

SEQ ID NO: 138330 - DNA, 598 bp, Homo sapiens
ttactctcctgtgcatctccccaaacctcccactttttgtatgtttttgaaaagatgataagcagtgggctttcctaatggttcctgacagtaagcagggcaatgggctaaattatytaaaaataagaaaaaacctggaaaaatatttaacaagctaactggtggtttttgttgtgttccaaaatgagaggcattcaaaagaagggcctttctgcttcctattcaagcagaaattcaagatatcaagccccaaaacagggcccccggagcagggagatgaggtcacagctgaccacatgagtggatcttgtccaagaaaactctttgaaggtatcccttatggtaactgaacagattgtcccctgaggttgaagcaaacacagataaaaaacactcgggaaaagccactggcatggcacagggatgataaaacgcctgctgatttcagctactcaatgcaggcttcaggccatttttccttaactcagtcctatgtttaccctaaactccagaactctcagttgtgaagagtaagaggctgatgggtgtccattcaatctgcttatcatgaaaattacatgaaagcttccttctactt

SEQ ID NO: 138331 - DNA, 598 bp, Homo sapiens
ttactctcctgtgcatctccccaaacctcccactttttgtatgtttttgaaaagatgataagcagtgggctttcctaatggttcctgacagtaagcagggcaatgggctaaattatttaaaaataagaaaaaacctggaaaaatatttaacaagctaactggtggtttttgttgtgttccaaaatgagaggcattcaaaagaagggcctttctgcttcctattcaagcagaaaytcaagatatcaagccccaaaacagggcccccggagcagggagatgaggtcacagctgaccacatgagtggatcttgtccaagaaaactctttgaaggtatcccttatggtaactgaacagattgtcccctgaggttgaagcaaacacagataaaaaacactcgggaaaagccactggcatggcacagggatgataaaacgcctgctgatttcagctactcaatgcaggcttcaggccatttttccttaactcagtcctatgtttaccctaaactccagaactctcagttgtgaagagtaagaggctgatgggtgtccattcaatctgcttatcatgaaaattacatgaaagcttccttctactt

SEQ ID NO: 138332 - DNA, 598 bp, Homo sapiens
ttactctcctgtgcatctccccaaacctcccactttttgtatgtttttgaaaagatgataagcagtgggctttcctaatggttcctgacagtaagcagggcaatgggctaaattatttaaaaataagaaaaaacctggaaaaatatttaacaagctaactggtggtttttgttgtgttccaaaatgagaggcattcaaaagaagggcctttctgcttcctattcaagcagaaattcaagatatcaagccccaaaacagggcccccrgagcagggagatgaggtcacagctgaccacatgagtggatcttgtccaagaaaactctttgaaggtatcccttatggtaactgaacagattgtcccctgaggttgaagcaaacacagataaaaaacactcgggaaaagccactggcatggcacagggatgataaaacgcctgctgatttcagctactcaatgcaggcttcaggccatttttccttaactcagtcctatgtttaccctaaactccagaactctcagttgtgaagagtaagaggctgatgggtgtccattcaatctgcttatcatgaaaattacatgaaagcttccttctactt

SEQ ID NO: 138333 - DNA, 547 bp, Homo sapiens
acaaaggtctcatagagggaaagcttttattaatacttaggatcaacctcatacacaaaggcgattggagacactgacattttttcctaggtgaatctgctcctaatctgaccctcccacccagcgccattaaaaacacaacatacatttccttcttctgtctatccatgggagttagtaataacctttatagcatttattacggtrtgtcaatataacttctttctcattctatctctccaccaggctgggagtttatcaaggataagacaccctgtaattcatttctgtgatagatgaatagtaggtggtaggtaaatgctttttgaatgaatgaatgaagattaaatgaaccagaatctctgcttgaaataggaggtggggaaggttgacattgtctatgaagttgtcagactctttgatctattgaatgctagcgttcaaaggcactttagaagtgaagccaaattccttcatcttaccaagagggaagcccaaagaagtttagcaacttgcccaaagttgcacaattagccactgagctgga

SEQ ID NO: 138334 - DNA, 401 bp, Homo sapiens
gaattctgagagtagtattttcatccggactgttagtcccagcagagcagaattgtgtagcgcttaagttcccaggctttaagtgcaagcggactaggrtagaatcttggtccaaccacttaaccagctcctgaccttggcagttgctaattctctgagaatctcaattccttcattgggaaagtgggaataataaaacttagtaacagtgggattgttgtgacaagtaaatgaggcaaatataaaacacttggcatggtgcctgacacataagtcttttcaaaaagacttaataagtggtggctcttttattattattactattaccattagccataaacttctgtgcagaaaccaaaatattcttaccacatgttaatctatttaaataaattaagagt

SEQ ID NO: 138335 - DNA, 633 bp, Homo sapiens
caagcttcagtgctatcaagattgcctagagcttattccctaggccaagaatattcacatcactatgccctatcaagagatatgctcaagagagtttgaaaccaaaaagagaaagataaaaggcccaaaaaggtttagataaaggaagatataccctggataagttaagggagggcgctccctttttccctttgtataacttatcaaagattggcrggtaaatttaggcgcagcaaattgaaaggcacaaccaaggtttgaatttcaagacggggtttctgtctccagagagggcaactccattcttcttgtcctcagacttctccagttctccaacaatgtttccaggctacaaactgctgctgcttcacacagagaagacagccggctgttagcgagagacttcttattcagaaccttgtatgatgaggctcgtttatccctaatgagagtagggagaaaaatataccctgcaaagatggtcccttcttttatacacatcgcattacttgaaatatcatctttcaagcaaataaaacaaaagcccgggtttcttgtgcttgtctagaagcttgctggtatcttcagctacttgatgaatgtgaagagaaacatcaagaaggaaattatgag

SEQ ID NO: 138336 - DNA, 499 bp, Homo sapiens
ccattttcactccctcttggtgtctgctttccagagaatccaaactgaacacaggacatctgaagagtttgtaaaaatacacattttttttttctctgcagatcaacaaataaaaatctctagggaagaaactttggagttcatttttccttaactctaaatatgagtttaatgctcagccacgtttgagaatctcccatccctattcatcctttgccatatgctcagggtatattcaatcgtcaacttactgcaactcgatctctgctacgattwctctaaagtcatctctacatgatatcccacaggtacctgtaactcatggaactcagaaaggaaccttttctctttccccctaaaactaattatccctcctatagattttacctcagtgacatctgaatcatccagtcatccaagctcaaaacatggaggctgctctctttctcctcttttactctctatctgatgaaatatcattaaacagagctcctagaaa

SEQ ID NO: 138337 - DNA, 565 bp, Homo sapiens
tctctcaggctctcaggaatttactgtgctatatgaataggggtcacactagttcttttgatctggctgatggatgacaagtgcatctgcaagttctaatccagtgtgataaatttgccttcccctcagaattgcgatttgagttctgagtgtgactttgaatccactcttctgtggcataaatgttagctgtgctcgtctccagggtagtccttactggggacccagattccgttccattttctgagatctcattcagtgccctgtaccagggcagggccagccctggcagctcatcccccttctgcctctcgtgtgatcctgttgtggtatttaggacttttatgctgaaggattttccttgrccttcccaggctgctcactcaccttacagtttgcttctccaacctggagtgtattagagagaattcacaggcttgtctagaaccactgtcttcccccagtattgcttctggatgtagagaacaggtgggaaggttagctctcctccggtggcaccagaaccttctatttcttcccttagccatgactttttgaagtttat

SEQ ID NO: 138338 - DNA, 608 bp, Homo sapiens
attatcaggaaaaagtaaccgaagatgagacatctggttatagaaaaaaatcgaaaccaaaaaccataygaggtttccttctccccaaagtaagaacctgcattgtagaatcagctgtttgtatttattataacagtccacatctctctgcagctgcacgactgcacaccacaacggctttttcagccttggtcctggcaacagagcctgtgtgtttccaggggtggcagtaggtctatggaggtaaagagggacacgcttctcttctcttttcttgtttttcttataattatcagaagaataaaacagctcccctggttttcaaaagcaacctgtgtggcgatatgattagttacaaccaggcaattaaaaatctgtccccaaaaaatggcaaagcagataaatctctcagacagacatccataccatgtttgagtatttgtttttcttattctggaatagaaggtaatcgacaattattgggaggagaaagaaacctgtatttgtggaaaaagaatctcccttagtgtttgttttacaatcctgcagtacttcctatttctcttcgaaattgtcacctttaaaaagttgaggttgcctcatgtgct

SEQ ID NO: 138339 - DNA, 490 bp, Homo sapiens
cgtctaaaattgggcaacactttgttccataaartaaagtaagtgttccaaagattgaagcagaggaggttggctttataaacaaaaagaactaaagaaagcagaaacaaaaaccaaaaagtggattggtcatttcaaagttactttccttgtaaggcaggtacagggagatagaacaatagaaagataatgggttggttaacatcaggtacttcaggtcagtctttcctgtaaagattaaaacagagcttcattattatgacagaaagcgaaaactggcctcttcaggcagctaggccattctctctctctcctgatttcccaaaaggccagataacaactcagtttcagtttggtgagcgtgggtgactccattttgatttttaatctggtcttctggggcccagtgcgggaatttagtcgaaaaaaaatggcctcctagattttgtttaacaaaggtgaacaagttttgtttaacaaaggtgaggaa

SEQ ID NO: 138340 - DNA, 441 bp, Homo sapiens
  misc_feature (1)...(441): n = A,T,C or G
acactgacacacccatttactaggaccttttaaaatatagcattacatctgaaaactcacaattccaatgccacattttactgcatagtattttatattgaatactcttcaaaatatacattctttttaatagtttgaaataaagaacataattttgatttttttctctaannngtacacataagtgtaaagactgtgttaactatattacactctaatgatatattaataatttttcctatactaaaagtattctaaacatcttaagtttgtccaaataaaatctaaggcataacttttctctttctattccraaaataatcctttagtataaattccatacatatgaatttgaaagatcttaatcatattccctggtacaagaaaatctttctgttttatatttagctcatgaattcaccacatttagctcaagtcttt

SEQ ID NO: 138341 - DNA, 441 bp, Homo sapiens
  misc_feature (1)...(441): n = A,T,C or G
acactgacacacccatttactaggaccttttaaaatatagcattacatctgaaaactcacaattccaatgccacattttactgcatagtattttatattgaatactcttcaaaatatacattctttttaatagtttgaaataaagaacataattttgatttttttctctaannngtacacataagtgtaaagactgtgttaactatattacactctaatgatatattaataatttttcctatactaaaagtattctaaacatcttaagtttgtccaaataaaatctaaggcataacttttctctttctattccaaaaataatcctttagtataaattccatacatatgaatttgaaagatcttaatcatattccctggtacaagaaaatctttctgttttatatttasctcatgaattcaccacatttagctcaagtcttt

SEQ ID NO: 138342 - DNA, 417 bp, Homo sapiens
aatgactattactatctgtagaaaactgttcaaattttagtgtagccctatatgggtacagataaagagttatttcagttatgagaaccctgatacaaaatccacaatttgttctaaaagcttgttatttgcacagatttttctcttttgagagacacatgtagaattgaatttgttggacatgagcttatccctttttaaaaattacattaaattattatgtataccttatttaaaaagaaagtctgttaacatgaaatgaactgtgatatcaaagcctacccacggactatagatattaattgtaggtgttcttacattaatactttttgctacttttgcrttaattgaaatataaaggaaggtgcaacgtgttctaatttttcatactgagtaatgtgttattgtgcttttatt

SEQ ID NO: 138343 - DNA, 603 bp, Homo sapiens
catatcatctcactggagattaggatgtcaatgtatgaatttggggtaacacacacatccagtccacagcatcatctctctgtgtctccttctgcagccacctcagctgtgccatccccaagctgcttccacaggctgctgcacacaaagtacaaaaacaccactgtgtctctgtgactccaaggatcttggtcatgatttgacagtcgcccaaatcgcttatgtaatattytacatcataatcaatgcactttttcagattacctggtgactttattaagatacttctgtagtgaaaaattgcataataaaatttacgttccaagattatcaaactcctttaatggatgacttgcagaatactctctcttcttcaatcttctggttcattccaagggaccaaacctttctccagctttgatctttaacttaaaatttcaaacaggaatagccttgttaagtttatgctaattgaaacaaataacagcattgtcgatttatcaggacaagagtgtatttgatgttctgttagaatgctgctcactggaccttgcattggaacactgctcactggactttctgttgaatacttctcactggatc

SEQ ID NO: 138344 - DNA, 592 bp, Homo sapiens
aatttaagatgagatttgggtgggacacaggtatttcatgccatttgttttgtgcttcatttcagagattgtacaatattataatagctaccaaataggtttaaaatactttcaagtttatttgattcatatgtatatttgtataatcagttaayttggactcatttgtttccaatttgtttacatctaaaaagtaagctatgtccaggtgcagtggctcacacctgtaatcctaacactttttgaggccgaggtgggcagatcatttgaggtccagagttcgggaccagcctgaaatcctgtctctgctaaaataaataaataaataaataaataaataaataaataaataaatgcaaaaattatccaggtgtggtgctgtgtgactgtagctccagctactcccaggaggtggaggttgcagtgagccaagatggtgccatttcactccagcctgggcaacagagtgagaccctgtctccaagaaaagaaaaaggaaaagtaagttacaatttaaagtaattgtcatagattatattttgatttttattataaggtaatatcttcattaatgagtaaaaatcatagtttt

SEQ ID NO: 138345 - DNA, 454 bp, Homo sapiens
ttaacctgcaattataaagaccaagttactagcaaataaaaaaatcaagttgctctcagattcttgacagaatacatacaaacagaaatgaatgaaaaataaataaaagactatttctaaaaaaattcacccaatgtaatattatgctagtgtaaaaactgagatataatttttaaatgatattcagaatacatatgtagtttaaaaataaagttacagagtggcatggttattatgttgcattttatacaacaaaagaggttaaaataaacatactttagcctatctttgccaaaaacaaaaaacaaatacaaaaaaaaacagctaatcaaacaaaaaactgtggaaataaaaacccaatacaaatagaaatagtcacctctagctggagttggttagtaggrataatataaaatatctgtaagtatacctttgaatgcattgttttgttttt

SEQ ID NO: 138346 - DNA, 498 bp, Homo sapiens
ggtgaaaccctgtctctaccaaaaatgcaaaaattagatagacatggtggcaygcccccgtaatcctagcaactcaggaggctgagttgggaggattgcttgaacctgggaagtggaagctgtctcatataataataataataataataataataataataataataataataataataatagtctcctcttttgttcctgatttttgtaatttgagttttctttcattttttttcttggtcagagtagataaatgtttatccatgttattggtctattcaaataactaacttggtttcattgactttgcctattttctattctctgtttcatttgtttctgctatctgtaagctttcttatttgtgcttgctttgggtttactttggtccctttgtttagttcgataaggtagaagtttaacttatttatctgatttttttttaaatactacaggcactcacagctacaaagtttcctctaacagtcctttagttat

SEQ ID NO: 138347 - DNA, 522 bp, Homo sapiens
acaaacgcagatgaacacacatttatttagggacatatgggtacttttcttgctcaggatctgccacttsgcactggcacagcatggcccataacccataaacccattacctcatggctgacaccgttagggctccaagataaagttcccctcatctcatgttgctctgaaagctgggagaggctgcgagtcacagccccgctgctgtcagagatggacgggactctgtggtgtggggagctgggggtggctgaggtgcttggctgggcctgcagatgccctgccatggtttgaagcatgacaatgatttttcacactggcagctcaaaaagtttcaacaggagaattgtgaacagcgttatttctacaaaaatgtttaataagatttaatttacataactatagcttcatttaacataactttgatttacagtgtttgagcttattaatgcaatttatatttgacctttaatttttaaaaagtagtttatcctagaagaaaaacaattttttttaaggaaa

SEQ ID NO: 138348 - DNA, 522 bp, Homo sapiens
acaaacgcagatgaacacacatttatttagggacatatgggtacttttcttgctcaggatctgccacttcgcactggcacagcatggcccataacccataaacccattacctcatggctgacaccgttagggctccaagataaagttcccctcatctcatgttgctctgaaagctgggagaggctgcgagtcacagccccgctgctgtcagagatggacgggactctgtggtgtggggagctgggggtggctgaggtgcttggctgggcctgcagatgccctgccatggtttgaagcatgacaatgatttttcacactggcagctcaaaaagtttcaacaggagaattgtgaacagcgttatttctacaaaaatgtttaataagatttaatttacataactatagcttcatttaacataactttgatttacagtgtttgagcttattartgcaatttatatttgacctttaatttttaaaaagtagtttatcctagaagaaaaacaattttttttaaggaaa

SEQ ID NO: 138349 - DNA, 554 bp, Homo sapiens
agctgacaaatcaaattgtcattttagccttaacttattagttatattattttgttgaatttaatactatgaattgtgtcattttactaaaactacattggtgtttccaacaggaatatagtagagactactatggtgcaggttctacttggcttggcaagtcccatcgtacaacccamcctgtgccctgtgataaccccattctccagccattaccctggattccaatagttatgaagctttcattcctttagcactttgtgtcatttttaactttctcaatgaattcagacatatcatttgctaatcaaatcctccaatatggatgcgggtgagctaatttggatccttcttccactacaaagacaaatggaagctaaattagatgcaacaaaataaataaataataactaaggcagtcaaactcacaatgaaagaatgtcttcaggtactagacacataaagagaactcaaagtcagggcaatcaaatgtgagagcttgccatgccccagaaaaacaccaggatgtagcaagtagatatgagactaaatgg

SEQ ID NO: 138350 - DNA, 554 bp, Homo sapiens
agctgacaaatcaaattgtcattttagccttaacttattagttatattattttgttgaatttaatactatgaattgtgtcattttactaaaactacattggtgtttccaacaggaatatagtagagactactatggtgcaggttctacttggcttggcaagtcccatcgtacaacccaacctgtgccctgtgataaccccattctccagccattaccctggattccaatagttatgaagctttcattcctttagcactttgtgtcatttttaactttctcaatgaattcaracatatcatttgctaatcaaatcctccaatatggatgcgggtgagctaatttggatccttcttccactacaaagacaaatggaagctaaattagatgcaacaaaataaataaataataactaaggcagtcaaactcacaatgaaagaatgtcttcaggtactagacacataaagagaactcaaagtcagggcaatcaaatgtgagagcttgccatgccccagaaaaacaccaggatgtagcaagtagatatgagactaaatgg

SEQ ID NO: 138351 - DNA, 478 bp, Homo sapiens
ttccgttttctctgcaaccttgccagcatctattattttttgactttttraaaatagccattctgactggtgtgaagtgatatctcgttgttgtttttcttttaatttctctagtgattagtgatgagcatttttttcaagtacttcttagccacatgtggtttttcttttaatttctcccgtgattagcgatgagcatttttttcaggtacttagccacatgtatattttcttttgaaaagcagtgttcatcttttttgcctactttttaatgaggtcgtttggttttgtcttttaaacttgtttaagtttctaataaattctggatattagacctttgtcagaggcaaagtttgcaaaaattttcttttattctgtaggttgtctttttcctctgttgatagtttcctttgctgtgaagaagcgctttagtttaaataggtcccatttgtcaatttttgcttctgttgcagttgct

SEQ ID NO: 138352 - DNA, 459 bp, Homo sapiens
gattatttttctcttcattattaagtatctttatgcagctgatgtgaataaaccaccacatttaatctggcagttgtccttttttcttaattttttctamatatttttctttggaaaatgaagactcttatctttgtttacaggccagaaaaactgggaaaaacaggctcttccacttactggatgtttgacaaaatatccttcttgggccaaaaacattgacattattggtgagcttgttagaaattcaaaaaatcaaactttattccagatcttctggaaaaaaaccctgcataacaaggtcttcaacttattgtatatatttaaattttagaggtgccttctaaactcaacatgtctttgtcatctgaaaaatattcacagctcattccatatgatgtaaacatagcactcaaaaatgtacatgttcgtgttcatacccttaattttacactttac

SEQ ID NO: 138353 - DNA, 459 bp, Homo sapiens
gattatttttctcttcattattaagtatctttatgcagctgatgtgaataaaccaccacatttaatctggcagttgtccttttttcttaattttttctaaatatttttctttggaaaatgaagactcttatctttgtttacaggccagaaaaactgggaaaaacaggctcttccacttactggatgtttgacaaaatatccttcttgggccaaaaacattgacatyattggtgagcttgttagaaattcaaaaaatcaaactttattccagatcttctggaaaaaaaccctgcataacaaggtcttcaacttattgtatatatttaaattttagaggtgccttctaaactcaacatgtctttgtcatctgaaaaatattcacagctcattccatatgatgtaaacatagcactcaaaaatgtacatgttcgtgttcatacccttaattttacactttac

SEQ ID NO: 138354 - DNA, 430 bp, Homo sapiens
tgaactagtgaccagacatggagaggctaagacagtaccatgatgcatgaatagaaggtctaaagaaaggggcttaaaaggctacaagtgtaaataagatctctgaggtcatccaagaaaaagaggagagtccagcgcaattctatgaaagacggtgtgaggcttacagtatgtacactcattttgatccagatagccctgaaaatcagcacatgatcaayatggccttagttagtcaaagcgtggaagatatcaggagaaaactgcagaaacaggctgggcttaagtgtatgaatatctcacagttactggaaatagccaatcaagtgtttgaatagagatgcaacaagccacagagaaagccgtaaggaaggtgaaagccaggccaggcgaaacgccaacttactggctgtggccatcaggggaattc

SEQ ID NO: 138355 - DNA, 430 bp, Homo sapiens
tgaactagtgaccagacatggagaggctaagacagtaccatgatgcatgaatagaaggtctaaagaaaggggcttaaaaggctacaagtgtaaataagatctctgaggtcatccaagaaaaagaggagagtccagcgcaattctatgaaagacggtgtgaggcttacagtatgtacactcattttgatccagatagccctgaaaatcagcacatgatcaacatggccttagttagtcaaagcgtggaagatatcaggagaaaactgcagaaacaggctgggcttaagtgtatgaatatctcacakttactggaaatagccaatcaagtgtttgaatagagatgcaacaagccacagagaaagccgtaaggaaggtgaaagccaggccaggcgaaacgccaacttactggctgtggccatcaggggaattc

SEQ ID NO: 138356 - DNA, 640 bp, Homo sapiens
ctttggcttaacatctcccctgatgatcttatttcttttcatgaagagccggtacttgtagctcccgtggccccaacttggacagccaggaccatatctatgctaactcttccctcttcaaacgtttgcaggctttgcctccggagacccctaatggctccaggaccaaactataatttacctgtaattctgtaggccctcccccatccaccacagctcctcaccctcctgtcattttggtccctcaaycagtcactttgccatccactcagcctgcttctctatacgcttcttcatgcaaggacactcctgccactctagttgcacaggactgggacaataatcaccagtatgcttctgcctcttgtgctcccccaatgcccctttctcacactctcataccagtctgacctcctcaacctcagtttcccttatctgcacatacttttcctgtcacttctatgccaactccgtctcatgtgcctgttcttgaaactttaatgcaacacttattacaccagaacaaagaaacaagtggattagagatgtaggcttatccggtcatgctggaacctcctgatgctcaaggggtacaagtgctttggtatgcactgctcaatcttacctttttaaaagaatt

SEQ ID NO: 138357 - DNA, 640 bp, Homo sapiens
ctttggcttaacatctcccctgatgatcttatttcttttcatgaagagccggtacttgtagctcccgtggccccaacttggacagccaggaccatatctatgctaactcttccctcttcaaacgtttgcaggctttgcctccggagacccctaatggctccaggaccaaactataatttacctgtaattctgtaggccctcccccatccaccacagctcctcaccctcctgtcattttggtccctcaaccagtcactttgccatccactcagcctgcttctctatacgcttcttcatgcaaggacactcctgccactctagttgcacaggactgggacaataatcaccagtatgcttctgcctcttgtgctcccccaatgcccctttctcacactctcataccagtctgacctcctcaacctcagtttcycttatctgcacatacttttcctgtcacttctatgccaactccgtctcatgtgcctgttcttgaaactttaatgcaacacttattacaccagaacaaagaaacaagtggattagagatgtaggcttatccggtcatgctggaacctcctgatgctcaaggggtacaagtgctttggtatgcactgctcaatcttacctttttaaaagaatt

SEQ ID NO: 138358 - DNA, 535 bp, Homo sapiens
ctacaggacccctgttttagctacagaccaggatagggttcacccaacttggttccattgagaattctaaacttactctgtaaccatcccaaactcctcccagccacagtctgacagaggtcctgctattccagagacttggaggaaggtgcccatttacagtcatgcatccaggcatgcagaccttggcctttactggggtcactgaggcagttccatgactcagtttcagttacctgagccacagtttatggtcagttctgcctatatagtaacccacacggttacctgaggaaatgctctctggtactcactgaaagccacacccatccacatcctgatacaaggcccaccatatgcagasccaattgcaaaaacatgccctagtgtctgccttatggagcaaagctctgaaggatattcagtctgtccaaaaataaaatgggaattataacaacccaagcccctgtaacaagccaactaaaggtggaccctaatgcagacccagcagcctggtgaccaagctacaaccctt

SEQ ID NO: 138359 - DNA, 608 bp, Homo sapiens
agattgtgctgctgcactccagcctgggtgacagagtgatgagactcctcaaaggaaaaaaaattacatttctgagtcctgaaaaattattaataaatatttgttatatagtttctttgaacatgtggtcactctgcctgcaaacgtaaagacttttaattttcatagagtgaaatatacacatattcctctgaagataaaccttaggtgtaagaaaattatgaartgagtgtttggtaaatatgcatttgtacatattttcagaagaaaacgcaattattggaacaaaataagtttttaggtgattaatggaaaactaaacaccttgaatatgctgaaagcaaatgtatactttctgctttgtatggaatttattaatataaaattttatggcttatggctcggattctccccagaatccgtgtattaaagcacaggcaactttgtctccagaaataacactcttgagtacaacaataaaagccctcttcaaacacactcaaaaaattatttttaacgcttattttaataaaaatttaaccaaaattgaataattggatacatttttattgttctatgtgtgtgtgaatgtataaaatgacacataa

SEQ ID NO: 138360 - DNA, 608 bp, Homo sapiens
agattgtgctgctgcactccagcctgggtgacagagtgatgagactcctcaaaggaaaaaaaattacatttctgagtcctgaaaaattattaataaatatttgttatatagtttctttgaacatgtggtcactctgcctgcaaacgtaaagacttttaattttcatagagtgaaatatacacatattcctctgaagataaaccttaggtgtaagaaaattatgaaatgagtgtttggtaaatatgcatttgtacatattttcagaagaaaacrcaattattggaacaaaataagtttttaggtgattaatggaaaactaaacaccttgaatatgctgaaagcaaatgtatactttctgctttgtatggaatttattaatataaaattttatggcttatggctcggattctccccagaatccgtgtattaaagcacaggcaactttgtctccagaaataacactcttgagtacaacaataaaagccctcttcaaacacactcaaaaaattatttttaacgcttattttaataaaaatttaaccaaaattgaataattggatacatttttattgttctatgtgtgtgtgaatgtataaaatgacacataa

SEQ ID NO: 138361 - DNA, 296 bp, Homo sapiens
tgtcttttttctaacctaaatcagcttataatatcgttgatcataccacattgctaaaggtcaaagcactttttaacagatgtataggtactttaatgtcaagtcagaaagaaacatgctcccttattataaaatattyactaacagataaaatataacacccacacagatactgaaatgttgttctaatgattagccatccttttattaattagtttatttttgaagccctttgtataaagatggctagatccctggaaagctggtaaactttttagatttatttttatctataa

SEQ ID NO: 138362 - DNA, 523 bp, Homo sapiens
tattcatgagggatccacccccatgatccaatcacctcccatcacactccacctccaacattggggattacagttcaacatgagatttgggtgaggtcacatatccaaattatatcaccagattaggatttttgttttgtcttaagcagtctttatattcaaggacaagtgaggaagacttcctcaaatagtttttgttttaagtaatctgacctattttggggaaagaaatgagaagttcttctacaaaagtgattgattctccactaaattgttatagtttcatgawtcctaaaaatgggtttatgctatagagatttgatatctcctatacgccactctcaggttggccctctccattacaaggcaaggaaggggaggaaatggactcaaatctctcagcctcacctctatcctttctgactccaagaggtgatggagagaggaaagaaaggaaagagaaggcaagcatgacaaacttctctacctttgagtcatttttaaagccacaaaggtggaattc

SEQ ID NO: 138363 - DNA, 474 bp, Homo sapiens
gatccaatcacctcccatcacactccacctccaacattggggattacagttcaacatgagatttgggtgaggtcacatatccaaattatatcaccagattaggatttttgttttgtcttaagcagtctttatattcaaggacaagtgaggaagacttcctcaaatagtttttgttttaagtaatctgacctattttggggaaagaaatgagaagttcttctacaaaagtgattgattctccactaaattgttatagtttcatgattcctaaaaatgggtttatgctatagagatttgatatctcctrtacgccactctcaggttggccctctccattacaaggcaaggaaggggaggaaatggactcaaatctctcagcctcacctctatcctttctgactccaagaggtgatggagagaggaaagaaaggaaagagaaggcaagcatgacaaacttctctacctttgagtcat

SEQ ID NO: 138364 - DNA, 523 bp, Homo sapiens
tattcatgagggatccacccccatgatccaatcacctcccatcacactccacctccaacattggggattacagttcaacatgagatttgggtgaggtcacatatccaaattatatcaccagattaggatttttgttttgtcttaagcagtctttatattcaaggacaagtgaggaagacttcctcaaatagtttttgttttaagtaatctgacctattttggggaaagaaatgagaagttcttctacaaaagtgattgattctccactaaattgttatagtttcatgattcctaaaaatgggtttatgctatagagatttgatatctcctatacgccactctcaggttggccctctccattacaaggcaaggaaggggaggaaatggactcaaatctctcagcctcacctctatcctttctgactccaagaggtgatggagagaggaargaaaggaaagagaaggcaagcatgacaaacttctctacctttgagtcatttttaaagccacaaaggtggaattc

SEQ ID NO: 138365 - DNA, 506 bp, Homo sapiens
atctgttaagctttgaacttgagagagakaagttagggcatctggcagaagaaatttgtaagcagaaaggcattcaagatttgacctggtggtttctttttcttttcctccttttttttttttttgagacggagtctcgctctgtcacccagactggagtgcagtggtgtgattttggctcactgcaacctctagctcccaggttcaagcgattctcctgcctcagcctctcaagtagctgggattacaggcatgcaccacgacgccctgacctggcagtttctaaaagtgtacagtcacatgcattcacaaagagatggtttgaaattggaatttatgtttaaaaggaaagaagacattaaaagtttggaaaatttgcaacttgaccatgtggttaaaaaaataaaaacccattttctggggagaaattcaggctggctgcataaatttgcataaatcaagaggatcctgatgttaatctccaagaaaatgaggaaaaagtcctc

SEQ ID NO: 138366 - DNA, 473 bp, Homo sapiens
cctagagatctgttaagctttgaacttgagagagagaagttagggcatctggcagaagaaatttgtaagcagaaaggcattcaagatttgacckggtggtttctttttcttttcctccttttttttttttttgagacggagtctcgctctgtcacccagactggagtgcagtggtgtgattttggctcactgcaacctctagctcccaggttcaagcgattctcctgcctcagcctctcaagtagctgggattacaggcatgcaccacgacgccctgacctggcagtttctaaaagtgtacagtcacatgcattcacaaagagatggtttgaaattggaatttatgtttaaaaggaaagaagacattaaaagtttggaaaatttgcaacttgaccatgtggttaaaaaaataaaaacccattttctggggagaaattcaggctggctgcataaatttgcataaatcaagagga

SEQ ID NO: 138367 - DNA, 473 bp, Homo sapiens
cctagagatctgttaagctttgaacttgagagagagaagttagggcatctggcagaagaaatttgtaagcagaaaggcattcaagatttgacctrgtggtttctttttcttttcctccttttttttttttttgagacggagtctcgctctgtcacccagactggagtgcagtggtgtgattttggctcactgcaacctctagctcccaggttcaagcgattctcctgcctcagcctctcaagtagctgggattacaggcatgcaccacgacgccctgacctggcagtttctaaaagtgtacagtcacatgcattcacaaagagatggtttgaaattggaatttatgtttaaaaggaaagaagacattaaaagtttggaaaatttgcaacttgaccatgtggttaaaaaaataaaaacccattttctggggagaaattcaggctggctgcataaatttgcataaatcaagagga

SEQ ID NO: 138368 - DNA, 475 bp, Homo sapiens
gttagggcatctggcagaagaaatttgtaagcagaaaggcattcaagatttgacctggtggtttctttttcttttcctycttttttttttttttgagacggagtctcgctctgtcacccagactggagtgcagtggtgtgattttggctcactgcaacctctagctcccaggttcaagcgattctcctgcctcagcctctcaagtagctgggattacaggcatgcaccacgacgccctgacctggcagtttctaaaagtgtacagtcacatgcattcacaaagagatggtttgaaattggaatttatgtttaaaaggaaagaagacattaaaagtttggaaaatttgcaacttgaccatgtggttaaaaaaataaaaacccattttctggggagaaattcaggctggctgcataaatttgcataaatcaagaggatcctgatgttaatctccaagaaaatgaggaaaaagtcctc

SEQ ID NO: 138369 - DNA, 475 bp, Homo sapiens
gttagggcatctggcagaagaaatttgtaagcagaaaggcattcaagatttgacctggtggtttctttttcttttcctcyttttttttttttttgagacggagtctcgctctgtcacccagactggagtgcagtggtgtgattttggctcactgcaacctctagctcccaggttcaagcgattctcctgcctcagcctctcaagtagctgggattacaggcatgcaccacgacgccctgacctggcagtttctaaaagtgtacagtcacatgcattcacaaagagatggtttgaaattggaatttatgtttaaaaggaaagaagacattaaaagtttggaaaatttgcaacttgaccatgtggttaaaaaaataaaaacccattttctggggagaaattcaggctggctgcataaatttgcataaatcaagaggatcctgatgttaatctccaagaaaatgaggaaaaagtcctc

SEQ ID NO: 138370 - DNA, 473 bp, Homo sapiens
aagctttgaacttgagagagagaagttagggcatctggcagaagaaatttgtaagcagaaaggcattcaagatttgacctggtggtttctttttcttttcctccttttttttttttttgagayggagtctcgctctgtcacccagactggagtgcagtggtgtgattttggctcactgcaacctctagctcccaggttcaagcgattctcctgcctcagcctctcaagtagctgggattacaggcatgcaccacgacgccctgacctggcagtttctaaaagtgtacagtcacatgcattcacaaagagatggtttgaaattggaatttatgtttaaaaggaaagaagacattaaaagtttggaaaatttgcaacttgaccatgtggttaaaaaaataaaaacccattttctggggagaaattcaggctggctgcataaatttgcataaatcaagaggatcctgatgttaatc

SEQ ID NO: 138371 - DNA, 506 bp, Homo sapiens
atctgttaagctttgaacttgagagagagaagttagggcatctggcagaagaaatttgtaagcagaaaggcattcaagatttgacctggtggtttctttttcttttcctccttttttttttttttgagacggagtctcrctctgtcacccagactggagtgcagtggtgtgattttggctcactgcaacctctagctcccaggttcaagcgattctcctgcctcagcctctcaagtagctgggattacaggcatgcaccacgacgccctgacctggcagtttctaaaagtgtacagtcacatgcattcacaaagagatggtttgaaattggaatttatgtttaaaaggaaagaagacattaaaagtttggaaaatttgcaacttgaccatgtggttaaaaaaataaaaacccattttctggggagaaattcaggctggctgcataaatttgcataaatcaagaggatcctgatgttaatctccaagaaaatgaggaaaaagtcctc

SEQ ID NO: 138372 - DNA, 464 bp, Homo sapiens
aagaaatttgtaagcagaaaggcattcaagatttgacctggtggtttctttttcttttcctccttttttttttttttgagacggagtctcgctctgtcacccagactggagtgcagtggtgtgattttggctcactgcaacctctasctcccaggttcaagcgattctcctgcctcagcctctcaagtagctgggattacaggcatgcaccacgacgccctgacctggcagtttctaaaagtgtacagtcacatgcattcacaaagagatggtttgaaattggaatttatgtttaaaaggaaagaagacattaaaagtttggaaaatttgcaacttgaccatgtggttaaaaaaataaaaacccattttctggggagaaattcaggctggctgcataaatttgcataaatcaagaggatcctgatgttaatctccaagaaaatgaggaaaaagtcctcagggca

SEQ ID NO: 138373 - DNA, 506 bp, Homo sapiens
atctgttaagctttgaacttgagagagagaagttagggcatctggcagaagaaatttgtaagcagaaaggcattcaagatttgacctggtggtttctttttcttttcctccttttttttttttttgagacggagtctcgctctgtcacccagactggagtgcagtggtgtgattttggctcactgcaacctctagctcccaggttcaagcgattctcctgcctcagcctctcaagtagctgggattacaggcatgcaccacsacgccctgacctggcagtttctaaaagtgtacagtcacatgcattcacaaagagatggtttgaaattggaatttatgtttaaaaggaaagaagacattaaaagtttggaaaatttgcaacttgaccatgtggttaaaaaaataaaaacccattttctggggagaaattcaggctggctgcataaatttgcataaatcaagaggatcctgatgttaatctccaagaaaatgaggaaaaagtcctc

SEQ ID NO: 138374 - DNA, 622 bp, Homo sapiens
tactaaattttatttattttatgtgcacttgttccaagcacattttcttaaatgtctgttccttatctattgatttctatggaaatttttattttcctccaaaatggcatctgggagttcatatgtttggaccatttttatcctcattgctgtttgtcttcatttgtctttttctctgatcactattttatatayacacacacacacacacacacatacatacatatataaatatatatgtgcatatatatttcccagcatttaatacatttaatatcccttagtggatagggatgacaacttacaaatttaaatacttttttttataaaggagtcatttttttctattgaatttaagctaaaacatgatccctcagttctgtaggccattgcactttcaatatagcattattaaatccaaatcattacatagcaataagcaaataactacacccataagaagaatgcccatataattgagcaaaagaacactttgccctggagcctgtgctttcaagggctccactatggtcctctctctggccacattcctccccaaagtacaaggagtttaccaggtccaaggggatgaggttagttggaggtgatgctgctcaccccc

SEQ ID NO: 138375 - DNA, 565 bp, Homo sapiens
attttttttccacctggtacctattaccttatatacagataataatatatacaacatataaaataattactccataaattacagaaaaatatcactatcattgactcatgtactttaacatacgactatattgtaactttttcttacagcttagatagaaacttgaaacctagaaaggtttgagtatttgtttttttttataaatttaaatttaattgactttctgaagttcaaagtgatgctttatatatgacatcattaatctctcacttgaattctatgatgttggcagggacaattttacttytcctgtcatgaatttttttggtgtgaatttaaaataaataaaatcaccaaaagaaaaactgagaaataattacccacacagctgaatctttgaggtacattaatcaatttgattttattttatagagtgccttttgtattgaatagtcacattacataatttttgaaaaaatactttttttgagcacttcttgtgtataaagtcttctgctagttacaacacaagcatcattgttttaagcatcacaacacacgcatc

SEQ ID NO: 138376 - DNA, 352 bp, Homo sapiens
attaggtgatgaggtttacttgttaagtgatgatttcaggaggaaatggggatcaggcagcatggtagcattgacttattaactaaatttaggttttctggaaataacctcagtycttcatgcctaaagaaactgaaacactgtaagcaatttattttaggctaaaatgcggtattcattccagtaaagtcgccctcaatcttttgcaagactgtcagatggtgttgtgcccttcaaataacttcagaggctcaaagtcatgggctgttaacaaatttgtcaataagcattagctatcgtaaatacatttagagcaaaatgaaattgtggatattcaattatatagcaatca

SEQ ID NO: 138377 - DNA, 519 bp, Homo sapiens
aatttttctgtaaatcataatcgttactcaataattgctttgatttctaagacactatatttgcatctgtcttatagatatattattgttcaaattattcaacagaaaatcgagaaacaaaactaatctatctatttgagaagaatatttgatgtaatgagagcaattttccaaatagttgcattggggaaaagaaaaattaaataatatactcatggcatcatggaagacatgggaaaaaatggatgctactcaaattttacatttataagtgtattcatctgcttctttaaacacagtctttgacatttaatttataacatatttaacattttataaaggatttgttccaatatatttaacctctctttagctgaaaattaatctccaaattatacttattaaacactttatcccatatcctgtgattttcagaatcttcagcttatgaaaccatataatttwaaaagtaatcttattaaatgtgtgaattgcattagttctcattgatctgaaggg

SEQ ID NO: 138378 - DNA, 523 bp, Homo sapiens
atgcatgtgacttgttaagtatttgtatgaaattactgttttgaaatgaaagtaaattagactgttattaacatttaaaaataacagatggatcatcattttttaaacggcatgttaaattataaaactatactttaatgttctttaatgctcatcaacatatttacttagttaatgtgaaatatatatcactaaagacgttttaactattctgagatgacggaatgactttataagttaaaagagaaaatatagctacatttaattgcttatttaattgttgctaaatttaaaaaatcataccatatgaaaaacagtgtkaaaatgtcaacttaaaggcaaaagctgaggcaaaattaatatagagactttatttgggccaagattaaggacaacaacctgggacactttcagcagcctggagtccaggttgccttgagcagggctctggagtacaaaggagaggctcaagtttgtaaagaacaaagaatgaatcaggagagggggtgattacaaaattgct

SEQ ID NO: 138379 - DNA, 485 bp, Homo sapiens
tttcctaattacactttctgtctcttgtgttttagattccatgctacctttcatcttcttgagttcttccttataagttttcctctctgaccaaagtcagtttcagaagtatgatgacatgcacattcagtttaattcttattcttaaggtgtcatacttgcttcatttaactttgatttcastatgtgttgtttgtttattcatctttgaattgtaagcatgacaagactcaagctgtaacattctctcctgtgtcatatatgaggatagagcaatgctatttccccctatgtgaatttggagctccgaatatttaactttctatagtgatgggctattcttctgatgtcgagcccttttttctcactggaggctttcttgactaataccttgaatttcacatacgtcttttgcgcctggccattttgaccctctccttgtgctagaactaatctgtatgtatttcttctgcatatggaaaaag

SEQ ID NO: 138380 - DNA, 471 bp, Homo sapiens
gttgcgcaacgcacaccttcccatataaggctgaacaaggtgacactctgccttcctgtctcagctctcctactatgcacagtgttctttttggggtccatgttttgccacttttttttttttttttttgctttttgtactttttcttgctgttttcattaagatgacccccaagtgtagtgttgaagagctgtayagtgttcctaagtgcaagagggctgtgatgtcgccaatatgtgtcagataagctttgctcagacacgaattatagttccattggcattgagttccatgacagtgcatcaataatatgtattaaataagatgtctttaaatagaaacacacaaaaaccaaattgatattgatcaattgataaaattgtgagcagaggctctcaggaacctaactctgtttccctttgggtgcagtgatttgctaatttagtgtttatggttactttatagaaccta

SEQ ID NO: 138381 - DNA, 435 bp, Homo sapiens
tggagcaaaaagaattcatctgtgatataactagttggtcattagcaatagcttgcrttcttttcttttcttttcttttctttttttttttttgagacgggctctcactctgttgcccaggctggagtgcaatggcgcaatcttggctcactgcaacctccgcctcctgggttcaagtgattcttctgccgcagactcccgagtagctaggattacaggcatgtgccaccatgcctggctaatttttctatttttagtagagatggggtttcacgatgttggccaggctagttttgaacttttgacctcaagtgatccatgtgcctcggtctcccaaagtgctgggattacaggcacaagccaccgcgcccatccagcagtagttttctattgctgagtaaaaacattaccacacacttagcagcttaacatagg

SEQ ID NO: 138382 - DNA, 623 bp, Homo sapiens
aaaactttcctttttttttaaggataggaagaataaaatatagatggcaggagattaatgacatttacaggagtctgtcttggaaaattcacatctcttctatgtcctgtattgaaaatagataaaagatggaggaaaatgctttagagattagacacttttagrttttagagagagaagagggtggggttcaagcttgctattgtcttgaaagacaatttggatgggcataggactgaaattgagtgggctttccccggcctgtgctccgctgccttttttattggagcttaagtagtaaaactggacaacctgcctttcaattataagttgagttggcagagaagcgctgtcttcttctgttttatttaggcaaaccaacttaagaataccaaacaatagttgattaattttccccaaggatgtctgtaaagcatttaattcagttcagtcaacttgagtaactaccatgtgcagtgcactgagctaggcgtgattgcaggggacatgactcagagcagacactgggagaaaaggaccttgtcttttttaatgcgaaaatgaattttggggcctaaactccatttccaacatcataaattacacatttcatacaagaagca

SEQ ID NO: 138383 - DNA, 361 bp, Homo sapiens
ccgatttttcaagcaggtctattaatctgtattcatatgtgaaatatctaacctttaaatatttaattttgtaaaagacatccactgggcttaaccaaaaatgtctgtaagtcaccaggtttttgactttgggtatcagagctcctgggtctatccaaaasccatgaacatttactatctgagtatatttggcatagtcatttaatcttcctgaggcttagtttttatttttcagagttgaaataatgatacttgctctagaaaattataaggataaagtcagagagggaaaatggaaatgatttgtaattgcaaagtcttttggtggtttaaaatgttacatgcaaggataaatcatgct

SEQ ID NO: 138384 - DNA, 452 bp, Homo sapiens
taataacctttgagctgaacaagtctacattggacacctactgtgttcatgctctgaggaaatgaggctcagagaacttaagtctcttacctgcaaaattctagaacgtggcctaggatttaggccttctatctgtccatcctctgccccagttttatattcttcacccacaaacttgataggtcatctgtttaacttttgatggaacagcagcrgcatggagatgagttttggagtgagatgcacctggctctgggatacagttgcccagggatcatgggcaatttaagttcctgcgctccagttctctcaccttgaaaatagagagcttagcccataagctcattgtgaagatttaatgtcagattatatatataaagtgccaactacacagcttgacgccatcacaaatattcttttttttctatagagtgcctgacacctacactatt

SEQ ID NO: 138385 - DNA, 479 bp, Homo sapiens
ttgaaggcctacaaattacgttccaacacagttttacaagaaggcgtgtgaagaaggcctagagcagagaaagattttaatgtgtagattgaaagcttcaatccctggccctgttcttcctttagactagagggaaaagtagttcgaatgttcccttcacctttatggatgaagtgatgccttcatgctagaagagtttgggaaaagaattctcaggaattttacaattattaatcaagtctcagkacatcaagaaaaagaatgagaaaaggaataacagctatccctggactatttgatctattctggctcaaaggcaaagctattatattttcaaaagagaagagagattagctcctaagttgttatattcaagaactattccagtttcaggcaagatttattttgcttaatgtatctccttttatagaagccagacctttcccttcactggctgctgcaaaccttaacttaggtta

SEQ ID NO: 138386 - DNA, 519 bp, Homo sapiens
tgtctatgtaacacattctaaaactcttttttataaatgggtgaattaaggtaatttgtattttttaaagttgaatatatttggactttattaattttatattactgttttaatatttgctaccaactcactggcttaaaatgacaaaatctttttacattttggaattcagaaattcaaaatcaatctcagtgagctaaaatcaaggttttggcatatttaaaaatttcttgaatggactatgtctttgctgttttaaaattgcagttcttacagtattcaagcatgtttgcatttggttttagtgcttatatttgtaattaaacttatgtaattctcttattttgtgtctcaacatcacgcctattttattccttttctaaattctcattttcctcttctccatcacttcattttcaccgacaagattaagcttcttagggtttacctcattctattttatgtacttayatttcactacgtaacttattaactttaaatactaacttatttttctac

SEQ ID NO: 138387 - DNA, 555 bp, Homo sapiens
aaatattgcatttattgatagattaactagcagtgatagaaacatttttgcagcctattgtttgtatgtttgtgttgagaaattatataaaagagtttgcattttgaacagaatatctaaacattgtctaagccttggaaaatagaaagctaatatccttacccattaatctcttctgctttttgaacagatctctgtttaaaagagaaatcacaacttgaatttttcttccttgtcagtacactccaatcatcacacatgctttccccattgtgaaataaagaatgcatgtactccagtacaatcaaagaggaacgaaattaggccagcacctattcatacttcaactctctctctttcagaaaatggaaaactttgtgagatatracactgaatagcaaggccaacaaattttaagagtccatatattactggaggaaagtatgaaaaccaaaatagatatgctacctgttattctataagattattttcaaagaaatgcagaatgaatacatattatttaattctataatggccacaattcatcatatttat

SEQ ID NO: 138388 - DNA, 397 bp, Homo sapiens
gaagggcttgtgagccacatacgactttgtttatttattttttgtagagacaatgtctcactrtgttgcctaggctgcttttgaactcctggcctcaagcaatcctcctgcctcagcctgtcaaagtgctgggattacaggcgtgagccaccacacttggctcacatacagactttgatttccaccttgagagaagtgggagctatgggaggcctttgagcagaggagggctgtgctgtgacttagctcttcataggaattctctggccgctgcaggagaagactgtcaagatgagagtggagtcagggagaccaaagatgcaattgctttgagagtactggcacctgaggcaggtagctcagatcagggtggtcaaacggtggtgtggtagagatg

SEQ ID NO: 138389 - DNA, 322 bp, Homo sapiens
ctctattttaaaaaaataggagaggcgccaccccattcttayttaggcgaatcacttgcttttcctcgagagcatgttaacccttcgggaatgataggacgaccggggtcttctggtgtcagacccgcgtgcagtgtgcccttttgttctgttttgcctgctcaaagtacctccccgcaccccactcctacctggattcttcccagtcggagctatttcacgtccacacacccttcccgatttctgtagcctgggattcaggaatccaaggcttcccccacctcagcagggctcatctgtattgtggttatgggtttccagg

SEQ ID NO: 138390 - DNA, 483 bp, Homo sapiens
agcaaatacaaattttatctggcaaaccttacttcccaggaacccctgagttctcctacagaaagttctaaacattccagggaattaattacaccagtgaggctgaaagccaggatttgagttgattaggagacacgtccagtcaggaatgcattaagaacgggaaatattttaagcctcaagagcagcagctaaaaggagccctgttctctagagcccatccccacgatgagaaaaaggctgtattcagtgcagacctggaccccccttcacagggccaaacagaggccagtctactccctgtccctgatacaaactggtccctgataaaaactggtctaatatttgcatacaacctatgctcactcagggtccctccccagccatgcgaccccacagcatggggagacaattagacccagargtctgggcttgtggaggaggaccagcagagagaccaacctgcctctgccttcctctgcc

SEQ ID NO: 138391 - DNA, 592 bp, Homo sapiens
ggaagcctcccaatggagaagctcagctagcattaaggagggtctggccaggcacagatggttacacgtgaggcagcaagactcatctccaaccctcagtgctgggggaaatggtgcttcatgtgtgctgggrttgtcagcactggctcaaagactgagtccactaaggatacagagcaaaggtactcaggaccagcactaatgagagatgagaaagccaaggctggcagcgtgcttgactgagtcatgcatcatatgcaggcaggtctgggactttaccttgaacatacttcttccatctttattcttagcactgtcgtctaagctgggtggactcaagcaatacctaaaccaaatcatgtccaaccttgcttaaaatccttccatggcttcctgctatacctgaaatacagtctaaattcctcattgaggtctgtaaggccctgcactgtgtgactcctgcccatccattaccctcacctcctccacccaagcttcagcagcattcatgtttctggtccttgagcccacccaggccttccctgtcttgagccttcaaacatgttgctccttctattttgaacactccttt

SEQ ID NO: 138392 - DNA, 578 bp, Homo sapiens
tcattagctgcagtgtaggtttgttgtgttacagcatcatacgttatttgctttgcaaatatgactcactgtctctgactttcatcacctgtgtttgtgcgtcctctgaagcgtttataagcttatcataggcctgcagtgttgagaaacatggttctaaaaaatagtcactaaaaagagtcaatagctactgcatctctccctgacattccaagcgttctgtcagatctaggaggtttacgcttatatttactccagacttaattttttacttttccttgactaatttttttaggtttctttactcaaaccttctttgatgtttgaggttcccctcaccatcgctcatgaattttggaaggccttggctcacatcaggaactcatttcaccactgtccccccagtaatgagtgttgaattaatggttcttcccagatgtgcttaaaagttctttaaagtaccttctttattcactcatcaaaaagtttgtcacttactctgtgctaggggrtgttgtaaggtgaggacagcaaagcccctttgttttaatgttgagagcctggagggagagagattt

SEQ ID NO: 138393 - DNA, 500 bp, Homo sapiens
agcaaatacaaattttatctggcaaaccttacttcccaggaacccctgagttctcctacagaaagttctaaacattccagggaattaattacaccagtgaggctgaaagccaggatttgagktgattaggagacacgtccagtcaggaatgcattaagaacgggaaatattttaagcctcaagagcagcagctaaaaggagccctgttctctagagcccatccccacgatgagaaaaaggctgtattcagtgcagacctggaccccccttcacagggccaaacagaggccagtctactccctgtccctgatacaaactggtccctgataaaaactggtctaatatttgcatacaacctatgctcactcagggtccctccccagccatgcgaccccacagcatggggagacaattagacccagaggtctgggcttgtggaggaggaccagcagagagaccaacctgcctctgccttcctctgccagggagagcaggagaca

SEQ ID NO: 138394 - DNA, 535 bp, Homo sapiens
tgacccccaggagagatgctggatttagcaaatacaaattttatctggcaaaccttacttcccaggaacccctgagttctcctacagaaagttctaaacattccagggaattaattacaccagtgaggctgaaagccaggatttgagttgattaggagacacgtccagtcaggaatgcattaagaacgggaaatattttaagcctcaagagcagcagctaaaaggagccctgttctctagagcccatccccacgatgagaaaaaggctgtwttcagtgcagacctggaccccccttcacagggccaaacagaggccagtctactccctgtccctgatacaaactggtccctgataaaaactggtctaatatttgcatacaacctatgctcactcagggtccctccccagccatgcgaccccacagcatggggagacaattagacccagaggtctgggcttgtggaggaggaccagcagagagaccaacctgcctctgccttcctctgccagggagagcaggagacaggtggtgga

SEQ ID NO: 138395 - DNA, 535 bp, Homo sapiens
tgacccccaggagagatgctggatttagcaaatacaaattttatctggcaaaccttacttcccaggaacccctgagttctcctacagaaagttctaaacattccagggaattaattacaccagtgaggctgaaagccaggatttgagttgattaggagacacgtccagtcaggaatgcattaagaacgggaaatattttaagcctcaagagcagcagctaaaaggagccctgttctctagagcccatccccacgatgagaaaaaggctgtattcagtgcagacctggaccccccttcacagggccaaacagaggccagtctactccctgtccctgatacaaactggtcccygataaaaactggtctaatatttgcatacaacctatgctcactcagggtccctccccagccatgcgaccccacagcatggggagacaattagacccagaggtctgggcttgtggaggaggaccagcagagagaccaacctgcctctgccttcctctgccagggagagcaggagacaggtggtgga

SEQ ID NO: 138396 - DNA, 500 bp, Homo sapiens
agcaaatacaaattttatctggcaaaccttacttcccaggaacccctgagttctcctacagaaagttctaaacattccagggaattaattacaccagtgaggctgaaagccaggatttgagttgattaggagacacgtccagtcaggaatgcattaagaacgggaaatattttaagcctcaagagcagcagctaaaaggagccctgttctctagagcccatccccacgatgagaaaaaggctgtattcagtgcagacctggaccccccttcacagggccaaacagaggccagtctactccctgtccctgatacaaactggtccctgataaaaactggtctaatatttgcayacaacctatgctcactcagggtccctccccagccatgcgaccccacagcatggggagacaattagacccagaggtctgggcttgtggaggaggaccagcagagagaccaacctgcctctgccttcctctgccagggagagcaggagaca

SEQ ID NO: 138397 - DNA, 599 bp, Homo sapiens
gaattttggaaactatgcaaacaaatgaaaattaaatagtatgctcctgaatgaccagtggatcagtgagraaattaagaaggaaattgaaaaatttattgaaacaaacaataatggaaatacaacatttcgaaacctatggtatacagcaaaaaactgtactaagagggaagtttatagctcttagtgcttacatcaaaaaagacgaaaaacttgaaatgaacagcctaatgatacatcttaaagaactggaaaagcaagagcgaaccaaatccaaaattgatagaagaaaataaataataaagatcagagcagaaattgaaatgaagaaaacaacacaaaagatcaatgaaacaaaaagttggttttttgagaagttaaacaaaataggcaaacctttagccagattaactaagaaaaaaagagagaagacccaaataaataaaatcagagatgcaaaaggagacattaaaactgataccacagaaattcaaaggatcattagtggctactatgagcaactatatacaaataaattggaaaatttagaagaaatggataatgaatcattagtggctactatgagcaactacatacca

SEQ ID NO: 138398 - DNA, 497 bp, Homo sapiens
atggactttgaaattgtgacagagagcaatcgcctgtctctctatagactcagtgtgcaaaacagcctttaaatctctagactaaatgtttacaatggacaaatatggttccctctttgctcgacatcctttgtctaggggaatcataaaaaatagtcagggataatataccaacaccttagtgtgcccatctttataactgtgtacttgattttttaatgttggctgatgtgctttctgtgccatgaaataatttttcaatatttaatgtctcattttttaagttggataagtcagatgcttattgagtgcttgttgtgtgccctgcacagctgttagtgtgttttcaagcaagctactattatttgtctatggtatttcaatataatttataaaaccctacaaattgtgaactcccttgtgmtaaggcagggaggaaaaattggagaaaccagaacaaataacatttcttcagtgctaccattaatcaggtacat

SEQ ID NO: 138399 - DNA, 511 bp, Homo sapiens
aagtaaaaagaaaaggataaaattataaaagtgaaaatagattagtggttgccatgaactaaagacrggaggtgaggctccggaggtaggcagatatggtgggatcctggtggtgttggacttcctctgggcattgcccgtgttggtgtatacataaacttacacatgtggtaaaattgcacagaactaaccacaaacacatatactcgcaatgcatacaaggacaattggggctatctgaataaactgggtagactgaatccatgtgaatattctggttatagtattgtactatatagttttgtaagattgtcaccattggaaaaacaactatgtaaaggataaatagagtctctctgtattatttcttaaaactgcatgcaaacattgaaaatagagagtctaagtaaaaaacaaaacttcctgatgactattacctgccctaagattggaaaaccaaataccattttcaaaactgttaacagaagttccagatagggaaggaactggt

SEQ ID NO: 138400 - DNA, 511 bp, Homo sapiens
aagtaaaaagaaaaggataaaattataaaagtgaaaatagattagtggttgccatgaactaaagacgggaggtgaggctccggaggtaggcagatatggtgggatcctggtggtgttggacttcctctgggcattgcccgtgttggtgtatacataaacttacacatgtggtaaaattgcacagaactaaccacaaacacatatactcgcaatgcatacaaggacaattggkgctatctgaataaactgggtagactgaatccatgtgaatattctggttatagtattgtactatatagttttgtaagattgtcaccattggaaaaacaactatgtaaaggataaatagagtctctctgtattatttcttaaaactgcatgcaaacattgaaaatagagagtctaagtaaaaaacaaaacttcctgatgactattacctgccctaagattggaaaaccaaataccattttcaaaactgttaacagaagttccagatagggaaggaactggt

SEQ ID NO: 138401 - DNA, 520 bp, Homo sapiens
ttgacatgctacattcaagatgtctgtctgtaagaattccaagtagaagattccaaacaggcaactagacaaacgaatctgggtgcaagaaaaaggttaaggctggaagtagattttggagtcattaacactaagatggtatgtaaagccatgggactttacaggagataagtgatagaaaaaggaaaacagatacacctggttacaaagccacagggacttcaccatttaaaataaagaagaagggaggattgtgctatacacttttaaytgacctgttgctatacccagcagctggggttcttgaaagcaacagaaattgaatgagactgacaagtaaacaatcaatgtatggatggctactcgcacccctgaaggcaataggatggttgggcagacgacgtcagaaagtgggcaggaaccaaaaaatcaaacccagaaagtatgaccacacccagggaacagcccagttaggacacctctgcagctgaacactgagtgggagctcagcctccaggaa

SEQ ID NO: 138402 - DNA, 341 bp, Homo sapiens
agaggttggtacttttaagtccccctaaggactattggtttgcataaaccatttgcctttggattgttttyctctttagggaatattaattttctaggctgtcattacagaggtaaagtttcaggtttttagttatttcctttgcaagtgggaagcagtgtgaggcaaggaaaggtactcaaaatggagttctcactacttgacaaagcttaaaattagctgggtgtacaggctcatccagggataggatctcctaaagaaatgctttgggtgccatttttctggtctgcatttctgagagtcacttgtaaaggcagaagcagaggacaaaaaagttcata

SEQ ID NO: 138403 - DNA, 341 bp, Homo sapiens
agaggttggtacttttaagtccccctaaggactattggtttgcataaaccatttgcctttggattgtttttctctttagggaatattaattttctaggctgtcattacagaggtaaagtttcaggtttttagwtatttcctttgcaagtgggaagcagtgtgaggcaaggaaaggtactcaaaatggagttctcactacttgacaaagcttaaaattagctgggtgtacaggctcatccagggataggatctcctaaagaaatgctttgggtgccatttttctggtctgcatttctgagagtcacttgtaaaggcagaagcagaggacaaaaaagttcata

SEQ ID NO: 138404 - DNA, 341 bp, Homo sapiens
agaggttggtacttttaagtccccctaaggactattggtttgcataaaccatttgcctttggattgtttttctctttagggaatattaattttctaggctgtcattacagaggtaaagtttcaggtttttagttatttcctttgcaagtgggaagcagtgtgaggcaaggaaaggtactcaaaatggagttctcactacttgacaaagcttaaaattagctgggtgtacaggctcatccagggataggatctcctaaagaaaygctttgggtgccatttttctggtctgcatttctgagagtcacttgtaaaggcagaagcagaggacaaaaaagttcata

SEQ ID NO: 138405 - DNA, 569 bp, Homo sapiens
tcttgatgtatttttcacctaacatatatttatttattgtctgtcttcccctatcagagtgtaggctccaagaaggcaagtgtgttgtgtgttgtttatagctgtttaatcccagtgccaagagcagcccacataaatattcaataaatatgtgctgaaaatgaatgaatgaccctccctatattgcagaaaccaccaattcaggagatttttcattgtttaaataattgtagctcaccacagtgttacataactaaacagtgtcagagcaatgacctcaaagagtggtcttaagaaaatggaraattgggacatgttcagataccacatgaagacccagaaaagacctttgccggctggaaggcatacatcatggactagctgtatacatgtgtgtgcagaagaggaacctaaggctacactagagtagtgtgatatatttttatcagtagaggtgggtgggttgtggggggacattggtttaaaccacagtacttcgatatgactgagaagacatatatatatgacaaggtggaagttaaggagtcttccctaccactgctgcatta

SEQ ID NO: 138406 - DNA, 439 bp, Homo sapiens
aactgaatagtggtggtatcacttagcggcactgaatccaattctatgtgtccccaggcacaactggaggggaaaggaagaaagattatttaaacaggtcactgacttcagaccttcacataatttgttattgttgtaataaagcttcaaataggtttaaggttcattcagtgatcctttgtcygcctgtttctttttagtaggccaagggctgactgttcaacctgtcccttacctcacagtgactagtagaaggaaagtctgcccgcctgcgttgaattgtatagttaaatcctggaatcccttagcatgtggtcaatttccagggttgtctctctgttttgtttttaaaagaactactgtgggaattaatttttttttcagagataagagtaaatgttccttgtttggcaattcagtttgcagttgaattcaagat

SEQ ID NO: 138407 - DNA, 434 bp, Homo sapiens
aactgaatagtggtggtatcacttagcggcactgaatccaattctatgtgtccccaggcacaactggaggggaaaggaagaaagattatttaaacaggtcactgacttcagaccttcacataatttgttattgttgtaataaagcttcaaataggtttaaggttcattcagtgatcctttgtctgcctgtttctttttagtaggccaagggctgactgttcaacctgtcccttacctcacagtgactagtagaaggaaagtctgcccgcctgcgttgaattgtatagttaaatcctggaatcccttagcatgtggtcaatttccagggttgtctctctgttttgtttttaaaagaactactgtgggaattaatttttttttcagagataagastaaatgttccttgtttggcaattcagtttgcagttgaattc

SEQ ID NO: 138408 - DNA, 422 bp, Homo sapiens
gagcaaggagggaaaagggctgcattgtaacaaaatcttaagtcgtagagggtttttttaatatatagttttactttggaggagggtaatkttgtctttaattatgttgagtagatccacgttgatatggctagccaatgacaactgtgtggtcacgcgatcatcttagaacctgtactttttacatgatttgcattttccatgaggagatgtttccattgaagcttcatttaagtgattagattctaaatattgttgggaggggggctaatgactggtgactgtgtgtctattacttgtgtgatggttatgagaatttagggcttcagtcaaggaaaggtggatgcagcagagtggagataagtctggccaaagaaaaggaggcccctgcttgagaggttgatgatttcactgcaaaatat

SEQ ID NO: 138409 - DNA, 422 bp, Homo sapiens
gagcaaggagggaaaagggctgcattgtaacaaaatcttaagtcgtagagggtttttttaatatatagttttactttggaggagggtaattttgtctttaattatgttkagtagatccacgttgatatggctagccaatgacaactgtgtggtcacgcgatcatcttagaacctgtactttttacatgatttgcattttccatgaggagatgtttccattgaagcttcatttaagtgattagattctaaatattgttgggaggggggctaatgactggtgactgtgtgtctattacttgtgtgatggttatgagaatttagggcttcagtcaaggaaaggtggatgcagcagagtggagataagtctggccaaagaaaaggaggcccctgcttgagaggttgatgatttcactgcaaaatat

SEQ ID NO: 138410 - DNA, 422 bp, Homo sapiens
gagcaaggagggaaaagggctgcattgtaacaaaatcttaagtcgtagagggtttttttaatatatagttttactttggaggagggtaattttgtctttaattatgttgagtagatccacgttgatatggctagccaatgacaactgtgtggtcacgcgatcatcttagaacctgtactttttacwtgatttgcattttccatgaggagatgtttccattgaagcttcatttaagtgattagattctaaatattgttgggaggggggctaatgactggtgactgtgtgtctattacttgtgtgatggttatgagaatttagggcttcagtcaaggaaaggtggatgcagcagagtggagataagtctggccaaagaaaaggaggcccctgcttgagaggttgatgatttcactgcaaaatat

SEQ ID NO: 138411 - DNA, 422 bp, Homo sapiens
gagcaaggagggaaaagggctgcattgtaacaaaatcttaagtcgtagagggtttttttaatatatagttttactttggaggagggtaattttgtctttaattatgttgagtagatccacgttgatatggctagccaatgacaactgtgtggtcacgcgatcatcttagaacctgtactttttacatgatttgcattttccatgaggagatgtttccattgaagcttcatttaagtgattagattctaaatattgttgggaggggggctartgactggtgactgtgtgtctattacttgtgtgatggttatgagaatttagggcttcagtcaaggaaaggtggatgcagcagagtggagataagtctggccaaagaaaaggaggcccctgcttgagaggttgatgatttcactgcaaaatat

SEQ ID NO: 138412 - DNA, 522 bp, Homo sapiens
taaaaatctgtattcatatttcttaatattatgtcatacttaacagatttaaaaatatataaagggcaattaatgcttctaggaaccaaaaaatcagagattaagcactataccacctcatctacattacaaactgatagttyagtaaagaccaccactacctttaaaggcactcagaagaccacaatgagctatacagtaaattaaacaaatacaccatttttatcagaaatataaaatgcatacagcacacacgccataaagaaagcaaaaattccaagaggttaatcagttaagaactcagcaaatcatggtctctctagagataatgtaatcagcaatccatcagaaaacaattatcattacattcaaaagcaaaaaggtagccaggtacgatggctcacgcctgtaatcccagcactttgggaggccggtgcgggcagatcacgaggtcaggagtttgagaccaccctagccaacatggtgaaacctcctcatctctactaaaaatacaaaaattag

SEQ ID NO: 138413 - DNA, 522 bp, Homo sapiens
taaaaatctgtattcatatttcttaatattatgtcatacttaacagatttaaaaatatataaagggcaattaatgcttctaggaaccaaaaaatcagagattaagcactataccacctcatctacattacaaactgatagttcagtaaagaccaccactacctttaaaggcactcagaagaccacaatgagctatacartaaattaaacaaatacaccatttttatcagaaatataaaatgcatacagcacacacgccataaagaaagcaaaaattccaagaggttaatcagttaagaactcagcaaatcatggtctctctagagataatgtaatcagcaatccatcagaaaacaattatcattacattcaaaagcaaaaaggtagccaggtacgatggctcacgcctgtaatcccagcactttgggaggccggtgcgggcagatcacgaggtcaggagtttgagaccaccctagccaacatggtgaaacctcctcatctctactaaaaatacaaaaattag

SEQ ID NO: 138414 - DNA, 564 bp, Homo sapiens
atccatcagaaaacaattatcattacattcaaaagcaaaaaggtagccaggtacgatggctcacgcctgtaatcccagcactttgggaggccggtgcgggcagatcacgaggtcaggagtttgagacsaccctagccaacatggtgaaacctcctcatctctactaaaaatacaaaaattagctggatgtgtggcaggtgcctgtaatctcagctacttgggaggctgaggcaggagaatcgtttcaacctgggaggcgggatttgcagtgagccgagatcacgccattgccctccagactgggagacagggcaagactctgtctcaaaaaaacaacaacagcaacaacaaaaaagttctttgaaatatttgatacagaacactataaaaattaaagaaagaaatactgtaaaatcccaaaccaattccacctctgggaagatcctaaagaccttttgtttgtgtaaagttatctaatgagaaatagagaaattaagttattctaatatcacactttttttgaaaaagaagctttcagtggacggtactacaatattcaattaa

SEQ ID NO: 138415 - DNA, 570 bp, Homo sapiens
gtaatcagcaatccatcagaaaacaattatcattacattcaaaagcaaaaaggtagccaggtacgatggctcacgcctgtaatcccagcactttgggaggccggtgcgggcagatcacgaggtcaggagtttgagaccaccctagccaacatggtgaaacctcctcatctctactaaaaatacaaaaattagctggatgtgtggcaggtgcctgtaatctcagctacttgggaggctgaggcaggagaatcgtttcaacctgggaggcgggatttgcagtgagccgagatcacgccattgccctccagactgggagacagggcaagactctgtctcaaaaaaacaacaacagcaacaacaaaaaagttcttygaaatatttgatacagaacactataaaaattaaagaaagaaatactgtaaaatcccaaaccaattccacctctgggaagatcctaaagaccttttgtttgtgtaaagttatctaatgagaaatagagaaattaagttattctaatatcacactttttttgaaaaagaagctttcagtggacggtactacaatattcaa

SEQ ID NO: 138416 - DNA, 574 bp, Homo sapiens
actgcaacacttaagctcaccctaatagcaacggaatgcagctacgaagttatgacagtagcctataacgtactacagttaattttatgcagttgtgatttaatatggcaaccttatgtttgtttacatttccctcaactgcaagtggtgtcatgtgtgatttgtaactgtgtgtctaagttttracaagttttgacctttttataatagatttgtgtatatcttatggtactaaacgatgaaaatagactagtatgtatatacattttatgccctcttgacagacttttttctccattttttttggtatttgtaaggcaatgcagtccatcttagaatgctttcaaattgtcacatatcttaaaaaaattttccaatatattgatttgaaaaaaatctatgtataaatagacccacgcaattcatacccatgttgttcaagggtcaactgtgtagcaaatcaataatggcttccttctacaggagaagataaatggttatgtttatttttactttatgaatcatgtgatttgaaatttttacctgtggtgctttataaacaataaaacaacag

SEQ ID NO: 138417 - DNA, 574 bp, Homo sapiens
actgcaacacttaagctcaccctaatagcaacggaatgcagctacgaagttatgacagtagcctataacgtactacagttaattttatgcagttgtgatttaatatggcaaccttatgtttgtttacatttccctcaactgcaagtggtgtcatgtgtgatttgtaactgtgtgtctaagttttaacaagttttgacctttttataatagatttgtgtatatcttatggtastaaacgatgaaaatagactagtatgtatatacattttatgccctcttgacagacttttttctccattttttttggtatttgtaaggcaatgcagtccatcttagaatgctttcaaattgtcacatatcttaaaaaaattttccaatatattgatttgaaaaaaatctatgtataaatagacccacgcaattcatacccatgttgttcaagggtcaactgtgtagcaaatcaataatggcttccttctacaggagaagataaatggttatgtttatttttactttatgaatcatgtgatttgaaatttttacctgtggtgctttataaacaataaaacaacag

SEQ ID NO: 138418 - DNA, 584 bp, Homo sapiens
taacagatttcaaatcactctctaaacttactgttgaccttgtgccttccaacattaaaaagaaatagagacaggccaactgggaggcaggcaggcaggcaggcaaacagataccaactaccatgaaaaaaattattcttctaggccaggtgcagtggctcatgcctgtaatcccagcactttggggaggccgagacgggcagatcacctgaggtcgggagttasagaccagcctgaccaacatggagaaaccctgtctctactaaaaatacgaaattagccaggcatggtggcgtatgcctgtaatcccagctactcgggaggctgaggcagggggattgcttgaacccaggaggcagaggttgcagtgagccaagtttgcgccattgcactccagcctgggcaacaagagcaaaactctgtctcccaaaagaaaaaagaaaaaattattcttctgaataacatctttgaagccttaatattcaatctatttatatatgtcttacttatctatgtaaaaaaaacagtaatacttcttgtaaaatagtccatgtacaactccccaagaaattatgtgaagccag

SEQ ID NO: 138419 - DNA, 567 bp, Homo sapiens
tccatattactctactttttcagatttaatgtcccaataaccaatttgtagattctagcctctattctaaagtccaaaaatgttccccactacgtacataatgaagataatgggaagaataaaagtcaaaaacctccataacttggccacaacttacataatctatgtctttataaaaataccacactcaaatagtctgtgtttcacgaacatactatgtccattcttaaccacgtgcatgaaatacttcacttagaatgtcctcccttctttcagaagcttgctcaaaaactgcctctctttaggaagtcacttcaaatcactatacttacaatgcttgctgatggaaatgtctgaaacagaaattctcagcgactgtgtagcactactgattttatgcatagctgttcttattacatattgattgtccaatggctaggatctagtacagaagtggcatttaataaaggtataatgatactgatgatgaataatatagtttcatagccagycactatatcataaatacccttaagctaagtttaccacattagaatttctgaattc

SEQ ID NO: 138420 - DNA, 487 bp, Homo sapiens
ccaaaccccaaaaaagtaatatacttacaagtgctttaagtgatgtacaagggacccaagtttaccttatttgttaatttcacactctaaacccatgagaggtgtgacctctctgtaaggaaacaaaagggtgataggctcttttccacgtgattttagccagctgtattcaattcaccagtccccattatgagacacattcctgaataaaagcttttcatgatcatacaagtttaggatatgctggcggagrgatcactgccctaagacactaataatcttggttaggaacacaaaagcaagacacaattacagtttacagaatagagacaataatgaatatgtgcacttaaggaaagcattaaattctaatagctctggagtcacaaatcgcaaccctgaacagttactagctgtgtgactttgaaaaaattataacctctcagctttaatattctcatttataaaacgagttttgttcatatct

SEQ ID NO: 138421 - DNA, 358 bp, Homo sapiens
ggacttggatctttagctatgcaagaaatgtgtattgatataattttgtacccatacaacctagtgaacacatttctacttcttatggaacactggtaagtggctcaacccatttatctgaccctttaaagatttgtttaaagattagggggaaggaaaatcagttgtctcctattgtcaaagagacaacttcttttctcctttatcaaacaattcatattctcatttcaattcaaaaatattgctgagcacctacaatgcactacaggggagacaataacaaagaggacgtgattcttgcacttaaagagcattatcagaaytataatcactgccctttgggtaacaccccaaagaa

SEQ ID NO: 138422 - DNA, 536 bp, Homo sapiens
ggcttgtgaaaagaatgcataaatttaatcctcataacaactttgccaaatgatattcttatccttcctttcagatgtggaaattgaggctcataaaggttaacatccccaaataagggtctacgtccaaatcctrtgctcttaagtcctatattgtctcccaaatgaagagggtcttctcgtgaaaatggcctggaagtggtatagggagctaaagatgataaaaacctatctcctggctttggcttatgaggtatggacaaagaacaggctctgttggagggaactgaaaatgaagtaagctccttggggtttcaattttaaaagatgtgatggagtgccctgttaaaaggttgagggcacagaggaagtgggtttgcagataaataggaatgagttaggagactggacagctgtaagaaaatgagcaaggagagtggatgagacttctcagcagccatggggataaaaggatgaatgcattgttgactgaatgcaagtgtacacttaagtatttagtgactgtgtgaacaaga

SEQ ID NO: 138423 - DNA, 536 bp, Homo sapiens
ggcttgtgaaaagaatgcataaatttaatcctcataacaactttgccaaatgatattcttatccttcctttcagatgtggaaattgaggctcataaaggttaacatccccaaataagggtctacgtccaaatcctatrctcttaagtcctatattgtctcccaaatgaagagggtcttctcgtgaaaatggcctggaagtggtatagggagctaaagatgataaaaacctatctcctggctttggcttatgaggtatggacaaagaacaggctctgttggagggaactgaaaatgaagtaagctccttggggtttcaattttaaaagatgtgatggagtgccctgttaaaaggttgagggcacagaggaagtgggtttgcagataaataggaatgagttaggagactggacagctgtaagaaaatgagcaaggagagtggatgagacttctcagcagccatggggataaaaggatgaatgcattgttgactgaatgcaagtgtacacttaagtatttagtgactgtgtgaacaaga

SEQ ID NO: 138424 - DNA, 536 bp, Homo sapiens
ggcttgtgaaaagaatgcataaatttaatcctcataacaactttgccaaatgatattcttatccttcctttcagatgtggaaattgaggctcataaaggttaacatccccaaataagggtctacgtccaaatcctatgctcttaagtcctatattgtctcccaaatgaagagggtcttctcrtgaaaatggcctggaagtggtatagggagctaaagatgataaaaacctatctcctggctttggcttatgaggtatggacaaagaacaggctctgttggagggaactgaaaatgaagtaagctccttggggtttcaattttaaaagatgtgatggagtgccctgttaaaaggttgagggcacagaggaagtgggtttgcagataaataggaatgagttaggagactggacagctgtaagaaaatgagcaaggagagtggatgagacttctcagcagccatggggataaaaggatgaatgcattgttgactgaatgcaagtgtacacttaagtatttagtgactgtgtgaacaaga

SEQ ID NO: 138425 - DNA, 601 bp, Homo sapiens
tggagttctgcctggcggtggagtggagagagccctgctgctatcctctcaggggagcaggatagggtacccagcaatggcacacacagactggttccaggttaccgagctggtcctggctgcaagccttgttgccgaggagaagccataactgtagcagctctcctcctgccacaggcctgtgacagggaagaacacaattccagggcctagtggtgaggcactttccacaactctggcctgtggaggcccctatctcactccagagcaagcacttcagtctctggcctgagacaaacatgtctgcgtggccacactgccaggatgccaaagaatggctgactttgcatrtgcctagattaaaaatggcatcctcctctcaacactgggtctgggaaattgactgcagcttttcctgatgtctttccctcatagcatctccaagcctctccccaagttagctccagagcttgggaggaacaaagttttctttctcagcctggggtgcttggagccccagtggaagggtgagttacagagggaggctctctgcctctctcacctactggggcttcactcacttttatcagctggacaccat

SEQ ID NO: 138426 - DNA, 539 bp, Homo sapiens
aagggagcatgggaagggaagtggaagagggagttacaaatacctactatggcctcataaattgtgtagactgcaaccatcgtgcatattttctaatgtttctctttccccatcttccttgaggtctttgaggatttgaacctaattatggaataggtcagggtctggaagtgataagtagtgagaattaacatttaggagattcgtcatcttcctgcaaataaaccacctcaggtgaaattattacaggttatcagatggaagaggaggactgctcctactaacaactaagactcagtggagtttgttaattcaggcaacaattggtgatattttaaggaatgttttgtcattacattgtacaaattatcagtatcctattttccattgatagtgaggccattactgatttcaagtctaatctatgtgtatgttaacatcygcaatgtgcttatactatgtgatagatttctttggaggaagggaaacacaagtgaaggatttgtagttggattcattagaacctacccaaatatttc

SEQ ID NO: 138427 - DNA, 592 bp, Homo sapiens
gaattctattagtgaccaaacagtacatttttatgctatccagctgttttacttcaatggccaaagaggacgtgtgagaataaatcatcatcatttgtaaaaagtccttgggggactcacatgatagtctaactgtcagtataatctctggcatccttacccaaaacagaagaatgttacagatatgaggataaaaagggccatcctttgtaacatamaagagactctcaatgaaaaatccggcaacctctaaaaatataaaactgcattaaaattattaataatagttaaattttgagtgtttactatttgtcagttactgggctaagcatgtaacataaattttctaatttaatttttatagctttccttgccgtatcctaaaacacccttcccttaagatctgatcagctattcatctgatgaccatgtgcttccttgaaagctgactttaccccacagattgaaggacagagtgtgcattacctaggataggccagttggtatattctacctactcatacggttcaggaataagataagccagtccagtcagagtgaaccaaaccaggtgaagcaaaatacatcctaa

SEQ ID NO: 138428 - DNA, 592 bp, Homo sapiens
gaattctattagtgaccaaacagtacatttttatgctatccagctgttttacttcaatggccaaagaggacgtgtgagaataaatcatcatcatttgtaaaaagtccttgggggactcacatgatagtctaactgtcagtataatctctggcatccttacccaaaacagaagaatgttacagatatgaggataaaaagggccatcctttgtaacatacaagagactctcaatgaaaaatcyggcaacctctaaaaatataaaactgcattaaaattattaataatagttaaattttgagtgtttactatttgtcagttactgggctaagcatgtaacataaattttctaatttaatttttatagctttccttgccgtatcctaaaacacccttcccttaagatctgatcagctattcatctgatgaccatgtgcttccttgaaagctgactttaccccacagattgaaggacagagtgtgcattacctaggataggccagttggtatattctacctactcatacggttcaggaataagataagccagtccagtcagagtgaaccaaaccaggtgaagcaaaatacatcctaa

SEQ ID NO: 138429 - DNA, 592 bp, Homo sapiens
gaattctattagtgaccaaacagtacatttttatgctatccagctgttttacttcaatggccaaagaggacgtgtgagaataaatcatcatcatttgtaaaaagtccttgggggactcacatgatagtctaactgtcagtataatctctggcatccttacccaaaacagaagaatgttacagatatgaggataaaaagggccatcctttgtaacatacaagagactctcaatgaaaaatccggcaacctctaaaaatataaaactgcattaaaattattaataatagttaaattttgagtgtttactatttgtcagttactgggctaagcatgtaacataaattttctaatttaatttttatagctttccttgccrtatcctaaaacacccttcccttaagatctgatcagctattcatctgatgaccatgtgcttccttgaaagctgactttaccccacagattgaaggacagagtgtgcattacctaggataggccagttggtatattctacctactcatacggttcaggaataagataagccagtccagtcagagtgaaccaaaccaggtgaagcaaaatacatcctaa

SEQ ID NO: 138430 - DNA, 495 bp, Homo sapiens
aagtctgatcacacccccattcttgtctggtcattctcttcctccacagagacacatagctattatcmatttggtaagtaacctacgatttttttccctatgtatttcttatatatgaacaaatgtgtctatttatctgatatatattttatatataagaatatatacaactatacatatataaaattcacactctattccatggcctgcaaggctctatatcacctggcctagctgacctctttgactttatctcccatcactcttcccgcactcgttccactagccatgggggcttcatgccattcctccaaaattttaagcttttacaatttcaattaatcataaaacttctaaggtaagaagaaaaactactagataaggccactgcctgctcaatcactgctttttctctaagggaatctgctctgcccagagactctcttttcctttccccaggaggggctgaactagggattggcaatggacccaagg

SEQ ID NO: 138431 - DNA, 656 bp, Homo sapiens
ggatctactattatggtgtctggaggatggtggccctcttctcacggctccaccaggtggtgccccagtaggaaatctgtgtgagggctccaaccccacatttcccttccacgcttctctagcagaggttctccatgagggccctgcccctgcagcaaacttctgcytggacattcaggtgtttccattatatcttctgaaatctaggcagaggttctcaaacctcaattcttaacgtctttgcacccatgggctcaacaccctgtggaagctgccaaggcttggggcttccaccttctgaagcaacagccccagctataccttagccccttttagtcatggctgcagtggctggaacgcagggcaccaagtctctagaccacacacagcatgggtagcctgggcctgccccacaaaactatgttttcctcctaggcctctgggcctgtgatgggagggcctgctgtgagggcctctgacatgccctggagacattccacccccacccccccaccgccctccccactctgttgtcttggggattaacatttggctcctcattacttatacaaatttctgcagctggcttgaatttctcctcagaaaatggaattctcttttctatcgcattgtcaggctgcaaattttctgaactt

SEQ ID NO: 138432 - DNA, 446 bp, Homo sapiens
cttaaggcaaaatatcagtcttgtatcttgttgcctgaaatctgactacattaagaacaaaagttatttctacacataaaactttggacccacagaatttggtcccacatataccaagaaatatgtgtggtttttaattcattcattagcattaaatttttcattgtaatcacctaattctaaaagaaattcctattattcaagtgcctgaagagcccaagaagatcatcccagagaagaaagttcctgtcatcaaaaaaccagaagcaccgcctcctaaaggtactcatgttaaaatgaatacttcatttttgtggtgtctacaattttacactcttcttattgtgtgttgtgttgtattatatgtttgttaactcttacctatatgttacagtgttgaataaayttgtatgtatatcttacatctcacaactttgtattattaa

SEQ ID NO: 138433 - DNA, 491 bp, Homo sapiens
gctacagctccgcactgatttccctttccagygttttacacattgcttgctccctaataatatttactgaaaatcaagaaaggagtgatgttgatgctgtagagtgttaaaaaggcatcaaagacagaatctccatatataagcacctaacaatcaaatggctgaatatacataagtcaactgacaataggcatgcatatacatgacatatgcatctgcatttataattctatatttaatttaaaagcttcccctatacatctgtctgggacagcagtaaagtaagcaatggagacataaaacaaagacagtatctcaccacaatgtatcatataaaataaatgactcagtagtctaatacaagtgatattattcacaacactttttgaagagtatggtacttttcaaaaaccagtaagtactgtttttcttaaagatgcaaatgtagtaaatagaagacagaatgttattctagatctaagtaggaagag

SEQ ID NO: 138434 - DNA, 649 bp, Homo sapiens
gaattctaataaaatcttattcatctaatatttttctttcatggattatgcttttggtgttacatctaaaaactcctcactaaacccaaggtcacctagattttctcctatgttttcttttagttttatccttttgcattttatacttaggtctatgatccattttgagttaatttttgtgaaaagtctaaagtctatatctaggttattttattatttatttatttaccatataaacaaccagttgttctaccagcaccattagttgaaaagactagcctttctccattgaattgtctttgctcctttaccaaaaataagtagactgtattttgtgggactatttctgggctccctatcctattccattgaaatttgtgtgcattctttaatcaacactattttatgtcttgatcactatrgctttaaagtaagtcttgaaattggataacctgagtcctcaaattttattcttcttcttcagtattgttttggctattctagaagtattccctttccatttaaactttaaaatcagtgtttcagtctcagtaaaatagctttctgggatatgaattgagattgctttaacatgtatgattttccttgtccctgaaaaacttcttttaccatttcttgtaaagtaggt

SEQ ID NO: 138435 - DNA, 294 bp, Homo sapiens
attccaattacagatatgtcacaccctttgaaattgacctatagttcttggatgctctgtttggttttattttttctttggagggggggctggtctttttgtttgtttttttcagtcttttttttctctttgcatttcagttcagaaagtttctattgacctgtcttccagctcactgattcttttcttgactgtgtccagcctagtratgagccaatgaagaccattatgtatttctagcattttaaaaattatttcttagtgtttttacctctttgcttacattattcatct

SEQ ID NO: 138436 - DNA, 513 bp, Homo sapiens
gaaaaaggcatttcttcctcatgtaaaatttttaagttagtattgtatttatttctcaattataaaaactacaacaaatataaagtcatttttcataaaattcataaatcaaattattgaacataaaataatacaaaattcaaaattgtaatcacaataattaagaatatcagctaactacaatatagtaatgtgttataaaataattacatatcatgcttccttggcaaataaatttattacaacaatttcartatttatttgtaactgtgtctcattctatagaaatgaccactgggttagactacatatcttatgatattctagtccttaagtcatgtttaataaattttcaatttgaaaaaacattttccacaggttactgatattcacaaaattaaatacaagccgagagccagataagtatttgaaactgtgtgcagtaaattcaggttgtatgattatatcccatctaatgttattcctcactgtgtataccagttcatttcaatt

SEQ ID NO: 138437 - DNA, 511 bp, Homo sapiens
taacaaataaaacgaagttttaaaagtattgtgcatatatatgtataaatgtgtgtatatatacatattttaaagggaaaactcagagtctagattaaacagatatgacctataaaattgatatcaaaaatattttcaatactttatgaaactttgttctttggaagttaattacatttcgcttaatatactgttaagaaaagagaagagtaactgacagctgttctycctcactagcaggccaacttcatgagtggtcatcacaaaaatgctcattaatttagatgaccactcatagtgttacagttttagacagcacactgcattgggaggggtatatgtaattacgttttgtgtgtgtgtattactagggatttgggaggtcaaataataactctcctgctctgtcttgaactgaaaccaaatgagcaataggacaggagcctctgtatacttggccgaatttttctacagagaggacttccactaaacctagaagaatgtgtttggt

SEQ ID NO: 138438 - DNA, 511 bp, Homo sapiens
taacaaataaaacgaagttttaaaagtattgtgcatatatatgtataaatgtgtgtatatatacatattttaaagggaaaactcagagtctagattaaacagatatgacctataaaattgatatcaaaaatattttcaatactttatgaaactttgttctttggaagttaattacatttcgcttaatatactgttaagaaaagagaagagtaactgacagctgttctccctcactagcaggccaacttcatgagtggtcatcacaaaaatgctcattaatttagatgaccactcatagtgttacagttttagacagcacactgcattgggaggggtatatgtaattacgttttgtgtgtgtgtattactagggatttgggaggtcaaataataactctcctgctctgtcttgaactgaaaccaamtgagcaataggacaggagcctctgtatacttggccgaatttttctacagagaggacttccactaaacctagaagaatgtgtttggt

SEQ ID NO: 138439 - DNA, 530 bp, Homo sapiens
ttgtgtgtgtgtattactagggatttgggaggtcaaataataactctcctgctctgtcttgaactgaaaccaaatgagcaataggacaggagcctctgtatacttggccgaatttttctacagagaggacttccactaaacctagaagaatgtgtttggttccctgtcacctctttatatgtgtgtgtatttgtgactaaatacaaaacctaccctgcctttcaggtgaacaccctgctgaatcatatagcttttattaaacatcagaacgattagaatgggaaggtacacatcaatgtgatagtctatattcccaccgaagttaaaaattcggtcattcaactmtacggagcatctgatattttgagtaattcacatagttgtgaacaagctattcaaggaccttatgctcacagggcttctacataaataatgctaaaagaaaagcattaagccttttcccaaaaatgtcctcattgtaagggtgtttcttcctcatatcttcaaagacactttcggttaaaaaccca

SEQ ID NO: 138440 - DNA, 550 bp, Homo sapiens
acataggtaaccatgtgtcatggggtttattgtacagattatttatcactcatgcattaagcctagtacccgttagttatttttcctgatctctctctcctcctaccctccaccctccaagaggccccagtgtgtgtggttcccctctatgtctccatgtgttatcatcatttagctcccacttataagtgagaacatgcagtattctgttttctgttcctatgttagtttgctaaggataatggcttctagttccatccatgtccctgcaaaggacataatcatatgatygcattcttttttatggctgtatagtattccatagtgtatatgtaccatattttctttatctagtctatcattgatggatatttaggttgattccctgtctttgctattgtgaatagtgctacagtgaacatttgcatgcatgtgtctttataatagaataatttatattcctttgggtatatatctagtaatgggattgctgggtcaaatggtatgtctgtctttaggtttctgaggagttgccacactgtcttccaca

SEQ ID NO: 138441 - DNA, 618 bp, Homo sapiens
tgatattgtagtcttgagtctgaagacaatatagaggtaaaattctttcattttcagaggacctcagtcttttttttttctcctaaggcctttaactgattggatgaggcccactcacattatggagkgtaatctgttttactcagtctactgatttgaatcttaaccataactaaaaaatactttcacagcagtatctagactgctgtctcaacaaacaactggatgccataccctagttaagtgaacacatgtaattaaccattgcagaaggataaaggttccaggtccctagtatttggggcctcccttccagctcccctttcttgcttctgtcctcaaacctcagtagcaacaccagtggagactaatggtagtgatggctgtaatcacagcaaatttagccatagaggctgcctgccacctgtcccatttagaagtttgttgacagtcacacagtctccatgagctttcagaatgggatgcctaatatcaacactaacattgctctgggacaaggggacagtagagaatatttgtctctctattttccccaaactcccctctcccaaatcctgcccaagatactgaaaactggaaatgcttcttattgatcat

SEQ ID NO: 138442 - DNA, 303 bp, Homo sapiens
aatatcaacactaacattgctctgggacaaggggacagtagagaatatttgyctctctattttccccaaactcccctctcccaaatcctgcccaagatactgaaaactggaaatgcttcttattgatcatgtgaccacttagaaaatttggaaacgtaaatgagatcttgttaaatacctaggcatctcaaaaaaaaaaagtgctactggtgcagggagggtattcattaaaagagtccttctaggcttttaaaaccaattagaattttctctgggtttgttatatagaaggagaaggaaatg

SEQ ID NO: 138443 - DNA, 547 bp, Homo sapiens
aagtgaacacatgtaattaaccattgcagaaggataaaggttccaggtccctagtatttggggcctcccttccagctcccctttcttgcttctgtcctcaaacctcagtagcaacaccagtggagactaatggtagtgatggctgtaatcacagcaaatttagccatagaggctgcctgccacctgtcccatttagaagtttgttgacagtcacacagtctccatgagctttcagaatgggatgcctaatatcaacactaacattgctctgggacaaggggacagtagagaatatttgtctctctattttccccaaactcccctctcccaaatcctgcccaagatactgaaaactggaaatgcttcttattgatcatgtgaccacttagaaaatttggaaacgtaaatgagatcttgttaaatacctargcatctcaaaaaaaaaaagtgctactggtgcagggagggtattcattaaaagagtccttctaggcttttaaaaccaattagaattttctctgggtttgttatatagaaggagaaggaa

SEQ ID NO: 138444 - DNA, 510 bp, Homo sapiens
ttttaaagccaggtatggtagcacacacctgtagtcccagctactcggaaggctggagtagagagatcacttgagcacaggagttaaaggttgcagtgagctgtaatcatgccactgcactccagcctgggtggcagagcaagaccctttaaaaacaataataataataaagaaaaaagaatgttaggattattttttctatttctgtgaagaatgccactggaattttcatagggatggactgaatttgtatattgctttaggtaatgtgaacatttaaacaatattaattcttccaatccatgaacataaaatatctttccatttatttgtatcctcttcaatttctttgaytgatgtttgatagtattaagtgcataggtttttcacctcctgggtaaatttatttccaagtttttttgacacttatcataaacgggattattttcttgatttcttcttcaggtaggttattatttatgtagaaatgccatgaatttttatatgttg

SEQ ID NO: 138445 - DNA, 550 bp, Homo sapiens
gtaagatgataaaggaagacttacactatcatcatcatcatcatcatcatcatcatcatcatgaccatcaccttcacaggctaccttaaacactttacatacattaactcatttaatttttacaacarcctgtgagataggtcatgttatcctcacctacagattaggcaactgaagctcagaaaggttaagtgacttgtccagggtcacacaactagtaagtagcaaattagagattgaatccagacatagcttaggtatctaaacccaaaggaggctcaagaaaatcaaagtttgatctgagtcttgaaggatgaataagatttcactaaatgcaaaggagattggtggcaaaaagtatgaagcaaaaagaaaaaggtaaagagtctactccagtctgcctggagtagaaaaaaatataagattggaaagataagctggtaccttttactggtaaccaaaacaaataaacaaaaaaaaccactgaaacttttaagcaaaaaatagacaagtcaaaatgacatttttttctgttctatgctgtttattt

SEQ ID NO: 138446 - DNA, 550 bp, Homo sapiens
gtaagatgataaaggaagacttacactatcatcatcatcatcatcatcatcatcatcatcatgaccatcaccttcacaggctaccttaaacactttacatacattaactcatttaatttttacaacagcctgtgagataggtcatgttatcctcacctacagattaggcaactgaagctcagaaaggttaagtgacttgtccagggtcacacaactagtaagtagcaaattagagattgaatccagacatagcttaggtatctaaacccaaaggaggctcaagaaaatcaaagtttgatctgagtcttgaaggatgaataagatttcactaaatgcaaaggagattggtggcaaaaagtatgaagcaaaaagaaaaaggtaaasagtctactccagtctgcctggagtagaaaaaaatataagattggaaagataagctggtaccttttactggtaaccaaaacaaataaacaaaaaaaaccactgaaacttttaagcaaaaaatagacaagtcaaaatgacatttttttctgttctatgctgtttattt

SEQ ID NO: 138447 - DNA, 646 bp, Homo sapiens
tgggcatctatatcacctgttgaactcactagattgtaggtgcttcaactcaaccactgtgattccaatgcacaccggtttgagaaacatgcgcccaggtattaaaatccatttggtgatgaactccccaccatactttctcaaggatttctagagtcattgggtgagacaacgatgttttttttaatggtgcctgtagtagattcctaatttctaaaaacccatataacaaataaaagcaaaaataatcacaaaattacaacatggtaaattcttactggttagtagattatattatctaaggaagtcatctatgactacaggggctatggttcaatcctagatcaagtattcctttgattaattgggaaacactgtaaaatttgtctttttattgttttccaagcactacaatttagtgtctggggcctgracctttgcatcattgactatggggatagagatctttaaaacttaaaagagcttttacttaaaatgtataccaacagtgtatgaaatcaagtgaatcaactaacagtgtggagatgtgaactgggttaatggggttgttaccgctatttggtaaagaatgactttaagactgaaatccaaagacagtcttgtgggtttttttgtctctcctttg

SEQ ID NO: 138448 - DNA, 546 bp, Homo sapiens
catcattcttatgcctttgcatcctcatagcttacctcacacttacaagtgagaacataaattatttgagtttttttaaattaatgattaaatctccttacttattcttgttctattcagattttctgtttctttatgatcctgtctttgtagactgtatgtgtttagaaatttatccattctttctaggctatccaatttttgatatataattattcatagtctcttatgatccttttggatttatttgtattcctgtggactttttataaaatgatgtcatctgtaaacagggagaatttcacttcttccttctygatttggatgcctttcttttcttgtatttcatgcctaattgctctggctaagacttccagtaccatgttgaatagaagtgatgagagtaggcttcttggtcatattgctgatcttttaaagaaaaagtttccaaattttcaccattgaatatggtgttatgatcagttgtaatgcttcctctttcatttctgattttatttatatgagttatctcttttttaatactta

SEQ ID NO: 138449 - DNA, 574 bp, Homo sapiens
ctctctggccctcagaaaacaaggtatgattgattcaaagctccattttcatgtcctgtgcaggcccaaatccttctccaaaataactataaattccactgaaggaaggcgtgaggtgtagggactgataggttatagatcacctctggctacagcctactacttcttcaatctactgatcatctcgacatcttacaggagctgcctctgctctgagtcacatcagccccatagcaaactcagcatctgtcttaatctcctcacacaggcaggtgcacattctctgtctctgtctctctctcacacagacacacatacacatacacactttacaaggaaatgagtaaatgtggtgttattttaagwtttgtccagatatggaggagggattttttaaagatttgcggggaccgctctcccaggtgcatttcaataattgccttgttgtttatctgacccctcagcctcaggccatcttgctcactccacttctcttcctccttctctctcttcatttcctctttctcaagaggagaaatatattcctgttattgcctcatgcaaagcagtttga

SEQ ID NO: 138450 - DNA, 381 bp, Homo sapiens
ggtgggttggtgcctcaccggggaagggcaaggggccagggaactccctcccctagcaaagggaagccgtgatggactgtgccatgaaggacggtgcwttctaacccagatactaggcttttcccatggtcttcacaacccacagaccaggagattcccctgggtgcctacaccaccagggcccggggtttcaagcacaaaactgggtggccatttgggcagacactgagctagctgcaggagtttcttttcatacaccagtggtgcctggaatgccagcaagacagaaccattcactaccctggaagaggggctgaagccaggtaaccaagtggtctagctcaacggatcccaccactacagagcccagcactggtttga

SEQ ID NO: 138451 - DNA, 381 bp, Homo sapiens
ggtgggttggtgcctcaccggggaagggcaaggggccagggaactccctcccctagcaaagggaagccgtgatggactgtgccatgaaggacggtgcattctaacccagatactaggcttttcccatggtcttcacaacccacagaccaggagattcccctgggtgcctacaycaccagggcccggggtttcaagcacaaaactgggtggccatttgggcagacactgagctagctgcaggagtttcttttcatacaccagtggtgcctggaatgccagcaagacagaaccattcactaccctggaagaggggctgaagccaggtaaccaagtggtctagctcaacggatcccaccactacagagcccagcactggtttga

SEQ ID NO: 138452 - DNA, 598 bp, Homo sapiens
ggagctaggggagggatagcattagaagaaatacctaatgtagatgacaggttgatgggtgtagcaaaccaacaaggcacgtgtattcctaggtaacaaacgtgcacrttctgtacatgtatcccagaacttaaagtataattatattaaaaaaaaagaaaaaaatgaacaagtaaaagaaaactaataaaaactctgccttaaaaaaaaaaacagaaatgcttatttttgaggggagttttgcttatatgcagaacatcataaggagataaattgcatgtttacagtgattatttcaggtgatatggttcacagtaacttttttttattaatgtcttattttccaaagttgctgcaccaggtatgtattagttttgaaaccagaaaatatattcttgaaaaacatgaatagatttcattttgtgtgataatatttatgtaaaaactcgggccgggcacagtggctcccacctgtaatcccagcactttggcaggccaaggcaggtggatcacctgaggtcaggagttcaagaccagcctggccaacatggcgaaaccccatctctactaaaaatgccaaaaaacaagaagaagaatg

SEQ ID NO: 138453 - DNA, 634 bp, Homo sapiens
ggttttcttgggttcttcagcttttcccaattttctccaccccacattcagagctctatttgccttcatctgcagaatctctgtaggaagcagttttgaaaggcactgctgagtcactgagttgtactgtggtctgactctctgatactttaaattctgatttgaagaaattgcttgaaagcactgatatctttttctcacygctggcaaatggcaaagttttcactgagtgaaaagcaatgtttcgtaagtgaaaaatataagaatcaatttgtccatcattccattatcctgcccaaacacttaacaattaagggacaggccagaaggcttcagttaattacataaaaggttttttttgttgtttgtttttaagttaggtttaaagagtccatgagctgctgacagtctaagaaaaattctttcaggcatttagctggaagttgtcacagtttgaatggatggtttattcaaaatgaagattaaatttctttatagcaattctaatttcatggaactttaaatcttaaaaaatttaatgaaacaccctaatcttatagaaaataaaagtaggagccagtgaatagaagtgactttcccaagttcccatagctaaatatatggcaaaactagg

SEQ ID NO: 138454 - DNA, 634 bp, Homo sapiens
ggttttcttgggttcttcagcttttcccaattttctccaccccacattcagagctctatttgccttcatctgcagaatctctgtaggaagcagttttgaaaggcactgctgagtcactgagttgtactgtggtctgactctctgatactttaaattctgatttgaagaaattgcttgaaagcactgatatctttttctcaccgctggcaaatggcaaagttttcactgagtgaaaagcaatgtttcgtaagtgaaaaatataagaatcaatttgtccatcattccattatcctgcccaaacacttaacaattaagggacaggccagaaggcttcagttaattacataaaaggttttttttgttgtttgtttttaagttaggtttaaagagtccatgagctgctgacagtctaagaaaaattctttcaggcatttagctggaagttgtcacagtttgaatggatggtttattcaaaatgaagattaaatttctttatagcaattctartttcatggaactttaaatcttaaaaaatttaatgaaacaccctaatcttatagaaaataaaagtaggagccagtgaatagaagtgactttcccaagttcccatagctaaatatatggcaaaactagg

SEQ ID NO: 138455 - DNA, 615 bp, Homo sapiens
aaaggggctcaagaacaatatgagagtagcaatagaaaatgaagaagctctatattctttgtacatttcagaaatgacactttaaatgatcaacacttatacatcttttttttttaatttgggaccatatttttcatataatatgttcccttaagattatgtgaaaaatatcttttctaataacattcctccaaagtgtgtttttcatgaccaatataatttcatagaatgagcataatttacttcatcaattttttataattggatatttaagctgtgtccaayttttactgttatgattaacgatacaaagactatttttgttgcatctctacttctttacagtacatttttcattgtggaatttctgaaatgaggcaatacatggtttgaagcgtttaatatatattatcaagttatcctctagataaagttcaaactcgttagaaaaataaacccattatgatctggttagtgtttccctgtacagcttaaatactctctatcatccatctgcctgaaaccatatactttatctagacactatgttgtactacctttagaaccttgcacttggtctcccctctttgtgaaacattttcccgtgttatttca

SEQ ID NO: 138456 - DNA, 585 bp, Homo sapiens
gatgtaggatcattcatatttggatatttcaggatgaggcagaggggctggatatttccagaagtggaaaaaaaggcatggagacagaacatttccatgtaaataagaaaaacaatacttttttaagtttagctggagcacacagcatggaaaaaggaataatgaaaccatgagaaataagggtgaaaaggttactcaaaaccaaattaaggagggtcttaacactgccacgcagagaactccaaataaagatggtaacaagaaaagaagacaagagaaataaacactgcacttagccaacaccttgaccactggtctgtctatgtagcttccaatcatcaaattcattttccaagattaggaggtgggcagaaacaggaataaagttaaaattgtcagccaaaaattgattttttccacttgaagggcttctttttttaatttgakatttttttacctttggacacatatcttgatttgttttgcttactctgccttatattatagtaaatataattagacactgcaggcaggcaacgatggaagtttgaggcaggcaatgatggaagccaggaaaccaggaca

SEQ ID NO: 138457 - DNA, 509 bp, Homo sapiens
cctcccctgaattctgtccagcagagcaaagcctctgactctcatgagatgttgctataacaaaggaaagaggtggcttacatctaattggctaatttcttccaaagatccaagcaagaagtgtctaactatgattggcttaaccattcaactctcttatgaagacaggttgaatccttttggctggatctaatgaccagttcaaagttcacttttgattaaaaactttgagctaaaatcttttcacaatctgaagaccaaccattaagatgaccttgtcttttgtctttcttggatggkgaaaaaccatcttcagaggaagatgttcatactcaggctaaaatgatccttattgtatttgatctgtgtacaacacacacacacacacacacacacacacacacacacacaaaacaaccagaagagtattgctcaaatgttatagatgacactctggtgaagttatgtaacttgccccatgcccaaccgcaaacagcagctaagccaga

SEQ ID NO: 138458 - DNA, 517 bp, Homo sapiens
ttatggtgcctcccctgaattctgtccagcagagcaaagcctctgactctcatgagatgttgctataacaaaggaaagaggtggcttacatctaattggctaatttcttccaaagatccaagcaagaagtgtctaactatgattggcttaaccattcaactctcttatgaagacaggttgaatccttttggctggatctaatgaccagttcaaagttcacttttgattaaaaactttgagctaaaatcttttcacaatctgaagaccaaccattaagatgaccttgtcttttgtctttcttggatggtgaaaaaccatcttcagaggaagatgttcatactcaggctaaaatgatccttattgtatttgatctgtgtacaacamacacacacacacacacacacacacacacacacacaaaacaaccagaagagtattgctcaaatgttatagatgacactctggtgaagttatgtaacttgccccatgcccaaccgcaaacagcagctaagccaga

SEQ ID NO: 138459 - DNA, 613 bp, Homo sapiens
gggaaggccagccactgttgtaaggacactcagatggcccatggagaggcccatgtggagagaaactgagtcagcattacatgagtgaaccatcttggaagcagatctagcctcattcaagccttcagatgactgcagccctgacatctttagagatcttgaaacaaaaccagctaagccactctcacacttctgactcagagaaactatttataggaatcccacagaaatgttgagaaaattctattcacagaayactaaaaggttcagaaaccataaaaacaaaaaaacacttttggacctccaaattctataggcaggaagcaggtagagaagactactcaccacccagctaaggcactcccagtttattgacgcacataattgtgtgagataataacttttttattgttttaaacctttacttcttgggtaatttgttacatcacaacagataattcatattcttgtactgtgacatctgatatattccagacttgcaggaaactaacagtaaaaagatccccaaatttaggaaaacactgtttttacagtagccttgataacaagtagccaccagaactagttttaaacatgttcaatcaacaactgc

SEQ ID NO: 138460 - DNA, 613 bp, Homo sapiens
gggaaggccagccactgttgtaaggacactcagatggcccatggagaggcccatgtggagagaaactgagtcagcattacatgagtgaaccatcttggaagcagatctagcctcattcaagccttcagatgactgcagccctgacatctttagagatcttgaaacaaaaccagctaagccactctcacacttctgactcagagaaactatttataggaatcccacagaaatgttgagaaaattctattcacagaatactaaaaggttcagaaaccataaaaacaaaaaaacacttttggacctccaaattctataggcaggaagcaggtagagaagactactcaccacccagctaaggcactcccagtttattgacgcacataattgtgtgagataataacttttttattgttttaaacctttacttcttgggtratttgttacatcacaacagataattcatattcttgtactgtgacatctgatatattccagacttgcaggaaactaacagtaaaaagatccccaaatttaggaaaacactgtttttacagtagccttgataacaagtagccaccagaactagttttaaacatgttcaatcaacaactgc

SEQ ID NO: 138461 - DNA, 613 bp, Homo sapiens
gggaaggccagccactgttgtaaggacactcagatggcccatggagaggcccatgtggagagaaactgagtcagcattacatgagtgaaccatcttggaagcagatctagcctcattcaagccttcagatgactgcagccctgacatctttagagatcttgaaacaaaaccagctaagccactctcacacttctgactcagagaaactatttataggaatcccacagaaatgttgagaaaattctattcacagaatactaaaaggttcagaaaccataaaaacaaaaaaacacttttggacctccaaattctataggcaggaagcaggtagagaagactactcaccacccagctaaggcactcccagtttattgacgcacataattgtgtgagataataacttttttattgttttaaacctttacttcttgggtaayttgttacatcacaacagataattcatattcttgtactgtgacatctgatatattccagacttgcaggaaactaacagtaaaaagatccccaaatttaggaaaacactgtttttacagtagccttgataacaagtagccaccagaactagttttaaacatgttcaatcaacaactgc

SEQ ID NO: 138462 - DNA, 550 bp, Homo sapiens
gatttttagaaagacctagaatactgatcaaagtaacactttcaatcaagcagaaatccacaycaatatttgtaggtgggcagttctcaaactttagagagtatcataaatacctgagggactattaaaagtcattctacttagtagaaagaaataggaaggagcaagaaacaagttgggagacaggttggatcacccaaagacttactcatggtgacgtgacttagaaggtggtgcagaggtaggtgcagccctgggggtcatgagaagtttcctgaagtcttcattggtgagttttgatctagaagaaaaggcaaagattttaaatattaggactcaataagaaatgaaaaaggaacaagtaaaaatcatgattaaattaacagaaatcagggaaatacaaattaaaacaaagatatgacactgtttttttttttttgagacggagtctcactgtcacccatattggccaggctggtcttgaactcctgaccttgtgatccacccacctcggcctcccaaagtgctgggattatagggatgagccacc

SEQ ID NO: 138463 - DNA, 531 bp, Homo sapiens
cttgcatcatagggtagttgtaggagtatgagaacatgyatgtagaagagcttggcatggtgcctgggcatgtggtcaccatgtcatatattttagctattgttatgatctttgtgtttcattctttgtagactatatatgtgtctatctgcaggtgctcacagttctgtgcaatgttgcagaaaagggtcctgcttactgccagcggctgtggccagggcccctgcttcccgccttgctgcacacactagccttttctgacactgaagtagtaggccagagtttggagctgctgcatctgctgttcctgtatcagccagaggtataggtttctggcccacatcctcagtcacccctgttctgaagccacacagtggctcccttcccatccagtcctaactatagttgtttctctgggcctggctaacctatataggttccatgtcagaaacttcatcctcttgttggggaatgcaccctctggagtaggctgacccatgaggctgtgggaattgagtcttaggacacaga

SEQ ID NO: 138464 - DNA, 531 bp, Homo sapiens
cttgcatcatagggtagttgtaggagtatgagaacatgtatgtagaagagcttggcatggtgcctgggcatgtggtcaccatgtcatatattttagctattgttatgatctttgtgtttcattctttgtagactatatatgtgtctatctgcaggtgctcacagttctgtgcaatgttgcagaaaagggtcctgcttactgccagcggctgtggccagggcccctgcttcccgccttgctgcacacactagccttttctgacactgaagtagtaggccagagtttggagctgctgcatctgctgttcctgtatcagccagaggtataggtttctggcccacatcctcagtcacccctgttctgaagccacacagtggctcccttcccatccagtcctaactatagttgtttctctgggcctggctaacytatataggttccatgtcagaaacttcatcctcttgttggggaatgcaccctctggagtaggctgacccatgaggctgtgggaattgagtcttaggacacaga

SEQ ID NO: 138465 - DNA, 531 bp, Homo sapiens
cttgcatcatagggtagttgtaggagtatgagaacatgtatgtagaagagcttggcatggtgcctgggcatgtggtcaccatgtcatatattttagctattgttatgatctttgtgtttcattctttgtagactatatatgtgtctatctgcaggtgctcacagttctgtgcaatgttgcagaaaagggtcctgcttactgccagcggctgtggccagggcccctgcttcccgccttgctgcacacactagccttttctgacactgaagtagtaggccagagtttggagctgctgcatctgctgttcctgtatcagccagaggtataggtttctggcccacatcctcagtcacccctgttctgaagccacacagtggctcccttcccatccagtcctaactatagttgtttctctgggcctggctaacctatataggttccatgtcagaaacttcatcctcttgttggggaatgcaccctctggagtrggctgacccatgaggctgtgggaattgagtcttaggacacaga

SEQ ID NO: 138466 - DNA, 559 bp, Homo sapiens
attgcagtctttggaaaataactaaattttattctagccaggattgaagttttcctctaagtcttaagcaaaattaaaaagaaaaaaaccactaatgccactaatagtgaagaagtctgtgttcttcccctgagttcactgtattgaaatagcatggtttaatcttggagccttgtttaatcctgcctctactgtttattagttttgtgaacttgccaagytctttcactgtttatgcctcagtttcctcatcaggaaaatggagagaaatatagttccctcttcatagattttatgagaattaagtgagatatgcatttagtgtacagaataatgcctgtcacatagtaagtatgtaataagcatttattattacttatcagggtatgatttatgaattgtggaacctgggattatgggagagtctggcttcaatcaagggctgaaattccatttccactgacatctcttccttccccatcccccgattctgtcctgcaacagggtaacaagaaggggcccttaggccgttgggactttgatacccaggaagaataca

SEQ ID NO: 138467 - DNA, 556 bp, Homo sapiens
gaattctaccaaatattaaaaagacttaatgccaatcttacttaaactctttcaaaaaacagaaaaggaggaaacatcttctttctttgtgtgtgtgtgtgtgtgtgtgtgtgtgtgtgtgtgtgtgtgtgtgttttgtttttttttgagacagagtctcgctctgtaacccaggctggagtgcaacgackagatctcagctcactgcaacctctgcctcctggatgcaagcgattctcctgcctcagcctcccaagtagctgggattacaggcacccaccaccatgcccagctaatttttgtatttttagtagaaatggggtttcactgtgttggtcaggctggtctcgaactcctgacctcaggtgatgcacccgcctcagcctcccaaagcactaggattacaggcgtgaaccaccacacctggcctaaagatgccacttttaccacttatatttactaccgtaccagaagttttagccagagaaactaggcaagaaaaataaataaataaaggcatccaatttggaaaggaagaagtaaaattgtatttgca

SEQ ID NO: 138468 - DNA, 556 bp, Homo sapiens
gaattctaccaaatattaaaaagacttaatgccaatcttacttaaactctttcaaaaaacagaaaaggaggaaacatcttctttctttgtgtgtgtgtgtgtgtgtgtgtgtgtgtgtgtgtgtgtgtgtgtgttttgtttttttttgagacagagtctcgctctgtaacccaggctggagtgcaacgacgagatctcagctcactgcaacctctgcctcctggatgcaagcgattctcctgcctcagcctcccaagtagctgggattacaggcacccaccaccatgcccagctaatttttgtatttttagtagaaatggggtttcactgtgttggtcaggctggtctcgaactcctgacctcaggtgatscacccgcctcagcctcccaaagcactaggattacaggcgtgaaccaccacacctggcctaaagatgccacttttaccacttatatttactaccgtaccagaagttttagccagagaaactaggcaagaaaaataaataaataaaggcatccaatttggaaaggaagaagtaaaattgtatttgca

SEQ ID NO: 138469 - DNA, 558 bp, Homo sapiens
tatgcttgatgtgccatctaacatgttcctccatctctagtatttcctgtaaactgatagttagtccaaagatctgattagattcaagttcaatttacttggcaagaatacttcccaggtggtgctgtgtacttcttcttgcatcacatcagcaggaacataatgtctagttgtcctacttttagtgatgttaaaactgatcactagtgaggacagactgatccatcataaattccacagtaagcttttcatctaatagtttgaaaaatcattgatgatcaccactttgggattttacactgtctctttaaccttcaaaaattagttatatgtagaaagaaacagctcaatgaatttaggatcccaaagaattaaccttaacacaaggaaaacagaccatctcccctctcctttggaattcaatttcaaatacatgtattaaatagaatcatccctcagtatccacaggagatttgttctgggccccatgtgrataccaaaaatccatggatgctcaagcccttgacataaaattatatgcacatcctcctatatact

SEQ ID NO: 138470 - DNA, 424 bp, Homo sapiens
tgataaggactaaattgaattgtaatatcttctcacatttttttacatctattgtgtttttcacagtatgagttctctgatgttgtgtaaattgatatccactactggtcatctcaaattgtttgtgatcacaccatttctaaacagaacaaatgtataagtaatataatattacttctgtttataatacaataatagtttctggctcttataaattacgtgatataaaatttgaaatttctatttactattactattactgttactgttgtagatagtaatttaagtaaaatcckccttcttaagcatgcgctcacaatttcagttatttctaaaaacagaggcttcaaggtcaattgtattacttcttagcctgattccttaattcctggattacatttttagtgtctactctccagaattc

SEQ ID NO: 138471 - DNA, 563 bp, Homo sapiens
aacaaactgcttagacttgttaccattctttgatcaaattggatcaaatcttgattgatggatgtgagcataaacagccaacctcctttcctgtttctrtttcccacaccacattccctttaaccctcctcaatcacatctcagaaaaaaagcgtttttttctaattactacaagttcaccctggctccagtttttgtgccagctggcatcatctctagattccagcctatctgaatatttaaaaaaaattttcaacagattttagatacaggaagtatgtatgtagattagttacatggaaatattgcatgacactgaggtttggagcatggatcctgtcacctaggtagtgagcatagtacctaataggctgttttttaatctaccccccttccaccctctagtagtccactgtgtctttcgttcccttatttatgtccacatatgctttatatttagctcccacttataagtgagaacatgtggtatttggtcttctgttcctgtgttaattttcttaggattatggcctccagctccatccatgttgctgcagaggaca

SEQ ID NO: 138472 - DNA, 553 bp, Homo sapiens
tggctcatcagagtccacaraccatatcggtgaagaagatgaataggattcctgtttaacccagagacacctatgttaaatgtttacatacagactaacccaaatatgcaattaaaccacaccactaaatggcaagatgaccatggatttaaacaaaatgtatcagggggaaaaggcaacacgtttaaacccatgtgaggagctggacttctgagacagccattctccttgcatagcactgtctgctgctacagctcatagaagtcaacaattttcttcaacactggtaggcagcctctaaatggccctgatcaccctcacctcctgccattcacacccttgtaaaattccacccctggacctagtgactcacttctaacaaagagaatacagcaaaagtaacatcgcttctgaggtgaggctacaaggagactacgatgcctgccttggtcacccttctcctgctctttccattgctccctctgatggaagccagttgccatgtgatgaggtgccctatggagaggcccacgtgacaaggtattgtaaaaag

SEQ ID NO: 138473 - DNA, 539 bp, Homo sapiens
ccacagaccatatcggtgaagaagatgaataggattcctgtttaacccagagacacctatgttaaatgtttacatacagactaacccaaatatgcaattaaaccacaccactaaatggcaagatgaccatggatttaaacaaaatgtatcagggggaaaaggcaacacgtttaaacccatgtgaggagctggacttctgagacagccattctccttgcatagcactgtctgctgctacagctcatagaagtcaacaaytttcttcaacactggtaggcagcctctaaatggccctgatcaccctcacctcctgccattcacacccttgtaaaattccacccctggacctagtgactcacttctaacaaagagaatacagcaaaagtaacatcgcttctgaggtgaggctacaaggagactacgatgcctgccttggtcacccttctcctgctctttccattgctccctctgatggaagccagttgccatgtgatgaggtgccctatggagaggcccacgtgacaaggtattgtaaaaag

SEQ ID NO: 138474 - DNA, 539 bp, Homo sapiens
ccacagaccatatcggtgaagaagatgaataggattcctgtttaacccagagacacctatgttaaatgtttacatacagactaacccaaatatgcaattaaaccacaccactaaatggcaagatgaccatggatttaaacaaaatgtatcagggggaaaaggcaacacgtttaaacccatgtgaggagctggacttctgagacagccattctccttgcatagcactgtctgctgctacagctcatagaagtcaacaattttcttcaacactggtaggcagcctctaaayggccctgatcaccctcacctcctgccattcacacccttgtaaaattccacccctggacctagtgactcacttctaacaaagagaatacagcaaaagtaacatcgcttctgaggtgaggctacaaggagactacgatgcctgccttggtcacccttctcctgctctttccattgctccctctgatggaagccagttgccatgtgatgaggtgccctatggagaggcccacgtgacaaggtattgtaaaaag

SEQ ID NO: 138475 - DNA, 539 bp, Homo sapiens
ccacagaccatatcggtgaagaagatgaataggattcctgtttaacccagagacacctatgttaaatgtttacatacagactaacccaaatatgcaattaaaccacaccactaaatggcaagatgaccatggatttaaacaaaatgtatcagggggaaaaggcaacacgtttaaacccatgtgaggagctggacttctgagacagccattctccttgcatagcactgtctgctgctacagctcatagaagtcaacaattttcttcaacactggtaggcagcctctaaatggccctgatcaccctcacctcctgccattcacacccttgtaaaattccacccctggacctagtgactcacttctaacaaagagaatacagcaaaagtaacatcgcttctgaggtgaggctacaaggagrctacgatgcctgccttggtcacccttctcctgctctttccattgctccctctgatggaagccagttgccatgtgatgaggtgccctatggagaggcccacgtgacaaggtattgtaaaaag

SEQ ID NO: 138476 - DNA, 230 bp, Homo sapiens
attaacttacatagttccactgaggcaagttttgctacctccctcccatctttccacctctctctcaacacaaaacctgaccaaagcattctaccagccyaccccatttccagtgattagctgtcagatgggctaagccaaacaaatctgggttttccctgagactagacctctctttctgggagagatggaatcacagggacaaggttggccaccttggggtagtgaga

SEQ ID NO: 138477 - DNA, 230 bp, Homo sapiens
attaacttacatagttccactgaggcaagttttgctacctccctcccatctttccacctctctctcaacacaaaacctgaccaaagcattctaccagcctaccccatttccagtgattagctgtcagrtgggctaagccaaacaaatctgggttttccctgagactagacctctctttctgggagagatggaatcacagggacaaggttggccaccttggggtagtgaga

SEQ ID NO: 138478 - DNA, 576 bp, Homo sapiens
acctctttacctgtcactgcttaagaaaaggattttttggtcttatttagaaataactttatctatttttctccataattccactgagaccaatgtgtgcctctatctcaagcaccagcaagcaaaactgcctgccagtatgttcagtttttgtatctttccaaatgtagggcacagctatcttttgatatcataattttttgaaaactgatgcacaaacttctycttgaaagttcagccaggtgcggtagctcacacctgtaatcccagcactttgggaggctgaggcaggcagatcacgaggtcaggaattcaagaccagcctggccaacatggtgaaacctgtctctactaaagctacaaaaattagccaggtgtggtggcaggtgcctgtaatcccagccactcaggaggctgaggcaggagaattgcttgaacctgggcagcagaggttccagtgagccaagattgcaccactgtactccagcttgggtgatagagtgagactccatctcaaaataaaaaataaaaaaaagaatttcagatatacagcagttgtaattcttctgaaggctg

SEQ ID NO: 138479 - DNA, 430 bp, Homo sapiens
cttccatccacccacctccctggggcattctaagtcacccccacagccctctaatgccagtccagctgccaggtcatgccagccccatcttacccgtctggtttttgagtttgaacaagctcctcccaagcttctgtaccagatgtatctcatgcttcttctcctccttagatgtgcgaacctgcccaaagcaaagggggaaaagggycctggagggaggggctggtgaacctccagagacagagtttgagaaaggcccaccccccttctgccagtttgtgatttagaaacgtgcattcattcaacaaacatttactgagcatgtacaggccaggtacagttcttcatagcagagatataaaacagcaaaggacagacaggagcccttcgccctgagctttccattctaggggcctttaaatctctgact

SEQ ID NO: 138480 - DNA, 461 bp, Homo sapiens
gaggggctggtgaacctccagagacagagtttgagaaaggcccaccccccttctgccagtttgtgatttagaaacgtgcattcattcaacaaacatttactgagcatgtacaggccaggtacagttcttcatagcagagatataaaacagcaaaggacagacaggagcccttsgccctgagctttccattctaggggcctttaaatctctgactttcagagctaaccgagacctttgatactctctacctcctccagaaacacgagcataaagaggagagatggcttgtccagactcaaaaagcaaattagggactgaggcagggcaggaatatggacccctaacaaccagtcaggctagtgcttcccagagaggtgacaaccccagggcatgtgtggcaaggactagagcaggggtgtctggagaagagagagtcagcaaagagggcagtgcagaagagc

SEQ ID NO: 138481 - DNA, 461 bp, Homo sapiens
gaggggctggtgaacctccagagacagagtttgagaaaggcccaccccccttctgccagtttgtgatttagaaacgtgcattcattcaacaaacatttactgagcatgtacaggccaggtacagttcttcatagcagagatataaaacagcaaaggacagacaggagcccttcgccctgagctttccattctaggggcctttaaatctctgactttcagagctaaccgagacctttgatactctctacctcctccagaaacacgagcataaagaggagagatggcttgtccagactcaaaaagcaaattagggactgaggcagggcaggaatatggacccctracaaccagtcaggctagtgcttcccagagaggtgacaaccccagggcatgtgtggcaaggactagagcaggggtgtctggagaagagagagtcagcaaagagggcagtgcagaagagc

SEQ ID NO: 138482 - DNA, 585 bp, Homo sapiens
accccaggttgagacgatatgaggaagattcaagctgtcaagttcagtttcccaagatctattccacagaagatgagcaaatctcacttcagaggccactgactgaagggcagtctggtcccagaaccgtggagaactcagaaaaaaatgttaaagtctctctggaaagtagaagcctgggaaaaaaccaaaccaaacccattctcccattgccacccagagatactgtgaacattttgagctcacaggggaagtgtaggcttttcccactgtcaatgtctatgttaagggagtaaggcagcctgaaacctsttgctcctaggtcccatagtctccactccccttccagctggaaatttgtgctgcaaccagaggaaccagaaatggggtgagaaaacttaggggactgggttgtaagatcaaaggctggtcttgcagcagtaatgacagttcctaggggcgctgtgacatcattgcattccactcctcccaggggaggggaccacatcagcgcgatgcccgagtcgctgctccacgatgggggagggaaacacacggtttcgacccaggtcctcagagacgcca

SEQ ID NO: 138483 - DNA, 585 bp, Homo sapiens
accccaggttgagacgatatgaggaagattcaagctgtcaagttcagtttcccaagatctattccacagaagatgagcaaatctcacttcagaggccactgactgaagggcagtctggtcccagaaccgtggagaactcagaaaaaaatgttaaagtctctctggaaagtagaagcctgggaaaaaaccaaaccaaacccattctcccattgccacccagagatactgtgaacattttgagctcacaggggaagtgtaggcttttcccactgtcaatgtctatgttaagggagtaaggcagcctgaaacctgttgctcctaggtcccatagtctccactccccttccagctggaaatttgtgctgcaaccagaggaaccagaaatggggtgagaaaacttaggggactgggttgtaagatcaaaggctggtcttgcagcagtaatgacagttcctaggggcrctgtgacatcattgcattccactcctcccaggggaggggaccacatcagcgcgatgcccgagtcgctgctccacgatgggggagggaaacacacggtttcgacccaggtcctcagagacgcca

SEQ ID NO: 138484 - DNA, 592 bp, Homo sapiens
catggtggctcatgcctataatcccagcactctgggaggccaaggtgggcggatcacctcagatcagtagtttgagactagcctggccaacatsgtgaaacctcgtctttactaaaaatacaaaaaatagctgggtgtggtggtggatgcctgtaatcccagctactcaggagactgaggcagaagaatcacttgaacctggtaagcagaggttgcagtgagctgagatcacgccattgcactccatcttgggcgagagagcaagacttcatctcaaaaacaaaaacaaaatcagcttaaataataccgtctctgagaagcctttatatcttcctattctttcagaaagagttgaaaattcctcaactcttaaaacatttgtgcctctattattatgtatcaggcactgaactgagtgcctaggagacaaagatgaaactgtagaccctgccctcatggagttcatggtctagtatggaaaacagccatatgaacaaataaccatactgtaggtcttcagagctcaaaccctatcctaaatactgctaaattaatattctgtgaggttttgaaattactagggccagagaca

SEQ ID NO: 138485 - DNA, 592 bp, Homo sapiens
catggtggctcatgcctataatcccagcactctgggaggccaaggtgggcggatcacctcagatcagtagtttgagactagcctggccaacatggtgaaacctcgtctttactaaaaatacaaaaaatagctgggtgtggtggtggatgcctgtaatcccagctactcrggagactgaggcagaagaatcacttgaacctggtaagcagaggttgcagtgagctgagatcacgccattgcactccatcttgggcgagagagcaagacttcatctcaaaaacaaaaacaaaatcagcttaaataataccgtctctgagaagcctttatatcttcctattctttcagaaagagttgaaaattcctcaactcttaaaacatttgtgcctctattattatgtatcaggcactgaactgagtgcctaggagacaaagatgaaactgtagaccctgccctcatggagttcatggtctagtatggaaaacagccatatgaacaaataaccatactgtaggtcttcagagctcaaaccctatcctaaatactgctaaattaatattctgtgaggttttgaaattactagggccagagaca

SEQ ID NO: 138486 - DNA, 582 bp, Homo sapiens
tttcacttcgggcctgacagcagcttgactggaagtttgctcccgcagttctgagattctggccttttcttttgtcccattggtactttttgctgccagggtttcctgtccttcaggtttccatccccaatcagttgagagtccgactggagtacccaaggtgcgttgaggaatgaggcacagccctgggcttaactcatccagcctggccagctcagccttcccctgtcaggtgggagcctaggattgctgtcagcccagggagcagagttggaagaagggggcagggccctacctaggctgcggcccatcggggcagcctgcgctggtggcttcggaaggccctggtttgaggatgggtgcggcaggaacagcctgaagatagtggatggagaaggtrcctgaggtgttgggagctctgctggtgagctgggcccttcacgtcaatgttagaggttgttacgtgctaggcgctgttcaagcactgggaattagctaaacaaaatgaccattactgtcatggagctcacccctagttgagaaaaataagccgaatcacacggcaagtgctaggaaatataa

SEQ ID NO: 138487 - DNA, 435 bp, Homo sapiens
cttccatccacccacctccctggggcattctaagtcacccccacagccctctaatgccagtccagctgccaggtcatgscagccccatcttacccgtctggtttttgagtttgaacaagctcctcccaagcttctgtaccagatgtatctcatgcttcttctcctccttagatgtgcgaacctgcccaaagcaaagggggaaaagggccctggagggaggggctggtgaacctctagagacagagtttgagaagggcccaccccccttctgccagtttgtgatttagaaacgtgcattcattcaacaaacatttactgagcatgtacaggccaggtacagttcttcatagcagagatataaaacagcaaaggacagacaggagcccttggccctgaggtttccattctaggggcctttaaatctctgactttcag

SEQ ID NO: 138488 - DNA, 510 bp, Homo sapiens
gatcataaatgtgaggaattttttctggatgctgaatttgattcctttcatttaggttgtctttgatttctttcaacagtgttttgtagtgttcattgtataaacttggtactttcttgaaatttgttgcttatgattttattcattttgatgcgattgttaattttgttatcttaattgttcagtttttgattgttcattgattatatatagaaatactattgatttttgcataccggtctctgaaactgtagccttgtttcagaggtcaattatagactataatctggcttgtttgtttggcaacagctcttaagtggatgccttaggattttctatgtacaggatgaagtagttggagatcgttttcttcctttccaatctggatgccttttatttctttttcttgcctaatcgccctgagaagcatctctggtacaacattgaatrgaagtggtgagcacaaacatccttgtcttgctactgatctgaaagagaaagcatccaagc

SEQ ID NO: 138489 - DNA, 391 bp, Homo sapiens
tgcaggcccgtctcccacccatctctgttttctcrccttttttgtacgttttataataagccttacattgaagtgtatgtgtctgtctgtccctccctccttcccccaccccctccctctccttccccactctgtgtgtgtgtgtgtgtgtgtgtgtgtgtgtgtgtgtgtaattacaaagaagttgtaaaggccttttaaagtagttatgatgtgatttcccctccttttaaaaaataaaatatgttaagcataagtattaacatcttagagggcaggtaggtggagactttgactttctactttatctttgaatcgcttaaatgtttacagtgagcgtgttatttttatggtacatagtaatttttgatgaaaacattttgaaggctga

SEQ ID NO: 138490 - DNA, 536 bp, Homo sapiens
tgccgtttcctctgaaaatgcctgtttttcacttagccccttgccttcctccctcgactgcagtccccatcttttctcccgctgaaaaggaaaaattaataaaaataggagccaaagaaaattcagaagggaaatgggtgtcaccagaccaaagagaaatgttatccaaacccctcatgagggaaatyctctttcatctgcatcaagggactcattagggacctcaagctaagtgtgatgcagtcctcggggtctacagatgtataggaatttacattttggcaagacaagttacagatagttgcctagtatgtaagaagactaataagcagatcctcagaaaaccacctgttggagggagaaatccaggattaaggctgttccaaattgtccaaattgattatgccgaaatgcccccaattggtcacttaaaatatttattagtgatagatcaccttactcattgggtagaagctattcccttttcaagtgcaactgctagtaatgtactcaaggcattagttgaaaatattata

SEQ ID NO: 138491 - DNA, 536 bp, Homo sapiens
tgccgtttcctctgaaaatgcctgtttttcacttagccccttgccttcctccctcgactgcagtccccatcttttctcccgctgaaaaggaaaaattaataaaaataggagccaaagaaaattcagaagggaaatgggtgtcaccagaccaaagagaaatgttatccaaacccctcatgagggaaatcctcttycatctgcatcaagggactcattagggacctcaagctaagtgtgatgcagtcctcggggtctacagatgtataggaatttacattttggcaagacaagttacagatagttgcctagtatgtaagaagactaataagcagatcctcagaaaaccacctgttggagggagaaatccaggattaaggctgttccaaattgtccaaattgattatgccgaaatgcccccaattggtcacttaaaatatttattagtgatagatcaccttactcattgggtagaagctattcccttttcaagtgcaactgctagtaatgtactcaaggcattagttgaaaatattata

SEQ ID NO: 138492 - DNA, 536 bp, Homo sapiens
tgccgtttcctctgaaaatgcctgtttttcacttagccccttgccttcctccctcgactgcagtccccatcttttctcccgctgaaaaggaaaaattaataaaaataggagccaaagaaaattcagaagggaaatgggtgtcaccagaccaaagagaaatgttatccaaacccctcatgagggaaatcctctttcatctgcatcaagggactcattagggacctcaagctaagtgtgatgcagtcctcggggtctacagatgtataggaatttayattttggcaagacaagttacagatagttgcctagtatgtaagaagactaataagcagatcctcagaaaaccacctgttggagggagaaatccaggattaaggctgttccaaattgtccaaattgattatgccgaaatgcccccaattggtcacttaaaatatttattagtgatagatcaccttactcattgggtagaagctattcccttttcaagtgcaactgctagtaatgtactcaaggcattagttgaaaatattata

SEQ ID NO: 138493 - DNA, 422 bp, Homo sapiens
ctatatacttggtctatcctccactttctctttccttaggactaaaggcctcttggcacatacaccaccccttgaatttccagttcaccaccaccagcccggacagtgaycacattctcatcaaaggtcagaaagaaaggaagctcaagcccacctgggagggacattatctagtgtttctaatgactgagacagccgtccacaccactgaaaaagaatggactcaccatacctgagtcaaaagagcaccacccactccagaatcatggacagctatttcagggccaattccaaccaagttaaagctaaaacgggtttgatcctcttatgctatatttcttttccccttctattgctagtcctctcgttattaatgtaactaggtcgagctcaccccaaactattacctttgatgcttgcct

SEQ ID NO: 138494 - DNA, 529 bp, Homo sapiens
tggctgctctgtggggttcctggatgagcagaagcccttgacasaccctcctagtcctggtctgggctctgagaagagagcggggtacacaggggtctgaggggcagcggcctgtctccacagccagcaatcccaaaagttcaggacccgtgatgcccacccagggaactgactgcaatgcagattctccggctccacttcagagattctgtagggctggctagggtccaggaatctgcacgctcagccatgccatggacatgagtgggcaccatctctagaggcacacaccactccccggaggatgggtgtacagcaagctccccagaaactcttgggaacacaacatatatgggagcacatctgaggcacgtgcacacacgcaacctgggaccaccacaggcacaacccaagtcacatgtgttcccggcagggaggctgggaggaaggccctctacctggtccacacctccactcaccacccccagctcctcacctccagctggtctcttctgatctcagctgcctc

SEQ ID NO: 138495 - DNA, 526 bp, Homo sapiens
cccatggctgctctgtggggttcctggatgagcagaagcccttgacacaccctcctagtcctggtctgggctctgagaagagagcggggtacacaggggtctgaggggcagcggcctgtctccacagccagcaatcccaaaagttcaggacccgtgatgcccacccagggaactgactgcaatgcagattctccggctccacttcagagattctgtagggctggctagggtccaggaatctgcacgctcagccatgccatggacatgagtgggcaccakctctagaggcacacaccactccccggaggatgggtgtacagcaagctccccagaaactcttgggaacacaacatatatgggagcacatctgaggcacgtgcacacacgcaacctgggaccaccacaggcacaacccaagtcacatgtgttcccggcagggaggctgggaggaaggccctctacctggtccacacctccactcaccacccccagctcctcacctccagctggtctcttctgatctcag

SEQ ID NO: 138496 - DNA, 529 bp, Homo sapiens
tggctgctctgtggggttcctggatgagcagaagcccttgacacaccctcctagtcctggtctgggctctgagaagagagcggggtacacaggggtctgaggggcagcggcctgtctccacagccagcaatcccaaaagttcaggacccgtgatgcccacccagggaactgactgcaatgcagattctccggctccacttcagagattctgtagggctggctagggtccaggaatctgcacgctcagccatgccatggacatgagtgggcaccatctctagaggcacacaccactccccggaggatgggtgtacagcaagctccccagaaactcttgggaacacaacatatatgggagcacatctgaggcacgtgcacacasgcaacctgggaccaccacaggcacaacccaagtcacatgtgttcccggcagggaggctgggaggaaggccctctacctggtccacacctccactcaccacccccagctcctcacctccagctggtctcttctgatctcagctgcctc

SEQ ID NO: 138497 - DNA, 529 bp, Homo sapiens
ggctgctctgtggggttcctggatgagcagaagcccttgacacaccctcctagtcctggtctgggctctgagaagagagcggggtacacaggggtctgaggggcagcggcctgtctccacagccagcaatcccaaaagttcaggacccgtgatgcccacccagggaactgactgcaatgcagattctccggctccacttcagagattctgtagggctggctagggtccaggaatctgcacgctcagccatgccatggacatgagtgggcaccatctctagaggcacacaccactccccggaggatgggtgtacagcaagctccccagaaactcttgggaacacaacatatatgggagcacatctgaggcacgtgcacacacgcaacctgggaccaccacaggcacaacccaagtcamatgtgttcccggcagggaggctgggaggaaggccctctacctggtccacacctccactcaccacccccagctcctcacctccagctggtctcttctgatctcagctgcctct

SEQ ID NO: 138498 - DNA, 529 bp, Homo sapiens
ggctgctctgtggggttcctggatgagcagaagcccttgacacaccctcctagtcctggtctgggctctgagaagagagcggggtacacaggggtctgaggggcagcggcctgtctccacagccagcaatcccaaaagttcaggacccgtgatgcccacccagggaactgactgcaatgcagattctccggctccacttcagagattctgtagggctggctagggtccaggaatctgcacgctcagccatgccatggacatgagtgggcaccatctctagaggcacacaccactccccggaggatgggtgtacagcaagctccccagaaactcttgggaacacaacatatatgggagcacatctgaggcacgtgcacacacgcaacctgggaccaccacaggcacaacccaagtcacatgtgttcccggcagggaggctgggaggaagrccctctacctggtccacacctccactcaccacccccagctcctcacctccagctggtctcttctgatctcagctgcctct

SEQ ID NO: 138499 - DNA, 471 bp, Homo sapiens
ctgatgtcagatttggctcatcagagtccacagaccatatcggtgaagaagatgaataggattcctgtttaacccagagacacctatgttaaatgtttacatacagactaacccaaatatgcaattaaaccacaccactaaatggcaagatgaccatggatttaaacaaaatgtatcagggggaaaaggcaacacgtttaaacccatgtgaggagctggacttctgagacagccattctccttgcatagcactgtctgctgctacagctcatagaagtcaacaaytttcttcaacactggtaggcagcctttaaatggccctgatcaccctcacctcctgccattcacacccttgtaaaattccacccctggacctagtgactcacttctaacaaagagaatacagcaaaagtaacatcgcttctgaggtgaggctacaaggagactacgatgcctgccttggtcaccctt

SEQ ID NO: 138500 - DNA, 522 bp, Homo sapiens
ccacagaccatatcggtgaagaagatgaataggattcctgtttaacccagagacacctatgttaaatgtttacatacagactaacccaaatatgcaattaaaccacaccactaaatggcaagatgaccatggatttaaacaaaatgtatcagggggaaaaggcaacacgtttaaacccatgtgaggagctggacttctgagacagccattctccttgcatagcactgtctgctgctacagctcatagaagtcaacaactttcttcaacactggtaggcagcctytaaatggccctgatcaccctcacctcctgccattcacacccttgtaaaattccacccctggacctagtgactcacttctaacaaagagaatacagcaaaagtaacatcgcttctgaggtgaggctacaaggagactacgatgcctgccttggtcacccttctcctgctctttccattgctccctctgatggaagccagttgccatgtgatgaggtgccctatggagaggcccacgtga

SEQ ID NO: 138501 - DNA, 494 bp, Homo sapiens
gaattcagataaaatttccttatgttctgctrttatgtttgatcgaatcctaatcacagtgagctcttcattagctcaatatgcagtttgccctcaagtgcgcggtctattactttgtaatatgccactgtgagtactgacatttacagttgtttaaaggtggagcactggaaacagcctttccccctttttctgtgtattggggatgggagtaataacattttggggaggtttttaaatctcccagaagaggaaagtggcctgctttggcaggtgtgtgcaggatagaatatgtttcatttgttccggtgccaagaatgagcgctgtactacggtagttcccttaggatttgtatgtgctctgggctcatgaagatactgcctcatgagctgtggcagttgtactcttttttgatgacctgaaaagggattatttctgaggaatgaaaggctcccatcatgactgtggatgtggaaaaccttttctagctgag

SEQ ID NO: 138502 - DNA, 494 bp, Homo sapiens
gaattcagataaaatttccttatgttctgctgttatgtttgatcgaatcctaatcacagtgagctcttcattagctcaatatgcrgtttgccctcaagtgcgcggtctattactttgtaatatgccactgtgagtactgacatttacagttgtttaaaggtggagcactggaaacagcctttccccctttttctgtgtattggggatgggagtaataacattttggggaggtttttaaatctcccagaagaggaaagtggcctgctttggcaggtgtgtgcaggatagaatatgtttcatttgttccggtgccaagaatgagcgctgtactacggtagttcccttaggatttgtatgtgctctgggctcatgaagatactgcctcatgagctgtggcagttgtactcttttttgatgacctgaaaagggattatttctgaggaatgaaaggctcccatcatgactgtggatgtggaaaaccttttctagctgag

SEQ ID NO: 138503 - DNA, 494 bp, Homo sapiens
gaattcagataaaatttccttatgttctgctgttatgtttgatcgaatcctaatcacagtgagctcttcattagctcaatatgcagtttgccctcaagtgcgcggtctattactttgtaatatgccactgtgagtactgacatttacagttgtttaaaggtggagcactggaaacagcctttccccctttttctgtgtattggggatgggagtaataacattttggggaggtttttaaatctcccagaagaggaaagtggcctgctytggcaggtgtgtgcaggatagaatatgtttcatttgttccggtgccaagaatgagcgctgtactacggtagttcccttaggatttgtatgtgctctgggctcatgaagatactgcctcatgagctgtggcagttgtactcttttttgatgacctgaaaagggattatttctgaggaatgaaaggctcccatcatgactgtggatgtggaaaaccttttctagctgag

SEQ ID NO: 138504 - DNA, 494 bp, Homo sapiens
gaattcagataaaatttccttatgttctgctgttatgtttgatcgaatcctaatcacagtgagctcttcattagctcaatatgcagtttgccctcaagtgcgcggtctattactttgtaatatgccactgtgagtactgacatttacagttgtttaaaggtggagcactggaaacagcctttccccctttttctgtgtattggggatgggagtaataacattttggggaggtttttaaatctcccagaagaggaaagtggcctgctttggcaggtgtgtgcaggatagaatatgtttcatttgttccggtgccaagaatgagcgctgtactayggtagttcccttaggatttgtatgtgctctgggctcatgaagatactgcctcatgagctgtggcagttgtactcttttttgatgacctgaaaagggattatttctgaggaatgaaaggctcccatcatgactgtggatgtggaaaaccttttctagctgag

SEQ ID NO: 138505 - DNA, 465 bp, Homo sapiens
gaggggctggtgaacctctagagacagagtttgagaagggcccaccccccttctgccagtttgtgatttagaaacgtgcattcattcaacaaacatttactgagcatgtacaggccaggtacagttcttcatagcagagatataaaacagcaaaggacagacaggagcccttggccctgaggtttccattctaggggcctttaaatctctgactttcagagctaaccragacctttgatactctctacctcctccagaaacacgagcataaagaggagagatggcttgtccagactcaaaaagcaaattagggactgaggcagggcagaaatatggacccctgacaaccagtcaggctagtgcttcccagagaggtgacaaccccagggcatgtgtggcaaggactagagcaggggtgtctggagaagagagagtcagcaaagagggcagtgcagaagacccatg

SEQ ID NO: 138506 - DNA, 163 bp, Homo sapiens
ctgaatttctcacttgatacctggctatgacttgcartcatgaaaaccaagaattgtgttatgtcactgtgtactgcttgttacctgaaatccacactaggctgggatcaagggttgaatctttcatgattttctccataacctgtgtgcttcttatcccaga

SEQ ID NO: 138507 - DNA, 194 bp, Homo sapiens
aatatactatattaattcaaatacsactctttgtgtaggtattttgtcatatgtttaagaaaaagctaaagagaatggaaatcctatgacaataactcaagtctttcttcaaagtgcatgcagtcttttgcagtacctcattcagccaagtatttgttctctacctcattcagtataaggcagcctttaatttg

SEQ ID NO: 138508 - DNA, 194 bp, Homo sapiens
aatatactatattaattcaaatacgactctytgtgtaggtattttgtcatatgtttaagaaaaagctaaagagaatggaaatcctatgacaataactcaagtctttcttcaaagtgcatgcagtcttttgcagtacctcattcagccaagtatttgttctctacctcattcagtataaggcagcctttaatttg

SEQ ID NO: 138509 - DNA, 194 bp, Homo sapiens
aatatactatattaattcaaatacgactctttgtgtaggtattttgtcatatgtttaagaaaaagctaaagagaatggaaatcctatgacaataactcaagtctttcttcaaagtgcatgcagtctyttgcagtacctcattcagccaagtatttgttctctacctcattcagtataaggcagcctttaatttg

SEQ ID NO: 138510 - DNA, 563 bp, Homo sapiens
ggcctagggcagtcagactgtctggttccaatccttgctctgccacctgtgactttggacaagttacctaccttcagttgcctcatcygtaaaatgcagatattaataataccctcttttaaagttattaagaggattgaaagagctaataaaaagtaaaaaataaaaagacttggtaagcataggcacagagggaaacaaaaaaagtaaaaataagtaaataaaaagactagtgcctagcacataaaagttcatcaggaattaattttataacatgaactcaattttgcaaaacttcaaagtacatataacttttactatggtatacataacaataataaatttacaactgtagacatgtttctctacagtaaatataacaaagactaaacaatcagatactaaatcattaagtgattatcagttagtaactttaattttcttacacttctatattttctatagatcatctttttaacaaaaagaaaacaaaccaaatgaaaatgaaatgaattctctcaaaaagaattaagataggaagaaggctcacaaagtagcataaa

SEQ ID NO: 138511 - DNA, 602 bp, Homo sapiens
agatctgaagatcactgtgcaaagractatcagggtcaaccttgagaattccaaaacaaaaaacaattcaaacaaaaagattattattattatttgtattaattttactaactcaaaaatgaaccaatctgaaagctaaaatacagcacctagggtaatttccagaaagaggagaccttaagctgctttatatccccaggaaaactagaggccactatagcttccagctcctttagaataaatgtcccaaagagattataatagcctaaatctaatcgaataagggggttcagagtttgcagtcattctaaaggaaaacagtcacatgtatataattttctcaagaattcaaaaaaagtttaatatgctttcctaaacttgtattactagccaagctgttcaaggagaaaaatttgccatggacagagctgtcaaaaaagttaaatcaccaaaaaattggtatttttctacaactgtcctatatatacatatataaatatgtatcccacctcccactctcccttttttttgttttatgacacagggtgtctcactctgtcacccaggctggaatataatggtgcaatcacggctcattgcag

SEQ ID NO: 138512 - DNA, 578 bp, Homo sapiens
gtggagctataagggatggctggctggagtgaatgccagaggcccctctgggccatcagaaagcccagggtcctctgaggaaccctggggaaggcagggagggcaggtagccggatgccattggccatagacttctaagtctaagaggggagccttaactggttggcggggggctgcaggttacataggtgaggctgggcccttcctgctgggaaaagcagaagagggagactccgtggcaggaaagggaagtgagctctctaggcggmgctcagctgggccagcagcactattggctgaatagcacaggcaacccctagaagcaacaggccaaggtgcgtgagcctgctggccagcagtagtgcttcagcaggggccagggaccctgccttcagtcgcacgctagcagctatcatggtacctgggagggagggaagggggctgtgtgtccttccatggcctatgaagtgtgttgtgggatgaccgcgtgtataggactctcaggcttttatcctagatcaccactggattgctgacagatagaggacgtgggaccgtgactatcacccctaatctgc

SEQ ID NO: 138513 - DNA, 343 bp, Homo sapiens
atactggaacttaaactcagtcctctgactccaagctctggggttttgccatgaatcagcagcttccagggaccaaaaccaggggcagaggtagaaaagyaaacattaagcaggcaggaactgtaggccgtgtggtttagagtcatacatcctcacaggtctgctagcgtgaagaagcgtgccagtacctctcacactttcatatcaatgtgtcctcatggcagaaggcagcttttctattaaatctgggaatttatcagaaagaggacaacccaagcctcatttcagagcgaagtctggtatacgcttggaaacctatgtgtctgtcatccctaagtacatt

SEQ ID NO: 138514 - DNA, 343 bp, Homo sapiens
atactggaacttaaactcagtcctctgactccaagctctggggttttgccatgaatcagcagcttccagggaccaaaaccaggggcagaggtagaaaagtamacattaagcaggcaggaactgtaggccgtgtggtttagagtcatacatcctcacaggtctgctagcgtgaagaagcgtgccagtacctctcacactttcatatcaatgtgtcctcatggcagaaggcagcttttctattaaatctgggaatttatcagaaagaggacaacccaagcctcatttcagagcgaagtctggtatacgcttggaaacctatgtgtctgtcatccctaagtacatt

SEQ ID NO: 138515 - DNA, 343 bp, Homo sapiens
atactggaacttaaactcagtcctctgactccaagctctggggttttgccatgaatcagcagcttccagggaccaaaaccaggggcagaggtagaaaagtaaacattaagcaggcaggaactgtaggccgtgtggtttagagtcatacatcctcacaggtctgctagcgtgaagaagcgtrccagtacctctcacactttcatatcaatgtgtcctcatggcagaaggcagcttttctattaaatctgggaatttatcagaaagaggacaacccaagcctcatttcagagcgaagtctggtatacgcttggaaacctatgtgtctgtcatccctaagtacatt

SEQ ID NO: 138516 - DNA, 343 bp, Homo sapiens
atactggaacttaaactcagtcctctgactccaagctctggggttttgccatgaatcagcagcttccagggaccaaaaccaggggcagaggtagaaaagtaaacattaagcaggcaggaactgtaggccgtgtggtttagagtcatacatcctcacaggtctgctagcgtgaagaagcgtgccagtacctctcacactttcatatcaatgtgtcctcatggcagaaggcagcttttctattaaatctgggaatttatcagaaagaggacaacccaagcctcatttcagagcraagtctggtatacgcttggaaacctatgtgtctgtcatccctaagtacatt

SEQ ID NO: 138517 - DNA, 334 bp, Homo sapiens
aaagaaatatagcataagaggatcaaaccygttttagctttaacttggttggaattggccctgaaatagctgtccatgattctggagtgggtggtgctcttttgactcaggtatggtgagtccattctttttcagtggtgtggacggctgtctcagtcattagaaacactagataatgtccctcccaggtgggcttgagcttcctttctttctgacctttgatgagaatgtggtcactgtccgggctggtggtggtgaactggaaattcaaggggtggtgtatgtgccaagaggcctttagtcctaaggaaagagaaagtggaggatagaccaa

SEQ ID NO: 138518 - DNA, 419 bp, Homo sapiens
taacaaggcaagcatcaaaggtaatagtttggggtgagctcgacctagttacattaataacgagaggactagcaatagaaggggaaaagaaatatagcataagaggatcaaacccgttttagctttaacttggttggaattggccctgaaatagctgtccatgattctggagtgggtggtgctcttttgactcaggtatggtgagtccattctttttcagtggtgtggacggctgtstcagtcattagaaacactagataatgtccctcccaggtgggcttgagcttcctttctttctgacctttgatgagaatgtggtcactgtccgggctggtggtggtgaactggaaattcaaggggtggtgtatgtgccaagaggcctttagtcctaaggaaagagaaagtggaggatagaccaa

SEQ ID NO: 138519 - DNA, 441 bp, Homo sapiens
cacaggatataacaaggcaagcatcaaaggtaatagtttggggtgagctcgacctagttacattaataacgagaggactagcaatagaaggggaaaagaaatatagcataagaggatcaaacccgttttagctttaacttggttggaattggccctgaaatagctgtccatgattctggagtgggtggtgctcttttgactcaggtatggtgagtccattctttttcagtggtgtggacggctgtctcagtcattagaaacactagataatgtccctcccaggtgggcttgagcttcctttctttctgacctytgatgagaatgtggtcactgtccgggctggtggtggtgaactggaaattcaaggggtggtgtatgtgccaagaggcctttagtcctaaggaaagagaaagtggaggatagaccaagtatatagttctt

SEQ ID NO: 138520 - DNA, 441 bp, Homo sapiens
cacaggatataacaaggcaagcatcaaaggtaatagtttggggtgagctcgacctagttacattaataacgagaggactagcaatagaaggggaaaagaaatatagcataagaggatcaaacccgttttagctttaacttggttggaattggccctgaaatagctgtccatgattctggagtgggtggtgctcttttgactcaggtatggtgagtccattctttttcagtggtgtggacggctgtctcagtcattagaaacactagataatgtccctcccaggtgggcttgagcttcctttctttctgacctttgatgagaatgtgrtcactgtccgggctggtggtggtgaactggaaattcaaggggtggtgtatgtgccaagaggcctttagtcctaaggaaagagaaagtggaggatagaccaagtatatagttctt

SEQ ID NO: 138521 - DNA, 474 bp, Homo sapiens
ttaaacagcaaagtatgaaggtaatgygtcccataaccagccttcagaagaattacagctgctgtgtctctgaactttcaagaagtttgtgcatcaattttcaaaaaattatgaaatccttgaagatagctgtgttctacatttggaaagatacaaaaactgaaccttctagcaggcagttttgcttgctggtgcttgagatagagccacacattggtctcagtggatttatggagaaaaataggtacagaaagttatttctaaataagaccaaaaatccttttcttaagcagtgacaggtaaagaggttgtcttggctaatattgaattgtgttgcccttgattgagacagttttatggtggggatggtagtggtgataaacttgtttgaaatttgtccacctatagtaacctttgtggtagctgtcacagacagcttcatcctcacaggccctaaaattactataaaactaa

SEQ ID NO: 138522 - DNA, 536 bp, Homo sapiens
gcccgtggctgctctgtgaggttcctgggtragcagaagcccttgacagaccctcctggtcctggtctgggctctgagaagagagcggggtacacaggggtctgagaggcagcggcctgtctccacggccagcaatcccaaaagttcaggacccgtgatgccctcccagggaactgactgcaatgcagattctcgggctccacttcagagattctgtagggctgggtggcgtccaggaatctgcatgctcagccatgccatggacatgagtgggcaccagctctagaggcacacaccactcccaggaggatgggtgtacagcaagctccccagaaactcttgggaacacaacatatatgggagcatatctgaggcacgtgcacacacgcaagctgggaccaccacaggtacagcccaagtcacatgtgttcccggcatggaggctgggaggaaggccctctacctggtccacaccccgctcaccacctccagctcctcacctccagctggtcccttctgatctcagctgcctctcc

SEQ ID NO: 138523 - DNA, 534 bp, Homo sapiens
agatctctggaaggcccgtggctgctctgtgaggttcctgggtaagcagaagcccttgacagaccctcctggtcctggtctgggctctgagaagagagcrgggtacacaggggtctgagaggcagcggcctgtctccacggccagcaatcccaaaagttcaggacccgtgatgccctcccagggaactgactgcaatgcagattctcgggctccacttcagagattctgtagggctgggtggcgtccaggaatctgcatgctcagccatgccatggacatgagtgggcaccagctctagaggcacacaccactcccaggaggatgggtgtacagcaagctccccagaaactcttgggaacacaacatatatgggagcatatctgaggcacgtgcacacacgcaagctgggaccaccacaggtacagcccaagtcacatgtgttcccggcatggaggctgggaggaaggccctctacctggtccacaccccgctcaccacctccagctcctcacctccagctggtcccttctgat

SEQ ID NO: 138524 - DNA, 534 bp, Homo sapiens
agatctctggaaggcccgtggctgctctgtgaggttcctgggtaagcagaagcccttgacagaccctcctggtcctggtctgggctctgagaagagagcgggstacacaggggtctgagaggcagcggcctgtctccacggccagcaatcccaaaagttcaggacccgtgatgccctcccagggaactgactgcaatgcagattctcgggctccacttcagagattctgtagggctgggtggcgtccaggaatctgcatgctcagccatgccatggacatgagtgggcaccagctctagaggcacacaccactcccaggaggatgggtgtacagcaagctccccagaaactcttgggaacacaacatatatgggagcatatctgaggcacgtgcacacacgcaagctgggaccaccacaggtacagcccaagtcacatgtgttcccggcatggaggctgggaggaaggccctctacctggtccacaccccgctcaccacctccagctcctcacctccagctggtcccttctgat

SEQ ID NO: 138525 - DNA, 545 bp, Homo sapiens
tctctggaaggcccgtggctgctctgtgaggttcctgggtaagcagaagcccttgacagaccctcctggtcctggtctgggctctgagaagagagcggggtacacaggggtctgagaggcagcggcctgtctccacggccagcaatcccaaaagttcaggacccgtgatgccctcccagggaactgactgcaatgcagattctcgggctccacttcagagattctgtagggctgggtggcgtccaggaatctgcatgctcagccatgccatggacatgagtggrcaccagctctagaggcacacaccactcccaggaggatgggtgtacagcaagctccccagaaactcttgggaacacaacatatatgggagcatatctgaggcacgtgcacacacgcaagctgggaccaccacaggtacagcccaagtcacatgtgttcccggcatggaggctgggaggaaggccctctacctggtccacaccccgctcaccacctccagctcctcacctccagctggtcccttctgatctcagctgcctctc

SEQ ID NO: 138526 - DNA, 526 bp, Homo sapiens
gtgaggttcctgggtaagcagaagcccttgacagaccctcctggtcctggtctgggctctgagaagagagcggggtacacaggggtctgagaggcagcggcctgtctccacggccagcaatcccaaaagttcaggacccgtgatgccctcccagggaactgactgcaatgcagattctcgggctccacttcagagattctgtagggctgggtggcgtccaggaatctgcatgctcagccatgccatggacatgagtgggcaccagctctagaggcacacaccactcccaggaggatgggtgtacagcaagctccccagaaactcttgggaacacaacatatatgggagcayatctgaggcacgtgcacacacgcaagctgggaccaccacaggtacagcccaagtcacatgtgttcccggcatggaggctgggaggaaggccctctacctggtccacaccccgctcaccacctccagctcctcacctccagctggtcccttctgatctcagctgcctctccctgga

SEQ ID NO: 138527 - DNA, 486 bp, Homo sapiens
gtgaggttcctgggtaagcagaagcccttgacagaccctcctggtcctggtctgggctctgagaagagagcggggtacacaggggtctgagaggcagcggcctgtctccacggccagcaatcccaaaagttcaggacccgtgatgccctcccagggaactgactgcaatgcagattctcgggctccacttcagagattctgtagggctgggtggcgtccaggaatctgcatgctcagccatgccatggacatgagtgggcaccagctctagaggcacacaccactcccaggaggatgggtgtacagcaagctccccagaaactcttgggaacacaacatatatgggagcatatctgaggcacgtgcacacacrcaagctgggaccaccacaggtacagcccaagtcacatgtgttcccggcatggaggctgggaggaaggccctctacctggtccacaccccgctcaccacctccagctcctcacc

SEQ ID NO: 138528 - DNA, 591 bp, Homo sapiens
tggccataggcattgtcctcatactcctccacctcctccagtctgcagccagccaccatgttgtgcgtcagcaaggcttcccacagcccccgcctctagccattgacactgaggtcttccatgcagccagcccagcagggaggcattggcagcccctggtgtcaggcctgagcggtgttcctggaggtgacgagaggcctctgcaccagctccccaagaaggagactgtcacgtggctccaggtagctgaggactcctcrgttcaaagtacatgtggggtactggtccatggagatttctagctggtgaatgttgatgtggatgctgaccttgtggggctgtgcgtcagtcacaggcacactgttgaggagcaatacagtaccctggcccttctcaaccatggaccacaggtggccctcaaatatgtccacatggatgaagtccccatgccagcctgctgcctggaaggccaagggtgcctgccagctctgtgtggtgagtgtaaactccagggttccttcatcctgagtgccccaggcaggcaaggcagccagagagtgggacctagagaagcccagggccacatcgtca

SEQ ID NO: 138529 - DNA, 555 bp, Homo sapiens
gatttggctcatcagagtccacaraccatatcggtgaagaagatgaataggattcctgtttaacccagagacacctatgttaaatgtttacatacagactaacccaaatatgcaattaaaccacaccactaaatggcaagatgaccatggatttaaacaaaatgtatgggggaaaaggcaacacgtttaaacccatgtgaggagctggacttctgagacagccattctccttgcatagcactgtctgctgctacagctcatagaagtcaacagttttcttcaacactggtaggcagcctctaaatggccctgatcaccctcacctcctgccattcacacccttgtaaaattccacccctcgacctagtgactcacttctaacaaagagaatacagcaaaagtaacatcgcttctgaggtgaggctacaaggagactacgatgcctgccttggtcacccttctcctgctctttccattgctccctctgatggaagccagttgccatgtgatgaggtgccctatggagaggcccacgtgacaaggtattgtaaaaag

SEQ ID NO: 138530 - DNA, 512 bp, Homo sapiens
ccatatcggtgaagaagatgaataggattcctgtttaaccsagagacacctatgttaaatgtttacatacagactaacccaaatatgcaattaaaccacaccactaaatggcaagatgaccatggatttaaacaaaatgtatgggggaaaaggcaacacgtttaaacccatgtgaggagctggacttctgagacagccattctccttgcatagcactgtctgctgctacagctcatagaagtcaacagttttcttcaacactggtaggcagcctctaaatggccctgatcaccctcacctcctgccattcacacccttgtaaaattccacccctcgacctagtgactcacttctaacaaagagaatacagcaaaagtaacatcgcttctgaggtgaggctacaaggagactacgatgcctgccttggtcacccttctcctgctctttccattgctccctctgatggaagccagttgccatgtgatgaggtgccctatggagaggcccacgtg

SEQ ID NO: 138531 - DNA, 555 bp, Homo sapiens
gatttggctcatcagagtccacaaaccatatcggtgaagaagatgaataggattcctgtttaacccagagacacctatgttaaatgtttacatacagactaacccaaatatgcaattaaaccacaccactaaatggcaagatgaccatggatttaaacaaaatgtatgggggaaaaggcaacacgtttaaacccatgtgaggagctggacttctgagacagccattctccttgcatagcactgtctgctgctacagctcatagaagtcaacarttttcttcaacactggtaggcagcctctaaatggccctgatcaccctcacctcctgccattcacacccttgtaaaattccacccctcgacctagtgactcacttctaacaaagagaatacagcaaaagtaacatcgcttctgaggtgaggctacaaggagactacgatgcctgccttggtcacccttctcctgctctttccattgctccctctgatggaagccagttgccatgtgatgaggtgccctatggagaggcccacgtgacaaggtattgtaaaaag

SEQ ID NO: 138532 - DNA, 521 bp, Homo sapiens
gtccacaaaccatatcggtgaagaagatgaataggattcctgtttaacccagagacacctatgttaaatgtttacatacagactaacccaaatatgcaattaaaccacaccactaaatggcaagatgaccatggatttaaacaaaatgtatgggggaaaaggcaacacgtttaaacccatgtgaggagctggacttctgagacagccattctccttgcatagcactgtctgctgctacagctcatagaagtcaacagytttcttcaacactggtaggcagcctctaaatggccctgatcaccctcacctcctgccattcacacccttgtaaaattccacccctcgacctagtgactcacttctaacaaagagaatacagcaaaagtaacatcgcttctgaggtgaggctacaaggagactacgatgcctgccttggtcacccttctcctgctctttccattgctccctctgatggaagccagttgccatgtgatgaggtgccctatggagaggcccacgtg

SEQ ID NO: 138533 - DNA, 521 bp, Homo sapiens
gtccacaaaccatatcggtgaagaagatgaataggattcctgtttaacccagagacacctatgttaaatgtttacatacagactaacccaaatatgcaattaaaccacaccactaaatggcaagatgaccatggatttaaacaaaatgtatgggggaaaaggcaacacgtttaaacccatgtgaggagctggacttctgagacagccattctccttgcatagcactgtctgctgctacagctcatagaagtcaacagttttcttcaacactggtaggcagcctytaaatggccctgatcaccctcacctcctgccattcacacccttgtaaaattccacccctcgacctagtgactcacttctaacaaagagaatacagcaaaagtaacatcgcttctgaggtgaggctacaaggagactacgatgcctgccttggtcacccttctcctgctctttccattgctccctctgatggaagccagttgccatgtgatgaggtgccctatggagaggcccacgtg

SEQ ID NO: 138534 - DNA, 543 bp, Homo sapiens
ttggctcatcagagtccacaaaccatatcggtgaagaagatgaataggattcctgtttaacccagagacacctatgttaaatgtttacatacagactaacccaaatatgcaattaaaccacaccactaaatggcaagatgaccatggatttaaacaaaatgtatgggggaaaaggcaacacgtttaaacccatgtgaggagctggacttctgagacagccattctccttgcatagcactgtctgctgctacagctcatagaagtcaacagttttcttcaacactggtaggcagcctctaaayggccctgatcaccctcacctcctgccattcacacccttgtaaaattccacccctcgacctagtgactcacttctaacaaagagaatacagcaaaagtaacatcgcttctgaggtgaggctacaaggagactacgatgcctgccttggtcacccttctcctgctctttccattgctccctctgatggaagccagttgccatgtgatgaggtgccctatggagaggcccacgtgacaaggtat

SEQ ID NO: 138535 - DNA, 542 bp, Homo sapiens
atttggctcatcagagtccacaaaccatatcggtgaagaagatgaataggattcctgtttaacccagagacacctatgttaaatgtttacatacagactaacccaaatatgcaattaaaccacaccactaaatggcaagatgaccatggatttaaacaaaatgtatgggggaaaaggcaacacgtttaaacccatgtgaggagctggacttctgagacagccattctccttgcatagcactgtctgctgctacagctcatagaagtcaacagttttcttcaacactggtaggcagcctctaaatggccctgatcaccctcacctcctgccattcacacccttgtaaaattccacccctsgacctagtgactcacttctaacaaagagaatacagcaaaagtaacatcgcttctgaggtgaggctacaaggagactacgatgcctgccttggtcacccttctcctgctctttccattgctccctctgatggaagccagttgccatgtgatgaggtgccctatggagaggcccacgtgacaagg

SEQ ID NO: 138536 - DNA, 579 bp, Homo sapiens
agatttggctcatcagagtccacaaaccatatcggtgaagaagatgaataggattcctgtttaacccagagacacctatgttaaatgtttacatacagactaacccaaatatgcaattaaaccacaccactaaatggcaagatgaccatggatttaaacaaaatgtatgggggaaaaggcaacacgtttaaacccatgtgaggagctggacttctgagacagccattctccttgcatagcactgtctgctgctacagctcatagaagtcaacagttttcttcaacactggtaggcagcctctaaatggccctgatcaccctcacctcctgccattcacacccttgtaaaattccacccctcgacctagtgactcacttctaacaaagagaatacagcaaaagtaacatcgcttctgaggtgaggctacaaggagactaygatgcctgccttggtcacccttctcctgctctttccattgctccctctgatggaagccagttgccatgtgatgaggtgccctatggagaggcccacgtgacaaggtattgtaaaaagcctctgaccaatagccatctaga

SEQ ID NO: 138537 - DNA, 534 bp, Homo sapiens
gtccacaaaccatatcggtgaagaagatgaataggattcctgtttaacccagagacacctatgttaaatgtttacatacagactaacccaaatatgcaattaaaccacaccactaaatggcaagatgaccatggatttaaacaaaatgtatgggggaaaaggcaacacgtttaaacccatgtgaggagctggacttctgagacagccattctccttgcatagcactgtctgctgctacagctcatagaagtcaacagttttcttcaacactggtaggcagcctctaaatggccctgatcaccctcacctcctgccattcacacccttgtaaaattccacccctcgacctagtgactcacttctaacaaagagaatacagcaaaagtaacatcgcttctgaggtgaggctacaaggagactacgatgcctgccttrgtcacccttctcctgctctttccattgctccctctgatggaagccagttgccatgtgatgaggtgccctatggagaggcccacgtgacaaggtattgta

SEQ ID NO: 138538 - DNA, 573 bp, Homo sapiens
acctctttacctgtcactgcttaagaaaaggattttttggtcttatttagaaataactttatctatttttctccataattccactgagaccaatgtgtgcctctatctcaagcaccagcaagcaaaactgcctgccagtatgttcagtttttgtatctttccaaatgtagggcacagctatcttttgatatcataattttttgaaaactgatgcacaaacttcttcttgaaagttcagccaggtgcggtagctcacacctgtaatcccagcactttgggaggctgaggcaggcwgatcacgaggtcaggaattcaagaccagcctggccaacatggtgaaacctgtctctactaaagctacaaaaattagccaggtgcggtggcaggtgcctgtaatcccagctactcaggaggctgaggcaggagaattgcttgaacctgggcagcagaggttccagtgagccaagattgcaccactgtactccagcttgggtgatagagtgagactccatctcaaaataaaaaataaaaaaaagaatttcagatatacagcagttgtaattcttctgaagg

SEQ ID NO: 138539 - DNA, 563 bp, Homo sapiens
cagcccgacgcgccccgccgcagcggcggggtccgccggctacacttcctcttcctctgaactcatgtgcaaaatatgctacgctgcatcttcagggaaagcctcgcggcccctgacagcagccgctggagcggtgggcccgcccagctctccccgcgccccctcggagttccgcccggtcacctccacgcggccgagctgcaagcgaccctggcagcctcagaacccaggggtcaggggctcatcgatcctccctcccagcccctcctaatcaaggttgtgtgctgtcaggaagagcgcctgggagacaaggatccttcaagatttgagccaggatgctgaaagggcgactgccatcaaggtgcygatggctgggggtggggttggggccgacttgagagaggaccatttctcgaccccattccacaggtgggagcatccctaaacatctcaggtgctgctgaaattctctcttgcgagttagtgcttcagggaagggtaatgccactgtctccgttgccatcccttggtctacctacttaagatgtccagaggtttgagaa

SEQ ID NO: 138540 - DNA, 563 bp, Homo sapiens
cagcccgacgcgccccgccgcagcggcggggtccgccggctacacttcctcttcctctgaactcatgtgcaaaatatgctacgctgcatcttcagggaaagcctcgcggcccctgacagcagccgctggagcggtgggcccgcccagctctccccgcgccccctcggagttccgcccggtcacctccacgcggccgagctgcaagcgaccctggcagcctcagaacccaggggtcaggggctcatcgatcctccctcccagcccctcctaatcaaggttgtgtgctgtcaggaagagcgcctgggagacaaggatccttcaagatttgagccaggatgctgaaagggcgactgccatcaaggtgctgatggctgggggtggggttggggccgacttgagagaggaccatttctcgaccccattccacaggtgggagcatccctaaacatctcaggtgctgctgaaattmtctcttgcgagttagtgcttcagggaagggtaatgccactgtctccgttgccatcccttggtctacctacttaagatgtccagaggtttgagaa

SEQ ID NO: 138541 - DNA, 595 bp, Homo sapiens
gcctgcacaggcacgcccctaggaagaccatggcacccttggccacgttaaagcagagtacacttgtgccaaaacatgcttttgactccccagtacagtggagatgtgaattagggtgggggcagggagctggttagggcattttttgcatatgcattgatcagccaaggctagggacttttgtccaaagtatagtcaaaacaatactttgaaaatgccacccacagacatcaccaatttgaggaaatgttggatgatagccaaatgttccattcactcccatmcaaaaaaaaaaaaaaaaaaaaaaaaaaaccaccacccacatttattgttattctgctcctgaatccactcattttacctctgaattcccagtctgagtcaagcagttcaggggagcaggggccctcctgtggctgagatggaatttgttctctggagcaaagagccactggagactgaatttcaggaatactgcgtgcaacacattgctatttgtagctttgtttccctcactcagcctgaggaattgtctgaatttaccaaaagccatccacatccacaccccttcactggttattccattcatgggaca

SEQ ID NO: 138542 - DNA, 477 bp, Homo sapiens
ccatcacgcatctcaagaactgcttrgtggcgaggtagtgtcgaggcaattcagtgtggtgagtgccacacgcagcctccacacaaatgggtgagaagcctaattgtctttgactaggactgaatttggttccgcttcaaacccttattctactggatggtagaaatgaaatctcaggccatttaggctttcccatgatgttacacagaacaatatgaaattgctgctatttgatcttttctaaactataaaaacagcaactacatatggcccagatgataatgtatctccatcactcccagggtttgtgacagtcatgatcccaggggccacctggtttccatcgccacccactgttgtgcctctgagatgtccttgctgtcctgtgctctccaccattggtccacgaagacctcctctgccctagccccatcagcaagggctccctgactgcagtgaatcctctcagcgattccc

SEQ ID NO: 138543 - DNA, 608 bp, Homo sapiens
gctcacccctcctctgggagccccatccctggagagtttgaaacctctgtcagccagagaacactggcggggatagctggagatccgggttgggaggccccactgaygatgagaaacaggattggggaactgcttaaaaaagcaatctggtcatgttttcataaggcagttgtgctgtgcagggggtccacttcagcccctagtcaccttgtactctccaaaggccagaatagctatgtcactcaaacggcacagatggcaggccatccctccctctgggagctccattccagggaggcttcaaatctctgtcaactggagaacaccagtgggggtggctaaagaccccagttggaagtcctgcacactgaaaaggaatgggagaggggatcttcttaaaaaggcagtctggtggtattttcatagagcagttgtgatgtgctgtaggattcctcctgtttctggtcagcttagactctccaaagaccacagggtggaacggctgtctcccaaacagcaaagatggtggcctacccctacccccaggagctccatcccagtcgcaatattactatcagtggctggctgaaattccaagccagagtttt

SEQ ID NO: 138544 - DNA, 608 bp, Homo sapiens
gctcacccctcctctgggagccccatccctggagagtttgaaacctctgtcagccagagaacactggcggggatagctggagatccgggttgggaggccccactgatgatgagaaacaggattggggaactgcttaaaaaagcaatctggycatgttttcataaggcagttgtgctgtgcagggggtccacttcagcccctagtcaccttgtactctccaaaggccagaatagctatgtcactcaaacggcacagatggcaggccatccctccctctgggagctccattccagggaggcttcaaatctctgtcaactggagaacaccagtgggggtggctaaagaccccagttggaagtcctgcacactgaaaaggaatgggagaggggatcttcttaaaaaggcagtctggtggtattttcatagagcagttgtgatgtgctgtaggattcctcctgtttctggtcagcttagactctccaaagaccacagggtggaacggctgtctcccaaacagcaaagatggtggcctacccctacccccaggagctccatcccagtcgcaatattactatcagtggctggctgaaattccaagccagagtttt

SEQ ID NO: 138545 - DNA, 608 bp, Homo sapiens
gctcacccctcctctgggagccccatccctggagagtttgaaacctctgtcagccagagaacactggcggggatagctggagatccgggttgggaggccccactgatgatgagaaacaggattggggaactgcttaaaaaagcaatctggtcatgttttcataaggcagttgtgctgtgcagggggtccacttcagcccctagtcaccttgtactctccaaaggccagaatagctatgtcactcaaacggcacagatggcagsccatccctccctctgggagctccattccagggaggcttcaaatctctgtcaactggagaacaccagtgggggtggctaaagaccccagttggaagtcctgcacactgaaaaggaatgggagaggggatcttcttaaaaaggcagtctggtggtattttcatagagcagttgtgatgtgctgtaggattcctcctgtttctggtcagcttagactctccaaagaccacagggtggaacggctgtctcccaaacagcaaagatggtggcctacccctacccccaggagctccatcccagtcgcaatattactatcagtggctggctgaaattccaagccagagtttt

SEQ ID NO: 138546 - DNA, 608 bp, Homo sapiens
gctcacccctcctctgggagccccatccctggagagtttgaaacctctgtcagccagagaacactggcggggatagctggagatccgggttgggaggccccactgatgatgagaaacaggattggggaactgcttaaaaaagcaatctggtcatgttttcataaggcagttgtgctgtgcagggggtccacttcagcccctagtcaccttgtactctccaaaggccagaatagctatgtcactcaaacggcacagatggcaggccatccctccctctgggagctccattccagggaggcttcaaatctctgtcaactggagaacaccagtgggggtggctaaagaccccagttggaagtcctgcacactgaaaaggaatgggagaggggatcttcttaaaaaggcagtctggtggtattttcatagagcagttgtgatgtgctgtaggatycctcctgtttctggtcagcttagactctccaaagaccacagggtggaacggctgtctcccaaacagcaaagatggtggcctacccctacccccaggagctccatcccagtcgcaatattactatcagtggctggctgaaattccaagccagagtttt

SEQ ID NO: 138547 - DNA, 520 bp, Homo sapiens
ggctcacagtaaatgagtgaagaaatatatttcacatacgtggaaaacaaaacagagcaaggttgctattcttgtatcacaccacataagccagactttaaacaaacaacagtaaagacagacaaaaaaggcactgtgtaatgacatagggttcaattcaacaagaaggtttatctattctaaatatatatgcacccaacaccaaaraagccagatttataaaacaaatgctaatatgactaagaaaagagatagacattcataaaataatagacgggagttcaatacttcattgacagcagtagaaaaatatttgatgcagactctggtcttaaactgtactcttgaccaattgaaactaatagataaatcagaatatttcatccaacaatggcacgatatacatttttctattctgttcatgaaatatagtcaatttatggatttcatgcacagatgaaaattcacagattaattccccaaaactaatcatatacttgttcataaagcaagtttcaat

SEQ ID NO: 138548 - DNA, 520 bp, Homo sapiens
ggctcacagtaaatgagtgaagaaatatatttcacatacgtggaaaacaaaacagagcaaggttgctattcttgtatcacaccacataagccagactttaaacaaacaacagtaaagacagacaaaaaaggcactgtgtaatgacatagggttcaattcaacaagaaggtttatctattctaaatatatatgcacccaacaccaaagaagccagatttataaaacaaatgctaatatgactaagaaaagagatagacattcataaaataatagacgggagttcaatacttcattgacagcagtagaaaaatatttgatgcagactctggtcttaaactgtactcttgaccaattgaaactaatagataaatcagaatatttcatccaacaatggcacratatacatttttctattctgttcatgaaatatagtcaatttatggatttcatgcacagatgaaaattcacagattaattccccaaaactaatcatatacttgttcataaagcaagtttcaat

SEQ ID NO: 138549 - DNA, 520 bp, Homo sapiens
ggctcacagtaaatgagtgaagaaatatatttcacatacgtggaaaacaaaacagagcaaggttgctattcttgtatcacaccacataagccagactttaaacaaacaacagtaaagacagacaaaaaaggcactgtgtaatgacatagggttcaattcaacaagaaggtttatctattctaaatatatatgcacccaacaccaaagaagccagatttataaaacaaatgctaatatgactaagaaaagagatagacattcataaaataatagacgggagttcaatacttcattgacagcagtagaaaaatatttgatgcagactctggtcttaaactgtactcttgaccaattgaaactaatagataaatcagaatatttcatccaacaatggcacgatatacatttttctawtctgttcatgaaatatagtcaatttatggatttcatgcacagatgaaaattcacagattaattccccaaaactaatcatatacttgttcataaagcaagtttcaat

SEQ ID NO: 138550 - DNA, 520 bp, Homo sapiens
ggctcacagtaaatgagtgaagaaatatatttcacatacgtggaaaacaaaacagagcaaggttgctattcttgtatcacaccacataagccagactttaaacaaacaacagtaaagacagacaaaaaaggcactgtgtaatgacatagggttcaattcaacaagaaggtttatctattctaaatatatatgcacccaacaccaaagaagccagatttataaaacaaatgctaatatgactaagaaaagagatagacattcataaaataatagacgggagttcaatacttcattgacagcagtagaaaaatatttgatgcagactctggtcttaaactgtactcttgaccaattgaaactaatagataaatcagaatatttcatccaacaatggcacgatatacatttttctattctgtkcatgaaatatagtcaatttatggatttcatgcacagatgaaaattcacagattaattccccaaaactaatcatatacttgttcataaagcaagtttcaat

SEQ ID NO: 138551 - DNA, 519 bp, Homo sapiens
ttgtcatcatggccactttgtctatgagtccattaagtaatcactgtagagtaaaaagaggccaaacratatccagataatgtgtcattatgtttaatataacagctttggctgttttctagtggagcacaaatttacgtgggaagtgagcatcctcatactcagtgcccattttgagagattcattcacataccttttcccaaattctcttcaccaattttccaacattattttatctaggtccctatttagccagtttaatcattagtctccattttttaatcatcatatatccacactcaagttatctctctttttgcatatattgaacatcttggtatagcacttgaaattctacccaccaatggaatttccctttacctcagctttctggggtatccatgactgatcttctaagtggccatccatttttagctgggactagcacacactgaagacgctaatataaaccaggcttacctttttttttctctgcaataactggccatagcatgtag

SEQ ID NO: 138552 - DNA, 519 bp, Homo sapiens
ttgtcatcatggccactttgtctatgagtccattaagtaatcactgtagagtaaaaagaggccaaacaatatccagataatgtgtcattatgtttaatataacagctttggctgttttctagtggagcacaaatttacgtgggaagtgagcatcctcatactcagtgcccattttgagagattcattcacataccttttcccaaattctcttcaccaattttccaacattattttatctaggtccctatttagccagtttaatcattagtctccattttttaatcatcatatatccacactcaagttatctctctttttgcatatattgaacatcttggtatagcacttgaaattctacccaccaatggaatttccctttacctcagctttctggggtatccatgactgatcttctaagtggccatccatttttagytgggactagcacacactgaagacgctaatataaaccaggcttacctttttttttctctgcaataactggccatagcatgtag

SEQ ID NO: 138553 - DNA, 611 bp, Homo sapiens
agtttttacttagacaacatatttactaagtaacattctattcaatcttggtttgtttctttctgtgaatyctccttaaaaaatggtaacgaaacttttaaaaatatcttggagattactgcttaagtgctgccatataagtaatgagaatacatattctaatgtttaaaaatccagtaactctttttaccacttgagcaaatttgatgttgaaactatttaaggttatttctaatttattcatgttgattaaaggtaactttttcataaaatgggctctcactactaatttgccaacaaatcaagatgctcactctttattaactttgtaaacctggtagaattatgattttcaaggggacaagctgaatatgttgcactccctgaatagaaaactaagtttgattgctaagtggtatttgggtttgtaatcaaacatcacaatttcatttatgcagtcagtgggaactaagaaaaatttttttagagaaacatgtatttccttctaaatataatgtatcttaccctaatacattataaattataattataaataaatataataaattataatatattataataattataaagtttgatgtttatacatt

SEQ ID NO: 138554 - DNA, 611 bp, Homo sapiens
agtttttacttagacaacatatttactaagtaacattctattcaatcttggtttgtttctttctgtgaatcctccttaaaaaatggtaacgaaacttttaaaaatatcttggagattactgcttaagtgctgccatataagtaatgagaatacatattctaatgtttaaaaatccagtaactctttttaccacttgagcaaatttgatgttgaaactatttaaggttatttctaatttatycatgttgattaaaggtaactttttcataaaatgggctctcactactaatttgccaacaaatcaagatgctcactctttattaactttgtaaacctggtagaattatgattttcaaggggacaagctgaatatgttgcactccctgaatagaaaactaagtttgattgctaagtggtatttgggtttgtaatcaaacatcacaatttcatttatgcagtcagtgggaactaagaaaaatttttttagagaaacatgtatttccttctaaatataatgtatcttaccctaatacattataaattataattataaataaatataataaattataatatattataataattataaagtttgatgtttatacatt

SEQ ID NO: 138555 - DNA, 611 bp, Homo sapiens
agtttttacttagacaacatatttactaagtaacattctattcaatcttggtttgtttctttctgtgaatcctccttaaaaaatggtaacgaaacttttaaaaatatcttggagattactgcttaagtgctgccatataagtaatgagaatacatattctaatgtttaaaaatccagtaactctttttaccacttgagcaaatttgatgttgaaactatttaaggttatttctaatttattcatgttgattaaagrtaactttttcataaaatgggctctcactactaatttgccaacaaatcaagatgctcactctttattaactttgtaaacctggtagaattatgattttcaaggggacaagctgaatatgttgcactccctgaatagaaaactaagtttgattgctaagtggtatttgggtttgtaatcaaacatcacaatttcatttatgcagtcagtgggaactaagaaaaatttttttagagaaacatgtatttccttctaaatataatgtatcttaccctaatacattataaattataattataaataaatataataaattataatatattataataattataaagtttgatgtttatacatt

SEQ ID NO: 138556 - DNA, 611 bp, Homo sapiens
agtttttacttagacaacatatttactaagtaacattctattcaatcttggtttgtttctttctgtgaatcctccttaaaaaatggtaacgaaacttttaaaaatatcttggagattactgcttaagtgctgccatataagtaatgagaatacatattctaatgtttaaaaatccagtaactctttttaccacttgagcaaatttgatgttgaaactatttaaggttatttctaatttattcatgttgattaaaggtaactttttcataaaatgggctctcactactaatttgccaacaaatcaagatgctcactctttattaactttgtaaacctggtagaattatgattttcaaggggacaagctgaatatgttgcactccctgaatagaaaactaagtttgattgctaagtggtatttgggtttgtaatcaaacatcacaatttcatttatgcagtcagtgggaactaagaaaawtttttttagagaaacatgtatttccttctaaatataatgtatcttaccctaatacattataaattataattataaataaatataataaattataatatattataataattataaagtttgatgtttatacatt

SEQ ID NO: 138557 - DNA, 590 bp, Homo sapiens
aaaattaatgaattatgaattaaaggtaaagtagaatatcaaaattattactaaagttttatttcaaaaatggaagaaaatattccatttctccaaagttacaatttgtcagtggaaatggatttatttgctagaaaaggaaaaaataataattgtccttgaagtttcaaaaatacaacaaaagsaaacagaatgaattgtataaatctctgcttattttcaacctaaaagtaaggcattacatgcaatgtgacagtcttcttttatctgttttttctagtaagtaagcacacaaacaaaaacacattctgctttagaagatgaagagtattatatcatattttaatgaacaggtgatcttctttaatgttttactattcaatatgctagaactccgaactctaaagctcatagcatttttatggcaagtagtttaggactggatttttatagctatcagtgtatccaagtcttcttattaagttaaaactaaaaacaaccatatactgtgaacaaatatttaacctacaaaatgtttatattattttcaaaatgacggtcacctttttaactgttaataaaataggttt

SEQ ID NO: 138558 - DNA, 590 bp, Homo sapiens
aaaattaatgaattatgaattaaaggtaaagtagaatatcaaaattattactaaagttttatttcaaaaatggaagaaaatattccatttctccaaagttacaatttgtcagtggaaatggatttatttgctagaaaaggaaaaaataataattgtccttgaagtttcaaaaatacaacaaaaggaaacagaatgaattgtataaatctctgcttattttcaacctaaaagtaaggcattacatgcaatgtgacagtcttcttttatctgttttttctagtaagtaagcacacaaacaaaaacacattctgctttagaagatgaagagtattatatcatattttaatgaacargtgatcttctttaatgttttactattcaatatgctagaactccgaactctaaagctcatagcatttttatggcaagtagtttaggactggatttttatagctatcagtgtatccaagtcttcttattaagttaaaactaaaaacaaccatatactgtgaacaaatatttaacctacaaaatgtttatattattttcaaaatgacggtcacctttttaactgttaataaaataggttt

SEQ ID NO: 138559 - DNA, 590 bp, Homo sapiens
aaaattaatgaattatgaattaaaggtaaagtagaatatcaaaattattactaaagttttatttcaaaaatggaagaaaatattccatttctccaaagttacaatttgtcagtggaaatggatttatttgctagaaaaggaaaaaataataattgtccttgaagtttcaaaaatacaacaaaaggaaacagaatgaattgtataaatctctgcttattttcaacctaaaagtaaggcattacatgcaatgtgacagtcttcttttatctgttttttctagtaagtaagcacacaaacaaaaacacattctgctttagaagatgaagagtattatatcatattttaatgaacaggtgatcttctttaatgttttactattcaatatgctagaactccgaactctaaagctcatagcatttttatggcaagtagtttaggactggatttttatagctatcagtgtatccaagtcttcttattaagttaaaactaaaaacarccatatactgtgaacaaatatttaacctacaaaatgtttatattattttcaaaatgacggtcacctttttaactgttaataaaataggttt

SEQ ID NO: 138560 - DNA, 590 bp, Homo sapiens
aaaattaatgaattatgaattaaaggtaaagtagaatatcaaaattattactaaagttttatttcaaaaatggaagaaaatattccatttctccaaagttacaatttgtcagtggaaatggatttatttgctagaaaaggaaaaaataataattgtccttgaagtttcaaaaatacaacaaaaggaaacagaatgaattgtataaatctctgcttattttcaacctaaaagtaaggcattacatgcaatgtgacagtcttcttttatctgttttttctagtaagtaagcacacaaacaaaaacacattctgctttagaagatgaagagtattatatcatattttaatgaacaggtgatcttctttaatgttttactattcaatatgctagaactccgaactctaaagctcatagcatttttatggcaagtagtttaggactggatttttatagctatcagtgtatccaagtcttcttattaagttaaaactaaaaacaaycatatactgtgaacaaatatttaacctacaaaatgtttatattattttcaaaatgacggtcacctttttaactgttaataaaataggttt

SEQ ID NO: 138561 - DNA, 378 bp, Homo sapiens
ttttatggcaagtagtttaggactggatttttatagctatcagtgtatccaagtcttcttattaagttaaaactaaaaacaaccatatactgtgaacaaatatttaacctacaaaatgtttatattattttcaaaatgacggtcacctttttaactgttaataaaataggtttaatctagaaactgatctcttgcaaaaatattctcatttagccaactcaaaaaacaacttataatgcatagtccagggatgtgatggaagttttgtgcttatgcacatatatacctgctttctacatagatatactaaaattgtgaatcaaycacaactgaaacacaattacagagaaagaggaagcaatccacttttgaaaatgc

SEQ ID NO: 138562 - DNA, 575 bp, Homo sapiens
tgactacatgaatagtgcaagatagagccaaatgtaaagtcatttccaactaagtaacaggagtgctttgctgataactaattaaattaytatttttctttgtaaagggtattttaggtggtaagttatttcatatgtggtatacattactttttagaagtcaattttaatctataaactccattaaaataaaatgtacagaaagactaggtgatgtcagcaaggtggtaaaataggaagctccagaccctctaactcatggagatactgactcaaagaaaatatatgaaacaattacctttgtgagaaacccaaaaacctgttaagaaagaggcttttgtaccctagatgattttgaaaccagccacacagaagctggtaaaaaaaaatctgtggcattcaccaaccatagtccctccccggtacactgtgatggtacaatagagagaaatctcccaggtcttagcttcttcctggggagaaaagagaagactgaaccatatatcaaatattctgccttttctttggggtggtaagactgcctgggagactgccttctgtcttgccagaatata

SEQ ID NO: 138563 - DNA, 575 bp, Homo sapiens
tgactacatgaatagtgcaagatagagccaaatgtaaagtcatttccaactaagtaacaggagtgctttgctgataactaattaaattactatttttctttgtaaagggtattttaggtggtaagttatttcatatgtggtatacattactttttagaagtcaattttaatctataaactccattaaaataaaatgtacagaaagactaggtgatgtcagcaaggtggtaaaataggaagctccagaccctctaactcatgkagatactgactcaaagaaaatatatgaaacaattacctttgtgagaaacccaaaaacctgttaagaaagaggcttttgtaccctagatgattttgaaaccagccacacagaagctggtaaaaaaaaatctgtggcattcaccaaccatagtccctccccggtacactgtgatggtacaatagagagaaatctcccaggtcttagcttcttcctggggagaaaagagaagactgaaccatatatcaaatattctgccttttctttggggtggtaagactgcctgggagactgccttctgtcttgccagaatata

SEQ ID NO: 138564 - DNA, 575 bp, Homo sapiens
tgactacatgaatagtgcaagatagagccaaatgtaaagtcatttccaactaagtaacaggagtgctttgctgataactaattaaattactatttttctttgtaaagggtattttaggtggtaagttatttcatatgtggtatacattactttttagaagtcaattttaatctataaactccattaaaataaaatgtacagaaagactaggtgatgtcagcaaggtggtaaaataggaagctccagaccctctaactcatggagatactgactcaaagaaaatatatgaaacaattacctttgtgagaaacccaaaaacctgttaagaaagaggcttttgtaccctagatgattttgaaaccagccacayagaagctggtaaaaaaaaatctgtggcattcaccaaccatagtccctccccggtacactgtgatggtacaatagagagaaatctcccaggtcttagcttcttcctggggagaaaagagaagactgaaccatatatcaaatattctgccttttctttggggtggtaagactgcctgggagactgccttctgtcttgccagaatata

SEQ ID NO: 138565 - DNA, 319 bp, Homo sapiens
taaaaaatcccagatgttttgaaattgaggacaactggggacacttaaatatgggtagacactagatcatattaggtaattctatttaattggtaataacagcattgtggtcatataacaaaatgtctcctttcttagaagatgcatctggaaatatttaggggtaaattttttaagattcctgcaacttaaatggctcaggatatgaaatgtaaatgtcaggtgtatatatgtgtgtgtrtgtatacacacacacatacagaaatgtagtagggtaaaacattcataatcattcaatttagtggatgggtagagaagt

SEQ ID NO: 138566 - DNA, 319 bp, Homo sapiens
taaaaaatcccagatgttttgaaattgaggacaactggggacacttaaatatgggtagacactagatcatattaggtaattctatttaattggtaataacagcattgtggtcatataacaaaatgtctcctttcttagaagatgcatctggaaatatttaggggtaaattttttaagattcctgcaacttaaatggctcaggatatgaaatgtaaatgtcaggtgtatatatgtgtgtgtgtgtatacacacacacatacagaaatgtartagggtaaaacattcataatcattcaatttagtggatgggtagagaagt

SEQ ID NO: 138567 - DNA, 577 bp, Homo sapiens
attcataaaataagttcctttaggcctaacaaaagacctagataaccacacaataatgggagacttgaacaycctacttacagtattaaacagatcattgaggcagaaaactaacaaagaagctctggacttaatacttgaccaataggacctaatagacatctacagaacactccacccaacaaccacagaatgtacattcttctcatctgcacacagaagtattctaggattacctaagtgcttcttcataaagcaagactcaatacatgttttaaaaatcaaaattataccaagcacattcttggaccacagtgcgaagacaatataaataaatatcaaaaatataccttaaaatggcacaaataagtggaaattaaacaacgtgctcctgaataacttccaggtgaacatcaaaattaaggcagaaatttaaaaattactttaaattaatgaaaacagggacacaacataccaaaatttctagagtgtagctgaagcagtgttaagagaaaaatttatagcccttcatcaaggcaaagtttacaataccttcatcaagaacttaaaaagatct

SEQ ID NO: 138568 - DNA, 577 bp, Homo sapiens
attcataaaataagttcctttaggcctaacaaaagacctagataaccacacaataatgggagacttgaacatcctacttacagtattaaacagatcattgaggcagaaaactaacaaagaagctctggacttaatacttgaccaataggacctaatagacatctacagaacactccacccaacaaccacagaatgtacattcttctcatctgcacacagaagtattctaggattacctaagtgcttcktcataaagcaagactcaatacatgttttaaaaatcaaaattataccaagcacattcttggaccacagtgcgaagacaatataaataaatatcaaaaatataccttaaaatggcacaaataagtggaaattaaacaacgtgctcctgaataacttccaggtgaacatcaaaattaaggcagaaatttaaaaattactttaaattaatgaaaacagggacacaacataccaaaatttctagagtgtagctgaagcagtgttaagagaaaaatttatagcccttcatcaaggcaaagtttacaataccttcatcaagaacttaaaaagatct

SEQ ID NO: 138569 - DNA, 577 bp, Homo sapiens
attcataaaataagttcctttaggcctaacaaaagacctagataaccacacaataatgggagacttgaacatcctacttacagtattaaacagatcattgaggcagaaaactaacaaagaagctctggacttaatacttgaccaataggacctaatagacatctacagaacactccacccaacaaccacagaatgtacattcttctcatctgcacacagaagtattctaggattacctaagtgcttcttcataaagcaagactcaatamatgttttaaaaatcaaaattataccaagcacattcttggaccacagtgcgaagacaatataaataaatatcaaaaatataccttaaaatggcacaaataagtggaaattaaacaacgtgctcctgaataacttccaggtgaacatcaaaattaaggcagaaatttaaaaattactttaaattaatgaaaacagggacacaacataccaaaatttctagagtgtagctgaagcagtgttaagagaaaaatttatagcccttcatcaaggcaaagtttacaataccttcatcaagaacttaaaaagatct

SEQ ID NO: 138570 - DNA, 577 bp, Homo sapiens
attcataaaataagttcctttaggcctaacaaaagacctagataaccacacaataatgggagacttgaacatcctacttacagtattaaacagatcattgaggcagaaaactaacaaagaagctctggacttaatacttgaccaataggacctaatagacatctacagaacactccacccaacaaccacagaatgtacattcttctcatctgcacacagaagtattctaggattacctaagtgcttcttcataaagcaagactcaatacatgttttaaaaatcaaaattataccaagcacattcttggaccacagtgcgaagacaatataaataaatatcaaaaatataccttaaaatggcacaaataagtggaaattaaacaacgtgctcctgaataacttccaggtgaacatcaaaattaaggcagaaatttaaaaattactttaaattaatgaaaacagggacacaacrtaccaaaatttctagagtgtagctgaagcagtgttaagagaaaaatttatagcccttcatcaaggcaaagtttacaataccttcatcaagaacttaaaaagatct

SEQ ID NO: 138571 - DNA, 646 bp, Homo sapiens
agaataaagtgacacccatagagaagtgtggatttacatcctaggtcagtcacagaatactcttgaacagttatcaaatttcttgttcagtttcttcatttataaaatgtaaacaataatgatgtccatctttatggtttttctgcaggttaaatgatataatgtatgcaaatgtgtgtaagaggktttagcacacattaagagctcaaggaaaacttataattgtgtacattatataaaaataacttttacattaattatataatacatacatatcactaactagaactacctaacataatctgaaataattttgacttattatctatatacttgaaaagctattcaatggcttcttcaaatatccaaagcatgagatattggaaaaatacattttgggttgaggttttttagatgtaaataagttcataagcttgaacaaatttatttatgaccaagatctattctaattttaattattttccataatataatatttattgattttctgactttacattggtttatataaatatataaatattacatattggcaataagaaaatgagggttgtttagtaattagctaaattatgtgtaatttgtgtaacaaatcatgtgccataatttacaacatggctaagtt

SEQ ID NO: 138572 - DNA, 646 bp, Homo sapiens
agaataaagtgacacccatagagaagtgtggatttacatcctaggtcagtcacagaatactcttgaacagttatcaaatttcttgttcagtttcttcatttataaaatgtaaacaataatgatgtccatctttatggtttttctgcaggttaaatgatataatgtatgcaaatgtgtgtaagagggtttagcacacattaagagctcaagkaaaacttataattgtgtacattatataaaaataacttttacattaattatataatacatacatatcactaactagaactacctaacataatctgaaataattttgacttattatctatatacttgaaaagctattcaatggcttcttcaaatatccaaagcatgagatattggaaaaatacattttgggttgaggttttttagatgtaaataagttcataagcttgaacaaatttatttatgaccaagatctattctaattttaattattttccataatataatatttattgattttctgactttacattggtttatataaatatataaatattacatattggcaataagaaaatgagggttgtttagtaattagctaaattatgtgtaatttgtgtaacaaatcatgtgccataatttacaacatggctaagtt

SEQ ID NO: 138573 - DNA, 646 bp, Homo sapiens
agaataaagtgacacccatagagaagtgtggatttacatcctaggtcagtcacagaatactcttgaacagttatcaaatttcttgttcagtttcttcatttataaaatgtaaacaataatgatgtccatctttatggtttttctgcaggttaaatgatataatgtatgcaaatgtgtgtaagagggtttagcacacattaagagctcaaggaaaacttataattgtrtacattatataaaaataacttttacattaattatataatacatacatatcactaactagaactacctaacataatctgaaataattttgacttattatctatatacttgaaaagctattcaatggcttcttcaaatatccaaagcatgagatattggaaaaatacattttgggttgaggttttttagatgtaaataagttcataagcttgaacaaatttatttatgaccaagatctattctaattttaattattttccataatataatatttattgattttctgactttacattggtttatataaatatataaatattacatattggcaataagaaaatgagggttgtttagtaattagctaaattatgtgtaatttgtgtaacaaatcatgtgccataatttacaacatggctaagtt

SEQ ID NO: 138574 - DNA, 412 bp, Homo sapiens
ctctattctcattccacacacactttagcttaacaagcacaacatgtttaagaaagaaaatataaaattgccttcatctgctcccaagctatttgtgaacaatctagaagatatttaaatataaagcagtattgaaagaactgtttttcttaaaaaagagtaacacacatcagcttcagaaaatgtgtttttccatagcayaatgtgagaaataggcaaatttgaggatagtaaaaaagaaaaacactttcttccttattctgagtatgtcttttatgccaaagggaatcttcgttatctaggggactattgatggattcacttaaaggacaacccttcatcggctaacttaattcaacaaatgctctccgagttaagatgtggaattacatcgtgtcactccaaaacattt

SEQ ID NO: 138575 - DNA, 412 bp, Homo sapiens
ctctattctcattccacacacactttagcttaacaagcacaacatgtttaagaaagaaaatataaaattgccttcatctgctcccaagctatttgtgaacaatctagaagatatttaaatataaagcagtattgaaagaactgtttttcttaaaaaagagtaacacacatcagcttcagaaaatgtgtttttccatagcacaatgtgagaaataggcaaatttgaggatagtaaaaaagaaaaacactttcttccttattctgagtatgtcttttatgccaaagggaatcttcgttatctaggggactattgatggattcacttaaaggacaacccttcatcggctaacttaattcaacaaatgctctccragttaagatgtggaattacatcgtgtcactccaaaacattt

SEQ ID NO: 138576 - DNA, 396 bp, Homo sapiens
aggtctctgagtttatgctcacttatttcctcttttttttttctttatgtgtaacaacatcttgttatctaccctcaagttctcttcatcttgtcttcctttctttcttattttcattattttgttaaggcttttttttttccttttgagaatattttctattttcttgcctgtttgttggataatgctggattgtatgatgaacattaaaaatatgtgggcatttgatattttattatctttaaataatgtcggttatattgtttggacaggaaaggggcagctcaaatctcagttcagattctttctctttagctgacctcttttgtctgcatcacacatacataggtcatagattagtcataaatatgggtagaragaattatggaccccatt

SEQ ID NO: 138577 - DNA, 555 bp, Homo sapiens
ttgtgcaacacaagtttgatttggggaaggctgttaaatgttcgaggtttaaaacacttgatattaagaaatagaattccagattaccataagttatttattttgataaartgatgactcaagttttaaagaaggagaaacctttcataaccttttataaattttgccaaaaagcagattagtaccttaggaaaaccttgttatgcttttatttcaatgctcaatttacagacaaaccatataataccctttttttgaatttagtcaatatgttcacacagagaacctcttctgcaagattaattcccacaattcttccaccacttctttgaaccttcagctttttcctaatttaactcaaaacagtcctttaactctaggcaaaagtttacatttccatgccttcttataaccttttactaaaaaacacattttactgttcttatacaccttgcatgtaaatctatttctagtagtttcaattaactcctggaaatttttaactttaaggtaaaacttggtaagttgcttttattgtgtgctaactgcagtcaa

SEQ ID NO: 138578 - DNA, 555 bp, Homo sapiens
ttgtgcaacacaagtttgatttggggaaggctgttaaatgttcgaggtttaaaacacttgatattaagaaatagaattccagattaccataagttatttattttgataaagtgatgactcaagttttaaagaaggagaaacctttcataaccttttataaattttgccaaaaagcagattagtaccktaggaaaaccttgttatgcttttatttcaatgctcaatttacagacaaaccatataataccctttttttgaatttagtcaatatgttcacacagagaacctcttctgcaagattaattcccacaattcttccaccacttctttgaaccttcagctttttcctaatttaactcaaaacagtcctttaactctaggcaaaagtttacatttccatgccttcttataaccttttactaaaaaacacattttactgttcttatacaccttgcatgtaaatctatttctagtagtttcaattaactcctggaaatttttaactttaaggtaaaacttggtaagttgcttttattgtgtgctaactgcagtcaa

SEQ ID NO: 138579 - DNA, 555 bp, Homo sapiens
ttgtgcaacacaagtttgatttggggaaggctgttaaatgttcgaggtttaaaacacttgatattaagaaatagaattccagattaccataagttatttattttgataaagtgatgactcaagttttaaagaaggagaaacctttcataaccttttataaattttgccaaaaagcagattagtaccttaggaaaaccttgttatgcttttatttcaatgctcaatttacagacaaaccatataataccctttttttgaatttagtcaatatgttcacacagagaacctcttctgcaagattaattcccacaattcttccaccacttctttgaaccttcagctttttcctaatttaactcaaaacagtcctttaactctaggcaaargtttacatttccatgccttcttataaccttttactaaaaaacacattttactgttcttatacaccttgcatgtaaatctatttctagtagtttcaattaactcctggaaatttttaactttaaggtaaaacttggtaagttgcttttattgtgtgctaactgcagtcaa

SEQ ID NO: 138580 - DNA, 590 bp, Homo sapiens
aattctcatatactcttattaatagctcagacacttttcatgcataaaaaaatccatttaatttctaaatgaagggaagaacagttaaaagagtagtcaaacatggcaggatattgttaaaaagctatcatattttcagatacatctgccactgtcgagggagcaatgtcctgcaagataagcaaattactaaaggtatgtgataaccagcaaaaagagacatttaaaatgaaatttttaattagttttatagacagagctaagtcactttctctyatatgaagtagattttaaaacataattatccatgaaaatatgattatttaaaaatattttatgcactttcttaatcatctccaaatattttattatttttccatgaatattctatgaagtactaaagaatattgcaatgtagagatctttcaaaattctgaggctcacaaatatattgtaatgcataagatttaactgagagaaagcagaagcaaaattataatatttgtatagttaacacaatatttcaaaatatattaattatattttaagttatataaatggaaaaaggaatatttttttatttgaacatc

SEQ ID NO: 138581 - DNA, 590 bp, Homo sapiens
aattctcatatactcttattaatagctcagacacttttcatgcataaaaaaatccatttaatttctaaatgaagggaagaacagttaaaagagtagtcaaacatggcaggatattgttaaaaagctatcatattttcagatacatctgccactgtcgagggagcaatgtcctgcaagataagcaaattactaaaggtatgtgataaccagcaaaaagagacatttaaaatgaaatttttaattagttttatagacagagctaagtcactttctcttatatgaagtagattttaaaacataattatccatgaaaatatgattatttaaaaatattttatgcactttcttaatcatctccaaatattttattayttttccatgaatattctatgaagtactaaagaatattgcaatgtagagatctttcaaaattctgaggctcacaaatatattgtaatgcataagatttaactgagagaaagcagaagcaaaattataatatttgtatagttaacacaatatttcaaaatatattaattatattttaagttatataaatggaaaaaggaatatttttttatttgaacatc

SEQ ID NO: 138582 - DNA, 590 bp, Homo sapiens
aattctcatatactcttattaatagctcagacacttttcatgcataaaaaaatccatttaatttctaaatgaagggaagaacagttaaaagagtagtcaaacatggcaggatattgttaaaaagctatcatattttcagatacatctgccactgtcgagggagcaatgtcctgcaagataagcaaattactaaaggtatgtgataaccagcaaaaagagacatttaaaatgaaatttttaattagttttatagacagagctaagtcactttctcttatatgaagtagattttaaaacataattatccatgaaaatatgattatttaaaaatattttatgcactttcttaatcatctccaaatattttattatttttccatgaatattctatgaagtactaaagaatattgcaatgtagagatctttcaaaaktctgaggctcacaaatatattgtaatgcataagatttaactgagagaaagcagaagcaaaattataatatttgtatagttaacacaatatttcaaaatatattaattatattttaagttatataaatggaaaaaggaatatttttttatttgaacatc

SEQ ID NO: 138583 - DNA, 591 bp, Homo sapiens
gaaaaatgtctaagtatcaaaaatataacctatcagtgttagggcattattactaactgcagtgaaacatatggtttttataagataactgtgttaaacatgctatgtgcaacttaagtctttaacaaggtctccttatcttttactccacctatcctgtattctctcttggagctctgatgaatgaaaaagagatttattaatatatacattaacattaatgcacagctaactcagtcattagtgtcatagctcaggtttttgaagaattcaagtgtagcatcttatsatgttacccaaatgaagagtagaacagagctatgccagcagcaattctgattatttggctgtaagagtagttttgtcacacatcttttgaaaggtacttaaaatggtaaaccaaccttttcatcaatatcaagctttcatggatagcatattgttttgtaagttaccttttcctggtttgataattagaaaatgctattgaaggtatacttttccttagaataatcacatttggcatagattatcttcctgtcatttcttgaaaagattgacatgccctaattttacaaataaaattgtttc

SEQ ID NO: 138584 - DNA, 591 bp, Homo sapiens
gaaaaatgtctaagtatcaaaaatataacctatcagtgttagggcattattactaactgcagtgaaacatatggtttttataagataactgtgttaaacatgctatgtgcaacttaagtctttaacaaggtctccttatcttttactccacctatcctgtattctctcttggagctctgatgaatgaaaaagagatttattaatatatacattaacattaatgcacagctaactcagtcattagtgtcatagctcaggtttttgaagaattcaagtgtagcatcttatcatgttacccaaatgaagagtagaacagagctatgccagcagcaattctgattatttggctgtaagagtagttttgtcacacatcttttgaaaggtacttaaaatggtaaaccaaccttttcatcaatatcaarctttcatggatagcatattgttttgtaagttaccttttcctggtttgataattagaaaatgctattgaaggtatacttttccttagaataatcacatttggcatagattatcttcctgtcatttcttgaaaagattgacatgccctaattttacaaataaaattgtttc

SEQ ID NO: 138585 - DNA, 441 bp, Homo sapiens
aatgtaggcatttaccataacaaacttcccatttagtactgcttttgctgtatyccatgagttttggtattatgtctcttcattttaatttatcttaagatattttctgatttctctttttatttcttctttgacccattgattgttcagaattgtgtttttaatttcctcatatttttgagtattctaattttccttctcttatgggtttctggtttcattccattgtggagaaaaagatacttagtatgatttcattcttttaaaatttgttaagacattttgagaatgtgtatttttctgctgttggatggaatgttttgtatatgactggtaggtccatttggtctttaatgatttgaagtctgttatttctttattttctatttggatcatgtatttggtattaagagtggggtattgaagtcttcagttattatt

SEQ ID NO: 138586 - DNA, 441 bp, Homo sapiens
aatgtaggcatttaccataacaaacttcccatttagtactgcttttgctgtattccatgagttttrgtattatgtctcttcattttaatttatcttaagatattttctgatttctctttttatttcttctttgacccattgattgttcagaattgtgtttttaatttcctcatatttttgagtattctaattttccttctcttatgggtttctggtttcattccattgtggagaaaaagatacttagtatgatttcattcttttaaaatttgttaagacattttgagaatgtgtatttttctgctgttggatggaatgttttgtatatgactggtaggtccatttggtctttaatgatttgaagtctgttatttctttattttctatttggatcatgtatttggtattaagagtggggtattgaagtcttcagttattatt

SEQ ID NO: 138587 - DNA, 441 bp, Homo sapiens
aatgtaggcatttaccataacaaacttcccatttagtactgcttttgctgtattccatgagttttggtattatgtmtcttcattttaatttatcttaagatattttctgatttctctttttatttcttctttgacccattgattgttcagaattgtgtttttaatttcctcatatttttgagtattctaattttccttctcttatgggtttctggtttcattccattgtggagaaaaagatacttagtatgatttcattcttttaaaatttgttaagacattttgagaatgtgtatttttctgctgttggatggaatgttttgtatatgactggtaggtccatttggtctttaatgatttgaagtctgttatttctttattttctatttggatcatgtatttggtattaagagtggggtattgaagtcttcagttattatt

SEQ ID NO: 138588 - DNA, 583 bp, Homo sapiens
ttttcacaaagtgacgaaatgggaacctaaaattaattgaatggagaagcagttctccccatctactccccacaacccacactcgcagcagagatgccagcatgcctttcacaagagctactgctaacctttgagtcaaatattctcgaacatgcccacaggttcttctgctcaayactaacttaccattttaagaaagccactaggggcgaggtcagatagactttattttattggcaatatgggagagtaggtaagcatacagtgtggtcacttgattccaaccctggcttttccatttgcttgtacttgaacttcaggcaagctatgtgacatcctcaagcctttacccagctgtagaatggaaataacattacacatttcgtgaagtgattgtgatacttcaatgaagtaaaacttgcctagtgccattttgaagtacttgttcaatggataattgtctttgactctcacgtctggttttaaatagcagcttccttgagctcaggtcttggttttgcagaaaggcttcactgagactgacaatcttgctgggattcttgaagctacaataatatcaaag

SEQ ID NO: 138589 - DNA, 353 bp, Homo sapiens
ttaatctttatttttctcaaaaggtatccaattaatcaaaatcctcattctactaaaaaaaaactagaaagctttattaccttcttctagcttccatgttgttatagagttcaacatttttatttaatctcattactaatattcacaaaataagttttttacgctaaaacgcatttacatatttctaatgtacttttactgcttccattttcaccattgctttatgttccccaatatggtttgcctgcttccccacycaaatctcatcttgaattgtagctcccataattccctcatgttgtacatgggatccggtgggagatagttgaatcatgggctggtttctcctatac

SEQ ID NO: 138590 - DNA, 591 bp, Homo sapiens
actatcacaataaataatagtcaatactgaatctgtttttattgataaaattagaaatctctcttttacccaagcatagcttccaagatctgataggtagaraacagctgccagaaagacattcaattataaatgttgtgatcatctatttgcttccttcattaacattaataacactataaatcaaagtaaaaccaccataggaatatacttgtcaatagactgccaggagaaaataccatcaaaaatacgtttgaatgtgaagttagcacaagcttggtgaatcatttgacctgccaggaccgagtcagatgtggaactgaatgaattcacaatggtatcatggttctcacactgaaggtacccaccctgaaaaaggaacaagttaccttcctgattttattttttgacacaatcatggaaagtactttctgaggtcattcaatccatttgctggcttccaggtgctatttcagaggattattcctttcctattaaagtatttgcaggactctctccttttctctaacaaaatcgttactttccagaacataatatgcctcttagaggctgacatactataggaaaaat

SEQ ID NO: 138591 - DNA, 453 bp, Homo sapiens
tggttttcacagtgcacaacgaaatctgattctagctctattacctcaaccagctgtctgacattggggatgctagtcccactgtctggacctctgcagcttggtctgtatgatgcggaatggggctaacatggcctcagcagttgcttcagctttgccgtcctgcccttctctggcacagactcccaggggcagccagggttctcacagccaccagacactgcaccctcctcgctgcctcccacgcagcagatggggctgctagatgagagcatgagcagggcagcagccggaagcatacaygcccattggatttcagctatttccatgccctggttctgcccacacaggccgccttggcagaagtgtcgagtctgcagctgctgcccagagcacttgtggagcctggtcagcagccccaccctgctggagtccagagacggacacctaggc

SEQ ID NO: 138592 - DNA, 603 bp, Homo sapiens
gtgggactatgttacaagcccttttattcctgccactcacagcttggcaaactgagggtatgttacagcttattcattcctgccacctacagctcagcaagtttccggttctcgttcggcaacgaagaggaattaaggtacgcagatgtcagagtgtgagtaaggcagagaagaattttattgagtgacaggaggaaagctctcaagtgcaagaagggaccctgaaggcaagttgccctcagctgcaagtggtggccccaaaatgggtagccatctgtgaggctggtccaggggtttttatgggctcagaatgggagagggcatgctgattggtccatgggtgggcttgggaaaaagcactattcaattggttgaaaggcatgatccagaaggaatcaattgagagagacggtaagatggggatagaagttctcactttggtygtgggctctatctggaaccatcagctcggttttcaggctttaaactgtctttggcttcaaggttgagtttcaaggggacctgttcctgtctgcccaggaatttgtctgtttcctgtccttatcaatatctaaaacagtgattgacagacatgggaaaaca

SEQ ID NO: 138593 - DNA, 518 bp, Homo sapiens
gtggtgggggacacagttgtttgtgtgagcttggtaggcaattgtaattacatcactttccactctgtaagtcaggaagcctttggaaaaatttatttaaagcaagaatatgattttatttttatttttaaaacattacatcagcttctgtgttaagaacagagtataaagggggaagagcagatctcagaggggttagaaggcaattacaacaatccttgtaaaagatgatggcaccttagaccacagagagatagttggggtgaaaagaaatttttgacataatcttgaaggtattttcagtgggatttggtggaggatcagatataaagtaaaagaggcgaaaggagttgaaaatgactccaagatttttgacttgagtcactgaaggaatggagttgctcattggcytagatggggaagccagcagcgggtggtaagaaaggagttttcaggatcttgatttggggcatagtgagagtttcagtgtctattaatattcaagaggatattgttgg

SEQ ID NO: 138594 - DNA, 599 bp, Homo sapiens
ataattacaaaacctgtgaatccatggagaccagaaacatgtgcccctgagaggtttctgtgaatcggcattactatcgaaaccacacattatctgttaggattttaaacactgaagccctgacaaaatgtcactttcattctttacaaatagggtaaggttttttagggtctctttaagtggcataagtagcaggagggatctaggagaaaatcagccgtaaatgtatgrccccattaatgaagggaaagccggctccccaccagccgtttccaaggcaacccacaggctggacaagcaccgtctcttctgtttcccattatggagatcgcctctacagcccataagaggagagcaagcatggtcagaaactctttctcccagtgttgcccgcacagttcgcaaatgcaaagctgtgagcagggatggtctgtgaaatgcctccatggacctcccccctgaatgcattccacctgcactcaagacatgtgtgatttaggaggggaaaaaaaataataatagtctcatgcagagccgtacatttccaaaagctctgataggagaaatgcttaggcttttcagataggcagggacatttc

SEQ ID NO: 138595 - DNA, 561 bp, Homo sapiens
tttaccatggctcttttctaaacaaacaattccataagcctattttctacaatcatcagatcacacaaggaagaaacacactgaactcttgatgaaaaatgctataaactaccttattatctctaggcaatcaccaagtcccatcttaccttaagtcatcttaatctgcacatacatccttttgaagttcaggtggaagaaaaaagyatgatgtggagctatttttgcctggccattccagcagagactcttctttgcagcatgaacttttgttattaatctttaaaaagcataaccaaaaatctatttgaaattcttatcacttaaagacctttaaaaattctgcctctgttatttgagttgttaaatccctgtggcttgaaattccataaaattgcttttgcattatgtgtggagttgtcatactttaacagttcaggatttactgcttcttaatgtcatgaagcatcaacaggcaagaagttgagatgccagttcttgtctctctcatctcacagtcacttaactcctttgaggacagtatctcttattaattaagta

SEQ ID NO: 138596 - DNA, 561 bp, Homo sapiens
tttaccatggctcttttctaaacaaacaattccataagcctattttctacaatcatcagatcacacaaggaagaaacacactgaactcttgatgaaaaatgctataaactaccttattatctctaggcaatcaccaagtcccatcttaccttaagtcatcttaatctgcacatacatccttttgaagttcaggtggaagaaaaaagcatgatgtggagctatttttgcctggccattccagcagagactcttctttgcagcatgaacttttgttattaatctttaaaaagcataaccaaaaatctatttgaaattcttatcacttaaagacctttaaaaaytctgcctctgttatttgagttgttaaatccctgtggcttgaaattccataaaattgcttttgcattatgtgtggagttgtcatactttaacagttcaggatttactgcttcttaatgtcatgaagcatcaacaggcaagaagttgagatgccagttcttgtctctctcatctcacagtcacttaactcctttgaggacagtatctcttattaattaagta

SEQ ID NO: 138597 - DNA, 507 bp, Homo sapiens
tctgggataaagtggtgaaataaagaatcaccaacttggactcttgcaagctggattgtacacaaagacccctggggaggaaggaggccgcacgctgaggaaactggaagaagaaccaggggatgagcagagaaagtgaaagggctcctgtgttacggtagaaaatgcgagcaggaggtgctaatccagggctgaagagacaaagagtaagcacccatgggttcatagaagaaggactcccttgatagggtagatctactcagtacaaagatgttcaaggagcttcttttcctgaagggccagaaatattgtggaatctaaaaggaaggaagataggagcctttagcatgaaggctggtcttgcccagtcagggcctttaaacatctaaaaytttcaccagaaagtgccacgtagaaaaattatagatttcaagaaaaagtgctggagagcttcagagggtggtgatagtccttcattcattttcctatccccagtgaagagcacca

SEQ ID NO: 138598 - DNA, 589 bp, Homo sapiens
tcccatggctggcaggagagagagagtgaaggggaaagtgctacatattttcaaacaactagatcttcttgagaactcactcactatcagaagaacagcaagagggaaatccacctccatgatcaatcgcctcgcaccaggcccctcctccaacaatgaggattacaattygacttaagatttgggtgagtacacagagacaaaccatatccctcacataatgtccccagggataatttaggtatcatatatttattcacaatagccaagatgagaaaacagcctaaatgaccattgaaagacaaacagatttgaaaaacgtggtatatacgtgcagtggaacattatttagccttaaaaagaggcaaatgtaacagtgcttctgccttgagatgaatgctgtttatctgcactgtccgtaaagtatccacgtagggctgttgaggacatcaaatgtggccagtgtgactgaacaactgaattttgaattgtattgagttttaagtcatctcagtataagtagctatatacagctagtagcacagctttagactataatgctatataatcaggacattgattatataaa

SEQ ID NO: 138599 - DNA, 618 bp, Homo sapiens
tgtgactgaacaactgaattttgaattgtattgagttttaagtcatctcagtataagtagctatatacagctagtagcacagctttagactataatgctatataatcaggacattgattatataaatgaagtctgatgctacaggctttcaaatggaaataaactatcatcattgagttgctcattagcaacaaagacgtcctcaatcttgattttgtggcaagaacctgaaccatcccactttgactgaaggacatgtgacagtaatcctttctttattayaatgtttgtgtgctgaaattcacttgaaacaaaaaggtaggctatgtttagattcttatagcattttctactaatttttttaccatcctactcttcttctgtaaattctcccttctgatttcaatatacatatatatgttttaaaagttctattggctcagatggcaaatagtaatggctgcttttcctggtttctggaggatttaataccatccgcgtagatcacacagcatttcttcaatccactaatttaatctctggtgaaagatataaagcactgggttaatgctcatggtattattcactgtagtaccacatactccatggatttgaatg

SEQ ID NO: 138600 - DNA, 618 bp, Homo sapiens
tgtgactgaacaactgaattttgaattgtattgagttttaagtcatctcagtataagtagctatatacagctagtagcacagctttagactataatgctatataatcaggacattgattatataaatgaagtctgatgctacaggctttcaaatggaaataaactatcatcattgagttgctcattagcaacaaagacgtcctcaatcttgattttgtggcaagaacctgaaccatcccactttgactgaaggacatgtgacagtaatcctttctttattacaatgtttgtgtgctgaaattcacttgaaacaaaaaggtaggctatgtttagattcttatagcattttctactaatttttttaccatcctactcttcttctgtaaattctcccttctgatttcaatatacatatatatgttttaaaagttctattggctcagatggcaaatagtaatggctgcttttcctggtttctggaggatttaataccatccscgtagatcacacagcatttcttcaatccactaatttaatctctggtgaaagatataaagcactgggttaatgctcatggtattattcactgtagtaccacatactccatggatttgaatg

SEQ ID NO: 138601 - DNA, 517 bp, Homo sapiens
atgttgaccgtcagccaccagcraataagaaatggcaattaaaatattcatgcttttacaatatatcctacatgtctattgagagcatgtctttttaaaaacctgagctctacttgtaattttgccttttccatatttatttatttatatttattattttatttatatttattgtaaaccaaatgtcccaattcacatttacctttcttccttaaagatatgaaatatttttcctgctttacgtctaagtccttttcttttgcttgtatctttcaaatcaatttctttaatcaattgattatataaacagagttttaaattctctttgtgtctattgatctttttttcaatcttccacctattgatcaaagcatttgatcaatagaataaagttacaatatcacctgccatatcccatacttgggcacttttgcttaaagaagaagaatgcagaggtttgtttttattctcaaaatgattacaaccttaaatgctgcattggatatgtgcattacct

SEQ ID NO: 138602 - DNA, 486 bp, Homo sapiens
caaaaattgtcttttcttcctgagactttctgctgctacattactttgcatgagttatacttatttcatcactgctattaacattctggtttctgccattcctgaacagctcaaagcattatgtcattacccttgcatagcctctggtatgagctaatcaatagagagatgtttgtaactaagagcgatgaagaaatgttgaggaggtgcatgaggttatctcctaccttctgattctgctctgattcccaggagaaatgatttttatcccatccaccctgacatgactaacctacagtcctggccacgcatactcacaatagaacagagggacagggaacagctttctcaggtaccctttcctcttgtgatggtgrcagttatttcttcacctccatgaaatctatgcaaaagcatttagtgaccggaagacagtgagggggaaccaccaatgcctccatcaaggagggccagagtgagagcatc

SEQ ID NO: 138603 - DNA, 486 bp, Homo sapiens
caaaaattgtcttttcttcctgagactttctgctgctacattactttgcatgagttatacttatttcatcactgctattaacattctggtttctgccattcctgaacagctcaaagcattatgtcattacccttgcatagcctctggtatgagctaatcaatagagagatgtttgtaactaagagcgatgaagaaatgttgaggaggtgcatgaggttatctcctaccttctgattctgctctgattcccaggagaaatgatttttatcccatccaccctgacatgactaacctacagtcctggccacgcatactcacaatagaacagagggacagggaacagctttctcaggtaccctttcctcttgtgatggtgacagttatttcttcacctccatgaaatctatgcaaaagcayttagtgaccggaagacagtgagggggaaccaccaatgcctccatcaaggagggccagagtgagagcatc

SEQ ID NO: 138604 - DNA, 486 bp, Homo sapiens
caaaaattgtcttttcttcctgagactttctgctgctacattactttgcatgagttatacttatttcatcactgctattaacattctggtttctgccattcctgaacagctcaaagcattatgtcattacccttgcatagcctctggtatgagctaatcaatagagagatgtttgtaactaagagcgatgaagaaatgttgaggaggtgcatgaggttatctcctaccttctgattctgctctgattcccaggagaaatgatttttatcccatccaccctgacatgactaacctacagtcctggccacgcatactcacaatagaacagagggacagggaacagctttctcaggtaccctttcctcttgtgatggtgacagttatttcttcacctccatgaaatctatgcaaaagcatttagtgaccggaagacagtgagggggaaccrccaatgcctccatcaaggagggccagagtgagagcatc

SEQ ID NO: 138605 - DNA, 633 bp, Homo sapiens
accaactatagatgtttccagaactgtcatggcactggtgagtgtggtaatttagcatattaatgactatgtaatgaggtcctagatgaaacctgggtcaaatccaacaccatgttgggtccagtgagtgttagccagcttggcccatatcttgtttttcaggatcttataggcccctagcttatgaatctatttcaacagtttccttttgctagtcatgtgaaactgctgcctagaatttttctattctctggcgatcactctgtattattcctgtctcmctatgagccaagtcttctgctagatgctgagcacacagatatgaaaaagaaaattgcctagcatccagtgagttagtgaggaagcaattccatttagaaataagaaaacctttgaaaccacctttgcacaaattatagaaacgagaaaaggatgacagtggaatatacctgatctaaccagcccccaacttacctatagcctccaaactgcccttaatcatcgctaggcttgggccaagctatctttgggagaaatttagtttatagtttaaatgataatagcccttccccaaaactaaaccaccttggaaaagttaatgaaaggcctgccaagttaggaggatgagaggag

SEQ ID NO: 138606 - DNA, 592 bp, Homo sapiens
cccatatcttgtttttcaggatcttataggcccctagcttatgaatctatttcaacagtttccttttgctagtcatgtgaaactgctgcctagaatttttctattctctggcgatcactctgtattattcctgtctcactatgagccaagtcttctgctagatgctgagcacacagatatgaaaaagaaaattgcctagcatccagtgagttagtgaggaagcaattccatttagaaataagaaaacctttgaaaccacctttgcacaaattatagaaacgagaaaaggatgacagtggaatatacctgatctaaccagcccccaacttacctatagcctccaaactgcccttaatcatcgctaggcttgggccaagctawctttgggagaaatttagtttatagtttaaatgataatagcccttccccaaaactaaaccaccttggaaaagttaatgaaaggcctgccaagttaggaggatgagaggagcctgaattctgctaaggtgtagacataaaggattaccagccattattccagaagctgtaagatttgcaacttccctaattactcctgcagataatatcacta

SEQ ID NO: 138607 - DNA, 542 bp, Homo sapiens
ccagccagaaacagatattttaaactaaacttctcattctagtcttgttgactttgcattaattgcagttttgtacagatactcctttgcagtaagaaagagacttggggaagtacactctcatgtgtcataaccagctcatggggagaaattactttggacattatttgaacmaaaatgtatttattgtttgaataaaaatgtattataggaatgaatttcaaattgagattaatataaatctttttattcagatactataaaaatgatctataatatatactacattatttcattttttaaaatgacattttcataagctcacataaagtagatttcacctcaactcttcagtttgcattaacaagtcaattattattgtgtttagctgtagggaaaccattaggacattgataagacatcttaactgtgatgagagcaattgtgaatgtaaggggtagcagtttgtagaatgcagtgagattaatctgtagtgtacttcatagggattggtaaaatcaggcaattcaccaggacacagt

SEQ ID NO: 138608 - DNA, 566 bp, Homo sapiens
ttatatcagataaaataggctttaattcaagaattaaaaaaaggacaaataaggccattatataataacagatcaatacagcaagagaatgtaacaattgcaaatatatatatatayacacacacacacacacacacatacacctgatatcaatacacccaaatacataaaacaaatattaatacacctaaagggagaaaatggctgcagtataatagtagggaacttcaaaatcccattttcagcaatggacagatcatttaaacagaaaatcaacaatgaatcattggactctatactactgtactctataccaaatggacctaacagacatttatagaacattccatccaatagctgcagaacaaacattttcctccatgtcacgatgaaacctttccaggaatagaccatatgtttgtcctcaaaacatgtcttaatgaattttgaaaaaacaaaataatatcatgtatttttctgacaacaatgaaataaaactggaaatcaatttaaaaagttagaaattgtataaattcatagttattaaacaacttactcctgaacaa

SEQ ID NO: 138609 - DNA, 399 bp, Homo sapiens
attattatactttaagttctgggatacatgtgcagaacatgcaggtttgttacataggtatacacgtgccatggtggtttgctgcatccatcaacctctcatctacattaggtatttctcctaatgctatccctcccatagcccccaatgccytgacaggccctggtatgtgatattcccctccgtgtgtccagaagcaagagtaaacaaattaaaaaaactagctgaagacaagatataactaagatcagagcagaactgaaggagagagagacacgaaaatcccttcaaaaaaaatcagtgaatccaggagctggtttttgaaaagattaacaaaatagatagatagaccgctagccagactaataaagaagaaaagagagaagaatgaaatagaca

SEQ ID NO: 138610 - DNA, 592 bp, Homo sapiens
accttaattttcaagagaatcccaggtatactgctccaataggtgtatcattccatctgaaagtacttgtgacctatgcttttgaagaaatgctagcttgtttatacctctgactttgacttagctttatcatctaaaactatctcctgcatttttatctaataggaatgatagttttttgtattattatactttaagttctgggatacatgtgcagaacatgcaggtttgttacataggtatacacgtgccatggtggtttgctgcatccatcaacctctcatctacattaggtatttctcctaatgctatccctcccatagcccccaatgccctgacaggccctggtatgtgatattcccctccgtgtgtccagaagcaagagtaaacaaattwaaaaaactagctgaagacaagatataactaagatcagagcagaactgaaggagagagagacacgaaaatcccttcaaaaaaaatcagtgaatccaggagctggtttttgaaaagattaacaaaatagatagatagaccgctagccagactaataaagaagaaaagagagaagaatgaaatagacacagtaaaaaat

SEQ ID NO: 138611 - DNA, 589 bp, Homo sapiens
aataaagtcaataaacaaagcagagaatggttgtgtttaacattatttgtaaatactttaaaacataatgagttatcctgccttgattatacatcatagaaacagtatttaacatcactttatatataataaatggataagttttgactgctgttcttcaaatctgctaatgtgaaaactgtgacttaattgtttactttcatcactagtcaaggaagaaatgtttacagtttacttactaagaaactgtcattctgtattcttaggaggccacctcttgtcagacaactartgctaggaggataaaacacatgctggaaaaatgacacctaaacagcatacttatgttatactttccacaaattaaattatgtggtactaacatctaatagctcttacttcactacaggcagtgttttaacgtttttttgtcttaatgttttaatgtcttctataaacaaagacaaggacggaattataaaacatgttacatatcatggtaattattttatatctggatctagacttggatcaaatacggggcactcttggtccccacatcctacaaatgtggggttgtatagtattt

SEQ ID NO: 138612 - DNA, 352 bp, Homo sapiens
cctgaagcaactttggaattgggtaacacgcagaggttagaacagtttgcagggctcagaagaagacaggaagatgtgggaaagtttggagcttcctagaggcttgttgaatggttttgaccaaaaagtccagactcaggtggtctcagatggagatgaggaacttgtaacaactggagtaaaggtcactcttgctgtgcaaagagactggtgacattctgctgctgccctagagatctgtggaactttgaacttaagagagatgacttagggtatctagtggaaaaaatttctaagtgacaaaacagtccagaggaaagrcagcataaaagtttgaaaaatgtgtagccca

SEQ ID NO: 138613 - DNA, 306 bp, Homo sapiens
cagcaatatcgtttaatgtaaaattccctgcaagcaatgcttttcaattctaatgaaatcagtaaagatgatgcagatgattaaaagaatgattttgcttccatttgtgaagtatatttacttatgagcaattaagtatgtgctatttactgcttataaattaacagaaaatatttactgtgctagcttacaattatcaaaaaaaaaccccaaaagtttgacttaataaatttgaccctgttaaaaattgtgtcaaartattccattctgaggaaagtgtgagagggaagacataaaagcaacttt

SEQ ID NO: 138614 - DNA, 590 bp, Homo sapiens
aagctttccatcatcaagcctataatcccagaactttgggaggatcatttgaggccaggagtttgagaccagcctgggcaacatacgctggattcgtctctgccaaaaatacaaacctcagccgggtgtggtggcgtgtgactatagttccagctattcaggaggctgaggtgggaagatcgcttgaaccaggaggcagaggtcgcagtgagccaagatcacaacagtgcactccagcctgggtgacagagcaagactctgtctcataaaaacacaaacaaaagttccagcagcccataataagtgaccaagatgttttgcttgaccagactttagtcaggctcctgggcccatctgtgtacctctttgtaaaatctggttttagcaaaacaaaaaacaaacaaacaaraaaacccacaaaaccactcatccttgatatttgatcaccattatctgttcacttgctatctaacgaggtttaaggcttaggttagggatacccaatctttcagtttccctgggccacactggaagaactgtcttgggccacacataaaacccactaacaataactgataagtgcatatatc

SEQ ID NO: 138615 - DNA, 590 bp, Homo sapiens
aagctttccatcatcaagcctataatcccagaactttgggaggatcatttgaggccaggagtttgagaccagcctgggcaacatacgctggattcgtctctgccaaaaatacaaacctcagccgggtgtggtggcgtgtgactatagttccagctattcaggaggctgaggtgggaagatcgcttgaaccaggaggcagaggtcgcagtgagccaagatcacaacagtgcactccagcctgggtgacagagcaagactctgtctcataaaaacacaaacaaaagttccagcagcccataataagtgaccaagatgttttgcttgaccagactttagtcaggctcctgggcccatctgtgtacctctttgtaaaatctggttttagcaaaacaaaaaacaaacaaacaagaaaacccacaaaaccactcatccttgatatttgatcaccattatctgttcacttgctatctaacsaggtttaaggcttaggttagggatacccaatctttcagtttccctgggccacactggaagaactgtcttgggccacacataaaacccactaacaataactgataagtgcatatatc

SEQ ID NO: 138616 - DNA, 590 bp, Homo sapiens
aagctttccatcatcaagcctataatcccagaactttgggaggatcatttgaggccaggagtttgagaccagcctgggcaacatacgctggattcgtctctgccaaaaatacaaacctcagccgggtgtggtggcgtgtgactatagttccagctattcaggaggctgaggtgggaagatcgcttgaaccaggaggcagaggtcgcagtgagccaagatcacaacagtgcactccagcctgggtgacagagcaagactctgtctcataaaaacacaaacaaaagttccagcagcccataataagtgaccaagatgttttgcttgaccagactttagtcaggctcctgggcccatctgtgtacctctttgtaaaatctggttttagcaaaacaaaaaacaaacaaacaagaaaacccacaaaaccactcatccttgatatttgatcaccattatctgttcacttgctatctaacgaggtttaakgcttaggttagggatacccaatctttcagtttccctgggccacactggaagaactgtcttgggccacacataaaacccactaacaataactgataagtgcatatatc

SEQ ID NO: 138617 - DNA, 427 bp, Homo sapiens
ctctcagctcttcccctgtgccgcgctggcctgccttcccgcttccctaggcctgtggactctcttccctctgcctgcactgtcttcatctgtttcgccttcctggaggactcctacacacccgtcaaggcccggtgtgaatgttccctctgctcggatgccctccttgtctttgtggtgttggtgtcccgtrtggtggtcgtgtgcatgtctgtttcttcaactccttggcgaagtcctcctggagagagggactttgtccctttggtggtggtatccttggcggggaatccccatccttcatggttagatggctgccaatctctttcccccatgggtgtgttgctcccttgagtgggcccaagtcatgggctgaatcctgggtcataggcttttcccagcacgtgctggctgtccactcctttgt

SEQ ID NO: 138618 - DNA, 427 bp, Homo sapiens
ctctcagctcttcccctgtgccgcgctggcctgccttcccgcttccctaggcctgtggactctcttccctctgcctgcactgtcttcatctgtttcgccttcctggaggactcctacacacccgtcaaggcccggtgtgaatgttccctctgctcggatgccctccttgtctttgtggtgttggtgtcccgtgtggtggtcgtgtgcatgtctgtttcttcaactccttggcgaagtcctcctggagagagggactttgtccctttggtggtggtatccttggcggggaatccccatccttcatggttagatggctgccaatctctttcccccatgggtgtgtkgctcccttgagtgggcccaagtcatgggctgaatcctgggtcataggcttttcccagcacgtgctggctgtccactcctttgt

SEQ ID NO: 138619 - DNA, 556 bp, Homo sapiens
aggaacaacattatggtgatgaagaagggattagaggttgctgggattaggagggtgttactataaaaagtaaggaggagtttttcaggggcgatggaagttttgcctmctcattgtagcagtggttacctgaattgatgtgtgtcatacaatttcatagaacttgtgttgtggggggcaggaaaccactctcagacccagtgattggctagaaagactcaggactcagaaactgttgagctcagagggagagggtgaccagtctctgcagttgcagccctggggctgttctaatctgtatcttttcctggtaatagacatggctgtgagcatgagaggtgtcagtgagctctgtgtgcctcatcaacgaatcatccaacctgaaggtggttgtgggaaactcttggacctgcagtcagtatcagaaggcctgggcagacttggccagccacctggagcactgtgcccttaaactcaggtttgcctaacatcagatactatgtaaaaaccagtgaaattgaaataggtctgctgataacaatatcataccaagctt

SEQ ID NO: 138620 - DNA, 556 bp, Homo sapiens
aggaacaacattatggtgatgaagaagggattagaggttgctgggattaggagggtgttactataaaaagtaaggaggagtttttcaggggcgatggaagttttgcctcctcattgtagcagtggttacctgaattgatgtgtgtcatacaatttcatagaacttgtgttgtggggggcaggaaaccactctcagacccagtgattggctagaaagactcaggactcagaaactgttgagctcagagggagagggtgaccagtctctgcagttgcagccctggggctgttctaatctgtatcttttcctggtaatagacatggctgtgagcatgasaggtgtcagtgagctctgtgtgcctcatcaacgaatcatccaacctgaaggtggttgtgggaaactcttggacctgcagtcagtatcagaaggcctgggcagacttggccagccacctggagcactgtgcccttaaactcaggtttgcctaacatcagatactatgtaaaaaccagtgaaattgaaataggtctgctgataacaatatcataccaagctt

SEQ ID NO: 138621 - DNA, 293 bp, Homo sapiens
ccaccctcctcccagggctcacctctcgttttcattgtgcccgatgcatctctgctcgggtggacctactcaaaaccaaggtctgaggattttgtttggaaatttagcacaagtgttatcactgttccccgatcactttgtaagctgccttttatacctgcctttatgttctggggtttaatagagccatcacagcttgtcttgcctgtgcgtgcacgcagtggtgtggcctgtcctccgcagtgacacyggacatgggaactgctggggatgaaccaaggagcaaagaattc

SEQ ID NO: 138622 - DNA, 501 bp, Homo sapiens
tcagcccccacgccctccaagcacaacctgtctgccttttaaaaaaaacaaatgactgcatgaagcagcttcctgcagagtccgtggttcctgagcacgcccatcaaagaccaccaggacagtccctccagtgctccctccccaaaatcccacaccccaagagagggaacagccatcatkagcaagagagctactgactatcagccctgggtaccaggaggcctttctgcctgtgctgcctctagctcctctgcttgcccataagccacgaggattcagatgcatatcatagcatcacactgagccccatctcagggctgccgtcactgaggatacagcaaggtcaggagccccatcctgaggacggtggtttccttctggtcggtgtcatgcactcagagcccaggccaattgcacgctggatgtccctgatttgaagactatggatgccctccccttcccacccagagagagtcttgttcatgaaaagacacagctgtt

SEQ ID NO: 138623 - DNA, 387 bp, Homo sapiens
cctgaaatcctgagtctcagaagatgttggaactagtgggtcgtggcaaagaagagcacttggagaaaactgtrataatcctttaattggtaaagcagagttctgtgtggcaggggcaaagtggaaggagaagtttgtactgaaaagcacaggctgagttggataaagctcctgatttgaacttttgtgtaatgtctcacagaaattctaaaagcaagcccctaaatgctgtggtatagctagtatggaattcatgctcctcacaggagctcttcctgtctttagcccctttctctctccccttccctaccttcactccattctgactttggtggccttcatctgagcacccatagtagctgcccttacttggtttgtagcacaagt

SEQ ID NO: 138624 - DNA, 391 bp, Homo sapiens
tgagatcccatccccatctctggcattggtctccatccttccagcatctcctctttggtcattgctcagcattttctgtctgttcagagaagggcagcagcaatttgctttcttgccatgtttactttatgtctttgtccaatatctatttgtcattttyattgtatttctctctctttctctgaattcatctttggatgaggccttgtccttagcatttgctttcagaaaagagaacagaacacctggtggaaccaggaatttatgtcactggttttgaacccagctacataggaaatggaacattcacatacccattggggactgtagaaacttaaaactatacagtgagtttatattcttcaaagtactttcaaaagcattatttctt

SEQ ID NO: 138625 - DNA, 641 bp, Homo sapiens
tctgaaatccacagtggaagcaagctgtggccatgtaaatggattgcaagagagtgacctcagagaggagcactgaggttaaagacaattttgcacaaacaagatgagttatattttctcaattcaaaggtaacttgatggaaacatcttagcctcaaatctgattgctttcaccaggacagtgatgaaactggctccattgataaaagccaacacatttccctccctaatttcatcagcttgaccctttcttctgattaaatgcttataatttttctcccagcatgtaattttttaattataatatgtttgaagaacatcaaaattatttggctgtttgcagggtgattgttgaaagcagagtcaattcgtttcttctctgatgtgccgggccccagtgggtgcctgagaaataataattgacgacagtggcagacatgtccctgtggatgggctgatgtgctcacgggcagtgacagtggggagaagaaggctctgaatttmctagtgctgaattcctgcctccccatgcagttgggatggtagaggagagaggaaaaagacagtgaatttcatactgaatgtcttatgtatcataaaggaatttctgctcaaaggcctccaactaatttagttggttt

SEQ ID NO: 138626 - DNA, 516 bp, Homo sapiens
aacaaacagaaaattaaaaagagtggggtaattattctcatattagataaaacagactttaaactaacaacagtaaaaaaggacaaaggggaacattacayaatgataacaagttcagttcaacaagaaggcttaattattctaaatataaacacacccaacattagaatacccagattaataataaaacaagtacttctaggcctacaaaagacttgaacagttacacaataatagtgggggattttaatgccctactgacagcattagacaaattattaacatagaaaattaacaaagacattttggacttaaattcaacacatgagcaataggacctaatagatatctgcaggatactccacccatcaaccaaagaatatacattcttatctgcacacagaacatagtctaagatagaccacatgtatggccataaagcaagtttcaataagttcaaaaaaattgaaatcataccaactatactctcaaaccacagtggaatacaaatagaaa

SEQ ID NO: 138627 - DNA, 516 bp, Homo sapiens
aacaaacagaaaattaaaaagagtggggtaattattctcatattagataaaacagactttaaactaacaacagtaaaaaaggacaaaggggaacattacataatgataacaagttcagttcaacaagaaggcttaattattctaaatataaacacacccaacattagaatacccagattaataataaaacaagtacttctaggcctacaaaagacttgaacagttacacaataatagtgggggattttaatgccctactgacagcattagacaaattattaacatagaaaattaacaaagacattttggacttaaattcaacacatgagcaataggacctaatagatatctgcaggatactccacccatcaaccaaagaatatacattcttatctgcacacagaacatagtctaagatagaccacatgtatggccataaagcaagtttcaataagttcaaaaaaattgaaatcataccaactatamtctcaaaccacagtggaatacaaatagaaa

SEQ ID NO: 138628 - DNA, 512 bp, Homo sapiens
gtggttcagctcaagaattccctaatatgcctgtttttctttttaaaccgaaaggtaaaacaaccagtgcagttccttacattgctccacaaaagaggctgcaaacttaaatttcgaatctgatactttcttaggggacaaatatcagtatatatttataccctcaaccttaatgctacccgcagaaaaccacgatttcctaaagaatgcagagaactaaagtgcctttaaaataatgcattcttctataatagtccatgaattaatatacgtgcaaggcaaaggtgaaaaagaaaacaaagcctggactgaagtgcatggccagtattttaaagaattcagactgatgaccggrtccttggtggatgagccatatattcatgcatggcgaaaccaagtctgttattgcttgaagcttagctcctgctttttttaattttgtttttcccttcaaattgatactcaatgaaaatatttcatttagaaatacttgtattttttagacctcttaa

SEQ ID NO: 138629 - DNA, 547 bp, Homo sapiens
ttcaaaccatttcaaagtctctgactccatttaggcccttgctctccacctccccagacaaaatgcccagcgccctgcaccagttctcatgtggctcagtttgttgtgtaagtggggacaagcagtaagtcattggtgaagagacagtgggaagatatcccctggctctgsgttcccttccagtaccatatttgctttcaagtcctatgtgagccacctgaggactgttacaaagtgtaatccttggttgggtgctgtggctcatgcctggaatcccagcattttgggaggccaaggtgggcagatcacttgaggtcaggagttcatggccagcttggccaacatggtgaaaccccgtctctactaaaaatacaaaaattagcctggcatggtggcgcacacccataatcccagctactcaggtgctaaggtaggagaatcgctggaatccaggaggtggaggctgcagcgagccaagatcacaccactgcatgccagcctgggcaacacagtgagactgtgtcccaaaacaaaacaaaacaaagtg

SEQ ID NO: 138630 - DNA, 547 bp, Homo sapiens
ttcaaaccatttcaaagtctctgactccatttaggcccttgctctccacctccccagacaaaatgcccagcgccctgcaccagttctcatgtggctcagtttgttgtgtaagtggggacaagcagtaagtcattggtgaagagacagtgggaagatatcccctggctctgcgttcccttccagtaccatatttgctttcaagtcctatgtgagccacctgaggactgttacaaagtgtaatccttggttgggtgctgtggctcatgcctgsaatcccagcattttgggaggccaaggtgggcagatcacttgaggtcaggagttcatggccagcttggccaacatggtgaaaccccgtctctactaaaaatacaaaaattagcctggcatggtggcgcacacccataatcccagctactcaggtgctaaggtaggagaatcgctggaatccaggaggtggaggctgcagcgagccaagatcacaccactgcatgccagcctgggcaacacagtgagactgtgtcccaaaacaaaacaaaacaaagtg

SEQ ID NO: 138631 - DNA, 568 bp, Homo sapiens
tttatttgactgcatgtcttaaatgtgccaaggtttcaagtctgattatagttattccaggacacaagcaacaytgcgtttggccagatgcttttagtaagataaatacatataatattcactgtgagtatataatcctgaccaccaatttcaacaaagaaataatggaaaaataaaaacaagaacccaagatcagatgttctgacagcacatgcagctcaatgaacaaattgcatttacattcattgtgcatgtttcactttcagacagcacacaaggtcaaactactaactgtcagttacaataagcttctaaacttctggtcaattacctggctaataacaaaagacaaggctatgacatcattatggttataattaatttacacagatcagcttcctgttaatcaaatatatctttaaaagcatttaattatttttcacctagaaagcaacattcagctttgttaaatgaaaagcaatcttgctgaatttaacacgaaaggctgtcaggctgctctaagacataaagaacaaatggcttcacagggcacactgctgcaatacag

SEQ ID NO: 138632 - DNA, 593 bp, Homo sapiens
ctcgatgaataaatgaatgaatgaatgaaataaaagaagaaaccaagaagcggattaagaaatattataccaaaagggcatttgcatttgttaccagattaaccaagtatagcaaaatattagaaagagtgatttaaacttaacagaaatccaaataaagaaaaaaaaaatcttataattctgttttctataaattaagaattatatgaggtgagggaaatgctggggtgaatactgctagcctgtgtgacattcaagcttatacagaactttattatctgggggacttcagttcaaataaatgaacccacacacactaaaaacgatcgcttcagaaacctgaaagggttttttytttttcttctttacagatcttctttacattcaggccaatgttttgattttccatttccccttgggcatgaagacagttttcttttggagttggggtccccacattgtaataactgttaacagagtgcacctgaaaggcttaaaggtagaccctaccaaaagccctttggcccaaacatctgtaaatgctagtgaacattatcagataaagaagcaggattccctttttatgtttttaa

SEQ ID NO: 138633 - DNA, 593 bp, Homo sapiens
ctcgatgaataaatgaatgaatgaatgaaataaaagaagaaaccaagaagcggattaagaaatattataccaaaagggcatttgcatttgttaccagattaaccaagtatagcaaaatattagaaagagtgatttaaacttaacagaaatccaaataaagaaaaaaaaaatcttataattctgttttctataaattaagaattatatgaggtgagggaaatgctggggtgaatactgctagcctgtgtgacattcaagcttatacagaactttattatctgggggacttcagttcaaataaatgaacccacacacactaaaaacgatcgcttcagaaacctgaaagggttttttctttttcttctttacagatcttctttacattcaggccaatgttttgattttccatttccccttgggcatgaagacagttttyttttggagttggggtccccacattgtaataactgttaacagagtgcacctgaaaggcttaaaggtagaccctaccaaaagccctttggcccaaacatctgtaaatgctagtgaacattatcagataaagaagcaggattccctttttatgtttttaa

SEQ ID NO: 138634 - DNA, 189 bp, Homo sapiens
caagtctgccgttttcagcacmctcgtggatggtctggaggcattctttgggttgttgcggagcatgtgtgtatatttcagtgtagtagtatcctgccaaacctctgcaggctctaaatatgatagagcacggtagtctcgcaaagggaatgtgctgcacagcacagaaaggagatgaaaggtacaagg

SEQ ID NO: 138635 - DNA, 590 bp, Homo sapiens
cccagagtgtgagagcccagaaaaggaggtggggtatgggctttggagcagttgtttgtgggtgaaaggcgtgttcccagcagcaggccaggcttttgctgtctccgggaattagctagcctttcagggtcagtgaggccctaagatgtcaaagcttcaaaatgcagaataaaaagacatgatcagtaaagaagcgaacaaggagcaggcaggtgagcatcacagcctccagcagaggcagccagagtctgcccagcccggcaggatgctgaagctggggaagacagacttctcttacccctgctgcaggtgcgggcaggcgggcgactgagctttccactttggtcctgtgacaaatggaggacagctgcagatggatgtttcacccaacaccaagcaagcagacataacctcactgtgcgaggcgatactgcctcactgtacagatgaagacacagaggttcagaatgtgtggaagggcttttcccagggtcccacagctcatagttggtagagccaggattrtctccattttctctctcaggccctgggcttaaagcccaccagcacattttttttttttgagacag

SEQ ID NO: 138636 - DNA, 389 bp, Homo sapiens
gcattttatttttgcaatccttggctgtaggtagagcttggcctcttytccactcaacaggaagtcttgaaaacaaagatgctaaggtttagagtattataactggaaatatgaaaggcattttgcaatattaccaaaaacttgaaatgaaggttaagaaatagatctgcatataatgatccatttatttttgatgaaaatgatttgtcaaaaggtaactcagtgaggaaaaggtaatggttttaaaaatggttctagaacaactggctacccatatgcaaatagatgaaccttgaaccttgccccatagcacataattaaatcgtcccaaactggatctcagacctaaatataagagccaaaatacaaaatttctagaagagtaaaca

SEQ ID NO: 138637 - DNA, 422 bp, Homo sapiens
tcatcattgggcatacttagtatagccatatatacatacttataaacacaacttacaggtataagttgacataaatgaacataaactgacaatcaactaagaaggcaaagacatttaaataagcacattgtatttaaagagataaaaagctatcaactacctatcaaatgaatgttccaccagggggtgtagtatgcatttattatgtctgcasccaatttacctggcgtatgcacctaaaaacagttgaacaaaaagtatatttttgtagaatgatttatgacgtcccactggctttcatttttattccaaggaagctttgtctgtatattttattgcttttcaattaaatccaaagttatttccaacacttttggttttcaaattaaagctaagttgtaaagaaaactgtaaacaaatat

SEQ ID NO: 138638 - DNA, 424 bp, Homo sapiens
acaagtgggcccaggaatggagttctgggccaatgaaataatggctcatrttcaaaaaacagttaatttaggagtctaaacaaccccagcggtgggttagcgattgtgaaattatgggctgtgtggactgcttccaaaatcagaacaaaacaacatgcaaataaatatgggagcatgctggaagagttctggaaataggtctgagttccaaccctgcattttcccaatacttacattccactgaatccaatgagcataaaaacaaagaatggcacatccacacatcagatttatcagaacgtataaaacgatggataaatgcaatggcaaaggagaaattaggtttctgaggttttttaggttataatgaactaaatgattacaagactataaaaaggtaattatgtcttatttaaaatatatg

SEQ ID NO: 138639 - DNA, 424 bp, Homo sapiens
acaagtgggcccaggaatggagttctgggccaatgaaataatggctcatgttcaaaaaacagttaatttaggagtctaaacaaccccagcggtgggttagcgattgtgaaattatgggctgtgtggactgcttccaaaatcagaacaaaacaacatgcaaataaatatgggagcatgctggaagagttctggaaataggtctgagttccaaccctgcattttcccaatacttacattccactgaatccaatgagcataaaaacaaagaatggcacatccacacatcagatttatcagaacgtataaaacgatggataaatgcaatggcaaaggagaaattaggtttctgaggttttttaggttataatraactaaatgattacaagactataaaaaggtaattatgtcttatttaaaatatatg

SEQ ID NO: 138640 - DNA, 487 bp, Homo sapiens
tatgtatgatcatattctcttttaaatgagtgataaatcactctgattttatttgtcagtctctaaatctcaaygcttaagtatatttaaaaacaggataggaagggacagaactaccaaaggttcattgccaataatttctctttgctttcagatgaaatgttttcttcaggatcattctcatgttagttgagtattgcaaatcgttagtgatagaagcagaaggcagacaactgcctaggaagataggagcaggtccccagtgaaacctggccttcaagctggaaacagtccttggactggattgagaacctaccttcccgtttgggatgctttcctctgattgatccccatccttctcctattttacatatacttaccctttcctaattggctttctacactgttgtgcccatgtttgagtgatgtcttcgctttgacctttttgcatgctcacaaactgatcagtacataccccctattctga

SEQ ID NO: 138641 - DNA, 487 bp, Homo sapiens
tatgtatgatcatattctcttttaaatgagtgataaatcactctgattttatttgtcagtctctaaatctcaatgcttaagtatatttaaaaacaggawaggaagggacagaactaccaaaggttcattgccaataatttctctttgctttcagatgaaatgttttcttcaggatcattctcatgttagttgagtattgcaaatcgttagtgatagaagcagaaggcagacaactgcctaggaagataggagcaggtccccagtgaaacctggccttcaagctggaaacagtccttggactggattgagaacctaccttcccgtttgggatgctttcctctgattgatccccatccttctcctattttacatatacttaccctttcctaattggctttctacactgttgtgcccatgtttgagtgatgtcttcgctttgacctttttgcatgctcacaaactgatcagtacataccccctattctga

SEQ ID NO: 138642 - DNA, 432 bp, Homo sapiens
tgactttgctgatatatttcggtgcgctgtgactcggataactttcaccgctaacatacattggcacygcttggctaggatccatgccctaatcgtaagagatctctatgcctcgccttctttggctggaggtgttcaacacccatacatggttttcttctccctttctctcttctgcttactaactaacacccagaacaattcctttcagacattagtgaccctgctcctcctggctgatctctcagctcaccctgatggatggctcatcatagtggaaaggacgttggggttcacatggagtaggactgaagcactaatggccctcctggacaggaagctcacgagaatgctagagctaaagtctaaaaccgtgcaatgtctgggtttcctctgctttttcatctcaaattggctctttcccaagaattc

SEQ ID NO: 138643 - DNA, 432 bp, Homo sapiens
tgactttgctgatatatttcggtgcgctgtgactcggataactttcaccgctaacatacattggcaccgcttgrctaggatccatgccctaatcgtaagagatctctatgcctcgccttctttggctggaggtgttcaacacccatacatggttttcttctccctttctctcttctgcttactaactaacacccagaacaattcctttcagacattagtgaccctgctcctcctggctgatctctcagctcaccctgatggatggctcatcatagtggaaaggacgttggggttcacatggagtaggactgaagcactaatggccctcctggacaggaagctcacgagaatgctagagctaaagtctaaaaccgtgcaatgtctgggtttcctctgctttttcatctcaaattggctctttcccaagaattc

SEQ ID NO: 138644 - DNA, 432 bp, Homo sapiens
tgactttgctgatatatttcggtgcgctgtgactcggataactttcaccgctaacatacattggcaccgcttggctrggatccatgccctaatcgtaagagatctctatgcctcgccttctttggctggaggtgttcaacacccatacatggttttcttctccctttctctcttctgcttactaactaacacccagaacaattcctttcagacattagtgaccctgctcctcctggctgatctctcagctcaccctgatggatggctcatcatagtggaaaggacgttggggttcacatggagtaggactgaagcactaatggccctcctggacaggaagctcacgagaatgctagagctaaagtctaaaaccgtgcaatgtctgggtttcctctgctttttcatctcaaattggctctttcccaagaattc

SEQ ID NO: 138645 - DNA, 438 bp, Homo sapiens
tgactttgctgatatatttcggtgcgctgtgactcggataactttcaccgctaacatacattggcaccgcttggctaggatccatgccctaatsgtaagagatctctatgcctcgccttctttggctggaggtgttcaacacccatacatggttttcttctccctttctctcttctgcttactaactaacacccagaacaattcctttcagacattagtgaccctgctcctcctggctgatctctcagctcaccctgatggatggctcatcatagtggaaaggacgttggggttcacatggagtaggactgaagcactaatggccctcctggacaggaagctcacgagaatgctagagctaaagtctaaaaccgtgcaatgtctgggtttcctctgctttttcatctcaaattggctctttcccaagaattcacaatg

SEQ ID NO: 138646 - DNA, 487 bp, Homo sapiens
tatgtatgatcatattctcttttaaatgagtgataaatcactctgattttatttgtcagtctctaaatctcaatgcttaagtatatttaaaaacaggataggaagggacagaactaccaaaggttcattgccaataatttctctttgctttcagatgaaatgttttcttcaggatcattctcatgttagttgagtattgcaaatcgttagtgatagaagcagaaggcagacaactgcctaggaagataggagcaggtccccagtgaaacctggccttcaagctggaaasagtccttggactggattgagaacctaccttcccgtttgggatgctttcctctgattgatccccatccttctcctattttacatatacttaccctttcctaattggctttctacactgttgtgcccatgtttgagtgatgtcttcgctttgacctttttgcatgctcacaaactgatcagtacataccccctattctga

SEQ ID NO: 138647 - DNA, 432 bp, Homo sapiens
tgactttgctgatatatttcggtgcgctgtgactcggataactttcaccgctaacatacattggcaccgcttggctaggatccatgccctaatcgtaagagatctctatgcctcgccttctttggctggaggtgttcaacacccatacatggttttcttctccctttctctcttctgcttactaactaacacccagaacaattcctttcagacattagtgaccctgctcctcctggctgatctctcagctcaccctgatggatggctcatcatagtggaaaggacgttggggttcacatggagtaggactgaarcactaatggccctcctggacaggaagctcacgagaatgctagagctaaagtctaaaaccgtgcaatgtctgggtttcctctgctttttcatctcaaattggctctttcccaagaattc

SEQ ID NO: 138648 - DNA, 432 bp, Homo sapiens
ttcccttaaggaatcaaattttacttatagagccaataaaamcccttgggtaaactgtcctcatactttgtctacacagttcctgtacagggttgctgacctttggtaagtaaagaatgtcactttctaatgggcccaggagcttcaagttatcttaggacctaaagaggagaagaatttacccaatcatacaggtatttgatggcaccaattcatggctgggcttaaggctttaagaaaactcttgcatgagattcattatggaatgaagatccatcaaagtcaatttaaaaaggagcctatatagaaaataaactttctgtgctttatgccaataatttgccaagtatcataaaactaaactttattttgcaaacaaatagttactttaatgtttttttaaaataaaaatgagaactggagggataaaaa

SEQ ID NO: 138649 - DNA, 432 bp, Homo sapiens
ttcccttaaggaatcaaattttacttatagagccaataaaaccccttgggtaaactgtcytcatactttgtctacacagttcctgtacagggttgctgacctttggtaagtaaagaatgtcactttctaatgggcccaggagcttcaagttatcttaggacctaaagaggagaagaatttacccaatcatacaggtatttgatggcaccaattcatggctgggcttaaggctttaagaaaactcttgcatgagattcattatggaatgaagatccatcaaagtcaatttaaaaaggagcctatatagaaaataaactttctgtgctttatgccaataatttgccaagtatcataaaactaaactttattttgcaaacaaatagttactttaatgtttttttaaaataaaaatgagaactggagggataaaaa

SEQ ID NO: 138650 - DNA, 432 bp, Homo sapiens
ttcccttaaggaatcaaattttacttatagagccaataaaaccccttgggtaaactgtcctcatactttgtctacacagttcctgtacagggttgctgacctttggtaagtaaagaatgtcactttctaatgggcccaggagcttcaagttatcttaggacctaaagaggagaagaatttacccaatcatacaggtatttgatggcaccaattcatggctrggcttaaggctttaagaaaactcttgcatgagattcattatggaatgaagatccatcaaagtcaatttaaaaaggagcctatatagaaaataaactttctgtgctttatgccaataatttgccaagtatcataaaactaaactttattttgcaaacaaatagttactttaatgtttttttaaaataaaaatgagaactggagggataaaaa

SEQ ID NO: 138651 - DNA, 432 bp, Homo sapiens
ttcccttaaggaatcaaattttacttatagagccaataaaaccccttgggtaaactgtcctcatactttgtctacacagttcctgtacagggttgctgacctttggtaagtaaagaatgtcactttctaatgggcccaggagcttcaagttatcttaggacctaaagaggagaagaatttacccaatcatacaggtatttgatggcaccaattcatggctgggcttaaggctttaagaaaactcttgcatgagattcattatggaatgaagatccatcaaagtcaatttaaaaaggagcctatatagaaaataaactttctgtgctttatgccaataatttgccaagtatcataaaactaaactttattttgcaaacaaatagttactttaatktttttttaaaataaaaatgagaactggagggataaaaa

SEQ ID NO: 138652 - DNA, 519 bp, Homo sapiens
aatcatacagattcgctgccactaacaaattttcccagtgcagtaaaaccacatatccacawtgaggtttttgctgtgatagaaaaggtggcattttttttgcagggtttcaagcaaggagggacaagaagctattgctccaatctggacctctcagatgtcttgcaggacaagattttaaaaggcaggggtaaattttacaaaagcagaagctacatgcaaaatactaaatcaatagatagaggttacacattgtttttggccttaaaaagttgagatagcttaaagtagaaccttacgggttgtaggtagatttaatgatttttggatttgcaattggttaaggaagcaaagctttgtttaataatttgtggtcagcagaaaaaaatcttaactgtctcagaagtgtgagttcttccaaacccctcaaaaaagaatatattacagagaatggtggtcacaatccagtcttcaatgcccccctatctgagcattacatgtcagtggatccatttggtg

SEQ ID NO: 138653 - DNA, 519 bp, Homo sapiens
aatcatacagattcgctgccactaacaaattttcccagtgcagtaaaaccacatatccacattgaggtttttgctgtgatagaaaaggtggcattttttttgcagggtttcaagcaaggagggacaagaagctattgctccaatctggacctctcagatgtcttgcaggacaagattttaaaaggcaggggtaaattttacaaaagcagaagctacatgcaaaatactaaatcaatagatagaggttacacattgtttttggcctwaaaaagttgagatagcttaaagtagaaccttacgggttgtaggtagatttaatgatttttggatttgcaattggttaaggaagcaaagctttgtttaataatttgtggtcagcagaaaaaaatcttaactgtctcagaagtgtgagttcttccaaacccctcaaaaaagaatatattacagagaatggtggtcacaatccagtcttcaatgcccccctatctgagcattacatgtcagtggatccatttggtg

SEQ ID NO: 138654 - DNA, 519 bp, Homo sapiens
aatcatacagattcgctgccactaacaaattttcccagtgcagtaaaaccacatatccacattgaggtttttgctgtgatagaaaaggtggcattttttttgcagggtttcaagcaaggagggacaagaagctattgctccaatctggacctctcagatgtcttgcaggacaagattttaaaaggcaggggtaaattttacaaaagcagaagctacatgcaaaatactaaatcaatagatagaggttacacattgtttttggccttaaaawgttgagatagcttaaagtagaaccttacgggttgtaggtagatttaatgatttttggatttgcaattggttaaggaagcaaagctttgtttaataatttgtggtcagcagaaaaaaatcttaactgtctcagaagtgtgagttcttccaaacccctcaaaaaagaatatattacagagaatggtggtcacaatccagtcttcaatgcccccctatctgagcattacatgtcagtggatccatttggtg

SEQ ID NO: 138655 - DNA, 519 bp, Homo sapiens
aatcatacagattcgctgccactaacaaattttcccagtgcagtaaaaccacatatccacattgaggtttttgctgtgatagaaaaggtggcattttttttgcagggtttcaagcaaggagggacaagaagctattgctccaatctggacctctcagatgtcttgcaggacaagattttaaaaggcaggggtaaattttacaaaagcagaagctacatgcaaaatactaaatcaatagatagaggttacacattgtttttggccttaaaaagttgagatagcttaaagtagaaccttacrggttgtaggtagatttaatgatttttggatttgcaattggttaaggaagcaaagctttgtttaataatttgtggtcagcagaaaaaaatcttaactgtctcagaagtgtgagttcttccaaacccctcaaaaaagaatatattacagagaatggtggtcacaatccagtcttcaatgcccccctatctgagcattacatgtcagtggatccatttggtg

SEQ ID NO: 138656 - DNA, 450 bp, Homo sapiens
aggcatgaaatattcttaggcagctaaaaactctaggcattattgcctacatattttktatgcattctttgcatcatttgtttttactcatttattctacaagcaccaccaataaatttaaatgagatgtcacctcccattatatattactttattcttctatgtgtcctattacattgaatgacaccaatatatatgtattctcccaagtaaaaaatgccaacagtacctttaaatacctttccagtaccaacctaccaaagttagagcatatagcccaggagtgctgagctgagacttaaacccctaaaatcttctaggataaaagctagtcaactgaatatactttataccacaatcaaatccccaagggcaccaaagaagataaaagcaaaaaaccccatgcaaaagccagcaacttcaaagattaaaggatcatacacccacaca

SEQ ID NO: 138657 - DNA, 450 bp, Homo sapiens
aggcatgaaatattcttaggcagctaaaaactctaggcattattgcctacatattttgtatgcattctttgcatcatttgtttttactcatttattctacaagcaccaccaataaatttaaatgagatgtcacctcccattatatattactttattcttctatgtgtcctattacattgartgacaccaatatatatgtattctcccaagtaaaaaatgccaacagtacctttaaatacctttccagtaccaacctaccaaagttagagcatatagcccaggagtgctgagctgagacttaaacccctaaaatcttctaggataaaagctagtcaactgaatatactttataccacaatcaaatccccaagggcaccaaagaagataaaagcaaaaaaccccatgcaaaagccagcaacttcaaagattaaaggatcatacacccacaca

SEQ ID NO: 138658 - DNA, 450 bp, Homo sapiens
aggcatgaaatattcttaggcagctaaaaactctaggcattattgcctacatattttgtatgcattctttgcatcatttgtttttactcatttattctacaagcaccaccaataaatttaaatgagatgtcacctcccattatatattactttattcttctatgtgtcctattacattgaatgacaccaatatatatgtattctcccaagtaaaaaatgccaacagtacctttaaatacctttccagtaccaacctrccaaagttagagcatatagcccaggagtgctgagctgagacttaaacccctaaaatcttctaggataaaagctagtcaactgaatatactttataccacaatcaaatccccaagggcaccaaagaagataaaagcaaaaaaccccatgcaaaagccagcaacttcaaagattaaaggatcatacacccacaca

SEQ ID NO: 138659 - DNA, 450 bp, Homo sapiens
aggcatgaaatattcttaggcagctaaaaactctaggcattattgcctacatattttgtatgcattctttgcatcatttgtttttactcatttattctacaagcaccaccaataaatttaaatgagatgtcacctcccattatatattactttattcttctatgtgtcctattacattgaatgacaccaatatatatgtattctcccaagtaaaaaatgccaacagtacctttaaatacctttccagtaccaacctaccaaagttagagcatatagcccaggagtgctgagctgagacttaaacccctaaaatcttctaggataaaagctagtcaactgaatatacyttataccacaatcaaatccccaagggcaccaaagaagataaaagcaaaaaaccccatgcaaaagccagcaacttcaaagattaaaggatcatacacccacaca

SEQ ID NO: 138660 - DNA, 408 bp, Homo sapiens
gtatcacatagaatatgttcactgctctaaaactccttggtggtttacctattgatttctccgtcccctaaattactgtaaaccactaatatttttactgtctccatagcttttctagaatatcatagtcagaatcttacagtatgaagccttttcagattggcttttgtactttctaatatacaatgatgatgccttcatgttttttacagcttgagttttttttttttttttgagtgtttagtaatgttttcttatctggatataccaaagtttatctattaatttacctactgagtgatgccttcattgtttccaaattttggaaattataaataaagctgctctaaacatctgtgtgcatgttattgtrtgaacatgagattttaactcctttgggtaaacaac

SEQ ID NO: 138661 - DNA, 408 bp, Homo sapiens
gtatcacatagaatatgttcactgctctaaaactccttggtggtttacctattgatttctccgtcccctaaattactgtaaaccactaatatttttactgtctccatagcttttctagaatatcatagtcagaatcttacagtatgaagccttttcagattggcttttgtactttctaatatacaatgatgatgccttcatgttttttacagcttgagttttttttttttttttgagtgtttagtaatgttttcttatctggatataccaaagtttatctattaatttacctactgagtgatgccttcattgtttccaaattttggaaattataaataaagctgctctaaacatctgtgtgcatgttattgtgtgaacatragattttaactcctttgggtaaacaac

SEQ ID NO: 138662 - DNA, 441 bp, Homo sapiens
tgttgctctacattcttaccagcatttkgtggtgttagtgttccaaataatggccattctaatgtatatgtggtgttatttcattgttttaatttgtacttcatttatgacatagtagagcatctttcatacgattattgaccatctgtatattttctttgttgtggtatgtgttcagatctttgtcttactttttaattgggttgttttcttattgttgaatttcaagggttgtttgtatacattagataacgtttctttatcagatgtgtcttttgcaaatatttttctctgtctgaggcttgttttctcattttcttaacattgtcttttgcaaaggagttttttgatttgaaaaaaatcttccctttaattatttatttcctcaatcatgcctcttgtgttgtatgtaataagctatcagcatacccaaggtcaagt

SEQ ID NO: 138663 - DNA, 441 bp, Homo sapiens
tgttgctctacattcttaccagcatttggtggtgttagtgttccaaataatggccattctaatgtatatgtggtgttatttcattgttttaatttgtacttcatttatgacatagtagagcatctttcataygattattgaccatctgtatattttctttgttgtggtatgtgttcagatctttgtcttactttttaattgggttgttttcttattgttgaatttcaagggttgtttgtatacattagataacgtttctttatcagatgtgtcttttgcaaatatttttctctgtctgaggcttgttttctcattttcttaacattgtcttttgcaaaggagttttttgatttgaaaaaaatcttccctttaattatttatttcctcaatcatgcctcttgtgttgtatgtaataagctatcagcatacccaaggtcaagt

SEQ ID NO: 138664 - DNA, 441 bp, Homo sapiens
tgttgctctacattcttaccagcatttggtggtgttagtgttccaaataatggccattctaatgtatatgtggtgttatttcattgttttaatttgtacttcatttatgacatagtagagcatctttcatacgattattgaccawctgtatattttctttgttgtggtatgtgttcagatctttgtcttactttttaattgggttgttttcttattgttgaatttcaagggttgtttgtatacattagataacgtttctttatcagatgtgtcttttgcaaatatttttctctgtctgaggcttgttttctcattttcttaacattgtcttttgcaaaggagttttttgatttgaaaaaaatcttccctttaattatttatttcctcaatcatgcctcttgtgttgtatgtaataagctatcagcatacccaaggtcaagt

SEQ ID NO: 138665 - DNA, 441 bp, Homo sapiens
tgttgctctacattcttaccagcatttggtggtgttagtgttccaaataatggccattctaatgtatatgtggtgttatttcattgttttaatttgtacttcatttatgacatagtagagcatctttcatacgattattgaccatctgtatattttctttgttgtggtatgtgttcagatctttgtcttactttttaattgggttgttttcttattgttgaatttcaagggttgtttgtatacattagataacgtttctttatcagatrtgtcttttgcaaatatttttctctgtctgaggcttgttttctcattttcttaacattgtcttttgcaaaggagttttttgatttgaaaaaaatcttccctttaattatttatttcctcaatcatgcctcttgtgttgtatgtaataagctatcagcatacccaaggtcaagt

SEQ ID NO: 138666 - DNA, 500 bp, Homo sapiens
gaattcttcagctgcaaagtggtacaaagtggaacttcagacacttayatggttggccacaggctctactagattataagtacctggaatccatgaatgaaagcatcagaggtcattttgctaatcagtgactttgggagtgatctagaatagaagactagagattcaggatgcaaggcctgaatttattctaacaatgtccagtacatcaaatatcaccgaaacaggtctgagaaacagggtcaagattgactaaatcaactctggaggttacttagggtaaattcctcaataaataaaagcttgcaagggattttaaattaaagttatctgcaatgaagtattttcttgatctgcaagttgcatatgttttctgttctttctttctctcttcctattgagaaagactctctccttgactgaactatagtcaggctcctctaagtcttattttggtttaaacattcacattagcccccatctaatctttaaactgcata

SEQ ID NO: 138667 - DNA, 461 bp, Homo sapiens
tgtctatttactctgttgatagtttcttttgctgtgcaggagctctgaagagcttcaattaggtctcatttgtcaatttttgcttttgtaacaattgcttttgcagtctttggcataacatcaattttattgactacataaatactcttttaatgtttgatgcaaacaaatctgtaagaacatctattaattttttatgtatcttgtttttcttttaactattwaaacaaggttctatgctactcctctttctctaagattttgctacttgatgaccttctcagaaatgtgcaagacaaagctgaagttagttttgttttcttgttctttaatggcttatgcgtttctctttttaacttgttcctttccttggaacttaaaaataacatttttttttcaaagcaatagcagctcatcttcttcgccttgcaaaaattattttttttcttttcttttttctt

SEQ ID NO: 138668 - DNA, 461 bp, Homo sapiens
tgtctatttactctgttgatagtttcttttgctgtgcaggagctctgaagagcttcaattaggtctcatttgtcaatttttgcttttgtaacaattgcttttgcagtctttggcataacatcaattttattgactacataaatactcttttaatgtttgatgcaaacaaatctgtaagaacatctattaattttttatgtatcttgtttttcttttaactattaaaacaaggttctatgctactcctctttctctaagattttgctacttgatgaccttctcagaaatgtgcaagacaaagctgaagttagttttgttttcttgttctttaatggcttatgcgtttctctttttaacttgytcctttccttggaacttaaaaataacatttttttttcaaagcaatagcagctcatcttcttcgccttgcaaaaattattttttttcttttcttttttctt

SEQ ID NO: 138669 - DNA, 461 bp, Homo sapiens
tgtctatttactctgttgatagtttcttttgctgtgcaggagctctgaagagcttcaattaggtctcatttgtcaatttttgcttttgtaacaattgcttttgcagtctttggcataacatcaattttattgactacataaatactcttttaatgtttgatgcaaacaaatctgtaagaacatctattaattttttatgtatcttgtttttcttttaactattaaaacaaggttctatgctactcctctttctctaagattttgctacttgatgaccttctcagaaatgtgcaagacaaagctgaagttagttttgttttcttgttctttaatggcttatgcgtttctctttttaacttgttsctttccttggaacttaaaaataacatttttttttcaaagcaatagcagctcatcttcttcgccttgcaaaaattattttttttcttttcttttttctt

SEQ ID NO: 138670 - DNA, 461 bp, Homo sapiens
tgtctatttactctgttgatagtttcttttgctgtgcaggagctctgaagagcttcaattaggtctcatttgtcaatttttgcttttgtaacaattgcttttgcagtctttggcataacatcaattttattgactacataaatactcttttaatgtttgatgcaaacaaatctgtaagaacatctattaattttttatgtatcttgtttttcttttaactattaaaacaaggttctatgctactcctctttctctaagattttgctacttgatgaccttctcagaaatgtgcaagacaaagctgaagttagttttgttttcttgttctttaatggcttatgcgtttctctttttaacttgttcctttccttggaacttaaaaataacatttttttttcaaagcaatagcagctcatcttcttcgccttgcaaaaattatwttttttcttttcttttttctt

SEQ ID NO: 138671 - DNA, 585 bp, Homo sapiens
aagctcatttttagcaggttgggaagtctcatgttctttggagataaaagaagaagaggtagggagaaaaacaaccacaaacaaaagaacaatcctggaaaatcaatataggtcacattactctgaagtccatacatcagtaggaaggcatgaaagtggtttatgcatgtaaataggtttctgttattctcttctgaagtttaagctgtctagcttcagttttcaggrctttcagaaagcatagcttagttttcagtgattccaaaataggaaaaatgggggtaagaagaaggaaataattgaaaacattattatgaagacttgtagccaagcatagttaaaattcagtccaaactgtagaaagtaataaaaattgaaaaacattaggcaatacttgaatctaaaaacaggtgtactatagcttttgaaacataatttttctctttccagtttctcatgtttactaaagaaaaatcatggtagtactgatttgctgtattatactaggcttatttgcatacagtgcagcaataataattatttttatataggctttaaattggctttgatggaactttgttctat

SEQ ID NO: 138672 - DNA, 585 bp, Homo sapiens
aagctcatttttagcaggttgggaagtctcatgttctttggagataaaagaagaagaggtagggagaaaaacaaccacaaacaaaagaacaatcctggaaaatcaatataggtcacattactctgaagtccatacatcagtaggaaggcatgaaagtggtttatgcatgtaaataggtttctgttattctcttctgaagtttaagctgtctagcttcagttttcaggactttcagaaagcatagcttagttttcagtgattccaaaataggaaaaatggggrtaagaagaaggaaataattgaaaacattattatgaagacttgtagccaagcatagttaaaattcagtccaaactgtagaaagtaataaaaattgaaaaacattaggcaatacttgaatctaaaaacaggtgtactatagcttttgaaacataatttttctctttccagtttctcatgtttactaaagaaaaatcatggtagtactgatttgctgtattatactaggcttatttgcatacagtgcagcaataataattatttttatataggctttaaattggctttgatggaactttgttctat

SEQ ID NO: 138673 - DNA, 585 bp, Homo sapiens
aagctcatttttagcaggttgggaagtctcatgttctttggagataaaagaagaagaggtagggagaaaaacaaccacaaacaaaagaacaatcctggaaaatcaatataggtcacattactctgaagtccatacatcagtaggaaggcatgaaagtggtttatgcatgtaaataggtttctgttattctcttctgaagtttaagctgtctagcttcagttttcaggactttcagaaagcatagcttagttttcagtgattccaaaataggaaaaatgggggtaagaagaaggaaataattgaaaacattattatgaagacttgtagccaagmatagttaaaattcagtccaaactgtagaaagtaataaaaattgaaaaacattaggcaatacttgaatctaaaaacaggtgtactatagcttttgaaacataatttttctctttccagtttctcatgtttactaaagaaaaatcatggtagtactgatttgctgtattatactaggcttatttgcatacagtgcagcaataataattatttttatataggctttaaattggctttgatggaactttgttctat

SEQ ID NO: 138674 - DNA, 561 bp, Homo sapiens
aatgggggtaagaagaaggaaataattgaaaacattattatgaagacttgtagccaagcatagttaaaattcagtccaaactgtagaaagtaataaaaattgaaaaacattaggcaatacttgaatctaaaaacaggtgtactatagcttttgaaacataatttttctctttccagtttctcatgtttactaaagaaaaatcatggtagtactgatttgctstattatactaggcttatttgcatacagtgcagcaataataattatttttatataggctttaaattggctttgatggaactttgttctatagaacaatctcagataagacttttttaaatccaagcccagccatggatttgtacagtcaaatatctatgacttgggtgaattcctctactctcgaggttccaagataaactgggggatcctgggcttgtcagaaagtgacattctttacttaccacaggtctttaaccctgtacaggaactgtgtaaacaaagatatgaggccagttttcccaaggggttttatttgctccataaatcaagttcaattcc

SEQ ID NO: 138675 - DNA, 561 bp, Homo sapiens
aatgggggtaagaagaaggaaataattgaaaacattattatgaagacttgtagccaagcatagttaaaattcagtccaaactgtagaaagtaataaaaattgaaaaacattaggcaatacttgaatctaaaaacaggtgtactatagcttttgaaacataatttttctctttccagtttctcatgtttactaaagaaaaatcatggtagtactgatttgctgtattatactaggcttatttgcatacagtgcagcaataataattatttttatataggctttaaattggctttgatggaactttgttctatagaacaatctcagataagacttttttaaatccaagcccagccatggatttgtacagtcaaatatctatgacttgggtgaattcctctactctygaggttccaagataaactgggggatcctgggcttgtcagaaagtgacattctttacttaccacaggtctttaaccctgtacaggaactgtgtaaacaaagatatgaggccagttttcccaaggggttttatttgctccataaatcaagttcaattcc

SEQ ID NO: 138676 - DNA, 549 bp, Homo sapiens
ttccaaatcttcgctattgtaaacagtgctgcaacaaaaataggagtgcagatatctttttgatatactgatttcctttcttttgcatatgtatccagaaatgagatttctggaacatatgttagctcaatttttagttttttgagaaacctctaaactgttctccatagtggttgtactaatttacattcccactaacagtrtacaagggtttcctttctctctatcttctccagcggtttttattgcctgttttggatataagcaattttacttggggagagatgatatctcattgtatatttgatttgcatttctctgatgatcaatgatgttgagaaccttttcaaatgcctgcttgtcatttgtgtgtcttctttttagaaataactatttaaatcttttgcccactttttgatcacattattagtttttttctatagagttgtttgagtttcttatatattctggttattcatcccttgttagatgtgtaatttgcaaatactttcccctattatcttggttgtctcttcattttgttgattg

SEQ ID NO: 138677 - DNA, 549 bp, Homo sapiens
ttccaaatcttcgctattgtaaacagtgctgcaacaaaaataggagtgcagatatctttttgatatactgatttcctttcttttgcatatgtatccagaaatgagatttctggaacatatgttagctcaatttttagttttttgagaaacctctaaactgttctccatagtggttgtactaatttacattcccactaacagtatacaagggtttcctttctctctatcttctccagcgktttttattgcctgttttggatataagcaattttacttggggagagatgatatctcattgtatatttgatttgcatttctctgatgatcaatgatgttgagaaccttttcaaatgcctgcttgtcatttgtgtgtcttctttttagaaataactatttaaatcttttgcccactttttgatcacattattagtttttttctatagagttgtttgagtttcttatatattctggttattcatcccttgttagatgtgtaatttgcaaatactttcccctattatcttggttgtctcttcattttgttgattg

SEQ ID NO: 138678 - DNA, 593 bp, Homo sapiens
ataattaaaataaataacgctgtgataaatatcattttaggtaaaccttatgcacaaccctgcaaccaatgcatagaatttatgaacatttttagaaactttcctcaattatttataatcactacaacttcccctaattcaatatcatattttaaagacttgcccccataagtttttccaaaaattcagcacagatttcactaaaarcaacttatgtttcagtcagtataatctacagtgagaatggagggtagtcagtaatgtggctcattggttaagtggaagtgagttaagaaaacttcctgctgtgagttattttaattgaatttctacattttctggattcgtagtaggtatatattataataattgtggtgcttctcccttcttatcttcacatattttggttatttttatttccagttttcagtgactacaaaattgagaacagtgtttttaaatggtggtgataataggtactttggacgtattgtagacagtaatgggtagtttatgacagctatttgtttatcttattttggaaatactctttcattaaacatgaaattgttagtctgcatctatgttcactt

SEQ ID NO: 138679 - DNA, 561 bp, Homo sapiens
tttcctcaattatttccccaaatatattttccaaacttttagatttcttttcttcctcaagagtgccagttattcttataactggcatttagtcattaaacataatctcaaactccttggagcctttgttcattttcttaaaattatttttcatttgtctttgttgggttgggttatttctcaaaccttgtctttgagctctgaagttctttcttctgcttgtttgactctattgctaagaccttctagaaccctttgcatttatctaagygtgtcctttatttcctgaagttgcacttgttttttatttaagctatctatttcactgaaggtttctgcactcatatattgtatcattgttttgatttctttaaattgaacttaaagtttatctggtacctccttgattagcttaataattgacctgaattctttttcttgtaattcagggatctcttcctggtttgaatccattgctgctgccctagtgtgattttttggggggtgttaaagaaccctgttttgtcttattagcaggattgtttttctggtttcttctca

SEQ ID NO: 138680 - DNA, 561 bp, Homo sapiens
tttcctcaattatttccccaaatatattttccaaacttttagatttcttttcttcctcaagagtgccagttattcttataactggcatttagtcattaaacataatctcaaactccttggagcctttgttcattttcttaaaattatttttcatttgtctttgttgggttgggttatttctcaaaccttgtctttgagctctgaagttctttcttctgcttgtttgactctattgctaagaccttctagaaccctttgcatttatctaagtgtgtcctttatttcctgaagttgcacttgttttttatttaagctatctatttcactgaaggtttctscactcatatattgtatcattgttttgatttctttaaattgaacttaaagtttatctggtacctccttgattagcttaataattgacctgaattctttttcttgtaattcagggatctcttcctggtttgaatccattgctgctgccctagtgtgattttttggggggtgttaaagaaccctgttttgtcttattagcaggattgtttttctggtttcttctca

SEQ ID NO: 138681 - DNA, 561 bp, Homo sapiens
tttcctcaattatttccccaaatatattttccaaacttttagatttcttttcttcctcaagagtgccagttattcttataactggcatttagtcattaaacataatctcaaactccttggagcctttgttcattttcttaaaattatttttcatttgtctttgttgggttgggttatttctcaaaccttgtctttgagctctgaagttctttcttctgcttgtttgactctattgctaagaccttctagaaccctttgcatttatctaagtgtgtcctttatttcctgaagttgcacttgttttttatttaagctatctatttcactgaaggtttctgcactcatatattgtatcattgttttgatttctttaaattgaacttaaagtttmtctggtacctccttgattagcttaataattgacctgaattctttttcttgtaattcagggatctcttcctggtttgaatccattgctgctgccctagtgtgattttttggggggtgttaaagaaccctgttttgtcttattagcaggattgtttttctggtttcttctca

SEQ ID NO: 138682 - DNA, 593 bp, Homo sapiens
ataattaaaataaataacgctgtgataaatatcattttaggtaaaccttatgcacaaccctgcaaccaatgcatagaatttatgaacatttttagaaactttcctcaattatttataatcactacaacttcccctaattcaatatcatattttaaagacttgcccccataagtttttccaaaaattcagcacagatttcactaaaaacaacttatgtttcagtcagtataatctacagtgagaatggagggtagtcagtaatgtggctcattggttaagtggaagtgagttaagaaaacttcctgctgtgagttattttaattgaatttytacattttctggattcgtagtaggtatatattataataattgtggtgcttctcccttcttatcttcacatattttggttatttttatttccagttttcagtgactacaaaattgagaacagtgtttttaaatggtggtgataataggtactttggacgtattgtagacagtaatgggtagtttatgacagctatttgtttatcttattttggaaatactctttcattaaacatgaaattgttagtctgcatctatgttcactt

SEQ ID NO: 138683 - DNA, 475 bp, Homo sapiens
gtgattttttggggggtgttaaagaaccctgttttgtcttattagcaggattgtttttctggtttcttctcatttaggtaggctawctcagagggaagatctggggctcaaggctgctgttcagattcttttttggccatggggtgtatccttgatgtagcactatttccctttttctataaatgtggcttacttagatctgtgctgtagtgattgttatttctcttattgatctagccacccagcaggcctaccaggccctgggctggtcttgtggggtgtctgcatagagttttgtgatgtgaaccatcttcaggtctctcagccatggataccagcacctgctccagtggaggtggcaggggagtaaaatggactctgtgagagtccttagttgtagttgtttaatgcattagttttgtgctagttggtctccttcctggagttggtgctttcaagagagcatcagatgtgg

SEQ ID NO: 138684 - DNA, 475 bp, Homo sapiens
gtgattttttggggggtgttaaagaaccctgttttgtcttattagcaggattgtttttctggtttcttctcatttaggtaggctaactcagagggaagatctggggctcaaggctgctgttcagattcttttttggccatggggtgtwtccttgatgtagcactatttccctttttctataaatgtggcttacttagatctgtgctgtagtgattgttatttctcttattgatctagccacccagcaggcctaccaggccctgggctggtcttgtggggtgtctgcatagagttttgtgatgtgaaccatcttcaggtctctcagccatggataccagcacctgctccagtggaggtggcaggggagtaaaatggactctgtgagagtccttagttgtagttgtttaatgcattagttttgtgctagttggtctccttcctggagttggtgctttcaagagagcatcagatgtgg

SEQ ID NO: 138685 - DNA, 475 bp, Homo sapiens
gtgattttttggggggtgttaaagaaccctgttttgtcttattagcaggattgtttttctggtttcttctcatttaggtaggctaactcagagggaagatctggggctcaaggctgctgttcagattcttttttggccatggggtgtatccttgatgtagcactatttccctttttctataaatgtggcttacttagatctgtgctgtagtgattgttatttctcttattgatctagccacccagcaggcctaccaggccctgggctggtcttgtggggtgtctgcatagagttttgtgatgtgaaccwtcttcaggtctctcagccatggataccagcacctgctccagtggaggtggcaggggagtaaaatggactctgtgagagtccttagttgtagttgtttaatgcattagttttgtgctagttggtctccttcctggagttggtgctttcaagagagcatcagatgtgg

SEQ ID NO: 138686 - DNA, 395 bp, Homo sapiens
atgtatctgattattcccctgcaacattttgtgtatgttatcgtatgtaaaaatgcagattccgtgcatttttcctctgccccatttatctatgtcatcttacrtaaaaaaaaaaaaaaaatgcagattaactgagccagacaaaggcatgaattactattttttctactccccgcccccaccaccttaagtgaaaattgtttctttcttaatatcccgccctttcccctttaaatttggatccctcaaaattgtcttcagggaaaggcatagacttgtctcctgggcacgtgtccttaactttgacaaagaaactgtaaaatgattgatagttgtcttgtgagaggagagagagagaaatcaactagatagttagggcaagggtccccggtgga

SEQ ID NO: 138687 - DNA, 395 bp, Homo sapiens
atgtatctgattattcccctgcaacattttgtgtatgttatcgtatgtaaaaatgcagattccgtgcatttttcctctgccccatttatctatgtcatcttacgtaaaaaaaaaaaaaaaatgcagattaactgagccagacaaaggcatgaattactattttttctactccccgcccccaccaccttamgtgaaaattgtttctttcttaatatcccgccctttcccctttaaatttggatccctcaaaattgtcttcagggaaaggcatagacttgtctcctgggcacgtgtccttaactttgacaaagaaactgtaaaatgattgatagttgtcttgtgagaggagagagagagaaatcaactagatagttagggcaagggtccccggtgga

SEQ ID NO: 138688 - DNA, 459 bp, Homo sapiens
cacatcacttccaaaaacctgaaatgtacattaaaaagaagctgcagtctcaggaataaggaggatatatgtacagttctagacctagtgactagctgacttcatgattgaatctattgttttccaaatatcactttgaaaggaagatcttaaaatttctatatgagtccagtttttgagaagatgttcaacagaagttttcattgagaaattacaaattaaacaagagttaaatgtcactacacacctattacaatggttaaatctaaaaaaaaatatytaatactgatgaggatgtgaaacaataggaattttcattcacggctgggtggaaggcaacttttacagatagtatcgccacttttgcagacagtttggcaatttctcacacagctaaacaaaccaacaagtgtgctcttaggttttcatccaacttatttgaaaactgtgtcgacacaa

SEQ ID NO: 138689 - DNA, 649 bp, Homo sapiens
tgatgtttgtctttctgtgcctggcttgtttcacttagcataatgacttccagttccatccatgtcattgcaaatgactggatctcatattttttatggctgtatattactccattgtgtctatgttccatattttcttaattcattcatatgttgatgaacacttaggttgcttccaaatmttaactgttgtgaatagtcctacaacaaacatggaagtgcagatatctctttcttagacagatttcctttctctgggatatatacccaacagtgggattgctacatcatatagtagctctatttttggtgttttgagaaacttccaaactgttctatttagtggttgtactaacttacgttcccacccacagtgtacaaaggttgccttttctccacatcctgacaagcatttgttattgcctgtctttggttataagccattttaactgggataataggacatctcattgtagtttttattttacatttctctgatattctatgatgttgagaactttttcatatgcctgtttgccatttgtatgttttcttttgatcaaatcttttgcctactttttgatttggttattacatttctacctatacaattgtttgaactccttttctattctggttattaatcgct

SEQ ID NO: 138690 - DNA, 649 bp, Homo sapiens
tgatgtttgtctttctgtgcctggcttgtttcacttagcataatgacttccagttccatccatgtcattgcaaatgactggatctcatattttttatggctgtatattactccattgtgtctatgttccatattttcttaattcattcatatgttgatgaacacttaggttgcttccaaatattaactgttgtgaatagtcctacaacaaacatggaagtgcagakatctctttcttagacagatttcctttctctgggatatatacccaacagtgggattgctacatcatatagtagctctatttttggtgttttgagaaacttccaaactgttctatttagtggttgtactaacttacgttcccacccacagtgtacaaaggttgccttttctccacatcctgacaagcatttgttattgcctgtctttggttataagccattttaactgggataataggacatctcattgtagtttttattttacatttctctgatattctatgatgttgagaactttttcatatgcctgtttgccatttgtatgttttcttttgatcaaatcttttgcctactttttgatttggttattacatttctacctatacaattgtttgaactccttttctattctggttattaatcgct

SEQ ID NO: 138691 - DNA, 649 bp, Homo sapiens
tgatgtttgtctttctgtgcctggcttgtttcacttagcataatgacttccagttccatccatgtcattgcaaatgactggatctcatattttttatggctgtatattactccattgtgtctatgttccatattttcttaattcattcatatgttgatgaacacttaggttgcttccaaatattaactgttgtgaatagtcctacaacaaacatggaagtgcagatatctctttsttagacagatttcctttctctgggatatatacccaacagtgggattgctacatcatatagtagctctatttttggtgttttgagaaacttccaaactgttctatttagtggttgtactaacttacgttcccacccacagtgtacaaaggttgccttttctccacatcctgacaagcatttgttattgcctgtctttggttataagccattttaactgggataataggacatctcattgtagtttttattttacatttctctgatattctatgatgttgagaactttttcatatgcctgtttgccatttgtatgttttcttttgatcaaatcttttgcctactttttgatttggttattacatttctacctatacaattgtttgaactccttttctattctggttattaatcgct

SEQ ID NO: 138692 - DNA, 352 bp, Homo sapiens
gctcctcatgcctttcagtctgtaagtcaagtgaggtatggtgttggctggggtaagtgattcagactatcaaaaggaaattgaactatttctccacaatggagataagaaagagtattcctggaatacagtagattctttagggtgtctctacgtgctaccatgccctgtgagtaasgtcaataggaaactgcaaaaacataatccaggcaggactataaatacctcagactcttatgaaatgaaggtttagatcgccctactaggttaaaaaaactaccacttgctgaggtgcttcctggaggcaaagggaatacagaatgtgtagtagaaaaaaatagttacaaatacc

SEQ ID NO: 138693 - DNA, 515 bp, Homo sapiens
atgccaagctctagatttttttgtatttatccttttttggtgtcctctaagctaactaaattmtacagtttagtgtctgacattaattttggaaagtatcttctcttcttatattctatttataactgtgttacacattttgaaattgtaacacaattttcagatgtgttttttaaaattttttattttcttttgtttttgcttttcagtttggggaatgtctaatgacatatttttatcctcacttattcttttatcagcagtgtcagtgtaatgatgtgcccgccaaaggcattatttgtcttgttttattagatattttgttttaattctttcttagagaccatctctcaggttatatttcccatctgtgctgtcatgtggtccacatgttccattatagctctttaacatattaatcaagattattttaaatttcatatctgatacttccaaagtatgtgtcatatataaatttggttttaatgtttgttttgtctcttcagagtgtatat

SEQ ID NO: 138694 - DNA, 515 bp, Homo sapiens
atgccaagctctagatttttttgtatttatccttttttggtgtcctctaagctaactaaattctayagtttagtgtctgacattaattttggaaagtatcttctcttcttatattctatttataactgtgttacacattttgaaattgtaacacaattttcagatgtgttttttaaaattttttattttcttttgtttttgcttttcagtttggggaatgtctaatgacatatttttatcctcacttattcttttatcagcagtgtcagtgtaatgatgtgcccgccaaaggcattatttgtcttgttttattagatattttgttttaattctttcttagagaccatctctcaggttatatttcccatctgtgctgtcatgtggtccacatgttccattatagctctttaacatattaatcaagattattttaaatttcatatctgatacttccaaagtatgtgtcatatataaatttggttttaatgtttgttttgtctcttcagagtgtatat

SEQ ID NO: 138695 - DNA, 515 bp, Homo sapiens
atgccaagctctagatttttttgtatttatccttttttggtgtcctctaagctaactaaattctacagtttagtgtctgacattaattttggaaagtatcttctcttcttatattctatttataactgtgttacacattttgaaattgtaacacaattttcagatgtgttttttaaaattttttattttcttttgtttttgcttttcagtttggggaatgtctaatgacatatttttatcctcacttattcttttatcagcagtgtcagtgtaatgatgtgcccgccaaaggcattatttgtcttgttttattagatattttgttttaattctttcttagagaccatctctcaggttatatttyccatctgtgctgtcatgtggtccacatgttccattatagctctttaacatattaatcaagattattttaaatttcatatctgatacttccaaagtatgtgtcatatataaatttggttttaatgtttgttttgtctcttcagagtgtatat

SEQ ID NO: 138696 - DNA, 515 bp, Homo sapiens
atgccaagctctagatttttttgtatttatccttttttggtgtcctctaagctaactaaattctacagtttagtgtctgacattaattttggaaagtatcttctcttcttatattctatttataactgtgttacacattttgaaattgtaacacaattttcagatgtgttttttaaaattttttattttcttttgtttttgcttttcagtttggggaatgtctaatgacatatttttatcctcacttattcttttatcagcagtgtcagtgtaatgatgtgcccgccaaaggcattatttgtcttgttttattagatattttgttttaattctttcttagagaccatctctcaggttatatttcccatctgtgctstcatgtggtccacatgttccattatagctctttaacatattaatcaagattattttaaatttcatatctgatacttccaaagtatgtgtcatatataaatttggttttaatgtttgttttgtctcttcagagtgtatat

SEQ ID NO: 138697 - DNA, 424 bp, Homo sapiens
aaacataaatcaaaactgtatttttagtagttgtcccagggcattaagctgattacaatatggagacctctaaattaaactgtaacacacatttcattttatttttcagtgcatcgctgcccatattcaaattttcatataataaatctaatgaggaaatctatgtatgaaacaytagcattttatgttttatgtcagaactttatttcaccgcagtaaaagttacacagatttgaacttgatgtttcctacattaaaacaatcaaatattttaatgtgattcatgtacatgtgtaaatcacacacactctctcttgccaacatattttcctggaaacgccccaactgtgattaaagccatctttccctctaatttatgcctacatatatgagcagataaacagaaaaaagctcaaaccaccca

SEQ ID NO: 138698 - DNA, 439 bp, Homo sapiens
gctgaatgaaacttcaaaggcaatctggtctttttctaatgcataaatccctttacaatacccactaacatgatttattagctcaagtcgtttaagttattggaactcattgcctcatcagacaacccattttactttakcagcttggagtgttagaatttttgtcttatattgagttgaaatctgtagccctttcttctctataacctgaacccatttgtcctaatttggcttcccagaaggatgcagaaaaagataagttctcatttacttgatagtgtttcatttttaagccacatatagcctaagtcattcatacagtctttttgatttttaaaaaataacaaattatttcaaatatcttcaacatctttctaaagattcacagatgcacagatttttataaaatggaagacattttggaaattatctgtttttc

SEQ ID NO: 138699 - DNA, 556 bp, Homo sapiens
tgtaaaatacaagataaattattgtaacagtgaaaagaaagaaaatgtggtaggtgtacaccatggaatactacgcagccataagaaacaacaaagtsacattatttgcagcaatatggatgcagctggaagccattatcctaagtgagttaacgcagaaacagaaaaccaaatactacatgttcttactaagttgaagttaaacattgagtacacacaggcacaaagatgggaacaataaacactgggattccaaaagtggggaagtagagagaaggaaaagagttgaaaaactacttattggataccatgttcattacatgggcaacagaaacatgaggagcccaaaccttggcatcatgcaatatatgtatataacaaatccgcacatgtatcccgagtctaaaattataaataaaaagaaaaaatttaaaaattacacaaaaaattatttatataaaatttatttatatttgggtaaaaatatagctaattattttgtactgcctatgtgccatagtctatactagtgatattcattaaaggacagttttat

SEQ ID NO: 138700 - DNA, 556 bp, Homo sapiens
tgtaaaatacaagataaattattgtaacagtgaaaagaaagaaaatgtggtaggtgtacaccatggaatactacgcagccataagaaacaacaaagtgacattatttgcagcaatatggatgcagctggaagccattatcctaagtgagttaacgcagaaacagaaaaccaaatactacatgttcttactaagttgaagttaaacattgagtacacacaggcacaaagatgggaacaataaacactgggattccaaaagtggggaagtagagagaaggaaaagagttgaaaaactacttattggataccatgttcattacatgggcaacagaaacatgaggagcccaaaccttggcatcatgcaatatatgtatataacaaatccgcacatgtatcccgagtctaaaattataaataaaaagaaaaaatttaaaaattacacaaaaaattatttatataaaatttatttatatttrggtaaaaatatagctaattattttgtactgcctatgtgccatagtctatactagtgatattcattaaaggacagttttat

SEQ ID NO: 138701 - DNA, 580 bp, Homo sapiens
gtgataggtgagctctcggatcaagattttaaaatagcagttttaagaaaactcagtgatatccaagacaacacagaaaaccaattcagaaatttattggaggaacttaacgaagagactgaaatgatttaaaaaatcaaacagaaatcttggacctaagaaatatatttgctgttggccaggcacggtggctcatgcctgtaatcccagcactttgggaggctgaggcaggtggaatcatctgaggttaggagttcgagaccagcctggccaacatggcgaaatccccgtctctactaaaaatacaaaaattagacaggygtggtggcacgtgcctgtaatcccagatactaggggacgctgaggcaggaggatcacttgaacctgagaggcagagatgcagtcagttgagattgtgccactgctctacagcctgggcaagaaagagtgcaagactctgtctcaaaaaaaaaaaaaaaagaaaaagaaagaaatatatttgttaaactaaaaaaagtgttaattgttctccatagcagaaggcatggagcagagtaaaccagagaacttagagacaatt

SEQ ID NO: 138702 - DNA, 402 bp, Homo sapiens
aggttttgctttagaggtagttggtgaagacaaatgcatttttcaggaccacagctattcttttttaaggcagtaacttgctcaggaagatcttcattgatttattcagaatttacattgttcttttgttcattgaaatgttgaacatatctgagttcaggggcattctagccagactaaggcttcattctgagagcattgattttagaccagtaatctaagatgtttttgttctgcagaggattacaaatttcaccagtaccacactccacacatttcactttattttatttttatttttggcagcaggagtggggtgtgtgtgggggacagggcagtgrggttggagtgaaggatagggaattagaggtcgatgcaaaggtgacatgttttggaggtaga

SEQ ID NO: 138703 - DNA, 514 bp, Homo sapiens
taaaacccagaagaaaacattgggattacttttataatctccgagtaaggtctttctaaattatgacacataatatagaaatcatatcaaaattaaatataatatattcgattactttaaaaatagcaaattatagtagtaataataatacaaaaattataatctaggaaaaatgccttaactcatcatagagaagactaatctacctatacataaagaaaaaggttacccccaaaatgggtaatgtatataaacattcatttcmaaaagaaattcaaactgcttttaatgatatgaaatattcctattcctaatataattcataaataagaaatacaattaaagtgtgtataggtgtgtatatacatacatatatgtacatatgtgtctgtgtgtgtgtatgtatatacgtatgtaatcagcaaaaatatgaaagtgtggaagcataatccaaacgccactgaagagcttgcttgtaaatgctttcaaactgggcatgtgcctttaacccagg

SEQ ID NO: 138704 - DNA, 626 bp, Homo sapiens
ctgtctcttataaaaccatatgctgaataatagtataagttaatagattttggtcctttttagataatgaaggcacattgctgagcgtgcatacaagacacatatgttcacaagcccaccttattgcttcattartgggcaggaagtatccaaagaagaacatttttattaaataaaaacaaagaaacagacaaggtcctttaatgaccttgctgggattcattgcctactagaaatgttaactcttcacacagatcccatctcagtctagaatctgcgctaatagtcctagagccccaggaacagttactcattagttctatgtgcacttgccaaaatgttgtcttacttgaccgttgctctttccatattccaattgcaggcttatttttttgacagttatcaactctttcaccaacctaggaaacgtttggaatagaaacacaacaatgagtgaataaatcgttaaaatataacataggaagggcaaaaacaatgaatattaagtgtataaataaaaaacctaggagtaggggaattcaaataacttcccaaactcagagagaatagaaatattagctgaagttcaaatgcacatatcactgaggaattccttacacaacagc

SEQ ID NO: 138705 - DNA, 626 bp, Homo sapiens
ctgtctcttataaaaccatatgctgaataatagtataagttaatagattttggtcctttttagataatgaaggcacattgctgagcgtgcatacaagacacatatgttcacaagcccaccttattgcttcattaatgggcaggaagtatccaaagaagaacatttttattaaataaaaacaaagaaacagacaagktcctttaatgaccttgctgggattcattgcctactagaaatgttaactcttcacacagatcccatctcagtctagaatctgcgctaatagtcctagagccccaggaacagttactcattagttctatgtgcacttgccaaaatgttgtcttacttgaccgttgctctttccatattccaattgcaggcttatttttttgacagttatcaactctttcaccaacctaggaaacgtttggaatagaaacacaacaatgagtgaataaatcgttaaaatataacataggaagggcaaaaacaatgaatattaagtgtataaataaaaaacctaggagtaggggaattcaaataacttcccaaactcagagagaatagaaatattagctgaagttcaaatgcacatatcactgaggaattccttacacaacagc

SEQ ID NO: 138706 - DNA, 609 bp, Homo sapiens
ctggtctgtgcaaggtttcaaattctttctgatttaatctaggaagttgtgtgtttccaagaatctatccatttcctctagatcttctagtctgtacacacagaggtgttcataatagtccctgagagtctcttgcatttctatgggatcagttgtaatgtcaccattgtcctctggggttgtgcttatttggatcttctctcttctgttcttcattagtttagtagcctattgatcttgtttattctttcaaggaaccaacatttcctttcactgatcctttgtatggtattttgggagtctaaatttcttctagttctgctctgatttctagttatttcttytcttctgctagcctttggattgatttgttcttgattttctagttccttatgtgtcatattagattgttaatttgagatctttctgtcttcctgatgtagatgtttagtgctataaactttcctcttaagactacttttgtcaaatcccagaggttttagtatgctgtatctctatttttcatctgtttcaaagaagtttttaaatatctgccttcactttgttgtttacacactagtcatttagaagcaagttgtttagtttcca

SEQ ID NO: 138707 - DNA, 508 bp, Homo sapiens
ttttacagttaagcatgatatttgatactgggaatgcatagtaaatgttgaataaaagagtatttcttggacagaaaatttgattagactctcagaatccatcccttgtagtactttttttctctttctttatcttacccccagatcacagagtttagtgttatcataatatacaagactaatcatatcaatcgagtttgtacattttcttagtacaatgtaatcattttcatttattcaataaatactggaaatttcagtcaggattcaataaaataaaactgacaggctgtcttccatatcttttgttattgtttatttcttttgcttatgtcctytttgcccaataaatagtgaatttccgaaagatagaaaaattttaaatttttctgtatatatcatttagcaataaatgcccgtgagaagacactgttgataatataggggaagaaaagggagttaatgtatgttagtgacccactaattgtccgacattttatatttgtta

SEQ ID NO: 138708 - DNA, 530 bp, Homo sapiens
gttttgttaaagatataattaatagcataaagacctaattttaatgaagaacctcaccctgttgtcctgcttttttagcagagctttaaaaatgacaaaagtcaattaatttccttagtctttaaattctggttccctattctcaagttatgattaatgactattaaactgtaggatttcaggcattcagcaaaaaataaacaacatggagacaaaaaacatgaataacctaaaaaataatgacttcattcctcagtaatgagacatgtccmtgcttttgtgataataaagaaataagcaatgggataaagtgctgccttttctttgagaagtagttggtatttagcttcctttagaacctatttgacctgtcagcatttgttttcttatttatatgaagcttcaactgaatttgcatttagatattatattcctgcactatactgaacagatcattcactttttgttaggatatttatttgaagtctaggtgggcatttgtgcatgcatggctacctaaggaaaatgta

SEQ ID NO: 138709 - DNA, 504 bp, Homo sapiens
taatccttacttttgctatccaytgaattgttaccatcagattattctttttcccgaaacattgattttattatcatatcccggatgggctcgtttttgcataggcaaaagcagttgctttgtttctctgtgtatgcttttttagggggtcctgccccacattcccaattgttatttctaatgctcttgaaaacaatttcttgctctggctgtgttcatcttctaaccacttatctaaaacattctgcggattctctaggtggtttttcacagtgggaaaggcaaacaagggctttagattatgatatttcaactctaattgtgtaacttacattcattctttatgtgaccctaggcaggttacataacactgtggagcttcagttttctcatttttcaagtaatgttgcccattttaaccatttcttgcttatagcatgttgtaagagtagcgtgaaagacttgttactgtgccgcacatccattgggtgtttaaagaagtat

SEQ ID NO: 138710 - DNA, 504 bp, Homo sapiens
taatccttacttttgctatccattgaattgttaccatcagattattctttttcccgaaacattgattttattatcatatcccggatgggctcgtttttgcatrggcaaaagcagttgctttgtttctctgtgtatgcttttttagggggtcctgccccacattcccaattgttatttctaatgctcttgaaaacaatttcttgctctggctgtgttcatcttctaaccacttatctaaaacattctgcggattctctaggtggtttttcacagtgggaaaggcaaacaagggctttagattatgatatttcaactctaattgtgtaacttacattcattctttatgtgaccctaggcaggttacataacactgtggagcttcagttttctcatttttcaagtaatgttgcccattttaaccatttcttgcttatagcatgttgtaagagtagcgtgaaagacttgttactgtgccgcacatccattgggtgtttaaagaagtat

SEQ ID NO: 138711 - DNA, 509 bp, Homo sapiens
tataataatccttacttttgctatccattgaattgttaccatcagattattctttttcccgaaacattgattttattatcatatcccggatgggctcgtttttgcatargcaaaagcagttgctttgtttctctgtgtatgcttttttagggggtcctgccccacattcccaattgttatttctaatgctcttgaaaacaatttcttgctctggctgtgttcatcttctaaccacttatctaaaacattctgcggattctctaggtggtttttcacagtgggaaaggcaaacaagggctttagattatgatatttcaactctaattgtgtaacttacattcattctttatgtgaccctaggcaggttacataacactgtggagcttcagttttctcatttttcaagtaatgttgcccattttaaccatttcttgcttatagcatgttgtaagagtagcgtgaaagacttgttactgtgccgcacatccattgggtgtttaaagaagtat

SEQ ID NO: 138712 - DNA, 383 bp, Homo sapiens
gtactcacaaaaataaaaattaaaaattattttaaaaaaagcacgactttctgaggagtccacatgcttcatcagactgataagaacccatatattatgaacctctattcattttgtttctttcacttagactatactttcctcacttcatctccagaaatcctggatattctttgagacgtgctggctcaagtcttttttcatcaattaaatcttcttccaaatatccttgctttccatttattttttctttttatgtctagracatattgttcttgaatatatgtgatcacatttttaaatggctgttttatattcttagatatcttcttatttctttacaataaaataatacaaactttgaagttagaattcaggttaca

SEQ ID NO: 138713 - DNA, 578 bp, Homo sapiens
tgggaattgaacaatgagaacacttggacacaggacagggaacatcrcacactgggtcctgtcgtggggtagaggggagtggggagggaaagcattaggagatatacctaatgtaaatgacgagttaatgggtgcagcacaccaacatggcacaagtatacatatgaagcaaatctgcacgttgtgcaaatgtaccctagaacttaaagtctaataaaaaaattaaaagaaaatcaatttagaaaatagtgtacataaaattttatataactattatttacatgtatagatactctgaatcatgctcaccaatatatctataatgctgaatttccgctgactttgactttcttcttttagattttctgtactattttgctcatcctccatgtggaggtatcatttttcaagtagaaaaaaaaaaaggtattttaaccttgaaagttaaaataacaaaaagcaaagtcttctgtagatctgtgcatagttacaatgacaaagcagaaccacaagaaatacttaagtattgacaaagactctatttctaaagaaagtcacatccacaggtcctgggggtt

SEQ ID NO: 138714 - DNA, 413 bp, Homo sapiens
agggacccagtgggaggtaattgaaacatgggggcaggtctttgccgtgctgttctcattataacgaataagtctcatgagatctgagggtatcattagggggagtttccctgcccaatctctctgtctcrtaccacccacctaagatatgacttgctcctccttgccttccatcatgattgtgaggcttctataaatccagttaaacctctttcttttgtaaattgtccagtctacggtatgtcttcaccagcagcgtgaaaatggactaatacatatgggaaggaaatttgtaaggataattgcttccaacttaaattaattttgcatatatagacattcttacgttacatagtgcacagatgataaaatcaaatacacatggtacaaggatcagcattaattgagaattt

SEQ ID NO: 138715 - DNA, 413 bp, Homo sapiens
agggacccagtgggaggtaattgaaacatgggggcaggtctttgccgtgctgttctcattataacgaataagtctcatgagatctgagggtatcattagggggagtttccctgcccaatctctctgtctcataccacccacctaagatatgacttgctcctccttgccttccatcatgattgtgaggcttctrtaaatccagttaaacctctttcttttgtaaattgtccagtctacggtatgtcttcaccagcagcgtgaaaatggactaatacatatgggaaggaaatttgtaaggataattgcttccaacttaaattaattttgcatatatagacattcttacgttacatagtgcacagatgataaaatcaaatacacatggtacaaggatcagcattaattgagaattt

SEQ ID NO: 138716 - DNA, 567 bp, Homo sapiens
aatttgcaattgcaaagatactgaaccaaccttagtgcccatccaaccaacgcctggataaagaaaatgtagtatatatacaccatggaatactactcagccataaaaaggaataaaattatgtctttttcagcaacttggatggagctggaggccattatattaagtggagtaactcaggaatggaaaaccaaatattgttttcttatcacttacacctgggagttaacctatgaggacgcaaatgcataagaatgatgtaatagactgtggggacttggtggggggaaagctgtaaagggggtagaggataaaagactacatattgagtacagtgtactctgctcgggtgatgagtgcgctaaaatcttagaaatcaccattaaataacttacccatataaccaaaaaccacctgtacctccaaaactattggaattttaaaaaagaaaaatataataaacagaagggttaaaaaaacctatttttctmctattaaaagtataacagtgttaaattattaaaatgtatacttattgtattatattttaataaatatgctatacat

SEQ ID NO: 138717 - DNA, 567 bp, Homo sapiens
aatttgcaattgcaaagatactgaaccaaccttagtgcccatccaaccaacgcctggataaagaaaatgtagtatatatacaccatggaatactactcagccataaaaaggaataaaattatgtctttttcagcaacttggatggagctggaggccattatattaagtggagtaactcaggaatggaaaaccaaatattgttttcttatcacttacacctgggagttaacctatgaggacgcaaatgcataagaatgatgtaatagactgtggggacttggtggggggaaagctgtaaagggggtagaggataaaagactacatattgagtacagtgtactctgctcgggtgatgagtgcgctaaaatcttagaaatcaccattaaataacttacccatataaccaaaaaccacctgtacctccaaaactattggaattttaaaaaagaaaaatataataaacagaagggttaaaaaaacctatttttctactrttaaaagtataacagtgttaaattattaaaatgtatacttattgtattatattttaataaatatgctatacat

SEQ ID NO: 138718 - DNA, 375 bp, Homo sapiens
gaattcattgtctgttctaatcatggagaaaattattcacttagtctaccaggcaattttaactgatttcagatgagaaagatgctttattccacaaacccccaaggactgtttatctatatgatataatcaagttgactaaattatcactttctaatcaatgaatttttctgaaaacaaactcacaacattcactttttcatctcttgtctccatcagatctaagttagtttggaggcaagattagcagagcagccccataggactctaattttgtggcaaatgyttctctaaggaggaagaaatttacacctccttcaagagaattgtttatctagctgctgaatcagagatttgctgtaatcatgcttctcc

SEQ ID NO: 138719 - DNA, 528 bp, Homo sapiens
ttttgaatgatagttacagaaaagttacagtaataatattatagtacaataaatgtcatagagtctgtcattcattgccttatatttaatagcaaatactaatattcactttgttaaaatgtaatgcttttataaaaaacatcaagtaattacatcttaaataaaaggaaatgtattctttttttatgtctccattaaaaccaactgtatggccaggcgtggtggctcacgcctgtaatcccagcattttgggaggctgaggtgggtggatcacctggggtcaggagtttgagaccagtctggccaacttggtgaaaccctgtttctactaaaaatacaaaaaattagccaggcatggtggcrcatgcctgtaatcccagctacttgggaggctgaggcaggagaatcgcttgaacccaagaggcggaggttgcagtgagctgagattgatcgctgtggacaacaaaagcgaaactccatctcaaaaaaaataaataaataaaaccaactgtatcactaagtttgttt

SEQ ID NO: 138720 - DNA, 528 bp, Homo sapiens
ttttgaatgatagttacagaaaagttacagtaataatattatagtacaataaatgtcatagagtctgtcattcattgccttatatttaatagcaaatactaatattcactttgttaaaatgtaatgcttttataaaaaacatcaagtaattacatcttaaataaaaggaaatgtattctttttttatgtctccattaaaaccaactgtatggccaggcgtggtggctcacgcctgtaatcccagcattttgggaggctgaggtgggtggatcacctggggtcaggagtttgagaccagtctggccaacttggtgaaaccctgtttctactaaaaatacaaaaaattagccaggcatggtggcgcatgcctgtaatcccagctacttgggaggctgaggcaggagaatcgcttgaacccaagaggyggaggttgcagtgagctgagattgatcgctgtggacaacaaaagcgaaactccatctcaaaaaaaataaataaataaaaccaactgtatcactaagtttgttt

SEQ ID NO: 138721 - DNA, 298 bp, Homo sapiens
agatctataacccataaattgaagtaaaccaggtggattttacatgcaaaatagcacaaagtgcttttcaacaatattatgggctgggagtaaaaatgggcacttatcttataatttattattgtttgactgaagtaccaagttaaccatcaacctttataaatacagagcaagtgaattaacagctctatatactaactacctatcaagtgccagccactgtaccagacactgtggatgtgtaattktgcagtcttcacaaaaatccagtgaggcgttattctttccaatataaagt

SEQ ID NO: 138722 - DNA, 417 bp, Homo sapiens
agaattcagacagccattgattaaacagagccatttctcagcgctcttttctcyccatttaagaaattggaatacagcatgatgagaatgatgatgccaaaacaagattgctggctcacatcatctagggtacaaatacgcacttacttaatcacttgacacttcattgaatgcaaagcaatatttagcatctttgccttcgttgtacacagctgaagcgggagcccagggaggggaacactgcatggttttccttggtgggggaggtgtgcaccctgcagtcctgtcgtgttgggggaagatcagcccatgttctgtcggttgccatagcccccaggatgggtgtccttccagttatcccactcccgaactctgtagagtgttcatcatcctctccctccttcacttcttgatact

SEQ ID NO: 138723 - DNA, 439 bp, Homo sapiens
tttgtgacaagtaaaaattgtatgagattcaattcaaattcaaatttcagtgtctataaatcatattttattggaacagagtcacacttatctgtttacaagctgtctatgactgctgtcacacttcaatggtagagttcagtagctgaggcagagactgtatggcccacgaagtctaaaacacttactctgtggccctttataggatgtttgcctatccttaatggaaggcattatttttccaaccagaaatcttgtctctatcagctctaggtattacaactcagttgtttctcttctctttcccactaagtmctaaagttttgcaaacttcttaccttatgatctcctgttaggcagtcgatttctacttcagagcaagccaccccatagctgaagtagtggaaggggttccctgagttagtctcaaagctgtagc

SEQ ID NO: 138724 - DNA, 459 bp, Homo sapiens
ggtgtcttcttccctcaaactgcttgtttgattatatcccccatatggcagaggagccagtgtggccaacctgcctctataatcaratttcagcttcagcccattgtcctattgctagctccagcaccagggagtaattccagaagcctctgctttccctcggtatcctcatctccccatcctgcactcatccttcccagctttgagggcagtgattatgattcttgggcctctcttttagcttgaggtttggagaaacagcatcctcctggataagggagccagaggcctgccagagccaaagagcctgcaaggaacccttctagctcccacccagggagactctccaggcccacagctctgggctggccctctgctctgcgggatcccatgggctccttacatagacggcctgtccattgaggtcagcgctgacagaggcagccgtgggagaggtgt

SEQ ID NO: 138725 - DNA, 459 bp, Homo sapiens
ggtgtcttcttccctcaaactgcttgtttgattatatcccccatatggcagaggagccagtgtggccaacctgcctctataatcaaatttcagcttcagcccattgtcctattgctagctccagcaccaggsagtaattccagaagcctctgctttccctcggtatcctcatctccccatcctgcactcatccttcccagctttgagggcagtgattatgattcttgggcctctcttttagcttgaggtttggagaaacagcatcctcctggataagggagccagaggcctgccagagccaaagagcctgcaaggaacccttctagctcccacccagggagactctccaggcccacagctctgggctggccctctgctctgcgggatcccatgggctccttacatagacggcctgtccattgaggtcagcgctgacagaggcagccgtgggagaggtgt

SEQ ID NO: 138726 - DNA, 459 bp, Homo sapiens
ggtgtcttcttccctcaaactgcttgtttgattatatcccccatatggcagaggagccagtgtggccaacctgcctctataatcaaatttcagcttcagcccattgtcctattgctagctccagcaccagggagtaattccagaagcctctgctttccctcggtatcctcatctccccatcctgcactcatccttcccagctttgagggcagtgattatgattcttgggcctctcttttagcttgaggtttggagaaacagcatcctcctggataagggagccagaggcctgccagagccaaagagcctgcaaggaacccttctagctcccacccagggagactctccaggcccacagctctgggctggccctctgctctgcgggatcccaygggctccttacatagacggcctgtccattgaggtcagcgctgacagaggcagccgtgggagaggtgt

SEQ ID NO: 138727 - DNA, 653 bp, Homo sapiens
cactaggccccaccttcaacactggggattacaattaaacatgagatttagaggggcagagtccaaactatatcacacttcctactaactctacaaattattgagtgagacactgaaggaagaaattaattgcagaaagatgactaagtatacctatgatatatttttctttcatttattttaataggtggtggagaaaaatgcagatccagagacaacccttttggcctacctgagaagaaagtgtatcctgactttggagtgggagtgayggagaaggggggcaatggtgactgattctgtaggccttacattgtttcctagtgactggtggggtggccttgaggtgtggaggaaagagcactggattaggacttgggacacttgcattttagttgcacctgtaatctgaaattctcagctactgaatgagaggattgtttgtggtgatcttcgaggtgtctccccgctaagactctagtaatgccaaggtttaatccagggcctgtagaaaggtcctcattagccttggtgagcttcatggtcattcctctgtgggaagaggggggccttccttaggtgacatttgcttaatacataaatggagttcctggggaatgtttccagctctgcctaggtggagggaagcaagg

SEQ ID NO: 138728 - DNA, 653 bp, Homo sapiens
cactaggccccaccttcaacactggggattacaattaaacatgagatttagaggggcagagtccaaactatatcacacttcctactaactctacaaattattgagtgagacactgaaggaagaaattaattgcagaaagatgactaagtatacctatgatatatttttctttcatttattttaataggtggtggagaaaaatgcagatccagagacaacccttttggcctacctgagaagaaagtgtatcctgactttggagtgggagtgatggagaaggggggcaatggtgactgattctgtaggccttacmttgtttcctagtgactggtggggtggccttgaggtgtggaggaaagagcactggattaggacttgggacacttgcattttagttgcacctgtaatctgaaattctcagctactgaatgagaggattgtttgtggtgatcttcgaggtgtctccccgctaagactctagtaatgccaaggtttaatccagggcctgtagaaaggtcctcattagccttggtgagcttcatggtcattcctctgtgggaagaggggggccttccttaggtgacatttgcttaatacataaatggagttcctggggaatgtttccagctctgcctaggtggagggaagcaagg

SEQ ID NO: 138729 - DNA, 560 bp, Homo sapiens
gatgatgatgaggaactcatttcaaaatggcagctcttataagacatgggagaaaaataggtactacaatatatttttctgggacaactgactaattgtccatttgggaaaaagctagaatagtaacacttcccacaaaaaagtaagttacagatagattaaattcctaaatgtgtgaaaggtgatttgtagaagaaactatagaatatagtctgccagttgtgctggtgcacacctataatcccagttacctgggaggtggaggcagtacgatcacttgagcacagcagtttgagacctgcttggacagcatagtgagactctgtctcaaaaataaaagaatatatttatgactttgagatatgaaagaagaagatggcttgctaggagcagctagtgtgtgggctctcatggagaagaacggaaggggtgaggaaatacagcaacctcmactaaaatatccaggtacaggcattggaactaatcaaggaaacaagttcacccaaggagaaggaagaaaagcaaggcaggatgatggcccaccgggagcagcgtggagc

SEQ ID NO: 138730 - DNA, 392 bp, Homo sapiens
cttattcttaaatttctacaatgacctccacttcccatttccaaatgcttttcaaagcttagaggatggaaaatctgttaaagaattaaatgtaaggatccaatttattggtacrttagttaaagtcatacattggcccccactctattgccatttttcccacagacagaagaaagggtgcagatatggagaacagagaagggttacaatgaaaggagagaagaaatcctggagtggtgggaatttgtaggaagggaaagtgttggagaaagggtagggagaaaagctcctgaaacttaagccatcctgatctttttccacctgcagagcagggcattagagaagaaaatgactggtttgaaggaagcacaccacctacccttgacaggaaa

SEQ ID NO: 138731 - DNA, 510 bp, Homo sapiens
tattttttagttaggtaatgtaakttttccagttttattctttttgtttaggatacttttggttattctgggtcttttgtggctctatgtaaattttagaattgtttgtttgtgtttatatgaagaacgtcattggtattttgtaagggatttgcacttaatccgtagattgctttgggtagtgtggacattttaacaatattgattcttccaatgtgtgaacatggaatatctttccattttttgtgtcttccttaatttatttcatttgtgttttttattcattgttggtatctttcacttctttggttaattctaggtatttaattttatgtgtggctatcacaaattggattacttttaaaatttatttttcagattgttcactattgggatatagaaacgctactgatttttgtatgttgattttgtatcctgcaactttactgaatttgtttatcagttctaacaatttttcgatggagtctttaggtatttccaaatataagg

SEQ ID NO: 138732 - DNA, 673 bp, Homo sapiens
taatcacagccatagtggtagcaatagtagcaataacagagcagtagtagtagcatcagcatcaatactactagtaataatactagcaacagcaataatagttgcagtagtggtaacaagatagatagtagtagtagaagtagtaatagtcatagaagcagttgtcatagaatcaacagcaacagtagtaataatagtagtaacagaagcaatgccaaaaagtagcagtcatagcaccagcagcatcaataacagcagtaatactactgttagtagtaatagtagcagcagcaatactagtagcaatagtaatagtagtagtagtagcagtaacagtagtagtagtagtaatttcagtagcaataatattagaagcagtaatgttattagtaaaatactagtataacagcagtaatagtagtagtagtactaatagagtaagcggtagaagaggcagcagtagtattagcaatagtaatagtaataacagcaataatactaatcataatagtgacagtaggaattgcagcagtgatcatagctgcagtgatagtagtagcaacagtagtcatagtaatrgcaataatgagtaacagtagtaattttagtagaagcagctggagtagtagcaatcataatattaattatagttgcaataatagtaacaatagta

SEQ ID NO: 138733 - DNA, 417 bp, Homo sapiens
tgacaatgcaaactttcaaaaccaaaaaacagagaaaaggaagtgaatgaaaacaaacagaaacaaataagaactgtgtgataactacaaaagatgtaacatatgtgtaacgagaatatcagcagtaaaagaagaaaaagagaaaggaaaagaagcaatatttgaaacaaaaatgactgagaatttcccaaaattaatgtcagattttaaaccacagagtcwggaaattcagagaacacaaaccaggataagtaccaaaacccaaaaccaaacaaaaactataccaaggcatgtgatattcaaacttcaaaaaatcaaaggtaaagaaaaatgacttgaaagaagccaaaggaaaacacccctcacctatagaagagcaaatataaaattatatctgacttttcccagaaaccatgc

SEQ ID NO: 138734 - DNA, 409 bp, Homo sapiens
atccacccatgtctcttcatttccacagtatccaccttaagctgagccaccaacatctctttcttaggaaatgacaatatttactccttggtttcctttctctaactttagctccctctgatccgtttgctacagtgaaaagtgatcttaaaacaaaacaaaaacaaaaattgaccaagttactcttctcctcaaaatccttcaacaacttccccactgcagtaaaattgaaaacccctcatgaggcctgcaagtgcctgcatgctctgagccctgctcccttgagtgtctgcacagtctgagccctgttccytcaagtgtctgcacactctgagccctgttcccttcaggcctcatgctgtctcagtctccccgctgtacccaccacaaattaggcttctggaagcca

SEQ ID NO: 138735 - DNA, 403 bp, Homo sapiens
catttccacagtatccaccttaagctgagccaccaacatctctttcttaggaaatgacaatatttactccttggtttcctttctctaactttagctccctctgatccgtttgctacagtgaaaagtgatcttaaaacaaaacaaaaacaaaaattgaccaagttactcttctcctcaaaatccttcaacaacttccccactgcagtaaaattgaaaacccctcatgaggcctgcaagtgcctgcatgctctgagccctgctcccttgagtgtctgcacagtctgagccctgttccctcaagtgtctgcacactctgagccctgttcccttcaggcctcatgctgtctcagtctccccrctgtacccaccacaaattaggcttctggaagccatcaaacccttt

SEQ ID NO: 138736 - DNA, 443 bp, Homo sapiens
tatagccagttggccagaagtacaggaggcctggcactgaagcaggggcagtcttatgagactgagccattaggctgtgaggtctgtgataactccaggtagttagtgtcagaattgatctgaactgttggacactctggtgtccagagaatcagagaatcggttgtagtgttggaaagcaccctatgtagagtacccatgaagaggggagagaaaaaactattcrttagcctgtggaagcagcaagaaagcattgtatctactcagagttcttgggaagaaaagaaaacaaaaagtttatatgaaaaatcaaaattccaggtgtggggtctatatttacccagcacacatggtagaagctcacctttgaactgataaaaaggcaataaaagcacagaagacacatgtgctctatagggaatcgttccccaacccacagagca

SEQ ID NO: 138737 - DNA, 564 bp, Homo sapiens
cctcccctacccagtacacaggcactggacctagttcagcactaggactcacctagaaggttcagactttgtggcctagattgccatccaagttaatttagggccccagagcactttagatcatgatggaaaggcttgtgggaactcaagttctgaccactgagattggtgattcctctctggctaggaatgttcactccatgggtgggtgtcagctgagtttggtccaattttgctttctgctataacagggcagaactgagttcaatgtctcacaaatgctgcactctccttcttcccaacatagaatcgctctctgcatcatgctgtcactgctggatatggggaaggggtggcattggtgattcagtactgcttttcctacctcttcgatacctctttcagtgatgcaaagttaaaaccagatrctatgagtgctcacctgtgttttgattctcatgaacgtacttctttggtgtgtagatagttgttaaattggtgtccttctgggagcatgattgatggcgccttctactttgacatcctgccccatgctacctcctc

SEQ ID NO: 138738 - DNA, 616 bp, Homo sapiens
atgattgttgttttattttgtttaataattcagtttcataaaagcttaatggatctccttcagagataattgtcatccaacatccccgaaaaagtaaacaacaaaaaatttttgtacaacacatcactttagaagatgaagtttctgacaataggaaccaacaattagtatgcatgtctctgataattatctcttrtggcccaaataagctattgactcagttggttagtgcaatggtggttaaatctggctgttggttattgcaatggtggttaaatctggctgactttcactagccataatgctagcactgctctgagaagctcttaaagtatgtaaagcaatttgttcttctatgaaatgctctcctcatggagtctttgttctcatatttttagttttttgttatctccttcacttttacatcaataataagatgaattcactcttcagaagtacccactcatgtctaatttgcaacattggatgtctattggaattacaaaatgactgtcgagaactatcctatgagtaaaatataaggacttttgtagcagctgtcttaaacatttgaaaaattttgtttgttgttgaagaattccacatagttgaaatc

SEQ ID NO: 138739 - DNA, 568 bp, Homo sapiens
gctagtaacctacagggaacaaaaccgtaatatttagggttatcatattttactatacatagataatttgcatctgtaacatgaaaaatctgttagttaacatgtaatattaattctggaatattcattagataggtaaaatatcctttgaaagaactagttagcaatgctccttatgacattaaaaggacactgctttttctttttgatttcttgcaaatttttccttaaacagatattactataagcagattaatcacatgctgttatgtcatatgtggaagaatgaaactggactcctacctttcwccgtatacaaaaattaactcaacataaatcaaagattgaaatgtaagacctcaaactataaaagtcctagaagaaaatctaggagatacccttcttgacatcaggcatggctaagaatttttgactatgtcttcaaaagcaattgcaataaaaacaaaaattgtcaaatgggacctgattagactagagagctttggcacaccaaataaataatcaatagagcaaacaaccaacttacagaatgggagaaactatttgc

SEQ ID NO: 138740 - DNA, 629 bp, Homo sapiens
gcaattgcgtacagtcaggaatatagaattgtgtatctcaactctaataccagatgttatatatcacttaataatctctctttattcataatgcgcaatgtggttgttaagtatcgtggtaatgttttggtcccaataaatagaatgggtatatgccagatgaggagatttctagaatagaggtcttcagaaatacaaaacaaaatatttgggggttcagcttaagtagtttcacttccctgtgagatctgtaaagttgatgcagcccccaaatactcatcgtttctaagcaaggtctattctaaattcttttatataaacatatagtctctaaagctagcaagcctcccaaacaatatttcygtgctaaaagaaggactcaatatgtccttttgtgatatgccataatagcctattgtagatttctgtcatctactttgttttatttacctttgtcatttaccttttctgagaagtgtgggtgatataaaggttgaaatgcctgattaagcatcaaaccttagcacaatgtttaatgacagtttcagacaactaaataaccttacatgggagagattggctggtcctttttgtgtttatattacttgggtaccattgagtttcttgaa

SEQ ID NO: 138741 - DNA, 624 bp, Homo sapiens
aaagatatttcgggcaaatagtaagcataaaaagactgagtggcaaaagtaatattatatatcaactatattatactaaatagttaaataaattaaatatatgaaatactaactttaggacaagagtactaccagaggaaaaaaggaacaattcctaataagtttaaatttattacaaatatataacaatcatgtctatatatgttttgaataacagaacttcgaaatgcataagcaaaaatggaaacctttaaaggtaaaatagatggttctgcagttataacaggaatgtgattgtcagcacaggttgccataacaaaataccatagaccaggtgtcctaaaacaactgaagtttttattttctcatagttttggagtctggaagtccactatcagaatgtcagtatggccaagttctagtgaagtctctcctcctcctcgcagatgttgtcttctctctgtgtccctacatagtagagtgtaatctctgtctctctctctctctctctctctctctctctcgctctctctctctctctccttctctcctctgtgtgtgtgtgtgtgtatgtgtgtgcgtgcaackcttctaataagaccagagtcctatcagattaggacc

SEQ ID NO: 138742 - DNA, 588 bp, Homo sapiens
ataaaatattagaaaaacaattatgtttttctaatgttcagtatacatttctcagtagttctattcaaatatattggacaataagtattgaaggaatgaatattgccacaagtaacaagtatcaaagcaagcaataaacctgtcattcattcccctgacttgtgtctatacgtatttttgtaattccgttttaaaggtggttaacatgaatttttgcatacatgacttttgtcttacattgaattacactgatgtcttttactcataaacactttatgtcaaaattaaatatagtcattatgtgtgacaattaacaatataattttatgagatctcttgggtaaaaatatgatcttgatgaaaacagactgtkcatgcattaaaatgaaaagtgtacttaaaaatatccctgatgaaaacagattgttcatgcattaaaatgaaaagtgtacttaaaaatatcccaggtgacaactttctttgatatttcaaaatttcacaggcaattaaaattgactttctcgcctctggctgctttcttttactggtgggaatacaagaaggaaaaacagtaagataaaaggcata

SEQ ID NO: 138743 - DNA, 568 bp, Homo sapiens
tgcattcagaataaaaattctcataaggattttttttttttttttttttttttttgagacagagtctcgctctgtcggccaggctggagcgcagtggcacgatctcggctcactgcaacctccatcttccgggctcaagcaattctcctgcttcagtctccccagtagctgggattagaggcgtgagccaccgcgcccagcctcagggggatatttcaagtacttggaggctagtcttaraatgagaacagcttgagattgtgttccagtcccacgaattgctctctcagtttcagtaggaaatgattgtagctagttctattgctttcagaaaataaacactttaacaacttggaaacaccaaatccagtcttattaatgacaaaaggcaaggatgcaaatcaaagatacagtgaggactatttttttctgcattcatcaaaaaaatctatgaaatggatatattttctgaacacaattttccatttatttggagaaaaaaatactaacttctgtcaaggaatattccacatttggtctcaaaaggtttataagtgaaaatcaatca

SEQ ID NO: 138744 - DNA, 592 bp, Homo sapiens
gttccagtcccacgaattgctctctcagtttcagtaggaaatgattgtagctagttctattgctttcagaaaataaacactttaacaacttggaaacaccaaatccagtcttattaatgacaaaaggcaaggatgcaaatcaaagatacagtgaggactatttttttctgcattcatcaaaaaaatctatgaaatggatatattttctgaacacaattttccatttatttggagaaaaaaatactaacttctgtcaaggaatattccacatttggtctcaaaaggtttataartgaaaatcaatcatacttgagaaattgagttttttcatagttactgggtgagaggcatactttatgaaagtaaatggagttctgtctcgagataatgagaatatagttgccaagagaaactgtgaagtattccctacagatcttttttcctacttgatcctatatcatgtaattatttttggaaaactttcaaagtagtgatgattgtaatgccataaaatgaataaaggggagggcaacagttcccaattaagatcggaagagtaataaaaatgtaaagaatatgaaggccctgccag

SEQ ID NO: 138745 - DNA, 579 bp, Homo sapiens
aagcaggtgagacacctaaaaatgaaacccagaactcaaatcactggcctgcatatatgtggtttaagattcctgtctgagggaggtcaatgtgatttaagctcttttacagaggaggaaactaaggttagacgaactggtgtatacagagtagggaaaattgagtcctatatgtcacatatattttcctttacatgatctatgttactgctctacttatatgttatagctgaccttcctgtatctaaagcctgtcctctgccttcccagatcaacatcattttgtgttattattttagaaatattaaagcaaattttatmatttttattgaaacatattacattaaacctattatttactattaattcttagaacaaatgtattaatgtactatgctaactcaatactgtgacactgaaggattaattctattcattaattccaacaatcttggaatctttaccagaatttgtcactatcatcagccataaaattaagattaaatttagaatgcagtattactgctatgaagggaattcctaagcaatgggagagatcatttgacattaaaagaagac

SEQ ID NO: 138746 - DNA, 228 bp, Homo sapiens
agaagacaaagcaggatactttaatagagtaatgtgtattcacacagtctattaaaacacataaacctatttcattcaygtattatgtttaggtgtctattatgcaaaatatttattcctcccctaaaaaaaaatcacactttagtaggaaagacaagagtaacaaacactaaaggtggaaaactatgtaattttagaaagatgccaaaaagttgtccagagacaatt

SEQ ID NO: 138747 - DNA, 580 bp, Homo sapiens
atatgaaatcttatggacattagaagcagaattatttcacagaggaaaaaaaggaggtattcagaaagaggatagaaagcaaaatgtaaaggacgaacacagtcagggcctgatgtctttttttggtgtagaagaggtatatggatcttccgaattctgygtggcctcaaataatcacaaaatagtcaaccctacgggaaagggagaggtaggcagaaagttttgccatcactgatctttcccattagtgaaacttaaaggtggtgtttctctcaaatcccttctagtcaatcatggctaagggcttccaagtgaccttggcaatctggcctctcccacactgggtgtcctttacccagtccctgagaagcttagggagaagagtgaaagagaaaacaggaaagcaaaaacaacttcaaaatttctgccttcagctaagtctgggattgtccaagctgcctctaatgtggtgtcagccaaggctcccactctttgcagaaaagttagctgctataggagcttggaaaattagaccagagtagttgaaactgacaatggttcaatatattgtcacaaagtc

SEQ ID NO: 138748 - DNA, 589 bp, Homo sapiens
ataatttgagccagaagcccacagaacttagggtccagtgataaaagcttacggaagccgccacaggactaacaaatgctgtaacggcctggggccaaccggaaaagggtgtcagtcaaggaagaatgtgttttctcgatttctttctgtatgtctgctttggcataatttaatatggtttattcatcagagtgggccacttagcagaccacagctatagccagatccaatatctgtaacgccattaacccctactcaagtgggaggatacaagaagtaaacatggcattttttttgtttgtttctgggatctcactgtccaaaaaaatgtgyatttgagaaacaacacaaatagagggtaaattttgtgtattaataaaacatataactctgtgacaacctatttaattttatgagaagttcctagtaacatcaaagctctgtaagatgaccaactacaggaaagggtaataaaaaccaaccatgctttttccacagaaggaagctaaggcaaatataatcaatggaatactattactagtcaacatttcacacattccacatctactctaccaaaactcataagtgg

SEQ ID NO: 138749 - DNA, 553 bp, Homo sapiens
aaaattacccacttttaggggttcatagcattggcaagatgtgttcaaaaatagtgaaattcgtctagtaaaaaaaaaagcaattaagtcaatattgcatatagtatgtactcaacaaagtcatttcctaatawggggatgtgatcatttctcactgaacttttaaaattaattatccattatatgtttagacagtacaaagatttaaaaaaatgaacaagagatgttttttaaacactgaagtctaaagagtgcagtaggaggaaaacaatcggaagcttttgcattgtgcttcttttcccatttgtagaatttgctctttaatgaatttttttttttttagcaccacgatatctgggttgttaaaaggaggattgctctattgctgtaggtagaattggctaacctatgggacctgaaaccaattctgtcattcagcagggaattccaggtcacacagttagaaatagagaggatttcaaaattgattattgaatacctacattactcggtctgtgtcatgtgccaaccctgaccttatgctccagtctta

SEQ ID NO: 138750 - DNA, 602 bp, Homo sapiens
cagtgcctatagagacaagagtatagggtgttaataacagtagttcaaagaggcaagaaatctgtcctaggaaaaacaccgcctaagatggagctgccaatggttagggatgtgttgctgaggaaacctggactcttttcttctgggaagcccaggctgagagatttctaacctgaactactttgaccacttgtttacatgaatgactcaaaaaatggctayttaactatatatgtatatgtagttttatgtaactatatgtgtatagacatacatatacgttcatacatatacatatacacagagtagatagatagatatcactttggtcacccatgtcacataaaactattatgtgaacccctaatcagtcactactctgtaaaaatcggctttctttaaagattctctatgtgagtacatttcctaagtcctattgaaagaattactatgtgggaatgggcgtgaccattatgccttttctacaggacattaatgtcatgattacaaagagtgaaaacaaaataacacaataactacaacaatgaaaacagcacggctttatctgattgtattaccctaaggctggcataacaacatac

SEQ ID NO: 138751 - DNA, 602 bp, Homo sapiens
cagtgcctatagagacaagagtatagggtgttaataacagtagttcaaagaggcaagaaatctgtcctaggaaaaacaccgcctaagatggagctgccaatggttagggatgtgttgctgaggaaacctggactcttttcttctgggaagcccaggctgagagatttctaacctgaactactttgaccacttgtttacatgaatgactcaaaaaatggctacttaactatatatgtatatgtagttttatgtaactatatgtgtatagacatacatatacgttcatacatatacatatacacagagtagatagatagatatcactttggtcacccatgtcacataaaactattatgtgaacccctaatcagtcactactctgtaaaaatyggctttctttaaagattctctatgtgagtacatttcctaagtcctattgaaagaattactatgtgggaatgggcgtgaccattatgccttttctacaggacattaatgtcatgattacaaagagtgaaaacaaaataacacaataactacaacaatgaaaacagcacggctttatctgattgtattaccctaaggctggcataacaacatac

SEQ ID NO: 138752 - DNA, 602 bp, Homo sapiens
cagtgcctatagagacaagagtatagggtgttaataacagtagttcaaagaggcaagaaatctgtcctaggaaaaacaccgcctaagatggagctgccaatggttagggatgtgttgctgaggaaacctggactcttttcttctgggaagcccaggctgagagatttctaacctgaactactttgaccacttgtttacatgaatgactcaaaaaatggctacttaactatatatgtatatgtagttttatgtaactatatgtgtatagacatacatatacgttcatacatatacatatacacagagtagatagatagatatcactttggtcacccatgtcacataaaactattatgtgaacccctaatcagtcactactctgtaaaaatcggctttctttaaagattctctatgtgagtacatttcctaagtcctattgaaagaattactatgtgggaatgggcgtgaccattatgccttttctacaggacattaatgtcatgattacaaagagtgaaaacaaaataacacaataactacaacaatgaaaayagcacggctttatctgattgtattaccctaaggctggcataacaacatac

SEQ ID NO: 138753 - DNA, 602 bp, Homo sapiens
cagtgcctatagagacaagagtatagggtgttaataacagtagttcaaagaggcaagaaatctgtcctaggaaaaacaccgcctaagatggagctgccaatggttagggatgtgttgctgaggaaacctggactcttttcttctgggaagcccaggctgagagatttctaacctgaactactttgaccacttgtttacatgaatgactcaaaaaatggctacttaactatatatgtatatgtagttttatgtaactatatgtgtatagacatacatatacgttcatacatatacatatacacagagtagatagatagatatcactttggtcacccatgtcacataaaactattatgtgaacccctaatcagtcactactctgtaaaaatcggctttctttaaagattctctatgtgagtacatttcctaagtcctattgaaagaattactatgtgggaatgggcgtgaccattatgccttttctacaggacattaatgtcatgattacaaagagtgaaaacaaaataacacaataactacaacaatgaaaacagcacrgctttatctgattgtattaccctaaggctggcataacaacatac

SEQ ID NO: 138754 - DNA, 587 bp, Homo sapiens
ggcagactacaagtgctgatttacttcttccatagctctatgtatgggtcacagtgttcacttcatggccarctaggggccatgagtgtcctctgctgccaacaccagatgttactctccatgagatctctatgtgtatgactatgccatcctgagctctactgatctctctccttctttctcattttggttttctcttcctctcaatattgggaaaaccttttctactttatagtgctaagatgttaatttttatctctgcagatttcctaagtccacaggcatcttagggcctttttatgaaactaaagcatatactctgtatttctgcattaccatttttttcctccatgctattggatatttcagaatttaggtattttaaagaggataggagaatcagggtaaacagaaactggaacttttggcttcctttctctcacagcttttctctctcatgtgtcatcttctagccacactctcctatgctcattttctgaaatatatctgtccccttagagctcagtgccttcacacattctgttcccacctcctgtgcctgtcttccttccttccacaaagctgac

SEQ ID NO: 138755 - DNA, 601 bp, Homo sapiens
tttgttgtgtagaagctctttattttaattatcaccagcttgtctatttttgtttttattgcaattgctttcggggatttagccaaaaatcctttgccaaggccaatgtctaaaagagtatttctgagattgtcttccaggattgctatagtttcaggtcttacattgaaatgtttgatccattttgagttaattttttatgtggtgaaatgcagaggtccagttttaatctgctgtgtatggcaagccagttatcccagcacmatttatggaatagagagccctttctccattgcttgttgttggccttgtcaaatatcagatggctgtaggtgttcaactttatgtctgagttttctattctgttcaactggtcaatgtgtctaattttgtaccattaccagcctatattggttactgtggctttatagtatagtttgaagttgggtaatgtaatgcctccagctttgttcattttgcttaggattcctttggccatttgggctcttttttggttccatatgaattttagaatatgtttttctccttctgtgaagaatgatgttggtattttggtaaaaaaaaaaaattgagtctgtgc

SEQ ID NO: 138756 - DNA, 576 bp, Homo sapiens
aattctttgggtcttcatttctttaygaaggttcctgtgccacttaaaacttgttgaataaagttatatacttttcttctgttgctcggtcttatcttaatccattttcagttgcactaatggaatatctgagactgggtaatttataaagaaaataattttgtctagctcatggttctggaggctggaaagttcaagatctggcagttgcatctggcaagggcctcatgctgcatcataacatggtaaaaaggaggaagaacaagcaaatgtgtgtgaaaagacaaacagaaaatctaccttactttcataacaacctgctctcacaattacccactcccacgatcattaatccactccctcaaagaagacatcaattcctctcaatgacctaatcacctcttgaaggtcccccctcacaacatcaccacaatggcaatcaaatttcaacatgagctttggagagaggaaaccatactcaaaccatagcatatatcaatttaattctcaggctcagccaaaagaaacctggaagaagaacttaactcctttttacagtctgaaaaaaacaataat

SEQ ID NO: 138757 - DNA, 619 bp, Homo sapiens
attaaggaaacaaattgatattgctaagtgaaataaacgagtttgaaaggctacagactccatgattacaaatctgtgacaaaaactacaagaaaagacgaaactctggagacagtaaaaagttcagtagtatccagtggtttgaggagtggggtagagataaagaagtgaagcacaggatrtttttagggcagtcaaactattctacatgatactataatggtatgtaaatgacagtatacttttgtcaaaacccagggaactgtacaacacagagtgaacccaaatgtaaactacagactgtagttaataataatgtgttaatatcagtctgtcagttgcaacgaatgaacaatactaaagcaagatgttaataattgaataaactgtgtgggagaaaggcaaggcatattggaactctatactttgctcaatttttctggaaactaaggtgtttttaaaaacaagatgtattatctagaaaatcaatatgtgattgttcttcacgaagaaagactaaatttgagaaataacaaatgatacttgcttagatgcattaattttaatgcttcagtatgaactacaatatttgttgaatatcactgtgctattaattttg

SEQ ID NO: 138758 - DNA, 587 bp, Homo sapiens
ctggctaagaaattataaggacaccatcagctgaggagacatggggcctggcccaggagcttacagtggagtggcaggagaaggacacacacacaaccagagagggagcaaagtcagataaacacattaagcgccaaaggactctgcagaccaccggtgtcaggacagctagagtagcatcaaggatgtcccttgatataagcaaaataacaccacacccaaagtccagttagaaaaagcaactgataaagctatgttgcaggggcaggcaggawgtctcatgcctttaatcctagaaatttgggaggttgtgtgggatgattgcttgaggccaaagttcgacaccagcctgggaaacatagcaaaacctcatctctacaaaaaattttaaaagttagtcaggcatggtgatgcacacctctagttccagctactagggaggctgaggtgagaggatcatttgggcccaagagttcgaggttgcagtaagctatgatcataccactgcaccctagttatgaagaggggaggcaaaaaacaacaacccacactttcccaatacttcaagacaatggtagaagagaaac

SEQ ID NO: 138759 - DNA, 580 bp, Homo sapiens
cagctgaacttctcaggtcctgccatcttaagaacttgaattaaatcaagttggcttgctcaaaaactatcaatggctcaattctttattggaagaattcttaagtctcctgcctgcacattaagtgttgcagctctttcactgctgtagttcaccaagttccaagttcttgtcctacgactgataagaatggggtatggatacactggagagagagtaaggcaaagtagaatttattgagcaacagaaaagctctggacagtgagaggggacccaaaggtsggttgcttgccacaaggctgagtctaggagttttatggacttgaaatggggaagtgcatgctgattggtctgtggatgtgcttgaaaaagcaccattcagaaataggcacaaaagcgtagaggataaattggggaagggtaggtatatgtaaaataggtaaaggataaggaccaatctggagacagcatgccaaatgggaatgggagttctcaatctggcccacggatttatccagagctcacagcttgggtttcaggcttagattatcctttgctcgaaggttgaatttcactgggg

SEQ ID NO: 138760 - DNA, 580 bp, Homo sapiens
cagctgaacttctcaggtcctgccatcttaagaacttgaattaaatcaagttggcttgctcaaaaactatcaatggctcaattctttattggaagaattcttaagtctcctgcctgcacattaagtgttgcagctctttcactgctgtagttcaccaagttccaagttcttgtcctacgactgataagaatggggtatggatacactggagagagagtaaggcaaagtagaatttattgagcaacagaaaagctctggacagtgagaggggacccaaaggtcggttgcttgccacaaggctgagtctaggagttttatggacttgaaatggggaagtgcatgctgattggtctgtggatgtgcttgaaaaagcaccattcagaaataggcacaaaagcrtagaggataaattggggaagggtaggtatatgtaaaataggtaaaggataaggaccaatctggagacagcatgccaaatgggaatgggagttctcaatctggcccacggatttatccagagctcacagcttgggtttcaggcttagattatcctttgctcgaaggttgaatttcactgggg

SEQ ID NO: 138761 - DNA, 573 bp, Homo sapiens
tcaaggccattgcattttctgagtatggcctgactgtccagccagggctgctctggaccagcaggcactgtggacatcatgscactagagttccaccttgcatggcagcccactgtgttgaccagacagccaagaaaagagggtcacgctgtcagggatattaaagatatagaatgacagaaacagccctggactgagaggcagaggcccccatccactctcctgttctttcacacaaccctggagaattttctccagttctttcatctctttgggcttgttttcttatctttaaagctatgacaattataacagcctcaagagacttctgtgctggaaggatgaagtgtagtgtaagcaaaacccctagccctgtgtgtggtctgtggaaggcacctgacaaatagaatcctttttctttccttataaccaaatcccctgcacagccagtgtagttggatctgtaggtctttggtctgtaaagccagaagagacagggcttccaggtcatattgtccaacctgttatcctacagatgtggaaatgagggaggaagaagggctcataagcaag

SEQ ID NO: 138762 - DNA, 601 bp, Homo sapiens
aggatattttacatcatgataagggatttgggcttcacctactttggcaataatggcaacccatcaacacattttaaatgaaggttaaactgatcagtctatgctttacagsgatcatattgacccataaaagttggattggagggagcaggactaacattccattagaattccagatgaacaggcaaggggtaccctggaaaagctaagttgctctttcattcctctaagaccagcatattccctgggacgtcttctcttaccttcttagttacatgagtgggcttccccgtctgaccctttacctctcaagaataatggagccggcatatttgtctggctctggtccttggaatgggccctgatagaggcactcaccatcattggaaagggctggagagtctaggcctgactgccttctattctggagattagatttgaaggatcctgagattttgctctggagcccctattgtcatctgtccaaaattaccaagtgccagaggtctgaatgaacactggaaatagtcaatactatcccattttttgcaatgtacaaaatcaaggattctggaagctatggatggaggagatgaatgct

SEQ ID NO: 138763 - DNA, 508 bp, Homo sapiens
gatcagtctatgctttacagggatcatattgacccataaaagttggattggagggagcaggactaacattccattagaattccagatgaacaggcaaggggtaccctggaaaagctaagttgctctttcattcctctaagaccagcatattccctgggacgtcttctcttaccttcttagttacatgagtgggcttccccgtctgaccctttacctctcaagaataatggagccggcatatttgtctggctctggtccttggaatgggccctgatagaggcactcaccatcattggaaagggctggagagtctaggcctgactgccttctattctggagattagatytgaaggatcctgagattttgctctggagcccctattgtcatctgtccaaaattaccaagtgccagaggtctgaatgaacactggaaatagtcaatactatcccattttttgcaatgtacaaaatcaaggattctggaagctatggatggaggagatgaatg

SEQ ID NO: 138764 - DNA, 512 bp, Homo sapiens
gagctatcactacaaacaaacaaacttggcatttagcacttctgcatttgtaacttttgtaacagtgtcccttctgttttcctcttcacagggcacacataatttttmttgcagccttagggggcactaaccatcctggtttgtgcagattgactggtgtcccagcatatggggctaaaaccgggaaaattccaggcaaactgggaggaactggttaccctgtgtaacatagaacatcctcaactatgtcattaatataataatgtaattagttccttgtatgtggacattaggagttttatattttttggtaaagtgagataattttaagtttgggaaagaaaattttgttaaatacagatctaaggcatttgactcaaagatagccatgaaacctttttgaaaattgatttgatattgactgttttagggtgttctttatgtcatatagttaaaggcactgtagtcattttaagtgtgtggtcgtatcttcagcctggatctctacccga

SEQ ID NO: 138765 - DNA, 615 bp, Homo sapiens
gtgactaggttcctgcaacaactctggttttaagcaccccactgcctgtcctggtgagttgaactcaagcaggacatttcttcattactgctttaccttttctttttatttcttcttcttttcttttttatttttttgagacagggtctcaatctgccacctaggctggagtgcagtggtgccatcatagctcgacctcctgggctcaggtgatcctcccgcttcagcctcctgagtagctgggactacaggcatgtacctccatgccacctggctcactttttgtagggacagggtttcaccatgttgcccagtctggtcttgaactcctgaactcaagggatctgcccacctcagcctcccaaagtgctgggattataggaaagagcaaaccaccgtgcccrgccttgcttttaccttttcaaccagctcttccagaggctgaatagtatttttcttaactccattcctgccatgaattggctgtgagatcctggccagtcattatacctccttgggcctcagttttctttaagaaatgaggacattgttttagagtttattcttgcagctgctccagtcttctatagttttaacccaggggttgcagactac

SEQ ID NO: 138766 - DNA, 538 bp, Homo sapiens
tccactcaccaaggttgacctggctatggccatcattgacagcccaatgccagcagcgacagagaccaccactgacccctgatacagcactattccctggaatgatcagccagctgcctggtggcaggttgagtacattggatggctttcatcatgaaaggggcagtgttaccttcttcctggaatagaaatttactctgggtatggatttgccctccctgcactcartgattctcacaaaactatcatctgtggattagcttatctgcatttatgatattccacacacagcatttctctaatcaaggtactcacttcacaaatgaagaatagcaatgggcccaggcttaagaaattaacttctcttaccatgttttctaccaccctgaagaaactggtttgatagaatggtagaatggccttttgaaagtttaattacataggaaattcttcaaaaaaccaaagaatgggtgaaaaaagatatttttctctccttatttgttgaaacaggcactttacactaaacacttagtttaat

SEQ ID NO: 138767 - DNA, 538 bp, Homo sapiens
tccactcaccaaggttgacctggctatggccatcattgacagcccaatgccagcagcgacagagaccaccactgacccctgatacagcactattccctggaatgatcagccagctgcctggtggcaggttgagtacattggatggctttcatcatgaaaggggcagtgttaccttcttcctggaatagaaatttactctgggtatggatttgccctccctgcactcaatgattctcacaaaactatcatctgtggattagcttatctgcatttatgatattccacacacagcatttctctaatcaaggtactcacttcacaaatgaagaatagcaatgggcccaggcttaagaaattaacttctcttaccatgttttctaccaccctgaagaaactggtttgatagaatggtagaatggccttttgaaagtttaattacataggaaattcttcaaaaraccaaagaatgggtgaaaaaagatatttttctctccttatttgttgaaacaggcactttacactaaacacttagtttaat

SEQ ID NO: 138768 - DNA, 524 bp, Homo sapiens
cctcatccaccccaaaaaagaaaattcagtttcaactccagccaggtggcaataccaggcagggttttggtaagactctccagaaagctgtatatgttctgaattagcatccaatatatgatgatgttttccttacagccaggattcatcagcccaggaatcaagaggtgaacatgggacaggcacactccctattaccactrttgatttacttactagcaaatttttggcttcctatttatgccaccttatgttctgttggtctagaagtcttagttccaaaggaaggaatgcttccatcaagagacatattaattattccactgaactggaagttaagacagagtgggttaagctacagctatccactttgggctccttatgtctctgaatcaacaggcaaaggagggagttactgtgctgggtgaggtgattgattttgattaccaaggggaaattggactgctactgcacaatggaggtaaggaagatcatatctggaatacaggacatcccatagggca

SEQ ID NO: 138769 - DNA, 532 bp, Homo sapiens
aatcaaaggtttacaggaactgaatgatcactgaatcgaggaaaagataacaagcatgtgagactttattttctcctcgtcccaatcccctacctggaaaaaggaaaaggaactgtcaaccaagaatacygtatctatcagaactatactcagaaataaagcaaaaattaagacattcacagagaaacaagagctgagggagttgttgctagtggacttgctttataagaaatgccaagagaagccattcaggctgaaataatggactctagagaataacttgaagtcatacaaagaaataaagtacactggtaaaggtaactacataggtaaataaataaaagtcagtataattgtattttaactcttctttcattcctatgtgccattatccaataattataaatctatgccaatgtatacacaatgtaaacataatgtaatttataacaataactacataaagaaggaggtctaaagctatatcaaagcaagttttggaatacaagttaagctaagtttgcaaaagaat

SEQ ID NO: 138770 - DNA, 554 bp, Homo sapiens
gaaacggtacagtaaaaatacagttagtataaccttatggggtcattgctatatatgtggtccactgtcatgatgtggtgcttgactgtatttttgaagtaatctttattctatatgtggagatttctactgagtcagatttgatgagcattgaatcacacacaggaattgttgggggatagtggagaataagaaaaatagaaagtactgataaaactagaaragtatagatctgtattacagagaaacaaaccttctactgtgttactgagacaaagctgcagctgtggaaaacctacaaactctcttaagaacatggttcctgctgtattgtctcagaatttttttctagggaaactgcttactaaatgagggacacctaaggtatagtcttttttatttgatccatttgacataattattttaaaccttgtaactgtacattccttggctgagcctagtaggcagtatcttaggcaaagtattagcacaaacaacagttcaaaaatagcaaaattatgtcaagtgaatttcatggaactcataacatttgg

SEQ ID NO: 138771 - DNA, 614 bp, Homo sapiens
aaattcaccatttggatctcctgctgaggaaagtataatttacctatgaccccagatgtttgccttgaagaactattgccactttcatgctgaagtcatgcttcccaccaacttctctcatgtcattactaatgtagaagcattcctacaagtactgccaggacttttgcagtggatgactttgatgtaaaggtcccatataagcctggccaaaactttctttcaattctctttccttcccttcactctcttctaaacaagtttcagacctgcattatgatctgaagtttcctctgccttccctggttccctcytctttatcctttgtaatcgtttatcccaataagtatttttttccattcacatccagtcttagaggtaggcaaacacatacaagttatgccaagagtggtctaagaaacaggtattaagatagttttataagagattctattgctacatgccattttaagcagtgtaggatgtatggatacttcctggctcaaaatgggagctaatttttaaaggattctatactggtagaggagaatgcccctgcaaacaaaatggttcaagcatatggagataaataataaataatctctacaagaaca

SEQ ID NO: 138772 - DNA, 649 bp, Homo sapiens
tctgcctatggggatagaaggctaattgattattgtctgagtgctgtttgagagagactggttatccatctgactttgccagcctggccccatgcatagatatactgacctctttgcatcagaaaaactccartgtcatttttttaatgtgttgacttaactagactacagttcccagttgtttagtcaaatatgaatatacgtactgctgttaagggattttgcagatgtaatttaacagactcttagttgactttaagtaaagattatcctggataatcaggctgatcctgactaaatctgttggaaggctttacctgtgagcctaaagcttccctgaaagagaagaaattctgcccttgtgcaagagctttgaccccactcatgtgctccagcctgccatgttctcccttgctgaatttgcctgccctgtgcatttcagagttgcttggccaaagcctggaattgtgtgagctaagccaatgctaattatacacacacacacacacacgtatacatatatatatgtttctgtagttgaactctgactgataatccgtttgacaaagatgcagttgctggcaattggaaattgagctgatgtacatggaaatgaggtttaaagtgaacataggtggggcacttatag

SEQ ID NO: 138773 - DNA, 399 bp, Homo sapiens
tgtttcccagaatgtatcattkttgcatttgattgtccatttaaaagtattgtgttctttttacagtggtttttagaactgatagtatcataagtgttgtattcagtattccatgttttacacatttcttcattgtcacttaaggatatggattctgatttgggccttttatcaagtaactgatgtgagtctaataattgctctgcagctaaatactgcttttctgaaattggttccaatagatatttcccagcattttcagtgtaactattctctgcttccattttgcagcgagtttctgattctttggttttctccatatgatgatgctgacataacttttttctttttttctttcttctacttttatggaaccagtattcatgggtctctttcaac

SEQ ID NO: 138774 - DNA, 593 bp, Homo sapiens
ccccttctacgggtcaatgcctggggaaaggagaacacaatacacttgcttaactgcttctctccattctctttgtttctctctttattttcttcatattattttttcaacaagtattctgaaagaagtggagatgtacttcactattcttctgtatcatagaaggatgaaacatcatcaaaggggaagtaacaataacctcatgatccttggcattttgactctctyttccaaccttggcctcaaactataattttctggaaagcttcaaagaaagaaggtagcatggacctataccagactctgggaatgctatttttaaaaacttctctggttattctcatattcaactagaattaaagttttcttgctatttaccatatttatctcttaccacagagagcaaaaaatcctagcatcttagtttctataggtgccaggagaattttaaatatattatgagataatcctttcagcagataatttaaggtttggttcttgataggattagtaggagataaaaattttgattctaggaatgtacccttctcaaatctccacatgatggtaatattagattttgcatatttttt

SEQ ID NO: 138775 - DNA, 593 bp, Homo sapiens
ccccttctacgggtcaatgcctggggaaaggagaacacaatacacttgcttaactgcttctctccattctctttgtttctctctttattttcttcatattattttttcaacaagtattctgaaagaagtggagatgtacttcactattcttctgtatcatagaaggatgaaacatcatcaaaggggaagtaacaataacctcatgatccttggcattttgactctcttttccaaccttggcctcaaactataattttctggaaagcttcaaagaaagaaggtagcatggacctataccagactctgggaatgctatttttaaaaacttctctggttattctcatattcaactagaattaaagttttcttgctatttaccatatttatctcttaccacagagagcaaaaaatcctagcatcttagtttctayaggtgccaggagaattttaaatatattatgagataatcctttcagcagataatttaaggtttggttcttgataggattagtaggagataaaaattttgattctaggaatgtacccttctcaaatctccacatgatggtaatattagattttgcatatttttt

SEQ ID NO: 138776 - DNA, 601 bp, Homo sapiens
gcatttaacatttatctgcataaaatcaaattttatgtgcattaataaaatcctgtgcttctgtggacttttgaataaaacatgctataagaacataagtgtgacagaaatctgagcactgtttacattaataaaaagaggctggtatgggcagatgataaaagagaaagagacatggaaatatgccactgccttttgatttttcatagaaaattttattttaatattgattaaagtttaacaaaatgaaatttgaaacaagattaytctgataattactgaacaggggagatattttaattttttttaggaaatggtgaaagacttgaatggcacaaggaagagttaacaatagcatcaattataattctccacttactactgagttagtatttccctgaaattaagacagcttctatatctgtaatagggcagttgcagaaaatttgatatcataatatttgctttattatgatatttcctggcttaatgatttattatgtagtatgtgatgtgagatgtatgcaatcacataaagcattatatactaagttgaataactctgataccactatccagtttaataattagaatatatttc

SEQ ID NO: 138777 - DNA, 601 bp, Homo sapiens
gcatttaacatttatctgcataaaatcaaattttatgtgcattaataaaatcctgtgcttctgtggacttttgaataaaacatgctataagaacataagtgtgacagaaatctgagcactgtttacattaataaaaagaggctggtatgggcagatgataaaagagaaagagacatggaaatatgccactgccttttgatttttcatagaaaattttattttaatattgattaaagtttaacaaaatgaaatttgaaacaagattactctgataattactgaacaggggagatattttaattttttttaggaaatggtgaaagacttgaatggcacaaggaagagttaacaatagcatcaattataattctccacttactactgagtyagtatttccctgaaattaagacagcttctatatctgtaatagggcagttgcagaaaatttgatatcataatatttgctttattatgatatttcctggcttaatgatttattatgtagtatgtgatgtgagatgtatgcaatcacataaagcattatatactaagttgaataactctgataccactatccagtttaataattagaatatatttc

SEQ ID NO: 138778 - DNA, 365 bp, Homo sapiens
cagcagcaatacccaggtagtacttcgtgggcctcgtgtgagactctgtgacttcctgggctcccagygaaactcagcatattcccagttgtggtggatatggggagagacttcctctgcttgagaaaagtagagagaaggaaaggggactttgtcttgcaccttagctacaagctctgccacagggagatagagcaccaaatgatctcttggggtccctgaatccaggatttggcttttgcatggcatttctggatccgccttgggccagaggggagcccactgccctgaaggttgagccccaggccaggcagtattcaccacaaactgaacgaagagcttttgactcttaaggaaatagcagt

SEQ ID NO: 138779 - DNA, 600 bp, Homo sapiens
tccactttcagcattgcacgaatattccagagagaaaatcagcaaagaaactttggacttaacctgtactataaatgaacttaatagatatttacgacacatttcatccaacagctacagaatacacattcttttcttcattatatggatcattctcaagagtagaccatatgtcacatcacaaaacaaatcttaaaacatcaaaaaaaattgaaataatatcaagcatcttctctgacacaatggaataaaaccagaaatcaataaaaggaggaattttggaaactatacaaataaaggaaaatgaaacaatatgctccttaatgatcagtaggtcaataaagagataaagaaggaaattgaaacacttctttaatcaaatgataacggaaacgtaacatacaaaaatctatgggatacaaccaaagcactactaagaggaaagtttacagcaaactaaaaaagaagacaacttcaaataacctaagaattcatcttaaataactagaaaacaaaagcaagccawacccaaaattagtagaagaaaaaaaaataaagattagagtggaaataaatgaatatgaagtaaaggaaacaata

SEQ ID NO: 138780 - DNA, 551 bp, Homo sapiens
aatttaaaccatttttagaggaagatgaaattatcctaggccatcaattgtctcaccgcaatgtttttgtaagcactattggtactctatcaaaaataaaaagcttaagaaagtactgcctaatagaaaaccaagagaagcaacactcagtataaacagaatcacacagatgattcatataatggagtttgcagacatatttcaaaatggttgtgcttaatgtaggagttctctatttattccagatatttcttatgagacatgtgatttacaagtattttctcccattctatggattgactttttactctgtggatagtgacctttgatacccaaaagtttttaattttgrtgaggtctaatttatctatttttccttttactgtttttcatgtcacttttgagaaataattgccaaatccattgtagtaaataaagcttttgccctatgttctgtcctaagagttttatagttttggctcttatgtataggctttttattcatttttagctaatttttgcatatagtattaggtaagggtccaagttca

SEQ ID NO: 138781 - DNA, 473 bp, Homo sapiens
ccaccaactatagcctgacttggatatcaagcacgggttcccacatgaaaattgttattgttggctttagtgcttyaatctaaagaggacacaaattctgctcatgtttgaataacgcttgccaacaaattgatgccacagcaccagggctgcaaaaagtacatttaaagattgaagagaaacataaaggggaaaaactcggtaaatgtatttcctcctactcagaatctaagatagatccctttaaagagaaaaaaggtttttctctttcctctttttccaaaagcagtccaaaagggcattagagaacatctgtaatttacacaaaagggagcaatgccaaagaaactcagattccacagctgttaacccaagggacaactcaaaccaggcaaatctctaaataaggtctgaaaggcagacgctctgctagagggcagctaacttccaaaaccaggagtttggagtgggca

SEQ ID NO: 138782 - DNA, 565 bp, Homo sapiens
tacaaaatacgtttctactgttaaattgtaacaataagactttggaaggtttactagtagaggaagggtgtccccctgtgataaacaatcattaaaaaaggagacagagagggtaatttgcctatccctgttatgtagataaaatgagccaggggggtgctcctcaaacatttatcaagtcactgctgagccttcagcaggccatttaactttggaacagaaagggaagtttcccaatgcataacagagtcttaaatccttcatacgtaatacgtaagatgaactttaaatagaaaagctacctgcacacaggacattgtgtcttgtactcgaactatgcagtcaagaagaaaacacaatactagcggggaaggcaccacgtacagaagctagctagagtttattgagtgcttacacttagtcggggccatggattatttcttttcattctaaccaccacacgataatgtgggtactcttaytgttactcctattttatagataaggaagcaaattttgagaaaccaaagtcagcagccacaaaatggcaaaagactggaaccca

SEQ ID NO: 138783 - DNA, 526 bp, Homo sapiens
taataggatcattttctagggactcctacatgaaatgtgaagttctatttaatgcaagtccttgttgctgtactaycatatttctcacatttgcctgattgtgaaaatcacctggtgtttttattgaaaatgcagatctccacgccactgcacaccagcctgagagacagagcacgactccatctcaaagaaaaaacaaaaaagaaaagaaaatgcagatctctgggccccacccatacctggggactcagaatcaccagggcaaggtctcatccttatgcgtcacatgtgttttgagatctcattatctcctgggaggtaggtctgtgagttatggctggcaaagccaattacctgccaattacctcttgaaagagcaacactgtgcttgctgaactggagaaactggggcagttgagcaacatctgagatcaaggcaaaacaaaatgcttggtaaacttcccctcatgaatgagttcttggctggtactccttattttttccagggtgggatttcttcaaatga

SEQ ID NO: 138784 - DNA, 526 bp, Homo sapiens
taataggatcattttctagggactcctacatgaaatgtgaagttctatttaatgcaagtccttgttgctgtactaccatatttctcacatttgcctgattgtgaaaatcacctggtgtttttattgaaaatgcagatctccacgccactgcacaccagcctgagagacagagcacgactccatctcaaagaaaaaacaaaaaagaaaagaaaatgcagatctctgggccccacccatacctggggactcagaatcaccagggcaaggtctcatycttatgcgtcacatgtgttttgagatctcattatctcctgggaggtaggtctgtgagttatggctggcaaagccaattacctgccaattacctcttgaaagagcaacactgtgcttgctgaactggagaaactggggcagttgagcaacatctgagatcaaggcaaaacaaaatgcttggtaaacttcccctcatgaatgagttcttggctggtactccttattttttccagggtgggatttcttcaaatga

SEQ ID NO: 138785 - DNA, 526 bp, Homo sapiens
taataggatcattttctagggactcctacatgaaatgtgaagttctatttaatgcaagtccttgttgctgtactaccatatttctcacatttgcctgattgtgaaaatcacctggtgtttttattgaaaatgcagatctccacgccactgcacaccagcctgagagacagagcacgactccatctcaaagaaaaaacaaaaaagaaaagaaaatgcagatctctgggccccacccatacctggggactcagaatcaccagggcaaggtctcatccttatgcgtcacatgtgttttgagatctcattatctcctgggaggtaggtctgtgagttatggctggcaaagccaattacctgccaattacctcttgaaagagcaacactgtgcttgctgaactggagaaactggggcagttgagcaacatctgagatcaaggcaaaacaaaatgcttggtaaacttcccctcatgaatgagttcttggctggtactccttatttttyccagggtgggatttcttcaaatga

SEQ ID NO: 138786 - DNA, 594 bp, Homo sapiens
cttatatttggagtcaatacaaattaatattatagtgttaggtagaattgttcaaatggttaatttaacacattgtgtagtgtctttaagctgacttgtaaaatggccacatccaatactgttaattttactgccaaattgtctgtgaatcttctaaatttgacttgacttttgtaaaaatactgtaatgtagacagtacagatgtcattatacctagagtagatataaggatactaaatctttgaaaaggtgaaacaaatttctgaggtgctgtaattatttcataatttagcaagaatttaggctacttaatatgaataaargttctatagttttgcctgactattgaatatatagtacatattaatatataagatatgtatacatgtaggatacaatgtggaatataaaacacattaaagaagagaaacacatttgctcttctacacagttattagatattagaaaaaatgcaaaaatagcaacatctttgctttgtattattcataacatttaagctaaatatcacaggtcaagttttttttaatgtcaatttgagcctcagtaagctcatcttcagcagacccaagcat

SEQ ID NO: 138787 - DNA, 570 bp, Homo sapiens
gcaatattttctatataaatattttgtttttctgaacttaagtaattttacaagtttctatttcactgtargacagagaatgcttgacaaagatggctagtcccaaaagttgccttgggtttgcaccacttcaggtaaatctgcatttgtttatttcccaggcaacctaaggttatccaatctaaaaaattatttacttatatgataaagagttgcttctccagcaaagccttaggcaatctagtaactataatgaatttccttgtcttctaattttaaaaaattaatcaaattcctgcctgtttacttattttcctccctatgtgttgactccatttggtaggagtgtccttttggtacttgtctatttgtttgacttctgatacacttcacgtggcatgacttagtctgcagctctgctttttctgtttttagttttctgcttttcagtttttctaatcttcctgtgcttaacttccaaccctcagtcagataagaataattcattctgccccatagtttccatcatacccactgctgacagccatccacaatcatgttgatgatagt

SEQ ID NO: 138788 - DNA, 570 bp, Homo sapiens
gcaatattttctatataaatattttgtttttctgaacttaagtaattttacaagtttctatttcactgtaggacagagaatgcttgacaaagatggctagtcccaaaagttgccttgggtttgcaccacttcaggtaaatctgcatttgtttatttcccaggcaacctaaggttatccaatctaaaaaattatttacttatatgataaagagttgcttctccagcaaagccttargcaatctagtaactataatgaatttccttgtcttctaattttaaaaaattaatcaaattcctgcctgtttacttattttcctccctatgtgttgactccatttggtaggagtgtccttttggtacttgtctatttgtttgacttctgatacacttcacgtggcatgacttagtctgcagctctgctttttctgtttttagttttctgcttttcagtttttctaatcttcctgtgcttaacttccaaccctcagtcagataagaataattcattctgccccatagtttccatcatacccactgctgacagccatccacaatcatgttgatgatagt

SEQ ID NO: 138789 - DNA, 499 bp, Homo sapiens
tgttatctcaaaagggtaatttgagaaaatcttatgagtaggcttcaactgtctttaataactttaacttaaattacagtatcctcagcaccacaatttagatattctccatttgactctgggtatacccatacctagctaaaaatgggcctctcttcatacctatcaaattcaactccttagcctccatcaaaacatcttactgctatgtcccattcacttagtgactactagtggatgtttgtaggtgatgggtgattaataattaatctatttataggtgattttttatttaaatgtatatattctttgcaaattacttttattataaaaagcaccaaatccagacctttactcaacttccaaaaattacaatttgtgaaaatwttactcagtctttttaggaaatgcaatcaattcttctgaaatcacaaccttgagaaaactatcttctaaatcaccgtatttctacattttagagaattaggcctcagcactc

SEQ ID NO: 138790 - DNA, 523 bp, Homo sapiens
aatcaaaattaaccactaagtcaaagtgctaaattgtctggtctatggccagatgttctttgtatgtgcagagcaagacatagatatgtttctaaattttgttatctttctattttaatggattgtctgtgatgagaagtcattcgaagaaaaattagattcatggcattatcaaaatagttgctatcctttgcttgtctatttaaataataggcattttctcacatgcttttatacttggaagakatttatacattaaacaaggtagaagactgtttacttaagtcatgttattaagtcagtaagtttgtcaaatactgtatttcaggggtccctaacccccggccacagacaagtactggtccatagcctgttgggaaacgggcctcacagtagaaggcaagtagccagcatgcgaacaaagcttcatctgtatttaaaaccactccccatcacaaccattaccacctgagttcggcctcctatcagatcagctgtgtcattagattctcataggcctgca

SEQ ID NO: 138791 - DNA, 375 bp, Homo sapiens
taatgatcacaatcttgatggaaataatgagacatgatccacaagaaaagtcagtggtaaagtcagtagggaaccaccaattcaaagttgagtttcactttctctagtatgtrtgagatgctctaggtcttatttttgcggttactatgatatttcttaattctctgaggctataatcaacaccataggcagaaaattacaaatattgtgattgggtaaatcaaacattttgcctattactctttttcagtgtcttacatattgcttatgagacttttgagaccaagtcctaatatatataatttctagaaatatttaagctaatctacataaattcccactggcctgctaatcagaaagttctgatctagaaca

SEQ ID NO: 138792 - DNA, 593 bp, Homo sapiens
tatcttttcatacattggtataagcatgtgtgtgcaggtgtatttgttggagacacagcctggttttaactactgtttcattatgttcatattgactagttatttttgctttgatttgcagattttcgtgtttttctatcaaagttttaatctctagtaattgctctagtactaaaatacagctcttgattctacttttgtcatatctaattgtttctaatattatttaatgattccctaatttttgttgttattactattttgttaagtacttccaagagtttttcgcttgttttcattttctttctttggtttttagttttctcagaaaacaagctcttggttttattacctccgttttctattttatttatctctgcctctatcttcgtttcatttcttatattattttagattttaattttttagcgatgttaatgtttttctgaattcatgaactcgaygctttagtaagtaatttataaatttacttgtttcccaaaaaattgttttccaaatatagttaagtccacatttttttctctcattatcattgtggctataatttacaaattataagatgctttgattgt

SEQ ID NO: 138793 - DNA, 590 bp, Homo sapiens
ctcagttatgctggcttactctcagggcagatttttacatttccaaataataaacttcatctttggctgtggtggggaaggagcagtcatccagtgagatagaatggttgaagggttccaaagatttattttttaagcatctttgaacctttcctccttcctctttctcccagttccagaggtaccaaattgccaattcttaggccctttggggattttctggtgtcgaaaggatagttctcagttttctccactgctagcttagggttgagctgtcttgagtctgctaagtcagtttccacttgtccatctgctttctaactttcaaaattttgttgctcctattactctccttgcctgttcrcttcatctttgtgcttttacatatgttgattaaaaagtcttttcagggcagtttagtgagtttgagggagggtatgaagatagatggcatgttcattctgcctttttacctagaagcctactctttttctgcctggcaaattccttctcatctttcaaggggcttgccctctgggaggtcatctccagtgtttccaggagagctcttgctccatcctccaccacat

SEQ ID NO: 138794 - DNA, 584 bp, Homo sapiens
gaaattatgtgaatttctttgtaaaacagtgaagtctgcctgattaactatgattctcattcatttccaccattacctactttgatagctaaatttgtttgtaccttgagaagtctttttccacctaaagttctttctcttggagggctagagagaaagtgaggtccagttctctgggagttaaattccgtttacgaaacagcaatctctctaggagtcatacttctcaggactattccattttctcaaagcacgtatgcacaatttgaaaatgtctgaagtcacagtttcgatggttgtttccacaaggagagctatggcctatgaaataaatgtctgagtcagattggaagagaaaatggagaatgatgattgacaaatatactgattttggaataacacttattctctgccttcatgtccaggtcaatattagaataataataatacttttcttcataattttggrggtattaaatgtgcaatgtacgtgaagacttaaaaagtaaggtgacaagaattcctagttgttataatgtagtcatccctcagctcaggtcctgggctacagtttttgcttagac

SEQ ID NO: 138795 - DNA, 608 bp, Homo sapiens
ataatttctgtttaacaagtcaaatttctatttaaccagttaaatttccatttcacaatggagattcaaaggggttaagtgacttgcctaaagtcacagatctggtggcagtaggaccagaggtagattctagaattatgcttctcattaaacctcttctctctcattttttgtatttcttcgcaagggcttcaaacatcatttcgtgagtgtttgaagattgacctagggtcttcatgattactcatcagaggcccctgctgatctttttactgaagtttatataagagagaaattttaaaatcatttctyatttacttttaaatatattagcagtgaccctgtgctatccagatgagtataggtggttttcatcttcatcttgggttggttgctgaacatgcacgtgcccagatctggaggcacactgcagcatggctggttagctttcacaaggcttcagctcaaagttcatgctccagctaagggagccttggttctctcagttggcgctaaaattttgcttcccaaatttgaatgtgcagatgaatcatctggagatcttgtaaattatgactcagcatgtctgggatgaggtctgcaattct

SEQ ID NO: 138796 - DNA, 562 bp, Homo sapiens
ggcacaagctagcgctagtctccgagctgggagggtccttgaaggtcattctgagttggccaagatgtccaggcttgaggtcattcacggccaccagtcsttggatgtgggaagctatgacctgaggccaggggctccaggcagctgaggcttccctgaagggccctccagcagccagagcaacatgtcctcccttgaaagcggatgagagagcacatcacagcttcccccacaggctgccaccataccccaagttgatctgactgagccaaaaacaggagccggagtgggagtggacagatgggatttttatgaaaagaggctcgattttcattagtggtagcagagactagagaggaaaggcaaatgaagccactgagagtcgttggaaatccatgcaagtttctgaatttagatgtcaactcaagtattcatcggtaatgagaattataatttgaattttcctttagcaacaagttttctttttctttttaggcaattagttaagattgggttatttgattttaaatatatgaatgatagcaattttatatacatttat

SEQ ID NO: 138797 - DNA, 562 bp, Homo sapiens
ggcacaagctagcgctagtctccgagctgggagggtccttgaaggtcattctgagttggccaagatgtccaggcttgaggtcattcacggccaccagtccttggatgtgggaagctatgacctgaggccaggggctccaggcagctgaggcttccctgaagggccctccagcagccagagcaacatgtcctcccttgaaagcggatgagagagcacatcacagcttcccccacaggctgccaccataccccaagttgatctgactgagccaaaaacaggagccggagtgggagtggacagatgggatttttatgaaaagaggctcgattttcattaktggtagcagagactagagaggaaaggcaaatgaagccactgagagtcgttggaaatccatgcaagtttctgaatttagatgtcaactcaagtattcatcggtaatgagaattataatttgaattttcctttagcaacaagttttctttttctttttaggcaattagttaagattgggttatttgattttaaatatatgaatgatagcaattttatatacatttat

SEQ ID NO: 138798 - DNA, 562 bp, Homo sapiens
ggcacaagctagcgctagtctccgagctgggagggtccttgaaggtcattctgagttggccaagatgtccaggcttgaggtcattcacggccaccagtccttggatgtgggaagctatgacctgaggccaggggctccaggcagctgaggcttccctgaagggccctccagcagccagagcaacatgtcctcccttgaaagcggatgagagagcacatcacagcttcccccacaggctgccaccataccccaagttgatctgactgagccaaaaacaggagccggagtgggagtggacagatgggatttttatgaaaagaggctcgattttcattagtggtagcagagactagagaggaaaggcaaatgaagccactgagagycgttggaaatccatgcaagtttctgaatttagatgtcaactcaagtattcatcggtaatgagaattataatttgaattttcctttagcaacaagttttctttttctttttaggcaattagttaagattgggttatttgattttaaatatatgaatgatagcaattttatatacatttat

SEQ ID NO: 138799 - DNA, 562 bp, Homo sapiens
ggcacaagctagcgctagtctccgagctgggagggtccttgaaggtcattctgagttggccaagatgtccaggcttgaggtcattcacggccaccagtccttggatgtgggaagctatgacctgaggccaggggctccaggcagctgaggcttccctgaagggccctccagcagccagagcaacatgtcctcccttgaaagcggatgagagagcacatcacagcttcccccacaggctgccaccataccccaagttgatctgactgagccaaaaacaggagccggagtgggagtggacagatgggatttttatgaaaagaggctcgattttcattagtggtagcagagactagagaggaaaggcaaatgaagccactgagagtcgttggaaatccatgcaagtttctgaatttagatgycaactcaagtattcatcggtaatgagaattataatttgaattttcctttagcaacaagttttctttttctttttaggcaattagttaagattgggttatttgattttaaatatatgaatgatagcaattttatatacatttat

SEQ ID NO: 138800 - DNA, 585 bp, Homo sapiens
ccatctactcatcatctttcagaactttcccccatgtctggcctgcctgaagccccactccctgctttccagaacaacgatgggttttgctgastggcacttactaatgggccaggtggggaatccattgcattgtgggggaaaggtgtcaaggttcgctggcagaaaaaaatgtggtaagttagttattgagggaagagtgttcaggtcaagcagacagtgggagtggcctccagtactaggggagaagccagtggactcatgggctgttttgtcttcctgcaatggttagcatcaagagagctgagaaccaagtattttactgagtataatcaaggccttgtcaaagataaaacctgactggctacacccctggttactgggatatgctgtccctccattataattagaaaaaacacacctgcgtggagtgaaggctcaatgtagggatatgctgttcctacattacaattagaaaaaacacatgtggatggagtgaaggataaatgggggcagatcaaactttcttcctgccttggagggaagtgtagaggtctgctcaggaaagagcatcagaaggaagat

SEQ ID NO: 138801 - DNA, 585 bp, Homo sapiens
ccatctactcatcatctttcagaactttcccccatgtctggcctgcctgaagccccactccctgctttccagaacaacgatgggttttgctgagtggcacttactaatgggccaggtggggaatccattgcattgtgggggaaaggtgtcaaggttcgctggcagaaaaaaatgtggtaagttagttattgagggaagagtgttcaggtcaagcagacagtgggagtggcctccagtactaggggagaagccagtggactcatgggctgttttgtcttcctgcaatggttagcatcaagagagctgagaaccaagtattttactgagtataatcaaggccttgtcaaagataaaacctgactggctacacccctggttactgggatatgctgtmcctccattataattagaaaaaacacacctgcgtggagtgaaggctcaatgtagggatatgctgttcctacattacaattagaaaaaacacatgtggatggagtgaaggataaatgggggcagatcaaactttcttcctgccttggagggaagtgtagaggtctgctcaggaaagagcatcagaaggaagat

SEQ ID NO: 138802 - DNA, 344 bp, Homo sapiens
ctacagctccaagcaggatgctgttaaaccatgagaaactgccyccatgatcaaatcacctcctaccaggccccagctccaacactggggattacaattagacatgagatttgggtgaggacatgagatcatttttaactttttggagctacagtgcatggaagactcttctgcagtttaaattgtttttgtactgtgggatatctttattgtgagagaccaagttttcaggtcactctgtggctgacttctatggcttctcaagtgacattgttattgaaagaataaaagtagattcacaaatgaaggggtcacaaatatagtacgcaagtggaaaaaagaaa

SEQ ID NO: 138803 - DNA, 364 bp, Homo sapiens
actcattatcgtgactacagctccaagcaggatgctgttaaaccatgagaaactgcccccatgatcaaatcacctcctaccaggccccagctccaacactggggattacaattagacatgagatttgggtgaggacatgagatcatttttaactttttggagctacagtgcatggaagactcttctgcagtttaaattgtttttgtactgtgggatatctttattgtgagagaccaagttttcaggtcactctgtggctgacttctatggctyctcaagtgacattgttattgaaagaataaaagtagattcacaaatgaaggggtcacaaatatagtacgcaagtggaaaaaagaaatgccgc

SEQ ID NO: 138804 - DNA, 372 bp, Homo sapiens
ctccaagcaggatgctgttaaaccatgagaaactgcccccatgatcaaatcacctcctaccaggccccagctccaacactggggattacaattagacatgagatttgggtgaggacatgagatcatttttaactttttggagctacagtgcatggaagactcttctgcagtttaaattgtttttgtactgtgggatatctttattgtgagagaccaagttttcaggtcactctgtggctgacttctatggcttctcaagtgayattgttattgaaagaataaaagtagattcacaaatgaaggggtcacaaatatagtacgcaagtggaaaaaagaaatgccgctagaaacaatgtcaccccagtagcaatg

SEQ ID NO: 138805 - DNA, 520 bp, Homo sapiens
gatgtttccataaattgcaggctgcttgccatgttacccccagttctcttggggaggtrggaagattaggatgagcactttgcttttggggaagtaaaggcacaggaagctcaggtaatgagtttgatagaatcaatgcagaaaccctatcaataatccctgggagagtaaaaagtcagggggacttctcatgaacgttttcagccataaatacattttaatgcaaacatgtttcaaaatgtaagcaagagtgtgcagccattcgaatgagattttattcaccaagcggaaggctgcattgtcatgcgaggactcagtggcaggagaagataaaaccatcttccataaaaatggggtcatgtaggttaagtctcctggagcatttattaaaaaggaaataattcctacttctcattcattgaaaaactggagcattctcaagaaaaaaatgttaactataaaatataatgatataatttattttatagatagactgtatgtgtgattttatagaattgac

SEQ ID NO: 138806 - DNA, 552 bp, Homo sapiens
aggacagcacatgaagtttcttcactccaatttttgtaagggttaaaaatacctaacccatctttcagtactaaattactttccttgaatagtatcctacttaaaatatactgtgtaaatacttttaaattatttcccattacctcaaatattttgtctgtttataactgatcttaataaaagtggcactattcacctttctgcttgaaagaaatttctcattaatccaccctaccagcaaaaacacattttagaaatgttcccaaaataagaataagaatgtgatgtctattaatatgtgctatctaatttgtaacccataacctatataatcaytaattttttgtgtgttctgagaaatgtggataaagttagagtatcatcaaatcattaactgataccaatgtttataatgccatgatttctaggcaaagtaatggatgtcatttaaaaagccctcgtttgggcatctatctgggtttaagttcttcattgtgcaatttttttaaccgtgagatcttgggaaggtcatcttccttagcctgagttatt

SEQ ID NO: 138807 - DNA, 524 bp, Homo sapiens
gggttatacttatttatgtaagcatgttgtagcttgtcttcacctggacctctatttaatggtaattatattttggaacaatgcatgataggccaactggtctgcttccaatggagttggaggggtgagactttataaactttgttgaagaaaatccctgagaaaagagattgccagtgatacttgttttgttctttatatattcatatgtttttaacttttaatgaatatatattattttagtaattaaaaaaacagaagaactttaattttgtttgagcaataaagctctcttttaaccagatataataatamaattctggttaatattgagattagcaaaaagccagaagatgaatgggacttgggttctaaagtttcacacaagtcagtgtataattgaaagtataatcacaatactgagctaaagataatatactcaaccgagatattgctgattttaaacatagtagctcagcagcagttttgaaagaaagaggagtaggagagactgaaagaaaaaa

SEQ ID NO: 138808 - DNA, 314 bp, Homo sapiens
ttttaataacacaaatgaaaggaggaagtcaatgcagcattattactgcaaatacttcctgctttaggacaatgatcctcaggggaactataaaatgtataatttatctttcacttctctttacacaaaatatatttggtgaccaacttcctcatggctgcctttacttccttgtttctcaatgtgtaaataatgggattaygtaaagggaatattaaagtattgaacacagacaccactttatctagggaaaacgagtcaaatgggcgagcataaatgtagatggatggcccaaacattagcaccacaatggt

SEQ ID NO: 138809 - DNA, 518 bp, Homo sapiens
ttatagttcaattgctctaatgtatctatttttgttaatatgtctgtttcatgtgatttaatgttgaacttgctcccatttatagcaagttttcataattatcattcttagaaagcataatattttattgaactaacatgccatgaattgtgaatttttatgtggggagatgaacattgtcctagacgaagggccttctttccaagaagctaagagctgactagyaaaagggaattttcagaagggatattaggagaaaaatgaacgcctctactacacaagaatgacttctcacagaatttgtactgtggcattctggggtaaggttactgaacactccaacaccttccttccttctaccaccaatttttttgatgaacattacagttatcccattttttgttataaaataatatctcaataaaatctccataaagatttgccttgataatattttgcaaacctgaattaggactcatcatctaatctgaaacagactgtcccagaaaatacagaat

SEQ ID NO: 138810 - DNA, 518 bp, Homo sapiens
ttatagttcaattgctctaatgtatctatttttgttaatatgtctgtttcatgtgatttaatgttgaacttgctcccatttatagcaagttttcataattatcattcttagaaagcataatattttattgaactaacatgccatgaattgtgaatttttatgtggggagatgaacattgtcctagacgaagggccttctttccaagaagctaagagctgactagtaaaagggaattttcagaagggatattaggagaaaaatgaaygcctctactacacaagaatgacttctcacagaatttgtactgtggcattctggggtaaggttactgaacactccaacaccttccttccttctaccaccaatttttttgatgaacattacagttatcccattttttgttataaaataatatctcaataaaatctccataaagatttgccttgataatattttgcaaacctgaattaggactcatcatctaatctgaaacagactgtcccagaaaatacagaat

SEQ ID NO: 138811 - DNA, 262 bp, Homo sapiens
tcgctgaacaaactttgattctaccctcaattacaactaattccctcacaaagcaaaatttatttcacaactaaacattatgtacattcaagattactagaaaacttaggacataaggtgcaagtgcgacaatattaggagaaaagaaagagtgtgtatcagtttaacaggttttcacatgcaaattcaccaccacagggttcrctgtcttggcaacattgaaaataataataattaacgttttaagacacctattttgtgt

SEQ ID NO: 138812 - DNA, 493 bp, Homo sapiens
agcttctgaagggaagaacaaggccatgtccacrtgcaccactcgtgtcattattatacttcttatgtttggacctgctatcttcatctacatgtgccctttcagggccttaccagctgacaagatggtttctctctttcacacagtgatctttccattgatgaatcctatgatttatacccttcgcaaccaggaagtgaaaacttccatgaagaggttattgagtcgacatgtagtctgtcaagtggattttataataagaaactgagaaggaggaattctggctggaattcatatcattcatttaacaagtcctgtttttcactgagtacctcccatttgccaggtaccattgtaggcaatggaggagagttatgcataatgagagaataaacttattatatttaaagaatataaaggaaaccccagagtggttgaagtataatgagtaagtgtgagaaatttaagggttaagttttatgtgactgcaagg

SEQ ID NO: 138813 - DNA, 603 bp, Homo sapiens
caaggttgagtcatctagatgattcattcccaggaccttctcaggcctcctctgaacttttcactgaaatctgaggcatgtacactactcatgctccagctccctttgaagagacattattactcaaggaaaggcagcttctgtgcttccagagccagctttctgtggtcacccagcaatgttatctcaagagaaagacacagaaatccatgtcctttgatagaaaatcctcctttgctcaagggcatgagttactgaataagtccaaggagggtgacacttttcattcttgtttgatgtctgtcattctcagagcaccagcctgatctgcctctttccatcttttcagggacccagataggggacacatgattattgctgatttcataataggcaactggaggctttaccatgaaagatgaataagtaaacagtgcaacttggaggtagggctggccacctaccacttggtggccaacgcagggactgctcacctcctgctgctgtttctggagcctgttgatcagcagcagctgcacagctaccaccgytttacccggtagcttcagaaggaggactattttgatttaccccaaggtgagg

SEQ ID NO: 138814 - DNA, 601 bp, Homo sapiens
aatctacaactcattgccattactgagagagaaggacagagaataaacaacttggaaaataaattcgactatatagtccatgaaaatcttcctaatcttgctagagaggatgatatgcaaatccaagaaatacagagaatcctggctagatattgtacaagatttacaaggcacataatcttcagattcaccatagttaatgcaaaagaaaagggatctagaaagaaaggtcgggttatgtatgaagggaactccatcaggctagcagcagacctttcagcagaaactttatcagccagaaaaaattrggggcctatttttagtattcttaaagaaaataaactccaaccaagaatttcatatcccaccaaacttagcttcataagtgaaggaaaaataaaatccttctcagaaaataaaatgctaaggtaatacatttcaacttagctagccttataacaggtccttaagggagtgctaaacacgtgaacaaaagaacagcatctgctgccacaaaaacacgcttaagcacatagcccatagacactatgaagcactacacagtcaagtctataaaacagccagctaacaacatgatgac

SEQ ID NO: 138815 - DNA, 529 bp, Homo sapiens
  misc_feature (1)...(529): n = A,T,C or G
catgtctgtaaaaaattctaagtacattggaaatgaaagggaacctctccagtccaataaagggcaattatgaaaaacctatagcaaccattataacatatgataaaatcttgaatgcatgcccccttaagattaggaagaatgcaagtatmcatgctctcaccacttctattcaacatgtgctaaccactgaaataaagttttttttaaaggtattaatattaggaagaaaaaaataaaaatctatttattcatagaagaaatgtatgtgtagagcatactatggtgtctttaaagaactagaatttacaaggaaatttatcaagggttgcaggatacaagatcaacatttaaaaactaaatcttggtgagaatgtgaaacaactattaactctgaaaaacgaaacaaagtaaacttaaatgttattattcttcttcctttgatttttttgtataaagtgttaaggatataaaaatactagaagtcatgccataaaagtaaaaaaagaaaaaannnnnnnnnnnnnnn

SEQ ID NO: 138816 - DNA, 529 bp, Homo sapiens
  misc_feature (1)...(529): n = A,T,C or G
catgtctgtaaaaaattctaagtacattggaaatgaaagggaacctctccagtccaataaagggcaattatgaaaaacctatagcaaccattataacatatgataaaatcttgaatgcatgcccccttaagattaggaagaatgcaagtatccatgctctcaccacttctattcaacatgtgctaaccactgaaataaagttttttttaaaggtattaatattaggaagaaaaaaataaaaatctatttattcatagaagaaatrtatgtgtagagcatactatggtgtctttaaagaactagaatttacaaggaaatttatcaagggttgcaggatacaagatcaacatttaaaaactaaatcttggtgagaatgtgaaacaactattaactctgaaaaacgaaacaaagtaaacttaaatgttattattcttcttcctttgatttttttgtataaagtgttaaggatataaaaatactagaagtcatgccataaaagtaaaaaaagaaaaaannnnnnnnnnnnnnn

SEQ ID NO: 138817 - DNA, 529 bp, Homo sapiens
  misc_feature (1)...(529): n = A,T,C or G
catgtctgtaaaaaattctaagtacattggaaatgaaagggaacctctccagtccaataaagggcaattatgaaaaacctatagcaaccattataacatatgataaaatcttgaatgcatgcccccttaagattaggaagaatgcaagtatccatgctctcaccacttctattcaacatgtgctaaccactgaaataaagttttttttaaaggtattaatattaggaagaaaaaaataaaaatctatttattcatagaagaaatgtatgtgtagagcatactatggtgtctttaaagaactagaatttacaaggaaatttatcaagggttgcaggatacaagatcaacatttaaaaactaaatcttggtgagaatgtgaaacaactattaactctgaaaaacgaaacaaagtaaacttaaatgttattattcttcttcctttgatttttttgtataaagtgttaaggatataaaaataytagaagtcatgccataaaagtaaaaaaagaaaaaannnnnnnnnnnnnnn

SEQ ID NO: 138818 - DNA, 534 bp, Homo sapiens
accactctacaccttaggccttgttctagtagaaaaacttgttccaagatcaattatcaatcctaattccaatttttgcccagtcctgctccacagtttgaacttctgaactatgtgcagcttcctcatatttctatgtttctgaacatgctgctacttctgctggaattcttgaccaacttttcaccttcaatactctaattaaaagtgttgttttcagccagctttcagmatggttttacaaggagttatttagtagagactacacttgcacctctgcctaatcatattctccagctgcttacccaatcacttgtgcagcatttctctcagggttttgatgatgcataaagattgcggagagtttcttccctttggcatccaggaatgtagaagtcttttgcataccaaggttagaagctatggcatggttgtaaactcataaaatactatctttgtgagggagagagagagaggagagagagaaagagaaaacaaactcaagaccactttttagactgtacaagaggaaat

SEQ ID NO: 138819 - DNA, 534 bp, Homo sapiens
accactctacaccttaggccttgttctagtagaaaaacttgttccaagatcaattatcaatcctaattccaatttttgcccagtcctgctccacagtttgaacttctgaactatgtgcagcttcctcatatttctatgtttctgaacatgctgctacttctgctggaattcttgaccaacttttcaccttcaatactctaattaaaagtgttgttttcagccagctttcagcatggttttacaaggagttatttagtagagactacacttgcacctctgcctaatcatattctccagctgcttayccaatcacttgtgcagcatttctctcagggttttgatgatgcataaagattgcggagagtttcttccctttggcatccaggaatgtagaagtcttttgcataccaaggttagaagctatggcatggttgtaaactcataaaatactatctttgtgagggagagagagagaggagagagagaaagagaaaacaaactcaagaccactttttagactgtacaagaggaaat

SEQ ID NO: 138820 - DNA, 534 bp, Homo sapiens
accactctacaccttaggccttgttctagtagaaaaacttgttccaagatcaattatcaatcctaattccaatttttgcccagtcctgctccacagtttgaacttctgaactatgtgcagcttcctcatatttctatgtttctgaacatgctgctacttctgctggaattcttgaccaacttttcaccttcaatactctaattaaaagtgttgttttcagccagctttcagcatggttttacaaggagttatttagtagagactacacttgcacctctgcctaatcatattctccagctgcttaccyaatcacttgtgcagcatttctctcagggttttgatgatgcataaagattgcggagagtttcttccctttggcatccaggaatgtagaagtcttttgcataccaaggttagaagctatggcatggttgtaaactcataaaatactatctttgtgagggagagagagagaggagagagagaaagagaaaacaaactcaagaccactttttagactgtacaagaggaaat

SEQ ID NO: 138821 - DNA, 534 bp, Homo sapiens
accactctacaccttaggccttgttctagtagaaaaacttgttccaagatcaattatcaatcctaattccaatttttgcccagtcctgctccacagtttgaacttctgaactatgtgcagcttcctcatatttctatgtttctgaacatgctgctacttctgctggaattcttgaccaacttttcaccttcaatactctaattaaaagtgttgttttcagccagctttcagcatggttttacaaggagttatttagtagagactacacttgcacctctgcctaatcatattctccagctgcttacccaatcacttgtgcagcatttctctcagggttttgatgatgcataaagattgcggagagtttcttccctttggcatccaggaatgtagaagtcttttgcataccaaggttagaagctatggcatggttgtaaactcataaaatactatcyttgtgagggagagagagagaggagagagagaaagagaaaacaaactcaagaccactttttagactgtacaagaggaaat

SEQ ID NO: 138822 - DNA, 462 bp, Homo sapiens
gattactttactggtgaactaaacctttaattctattataattttccatagactcaagagaattgacatctggtgttaaaaaacaaaaaatcatacaaatgwctgatatgtatcattttccttattaaatatggaagaaaggggaggaggatgcagaaatggttggctaaaagctccagagaaaaacttaacagattttatgattttgcggaaggtaagtccttgacctcttcattttcacattcagcaggtatgaaagtttcttctgttacatatggttctatcatttattcatagaattttgacagaaagctgtagaactgaaaaaaagcttgatatacaaactactagctgtattggcaattttacatgaaggcattactgaccctccacagcttctttctattaaccattcagatttatgcaactaccattatcccaggggttactcaaagacattga

SEQ ID NO: 138823 - DNA, 415 bp, Homo sapiens
tctccatctgcatttaatgcttgggattactttactggtgaactaaacctttaattctattataattttccatagactcaagagaattgacatctggtgttaaaaaacaaaaaatcatacaaatgactgatatgtatcattttccttattaaatatggaagaaaggggaggaggatgcagaaatggttggctaaaagctccagagaaaaacttaacagattttatgattttgcrgaaggtaagtccttgacctcttcattttcacattcagcaggtatgaaagtttcttctgttacatatggttctatcatttattcatagaattttgacagaaagctgtagaactgaaaaaaagcttgatatacaaactactagctgtattggcaattttacatgaaggcattactgaccctcc

SEQ ID NO: 138824 - DNA, 458 bp, Homo sapiens
gattactttactggtgaactaaacctttaattctattataattttccatagactcaagagaattgacatctggtgttaaaaaacaaaaaatcatacaaatgactgatatgtatcattttccttattaaatatggaagaaaggggaggaggatgcagaaatggttggctaaaagctccagagaaaaacttaacagattttatgattttgcggaaggtaagtccttgacctcttcattttcacattcagcaggtatgaaagtttcttctgttacatatggttctatcattyattcatagaattttgacagaaagctgtagaactgaaaaaaagcttgatatacaaactactagctgtattggcaattttacatgaaggcattactgaccctccacagcttctttctattaaccattcagatttatgcaactaccattatcccaggggttactcaaagaca

SEQ ID NO: 138825 - DNA, 415 bp, Homo sapiens
tctccatctgcatttaatgcttgggattactttactggtgaactaaacctttaattctattataattttccatagactcaagagaattgacatctggtgttaaaaaacaaaaaatcatacaaatgactgatatgtatcattttccttattaaatatggaagaaaggggaggaggatgcagaaatggttggctaaaagctccagagaaaaacttaacagattttatgattttgcggaaggtaagtccttgacctcttcattttcacattcagcaggtatgaaagtttcttctgttacatatggttctatcatttattcatagaattttgacagaaagytgtagaactgaaaaaaagcttgatatacaaactactagctgtattggcaattttacatgaaggcattactgaccctcc

SEQ ID NO: 138826 - DNA, 415 bp, Homo sapiens
tctccatctgcatttaatgcttgggattactttactggtgaactaaacctttaattctattataattttccatagactcaagagaattgacatctggtgttaaaaaacaaaaaatcatacaaatgactgatatgtatcattttccttattaaatatggaagaaaggggaggaggatgcagaaatggttggctaaaagctccagagaaaaacttaacagattttatgattttgcggaaggtaagtccttgacctcttcattttcacattcagcaggtatgaaagtttcttctgttacatatggttctatcatttattcatagaattttgacagaaagctgtagaactgaaaaaaagcttgatatacaaacyactagctgtattggcaattttacatgaaggcattactgaccctcc

SEQ ID NO: 138827 - DNA, 623 bp, Homo sapiens
ttttcagcccttatgattttgccaactggtgatgactgagcgcaatttgactttgctggtataggaygccgattatttaaagattttaggaatgtgaaacatattctccaattgaaggactttgcacgataaggaagcaattgtttaaattcaattctttttgtggtggcaggtgacagtaatcccagctacttgggaggctgaggcaggagaatcacttgaacccaggaggcggagattgcagtgggccgagatcacgctgttgcactccagcctgggtgacacagtgacacttcctctccaaaaaataatagtaattaaaaaataaaataaagaataagttcagttctttttatgagaaatttatctatctaatctttctatctacctatgatttatttaaggatatgtcagttatgtgtgttctggagaaagaataccacaattataccagtccttttacggaaaattatattgggcaatttgcctctttaatctttagtgctgctctgtaaaaaggagataataaaaattattatattgttgtgaggatggaattaaataacatatgcagagtttagcacacgattctgcacatggtaaaatgctcagtaaatgttagc

SEQ ID NO: 138828 - DNA, 623 bp, Homo sapiens
ttttcagcccttatgattttgccaactggtgatgactgagcgcaatttgactttgctggtataggacgccgattatttaaagattttaggaatgtgaaacatattctccaattgaaggactttgcacgataaggaagcaattgtttaaattcaattctttttgtggtggcaggtgacagtaatcccagctacttgggaggctgaggcaggagaatcacttgaacccaggaggcggagattgcagtgggccgagatcacgctgttgcactccagcctgrgtgacacagtgacacttcctctccaaaaaataatagtaattaaaaaataaaataaagaataagttcagttctttttatgagaaatttatctatctaatctttctatctacctatgatttatttaaggatatgtcagttatgtgtgttctggagaaagaataccacaattataccagtccttttacggaaaattatattgggcaatttgcctctttaatctttagtgctgctctgtaaaaaggagataataaaaattattatattgttgtgaggatggaattaaataacatatgcagagtttagcacacgattctgcacatggtaaaatgctcagtaaatgttagc

SEQ ID NO: 138829 - DNA, 623 bp, Homo sapiens
ttttcagcccttatgattttgccaactggtgatgactgagcgcaatttgactttgctggtataggacgccgattatttaaagattttaggaatgtgaaacatattctccaattgaaggactttgcacgataaggaagcaattgtttaaattcaattctttttgtggtggcaggtgacagtaatcccagctacttgggaggctgaggcaggagaatcacttgaacccaggaggcggagattgcagtgggccgagatcacgctgttgcactccagcctgggtgacacagtgacacttcctctccaaaaaataatagtaattaaaaaataaaataaagaataagttcagttctttttatgagaaatttatctatctaatctttctatctacctatgatttatttaaggatatgtcagttatgtgtgttctggagaaagaataccacaattataccagtcctttyacggaaaattatattgggcaatttgcctctttaatctttagtgctgctctgtaaaaaggagataataaaaattattatattgttgtgaggatggaattaaataacatatgcagagtttagcacacgattctgcacatggtaaaatgctcagtaaatgttagc

SEQ ID NO: 138830 - DNA, 536 bp, Homo sapiens
ctaatattaatctcctttaagaattttttcctgattatttttatccattatttttctctgtatgatgcaaggattcctattacagtttataaaatggcttcagacacttatttttaaactatcatttataacattatctgtatgataaatttcattcctaatttttcctgtgatcacaaggacagagagttatctgggtctttttcaaggcaaagggattgaggatgacagggacctgcaaagggattgwggatgatagggaactcagtaactttaaaatgtttcaactcttcagagcaacatagaaaaaagtatttctctgtataagttgatcacttctcatgtattccttactggcaagcaaaatggaattttcaaactgcaggtccaggcttatgattcaaatttcctcaatgttgatttataagcactaaaaatgacttaatttttaattgaattgagacttttaatctaattgagaaattggaaactgagtcttcctctcttgattaaataaaatgttacttttctatagg

SEQ ID NO: 138831 - DNA, 536 bp, Homo sapiens
ctaatattaatctcctttaagaattttttcctgattatttttatccattatttttctctgtatgatgcaaggattcctattacagtttataaaatggcttcagacacttatttttaaactatcatttataacattatctgtatgataaatttcattcctaatttttcctgtgatcacaaggacagagagttatctgggtctttttcaaggcaaagggattgaggatgacagggacctgcaaagggattgaggaygatagggaactcagtaactttaaaatgtttcaactcttcagagcaacatagaaaaaagtatttctctgtataagttgatcacttctcatgtattccttactggcaagcaaaatggaattttcaaactgcaggtccaggcttatgattcaaatttcctcaatgttgatttataagcactaaaaatgacttaatttttaattgaattgagacttttaatctaattgagaaattggaaactgagtcttcctctcttgattaaataaaatgttacttttctatagg

SEQ ID NO: 138832 - DNA, 584 bp, Homo sapiens
agatcttgtctaatattaatctcctttaagaattttttcctgattatttttatccattatttttctctgtatgatgcaaggattcctattacagtttataaaatggcttcagacacttatttttaaactatcatttataacattatctgtatgataaatttcattcctaatttttcctgtgatcacaaggacagagagttatctgggtctttttcaaggcaaagggattgaggatgacagggacctgcaaagggattgaggatgatagggaactcagtaactttaaaatgtttcaactcttcagagcaacatagaaaaaagtatttctctgtataagttgatcacttctcatgtattccttactggcaagcaaaatggaattttcaaactgcaggtycaggcttatgattcaaatttcctcaatgttgatttataagcactaaaaatgacttaatttttaattgaattgagacttttaatctaattgagaaattggaaactgagtcttcctctcttgattaaataaaatgttacttttctataggtgagtagcatacattatatttgaaggattctgaaatttt

SEQ ID NO: 138833 - DNA, 542 bp, Homo sapiens
taggttcttgtatggaaaagaggaactataagactaattatgaaagaaattcaaatgtgagtcaatagtgtggaaatcaagctaaagacaagaaaaatattcatgaactatgttcaagaaatatgaagaactttctctaccatatttaacatcatataggtgttttcacaagactcttaytgataggctttactatgcttaccacggtttataacgtgtttatttttgcagagaaccagagtcactccacgagtcctgcctggggccccatgaaagtggccaacaatgtcactgagtttatattcctgggactttcccaagattctggaatgcaattgatgttctttgtcttatttctcctcttctacgtcgtgatcatggtgggaaatttgctcattttgcttatggtcttttctgactcccgactacacacacccatgtatttcttcctcagtaacctgtcttttgtggacattgcctattcctcacccacagcacccaagatgattgaagactttgtttctgagaaaaagactatttcc

SEQ ID NO: 138834 - DNA, 542 bp, Homo sapiens
taggttcttgtatggaaaagaggaactataagactaattatgaaagaaattcaaatgtgagtcaatagtgtggaaatcaagctaaagacaagaaaaatattcatgaactatgttcaagaaatatgaagaactttctctaccatatttaacatcatataggtgttttcacaagactcttattgataggctttactatgcttaccayggtttataacgtgtttatttttgcagagaaccagagtcactccacgagtcctgcctggggccccatgaaagtggccaacaatgtcactgagtttatattcctgggactttcccaagattctggaatgcaattgatgttctttgtcttatttctcctcttctacgtcgtgatcatggtgggaaatttgctcattttgcttatggtcttttctgactcccgactacacacacccatgtatttcttcctcagtaacctgtcttttgtggacattgcctattcctcacccacagcacccaagatgattgaagactttgtttctgagaaaaagactatttcc

SEQ ID NO: 138835 - DNA, 542 bp, Homo sapiens
taggttcttgtatggaaaagaggaactataagactaattatgaaagaaattcaaatgtgagtcaatagtgtggaaatcaagctaaagacaagaaaaatattcatgaactatgttcaagaaatatgaagaactttctctaccatatttaacatcatataggtgttttcacaagactcttattgataggctttactatgcttaccacggtttataacgtgtttatttttgcagagaaccagagtcactccacgagtcctgcctggggccccatgaaagtggccaacaatgtcactgagtttatattcctgggactttcccaagattctggaatgcaattgatgttctttgtcttatttctcctcttctacgtcgtgatcatggtgggaaatttgctcattttgcttatggtcttttctgactcccgactacacacacccatgtatttcttcctcagtaacctgtcttttgtggacattgcctattcctcasccacagcacccaagatgattgaagactttgtttctgagaaaaagactatttcc

SEQ ID NO: 138836 - DNA, 618 bp, Homo sapiens
ttttgcttatggtcttttctgactcccgactacacacacccatgtatttcttcctcagtaacctgtcttttgtggacattgcctattcctcacccacagcacccaagatgattgaagactttgtttctgagaaaaagactatttcctactggggctgtataactyagatgtttaccttccacttttttggttgtgctgagatttttgttttgactgtcatggcttttgatcgctatgctgctatctgccaatccctccgttacactgtcatcatgagtgctaatgcttatactgtgctggcatcactgtcctggttgggggccctgggtcattcctttgttcagaccctcctgaccttccagctgcccttctgtaatgctcaggttatagaccattacttttgtgatgtccacccagtcctaaaacttgcctgtgctgatacaactctggtaaatatgttggtggttgccaacagtggtctcatctccctggggtgtttcctcattcttttggcctcctacacaagtcattctgtttagtcttcaaaaacagtctgcagagagctgacacaaagttctctctacctgtggatctcatctgactatagtaactttcttc

SEQ ID NO: 138837 - DNA, 618 bp, Homo sapiens
ttttgcttatggtcttttctgactcccgactacacacacccatgtatttcttcctcagtaacctgtcttttgtggacattgcctattcctcacccacagcacccaagatgattgaagactttgtttctgagaaaaagactatttcctactggggctgtataacttagatgtttaccttccacttttttggttgtgctgagatttttgttttgactgtcatggcttttgatcgctatgctgctatctgccaatccctccgttacactgtcatcatgagtgctaatgcttatactgtgctggcatcactgtcctggttgggggccctgggtcattcctttgttcagaccctcctgaccttccagctgcccttcygtaatgctcaggttatagaccattacttttgtgatgtccacccagtcctaaaacttgcctgtgctgatacaactctggtaaatatgttggtggttgccaacagtggtctcatctccctggggtgtttcctcattcttttggcctcctacacaagtcattctgtttagtcttcaaaaacagtctgcagagagctgacacaaagttctctctacctgtggatctcatctgactatagtaactttcttc

SEQ ID NO: 138838 - DNA, 430 bp, Homo sapiens
cagtattgcattgtaatacagacaccatgttgtgcattaactctccagaactcactcatttttgcataactgaaactttgtaacctttagtccattatctcctcatttctccctttcctttccactcttggcaaccgccatcctaccttcagtttgagtattttagattccacacataagtgagatcatgcagtatttgtccttctgtaagttgctttttaaaggctgaataatactccattgcatatatatactacaattttctcaggctttattgaggtatgatttacaaataaaatttgcatatatttagggtatatgcatacttacgaaatgattaccacaaccaagctaattaatatattcatcatgttacatcattaccatttgygtataatgtgtgtatgtgtgtgtgttaacacttgagatc

SEQ ID NO: 138839 - DNA, 609 bp, Homo sapiens
taatgttaggttgttaatttgagacctttcgtcttttttttgtaaacatttattactatacatttctcccttaaaactacttttgctgcatcccatacctttttgtatgtcatgtccattttcatgtgtctcaagatatttttacatttaccttttgacttctttttttggcccattggtggttgtttaatttccatatgtacatgaattttccagttttcctgttattattgattttagtttcataccactacggtcagaaaatatawttgatatgatttcagtcttctgaaatttgttaagacttgtttgtggcttaacatacaatctgtccaggagaatattctgtgtaagcttgagaagaatgtgtgttctgctgttggatcaaatattccgtgtatgtctattagattcatttagtctgaagtagttcaagacaatgttttcttaataatattctttctggatgatttatccattgttgaaaatcagatattaaagttctctattattgcattgcagtctatctcttgctttagatttgttaatatttgctttatatatttaggtgctctgatgttgggtgtattcatatttataactgttcta

SEQ ID NO: 138840 - DNA, 562 bp, Homo sapiens
caattgtgcatgtgcatggttgtcctttcataaatattcaagattcctcctatagcttattgagcatatgtatttggccacctcactcagtacatattccttttgacactgtctcgaaatgtttgtttctggctcctggccagaggctatatttcccagcctgtcataatagccacccttcaggctacaactctatgagaaataaaggtcctcctttccaaatttatgaaccccatcattcttcagttgatagcactgacaccccatatctaagtatattaaaagagaaataagctgcaaatatatataatatataaatatgtaatatatgkaaatatatgatatatacatatttatatataatttatattatatataaaatattttaatatactttaatatattcaagtaaattaaaagaatatattaatagttgtatataaaataagtattttaatatactttaataatgttaatgtatatactatatattttaatatactttaataacattaaagtgtattattaaatataataatatattaaagtatattaaaagaga

SEQ ID NO: 138841 - DNA, 574 bp, Homo sapiens
ccattttctacttctgttttggtggaatgggtatggagtagagcagaggaagaaggggtgatttgtgtgaygacactcagaatcattgcatcatgtccccataataataaaaaagcatatgatcttgtaatggtatttactgctttaaaatattcatctcctttcaataataaaagggacaattatttacttaaggaacaaataatcgctttcatctggtcaaaaactacatagcattatagcaaaatatgtaaatgagctgagtaatcataatatttcagatgcttttgttagaaatttatttgattgttggaacctcatagttgacttatcagtgaatgtaaatgagttagtatataactagctcatagccctcataactaatacacaatgttgtgttattagttatgaaggctatgaagctgccttctcaaggtaagtacaataagatcattggtttccttgggaatggtaagaaatattttcatttctgggataaccttaattatcctttctttttgaattaaaatcttccctaaaccaaattttaaattttttcaatcttattaaaaat

SEQ ID NO: 138842 - DNA, 515 bp, Homo sapiens
ccaaccctgggaaggtagagcttgctttctgctttcaggttctccggatggctcagcttttgtctttgctctgagttcagttgggactactggctgggctctgatttttggtatgaccactaaatgagctatgcaatcagacaaaattgcttgctcggatggtgattgtctctgactgggccrggccacaggatgtatttcctggctggatggtaccactatttgagttctggagttgtatggggttgcaggcttactcataaagttaagtggggacactgctcaggatggagagaacagctactacacttggtgggaatgcacatttgatgtttgccttcctgactgggtaggaccttggggtgggctttgagatttgagccaaaccactgtttggattccttgttggggtgcatatagccctttcactttgccaaaatgcactgcggcaagtatctccatctctgagtgggctttggggatgattttgaggctgagttgaaccactgttagag

SEQ ID NO: 138843 - DNA, 616 bp, Homo sapiens
cattctatgaagccagcatctctttgataccaaaacctggcaagtgaaagtttatagctacaagtgcctacaccaaaaaagtagaaaaatttcaaataacctagtgatgtatctttaaaaactaaaaaagcaaaagcaaacaaacccaaattattagaagaaaataaataataaagatcagagtagtaataaatgaaatggaaacaaagcatacaatacagaagatcaacaaagtgaaaagtttgttttttgaaaagatgaacaaaatcaacaaaactttacctaagagaaaaagtgaaaagacccaaataaataaaattaagacataaaaccaatactgcagaaattaaaaggatcacttgcaaccatatgccaataaaccggaaaatccagataaaatagataarttcttagatacatacaacctatgaggtttgagccatgaagaaatccaaaacctgaacaaaccaataacaagtaatgagatcaaagccctaataaaaagtctcccagcgaagaaaatcccaggacatggtggcttctctgctgaattttaccaaatattatagaggaattaataccaacactattcaaactattccaaaaaatataggaa

SEQ ID NO: 138844 - DNA, 496 bp, Homo sapiens
agtttccttaggcttcagaagctaagcagatgctgatgccatgcttgtaytgactgcaggaccatgagccaaataaacctcttttctttataaattactcagtctcaggtattcctttatagcaacgtaaaatggactaacacaaatgttattggtgatttatgcaatggccattttaagggtgtggtggggggaagccatatttaaatatattggaggtgagaaagacatgaggaaaagatgaagattccttactgtctctcaagtatggcaggcatgctcctgccttgtggtccctatacatgtcatctcctttgcctggaatgctcttttcccagatatttatatttctttccctaacactcccttcaaatctttgaccaaatatcaccttttcggtgaggcctttcctgactagctattgaaaattccactcaggggaattgagagatattggtcaaaaggtacaatgtttcagctaaacagaatgaataag

SEQ ID NO: 138845 - DNA, 583 bp, Homo sapiens
tctgatggttaaaaagagtatgggacaaccccctccccacctagctccctttcttgccatgtgacacaactgctccctctttgctttcttcaatgagtagaagtttccttaggcttcagaagctaagcagatgctgatgccatgcttgtactgactgcaggaccatgagccaaataaacctcttttctttataaattactcagtctcargtattcctttatagcaacgtaaaatggactaacacaaatgttattggtgatttatgcaatggccattttaagggtgtggtggggggaagccatatttaaatatattggaggtgagaaagacatgaggaaaagatgaagattccttactgtctctcaagtatggcaggcatgctcctgccttgtggtccctatacatgtcatctcctttgcctggaatgctcttttcccagatatttatatttctttccctaacactcccttcaaatctttgaccaaatatcaccttttcggtgaggcctttcctgactagctattgaaaattccactcaggggaattgagagatattggtcaaaaggtacaatgtttcagctaa

SEQ ID NO: 138846 - DNA, 552 bp, Homo sapiens
cctccccacctagctccctttcttgccatgtgacacaactgctccctctttgctttcttcaatgagtagaagtttccttaggcttcagaagctaagcagatgctgatgccatgcttgtactgactgcaggaccatgagccaaataaacctcttttctttataaattactcagtctcaggtattcctttatagcaacgtaaaatggactaacacaaatgttattggtgatttatgcaatggccaytttaagggtgtggtggggggaagccatatttaaatatattggaggtgagaaagacatgaggaaaagatgaagattccttactgtctctcaagtatggcaggcatgctcctgccttgtggtccctatacatgtcatctcctttgcctggaatgctcttttcccagatatttatatttctttccctaacactcccttcaaatctttgaccaaatatcaccttttcggtgaggcctttcctgactagctattgaaaattccactcaggggaattgagagatattggtcaaaaggtacaatgtttcagctaa

SEQ ID NO: 138847 - DNA, 552 bp, Homo sapiens
cctccccacctagctccctttcttgccatgtgacacaactgctccctctttgctttcttcaatgagtagaagtttccttaggcttcagaagctaagcagatgctgatgccatgcttgtactgactgcaggaccatgagccaaataaacctcttttctttataaattactcagtctcaggtattcctttatagcaacgtaaaatggactaacacaaatgttattggtgatttatgcaatggccattttaagggtgtggtggggggaagcyatatttaaatatattggaggtgagaaagacatgaggaaaagatgaagattccttactgtctctcaagtatggcaggcatgctcctgccttgtggtccctatacatgtcatctcctttgcctggaatgctcttttcccagatatttatatttctttccctaacactcccttcaaatctttgaccaaatatcaccttttcggtgaggcctttcctgactagctattgaaaattccactcaggggaattgagagatattggtcaaaaggtacaatgtttcagctaa

SEQ ID NO: 138848 - DNA, 540 bp, Homo sapiens
tttcttgccatgtgacacaactgctccctctttgctttcttcaatgagtagaagtttccttaggcttcagaagctaagcagatgctgatgccatgcttgtactgactgcaggaccatgagccaaataaacctcttttctttataaattactcagtctcaggtattcctttatagcaacgtaaaatggactaacacaaatgttattggtgatttatgcaatggccattttaagggtgtggtggggggaagccatatttaaatatattggaggtgagaaagacatgaggaaaagatgaagattccttactgtctctcaagtatggcaggcatgctcctgccttgtggtccctatacatgtcatctcctttgcctggaatgctcttttcccagatatttatatttctttccctaacactcccttcaaatctttgaccaaatatcaccttttyggtgaggcctttcctgactagctattgaaaattccactcaggggaattgagagatattggtcaaaaggtacaatgtttcagctaaacagaa

SEQ ID NO: 138849 - DNA, 400 bp, Homo sapiens
ctcttccccagggcccagtacgttggccctctgaccctgcacacagcacatgatgctgaggttcagtgctgaacaagagctaccgagagccagagactcacttcttccatggagccccactcatggatggaggctctgycccgggtccagtgccactgggaacactgggtctctggtttctagctctgtcctatggcagaggttccaccccacaataaccgaagtgctgagaaggtgggaagctcctgcccgaccctccactgagagctcagctcctaggctgaggaataaaacagctcaactttgtctacacctgcagaaccttgtttaggagctctgtcccaggagagagggagcaatggaattcagtcataaaatatgatccttaattagtcctaaa

SEQ ID NO: 138850 - DNA, 221 bp, Homo sapiens
tgggaagctcctgcccgaccctccactgagagctcagctcctaggctgaggaataaaacagctcaactttktctacacctgcagaaccttgtttaggagctctgtcccaggagagagggagcaatggaattcagtcataaaatatgatccttaattagtcctaaaaatcctaacttcagtaacaacagaatgtggacaaattgaaagcctgccagtgctct

SEQ ID NO: 138851 - DNA, 221 bp, Homo sapiens
tgggaagctcctgcccgaccctccactgagagctcagctcctaggctgaggaataaaacagctcaactttgtctacacctgcagaaccttgtttaggagctctgtcccaggagagagggrgcaatggaattcagtcataaaatatgatccttaattagtcctaaaaatcctaacttcagtaacaacagaatgtggacaaattgaaagcctgccagtgctct

SEQ ID NO: 138852 - DNA, 549 bp, Homo sapiens
tggcaaacagcaaggagtgcactgggatcctggaccaaatggacagcaagctcagggagcacaataggatccctagtatccaagggacaaaagcaaggcatgtccaatgccttattgtttcattgagagacttcccaggccatgactggtrttaaggtttagggcacaactgtctccagctcgccggggaaaagccaaagccacctccagctttgagccctgggccaggccgatgtgctctaggatggggtactagggtgtcctttccaggtgggcatgtgctcaagcggactgactggctatcagcacttgccgtgtttggttgaagtgatggcctatttggaggtttctgccctttggattataacaaataagtccacaatacaagcagccacatggacaatggtgagaccagcagtcaacagaggggtgcttggctgcagttggcaggtgttgatgttgttttcatttgttttttgagtttgtttttgtggaactttacgttcaaatgggctcatatcagatgagcagccgactgacccacgggac

SEQ ID NO: 138853 - DNA, 549 bp, Homo sapiens
tggcaaacagcaaggagtgcactgggatcctggaccaaatggacagcaagctcagggagcacaataggatccctagtatccaagggacaaaagcaaggcatgtccaatgccttattgtttcattgagagacttcccaggccatgactggtgttaaggtttagggcacaactgtctccagctcgccggggaaaagccaaagccacctccagctttgagccctgggccaggccgatgtgctctaggatggggtactagggtgtcctttccaggtgggcatgtgctcaagcggactgactggctatcagcacttgccgtgtttggttgaagtgatggcctatttggaggtttytgccctttggattataacaaataagtccacaatacaagcagccacatggacaatggtgagaccagcagtcaacagaggggtgcttggctgcagttggcaggtgttgatgttgttttcatttgttttttgagtttgtttttgtggaactttacgttcaaatgggctcatatcagatgagcagccgactgacccacgggac

SEQ ID NO: 138854 - DNA, 577 bp, Homo sapiens
agctattgtaaatgggattactttcttgatttgtttttcagacagttcactgttgacatatggagatgctactgacttttatatgttgattttgtatcctgcaactttactaaatttgtttatcagttctaatagtgttttggtggagtttttaggtctttcctaatacaagatcacatcatctgcaaacaaggataatttgacttcttcctttccaatttggatgccttttatttctttctcttgtctgactgctttagctaggacttctagtactatagtcaatgaagtggtaaaagttggcattcttgttgtgctccagatattaaaggctttcagtttctttccattcagcaaaattctatctgtgggtctgtcatatatggcttttattatgttgcagtttgttccttctatacccagttttttagaatttttatgatgaatggatgttgaactttatcaaatttttcagcatcagttgaaatgatcatatgsttattctccttcatactgtttattgtttatcatattgattgatttgcacatattgaaccattcttgcatccctgggata

SEQ ID NO: 138855 - DNA, 446 bp, Homo sapiens
aaatgaatcaaaaagtttgatacattacactgatagaataaaagacaaaargtgtatgatcatttcaatagatacaaaaacagcatctgataaaatttatcattgcttcatgataaaaattaaacaaatttaggcatagaaggagcatacctcaacataataaaggccatatatcagaaactcacagtgaaaatcatactgacgtaggacaaacagaaaatccttcttctaagaactgaaaaacgacaaggattctcactttcacaacacctatttcatatagtattggaagttttggccagagtatcagcaagagaaagaaataaaacgcattgaaattggaaaagaagaagtcaaattgtttctcatggcagatgacatgatcttatatagagaaaaacataaaaacgttatcaagacaactcttagaagtgataagtgaattc

SEQ ID NO: 138856 - DNA, 446 bp, Homo sapiens
aaatgaatcaaaaagtttgatacattacactgatagaataaaagacaaaaagtgtatgatcatttcaatagatacaaaaacagcatctgataaaatttatcattgcttcatgataaaaattaaacaaatttaggcatagaaggagcatacctcaacataataaaggccatatatcagaaactcacagtgaaaatcatactgacgtaggacaaacagaaaatccttcttctaagaactgaaaaacgacaaggattctcactttcacaacacctatttcatatagtattggaagttttggccagagtatcagcaagagaaagaaataaaacgcattgaaattggaawagaagaagtcaaattgtttctcatggcagatgacatgatcttatatagagaaaaacataaaaacgttatcaagacaactcttagaagtgataagtgaattc

SEQ ID NO: 138857 - DNA, 446 bp, Homo sapiens
aaatgaatcaaaaagtttgatacattacactgatagaataaaagacaaaaagtgtatgatcatttcaatagatacaaaaacagcatctgataaaatttatcattgcttcatgataaaaattaaacaaatttaggcatagaaggagcatacctcaacataataaaggccatatatcagaaactcacagtgaaaatcatactgacgtaggacaaacagaaaatccttcttctaagaactgaaaaacgacaaggattctcactttcacaacacctatttcatatagtattggaagttttggccagagtatcagcaagagaaagaaataaaacgcattgaaattggaaaagaagaagtcaaattgtttctcatggcagatgacatgatcttatatagagaaaaacataaaaacgttatcaagacaacwcttagaagtgataagtgaattc

SEQ ID NO: 138858 - DNA, 609 bp, Homo sapiens
atcaattttgttagctgccttatcctcatgggctttccctcaagcccagaaatgcagctcctctacttcggtctcttctcagtagcctatactctcaccccgatgggaaatgcagccattgtctgtgctgtgtggtaggaccagcaccttcacactcccatgtacaccctcttgggaaatttctctctcctggaaatatgttatgttactgcaactaaactgctggccaacttcctctccacaagcaagtccatctcattcatgagttgttttgcasagttctacttcttctctttggggtatgatgagggcttcttcctttgcatcacggcctttgacaggtatcttgccatctgccgccctctacgttatccatgcatcatgactaaacaagtatgcactggcctcatcatttttgcatggtcatgtgtctttgtaatcttcctaactctggtgattctcatttcacagctatcctactgtggcccaaatattatcaaccattttatttgtgatcccgtcccattgaagatgctgtcctgttctgaagacatcatcatcacccagctcatttactccacattcaattctgtcttcataattggcacc

SEQ ID NO: 138859 - DNA, 288 bp, Homo sapiens
tagttcttttcttgggattagaccctttttctccttgtccacaccaccccmaaattttcctagacattttcttccctcagttcctgtgtaattcccagttcctagctggtaactctcttccttgccctctgtcttatcatctaatttacttcttattatactccttttggtctgatatccttgaatactcttttcccagactgttcacgagaatcccaagctatagctccacttttgacctaacacaggcacagtgctccagctgtaactctgtttgaacaccactcc

SEQ ID NO: 138860 - DNA, 288 bp, Homo sapiens
tagttcttttcttgggattagaccctttttctccttgtccacaccacccccaaattttcctagacattttcttccctcarttcctgtgtaattcccagttcctagctggtaactctcttccttgccctctgtcttatcatctaatttacttcttattatactccttttggtctgatatccttgaatactcttttcccagactgttcacgagaatcccaagctatagctccacttttgacctaacacaggcacagtgctccagctgtaactctgtttgaacaccactcc

SEQ ID NO: 138861 - DNA, 288 bp, Homo sapiens
tagttcttttcttgggattagaccctttttctccttgtccacaccacccccaaattttcctagacattttcttccctcagttcctgtgtaattcccagttcctagctggtaactctcttccttgccctctgtcttatcatctaatttacttcttattatactccttttggtctgatatccttgwatactcttttcccagactgttcacgagaatcccaagctatagctccacttttgacctaacacaggcacagtgctccagctgtaactctgtttgaacaccactcc

SEQ ID NO: 138862 - DNA, 556 bp, Homo sapiens
ctgaggatctgcatttctgacaagttctcaggtgatgctgatgctgctggtccagaaaccacactttgagaaccactgttgttctcagcgaaaacctggatggccctgccaggaagtcttctgtctaagtgggcttagatgagatggccttatggggcggatgtgtgtgtggaggggcctgggtccgtggcaccccagacaccaggaagtgagtgcctcttgcctagaggcagaagcagcmttgaatgtcctgagtcagagctgcgacatctgagtttaatctgtgtggagcaattcaagggagggagccaagggtggggggagcgggagctgggaaggcggctgcatatttcatactgttcccagctttgaaggtccagggaaagcgtgtggcagtcggtgacagcttcatcgtaatgagggatggggagatgcaccctgcttggggtgaggcgctcatcagatgggtggaaggatggtcagggaggggcaggggaggtggtggtaggtgtagatggaaagtggtggtgggggagggtagaatctgtagtgtggg

SEQ ID NO: 138863 - DNA, 556 bp, Homo sapiens
ctgaggatctgcatttctgacaagttctcaggtgatgctgatgctgctggtccagaaaccacactttgagaaccactgttgttctcagcgaaaacctggatggccctgccaggaagtcttctgtctaagtgggcttagatgagatggccttatggggcggatgtgtgtgtggaggggcctgggtccgtggcaccccagacaccaggaagtgagtgcctcttgcctagaggcagaagcagcattgaatgtcctgagtcagagctgcgacatctgagtttaatctgtgtggagcaattcaagggagggagccaagggtggggggagygggagctgggaaggcggctgcatatttcatactgttcccagctttgaaggtccagggaaagcgtgtggcagtcggtgacagcttcatcgtaatgagggatggggagatgcaccctgcttggggtgaggcgctcatcagatgggtggaaggatggtcagggaggggcaggggaggtggtggtaggtgtagatggaaagtggtggtgggggagggtagaatctgtagtgtggg

SEQ ID NO: 138864 - DNA, 215 bp, Homo sapiens
agtagaatggcattagaaggaggacctttgggaagtaatttggttttgatgaggatggagttcccacaatggggttagcatcctaataagaagagyaggagactacagccctcttctctcagccatgtgaagatacaacaagaacacctgcaaaccagtaagagggccttcaccagacactggctctgctggcccagattttaatctttgaattc

SEQ ID NO: 138865 - DNA, 215 bp, Homo sapiens
agtagaatggcattagaaggaggacctttgggaagtaatttggttttgatgaggatggagttcccacaatggggttagcatcctaataagaagagcagragactacagccctcttctctcagccatgtgaagatacaacaagaacacctgcaaaccagtaagagggccttcaccagacactggctctgctggcccagattttaatctttgaattc

SEQ ID NO: 138866 - DNA, 215 bp, Homo sapiens
agtagaatggcattagaaggaggacctttgggaagtaatttggttttgatgaggatggagttcccacaatggggttagcatcctaataagaagagcaggagactacagccctcttctctcagcyatgtgaagatacaacaagaacacctgcaaaccagtaagagggccttcaccagacactggctctgctggcccagattttaatctttgaattc

SEQ ID NO: 138867 - DNA, 531 bp, Homo sapiens
cagaccatgcttcaaaatatttgtctgaccttgacaaatcattacctttctcgggcctcaagtcccagctataaaatagtggggcaagccaggtgcagtggctcccrcctgtaatcccagcattttgagaggccaggcgggaggattacttgagcccaggagttcaagatcagcctgggcaacatggtgagatcccatctctacaaaaaaaaaaaaaaaaaattaattagctgggcatagtgtcaagtgcctattgtcccagctactcaggaggctgaggtaggaggatcacttgagcccaggaggtcaaagcttcagtgagtggtgattgcaccactgcactctagcctaggcaacagagtgagaccctggctcaaaaataaaataaaataaaatttaaaagatgggaccactgtagtcacctctgtgattctagaaagacaatctgatgaaatgagggaatggctggcagtccctaggtcatgctaaaggactgtgtgtttttagaagagtttttatccccatatgttt

SEQ ID NO: 138868 - DNA, 531 bp, Homo sapiens
cagaccatgcttcaaaatatttgtctgaccttgacaaatcattacctttctcgggcctcaagtcccagctataaaatagtggggcaagccaggtgcagtggctcccacctgtaatcccagcattttgagaggccaggcgggaggattacttgagcccaggagttcaagatcagcctgggcaacayggtgagatcccatctctacaaaaaaaaaaaaaaaaaattaattagctgggcatagtgtcaagtgcctattgtcccagctactcaggaggctgaggtaggaggatcacttgagcccaggaggtcaaagcttcagtgagtggtgattgcaccactgcactctagcctaggcaacagagtgagaccctggctcaaaaataaaataaaataaaatttaaaagatgggaccactgtagtcacctctgtgattctagaaagacaatctgatgaaatgagggaatggctggcagtccctaggtcatgctaaaggactgtgtgtttttagaagagtttttatccccatatgttt

SEQ ID NO: 138869 - DNA, 460 bp, Homo sapiens
gacctcttatttaaaaaaaattaaagaattagctgggtgtggtggcacatgcctgtagtcccagctacttgggaggctgaggcaggaggatcacttcagcccaggagtttgaggctgcactgagctatgatcatgtcactgcactcctgcttgagcaacagagcaatcccctgcctctaaatagattagatagatagatagataaagattagctgaatggattaaaaaaaaaaagacccaactatatgctgccagtgagaaactcacctcacctataaagatacacayagactgaaagtgaagggatggcaaaagatatttcatgtgaatggaaaccaaaagtgagcaggcatagctatacttagacaaaataggctttgagttagaacctgtaaaaagagaaaaagaaggatattatataataggggattaattcagcaagaaaaatgtaacagttgta

SEQ ID NO: 138870 - DNA, 591 bp, Homo sapiens
tcggagttgattcttttaatcttgggaggatataatatctctaaatcctttcgaaagagtaattcttgaatgtgagaagtaaccaattcatattttaagtgttatactgcccccttgtgtatcttgtgtttagtgaagagggagctcagacaatacagtaattgtaattctcagaaatacttcagtggaatctgagtttagaactagaaacagcctcaaaaatcattgagaccagcatgctcatttcacagaaaagagaactgagttcctgaaagattacgtaacttgtgcaagaccgtacactgctagtcaayaacagagcaaatactgttatatagaacttaagcctcagaatgttaatttttttttaattaaaacggagatggcagcctgaaagaagaaaaaacagtgaggtgttggaattaggcagatcaggatttgaattttaggtcaccattttacaatctccacaagctttagttaccccattcataaaatgggttgaataatagctatagcaaagtccttgaaaggattccgtatgacaatgttaatggtcatcaagcccttagcataagtatctgcaatata

SEQ ID NO: 138871 - DNA, 593 bp, Homo sapiens
gtcagtgcacattctgtatcaaggcagagatgatatgtagaaatctggcagctatttagaagggaggctgggcagtggtgtgccagtataattaatgagagtcatcgcttaggaaatgaagagggtgggggttgggaaggatgcctttcaccattcaatggcatttaagaaaaattgatgctttcttagcacttttaatgctgggaggacattaagtcaaagaatcacagcaaaagatttttgtaactactgtacagatggatgtccctgtgcttgaagaggcagggctaattcaaccccagacttttcagccaggcggatttcaaccttgtattgagctaccagcaggagttctttatacttggaaragtggtaaatccttactaaaagatcatagcttgcatgaccaagagatcctctagaaaaggtactttactaccatgtaggatgtttgtcttacctgcccaaagaagttttaatgaagatctcattttctccagttcccctttaaccagtgaaagaggagggtattatttgttttgtttttctatttattctttggtaaccatggaagagtttgtgtaacctagaga

SEQ ID NO: 138872 - DNA, 580 bp, Homo sapiens
aagccatagtatcacattaacttaaagcatattcacagttttcatcacaaaatggaaagtaggggaaaagcaagtatagggtgcagcttcgccattgagagcctccagtcacacccagctaccacttcctaagacctatcccacatacaggtacctcaattaaggggaggatctcacaggaactttcatactctgctgttaagttgtacattgagagcataaactgtaacaaacttaatgaagtcatcaggcamgatgcagcaagatttgtaaaaatggttatgcttattttagtcaataatcattgctgctagaaagctaccataaggaaatcatcagaaatataaaaatctatatagaaggaagtatcctttccttaacatttgttataataattaataactctcaactgtctaattgtctaccaaaaagggaatgattgacttaaatatacattcacattttggaatactgtctaaccattaacgatgtctgtaagacattgcaattacctggagaatgtttgacatactaagtgaaaaaaggaggatacaaactaactactaattaaaggaaaaaa

SEQ ID NO: 138873 - DNA, 393 bp, Homo sapiens
accaccaaggtgataactctacragtctgaaaaaaacacagcattattggacttgggacccaagtctcttttaatacctgaaagtctttccaagaagaacaggcacaaacaagtttagaccgtgaagactacaataaacacctaactcttcaatgcccaaacaccaaagaacatctaccagcatcagcatcatccaagaaaacatgaccttaccaaataaactaaataagccaccagggaccaattctggagaaacagagatatatgacctttcacatagagaattcaaaatggctgttttgaggaaaagtcagagaaattcaagataacacagagaaggaactcagaattctatcagatatactttaaaagaaggttgaaataattaaaaag

SEQ ID NO: 138874 - DNA, 573 bp, Homo sapiens
cattgctgtgtcacaatagtggaaaaaccctggatttgagagtctgacaaacctaggtttgaactccataatctaacaatgtgacttgtggcaaattgtgatttctgtgagtttcatctgtaaaatagtcttgttgagagacttaaaagaggtaatgctactccaaagacaaccttgacttagcatcaacctaacatttcctaatgatccctcaagaatattctaacatagagtccaccaattcctcccgacaaggtctaaactcagttatagyaacaacagtctcaaattcctctttgtgttccccttaagatcctatatgcaaagccggagatattgtgcaaaacaagagcaatctgagaaggcaaggtttcttcttcacaactctgagacttctaggaataacacagagaacctgagcatcagttttctcacatgtagcgtaacagaggtagagcagatatctacagggactgacacagcttgccttccacaacaaaatgcacaggggtctctaagtctctggataccacttagttttccaaagtagacaaataaacacaattctagtta

SEQ ID NO: 138875 - DNA, 573 bp, Homo sapiens
cattgctgtgtcacaatagtggaaaaaccctggatttgagagtctgacaaacctaggtttgaactccataatctaacaatgtgacttgtggcaaattgtgatttctgtgagtttcatctgtaaaatagtcttgttgagagacttaaaagaggtaatgctactccaaagacaaccttgacttagcatcaacctaacatttcctaatgatccctcaagaatattctaacatagagtccaccaattcctcccgacaaggtctaaactcagttatagtaacaacmgtctcaaattcctctttgtgttccccttaagatcctatatgcaaagccggagatattgtgcaaaacaagagcaatctgagaaggcaaggtttcttcttcacaactctgagacttctaggaataacacagagaacctgagcatcagttttctcacatgtagcgtaacagaggtagagcagatatctacagggactgacacagcttgccttccacaacaaaatgcacaggggtctctaagtctctggataccacttagttttccaaagtagacaaataaacacaattctagtta

SEQ ID NO: 138876 - DNA, 626 bp, Homo sapiens
attgggcaaatgctatacttcttggctcctgctgatagttgtagaggaagttaagtgtactactgttagaggatcacttttatttttggctgtttcaacaagcgtagatttttttttccagtgggcaagtctaagtctggcagaagcattaaaaattagtaaaggtggaagtgctttgaaacatttgatctcttctcgaggaagctgagcagaggggaggggagtccctcaggaaggcttgctgtgtggaagcatatacaccaacaatgagattttcttcaatgcctcctgtggccttcaattctcccctctagtcaggcaccaaaggggaaaagcccagcactcctctctgacatttgatctaaatctcctgaagtcataggggaggctgggcaagctcagatgggggcaataragcaagaacagcaacatggcagtaaataaatctgatttttgtccatttcagccaaggctgattttgtttgctgggaagtgatttctcttacctttgtttttctgcagattgtcaaatcctggctcagtttgccctgtgaaccacatcaaccaactaatcatccaccaagcagatgaactaacagacatctagcctgtccttaacaagagtg

SEQ ID NO: 138877 - DNA, 456 bp, Homo sapiens
taggcaatgaacattcgcagccagaccagctgaggaagaacacagatgttgacatttatagataaaataggaagcaggctggtggagggaggtgaggtgggcccaaagtgcacagatagacacaacttagcagggaccctcacattacatacaacctacatgcagagctgggcccattactaggcaaacatgagatcaattatwtgtagagagcacaatttgctgcttctgcttaaagaagagtatatatggattctataggcctacttgtttgagtcaaggctcagctttctcactatgaaatcttgagtgaatcatttaattttccaggtcttagtttcctcatctataagacgggtacacacctcatgggattgccataaagactaaatgtgataatacaagaaaagtgcttagcacaaaatttagcaaggagtagtggtcacaacattttag

SEQ ID NO: 138878 - DNA, 600 bp, Homo sapiens
ggcattctgttatagcaacacaaagcggactaaggcaatttgtttatggtaaacttgaaatggtactatcagatagataatttaatctgctgactgcctcagctgtccctgaaataatgtctctggctactttgaaatatcaggaaccctctttttagttaccgattcagtgttgaaccacacaaaataatatagtatttatacatattacattattgatctaaagtagatttgactcaaataaaattttaaccaggtaatgtactaagcttttggggtattgagtaaaacagaaattagtmgactagaaaggaggagagacaattatataagctgttacataaactgtaacaagttttatgataatgaaggtacaggatgctacatgagtgcatagcaggggcacataagaggctctgtggggtttagaaacatatcagacagagacacatatatttaatgataacatgttttccccaaagctatctaaagaatatctccatgcatctttggaaggtttgatggtgatattttagaatcttggattctagaagtacaacaaaaacttcccaataaatagatgtactgcatattttttct

SEQ ID NO: 138879 - DNA, 571 bp, Homo sapiens
gtttgcccaggggggaaataatcacaatattcagcaaagttttctgggatgctatagtgaatgtgtctatgaacaaaacccatgcagcctgaggtgacattaatagaaatatataatttccagagcagatgggtgtttagcacattgatgggctaacatctgaaagaagatttttccttctgggggtcacttttaaagagagacagtgacaaacccacatgtttacaggagagtgagaagtcaggaatgatttattaagtcaatttgatgcaactaccctttgttgagtatttgctttgtgctgggcactgaggatataaaaaagacagttttctcctgtgaaactgatcacggtctactggggaagatggacacatgaacaaatcactaggatgtattcatacaattgctgctttaaaagtgctatgggaacacagagaaaagaaaattaattctgcctgggggtattaagaacctaccaggaaaagataacatctgaatttggcccttgaagagtggtrttcaaatttcctcagtggtaagggaacagggaatggaggagacaaggacc

SEQ ID NO: 138880 - DNA, 582 bp, Homo sapiens
aatgatctggtaagagtagagggctttatacgtggaactggagctggagggtcttggactggggtgaggaaatcagaatatgaggctggacagaggaaagtttactaacatggaggcacctagccatgctcagaatttgatgccctataaagatcccctggagctcatcctaattgtctgttgagatgtgtcttaagacttggtaaagagaatgtttacatcaactgctatggtagaaaatcaccttcccatcaccctttttccagacctaaatcagctcatagatccagatttcagtgattgatgtggaagccaggatcccttgaggaaggacggttccatgccaccaccagtatatatagtacatcttcctttgattctttccccaaatgtacttgcagcagggtaactttgcactgttggaaggggaaaacccagactttycaaaggctgttaggtaaggagttggggctgaatgataccaaatgaactgaaatactatcaaagatctctggttagagtgggagcccatctggacacaatgagaacggaattttgggccaagtttgcttcacagtgtgt

SEQ ID NO: 138881 - DNA, 438 bp, Homo sapiens
agacttcagtaaaaatcttacatgttatggaagacatattaccgagtggagttaatargcatgcttggagtggtgaataaacaagatttaggtcattgccatagagcatggctgaatcaacaataacagcaacaaaaataagagttgattcactgtgatatgtgggccacaatctttatgaattgatggaaaaaatgcacggtcaatcctagaaggccactcattcattgaacatacatttgttgagtatgttctaggtcctagagttgtgccaggtgctggagttgaggaaagtaagaaaaagttaatacagttctcaatgacatagctagaaggagttctgatagtagtagtactcatcaaatcagaatgtcgttgtgcttatggtaactcctctaatttttagcagtcagtccaaaacagatggtgggatagggc

SEQ ID NO: 138882 - DNA, 438 bp, Homo sapiens
agacttcagtaaaaatcttacatgttatggaagacatattaccgagtggagttaataggcatgcttggagtggtgaataaacaagatttargtcattgccatagagcatggctgaatcaacaataacagcaacaaaaataagagttgattcactgtgatatgtgggccacaatctttatgaattgatggaaaaaatgcacggtcaatcctagaaggccactcattcattgaacatacatttgttgagtatgttctaggtcctagagttgtgccaggtgctggagttgaggaaagtaagaaaaagttaatacagttctcaatgacatagctagaaggagttctgatagtagtagtactcatcaaatcagaatgtcgttgtgcttatggtaactcctctaatttttagcagtcagtccaaaacagatggtgggatagggc

SEQ ID NO: 138883 - DNA, 438 bp, Homo sapiens
agacttcagtaaaaatcttacatgttatggaagacatattaccgagtggagttaataggcatgcttggagtggtgaataaacaagatttaggtcattgccatagagcatggctgaatcaacaataacagcaacaaaaataagagttgattcactgtgatatgtgggccacaatctttatgaattgatggaaaaaatgcacggtcaatcctagaaggccactcattcattgaacatacatttgttgagtatgttctargtcctagagttgtgccaggtgctggagttgaggaaagtaagaaaaagttaatacagttctcaatgacatagctagaaggagttctgatagtagtagtactcatcaaatcagaatgtcgttgtgcttatggtaactcctctaatttttagcagtcagtccaaaacagatggtgggatagggc

SEQ ID NO: 138884 - DNA, 438 bp, Homo sapiens
agacttcagtaaaaatcttacatgttatggaagacatattaccgagtggagttaataggcatgcttggagtggtgaataaacaagatttaggtcattgccatagagcatggctgaatcaacaataacagcaacaaaaataagagttgattcactgtgatatgtgggccacaatctttatgaattgatggaaaaaatgcacggtcaatcctagaaggccactcattcattgaacatacatttgttgagtatgttctaggtcctagagttgtgccaggtgctggagttgaggaaagtaagaaaaagttaatacagttctcaatgacatagctagaargagttctgatagtagtagtactcatcaaatcagaatgtcgttgtgcttatggtaactcctctaatttttagcagtcagtccaaaacagatggtgggatagggc

SEQ ID NO: 138885 - DNA, 609 bp, Homo sapiens
aaaaggagataactcttatcactgaagattgtaataacttgagtctgcataataaaactrattaaataatccacatcttccactagtttcctccatatacttactttcctacaatttgttgcacatagaagctgtattagtctgttcttgcactactataaagaaattcctagaccaggcatggtggctcatgcctgcaatcccagcactttgggaagctgacacaggcggatcacttgaggtcaggagttcaagaccagcctggccaacatggtgaaacctcatccactaaaaatacaaaaaattagccggatgtggtggcacatgcctgtagtcccagctacttgggtggctgagggacaagaatcacttgaacccgggaggtggaagttgcagtgagctgagatggaaccactgcaccccagcctgggtgacagagtgagactccatctcagaaaaaaaaagaaaagaaagaaagaatttcctgaaactgggcaatttaaagggagaagaggtttaattggctcctggttttgcaggctatacaggaagcatggctggggaggcctcaggaaacttacaatcatagcaaaaggtggagggcaagca

SEQ ID NO: 138886 - DNA, 549 bp, Homo sapiens
aagatcaagctactggtttctgagacctctcttccgcctgcagatggctaccttctctctctgtccttacacagttcatcctttatttgcatacatctctggtgtctctctgtgtccagatttttttcttyttataagggtattagtcagattggattatggcacaccctaacagcctctaacttaatcaccatgttaaaggtgctatcctatagtcacattctggtgtatggtgattggggctttagcatattaaattttgtaaagacacagttcagcccataatacctccaattctattttcagcataaatagcagtcaaaagagagtttacattgagggcacttggttggggggtgttctagaacttatatcttcattaagatccatggatgcattctaaaggaattgctcaaggttgaactcctgaaaataaaaaataaaatcacaaaacagtgagatgcaaaaaatttatgagcaaggaaagaaatagaacttatatgtaaatgtaaataattgttaagacattgttttaatatacatgaattc

SEQ ID NO: 138887 - DNA, 549 bp, Homo sapiens
aagatcaagctactggtttctgagacctctcttccgcctgcagatggctaccttctctctctgtccttacacagttcatcctttatttgcatacatctctggtgtctctctgtgtccagatttttttcttcttataagggtattagtcagattggattatggcacaccctaacagcctctaacttaatcaccatgttaaaggtgctatcctatagtcacattctggtgtatggtgattggggctttagcatattaaattttgtaaagacacagttcagcccataatacctccaattctattttcagcataaatagcagtcaaaagagagtttacattgagggcacttggttggggggtgttmtagaacttatatcttcattaagatccatggatgcattctaaaggaattgctcaaggttgaactcctgaaaataaaaaataaaatcacaaaacagtgagatgcaaaaaatttatgagcaaggaaagaaatagaacttatatgtaaatgtaaataattgttaagacattgttttaatatacatgaattc

SEQ ID NO: 138888 - DNA, 559 bp, Homo sapiens
aagatagatacatgtacaattatagctggggacttgaatacattttctcaataatgagtaatgctactagacagaaaataaacaaagataaagaaaatatcaccatcaactaatggcatctaattggcatttaaagtacatatcacacagtaacattagaacacacatttttttstagcacacatggaacattcaccaagatagactacatcttgggccattaaaaaaaacccttaacaaatttaaaataaaatcataatgttctcttatgtagtggaatcaaactagcaatctatactagaaaggtaacagaaaaatctctaaacacttggaaattaaagaataggtttctaaatattccatggataaaacaaagtttaagggcagttaatttaacacaactgtactgagtccaataatttgtgtttcttataggcttccagttgttgctgatgcttctagtccatgatagggatagagtagaacaatggagaccacattttaataaccattgaagtagagcattaaaaatacagagttcttctgaagatacctacat

SEQ ID NO: 138889 - DNA, 566 bp, Homo sapiens
tatagaggaggagactgaggctcagctaagtattcagttggatagttttgtgtattacagtaacaggataatattttaaaaatactttcagaaatgttttccttgctcaagaagatgtctcaatgtgtcaatctgaagacagcttcatagatctctgcattccccaataaggtgtgaagaaagcagccagaacatccaaatcctcaagcagttacaaacatttctagagctctgatggtttggtagaaacctgatcttgggatagagaggccacatttagggacaagaggcttttgcaagggccattgattttagcagttggtgccagtaaatgcctaaatcatcagatgagactaaccacatttgagtgggtaccaacaatggatgctcagtgaccatgaagggtgtgaaatatctcagtccaacaagtccaactcagagatatctctgagtccaamaaggactcagaggactgcacgtggaagagtccccttcctacccaatgccagttaatgtgtaagcctctcatttctaccttaagaagaaaaagacaacagaggaaagcc

SEQ ID NO: 138890 - DNA, 562 bp, Homo sapiens
gatgaatcaaaattgtatgctttgcaccctattttggataaaacagaacccatttaaagtatatattacatattttaatayctgattaaagtacagcagacttaatttgagtatctggcagtagagaaggtcaagttattcaaataagttgaataaagatttatattgaatataaaagaaaccattacatcatgctaattaacactgtttacaaaattcttttaaaacttgttggcaaaaacttttcttatgaggtagaaaattcatctacgtttcccactaaaccaagagtaatgtcccctcttcccctttctcccttcctctcttcctctggctttctttctgtgctctccaatgctaatctcttgtttattagaactaaacatctccaatgtctaaattttgtctagatctcatttctacatcatttaagcagcaattctgtaggttgtatggttacattttgccaataaagagctttgtttgattaaaatgatggctccatgtctgattttcttgaattcaatttactagatacagtgggaacttgttatattctctc

SEQ ID NO: 138891 - DNA, 562 bp, Homo sapiens
gatgaatcaaaattgtatgctttgcaccctattttggataaaacagaacccatttaaagtatatattacatattttaatatctgattaaagtacagcagacttaatttgagtatctggcagtagagaaggtcaagttattcaaataasttgaataaagatttatattgaatataaaagaaaccattacatcatgctaattaacactgtttacaaaattcttttaaaacttgttggcaaaaacttttcttatgaggtagaaaattcatctacgtttcccactaaaccaagagtaatgtcccctcttcccctttctcccttcctctcttcctctggctttctttctgtgctctccaatgctaatctcttgtttattagaactaaacatctccaatgtctaaattttgtctagatctcatttctacatcatttaagcagcaattctgtaggttgtatggttacattttgccaataaagagctttgtttgattaaaatgatggctccatgtctgattttcttgaattcaatttactagatacagtgggaacttgttatattctctc

SEQ ID NO: 138892 - DNA, 562 bp, Homo sapiens
gatgaatcaaaattgtatgctttgcaccctattttggataaaacagaacccatttaaagtatatattacatattttaatatctgattaaagtacagcagacttaatttgagtatctggcagtagagaaggtcaagttattcaaataagttgaataaagatttatattgaatataaaagaaaccattacatcatgctaattaacactgtttacaaaattcttttaaaacttgttggcaaaaacttttcttatgaggtagaaaattcatctacgtttcccactaaaccaagagtaatgtcccctcttcccctttctcccttcctctcttcctctggctttctttctgtgctctccaatgctaatctcttgtttattagaactaaacatctccaatgtctwaattttgtctagatctcatttctacatcatttaagcagcaattctgtaggttgtatggttacattttgccaataaagagctttgtttgattaaaatgatggctccatgtctgattttcttgaattcaatttactagatacagtgggaacttgttatattctctc

SEQ ID NO: 138893 - DNA, 542 bp, Homo sapiens
tacagtgggaacttgttatattctctctatatccagccttcttggagtaccattactatatttggggaatttccagtcaaatagaacttttccagtctccccagtttcctttgcatccagttcccacgcatgtgtcctgggcgtcacctgctaaatacttcactcccatggactaaattgtatttccccctcccccaaattcatacattaaagccctaattcccaatgtaactgtatttgaaacaggatctttaggaagtaattaaggtaaagtgaggtcataaaagtggggccctgagtatctgagaagactgtggctatataagaagaggaagatatatatatataagatatatatatatgagacacatttgcaaattgtttcaactttttcactactttaartgcagtctatcatctaatcctcaaaacagctttgaattaaatagtatagtcattcttacgttcatttttaaaatgaagaatgagaagcactgaaagttttcagagattagtaataaatttgaaaagttacagaattc

SEQ ID NO: 138894 - DNA, 583 bp, Homo sapiens
ggtgttaagaatgaataaatctttcacgtttttaaaatacttctttttctgtgacctgtttttaacattcattaattttttttatcaatttactcatctttttactgattagtatgtgattttcatatgctaacagaattagtcttttgtctgcagtaggtatttcaaatattttttaatttattatctttcaagcttttttgtgtgttcaagaattttctgggtatttttttgtttgtttgtttggttgtttgtttgtttgtttgttttttgagatggagtttcgctcttgttacccaggctgctggagtgcaatggcrcctcagctcactgcaacgtctgcctctctggttcaagggattctcctgcctcagcctcccaagtagctgggattataggcacctgccaccatgcccagctaattttttatatttttagtagagacagagtttcaccatttttgtcaggctggtctcgaactcctgacctcaggtgatacacctgcctcggcctcctaaagtgctgagattacaggcatgagccaccatacctggacgaattttctttttttatagcataaaaa

SEQ ID NO: 138895 - DNA, 674 bp, Homo sapiens
acacatcaataggaccagctttcaacaaaagtaccatgttgaagagacagaaagcaatggcaataggcggctgattgtactctccggtttccctccacctggcatctcaaaggaaaatagacccctaagtaaactgcctggattcttagacatttcagtggggaagcatcaagcgagagaggcaatactaactgtcaaattgggcaacaagtgctcgtgataggcttgaaaaataagaactgtgaactatatttttatcctaagcatctggtcctaactggctatataaacaaccagtgaatcatgctacattcaatcaatggggtatttattacaaaggcgaggtaaaaagaatagggtagtttttgaagtacaaattagaagaaaatgagaatatrtcaaatatcaaataagcaaataaatacatttttagggagattccatttgtgaaaagtctaaactcatccccttgcatatatatgtgtgcatgtgtgcacacacataacgcacacacacacaaatgcatttgctcattaatatatgaatatatttattccctaaactgtttcccatgtttacttcctaaggaacatcaataaaatagcaaatgggaattttattatttaatcatctatatttctaggctatttgtgttcctgtataatagcatgtat

SEQ ID NO: 138896 - DNA, 674 bp, Homo sapiens
acacatcaataggaccagctttcaacaaaagtaccatgttgaagagacagaaagcaatggcaataggcggctgattgtactctccggtttccctccacctggcatctcaaaggaaaatagacccctaagtaaactgcctggattcttagacatttcagtggggaagcatcaagcgagagaggcaatactaactgtcaaattgggcaacaagtgctcgtgataggcttgaaaaataagaactgtgaactatatttttatcctaagcatctggtcctaactggctatataaacaaccagtgaatcatgctacattcaatcaatggggtatttattacaaaggcgaggtaaaaagaatagggtagtttttgaagtacaaattagaagaaaatgagaatatgtcaaatatcaaataagcaaataaatacatttttagggagattccatttgtgaaaagtctaaactcatccccttgcatatatatgtgtgcatgtgtgcacacacataacgcacacacacacaaatgcatttgctyattaatatatgaatatatttattccctaaactgtttcccatgtttacttcctaaggaacatcaataaaatagcaaatgggaattttattatttaatcatctatatttctaggctatttgtgttcctgtataatagcatgtat

SEQ ID NO: 138897 - DNA, 441 bp, Homo sapiens
atatacgaaaatatacaatatgtatacatacattatgtcagtgaatacataataaattatgctggaaaaactaaatattgatatggagaacaatgaaactagacccctgtctctcaccatatagaaaagtcaactcacgatcttttagacttaaatgtaagaccccaaactgtgaaactgctagaagaaaacataagggaaatgcttcagaacattggtctaggcaaaggtttattgagaagactgcaaaagcacaggcaacaaaagcaaaaatagacaaatgagattaggtcaaagtaagaagcttcgtacagcaaagaaaatgatcagtaaaaagacaacytagagaatgggagaaaatatttgcaagctattcatctgataagggattaatagctagaatacacaagaaactcaaataactcaacaacaaaaacacca

SEQ ID NO: 138898 - DNA, 621 bp, Homo sapiens
cagtgtgtggtgttccccattctgtgtccatgtgttctcattgttcagctttcacttacaagtgaaaatatgcagtgtttggttttctgttcctgtgttagtttgctgatgataatggcttcaagctccatacatgtccctgcaaaggacatgacctatttcctttttatggctgcatagtattccatagtgtacatgtatcacattttctttatccagtctaccattgatgggtatttgggttgattccacatctttgcttttgtgaatagtgctgcaatgaacatacrcatacatgtatctttatattagaatgatttatattcctttgggtacatacccaggaatgggatgagccaagttcttagcttctttgcgtcgggttagaacatgctcctttagctcagtgaagttcattattatccactttctgaagcctacttctgtcaattcatccgtctcagcctccgcctagttctgtgcctttgctggaggggtgttgtgatcatttggaggagaagaggcactctggctctttgagatttcagaattttttcattgattctttctctgtgggtttatctagcttcaatctttggggctgctgacctttggatgggg

SEQ ID NO: 138899 - DNA, 538 bp, Homo sapiens
gcggctgaagagctgcatacatctctatagctaaaggctgtgcttttcccctgctggagctagggagtctggacagcttggtcccaagacttgtcccccacagtccaacaagctggctgtggcaatctgtggccagagtgcctcctcaggcctgaccctgactcatacttcctcatctggtggggcttccctgcaggaactccaataactccagtcagaggctgagggacagaacccagatatccttgggcctgagccctgaggggaaggggtggccacagtctgcaatccagcagccttagcctttcctcctggtagttctaaggaatcagggcagcccagacaagtgggtttccccctcaggatgcacaagccctccaccaagggacaaagwgcctcattaaacgggtcctgttccccatgccacccaactgggtgagaccctctaacagggattgtcagaaactttacacaggagtgatcctactggcatcagtttggcgcctcttgaggtcacaggtcccagaagaaggaacag

SEQ ID NO: 138900 - DNA, 503 bp, Homo sapiens
tcaataggattggtaccaattctttgaatgtctgatagaattcagctgtgaatccatctgttcctgaactttttttgttcttggtaattttttaattaccatttcaatcttactgcttgttgttggtctgttcagggtttctaattcttcctgatttaagctaggagggttatatctttccaggaatttatccatctcctctaggttttctagtttatgcatgtaaaggttttcatagtagccttgaatgatcttttktatttctgtggtgtcagttgtagtatctcctattttgtttctaattgagcttatttgagtcttctctcttcttggttaatcttgtaatggtgtatcaattttatttatcttttcaaagaaccagctttttgcttcatttatcttttgtaagtttttgtttcaatttcatttagttatgctctgatctttgttatttctttttttctgcttaattttggtttggtttgttcttgtttctctacttc

SEQ ID NO: 138901 - DNA, 580 bp, Homo sapiens
taataatcagctcatctatgtatataattttataactagtagaaaaactttattttgaagatgtatktagaaagcaagtgtccatatgaaattctaatgatgtctaaaaataagtggaatgggtgacagttttttatcaatgcctaattgcataggagtagtctgattaattttattgatctgtagctaagtcagaaagatttaaaaccctttaaggcttttatattagcaaaacaactgcagctttttaggacacctaaaattaggtcacatggaaatgcataattctcaaatatggtttctgactatgcatgattaaagtcttcatttatactgttaacaactgatttctctggctagttttttcaagagttgctcaaccttttgcagagaaaagattacagttctagttggtagaggaataaacaaatttggggatttcctcaggaagttgcttgtatttatgtaatttttaagcccctgggttggaatacctacctataagtgttatgcccatttagcagatatgacctctacttatcttttcaaggtaatttaaataacttctatcaaagcaata

SEQ ID NO: 138902 - DNA, 580 bp, Homo sapiens
taataatcagctcatctatgtatataattttataactagtagaaaaactttattttgaagatgtatgtagaaagcaagtgtccatatgaaattctaatgatgtctaaaaataagtggaatgggtgacagttttttatcaatgcctaattgcataggagtagtctgattaattttattgatctgtagctaagtcagaaagatttaaaaccctttaaggcttttatattagcaaaacaactgcagctttttaggacacctaaaattaggtcacatggaaatgcataattctcaaatatggtttctgactatgcatgattaaagtcttcatttatactgttaacaactgatttctctggcyagttttttcaagagttgctcaaccttttgcagagaaaagattacagttctagttggtagaggaataaacaaatttggggatttcctcaggaagttgcttgtatttatgtaatttttaagcccctgggttggaatacctacctataagtgttatgcccatttagcagatatgacctctacttatcttttcaaggtaatttaaataacttctatcaaagcaata

SEQ ID NO: 138903 - DNA, 606 bp, Homo sapiens
catctatgtatataattttataactagtagaaaaactttattttgaagatgtatgtagaaagcaagtgtccatatgaaattctaatgatgtctaaaaataagtggaatgggtgacagttttttatcaatgcctaattgcataggagtagtctgattaattttattgatctgtagctaagtcagaaagatttaaaaccctttaaggcttttatattagcaaaacaactgcagctttttaggacacctaaaattaggtcacatggaaatgcataattctcaaatatggtttctgactatgcatgattaaagtcttcatttatactgttaacaactgatttctctggctagttttttcaagagttgctcaaccttttgcagagaaaakattacagttctagttggtagaggaataaacaaatttggggatttcctcaggaagttgcttgtatttatgtaatttttaagcccctgggttggaatacctacctataagtgttatgcccatttagcagatatgacctctacttatcttttcaaggtaatttaaataacttctatcaaagcaatattcctatcttgttgaatttcctcacacatgtttttaag

SEQ ID NO: 138904 - DNA, 611 bp, Homo sapiens
tggatgtcttatttaccttagtttctaaaaataattgcctactttaagattccagatgtctgaagaaatcttaactctttggatactcaaattaatgttctcaatttaaatcattatgactctaagtataatcagcctccttaccttactgaacaaaaatattgaatataatttatattttccaaaaaaatgtacagtcracattacagtcactggatactttatggtgtattaacagtcacaatccctcagggacttccaaaatacatgtacaatctcttgataaaatggtcccgactgctgcaattttcatcttacttggtatctgattttaagcattcttctgcttcatcatttactcacacatagactgttagcatcacttactgttgacaatttatcttattacagcagtctctattcctgttaatctgctgttggctaggaaacacaaagtaagagtaattgagttctggatgacgaacttggcattctctagagtaaactgcatagagttgaatgtacaagctttagaacattgttcatagtgtttgtgtgtgtgtgtgtgtgtgtgtgtgtgtgtgtgtgtaaatgtgtatttgcatgtgcct

SEQ ID NO: 138905 - DNA, 595 bp, Homo sapiens
tcagccaccctctgtccttttattgaagagtttagtccatttacattcagtgttattattgataaataagaggttactcttgccattttgttatttgttttcttactgttttgtgatcttctctttcttctttcctttcttcctgtcttttagtaaaggtgattttgtctgaaaggtcatatatctcagtttctccataatttatctcagttgccttatttagttaatttggtgaggtcgttttcctggctggtcttgatgcttgtagacattcatcagtgtccagacattgaagagttaggtatttattgcagtcttcacwatctggactttgcaatctttgtctgttcttcttgggaaggcttctgaggtattagaaaggacttggaccccaagcccaggaatgctgtggttcttgcagacttgtaaaggtactatcttagtggtcttgcataagatctgaaaaaactctctggattatcaggtcgacattcttgttctctttccttacattctcccagacaaacgccatctctctccctttctgtgctgagccacctggaactttgggtcggatgatgcaagcacccctgta

SEQ ID NO: 138906 - DNA, 573 bp, Homo sapiens
acctctgtgccgttggagtgaggagaactgggcctgaccactcaatggaaactcctggggttgatgtcttggtcttgggaggtgtttgccacattcaggaggtggctggccactgggttggcagtggcaggatctgcagagggtcagcagccaagcagagctcccagctcaaaggaggcctctggtcaggaacaaactccagctctggatctctctctttggctcactgattctgtcttggcctttcctcaccatgggagttgtaagcgacagaggccatgggtctggagggaaagggtaatgggtgtgacaaggtcagctttgggcttaggtctgcccaaacctctatgtgggtgactcacctgggattcctggatcttctcttgggcttggggccaaagccatgggtatgattgcattgctggcctcatcttccawggctggctaaccagggcaggggatcacggatcctgtgctcattcatcctttcattcaatacagatacagagaatagcagccctgagcccggcactgtgccaggccctaggggtactgcgctgggctcctcacaag

SEQ ID NO: 138907 - DNA, 573 bp, Homo sapiens
acctctgtgccgttggagtgaggagaactgggcctgaccactcaatggaaactcctggggttgatgtcttggtcttgggaggtgtttgccacattcaggaggtggctggccactgggttggcagtggcaggatctgcagagggtcagcagccaagcagagctcccagctcaaaggaggcctctggtcaggaacaaactccagctctggatctctctctttggctcactgattctgtcttggcctttcctcaccatgggagttgtaagcgacagaggccatgggtctggagggaaagggtaatgggtgtgacaaggtcagctttgggcttaggtctgcccaaacctctatgtgggtgactcacctgggattcctggatcttctcttgggcttggggccaaagccatgggtatgattgcattgctggcctcatcttccaaggctggctaaccagggcaggggatcasggatcctgtgctcattcatcctttcattcaatacagatacagagaatagcagccctgagcccggcactgtgccaggccctaggggtactgcgctgggctcctcacaag

SEQ ID NO: 138908 - DNA, 425 bp, Homo sapiens
cttggtctctgcagtccaccrtgccatctgcctcttcttatgattcacagacttcagactcaaaagatcagaggcattccgacaggagagtaagaaagtggcagtggcagggaagaggctttggggcctcaagaatgagggctcaggctggtgaggcctggtggagcagaggaggggaactcacggtggagagggcaccaaggtcaaagtttgtctcctcatagctttgcagagggaggtcccgcaccatgctcccgggtgactcacatgaagtgcgttaccgggggaggatcaggctggggctggtagggagctgagctatccaggaggagccaggaatggacccacacctcggacattcatctgcctggccctttgctccctggagggcaaggatttctcctttgcctttgggggaaactggg

SEQ ID NO: 138909 - DNA, 426 bp, Homo sapiens
ccttggtctctgcagtccaccgtgccatctgcctcttcttatgattcacagacttcaractcaaaagatcagaggcattccgacaggagagtaagaaagtggcagtggcagggaagaggctttggggcctcaagaatgagggctcaggctggtgaggcctggtggagcagaggaggggaactcacggtggagagggcaccaaggtcaaagtttgtctcctcatagctttgcagagggaggtcccgcaccatgctcccgggtgactcacatgaagtgcgttaccgggggaggatcaggctggggctggtagggagctgagctatccaggaggagccaggaatggacccacacctcggacattcatctgcctggccctttgctccctggagggcaaggatttctcctttgcctttgggggaaactggg

SEQ ID NO: 138910 - DNA, 424 bp, Homo sapiens
ttggtctctgcagtccaccgtgccatctgcctcttcttatgattcacagacttcagactcaaaagatcagaggcattccgacaggagagtaagaaagtggcagtggcagggaagaggctttggggcctcaagaatgagggctcakgctggtgaggcctggtggagcagaggaggggaactcacggtggagagggcaccaaggtcaaagtttgtctcctcatagctttgcagagggaggtcccgcaccatgctcccgggtgactcacatgaagtgcgttaccgggggaggatcaggctggggctggtagggagctgagctatccaggaggagccaggaatggacccacacctcggacattcatctgcctggccctttgctccctggagggcaaggatttctcctttgcctttgggggaaactggg

SEQ ID NO: 138911 - DNA, 582 bp, Homo sapiens
tttctgatggtgatggagttggtgatggaggaaatggtgatagatagttgttagagttgttattagaatgaaaatggtggtgttactagtgacactgatggtgggagaggtggtgataacattgatggcaatgataccaatgctgatgatggtatctgatgagaattatgtggttgctatggtgatgaggatggtaatggtgtttgctatggtggtgatgatgaagatggttgctatggtgatgacgatggaggtggcggttgctatagcgatgatgatgcagatgctggttgctacagtgatgatgggagtgatgactgtagtgatgagaagaatggtgaagtgtgatggtgaggtaatgagaggtcattatggtgatgataatgatggtggtggtggtgatagtgatgattgtgttgctgatgatggtggtgatcctgatgacaacaatggtaatgcaagaatggcattgacattggtggtgttaatagcgatatcgatgggagctctttttatggctggatatagaattgtgaatcacttctcccyggtcatggatcaccttttcttcatgagatgaca

SEQ ID NO: 138912 - DNA, 483 bp, Homo sapiens
aattcctcatatattctggctactagtccctggtctgatgaatagtttgcaaatactttctcccattctacaggttgtctctgcacaagttgaatttggttcaacaccttgttgctgagcttcccaatgaatgtggtgctagcttgacccccacctccactccacaaatctgctcttccccmcagcagcaaatgcacatcatcacccatccagttgctcaaaccccaattctgaatccccctcttccactggtgccatcagcagctcccatcagcatacctcctagagtacaccctgactgtcctgctctccctccctagccagagtcatcatcctccctggctagaactgaatagacttagggggtctccctgcttcctcccactgtctcctgcaacccactgtcctcccactgccaacatgcttttgaaaacaaaaggcagatcatgccatgcctctgtttacaactctttagtggcttct

SEQ ID NO: 138913 - DNA, 326 bp, Homo sapiens
gtgtatgtgccacattttctttatcccatcattagttgatgggtacttaggttggttctacatctttgcaattgtgaattgtgctgctataaacatacatgggcaagtgtctttttcatataatgacttctttctttgggtagataccccacagtgggattgctggatcaaatggtagttctatatttaattcctcaagggaccttcattacagttttccatagaggttgtactaatttacattcccaccaatagtgaataagtgttycctttttcccacatccatgccaacctctattgttttttgactttttattaataatggc

SEQ ID NO: 138914 - DNA, 419 bp, Homo sapiens
atcggtggcagttttaacaaggggtattagttttgacacaggaaaatgaaggaagtccgctgggacgatggtatctgctcctagcatataaggagtgtgtttctgatactggccaataataaaaaggaggttaaaatgtacatgaacattcaatctagggctgtttgtctccaattacctctgcttaaacatagcacttactacctatrtggaagtatcttatttttgttaacttctgtatgtctcccttctttagaatgtaagctccatgaacatgcgggccataactgtcttgatctctgcagtaactacagtgcctaagagaactgagcctggcattacggtaggcatgcaaataagtatttgttgcattaacgcacaaattgctgagtgaagcaggagagtagacagagaatata

SEQ ID NO: 138915 - DNA, 619 bp, Homo sapiens
ttcacttgacataatagttttggtaaactgtctttatctggctgcacccccttttaagtaagcccttaattttaaatggtcccggcgtggtgttcagtatctgcatatgccccagttctcatttaagggcagttcaatgtaattgctaattaccagccctgtatttactgaaatggctgtctgtcatgcttgccatttttatgaaacactttattgcaggtcagctattattgcacgtgctacttcaagtcactggctcaggctggtgtcatgtgtggtttgctgcaaayggcagcctgctttgcagtgtgagctcttcctggaaacagcagtctcttgtagctgatgccacatcagctttaagtcattaggaagatattctaggccccttgttgcttcagccatcagtctataaataacacaacactaattttccatcaagtaacagcttaaaacagaacactgtcaaaccactttatgttccacccttaaatcacatcactgaggaaacactgtaagagaatgcagttgactctttcccccccttctttttgaatgaacctcgtaaacctaatgctttagaaagagctctcagaagactgagaatggtttttaggat

SEQ ID NO: 138916 - DNA, 619 bp, Homo sapiens
ttcacttgacataatagttttggtaaactgtctttatctggctgcacccccttttaagtaagcccttaattttaaatggtcccggcgtggtgttcagtatctgcatatgccccagttctcatttaagggcagttcaatgtaattgctaattaccagccctgtatttactgaaatggctgtctgtcatgcttgccatttttatgaaacactttattgcaggtcagctattattgcacgtgctacttcaagtcactggctcaggctggtgtcatgtgtggtttgctgcaaacggcagcctgctttgcagtgtgagctcttcctggaaacagcagtctcttgtagctgatgccacatcagctttaagtcattaggaagatattctaggccccttgttgcttcagccatcagtctataaatmacacaacactaattttccatcaagtaacagcttaaaacagaacactgtcaaaccactttatgttccacccttaaatcacatcactgaggaaacactgtaagagaatgcagttgactctttcccccccttctttttgaatgaacctcgtaaacctaatgctttagaaagagctctcagaagactgagaatggtttttaggat

SEQ ID NO: 138917 - DNA, 619 bp, Homo sapiens
ttcacttgacataatagttttggtaaactgtctttatctggctgcacccccttttaagtaagcccttaattttaaatggtcccggcgtggtgttcagtatctgcatatgccccagttctcatttaagggcagttcaatgtaattgctaattaccagccctgtatttactgaaatggctgtctgtcatgcttgccatttttatgaaacactttattgcaggtcagctattattgcacgtgctacttcaagtcactggctcaggctggtgtcatgtgtggtttgctgcaaacggcagcctgctttgcagtgtgagctcttcctggaaacagcagtctcttgtagctgatgccacatcagctttaagtcattaggaagatattctaggccccttgttgcttcagccatcagtctataaataacacaacactaattttccatcaagtaacagcttaaaacagaacactgtcaaaccactttatgttccacccttaaatcacatcactgaggaaacactgtaagagaatgcagttgactcttycccccccttctttttgaatgaacctcgtaaacctaatgctttagaaagagctctcagaagactgagaatggtttttaggat

SEQ ID NO: 138918 - DNA, 483 bp, Homo sapiens
tgtttcatctgattgttgcttgattttaattcaatctggcacttcttcatggagcactaaatttcttctcaacggctatacattaaactgtggtgagccctgaaggctctaccaccaacatgagttcagcctttattgctttgtgcagtccatccattcttggttcaagggtggcctagatacagagataccagttcagatacgcataggtaatgacaccaattacagggcaggatgtgtaagataagctcttccattctcttctgtaccatgctgatggactctgatacatcttcccttcaattatcaagtaggagttcattcgctgaaaggtctcatcaaagtccacgtgtcttggtggkggagttctttaatgccacacttttcaacatctttaggcttaaaatcaggagaaccatctgacatacaaaaacatcatctgttttgaaacctaaacgtttctattattggagctcctgaatt

SEQ ID NO: 138919 - DNA, 407 bp, Homo sapiens
ttagtattaattcctgaatttttcagtttttctgatcttttrcctccaggatgactctttgaaacaactctaaattattgactgaaacttttatgtataattctcattttgttcttcacacaatctctgtgaaggaggttctaagaactaagaggcttagagagggtaaggatcttcccagaaattacacagcactcccagatttggaacctttagaaagtttatatacttattggaaaacttagctcatttttaatcagagggaagtcattttacagtgccccatacagggagtcagataactacttcctagttaggttttcctctctatagagagtcaaccagccctgctgtactttcccgtgggatctgaaactgcagaaatctactgagaaaaacagaatgct

SEQ ID NO: 138920 - DNA, 596 bp, Homo sapiens
tgcagtattgagtaaaatcctggaagaatctaaatgtccatcaggaacagaaggtataaataaaatgtgacacrttatgggtacaaaacaacaatgaaaaaagaatgaaatagaattctacataccagcagcatagctagatctcaaaaagataaccgtagccaagaaggcaaattaaagaagaatgtgcacaaattatacaatttatgtaaattttaaagccacacacaaaaaagctactaaatattgttcatagataactatatgtatatatgggtgtaaatttatgggaatggattggaatagtacatgtcaaattcataatagcgattgtctaaagctgggggttttgtgaaagaatgatggtaagaagaatggggtaaaaagtcctacttagaatttgtcttcgcccctatcaaggcagttaagaaaataggaatgttgtcatatgaaagttttctgtctataatagacgctagaaatatagattacctttaaaagtgtgaaaataaaagattcccacatctgagaagatttgatgttctgagctaatgtatttggcctccttttctggactgaaacatttatataaagag

SEQ ID NO: 138921 - DNA, 596 bp, Homo sapiens
tgcagtattgagtaaaatcctggaagaatctaaatgtccatcaggaacagaaggtataaataaaatgtgacacgttatgggtacaaaacaacaatgaaaaaagaatgaaatagaattctacataccagcagcatagctagatctcaaaaagataaccgtagccaagaaggcaaattaaagaagaatgtgcacaaattatacaatttatgtaaattttaaagccacacacaaaaaagctactaaatattgttcatagataactatatgtatatatgggtgtaaatttatgggaatggattggaatagtacatgtcaaattcataatagcgattgtctaaagctgggggttttgtgaaagaatgatggtaagaagaatggggtaaaaagtcctacttagaatttgtcttcgcccctatcaaggcagttaagaaaataggaatgttgtcatatgaaagttttctgtctataatagacgctagaaatayagattacctttaaaagtgtgaaaataaaagattcccacatctgagaagatttgatgttctgagctaatgtatttggcctccttttctggactgaaacatttatataaagag

SEQ ID NO: 138922 - DNA, 455 bp, Homo sapiens
ccttagtaccagattctgagcagggagaggcgatactgcctcgcatcagcgtgatcagcactggccccacgcttcaggcacgaaggaggcagtctgtcctgaacctgatgacacactcagttaaccaaggtcagaacattcaccgaaagacaacagcatccacacgaaaagtgtcactggcccctcaggcaaacttgactgaactggatatatattcaagaaggttatctcaagaaactggcttggaaataagtgaagaaattaacgaagaagacttaaaggtaggtatacatcgcttgggggtatttcaccccacagaatgcaattgagtagaatgcaatatgtagcatgtaacaaaatttactaaaatcataggattaggataaggtgtatcttaaaactcagaaagtatgaagttcattaattakacaagcaacgttaaaatgtaaaataac

SEQ ID NO: 138923 - DNA, 479 bp, Homo sapiens
atatttttgatattaacatttagaatattttttttaccctttttttcttttgcctttggttaataacatccactaaggggaattaagaatgaaatttcttgaagtgtagtttttaccaattgccttgaaatgagaatatttagtggccatctggtccacaaggaaccacacaagtcaagtcaattcccaattaatggtgtctgtgtctctcaggcagatggagagtatcctcagcaaggcagccaagtttactgaggatcatgttagaaatttcataccccggggcataactgatgacttaaagaaaaagttgttgtcaaatgtctcagaaactctctagagaggtcagctaggacctccatgctgatatttctcaacctacataaaaatcaccttcctgaaaggtacytacattgctttacagagggaatataagagatgagtatatgactcataggatcataagatatgtgagggat

SEQ ID NO: 138924 - DNA, 454 bp, Homo sapiens
ctcatgctatgaggccagcattaccttaaaaccataagcagataaagatgtcacaaaaaactacacaccaatattttttcatgaacaccaatgcaaaaattctcaaaaagtattagcaaatcgaactcaacatgtatacaaataattwtataccacaaccaaacgggattaatctcaggtacaaaaggttgattcagcattcaaaaatcaattaatgtacttcacatcaacaagccaaagaagaaaaataaagtgctcaaatcaatagttgcagaaaagcatttcacaaaatttaacacccattcctgattctttttaaaaatcagcaaactaaaaatagaaggagacttcttcaacttaaaaaaaaaaaacttctacaaaaaccctccagctaaaatcatacttaatgataagaaacttgaagttttcccactaagatcaagaacaagaccaa

SEQ ID NO: 138925 - DNA, 517 bp, Homo sapiens
ctacctggaccatgcccctctaggtcacataggaacatcagtgcctcagagacagtgagcacggacaaaagatgatgtagggcaacacactccttaattccwaatatcatggcattctgtaaactccacttagaacccagcaaaatctctgaattcaatgatattatttctttcactcagtggaatgcgtgctcaaatagaaaataaactcaatcacagaaaaagtaaagtcatatttcttgtacacttaatttcatagtcaaagattcatagctgctaccaggggtagatccaggttttgtggagcctgaagcttaagtaattggggaactctttaaaaaaaaaagaatccaaatccaaactatgcatataaaattaagtatagggccttcaaaggagttcctgcacgtgagaggacctgtggcttatgtctcataggcttcatgttaaacaaattctgcctatgatagtaacctcgttcaaagcgttccttgttatagtcaaacaatggacagtt

SEQ ID NO: 138926 - DNA, 592 bp, Homo sapiens
tctagcaaataacccataacacttctaagatatacctgcaaggtcaattgtgttgtaaaaccttgataaccatactttattgttcaaaaaagccttttatgaaggcagaagttaaaaaaaaaaaacaaaaaaaacagagtccacagttatcacctcagctacaatctcatcagttcacaagtaccagcaaaacatgtgataagtcaacaaatgttttatttcaatctgaacattttacrtaagtgaagacattgttagatatcatttggaatgtggaatctacacagttggcatatcagagaaggttgaattcagtttaataaatgtttatagaaagtgcttgttatcataatgataatagctcaggatgtgcatgacaagcttttaagcgattgggtacactatctcatttgatcttctgcacaactattaatggtaggtactattatccctatcttatggataagtaaactaagatttaaaaagtacagaacatggtgtgaacactgcttcaaaatttctaaaataggtaaatcacgatctctaaactggagggttgtccaaccactagggacaatagagtactgatatt

SEQ ID NO: 138927 - DNA, 437 bp, Homo sapiens
tgttttttctttctaatctactattttttcagatgtatctccaaatatgccaggttaagttgttcttagggtgggatatggagaagaggatgaccactgaataaattaacattcctatgtatttcctcaaaaaactatcccactaaataatttttccttataatatatcataagcaaatctaaatctattctgaaaattgtaatgttaacaaaaatggagacyttttgtttatgtggttactaaggcaaaatgtaagtcatgattttcctggaccagctctgaaaaaatgtctgttctggttaagaatggataaaatggatgatttgtttattcaataaagttattgaatgctcgccatgtgcaagatacagtgttgaatgtggtgcaaaatataaagatgtggaagaaaaagccactgaaaataatatgaggaaat

SEQ ID NO: 138928 - DNA, 485 bp, Homo sapiens
cgttgtaatgaaaatcattggaaaactttagattctagtaattttgaagtcttcttagtttggacaggactgagctaaagtttgtactttttttaatttattgaaaaatggtttctaatgatagtattaacaagattatattgggggcaggacgcagtggctcacacttgtaatcctagcactttgggaggccgaggcggttggatcacctgaggtcaggagttcaagmccagcctggccaacatgtagaaatcccctctccactaaaatacaaaaattagctgggcatggtggcaggcactgtaatcccagctacttgggaggctgaggcaggagaattgtttgaacctgggagtcggaggttgcagtgagcccagatcgcaccactgcactccagcctgggcaatagagcaagattctgtctcaaaaaggaagaaagaaagattatattggggatatatatgtgtgtgtgtgtgtgtgtgtgt

SEQ ID NO: 138929 - DNA, 615 bp, Homo sapiens
ctttgggagccagggcaagcttaattattgcaggcaatatgttccaagcagtgagtggaagtattttagataacagagacaattaaggtatagcctctcatttcaagagcttacaatctagtgagggtatagaggacaacttaatgaaagagctggcttctgagctgcacttttgcttcatgcataggagatctgttgtatcttcctctgcccagtcttaccgatcctagccctcacttgtctttatggccagcttgagacactatgatgcctcaccagaggaaattctctaatcctaagtaataaaaaaagttaaataataaagttrttgttatttcaaaagtagatactgatgtgagattaaacaagtagatgatagaataaatacagttgtgccttggcatctgtggggaattggttccaggactctctgtggataccaaaatccatgaatgctcaagacccttatataaatggggtagtatttgcatgtaacatatgcacatcttcctgtatactttaaatcatctctagattacttacaatacctaatacaatgtaaatcctacataaatagttgttatactatattgtttagggaataatgacaagcaa

SEQ ID NO: 138930 - DNA, 553 bp, Homo sapiens
agaattcttattttcaattttatatctgagtcagaagtattggggggagagaggtaaagagagggagagtaaatgcatgtagtcagcagttgcagcatttattgtttctgctgcaataaaatccatattttatgtgktgttaaattaatgcagcatattgcaagtataaatgcatgtccccaacaagtaactattgatagcactgtaactatgggcaaaagcagtagtctgaaattgtttttatgccactaaaataaaaacctactgtctccttattatgaaaaaaggggagtctacaggtacaaagacaaatattgttttaaaaatgacctatcatcttttgctttgaaaaaacagatgtttcctataattgtggtccttcattccttcattccagtgaaagcttctattatccaaaactgcacatccattacttctcagctctttggagatacattattttttctcctcttttttttttcttgaaggatctgtattaaaaataatctgtccttctgatgttgacaactgttatacttcaatgcatatgtta

SEQ ID NO: 138931 - DNA, 560 bp, Homo sapiens
tttaaaaatgacctatcatcttttgctttgaaaaaacagatgtttcctataattgtggtccttcattccttcattccagtgaaagcttctattatccaaaactgcacatccattacttctcagctctttggagatacattattttttctcctcttttttttttcttgaaggatctgtattaaaaataatctgtccttctgatgttgacaactgttatacttcaatgcatatgttagtagactttctccctccataccatccccctctctatcttcctttaaaacgtagctacaagagcttctctgtggtgaataacacttggcaagagtgtgctcattttttaggtctggtatggtgaggatttttaattagtagaactttcatgaaaacattatgtcattgacagagccgtatgttcatttttagttaaaagtgatgaagaagaaagaaagaggttatgtcctagaaacacaggtaaatgctaagtcgcatagataatctgcaccccgctcccccsagtgtactaaatgtggcacatatgtattcaatgtgcaacgcat

SEQ ID NO: 138932 - DNA, 567 bp, Homo sapiens
ttatggtttcagaagagttgactggcaaaaacgaaaacaaaaacaaaaacattaagaaggctacaaagcccaccaggaaaaaggatttaaagagggaaatctgttttgtttgtttgtttgtttgtttgtttttttgcatttaaaattatttttttattatactttaagttttagggtacatgtgmacaatgtgcaggttagttacatatgtatacatgtgccatgctgatgcgctgcacccactaactcttcatctagcattaggtatatctcccaatgctatccctcccccgccccccccgccccacaacagtcctcacagtgtgatgttccccttcctgtgtccatgtgttcccattgttcagttcccacctatgagtgaaaatatgcggtgtttggttttttgttcttgtgatatcttgagaaggctttcagcaccttcccacctggcatgtggtccccaggcagccaaaacaacaccccctaaaagcttgttagaaagataaaatctcagtcccctgccctacctactaaatcagaatctccatactcgcaagggccctagat

SEQ ID NO: 138933 - DNA, 561 bp, Homo sapiens
aaagtgtaatcatcatgatagagattttcaaagctctagtaataattacctgccattcacttcccttcatgacactacatagccatttatgtgtgacaatatatcgtacggaatttaaatacatccacatattacctattattcatcttgctgtatcaacactactgaaacaataaacattctcgctttctgatctgtgtttggctgcatattaatttctttattttgtcaatggctttatttgtcaattattcgtgtrtaattttcttgttaaagaaaatttagaaaaaaatgaacgttaattaaaagattatatagattcttgagacaaacatggaggcacttaagaatatatatgtggggctttaggatcaaatgggggggttagaggatcataatctcctgttttagtatagtctaccttattctccatgctagttttatgaaaaaaaagtagcccctgattatggtgacaaccgcctgtgccaagccaggactagaagtttccagtgatgagcccaagttcagagagctctctatcctgtgcctccaattcaaact

SEQ ID NO: 138934 - DNA, 561 bp, Homo sapiens
aaagtgtaatcatcatgatagagattttcaaagctctagtaataattacctgccattcacttcccttcatgacactacatagccatttatgtgtgacaatatatcgtacggaatttaaatacatccacatattacctattattcatcttgctgtatcaacactactgaaacaataaacattctcgctttctgatctgtgtttggctgcatattaatttctttattttgtcaatggctttatttgtcaattattcgtgtataattttcttgttaaagaaaatttagaaaaaaatgaamgttaattaaaagattatatagattcttgagacaaacatggaggcacttaagaatatatatgtggggctttaggatcaaatgggggggttagaggatcataatctcctgttttagtatagtctaccttattctccatgctagttttatgaaaaaaaagtagcccctgattatggtgacaaccgcctgtgccaagccaggactagaagtttccagtgatgagcccaagttcagagagctctctatcctgtgcctccaattcaaact

SEQ ID NO: 138935 - DNA, 510 bp, Homo sapiens
aatgataaattgtctactgagatagcacgacagaaatcttgtctccttatggtatgtagaactttaaaagtaggctgccatagacatggatatctattcagtaccccaaaccagttgttgctgaaagagtaacagcgatattttagatttaaatagccattcagagtcacaaaatacttttaagtacctactcaagcatttttattaccttaactttcagattataatattagggtacaaactctgatacactcacactaaaacaaaaaacgggatgctataaatattagcaggataagcactgatatttttagagtgcycacgttgctttgtgtaggtaatagaattatctaagagctattgtttcattatgcaaaacaagtattcctactctgaaatatcactgcagttgaggctaataccattttaacaaatacccttccactagcttgaatgcttgagtactttccttctctttcctaacacagttacttttctccatggcgacgt

SEQ ID NO: 138936 - DNA, 564 bp, Homo sapiens
acagtactgctacaagtttgaaaaaaccacagtgttattgggcttgaatcccaagtccctccaaatacctggaaagtcctcaaaagaaagacaaacacaaataagcccagactgtgaaaactacaataaatatctatttttcaatgcccaggcaataaaaaacatctacaagcatcaacaccttccaggaaaacatgacctaatcaaatgaactaaataaggcaccaggratgaatcccggagaaacagtcatacatgacctttcaggcagaaaattaaatgtgctgttttagagatactcaaaaaaatttcagatagcagagaggagagaatcagaattatatgagataaatttaacaaagagattgaaattattaaaaagaatgaagcagaaattctagggttgaaaaatgcaaatgacatgctgaaaaattcatcacagtctcctaatagcagaattcatcaggaagaagaaagaattagtgagcttgaagacaggctatttgaaaatacagtcagaggagacaaaataataaaaaataaaaaacaatgaagcacacctac

SEQ ID NO: 138937 - DNA, 558 bp, Homo sapiens
acacaacagattttcagtgtgaataagacagtcttctattggaagaagataccrtctaacacttccacagttagacagaaaaagtaaatgcctggcttcagagctttaaacaaggctgatgctcttgttaggagacaacacaattggaactgactgtattagtcagtccttgcattgctataaagacataactgagactgggcagtttataaagaaaagaggtttaattggctcaaagttcttcaggctgtacaggaagcatagtggcttctggggaggcctcaggaaagttacaatcatggctgaaggcaaaggggaagcaggtactccttacatggctggcacataagaaaaagatggggggaggtgccatacactttcaaacaatcagatttcctgagcactctatcacaagaacagcaccaaagggatgatgctaacctttcataaatgatacacccccataattgaatcacctcccactcaagccccacctccaacatttgggattatgattaaatatgagatttgggtggggacacagatccaaaccatatt

SEQ ID NO: 138938 - DNA, 558 bp, Homo sapiens
acacaacagattttcagtgtgaataagacagtcttctattggaagaagataccgtctaacacttccacagttagacagaaaaagtaaatgcctggcttcagagctttaaacaaggctgatgctcttgttaggagacaacacaattggaactgactgtattagtcagtccttgcattgctataaagacataaytgagactgggcagtttataaagaaaagaggtttaattggctcaaagttcttcaggctgtacaggaagcatagtggcttctggggaggcctcaggaaagttacaatcatggctgaaggcaaaggggaagcaggtactccttacatggctggcacataagaaaaagatggggggaggtgccatacactttcaaacaatcagatttcctgagcactctatcacaagaacagcaccaaagggatgatgctaacctttcataaatgatacacccccataattgaatcacctcccactcaagccccacctccaacatttgggattatgattaaatatgagatttgggtggggacacagatccaaaccatatt

SEQ ID NO: 138939 - DNA, 611 bp, Homo sapiens
ggacagactgcctcctcaagtggatccctgaaccctgtgtagcctaactkggagacacctcccagtaggggctgactgacacctcacacagccaggtgcccctctgaaacgaagcttccagaggaaggatcaggcagtagtatttgctgttctgcaatatttgctgttctgcagcctctgctggtgatacccaggcaaacagggtctggagtggacctccagcaaacttcaatggacctgcagctgagggacgtgactgttagaaggaaaactaacaaacagaaaggaatagcatcaacatcaagaaaaaggacatccacgccaaaaccccatctgtaggtcaccatcatcaaagaccaaaggtagataaaaccacaaagatggggagaaaccagagcagaaaagatgaaaattgtaaaaaccagagcaccccttctcctccaaaggatcgcagctcgtcgccagcaacggaacaaagctggacaaagaatgatgagttgacagaagtaggcttcagaaagttggtaataacaaacttctctgagctaaagaaggatgttcgaacccattgcaagaaagataaaaactttgaaaaaaggttagacaaatgg

SEQ ID NO: 138940 - DNA, 565 bp, Homo sapiens
aagcttccagaggaaggatcaggcagtagtatttgctgttctgcaatatttgctgttctgcagcctctgctggtgatacccaggcaaacagggtctggagtggacctccagcaaacttcaatggacctgcagctgagggacgtgactgttagaaggaaaactaacaaacagaaaggaatagcatcaacatcaasaaaaaggacatccacgccaaaaccccatctgtaggtcaccatcatcaaagaccaaaggtagataaaaccacaaagatggggagaaaccagagcagaaaagatgaaaattgtaaaaaccagagcaccccttctcctccaaaggatcgcagctcgtcgccagcaacggaacaaagctggacaaagaatgatgagttgacagaagtaggcttcagaaagttggtaataacaaacttctctgagctaaagaaggatgttcgaacccattgcaagaaagataaaaactttgaaaaaaggttagacaaatggctaagtggaataaacagtgtagagaagatcttaaatgacctgatggagctgaaaaccatggcatg

SEQ ID NO: 138941 - DNA, 565 bp, Homo sapiens
aagcttccagaggaaggatcaggcagtagtatttgctgttctgcaatatttgctgttctgcagcctctgctggtgatacccaggcaaacagggtctggagtggacctccagcaaacttcaatggacctgcagctgagggacgtgactgttagaaggaaaactaacaaacagaaaggaatagcatcaacatcaagaaaaaggacatccacgccaaaaccccatctgtaggtcaccatcatcaaagaccaaaggtagataaaaccacaaagatggggagaaaccagagcagaaaagatgaaaattgtaaaaaccagagcaccccttctcctccaaaggatcgcagctcgtcgccagcaayggaacaaagctggacaaagaatgatgagttgacagaagtaggcttcagaaagttggtaataacaaacttctctgagctaaagaaggatgttcgaacccattgcaagaaagataaaaactttgaaaaaaggttagacaaatggctaagtggaataaacagtgtagagaagatcttaaatgacctgatggagctgaaaaccatggcatg

SEQ ID NO: 138942 - DNA, 565 bp, Homo sapiens
aagcttccagaggaaggatcaggcagtagtatttgctgttctgcaatatttgctgttctgcagcctctgctggtgatacccaggcaaacagggtctggagtggacctccagcaaacttcaatggacctgcagctgagggacgtgactgttagaaggaaaactaacaaacagaaaggaatagcatcaacatcaagaaaaaggacatccacgccaaaaccccatctgtaggtcaccatcatcaaagaccaaaggtagataaaaccacaaagatggggagaaaccagagcagaaaagatgaaaattgtaaaaaccagagcaccccttctcctccaaaggatcgcagctcgtcgccagcaacggaacaaagctggacaaagaatgatgagttgacagaagtaggcttcagaaagttggtaataacaaacttctctgagctaaagaaggatgttcgaacccattgcaagaaagataaaaactttgaaaaaagrttagacaaatggctaagtggaataaacagtgtagagaagatcttaaatgacctgatggagctgaaaaccatggcatg

SEQ ID NO: 138943 - DNA, 574 bp, Homo sapiens
tacagcaagcaaagaatcaaagaagaaaagcagtatactttattcaataatcaaaagcttccacatgcatttaatcttgagcyggccagggcactaggaatagagcagcaggccagccagtggttatgagcctggctctgtgatcaggctaggggcttaaatctcagctctgccacttcctagctgaatgaacagacaagttacacaatccttcagtgcctcgtttcctcatctgaaaaataatgaagtacctgtctcatgaggttgtgaggattaaacaaggtaattcataaaaagcactttgaatgcctgggcatgcaatacatgctccactgatattaggtattagtcaacgtaatgcggagtcaggaaaggaacaaaatgggtaagaataaggcatgagcaaggaggcatttagagaatttactgagtgaaacacatacctacagcttcctatttaatctttacagcaaatccatgagaaattcccatctccttccttcttgcttcctccggtcctctctgtatgacccaaggctcattgggttgagggtgggaggagaaaattaactac

SEQ ID NO: 138944 - DNA, 412 bp, Homo sapiens
tgttcctgtgttgttattaaatccagcaagaacacaaaatgaaattagcattatcttcctactacaaagttgttgctctttctttctcccaccccagaaaaccttcccttatctttctataaagagacacaccaattttattttaggagaaacagtacctcttatccttgttaaaatactggagaccaggcaagtacattagaagaggaagatacaaagcagctaggaaggagatctgaggaagtgccaagtgttggaggtggacatctgaagctctgtyctgacctcctcaggccgaaaggtcctcaacctctcgatgactctgtttccatatccaaaagggatgcctttgtagtgctgttgtaaaaatgaagtgggaagcctgacacaaaatacatgtgaccactgatag

SEQ ID NO: 138945 - DNA, 514 bp, Homo sapiens
atacttggcatatagtttatttaaccagctgcctcgttccataaggtatgaggttatttcttttgtctgctctccactaatcccccctactcccagtcactttagaaggcaagatttacaagggacctttgttttgttcacggacatagctagaacagtgcacatggtaggcatttaatatttgcagaagagaaggaaagaataagaaggttgaaagtaagcaagcactcatagagcaaagaggacrcttaccaaggggactattattaaacctaggttactttaaaaaatcctactaccatggccatattgggatcaagaggaaagtctaagggcatcacagaatctctagtagctgagctcggctgtggtcctataacaagttacagatcctatgtgatgggcgctctggcctcctcctgcttagcatattcttggggcatcccaacctgaggatctgggttagagggaaatgggctctcaagaaccctccagagctgcagagtgcagggca

SEQ ID NO: 138946 - DNA, 523 bp, Homo sapiens
aagccagtatgtgactttcatatcatgcagaattaatcagaaattccatacattgacagctcgtgccactcgcctcaaagtaagatttgaggacaaagtagatgtggaatccatttaccctttcaaagtaatttaagactttggaaatctaagaaagataatcaattttgaactatacttgattatgtatgaggtatatgkcccccgtaacgatggattaacgttctatgttaattttagggtggtttccaggcactttcaagatgtaaaacttgagctgagagcggtggctcatgcctgcaaccccagctacttgggaggcataggcagaagggaaacttgaggcaaggaaattgagaccagcttgggaaacatcaggagacccactgctattgaaaaaaatatttaataaattaagatgttttccacagaatctagtttaaaaaagaaaaaaaatgagatgtaaaatgtagagtagccaactcttattcccagaagtctgcaatcttcagacgcatacatc

SEQ ID NO: 138947 - DNA, 523 bp, Homo sapiens
aagccagtatgtgactttcatatcatgcagaattaatcagaaattccatacattgacagctcgtgccactcgcctcaaagtaagatttgaggacaaagtagatgtggaatccatttaccctttcaaagtaatttaagactttggaaatctaagaaagataatcaattttgaactatacttgattatgtatgaggtatatggcccccrtaacgatggattaacgttctatgttaattttagggtggtttccaggcactttcaagatgtaaaacttgagctgagagcggtggctcatgcctgcaaccccagctacttgggaggcataggcagaagggaaacttgaggcaaggaaattgagaccagcttgggaaacatcaggagacccactgctattgaaaaaaatatttaataaattaagatgttttccacagaatctagtttaaaaaagaaaaaaaatgagatgtaaaatgtagagtagccaactcttattcccagaagtctgcaatcttcagacgcatacatc

SEQ ID NO: 138948 - DNA, 622 bp, Homo sapiens
tctcttgggtgtctaattagacatatgttcaaccttcttattccatctccctgtctcttaatccctctttcattttgttcctctttgtgctgtgtactgagatgtttcctcaagtaggtaattcattctttaactgtgtcgactctatctgacctatttgagtttttagtatcagctattatgtattttgcatatgtagaaattgtttctttttcaaatctccctggtcatttaactcttgttcctcgctcatgttttagtttaattattttaaataaatgatatttctaatttagttattttatrctatgcatttgaagatgccgatctgatatccttgggtatgctatttctctcttttgctatttcttgtttttaccaactctagctcatagttttgctttcctcggtatttttcactttttattgggaacccatatttaactgtcataatctgtggcagtccaaaaggccctggcttgagagcaggcctccacgggacacttgtttgcttctgccagatacctggaagtgccttctgagaccacttttggttaatgttgttgctttagggatcgcaggtcatgcatttagtctaaatgcagtccctgaagctgtgtgg

SEQ ID NO: 138949 - DNA, 567 bp, Homo sapiens
cagctttgtcatggtgaactatttcttgcaggagtcgggatccgcatctacagactatacaaagacaaacaacacagattaaaaacacaatcatcattgaaatcacagagcctccaagtgtccttatctattttaatgggttaatagctgctactctgtctgcagctccttcaagcactccagttcctggcattaaggtcaggtgtgcctgggatgcyttaaatatttgttcttttaattttgcaatatccaaagacaagtttgtggagtgtccttctagatgcttttttattatttcccaaattttgatcttatttaagagccattaattgtttccacaaatccttatgtttaactcctagagcgagccatatcatttgaggttgaggtgccactataccaccatgtttccagataataggaactcttgccatatttctaaccatttctaccatctgaccattctgttcagaccagctgaacacagtgtggccatggcacacagactgagaggtgcaattcaagctgaacatccccttaggggaccaatcaataatgattccatag

SEQ ID NO: 138950 - DNA, 567 bp, Homo sapiens
cagctttgtcatggtgaactatttcttgcaggagtcgggatccgcatctacagactatacaaagacaaacaacacagattaaaaacacaatcatcattgaaatcacagagcctccaagtgtccttatctattttaatgggttaatagctgctactctgtctgcagctccttcaagcactccagttcctggcattaaggtcaggtgtgcctgggatgctttaaatatttgttcttttaattttgcaatatccaaagacaagtttgtggagtgtccttctagatgcttttttattatttcccaaattttgatcttatttaagagccattaattgtttccacaaatccttatgtttaactcctagagcgagccatatcatttgaggttgaggtgccactataccaccatgtttccagataataggaactcttgccatatttctaaccatttctaccatctgaccattctgttcagaccagctgaacayagtgtggccatggcacacagactgagaggtgcaattcaagctgaacatccccttaggggaccaatcaataatgattccatag

SEQ ID NO: 138951 - DNA, 527 bp, Homo sapiens
tatcaaaacaccaatatcattttttatggaattcraaaaaacatttcaaaaattctataatatggtttggctctgtggccccacccaaatctcatgttgccttgtaatccccagtgttgggggagggacctggtgagaggtgattggatcatggaggcagatttttcccttgctgtttttgtgatagtgaatgaattctcacaagatttggttgcttgaaagagtgtagcacttccccctttgctgtctctcctagtggccatgtgaagatgtccaggattccccttcaccttctgccattattgtagtttcctgagtcctcccccaaagcagaagcctgaacagcctgcagaactataagccaattaaacctctttttttagtttcaggcatttctttacagctgtgtgagaaaggactaatatagtatgaaacaaacaaaaaagcctgaatagccaaagcaatcctaagcaaaaagtacaaatctgaaagcatcacatgacccaacttcaaattatactacaaag

SEQ ID NO: 138952 - DNA, 540 bp, Homo sapiens
taattaactcatttcttgaacacttcccaagtaaccaacactattccaagtgctagatagaaagatgaatagaatttcatttctgctttcaaaaagatggcagtttattggggtacttaataaatacatagtgagtaaatgtataaataaatgatctgatatattatatgtaaactttatatctatgacataaattataatccttatttttctttatttttgaaggagcttaatggttcaattagagtatatgattaatcgaaaccttgtctctagaaaccactttgccttggtttttttatttgttaatttattttaagttctgggatacatgtgcaggatgtgcaggtttggtacataggaaagagtttgccatggttgtctrctgcagctatcaacccatcacctaggtattaagcccatcacgcattacctatttttcctgatgcttttcctcctcctggtcccccagacaggccccagtgtgtgtcgttcccctccctgtgttcgtgtgttctcatcattcagctcctacttata

SEQ ID NO: 138953 - DNA, 624 bp, Homo sapiens
aactgaattgccagaactgcactcttgtttctttcccttactttctccaaaacagattatctctctgtgtgttgagccacctggagctaagggtgaagtgatacaaacattcctgtggccaccaccactgggactgtgctgcatcagacctgaagccagcacagcactgggtcttgcccaaggcccgctataaacactacttggttatgacctatgttccctcaaaaccctaggactctacaataagtagatggggtaactagccagatttgtgctcttcttttcaggatggtgaagtcccccaggctccaggaagatccagagatgctatctgggagccaaagattggagtcaaaaacctttgaaatcttcctgatgatttattttattgtggctaagctgrccctcaaaccatgaggcaaactccttctcacttgtctctccactttttacaggcagaggagtgtttcctgatggccaccagaaccacaggacaatgaggtattttccagtccaccactgatgttcacttaaaacccaatgactcttcagtcagcttgtggtgaaggctgccaggcctggtacaactcttaaaagcaatgggcttccctctggctcagggtg

SEQ ID NO: 138954 - DNA, 412 bp, Homo sapiens
caaaaatgtctctgtcattatctgtacttgattttcatctctaggagcaggaggatcaattcagtcgttgacattttccaacctactgtgcagggaaaggggaattcagagaaaacatcgtcttcttaaagaggarcactggaagtcacagatatcaattttgtttatatcatctcagcctgcacttcataatatgatcacatctaagtgaaagggaacctggacaataatgttctataactgagtcatcatgggccccattaaaactgttactgaaaggaagaataacaaagggtgaagttaagacaatatcaaaaagaagaacctatgacaatttcacaataccccagtagatccatggagaaaatgctttcatagatgatttaccctaagagaaaggagaccatttaga

SEQ ID NO: 138955 - DNA, 498 bp, Homo sapiens
aattgcctacagtattcagtacagtaacatgccatacaagtttgtaacctaggagcaataggctactccataaagcttaggtgygtagtaggctataccatttagatttgtgtaagtacacatatcccagttgttaaacaatgtatgtatgactgtatataaatacatatacatgcatctatcatatatgtgtgtatgttatatgtatatatttaatatattttgtataattataagaattctgtagttacatataattgtatacattaaaaatactttgctatgtattaatatcaaatttttaaaaaccttaaaatgttaccataagattgtggtattgccaaggttgcaatttgagttatttaattcacatgcttgggtattagtattcatttattttctgtgcatttttaataatatctgtaaattgatatagcttatttcaaggaacattagttagtaaagctgtgataaacaccagtctttagtttcactctt

SEQ ID NO: 138956 - DNA, 498 bp, Homo sapiens
aattgcctacagtattcagtacagtaacatgccatacaagtttgtaacctaggagcaataggctactccataaagcttaggtgtgtagtaggctataccatttagatttgtgtaagtacacatatcccagttgttaaacaatgtatgtatgactgtatataaatacatatacatgcatctatcatatatgtgtgtatgttatatgtatatatttaatatattttgtataattataagaattctgtagttacatataattgtatacattaaaaatactttgctatgtattaatatcaaatttttaaaaacyttaaaatgttaccataagattgtggtattgccaaggttgcaatttgagttatttaattcacatgcttgggtattagtattcatttattttctgtgcatttttaataatatctgtaaattgatatagcttatttcaaggaacattagttagtaaagctgtgataaacaccagtctttagtttcactctt

SEQ ID NO: 138957 - DNA, 546 bp, Homo sapiens
aagtatgcctgaatatgtgctagaaattcagtatagcagatataattattgtgaatcttcaccaatttcaccccatatatacaggattgaagagcaatctaaagaggagaaatgggtactggagcccatgtaggtacctatcttggcatgggcaacattttctgcatgtcactgtagacccagttggtctcagccacaagaataggacttagaaattttcaagggaatcattccaaagtacaataatccaccgggacccaaattactgtccaaggagttattttatcagtgcatttatagataacattgagctcatttacaagaaattcttacttccttattttttcaatttatcaacctttaatttgctttgtcatgtaatcrcaaattcatttaaggttatttccctctttctcttatcatatacaaatatgtctggtctctaactatactaatcctattttttctggtgtctgtctatacttctgttcttttattttctatacttcctgtaaataagggcttgtgatgttcttatgttgttaa

SEQ ID NO: 138958 - DNA, 577 bp, Homo sapiens
gcagctgcacagatacttctctattcagccaattctatcataattttcacaagagaatttaaagtctggtatttaactatatcctatacagtagaatctgctatagagcctactatgaggaatgcatttctaatcattgcttcttttactccaaaccatagaaaaaggaactaacaaatgatgcccttctagaaaagcaaaggactcctggcaatgttcttagaagtacctgtactattcctctcagtaatggagatctactttccatgtgctctccaacacattcaggcaccaawcttacaagtcttctattctggatttgcccttcatacaaaatctatcaacactttttaaaaatctcttcatattccacccttttgtcctatttctactactacaaaattaatctggggaattgttaccacacttatttttgctgccatcaatttctcagctctgtaaatcaccccatgcagtgagatcaggtggcttttatgaaacattcttttgatcaaagaatttcccaaccctccaaaatgtcaatgaaattactttcccatgttatacagagaagcaa

SEQ ID NO: 138959 - DNA, 514 bp, Homo sapiens
gattattcatgcctcctctttttagamcatatagggtaacttcctgatgttgccatggcatttgtaaactgtcatggtgctggtgggagtgtagcaatgaggacaaccagaggtcactcttgtcaccatcttggttttggtggcttttagctgacttctttactgcaacctgttttatgagcaagatctttatgacctgtatcttgtgccaacctcctatctcatcctgtgacttagaatgccttaaccatctgggaatgcagcccagtaggtctcagcctcatttgacatagcccttatttaagatggagttgctctggttcacacacctctgacaaaaccatgcacttgatctctcaagttgcctgcttggccttcttccaagtgtactttacttactttcattcctgctttaaagattttgaataaactttcattcctgctctaaaacttgccttgttctctctttctgccttatgctccattggtctaattatttcttctgaggaggcaa

SEQ ID NO: 138960 - DNA, 514 bp, Homo sapiens
gattattcatgcctcctctttttagaccatatagggtaacttcctgatgttgccatggcatttgtaaactgtcatggygctggtgggagtgtagcaatgaggacaaccagaggtcactcttgtcaccatcttggttttggtggcttttagctgacttctttactgcaacctgttttatgagcaagatctttatgacctgtatcttgtgccaacctcctatctcatcctgtgacttagaatgccttaaccatctgggaatgcagcccagtaggtctcagcctcatttgacatagcccttatttaagatggagttgctctggttcacacacctctgacaaaaccatgcacttgatctctcaagttgcctgcttggccttcttccaagtgtactttacttactttcattcctgctttaaagattttgaataaactttcattcctgctctaaaacttgccttgttctctctttctgccttatgctccattggtctaattatttcttctgaggaggcaa

SEQ ID NO: 138961 - DNA, 530 bp, Homo sapiens
tcatcctgtgacttagaatgccttaaccatctgggaatgcagcccagtaggtctcagcctcatttgacatagcccttatttaagatggagttgctctggttcacacacctctgacaaaaccatgcacttgatctctcaagttgcctgcttggccttcttccaagtgtactttacttactttcattcctgctttaaagattttgaataaactttcattcctgctctaaaacttgccttgttctctctttctgccttatgctccattggtctaattatttcttctgaggaggcaagaattgaggttgctgcagacctgtatggattcactgctagaayaataccagatatattttatgcatgtggaaagatacatactcttattttgatgaatattgttttctgtgcattgaaagctatttggatcagaaggctcttattgagataatgcccacgtatgtagcacaaggcttctttgaaatcattattttctcatgtttagtttcagctgtacaatacaatctttgtagatc

SEQ ID NO: 138962 - DNA, 578 bp, Homo sapiens
tcctacaaatttctctatgaacactaccttatccatgtctcagagattctggtatgttgtatctttgttctccttagttaaaaagaacttattgatttctgccttaatttcattatttacccaaagtcattcaggagcatgttgcttaatttccatttaattgcatggttttgaatgattttcttagtttttggctactatttttattgcactgtggcccgagagtgtgcttggtatgatttcagttcttttgcatttgctgaggattgttttttgtccaattatatagtccattttagaatgtgtgccatgtggtgatgagaagaatgttattatgaggtggagagttttgtagaggtctatcagatccatttggtacaatttgggttcattttcatactgttatgaagaaatacccaaaactgggtaatttaaaaagaaaaagagatttagtggactcacaattccatatggctggggaggcctcacaatcatggcagaaggctaaagaggagcaaaggcatgtctkacatggcagcaggcaagagagcatgtgcagaggaactgctattcataaa

SEQ ID NO: 138963 - DNA, 609 bp, Homo sapiens
gacattggaaataaggattgtggttacctttggaggataatgattaagagagggcaccaagtgcttttggggtcctggtgacattcgtaatcttaatctgggtgctgttttacagcttcactttgtaaaaatgtcatgtgttttccatgtttattttacggaaatttattgagttacacttaagatttttaaaattttctgaatatatgctgactagacactatactttgataaaaagtaagtaaataaagattaaaaacaaggtcctctttaaaaakatttttttatagcttttactgcttgagcctatgttttgatttcatttttataacagaattttatcctaatggaaataaaaaatttgattgattactttgcaaccagaatgctataagtcttaaaaaacttttcttgaagagtaagctatccttaagacttttattagtacacaattggcaatatagaaatgtattataaattttgataaaaattattgagcatgagatttttagaaatgcacttttaaatcagttgggtaggccttttcttggggatgcatagttggaataaaagagggttcaatatcaattctatttctattctatgaat

SEQ ID NO: 138964 - DNA, 546 bp, Homo sapiens
tttcaaaaacaaagcattcttgaaacaaacaaacaaaccaaaattatagtagtcttgatgctttttattgcctatacattttttagttattagtgttcccatatttttcataataaatgcatttttaaccatattatcacctatatagattgttgtgtcatttgcttaaatataacctagtgttatatgaagaaattcattctgagttagcacattggggattgacaataattgtaaatagtgccaccctgtaatattttagggcaatggtaaccaccctgtgttagtaattcagaatatgtttatttcatcccagtaaactccatttatgcaagatgagattttgctattagtacatcttctatcatcccttttatcttttcatatttaaatacttaccaagcttctaatttgctaatgacaagaggatacaatatgtgctaatkatataaatacagtgtttcctggtgcttgatatactttagtgtaagttatctgtcttttaaaaagcatactattttcccacgtcctaagacattttagaaa

SEQ ID NO: 138965 - DNA, 441 bp, Homo sapiens
  misc_feature (1)...(441): n = A,T,C or G
ttaccaatctaacatcactcttagtggaactataaaaacaagaacaaactaaccccaaanctacagaagaaaattaaataaataaaatcagagcagagacaaatgacatcaagacccaaaaattcatacagagaatcgataaaaccaacagttcttctttgaaaggataaacaagatctatagaccactaactaaattaacaaagaaacaaacggagaccaaaataagcaaaaccagaaaacaacaaaggtgacattacarctaatcccacagaaatctaaatgatcctcagagagtgttacaaacaactctatgcacattacctgggaaatctagagaaaatagataaattcccggaaacatataaattcctatgattgagtcaggacagaattgaaaccctgaatagaccaatattgagttctgaaattgaatcagtaa

SEQ ID NO: 138966 - DNA, 556 bp, Homo sapiens
ttgtaccatcactatggagaacaaagttaaagtttctcaaaaaactaaaaatataaccaccttatgattcagcaatcccacagctgggtatatatccaaaagaaaggaaatcagtgtatcaaagagctatctgcactcccatgttttttgctgcattattcacagtagctgacatatggaatcaacctaagtgtccatcayccatcaacagatgcatgggtaaagaaaatgtggtgcatgtgcacaagggagtattgttcagccataaaaaaaagaatgagatcctctcatttgcaacaacatggatggaaatgaaggacattatgttaagtgaaataaaccaagcacaggaagacacacattgcgtgttctcatttattcgtgtgatctaaaagacaaaattgatctcaaggagataaagagtggaataatggttaccagaagcagggaaaggtattgaagaaggggagataaaatggggttggttaatgggtacaaaaatgcacactattgggtatttttgaatagcaggctttttttccccagtactttagtt

SEQ ID NO: 138967 - DNA, 582 bp, Homo sapiens
tcggcaaatgttcaagtgtgaatgttcccatcgaatcctgatctttttagcaacatcgtgttttcaaagcaagctcaagaccacaggggttgctgggcttagtgtgaacaatcaaattctaagtaaacagcctcatcttccacccttcatctctccttcttcctctgaattttgctatscatttggaaactgctctttcatttggcttggaggacccccttttgagccagagccctttgttttagtcagagtatgctctggagttgttagagcctgcattaacttcactgtttgtcattgtcaaggtgttgtttgaagttgctaacttgccctttggtgggtatgctaaatgtagatggaatgaaaagactatcattccctcctaattctcccactagaccaacccaaaggtacatacttcctttggggtgacagaaggtgacaagcggcagctgcagcagcattcatttaattaagctcttatctggccttgggcctggttgcccagtttataccctaccatgaaaattctaaaattctatcatttactgagggaagatcatgaatcctggaaattttaga

SEQ ID NO: 138968 - DNA, 651 bp, Homo sapiens
atgcccatccaactcaggccctaacctaattttcttttgagtctctccttcccccaatttacatgattgtgatgctggaatcaaatgagtccacttgctaatctccattccttgaaacttagtgcctccatggttgtgctaaatctgttctttgctcaggaaaacacagctgaaatacttcgtcctccatgaagcacttgcctaataacacctgaggaaagggattactttcccatttgayctgaagcacattgtaatattactaagaaaacacttacactagtacatcctattatttatataagtgtatggatgtcactggctagctgtgtgagcttagacaagtcacttaacctcttttaacctcagtgttctaatttgaaaaatgggacaatcataacatctacccacaggattgctgtgaagattaaatgaaataatacatgtacggcagctgctagcttaatcaatgccactttctcacataatattgtaaacttcctgatgaaagttactgcgcctgattctcctatgcatcccacatacccggttcaatgcctggccgtggcaggcacttatatttattgagtgaattacacatgattggccaggcttcctctcctttgccactctgccctattgtgaagccag

SEQ ID NO: 138969 - DNA, 651 bp, Homo sapiens
atgcccatccaactcaggccctaacctaattttcttttgagtctctccttcccccaatttacatgattgtgatgctggaatcaaatgagtccacttgctaatctccattccttgaaacttagtgcctccatggttgtgctaaatctgttctttgctcaggaaaacacagctgaaatacttcgtcctccatgaagcacttgcctaataacacctgaggaaagggattactttcccatttgatctgaagcacattgtaatattactaagaaaacacttacactagtacatcctattatttatataagtgtatggatgtcactggctagctgtgtgagcttagacaagtcacttaacctcttttaacctcagtgttctaatttgaaaaatgggacaatcataacatctacccacaggattgctgtgaagattaaatgaaataatacatgtacggcagctgctagcttaatcaatgccactttctcacataatattgtaaacttcctgatgaaagttactgcgcctgattctcctatgcatcccacatacccggttcaatgcctggccrtggcaggcacttatatttattgagtgaattacacatgattggccaggcttcctctcctttgccactctgccctattgtgaagccag

SEQ ID NO: 138970 - DNA, 486 bp, Homo sapiens
tggtaatagtagtgaagtgaggaatttattaatgttcatatgcattttttatattgggagatatgtttacataatacaagacatttagtggataatttctgtgatttccctggmaaattagttgaaatctaaagtagatatgcaaccatttagtatcattaccatttaaacagaggatatgtttcagccttgaagtagaaggaataaaaatcaaaatatttgtactatacattcatggtaatgcaattagaatataaaggccccaaaagaccaggattctgtaggtatggtttataaaagactcaattacacacatatgggctattatctaacaaagcttgtgatatttgatgaggccgtgaaatgccagaataaacatttgaaactaaaatgcccaatcaatttattcatttgttcaacaaacaattgtggcacatttttactaagcatgagtggcacaacagaaagttgagtaaaccacatcct

SEQ ID NO: 138971 - DNA, 486 bp, Homo sapiens
tggtaatagtagtgaagtgaggaatttattaatgttcatatgcattttttatattgggagatatgtttacataatacaagacatttagtggataatttctgtgatttccctggaaaattagttgaaatctaaagtagatatgcaaccatttagtatcattaccatttaaacagaggatatgtttcagccttgaagtagaaggaataaaaatcaaaatatttgtactatacattcatggtaatgcaattagaatataaaggccccaaaagaccaggattctgtaggtatggtttataaaagactcaattacacacatatgggctattatctaacaaagcttgtgatatttgatgaggcygtgaaatgccagaataaacatttgaaactaaaatgcccaatcaatttattcatttgttcaacaaacaattgtggcacatttttactaagcatgagtggcacaacagaaagttgagtaaaccacatcct

SEQ ID NO: 138972 - DNA, 562 bp, Homo sapiens
tgtattgacggttattctcttttgttttaaattttatatgttttttatatatttaaggtgtacaacatgatattttattatatatgcatacatgatatttagtatatacttagtgaaatggttactatagtcaagcaaatgaacatatccatcayctcacaaaattactcattttgtttatggtaagatcacctaaaatctaacttttaagcaacaatccagaatatttttaaggtaaagttcaaaatccttcacctactcattcctgggtgattgacccaggaacctctgcagaatcattttgctcctatttttacatttctatgattgagtaatattgatgttttgaagcagttttattgagatataataaagtatattaatatattcacaaagttgtgcaaccatcaccacaatctagttttagaatattttcattaacccagaaagaacctctttatgtgttaacagccactcccattcttgctccactctccagctctaggcaacctaaatattctttgaggcatccataagagcttctttctctttactgggctat

SEQ ID NO: 138973 - DNA, 448 bp, Homo sapiens
tattgttttgcaaatgttttgcttatcctggcacttgggaaaatggcttccaatctattatttttcaagtggagaggagaaagaaagggaactaacatttatttaacatccgctcggtgccaggcactgtcctggtagacatgtttcatcaaattaagtacagcttcttaggagccttttaactaggatacataattccctgaaatcatgtggctgctctgatccctggttactacccatacaagttaagaaactcaactacaagatgagcaagggaaatgagaggaaaacccaagatttaagaatgagaacaytaatacagaacccatcccctaattaaaatagacgtaagataaaaatttattattactttctgaaaagtttgcagacttttcatagatatgttatagcagaaaacacactgtaccagacgacctgagttctagtc

SEQ ID NO: 138974 - DNA, 636 bp, Homo sapiens
tcacttgtttttagccaaggccatttcatcattttgagttcttcaggacagaaaaacgcttacaaagcaaaaggcagtaaaataattaggtgcaaggtwatggttgagcagttcatttaatatatttatgtaattcctaatgtgttgcactttggggtttccttgaaataagacacagcaaccatgtgtcccataattactaggacctgatgcacccaccagctgacagcatgccaagggagagagcagcaagcaaagggagtctacagggcttaaagcatatcaatgctgaattctccctgcagccatctgcatactgggcctgctactcttagggtgcagcgtttttctaggagctgcacaccaatctaggtggaaaaggaaatagtggagattgccaagattcctctctgagattctgaaaatgaaagacctcttcaaaaacatcatttcacctcattttctccccatcccaacccctacacctcctgcaaagagtctattcccaccacctgcagagcaatgcactgaacagaggaagaaagctaaattagcaaagaacagcacatgtgcctttctgagccaagtacttacaggcatttctcatctaatcctcaaaacaaccctaataagtag

SEQ ID NO: 138975 - DNA, 564 bp, Homo sapiens
ggtgcatttttgtgtagatagttgtgacatttgatgttcctatggggaggatgattagtggaagcttctatttggccatcttgctccacctcctctttgccatgctgttaatttaagagtcagcactctgaaatattagagctcatgaaaacctgttaaaaataatggtgaagcttttatcttttaatatattttgttagaatttataagaactacttatctgttgaaagttaatttcaacagatatatatatatatacctgtcctcgggggtatagattttgcaatgcttttagggcatgatatagtgtctccagaaaacaacagaaacttcctagcccctatcaatctctgcagtctcatcttctcccacrcagacagttctggatcacctattaagcccactaagcacacatttgaaacaccaggaatgcaagccccatcctgccccatccttccccagcccacctcacaaaatgagagacctcaacgaaatgaatctatccataactttataattggataagtctagaaaaagctattttaatttccactttcaggtagg

SEQ ID NO: 138976 - DNA, 564 bp, Homo sapiens
ggtgcatttttgtgtagatagttgtgacatttgatgttcctatggggaggatgattagtggaagcttctatttggccatcttgctccacctcctctttgccatgctgttaatttaagagtcagcactctgaaatattagagctcatgaaaacctgttaaaaataatggtgaagcttttatcttttaatatattttgttagaatttataagaactacttatctgttgaaagttaatttcaacagatatatatatatatacctgtcctcgggggtatagattttgcaatgcttttagggcatgatatagtgtctccagaaaacaacagaaacttcctagcccctatcaatctctgcagtctcatcttctcccacgcagacagttctggatcacctattaagcccactaagcacacatttgaaacaccaggaatgcaagccccatcctgccccatccttccccagcccacmtcacaaaatgagagacctcaacgaaatgaatctatccataactttataattggataagtctagaaaaagctattttaatttccactttcaggtagg

SEQ ID NO: 138977 - DNA, 384 bp, Homo sapiens
tcttttgagagccaggctccactcttcgtgccttttttataccatgaagacctgctgttcttttattctgcttaagtgcataagcgttactgtgtatgttgaaaaacgtgttgcctcacagagcagccaaaagctagctgctaaaaccaggattcattctgtaacaggatgacattttgtctttttttttgagacggagtctcactctatctttttactcttcyacgtgacttctgtatttcaggagagaggaagtgcgattcctaaggggatgatttgattcttctcaaataccaggtcagcctctctttaaggccacacaccgatgctgagctgaagagtggcctgatctgcattttcccctgggttttaggagatgcagag

SEQ ID NO: 138978 - DNA, 413 bp, Homo sapiens
cagagatgtgaaaacatttgcagaagatcatgtagttgcaggtaggggagcaagatcagaactcaaacactctggtttgaattcgtgattttcaccaccatgtgacctgactacatcagaggcttttgtgagaattaaaatttcaaactatatgtaaaatactaagaacaagtcctgcccttagtgagcagstatcaaagaataaaacaaagaaaactgaaattaaaggagacccaatccaagtttattaacctgtcggggaaaggaaaacacaccatgaagccatttattgactagttgcactgagggacaaaacgctgatcaagcgctagaaaacagaggagggtgtgtgtgtgtatgtgtgtgtgtgtgagagagctcatggtgttatcttaaataaagattgaatacta

SEQ ID NO: 138979 - DNA, 607 bp, Homo sapiens
tgtcagaaccagttgggatgcaacaggattttcagttttgctgycttccatgcatgaatggctgtgagttgaaaatttccttttatccatggtagctatgatgatgatcacaatagtgatcatgatactaattatgaccatgaatttgctactggattgtaaagtaatttttaaattatacttgtgcaatctcattttcactctgttggacatgggcttccaaattgttagtgatttattttcaagcatgtgtattttgtggatttggtcctcatgcattctacaaagaatagtaccagtcaatgttcaaaatatacgtcttataattgtcagagttggagacttcactaagttacttgggatcacagggtttactgtctggtgtagagtgatgttctcaggaaagaaatattaatatattaaccttatgcttacaatataaaggtatttcttctattataactctacaaccactctgagagcctcattttttataaagaagagaaaaataaaaataaagacatgaaggaaaaatgaaaagaagagaaagaaagaaaagaaaggaagaaagagaaaacagaaaaagaaacctaaacatggacattag

SEQ ID NO: 138980 - DNA, 597 bp, Homo sapiens
ttgaatactagtggcctgaaaaggaggagacaagtttgtaagtctgaatgtgattggataaaacaagtttccatgttcattaatcaggagaatttttggatggaattagtagcggcatggcatcttaagtcactcaaaattcatggctttttttttttttcagcttcagtttgtcagaaccagttgggatgcaacaggattttcagttttgctgtcttccatgcatgaatggctgtgagttgaaaatttccttttatccatggtagctatgatgatgatcacaatagtgatcatgatactaattatgaccatgaatttgctactggattgtaaagtaattttyaaattatacttgtgcaatctcattttcactctgttggacatgggcttccaaattgttagtgatttattttcaagcatgtgtattttgtggatttggtcctcatgcattctacaaagaatagtaccagtcaatgttcaaaatatacgtcttataattgtcagagttggagacttcactaagttacttgggatcacagggtttactgtctggtgtagagtgatgttctcaggaaagaaatattaatatattaacct

SEQ ID NO: 138981 - DNA, 607 bp, Homo sapiens
tgtcagaaccagttgggatgcaacaggattttcagttttgctgtcttccatgcatgaatggctgtgagttgaaaatttccttttatccatggtagctatgatgatgatcacaatagtgatcatgatactaattatgaccatgaatttgctactggattgtaaagtaatttttaaattatacttgtgcaatctcattttcactctgttggacatgggcttccaaattgttagtgatttattttcaagcatgtgtattttgtggatttggtcctcatgcattctrcaaagaatagtaccagtcaatgttcaaaatatacgtcttataattgtcagagttggagacttcactaagttacttgggatcacagggtttactgtctggtgtagagtgatgttctcaggaaagaaatattaatatattaaccttatgcttacaatataaaggtatttcttctattataactctacaaccactctgagagcctcattttttataaagaagagaaaaataaaaataaagacatgaaggaaaaatgaaaagaagagaaagaaagaaaagaaaggaagaaagagaaaacagaaaaagaaacctaaacatggacattag

SEQ ID NO: 138982 - DNA, 597 bp, Homo sapiens
ttgaatactagtggcctgaaaaggaggagacaagtttgtaagtctgaatgtgattggataaaacaagtttccatgttcattaatcaggagaatttttggatggaattagtagcggcatggcatcttaagtcactcaaaattcatggctttttttttttttcagcttcagtttgtcagaaccagttgggatgcaacaggattttcagttttgctgtcttccatgcatgaatggctgtgagttgaaaatttccttttatccatggtagctatgatgatgatcacaatagtgatcatgatactaattatgaccatgaatttgctactggattgtaaagtaatttttaaattatacttgtgcaatctcattttcactctgttggacatgggcttccaaattgttagtgatttattttcaagcatgtgtattttgtggatttggtcctcatgcattctacaaagaatagtaccagtcmatgttcaaaatatacgtcttataattgtcagagttggagacttcactaagttacttgggatcacagggtttactgtctggtgtagagtgatgttctcaggaaagaaatattaatatattaacct

SEQ ID NO: 138983 - DNA, 607 bp, Homo sapiens
tgtcagaaccagttgggatgcaacaggattttcagttttgctgtcttccatgcatgaatggctgtgagttgaaaatttccttttatccatggtagctatgatgatgatcacaatagtgatcatgatactaattatgaccatgaatttgctactggattgtaaagtaatttttaaattatacttgtgcaatctcattttcactctgttggacatgggcttccaaattgttagtgatttattttcaagcatgtgtattttgtggatttggtcctcatgcattctacaaagaatagtaccagtcaatgttcaaaatataygtcttataattgtcagagttggagacttcactaagttacttgggatcacagggtttactgtctggtgtagagtgatgttctcaggaaagaaatattaatatattaaccttatgcttacaatataaaggtatttcttctattataactctacaaccactctgagagcctcattttttataaagaagagaaaaataaaaataaagacatgaaggaaaaatgaaaagaagagaaagaaagaaaagaaaggaagaaagagaaaacagaaaaagaaacctaaacatggacattag

SEQ ID NO: 138984 - DNA, 540 bp, Homo sapiens
acactgcactatttatactttaacattttacaaatgacatttgtagagaaaagaacaggggaaaaatgctgaagtatgcccatctttccttctttcagtgtgtttctccactgtggcttgagatgagaggaatgaatctctcccactgaccctcaccctgatacttgtttgaagactttccactaccaactttggagggatggagagatggagaggagaccaggaaggaggagctgggaagagtgtttcaaaccagtagctactggtactgaaacctatccaattgtyccatagaactgatgtttattgtttctttttgataaacatagaaattgaccctcccagttttgaaacctgagaaagttatatttgtcttatctgggttcctttctcaggaaagcaaccaccgggattcccagatagtattaaggaactgaaacttaccagatcaccacatgtggacaatgaggtacccctcacctgtcacaattgcctaagcaacgacttgcttcctattgatcaactcctcttccttagttc

SEQ ID NO: 138985 - DNA, 540 bp, Homo sapiens
acactgcactatttatactttaacattttacaaatgacatttgtagagaaaagaacaggggaaaaatgctgaagtatgcccatctttccttctttcagtgtgtttctccactgtggcttgagatgagaggaatgaatctctcccactgaccctcaccctgatacttgtttgaagactttccactaccaactttggagggatggagagatggagaggagaccaggaaggaggagctgggaagagtgtttcaaaccagtagctactggtactgaaacctatccaattgttccatagaactgatgtttattgtttctttttgataaacatagaaattgaccctcccagttttgaaacctgagaaagttatatttgtcttatctgggttcctttctcaggaaagcaaccaccgggaytcccagatagtattaaggaactgaaacttaccagatcaccacatgtggacaatgaggtacccctcacctgtcacaattgcctaagcaacgacttgcttcctattgatcaactcctcttccttagttc

SEQ ID NO: 138986 - DNA, 615 bp, Homo sapiens
gtatgcccagcacttaaccaggctgggatttttaggatttaagggctaaaagattcaacccatttcataaatccttgtgacattagtcgtgtgtgcagagcaaagagacggagttttccaaatatacctgagagcagcaagtatttgttgtcataatggggtaacggcgttggtccatagctctgtttttattcctgtcttggccattaggatcgggattaggtgaagaggcttcgttacatatctagggagagcattctggacttatatgaagataggggagacagtagaatccctgttactaacagtgaataatgtatttaaatgtcctctatggtatggtttggatgtttgccccacccaaatctcattttggaatgtaatccccagtgttggaggtggggcctggtgggaggtgtttggttcataggggaggatccctcgtggcttggtactgtcctcatgttagtgagttagttctcactagatctggttgtttaaaagtatgttagcacctcccccaagccctactcytgctctcaccatgtgacgtacctgctcccacttcactttccaccatgagtaaaagctccctgaggcctccccagcatctga

SEQ ID NO: 138987 - DNA, 514 bp, Homo sapiens
actttccaccatgagtaaaagctccctgaggcctccccagcatctgaagaggtgctggctccatgcttgtacagcctgcagaactgtgagccaattaaatctcttttctttattatttatccagtctcaggtattcctttataacaatgcaagaatggcctaatacaccctatatctctgaaagtagctttcacattaattgtttttatatcacaaaaaaaatttatcaaaagcatctgttgaacagacaaagattagggcaaaaatggggcaattttaccagagaggctgcatctcctctcccaagcctcacattccgtaatttatccacccttgcccagcagcccagaatgtgggcaaccactctcccaggattgcagggctgaatgtgttycctgagactgcactgcatgtttttccagagcactgttaggtaaaccagaacgcactgtacagtgtacatatggtgtttctctgtcctttggggccaatacttggcaactcagtcaggatg

SEQ ID NO: 138988 - DNA, 500 bp, Homo sapiens
ttcaagagctaaaaccaggagagggtcgactcagactgcagccccctaaagactgactacccaaccccattctttaacaccccacatatcaggtcattattgtagaattccatttagaacaatttttgacactataaaagtaatacttgtttcattgtatgaaatatttaaaatacaaattatttttttaagaaaaggaagaaaaatcattcactgccagagacaacactgatattttggtacctattctggtagtatatattttttaaatacctaatataggcagaatttattttgacaaaaataaggttaacaatttttttcttcccataaaatattcctctatacagcataatcaccaatcacaggagtctatcacagttttyttcttcttcttcttttttttttttttgtaagaaacagggtctcattatgtcacccaggctggagtgcagtggtgggattataattcacggtagctttaaattcctgggctcaag

SEQ ID NO: 138989 - DNA, 551 bp, Homo sapiens
ctcccaatggctccaggagaatgggtgagttgaactggtaaggagcaacctgctttccccacaggtgtctggaaaccagtaggaggagacctctttaccatcacagacacttgagttggcagggagagctgcttagggaagtggtaggggcagcaagccagctgatgtggagcccagaaggtttggtgcgggagcatctgtagcagagtacagccagtgatgaccatccctaggcttgacttgctcctataggagactttagccctagtggaactgtcaagtcctgaactctatggggcagtcttgcccatcagatagggctggtccaatctgagcacctcttggtctgctgacctctcccaggccctgactgaccatagctgcttkcagggaaaccttgcataccctggaggcccaccccatagcttctgcactggcagactcatgcctgactggtgaagagatccagcagagcagcccctacagccacacaccagcctgcattctccctccccatactgaagcttcccccacatccattgctactcccc

SEQ ID NO: 138990 - DNA, 528 bp, Homo sapiens
aatatgcattcttcttattgccacatggcacatactctaaaatcagtcacataattggaagtaaatcactccctagcaaatgcaaaagaactggaatcaaaacaaactatctcttggaccactgctgtattagtctgttctcatgctgctaataaagacatacccaagactgggtaatttataaagaaaaagaggtttaatggattcacagttccacgtggctggagaggccacacaatcatgattgagtgcaaaggaggagcaaaggcacgtcttacatggcagcgggtaagagtgtgtatgcaggtgaacttccctttatgaaactatcagatctcatgagacttatttactatcacaagaaatgagataaattggccataataaaggagctgcaggctccacacaagtttgaaatccaatagggcagtcattacaccttgaagttccaaaataatctccttgactccaagtctcayatctaggtcatactgatgcaagaggtggcttcccatggtcttggacagc

SEQ ID NO: 138991 - DNA, 592 bp, Homo sapiens
agcattcactccctaaccccaagttagaggacactggaaaatgtttacaagtagcatccaagggttcaataaaaccactccttacacctaagacaagtccttaccctcaaacattggagcttgctgtactggctacctagctctggctaatatggaacagggaacataaaaaggacaaaagagatgcttttattcacatggtggttaaagacagatttcaaaggatcagattgactttggtgtaaattccagctctgtcactgtgatcttgggcaagtttctttacttcactcaacctcattttcctttctataggatgaggataataaaattaggcktctgaagtgttgtaagaattaaatgttatggaggctctggaaacctggttcttgccattggtcctcaggccaactccatggacatggtctcagtctcagtcttagatcaagcagatatgtaaattgtgttttcacaccaaattgctctgaaaacttgcaagtacaaggcagtctcctgttgggagtgttatagcaggaagtaggatacagcgtttttggcgtggtagtcacagggtgaaggaagtaggaaaagg

SEQ ID NO: 138992 - DNA, 592 bp, Homo sapiens
agcattcactccctaaccccaagttagaggacactggaaaatgtttacaagtagcatccaagggttcaataaaaccactccttacacctaagacaagtccttaccctcaaacattggagcttgctgtactggctacctagctctggctaatatggaacagggaacataaaaaggacaaaagagatgcttttattcacatggtggttaaagacagatttcaaaggatcagattgactttggtgtaaattccagctctgtcactgtgatcttgggcaagtttctttacttcactcaacctcattttcctttctataggatgaggataataaaattaggcgtctgaagtgttgyaagaattaaatgttatggaggctctggaaacctggttcttgccattggtcctcaggccaactccatggacatggtctcagtctcagtcttagatcaagcagatatgtaaattgtgttttcacaccaaattgctctgaaaacttgcaagtacaaggcagtctcctgttgggagtgttatagcaggaagtaggatacagcgtttttggcgtggtagtcacagggtgaaggaagtaggaaaagg

SEQ ID NO: 138993 - DNA, 416 bp, Homo sapiens
attctatcattgtgagtcctcctgagacaccctctcaggtgttccagaagtaactggagagaygttaagggatggtggaggtggcagacccacaatagcacagtgagggaaatccagaaaaacagatcacacagtttgtcttttctggctacccaatcacataatttaaaaaaggacctgcctgtcttcaccaatgatgtcccactcccctcacaatgagtacaacagctgcaatgtataacagcttcccaacttaaggcacttgttcttctgcatctcttcctgggggcttcctccattgaggtgtgggaaagggggcttggcagagagagatttctcagcccacagctaggatggcctgtgatttgatgccctgagaggagagataggagttaaaggatgaatattcaattttc

SEQ ID NO: 138994 - DNA, 407 bp, Homo sapiens
attctatcattgtgagtcctcctgagacaccctctcaggtgttccagaagtaactggagagacgttaagggatggtggaggtggcagacccacaatagcwcagtgagggaaatccagaaaaacagatcacacagtttgtcttttctggctacccaatcacataatttaaaaaaggacctgcctgtcttcaccaatgatgtcccactcccctcacaatgagtacaacagctgcaatgtataacagcttcccaacttaaggcacttgttcttctgcatctcttcctgggggcttcctccattgaggtgtgggaaagggggcttggcagagagagatttctcagcccacagctaggatggcctgtgatttgatgccctgagaggagagataggagttaaaggatgaatat

SEQ ID NO: 138995 - DNA, 415 bp, Homo sapiens
tggctaacgctattctatcattgtgagtcctcctgagacaccctctcaggtgttccagaagtaactggagagacgttaagggatggtggaggtggcagacccacaatagcacagtgagggaaatccagaaaaacagatcacacagtttgtcttttctggctacccaatcacataatttaaaaaaggacctgcctgtcttcaccaatgatgtcccactcccctcacaatgagtacaacagctgcaatgkataacagcttcccaacttaaggcacttgttcttctgcatctcttcctgggggcttcctccattgaggtgtgggaaagggggcttggcagagagagatttctcagcccacagctaggatggcctgtgatttgatgccctgagaggagagataggagttaaaggatgaa

SEQ ID NO: 138996 - DNA, 408 bp, Homo sapiens
cgctattctatcattgtgagtcctcctgagacaccctctcaggtgttccagaagtaactggagagacgttaagggatggtggaggtggcagacccacaatagcacagtgagggaaatccagaaaaacagatcacacagtttgtcttttctggctacccaatcacataatttaaaaaaggacctgcctgtcttcaccaatgatgtcccactcccctcacaatgagtacaacagctgcaatgtataacagcttcccaacttaaggcacttgttcttctgcatctcttcctgggggcttyctccattgaggtgtgggaaagggggcttggcagagagagatttctcagcccacagctaggatggcctgtgatttgatgccctgagaggagagataggagttaaaggatgaa

SEQ ID NO: 138997 - DNA, 589 bp, Homo sapiens
aaattatcatgtctgtctagcacattgtaatggaataaatgccaaaagcactgttaagtcttctgaagaactctaaaataatattttttaagtcattgcacatagagtcagccttagactaacattagcctgctataatatagattcagtgagcaccgagcattgctctgattctcatctgcattctctctttctaattggtgattatgacatctctttatgttagttacataaacatccttccattagggccagtgatttttctcttgaaaagatgttggaacaaggtgtagaacaaactagtttgaccatctccttctgccttgttctaaattcaacagctctaaatgtgatttcttcttcttgaggaagtccatgctttatcatgctgtttctggtcttctgagatggaacctctacaacttcttccaggtgaagagaatgataatgcttatygtagttgtgcctcagaataatgtgtcctaggggtagaagtggggagaatttatctgacagctcccatcccataatatccatcagtggcacaaaggaggtcaactgcctgtcactcctgggtgctcccatgtta

SEQ ID NO: 138998 - DNA, 589 bp, Homo sapiens
aaattatcatgtctgtctagcacattgtaatggaataaatgccaaaagcactgttaagtcttctgaagaactctaaaataatattttttaagtcattgcacatagagtcagccttagactaacattagcctgctataatatagattcagtgagcaccgagcattgctctgattctcatctgcattctctctttctaattggtgattatgacatctctttatgttagttacataaacatccttccattagggccagtgatttttctcttgaaaagatgttggaacaaggtgtagaacaaactagtttgaccatctccttctgccttgttctaaattcaacagctctaaatgtgatttcttcttcttgaggaagtccatgctttatcatgctgtttctggtcttctgagatggaacctctacaacttcttccaggtgaagagaatgataatgcttattgtagttgtgcctcagaataatgtgtcctaggggtagaagtggggagaatttawctgacagctcccatcccataatatccatcagtggcacaaaggaggtcaactgcctgtcactcctgggtgctcccatgtta

SEQ ID NO: 138999 - DNA, 636 bp, Homo sapiens
ccccctgggcagataagaaataacacactcaacacactcagaagcagactggggttgtgattatgactgtgtcaggcaggatgagaaagggatgattacatgatggattgaacttcacaatgccacctttaatggaccatcttattgtagtttttccgttctagtatagagggcttcctgctcatcagagccaagggcrtgcatgtatgctagttgtttttctaggaagcctacaggtagcatcgtttatcccttcttgagttatgacttttgattcaattgagatgaaaaagaaagtaacttagataagatataaaaatatcctgcttactaataatgaagctggtactagagccagtggtttgtttctgtggacaggtgtacttcctaacactgacccccagaattaggcagacctatctatgtagtcacaagctgggttggaaaatcttaggtatgccctatgcgataagctacttttattcttggcagagagcagaacagatcatttactttacaggagggtgagtggttctgtgaaaaaggtaagcaggagatgttatgcaaagttgattgtttcaaactcacccatctaaataagtcaatgtttccctcagaagcagagagactagatga

SEQ ID NO: 139000 - DNA, 572 bp, Homo sapiens
ttttacctcaactatacaagcaattaaggcaacacataccttatgttctatgcaaatgatttccttcctcacatcttttcatgtatttgcctgcagtttgggattttgtgtctcacttgaccacatctgtatagaattatgctccttgggagtcacattccttctttgcctgtgaactgaggccacttagggagttctgtgaattggactgatgaaacacatttattatcacaattcaaacaagtgtcagttgaatgtttcagcagctgcaccattttagaagaaaaacaaactgggcctattcacattattttatgtaaactcaagtggaatgtgagaggaagagtcctgggaagttttttattgctcaagactattgcttgttgcaattgagaaatgtgggaaatagctgaagtgatattttggttaataatttctcaaccaatactttttgaaattttttttaatgcaataaatcttgagtgactgttttgtgcaaagcacaaactagttgcttcagggaacaaaatatactgcctggcattaagwgtctaacatgatatataaaggga

SEQ ID NO: 139001 - DNA, 576 bp, Homo sapiens
tgtcaccttttcttccttggactccgtggcccacagagttgggcatagttgtaaggaaatgtgtgtttcagtggggattggtgatggtggtagtggtggtcatggttagaggtgggaggacaattcttttcagcagtgacagacaataaatgaggctcaagaaaggagaaaaatttccattgaaaatgatgagttctagaaggagatttagctatatttaaaaaaaccatatctctgttggcactaaaaagaaaattcagaagacgcattggtccagatcaagatgatagcacctgataatccagtgaaaggatagcagagctggcaaggagcagcagtcaggatgtcttagaaggcctgatgaattaatcactgtgtcatggggaagaaatkcacctcacgcagaaatacacagagggtatccttctgaagattttatgtttcagcaccccacagagcttgggcgtaaccagggtggggctagccctgctaactgaagtataagcagcagaggtaatttaagataaaaatgaggattcctggcttcatgccttggctctgtcactaactagtttt

SEQ ID NO: 139002 - DNA, 610 bp, Homo sapiens
cattaaaaaacctgtgatattttttgaaacaagaaagaaagaaaggaaaaaaaattcttgaggttaaatgttttaccctgacatgtttgtatatattagcatttagttaacatctacatggttacaattctagcattagtattgaccttgtaagtaagtacaatgtagaacttaacctttactagactactaattctttttttaatcaacaaaatttccattcatttcttaacccctaaaatttatacctacaaaattttcattaacaaaattaattttgttactacaaaagtattaacataagaataacaatttctatttatttgttgttatatattattaatttgaacataattgctgtggataaaagctttacttcttcccttctygttttgtttcacactttggtatttcacaatatggccaacaaaattcacaagttatgatctgtatcattctttatatagcatgataatagttcaaatttattaatcacttttaatatgccaagcatataaagtgttttgcatgcaggaataaacaattttatgagatagttatgacccagctaaaagcacatcctctccagtcagaataatgggctaacctg

SEQ ID NO: 139003 - DNA, 203 bp, Homo sapiens
ggtcctgccgctgctgtgttgagagagctgcgttgcgtttgtttacagaccacgcarggagttcatcccaaaatgatcagtaatctgcaagtgttcgccataggcccacagtgctccaaggtggaagtggtgtaagttctgtgctgctgtgtccgctgtgaccttggcaagagagaaatcccgcagcctgggtcttcaacctt

SEQ ID NO: 139004 - DNA, 348 bp, Homo sapiens
agtttttccaacacaatctattgaagaggttattcattccctattttgtgttcatgrcacccttgtcaaaaattagttaactttatatgtttaagtttatttctgggttctttattctgtttcattaatctctgtgtctattttaatgtcagtaccatattgctttagttactataactttgtagtataatttcaaatcaggaagtgtggtgcctccagtgttgttcctgttcaagactgtttggggtcttttgtggtttcatattgctgtatgttgaatatttgtatctccctaaatattggaccctaattaccagtgccatagttttgggaaatagggccttcata

SEQ ID NO: 139005 - DNA, 348 bp, Homo sapiens
agtttttccaacacaatctattgaagaggttattcattccctattttgtgttcatgacacccttgtcaaaaattagttaactttatatgtttaagtttatttctgggttctttattctgtttcattaatctctgtgtctattttaatgtcagtaccatattgctttagttactataactttgtagtataatttcaaatcaggaagtgtggtgcctccagtgttgttcctgttcaagactgtttggggtcttttgtggtttcatattgctrtatgttgaatatttgtatctccctaaatattggaccctaattaccagtgccatagttttgggaaatagggccttcata

SEQ ID NO: 139006 - DNA, 360 bp, Homo sapiens
tagtattggccattcctttcaaccctgagccaccctgataactcagaggtggacaagtgatctaataagcctggccaagtcagaaaaatcccctgagaccactttggcaggaaatggctggaaaaatcatcccttgcttcctgctggattatagcttggagctttgccagtgctttgcataaagtaaagccagcacagagaaaggcagttagacctgcagtgagactggttattaaagagaatttttggactctaggatccaggtttatctcatctacacagcagtcaaataaagtaatgctactctctatttcaargggttgttatgatgaatgtgtcaatatttataaaacaccaata

SEQ ID NO: 139007 - DNA, 552 bp, Homo sapiens
taaacatgggcgaatctttaagaaatgagacaagaatctgctgctgctgttcttctggggcttctgtcaattccaggcatttgttgtaggctcagcatttggatttatccaagacagaagattgctacctggagcttctggtgagcacaaagacatgaaggggcacagttccaaaaatgtgggcctcaagcaaagagacagtatgtccctcaagatttgtgctaagttctaaagctgtgtggggtaagcaactaatgagttaagataaaatcgttctgaaaagcagagcaaaatttctcagtctggcagtgattaggagacaaagaacytccgagggagaaaccctgggaatacagcaaataaaagacagaagtgttggaggtggtcctgacttgatgctgcctaaataccctatcatcaagtaaaaatgtagactggggggaaaaaagacgtttatactgtttgtaagacacattttacatatgaggacagaaaacactagaaaataaatgtagaagaacatatatcacaaaacactaatgactagaaaag

SEQ ID NO: 139008 - DNA, 533 bp, Homo sapiens
ttactccgattaaatattttcattcccatgctcatgccacatataaacaaaagaaaatgagattttcatcagatttttagacattaatattcaaaattagtaaacagttgaacaacgtctaatgataagaaaagaacttttgaggcaagaattttagaattcactggccttcgaatcagacaaaatattttgaacacaaaataacccaggaaatattgactttgtgattactccaggtgctaactgaggatatatttcacttaaacaaaacactgagaaaactacattaggcaaattggtggtgaacactgaatattattaattataaattaagaacgaaaaaggctggtataggggagacaaaatgatacatgctcagagaaaaatttcagatatgtaaaaaggayagatagatgatagatatttttaaaatatatatatgcacatatatagtatatatacacttatatgctatacatttatatataggcatatgctcacctatggtgagtatatatgaaagagtagatatg

SEQ ID NO: 139009 - DNA, 617 bp, Homo sapiens
atacataacatataaatgttatatgttaaggcacttcaactaacaaaaaaaaagtatattataaaataagcccacttattgcctcatagatgatcacttcaagtaaaagcattttattaaagttgataaaaagtgaaagcagacatatatttttgaacacaaagatacacatcaaaaaagataacattattaactaaattaggatgagaggataggaagggataaaaggacaataaattttatttttttcataaaagaaatgaagaggagactgaagatatgaatataaaatgacagaaaactgcaaatactcaaaatagtagaatgataatggcaaaaaataacacagagaaacacagcagatactgaaaaagtgtgcgtatgtctgtgtgtgtatgtatatataagtatatttttayatgaatatcacaatatatgaaatggtagttgtatatatgtacatatatatacatacatgtacataatacacacatatatgtaagattcttaggtagttttgtctttgcatttttaaagtactttatctcaaattatacagcttggcaagtgtacagctacagatggagacactgtgtatatgataggaagtatcaagg

SEQ ID NO: 139010 - DNA, 603 bp, Homo sapiens
ttcttttttttcttaagttacttacatatgtttttcttttgttttgttaccatagcacaacctaccatgaactattataaatgtgttattggaaactctgtgttatcaagtgctttctcaaccagtagagattaaaaatacaactattttcaattgtctgtcaatatacccttttgtcgtattaaaaggtgtcctcatacattaaatcttcaaaacctgtgtcccaaggcagtttgtcccatgaagagctaaaatatgatatgatgtgatatacccatgtacccatgtttatttttcctgaacatatgttatctatttgtgaattcatgtttctttctacttataccttgagaattattgaaatcttatttgagmaaacaacctgattatttgtgaatctgattgataaattctgctttccagaataaaaaacgaaagagtggccataacaaaaaccaagtaacatttataaaagagagttcagaatgtagaatggaactactatgtagattttgacagatatcttacacacagatattctgaatattccgcatatgtagtgtattagtccattctgtggctgctgtaaggacatacctgaga

SEQ ID NO: 139011 - DNA, 596 bp, Homo sapiens
tgagactctaaaaaagagtatattgaaatatgtttagtttatgatgtttagaaagattaatataaaaagtctctagcaaaatcctgaggtccctgtataattctggacaaaagaatatgagggtactatctatctggtttaggattgttcaaaattcatgtcgttatgcattttgaaacatttgtaaagccccaatgatacagtgtttctattaatcaataatttattgggactctgttatgtaccagccttctaatctcaagtgtttttcagtatctgctgtggtatccaaatgatacttgttagtatccattcaacatagagcaatgtaaactttaaaaagcagatagctggttatgtatgtacaactcattaggactcgtttytgtcttatttagacaatcccctagtaagaaaaagcaatgaggagagattactgagattcatataaacactagtgttttatacttaagaaaaatatatattagttatgatagaaccagctttgctgaagtgaaacacatctgcaaatatctctgtggcttaaggcaataaaaaggtttgtttcatggtatatcacaggctggttagaaagg

SEQ ID NO: 139012 - DNA, 556 bp, Homo sapiens
gctaagtgaaatttcagtagagtgttctgcttacctagaagacaaaaaagacaaaaagattggtactgatgagaaatgttaatatctcttgtgtttaactcatttaaattaaaaagattagtgaagatcttctatgaagaaaacattgtgtcatactatgttgtacacagaaatgagcaagatgcagtcactgactagaatacattcaatctaactgagctagcatatttacaccactataataatgaaaagtagaatgtaatgtcatattaaatttgacattgactccaaaattttataggggtcaaaaagtacaattgtaaggtaaagtttaggagatgctaaatgactactcacttgtcttagttctcttaagctccacatttacaragacatctatatttcacaataagaggctgattcagtaatttggttaatattttattttagtgaagaattgtgcttataaaataacaagacaaatatagaatagcatataaaaatcgcctaaatatagtttcattatattattcactaaataattttatgaattgcc

SEQ ID NO: 139013 - DNA, 543 bp, Homo sapiens
acttagagaaaaaaatttgtcctccattttaccaagtggctgattaaaaatccattgcctttctctttgaaaacaatctaaaaatcttcttgatagacatttacaccaggctatgcttatagaatgtaaatcagaccaaaacaaatggagaagatcttatacatcaatggaaagaatcactatcaaagacatcttttctgaaattgattaaaatattgaatagatttcaattaaaattccaacagagatatttgaggagcttgccaagattcccattgtcatgaagatgtggactaagaggaatgcttatatatagcaaatggttawgtgacattgtacatgaactttgaaaattcaatctggcattttcttgtagagttaaaaatatgtataccttgtacctccacaaaagtctagagaaatttttgccgtgtatgccaagagacttcagaaaatgtagccctgaatgtcaagagacttcatcgagagtattcattgcagctttgtattaaaaaaaatcctagaaataatacaaatgatgat

SEQ ID NO: 139014 - DNA, 563 bp, Homo sapiens
tataacaactttaacttatatttactaattttctcctaccttatagcatttaatcatgcttgtgtaagtgttgggtaacatgactttattattgctggatctctggtccaggccagacctcatgaattccagagaataaacatttctcactccaaaccctcaaatggggcaaaggtttttgaatagtcagaaaagatttggttttgcatctttttttttacttgaatgtttctcttaagctttccccagatattcatgcttgccaaatctattaagtaaagtacttagtgtttgtggactcrtgttgaacaagtagagcctcgttccctataatcatataaaataggagatgctttcatttgctgaacagcatgatgtaggattctatcaacggttgtgcttctcaaagacaaggtaaatgtggctgctgctaaattaacctttccttaaaacaaagctggattgtgttttctggtggctagtcacaaaatgggtaaattctttggctcagggtaaataccacctgctgataatagttatttccttagtctcaattttaatta

SEQ ID NO: 139015 - DNA, 563 bp, Homo sapiens
tataacaactttaacttatatttactaattttctcctaccttatagcatttaatcatgcttgtgtaagtgttgggtaacatgactttattattgctggatctctggtccaggccagacctcatgaattccagagaataaacatttctcactccaaaccctcaaatggggcaaaggtttttgaatagtcagaaaagatttggttttgcatctttttttttacttgaatgtttctcttaagctttccccagatattcatgcttgccaaatctattaagtaaagtacttagtgtttgtggactcatgttgaacaagtagagcctcgttccctataatcrtataaaataggagatgctttcatttgctgaacagcatgatgtaggattctatcaacggttgtgcttctcaaagacaaggtaaatgtggctgctgctaaattaacctttccttaaaacaaagctggattgtgttttctggtggctagtcacaaaatgggtaaattctttggctcagggtaaataccacctgctgataatagttatttccttagtctcaattttaatta

SEQ ID NO: 139016 - DNA, 471 bp, Homo sapiens
gatatgtgttctgtctatgaattgcgagaaacacacagtcactttgaggaagataggacataggaacattacaaacaaaaaaaggcaaaagaaaaatagatgaaagagatttttattatttttattcctgcgtttttccctgggtgttttagataattctttgtgccttagagaacaatattagagcatgaaaggaagccttttgttagtattttaattttttcttacccttattctttattatcacrgtttgcattattgatgagacaattttagttaataggtagttcccttagaatgggaaattccattcgagaaacaattatgggcatctcacaattttgtaagtaacatttttactaagtaagtggtatttaacttacaacgaggtgataaagaacatggatttgaagatacagagtgttacttgtgggtctcagaattaaaaatttggcaatctactcagttctt

SEQ ID NO: 139017 - DNA, 651 bp, Homo sapiens
aaaacctagatattttatatatatatatatatatatatatatatatatatatatatacacatatgtcattcraatgctaaccatagatgtatcatctgtactattgcatatataatatttttgttatattgttcaaatttttttatggttcattttatttaaagcaaagttaaagcagacatcctaggcaacaccaatgaaaacataagtgtggggtgtatttgcacatatcaaaatatatatttagctattaaaatacatggtatttattttccatctaaaatcatttcaccatgtcacctctagtggtaagtgacatatgaacagctaatctgtatgaatatgcctcttttaaaatggaacaaattggttttacaaaagaaggtaaataagagaaaaactatgaaaattttggcttcaatcctaccccaccaatggttgctgtacaaacagaagtgagtcaactgagtctaacacactcatgtgagaaataatagtagcagtcagtgaatctaacacgttgcttttataactgctaatattctatgactatgccagcttccaactttgctttatattcctctaatggaaattgttttccattaccagcaaaaatgagaaaaaacagaaattttagaaattttttagtca

SEQ ID NO: 139018 - DNA, 651 bp, Homo sapiens
aaaacctagatattttatatatatatatatatatatatatatatatatatatatatacacatatgtcattcgaatgctaaccatagatgtatcatctgtactattgcatatataatatttttgttatattgttcaaatttttttatggttcattttatttaaagcaaagttaaagcagacatcctaggcaacaccaatgaaaacataagtgtggggtgtatttgcacatatcaaaatatatatttagctattaaaatacatggtatttattttccatctaaaatcatttcaccatgtcmcctctagtggtaagtgacatatgaacagctaatctgtatgaatatgcctcttttaaaatggaacaaattggttttacaaaagaaggtaaataagagaaaaactatgaaaattttggcttcaatcctaccccaccaatggttgctgtacaaacagaagtgagtcaactgagtctaacacactcatgtgagaaataatagtagcagtcagtgaatctaacacgttgcttttataactgctaatattctatgactatgccagcttccaactttgctttatattcctctaatggaaattgttttccattaccagcaaaaatgagaaaaaacagaaattttagaaattttttagtca

SEQ ID NO: 139019 - DNA, 566 bp, Homo sapiens
tagcttacatgattatggagacagtcaagtgcaaaatctgcaaagccacatcctagcttgggtctgagggccagaasctgcagcagaaccaggaagagctaatgtttcagtttgaaggccatcaggcaggagaattctctcttagtcttttgttctattcaggccttcaatggatggccaccttagaaagggcattctgtttcactcagtctactgagttaaatgtgaatcccattcagacatactctcacagaaacacccagaagagtgtttgaccaaatatctggccactctatgtccctgtcaacttgacaaattaaccatcacacccattttatagataaagcaactgagacactgataatttaatctatttgctctgaatcctaatcaagtggttggaatatagtttttttcaaaaaaaaaaaaaaagtcatggtccttgttctatatagtactcctgcattggctatcccctgaactccagaataaaaataaatgaataaaaatgttaaatttacatttttcattgttttcacctgtggctgtaaaagaaagattaactt

SEQ ID NO: 139020 - DNA, 511 bp, Homo sapiens
gcccagactggagtgcagtggtacaaacatgacttacgcagcctcaacctctgggctcaagaaatcctccttcctcagcttcctgagtagctgggaccacwggtgtgcaccaccatgcttggataatttttaaaatttttgtagaaacagggccttgccaggttgtctaggctgttctcaaatttctgggctcaagcaatcctcctggttcagcctaagtgctggtatgaaccaccatgcctgaccagaaagacattttagatggagataaaacatgagaaatgacaaaaaagaaaagaataacatactatgtagcaaaaagaagcacaaccattccagagcagagaatatctgttcagaggtactttaggtgggattgtgtagatagtgtagccccatggagggacactaatgtaagactgagttgtgtcaatatgagttcatggtcaacaggttgtcattgcagatgcaagaaagagagaagatataataaaactggaattccaggaga

SEQ ID NO: 139021 - DNA, 591 bp, Homo sapiens
tgattctatttcaatcttttcgtgtgtaaaagttatttgcagaaaatcttcaggaaaaattattcttggggcttacaacaaatgtccactacatcatctgaaattatgawcaaaagtcacagaaaaaacaacagtagcccacaaagtggtattggctctgttcagcaaaatatgttttgttatccatttattatagatatatagaggtctgctctctacaaaagattacaatatcattaaactgcattttgattcattcctttcaaaagtaatatactactatcatttttacaaagtgcattggatattcctcctattataaaggcaataccattcctttgaagaacatttggaaaatacagaaaaacaacaaaaaggaagacaattacttgtaatcctgtcacctaacttagccacttcatttggctctatatctgggtctatatgtaaattagaatctccttgcatattctactttgtaacttgaattttccatttgatattatataataaatatttaccatgtttttatgattctcatacattttaatggctgcctactgcatcacatatagttgaaccatactttat

SEQ ID NO: 139022 - DNA, 591 bp, Homo sapiens
tgattctatttcaatcttttcgtgtgtaaaagttatttgcagaaaatcttcaggaaaaattattcttggggcttacaacaaatgtccactacatcatctgaaattatgaacaaaagtcacagaaaaaacaacagtagcccacaaagtggtattggctctgttcagcaaaatatgttttgttatccatttattatagatatatagaggtctgctctctacaaaagattacaatatcattaaactgcattttgattcattcctttcaaaagtaatatactactatcatttttacraagtgcattggatattcctcctattataaaggcaataccattcctttgaagaacatttggaaaatacagaaaaacaacaaaaaggaagacaattacttgtaatcctgtcacctaacttagccacttcatttggctctatatctgggtctatatgtaaattagaatctccttgcatattctactttgtaacttgaattttccatttgatattatataataaatatttaccatgtttttatgattctcatacattttaatggctgcctactgcatcacatatagttgaaccatactttat

SEQ ID NO: 139023 - DNA, 591 bp, Homo sapiens
tgattctatttcaatcttttcgtgtgtaaaagttatttgcagaaaatcttcaggaaaaattattcttggggcttacaacaaatgtccactacatcatctgaaattatgaacaaaagtcacagaaaaaacaacagtagcccacaaagtggtattggctctgttcagcaaaatatgttttgttatccatttattatagatatatagaggtctgctctctacaaaagattacaatatcattaaactgcattttgattcattcctttcaaaagtaatatactactatcatttttacaaagtgcattggatattcctcctattataaaggcaataccattcctttgaagaacatttggaaaatacagaaaaacaacaaaaaggaagacaattacttgtaatcctgtcacctaacttagccacttcatttggctctatatctgggtctatatrtaaattagaatctccttgcatattctactttgtaacttgaattttccatttgatattatataataaatatttaccatgtttttatgattctcatacattttaatggctgcctactgcatcacatatagttgaaccatactttat

SEQ ID NO: 139024 - DNA, 567 bp, Homo sapiens
aaaacttgcatactatagttcacattttaaaacatagaacgaaagcaccaataatgtcaaagaaaacaaatatgtttatcwtgtttaattcaggctatcccaaacttatttgagcccagaacttgtctttcttcctttaacgtccatggatgtcctgtacaacacactttggccccaaaggagagcaagctgagagtgtgttctgcagccttacacaccactccagctatgacaccttatggggtgactccgtttgctttgagaacatatcatttttttttaaataaatgtttataattatcatgtcctgccagttttcccccaaccgcaatttagccccttgatgagtgctcacatttacaaactttctaaaacatccagaatgactaagagtgatagcaggaacagggggcctggctctgggtgccaggagtagagaaggccaggcctgatgtaggaaagctctctgtgcataagaacatggacgaggtgagaacaatgtttgttcctcctcaaatatacaattctataacactgtatttctcaatgtctcaagacaaggatctg

SEQ ID NO: 139025 - DNA, 525 bp, Homo sapiens
cagtgctgaaacggggaggaagcggggcacaccaggcagagatggttccccagaggaggagatgcytgagttgaacctgaacaaatgagttaacccatggaaagcaaagtcagaaaagcctcacatttcaggcaggtaacaggataaacccagaagtcaaacaatggcaggacttgagccacaaggctgggaatatggaacatagttgcaggtctggagccacagagcggcttaaaaaagagaaagcagcagaactcctggcctgcacatggattcggtattgaaagaggactgaacaattcaggagcaggcacagaaagaattcagtagtagagaccaatgaagcagcccagcgctatcaactgctgccacagtgtgtgtgtggggtgtgtgtgtgtgtgtgtgtgtgtgtgtgtgtgtgtttgtgtgttttcagacagcaggagtgatataggaagtggtgatagttggtagcagagaaaaccaaaatggagataaggaagtggaggctgcataaggcaaatg

SEQ ID NO: 139026 - DNA, 525 bp, Homo sapiens
cagtgctgaaacggggaggaagcggggcacaccaggcagagatggttccccagaggaggagatgcctgagttgaacctgaacaaatgagttaacccatggaaagcaaagtcagaaaagcytcacatttcaggcaggtaacaggataaacccagaagtcaaacaatggcaggacttgagccacaaggctgggaatatggaacatagttgcaggtctggagccacagagcggcttaaaaaagagaaagcagcagaactcctggcctgcacatggattcggtattgaaagaggactgaacaattcaggagcaggcacagaaagaattcagtagtagagaccaatgaagcagcccagcgctatcaactgctgccacagtgtgtgtgtggggtgtgtgtgtgtgtgtgtgtgtgtgtgtgtgtgtgtttgtgtgttttcagacagcaggagtgatataggaagtggtgatagttggtagcagagaaaaccaaaatggagataaggaagtggaggctgcataaggcaaatg

SEQ ID NO: 139027 - DNA, 525 bp, Homo sapiens
cagtgctgaaacggggaggaagcggggcacaccaggcagagatggttccccagaggaggagatgcctgagttgaacctgaacaaatgagttaacccatggaaagcaaagtcagaaaagcctcacatttcaggcaggtaacaggataaacccagaagtcaaacaatggcaggacttgagccacaaggctgggaatatggaacatagttgcaggtctggagccacagagcggcttaaaaaagagaaagcagcagaactcctggcctgcacatggattcggtattgaaagaggactgaacaattcaggagcaggcacagaaagaattcagtagtagagaccaatgaagcagcccagcgctatcaactgctgccacagtgtgtgtgtggggtgtgtgtgtgtgtgtgtgtgtgtgtgtgtgtgtgtktgtgtgttttcagacagcaggagtgatataggaagtggtgatagttggtagcagagaaaaccaaaatggagataaggaagtggaggctgcataaggcaaatg

SEQ ID NO: 139028 - DNA, 426 bp, Homo sapiens
tatagtaacataaagcagaacagtgattgcatggggatgataggattacaggggtagtgggaggaagggtttacaaaggggcacaagaaacttttggaagtgatggatatagtcatcttgattgtggtgatggtttcagaggggtacatatgtcaaaattcatcaaatttacactttaaacgtgaaatttactgtatgtcagttatacttcaataaagctgtttcaaaaagctataatgagatatagttcacctcagactggcatatatactgcatgtattattacgtattatatatgtgtgtatatatatatatatatatataaaaaaaactgygtggcaagtttgtaaagaaaaaacactcatattgttgctggaaatgtaaataggtacaacttcaatggagggctaattgataatatcaaaa

SEQ ID NO: 139029 - DNA, 488 bp, Homo sapiens
tctggtctcctgcagatccttgatttggtccctgtccctctctgacaatagtgtctgagaacaaaatgctctcgcccttttatgttttctttccatggaattgatatgtgtgtgtgtgtgtgtgtgtgtgtgtgtgtgtgtgtgtgtgtgtgkcttgtggcttagaggtaggtcctgaaaaaagcagagattgctgtagatcctttccccatacacttggttttaaccgattacctgagccatttgagggtgttagaatttgagagaattagggcaaggcaaaggaaggacagatgagctttttttctgtcaacttttattttaggttcagggggtccatgtgcaggtttgttacataagtagattgtgtgtcactggggtttggtgtacaaatgatgatgtatccaataggtagttttctgagctttatcctcctcccactcttcccctcaagtaggccccagtgtctattgttcccatctttgtgt

SEQ ID NO: 139030 - DNA, 409 bp, Homo sapiens
ttgtcaaataataagagaaagctttaaactgaaagttttgtaaaatttggaggaattctcttacagtcctgctaataaccctggcactgtatacccagtacaggccactagagctgttctgtggaaatcgttgaattgtttattttggtttggtttgtttgtttcccctctgccctttcacattcagttttaaattttttgtttgctttcagtttctctctctcttttttgtttttttaatttgagacagggtcttgctctgttgcccaggctggagtgcagtggtgtgatctcagctcactgcagcctcaacctcccgggctcaatcaatcctcctgcctcagtrtcccatgtagctgagaccacaggcgtgccaccacgcccagctaatttttgtatttttggtagc

SEQ ID NO: 139031 - DNA, 562 bp, Homo sapiens
tctttttggtaaaagccatcctaacaggtgtgaggcaagatgtccttgtggttttgatgtgcctttccctgataatgagtgatgctgagcacctttccacatagccactggacatttgtacatcttctttagagaaatgcccattccagtccttctcccatactttaacggggttatttgtgtttatacttctgagttgtttgagctgcttttattttttagatattaacccctcatctgatacatggttttcaaataattcctcctaatccattggctgccktttcattttgttgattatttcctttgctgtgcagagactttttggtttgatgcaacttcacttgtctatttttgcttttgttgcctgtgctttgggtgagatatatatataaaaaaaatgcttgccaaggaaaatagcaaggggctttccccctgtgtttcctcctaagagttttatcgtcttaagttttgatttttgtgtatggtgttagataaggcgccttcattcttttgcatgtggatattcatttttcccaacaccatttattgaagagactat

SEQ ID NO: 139032 - DNA, 562 bp, Homo sapiens
tctttttggtaaaagccatcctaacaggtgtgaggcaagatgtccttgtggttttgatgtgcctttccctgataatgagtgatgctgagcacctttccacatagccactggacatttgtacatcttctttagagaaatgcccattccagtccttctcccatactttaacggggttatttgtgtttatacttctgagttgtttgagctgcttttattttttagatattaacccctcatctgatacatggttttcaaataattcctcctaatccattggctgccgtttcattttgttgattatttcctttgctgtgcagagactttttggtttgatgcaacttcacttgtctatttttgcttttgttgcctgtgctttgggtgagatatatatataaaaaaaatgcttgccaaggaaaatagcaaggggctttccccctgtgtttcctcctaagagttttatsgtcttaagttttgatttttgtgtatggtgttagataaggcgccttcattcttttgcatgtggatattcatttttcccaacaccatttattgaagagactat

SEQ ID NO: 139033 - DNA, 611 bp, Homo sapiens
atccctcttccctggagtaagcaggacattcacttacttccagccatgactattttagtgagtgcccatgactttggaataatgtagtcacccaacacatttttcaaagtttgcagatgagcaaatctaggccacaaatttctcyacttttttttgtctctcaaagataaatacaagatgataggtgctgggcttggtgaggatgagtgctattcatcatggataagatttggactcaacttgtggaacttggctcaaactgctccctgctccttccttgagtagcaaacccaacttcttatccaaaaggagcagattcttattgtcactcggattgccagaccataatggatttttccaacttcaatgcattttctaccccaaacacatttgctctcatgaacacatacagctgtccacagcaccctaactctaagcagtttcaattgccaacatttgtcaaaatgggagaggctgtgtctgttttcttcataggtacaatagagaaaaagtttgctttgtttttgtaattgtcatttaaatatattttcaatgatggcaattttactgagctttgttgtgtattacacacttaggataaatgtgtcagt

SEQ ID NO: 139034 - DNA, 488 bp, Homo sapiens
cagcgactggcatccagagatctgctgtaatgaccccacaaagctagtaatttcacaaagctagtaagtgatagcccgggttgcaccaggtctcctgactctgtccagtcctctttccgccatccacagtctgtctcaactgtcagatatgtagaaggtctttaaacatgcgagctcacttcccacttctgaggctgtgaggaaatggtactcccttcactttgggcataaamgcaatgaacataatccaggatatgagagaaaattttctgccttgtcaaatactccaaacatcagtctatcattggcctctagggaatcagttcattattacaagctgagtgtgcagacagtaagtagacaattacaggaaaccctagggacatctgccagggtcttgtagtagacatttttcattttttctggcctcccaactagggaactccatggacgtgattagtggaggagcccacctcccacagaaaagc

SEQ ID NO: 139035 - DNA, 578 bp, Homo sapiens
ggcatttttctttcatgtagatgcaagctctctggcatttttacaatcaaaatagttccgttgtcaatttttcattctgtattggaagtaattggtaggtatttctgaagggatgaaggtgtttctgtgttcattgtgatccaaactttttttagacctagtggtgtttgtaaaacaatttgtgccagctgaccaaggaccactgtggcagaaagcagcaaacttgcataagatgtcactgcctcatcagttggctttgaaaactaggggctatcaaagacattgatagatgtagtataagattacaatcatattttccttttgacagtcacattataaagcatgatgtattgcaattaatctcaattagctgatgacaattaaaattaatagtttattattgctgataaacaatcatgactctcctsttctcaaatgtgcaagtaattcttgtaattttaatacaaatttgcatattactaattgatttaatctcattgtatttggttcatggatccaatttattaaaatattgataatggggtaatgatttatctccccatttcatttacactaaa

SEQ ID NO: 139036 - DNA, 578 bp, Homo sapiens
ggcatttttctttcatgtagatgcaagctctctggcatttttacaatcaaaatagttccgttgtcaatttttcattctgtattggaagtaattggtaggtatttctgaagggatgaaggtgtttctgtgttcattgtgatccaaactttttttagacctagtggtgtttgtaaaacaatttgtgccagctgaccaaggaccactgtggcagaaagcagcaaacttgcataagatgtcactgcctcatcagttggctttgaaaactaggggctatcaaagacattgatagatgtagtataagattacaatcatattttccttttgacagtcacattataaagcatgatgtattgcaattaatctcaattagctgatgacaattaaaattaatagtttattattgctgataaacaatcatgactctcctcttctcaaatgtgcaagkaattcttgtaattttaatacaaatttgcatattactaattgatttaatctcattgtatttggttcatggatccaatttattaaaatattgataatggggtaatgatttatctccccatttcatttacactaaa

SEQ ID NO: 139037 - DNA, 578 bp, Homo sapiens
ggcatttttctttcatgtagatgcaagctctctggcatttttacaatcaaaatagttccgttgtcaatttttcattctgtattggaagtaattggtaggtatttctgaagggatgaaggtgtttctgtgttcattgtgatccaaactttttttagacctagtggtgtttgtaaaacaatttgtgccagctgaccaaggaccactgtggcagaaagcagcaaacttgcataagatgtcactgcctcatcagttggctttgaaaactaggggctatcaaagacattgatagatgtagtataagattacaatcatattttccttttgacagtcacattataaagcatgatgtattgcaattaatctcaattagctgatgacaattaaaattaatagtttattattgctgataaacaatcatgactctcctcttctcaaatgtgcaagtaattcttgtaattttaatacaaatttgcatattactaattgatttaatctcattgkatttggttcatggatccaatttattaaaatattgataatggggtaatgatttatctccccatttcatttacactaaa

SEQ ID NO: 139038 - DNA, 578 bp, Homo sapiens
ggcatttttctttcatgtagatgcaagctctctggcatttttacaatcaaaatagttccgttgtcaatttttcattctgtattggaagtaattggtaggtatttctgaagggatgaaggtgtttctgtgttcattgtgatccaaactttttttagacctagtggtgtttgtaaaacaatttgtgccagctgaccaaggaccactgtggcagaaagcagcaaacttgcataagatgtcactgcctcatcagttggctttgaaaactaggggctatcaaagacattgatagatgtagtataagattacaatcatattttccttttgacagtcacattataaagcatgatgtattgcaattaatctcaattagctgatgacaattaaaattaatagtttattattgctgataaacaatcatgactctcctcttctcaaatgtgcaagtaattcttgtaattttaatacaaatttgcatattactaattgatttaatctcattgtatttggttcatggatccaatttattaaaatattgataatgggrtaatgatttatctccccatttcatttacactaaa

SEQ ID NO: 139039 - DNA, 360 bp, Homo sapiens
acttcaaaaagaaaccccaccttctctagctgttaacctcttatgcactcatcccctactcaatcctaagcaacmacaaatctgttttctgtctctgtagattttcctattctattttcatctaaatagaatcatacaataggtggccttttgtgcctggcttctttcagttggcataatgctatcaaggttcatatgcgtattggtactttatttctttttataactgtataacattcaatttcatggatataacattttgtttatccaataatatttttattgacatttgagttgtgttcagcctttggctattttaaatactgttgctaaaaatactcgtgtacaatttgtgtttga

SEQ ID NO: 139040 - DNA, 360 bp, Homo sapiens
acttcaaaaagaaaccccaccttctctagctgttaacctcttatgcactcatcccctactcaatcctaagcaaccacaaatctgttttctgtctctgtagatyttcctattctattttcatctaaatagaatcatacaataggtggccttttgtgcctggcttctttcagttggcataatgctatcaaggttcatatgcgtattggtactttatttctttttataactgtataacattcaatttcatggatataacattttgtttatccaataatatttttattgacatttgagttgtgttcagcctttggctattttaaatactgttgctaaaaatactcgtgtacaatttgtgtttga

SEQ ID NO: 139041 - DNA, 360 bp, Homo sapiens
acttcaaaaagaaaccccaccttctctagctgttaacctcttatgcactcatcccctactcaatcctaagcaaccacaaatctgttttctgtctctgtagattttcctattctattttcatctaaatagaatcatacaataggtggccttttgtgcctggcttctttcagttggcataatgctatcaaggttcatatgcgtattggtactttatttctttttawaactgtataacattcaatttcatggatataacattttgtttatccaataatatttttattgacatttgagttgtgttcagcctttggctattttaaatactgttgctaaaaatactcgtgtacaatttgtgtttga

SEQ ID NO: 139042 - DNA, 360 bp, Homo sapiens
acttcaaaaagaaaccccaccttctctagctgttaacctcttatgcactcatcccctactcaatcctaagcaaccacaaatctgttttctgtctctgtagattttcctattctattttcatctaaatagaatcatacaataggtggccttttgtgcctggcttctttcagttggcataatgctatcaaggttcatatgcgtattggtactttatttctttttataactgtataacattcaatttcatggawataacattttgtttatccaataatatttttattgacatttgagttgtgttcagcctttggctattttaaatactgttgctaaaaatactcgtgtacaatttgtgtttga

SEQ ID NO: 139043 - DNA, 276 bp, Homo sapiens
aataattttcagagaaaagtaaatatttgtcattcaaaggcatctaagyatgcaaggaaatgatattccaccatttgaaaggaaagcagaaaaagagtacaaacagatccacaaaggttcattagtagaaatatcactgttagattataaagcacatttgctttcaaaaaattttttaaaaaatgaatatattgttaggagactaaaaaattcatgtagcaaatttgaaaagtagtttgtataaaaatatagttattttaaattaaaaactcaaaa

SEQ ID NO: 139044 - DNA, 276 bp, Homo sapiens
aataattttcagagaaaagtaaatatttgtcattcaaaggcatctaagcaygcaaggaaatgatattccaccatttgaaaggaaagcagaaaaagagtacaaacagatccacaaaggttcattagtagaaatatcactgttagattataaagcacatttgctttcaaaaaattttttaaaaaatgaatatattgttaggagactaaaaaattcatgtagcaaatttgaaaagtagtttgtataaaaatatagttattttaaattaaaaactcaaaa

SEQ ID NO: 139045 - DNA, 276 bp, Homo sapiens
aataattttcagagaaaagtaaatatttgtcattcaaaggcatctaagcatgcaaggaaatgatattccaccatttgaaaggaaagcagaaaaagagtacaaacagatccacaaaggttcattagtagaaatatcactgttagattataaagcacatttgctttcaaaaaattttttaaaaaatgaatatattgttaggagactaaaaaattsatgtagcaaatttgaaaagtagtttgtataaaaatatagttattttaaattaaaaactcaaaa

SEQ ID NO: 139046 - DNA, 538 bp, Homo sapiens
ctcccacccccctgacaggccccggtatgtgatgttcccctccctgtgtccatgtgttctcattgttcaactcaaaagaaaaacagaagcatttcctgctttcccaatttcttagatacaatgcaactttatgtttaatttaactaacttaattttttgagacaaggtctagctctgttgcccaggctgcagtggagtggcgtsaatatggttcagtgaaacctccacctccctggctcaagtgatcctccttcctcagcctctcgcgtagctaggaccacaggcacgcaccaccatggccagctaatttcttttttattttttgtagagatgaggtctcactttgttgtccacgctggtctcaaactcctgggctcaaaggatcctcttgccatggcctcccacagcgctgggatttataggtgtgtgccatggcaccgggcctaagcaactgtagagaagccttttttttctttcataaaaacagttgtagatattttccttatggaatttatttgtggtgaaatattttaataga

SEQ ID NO: 139047 - DNA, 609 bp, Homo sapiens
aggaattcaaacatatcaacagcaaagaagcacaacaatctaattaaatataaacaaatgctctgaacagacatttctcaaaagaagacatacaaatgaccaacaagtatatgaaaaaatgttcaacaccactaatcagcaaggaaatgctaatcaaagccacagtgaggcatcatcttactccagttaggatggctattatggaagagacaaaaataacaaatgctgacaaagacgtgaagaaaagggacttttttttgacagagtctcactctccatccaggctggagtgcagtggtggtgtaatctggctccctctgcttctagggttcaaatagttctcctccctcagcctcctgagtagctggagaaaaaggaactcttatgcactgttggtaggaatgtaaattagtgcagccagtatggagaacagtattgaaacacctcaagcaatcccactactgggaayttatccaaaggaaagaaaagcattatattgcagagacatctgcatccccatgtttattgcaacagtgttcacaatagccaagatatggaatcaacctagtttccaacaacagatgaatggacttttaaaatatggtatat

SEQ ID NO: 139048 - DNA, 600 bp, Homo sapiens
gtggctggcccagatattgaccctacacagttgcctcctcctggtgactaccagctatggaaccgttggatacaacctacctgactcaccccacagacctcacagcgcacatggacagcccccacacgccagagtgacctgctcggttgcagcgggagtcaagaaatgtgcctgctggcactcaccccaccgactagtgccccgtggaaaacttatttgggtaatgttctgggcccaataaaagctagagtcccacagaccccttttctctctccygctccccactcatcttccccattttgttcagccctatgaggtgtgctactgtattagtccattttcacaccaccggtaaagacatgcccaagactgggtaatttctagaagaaagaggtttaatacacgcacagttccacatggctgggtaggcctcacaatcatggcgcaagctgaaaggcacgtctcacatggcagcagacaagacaagagagcttgtgcagggaaactcctctttataaaaccatcagatcttgtgagacttattcactatcagaagaacagcatgggaaagacctgcccccatgattcaattacctccca

SEQ ID NO: 139049 - DNA, 600 bp, Homo sapiens
gtggctggcccagatattgaccctacacagttgcctcctcctggtgactaccagctatggaaccgttggatacaacctacctgactcaccccacagacctcacagcgcacatggacagcccccacacgccagagtgacctgctcggttgcagcgggagtcaagaaatgtgcctgctggcactcaccccaccgactagtgccccgtggaaaacttatttgggtaatgttctgggcccaataaaagctagagtcccacagaccccttttctctctcccgctccccactcatcttccccattttgttcagccctatgaggtgtgctactgtattagtccattttcacaccaccggtaaagacatgcccaagactgggtaatttctagaagaaagaggtttaatacaygcacagttccacatggctgggtaggcctcacaatcatggcgcaagctgaaaggcacgtctcacatggcagcagacaagacaagagagcttgtgcagggaaactcctctttataaaaccatcagatcttgtgagacttattcactatcagaagaacagcatgggaaagacctgcccccatgattcaattacctccca

SEQ ID NO: 139050 - DNA, 600 bp, Homo sapiens
gtggctggcccagatattgaccctacacagttgcctcctcctggtgactaccagctatggaaccgttggatacaacctacctgactcaccccacagacctcacagcgcacatggacagcccccacacgccagagtgacctgctcggttgcagcgggagtcaagaaatgtgcctgctggcactcaccccaccgactagtgccccgtggaaaacttatttgggtaatgttctgggcccaataaaagctagagtcccacagaccccttttctctctcccgctccccactcatcttccccattttgttcagccctatgaggtgtgctactgtattagtccattttcacaccaccggtaaagacatgcccaagactgggtaatttctagaagaaagaggtttaatacacgcacagttccacatggctgggtaggcctcacaatcatggcgcaagctgaaaggcacgtctcacatggcagcagacaagacaagagagcttgtgcagggaaactcctctttataaaaccatcagatcttgtgagacttattcactatcagaagaacagcatgggaaakacctgcccccatgattcaattacctccca

SEQ ID NO: 139051 - DNA, 561 bp, Homo sapiens
gttaaaaggtgtgagggtatcaatattgttgtggctattggggaggaaacattagtaaaaccatttagttaaagctattgctttaaactttggctttaatttaacaaatgttctatggagtgacagtatgtatgtaaccatgctatgcccattcacagatgcagtagagggaagaatttctcaaagacaactgttctaacactcaaattaaaccgtactgggtttgaaaagagaaagtccaggaattaccaaatattttagatatcagataaaagagaatgccaggtatgcgatgataatcagcaatggttgttcacacaatacatcaaatcagtatttgaattagcttttgaattacaaggacaaatggaycaagtctagactctttagtagataaatcttattaggctgagatgtgttttcccctgtttttccacaaggagattacaaatttgcaaacctcagctgctctcattttatgctctcaccaagccaaaagctgaagttcatcaatcagtgtgtctaagtgttcactggttatataccattttgtagtttcag

SEQ ID NO: 139052 - DNA, 561 bp, Homo sapiens
gttaaaaggtgtgagggtatcaatattgttgtggctattggggaggaaacattagtaaaaccatttagttaaagctattgctttaaactttggctttaatttaacaaatgttctatggagtgacagtatgtatgtaaccatgctatgcccattcacagatgcagtagagggaagaatttctcaaagacaactgttctaacactcaaattaaaccgtactgggtttgaaaagagaaagtccaggaattaccaaatattttagatatcagataaaagagaatgccaggtatgcgatgataatcagcaatggttgttcacacaatacatcaaatcagtatttgaattagcttttgaattacaaggacaaatggatcaagtctagactcyttagtagataaatcttattaggctgagatgtgttttcccctgtttttccacaaggagattacaaatttgcaaacctcagctgctctcattttatgctctcaccaagccaaaagctgaagttcatcaatcagtgtgtctaagtgttcactggttatataccattttgtagtttcag

SEQ ID NO: 139053 - DNA, 467 bp, Homo sapiens
tcaattaacacccagcaacagactaattattaataaaccagaatcttcagtattaggcttcaatcattggcaatttttttttttttgacacacagtctcccactgtcgcccaggctgaagtcctgaggccagaatgagaytaggacatggttcctttgcctaagtaaagtgaggcagacaatggagtacttcagacttcaaattagtatggtaagtgctatgaagagtatgattagagttcattatttacccagaaaagggtcactcagcccagcctgggagttagagaaggtttcctgaagtcttgacatgtgagtcatgaaaggacataaggagttaaccacgtgacaaaataagctaagggaattctcaacaaaagacaaaatattggcaaaggcttttaggcatatactagcttagtattattgggagaatgtaatgattttctgtatttcaaaagtgtaaaa

SEQ ID NO: 139054 - DNA, 467 bp, Homo sapiens
tcaattaacacccagcaacagactaattattaataaaccagaatcttcagtattaggcttcaatcattggcaatttttttttttttgacacacagtctcccactgtcgcccaggctgaagtcctgaggccagaatgagactaggacatggttcctttgcctaagtaaagtgaggcagacaatggartacttcagacttcaaattagtatggtaagtgctatgaagagtatgattagagttcattatttacccagaaaagggtcactcagcccagcctgggagttagagaaggtttcctgaagtcttgacatgtgagtcatgaaaggacataaggagttaaccacgtgacaaaataagctaagggaattctcaacaaaagacaaaatattggcaaaggcttttaggcatatactagcttagtattattgggagaatgtaatgattttctgtatttcaaaagtgtaaaa

SEQ ID NO: 139055 - DNA, 467 bp, Homo sapiens
tcaattaacacccagcaacagactaattattaataaaccagaatcttcagtattaggcttcaatcattggcaatttttttttttttgacacacagtctcccactgtcgcccaggctgaagtcctgaggccagaatgagactaggacatggttcctttgcctaagtaaagtgaggcagacaatggagtacttcagacttcaaattagtayggtaagtgctatgaagagtatgattagagttcattatttacccagaaaagggtcactcagcccagcctgggagttagagaaggtttcctgaagtcttgacatgtgagtcatgaaaggacataaggagttaaccacgtgacaaaataagctaagggaattctcaacaaaagacaaaatattggcaaaggcttttaggcatatactagcttagtattattgggagaatgtaatgattttctgtatttcaaaagtgtaaaa

SEQ ID NO: 139056 - DNA, 467 bp, Homo sapiens
tcaattaacacccagcaacagactaattattaataaaccagaatcttcagtattaggcttcaatcattggcaatttttttttttttgacacacagtctcccactgtcgcccaggctgaagtcctgaggccagaatgagactaggacatggttcctttgcctaagtaaagtgaggcagacaatggagtacttcagacttcaaattagtatggtaagtgctatgaagagtatgattagagttcattatttacccagaaaagggtcactcagcccagcctgggagttagagaaggtttcctgaagtcttgacatgtgagtcatgaaaggacataaggagttaaccacgtgacaaaataagctaagggaattctcaacaaaagacaaaatattggcaaaggcttttaggcatatactagcttagtattattgggagaatgtaatkattttctgtatttcaaaagtgtaaaa

SEQ ID NO: 139057 - DNA, 611 bp, Homo sapiens
cagttttctaccactaaaccatgcatttggtttaaaaaacacaacaactctggggaatatcggctgcttccaactgtgttgaaggtgttaaagaaaagagcataaaagtaraaatgatcatctgaggcctttatagtctctgctcaagagactagagtcttccattcttaacgaaacacccaaatatcttaataattgggcaaaatctaaatatcagagagataattttatcttgaagattgttaaattataatggtgattcactaccttgccacgtctctgagtcaaaaattaggtctttgtttaggaatcaatggtactctgcaacttggaaataggaagattttagaagactcaaacactgactttcttgtgcgcaaaaaaaaaagacgtattgagataagacaagtccttccttgcaaggatacctctaatgctcatacaccacctcccctaacgttaatatagccttccaggtcagtaaccagtgtcagagagcagccccatgcaaactacaaattcaatagatgtcgaacacagggtcaagcctagaataagaagtcttagctaattaagtatgcttttttccccaaattcatattaacaaaaac

SEQ ID NO: 139058 - DNA, 611 bp, Homo sapiens
cagttttctaccactaaaccatgcatttggtttaaaaaacacaacaactctggggaatatcggctgcttccaactgtgttgaaggtgttaaagaaaagagcataaaagtagaaatgatcatctgaggcctttatagtctctgctcaagagactagagtcttccattcttaacgaaacacccaaatatcttaataattgggcaaaatctaaatatcagagagataattttatcttgaagattgttaaattataatggtgattcactaccttgccacgtctctgagtcaaaaattaggtctttgtttaggaatcaatggtactctgcaacttggaaataggaagattttagaagactcaaacactgactttcttstgcgcaaaaaaaaaagacgtattgagataagacaagtccttccttgcaaggatacctctaatgctcatacaccacctcccctaacgttaatatagccttccaggtcagtaaccagtgtcagagagcagccccatgcaaactacaaattcaatagatgtcgaacacagggtcaagcctagaataagaagtcttagctaattaagtatgcttttttccccaaattcatattaacaaaaac

SEQ ID NO: 139059 - DNA, 611 bp, Homo sapiens
cagttttctaccactaaaccatgcatttggtttaaaaaacacaacaactctggggaatatcggctgcttccaactgtgttgaaggtgttaaagaaaagagcataaaagtagaaatgatcatctgaggcctttatagtctctgctcaagagactagagtcttccattcttaacgaaacacccaaatatcttaataattgggcaaaatctaaatatcagagagataattttatcttgaagattgttaaattataatggtgattcactaccttgccacgtctctgagtcaaaaattaggtctttgtttaggaatcaatggtactctgcaacttggaaataggaagattttagaagactcaaacactgactttcttgtgcgcaaaaaaaaaagacgtattgagataagacaagtccttccttgcaaggatacctctaatgctcatacaccacctcccctaacgttaatatagccttccaggtcagtaaccagtgtcagagagcagccccatgcaaactacaaattcaatagatgtcgaacacagggtcaagcctagaataagaagtcttagctaattaagtatgctttkttccccaaattcatattaacaaaaac

SEQ ID NO: 139060 - DNA, 564 bp, Homo sapiens
tttttttacagattgaatgcattaagtcaatttattatttatgatgaatttatttatgtatttattttcgctatcacaagtagaaaaagcctataagttgctatgccaaaaacctgcctctagatggcaaacaaaccccacaatacacaaaagagagccaaattcttagaaaccctgggaaaggaagagggctactgtcccattaacaactkggagcccttaaggcaagaatgaggtggaacatctggaacatctgggaggagacaccagggtgcggagtagtggggaacctgctctgtgctctgagactgaaagcccagccttgcctctcaccgctgccttgactgtgtccccatctgctgtgaagtgaatggtgtcttctaaattcatgctgagccctaattgctgaaaagtgtaagacatgcaatggggggattatgtgcatcttcccgacaccaacatgatgctcaggaaggagacttcttgttttctcttaggattcttttactaaccaagattttgcctctactacatatttccctttgctgattgtccctccctttt

SEQ ID NO: 139061 - DNA, 412 bp, Homo sapiens
cacaagtagaaaaagcctataagttgctatgccaaaaacctgcctctagatggcaaacaaaccccacaatacacaaaagagagccaaattcttagaaaccctgggaaaggaagagggctactgtcccattaacaactgggagcccttaaggcaagaatgaggtggaacatctggaacatctgggaggagacaccagggtgcggagtagtggggaacctgctctgtgctctgagactgaaagcccagccttgcctctcaccgctgccttgactgtgtccccatctgctgtgaagtgaatggtgtcttctaaattcatgctgagccctaattgctgaaaagtgtaagacatgcaatggggggattatgtgcatcttccygacaccaacatgatgctcaggaaggagacttcttg

SEQ ID NO: 139062 - DNA, 343 bp, Homo sapiens
caacggcagaagcatttaagttgtgagttggataaattaattttaaaatattgtcaagtttttttttttttgcaaatagacaaatgtaccaattatattagaccctgaattcaakaatgcacgttgtattaaaccaggtaaaatataaccagaccagattttttaaatggactctcttaaagtttttataatttatattcatatttcacatatgttgaaagtaaataatggaaaagcatgcaatgcaaatattaaccaaaatatagctttagttgtacttatattcacattttaaaagttggacacagttaagtctcagtgatttttttacacaacggaggca

SEQ ID NO: 139063 - DNA, 343 bp, Homo sapiens
caacggcagaagcatttaagttgtgagttggataaattaattttaaaatattgtcaagtttttttttttttgcaaatagacaaatgtaccaattatattagaccctgaattcaataatgcacgttgtattaaaccaggtaaaayataaccagaccagattttttaaatggactctcttaaagtttttataatttatattcatatttcacatatgttgaaagtaaataatggaaaagcatgcaatgcaaatattaaccaaaatatagctttagttgtacttatattcacattttaaaagttggacacagttaagtctcagtgatttttttacacaacggaggca

SEQ ID NO: 139064 - DNA, 590 bp, Homo sapiens
tgcaacattggggatcaaattttaacatgagattggaaggggcaagcattcaaaccatagcaagagttaaatttcctttttaagaaaatcactgatatgattccatttcgccatagataaaagctggtatttcagcctaccattgagtgtgcttatagctcaccaaaagggcactctgtctcgggaatacagatttgcctagaggtatcctagtgcagtcaaagaaagagcaatgagggatagaaaaggttagtgatggagacaccagcgctgcattttgcaacaaacaatgtgaaaattttacggattggttcagctaacttactacagttwacattcctctcaggtgggagaattgttgcgtttttttctcaagatagaaaagcaattcagataatctgaaatctccacaagaaggataagaagcacagcagaaactattctaggcaggaagtcaatcctttcaactgtctgtgctccatagaaacaattgtctgcactgggagtcatatgaggtacagacaacagccagacctctgatcctctcattagtgatttcagaagaaattaccagtcaactgagtaattca

SEQ ID NO: 139065 - DNA, 256 bp, Homo sapiens
aatgcttgagaagtagatatttaatcataacatttcaaaatctactggataacctagaattgaaaaatagcctataggttgaaaaactcctgtagtgaagaaagaaaataactaatatacagtgacaatataaatattataagtatttattktattatcgccctgaaatttgataatacaaacatgtaatatctacatatcatccatatatcaggtcataaaaaatcaatacattcttcaaaagtttagcataaca

SEQ ID NO: 139066 - DNA, 256 bp, Homo sapiens
aatgcttgagaagtagatatttaatcataacatttcaaaatctactggataacctagaattgaaaaatagcctataggttgaaaaactcctgtagtgaagaaagaaaataactaatatacagtgacaatataaatattataagtatttattgtattatcrccctgaaatttgataatacaaacatgtaatatctacatatcatccatatatcaggtcataaaaaatcaatacattcttcaaaagtttagcataaca

SEQ ID NO: 139067 - DNA, 299 bp, Homo sapiens
gatgaacacacagctcaaagaggagcaggacagaactgctgtctcatttgaatatctctctgggcctgattatttaaaaggacttgcatttctcacatgaaagttattttcttttctcaatgtccataaaygagaataaatatagatcttttcgaggatgaagtaaatggaatgaaaaacaaaacccaagctgaccagaaatcatagagggaagaaaaggttataaatatatggatttttcaaagtgattttaagctattaggaatcagttaaatgttgggggattttgtctgagaatg

SEQ ID NO: 139068 - DNA, 644 bp, Homo sapiens
tttagaggaaaatagagaaaatgtaggtaaccttgggtttggcaatgagtttttcaacacaacatcaaaaacatggtggatgaaagaaaaataggtaagttaaactgtattaaaattaaaagcttatgctctgccaaagacattgcaagataataaaaaaataagcctcagacttggagaaaatatttgcaaaacatatgtctgataaagaacttatatctgaagcttacaaagaacttttacagttaaacaataagaaagcaaacaactcaattaaaatgaagttaaaagatctgaacagaaaactcagcaaagaaaatatacaaatggcaacctaaaataatttttgaaatcatttcccaattgggaattgcaaattgaaaccacatacaggtagacatgyattagagtagataaaatctgcaaaaattgcaccaccgcatgctggagaggattcagtatggaggaactctcttttgctgctggtgtgaatgaaaaatggtgcagtcattggaagatagttaggcagtttcttgcaaagctaaacatagtcttactatgtgatttagcaatcaagttcctagtaagaattgatttgaaaacttatattcacaccaaaagctgcatgaaagtgtgttttagca

SEQ ID NO: 139069 - DNA, 577 bp, Homo sapiens
gaagcttttactcatggtggaaggtgaagggggagcaggcatgtcacatggtgagtgaaagagtaagagagagagggaggaggcaccaggctcctttaaacaaccagctcctgcatgaactcacagagaaagaactcactcatcaccacagggagggcaccaagccattccatgagggatcygcccccatgacccaaacacctccctccaggccccacctccaacattggggatcacatttcaacatgggatttggagggaaaaaataacaaaactatagctcagccatctacaagccaaggagagaggccaggaacagatctttccctcacagccctcagaagaaccaaccctgccaccaccttgattttggacttcctgcttccagaactgtgagaccatacatttctgttggtcaagccacactcactatacagtattttgttatgacagccccaggaaactaatgcacacctctacaaccctttcagggacaatggaagatgctggtgagagcccctccaagccagtggaacccaaggaagcagagtgactgacaaaacaaacttctggcctt

SEQ ID NO: 139070 - DNA, 560 bp, Homo sapiens
tatcttcaccatgagtagattccatcttaactaatcactttctttggtaactcataagaagaaactcctcatccattcaagtttatcaagaagatgcagcaattctccacttctaattctagttttcttgctattttcaccacaactgcagttacttctcccactgaagycttgaacccctcaaaatcatccttagggttggaatacacttcttccaatctcctgttaatgttgatattttgacctcctcccatgaattacacatgttctttgtggcgtctagaatggtgagtcctttccaaaaggctttttatttactttgcctggatacatcaaagcgatcactatctatggcagctgtagccttagaaaatgttatctatgtaatgtatccatgttcaattcaattaaactcaattagattttatttgctaaaaagagttcaaggcacagacacaataataaaccacataaattcttcaggttccctatcagttccagacatcagtttttcttcccaaaagcgttgttctggattgcaggcctaggtcaggtgagag

SEQ ID NO: 139071 - DNA, 560 bp, Homo sapiens
tatcttcaccatgagtagattccatcttaactaatcactttctttggtaactcataagaagaaactcctcatccattcaagtttatcaagaagatgcagcaattctccacttctaattctagttttcttgctattttcaccacaactgcagttacttctcccactgaagccttgaacccctcaaaatcatccttagggttggaatayacttcttccaatctcctgttaatgttgatattttgacctcctcccatgaattacacatgttctttgtggcgtctagaatggtgagtcctttccaaaaggctttttatttactttgcctggatacatcaaagcgatcactatctatggcagctgtagccttagaaaatgttatctatgtaatgtatccatgttcaattcaattaaactcaattagattttatttgctaaaaagagttcaaggcacagacacaataataaaccacataaattcttcaggttccctatcagttccagacatcagtttttcttcccaaaagcgttgttctggattgcaggcctaggtcaggtgagag

SEQ ID NO: 139072 - DNA, 482 bp, Homo sapiens
ataaattctgatttaagagaaaggctgccttctgccatgaggacacattgatataaaagtttgagaggtactggtgcacttcttcacactaacagacgtgtgaggatgtatgactaaaccacatggcatacatttcctgcctacttaatgtttacttttctacctctgcctctggttttggtccctggcagctgctgattcttggcaaaacctcagagcttggagtcagaagactgagtytcaaagttccagtattgcctttttcttttttttttctagccatgatatcaatccttctcagtcactaaatgagtgtgacaacaccttgtacagttgttggtgtcattaaatcagatggtgtgtaagtgtattttgtaaaaactgtaaaggaggttgtggctgtaggggctgacggttctcatgaatattactgctcttctttccaacagttaaaagaatattggcagaaaaacagacctaga

SEQ ID NO: 139073 - DNA, 482 bp, Homo sapiens
ataaattctgatttaagagaaaggctgccttctgccatgaggacacattgatataaaagtttgagaggtactggtgcacttcttcacactaacagacgtgtgaggatgtatgactaaaccacatggcatacatttcctgcctacttaatgtttacttttctacctctgcctctggttttggtccctggcagctgctgattcttggcaaaacctcagagcttggagtcagaagactgagtctcaaagttccagtattgcctttttcttttttttttctagccatgatatcaatccttctcagtcactaaatgagtgtgacaacaccttgtacagttgttggtgtcattaaatcagatggtgtgtaagtgtattttgtaaaaactgtaaaggaggwtgtggctgtaggggctgacggttctcatgaatattactgctcttctttccaacagttaaaagaatattggcagaaaaacagacctaga

SEQ ID NO: 139074 - DNA, 368 bp, Homo sapiens
atctgacccttcagcccccccacattagataggtcactggatctttctgggcatctgtaaaatgggaatagtagagccagaggtggtcatgggtctgggctttgtggrggtgggggcagagaaggagagggcagcctgtccagccaccagcccctctctccagggccctttccccctgtgctttgggcagatttgcacattaaagaaagagaagcaggatatgcgttgggtagagcagctggagtggagcttgtccaaactcaaaaaccagacgggtaagatggggctggcatgacctgggagcaggactggcatcagagggctgtgagggtggcttagagtgccccagggaggtgggtggatggaag

SEQ ID NO: 139075 - DNA, 368 bp, Homo sapiens
atctgacccttcagcccccccacattagataggtcactggatctttctgggcatctgtaaaatgggaatagtagagccagaggtggtcatgggtctgggctttgtgggggtgggggcagagarggagagggcagcctgtccagccaccagcccctctctccagggccctttccccctgtgctttgggcagatttgcacattaaagaaagagaagcaggatatgcgttgggtagagcagctggagtggagcttgtccaaactcaaaaaccagacgggtaagatggggctggcatgacctgggagcaggactggcatcagagggctgtgagggtggcttagagtgccccagggaggtgggtggatggaag

SEQ ID NO: 139076 - DNA, 368 bp, Homo sapiens
atctgacccttcagcccccccacattagataggtcactggatctttctgggcatctgtaaaatgggaatagtagagccagaggtggtcatgggtctgggctttgtgggggtgggggcagagaaggagagggcagcctgtccagccwccagcccctctctccagggccctttccccctgtgctttgggcagatttgcacattaaagaaagagaagcaggatatgcgttgggtagagcagctggagtggagcttgtccaaactcaaaaaccagacgggtaagatggggctggcatgacctgggagcaggactggcatcagagggctgtgagggtggcttagagtgccccagggaggtgggtggatggaag

SEQ ID NO: 139077 - DNA, 368 bp, Homo sapiens
atctgacccttcagcccccccacattagataggtcactggatctttctgggcatctgtaaaatgggaatagtagagccagaggtggtcatgggtctgggctttgtgggggtgggggcagagaaggagagggcagcctgtccagccaccagcccctctctccagggccctttccccytgtgctttgggcagatttgcacattaaagaaagagaagcaggatatgcgttgggtagagcagctggagtggagcttgtccaaactcaaaaaccagacgggtaagatggggctggcatgacctgggagcaggactggcatcagagggctgtgagggtggcttagagtgccccagggaggtgggtggatggaag

SEQ ID NO: 139078 - DNA, 397 bp, Homo sapiens
agccagttttaatggtaacatgagcaattcagttactttctcagagttttatatttttatctgtaaaatggaaattatggtacctacagtttaggatttttgtgaaaatcaagtgagactgcaagtgtcttgaatagcagtggaagtacattgatataggtgatattttacagyggtgtcttcctcagcatcatattagttcagtgttttaaagctctatattagtcacagaaacaaagtcaaatttttgttctcatttcagattacaagtggacacctgagtcagcaggacctggaatcccagatgagagagcttatctacacgactcagatcttgttgtcacccccattattgacaatccaaaggtgcagaaagcactctgacaagtgagttgta

SEQ ID NO: 139079 - DNA, 552 bp, Homo sapiens
tggcttccctgggccacactggaagaagaattgtcttgggccacacataaaatacactaacaatagctgatgaactaaaaaaccaataaaaaaaaattgcaaaaaaattcttacaatgttttaagagagtttatgaatttgtgttgggccatattcaaagccgtcttgggccgcatscagcccacgggctgcgggttggacaagcttgctttacacaatattctgtgtttccttttttcctcttataaccatatttgatagtttatgggaagccttcatcagtggaaatttttgtgtttaacttttaattctaaactacttttagagaaaagattaaaaaatagttgagaactcctgtatagcttttgcccagctgctcttaatgttcacatcttataggtctatagtatagttagcaaaacctgggaattaacattggtatagtgttagtcaggcgggataatccttacctgtgcctccttttggagggcagcagaatgtggtagttggagttgcatgatacttgattcatatctctgtgtaatgatggca

SEQ ID NO: 139080 - DNA, 552 bp, Homo sapiens
tggcttccctgggccacactggaagaagaattgtcttgggccacacataaaatacactaacaatagctgatgaactaaaaaaccaataaaaaaaaattgcaaaaaaattcttacaatgttttaagagagtttatgaatttgtgttgggccatattcaaagccgtcttgggccgcatccagcccacgggctgcgggttggacaagcttgctttacacaatattctgtgtttccttttttcctcttataaccatatttgatagtttatgggaagccttcatcagtggaaatttttgtgtttaacttttaattctaaactacttttagagaaaagattaaaaaatagttgagaacycctgtatagcttttgcccagctgctcttaatgttcacatcttataggtctatagtatagttagcaaaacctgggaattaacattggtatagtgttagtcaggcgggataatccttacctgtgcctccttttggagggcagcagaatgtggtagttggagttgcatgatacttgattcatatctctgtgtaatgatggca

SEQ ID NO: 139081 - DNA, 552 bp, Homo sapiens
tggcttccctgggccacactggaagaagaattgtcttgggccacacataaaatacactaacaatagctgatgaactaaaaaaccaataaaaaaaaattgcaaaaaaattcttacaatgttttaagagagtttatgaatttgtgttgggccatattcaaagccgtcttgggccgcatccagcccacgggctgcgggttggacaagcttgctttacacaatattctgtgtttccttttttcctcttataaccatatttgatagtttatgggaagccttcatcagtggaaatttttgtgtttaacttttaattctaaactacttttagagaaaagattaaaaaatagttgagaactcctgtatagcttttgcccagctgctcttaatgttcacatcttataggtctatagtatagttagcaaaacctgggaattaacaytggtatagtgttagtcaggcgggataatccttacctgtgcctccttttggagggcagcagaatgtggtagttggagttgcatgatacttgattcatatctctgtgtaatgatggca

SEQ ID NO: 139082 - DNA, 552 bp, Homo sapiens
tggcttccctgggccacactggaagaagaattgtcttgggccacacataaaatacactaacaatagctgatgaactaaaaaaccaataaaaaaaaattgcaaaaaaattcttacaatgttttaagagagtttatgaatttgtgttgggccatattcaaagccgtcttgggccgcatccagcccacgggctgcgggttggacaagcttgctttacacaatattctgtgtttccttttttcctcttataaccatatttgatagtttatgggaagccttcatcagtggaaatttttgtgtttaacttttaattctaaactacttttagagaaaagattaaaaaatagttgagaactcctgtatagcttttgcccagctgctcttaatgttcacatcttataggtctatagtatagttagcaaaacctgggaattaacattggtatagtgttagtcaggcgggataatccttacctgtgcctccttttggagggcagyagaatgtggtagttggagttgcatgatacttgattcatatctctgtgtaatgatggca

SEQ ID NO: 139083 - DNA, 456 bp, Homo sapiens
ggtttggctattggaaaagtggttggatttcagtccctgctttttttctcttaatgccgagaaagaaaggaataaagagggaggaaggaagagacagatggtgagagagagggagacaatagtactatcttcactcctagactatggacaaagactgtgtctctttgagtccctacagcctascagagtgcctagcacatagtagcactttacacatattaactaattgaattactgatattaagagattgtgtcaggttgctttatatgtagcagggagctgaaagtggagagaatcccaaaggaggatagttggaaaatggagaaagatttgcgtggaaaatccagccaggactggaaggctgagctgagtggcctcacaacactgcagtgagtgccaagaattgctgtagttttgtagaaaactgttattattttttacaggttgttttctag

SEQ ID NO: 139084 - DNA, 631 bp, Homo sapiens
atcatatctttaacttgtaacttattttttcccaaagtcaagacactgactaacaacagtattactcagcgatctatgacactagaatataatttccttagaattacttcctagagggttaagaaatttctcttccatccccacccaagaataatgctgttcaaaacttttacaaatatgtcctgmagataaatataacctttaagataatatgagtagtaaaaaaataaaagtcatatgaagtatccagtttttcaatcaatatattgaagctataggatgtttacatgctgctattcacttcagggagacccagaagagaatccatatctattgtacagggaaatagacaaaacaacaggagttttagctactggacaccgattaaagaataatgggaaaacttttatgcagctaaaaaccttctgggactacctgcttttaatggacagtaacaggttttgaaacacaacctttacaggttctgtacaaaggtcatttatctcttgaaacttgacttgagattttattcatagtgcccaaacaatagtcactcattcattcattcactcactcagcacattttttgttttagcttcttctatgtgccatgtacaggatctacagaaag

SEQ ID NO: 139085 - DNA, 631 bp, Homo sapiens
atcatatctttaacttgtaacttattttttcccaaagtcaagacactgactaacaacagtattactcagcgatctatgacactagaatataatttccttagaattacttcctagagggttaagaaatttctcttccatccccacccaagaataatgctgttcaaaacttttacaaatatgtcctgcagataaatataacctttaagataatatgagtagtaaaaaaataaaagtcatatgaagtatccagtttttcaatcaatatattgaagctataggatgtttacatgctgctattcacttcagggagacccagaagagaatccatatctattgtacagggaaatagacaaaacaacaggagttttagctactggacacygattaaagaataatgggaaaacttttatgcagctaaaaaccttctgggactacctgcttttaatggacagtaacaggttttgaaacacaacctttacaggttctgtacaaaggtcatttatctcttgaaacttgacttgagattttattcatagtgcccaaacaatagtcactcattcattcattcactcactcagcacattttttgttttagcttcttctatgtgccatgtacaggatctacagaaag

SEQ ID NO: 139086 - DNA, 518 bp, Homo sapiens
gatgatgatttttttttattaaatagtgtttaaataaccttttagggagtttattttgactaattgaaagaatgttcaaatgcttcaactttgatatcgtattggaacaatttggagtaagattggtagaaatgttaaatctgtgggttctgatggccctaggggaaaacagtcacagaaaattaacttaggatgcactctacccataacccagttcagccaatatactctgcagttgaggaaatcctatcttagaaaagttcacctcccaaaaatggaacaaccaagactagcacctgagttatttatcttcatatttggtggtggtcttgttctaaaagacctaaaacaattattccataacattgcrttacaaaataagccatgggctctaccacaagaagctgatgtcttgctggatacaaatgaatttgattgcaaggttccccagtccctaagaatttaaagggaatactttaataggatttctttgggtaaatttttaagaagaaagttta

SEQ ID NO: 139087 - DNA, 588 bp, Homo sapiens
ttgtcaatacaagaggatgggagttggctcaatggaatcctacagaacactattaagggcaataacttctgacttcctgctgaatccagagagcagcataatattactcattctgtcactcaaccagctagtgcctaacaatcaggggcctctgattgttcacccactgcctagtatcaggggcacttacctccctctgctctcaggtcactgcaactgcgaaagaatctgggagttgaattcagcttccagatgaattatttgtaaaatacaatccactcaatttaaagaatttgcagcaatttggattataacatacaattaaaataaatctccagccaggacgtggtggctcacacctgtaatcccagcaattggtgaggctgaggcaggaggattgcttgaattcaggagttcaagagcagcctgggcaacatagcatgacctcatgtctactaaaaataaaaaaagctggcagggtacttttttggtggtygtgtacacctgtagtcccagctaattaggaggctcaggcgggaggaccacttgagcccgaaagattgaggctgcagtgagctatgattgcac

SEQ ID NO: 139088 - DNA, 331 bp, Homo sapiens
ttaataaaataaatagcaagcataatataatgcaatgcacaataatttatgggaagtataaagtgctttggaaactcgaatgagggatagcttacttagtctttggaagtggatcagataaagatggcttctcggagaaaatgacatttaaattgagccctgaaagggttctgctgtgcaagagaatgaggagttagagctgtagagcrggttatattcagaggaaggcatttgcacaaaggcttaagggtgggggagcaaaaaagaatatcagcaatgtgcttatgaagctggagggaattcagcatggaaaacacatcatagagaaggg

SEQ ID NO: 139089 - DNA, 617 bp, Homo sapiens
caataatcattttgaatgtcaatgatctaaatataattaaaagacagagtttgtccgattggttcaagaaacaagactcaactatatgttctctacagggggcacacttaaaaaaatcaacctctgtgttagattcaggtgggtacatgtacaggtttgttacataggtgtatcgtgtgatgctgaagtttggaatattaatgatcctgtcaccaaagtagcgagcatactgtccaacaagtagttttcaaccattgtcctactctttccctcctgcytctagttgtttccagtgtctattgttgtcatcttgatgtccatgagtacctagtgtttagctctcacttgtaagtgagaacatatggtatttgcttttgcgttcccacattagtttgtttaggttaatggtctccagctgcttccatgttgctgcaaaggacaaaattacattcttttctatggctgtgtagtattccatggtgcatatgtattatattttgtttagctgtccaccactgatgggtacctaggttgatttcatgcctttgctattgtaaatggtgctgtgatgaacatacatatgagtgaatgtgtctttttggtagaataatttattt

SEQ ID NO: 139090 - DNA, 617 bp, Homo sapiens
caataatcattttgaatgtcaatgatctaaatataattaaaagacagagtttgtccgattggttcaagaaacaagactcaactatatgttctctacagggggcacacttaaaaaaatcaacctctgtgttagattcaggtgggtacatgtacaggtttgttacataggtgtatcgtgtgatgctgaagtttggaatattaatgatcctgtcaccaaagtagcgagcatactgtccaacaagtagttttcaaccattgtcctactctttccctcctgcctctagttgtttccartgtctattgttgtcatcttgatgtccatgagtacctagtgtttagctctcacttgtaagtgagaacatatggtatttgcttttgcgttcccacattagtttgtttaggttaatggtctccagctgcttccatgttgctgcaaaggacaaaattacattcttttctatggctgtgtagtattccatggtgcatatgtattatattttgtttagctgtccaccactgatgggtacctaggttgatttcatgcctttgctattgtaaatggtgctgtgatgaacatacatatgagtgaatgtgtctttttggtagaataatttattt

SEQ ID NO: 139091 - DNA, 617 bp, Homo sapiens
caataatcattttgaatgtcaatgatctaaatataattaaaagacagagtttgtccgattggttcaagaaacaagactcaactatatgttctctacagggggcacacttaaaaaaatcaacctctgtgttagattcaggtgggtacatgtacaggtttgttacataggtgtatcgtgtgatgctgaagtttggaatattaatgatcctgtcaccaaagtagcgagcatactgtccaacaagtagttttcaaccattgtcctactctttccctcctgcctctagttgtttccagtgtytattgttgtcatcttgatgtccatgagtacctagtgtttagctctcacttgtaagtgagaacatatggtatttgcttttgcgttcccacattagtttgtttaggttaatggtctccagctgcttccatgttgctgcaaaggacaaaattacattcttttctatggctgtgtagtattccatggtgcatatgtattatattttgtttagctgtccaccactgatgggtacctaggttgatttcatgcctttgctattgtaaatggtgctgtgatgaacatacatatgagtgaatgtgtctttttggtagaataatttattt

SEQ ID NO: 139092 - DNA, 617 bp, Homo sapiens
caataatcattttgaatgtcaatgatctaaatataattaaaagacagagtttgtccgattggttcaagaaacaagactcaactatatgttctctacagggggcacacttaaaaaaatcaacctctgtgttagattcaggtgggtacatgtacaggtttgttacataggtgtatcgtgtgatgctgaagtttggaatattaatgatcctgtcaccaaagtagcgagcatactgtccaacaagtagttttcaaccattgtcctactctttccctcctgcctctagttgtttccagtgtctattgttgtcatcttgatgtccatgagtaccyagtgtttagctctcacttgtaagtgagaacatatggtatttgcttttgcgttcccacattagtttgtttaggttaatggtctccagctgcttccatgttgctgcaaaggacaaaattacattcttttctatggctgtgtagtattccatggtgcatatgtattatattttgtttagctgtccaccactgatgggtacctaggttgatttcatgcctttgctattgtaaatggtgctgtgatgaacatacatatgagtgaatgtgtctttttggtagaataatttattt

SEQ ID NO: 139093 - DNA, 597 bp, Homo sapiens
aaaataattatatacttcccaaagtgagatttatttcaggtgtgcaaggctggttcaatattttaaaatcaagtaataaaattcctcacatcagaaggctaaagaagaaaaatcacatgattatataaacaaatgtagaaaatttayttgacaaatctaacactcgttcatgataaaaactcttagttaacaacaaatagagggaaccttttaaacttgagaaaaaataatctacaaaaatcctacagcaacatcatactactggtaagacactagaagttctcttacttacattgggaacaatgcaaggatatgtcctcccaccactccttttcaacatcatgctggaagttctggctaatgcaataagacaagaaaagatgataacaggtatactaattgggaaaaaataaataaaactatctttgtttgcagatgatttgatcgtctatatagaaaatctgaatgactgacaaaacattctcctggaactaataagggattatagatatgttccagaatatagggtgaatataacaaagttaactgcctttctgtgtaacagcattgaacaaatggaatttaaaaataaaaaca

SEQ ID NO: 139094 - DNA, 597 bp, Homo sapiens
aaaataattatatacttcccaaagtgagatttatttcaggtgtgcaaggctggttcaatattttaaaatcaagtaataaaattcctcacatcagaaggctaaagaagaaaaatcacatgattatataaacaaatgtagaaaatttatttgacaaatctaacactcgttcatgataaaaactcttagttaacaacaaatagagggaaccttttaaacttgagaaaaaataatctacaaaaatcctacagcaacatcatactactggtaagacactagaagttctcttacttacattgggaacaatgcaaggatatgtcctcycaccactccttttcaacatcatgctggaagttctggctaatgcaataagacaagaaaagatgataacaggtatactaattgggaaaaaataaataaaactatctttgtttgcagatgatttgatcgtctatatagaaaatctgaatgactgacaaaacattctcctggaactaataagggattatagatatgttccagaatatagggtgaatataacaaagttaactgcctttctgtgtaacagcattgaacaaatggaatttaaaaataaaaaca

SEQ ID NO: 139095 - DNA, 597 bp, Homo sapiens
aaaataattatatacttcccaaagtgagatttatttcaggtgtgcaaggctggttcaatattttaaaatcaagtaataaaattcctcacatcagaaggctaaagaagaaaaatcacatgattatataaacaaatgtagaaaatttatttgacaaatctaacactcgttcatgataaaaactcttagttaacaacaaatagagggaaccttttaaacttgagaaaaaataatctacaaaaatcctacagcaacatcatactactggtaagacactagaagttctcttacttacattgggaacaatgcaaggatatgtcctcccaccactccttttcaacatcatgctggaagttctggctaatgcaataagacaagaaaagatgataacaggtatactaattgggaaaaaataaataaaactatctttgtttgcagatgatttgatcgtctatatagaaaatctgaatgactgacaaaacattctcctggaactaataagkgattatagatatgttccagaatatagggtgaatataacaaagttaactgcctttctgtgtaacagcattgaacaaatggaatttaaaaataaaaaca

SEQ ID NO: 139096 - DNA, 614 bp, Homo sapiens
atgtttgcagcaataaatgcctatatcaaaaagaagaaagagctcaaataacataatgttgctcctcaaggaactaagaagagaacaaactaagaccaaagttagtagaagggaggaaataataaagattagagcagaaataaataaaatggagagtaaaagaaatagaagaaataaaaaaactgagttttttttttagagttaaacaaaatcaacaaatgtttagctagaccaaggaaaaaaagaagactcaaataaattaaattagaaatgaaagaggagacattacaackgagacagcagggataccaaagatcacaagagactacgatgaacaattataggccaacaaataggataacctagaagaaatgcataagttcctagaaatatacaacctaccaagactgaatcatgatgaaatagaaaacccgaaccaccaataattaaattaggagattgaatcagtaataaatagtctcatatgaatgaaatgcccaggatctaatggcttcaactgcttaattctaccaatatttaaacataaactaatactaatgtttctcaagctgtttcaaacattgaagtgaaagaaatacttccaatatcttttt

SEQ ID NO: 139097 - DNA, 645 bp, Homo sapiens
gcttgatttaattattccacattttatcacaaattggtaacatcactttgtacataaatatatgcaattataaatagttaatttgcaatttaaaaaattgtgattgaataattggatatccacatttgaaaaagtgaatctggacatagaccttactcttcacaaaaatgaactcaaaatagsttacagactgaaatgtgaaatataaaactactgggaaatagcataggagaaaacctagggttatttcaatgtaatatgcatattagatagagcaccaaagacaagagccatgaaataaataattggtaaactggacttcattaaaattaaaaacttctgccctgcaaaagacaatatcaagagaatgagaagacaagctgcagactgggagaaaatatttgcaaaatacatgtctgataaaggactgttatcaaaaatagacaaagaactcttaaaactccacagtaagaactcaaacaacccaatttatgaaatggttcaaagaccctgacagacaactctccaaagatttacagatggtaattaagcatatgaaaagatgctcctcattacagatcatcagggaaatacaaattaaaacaacagtgagatgcctttgcatacttattacaatggccaaaa

SEQ ID NO: 139098 - DNA, 645 bp, Homo sapiens
gcttgatttaattattccacattttatcacaaattggtaacatcactttgtacataaatatatgcaattataaatagttaatttgcaatttaaaaaattgtgattgaataattggatatccacatttgaaaaagtgaatctggacatagaccttactcttcacaaaaatgaactcaaaataggttacagactgaaatgtgaaatataaaactactrggaaatagcataggagaaaacctagggttatttcaatgtaatatgcatattagatagagcaccaaagacaagagccatgaaataaataattggtaaactggacttcattaaaattaaaaacttctgccctgcaaaagacaatatcaagagaatgagaagacaagctgcagactgggagaaaatatttgcaaaatacatgtctgataaaggactgttatcaaaaatagacaaagaactcttaaaactccacagtaagaactcaaacaacccaatttatgaaatggttcaaagaccctgacagacaactctccaaagatttacagatggtaattaagcatatgaaaagatgctcctcattacagatcatcagggaaatacaaattaaaacaacagtgagatgcctttgcatacttattacaatggccaaaa

SEQ ID NO: 139099 - DNA, 645 bp, Homo sapiens
gcttgatttaattattccacattttatcacaaattggtaacatcactttgtacataaatatatgcaattataaatagttaatttgcaatttaaaaaattgtgattgaataattggatatccacatttgaaaaagtgaatctggacatagaccttactcttcacaaaaatgaactcaaaataggttacagactgaaatgtgaaatataaaactactgggaaatagcataggagaaaacctagggttatttcaatgtaatatkcatattagatagagcaccaaagacaagagccatgaaataaataattggtaaactggacttcattaaaattaaaaacttctgccctgcaaaagacaatatcaagagaatgagaagacaagctgcagactgggagaaaatatttgcaaaatacatgtctgataaaggactgttatcaaaaatagacaaagaactcttaaaactccacagtaagaactcaaacaacccaatttatgaaatggttcaaagaccctgacagacaactctccaaagatttacagatggtaattaagcatatgaaaagatgctcctcattacagatcatcagggaaatacaaattaaaacaacagtgagatgcctttgcatacttattacaatggccaaaa

SEQ ID NO: 139100 - DNA, 645 bp, Homo sapiens
gcttgatttaattattccacattttatcacaaattggtaacatcactttgtacataaatatatgcaattataaatagttaatttgcaatttaaaaaattgtgattgaataattggatatccacatttgaaaaagtgaatctggacatagaccttactcttcacaaaaatgaactcaaaataggttacagactgaaatgtgaaatataaaactactgggaaatagcataggagaaaacctagggttatttcaatgtaatatgcatattagatagagcaccaaagacaagagccatgaaataaataattggtaaactggacttcattaaaattaaaaacttctgccctgcaaaagacaatatcaagagaatgagaagacaagctgcagactgggagaaaatatttgcaaaatacatgtctgataaaggactgttatcaaaaatagacaaagaactcttaaaactccacagtaagaactcaaacaacccaatttatgaaatggttcaaagaccctgacagacaactctccaaagatttacagatggtaattaagcatatgaaaagatgctcctcattacagatcatcaggkaaatacaaattaaaacaacagtgagatgcctttgcatacttattacaatggccaaaa

SEQ ID NO: 139101 - DNA, 539 bp, Homo sapiens
tatatagggactctctctttttaaaacacaaatttagcatactttacacattgttctgcatattctttttcaactttaacatatatcacagatagtgtgacttatcattacatgcctcattattttaaaggcrtgtatttaattttatggatagacatactttacataatcagttccatactgatgggcatttaagttgtctccaatcttttgctattacaagcactcattaaataaatatcctgggacatacttctctgtgcatttgtgaatgtatctgtgggatacatcacaaagatagaattgctgggctatgcgtgtgtgcatttgtaatattaagagatacggcaaaatgtcttgtggaaaaattatatcaacttacattctcaaaactgaaggataagtttgctgtttcccacatctctaccaatagggtctagtatctttctcaaaatcttttacctatgtgggggataaaaaaagtaatctcttgtcattgttttattttgaaatacagttattatgagaatagttgtcca

SEQ ID NO: 139102 - DNA, 440 bp, Homo sapiens
tctacttcactaactttcgtgtcctacattgatgatgggacaaattggcatggtctatttcttccccttcaaccccaagttcccyactggcttgttctgctttcagaatattaaatgtgaagagcttactaattgttaaaatctcagtggaaaaatgagtcatgtgactaaaactaatatgtggcctttctctcttctgtctccaaggactcatccaaaactgtcaactctttattaaagcaacgccttgactttctagagaaaatgacttcacggtgttactgccaaccgtgggaagcccagtcattctaacgaatttttttaagtgtctgcagcttaattaaaccctaagcaaattaaacacatcaccctcttctgcaggtaaagcagaacgttcatatacccactgttggggcagttcaatgcatctgtacacaaag

SEQ ID NO: 139103 - DNA, 576 bp, Homo sapiens
tccctggcatatagtgcatttcctcctgataatttataaacattaggttttagtagaaagttaccaaaaaagtttcttgaataactgagctcccttattcgtgctcactgatgcttaactggatggagcattggcacccagaatattaaatccttttcatacaattaggttatgtgcttatgcatactaacaagtatgtgagtgtgggatgtktatcttcttcctgaagattataaattcttttggcaggtactgtctctttctatttcactgtgtaatatgtgcccagaggcaattgcgcatcctccaaacagaaatcggtgaagttagagaatgtcctgaaatgtatgtctcaaatatgttgcattttccctcactagtatgtgcatcagccacttggtggctatcctcctgcatctgttatatttattacattagttttcaaaatagattctttatttcataatcatttaaataagagaaattaaaattggtaaagtatagaatgccatcctaatttttgatttgggacaaatacttaaatgactaattcaagaactgaattttaaacctaaa

SEQ ID NO: 139104 - DNA, 409 bp, Homo sapiens
ttggtaaagtatagaatgccatcctaatttttgatttgggacaaatacttaaatgactaattcaagaactgaattttaaacctaaaytgcagttgagaatattttgagatttgggaaatgtcattatgctatcattgtatttgttttcttttgcccatcttgtacctaccagctgaagtaaagatcttgaggtacagggacagtagtactgttgctgtttccaatccagtccattttggcattgaatgagatgtaatatcattggagtctgattgctgaatcggagagaattgaacctatttttgttctcaggaagggagaaatttgaaggttacactgagataaggagtaacaggaggaggaagaataagaaatttttgtttctggattttccaaatccagtggccca

SEQ ID NO: 139105 - DNA, 409 bp, Homo sapiens
ttggtaaagtatagaatgccatcctaatttttgatttgggacaaatacttaaatgactaattcaagaactgaattttaaacctaaattgcagttgagaatattytgagatttgggaaatgtcattatgctatcattgtatttgttttcttttgcccatcttgtacctaccagctgaagtaaagatcttgaggtacagggacagtagtactgttgctgtttccaatccagtccattttggcattgaatgagatgtaatatcattggagtctgattgctgaatcggagagaattgaacctatttttgttctcaggaagggagaaatttgaaggttacactgagataaggagtaacaggaggaggaagaataagaaatttttgtttctggattttccaaatccagtggccca

SEQ ID NO: 139106 - DNA, 585 bp, Homo sapiens
aagcttaactccattctttgcttcactgagggtctaaagtacaagttctttctgctttcaaggaaagggrgatttagaaagtttgtttcgtgtgataattaagggcatgagccctggagataaaccacacaggttcaaatcccctctctagcactgattagctgtgtggctttgggaaaattattttttctgtgctacaattttataatctataaaaggggaataaaagttacacctacctctgatagatgtgggtattaagtgagttaatacatataaagcaactaaaccaatgtatgcatatactaaatatttaattaacatcagatattattagtttttgattggctctagatctggtagtaatcaaggccttgcactatcaaggcctattataaaagactacagagaaagaataataaccgctcgcttgttgagtgcttactgtgtatcagacacttttcaaggcaccttttatgtactaaagaaaagggaatttataggcacagaaaaattgtttttgataaacatagagaagaaattttccctgtgtctgaaagatcctctaaattggcgagagagacc

SEQ ID NO: 139107 - DNA, 585 bp, Homo sapiens
aagcttaactccattctttgcttcactgagggtctaaagtacaagttctttctgctttcaaggaaagggagatttagaaagtttgtttcgtgtgataattaagggcatgagccctggagataaaccacacaggttcaaatcccctctctagcactgattagctgtgtggctttgggaaaattattttttctgtgctacaattttataatctataaaaggggaataaaagttayacctacctctgatagatgtgggtattaagtgagttaatacatataaagcaactaaaccaatgtatgcatatactaaatatttaattaacatcagatattattagtttttgattggctctagatctggtagtaatcaaggccttgcactatcaaggcctattataaaagactacagagaaagaataataaccgctcgcttgttgagtgcttactgtgtatcagacacttttcaaggcaccttttatgtactaaagaaaagggaatttataggcacagaaaaattgtttttgataaacatagagaagaaattttccctgtgtctgaaagatcctctaaattggcgagagagacc

SEQ ID NO: 139108 - DNA, 614 bp, Homo sapiens
cctctatgtttccattcccgaggggtaaatggcatatatttttttctttcaaaacgratcatagtcaggcgcggcctgtaatccgagcactttgggaagctcaggcgagctgatcacctgaggtcaggagttcgggaccagcctggccaacatagcgaaaccccgtctctactaaaaataaaagaattagccggacgtggtggcgggcgcctgtaatcccagctactaggaaagctgagacagaagaatcgctggaacccgggagtcggaggttgcagtgggccaagattgcaccactgcactccacagagcgagactgtctcaataaataaattaatcgaatcctgttgaggtataatttacaaacaatggttacacccacgtcagtggaagagtttgatgacttttagcaaatgcatgtataggtgtaatgacctccccagtcaaaatgacagtttccatcgcccctaaaaattgtctcttgcctgtttgcgaagattcccgcaaccactggtcttggcctcactacagatagtgttgcggaagagtatccttatgtatgaatatagctaatctgtttccaaaacaccggtatgcgctagaactaggatgaa

SEQ ID NO: 139109 - DNA, 491 bp, Homo sapiens
gggagccatactatgaaggacacatgcttttcagatctgcagggagagtctggtttggcccatgatccaacttacaaatgagtaaaaagagaagctggttagagtccctggagtattcagagttgctggctaacggttagaggaagtcaggatggccagttaaaatcacagaggtggctgccagggctcgttcgacacctgattatgaagayagatggatcagggcagatctgccataatccttcccagtcacacttctccaaaggtgatccattctctagtccaaagtctacatcagccaactgaaattcaggacaaatcatagccccactgggattttagcttatatgttcagagttctgccaacatgtacagtagatttttggatacaagatgatttctggaatacactctagctggacgaagagtagaaagggcagcatggagggagtcgtgtgaagtcattttttcttctcttattttgtttcaag

SEQ ID NO: 139110 - DNA, 491 bp, Homo sapiens
gggagccatactatgaaggacacatgcttttcagatctgcagggagagtctggtttggcccatgatccaacttacaaatgagtaaaaagagaagctggttagagtccctggagtattcagagttgctggctaacggttagaggaagtcaggatggccagttaaaatcacagaggtggctgccagggctcgttcgacacctgattatgaagacagatggatcagggcagatctgccataatccttcccagtcacacttctccaaaggtgatccattctctagtccaaagtctamatcagccaactgaaattcaggacaaatcatagccccactgggattttagcttatatgttcagagttctgccaacatgtacagtagatttttggatacaagatgatttctggaatacactctagctggacgaagagtagaaagggcagcatggagggagtcgtgtgaagtcattttttcttctcttattttgtttcaag

SEQ ID NO: 139111 - DNA, 607 bp, Homo sapiens
actttgggaggccgaggggggttgattacctgaggtcaggagtttgagaccagcctggccaacatggcaaaacccccatctccactaaaaatacaaaaaaattagctgggtgyggtggcgggcacctgtaattccagctactcaagaggctgaggcaggagaatcgcttgaacctgggaggcggaggttgtaatgagccaggatcatgccactgtactccagtctgggcaacaagagtgaaattccacctcaaaaaaaaaaaaaaaaaaaaaaaaaaaaaaaaaaaaaaaaaggaaatcaagctcagagtgataaggaaagctgcctggagtcacataattagggaactggaacctgggtccacgtggctctaatatcagttctttttcacgaagcacactgcctctctagacagtagtgataattagagctggggcagactccttaatctcttagcttcaatatccttatctttaaaatgagaggcctggatatgaacactaagattcccctatcactaatactcgctaatagttaatctcccttatttctcacattggagaagagtagagggagaaaaaatgagtcatctgctgctatagaactt

SEQ ID NO: 139112 - DNA, 607 bp, Homo sapiens
actttgggaggccgaggggggttgattacctgaggtcaggagtttgagaccagcctggccaacatggcaaaacccccatctccactaaaaatacaaaaaaattagctgggtgcggtggcgggcacctgtaattccagctactcaagaggctgaggcaggagaatcgcttgaacctgggaggcggaggttgtartgagccaggatcatgccactgtactccagtctgggcaacaagagtgaaattccacctcaaaaaaaaaaaaaaaaaaaaaaaaaaaaaaaaaaaaaaaaaggaaatcaagctcagagtgataaggaaagctgcctggagtcacataattagggaactggaacctgggtccacgtggctctaatatcagttctttttcacgaagcacactgcctctctagacagtagtgataattagagctggggcagactccttaatctcttagcttcaatatccttatctttaaaatgagaggcctggatatgaacactaagattcccctatcactaatactcgctaatagttaatctcccttatttctcacattggagaagagtagagggagaaaaaatgagtcatctgctgctatagaactt

SEQ ID NO: 139113 - DNA, 607 bp, Homo sapiens
actttgggaggccgaggggggttgattacctgaggtcaggagtttgagaccagcctggccaacatggcaaaacccccatctccactaaaaatacaaaaaaattagctgggtgcggtggcgggcacctgtaattccagctactcaagaggctgaggcaggagaatcgcttgaacctgggaggcggaggttgtaatgagccaggatcatgccactgtactccagtctgggcaacaaragtgaaattccacctcaaaaaaaaaaaaaaaaaaaaaaaaaaaaaaaaaaaaaaaaaggaaatcaagctcagagtgataaggaaagctgcctggagtcacataattagggaactggaacctgggtccacgtggctctaatatcagttctttttcacgaagcacactgcctctctagacagtagtgataattagagctggggcagactccttaatctcttagcttcaatatccttatctttaaaatgagaggcctggatatgaacactaagattcccctatcactaatactcgctaatagttaatctcccttatttctcacattggagaagagtagagggagaaaaaatgagtcatctgctgctatagaactt

SEQ ID NO: 139114 - DNA, 607 bp, Homo sapiens
actttgggaggccgaggggggttgattacctgaggtcaggagtttgagaccagcctggccaacatggcaaaacccccatctccactaaaaatacaaaaaaattagctgggtgcggtggcgggcacctgtaattccagctactcaagaggctgaggcaggagaatcgcttgaacctgggaggcggaggttgtaatgagccaggatcatgccactgtactccagtctgggcaacaagagtgaaattccacctcaaaaaaaaaaaaaaaaaaaaaaaaaaaaaaaaaaaaaaraaggaaatcaagctcagagtgataaggaaagctgcctggagtcacataattagggaactggaacctgggtccacgtggctctaatatcagttctttttcacgaagcacactgcctctctagacagtagtgataattagagctggggcagactccttaatctcttagcttcaatatccttatctttaaaatgagaggcctggatatgaacactaagattcccctatcactaatactcgctaatagttaatctcccttatttctcacattggagaagagtagagggagaaaaaatgagtcatctgctgctatagaactt

SEQ ID NO: 139115 - DNA, 506 bp, Homo sapiens
cagactccttaatctcttagcttcaatatccttatctttaaaatgagaggcctggatatgaacactaagattcccctatcactaatactcgctaatagttaatctcccttatttctcacattggagaagagtagagggagaaaaaatgagtcatctgctgctatagaactttagaccaaagacaattaacccaagcacaaagtagtgtttaaaataaaatgtcaagtscagatgtaccctgtccatagttagaagagagtcctctggttctcggaccctatcaagtgagaaaattgtattgccttttgcctcataacacttgtattattttcaggtaagttgccttaaggactaaattaccgggggagacttggaacttggcttactttctgtgactaagagacaacaaaactcatcatcgaatccctttatcattgccaagtcttgcagaaggaacctttaataacccttcagtggtgggcttcctacacttcctccaccacctg

SEQ ID NO: 139116 - DNA, 552 bp, Homo sapiens
ggaacttggcttactttctgtgactaagagacaacaaaactcatcatcgaatccctttatcattgccaagtcttgcagaaggaacctttaataacccttcagtggtgggcttcctacacttcctccaccacctgacttttttctgtctagatcttcagggtccattatgaagcactggaaaagagacactcagtgtaattgatctttgaaagatgtgcttggagatttctcttggataaagaaaataaaagtttctaacaattttatgatttttcagatagcaagtgtatttgtatgaatgttcagacaaagataatgaaagcacattactcaatataatgtacaaaattaagaaaaagaagattaaaatagaatggcaaratttcaggctttctgccaaaatgaaacaaactagccttttgatgcattcggtagatccatacatcctgattacaatttgaataaacaatggctatttcttctttctagaaatgggatcttgctaacttgcccaggctggactcaaacccggccataataaccatttttaaa

SEQ ID NO: 139117 - DNA, 563 bp, Homo sapiens
gtcttcaccgtctaacatcctacatcctaaaaacatcctacatcctaaaaacatcctacatcctaaaaacagtgcatatatccttccatttttcaaaagtccraattacatctccctactcagaacccaaactcagattcatcaagtctgtctcagacattgcctgaatcaaacaatcggcccagatggatattcatgaatgggtgaacttaacccctatatgccctccaacttcccaatccccactggaaagtaagagtgcgctcctggggctatcttagcttgagtggatcctgaagggcatgtctggcagggagagggctgctgccctagagattcaagtttatcaaaatggaatggaagtaaagtcaggtgggagacatggttagaaaatgagagaataactgaggttgacattaggagatagagtaaaaaaccaaggaatgcaggaaccagggaaatgggactagaacctgggtggactgagcaaatgggaggagacttctgggaatgcctggggttcccaggcattcagggttgctgctgcccaagtgtttactggg

SEQ ID NO: 139118 - DNA, 563 bp, Homo sapiens
gtcttcaccgtctaacatcctacatcctaaaaacatcctacatcctaaaaacatcctacatcctaaaaacagtgcatatatccttccatttttcaaaagtccaaattacatctccctactcagaacccaaactcagattcatcaagtctgtctcagacattgcctgaatcaaacaatyggcccagatggatattcatgaatgggtgaacttaacccctatatgccctccaacttcccaatccccactggaaagtaagagtgcgctcctggggctatcttagcttgagtggatcctgaagggcatgtctggcagggagagggctgctgccctagagattcaagtttatcaaaatggaatggaagtaaagtcaggtgggagacatggttagaaaatgagagaataactgaggttgacattaggagatagagtaaaaaaccaaggaatgcaggaaccagggaaatgggactagaacctgggtggactgagcaaatgggaggagacttctgggaatgcctggggttcccaggcattcagggttgctgctgcccaagtgtttactggg

SEQ ID NO: 139119 - DNA, 563 bp, Homo sapiens
gtcttcaccgtctaacatcctacatcctaaaaacatcctacatcctaaaaacatcctacatcctaaaaacagtgcatatatccttccatttttcaaaagtccaaattacatctccctactcagaacccaaactcagattcatcaagtctgtctcagacattgcctgaatcaaacaatcggcccagatggatattcatgaatgggtgaacttaacccctatatgccctccaacttcccaatccccactggaaagtaagagtgcrctcctggggctatcttagcttgagtggatcctgaagggcatgtctggcagggagagggctgctgccctagagattcaagtttatcaaaatggaatggaagtaaagtcaggtgggagacatggttagaaaatgagagaataactgaggttgacattaggagatagagtaaaaaaccaaggaatgcaggaaccagggaaatgggactagaacctgggtggactgagcaaatgggaggagacttctgggaatgcctggggttcccaggcattcagggttgctgctgcccaagtgtttactggg

SEQ ID NO: 139120 - DNA, 563 bp, Homo sapiens
gtcttcaccgtctaacatcctacatcctaaaaacatcctacatcctaaaaacatcctacatcctaaaaacagtgcatatatccttccatttttcaaaagtccaaattacatctccctactcagaacccaaactcagattcatcaagtctgtctcagacattgcctgaatcaaacaatcggcccagatggatattcatgaatgggtgaacttaacccctatatgccctccaacttcccaatccccactggaaagtaagagtgcgctcctggggctatcttagcttgagtggatcctgaagggcatgtctggcagggagagggctgctgccctagagattcaagtttatcaaaatggaayggaagtaaagtcaggtgggagacatggttagaaaatgagagaataactgaggttgacattaggagatagagtaaaaaaccaaggaatgcaggaaccagggaaatgggactagaacctgggtggactgagcaaatgggaggagacttctgggaatgcctggggttcccaggcattcagggttgctgctgcccaagtgtttactggg

SEQ ID NO: 139121 - DNA, 337 bp, Homo sapiens
aagtaaccaaggtggctagaccaggactcaggtctcccaaagcctagctctgtatcggatatgtctgtggctcatggtgtgtttgtgcacgtgtgatagggagataatacccgatgctaaagatgcatattcaaacttagaaagttggatccacgraaaagggccaggttatagagggcctgggatgctaaggtgagtgcagacttcattctccaagacatgcagagctccagaggttttttgagctgggaagacccatgcttacagaactagtattgttggtgagataaatctgagtggacaagggcctgaggctgggggacccaggcaaaagcct

SEQ ID NO: 139122 - DNA, 597 bp, Homo sapiens
ttgatctgcatttcctgaatgatgcataatgttgagcattgttttcatatgcttactggctgcatgtgtgtcttcttttgaaaaacatctgttcatgtcctttgcctactttctaatggagttgttttttgcttgtgaacctatttgttgcatatagcttctggatactagacatttgtgggactggtagtttgcaaatattttcttcccttctgtaggttgtccaattactctattgatagtttagggtgtgcttgttcagaagttctttagtttaattaggtatcatttttmaatttttgtttttgttgcaattacttttggcacctttgtcatgaaatctttgcccagtcctgtatccagaatggtgtttcctaggttatcttccagggtttttacagttttaagttttacatttaagtcttttatacatcttgagttgattttttttgtatggtgtaaggaaggggttcaatttcaaacttctgcatatggctagcaagttatttcagcaccatttattgaaatgtaagtcctttccccattgctggtttttgttggcttcgtcagagatcaattagttataggtggacagca

SEQ ID NO: 139123 - DNA, 214 bp, Homo sapiens
ggtaatcccaatggcaaagggccttgcaggcataacccaattcactaaacatacatttgtatttkcagtcttctgctttatctttggaaatgtatgagaactttgcatttgattccaaatatcaaaaataatttcctcaaatcttccagtgaactgatgttctgggaaagcacaccacatttttcctgtggcttcccagactgcctagctcctt

SEQ ID NO: 139124 - DNA, 622 bp, Homo sapiens
tacttaatcctctgtgcttctgtttcttcatctgtaagctgagagaagcactgtctcacctgggtttgtgaggattcagtgagatagtgtgtaaaggagttggcaagtgtagacagtcaataaatgcagtaatgtttttataaaattatcaggattttttttcttttttttttttttttgagatggagtcttgctttgtcacccaggctggagtgcagtggcgcagtctyggctcactgcaacctctgcctcccgggttcaagtgattcttctgcctcagcctcccgagtagctgggactacaggcgtgcagcaccacacctggctagtttttgtattttttttagtagagacagaatttcaccatattggccaggctggtcttgaactcctgaccttgtgatccacccacctcagcctcccaaagtgctgggattacaggcatgaaacactgtgcccagccaaattgtcaggattttaagaaaagctatgcatttatattaggaatatttttgaagttgtttaaaggtgaaagaaggaatttctatggcacaaatgaagaacatgggaaagacccaatgcagagcacgtacttatgttaaaacaagttgtcagcatgttct

SEQ ID NO: 139125 - DNA, 622 bp, Homo sapiens
tacttaatcctctgtgcttctgtttcttcatctgtaagctgagagaagcactgtctcacctgggtttgtgaggattcagtgagatagtgtgtaaaggagttggcaagtgtagacagtcaataaatgcagtaatgtttttataaaattatcaggattttttttcttttttttttttttttgagatggagtcttgctttgtcacccaggctggagtgcagtggcgcagtctcggctcactgcaacctctgcctcccgggttcaagtgattcttctgcctcagcctcccgagtagctgggactacaggcgtgcagcaccacacctggctagtttttgtattttttttagtagagacagaatttcaccatattggccaggctggtcttgaactcctgaccttgtgatccacccayctcagcctcccaaagtgctgggattacaggcatgaaacactgtgcccagccaaattgtcaggattttaagaaaagctatgcatttatattaggaatatttttgaagttgtttaaaggtgaaagaaggaatttctatggcacaaatgaagaacatgggaaagacccaatgcagagcacgtacttatgttaaaacaagttgtcagcatgttct

SEQ ID NO: 139126 - DNA, 659 bp, Homo sapiens
caccacgtccagccaacaataaattatttaattaggacacatgaagattctatgacctagaactgggacagacgagtggctctatatcttaataaagtgatattatcttatgctacaattagctctactcactattggaatgtccgtctaaatactattcttatcacattaatttcctgctcaagaatttatcaggctttttaacgtcctttgaaactaacctaacccaacccaactttcaatgccatctccatgtgtaatgcccaaaatatctcccagtcttatcctttggcttcagccaaacctgttgcctgatcagctttggtacaaaaattcttatttcctcctatttacccttgattggtctgttcccattatttggacaggaaaggaggatggaggtgggagtacaaagggagtggggagggagaaggaggaaaagataatagagagggagggaatattaagaaataaagagaaagggaataagatgtttgcactgagctacctgattccatccaactccccagcatgtattttgtgctcttcctccacgcagcccttttcaaggaggcaaatcaattgtttgaaaaactttcagtaagtactgagtgyttaccttcaaggtattattctgctttgtgatttctaaagtcatc

SEQ ID NO: 139127 - DNA, 595 bp, Homo sapiens
ttgaagtaacacatgttctgtgtctttacagtaaccatgctatcattgcttatttcaaatcttttgattaaatgcagaaatatgtagtaccacaggagctggagatagtaactgtgcctgaagcaaacatgaattattctcaacccttaggaacttgttcttgaaacaaatgtgtgtagctaagacccagtgtgttgggaccaactggacagcagggaactttctgaattaacttctatgtagaaaatatttattaaaaggggaatagtagcaatgtactaatttgaaacttaccacagcaattgtttagacattaaaccaacaaaagatattttggagaggagtatttatcattggcagtatatagaaatgctgcaaaatgatcttgaaaagcagactaactttgagtgaatttaatcactgcttttaaattctccacagatgattcatccttgatgtcttagtaccatataagytcctgagcttggattcaaccttcagaaaaacatgagcagaaggcccagtttctgtcattgagtgaaaagggcttaaggtaaaaataatcctcagttattaaatgaagagttattttctt

SEQ ID NO: 139128 - DNA, 418 bp, Homo sapiens
ttttaaaataaatctattgccctttgacaaaatcaatccaaaccccataaaccaagaagtcatccacttgatattaatgagcccacatttgcatttatttgtctcttacactagacaaaccattaatttcatgtttatgtttcctttgaagtctgaatgctcatagatagatggcctcatcgaatctcctgctggtacattaatatttcgctataaatgataaattttatcattttccacaacacccctttttactttaagaaagctgtgaaaatacaagcaataagtcttaaggtctgaaagcacagctttttttttaatactcttcagcagagatcattaaaatagtgatatctttaacatcaagatacctttgatggcctctaggacttasaaaccaacatgatatatatctcat

SEQ ID NO: 139129 - DNA, 542 bp, Homo sapiens
cacaggattttccgtgtaagcacaaaacagatcatctgctctgtaaaagtactttgtaaagtctaaaatgcttttcacaaacagaacattattaatgtttttaggtgagatcaatgcctttatcttcacagaawaatctaaaagacattttagtttgaaatattttcagacaaaataccaaaaacctcattgaagccacttggctcaactggttagaacatagtatctagtgttagcttcacaatttctataaaagaggtgcttaaaagccacaatcttataggaagagaggggagcattaacctgtgaaatcactccctagatggcgccattgaggttacatcaaggccacagtcgtcggtcccatcttttccagaggttcagagcaaaatgtgctgctcctagtgttcaattataccccaggctggctgcctccaaaacacttgctgatgctcacaaatgggtgataatttagtgcaaacccatattattattcacctagatgaagatttaggtgttagtttccagtgataataaatcaa

SEQ ID NO: 139130 - DNA, 560 bp, Homo sapiens
acagcttaatagcatcaaagacaggaatggttatgtttactattggtagtcctattttgagtaagaataaaacatttttgtagtaacatatagcagatgccgaggctaaaaatgtttccattataacatatcactccaaattccagataggacagaaaaagaaatgaaacatcacaaatgaaatttagatacctacttttgcagtcatcttggccaaaagctcttgtaaatccattattccttgcaccaggcttaagaaatcactgcaggttgggcaagctcaataaagaaaatataaaacatatatatttatattgtgctaatataagaaataaaattttaaaacagtagatacgtgactatgtagaagagtttttggggtttttttggttgacattgctttgaaatttgagtgaaatcacagaggatttcaggtctggatcttttcctactttaataagcaaaaagaaaggaacaggaaaaaggyattgttaactaaaaagaaaggcaacatgacattttaaagttaaaattaaactctcatttttatagggaggtaa

SEQ ID NO: 139131 - DNA, 675 bp, Homo sapiens
cattcacttgatctttatagctctgtgagatggatgtgattgcatcttatagatgggaggttttgagatgctaagtgtaaggtacatggatgtgctttggtcaagaataggctgaggcagacatctgggccagagtgactcagtgagtttggagtacaggtgcataactccacttgttatataatcacagccataacatgggaaggctcatygctattattgtttgtaaaaggtataactgccctgctgatgctgtgcatacagcatgcatccagagggagagagggaagctgttggccgtataagggagagccagccttgcaggccagggaatgcagctgtaagcatgggagcggcaggagctgcagaaccagagcaggcagccgagataaaggcaaacagtgtgagagagctgctgatgagagagtcgctgaataaaaccgtatttcacctgcctatagccccccgagtgttctttcagccattcaccacccatccactcactcccctcgaacctcagcatgggctgcaacctaatatctggcatgacatttggcatagctggcaggagaaggtgagtggttcttcagccccgaggctcccagctcggctatgtgacctcagcatgggctgtggtacccagtggcagtggtgctgctttgatgatccccagtg

SEQ ID NO: 139132 - DNA, 578 bp, Homo sapiens
ttgctcaatgacttcccctacacatagcattgtcagatggtttttcacttttgccaggctaatgggtgaagaaatggtttttcataatggttttaatttgcatttccaagataactagtgaacttgaattactttcaatatgttcactggttatttatgttttctactttggaaaaccatccttctatatcttttgtctgacttcctattgagttaaaaaaaaaaggtttcttattgatttgcagcatttcttcaatgaatactttttttttgctaattgttgtcaagatcttccttgatgtattgtcacactttttagaattttatgcagtaaacccatcagtattttctttaaggacttgtgcatttttttatcttgtctaagaacttctctatcctgactgagatcgtgaagatatgttcttatgttgtcttctaaacctwtcaacattgagctttcagttaggtatttaattcaattgtacttgtaagtgatttttatgtatggggtccaggtatatatttgaagcttttccttatactgtacacaaaaatcaattacatcactcaatgtctgt

SEQ ID NO: 139133 - DNA, 597 bp, Homo sapiens
gtgctacaactcccctgtaaaactgtgtgagcctcgtggttatttggtggagggacatggtagactgccagaatgatcccagtcctttgctcctcactgtgtccataccttgtgcaatgtgaatttgtagcatatcccatcaaaaggtcaaatctatttccagtacacttgaatctaagctgggcttgtaacttgctttggccaatataatgaagcaaagtaatctagtgcaagtttcaagcctaggcctcaaaaggccatgcacatttctgctctgactcttgaaactttattccatgawcatgtaaactagtttgggctagacttctggaaatcgagaggccacatgaagcagagatgagccataccagctaaggccattcaaggcctagtacaactaggccccagaaaccccagcagctgatcaaagatgcacaaatgaacccatggagaataaaatccagcaaagtaagcccagctcaaattgctaatgcacaaaattgtgaggtaaataaaggctgttgttttaagccattaagctttgttttgatttgctgtatatcaaaagctaactggtacaatagactttcaatcata

SEQ ID NO: 139134 - DNA, 565 bp, Homo sapiens
agtatagctgatcagttggtctttagatgctagaaggcttatgtgtgttgtttttagattcaaagactccctctttcctggaatttgaaagtattgataggttcatgacttcaacactacagagatacggcccattgtccttgtaagatttgtatgcytggtgtgggtctcgatgctgatgtgtaatggccagggacataatcttacatcacgactgactgcaaatgagccattcagccatttcttcaaatgtggagtagacgttacactagtctccagtgttacgtatgtggttttacactgctccaatataaattttgatattcgctacctcaaggtgacaaattctctgtattctttaaggggactttgcaattgaaggtctcattataaactactggtggtgaaatcaagggttgggcagtaggagacccccatttaggagggcatttgtcgttattgcttcttttattggcacctaattagatatgtactagagcctgcaggaactaataagagagcacaggaggtaggcgaacatattgaattctgagtaattttcatg

SEQ ID NO: 139135 - DNA, 565 bp, Homo sapiens
agtatagctgatcagttggtctttagatgctagaaggcttatgtgtgttgtttttagattcaaagactccctctttcctggaatttgaaagtattgataggttcatgacttcaacactacagagatacggcccattgtccttgtaagatttgtatgcttkgtgtgggtctcgatgctgatgtgtaatggccagggacataatcttacatcacgactgactgcaaatgagccattcagccatttcttcaaatgtggagtagacgttacactagtctccagtgttacgtatgtggttttacactgctccaatataaattttgatattcgctacctcaaggtgacaaattctctgtattctttaaggggactttgcaattgaaggtctcattataaactactggtggtgaaatcaagggttgggcagtaggagacccccatttaggagggcatttgtcgttattgcttcttttattggcacctaattagatatgtactagagcctgcaggaactaataagagagcacaggaggtaggcgaacatattgaattctgagtaattttcatg

SEQ ID NO: 139136 - DNA, 580 bp, Homo sapiens
cacagtaaacaagtatactaataaatgagtaactttagattgtaatatatactatgaaggaaatataagagctatactggagagagaaagagagagagagagacttagggggagagttgactttacattggggaaggcttccccgcagaggtgacgtttgagctgaagcctaaatgaaggagccagccatgcaaagataatattattattaataatcactcacattattaatgaygaacacttcatatgctaggtactattctaaattctttatattcatgagctcatttaatccttataacaattgtgcaaaggagataggtattatgagccacagaaaggaaaatagaggttaaatcacttggccaaggttatgtataggtccagtaagctgagagttgaatccaggctgttgtgctccgaagcccttgttcttgaaacagccagccaaaaggccccttggatcaaacaagtttaaagggcacaaggatggcccatgtgggtgaagctaccaaaggaggccagagagcatagccagggcctttcaggccatggcaaggagttagggttttattcaaat

SEQ ID NO: 139137 - DNA, 555 bp, Homo sapiens
taaatagcttagtagtagctagatgcagacactcataggtcaaacttgggtccaaatcctggtgctgccatttattagtagcagggttacagacaaatatataacctcagtttcctcatcttaaaaagaggaaaaactaatagaatgagtatggaataagttaatctatgtaaagtactcagcactgtgcctagcacaatcaacatcaaatgttatctaacatcatctcctttcatactctaatcagcagaacactactgggtgagaggttgagaaaaactctaagagtaacagggatcaaaaaataagaatcacaaagtagtaatggatagctgaaattcactctctgtgagggtggctragactaaaagtgatagaaccagcatcttgatatatgggacagagcttctgctactgtaaagttggcaagttctggctgggaagaaacttgtgaagaaggtaaagtttgtttcgtgcattagacactaccctctccttaatccttttctccttcttaccctccttcaggtaactggtcttccacgacttcattta

SEQ ID NO: 139138 - DNA, 614 bp, Homo sapiens
gctacatatttatgattccatttatacaataccttgaaaaagacaaaagtaaagagaatgaaaatagattactggttgctaggcaccggtggtagggtaaagggttaactataaaaaaatacaagagaaatktggggggagatagaaatgtactataccttgattgtgatggtaaaccttggtcaaacctcatagaactgtatgctaaaagggtgaattttactgtatgcctcagtttaattaagcatgttttaattaattaaaaattatgtctcgttttataaaagcatattcttataaactatttttgtaggagatctgcattttaataattgcataaggtgatattttcttaactgggtttgacatttttcaaataaagtcattagagaagatgtttccaacatttgatgggatgttggttatggatgacctctaagatcttctccaactccaaggtttttgaggtgtgcatgtgatcccccaagtttacaaacacacattttatatatatatatatatatatatatatatatatatatatacacacatacacatatatgttaagtatatattcatagttctaattacatttatattatatatacatgtaa

SEQ ID NO: 139139 - DNA, 612 bp, Homo sapiens
ttgtcttttatatgtctgtttccctaattaaactgtgaactaaagrgcaaaaaatatatagtagtttgtatttgtgtacagtgcttagtgtatcacagaatctcaaaatgtctttggaattactattatttgtttaatgcacttctgaaaattgtacatataaatttcatacaatacgcatacaaaaacacataatataaagaatatacacattcttatacagtgctattccagtgagggtagctaatattactgataaatctctaagaaaatatggcttaacaaaatgtttcctcatttgatgtttttgcttataacacctaaatttgaacattttataagcatgaaaacttgtttctttgttttcctaatggaaatttactgttcttcaggtactttaaattttttaaatatatactaccagaaattcaccatactaataaacctgttgtttataccatataattttctttctgaaaacagattacatttctaataacatttagtgctgtaccgtgagcttcatgctacctcaagtacactgaccacttcaaaagctccaagcatatttgcaaaagctttgacgccatgtaactattgagaggatagaga

SEQ ID NO: 139140 - DNA, 612 bp, Homo sapiens
ttgtcttttatatgtctgtttccctaattaaactgtgaactaaagggcaaaaaatatatagtagtttgtatttgtrtacagtgcttagtgtatcacagaatctcaaaatgtctttggaattactattatttgtttaatgcacttctgaaaattgtacatataaatttcatacaatacgcatacaaaaacacataatataaagaatatacacattcttatacagtgctattccagtgagggtagctaatattactgataaatctctaagaaaatatggcttaacaaaatgtttcctcatttgatgtttttgcttataacacctaaatttgaacattttataagcatgaaaacttgtttctttgttttcctaatggaaatttactgttcttcaggtactttaaattttttaaatatatactaccagaaattcaccatactaataaacctgttgtttataccatataattttctttctgaaaacagattacatttctaataacatttagtgctgtaccgtgagcttcatgctacctcaagtacactgaccacttcaaaagctccaagcatatttgcaaaagctttgacgccatgtaactattgagaggatagaga

SEQ ID NO: 139141 - DNA, 413 bp, Homo sapiens
gcatatttgcaaaagctttgacgccatgtaactattgagaggakagagaaatcgaatccttcaagaatacttttcccttatgttaattaccatatttttgagatcataaacatatttctaagaaagctaaatcaagtttataaaaagctatatcttgaaaaattaaacatttcagggccattattcactgtctccatgcagagggctagctatgaatataagtagcataaacagaaaacccactaaataagcatattagttatacctttctgaaggctcttcaaaaacatcctcataatcattatgtgggaaattccgaagagaaagttttaccttctctgaattaactttattttcaaaaacctacagacataagaaaggaaacaaattatagcactggttttagaaaaata

SEQ ID NO: 139142 - DNA, 488 bp, Homo sapiens
tgtaatacagggggcgttgaggatagtgcacagaagagatacctcttagtactaaaactatccttggaacagaagctccttagggccacctataaaaaaggtgaagagcaagcctcagacaggatcaggttaaacttcaagtaacataactacaaggcagaaaaacccaacattctttaaagaaaaatcaaggccgggtgtggtggctcacgcctgtaatcccagcactttgggaggctgaagagggtggatcacgaggtcaggagttcgagatcagcctgacaaacatggtgaaaccccatctctactaaaaatacaaaaattagctkggcatggtggcacgcacctgcaatcccagctactcaggaggctgaggcaggagaatcacttgaacccaggaggcagaaggttgcagtgagccaagattgcaccactgcactccagcctatgagacagagtgagactctaagaaaaaaaaaaaaaagaaa

SEQ ID NO: 139143 - DNA, 488 bp, Homo sapiens
tgtaatacagggggcgttgaggatagtgcacagaagagatacctcttagtactaaaactatccttggaacagaagctccttagggccacctataaaaaaggtgaagagcaagcctcagacaggatcaggttaaacttcaagtaacataactacaaggcagaaaaacccaacattctttaaagaaaaatcaaggccgggtgtggtggctcacgcctgtaatcccagcactttgggaggctgaagagggtggatcacgaggtcaggagttcgagatcagcctgacaaacatggtgaaaccccatctctactaaaaatacaaaaattagcttggcatggtggyacgcacctgcaatcccagctactcaggaggctgaggcaggagaatcacttgaacccaggaggcagaaggttgcagtgagccaagattgcaccactgcactccagcctatgagacagagtgagactctaagaaaaaaaaaaaaaagaaa

SEQ ID NO: 139144 - DNA, 488 bp, Homo sapiens
tgtaatacagggggcgttgaggatagtgcacagaagagatacctcttagtactaaaactatccttggaacagaagctccttagggccacctataaaaaaggtgaagagcaagcctcagacaggatcaggttaaacttcaagtaacataactacaaggcagaaaaacccaacattctttaaagaaaaatcaaggccgggtgtggtggctcacgcctgtaatcccagcactttgggaggctgaagagggtggatcacgaggtcaggagttcgagatcagcctgacaaacatggtgaaaccccatctctactaaaaatacaaaaattagcttggcatggtggcrcgcacctgcaatcccagctactcaggaggctgaggcaggagaatcacttgaacccaggaggcagaaggttgcagtgagccaagattgcaccactgcactccagcctatgagacagagtgagactctaagaaaaaaaaaaaaaagaaa

SEQ ID NO: 139145 - DNA, 586 bp, Homo sapiens
taccaactatgttattgaaaagatacaaaatagtacaattttaattaaagacaaaataaatttygtttcgaattttatcaagtaatttcaagacactccttgataactggagacactcttactaattcaaatactagggtttaaacatgctataccttgcattccacaaataaatatgtgaatggtcctttaccccaatgacttatcctctttatataaatacacacacatattattaagacctctccagtgcacagatgaatagactaaaattcatatcaaaccataccaatagtcagttgttcaaaccttccatcagaacagctttgatcagaaatgcatgcctaatcctagtattttaataaacaacagtgcagtgagtcacagataaccctacagaagcacaagaattaaactggataaatttccctttcctggcatgttttctagtatatcttaaaatagacaaaacaaagcaatattaaaatcattaacatttaattcaattttgagttgcagctactgtagtaaaccagtaataagatcatacaagtcaacatcaacacatgtgtactgaaattttagg

SEQ ID NO: 139146 - DNA, 586 bp, Homo sapiens
taccaactatgttattgaaaagatacaaaatagtacaattttaattaaagacaaaataaatttcgtttcgaattttatcaagtaatttcaagacactccttgataactggagacactcttactaattcaaatactagggtttaaacatgctataycttgcattccacaaataaatatgtgaatggtcctttaccccaatgacttatcctctttatataaatacacacacatattattaagacctctccagtgcacagatgaatagactaaaattcatatcaaaccataccaatagtcagttgttcaaaccttccatcagaacagctttgatcagaaatgcatgcctaatcctagtattttaataaacaacagtgcagtgagtcacagataaccctacagaagcacaagaattaaactggataaatttccctttcctggcatgttttctagtatatcttaaaatagacaaaacaaagcaatattaaaatcattaacatttaattcaattttgagttgcagctactgtagtaaaccagtaataagatcatacaagtcaacatcaacacatgtgtactgaaattttagg

SEQ ID NO: 139147 - DNA, 617 bp, Homo sapiens
taaatacacacacatattattaagacctctccagtgcacagatgaatagactaaaattcatatcaaaccataccaatagtcagttgttcaaaccttccatcagaacagctttgatcagaaatgcatgcctaatcctagtattttaataaacaacagtgcagtgagtcacagataaccctacagaagcacaagaattaaactggataaatttccctttcctggcatgttttctagtatatcttaaaatagacaaaacaaagcaatattaaaatcattaacatttaattcaattttgagttgcagctactgtagtaaaycagtaataagatcatacaagtcaacatcaacacatgtgtactgaaattttaggtagcctagaaaagtaaactatatgataaaaacaaaatcttcatttgcagaagaaaacctttcagaaaatatagtgcaagcttttaccatatttcccacctcccctcaagcttggctaagtaagcccctgcaagtgcttcccctataagctccatgttttataatgatttctggactcatctcctcgggttggaccataagcatcttgaggacagaaactgtaacattttcacttttcaatctccagc

SEQ ID NO: 139148 - DNA, 579 bp, Homo sapiens
tgagaccctatatcaacaatgcttcacccttgaaacccagggactgatgatgatacagttgccatgagctacattctgagtaaatactttatcaattattagaatggttcaagtaaaagtaatgaatgacttaagacatctttctgaaatgactctgttatctggatgcctctgctattagggtgcaaggcaaacaaccttctactgtttgtttcattcatgatataaattgctttggcatattccctccaacctcctgaacctcaggtcsatctgtttgtccatttgtctgtttacacttcttttcttccctccttcctacgttcctctccctctcttgtggaagtgtatcagtaattataagagggtgctttatttcagaagacacaattcctgtacctccaatcactgttaccaagcaaaagagttcactgttcaatgtgttagaagccaatactatggcactgggtttttgagaaaagaaagacttttttctaggtcaaccaacaaggagacaggagtctagctcaaatctgtcttcctgtactgtttttaaggcagtatttttattagaaaatg

SEQ ID NO: 139149 - DNA, 606 bp, Homo sapiens
atctgaaggctctaggggagtatacttccttgtctcttcctgtcttttggtggttgccagaaatccctggacagcacgattcaactgtctcacacaatttaaaccacaacagtcttctctccaatcccccaaaagtcatatccttactgtatgcaaaatacattcaccccatttcaacatctccaggacccttaacccattccagcatcaactctaagtcaaaattgcctctaaatatcaactgtaatgtcccaaatctcatctcctaaatcatctaaatcaagtatgtgtgagatcctgggtatggtccagcctggggcaaagtttctctcctayggacactgaaatccacaaaacaagttatctgcttccaaaatacaacaggcataggacagacagtcaccttccaaaagggagaaactggaaggaaaaagtgggtcacaggtctcaaacaagtccaaaacatggcagggaaattttcattaggtttccagggcctgagagggctgtctggatccatgagtcacacaggtaatcttttcagtgaatggttgttcagccacacccttggtcctgtttcgggagtatgtttcctggattggctga

SEQ ID NO: 139150 - DNA, 594 bp, Homo sapiens
gttgttcagccacacccttggtcctgtttcgggagtatgtttcctggattggctgagaactttcaaacccatcaagtgctggttcctttgcttaacaattccttcctcaagttatctctttccttttgcatttcactataagcagcaaggaraaaccatggccccatctttcacgctttacttagaaatctcctcagctcactgcctacaagttctgctttccacccacaggtaaaacacagttcacccaaatttctgccactctgtaataaggatcacttttcctccagtgtctgataatatattcaccacttcctttctaagggcctcacaagaagcacctttaaagttcacatttctagtaacattctgttcatgacaacatatgtattctctaagatgcaaagaatctatgatagatgctttttctaaaattcccctctctactgagccttcaccagaatcacctttaatatctgtatttctaccagtagtcttttcaaagcagtctaggctttttatgttatgcacctaaaaattattccagtctatacacaattccaaagccacttacatgttttttaggtagttatt

SEQ ID NO: 139151 - DNA, 594 bp, Homo sapiens
gttgttcagccacacccttggtcctgtttcgggagtatgtttcctggattggctgagaactttcaaacccatcaagtgctggttcctttgcttaacaattccttcctcaagttatctctttccttttgcatttcactataagcagcaaggagaaaccatggccccatctttcacgctttacttagaaatctcctcagctcactgcctacaagttctgctttccacccacaggtaaaacacagttcacccaaatttctgccactctgtaataaggatcacttttcctccagtgtctgataatatattcaccacttcctttctaagggcctcacaagaagcacctttaaagttcacatttctagtaacattctgttcatgacaacatatgtattctctaagatgcaaagaatctatgatagatgctttttctaaaattcccctctctactgagccttcaccagaatcacctttaatatctgtatttctacmagtagtcttttcaaagcagtctaggctttttatgttatgcacctaaaaattattccagtctatacacaattccaaagccacttacatgttttttaggtagttatt

SEQ ID NO: 139152 - DNA, 594 bp, Homo sapiens
gttgttcagccacacccttggtcctgtttcgggagtatgtttcctggattggctgagaactttcaaacccatcaagtgctggttcctttgcttaacaattccttcctcaagttatctctttccttttgcatttcactataagcagcaaggagaaaccatggccccatctttcacgctttacttagaaatctcctcagctcactgcctacaagttctgctttccacccacaggtaaaacacagttcacccaaatttctgccactctgtaataaggatcacttttcctccagtgtctgataatatattcaccacttcctttctaagggcctcacaagaagcacctttaaagttcacatttctagtaacattctgttcatgacaacatatgtattctctaagatgcaaagaatctatgatagatgctttttctaaaattcccctctctactgagccttcaccagaatcacctttaatatctgtatttctaccartagtcttttcaaagcagtctaggctttttatgttatgcacctaaaaattattccagtctatacacaattccaaagccacttacatgttttttaggtagttatt

SEQ ID NO: 139153 - DNA, 416 bp, Homo sapiens
gaggtgcatgaggcagaaggagaggccaagacaagtgttagagcaggagtgaaagttcattaaaaggctttagagcaggaacaaaaggaaagaaagtacacttggaagaggcccaggtgggcaacttgaaggacaagtgccccatttgrccttgaacctaggatttcatatgctgaccgacttccagcattttgcaccccatttcccttgatttttctctcagggtgagctacccacatgcacagtggcctactagcacctgggaggtgagcatgggcagtgtgtttagtggagctgtacgcatgttcacctgaggctttcttccctttcctggtggaatgcctctggaaggtcatactctgccattttgcccgttaatgtgcatgcttgagcccacttgcccaattcctgaaagc

SEQ ID NO: 139154 - DNA, 534 bp, Homo sapiens
tcaccctatcagacaaggaaccacaaccaaatgggatgtttgctgagctgaaagagaataccagacaggtgtaagacggcagtgatcaaaaccagatacaaccatgtgaccagctgcataaacagggataaaatattgtgaatttttctttcttttttgatatgcatattttatacatatatatatatcatatttttgttttcttttaaaaatattaaagggaatgtgaatcagttggaaaagaaagaatatcactcaagacaaaaaagagacacttttggagaaggggagagaatgttttcagttgtacacagattagttttatcactgtagatgcaagcataaggttgtccttatttggatattaagtaacatttaaaagggtgtatataggtgccaggctgatayagggtgaactgtgatagctttataatatgttgacatggctaggctggaccacttttcccagaattctgttctctgaatgtttccagctaaaacagggcacaagcgaggttctcatgtcagatctgg

SEQ ID NO: 139155 - DNA, 573 bp, Homo sapiens
ggtgagggttacatgggctacaacacaaagagcctggtgcagggcttgaaggctggcaggttcygacaaaactcttctaggaagagcagcctccacccacagctgtggtcaagactaccagattcgcactggcaagtactttagaaaaagcatactgtctacagtaacactgctaagcatggagacttatttatttatttttgagacagagttttgctcttgttgctcaggctggagtgcaatggtgtgatctcagctcactgcaacctccgcctcccgggttcaagcgattctcccgcctcagcctcccgagtagctggaattacaggtgcccaccatcatgtctggcttaatttttgtatttttagtagagatggggtttcaccatgttggccaggctgctctcgaactcctgacctcaggtgatccacccaccttggcctcccaaagtgctgggattgcaggcatgagccaccgtgcctggccagagcttttcactttaaaattatttcaaaatggtaaaaggaaatctgaaaagtccagtgaaggaaaaccacttgggaaacagaaatc

SEQ ID NO: 139156 - DNA, 573 bp, Homo sapiens
ggtgagggttacatgggctacaacacaaagagcctggtgcagggcttgaaggctggcaggttctgacaaaactcttctaggaagagcagcctccacccacagctgtggtcaagactaccagattcgcactggcaagtactttagaaaaagcatactgtctacagtaacactgctaagcatggagacttatttatttatttttgagacagagttttgctcttgttgctcaggctggagtgcaatggtgtgatctcagctcactgcaacctcygcctcccgggttcaagcgattctcccgcctcagcctcccgagtagctggaattacaggtgcccaccatcatgtctggcttaatttttgtatttttagtagagatggggtttcaccatgttggccaggctgctctcgaactcctgacctcaggtgatccacccaccttggcctcccaaagtgctgggattgcaggcatgagccaccgtgcctggccagagcttttcactttaaaattatttcaaaatggtaaaaggaaatctgaaaagtccagtgaaggaaaaccacttgggaaacagaaatc

SEQ ID NO: 139157 - DNA, 577 bp, Homo sapiens
ggcctgcctgtggtcccccagtgtttcttttgtgcatttgctaatccatgtgtctttagttctttgtcctaatatggggtaatgctggatctaacacatcactctgctttctttactagatatccccatcttatttttccttcatatgctttgtagaatcaggtataaagtccaaaaggaaagtccttttaaaagaatgtatagctatgtggagttgtgtagaaaagatacagaaagatatcaaaacatattacacccataaccttggagccaagccccttaacagagtccttccactgtgataaccataaaactcctttgttccaaggtgaactatgaagtgcaccctgcaacactgtrtctgtcccggagagtgtgtgccagtgctgcagcaagacttcaccctgcctggggtatcttggatgaagagattggttctcaattcctttcacaaagggaagcccccacccccttctcaccacctccccttcccacacgcgcgcgcacacacacacacacacacacacacacacacacgcacgcacaaagctttgctggacgtaaaccccagaactga

SEQ ID NO: 139158 - DNA, 577 bp, Homo sapiens
ggcctgcctgtggtcccccagtgtttcttttgtgcatttgctaatccatgtgtctttagttctttgtcctaatatggggtaatgctggatctaacacatcactctgctttctttactagatatccccatcttatttttccttcatatgctttgtagaatcaggtataaagtccaaaaggaaagtccttttaaaagaatgtatagctatgtggagttgtgtagaaaagatacagaaagatatcaaaacatattacacccataaccttggagccaagccccttaacagagtccttccactgtgataaccataaaactcctttgttccaaggtgaactatgaagtgcaccctgcaacactgtatctgtcccggagagtgtgtgccagtgctgcagcaagacttcmccctgcctggggtatcttggatgaagagattggttctcaattcctttcacaaagggaagcccccacccccttctcaccacctccccttcccacacgcgcgcgcacacacacacacacacacacacacacacacacgcacgcacaaagctttgctggacgtaaaccccagaactga

SEQ ID NO: 139159 - DNA, 574 bp, Homo sapiens
gagtcctgctttattttgctttcttaaataaatgaccatcaagatttataccatcactttcacaaagtgatgcttgttgaacttacgtgcattttacttacatgagtttaatgatatgtgctaggcaaaaagagaaagagaaagataaccttaaacattctgcaaagaccaactttccaaccgataagtgtaagccttgaagtgcacatgagtgggagaactaaatctttcatcctctcaatctgtctctgtttctattgggccagcatttaaagacaaacattttgcatacagcatggcccataaatgcaagcctcctaacttcatctgaggctcgaccaaacaaaaagtgatttgctcccacaccaaggggcaaataacatcactccttccaaagtgatgtttcaagggtaatgagacttgatgtgattgttgccttctgcctacctttaggaactaaccttataaaaaayatgactccagccaagctttccctctgataggcacgtaatccaactctccttcataaaaatgtactgtactgctttattacaagatatttttataaagatct

SEQ ID NO: 139160 - DNA, 584 bp, Homo sapiens
agagattcaaatgagtctgcttataggaaggattcgaaaattaagaagcatttgcagagtcaagggagtgcctcctggttgccatatgaagtgtaaactgagtttgttcacctttccttctaggttgcaagactggtcttagagagaagagtccccaggagtacacagcagtgtccttctgctaatgacagcatgggagatgaacgcacggctgtttccttggtaacagccttgcctggcaggccttcgagctgtgtctcrgtgacagatggtgagaggggagagaattgagtgttactattgtcatgttattgtgtgccgcttttgaattgtcaagtcaaaagggaaaggcaggaaggcttcctctgggtcctgaaaagaaagcgagccatagtgatcatgctgagatctgctttttcatgccatggaagcccatctcatggaataggtttctggaaacaaatgcattttccccaaattatttctaggcatctttctgcccccagccttcctcagtcctttgatcagctgccagaatgttaatgtttgtgtgaatatttaggatgaaattgactgaaagggtc

SEQ ID NO: 139161 - DNA, 584 bp, Homo sapiens
agagattcaaatgagtctgcttataggaaggattcgaaaattaagaagcatttgcagagtcaagggagtgcctcctggttgccatatgaagtgtaaactgagtttgttcacctttccttctaggttgcaagactggtcttagagagaagagtccccaggagtacacagcagtgtccttctgctaatgacagcatgggagatgaacgcacggctgtttccttggtaacagccttgcctggcaggccttcgagctgtgtctcagtgacagatggtgagaggggagagaattgagtgttactattgtcatgttattgtgtgccgcttttgaattgtcaagtcaaaagggaaaggcaggaaggcttcctctgggtcctgaaaagaaagcgagccatrgtgatcatgctgagatctgctttttcatgccatggaagcccatctcatggaataggtttctggaaacaaatgcattttccccaaattatttctaggcatctttctgcccccagccttcctcagtcctttgatcagctgccagaatgttaatgtttgtgtgaatatttaggatgaaattgactgaaagggtc

SEQ ID NO: 139162 - DNA, 584 bp, Homo sapiens
agagattcaaatgagtctgcttataggaaggattcgaaaattaagaagcatttgcagagtcaagggagtgcctcctggttgccatatgaagtgtaaactgagtttgttcacctttccttctaggttgcaagactggtcttagagagaagagtccccaggagtacacagcagtgtccttctgctaatgacagcatgggagatgaacgcacggctgtttccttggtaacagccttgcctggcaggccttcgagctgtgtctcagtgacagatggtgagaggggagagaattgagtgttactattgtcatgttattgtgtgccgcttttgaattgtcaagtcaaaagggaaaggcaggaaggcttcctctgggtcctgaaaagaaagcgagccatagtgatcatgctgagatckgctttttcatgccatggaagcccatctcatggaataggtttctggaaacaaatgcattttccccaaattatttctaggcatctttctgcccccagccttcctcagtcctttgatcagctgccagaatgttaatgtttgtgtgaatatttaggatgaaattgactgaaagggtc

SEQ ID NO: 139163 - DNA, 584 bp, Homo sapiens
agagattcaaatgagtctgcttataggaaggattcgaaaattaagaagcatttgcagagtcaagggagtgcctcctggttgccatatgaagtgtaaactgagtttgttcacctttccttctaggttgcaagactggtcttagagagaagagtccccaggagtacacagcagtgtccttctgctaatgacagcatgggagatgaacgcacggctgtttccttggtaacagccttgcctggcaggccttcgagctgtgtctcagtgacagatggtgagaggggagagaattgagtgttactattgtcatgttattgtgtgccgcttttgaattgtcaagtcaaaagggaaaggcaggaaggcttcctctgggtcctgaaaagaaagcgagccatagtgatcatgctgagatctgctttttcatgccatggaagcccatctcatggaataggtttctggaaacaaatgcattttccccaaatkatttctaggcatctttctgcccccagccttcctcagtcctttgatcagctgccagaatgttaatgtttgtgtgaatatttaggatgaaattgactgaaagggtc

SEQ ID NO: 139164 - DNA, 541 bp, Homo sapiens
gagggacaaaaatacaagtgtgcttgggccatcgttaatgaagcagaagtggaggaagttgtggaggtggcagggaccctggagggccttggggatcagaggagcatgatgccaccatcctgcatgcagtgggaagccactgggctggcayggagggttaagcaggaaatgccctcctccgttcttcagaggggccactcgggttactggtgcacagggactaaaggaggtcaagcagcagtcattcaggtcaaacatgatgtggcttggactcaggctgtagctgaagtgttaagaagcagccagatttgggatacatctgggaggcggagttcaggagactactttgggattagaaacaggcatgaggaaagagagcaatcaagctttggcatgaggaagccttggggaaatggtggtaccaccaatgcagggtgaaggaggggtaagaaggtaaaaagcctgattttcctgattccaatacctctcttctttgcactagatcacatatacctatttcatgctttaggagggtaatcat

SEQ ID NO: 139165 - DNA, 541 bp, Homo sapiens
gagggacaaaaatacaagtgtgcttgggccatcgttaatgaagcagaagtggaggaagttgtggaggtggcagggaccctggagggccttggggatcagaggagcatgatgccaccatcctgcatgcagtgggaagccactgggctggcacggagggttaagcaggaaatgccctcctccgttcttcagaggggccactcgggttactggtgcacagggactaaaggaggtcaagcagcagtcattcaggtcaaacatgatgtggcttggactcaggctgtagctgaagtgttaagaagcagccagatttgggatacatctgggaggcggagttcaggagactactttgggattagaaacaggcatgaggaaagagagcaatcaagctttggcatgaggaagccttggggaaatggtgstaccaccaatgcagggtgaaggaggggtaagaaggtaaaaagcctgattttcctgattccaatacctctcttctttgcactagatcacatatacctatttcatgctttaggagggtaatcat

SEQ ID NO: 139166 - DNA, 464 bp, Homo sapiens
tgacaccacttcagcaacaatggagaaataagaaagtcactaccacaactgttggctctagtaacacatcaccttacctataatgaggaccaggaacgccaagcctgctatgatgcatagcaataaaatggatgcctctctacacatttacatyttggctaagtgcatatgatcggcaaagcccaaataagctaccaggaagtcttgaaaatgtaatttttcatttttctgcctgggccatacaggaaggtacactaggagaagggtgtgactgatattgagtaagggcatctgtgatatctgcttaacatttcagccacaccatgccctttgagtatcctgctccttggcccctatcccttcagcacacttatcattgtcctcgggcaaaataaacaatgcagccctccaaaatacagtttacaagggaagatgatgagatccaaataaaaatggaaatcagg

SEQ ID NO: 139167 - DNA, 644 bp, Homo sapiens
tagaatggaaatacacagcctggatccttgatgacatgaaacggctgctgaccaatccctagacctcttgtttagtaactaacaaccatatctttggccctggccattgtattttaggccttctgtttccatgacacattacagktcagcctgattacaaagcaccatatcttgtcaagaagcaaaatgatgtcatgggaagagcattgtttgacatctctgaccctcagtttcttcatcttaaaaatgagtattctgcctgaattctaataaagatcaagtcaaaagtacccgaaggtggtaatattaactattattattgttaccattattattattggacatagagcacttacaatataccaggccttgttctaagtcttttacccatataaacttatttagtcctcactgcaatcctgtgacgtaggtactttaattgtccccacttgtctacatggcctctggattataccagtcctcaatcaatgtcagttggtgtttattgtggggcttctattataactgacaaggcacatttcccttaagatctctcttctcaggaaatgatttttgggattttagaaggaaacaatgaggtaatgaaacattgcatgtaaaaacacacagttatttgagccccc

SEQ ID NO: 139168 - DNA, 605 bp, Homo sapiens
ttcaatttgggaagacggacagagctctggggatggactttcgtgatggtagcacaacatcatgaatggactgcgtgctactgaactgacaagtggttaggatggtaggtgttatattatgtgtattttaccaccatttaaaaacattttaaacgtgaactttaaaaaaatccatttactgaaagctttccctgccagcctcagagccaaggatataccagrcacattgctgttcttgagaagttccatgtttcacagcacagacaggagcatgtgggtgtcagggtggaggggacagagggtactgccctaactggagccagcgatgtggaggagccacaccttcacctgaggcagtggcgaaaggcttcagaaaagcagtgatgtgaagtcagaggccacctctcaggagtgggagggcaggcaggagctgtacctcacggcaggcagccactggcaccacgtgctgtgtaaacaactgctcaggaatgccactggcgatggggtcctgcctccacatgtcagccttccctcctgtggtcatatgcccaggcttaggccagcggcatgacccacatctttccacacagaccccatgtgggcca

SEQ ID NO: 139169 - DNA, 605 bp, Homo sapiens
ttcaatttgggaagacggacagagctctggggatggactttcgtgatggtagcacaacatcatgaatggactgcgtgctactgaactgacaagtggttaggatggtaggtgttatattatgtgtattttaccaccatttaaaaacattttaaacgtgaactttaaaaaaatccatttactgaaagctttccctgccagcctcagagccaaggatataccaggcacattgctgttcttgagaagttccatgtttcacagcacagacaggagcatgtgggtgtcagggtggaggggacagagggtactgccctaactggagccagcgatgtggaggagccacacctycacctgaggcagtggcgaaaggcttcagaaaagcagtgatgtgaagtcagaggccacctctcaggagtgggagggcaggcaggagctgtacctcacggcaggcagccactggcaccacgtgctgtgtaaacaactgctcaggaatgccactggcgatggggtcctgcctccacatgtcagccttccctcctgtggtcatatgcccaggcttaggccagcggcatgacccacatctttccacacagaccccatgtgggcca

SEQ ID NO: 139170 - DNA, 223 bp, Homo sapiens
ttgaaatgcttccctatcagggatatactctataattgtgtataccgcattatcaacacatgacacgwttttttttatgggaatcccatgaaatagaatttgtcaggtttcctgcatttgcagcaaataactctgttgcagcactagaaagagcaaaaatgtttctgtgcaaagctgcgtgtttcatgcatcctattaatcctttcaataataaaaacagatt

SEQ ID NO: 139171 - DNA, 329 bp, Homo sapiens
tcatacagaaaaataatcagggtacgccattaaaaatttgaaaggaaaaaagtattataggcattgtcaggaagttaataaaaatattayttgctggcttttttgatatctgcaggatttgttcagcttttaaaaattcataaagtttttgtgatttcttttctcattctgaataaatatttctttcatgccatcttttgtaactttgtattctttttcataaagagggccctaaatagcgtgtgtctgcttctgtttccatgcatttctcttcagagatttaactagtgctgataactatggacagttactagcatgcataggtttat

SEQ ID NO: 139172 - DNA, 460 bp, Homo sapiens
cggaagcatccagaatgattctaargttgagcatgttgtttccgaaggggatggaggtgtgcagggtcaggaatccagttttagactgaatatctaggctactagatatccaggcagagatgtcaaacaggcaatcagatatttaaacctgactttgaaagggaagtctggactggaaatgtaaattggtgaattgttttttggcatagttgaaaccatggatttggatgagatcaccaagagagtgagtgtaggtagagaacttcttcagtgggtttcaggtatttgatgtaatttattcagtgagtaaagataaatgctccctcttctcaaagatttcatcatttgttttggctacacagattgttcacaacctagagataccattcacatagactacagtgtctggtgttgaatactgcaatgggctgcaatggctggggaatcggggagcagtgtg

SEQ ID NO: 139173 - DNA, 601 bp, Homo sapiens
atccttgttgcagcgtcaggctgtgttctccagcacctagcacgttactctgcatgcacacagctctggacaatcatctgtcagtctattagatgctgattgattagttgttttccaacatttacacagcaggatatgtgattaacaatatcatacttctgtattcaggtccttactgtgctttatttactatcattttatgaatgtttctctgtccttatctgcttatttatataaggttcaaactaatgaattaaatgcagaataaatagctgccagttcaatttatcttgagaatttagctgacataatggcatyggcagaaaccctaatgagcattaatttacttattcatcaaatacttattgagcatactgagtaccagccattgtgcaaagtggtgaggatacaaacatgaagagggcagatggagtctctgtcctcgtggagcttctagataagaaaagaaacagtggtagtgtcacacaataatacaagttcagggagctcctgtttcagagttagattagcatatgtggaagaaaacccaaatcgcagtagtttaaggaaaatagaaatttttctccaacatgagtgtctg

SEQ ID NO: 139174 - DNA, 601 bp, Homo sapiens
atccttgttgcagcgtcaggctgtgttctccagcacctagcacgttactctgcatgcacacagctctggacaatcatctgtcagtctattagatgctgattgattagttgttttccaacatttacacagcaggatatgtgattaacaatatcatacttctgtattcaggtccttactgtgctttatttactatcattttatgaatgtttctctgtccttatctgcttatttatataaggttcaaactaatgaattaaatgcagaataaatagctgccagttcaatttatcttgagaatttagctgacataatggcattrgcagaaaccctaatgagcattaatttacttattcatcaaatacttattgagcatactgagtaccagccattgtgcaaagtggtgaggatacaaacatgaagagggcagatggagtctctgtcctcgtggagcttctagataagaaaagaaacagtggtagtgtcacacaataatacaagttcagggagctcctgtttcagagttagattagcatatgtggaagaaaacccaaatcgcagtagtttaaggaaaatagaaatttttctccaacatgagtgtctg

SEQ ID NO: 139175 - DNA, 601 bp, Homo sapiens
atccttgttgcagcgtcaggctgtgttctccagcacctagcacgttactctgcatgcacacagctctggacaatcatctgtcagtctattagatgctgattgattagttgttttccaacatttacacagcaggatatgtgattaacaatatcatacttctgtattcaggtccttactgtgctttatttactatcattttatgaatgtttctctgtccttatctgcttatttatataaggttcaaactaatgaattaaatgcagaataaatagctgccagttcaatttatcttgagaatttagctgacataatggcattggcagaaaccctaatgagcattaatttacttattcatcaaatacttwttgagcatactgagtaccagccattgtgcaaagtggtgaggatacaaacatgaagagggcagatggagtctctgtcctcgtggagcttctagataagaaaagaaacagtggtagtgtcacacaataatacaagttcagggagctcctgtttcagagttagattagcatatgtggaagaaaacccaaatcgcagtagtttaaggaaaatagaaatttttctccaacatgagtgtctg

SEQ ID NO: 139176 - DNA, 566 bp, Homo sapiens
ttagtctatgtgcagaatcaaatacactttcttctgcttggttgattttgatatttcaatacatgataaatgattgccaatcaatcagctggatcattgcacagaaaatccaatctgatcatcatgttcacatctsgttgttttattcaattaatgaacaaacaggaccaaccacaaagaattttggttcctgaacaataacttagactcataaacttcccaacagaaacctgatgaaaaccaatcaatttaaggcacatgtatacaaacatggcatatgtaatgagtaaaacataaattagtaaaaaaacaaaaacaaaaacaaaaaacttcagaaatctatatttcttattgcatcactgaaataaatcagtctctaatatattcagatttaactctcttatgcttactcttgttcactactctcagcttgtgtttctgaaaagttttatgtaaacccaagttctgtaaactgaattgtatttcagatacattaatttattggttaaattataaatctgtttgtaaataatgaagtcttctcaaacatgtctgtggtgcagagt

SEQ ID NO: 139177 - DNA, 566 bp, Homo sapiens
ttagtctatgtgcagaatcaaatacactttcttctgcttggttgattttgatatttcaatacatgataaatgattgccaatcaatcagctggatcattgcacagaaaatccaatctgatcatcatgttcacatctcgttgttttattcaattaatgaacaaacaggaccaaccacaaagaattttggttcctgaacaataacttagactcataaacttcccaacagaaacctgatgaaaaccaatcaatttaaggcacatgtatacaaacatggcatatgtaatgagtaaaacataaattagtaaaaaaacaaaaacaaaaacaaaaaacttcagaaatctatatytcttattgcatcactgaaataaatcagtctctaatatattcagatttaactctcttatgcttactcttgttcactactctcagcttgtgtttctgaaaagttttatgtaaacccaagttctgtaaactgaattgtatttcagatacattaatttattggttaaattataaatctgtttgtaaataatgaagtcttctcaaacatgtctgtggtgcagagt

SEQ ID NO: 139178 - DNA, 467 bp, Homo sapiens
taaagtataagcctatatattacttagataattaaaatccaaaatctacctggggaggaaaaaaattccttaaagtagaggtagaagtagtcatgtgtgaactgagattttttgtttgtttgagacaggatttttgtgttgcccaggctggagtgcagtgaatgatcatgggtcactgcaacctccgcctcttgggctcaagccatcctcccgagtagttgggaccacaggctcaggccaacacacccagctgatttttgacttttttgtaaagacagggtctcattatgttgtccaggctggcctcgaattcctgagctcaagtgatcttcctgcctcagcctcccagagtgctaggattacaggtgtgagccaccacaccaggcatgtttggaaggrtaagaacgagttgtttgaatagatgtttacaatcttttccactgttaattggagtaaaacaagggtta

SEQ ID NO: 139179 - DNA, 625 bp, Homo sapiens
taaactctgacagctgaaatgcagcagttgattgccaatggaagctacagaaaaggatgattaatataaacaggcttttgcccctgctgcacagcaacattacataaagcagtgctgtttcaggagacttttgtattttaatttccaagagtccatagggtaataaatttttttccttcatcttgtttgatctttgatatttaagaccaacttctgtgttttgtttattttttctttgcaytggaaaaagaacataaagcgagtgacaacacataatcagggctaattggtatttttcagagaaaaaaaggaaacaccttttatgataagccaagtgcaaacatttgcaaatagggtatcttgcaccaaatagtcatgtcagtaaaaaaaagtagttatgttgcaggcatggaagtatttgttagtttcagatttaatcatagctagtggttttaatttatatttccctaaaatttggctattacacaaagcaagtactttaaaggactaaatgattgtcttttccctgaaggaaagaaactgaaagttgatttcaaactgcaaagaatagtagagacaaggcattttaaataaaaataaataaaggaggtaggtaaaccattga

SEQ ID NO: 139180 - DNA, 625 bp, Homo sapiens
taaactctgacagctgaaatgcagcagttgattgccaatggaagctacagaaaaggatgattaatataaacaggcttttgcccctgctgcacagcaacattacataaagcagtgctgtttcaggagacttttgtattttaatttccaagagtccatagggtaataaatttttttccttcatcttgtttgatctttgatatttaagaccaacttctgtgttttgtttattttttctttgcactggaaaaagaacataaagcgagtgacaacacataatcagggctaattggtatttttcagagaaaaaaaggaaacaccttttatgatragccaagtgcaaacatttgcaaatagggtatcttgcaccaaatagtcatgtcagtaaaaaaaagtagttatgttgcaggcatggaagtatttgttagtttcagatttaatcatagctagtggttttaatttatatttccctaaaatttggctattacacaaagcaagtactttaaaggactaaatgattgtcttttccctgaaggaaagaaactgaaagttgatttcaaactgcaaagaatagtagagacaaggcattttaaataaaaataaataaaggaggtaggtaaaccattga

SEQ ID NO: 139181 - DNA, 614 bp, Homo sapiens
cctcaaatactacactcctctctaaatcctttgaaacccaaacttctttaccatatctattacagcattagataccttattctaaattgctgcacaataaaatttaaacagctatttccatattagaaattatgaaatcgtatattaggttatgtctttattagatttctttgccatatttgaacatgatatgttgatggagtcatctttttgggtaaaaattcctgagctatctttaggagcaatgagtgaattctaagccattttaacctttgtgtgaacacctgctaaataagaagtacagcaaattgacatttggataaaatattgctccagggtcagaattccataatggcacttcctacatttaaagcaawttctctatctcctgaaatgtttaattttcttcttgatattctatagtacataaacatagatatagatatacatacatcaatctaaagacttgaaaaattcaagattatctatctacctatctatctatctatctatctatctatctatctatctatctatctctatttatctacccaaagacctgaaatagccacaggctgaagttttgggtaattactcaagaggctgaagaacag

SEQ ID NO: 139182 - DNA, 657 bp, Homo sapiens
  misc_feature (1)...(657): n = A,T,C or G
tatctttaggagcaatgagtgaattctaagccattttaacctttgtgtgaacacctgctaaataagaagtacagcaaattgacatttggataaaatattgctccagggtcagaattccataatggcacttcctacatttaaagcaatttctctatctcctgaaatgtttaattttcttcttgatattctatagtacataaacatagatatagatatacatacatcaatctaaagacttgaaaaattcaagattatctatctacctatctatctatctatctatctatctatctatctatctatctatctctatttatctacccaaagacctgaaatagccacaggctgaagttttgggtaattactcaagaggctgaagaacagacagtaggaattttgattgaatcaaagttatacaytcacttgatttgcaatcaaaatgtttccttactaaagaccacagaccacattattatatcacttacttaaagacaaaaagacanataatggtgatgaatgaaagtaaagatcttgccaataaatntcattctctgtgagtgaaattacactatcantgaagctctcgttttgtttatagatgtgtcctgaagatttccgtcaattctccaaacttttcctttgattgctgattttaac

SEQ ID NO: 139183 - DNA, 425 bp, Homo sapiens
  misc_feature (1)...(425): n = A,T,C or G
nnnaaaccactgttaccattctggtcctttatcgtttgtgaaacgtgtccatgtatatgacctccttgatactcataagagccctacaggtaggaggatgaggagtacagttctagttttctggtgaagaaacaagtaagggttgttaagggacttgyccaacattccacagctgtatttgttggggctgggattcatccagtgtcttcctcatcttttaatatgctgcctattttgtcaataacaaaagagtggtactagcaatcacagaagcagcacctcacatttacaccattccctctttgggttcaaagccttgtacatatctcatctcagttggctgaatttcatctagggaagaaggaaagggatggcatgactgctgacaacttttctggtctatgtacaagaaaacttcagcagaa

SEQ ID NO: 139184 - DNA, 552 bp, Homo sapiens
agcactgttaaacctgtttctaaaggtttcttgggggagatttctctactgggatatttcccctgataactagagaaaagcagcaattctatttccccatggcttaattaatggaaactcctctgacactttctcattagttttccatagtgtcaggaactccaagcatctaagtaaaggctttacctagcaggctcatggggaaagctgctcctcctacaccaggctctgtgcaggaccaatgcattgcagcctgtgaagygagttagtcaaggactcaggctggtcatgctctttgcatatttatattcctagccccagagccttcatcctaagtttctttatctgaagacattggctgaggtccttttgaagtgtctgctatgtcataagtgtgtgtcataagtaaagtatgaacctcatttgatagatttgctcagaatcaacaggttatataaatacatgttcttttgaagaattgctttcaacagaattaagaatttatttatttatttatttatttttacttcactgtcctctgaaatggtagtt

SEQ ID NO: 139185 - DNA, 606 bp, Homo sapiens
gttccaaatcaaacctgagcctttaagcagaacagataatatggctgtatatgagattgtaaaattattttgtcatcccaatatcttatgactgtattatccccaacaggctttcctagtatgatagaaaatgatacccrtgtaattgttctgtgttctgcttacagaggcagtagggagacaaacagggaaagaagcattaagctctatgtccagtaccgtttggaattagaaaattgaaatctggaaatttttgttaaaaaggtaggtctttaggaacttgagtctttaagaaggaaagaggatgcctataggaaggcaatttgatatagagtcttgggagcaaagttatacctaataggactctcctattttctgtaggaatggataccccagaatctcaaccagaagctccactagttgtcctgacattcctttattcttaagagcctgtcctgatgccactaaatacaatacaaacctagattagaatttagctcagaaaatagtagagttgtgaaagagtcatagagctagtgggccagacacaatttgacagatttagtccaggtgtttgttatcttacggcaatctctaattgtagga

SEQ ID NO: 139186 - DNA, 606 bp, Homo sapiens
gttccaaatcaaacctgagcctttaagcagaacagataatatggctgtatatgagattgtaaaattattttgtcatcccaatatcttatgactgtattatccccaacaggctttcctagtatgatagaaaatgatacccgtrtaattgttctgtgttctgcttacagaggcagtagggagacaaacagggaaagaagcattaagctctatgtccagtaccgtttggaattagaaaattgaaatctggaaatttttgttaaaaaggtaggtctttaggaacttgagtctttaagaaggaaagaggatgcctataggaaggcaatttgatatagagtcttgggagcaaagttatacctaataggactctcctattttctgtaggaatggataccccagaatctcaaccagaagctccactagttgtcctgacattcctttattcttaagagcctgtcctgatgccactaaatacaatacaaacctagattagaatttagctcagaaaatagtagagttgtgaaagagtcatagagctagtgggccagacacaatttgacagatttagtccaggtgtttgttatcttacggcaatctctaattgtagga

SEQ ID NO: 139187 - DNA, 606 bp, Homo sapiens
gttccaaatcaaacctgagcctttaagcagaacagataatatggctgtatatgagattgtaaaattattttgtcatcccaatatcttatgactgtattatccccaacaggctttcctagtatgatagaaaatgatacccgtgtaattgttctgtgttctgcttacagaggcagtagggagacaaacagggaaagaagcattaagctctatgtccagtaccgtttggaattagaaaattgaaatctggaaatttttgttaaaaaggtaggtctttaggaacttgagtctttaagaaggaaagaggatgcctataggaaggcaatttgatatagagtcttgggagcaaagttatacctaataggactctcctattttctgtaggaatggataccccagaatctcaaccagaagctccactagttgtcctgacattcctttmttcttaagagcctgtcctgatgccactaaatacaatacaaacctagattagaatttagctcagaaaatagtagagttgtgaaagagtcatagagctagtgggccagacacaatttgacagatttagtccaggtgtttgttatcttacggcaatctctaattgtagga

SEQ ID NO: 139188 - DNA, 604 bp, Homo sapiens
ggtctgctatacctactctcacgtatgttaaaatcccatactatattagtctatttctttgcttccattggctgtttactcccactgctattttattacaaatattgcttcataataacttttactaaatagacaagtgscaccattttaatctcctcctttgaaatgtcttcttcttggccctcattcttacatatcccactcctctctactcaaaatgagattttgattgaaattgggttgaaatgattgacttgtagatgattggcatgtttatgtaactgagacattctattcattcatacagcatatggatcaatttatttatgtttttgatatagtccaatacagttttataaagtgctatgtttagatgtaacatatcttttacagttttttatttttgttgatacttcaaatggcatctttttattacactttttgtcaactgttacatataataatgcaatgttaaatatatccatttgtatctatgcacttgctgaactttgtgttataatttgtctttattttcatttggaaattttatatcatctttaactaatttcattctttcttctttatggtcttaatgctgtgtgtt

SEQ ID NO: 139189 - DNA, 536 bp, Homo sapiens
tatttgggttgctttgagaattaaatgacaggacaaggccttccagcaaaagaaaggaacatacccataatctaacaaaattaggtttattgactcactgcaatgtgggtgatcacacaccactggagttgtgggacatttctgtaagagagtgttagatagaaattattataggatgtgggctcatattaggcaattttaggtgaggaggaagggttcaagaaagctaagcttgctctggatttggtcctgtcaattactagaaataattccatgattaggtatcttaatgaatcttacttrttaaggtagactaaagctgtaattgagaaagatcatatcagtcactcattttagctagaagacaatatatttttctgattgtacagtgttatacgtaattaggattattaagtggtattttttttcctctcatttcattgtggtcacagagtgactttgtctgatgttggtattctttgagaacatcatgagctagcttgtgttttgctcagataaaatacataaagagcaaa

SEQ ID NO: 139190 - DNA, 567 bp, Homo sapiens
catagtgtgtttttgtgagatcttgttgcttaaaagtgtgtggcatctcctccccctcttgctctcgctctaccacgtgacatgttggctcctcttttgcctcctgtcatgattgaaatcttcctgaaggctcaccagaagctgagcagattctggcatcatgcatcctatacagcctgcagagctgtgaaccaactaaaccccttttctttaaaaattaatctcaagtcccagtctcaagtatttctttataacaatccaagaaaggccaaatacactgtcacaactactaagctcaggctttgtagcacaaatgtagccatcagcaatatgtaaacaaataaatgtagctgtgatctgataaaattttatttacaaaaacgaactatcttgtttggtccatgggccttagctggatacaggcttgcagtttagcaaaccattacatgtatatactttctctctctctctctctctatctatctctctatctctctctctctcwcacacacacacacacacacacacacacacacacacatacacaaatacacacgaacattttat

SEQ ID NO: 139191 - DNA, 484 bp, Homo sapiens
aaaatttcagtatacaaactcaatgtaggaaaatcagtagcatacctgtataccaacaacaaccaaggtgagagccaaatcaagaacacaacctcattcacaattgtcacaaaaagaataaaatacctagaaatacagtgaaccagggaagtgaaagatccctacaatatgaattacaaarcactactcaaataaatcagagatgacacaaacacatggaaaaacatttcatgctcatggatagaaataatcaatacattaaaattgcaatactgcctaaagcaagttacaaattcaatattattcctatcaaatgacctatgacactcttcacagaactagaaaaactattttagaattcatatggaaccaaaaaagagcccaaatagccaaggtaaacttaatcaaaaagaataaagctggaagcatcaaattacctgacttcaaagaagttgccttaatagaggggatcttcatcaacctg

SEQ ID NO: 139192 - DNA, 484 bp, Homo sapiens
aaaatttcagtatacaaactcaatgtaggaaaatcagtagcatacctgtataccaacaacaaccaaggtgagagccaaatcaagaacacaacctcattcacaattgtcacaaaaagaataaaatacctagaaatacagtgaaccagggaagtgaaagatccctacaatatgaattacaaagcactactcaaataaatcagagatgacacaaacacatggaaaaacatttcatgctcatggatagaaataatcaatacattaaaattgcaatactgcctaaagcaagttacaaattcaatattattcctatcaaatgacctatgacactcttcacagaactagaaaaactattttagaattcatatggaaccaaaaaagagcccaaatagccaaggtaaacttaatcaaaaagaataaagctggaagcatcaawttacctgacttcaaagaagttgccttaatagaggggatcttcatcaacctg

SEQ ID NO: 139193 - DNA, 578 bp, Homo sapiens
ggcagaggatcagaaaaagtaactaatgggtactaggcttaatacctgggtgataaaataatatgtacaatgaacccctatgacataggtttacctatgtaacaaacctgtacatgtaccgcacatgtattaaacatgcacatgtacctcacatgtattaaaatgaaagtattacacattagtaaaaaaaaatggacacacatattatttactcctttctggtcatttggctgwtcttaccagaagggagtagagatgaagctgattgggaagtctttttgcaaagtaatttttaagaacattcaactcgtttttggagtgatcaaggtgttgttctccatgtatacacaaggatatacgagttggatttgttctctttttataaaaggctatgtgggacttgcaaaacttctagtggcccagaggaggcaatgcccctgggattaaactgtaaagtccacagcgagggttgcagacttgagaaaagtcatttgagacatagagctgctctgctgcacttccttttgcacaactgcttgccccagagaggtccttgctgaaagctttacacacttagc

SEQ ID NO: 139194 - DNA, 587 bp, Homo sapiens
tttgatatcagtgaaagaaacccttaatacagtgacatttacattaagactgtgctgagcaaggatctgcctttttaaaaaaaaaaacttctatgggcaagagggatgtgatttgcttgcttttcttgctgaactttaagccttaagggcactatacaacattggatgcatgacttttaaaatcaaccaatgagtagttacttaggaccccccagaggcccaacactgggctgtccagataccaacacagatgaaaccacagcacatagcacaaagcacaaagtacaatatgattaagaaygcaacagtttaaaaaaaaaaaaaggaacgagagttaaaaagggataaattggtccagaggtgggacataagcaagctgttggagtggaagagggtatgtgatgtatgatgagagggaaggaaggctttcaggcaggcagccagaggtgagcaaggatcaggggcaggtgcatttgcagaaaaagggaaaggctggctgcccttagagtgggaatacaaacagcaggctgaggctaggttcttacagtccaaaaacatgtgttggatactgtaatcaacagaccaga

SEQ ID NO: 139195 - DNA, 614 bp, Homo sapiens
tgtgttctccttcaagaaacagagagcagagcagagccaaggcagaattcaggtatccttaggtcaaaatcttatgattatactgctatccttcatatgtctgaacttcattccctgtgtattaagatagagatttataaacagaggaaagatgtgacagatctatggacttgccagaggtcatccagagtmtccttcacccttcagatctaggaagatcaatcaaatctccatgttttgtctgaggaagtacaatgaatgccttttcagggacttctgtgaaaggaaacactgggggacttacactctcatggttacctgaggctctttgctcctgcatctgctgcattagttctgtttaggcatcttcttgccattctaaacctgctgctgtgttctgcatctcacaaacccagacatggaactcagcccttttactttattgccacagtgcaaagctccacgcatggcatttgcatgtatggaacacatcactaaagaagatggggtctgtgaagtttgaagtgactcttaaggaaaattagacaggaaactatgttagtccaggacggtgcagagagcctaaccatgagttcacaggtgccacatattgt

SEQ ID NO: 139196 - DNA, 598 bp, Homo sapiens
agtgccatctaccaagcacttactacatgccaggtattgtgctaagcactttgctacatcccttatacatatattttcccttcacattgaccctgcgaggaaatatttttcccattttacagatgtggaaaccaaggttcagaggaatatgcccacagttgcagggctgctcagtgacagaacaagggtttgaattcagtgatgacgctaaatcctgggctctacagcatcccaaaaggtaaggtgagctctaagagttatttggcagatgaggaaatgggaggkatcgtgatgcatcaaagtttcagagaagaggaaaagagctgcgtcctctgatcagaagtgtggggaagtgcggaggtgggaagagggaagctgaaggagttcaaatgcagctgtccctcaagtcattccttcctatgaagtaggccagtttatctgctgagggtgaaagggacggggagaatgaaggaggcttcaggaaagggtcagagacttgcggcagaccctgtgagaagatggaaagaacactgactgctaaagattcctggcagcaccaagcactcagctaggactggaaatcatcattttgtaattg

SEQ ID NO: 139197 - DNA, 598 bp, Homo sapiens
agtgccatctaccaagcacttactacatgccaggtattgtgctaagcactttgctacatcccttatacatatattttcccttcacattgaccctgcgaggaaatatttttcccattttacagatgtggaaaccaaggttcagaggaatatgcccacagttgcagggctgctcagtgacagaacaagggtttgaattcagtgatgacgctaaatcctgggctctacagcatcccaaaaggtaaggtgagctctaagagttatttggcagatgaggaaatgggagggatcrtgatgcatcaaagtttcagagaagaggaaaagagctgcgtcctctgatcagaagtgtggggaagtgcggaggtgggaagagggaagctgaaggagttcaaatgcagctgtccctcaagtcattccttcctatgaagtaggccagtttatctgctgagggtgaaagggacggggagaatgaaggaggcttcaggaaagggtcagagacttgcggcagaccctgtgagaagatggaaagaacactgactgctaaagattcctggcagcaccaagcactcagctaggactggaaatcatcattttgtaattg

SEQ ID NO: 139198 - DNA, 598 bp, Homo sapiens
agtgccatctaccaagcacttactacatgccaggtattgtgctaagcactttgctacatcccttatacatatattttcccttcacattgaccctgcgaggaaatatttttcccattttacagatgtggaaaccaaggttcagaggaatatgcccacagttgcagggctgctcagtgacagaacaagggtttgaattcagtgatgacgctaaatcctgggctctacagcatcccaaaaggtaaggtgagctctaagagttatttggcagatgaggaaatgggagggatcgtgatgcatcaaagtttcagagaagaggaaaagagctgcgtcctctgatcagragtgtggggaagtgcggaggtgggaagagggaagctgaaggagttcaaatgcagctgtccctcaagtcattccttcctatgaagtaggccagtttatctgctgagggtgaaagggacggggagaatgaaggaggcttcaggaaagggtcagagacttgcggcagaccctgtgagaagatggaaagaacactgactgctaaagattcctggcagcaccaagcactcagctaggactggaaatcatcattttgtaattg

SEQ ID NO: 139199 - DNA, 550 bp, Homo sapiens
taaaacagcaatgagagaaattgaagaggacacaaatacatgcaaagatattttatgttcatggattggaagaattaatattgttaaaatgttcatacttcccaaagcaacctacagcttccatgcaatccttatcaaaattctaatagcattctttacagaaatttttaattctaaacttcctatggaacyacaaaagaccccaaatattcaaagtcatcttgactaaaaagaacaaggctggaggcatcacactactggatttcaaaatatattacaaagctataataataaatacacatggtactggcataaaaacatatatcagtcagtggaatgagatataatgtctagaaataaactcatacatctattgtcaattgattttcaacaaagctaccaagaacacacaatagggagagaacagtctcatcaataaatgatattgggaaaactggatatccataaacaaaacaatgaaaatgaaccttatctcagtccttaaacaagaatctgttcaaaatgaattaaagacttaaacataagatct

SEQ ID NO: 139200 - DNA, 596 bp, Homo sapiens
aattatttcttttctccttagcttttataggttgagtattccttatccaaagcgcttgggaccagaagcattttggatttcagattattatggattttggaatatttgcacatatgtaaagagataacgtrgggatggaatccaagactaaacataaaatttaattatactttacatgcaccttacacagacagcctgaaagtaatttgatacaatattttaattaattttgtgcttgaaacaaagttttgactgtgttttgactgcaacctgtcacatgaggtcaggtgtggaatttgccagttgtggcatcatgtcagtgctcaaaagtttcagattttggaacactttgaaattcagattttcagattaggaatactcaacctgtagtaagttaaattcagtctcaaaaaaaagtgtagcgcgaggttattttctaaaatattctgctctaaaacatattacagacaaaattagtcttcacaagttgtgtaaagccatctaactaaaatgtttcatctagaaataatgcatatttatttccgtggtttcacacccattttgctgctagtacctatagagaattctgttatgat

SEQ ID NO: 139201 - DNA, 539 bp, Homo sapiens
actgaactggggaaataatcatagttcttcaatggattgtttctgaaaactgaatatgaggagagaatattcataggtatggcataacttccatcttgtagctgraagaaatcatacccccaaattatgacaatttatagaattatgagttgaatgtttgtgtaagtatatgccttcatatttttaaacatgtataggctgcattattttctgccaataaattttatggcttttatatcaagtaaagatatgttgctaatatgatccctgcagttgatagataatataactttttgtgggctagactaaccatgtggcttcccagttgggctgtaaaggaatcaacagctagtttagagttactgggggcagcatttggaagatttaacttgtccagtttgggccacttattaatattacatattgcttatctatcttttgcaattctttggggtcccttccgtagacgtggtgctcaaggaagctttgatggaaggctttctgtagacaattcacttggttctgacaggccaagaaag

SEQ ID NO: 139202 - DNA, 617 bp, Homo sapiens
ctccttttttacagtattatatttgtacctaattagcaaggtcattatattggtaatcttggtttattttaatccacatgactatgacttcggaaattgaaaaatcacatccacgacaagttagataatgttctttaacgactccagatgaaattaagtaattaacaaatttaacattatctaagccaattaaagacattaaaatgactgggattttttaaatgtatacactttttttaaacaaatatttgtgttttaaaactctaacagatttgaaattttcacaattacacaattggaaaagagttatagggttcataacaactgatgcaaatgatccttgccctgcttgtaaaacatctcaagaaacaatgaaacatgtctacagctaaaaagactgtatttaaagagcattaaacatctaccagttataataatraactatttttagagaagttttacttattttctacactaaagaaaatacttttaactcccagcattctcaggagataacgtatgctgatttcaaaagaatttaaactagacagggcatatctggaaagaacccatagaattataattaagccccatatttatccaagtacatgattata

SEQ ID NO: 139203 - DNA, 596 bp, Homo sapiens
actgggttgaatgatagcttcctttttagtcctttgaaaaatctccaaactccttcccacagtggctgaactatttacattgccacgagcagtgtataggcattcccttttctctgcagcctcaccaacatctgttattttttgactttttaatagccattctgactagtgcaagatcgtaccttactgtggtttctatttgcgtttttctgatgattagtaatgatgagccttttctcatatgtttgttggctgcttgtaggtattcttttgagaagtgtttgttcatgtactttgcccactttttaaccgggttacttggttcctgcttgttgatttctttgagttctttgtagattctggagactagaaatttgtcagattcatagtttgtgaatattttctcccaatctgtaggttgtctgtttactatgttgatcatttcttttgctatgcagactctctttagtttaagtagttcccacttgtcaatttttgtttttattacaattgcttataaggacrtagccatcaattctttgtaaaggctgatgtcaagaagggcattttctaggttttcttctttgacttttata

SEQ ID NO: 139204 - DNA, 509 bp, Homo sapiens
gaattcgattgtggataaatttttactttaattccaggattttctttgtaacaaaattttatagctaatgggcaggatcattaaagragaatttttgtgttaattgccactgttttctaatatgaactctctgctcttgtcagtcaatttaaaaagaaaagcacctacagcctcaatatctaatgcaataatagctttctccatggttttgatgatggtttttgctctgtttacaatggacaaatcctgctcttttgagatctgcttctatattcaattcaggcagaaagctggtttcttctccagaccctccttccagaatgtagctcccaccaccagcatgtgcattgaccaaagagtagtggtttgtgcagagtgaggaaggagctttaatatgtgaactaaggtagtaactttattttggcagaagaggtgtcacttgaagtatggtgcagagccagcagtgcatagaaataaaatactgtagtagaagatgggctgttattagg

SEQ ID NO: 139205 - DNA, 509 bp, Homo sapiens
gaattcgattgtggataaatttttactttaattccaggattttctttgtaacaaaattttatagctaatgggcaggatcattaaaggagaatttttgtgttaattgccactsttttctaatatgaactctctgctcttgtcagtcaatttaaaaagaaaagcacctacagcctcaatatctaatgcaataatagctttctccatggttttgatgatggtttttgctctgtttacaatggacaaatcctgctcttttgagatctgcttctatattcaattcaggcagaaagctggtttcttctccagaccctccttccagaatgtagctcccaccaccagcatgtgcattgaccaaagagtagtggtttgtgcagagtgaggaaggagctttaatatgtgaactaaggtagtaactttattttggcagaagaggtgtcacttgaagtatggtgcagagccagcagtgcatagaaataaaatactgtagtagaagatgggctgttattagg

SEQ ID NO: 139206 - DNA, 615 bp, Homo sapiens
ggaaaggtaaatatctttcttacagtagaatatcaactaataattacacaagaaatgataggaaatcctcaatgcttgttaaaattagttggcaaaagtttaattagaaagaagatgyttacatagtctcaattatttccatacaaattattttttacaaaagagaaaaatcataatttccatgtaagaaatgagttggactctcaccttaataaaatcattaaagtagcagtactaatatgatgtgtcttctcatatgatttatgagaaagtatcacatttctgtgttcatccagcctaaaatataaacactaaatatactaatcaggatatgacaaagatacccatattgtgggaaaacctataaagcaattgatcttgtacaattatcaaggttaagaaagaaaagaaatgttgagattaaaaatataagaagacatgaaaactaaatttaatgtgtgttcctgaatcaaagaagaacagttatagagaacaatactgagacaaattttaaaataataaacataggctgtgggttagataatagcattacgattaatgctacattttctgattttgttaatagtacgtggataataggatagaataaccttt

SEQ ID NO: 139207 - DNA, 579 bp, Homo sapiens
aggagtgatgattaagatcctaaatttagaatgagattcatatgtgggaagtgaaaagactgtcttctgtaagtaaaatattctttacaaagttgaaatgatagaataggagcagattgaggaaagtcacatcaatctgaatagtttggaatttatcttctaggtaataagaaagtacatgaattgtacatgaagtgacatcatgggagtggcatttactctcaggctagtttaatgcactgcttattcctcaaatcagaaaaattcttctcattgttattctttaaaattatttaagaagagccaatgctgataaaacaaactcctttggccatgattttatccttggatgatagttttttactcaatacatgtctcagttttggaaaaatrgctccattcatggaacattttcatttcattaattttgttgcagtattttggcaaagttgaacaccttaaagcattagagtatattctgatatatcaaaggaaacgatgtgttcttaacattggatagtataatacgtagcagacaacacagagccaagtcatagtcatttacagaaaaagcacatt

SEQ ID NO: 139208 - DNA, 428 bp, Homo sapiens
agcatttgcaatattattttctgcttatcttctgcttactgatctaggtggagaaggaagtagctgacaatgacatctttaggtttcttacccaatcctcccattttttttctttgtaaattacccatttcaactcataaaataggctcctatagctgtattgtaaatatgactgtacccttactttaccactctgattagagtgaaggacacctgatgtaggaaaagcaagtccattacataggcttagccaatcagattttgtcttctggaaatttctgttgggccccccaaaatacctcagttgctatagaaaataaacttataagaatatttagtgttggagatacagtggttgtgtttgagttaygctgaaatacagtagcaagtaatctgcaggaacagagaacactgacatggaggagatt

SEQ ID NO: 139209 - DNA, 314 bp, Homo sapiens
gaaatgcatcgttactcacatctcttgaagaacattaaaggtttgcattgctctaatgaccagtgatgttgagctttttaaaaatatgattattggctgcatgtatatcatcttttgaaaagtgttcctgtcctttgcccacttttttatgtttttttttttcttgtaaatttgtttaagttccttatagatgctggatattagacctttgttggatgcatagttkacaaaatttttctcccattctgtaggttgtcagtttactctgtggatagtttctttgctgtgtacagaaactcttaactttaattaga

SEQ ID NO: 139210 - DNA, 401 bp, Homo sapiens
atgctgacacttactagctattgagaattagaggggatgaagaacttctaaaaattgagtggctaacactgttcttgaatcctgatagaatattatccatttgctttttagtatctgtgacaatcaaatcaatttttctccttttgtattttacttatgattctatttttgatgtaaaacagatatatctgcagttacataaacagggtaaagatcaattaattcccactttactctttcatactttattcatgatcacaatatgcatgcttgccaaagagatgagtaaatattgttattattttaaagacagaggcattggcctaatgtcacrtattttataatatttacttaattgaaattcagaatagaagactttcattgttgtgcaagaacagaag

SEQ ID NO: 139211 - DNA, 536 bp, Homo sapiens
tatatatacagatatttatatttatgtatttttatatattataaaaagcatatatttttcatttttcaattactacaaccgctaaaaccattaggtcagaagaaaacgtgttccactggtgccacttcagtctgctttctaaatctcatgtccgtgggcaactggattttatgtctgtaataagaagtctgactccattttgatgtttgattactaacaactttcaagcccacccgtctctcttcctcttttgcctcagatgtgggcaagctcataagaacgcccagatgctttcttctttggtgcaggttggacgttcaaatcacataagctgtcatccatgcctaggaaccctcatttatagccctaccccttgaccacaataaaagccaaagccagttgtcactccttgctccctcacgtcattttcagacctgcttgatggtctgcactgttcttcccagaaattctcactatgtgagtaatcartcttttcataccctcctggtgggtgtgtggtgtcattaattttgaca

SEQ ID NO: 139212 - DNA, 480 bp, Homo sapiens
tactgatttgtgggaaacacatgatatgggactgtcttatgcagtgtctaatcatcaagattcagactctgggaaactgtagaagtaacccagtttcttcaacaaactaatttcaatgaaaaaaaaagagtaagttatagattaaaagaaaattaagaaacaaaatgatttgaaatgtgtaccttatttggattctgattcctacaaacaaactataaactacttacctgcatattgctttactgggaaaaatcttagcagatgatacttccttacatttgtagagtagaatgtrttttatgtcttttattagtatagatgactggccctatatcatctaatagatagtccttttcatcatggagatgaattattgtgggtccagagttttgtatatgtctctaatcctgctagggagtccaatcatacccttgtggtcctatacttcagccacacaggctgcagctttagtgacatcac

SEQ ID NO: 139213 - DNA, 513 bp, Homo sapiens
taaataactgcctgattgctagcacagctggcctaaacgtgtttatactgaccaaatattttttcacttctttgactctactgagcccttacactccacctccctcattctccctttaaaatgcccaaatcacttctgtgtgaagtggaattgggctcarctctttcccctgctgtcagtagttactgaataaaatctgttttcaccacttaaattgctgatgtctttggcaccagctgaggctgaggaatggcgtagaaggtactcaatttgaaatgtaactgtcatgctatcaatctgcatcggcagcctaaaggagtcagagtgagaaaagaaggctcgtggatagaaaagcaggcactgcaaatgcattcttaatagggtggggctcttatttccattcctactactgaagattcatttctacttcaattgccacttttcagaagagagtttatttggaagttccatgggaagcagtggaaatccagtatgctgatgtcacctgaaaca

SEQ ID NO: 139214 - DNA, 594 bp, Homo sapiens
ggagctcaattttaaggagagaggtttaggtctgagaaggtcccatgaaaaatgtaatgggttgtgcagtgggagtgatagtccttggtggaattggtgaggaatgtgaggagatgaacttcaagtttagaacactaagaagacatcacagaactgagaagttcatgagattatagaagttgtaaatgagaagaacttcaaatactatgagatcttctagaataagaattctgagttatwcacccctttatttgctgtacctattacagaacctggcacataaacagcataacttttagttgaatgattactatgtgaatgaagtaggaatccttcctcatcaccaacccataattgggttaaaagagagggtaggatttgttcacaagagaggcatatgaagctcacctctccagtcatatcttttatctttcttgctcattatcttcatataatactgattttcattatgtttttagaatatccaaagctcgtttatgcagaagaattttccacttactgtgccatctgcctcaaatatatttccatagctagtttttttttccattttttgtgtctcaactcagaagcaac

SEQ ID NO: 139215 - DNA, 534 bp, Homo sapiens
gctctattcactaagacaagaaagtagatgtatgaattttgtgaagattgtcaacaataaggaataaaagaggtttctgatttattctgatttaactagaaaataagcttaatcagagcacctgttccacaagcaggctagttaattcatgttttacttgattacctgagatttcagtagttactcagtggatagaagagatactaaagacaggtaattctagaaggaaagcaaagcttgcagattagatacttgtttcaaagagaaatataaaaataaatgagttcrcctttgaattttacaatattttgtttttgttacacaataaatctattttttatcttgtaaaactatacaaagccccccaaaatagacaaattgattgcaaagatcactaatgaccaataaccatgctttaataaactaaatggaattagctcacatacttctgttccctaaagctacttctgactatcctgttcttaaaatcgggttctttggcaatacactaactatattagtccattttcacac

SEQ ID NO: 139216 - DNA, 523 bp, Homo sapiens
gatttgcatgaaattaatacacaaactgctttcacatattctttcttacattcttagtaaaaaaaaaaatcttttgttcagttcattttcccatcttctgctccctcctacttcccctattcctgcttgttttcttttctctcttgctcttgctcatacactcatgttcacacacacttacatagacatacagtacataaagacacagtctgaaacaattcttttcatatctatggttctaaaatagcttcctcacatgtgatttcctttttggttgttgttttaaggatgactgcattacttataattgggaaatgtttgttttggtaaggtaaaccagaggcctagtctgctgtctggaggacttcagtttttaaaaaagaaacaaaacatatctgctgtgtttactcatttatctataaataattcaactagcatttatcaggtacatatgatgaccctaraactatacatttttcccatttgcacaaagaaaagagagtgatggattttgacatcaaaa

SEQ ID NO: 139217 - DNA, 503 bp, Homo sapiens
atgatcaagtcaagttgtagatggttagatgactgattagattatttctcttcttacttacagaggtcaggaagaatctatctccaaacttcagagacaaaagttgaaaatagttaaaagcttgggtcagagatattacataaagtttattccctttggaatttttggatgagcccagaaagggtttaaatttaacttagtaccaaaaacaacagcagcaaatatcacaatatcaagagtgaaaagaaaaagccattaagccatgaaacctcttcaaaggcatcatttgttcactgagcactcaaggctatgtagcattattygtcactgattctgcagacaaggaaaagataacaaaatgttttctgagaaggcagtttgttccaaggtaagattgagttaaataaccaacattgttcttggccaaaacgccaaaaggtttgtgttcctcttctctgtaattgaacttgtactgagcacacaaagattaagaaaagactttg

SEQ ID NO: 139218 - DNA, 590 bp, Homo sapiens
agatctggttatttaaaagtttgtggcacctgcccgctactttcttgctcctgattttgccatgtgacctgcctgttcccacttcaccttctgtcatgactgaaagctccctgaggcttcactagaagtygagcagatgccagcgccatacttcctgtacagcctgcagaaccataagctaattaaaccttttttttttaataaattacccagtctcaggtatttctttatagcaatgcaagaacagcctaacacacttccctagttgagcactgagattactctatctcagtcaacatctttattctagccttatgagagaccataaaacaaaggcatcacactaagccgtatccagattcctgactcataaaactacaagaaaatagaagttagttatttaatagggttttggagtaatttgttacacagcaataaataattaatgcataagtatttggttgagcatatcaatgtagtacttgatgtgaactctcttttctacttcctgcaactatcaaaatttaagtaaaatatccatctctcattatttcagggaatgtagtgaacacttaattgctctgcatgag

SEQ ID NO: 139219 - DNA, 568 bp, Homo sapiens
tatttaaaagtttgtggcacctgcccgctactttcttgctcctgattttgccatgtgacctgcctgttcccacttcaccttctgtcatgactgaaagctccctgaggcttcactagaagttgagcagatgccagcgccatacttcctgtacagcctgcagaaccataagctaattaaaccttttttttttaataaattacccagtctcaggtatttctttatagcaatgcaagaacagcctaacacacttccctagttgagcactgagattactctatctcagtcaacatctttattctagccttatgagagaccataaaacaaaggcatcacactaagccgtatccagattcctgactcataaaactacaagaaaatagaagttagttatttaatagggttttggagtaatttgttacacagcaataaataattaatgcataagtatttggttgagcatatcaatgtagtayttgatgtgaactctcttttctacttcctgcaactatcaaaatttaagtaaaatatccatctctcattatttcagggaatgtagtgaacacttaat

SEQ ID NO: 139220 - DNA, 524 bp, Homo sapiens
ctatctaattaatttcctattaactctctttttctgcctattctattccagttgaacaaaaaaaaatcctgtaaaggtgtgatatgaaacatgatcatttttcacatgaaataatttgacaactactggaataagagaagttaatagtataagagaagttaatatttaataggcaagcctattaaataaagccaataaagtatagaaagaaaagwtgatatttaatactttaaaaactctctgttctagttggatttaggtttggtgacacatgccagtctacaggattgaataaatataggaatcaaaaggaaaaatattactcttaaactactatttcatattttaataaacaagtaaagtcaataagtgaatatcaaatagtatgtttctggatatcaggttgttgaacaatcctttgaaaaggatgctatgaagtaagctaagcttggtccaattaatttttttagattattacataattcaccattcatgcatttaccaagtcatttatttaaaaacac

SEQ ID NO: 139221 - DNA, 480 bp, Homo sapiens
ctctgattctagcctaggagagaacagttttggagtctgtgtctatacgcatgattagaaaatgaaggtactaaaaagaatgagatgaatctattgccttcagagccacttagaacccatttagctgaaggctccaattctaagcaacttattcatctttatgagtaaaggtaatggatatggtcccactgagctggatctacaaggtcactawcttatctgttaaaagaacaaacatctactctctccatacttggcacattcagatgattgtatattccatgtaaaatatatgccaatttctggcttgaccaactacaagtatgggtttctcaggctaatggtttgtaagaaaagaaggtagacttcaggcataactcttcaaccacagaatactgttataatatttatcactctgtggaaaaatatcagaaacaacattaaatgatttatggtcttaattatcttttgtttggactt

SEQ ID NO: 139222 - DNA, 596 bp, Homo sapiens
ctggaccaagcagggggatggccttcctgctcggtctgcagttgcctcttctgagctcagtgagtactttgttctgcttctcctgtgtggttttaaaatgttagccaagagattagaggaactagaattattactcttggagtaaagagctggtgggggcggggcggggtggggtggggcggagttctcacacagaaaagagtgaccagttaatctccaccttggctgagaagaggagacacgtaataaaaaaagttaattttactgtgacaacaaaacgtcacaagtgaaagggcatttcggtgatagcaaagggcctgagggcagttcgatctcaaaggggaaggggtacgttcccaggggacatgtgtgggcttttcctctctcctccatcactgccacaggaatccagctgttgtcttctcagctgtatcctacmgaatctctctctggactgctcttgaaaatagcatagaccttcatttcaacaaatgagtgatgtgaggcctagactctaagcagaggcttttccaggtgacctcctgggacacctggcaatgccgcaggtttaggaaaaacatgatctatattgcagt

SEQ ID NO: 139223 - DNA, 425 bp, Homo sapiens
gcaggtgataaactattgtaattaaatggatatttgtaaaaacctccatggaataagaatagcaacataaaacagaaaaactatagcaaaagcaacaactgtgtggtaggagctgttggtgtgaggtccaatcaaacagattctggtgtttcctccattaatttgggttacaacgtgtactatgtaatttcttcagagaaaaagaaccaagagaagagaaagagagtgagcgtgagagagtaggggagasagaggtattatgaggaatttgttcatgtggttatgggaagctgaaaagtcctgggatttgctgtctgcaagccagcgatccaggaaagccattgatgtaattcagtgtgagtttgaaggcctgagaacgggtaggtgatgatgtaaatccctgtttgagggcaggtaaggtgaga

SEQ ID NO: 139224 - DNA, 416 bp, Homo sapiens
agagtattttcttattgacattacttagaatttccatcataaaatgataataaaagttagaaccaacgttttgtcagttttattatcatttttaaatcctccaccaactgtgcaccccgttattgyttgcacccaaggccagtgctccccacctctttctttgaatacctgtgtcaacaagttgcttttgggcagtctaaagattctctttggcttaagcattctcttttgaaactattcatcatattataatattgtgaaccttcagtgttctggtcctataaaccctctgtctttctagtgaacactcagtacttcagattagtaataatttgggctgagggtaaattcctttttgtataataaactgaaaattacaaaatattaagtatattcttcaagcatggaatattaaa

SEQ ID NO: 139225 - DNA, 477 bp, Homo sapiens
gttatccatgacagccctgctcctgcagcaaacttctgcctgggcatccaggtgtttcatcttctgaaatctaggcagagattcccaaacctcaattcttgaattctatgcaccctcaggcttaacaccacatggaagctgccaaggtttggggattgcaccctctgaaaccatgggctgagctgtacctargcccccttttgcaatggctggagtggcttgagtggacgcagggcaccaagactctggctgcacacagcacagggaccctgggtccagcccacaaaaccactttttcctcctaggtttccaggtctgtgatgggaagagctgccatgaagacctatgacacgtcctgcagacattttccccattgtcttgaggattaacatccttgttagttacacaaattcctgcaaccaattaatttctcctcagaaaatgggattttcttttctatcgcattgtcaggctgca

SEQ ID NO: 139226 - DNA, 599 bp, Homo sapiens
ggtgatgggtttacaggtgcaacaaaccaccatggcacatgtttacctacataacaaacctgcacatcctgcacatgtaccccagaaattaaaataaaataaaaaaatttgtggttagmaaaagttaaacttacatatttggttaagtattctatgcatccacattaaaacacacaggaacaaaatgagcagataacatgtttgtctatcgctacagtattgtcttcataaagttaggagtcctctgctgtcccatctttgtattcttaaatagtatcccttggcctgtcagacaacatgatgggtgataaacatctactcagtgaattattgagtgagtaagtgaatggatgtcctgaggcaagttccaaattcatacacaaaaagaaaccccaaaaaacccctctgttgtttgagaagattcactcctacaaatcagcctttgtggaacctaagaagtcaggaaactagtttaacgtatctagtcattctaattaacaaagatattaaattttggaaagcaaaaagagaaaaaaaatagcctttctacaaattggggaaaaaactctacaaatagttataaaaatacaattattata

SEQ ID NO: 139227 - DNA, 610 bp, Homo sapiens
attttttattgtattttaaaactaaaggaatcattccattatggctgccacaaaatttgagaaaattaaatggtttgatatccttacaccaaagaaaattaatctagcagcaaaatcacagaaagaacttgatttcaagaagtaaactttttatacagtaaaagtattctaatctcagaaacattagagtcatgttaattagcaactatttattcaatttaactcttttccacaatattgctattattggtttccatctggcctaattaataaaaattcttctttcactggttctgatcatcagccaaatttcattttccccaatctggcttggttaagaaatagtgttagtccatctgcaatagccttacttttataataagccagaaacaaaatgactgctgattatataaagctatattccaacacatctactgaatctctattttatcattcagaaggtgtgaaagaggctgaaacttttcaagatgttttttctagtaaaaaatatttctacacaaaacaaatataattttagaggtttaaaacacacagktgtgctctttggaagttggcaataattctggaacagaaattgttaattacacat

SEQ ID NO: 139228 - DNA, 653 bp, Homo sapiens
ctgcagagccataggccaaaaaacctctcttctttataaataactcagtctcaagtattcctttatagaaacatgaatgaactaagacagttcacatggtgctaattctgcaggcacacrgactgcaagagctgtggggcatgtcagcttctaccaaggtttcaaaagtgtttcaaacagtctggggcctcaggcagagacttgtcacaggggtggagccattgcagagagcccctgtgaagacaatgtctagtgaagttgtggcagtagggaagtccgtgaaatcacaaaaccatagtactatcagcatgcagctctagcttgaaaaggccacaatcatgaaactccaacctgtgagagcttctgggtagactatgcccagcaaaacaatagaagcagagctgcctgagatctggagcacccaaccccagccctagtgtgcccaggatgtgggatatggagataataaaatctcaaaggagattctttttcagctttaagatttaatatcacctttcctgttggattttggacttagctgggtcctattacttcatcactatattttgaaagtcaataattttttatgatttcacaggctcttggttgaggataatttgtctcagggaaaatcatgtcttgggtctcaccta

SEQ ID NO: 139229 - DNA, 653 bp, Homo sapiens
ctgcagagccataggccaaaaaacctctcttctttataaataactcagtctcaagtattcctttatagaaacatgaatgaactaagacagttcacatggtgctaattctgcaggcacacggactgcaagagctgtggggcatgtcagcttctaccaaggtttcaaaagtgtttcaaacagtctggggcctcaggcagagacttgtcacaggggtggagccattgcagagagcccctgtgaagacaatgtctagtgaagttgtggcagtagggaagtccgtgaaatcacaaaaccatagtactatcagcatgcagctctagcttgaaaaggccacaatcatgaaactccaacctgtgagagcttctgggtagactatgcccagcaaaacaatagaagcagagctgcctgagatctggagcacccaaccccagccctagtgtgcccaggatgtgggatatggagataataaaatctcaaaggagattctttttcagctttaagatttaatatcayctttcctgttggattttggacttagctgggtcctattacttcatcactatattttgaaagtcaataattttttatgatttcacaggctcttggttgaggataatttgtctcagggaaaatcatgtcttgggtctcaccta

SEQ ID NO: 139230 - DNA, 576 bp, Homo sapiens
ttatgtaaggtatgtttcatcaaaaacaataacagaaaacttagactgcatttgtcatctaaagtaatcagatttggtctgatagtttaccaaaaaatataatttaaatctctgaattggttttacacttgaacattaagttatccttttgttttttggggaaaaatggttatcttgcagatacaagtcattcttaggaactcggtcatgaaattctgctgtcagaggttytgaacagtgagaaatatattttaagaatttccaaaatgaataccactcgtggattactctcatttgtagtgccagaaaggaagtaattcctttctttcccattatgaaaggtcacactctacatgcctataacaaatgacaggttaatgacagaaaagcataacaaatttgttatgtgcccaaatgtgcacagaagtcatgcgaaatataaaagtcaaaaaaaaaaaaaaaagatggttgatgtttaaatgccctcttcattgaggagagaggagatggaggtgcaggagtaaattattttcagggaaatgaatgagcccaaagaacaattgctgcctgggccca

SEQ ID NO: 139231 - DNA, 685 bp, Homo sapiens
ttcatcagagcactgggcatgcaaagtgcccacagcattataccacaaagttagtgtgttgaacacaaacacacaaagggtcattgataagtgtgctgcttttagatgtatgtttagaaataggtttagactrtaatgtttttaagaattgctttgttttgtcaaagcaaaagtgctttgctttgttttgtccacgaagtctctggatcctatatcaaattgagggcatgatggtcagtatttaattcggaagtacaagcttccaactcagttgcttgcataactctgccaaagaaacatggaagagaaggcaaagaaaatagaatggactttgggggctcaagccagatgtagaaggaggtactgggtcaggatcagtgcactgggttgcattgcaggtgagcccagatagaccttataaaccagtttttaaactggaggcctgaagtgctgtatgggtcttgtcctcactgacctttgtgacaataataatgtatacataggttttctgagggtgtaaaagttcatgtgattcacgtcttggaaagtggaggctgaagaatgctttcccattgggttagcagctgaattggtctgaagaggatagtcaagggaaaggcttgcatccatacaaaagaaaaagtaataaaccgagatcacaaagtatatgaggggcttcctgaca

SEQ ID NO: 139232 - DNA, 685 bp, Homo sapiens
ttcatcagagcactgggcatgcaaagtgcccacagcattataccacaaagttagtgtgttgaacacaaacacacaaagggtcattgataagtgtgctgcttttagatgtatgtttagaaataggtttagactgtaatgtttttaagaattgctttgttttgtcaaagcaaaagtgctttgctttgttttgtccacgaagtctctggatcctatatcaaattgagggcatgatggtcagtatttaattyggaagtacaagcttccaactcagttgcttgcataactctgccaaagaaacatggaagagaaggcaaagaaaatagaatggactttgggggctcaagccagatgtagaaggaggtactgggtcaggatcagtgcactgggttgcattgcaggtgagcccagatagaccttataaaccagtttttaaactggaggcctgaagtgctgtatgggtcttgtcctcactgacctttgtgacaataataatgtatacataggttttctgagggtgtaaaagttcatgtgattcacgtcttggaaagtggaggctgaagaatgctttcccattgggttagcagctgaattggtctgaagaggatagtcaagggaaaggcttgcatccatacaaaagaaaaagtaataaaccgagatcacaaagtatatgaggggcttcctgaca

SEQ ID NO: 139233 - DNA, 475 bp, Homo sapiens
gatgatgggatgatgacctcccccttccaaagatgcctacatcctcataactggaaacttgaatatcttaggttatatatggcacaagggaattaaggttacaccacagatttaagawtgctaatcggggtggctttttttttttttttttttttttttttttttttttttgagacgaagtcttgctctttcgcccaggctgcagtgcagtggagctatctcggctcactgcaagctctgcctcccgggttcaggccattctcctgcctcatcctccggagtagctgggactacaggcgcccgccagtgcacccggctaaatttttgtatttttagtagagatggggtttcaccgtgttagccaggctaatcagctgactttgagattggaaggttaccttggattatctgaccatacacaatgtaaatcacaaatgtccttaaggaatgaaggcagaagagaaataactgaata

SEQ ID NO: 139234 - DNA, 475 bp, Homo sapiens
gatgatgggatgatgacctcccccttccaaagatgcctacatcctcataactggaaacttgaatatcttaggttatatatggcacaagggaattaaggttacaccacagatttaagattgctaatcggggtggctttttttttttttttttttttttttttttttttttttgagacgaagtcttgctctttcgcccaggctgcagtgcagtggagctatctcggctcactgcaagctctgcctcccgggttcaggccattctcctgcctcatcctccggagtagctgggactacaggcgcccgccagtgyacccggctaaatttttgtatttttagtagagatggggtttcaccgtgttagccaggctaatcagctgactttgagattggaaggttaccttggattatctgaccatacacaatgtaaatcacaaatgtccttaaggaatgaaggcagaagagaaataactgaata

SEQ ID NO: 139235 - DNA, 505 bp, Homo sapiens
ctctgcagcaaaccaccttggcacacgtttacctatgcaacaaacctgtacaccctgcacatgtaccacagaatttaaaataaaaattgaagataaaaaaaagaaatgtgttaggtatccagtagattacttcttgtccttttgtatacatctatgccacttgtttaaggcttcaaaacaaccttataagatatatactattaaatttattatatatgacacaactaaggttcaaagaggttaaaaactgaacagcagtcagtaaattatgaagccagaatttgagttctcagctgcttttccacttcctattctgatatttcttacaaaagagaagacaagaaatagcttagtttcctagcttccaaaaataggaggtccayactgagttagaagaaaaaaaaccaaataatcattgtttttcttaagactgctttggaataatttgatttatgcatgtttttgtgacccctccagaatccctagagaaaacacagggcctgtc

SEQ ID NO: 139236 - DNA, 620 bp, Homo sapiens
tttgaattactgcagaccatagaaaaggaacaaaatcttcctgactctataatgttagcatagctttaatacaaagaaaagacaaaaatagttttctatataaatatagttacaaaaattctgtatagtatatagctactgattccagctgtatagtaaaagaacagtgtagcacgacctagtagagtttattctaagaccataaggatggttcaatattaggaatctatcaatgtaatatatcaacacattaaatttaaaaagctgatgattatatcaatagatgcctaaaaggtatcataaaattcaaaagttatttctaataaaaattccaagtaattcagaaataaactatttagaaatgatagatttttttttttttggccaaaattcaacagtaaacatgataaaaaaaaaaacaacaactatgaaatgctggagctatttccattaaaatgagaactgatttgtcattaaacataatgtrtagtgaagttgatcacacctttcaacccccactggtctaggacattcccccggtgtggcaattgcaagaatgtatttaaacatcattgtcccatttgattgtgacttcctagaggcaggtatatgccttacaa

SEQ ID NO: 139237 - DNA, 539 bp, Homo sapiens
gggctcttcttaaccaaaatgctacctaaaatgcaacaaagtacatcaacatatgtcttttgcaaagccaattaacttgtaatttatatttttaaaaatattcagatatgactcatgtttcttaataaaattccttgacaaaaagtgaattcaaggcccagggtttgctggagataacaatccacctggtaagacatggatttagactaatttttaatcactaattttatgttttccatgtttaatatgtttaatcactaatgtttatcatgcttctactttgtgccaggaactaggaccattggccatttgataccgctgcttccccatggataaagtagggggtgtggtggcccatagggagttttctttctcgagagcagccaatcctgaaggatcacagttgcccaatgtgcgcacaaagcactaatggttttgcatckgattgaagggctgtttgacaaaggttttcgctatttcaaatacgtaactggagtctaagtttccaaaaggtgctcccaagataaaaaatttctgtg

SEQ ID NO: 139238 - DNA, 516 bp, Homo sapiens
agatgaaggccacccttaacattgctcacaggcatgaggaaagctcaggttgtatgacagagtggtttaattcaaatatccctcactcagacttccttgtcttggggaatttggtcatagacagaagagaccagatctttttaaaaagtaaggctcctttttatgtatcaaaagagatatgattgcttacaggttggattacctaaattggacataaaagatgtgatacttcatggggaaataaatgtttatttattcggagtggagagaactggggatctcagagaaggacttatgataagcagttgcatacaacaagatgggaactgtrggaatcataaccagagcagcattgtaacaaaatgcaccaggtcatcagtggctacccggaagcaaatcagcattgatggatggtggtcaatgtctaaaataggaaagcacagccacagaaaacagcaacagggaaagtcgcccgcaaccccttggcatatactgccctctgttctgattgctatc

SEQ ID NO: 139239 - DNA, 562 bp, Homo sapiens
ttttgctgcattccatgtttttgtcttgcaatctattttgtctgatatgagtatagctactcttgctcttttttggtttccatcaccacagaatatctttttccatccccttattttcagtctatatgtgtctttttaggtgaaatgggtttcttgtgtgcaacagatcatcgaatcctctttttttcatccattctgatactctgtctttttactggagagtttagtccatttacattcaatattattattgataagtaaggacttacttctgccttttaaaaaatttgttttctggttgttttgtggacttctctttcttttttccttcttttctgtcttccttttagtgaagatgattttctctggtggtatgatgtaatttcctgctttttatttttggtgtatacattgtattttttttattataggttgccatgaggcttgcaaatactgtcttatatcccattattttaagttgataacatcttaacactgwttgcataaataaacaagcaaaaagaaaactaatagaaactctgttttttaactttgtgccctg

SEQ ID NO: 139240 - DNA, 488 bp, Homo sapiens
ttttgtaaaaccatgttttcatggatggtctggatgcttgtggatgtttgccaatttctggaaattgaagagttaggtatttattgaagtctttgcattctgggcttgtttgtgcctgtccttgggaaggcttttgagatattcaaaaggacttgggtggtgtaacctaagccatgtctgcattaagggggaccccaaatccactaatactgtagttattgcagactcatagaggtaccaccttggtggtcttggataagatctggaagattctctggattacctgttctcttttcttattttctcccaaacaaacagggcctctctctttccatgctgagctgtstggagctgggattaaggtgacacaagcacctccatggccaccatcactactgtgctgggtcaggcctgaagccatcacagcactaggtctcgcccaaggctcactgtaatgactacctttctactgcctatgtttggtgaag

SEQ ID NO: 139241 - DNA, 389 bp, Homo sapiens
cctcaaagtacaggcagcaaaaacaaaaatagacaaatgggayttaatctaactaaaaagcttctacacagcaaaagaaaaaatcaacggagtgaagagacaacttgtagaatgagagataatattattcatccaacagaggactagtatccagaaaacacaaaaacatcaatacaaagaacacaaatacaaagaacagcaaaacctcctgaaataatcccattaagaaataggcaaaagatctgaataagtacttatcaaaagaagacatacaaatggaccaggcatggtggctcacgcctgtaatctcagcactttgggaggccaaggtgggcggatcacctgaggctaggagttcgagaccagcctggccaacatggtgaaacccg

SEQ ID NO: 139242 - DNA, 389 bp, Homo sapiens
cctcaaagtacaggcagcaaaaacaaaaatagacaaatgggatttaatctaactaaaaagcttctacacagcaaaagaaaaaatcaacggagtgaagagacaacttgtagaatgagagataatattattcatccaacagaggactagtatccagaaaacacaaaaacatcaatacaaagaacacaaatacaaagaacagcaaaacctcctgaaataatcccattaagaaataggcaaaagatctgaataagtacttatcaaaagaagacatacaaatggaccaggcatggtggctcaygcctgtaatctcagcactttgggaggccaaggtgggcggatcacctgaggctaggagttcgagaccagcctggccaacatggtgaaacccg

SEQ ID NO: 139243 - DNA, 533 bp, Homo sapiens
gggtggtttcccccatactgttctcatggtagtaaataagtctcatgagagctgatagttttataaggggaaaccccttttgtttggttttcatttctctcttgcctgccaccatgtaagacatgactttcaccttctgccatgattgtgaggcyccccccagccacatggaactgggagtccattaaatctctttttctttataaattacccaatctctggtattatcagcaccatgaaaatggactgatacaggtgttaatatgattatttcatggtgagttgagctataggagtaaggttttatacctcattattgtcaacccaatttctgcttttcttgtcctttatttaagacaataaattcctatttttttgcactttattttttccattactgcacgagcttaaaatatctctactggaaatatcatagagaccattctaattccaagctcttctttaaacatatgtggagatgaaggcctgggtcacagtctcatgactaagccacatgattcttggtaggttat

SEQ ID NO: 139244 - DNA, 552 bp, Homo sapiens
ttctaaaatatcttaaaatgcagtaagtatattcttggtgaggatgaataaacagtttttttttctaattttgttttagttgcaggggtacatgtgcaggtttgttatataggtaaattgcatatgggggtttggtggacacattattttattgcccaggtaataagcacagtacctgatgggcagattttttatcttctccctcctcctatccttcaccctcaagtaggatctggtgtccattgtttccttctttgtgtccacatgtactcaatgtttagcttccatttataagtgagaacatgcagtatttggtattccattcctacattagttcacttatarcaatggcctctagctccattcatgttgctgcaaaggacatgatttcattctttttatgcctgcatagtatttcatggtgtatatgtaccatattttctttatccagtctactgttgatggtcatttaggttgatttcatatctttgctattgtgaatagtgccgcagtgaacatacgcatgcatgtgtctttatggtagaacaattt

SEQ ID NO: 139245 - DNA, 511 bp, Homo sapiens
tgttatgttatttaaatggaatgtccttttagcaaagttgtagttttctctgtcattagccaacattgtttcttgagagaactaatttttataacatgttaaagtatttataaacrtattccctgaaacagctattgtagcatcaaaaatggaggatttggatggcttaggggggaaatcttgacccaaaaataatagctgggtgctcttctgagagctagtagattgacataaagtgctgaagccatgcttttttgatcattgaggaagaaagcgtgatttattaaggaagcaactgtatttggaagataactcttcacatcagaagcatgaaaactattgagggatggtgttaatttaggtaacagtgtcagtaccggataaagaggccaactccacctctgagttcccttcttatattctgaggaaatggaggaagactttctccaatctgtcaacaagtctttgaattatttctccatgttcctacttattttttcttttatcttct

SEQ ID NO: 139246 - DNA, 601 bp, Homo sapiens
cccccctcccctttttaatgccaatcaaactcaggaatgtgtgcacacagaaggggttttcaaggtgagacaacatgtcttcgaggtctggccaggctggggacctcactagactgagaaagaacctcaggggaagaggaaactcagaacatcagagatttaaatagcttctggtaatcatctctgggcaatggagaaagcttctggagctttcttgtgctcaaggcctggctggttttgaatgaaaacaagataggccactgctggactgcgtygcatggggctgaggctgccctgtaattctgaagtgccctccggcatctcttaggaagagctgcagcagtggtgaggcagagaggtggctcgtgcctccctgccagggtgggtggacagtggattgattacgcctgacaactcctacttgggccctgtcactgttgtgctgatatagaccttgaggagtatcagaagggagtaacaaaatgacaaatcctctacccacatgttttaccctcaggacaaaacatgcttctgaaagaaaaaaaggtagaaaagactgcggttgacttattccagagtagaggatgaggtctatgagaag

SEQ ID NO: 139247 - DNA, 562 bp, Homo sapiens
ttgtttgccacttccttgttactattctgcttatgttctaatggtaggtttcccttcatttaaaacaaagtctgctgcatgtggtgattttcacacttatattcctaggtccaaacaatgatggatcttcaacaaatgatttcactgatggctttgttagtgtaaggacaagccgctcctgggtcacaaggtggcccatggctgtcactccagtgaagctcttgactaggattcaagtcagctcttcactgctgacttagaataaggccaaccttgtgctatgattttaaaatgggtgatgtggttctaagtcatgtactatgtaaaactctctttttaaccctcataataatttcaacccccaaatttaaatggggctaacaaaagcctatataatcttccctttagagcatttttakcctttagtgatttttttcggacccacagttaagattagacattctcttttatagtcagatattctcccttcacagatatgatcatagaggataaagatcataaggccatgcccaacatgatatactctatactcaactcgttt

SEQ ID NO: 139248 - DNA, 411 bp, Homo sapiens
gaagcagtcagaacacatacaacatttgtaatttatgctcaccgtcttacgtggtcatggtttgtggcaccccaaagcaattacaatagcaacatcaaagatcactgatcactataacagatataataataataataatgaaaaagtttraaatattgctagaatcactaaaatgtgacacagagacatgaagtgagcacatgctgttgggaaaatggcactactacacttgctcaatgcagggttgtcacaaaccttcaatctgaaattaacaaatgcaataactgcaaggcacaataaacaaagtataataaactgaggtatgcctatatctaaagatcattgaaataagtggcccatatactgaataatgatggggtgaccatcatccacaagcaatctcccaaaagt

SEQ ID NO: 139249 - DNA, 411 bp, Homo sapiens
gaagcagtcagaacacatacaacatttgtaatttatgctcaccgtcttacgtggtcatggtttgtggcaccccaaagcaattacaatagcaacatcaaagatcactgatcactataacagatataataataataataatgaaaaagtttaaaatattgctagaatcactaaaatgtgacacagagacatgaagtgagcacatgctgttgggaaaatggcactactacacttgctcaatgcagggttgtcacaaaccttcaatctgaaattaacaaatgcaataactgcaaggcacaataaacaaagtataataaactgaggtatgcctatatctaaagatcattgaartaagtggcccatatactgaataatgatggggtgaccatcatccacaagcaatctcccaaaagt

SEQ ID NO: 139250 - DNA, 600 bp, Homo sapiens
gaataaaatacatggtatgaagctaaaatggtttataataggtgaatagtagtgatagaatttccttctcagaaacgagaaatatatatgctaaaaccatttctgaatgaacttccaaaactattaacatcattcatttaaatactttgatatcaagatgacaccaacttaaatactggttctgacagtttattccatttatataagatatcacaaggagaaatttagaaacattctgatgaayccaaatgagaaacctcaatatagcttttcaactaatatttaaagcaaaccatctgaggacgccatcaaatatgcttcttttttcctaactcatcactactattactactattttatatttttatttaaaattagcaactctatttgcaaaagtatctattttcaggcatcctcgcttaagaagccctcagcaggaaagactgcaatcacatgcaattacagatggaaatgacactcaaatttatctatggtatttgtttcccaaagccaaaacaatgtttccctgagctatatttcaccattggtttgatcctgtaagacaaaaataacttcagtttcttaatatcatctgtaaga

SEQ ID NO: 139251 - DNA, 600 bp, Homo sapiens
gaataaaatacatggtatgaagctaaaatggtttataataggtgaatagtagtgatagaatttccttctcagaaacgagaaatatatatgctaaaaccatttctgaatgaacttccaaaactattaacatcattcatttaaatactttgatatcaagatgacaccaacttaaatactggttctgacagtttattccatttatataagatatcacaaggagaaatttagaaacattctgatgaacccaaatgagaaacctcaatatagcttttcaactaatatttaaagcaaaccatctgaggacrccatcaaatatgcttcttttttcctaactcatcactactattactactattttatatttttatttaaaattagcaactctatttgcaaaagtatctattttcaggcatcctcgcttaagaagccctcagcaggaaagactgcaatcacatgcaattacagatggaaatgacactcaaatttatctatggtatttgtttcccaaagccaaaacaatgtttccctgagctatatttcaccattggtttgatcctgtaagacaaaaataacttcagtttcttaatatcatctgtaaga

SEQ ID NO: 139252 - DNA, 605 bp, Homo sapiens
gtcccattgataccacggtwtaagtgatacacattttagaggtcactggaccttgttttgaataattttaggtaaattcaaactactctctagctccgtgtctttcttgtaagattgtgacaataatacctacctcataaggatctaatacatgactattttcttataaattatgtgagcagcacaaagcacaactgatagatgctctgtaaatgttagttcactcataattcatttctaaattcattcagccagtactaattctgcatgcctaaatgccaggcactgttctaggcaccagggtggaaaacccacataatgcctctactctcatggagctgtcattctagtaaaaataacaatgaagagtttggctggtgacataaatgccaatgagaggtccctcaatcaacctgtcctcacccctccattgagcacagggttgctgggcgccagccaattgctctggagcataggaaaggttgtatttgaatcctgcccagctgctttactacctctctcttatatactttatctgctcccttttttttcctaccgtcttccagtctcaaccatctatgattttaaatagtatgcttcaagtt

SEQ ID NO: 139253 - DNA, 605 bp, Homo sapiens
gtcccattgataccacggtataagtgatacacattttagaggtcactggaccttgttttgaataattttaggtaaattcaaactactctctagctccgtgtctttcttgwaagattgtgacaataatacctacctcataaggatctaatacatgactattttcttataaattatgtgagcagcacaaagcacaactgatagatgctctgtaaatgttagttcactcataattcatttctaaattcattcagccagtactaattctgcatgcctaaatgccaggcactgttctaggcaccagggtggaaaacccacataatgcctctactctcatggagctgtcattctagtaaaaataacaatgaagagtttggctggtgacataaatgccaatgagaggtccctcaatcaacctgtcctcacccctccattgagcacagggttgctgggcgccagccaattgctctggagcataggaaaggttgtatttgaatcctgcccagctgctttactacctctctcttatatactttatctgctcccttttttttcctaccgtcttccagtctcaaccatctatgattttaaatagtatgcttcaagtt

SEQ ID NO: 139254 - DNA, 605 bp, Homo sapiens
gtcccattgataccacggtataagtgatacacattttagaggtcactggaccttgttttgaataattttaggtaaattcaaactactctctagctccgtgtctttcttgtaagattgtgacaataatacctacctcataaggatctaatacatgactattttcttataaattatgtgagcagcacaaagcacaactgatagatgctctgtaaatgttagttcactcataattcatttctaaattcattcagccagtactaattctgcatgcctaaatgccaggcactgttctaggcaccagggtggaaaacccacataatgcctctactctcatggagctgtcattctagtaaaaataacaatgaagagtttggctggtgacataaatgccaatgagaggtccctcaatcaacctgtcctcacccctccattgagcacagggttgctgggcrccagccaattgctctggagcataggaaaggttgtatttgaatcctgcccagctgctttactacctctctcttatatactttatctgctcccttttttttcctaccgtcttccagtctcaaccatctatgattttaaatagtatgcttcaagtt

SEQ ID NO: 139255 - DNA, 471 bp, Homo sapiens
ggcttcaagggtcagaaacctagttttaattttttacgtcactcactaggtgtgagattaaggcaagttatttaaaacttctctgggcctcagtttctttgtctataaatggagaagtagtgttgccctacccgaacattgctgtgaaaaattacctgaaaatgtttgtacagattttataaattataaagtagcaccaaaatactagattattactatcctctatgaacaaatgccaaagttcctggtgatgttcacgtagagagatgatgtaaatgatacaaycacattgagttgttaggtcgtcatttttcagtccttcattttcctttgttagatcttcattattcctgtaatgttattttgtcctgagagctgccctttgaggtggcaagatccttctaaactagcagttctcaaaggctgtgtgtggagaatggggatctgtggaaatgtcctagaggggctttt

SEQ ID NO: 139256 - DNA, 549 bp, Homo sapiens
ttatgtatgtgatggtaagccataaaactgggtgagatcatatggtgggtgagcatagactggagagtgaagcctgaagagtcatgggttattgaaaagaagagagggaggcccactgtttactgcaaagtagtgaacaggctccaaaccactcccttcagtgtagtaccatcatgttcccttgatttaagaattactaagtaaattacagtaaataytcaataaaaataatgtgcatcacttaatgtaattaaaataatttaatctaaagtatattctctaatattatagtaaatcttagtaataacaataaaacaatagtaacagaatagggaaatctatcaaagtgaagaaatgaaaccctgccattataataatctaatgccttttctaaaaatggaaggctcttaatgaatatgggtaggtgtagataattacacaaaggcaatcaatatccatggtaaaaatggtaactgataaatataacgtttcatgatgttgtacagcagcttagagaggtttccacttttaaaataaaattttaatgcc

SEQ ID NO: 139257 - DNA, 549 bp, Homo sapiens
ttatgtatgtgatggtaagccataaaactgggtgagatcatatggtgggtgagcatagactggagagtgaagcctgaagagtcatgggttattgaaaagaagagagggaggcccactgtttactgcaaagtagtgaacaggctccaaaccactcccttcagtgtagtaccatcatgttcccttgatttaagaattactaagtaaattacagtaaatactcaataaaaataatgtgcatcacttaatgtaattaaaataatttaatctaaagtatattctctaatattatagtaaatcttagtaataacaataaaacaatagtaacagaatagggaaatctatcaaagtgaagaaatgaaaccctgccattataataatctaatgccttttctaaaaatggaargctcttaatgaatatgggtaggtgtagataattacacaaaggcaatcaatatccatggtaaaaatggtaactgataaatataacgtttcatgatgttgtacagcagcttagagaggtttccacttttaaaataaaattttaatgcc

SEQ ID NO: 139258 - DNA, 580 bp, Homo sapiens
ttatgtatattttagtaaaagataatcaaagataatattatatgacaaaatccaagtgatgtaagattttaaccttgagaaacacttattatggtgcgcagtaagaaaaagcaagtaagttactaacaaggaacaaggaacttttttttcaggaggagtgacttacatttctcacacattcaatactaggaatttaacatagctgcacttcactatgcaaaaacatctgttatctagataaactaatacgttattcagggcagtggaaagggaactagcatttgttgaattcctattatgtgacaggtgctttaccaatcatacctaatttaawcctttaaaaatcctatggggggagtcctatgagattggtcatattatccccattttgtcaattaagacaaattcggagtggtaaaattatgtggctagcttagctgggattcatacttacagcactttcattacagcacttactctgtctacggtccatccatgttagaagtatacttaatattcttataccaacaggacaaaatggtgcagaaacagaacctctggaatgcaagacatgtttagg

SEQ ID NO: 139259 - DNA, 522 bp, Homo sapiens
caaaaacaaaatcaagatggcaatttaaaaattcttcaaactgaattgacagtaatgacacaacctatcaaaacctctgagatacagcagaggcaatgctgagatgaaagttcayagccctgaatgcctacatcaaaaagtctgaaagaacacaaacaatctaaggtcacaactcaaagaagtagagaaacaagaacaaaccaaacccaaacccagcagaagaaaagcaataaccaagatcagagcagaactaaatgaaattgaaacaaacaaacaatacaaaagataaatgaaacaaaaagctggttctttgaaaagataaataaaattgatagaccattagcaacattaaccaagaaaagaagagagaaaatccaaataacctcactaaggaacaaaataggagatattaaaactgacaccactgaaatacaaaagatcattcaaggctactataaacacctttacacacataaactagaaaacctagaagagatggataaaatcttggaaaaatacaat

SEQ ID NO: 139260 - DNA, 600 bp, Homo sapiens
ttaatctctcagtatggactaggaaggataatactaaatgtttaagtccccaaaataggaaaaaacatattaatgaaggaagcttctattttcctgtaagttctaacagatggtttccaaacacattcatagagttaaatgcataatttcaccctataaatatgctgtaaaacattaaaaatagattatagcacatatatcttatggggcaaatgaaatgataaaaggaattttatagtggataaactcatagttaaaagataatattgtttacaactatgtgtctcttttaatagaattaatggattaaatgtgacagctttataaataacacttaaaactatttccttaatttacatcttaatatcttagcatagtataagaggaaaggctttctctcgaacgtgaatatttttgtgacactttagtgtttttaaatttacttttttttttctatttcagcctcactgataagaaaccatgttataatcaaacactaagagagttagctattatattacattattaggttaaaartgcaaaaaaaaaacttggcaaagagaaatgacaactatcattcaaagaatttttccacttaag

SEQ ID NO: 139261 - DNA, 568 bp, Homo sapiens
tgcaatgaaaattgaattgatggtccctacggctgtttgatctttctgaagacagatcttttatgaagattaaatgagagcatatattacactttttattctatctaaaaacaatggtatagttaccattttaaatggtacatttacagtgagacttcatagcactatatattacatctagggtaagatatagtgtccttttctcccagagggtgttctaactgtaactataattctttgtcttgaaactaattgcccgtctataaggtttacttgtatgtcaagttgcttatatgcatgctgacatgcatatttttgcagttatttttgacagaaagtggctggcacatggccatgttaagagatataaagatggccagtgagaaaggataaggggtgaaagccataatcccaaaggacttcttgtgcaggctttactttaggactttgattatttcatgcttgcatctaccctttgaaatgygcctcctggtctctgattctaacaatgctgtttctacaatctctagtttgttccctatgaattcatgttccagctaattcaaat

SEQ ID NO: 139262 - DNA, 442 bp, Homo sapiens
taacgtgactcccaaagatcatggtgagaacacagccacatggtgaaagggcagcacagactcctctacagaacccgtgttacctgtgatggggatctgatagggctggatcgatcgagcrggaagcacggggtggtggaaggtaacggagccgtcaaactctccccgtaacttgatatcgaatattaccgatgtctgggggggaaaaagacaagactgaggccaaaatcaatcatggtttgcccagttgctttcattccatcccatcttgctgtttaaatcagtttaaaagcctgtgtttgcatttcctccctacaggctagctcttacttgagaaggaatttgtcattaacatcacaactctcttttaatatttttatctcctctcacaagtatttcctgcatttatgacatgcttcctttgatgagctcactcaaagtg

SEQ ID NO: 139263 - DNA, 610 bp, Homo sapiens
agccttgggtacttgagatttaaaaaatacttaagagatggctacttaataatgtgaagcctggctgggcgaggtggctcacacctgtaatccccaaaagaggagggcggatcgctagaggtcaggatttcgagaccagcctgaccaacacggtgaaaccccatctccacggaaaatacaaaaattagctgggcgtggtggtgggcacctgtaatcctagctacctgggaggctgaggcaccagaattgcttgaatccaggaggcagaggttgcagtgagccgagattgcgccactacactccagactgggcaacagagactctgtctccaaaaaaaagggaagcctatttaaggtcctgatctaaaactctaggaggggccaggagtggtgctcacaataatcccagtgctttgggaggccaaggtggaaggactgcttgaggccaggagttccaggctgcagtgagctatgatggcgacactgcccccacgcctgggcaacasagcaagaacctgtctctaaaataaataaattttaaaaataaattttaaaaaactctagggaaacagaatagccacattttctctacggcacataattgctattat

SEQ ID NO: 139264 - DNA, 482 bp, Homo sapiens
  misc_feature (1)...(482): n = A,T,C or G
ctgaattctctgggaaggacgagatgcctggtgtcataaaaagacccatagtcttttttaagtgtgaggcatgcgcacacaggcacgcayacacacacgcgcacacacacacacacacacattgcantgntgccctgtccttggcagacattcctgtggggtcatgttcgaaatatgcacttctgtggagtagcttgggttttcttggaagtctctttttctaaacttgtacctaagctgatggcctgtgcctgcttgggcatgaggggtcggagtggggatgggtcaagactgactcctgtgaagtagaggaaggcagtgatagccagacagggacgtgtgtttagggaagtcctctgtgttttcagttctgtttttgttttgtttttatgatgggagagatgagcaaatataaaggctgcttctaggagcaggagtgaggagaggttgcctatatgagagaaacgggatggtcaatactg

SEQ ID NO: 139265 - DNA, 482 bp, Homo sapiens
  misc_feature (1)...(482): n = A,T,C or G
ctgaattctctgggaaggacgagatgcctggtgtcataaaaagacccatagtcttttttaagtgtgaggcatgcgcacacaggcacgcacacacacacgcgcacacacrcacacacacacattgcantgntgccctgtccttggcagacattcctgtggggtcatgttcgaaatatgcacttctgtggagtagcttgggttttcttggaagtctctttttctaaacttgtacctaagctgatggcctgtgcctgcttgggcatgaggggtcggagtggggatgggtcaagactgactcctgtgaagtagaggaaggcagtgatagccagacagggacgtgtgtttagggaagtcctctgtgttttcagttctgtttttgttttgtttttatgatgggagagatgagcaaatataaaggctgcttctaggagcaggagtgaggagaggttgcctatatgagagaaacgggatggtcaatactg

SEQ ID NO: 139266 - DNA, 482 bp, Homo sapiens
  misc_feature (1)...(482): n = A,T,C or G
ctgaattctctgggaaggacgagatgcctggtgtcataaaaagacccatagtcttttttaagtgtgaggcatgcgcacacaggcacgcacacacacacgcgcacacacacacacacacacattgcantgntgccctgtccttggcagacattcctgtggggtcatgttcgaaatatgcacttctgtggagtagcttgggttttcttggaagtctctttttctaaacttgtacctaagctgatggcctgtgcctgcttgggcatgaggggtcggagtggggatgggtcaagactgactcctgtgaagtagaggaaggcagtgatagccagacagggacgtgtgtttagggaagtcctctgtgttttcagttctgttttygttttgtttttatgatgggagagatgagcaaatataaaggctgcttctaggagcaggagtgaggagaggttgcctatatgagagaaacgggatggtcaatactg

SEQ ID NO: 139267 - DNA, 437 bp, Homo sapiens
ggagagacagattcaaaccaataattatgacacatagatgggaggccttttatttttgttttgttttgagacagggtctccctctgtcacccaggctcgatcgcagtggcgcaatcataactcactgcagccttgaccttccaggcttaagtgatcctctcaccccagtctcccaatcagctgggaccatgggtgtctaccaccacacttggctaatttttttttttttttttttttagttttttgtagagatggggtctccctgtgttgctgagattggtctcaaactcctgggctcagggctcaagcaatcctcccgcctcagcctctgagtagctaggaagaatgcaggcttgcaccrctgcatccaactaatttttaaatatcttatagaaacagggtctcactctgttgcccaggcttgtcctgagctcctg

SEQ ID NO: 139268 - DNA, 576 bp, Homo sapiens
aaagtcctagctccccgcccaaccccaaagggcttacacattttgcagggcaggggagcctcaacactggcgctccactggggaaagttcttggcttccmccaggaaagaattcaagggtgaactagtggtagaagaaaacagctttattgaggcagcagtgttacagctccgtgactgttcccactgaggagagagtggagtctagcagctcaggggcagttctgcagtttcatttatatccacttttaattacatgcaaattaaggggcaggttattcagaaatttgtttttatttgagacacagtctcactctgtcgcccaggctggagtacagtggtacaatctcggctcactgcaacctccacctcccgggtttaagtgattctcctgcctcaacctccagaggtgctgggattacaggtgtgtgccatcatgcctggctaatttgtgtatttttagtatagatggggtttcatcatgctggccacgctggtctcgaactcctgacctcgtgatccgcctgcctcagcctcccaaagtgctgggattacaggtgtgagtcaccgcgcctgg

SEQ ID NO: 139269 - DNA, 410 bp, Homo sapiens
agcatggtcccatcagtcctaggcggatactccctctttgcttccctccatccccttcttcctgtaaatggatcaaaccaagagccacagggcactacccggtaactttgccatggagctgaaataagcccatttatacagggctgctgtggacggtggtggggcacgggagaaatgccacatctaagacagcatcttccctggcaaagctcttgcagctttctatactcattacagagacttcccagcagggggcatggagtgtcttaaagaagtctgcccttttctaatctgcaaaagtgcctcgtggcctaacatagccctgaggtctgragtcaccctcctgccccaacctggtcacactttggagacaatgctccactgtcaggtttcagcttcctcacgacagt

SEQ ID NO: 139270 - DNA, 546 bp, Homo sapiens
tctacctcctcacattgagcattccagtgccagccgagccaccacactcagcctcctcctctgctgcatcctgttttctcagtccaattctgtgtctgaggctgcagctcctccctcccccacaccctctcctstgcaccctcccctgccccagcccagcattgccctctgctctccacacacagccacacagccacaaacaccccttgacatgcttgagtgggagtctcagagctggtcctctcctagcctctgttgtgtgtgctcagaaatttcaaaagggacttcctgcctccctcggggggaaatgggctgggtcacaagaaatttgcatattgtaaagactgacctgcacaggaaccctggctcaggaaatacctgcctgggagctagacgccaagtggtaagaggaagaggctagaagttgttgccatgcccagatgcctgctcagcttctgcctagaactgactccataggatttttggaagaccatgatctggctggtggaaagacttcctaaaattaattaggcaaaggccaacatg

SEQ ID NO: 139271 - DNA, 382 bp, Homo sapiens
gaattcacattcacatcctcaggaggggcagaggctgcagccatcctgtgccctccccacccagtctggatgcatccctcccacccgcagcagggactccaggttgcaggggtggccttgggcattgcttgcctggtgcatgaggaaggctgtccagttccaaatgcagcctggtccacacacacctgtcctcaccaccacccgtgtgcattcagtgatcatacaatcccttcyagaaatccccagaggcagactgcagatgtcagaacccattgactttccccttcgctccttaaacccatcacacactcatcccagttagctttgagtttaatctattgttactcaaccagacacaaggtgcacagggtgttatggactg

SEQ ID NO: 139272 - DNA, 465 bp, Homo sapiens
aaatccccagaggcagactgcagatgtcagaacccattgactttccccttcgctccttaaacccatcacacactcatcccagttagctttgagtttaatctattgttactcaaccagacacaaggtgcacagggtgttatggactggatatttatgtcccctcaccccsaattccatatgctgatgccctaacacccagtgtaatggtgtttgaaggtaggggtattgaaaggtaattgggcttaggtgaggtcatgagagtgggggccctataatgggattagtgtccttataaaagaggaagaggctagattcctctccctctccccctccctcccttcctctctttctcttcctctctctctctctctctctctctctctctctcttagccatgtgaggacagaaggagaaggtgtacttctgtaaatgaggaagctcacaccaggagccaaatctgctgta

SEQ ID NO: 139273 - DNA, 411 bp, Homo sapiens
ccttaaacccatcacacactcatcccagttagctttgagtttaatctattgttactcaaccagacacaaggtgcacagggtgttatggactggatatttatgtcccctcacccccaattccatatgctgatgccctaacacccagtgtaatggtgtttgaaggtaggggtattgaaaggtaattgggcttasgtgaggtcatgagagtgggggccctataatgggattagtgtccttataaaagaggaagaggctagattcctctccctctccccctccctcccttcctctctttctcttcctctctctctctctctctctctctctctctctcttagccatgtgaggacagaaggagaaggtgtacttctgtaaatgaggaagctcacaccaggagccaaatctgctgta

SEQ ID NO: 139274 - DNA, 445 bp, Homo sapiens
aggcagactgcagatgtcagaacccattgactttccccttcgctccttaaacccatcacacactcatcccagttagctttgagtttaatctattgttactcaaccagacacaaggtgcacagggtgttatggactggatatttatgtcccctcacccccaattccatatgctgatgccctaacacccagtgtaatggtgtttgaaggtaggggtattgaaaggtaattgggcttaggtgaggtcatgagagtgggggccctataatgggattagtgtccttataaaagaggaagaggctagattcctctccctctccccctccctcccttcctctctttmtcttcctctctctctctctctctctctctctctctctcttagccatgtgaggacagaaggagaaggtgtacttctgtaaatgaggaagctcacaccaggagccaa

SEQ ID NO: 139275 - DNA, 552 bp, Homo sapiens
gcatttggctccattgtatagctcttacagaactttggtcaaaacaggcatcagcaaaagctgttttagcccagctgcctcagtttacttacaaagaaatggagatcctgggagacttgcaaggccacaagactagtagtcaggttcatccccacaaagggtgagtgaggacaggctccggtattgccatgctytcccaccagacaccctgtgccctgagcctgtctccagagatcacctgtcctaaagctcttttctctttgtgtgtctctactttaatctacaaaaggtgattgaatggagattaaattcctttccctcacatttccaaccccccacctccccacaagctgaccagagcaaaccctgaactctagccttggagtcctcaccatgctgcatcctgggacctcccctttcacctcctggactttgcttcttctcttctcagtgcctggagtcagcctcagagcagggctcccaatctaagcctgcacaggaatatatcagtcttcctatcgatggcttccaggttggatgagctgcttagaa

SEQ ID NO: 139276 - DNA, 485 bp, Homo sapiens
attgatgaagatggctccactaaaccacagatttttcaatgtagatgaacaactttctattggaagcagatgccatctaggactttcatagctagaggagaagtcaatgcctgtcttcaaagcttcaaaggacaggctgactctcttgttaggggctaatgccagttgaagccagtgctgattggccattctgaaaattttagggcccttaggaattaggctaaatctactrttgaggtttactactcagaaaaaaaagactatcttcaaatattactactcattgacagtgcatctactcaagagctcagatggagatatagaaggagattaatgttttcactgcatccattctgcagcccatggatcaaggagtaatttctactttcaacttctattatttaagaaatacatttctaaggccatagctgccatagataatgatttctcttatggatctggccaaagttcactgaaaatatttt

SEQ ID NO: 139277 - DNA, 532 bp, Homo sapiens
cagctgtgcagctgggacgcataccaccatacccagctagtgtttgttgttgttgttgttgttgtttctttccttttctttttttttttttttgagatggagcttccctcttgttgcccaggctggagggctggagtgcaatggcatgatctcagctyactgcagccttcacctcctaggttcaggtgattctctcacctcaacctcctgagtagctgagattacaggcgcctgccaccatgtctggctaattttttgtatttttagtagaaacggggtttcaccatgtttgccaggctggtcttgaactatacttttttgtagagacaggatctccttgcctcaagcaatcctcccaccttaacttctcaatgtggtaggattataggcatgagccacggtacctggcctaagcaaggatattaaattgatctaaaggctaaactttcccaaattaattgcaaaacataggaaatggagcacctattcatttcttatcaaatctgtatttgtttgttttcaattatctgtg

SEQ ID NO: 139278 - DNA, 532 bp, Homo sapiens
cagctgtgcagctgggacgcataccaccatacccagctagtgtttgttgttgttgttgttgttgtttctttccttttctttttttttttttttgagatggagcttccctcttgttgcccaggctggagggctggagtgcaatggcatgatctcagctcactgcagccttcacctcctaggttcaggtgattctctcacctcaacctcctgagtagctgagattacaggcgcctgccaccatgtctggctaattttttgtatttttagtagaaacggggtttcaccatgtttgccaggctggtcttgaactatacttttttgtagagacaggatctccttgcctcaagcaatcctcccaccttaamttctcaatgtggtaggattataggcatgagccacggtacctggcctaagcaaggatattaaattgatctaaaggctaaactttcccaaattaattgcaaaacataggaaatggagcacctattcatttcttatcaaatctgtatttgtttgttttcaattatctgtg

SEQ ID NO: 139279 - DNA, 545 bp, Homo sapiens
tcaagtaaactaatcagttacaaacaagctctagttttcatgaaaaaggatgactcagaggatggaccaaggtagcagcttctgaaattgcyttcaaaggtccctgaatcctgggatccatgtcctggtataatcccctctccttgagtgtaggctgggtctgatgaccagtttctaacaaatagcatatgaatcgtattattatttccaagattaggttataaaatactgtgttttccatcttgttcctcttttgccctcttgcttgtttactgtgatcattgtgagttgctgtatgttgtgagcttctcatgcctagagatgcccctggcctggagttcaacaggaactgagaccctcattccaacaacccacaaggaaccaaatctttgtggattttttcaagcaactgcgcgagtgaggttgagagcagactcccccctagttgagccttaagatgatgatggccttgattgaagcctcaggagaagctcagaactagagaccagaacccagttacactatgctaggccattcctgaattc

SEQ ID NO: 139280 - DNA, 378 bp, Homo sapiens
gggggacacagatgtgcagtaggcagtcaacatcgttcaataccgtcagtaactgttttggtgtggggaagtggagggagcgattgtcagtattctcaggcttactgaactgggtgattagatattttcatcaggataagaaacaggagaataaacagctttgggcagaagatcagttttgatgagaatgaggtagagctatgtaaagatgtcaaayagacatctaaataagtagttaaacacaagagtttgaagcttagaaaagggtttaaaaatatatatttggaagttgcacgcatatggaattatacagcacaggtgcagggtgaggtcattgttggatgcgataacccaagaaagtatgccgcgtgaggagag

SEQ ID NO: 139281 - DNA, 603 bp, Homo sapiens
aactaacatttgccctcaaggagctcacagtccagtggaaagataggccagtaaccagttacaaaacaaggagatgaawattcgaatagaaacgtgtactaaggactttcaggggaaaaaaggaaggagcattttcctgctttatgcagagtcatggagaactttatgctttatgcaggttttaacctgagtaagaaaccctgggaggatgctcctggtaggtgagagggatgtgcaaactaccttggcatgaaggaggtgggatattcccagaccatgtgttgcatgaaccagcagaggaggggaaggccacaatagtcaatatactcttggaaataccttagaggactgacatatcatttcttactgtatccaacagatattgttttcattactgaagcaagattgtgtttcttcatctaagcagcagatgaagaattggcttgagttttgaagtcatgctcaacaaatcatgttcatcttcaaactctaggctgagtggtaacatgcgtacactagggaaggagtgaaggctcataagggtaatgactcctagctctcagcccaccacatctaagggaagagagcgtgttcatctagcac

SEQ ID NO: 139282 - DNA, 603 bp, Homo sapiens
aactaacatttgccctcaaggagctcacagtccagtggaaagataggccagtaaccagttacaaaacaaggagatgaaaattcgaatagaaacgtgtactaaggactttcaggggaaaaaaggaaggagcattttcctgctttatgcagagtcatggagaactttatgctttatgcaggttttaacctgagtaagaaaccctgggaggatgctcctggtaggtgagagggatgtgcaaactaycttggcatgaaggaggtgggatattcccagaccatgtgttgcatgaaccagcagaggaggggaaggccacaatagtcaatatactcttggaaataccttagaggactgacatatcatttcttactgtatccaacagatattgttttcattactgaagcaagattgtgtttcttcatctaagcagcagatgaagaattggcttgagttttgaagtcatgctcaacaaatcatgttcatcttcaaactctaggctgagtggtaacatgcgtacactagggaaggagtgaaggctcataagggtaatgactcctagctctcagcccaccacatctaagggaagagagcgtgttcatctagcac

SEQ ID NO: 139283 - DNA, 603 bp, Homo sapiens
aactaacatttgccctcaaggagctcacagtccagtggaaagataggccagtaaccagttacaaaacaaggagatgaaaattcgaatagaaacgtgtactaaggactttcaggggaaaaaaggaaggagcattttcctgctttatgcagagtcatggagaactttatgctttatgcaggttttaacctgagtaagaaaccctgggaggatgctcctggtaggtgagagggatgtgcaaactaccttggcatgaaggagktgggatattcccagaccatgtgttgcatgaaccagcagaggaggggaaggccacaatagtcaatatactcttggaaataccttagaggactgacatatcatttcttactgtatccaacagatattgttttcattactgaagcaagattgtgtttcttcatctaagcagcagatgaagaattggcttgagttttgaagtcatgctcaacaaatcatgttcatcttcaaactctaggctgagtggtaacatgcgtacactagggaaggagtgaaggctcataagggtaatgactcctagctctcagcccaccacatctaagggaagagagcgtgttcatctagcac

SEQ ID NO: 139284 - DNA, 603 bp, Homo sapiens
aactaacatttgccctcaaggagctcacagtccagtggaaagataggccagtaaccagttacaaaacaaggagatgaaaattcgaatagaaacgtgtactaaggactttcaggggaaaaaaggaaggagcattttcctgctttatgcagagtcatggagaactttatgctttatgcaggttttaacctgagtaagaaaccctgggaggatgctcctggtaggtgagagggatgtgcaaactaccttggcatgaaggaggtgggatattcccagaccatgtgttgcatgaaccagcagaggaggggaaggccacaatagtcaatatactcttggaaataccttagaggactgacatatcatttcttactgtatccaacagatattgttttcattactgaagcaagattgtgtttcttcatctaagcagcagatgaagaattggcttgagttttgaagtcatgctcaacaaatcatgttcatcttcaaactctaggctgagtggtaacatgcgtacactagggaaggagtgaaggctyataagggtaatgactcctagctctcagcccaccacatctaagggaagagagcgtgttcatctagcac

SEQ ID NO: 139285 - DNA, 440 bp, Homo sapiens
ttcctgtttctctcattccaacagtctccctgcatttgcctatgatgtgatcacagatggtggacactagggtttctatttggcctgagggagggtagagaagggggcacagggtggggacgtgggaagttgaccaaatgtggcatcgtaatgcatctcgttgccgtgatgggtcgtttggagactctyttaagtgctgggaatctgggagaggatctgcaggccactctgttgggagaagaaagggtggattgaggagtcatgagaatggaggcagggaaaccattcagagactcaaaaaaccaaggacagggatctcagctaagagggcaatccctgggaatagaagggaacgcccacttccacagatatttgggtggtaaatctgacaaggcttgagggctagcatggattagaggtattaatataagagaaaaaag

SEQ ID NO: 139286 - DNA, 443 bp, Homo sapiens
attcctgtttctctcattccaacagtctccctgcatttgcctatgatgtgatcacagatggtggacactagggtttctatttggcctgagggagggtagagaagggggcacagggtggggacgtgggaagttgaccaaatgtggcatcgtaatgcatctcgttgccgtgatgggtcgtttggagactctcttaagtgctgggaatctgggagaggatctgcaggccactctgttgggagaagaaagggtggattgaggagtcatgagaatggaggcagggaaaccattcagagactcaaaaaaccaaggacagggatctcagctaagagggcaatccctgggaatagaagggaacrcccacttccacagatatttgggtggtaaatctgacaaggcttgagggctagcatggattagaggtattaatataagagaaaaaagaa

SEQ ID NO: 139287 - DNA, 518 bp, Homo sapiens
tgcacatgcaggcacccacacactcatgctccctcattcacacctgcacatctgtgaacatgggtgctccatggggaccatagggcaatgagcacaagccactcaaactcggcaaattcagtaccagaccctccttttctgccgctggtaccttgcagtgagaatgcccagttcaggaggtaaaaagtgttcaacctttgcagaaggtttacaggcaaagcaaggctatcgattgtcccatgatgagaaaatgaagaaggatgtggcgcattttgygatatcaatctgacctattagcaacagtggcaggtcactccatcctccccaaatcttcttcatgttctaagcaccatgggcaaaaaggaagtagagcttgggtgaaagattccttttttaggaagagcaatgtgtgtgtaacagagagaggagagagagacagacagagcaagaaaaagaaagaacaggagatagaaaaagagctagagagagacacagagagaagcatttctaatggggta

SEQ ID NO: 139288 - DNA, 616 bp, Homo sapiens
aggaggtaagaaaagatctcaaatgatggggtatggcaaatgttcagaaggatggcagagggctgcacttcaagggccatgctaggaaatagaataccaccagtgcatgctggccatgcagttgagaaagcagagaccacaggacaaaaacagcggcagaggaaataggaactggtagctttagagaatttcagtagccaaccgaataatcaaatctactttggactgttccttaggaaagaagggttcattaggtgataaactccccatgattctcctgggagaagctccatgcactcctcatctcaaataacrgggatagaagggggtggcatccaggttacatataagctcagtgcttattcattagatattaggtgccagtgttccctgaattatccttagatgacatgactgtgtcaaaccaaactaaagtgctgcctgaaggaataattgctagaaaaataaaaagtggcttggaagaaatctagattttaggatgtttattcaacccttctcctgtgtagagtgagaagaaggaacactcctctaaacagtcacattagaaagattaaggagcagtgctcatcagagccagataaagacaagagggtac

SEQ ID NO: 139289 - DNA, 616 bp, Homo sapiens
aggaggtaagaaaagatctcaaatgatggggtatggcaaatgttcagaaggatggcagagggctgcacttcaagggccatgctaggaaatagaataccaccagtgcatgctggccatgcagttgagaaagcagagaccacaggacaaaaacagcggcagaggaaataggaactggtagctttagagaatttcagtagccaaccgaataatcaaatctactttggactgttccttaggaaagaagggttcattaggtgataaactccccatgattctcctgggagaagctccatgcactcctcatctcaaataacagggatagaagggggtggcatccaggttacatataagctcagtgcttattcattagatattaggtgccagtgttccctgaattatccttagatgacatgactgtgtcaaaccaaactaaagtgctgcctgaaggaataattgctagaaaaataaaaagtggcttggaagaaatctagattttaggatgtttattcaacccttctcctgtgtagagtgagmagaaggaacactcctctaaacagtcacattagaaagattaaggagcagtgctcatcagagccagataaagacaagagggtac

SEQ ID NO: 139290 - DNA, 394 bp, Homo sapiens
agccttaaaagttccacttgactgtagataaaaaggcaaacatatgcagacaaccaaagttaagatgaataaatggaacaaaagcaataataaaatatataaccagaaaaaaagcatttataaatataacatcagacccaaggcacagattttaaaaggtcactaaaaggaagtmaaatgagtgagaagaagcaaatagccaggtgtgtgtgtatgtgcacgtgtgtgtgtgtgtgtgtgtgtgtgtgtgtatttagacaaggtcttgctctgtcacccaggttggagtgtagtagtcctgtcatacctcactgcagcctcaacatcctgggttcgagcaatcctccaccttagcctcctgagtatctggtactacaggcactcaccaccatgc

SEQ ID NO: 139291 - DNA, 596 bp, Homo sapiens
gggggaggcaggtttggccacccagttcccagctcaacttttccctttggcttaatgagtttggggagttttttcacaacacttacatgcagcctatatccacctgccgctcttggctgcagtctctgttccccaaattctctaagccaatatcttgtgagggcattattcagcagcagcttcaggcccactgagccagatcctgtattacccatataatccctgcatctcggcagctgaatgccatggctaacctgaccattctggccatgatggactggaacagaaatcagatatttatcctatcacaagcagctatgggtggagaaaactgaaataaagttagagtagcaaccaacaatcaggcagaactttgtgggtgcttggggagctgattctgctcttgctgcccctgttctaggtttgtctacttggctctgcctcttggcacctccartgaggtgcttttttctggattctgttctttcttctggcttctaactctctgcctcgtcactgcatgtgtgccctctcctggctttcactcttgctcagcaccttctcagtccagggatggcaggttgtagccacctgct

SEQ ID NO: 139292 - DNA, 536 bp, Homo sapiens
tttgcctttctggggagctatttgctacaagagttatactagagctgatcctctccttcataagtttctatttcatggcatatttttaacaactagaatgttcaaaataagggagacggataacacggtctcaaagatctcttccagctctccatttaatggttctgtattagactgcacagttattagctagtttgatggtggagaagagaaraagaaatgcatgtagtaagtttgcttcctctttacgactcaagaagaaattctattatccccactttagatattaggtaactgaagcttgcccgagatctcaaggccaatgaatggcagaatcatattctaaatataggttttcaaactcctgtaccatttcctctataagaacattctttgaaactttatattcaataattaattacttaatatgtaaatatatgataaacataatataatgatccttttactacttgttataaactggataactagagtttagcacagaaatgggttttattattggtttttccctttta

SEQ ID NO: 139293 - DNA, 536 bp, Homo sapiens
tttgcctttctggggagctatttgctacaagagttatactagagctgatcctctccttcataagtttctatttcatggcatatttttaacaactagaatgttcaaaataagggagacggataacacggtctcaaagatctcttccagctctccatttaatggttctgtattagactgcacagttattagctagtttgatggtggagaagagaagaagaaatgcatgtagtaagtttgcttcctctttacgactcaagaagaaattctatyatccccactttagatattaggtaactgaagcttgcccgagatctcaaggccaatgaatggcagaatcatattctaaatataggttttcaaactcctgtaccatttcctctataagaacattctttgaaactttatattcaataattaattacttaatatgtaaatatatgataaacataatataatgatccttttactacttgttataaactggataactagagtttagcacagaaatgggttttattattggtttttccctttta

SEQ ID NO: 139294 - DNA, 536 bp, Homo sapiens
tttgcctttctggggagctatttgctacaagagttatactagagctgatcctctccttcataagtttctatttcatggcatatttttaacaactagaatgttcaaaataagggagacggataacacggtctcaaagatctcttccagctctccatttaatggttctgtattagactgcacagttattagctagtttgatggtggagaagagaagaagaaatgcatgtagtaagtttgcttcctctttacgactcaagaagaaattctattatccccactttagatrttaggtaactgaagcttgcccgagatctcaaggccaatgaatggcagaatcatattctaaatataggttttcaaactcctgtaccatttcctctataagaacattctttgaaactttatattcaataattaattacttaatatgtaaatatatgataaacataatataatgatccttttactacttgttataaactggataactagagtttagcacagaaatgggttttattattggtttttccctttta

SEQ ID NO: 139295 - DNA, 594 bp, Homo sapiens
cctgcttctactgggggagacagagaagtcaataaataattttaayattatgatcaagtgctatagctgcattttccttaatgaaatcttgcttttaaagagaacttggtttacttattccattgtaaacttttaagcaggctgggcgcagtggctcacgcctgtaatcccagcacgtcgggaggccgaagcaggtggattgcttgaggtcaggagttcaagaccagcctggccaacatggtaaaaccctgtctctactaaaaacacaaaaatcagctgggcatggtggtgcatgcctgtaatcccagatactcaggaggccaaggcacgagaatcacttgaacctgggaggcaaatgttgtagtgagccaagatagtgccactgcactccagcctgggcaacaaagtaagattttttctcaaaaaaaaaaaaaaaaaaaagaaagaaagaaagagagaaagataacctttaaaccaataagtaatgaaggtcctaaagtatttttgtttgtataaatttaagggtacacgggcagttttgttacatagatatgacgcacaatggtgaagtctgggttttaatgtaaccatcac

SEQ ID NO: 139296 - DNA, 563 bp, Homo sapiens
acaaaatactagcaaacagaatccaacagtatatcaagaagataaaacacaatgaccagatgcattttattccaggaatgcaaggatggttcaacatatggaaatcaataaatgtgattcatcacgtaaactgacttaaggacaaaaatcttataatcttctcaacagatgcagaaaaagcatttgataaaattcagcatctcttcatgataaaaactctcagtaaactaagcatagaaggaacatacttcaaattaaaaaggccgtatataacaaacccacagccaacatcatactgaatggagaaaagttgaaagcattccacctacgaactagaacaagacaaagwtgcccacttttgccactcctattcaacataatactggaagtcctagacagaacaatcaggcaagagaaagaaatgaaaggcatccaaattgaaaaattggaagtcaaattatctctgttcactgacagtatgatcttataactagaaaaccgtaaagtaagcttgtctatcccatgacccatgggccatatgtggcccaggacagctttgaatg

SEQ ID NO: 139297 - DNA, 594 bp, Homo sapiens
cctgcttctactgggggagacagagaagtcaataaataattttaatattatgatcaagtgctatagctgcattttccttaatgaaatcttgcttttaaagagaacttggtttacttattccattgtaaacttttaagcaggctgggcgcagtggctcacgcctgtaatcccagcacgtcgggaggccgaagcaggtggattgcttgaggtcaggagttcaagaccagcctggccaacatggtaaaaccctgtctctactaaaaacacaaaaatcagctgggcrtggtggtgcatgcctgtaatcccagatactcaggaggccaaggcacgagaatcacttgaacctgggaggcaaatgttgtagtgagccaagatagtgccactgcactccagcctgggcaacaaagtaagattttttctcaaaaaaaaaaaaaaaaaaaagaaagaaagaaagagagaaagataacctttaaaccaataagtaatgaaggtcctaaagtatttttgtttgtataaatttaagggtacacgggcagttttgttacatagatatgacgcacaatggtgaagtctgggttttaatgtaaccatcac

SEQ ID NO: 139298 - DNA, 348 bp, Homo sapiens
gaattcaaacaactcaacaacaacaaaaaataaccccactaaaaagtgggtaaaggayatgaatagtcattttcaaaagaagacatacaaatgaccaataagcatatgaaaaatgctcaacatcacgagtcatcacagcaatgcaaattagaaccacaatgaaatatcatcttgaacaagtgagtatggctattactaaaatatcaaaaaataacttgttgaggacaaaaggaaatttttgtatattgttggtaggaatgtaaattggtacaacttctatgaaaaacagtatggagagttttcaaaaaactataaagaaaattaccattcaatccagcaatcccacta

SEQ ID NO: 139299 - DNA, 588 bp, Homo sapiens
tcgcttgcttcgttgtcttcaactgccttgacccattatcccattgtcatcatcaacctatcttttgttaaagtcaactctcctccactcaatacctgcaccacatagatgaacctggccagagagcaagccccaaatcacgcaaactggtctcacattcaatgtatgagcacaaaactcaatgtgccccttagtaatcacgctacattttattccttccctttccaagatgattgcttcatgtcttctgtctcttctaacatccagcactccctcctttctcatgctcagttgatgattgcttcccatttcactgaagaaatagaaacaatcagagagaatttccctaatctcctgccagctgctactcatctagctctgtctatgcccttatgccatgccctctttcctactaagggtaaacttgcctattcctaaataagcctaagtgagtgcgtgatcccactcccttttacytactcagagacatgtgtctagaaattatcccctctctatgcatcatccaatgctctcactcttctgggggtcattcctatgttcttataaacatattattatttctccatg

SEQ ID NO: 139300 - DNA, 592 bp, Homo sapiens
ggatcggggcctgctgatgggtgcaccagttcctgaaggaaagctgtctgccaggagcactgcactggtgtctccattccctgccttgcctgtctcccaggtgcatagacaacacccacactgcccagacctgtaacttccctgtctgtttaaacaagttgatgtttcttggttgaattttaacccaaactccttctcagccttgaaaacttcctacaggtgcaaaccctcctagtatcacccgcaggctcctgtacctgaggaaaatgagctccccttctcaaattctgattttaggcagaaggcaaatccctgggcatgggtttacaagcccttccccatccatctgcagtttagaatttcagttttacttcaactccactcacctgacatttcaattttccagatgagtaacagctgcctgacttcaccgtgtgcttttatgcctctatctttgctgctgttttcttcccttgtgtcaagaatacagctcctttaagttgttatccatttgcaaaattttgatgcatccgyctatagccaatgttctcagatctctcccagatccgaggagcaacccttcccatctgat

SEQ ID NO: 139301 - DNA, 515 bp, Homo sapiens
tatccaaatattcaacagcatgtgtgatctgtcacccccgctactcaccccagtgtgaaaawgtgcctatggttgagaaagaataagcagcctcgtatgagagaggaagcacagggcagcttcacagggtgtcacgagtcagccaaggaaattgttctgaaccctgtaagacacatgaccccctccactctcctgaaataaaattcatagagaatagaatctgatcacacaggtaattttgaaaaatatcaattaatgccccaactgaaatataaaaggagaaatcagagggaaaaaaatgcttataacaaaagatgtattttgaggatttgggaagtttataaatcacagattaggggttccagaaggcacaaagggaaggtttgagagaaaaaagttagtggaaaggaagcagtgagctgtatagtaatgaggataaacaggagaatgactattggaggggcttttaatttagatggcaagaataacaagtggggatatctggctattagatt

SEQ ID NO: 139302 - DNA, 576 bp, Homo sapiens
ctccagtgttctatggtcagaagaaagaaacgtatccaaatattcaacagcatgtgtgatctgtcacccccgctactcaccccagtgtgaaaaagtgcctatggttgagaaagaataagcagcctcgtatgagagaggaagcacagggcagcttcacagggtgycacgagtcagccaaggaaattgttctgaaccctgtaagacacatgaccccctccactctcctgaaataaaattcatagagaatagaatctgatcacacaggtaattttgaaaaatatcaattaatgccccaactgaaatataaaaggagaaatcagagggaaaaaaatgcttataacaaaagatgtattttgaggatttgggaagtttataaatcacagattaggggttccagaaggcacaaagggaaggtttgagagaaaaaagttagtggaaaggaagcagtgagctgtatagtaatgaggataaacaggagaatgactattggaggggcttttaatttagatggcaagaataacaagtggggatatctggctattagattatcattaacatatgtggtctcaggaattc

SEQ ID NO: 139303 - DNA, 383 bp, Homo sapiens
tgagcaatgttgagagatgctgtaagctctcctttcagaccacagctgctgtcagtggtacattttctaggttscacattcgtctcccatgacacaacccatgtttgtgcaagcataggtctaggaccacctaagctgccctgcagaactggtgctccagaaaccaatgcaaccaagtttgcactccggctactgcttttgctgtgagtaatcgtttttgactctaactcaggaggtcttctatcttctgtcagcatccctgacattgtggcaagctgacttgttagcttgcagcagagtaaaatctcagacccctcacagttcttgtaagctacctttcaattcgttgtttaatttatacttttaacacacatatattaatc

SEQ ID NO: 139304 - DNA, 330 bp, Homo sapiens
aaaaatacatccctcaaaaaggcaccaggccccaataaatcatgatatataaattgttaaagaccaaagaaaaagctgaaaacttcctagtttgcatctagcataaacacaatgcaaaaattggacaaaaataagatgtaaaagaaaactataaaccaataaaacattttaatayacttacaaaaattataagcaaagtccagcattgcattaaaaggataccatttcatggtcttatttaaatatatttctacttcaaggactctactaaaaacatgaaactttagttttaataaatgagatgattggagaagacaaaagaaaatatct

SEQ ID NO: 139305 - DNA, 437 bp, Homo sapiens
ctcaaaaagatgcttgacatcattaaccatcaggaaaatacaaattgaaaccacaatgagatattaattcatattcactggaatgaccgtaattgaaaagacagataatgtggatgtggagaagctggaaccctgcttcattgctgatgggaatgtaagatagtgtagctgctttggaaaacagtctgcattatagaacaaatgtccttctctgtatttttacycccacttccctatctagcctggagtcctgcagtggctctgactgtcctcctgcagtattatccaataatttacttaagacctccactgatacacaggcatggtggcagtagaaatccagtctatcagcttgtctctccaaatctgatcatgaccatccttcttccttgtgaggagtgacttgtcttgtatcctatagatcaggggtccccaag

SEQ ID NO: 139306 - DNA, 523 bp, Homo sapiens
tttttcctttccccaagcccctggcaaccaccatccctaccctgaatctatgaatttgactattttatatccctcattaaaagtagaatcatgttggatttatctttccatgtcttgttttaatgtcctcaaagttcatccatgttgtcacctattgtaaaatgttctttttttaaagctgaatagtattccatggtttgcatacatcacattttctttacctgcattcatctgtcaagacaatgaacatttaggctgtttctacatcttgggtattggggaaaatgctgcaatgaacacagaaatgcagatatctccttgagatcctgattttagttcttctggatgaatacccagaagtaggattgatgggttgtactgtagctcagtaaatgtttttagatttgcaaatgaaatatgtgtgtgtgtatttgtgtttgtatacasaactttaaaaaagtgacctgcaaataattctccaacttgtttttattaatcctttaaaatacatgccaggtaaaaa

SEQ ID NO: 139307 - DNA, 567 bp, Homo sapiens
cgtgtgtataagttgaaatcagaccctgtaatggacatcttttgaatggtatgatagtatggttttaaaagagttgtgatggtcagaaaataattaatgtagaattcagagggtgagaggagggagaataaaaattaaagaatcttggcctacttaattaaacccctatacttgggggatgaggtaaagaagattataggacactaagagacttccccaagggctgaaagtcctttctcccttgtgagggtgccacagctagatctgggagagtcacagccttgagaaggtttggaacaactgattggattagtgaatgggagggrcattttgtcatgtagtattcatcttcaatgaaactaaaacgttgaaagtatttccctaccataaaaaaatcacaaaatgatgaattccagctctgaattccttaacataagaaactctctaacagactttattgtgagggtttactttccatccctgactgggggctggggtcctggatactggtggccggggcagccctgctcatcccctacaccattcaggaagttcaaaggcaactca

SEQ ID NO: 139308 - DNA, 567 bp, Homo sapiens
cgtgtgtataagttgaaatcagaccctgtaatggacatcttttgaatggtatgatagtatggttttaaaagagttgtgatggtcagaaaataattaatgtagaattcagagggtgagaggagggagaataaaaattaaagaatcttggcctacttaattaaacccctatacttgggggatgaggtaaagaagattataggacactaagagacttccccaagggctgaaagtcctttctcccttgtgagggtgccacagctagatctgggagagtcacagccttgagaaggtttggaacaactgattggattagtgaatgggaggggcattttgtcatgtagtattcatcttcaatgaaactaaaacgttgaaagtatttccctaccataaaaaaatcacaaaatgatgaattccagctctgaattccttaacataagaaactctctaacagactttattgtgagggtttactttccatccctgaytgggggctggggtcctggatactggtggccggggcagccctgctcatcccctacaccattcaggaagttcaaaggcaactca

SEQ ID NO: 139309 - DNA, 411 bp, Homo sapiens
gaattcacttgtttaaacaaagcatctcagttttataatctcaagaagtttaaagcatgagatttttagaaacacatgaaaatgataattaaaggaacctaactagggaargttaactaatgcttctctctttttgatgattgtgaaaactcagtaattccctgatccacgatggatacggaatacaaatacttacagtcacatccgtgcctggtgcaaacacacaagttcatacctcagcggacacacacacatgcgtgtgctcatgtacaacatgacttacctggacatggctgcagcaaactcctcagagttcttggttttcttcagcaaggctttgccctcagggttgaagccatacacctctttcagggtgcactggctggtcttcaggatgaagctgcagagctg

SEQ ID NO: 139310 - DNA, 411 bp, Homo sapiens
aaagcatctcagttttataatctcaagaagtttaaagcatgagatttttagaaacacatgaaaatgataattaaaggaacctaactagggaaggktaactaatgcttctctctttttgatgattgtgaaaactcagtaattccctgatccacgatggatacggaatacaaatacttacagtcacatccgtgcctggtgcaaacacacaagttcatacctcagcggacacacacacatgcgtgtgctcatgtacaacatgacttacctggacatggctgcagcaaactcctcagagttcttggttttcttcagcaaggctttgccctcagggttgaagccatacacctctttcagggtgcactggctggtcttcaggatgaagctgcagagctggggaacctccagctcaac

SEQ ID NO: 139311 - DNA, 411 bp, Homo sapiens
gaattcacttgtttaaacaaagcatctcagttttataatctcaagaagtttaaagcatgagatttttagaaacacatgaaaatgataattaaaggaacctaactagggaaggttaactaatgcttctctctttttgatgattgtgaaaactcagtaattccctgatccacgatggatacggaatacaaatacttacagtcacatccgtgcctggtgcaaacacacaagttcatacctcagcggacacacacacatgcgtgtgctcatgtacaacatgacttacctggacatggctgcagcaaactcctcagagttcttggttttcttcagcaaggctttgccctcagggttgaagccatacacctctttcaggrtgcactggctggtcttcaggatgaagctgcagagctg

SEQ ID NO: 139312 - DNA, 588 bp, Homo sapiens
agattggattttcagaatactgtatagcttgccaaaagtaggtacttcaattgtgtgtgagatgtggggaagctggaattctrgtatgtgaaggtcaggaacttgaaaatcattaaggttgagagttgggattatgaattctggaattgcgatttctggtaaacggaagtctggcagggtgattctcgctagaggaatgtcctccaccttcagatccctgagatatatatctggaacgggccactgcagctcactgttcagcatctggtcaatggttctgatgatctttactttcatttctacaaagtcaattgtaaaggaaggaatgtggaaggtgttaaggatggtaaattctggtgtggaaaacctggatgggatttttatattttttaagtctttgaagtttatctgaactgatggaatcctcaaatctgttagggggactataaaatcaggtgtctggaaggtagctttctgaagagcctgaagactgacttcaaaggcaggcatggtcccaaggatggtcttgatttcaggaacagtgaacccttgctctaccaatgctttcatacgtttagcccaatcttg

SEQ ID NO: 139313 - DNA, 608 bp, Homo sapiens
ttattttaacattaaaaaaattggagaggatgtctgggaattgactctaagggcacaaggccaagagcggactaacaattttgagaatcatttatcaatatgagtttacttaccaaggattccgaatttgatgtattggcttgagcagctgcaaatggttttaattttttgtttacttggtgacgaccttcttctcaatgtcactacattaaatgaagtcgaagggtctgtcaggaaatccttggtataatgcattgaaaggtatccagcaatttggggagatagtaargctgaagttcatttatcatgaatggctcactcactcatcctcctttgtctcccaagaaaacctagaagacattctctaattaagtaatttagaaataccttggttgaggcgggtaccagcatctgtgaaaagtgtcatagtgtctgttctctgtagagcaggatgctggtggtggtggccacaagagacacaaggatgatgattctattggaatgattagatctcaggacggtatcagcctaggggctgaacttcaccaccaaaaagaaaagagggcataattattgttgagtggtagccaggatgttctgagtagtag

SEQ ID NO: 139314 - DNA, 572 bp, Homo sapiens
cctggggctacagaagagtaggatgatgccatccaggcaagactacaaaggctcaaatcccccagaaacaaaggtttgcatcccctatcatgtaaagagataagaccagctaaggtgctggatgaaaggaaagaagccatgaaacaaatgcatgataagaaagagaatgaaaacatagtaactatggacttgtaactagttgaagaagcaagagctgtatcatgtccccatattttcttccttgctttttgtaaatgtatttataaattmtacctaatttctttgcccactccagttccactactatttttgtctgggatgttttgatagtggctaatttcacattttagtccacaagttatagaatgtcaaaacaggattacaataaaaccagaaaagaaatggatatcactcagagaggccagacttacagtcaaatgaattaatttaggatactttgggttgtctcttttgaggatattgtgatcatgtattcattttcattttaaatgatagttgtattgcatcaacaaatagcattttacatattttaaaggtttgagtatggaata

SEQ ID NO: 139315 - DNA, 572 bp, Homo sapiens
cctggggctacagaagagtaggatgatgccatccaggcaagactacaaaggctcaaatcccccagaaacaaaggtttgcatcccctatcatgtaaagagataagaccagctaaggtgctggatgaaaggaaagaagccatgaaacaaatgcatgataagaaagagaatgaaaacatagtaactatggacttgtaactagttgaagaagcaagagctgtatcatgtccccatattttcttccttgctttttgtaaatgtatttataaattatacctaatttctttgcccactccagttccactactatttttgtctgggatgttttgatagtggctaatttcacattttagtccacaagttatagaatgtcaaaacaggattacaataaaaccagaaaagaaatggatatcactcagagaggccagacttacagtcaaatgaattaatttaggakactttgggttgtctcttttgaggatattgtgatcatgtattcattttcattttaaatgatagttgtattgcatcaacaaatagcattttacatattttaaaggtttgagtatggaata

SEQ ID NO: 139316 - DNA, 599 bp, Homo sapiens
agtgtttattgatatggggtagccaaagaaccagaagggacataccgtatttttggccaaccagaaaagagcaatgtgagaaaaccagaaaagagcaatgtgagaaaaccagttctgcctgaagcttccttttttttttttttttttttggcactagtggcaggaacagccatttcttattgattttaaggttccatttctgaatcagaaatggtattgrtagggaacaatgactagcaacaattgcatctagggttacatagggatagtagcaacagtgacagttttctcattgggcaagttatgcaacatgatttcagataattctatcagatacctaataacctttgcagttaatttcttcattgcttaattcagccaaagtcagcttctgtggctgtcaaatgaaaaaataaagtcctagaaggaaacaaatggtatagttaggggtctttgaagacactttaataaaggtctatagaaggggttaaagggaatcaacaagggatggtgcagtaccctagggactagcaacaagaaatcccctaagccttaaggaggaaggggacaaagtggatactaaaacccagtgagagtag

SEQ ID NO: 139317 - DNA, 599 bp, Homo sapiens
agtgtttattgatatggggtagccaaagaaccagaagggacataccgtatttttggccaaccagaaaagagcaatgtgagaaaaccagaaaagagcaatgtgagaaaaccagttctgcctgaagcttccttttttttttttttttttttggcactagtggcaggaacagccatttcttattgattttaaggttccatttctgaatcagaaatggtattggtagggaacaatgactagcaacaattgcatctagggttacatagggatagtagcaacagtgacagttttctcattgggcaagttatgcaacatgatttcagataattctatcagatacctaataacctttgcagttaatttcttcattgcttaattcagccaaagtcagcttctgtggctgtcaaatgaaaaaataaagtcctagaaggaaacaaatggtatagttaggggtctttgaagasactttaataaaggtctatagaaggggttaaagggaatcaacaagggatggtgcagtaccctagggactagcaacaagaaatcccctaagccttaaggaggaaggggacaaagtggatactaaaacccagtgagagtag

SEQ ID NO: 139318 - DNA, 524 bp, Homo sapiens
tgagaaaaaaaagtaaaactgcttcttcacatttcatcaattctatacattattcctctgcttgattttcctaayagcaattaccattatccaaaatcatattgctcatttattgtttacttctcactgtctgtctccaaaatgagatgttaaattccatgagagttgagagctgactcttttatttacagatattctccaggtcagggacagtgcctgacaaatagtagatgctgaataaatgtttgccaaataaataaataaatgaatcctaaagtattcctcaatattgggattactagtactcactatcctgtacttcagtcaatttctatactgttgtttcggtgcatttgatgtaagcagttttgagagggagtatgtagattgaaactgattcttcatgttgattaatactacatggttactgattaaccttattggtgttcaatttgtatgtaactattaaaagagaaaatgattctattaaattgtattcatgatgtactataaaggcaatgaat

SEQ ID NO: 139319 - DNA, 524 bp, Homo sapiens
tgagaaaaaaaagtaaaactgcttcttcacatttcatcaattctatacattattcctctgcttgattttcctaacagcaattaccattatccaaaatcatattgctcatttattgtttacttctcactgtctgtctccaaaatragatgttaaattccatgagagttgagagctgactcttttatttacagatattctccaggtcagggacagtgcctgacaaatagtagatgctgaataaatgtttgccaaataaataaataaatgaatcctaaagtattcctcaatattgggattactagtactcactatcctgtacttcagtcaatttctatactgttgtttcggtgcatttgatgtaagcagttttgagagggagtatgtagattgaaactgattcttcatgttgattaatactacatggttactgattaaccttattggtgttcaatttgtatgtaactattaaaagagaaaatgattctattaaattgtattcatgatgtactataaaggcaatgaat

SEQ ID NO: 139320 - DNA, 588 bp, Homo sapiens
tggaccctaaggttaaggacaaagctacctatggatggagggttcaggacccagctggcatggcaaatttctaaatttctacagctcgaaactccataactgtaggagctatcagattacycctaactctgatttagagcccagactgttacaactctgattggacagaggaccagccctacaaacattcttttctgataactgcagaccttaagccagtttcaaccaaacttcctttgtgtcctatggctcacctttaacatgaacagccaaattccatctcattttaatgctaaaatccatcccaaagtgaacatgggatgtatgttacatatatgtttactcattgcacatgtgctcagctcccctcataaatatgtatagcttttccccaaaacttgatgaacattatgatactattgtgtgatacaggccctatgaggcataaaacccattcgatccttcctctcttcagagagcaccttcggcacatgccagggaccatctcttcccagtctgcaaagtggtatcaccaagagagctctcatttctactctttagccatccttgtggatgacaagagtcatg

SEQ ID NO: 139321 - DNA, 588 bp, Homo sapiens
tggaccctaaggttaaggacaaagctacctatggatggagggttcaggacccagctggcatggcaaatttctaaatttctacagctcgaaactccataactgtaggagctatcagattactcctaactctgatttagagcccagactgttacaactctgattggacagaggaccagccctacaaacattcttttctgataactgcagaccttaagccagtttcaaccaaacttcctttgtgtcctatggytcacctttaacatgaacagccaaattccatctcattttaatgctaaaatccatcccaaagtgaacatgggatgtatgttacatatatgtttactcattgcacatgtgctcagctcccctcataaatatgtatagcttttccccaaaacttgatgaacattatgatactattgtgtgatacaggccctatgaggcataaaacccattcgatccttcctctcttcagagagcaccttcggcacatgccagggaccatctcttcccagtctgcaaagtggtatcaccaagagagctctcatttctactctttagccatccttgtggatgacaagagtcatg

SEQ ID NO: 139322 - DNA, 588 bp, Homo sapiens
tggaccctaaggttaaggacaaagctacctatggatggagggttcaggacccagctggcatggcaaatttctaaatttctacagctcgaaactccataactgtaggagctatcagattactcctaactctgatttagagcccagactgttacaactctgattggacagaggaccagccctacaaacattcttttctgataactgcagaccttaagccagtttcaaccaaacttcctttgtgtcctatggctcacctttaacatgaacagccaaattccatctcattttaatgctaaaatccatcccaaagtgaacatgggatgtatgttacatatatgtttactcattgcacatgtgctcagctcccctcataaatatgtayagcttttccccaaaacttgatgaacattatgatactattgtgtgatacaggccctatgaggcataaaacccattcgatccttcctctcttcagagagcaccttcggcacatgccagggaccatctcttcccagtctgcaaagtggtatcaccaagagagctctcatttctactctttagccatccttgtggatgacaagagtcatg

SEQ ID NO: 139323 - DNA, 592 bp, Homo sapiens
acttatgagtcaatatctacatgtggctacttaaatttaaattaagtaaaattaaaaagtaatttattcatagataacacaaacaaatggaaacacatcccacgctcatgcattggtagaataaatattgtgaaaatgaccatactgccaaaagcaatctacaaattcaatgcaattcccatcaaaataccaccatcattcttcacagaactagaaaaaacaatcctaaaattcatatagaaacaaagaagaacctgcatagccaaagmaagactaagcaagaagaacaaatcaggggatcacattacccaacttcaaactatactacaatgccatagtcaccaaaacagcatggtactggtataaaaataggtgcatagaccaatggaacaaaatggagaacctagaaataaagccaaatacttaacagccaactgatcttcaacaaagcaaacaaaaacataagataaggagatgacacgctattcaacaaatggtgctgggatatctggcaagctacatttggaagaatgaaactggatcctcatctctcaccttatacaaagatcaactcaagatggatcaaagactt

SEQ ID NO: 139324 - DNA, 592 bp, Homo sapiens
acttatgagtcaatatctacatgtggctacttaaatttaaattaagtaaaattaaaaagtaatttattcatagataacacaaacaaatggaaacacatcccacgctcatgcattggtagaataaatattgtgaaaatgaccatactgccaaaagcaatctacaaattcaatgcaattcccatcaaaataccaccatcattcttcacagaactagaaaaaacaatcctaaaattcatatagaaacaaagaagaacctgcatagccaaagcaagactaagcaagaagaacaaatcagrggatcacattacccaacttcaaactatactacaatgccatagtcaccaaaacagcatggtactggtataaaaataggtgcatagaccaatggaacaaaatggagaacctagaaataaagccaaatacttaacagccaactgatcttcaacaaagcaaacaaaaacataagataaggagatgacacgctattcaacaaatggtgctgggatatctggcaagctacatttggaagaatgaaactggatcctcatctctcaccttatacaaagatcaactcaagatggatcaaagactt

SEQ ID NO: 139325 - DNA, 592 bp, Homo sapiens
acttatgagtcaatatctacatgtggctacttaaatttaaattaagtaaaattaaaaagtaatttattcatagataacacaaacaaatggaaacacatcccacgctcatgcattggtagaataaatattgtgaaaatgaccatactgccaaaagcaatctacaaattcaatgcaattcccatcaaaataccaccatcattcttcacagaactagaaaaaacaatcctaaaattcatatagaaacaaagaagaacctgcatagccaaagcaagactaagcaagaagaacaaatcaggggatcacattacccaacttcaaactatactacaatgccatagtcaccaaaacagcatggtactggtataaaaataggtgcatagaccaatggaacaaaatggagaacctagaaataaagccaaatacttaacagccaactgatcttcaacaaagcaaacaaaaacataagataaggagatgacacgctattcaacaaatggtgctgggatatytggcaagctacatttggaagaatgaaactggatcctcatctctcaccttatacaaagatcaactcaagatggatcaaagactt

SEQ ID NO: 139326 - DNA, 534 bp, Homo sapiens
tgataacatctattaaaattaaacacattctttcacccagcaatctcactgataaaaagctatctcaaagagtcaaagttacyctatgtaaggatatataggcatggatgtgtaatgtaagtatcctcaatgtggcaaaaaaaaaaaaaattaatgatgagtagtcaccaatagaaaagttactgaaaacaaaattaaaatacatccacaattttaaatagtatgcatacatttaaaagaacaaatagaactacattacctatcttaaaaagattttcaagaggtaagctaagaaaagcaaaatgcaaagaattatgtatgatcttatttttctagaacaaataacacaaatttgtaacttgtatatatgtatttatagacgtataatcactcagtcattgatttacatgcacatggagaaaatctctagtgttataatgacctacctcagggcaagggagggattatatcaatgaggaaaggaggaggaaaggaaatccaagcaaataaaggaaatgaaaaagtacaggaaaa

SEQ ID NO: 139327 - DNA, 544 bp, Homo sapiens
cattgggtgggtgttatagagcctctgttctcagccatgtcagtgatggcagtggtgggctgtctgcagcagggaggtgcgggaggtggtggtggcggcagaagtgcctgtgggaacagcaatggcggtggtgggtccactgtgccccacgtccccaaggcagccaaatgcacygcccccaccctagtgcagccaggtaggacccacccccaggtccagagcccccatgctctggacactggccaccactgctatggggagggttcaggcaggaggtggggctggggccttgtttcgtgggcccaggacgggaagtgggagcagtgcctacctcagggacccagtcagcggtgcagtcaccgcagccaccctgtgaggctcctgtgcctcaggggaggctctgcccaggaccacccggggccatgtcccaggggtccaccccacatctgggtgattgctgggcctgacactccaaacagcaaggcaggccgcaatccattagaggaggctaatatggtttggctgcatccccactcaaatctca

SEQ ID NO: 139328 - DNA, 544 bp, Homo sapiens
cattgggtgggtgttatagagcctctgttctcagccatgtcagtgatggcagtggtgggctgtctgcagcagggaggtgcgggaggtggtggtggcggcagaagtgcctgtgggaacagcaatggcggtggtgggtccactgtgccccacgtccccaaggcagccaaatgcactgcccccaccctagtgcagccaggtaggacccacccccaggtccagagcccccatgctctggacactggccrccactgctatggggagggttcaggcaggaggtggggctggggccttgtttcgtgggcccaggacgggaagtgggagcagtgcctacctcagggacccagtcagcggtgcagtcaccgcagccaccctgtgaggctcctgtgcctcaggggaggctctgcccaggaccacccggggccatgtcccaggggtccaccccacatctgggtgattgctgggcctgacactccaaacagcaaggcaggccgcaatccattagaggaggctaatatggtttggctgcatccccactcaaatctca

SEQ ID NO: 139329 - DNA, 486 bp, Homo sapiens
gatttcagtccttctacaaggaactgaattctgtcaacaacctgaatggaagtagattmttccacagagccctcagagaggaacaccgccttgctaacaccatgccttagggtcttgtgagactcagagaagaggcactggttgagccacaccaaactgagacttgacctacaaaaattgttagatgatgagtattgttttaagctgctaagtttgtgattatttgttatggtagcaatataaaactaatacaattgctgtggttttgattttgttcttttatatgttttcttttaatataacttatgcctgtctttgctttatgatttatctttgtattaaaaactattttcattttataactaaaagagcactctaaatatttttatttttgcagtgtcacacaaaattaattttatttttggtgatttcaagttctgattgtttagaacagaacttgctgtctttcataccattaaatttctt

SEQ ID NO: 139330 - DNA, 486 bp, Homo sapiens
gatttcagtccttctacaaggaactgaattctgtcaacaacctgaatggaagtagattattccacagagccctcagagaggaacaccgccttgctaacaccatgccttagggtcttgtgagactcagagaagaggcactggttgagccacaccaractgagacttgacctacaaaaattgttagatgatgagtattgttttaagctgctaagtttgtgattatttgttatggtagcaatataaaactaatacaattgctgtggttttgattttgttcttttatatgttttcttttaatataacttatgcctgtctttgctttatgatttatctttgtattaaaaactattttcattttataactaaaagagcactctaaatatttttatttttgcagtgtcacacaaaattaattttatttttggtgatttcaagttctgattgtttagaacagaacttgctgtctttcataccattaaatttctt

SEQ ID NO: 139331 - DNA, 486 bp, Homo sapiens
gatttcagtccttctacaaggaactgaattctgtcaacaacctgaatggaagtagattattccacagagccctcagagaggaacaccgccttgctaacaccatgccttagggtcttgtgagactcagagaagaggcactggttgagccacaccaaactgagacttgacctacaaaaattgttagatgatgagtattgttttaagctgctaagtttgtgattatttgttatggtagcaatataaaactaatacaattgctgtggttttgattttgttcttttatatgttttcttttaatataacttatgcctgtctttgctttatgatttatctttgtattaaaaactattttcattttataactaaaagagcactctaaatatttttatttttgcagtgtcacacaaaattaaytttatttttggtgatttcaagttctgattgtttagaacagaacttgctgtctttcataccattaaatttctt

SEQ ID NO: 139332 - DNA, 590 bp, Homo sapiens
taagtttgtgattatttgttatggtagcaatataaaactaatacaattgctgtggttttgattttgttcttttatatgttttcttttaatataacttatgcctgtctttgctttatgatttatctttgtattaaaaactattttcattttataactaaaagagcactctaaatatttttatttttgcagtgtcacacaaaattaattttatttttggtgatttcaagttctgattgtttagaacagaacttgctgtctttcataycattaaatttcttcatgtgttttggcatttccattaaaaaaattgtatatgattttaaaaatgttgaaactgcttcaaatctacagaaaggttgaaagtacttctgccttcctatcactcagtttccctaattgttaacattttatatatttccccatcccaccactttgcatgtgtgtgtgtgtgcatgtgtgtgtgtgcatgtgcatgtgtgtgtatgtgttcatgtgcgtgtgtttgtgaatactctactgtttcccacccagaaacaaggacactctcttatattccactgtacagccctctgttcaggacatcaaccctg

SEQ ID NO: 139333 - DNA, 590 bp, Homo sapiens
taagtttgtgattatttgttatggtagcaatataaaactaatacaattgctgtggttttgattttgttcttttatatgttttcttttaatataacttatgcctgtctttgctttatgatttatctttgtattaaaaactattttcattttataactaaaagagcactctaaatatttttatttttgcagtgtcacacaaaattaattttatttttggtgatttcaagttctgattgtttagaacagaacttgctgtctttcataccattaaatttcttcatgtgttttggcatttccattaaaaaaattgtatatgattttaaaaatgttgaaactgcttcaaatctacagaaaggttgaaartacttctgccttcctatcactcagtttccctaattgttaacattttatatatttccccatcccaccactttgcatgtgtgtgtgtgtgcatgtgtgtgtgtgcatgtgcatgtgtgtgtatgtgttcatgtgcgtgtgtttgtgaatactctactgtttcccacccagaaacaaggacactctcttatattccactgtacagccctctgttcaggacatcaaccctg

SEQ ID NO: 139334 - DNA, 590 bp, Homo sapiens
taagtttgtgattatttgttatggtagcaatataaaactaatacaattgctgtggttttgattttgttcttttatatgttttcttttaatataacttatgcctgtctttgctttatgatttatctttgtattaaaaactattttcattttataactaaaagagcactctaaatatttttatttttgcagtgtcacacaaaattaattttatttttggtgatttcaagttctgattgtttagaacagaacttgctgtctttcataccattaaatttcttcatgtgttttggcatttccattaaaaaaattgtatatgattttaaaaatgttgaaactgcttcaaatctacagaaaggttgaaagtacttctgccttcctatcactcagtttccctaattgttaacattttatatatttccccatcccaccactttgcatgtgtgtgtgtgtgcatgtgtgtgtgtgcatgtgcatgtgtgtgtatgtgttcatgtgcgtgtgtktgtgaatactctactgtttcccacccagaaacaaggacactctcttatattccactgtacagccctctgttcaggacatcaaccctg

SEQ ID NO: 139335 - DNA, 535 bp, Homo sapiens
tagtgttcagacttcctgttaattgttttccttgaatcttcagtttagtattttctcccaaagagagaaagagaatgagagagaaagtgatctaagatttcataaacaacttttctgaagtttagttaattttacttttcttatttttattcctttagaatagagacctagattggtttcttgatatgatgtaattctgttttgaaaatttcattttagttcattggttttcattttgactgttttcatttctacaatatcaggaacatgayttaccttttataaaaatgatttgctatataagcattaaattaaaacttaaattggctatattgatttgaaattgccaccaatttggaaatatgaattcatgaagttatatgatcaagtttacatgtttaacaacaaacaaaatgatctgtccttgggtcaccagggtcaggctctccatgtgacactgggcatggccaccctggactcaggcttgggctggaaccactctgatcccactgggactgtgcactcatggtaacca

SEQ ID NO: 139336 - DNA, 622 bp, Homo sapiens
actacccactgtactgctggaaggcaattatatttatgcactggctgccttctttttttatttgaaatgtttgyagagtctgtagcctttcttcctaagcctagtaaccaaactctttattttggatggtaatagcattacaaacagatgtcttacaagcataattgaaaacagcattggagaaaaataattaaggatgcaagtgaacagagattagttatttagatatgttaattaaaaatacatttaaagcgatgattattaaataaatagcattctagtcttgggcagcatattttcactgtttctggaatccttccttttggggattgaaaatgtctactttgaaaaaaatcaacaaataaggcccattgtaaaaataatctatagttctatccaatgtggggattgcagacatgctgacatgtggtttattctcagctctcttaagttgttattgccattgtctattcatgccacacaatataaggctaatggtcctttgcatttctgtccatttccagatcatccttgggcatcctgtgaaatgcttaggtaatacatcaaaaatgtcttcttttacacaatacacactatttagatagtgatactttacttgaca

SEQ ID NO: 139337 - DNA, 622 bp, Homo sapiens
actacccactgtactgctggaaggcaattatatttatgcactggctgccttctttttttatttgaaatgtttgtagagtctgtagcctttcttcctaagcctagtaaccaaactctttattttggatggtaatagcattacaaacagatgtcttacaagcataattgaaaacagcattggagaaaaataattaaggatgcaagtgaacagagattagttatttagatatgttaattaaaaatacatttaaagcgatgattattaaataaatagcattctagtcttgggcagcatattttcactgtttctggaatcyttccttttggggattgaaaatgtctactttgaaaaaaatcaacaaataaggcccattgtaaaaataatctatagttctatccaatgtggggattgcagacatgctgacatgtggtttattctcagctctcttaagttgttattgccattgtctattcatgccacacaatataaggctaatggtcctttgcatttctgtccatttccagatcatccttgggcatcctgtgaaatgcttaggtaatacatcaaaaatgtcttcttttacacaatacacactatttagatagtgatactttacttgaca

SEQ ID NO: 139338 - DNA, 592 bp, Homo sapiens
gtctcattttagggtctcattatttagtggtttgccttctataatgatttctcccacttatttcttagccttttaaaatctggtttctctttgaactgcctttagattctcattccattcatatttattgaacacctaccatgtgtgagattccgtgttgggtgcttaagatattttgtctcacttaagacaactccacaataaacatgtagttaggtattatattctcattctacatgggaggcaatagtgtttcagaagaatgcaaggacttgccctgagtcacagagtatgccaggactgggtgaagacttgagttttgttttcccatgaatctggtttgctccactttgcagtctttaatccccagcagaayaatcaaatgtctcttgtaagagttgctgttctgactctcccttttatctctcttcttctgggcagcagctccagagaaattgaaagaacctaaatgtattggtcatttattattgtataacaaattacttaaaaatgtagtagcttaaaatgataaacatttagcatctcacacagttgctgtaggtcaggaacctgagagctacttagctgagtg

SEQ ID NO: 139339 - DNA, 582 bp, Homo sapiens
tttaagagataacctactgctgttctcaatttaaataatttccatttgtctgtaaactaaataaattttagtagccattaaagtgaaaatgccaaatacacattttaatcaatgattttccaccttaaatgcaaggatttagaacctgacaacatcttttattgaagcacagcagtattaattaacgataacagtygttgttgaataataatgtaaaacggtcctaccataagaagtaaaaaaatcataccttatagaaaccattctctttaagtgaagtttgttttctttgattccataatttcattcctttcccacaagagtcataatgctttgtgcttgggagccattttgtgctttaaaaatgtaaacaataatttgttcatctaagacacttggaaatatgattcttttaaaaatgagtgtcagcggctgggcacggtggctcacgcctgtaatcccagcactttgggaggccaaggcggaaagatcatgaggtcaggagtttgagcctggcatggccaatatggtgaaactccatctatactaaaaatacaaaaattagccaggcatggtggcacg

SEQ ID NO: 139340 - DNA, 582 bp, Homo sapiens
tttaagagataacctactgctgttctcaatttaaataatttccatttgtctgtaaactaaataaattttagtagccattaaagtgaaaatgccaaatacacattttaatcaatgattttccaccttaaatgcaaggatttagaacctgacaacatcttttattgaagcacagcagtattaattaacgataacagtcgttgttgaataataatgtaaaacggtcctaccataagaagtaaaaaaatcataccttatagaaaccattctctttaagtgaagtttgttttctttgattccataatttcattcctttcccacaagagtcataatgctttgtgcttgggagccattttgtgctttaaaaatgtaaacaataatttgttcatctaagacacttggaaatatgattcttttaaaaatgagtgtcagcggctgggcayggtggctcacgcctgtaatcccagcactttgggaggccaaggcggaaagatcatgaggtcaggagtttgagcctggcatggccaatatggtgaaactccatctatactaaaaatacaaaaattagccaggcatggtggcacg

SEQ ID NO: 139341 - DNA, 585 bp, Homo sapiens
gaccgaggatttgcctattttattctcaatcaatttatctcatgtacttgtaacaatgcttgacacacagtaaggactcaataagtattactagaaataagtgaacctcttagaaccaaaactgaggaattttttaagagagcacaatttactgtgggatcagagaccataatctgttcatctccacaaagcaggcaggcatgaatagttttatattgaaacttaaaaccgcaaacaacattgtcccttatctgatactgttgctgacgtgatccttctttcttgacacagctaacagagtgtctgacaccaatatagattataggatctcatcacaataatgataggcatttaacagccttgacagatcaatgaccttgcagcctacaactcagcagactctccctcagyatggaaatcctaaaaaacataatacactcacttattattcatcaatccattgtttttccaaagccaggactcacttagaaatgcctgtaatttggatgaggttgactaacatcggacctaccgatttggggtgtgggggtggggaacaatagacaccagcaaaagagtaaagtg

SEQ ID NO: 139342 - DNA, 585 bp, Homo sapiens
gaccgaggatttgcctattttattctcaatcaatttatctcatgtacttgtaacaatgcttgacacacagtaaggactcaataagtattactagaaataagtgaacctcttagaaccaaaactgaggaattttttaagagagcacaatttactgtgggatcagagaccataatctgttcatctccacaaagcaggcaggcatgaatagttttatattgaaacttaaaaccgcaaacaacattgtcccttatctgatactgttgctgacgtgatccttctttcttgacacagctaacagagtgtctgacaccaatatagattataggatctcatcacaataatgataggcatttaacagccttgacagatcaatgaccttgcagcctacaactcagcagactctccctcagtatggaaatcctraaaaacataatacactcacttattattcatcaatccattgtttttccaaagccaggactcacttagaaatgcctgtaatttggatgaggttgactaacatcggacctaccgatttggggtgtgggggtggggaacaatagacaccagcaaaagagtaaagtg

SEQ ID NO: 139343 - DNA, 595 bp, Homo sapiens
tggagctgaactcggcatcagcacccgggagtgcggccttctgcactgccaacttggtagaaggcggggctctcatctgctcctggctcccacaccagctctgcctagtgcgcaggcctggctgtgcctcccctgctgcagccagtgtccttacagcagccgctccagatgggccatcactgccatcatctggacactcaaaaaaaaaaaaaaaaaaaccacataggcaggccccttaytctgcttatatgtaagcctacttctgcttagttatatctatatatctctggatataaatggccttctgctatgttgctcatgctgtcccaaactcctatgctcaagccatcctcctgcctcagcatcctgagtagctgggactacagacacacaccattgcaacccaccatacaagcctgtgtctataaatatcatatgcgggttttttttttttaataagatgaaggcataggctatgtaagatgtgctaagctaaggaaggtggaagatgcagtttgattacaaagaaggtagaatgtttcagattcatttcaggtgtcactaactattgacagtactgccttaaggatgaatg

SEQ ID NO: 139344 - DNA, 422 bp, Homo sapiens
aactatttgtgaaacagagtactgtcgttttcattacagtcaaaagaacaatcaggccaaattcactctccctagattgtggaagctcagatgaatcctatctttctaactggttatcattttgcacagaggtggctaatttccttagaaactttctaagctgtaaagaaaggttggagaakatagagcctgggattccttcagtgcttttagtgttaatttctccttagtttttgctatctaatctcaggtatgcttttgtaaacattttcaagggaataaaaatccctaattttctctgcattgttctcttatttccccttcactgtctgtcctcttagctctctgctacctgcccttctctggtggatatgagcaaacaagtccagagtgactgcctagcatcagctttaactgaattc

SEQ ID NO: 139345 - DNA, 612 bp, Homo sapiens
aaatggaaagtgagtaggtgtaaaatatttggcacaatctttggcacttgaccaaatgcaaaaggacacaattatcagattacatgaaatatcgaggggataatccaagcaaagttatgacaccagtcttggagcaaaagtcagaagcctaagttgagtggtgggaaagctggcgagaagaatgagcttccatgagtacagtattctggcccttctctgtctctcccttcctaactccaygttttccacttccacggctacctcatccctctcttcttgtagtaaaaacatgcccattatttctcacctttaacctatcctcacatgcctgacttctctatgtggtttttcttccatttacagctaactttttattcagttttcattctcttctctatattttttaaagtattccattcatcaaggcagtaaaaatatgaatagccccagtggttctccaccatggaattgctacagatgtggcatactttcccatataaggcatatcagtatttcattgggtaggagtcacagtcctctaccctggctaaacagccttacaaaatcaaaagtagtaatctcttttatttgctctctagtttatatgtgaca

SEQ ID NO: 139346 - DNA, 434 bp, Homo sapiens
cccttgagttttaatatttagggtaatatttttgaactctgctgtttcggagagtataagtcagtatgtggagttttgatgaaagtagatgttttattcctcactgatttgtgttaatttgagacacagtcttttaaaactaaactatcatgcgataatgcattgtgtaacctcctatcttgaaagattttattcttaaatgaaakttaggctaagtggaattgacaagtaatgatgatttcaattatgctctttttctcattgtgctttatgtaagcatttaatgaatgttcatctgaacttgatatttattttcatcttgccattgataattgttttctccttgcattgtatattgttacctctataatattttagtattcttatgattcaaaaatgctttatatatagtttgtatcaaaatatactgtttt

SEQ ID NO: 139347 - DNA, 599 bp, Homo sapiens
aggttaggtgtgttataagcattttctacttatgatattttcaagatgggcttatcaggatgtaactccattgtaagtcaaggagcatctgtattaaaaacttcacaactgtaagctaagttgtaaaaatatcagattgaggctgactttcagagaggtataaactcctatctccctctcccacttctctccctcctgacttccaaacctggagatgacattcatgataagaattgaaagtgtctttataaggcaatcaaagggctttaacttgctgaccctccgttaggaagcagaaacaactgttgtgmagtaactagtgtcaaaaattgagctgttgacaaaaagttcactcctgccaaacttcctgcactcctaagcactagctgtgccctatcaatgtctgtcatcagtcagtcctcactatctacagtctacttgtttgaaccaaagtagacttcattccccagacgcaacattcactttggttcaagccaactgttctcagaaggaaacacctgttcctcagaaatgctaactcaatgtcctgcagtttgacaaaattaagccttttgctaggtacataggtgaccttatct

SEQ ID NO: 139348 - DNA, 550 bp, Homo sapiens
ctctcattcattccccatttttgtgggttttcaaggtatcacttagtcttgttatctgctttgaggaaacagacattaatatgcccatctaacagataggtcaactgaggtccagagggctctgtaattttctcaaggccctacaagtagtaaacaacatgaagaagtagaaaaacaagattagcacttacatctctaaacacctagaatacccattccttgcattataactcactggcaagcaaaagctatttaactgcacactttttaaaaagaagcaaccattaaaataacaaatcgttaatttaaattaacatcttcaatctgctcctcagctcaacctctccaatatratctccagaaatgaggtttaaatgcactgataatctgtcaaccatatccttaaggaacagattccagagtctgctttgtttgaaatgactgtcatgagttgacttgtaaaaagtaattggttccataatttcatacatgtcaaaatctgctacacactgtttcctaattgctgttttgtgtgtgcacacaggtgtaa

SEQ ID NO: 139349 - DNA, 490 bp, Homo sapiens
gtcttatatataatcacctttgctagaggaaaataaattaaggagattaagtttcagtcacataaaagtgacagttggcwcagtggaaacaaaagacctgttttagtaatagcaagccttcatatggatagcaattggtatgagccaggcatattctaagagctgttcatggattaatgcacttaatcatccacaatccaggggatgtgagggtcctattattatgcccatttcacagataaggaaacagaggctagcatgggttgaggaacttggccaaataagcagcagaactagaacttgaacccaggaagtgtgttccaaagttcataagcttaaccactgccatatagagaatttgagtcaggacttccggatttgagtgccagtctcccagtctcagacattcaaggctaatttacggcaacttgtcaatggcaaggttactggttattttaccaattgattatctcacttggggaaaggctca

SEQ ID NO: 139350 - DNA, 430 bp, Homo sapiens
aggcttcaaaaggtgggtaataacaaactcctctgagctaaaggagcatgttctaacccaatgcaaggaagataagaaccttgaaaaaaggttagacgaattgctaactagaataaccagtttagagaagaacataaatgacctgatgcggttgaaaaatacagcatgtgattcccagggcartcaggcaagagaaaaaaataaagcgtattcaaataggaagagacgaagtcaaattgtctctgtttgcagatgacatgattgtatatttaggaaactccattctcagcccaaaaactcctaaagctgataagcaacttcagcaaagtctcaggatacaaaatcaatgtgcgaaaattacaaacattcctatccacaaataatacagagccaggtcatgagtgaactcccattcacaattgctacaaag

SEQ ID NO: 139351 - DNA, 514 bp, Homo sapiens
gacggggtttcaccgtgttagccaggatggtctcgatatcctgaactcgtgatccgcctgcctcagcctccaaaagtgccgggattacaggtgtgagccaccacacctggcctgcccatgttaatttcttacatggttatgtaagatcttaactttagggcagcagttctccactatgcaataatttttttccctggggaacttctccaatatctgaagacatctttggctgtcaccattgagggaacagtgttaccagtatctaaggtagaagcctaggatgctagsaaagatctatagtgcacaagacagtcccccacaacagagaatgatcttgcctgaaatattaattgtgccaaggtggaaaaaacccacattcaagggcactgtgagaggtgaatcgggatgatggactatgttcgcaactgttctgtaaatctacaattatgctaaaataaaagtttatttaaaaatgcttcacttaaagaaaaccccaggttcagctagcctcact

SEQ ID NO: 139352 - DNA, 561 bp, Homo sapiens
aataccttataaatgagtgagtctggccctctcttgcccttttgttgtccttttgccatgtggggaaccagccacttttacctctggagaattcaacaggaaaggccctgtcttggaagaagagaatggtcttgccagacactggaacttctggtgccctgaccttaaacttgcccgctaccaaaactgtaaggaaataaatttcctttcatcataaattatcttgatgtaggagataagcaggacttgtttcccaagcaccagaaacaacaccgttaatcaaaaagaggatggagtaaagaaactggcagaaaccagcacatggcaatgacctctggttgccctcactgctcattattaaagacactcccacaggtgccatgacagtttacaaatataatgtcaatgtgccatagtaataacctggaaatgaccttatatggttccaggaacctccgttstcttttctagaaaattccaaatcaaccaccccttaattggattataattaagagcggatgtaaatacagctagccagaaattcctgctgcggctgctggg

SEQ ID NO: 139353 - DNA, 583 bp, Homo sapiens
cgatgcccaaggcacgaccctggcacctgattccactggctacatttcaccccaagccacaaagtccacatggatggtttgcaaggagaggaggtttatctgactctctctcctattatattggttacagggaactaactttctcaagctactaggctgctctatccatcccttcagggccactcaggaagtaagctctgggccccaaactgtgatgtttcattcatgtccaagagcagagggaaaaccagccaagatgggacaacaatcaaagcagagagtaaagaaattaaaggctgaggaatccaagaaagaattcaaggtttgtatctcaacataaatgygtatgtgggaaaagcatcctaaacaaatattaagcctgtgtgaatattatatatagtatcattttatatatttacataagatataactatattatttcatatatatatatatgaaatttgggggtatgtacacagaacaaaagaacaagataggatatccaaaagtagaaccaagtaaatataggaatttaatatatagtaggtgcagcatttcaaatcaagaagaaaaatatttatat

SEQ ID NO: 139354 - DNA, 583 bp, Homo sapiens
cgatgcccaaggcacgaccctggcacctgattccactggctacatttcaccccaagccacaaagtccacatggatggtttgcaaggagaggaggtttatctgactctctctcctattatattggttacagggaactaactttctcaagctactaggctgctctatccatcccttcagggccactcaggaagtaagctctgggccccaaactgtgatgtttcattcatgtccaagagcagagggaaaaccagccaagatgggacaacaatcaaagcagagagtaaagaaattaaaggctgaggaatccaagaaagaattcaaggtttgtatctcaacataaatgcgtatgtgrgaaaagcatcctaaacaaatattaagcctgtgtgaatattatatatagtatcattttatatatttacataagatataactatattatttcatatatatatatatgaaatttgggggtatgtacacagaacaaaagaacaagataggatatccaaaagtagaaccaagtaaatataggaatttaatatatagtaggtgcagcatttcaaatcaagaagaaaaatatttatat

SEQ ID NO: 139355 - DNA, 583 bp, Homo sapiens
cgatgcccaaggcacgaccctggcacctgattccactggctacatttcaccccaagccacaaagtccacatggatggtttgcaaggagaggaggtttatctgactctctctcctattatattggttacagggaactaactttctcaagctactaggctgctctatccatcccttcagggccactcaggaagtaagctctgggccccaaactgtgatgtttcattcatgtccaagagcagagggaaaaccagccaagatgggacaacaatcaaagcagagagtaaagaaattaaaggctgaggaatccaagaaagaattcaaggtttgtatctcaacataaatgcgtatgtgggaaaagcatcctaaacaaatattaagcctrtgtgaatattatatatagtatcattttatatatttacataagatataactatattatttcatatatatatatatgaaatttgggggtatgtacacagaacaaaagaacaagataggatatccaaaagtagaaccaagtaaatataggaatttaatatatagtaggtgcagcatttcaaatcaagaagaaaaatatttatat

SEQ ID NO: 139356 - DNA, 583 bp, Homo sapiens
cgatgcccaaggcacgaccctggcacctgattccactggctacatttcaccccaagccacaaagtccacatggatggtttgcaaggagaggaggtttatctgactctctctcctattatattggttacagggaactaactttctcaagctactaggctgctctatccatcccttcagggccactcaggaagtaagctctgggccccaaactgtgatgtttcattcatgtccaagagcagagggaaaaccagccaagatgggacaacaatcaaagcagagagtaaagaaattaaaggctgaggaatccaagaaagaattcaaggtttgtatctcaacataaatgcgtatgtgggaaaagcatcctaaacaaatattaagcctgtgtgaatattatatatagtatcattttatatatttacataagatataactatattatttcatatatatatatatgaaatttgggggtatgtrcacagaacaaaagaacaagataggatatccaaaagtagaaccaagtaaatataggaatttaatatatagtaggtgcagcatttcaaatcaagaagaaaaatatttatat

SEQ ID NO: 139357 - DNA, 561 bp, Homo sapiens
ctggagatatcaacaccccacttttagtaactgatagatcaagcagacagaaaatcagtaagaataaaaatgacctgaacaacactattattcaacctgatctaactgacatttgtagaatactacattcaacaacagcagaatacacattctcctcaggtacacatggaatatttacaaaaaaaaatcatattctggaccataatacatatctaagcaaattgaamggaatagaaattatacaaagggtttctcagtccacaatggcattaagctggaaatcaataactgagaggtggataattgccaactctttggagattaaacacacttctaaataatgcatgggtcaaagaagtctcaaaaaaattaaaaatgttatttaaaaaataaaagtaaaattcatattattaaaatgtgtaggacacagcagaagatgtgctcacagagaaatttatagcattaaatacacatattagaaaatgatgaataataaaaatcaacaatctcaccttctaccatagaaaactagaaaaagtcgagcaatttaaatataaagca

SEQ ID NO: 139358 - DNA, 567 bp, Homo sapiens
tgtaggtgacctagtccttctctctaactatctttaacatttttttctttcatttcaaccttggataatctgatgactatgtttcttagggatggtcatcttgtatagtatctcacagtggttctctgcattctctgagtttgaatgttggcttctctagtgagactgaagaaattttaatggayaatatcctcaaatatgttttccaaattgcttgctttctcttcctctctttcagggacgccaatgagtcataaatttggaatcttcacataatcccataattcttaagagactttatctttatttcttttgcttttttttcctgagtcaacttgcagaaccagtcttcaagctccgagcttctttccccagtttggtctattcttctgttaatacttccaattgtattatgacatttttagtgcatttttcagtttcatcaggtcagtttggttcttttttaaaatagctattttatctttcaactcttgtataattttattgttttcctcatatagggtttcaactttctcctgaatctcaacaatcttcatttccatttag

SEQ ID NO: 139359 - DNA, 567 bp, Homo sapiens
tgtaggtgacctagtccttctctctaactatctttaacatttttttctttcatttcaaccttggataatctgatgactatgtttcttagggatggtcatcttgtatagtatctcacagtggttctctgcattctctgagtttgaatgttggcttctctagtgagactgaagaaattttaatggacaatatcctcaaatatgttttccaaattgcttgctttctcttcctctctttcagggaygccaatgagtcataaatttggaatcttcacataatcccataattcttaagagactttatctttatttcttttgcttttttttcctgagtcaacttgcagaaccagtcttcaagctccgagcttctttccccagtttggtctattcttctgttaatacttccaattgtattatgacatttttagtgcatttttcagtttcatcaggtcagtttggttcttttttaaaatagctattttatctttcaactcttgtataattttattgttttcctcatatagggtttcaactttctcctgaatctcaacaatcttcatttccatttag

SEQ ID NO: 139360 - DNA, 567 bp, Homo sapiens
tgtaggtgacctagtccttctctctaactatctttaacatttttttctttcatttcaaccttggataatctgatgactatgtttcttagggatggtcatcttgtatagtatctcacagtggttctctgcattctctgagtttgaatgttggcttctctagtgagactgaagaaattttaatggacaatatcctcaaatatgttttccaaattgcttgctttctcttcctctctttcagggacgccaatgagtcataaatttggaatcttcacataatcccataattcttaagagactttatctttatttcttttgcttttttttcctgagtcaacttgcagaaccagtcttcaagctccgagcttctttccccagtttggtctattcttctgttaatacttccaattgtattatgayatttttagtgcatttttcagtttcatcaggtcagtttggttcttttttaaaatagctattttatctttcaactcttgtataattttattgttttcctcatatagggtttcaactttctcctgaatctcaacaatcttcatttccatttag

SEQ ID NO: 139361 - DNA, 567 bp, Homo sapiens
tgtaggtgacctagtccttctctctaactatctttaacatttttttctttcatttcaaccttggataatctgatgactatgtttcttagggatggtcatcttgtatagtatctcacagtggttctctgcattctctgagtttgaatgttggcttctctagtgagactgaagaaattttaatggacaatatcctcaaatatgttttccaaattgcttgctttctcttcctctctttcagggacgccaatgagtcataaatttggaatcttcacataatcccataattcttaagagactttatctttatttcttttgcttttttttcctgagtcaacttgcagaaccagtcttcaagctccgagcttctttccccagtttggtctattcttctgttaatacttccaattgtattatgacatttttagtgcatttttcagtttcatcaggtcagtttggttcttttttaaaatrgctattttatctttcaactcttgtataattttattgttttcctcatatagggtttcaactttctcctgaatctcaacaatcttcatttccatttag

SEQ ID NO: 139362 - DNA, 266 bp, Homo sapiens
gaattcatatttaagtgaagtaataggaggaatggaagagagaatgggtaatgatgcagacttgagaaggtctggaaaaaaatggaaataagtggtgaaggaacgtagggcaggtgctaacattttaccttgcttgggtcatgaagatcccatgtctgcaaataatgagacttcagttaaataaytgaaagtgcttgatgactttctaagtctgttaagtctttgattccatgactctgaagctgccagcacaattttactttgac

SEQ ID NO: 139363 - DNA, 555 bp, Homo sapiens
ctactgtggatatcccaattttacagatgaggaggttaagtgagaataaatgtcttaaattcacagcaaagaagtgccagagctgggggttcaaacctaggtgctctcagtattgtctttctttttaactgctccaacagactttcccaaattaaacaggaagagcagacacaggtgatgaaaaaggactagaacagatttccattatccagagaaggcaagccacaaaatccagttgaatgatggaagtgaccctggatgtttgaaaaatcaaaactatctactggggtctctgctctatttgaaaaagaaacaactattccatattaaaattccattataagtggggggaaaggacaaaataacttcctgtcatttccatcactttagaaggttgtttttcattctgtctggttgagtggatgggttaacacaccagatgggactcaggctccacagcrtcaaggtcacgtctatagaggtctcttcgaagttgccagccctggctgttcatctttcttctcccctccctcccaccctgcagatgtaatctat

SEQ ID NO: 139364 - DNA, 540 bp, Homo sapiens
gatatcccaattttacagatgaggaggttaagtgagaataaatgtcttaaattcacagcaaagaagtgccagagctgggggttcaaacctaggtgctctcagtattgtctttctttttaactgctccaacagactttcccaaattaaacaggaagagcagacacaggtgatgaaaaaggactagaacagatttccattatccagagaaggcaagccacaaaatccagttgaatgatggaagtgaccctggatgtttgaaaaatcaaaactatctactggggtctctgctctatttgaaaaagaaacaactattccatattaaaattccattataagtggggggaaaggacaaaataacttcctgtcatttccatcactttagaaggttgtttttcattctgtctggttgagtggatgggttaacacaccagatgggactcaggctccacagcatcaaggtcacgtctatagaggtctcttcgaagttgccagccctggctgttcatctttcttstcccctccctcccaccctgcagatgt

SEQ ID NO: 139365 - DNA, 441 bp, Homo sapiens
tgatctgtaaagaaggggttgataaacataaagcagattcccttcctttcaagaatgatagaagttgcattctaggtaggctctggcctttcctttataattttacttgggatttttcatagctgatcataatttaccatttgataattcacttctttttcccaggctcaaggctgataagccagtatccagatagaatagacccgtttatacytctgtccccagtttattttttaaggttttttttcattgcacctgatgccaaaacaaaacctcaaaagaccttgagtgaattttgagctcgtgtaacaactgggaagtctggggaacgttttagctttctgctgtggctggatccagggactcaaacattgggctccatctctctctatttctttcctctctttcccactaggtgggcttctggataaaacatttccc

SEQ ID NO: 139366 - DNA, 441 bp, Homo sapiens
tgatctgtaaagaaggggttgataaacataaagcagattcccttcctttcaagaatgatagaagttgcattctaggtaggctctggcctttcctttataattttacttgggatttttcatagctgatcataatttaccatttgataattcacttctttttcccaggctcaaggctgataagccagtatccagatagaatagacccgtttatacttctgtccccagtttattttttaaggttttttttcattgcacctgatgccaaaacaaaacctcaaaagaccttgagtgaattttgagctcgtgtaacaactgggaagtctggggaacgttttagctttctgctgtggctggatccagggactcaaacattgggctccatctctctctatttctttcstctctttcccactaggtgggcttctggataaaacatttccc

SEQ ID NO: 139367 - DNA, 430 bp, Homo sapiens
atgttgtggtaaacagtgatgctaactgaatatcgaggaagaaaatgctggatttatcaataaataattttcttttataatgaaaaatatatgcattttaccactagggctgattgtatttagcycatattctaaggcaagtgatttatttttaaattgttcctctgttttcatatttgactctgtggagttgaacctttggaggaaaacttattaaagccatactcaggtgtttgctttttgagaaaaaaacaaagatttcccatgacatgcctgagaaagtatgttataagatgaattataatagccttacatgtagttttgtgacagtgacaagaagaaaaatgaaatttaacgttctgaggcagctgagaaattatcagatggaggggccgctacacgcttgtatttgttattattattgtacatg

SEQ ID NO: 139368 - DNA, 430 bp, Homo sapiens
atgttgtggtaaacagtgatgctaactgaatatcgaggaagaaaatgctggatttatcaataaataattttcttttataatgaaaaatatatgcattttaccactagggctgattgtatttagcccatattctaaggcaagtgatttatttttaaattgttcctctgttttcatatttgactctgtggagttgaacctttggaggaaaacttattaaagscatactcaggtgtttgctttttgagaaaaaaacaaagatttcccatgacatgcctgagaaagtatgttataagatgaattataatagccttacatgtagttttgtgacagtgacaagaagaaaaatgaaatttaacgttctgaggcagctgagaaattatcagatggaggggccgctacacgcttgtatttgttattattattgtacatg

SEQ ID NO: 139369 - DNA, 617 bp, Homo sapiens
actttgctaaagttgcttttcagctttaggacttttggggctgagacgatgggatttttcttttctctttttccattttttttttctttttagatggagttttgtccaggctggagtgcaatggtaaaatcccagctcactgcaacctccacctcctggtttcaattgattctcctgcctcagactctcaagtagctgagattatgggcacgtgccattacacccagctaatttttgtatttttagtagacatggggtttcgccatgttggccaggctgatctcaaaytcctgacctcaggtgatccacccacctcggcctcccaaagtgctgggattacagacttgagccactgcgcctggccgatgatggggttgtctaaatacagaatcatgtcatctgcaaacaggaacaatttgacttcctctcttcctatttgaataccttatttctttttcttgcctgattgtcttagccagaacgtctaatactacattgaataggagtggtgagaaagggcatccttctctggtgccagttttcaaagggaatgcttccagcttttgcccattcgatatgatattggctatgggtttatcataaatagctcttattga

SEQ ID NO: 139370 - DNA, 620 bp, Homo sapiens
tgggaaagtctttaagcacactggagctatgcttacacatttactccaacagcattccaggtgaggaagactaaaaatggaaaggtaagggggaaaatgagtatgaggtatgtgcagtgcakgtgcatatatgtgaaagtgtgtttgggagaaggaggtagtagtatgcctatgcaaaactgttcttggagaataaacagatagatggtgacaaaaagcatgatgatgatattacagtaataagctcttcctatgtgttagaccttgtgttgggggctttacatccattttcgcagttaattcacacaattctataggtttaaaaaaaaattcaacaacgataaaaccaaagcccaaagaaattaaatgataaactcaaaacctcacagtatcagacctctgagcccaagctaagccatcatatcccctgtgacctgcacatatacatccagatggcctgaagcaactggagaaccacaaaagaagtgaaaatagccagttcctgccttaactgatgacattccaccattgtgatttgttcctgccccaccctaactgatcaattgaccctgtgacattctttctcctggacaatgagccttagaagctccccaccgagc

SEQ ID NO: 139371 - DNA, 566 bp, Homo sapiens
acatcaaacaggataaatatcaaatatggaaacagccctcaaagaactgtctagtggggaacacaggggtgaaatagttcattatgtaataaaggcatgtgacaagcgttgcacggggaaaataaggctgtgacaaaagcatacagtggagacaagaagtagaggggaacggaaaggaaagagaaaaggtactcaaggaagtagayttgaagaaactagtttttgtttgtttactgcctaccaaaagatgagtatctacatggaccaggaatttctttttctgttcctcaaaaaagaaagtccactggttccataaaattataggcctaaaatgcaacacacaataagagctctcactgttatttgactaaaagtctccatcatttaaactatttaatctgctctgagctctgaacactttctcctttcagaatgcatttatggctacagaatctgggctaggttttcctgctggaatccacaatgacttatgatattgtgtttcaagctagatgctgatgtaagaatacacaaattatgtaagacagaattttgaccagtttaat

SEQ ID NO: 139372 - DNA, 607 bp, Homo sapiens
gggcagttctaattccagtttctcatgaggtttcagtccaaacatcagctaggctatgttcaactgaaggcttggagctggaaaatctggttctaggatggctcacacacatggcagacaagtttattctggatgttgtcaggaagtcttgtatcatggacttctctatgggactgccttcctaacatggcagctggcttaccacagtgagtgacccaaaaaagagcaaggtggaagccgtaatgtcttttataacttaacctcagaggttatagtctgccatttcccccaatattcgattggtcaaacaggctgaccctactcagtgcaggaggggactaaacatgcacgtgactttcaaaagagaagaatcagtgggggtcatcatggagactggctacagcatggtcatctagcagaagaatctgattgaacctggaggtagaaatgtggagatactcaacagtcacaaggcaagtcaaggacacctgacccagaaccattggctctggacaagtttaattctygtacaaacaccacatttccacatggaatctcctatcagctaaagtttccatggcaaggagcaggataatcgtcagaattc

SEQ ID NO: 139373 - DNA, 607 bp, Homo sapiens
gggcagttctaattccagtttctcatgaggtttcagtccaaacatcagctaggctatgttcaactgaaggcttggagctggaaaatctggttctaggatggctcacacacatggcagacaagtttattctggatgttgtcaggaagtcttgtatcatggacttctctatgggactgccttcctaacatggcagctggcttaccacagtgagtgacccaaaaaagagcaaggtggaagccgtaatgtcttttataacttaacctcagaggttatagtctgccatttcccccaatattcgattggtcaaacaggctgaccctactcagtgcaggaggggactaaacatgcacgtgactttcaaaagagaagaatcagtgggggtcatcatggagactggctacagcatggtcatctagcagaagaatctgattgaacctggaggtagaaatgtggagatactcaacagtcacaaggcaagtcaaggacacctgacccagaaccattggctctggacaagtttaattctcgtacaawcaccacatttccacatggaatctcctatcagctaaagtttccatggcaaggagcaggataatcgtcagaattc

SEQ ID NO: 139374 - DNA, 566 bp, Homo sapiens
gcactgctaaataatcagtgttctgcactctcaagtctcaaccctggtactcatcccctaggtaaccacgagaagctacctcgccttgawgagtttcatgtcctgcttggtaagattggcaatggtcagataccaaactcagaggatacaaccagggttcaggctccttctccctgacagacaagctgtctgtgaccttgggtgaatcactgaatagggtctgagttcactgtctcacctgaaatagaaatactgacgcctgccctaccttccagagcgtcacaagggtccatgcgatgatgctggggccagtctttgtgaaccttgaagacacgtttatgaagtgaaggggttgataggtgatgggcaggtctttccagctaagatacgtttggatttgacagtgcaatacagtgaccttagttacaggaggatggccttgcagagtatccagcagccccagggcttctcatggctacttcccattccctgtagctgtagacggagggaaggctgagggttgctcatttgacaggcatcattatcttatttctcagctgatcaga

SEQ ID NO: 139375 - DNA, 376 bp, Homo sapiens
gtcatttttaagatctttcctgttttgggatgtgggaagttttctcagaggcaagtttgatactgaatgagacctaacagttgttttaaatatatccctggaccctcagtttcattcctgatgtttaatccgtaattagtgggagacaaaaactctaatamtgtcaaccaaatttgaactaccttttttgctgcaaatgtttcttgaggtgtacataaaaagtgtaaattaccatcctttaaaaaaagtctgaaaaacttcaaaatacatcttattacatggaagatgtgttggcagtttgggtcttacagcctccaaaataaagacctctgatggaaaacattacttaatttttgtcggtgaactcctggaattc

SEQ ID NO: 139376 - DNA, 515 bp, Homo sapiens
ggaattcatattcacaagggagtaagaccattcgatttccagaaacaagggtgtggctactcttgtctcccacttctcatgaagtgcaccctttgaattagaccaagaaaaaggggakcatgaagcagctttgtttcttccttagaaggagcaagtttgaagccataaagactctattttcgcactcaggaactaactgctagctcttttctagctagctggagtgagcgccagcactggggtatcctagcgtgaacaagaatgctattttggtctgttgtaaagcattgtggaatgcagattttagatcatttcatcacatctaccagcaaccacaaaacaaacgttatttcagaatgaagactatggatgtagaaatactaagagctaaataaaaagaagattatacagacatttttaaagtttaatgaatatgctcactaccaaagctttgctttaaaaagaaaaaacaaatacttatacgcagtgttgggtgtttatacagtttgataaag

SEQ ID NO: 139377 - DNA, 511 bp, Homo sapiens
atttccagaaacaagggtgtggctactcttgtctcccacttctcatgaagtgcaccctttgaattagaccaagaaaaaggggagcatgaagcagctttgtttcttccttagaaggagcaagtttgaagccataaagactctattttcgcactcaggaactaactgctagctcttttctagctagctggagtgagcgccagcactggggtatcctagcgtgaacaagaatgctattttggtctgttgtaaagcattgtggaatgcagattttagatcatttcatcacatctaccagcaaccacaaaacaaacgttatttcagaatgaagactatggatgtagaartactaagagctaaataaaaagaagattatacagacatttttaaagtttaatgaatatgctcactaccaaagctttgctttaaaaagaaaaaacaaatacttatacgcagtgttgggtgtttatacagtttgataaaggccaggtgtagaggaggcattgaagaattc

SEQ ID NO: 139378 - DNA, 511 bp, Homo sapiens
atttccagaaacaagggtgtggctactcttgtctcccacttctcatgaagtgcaccctttgaattagaccaagaaaaaggggagcatgaagcagctttgtttcttccttagaaggagcaagtttgaagccataaagactctattttcgcactcaggaactaactgctagctcttttctagctagctggagtgagcgccagcactggggtatcctagcgtgaacaagaatgctattttggtctgttgtaaagcattgtggaatgcagattttagatcatttcatcacatctaccagcaaccacaaaacaaacgttatttcagaatgaagactatggatgtagaaatactaagagctaaataaaaagaagattatasagacatttttaaagtttaatgaatatgctcactaccaaagctttgctttaaaaagaaaaaacaaatacttatacgcagtgttgggtgtttatacagtttgataaaggccaggtgtagaggaggcattgaagaattc

SEQ ID NO: 139379 - DNA, 377 bp, Homo sapiens
gaattccccaaacttgttaaaatggaaaaaaactgtttttttrttgtttgtttttttgagacagagtctcgctctatcacccaggcttgggtacagtggcatggtcttggcttactgcagcctctgcctcctgggttcaagcaattcccctgcctcagcctcctaagtagctacgcctggataatttatgcatttttagtagagatagggtttcaccatgttggctaaactggtctcaaatgcctgacctcaagtgatccacctgcctcagcctcccaaagtgctgggattacagacactagctcctacacccagctggaagaaaaatgttttaatttgggttatcttccttctatgtttccactggatttagaaat

SEQ ID NO: 139380 - DNA, 748 bp, Homo sapiens
gctgctatttactttggcttcagaccaaatccttcaygcaatgcctttggcggtcacagacgagaaagagccctgtgggccaggctggcaagccaggacatgctacaggtgaagacagacacgcttccattggaaaaaggaagaaactgaaacaaagctctaagtgccttgctgctatcctcaactactccggttgcaaggatttttaatatttcactcaaggtcacatacacaaccttgaattgctctgaacctactttctcccaactcttcttttcactaaatctcatcccaattctttccaaacctcattctctcatcattatcccatctgcatcttcaatctatacacccaatgtttcctccccctccttgtcttatttggattctgtaagacctaattcttacagggaccaggagggagggtcagccttttgcaaagtcagccttcaccagtcttctctttgcacatctaccatctacctaaactaagatctcttcctcctttgaggtttaggctgctcagatacaccatgttctttttgcctgccttgttgctgtcatctgttgacctcccatcagtcactaccatccttctttgggagttctggcatctcactcatagcctacctgccgtcaccaaggacaacttcaacactcattgaacatcctggactcagaattcctcaacttttacaaccccattatgcttcatccaagacagctgaataccatccatccaccggtg

SEQ ID NO: 139381 - DNA, 748 bp, Homo sapiens
gctgctatttactttggcttcagaccaaatccttcatgcaatgcctttggcggtcacagacgagaaagagccctgtgggccaggctggcaagccaggacatgctacaggtgaagacagacacgcttccattggaaaaaggaagaaactgaaacaaagctctaagtgccttgctgctatcctcaactactccggttgcaaggatttttaatatttcactcaaggtcacatacacaaccttgaattgctctgaacctactttctcccaactcttcttttcactaaatctcatcccaattctttccaaacctcattctctcatcattatcccatctgcatcttcaatctatacacccaatgtttcctccccctccttgtcttatttggattctgtaagacctaattcttacagggaccaggagggagggtcagccttttgcaaagtcagccttcaccagtcttctctttgcacatctaccatctacctaaactaagatctcttcctcctttgaggtttaggctgctcagatacaccatgttctttttgcctgccttgttgctgtcatctgttgacctcccatcagtcactaccatccttctttgggagttctggcatctcactcatagcctacctgcygtcaccaaggacaacttcaacactcattgaacatcctggactcagaattcctcaacttttacaaccccattatgcttcatccaagacagctgaataccatccatccaccggtg

SEQ ID NO: 139382 - DNA, 409 bp, Homo sapiens
gaatagggagaagctgctggtatccatcctggtttcctcattgatacaaagcaatagtggcaaaggaaaatttgctcaagaagctcctgttgtgtgtccacgattgttcctgaatggctcagagcctactgtctgcccctccttgattttctgtgatctacctaatattcttgaataaacccccttcctgattaaactaatcagaatggattctkttgttggcaactcagaaccttgaccattaaatacccagtcttatcagaataagggaattctaggatttcaggaactatagaccttgctacttcagcaaaagtaaactgctttatgtcttttaaaaagtgacctaacccttatatgttatcaagtaggccctgttttcctacaactgtacttttaaaaacttttc

SEQ ID NO: 139383 - DNA, 543 bp, Homo sapiens
actgagttgactgatcagattaggcagccgcctctaatcttctcaggcaggtcaaggctcatagagagcccagcatttgaggaaacataaatgtggtttttagtaygtatgctgttaaagtcccagcacataaacctccagaagtcacacttctccgaaaccagtcagatgtagaggcatctgaataatggctcttgtagggaaccctgttcctgcttcctgttcttcagctgcttggaaaacattgctggaacactgggatccactgagggagattcttccagaagtgtcctgtgtcccagactgtgacttttctaaccagcatggacacagttgaaatctaagctccactgcatctgctgctgccatgatagaaacactggcatagcatgtgctaggtaccaggccctggtctaaaccagtcacctatgctaaagcactttatcatcacagtgaccctggggggagggtggtcctttgaggggactgattcatggaggttaagtaagttggccaaggtcactcaggtggtaaagagtgtat

SEQ ID NO: 139384 - DNA, 528 bp, Homo sapiens
caagagcatgggaacaaccatctcctggaatggcccttccacaggaagagaggaggacacatggcacagaggaaggatggggcacctggattcaaaatctgcttacaccatccacggagcctgggatgttgaagaattagttttttctcttggaacttgctttccttacttgyaaaataaagttaatcctacaaacactacaaggccattgtgagggtcaaatgagaccaggcatggtaaagtatcttgtaaacagcaaattacgaaaaacaaatacaaacaaaacagaaaacgtaaaacaacaacaaaggtcttggttctaaaggacatgaaactttcatttgacccaatttagagatcattcattccttcaacaaataataattgaagccctgcgatgtgccataccttcacacattctaagaattattcctatttacacactttcaagaaacctatcatttccggttgggaaggacacccacagcatcccctctaccccggcccccattggaacccatggggatg

SEQ ID NO: 139385 - DNA, 559 bp, Homo sapiens
cactgatgtactttcccaccaatcatgcctgcgagtgagcatgctgacaagtaggactggcaacgctggtttcctattagagtaacctggagtgctctacaacaaaatgaaaacaaaaggaagtgaagctcacatactatctcaagaccaagtaaatctatgttaagaggtaaatctatatttaatgttataagaaacaaygactgttttttaatgttattttgcttttcctctagaaatacatgttccagtgtttcccatccttgacagcgtttcattttgtcactcttaattttagtcaatccacaggttatatagtgctatatcattatggttttaatttgcatgttcctactgactaatgatgtagagtatttcatgtatacatttaccactcatgtatcttttttcataaagtgttttctcccaacttttttttttttaattggaatacttgtcttccttttgtagaactatagaattttctatttattcttaatatacacatatatttgatgtattctggatataagtgctttgtaagatatatgttttgcaa

SEQ ID NO: 139386 - DNA, 573 bp, Homo sapiens
aatgactttttatatttactgaccagttgcatttttctttagactttagactggttgagattttttatccctctttttctctttgagaaatttgatttttcctgataggtttgcagtagctctttagacagtagttcccccttatccgagaaggtgcattccaggaccccaagtagatgccttaaaccacagatgtattggaccttatatattctgtttttttcttacaccacatacccttggtaaagtttagtttataaactaggcatggtaagagattaacaataataacraataataaaataacaagtatagtaatatgctgtaataaaaattatacaaatatggtctctcttcatctctctcaaaatatcttattatactatgcccacctatttccagaccacattttactatgggtaagtgaagccagataaagggggactacagtaggttactgatattattctttccctgccatttatgttacaaatgatttttccaagttattatgcatgtgtcagccttgtctgtggtggttgcaatgtggaacgtgttgaggggaaggccaca

SEQ ID NO: 139387 - DNA, 558 bp, Homo sapiens
aataccatcctttattcacaggacagaatgtgcatctattcttgacgccagtggacagaacatcctcagtttcctttgcaaaactatttgtaaggcgcatccatgatgagcycatcccatcctggtccatccattcttagagcttcttaggaatttggaatttccatgagacacagtgttgatttcctcaaaaattcttgttctcaagagtgaacatttggacactctcacctatctgggctttttcattctgcaaaggactttcctttttgtagattctttcttcaacacccctctaatagctggctacatgtagaatcaactcagactttgagtcagacagacctaggtttgagcccaagccctagcaccatctgatagtggatattttggtgaatcacttttcctgtctgagtctcacttttttaatctgtctaatggagatgcagtttaaggccattgtgagaaacatatgaaaaaacaaagaaaaaaatgtgaaactgttttataaaccttaaagtcccatataaatgtgaaaaaagaaaagtggctctatga

SEQ ID NO: 139388 - DNA, 537 bp, Homo sapiens
gatcaaaatcttgtggtcactggctggtcaatcaatttaaccataactgagactggaggagaaaaacgtcattgcagcacttcggagagaataataaattaataataaaataatgataataatgttagaaaaaatattgagtgaatattatgtgccaggctttatattactgagcgcatatgtaaggacttgcaaaacatctataaggtaaatataattattatacctgaagcactgaaaggttgggcagcttgwctatgttcagaaaactaataaatggccaaggcaggttttaaaccaaagccgcctggttccagagccactaggctcactacacaatatgatttcccaacaatgacccactcctaggtcacactacacaatactatttcccaactatgcttagtgttgtggttataaccccacagcaataaagatctcttctttcaaattctaggaaagcagaagatggtgatctttgtacattaatgcagagccctttttcttgatgttttccattgagatttttaaaaagga

SEQ ID NO: 139389 - DNA, 660 bp, Homo sapiens
ttagcagagggaggagagatcaagctaggctaaaagagacaggggagggaggctttctacaagaggtggtacttgggtgaactcttgcagactgggaagatcgagattagtaaaggtaagggaagagaagattctccacctgctgggggccrctcaagcaaaagctttgaggtgagactggcaagagtaagtgagatcagcagttcagcagagtagcaagtaggataacatattgcataatatgttggatttggggactattgacagttaggcagaagtacttggatctagatgtggaagtcaagagagagaaacaaatgagctgacaggtaagtagggcaattatctagtctagtttccactagatgatcaagtcacaagtagcctggttgcatggaatccatcaacatctctttgtcccatcaaccaaccacaacctgagactcaggcagcagtgtgtacagactgcattgcacagattaacaggctctggtcttcctcggtaggatcttgctttgaatatttcatctcagaaaggttcaactaatttatttcacagactgagaaactatgtgttagagaagcaaagtgatatagcactagtgatggagctgagatagaacccagatctcaataccctgactccaagtccaggattat

SEQ ID NO: 139390 - DNA, 575 bp, Homo sapiens
gtagtagctacatgccacctggcagttgtgaccatagctccatattatcaaatgtgctccatctctaatggagaacagtggagcctagagctgccacaaacacatgcacaaacgtacacatacgcacacacacatatgcacacacacacacacatacacacacactaggctgttctgggtagagtcaaggctgctgtgcccaagcttcactatattgtatagaaattggctggggccctaaagaggccagactgttcttgrgcaactcttatgtgccaggtcttgcagaataggaagaaatgtccagcaggctggacacatggctcaggggcatgtctaagtgcgggggaaacagaatttattggcttgtaactagcaactgcaagcaggagctcaaccagggacagcaggaagagtaagatgaaggaaggaccagagagagactcccagggaataccgatcttgggagaaagaaggcaggcctatagagattgggggaatcgtcagaggatgagagcactaagatgatagatgtcatgaaatctaaaagatgggaatggtcagtggtgtcaaat

SEQ ID NO: 139391 - DNA, 629 bp, Homo sapiens
gaattccagcagctgaggtgttagctgctcatctatgagctgatcactttggctttccaaaagatcacagcttcctcattaatatcrtagtaacaaatataatccttgcctgcctaataaactcagtgagggacaaatcagcacatggattaaaatgaaaagcactgcatgtaccaggctcacaattactatcataagtctcttctctgccagacttgccctactgagtcctttgtaggatctcattcttcctttagatgattagctttgaaagagagaagctgacccaaaagtcacttaaagtagcagcaattattatcagttcaggcatcactgtataggaacatatcatatattttatctgtcctagtctgcccagcccctcccagaaaccattaaaaatacctacccccctgcaggctcagcccactctgacctttttggctttataggactcccttaaatccctccagtgcactccagaattattctctactcccttagcagatattcattggggtgaacatcaccatggcacctgcattaccctaaggccacagcctccttatcttactcccattgtatggaactagtctctctgcctgcccagccttccagcaggtggccat

SEQ ID NO: 139392 - DNA, 567 bp, Homo sapiens
ttgtggcattttgttagggtggctctaraaaactaatacaatttggtagaaaatctgcaccccaaagctgtacaaagagagcagaaaggatgagaaagcggtttcctcccaactctcatcgcagtggtcaagtttcattccacagggagcaaatgcccacacacgctggggctgcatcctctgacgtctaggtggctgcacccaaagccatgacacagctcgtttgtgtggcatttcacccaggtctggaagtggaaagtcatgtaggtggcattgaccaacataatgaaggaggccgttgagagaatgtggaaatatgaacaaggtttgtttcctataatcactttcccactctgaatttcagttttcttataataatgacaacttcataatgttattgaaggcatcaaataaaatcatagtgtaaaagggttttataaaccataagctattcattggccaccaacattatctagaaccaggtaagctatttctcaggcttgcttcttggttttaagagtctaaggcagcttgtagagcctcaactgaattataatacactaaatt

SEQ ID NO: 139393 - DNA, 412 bp, Homo sapiens
caatttggtagaaaatctgcaccccaaagctgtacaaagagagcagaaaggatgagaaagcggtttcctcccaactctcatcgcagtggtcaagtttcattccacagggagcaaatgcccacacacgctggggctgcatcctctgacktctaggtggctgcacccaaagccatgacacagctcgtttgtgtggcatttcacccaggtctggaagtggaaagtcatgtaggtggcattgaccaacataatgaaggaggccgttgagagaatgtggaaatatgaacaaggtttgtttcctataatcactttcccactctgaatttcagttttcttataataatgacaacttcataatgttattgaaggcatcaaataaaatcatagtgtaaaagggttttataaaccataagct

SEQ ID NO: 139394 - DNA, 564 bp, Homo sapiens
cacaaagaaatgatcaatgtttgaggtggtagataccccacttaccttgattttattgtcacacatcatatgcttgcaacaaaaatcacatgaatcccataaatatgtacaattagtagtattcgtaataatttaaaaagttaagcaacaacaacctgactgctaattctagcaagttagaatagacagcaattttattaacagcataaaatattttttcaaatacttatagtgaacatcatgtttaatggtaaattattcgaagcaagaawaagataaaaatgcccactattaacatttcgacttaatatttcatttgaggtcttacacaaaaagcaagaaaaataaatgataaaaaaatttaagataagaaaactaaactgtcattattcataaacattttgattgttcatatagaaaagttaaaactgtagttaaattatgaaacctaataagataatttagcaagaaaataaaattgttatgcaaaagtgaattttatttctatatgctaacaggaaaagttagaagataccattttaaaaacataatttgtaaaaagca

SEQ ID NO: 139395 - DNA, 559 bp, Homo sapiens
agtttcataatcattactaaatagaatagtgcctagtttgccaaatttgaataaaaacagaaggacaaggccgtgttgcctaggtttataaagttccatgccattttcagattgtgcaattttgtctgaatattccatgtcagtgtaacctaacctctgttttagatcctggtgatgatcctgcacagttgacataattaccaccaccttcccaggtgccgaaattgagactgagagaaaaacaatcagcccccgattttacagctacagaatgctggagctggagcctagcgtcctgacccctctactgcacttacagatttctccggatcttgactacaatccaaagcaatcgtgctggaactaaggagagctgtagcctcatccatcagactgaatcttttacttttcttctggctgtttgcatgttataaacaaagctacgagttaytctttttttccaaggtggcacacagtaactgtggggagggtcagatgcttttcttggagtactgattccaaggaaataccttaatctcattgagtcaattcattagca

SEQ ID NO: 139396 - DNA, 491 bp, Homo sapiens
ccattcaaatggagactaaaagtgagtaggagtaactatatttttatcagataaaacagactttaagtcaaaaagcagtaaaaagagataaagaaggtcattatataatgataaaaggatgaattcagcaagaggatataacagttytaaacatagatgcacccaacatcagagtgctgagatatgtgaaacaaatattattagatccaaagagagagatagactctaatgcaataatagttgaggactttaccatcccactttcagtattaggcagatcatctagacaaaaattcaacaaacttcagatttaaactgcacgttagaccaaatggatctaaaagacatttacataacatttcattcaatggctacagaatacatattctcatcaacacacaaaacattctccagaatagaccgtatgttagaatacaaagcaagtcttaacaaaattttaaaaactcaaagtcataccaagtatcttctga

SEQ ID NO: 139397 - DNA, 285 bp, Homo sapiens
catctctcacctggatattactacaattgcttcctgttttccctgctcctacagtggcttgccaactccccaccaagcccccactcaccacatcctcagtctattcataacagagtggtcagctactcttttaaaaataggtccgactgtatccctcctctccttagttctctccaatggctccccatttcactcataktaaaagccaaagtccttcaacaggctggtaggactttttaaaatttttttatttttttattttattattattatactttaagttgg

SEQ ID NO: 139398 - DNA, 619 bp, Homo sapiens
atactatgaatagtcctccctagggaaagaagtaatatacaggctatattatggaaaaaaaaaaaaccaaaatacaaaaaaaaaaaaaaagaaaacaaaaatccctaactctttaaatatattgctgagcagacctggtattaaatacacacacacacacatgcacacacatatgcaaaatgaagtgacaccaggcaccctaggagataggaagtccagcctccatcctgagggctcccatcagatcctgaaatattgagcttccacactgagagttacataggtcatgcaggcagacagtaagcctaggaccaggccatgtaggaagaaatctaacaggagatttcccacacaaacctggaaactcaaagattttactgtcatgaaaggacaaaggtaraagagcaaggtgagggaaggtaaagaacaaggcagcatgctatttcaaagttcatgccaatcggaaggggataaatctttctcctgggaatttggaactacaaatgagccctgacatgggttttcattctgaattcccaatatgtatgaagtctaaaattaaaggaaaacagatttgtaatgcatataggcaaatagcagaagtaaaagcaaattccct

SEQ ID NO: 139399 - DNA, 514 bp, Homo sapiens
agaaaccaagatgtccttaagtaaatgaatagataaataaagagtagtacacccaaacaatagaatattatttagcactaaaaaatatgagcacacacacaaaaaatgaaaagacatggtggagcttaaaatgcatattattaagtgaaagaagccaatctgaaaagtctatatttcatacgatttcaactatatgacattctggaaaaaaactgtagaaagagtaaaaagatatctggggttaaagggatggggggatggatagrtggagcacgggaaatttttagggcagtgaaactattccatatgataccatgatggtagatacatgtcattatatatacaccaaacccacagaatgtacaccattaaaagtgaactcagatgtaaactatggtctcttggtgatgatggtgtgcaaatgtaggttgatcaattacaacaaacgtaccactctggggaggggagtgttgatattaggggaggctatgtatgtgtggggcagggggtatat

SEQ ID NO: 139400 - DNA, 544 bp, Homo sapiens
aactcactaattaactgtagaagaaagtttgtttgttattagtttgttckttcttcagattccttgagactttctatgtagacaatcatgtcaacttaaataagaatagttttatatcctttttatctgaatacattttgtttctttttcttgccttattgcaattgctagaaattctattatgttaaatgaaagtggtgaaagaatatgtccttgaatagttctcaaccttagggcaaaatctttccccactatgtgtgatgttaggtacaggtttttttgtaggtgctatttatcatgttatggaactttcttctatttctagtttacagagagttttattttgttttgattttttattatgaatagttgttggattttgtcaaatgctttttctgtctctatagatatgactgtaggatttttattcttttgcttatttatattatggattgcattgattttcaaatgtcaaagcagtcttgtatacctagaatcaatcccacttgtacatattttataattcttactatagcttgctaga

SEQ ID NO: 139401 - DNA, 604 bp, Homo sapiens
aatatttctcaaaagcatagatgtaataatcttagcaatatgaaacctagtaatgcatcaaaaaattacatagcacaacccagtgggatttatttcagatatgcaaggctagttcaatattcaaaaatccattcaagtatttcatcacatcagtgacctaataaagaaaaatcaagtgatcatatcaatagatacagaaaaagctttataagacaaatccaacaccattcatgaaaaaattattagcaaacaaagcatataagggaactttctcaacttggtgaaaagcatcttaataaaacctatagctaagaacgtacttaatagtgagaggctagatgctttctatctaaatgcaaaaacaaagcaaggatgtcttctaatcccattcctatatagcatcatactagaatttctagctagtgcaaaagacaggaaaaaaatatacaggataggaagggaaaaattaaattctgtttttttcacaggtcaaaattattatctgtattatcccaagaaattggcacaaaacaaktttagcaagtaaataaataaagaagtattggattgtagcccaaagtataaaataggtacctatgaatct

SEQ ID NO: 139402 - DNA, 509 bp, Homo sapiens
aaacatttattctgcttttccaggtttctcccctgcatgtgcgacttttcaagagaatattgcctctccatacatctcagcattccttttcttttaaagactctagcaacatcaaagttctattaatcatttagttaatctgtgatatggaggagtttgaatataattcatctgaacatcacaacctcaaattctaagccaagatcaggaaaagttctgaagccaaaataaagatttttgatttagccataatcactgtgacagaaaaacttaggtgaacacatcttaaggcaagaccgcatgcgtcattttggaacatttctcaaggccaagaggacagcatatgaactgtgaaggttgttattacccctctattttcaaccttagtgggtctttgtttctcttacaatctcacaacagtgtgtatgttacatggttagcagaaatacagtatggaaccattctackcatttaacttgatgtgaagcctttattaaggtgcctcatat

SEQ ID NO: 139403 - DNA, 376 bp, Homo sapiens
ctcataatgagtagacagcagtcatagaggttctatcagtctaacttatgtatgtcttttctcctgaggagagagtgaatggaataaaaaggaaaaacaatggtaagaaaacatccatttttgttgttgttgttatcatacaattttaaagttcctttccctttcctgcatacaaaaaaaggaaattacaaattagatacagcatgagaaaagtattttatgacatttacatagtgtttttaatgtctctgttttacagaaatatacataaaaatcattaatattttacaaccrttttagtaaagcattgaagccaaaggcaagtcctgtttcctatattcaccgacatcagagcaaaaagtattcctaaactgta

SEQ ID NO: 139404 - DNA, 546 bp, Homo sapiens
ctcatttttgatgcaggtaccaagaacatacaatggggaaagggcaaacccttcagtaaatcatgctgaaagaactgaatacccatatgcagaaaaatgaaactagacccgtatctctggccatatacagaaatcaaataaaaatggattaaatactaaatctaaaacctgaaacttacagaatggcgaggagaaaacattggggaaacattctaakacattggtctgggtaaagattttatgcctaagacctcacaagtacagacaaaccaaagcaaaaatggacaaatggggtcacataaagctaagaagcttctgtgcagcaaaagaaacaataaacaaagtgaaaggaaaacccacagaatgggagaaaatattagcaaactacccatctgacaaaggattgacaaccagaatatatgagaaactcaaacaactcaatagtaaaaagaccaaataatccaatttaaaaatgagcaaatgatctgaataggcatttctcaaaagaaggctacagatggccaacaggtatataaaaaagtgttt

SEQ ID NO: 139405 - DNA, 456 bp, Homo sapiens
tggctaaataaataattacaataaaatatattatatcttatgataytgatgtatgaaatttaatggaagaacctcgctgggtcctaaacaatttgagaaatgtttcccaggggaatagaaatctaaaagacttgaaggataaagggaacaaacatgtcaggcacagaaaaagatacactgagtcattgaagtgaggtgagtgcagcacatctgaaaacagcacttgatgaccaaagactctgggatgaggcactggcgtgtatgctgggcaaccagctatttgcttagatataaaaacagggaagacatgctgagaggggactatcatgagtctagtctgagcatgtgaagtttgagggctgtgatttatatagatcaatgtattcaagttgggaaattagtagattgctgtatatcagctctggaagccatgagtagttatggcatgaaagaaga

SEQ ID NO: 139406 - DNA, 429 bp, Homo sapiens
atattatatcttatgatattgatgtatgaaatttaatggaagaacctcgctgggtcctaaacaatttgagaaatgkttcccaggggaatagaaatctaaaagacttgaaggataaagggaacaaacatgtcaggcacagaaaaagatacactgagtcattgaagtgaggtgagtgcagcacatctgaaaacagcacttgatgaccaaagactctgggatgaggcactggcgtgtatgctgggcaaccagctatttgcttagatataaaaacagggaagacatgctgagaggggactatcatgagtctagtctgagcatgtgaagtttgagggctgtgatttatatagatcaatgtattcaagttgggaaattagtagattgctgtatatcagctctggaagccatgagtagttatggcatgaaagaaga

SEQ ID NO: 139407 - DNA, 416 bp, Homo sapiens
atgatattgatgtatgaaatttaatggaagaacctcgctgggtcctaaacaatttgagaaatgtttcccaggggaatagaaatctaaaagacttgaaggataaagggaacaaacatgtcaggcacagaaaaagatacactgagtcattgaagtgaggtgagtgcagcacatctgaaaacagcacttgatgaccaaagactctgggatgaggcactggcrtgtatgctgggcaaccagctatttgcttagatataaaaacagggaagacatgctgagaggggactatcatgagtctagtctgagcatgtgaagtttgagggctgtgatttatatagatcaatgtattcaagttgggaaattagtagattgctgtatatcagctctggaagccatgagtagttatggcatgaaagaag

SEQ ID NO: 139408 - DNA, 416 bp, Homo sapiens
atgatattgatgtatgaaatttaatggaagaacctcgctgggtcctaaacaatttgagaaatgtttcccaggggaatagaaatctaaaagacttgaaggataaagggaacaaacatgtcaggcacagaaaaagatacactgagtcattgaagtgaggtgagtgcagcacatctgaaaacagcacttgatgaccaaagactctgggatgaggcactggcgtgtatgctgggcaaccagctatttgcttagatataaaaacagggaagacatgctgaraggggactatcatgagtctagtctgagcatgtgaagtttgagggctgtgatttatatagatcaatgtattcaagttgggaaattagtagattgctgtatatcagctctggaagccatgagtagttatggcatgaaagaag

SEQ ID NO: 139409 - DNA, 345 bp, Homo sapiens
atattttagcgggttaaaaagaatacttactcgaaaagttgcagagtcacttgtataaaaatattgtgtcacaagagtcttactgactttcaaaataaaactgggcagaaccctaactcagaaacatttcaataatcagaaatattctcgtcatttaaaagcaataacatggcattcaaaaatatacacagcctgtaatcccagcactttgggaagctgaagtgagaggactgctttaggccaggagtttgaggctagcctgggcaataaagaaaggccctgtctcttaaaaaaaaawaataataataataattaataataataatattaaaacttagccaggtg

SEQ ID NO: 139410 - DNA, 522 bp, Homo sapiens
tgtgtgcatagtggtgttcgtaattgtctctaagaatcctttgtatgtctgtgggatccattgtaatgtcatctttgttgcttctcattgtgcttatttggatcttctttttttctttattattctagctaacagtctgtcaatcttgtttttgttttcaaagaaccaacttttgatttccccaggctggtgtggtggctcatacttgtaatcctagcactttgggaggctgaggtaggcagattacttgagcccaggagtttgggaccaacctaagcaatatggtgaaactccatctctacaaaaaaaaaagcaaaaaacaaaaaaaactagccgagcrcagtggcgtgtgcctggagtgccaactactcaggaggctgaggcagcaggatgacctgagcccagagaggtcccggacaacaaagtgagaccctgtttcaaaaaacaaaacaaaagaaaatccacaaaaaagccaacagaagtgtggcgcagtaatagttatttatttaaatcttcccctgt

SEQ ID NO: 139411 - DNA, 424 bp, Homo sapiens
agcctggcctcactctccacctccagctcagcactcaggcctggcaggccaccggctgcagaaagatcctcctccccttccccacccaagcagttgtgtttcccagcaaaaaatcggaccctcagctgctaccgcagccacatgatccactcagtgactcacaggcaggccacaccccttcaggcctcccggccaggctctgctcccagccagctaactctgggatgcatcttattaccaaagggaacaactagctaactaatgcccttgacagtccaaataattactttctttcattagaagaacttgcttataaaatatataygggctgagaggacgcaggctcttctgaactctggctctgccagctctccaagtcctcccccaccatgccaagacctggggaatggcagacatggttagc

SEQ ID NO: 139412 - DNA, 576 bp, Homo sapiens
aggccgcggaggccgaggaacaggaggaggcggaggaggagcaggacgaggccgaagagcaggagggcggcggcggcgtgcgcgacgtggggctgtcgagcagcagcggcgactcgaggccgcccgggggctgatggtggcccgacgggaagcccgagaagctgaggctgtggtgcarcttgggccgcggctcccgcgggaagcccaggtgcaacgcatcgcgcgtgccaaaggcacgcaggtccccggagggccccccgacggcgcgggccgccgctcgtccgcgttgtggatgaagtggcagcgcggcccataggggcagaagccgatggtatgaaaggtgcggcacagctcggtcttgtacttcggatggcgagtcaggctgcgcagctcgtggaagccatgcgcgaactggcacttttcgccgtacttgcacgtgccgctctcctcgaagggccggcacagctcggtcttgtagcgcgtggagttgatctgggagccgccgccccccttctgctgctgctgcaggtgcaggaggtgctggctgcgatcgccgttctcgctaaacgagcggtc

SEQ ID NO: 139413 - DNA, 424 bp, Homo sapiens
tggctttgctctcatggagctccaactgggtggggaccacaggaaccatattcccctattccatctcagtacccagagtgagagggtctctaggtggaacagaaggttggaggcaggaatgtccaatacytcagcataagctactgcagcagctaacaaagaaatgctgcttttctcttgcacagtggttctcagcccagaaagcacattacattaatctgagagctttagaaaaatactcatgtcaggggacacttgaccacatctctggggtgaaacctagcagtctagttttaaagtgacctaggtacagcagggattgacggctactgttttagtggtacagtctgtttcccactgcaggtagagttcgtcaaagggttttcacaatcgggatttttccctggtgcaacaacgtttgtgt

SEQ ID NO: 139414 - DNA, 467 bp, Homo sapiens
tgtgggatgcagcaatagcagtactaacaggaaaatttatagtggtaaacacctacattaagaaagaacaaagcttgcaaataaacaaactaactttacacctcaagaagctagaagtagacaaacaaattaaatccaaaattagaagaaaaaatgaaataataaagataagagcagaaagaaataaaatagagaatagaataacaataggaaaatttaaaaaagtttgttttttgagaagatcaacaaaattgacaagctcatagctagagtaagaaaaaacagagaagactcaaccaatttaaatcagaaatgaaagagacattacaactgatactgcagaaataaaatgatagtaagagaytactatgaacaattatatgacaacaaaactggataacctagaagaaatgaataaattcctagaaaaatataacagaccaagactgaagcatgatgtaatagta

SEQ ID NO: 139415 - DNA, 477 bp, Homo sapiens
tactattaaaagagtttagaataaaaaagaaaaaggcaaggaccattgcttggtaagatcctcacaaaatgcccactctgtgatgtactggtgccacccttggaggtctttcttttagtatgaagatatctgaggacagctagcactccacagccagaagctactgactgccagcaaatttacagctgctccctggagctggctttcgggacttctcaatgctccaggaagggctgagcagaaagcctgttctccccagagatttccagcaaggatgtgaagtgcacacgggggctctgagtctcckcttggctgtgtggggagcatgttttgtaacctgatgagcccagaggttgagcaaggccagcaggttgcaaaaggaaatcaataatgatgttttctgttggttaaagataattaccaaaatgagtagggtgacatctctcaaaatgaatacagtgacagtgaaaaaactgg

SEQ ID NO: 139416 - DNA, 590 bp, Homo sapiens
caatcttattgattttctgaaagaaataactttgctttcagggttgtatattggttctactttgcattgcagtgtctagttgcatggcaactgatgaatctgtttctgaagttagagggttagagaagttagcaggctctcttctcctctcagaggtaccagtaaggttttgcatctcagtttctgatggtatccctctcattattttgtgtgccttcttttgaagaacttggaacaaattctttttgagctgggtctcaaggaaatatgagcggtattacacacaaaaaaacttagtccacacaagctctccctcacgtctgacatcaattgmaaatttaaaagggtccctaatagcactctcaggttcaataatttcttagagagattcacaaaactcactaaaaggctgttatactcatggttacagtttattacagggaaagggtatagataaaaatcagccaggaagaagcacgccaggcagagtccaggaggaagtggaatgtggagcttctgttgccttctctgtgtgtagtcaggatgcattcatcctccaccatcaatgtgtgataacgttcatagaagat

SEQ ID NO: 139417 - DNA, 658 bp, Homo sapiens
gtcatcacaaatttaccatcaagaatgtcttcactaactgaccaaaacatgaatttctagaaaagtattaacacattactttctcaagaataaaataaatactaaatacttcataaaactgtttaaatttaccttgaaattatattatacaagaatacttcttcaaagtaaaagttgacattcaaacactataaatgtcaaaggaaaaagaaacttttgattttatgaagatctaagctataaaatgtaaagctggccaattattatagtcactctttattaaaaagaaaaaaaactataatgcttcattttaaaaacagctgaatttatagtaatttgaaataaattgtgctataattatttaagatttaaatacttggccataaatggaaattgtaagtggtgataaatttgtcattagcagatggtcctattcttgtttatcacaggctgtgattttgccttaagcatataaggaagctgtgtcagagtaattaaaaatatgtagaccattgctaagagaaaaaagttttctctcacacacatamaatatccttatttctaatttttgtaagttttttcttttgatttccttagctatcaccgcttagaatgactcatcctaatgctgaagaaaaatctgtaccttgctaaatgg

SEQ ID NO: 139418 - DNA, 475 bp, Homo sapiens
cacttagaatttcatatactgtaataatgacattggagaatcttccattttgcatattgcaatgacacacagaggtagattttttgttattaaacattcctygcatttctaaatttttgtggatataatttatatatttaattatgaaataccctttaagaataacttacaattcaagttcaagtactatgtgaaacgcaggtttgtcagtgtccagcatttaggttaggggtatagaattaacaacaagtgggccgggcgcggtggctcatgcctgtaatcccagcactttgggaggctgagaggggtggataatgaggtcaagagatcgagaccatgctggccaatgtggtgaaaccccgtctctactaaaaatacaaaaattagccaggcgtggtggcaggtgcctgtagtcccagctactcgggaggctgaggcaggagaatcacttgaaactgggaggcggaggttgcag

SEQ ID NO: 139419 - DNA, 520 bp, Homo sapiens
gctcttgactttcgtacagcttcagccttttcatgaaacataactcagatgatcttcttctgaattagtgaaccctgatgttagttatataaccaggggaccacggtgtcagccttgttattttaagggtcttttccagtctgcaagacccaaccaatttccttcacctttcacatgtggacttctcattgttactaaamtaaccatcccttcctgctcatctctacacatactttaggacttattgatttcatggacgttcatttgtctcacaaacttggtgatatagaaactgcattttctgctttggtgcaccccttagagagcctagtgtggttcagacaaacctgatgagatgcacaacttggaggtctcgattttctcatctgtaaaactgggcaagttgttataaggattgtgatactatacaggaaagtgctaaataccgcaggcacagatgaaaggaaatctttccctctcctggcacaatgctacggatgcaaacaaacacattgtttta

SEQ ID NO: 139420 - DNA, 520 bp, Homo sapiens
gctcttgactttcgtacagcttcagccttttcatgaaacataactcagatgatcttcttctgaattagtgaaccctgatgttagttatataaccaggggaccacggtgtcagccttgttattttaagggtcttttccagtctgcaagacccaaccaatttccttcacctttcacatgtggacttctcattgttactaaactaaccatcccttcctgctcatctctacacatactttaggacttattgatttcatggacgttcatttgtctcacaaacttggtgatatagaaactgcattttctgctttggtgcaccccttagagagcctagtgtggttcagacaaacctgatgagatgcacaacttggaggtctcgattttctcatctgtaaaactgggcaagttgttataaggattgtgatactatacaggaaagtgctaaataccgcaggcacagatgaaaggaaatctttccctctcctggcacaatgctayggatgcaaacaaacacattgtttta

SEQ ID NO: 139421 - DNA, 443 bp, Homo sapiens
attcctcttcatgtattgcgatggggttgttataaagatactcacacctttaaatcttcccagtagcacgtatatttctgctttcaaacacaacaaccaagaaaaaagaaaattctactgaaacaactgaccaatcttctttccttagaaaaatcaatctcatcagtagctcatgaaattcaatttccctggtcaggaacaaagcagataatcatcccctaataatatttatggatgayagaaatgcagagcaaataaaattagcctctaaaactatcatcaagttccttgaaacttttttctttatctcaaggggatttatggagtaatggtaagtgtgtttttctccatttctatttaggccaacacacatcagaggcactcaatagatatctggtgaatgaatgaggagtgagtaaatgaataaagtaaaatacagatga

SEQ ID NO: 139422 - DNA, 594 bp, Homo sapiens
cacttaggagaacaacataaatgctgttgctgtaacctttgcagacgtggggactgtttgctcacaacattatcacggttaaggaaakaagctggttaataaaacatctttttgtaaactcaaacaaaattattgactaaggaagtggtcatcaataaatgataaaactattaggtgagaggttgatgggaaattgagtctttacatggtgtcagactgtaactccacagtttcttgccaggcagagagaacagacataacatcaatggagagatcaagctttcactaccttagtacagtgagtcactaattatgtgacaaccagacaccataatacagcatatgatgacacatcaacttctcagcatgacctatgaagtgtttttgccaaaagtgattaacctgaaattagcagagtcctaggtcccaactctccctttacaggaaatacaaggcatagagatagaaattaaataccaccagttaacatcagaaaaattcatcaagcacacgttctataagacaactgactggttacttcaacaagtcaatgttacaaaaagaaaaagtgacaaaggagtggaaaaaaccata

SEQ ID NO: 139423 - DNA, 588 bp, Homo sapiens
gagaacaacataaatgctgttgctgtaacctttgcagacgtggggactgtttgctcacaacattatcacggttaaggaaataagctggttaataaaacatctttttgtaaactcaaacaaaattattgactaaggaagtggtcatcaataaatgataaaactattaggtgagaggttgatgggaaattgagtctttacatggtgtcagactgtaactccacagtttcttgccaggcagagagaacagacataacatcaatggagagatcaagctttcactaccttagtacagtgagtcactaattatgtgacaaccagacaccataatacagcatatgatgacacatcaacttctcagcatgacctatgaagtgtttttgccaaaagtgattaacctgaaattagcagagtcctaggtcccaactctccctttacaggaaatacaaggsatagagatagaaattaaataccaccagttaacatcagaaaaattcatcaagcacacgttctataagacaactgactggttacttcaacaagtcaatgttacaaaaagaaaaagtgacaaaggagtggaaaaaaccatat

SEQ ID NO: 139424 - DNA, 375 bp, Homo sapiens
aagctggagttttaaaagaggaaagatacctgaagaccatgggaaagaacaatggttttaggtttgggggtttctgtgaataatacccaatgtctttctcaccagaggaggaaaagctttggtgggaaatgatgagaccacaacccactggtgaaagagttctaggttcatagtagacastaagaaaatggagtcgcctgcttggaaatcgccatatgccctggagaagcccaaaagggttcaggaaacgggcacgtcaatgagtggctggcatgatagacgtccttccacctttctcaggtaagcagtaggtgcttctgttatcacagggacagggagaagcagaaaggagaaaggagactgatttagttctat

SEQ ID NO: 139425 - DNA, 375 bp, Homo sapiens
aagctggagttttaaaagaggaaagatacctgaagaccatgggaaagaacaatggttttaggtttgggggtttctgtgaataatacccaatgtctttctcaccagaggaggaaaagctttggtgggaaatgatgagaccacaacccactggtgaaagagttctaggttcatagtagacactaagaaaatggagtcgcctgcttggaaatcgccatatgccctggagaagcccaaaagggttcaggaaacgggcacgtcmatgagtggctggcatgatagacgtccttccacctttctcaggtaagcagtaggtgcttctgttatcacagggacagggagaagcagaaaggagaaaggagactgatttagttctat

SEQ ID NO: 139426 - DNA, 539 bp, Homo sapiens
tgagagcagaccacagggaaggaaaacttgtagttggagagtctatgcacagtagagattctagaaatactacttcttgcagaatgaacacgtaagacaaactatggaactcagaaatctcagcatctataaagcccatgtcagttgtaaagacccattaaaatggaagattattcttataatctgagatgcagggctaattaagagtccaggttcatccycacctcatggcgttctgcatcttaccttcacctggggattctcacggggctgccacttcaggtcacagagacgaaacagaagtaaaaactgggtcacttcagcccagtttttaacttccctggctgcctatgctaaggcaatcctgctgtccttaccagataatgctgaccacattcctttggattattgtgttcacgatgaatatcacagtcttatatcagcttatttatttactcttctgtgtattgttgaacactgtccactgaatgataagtggctgaggactgaggttgtgtctgacttgtgcaatgcccctc

SEQ ID NO: 139427 - DNA, 291 bp, Homo sapiens
ccactctggtgctgtaatgaaccaaygtttggcattagggaaatcagtcacataatttttgatgcttctgagtatgaagatactgatgccatgataatgccagggcagaatttaagaggttggagggatcttacaaatctaacctaaatttctaaattttgtacagaagaaatctgcctcagctccagaggaaaacttgtccaaggacacatgtttggttgaggaagagctgggatgaagacccaggactctagaccacctgcctggtgttcttcctgctgtgtgtgactc

SEQ ID NO: 139428 - DNA, 482 bp, Homo sapiens
gggctagagtgattcagaaatgatctatgccatcattattcctcatttctggtacttgaattgcatctactttccccaacaggcttgatttattaagtaaataacaatatgtttcgataatgtatatctattgagacgtcattagctgcccagaagatgctattctgaytttaaataattgaaacataccagtgatggagtccaatggacttgagatgattgggttataaatatttactaaagcctagtggtgggaggaagatactttcagaatagactggaaatgaagagagacattcaaatgatggtaagtgttcttcataaaagtctaaagatttagaggtttattctctcaaaatagaaaaggtagcatagagtggaaggtgagcagatttgtttattttcttagaatctgaaacagaatttcctccaactttcagctgactgcctttaaaaaagtacctgtaatattggttgaattc

SEQ ID NO: 139429 - DNA, 481 bp, Homo sapiens
ctatagaagcctttctccctctatgatattcagattcttcaagctgaccagattgcttcaagaacaaatagctgatgcacagaagcccctgcgccatgcatggcaaggcctccaggttcctcagagggtgaccactctttcagttcactgtcaaggcwcagaatgcagatgacccatctcttagggtttgcagcccttctggaatatagcccctaccatgactttcaaaagtttcataggtacagctccccattttgaacatctatccaatgccttataagtggaggacaaagctactcagtaatgggtgtgtttctcccccaaggtcaaagttgtgtcccagacatatgtacagtacttacctttagtttttcccaccttaggatgaccttcttcccttcacagcagggtatattctcactccaagtcagagggcagtactgattttccctctctctttaaaggatctgaattttggaat

SEQ ID NO: 139430 - DNA, 394 bp, Homo sapiens
cctgcctcagcctcctgactagctaggattacaggcatgcaccaccactcccagctaatttttgtatttttagtagacacggggttttgccatgttggccaacctggtctgaaactcctgtatggttatctgcctgcctccacctcccaaaatgctgggattacaggcatgagccaccacaccccgcccacaatatatatatattttttaaaaacttctgtctttcattctcctggctgaaggttaaacaagatgaatgataaaamctagacaataaaaaatgataattacttttgtttgagaacaaatcctctcttgtttaataagtacttagtattctcaacatttagtccatttgagcaacttttgcactcttgatctcaatcctgtaccc

SEQ ID NO: 139431 - DNA, 559 bp, Homo sapiens
ggatgaaattgagacataaaggttaaggcakgtcatagctgtatggggctagaactggatttcaacacaggcttgtgtgaccccaaaaacagtgctcattccataccaccatacttccttacctctgaatactcacactggggaaaaggaagcataatgattatgtataagctctgcatggtattatactacttcccttaaaattagaaagaaatatggttggtcataaagagaaaccactgacagtgagcccaagggaagttgtggactcttccatttgatgtctttaaagcataaagaattcagttgtttagcttcatgtttcctgaaggtagagaagtggaaatgacaaccccctccctccatgtctttctcaggccaaaaattccatttaacattgcccccaactaaatacctgtctcccttctgaaggacttgctgcagtcagctttgccggcctataggtgcaaacatctggaaggcaggtgtttgattttgtgggtgccagaggacacacagctgagcggcacagctgaggggcagggaggaaatgtcttac

SEQ ID NO: 139432 - DNA, 559 bp, Homo sapiens
ggatgaaattgagacataaaggttaaggcatgtcatagctgtatggggctagaactggatttcaacacaggcttgtgtgaccccaaaaacagtgctcattccataccaccatacttccttacctctgaatactcacactggggaaaaggaagcataatgattatgtataagctctgcatggtattatactacttcccttaaaattagaaagaaatatggttggtcataaagagaaaccactgacagtgagcccaagggaagttgtggactcttccatttgatgtctttaaagcataaagaattcagttgtttagcttcatgtttcctraaggtagagaagtggaaatgacaaccccctccctccatgtctttctcaggccaaaaattccatttaacattgcccccaactaaatacctgtctcccttctgaaggacttgctgcagtcagctttgccggcctataggtgcaaacatctggaaggcaggtgtttgattttgtgggtgccagaggacacacagctgagcggcacagctgaggggcagggaggaaatgtcttac

SEQ ID NO: 139433 - DNA, 586 bp, Homo sapiens
ttctcagcaattccatcacctactaaccaattcccctygtcacattctctttgttataaatatttcatgtgactctgtttccttggttggaccctggtggatacaattcctttcctccctttccgaaaagttactcctcaactccaaactcctgtgcttccccactctctgagccccctttgctttcaccaaccagctcctttggaaaacaaaatccccattctccacctgattcccagccctgtttgctcttttaggcaaaatggaacagactcaggtctaacacgtggtgattccctgtggtcagcaaaggagtcattatggcatgaggtgggagagtggccgctggcacctgagaaaggccccacacacttcttatttgtctcagcccctaaaggctgagcaggttgaggagggagccttttaaaagtcttaaaacaaaaacaactctgatttattctgattcttctgcaatggcaagaacaatacaaattaatatgtcaacaaatgatcctgccaagcttaggaccctggaaaaacacacagagcctctgagggtcctgctcttgccagtggagtctcaagt

SEQ ID NO: 139434 - DNA, 469 bp, Homo sapiens
ttaataaaaagaccattgaaaaagatgtgagcaaagtgtagggaaattgcaaggggcggtgtgatattccaaggctgttgacaatgaggctccattatgaccccgggggttgaaggagtaaggtaagctagcggttattagaccccagagagaacatgggagaggatcctctaccaggagctttgaccttgagtctaggaacacagttgattcctggcaacccctcggagaggtcaytgggagaataaatacccagatcactctcctactaccttctgatctcctgctgggctcccattagctaggccaatgggaaaccagaggacatgagaactcactgatgtggtccatagaggtgagactccaggacgaaaaacagagtgaagaagggtggagaatggacctgcagagctaaacacgagctatccagcacaacttctatgtactatctcactcagtcttcacaatt

SEQ ID NO: 139435 - DNA, 601 bp, Homo sapiens
cctccattgaataataagtgttatttgaagacttcctggggaatggaaaatcgcactgcctgcctgtgacagctgagtctggggaggagaggaaatcaaatgagggtcaagtggaataaacaatatttcaatgttaacaccattgggtcaataacaggttattagtgaccatcagatctgatcgtcattttgcagagaaggaaattgaagcatagcaaagggaagggagatcatggctcagaaagcattgccagagcacaaaacaccaacaagaaagaaagaatggatgaaacyaagggattatgaattcctgctctctgccatttggggcacaggatgaggcggtaggtatatcaagggctcgatatgaacctgagatggaagttcctggagaagacgggatgagttcaggacaaaaggagccataagtggcagactggcagcctctgctgcagggcgtgagtgtagctgggcaagagaaagaagggaacgatgggtaaatggggcagcctctttggggagaagagcccttgggaaggagacgtgatgggcagaaggaaaggagggtgattcttaaagataactacctatcacggtgcct

SEQ ID NO: 139436 - DNA, 601 bp, Homo sapiens
cctccattgaataataagtgttatttgaagacttcctggggaatggaaaatcgcactgcctgcctgtgacagctgagtctggggaggagaggaaatcaaatgagggtcaagtggaataaacaatatttcaatgttaacaccattgggtcaataacaggttattagtgaccatcagatctgatcgtcattttgcagagaaggaaattgaagcatagcaaagggaagggagatcatggctcagaaagcattgccagagcacaaaacaccaacaagaaagaaagaatggatgaaaccaagggattatgaatycctgctctctgccatttggggcacaggatgaggcggtaggtatatcaagggctcgatatgaacctgagatggaagttcctggagaagacgggatgagttcaggacaaaaggagccataagtggcagactggcagcctctgctgcagggcgtgagtgtagctgggcaagagaaagaagggaacgatgggtaaatggggcagcctctttggggagaagagcccttgggaaggagacgtgatgggcagaaggaaaggagggtgattcttaaagataactacctatcacggtgcct

SEQ ID NO: 139437 - DNA, 495 bp, Homo sapiens
tccacaccacccactcgactgtcctgcaaggctgcagtgtgacgatgtcaacaacaatgatggcaatggcatctttgcgactctctcccttgcctcctccaaatctttgctcaaatatcatcttctcagtgaggctaccctgcccaccctattaaaattttgatctgtccacatcacagcaatccctgtcctccttaccctgctccattctttaggcttttttctcatgtgtgccaaccatgagaacgcactgtacagaccttcaactccaggtcacatagttgaccaagggcctcagctgctatgctgtgaaacccatcactgyatcggagctgctaccccacctccccagggcagttgctggccaaagactaaggccatcatagagacatgggactcctggtgtccagcttttgcttgaggactgactccccctcatggcttcagcaagccagggctcctccacccaaccttctctctctctcctcactcaag

SEQ ID NO: 139438 - DNA, 510 bp, Homo sapiens
gctcctcgggaggctgaggcacgagaatctcttgaacccaggaggcagaggttgcagtgagctgagatcatgccattgtgctccagcctgggtgacagagcaagactctgtctcaaaaaaaaaaaaaaaaaaaaaaaaaaaagataatttgattccagaacagaaagccctatcttccacctgctttggaggctggagtgatgtggctaatgtagaaaagagatgaggactggaaatatacagcccagtgtgaccactgtagcctcatggctgcagacagcaggagatcagatggaggatggggtgaatgaggcaattgttttccaacatctcaagttgaaattatgaccctggtgagarccatatatgtactcatactttatgggtacaatgatacttttatttattttaatgagattttctttttctctccttctctcaaaacatttgactaagtttgtataaagaagtagggttaatttattttgagtgaggacaaggaatccagca

SEQ ID NO: 139439 - DNA, 498 bp, Homo sapiens
aacagttttactcccagacatatacccaggagaaatgaaaatttatgtagaagaaagacttttctgggaaagcaggtttattagtaaaagccccaaactggaaacaccccaaatgtctatcaacaggagatcagataaataagttatagtatattaataacatggagtactattcagcaataaaaagttactgatacaacatagatgactctcaaaaacattctmttgtgtgaaagacggtagtcacaacagttcatgttgggtgattctgttatatgaagtttgagagcaggaaaaattagtctatggtggtaaacattagaaatatcataatttcaggggaggagttgggatactgttgactgggaaaggaaaagtatgaactgttccatttatctattgttatgtgacaaactaccctaaaacttggtggctaaaaacaacaaccagcacattctacccctcaattttgtgagtcaggtgttcagacagggcttg

SEQ ID NO: 139440 - DNA, 498 bp, Homo sapiens
aacagttttactcccagacatatacccaggagaaatgaaaatttatgtagaagaaagacttttctgggaaagcaggtttattagtaaaagccccaaactggaaacaccccaaatgtctatcaacaggagatcagataaataagttatagtatattaataacatggagtactattcagcaataaaaagttactgatacaacatagatgactctcaaaaacattctattgtgtgaaagacggyagtcacaacagttcatgttgggtgattctgttatatgaagtttgagagcaggaaaaattagtctatggtggtaaacattagaaatatcataatttcaggggaggagttgggatactgttgactgggaaaggaaaagtatgaactgttccatttatctattgttatgtgacaaactaccctaaaacttggtggctaaaaacaacaaccagcacattctacccctcaattttgtgagtcaggtgttcagacagggcttg

SEQ ID NO: 139441 - DNA, 418 bp, Homo sapiens
tgagacaggtgctcgtggtgatcttgtttattacagtcagcattctaatctgcaatgtagtggctcaaatgtcttcagtttaggggaccaatgaatgaaaactttaagactgaggttgatagtacgtgatgcagcccccatctacctgcacttcctatacctataactcatgctccgaaatgaatgcagattcartcaagtgaggagtggacataagggtcaagaggacttggcaacgatttcgttaattctttctggctttgtcacttctcactatgggctctaagttctagttagtctcatcagttttccattcattgaatgcaccatgttattctacacttttggtataagctgctccttttgcctggaatactcttcccttggaatgccttcttcgttttaagacttgttccaa

SEQ ID NO: 139442 - DNA, 553 bp, Homo sapiens
ttaaaatatttggttgattttagtccaataatgtaatgtttttagaaagacaggttattggtctggattcagctgatttttttttctatcctagcataaaaagatttttaaaaatccagcaattacaaaaaaaatttgcaaaatgccctctgtgaattggttcctcctaagtgggtcttctgtaggtgggagctctgaggtgcaactaagatgagcagaaagggcaggagaagaaggggagacagaggctgatgtaggatttttatatcactagaaagttttgtggcttccatgccatttctgggacataattggaaactgcytaaaatgtgcagggaaagaggaggaaggggctgtgaagctccccttccctagagaccctaaaagcaagtaggtccaccggtatcccttgggtttcttagtcatcctgtctggaggcagagggaaggatgaaatgacctctggagggcatattaatgcaaatgggaagatgaaccaacccatctggctgagtagtaagatcacctgtgagagtggaaacgtttgcaagttg

SEQ ID NO: 139443 - DNA, 565 bp, Homo sapiens
aaaacatttttgagggcccctagaaatattgtggcttctaggcactgcactgtgcctcatggagaagtacgccctgcgtgctggaagtgatgggcagtcctaagagtcttgtcctgggaactcctctggacccagcaacctctgctgccacctgacctagagcccaaccccactccttcagccgagcagccctaaggtaagggaaaaccaggattgcctctgccctcttactccaccccttccaccttctctcaaagtccttccaagcctcgtagacaatcagcaaaagaaagtcacccctctaggcccttttaaagaccatttaggccccctctgcctccccagcacaagctctttgatttcatctccttctcttccctgtttggaaacagctgacttttaggaactgcartgaccagggcaactcaccccacttcccaggaaagtccctctttccttctctcagagaaagattggaggctgctctgggattagtgctgccggctccctccccgaaggctttgtaccctgcagcagtgggctcccagggcctccatagggagaa

SEQ ID NO: 139444 - DNA, 364 bp, Homo sapiens
gttccagtgttttggctattaagaataaaacttctgtgaacgtttacatacrgagcttattgtggacaaatgcgtggatttctcatgggtaaatacctagaaatgggctggtggggtcatatggtaggtgtatgttaaaattttagtgaaaggtaaaagatttatgcaatctgaagaaaaaccagagtatgctgtttaacttaaaaaaaaaatcctgtcacttcttggaagtggttgtatcatttctcatttccaccaacaatgcatgaaggttccagttgctccatatcctcactaacatttggtattgtcagtctttttaattttaaacattctgctgagtgtgttaagaatcttatcacaa

SEQ ID NO: 139445 - DNA, 364 bp, Homo sapiens
gttccagtgttttggctattaagaataaaacttctgtgaacgtttacatacagagcttattgtggacaaatgcrtggatttctcatgggtaaatacctagaaatgggctggtggggtcatatggtaggtgtatgttaaaattttagtgaaaggtaaaagatttatgcaatctgaagaaaaaccagagtatgctgtttaacttaaaaaaaaaatcctgtcacttcttggaagtggttgtatcatttctcatttccaccaacaatgcatgaaggttccagttgctccatatcctcactaacatttggtattgtcagtctttttaattttaaacattctgctgagtgtgttaagaatcttatcacaa

SEQ ID NO: 139446 - DNA, 526 bp, Homo sapiens
aacattgttcattaatcctagaagtcttagtgctggggctccaggatcgtttacattgtagggtacaacccttcccctggcccctctaggcagatgggttttattatgagccatagaaacaatagagacctatatgacaatcatgataaagggtgtgtatggggtgggtacaggatgtgcaggaaaaggggatgaggtctttcatttttctgaggcaaataaatgactgccacacctccatggacacagataaaatgttctaatgggaaattgcatgttggatctattttgcctttcattcatttattcatttgtccagctatccatccatccatccttccatccatccatccatccttccatccatccatgcatgcatacatgcactgcatgcctagtgcctgaatggtatggaattgtgacacgccatgatgaaaaatttggagttaatccaagagttastgaggaaacattgaaggttcttggttgagggagtgacaaaatgcaggaagtgattcagggagag

SEQ ID NO: 139447 - DNA, 400 bp, Homo sapiens
aatgcttattgtttccaaaaaattgaaatacattttgtacataaagtgttgaacccaatgcctagtttaataattggagtctttataattactttatgattaatcatccaggtgtcatctcgtagctctcaccactttctmtaggacatttattaagcgcttactactcactattggattaggcactgagactgtgaagacaaaacagacacaactcctgacctcaaggagcaaataatcgaatgcaaacaatggggtgtggagaccacaaggagacatactggctgtggtcctatatttgaaggctgtcacatggacagaggggtaagtttgtttcacaggctctggaggtgaagagccactctggtggtgaaagtcagggcagtttcagctgctggca

SEQ ID NO: 139448 - DNA, 594 bp, Homo sapiens
aagcttgcaatgccttttttcctacaaattcccactctctaaaaggattgtctcatttatcactattgtctggattctccaaatgcaatccatgcaatggaggaaaacaagcccaacataacacagtccctcctctgaacactcgagccaggactaggaatctgcacatatcacaatttttggccttcagaagtggaatgcccagtctgcccatatgccttcctagtgtggaggatgtattgctgtcaagagccaacactgcatacctctctatgaagaggaggagtcaggagacccatttgtcctcgttgactcgaaggyggaatcagaatgatgggttctttgggaggtacaggttgcagtgagccgaaactgcgtcactgcactccagcctgggtgacagagcagtactccatctcaaaaaaaaaaaaaaaaaaaagaatgatgggttctttccagggcaagtcaggacaggactgagagaatgtagggaatttccttgaggaagtgaccactgcataaagatggactctacaagatccttgcgacttcttccatgtctaaattctgatttggaattcttggagctctttc

SEQ ID NO: 139449 - DNA, 444 bp, Homo sapiens
gatgtagtactcattgtgggattttgatttgcacttccctgaagactaattatgttaaccatcttttcaagggctttttagttattcctatatcttctttccagttgtgtctgatagaattttgtgtggaacatttgatagaattcaccagcacaataatccagctcttagttgtcttttttggaaaggattttgacaatgaattaaatttttgtatagacctagggtcattcrgatttttctaattcattttatgttttggtaagttgtgtttttcaatgaattcattcatttttgtctagatttttgaatatattgacctaatatttttcataatattcccttattatccttttaatgtctataggatttttagtgatctcttttcttgcattcctgatattagtaacttgttatttctctctcttgatcagttttgctaaa

SEQ ID NO: 139450 - DNA, 514 bp, Homo sapiens
gcaaccccacacaggcagacaacattatccagacaggggataagtctgtccctgtgtcaaccctttagaagttaaggctctctcctaagcttgagccaacccagccaggtatctctctggcttagacttccatgatagctacagggagcgggataagttgacacttytccttcaagttctgctctgctgttccttctaggaagaccaaattcacagccaagctccctaagatctagtccaaagcctgagccagcaggaaacaattcttatttcagatttccagctactgaaatggtgtgtcttccctaggctctgtctataatcacttcctttcctctttctcccagtatcttctccttgcttcaggatccttggattttttttttttttttttttttgaactgttgctatttgggacccagtcttttggtttctagatgaaccaattagacagttgcaagtatgcagactcatcagtccttcttataacaatgttattgatgtccttgacatc

SEQ ID NO: 139451 - DNA, 397 bp, Homo sapiens
ccaattagacagttgcaagtatgcagactcatcagtccttcttataacaatgttattgatgtccttgacatcactgccccaaagccatttgcatgactcatagagatagacggccatcaggtgagtggatgaaagagagaaaaaaaccagaggccctaaatccagcccctactgccatatacacacttagatctctctctctcacacacacacacacacacacaygcacacgcttccctcattttctgggtgtgtaagcttagataagtggggaaaaagtttctcaattaagtagctttgatgaataaaatgagaaattaattactaatcaatacttgtacagcactttatgttttatgattgctattcatgcccagcagctattaagcagcccatt

SEQ ID NO: 139452 - DNA, 438 bp, Homo sapiens
aaaaacctttattcttcaaaagatgccattaagaaaatgaaggacaagtaataaactgagaaaaaatatttgtaaatcatctattggacaaagcacttgtgaccagaattsataaaggactcttaaaactcaaaatatggatttaattcatcttaaaaattggcaaaagaattgaatagatattctatcaaagaggctatacaaaggacaaataagcacatgaaaagatgttcaccatcatcggtcattagagaaatgtaatttaaaactacaatgagatacaattccacacctgctagaaggattctcattttttaaaactgccgtaccaggtgccagcgagaaagtgaagaaggtggaactctcatacactgctggggagactataaagttgtatggccgctctggaagattagcagcttacgaatggattaaacc

SEQ ID NO: 139453 - DNA, 552 bp, Homo sapiens
attggtccaggctgacttctttctaaggtgcacgtggccggcagagggacacgtgcccctgacattagtacaagcccattggatcttctttctccttgctgacaaaggcagctccagtcacagtstcttggctttagccttttccttggggtggtaagggtacctgcatactgacagagctcacttcaaataaatcctgaaatcctccctttcagtatctcattcgatacagaccagaggaggcctgtctctaatgctagagaacccattttgcactcacttagctatcctctatgggtggtccagcatgtagaatctggctttggttggcaccttttgaaattttcttggccttcagtgcttcagccagggctaaaatggaaccaatcccattttaacatgctgtaacacatgggttttatttagtcttcatagtgttgacccaatcagtgatttttaacgctgtgatttgtttgctaacatttttaaatcaaaggattatatattttaaaatatggacctttaactttcctctaaaagagaaagtaaagg

SEQ ID NO: 139454 - DNA, 584 bp, Homo sapiens
aaagctttgcctttatagggcttatattctagtgatgaaaacagaaaataaatagagcaaagtctgcactggagaaagaaaaaggaatgtggaagattrtattttccaaacatggataatatatttatatataccattacacatgttcttaaaatgtcacattcccctcctcccttgaagctgggttaacttttgtaattccctcaactaagagaatgcagcagaagtgatactcactgactttccaagactagatcataaatggtggtatggcttctacatggctaactctctccctcaggacatttgcctttggagccttgagccaccacggaagaattctgattaccctaaagccaccatgctggagagtccctacagagaaaaatgactaaggagacccacgtgttctagtccccagcttctttagtcttcccagaccaggtgccaaacatgtaagtgaaggctaagagatgatcccagccatagccgctgcatgaatgcaatatcataaaacacccagagccagaaccacttagttgaaccattttcaaattcctgacctcacagaaactgtgagaaat

SEQ ID NO: 139455 - DNA, 587 bp, Homo sapiens
gctcagggctggatagtctcattgatgccacacttccacatgatagccataaaggagataatataaactcctgccttggccataaaagaaacttagcctttcttccttccctcattgacatgatatgaaaatatatacctaaaatttccaaggaaattttttaaaaaatagatttgataacctcatgatacgaaaatatatacctaaaatttccaaggaaattttttaaaaaatagatttgataacctaactacaggaaatgatttggaatctttactgtaggagccccagacattcttagaggcaggatctaaatgatacgtaagattcctcccaagcctcctaatatcgtagccagctacaaaatttcaacgttcaccatctactccaaaacctctcagtaactttttccacttgatggatgacttttactttctgaaacttaggatgactgtrctgatgaaaaactgattttaattaaatcttgaaaattaaattggaaaaaaagctcttgctctcatatctttcaggtcacttaggtgtttagaatgagtcattcctgaaatctgtctcttccatttcaatct

SEQ ID NO: 139456 - DNA, 270 bp, Homo sapiens
aatacttgagactaggtaatttataaagaacagaaactcatttcctcacagttacagaagctgggaagtccaatatcaaggtgtcagcctctggtttagtgagggcckttttactacatcttcagataggcagaaggcagaaaggaaagctaactgaaaatgaagccctttttttttcctgaaagggccttaatccccttaagaggggagcagccctcctggcctaatcacctcttaaaagtccccacctctactaccacaccgaaatca

SEQ ID NO: 139457 - DNA, 447 bp, Homo sapiens
aaaaatacttgggctgttttaaagattagtgtgttggcataaaaccgcacatgcttcctagaagtatgttctttaaccctcaatcatgacatttaaaattatttttcatgatacttaaatattgtcaaggtactttggcatcagaagagaatttcaccaattctcattaggcaattagttatgatagaaatgaggtaacatgctgagccatgaatattcagtatttrtcactacttaaaatgctaatatgcaagataaaaatgccaagtacacttttttggattcatttaaacttaaatcatagggatggcattgtgttttcaccatctcagctttcatcattatattaagattttaaatataatagccagaatatattaattacaaagcaaagtggtcagcaatggtttcccagggttattttgtagtatcttaaaatgctggcca

SEQ ID NO: 139458 - DNA, 299 bp, Homo sapiens
tacctacattacacatgtggactgttgagttcaaatgattaaatattaagtttatgtgcccttcaatgattaagcagccttctctggtagagaataaagagcatgaactctggaatggcctgctttgrttagaatcccagctcctcatctaacaaggtatgtgatccccagaaaattttttaaaatagttaaggttaaatttcctcatcttcaatgaagggaaaataatcatcaccaccatatgggatttctgtgttttttaagtgagataatatatatatatatatagaccacataga

SEQ ID NO: 139459 - DNA, 592 bp, Homo sapiens
gggacatggccacataagaccgtatcagaatctactgagagattttccagactgtaaacacaccggaccctctacttcccattcttgccaaattctgacactttccagtgaccttcctgattaccagctcagttcatgaggagccctttttgctgatggcaatgtgtgccacaagtaaagaggaatagaagaaacaggctgtagaccaccaacaagtaaaggtcctcacacttcccagtaaggatgatgctattgtaggcctggagactaagggrtcccttctataagcacacatgcctaccctgtaaagcccatctcaaaggctatattttcaaccttattttcactggtgctctctgctctttccctctgaacaaccataaatctatctatactttcctatggcatggctcactttctactatgtattatagtttcttatgtccatgacacatttccctactaggcttctgtgcatttcagataataagtgatttctgaattaattaattaattaactaattaatatcaaatgtctccctttgaactgtgcctaaactgtttaaacaggcttgcgtttcagagtttcatc

SEQ ID NO: 139460 - DNA, 453 bp, Homo sapiens
ttataagcctcccccttgagaaggctccctccagtgcatattgagaggaagttggacaataagaatttccttcaattctaacagcaagctttaaagttctccctttcttattctcctaaatcaagttttatgttctgccttgaattcattaacgcctgtgtttatatctgtcaggtgaarcttggtcagaaaaggaatttactaaaaggatactgggtggttgcactcttaatccacaaatgatctctaactactcaatgccttcccatcagtaacttcacattctgaatctgctcaagagcatcagttgactaagcctaggcccctaaagaaactctagttgccaggaagtgaagaaggagagggaatatctggccacctttagcttccataacaggaataactaccaacattcaatgaggaatgctacaaagggggtagaatgtgagcagc

SEQ ID NO: 139461 - DNA, 480 bp, Homo sapiens
gctgtagttattgctggctataaaaagttaatttcaaaagttaattagctaaaatcacttctattcttactgttaaaaacggaatgtcactgatattcagcagcaatgtmtgtgctgtagaacaagttatatcagaaacttgaagactccttagaatttataacatggatttaattgctctagttgtgtcagtataactcaaaattataatcattaatagttttttgaaagtatgcattcctgtttatgacatcttgtaagagggcaatattttctgtagcagggtcagcacactttttctgttaaggaccacatagtaaatatttttggttttctgagtggtacccatatcgtcactgtcacaaattgctcaattttgtaatcttagctcaagaacacccacaaaggatacgtaagtgaacaggtataactattccaataaagcgctatttacatagaactggcaaggtttggcctgtg

SEQ ID NO: 139462 - DNA, 610 bp, Homo sapiens
tatcattttgctgttcacatttgaaggagcagtgtttttgttttctgtttttttttgagacagggtctccatctgtcgcgcaggctggagtgcagcggygtgatcatgtctcaccgaaacctcagccataaggcttcagagatcctcttgcttcagcctccggagtagctgggattacaggcatgcaccaccatgcctggctaacttgtggatttttgatagagatggggttttgccatgttgcccaggctagtcaagagctcctggactcaagcaatccaaccatctcagcctcccaaagtgctgggattacaggcatgagccacctcgcccaactagaagcagtgttcttatatctcaaatcccatctcagacctgtgccttgtgtttttaacaacctctcaggggtactgtgcaacaactcttcagaaaagcaaagcaaaacatattatgtgtattggggccctgtctgtgcagagatagtaatatgagataaacatggatgatttaagggagaaactatataaagcatttaatccccattttctccactttccctacagctctgctgtccttgcctggagctgtcagaggaaaatgggagaattca

SEQ ID NO: 139463 - DNA, 592 bp, Homo sapiens
gaatttttaaaaatgttactttacatggcaaaaaggacttgcagatggtaagagctctgagttgaagacattatcctggattaatcaggtgggtccagtgtaatcacaggtccttgaaaactaacagccattcctggttgtgggcagagggagacgtgactacagaaaagggtaagagacataaagttcctggcttttgaagatggaggaaggggccatggaccaaggaatgtaggcagcctctagatgctgggaaaggcaaagaaatgagttctttcttagagcctctagaaaaaaatgcagtcctcytgacatcttcagtttacatcagtgaggcctgtggggcttctaatctacagaactgtaggatgataactttgtattgttttaggtcactacatttgcgataatttgttacagcagccatagaaagctgatataccatactattttaaaaattttacatagtcaaatttactaatcctgtatggcatctggagtttgagtcattgtcaggtaaccattcctttcatccagctgataaaggaattcacctgtggttttttattccttgtgatggcgtggtttcatt

SEQ ID NO: 139464 - DNA, 592 bp, Homo sapiens
gaatttttaaaaatgttactttacatggcaaaaaggacttgcagatggtaagagctctgagttgaagacattatcctggattaatcaggtgggtccagtgtaatcacaggtccttgaaaactaacagccattcctggttgtgggcagagggagacgtgactacagaaaagggtaagagacataaagttcctggcttttgaagatggaggaaggggccatggaccaaggaatgtaggcagcctctagatgctgggaaaggcaaagaaatgagttctttcttagagcctctagaaaaaaatgcagtcctcttgacatcttcagtttacatcagtgaggcctgtggggcttctaatctacagaaytgtaggatgataactttgtattgttttaggtcactacatttgcgataatttgttacagcagccatagaaagctgatataccatactattttaaaaattttacatagtcaaatttactaatcctgtatggcatctggagtttgagtcattgtcaggtaaccattcctttcatccagctgataaaggaattcacctgtggttttttattccttgtgatggcgtggtttcatt

SEQ ID NO: 139465 - DNA, 394 bp, Homo sapiens
attcctggattaaatgtcacttggccgtgatatttttttaatgtagtgttacattgttttggtcatatttattcactatttttgcagtgatatatatagtgacatcaccctgtcatttcatttttttaaaactgacttttgcaggttaaattatcaatgctatatttgctttataaaaataattagaaagtttttyttcattttccatgtcctgaagtaaatgtggagcattggagtggtctgcctttgggagtttgttttgggcctagagatgtttttgtggggtggtatttttttttttctagaagagttgattaatctttctatctctaacagagccaattttggtaaatgtattttccaaagaaagtttcaattttgtccatgttttcaa

SEQ ID NO: 139466 - DNA, 611 bp, Homo sapiens
  misc_feature (1)...(611): n = A,T,C or G
tggaaaagaataaattctttgctgtgtgattaaaaaagcccaatcttttctctcgcatttctataatgctgtgaacggagtgtaggggatcaagagattgttgaacccaaatacaaccctgtatattgtagttattacagaaatcaccttcaagttttccaaacgattcaaagtaccagcaaaaaccacccaaggtaggcttatctcataggataactctctcctttgcaacccacagtgttttatttaataacaccgctataacacttaagtttaccttattatataataattctaacataacagagaaaatatctatttcacagatatcaatactgctgtctttgaaaaggtccaaagatatagtatgtttctgacacagaccaggkcttaataagtgacagatgtatttattatgatgatgttccttactatgnnnnnnnnnnnnnnnnnnnnnnnnnnnnnnnnnnnnnnnnnnnnnnnnnnnnnnnnnnnnnnnnnnnnnnnnnnnnnnnnnnnnnnnnnnnnnnnnnnnnaatttaatgttaactgaaatgtcgaagcttatctttaaactaaactggtttatctcatgaactgacctgtttgta

SEQ ID NO: 139467 - DNA, 506 bp, Homo sapiens
gatcctattttggtcaaatgttttaaacctttgacatatttgagaagtatgtcaggttatattttgatgattgttattaatatatgttccaaaattgtatgggatttctaaacttctaatatgtctcactatatgctaacaatcataatcatgttagcatgttgtcattgtagaccacaaaaataaccaaatttccttgtcaactgtgtctttaacttattatttacagtcatttccatagtttataacttaattctgatgcagtttctgaaaacttcacaagcatgcaaaatcctagcatataatgtctttaaggaggttaatgaaaggatgaaattaccctgagaagcactcttcagtaaaggtttctaatarctttagaatcatatcgtttggcctgggtaagaattcctggaactttataatagtagctcattatgccatagtgtattttcaccaggtaaagaaagtttttcatggttcactgactgagaacaatcaaccac

SEQ ID NO: 139468 - DNA, 581 bp, Homo sapiens
atcacttcaccacacttgtatgagtgttcaatttttaaatattagctaatctaacaggttgaaattgtcctgattcattttctaatttatacttctttgacaatttgggagagtgaagattctcctggttgtgtttattcttttgtgaaaaactgctttattttctttgccaaattcaaatagaacggttgcaaaattgccagaggaaatgctgtttttccagatggacacacccagggatgtttcagtgttctcacaaataatccagttttctaattttgcaagcccagctttcattagaattttgcaaaaatccttgctttgcgagcatggcacaggcaagagatgaggcactctctctttcttcccccagagcctttgactgcacttagatcattgactttggttcagaaacctgactgcatctggagttgacatgagcagcatggaagatgtttgtcccagcacctcactccagaggccagctmagctcaatctgggcagagctgcatgatggaagtttctgactaccaagcatcgggcagagggtgcatcacctggactacatagttgtgtgaggg

SEQ ID NO: 139469 - DNA, 517 bp, Homo sapiens
gaaaaatcatcaggttaaaaaaagaaaaattgattctgttttgggatatttcctagcaacatgagctggggaggggatctcagcagtgatgctctatgaagcataataaaatgacacagttacaggtaacttagttaaagggggaaataaatggaagtttcctctttttgaatatcaattgtagcctgctctgctacatttcaaaaacactcttcaaaatgtttaactgaactcactgtaggaagcaccttattaatttattgtgtgttttgaagtcacactgtgagctatagaatttacycaagcacaactcttcctggaaaagagagttcaaatgagaaacagtgcagggtgaagacatggatatgggcctaaaatatctatttctcaatgatattttgatatatctatcaagtgctttttagtggattaggttcagaatgcatcagccagtgcctgttcaataatccagttttccagcatagagcatattaaattgaggaaggacaaagtcaca

SEQ ID NO: 139470 - DNA, 517 bp, Homo sapiens
gaaaaatcatcaggttaaaaaaagaaaaattgattctgttttgggatatttcctagcaacatgagctggggaggggatctcagcagtgatgctctatgaagcataataaaatgacacagttacaggtaacttagttaaagggggaaataaatggaagtttcctctttttgaatatcaattgtagcctgctctgctacatttcaaaaacactcttcaaaatgtttaactgaactcactgtaggaagcaccttattaatttattgtgtgttttgaagtcacactgtgagctatagaatttactcaagcacaactcttcctggaaaagagagttcaaatgagaaacagtgcrgggtgaagacatggatatgggcctaaaatatctatttctcaatgatattttgatatatctatcaagtgctttttagtggattaggttcagaatgcatcagccagtgcctgttcaataatccagttttccagcatagagcatattaaattgaggaaggacaaagtcaca

SEQ ID NO: 139471 - DNA, 517 bp, Homo sapiens
gaaaaatcatcaggttaaaaaaagaaaaattgattctgttttgggatatttcctagcaacatgagctggggaggggatctcagcagtgatgctctatgaagcataataaaatgacacagttacaggtaacttagttaaagggggaaataaatggaagtttcctctttttgaatatcaattgtagcctgctctgctacatttcaaaaacactcttcaaaatgtttaactgaactcactgtaggaagcaccttattaatttattgtgtgttttgaagtcacactgtgagctatagaatttactcaagcacaactcttcctggaaaagagagttcaaatgagaaacagtgcagggtgaagacatggatatgggcctaaaatatctatttctcaatgatattttgatatatctatcaagtgctttttagtggattaggttcagaatgcatcagccartgcctgttcaataatccagttttccagcatagagcatattaaattgaggaaggacaaagtcaca

SEQ ID NO: 139472 - DNA, 305 bp, Homo sapiens
gcttatgacagtcacacaacactactaaytggggagaagtcagtttttccaaggtgttgacaggtatctggatttcggaggaaattgtaaaaaagcaggacctgggacaaatactggtcttggtttttctttgagatcaaatctgagacaacgaatctgtccgaaagctgctttctgcctggtcgtggcagagggtggccaagggggcctcagctgtgctcccaccacaaggctacagggtgtccccttgtcctgaggctcttccagacatctggctgagctttggtagctctattccaagcctg

SEQ ID NO: 139473 - DNA, 305 bp, Homo sapiens
gcttatgacagtcacacaacactactaattggggagaartcagtttttccaaggtgttgacaggtatctggatttcggaggaaattgtaaaaaagcaggacctgggacaaatactggtcttggtttttctttgagatcaaatctgagacaacgaatctgtccgaaagctgctttctgcctggtcgtggcagagggtggccaagggggcctcagctgtgctcccaccacaaggctacagggtgtccccttgtcctgaggctcttccagacatctggctgagctttggtagctctattccaagcctg

SEQ ID NO: 139474 - DNA, 305 bp, Homo sapiens
gcttatgacagtcacacaacactactaattggggagaagtcagtttttccaaggtgttgacaggtatctggatttcggaggaaattgtaaaaaagcagracctgggacaaatactggtcttggtttttctttgagatcaaatctgagacaacgaatctgtccgaaagctgctttctgcctggtcgtggcagagggtggccaagggggcctcagctgtgctcccaccacaaggctacagggtgtccccttgtcctgaggctcttccagacatctggctgagctttggtagctctattccaagcctg

SEQ ID NO: 139475 - DNA, 305 bp, Homo sapiens
gcttatgacagtcacacaacactactaattggggagaagtcagtttttccaaggtgttgacaggtatctggatttcggaggaaattgtaaaaaagcaggacctgggacaaatactggtcttggtttttctttgagatcaaatctgagacaacgaatctgtccgaaagctgctttctgcctggtcgtggcagagggtggccaagggggcctcagctgtgctcccaccacaaggctacagggtgtycccttgtcctgaggctcttccagacatctggctgagctttggtagctctattccaagcctg

SEQ ID NO: 139476 - DNA, 546 bp, Homo sapiens
ggttttataacaggaaacctcttaggcttgactcacattctgtcttgtctgccaacatgtaagacatgcatttggccttccaccatgattaggaggcctcctcagtcacgtggaactgtgagtccacttaacctctttttctttataaattacccagttttgggtatgtctttatcaggagaatgaaaacggactaaaacagtatccaacaccaggacgatgcatgcacatcaactaatactaagggaagatcccacaagcctagagtggggactaggctgggaaaaggctaggacttaaggcaggagcaagaaatctagacaaggaaaaaaggcagagacttaagacagaggtgggaacttcaggaaagagtttgatgtcatagcaactcaatgcagaactcttggaaagctgttgactctctccctttcaacagcctgctctgccttatctttcagagcatactgtctctctgtgtaaattcyctgctctctatcttccttccataaattgtcttttttggctaaattagtcacttagcagaat

SEQ ID NO: 139477 - DNA, 601 bp, Homo sapiens
aagctttcatcagaattaaacatcagaaacacctcatgccaacaggacatgagggaacttttgaagtaatgaaaatattctatatcttgattgtgacggtggtttcacaactgtatatgtttgtcaaaactcatagagctgtaactaaaaagggtgatttcactatrtgtaaattacaccttaataaatctgacttaaaaagagaaaaaaagcatctttggcaatatacacagagggaattattttctagaactttagtgggtttaaaaaacatacagctgactctttttgctagagacagtttttcccttgcactggggtagttctaaaagatgggaaaaggaagttattcttcagggtaccctctagtgaatgacgtctggtaatgtcctgcagaatcctcccagacttaaaattcttttctcgtgtctagtcatctcaccctaacctggccctgttagtttcagtcagattgtggtctgaattttcagagactttaatcaaggactgactcttcctcccttaaaaatgaacataatttattgctgcatctgcttccaaacgtctggatcttaaaaagaaagatatggggtctaaaact

SEQ ID NO: 139478 - DNA, 635 bp, Homo sapiens
ttattattattaaccaggatcagacagctacacagaactatgaaattttcacccagtgtctttgggggtaacctgtacatttttttttttttacttttctaaagggttagctggagtgggaagaaaagggaggagcaaatagaacttgctggccctggaaatctgcctggtgacctgacagattcagctttctttgtgaggtagcccagctgtctagtagagtaaatacttgtgagccgcttttcaaacacgatggagcacrtcttgtggaatatgattacaaatctcactaaatctgaaaaagtgttttgcatgacagatatttggtatttcagtgccagtggttctcaggagtctctgcagggagccatggacatgagtccttcaggattgtctatgaacctgatggtagaaaaaaactgaacttgctcatgaatgcctagataaaaaactttgcagagggcatgaggctctctcccagctactacagaaactcaagaaattttaccataaaactgcttttgtaatgttgatcatgttataataattttcatttttagaccttttataagatgtcccctgggaaagaatgaaactctcacatttacatgaatatggaatcactgaatcctcag

SEQ ID NO: 139479 - DNA, 423 bp, Homo sapiens
aaaatccaagataacagagagaaggaatttagaatcctatcagataaatgtaacagattgaaataattaaaaaagagtcagactggatgcagtggctcatgtctgtaatcccagaactctgggaggctgaggtgggtagatcacatgagcccaggagttcaagaccagcctgggcaacatggcaaaaccctgcctctacaaaaaatacaaaaattagccagatgcggtggtgcacacctgtagtcctagttacttgaraggctgagacaggaggatctattgagcccaggaggtcaaggctgcagtgagctgtgatcatgtcattgcattctagcctgggcaacagaatgagaccctatcttaaaaaaaaaatcaagcagaaatcctggagctgaaaaatgcaattgacataatgaagaattc

SEQ ID NO: 139480 - DNA, 523 bp, Homo sapiens
gatggcttttagtgactggaaatgaggtagtaggaaacccaccctgagagcctcccttctacagatacctctgtagatctccagattgcctgcatgtctcaagagtccaaaatttgtagaagcagtccccaggatgtttttggttatgtcayagccagtgggttccttgctgcctctaccccacacttacccacattatttgtgaaagctgtagcttgtcctccatatagggaggggggtgggggagtgaatatggatacctggcagcatacccttttagaaagatttctgatgcctgtgtaatattacaacctcttatacaattattcttattaacatgaacctaccactacatttctcaaaacaacagaatgactttaccaattaatagagtcctactatgtagttctctgatgtttatgaagaaaggtcacatgtatttgatctcttgaaaaaagtattaagtaggatttctaaaccattacatattaaaacacatacacagctggggtggagggtacta

SEQ ID NO: 139481 - DNA, 537 bp, Homo sapiens
tatgatggcttttagtgactggaaatgaggtagtaggaaacccaccctgagagcctcccttctacagatacctctgtagatctccagattgcctgcatgtctcaagagtccaaaatttgtagaagcagtccccaggatgtttttggttatgtcatagccagtgggttccttgctgcctctaccccacacttacccacattatttgtgaaagctgtagcttgtcctccatatagggaggggggtgggggagtgaatatggatacctggcagcatacccttttagaaagatttctgatgcctgtgtaatattacaacctcttatayaattattcttattaacatgaacctaccactacatttctcaaaacaacagaatgactttaccaattaatagagtcctactatgtagttctctgatgtttatgaagaaaggtcacatgtatttgatctcttgaaaaaagtattaagtaggatttctaaaccattacatattaaaacacatacacagctggggtggagggtactatactaattaag

SEQ ID NO: 139482 - DNA, 595 bp, Homo sapiens
tctgactaacagaagcaaaaagagacttttaacagggtgctagctaggaactcaggatagatgggaggctggagagccaaatcaggacacaagacaggaatgaaggcaattcctggagtccaggcagcatgaacaactgaaggatcttatctgggtgctgctcctccagtatatgtgttccaatattttcccattccttatgcgcctccactcaagatgaaaagttccaagagtmcagtctgcttgatgtttgctgggcattcacagatttatagtactaaaaatatgtgagaccaggtgcagtggctcatgcctgtaatcccagcactttgggaggccaaggcaagagaatcacttgagtccaggaattcgagaccagcctgggcaacatagtgagacagtgtctctacagataaataaataaataagttagccaggcgtggtggtgcacatctgtagtaccagctacttgggaggctaaggtgggaggattgcttgagccagggagttcaaaactgcatacagtgagtggtgatcgcaccactgtactccagtctgagtgactgacagagatcttctctctctaaaaaaaaaa

SEQ ID NO: 139483 - DNA, 595 bp, Homo sapiens
tctgactaacagaagcaaaaagagacttttaacagggtgctagctaggaactcaggatagatgggaggctggagagccaaatcaggacacaagacaggaatgaaggcaattcctggagtccaggcagcatgaacaactgaaggatcttatctgggtgctgctcctccagtatatgtgttccaatattttcccattccttatgcgcctccactcaagatgaaaagttccaagagtacagtctgcttgatgtttgctgggcattcacagatttatagtactaaaaatatgtgagaccaggtgcagtggctcatgcctgtaatcccagcactttgggaggccaaggcaagagaatcacttgagtccaggaattcgagaccagcctgggcaacatagtgagacagtgtctctacagataaataaataaataagttagccaggcgtggtggtgcacatctgtagtaccagctacttgggaggctaaggtgggaggattgcttgagccagggagttcaaarctgcatacagtgagtggtgatcgcaccactgtactccagtctgagtgactgacagagatcttctctctctaaaaaaaaaa

SEQ ID NO: 139484 - DNA, 433 bp, Homo sapiens
tgtcttcccctacaagaatgtaagctccaagaaagtaggttactttgccttcggccaaatccctggggcctagaacagtacctagcatgtacagaggcattcaataaacmcttgttgcttgaataataaatacaatgcattatacacacacatagaaagaggactttgtgcccaataaacaaaatatccattctttgcaaacatctttgaacatttacatgaatagaccacagaacacttttcaatcaagttggtgagactataaattagtataagctttctaaggaataatttgataacatttatccaattttcaaatgcaaatatcctttgaaccaacaccatttattgaaaagcccttcctttccacactgaatttcattggcatatttgtgataaattaagtaatcctctgtgtacgggtctatgcctg

SEQ ID NO: 139485 - DNA, 433 bp, Homo sapiens
tgtcttcccctacaagaatgtaagctccaagaaagtaggttactttgccttcggccaaatccctggggcctagaacagtacctagcatgtacagaggcattcaataaacccttgttgcttgaataataaatacaatgcattatacacacacatagaaagaggactttgtgcccaataarcaaaatatccattctttgcaaacatctttgaacatttacatgaatagaccacagaacacttttcaatcaagttggtgagactataaattagtataagctttctaaggaataatttgataacatttatccaattttcaaatgcaaatatcctttgaaccaacaccatttattgaaaagcccttcctttccacactgaatttcattggcatatttgtgataaattaagtaatcctctgtgtacgggtctatgcctg

SEQ ID NO: 139486 - DNA, 609 bp, Homo sapiens
tgattgataaacatttatctcttttacattatctaacttatttgttttttaaaaatttacctagattatgtgtgaaaatggaaatattagacaaagctagtcatcatttaaagttatccctgttaaccatttttatagcctgttaatatcagatattcacccaactcagaactttaaagttaaatacattggtrttttgttgacaactcagaagctacagtcatttttattaagccaacaatattaaattagtgttacttatcaaaaaattgcacaagcaaagatcattctcttttaggctgggcttataattttgtaaactttgtgtcaaattttgataccttaaaacttctagcaaggacaaatatataaaaccgtctgatcagtaaacccaggaaaaaaagtatgctgacaattctgaagacatttctattttgattttgccaataattttaaaaccagcttatttattaaagatttgcttaagtcacattaactaaaatgcatttgttaattagtattattttatatgagtgctcatttatctaagccaatctaagtagagttccttagggaatttttggccaactatgccctatttcactatgt

SEQ ID NO: 139487 - DNA, 590 bp, Homo sapiens
gaaccgtgagccaattaaaccttctttctttataaattccccagtctcaggtatttctttatagcaatgttaagaacaaactgatacagttagaaatcctggaaattaaaaattagagtttaagttttcaaaaaccttaataattgagataatggaatccagaattgatatattgaaagagtactaggaatttacccagaacccattatggtggaataaagaggtgcaaacacattataaaaaatatggaagatccattgggcatctccaacatatatataatgggagcaccaataaatagcattgaggaaatggcataaacttttccaaaatagaagaaatacagtagccttcagattaaaaacaaccaccaagtgctacacagaataagtgggccaaatttatgctaaagtaaaaaatctattcttaaaatacatatttatatttaaaatctctagaagtctaaatataagaacttatacacrgatttccatgttccttagcagctccaaaactcaatggaagacacacataagtaaattttgaatttccagttaaaactggtttggaaattgtatctaacaatgtta

SEQ ID NO: 139488 - DNA, 569 bp, Homo sapiens
ctactttggtggtagcctctttgtaataagatattggcacatttgtcattaaggaaaaataaagaggaatgaataatacagaatccagtggaacagtaaataataagttcccaccacttttgaaatactattcctacctagaattgatctgctattttttttttttttacatctcttttcttgtttttctaagatgggaggtttgtgggaaattatacataaaagaaggaagcgaaaatcttttgcttttgttttacttgagagcctttaagaaaaagatggaatttataaagtcatatttccyattgatggcatccttcacaggttacaatcccttgacagaacatgtctgcaaataacaagatcttatttcttaacaggtctgtgctagattcaaaattttcgtgccgaattaactgtgtaaacaaatttggaatttctatgtcacaagggagtgaaagtttcctacctcttttttttgtagatgggttccccacctccaaatctgaagagttcacattttctgaatctatgctattccctcagtgttgttccctttgactctttct

SEQ ID NO: 139489 - DNA, 578 bp, Homo sapiens
tgagcctcagtaatgaggactgacgtagatgtttccaacacttcactgttgtaatacctgtggcctgggctctgagacttccatgctctctgactggacacagttatttttttacagtggttaggaaagacctcttggttgttaagctctctaaaagagaataatttaacttcagctgccaaatttccctcttaagtagtttctttaacaactggcaatctccatctcctccaaatataaaatatctcctatttcatacccttatttttaataataataggattctagaacttagataccatcctgtaaaaaatctcttatttttaagacttgcacaacatcgcagtttgttgagcaagagtgctatgcctagaatgcagttcttatgacttagattagggctcttttcattggccatactccaaatttcaacaccaacaagcaatctctttccttttaaaccccttcttgaacagtgtccaytccacatcatgggccagcctttctggctgcatgactttttcatcgctgctttcacatgcaatcggattgaaataacatagataccaccaacctga

SEQ ID NO: 139490 - DNA, 509 bp, Homo sapiens
gattctcattttaactaggcacacataaaagcacatgcagtttttatggctgtcttggattcccttccctacgtcactcttatttcacctacagttcaagtctcagctagttaacagttctcaatgggctctcagtaagctctgttctttcttcctgggttcctgagagctatgactttttcttctcacttatctagctcccccgagcttctctactttgggacaagatcagaaaactcttcttttaaatcacctgtacacaactaagtgactttcttggattctaaaaacaaatttgagaaggataayttctagccagggaaatgtccaaggtaagatggactgctcagagtccttctcccttgatcttattttacagaagttcatcaaaagccttgagtttcttcgcagtatcagagagctcacatcaatgttttctacccttacagaaagacaattacagcatgatctcacttaaatgtacaatctgaaaaagtcaaactcataga

SEQ ID NO: 139491 - DNA, 506 bp, Homo sapiens
ataaatgagttattaccatttgctgagaattggtacctaaagtttcaggaaaagtaggatcagtgttttacctaatggagctaaaaatgtatgaagcagagtaacaaggtatatctgagaaacacagcaaaatcagtaagatgttagtaaaagaaaaatgatgttgagcaagtgagtccaggagtgcagaggctatgaggtataaagcagattcgccagaagaggtgggttctccactgcattttgaagaagacgagatacatgggttgccaggaaaaggaagctgtttctaggcagaaagcagctcacattagaaaatgctgataagacaaaactggtttccatgagaagaatggcagacagatggmgtcagcacagctgccggggctctgtgtgaggagcctggtgcagtgcctggttgaagaggatcatgaaatgctagatctgtcgtgaacaaaattcaaggccttaaaggcaggattagagagtctggattgaacaacata

SEQ ID NO: 139492 - DNA, 568 bp, Homo sapiens
tgccaagaaggatggagaagaggcaatgaggctgaggaaggccagataccaaggagagcagtgaggaggccagtgcaataatggagaggagagacaatggtggcctggacttgggaaatggcagtggtgttagagaaaaagagatgggtctgagagccattaaggaggcacaattgtcaggattccatgacttactggatgtgagagatgagggagaaggaaacacagctgcaggtttctgatttggacaactgggtgcatggtgggtgttattcactgagccatcacttacaaggggagcaggttgaggggggcagatgatgagttcagttctgaatatgttcagtttgaggtacatggcaggcatcgaactggagatttctatcacgtaattggactatagggtctgagctgcagatatagatttggaagataatgatctcagagcagatagttgaagccatggcttttgatccgattatccagagaaagtctacagactgrgaaaagcagaggtcagaaaacagaccctgtagtctactgacctttagggaacaagccaagggaa

SEQ ID NO: 139493 - DNA, 586 bp, Homo sapiens
gttaacaatacttgatgatcaaggtttaaaccagctagtcttattccagcgcctgcyccactaaccactgtgctctactgagctaataatatcttccctcccactttcagggatatcaagaagagcacatgaaataatgtgtaagaaaacacttggtagatttgcttaatgggtacaaagttacaatttggtaagacaataagagttctagagatggatggtggtgatggttgccaacaatgtgaatgtacttcatactactgaactatatgcttaaaaatggttaaagtggtaacttttatgttatatgtattgtacattaaatttgtaatttcaaaaatacttgataattataaagtgctgtaggaatgcaaactattagagatagttttaattctttttcatttataaactagcaggttcctcaaaagattttatctgactcactattaatcctctgaatgtctagaagagatgatggaaaaagaggacccctagtgtaaaatgacagcatctgtactcagcagcttcagtggcggaacagaaatgaagagggtaaaatgagtccagggcagagcctgattgc

SEQ ID NO: 139494 - DNA, 575 bp, Homo sapiens
ctgtctcaaaaaaaaaagttgttgttgtaacacagaggaccacagttttagtttcgtattagtgtatttttaatatcaaatgcaacctttggaaagacataaataattcctttctgattatagccaattagatcatatacaaaattctttcataaattcataatccatccttcctaaactttattatgacctactgagaccttatgtgacatgtttagactttctgctttgtcctgtacttcctctttcataaataaccattttactttaggacaaaaatttatcacacaagattcttcctcatacaaaagtgttctctttttaaaaaacttccttgctaaaaatacatcttaaactccataactttctkcatatctctcactcttacttactggtttctttatgtcttgtttctgtattttgaaacaacctttaaataacctctgaattagacaaaattacttctttctaataagaacacattttttaatgactttcttataacttttctcatcccatatttttttggtacactttgtatacagaattatatatattaattagaattttagctc

SEQ ID NO: 139495 - DNA, 657 bp, Homo sapiens
acaggctccttctacaacttggttagtgacatcaagtactaactatatatgttccaggtcaagaacttactcttgagatattcaaaaagtgcttgtcaagaatatcagaatctagaatttatggcaaattgtatatattttaataaaaaccttaaaataaattctaattttaattgctacccatagaaactcctcaagagaagacattagccaaacagacatgaaatatccacagcatttagctactccctcgtcttcagtactgtctctaacttcagttgcagtatatgtgctgctgaagagcagtctgcttccaatttcaacacagcattaaggtaccctatagccatcatccaatatacttgctttaaaaacagcactactctgatttagcctggctttctaagaatgattctctggagagaaagaccatgtgaatggtctgtggaagaccagaacaatcctgctgcagtccaagtggattttcctagagacaagcctttgttaaaatattctaaaagtatatgtggcaccttccaattctgggawcctggcctttctaagcacatgcaacacaaccccctcgcttaagctacctgtgagagagctacaaatggcaaaacttcttttgctactctaaatattaatgcattaaaa

SEQ ID NO: 139496 - DNA, 589 bp, Homo sapiens
gatgtaatacatgccaagaaacaccttcaaggcaggagaacaataacatgtacaaagaccaccaacagaagtatcagaaatgctgaaggaaggccaatggagctccagcatcataaagaagggtgatataaaatgagactggaaaggtgggcagacatcacctggcaggaccacagggagttggattttattctaagaacaaaaaatggtccttaagaggaccattctgawcatgatgtagaaaatggacttgaagggggtaaagtacaaactagagaccagttagaaactattatagtttatcaggcaagtgacaattatgggtttagtctaggagcagtacaatgacttgtaaaatactttctaaatatgctgtgaagtgtccatttttgagaagattagaaatgagtcccccttaatttaagaaggaaattggctctaacataaggaaaactatgaaaacaccttcttggacctaaaagtatgtcctttatacatgtatttaaatcccttctatgtaccaataagaaaactgaactgacacatctttgcactaaatactgagctctggacaacttagtaatcacac

SEQ ID NO: 139497 - DNA, 404 bp, Homo sapiens
aagagtataaaattaaaacactttcaaaactgcaaagtctaaaaatagttacctaccccacattcatgctttagcagaaagcgccaccaaaacattttgacaaatcaagaaagaaagacactaaattctaataggaaagaaaagycaaggacaagtaggacaatttcctcaggaggaagtattttaaatatttttaccttcaagctgaagataagcttccaaatgatgaacaggttcaagttttaggtctaaaatggcaaatttctctcagatttagaataacaacttaattaaataacatacacttataaaagtactattatgggctgggtccagcggctcacacctgtaatcctagcaccttgtgaggtcaaggtgagcaaattgcctgagctcaggaattc

SEQ ID NO: 139498 - DNA, 243 bp, Homo sapiens
ttagctatgctggaagtttagaaaactgagggctccaggaggatatttccatgggaaaaaaaaaamcagaaatgaagtatctgaactattgaggttctaccaattctgtggaagtttacagtttccacaattataaaaataaaaaattatttaaggaaggtaataatacactataatgcctggctgtaaataatattttcataggcacaacatggtaaaagtgactataaatttaataaaatg

SEQ ID NO: 139499 - DNA, 471 bp, Homo sapiens
atacatgtggtagtcatatatgatagccagcctccaagttggccgtcaatgacctgacaccaatgatccttagtgttcatctctttttatagtctcttcccatatcaaatagagctggtctgtgtaaccaataagatattctggaaacgtgaagattaattcgtcagtaatgtgagtgagccatcttggaagcagaccatccagtcccagttaagccttaggtaacaacagccctggccaacatcttgattcatgagrgaccctgaaccaaaactatccagccaacctactctcaaatccctgacctacagaaactctgatataataaatatttattgttgtttcaagtcactaaattttggggtaaattgttgtgcatcatggataactaatacatgaaagagagaattggatgttaattgagtttattgaagagattatatgaattgttgtgtgtatgactccctgtca

SEQ ID NO: 139500 - DNA, 539 bp, Homo sapiens
aaacaaaatagagaaaaataaagagaaatgtaattaagatcagggaaagtaaataaaatgaagatgaagaaaataaatacaataaaattaagagaaataaacagaaatgaaacaatttgcaatagaataaaataaaactttatgaatcaggagaaaaaataaaagtaaaaataaagataaatatggagaaataaaataaaataatataaagggataagaatgggagtaaataagataaaaaagaaattaaataaaatgtttcaaacaagacacaaattggagaacatttgaaatgaagagacaataatataaaaaataaaagatagaaacaaatttaaatgcatagaaaaaatgaaagtaaatamaaaataaaaaagaaaaagaaaaatatatagaaaaataaaagttaaagagcaaaataagacctggggataatctacaaaatgtttcacccaacaattgcatagtacatatttctatatacatttggcatgttttcttagataggcaaacttttaagctagaatgcaagttttagc

SEQ ID NO: 139501 - DNA, 579 bp, Homo sapiens
gctaaatgttacagcattgtctcatgggttcctaacacagcaggacgattagcagctgtctgagtaacaaagagaacctgaagcctacaagcttagctttttattttccagatttggaatgcttgaagctccctggtggagttaacagcaaaaggaatagaagccttgatgcatagcagctaatcctttcctttctcttttctgtattctgctcagtaaaaatgaaccttttccttacattgttctccatattccaaattaattttggagagcattttttttgttggttatttgtttaaaaaataattttggggggccttttttttttcctctgatcttscctaggaagtgattggagggcattgtaggtcatggagacccccatttggtgaaggttcaccatcctgtctaaccaagttacacataaaataatttcaactaagagtggaaacactagataactgtcaacactacttttaggcccagtgagaagattcatctcactagaagcattcagagaaaaaaatgtatatttattttttgttgttgttgctagtttcaccccattttcttacctta

SEQ ID NO: 139502 - DNA, 534 bp, Homo sapiens
ctactttcggcatgatttttgcaaattttaaggagcaggatgtttatatacaagcctttttcctcactgttcatctctcccaaactcaatctctcttcttgtgtcattgtcttctacaatttgggaaagccagcatatagcttcgtggaaccccagtaatccttccacttacgttttctgattaagaaaaagaaataatataaggcaggcaaattttttctcctcctagccgtctgcggtagatggccaatctttattttgtattatttatttatttattttatttttatttatttattttttattttttatttttttattttttatcttgctctgttgcccaagctgaagtgcagtggcacaatgtgagctcactgcaacctccacctcccaggttcaagtgattctcctgcctcagcctcccgagtagctgrgatcacaggcgcgtgccaccatgcccggctaatttttgtattttagtagagacgaggttttgccatgttggccaggctggtctcgaactgatggcctcaa

SEQ ID NO: 139503 - DNA, 299 bp, Homo sapiens
cctagcctatgaaatctgagtcatgtcctttgacgatggggctgctttgtgcttcttagaatcactraatgtttatgctggaatggatgctacagatagatcccttatgggggtccccttgaactgactcccactctgctgatggcatgcaagattcctaaggaagtcaatggacagaaactcacgtagtgagaaagtttcagtccttctgatgacctcagagagaaaattgtcttggtgctaatttgtcatttaagaaagaggaagcagcctcaggctcacagttggtatcttgctag

SEQ ID NO: 139504 - DNA, 432 bp, Homo sapiens
tctgaaaataaatgaccaaagccacttcagaaagcagcaaacttcaaacarcttggtaatttgtagatccctctgacatcccaagtgcataatggatttgcaaagacattgaagattaagtaaattaactatgaagttgcaactctatttaaacatttttccttaaaaatttttttttttattttttggaaaatatatttggtgacaaatagtcctcaagaagcgactgtggtttttacctctgtcccaggtagtccatctatccaaaagaagcaattgagaaaacccacaggctgaaggccagatttggctcttgtgggtcatagagttctattaaaaaaaaaaaaaaacagcttcagataatctgagaggttcctcagactaacattcaaagggatattttcaactcatgctatagaaattggaaaaaaa

SEQ ID NO: 139505 - DNA, 432 bp, Homo sapiens
tctgaaaataaatgaccaaagccacttcagaaagcagcaaacttcaaacagcttggtaatttgtagatccctctgacatcccaagtgcataatggatttgcaaagacattgaagattaagtaaattaactatgaagtygcaactctatttaaacatttttccttaaaaatttttttttttattttttggaaaatatatttggtgacaaatagtcctcaagaagcgactgtggtttttacctctgtcccaggtagtccatctatccaaaagaagcaattgagaaaacccacaggctgaaggccagatttggctcttgtgggtcatagagttctattaaaaaaaaaaaaaaacagcttcagataatctgagaggttcctcagactaacattcaaagggatattttcaactcatgctatagaaattggaaaaaaa

SEQ ID NO: 139506 - DNA, 432 bp, Homo sapiens
tctgaaaataaatgaccaaagccacttcagaaagcagcaaacttcaaacagcttggtaatttgtagatccctctgacatcccaagtgcataatggatttgcaaagacattgaagattaagtaaattaactatgaagttgcaactctatttaaacatttttccttaaaaatttttttttttattttttggaaaatatatttggtgacaaatagtcctcaagaagcgactgtggtttttacctctgtcccaggtagtccatctatccaaaagaagcaattgagaaaacccacaggctgaaggccaratttggctcttgtgggtcatagagttctattaaaaaaaaaaaaaaacagcttcagataatctgagaggttcctcagactaacattcaaagggatattttcaactcatgctatagaaattggaaaaaaa

SEQ ID NO: 139507 - DNA, 432 bp, Homo sapiens
tctgaaaataaatgaccaaagccacttcagaaagcagcaaacttcaaacagcttggtaatttgtagatccctctgacatcccaagtgcataatggatttgcaaagacattgaagattaagtaaattaactatgaagttgcaactctatttaaacatttttccttaaaaatttttttttttattttttggaaaatatatttggtgacaaatagtcctcaagaagcgactgtggtttttacctctgtcccaggtagtccatctatccaaaagaagcaattgagaaaacccacaggctgaaggccagatttggctcttgtgggtcatagarttctattaaaaaaaaaaaaaaacagcttcagataatctgagaggttcctcagactaacattcaaagggatattttcaactcatgctatagaaattggaaaaaaa

SEQ ID NO: 139508 - DNA, 421 bp, Homo sapiens
gtatatagcccaggtgacaactctggctgctaaagtccaagttagacctacctttattgactaaggagggaataaaatgagacatatggcttatttcttgagtttctcattgctctgaaagaaacgggcactgaatatcttgccattatagatacatttaatgaacatccattcacttcactggtgtgaaatactttctgcatcacacagcaagtaccagagaaaggtgctacaatgggtaattattattttctagtgggatgtcacctcacattcagttgacaggagtttgacagcattaagccccaaagaaactatagccacatgatagtagatacaaaggrctatcatatcatattataaaatatcacatcatatcatgttgtattataaaaggaatcttgatcttcctttaccaacc

SEQ ID NO: 139509 - DNA, 421 bp, Homo sapiens
gtatatagcccaggtgacaactctggctgctaaagtccaagttagacctacctttattgactaaggagggaataaaatgagacatatggcttatttcttgagtttctcattgctctgaaagaaacgggcactgaatatcttgccattatagatacatttaatgaacatccattcacttcactggtgtgaaatactttctgcatcacacagcaagtaccagagaaaggtgctacaatgggtaattattattttctagtgggatgtcacctcacattcagttgacaggagtttgacagcattaagccccaaagaaactatagccacatgatagtagatacaaagggctatcatatcatattataaaatatcacrtcatatcatgttgtattataaaaggaatcttgatcttcctttaccaacc

SEQ ID NO: 139510 - DNA, 497 bp, Homo sapiens
aaaaaaaaaaaaaaaaaaaagaggaaaagaattctggaataggggatagtcaatctacttttatataactttgctacatttaacttccttaaatattgcctcatctgtaatatttaggagttataactggatcagaaagcaaactttttcagtaaagaaccagcaagtaaatatttcagcctttggagaccatacacagtttctgttgtatatttttctttgctgagtaatattctgctgtatgaataataccacagttttgttttttgtttttttgagatggagcttcactcatcgcccaggctagagtgcaatgcacaagcttggcttactgcaacttccacctcccaggttcaagcractctcctgcctcagcctcccaagtagctgggattacaggcacgtgccaccacgcctggctaacttttcgcatttttagtacagacggggtttcaccatgttggtcaggctggtcttcactcctgactgcaggtgat

SEQ ID NO: 139511 - DNA, 389 bp, Homo sapiens
ttaacacttatataggtcacatactgtgccaaaacttcatacttcatgctagaactgttctaagcaatatctaaacactatgtccatgtatatggcatgttacttagaataattctggcataaattattagcatacatgtkaactaatatgcatgcatatatttatatgtctacacacacacgtgcacgcacatacacatacacactcaccatcctcttgagaaatgcactctggtccctattttaaagttgggcaaatgctagaacagaaaagctaagtgtgtgcctgaattctcacattcagtaagtgggagagcaatgactaaacttaggcaatgtgccccagagtccatcatcaacaccttgctacagtaccatgcaggaatagc

SEQ ID NO: 139512 - DNA, 481 bp, Homo sapiens
catgaaaataaagaaaaactcactgaatttcttagttgagtaaattcactggtaatgtgaactagggcttgaratagatctttctatatatgaattcaatacctctgctaacctgtcaacaacaacaataataatagcaataacgataacgataacaactgtttaataaacatttggtgttagaatacaggtcccccagtattttgctccaggactttttgtcttgaactatgacaatctgtgcagaaaaaggccagtcttagagtcaaatgcagacagggctactgaccaggagttaacactaagcatcactgcatcttcttgagtctcagtctcctgtcttagcacatcactatattgcaatgatgaaagctttcaggcatttctgtgtggaagaaaaaattaggtgacactcttgtggataggagaggccagagaatttctttgacactgaatttgcatagtgagcaagttttttttc

SEQ ID NO: 139513 - DNA, 633 bp, Homo sapiens
ggagctgccatacatgttggtgttatctctcagtgcagagacagaaatataaatatatgacactgttgtcaacagtcacttcattaccccctacactttttttttattactttttttttgagaccgagtctcgctctgttgcccaggctggagcgcagttgcatgatcttggctcactgcaacctccgcctcccgggttcaagcgattctcctgcctcagcctcctgagtagctgagattacagacacgtgccaccacgctaatttttgtatttttagtagaaacggggtttcactatgttggccaggctgtctcacactcctgacttcatgtgatccacctgtctcgtcctgccaaattgctgggattacaggcgtgagccatcgtgcccagccaattatctcttacacttaacacagcagaagtcaygcaaaatccagaatttcagaacaaacacagcagtagcaacagaggagtctggtgtcatatacatgccgtcaattacttaacaaacatttatctttacatgcacaacgccttcaagaacaatttctcttctgaatcatacaaaccagtgggcaacaaaggcatgtttctctttgtttctgggttgatgtacataatatcagttgt

SEQ ID NO: 139514 - DNA, 416 bp, Homo sapiens
taggtcatttcatagagtcctgaagaatcctatttaatatcacgtgggtttgttatctggaccacagagcaattgaaggaatgattgtctattgggacctactcttttcctctgacttctgacatgcaaactttctccagtgtacagttttaacaaatggcacaccacactttggtccagcatgttatatccaggattcttattgagttattatgaaaggtggtatttccaaaattcatataaggaactctcaataatttatacttacctccatrtaatacattcaggtcttctttccaatgccttagcttggatacattttgtgagagtaatagcatgtgaaagaatgtcaaaaaccagaggcctgggcttgagatttagccctgagctctgcccatgcccttcccttccagtga

SEQ ID NO: 139515 - DNA, 534 bp, Homo sapiens
gtatagtctccactgaagtcaaggttccttcagatgccacaaagatgttctagacctcagactacactgtaaagtctgtcatgccttgagacactgggaccagccttttgaactttgtatcaatctgacactcgctgagttgaggacatgggaagtgatagctcccaggcaagaagscttctctttggccaaggacaaatctctggaaaaggggatagttctagttgtcatctagcactcacagctgaaggatgagttcacctgctagagaggatctggatagagacctgagaacatcctcaacaagaccactttcaaccctaagagctaagcttctcctctcggtgtttctctctgtgctttagatgccaccctgctcttcagaagctctcaattaatacctgaccaagttggtgtataaaaaccccagctccctcccactcaaatgagataaccctaaggtgcttcctatcccactgggatgaaactcactcacagggatgatgtcctgatgatgtcccatagatgggcttt

SEQ ID NO: 139516 - DNA, 591 bp, Homo sapiens
taacaacagctattccattttggttaatttgggggagattaataagctaagtttttttactgtgggaaaaagggagctatgattttctttagacaaatttgcagaaactttaatgctaaatcattctctattttttgttttggtttgtcttggtttggtttagctttgatcagtcttttgttattttattctttgcaagcwaaatttcttgtcaatttatttccttgtttccattcttcatgtaagttcttatcatatgctaattagaatagatgaaggaaaaactttaaagcatgatgaggaagtctagttgtgaactattgagggtaaaagagaaacagttaaggcttaagaattttcattttaaaaataatgatggtcacagaaacagcaaaagtcctatattatagcatcagctcccaaattgctgtacatattctttacgcaataaatcacatatgagtaataaaattctcagcttataaaagaagaaaatgttgataagggaaactatgttatatgcaaaaatcagaagagtataaaatcactcatacattcaccacagacaaaatcgccatatacatttatttt

SEQ ID NO: 139517 - DNA, 526 bp, Homo sapiens
tcagctgcatccatcagtggtggaaaaggaaagcaagtggagaaggagcacgctagcctggaagtggcacaaattattcccactcacattcttattggagagaacttgaccacatggccataaccatgaaagtatggaaagctgaaaactgccattaagccatgcactcactgcaattctaytaccaaagaaggaagagagaatggatattagtgactatctgccataactgccactgtattcataaaaaacacttaaaaatcacattccacaatagatgctgagcacattcccttccccttctttcctgcatttgaatcttctcaggaatggtgagaaaaaaaaaaagaaaaaaatcaaaacttttctcaaacaaaatctgctaagggctagctgcttactgaagaaaatcaaccacaatttgcaagatgtgcctttaagtcctctatttttccatccttaaagacagaataggattggctttatgccctctatcactctgtctgcattgcagtcctgtactatg

SEQ ID NO: 139518 - DNA, 509 bp, Homo sapiens
ggtggaaaaggaaagcaagtggagaaggagcacgctagcctggaagtggcacaaattattcccactcacattcttattggagagaacttgaccacatggccataaccatgaaagtatggaaagctgaaaactgccattaagccatgcactcactgcaattctattaccaaagaaggaagagagaatggatattagtgactatctgccataactgccactgtattcataaaaaacacttaaaaatcacattccacaatagatgctgagcacattcccttccccttctttcctgcatttgaatcttctcaggaatggtgagaaaaaaaaaaagaaaaaaatcaaaacttttctcaaacaaawtctgctaagggctagctgcttactgaagaaaatcaaccacaatttgcaagatgtgcctttaagtcctctatttttccatccttaaagacagaataggattggctttatgccctctatcactctgtctgcattgcagtcctgtactatga

SEQ ID NO: 139519 - DNA, 509 bp, Homo sapiens
ggtggaaaaggaaagcaagtggagaaggagcacgctagcctggaagtggcacaaattattcccactcacattcttattggagagaacttgaccacatggccataaccatgaaagtatggaaagctgaaaactgccattaagccatgcactcactgcaattctattaccaaagaaggaagagagaatggatattagtgactatctgccataactgccactgtattcataaaaaacacttaaaaatcacattccacaatagatgctgagcacattcccttccccttctttcctgcatttgaatcttctcaggaatggtgagaaaaaaaaaaagaaaaaaatcaaaacttttctcaaacaaaatctgctaagggctagctgcttactgaagaaaatcaaccacaatttgcaagatgtgcctttaagtcctctatttttccatccttaaakacagaataggattggctttatgccctctatcactctgtctgcattgcagtcctgtactatga

SEQ ID NO: 139520 - DNA, 607 bp, Homo sapiens
cattttttttaggagaaaaatagttaccatgtctgctatggcttgattgtgwccttaaagttcaagtgttggaaacttaatcccagtgcaacagtgttgaaaagagaattcctagtaagaggtgattaggtcattaggactttgtccattactgttatttcaagtgtgaccttgttataaaagtgagtttggccacttcttgcccttttgctctttcattctctcttgcctttctgctttacattatgggatgacacagcatgaaggctctcaccatgtgccaacatctttatattgaacttctcagcctccagaattgtgagatataaatttcttttaaaaaataaattacctaatatttttattcttttatagcaatacacaatggaagaagacaatgttgttttgcctgtgtcccttatggcacattttattatttgcctatatatgtctctgctcagttctcaaatattgtttttaatcaggtctcatctttcctactcaaactaatttccagttctttgcactcttcctgcttctggtgtataattccgtctccttagcatcttttattagtcagagatcgtgagattgcatttgacagaac

SEQ ID NO: 139521 - DNA, 607 bp, Homo sapiens
cattttttttaggagaaaaatagttaccatgtctgctatggcttgattgtgtccttaaagttcaagtgttggaaacttaatcccagtgcaacagtgttgaaaagagaattcctagtaagaggtgattaggtcattaggactttgtccattactgttatttcaagtgtgaccttgttataaaagtgagtttggccacttcttgcccttttgctctttcattctctctygcctttctgctttacattatgggatgacacagcatgaaggctctcaccatgtgccaacatctttatattgaacttctcagcctccagaattgtgagatataaatttcttttaaaaaataaattacctaatatttttattcttttatagcaatacacaatggaagaagacaatgttgttttgcctgtgtcccttatggcacattttattatttgcctatatatgtctctgctcagttctcaaatattgtttttaatcaggtctcatctttcctactcaaactaatttccagttctttgcactcttcctgcttctggtgtataattccgtctccttagcatcttttattagtcagagatcgtgagattgcatttgacagaac

SEQ ID NO: 139522 - DNA, 607 bp, Homo sapiens
cattttttttaggagaaaaatagttaccatgtctgctatggcttgattgtgtccttaaagttcaagtgttggaaacttaatcccagtgcaacagtgttgaaaagagaattcctagtaagaggtgattaggtcattaggactttgtccattactgttatttcaagtgtgaccttgttataaaagtgagtttggccacttcttgcccttttgctctttcattctctcttgcctttctgctttacattatgggatgacacagcatgaaggctctcaccatgtgccaacatctttatattgaacttctcagcctccagaattgtgagatataaatttcttttaaaaaataaattacctaatwtttttattcttttatagcaatacacaatggaagaagacaatgttgttttgcctgtgtcccttatggcacattttattatttgcctatatatgtctctgctcagttctcaaatattgtttttaatcaggtctcatctttcctactcaaactaatttccagttctttgcactcttcctgcttctggtgtataattccgtctccttagcatcttttattagtcagagatcgtgagattgcatttgacagaac

SEQ ID NO: 139523 - DNA, 544 bp, Homo sapiens
tcctgcggtgattctaaatcagagatagggttgaaaaccttttctttccttttgtagttttattttagtgttataacctgtcaaattgtgatttataagcatcaaatgacacaatttaaccttataaagtgttcttaaaataaagacaaggtttgtaagagcttgctacggtgttcactacatgaaaatcactcaaaaaatggtatgtatgcatatgtcacatgtctgttcaaaaatcttcatcggacaaatgcaaggaggtcttgactatatctattgtgcacatcaaaacccaggaaaggcagttccctcaggcttatcagaaagagcacagaaatttataatcagagcaatctggggtcagtttcactagtaccctgctgtgtggtcatggrgcagtttcactcagcatgcttcctctggtacaaagtggtcataacaatacttggtaaggttgttggaaaaaaacagacaatgcaattaccacacaatatttttacataatcactactgtatccactataattaaagacaatgtataaca

SEQ ID NO: 139524 - DNA, 532 bp, Homo sapiens
tagtgataccgggcacaggggctaaatggacatataaagagatccctgcctttgaggagcttggaatcatttagaaacacagggaaagtgacaagggtgaggaagtgaaagaggctttgtgccccctgctcatgagcccagaggaattgtcatccctcgaaatacatcccaacccaggggctaagctgaaagtagattatttggttctaaagaagatgaaactcatgattaaaaacaaaaaaattaggcacaataactcaaagctacaactcaatctaaagacaaccagtcccaatgacaagtaccagagaaaacaaaaaatcccacatcgatttgtccctctaaagtcaacataaaaaccttaaaattgttcctcaaaatggaaggtgtgcttatttcttatctcaaactaaaagtgaaacaaaatgaaaacctgtaataatttatggggacctcaaaattgagaaaaaataaaatagtccccaaaatacaattttttttytttttcaacttttattttaggttcaagggg

SEQ ID NO: 139525 - DNA, 347 bp, Homo sapiens
tcctctctaggcagaacctargaagaaggcttacattaactgggtgctggaacaggtaatattacagaattctgcatatgaaaaaacttagcaaaggggtaagagccaaaacacctacggaataaacaaaagatatgtcagaatacttcctgtggctctgtcatgtaatattacagaattccacatatgaaaaatcttagcaaaggggtaagagccaaaacacctacagaataaaccaaagatatatcaaaatacttcctgtggctctgtcacaggcatgacagtagcatcatcagggtgattggcccaccatctgcaataattttctctttattcactttggcaaa

SEQ ID NO: 139526 - DNA, 347 bp, Homo sapiens
tcctctctaggcagaacctaggaagaargcttacattaactgggtgctggaacaggtaatattacagaattctgcatatgaaaaaacttagcaaaggggtaagagccaaaacacctacggaataaacaaaagatatgtcagaatacttcctgtggctctgtcatgtaatattacagaattccacatatgaaaaatcttagcaaaggggtaagagccaaaacacctacagaataaaccaaagatatatcaaaatacttcctgtggctctgtcacaggcatgacagtagcatcatcagggtgattggcccaccatctgcaataattttctctttattcactttggcaaa

SEQ ID NO: 139527 - DNA, 645 bp, Homo sapiens
ggcacactgacttactcttgtaatcttatcatttcggcaagaggaggtgtgaggatggcttgaagtcacgagttggagaccagactgagtaatataatgagcttctttaatctattgccattttggcaccaaggaccggtttagtggaaggcatttttccacatagaagaggtgggtagtgggagaaggtgaccaggtggacaccttggggaggtggggggtggccgttccaggaggaacacagggtagggaggggcttcaggtcagagcactgtgacaggggctgtggtggggcagcagggctgcgaggggcacaaggcagcccagtggggaacaaggagaatggattctggatgaaacacctcaggtcacactcaggaattaaattcttccaaggaaagcaccacctagatcttcgcatgcrcagttcacagtagggctcttactcctgtgggaatccaatgccttcgctgatctgacaggaggcaaagctcaggtggtgcaagtggttcatcacttgttctgcagccggattcctaacaggccacagacagatactggttggagaccagggtttggggaaccctgatctattgtatacttcaaatcactaaaatattataaaaaatttaaactgttctcccc

SEQ ID NO: 139528 - DNA, 564 bp, Homo sapiens
gtatctactacaaacaagtctctcaaaaactggatgtataggatgactcatcttgtgactgtcaatctaactgtttcttagattattctggtacttgtaccatgtacctaaggacagaataaacattaggaaaaaaatgaaatacattcttaagtcccaaaacagggactgtccactaaagatatgctagctaccaccagtgctgaatatccaacctgccaacaacagaaaccaatgccaaagctttaatatggctttattcttcagatatttaggccatccaaacattggctgttcaatcacattcaacaactttccactttggcagagacagaaactcaccatattggaatcaatacttgaattggctcttcatgtttgtgtactgtcaccagcaccactaactgaagactaacagaatgactaatgtattgacatggtatsccacataatattgctcagtcttttatagaaaaggaacggtgacaatgagttaataaataggaattccactgtacataccacatactcaaccatcaaaaatcagccaacttgattgaacag

SEQ ID NO: 139529 - DNA, 564 bp, Homo sapiens
gtatctactacaaacaagtctctcaaaaactggatgtataggatgactcatcttgtgactgtcaatctaactgtttcttagattattctggtacttgtaccatgtacctaaggacagaataaacattaggaaaaaaatgaaatacattcttaagtcccaaaacagggactgtccactaaagatatgctagctaccaccagtgctgaatatccaacctgccaacaacagaaaccaatgccaaagctttaatatggctttattcttcagatatttaggccatccaaacattggctgttcaatcacattcaacaactttccactttggcagagacagaaactcaccatattggaatcaatacttgaattggctcttcatgtttgtgtactgtcaccagcaccactaactgaagactaacagaatgactaatgtattgacatggtatgccacataatattgctcagtcttttatagaaaaggaacggtgacaatgagttaataaataggaattccactgtacataccayatactcaaccatcaaaaatcagccaacttgattgaacag

SEQ ID NO: 139530 - DNA, 505 bp, Homo sapiens
acatagacaaatgtgggtacgaagagcttcattttctgcctagcttgctgaaggtcaaagtttggtaacctgtggaggaagccttctagtgtgagcccatcatcacatcatgaacagcaaatatagcatcagcttccttcctgagccttgtgattgttctgtgctgsaaggggaaaatcagtagaggacatcctgaggaagtgaaaatcagctttgccttacttcatttgtaccagctttcagaataagatgatattgccactgatgagtttcttttaaatgactgttttctccagcggtattttataaacggttgttgcattaaagagtaaatgaaacctccccgaagaacacactccaccatgcctttagtgtctttactgacacatctgggaagacggatggaccctaaagagctagctgcaaactaagtgagtcacatttgtctcccaggaatgttttatatgctgcaaaatgtgacaaaggccattacggagattatatt

SEQ ID NO: 139531 - DNA, 564 bp, Homo sapiens
aataaacaggtgtaattattgcccttggcagaactctgatcagtaaacagtgatcaaatctgtttattagatttagaaggatggcaggcagatacctaaagactttatgccagttccaagtttctataacagtctttgatctaatgcaattctgtttgtcccaagtacagatttctctattgcttagcccggaactaataaataaatgaataattaatgtcatcacaattctcatcatgcttcctttctggctgttggtagctataaaaattacactacccagattttgatacatccacagtcctagatggacctgtgtacatcctttcctacaagttttcagacatagctctctttcactgggatacacatgtacaaggagataagggagacgattckctagtagccagggccatttggttcaggagtaggtaccagggctttgtcttttgttaaaactttgtgtttctaatccagatggtgaacagaaaggaaggtggaatggaccacttcctagtttctaacaggtcattttaatcagtgcgtaatacaggtggactaccc

SEQ ID NO: 139532 - DNA, 564 bp, Homo sapiens
aataaacaggtgtaattattgcccttggcagaactctgatcagtaaacagtgatcaaatctgtttattagatttagaaggatggcaggcagatacctaaagactttatgccagttccaagtttctataacagtctttgatctaatgcaattctgtttgtcccaagtacagatttctctattgcttagcccggaactaataaataaatgaataattaatgtcatcacaattctcatcatgcttcctttctggctgttggtagctataaaaattacactacccagattttgatacatccacagtcctagatggacctgtgtacatcctttcctacaagttttcagacatagctctctttcactgggatacacatgtacaaggagataagggagacgattcgctagtagccagggccatttggttcaggagtaggtaccagggctwtgtcttttgttaaaactttgtgtttctaatccagatggtgaacagaaaggaaggtggaatggaccacttcctagtttctaacaggtcattttaatcagtgcgtaatacaggtggactaccc

SEQ ID NO: 139533 - DNA, 564 bp, Homo sapiens
aataaacaggtgtaattattgcccttggcagaactctgatcagtaaacagtgatcaaatctgtttattagatttagaaggatggcaggcagatacctaaagactttatgccagttccaagtttctataacagtctttgatctaatgcaattctgtttgtcccaagtacagatttctctattgcttagcccggaactaataaataaatgaataattaatgtcatcacaattctcatcatgcttcctttctggctgttggtagctataaaaattacactacccagattttgatacatccacagtcctagatggacctgtgtacatcctttcctacaagttttcagacatagctctctttcactgggatacacatgtacaaggagataagggagacgattcgctagtagccagggccatttggttcaggagtaggtaccagggctttgtcttttgttaaaactttgtgtttctaatccagatggtgaacagaaaggaaggtggaatggaccacttcctagtttctaacaggtcaytttaatcagtgcgtaatacaggtggactaccc

SEQ ID NO: 139534 - DNA, 526 bp, Homo sapiens
tgtctctctctctctctctctctctgtacatatatatatatatacacacacagacacacacacgtataaatatattacttcatgcatctctctctctctttctctctctctctctctctctctctmtatatatatatatatatatatatatatgaagtaaatgcacgtagcacttatgactttcagtgtcttataattctggtaaatagacttggctccatctctcttgatgctcttggccctccacttctcaaagtagtggttttctagtggcagtaattctctatgggtccgaacaaaaatcttgattttcagtttgtctagcttcttgtttttttaaggataggaacaacaacctccaagctctttaaatgttacagataaagcagaaacctagtttttttattttaacattttaataaaatataaaatacataaacacataaatacacacacccccaaataaagtcacagctcattgaatttacataaagtaaatagataacttcacccaggtcaagaaata

SEQ ID NO: 139535 - DNA, 598 bp, Homo sapiens
tgatctactggtggcggagttgaacattaatcatgacatttcgttgaaggtcaagatgaaagaaagagaggtgattattgaaacaatgaagtaaagactgagcaaacagatgtagagaacatccttttgatggagggtagaaaaaacacrtaaggaataccagtaagtaatgtaaaccatgtaaataataccagtaagtaatgtaaaacatgtaagtaataccaaagatcaccctttgtgatggagggcagaaaaaccacgtaagtaatactggtcagtcaaagaagttccagatggctagcttctgagccagggctgtaaaataaaagtgcaatccgtaaacaggcacatatgcaattatgattttctagtagctacattaaaaagtcaaagaaaactggcaaaattaattatgataccattatttaatcaatatatactaaatgttatcctttcaatagataataatatgaaattattagagatatattttacattgtccttaatattttaaatgtattttacaaatatagcacattttgatttggaaaagccatatttcaagtgcttgacagtcacatgtggctagtagcttcct

SEQ ID NO: 139536 - DNA, 456 bp, Homo sapiens
tctttatgattacaccattgtactggctagggatacccaattttcctrtggttgctgctcagttgtcatgaaatgggattattctaaagaagacaagagaaaataaaacagggatatgtatggaaatagcagtaactgaatgaacttaggcaatgcagtgacctgacaacacagcagaggtgacaccagaaacagctaggcacgcgtgaaaggtcacttgaagggctcaagggttactaacaaaaacaagcaccccagcagcctggaatcccattgatgactgaggtatgggcacaggagataatcttgaaaccatgagtactatttcctagatcgactcgtttaaacctccttaacttgtagtatcataatgaaagtccaatatcctaattaataagaaacttatttggaaactcttaattgccagaaaaatattaggaggtttaagattatgaa

SEQ ID NO: 139537 - DNA, 527 bp, Homo sapiens
aagatgcaatatttgaactaatgttatttttcgtgttacagtataaccacagccatgacctctacttattttactgagaaaagattaatggtgcttcagggtgtcttttgtttccatatccagaaaccaagaagtgcaggctgaagatattgttgttgttgctgctgctgatgccactgttgttattactattttggcaagttytcatataatgctttgtcaggttctcctaattaacttctttcaacttcagtttctcattattaaaatggggatatttccaactatgtggggttgctgtagaaattcaattagatgatccaaatacaagcatgcatcacattgtttgaaaatgagacacatttttgaatatacaaaaacaaaggattttcttcagtaccattgccacagatgattaccctaaaaaatgaagatatacaaatgtcttacatgttttgaaatataaagtgattgtaaattgaaaagaattggcaattttctgtctaaatcaaacacatcaattcttt

SEQ ID NO: 139538 - DNA, 527 bp, Homo sapiens
aagatgcaatatttgaactaatgttatttttcgtgttacagtataaccacagccatgacctctacttattttactgagaaaagattaatggtgcttcagggtgtcttttgtttccatatccagaaaccaagaagtgcaggctgaagatattgttgttgttgctgctgctgatgccactgttgttattactattttggcaagttctcatataatgctttgtcaggttctcctaattaacttctttcaacttcagtttctcattattaaaatggggatatttccaactatgtggggttgctgtagaaattcaattagatgatccaaatacaagcatgcatcacattgtttgaaaatgagacacatttttgaatatacaaaaacaaaggattttcttcagtaccattgccacagatgattaccytaaaaaatgaagatatacaaatgtcttacatgttttgaaatataaagtgattgtaaattgaaaagaattggcaattttctgtctaaatcaaacacatcaattcttt

SEQ ID NO: 139539 - DNA, 453 bp, Homo sapiens
aaaagtgccttttgcctcctgccatgattctgaggcctccccacccatgtggaactgtaagtccaattaaacctcatttttctttccagtcttgggtatgtctttattagcagcctgaaaatggactaatacaccagtctgtacaaaaaatmcaaaaaaaaaaaaaaaaatagccaggcatggtggcgtgcacctatagtcctagctactcaggagtctgaggtgggaggatctccagagtctgggaggtggaggctacagtgagctgtgatcataccactgtatgacagagtgagacccttcctcaacaaaataaaaaaataaataaataaataaaatacaaaggaaaataaatgttttagactttgtgggcaatatggtttctgtgttagtactcaattctgccattggtacacaaaagcagtcatagacattatataattaatagttgta

SEQ ID NO: 139540 - DNA, 565 bp, Homo sapiens
caagggtaaactctaggcttacttttggatccaggttgaacctggaggcctcagtgtcagaatgatctcaaaaggtgcagaatctgagatacatctgtgaaatcccaccacttacctctagatattagcagttagtcccatgagaagcagagttattcaaaagaaggtcttaggactgggtctaggcaatgattttctttaaggatgcatgcaaaggtagaggtcatttgggaaagaaaattaacagcataccttagagctcatctttctttacaacagtcctctctttttactatatatttcattctccatttagacatgacagctctttgggagtatgagatgtatttatttacagtaattttgacttagatstttttacaagtctcatctttaccatcagttagctgttttggctatgaggacacccatattttaaaggtgaacgttactgaattctcagagtcatatatcttgcttggaatctgatcacactgcaagccttcatctttagaaaaaaacaaagaggaaactagttgtgaaagtatattggggatttaagagc

SEQ ID NO: 139541 - DNA, 565 bp, Homo sapiens
caagggtaaactctaggcttacttttggatccaggttgaacctggaggcctcagtgtcagaatgatctcaaaaggtgcagaatctgagatacatctgtgaaatcccaccacttacctctagatattagcagttagtcccatgagaagcagagttattcaaaagaaggtcttaggactgggtctaggcaatgattttctttaaggatgcatgcaaaggtagaggtcatttgggaaagaaaattaacagcataccttagagctcatctttctttacaacagtcctctctttttactatatatttcattctccatttagacatgacagctctttgggagtatgagatgtatttatttacagtaattttgacttagatctttttacaagtctcatctttaccatcagttagctgttttggctatgaggacacccatrttttaaaggtgaacgttactgaattctcagagtcatatatcttgcttggaatctgatcacactgcaagccttcatctttagaaaaaaacaaagaggaaactagttgtgaaagtatattggggatttaagagc

SEQ ID NO: 139542 - DNA, 565 bp, Homo sapiens
caagggtaaactctaggcttacttttggatccaggttgaacctggaggcctcagtgtcagaatgatctcaaaaggtgcagaatctgagatacatctgtgaaatcccaccacttacctctagatattagcagttagtcccatgagaagcagagttattcaaaagaaggtcttaggactgggtctaggcaatgattttctttaaggatgcatgcaaaggtagaggtcatttgggaaagaaaattaacagcataccttagagctcatctttctttacaacagtcctctctttttactatatatttcattctccatttagacatgacagctctttgggagtatgagatgtatttatttacagtaattttgacttagatctttttacaagtctcatctttaccatcagttagctgttttggctatgaggacacccatattttaaaggtgaacgttactgaattctcasagtcatatatcttgcttggaatctgatcacactgcaagccttcatctttagaaaaaaacaaagaggaaactagttgtgaaagtatattggggatttaagagc

SEQ ID NO: 139543 - DNA, 546 bp, Homo sapiens
atcagaagacaaaaagcaaacatggacatagcctatctttattgatatatatttatatctatctatatgccattatacatatactcacattatatacatgatatatatttttatttatcatgaaataaaaatctttattgatgtatatttatatctatattgatatatgtttatatctatctatatgccrttatatatatactcacattgcatacaagaaatgtaagtatgtgtttgtaaacacacacacttatgaatgagagagagaaaatgctccatagcagctgaggataaaacagaaagagtcacaccaaggcagcctcacaattcaggaatagagaaacagtaacccggtggaggggcaggtggcggaacaggtgcaagggtaccagagttaaagtctgagcctgcaaggtgtcccaggtgtacagagatagagacagaaggatcaagctcaggacaatgtggttaagttatggcagagagtggctggctgaggcagtatttaatggccaagacgctcaccttcacaatttattggtgaaa

SEQ ID NO: 139544 - DNA, 546 bp, Homo sapiens
atcagaagacaaaaagcaaacatggacatagcctatctttattgatatatatttatatctatctatatgccattatacatatactcacattatatacatgatatatatttttatttatcatgaaataaaaatctttattgatgtatatttatatctatattgatatatgtttatatctatctatatgccattatatatatactcacattgcatacaagaaatgtaagtatgtgtttgtaaacacacacacttatgaatgagagagagaaaatgctccatagcagctgaggataaaacagaaagagtcacaccaaggcagcctcacaattcaggaayagagaaacagtaacccggtggaggggcaggtggcggaacaggtgcaagggtaccagagttaaagtctgagcctgcaaggtgtcccaggtgtacagagatagagacagaaggatcaagctcaggacaatgtggttaagttatggcagagagtggctggctgaggcagtatttaatggccaagacgctcaccttcacaatttattggtgaaa

SEQ ID NO: 139545 - DNA, 546 bp, Homo sapiens
atcagaagacaaaaagcaaacatggacatagcctatctttattgatatatatttatatctatctatatgccattatacatatactcacattatatacatgatatatatttttatttatcatgaaataaaaatctttattgatgtatatttatatctatattgatatatgtttatatctatctatatgccattatatatatactcacattgcatacaagaaatgtaagtatgtgtttgtaaacacacacacttatgaatgagagagagaaaatgctccatagcagctgaggataaaacagaaagagtcacaccaaggcagcctcacaattcaggaatagagaaacagtaacccggtggaggggcaggtggcggaacaggtgcaagggtaccagagttaaagtctgagcctgcaaggtgtcccaggtgyacagagatagagacagaaggatcaagctcaggacaatgtggttaagttatggcagagagtggctggctgaggcagtatttaatggccaagacgctcaccttcacaatttattggtgaaa

SEQ ID NO: 139546 - DNA, 460 bp, Homo sapiens
ccagtttgtgcatttacctactgaaggacaccttggttgcctccaagttttgttaattataaatgaacctgctataaaccccatgtgcaagtatttttgtggacataagcgttcaattcatttggatcagtgtcaaggaacatgattactggattatatggtaaaagtatgtttagttttgtaagaaactgccaaactggcttagaaagtggctgtgccattttgcattcccatcagcaatatatgtgagttcccaatgtatgagatttggagtaccaaatcctcatcagaatttcatgttgtcaatgttctgaattttggacattctaataggtgtgtagcagtatttcattgtttgaatttacatttccctaattatatatgatgtggagtatcttttcatatgctyacatgacatctgtgtatcttctttggcaaggtgttggttaagattttagga

SEQ ID NO: 139547 - DNA, 490 bp, Homo sapiens
tgcaccagagaaccagaaagaggtgaggaggagcatgtgctttcaaccattcctgatgtctcccgtatgtcatctagccaccttgttgctgcctttcactgaaatgtctcttattatcatgtttttaatattttaatgtgtttctatttaatcacgagccatgtttacaaaatttctattggcatgcagcgtgtgtatccccccataccctgccttctctccattaatgtttatgtcagtcatttacttaaacctaagaattgataggcagtaggcagagtgtggtacacactgatatgtcaccctcatcccctttcagtgaagaaatgtttgtccccggtgctgagaacaccatcagatgatctttctgcccagagccactatctgtcyctaaatatcaggtttatcaatgcctggccatctcttttcaatttgggacaactgccagcgaccactagctagctccagaattcctcagtatggaagctgt

SEQ ID NO: 139548 - DNA, 582 bp, Homo sapiens
tcatggcaaccttacagtttagatattgatatttactactgtccagataaaaggctgataatacctgctttctaactttcctgtgatagaattctgtctggaattaaaataaaatcaagctgttattcttcaagacctcacgttagtaaaggtttttatgagtttgtactacccaacttttgtgactgtgaagggagtgggttttctcatgtgctgctggtgtgggtataaatggggcagcctgagagtagaaatctgaygttattgttcgtgtctgcaaatctgcatcccctgtctcaacagtctgactttttattctacaatttttttctactcatgcaagtacaaatacttgtattcactgcattatttattgcagtatttaaaatactaactttgaagacaatgcgattgcccagccaaagaataatattaaataatgtagagtccatccatataacaccatgcaatctatgtaactgttacaaaattatgctatatttgtgtgtaccgtcatataaggagatctaagacataatcttcagtgaaaaactgcaagttgcaaacctatatattgaaagc

SEQ ID NO: 139549 - DNA, 507 bp, Homo sapiens
gctggggacagccaaactccaggggaagattatcttcccactctctcccctttccaggtccccaacccactgagagccacctccatcactcaatacaacctctgcattcaccatccttcaagtccatgagacctgattcttccagggtgctggacaagaacctgggtaccaagaggacaaggtgtaagaagctgtcaccctgactgtccactgagctggttaacacctagccatccatggacagcaactgctaaaggagcattaattgtaacacacccctcgccactgctgtgggatggagcccaaaagcactagctccggccccagcacccactcatstgcgtgcttcccatcctgcaaggggtttgagcacatggtggccaagtaagcaagccacacccctatcgcaagtctcacaaaggggtaagggaactctcctgtctcagtggtgctcactcaactgcagttgtttgtcaaaactcacagaactgtaaaccaaaaagtgtg

SEQ ID NO: 139550 - DNA, 516 bp, Homo sapiens
tcgtccatgtcctcgcccgcccccgcgcggtggccgcgccggacatccgccgtcgctcgcctggcctgtcctcgtcgccctcgctctggcacagcggcggccgccttggatgcgcacagccaggacgctccgagcagcatgggggaggcgccgcagcggtctcgcgcgctgcctaggtccggggccgggtggagcccgccaccsgcagccagcatcaggactggggagccgggctcgccgtgactttcttcaccccggctggtggcccgatgctagggctgtggcggtgcgaagtggctcaccgaccggcctgcgtggcggggacggccagccgagcccgcccagtcctgagcgcaggactgcggctgcgggctacacctgtcccgccgcaagtccgccccgcgcgggaccgggggtgctgccgggcacgaagctcaacgggttctgtgctgcaagcggcggctcgcgcctgggagaccagcggcaggaagtgcgggcagcggccggccaggtccc

SEQ ID NO: 139551 - DNA, 523 bp, Homo sapiens
gaattccggggaggagcatttatcattaatttcatcagaatgaagatttccaaggaagagaggataagggctatgttttagcactagtgagcrggcagctgtggccaggatgtgactgaggaagaattgcccctgtgggaggaggctcagagcttctgcaagagcctgagaggaaggaatgaattagggcaggaagtgcaggagcagaagaagagaagaaatgcagggggcatggaaaggaggaatctatagaacctatccctccgcagagctgggcgtcagagctgcccagagggtcagcttcagagttctgggccccactgcagagctcccagctcaggaggcctggataaggcctgtgtgtggcatttctaacaagctcctggctgacaagctgctgcttctcctgggtcccatcccgagagctgctgcctgagaccgaccctggaggcgtcaagacaggaacctgggagaggcatggcggagctgcacctggggagctggtgggcccacctggagcaga

SEQ ID NO: 139552 - DNA, 446 bp, Homo sapiens
tgtacacatcattctatgagaacatatactacagttagccaaccccccaaccaatcttttaacattggagagttaagttgtttccaattaaaaaaaattattataacaacacaaagataattaaatatatatttaagcccatacrctgttttttgaaacgtttttgaggtataatttatggtcattctcattttgagattaccgtgcaatcagttttgaccattgccctcgcccgtacccctcatcctaagcaagagctggaacattctttttttttcttttttttaaatcagctttccatttattaagtttagagaggaacaattctaagtaaagctttaaaaaatcttcaacacagatattttttataggcaatacagaaggacaggatgaccaataagggtgctcagagtaaaactcctaaagttgcacaagttgtagaagaa

SEQ ID NO: 139553 - DNA, 446 bp, Homo sapiens
tgtacacatcattctatgagaacatatactacagttagccaaccccccaaccaatcttttaacattggagagttaagttgtttccaattaaaaaaaattattataacaacacaaagataattaaatatatatttaagcccatacgctgttttttgaaacgtttttgaggtataatttatggtcattctcattttgagattacygtgcaatcagttttgaccattgccctcgcccgtacccctcatcctaagcaagagctggaacattctttttttttcttttttttaaatcagctttccatttattaagtttagagaggaacaattctaagtaaagctttaaaaaatcttcaacacagatattttttataggcaatacagaaggacaggatgaccaataagggtgctcagagtaaaactcctaaagttgcacaagttgtagaagaa

SEQ ID NO: 139554 - DNA, 607 bp, Homo sapiens
agaccatgggtgccccttcttggaaacgttggcaggatggccacagggctctacagaacatcatctctgcatctacttgcactgccaaagctgttggaaaggtcatccccaagctgaatggaagctcactagcatggtgttccatatccccacctctgtgtcattttggacctgacttgccatctggagaaacytgacaaatatgacaccatcaaaaaggcggtgaagcaggcattggagggccccctcaagggcatcttgggctatagtgagtgccaggttgtctcctctgactttaacagacattcactcttccagctttgatgctggggctggcatttccctcaatgactactttgtcaagcttattccctggtatgacaatgaatttggcaacagggtagtggaggcctcatggtccacatggcctccaaagagtaagagcccctggaccaccagccccagcaagagcacaagaagattagagaggttctcagctgctagggagtccctgccacactcactctcccaccatactgagaatctccccctgacacagtttccatgccaggccccctgaaaagagaggggcctagggagccacatc

SEQ ID NO: 139555 - DNA, 607 bp, Homo sapiens
agaccatgggtgccccttcttggaaacgttggcaggatggccacagggctctacagaacatcatctctgcatctacttgcactgccaaagctgttggaaaggtcatccccaagctgaatggaagctcactagcatggtgttccatatccccacctctgtgtcattttggacctgacttgccatctggagaaacttgacaaatatgacaccatcaaaaaggcggtgaagcaggcattggagggccccctcaagggcatcttgggctatagtgagtgccaggttgtctcctctgactttaacagacattcactcttccagctttgatgctggggctggcatttccctcaatgactactttgtcaagcttattccctggtatgacaatgaatttggcaacagggtagtggaggcctcatggtccacatggcctccaaagagtaagagcccctggaccaccagccccagcaagagcacaagaagattagagaggttctcagctgctagggagtccctgycacactcactctcccaccatactgagaatctccccctgacacagtttccatgccaggccccctgaaaagagaggggcctagggagccacatc

SEQ ID NO: 139556 - DNA, 423 bp, Homo sapiens
ctttattcctggggtgtaagattcaacatatacaaatcaataaatgtaatttaccacatacacagaattaaaaacaaaaaccatatgatcatctcaatgatgcagaaaaacattcaataaagtccaacatcccttcatgataaaaaccctcaacaaactaggtatcaaaagagcatgccttaactccagcctgggcgacagagcgagactccgtctcaaaaaaaaaaaamaaaacaaaacaaaacaaaaaaaaaaacatgccttaaagtaataagagccatctatgacaaacacacagccgacatcatactgaatgggaaaaagctggaagccttccccctaagaactggaacaaggtaccgactctcactactcctgttcaacatagtaatggaagtcctaaccagaacaatcaggcaaaat

SEQ ID NO: 139557 - DNA, 575 bp, Homo sapiens
gctctctaacacttgtgctcttaatctctcaactatattgattagatacatatatatatgattatatacacatacacacatatgcatatatatggataaagagtaatttaaaatttcacatgcagaatttgatcaaatgtagatggcctacagatgcctattctgaaagctgatattagttaataattactatgaggatagaatmctgtgaattacctccttaataaagaacaattatccctccatccctccttccctccttctctcccttccttccttcctttctttctttctttatttcagaaggtttgtgattcttgttttgcttgtgaaacatagtctttatattttgaaataaaaaatcctaccctctttcctagttattttaaagggtggtaattattgtgattgtacctgtcattgaactttgaagtgttactgatttggtggctctggttctaattataacataaaaccaaagaaggtttatgacttccaagggtgataaggtctagagataaggcctcagaagaatatccttactgacagaaattcaaactagttaggataaattg

SEQ ID NO: 139558 - DNA, 594 bp, Homo sapiens
ctagcatttcattgctaacattttatgtcttccctcctatagatgcttatagtaacaacagttcttctggtactggagaataataacaactataaatgttgccagagtgaaaactgcagcaaaaaatatgtggtaagagcaacagtttttttgaggatggttgagtgggctccagctttctttcctctcactcagaaacacaaaaatattgacagtattataccctcactactgttgagtacagtacagagatcaagagtttactgccaagatcatcttccattttgcttagtctttcctccacttttgttctactgatgcactttcagaaaatcagcatttaaagatacctaaaattaggaaataatacttttttttcctaactaagtttccattagtctattttttctttacaaactttattgagggctaaattacatataataagtggcatccattaaaaktatgcaatatcatgagttttaacagttgactacactcatgaaaccaccattgcagtcaagataacagaatatttctgccaacccccaaagattaacctttgatttactttttgtcattatagattagttt

SEQ ID NO: 139559 - DNA, 558 bp, Homo sapiens
cttgctcagaaattgtatatctgatgggcacggtgactcacgcctgtaatcccagcactttgggaggcccgaggtgggtggatcacaaggtcaggagttagagaccagcctgaccaacatggtaaaaccccgtctctactaaaaatacaaaaattagccaggcatggtggtgggcacctgtagtcccacctactctgaaggctgaagcactaraatcgcttgaacctgggaggtggaagttgcagtgaaccgagatcgcgccactgcactccagcctgggcgacagagcaagattccatctcaaaaaaaaaaaagaaaaagaaaaagaaattgtatatctgacgggatggtccgcaagcttcggggcttgggaggaaggtacagtcataggacagaacacagctttagactgggtcaagatcgtccaagtctggtggtggcttcagaaggccctttgaatgaggctcgtccaggcaataattaccatgttatctaattttgcccacttaacgtttccacttggatgtctaagagccatctcaaagccccacgtggcca

SEQ ID NO: 139560 - DNA, 573 bp, Homo sapiens
catatcagccaggtcagagctgcagcaggctccagcaactgtttgaaagtcttgagcattgtcagatctcggaggagatcaaaagaaacagtcaagccgtatggagaggggaggaggccagagagaactgacctgccacattctttcagacctccaagctggcaggagactgcattccctgaacaccactcctaaacctcctggatacagcagtctccaccctgggcccagaggcttctctggrggaaagaggcaaagacacgccaggtgaaaagctctgatttggatcaatcttcctcccagcttgagatgctaagatgtcactttgcaacacagtgacttcaacttctgaaacctcagcattatttaatatagaattacatatatcaccctggtttagggcttgcagaggaaatacatattcattatgtttaagacattcttaagattatcttccttccccttcagaaagttttatggttttttttttctttttaaggacttagcctcttgcttccagctttagttttatttttgcttttctttccacaattaggttcaggaaagaaaaat

SEQ ID NO: 139561 - DNA, 573 bp, Homo sapiens
catatcagccaggtcagagctgcagcaggctccagcaactgtttgaaagtcttgagcattgtcagatctcggaggagatcaaaagaaacagtcaagccgtatggagaggggaggaggccagagagaactgacctgccacattctttcagacctccaagctggcaggagactgcattccctgaacaccactcctaaacctcctggatacagcagtctccaccctgggcccagaggcttctctgggggaaagaggcaaagacacgccaggtgaaaagctctgatttggatcaatcttcctcccagcttgagatgctaagatgtcactttgcaacacagtgacttcaacttctgaaacctcagcattatttaatatagaattayatatatcaccctggtttagggcttgcagaggaaatacatattcattatgtttaagacattcttaagattatcttccttccccttcagaaagttttatggttttttttttctttttaaggacttagcctcttgcttccagctttagttttatttttgcttttctttccacaattaggttcaggaaagaaaaat

SEQ ID NO: 139562 - DNA, 573 bp, Homo sapiens
catatcagccaggtcagagctgcagcaggctccagcaactgtttgaaagtcttgagcattgtcagatctcggaggagatcaaaagaaacagtcaagccgtatggagaggggaggaggccagagagaactgacctgccacattctttcagacctccaagctggcaggagactgcattccctgaacaccactcctaaacctcctggatacagcagtctccaccctgggcccagaggcttctctgggggaaagaggcaaagacacgccaggtgaaaagctctgatttggatcaatcttcctcccagcttgagatgctaagatgtcactttgcaacacagtgacttcaacttctgaaacctcagcattatttaatatagaattacatatatcaccctggtttagggcttgcagaggaaatacatattcattatgtttaagacattcttaagattatcttccttccccttcagaaagttttatggttttttttttctttttaaggacttagcctsttgcttccagctttagttttatttttgcttttctttccacaattaggttcaggaaagaaaaat

SEQ ID NO: 139563 - DNA, 482 bp, Homo sapiens
tccctgtagtatctgggaagaagccatccctacagtgactcagctgggaaacctggtgtatttactaccccaaatcagaggagagtatcattccctgccaaatcacttcagccattttggtcaytggctctttatgcctgtccccaaaacgtactaagtgagtacatttagtacaagtaatcacttactttgaactctgccttgtatgaaattcaaggctaaaggtaagctgcatgacagcaatccctagaggatacttctctgcccttccccaaccgtactgcttgaaagaagctccatattgaaggtttcccattcccttattttcttggaaatttgccaaagaaattattaatcttgctatacttgcctgataaggaaaactagattttcattttaaccttcccccaaaattacagaaagtttccttttattttcagcaaagtttttcatggtagcaatgggctttcagttttcattag

SEQ ID NO: 139564 - DNA, 617 bp, Homo sapiens
tccttctgcttgttagggggaaatgaattcagaaagcataatgatatggttagactttgtgtcaccaccaaaatctcaccttgaattgtaatctccataatctccacaatctccacatatcaagggagataccagaagggggtaatcgaatcatggaggcagtttcccccatgttgytcttgtgacagtgagtgagttctcatgaaacctaatggttttataagaggttcttcccccttcactctgcacttctccttcctgccgccttttgaagcaggtgccttgcttctcctttaccttccaccatgattgtaagtttcctgaggcctccctagccatgttgaactgtgaatcaattaaacctgtttcctttataaattacccagtctcaggtattctttatagcagtatgaaaactgactaatatacatacataaatacgtacacacatgcatacaaatatatgtatatgaatataggtatataaatgcctgcatataaagtgataattgctctaaaataagcaaggtgagcaccgttgaagggatgcagatcaggaagcaattgatttttttcagaaatcaatttttcaaaaaggaagttgatatttaaattta

SEQ ID NO: 139565 - DNA, 468 bp, Homo sapiens
gaaaaataagactgatgacaagtagagtaacttctatatttgaattgtactgagctattattatatctcccagagaaacattcaaactcaatattattattatcatttccattttacagtttaggaaactgaggcccagagaggttaaataacttgtccaagtttaatagtaaataaatgtatacctgggatttgaaaaaattgtctagttaatagattctcagcttcaatgctgcatttggaggtgattatagcaaagatccagggaagaagagatggtttgattgagaccatgggagggggaatggaaaggaaagaagccttccctaaaaaaatcattattggtaatatgcaaaacctagtgcccctcctcctgatggtaggacaatttcagggaatggtctaagagaatagatggccctggatctcatcaggatgagacagaygtaacaacagggtaaagctcac

SEQ ID NO: 139566 - DNA, 561 bp, Homo sapiens
gggaacatcacacaccggggctgttgtggggtggggggaaggggaagggatagcattakgagatatacctaatgttaaatgacgagttaatgggtgcagcacaccaacatggcacatgtatacatatgtaacaaacctgcacattgtgcacatgtaccctaaaacttgaagtataataaaaaaaagaattaattctgattacgtattctgccgaaatctctagaagacagttaaattattattgcataagcagactctggagtccatataaactgcagacaaaatccaagaagaaatctaatctagaaagagagagcaaagtgggtctaacctgtgagcttgctgggttttgaactaattggacacattcgccaactttgaacagatcaggtggcaaagtcctgaagcttcacaggcttgaagtgtcagaggacaaagttttaaaccagcagaaccgctgaaaactaggagggagtccctacaagaagccctgaagaaggtgagctccaatgccacccacattttgggatgaatgccaaattcttcaggcctaggagagac

SEQ ID NO: 139567 - DNA, 448 bp, Homo sapiens
atccacaactattaaccaatgttcatgcagtgcctgagcacacatacagaacttgtgatctgcagcactggctgaggatgtcagtccactggtgtatattggaaagctaattggggattctttaaagggaactattgtttgttgaataacttttatgtttgctctatgtttttaccttggattctgataggttgataaataaactctcttgacctaatttattgctagaatcayagactcattgttaaattcagctccaaggtaatattaaggatcaagtaggtgccagacactgtgctagttgcactcagaggcaagtaagcaattgcccttgcattctaattggaatacaggccaccattttcatgtgccctcattccccctagtattagataggaccctcccacacattttcttcatatcacattttatgataagattttgttcc

SEQ ID NO: 139568 - DNA, 606 bp, Homo sapiens
atattaattatgcatgattaatatatttaattatattaattatgcatgattaatatatttaattatattaattatgatagcattaatgatacagctaacaattatatattgatatattcagttaatatataatccagcccttggcagaaaaccttgccaaatctgttaaatattcatgacaaaattatgamatttttctctctacattttttcatttcttaagtaaggataattgcagtgcatatcccataaggttaaataacttaataaatataaatgctttggaacgatatttggcattttgtactaacacaataaatattacctattgtgatgataagtaatcacacccttctcctttatggaatctgaaataattgagaaagaattgctgaagtgttttgtacctttagcttatataaatataccacatagaacataccttgtgtttagcactcttccaagcactttacaaatgttaatttacttcatcttcataatgactctttgaggtggttactgttattactgcagttttatagatggggaaaccaaggcacagaaagatttttattgttgttgttgttgctttggttgtaacttgcc

SEQ ID NO: 139569 - DNA, 527 bp, Homo sapiens
ccaatcatgacattcttaacacctgtggattccaattaactatcctgatttaaaagaatcctttgttcctcatatcagcaatctggttccatgctggaaagggccattttgctgacacctggttcccccaaatggcctgaggcctctctcccagctctgatcaggtgccttccccaaggacatccctctagctgctatgtgaggtcctgctcctagtgcccttattcytggaatcaagaatccaggctgattctcaaggtaatgctgtgagacagaatatttcatgtgtatttgagtgtgtggaacttctgtgccagaccttccagaataacgtatctatcataaatagagtaacactagctcctgacccctttaatactgttctccacaaagatataaattctgccataatgaggatactttctgtcttggttcagccaccatcaaacagggtgagctaaaattcttactttgcacaggagaaggaagagatgaaagtgagagtaaagtcaggcaacaaatagcag

SEQ ID NO: 139570 - DNA, 587 bp, Homo sapiens
atgatacagtgggagcagcacagtcttggaccggaaatacgtgtgtttcaattgtatttgtgtctttaattagctgtgtaactttagaaaataaatacgttaaaacctaaaactgggcmtatgccaggtcaatatatgtgatggttcatactgagtgttaacttgagtgtattgaaagatacaaagtagtgattctgggtgtgtctgtgagggtgctaccaaaggaggttaacatttgagtcagtgggctgggaaaggcacacccacccttaatcccatctgatcagctcccaacaaggccagaatataaagcaggcagaaaaaacgtgaaaaggttagactggcctagccccctagcctacatctttctccggtgctggatgcttcctgccctcaaatatcagactccacgttcttcagttttgggacctgtgctagctctcctttctcctcagcttgcagacagcctattgtgcgaccgtgtgatcatgtgggttaatatttaataaactcccatttacatatatataactcccctttatatatataaaatatatatatgtatatatgatatatatatcctatta

SEQ ID NO: 139571 - DNA, 589 bp, Homo sapiens
gcatgatacagtgggagcagcacagtcttggaccggaaatacgtgtgtttcaattgtatttgtgtctttaattagctgtgtaactttagaaaataaatacgttaaaacctaaaactgggcatatgccaggtcaatmtatgtgatggttcatactgagtgttaacttgagtgtattgaaagatacaaagtagtgattctgggtgtgtctgtgagggtgctaccaaaggaggttaacatttgagtcagtgggctgggaaaggcacacccacccttaatcccatctgatcagctcccaacaaggccagaatataaagcaggcagaaaaaacgtgaaaaggttagactggcctagccccctagcctacatctttctccggtgctggatgcttcctgccctcaaatatcagactccacgttcttcagttttgggacctgtgctagctctcctttctcctcagcttgcagacagcctattgtgcgaccgtgtgatcatgtgggttaatatttaataaactcccatttacatatatataactcccctttatatatataaaatatatatatgtatatatgatatatatatcctatta

SEQ ID NO: 139572 - DNA, 562 bp, Homo sapiens
ataatgaggatggctacagacatctgcactgctggaatgaaaactaaaaatcaaaattaaaaaaacatttccaaatttcatttagaatttggcatgttagtgatccagtaagacaatgagccgttcagagtttcagaatgtccagacccagcctgattgctgccaatackttggcttatacattttaaaatcaaacctattagatcacaccagacttcattttgccttttggtagatatgcccaaaatttgcaaccttaaattcattataagaaaccggtgggaaaaaccctaagtgtacttcttaaattaataattttaaatgaattttttagtcatttaaaaaggaaacattgttatgcacttactataatctagttcttaaggccaaacttttgcacatagcttttcatgtaatcttttgcacagcactttaaatcatatatcattatttccacagtgtaagtcagaaaacagaggctcatggaggataaatgaaaacaagcaaacaaacaaaaaaattccttagtaatggttgagattcaaatgtacgtctttacatc

SEQ ID NO: 139573 - DNA, 538 bp, Homo sapiens
tgggcccaagttctaatctagtttttaccaactttaattaaagaaagtatctttattccctgtggttcagagttttatcacatgtaaattagtgacaatataattcctaccgcttcaagtggaagtaacaatcaaaataaacatatgaaaaactatttgttaagttgatgggctaaggcaggtccccaaatgtcagtgggaactcaacttcagctggtatccaggttcttgacaccattccaagaaggaattcaaggacaagtcataaaatagcaaaagtatggagatttattgcaaaatgaaagtacacactcaagaaaggggaatgtgagtatactcaacagagtgagttgtgccccgtggggtttggggcatctatctctatgggtttatttaaccaaggggagtcatattcatgaagatttcttgaaaaagayaaagatttcatgtaactatggtgccacccattttcataccaaatatcggtgttcctgaaactgtcatagcactaatgggtgtgtaatttagtatggtaatg

SEQ ID NO: 139574 - DNA, 428 bp, Homo sapiens
tgaaattttaattggtttcttaactctctgagtagctaataatacttaaactgacatatatgttttctgagaagaataagtacatagggaattactttgttgaaacagaggcagaaccaaggaatttccttctcctttgtcaaaaactcaggtgcacagtcatsgagtaatcataatcttgactcacggaaacttctcattattggtccatgtattttcttcttttattatttatgtatttgtttatttgttttaccgtgggttcaccactggcacagaaactggaacactgtgactaacatctacttatttgattatctccaattttaagcccttgtctcaaaatctccccccccatcccccccaaaaaaacaagccccatctaaaaattttgtgttaatactaagattttttttgaagaaaatgtc

SEQ ID NO: 139575 - DNA, 428 bp, Homo sapiens
tgaaattttaattggtttcttaactctctgagtagctaataatacttaaactgacatatatgttttctgagaagaataagtacatagggaattactttgttgaaacagaggcagaaccaaggaatttccttctcctttgtcaaaaactcaggtgcacagtcatcgagtaatcataatcttgactcacggaaacttctcattattggtccatgtattttcttcttttattatttatgtatttgtttatttgtttyaccgtgggttcaccactggcacagaaactggaacactgtgactaacatctacttatttgattatctccaattttaagcccttgtctcaaaatctccccccccatcccccccaaaaaaacaagccccatctaaaaattttgtgttaatactaagattttttttgaagaaaatgtc

SEQ ID NO: 139576 - DNA, 540 bp, Homo sapiens
tccactgtttctgcatccaccaattcaaccaactacaaattgaatattcaatctgaaatggaatcatacagtattcacccttttgtgtgcctagtttctttcactcaaaagcataatgcttttgagattcatccatgtggttgcatgtattactagctygtttctttttattgttgagtagtattctattgtgtgaatgtatcagaattcttgacacgttcaccatttgatggctgtttggattgtttaaagttttagctattttgaataagcagcaataaatatttgctcagaatattcaatcaattgaatattgggatgtttgatctggaatgcagatcctgcacatatgaagggctgcctgtaaaggacttgagcatgcttagattttggtatttgtggggtgtcctggaaccaatctcccataccaacagaccactgtatttaaatttgtttttaattttatttatttgtatatatttttagagacaaggtattgttacattgtctaggttattcacaggcacagtcacagcatac

SEQ ID NO: 139577 - DNA, 247 bp, Homo sapiens
ccttaaacactctccaagaggaccttcccctccctagcaacttggtaagacacttgtcaccccagcctgaggtcaaagaagagcagttcttctcttcttcctcaattcatartctccctttcctggttccacccctacttgatgtgtcagccccaggttctctgctagagcacatttatttgccccctacccctgaccagcacaaaaaaccactcaaaagtaaaggcagcaagaaaacctctagctt

SEQ ID NO: 139578 - DNA, 626 bp, Homo sapiens
ttaaaaatcctttctctatgatacttttcataaaattggaacttgagaaggaaaagattgtggggggataggatgagagaacagtaactattgaagtattttacagaaaggagaatgagcagatatttgtgttatttttaagcctagaaagagaaattaacaagctgtagcaagaaatctacaggttagagacagaagatgaacaaagataaataactagatattttcacctagataaattactaaggaagatacaaaattacttttaccaaataagtggcaccaccctgactccctccaaccccaccctaccctgatctactctaatcagcctggagtcttgagaatatctcattctgagatgcagtacagtgcataggaaaagacagaaacggactctcgggctttatggccttgatttgaatcctgtgtctcctatcagttggacaagtcacctaagctgtctgtgcctcagtttcctcatctttaaaatgggaatattgatagtcctctctcacagggttgttatgaagattaaatacagttggtgcatgtaaagtgctsaaaacagtgcttgtatgcagcaaccactcaacacaccattaactattatcacagcatcacta

SEQ ID NO: 139579 - DNA, 577 bp, Homo sapiens
atctgtaaaaataaaataaaataataaggtttttcaaaaacagagaatgaatgagcattgaaggtgttcaccatgttttttttttttaaggttgtggagataatgagttttttgagacttgggggaggaaaagaattcacaagccaagtttcaagctgctgaaaaattgcttttaggaaagaaaaaaacccttttccatgctaaccatctgcttgcatcttgtttactgcccagagtgccagtttgtgcttattaatcatgcttacacaagtatcttaattactccctatgtagctgctctgtcttgaactcagaagttgacctttctctttttattcctttaaatcattaatcatacacaatcaacgccagcgggacagagccacagagaaggctacccagattctcacacctcacgccagtcccaggcagacagggaatgccagagtgactgctttgccagcagccaggcggaycttaattaatgactctgctgtgttgaggcacacgggctgggggaggcccttcctgccaccgcccctccgtgcttcctccagttgctgcctggtttgaggaa

SEQ ID NO: 139580 - DNA, 482 bp, Homo sapiens
ctgttcctcccactccactattatctcttctaatggttagatgatttcttagccagaattcttctgaaatcaaggattcctgtgattaatgcaggaatacctggtatcaggatgaactgtcacaaagaagtaaggcagtgagtgtttcctgctctttaaaccagccttgtttgtgtatgtgtctcagttgggctgctataacaaaataccatggactggctggcttatgaacagcagaaacttatttctcacagtgctgaaggctgggaagtccaagatcaagggactggcagattcagtgtctggtttctcatagatggctgtcttctcactttagcatggcagaagggrcaaggggtctgtttgtggatccattcatgaaactctgcccctatgacctcatcatcttccaaaggctctgcctactgataccatcatctcaaaggtgaggattcaacatgttaatttcatggaaggtggga

SEQ ID NO: 139581 - DNA, 634 bp, Homo sapiens
atttcatcataaggtttatcaacaaactgaacacagcagagaaaatgatttacaaacttgaagataggtgagtagaaatgatccaaaataataacaaggaaaaaaaaaagcatatgagagctataggataatagtaaacagtataacatatattttgaatcccaaaagtaggagagagagaaaaggaagcagaaaaaaaaagtttgaagagataatagctacgaattttccaaaattaattaaaaagagcaaaccacagttcaaagaacctcagaaaatcccaagtaggggatgaggggtagaagtggtcaggcacttgtatctttgattttcagtagtttactatgatggggtggatggcacacctcatcatagtaaaactactaaaaaccaaggatacagtgaaaattctgaaagcagccagagggggggraaaaaaaaaaaacacagaacaaagctaagaatgacagcgcactgctcaacagaaagaatgcaatgcaaaagaaaatggagtgacaccattaaagcactgacagaaaaaactgtccacatggaattctatacaagtgaaagtatctgctaaaaaatgaaggtaagataaagaatttttcagacacacagaaactgaaaaaat

SEQ ID NO: 139582 - DNA, 608 bp, Homo sapiens
gaattccttggtgctctttatagtataatgctaggccatattcaaatttcctaaactatctcaaagatgtctttttatagttggtctgcattaggggcccatattgcatttagtaattatgtctcttaaatttctcttaatctagagcgatccctaccttttttttttttctttgtggcagtgacwtgttgaagaaactggatcagttgttctgtggaatgtcccaatttctggttttgtctctcaccttcttcatggtgtctttaacccatttttctctctcctgtgttgctgtaaaccagaactcagctgtgaaggctcatttagatgtgggttcttattgggcaaccccactttatacactgggctgtgtagtttatactgcatcacatcaagacacacatggtgtccactttttccatgtccactaagttgttttgtttgtttgtttgttttttgagacaggatcttgctctgtcacccaggcttgagtgcagtagcacaatcatggctcactgcagcctcgacctcctgggttcaagcaatcctcccacctcaacctccccagtagctgggactacaggtacatgccatcatacctacctaat

SEQ ID NO: 139583 - DNA, 415 bp, Homo sapiens
ggtgtgctctcattgttgatgttacccaggctacctstggaggtagccatgtcacccacctttgagcagttcttggggaaggggtcttttttttttttcctttaagacggagtctcgctctgttgcccaggctggagtgcagtggtgcaatctcggctcactgtaacctctgcctcctgggttcaagtgattcccctgccttagccttctgagtagctgggattacaggtatgtgccaccatgcccagctaatttttttttgtatttttagtagagacagggtttcaccatgttggccaggctggtcttgaacttctgacctcaggtgatctacctgccttggcctcccaaagttctgtgattacaggcatgagccactgtgcccggccaaaggggtcttattgggaactccatg

SEQ ID NO: 139584 - DNA, 415 bp, Homo sapiens
ggtgtgctctcattgttgatgttacccaggctacctctggaggtagccatgtcacccacctttgagcagttcttggggaaggggtcttttttttttttcctttaagacggwgtctcgctctgttgcccaggctggagtgcagtggtgcaatctcggctcactgtaacctctgcctcctgggttcaagtgattcccctgccttagccttctgagtagctgggattacaggtatgtgccaccatgcccagctaatttttttttgtatttttagtagagacagggtttcaccatgttggccaggctggtcttgaacttctgacctcaggtgatctacctgccttggcctcccaaagttctgtgattacaggcatgagccactgtgcccggccaaaggggtcttattgggaactccatg

SEQ ID NO: 139585 - DNA, 563 bp, Homo sapiens
tttaacatgccagaatacaggcctcctttacttcactttcagaagaagctggcaccctggagttttacgtaaatgcttctaatatttaratgttagccactcataaaacactatgctatgtaccagtaagaggaagggagagggaaagtaacgtgtctgtggattgcattcagtccttgggtggccaggcttggcctttggtctaggctgttgcctcagatactctctggaagtctctttgagtttcccttctttctactttccttgaccttcccctggatcaaggctggacatctgagaagaggaaagctggtgtgagcctccaaactccagccactagagattgcacactgggtcttagcatacccgtttcctttcaaataattttcttcactaggagtcatctgtagatttgagaagggtgattgcatgaggccgttttggcattgagctgattgtaagtgaagctgcaggagccaactccctgattagaactgagatcctgaagccagatgaattaataatgaggtgatggggagaaagagagactccgtgacagctct

SEQ ID NO: 139586 - DNA, 525 bp, Homo sapiens
tatgatcaattaaaaatacaattttttaaaaccccaggctgatagctgtggagcaggcccataaagacatttggtatctcaataagtggtttgctttaaaaagctgaatgagcttaggaatatgrtgaagaaagcatatgttctttcaggcaacaagaaacaaaaaaggaaggcaatcaaactttcagtaaagcaatgcatattcctagaccattatattccaaataggaagaaaaaaaaaggcatgattttgaaaaaaattctggttgaccttgaagcttggagtatcttcctctgtatggcccaagtttagtgatatattacacagtattttctaagggtctaataacacccactagttctatagtaaatattataatgctgctcaatattaattttactcaattgaaatgtaacataatgcacacattataaaccttatcaataaaaatgtattggtatggttggccagctgagaagtagaggaaggagatagagtagaaagggttaaggcactaaatttct

SEQ ID NO: 139587 - DNA, 525 bp, Homo sapiens
tatgatcaattaaaaatacaattttttaaaaccccaggctgatagctgtggagcaggcccataaagacatttggtatctcaataagtggtttgctttaaaaagctgaatgagcttaggaatatggtgaagaaagcatatgttctttcaggcaacaagaaacaaaaaaggaaggcaatcaaactttcagtaaagcaatgcatattcctagaccattatattccaaataggaagaaaaaaaaaggcatgattttgaaaaaaattctggttgaccttgaagcttggagtatcttcctctgtatggcccaagtttagtgrtatattacacagtattttctaagggtctaataacacccactagttctatagtaaatattataatgctgctcaatattaattttactcaattgaaatgtaacataatgcacacattataaaccttatcaataaaaatgtattggtatggttggccagctgagaagtagaggaaggagatagagtagaaagggttaaggcactaaatttct

SEQ ID NO: 139588 - DNA, 589 bp, Homo sapiens
aagcttatgcttttatccctaatactgctgttctcagctcttgcagcatcccaaagaacctgggtcctcctagccatcactctttatggtatctaggcaggaacagcacacaggctgctgctcccctcctgtgctcattagtcaggagttcatggccatgcatcctgctgggctcagcctccactgcagaaccctgctgagagccatgcttgtaagcagctgctgccagcccatctgagggctgcatgagcaaacataatggacacacttggttagcagtgagtgaagtggaagtagaggccagcaaatgcgatttttctcatagtggggaagagagtatctctgagaaaaagatactcctaaccccttttgctatgtgtgtccctctctccattcccacagccgtcagcctggctcatgggctctttgtctccctggaccacgctgtggccatgtaagtcctagcataaatccaagcacacttctctccagctcatccttcagggggtccccagtgctccagggkgaagggaatcctccttagctagaaacctccacccaggaaaggcccttggctgccttggccacc

SEQ ID NO: 139589 - DNA, 607 bp, Homo sapiens
gaaaaaaagaggtgttaaagttgttagggtaagaaaatctctgaggtagatttgggcttcagaacaaactcaaggaaattgtcttcaatgccaaatgggtcagtctcaaagtgataaactgttctgcaaaaacaggaaagtacaaacctaccttgttttattgtgcctcaatttattgtgttttgcagatatttcattttttacaaattgaaagtctgtgcaaccctgcatcaagcaagttgattgttgtcattttttcaacagcatttgctctctttatatctccatgtcataatttgataattctcacaatgttttaaattcttatcactattattatacctcttatggtgatctgtgatcagtgatctttgatgttactgttgtaattgttttggatcgccacaaaccatgcctatatgagatggtgaacttaaattgataaatgtgtgtgttctgactgctgcactgactggccattcctttggtctttctccatctctctctctstctctctctctctctctttctctctctgtctctctcccctttgggcctctattccctgagacataacaatattaaaattaggccaattaataactct

SEQ ID NO: 139590 - DNA, 584 bp, Homo sapiens
ttaaaataatatgtcacagtggttttttcctttcctggaaaatatgaatttcacaagtatcaactaayatgtttttgctttgcttacttcggtgctggtcgatatgtgtaagagttccagattcaatgcaaaataacaagatgaagatgtgggaagatgttgagaagctacaaatgttcttcatactggacacttcaatacacaggttccatctgacagaaaatcaaccaagatgatataatcaagtatcacagaccagagatttaagttggccttgcccaggccctttaagtttatacaaaaatagggctctaatatcctctcattattcacagctttgatcctaaaccacctactccaacctatccgtgaaccagagtctaaacctcccctaactccacaggtttctggtgagacttttccatcagaacataaccttgcctcccctcttgagtaagcttggattctccctttaactccactgtcataaactctccccagttatgcatgtctctaatacctaacaatccctctgtgttcacctcagtcccagggtaggaccccaaacagaccaggagttatct

SEQ ID NO: 139591 - DNA, 584 bp, Homo sapiens
ttaaaataatatgtcacagtggttttttcctttcctggaaaatatgaatttcacaagtatcaactaacatgtttttgctttgcttacttcggtgctggtcgatatgtgtaagagttccagattcaatgcaaaataacaagatgaagatgtgggaagatgttgagaagctacaaatgttcttcatactggacacttcaatacacaggttccatctgacagaaaatcaaccaagatgatataatcaagtatcacagaccagagatttaagttggccttgcccaggccctttaagtttatacaaaaatagggctctaatatcctctcattattcacagctttgatcctaaaccacctactccaacctatccgtgaaccagagtctaaacctcccctaacyccacaggtttctggtgagacttttccatcagaacataaccttgcctcccctcttgagtaagcttggattctccctttaactccactgtcataaactctccccagttatgcatgtctctaatacctaacaatccctctgtgttcacctcagtcccagggtaggaccccaaacagaccaggagttatct

SEQ ID NO: 139592 - DNA, 450 bp, Homo sapiens
attatccatggcccttctgtggcaaaagtgcccccagaaagttacagacttgagttgtaggcaacctaattaatgagaatggtctctaactgcaacccgaaagcatgaataatgcctatctacttacttcacagtttatggtaatgagattaataagctacttccctggaatactagagagagtcagaagcaacaatatatcctctactgtgagccaccttacatttgtgtcatggactgaggtttaaatgggaagagtggaagtctaaggatttgagaagctcttttcataactagtaaagtccatcaaatcatccaaagatacacagacaaatctgccattgtaaagagattcagttctgttmaagaatctacactacatttcaaatacgtcctgtaatagaaacagagggtagaaggcagataggaggcagtccttcccaccaagga

SEQ ID NO: 139593 - DNA, 442 bp, Homo sapiens
tggagtgtggagggacataagagcatggcagctctccctggaaccacatggaactgtttcccccaaaggggaaagtttgctgggaagatgacartaagtaacaatgaatgtttacgacacattttcagatagactgatgttcttgattcagagataaagacattttataaaatgcaaggtgatgtttaccattggttggttacttaaaaaaaaggagcccaataatggacagtttcatttaagatttttgaataaacaaaattaacaaagagaaacaaacattagcgtttcagtctttagaatatgcctttaacatggtgtttcatttgcattgaagttattgtcttgtgaatatgtgtggttgataacttggaaacagtctatcccaagcttgcatctttggattctcaagaaccaagcatcactcttagagcatgacagg

SEQ ID NO: 139594 - DNA, 487 bp, Homo sapiens
gggatgggagagacagaacactgcaggcaaagatatccacaagtgcaaargctgcagacagagagggatggcagcgtgagaagcaaagggttccgtggcctgggtgtgggagagataagaagaggtagaccaggctgctgtgaagccagtgttggtaggtgcaggcaatggtattgatacctgatctggtggctttggagggacattgagagcttttaggcaggccagtgacaagttcagttttgtgtttaagaatgatggcactgaaatgacatgatgtctgggtattgcaaaatataaaaacatgttactcaagcaaaatataaaaaccaaaagggagactgattttttttaaatgatgaactgttgataatgaagacaagtgatgagtatgtgagggttcatgatattattcactctatttttgtgtaagtttaaacttttcatagtagatatatttttaatcacatgaattattaaaaaaata

SEQ ID NO: 139595 - DNA, 499 bp, Homo sapiens
tgcattcagtacattcctcaccttacaatggggtatgtcccaataaacccacaatatgttgaaaaaatatcctaagttgaaagcgcattttctatttttgatgggtttatccagacacaacaccatcataagttaaggagcatctgtgttaaaaaataatcattgctgatactaagcagtgcttcctaactgtgaggcactgttctaagcactttactatattaactcatttagtcttcacaacaaattcttgagttaggttgctgctattatcaacctaattctaattttatagatgagtcaagtgagacacagaaaagctaacttgctcaaggttagtaagtaaaatagytgcattttttaaaaagaaactttatttttttagaaccattttacatttacaggaaaattataaagatgatacactaagttcctatataccccatacccaggttcccctgttatttatatctcacattaatatggtgcatgggttata

SEQ ID NO: 139596 - DNA, 401 bp, Homo sapiens
gtggtgtatgtctgtggtagcaagtagagtaagaatctttcttcattacatgattatttcaatgcggtatttccttacaaaataaacactctcatcaagttgatttagcagtgctgagagagaggaacttttaccaatttctaatgtaggcccatggtttactttatggcaaagctgcactccaggtaaactccaactaggaagcccaacaaaggtacctgatgtgaagcaagactgggtttaagggatctaagccaattcaacatattattcatgatttctgccatgtagcagcttctctaacttmttttgttaatagaggcctcctgaaatcaatgtcttggttattgtgctggtatttctacccatttattttctccttatagacatattctagttgt

SEQ ID NO: 139597 - DNA, 571 bp, Homo sapiens
aagtggttattactttagaccattaaattttgctgttgtgcaacaacagattgattgattgattgattgattgattgattgattttgagacagagactcacactgtcgcccgggctagagagcagtgatgcaatctcagctcactgcaacctcygcctcccgggttcaagtgattctcctgcctcagcctcccaagtagcgagaattacaggtgcccgccaccatgcccagctaattttttgtatttttagtaaagacggggtttcactgcgttggccaggctggtctcaagctcctgaccttgtgatctgcccacctcggcctcccaagtgctgggattacagttgtgagccaccacgcccggtcagatttttttaaaatgctattgcatgctttcatatcagttggccctatcgaacactaccattgggggatgaaagtttattgttcgtatggtccacaaataaaggcttaaaacttgcttcttaaatgtgctattttaattcttctgatagtacacacaccatctcagactgtactgttaccgacttctttcacaataactgatgtg

SEQ ID NO: 139598 - DNA, 571 bp, Homo sapiens
aagtggttattactttagaccattaaattttgctgttgtgcaacaacagattgattgattgattgattgattgattgattgattttgagacagagactcacactgtcgcccgggctagagagcagtgatgcaatctcagctcactgcaacctctgcctcccgggttcaagtgattctcctgcctcagcctcccaagtagygagaattacaggtgcccgccaccatgcccagctaattttttgtatttttagtaaagacggggtttcactgcgttggccaggctggtctcaagctcctgaccttgtgatctgcccacctcggcctcccaagtgctgggattacagttgtgagccaccacgcccggtcagatttttttaaaatgctattgcatgctttcatatcagttggccctatcgaacactaccattgggggatgaaagtttattgttcgtatggtccacaaataaaggcttaaaacttgcttcttaaatgtgctattttaattcttctgatagtacacacaccatctcagactgtactgttaccgacttctttcacaataactgatgtg

SEQ ID NO: 139599 - DNA, 459 bp, Homo sapiens
acttataggtatatattacagtgatttatttaggatacacaaagaaataaaatccctatattacatggcttttaccatgaagtcatcttcagttttcagcatatatcaaagtycttgactgcttagttttcagtctaccatgtggtttgtagagccagatgtcttggtataatacaactgaatttaaattgtgtgtgtgtatgtgtattgtgtcaatcttgccctgttgcccgagcaaccgtgcaatggcacagtcttggttcactgcagcctccatttcccaggttcaagtgatcctcctgcctcagcctcctgaatagctggaactatactgcatccgactaatttttgtatttttgtagagatggggtttcaccatgttggccaggctggtctcgaattcctgacctcaagtgatccaccctcaggggtgctgggattataggcatgagccactgc

SEQ ID NO: 139600 - DNA, 459 bp, Homo sapiens
acttataggtatatattacagtgatttatttaggatacacaaagaaataaaatccctatattacatggcttttaccatgaagtcatcttcagttttcagcatatatcaaagttcttgactgcttagttttcagtctaccatgtggtttgtagagccagatgtcttggtataatacaactgaatttaaattgtgtgtgtgtatgtgtattgtgtcaatcttgccctgttgcccgagcarccgtgcaatggcacagtcttggttcactgcagcctccatttcccaggttcaagtgatcctcctgcctcagcctcctgaatagctggaactatactgcatccgactaatttttgtatttttgtagagatggggtttcaccatgttggccaggctggtctcgaattcctgacctcaagtgatccaccctcaggggtgctgggattataggcatgagccactgc

SEQ ID NO: 139601 - DNA, 459 bp, Homo sapiens
acttataggtatatattacagtgatttatttaggatacacaaagaaataaaatccctatattacatggcttttaccatgaagtcatcttcagttttcagcatatatcaaagttcttgactgcttagttttcagtctaccatgtggtttgtagagccagatgtcttggtataatacaactgaatttaaattgtgtgtgtgtatgtgtattgtgtcaatcttgccctgttgcccgagcaaccgtgcaatggcacagtcttggttcactgcagcctccayttcccaggttcaagtgatcctcctgcctcagcctcctgaatagctggaactatactgcatccgactaatttttgtatttttgtagagatggggtttcaccatgttggccaggctggtctcgaattcctgacctcaagtgatccaccctcaggggtgctgggattataggcatgagccactgc

SEQ ID NO: 139602 - DNA, 459 bp, Homo sapiens
acttataggtatatattacagtgatttatttaggatacacaaagaaataaaatccctatattacatggcttttaccatgaagtcatcttcagttttcagcatatatcaaagttcttgactgcttagttttcagtctaccatgtggtttgtagagccagatgtcttggtataatacaactgaatttaaattgtgtgtgtgtatgtgtattgtgtcaatcttgccctgttgcccgagcaaccgtgcaatggcacagtcttggttcactgcagcctccatttcccaggttcaagtgatcctcctgcctcagcctcctgaatagctggaactayactgcatccgactaatttttgtatttttgtagagatggggtttcaccatgttggccaggctggtctcgaattcctgacctcaagtgatccaccctcaggggtgctgggattataggcatgagccactgc

SEQ ID NO: 139603 - DNA, 493 bp, Homo sapiens
gatcaaactgattatttcccacttcttccttgtagatatgcccacttcatgcttttattagaatctttttctgtagaaatctatcattctacctaaacaatgttttactattcttagcagccttctccctaatgaaactggcccataccactccattgccatcctgatatctcctttctttcttacagtttgtatggtttttcccgtattatttagcatgaaatcrtacttggctttttatgcttctcattcttgtttctctgaataatttgtattaagatggacacctcacaatatttttgtaagcctccaaagtagtttttgtttttgttttttggtcagcttagataggcattgccttttgtatggaattagttgataaaggagtaaatactgagcaccctgaaaactcaaattctgcattgatagatcacactttaatattgcagcattttaatgtttcttattttaccttatcaaatattttgtattt

SEQ ID NO: 139604 - DNA, 493 bp, Homo sapiens
gatcaaactgattatttcccacttcttccttgtagatatgcccacttcatgcttttattagaatctttttctgtagaaatctatcattctacctaaacaatgttttactattcttagcagccttctccctaatgaaactggcccataccactccattgccatcctgatatctcctttctttcttacagtttgtatggtttttcccgtattatttagcatgaaatcgtacttggctttttatgcttctcattcttgtttctctgaataatttgtattaagatrgacacctcacaatatttttgtaagcctccaaagtagtttttgtttttgttttttggtcagcttagataggcattgccttttgtatggaattagttgataaaggagtaaatactgagcaccctgaaaactcaaattctgcattgatagatcacactttaatattgcagcattttaatgtttcttattttaccttatcaaatattttgtattt

SEQ ID NO: 139605 - DNA, 560 bp, Homo sapiens
tgggtgattcttctgtgtctgagctttactcattttcaatcccttttacagcccatcctctggcccagaagaggtttgtttctgcccttttttatcacatgacctaactttatttcagactttttggtccatactatcaattctataccctgagtactccagacttctctgaactgtataattactgccaattgaaagtgctttgactgaattcatggtatcccattgcaagacttcccataaagctacactaatcaagcaaaaggatactttcaaaaggataggcacttagatcactagagaagaatakagtctagaaataaacctacgcaagtatagtaaattaatttttgacaaagatgcaaagatagatatattaattgagaaataagaggtacccaaaaagggatcttgatccatatctcacaatgtgtgcaaaaacaaactcaaacgagtcataaatctaagtgaaaaataaaagattataaaacttttagaagaaaatctagaaaaaagactctaggtcagacaaaaaaaaattattagtagaatctccccca

SEQ ID NO: 139606 - DNA, 560 bp, Homo sapiens
tgggtgattcttctgtgtctgagctttactcattttcaatcccttttacagcccatcctctggcccagaagaggtttgtttctgcccttttttatcacatgacctaactttatttcagactttttggtccatactatcaattctataccctgagtactccagacttctctgaactgtataattactgccaattgaaagtgctttgactgaattcatggtatcccattgcaagacttcccataaagctacactaatcaagcaaaaggatactttcaaaaggataggcacttagatcactagagaagaatatagtctagaaataaacctacgcaagtatagtaaattaatttttgacaaagatkcaaagatagatatattaattgagaaataagaggtacccaaaaagggatcttgatccatatctcacaatgtgtgcaaaaacaaactcaaacgagtcataaatctaagtgaaaaataaaagattataaaacttttagaagaaaatctagaaaaaagactctaggtcagacaaaaaaaaattattagtagaatctccccca

SEQ ID NO: 139607 - DNA, 560 bp, Homo sapiens
tgggtgattcttctgtgtctgagctttactcattttcaatcccttttacagcccatcctctggcccagaagaggtttgtttctgcccttttttatcacatgacctaactttatttcagactttttggtccatactatcaattctataccctgagtactccagacttctctgaactgtataattactgccaattgaaagtgctttgactgaattcatggtatcccattgcaagacttcccataaagctacactaatcaagcaaaaggatactttcaaaaggataggcacttagatcactagagaagaatatagtctagaaataaacctacgcaagtatagtaaattaatttttgacaaagatgcaaagatagatatrttaattgagaaataagaggtacccaaaaagggatcttgatccatatctcacaatgtgtgcaaaaacaaactcaaacgagtcataaatctaagtgaaaaataaaagattataaaacttttagaagaaaatctagaaaaaagactctaggtcagacaaaaaaaaattattagtagaatctccccca

SEQ ID NO: 139608 - DNA, 568 bp, Homo sapiens
gacatatgttttcctttctcttgggcacatacatattgaagtgcaattgctgggttataaagataactacatgtttaatatttggaggaattgttaaactgttttccaaagtcatggccctgttttacaatcccgtcagcaatgtgctgatccaatttctccacatctttgccaagacttgttactgtcttttcattgtagtcatcctagcaagtagaaagcgctgtttgtggcatagatttgcatctacctaatgactaattgacttgagcaacttttcagtacttattgttgaattgtatatctccttgaagaaatgatcattcaaatcttttgctcattttaaaaattgggttgtctttttgtaactgagttgtgatagttctttatgcattttggatttcagtcccttattagatatgtcatttgcacatattttctgacattctgtgagttaccttttgactttcttgctggtgttckttgaagcataaaagttttaagttttgatgaagtacaatttatatcctgattttagtgtcatatctaagaaaactaactcaaaatc

SEQ ID NO: 139609 - DNA, 553 bp, Homo sapiens
cacgcccattgctggctgcctgctgacatttacatctactactaagaaccttgatttgtgaaacaatgtatatgatgatgttatttgaaatgcacaccttatttccgggtaaatgatttattgttagctttatgttagtaacaaagtggtctttagctcacctcaactgaagtacatagtgaaaacctcacaaatcgaatgtttgcttttttttttttttttaactgacaacaatcttcastttcatcaaatggcaatataggaatattgaaagaaatgaaatggatgttttccttggctagagaggtgtgtgtcattgatgagtttcttcctatgagtcagctttctgactttcataattcgttttgatataaaaatggatgatcgtgattcttattcttgctaatacaatcaattattttctactttcctgctttcaacaaggaaattttggaattaattgtggcaaatcatcaatgactttcctaagaaccagttttcttctaatacgcaacacaaatacatctatagcttatataagaaaatagttttc

SEQ ID NO: 139610 - DNA, 447 bp, Homo sapiens
tttatgactgttctcaaaataaaaaagtagttatataatcttttaatctaaattatgtaaatctgaatatgtaatacttttaaaataaatatattttctggtctcctaagaaaatgaatgtcataaatagggtcctggaaaaattttaaggtgtatacattacatttaaatattatttagatatttccaaaactgcatttgaattacaaaaacaattggagttctcttctttaaaaatgtaatctctaaagtttgtcatgtgcttagaactaatggaactagattttcagaaaggttcctctgatattaaaatctttctctctgaaaccaagtcactctccagttgccagctgctattagtactcattacttaatatmttaatctatttagaaataccattcttttctggatgatttctcctagtaaaagtgacatagctgtttcat

SEQ ID NO: 139611 - DNA, 367 bp, Homo sapiens
aaagtgaataagtcttacaggatctcatggttttataaagggagttctcctgcacatgctctctttttctctttgcctgccaccatgcaagacaagttccaccttctgccatgattrtgaggcgtccccagccatgaggaactgtgggtcagttaaccctcttcctttataaattacccagtctcagtatgtctttattagcagtgtgacaacagactaacacaaaaggcatcaggataaagtttcaaagaataaaaaagaaggtggtctatcttaataatcaagaatatgggattttaattcaaatgaaaccacccacagattttccagattttcttctgaaacattaatgagcaagaaaataaaa

SEQ ID NO: 139612 - DNA, 608 bp, Homo sapiens
aaatttcacttgaccattttcaaaatcaaacaaaattatgagtcactttcacagattttgtcgtagaggcctccccggtgatctagggatagaatttctaataagaaagaaaatcatctagcaatgatgatcaactctgctgggtttcatgctcagattattgcttcacagcaggctaagatcgttctcatgatacaggataattagactgagttttccatgtmgagtactattgtcagaatttccaagaataaaatagtgttagctatcatttttagaagcctggaaacatactagacactgtattttatcttatttgaaatacacaacaaccttatgatgaagctatgtattattatccctgttttgtaatgagataactggaactcagagagaccaggtggcattcccaaaggcatagagttggtaaatagagaaggcagaattcatgcccatctgttcaaatgcagagcttgtactctgtattactgggctggtgtctggtaacggtggtggtgtatattctgtactcaggagtctaggaaaagtggagagcaggaagctcttacgacttcaggaggctaccacaacggaatgcagacaagcaa

SEQ ID NO: 139613 - DNA, 393 bp, Homo sapiens
cttgctcccgtttccataagcccacaaatcttttctacaatttacactgcacaagtgggtctgtgagatgctatgggtcgtgatagataaatttcccatgtagttgtacttccaaatccctgattccttcatttctcctctcatagagagaggtgcaatttacagggaataagcaacagttgaggaatacattctcccgtttcaaaaacccaaggattttgtgacattaccactacccgaatttctccttcacaatcaaaatcaactcctaggattacagtaatgccctctaagttaacatgacytttacccgaaatgaatcctatgtatcctgttggcaaaggtccccaaataccaatgggaatcttagtgagtttgtttctttcaattaat

SEQ ID NO: 139614 - DNA, 570 bp, Homo sapiens
cagcttcttcccatcaaggcaatgagttcccttctggcccacagtatgtctagaaaatgttccttctggcccagcatgtgtctagaaatgtcttgcatcttggataccaggccttggataccatgactctgactggtgccctttcctgctgtggctgagctggtatccaagctgcaagataaagtcctccctacttttctgtctcmtctcctcaagtggaaggaagggatctcttttggagctgtaaactatgcagcatgggtttcagggaggggtaatgccagtgaggtaggaggcaagacttgactccagaggcagggctcaaacataagaacaaattgaggactagctaaaacagggccagggcagaagcagctttccaccagacattcccaccagtgtgccatgtcagtttaccattgccatgacaacatccaggagttaccacccctttccacggctatgacctgatgtcccaatagttactacttcttccccagaaatttctgcataaactaccccttaatctgaatgttattaaaagctggtataaatatgactgcaaaactg

SEQ ID NO: 139615 - DNA, 570 bp, Homo sapiens
cagcttcttcccatcaaggcaatgagttcccttctggcccacagtatgtctagaaaatgttccttctggcccagcatgtgtctagaaatgtcttgcatcttggataccaggccttggataccatgactctgactggtgccctttcctgctgtggctgagctggtatccaagctgcaagataaagtcctccctacttttctgtctcctctcctcaagtggaaggaagggatctcttttggagctgtaaactatgcagcatgggtttcagggaggggtaatgccagtgaggtaggaggcaagacttkactccagaggcagggctcaaacataagaacaaattgaggactagctaaaacagggccagggcagaagcagctttccaccagacattcccaccagtgtgccatgtcagtttaccattgccatgacaacatccaggagttaccacccctttccacggctatgacctgatgtcccaatagttactacttcttccccagaaatttctgcataaactaccccttaatctgaatgttattaaaagctggtataaatatgactgcaaaactg

SEQ ID NO: 139616 - DNA, 570 bp, Homo sapiens
cagcttcttcccatcaaggcaatgagttcccttctggcccacagtatgtctagaaaatgttccttctggcccagcatgtgtctagaaatgtcttgcatcttggataccaggccttggataccatgactctgactggtgccctttcctgctgtggctgagctggtatccaagctgcaagataaagtcctccctacttttctgtctcctctcctcaagtggaaggaagggatctcttttggagctgtaaactatgcagcatgggtttcagggaggggtaatgccagtgaggtaggaggcaagacttgactccagaggcagggctcaaacataagaacaaattgaggactagctaaaacagggccagggcagaagcagctttccaccagacattcccaccagtgtgccatgtcagtttaccattgccatgacaacatccaggagttaccacccctttccacggctatgacctgatgtcccaatagttactacttcttccccagaaatttctgcataaactrccccttaatctgaatgttattaaaagctggtataaatatgactgcaaaactg

SEQ ID NO: 139617 - DNA, 412 bp, Homo sapiens
aaggaaactacctaaggctgggggaaaaaaacttctaagagaattagagggaacagggcccaacactcctatggggccaatctactcaccagctagataggaaaaaatcwttctggctctacctcttagtcttttcagcctgatatgaaaaatgtcataggctgaatagcttataaacaacataattttaatctctcacagttctgcaaggccagcatgtccaagaccaaggtgctggcagatatggtgtctggtgagggaatgctttataatttatgaatggccatctttttgctgtgttctcacatggtaaaagggacaagacagctctcaggggcctttcatagggacactaatcccattaatgaggactatgccctcataatgtaatcaaccccaaaggccctatctc

SEQ ID NO: 139618 - DNA, 539 bp, Homo sapiens
agccaaactgctttcagcgttcagatgctgcttctctcctctctgctgttctgccattcttctgttcatctcctcatctgcttgtggggtctggggtttataagggtacaggataggggggtatggcaggccaaaaggcaacttttgggtacaaaaataggaatgtgtgttcccatttagggccgtgggtttccaggctttgagggtggggcctttgccagggaacatatgttagttaactctaaaarccattctgttgtatagttacttcctcctctatcaggccctgcctattctcagcaagaaatatgctgtctttaccccacataccatcctggcagccagaagaggtgagagcagctcctgagggaatacctgttgctgcaccaaagtgttaccttttactgcagaaaagtgggtcacctctgaaagcccaaagcattcagggtattgcagcttcaacatcctcaagggcatcccttcccatgccatgtttcagtgtctcatgttttcctaaatgtggccctgactttagaata

SEQ ID NO: 139619 - DNA, 638 bp, Homo sapiens
agaaactagtattaatcactgaaatttttaaagatttaggttcctcacctatagatgaaggcataaccatatcttccatgacaattttactgcttcatgatgaggaaagataaaatcatgagaagagtccctgtaaactgtaaagcattgtaaaactgttatttgtcattacaatattccccctcccacacaaatctgcccccttttttaaaatgtttttcttgacatcagcacaatcccgcattccttggccttatatctccctccatctaacacccgcaactgttttccttcacaacaatgtttgttgaaaaagttgagtaattcattatctaattcctcatctcttaatttttaattccttccaatctagctcccatctcctctactccccttatatgatcttatcattgcttgtgtattcccctctctctctcttcttttctctcctctttttgttgcccttttattctcatacttctctaggtgctctcttaggtggtaaaaatgccaagagaaatcaatattcagggaatgctcaactgtctagcttctactctgagttcccaactagcatatcctacttcccactggatagytccactttaaagtctcaaacaaaatagggccaaaacaga

SEQ ID NO: 139620 - DNA, 638 bp, Homo sapiens
agaaactagtattaatcactgaaatttttaaagatttaggttcctcacctatagatgaaggcataaccatatcttccatgacaattttactgcttcatgatgaggaaagataaaatcatgagaagagtccctgtaaactgtaaagcattgtaaaactgttatttgtcattacaatattccccctcccacacaaatctgcccccttttttaaaatgtttttcttgacatcagcacaatcccgcattccttggccttatatctccctccatctaacacccgcaactgttttccttcacaacaatgtttgttgaaaaagttgagtaattcattatctaattcctcatctcttaatttttaattccttccaatctagctcccatctcctctactccccttatatgatcttatcattgcttgtgtattcccctctctctctcttcttttctctcctctttttgttgcccttttattctcatacttctctaggtgctctcttaggtggtaaaaatgccaagagaaatcaatattcagggaatgctcaactgtctagcttctactctgagttcccaactagcatatcctacttcccactggatagttccactttraagtctcaaacaaaatagggccaaaacaga

SEQ ID NO: 139621 - DNA, 571 bp, Homo sapiens
atatgaaatagcactgtctgtatcctgtggaagggatcaaagaccagagaggaagagcaggtaagaagaacacagcgcccattcagaagccaggcttcgtaaacctcggctttctctgtatatacatacacacatttacaaacagctcatttaatacatgaagcaactccaaggtagctattgctcccctgcattatacagaccaggaaacaaaataaatactttaytgtttctggctccgtgacattaggcaatgtagagttagtatttgaacttaatctaatccgtgcttgtcaccataacaatctttcaaaatccttggactcaccgtcaaaatgcctctcccagggtttgtgggcatgtcaccagtgtccaggtaaggatgccttcaagtgggctgacacagaaaatagttcagaccaccatttaagatgccaataagctacacacacacacacacacacacacacacacacacacacacacacacaaaataacagtatgttcaactttctcttgtcccagctttctctggacactttttgtgatgagtagccactatgtcgacttg

SEQ ID NO: 139622 - DNA, 609 bp, Homo sapiens
gaagaaaacgaggcctgaactagaaagatggcagggaaaggtaagaaataccttatctttgaggttcttctaccagaagcagtcctgaagtatcttgattatgtgattatccttccttgtctggttctaagtttttcagatatgtcattctgatatccttttaagataaaggtataggcaaccaaatagattcagtattaattgagtccattctgggtacagaggccttttttaaggagaaatagaagataaatcctttgagcatggacatcttagttctgaaaacaatgaacagtctggacaaaacttgcactacagaggaggtcttagtttctggatattaggggaagaagactggctccattcacactcctactcagagcacttcattctgaggagttgattttagatgaacttcaaaggaagtaagatttatgaactattagacaccctgtcttttcaggaagaaatctgatagaagagatgcctttttttcttgtatgaagatrggtagacagctcacagggtggttagtgatgtttaaaagttgaatggaggaatctagggggacatggagactcaaagtaaaacatgtgggttttgtggaaa

SEQ ID NO: 139623 - DNA, 315 bp, Homo sapiens
agtgaaacaggagcgtgactgctgaagcacagcatcacagggatgctggatgctgtggcctccagatggctgtgggtgggcctgactaatgtcaggccttccacaagaggtggtgaaacagagtcttctctaactcccccagggaaagggagactccctttctgggtctgttagtaacgggtgtcttccctaggaactgactactactagaccacagtccactaggtaatgggtgccttcccaggcactggcattaccgctagaccaaggagccctctagtggccctgtccgggcrtgacagaggctcacacttg

SEQ ID NO: 139624 - DNA, 594 bp, Homo sapiens
cctccaattaaaggagttaggaagagatgcttgaacttatgttttaaaaagtcaatgcaggttgggcacagtggctcgcacctgtacacacagcaccttgggaggctgaagtgggtgaacggctggagcctagaagtctgagaccaccctgggcaacatggcaaaaccccgtctgtacacaaaatacaataattagccaggcacggtggtgcctgtggtcccagctactcgggaggctgaggtgggaggtcgaggctgcagtgagctgagatccaccactccactgcagcctgggcgacagagtgacaccctgtcttaaaaaaaaaaaaaaagtcactgttttggagttttctgggtgaaacctctgtttccataaaaaaagaaaarggtcgagacagtgtgtattactgattcaaaatcataacctgatgcttagagtaaatcattgtatctattgtttcaaaaaccaacgtcaggattattaaaagttaattttattgggtttttctttaagcttggctgattcactcaggtctgtcacttccaagcccatgttttactactttgtaaccctatttggaaggaaaactgcag

SEQ ID NO: 139625 - DNA, 433 bp, Homo sapiens
cctccgtgccttctcactctgtttcccgtccccttaggagcacctagaagctgccagccascagaaccaacagctagagacccagctaagcctcgtggctctccctggagaaggtacaggagaccactcagaggaagaggagagagccccaggaggaaggggggactgttagcagcataggattgaggggttggaagagacctttagaacagctggtcgttatgccaaccgggtgtccgcactaagttcagcatcaatatggtgacctcctgggagcagggggccaccaggttgcctaaggatgaatgaactggaccagatcagaaagggagcaggtcaggactcccgcaccgaccggtagtgggactgtgcctgggcaatatagcaagatcttggttcttaaaaggaaaaataaagaacagcagctcactcc

SEQ ID NO: 139626 - DNA, 580 bp, Homo sapiens
taggaaatgcttgtcgtggtatgtggaacatgtaaggatattactattatccttattgtaattgcctttgcaaaaaattatatcattgagaaaattatggctctggaggagatctgatctggccaatcccccttttgcctttagtcttcaactgcccttaattattcctgggcttaggctaagctaactttgggagaygtttagtttatagtttccctgataatagcctttcccccaaattgaacctcctttgtaaagctaatgagagaccaccaggctaggaggatagaggaacctgaatttggctaaggtggagacataaacaattgccagccattactccggaggtcacaagatatgcaacttccacagttattcctgcagataacatcactactgtagaacgttaagattggccttttgagatgtcttttcaggttttctgcatgtctcacactgataatggctccacctggatcccccaagtgttcctgtggccctacccagaagcgactcagctcaggaggaccatttcccacacccctctgattgcacccccaaccaattggcagcaagcacc

SEQ ID NO: 139627 - DNA, 371 bp, Homo sapiens
ttcaatcctgttgtgtaaacacattacayaaatgctgttattcttcattaaaatctgctatccctggaattttggttctcatatacatattaacacaaaaagacaaatatagcatccaaaacaggaatcagtaaaaaacatttagaatgttggaattgatcaatggcatcctgcagatagaactccaggaatcaaatgtcctggaagtgacttttttgttgttgttaggactagtccagtggaccaatgggaatacaaaaggaactggaagttacttaaaatttacaattagttatccatttctgcataattcttttgtgaagtcttgcaacatgtgaagagcatttttcctaaaagttgaggtattcaaa

SEQ ID NO: 139628 - DNA, 490 bp, Homo sapiens
gttctatatctacagtgttcaatacagtagctgttagccacatgcagctccatagagcacttgacatgtggctagcatgactgagaaatcaaattttaaatttaattttatgtatttatctatttttataagacagagtctcactcagtcgcccaggctggagtgcagtggtgtaatctcggctcactgcaacctctgcctcctgggttcaagtgattctcctgcctcaggctcccaagtagctgggattacaggggcctgccaccatgcccagctaatttttgtgtttttagtagagaggggtttcaccatgttggccaggccagtcttgaactcctgacctcaggtgatccacccgccacagcctctcaaagtgctggrattacaagcataagccactgcgcctggctgattttatttaattttaatcaccttaaatttaaatggccacatatggctaaggctaccattttggatggtatagctctag

SEQ ID NO: 139629 - DNA, 457 bp, Homo sapiens
accagaatcagacaacttggaaatggtttactgcaaccatttgctgactctctagacacataggtagtgtaaatcaacatatctgtgaacaaagatgactcaaggaattgttttctcttggacttctgggatggtatattcagtgtattttcccctccaatatgggtcatctcagtactataccaggccattcattagtatgaagctgttaggttgccttcatggcctccccaatcagggagcatggacagargtgttcttctctcccttttaattttaatccttactcttggtcatacacaaatagctattaacaccacacactttagctccttctatgctacaggagaaataacttacagatgtaaacattaatgcttattatatagccatttttgcactagcaactttacatgaggcaactatcattttcttcattttaaagtttaaagaattc

SEQ ID NO: 139630 - DNA, 436 bp, Homo sapiens
acatgcagtatatctttggaatacccatgcagtgaatayaaactcattctcagaaaataaaggcacatttgtaactgcgcttgaaacatatttttttaacccatggctattagagtgttgaagcccatcagacagatgtgtatatgcatttttatgttttaggcaagttaggatgttggcttgttaaaagtaagcatctatgggttggaatggatgttaaccatatacatagtccagtttaatatcttagaatggataggatttatttatctcggctcatcttcaagcatatgttagtaataatggacctccatcccctgcaaaaaaggaaaagctatatttgaagtttgcattttatggaacgggtccatagtagtgatatcagaaagaaaaggggcagaatctcttctgttgtcacggctaggtttgctgtaca

SEQ ID NO: 139631 - DNA, 464 bp, Homo sapiens
aggctggtgtccgtctgtgaaacatgcagtatatctttggaatacccatgcagtgaatacaaactcattctcagaaaataaaggcacatttgtaactgcgcttgaaacatatttttttaacccatggctattagagtgttgaagcccatcagacagatgtgtatatgcatttttatgttttaggcaagttaggatgttggcttgttaaaagyaagcatctatgggttggaatggatgttaaccatatacatagtccagtttaatatcttagaatggataggatttatttatctcggctcatcttcaagcatatgttagtaataatggacctccatcccctgcaaaaaaggaaaagctatatttgaagtttgcattttatggaacgggtccatagtagtgatatcagaaagaaaaggggcagaatctcttctgttgtcacggctaggtttgctgtacaggctgac

SEQ ID NO: 139632 - DNA, 630 bp, Homo sapiens
tatctgctttatagaagttacaaaatggaaaacaaataaatgggagtggagaaaagaatgaaccaaagtaatcaaataaatgctaaaacagtgtttccttggaattcagaagaagatttggggaaaaaagaccatctattgccaagcayaagtaaaataaggataaaaactaaaaacaatttaccaaaaaaaagttataaacacccaactaagaaaatgttcactttcatatcaaatatatcacttccatcagattttttgtcatcagatacaccattctcagcctgtccactaccataaactttacacctacatatccatcaactatgccatgtgaaacgtaagtatgagctctacagctacacgtgcacatctacaaaaggtgaaaagtgaaattctgactctttttaaaggctttgtgaaatatataatattgtgtaaaatttaaaatgctataaatactactggttctatctggtacagaaaggaagtgttactgttgtcctagaaaatatgtttccgtctgaaaacaagaaaatctcatctctatggcaaactacttaagggcattaattaaaatgcttcaaggaaaaattaaaaccaaagatgatcttttgtctaaataaaaca

SEQ ID NO: 139633 - DNA, 355 bp, Homo sapiens
ttggccgacatttgggcatgccacatgccccttctttggtgcaaggtctatcatctgcaaggtgcattttacagaaaaaaaggcagagtcctgctcttgacctttctccttctcaccagggaaatgcttcrtgccatccaccctgagcagaagtccagagacacctgggcaacttccatggtgcatttaaaaagggaagaaatgccagaatacagctgtaaaaatgatggtatattttaaatatcaatacctaataaatcaatgcttttaatgcctacataatatgccacgtggagtgactgccattacgagacaattatggtctcataaaaaatattaattatcagtgtcttgt

SEQ ID NO: 139634 - DNA, 575 bp, Homo sapiens
gattggtgtacaaagacaggcaagtgctggtgaygacgtgaagaaactggatccttcatacactgctggtgtgaatgtaaaatggtgcagctgctttaggaagcagtctggcagttactaaaaacttaaagagtttccatttgaaccagcaattccattcccaggtatgtacccaagagaaatgaaaacatatgttcacacaaaaacctgtacatgaatatccatagcagtattactcaccatagccaaaaactaggaacaacccaaatgtccttcaactgatgaatggggaaaaaaatatgtatctatagaatggaacattatttagccattaaaaggaatgaaaagccaggtgtggtagctcacgtctgtaatcccagcactctaggaggctgaggcaggaggatcacttgcagccaggagtctgtgaccagcctggacaacacagcaataccttgtctctacaaaaaacaaataaacaaacaatggaataaagaattgacacatgctactatgtaaataatactgaaaatactatgctaagaagccagtcacaaaagacctcacacagcagt

SEQ ID NO: 139635 - DNA, 435 bp, Homo sapiens
gccatcattttcgcatagaacgccattacgctggccacaggtgcagacatctgacctattatgaaccattgagaatccttctccctggtatttacaatcagractaagagattccagcttcagtctggatgaacccttgagaggaagaagtatatgctaggagtgtggacagccaggctctgggaagcagatcagtctattttgagagaacagaagaatgaagtaagagcgcattcagcaggaaatgaaaaatacctacagaaaaacctgataaggttcaaagtcttagtcccggggtgtttccaaaactggcctacactggataactcttaccttgggtatgcttcagatacccttacagtaaacatcctctttttatttttgctcaagagcatttatactacttgcaacgcagagcccaacataaagactatt

SEQ ID NO: 139636 - DNA, 435 bp, Homo sapiens
gccatcattttcgcatagaacgccattacgctggccacaggtgcagacatctgacctattatgaaccattgagaatccttctccctggtatttacaatcaggactaagagattccagcttcagtctggatgaacccttgagaggaagaagtatatgctaggagtgtggacagccaggctctgggaagcagatcagtctattttgagagaacagaagaatgaagtaagagcgcattcagcaggaaatgaaaaatacctacagaaaaacctgataaggttcaaagtcttagtcccggggtgtttccaaaactggcctacactggataacycttaccttgggtatgcttcagatacccttacagtaaacatcctctttttatttttgctcaagagcatttatactacttgcaacgcagagcccaacataaagactatt

SEQ ID NO: 139637 - DNA, 575 bp, Homo sapiens
gagatatgagcgttgtttttacaatgttttagtatctgtgaataccacattcttttcctttcttgtacagtcttgtttgaaactctggcaaaacgctgcaaaggggaagcaattggaagttggctgagatgaagttatgtgatttcaattaaaaacattctctcacttgtggcttgctatcgctgtggaaaataaagaactgcaacggcaaggttttttccctattgaaaatatttctgttaagcttcagaacggtgaaaatcatttatctacatacacaaataacttctgttcaagttatatcggggctctggtccaatcyccagattctgcgaaaaaggcaaattttgtatagactaattctactgttctcatttcctcagcaccctccacaattttgcatgtatacatcccagaatgcctaaaaactcacaaatgcctgctatcccacagggttccaataattagcacttttacaagtacatccttattttgctgcagaaaatacttacgaggttttaaaattcattattttttttaatacatcattttcactacacaaaaagaactaccaa

SEQ ID NO: 139638 - DNA, 589 bp, Homo sapiens
gtttataacctcaaagcagaagaagagcctcaacaacccgggacttataagttatttttatgttactagacttgcataaagattcttgttttccaactcttcattttgttgcaatgtgttattacaggatatatgaaccaattaaggtttttcactacagttcttgaataaaatttaaaaatcattttttattttaattaaaaatatttcccatttatagaatgcatatatttgcaatggacttccactttcatcaactttccatctcatcgctttaaacaggaacttgaacaagcactgttagtttagacctaaaggataggaaagcattaaataatactttggatctcctgaggaaaagataagtttgcttgcaatttacacattccatggggaaagaagagccatatttcyttaaaaaaaacattaataaagcttgttattgagaaaaattgtagtgaaaagccttaagtaccaaattttaaagcagcagtaacttaatttttatatcagtgtttttgttttgcacaaactaaatgcagtggtaggtgggtttatgagtatattaattgcctttatccatttgtga

SEQ ID NO: 139639 - DNA, 469 bp, Homo sapiens
tcagccatggctcaggacatttctgtccaggggattcttcaacatacatgggaaattatctcaaatttattcaagtaactgcaaccctaacaaacagtcaccactgagagttggagttactatttatgatctttgtggcttgtgaaataggaattgcatttactattttgtaaaaagtgttgtcagtctttgcacctggaaagagtccatgaacatttccagagatcatcagaactggcatcaactttcaccacagrctctgccaactttgtagaataaaagataataactggctaatctcttgcctatgaaagagcaaacaaggtggaatgcccttacatgccaaatcaatagtgatattaatttccttcttagccataaaaagagtcaaccccacagttacatgctatgagatgatacatacatgggcatacataatgtagttggcaagtggcatcctgggatcatt

SEQ ID NO: 139640 - DNA, 544 bp, Homo sapiens
ggttcttgactctgttagggcctccaggggcaattagagatgggtgcagtggggtgggaattgagcaggggaatggaatacttgctcacaractccctgtttgcatatttggttgggaaatggtgaggtggagagatagatcttttcaaaaatgcatttggcttgaaagatgaagtaagaaggaagggagaaaaacagtaagaactggttgatggaaaaatttattctcatggcaaaccctgacaaccaataaacaggaatgtggtgagagaaaatagatactgatggaagaaagaggagaaaagaatatcttcagtgaggggatcatagaagatcctggaaggcacccatgaaaagcaaatagattcaaaaggcttgcctgaagttaccaactttccttaatgtatggtgccctcactgaagctgcagctgtagagatgggcacatcctgttggactgctgaccctggagtgccctgactggtgattcagatacacgtggctgcagtggcagtgtattagtccgttctcacactactataaag

SEQ ID NO: 139641 - DNA, 454 bp, Homo sapiens
tctacccagggttcctcaaaggagatttccactatttgactattgctcctcattaaaaaatatattaacccttttcactcttgtaaccacctcacttcttaccactgacttcctcccaggaactccagttgctccagaaatttggctcagggaacttggcatcgtccaccaaactctttattcttacaaagtgtgtggcacattccaaagggagctcagattcccagctccaatgcagaacctggttccacttcacagtggtgctgtaattcccctaaaagcaaagagaaaacaattggagacacatagccatcttgtcctataaaatagcttgacttgamttatcccaaagcacaaacctaagaccccattgcaggtccacgatatgtgccagtgaattccacttctgctagtcaattccccatgttctgatgcctcgcatgggagccagcta

SEQ ID NO: 139642 - DNA, 580 bp, Homo sapiens
tgaacaattgctttttaggaaaataaataaaaaaatccacttggtgtatggctaatattattttttgtaacataataatagatatgagttgtcttttggaaaaataaagaataggatccatgtagtctatggttaatgttatttttgctaacggtgctaagtgctagttttccacaattcctccagcacttccacctcaatttttctttttgtagataatccttagtctcaatatgacctttgcttcaatgttttaccgggcccaaattaccaacaagtgtacccattaaaaatacaaaaatcagacttgctagtataaggtgagatagtggaaagatgtgttgatagcagggagtaaacagctacacagaagtattgctgttgttgaaaatcatcatactaaataagtytcattgtgggaaactgccctttgagaggtagaattatagactaggtatgaatcctaagtggacagagtcaaaattttatttaacttgcgcagatctcaaatttcaataatgaatatggaaagtaactgaagatgttaaaattagtgacttgtatgccttaccaaaggaac

SEQ ID NO: 139643 - DNA, 332 bp, Homo sapiens
agagctaattttcccacacatgagcctttgaaaacattaataatgaaaatgccaactgaatttcaaatacttttgctaggcaattgtactatatattgctgatrttatatattaaaagattaatcatgtcttataattaaacagctttatgaacttttaattgattcactcaataaacattgagtaccatatttgccaagtacttgtttgaagtactgcaaagttaacagtgaacaagatagtcaagaagacagcatcaccaccatggaacttacactctaatggatggaaactatcaataaatataaaaggagacatcaaatcatgatgag

SEQ ID NO: 139644 - DNA, 547 bp, Homo sapiens
agacagacaagatctctgctttcatrtagcttatattttagtgaatctcaggttgaagaaatctgcaaactaaacaaaaaaccctgaatgcctgacacattccagaaaaatgatatagcaacatgcaaacagttccactgatagagcattcattctatttttgaaatatatttatttttatgagccaaaataaccttcccagtagttttcacccttggatcagatttctgctctcttgggtcataaaaaacaaatccctgtttcacatgacagccctttatactttaagacagctatatcaaatatctctgaactttgtctcctaaaggctaaaataattctatcggtgctttggacagatctttataagacataatccttaagactggaaggaaaggagtacaaataccaggttctatatgactttaggccattaattagtaattgctacataaattttcttgaactgtccttctcaaacttgcaatatttatttttatgagaaaggccataacatttaccaactcctatgtacaaagcaatgttt

SEQ ID NO: 139645 - DNA, 517 bp, Homo sapiens
gacaagatctctgctttcatatagcttatattttagtgaatctcaggttgaagaaatctgcaaactaaacaaaaaaccctgaatgcctgacacattccagaaaaatgatatagcaacatgcaaacagttccactgatagagcattcattctatttttgaaatatatttatttttatgagccaaaataaccttcccagtagttttcacccttggatcagatttctgctctcttgggtcataaaaaacaaatccctgtttcacatgrcagccctttatactttaagacagctatatcaaatatctctgaactttgtctcctaaaggctaaaataattctatcggtgctttggacagatctttataagacataatccttaagactggaaggaaaggagtacaaataccaggttctatatgactttaggccattaattagtaattgctacataaattttcttgaactgtccttctcaaacttgcaatatttatttttatgagaaaggccataacatttacc

SEQ ID NO: 139646 - DNA, 532 bp, Homo sapiens
gtcgtatctagagacacgggttctacagattcagtccagtgtccaaacactccatttaagtctcttttcttctcactcccctctggagcaggacatgctaaagactatgcccatcagcagttcccattctattcaatgtctctgttttctaagcctgtaattctgcacccttgctacagtccttcacagcttgtttaagtcagttttctggaaattcattttccctacttttactagtttcctttcttcgtttctttgggatcttaaatttcattatcttggggccattctcatagaagattttgctggccagttcatagcctccttctttgttctgtttgtgcatctggcattagttgagctccacccttttccccaagcccagcacgtgtttattcactgtgttactggtgcagaagagctggctcccgaagtcctctgctttctcacaaacaagcctctgtaactgctctggaattgtcctaacaagggaagaagagcatgtccrgttttaattttgtaaggaaattga

SEQ ID NO: 139647 - DNA, 610 bp, Homo sapiens
atttttttttctgcttttcactcagcagtaaatcactcattggtaatccaaggttggtagaaaagcaactatgaaactcaaagaaaattcaagggaatctttttttcccttctgtaggtaaggactttgtaagaaaaatgtaaaaatcacaaaagacatatagacttagttccataaaagttaaaaaaaatcgaaataccaaatggcaaattgtctactaggaaattttaaaatacaatatccaagggctaatttatttatcattaataagacagacatgaaagcctaattaaaagtgggcaaaaacaatgaacaatttgcaaataaagaagtttgaatgacaaataagaatatttagtttctgtaatcaactgagatgtgaattaagcagtaatagatatataattttcttyattaaaaacaagacataataataaatgccagtataattggtagaagtgtaaattgctatacactttctgaaaagcaatctgtcaatacccactaagttttcttataggaatctaacctaaggaaattgaaatggatgacaataaaaatttatgttaaggaaggctcattttcatgatatttatgatatcagaaaatt

SEQ ID NO: 139648 - DNA, 204 bp, Homo sapiens
cacaatcttgtataccatcccctacgacacacacaggcaaatacacatgccttcttgcttttaaatatttatcattttggaatckaccagtactgtatttgatacctgatgctttctttaggtaagcatataaatctgggtgccttatagttacaccttggcagtaactacaaaaaaaattgtttaaggtccatcaacttctgc

SEQ ID NO: 139649 - DNA, 615 bp, Homo sapiens
tgcggtattttgtggctgaacagtaggtggcatacagggtagtgaagaaatggggaaattttaatcyaagcgattttcatctgatttcattaacttccgaatatgtcatcagcgtacacagaacattaatttgcaaaaaaataggaacactaaatagtcatgaaatgtgctagttaaatgtggaaaaatcaaaaggatcccacagaaatggaagcaaaaggtctaatgtttcctcaggtaaagtgtgtgtgaaacagcaaagccccaagaataaaggggcccttgtgtatggtgggcttttcctcactgttattcttggtctcaacttgatgaagtgtattcgtgatatacacgaagcactgtgactcttgtgtctctctttgtgagactgtccatgcctttgttcctgctgtcagtcagttgttctttctcttgggcagccacattggtaaccgcagtatctacttgcaaatagatttctgtaaaaccatattatccttcaggcctttactcctagcccccacccctctttcctcaacaatctggccattcatgtggcatagctcccttgcttgcttctttgccatatgtctagtggtttgtgtttcagggagg

SEQ ID NO: 139650 - DNA, 589 bp, Homo sapiens
cttaataaaatgaaatggagagccgacgttatgtatctttacttcatataaagttttactttttcctgctttagcttataccttaatggctaatactgacaaaaaaatatctctttttggacaagtagaaggttagagaaatgcacatagaaaaatgctaatattcagtaaatggactttgcactgagatagaaagggcttttcttccacctcagccacctactgccatgttcaccccagaccttgccatgacctgtagctatatcgtgctgaacctttgaactcttatgtcttcartcataacatttccatcacggcaatgagtttatattagcggagctaccacttttcgtcatcattactcttgtgaaatccacacttcccttcttaacttgcatggcctccacagtccacaatcgtaaatatttattttgatcaattcagtttacttgaccctgttcctccactacaattgcttggcagtccaacaacatgaattaaaaaacaatatttgtctattatgtaaccgtaaagaccttaggcgtttgaaaaatacataaaaacatacatacatacaaagtaatgatta

SEQ ID NO: 139651 - DNA, 589 bp, Homo sapiens
cttaataaaatgaaatggagagccgacgttatgtatctttacttcatataaagttttactttttcctgctttagcttataccttaatggctaatactgacaaaaaaatatctctttttggacaagtagaaggttagagaaatgcacatagaaaaatgctaatattcagtaaatggactttgcactgagatagaaagggcttttcttccacctcagccacctactgccatgttcaccccagaccttgccatgacctgtagctatatcgtgctgaacctttgaactcttatgtcttcagtcataacatttccatcacggcaatgagtttatattagcggagctaccacttttcrtcatcattactcttgtgaaatccacacttcccttcttaacttgcatggcctccacagtccacaatcgtaaatatttattttgatcaattcagtttacttgaccctgttcctccactacaattgcttggcagtccaacaacatgaattaaaaaacaatatttgtctattatgtaaccgtaaagaccttaggcgtttgaaaaatacataaaaacatacatacatacaaagtaatgatta

SEQ ID NO: 139652 - DNA, 443 bp, Homo sapiens
cttgaaagcagctagagagaaggagcaggtcacttacaaagggacccccatcaggctaacagcagacatttcagcasaaaccttacaaactgggaaagactgggagcctgtattgaatatccttaaaaagtaattccaaacaagaatttcgtatctcaccaaactaaccttcataagcaaaggagaaatgaaattcttttcaggaaagccaaagctaaggtaatttgttgaaactcgacctgccttaccagactatctaaaaggcatgctaaatatggaaatgaaagaatgactaccaccgaaaaacacactgaagcacatacctcattgacattataaatcaactatacaactaagtctacataagaaccagcttacagcaagatgatagatacaattctcacgtgtcagtattgacccagaatgtaaatgggttaaatgtc

SEQ ID NO: 139653 - DNA, 443 bp, Homo sapiens
cttgaaagcagctagagagaaggagcaggtcacttacaaagggacccccatcaggctaacagcagacatttcagcacaaaccttacaaactgggaaagactgggagcctgtattgaatatccttaaaaagtaattccaaacaagaatttcgtatctcaccaaactaaccttcataagcaaaggagaaatgaaattcttttcaggaaagccaaagctaaggtaatttgttgaaactcgacctgccttaccagactatctaaaaggcatgctaaatatggaaatgaaagaatgactaccaccgaaaaacacactgaagcacatacctcattgacattataaatcaactatacaactaagtctacataagaaccagcttacagcaagatgatagatacaattctcacgtgtcartattgacccagaatgtaaatgggttaaatgtc

SEQ ID NO: 139654 - DNA, 351 bp, Homo sapiens
attacatgctaattatacaatatttataatcggaaaataaygtaatgtcaggatacatctttctaattaaaacaattttcttccaatgttctaatggctccaattgtcacaattttaagcttgttctttaaaacattctagagtaggaaaaaatgggttgtcatacacctgctactgaaaagacttagatgatttttaaatacctttgtctaggtcatacatactggtatcaatttctaacttggtatctctctagaaatatcaaatagctagtattactttatcagtcaaggaagagatatgccatcttttatgttgctaatgccacatctggcaaagtgtttagagcag

SEQ ID NO: 139655 - DNA, 556 bp, Homo sapiens
ggtaggtatttgtgcattaatgctttcccagtgtctgctgagaaagcatagagtatatagtgcttagcagtttcctttctggaagcactctgtggatttatttctcctccgacttattacaaggtatgaaatcataagtaaattatttaaccatttcatagcgcmcatagttttctcacatgtaatatttatatagtagtacctatctttttggtttatagtcaaaatagatgaagcagtaaatctataatacttagaatagtaactgttctatcataataacataataaatgttagctattactgtggttttctaaaaagactctgcaccacctgtcacccatcctacttcataaacacccacttcataaacatattctattctctacaccatagttgctagctaatatatattaagtaaaatcttgctgccatttattttgtgccttgagtatgtcaggtgttttatacactaagttttatgatttcaataacgctgcaacatagatatgtgtatgcccattttaaagattaagaaaaaacgaggcactaaaaa

SEQ ID NO: 139656 - DNA, 406 bp, Homo sapiens
atgcagttcaacttttctatatacagacagtccttacattgcaaagtagtctgggaccattaaaagcacgatgcaagctgaaatttctgatatgatgaagccagcctttattggcagtgaaatgttcttcttcagtcttcttgtagctgccattttcttcaatatggcaactagaacctttctacctgaatgctagccaaactgagtagaagacatttgaagctgcactgaaaccaaaaatttagcgcagactactcatgtaatgaagayagtactagctacattagattttcttgtcatttgagtgtacctagaattttatttttcctacgaaatgaatcttgggtcctctctctaaactagcttcatatcccatggtgaggtaatctgttgtgatttatatatt

SEQ ID NO: 139657 - DNA, 554 bp, Homo sapiens
tttcaaactaaatctatgctaaagagatcttaaatacctgtgaaaaaaggcaaaagtagtactataagtcctaaaaacacttactattttaatcattaagccttgctattgcattattgcttaatgcatggtaaaatkaaattagttagggtaatatgctgccaaaggaagaaaagaaacagtattaccctttaatcaatatcattatttatacttttgtagttataaactcttaatacccatgtcattgtatgaccattaaaaactcaaaaaatggaccttggagccacgagagatttcctttggtggagaaaaggtaagcagaagatccccagtagactacctttcttccataggtgcctataattctagctacagggtagccccacagctctcacaggccctaagcttactatggggagttgtctggagtccatgggagtacattattctagagagagaattcatgctgagtgcctcccatccccccaggacccaagttgctgtagcaaagtgccaccttgagagcaaagccaacactagactacatcttt

SEQ ID NO: 139658 - DNA, 554 bp, Homo sapiens
tttcaaactaaatctatgctaaagagatcttaaatacctgtgaaaaaaggcaaaagtagtactataagtcctaaaaacacttactattttaatcattaagccttgctattgcattattgcttaatgcatggtaaaattaaattagttagggtaatatgctgccaaaggaagaaaagaaacagtattaccctttaatcaatatcattatttatacttttgtagttataaactcttaatacccatgtcattgtatgaccattaaaaactcaaaaaatggaccttggagccacgagagatttcctttggtggagaaaaggtaagcagaagatccccagtagactacctttcttccataggtgcctataattctagctrcagggtagccccacagctctcacaggccctaagcttactatggggagttgtctggagtccatgggagtacattattctagagagagaattcatgctgagtgcctcccatccccccaggacccaagttgctgtagcaaagtgccaccttgagagcaaagccaacactagactacatcttt

SEQ ID NO: 139659 - DNA, 260 bp, Homo sapiens
gaattaatatcaaaaattgacctctggatccctgaatttgactgaattagtttgcaatttatttcctaaggcatttttgttaaaaaaaaaaaaagataaatcagctagcaattaatgaaagttctcagctggttatggtccaggaaagagataaagagagccttgccaaattcattgtcataccagcatgaccgtgcccatacccaaagctgtgtctctakgaggagcaacattatggagttaggactacaggaggagag

SEQ ID NO: 139660 - DNA, 348 bp, Homo sapiens
tatcatttttaaacagtaaagtcttttttatttaaggtgcatacattgttttaagacataatgcattacacagttaacatactatagtgtaaacataactttcatatgcacttgggaaccaaaaaatttgttgtgtctcactttattgcgatattagctttargcaatggtctgaagccaaacctgcaatacctccgagacaagcctgtaaaataatcaatgcacatgtaaatattagagactctgatgttccactatcaatgacattccaatgtagggctattgtttctgagattggggcgaaatttctgagtcattcagagaaaaaaataatcaattggtaaacat

SEQ ID NO: 139661 - DNA, 566 bp, Homo sapiens
caagaattgctttgttagatgacctatctaattctcttagtggggtgttgaagtctcccattttcattgtgtgactgtctaagtatttttgtaggtcaggaagaacttgttttataaatatgggtggtccagtgttgggtgcatatatatttaggataattaactcttcctgttgaattgcaccctttaacattatgcaatgcccttctttgcccttcttaatagtagttggtttaaagtatgttttagcttacataagaatagtgactcctgctcttttttgttttccatttgtatcatttatctttctccrtccctttactttgaacctctgggtgttattacatgagatgggtctgctaatgatagcagatgattggctcttgtctttttatccagcttgccattccatgtctttcagttggtgtgttgagcttatttacattcagtgttagccttgatatgtgagatttggattccgtaattgtgttgttacctggtggttacgtagaatggattgtgtagttattttaaagtgtctgtggactatgtgcttaaatgtgttt

SEQ ID NO: 139662 - DNA, 546 bp, Homo sapiens
attacatgagatgggtctgctaatgatagcagatgattggctcttgtctttttatccagcttgccattccatgtctttcagttggtgtgttgagcttatttacattcagtgttagccttgatatgtgagatttggattccgtaattgtgttgttacctggtggttacgtagaatggattgtgtagttattttaaagtgtctgtggactatgtgcttaaatgtgtttttgtggtagcaggtgtcattcttttgattccatgtttagcacttccttatgaacctctcataagtctggtttatttatttatttatttatttatttatttatttatttatttattttctgtgacagagtctctctctcttgcccaggctggagtgcagtggcatgatcttggctcactgcaagctccacctcctggattcacgccattctcctgcctcagcctcccgagtagctgggactacaggcacccgccaccacgcctggctaattttttgtgktttttttaattagagacggggtttcaccgtgttagccaggat

SEQ ID NO: 139663 - DNA, 614 bp, Homo sapiens
tcaatgagcttttaacaaataatgtaacagtgacttagacatagtacaagattgtttctccctgttaactagtaatcctcactggaaacgccctagagattttattttaaaatatgttacattttcaaatatacgtaagatgtataagtcgattatactaactcagtattatattgttattgaaaaagttgcttctgttaaactcatgttaaacatgtgcgaataatatatttarcattctgactgcctttcacatgaacttctaagaatatggatcttcaaactattgtataattcactaaggatagctattttctcctaaaatgataaactcttccacaatttgacttctgaaagctcttatggttataacagagtgattgcaatagataataaacataattttttaaactacagttcagaattaaaatcaatgatataactttgtacatttttaacgaagagcctgataaattaatttgggctagaaaatcacagctgaagtatataatatacaatgttttacattttggctcaatactattggaaagattttatgattctaattattgtaaatctaaaacatctggtaaattatcattttgttcattaga

SEQ ID NO: 139664 - DNA, 604 bp, Homo sapiens
tagctactgtagcctctacttccccgactgagttcacctctgtctcctgagtagctgggcgcaggcagaaccatcttggctattttgacccttatatattttttgtagagagagtctcactacattgcccaggctggtcttgaactcctggcctcaagcaattctcttgcctcagtctcccaaagtggtgggattactggtgtgagccatggtgtccagacttgtctaagcttttagaactcaaattggaccacagaaacgaggatgtgagccaaagtcatgcttttaccatggcacaaaaattagtgtttctggagttgtgcataacccaggatcagaatcatgcatcagacagtgacccagaacccaaaaatgggccacatcccaaaatcagaaatgaaacacatatttgtgtgaggtgaggctayggaattcttaggccagacataaatttcttgttattattaaatatattacccatttatcaatttatttcttataaatcatttaaattgtaattatttccttctttaaaatgacttgaaatatgaaacagattatttgctatgtacttcctaattaatatttgctccctactgagaac

SEQ ID NO: 139665 - DNA, 553 bp, Homo sapiens
caagcacttagctagttaaaaccacggctctgggccaacaaagactggcagacagtccaaagacaaacacacaaaaaactggcttcaacactaggttaccccatagggattttttctttcgtgttatttttggcatccgatgaatttctttccattcctgcagttaaaaacacctctaaaaaagataatgtatgatgcaggaatgagcgtgagtaactgaatggcaatatcttggttggatctgaaagaaaatagcatacaaataaaaaatgaaggagtagtccttagacagatgtacagmtatgacatctaaaaaaacagaggaaaggtgagaaatagggatatcaatatgctgatttatgtaattgataatcagagcatggctggaacctgtggcctttttctgtggcccttgctgatttcagcctgagggttttcatggaattaccttgaatgtcccttctatttagtctctggtggggtttttcttctcttgtggtggttttcaggtaacaatttcaggccccatgtcttaaattttctgaaaaatgat

SEQ ID NO: 139666 - DNA, 548 bp, Homo sapiens
cccaggttcaaccaattctcctgcctcagcctcctgagtagctgggattacaggtgcgtgccaccatgcccagctaatttttgtatttttagtagagacagggtttgaccatgttggccaggatggtctccgtctcttgacctcgtgatctatccacctcagcctcccaaagtrctgggattacaggcgtgagccactgcacacagcccccctcttttaattacttagttagtttcttatgggccctcactgaaattagtaggtacaggtagggtaatttgtggaacactattgctgtgttttactaaatccataaggcatctctctctctctccttttttttttttttttttttttttacaaagtgagagagaatgcatctccctactttttattacgctgtattagactgtaaataaaatatttttgtctgtcacaatcaatacctcaaaacctccaataggttttagtgaaacagaactttcatcctttatttataggcctgctccaactcctctttattgcactggaatccaacataaattcta

SEQ ID NO: 139667 - DNA, 548 bp, Homo sapiens
cccaggttcaaccaattctcctgcctcagcctcctgagtagctgggattacaggtgcgtgccaccatgcccagctaatttttgtatttttagtagagacagggtttgaccatgttggccaggatggtctccgtctcttgacctcgtgatctatccacctcagcctcccaaagtgctggsattacaggcgtgagccactgcacacagcccccctcttttaattacttagttagtttcttatgggccctcactgaaattagtaggtacaggtagggtaatttgtggaacactattgctgtgttttactaaatccataaggcatctctctctctctccttttttttttttttttttttttttacaaagtgagagagaatgcatctccctactttttattacgctgtattagactgtaaataaaatatttttgtctgtcacaatcaatacctcaaaacctccaataggttttagtgaaacagaactttcatcctttatttataggcctgctccaactcctctttattgcactggaatccaacataaattcta

SEQ ID NO: 139668 - DNA, 509 bp, Homo sapiens
gagctgcggttctcccagtacagtgtttgagcactgatgaggtacagactgcctcctgaagtgggtccctgacccccggtgtatgcagactggaagacacctcccagyaggggccgacaggtacctcataaaggaaagctctcgctggcatctggcaggtgcccctctgggagaaagcttccccaggcacgaacaggcagcaatctttgttgatctgcagcctctgctggtgatacccaggcaaacaggatctggagtggtcctttagcaaattccagcagacctgcagcagaggggcctgactattagaaggaaaactaacaaacagaaaggaatagtgtcaacatcaccaacatcaaagaccaaagttagaaaaatccatgaagatggtgagaaaccagcacaaaaaagctgaaaattccaaaatacagaacgtctcttcttgtgcaaaggatcacaactcctcactagcaaaggaacaaaactggatggagaatgagcttgacgaa

SEQ ID NO: 139669 - DNA, 616 bp, Homo sapiens
caccaacattgagggtggattttccccattcagttcaccaattgacaggccaatcttcctagaaaacaccctcaagaacacacctagaaacggtttcaccagccatataggcatccctttatgcaggcaaaaattcctctaggtatccctctatgcagacacctaaattcgaccatcacagtagcctgttcacatattacaagctttttacaacttgccacaacttttgaaattttgttttgayatttctgtatgtaatataacatactatatactatatattgatgtatgtatttaatataaacctgaagcctcaaaaactggaattagcctgaacatttcttgccttgggaagaccctaagtaaattcaccagacctattctccaatttcatgtttcaaaatttggctgtatgttaattgctgtgaagcaaattttgactgtgacataaaggtcctcagtgtggggaatgcacctgaattgtccagagttggactgagtgaagttgaacagaccactgggagctagctttctttaatggggagggctacaaggagtctggataatgtgacctaatgtggagttttcatttccaatcatcatatctatgaaatct

SEQ ID NO: 139670 - DNA, 616 bp, Homo sapiens
caccaacattgagggtggattttccccattcagttcaccaattgacaggccaatcttcctagaaaacaccctcaagaacacacctagaaacggtttcaccagccatataggcatccctttatgcaggcaaaaattcctctaggtatccctctatgcagacacctaaattcgaccatcacagtagcctgttcacatattacaagctttttacaacttgccacaacttttgaaattttgttttgacatttctgtatgtaatataacatactatatactatatattgatgtatgtatttaatataaacctgaagcctcaaaaactggaattagcctgaacatttcttgccttgggaagaccctaagtaaattcaccagacctattctccaatttcatgtttcaaaatttggctgtatgttaattgctgtgaagcaaattttgactgtgacataaaggtcctcagtgtggggaatgcayctgaattgtccagagttggactgagtgaagttgaacagaccactgggagctagctttctttaatggggagggctacaaggagtctggataatgtgacctaatgtggagttttcatttccaatcatcatatctatgaaatct

SEQ ID NO: 139671 - DNA, 596 bp, Homo sapiens
aagctatataaacaaaggagaaataaagtcttacccaggcaagcaaaccctgggggaatttgtcaccacttgtttcctacaagaaatgctcaagggagttctaaacatggaaataaaaggataataatcatcatcataaaaacacatgtaactacaaagctacagaggacataaagcaattacacaattgagactactgactagttaacaatagttaacaacactataacaggaacaacactttacatatcamtattaaccttgaacattaatggcccacatgctccacttaaaagatatagactggcagattggatacaaaaaaaaaaaataaataaaacaagccccaactatctgctgcctacaagagacccacctaaggggtaaagacatctacacactcaaatataagggccgcaaaaagatatatcatgaaaatagaaaacgaaaccagcaggagtagctattcttatatcagataaaacagattttaaatcaacaacagtaaaaaaaagacaaataaggtcattatacaatgataaagcgttcaattcaacaagaagatttatcctaaagtagacctattgttcacccaa

SEQ ID NO: 139672 - DNA, 596 bp, Homo sapiens
aagctatataaacaaaggagaaataaagtcttacccaggcaagcaaaccctgggggaatttgtcaccacttgtttcctacaagaaatgctcaagggagttctaaacatggaaataaaaggataataatcatcatcataaaaacacatgtaactacaaagctacagaggacataaagcaattacacaattgagactactgactagttaacaatagttaacaacactataacaggaacaacactttacatatcactattaaccttgaacattaatggcccacatgctccacttaaaagatatagactggcagattggatacaaaaaaaaaaaataaataaaacaagccccaactatctgctgcctacaagagacccacctaaggggtaaagacatctacacactcaaatataagggycgcaaaaagatatatcatgaaaatagaaaacgaaaccagcaggagtagctattcttatatcagataaaacagattttaaatcaacaacagtaaaaaaaagacaaataaggtcattatacaatgataaagcgttcaattcaacaagaagatttatcctaaagtagacctattgttcacccaa

SEQ ID NO: 139673 - DNA, 596 bp, Homo sapiens
aagctatataaacaaaggagaaataaagtcttacccaggcaagcaaaccctgggggaatttgtcaccacttgtttcctacaagaaatgctcaagggagttctaaacatggaaataaaaggataataatcatcatcataaaaacacatgtaactacaaagctacagaggacataaagcaattacacaattgagactactgactagttaacaatagttaacaacactataacaggaacaacactttacatatcactattaaccttgaacattaatggcccacatgctccacttaaaagatatagactggcagattggatacaaaaaaaaaaaataaataaaacaagccccaactatctgctgcctacaagagacccacctaaggggtaaagacatctacacactcaaatataagggccgcaaaaagatatatcatgaaaatagaaaacgaaaccagcaggagtagctattcttatatcagataaaacagattttaaatcaacaacagtaaaaaaaagacaaataaggtcattatacaatgawaaagcgttcaattcaacaagaagatttatcctaaagtagacctattgttcacccaa

SEQ ID NO: 139674 - DNA, 636 bp, Homo sapiens
tctattcactggaaacatccggaaaagaccattagtcttctactcctctcacaccaatttctttgkccatttagaaacaattattttaaacacactgatcaaagatgctgcaattgtgccaggagtcctagagagatgctgatagcatataggtgctccctccatcagctgaactctccgaatctagcctcacattaccactgccagtttaatcataatgagctctctcactgcctatatgatctgatggggaatcacatagacattaacctcagctcattttcctgttcatttaaagaggcattaaaccttgatacagtgcataccactaccctttcttaccataccattattatagattatatatagtgattgcccagctttgagatgtacctctcaaattcatagcgtatgctaagggcgaacatagaagtcagcattacagaagtttctactgtgtcagtttttcctctatcccttccagatttcgctttcatataaaatgaagtcaagcatgcagttgaaaaagaaaaaaattcagttaatcattcctgtcttatcaaacttactcttaccactaggacatgaggaaatgcagcttcccagaaggaaatactattataacttcacatttta

SEQ ID NO: 139675 - DNA, 586 bp, Homo sapiens
aacctaaatctgttgtcggctgtgaatatctacttctatgtattctgtggaatagcaaaccattagccttttatcatatttttaagtttccagagccataaataaacacaaacttctaagtgagatgaaacctaaaatttctacagagcaggaccatatatatatatatatatatatatatatatatatatatacacacacacayatatatatatacacatatatatatatatatatacacacacacacatatatatacatatatatatatataggataactgaaagagttgaaaggagattgtatttttagtctaacgttctatcaaaaattcataacataattaaattaactagatatttttctcacatcccaaatatggtttattgtagacatgatatctgaatgattgcctattaaagttttcaacttcatggtttttttaacctcattttaattgatgagagaaaaaaatacagattattaaaaaatctttaaatcacttgttttataacaagggatcatgcttcattatcaaagagttgtatcattggaccaatatttgaatagttcacaccatcttgat

SEQ ID NO: 139676 - DNA, 519 bp, Homo sapiens
tgagatcaaccatgagatgatccagatgttggagttagcagatgtatattttaaagcagctattataattatattcaatgaagtcatggaaaataagttaataatacatgagaaacatagaaaatctcagtagagaaatagaaataaatggaaattctagaactgaaatagaagaagcaaaattagaattccctagataggtttaacagcagaatggagaagatagagtcatgagttaatttaaagatggttaatagaagactaatctgaagacaggtaaaataagattgaaaaaaatgaacaggactttggggacctatgaggcaataaaatgataacaataacaaaagcatwgcataatcaaactgttgacaaccaagggtattggggaaatcttgaagcagccagaaaataaagaaatttcatatacaagggaggaagaaaattaatatatgagaaaataaaccggaacagtggaggaatgggggcagggggaatctgggaattgacatgaaaaaa

SEQ ID NO: 139677 - DNA, 408 bp, Homo sapiens
tgtgtcttacaggcccatgttttttcttatttatcacactggctctcagtttagacacaattttggtagcaaccatgagttttattacagttagagacttgttgcactaggcactctcaatttcttttccagcagtcaggaagtcatcacaaagctcctgagtttaaatgcagagtggaagatgggaatgaaccactattacttaacttagttcttagatcatkaactcagacattgccaacaatcttccaaattcagtgtacccttgtccccaggttagtggactcttttaggactttacatgaattaagctgagttactaatgaaatgccataaggctaactgatggatggttactctttcatgtgacattttggagtctagaaaagatagggattaagataattg

SEQ ID NO: 139678 - DNA, 408 bp, Homo sapiens
tgtgtcttacaggcccatgttttttcttatttatcacactggctctcagtttagacacaattttggtagcaaccatgagttttattacagttagagacttgttgcactaggcactctcaatttcttttccagcagtcaggaagtcatcacaaagctcctgagtttaaatgcagagtggaagatgggaatgaaccactattacttaacttagttcttagatcattaactcagacattgccaacaatcttccaaattcagtgtacccttgtccccaggttagtggactcttttaggactttacatgaattaagctgagttactaatkaaatgccataaggctaactgatggatggttactctttcatgtgacattttggagtctagaaaagatagggattaagataattg

SEQ ID NO: 139679 - DNA, 573 bp, Homo sapiens
caacaaaacaacccttggactgcctaccatcagatttcttgttaagtaaaaaataagcatccatatgatctgagctgattttaaccaggtgatctgtacttgtagtcaaatgtatccyggctcatacaatatgcaaatgcctaggatgccaacattaattgtccacagtctctgtcagttaaattcaagaggtcttcaatctgcatgttcccctcctctttttaagtagtcattcctgacaagggaaagaaataatatttggctcaactacacctacagactagtatgggaagattgctgaattcatggtaacccatataaaagagacaaatcctgattattcatcttgtttccaagtatcaatctttatctatcagataaaatgtgggtatagaaattttccatactagacatctgagttgcatcctggatttggagttggccttgtcctaaccttaaactgctgaagttctgatatgctctgacatgctactttgttcttcccagagcctttctctgggtatgaatcttcttacctcaactcacaactagagactgcgttttgtaaaatga

SEQ ID NO: 139680 - DNA, 413 bp, Homo sapiens
caaaatgaaaagcaaagctttgagctggtttgaccataatcatttattttcatagcatgagtctttcaaaagtttgccttttatttgaagtttcttccattttcctgattttgttttcttcctgagtaactctgattctccttccgaaggtcattctctatttstgttataatatcctaaaaaaatgtgctctatgaaatagctaggcttcttaccaaagcacgatgtaacactcttaccctttagaggactctcttttttctctcactctttggagataaacatgaagaaaactttgaatattagttaagtgtggaccttcccattatatcatcagtgttagagcaactcagtagaaaaccaaagaaaaataactccagggatattaataaaccgatatgaatgtcgtaata

SEQ ID NO: 139681 - DNA, 563 bp, Homo sapiens
tgtctactaatttctttgcttaccaatacttcttgcattgcacactttatgtcagaggtcttctttcttctaaggttcctatagtaaaaatctgttggtrgcaaactcattcagtcatgatttttgttgtcttgttctcttgttttaatctgaaagtgactacttcatccccattcttgaaaatatttttactagatataaatttctaaatagttttatcttttgtttcttttattatattattgtgctattttccaactgttatcattgctgttgaacagtggctgtcctttcaataatttgtgttttcttttgagctattcttaggagtatattcttcgtttaatgttttcaagttttatttcaaagtatttaactatgaattttttcttatttattcttcttagtatcatagcattgtttttatttatggattccagtctttttgtcagctctagacaattgtcagcctatgtctgtttaaacatggcctaacctcttttaggactgtcattaggcatattttatatttctttctattctcaacgtttgttaagttgtca

SEQ ID NO: 139682 - DNA, 571 bp, Homo sapiens
acattaattttgagtggccaggggcaaatgctatggtctgaattttgtgtccccccaaattaatatgtggaaatctaagccacaatatgttggtattaagtgacaggacctttagaaagtgactagatgttgaaactaatattctcatgaatgtgattagttcacttatttwaaaaaaaaaaagagatttaggtgagcttgcctttctccttacccttctatcatctaagatacagcaagaaggtgccatttgtgaagcagagagccctcatcagataatgaatcttctggtgacttaatcttgaactttccagcttttagatctgtgagcaataaacttacgttgtgtataaattactgagtttaaagtattttttataacaacctgaatggactaagacacaaatataacaaaaggattgcccatatacactgacctttttattctgttgacaggtaatttttttttgtcatattttatttatgtttattattttactaattatttaagatatttcaaacctattaacaattttaagacagtaaacttcacacattcatacattttaaa

SEQ ID NO: 139683 - DNA, 559 bp, Homo sapiens
taacaatctactgcacatagtatctttcttagtgtgtttcagttaattatatcttaaatatttcttacagtacacgtaactgaaagattctgtggatttgaggtcactgggagctgctactttatctgctcctcatctctgccccgggtgcaaagcttattttctgagactgagagagatccaataatgagtggcacctgggttccttcttcaccgctcagtcatggagatgatgactaagacccactctaatgcctgcaggtccccttcatggtgacattgattaggccagagatggtggatccattcagggatttcttggactcaccctttacttccagaaccggactcaacttttgtttttatatctgcaaaaattagraaatcatgcctactttacaggagaagtagagaaaatatttgcaaagcacatagcaaaaaccaagcatacaaatacttgcaggaaaaaaagtagattttaaaaatgtttatgaaaaacttttgtgaattcagaaaaatacgattgttatcgtagataggttgttaatacctactgatc

SEQ ID NO: 139684 - DNA, 560 bp, Homo sapiens
tactcaatgactttctctagcaaattactaattatagcttgtaaattcaaataggccatgggtctaggacttaaaatattctggaatataataaattattccagaaaaattagtaagatttacatttgtagaccttagaattaagcttgtattttaggagtcctggtgcttaaagaatccttaaggcaattttaatacctgttatacaaagtaatgattcatttccattagaaaagtcttgctgaacaacccgtgtggtcaattttagagacagtgagaaaaagggttggggggatctattctgttgataaggcaagacttaacttagattagtatgtgttttttttttccttctgaaaatgttaagaatcatttatgatcatttttgtagtagaccacatattaatcttttcccatctcttttggtattttttatattattttgcttaattgggtaattagacattatgttttcatgtttcagaawagagatgcttcagaatgaatgcagaactgcatatcagatataaacattggcttttgcatttcaaattcttaaa

SEQ ID NO: 139685 - DNA, 521 bp, Homo sapiens
atgaaaacaaaatgtgctcactggaggcctactgtgttcttggcaacatctgaaggcatcaggaattgaaaaaaaaatgtggttgcttttatggattataytgtatcataagagagaacatccgatatgacaggaagatgagtaaaacaattggaatttttgataaattctacgacagaatccaattaaagtatgagacaaaattatagggatgagagacactggaacagatgtggaacggagtaaaccaggtattttggatcctttccttgtttccgcaggaataaaagcctccaactctaagagggttactcagtcattcattggccaatctaaccactgtcatatagtgtaggtggacagtgtggcatctcctcagctattgactggaccttagggaaggtccgggacagttttcacctgcagcctctgaaatggatgagctcagttgccatgggagtcaatagagaattgattgctaaagaacacaagggttaagtagtgctacacaatgtgggtgg

SEQ ID NO: 139686 - DNA, 582 bp, Homo sapiens
cacagttacaaggaaggtgttattactatctttaatgtttagatgataaaattactccttagaaaggtttaattaattgtcctaaatcacccaatataaaagtgaaaactacgggtttgcatataaatcagcttgtgatgaaggcccacagttttaattagggagcaatattagtttataatattaatgaatatatttttctttttagagaaattctgacattctattcaaagaaattctggaaattattcaaatgagaagtaatctttttatgtgaagtacaaaataagtaaggctgtttggaaattttgtaaaatacattgatarctaaatgcacaactgaaatttgaaactcactcttttctcgatatcatgcgccttcctcctattgtatctctcagtcctctaatctccctcaatgtgctccagtggctcaagtctctttatgtgtcctggaaaacaccagacataacttaacactgttgatgttgaccttgatcacctggctgaggtagtgtttgtaaggtgtgtacaagattaaatttgtcttggaaacctagagaattcatgtgagaaatgccc

SEQ ID NO: 139687 - DNA, 569 bp, Homo sapiens
tgtggaaaatagggaaaaaataaacatcttaaggtaatattctgattcatatcattgttttcatactcactttattttaatactaaaaaaatactatttatattacctaaacatcctaaaccctaaatcttgctttgcaaatgttctgaattctttctccatttacacaaacgtcacttacagactaattttacttttgaacctaaagtcttttacaattttttcccttgagttggccatgcaatatttttatttatttttaggttttatttattcgagagttttttttcaaaatttaggcttagtcttgataactaatgtacattgttttcaatgtagtaagattgttctgaacatgtcatttaccaactccactcatctcagttaggttgccaaagagaacaaatgaaagttataaaaagtattaattatttatatgttatcatgttgtgagtgaaactgaactgaytgaaatacaataagtctagtataagaattttggagttagaaggaactgagttgacaactgggtctactactcattaactgtgctctgcccttgacaagtt

SEQ ID NO: 139688 - DNA, 378 bp, Homo sapiens
ttcatcatttccgtgcaggacaaatataaaaataaattcactgttacttggaaagcatgcagcataatctttattgtctcaagcgtatgtagctgtcacttgctatgccaccctaattggagaggtgcaccctgtgatgattaagaccttttctggtggggaatgtttcctcttargtatacctttttggtaagtcctaatgtctgacaatttctaccacaaaataagtggtaccttaataaagattagttcaaatgacaaattcagatctttccctttgttccctctaaacatcagcacagagacacataactcaaaaatttgaaaataaactcatctcgctaaacagagcaataattgacaagagagtcctacata

SEQ ID NO: 139689 - DNA, 554 bp, Homo sapiens
ggtaagtcctaatgtctgacaatttctaccacaaaataagtggtaccttaataaagattagttcaaatgacaaattcagatctttccctttgttccctctaaacatcagcacagagacacataactcaaaaatttgaaaataaactcatctcgctaaacagagcaataattgacaagagagtcctacatatgatcagacattttaaattttgtaatgatacatttccttctttagatctgattaagtctctttattaggccctttgtatcactataaagcaatacctgaggctgggtaatttatagagaaaagaggtttaattggctcatggttctgcagaatgtacaagaagcatggtgccaacatctgctcagcttctggtgaaggcctgaggaatctttcagtcayggtggaagacaacagaaagccagcatgttatgtggcaagagcaggagcaagggagagaaggaaatgagtcatccatttttaaacagccagatcccatgagaactcactcactgtcttaaggacaataacaagctattcatgagga

SEQ ID NO: 139690 - DNA, 650 bp, Homo sapiens
cagttggttactactggaaaacagtttgtaatgttatattaaagatgaggttccctaaaaattttaacttgttcaaattgactgtatatgaggacatgtgaaaaactctaaaggtgcctttaaattattcattcccagtctgagacataaaaggtacaaattacattgccatcamaagagcaagaatgctatcaaagacggctggagttgcaaaataaactcccttgaggaggcttccatagatcgaaggtgggaaatacatcaaaaggagtaactgcaatggattggaacatagtatgtcaaattccattagtttattaagccactaaaatattgtagattaattcccattggtacttttggaaaatgtctagaaataacttgtttgaaaaatgacaaataaaagaaaacaatcaaatatttatcttgatttttatttctaaatctaccatagataaccaaataattctcaagaaaatgtgtctctctttagaattattgtagttggtagaaaaagaagaaattatatacaaatcccattttataaactcctaataaaattcttgatttaggcaataataatagccactagtatgacgaaaacaaagacaaaaagcttatttgtacctctagatgaaaaaacacgagcc

SEQ ID NO: 139691 - DNA, 592 bp, Homo sapiens
tataaatgaataatgttttacataatgtttaaaatttgtagataaaataacacaacaaggttactatggcaaatctcaccacttttttttagagatgaagaaataaaattgaataattttttcagggtcacagaataggaaaaatcaaggcagtattttaactcaaactaggtttacttattctattcctttattctataatacttccagattcaaaactatctctaaatctcttttaattacttccaattttcagataaaatctaaagctggtaagaatatatacattaagtaggtgtaatgccaaaatctatgtctgctctttattttacctatagtgtttaatcatgttacagttgaaattcaacagatataaatattatacaacagttatctaaaatttattatgaatttagaaacaagctctaatgaggacaggggtcaatgtgatcaaatatttatttggacttataattttatctatgacagaaaaatatatacttctgcttctagaaggtggattacatgcactattgtaaccataatagkctcattggtcaatatgcatagcaagtcaacattcagagacacc

SEQ ID NO: 139692 - DNA, 540 bp, Homo sapiens
ctttcttaagagaaaagaaagcatatgaacaaagaaagactacctggttcgagagtgatcatagtagctctatttctaaaagctttctttctaaaatttctaaagtttttacttatacatatatatatagacagacatccatatatacacatatatatgtccaagtaaaagcaacaaattacagataaagtacatcaagaatagatctcaaaaactttacacttactgtataatttcacttatataaaatcctcagacaaaattaactatggttagtagaggtttggrgaaagagactaggaagagacatagaaaattcgaaactccctcaggtgacagaaatgttttttgatagtgatatatttatgtgtgtatgtagttacttaagaaatgcaatgctatatatattatttgagtttttcactcctttaaaaaggagtggtgaactgaagttctatatgagaccaacttaagatatcttatttaaaacttacctctctctccctgtcctaatttagttaacataaaattcctaaattg

SEQ ID NO: 139693 - DNA, 507 bp, Homo sapiens
tttttctatgcctagtaaaacaagtgttggtttagagtgggcagggcagggcaggaactgatttcactctgcggacaatgctggcaaacctaagacagggtcttgctctgtcatccaggctggagtgcagtggcacagtcgcggctcattgcaaccttgacctcctgggctcaagcgatctttccatctcagcctcctgagtagctgggtccacaggcatgccaccatgctcacctaatttttaattttttttttgtagacttagcttcttatagagccacctttaaaccatgtcyctcttgtttcctggagtggcaaaaatgcctaaagatggtttcttgctgaagccaggggcagggccacgtggctaaatgacctcagcagagagcagtgtactaaggctgcatgacttcacctcagaatcatggggcagagaccctgccacaaagtttctactgattcattcacaaacatgaatcacacctgacacgtttaattttattttat

SEQ ID NO: 139694 - DNA, 592 bp, Homo sapiens
tatgcttttggatttcttagactccagatcattatttgtacagacaataccaccatcaagaacagtgatggggcagatgagtggatgccccaccgttgtctcaggatgtctcttcctggtgggtgaaaccattctgcaggctgtgctttgcatacacgggcaacagcagccccttgctgactgcctccagtcctcccgacagtgatttccactgcattccccacttcagaggtgtcaaagttgggaaaagtttgtgtcttagtataaaataaagtatggtgtctgattcctcttattaccttaccctccacattcaagcaattagcaagtgcttttmattctaaatcaaaccatttattttttgtatttattagagctcctcatctctgtccattcgcactgccatccccttggtctaggtcacatggattttcatctggatggcaaaacaatccttcaagtgcctccttttctaacctccagccccctaagtccccaccttcatgtggcagcccagtttccctaaatcacttactgcggccctcaagtcactgtgtctcttgcttccccctctgctgtagatgccatattt

SEQ ID NO: 139695 - DNA, 407 bp, Homo sapiens
aaacaaaatattgtttaaccacacaatggaatattatttagcaacaaaaaggcactaactactgatacacattacagcatggatcaatctcaaaaacatgatcttgagcaatagaagccagacaccagaaaagtacatgatttcatttacatgaagcttcagaaaaagcaaaatgaatcaaaacttttatgaatcagatcactgatggcctggaatgggggttacaggattattttcaagcggtcatgggcgatttttttgaagtgacagaaatgttctccatcttgatatggggtggtggtgaagtaaattgacctatttttccaaattcacccaaccrcagacttaaagtggaaacattttattttatgtaagttatatttcagtaaagctgaaggaaagacaaa

SEQ ID NO: 139696 - DNA, 319 bp, Homo sapiens
caacaaatgtttgttaaatacatctagcattttgagagcaggggtaatttcatacatttttctctgtgatttgttatacctgacaggaatgagaaatcacttaaaggaaaactaatgttaaggttcctttgagactaattttttcatcaacaaagtagagataataacactggatggcaagatactgtgaacagggagtgtggaggaygaggggagttttatcactgttgttctgtgtcttgccttattattttagagttgctaggtgggtttttttctaagaaaaaaagacgaagtctgcaaattgccaaggcagaat

SEQ ID NO: 139697 - DNA, 467 bp, Homo sapiens
gtctgccgtctgcaagttggaggcccaggaaatcccatggtataagttccagtccaagtccaaatgcccaacaacgaggtgtgccactrtctgagggccagaggaaatggatgcctccactcaagcagacatcaggttcttcctccctctcccttttgtcgtattaaggtcctcaatggattggagggtgcccgctcacactggtgaatgggtgggcatcaacccacttctttacccagtctactgattaaaatgctaatctcttccagaaacaccctcacagacatgcccagaaatactgttttaccagctatctgggcaccccttaagcccagtcaagttgacacataaagtaaccatgtagattatttccactcctaatacaaagaaagcaaaagaccaatagcataaaatttagaaaagcaaaagtagttaaaagctttatagcttaaagcaaacatattttg

SEQ ID NO: 139698 - DNA, 512 bp, Homo sapiens
ttctatgataatgtttttcagtagtcatttctattcaactctacttttctcaagcaattactggattacagatgttcttttttcctgacatctccaatctattagtgtctctaccctagatagtcttcaggcctgccttcaatgctaagaagtacagattgtagatttgttccttaaactgtcaggatcttccttcacacgaacacaaaacctgttacacatggtctattggtttgagaacatcttcatcatagctcattcactggataacagaacaggtaaaggcataatgggtaaaggcataatgttttcctgaagttcaaactaaaaatatgaagtaatccaatttgaggctttaggaagataatggtttctctactgtatttagccaatattaatgacaaaatgtctaacgggagcttacataatttatgcacccttaaatgtcagggaacatttctgagaatatggcttgaacaatgtattgagaaaraaaacaatgtgggttgtgg

SEQ ID NO: 139699 - DNA, 545 bp, Homo sapiens
gatatatattgccaattagccttcatagatgttgaataattttacactttttttcagcactgtatgaaaggatctctctccccatattcttaccaatacagcagattgtcaaattgtaaaatttttgagtgaaaaatgatataatagggcatttgaggcattttaaaaatctattttagaattcttctaaacatgtgagatgtaactaatatagagtacatcactcagcaacttcatgtgcagccccagcttagctcctgatggttactggggagtacacatcacctgggatgtctggctcagctgatccaaccccataggctatctgcctgaaactacatgccagacttcaaacaagaccccacaggggaacaaaaaaatcacactcaattcgggccagtaaatccacagacrcactagagataattgttgctcaaagcactgagacattggtcatttaattatgcagcaatacatagccaaaacacccctagcatgattaatcaaggaaaaaaaacccactttgctagcattagaaattaaaa

SEQ ID NO: 139700 - DNA, 409 bp, Homo sapiens
cagcatggaaaaaacccacccccatgattcaattacctcccactgggtccctcccatgacacgtggggattatgggagctacaaktcaagatgagatttgagtggggacacagccaaaccatatcaatctccctttcataaatttgcatttagcaaatcataggcattaataaaatatttcagaaaatgaaggaaaaataaatttgaacccaaatagcttatgtgtgtcttttgacctctatgtagtgcctacaaaatgtggtgtgtttgtgtatgtgtgtgtgtgtttcaaatctacttactcttctgcatggttggacaaagaatattagcagaaacttgttctttgaaggaaaaggtaaaatatacaggaatacagttcttcaattttgggagttacaacctttaa

SEQ ID NO: 139701 - DNA, 604 bp, Homo sapiens
tgggtgaaaatgctttaagtacacaatttaaaaaattaagatcgctwaatgtcttagattgtcaaaaaacaaatgtttatattgagaaaagtggtttgacctcaattaatattaaaaattatgaatgtcaatactaatctgtaatgacagcctcactattccatgtctcctctgtgtgtggaggaatgggatgcagcgaggaggccaggctggagttctaaaacaatgttctaaattcgtcgtgcgatggggaactcaacttgatgcagatatcttataatgagccttgatcttggcttattaaaggggtagtagaaaatcagtcatggatagccatgtgatcttatcttctgtctgctttccctctgtgcttaaaatcttaaaatgcatctgcagaaccctcacattttaatccaaagtttttccttattttctttaagacattaaaaaacttacatatacaatgttcattgcagaaatttcagagaggtcaaaaaaattcactcatctcacccaccaattggataaaaccactattaagtttctgtgcatttcagaatgtatacttccttctcaaactatcaattcagaaacaaaactggat

SEQ ID NO: 139702 - DNA, 584 bp, Homo sapiens
aaaaattaagatcgctaaatgtcttagattgtcaaaaaacaaatgtttatattgagaaaagtggtttgacctcaattaatattaaaaattatgaatgtcaatactaatctgtaatgacagcctcactattccatgtctcctctgtgtgtggaggaatgggatgcagcgaggaggccaggctggagttctaaaacaatgttctaaattcgtcgtgcgatggggaactcaacttgatgcagatatcttataatgagccttgatcttggcttattaaaggggtagtagaaaatcagtcatggatagccatgtgatcttatcttctgtctgctttccctctgtgcttaaaatcttaaaatgcatctgcagaaccctcacattttaatccaaagtttttccttattttctttaagacattaaaaaacttacatatacaatgttcattgcagaaatttcrgagaggtcaaaaaaattcactcatctcacccaccaattggataaaaccactattaagtttctgtgcatttcagaatgtatacttccttctcaaactatcaattcagaaacaaaactggatcatatttgaa

SEQ ID NO: 139703 - DNA, 556 bp, Homo sapiens
atatttcaaggacatgcacaaaggcagagaattttggagttcactatctattttgggaaatcccaccaggcctgcatgcctagagtgaggtgcatatgggaaagcagcatgaaatcagcttgccataatatgaggcttgtactttgtcctgcaaagcacaggaacccataaaaaattacaggccatgggaaaggaaagtccaaaaattgtagaaagatcaccctaacagaatgggagaggatacattggattgaggtgagattgaacacaggaaagttaagaagctcctataatagttcaagtgagagagatctgaacaaggactgtttatggagagayctggggaatattagagtggttcatttaacaatccttggtaatctattcaatgcagaaattaaagagggaatatttctggcatgagtgattaggtgaatgctgttataattttccacagtgaggaatatgatttagtagacaggcatggtgaaaatagattagtgtattacaggaaaattccaacaagtaaaactatgagggaaaaagaagattgaaa

SEQ ID NO: 139704 - DNA, 556 bp, Homo sapiens
atatttcaaggacatgcacaaaggcagagaattttggagttcactatctattttgggaaatcccaccaggcctgcatgcctagagtgaggtgcatatgggaaagcagcatgaaatcagcttgccataatatgaggcttgtactttgtcctgcaaagcacaggaacccataaaaaattacaggccatgggaaaggaaagtccaaaaattgtagaaagatcaccctaacagaatgggagaggatacattggattgaggtgagattgaacacaggaaagttaagaagctcctataatagttcaagtgagagagatctgaacaaggactgtttatggagagacctggggaatattagagtggttcatttaacaatccttggtaatctattcaatgcagaaawtaaagagggaatatttctggcatgagtgattaggtgaatgctgttataattttccacagtgaggaatatgatttagtagacaggcatggtgaaaatagattagtgtattacaggaaaattccaacaagtaaaactatgagggaaaaagaagattgaaa

SEQ ID NO: 139705 - DNA, 567 bp, Homo sapiens
tatttgcatgcagcaaatgtgttttgaatgccattgctatgtgctagctacagcagacacagtcataattaaatgacattcaatccatgtattcaagacccttacattctaatagctcttaaatatctattaatatttttaaggagaagagaaaaggtaatttttttaatttgaaaaaagagactaaagggagagaggagaatgggggttgataaataattggttcaaggtttccttggagaaggatgaaagttctgtaattaaatagtggtgatggtttcacacttctgtgaaataaaacattgaattgtrtactttgaaggagttaatcttaccacatctatattccatttcaataaccgttattgaaacagagagagactaaagagatcccctatcttgatcttctcttcagggatggtttaagcacttccaaaccactactacaggaatttctgtttcctctgaatttcattacactgatagttgctgaagtttatgaaaatacacttgaaagagtgacggtgcactggggatttattctatagctattagggggcaatattg

SEQ ID NO: 139706 - DNA, 567 bp, Homo sapiens
tatttgcatgcagcaaatgtgttttgaatgccattgctatgtgctagctacagcagacacagtcataattaaatgacattcaatccatgtattcaagacccttacattctaatagctcttaaatatctattaatatttttaaggagaagagaaaaggtaatttttttaatttgaaaaaagagactaaagggagagaggagaatgggggttgataaataattggttcaaggtttccttggagaaggatgaaagttctgtaattaaatagtggtgatggtttcacacttctgtgaaataaaacattgaattgtatactttgaaggagttaatcttaccacatctatattccatttcaataaccgttattgaaacagagagagactaaagagatcccctatcttgatcttctcttcagggatggtttaagcacttccaaaccactactacaggaatttctgtttcctctgaatttcattacactgatagttgctgaagtttatgaaaatamacttgaaagagtgacggtgcactggggatttattctatagctattagggggcaatattg

SEQ ID NO: 139707 - DNA, 591 bp, Homo sapiens
actaaacaatgcctatgatatgttgtggggagctctaactakaaacaaccactggcccactaagaagagactcgcctaggaggtgaacttgacagagaccaccgtctacatatacagagttcttggccctctattaaaaagtttcttctctgccattggctaaaggagaaataattgaatgctcagagggagaagttaagggctgctcttggcttgatgacatacatgcccagtagtttcacatctccgctaaaataattacaaacattatgaccttggactttcagtctctgtgcctcatttgttaaatgtggtcaacaatgcctctgcctccaagggttaaactcaaaatatttatcaattagttaaggcacaggcacataccaatcagaaaagaagtgtgaccaatcagaacagtcttatatggtgaataccagcttaatgtctgccttcctttcctcatacaattgatatagcaattaagtgagatagctgtgaaagctataatcgcacattgtatcagcagagactcaaaatatttaccttattcttctacttcttcctgtttcttatccttcttcaatgcacaag

SEQ ID NO: 139708 - DNA, 573 bp, Homo sapiens
aaatactcttcctaaaatatctacttggctcatttcaactccttcagttctaaaactgtacctcataattctgtcctttggctaagataatcctttaattatcctattcaaagctctttattaactccttctttgacatcaggatacaggtaaacattttagcaatacacactagagattccccagtcagtcataagcatcactgtagactcaycagctaccccactgtgacttttgctgcaacttgtttctcttcttcctgtgatgattttcccatgaagactcttacagagtcttctaggttataattacagtgcctaaattcaaagccacataatgtctgttggatacagacattgcatccactttacatctactgttagacattttgatctgaaaaacaaaaatgaacaaaaaattgtccctgttctgatcatgcatatggcttaccatatacgctgttgttctccatcacagcatttcaagccgtgttccactgcctgatgttttgctccaggattttttaaggacattttttaataacaattttgttccccttattactcattagta

SEQ ID NO: 139709 - DNA, 584 bp, Homo sapiens
taaaatctaggaaggattttctgaccttcacttgaaacagtaagacccttagaggtacctgttctacatctgtaggaaaggagcatcctcatctctgaagatatagggaaacagaataatcaaaacaaatggggcttcctaagatttccccatttattaccattaaatcatatcccctttgtccaaacctattgctgcatttgcctcattatactgtccttctttttgaaatccaggaaaagccaaccagcattaacatcaacacagaacttaagtctgataagaaatatgtacaattgattatctctgaagcctgctacctggaggcttcatctgcgtgataaaactccaacaacccattatcatcataacccagacattcctttctactgtctccaggtcttcaaataataacttaactttttcaaccaattgycaatgagaaaatatttgaaatctacctatgaacaggaagccccttcacttcaagttgtcttgctttccatatgtaaccaatgtacatcttacaggtattgatgtattctgtctccctaaaaagtataaaagcaagcttgccgggtgca

SEQ ID NO: 139710 - DNA, 352 bp, Homo sapiens
gttctataatctagttaacagtattgtatcaatgctaattgycatagttacataaaatgacaacactgagggaagctgggtgatagacaggcacaccctatgtattgtttttgcaacttttgtaagcctataattatttcaaaataaaatgttaaaaacaagcaaagagaaaaaaaaatgccataattcattaacaggatccaaagacctccctaaactgccaaagaagtacatggaacagaaaagattaagaaaccctggcctaatccttcttggtaaccacaagcagaggtgaggctcaatcacaggcctgggtatcttccagaaaactacttcgagttgacaagattca

SEQ ID NO: 139711 - DNA, 567 bp, Homo sapiens
gaggaggaggagagagctcacagtacaaaaaaacagctggggaaggaatgattgggcttcgttctctttccatcatcacaaatatcttaccactctagagctggagcctgggagaatggaggacaaggcagaccttatttaactcatggtgtccccagttggtgttcagtaggtctgacagctgtctaaagtatactctttccttcattaatacttttatgtgctcccaaaagattgctcaatcactgatgatcttttagcctctagtccctaatcccaagcaaaagaatttctattatgagtagtcaattactcctccccctcaacccacatatactagacatgagaaagtgaactctgtttgctcctgcaggtagccctttacctaaaccctaatgtagtactcctagatttaktctaattcctgatctacatgtgggccagagaaaacactcaagcattcaagcattctttgacacaacaaaagcagcttcttttttagctctagctattaaactagctatccagccatttttctgctttcagaatttttaaagtggaagccaa

SEQ ID NO: 139712 - DNA, 209 bp, Homo sapiens
aatatatgactggttaaatcacttaacctctctgagatgtggttttctcatcagtaaaacaagcttaacaatttttcctctttcatcctccaaggattaaattaggtaagcrtatgtgaaagcacccacaaagagttgattgccagtgactatactctacaaaatacggggtgatgccatcctcattattattctcatttttctggttg

SEQ ID NO: 139713 - DNA, 528 bp, Homo sapiens
tggggcaagaaagactaaaccacctgacttatttttgtcacaactcaaaggaaagatgggaakatgggtgagaaggactgatattccccaggcagaactttacaagaacagaaggaaatgttttcttcagatgataatccaaggatgtggtgagcccagacatgagggtagttgagaaagcatgccagagactgtgctgaatgcatttggattgcacaggtttgccagatcccaaagctaattaggactaggcagaaagaggctcagcactccacagcctggctagttcccttaaggtaatgcttttttgaagtctgagaatatcccattgtttatttaagctttagccctcagccttttccaaaaggatttgaaggggcttaaacattaatcaaaatgcaaactaagattattagtaataagccaaaatcaagtctatccaaataaataaataaaagaataaatgttgccagaggtggaagataagctgattgtttctctgggtaatgggtttggcaccagtgtgag

SEQ ID NO: 139714 - DNA, 596 bp, Homo sapiens
aatgatatacatgaaggactaggctctgaaatgcctcagggaggctgtagaagtcagtcaatgccacagtaccgctgtgcagccatccccacccccactcctcagctcggtggctgaaaaacacagaattaatttgtgctcacacatctttgggccagctagagtttcattaaactgatctgggttccactaaacttaaactttgggccacggattgaggtcagagtctcttgttctgtaacgagtaggcaactcaggaacttttctatcatggctatgggaaaagtgcaagaagacaagtccaatcctgcatgcacatttcaaatcacatttcaattgtactaacatcccactatctaaaacaagttccatggccaaatcaaaggtcagcagccagggaaacattttctgtctattctgagcccatggcaagaacktggatggatgatactacaagggagtgaaaaattgggaacaataattctatgccaaagaataatgccaaataataccactaatgccaaagaggcattcctgaattggtaggttatgcagcctatgtggagaaagcaaattctctggttaggaaagcccca

SEQ ID NO: 139715 - DNA, 606 bp, Homo sapiens
tgattttctttcatttcatgaaaggacttacgctcctcaaggttaagtgactagatcaaggtcacacagttagagtcagagccagaaaaaaaaatccaaatggtcaatgtagatcayggaaatgtccttgtttgcagtctcttattcagttcaatgctaggattcatgcccacttttagaatcttgttggaacttgactcaaaaggactgagttcagaagccaggcactcctccaacttcgctcacatattgatcaaagacatttcccttccactattctttgcaaatatgacatgctttccacatcaaaacaaaacagtggccttatcagaatcaagaaatgaaaatatcaaaacagtttgagattattcccattttaatgtaaagaatattgcctggcaaatttttggtttgggttttcactaaaattggtagtatcgagtgaattggtgcaaatcaaatgatgtttgtgtggagtatggaaagttattagaaccatagcgaatactcctgcatacttgtgtaattttggaaatgccactaagtgccagtttccttgtaagtaaaatcaggggaaaaatcatcatcctcacttaactcataata

SEQ ID NO: 139716 - DNA, 562 bp, Homo sapiens
ttacatggctggtccatagggactttggttctatctacctcttttaagatggcagactaagcaccaaagtacttccctctccatttttccaaaatctcaaatgcaaattaaaggtacaataagatacttctaaaactatttgatccaacagccttttagaatatcaatttttaaaaaagtttaaagcaatatttatgagcatatattatttttattacacaaatttaagtctgtctgactcaattatctctattctttcttctaaacsatgttatctcattatctctttgattatggtctcccctgtgtctctctataattcttacaaatgaaccagttgagcttaacagtaaaccaattatagtatgactttctccattttaatcaaagaagggaaacctgcctgattattcggggattttgataacttaagtattccttcaggtctttgtgtatacttgaggcaataatgtagttttctcctaagttaactgcactgtctttgaactcttggactcatgtatgcttaaattagggttgtcagatttagaaaattaaaatt

SEQ ID NO: 139717 - DNA, 645 bp, Homo sapiens
ggattcaacatttatctttaatgtaaccctgaatagcagccagctgatttataatggtacatttttacatcttcaatacatagtaaggaagaaacatgaactgaaacctttagaacagttgtaaacagcatggaatcatatagatgtttttcctctggaaaaatcaatcaaatattagttcataagaatattttgattcaactaattaatcaattattaatacttagaagtaaattgtaactatacattgttggttggattttgatgtataaacataaattgagtctccttgtgactctataatacatgcaatgtattatatgtatgagatggctaacctttacaaacatgattgtttttactcttggtattattagacatatttccagggaaatgcaaaccacagaagtaacttacagaaagggatttctatgtaatattatctatgctccctttagtggaggaaggartttagcatgggaagtagatccaagagagcatctgctttcaacagaatcttgcacataaactctgattcccatgggtttagggaacatgctcagcatgtggagcaatgttttctgttactttcattttcaaatttcctattgcaagcctcttcttcagagatgtgtttctgtttta

SEQ ID NO: 139718 - DNA, 645 bp, Homo sapiens
ggattcaacatttatctttaatgtaaccctgaatagcagccagctgatttataatggtacatttttacatcttcaatacatagtaaggaagaaacatgaactgaaacctttagaacagttgtaaacagcatggaatcatatagatgtttttcctctggaaaaatcaatcaaatattagttcataagaatattttgattcaactaattaatcaattattaatacttagaagtaaattgtaactatacattgttggttggattttgatgtataaacataaattgagtctccttgtgactctataatacatgcaatgtattatatgtatgagatggctaacctttacaaacatgattgtttttactcttggtattattagacatatttccagggaaatgcaaaccacagaagtaacttacagaaagggatttctatgtaatattatctatgctccctttagtggaggaaggagtttarcatgggaagtagatccaagagagcatctgctttcaacagaatcttgcacataaactctgattcccatgggtttagggaacatgctcagcatgtggagcaatgttttctgttactttcattttcaaatttcctattgcaagcctcttcttcagagatgtgtttctgtttta

SEQ ID NO: 139719 - DNA, 571 bp, Homo sapiens
aaaatgcattgttacaatgcagaacaaagtacatgtatttctatacctatcttatactgataacagttttccttggcactgtgggagaatacaaaagtagtaacacagacttatggataccacaagcacacggtctaacagaaagcaggggtgaaaaagtctagtgaactaggctgaacaaggatgaacacaataaataggataataatacatcacctgtgtagtacagactgcaagttgcatggacatttggaactgaggacaaaagtacaacatattaggacaaacttaacatgggaaaatcaggaagttggtattaggctcaaatatggcaatacccacaagagcactttatacacagtgrggtaagattcaaatctgacacagaaagagcttcttgtctgctaggacattaggaattagaaggccttcaacagagccctatctttgctccttcttcactcattcagtgcatgtcattatatgtaatttatttttttctgaggacccattctcccttctacaaaatcgtcacatttctattactaattaaaactcactgaaaaatcaa

SEQ ID NO: 139720 - DNA, 506 bp, Homo sapiens
tctatggcttgccttgggagagaaaggggagtaggaggacaaagagtgggagcaggtcagacagttcttgcctctgaggtccttttggtttccttcagttcaaggggcgcagcatgccaaggcacaatactgtggggtatccttttttgagccctaaaatattcaagtgaacacaggagtggtaaatgtactggaaccatctaatgaagggagatctagtcggattgcgtgggagaagccttcagccaatgtattagtctgttttcacactgctgataaggacagatctgtgactgggcaatttacasaaggaagaggtttattgacttacagttccacgtggctagaaggacctcacaatcatggtggaagatgaaaggcatgccttacatgacagcagacaagagaagagagcttgtgcagggagactcccctttttaaaatcatcatatctcatgagacttattcactatcatgaggatagcacaggaaagacctgcctccat

SEQ ID NO: 139721 - DNA, 524 bp, Homo sapiens
aaggagcttcatattatctcactttaataagttctaagacttgaattactgcagcgcatgtacttaatctgcttgagaaatggaagagccatttataaggaacatttgggattcaaacacgtttcctttggagtctcaggtttttaaggagtggtccagaaaaagtggcatttgttctgatatctctgagaggtaacttggacccttttttctggggtgagaagtggacagaagtggccacctgcttccagaagtattttttactggattggcatcttcagacggtgatggtgaattcagtcctgrctcgtacttttcagtatcctcgtacttttagtgaccagaacctggagctggaacacctgtcctcactgcttctttgtgcatttaggaaagtgttcagagaatatggtgcatttgtgcagtaaatataaattttaagatacttttacattattctccccagaaagtatctgttgggtctagataggaatccatagttcaattcctaaagctgctgttta

SEQ ID NO: 139722 - DNA, 569 bp, Homo sapiens
gcatcaactttccatcaccctctctctagctctgctctcacattcagactttgaggcttctctgcagcctctcctcatcccatgccctgccacctactagccatgtgacaaagttacttctctctgtgttttcccttgtgtttcccccatygtcatcttccctctgcttgaaatatccaggcatggatatgtacctgcacaggtaacttctatcacctcttcagagcccagctcaaagcagcctccactgagaggcctttcttacccactcttccccatctgggctgaggctatcactccccatgtgtgcacccacagcactgtgttcacaggaccagaagagtgcctgctgccttgtgttggagcaggtcatgtctgtctcactttctgaactggtagcacctcagctagtcttttttagttttgtatctatacacagaagagtgttcagaacccttgaagatcgtcagagaaggttacactgaataaatgaatgagtgagtttctcatttctaaagtctggaagatacaaggtctctatcacccaccgttttagagcagacactttt

SEQ ID NO: 139723 - DNA, 569 bp, Homo sapiens
gcatcaactttccatcaccctctctctagctctgctctcacattcagactttgaggcttctctgcagcctctcctcatcccatgccctgccacctactagccatgtgacaaagttacttctctctgtgttttcccttgtgtttcccccatcgtcatcttccctctgcttgaaatatccaggcatggatatgtacctgcacaggtaacttctatcacctcttcagagcccagctcaaagcagcctccactgagaggcctttcttacccactcttccccatctgggctgaggctaycactccccatgtgtgcacccacagcactgtgttcacaggaccagaagagtgcctgctgccttgtgttggagcaggtcatgtctgtctcactttctgaactggtagcacctcagctagtcttttttagttttgtatctatacacagaagagtgttcagaacccttgaagatcgtcagagaaggttacactgaataaatgaatgagtgagtttctcatttctaaagtctggaagatacaaggtctctatcacccaccgttttagagcagacactttt

SEQ ID NO: 139724 - DNA, 549 bp, Homo sapiens
agaaacagttgtcacataaatatggaaattacaaaaaacatttagtttcaatactccatgtaaactattagctgwtgtgtgaacatgctgctgattaaattacaaaaaataactctaagcacagtgcccagtatcactatatttttacctagaatttattttgaaagttgctgtaaagcagaaatcatgaacaggcagccagtaggctagaaagtccatgatgaatattgtttggcccagggagtattataaaaaacagtaatcttcaaataaaacaaagagttccaacttctcttgaaaaattaaaagttctggcagcaatggttccttgcctcaggtggtaaagagactgtcaactctagcaggctccagctgtctagttccagaagcccaccctttcctaccaccttcactccctaccccattgttaagtgccttgatgagcgacgccacagtcatgtgaatttgtaattctgctctagagtattttcttttactttttctttttttgagatggagtttctctcttgttgcccaacctggagtgca

SEQ ID NO: 139725 - DNA, 527 bp, Homo sapiens
gtgcatcctacatattcttaatattatatattggaagtaatggcaaaaaccacaattacttttcacyaacctaataccattagcagtcacattctggctacaaaatgttctccacacatttcttagtagacatacatctcagaaagggattctcttgttttagaaatgcttcagaaatggtcacatgccaatagcatgtaatatcattgaaatatgctttttgaagaaggttttccagtgccaaagatgctattgctttgcatggaaatgtttcaggtacgggtaaaataagtaagccaaaactgtcttagaatcttaccatataaagataactaataattcaccttgaaatatttcagttttttattcaaattgtacacatacacaccacagatatatgtatatagaactgggatcaaactacctatacagttttgtatcctgctttttttacttgaaatccagtgagaatattactttgtcattaaaatttctttgaaaatgtggtttttaaatggctatatagt

SEQ ID NO: 139726 - DNA, 472 bp, Homo sapiens
tgtgcataagtaccatattttctttatttactcatctgttgttagacacttaggttgcttccaaatcttggctattgtgaacagtgctgcagtaaatggaggagtgcagatatctctttgatatactgacttcctttcttttgggtatatccccagatttttggaatgctggattaaatattatctctctttttagttctttgaggaacctccaaattgttctccatagcagttgaactaacttacattcccaccaacagtgtagaaggactcccttttctctacattgttgccagcatttgttgttgcctgtcatgagataagccattttaactgggaagagatgatacatcattgtagttttattttgcatttctctcawgatcagtgatattgagcatattttcatatgcctctttgccattcgtatctcttcttttgagaaaactctgttgagaaatgtctattcaaa

SEQ ID NO: 139727 - DNA, 549 bp, Homo sapiens
ccaccaacagtgtagaaggactcccttttctctacattgttgccagcatttgttgttgcctgtcatgagataagccattttaactgggaagagatgatacatcattgtagttttattttgcatttctctcaagatcagtgatattgagcatattttcatatgcctctttgccattcgtatctcttcttttgagaaaactctgttgagaaatgtctattcaaatcttttgccaattttaaaatcagattactagttttttttttctacaaagttgtttgagctygtttttataccctggttattaatctcttgtcagatggatagtttgcaaatattttctcccattctgtgagttgtctcttcactttgttgcttgtttcctttgcagtgcagaagatttttaacttgatataatctcatttgtccactttgcctgtgcctgtgggttattactgaagaaacttttgcccagaccaatgtcatggagaatttctgcaatgttttcttatagtggtttcatagtttcaggtcttagagttaagtgtttaa

SEQ ID NO: 139728 - DNA, 443 bp, Homo sapiens
caaaacacacactgactagagcacatccatagggagaaggagaaagaaactgaggagattacattcagcaagcgattttgcctgtctgttctttgtaatatgtgtggacgattatcatgcaatataattgtgaatcctgttactttcatggagagaaagtacatttgtgtgtgtgtgtgtktttgtgtgtgtgtgtgattttacttttcattcttggctaccagtaaagcatattttgggggaacatgaggaaacactcataggcaccataaatgtttccacagggagatttttgtttgaacaggtttcatttagcaaataaaaataattctggtaaactattctatacatttcatttccattagaatttaagtttaaaattgagtccctataatctgattattcttagagtggaaagcatgattaaagataatttccttttg

SEQ ID NO: 139729 - DNA, 603 bp, Homo sapiens
tgtggaaagcagtgtgacaactcctcaaagagctaaaaacagaactaccactcaacccagcaatcccattactgggtatatacccaaaggaatataaatcattctaccmcaaagacacatgcatgcaaaagttcatttcagcagtattcacaatagtaaatacatggaatcaaactaaatacctatcaatagtagactggataaagaaaatgtggtacatatacagtgtggaatactatgcacccataaaaaagaatgagatcttgttcttttcaataacatggatggagctggaggtcatcattcttagcaaactaatgcaggatcagaaaaaccaaataccacatgctctcacttataagtgggagctaaatgatgagaacgcatggacacaaagatgggaacagcacacactggggcctatctgagggtggagggtagaaggagggaaaggaacagaaaaaacaactattgggtgttaggcttagtatctgggtgacaaaataatcggtacaataaaccactgtggcatgagtttacccatataacaaacttgcacatgtacccctgaatataaaagtcagaaaaaaaaattatgaaaaa

SEQ ID NO: 139730 - DNA, 617 bp, Homo sapiens
ggaaaaattatttagaagaaaatcttcaacatactagtcagtatagtagatgataaaataaaccattactttcagattatttacaatatttatttaatatcaaaactgcyggtggtcattataataaatatcatctacttttatagttgccttctattttgttccaatgtttggggctttagatactaaaaagacttttagtgaacctgtgagaatttacttaaagctgttagtgtatgtgcgtgtttctttccattgcaggttatgagaacatatttaaagtatcccattacttttcttgtttaataagaaccagtattattttgtgggcataatttagaaactctattacagacatgtttgctgggagttgaaaatgttaattaaagttcttaaatatctggttgttattttattaaatgtaaaagtgtcaatgtcatagactgtatgtttcttataagaaacataaagaacagaaccattacccatatagtctacttttaatgaaatgatattaattgattctttgtatataataaacatttaatattaatgcaaacttaactcatggtaccaaactaagtggttgtagaaaaatgctggctttatttgaaaga

SEQ ID NO: 139731 - DNA, 459 bp, Homo sapiens
taggtcaatggaaatgtttctcctaattattatttttaactttgtatcaaataaaaacattcataaagttcttcttgacaraatttcacagtaaaacataaatttattttatatatatatggctttgcattgtattaatatggagttctttagataatattttaagcattgatgatcatcaaaggaatataatatagatccacagaatatcgttgactttgtaatccgtaaagaaagctggaataggatgaatgtcgtgagaaattcattcattcattttgacaactatttatttggtacccaaaatttacaaaatacaatttgttggagtttacatgttaaaccatggtctctgcacagaagggacagaagcaaagagagacaaagagagagggagacagggagagagaacctgatcagacttgtctgggtgttgcaagttgttattgtgtgaaatgg

SEQ ID NO: 139732 - DNA, 459 bp, Homo sapiens
taggtcaatggaaatgtttctcctaattattatttttaactttgtatcaaataaaaacattcataaagttcttcttgacagaatttcacagtaaaacataaatttattttatatatatatggctttgcattgtattaatatggagttctttagataatattttaagcattgatgatcatcaaaggaatataatatagatccacagaatatcgttgaytttgtaatccgtaaagaaagctggaataggatgaatgtcgtgagaaattcattcattcattttgacaactatttatttggtacccaaaatttacaaaatacaatttgttggagtttacatgttaaaccatggtctctgcacagaagggacagaagcaaagagagacaaagagagagggagacagggagagagaacctgatcagacttgtctgggtgttgcaagttgttattgtgtgaaatgg

SEQ ID NO: 139733 - DNA, 606 bp, Homo sapiens
actcctggttaaggactacgtcaaccaaaagacttgtccatcttctatttccaagtcctgatcagagggcagggttgggcaggctgtctgagaggtagcactctatttctagaaccaaaacatgaaaaatcaactcattgacacattaattgttttaaaactccaaggaatatttacctaatgtctactatattctaaacaatcaacatattgggccttaaaaacatagatattaatataaaagaccttgtctttgaagaagtagaaatcctcaaatgggagacttacccataatcaccctgttgtaatacaatgtgattggactattataagaatatgtcaaagcasaagggatggtacaggatttctgcacaaaattgcccgagaaagatttacctaataaagtaaaatttgaactggatctttaaaaaatgagcagaagttttctaggttgattggagttggcagagaggcatttattactggcagaggacattgcatttgacaagccacagagtaatttaaaaaatggaaattttggaaaactgaaatgctacttactacaggggtaaaatagcgagcagccagagatgtgggtgaagatga

SEQ ID NO: 139734 - DNA, 606 bp, Homo sapiens
actcctggttaaggactacgtcaaccaaaagacttgtccatcttctatttccaagtcctgatcagagggcagggttgggcaggctgtctgagaggtagcactctatttctagaaccaaaacatgaaaaatcaactcattgacacattaattgttttaaaactccaaggaatatttacctaatgtctactatattctaaacaatcaacatattgggccttaaaaacatagatattaatataaaagaccttgtctttgaagaagtagaaatcctcaaatgggagacttacccataatcaccctgttgtaatacaatgtgattggactattataagaatatgtcaaagcacaagggatggtacaggatttctgcacaaaattgcccragaaagatttacctaataaagtaaaatttgaactggatctttaaaaaatgagcagaagttttctaggttgattggagttggcagagaggcatttattactggcagaggacattgcatttgacaagccacagagtaatttaaaaaatggaaattttggaaaactgaaatgctacttactacaggggtaaaatagcgagcagccagagatgtgggtgaagatga

SEQ ID NO: 139735 - DNA, 566 bp, Homo sapiens
aaatgagggaatgaaaagttttatgctctgaaagagtttggactttctcctgtgggtaataacgaactatgaaaatactttaagcaggcgtaaaacaagccaaagatcagccttgtttcctttttggcaatgatagttttctatttttatattgagacctttggttctattaaaaaaaaaaacaaaacttttgtttcttaaaaaggcttattattaattaaaatagaaccaaattttatttgcttaaataaaaataggaaggaaaagtgtagattcaaaggaaggctaaccacataatgaatgaattataatgaatgaattgggagtggggtcaatggaggcagtcttgttcctataaatgtttacttctraacacatgttcagggggaagaagtcaaaatcttttactatgaattaagataaaataggcagctatttaaatagctcagaaaccagtgaacatttttgaagtcgtatttctaaaaataatatgcagtagtactgctctatttagaattattttatcaatggtgcattacgttaagagattagttcagatttttaaa

SEQ ID NO: 139736 - DNA, 573 bp, Homo sapiens
agcaacatcttgatctaattgacaataatggaatagttcgaccagcaacagcagaatttacatcacatcaagttcgcatgaaacacactttaacaaatttaaaataatataaatcatacaacatatgttccttaatcacagtggaattaaactagaaattagtatcagaaagataactggaaaattctaacatatttggagattaaatacatgggttgattttcaagacatttaaaaagtctttgatctagattaaaatgaaaataaaactgtgtgggatgaagcaaaagcagtgcttggaaggcaacttaaaatattaaatgcatacrcttaaaaaaatgaaaggtctcatgtctatgatctaagctttcacctcagaaaactagagatagaagaccaggttaagtttaaagccagcagaaaaaataataattatagcagaaatcaaagaaatttaaaaataaaaataatagagaaaaatagcaagcctaagtccttgttatttgaaaatattaataaagtttataaacctttagccaaggtaacagaaaaaaatagaaaaacacaaactac

SEQ ID NO: 139737 - DNA, 541 bp, Homo sapiens
aatacaactatgcacataaatttgtataaaattcacaaagatttttgtgaaataagccagaggcaaaaaacatgcatatcttataattccagtaatataatatcaaggacaagcaaaatctgtgatttcaggtaagaatgtggttgtcattggagttaattgcctaaaaggatcatgggtcagggccagattgtgatttactgtgattctatgtyctgatgtttgagaatttttccaaattcttgttatgctttcaataaaaaaagttacaaagataaagaactaaaaactaaaagtacattgtaagtgaccaaaactatttgtctcattcttttaaatgttacactagagaggcaaatgtgattacattggtaagtagcagctatataaattactgacagattccttggtaatattatagtcaactaattgcaaacctaatataaagtttattttttaaaatgctgacaagagagaaatgtgattatggagtaactagtaaatagctggagcttatggggaggctgaaaggcatgaatgt

SEQ ID NO: 139738 - DNA, 541 bp, Homo sapiens
aatacaactatgcacataaatttgtataaaattcacaaagatttttgtgaaataagccagaggcaaaaaacatgcatatcttataattccagtaatataatatcaaggacaagcaaaatctgtgatttcaggtaagaatgtggttgtcattggagttaattgcctaaaaggatcatgggtcagggccagattgtgatttactgtgattctatgttctgrtgtttgagaatttttccaaattcttgttatgctttcaataaaaaaagttacaaagataaagaactaaaaactaaaagtacattgtaagtgaccaaaactatttgtctcattcttttaaatgttacactagagaggcaaatgtgattacattggtaagtagcagctatataaattactgacagattccttggtaatattatagtcaactaattgcaaacctaatataaagtttattttttaaaatgctgacaagagagaaatgtgattatggagtaactagtaaatagctggagcttatggggaggctgaaaggcatgaatgt

SEQ ID NO: 139739 - DNA, 541 bp, Homo sapiens
aatacaactatgcacataaatttgtataaaattcacaaagatttttgtgaaataagccagaggcaaaaaacatgcatatcttataattccagtaatataatatcaaggacaagcaaaatctgtgatttcaggtaagaatgtggttgtcattggagttaattgcctaaaaggatcatgggtcagggccagattgtgatttactgtgattctatgttctgatgtttgagaatttttccaaattcttgttatgctttcaataaaaaaagttacaaagataaagaactaaaaactaaaagtacattgtaagtgaccaaaactatttgtctcattcttttaaatgttacactagagaggcaaatgtgattacattggtaagtagcagctatataaattactgacagattccttggtaatattatagtcaactaattgcaaacctaatataaagtttwttttttaaaatgctgacaagagagaaatgtgattatggagtaactagtaaatagctggagcttatggggaggctgaaaggcatgaatgt

SEQ ID NO: 139740 - DNA, 541 bp, Homo sapiens
aatacaactatgcacataaatttgtataaaattcacaaagatttttgtgaaataagccagaggcaaaaaacatgcatatcttataattccagtaatataatatcaaggacaagcaaaatctgtgatttcaggtaagaatgtggttgtcattggagttaattgcctaaaaggatcatgggtcagggccagattgtgatttactgtgattctatgttctgatgtttgagaatttttccaaattcttgttatgctttcaataaaaaaagttacaaagataaagaactaaaaactaaaagtacattgtaagtgaccaaaactatttgtctcattcttttaaatgttacactagagaggcaaatgtgattacattggtaagtagcagctatataaattactgacagattccttggtaatattatagtcaactaattgcaaacctaatataaagtttattttttaaaatgctgacaagagagaaatgkgattatggagtaactagtaaatagctggagcttatggggaggctgaaaggcatgaatgt

SEQ ID NO: 139741 - DNA, 661 bp, Homo sapiens
taaagataaaatgatcaattcacctaaaagacacaacaatctcaaatggggatatgtctaacaaagggttttataaatggaaaaatctgacagaagagaaagaaaaaacatacaaattcacaatagagaacttcaacatttatctgtaaatgataaatggatagaaaaccaacaagaatttagaacaacattatcaaccaactggatctaatggatatttatagaacattctacccaaacacatgaatgtcattttttcaagtatatgtggaacattcaccaaaacagacatatcctaaaggaaactttaacaaatttgagtgattcaaatcaatgtaatatattatttatgtasatagtgtaattaaactagaaattaatagagaggggaaatatccaaattcttaggtattaaataacgcatttctaaataatctcataaatccaaaataaaactacaaatacatagaaagatactcaatattgtacagttgttctcgccattattataaggcaaatctattaatgaaacaatcaatccatccatcggaacaaacattaatgtcattctactaagaaagtaagatgtaaaactgtttttattccctgatgacatcattctgtagaatatcctaacaaatctgcatttaaaactactaga

SEQ ID NO: 139742 - DNA, 661 bp, Homo sapiens
taaagataaaatgatcaattcacctaaaagacacaacaatctcaaatggggatatgtctaacaaagggttttataaatggaaaaatctgacagaagagaaagaaaaaacatacaaattcacaatagagaacttcaacatttatctgtaaatgataaatggatagaaaaccaacaagaatttagaacaacattatcaaccaactggatctaatggatatttatagaacattctacccaaacacatgaatgtcattttttcaagtatatgtggaacattcaccaaaacagacatatcctaaaggaaactttaacaaatttgagtgattcaaatcaatgtaatatattatttatgtagatagtgtaattaaactagaaattaatagagaggggaaatatccaaattcttaggtattaaataacrcatttctaaataatctcataaatccaaaataaaactacaaatacatagaaagatactcaatattgtacagttgttctcgccattattataaggcaaatctattaatgaaacaatcaatccatccatcggaacaaacattaatgtcattctactaagaaagtaagatgtaaaactgtttttattccctgatgacatcattctgtagaatatcctaacaaatctgcatttaaaactactaga

SEQ ID NO: 139743 - DNA, 288 bp, Homo sapiens
cagggttgctggtgttcatgcacaagttcacaccagtgactgtgacatggccaggtgccctmacatcagcaggcgaggagcagcagggtgtgcttggctggcagcagtgacacacacagtagagtacctgtgctggaagaggaggggaggtgaagtctgcccatgggaatgctggcaaagcagtgggcaggggaggtggctgtgggcaagtgcataccagcaaagcaatgtaggggaggctgcagtaggggaagagtgctggtgggctggtgcatgacggcagaggcc

SEQ ID NO: 139744 - DNA, 288 bp, Homo sapiens
cagggttgctggtgttcatgcacaagttcacaccagtgactgtgacatggccaggtgccctcacatcagcaggcgrggagcagcagggtgtgcttggctggcagcagtgacacacacagtagagtacctgtgctggaagaggaggggaggtgaagtctgcccatgggaatgctggcaaagcagtgggcaggggaggtggctgtgggcaagtgcataccagcaaagcaatgtaggggaggctgcagtaggggaagagtgctggtgggctggtgcatgacggcagaggcc

SEQ ID NO: 139745 - DNA, 530 bp, Homo sapiens
actttaattcccacagtatttagcaagcattgaacttaatcagcattataaaacagtctatgtaaatgtcttagacactgagaaaggaagtatgaaaattttatttaaagtagagagaatcaatttagttgaatacagtttgaaaaaaactggactttattcaaataaatttctctcaaactaaaataaaagcaccctttttcttatgaactattatgtataattctttgattctggtatctattgtgagactatttttaacataagaaaactgagaamacaatatcatttgaatctatttagtttaacaaaaagctatagaaattctagaagaaaaaagctattcagatacaaattagtttgtaagaaaacatcaaaagaaggacaattaattctttcttttagaaacttttcctttaagtttatgtataataattattaaattaaactccttttaaaaaggaattataaagaaagtcttttagctttttattctaaaaacagcatatgtaaatgagtcaatccatctt

SEQ ID NO: 139746 - DNA, 470 bp, Homo sapiens
gctctcattctctcttgtctgccaccatgtaagacatgcctttcaccttccaccatggttgtgagtcctcccgagccacgtggaactgtgagtccattaagcctctttttctttataaattacccagtctcaggtatgttgttatcagcagtgtgaaaatgaaccaatacagattattgyggtcatagaaaacagtttattaagaaaaatggagtgatatatgagagggtaaaaatgcaattacttcctggccatctttcagttctttatttataagaaaattctctggtggttcattaacttagacttgatgagccattttatcctttgtctgttataatatagaatcacatgtttgatatgatgcagaagctacagaataagagtagattgatttaggtagtgggaaaggagctaaattgaaaatgaatgaatggagacataacaatagaaaaaaatatagtgagtaa

SEQ ID NO: 139747 - DNA, 545 bp, Homo sapiens
aaaaaacaacaacaagtctactttatttaaagatatagctgaaatgtaaaagatggaaaataaaaactaacagatacaaacactaaacataagaaaagagaagtgcttatatcaatattaaagaggtaaacttcagaacaaagaatatcaatgaagataaatagaaagtttgtaatgatagatgagttgcctcatcaataagagttttaaaagctagacgttcaggcacaccataacagctacaaaactcatgtcacacaaccagctagaactgagaagagaaatagtgaacctaaaattagagctggtatsaacaatgctttcttagtaactgatacaatgcatgaaaataaaataaatagatatatatgccttgaaaagcactattaaccaatttgacttaattgatacctctagaccattccatcaccaacggcagaataaattttattgtcaaatgaaactagagtagtaaagataggccattttagatcgagtgtggttggtcatgcctgtaacctcagcactctgggaggccaaggcac

SEQ ID NO: 139748 - DNA, 333 bp, Homo sapiens
gagttgatgtgcccaaggtcctctctttaatcagctgtggtacttcccgccctgaactcwaattatccctgcaacaggagtaatcaaggcagaataaaatccaggttattctctttggcccagtttatctctctacagccacggggaaggctgctgaatcatgtctccaaataaaaaggtaattatttcctgatttctctggagcagatgcaatgagagcaaggttgcttctactgggagtccctactgtgttgccaaacagcagcagttatcttagaagacagaagcaattacttgcaagatgttcttgtctttttaggtagggctgagtgc

SEQ ID NO: 139749 - DNA, 573 bp, Homo sapiens
aatgttgaaacagcaccaaaaatagaaccagagaagagggatggaagggaggaagaaaggaaaggggcaaagaagaagggaaaagaaagaggagagaggagaggagaggagaaaggaaatggggaagagagagaaagagggggcacgggtgagggagaaggaggagaagaaacagaaatagaggaaaaagaaaagaattaatcaataataataagaagaaaaaaaacaagtgatatggttggctgtgtccctacccaaataccatcttgaaatttagctcccataattyccatgtgttgtgggaggaagccggtgggaggcgattgaatcagggggcgagtctttcccgtggtgttctcatgatagtgaataagtctcatgagatgtgatgattttataaaggggcactaactctcttgcctgccgccaggtaagacgggactttgctcctcttttgctttccaccgagattgtgaggcttccccagccatgtggaactctgaatcacttaagcctctttcctttataaattacccaatctcaggtatgacagtgtgagaacagactaataca

SEQ ID NO: 139750 - DNA, 622 bp, Homo sapiens
ctcttttgaaaatgtttttttacatgtagaggagtttcttattttctcaccaattctagatggcaataattactaaaccactaggcagaagctactggaaatgttatacagtagtaattacacagatatccttaaatttacttatctataaccaatttctattactctattatgaattactttctcasaccaccaaaatcattccacatatatttcactcagcaatggcttttcaacaatgattagcccatatgcgccgtgcttggtttagcattcctttccatttctgttcttcatatcttggcaactaaccttaactccttgacatgtgcaatttacaatcagaactacctcaaataagctgtttcatttaacattaatgaagaatgatgaaattcaagaagtataaaaacatctcaagactcattctttctgttttcagaaaactatcaaaataccagcatgtagtgtgattataatttttctactgccataattgaaattaactcccaaacaataacaatctccagacagaaacatcagggctaaaagaaatcctaacattgatacgtaatgttttccatactggatggtaaagcagttaaaatcagtgctgcaatgt

SEQ ID NO: 139751 - DNA, 622 bp, Homo sapiens
ctcttttgaaaatgtttttttacatgtagaggagtttcttattttctcaccaattctagatggcaataattactaaaccactaggcagaagctactggaaatgttatacagtagtaattacacagatatccttaaatttacttatctataaccaatttctattactctattatgaattactttctcacaccaccaaaatcattccacatatatttcactcagcaatggcttttcaacaatgattagcccatatgcgccgtgcttggtttagcattcctttccatttctgttcttcatatcttggcaactaaccttaactccttgacatgtgcaatttacaatcagaactacctcaaataagctgtttcatttaacattaatgaagaatgatgaaattcaagaagtataaaaacatctcaagactcattctttctgttttcagaaaactatcaaaataccagcatgtagtgtgattataatttttctactgccataattgaaattaactcccaaacaataacaatctccagacagaaacatcagggctaaaagaaatcctaacaytgatacgtaatgttttccatactggatggtaaagcagttaaaatcagtgctgcaatgt

SEQ ID NO: 139752 - DNA, 402 bp, Homo sapiens
tacataagcaccaaactataattcataaasttgtttcccatagtgatgtgggttagaaattctgaaactattatatatgtatactggaattacacaattaaatacatggatggcagatggtaaaaactggattttcatttttggagtgggagattataagttaaatgaagaaaagaggctagaatgatccatgtagtaatggattagagttggacacagtatgagctcatgtttagcttaatatagatacagagggttacatacagaaatatttatgggtatgcaaatctacatgggttagtatgcacacatacattttcttgctctgtcatctgaaaaggcctaggagcaatgacacccagtagcaacaagcatatccactgaccagatagttgtttctaa

SEQ ID NO: 139753 - DNA, 402 bp, Homo sapiens
tacataagcaccaaactataattcataaacttgtttyccatagtgatgtgggttagaaattctgaaactattatatatgtatactggaattacacaattaaatacatggatggcagatggtaaaaactggattttcatttttggagtgggagattataagttaaatgaagaaaagaggctagaatgatccatgtagtaatggattagagttggacacagtatgagctcatgtttagcttaatatagatacagagggttacatacagaaatatttatgggtatgcaaatctacatgggttagtatgcacacatacattttcttgctctgtcatctgaaaaggcctaggagcaatgacacccagtagcaacaagcatatccactgaccagatagttgtttctaa

SEQ ID NO: 139754 - DNA, 402 bp, Homo sapiens
tacataagcaccaaactataattcataaacttgtttcccatagtgatgtgggttagaaattctgaaactattatatatgtatactggaattacacaattaaatacatggatggcagatggtaaaaactggattttcatttttggagtgggagattataagttaaatgaagaaaagaggctagaatgatccatgtagtaatggattagagttggacacagtatgagctcatgtttagcttaatatagatacagagggttacrtacagaaatatttatgggtatgcaaatctacatgggttagtatgcacacatacattttcttgctctgtcatctgaaaaggcctaggagcaatgacacccagtagcaacaagcatatccactgaccagatagttgtttctaa

SEQ ID NO: 139755 - DNA, 593 bp, Homo sapiens
ctgaagcctcttgtgtacacaaattaaataaatttgtgtgccttttattctattcatcaatgtgcctcatgtcagtgatttttagcaaacctttacgggtccaagggccaatggcccccagacaagtatccgagaattctctgtactatctcttcggtttttctgtaaatctaaaactgttctataaaatgtcaggcctctgagccaaagctcagccattataacctctgtgacctgcacacacacatccaggtgccctgcaggagccaagaagtctggagcagccaaaaaaccacaaagtcaaacagccagttcctcccttaactgattarccaaaattacaacattttaccattgtgacttgtccctgccctaccttagctgatcagtcaactttatgacattcttcttctggacagtaagtcttatgatcttcccaccatgtaccttgtgaccccctcctcctctaacaatagatagccaccttttaccgtaattttccattacctatccaactcctataaaacaacctcttccccatctcccttcgctgactctcttttcggactcagcccacttgcagccaaatgaat

SEQ ID NO: 139756 - DNA, 416 bp, Homo sapiens
tgctggatttggcctgtttcacctatgaccttgctgtatgctcattaaacactaaatcacacacccatcagctccatgacatttcyaagaacactcatatttggtgtaaaaatggatgacactacagttctgagaaatcttcaccttttttcttccagaaatcttcatgaatattccaccccttggttaaagaaaccagtaaagatagaagccccaagccccactgcaagcgactcactctcttgagtttgcccacactgccttttcttgagtgtgtactttttgctttgcaataaatcttcatactttcactattttctgacttgtccttgagttccttctgacaatggtgtcaagagcctagacactggccagggtggaggttatgctggcatttggggacctcccctagccca

SEQ ID NO: 139757 - DNA, 416 bp, Homo sapiens
tgctggatttggcctgtttcacctatgaccttgctgtatgctcattaaacactaaatcacacacccatcagctccatgacatttccaagaacactcatatttggtgtaaaaatggatgacactacagttctgagaaatcttcaccttttttcttccagaaatcttcatgaatattccaccccttggttaaagaaaccagtaaagatagaagccccaagccccactgcaagcgactcactctcttgagtttgcccacactgccttttcttgagtgtgtactttttgctttgcaataaatcttcatactttcactattttctgacttgtccttgagttccttctgacaatggtgtcaagagcctagacaytggccagggtggaggttatgctggcatttggggacctcccctagccca

SEQ ID NO: 139758 - DNA, 546 bp, Homo sapiens
ttagtaagtaacatgtagtttactaatgactcagtatttacgtatgtagcaatattaaaatattgcattatcatgtatcataatacatacaaaatctgtatatatttgtatgcagatatacttacttattctaactgtaagaatatatttattgcctctgccttttttcccatctctccctgtgaatgctggtttttgaaagccattaaaaaacaaaaatcaaaaacaaaaataaaaaaaccactacactttgaaaatgttaagatgagaactagattcattgaaagagtacagattctgatattgytcagggcacaaaaaaatgaagtttcgaaattaaagaaaagctaaagaagtaaaaatttgtcatggtttgaggtattaagacattgacgttcacatgtatatttggtggtttattcaatgccaaaatgaatgttcactgtcagggagattcttcgagtgatacataactgttggcttagtttgctgctctgtaaacattataactctcccagatgggaaaatgtgctaaagtatatattt

SEQ ID NO: 139759 - DNA, 587 bp, Homo sapiens
ccatatttacaaaaaacccttcaattcatgtgttataacttatataaaaattaactcaaaatgaatcataaaacttaaaactataacattctaaaagaaaacataggtaaaatccttatgaccttgggttaggcaaagagttcttaaatatgacattaaaagtatgattaatttacaaaaccamtgaacttggttttatcaaaatttaaaacttctgcttttcaaaagacactattaatagaatggaaagacataccacaaactgggagaaaatatttgcaaagcatatgatagatccagaacaaataaagaactctcaaaacacagacaaacagctcagttaagaaacaggcaaatgatttgcacacacttcaccaaaagaaaatacggagatggcaaataagcccatgagaagatgctctacatcaccagtcattagggaaatgcaaatttaaaaaaaaacacacaatgagatagtattacacacccatcagtacataaagctaacaaaaaattttaaagtctgaccataccaagtgtgggagaggatataaggaaatagaactctcatacattgctggtgagaa

SEQ ID NO: 139760 - DNA, 606 bp, Homo sapiens
  misc_feature (1)...(606): n = A,T,C or G
gactgtcttatttgcccacaacaggggaggttttcatgttaaagaaacacagtgcaacagatgtggaaactaaggtttagaataattcacttgcccaagtttatcataaggacagagctaggattcaagggaaggcaggaaggagaaagagagggggaggaaaggagtgagcgagggagggaggtaaataggggaaggggggtgttagcatctatagaggtattctccaaggatggaaaagaggaaaagttgaaagatcagtgaaaatggaaaggctttatgagaaaaattgtgtgaacacacacgtacgcacacacacacacacgcacacacacacacacacacacamacactctacaattctctctttnggaatgaattaaaattagtattaatatataaactgaaggaaagtgagcaaaatatttatagaagtgagtcacattgtaaatcccccttcacctgtcctataaaaactgactgaacataaaaaagcatccatagcctttatttgttttctgcttcataagggaaagaaaataagagctatagaacatcctgtgaccaaaaattgtgtcagagataaattttaatattagggattta

SEQ ID NO: 139761 - DNA, 444 bp, Homo sapiens
tatttaatttacaaatatttgtggacaaatggattcactgaccctcagagttcctggaaaggcccactgctaaagcaagtcattttagagattcttatagtgttcttatactcaattcacctcctcaagacttgacagaattaacctatttttataaacttttcataaatatatgcacataatakaatgtaccacatgtacaagataccctaaatagctattaggtattttgcatcttccactgagcaactcaaggcaacatttcctttgcctgtcttactcctcccctttcttctcaaagtgcttgcccactgtaccactgttggagatttgccataactctttacatgttaaaggatctcagaggctctacagtaaagaaatttatttgactttatttgcctctgcattttctaatttttcttacatttcttacaaattaac

SEQ ID NO: 139762 - DNA, 504 bp, Homo sapiens
gagaagataagcaccccccagagtatttggcagacatcttatcatcacgaagtggaaccagcaacactctaaaagtgacataacaccatgaaggcagagtggattggatgagaaaccaggtacatgatgataactccaggcctatggtcaatccaaccatgatactcaaagcaagtccaaaaggatgtggactcttcacctaaatgaatgaataaatctcctttgttgctgtagttggactttcggtcatttccaactgaatggatttttacctaatatgctcctccaaccctaattttaaagaaattgtttttwaatgacggtatttccacggatgtatgccccagataactgggcttcaaaaggataagcccatacaagcaaacacgtctcattttccacagtcttatataaaatccataacaatgttactcgaggattgtcaccagtcatctcggtgcaacccataagaacttgaagatatgtctcctgagagcagtaaac

SEQ ID NO: 139763 - DNA, 595 bp, Homo sapiens
gcactaattttgctaaaaaaaaaaaaaatagaggcacacaaaaatgtgatgagtaaatgaaacaactgttattagtgacggatttggcatgttttacgaagtctgaatgattactcatccactgtacatttgcagaagttctttaataaaaaccagacgcatatgtrgtagcaggggttagtaggtggatgggaggattaaaccctgtgcgtttctggagcattggtttgtaactgttttttggcttgtcaacaggctatttttctgagtcagcctataggatggcttcccagggtaagtctgattttgcttttctggttttaaaatataaagtggtaatggagagctgactagttgctctctgcattagattctgtaaatcaatattgcctgcatttcttctgtaagaaagacattggtcgcatttcagcatattctagtgttcctgctgctcatttttgtagctttgccttacctccccctaattttaaaagtcaaatgcccaagtgctgaaagaatttgcaaggggaattgcaaaggtcatgtgtaagttctgtggctgaagtgtggagagcagtatgattgagctgcagcc

SEQ ID NO: 139764 - DNA, 595 bp, Homo sapiens
gcactaattttgctaaaaaaaaaaaaaatagaggcacacaaaaatgtgatgagtaaatgaaacaactgttattagtgacggatttggcatgttttacgaagtctgaatgattactcatccactgtacatttgcagaagttctttaataaaaaccagacgcatatgtagtagcaggggttagtaggtggatgggaggattaaaccctgtgmgtttctggagcattggtttgtaactgttttttggcttgtcaacaggctatttttctgagtcagcctataggatggcttcccagggtaagtctgattttgcttttctggttttaaaatataaagtggtaatggagagctgactagttgctctctgcattagattctgtaaatcaatattgcctgcatttcttctgtaagaaagacattggtcgcatttcagcatattctagtgttcctgctgctcatttttgtagctttgccttacctccccctaattttaaaagtcaaatgcccaagtgctgaaagaatttgcaaggggaattgcaaaggtcatgtgtaagttctgtggctgaagtgtggagagcagtatgattgagctgcagcc

SEQ ID NO: 139765 - DNA, 427 bp, Homo sapiens
ctgaattcagtatcagaagggcttttcagacctctggccaggctgactagaggtggggaagagaatgtgaattttgtcagacatggaggaaagtgtcctggcttaagaatgagagatgtatgtgggctcatgtcccagctcgcctactaaacaaacaggtgatcttgaatgtkttagtattcatttccaaacatggctgagtatcagaatcagctacagaaaatctccttcaaatgatccccttctctaaaccttctgccaccatgtctcctgtaatctggctgcactggctggagcttcagaagccatcctgaaccatgagaatgagggccagactcagggatgaaactggtatgtgcttggtccttcatgacctggtccaatctgctccaggagggcagagatgtttacatgttttattcacata

SEQ ID NO: 139766 - DNA, 414 bp, Homo sapiens
aatattgtaggccaggcactgtggctcacatctgtaatcccagcactttgggaggccaaggtggaaagatcacttgatgccaggagttccagaccaggctgggcaacaaaattagacctggtctttataaaaagtttaaaaattacctgggtacagtggcatgtatgtaatctcagctactcagccagttgaggtgataggatygctggagcctaggagtttggggctgcagtgagttatgttcgtgtcactgcactctgggtgacagagaaagatcatatctccaaaaataataatcaataatcactattataacaaattgaaacacatcaaatatagtcatgtgtgacataatgacatttacgtcaatgatggacaccatgcaaaatgatggtcccataatattataacgaa

SEQ ID NO: 139767 - DNA, 414 bp, Homo sapiens
aatattgtaggccaggcactgtggctcacatctgtaatcccagcactttgggaggccaaggtggaaagatcacttgatgccaggagttccagaccaggctgggcaacaaaattagacctggtctttataaaaagtttaaaaattacctgggtacagtggcatgtatgtaatctcagctactcagccagttgaggtgataggatcgctggagcctaggagtttggggctgcagtgagttatgttcgtgtcactgcactctgggtgacagagaaagatcatatctccaaaaataataatcaataatcactattataacaaattgaaacacatcaaatatagtcatgtgtgacataatgacatttacgtcaatgatggacascatgcaaaatgatggtcccataatattataacgaa

SEQ ID NO: 139768 - DNA, 426 bp, Homo sapiens
tggtacaattatgctttaaaagacaatcaaaacatgaatacaatacctgagcacttcawaaaacaagttagggaccttatgaaacttatgaataagagaataaaatagaaaaaaattaaaaaaatcatttaagttactacaaccttaatgatcgatgtaattagaaaataaaggtagatggaacctcaattgaaaactaatataattttataatatttttactagctcaacaaaagggaaaggagtgacatatatgcccccaagtttgattttgatcagaatctaaaaacaacaatatatttttataatcatgtgcaggcaaatccaaaaaactgatttggtaattaacaattaagcatacttttatgcctcctttaagtctctacttttacaacagaataaatagatgtatttttaaaaagaaaa

SEQ ID NO: 139769 - DNA, 426 bp, Homo sapiens
tggtacaattatgctttaaaagacaatcaaaacatgaatacaatacctgagcacttcatwaaacaagttagggaccttatgaaacttatgaataagagaataaaatagaaaaaaattaaaaaaatcatttaagttactacaaccttaatgatcgatgtaattagaaaataaaggtagatggaacctcaattgaaaactaatataattttataatatttttactagctcaacaaaagggaaaggagtgacatatatgcccccaagtttgattttgatcagaatctaaaaacaacaatatatttttataatcatgtgcaggcaaatccaaaaaactgatttggtaattaacaattaagcatacttttatgcctcctttaagtctctacttttacaacagaataaatagatgtatttttaaaaagaaaa

SEQ ID NO: 139770 - DNA, 426 bp, Homo sapiens
tggtacaattatgctttaaaagacaatcaaaacatgaatacaatacctgagcacttcataaaacaakttagggaccttatgaaacttatgaataagagaataaaatagaaaaaaattaaaaaaatcatttaagttactacaaccttaatgatcgatgtaattagaaaataaaggtagatggaacctcaattgaaaactaatataattttataatatttttactagctcaacaaaagggaaaggagtgacatatatgcccccaagtttgattttgatcagaatctaaaaacaacaatatatttttataatcatgtgcaggcaaatccaaaaaactgatttggtaattaacaattaagcatacttttatgcctcctttaagtctctacttttacaacagaataaatagatgtatttttaaaaagaaaa

SEQ ID NO: 139771 - DNA, 531 bp, Homo sapiens
actgaaatttgaagactatttctttgagactttcagtaagtcacaatggagtgttcataaatcatatattctagcatatccaatgctacttgsatatttgtaatgagagatgactggatgcaagagaatatgggaacatatgttttaaaaaattattgttcatctgaaattcaaatttaactggatgtcctgattttatccagcaatcctatctgggatacacatgctaacattattcctgccactttaaacattgcacagtgaaactccctggggccctcaccaaaactaacctttccactgggagaagctctcattggtctctgtcccacacaactctccatagtcaggaatcactaactcctggcatgcctgtgctgagaacatccttgctataaggaattactaaaaaaccatggtaactttttttcttttctaagttttatattgatatttgccagtcgaaaagcaaatactgagactttcctttctggaaatatggaacacccactttcccactgaaaaacttct

SEQ ID NO: 139772 - DNA, 353 bp, Homo sapiens
ctaaaaccaaaacagagagtatgtggcactttttaattttttcctggaatcagtggtcataacccagtttactgtttgtgtgattctaaaattctggattgtggattgttcyttccaaaatctgctacttgtttgctgcattcaattggaacttaaaatagattttaaatccatcctggtaatttcagaatcattcatttcctgtccatctcgtcacttattggccaagtttccagtcttaacactgctctactggagtaaaaggaaacctagtggtattgccagagtgggaatttagggccttacagcttatgaacctataggtggtgtggatttataagcaattaaagaga

SEQ ID NO: 139773 - DNA, 353 bp, Homo sapiens
ctaaaaccaaaacagagagtatgtggcactttttaattttttcctggaatcagtggtcataacccagtttactgtttgtgtgattctaaaattctggattgtggattgttccttccaaaatctgctacttgtttgctgcattcaattggaacttaaaatagattttaaatccatcctggtaatttcagaatcattcatttcctgtccatctcgtcacttattggccaagtttccagtcttaacactgctctactggagtaaaaggaaacytagtggtattgccagagtgggaatttagggccttacagcttatgaacctataggtggtgtggatttataagcaattaaagaga

SEQ ID NO: 139774 - DNA, 607 bp, Homo sapiens
aggtttaaaatcatttagatcattgttctaaagcttgttcaaactgtagggaatgatctagtactgtaaaggattctatcctattcagaaagtagacaattgaaaggcaaatatgccaaatttattagggatggcttcagaatttaactacagaagcacaaaaataaaaaatatttccacaagctggaattattggttgaagygaacgaagctattggttcagtaaatattctccagttataaaatataaaaaatttggaaactgctgaagatataaaaagtaaaatgtgttataatggccaacgctgagatggactttgctgatattttcatgatatttcttcttatattgtgtgtgtgtgtgtgtatgtatgtatttttaaatgaaaacattctgcatatccattcattacttcttatatgcatatatgcacggcatgcctgctagcacctggcaatattctaggtactggggacagtcagctataaataaaacagacaaatacccttgaattcatgaaagttacagtttaaatataatttaatatcttattgtcttctcaagattataatgaaagggtctttcatgttattaaatatttttaaa

SEQ ID NO: 139775 - DNA, 381 bp, Homo sapiens
  misc_feature (1)...(381): n = A,T,C or G
ccaaaggtgggctggaaatagaattaaacgaaggccttacgcaccaccacccagacacactgagcccgtttctcatctgaggccattgcttacattggtagaacaaagttccattttcttttccactggatccaccacagaatgttctcggatgtatgtcaatgtcctactggttcccaaaatctagaaaacaaagcaaaactagcatagtggaacgttaaaaattctacttcatatcaccaccgaataccattgcatttactaattagttcactattcwagaaatgatatcatgggatgcagcaagggacagagacaaaaccggtgtgtccagggcgcttccgctccagcaggtgagccactgagcaaaggaatgannnn

SEQ ID NO: 139776 - DNA, 607 bp, Homo sapiens
aaaaaccctgttatataaccctatctctccctctagagctggggggagaaaaatcacaaaaccattgcaaataycaacaccagcgatggcttccaaccatagcaaagacccaagaatcactcagcaagcttgctcttttctctgctcaattaccttgcctacaggagctgatccattcttcttcaagaagtcattttatatcatctttctctttaatccaacactcttttctgcctctctagggctcagctccaaataaaacaatcattttcccactttcaaatgtacaaactgataggaatctctacttattttccctttcttcctttcacagtggaggagtaggtcttctattcctgtttaaaggtcagccccactctcctaacccctcataccctccagtgcaatcccatttctgtgctccctttacaagcaaacctcccgaaagggcggtagcaatgctgatggtagcaatgatgccctcatctttgctatgaggctgcagaaggcctggaagatgaagatgaaaagagaaaaatctcaggtattcgtttggatagagtcatgaaggtaaggcagcagtttatgtagtacttgtttttctcaa

SEQ ID NO: 139777 - DNA, 543 bp, Homo sapiens
tggaaccgaaaccaggtagtctctctggagcccaagttcttttccattctactctaaaataaatgtaattccctttatattaaagggaataatgttcttaaagtacttaaagcatagagcatggtatacagtaagcatgcaacaaaatcatttttatagttccaaaaaaagagacatcaggggttagggggacaaaattaggttatatgaccttggacaagttatttaacattgctgggtttccatttatctctaaaaagagaggactggtttatgtaacctcttatataaatctgtctctcctctttgctctacatataaacttctaaattaaactgaaatactgaggtttttgagggakcagtcttggatctttgggtatcctctgcttactgtagctgcccttgtctagtctaatggctttaaatgccacctataggctggtaactcctcaacccctattccaggccagccctttatgttaaccacttatggctatgtacttagcatttccactcagaagtcacaaagacagctcaaaca

SEQ ID NO: 139778 - DNA, 426 bp, Homo sapiens
atttcttgttggtttctgtgcttgtgagcatttagaataaaagtctgtatcagttaatcctttgattatgtaaatcattttattttgttttcctctcattttcaaactgaggtttgaaaaccaaaaaaaaaaaaagaattaaatattttgaaacattctaagtgcataaattcttggtcrggaatgaggaactgtccttagaaaaatgggctagacatttaaaaaggaatcttgtagagcaccttggcctgttcagcagtttatgtttgtggttagtttttttctcttccaataatttgggtgggaatagtagttgctcatcttttgagattaatgttctaattatttgaatacaaatgttttctctcaaaataattgggaaggaagtatgaaaacagaaaaggtcatcttttgaattcttaaagt

SEQ ID NO: 139779 - DNA, 391 bp, Homo sapiens
tggtttctgtgcttgtgagcatttagaataaaagtctgtatcagttaatcctttgattatgtaaatcattttattttgttttcctctcattttcaaactgaggtttgaaaaccaaaaaaaaaaaaagaattaaatattttgaaacattctaagtgcataaattcttggtcaggaatgaggaactgtccttagaaaaatgggctagacatttaaaaaggaatcttgtagagcaccttggcctgttcagcagtttatgtttgtggttagtttttttctcttccaataatttgggtgggaatagtagttgctcatcttttgagattaatgttctaattatttgaatacaaatgtyttctctcaaaataattgggaaggaagtatgaaaacagaa

SEQ ID NO: 139780 - DNA, 592 bp, Homo sapiens
gattacaggtgtgagccaccatgcctggcctaaaatagcttttaattattgttttggccttgcaaagacacattatgtagagatttttgaaattacgttttaactgatagattagaagggttgataagtacgttttgttgggcatgtctgataagtaaargaggtgcacacaggaccctctgagcccagctgctggaagtgtaggcagtcacccctgcacgggagctcttccttagctgtgtccgagtggctgaatcacaaagtgctgtgccttcacagccctcttccccaaaggcccttcaataagcatggggaaggagaggtgcggattcttctctacagccacagggaggcaagaagaaaaagtgcagggcccagagggatctctgcatgacctgttttccctggtgtggctctttttttatctggagaagagaggcttacttttgcccagtgcagagccaggggctgagctggattcaatgcagggagagtctggaaggtgcgtcgagtcttgaggggaaagtttgtgctggctcgaaactggggagcaaccgtggatgagtggacattccattgaactaagacagca

SEQ ID NO: 139781 - DNA, 592 bp, Homo sapiens
gattacaggtgtgagccaccatgcctggcctaaaatagcttttaattattgttttggccttgcaaagacacattatgtagagatttttgaaattacgttttaactgatagattagaagggttgataagtacgttttgttgggcatgtctgataagtaaaggaggtgcacacaggaccctctgagcccagctgctggaagtgtaggcagtcacccctgcacgggagctcttccttagctgtgtccgagtggctgaatcacaaagtgctgtgccttcacagccctcttccccaaaggcccttcaataagcatggggaaggagaggtgcggattcttctctacagccacagggaggcaagaagaaaaagtgcagggcccagagggatctctgcatgacctgttttccctggtgtggctctttttttatctggagaagagaggcttacttttgcccagtgcagagccaggggctgagctggattcaatgcagggaragtctggaaggtgcgtcgagtcttgaggggaaagtttgtgctggctcgaaactggggagcaaccgtggatgagtggacattccattgaactaagacagca

SEQ ID NO: 139782 - DNA, 382 bp, Homo sapiens
ggcctttctctttcaggactccctgaaggctgtgtccatggaaacacgttctatcagtgtcctcttcagtccagttgaactgaaaacttgaagggcttttttttccagcagttgctgttgamtcgaccagtgtgctaaattgtttctgtagattcaccaccatttctggaaccggagaaaaaaaggaaacaaaataacaagtaatgttaaatcacaaataaagcctggaatttacttgataggaatgtaccaatattggttccttagttttcgcagatgtaccacagtaatgtaacaggataacgttaagggaaaatgaaactggatgaggtgcatgggggaaaccttacttcaaaaagaatgtacagtctaaaaggaattc

SEQ ID NO: 139783 - DNA, 382 bp, Homo sapiens
ggcctttctctttcaggactccctgaaggctgtgtccatggaaacacgttctatcagtgtcctcttcagtccagttgaactgaaaacttgaagggcttttttttccagcagttgctgttgactcgaccagtgtgctaaattgtttctgtagattcaccaccatttctggaaccggagaaaaaaaggaaacaaaataacaagtaatgttaaatcacaaataaagcctggaatttacttgataggaatgtaccaatattggttccttagttttsgcagatgtaccacagtaatgtaacaggataacgttaagggaaaatgaaactggatgaggtgcatgggggaaaccttacttcaaaaagaatgtacagtctaaaaggaattc

SEQ ID NO: 139784 - DNA, 382 bp, Homo sapiens
ggcctttctctttcaggactccctgaaggctgtgtccatggaaacacgttctatcagtgtcctcttcagtccagttgaactgaaaacttgaagggcttttttttccagcagttgctgttgactcgaccagtgtgctaaattgtttctgtagattcaccaccatttctggaaccggagaaaaaaaggaaacaaaataacaagtaatgttaaatcacaaataaagcctggaatttacttgataggaatgtaccaatattggttccttagttttcgcagatgtaccacagtaatgtaacaggataacgttaagggaaaatgaaactggatgaggtgcatgggggaaaccytacttcaaaaagaatgtacagtctaaaaggaattc

SEQ ID NO: 139785 - DNA, 572 bp, Homo sapiens
agatcttgaactgctccgcttatgccaaaagtacagactaataagaaaarcaactggaagaaatgatgagaatggtagcaagaacagtatagggtcttggaagggagcagagggtgggaagagcacaggccctggaaggggaagactgggttgtaggaatctactctgccatctaccagctgagtgtccctgaactgccctaagtctcatctgtcaaggggaagcctgcttgccctcccttcccaccttcacaaagaagagaatttatatatgggcactttggaaacttcagaaattacatacatgaaacagaaattacataaatgatcatgaaagccatcagaaactctatccagcaggctcgtgggtgacaatgggaggaaccatagtagagggtggagagtgcatctgagctcattcatggccatcaaaggggcagcgcttactcaggcagggtgtgtgtgacatacttgccgaaagctttccccgagccccagaggctacctggtcacctttaaaggcgttgaggaggggcggctattgtctcagcatgtttaaaaccgcttttagct

SEQ ID NO: 139786 - DNA, 590 bp, Homo sapiens
gccaaaagtacagactaataagaaaagcaactggaagaaatgatgagaatggtagcaagaacagtatagggtcttggaagggagcagagggtgggaagagcacaggccctggaaggggaagactgggttgtaggaatctactctgccatctaccagctgagtgtccctgaactgccctaagtctcatctgtcaaggggaagcctgcttgccctcccttcccaccttcacaaagaagagaatttatatatgggcactttggaaacttcagaaattacatacatgaaacagaaattacataartgatcatgaaagccatcagaaactctatccagcaggctcgtgggtgacaatgggaggaaccatagtagagggtggagagtgcatctgagctcattcatggccatcaaaggggcagcgcttactcaggcagggtgtgtgtgacatacttgccgaaagctttccccgagccccagaggctacctggtcacctttaaaggcgttgaggaggggcggctattgtctcagcatgtttaaaaccgcttttagctttctgggaaccctaaaccctctctttgtaaaagtgccacat

SEQ ID NO: 139787 - DNA, 590 bp, Homo sapiens
gccaaaagtacagactaataagaaaagcaactggaagaaatgatgagaatggtagcaagaacagtatagggtcttggaagggagcagagggtgggaagagcacaggccctggaaggggaagactgggttgtaggaatctactctgccatctaccagctgagtgtccctgaactgccctaagtctcatctgtcaaggggaagcctgcttgccctcccttcccaccttcacaaagaagagaatttatatatgggcactttggaaacttcagaaattacatacatgaaacagaaattacataaatgatcatgaaagccatcagaaactctatccagcaggctcgtgggtgacaatgggaggaaccatagtagagggtggagagtgcatctgagctcattcatggccatcaaaggggcagcgcttactcaggcagggtgtgtgtgacatacttgccgaaasctttccccgagccccagaggctacctggtcacctttaaaggcgttgaggaggggcggctattgtctcagcatgtttaaaaccgcttttagctttctgggaaccctaaaccctctctttgtaaaagtgccacat

SEQ ID NO: 139788 - DNA, 385 bp, Homo sapiens
tccccagaaaacagaatatgccggttgtaggaaacaaaaaataaaatgcagaggctacttttcttgtagacaggaggaagtgctcagatagttttactctccaagtttggaaagagaagcacacatacacattccagtgaggctgagatgatggtagctgggggcggggtggggggttgggggaagtgggccaggaacacaagaaaacaccagctggcttctctccctcatgctgtctgggagggaagagtagaaatgagggaacctgatcattatgttcacytcaacttccctcaagtagatttgaaacctgtcaggttattattctaataaagattgtacaaaaaatcccaagcattacatgtggcctacagagtaagaaggt

SEQ ID NO: 139789 - DNA, 528 bp, Homo sapiens
tgccagctcagcgggaggggttttcctggggactacaggatagatcccygggttttcccgacctcagcgtttttggctctcagttctagttcagacttctgtttccagtcttgaaaaatgacaacacgttctgcatgaatcactgttaaaattgggacttatctagattttttaaagtaataataatggtcttgagaattcaagatgtcttaactccaagtaagatcatattttgtatctaaagtatagtattttaatatttgcagaatctatagggcttctgtttggacatttcaccaggaaggctttgttttcttttttttttaattgtgaccagtattcatattcacaaaatcttgtatctaaaatgaagaaagtgctgttctgtgcctgtagggttccatctgtagtacatgggcttctggcagctcttttgaatggtctgtctggctcagcagacatttgccctgcaacaccttagtcaggattctcctactggtatcaaagtacaaactcccagtgacactt

SEQ ID NO: 139790 - DNA, 528 bp, Homo sapiens
tgccagctcagcgggaggggttttcctggggactacaggatagatccctgggttttcccgacctcagcgtttttggytctcagttctagttcagacttctgtttccagtcttgaaaaatgacaacacgttctgcatgaatcactgttaaaattgggacttatctagattttttaaagtaataataatggtcttgagaattcaagatgtcttaactccaagtaagatcatattttgtatctaaagtatagtattttaatatttgcagaatctatagggcttctgtttggacatttcaccaggaaggctttgttttcttttttttttaattgtgaccagtattcatattcacaaaatcttgtatctaaaatgaagaaagtgctgttctgtgcctgtagggttccatctgtagtacatgggcttctggcagctcttttgaatggtctgtctggctcagcagacatttgccctgcaacaccttagtcaggattctcctactggtatcaaagtacaaactcccagtgacactt

SEQ ID NO: 139791 - DNA, 270 bp, Homo sapiens
agacccacgtgtccatccacacttgtccacgtcttggttccaggagtgtctgtcagggatgttccccctgaccctggatattccttctcctctgtgaaagtacggtcacgtatggtgcaagtatgggcatgtgtgatgcaagggasgctgctgggcagctgcctgtgcaggcaccggggacaggaaggtggatagggcataatttgtgggggaaaaggcatgtaaacatgtattacaacataagagagtacgtgtagcgggaatgtaaat

SEQ ID NO: 139792 - DNA, 400 bp, Homo sapiens
tattgcaccaaatgcaagcatctcttctccctatcaccctttctctcaattagtcctagcacattagcatttcatccacagtactytaagctgataactttctcccaacaagctcagacttccaaaaaaaatttcccgcctcttttttactacactcctaatccaggccttttgtcggttatgagcactaccttgcatagagagctctgtccttttcactggttcagacacaaagtttctttcctaccccagcacagggcatttccccattccctccttcttcccaccaaattctttccttctcatcattcctgtttaaatctctctctcttttatacatctactcaattacttctcttctatttcctaattccaaatcagtttcttttcccattacttt

SEQ ID NO: 139793 - DNA, 494 bp, Homo sapiens
ccttgtggtacttttgcctaataatgatggcagcttrtaataattgagcacctactagaggccagatgctgtgatgtgcttcacaactagacccccgtttagtgcttgcaataaccctataagataagcaatagtatcatgatttcctttgaagaaagagagtaaatagtttccccatagccacacaggaagaggcagagccaggatctgagcccaaatttgactccaaagtctgcccgtaattatcataccataccatacagacaatctgcagcttagggtagttcgacaggattttttaactttgtgatggagccaaaatacacattcagtagatactgtactgtgagcacccatacaaccattctgatgttcattttcagcacagtattcaataaattacatgagatattcaacagtttattataaaataggctttgtgttagatgactttgcccaaccgtaggctaatgtaagtgtaggctgggctgagc

SEQ ID NO: 139794 - DNA, 494 bp, Homo sapiens
ccttgtggtacttttgcctaataatgatggcagcttataataattgagcacctactagaggccagatgctgtgatgtgcttcacaactagacccycgtttagtgcttgcaataaccctataagataagcaatagtatcatgatttcctttgaagaaagagagtaaatagtttccccatagccacacaggaagaggcagagccaggatctgagcccaaatttgactccaaagtctgcccgtaattatcataccataccatacagacaatctgcagcttagggtagttcgacaggattttttaactttgtgatggagccaaaatacacattcagtagatactgtactgtgagcacccatacaaccattctgatgttcattttcagcacagtattcaataaattacatgagatattcaacagtttattataaaataggctttgtgttagatgactttgcccaaccgtaggctaatgtaagtgtaggctgggctgagc

SEQ ID NO: 139795 - DNA, 494 bp, Homo sapiens
ccttgtggtacttttgcctaataatgatggcagcttataataattgagcacctactagaggccagatgctgtgatgtgcttcacaactagacccccgtttagtgcttgcaataaccctataagataagcaatagtatcatgatttcctttgaagaaagagagtaaatagtttccccatagccacacaggaagaggcagagccaggatctgagcccaaatttgactccaaagtctgcccgtaattatcataccataccatacagacaatctgcagcttagggtagttcgacaggattttttaactttgtgatggrgccaaaatacacattcagtagatactgtactgtgagcacccatacaaccattctgatgttcattttcagcacagtattcaataaattacatgagatattcaacagtttattataaaataggctttgtgttagatgactttgcccaaccgtaggctaatgtaagtgtaggctgggctgagc

SEQ ID NO: 139796 - DNA, 574 bp, Homo sapiens
aatttaaatttcatcctatgaaaaatataattagcaaggggaatctgctgccaaaataaattatgcccctcatttccataggcaaatggattttttttaattactcaccactttgcattgaaatctatttgtatggataattagaattgacaagtatggcactctaaagcactctcccactttccattttcttgctgcttcttcatccattcccatcaagttcacaatttcccccagtgagtcatctgcccctcatgggtcatccagcccaggagagctgaaagagccagggggcttgttcaccatctcagttcttctcataagtccccagaggccacatttagtgtttgcggttaagcacataargccctggaatgcctctggcaaggagctgacaggtaggactgtgcagtcgcttttgttttctttcttaaatatgataattagagaaaggaggtggagaaggggcacggaacaggtaaggaacagtagggaagggaagcagagaattatacacacacacatgcatgaaaaatgtttactactcttaaaatatagtttatggatacttgga

SEQ ID NO: 139797 - DNA, 574 bp, Homo sapiens
aatttaaatttcatcctatgaaaaatataattagcaaggggaatctgctgccaaaataaattatgcccctcatttccataggcaaatggattttttttaattactcaccactttgcattgaaatctatttgtatggataattagaattgacaagtatggcactctaaagcactctcccactttccattttcttgctgcttcttcatccattcccatcaagttcacaatttcccccagtgagtcatctgcccctcatgggtcatccagcccaggagagctgaaagagccagggggcttgttcaccatctcagttcttctcataagtccccagaggccacatttagtgtttgcggttaagcacataaggccctggaatgcctctggcaaggagctgacaggtaggactgtgcagtmgcttttgttttctttcttaaatatgataattagagaaaggaggtggagaaggggcacggaacaggtaaggaacagtagggaagggaagcagagaattatacacacacacatgcatgaaaaatgtttactactcttaaaatatagtttatggatacttgga

SEQ ID NO: 139798 - DNA, 595 bp, Homo sapiens
gcatctattttaaagcattcatctggcacattacttaaagatgacaaatctctgtaatatgcaaaatcagcattgggttcaacgaaatccaaactcgttataatcactccaagttgccccagagaaatctattgtttaaartggacactacaggtaagagttatctttagtccttcctggaacttctctctttttagatcattttaaaggtttgctttatttttaacaggcccatcccagctcgaagtggatggacatgcgcagtgggacacaagggatttgtctcccagcattacactttcctggatgacaaatgaaaagtactgaccatgacaagcaggctgctctgagacccttgccagaaccaggggtctcaaatttctcttagtcactattcatccaacatcagaaaatccacagcccttttagctatgcacattgggtgtgcactatgctgagttttgggggttttagtgaggagaagtgtcataaacaataacaaaacaaacaaaaaacccagccagcttctaaaaatcacatggtcaaaagctaactatcagaaagaacccactgtgccctcagacaggcttgaaaa

SEQ ID NO: 139799 - DNA, 418 bp, Homo sapiens
gaattcttagataattcctcaagttaatttactaatctctttgttagcaatatccattctgctcactgtgtgattttctggttaatttcagcaataatgttttatgctaaacactctggtacttcgatttttttcttttccatgaccatataatctctttgaatgcagcaacctttctaatctcactgaagatatgaataacaattttcttaacgttttccgtggtttgcatcattaatcttgtttttttgagggatattaraactcactgtcactattgcttccctcctttcagctgatttttttcaaaagtctgatgataaatattttactgtctgattatatacctacctccaaattaatgtccttagtagggttttttttaaatgggcccaaggaagagtagctattatctttt

SEQ ID NO: 139800 - DNA, 310 bp, Homo sapiens
caattaggggttttctaaatttttgctgcgatgtctactataatctatgttttagttgctttaaagtaagtttatatgtaaatttcaatgaataatttttaaaactagagcatggataaaaaagtaatataaatcatatgttgatttttcagtatgttgctacttgtagacatcgggctattttgtttgctaggcagttttgggggaagccaggtaatacatttatgggatgtattgagatggagatacattaaataagatcctaacttgctacagtgtttytacattaaatgagtggacatgccagagg

SEQ ID NO: 139801 - DNA, 432 bp, Homo sapiens
gaatcacagaatatgtgctcatttttatattcctttttgcrttgagcataatgtttgtgggatcaatctatgattttgagtacataaacttctagaagaaaatataggagataatctgtgatgttggattaggcaaagatcccttaggacccaaaaagcactaatcataaaatttaaaagaaaatatgcattagactttatcaaagttaaagaaagaagttttgctcttcaaaagacaaaaggtttgttagaactacatgtctctctctgtatgtttgacaaaggactttatctagactatgtatagaactcttgcaactcagtaagaagacaggcaatccatctaaaaaatgaacaaaatatgtgctgagatatttcacacaagaaaatatacaaatatctaatgagcacatgataactctataattcacc

SEQ ID NO: 139802 - DNA, 432 bp, Homo sapiens
gaatcacagaatatgtgctcatttttatattcctttttgcattgagcataatgtttgtgggatcartctatgattttgagtacataaacttctagaagaaaatataggagataatctgtgatgttggattaggcaaagatcccttaggacccaaaaagcactaatcataaaatttaaaagaaaatatgcattagactttatcaaagttaaagaaagaagttttgctcttcaaaagacaaaaggtttgttagaactacatgtctctctctgtatgtttgacaaaggactttatctagactatgtatagaactcttgcaactcagtaagaagacaggcaatccatctaaaaaatgaacaaaatatgtgctgagatatttcacacaagaaaatatacaaatatctaatgagcacatgataactctataattcacc

SEQ ID NO: 139803 - DNA, 432 bp, Homo sapiens
gaatcacagaatatgtgctcatttttatattcctttttgcattgagcataatgtttgtgggatcaatctatgattttgagtacataaacttctagaagaaaatataggagataatctgtgatgttggattaggcaaagatcccttaggacccaaaaagcactaatcataaaatttaaaagaaaakatgcattagactttatcaaagttaaagaaagaagttttgctcttcaaaagacaaaaggtttgttagaactacatgtctctctctgtatgtttgacaaaggactttatctagactatgtatagaactcttgcaactcagtaagaagacaggcaatccatctaaaaaatgaacaaaatatgtgctgagatatttcacacaagaaaatatacaaatatctaatgagcacatgataactctataattcacc

SEQ ID NO: 139804 - DNA, 652 bp, Homo sapiens
ggtagaaatgtcattgtaaatttaagggggaatataaaatgatgccgctaatttggaaaacagtttggtagtttctcaaaaagttaaatataaaatttccttatgacccaacaattctattcttagatgtgtattaaggagctgcaaaaacatatgtccacaccaaactctgtacatttatatccatagcagcattatttatgatagccaaaaagttgaaaaatctgatgtctattaattgaagaatggacacacaaaataaggcatatttatacaatgggataatattccaccataaataggaaaaagtactgatacacgtgaaacgtggatatccttgaagacattgtgtgaagtgaaagaaagccagacacaaaatatcacatattgtttgattgaatttatataaaatgtccagaattcaccaatctatgtagagaaaaactagtggttgtcagggtttgggagaagggaggaatgaagaatgaacgctaatgggtacacgttctctttttcttttcttttcttttttttttggagacacggagacagggtctcactgtgttrcccaggttaagtgcagtggtgcaaccatagcttactgcagctcgaactcctagacacacacgatcctctccctttggtctccaca

SEQ ID NO: 139805 - DNA, 567 bp, Homo sapiens
gttaggattttattttactttgaaatgtgaaatcaagttattatttcagtaactaagcattgttgtacctttcttcttaagaagattaatatgtaaatttagtgttaccttaattcaaatatttctttaaagatgtttttaaagatagacagctgtagcttgctggttataaaagcagcagttagaaatacatttttgactcacttattattttgactgttttgatggttttcaatctgacaacttttttttagtagctccactgcttccgtcacacccaattggaccttgtttaatgtgttggttttatgcttcactagcaatgaacagatcatttaatagatgattatatatgaaaatatgatttataatgaaaatggtttcataggctatataatagtgcagaactacctggaaataaaacattgtgtccatctgttttacaaagtccattttatgcctttatcatgataccaaaatttcattaacaccaatttgaaaatattraagaataaaaaaagactttgtgatttaaatttctcgttataaaatattaaagtagaaaag

SEQ ID NO: 139806 - DNA, 569 bp, Homo sapiens
acagtttaaaaactaccaactgtccccaggggtggagcaatcaagtaagcaatggcatgttaactcactggaatactgattgattgtacattattgcaacttctgttgcaataactatatacatattttagtcttctcagcaacagttctccctacaatagcatttttatttattttgaagaagttaaggaagctgggttgtatctcaacaacttgcctatgtaatgattcctttccagattcaagccttaaggcytgctcaacagtgcttccaggccaactaattttttagaaatttgtggaatttgtgaaaagaacgcttgatgtacttgtttactaaaatgtaatgtgcatgcatgcgtgtgtgtgtgtttgtgtgtgtgtgagtgcttgtgtttctttaggactagttctctggtacataatagggatcataatagggtttaaaacatttctccataggtagtacagggcttctcaccagaatgactctttgatgcaaaataaatgtattactctttgtgactaattttccatattcagtatattagtgagtgttttctctaata

SEQ ID NO: 139807 - DNA, 522 bp, Homo sapiens
aactctgtttcagggtgtattaakccattctcaaattgctataaagaattacctgtgactgggtaatttataaagaatagaggtttaattgactcacagttccacaagttgtacatgaagtatggctagggaggcttcaaaaagcttacaatcatggtggaaggcaaaggggaagcaggcacatcttacatggacggagaaggaggaagaagggagtgggaggtgctgcacacttttaaacaaccagatcttgtgagaactcactatcatgagaacagcaagggggaagtctgcccccatgatccagtcacctcccaacaggctcttcctccaacattggtgattataatttgacatgaaatttgggcagggacacaaatccaaaccatatcatttcacctctggcccctcccaaatcttatattcttctcacatttcattcccaacattcccccgaagtcttaactcatcccagcattaactcaaagtccacagtccaaagtctcacttgagacaaggcaa

SEQ ID NO: 139808 - DNA, 460 bp, Homo sapiens
cagagaaggaaattctacagcctttttgggcagcctattctagatccttacagcattcactgtcagggaactytttctcatatctaaccaaaatctctgttgctggaatttaagctcatttcttcttttattgtcccctgtgggaagtagaataggtcagttttttgtttattattctctcaatagccctcaatacataaaattaaattatggcagagttatctttatttcataacctacaacttttgcccgttaggagagttcagggcctaaggtggccctcttaattctgatgtatgcatttattttcttgctgtgtattgtgttagttgtacttcatttcagaaattggaaacagaatgtgatgagtgagctctgaatgctggaatttaagctagtatccacaagagacatcttggaggagctagcagagatgcccatttgaaaattaaatgtaatt

SEQ ID NO: 139809 - DNA, 470 bp, Homo sapiens
ttcaagttgatgattcattatccgagtttggctctttcccactatgctgtattgtggaatacatcccttggctctaccttctstggtctcaacacaagcaatgcccacccaatctcaggctgcaactccagggaactcatctaacattgctgcttctacttgtatggggaggaagggtcatcaaaccagaataaagaggaaggtgaaactcattttgactgggatgagaggtgaaggctatacaagaacaacaacagttgagttggcccttacatatttgggcagaaatatgaaagaaaaataagggaagggtagtctaggtagaagggtcttcctgttggagcaatggcataaaatgtgaatctcaaaggcttactcaggtgaagtcaaagagactactcagcattagtcatattaagtctcatatctagtaaatgtagaaatagataaaatacattacaaatagctaa

SEQ ID NO: 139810 - DNA, 444 bp, Homo sapiens
tgttcagtggaatcattgttgttttgaaatgtaaatatcatgaaattaatggaaaggattatactatcttgagatgtacaaaattaacaggcctcatttgcatttcctaaagccatgtagattcatttttttatatttacagaagcatattacctgaggtattttttggctcataaatacaaaattaaatcccacagatgaccagaaggaaagctaggtcattgtttctcttttttacatatsattttctgtatcaaaagcttaataagatgatttactaaggagtatatatgctgaacacaactcgtgctgaaatgtcagtcctcactgtgaaagacttctaggcaaatataattgctgtaatgtgttacgacctttcaagactcataattcaattgaaaggggcaaggctaattaaatgcaggagaatcatttcccacttac

SEQ ID NO: 139811 - DNA, 439 bp, Homo sapiens
tctgaaatgacatgagcctgcaatttgcatgaatttgatgtaraaaatcttatcatcatcacatggatcatagttcaattttatatatgtgctttccggattccaaatggagattgggaaaattattcaaattgttagaatatagacctgtaatctcaagtaattgatgtcccctattttaagaaagcatgcaacaaaattcagatgcatgtgtacagtctataaatattatttttaggtgagaagttgaatttttcatgattgtaaatggaagaaaaagaaaatcagtttaggtcaaaatacataaaatggcttggatattaatttcaccatatttttactttgtttcaaatattatagtaaaattatcagagctttgccactgaaccaatctgtctcagactcatactgagtagtagctctgtaacttgacttaaat

SEQ ID NO: 139812 - DNA, 424 bp, Homo sapiens
gttctttttgtttagtcttgctttggctatgggggatcttttttggttccatatgaattttaggattgttttttctagttctgagaagaatgatggtggtattttgatgggaattggcttgaatttttaaattgcttttggcagtatggtcatttcacaacgttgattctacccatccatgagcatgggatgtgtttccatttgtttgtgttgtctatgatttctctcagcaatgttttatagttttccttgtagagggctttcacttccttggttaggtataygcttaagtattttatttttttgcagctattgtaaaagaagttgagttcttgatttgattctcagcttggtcacttttggtgtatagcagagctactgatttgtgtacattaattttgtatcccgaaaatttgttgaattc

SEQ ID NO: 139813 - DNA, 569 bp, Homo sapiens
tggctctgtcctggaggagctcaccctttagctggggggcacgagaggaccaggaaattcacaatgccagtgaatttcctggtcctaagatggaccagtgctaagatggaggtctgttcagggccccacaggtgcaccaaggaggagtggccttagtgcctacctgggccaaggaaggaggaggggtgtttgccagacagagggaaagggtagacgggtcacccgtgacagactgccayggttactacttgagaccattgctacgatagttactactgtcactacttgagaccatcgttatgagacagaacaaagggggatgaacgtagaaatgaaaactgaagacaaaagaaacttttaaaggaaggggtcaggggaagaagaaaagggctccctactcctagtgagcaaagacagcccccgccctgagcttcttcagcccttagtatttattgggtagaatgagcagggaggaggaggtaacgattggtcagctgcttaattgatcacaggttcatagtattactaacaggcttcaggtgtgccctgtagataatcacaagaaacac

SEQ ID NO: 139814 - DNA, 569 bp, Homo sapiens
tggctctgtcctggaggagctcaccctttagctggggggcacgagaggaccaggaaattcacaatgccagtgaatttcctggtcctaagatggaccagtgctaagatggaggtctgttcagggccccacaggtgcaccaaggaggagtggccttagtgcctacctgggccaaggaaggaggaggggtgtttgccagacagagggaaagggtagacgggtcacccgtgacagactgccatggttactacttgagaccattgctacgatagttactactgtcactacttgagaccatcgttatgagacagaacaaagggggatgaacgtagaaatgaaaactgaagacaaaagaaacttttaaaggaaggggtcaggggaagaagaaaagggctccctactcctagtragcaaagacagcccccgccctgagcttcttcagcccttagtatttattgggtagaatgagcagggaggaggaggtaacgattggtcagctgcttaattgatcacaggttcatagtattactaacaggcttcaggtgtgccctgtagataatcacaagaaacac

SEQ ID NO: 139815 - DNA, 398 bp, Homo sapiens
tctgggagagaaaatactcccagctggcctgatacccaggcacaggcttctcctaaacacaggtctccccacctgtcaggatgtccaaacggagttggtgggctggatccagaaagcccccaagagagatgctgaaactctcaggtgggtaaaaagagtagacctctgacgtcccagggtacagcccttgctgccatcctgggggcaccctcctaagtgccaggggcaagccatggtcaggggaagcagaaagcggtgacacccyggccactgcacctgtgggcaggtgggtcagggagggtccaggcactcaggatgaacagaactcacctgccaaggcttgggctgaggaggagctggaatcccggagacacactgcccccgcccctcaccacccc

SEQ ID NO: 139816 - DNA, 325 bp, Homo sapiens
atctggctttgatcttttgagaggtakatttatgtgtcctgattaaaaagtacagtgcttttcttacaactaagaaggcctgaaacttactgtaaggttgtgtgtgtgtatgcgaatgtgtgtttacataactgatcatatttaaaatcattttcttagaagtagaaggctatagaatatctgtcatttttagagtgtgtagatatgctctagaaacagaccactgatctgtaaaatgatcaggtcagtgattcggatttgattcttgtgtgaatcacagagtgctatattgcctaggatatggatatcgatatttagtaatctg

SEQ ID NO: 139817 - DNA, 325 bp, Homo sapiens
atctggctttgatcttttgagaggtagatttatgtgtcctgattaaaaagtacagtgcttttcttacaactaagaaggcctgaaacttactgtaaggttgtgtgtgtgtatgcgaatgtgtgtttacataactgatcatatttaaaatcattttcttagaagtagaaggctatagaatatctgtcatttttagagtgtgtagatatgctctagaaacagaccactgatctgtaaaatgatcaggtcagtgattcggatttgattcttgtgtgaatcacagagtgctatattgcctaggatatrgatatcgatatttagtaatctg

SEQ ID NO: 139818 - DNA, 388 bp, Homo sapiens
ttactcaaccaaccccttacagagtacacccttgaaattagtaaatcctgagagtcgccactgcctctatgtatataatttgccccgtaaaaaatgggcaagcaaagccaaaacctaactgagagggagagggatggcagagatgcactcaacgtgttaatttactcctctgtcttgcaatccatgactcagattcacaactcacaaggcacatrgtatcctcagctttcatgcaacagccagaaccaggactgttttaaccacatattccagaaacagaaagactctgggctgactattcattccaaacggaccctacctgagacctacttaattagaacatctgcagtttataaaagcttctaggtggttatgaggcccagcccca

SEQ ID NO: 139819 - DNA, 589 bp, Homo sapiens
agcatgtattctttttttggtctggcttctttcactcagtataaatattctgagatacatctgtgttgctgtgtatatcaatagcttgtttttttttattgctgaataatttccattgtacaaatataccatttatgtatccattcacatgttgaaaaaattattctttctcaactctactacttttgaatctatgttgaaaattaattgaccttgtatgtgtgggtccctttctgaattctcatgctgttgtattgatctatttatctatctcatagcaatatcatagccttgattactgcagccttataaaaagtgctgacgttagtgtaagtcttccaactttgttctttttcaaagttgtttttgctactctaggtcatttgcttttttatgtgaattttggaatcaacttgttttttttaataataaaacctgctgggattttaactgagataacattaaatctatatatcaattggagagaatttacattttaacaatatcrtgtctcctaatctgtgaacacaacagaaactttaggtattctttaatttctctcagcaatattttttagttttcagtatac

SEQ ID NO: 139820 - DNA, 521 bp, Homo sapiens
gcgcgcagccagccggtgtttccggaaaggcctccctgcgcgccggctgagcagccagygccaggcgagcccagaaaggtggaagtcacggtggaaacgccggccacgcggctccttctccaaacgcgctctgggaagggattaggcgccccctgcactttcgctttgggcgtgattgatgcgaacggcgcgctaagggctgcgtaattaataaagattacgccggttttgtcgaaacgttcctcttaattaatgaagaagcggggcgccaagggtgtttgatttgcatttggaaaattccctcggcggctcgggctcagtggtgaagcggccgctgggatccgggactaacgggcaaccgccaggccgaggcgttcttgttccggatcaagtgtacccgatcctgttcccctcgccccgagatctaccgggccgcactccctggggctcagggcccgactcaagtctgtctccatccagccctcctcgagtgggcctccttgccttctgcggacattggc

SEQ ID NO: 139821 - DNA, 623 bp, Homo sapiens
ctaatgaagagaatgaattgaggagcaaatttaaaaaattacagcaccgaatttgccatgttttagtcgaatttttatttgattatagttctaagagctgtcaaattacctaaaggaagcaatgagtttctcaataggaaaaaaaaaggaaaaagaaagggaaatgatccaaaaatgctgcaactaaataacaatcatttctgctaagctttgtgcagctttaaatacaattgaatattaattctttcagacctagttgacttaaaagctaggatggatcaggagctgatttttggcattccttcatttttccactcttttgttcacttgacacacagcttttatacattggctttgcaggaaccactggcatgatctccgaacaatctgtttgaggaggaaagggtccttccaacaagcagccagaggtttaataaaatactgcccatcctgtctaccttaaacagtagaagaaatagctgttggcataaaggtaccaatgaacttatgtttcctcgtgttaatagagcaaagaaccttcttggtgtttaaacacacatggacacacaggcgtgtgcacacacacacaagcccraaaatcatgtggttatatttttttagtt

SEQ ID NO: 139822 - DNA, 467 bp, Homo sapiens
agaaatcaaagtagttcatctgaccatttgcagtctttactaagaaccatcacagaccattgatatctagggtcagtctggaacctgccaataatcataagctggtgaactgattattcattttatatctttattaaagttttaattttggtattttgtattacaatgaatgtaataaaaatataacaagagctaaaatggtcttctgaagcaaaagtgcaggaaggaataactggaaacatatcaggatattctcaggttattcagcagaaactccagtgtgatcactgaaagcatcacctctcaccgaagtatttcaactctgtgctttataagaaagttcgatctcaagctaattttagatacaggagccaaattkttagttatcctaatcatctcacattaactcccaagattacacttgggaaaatggacattgtcagtaaaaagaaagaaaggatcaagca

SEQ ID NO: 139823 - DNA, 603 bp, Homo sapiens
agcccagtggcttcttatgtgtgtatatgtgtgtaacaagaattccttttacaacacgaatgacatcgccctttcctacagtctcctgcaaaagatttctatttgcaattgtttttaacggctttttaaaacgccatggtaactaccaccaaagcatttcaaagagaaaaagagaggaaagtmcacaagaaaatgtgtccctattcaattaggaaaactgattaattaattaatcagctaacagcattttaagaatagtctcccatgataacaactttctccccacctaagagcttaaaaatcagtcataattaaaattaagagccagggctgctatctacagtaaggctccatgtctctaaaagcagtaagctaaattctagtttactgggattggattgcaaggggcgcagaaaggtaatttgcacactgaaggggaacaggaaaacagtagttctcgtgaaaggaaaagggccaagtgacttttatttacaattgccaagagagaggccattattgaccatatgtgccacaattgccctcttatcgcgggctggccatcatgtcctttgggagctgttaatgaactgggtaattgagctg

SEQ ID NO: 139824 - DNA, 603 bp, Homo sapiens
agcccagtggcttcttatgtgtgtatatgtgtgtaacaagaattccttttacaacacgaatgacatcgccctttcctacagtctcctgcaaaagatttctatttgcaattgtttttaacggctttttaaaacgccatggtaactaccaccaaagcatttcaaagagaaaaagagaggaaagtacacaagaaaatgtgtccctattcaattaggaaaactgattaattaattaatcagctaacagcattttaagaatagtctcccatgataacaactttctccccacctaagagcttaaaaatcagtcataattaaaattaagagccagggctgctatctacagtaaggctccatgtctctaaaagcagtaagmtaaattctagtttactgggattggattgcaaggggcgcagaaaggtaatttgcacactgaaggggaacaggaaaacagtagttctcgtgaaaggaaaagggccaagtgacttttatttacaattgccaagagagaggccattattgaccatatgtgccacaattgccctcttatcgcgggctggccatcatgtcctttgggagctgttaatgaactgggtaattgagctg

SEQ ID NO: 139825 - DNA, 603 bp, Homo sapiens
agcccagtggcttcttatgtgtgtatatgtgtgtaacaagaattccttttacaacacgaatgacatcgccctttcctacagtctcctgcaaaagatttctatttgcaattgtttttaacggctttttaaaacgccatggtaactaccaccaaagcatttcaaagagaaaaagagaggaaagtacacaagaaaatgtgtccctattcaattaggaaaactgattaattaattaatcagctaacagcattttaagaatagtctcccatgataacaactttctccccacctaagagcttaaaaatcagtcataattaaaattaagagccagggctgctatctacagtaaggctccatgtctctaaaagcagtaagctaarttctagtttactgggattggattgcaaggggcgcagaaaggtaatttgcacactgaaggggaacaggaaaacagtagttctcgtgaaaggaaaagggccaagtgacttttatttacaattgccaagagagaggccattattgaccatatgtgccacaattgccctcttatcgcgggctggccatcatgtcctttgggagctgttaatgaactgggtaattgagctg

SEQ ID NO: 139826 - DNA, 603 bp, Homo sapiens
agcccagtggcttcttatgtgtgtatatgtgtgtaacaagaattccttttacaacacgaatgacatcgccctttcctacagtctcctgcaaaagatttctatttgcaattgtttttaacggctttttaaaacgccatggtaactaccaccaaagcatttcaaagagaaaaagagaggaaagtacacaagaaaatgtgtccctattcaattaggaaaactgattaattaattaatcagctaacagcattttaagaatagtctcccatgataacaactttctccccacctaagagcttaaaaatcagtcataattaaaattaagagccagggctgctatctacagtaaggctccatgtctctaaaagcagtaagctaaattctagtttactgggattggattgcaaggggcgcagaaaggtaatttgcacactgaaggggaacaggaaaacagtagttctcgtgaaaggaaaagggccaagtgacttttatttacaattgccaagagagaggccattattgaccatatgtgccacaattgccctcttatckcgggctggccatcatgtcctttgggagctgttaatgaactgggtaattgagctg

SEQ ID NO: 139827 - DNA, 389 bp, Homo sapiens
tcatgcttgggatacctactgtgcaagaagtacttccctagaggccgtgaagaggggataatgaatgagaagagagtgtgattcctccccttcatcgtgcaaaagtataagtctcctgtctacaaggtggtcsttcagattagtgtcacatccaaccaatggacctaggggaggaattggcaaaccagtcaaaatgactaaatagatgatgtaaatgatttatcaccagccttaggtagggacagctgctttttgaaattttgtctttttgtgtctaagcaacagttgccattgaacttagaagaggtgatatcaaaggtttgggcaaaggaagtttcatgtcatggtgatgtgtcctactgcttaggagagaggccaaactacttcaa

SEQ ID NO: 139828 - DNA, 556 bp, Homo sapiens
gcttgggatacctactgtgcaagaagtacttccctagaggccgtgaagaggggataatgaatgagaagagagtgtgattcctccccttcatcgtgcaaaagtataagtctcctgtctacaaggtggtccttcagattagtgtcacatccaaccaatggacctaggggaggaattggcaaaccagtcaaaatgactaaatagatgatgtaaatgatttatcaccagccttaggtagggacagctgctttttgaaattttgtctttttgtgtctaagcaacagttgccattgaacttagaagaggtgatatcaaaggtttgggcaaaggaagtttcatgtcrtggtgatgtgtcctactgcttaggagagaggccaaactacttcaaatacccagatggccccttcctctctgatttgggacaagcttattaaccctctgaatccattttctcatcagcaaagtagggtttaaaacatctgctccaaagactggtttttaaggaaaggagatagtttgcaaaacataacacaattcctgatacacaatttatcctcag

SEQ ID NO: 139829 - DNA, 454 bp, Homo sapiens
ataatttcaacacagatatatattttacaatgtctatgctttgcttaaatgtctccaggtgccttgctcttagcagggacacagtaaacatccgctgcataaatggctcagcattttttttttttgaccttcagataagtttctgttccttcacactcacttactattgaaatttacyattatgtttttatgctgtaacaattcaagatgtatgttgttttcatgtcttttaactcatagagccaaatatgaagggccaattaataatgtacttttatgttttaagcatagtactatgctagaatgattatttttctaccccagcagctacaaaaaatttgaaactccatagctagtgaatgctcaaaaaataattatttgctgttttgccatgctaattattgagacttgttctcagggactttcactgagatagtgcctgttttccagacgt

SEQ ID NO: 139830 - DNA, 456 bp, Homo sapiens
ttttcatttttgtgagtttgggtttttgtttggtcagttatattcagggggttcttattctcccctaaatactattaagtcatagatataaaatccaacccacttctttttaaagactttggataaaacgctgagatgggagagatcccttgaccccttcctgggacttgcaacactggtgtggctcattttactcagctaccaccctcgaaccccttgtggaaaggggagcacacaggtgagcaggtgcaagagccagggcaagtgcctttggccaccagccagcccacagcagcatctaggagttgcccgcgacctctggagccccagaaagcatgtgttacaaacaatgctcttttagctttcccatccacggatggcttaagtgctgaacagctcagtgaagagtcagtgtgacagcctttttgrgtccccacacccaatgcatctcgaatt

SEQ ID NO: 139831 - DNA, 620 bp, Homo sapiens
cttttgtttctctgggaaagtcttgatttctcattcatgtttgaagaatattttcaccaggtatactagtctagggtaaaaggttttttccttcaacactttaaaagtgtcataccattctctcctgacctgtaaggtttccactgaaaagtctgctgccagatgtattggagctcaattgtatgttatttgtttcctttctcttgctgattttaggatcctttctttatccttgaccttcaggagtctgattatttgatgcctgaggtagtcttctttgggttatatctgcttgctgttctataaccttcttatacttgaatgttgatatcttttctaggtttgggaagttctctgatattatccctttgaataaacttcctactgctttctccttctctaccacctctttaaggccaatatctcttagagtatcccttttgagtctactttctagatcttgtaggcatgcttcattgttttttattcttttttctgtctcttctgactccgttttcaaatcacctcttttcaagctaattctctgttctgtttgatcagttctactattgagactctgayggcttcttcagcatgtcagttgtatttttcagctctac

SEQ ID NO: 139832 - DNA, 488 bp, Homo sapiens
agcatggtggctaccagggctaaggaggtggggcaaatcgggagacattgctcaatgggtataaatctgtatttgtgcaatatgaataagttcttgagatctaatgtacagcatggagactataggtaataatactgtaacatggacttgaacttttctaggagagtggatcttaagtgttctccccacacacacaaaaagaggtaactatgtgaagagatagatatgttattagcttgactgtcataaccagttcactgagtcaaggtatatcamaaatcacactgtattctttagattacacaatttcagtaaaaaaataaattggtaatataattagatgacatatattaacctgaaggacatatagcgagacagatctgccctgtactttagaaaggggagtggaaatcctcattctagcaaggggagtggaggtttccatctgggttttgaaacgaccatgagtactgagatgtgggtttagg

SEQ ID NO: 139833 - DNA, 564 bp, Homo sapiens
agattaaaacatttgagagccactgccctagagaaacaatattaagctcctctgaaaataccagaagaaaaagcttctcctgctctactccagagatgtgtcccccttccattcaacacaactatgctaggaaccttcagttcctaggcaaaktcggctcatgggggagatggcatgcagcacaggggtaggaatgggggacgtttccacagtaagggggaaattcccaaagcctcttatataaatatgaatgaaaggggaaagttgaaagcagacttaaaatttccataggcataaaaggcatcagaagatcagagcttaacttctgcagtttcttccaaagattctgggtgggacacattgtttcattgcagatgaatatatccctagcttctaacacagtgcccggcacacagtagcttcctgatatctgtttgtttggtgatgaatagacagacagatggctgaatggatgggtaaataaatggatacatggaaaaataaatagatggatggagagacatcctggaagagataaaagccaataagcagaggagttttggc

SEQ ID NO: 139834 - DNA, 564 bp, Homo sapiens
agattaaaacatttgagagccactgccctagagaaacaatattaagctcctctgaaaataccagaagaaaaagcttctcctgctctactccagagatgtgtcccccttccattcaacacaactatgctaggaaccttcagttcctaggcaaagtcggctcatgggggagatggcatgcagcacaggggtaggaatgggggacgtttccacagtaaggrggaaattcccaaagcctcttatataaatatgaatgaaaggggaaagttgaaagcagacttaaaatttccataggcataaaaggcatcagaagatcagagcttaacttctgcagtttcttccaaagattctgggtgggacacattgtttcattgcagatgaatatatccctagcttctaacacagtgcccggcacacagtagcttcctgatatctgtttgtttggtgatgaatagacagacagatggctgaatggatgggtaaataaatggatacatggaaaaataaatagatggatggagagacatcctggaagagataaaagccaataagcagaggagttttggc

SEQ ID NO: 139835 - DNA, 564 bp, Homo sapiens
agattaaaacatttgagagccactgccctagagaaacaatattaagctcctctgaaaataccagaagaaaaagcttctcctgctctactccagagatgtgtcccccttccattcaacacaactatgctaggaaccttcagttcctaggcaaagtcggctcatgggggagatggcatgcagcacaggggtaggaatgggggacgtttccacagtaagggggaaattcccaaagcctcttatataaatatgaatgaaaggggaaagttgaaagcagacttaaaatttccataggcataaaaggcatcagaagatcagagcttaacttctgcagtttcttccaaagattctgggtgggacacattgtttcattgcagatgaatatatycctagcttctaacacagtgcccggcacacagtagcttcctgatatctgtttgtttggtgatgaatagacagacagatggctgaatggatgggtaaataaatggatacatggaaaaataaatagatggatggagagacatcctggaagagataaaagccaataagcagaggagttttggc

SEQ ID NO: 139836 - DNA, 558 bp, Homo sapiens
gatgagtaattgtgaagaataaaacacttttcttataagaagtcacaaaaataaccatctctgctatcacatcatttcccttccttcattccactataatttatgaaaatgatttaaaactttggacctcagtgaatactgcraaatccggtctgcaattagttttgtatgtttaagatctccctcatcagagcaaatcataattctttggaagtaaagccctgaaaaagatatgaatttgcaagttttcatttttagagaaattgacttataagagaaacggcctttaatatgattttctaagtagaaaactccctaaaataaactttggggaaattggcacaaattcacgttctcaacacttatggtccacttgtattactgtgaggtgccagggactgtgctggacgctttcacacgctttaggccatcagtcctcgggtaccaacttggtgtaatctaatctgcaacgttgagaataaagcaaagttcaggtctgtgagataattcttaagaagtgacttcaagtcatgatctttctaccattcttgcttatac

SEQ ID NO: 139837 - DNA, 558 bp, Homo sapiens
gatgagtaattgtgaagaataaaacacttttcttataagaagtcacaaaaataaccatctctgctatcacatcatttcccttccttcattccactataatttatgaaaatgatttaaaactttggacctcagtgaatactgcgaaatccggtctgcaattagttttgtatgtttaagatctccctcatcagagcaaatcataattctttggaagtaaagccctgaaaaagatatgaatttgcaagttttcatttttagagaaattgacttataagagaaacggcctttaatatgattttctaagtagaaaactccctaaaataaactttggggaaattggcacaaattcacgtwctcaacacttatggtccacttgtattactgtgaggtgccagggactgtgctggacgctttcacacgctttaggccatcagtcctcgggtaccaacttggtgtaatctaatctgcaacgttgagaataaagcaaagttcaggtctgtgagataattcttaagaagtgacttcaagtcatgatctttctaccattcttgcttatac

SEQ ID NO: 139838 - DNA, 577 bp, Homo sapiens
attgaaaggatctggtctacaaacatgggtgaggctaataccaaaatggagttgcctatcgcacacatttatcagtcaaaagttaagtttgtgctttgaaatctgaaaatgtccctgagtcaaatagtcatgtccaattggcatgtacctgtctttgaacattttttgttcaaatgctgttccccctgttccctttcccctagataacctccactcctcttctttagtaagtcttccctgccccacctcccaagcctgaaytgaatgactatcaacttctgcctaacatggccctagaactgaaaaaggatcatgtttgcggagtgaactgagtctgtcttgcctggtagactgtcatggacagtgaacgtggtgggttttactcatctctctccccagggcctaatgcagtgtcttgcaatgaataattactcaatacatgtttgtggaatgaatgaagggtataatactatcattgctagtcagcaatagcaccaatgcaagttcacaaacattctcaaatagaagtgctgaactatgtaacacagtgaaatatgcaagtgaaattactaagtta

SEQ ID NO: 139839 - DNA, 600 bp, Homo sapiens
ttgaaaacctgaataagattgtaggttgtatcaaggtcaatgtcttggttgtgatattgtaatatagttttttgtgaactgttacatttaggggaaactgattaaaggatacatgagatccctcggtattattgctcacaactacatgtgaatttctgatcataccaattaattttttattacaaataaaaaatgtacatatggttagtgacggctaagtggaataaaacttatatttccaagacagcatataattcaagaaaaatggttcaggaagcctcagcactgtatcttagtgctccagaaaaattggccctctgatttggaaacctaktatctattttgtttaaaaaaatagaaactaaatgttcaaacttgcccttctctaatcccgtcaatttgattcacagtagataccatcagagactaacaagtgagttaattgtaaattcccagtattaagattttcatgaaaaaaaggaactagtaactttttagcttcttttaaatatcagtcatcctaaatacataatcatatcaaaacctcatctgagaataaagctacttttcaatacaatcttaagagatagtcaaataaaa

SEQ ID NO: 139840 - DNA, 600 bp, Homo sapiens
ttgaaaacctgaataagattgtaggttgtatcaaggtcaatgtcttggttgtgatattgtaatatagttttttgtgaactgttacatttaggggaaactgattaaaggatacatgagatccctcggtattattgctcacaactacatgtgaatttctgatcataccaattaattttttattacaaataaaaaatgtacatatggttagtgacggctaagtggaataaaacttatatttccaagacagcatataattcaagaaaaatggttcaggaagcctcagcactgtatcttagtgctccagaaaaattggccctctgatttggaaacctattatctattttgtttaaaaaaatagaaactaaatgttcaaacttgcccttctctaatcccgtcaatttgattcacagtagataccatcagagactaacargtgagttaattgtaaattcccagtattaagattttcatgaaaaaaaggaactagtaactttttagcttcttttaaatatcagtcatcctaaatacataatcatatcaaaacctcatctgagaataaagctacttttcaatacaatcttaagagatagtcaaataaaa

SEQ ID NO: 139841 - DNA, 441 bp, Homo sapiens
aattcagaaacaatagcagcacacattcttcttagaaaagcaagacaaagaaaaaaaaaaggaaatttagcttaccaggagataaatttaaaacctgtgaaggaagggactggtagtaagaattaaattatttcaattcataacaaktgttaaaattatggctacaaaagacaacgtaaatattctaaatcctgacaatatagaaataataatttgataaaattggaaagtggaagtgatatacatttaagttttcaagattaaaataatcatatttacatgtataatgctacagattagttgaacagatcatactctttccacattaccagaaaaaaagtttttaaacaacaaaacaagtattatacaaacaagtattaaacaaaacaagtattatacaaacaaaattacaaatcacattatataaaagacaaaaacact

SEQ ID NO: 139842 - DNA, 592 bp, Homo sapiens
aaataatttatgctttgtaatgctttgattattctcattatgtactcactgttctcactacactcactataaaagatgtctctgttatacgaaagtgacagagtatttaatgtggctggtttagcctatgcctaatccactgaatctgtgaaaagcagtgaaactagtaaaactggctatttaactagttaggtgttggactgaatacattcagtcaaaatgtgaggtgatcttacctgaatagaaagaatcatattcccaactaatagtttattactctttttcatgttaagtctttggttaaaaatggacacacttaattggrtattttagtatttccctatagacagatgattgtattactcagatattttatttattcatccactatctttcacttttttataagaactatttttcttaatgcttttctatgcagaaactttttctcttttattttcttactgtattccccatactgaggttccttattctctattctttaatatcttgtttcaacttacatttttttgcatgattgcagtgtgtcatatatttttgcttctaatcctgattattttattttatttac

SEQ ID NO: 139843 - DNA, 586 bp, Homo sapiens
ctattctgactggtataagatgatatctcattgtggttttaatttgcatttctctgatgattagtgatgttaagcattttttcatatgcttgttggccatttgtataaaattgccaaactatttcccagaacaactgtgttactatgtagtatcactggcagtacagaagagtgccagttgctccacttccctgccaaatttgatgttttcttttacaatttttgttttaattctagtgggtatatagtagtatcrcattgtggctttagtttgcattttctaaaggcctatcatggcaaatatcttatatgttcctaattggcatttatatttcattttataaagtggctgtttagttctttgttcatttttgttgggttgtaagagctttttaaaatctatattctatatgagcttttaaaaatctatattctagattaagtttttaaagcaggtatatcttttacaaatattttatattagtctatgactagtcttttcgtttccttaacagtgtctttcaaagaacataaatgtttagctttgataaagtacaaattatttttttcatttacttgttttatt

SEQ ID NO: 139844 - DNA, 535 bp, Homo sapiens
tgcagtcactaagttcttttcaattcacattaattaagatataaaatttaacagagtcaaaatgctttcaatatagattataaccaaacacctttgtataacccctggaaggtaaattcacatgaatctgtttagcatgtcaggggaactaaaggatgaaaatagtgactaaaatcaacacataagaaacatgacacctaatgttgtggctatgttgaaargcattctgatatggtttggctgtgtccccacctaaatctcatcttgaattataatccccatattccccaccagtctaaggaagtgggaggtgattggatcatgagggccatttcctcatgctgttctcatgataatgagtgagttctcacaagatctgatggttttataaggggttcttcccccttcactccttgtatttctctctctcctgctgccatgtgaaaaggtccaagcttgcttcccttttgtcttccaccatgattgtgagtttcctgaggcctatccagccgtgtggaactgtcagtcaattaaa

SEQ ID NO: 139845 - DNA, 626 bp, Homo sapiens
ctaaataaaaatatacttgttaaggttgcctaagggtggaagggacagtgagatattctctgtaggcatcttgcagtgcccacatattgccaacacgctccttacctctgtctgttttcttgttgactgactagtgaccactctgacattttctatgctttwgcctcacagggttctgcttacctgtcaaaaattgtcttccagtcactgtgagtaaaaggccagggataaattatttaaggaaaaatacttacaaaaatgcaaccatgactgtaacccaaaaataaaaacaattaggctattggagcagtcaaaagttactccatgtctttgcaaaaggtcttaatttttaaggttaaaattatcaaagagcaaatgtggaattatttttaaaccatatgattgttaataaaacattcaagtgctgatttatgagagtgccaccctgagataaatataaggatttaacacagatgaaatcagtatagccagaataagaggctgtttggtatagcgggaagacataaccaaaggactcccaaaaatatattatatttataataatatacaaatatatatttataggtatacatttatatttaaccataaatatttaaatatatgta

SEQ ID NO: 139846 - DNA, 520 bp, Homo sapiens
aatcatgggaccctaagagatcatttccatgtggggatgggatggtgttttataccagcatcagtaatacatggaatgatagagtataaatcagggagtaaggatactccaatattattcaaaggtgaaaactatgctaatgagatggaataacaaataaatatagaagtgctcaaaaaaagatttaatgcacatttttaatgtcaatccagttttttaacctaatataatgttcactgagtatccagtayttcctaattgggcctgattataattatatataaacaaaacataaaattttgaggaaacaattattcttttaaattacatatattatttaatatgtatatagtaaaatatatacattatgtattaaaataattattttttatatatgtaatgagtacagacctgcctttaaatatgttgggagctcacattttatatatgcgtgtatctgcatgtgtttgtgtatctgtgcatattctctcatatgtatatttatggattttgcaggaat

SEQ ID NO: 139847 - DNA, 356 bp, Homo sapiens
atctccctatttgatttaaaatgttgttgctgtatatgaagttatatttccgttcagcttagcagaaagttatcaattcgctaggcattctcttagagtacatatggtataaaggtgaatagacatacattgttttgaggaaatagataaatttataattctaaaatattgtagggctttatcacatgatattgtatttaaaaatggtgtctgagattcagatatgcacaaattcctacgggagcwtagagaacaggcttttagttcaaccaaagaggtcaggtgaacaataattttattattttatttcatcctcttagatgaaataaaatattcatattattcacacctgtcaa

SEQ ID NO: 139848 - DNA, 587 bp, Homo sapiens
tattttaaaaacagccacttataataaagcttgaaactggtcacagtgatggtcatatttataacacggaaattggcaaacgaaaatggaggcttccctcccccacctgcccagagagctggttctaaaacatttaccatccaagaccaaagacctagatccttcggtgatagcttacaggttttatatatggtttccactcatacctaatctaaatagtaatctggcactttcaatagatttgaggtgaaaatactcacattaaaaatgcaaatctaaataatttgttaggctaattgaagcatacccaccatgggttgacattgtgatacagactttgagtacattttttatatttggtctttcagatatttctgatcttctgggaagtttactgtaactcttcttgtaaatgtttactcttgattttggctattctttatataccctaattttactgatttaaagtgtcctttatttcaatttctttaatattcttttaatgtctaatgagractactgctaaaagtcaatattgttaatgggaaaatctaacagaatgtaactggagggtttcattaagttaa

SEQ ID NO: 139849 - DNA, 583 bp, Homo sapiens
aatagatcttccaaacctagagaaaaatctctaggtttatactttcagattatttcttcttgcttattaacatccttttctgtcagattgaagaactccctttagcatttcttgtaggacaggtctagtgttgatgaaatctctcagcttttgttcatctgggaaggtctttatttcttcttcatgcttaaaagatattctctctaattatactactctagggtaaaatattttttctttcagccctttaaatatgtgatgacactctctccyggcctgtaagttctccactggaaggtctgctgccagacgtattggagctccattgtatgttatttgtttcttttctcttgttgcttttaggatcttttctttatccttgacctttgggactttgagtattaaatgcctgaggtagtcttctgtgggttaaatttgcttggtgtttcataatcttcatgtactagaatgttgatatctttctctaggtttggaagttctctgatattatccctttgaataaactttctacccctatctttttgtctacctcctttttaagtccaataaattttacatttgc

SEQ ID NO: 139850 - DNA, 558 bp, Homo sapiens
agaggtacaacatacttgccaaggacacacagcagctagatattagagccatgattgaaacccaggcattttggttctggagaccacatgcttaagcattatgctttatcactttaagaaatttttcatgagagtcagagctctcagtctaatgggaccacagttgtgaaagaattaacaataataacacacatgagctatatagtagatgctgtagcctgaaggatatatgcttcaaaatgctgggattcctcagctgtcaattcttttcaaaattgctccaaatgaaaagaatcaccttgcccaaagtcagacccctctttaraatagcccacagaccatgaatgattgatagggaggactaatctgagggcccttcatgttcacaacattccatggagctcactgaggtcttctttgaaactgcatcacagcccagtatttccctctgctcaatcctgcttccttcccttgtcttccataggtgttaatccccagaacgatccctaataaacagcctgcattttaatcgccatctctgataggacagcctgattc

SEQ ID NO: 139851 - DNA, 542 bp, Homo sapiens
aggaattcaccaccatctaacccaagtggaaaacaacgtaaaacaaaccaagaaataataataaatcttttcatattaatataataaatacrcaagtatacttgatgtcagaattgtttataggatgatttcctccaacgtttgctgaacaactggaaatttcagccaaacagacaaattgcaaaactcaaagcttagtggaaatgtggctagacagaaacaagatcagatgacaacacagattaagtacaaagcaaagatctgctatgtttactgagtgtgttagaggaaaaataaatagctgtttatttggaacaaagatgcaagaagacttaggccaaaaaatgtaattctaattgttagcaggcaacaaggtgaagggttaatgagctcaaggcttgaatcctatctctaaccacttcctagctgggtgacttgcaggaagttgcgttcatttagcttgagtttcttcatcaattaaataaggcaaatgttaatatctacctgataggtgttagaatgaaattctctttggtagaaaa

SEQ ID NO: 139852 - DNA, 564 bp, Homo sapiens
gtcttaaacaaagtataaaaataggaaaagggtctctggtcactttatcaggttttccagccttgtctcccatctcatatctgaaatgcagcagcacttggtttctttgcagatcctggcaaaccaaataccagagtccagcctcccccactatcaatgaatgttaccgccaagaaaggtgaatgttactcaatatacctctctgcagaaagacagttatcttataggaattgagcagtaacctaaccccagaacgccttacttaggaaatatgcacttaatatatgttcagataagaaaaatatttaccagaggctcccaaatcccatttggggctatttctcctgagaatctccagaaaagkatattattttccctaaaagattgtgtgattgaatttatttcctccctgattcctctctatttctattacactgaattatttgcttacacaaaatatttggagggaaggaattctctgtaagaaaattacaaccaacactttcttaacttaccatccagtggtctggagatacaccgaaataagatatggatatgtcatta

SEQ ID NO: 139853 - DNA, 598 bp, Homo sapiens
catgtcttttacttatgccaagctgtcacactgtgtgcatgaactgagggatttagtttttcttccacagccccagagccagcaaatgactgaccttaaacctaaaactgtaggagtttggtcagggtggtgggaaaagttgtaagaaaaggttatagggaaagacacaaatcttcttggaagaatgggaggttttgcaaaagcttcaaaggagaatttagctgaaggcagttaaattctcttaagagcaagggttagataacaagggaatgtaaagaaacttatctagataaattgttctacttatatctctggaaaccaacctttgatcattcatgtgcaggactgctctctacttgcrggggttgacaatgttaattacccacaaattgtgtttgctccaagcccttgtcattaaatctgtactaaataaattcaagtggggccagcttagggggctgcactccttttggctgctgcactctctcattggcagtgctgagtggtgcagtcccctagctcactgtcaggaaaaatacctgtgtcagggaactcctttcattcatcgcttggccagagtctgcgggacagatcagca

SEQ ID NO: 139854 - DNA, 357 bp, Homo sapiens
gggcactgctgggactggaccataaaatccttccacattatgtcagtgccycttttactccattggcagctggatattgtcatccagagagatggatgacttagaagccacgtgcagaagatggcaaccttccatcagcatggatccttgagtgactgtggagtgcaacgccttctaccagttagaactactgtgattgacaatcacatttcatttgtattaagctactgatttggggggtttatctccttcagctcccacattagtacaactcatgcagaatggagagtgactgtgaacacatgtggcacaggctggtgaaacctaggactttatagatgaatttctgattatact

SEQ ID NO: 139855 - DNA, 357 bp, Homo sapiens
gggcactgctgggactggaccataaaatccttccacattatgtcagtgcctcttttacyccattggcagctggatattgtcatccagagagatggatgacttagaagccacgtgcagaagatggcaaccttccatcagcatggatccttgagtgactgtggagtgcaacgccttctaccagttagaactactgtgattgacaatcacatttcatttgtattaagctactgatttggggggtttatctccttcagctcccacattagtacaactcatgcagaatggagagtgactgtgaacacatgtggcacaggctggtgaaacctaggactttatagatgaatttctgattatact

SEQ ID NO: 139856 - DNA, 528 bp, Homo sapiens
gactgtggagtgcaacgccttctaccagttagaactactgtgattgacaatcacatttcatttgtattaagctactgatttggggggtttatctccttcagctcccacattagtacaactcatgcagaatggagagtgactgtgaacacaygtggcacaggctggtgaaacctaggactttatagatgaatttctgattatactctcctttcttgcaaaaagcttttttcaaattaaatgttataatataaatgtgaatacttaaatgtctttctaatgaaatgatgactaactgtagaaaagaaaatgtaggaatgtatacatccttgataagagtgtgaaactgacacaggcaatgtagagagtcttgcttacggataatgaacaaaagaacatacctgggtaaaagaaatgagaggttactgataacaaaactaatatctatattgcacaatataaaacattattttatacttaggattatatttgatttttgcaaatccctgtgaaatagctattattatcaga

SEQ ID NO: 139857 - DNA, 528 bp, Homo sapiens
gactgtggagtgcaacgccttctaccagttagaactactgtgattgacaatcacatttcatttgtattaagctactgatttggggggtttatctccttcagctcccacattagtacaactcatgcagaatggagagtgactgtgaacacatrtggcacaggctggtgaaacctaggactttatagatgaatttctgattatactctcctttcttgcaaaaagcttttttcaaattaaatgttataatataaatgtgaatacttaaatgtctttctaatgaaatgatgactaactgtagaaaagaaaatgtaggaatgtatacatccttgataagagtgtgaaactgacacaggcaatgtagagagtcttgcttacggataatgaacaaaagaacatacctgggtaaaagaaatgagaggttactgataacaaaactaatatctatattgcacaatataaaacattattttatacttaggattatatttgatttttgcaaatccctgtgaaatagctattattatcaga

SEQ ID NO: 139858 - DNA, 528 bp, Homo sapiens
gactgtggagtgcaacgccttctaccagttagaactactgtgattgacaatcacatttcatttgtattaagctactgatttggggggtttatctccttcagctcccacattagtacaactcatgcagaatggagagtgactgtgaacacatgtggcacaggctggtgaaacctaggactttatagatgaatttctgattatactctcctttcttgcaaaaagcttttttcaaattaaatgttataatataaatgtgaatacttaaatgtctttctaatgaaatgatgactaactgtagaaaagaaaatgtaggaatgtatacatccttgataagagtgtgaaactgacacaggcaatgtagagagtcttgcttacggataatgaacaaaagaacatacctgggtaaaagaaatgagaggttactgataacaaaactaatatytatattgcacaatataaaacattattttatacttaggattatatttgatttttgcaaatccctgtgaaatagctattattatcaga

SEQ ID NO: 139859 - DNA, 512 bp, Homo sapiens
ttctttctaccgccctatgctaccacccagtgcagatgtaagaacaaaacctactagtaacctgctattgactgtttagaactttagcaactttaattatccaaaacatagctgtgagaccaaaaagaggaaaacagtttgcaaaagcccacatttattacaccatgaaagagccaggtctgtgaaatgttgcctagaatttgtgtactaaactcagcaaaatgaattaacaaactcagtgacctcattttctcctaaatttcagtaaatggaagatttaaaagatgagaaaaataaagacagaaaatttcagttgacagggtagaggacccattgaaagattggatgtctatgtgtggtatgtaaaggcaggtcctaygagtgttaggccggcctaggcacgtgttctctcttttttgttgtttgattctcaatttatgacaaatgaagaatgaggcctttacctggtctggatcgacttgttatggagctcacgtgaaatgaaaatgatt

SEQ ID NO: 139860 - DNA, 490 bp, Homo sapiens
aacaccagcataagcaagatagtgaggccctatctgtataaaaagtatgaaaactagccagctgtggctgtgtgtgcctatattcccagcagctcaggaggctgagacaagagaatcccttgaacccaagaatttgaggttacagtgagctgattgygaactgcactccaatctgggaaccagagtgagaacctgtctcaaaaaaagaaaaaaaaaaaaaaaaaaagaaagaaagaaaaagaaaagaaaagaagaaaatatgtataaatgaatgttttaaattggaacaattactatagcatcaaaacgcacatttgatgagatgtgaaaatttattcttaagtatttatccatttctggttttgtagcaaaggcattattatacttctataacttgtctaatagaatcagatagaatcaagcaaagttggcagagcctaggcatctacctaaaagaaatgctctctcccatttccgtgaacacattaac

SEQ ID NO: 139861 - DNA, 256 bp, Homo sapiens
gatacacccactgctaaccacccccctcccaatacatacacaaacttgctatttcaccagtcttctacctctaaccaaatgctaattcaatttgtttagtagttcagccaaaaactttggggttatccttgattcttctctytctttaacaacccacacacaattgaacaaaatctatcagctccctgtttgaaaaatacccagaatcataatttccacctgctatctctctgatccaaaccactactgtagcctg

SEQ ID NO: 139862 - DNA, 591 bp, Homo sapiens
acttgccaggcactgtggtagatgctgaggtaaaaaaaaattacatatgatatattctttgtctttaaagaactggcgatctggtgggagatgtggacaattcatgattacaatcttttgcctgagtattctgctagaggccggtacaatacgctctggaggaacacaaaagaagcatctagctctgtctgggtgccmggaaggggaggagtgtggctgggttaggaaaggctttctgagaaagctgtccatatggtaatagcaagcatttactaaaatgttcactgttctaaccactgtactaagcactttatctcactacgttctcccaagagctccctagaatagaataattattattctcactgacagataaaaaaattcatctacagggagaaactgagagactttttccaactgatacaactaataagtagtggagtctactaaattgtgggatgcataccagcaaataacatctatgtgagcacggatttctgtttagtgatatgtcctcagcaccaagaataatgtctatttaataaatacaggagtgagtgaatgagctatgatttgaatccaagtctatta

SEQ ID NO: 139863 - DNA, 591 bp, Homo sapiens
acttgccaggcactgtggtagatgctgaggtaaaaaaaaattacatatgatatattctttgtctttaaagaactggcgatctggtgggagatgtggacaattcatgattacaatcttttgcctgagtattctgctagaggccggtacaatacgctctggaggaacacaaaagaagcatctagctctgtctgggtgccaggaaggggaggrgtgtggctgggttaggaaaggctttctgagaaagctgtccatatggtaatagcaagcatttactaaaatgttcactgttctaaccactgtactaagcactttatctcactacgttctcccaagagctccctagaatagaataattattattctcactgacagataaaaaaattcatctacagggagaaactgagagactttttccaactgatacaactaataagtagtggagtctactaaattgtgggatgcataccagcaaataacatctatgtgagcacggatttctgtttagtgatatgtcctcagcaccaagaataatgtctatttaataaatacaggagtgagtgaatgagctatgatttgaatccaagtctatta

SEQ ID NO: 139864 - DNA, 591 bp, Homo sapiens
acttgccaggcactgtggtagatgctgaggtaaaaaaaaattacatatgatatattctttgtctttaaagaactggcgatctggtgggagatgtggacaattcatgattacaatcttttgcctgagtattctgctagaggccggtacaatacgctctggaggaacacaaaagaagcatctagctctgtctgggtgccaggaaggggaggagtgkggctgggttaggaaaggctttctgagaaagctgtccatatggtaatagcaagcatttactaaaatgttcactgttctaaccactgtactaagcactttatctcactacgttctcccaagagctccctagaatagaataattattattctcactgacagataaaaaaattcatctacagggagaaactgagagactttttccaactgatacaactaataagtagtggagtctactaaattgtgggatgcataccagcaaataacatctatgtgagcacggatttctgtttagtgatatgtcctcagcaccaagaataatgtctatttaataaatacaggagtgagtgaatgagctatgatttgaatccaagtctatta

SEQ ID NO: 139865 - DNA, 591 bp, Homo sapiens
acttgccaggcactgtggtagatgctgaggtaaaaaaaaattacatatgatatattctttgtctttaaagaactggcgatctggtgggagatgtggacaattcatgattacaatcttttgcctgagtattctgctagaggccggtacaatacgctctggaggaacacaaaagaagcatctagctctgtctgggtgccaggaaggggaggagtgtggctgggttaggaaaggctttctgagaaagctgtccatatggtaatagcaagcatttactaaaatgttcactgttctaaccactgtactaagcactttatctcactacgttctcccaagagctccctagaatagaataattattattctcactgacagataaaaaaattcatctacagggagaaactgagagactttttccaactgatacaactaataagtagtggagtctactaaattgygggatgcataccagcaaataacatctatgtgagcacggatttctgtttagtgatatgtcctcagcaccaagaataatgtctatttaataaatacaggagtgagtgaatgagctatgatttgaatccaagtctatta

SEQ ID NO: 139866 - DNA, 488 bp, Homo sapiens
gaaaacaggaggaaggggaaaaaagacataaggcaatacatctatgcaatagaaaacaaagcagcataataaagagtcaataggctgggtgcggcggctcatgcctgtaatcctagcacttttgcaggccgaggtgggtggatcacctgaggttgggagttcaagaccagcctgaccaacatggagaaaccccatctctactaaaaatacaaaattagccaggtgtggtggtgcgtgtctgtaatcccagctactctactcaggaggctgaggcaggagaactgcttgaactcgggaggcaaaggttgtggtaagccaagatcatgccattgtactccagcctgggcaacaagagcragactccatctccaaaaaaaaaaaaaagaaagaaagaaagaaaaaagaaaaaagtcaataaagcctgaagaagttggttctttcaaaaaaagaaataaaataaaacctttgaagactagctgagaagaaaa

SEQ ID NO: 139867 - DNA, 488 bp, Homo sapiens
gaaaacaggaggaaggggaaaaaagacataaggcaatacatctatgcaatagaaaacaaagcagcataataaagagtcaataggctgggtgcggcggctcatgcctgtaatcctagcacttttgcaggccgaggtgggtggatcacctgaggttgggagttcaagaccagcctgaccaacatggagaaaccccatctctactaaaaatacaaaattagccaggtgtggtggtgcgtgtctgtaatcccagctactctactcaggaggctgaggcaggagaactgcttgaactcgggaggcaaaggttgtggtaagccaagatcatgccattgtactccagcctgggcaacaagagcgagactccatctcmaaaaaaaaaaaaaagaaagaaagaaagaaaaaagaaaaaagtcaataaagcctgaagaagttggttctttcaaaaaaagaaataaaataaaacctttgaagactagctgagaagaaaa

SEQ ID NO: 139868 - DNA, 611 bp, Homo sapiens
caacctcctgttaacatggctactgctcccagtaggcagcatttttatccctcctaagagtcccagataggaaacaccaatgagtttaatttgaatgcaacatcaaattaatagtaatagcttccagaaatgctgttagaagggaatctagaacagagccttggcacagggataaccaatgtcttatcagcccacagtgtttgctataggtgtgagagaggtagaggaaacaggcatgccaggcatttttcattcctggaaagcattttccaattcaaagtcacaatatataaatgagccacagtgtctagctgccctgcaatagaactttcagtgcggtaccatgrcttatcattggaatatgaagagctagtggtacctatgtaacagggatagaaggggtgcgttagttagtaggtactaagtaatcctacagaatagcaaaactccctacttttatcttctaccatcattagatgtttaagttgtactcaaattgatttccatggtttttgtacattgaccagattaaatcccttacattcagacaaattaatcatttgtatagtacagggtttctcaaagagcatttccccaagcatcaagaatca

SEQ ID NO: 139869 - DNA, 592 bp, Homo sapiens
tttcccagcctgcacagaaaaagaacataaaatgtgaaaccaggtcttaagtaacagctggggctgaagtatgtaccatcaaactgattatactagtgcaataagtgaaaacagctaacatcgatccactgcttaccaggttcccacactaagtctgacttcgtcagcctatcctagcttcccagccaagygcatcttcagcattttcttgaactactcgtgttcctcacgttcctttagggaataaaattcctcatatttgtgagagattaataaacttaattaccaaacaccaagaataaaccttcacattttaaaaattaactcataagacacgttaagaattaagattacataaatttcccattaatgtttgttttccatttccttaatgattttgttttctgctagggtttactaacctacaagcaatagtaggcagtaaaagtttaagaaagttttatttgaaaaaaaattaattggtgaaattccacaactaatgacaaaaacttttttggcttagaaaaatggccttattatttactttttcttcagaatctcatttcacctcacagatcactgatgttatata

SEQ ID NO: 139870 - DNA, 592 bp, Homo sapiens
tttcccagcctgcacagaaaaagaacataaaatgtgaaaccaggtcttaagtaacagctggggctgaagtatgtaccatcaaactgattatactagtgcaataagtgaaaacagctaacatcgatccactgcttaccaggttcccacactaagtctgacttcgtcagcctatcctagcttcccagccaagcgcatcttcagcattttcttgaactactcgtgttcctcacgttcctttagggaataaaattcctcatatttgtgagagattaataaacttaattacyaaacaccaagaataaaccttcacattttaaaaattaactcataagacacgttaagaattaagattacataaatttcccattaatgtttgttttccatttccttaatgattttgttttctgctagggtttactaacctacaagcaatagtaggcagtaaaagtttaagaaagttttatttgaaaaaaaattaattggtgaaattccacaactaatgacaaaaacttttttggcttagaaaaatggccttattatttactttttcttcagaatctcatttcacctcacagatcactgatgttatata

SEQ ID NO: 139871 - DNA, 601 bp, Homo sapiens
tcactgatgtttgtatttgaaaaatttgccccaatattggtagttctttcttgtattcattaagaattattgatgtatacctgctttccatacacacacataaactcttctatgtgttttataataacgaatttaataatctttgaagatatttttactgcatcctcaattcactgcactaattcatgcaattataaactgcaggaaggaggaaatacccccatcttgcgataaataaagcaaaatccttggcagaaccatgcccgcctgtccgcgccccgaccagccctcccgggcagccactcaccggtgtccgtcttcccagctccccgccatgtcgccaagtgaatccatcctgccgtccgtctccactttcrccagcccgtaccgcaagcgccgcctgcaggagcgctgaccctgcgccgagcccgaggccaggggaacccatgactacctcaacagcgtgtgggactccattcggtccacagggctggatggcctggggccgaggccaccccgaagcccccggcgaccccgccgtctgcgtcctattacccgaacactgcacgccgctgccctagggcgccctggagctggaccc

SEQ ID NO: 139872 - DNA, 601 bp, Homo sapiens
tcactgatgtttgtatttgaaaaatttgccccaatattggtagttctttcttgtattcattaagaattattgatgtatacctgctttccatacacacacataaactcttctatgtgttttataataacgaatttaataatctttgaagatatttttactgcatcctcaattcactgcactaattcatgcaattataaactgcaggaaggaggaaatacccccatcttgcgataaataaagcaaaatccttggcagaaccatgcccgcctgtccgcgccccgaccagccctcccgggcagccactcaccggtgtccgtcttcccagctccccgccatgtcgccaagtgaatccatcctgccgtccgtctccactttcgccagccmgtaccgcaagcgccgcctgcaggagcgctgaccctgcgccgagcccgaggccaggggaacccatgactacctcaacagcgtgtgggactccattcggtccacagggctggatggcctggggccgaggccaccccgaagcccccggcgaccccgccgtctgcgtcctattacccgaacactgcacgccgctgccctagggcgccctggagctggaccc

SEQ ID NO: 139873 - DNA, 601 bp, Homo sapiens
tcactgatgtttgtatttgaaaaatttgccccaatattggtagttctttcttgtattcattaagaattattgatgtatacctgctttccatacacacacataaactcttctatgtgttttataataacgaatttaataatctttgaagatatttttactgcatcctcaattcactgcactaattcatgcaattataaactgcaggaaggaggaaatacccccatcttgcgataaataaagcaaaatccttggcagaaccatgcccgcctgtccgcgccccgaccagccctcccgggcagccactcaccggtgtccgtcttcccagctccccgccatgtcgccaagtgaatccatcctgccgtccgtctccactttcgccagcccgtaccgcaagcgccgcctgcaggagcgctgaccctgcgccgagcccgaggccaggggaacccaygactacctcaacagcgtgtgggactccattcggtccacagggctggatggcctggggccgaggccaccccgaagcccccggcgaccccgccgtctgcgtcctattacccgaacactgcacgccgctgccctagggcgccctggagctggaccc

SEQ ID NO: 139874 - DNA, 601 bp, Homo sapiens
tcactgatgtttgtatttgaaaaatttgccccaatattggtagttctttcttgtattcattaagaattattgatgtatacctgctttccatacacacacataaactcttctatgtgttttataataacgaatttaataatctttgaagatatttttactgcatcctcaattcactgcactaattcatgcaattataaactgcaggaaggaggaaatacccccatcttgcgataaataaagcaaaatccttggcagaaccatgcccgcctgtccgcgccccgaccagccctcccgggcagccactcaccggtgtccgtcttcccagctccccgccatgtcgccaagtgaatccatcctgccgtccgtctccactttcgccagcccgtaccgcaagcgccgcctgcaggagcgctgaccctgcgccgagcccgaggccaggggaacccatractacctcaacagcgtgtgggactccattcggtccacagggctggatggcctggggccgaggccaccccgaagcccccggcgaccccgccgtctgcgtcctattacccgaacactgcacgccgctgccctagggcgccctggagctggaccc

SEQ ID NO: 139875 - DNA, 549 bp, Homo sapiens
ggttcacgccatcctcctgcctcagcctcccgagtagctgggactacaggcgcccaccaccacgcccagctaattttttgtatttttagtagagatggggtttcaccatgttagccaggatggtytcgatctcctgacctcgtgatccacccacctcggcctcccaaagtgctgggattacaggcgtgagccactgtgcccggcccagattaccatttcttaacttttcccatttctcctccagagtctgcctggaggctgaggtcacctttcccaggggcttggcactccagtgagaagggaatacctggccatcaagcacccacctgtgctagacatcttgctagctgctttacctattttttcatttaatactcacaacaataaattatgcaagatggtcactcttatcacctcatgtacaaattgagagagtttaagtgacttgcctagagccacatagcaaggaagtggctatccatgaacaactgagaccactctgctccagagctttccaccccactccagtgtgacctcaagcccctcaaa

SEQ ID NO: 139876 - DNA, 549 bp, Homo sapiens
ggttcacgccatcctcctgcctcagcctcccgagtagctgggactacaggcgcccaccaccacgcccagctaattttttgtatttttagtagagatggggtttcaccatgttagccaggatggtctcgatctcctgacctcgtgatccacccacctcggcctcccaaagtgctgggattacaggcgtgagccactgtgcccggcccagattaccatttcttaacttttcccatttctcctccagagtctgcctggaggctgaggtcacctttcccaggggctyggcactccagtgagaagggaatacctggccatcaagcacccacctgtgctagacatcttgctagctgctttacctattttttcatttaatactcacaacaataaattatgcaagatggtcactcttatcacctcatgtacaaattgagagagtttaagtgacttgcctagagccacatagcaaggaagtggctatccatgaacaactgagaccactctgctccagagctttccaccccactccagtgtgacctcaagcccctcaaa

SEQ ID NO: 139877 - DNA, 522 bp, Homo sapiens
taattcagtggctttttcttttaattatttttttttcttaaaatttcaggaaagtggttcatatccatttaaaaaataataaatagctgtttaaaagatttttttagtttttttatttaaaattattttaagcttayattaaaggtaaaactataaggataatacaaaacaagtgtgtcctttattcaatttcatatatgtattttttattgactatttgataataagttgcatatatcaggaccctttaccaataaaaaccgctatgtttatttcctataaaaaggctattatcttatataatcacagttttcatgaagtaaatttaacattcatttgacattttaactagtttaccatccttattccactttcttcaattgacactataatatcctttataacatttttaaattctccagtagggaatctagtcaaagttcaaatattaaatttacttgtcatgtctcttgaatctttacgtaatgtcaagtatcaccacagcctttcattgaagatctt

SEQ ID NO: 139878 - DNA, 522 bp, Homo sapiens
taattcagtggctttttcttttaattatttttttttcttaaaatttcaggaaagtggttcatatccatttaaaaaataataaatagctgtttaaaagatttttttagtttttttatttaaaattattttaagcttacattaaaggtaaaacwataaggataatacaaaacaagtgtgtcctttattcaatttcatatatgtattttttattgactatttgataataagttgcatatatcaggaccctttaccaataaaaaccgctatgtttatttcctataaaaaggctattatcttatataatcacagttttcatgaagtaaatttaacattcatttgacattttaactagtttaccatccttattccactttcttcaattgacactataatatcctttataacatttttaaattctccagtagggaatctagtcaaagttcaaatattaaatttacttgtcatgtctcttgaatctttacgtaatgtcaagtatcaccacagcctttcattgaagatctt

SEQ ID NO: 139879 - DNA, 645 bp, Homo sapiens
tgataatattcaaatacatcccacagacttgttcagtctatgattttacattatttctgttatgtccrgtgcctacaatgaatcaaaagaagccaaagatacagattccttcatggaaagaaagatgtaagacctcctttgtgtagatttaaagtagactcacaggatattgaacctcaaaggaaccattgtcaccattcaaacaaatctttttatttttcagatagggaaacttagacttagtaggtgacattaaaaaattgatttggtgggagttgtaagtgaaatataacatagctgataaggattctgtataacagctgtccacaaaactaaagtgaaagcaatttagcaaagattgtcccaactattctgcttaaggatttccactggaatgctcccataggattatattttcttccatatgtagaacacactacaagataggtataacgttaatattcttgatatgaatagaaacttttaaacaacaagtataacttacatgggagagttttttttaatacattctacttattttgactcaaacactctcttgtaataacaagtttaagatccagttctggtgtcaacctttctgcttttccacaggctttcttctagtcaccactaaaacttgtacac

SEQ ID NO: 139880 - DNA, 646 bp, Homo sapiens
agtttctcagcaatatttctttaatagatagctggatggatacatgggtaattcagtcctgtaaacatggactgtgtttccttcactattggtatttaaaagcatagaaaagataaaaagtgcaaaattcatttagrtaagcatcaaatggtgatgcttttagagggtatctttcagagtccatatatatatctcctgtgattgattctaagcaacttacccaagactcactcattgacttagttgcagacaattatgcaaaacattatttgaaaggaccctccttcatttcttaacttggtcattccttttctcttctcactttttattatgtcctttcaaagagatgcccattatgatcatagtcattctccttacagagagacatgacagatgtatctgtttacaaatataaatgacttaatgtgctgctatttgggcagctatatttcaaaggagaaacgaagtgagagggaatatttcctggaggtattttaggcttcagctacaaagtagaggagcagcactgattcccagatatttgtttatattgttctgcaaatatatttgtagtgggatctacaaatgtgttgcccaggtccttcttcaggatggaagaacttattcttcctattgctgggattgc

SEQ ID NO: 139881 - DNA, 646 bp, Homo sapiens
agtttctcagcaatatttctttaatagatagctggatggatacatgggtaattcagtcctgtaaacatggactgtgtttccttcactattggtatttaaaagcatagaaaagataaaaagtgcaaaattcatttaggtaagcatcaaatggtgatgcttttagagggtatctttcagagtccatatatatatctcctgtgattgattctaagcaacttacccaagactcactcattgacttagttgcagacaattatgcaaaacattatttgaaaggaccctccttcatttcttaacttggtcattccttttctcttctcactttttattatgtcctttcaaagagatgcccattatgatcatagtcattctccttacagagagacatgacagatgtatctgtttacaaatataaatgacttaatgtgctgctatttgggcagctatatttcaaaggagaaacgaagtgagagggaatatttcctggaggtattttaggcttcagctacaaagtagaggagcagcactgattcccagatatttgtttatattgttctgcaaakatatttgtagtgggatctacaaatgtgttgcccaggtccttcttcaggatggaagaacttattcttcctattgctgggattgc

SEQ ID NO: 139882 - DNA, 418 bp, Homo sapiens
agcaggtcaccaaatctgttagagaagycagttgaacgtagggtgtcacaaaccattggaatgcagattcattggtgtagatttcagtttctatggcagaacacttacatataaagtttatgatacctattagagatgatctagatttatctttggacaagaatttacacacacatgtattaaccagtcaaatgagtgaagacatagacaggattaggcagaaagaaatgtgccatatattactagtttacaagaatatctgcttcctaaaatgcttagctttgttgtgctgtttctttcttcttgggaaaccaaattatataaacatgggctgaaaaaatgggcagaagtatttcaaactacatcttgaagtaaagctttatgaaataaagagagcagcggggattatgaggttggt

SEQ ID NO: 139883 - DNA, 417 bp, Homo sapiens
acacattccttgcctcatggatgcttcccccatcttcaaagccagctatggcrggtcaagtcacttacacactatatcacagctttgaccttttcttcttcctccctcttctacttttaagaaccctgatggtcacattgcgcctacccacataatacaggataatgtctctattttaacatcagctgattagcagccttaattctatatgcaactcatttttctttgccaagtaaggtaacaaattcacaggttccagaaattagggcttggatatctttgcacagggctattattctgcctaccacaattaccacccaatgaggttcattggactagatgaggctaaacttaaatgttttaaaatacgaatatgccctctctgattcctggttcagacttgggtcaggacagctt

SEQ ID NO: 139884 - DNA, 414 bp, Homo sapiens
tcatggatgcttcccccatcttcaaagccagctatggcaggtcaagtcacttacacactatatcacagctttgaccttttcttcttcctccctcttctacttttaagaaccctgatggtcacattgcgcctacccacataatacaggataatgtctctattttaacatcagctgattagcagccttaattctatatgcaactcatttttctttgccaartaaggtaacaaattcacaggttccagaaattagggcttggatatctttgcacagggctattattctgcctaccacaattaccacccaatgaggttcattggactagatgaggctaaacttaaatgttttaaaatacgaatatgccctctctgattcctggttcagacttgggtcaggacagcttgcggaggcagc

SEQ ID NO: 139885 - DNA, 587 bp, Homo sapiens
taaaacaatggggcaattacagggctattttgtttgtctgtttctctctgtgttaactttcctgtgctggctgttgtccaatatctgaaaactgttgtttcatatattgtgtctgggtcactcgttgtttaaggcaggagtacaaaatcagttcattttmctccatcttggtcaaaagctaaaggtgcaatagatcagtcgagaaagtaaaaatatctaacttagcaactcaaaatattccatgtcaccaatggaacatttaaacacaggccttgttgttaaattcttttgcatgagttttctctgcagttgagatcaaattgtgaaattttatctgtgtttcttcttgttatatagttagtgtctataaagaaacctaattgtcaataatcactggatgatcaatttttgtataaaataggttgatgttataacagtaatgacaagtcttaaaattatatgcaaacatacatccattttcatcttgatatctcaatttgcttcttgaaatatagagaaagacacagaaaacaaaatgctgtgaataaagtaaaagctaaatgagaaaacacacttcagtgtaagat

SEQ ID NO: 139886 - DNA, 587 bp, Homo sapiens
taaaacaatggggcaattacagggctattttgtttgtctgtttctctctgtgttaactttcctgtgctggctgttgtccaatatctgaaaactgttgtttcatatattgtgtctgggtcactcgttgtttaaggcaggagtacaaaatcagttcattttactccatcttggtcaaaagctaaaggtgcaatagatcagtcgagaaagtaaaaatatctaacttagcaactcaaaatattccatgtcaccaatggaacatttaaacacaggccttgttgttaaattcttttgcatgagttttctctgcagttgagatcaaattgtgaaattttatctgtgtttyttcttgttatatagttagtgtctataaagaaacctaattgtcaataatcactggatgatcaatttttgtataaaataggttgatgttataacagtaatgacaagtcttaaaattatatgcaaacatacatccattttcatcttgatatctcaatttgcttcttgaaatatagagaaagacacagaaaacaaaatgctgtgaataaagtaaaagctaaatgagaaaacacacttcagtgtaagat

SEQ ID NO: 139887 - DNA, 552 bp, Homo sapiens
aggcagacttcatgaccaggaacccaaaagcaaawgcagcaaagacaaagataagttgatgggacttaattaaactaaaacacttttgcacagcaaaagagataatcagcagagttaacagacaacacagagaataggagaacatctttgaaaactatgcatccaacaaaggactaataaatatttagaaactacacagaactcaaatcagcaagaacaaaaccaataatcccatcaaaaactgggctgaggacatgaatacacgattctcaaaagaagatatacaaataaccaacaagaaaacgaaaaaatgctcaacatcactaatgatcagggaaatgcaaaccaaaaccacagtgtgatatcaccttactcctgcaagaataaccataatcaaaaaataattttaaaaaaagatattggcatggatgtggtgagaaagtaacactcttacactgatggtgggaaagtaaactactagaaccactatggaaattagtgtggagatttcctgaagaactataagtagatctatcttttgatccagcaata

SEQ ID NO: 139888 - DNA, 375 bp, Homo sapiens
cccagtacttcggaaggctgaggcagggggattgtttgagcccaggaatttgagaccagcctgggcaaaatagtgagataccgttactataaaacttttkaaaaaattagctgagcaaggtggtatgagcctgtagtcctaggtattcgagaggctgaggtgggaggattgcttgagcacaggaagtggaggttgcagtcagctgagattgcgttactacactccagcctgggtgacagagtgaggacctatctcaaaaaacaataataataaaataaacagttacttttaacattagtatttctcaaccttagctgaatgttagaatcactgggggagtttttaaaattgtcaactaactcctatgttgtttac

SEQ ID NO: 139889 - DNA, 419 bp, Homo sapiens
acccagtattgttttcttgtatgatataaaaactatgaagtcttgtgacaaacatacacacagtgtttagaatcaaagaactaatgtctgatcttggctctagcacgtattatccttgttcaaaaaaattacctcttctttctcttaactgatatacgtattgaaaaccacataatgtagaaggttcctgtaaaacaaaaatgaaaatgtgtgaaagtactttctaaactgtttttcaaatattatttactattaattgaccacaaagtatttcmttttttgaaaatttaaactcaatctgtatgtttaaacactatatttactctaaaggtaactgagtccttgcattcacagaaagactgtattattaaggatacaaggctaacacattgaaatatgtagtgaatttataaaggtaa

SEQ ID NO: 139890 - DNA, 579 bp, Homo sapiens
ctgtgtgttttttctttatcctggactccctctgcactgtttgttttggaagttgttaagttaaattagccatccctttcctttcctggttactgtatgacaatgcagctgtcagtctgtgaactctgccatcatctatttttagacacagtgtgaatgaagctctcttctctaattgcattcagagagagagagagagagagagaggggcacgcaggtagattttcacaacgatcaaatcagctattctaaatgctctgtgtactgacagtgtcctggagagaaagcaaagaaacccactgtgtgttttcctcacttgctktcaggtttgttttctttccacattgatgttgattatggtcaaataggaaagtgctgttgccacatttgctttccagtgttttaacacttgctaacttagatggttctgagttctctagctttgttagcgaaagattggttcatcattgggttcagattctttggtaaacaaattccttagaaaatatcctcctggcagtattttccacaaggttaaatcgtcttaagcacactgagaactgtgttagcagtgggcct

SEQ ID NO: 139891 - DNA, 586 bp, Homo sapiens
ctggactggagagggtgacttgcatcccaggagcagatgaaatccttcagggtgaacgtgttgagttagatgaggaaagagctactctccaacctggtgaacaatagatatggtttttttctgtattcggtggtacttcagattcatttatttaaaaaaattgatgtctccacttactttttcagtggtatagcatttaagtactagtagccttggctacaataggggtaagtggatgttttctaactgcatgtcactttgaagagaacctaatgtgagcaccgttctcccttgtccttgtcatgttccatagacagatatgtgacttcaaccagatgataatgcatcagaatacagcaaggaaccagttttgcaatgcttagaaatatgttttcttacatgtggaagataattctctrcaattcaaatgcttgatttgatgaggaaagacgagaagcaatgtgaactaaactgttaggctggtttgcaaaataattgtactcattcatttttataaccactcacacccaggcctgtagggcatcttaagaaaaccgccagggccaaatttgtaattagctgagtc

SEQ ID NO: 139892 - DNA, 586 bp, Homo sapiens
ctggactggagagggtgacttgcatcccaggagcagatgaaatccttcagggtgaacgtgttgagttagatgaggaaagagctactctccaacctggtgaacaatagatatggtttttttctgtattcggtggtacttcagattcatttatttaaaaaaattgatgtctccacttactttttcagtggtatagcatttaagtactagtagccttggctacaataggggtaagtggatgttttctaactgcatgtcactttgaagagaacctaatgtgagcaccgttctcccttgtccttgtcatgttccatagacagatatgtgacttcaaccagatgataatgcatcagaatacagcaaggaaccagttttgcaatgcttagaaatatgttttcttacatgtggaagataattctctacaattcaaatgcttgatttgatgaggaaagacgagaagcaatgtgaactaaactgttaggctggtttgcaaaataattgtactcattcatttttataaccactcacacccaggcctgtagggcatcttaagaaaaccrccagggccaaatttgtaattagctgagtc

SEQ ID NO: 139893 - DNA, 561 bp, Homo sapiens
aattcaaaatcacatccatttggtrcccaatttatacactttgtactatcctggctgggaaatacctgtttcaaatatagaaggtgtagagcttaggtgacaagcattctgatgtcttcctcaattaaggctctagtggccttttcattgcttttccttctccccacattcccaccccagggaccattcttacattaagcagctgccctagatttcttggggacactagacctctttcctagcgatttctagcacccccctcccaccatttctggcttatagaaggtacttgccctcctctctgactttccacttgcctgcagaaaaactgattggctttgcttttctcaagcagggcagggcagtataactggtatagagacagacttcctaaggatacaattagttgatgcttcccaacatggaaaggcatggatctttctgtctgtaaccacactttgcagtctaggtctgctcctatggaaccctggagcataggggaaactgcccccataacaggatggaaatagtaagtgtaacgaacgacagtgcctttccaca

SEQ ID NO: 139894 - DNA, 561 bp, Homo sapiens
aattcaaaatcacatccatttggtacccaatttatacactttgtactatcctggctgggaaatacctgtttcaaatatagaaggtgtagagcttaggtgacaagcattctgatgtcttcctcaattaaggytctagtggccttttcattgcttttccttctccccacattcccaccccagggaccattcttacattaagcagctgccctagatttcttggggacactagacctctttcctagcgatttctagcacccccctcccaccatttctggcttatagaaggtacttgccctcctctctgactttccacttgcctgcagaaaaactgattggctttgcttttctcaagcagggcagggcagtataactggtatagagacagacttcctaaggatacaattagttgatgcttcccaacatggaaaggcatggatctttctgtctgtaaccacactttgcagtctaggtctgctcctatggaaccctggagcataggggaaactgcccccataacaggatggaaatagtaagtgtaacgaacgacagtgcctttccaca

SEQ ID NO: 139895 - DNA, 574 bp, Homo sapiens
ttctccttgaaaaatttcttttaacattcctgcagggcaggtgtgataatgatacatttccattgtgtgtctgagaaactatttttctccttcacttttaaagaataattttgctgtatataaaattctaaggatggtgagtgtctttctttcaatgctttaaaaattgcactgaattatttttttttttggtcttgtttctggcaagatgtctgatgtaattcttattttgttcttctgtaggtaagattttttccccttccatcttcgtttaagattttctctttgtctttgggtttctgtagtttgaatatgatayacctgggttttaattttttggtattaatatttatcctctttggctttccgtgagcttcctggatctgtggtttggtatctgtgattaatttttgaaaactctcatccattgttatttcaagtatttcttttcctatatttgctctcttctatttctagaattcaaattaaatatatcctcttctatttctagaattcaaattaaatacatcctcttctatttctagaattccaattaaatatatcctcttctatt

SEQ ID NO: 139896 - DNA, 562 bp, Homo sapiens
gcacttcattctgtaatcctgagtgtggaggacaatggcatttttgggcaaggagagtaatatgatcagatctgagctttagaaaaataactggcaactatctaaatgaaatttgaaggataagagcctggagagaaacatagaagttattattaaaaactatgaaagaatatatacaaaagaggggatattgaaaataggagtaaaaatatgtagagagattatggaggcagaatagacaggccttggggcmcatttcatagctaacagtggcagagactggcaagatccttaccaaacctgtatcttcctcttcctgggcacacagctggactacatttcccagcctctctggcattaggcacagctatgactgactctccagccaaaatgaacattatgggtgaaagtcatgtatgccactttcagacctatccttctaccataagactggaatggagagaactttcaagaccactctgagagtcatgcatagaatataatagaactatggggtagaaggagctgtagctcccaaattacttcctggagaattactcag

SEQ ID NO: 139897 - DNA, 562 bp, Homo sapiens
gcacttcattctgtaatcctgagtgtggaggacaatggcatttttgggcaaggagagtaatatgatcagatctgagctttagaaaaataactggcaactatctaaatgaaatttgaaggataagagcctggagagaaacatagaagttattattaaaaactatgaaagaatatatacaaaagaggggatattgaaaataggagtaaaaatatgtagagagattatggaggcagaatagacaggccttggggcamatttcatagctaacagtggcagagactggcaagatccttaccaaacctgtatcttcctcttcctgggcacacagctggactacatttcccagcctctctggcattaggcacagctatgactgactctccagccaaaatgaacattatgggtgaaagtcatgtatgccactttcagacctatccttctaccataagactggaatggagagaactttcaagaccactctgagagtcatgcatagaatataatagaactatggggtagaaggagctgtagctcccaaattacttcctggagaattactcag

SEQ ID NO: 139898 - DNA, 488 bp, Homo sapiens
acactgaaactgagagaagccccaaatcatacaaataataagakatagaccattgtacttgggagggtcctctctaacacccactttggagatggacaaatacgaaaatgaacagtgaagaacttcccaaagatcaagactaggggcctcctagaacagtgagttatagagatcatcccatagagcagaatcatggactaactaaggaagttatcttatttatctaagagcacaagagatagaaactcttcaccacaatgctctatcacttcttgaggccaaagataatttctatgttacttggaaactagaacaacagcagagataataatataatcctagaatattgggaaggtccctggcaatcttggtgaggaaagcacatgcagtattggagacatgagctagtgtgcaagggactggggtgttcacaggtggacatccacaagctgcatgcattggtggctccagaatttctgtgtcagtgg

SEQ ID NO: 139899 - DNA, 592 bp, Homo sapiens
gattcttttgagattttttttcactgataattgaatttttaattctacttagttttaattaattttaatttaatagccayatggagctaatggtgaccataatgtacagctcaaggctataagtttattctctggggaaagtaaaacagaagtcaaagaacattaaaaaattgagagcttttcttatggggaaaattggcacactaaagataccacggacccagagaaaggccaaaaaatatatatatgagggaaagaaatggtaatgcctggaggggcccgtgttagtagaattcaatatgaaagtattaaagagcacttctggtactataaggaatgaaatattatgaaatgcttagtgctataaaataaagacaacctgacaaagtatacttttaattttattcctgggcttgcaagaagttatgtaccacttatgcactaccaccttcacccccaacaaagacctgaacacacagcaataagtgctaagcataggtgaaaggcagggttgccctgctggcaaatgctgatgttaaaactgcaatcaaaagccagctaacaagatagagagattaagcctagggtccca

SEQ ID NO: 139900 - DNA, 592 bp, Homo sapiens
gattcttttgagattttttttcactgataattgaatttttaattctacttagttttaattaattttaatttaatagccacatggagctaatggtgaccataatgtacagctcaaggctataagtttattctctggggaaagtaaaacagaagtcaaagaacaytaaaaaattgagagcttttcttatggggaaaattggcacactaaagataccacggacccagagaaaggccaaaaaatatatatatgagggaaagaaatggtaatgcctggaggggcccgtgttagtagaattcaatatgaaagtattaaagagcacttctggtactataaggaatgaaatattatgaaatgcttagtgctataaaataaagacaacctgacaaagtatacttttaattttattcctgggcttgcaagaagttatgtaccacttatgcactaccaccttcacccccaacaaagacctgaacacacagcaataagtgctaagcataggtgaaaggcagggttgccctgctggcaaatgctgatgttaaaactgcaatcaaaagccagctaacaagatagagagattaagcctagggtccca

SEQ ID NO: 139901 - DNA, 274 bp, Homo sapiens
ttgggttctgaggatttgctcagttatagatgtmattctcgatttggcctgaagagggcagacacttgccattcatggaggtgaagagcttgtttttaaggctggactaacatctcccaataaggtcatttggttctagtgagagttgcagctcacaacattcttgactcttctgctgcaaatatgctactggaaagacactgaagttcacagactgaagttcctttagttccaactctggcactgtaataggtgaccttgcacaggtcacttc

SEQ ID NO: 139902 - DNA, 580 bp, Homo sapiens
cattttctttctggaaccctcaccctcaacacacacacacacacacacacacrcgcgcgcacacacacacacgggttggcttttgtgttaggagcttctgtttggctacatgcaatctcgtttccccgtattggatttttcgaggctcttaataccttctctgctgggagctgaaggcagccttccctgtgccctcacagtgattatgcagcggttacaattacacctcttgtctcccttgatgagcagttgcagttagatgccattggatcttgtgtgatttcagtggcagaccataattaaaatttcttgcaccttgtgctttcagaattaaattggcctattatccctgtctgaccttcatcctctttgaggtttttgcacaagcagcaaaccattacacatagtttcctggtgtttgttggtgtgtttctttttctaggctgatctcctagctttgcagacagagcccattatccaagaagtaggcttcctagggcacttctgaaactagtaggatttctgggatgctaccaccaaggagaagccctaagggcactcgtgagtggctggtggacat

SEQ ID NO: 139903 - DNA, 692 bp, Homo sapiens
ctcatctctgtgggggagtctggcacatacgtagaacatgacaaagcccagccataagggctctgagagtaataagaacaggatgccatgggaacacaaagaaaggcctcggctcccaggcaggggacattttgtggtccacaaaataactcattctgaattaaatttctacgtgacttgtaacttgtgtttataaaagtgactgatcctcagaagacaaagtaaagacattaaagcatttaaatatgtaaagtgtgtctattatggtgaggaaaataggcatattttctccccatccttattaaaaccaggaatgagtccccttgataaacaaagacaccaagagaaagaaaaggaaggaatgtagaatgagaaaaaagggaaagcaaagatgatcttagcctccaggtggggccccaggtgggtcagtccacaccagctccctgcggacaatccttggctggcttcctggtgctggaccaagttccatccactcccccgccctgctgctgaggcctcattctcagcrcatctctgctggaggacacctcatggagaaagaccccttaatgtagacagtttagcagtaggaagaagtctctctctctgctctcacactgctctcctggaagggcagcaggacttgagaggtctggttttcatgattgagccataatggaatttaaaaacag

SEQ ID NO: 139904 - DNA, 692 bp, Homo sapiens
ctcatctctgtgggggagtctggcacatacgtagaacatgacaaagcccagccataagggctctgagagtaataagaacaggatgccatgggaacacaaagaaaggcctcggctcccaggcaggggacattttgtggtccacaaaataactcattctgaattaaatttctacgtgacttgtaacttgtgtttataaaagtgactgatcctcagaagacaaagtaaagacattaaagcatttaaatatgtaaagtgtgtctattatggtgaggaaaataggcatattttctccccatccttattaaaaccaggaatgagtccccttgataaacaaagacaccaagagaaagaaaaggaaggaatgtagaatgagaaaaaagggaaagcaaagatgatcttagcctccaggtggggccccaggtgggtcagtccacaccagctccctgcggacaatccttggctggcttcctggtgctggaccaagttccatccactcccccgccctgctgctgaggcctcattctcagcgcatctctgctggaggacrcctcatggagaaagaccccttaatgtagacagtttagcagtaggaagaagtctctctctctgctctcacactgctctcctggaagggcagcaggacttgagaggtctggttttcatgattgagccataatggaatttaaaaacag

SEQ ID NO: 139905 - DNA, 524 bp, Homo sapiens
gttttctcctagtggcccatctggttaatatccgctttgactctcaaatatgtcccagacaagatgttaaattagaaggtcatcctgcctacgtcattgtatcatctagtccaggggtgtccaatcttttggcttctctgggccaaaccggaaggaggagaattgtcttgagccacacataaaatacactaataatagctgatgagctaaaaaaaaaaaaaatcacaaaaagaaattataatgttttaagaaagtaatgaatttacattgggccacattcaaagccgtcctgggctgcatgcggcccgcaggcagagttggacaagcttgatctagcccttaaacagactcccaaggtaggtactcttatctcatcttgcagaagaaaaactgaagctcagacagattatktaagcttacctgaggtcacaccgtcagtgataaaaccacctaatctttctcctctttaggaaaaaaatggctaaagctggggcaaggtactcagaggcttcaacctcatgttt

SEQ ID NO: 139906 - DNA, 575 bp, Homo sapiens
tcaacaggcagtcatggcaaggaaaggagtgctgagacccagactagaattcaccactcttcctgaaagcagttgagaatgtggctttatgtcttcttttggctcttaacatagctctcaccaagcttcaggggtttgtttgacttgtgaaaaatgtatttatgtatttacaggtgggatgtagctttcaagtgattaagctatattgcttacatgttagctgagtttgagtgtgtagatatttgataaaaagcctctctctgcttgggtttgcaattaaatgctggaattaatcaggtgatgtgctcccagatggttaygaaactataatgaaagtcatcccaggtatgtgagtgacccataggaagactgcgtaaaagaataagtatgggctagatgtagtttttagtaaaatgcattttttaaattcttcaaaacaagtttggatttttaggaaacaaacccagcaaactgaacttcattcctaaaatcagttgccagcaggaatcaaacagactttatatgattaatttttgtgctatggctctgcatggctgtcatctctgggccagccc

SEQ ID NO: 139907 - DNA, 568 bp, Homo sapiens
atcctgtatttggggatgatatgcagaccattagcttgctttctttgaccttcagtcctgatctgtattctcagtttgctatgagtattctgttccatctaggtcagaaagaattacgtrtgtgcaactgaagcggagtgtggattttaagcagagcatgtaatcctaagaatgcagaaaaatggtataaatttgcatcttaagaggaatgctttctaaaaacactgaagccgttttaattcaataaaatagagaaggggatggaaatgccacccacttgacaaaatcttttattttcatgggagaaaagaattacaaaatcatctatccacttgtcaaatgtcttttgggcagctttttacattgtggtgcacattaaacagaggtcagggtaacagcttctgttcttgtggaattagcatggccttcctcttgaagaccttctaggagtgggatttgaagctacctgtggggcagggagaccagtgttccaggaagatccatgtaattaactaggacaccaagcacatattcctcagggcatctaagccccttttgtgccatggag

SEQ ID NO: 139908 - DNA, 532 bp, Homo sapiens
agaccttttctttctggatctgtgaagatctttctccccatctcagacaccatcckaagagagggcagaggtgtagagaagaaagaaataatacttcaaagagacaggttactcaactggactaagttttgaaccagactgcattaaaactagggcagtggtggtggttgttttcattacaccaatcaggtagaatacaaaaggatatcagaacaaattcagaacacatggacactactttttctgcacacctcagtataatgcaagtaattctgtgatcctaatatgtatgaaatcattgaatagataaagctaagaggacaacaaagtatggagtggtatgatgagtctatgagaaggtaaatgattttcagacaattcaaattctctagcgaatttgttgtcacaaaatacactgtaattaaactgcattggccttgggcaaaattcatcttggatatcttatttgaaatagcattcaatgagcacttgtgctagccactgcagatactttattaaatagaatatgctt

SEQ ID NO: 139909 - DNA, 634 bp, Homo sapiens
tggagacattcttttggttgtcacagttgggggtgggggtgctactggcatctagcaggtggaggccagaaatgctgctaaacatcgtacagtgcacaggacagcccmcaagccccaaagaattatcccaccccaaatgtcaatagtacagaggttgagaaatcctgtcctacaggatcatggggaggagagaaaagatctagccttattttctgcctgaaaccccattattagcttctgggttaaagtcggccctggtgtagcaactgtgcttgggatgggaagactaggtgcttctttagcccactttgcaattgtgtgacctctgacaaatcaaaatgaccaaatcctagtttcacatattctgtttctgtggtcaaatatatcctaggttggtattcataaacatgtttaccataatgcaagtgacattgtaatgtatcttccatgtttgagagtgaaaggggtgttattaataattatagtgggacaataggagtaaatcttgactgtcctaggcaaactaggatatgtggccatccaccaagaagaggacagcagaaaatcaaacgaaaacagcatcctcctctgtttctctggtattctgtccactcaccactcatctgcctgcctg

SEQ ID NO: 139910 - DNA, 634 bp, Homo sapiens
tggagacattcttttggttgtcacagttgggggtgggggtgctactggcatctagcaggtggaggccagaaatgctgctaaacatcgtacagtgcacaggacagcccacaagccccaaagaattatcccaccccaaatgtcaatagtacagaggttgagaaatcctgtcctacagkatcatggggaggagagaaaagatctagccttattttctgcctgaaaccccattattagcttctgggttaaagtcggccctggtgtagcaactgtgcttgggatgggaagactaggtgcttctttagcccactttgcaattgtgtgacctctgacaaatcaaaatgaccaaatcctagtttcacatattctgtttctgtggtcaaatatatcctaggttggtattcataaacatgtttaccataatgcaagtgacattgtaatgtatcttccatgtttgagagtgaaaggggtgttattaataattatagtgggacaataggagtaaatcttgactgtcctaggcaaactaggatatgtggccatccaccaagaagaggacagcagaaaatcaaacgaaaacagcatcctcctctgtttctctggtattctgtccactcaccactcatctgcctgcctg

SEQ ID NO: 139911 - DNA, 634 bp, Homo sapiens
tggagacattcttttggttgtcacagttgggggtgggggtgctactggcatctagcaggtggaggccagaaatgctgctaaacatcgtacagtgcacaggacagcccacaagccccaaagaattatcccaccccaaatgtcaatagtacagaggttgagaaatcctgtcctacaggatcatggggaggagagaaaagatctagccttattttctgcctgaaaccccattattagcttctgggttaaagtcggccctggtgtagcaactgtgcttgggatgggaagactaggtgcttctttagcccactttgcaattgtgtgacctctgacaaatcaaaatgaccaaatcctagtttcacatattctgtttctgtggtcaaatatatcctaggttggtattcataaacatgtttaccataatgcaagtgacaytgtaatgtatcttccatgtttgagagtgaaaggggtgttattaataattatagtgggacaataggagtaaatcttgactgtcctaggcaaactaggatatgtggccatccaccaagaagaggacagcagaaaatcaaacgaaaacagcatcctcctctgtttctctggtattctgtccactcaccactcatctgcctgcctg

SEQ ID NO: 139912 - DNA, 361 bp, Homo sapiens
tacaggctgaattgtgtcctccttatccccacctcccccatctatatgttaaagtcttaacccccagtcacccagaatgtgactgtatttggagataaggcctttaaagaggtaataggtaagatgaggtcattagggtgggccctaatcccctgtatttggtgtccttataagaagagagcttaggacacaggcacatgaagagggaagacaatgtgaaggcactgggagaagayggccacctaaaagccatggagagaggccttagaatgaaaccaacctggcccacaccttgatcttggacttccagcctccttgattgtgagaaaataaacttctgttatttaggccatcccatttt

SEQ ID NO: 139913 - DNA, 458 bp, Homo sapiens
aagaaaacctttgaataagaagacagcatatctttgatcctttgtcctttgcttggatattctgagatattawgctcagaatgtaagaatctgtaacagaacttcaagattggtggcatttcaaaatacagttggtatttcactttcaataaaaatttacttgaaaatccagctatctatattcctttgaatctcatctttgatggatattatcactttcttttgaattcataaaaacttactttctcattactttataaataaagataacttagggattttatgagtatactgggactccatggcaccaaagagaaaggcaggagaataaaaagcaaaagagcttttagatgaggaacaaatttccattttctgcttttatttagcaaagaatagcttctcttgtcatggaacaaggtaaaggcataagtcctagattcataaaatctagggtggag

SEQ ID NO: 139914 - DNA, 600 bp, Homo sapiens
gcaatgcctgttcacaaaggcacattgggtgaggatctctgtgtttagattcctctctacagaggccagaaagyctttagagtcacagaactgaccctcgggctgaagcttgaggtcatccttcatgttcagagttcctcacatgccgtcccctgctctctgccagactgtttggtgacaaagagtccagagggagggagagtaagaaggggaaggggccaaggcagggcttctctttccaagatgtaaaaggcaaacttcaggccaccaagtccaaatcgacaaccagatagagcctctgtgctggtttgagctattgctcaacgttctaggctttaatattttaagaaaagtttattatgacaagtcaatgacagcacttttagtaggttaataaatcatgggcatattatatcacagagatgacagctatgtaaagcatcacaggaaacctgatattatttcaacaaaatagcaactagagcgtcttggcacttactgtaattttaagtcaaggtttaaaaatatattattattaatattactgaatgagaaatttccttggattgggtactgagaaatgaaacagttcattgcaca

SEQ ID NO: 139915 - DNA, 600 bp, Homo sapiens
gcaatgcctgttcacaaaggcacattgggtgaggatctctgtgtttagattcctctctacagaggccagaaagcctttagagtcacagaactgaccctcgggctgaagcttgaggtcatccttcatgttcagagttcctcacatgccgtcccctgctctctgccagactgtttggtgacaaagagtccagagggagggagagtaagaaggggaaggggccaaggcagggcttctctttccaagatgtaaaaggcaaacttcaggccaccaagtccaaatcgacaaccagatagarcctctgtgctggtttgagctattgctcaacgttctaggctttaatattttaagaaaagtttattatgacaagtcaatgacagcacttttagtaggttaataaatcatgggcatattatatcacagagatgacagctatgtaaagcatcacaggaaacctgatattatttcaacaaaatagcaactagagcgtcttggcacttactgtaattttaagtcaaggtttaaaaatatattattattaatattactgaatgagaaatttccttggattgggtactgagaaatgaaacagttcattgcaca

SEQ ID NO: 139916 - DNA, 591 bp, Homo sapiens
gccctgacctgatggtccttccctatctaccctggtagcggaagaccaagggcatataatcttaggagttctagggccccatccaccgtcagtccctctctatactactaaaactgatgctttctggaaagccccacctcctggcaggaggccaaccagcataaaaatagagcattaaaccaccaaagctaagaaccctcatggagtccactgcatgccccctgmcacctccaccagaacaggcactagtatccacagctgagagacccatagatggttcacatcacaggactctgtgcaaacaacccccagtaccagcccagagctggatagactcgctgggtggctagactcagaagacagacaacaatcactgcagttcggctcacaggaagccacatccataggaaaagggggagagtactataacaagagaacaccccgtgggacaaaagaatctgaacagcagccttcagccctagaccttccctctgacagagcctacccaaatgagaaggaaaccaaccctggtaatatgacaaaaacaggctcttcaaatacatggaaattaaataacctgctcctgaatta

SEQ ID NO: 139917 - DNA, 570 bp, Homo sapiens
gtcaagttcaaacactgttagtggaggtatatatttgcaaaactcctttggaaaaaatttggccatgcctaaaaaagttgaacccatacatgcattatgaccaagcaattctagatatatacaccagagaaactcatgcctcggaaggtttgtaccagttgttcgtaggaacattgcctaaaattggacacatcccaaatgtacatcaacagtagaatggaaaaaataaagtgtagcatatttaaagtagaataacataccacagtaaaattaagtgcacatcaataatacatgtcaatgagtttcacaaacagaaataaggaaaagaagcaagtgacaaaagaatatttacagtgtcattccatttgtattaagttcaaaaagagaaggaaatgcaatgcaatttactgacaagcattagtggtaacagtataaagtaaacaagagaaargattaccacagaagagtagtatgtagttatgtttgaagggaagagggaattatgtcagaaagaaacataaagaaaatttctaaaaactagtaatgtcccattttataacctgggggcag

SEQ ID NO: 139918 - DNA, 574 bp, Homo sapiens
ttattaaactctcccaacaatctgaaggtaaatagttattctcactttgcaagtaaaaaatggaaaaggcctagagagaagaatttgggtttttaactttgaaagggatcacatacatatccagacacattctcatgaatttttggaacagcaaatcacagaaaaaaatcccaaaagcacctagaagagaaaaaaaaaatgagctacctctaaggaacaagattctgccattaaatgctcaaggagtttgtaagaagagycttttgtgggtttcccaaagctgcatcaggtaggactgagaggaaatggatagcatcccctttaggactggtaaaggaaaccagaaacttcataaacaatagcatggcaaagaaaccaaggaatgtcaagggaaggcccagaagccagtgtgactacagcaggactgagaaataggcctggaaggccaacttcgtgtcacactgcagaaaactttatggttgagaagaaagagtaatgattctccctgcagctctctgtcccacgcctcatctttttatgacctttgaatttcctactctctccccagagacct

SEQ ID NO: 139919 - DNA, 574 bp, Homo sapiens
ttattaaactctcccaacaatctgaaggtaaatagttattctcactttgcaagtaaaaaatggaaaaggcctagagagaagaatttgggtttttaactttgaaagggatcacatacatatccagacacattctcatgaatttttggaacagcaaatcacagaaaaaaatcccaaaagcacctagaagagaaaaaaaaaatgagctacctctaaggaacaagattctgccattaaatgctcaaggagtttgtaagaagagtcttttgtgggtttcccaaagctgcatcaggtaggactgagaggaaatggatagcatcccctttaggactggtaaaggaaaccagaaacttcataaacaatagmatggcaaagaaaccaaggaatgtcaagggaaggcccagaagccagtgtgactacagcaggactgagaaataggcctggaaggccaacttcgtgtcacactgcagaaaactttatggttgagaagaaagagtaatgattctccctgcagctctctgtcccacgcctcatctttttatgacctttgaatttcctactctctccccagagacct

SEQ ID NO: 139920 - DNA, 573 bp, Homo sapiens
tattcttcgttctgggatgcagttaagctacttggaaagtttgattcattgctggcttgcttgtaggctttattaggtagtcttaggtctagggctatttattccctactactgaagcaagtctcttgtaaagattctatccagtgaccaggaatcatgaaggttttgagtttggctgatgagaacaggcactattccttgccttgtgtgagtaccaggcacttttccctctaatacttccaggtggttctttcttcttcctgggaagttttttcacacacatgtgctaatcaatatatagccaaatactcaaacggrccctctgcagatttctagaattctctctgtgtgcagcatgttcctccctggcactctgccctatgacttctagctgccttggggcccctagatcctcagttccatctcctcctcctgtaccacagcctggaaattttcttaaggttataagctgcagcaatcacagggctcaactcacctgagtccctcaggaatcactgtctttcaatgtctaatgtccagtgtcttgaaagtgggcttgtcttttttgttttt

SEQ ID NO: 139921 - DNA, 543 bp, Homo sapiens
gaaagtcaacagaaaaggttttaaacgtagattaaaacaagaagattttatgtaaccacgaaccaaaaaggttaattactcagcacagccccagctccttattaattttgttaattgggtgtaccggttttgggaccccctcccaaaacatatgtacaccagraactgtgaatgtgactttagttggaaaaaaaggatctttgaataagtaattaagttaaacatcttgagatgagatcaccctagattatccagatggaccttaaatttagtggcaagtgtccttgataagaagagtagacacagagacagaagataaggtcatgcaaagaggaaagtagggattggagatatacagccacaagctcaggaatgcctggagctacaaaaagctggaagaggcgaggaaggattctcctgagaccttcagagggagtatggccctgccaacaccctgattttggatttcttgcctctaaacctgtcagagaaaaaatttctgttgttttaagccaccatgtttgggcttatttactattactt

SEQ ID NO: 139922 - DNA, 490 bp, Homo sapiens
gatccgcctgcctcagcctcccaaagtgctgggattacaagtgtgagtcaccgtgccctgcaaaaattgcaaattcttttcattctgtatctcctttgcttgtgattgttttgttttccaaatggacagcatgtacttacaaaatttgtagaccacaaccactctccaaatacgagttcagtgagtgttctgaagatcataaaagtgaaaacaccrgcccaaaatacaagaaatcttctctggcaaataatttaatcatgtgtggcttctgttccttcacatataatgccaacttgctatgctaggtattttatctttgcatcattttcaatactgaaggtatatttggatcttctcttttttttcttagtttggctaaagatttgtcagctttgtttgacttttcaaaaaaccaacttcttgtttcaatgatcttttcttttttttttgagacagagtcttgctctgtcacccaggctggagtacggtg

SEQ ID NO: 139923 - DNA, 527 bp, Homo sapiens
gaacaggagcttgaggcaatctgagagagagcaatgcacttgaagattagagataacatcattttttcttcaygaatctctacatgttggttatgagataacaggagcgttctttcagtttacttctatttgattaatctctccatcctcaggaccagggacataaaaggcactcaatcaatgtttagtgaattaatgtgtactttttaaacataagatatgttctggaaaggtgaataaatcaaactttgtaaatggaatatcatttaataagaagctcatgtggcaatttcattctgatattctctttatctctgattgctgattggagacagttaatgcttcccacatattccttgtatattagtctgttctgacgctgctaagaaagacatacccaagactgggtaatttataaaggaaagaggtttaattgactcacagttccacatggctggggaagcctcacaatcatggcagaaggtgaatgaggagcaacgtcatgtcttacatgccagcagccaaga

SEQ ID NO: 139924 - DNA, 621 bp, Homo sapiens
atgactcaaacacaatgagtgctcaataatgtcagctgttttgagtgtctaagcattttctaacttcttagttgaaaaaggctgtggcagaggaacttgaagctaaagatttaggatcctttgtccaccgcaaaaatggtgacagatctacattaagatgctaagcccttgcttctcttggcaactatgtacctgmttgactttctaggagaatctgggatggatttcctgctactgtgttgaaatataagagaaagagaacaaatcctattaaatatagatactccccattttatgggttaaagacaaaagagtggatggaatgtcaatatcagaatatcccaagggagttggccgaggctgtaaagaatttaggactttcaaaaggtctttatgtccagtgatacctgaaatgtttttaacacagtcccatgctatctctgcagaaagaagccacttctaaatggggattttgaaaatgtatttgtaaaggtccaagtaactagagcaaccacctttctgtacttgacattggtttgactaattttcatgaatctgtacagatgataaagtcagttttaatctaatgtactatacaaactcaaaagaatgcatattaac

SEQ ID NO: 139925 - DNA, 539 bp, Homo sapiens
ccctgcccctgaaccaatatccttctgaccacaaatctttgctttttatttttttttatttttatattttagagacaggttcttgctctgtcacctaggttggagtgcagtggcacaatcataggtcactgtaacctcaaacttcttggctcaagaaatgcccctgcctcagctgggagtacaggtgcacaccaccatgcctggctcatccttgcttttaaattcctgtcagttatgggttgaactctgtactttccgctcccatcatcaaagatatgttgcatttctaacccccagtatctcagaatgtgactttttttggagatagagtctttayagtggtaaccaagttaaaatgagatcaagagggtgtgccctaattcaatatgactggtatacctgcaaaaggaagaaatctggacgcagagacagacaagcatgtagaaagaacaccatttgatgatgaaggtagaggtgatgatgcttctataaaccaaggaatgccaaagcttgccggcaaacccccagaagctagaagg

SEQ ID NO: 139926 - DNA, 539 bp, Homo sapiens
ccctgcccctgaaccaatatccttctgaccacaaatctttgctttttatttttttttatttttatattttagagacaggttcttgctctgtcacctaggttggagtgcagtggcacaatcataggtcactgtaacctcaaacttcttggctcaagaaatgcccctgcctcagctgggagtacaggtgcacaccaccatgcctggctcatccttgcttttaaattcctgtcagttatgggttgaactctgtactttccgctcccatcatcaaagatatgttgcatttctaacccccagtatctcagaatgtgactttttttggagatagagtctttatagtggtaaccaagttaaaatgagatcaagagggtgtgccstaattcaatatgactggtatacctgcaaaaggaagaaatctggacgcagagacagacaagcatgtagaaagaacaccatttgatgatgaaggtagaggtgatgatgcttctataaaccaaggaatgccaaagcttgccggcaaacccccagaagctagaagg

SEQ ID NO: 139927 - DNA, 458 bp, Homo sapiens
gtctgtggcgagaatgatgagggtcttgggtactactacaaaattttctctgtgtagctattcagcacgagcccatatttgttccaacttgtgaccaaaatcattgtttgcttgagttctttctttcctctagcaatttcatctgtaatctcagagatgaacgttgcaatgtgctgggctaatctaatccacctttgacttaacaataccctgtactgagagaggcctagagggcaccaggcacttgttgctcactgtgtctttatattataggagcaycctcttgacatttgcctttgggccttgtagagttatacccacttttgacataattttaaggctaaatttcagggagaaatttcagaaagattcctataatccttgaattgctgtcccttcaaagaggtagttaatctttcagtggtatcttggcacattcctgggaccaaaataagcag

SEQ ID NO: 139928 - DNA, 551 bp, Homo sapiens
tcaccctccgtgagctgcacccactgtccaaccagtcccagtgagatgaaccaggtacctcagttggaaatgcagaaatcacccrtcttctgcatcaatcatgctgggagctgcagactggagctgttcctattcagccatcttggaacagaacccgaggtgggaggatttcttgagcctaaaagttcaaggccagcctggacaacatagcaagaccccatctcttttttgaaaaaaaaaaaaaaagagagagagagggaaccatcacaggctgaggctgagggtagggagagcagatgaggaaggctggcagactcagtagtgaccagagttctagtgaggaggtaaatgggccacctaagtgtggggtaagagattttaaatggccatggtgccttcctgcagaagatctcaaagctttacacagacactgttgactgtatgatatcccagttcttatgcccctactctgaatcagactgttggtacagcctgtggactccggtccaggaattagatgatacagtgaggaacatcattgtaagtgccac

SEQ ID NO: 139929 - DNA, 542 bp, Homo sapiens
gaggtcccaattttacaagttggggctcagagcaagaagactcaccctgttcaggacttctttaagggaggatcatgttaaaatgcagactctcrttctacacatctggaattgggcttgagattcttcatttctaacaagttcctggaccactctttgatgagcaatgccctgactcctggagaagatgccacctcctatgggccacccctgctttggttctggtgggaagggtagggcattgagggaaagggtgtgactgctggaaatggctggtcctcttagaggatcctgagtgaacacatccagtcccctactttttcccaactcaattctcctaaagagatttttttcctttttaataaacccagtggttaacaactagcttgttagttaaaggcctgagggacacagagggaggctcatgccctactactcagttcattaactggagtaacaaccaatttcaaggtgattattgctattataagctctgatcaattttttaaacgtttccaggttttaaacctaaagcgggaata

SEQ ID NO: 139930 - DNA, 585 bp, Homo sapiens
catgaaacaattgccatgctttttttctattctgtctgctttgcatttacrtttaggttctgagacttcaaaaatatcacttccatcttcctccttttaaactagctctgataattttttcctgccttaactgttaaaaatcccattttcagggtcaatgaagggctcagtaatatgttttggctacatcattcacagaaatgtctgccaagcagctcaacttttcaataacccagactcactcaaatttaatttcaggggagcataaatgactggagaaaatgttctctctacactgaagttttccattgtcttctaaggccatgcattcaaggtgatgcttgaatctagaatgttccctctcttttggttggagatctcagaagaaaacaccaaaaaaaaaaaaaaaaaaaaaaagtttctcaatgtaatcaataagagcatctttttttaccatgacacaggatctctgtcaccaacatgggaatattcaaacctcagcaagaacaaaaggtttcccaagttcatatttctctattattgttcctggtagcaataaaaaccccttggatatttgactacatt

SEQ ID NO: 139931 - DNA, 565 bp, Homo sapiens
acagtccccacttcttcagcaactctctttgtgcattgactagacggccttttggcttcaagaatggcaactgcattaagctggaggctgacccaaattttccctttcaagttctaagtcctgttttctattttcgtttctatcctggaatagggtcaccctacaaaagatgaaatattacattcttagaagacaatgaactgatgatgtcatattggcatgtttgggttttatactgctcttgggggtastgcaaggaaaaaaataatgtggtgttggaaatggggaatgcaagccaggcagcctgaaatccaaacttttaaaatcaaaccacataatcaacaccacaatatcgatactggggaggttggaatagtaaacaaatagtatatattttttaaaaaaccctctttcccctgggaaaaaaatccacaatgagactcccacccactacaatcttaccaaaatagctaaaattaaaaggactgataataccaagtatttgtaaggataagaagaaattagaagtatcatacatttttagtgagagtataaattggtacaa

SEQ ID NO: 139932 - DNA, 585 bp, Homo sapiens
catgaaacaattgccatgctttttttctattctgtctgctttgcatttacgtttaggttctgagacttcaaaaatatcacttccatcttcctccttttaaactagctctgataattttttcctgccttaactgttaaaaatcccattttcagggtcaatgaagggctcagtaatatgttttggctacatcattcacagaaatgtctgccaagcagctcaacttttcaataacccagactcactcaaatttaatttcaggggagcataaatgactggagaaaatgttctctctacactgaagttttccattgtcttctaaggccatgcattcaaggtgatgcttgaatctagaatgttccctctcttttggttggagatctcaraagaaaacaccaaaaaaaaaaaaaaaaaaaaaaagtttctcaatgtaatcaataagagcatctttttttaccatgacacaggatctctgtcaccaacatgggaatattcaaacctcagcaagaacaaaaggtttcccaagttcatatttctctattattgttcctggtagcaataaaaaccccttggatatttgactacatt

SEQ ID NO: 139933 - DNA, 303 bp, Homo sapiens
agcgatcatcatgtccagcacaattccaggcattttctgggcacttggtacactttaattaaatgaatgaacaaaacaaaacactggcaggaaaaaaaayggagagtgactgcctgaggtccaatatgctaggaaatatgtcagtccactgataaactccagctactcagcaaagggaaaagatactgagaggccaatttaaaatgatttgatagctttgcccattgctccttattgtacaatcacagtcataaagttagtccaatcgtttgtaatctaaacacacacatgcacacacaatca

SEQ ID NO: 139934 - DNA, 303 bp, Homo sapiens
agcgatcatcatgtccagcacaattccaggcattttctgggcacttggtacactttaattaaatgaatgaacaaaacaaaacactggcaggaaaaaaaacggagagtgactgcctgaggtcmaatatgctaggaaatatgtcagtccactgataaactccagctactcagcaaagggaaaagatactgagaggccaatttaaaatgatttgatagctttgcccattgctccttattgtacaatcacagtcataaagttagtccaatcgtttgtaatctaaacacacacatgcacacacaatca

SEQ ID NO: 139935 - DNA, 303 bp, Homo sapiens
agcgatcatcatgtccagcacaattccaggcattttctgggcacttggtacactttaattaaatgaatgaacaaaacaaaacactggcaggaaaaaaaacggagagtgactgcctgaggtccmatatgctaggaaatatgtcagtccactgataaactccagctactcagcaaagggaaaagatactgagaggccaatttaaaatgatttgatagctttgcccattgctccttattgtacaatcacagtcataaagttagtccaatcgtttgtaatctaaacacacacatgcacacacaatca

SEQ ID NO: 139936 - DNA, 572 bp, Homo sapiens
cactacatgccctgcgaggagtagggcataagatggcctcaatcactgcccacttccctgctgctaagctaagttgcagagctgtaaactgtatataccttgtccaatctcattttctagtccctccccatgtgtatagccctcttgtcatcctctagcctctaataaactcttgtttaactaatctgagctgggctacaagaattttttttwaaaaagttggatgtccatgcttgggagagagtgttaaagagggagaagctccttctcttttcctagatgaatgtagttgagccagatggccaagggagagttgaatttcagatgtgagaaacaaaactgaatggtctaatcatgttggagagcatccttccattgtccatcttaaagattctattttttattttgctaaggatgatacctttttttttttcatttttcctgaaatactctactgttaattcatttgacaaatttatcaagcactcaacctatgcaatatatataaagattcaaagatttataaggtactttttctgtcctcaaagaactaacagtaggtgaataagacc

SEQ ID NO: 139937 - DNA, 572 bp, Homo sapiens
cactacatgccctgcgaggagtagggcataagatggcctcaatcactgcccacttccctgctgctaagctaagttgcagagctgtaaactgtatataccttgtccaatctcattttctagtccctccccatgtgtatagccctcttgtcatcctctagcctctaataaactcttgtttaactaatctgagctgggctacaagaattttttttaaaaaagttggatgtccatgcttgggagagagtgttaaagagggagaagctccttctcttttcctagatgaatgtagttgagccagatggccaagggagagttgaatttcagatgtgagaaacaaaactgaatggtctaatcatgktggagagcatccttccattgtccatcttaaagattctattttttattttgctaaggatgatacctttttttttttcatttttcctgaaatactctactgttaattcatttgacaaatttatcaagcactcaacctatgcaatatatataaagattcaaagatttataaggtactttttctgtcctcaaagaactaacagtaggtgaataagacc

SEQ ID NO: 139938 - DNA, 589 bp, Homo sapiens
tccttggtaaagcaaccaataggtatcatcctagtgagagtagcgtctatgattgtcttggagcaacaggtattactatgccctgtcaccaccatgccgtttcggagtctcttgctctgtagaaacccaatattcactctcataaattcaaaaatattagattcctgttgttttgtctcttccaagcttcataaagtatctttcctttcagagagttgcttatctygcacaaactaaagcaggaagatattcttacaataaaataggagactaatatctagggctagatttacttctattaaagtgctagttttgataaacttttttttctggaggcattgaatcaatcagtaaatcagttttagcactgtataaggaaaagctttgattgttcactagtattcataaatcgaatgacctatctagaaaagagaaggtcccctggccccaaagctgagaaagatcaggggcatcttcttggatggtacccaggatattcctgctttggggaaggctagaggagatgaaatttatggttacttctgattaaacgattctgcagccctattggttagaagtcaactatttg

SEQ ID NO: 139939 - DNA, 589 bp, Homo sapiens
tccttggtaaagcaaccaataggtatcatcctagtgagagtagcgtctatgattgtcttggagcaacaggtattactatgccctgtcaccaccatgccgtttcggagtctcttgctctgtagaaacccaatattcactctcataaattcaaaaatattagattcctgttgttttgtctcttccaagcttcataaagtatctttcctttcagagagttgcttatcttgcacaaactaaagcaggaagatattcttacaataaaataggagactaatatctagggctagatttacttctattaaagtgctagttttgataaacttttttttctggaggyattgaatcaatcagtaaatcagttttagcactgtataaggaaaagctttgattgttcactagtattcataaatcgaatgacctatctagaaaagagaaggtcccctggccccaaagctgagaaagatcaggggcatcttcttggatggtacccaggatattcctgctttggggaaggctagaggagatgaaatttatggttacttctgattaaacgattctgcagccctattggttagaagtcaactatttg

SEQ ID NO: 139940 - DNA, 287 bp, Homo sapiens
aaagaaaattcagtgatatgtgtgaggagtggtttgcatgtgtgtgaggttagagaaaaagccacacgtggattgcaaatgtattcgttttatctastgagtgctattctgccaatcctgaaacaagaagattaccatttttgtgttttcagtgtaatagtatcaggtaacacagattcattggttgctacatgccaagcacctcatgtgcattgtttcatttaaacccctcctttaccctgtgaggcagacactcatacaaatgaagtgctgaggcccagagagct

SEQ ID NO: 139941 - DNA, 645 bp, Homo sapiens
acccaaatctcatcttgaattgtaactcctacaattcccatgtgtcatgggaggaacctggtgtgaggtaattgaatcataggggtgggtctttcckgtgctgttctcatgatagtggataagtctcatgagatctgatgtttttaaaaacaggagtttccatgcagaagctctctttctctctttgcctgctgccctccatctaagacgtgacttgctcttccttgccttccgccatgattgtgaggcctccccaggcaagtgaactgtaagtccattaaataaatctctttcttttgtaaattgcccagtctcaggtatgtctttatcagcagtgtgaaaacggactaatacagttacgttctagctctccttttttgacatccctggggtcttggagaagtgttatatttcaggggtgttgtagagctctaggctttcagggcacgtcttttttaattttaattttttttacatttaaatttatttgttatttttaaaatttcaatagcttttagggtaagagtggtttttagttacatggatgaattatatagtgttaaattctgagattttagtgtagtcaggccacatcatttggtcaagtgtttaaaccagtgactcttgatagagaaagaaaaggaa

SEQ ID NO: 139942 - DNA, 638 bp, Homo sapiens
ttttgttccttaccatttcaataaaggcatctattgattaggaaaagaaaggtgaatgaaaagaacattggtctgggactcagtcccagccaggggcatggattcagttctgacttgtttgttagcactatgtcttatcaagcaagtaacttaacctttttgggcctctgtttcctcctctgtaaatgagaggattatactagaaagyctccaaaaacttctgcagctttcacactttactattgtatatgataagccaggaataaagctcattcttagaaacgtccttctttcgtcaaaaaatagcttgcaggtagctgcctgccttaacaatacttagtagaatattagttccatgtctacagtatcaccagtctcaactaaacatgccttttttcattatcagaagtaactatagaaaccatactgacagcagctattgtaaggaggctttaacatttttagggcttcaaaagacaccaacaaaaatggaggtggagaaataaacaatggcttttgctgtaactgcctccactttttcagcagtctggccacagcctcagcataatttaaaagtaccaggtgttcctgcagtttctttcaggaagattaggggttccattcaggaaagagtattc

SEQ ID NO: 139943 - DNA, 638 bp, Homo sapiens
ttttgttccttaccatttcaataaaggcatctattgattaggaaaagaaaggtgaatgaaaagaacattggtctgggactcagtcccagccaggggcatggattcagttctgacttgtttgttagcactatgtcttatcaagcaagtaacttaacctttttgggcctctgtttcctcctctgtaaatgagaggattatactagaaagtctccaaaaacttctgcagctttcacactttactattgtatatgataagccaggaataaagctcattcttagaaacgtccttctttcgtcaaaaaatagcttgcaggtagctgcctgccttaacaatacttagtagaatattagttccatgtctacagtatcaccagtctcaactaaacatgccttttttcattatcagaagtaactatagaaaccayactgacagcagctattgtaaggaggctttaacatttttagggcttcaaaagacaccaacaaaaatggaggtggagaaataaacaatggcttttgctgtaactgcctccactttttcagcagtctggccacagcctcagcataatttaaaagtaccaggtgttcctgcagtttctttcaggaagattaggggttccattcaggaaagagtattc

SEQ ID NO: 139944 - DNA, 563 bp, Homo sapiens
gcatgtagcgttttcccattcgcatgctctctcctgctccaccatgggaagacatgcttgcttcctcttcaccttccaccatgattataagtttcctgaggtctccccagccatgcctcctgaacagcctgtggaactgtgagtcaattaaacctcttttctttgtaaactacccagtcttaggtagttcttcatagcaatgtgagaatggactaatacattatctattaatttatctattatttagttcattgggttggaagcagaagacctaaatttatatctcatttgcaatatttaccgcctatgtgctccacaaatattcaaaattccttgaaccacacatttctcatctggaaaacagggctaacaatgcatagggtagtgtataccagatgatgtggtaaatgacaaatgacagtgtgaactttgcaaattgcagaatgtacatgtaagttggttttattgaagttattgccaataaggccaagttcayatacaacttgcttgccaaactgtgagtgaaaaatcacagttcactctattattttattacttaaaaa

SEQ ID NO: 139945 - DNA, 523 bp, Homo sapiens
gaattaaggaaaagttttggcacacaaatcatgttttcaatatttttatcattacattttcctgatttttatatttgtttcaacattgtacacaagaatccttgatactttcccccaaactggcatgtgatgatttattacctgccaaacggtgagtgaggaaagagttaccctttgtttttaagacaagagtctcaccctctgtccagactggggtgcagtggcacgatcatggctcgtggcagcctcaaccaccaggctcatgtcatcctcccacttcagcctcccaaatagctgagacaacaggcgcagaccaccactcccagckgattttttttttttttttttttttgtagagacagggttgtgcaatgttgctcaagctagcctcgaacttctgaactcaagcgatccacccccccttggcttccctaagtgctgggattataggtgtgagctaccagacccagcaacagttaattttaattaagactttaaaaagtgttttcagggatcagtgagt

SEQ ID NO: 139946 - DNA, 521 bp, Homo sapiens
acagtctcagcttattctagcatgcacctcaaaactcttccagtctcagtacattacctcatttcaaagccacttacacatttgtaggcactgttacagcggcaccccacttcttggtaccaatttctgtctcagtcacaaacatctagtccatagcaaggtggagtccaggagaagagkaatgactgagcacacagtattagtttaacccctggggattttagagtgtggtcaggaaacaactcgactccattcctctgcagctggttcagatctgcactgtggcgctagccagccctgccctctctgttccttctctggttagttactcaagacttgtgctggcacctctggccacctagaggcacacttctacacttctacattcttccagctgaggtctcttgggctttcaggaggccctccctggcaagatccaggataatctccagccagttctctttcacagggccccatctgaccccacatcatttgcatgaggaattcagcacacacttgct

SEQ ID NO: 139947 - DNA, 521 bp, Homo sapiens
acagtctcagcttattctagcatgcacctcaaaactcttccagtctcagtacattacctcatttcaaagccacttacacatttgtaggcactgttacagcggcaccccacttcttggtaccaatttctgtctcagtcacaaacatctagtccatagcaaggtggagtccaggagaagagtaatgactgagcacacagtattagtttaacccctggggattttagagtgtggtcaggaaacaactcgactccattcctctgcagcyggttcagatctgcactgtggcgctagccagccctgccctctctgttccttctctggttagttactcaagacttgtgctggcacctctggccacctagaggcacacttctacacttctacattcttccagctgaggtctcttgggctttcaggaggccctccctggcaagatccaggataatctccagccagttctctttcacagggccccatctgaccccacatcatttgcatgaggaattcagcacacacttgct

SEQ ID NO: 139948 - DNA, 606 bp, Homo sapiens
tatcagattttgcaattaaagttgttttggcttcaaaaatgaattgggcactttctaaacacattagataatagttctccaattttgttacgtgtcagaatcacctggaatgctaataaaaaatacagagacccaaatttgttgaagtaaagcaggcgctagcccttcgggtttttccactaacttacccagacgattcttattcataccagagttcgaaagccactgggttagaaagcaatgcaattatctgttgtttaaaagtcagttaaaatgcagctataagcacatcagttcctgatgactttctcaatgatagacctttaattatctttcaggttttttctgtggcaatttatctatttaagaaaactttaaaactgtgcatttatgaatataaatgcaaaaatttctaaatattagtcaataagtcccagcgatgtatcaaaagaataaagtgtgatgatgaggcagagttgttttccagtaaatgaagtttcaacatcaatgaaayatgtagacacatctattatattgacaaactgaaggagaaagcctgcatggccacagtaacaaaggctaaggcatgtgataaaattcagcacc

SEQ ID NO: 139949 - DNA, 593 bp, Homo sapiens
taactgcacataattgtataagcacaagcatttcctgggcatctgttctctgtcaggcactgaactgaaggatgaaaatacaaagacacggatttgtactggagttgyccacactccacgagaaggatgattttagagtcaaggattgacaatgggttagacagggaagtttgcagcatagacaaaccatttaaagttgcttgtggggaacagctgaatccccaacaagccatagctagatgcatctgtcaggcacagagttggctacagagggcactgcatgggcttataaccttgggcttattcccaggattcctgaatctctcctccttgcctaagactagtgtccctctcctgattgcattgttttgattgactgcttagtttccttctgccatgtagcttacatattgttcacatttcaagttccatgtggcaggttcttgtctttcggattttactatttgcaatgttcagtctacatgtgtgatgtcctttgtaaaccatgaatgttaatcagagtttaggtgtcagccacaacaaattttgagatgacaatgtctaaatcctaaaaacgtttgaaaccagaatgc

SEQ ID NO: 139950 - DNA, 593 bp, Homo sapiens
taactgcacataattgtataagcacaagcatttcctgggcatctgttctctgtcaggcactgaactgaaggatgaaaatacaaagacacggatttgtactggagttgtccacactccacgagaaggatgattttagagtcaaggattgacaatgggttagacagggaagtttgcarcatagacaaaccatttaaagttgcttgtggggaacagctgaatccccaacaagccatagctagatgcatctgtcaggcacagagttggctacagagggcactgcatgggcttataaccttgggcttattcccaggattcctgaatctctcctccttgcctaagactagtgtccctctcctgattgcattgttttgattgactgcttagtttccttctgccatgtagcttacatattgttcacatttcaagttccatgtggcaggttcttgtctttcggattttactatttgcaatgttcagtctacatgtgtgatgtcctttgtaaaccatgaatgttaatcagagtttaggtgtcagccacaacaaattttgagatgacaatgtctaaatcctaaaaacgtttgaaaccagaatgc

SEQ ID NO: 139951 - DNA, 593 bp, Homo sapiens
taactgcacataattgtataagcacaagcatttcctgggcatctgttctctgtcaggcactgaactgaaggatgaaaatacaaagacacggatttgtactggagttgtccacactccacgagaaggatgattttagagtcaaggattgacaatgggttagacagggaagtttgcagcatagacaaaccatttraagttgcttgtggggaacagctgaatccccaacaagccatagctagatgcatctgtcaggcacagagttggctacagagggcactgcatgggcttataaccttgggcttattcccaggattcctgaatctctcctccttgcctaagactagtgtccctctcctgattgcattgttttgattgactgcttagtttccttctgccatgtagcttacatattgttcacatttcaagttccatgtggcaggttcttgtctttcggattttactatttgcaatgttcagtctacatgtgtgatgtcctttgtaaaccatgaatgttaatcagagtttaggtgtcagccacaacaaattttgagatgacaatgtctaaatcctaaaaacgtttgaaaccagaatgc

SEQ ID NO: 139952 - DNA, 519 bp, Homo sapiens
taaccactcagcactgctgttacagcatgaatacagctagctaatatttaaacgattgagtgtggttgtattcccataggaactttatttttgatttttatttatttatttatttttgagatggagtctcactctgtcacccaggctggagtgctgggkcgcgatcttggttcactgcaacctccgcctcccaggttcaagtagttctcctgcctcagcctcctgagtagctgggattacaggcacacaccaccacaccaggctacttttatatttttagtagagacggagtttcaccatgttggccaggctggtctcaaactcccggcctcagataattcacccatctcagcttcccaaagtgctgagattacagatgtaagccaccgctcccgacctggaactttattttttaaaaaacagttttttgtttttttttttctcctttgttttgtgggaggggttgcctgcaggctgtcgtttgccagccctgatgccacacaagtattaggaataatc

SEQ ID NO: 139953 - DNA, 519 bp, Homo sapiens
taaccactcagcactgctgttacagcatgaatacagctagctaatatttaaacgattgagtgtggttgtattcccataggaactttatttttgatttttatttatttatttatttttgagatggagtctcactctgtcacccaggctggagtgctgggtcgcgatcttggttcactgcaamctccgcctcccaggttcaagtagttctcctgcctcagcctcctgagtagctgggattacaggcacacaccaccacaccaggctacttttatatttttagtagagacggagtttcaccatgttggccaggctggtctcaaactcccggcctcagataattcacccatctcagcttcccaaagtgctgagattacagatgtaagccaccgctcccgacctggaactttattttttaaaaaacagttttttgtttttttttttctcctttgttttgtgggaggggttgcctgcaggctgtcgtttgccagccctgatgccacacaagtattaggaataatc

SEQ ID NO: 139954 - DNA, 519 bp, Homo sapiens
taaccactcagcactgctgttacagcatgaatacagctagctaatatttaaacgattgagtgtggttgtattcccataggaactttatttttgatttttatttatttatttatttttgagatggagtctcactctgtcacccaggctggagtgctgggtcgcgatcttggttcactgcaacctccgcctcccaggttcaagtarttctcctgcctcagcctcctgagtagctgggattacaggcacacaccaccacaccaggctacttttatatttttagtagagacggagtttcaccatgttggccaggctggtctcaaactcccggcctcagataattcacccatctcagcttcccaaagtgctgagattacagatgtaagccaccgctcccgacctggaactttattttttaaaaaacagttttttgtttttttttttctcctttgttttgtgggaggggttgcctgcaggctgtcgtttgccagccctgatgccacacaagtattaggaataatc

SEQ ID NO: 139955 - DNA, 519 bp, Homo sapiens
taaccactcagcactgctgttacagcatgaatacagctagctaatatttaaacgattgagtgtggttgtattcccataggaactttatttttgatttttatttatttatttatttttgagatggagtctcactctgtcacccaggctggagtgctgggtcgcgatcttggttcactgcaacctccgcctcccaggttcaagtagttctcctgcctcagcctcctgagtagctgggattacaggcacacaccaccacaccaggctacttttatatttttagtagagacggagtttcaccatgttggccaggctggtctcaaactccyggcctcagataattcacccatctcagcttcccaaagtgctgagattacagatgtaagccaccgctcccgacctggaactttattttttaaaaaacagttttttgtttttttttttctcctttgttttgtgggaggggttgcctgcaggctgtcgtttgccagccctgatgccacacaagtattaggaataatc

SEQ ID NO: 139956 - DNA, 565 bp, Homo sapiens
ctcagaacttgaaatctcttggccctatgtgaactcaggaaaatgctcaacctaaagatgaccaattcttctttacctcataaaatttcaccttattcatgcataactacatttagcacatctgccttagccaaccaaaattccaatctatgtccccacaaccagagagattatcatgctrtatatgggtccatctccctgtgctgtggtgtagaaaagtcctctaggccaataactggggtgattgtaaggttggcctcaattgtatataatatattatatatgttagtattatatatattatatataaaaaatataatataccagaacctgggcatagattagttcattagttaatattattattgctgtcattatttaaaaaatagattatctgagaagtaataaggtcacagacgaagtttatatatattggcagttgggggagagaggaggtaagtgggtagaagtttccaaaatacaagatgtgataagcataaaagaaagacagagaggatggttgatagaagggacaggaagtaggaagcctaaataagatgtatag

SEQ ID NO: 139957 - DNA, 588 bp, Homo sapiens
aacttgaaatctcttggccctatgtgaactcaggaaaatgctcaacctaaagatgaccaattcttctttacctcataaaatttcaccttattcatgcataactacatttagcacatctgccttagccaaccaaaattccaatctatgtccccacaaccagagagattatcatgctatatatgggtccatctccctgtgctgtggtgtagaaaagtcctctaggccaataactggggtgattgtaaggttggcctcaattgtatataatatattatatatgttagtattatatatattatatataaaaaatataatataccagaacctgggcatagattagttcattagttaatattattattgctgtcattatttaaaaaatagattatctgagaagtaataaggtcacagaygaagtttatatatattggcagttgggggagagaggaggtaagtgggtagaagtttccaaaatacaagatgtgataagcataaaagaaagacagagaggatggttgatagaagggacaggaagtaggaagcctaaataagatgtatagaagataagaagtaagcactagaagatct

SEQ ID NO: 139958 - DNA, 618 bp, Homo sapiens
cattatagtgtgagacaatagagaaaatcatttcttttctttgccaagtacttattttatatacattacttagatcagaaattggtattgatggtgtacatttaaaaattaaataagggctggccacagtggtcggccaagtggaaggccaaggtgggcttgagcccaggagtttgacacaagcctgggcaacatagcaagaccccatttctacaaaaaatacacaaattagctaggcacggtggtatacgcctatagtcccagctaattgggaggctgaggtggaaggattccttatgacccagaagcagaggttgcaatgagccaagatcatgccactgcactccagtctgggcgacagaccaagactctttctcataaataaataaataaataaataaataaataaataaataaawagttttgtgcatcaaaggacactatcaggagagtgaaaaggcagcctgcaggagatcatatatttgctacagtgttaatacccaaatatataaagaactgctacaactcaaaaaaagcaactaaaaactgggcaaaggacttgaatagatatttccccaaagaaaatacacaaatgtccaacaaacatatgaaaagatg

SEQ ID NO: 139959 - DNA, 587 bp, Homo sapiens
tccttcgtccctttcaccatgtgaggacacagctagaagacaccatctgtgaaccagaaagtgagtccttatcagacactgaatctgctggcaccttgacttcttagccttcagaaatgtgagaattaaatttctgttgtttataagatacacaatttatgatatgttgttataacagcccaaacatatatgatgtattgaaatcttctatgaaaaattgtgtgattttcctcaatttcttcatgtttctaacagattttattttattatgcatatctgaagctgtgcttttcagcatataaatgtttattgttctataactttgatataggtagtgcctcataagtagtacctyttgtctgagagtctattttgttttcttccatgaccctgtgaactccaaggagttttctaaaatattttctgctttggtagtatgcaaaattcctaggcctgaaatttctttaattatctttacatgaggggtggtctagctagtccagtctttgccgacttaaccttggtcttcctctctgtaccttcactctagttatattgaattctggaccacagccagggaccacatt

SEQ ID NO: 139960 - DNA, 575 bp, Homo sapiens
taacagtttttgagtattttaataattttttaaaaatgtattttaatttttgtttttgtttttrtttgtagacagggccttggtctgtcacccaggctggagtgcagtggtgcagtcatggctcactttaagccttggcttcctgggctcaagcagtcctcttacttcagcctcctgagtagctaggattacaggtgcatgccaccatgcctggctaatttttagatttttttgtagagacagggtctcactatgctgcccaggctggtctcgaactcctgacctcaacccattctcctgccttagcctcccaaagtgctgagattacaggtgtgagctaccaccctcagtctgagtattttacggaagctaaatagtcaccctaagctttttattttccaggtgaaaagtccgctgcccttcagtggattcttattatactcttatttggtagaccttttttccaaacttactgtattttattggatatattgctattacttttattagactgtaaggtcatttatgacaagggatgtctaatttttctgtggtttgcaatgtctgtcatagta

SEQ ID NO: 139961 - DNA, 536 bp, Homo sapiens
aagtgctgggattacaggcatgagccaccgcccccagcctgtgcccttttcactaaatcacatttattgaggtttctttgggscactcctgcttgcgttttcacatttcttatctatgcacctgaattttccctttggaattttgaccacagaacctgttttgtttcagttagaataatcctcagtctggaaatcatgtattaaatgacacaatgggatggaattgtagcctataataagtgaagagaaagagaagattaccacctaagagctttaaatacttgaaatgcgcctggtctccagatgcagagaagttgtgttgaaagaatttgtatgatagctcctcatacagtgtttttatttataaaagtaattcatgtacatcagtttacaaaataaaagttcttacgtaagaaatgttagtcaccagtgtgatgaaacgtagaatgaaaccttaaactgtgttaatagaaatgtggtgtcagaatcatagatggtagtggttcctttgtaatcttcgctgagatgatgaattc

SEQ ID NO: 139962 - DNA, 656 bp, Homo sapiens
atactctaatcaagatagggaccatgtccatcactccagaaagtaccccctttcagttagttttcttcaacacctatgtcttggaacgggtcatcagatttctgtcactgtaaattacctttggcctgttgtagaaataactacataataatgaaattgtacaggataaactcttgtatctggcttctttgactcagaatgttttcaagatttatccaagttgttgcatgcatcagaaattagttatcttagtgaataatagttttccacgtgccagtgctgatttggccattcgttcgttgatgtatatttggaccttttagagtttttaagctattatgaataaatctgttgtgaaattctctataaggttttttatggtcatttttttttcttggatacatactgagtagaggaattgccaggtcacattgttaactgtatggttaatactctgagagagtggaaaagtgcttttttaaagtgatcgtaccactttacagtcccacattgatatggtttggccgtgtccccacccaaatctcatcttgaactgtagctcccataatccccatgtgtctcaggattccccacgtgaatcatgggrgtgaattttcccttactgttctcatgatagtaaatgtctcatgagatct

SEQ ID NO: 139963 - DNA, 653 bp, Homo sapiens
gtttttaggctggtattcagtaggagaagataaaagcagtttcaaataggtctttaccctatggtttatttatttttgaagagacatgagctctcagaatatcgagaatatctcatgatcagatgtaaacacaaaaaacagtttcgagccaatataaatagttcttttgaattttcctaattatactactgccttgrttagggtgaaaaattgcatttagggtaattaacttactcataatatggatgtgaaggcaactgactttatttgtgattatatagttgggtgttgtgaatgttattatagtcaaaatttctgcttaagtgcatataggctatttttgtacattttaacatttcctcatagtgttctgaagaccacactgaaaaaaatcccttttaaattactgattttcattacctgattaacttatgtgaatctatgatgaggctctcaggtattaactttaacaaattaagctatcatgtttataatcacatgaagaatttgaggcaggatgtcctacctgacatcaggtacttcttctacatttgataaaacgaaaaatgcattggaagacagatgcagtactttggaagacagacagaaaagtacaataaagattaaaagaaagatgggcaatttggcagtca

SEQ ID NO: 139964 - DNA, 653 bp, Homo sapiens
gtttttaggctggtattcagtaggagaagataaaagcagtttcaaataggtctttaccctatggtttatttatttttgaagagacatgagctctcagaatatcgagaatatctcatgatcagatgtaaacacaaaaaacagtttcgagccaatataaatagttcttttgaattttcctaattatactactgccttgattagggtgaaaaattgcatttagggtaattaacttactcataatatggatgtgaaggcaactgactttatttgtgattatatagttgggtgttgtgaatgttattatagtcaaaatttctgcttaagtgcatataggctatttttgtacattttaacatttcctcatagtgttctgaagaccacactgaaaaaaatcccttttaaattactgattttcattacctgattaacttatgkgaatctatgatgaggctctcaggtattaactttaacaaattaagctatcatgtttataatcacatgaagaatttgaggcaggatgtcctacctgacatcaggtacttcttctacatttgataaaacgaaaaatgcattggaagacagatgcagtactttggaagacagacagaaaagtacaataaagattaaaagaaagatgggcaatttggcagtca

SEQ ID NO: 139965 - DNA, 521 bp, Homo sapiens
tatttacactaaagatatagtaaaatgcgtgttttatttatttaaaaatattttacttaagtgttctattttgttttgttgtcatcacaatgaatattatttcattcaatgtagttgcatacgtcaatatcatcgttcaacttctgaaaacattattataagaaaacaaaataacttttacaattaaataaagtacattctcactcttcatttaattattgaagctagaaaaatctaaaaaaatcttccagctgcaaatagtatgaattacgtggctaaaaaaatcttgtgttcttttttctgaattattgtacaatagaaattttgatycttaaatatgactttagagaaatagagttttttctgcacatgaggtagttattaataagagaaatagcaagtataagatatgatgattggtaaatctttcatgcctctgcatttatttgcaaattaattctaaggcaatatatttttcctttagatattattatttatttttttaaaaatttaacagtcct

SEQ ID NO: 139966 - DNA, 566 bp, Homo sapiens
ccttaagggttagagctgaatgctttaaagatttayacattaacacatacacagttctggaagatgcattctgcttagccatatacatgtagatgacatacagatcatttattccactttaagcaatattgtacaagttcattttagtggatctgtttacatggatagctgacttactgtggggaaattgccaacattttctaaaattgaatccagataagacagaattccttttgattggaacttatccctagttcgatcaacactcttccgtcacggtgaaatttggcaactcattcatagcactggtcccaaaggggaaaaccttggttttatgcacaactctactctgtcatttatgaatcgtgtaaatataaatattaaactgtcatatttttctttaaggaatatagcagggataaagtaaataatatctactcaagatacggaagtgttgctttctgattagcacttttcatttatagtactgaaattccttagtatttgaatgaatagagcaagcacattctaaatgtatacattttaatactaattttgggaaagct

SEQ ID NO: 139967 - DNA, 500 bp, Homo sapiens
ttaatgctccttcactaggtgatggtgggatagcgatccactgcctcaattaggaataattctgtagtgacatccaagttctccacatgattggctaagtccaccattgtatcacatggagggtcaatttcttgctttctctgcccctgctttcytcatttcctaaccagtggagctgctaatcacctccccaataaacctgaatgaaactcaaggattttttcctgataacctaatctaagataaacctagtggtagctttagtaatggtagaagtgtctgtgtttgactttcactgcttctgaagtcatgaacaattaagtatgctcctctaagctcaagggccctgagatacaggatcaatttggtttatcctctgcctctagtcattcagtcatttcaaggtgtcccttctagatttgggctacaactcttgaagcctagaaaacatttctaaaaatcctcagaataattcttataaaatatgttattctccagag

SEQ ID NO: 139968 - DNA, 607 bp, Homo sapiens
aagcttctactcacaggatagggcaaggaaagtcagtgtgtacagagatcacatggtaagasagaaagtgagagagatgagtaagggtcagtctcttcaccagtcagttgtttcgggaactaagagtgagaactcactcctgtgaaaatggcaccaagccattgatggatcccctacccaaggatccaaacacctcccacaaggccccacctccaacattggaaatcaaatttcagcatgagacttggcaggacaaaacaagccatattcacaccatagcgtatggtaatacctctaaattcataggtatatcgtgaacctttagctccaaagacagaaggccaatccaaactagctaaaacacaatgcaaattattggcttacttaaactggaagtccaaaggtgaggtgggcttcaggattgattaaatgagcaacatcagctcaacaggcctgcagttctcatacctttcctctcctccagctgtggggtttatctttgggcagggagtaagatggtggcagctgcttaggtctcctctcaatataagacaaattccctgtaaagagagagagtgttgcctcttgaagttctacaggaagagta

SEQ ID NO: 139969 - DNA, 541 bp, Homo sapiens
tccatttttaaattctgttcaagaagggccattctttcttatataccctttcacacatccattttgctcctcaatctcacctcatcacatacacgcatagttcaggatcctgcttctttattttcctgctcttttttataatacacattttccataaatgttttgaagastgctcatatgtatatgtgcatataagcatatatgctcatgcacatgagtacataaacatctatgtccacacgcacacatacatacatatatatacttaatccttgcaattttttcatataaatattattatttttattttaaagatggaaaaacatacagacacacagttaagtaatctgccccaaatcacacaacttttaggtgaatgaatctaaattcaaacctacttgaccccaaagcttgaatttttaactactatgctgtatggcctctctagtgatagaacactagaaatattcccattaaaatctggaagaagccaaggatgcctgttgtcacccctattattcaacattgtccatgagctctg

SEQ ID NO: 139970 - DNA, 526 bp, Homo sapiens
cttgcactactaaagcctttttggggagttgaggtgacagggtggtsaggctaggaacatgatttactactcagatgaagaaatagtaatgtcattgtccaggcaaatcatttcttggaacttctttggctggtctcctgctggaagatttaattgatttttgaaatgagcttagacatatgcaatttactttaggtcaaagtcttcattaaaatgaaaaatttttgttgacatctcttgagtattatgtaattttctatgcaataaggagtagtgatggttatggcctcatttaaaatacattgttatccttcctagaaagtatacgagattttttttaaaaagagtaaacaagcaatttgggaaagaacaagacgtaacagaatcaggaagggtactaatggtgctattctcacattttgacacaatctctcatttaagcatttaacaaattagatacaacagacaacttgttctggggaatcagcactacatagtgaaaattttacaaaactacagctagtac

SEQ ID NO: 139971 - DNA, 384 bp, Homo sapiens
ttgttttaattacttgtgttgtttcatttaattcactgaaagagatattattgctctaatttttgaagatgaaaaaaactaaggctcagagaggttaagtaatttgtttaaggtcagaacaatattgtgctgcccagtattatgcctgagttatactactgcagactttgtaattgcttattgtatgctagtttctgtcagtagtttgattcactgcacagttgttcaaattgtgcaaggttggagaatcctgaagaaactttgaaatcagttagactttgcctaacttaacaataattttacattttaattataccattatattgaccaactttttggttatygtcacctaaaataaatatgtatgtgagtgggaatttgtgg

SEQ ID NO: 139972 - DNA, 584 bp, Homo sapiens
cctggtagttaaagattgacccctgacctaatcggttatctatagattacagacattgtatggaaaagcactgtgaaaatccctgtcctgttctgttctgttctaattactggtgcatgcagcccccagtcatgtaccccctgcttgctcaatcaatcacgaccctctcatgcagacccctttagagttgtaagcccttaagagggacaggaattgctcatttggagagctcggtttttgggacatgagtcttgccaatgctcccggccaaataaagcccttccttctttaactcgttgtctgaggggttttgtctgtagcttatmttgctaacagatccagaaattggtggaaacattttttttccaatatggaaaataagaatcactttaatttctgtaggaaggctataattttggcataggtgaatagtgctataaatgtaatattttagataattatattcttatttttatcagttatacatgtacatgttttaaacaaccagataattttacaagacttataaaatagtcttgttgattaaaaaaactctgtataatatttaaagagatttattctga

SEQ ID NO: 139973 - DNA, 593 bp, Homo sapiens
taacattatgtaacacttgattcaattgcattgttttgcatgtagcatatatcaacctccctgtattgcagtgagtcattccagatgtagggaacacatgtactcatcycatccttgaatcccacgttcttccataataagtgtttattagtagatgtgtgttacatgaataaattaataaattggtgaatgaatggatgcgtagatggttatgtaaaaggatagataaatttcttaccccttgacacactattttcccagaagatgcaaggcttttatttatgttgttatattttgctgggggattttcttgtttgtgatttttcattcactatgtaaagaagaaaatagatacctgtgaactgaagcaaacctaaaacaaattgcctaagaccatgaccaacttgtctacaatcataatcataaaatacattgcatataaatatatcatagttgatcataaaggagaataagaaagagacgataggtgaattaatgaaaacctgacaccacaagtaaaaaaaaaataaaatcaaaagccgagggggttaatcagatgattttatggtagaaaaaacacttccatttatgtt

SEQ ID NO: 139974 - DNA, 597 bp, Homo sapiens
atttcctttcctttcctttcctttatttcttttgttgttgttgttgagacagagtctcagtctgttgcccaggttgaagtgcagtggcgcagtctcagctcactgtaacctccacctcctgggttcaagcgattctcaagctactcctcccaagtaggtgggattacaagcatgtgccaccacacctggctgatttttgtatttttagtagagatgaggtttcatcatgttggccaggctggtctcgaactcctgacctcaggtgatccgcccgcctcagccttccaaagtgctggggttacaggcgtgagccactgagcccggccagttcatctgtttctgagaagccttgggctttcctggggataataagtgaccagtggcaatctatgggaaatacctgggaaggtgacagaagcagtgaagcagagaaacggagtgggggcactgacatttgagatgatcttttccaacatcataattctatcttgagraaactgaggcatgaattatccatgaagcagctctccatccctgaactccctatagtagcttagcaaggatggagcgcaatccctgttggtactgattagacag

SEQ ID NO: 139975 - DNA, 540 bp, Homo sapiens
atgaggcccacccatattatgaagagaaatctcctttactcaaagttcaccaacttaaatgttaatctcatccagaaacaccctctaagttgacacaaagttaatcatcacaatcctgaatggattccaaggtcctgctttggtttcctgtgttgttgtacatggaaaaattacctaagagtctgacccacgtatgaaccctgccttctaagcttcattgcttaaacaaaggcaaaatagaataaasagagaagagtagaagtggctgcaaaatgaagaacattagcttcattattaggacagtagattccaagccagtagggttttgatgagcatttctgtcttcctcattatactgtcattgccttatcctgagttttccaccttcaatctgtatgcccttgatatagtttggctgtgtccccacccaaatctcatcttgaattgtagctcccataatccccatgtgtcgtggaagggacctggtgggaggtaattgaatcacagggacaggtttttcccatgctgttctcatgatag

SEQ ID NO: 139976 - DNA, 540 bp, Homo sapiens
atgaggcccacccatattatgaagagaaatctcctttactcaaagttcaccaacttaaatgttaatctcatccagaaacaccctctaagttgacacaaagttaatcatcacaatcctgaatggattccaaggtcctgctttggtttcctgtgttgttgtacatggaaaaattacctaagagtctgacccacgtatgaaccctgccttctaagcttcattgcttaaacaaaggcaaaatagaataaagagrgaagagtagaagtggctgcaaaatgaagaacattagcttcattattaggacagtagattccaagccagtagggttttgatgagcatttctgtcttcctcattatactgtcattgccttatcctgagttttccaccttcaatctgtatgcccttgatatagtttggctgtgtccccacccaaatctcatcttgaattgtagctcccataatccccatgtgtcgtggaagggacctggtgggaggtaattgaatcacagggacaggtttttcccatgctgttctcatgatag

SEQ ID NO: 139977 - DNA, 463 bp, Homo sapiens
ctattcccaccacacatagccttttggttctctrtgtctgcactgcataatctaacacagtggctcccaatgtgctttttaaatatgaggccatctttaaccatttaaaattgtatttatctgtataaaactaaaacatacttgtaaaaataatacaaatattttgccaggcatggagcagagtcctcagtcagtatgcatttcttctccagggtaaaacagagtccagtaaggtggttttagctgtgatgcactggggagatggtgctgtgtgttgtcaagaaatttagaattagaagttttgggttctggtaatatttctgccacttactagttgtatgcctctgagaagtccacagctccaagcctgtttctgctcctggaatgtaagtccagttgagccctttcacagccaacccacccccgtgtcagtgtgagatctgcacagtatctgcgaaaatgc

SEQ ID NO: 139978 - DNA, 261 bp, Homo sapiens
ctattcccaccacacatagccttttggttctctatgtctgcactgcataatctaacacagtggctcccartgtgctttttaaatatgaggccatctttaaccatttaaaattgtatttatctgtataaaactaaaacatacttgtaaaaataatacaaatattttgccaggcatggagcagagtcctcagtcagtatgcatttcttctccagggtaaaacagagtccagtaaggtggttttagctgtgatgcactggggag

SEQ ID NO: 139979 - DNA, 553 bp, Homo sapiens
cgaaaatgcttcataaattatctagagttatgcaaatgtgagtattatggggattacagtatgttattgcctggaatcatgcttccagtattttaaagaatccattaatgggatgctcttaaattttttttttcctggcattattctcagccaggctgcaacaaggagtcttacttgatcagtatggcctttacttaggtatttacttagcttttaggtctttaaagcagcacatgattttcaagtgagttattcaattaatcgtttctgtatcactctgatgcccctttggactgtctgcttattgaaagccgtcccatctggagggactgccctaactccctgctcatcctgcaaacagatcaaatggcctccaggggaaatcccaattaatggcaaaatcaattagtcacaagttgggaagaaagagagagccaaatggttacccaacacataatgtaccttcctttacacaatgtgtggtccagtaatgcatctagatgggatttytacaaattgaatcaaaacgaaggagattgctatttaaaggacc

SEQ ID NO: 139980 - DNA, 568 bp, Homo sapiens
gcttaaaatcaggtctgcaggtcagccagactcatatggaagacatcacgtggaagggaccaaccctctyattttacaaatgaggaaagcgaggcacagagaggctaatgtgactcacctgccactcaggtgggcaagtcatttcttttccctccatctcctgatgtgcatcacagcatcttcctgccttgaagacagggagccaggggtgttgtgctcattagtcgggtaatggctgccaccacctttgaagctgctggataggatcccaggtaaatagcattaccccctgcaaatgaaatggttccctgtacacaacctgttttcacttgttgcctgtggccgctggccacttgtggctggaaagattactactgaactccaggtcataagcctccatctgctcacaaccttcagaaaataggagggctgggtctggttcttattattaaaagcaaacaaacccattattaaaagtaaacaagacagaactgctttgaaacaattgactaaatgtctcctggctcagaagcctaaattcacccctattagcccaaaccaagccttc

SEQ ID NO: 139981 - DNA, 538 bp, Homo sapiens
ttcaattatctcccacccagtccctcccacaacatgtgggaattcaagatgagatttgggtgggaacacagccaaaccacatcatctgctgtgcctcatcccacagatagcagagcttcctcctaatctatcaagagttcagcatttagtgagtggtcaggatctcacccttcatttaaccaactaaccaccaccaaccaaccaccaccatcagaggtgggcctaaggcaggccttggggtctctgggaagtgggccatgctcagtctacatcccaatgtgctatggctcctgacacyctgagcaggggctctcccttgcacacaccaaaggaatgactgggcttaaaaaacgtgccaacttgcttataaatcagtctcctcagattctacaattcaccgagccataaaacctcagagcttcaaagatgcttagaaaatatcaaggccagggttcccaggaagcctcaatgctgccattttacaaaggaagaaactgaagtgcagagagattaaggggcttgtccaggtcacacagct

SEQ ID NO: 139982 - DNA, 415 bp, Homo sapiens
tttgcccatttttaaattgggttatttgtcttcttattgttgagttgtaggggttactttttttttaatctgtcttgtttttagtttttctgttttttggttttkgtttttgagacagagtctcactctgtcacccaggttagagtacagtggcaccatctcggctcactgcagcctccacatctcaggttcaagagatcctcccacctcagcctcctgagtagctgggaccgcaaatgtgcaccaccatgcccagctaatttttgtattttttttctttatctttttctttttttggagagctggagtttcaccatgttgcccaggttggtcttgagctcctgacctcaggtgacctggctaccgtggcctcccaaagtcctaggattacaggaatgagcaccatgcccgatct

SEQ ID NO: 139983 - DNA, 434 bp, Homo sapiens
gagaatggagtagttgtggtggtggtagtcatagcaggagggtgaaaccttcaccgaatgctgactgtgtgccaggcactttgtgtgggttacttatcttccttaatctttacaactctaaagggtgggtactattattatcacaatttttacatacaataaaaacttaggcttagagagggaggttaactaacttgatcaaagccagcagcttgsaagtgcaggagccaggtgcagacctggaatgctttgctgcacactgcgtctcccacgagtgtaaacacttggccactgtactttgcagtggagccgcagatttaagctttcacttggggtcactaaatctggtgaatttctaatcagatttatagaatatatcacatgtgatgtccagcctgtgctctgcccaccttctgtttttttcaacaggacca

SEQ ID NO: 139984 - DNA, 502 bp, Homo sapiens
gcctctgtagctctcattttgtaagtatttctcatagccaggtttcctctgaatgccaactcctaacagctgaatgtcaaactctagaagacaatttgacaaggatcacttcagccctccctacatggatacgcagaccttcatagagatggcctcagaataagtccagcagatcctaacagaataattagcctcaggccttgcttggtaactgaactcaagacactccatctgggctcaggatgtgtttcccagctggatttccttaggccttcaatttagcagccctcccatttcatgttgaaataactgggatcaacgttccccaggcaaggtaaagaactggagagctcartgcaattctttattccataagtgacttcaccttgcaaccatccgcagttttcagaaaggaatgttatcagtgggcacacctaaaccatccctcccctctctcgctacacacccactgcataacctgccatctctttagacacaaagc

SEQ ID NO: 139985 - DNA, 567 bp, Homo sapiens
gttgctttctcatcagaaagaaatcaatatggtaagcgaatgaaggattcatcatgactatgggcatggccagccagattcactcatttgcatkcaggctatgaatccctcaaaattcaactcaaatgccatcgtttcaaagccttcccttctaccttcacttggaagtatctcttcctgttctggatgtccaaagcatcttgcacttctccttaggttccattttccattgcagtatggtttttaatgtacatttctcatatcttgtattacatgccttgaggtttatttcatctttatatccctaagttactagccctttgcttggtagagtaagtgttcaataaatatttgataatcaaatgattaattgaatttgaagtgagaatactgttctggcaaggaaactcgactggggtaaaatagattcattatctgtcacattgtccttgcagggaaggtcactgggaagacccagtggcctgagaacatacgaaatgtcaaaaatcctctaccagagctgtacaacaccttgagtttagggtaaaagaaattcttgcataatct

SEQ ID NO: 139986 - DNA, 567 bp, Homo sapiens
gttgctttctcatcagaaagaaatcaatatggtaagcgaatgaaggattcatcatgactatgggcatggccagccagattcactcatttgcatgcaggctatgaatccctcaaaattcaactcaaatgccatcgtttcaaagccttcccttctaccttcacttggaagtatctcttcctgttctggatgtccaaagcatcttgcacttctccttargttccattttccattgcagtatggtttttaatgtacatttctcatatcttgtattacatgccttgaggtttatttcatctttatatccctaagttactagccctttgcttggtagagtaagtgttcaataaatatttgataatcaaatgattaattgaatttgaagtgagaatactgttctggcaaggaaactcgactggggtaaaatagattcattatctgtcacattgtccttgcagggaaggtcactgggaagacccagtggcctgagaacatacgaaatgtcaaaaatcctctaccagagctgtacaacaccttgagtttagggtaaaagaaattcttgcataatct

SEQ ID NO: 139987 - DNA, 560 bp, Homo sapiens
agcgccctagaactggggaataataaaatacttaaagggttttgttgaagtatcatttttaaggatcttttattctaacttatagacttttctttataccatttaaaatatattgaaggaatttaagaaaagccttagattttggccaaagacacagaaaaacaagggtggttggaccatacaaattatttagggttcgcaacctacatgtgcttagctaaaggatagcaattctgttcaagcacataaataaagggaatccattgcaaacaatccaccttctattcacaatcccttgaatctgtactgtaactggtcaagattcttgtgraaaccttgagtctttatggcatcgctggcttgtagactacaaaagtttccaaatcaccgttcctcttaacatgtggtatgaaacagagttccagaacgtttagagaagaggtgggggctgggcacaggatagttcaccaccaaatagcacaacacataaaatcaacctagggaaaatggcggagtcaaaaagtcaaaagcagccacatcacacaagaatgccagggagt

SEQ ID NO: 139988 - DNA, 420 bp, Homo sapiens
ggtgtggggactgtggctaataacagtgtactgtgtcaggaggttcactaaatgagattacacctgctcttgccatgaagggaaaatgggtaactatgtcactacatatatgtaactcataacatgtacagctttaaatatactcgataaaaaaaaaaatttttttttttaagtactcagaggccaggcgcagtggctcacgcctgtaatcctagcactttgggaggccaaggcaggcggatcatctgaggtcgggagytcaagaccaacgtggccaatatgctgaaaccccgtctctactaaaaatacaaaaattagctgggcgtggtggctcacgcctgtaatcccagccactcaggaggctgaggcagcaggatcacttgaatccaggaggcggaggttgcagtgagccgagatggt

SEQ ID NO: 139989 - DNA, 420 bp, Homo sapiens
ggtgtggggactgtggctaataacagtgtactgtgtcaggaggttcactaaatgagattacacctgctcttgccatgaagggaaaatgggtaactatgtcactacatatatgtaactcataacatgtacagctttaaatatactcgataaaaaaaaaaatttttttttttaagtactcagaggccaggcgcagtggctcacgcctgtaatcctagcactttgggaggccaaggcaggcggatcatctgaggtcgggagttcaagaccaacgtggccaatatgstgaaaccccgtctctactaaaaatacaaaaattagctgggcgtggtggctcacgcctgtaatcccagccactcaggaggctgaggcagcaggatcacttgaatccaggaggcggaggttgcagtgagccgagatggt

SEQ ID NO: 139990 - DNA, 493 bp, Homo sapiens
acttcaacatatgaatttcaagagggaaacaaacattcagatcatagcatccccttacctcatctactctatcctttggtctctatactccaatcacactgacatcctttcagttttattgaatgcgccaaacattttctcttctctgggaatttgtgtatgctgtcaccttggcttgaaatagtcttcccctccaactctgtctggctagcttctcattgctcatatcttggattccatttcacttctcaaacaagatactccctaactatccaggccaaaataggtcttctcccttattataacaccacttgtgctttccacccacagcatctgcaataatttgtaataatatattttatttatttacttgcttcatcttytaatatctctcttacgaactaactgtaaactccacaaggtaggtaccatgactattctgtccacaagtatctctgcatagtccctagcataaaaatcactgaaacacatt

SEQ ID NO: 139991 - DNA, 552 bp, Homo sapiens
aattgagtatgctgtaccctgatttcagacttctagcccccaaaactgtgagaaaataaatttctgttgtttaagccactcaatttgtggtattttgttatagcaggccaagccaactaatacaacctgataaatggtatctataaaatgaagcaaatatcataataataaaatgttaaaaaccattccctttaaactcatagcaaggtaaggatgccaactagcwctatgtttattcaacactgcacatatggatctacctatcccaagaagacaaataaagacaattaaatgtctaagaattataaaggaaaaatactaaatcatcagttttctcagatattacaatttgcagaaaaaaacaatttataatactttttatatttacaatatgtatcttctgtttttgaaatgaatagaaattcattaaacaatattatatttttaacttcagcccaaatattctattttaatgatttgggggcctcaaaaatatacttaggcaatattctcatcaccccttaatagtttcatgctccctgtgcatgcttg

SEQ ID NO: 139992 - DNA, 595 bp, Homo sapiens
gtttttattccttaagcgttttaaaacaaatcccagaccacgtgttatttaattcctacatactcagtatgtatctctaaagaaaaaaaaaatgatakaactactataatgccattacttctcccaagaaacaaaaattaattggcatcacataatacccagtccatatttaaatttctctgacagtctcaaaatttgttttaattgaattatttaaatcaggattcacagaaaggtcataaattgttatgtattataagtcttattaatatagagaagcccttctcgcttgcctcttttgcctgccattaacctattgattaaactgagttcgttatcttgcaaactgtcccacattctggttccagtgttgtcatttaacttgttcttttatacctgtgtttcctgttaatggtaaattagttctaaaacttgattaggttcaggtttactctttttgaaagaatacttttggaaattgttcttcatatttcatcacattaggaggcacatagtgtctgaatgcctcctctttgtgatgcaaagattgatcacagggtacaggtggtgacagcttatccttctcttgcaaaca

SEQ ID NO: 139993 - DNA, 450 bp, Homo sapiens
tagaaagcttttgcacagcaaaggaaacaattaacagagtgaagagttaacctacagaatgggagaaaatatttgcaaacaatacatctaattaggggttaatatccagaaygtaaaaggaaattacctcaatggttaaaaaaaaaacccaaatgtgattcaaaaattggtaaaagaccttagccagcatttctgaagacacacaaatgaccaacagatgtatgaaaaaatgtacatcattaatcagagaaatgcaaatcaaaaccacaacgagatgttgtctcattccagttagaaaagctattatcaagaaggcaaaagaaaacaagtgttagtaaagatattgagaaaagggaacacttacatactactggtggaattgtaaattagtatagctattattttaaaagtacagagttttctcaaaaaactaaaaatagaactacccac

SEQ ID NO: 139994 - DNA, 633 bp, Homo sapiens
ttctgatgtatttcttaatgctctggttatatttcctttaaatttttatcttttctattactagctcagtgtaatgaataagaatctccatctaaagtcatgttgactgggttgaaattcatactttgccactaatctgctatgtgaccttggtctctttgacttattccatctctaaacaaggataataatagcacctatcacraagaattgtttaagacactaaaacagtgcctgatacatagtaagttcaaagtaagtgttagctacaattgctatgcctaaactaccagccttcttaaggtctttagattctcactgctttaattcatgcttctacagagttatataatgatattaattcccttatttacaatttttagtagcaccttatggcctataatataaattcaaaacttcaccatacaaattcatctgcccatgcttctcatactgtgggctttagtcatttatccagactcttatgactatctttactcatcatatttcctctgcctattattctctttgtactctgacaaattattacttatctgtcaaaatacaatttaaatattatgtcttagtggaatatcttctccaactcttcactatcacaatcccaaccagatt

SEQ ID NO: 139995 - DNA, 573 bp, Homo sapiens
tgagtgatcacagcagctgatttcaatagactcacaagtaaagaggcattgaagagagtgagaagaacagtcttggattgcctataccactcctaccccaaccacaggcagcacagcacagagagaatctgtgtgcgtaggggaggaaagtgagtgtgactttgcattggaactcagtgtggtcctgtcactgagcggaacacaatactgttgcaggaatcaggaggaccagagagacctcggagtaaagcaggaggattttatcgagggcactcagacccagtggattaacatcctgagactgggcccggaamaaagatagctcttgacctttatacacccttcaaaaagggagtgagctaacttgaagcaggattacagtggtgtgaaagcaaggatagagaggcagaacaaaggcagttaatcaaattgtgacaggtgcataactcagaattacacatgacccttgctattcagcacagatggttgttatctaggttttgctctagtgtcttgcacaggcttatttcataaccttcactatggtgcccaggtggctgtagctcaggcctt

SEQ ID NO: 139996 - DNA, 573 bp, Homo sapiens
tgagtgatcacagcagctgatttcaatagactcacaagtaaagaggcattgaagagagtgagaagaacagtcttggattgcctataccactcctaccccaaccacaggcagcacagcacagagagaatctgtgtgcgtaggggaggaaagtgagtgtgactttgcattggaactcagtgtggtcctgtcactgagcggaacacaatactgttgcaggaatcaggaggaccagagagacctcggagtaaagcaggaggattttatcgagggcactcagacccagtggattaacatcctgagactgggcccggaacaaagatagctcttgacctttatacacccttcaaaaagggagtgagctaacttgaagcaggattacagtggtgtgaaagcaaggatagagaggcagaacaaaggcagttaatcaaattgtgacaggtgcataactcagaattacacatgayccttgctattcagcacagatggttgttatctaggttttgctctagtgtcttgcacaggcttatttcataaccttcactatggtgcccaggtggctgtagctcaggcctt

SEQ ID NO: 139997 - DNA, 584 bp, Homo sapiens
ttatcaaccagaatattatgaacccttgagactaaggacaacacacatgcagaaattaaaatgagagtctaaaagcaacaagagaggaagagagagacaaagacacaaagaaaaagggagaaacagagagataggagtaggggggcagagaaacacagagacaaactgcaagaytgagacaaagacagagtttcctgatattgtctgagtcatgatgttgtctaagtccagttaacccaaaggccagccctatctcttctttcttgagtactgaatacttaaactaataaattccctttattcatttaagcgagtttaacatgggtatctgtcacctgcaaccaaaagaaaggtggataattactctgccaaacatgagtaaaagttatctggtacataaacattctatcagaggtgaataaatagtgacatttcctccccctgcataagtaagcaaaagcacagaacatatccagacttatttccatatactcatcattaaccaaccaggtgaccagtataaaaagtgactcaaaatatatgtgtgcatatgggtgaggcagaagataggcattatgtgaaaa

SEQ ID NO: 139998 - DNA, 584 bp, Homo sapiens
ttatcaaccagaatattatgaacccttgagactaaggacaacacacatgcagaaattaaaatgagagtctaaaagcaacaagagaggaagagagagacaaagacacaaagaaaaagggagaaacagagagataggagtaggggggcagagaaacacagagacaaactgcaagattgagacaaagacagagtttcctgatattgtctgagtcatgatgttgtctaagtccagttaacccaaaggccagccctatctcttctttcytgagtactgaatacttaaactaataaattccctttattcatttaagcgagtttaacatgggtatctgtcacctgcaaccaaaagaaaggtggataattactctgccaaacatgagtaaaagttatctggtacataaacattctatcagaggtgaataaatagtgacatttcctccccctgcataagtaagcaaaagcacagaacatatccagacttatttccatatactcatcattaaccaaccaggtgaccagtataaaaagtgactcaaaatatatgtgtgcatatgggtgaggcagaagataggcattatgtgaaaa

SEQ ID NO: 139999 - DNA, 573 bp, Homo sapiens
aataaaagaccaatgagtaatattttctaagagttgtagaaaaagaattggaaagctaaaaattgatctgcagctacactatcagtctactagagaaatgtgaagatgaaataaagatattttcagatgtaaaaatcctcagaaatgtttattgcacaaagaaacacttttaaataatattttggaattgccttggaattagaggttactctcttgagccagacaccactgattattttyatttcaatgagatccaaatttaagcattataagcaatctctaaactatatttgattttaacctcctgaaattaaaaacctgaagtatctaagcagtcctagccatcacagtggcctgaaaatctactctccatttgcagtatcccaaaggcttaccctaattagctcattttgagtaagtgtattgatttctctttaaaaaaatggtaagggctcttttcttaatcagagcaaagtaaggcagccagtcccacaatgttagaacttaaagcagagaacttaaaatatatatgataaattatcacaagaaaatgaaagagcaaagtgacttcta

SEQ ID NO: 140000 - DNA, 407 bp, Homo sapiens
ccatgattcaatcacctctcactgggtccctcccatgacacacggcgattatggggattacaattcaagatgagatttgtgtggggacatggtcaaaccatatcattctccaattaaaagatatagtgtggctgaatcgataaacaagaccctactatatgttgcctactcattaaagacaaatggactgaaaagagatggaaaaagatattccttataaataaaaaccaaaagtgaacaggaataaacatattatataaaatagaacagatttttagtcacaaataattttaaaagactatggagctcattatattaacgctaaaggagtaamttcaaaaagaggatgtagcaactgtaaatatagatgcacccaacagaaaagcaccaaaatataaaaagcacat

SEQ ID NO: 140001 - DNA, 593 bp, Homo sapiens
cctacgtgataaaataatctgtacaccaaacccttacgacacacaatttacctrtgtaacaaatctgcacatttcccctgagtctaaaataaaagtttaaaaagaaaaaaaatcagaaaatcaaatattttaaaaaatatatttaaagtaaaactggaatgtgttgtgaaaataaaatgtttaaataaagcttgtggggtctacagtactaaatcaagtttaattttgtctccttcaggctcactagcaactttttttgaaggtagatcttttttttaggttacctgagaactgatcatgcgctgagatgagcgagcgatattggcaggcagaccaaagaaactaggtttgtcgtcctctggaattttctcaatgacagcacgatagtcctaaatataaagaagtgaaaaacagtttttttaaaaaataaagattgaacttacaatcattgaaataagaaagaatactttgaaatgttcaattattatttgtatttttattttctagataaatctcactttgtatgatattaactcagttatctgtgggaagtattctgtcattaatacttcttcacacttcaattatttgat

SEQ ID NO: 140002 - DNA, 563 bp, Homo sapiens
ttataaagaacataaatgcatatagaaattaatatgtttgtgtatttatacaatctctctgaagcacaaacaagaaatggttaatagtggaccctctcagaatagaaagtgggtggcagggaagtaagtagggaggaacctaacttttcattacaaaccattttatatcttttttatttataccatgtgcctatataacttaataataaaatctaaatttttaatgtaacttttctcaataaaggtaaatcactatcagtgttgttcatctayccttcaggattaattgatatattaggctaaggacagaggtcagagaagtcaggaaaaaaaagatttacaggaagatgtgcctacccattttggaactctactttttaggtgtgattctttgagcaagttaactatgatcaatgagtcctccccataagtgtggtatacatattataagaaacaacacaatgctattattgtttactatttcatctgtttgacaaatgtttattgacaggctacaaatcagacactgtgttaagcattaaacatacactatttcatttgat

SEQ ID NO: 140003 - DNA, 563 bp, Homo sapiens
ttataaagaacataaatgcatatagaaattaatatgtttgtgtatttatacaatctctctgaagcacaaacaagaaatggttaatagtggaccctctcagaatagaaagtgggtggcagggaagtaagtagggaggaacctaacttttcattacaaaccattttatatcttttttatttataccatgtgcctatataacttaataataaaatctaaatttttaatgtaacttttctcaataaaggtaaatcactatcagtgttgttcatctatccttcaggattaattgatatattaggctaaggacagaggtcagagaagtcaggaaaaaaaagatttacaggaagatgtgcctacccattttggaactctactttttargtgtgattctttgagcaagttaactatgatcaatgagtcctccccataagtgtggtatacatattataagaaacaacacaatgctattattgtttactatttcatctgtttgacaaatgtttattgacaggctacaaatcagacactgtgttaagcattaaacatacactatttcatttgat

SEQ ID NO: 140004 - DNA, 563 bp, Homo sapiens
ttataaagaacataaatgcatatagaaattaatatgtttgtgtatttatacaatctctctgaagcacaaacaagaaatggttaatagtggaccctctcagaatagaaagtgggtggcagggaagtaagtagggaggaacctaacttttcattacaaaccattttatatcttttttatttataccatgtgcctatataacttaataataaaatctaaatttttaatgtaacttttctcaataaaggtaaatcactatcagtgttgttcatctatccttcaggattaattgatatattaggctaaggacagaggtcagagaagtcaggaaaaaaaagatttacaggaagatgtgcctacccattttggaactctactttttaggtgtgattctttgagcaagttaactatgatcaatgagtccyccccataagtgtggtatacatattataagaaacaacacaatgctattattgtttactatttcatctgtttgacaaatgtttattgacaggctacaaatcagacactgtgttaagcattaaacatacactatttcatttgat

SEQ ID NO: 140005 - DNA, 381 bp, Homo sapiens
cataacacaagtacaatcctctagcagtatgtagcaaaagccttaaatagcacatagcctctgacctaacagttctactttgaggacatttttctaaagaaataataaaaagataggctgggcacagtagctcatgcctgtaatcacagcactttgcgaggttgaggcaagtggatcgcctgaggtcrggagtttgagaccagcctgggcaatatggtgaaaccccatctctactaaaaaaatacaaaaattagccgggagtggtggcacacacctgtaatcccagctactctggaggctgaggcaggaggatcacttgaacccaggaggcagagggtacagttagctgagatcgtgccattgcactccagcctgggtgcc

SEQ ID NO: 140006 - DNA, 483 bp, Homo sapiens
atcctccatacaggagcctgccaaagcacaaatcagattctgtatcaccttcctgcttcaaacctaccaatggccctcagtgaaactagaaataaatctaaaccattttctaaagccaaaggctctttcgtatgtctctgaccttgcctccttccactctcccaggaaccccttgcatgagccacacagatctctccaaggcctttcctgtcccctgccyttgcacttgctgtttcttccacttaaaagctctgctctcagatctttagcagggatccatatctgaaattatacttttctgttttttttttttttttttttttttttcaggcagggtcttgctctgttgcccaggctggaatgtagtgttgcaatcatagctcattgaagtctcaaactcctgggctcaagcaatcttcctgccagtgactcctgagtagctggaactgcaggcatgcaccactgtgcccagatggtttaaaa

SEQ ID NO: 140007 - DNA, 641 bp, Homo sapiens
ctggcgggttggtttctcctgaggtctctctccttggcttgcaaatggccaccatcttgctgtgtgcttttctctgtcacacccattcctgatgtctctctcttcttataagaacaccggtcctgggcgggcatggtgggctcgtgcctgtaatcccaacacattgagaggacgaggggggtggatcacttgaggtcaggagtttgagaccagcctgaccaacacggcgaaaccccgtctctactaaaaatacaaaattagccaggagtggtggcacacacctgtaatcccagctattggttgttgggaggcaygagaatcacttgaattcaggaggcagaagttgcggggagccaagatcatgccactgcactccagcctgggcaagaagagtgaaactacatcttgaaaaaaaaaaaaaaaagcacagcagtcctattccattagggccccacccttatgacctcatttaaccctaattaccccttaaaggccctgtctccaaatacagtcacattagggattagggtttcaacatattaatttgttgggggtggggtagttgggaattcaatccataacagtgggttttaagaattataataaagtcaggaccaggctgcagggcaacaactgttcac

SEQ ID NO: 140008 - DNA, 539 bp, Homo sapiens
cgaataattaggacttttctcagctaaaaaaaaagaaaagacgtagaaaatgttattttaaaaacatttttggtttatgtaattattcgaaagctccccttagaccctaaaaacaaaaacaatcctccaaactttaaatttatgatttatttatttacttatttttcaatctgaactttctgaaaagagtgactgcaaactcgagtgaatcctgatgtctagtcaagaacaatacagatgagacttcactgacagaagttctgcttgggacagacaaatactttattgataaggagatgaataattcgatgtgttctctgaatctgcagggaatatggttagattacaaaattttatttrtttttttttttaataacagaggtcaatgcgcattgttgtcagcaacatcagtaagaaggaagtaccacatcagctgtaacccactacagctgaacaggagaaactgatccaggttttagtgcagctcagggcatgctgtgaatgattagcaaatgtggatacccagtatgccttgtgga

SEQ ID NO: 140009 - DNA, 539 bp, Homo sapiens
cgaataattaggacttttctcagctaaaaaaaaagaaaagacgtagaaaatgttattttaaaaacatttttggtttatgtaattattcgaaagctccccttagaccctaaaaacaaaaacaatcctccaaactttaaatttatgatttatttatttacttatttttcaatctgaactttctgaaaagagtgactgcaaactcgagtgaatcctgatgtctagtcaagaacaatacagatgagacttcactgacagaagttctgcttgggacagacaaatactttattgataaggagatgaataattcgatgtgttctctgaatctgcagggaatatggttagattacaaaattttatttgtttttttttttaataacagaggtcaatgcgcattgttgtcagcaacatcrgtaagaaggaagtaccacatcagctgtaacccactacagctgaacaggagaaactgatccaggttttagtgcagctcagggcatgctgtgaatgattagcaaatgtggatacccagtatgccttgtgga

SEQ ID NO: 140010 - DNA, 595 bp, Homo sapiens
agatcttcccccaaaactgctgcttctagttgctctttaytgaagcaaattgcctcagaggatacatccttgacacttccctctgtctcctgccccatatctcaccaagtcccaatactttagtttcaccagcctctctccatgtcttcccataccataacccaagccaccattccatctctcccagactgcggctacaaccaccggcctccttgcagcatctctggcaccctccaatccattcctccctccttatgctagaggaatctttccttaaaaaacaactcacttcccattcttgcttaaacccctcagtggctgtccaatacccctgggataaagttcagtcttgtcttgccccctcacccacactggtcttctttcagcaccttcaaagcaccaagccctcagccatcagggtatttacacatgctcttctctctcctataacgtttgccctcaccttcttgtttggcaaccctcacccatccttcagggctcagcttcagattttctgggggaaatttcactgaccctctgacgctcatcacaattgtggctaattaattacttgaaaatttgttttatgtctttc

SEQ ID NO: 140011 - DNA, 528 bp, Homo sapiens
gtgaaattatatgcattattgatacacacataatctaccacagtayaaaattgggattattttaagtggatctcacaaataataaaatatttgatttatgtttaacaaaactagcaaaatgttaaccaagggacctcgctcaccttgtaggtttccttgacttttaggtctacctttccctggggctgcaccacagtttacacagtacacagaatgtatggggtcatttcagaaactcaccctcttctccactcccctggttcctgttatcttgttcttcctcagtgacaacagacttacatgaagtgtgtcagtcacttggtttcacaacaaagaggggaacaagcagtcagtcagacccagggatgaatccatcaaccaaattcaagtggcaagctaaggaaaggaaggcccaacaaaggcacatgctgattaagtcctgcagatggaattgttcttctgcctattttaatgtttcagaatactaagagtggtgctcagaagaagaaaaaaaagtgtaagcaattc

SEQ ID NO: 140012 - DNA, 556 bp, Homo sapiens
caagcttccaacttctggtaacatttcctcttccctctccagtaatgcctgagtttcatccccagagatccttggtcttaggtatggcctgggcatcaggatttttaaacacactattatrcagccaaggtggtgaaccattgcaacaggcattgtacaaataatgagaaaagtttacacagatgtatccacattttatcacactggctctctaagaccatcagcacatttgcaaaaatgttgactacaggtaaggtagaagcacggatggctgtgtaattaattaatccttgaagtcagaagttagctaatgaaattgcacatgcccaaaactaacttagggactatgcaagacacaaagaagtaaaagacatggtttctgatcatagtagtactgtaatttagttagaaaagtcaatattaatagtcacaaagaaagtaaagaactatgcagagacaataaggagatactttattacataacacaacaagggtagtttgatttacctctctgctcctcacgcctcatcacaagaggtgaacacacttgcttcca

SEQ ID NO: 140013 - DNA, 589 bp, Homo sapiens
attactgaatggccttctatcactgatagccactgttatctcactctgagattagcaattagtctttgacatcagtagcttttcaaaattacccattcagggccattcccccaaaaaggtttttattttacatcatagaattcaaaggattttgtgtagatttgcacgtcygtcttttttcttcctttctctttctttctttctctttctttctttctttctttctttctttctttctttctttctttctttctttctttctttctttctttccttccttccttctctctctctctctctttctttctggcactaattacttcctttatctgctctcaagctagttaaagagggtctttttactgcaaatgaaaaatcaactcatttattttagccatgtcatggttagtttggctcaacggttattcagaatcgttaatcaatcaataaattgttgagagattcaacaaatatttattaaacacttccatgtactacagtctacagtgcaccttccaggggaaacaaatcaagatcgaagcacagtttctgccctcaaggatggagggcccaaaacttgcagtgttat

SEQ ID NO: 140014 - DNA, 429 bp, Homo sapiens
aaagaaaaattatacctagtctcagagatcaacaaacacttcttgaagtggagactgggagttactttagaaaacctgtaaggataagcaggatattgactagtgaagttacaaaaaaagacaagtccaaggagaaaagctaaagggataaaacaggataatgaaggaaaacaaggaatttacaggaatatgcagaagaaacatatgggaaaacaacaaggaaactgaaacaatatctaygtctctcaacagattgaagagaaaagtgactctagcctgcattgattaaacataactgtgattgcttttgcaaatgaagacttgtgattttagcaaaatgcttttaggtctgattcaataaaatatgcccaaaggaagaatccaccactctgaggacagatatggcaataaagtcaactatattagaat

SEQ ID NO: 140015 - DNA, 529 bp, Homo sapiens
tcaacaaaataagagtaatgggatggcattagtggggatgtgtgagaatgcttttgagagsacagtcaggcaaggtgtctcagtggaggtgatatttcagctgggacttgaagaaaacagccaggaggagacctgtaggggagcacatttcaggcagaggaaacaacaactgcaaatacttgaaggcaagaagattttgtactgagcatgtatcgaatatgataggatataatcgatgagggagagtggtatgaatcgggcttggggaaacagacagagataacatcatgtagaatttgtaggtcatggtaagaagtagaaaaaattataaacaggactaaaatgtgatctgaaagaagttaaaatttcctctgtctttttttcagacagtgaacagacaaaccaaaaacatatttattgggagtacacagtatactaggaactctataagtgcctttcatgtgatagctcattgaatcctattaccaattctatgaaggagaattttatgaggaaattaaaccacagt

SEQ ID NO: 140016 - DNA, 548 bp, Homo sapiens
aacaaaataagagtaatgggatggcattagtggggatgtgtgagaatgcttttgagaggacagtcaggcaaggtgtctcagtggaggtgatatttcagctgggacttgaagaaaacagccaggaggagacctgtaggggagcacatttcaggcagaggaaacaacaactgcaaatacttgaaggcaagaagattttgtactgagcatgtatcgaatatgataggatataatcgatgagggagagtggtatgaatcgggcttggggaaacagacagagataacatcatgtagaatttgtaggtcatggtaagaagtagaaaaaattataaacaggactaaaatgtgatctgaaagaagttaaaatttcctctgtctttttttcagacagtgaacagacaaaccaaaaacatatttattgggagtacacagtatactaggaactctataagtgcctttcatgwgatagctcattgaatcctattaccaattctatgaaggagaattttatgaggaaattaaaccacagtctaagcaactccctgagaatt

SEQ ID NO: 140017 - DNA, 565 bp, Homo sapiens
tgccactgcaaagtgtgtggcttgcttattgtgtggcacaatgaggattaagataagacaaaatatgatttctgtccagctgccttgcgtttggttggtgagatcaaacaactaaggcctatgaacttccctcaaggatgataagctgcacagcaaagcagaggccaccaaggtcaccatagactgactgcactgtctgtaaagacttgagtaggtctggaagaagtgagagagaagaaagatgaaagactttccagataggggaaaaaaagcaatacgcaaaggcataaaaatatgtattgaggaatgatgggctctactgtgtaaaatgtactccacgttctaaagagacctacacacaagcacacaaccaaactgcttctgttgactcctactcttgcctttccccactccacaccccttaccagtctaagaacccaggtggaaatctgagtttttgataccaagaccaggagttcttttccttctgcctaccacaaagaagggaaggaggactcttgcccttctcctttacaakacaagagaaggaggccccaacataatc

SEQ ID NO: 140018 - DNA, 474 bp, Homo sapiens
aggaataagtgatagagaaaatgaatttttcataagaacaaaacagaaattgcaaatgcaatgttcttgttacctttacacaaagttcaaatatatctttttgaaatataaattgaaatgttgcaaaactcctggtgcatttttttggaactctagattttagatattaaaacttaaaatccagttatttataccatcccaccaaagtgaactcagcacttcagaaacagaccaatgacagtgtaaagccctttctgccagttgacaattccattttytaggatttgaagcaagtcttcgtaaaaactaagactatatttccacaaagccaaaaaaaaaaaaaaagaaaaaaaaaaactagtcaaggtaatttccaaagaagtcacttaagatatttacctaatgaattaaaaaggcaaattttgatggatatatttgaacccctctatcagccatttgtgtgttatatggaca

SEQ ID NO: 140019 - DNA, 647 bp, Homo sapiens
tagttgtgaatgcaaccagatggccagtcacacatgccactgagaaacactgaagtggttttgtcttttttaaaacaaactaggttttgattattccaagatgaaagctattatggaaaatgttcattgagataggacaacaatgaagctgacaaaaaatagcacaagaaacaaataaaaatgagaggttttgtggggacaggcacaaagcaggtttccaattctgctttagttacccaggtaaatggaattttataatacaagagctggacaggactattgaggctccagtcttcttcactatacaaatgaggaaacaattcagagatgaagacttccctgtgtcctttaacctataccaccaaagcatttttatttatttcaaaactgatgcaagtcataccaaaataaacacgtatatgwgcactatcttactgatttttaaaaataaacttctttttaaaccaagacataacatagattcagaaaagtaacacttagcattgtcaatattctaattgatgaatatttacaaaatgaattatgtaaaaatgatgcagtaaagaaaaagaacattatcagtaactcaaagttcttcttatcctctttcccattcactatttactctaagcttatgatctcaggtt

SEQ ID NO: 140020 - DNA, 588 bp, Homo sapiens
ttcaagcgattctcctgcttcagcctcctgattataggtgtgcgccaccaagcgaggctaattttggggtttttagtagagacagggttttgccatgttggccaggctggtctcctgaccttagtgatccacctggcttggcctcccaaagtgctgaaattacaggcgtgagctaccgcacccgaccctgggtgttctgattttatatttactaataaactctgtggctttggacatttcagaggctctggttctatctcctaatctttaaaatgagaagctggatkaaatgatctctaaagtctgttccaatttaaaaattctgtcgtttgctaggaaaatattagcaccacagtctatctctctaatatgggaagttttttcagattgggtatcagtgctattaaacatttaataaaaagtgggaaattattagtgtgtattgtcacagacatgttaagctatttgcattttaatgaatgaaagagaactttaactgttaacatttaccaaggggtgtagctgagagttaatagtttacaaggggtgtaggtgagagttaatggtttataaatgttaactagttta

SEQ ID NO: 140021 - DNA, 400 bp, Homo sapiens
tgttccgcatgtattctgagagccagttgttctgccatcccatgagacagaatgactagaaaaaagaaaccatgttgcttcttaagttttttgtgacaaggtcccctttgacagtctggtgaagcttatggactatctcagaataatttttttctttttatcattattattattatttaatacagataaggtcttgctatgttgaccaggctggtctcaaactcctggcctcaagtcatcctcccatgtcggcctcccatagtgcttggattacaggygagagccaccatgcctagcctcagaataattttttcaaagatataaaagaaaatgtataggattataaaagatagcaattatattgaaatatattcatcacaatgcttataaagcaaatgtg

SEQ ID NO: 140022 - DNA, 464 bp, Homo sapiens
gcagtggcgcaatctcggctcaccaaaagctccgcctcccgggttcatgccattctcctgcctcagcctcccaagtagctgggactacaggcacccgccaccacacccrgctaattttttgtatttttactagagacggggtttcaccgtgttaggcaggattgtctcgatctcctgacctcgtgatgggcccacctcggcctcccaaagtgctgggattacaggcgtgagccaccgtgcctggccataaattgctatacttttttagtaacaggttaaaaaccctgggatctgagggaaagaccaattgtttaactccattcttcattctcaacatgtgtttcctaccgctaataaatggaactcgagtttttccatggccccactcagttggaagaatcctctttctcgcctgaacttctgtggcactctgtccagactgacttttatcatttattataata

SEQ ID NO: 140023 - DNA, 464 bp, Homo sapiens
gcagtggcgcaatctcggctcaccaaaagctccgcctcccgggttcatgccattctcctgcctcagcctcccaagtagctgggactacaggcacccgccaccacacccggctaattttttgtatttttactagagacggggtttcaccgtgttaggcaggattgtctcgatctcctgacctcgtgatgggcccacctcrgcctcccaaagtgctgggattacaggcgtgagccaccgtgcctggccataaattgctatacttttttagtaacaggttaaaaaccctgggatctgagggaaagaccaattgtttaactccattcttcattctcaacatgtgtttcctaccgctaataaatggaactcgagtttttccatggccccactcagttggaagaatcctctttctcgcctgaacttctgtggcactctgtccagactgacttttatcatttattataata

SEQ ID NO: 140024 - DNA, 566 bp, Homo sapiens
aatgcaaccccaattaaaatatcagcatttttcaaagctgactatgtaattctaaatttcacgtagaaatgtaaaataaccagaatagttataaaaatattaaagagaaggacagtgtcagctaactctgtcacctaatatcaagatttacttgaaatttttactatgtaagaagcgtgaacttggcaaaatgataagctaagagattaagtaaaccaaatagagaatacaaatacagacctacacatatrtaaaaaattaaatttgagctggatcataggtgaaactaaaatataaaattatatacctagggaataaaaaaaccaaaaagtatatatttataactcgattatgattcaagaatgtatatatttattgataagatacaaaaaggattaactgtaaaagtaaacatttataaatttgactttattaaaattgagattttttggtcaccaaaaggcgtgactgaaaaggcaagccaggactcatatcaagattacataatgtatacttacaaataaatagccaatagtcagataacacaattgaagaaaaaacagcaa

SEQ ID NO: 140025 - DNA, 532 bp, Homo sapiens
aatctggaacttgataacgcaaagatcaaactgagagaggaggcaggtggtgggtggttaggcagatagagagggagggtcttggaagacagacaatacctgcggggaccccacctgcaccatccctgttatgtagctrgcaggaggaaatgtggttaagagcttcctcttacacaataccaagatactttctcagaatggattttccagccaccccacaggtacagacaaggaccaagcgcattgtaaaatgaccctgaactcatcatgacgcaattagcattgtgtttttaaccccacgggttttgcttaagcactcatgggtaatatccaagatggaggcactatggccaaccccaggaatgcccagatgcaacacccccagggggtgaactttacccctcccattagggcaaacccacagaagacttccatgtttctgccacataaaagacccagaactcaggcccatttttggcaaccctctttgggtcccctcttgctgctgagaacttttctgtcatgtaataaa

SEQ ID NO: 140026 - DNA, 566 bp, Homo sapiens
taaagacagatatttttacaaaacaaatagaacttatgaaaatataaacaatttactaaaggaccacaacattcatttgaatgtgttagcaatcaactagaccaagcagatgaaacaatttcagagcttgaagactggtctttgaaataacttagacagaaaagaaataaaaacaatttaaaaaatgaataatgcttttggaaaatatgggaatatgtaaaktaatcaaacctccaagttataggcattcctgagaggggagaagaaaaagttaaaagtttgggaaacatatttgagggaacaattcagaaaattttctctggtcttgctaatgatatagatgtccagatacaaaaagctcagaagagacctgtgagatacttaacaagatgaacatcactaaggcatatagtcatcagactgtccaaagtaaacagaaggaaaaaatcctaaaagcaacaagagagaaggatcaaatcacatatacaagaaatcccatcagactaacagcagacttcttaccagaaaccttacaagccagaagagactaaggccctattttcagt

SEQ ID NO: 140027 - DNA, 521 bp, Homo sapiens
ggaaagcataaggatcagattttggccaaagttttatttaaacagtcaaattcttggtgtgataacagacagaaatagaaaaaaaaataaaggtgaagaaaaatataaaaccaagataaaggatttgttgttttcaattgtcttcttcaggtggctgtaaggaagagcagtccagattgacccagggttttcctaggttaaatgaagagaataggaataggyactttgtccatcatattttattagaaactctaggttcttcattaatattatttgttaaacatggggtcatttgacagactactctttatccaaacactttcacttgaacctttttttttataattgtttccatagtgtgacatgagtgagtgagtgtaaaaccgatgggaaccaatattaagagaattgacatagtcattaatctggggagaacttttttttatagatgtggcttttatgtcccagagaaataaatgggcattaattaaatcaaaaatgtaagaaagatattgaagtca

SEQ ID NO: 140028 - DNA, 594 bp, Homo sapiens
ttgacatagtcattaatctggggagaacttttttttatagatgtggcttttatgtcccagagaaataaatgggcattaattaaatcaaaaatgtaagaaagatattgaagtcaatgggaaaggcatgcaaaaaaactctctgataggtgaattttcttaaacaaaaatgaggctgtggtgggacgtttttgtrtatcatgggatcagaaattttcagagctacagaaaccttgaagagaatttactccaacttcctaattttcctaaattgaaataccgacagccagacaattaagaattctgtcttagatcacatagggaaaacagaaatacaataataattacatttaggtttcctgatttcaagtttaatatctttataatctcaacacagtgaagatcagcaggtgacttatgttttcttcatctgtgtagggctgatttcttacatgatttttctttttaaattctgaaattaagtatttttgttaagtatgatcttattgtgttaaaagggaaattttaattcaatgtttattttgtagaaatacctaattttcattaaatattaattactggatgaaaatgatcacc

SEQ ID NO: 140029 - DNA, 594 bp, Homo sapiens
ttgacatagtcattaatctggggagaacttttttttatagatgtggcttttatgtcccagagaaataaatgggcattaattaaatcaaaaatgtaagaaagatattgaagtcaatgggaaaggcatgcaaaaaaactctctgataggtgaattttcttaaacaaaaatgaggctgtggtgggacgtttttgtgtatcatgggatcagaaattttcagagctacagaaaccttgaagagaatttactccaacttcctaattttcctaaattgaaataccgacagccagacaattaagaattctgtcttagatcacatagggaaaacagaaatacaatartaattacatttaggtttcctgatttcaagtttaatatctttataatctcaacacagtgaagatcagcaggtgacttatgttttcttcatctgtgtagggctgatttcttacatgatttttctttttaaattctgaaattaagtatttttgttaagtatgatcttattgtgttaaaagggaaattttaattcaatgtttattttgtagaaatacctaattttcattaaatattaattactggatgaaaatgatcacc

SEQ ID NO: 140030 - DNA, 594 bp, Homo sapiens
ttgacatagtcattaatctggggagaacttttttttatagatgtggcttttatgtcccagagaaataaatgggcattaattaaatcaaaaatgtaagaaagatattgaagtcaatgggaaaggcatgcaaaaaaactctctgataggtgaattttcttaaacaaaaatgaggctgtggtgggacgtttttgtgtatcatgggatcagaaattttcagagctacagaaaccttgaagagaatttactccaacttcctaattttcctaaattgaaataccgacagccagacaattaagaattctgtcttagatcacatagggaaaacagaaatacaataataattacatttaggtttcctgatttcaagtttaatatctttayaatctcaacacagtgaagatcagcaggtgacttatgttttcttcatctgtgtagggctgatttcttacatgatttttctttttaaattctgaaattaagtatttttgttaagtatgatcttattgtgttaaaagggaaattttaattcaatgtttattttgtagaaatacctaattttcattaaatattaattactggatgaaaatgatcacc

SEQ ID NO: 140031 - DNA, 496 bp, Homo sapiens
gtgatacaacagcatttaaatgtgcatgcataaaaagtaactcaaaggttttccactaggagatattgcagtggaacgaattgtactgcatgaacttcctgaaacaaaattgtgagaacaaaaacactaaatagagatagcccaatttataatagaattagagagttctaagtttctaacatagatgatactttatttttaacaatatgaacttgcagtatgatagagaataatcagaatataaaaatcaactatggatagaaatgacttgaacaatataaactagtaataagaatgaggatctgtcataagtaagccttacacacacacacacacacacacacacacgagaaaactagatagaaatttgtatatctcataaaaagtgtctcaatgtagttagatgtagatagtataaggttggcaatctgaagtgttaggccyttgggctttttttactaactggtttacttaatgtagcatatgctttccactg

SEQ ID NO: 140032 - DNA, 607 bp, Homo sapiens
agaggaaactggataaagattatacagaatctctttgcattttttttcaaatttcatgtgaatctaagattatcttgaaagaatgtataattcagaaggtaaataaaaaactagaaatagatgaacaatttgaatctacttaagtagcaaaaatgtcataacaaagcttgagcacaaatcagtgaagtaggtaatagagaaatgagacaaaagtagcaaggaaaaaaggtagtaccttgaaaagatcaataatactgaaaaacttctaacaactttgagaaaggcaaagaaaggagatgtgagagaaacaggaatgtatggaccactctatgacaaacaaattttacaacttaaagaatgtaaatttaagataaagcagaaaattttattttttattttttaaaattttagattcagggggtacatgtggaaacatttacacgaatattacttgtgtaatggtgggtattgggcttcctgtccagtcatcatccaaatataaatattgtatccaataggaattttggraagttaccaatgtctattatctgcatctttatgtccatgtgtatccactgtttagctctcacttataagtgagaaaaag

SEQ ID NO: 140033 - DNA, 523 bp, Homo sapiens
agaacaggtaatagaagacagttataaataccagttatgacaacgcagccagttatgaaaacaaagactgtaattgtcatgagtttttccttccttttttgttaagaatacctttgtgcatatatacatatgtattaaacgactatctttgttttcttacttctcttatatcttcatcatgtacaaagcatttattgactttatatcatttaagtatcattaagtgtatatgatagtatttaagttaygagatatcaggggaagaataaacatcacccaagacactatcttctcctctgggaaagggattattgtgtttttggttgcatgagggagagctaggtcatgttatgtcgaactatgaccttgtcattgtttttatttttatagtaaatatggtttaagatgtgtatgtatgggtgccaagttgaccaggggtggaattatgatagttaattttaggcatcaatttgactggattgaggtacacctagatggctggtaaacattgtttccatgtgtt

SEQ ID NO: 140034 - DNA, 539 bp, Homo sapiens
gattataaggaaacataagaatgtggatttttacttacattaaaaggttaaaagaattattgttttaaaagtttaagcaagttttaaaacattaattgtaaagaaaattccatgtgtaaacatattagctaaagttaaaaaggtatcatccagtttttctgtgaactggacattaaagtaaaaatgcaacagatttttcttaaagcatcaacctgctctttaacaaaaagtataaaaggttaaaaagagtctataaaatcttaacttatagtcaaacatgaaaaattcaataaatatgtctacaaggttttattaaaattaagtttaacattartaacacactaatataaaggtaaaatttagtttatctggtataaaaatcatacaagcaatattattaaatataaaatggtgtttagctttctttgatctaaaaactaataaaaataggtgctaaaggaaacattcattttactgaggatcataaaggttaaagacttaaaacaaactttggcaattaagacagcataccaagatgc

SEQ ID NO: 140035 - DNA, 539 bp, Homo sapiens
gattataaggaaacataagaatgtggatttttacttacattaaaaggttaaaagaattattgttttaaaagtttaagcaagttttaaaacattaattgtaaagaaaattccatgtgtaaacatattagctaaagttaaaaaggtatcatccagtttttctgtgaactggacattaaagtaaaaatgcaacagatttttcttaaagcatcaacctgctctttaacaaaaagtataaaaggttaaaaagagtctataaaatcttaacttatagtcaaacatgaaaaattcaataaatatgtctacaaggttttattaaaattaagtttaacattaataacacactaatataaaggtaaaatttagtttatctggtataaaaatcatacaagmaatattattaaatataaaatggtgtttagctttctttgatctaaaaactaataaaaataggtgctaaaggaaacattcattttactgaggatcataaaggttaaagacttaaaacaaactttggcaattaagacagcataccaagatgc

SEQ ID NO: 140036 - DNA, 527 bp, Homo sapiens
aactatccttgtatatgcatgatagattaattttctttaagtttgaaatatatgcaaatggaaccatatattatgtcttattttatttctggcaaattttattcaagattagatttatgtcttctgtataaaataagttatttattttgtcagtagatggttaatgagcatttgggttacttttgtatttttaattactacagttaatattatagctagccttcttgcacatgtcttttgatacatgtatccatgggtttgtgttatctatgaaagcaggtataaaactctggggacatagtgtatttatrcattccctttcatatatgctgaaaagctgttttctaaagtggttgtactaatttagaagtagataaaagcttctgttatttcacaacttttcctgcttttagtactttagtatttttaattgtagcctgatgagtatgtagaaatacgttagaatagttctactttgcattctccttattaccattgatgtagtacagatattcatatgcttattg

SEQ ID NO: 140037 - DNA, 454 bp, Homo sapiens
tgccactccacattactaggtccccttataggtgacaggggtatataattagttctgaccaatagattgtggaaaaaggcatatgtgtctctcccagatcgaagcacagaaatgtcaggttgccttccctctaccattctctttcctgacaccgggatcaaggagacctcatgttttagatggtatagctacaaaatgtggtgtgttagtctagatccttgaatgactatatagatcagagtgccctaacctgcartgagtgagaactagcctttgtattattaagctactgagatttcaggtttactgcattcttacaacaaacctaacctaaccagattaacacaaaataataaaagaaacaggaagagaattaacatttaatgagtacccaattatatgcctacactacagtaggaccttcatatggtctgctgtttctgctgttgatgta

SEQ ID NO: 140038 - DNA, 593 bp, Homo sapiens
catacatacaacacatactagacttttattctacttttcattgggcatttaaaaaggcatagccgctatttgaaaatatattcaagggcttaacagcaaatccaaattaggactccacatccaggaacatttgggaattcaactgtatcatctaagaaagtcttttctgatggggaagggctgcttcagattcaggaatacaggccaaaaagatcaatttgtttcctgtcggcacagctcaaattgcattcttgacttcacagcactgagatctttccagmacatccattaaaggaatttggctcacattaaggttgtgtgtaagacctaacatccatgaaaatgagcataaccctcatcaagcaagtatggaacactggattctgagcaggagggccttcatgtcgctttgcatgaaaagcctgttgacaatcttatggtgactatattcaggcattttgataaggcaacttacattccctcagctcattcactgaagctgcatggaccaaatttttaataaatgtatttagaagcatggataagtagttacccatgatatgaatcatgacaagtagctatgcaaggaagta

SEQ ID NO: 140039 - DNA, 484 bp, Homo sapiens
tatctcatataattcccataatgatgataaataacattaattaattatttgatatgtgcaaggcattgtgctaagtgctttacaggaagttcatacctcatcacaactttgtgaagtcatgaactaactttatccttttgctacagatctcctaactggtcactgctttggtccttgggctttaaaaacaccacatacattatcttctcaggtctcattctttgctctaacctattcctgaaattctctttcccaaatattcatatggtcactccttcaagtcttcactraagtgacacattttcaaatgaatctgttcctttggatgtgctcttatttttaaacattgcacttatcagcttctaacagcgtatttcacttatttattttgtttcttctcttcccatcctcactagaatgcaagttctgtgaagggagaaattttagccttttttgctcattagatagaaggatgcttgatgta

SEQ ID NO: 140040 - DNA, 656 bp, Homo sapiens
tcacatttctttttactattgctactattaaataatggtaataatgattaccatttttattgctgaacatattaattctagcctagaaacatcttatcacatttaattccttcaataattctataaggcagatgttggcatccttattttgcaaattaggaacctgatgttgttgagagacatttaaacacttgctcaaagccatttaactagtaaattataraactggaattaaaattaagtgtctctcattcaatacttgcagtgatttttactaggtctgtagtcccaaatatattacttaaccttgttaagtctcagattgcctaactacaaaaatggagaaagcacttatctcttaggattcttgtgaagacaaatgagatgttacatataatatatgtaagtacttgatgcaatagctagtatacagtatacgctcatagaatgctacttttaatttaaaagctaaaatttacatttcacttattatattatgataccttataccaaatttgtgggaagggtcgcctaccattgttgcattgctacagaactactgattgtttgaaataaataggatacattttaatactactatatcaccagggtcataactgaggtatagaaagattaagtatcatttagaaaggcac

SEQ ID NO: 140041 - DNA, 471 bp, Homo sapiens
gattccatttatatgaagtgcctacagtggtgatattcacagaaacagaaagtaaaatggtagttatcagggactagagagaggaagaaatagggagctgtttaaaggatataaagtttcagatttacaagaggaagaagttcgggggatctgttgtacaacaaagtgaacataattaacactactgaactgtacagtttaaaatggttaacatagactaaaattttatgaattttttactacaattttttaaaagcttactctagctgccaaaggagaatggattcaaagggagagggcaaaagttggggagaccagttgggaggcatttagagaacctgtgctggtgcctgagacaggcaagtggcagagcctgcaggccaatgagctcrgcccctgcccatctgcatttcctacagtaggaagcatctaggggccacaaactccaagttttcttttgcccacccacac

SEQ ID NO: 140042 - DNA, 478 bp, Homo sapiens
agcctggccaatatggtgaaaccccatctctacaaacaaagtgaaataaaatacacaaaatacaaaaattaacatcgtatggtggtgtacacctgtacttgcaggtacttggcaggctgatgcaagaggaccatttgagcccaggaggtcaaggctgcagtgagccctgtttatgccactgcactccagcctggccaacagaaggagaccctgtctcaaacaaatgaacaaacaaacaaaaacaagaaaaacaacaacaaaaaaaggtcaggtattagtttgctgggtagataggcagggcaaggrcagacagagaagagagacctgtgtttgtgggtaggtatgaagttaaggaatgggcatattcaggtaatcaggggttaagtgtggtgacagctagggcagtagggggagttttcagagatcaatggacaaaataaatggggagttttcagacttcaggtagcactagagttgc

SEQ ID NO: 140043 - DNA, 501 bp, Homo sapiens
ttctcttacttttccattgaccattctagaaagtgggaatgagaaaaagagggtggaatggaaaatagggactagggaaatagaagttgaggtggaggtagccacacaggaatttgagtgtggaagaaggggttctttaagcgtagatggtaaaattcaagccaacaaakgataacctccttaatcttaattacttcccacaatgtgcttctattatcatcagtatataaatgtggaaattaggtttaggagcattcagtgaattctcaaatggcacatttctgatgccatgcctagctcttatcccacacactgccctgcagctctgggaaagcatcccatagagaaataatagcattgctacgatgtacattagtctttgagatgtaaatcatttacattttctttttacaaaactatctcatcagaatttacacaagtacacaaatggacagaagagttaaataatgatgagacttatttttactgaatcaatctgat

SEQ ID NO: 140044 - DNA, 466 bp, Homo sapiens
aatcatctgccttcagagtgactttggtgagtcagctggactggaagaatgtatcctgggagctgcattaggattaaatctgattgctagacactggcaattcctctctgagttggagaaaatcaattcaaccttctctaccatgttttcttgtacaacattctgtcttatataagattacataagtttcctttgtatataccaatagasgcatttaaaaattgccttctggactatttttatacttattaaacaagatgaaataagtgttttgctgtatagcttctgtccactaaatgatccttgcacatcctgattatctttaaaggttatgcatatgttccaatatcttccatcactagcctcaaaagaaagccatttctttatgctttagtaaattcttgtttggaccactcaaaatgtccccaactcatttgctacaatttgagctaaccaacatgacatt

SEQ ID NO: 140045 - DNA, 615 bp, Homo sapiens
tggggactactgtatagttcaacaaataatttttagaacaatagaataaggcatattttaaaatgatgactatgtgggatgcactaactccttgtgccataggatcttatgaccagtcggggttggccaagagttaacaggaaaggctttatgtaggaagagggttttyattgtacttttggctaaaacatactttcctatgattgtgctctggcaactctagtaagaaaatagtataaaaatacacattgttatcctttgtctatagtttttttattggcttcttcatgcttcagctctcctcctataatttctcaaatgtgcattgcctacagattctcaaatgtcttctatatatactcaacaagtgcccagttgtctcagggtattgaagtttacccaaacctcacatactcctaatttccagcaaagcttcccagaactgtttattccagtccctgtgaaaattcgaagacacacaataatatttatctgattaaagtaattcacaccaatttataaaaggaggctttaatcttccttgtaattagttactgaacctaagaatctaagccggttttgactgcaagacacatttcttttttaatacaccct

SEQ ID NO: 140046 - DNA, 467 bp, Homo sapiens
ccaaattccattgcatcttagaccagcaaacacaagtgaattctacttaaccccagaattctgtatgaaaatcttactgcctttttttttctaatcatgtgtcaaagtgtgggaagaacttttatttatgttttaataaattgtcagtataaccatttttacttgaaaatattataatttttcaagtaaacaaattgtttctctaagttgaaaattttatgatggaataaaagtatttttcctcaaaacacatagamattttacaacaatattttagagttaactaaatgtttctttagtagtttagtcacttaaaaagtgatatgattatgaaaatacttaaactttgtcttttaactatttctaataatgctattggtataatttcatatttttatactgatcttttctccaaactttagtaaaacatacttctgtaaacccctgcccacaaaactgaagtccac

SEQ ID NO: 140047 - DNA, 405 bp, Homo sapiens
tttgtttaaaatgtttatgttctgtattccaccaagtctagttttaaaacaaaacaaacaacaacaaaatacttctctaacttggagtttaaggtgaaagaaaccaattacgtggtttggaaatgtcacacttttcatctcttttttaaaaaaatttttaattcaggacagaaattgtatggatttartgtaagtcttgggatctcacaagtgtcagtatttcactctcctccatatcttgatagcaataacttgaaataggatctcagtagctcaagcaatactgggctctgagagttggttaaaaattatttggctgagcgcctgttgctgagggaagaactaatctcgagcatatttttggagccaaataccaaattgtttgtgcttagcaacacagcacca

SEQ ID NO: 140048 - DNA, 484 bp, Homo sapiens
atttgcccacttgtttggtattattgaagcacaattagaaaaatgtgcaatgtatgccyaaaaattctataataagggccaggcgcggtggctcacacctgtaatctcagcattttgggaggccaaggtgggcaaatcatgaggtcaggagatcgagaccatcctagctaacaccatgaaacccagtctttactaaaaatacaaaaaattggcccagacgtggtggcgggatcctgtagtcccagctactcgggaggctgaggcaggagaatggcatgaacccaggaggcagagtttgcactgagcctactctccagcctgaacgacagagcgagaccccatctcaaaaaaaaaaaccataataagaactttttaatatactatattataatgtaaaaagactagatgtcaaacaaattaggtgatgggaaggaattgagggagaattttagactaagcaattgagcagcacctgtttttcacc

SEQ ID NO: 140049 - DNA, 543 bp, Homo sapiens
agatcttattgctcaaagttttttttgaaaattttttcttctktttttttttttttttttttgagacagagtctccctctgtcacccaggctggagtacagtggcgtgatctcagctcactgcaatctctgcctccagggttcaagtgattctcctgcctcaatctcctgagtagctgggattacaggcacgtgccaccatgcccggctggtttttgtatttttagtagagacagggtttcaccatgttggtcaggctggtctcgaatttctgagctcatgatccacccccgcttggcctcccaaagtgctgggattacaggagtcagccaccgcgcctggactcctcttttttttataatagtcaccatagtaatataaggaattactatattaaaagcccaaacgtatatttatttgacctgaatatttttaaaaaatattaatatcactttaattctattacatcttgctgttaagattttgacttttcttacaccagtgaagatgagaaaatggaaataaagaaatactaggtattatt

SEQ ID NO: 140050 - DNA, 543 bp, Homo sapiens
agatcttattgctcaaagttttttttgaaaattttttcttctgtttttttttttttttttttgagacagagtytccctctgtcacccaggctggagtacagtggcgtgatctcagctcactgcaatctctgcctccagggttcaagtgattctcctgcctcaatctcctgagtagctgggattacaggcacgtgccaccatgcccggctggtttttgtatttttagtagagacagggtttcaccatgttggtcaggctggtctcgaatttctgagctcatgatccacccccgcttggcctcccaaagtgctgggattacaggagtcagccaccgcgcctggactcctcttttttttataatagtcaccatagtaatataaggaattactatattaaaagcccaaacgtatatttatttgacctgaatatttttaaaaaatattaatatcactttaattctattacatcttgctgttaagattttgacttttcttacaccagtgaagatgagaaaatggaaataaagaaatactaggtattatt

SEQ ID NO: 140051 - DNA, 611 bp, Homo sapiens
atttaggaatagtttcaatgttatatctattctattgcattttgggttcttcaattctaggcttactcaaaggataaaacgaacattactgcatcaatcaactacacctagaaaatcaaactttattatacaatattaagttgctaatattatttatacctatagattcttaattcatgccctttactatctatttataaattcattcattccattactaaatatgtataattgacaatcccagttataccttaatttatatttttttgtctatttgacataagccaagtacccatgccatgattcaacacagaaaattacaaagcccaccttactgtagactgctgctcttattgcatcaacattcgtatcttccacggaaaataattaacttagttctataatcaggatatgccyggtttatttacaaggaaatacctatcaggtgctaatttctcttagaattagaaatcttggccaggcatggtggctcacacctgtaatcccagcactttgggaggccgaggtaggtggattacctgaggtcaggagtttgagaccagcctggccaacgtggtgaaccctgtctctactaaaaatacaaaaattag

SEQ ID NO: 140052 - DNA, 611 bp, Homo sapiens
atttaggaatagtttcaatgttatatctattctattgcattttgggttcttcaattctaggcttactcaaaggataaaacgaacattactgcatcaatcaactacacctagaaaatcaaactttattatacaatattaagttgctaatattatttatacctatagattcttaattcatgccctttactatctatttataaattcattcattccattactaaatatgtataattgacaatcccagttataccttaatttatatttttttgtctatttgacataagccaagtacccatgccatgattcaacacagaaaattacaaagcccaccttactgtagactgctgctcttattgcatcaacattcgtatcttccacggaaaataattaacttagttctataatcaggatatgcccggtttatttacaaggaaatayctatcaggtgctaatttctcttagaattagaaatcttggccaggcatggtggctcacacctgtaatcccagcactttgggaggccgaggtaggtggattacctgaggtcaggagtttgagaccagcctggccaacgtggtgaaccctgtctctactaaaaatacaaaaattag

SEQ ID NO: 140053 - DNA, 428 bp, Homo sapiens
atctatagatatagatatgtttatagatatatagatatacagagacatatatatagagatgagagatatgtgtacacatatatatagatacacattttgtgtgtgtttgtgtgtgtgtgtgtgtgtrtatgtttgtcttcaggcacctgaagaaaaacagatgtactagcaaaacttactaaaggctcaaactctagtaaattttctttaggtacctgaagaaaaacaaatatctaattattatacctagaaaagtggggctatcaccccatttcctagacttctggaagttttcttaaatagctgtgtgtcctcactctgacactatgtggccaaggggctgagagcacagactgtggtgctgtaatgttgggcctcttggctctgccgcttactagctgtgtggccgtgggaaagttatctagcct

SEQ ID NO: 140054 - DNA, 428 bp, Homo sapiens
atctatagatatagatatgtttatagatatatagatatacagagacatatatatagagatgagagatatgtgtacacatatatatagatacacattttgtgtgtgtttgtgtgtgtgtgtgtgtgtatatgtttgtcttcaggcacctgaagaaaaacagatgtactagcaaaacttactaaaggctcaaactctagtaarttttctttaggtacctgaagaaaaacaaatatctaattattatacctagaaaagtggggctatcaccccatttcctagacttctggaagttttcttaaatagctgtgtgtcctcactctgacactatgtggccaaggggctgagagcacagactgtggtgctgtaatgttgggcctcttggctctgccgcttactagctgtgtggccgtgggaaagttatctagcct

SEQ ID NO: 140055 - DNA, 428 bp, Homo sapiens
atctatagatatagatatgtttatagatatatagatatacagagacatatatatagagatgagagatatgtgtacacatatatatagatacacattttgtgtgtgtttgtgtgtgtgtgtgtgtgtatatgtttgtcttcaggcacctgaagaaaaacagatgtactagcaaaacttactaaaggctcaaactctagtaaattttctttaggtacctgaagaaaaacaaatatctaattattatacctagaaaagtggggctatcaccccatttcctagacttctggaagttttcttaaatagctgtgtgtcctcactctgacactatgtggccaaggggctgagagcacagactgtggtrctgtaatgttgggcctcttggctctgccgcttactagctgtgtggccgtgggaaagttatctagcct

SEQ ID NO: 140056 - DNA, 570 bp, Homo sapiens
aatacatattttcatatatgtatatatttattatgtcacaaatagctacatactggataagccagaaagatgaggaaacatgtttgcatctcacactagtgcagagattctgaaaaagaccccacttggaataccaaaccacacattagattgttctgttcccaattgtgtgccaaagtgcactctgaactgttttggtaaagccgaccgtggagtcatatgaggctgaataacttgggagaatgtaagtctgcaaaataaacctaggactggattgatcctcaggccacttggcaggtgaatgtctcgggagtgaatatgagacaagcttcctgaaaaggcttatatgacttaaagaactttttgtttaagtgtttggtcccaaataaactattaagatatataaagtaattcactgctcaaaaatwaccgtcagataaatattaagggaagaaacactttaaaggagaatttgtatccacataaatccttaaattcatggtcacaactttcctaatctcaaattgttctaggtcactgctatcagtctagttctgtcctctatttctt

SEQ ID NO: 140057 - DNA, 570 bp, Homo sapiens
aatacatattttcatatatgtatatatttattatgtcacaaatagctacatactggataagccagaaagatgaggaaacatgtttgcatctcacactagtgcagagattctgaaaaagaccccacttggaataccaaaccacacattagattgttctgttcccaattgtgtgccaaagtgcactctgaactgttttggtaaagccgaccgtggagtcatatgaggctgaataacttgggagaatgtaagtctgcaaaataaacctaggactggattgatcctcaggccacttggcaggtgaatgtctcgggagtgaatatgagacaagcttcctgaaaaggcttatatgacttaaagaactttttgtttaagtgtttggtcccaaataaactattaagatatataaagtaattcactgctcaaaaattacygtcagataaatattaagggaagaaacactttaaaggagaatttgtatccacataaatccttaaattcatggtcacaactttcctaatctcaaattgttctaggtcactgctatcagtctagttctgtcctctatttctt

SEQ ID NO: 140058 - DNA, 576 bp, Homo sapiens
tggtggcattttgatgggagtcgcattgaatttatagattgtttttggcagtgtgctcattttcacaatattgattctgccaatccatgaataagggatgtgttttcattagtttctgttgtctgtgatttctttcagcaatattttgtagttttcctgtagagatcttccacctctttggttaggtatattcctaagcattttttttttttgcagctgttgtaaaaaggctcaagttcttaatttgattctcagttttgttgctgttggtgtatagcactggtactgatttgtgtacattgattttgtatctggaaactttactgaattaacttatcagatctaggagctttttggatgagtctttaggttttctaggtatacaaacatatcatcggcaaasagcaacagtttgacttcctctttagcagtttggatgctctttatttctttctcttgtctgattgctctggctaggatttccagtactatgttgaatagaagtggtgaaagcaggcattcttgtcttattccagttctcgggggaaatgctttcaaattttcccccgttcaata

SEQ ID NO: 140059 - DNA, 385 bp, Homo sapiens
aggtcttgttttggaaaggctagatattttgttaaaaaatataagatttcaaaaaacctaaaactttggacaatgttatttaatcatcaaaagcaaaacaatatgcatatttcagaaataacactatattttcagtcttactattatgyataagaaagaacaatataaaaataatgtaatgattacatttattgtttacatactctgaggagtatttaattgcatcctagtaagtatattctgtcacatgagaagccatagaaattggcatgttctgctgtatccaatgcccaaaggataataaagcatgataaaattacacttaacgaacccaacctccttttccaattatatatggttaagttaaaattcaaactttaatttt

SEQ ID NO: 140060 - DNA, 542 bp, Homo sapiens
ttcttttttgtttgtttgtttgtttgagatggagtctccctctgtagcccaggctggagtgcagtggcrggatctcggctcactgcaacctctgcctcccgggttcaagtgactctcgtgcctcagcctccagagtagccaggattacaggcgcatgccaccacatcccacttttttttttttttgtatttttagtagagacaaggtttcaccatgttggccagggtggtctcaaactactgatctcaagtaattggccagccttggcgtcccaaagtgcaagactgcaggcttgagccaccacgctccaccaaaagtttcttagcactcattctcatgagaaaaattgctgaaaacttggcaataaagaaacagaatgactacatgtcctttaaatgttatttttaaggggctcaatcaatgactatgaagttatctaagataaaacaccagattttgacattgccattaacttttttattagagcccccagatctacaggttatatgtgcagatgtgcagtggctgctttatttcccttt

SEQ ID NO: 140061 - DNA, 542 bp, Homo sapiens
ttcttttttgtttgtttgtttgtttgagatggagtctccctctgtagcccaggctggagtgcagtggcaggatctcggctcactgcaacctctgcctcccgggttcaagtgactctcgtgcctcagcctccagagtagccaggattacaggcgcatgccaccacatcccacttttttttttttttgtatttttagtagagacaaggtttcaccatgttggccagggtggtctcaaactactgatctcaagtaattggccagccttggcrtcccaaagtgcaagactgcaggcttgagccaccacgctccaccaaaagtttcttagcactcattctcatgagaaaaattgctgaaaacttggcaataaagaaacagaatgactacatgtcctttaaatgttatttttaaggggctcaatcaatgactatgaagttatctaagataaaacaccagattttgacattgccattaacttttttattagagcccccagatctacaggttatatgtgcagatgtgcagtggctgctttatttcccttt

SEQ ID NO: 140062 - DNA, 566 bp, Homo sapiens
gttcttaatccatttttaactttttcatatattgccacatttctctctataaaagctggacacatttacgctcccaccaatagtgaaccagggcccatttcccacataactaatttaaacctcgtagaccagttctgctcagtagaattgtctgcattgatgtaaatattctgtatctatgatgtctaatatagtagccactagctatatatgactactgagcacttgaaatttgggtggtacaattaagacattaaatttttaattttatttaatttagatttaaaaagccacatgtgactagtgtttaccatattgaactgcataactatacccggaatgggatctggtttatttacaagcttgataatcttttataacttttaaagtggtttattgttcagtatcaattatttaacctaagaaattttgcctgyatatttctgcttttttgctactgtattgtgtcttttatcttattgacttacaagtaatattttcctgatatgctgatttctactggatgtttattaatacttaatctactatataggatgcaaatattt

SEQ ID NO: 140063 - DNA, 527 bp, Homo sapiens
cactcatgcactacgtagtggtacaggaagtccatcacccttaaagcagaggagctctgagrgctgaatgggcatttccaaatctactcagacacctaagagaaaaacaccatgtttaatcactgtcacacaaatgtactacattgattgtcaacttttgtttgattaaatcactcttttgtggaaaaggaggctaaaattcttatggcacaaaattggctcacacaaactaaaggacaaaatattcataaatcacacaccacaactagaattgaattattttggtcatactgagtagaaagagaagtcccttctacacagtcctcagactggtatatcattgtttgggaggataggagatgactctccagatgaatcaattctgaaaacaaatggactggaccagttcgaacctcacaggaagagccagtataaagtatatgggcatctaatgaaattagatgaatgtaagaaatactgggaaaacaatgataaagaaggcaaaaggaaatcacctacccaagcac

SEQ ID NO: 140064 - DNA, 600 bp, Homo sapiens
tcatatatagtagggaaaaaagaaatcacatccaaacatttctaatagagggactgggtactagtagagtgatgcccagaacactacagtgaagtcataattttagaattacaaatgtaaatcagatgtgtgaatacatatttttattccttataattaaagttaacttttctgtagatctgtttttaaacatgatagtagaataaaacacattttacaattgtaacccagttacttcccatttttagttcagtctcagcttttttgtttcttttactttcttctcaaggttacttcacaatgatgtctactctcaagcgagggtgttttccgtagagtccagattgaaggtcaggcaaatctctactattttcraagtccttcagtgacggatatattatatgtcaacttggctggggcattgtgcccatatttggtcaaacattattctggatgtttctatgaaggtttgttttgttttgtttttttggcacagggtgagggtagtaaaattaacattgaaacagctggactttgagtaaagcagattaccctccttaatgtaggtgggtttcattcaatcatttcaagactgcaatc

SEQ ID NO: 140065 - DNA, 431 bp, Homo sapiens
gcacatgttgaatttatctaataactctatatttattacatccaataaaattatcagtgcagaagccataattcaatataaattcctgcgttaaaaaatgtataaccctgtgcctaatcatgaaattttttcacaattaaacattgggaaaattttatttgtctttttaattcagtgctttcactactaaaggatatgasctttattaaagtcttgtaatttcaatcaagaaaatcagcatttgcaaagtacaaagataagtcactgctacagagtcagtggtgaatgaacccaaatgtccaacatcagaagttttaccatctagtatggagttaattttttcctagtatatccttgccataaacatttagccagtattcaaattctccctctggaaattattaacatattcttagactgagcaaaatttt

SEQ ID NO: 140066 - DNA, 518 bp, Homo sapiens
cacacgttatagatgaggaaactggtttacagatatgttaagggttttgattcaagtaattcaagtaattagtgacatcatgtgattaacttcatgacccaaactctgagcctgggtcttttccaacttcatcatattttgctgtactcattgtgaaacaggagagttccctgacccccacttgcagaacatgcaacaggggtgtggctctctgttcagccaccacaagctcaaaccccttacgggacgggaagcacgcagatgggcaggtgcaggaaatgaggggagctcttttgggctctggcyccacagcagcatctaagggtaggagtctgagactcccaaagcccaagtgggtgtgtgttacagtgcactcttttagccttgccatccatggatggcttaagggttaaccagctcagtggaccctctgcctttttgcaagggcaggggacgattgtgccagctttctgtatcccaagatcttgtccagcatcccagaagactcaggtcacaca

SEQ ID NO: 140067 - DNA, 518 bp, Homo sapiens
cacacgttatagatgaggaaactggtttacagatatgttaagggttttgattcaagtaattcaagtaattagtgacatcatgtgattaacttcatgacccaaactctgagcctgggtcttttccaacttcatcatattttgctgtactcattgtgaaacaggagagttccctgacccccacttgcagaacatgcaacaggggtgtggctctctgttcagccaccacaagctcaaaccccttacgggacgggaagcacgcagatgggcaggtgcaggaaatgaggggagctcttttgggctctggccccacagcagcatctaagggtaggagtctgagactcccaaagcccaagtggstgtgtgttacagtgcactcttttagccttgccatccatggatggcttaagggttaaccagctcagtggaccctctgcctttttgcaagggcaggggacgattgtgccagctttctgtatcccaagatcttgtccagcatcccagaagactcaggtcacaca

SEQ ID NO: 140068 - DNA, 493 bp, Homo sapiens
ctgaggatttagggacttttatgctttttacatttttaaaatatagtttttacttttggcttttcagtgaattttttgcaatgatatatatatacacacacatatatatatatayacacacacacacacacacacacaatagaatactattagatttctttgaaattcacataagataataaaaaacaaattttaggagaaatttgtagtgtaccaaaaataatgaaggaagaggttctgtgaatatattaatttatgactgaagagttttttatagtgaaagtctatgctctatttttttcctctaacctgcccatcctcatctatataataatggaaatataataaagatacataactggatacgtgaatatttggaagtacaataaagatctattaatgtataactaaacaccccaaaatgttagtggcttaaataaattaactattttatttgttcattattttgcatcttgagcagggcttagatgct

SEQ ID NO: 140069 - DNA, 493 bp, Homo sapiens
ctgaggatttagggacttttatgctttttacatttttaaaatatagtttttacttttggcttttcagtgaattttttgcaatgatatatatatacacacacatatatatatatatacacacacacacacacacacacaatagaatactattagatttctttgaaattcacataagataataaaaaacaaattttaggagaaatttgtagtgtaccaaaaataatgaaggaagaggttctgtgaatatrttaatttatgactgaagagttttttatagtgaaagtctatgctctatttttttcctctaacctgcccatcctcatctatataataatggaaatataataaagatacataactggatacgtgaatatttggaagtacaataaagatctattaatgtataactaaacaccccaaaatgttagtggcttaaataaattaactattttatttgttcattattttgcatcttgagcagggcttagatgct

SEQ ID NO: 140070 - DNA, 512 bp, Homo sapiens
tacattagatctctaaactggctcatcctacatagctgctactttttatcctttgacctatgtctgtcaaccatgcctccccaccctgtggtaatggtagccactgttaaattttctatctctttgtatttaagttctttgtacagtacatataacataaaaaagatgtcataatcaactttatattattggattccagttaacagtaggctatcagtagtaaagttttcaggaagtaaaaagttatacacagattttcaactgtggataaggttggcacccctaaccctcacattgctcaagggtcaactgtaggagtgtstatgtgtttgtgtgtgtgtgtgtgtgtgtgtgtgtattccacataaaagtgagatcatgcaagatttctatttctgtgtctggcttgcttcacttagcgtaatgttctgcaggtccatcattgatgtggcaaatagcataacattttattgtgtgtgtgtatacacagactgtatatatatgtacacaca

SEQ ID NO: 140071 - DNA, 579 bp, Homo sapiens
ataatttggctgtttctcattttttcttgctgagcttaaaagggttttttttttttttcccaattttgttgatcttttcaaagaccttttcaaagccaacttttggcagtgtggattttctctgttgtttttctatcctccatgtcattaatttcctctctgatctttcttagtctcttattctgcttgtttttggtttcatttgctcttctaccaatgtcttacagtaaaattgagattcttgattaatgatctttttttaaaaaaagatatttatatccacaaatttcttctaagcaagattttagcagtagatcataaattttggtgtgttgtgtattttaatttatattaatattcatattaatttctcttgtgattttcttgacctattaattatttagaaacatgttaatttstgcatatttatggctttctctcatttctttctgtttttaatgcccaatttcaaaattagagaaaaaaatcatggttggagaagaaactatggtttcaaaccttttacatttattgaggcttattttatggcatagatctatcctagcaaatgttccatgt

SEQ ID NO: 140072 - DNA, 568 bp, Homo sapiens
ctatcactatttgttgaaaatagaccatttcccccttattaaattactttggtgcttttataaaaaaatcaattgcccatatgtgtgggcacactttggactctggtgtatttaattgatcctatgcaacattaagtattttgtttactgcagccctacaataaattttgaagtcaagtaggttaaatcttccaactttgtagttacttcttttttttcagaattgctgaattttctaggtcatttgatttcatacaacatttagaagcaatttgccaatttttaaaaagtcagttggaattttgattcgaattgcattgagtgtatagatttttggagaacagacatcaygtcagtattgaatctcctcggtccgttgccctgcagatagcagccccttcagcagcctcagattctgatctccacttctcatcccaatgagaccatagttctctgcctggacttcaactccttgtgttttggttaggaaatcattccaggctgagagtggggcagccacgcatctcatctcctagagccccgttctctcagaaatcgcataaagcat

SEQ ID NO: 140073 - DNA, 616 bp, Homo sapiens
tacgtcatgttgggcatgttatttaacttgtctgagtcttgaaacgggtataaaataacctaaaattaatattgttcaattgaatgaaatatgtgtgtgtgtgtgtgtrtatatatatatatatatatatatatatatatatatatatatatatgtgatatataaatataaatttatttcttccttctcttctgaattttgaggggattgactggtaggcaggaattggcctcataatattctgaacaggaatttgttcctattcagttggaagttagtgtatttctctacgcctcctctgaggatatgtcaaaaatatgttctcctttactcaactcatctccattcatcaaaatgctattactgtgttttttctttttaggattcaaatgcctattaatttactgaaaattatgtatccagttaaatagtcttttgagtctatattcctgtagaaatgtatttaaacagtttcctggaagtaaaaagaaaaagtttttaaaactaaattttataatttctccttttcattccctatttgcctttcaatgcgcagctcattgtcacagtcttcacctcccccttcaaaacttcattgtttgctgcactcttcgag

SEQ ID NO: 140074 - DNA, 616 bp, Homo sapiens
tacgtcatgttgggcatgttatttaacttgtctgagtcttgaaacgggtataaaataacctaaaattaatattgttcaattgaatgaaatatgtgtgtgtgtgtgtgtgtatatatatatatatatatatatatatatatatatatatatatawgtgatatataaatataaatttatttcttccttctcttctgaattttgaggggattgactggtaggcaggaattggcctcataatattctgaacaggaatttgttcctattcagttggaagttagtgtatttctctacgcctcctctgaggatatgtcaaaaatatgttctcctttactcaactcatctccattcatcaaaatgctattactgtgttttttctttttaggattcaaatgcctattaatttactgaaaattatgtatccagttaaatagtcttttgagtctatattcctgtagaaatgtatttaaacagtttcctggaagtaaaaagaaaaagtttttaaaactaaattttataatttctccttttcattccctatttgcctttcaatgcgcagctcattgtcacagtcttcacctcccccttcaaaacttcattgtttgctgcactcttcgag

SEQ ID NO: 140075 - DNA, 584 bp, Homo sapiens
tgagttgcgctgagcttacgagacatccacaggtatgtttaaaagaggtcaacctgtgaagctgtggaaagaggaagaaggttgagtgatgtgggagcagagagcagtcgcagcaggagaggccataatgatagtgagcggcagattcagtatgaatgagaaattaggagggttgacatgataggggtgttttcagtggtaccagactgaacttgaaatcggaagacctgggttgaacttaacttctgtgcatgactgagtaatacttttatgtgctaagcttaccttctgtgcaatgagggtaatattacaggattctttttttagagttaaattaaatactgcatgttaaattattttatayaatgcaaagtactctacaaaaaatacttttaagggtataataacaaagagctttagctatttcacatgaccactttagaacatatgcaacacttcaaagacgaatagtttataaaacatcaagtttttaggtttgttcatcggtttctgaaaacttaccaatgccttcaacactttctgtataatcataatggaagacagactttggacaaaatcaggct

SEQ ID NO: 140076 - DNA, 453 bp, Homo sapiens
ggaaacaaaatagaaactccagaaataaactcacrtatacggaaatgtattaagtgcaaaagcagggatcgaagctctgtggtgaaaggaagggctgtttatgaatggtacttgcacattaacttatggataccaaataatggaaattggattcctacttcacagcctatacaagtatggtcatgcactcccacataatattttgatcaacagtggactgcatatacaatggtggtcccataaggtaatcagggagctaaaatatttctatggcctagtgatgtagcagccgtcataacatagtcacataatgcattaccttttccatgtttagctgtgtttgatacacatagaatcatgttacagttgctgacagtactgagtacagtaacctgctgtacaggtttgtagcctaggagcaataggctattccgtatagtgtaggtatgtggt

SEQ ID NO: 140077 - DNA, 453 bp, Homo sapiens
ggaaacaaaatagaaactccagaaataaactcacatatacggaaatgtattaagtgcaaaagcagggatcgaagctctgtggtgaaaggaagggctgtttatgaatggtacttgcacattaacttatggataccaaataatggaaattggattcctacttcacagcctatacaagtatggtcatgcactcccacataatattttgatcaacagtggactgcatatacaatggtggtcccataaggtaatcagggagctaaaatatttctatggcctagtgatgtagcagccgtcataacatagtcacayaatgcattaccttttccatgtttagctgtgtttgatacacatagaatcatgttacagttgctgacagtactgagtacagtaacctgctgtacaggtttgtagcctaggagcaataggctattccgtatagtgtaggtatgtggt

SEQ ID NO: 140078 - DNA, 491 bp, Homo sapiens
ctgagctaggtctacctctcttgattaagtcaattattccctcttgtggcttaagctacatccgatatgatactgttacttgcaacaagaagagtcctcatacatactgtgtggatgtacccatatttataaactaatctcatattgttggacatttaggttgtttccaaaatttcaatattatgaacaagattatgaagaacttttacatatgcatctttgtgtacatgtcctgcagggtcaaaagttatgtctttgatttctgttaccctattgccttcctaaaagatttctcaattactattccaccatcattgtaacagaatgccaagttttcccaagcagcctgagttctagttgctgagctctgyattaggatcaagataatttgcatgaaactactttacaaatagttaactttttcttcattacaaagcacagccttttccttaagaatggaacaagtatcattaagtgcttcctatgtgccg

SEQ ID NO: 140079 - DNA, 427 bp, Homo sapiens
aaatttgtggttttaagcaccttgtttgtggtactttgttacagcagcgttctactctgcagcccagcatgagaacattgagctgtcatcaaagccacaaggtactaaaactgaagatttcacagaaagaaatctgatcagacccaggctttcaggtgccacctgggctgggaggtccggtcctgaggtcagtgctgtcatgagcctgggctcgatcttgtgacactggctttgccgagcctctgctggacactgccagtgtgggccactctgtaatgtggggcctcagcaaggtccttgctggtgggattgracagaaagaagctcagtgtctctctcacacataagttacgtgactgcatctctattaaatgcttttattttctcccaggcttcactttatgaatgggattttaatagctgaaat

SEQ ID NO: 140080 - DNA, 439 bp, Homo sapiens
atgacttttttgcattatatggaagaagactatattcttcagaataaaawcaaagtatgtaagttgacaaaaataaggacaaatcaatgatattcatgaggttaatatttgatattcagatgtatgtttcaaaatgttcaaatattctctatagaaagagctacagtatttaattattaagtccaaattttattcatacttttattttaaaatcatcattgtctttacatcagtgaatcactctgaaatattttaatctggcacttcaaattactgtaaatatcttccctttattagaaacattggtagctttttgaaggtcataataaatattttcaaaaatagtttataaattggaaagagtgtaacttgaaagagatatatatatttgaatttgaatataaattataccactaattaataataaactcttgttcaa

SEQ ID NO: 140081 - DNA, 439 bp, Homo sapiens
atgacttttttgcattatatggaagaagactatattcttcagaataaaatcaaagtatgtaagttgacaaaaataaggacaaatcaatgatattcatgaggttaatatttgatattcagatgtatgtttcaaaatgttcaaatattctctatagaaagagctacagtatttaattattaagtccaaattttattcatacttttattttaaaatcatcattgtctttacatcagtgaatcactctgaaatattttaatytggcacttcaaattactgtaaatatcttccctttattagaaacattggtagctttttgaaggtcataataaatattttcaaaaatagtttataaattggaaagagtgtaacttgaaagagatatatatatttgaatttgaatataaattataccactaattaataataaactcttgttcaa

SEQ ID NO: 140082 - DNA, 540 bp, Homo sapiens
caagatgattggaacaggtgatgtgtaaattagaattgagccaaagactgtagaatcatttttagtattcaactaagattggttagcacaaatttagaatgttaccaccttaaatgctttttcccccagaaatacttccaacttaagaatcaagataaatagataatatgcagctgagtctacccaacgttgagtgaagacatcaaaatatgacagaaaaacaagaggaatgtgaaaacttgtgagacaaggaggagggacttccttaacctgtgttaatgcagagagtaaacagattcaatttcacaataaaacaaaagcaaaagaaatggataagatgcttaagattcaattcaataataagttttcaaatatttgtgggtagtggaaattatagaagtttatgttcatatcaaaattttctgttcagtaatacytgaattctaaaaatccaactcagaaatgtatcagaagttccttataaaacaaaacaaaatatgtatgtgctgtatcagtgcaatgcagcatttagtatcatcc

SEQ ID NO: 140083 - DNA, 457 bp, Homo sapiens
ttacgttaatcctaccaaaaagcagaatagcctgaactcttatcaaaactgcccttagaagtgcttgaagtgaaaaaagaaaggatagtatattcaatacgggcagawcctaaagccagacaggaacaataaacaatgacaaacaagcctgactcattgtgacttggagaagcagaacttgcaagttcaacaggagagacactaaggtaaatggatggatgaagagaaacaggaagcaaatgctgcagccattctctagtttttaaaatgataacctaccaaactcctgtttctatttggttaagtagataagaagggcttgtctgtctatgagagagattaaataaaatatttcccaattttcatctaaagaaataaatattatgtatatttcatcaagggaaatggaataagagagctgaagatattagcaaaggagtaattataatggaattta

SEQ ID NO: 140084 - DNA, 457 bp, Homo sapiens
ttacgttaatcctaccaaaaagcagaatagcctgaactcttatcaaaactgcccttagaagtgcttgaagtgaaaaaagaaaggatagtatattcaatacgggcagatyctaaagccagacaggaacaataaacaatgacaaacaagcctgactcattgtgacttggagaagcagaacttgcaagttcaacaggagagacactaaggtaaatggatggatgaagagaaacaggaagcaaatgctgcagccattctctagtttttaaaatgataacctaccaaactcctgtttctatttggttaagtagataagaagggcttgtctgtctatgagagagattaaataaaatatttcccaattttcatctaaagaaataaatattatgtatatttcatcaagggaaatggaataagagagctgaagatattagcaaaggagtaattataatggaattta

SEQ ID NO: 140085 - DNA, 421 bp, Homo sapiens
tctagggagcagatcagacacatacttcaacttcctgctaggaaatgtcaggttgctgacaggaaaagtagcttccatttgaaaagacttagagggaagcagcgattttaggaaatacctcatttcagttaaagaaaggagttggcaaataaaaaactaaaactatgttgctattatttaaatgtttgttcccccacaaaactcatgtttaaatttaatcgccaggcagtattaaaaggtggaaccttgaagaagtgattaggccatgarggctccagcctcatgggcggtgttggtgctgttataaaagggcaagtttggttccctcttgcttttacttgcccttctcctgccaccatgaaatgaaggtcaccatgaggtgctagcaccttgatctcagatttcccagtctccagaactg

SEQ ID NO: 140086 - DNA, 397 bp, Homo sapiens
aatagactgcactgctagcacttcaaacacaattgaatacgtctgagtgcatgaccaggttctttgccttggacagctccattttcctataayatttaggtagatcctctagcactcacaaatattatataatgtataacttatgataaagtccataaacaattttatcaattaggatatgtttttcctttctaaagctgatactgtcaggaacaagaatccttttatagtatcttttatttcttccaatttaggaagaatattcaaatccactattaagcctgtcacttatttggaaattatattgaatttgacacaaatgcaatacatttttctgatatgacaatattttccaatgtatataatccttggaggtcttcacaaaagttttaaattg

SEQ ID NO: 140087 - DNA, 308 bp, Homo sapiens
cttctagccaactacatgaaaatgtgatcatttaattttccaaaagtttttgagccatacagctgtcattactaatgaaaggagtaggaatcctagtattacccactccctgycactccacctctgaaggccaaagtgggacaccatttcaaggggcagagtcgcactgaacacttccagaatttttttttttttagtggatactgcaacaatggtgagattcagcaaaactttcaagactttgaggggcaatagtttcctattctcttataggagaacaaatagcaaggaagcatggtttcaaaacc

SEQ ID NO: 140088 - DNA, 388 bp, Homo sapiens
atgagattattatgagattgttttacccaataaagggtatctggattactattatcacaactatcaccatgatatgctcaacgaaagcttctgtgtattaaaaaaaaaaaaaaaaaaaaaaaagcctggtaattgttaaaagagagggaaaraaaggacggggggaaagtatgaaagtgtagtgtggtagcgttacgttttatcaatccattaatatgcttgatttgtcattctttttattttaaaaaggtctattcgcagccaaaaaatgtcattaaaacccttttctatagctgagttgggtaggttgaagtgatctgttctaacgtactttaaaatatgtgttattggctaagccaaaaaattttcccttcattatcacctcata

SEQ ID NO: 140089 - DNA, 563 bp, Homo sapiens
aatattccctgaaattataaaatttcatatatattccataagtcttaaatttatatattatcatcattcttcaggaaagtgtgtgagcgcacacacacacacacacatcacaccacaaacacacacaacgcttcttcaaaagttcatggaaaatgtgtattatcaaaaagctatcatgaatttcaacattttttgcacaaatataaactcatactaatttattataacatgtctgtacagaacagartctagctggaggcattaagaaagataagattagtttgaaaagggcccccgtcagagtaacctaaattctgttaaaactgacacaagaatgtttgtggtaaacattcaaatttgtgctgaagttgaggtggaaaaatgatgaaatcattgatcctttaccaaaagtttatggggacaatgcaccaaagaaatcaagagtttacaaataggtaacttgttttaagaagaaacagaaggaacaagacaatattgaagatgaagcctgtcatggcagaccatccacatcaatctgtgagaaaaaaattcatcttgttcat

SEQ ID NO: 140090 - DNA, 618 bp, Homo sapiens
tgagaaaagtgataccctcatttctaaaacaaataataataacaaaaataaatcaaatctaattaaaatagacaaaaggtaatcaatctattaatcagtcaatgttacaaaatggaaactataagacccaaataagtggtcacgggttcaggattttttttgaataaagcagataacttcattatgaaaggaggaatataagagttaatctggatgctttaatgtaagttaagtaatccacctagtatgtctgttttctttaactttttacactgatcataaatttgtctaccattaaagtctttgttttagtgattgcatttttaaaattttcacaattatttgttgcaatcatttataaattgaaaatattcaactttacaactgcattttaaagtatagatatggcttgttttgctggaaatataaagccaacattttccccctaccttccccctggtaataagttaaaataatttrtgtattcacacattaaatgaatatgtaacaagtatctatgcacaatgtgtaaagtaaattaaatatgtatcaagcatctatacattgggcaatcttctagatgttgaaagggatgccaagggacaaacaggaaagcac

SEQ ID NO: 140091 - DNA, 546 bp, Homo sapiens
actcactagtaccattagcaagttctggggactactcagtctctgagtttcagtactgacaacaacattacattctaacaacattttctacaaatcaacggtggtgcaatcagagtctcargctagttaagggctacaaagatgaacatatcataataaaaatattttgacataccaccaaaaaagtttaattttaaatgcttaaaaatttttcctgctttctgtcagaggacaaagagccaccttattttatttgagaaatgatttttttttcttttaagcaccaagaaccagctaagacaaagtatacaggaaatcataaaagtcattctaggaccatagttttcattgtaaccagatcagtataggacataagaatcctcttcactaaaaaaatataaagaagtttatgtataaaatctgggttatcaaagaccagctgacactaaatgttttgctccgtatcttaatttgatctcaaagacatctccatctcaaataaataaataaataaatgaaacaaaaacaattcttcaaggtccccaa

SEQ ID NO: 140092 - DNA, 642 bp, Homo sapiens
agccaaaattctgccctaaattaaaaacaaaacaaaaatttctatgggtatagtgcatgctgattaatatatagcctctatgtatcaggcatatgctatccatttttaatgcatcatcccttttcattttcacaattccataaaatagacattcttatcctcaatttacatttggygtaactgagtcttaaaaggctcatttttgcccaaagacctacagcttttttgtgttagaagcaagagtcaaacccagatttgttaacactgaagctcatctctttaatctctataaaatgtacagtcaagcttctcaaaaaagtagcccacatttgctatgtcttataagagggtaagacttgtccaaggacttggaaaagacttcaggtggcagctagaatctattatgggacagttactaaggagtaggtaacttgttgatcagagagaagtgaaaaaaattgtacaacactggttctaaactatatcagcagtgatactacaccccaaaccaaaatttctttggtttggaatatttgtattccctgtgctgccccctcccccattttttaaattaatttcatccccactatccctagacaagtgccctccgtaactttccacatgatctcatcattaccaaat

SEQ ID NO: 140093 - DNA, 585 bp, Homo sapiens
tatactagcaatcaaccatgggaaataaaattttaaaatgccaatttcaaaggcataatatttataatataattaatagtaaattaaccaaaatatgtatataacrtataaactacaaatgactgggggaaagtaaaacagacttaaataaatggagaagtataccatgttgttggtttaagtgatatattattaagatgtttatttctccccaaatctatctacagagtcaaaacaattccaattaaaattccatcatgtttgtttgtactgattgataagttaattctaaaatttatatgaaaatgcatagaagaatagccaacatgatttaaaccaaacataaaaacagagaacttcttctacatggctttaagacttactataatgctgtattagtcaagggacttgagtaagaatcaatggaatagaatagtgtgtttccaaaatcacactgacatatgcatggaaaatcagtttttcatagtgatgataaggcaatttaatggagaaaataaaatattttccccccaaaaacagttaaataattaaatatccacatggaaacaaaacaacttcgaacat

SEQ ID NO: 140094 - DNA, 585 bp, Homo sapiens
tatactagcaatcaaccatgggaaataaaattttaaaatgccaatttcaaaggcataatatttataatataattaatagtaaattaaccaaaatatgtatataacatataaactacaaatgactgggggaaagtaaaacagacttaaataaatggagaagtataccatgttgttggtttaagtgatatattattaagatgtttatttctccccaaatctatctacagagtcaaaacaattccaattaaaattccatcatgtttgtttgtactgattgataagttaattctaaaatttatatgaaaatgcatrgaagaatagccaacatgatttaaaccaaacataaaaacagagaacttcttctacatggctttaagacttactataatgctgtattagtcaagggacttgagtaagaatcaatggaatagaatagtgtgtttccaaaatcacactgacatatgcatggaaaatcagtttttcatagtgatgataaggcaatttaatggagaaaataaaatattttccccccaaaaacagttaaataattaaatatccacatggaaacaaaacaacttcgaacat

SEQ ID NO: 140095 - DNA, 452 bp, Homo sapiens
ttcccactacagaaaaatgcattgttgcagaacagactgtacttaattgtctggtgccaagcaggtattgctcacaactcagagtgstgcaaaagaaactccccaggagggttaaagtcgtcatggaaggtttcatggacttaggcctgtaatgacagctgagatttgcataaacaaaaaggattaaatgcatatgctttgtgtgtgagggtgctctaagttacatgaccttaacaaagtagaagatctgtgtttggattaacaaagtgtggtgagctcacaaagggcctccaaagccaggcagacaaatccatattcattgaataaaaacacagaaacacaatgtagttttggaataggaaggcattaaaaatacctatttagagccagtaaagcaaatgtttattactctatgctacatgaagagcaagactatcaataaaacgtgacag

SEQ ID NO: 140096 - DNA, 623 bp, Homo sapiens
tctttggaacccactcactgtccaacaggctttactacctgagaacatgaagcaggagagaagggcaggggcgaggtgggggcctgcacagggtcaggatgtaggaggtgcagaagacagagtttgtagtgtgtgtgaatatgtgtgtgtgttctgtatgtacgtggataatatytaatgaattccgctcaccaactgtgaaaaattctgatggataaaatttgtcactctttatccctgaagagatttgaataagttggtagaaaggagcagaaactttttatataacacagacccttgctactcaaatgtgtggtggttcttgaatcagcaccgtctgcatcacctggaagcttgttagaaatgcagaatttaaggcttaatcccggacctactgaatcagaatgcgctttttaacaatacttctctctactcctgggtgattgattcatgcattgaatttgaaaagcgcttcactagttgccagatgttttgctctaaattccttcttctgtgtactaaggcataatataggaaagactcaaaggatttctccctacagctggagttcataagcttccattattgaagtgaggtgtatagtgtttttgagatagtccagt

SEQ ID NO: 140097 - DNA, 623 bp, Homo sapiens
tctttggaacccactcactgtccaacaggctttactacctgagaacatgaagcaggagagaagggcaggggcgaggtgggggcctgcacagggtcaggatgtaggaggtgcagaagacagagtttgtagtgtgtgtgaatatgtgtgtgtgttctgtatgtacgtggataatatctaatgaattccgctcaccaactgtgaaaaattctgatggataaaatttgtcactctttatccctgaagagatttgaataagttggtagaaaggagcagaaactttttatataacacagacccttgctactcaaatgtgtggtggttcttgaatcagcaccgtctgcatcacctggaagcttgttagaaatgcagaatttaaggcttaatcccggacctactgaatcagaatgcgctttttaacaatacttctctctactcctgggtgattgattcatgcattgaatttgaaaagcgcttcactmgttgccagatgttttgctctaaattccttcttctgtgtactaaggcataatataggaaagactcaaaggatttctccctacagctggagttcataagcttccattattgaagtgaggtgtatagtgtttttgagatagtccagt

SEQ ID NO: 140098 - DNA, 659 bp, Homo sapiens
attgcaccacaatcacacagaaatacatattttaataacctctggattttaatttttcttattcccttctccatttttgaaataaagataaataactatataaatatatgctaatttagttatgtggtaaaattaatcatgaaataatttggcaattttttgcattttgaagatgatttagaaattgaatttatataaatgggaattgatttttacaaaacaatattatctttatgtcatttaataagcaaggaatcattattttgacaataaaaaagttgtatcaatttttcacttaaatacttctaacctgaggtgggaaacaggcaatagaatacrtaaaatcctaaactattataagtttccgtggaaatatgcttaatggtagtctaagaaaaaataatcttgggaacattgtggagagagtagataattacatgtaatatgaagaggttatgttctcttgatgcttagagtatatgacagttatatatttttgaaaatcattcagagctaatattatatttaggtagactagatagcttgctataattatgtggtacaattacagcattaaaaaattcagcatatttacagagcacctaccatatgctaagacctgtaccaggcattttcacacataggcagtgcattagaca

SEQ ID NO: 140099 - DNA, 517 bp, Homo sapiens
gcctgtaaggataattacaagtaagggcagcaagaccacattcctcctccaatccatggcagacattactaatcaattagcctgggaatatggggagaaactcggtaaacaaagtttaatagcctttaatatgctaatgtccattatgactcctctggaagaagctggctaacaacaggggtgcaccaatcacaccaaacaccagcagaatgtcaattaggcctgcaagggtgctttttttcagaggacctcataggacttgtggtcccttgggaaatatggtctactgattttagacacacacacacacacacacacacacacacacmccccacccacccacccagaaaagtgacaatgacaaaatagcagaacccaattaacaatctgtggattaaaaattcctcagggctatcctaaagcagtgaaaagctggagcatacaagcatatgacagcactgtattcactgtaacctatggttatatttcaaaggcctacagttaaattagtgtaatt

SEQ ID NO: 140100 - DNA, 250 bp, Homo sapiens
caagttcccctaaaagacagtttagccgaaatccaaactcaaccctccacccgagtccctgattccctgacrcatattttaccatgctccctcttacccactcacttcctaactttagcctcaccactcattctgtgtctctgagtcatgacagtccctttcttgccccaaagtcttccactgtgctctttcctactaatggaattatcttcttttccaagtttattcagaactctgatcaagtatcaat

SEQ ID NO: 140101 - DNA, 422 bp, Homo sapiens
aaccaatcgaaacataaaagcattttgccatgctgcttctcaataagtataaaggtcacaacaaagaggagtgaataataatgaaaataacatttagcccgtgaataactgctgttcaaatgtagagtatgttttcgtttttcttttgagatggagtctcgctctgtcacccaggctggattgcagtggcgcgatctcgactcactgcaaccccctccccgccaggttcaagagattctcctgcctcagcctccccagtagttgagattacaggcatgcaccatcatgcctggctaatttttgtatttttagtagagatagagtttggacatgttggccmggctggtctcaaactcctgacctcaggtgatccacccacctcagcctcccaaagtgctggggtcagaggcatgagccaccac

SEQ ID NO: 140102 - DNA, 565 bp, Homo sapiens
tacctgagcttacttctcatcatgactaaagtcaattacttccacagtgtagtagctcctttctgtgtttattgttctagacccacatgaacagatggaagcttgagctctatgttatgcaggattcttacttttcctcactttccccgggaaaagtgttatccgtttgagagccagcatcactatggccattgatcctaaggagtaggagtataaatcacttcttttggtttctgaaagcaatggtgactagaggtacttctacttctatgatctcattttaagatccatatattctacttagtaacacaacagcatatagtgagcatcatttaagatggatactgtaccctgaaggataatakcccattctcagagggtgtcatctccaaactggtacctagactacacctaaaagatgctgctctaattctctatttgatggcaatttcagaatgatgcagtatatggtaggaccaatgcttcccatggcaaggggtccactgctgctatagtgggaagcatcagggtttctacttgaccctttctattaaatagtacttac

SEQ ID NO: 140103 - DNA, 542 bp, Homo sapiens
agctgggactacgggcacgcaccaccacacacagctaattttcgtatttttagtagagacagggtttcaccatgtttggctaggatggtctcaatctcttgacctcctgatccacctgcgttggcctcccagagtgctgggattacaggcatgagccaccgtgcccggcctgaaaaagtgggcccagagtctctctgctgtgtccagcatagggacttagtgtcctgcgttacagcygctccagccatggctgaaagtggccaacgtacagcttgggctgtggcttcagagggtggaagccccaagccttggcagcttccacatggtatcgagcctgtgggtgcacagaagtcaagaattgaggtttgggaacctctgcctagattttagaagatgtatggaaatgcctgggtgcccaggaaaaagtttgctgcaggggcggggccgtcatggagaacctctgctagggagtgcgagagagaaatgtgggattggagtccccacacagagtctctactggggcactgcctagtggagctgtg

SEQ ID NO: 140104 - DNA, 542 bp, Homo sapiens
agctgggactacgggcacgcaccaccacacacagctaattttcgtatttttagtagagacagggtttcaccatgtttggctaggatggtctcaatctcttgacctcctgatccacctgcgttggcctcccagagtgctgggattacaggcatgagccaccgtgcccggcctgaaaaagtgggcccagagtctctctgctgtgtccagcatagggacttagtgtcctgcgttacagccgctccagccatggctgaaagtggccaacgtacagcttgggctgtggcttcagagggtggaagccccaagccttggcagcttccacatggtatcgagcctgtgggtgcacagaagtmaagaattgaggtttgggaacctctgcctagattttagaagatgtatggaaatgcctgggtgcccaggaaaaagtttgctgcaggggcggggccgtcatggagaacctctgctagggagtgcgagagagaaatgtgggattggagtccccacacagagtctctactggggcactgcctagtggagctgtg

SEQ ID NO: 140105 - DNA, 487 bp, Homo sapiens
cagcaaactattgcctactacccaaagccagcccactgcctgttttaataaagttttcttggaacaaaccagctaatctgaaatataaggaaagctaggagcttccaagaaaaggcaggacaaratggcttgcttacatgagtattatattcctgggctgctgtaacaattagcacaacatgttgaactaaaagagcagcaatgcattctctcacggtttttcaggccagaagtctgaaatcagtttgaatgggctgaaatcaaaatgctggtagagaggcactctgtctagacgttctaggctctgctctatgagggcagatctcacccctgacaatccggagacacagtatctgcttaaatctgaggctgaatcagaaagcaaggagaacttgcccactcatgaagactttgcagctaaacaagagctaagacaataggaaaaaatattccctgaagtggaagtgtaaaggaaagactcaaaacc

SEQ ID NO: 140106 - DNA, 469 bp, Homo sapiens
agactagacatatagaaggggtaagggccaggtagagcaaagatgctcctgaaaaagagcaaggtgcataaatttgtcatagcagatagtaaaatttagggagagctacagtgctaagtatcctgtggtatttgcacacgaatgggtaaatgggccaatggaacagcaaagattgtgcagaaataaatttacttctatttaaaatagtagatgtgaaagagctggaattgaagatgattgtaaataaaggagtttgtttaataaatacttctggattagtttgtttttcatatagtcattatatgaattttgattcttatgcaacatgccatttgctacaaatcaaaataaatgatttagcattttaaacctggaagacaaaatttgaatatttacaastatagcagaatagctttgtaatctcagtatgagaaagatttattaaatacttttcaaaatgtactgaggg

SEQ ID NO: 140107 - DNA, 545 bp, Homo sapiens
gactacctcactttcagtgtgaggtactttcagatattgtagaatttactatacggcaaagatatgtgaaagaaaatttttatcacatgccaaacaatgtaccatataactcctttcaaaaatatctgttctttattgcaagggttctcatttaatgccagccacttgactccatgtctatttccatttttcacctctaaaatcaccattattaatccacaatttttatcttttataaagccttaaagcccaggaattagctacttcctttcctcccagggacatcccaaaggctatctattattactgaagaatatgctggctgaatctcattgtctgccccmatctctgcaactccaagaaacttattatcatattcaaaaggaaacagatcatggtaatgaggaaggacagaaaagaacagtgaagatatcagtcactaggaagataaaacctattccacgtaataacacttgtttttgtacctgtctaaactccaatgtgtccatcaacctgaaatatgcaacctctttcaaccctctttc

SEQ ID NO: 140108 - DNA, 620 bp, Homo sapiens
cccttccccactgagctcaaggaacacaaaaaaggtcaacttgttttttgtgattctctattgtttttcaataactaacgtataggaatagattgaagtagagatttcttggaaacagagctggatgaagcctcaaggggctcacacaacctgttccaggacttggtaaccaytgtttgtgtccatgttcaattgagttcaaatttaatgtttaacttttcctccacagtatctacccagagaaaaagaagtcattattcaaaaaagatacttgcacatgcatctttatagtagcacaattcacaattgcaaaatcgtggagtcaacccaaatgtccatcaatcaatgagtgaataaagaaattgtgagatatatatgatggaatactactcagccataaaaaataatgaatgaacagcatttgcaataacctggatgagattgcagattattattctaagtaaagtaactcaggaatcgaaagccaaacattgtatgttctcactgatatgtgggagctaagctatgagcatgtaaaggcttaagaatgatacagtggactttggggacttggggggaagagttgcggggcaaaggaaaaatacaataaatgtggtgta

SEQ ID NO: 140109 - DNA, 558 bp, Homo sapiens
ctcatctatggccaatgtgggtgcaatggttctggcatccattgagtggaatttgctcaactttaatttttcagtcagaattgtgtatgctgaaccaattgaaatgtctatggtgttagctgttttagctgttgattctcagcccccttcagttagggccaaccctaactcttccatccacacgtcaccataaatttgaggtttgttcttgcttctattttctcagaattcatgttgctctcataggggttctttccaaactaatgttttatccttagtgcttcaaactagatcctgttggtttattttgatgcaaaaatattttgaaatccatctatatatatttttcctaatacacattttccacgacttttctgaagaccgttttcataatagtctgactcttgccaactacttttagtcaatkattagaatacattaatcattgttctgcattatatatatatatatacgtcatatgtatatataataaggaatgtaaagtgggacaaaaagctattggagaagagaagggcatttacaaatgatgttatatgt

SEQ ID NO: 140110 - DNA, 443 bp, Homo sapiens
tgctggttttcttaatggtttgatctgtcagtgggagaagctcttcctggctgcctctagtcagccatcttggcttttctcaaagcagatattaattttactgttgcgatttttttaaaacattttttatttttgtcattttgtacattttatcctccacctgcccatgtttctattttstcactatattttattgggaatataggaacgtgaaatatagacattttcccaatcctctgcttaatatccagttagtttttttttttacaaaatttctagaattttctcttttttctgtttaaactctaattttctcattgtaattccacaagtctcactccgctccccttttcttcatcagtggagaataatagttttagaatattctgccaataaacagattgaatagaaagtcattgactctcttactgtttacctataca

SEQ ID NO: 140111 - DNA, 658 bp, Homo sapiens
ttgtcccaataaacaaaaaatctcagtgcctttcagaaaagttatcatcatagttaaatttgtgaaaaaacagtccaaacttcatagttcatacttttgaattaaaacatatttttaagattaccttcctaatatactatctacgagcatacatttacctattgcaaaatacttgtattacagagaaagtttcctaaattgtattggttcatttaagtagttacattatagttaatataatattaacattaatatgagtcaggaggcttctgtggaaaaataaacaaaccctttctgcctgtttacactctcattatcagcctctttgtagatttgtagtaatctacagataactacataatataaaaaastcaaggttctaccctagaagacctcctcttttcattttgtaatctctccctaagagatataatcttaccaaagtttcaaatactcccagctgcttaaactatttaaatctctagtcttatcctttctactaatataatatacctagtcctctggtggagtgttacaagacacctcatacttataaatctgcaaataaaacttagaaattctcatctaaacatactcctcatctaaacaacagcaccactcatttttctgtactgccagaaacttaggggttatcaac

SEQ ID NO: 140112 - DNA, 658 bp, Homo sapiens
ttgtcccaataaacaaaaaatctcagtgcctttcagaaaagttatcatcatagttaaatttgtgaaaaaacagtccaaacttcatagttcatacttttgaattaaaacatatttttaagattaccttcctaatatactatctacgagcatacatttacctattgcaaaatacttgtattacagagaaagtttcctaaattgtattggttcatttaagtagttacattatagttaatataatattaacattaatatgagtcaggaggcttctgtggaaaaataaacaaaccctttctgcctgtttacactctcattatcagcctctttgtagatttgtagtaatctacagataactacataatataaaaaactcaaggttctaccctagaagacctcctcttttcattttgtaatctctccctaagagatataatcttaccaaagtttcaaatactcccagctgcttaaactatttaaatctctagtcttatcctttctactaatataatatacctagtcctctggtggagtgttacaagacacctcatacttataaatctgcaaataaaacttagraattctcatctaaacatactcctcatctaaacaacagcaccactcatttttctgtactgccagaaacttaggggttatcaac

SEQ ID NO: 140113 - DNA, 520 bp, Homo sapiens
atctattgaagtagttatcgaaggaaactaaacccagaagttcttgacgtaaattaaaattcagttttactaatggtcctacatgtggctacaactatgaaagtwctatggaaatctaataaactgcttttcatcaaagaaataataaaaaagggggccttcgtgacaccatgagaaaattagaaaagacaaaaaatgttttatttaaaagtaaaacaatacaactctcactccacttagcactcattaaaatccctgtcctttactagataatttaaaagcaaattatctacacataatattgattatacatcactgtccttaatatgtagatgcaaactaaacttgatcttctctgctgattaggtttgagaagaaattagttgccacatcaatgatcatatatgaagaactagaagttttgtgttttatctgctccaataaagattcaaaatgcaactgtaattagggctatcacctggttatttatatggtagtctaccttcattattcaagatct

SEQ ID NO: 140114 - DNA, 516 bp, Homo sapiens
gcagctatgaattggaagttgaatcttatttacaaatggaagatgttacctcaacatttattgctcccagggaatgaatctaataatcttgccagtgacacctttatcactcacaagaaatcgtcatttataaagaacataaatcaaggcagttcatcctcagtgatagaatctgatgaagaatgtgctgaaattgttaaacaaactcatatcaaacctactaaaattgtttctttaaagaaaaaagtgtctaaagaaataaaaaaagatcagcttaaaaaagaaaataatcacggtattatagattctktagataatgacagaaattccactgttgaaaatatttttcaagaagacctaccaaatgataaaaggacatcagatacagatgaaattgctgccacatgtactattaatgaaaatgttattaaagaaccgtgtgtgttattaacagagtgtcagtttacaaataaatccactagttcacttgctggaaatgttttagattctggttat

SEQ ID NO: 140115 - DNA, 533 bp, Homo sapiens
tcaaacaaaatatatcttcaggcagtggcttgctgtccttggctataaaacaatatcatctcccacctgttcttgtcaccaccttaggatgttttccaatggagattttctttcttttcttttcccttcccttctctttccttcttcctttccttcctcctctcctttcctttttctttcctttctcccctcccctccttccctccctccctctctcccttccttccttccttctttttgtaatgttttgtgcatggagtagcaggcatttttctcttgcagccaccgttgttcccctcccatccagrcacacatgactgcatcatgaggctgatttcatttttatcagcattctctttctctctctctctttaaaccattttacaaagcataagcagaaagacttcagaaagtcagatttcaaaagtggtgcactgcctaaaaagttctctacacttcttatgctctttccttgctaggacaatattcaaagagctctataagcattcaatgagtctgtgaacaagtattta

SEQ ID NO: 140116 - DNA, 482 bp, Homo sapiens
tattgaaaaattgtgcaatatcaggatcaatagccaggcatttggaacagtagcatacactcggaaacccctcctgtgggatggatgtgcactggaaaagaacacacttccttctgccagttagstttttaggttcatggcctgagaaaacaatgaaatcagtcaggtatttagcaaggaggagcatgatacaataaaatgtctcataatgaattcaactcaattcacttggaaagcaaagggtaggggccaagagaaagaatgattgcatagttcagaccactccaagaaataataaatgggcttatttactgtgtctcagaacagctacctagaatgtttcattccaactgtccataactaaggtattaaaaaataattgagagcaggatctggatgaaaaaggaaaaaaaaaacccctacatttatttacattattttttcagggcatatttttggctctttacttcttatttttggct

SEQ ID NO: 140117 - DNA, 605 bp, Homo sapiens
gaagatccttcatcctaactttgaacaacttcaaagtttgccctggggtcttgagtctgtgatggaggaggtctgggtgactatgggatgaggaacctcccttctcagttacactgagagacggtgtcagagtcaggcttttctgggggcatatgagactttggggaggcaggttgtcttgatgactgtatctgtgtgggttgagagtaggtatggaaaagacggcagagaggaggatggtacaggatctgtaggcccgtctttaccctggggttgctggtctgtgctcaccatgaggcctcgtgctcaccaagagtctgccacttttcctctgcttcccagtcatcctcgctggtttcaccaaagacccactaattccactaatacgtggaagactctcaaagataagaagatgagtgagtgaatataaataataaaarggtgagggcaaaggagcaggtttatcttaaacacatttttttttccctggaggtgccttcttttctacctagagcatatgttagtgtcctacacgtgggatattggggagttcatctttggaaaagacttttgagttctggggagcaaggatgtcttgaaaatag

SEQ ID NO: 140118 - DNA, 605 bp, Homo sapiens
gaagatccttcatcctaactttgaacaacttcaaagtttgccctggggtcttgagtctgtgatggaggaggtctgggtgactatgggatgaggaacctcccttctcagttacactgagagacggtgtcagagtcaggcttttctgggggcatatgagactttggggaggcaggttgtcttgatgactgtatctgtgtgggttgagagtaggtatggaaaagacggcagagaggaggatggtacaggatctgtaggcccgtctttaccctggggttgctggtctgtgctcaccatgaggcctcgtgctcaccaagagtctgccacttttcctctgcttcccagtcatcctcgctggtttcaccaaagacccactaattccactaatacgtggaagactctcaaagataagaagatgagtgagtgaatataaataataaaaaggtgagggcaaaggagcaggtttatcttaaacacatttttttttccctggaggtgccttcttttctacctagagcatatgttagtgtcctacacrtgggatattggggagttcatctttggaaaagacttttgagttctggggagcaaggatgtcttgaaaatag

SEQ ID NO: 140119 - DNA, 434 bp, Homo sapiens
atgatattttaaggctatgtatatctttttcctcttttctcatctgacagttcttcaactttaaaccactgatatggtgtgactaatgccctagaattaagatttcttacaggcagatattagaacccattttaaaaagccaacacatttaatttcttaccattgccacactactctgcagctaagaaacttttagtaattaatgggcaaataccagagaccttccaaaaaaaaaagctcytgaagacttagagcatatcacctggtgaagctgtttccccaggtcgtttgggttttcccacatcaagcaagtcaagctcttctagtccaaggtggagcaccaaccaattcctggaattagggagcgcttcagatgttctaggtcaggtccctggttccagggtggggctcagtggtgagtcaattatgcatgg

SEQ ID NO: 140120 - DNA, 441 bp, Homo sapiens
tgatattttaaggctatgtatatctttttcctcttttctcatctgacagttcttcaactttaaaccactgatatggtgtgactaatgccctagaattaagatttcttacaggcagatattagaacccattttaaaaagccaacacatttaatttcttaccattgccacactactctgcagctaagaaacttttagtaattaatgggcaaataccagagaccttccaaaaaaaaaagctcctgaagacttagagcatatcacctggtgaagctgtttccccaggtcgtttgggttttcccacatcaagcaagtcaagctcttctagtccaaggtggagcaccaaccaattcctggaattagggagcgcttcagatgttytaggtcaggtccctggttccagggtggggctcagtggtgagtcaattatgcatggagtcaaga

SEQ ID NO: 140121 - DNA, 489 bp, Homo sapiens
aaaggacttagagttgggaggctttgccatggcctatgggcccactccatgttcccagtggcctcagctcttccttggagaggataaggcaagacctcaagtctatatcaagaaatgtgggagccatgcattctccacatctgtgctcttgctactggctgcaaggaaattggtgctgctcagagaagtggacaagctccagggagggatgaagaataagtgtgtgtgtgtgtgtgtgtgtgygcgcatatgtgtgtagggggtatttgagggagatggcatagagaaacactgactagagatgttacaagtcccccaaactcagttggaccacttgactcacccctggatgcagcccaaaaatttgctcttggaagtgcttcctgactggcttggaatacttgtccttaactccatcaggatgccatgggtcttaagatcttttctatattggaatgtttggggcaattagacttaagtccaaggccc

SEQ ID NO: 140122 - DNA, 574 bp, Homo sapiens
ctcttacaaaaggcctcataatcaggtaggctcatgtaagaagagtatgaacggcatcacttgggactggagttgactatagcttactgtcttggatccatcctatcctcggtttgttcattcagattacaagtattataatacctataattttccagaagacttaaagatttaaaattatgtagcagctgttctctgattttagtaggtttgcaatctagtaggagagatgacatatcttacagggactgggagtcaattaaagaattttgagcaagaatatgacaagaagtaaaggcagcgatctatagggcagattggaacagccatagtttagaaggtgaggtttcaggccagtgtgattacactggcccactgacagaaggaatgaaaagagaagacacamagagaagttggtgcaggaacaaggctggaatatagagggagagaacagtccagggtgacatttggactagggaatggggccacatctatgctaccatcctcccttccctagtcacatttattcacatgtatggtgttgtggctcagaactaagaataaggcaaaagtg

SEQ ID NO: 140123 - DNA, 566 bp, Homo sapiens
tccattcttcctaaaagatataattctgaaaatacattcatgaatgtttctgaagcaaacaccaaatgctaagaggaataattcctccattacaaaggctaatgagaatatttaatttctatcaaagtaaatgcagaacttggtattgctggaatcacagttactaatacatatttggaagagataaatatgtcatagctattaaaatttcatgtaaaaagtaaggcagaaagagtaaacmttttagggatattataactgatggccatagcactgaatgtatcagtactgtacattttgctgatttatttactgattctctcaataaatatggttatagagagtaatagtgtttgggaatcattagtggccaatatgaaatttgtcgtagtattcctggggaaaaaaatatacatataaatatggaggagagatattgtttagggaaagccaattaaccagatttgatttttttcctccaaaatgacattgtaaatggagttagttaagaagatcaagtaaaaccatatgcaaaacacatagaaatatatttaaatattgatctc

SEQ ID NO: 140124 - DNA, 420 bp, Homo sapiens
agatctcaaacagattatcatacaccactcatgtccatcacatattttgtattactcaaaatagccaagaggtggaaacaacccaaatatccttcaatggatgtatgaataaatgcaatgtggtatatccctaaaacagaatattattccgccttaaaaaagtaatgaaatcctgcaatatgcacgggtgaaaattgaggacatgctaagtgaaataagccagtaactgaaagataaatattgtctaattccacttacatcagctacctagaatagttgaagtattcaagacaaagtagaatagtgggaagaggggattgggaattattatttaatgagatggagttttagttgggaagratgaaagctcttgagtggtgatgattgtgaaactgatggttgtgaaactgttactgcaaa

SEQ ID NO: 140125 - DNA, 492 bp, Homo sapiens
gggaacttgtttcttcctggtttactacttgttttcactatagtggtagcatttggttccagtttccaggttcttctagtgrtcctagaaccagcttctttatgtttcagaattagcagccgccgccaggcagggacgtcccgtcagagctccacaagccttgctgttagggcccttcctgcaagcttctggagtttgatagtctctttccttcgctgccagggatatgtcctgggctgtgttggctgctataacaaagtaccatagccttggtggctgataaaaacaaaaagttggctgggcacggtggtggctcacgcctgtaatcttatcactttgggaggccgaggcaggtggatcacgaggtcaagagttggagaccaacctggccaatatggtgaaatcctgtctctactgaaaatacaaaaattagtcaggtgtggtggcaggtgcctgtagtcccagctactcgggaggctgaggaagaatcac

SEQ ID NO: 140126 - DNA, 492 bp, Homo sapiens
gggaacttgtttcttcctggtttactacttgttttcactatagtggtagcatttggttccagtttccaggttcttctagtggtcctagaaccagcttctttatgtttcagaattagcagccgccgccaggcagggacgtcccgtcagagctccacaagccttgctgttagggcccttcctgcaagcttctggagtttgatagtctctttccttcgctgccagggatatgtcctggkctgtgttggctgctataacaaagtaccatagccttggtggctgataaaaacaaaaagttggctgggcacggtggtggctcacgcctgtaatcttatcactttgggaggccgaggcaggtggatcacgaggtcaagagttggagaccaacctggccaatatggtgaaatcctgtctctactgaaaatacaaaaattagtcaggtgtggtggcaggtgcctgtagtcccagctactcgggaggctgaggaagaatcac

SEQ ID NO: 140127 - DNA, 501 bp, Homo sapiens
attgctgaaggggcagctataagttgttgttcaatgggacacttcctgtgtcttctagaaagagtgtgcctctttggggacctggaccttttaactctgtagagtccagagttatagggatcggaaacataaagtgctcaatggttcattgttgtctcgtcaattaacttcattcctcatggcaagtgctctcttaagagatctcagttgcataccatcacagctgccaggtatttgatctcctacctgtacaaggaatatgcayccccatatattgccatatgacttgcagtatttattggaggagaataagtccccaggccactgacctcaagcttgaccataagattggttttagtcagtggagagtgatggaaagattataagccacatctgagcagaagccaggagagacatataagttagttggtgtttttccttctctgccaggagaaaaagtcccaatggggctacatcctggggtgaagaatatatgtgaaa

SEQ ID NO: 140128 - DNA, 541 bp, Homo sapiens
tgtcatgagtgcctattatattttctagattttttttcttcagggtttagaaagtgagcatttgggcttacttgggggataaagggactacttaagtgaaaacattaatagaaaggtggaaaaatattttaattattttctttcaagcattatttgtcatatttaagaccscaggtgtgagctttgctctgctccccattgtgcaactgattaggggttatgcaaagttaagagtggagactgcaggagttattcttatgattttccagttgaaaatgctgtttagcactatatatttctaataaaacatgcaaaaggagagaaccacttgcttccaaaaagtcaagagccacttgcatccaaaaagtcaaaacatgaggtatgaaaaggtaagtcaagatggtatctaaacaattctgatcagccagatatctggaatcttttataatattgagagaatttgtatttggtattgttacggctgcaaatccatacaggcctgcggcaacctcaattcttgcctcctcagaagaaagaattc

SEQ ID NO: 140129 - DNA, 382 bp, Homo sapiens
gtcactagccacttgtggctattaagcccatgaaatgtaagtagtcagacyggaaatgtactataagtgtgaaatacacatcagattttagagactctatgaacagaaaaagaatgtaaaaatatctcaaatatacttattcattcaatcagtcattacacatagaacaatgaatagcacaggctcagtcctggcctctgtggagcttgaagtatagtagatattattcaaaatgttcttttttattgcttggactttcatatgaatattttgattatatatctgatattctcaaagcagataccattgtagctctgccgaaatatcgaggactgggatgtgagctaggagtacgttaccaattgctgcctggccaggatga

SEQ ID NO: 140130 - DNA, 527 bp, Homo sapiens
tggaaatctagataagaaaatgaaaggatgacctgaaagaagtctatatatatatatatatgcatatatgtacacrcactatcttagaatatgtgtgaaaaagtaatcaaaactgaaacaagacaactaactcctcatagatatgccatttttttcattatataacatgcatagcaagagattgtaggggatgaatctgaaaagataagcatggacaaccttgccagtattattaagaaagttgacttaattttatgtttataggaatgctttgatatctttaagccagagaatactatatatcagatttgcatttgtaaaatgtcacattctggctgtattgcgtagatagagtagaaggaaaagatgaagcctggatgaagcagagcaagtgagccccaaaattggggcttagcctgagagggttcttggcttcacccaggaaaaaaactcaggggctagccagtggtgagagaaagccactcttattgaaccagtgctgctccttgtggagcagggacataggc

SEQ ID NO: 140131 - DNA, 527 bp, Homo sapiens
tggaaatctagataagaaaatgaaaggatgacctgaaagaagtctatatatatatatatatgcatatatgtacacgcactatcttagaatatgtgtgaaaaagtaatcaaaactgaaacaagacaactaactcctcatagatatgccatttttttcattatataacatgcatagcaagagattgtaggggatgaatctgaaaagataagcatggacaaccttgccagtattattaagaaagttgacttaattttatgtttataggaatgctttgatatctttaagccagagaatactatatatcagatttgcatttgtaaaatgtcrcattctggctgtattgcgtagatagagtagaaggaaaagatgaagcctggatgaagcagagcaagtgagccccaaaattggggcttagcctgagagggttcttggcttcacccaggaaaaaaactcaggggctagccagtggtgagagaaagccactcttattgaaccagtgctgctccttgtggagcagggacataggc

SEQ ID NO: 140132 - DNA, 598 bp, Homo sapiens
tttgaatgacagccaacttaatcatacacaaaattccttcataaatcccccatcatgaacctcatcatgacttacacagaccatctacaacatgcttgaactttctgactagtcctataccacctcttttataaataaccagtcactttactgtaggacaataatttatcttacaagatcctttctcatacaacattcttttacatttatatcatcctttaccaaaaatacaccttcatatccttatctttcttcatatatctctctcgcctacttactagttaatttctaccttatttcataagtcaccttctcatgtccataattttaattaacctttaagtacttttaagttgggcaaaaacagtctttcacaaaaagagcacattgtaacttagtatttttacctgccacactaagggttgcscagggttcctctgtagagatggtaaggtgtctaatgggagtcatgggggatattgggctgtttaaatcctctgcaaatgatgggtttgggtaaccaaggctccctttggaaactggggcagtcccttttccaatggccctcgtgtttacagaagatatattgattctggct

SEQ ID NO: 140133 - DNA, 673 bp, Homo sapiens
ttgctaatggctaattctttaatttctcccccactctgagaagtaaccaaattttggtggtctcttacatcaaagtgtactagagaaaagggaagccatgtctttgttaaccaaaaaatcttctttacttaagtgatgaagttgatagcttaactaatccttgttcccaccccagtcactctccactcttaccactcacactgtacatgcccttctctaaaccattttaataatcttcctaatgaatatttagttagcatgcaagcagattttttctattgccgaaggccagcaatctcagtttctcaaaaatctgtttttttgtttttttgttttttttttgtggagaggggaagttactgttatttgttttacatacttctgtcagtttcttttcagtgctgttttttgttttgttttgttttggccctgtgtttatatgtgtgagaagatcaatggtgccctaacttctgttccattttcacacccccactgaaatctcccctacctagctacytgaaatttctctggaattgttttcacatacgtagggctggatacctgcctccagctaatttatacccccatcatggacccttctctccacttcccttatactaatttggtctcatcctaagtaggtgagtgagagagaggtaaaaagactgcaatg

SEQ ID NO: 140134 - DNA, 673 bp, Homo sapiens
ttgctaatggctaattctttaatttctcccccactctgagaagtaaccaaattttggtggtctcttacatcaaagtgtactagagaaaagggaagccatgtctttgttaaccaaaaaatcttctttacttaagtgatgaagttgatagcttaactaatccttgttcccaccccagtcactctccactcttaccactcacactgtacatgcccttctctaaaccattttaataatcttcctaatgaatatttagttagcatgcaagcagattttttctattgccgaaggccagcaatctcagtttctcaaaaatctgtttttttgtttttttgttttttttttgtggagaggggaagttactgttatttgttttacatacttctgtcagtttcttttcagtgctgttttttgttttgttttgttttggccctgtgtttatatgtgtgagaagatcaatggtgccctaacttctgttccattttcacacccccactgaaatctcccctacctagctacctgaaatttctctggaattgttttyacatacgtagggctggatacctgcctccagctaatttatacccccatcatggacccttctctccacttcccttatactaatttggtctcatcctaagtaggtgagtgagagagaggtaaaaagactgcaatg

SEQ ID NO: 140135 - DNA, 536 bp, Homo sapiens
gtcaagctggagtttgagcccaatagacccagaatgtactccagttctttttagttatcttcccaatttttttattacatgttkgccacatcatataacattttgatctgtgggaaataaatcatcgtgtttatttgccttttgaaacagaaaaaagtcatgaaggaattcagatgataagtttcattttaaaatgtgacctccacttttagaaatagttagaaatgctttcagcttcaaatcaaagaaaaacctagttaacaatggtgcctcatatagcaagactttggaaataagtggtcgcggcattggttcagtgtctcaaagatttcccagcctatttggtgtcggttccttgctgttctgttccttatggtttcatgatggctgcatctcaggagacagtattaagagtgctccttcttgggtacctctttctaatggaaaaaaggagaaatcctcccaaaagctcctaggagaccctctttccatatgtgacctgacccggaaggaaagttgaataaactaaagagaga

SEQ ID NO: 140136 - DNA, 595 bp, Homo sapiens
ctatatgctctgatgtggatataatcatggatctgatggctttagatgaacattagaagaaaaagtacaataatgataataaattaattcatactaacttagcatttactatgttccagatgttgttcatcatgatctacttccatgaaagtgttagagaccgctagagtcaaaataaagcagatactggcaggaatgattagacttaaattctatttctagcttaacttttctggactctagtttttctcttttgtttgtttttggtcttttaattttcaaaatgggaactttcgcaatgcagaatraattgtctgactaacataaacgaagggatcacaagtagtcaagtctattgggctgtctcttttcagacattgagaatctcattcaattatctattgctattataaatcaccgaaaacttggtggctttataattcggtatttatttgttcatgattctgcagttcggacagggcttgtcagggcagttctactctgctacatgctaggactgggatattcaagatggcttcttcaaccacctatctgaagatgccatcactagaatggctgaaacagatgcaggctg

SEQ ID NO: 140137 - DNA, 466 bp, Homo sapiens
tccagaaggaaatattaggtgaattaccttaagaaagtgactgaaaaactcccctacactgagagtcacaaaaatactttaaaaatactttgaagcaggcagcctgtgagtgcaaattgaagtcctctgcatagatgaggggattggtacagtctcctaacccaaataaataacatagcaaaagaaaccagcaaagacagttgtatgatgaccatatattccacactcttaattggaactgtatcctgacaagaaaaacaaactcagaatgtttatgacggagacaattttaaatcaaacttctcccagattatctgaaatatagttttcacaaaatcaggaaaattattttacattttccctttattcactgcataacttaatgggttctgcatttgttttcagagcctttatattttttgagttcaatttggttaccaactacmttcatcacagaatttttaaa

SEQ ID NO: 140138 - DNA, 617 bp, Homo sapiens
gggactcaatgaactctaaattcaaataccttcttggcctctactcatatattttaactctaaggtggtcctgaaaattcatactgccagagaaattgtaaggagagattcagaaaaatgaccatgtaagaaatgctcataataaataaaagtagaaaaaaaaaatctgcagaaggtgatggagattggctggtttcctgctggtggccagaaaggactttatttttcacaggcctggctttttggccactgctggagttgtccatagaaatagttatctccaacttcaggatggccaggtacaggctggacctgcaggtggtgagtctagggttcaggctgccctttccagatcatggaaatctctgcctgttgtcatatggtttttggaaggcatgaagcagggctggagtgactgcagtgagtacttatgcagacttcccaaatgtcatttgtccagagacaaccacataaatctaagcaaaatcagtgccctatctaccaagtgaaacatttccaaaaatggcaraactcagagttactgtagtcaaaataatttatttttagtccagctgtagaaccaaaatattcagcataaatacagaattgaaaggaaa

SEQ ID NO: 140139 - DNA, 401 bp, Homo sapiens
tcatatcttaggccaggcacagtgatcccaatcacaattatacctgtgatcccaatattttgggaggccaaggtgggaagatcacttgagcccaggagttcaagatcagcctgggcaacatggtgaaaccccatcactacacgatatagaagaaaaaaaaaattagtcaggtatgcacattcctgcagtcccagctacctgggaggctgaggtgggaggatcacttgagcctggagagtttgaggctccagtgagccatgactgcaccactgcactccagcctgggcaacagagtgagaccctgtctcaaaaaaaaaaaaaaaaaaaaaaaaaaaaacaggaagaaaaaatatatataatttttaraaaatcatcttaaagttatcagacaaaaaaaggaa

SEQ ID NO: 140140 - DNA, 601 bp, Homo sapiens
tacattccccccttatctgcaggggatatattccaagacctcagcggatgcctgaaacctcagattaaatcaaacttgatttctgtcaactagaacatatttctgttcatgtctttcatgacaaatttaatgcctttttcatcttaactaagtacttatcatatactatggccgtaattttcagtttgaagttcgacagcaaaactagcaagaatttatttttccttcttcataatttcacagacagaagattctttcttactacaaatcttagtaacctcagcatatgattgttttttcttaagttgagaactttcaccttttcacctaaaggaagcacttcacaagcttctctttggcgtatctgaattgccagcatcaccactcttgtgctttgggggtattaagtaaaataagagtgacttgaacacaagcatgccctactacaacagtcagttgtgataactgagatggctactawgtgactaaatgggaaggtagcttatagagcatggagacactggacaaagattcacatcctgggtgggacagggcaagatttcatcatgctactaagaatggtgtacaatttaaaacttaa

SEQ ID NO: 140141 - DNA, 558 bp, Homo sapiens
atctgctctctctcttttccttgcatgataaaccacatggtatattataaatggggaaagtcagatttaaattgagatagaaaattatttaaatttttgcaaaatattacgcctgtttgcaattatgtctttctgctcctctttccgtctccccaggatgtttataggagagtcctgttgtttgtgctctaatttaaaaaaataataaagacaaatgaatcataattcttgaattacttgtctggtagggaacacattttgagaaggaagttatttataataatgtttttcaaatcagaaaacatgcaaaaatgcacactttacaaatatatgactcaaccrtcttaaaaatgttttactgactcaaggccagagtcggacatcatcaaaaataagagttcagggtaaactattagaatgagaaaaaaagtgtattttagcaatctgacttatatgtcatttttcccattgtaaatagtgttcacattttgtaataattcattaataattaatacataaaaagaacaattataggcactttacatatatattgactca

SEQ ID NO: 140142 - DNA, 488 bp, Homo sapiens
tgtcgaaatgataaagactaaagattttctaggaaagtttgaacatatgacaaatattcttggaaacagaagagggattacataaaagggcattgtaaaagaagcaaaacattggattamaaagataaacaactatgtcaaatatttttaaaaagaaaagaaagacacacagtcagaaagagtggggatgacaaccaatccaaagggcataaaatgtggtggaggattatgaatcggataggagaaaggaacatggagctagaaagtgggcgaggagtacatgagtggaattgatcagcctctttattccagtcagaaatttggtgtgcagttgtgggataactttgtaaatgaatactttaagcataatcttaactgtgaatcaaaattgcacataaatttatatttattaaacattaaacaaacattcactgatgattatattgtgcatacaaacatgcatagaaattggctctccataaaaatat

SEQ ID NO: 140143 - DNA, 488 bp, Homo sapiens
tgtcgaaatgataaagactaaagattttctaggaaagtttgaacatatgacaaatattcttggaaacagaagagggattacataaaagggcattgtaaaagaagcaaaacattggattaaaaagataaacaactatgtcaaatatttttaaaaagaaaagaaagacacacagtcagaaagagtggggatgacaaccaatccaaagggcataaaatgtggtggaggattatgaatcggataggagaaaggaacatggagctagaaagtgggcgaggagtacatgagtggaattgatcagcctctttattccagtcagaaatttggtgtgcagttgtgggataactttgtaaatgaatactttaagcataatcttaactgtgaatcaaaattgcacataaayttatatttattaaacattaaacaaacattcactgatgattatattgtgcatacaaacatgcatagaaattggctctccataaaaatat

SEQ ID NO: 140144 - DNA, 458 bp, Homo sapiens
gttggtggacttagtggtttttcccaagtttccacaagcggcttttgtcagagctggttcatgacctgattcgtattgctgtgttggggatttccttataattcaacagtaatcatttttcaaagccatctgtgtctcttctggagaccagaaatcacaaaccggataacatttttgaatatagtggacattgctgctggggagggcactatgtcagcacaatttaaagtaagccaccccctctccagctttaagttgatcaagcagagtacacacgctctttaggttctgggtaagggacagtgcattccatgtgaaagtagggaggtttttgaaactttatattagaggacacttatacatccatgattgcctcagttgcaratttttagccctgactgccttcctagcccctctacttatcactggaatgtgttcaggcaggataactgtaatga

SEQ ID NO: 140145 - DNA, 623 bp, Homo sapiens
ctgttttcattcttcagcactcccggggaggagcaacccagaaagattcccatttgggactggctgctccacactgcctctaactcaggcactgagtttagaagcgcccgtcttgaacgtaaaagagaaaattgaagtgagagggactaaaatgtttctaccttgatgaatggaagcacgytgtgtattaaacgaccggtttcaaggagtatttctctagttcatatatgcatatacatatacgcatatatacaggtaaatttacaaaacgggaggacccggggaaaagcacagatagaagctttgtattaccagtccaggtttcaaggtcgtaggaaaccaatggttgaaggaaaggaggaacagctagaataatattacagaaaagtccatgcaacaagtcaagctatgattctgagaagtgagaaaaactgcccatgatttgcagactagccaaaaccttctatgtgttcctcagaagtgtttttctactaccagtaggggctgctctgcgcattgcctgggaaaagctcctgggaaaatatcttgatgctgatagcagtgatgatgatgcatatgttctgaatgttatcattcagaaatagtttccaagtaaaggttaa

SEQ ID NO: 140146 - DNA, 623 bp, Homo sapiens
ctgttttcattcttcagcactcccggggaggagcaacccagaaagattcccatttgggactggctgctccacactgcctctaactcaggcactgagtttagaagcgcccgtcttgaacgtaaaagagaaaattgaagtgagagggactaaaatgtttctaccttgatgaatggaagcacgttgtgtattaaacgaccggtttcaaggagtatttctctagttcatatatgcatatacatatacgcatatatacaggtaaatttacaaaacgggaggacccggggaaaagcacagatagaagctttgtattaccagtccaggtttcaaggtcgtaggaaaccaatggttgaaggaaaggaggaacagctagaataatattacagaaaagtccatgcaacaagtcaagctatgattctgagaagtgagaaaaactgcccatgatttgcagactagccaaaaccttctatgtgktcctcagaagtgtttttctactaccagtaggggctgctctgcgcattgcctgggaaaagctcctgggaaaatatcttgatgctgatagcagtgatgatgatgcatatgttctgaatgttatcattcagaaatagtttccaagtaaaggttaa

SEQ ID NO: 140147 - DNA, 499 bp, Homo sapiens
aataatataaaacgaactgttaaaaatcattaactgcaactcactttcagcaaatatataacacaaagattaaagtatgttcaaatatttcctatccattgctccttgcacattttcagttaatttctgttcctttatggcaagttcaaatatttggctacaagtgaagaaactttaactgtagaaatgtttccaaatccttaagcagttatttatttttacacataagtctctacattattattccaatagctaggaatattatttttcctagaatattcctagatgtaggaatattattttactaggaatattattgttcctaaaatattcctagatctaggaatattatcttactargaatattattattcttaggtaaaggaataataacgtagagacttaagagtaaaaataaatggtgtctgatttaacatacatttagagagggtaccttgtgtacagagatacagatcctgcctttcagggttgaaggtga

SEQ ID NO: 140148 - DNA, 578 bp, Homo sapiens
taaaagaaattgcaataactttttataaagctaagcattcttttgtaataggtgtaataattttctaacatgttttcttttaaaagtcacacgrtacctatcaagtctctgtcaaatgcacacatttttacacctgatataaatgtatttctgtttctacagagcatcaataactcatacagcaagtaaaacagtcaatgattcatacatatttttaaatttgaatataatcaactgaagtttgacattgtatgaagacattttgtgttctgtaagagtaggcagaaatttgggaagtcaagtccctgaagtactaaagacataatttctaatttcatcacaatggttcctgatatttcagtcttaacattattgaatgcagtagctctcaacccaggatacacagcaaaatcactttgtggacctttaaaattacagatattcaggcccacctgaacttactgatgtgaaacgggtatttctacatcctgaaaattccagcatgtgacatcacaccgcctcattctgaactcctatattgtgtattgctgattaactttcataggcaaaggcataat

SEQ ID NO: 140149 - DNA, 522 bp, Homo sapiens
tatgaaattatacctcatagatttagtcatggtctatttcagaattattattctatgaaagctcattaagaaatatcaatactagattttgtatttttctagatctttcttccaagttraagtgtttgtatatatatatcagaatgtgtgtgctctagaacacctatgtatgaagatgtataattttcctgaagggtgattttttttcacatatgtgaaggaattttctgtttcttttacattttcctaaataaaatggcaaaaaggaatttcctggaaaatgcgataaatcaatgacctattaacttttcttttaaagtgtattccacagagcaaccagcttcagaatttctattttccaaacaaaagatgttttgaatcaaagaattttttaaaagccttcactcaatgaggtataaaattccctattaaacatatttgatattttgctttgaaagttttttattaaaaatctgtcttccctaagtagaaacaatgcatgttagccaaccacagtacttt

SEQ ID NO: 140150 - DNA, 612 bp, Homo sapiens
acacaatacacagagtggttattaataaaacatatttctgttctgtttttttaaaaaccctgacattttcaaaaggaaaataccagctttacacacactyattaggatgacctactttttgacatgtggctacaatttattctaccacttattggtgaggtagttatcccagtacaaaatgaaaaaaatatataatgtccttacttaaaaagttatatgaacttaacttaaatgccatgtcccacatagaagaaggcaagaccccttttatgacaaagtaaagacaaaatgaaccccatatttctatggttgctgaccaagcttgcattcaaggactttagatcttgatgcattaagaaaaatgataaatgataatgggatgacattaaggcataattgctgaactagttctttggcatctgctgccatgaaggtaaatttaatgataaatagcatacatttggtaattttctactataataagacatgtttgcaaatcaaccatagtttttgcaggtaaacctgaaaacatattttatcaattaaaaataagattttatgttcagtcattttttaggtattataaaaattcctaaaattgctaatttctga

SEQ ID NO: 140151 - DNA, 554 bp, Homo sapiens
tatgagatcaaaataatgaaaacaggcctggcagcatgtgttttatttccatatttcagatattccctaatgataaccacaaagtcctctgaggggagtgtatttgttttcaatgcaattgtaatagaatgaagggaagcttttgcttactaatgtgctgcatttctaataattctttccatccacttgcaaatgtgaattgtcaccgctgatttatgttcattaatcaaaacggcaaatgcatgtggagtgcagaatcygggtccaggctgttgtgtgaaaaatgtgatcaatcatcactgattggcattttgagttaaactatacaagaatgtggaagaacagatgcttgctaggaacaagggaaaggaagttagggccaggaggctagcattttaattggcaagattcaaggtggttaaaacagactagaccaaaaattctgagttttggaataagagaaaataattatgcaaaacccagggaagaacgacttttcaaactaccttcatgtgaaagatacctttaaaacaatgctatagatgcttaaaaat

SEQ ID NO: 140152 - DNA, 575 bp, Homo sapiens
actatcttcctgcccatgtgaggcaacacaatatgaaggactgtaaatttttgtgtgagatctggcctcgtctggcagctgtttgattactggcaatttgctaaacttttctcaagtctcctcatctgtaaagttgacacaacactacttggacctaggggtgtttggggatttaaacaaaatatgttaattacctggtatgtgacttgtacaacataggagccaagttaaaaataaaaaaaatgcctcttttgtatctgtcgcagaacytagtataacagaaacctatgcatagtatgcatgatgttgcttaataaatatttgttgaatttaatttaatgatatcagagtagttcagagtagaggtctctggcttcccctgggccaccatggaagcaatggcagccttagtaacaggtgcctttgttaggattctttttctttagtgaaagggattaacagagcaactttcttactcacaccttcttcttcctttttgtttgtttgtttgtttcattttgagactgattttgctctgttgcccagactggagtgcagtggtgagatctcagctc

SEQ ID NO: 140153 - DNA, 572 bp, Homo sapiens
aagtgaaataagccagacacaaaaggacaaatattgtatcattccacttgtatgaagtaccttgtacaggtatattcagagacagtataatggtggttgtccagggggcaacctgggaggaaagggtacgaaaagttatcctttaaggggtaaagaatttcagttgagcaaatttcagtacagaaaaatgaataatggtgatggttgtagagcactgcgaaggtacttaatgccagtaaactgtacacttaaaaatggttaagatggtacattttatattatgcctattttgctacagaaaaacatcatggagagtagtgtttagaaaaaaagttgtctacaggccaggtgctgtggctcatgtgtgtaatcccagcactttaggaggctgaaggaggatatcttgactccgggagtttgagaccaacctgggcaacatagcgagatcctctatctatacaaaataaaaaacaaaacaagcaaacmaaaaaagttgtttaaaaaggctccttacgatatcactgattttaaaaaaggttgagaaatgctgttttagtgggaagacagagggg

SEQ ID NO: 140154 - DNA, 412 bp, Homo sapiens
gtagcaacggtttataccgttcagaagaggtatgtgtcttggtgtagagtgttctcsttaatcaggggaagaagaagtaagaaaggatgcacctactgtgtgccagccactgtgctgggcgctcccaagcatcatctccttaaatcccacaacaacccacaggtaccatttatcagcactacttggccaataatggcgcagtcattcaaagagaaggccttgtggcccaaagcaagctttccatggaaaaaatgaagagggaatgaatccctttggcaagtacagaactgcgattaccctaatcacttatgtgaaaggcacttgtgggttgtttcagttttatttagctgcttcctgctgtgattctgagtcaaaacaggaacaacgtgtctaatttgtaatattatccaac

SEQ ID NO: 140155 - DNA, 570 bp, Homo sapiens
ctaagaataatatcatggattctggggacttgtggggaagggtgggaagggagcaagggataaaagactatccactgggtacagtgtacactgctcaggtgatgggtgcaccaaaatctcagaaattaccactaaagaacttttgcatgtaaccaaaaaccacccgttccccaaaaactattgaaatgaaaaatgaaaaaacaaacacaaagaaaaaactcactgaactgaaaagaataaaatacaaatcgacaactacagttataaaattccrtatgcttcactcagtcataaatagaataaaaagacaaagacttaaaatgcctaaatatcacaagtgaccaacttaacctacatgacttttatagaacactccatccaactacagtatactacactttctcttcaaatagccatagaaaagtcatcaacattgacatatgctggacactaaagcaaacaaattttactcagtttatagaccataactgaattaaagtagaaattaataacaaaaagatatctgaagtatccctaaatatttgaaaattaccacttgatttatcaata

SEQ ID NO: 140156 - DNA, 570 bp, Homo sapiens
ctaagaataatatcatggattctggggacttgtggggaagggtgggaagggagcaagggataaaagactatccactgggtacagtgtacactgctcaggtgatgggtgcaccaaaatctcagaaattaccactaaagaacttttgcatgtaaccaaaaaccacccgttccccaaaaactattgaaatgaaaaatgaaaaaacaaacacaaagaaaaaactcactgaactgaaaagaataaaatacaaatcgacaactacagttataaaattccatatgcttcactcagtcataaatagaataaaaagacaaagacttaaaatgcctaaatatcacaagtgaccaacttaacctacatgacttttatagaacactccatccaactacagtatactayactttctcttcaaatagccatagaaaagtcatcaacattgacatatgctggacactaaagcaaacaaattttactcagtttatagaccataactgaattaaagtagaaattaataacaaaaagatatctgaagtatccctaaatatttgaaaattaccacttgatttatcaata

SEQ ID NO: 140157 - DNA, 579 bp, Homo sapiens
tatatttaattatatatatatatttatatatatatttatatatatatacatatattacacattttctttatccatttatttgatgatgattgctgatgaacacttatgttgcttacatatcttggctattgtgaataatgctgaaatgaacatgagagtgcagatatctcctcaacatactgatttcaattcctttgcatatataaccaaaagtgggwttactgaattatatggcaatcgttttctttttcttttcatttttttgagaaatcttcatagtattttccaaaatggctatattaatttacatttctagtaatggcatacaaaagtaatttttctccacatccttgccaacacttgctatcatttgtcttttttataatagttatgctaacaggcataagatgatatctcattgcagtattaatttgaatttccctgatgattagagatgctgcaaattttttcatgtatctgttgatcatttatgtctcttcttttgagaaatgttggttcagattctttgcccatgttttaattgagttaattgttttcttgctattgagttgcttgtgt

SEQ ID NO: 140158 - DNA, 446 bp, Homo sapiens
gttacagtctttggtgcaacaacaaataactaaacgcrctctttacattgtattccttttctatttaaaattcgacatgtattctcttggtgatctatcagattttccagagtcttaaaaaaatcacagaataaatttaagacattggttatattttatagttgatcatgtaaaacattaaatgctttttgtgagatagatgtgtaaatactggcatacatttttaaaagacaatttataataaaaatatatttcaggcttagaaatggataattccaggtgcaaaataatacaaaatcctatgtaatactgagtgcatataagttgagtgggtataggacaaaaatatttactttcttctgctttaggagtgcttgtataaacaagttatgaaaacattatgtctattcactccattgaattgagtctctccttatctttctttc

SEQ ID NO: 140159 - DNA, 446 bp, Homo sapiens
gttacagtctttggtgcaacaacaaataactaaacgcgctctttacattgtattccttttctatttaaaattcgacatgtattctcttggtgatctatcagattttccagagtcttaaaaaaatcacagaataaatttaagacattggttatattttatagttgatcatgtaaaacattaaatgctttttgtgagatagatgtgtaaatactggcatacatttttaaaagacaatttataataaaaatatatttcaggcttagaaatggataattccaggtgcaaaataatacaaaatcctatgtaatactgartgcatataagttgagtgggtataggacaaaaatatttactttcttctgctttaggagtgcttgtataaacaagttatgaaaacattatgtctattcactccattgaattgagtctctccttatctttctttc

SEQ ID NO: 140160 - DNA, 451 bp, Homo sapiens
ttcatttagctcaaggtattaaaaaatacattttttattttactaatagattttttcagaatcatgtttaaaaatttctacatttaattttctgtggctcctcctgttactgaattatagttttataccattcagattggaaatgatactttctataaytttgattttcttaaatttaaggctaattttgtagcctagcatataatctatcaaacagaatgttccatgtgcatgtgaaaaaaaatgtgtatacttttcttatgtcatggagtatttagtatatgtttgttagattcatttggtttaaagcatagtttatatccaatgttttcgtgatagttaatattggtgtcgaattgatagaattaagaatacctagagaactgttaaagatttattttgggtatatttgtgagggtattttcagaagagattggcacatgagttgctg

SEQ ID NO: 140161 - DNA, 437 bp, Homo sapiens
ttaggatctaaactcaacattggaccaaatggatcttatagacctctacagaactctgcacccaaaaacaacagaatataaattcttcccatcactatatggcccatactctaaaattgaacacacagtcagacataaaacaatcctcagcaaattcaaaagaacagaaatcatgctaaacatactcttggactccagtgcaataaaaattgaaatcaatactttaaaaattgcttaaaaccatccaaatacatggaaattaaacaacctgctcctgaatgacatttgagtaaataatgagattaaggcagaaatcaagaagttctttgaaactaatgagaamaaagatataacataccacaatctctaggacacagctaaggcaatattaagatggaaatttatagcactaaatgcctacatcaaaaaagtgagaa

SEQ ID NO: 140162 - DNA, 587 bp, Homo sapiens
agaatgtattttataatacyatgggacaaactctcttttctgtgaataccatctcttaaggcacctattacagtgcctggcccacagtcgaaacttaaaaactatttgactatcattaaaaactttcctgccatttatatcggcattacgcataaaaggtacccactaagagtcccaaagtaagggtacagccaagtttctcaacctaggcattactgatattccggaccagataattctttgttgttagagccatcctgtgcactgcaggatgttcagtagcatctctagcctccatgcactagatgtcagcagcaaacctcaatcatgacaatcaaaactatctcctgacattgccaaatgtctcctaagggaaacaaaatctctgagaaccccgccacagttgttttacaaatcattgtgtttcaccaggagcattccgcttttctaattaaataacagaatttaagaattgtaacatttctaaattttctctcaagtttactgcgaaacacaaattataagctacctacagattatctctaatgtccctcataaatcctcagaggattttacgagagaaatat

SEQ ID NO: 140163 - DNA, 533 bp, Homo sapiens
ctgatcttggaagggaacatatccatattgtgttaggctggattttcccagaatcagaccctgagccaaggattttagtgcaaatttttgcatgcgtgtggtgatctcaaaaagcaccaatacaggactgcagaagtgaaatagagaataacagaaaacgaatctgaattcaggataccttaacaagcaggttaccacttggtgaaattggattaggtctcactgggcccctccagtagatgtagaatttgcctcagagttgttccattcaaggggcaagaaaggtggagattggcttctggayggccaaactccaggagaagaccaatttctactcctcattgtttaaaagctgtgctcatggacagtaactccctggagattacagaggccaagcaccctccacccaggaaaccctctgactaagggatgcaggtacctcaagtaaagaagttattggcatgtatgggaaacataattgcataggggatatggctgtaactgctctactgtacccactgtactgcacagat

SEQ ID NO: 140164 - DNA, 520 bp, Homo sapiens
agttcattttcacactgctaaaaagaacttccctgagactggctaatttataaaggaaagaggttttattgtctcacagttccacttggctgggaaggcctcaggaaacttacaatcatgcagaaggggaagcaggcatyttcttcacaaggcagcaggagacagagaagtggaggaagaacttccaaacacttataaaaccaacagatctcgtaagaactcactcactgtcatgagaacagcataaggaaaccacccccgtgatccaatcaccttttccctccacacatgggtattacaggtcctttcctagagatgtggggattacaattagagatgagattgggtggggacacagagccaaaccatatcagacctcatctctacaaaaaaaaaaaaaagaaaagaaaagaaaaatcaaatgaataataaataaataagttttaaaaaataaataagaggctgttggatcttacctaatagggcttggattaccattcaaacagacctaaaggaattc

SEQ ID NO: 140165 - DNA, 508 bp, Homo sapiens
ttgtcacttttacgtataattttattttatttcatatatttcctattggttttttacatttaaattatggagcacttcatcatataaaaaacttcaattatatttaaacagtaagtctttggatttttttgccttttaatttccatattacataataatgagataaacattaatgttttcagggtactttaaattttagataattactcattgtattcatgtgaaatttgtttttactgcatgtgtgggttggaggwcggttttcacttctgattcatctttactcttatctcatcagagctcatacctcttgtagttgggggattgcagtttataattccaataaatggggcaaattcaataataacataatacaaatgagtttgaatgcaggacaggtcttcaaagcatacacaacatgggcctacatatgtacaacaataataatttataagttactgtttggatggaaagtaaaagtacagaaaatttgttaaaggaaattaaa

SEQ ID NO: 140166 - DNA, 402 bp, Homo sapiens
tcagccacagggtactaagtctcttcaggaaaaagcaattgttgtccatcakctgaaaaactgtggcctggaaccatgggcaccgagagtgcacactgcccactagagttccatgcctacatcacggagagatagaatagtctcaaaggattcttaagagtaatgtggggaccaaaaggagatgaatccacagcctctgccttaccgtctgatctaactaatagtatttccagacctttctgtgggctgcaccaggggttgttcagaaagaaaaaaagttgttaatgtcccaccgtttcccgtagcttccgaggtctgtgttgttcataccccaggttccaggttgttctcccactacttccacagaatcagtgtgtctcattccggtacctataatctcat

SEQ ID NO: 140167 - DNA, 396 bp, Homo sapiens
cacagggtactaagtctcttcaggaaaaagcaattgttgtccatcatctgaaaaactgtggcctggaaccatgggcaccgagagtgcacactgcccactagagttccatgcctacatcacggagagatagaatagtctcaaaggattcttaagagtaatgtggggaccaaaaggagatgaatccacagyctctgccttaccgtctgatctaactaatagtatttccagacctttctgtgggctgcaccaggggttgttcagaaagaaaaaaagttgttaatgtcccaccgtttcccgtagcttccgaggtctgtgttgttcataccccaggttccaggttgttctcccactacttccacagaatcagtgtgtctcattccggtacctataatctca

SEQ ID NO: 140168 - DNA, 378 bp, Homo sapiens
tcaggaaaaagcaattgttgtccatcatctgaaaaactgtggcctggaaccatgggcaccgagagtgcacactgcccactagagttccatgcctacatcacggagagatagaatagtctcaaaggattcttaagagtaatgtggggaccaaaaggagatgaatccacagcctctgccttaccgtctgatctaactaatagtatttccagacctttctgtgggctgcaccaggggttgttcagaaagaaaaaaagttgttaatgtcccaccgtttcccgtagcttccgaggtctgtgttgttcataccccaggttccaggttgttctcccmctacttccacagaatcagtgtgtctcattccggtacctataatctcat

SEQ ID NO: 140169 - DNA, 518 bp, Homo sapiens
gcatattcacttattttgtgattcttcagttacttcaggccatctgggcgtatacgtgcaagtcacrggggatgcgatggcttggcttggtctcagaggcctgacatacactcccagtcttttggtcacagggctgtgggactgaggagggaaattaaagaaaaataaaattaaaaagaaagagaaataaattttcttgtattgggctgacttgtcccagaggcttcaacaggcacagcccagaaccaggaatagtcttgataatattatctaatgtgctctggaggctctcccaacgctcccccaacatcgggaaaagaaaaacaaatttcctttttttacggaatgagtttatagattcttgttctctgtaactagtgacttcaagtattctgttttatctaagaagtacaatgtaagtcatgagaagcctgagtaggctgaactacagctgtttgggcaccatagtgagggttataggataagcccatgcccagggaaacctagaaaatggacat

SEQ ID NO: 140170 - DNA, 518 bp, Homo sapiens
gcatattcacttattttgtgattcttcagttacttcaggccatctgggcgtatacgtgcaagtcacgggggatgcsatggcttggcttggtctcagaggcctgacatacactcccagtcttttggtcacagggctgtgggactgaggagggaaattaaagaaaaataaaattaaaaagaaagagaaataaattttcttgtattgggctgacttgtcccagaggcttcaacaggcacagcccagaaccaggaatagtcttgataatattatctaatgtgctctggaggctctcccaacgctcccccaacatcgggaaaagaaaaacaaatttcctttttttacggaatgagtttatagattcttgttctctgtaactagtgacttcaagtattctgttttatctaagaagtacaatgtaagtcatgagaagcctgagtaggctgaactacagctgtttgggcaccatagtgagggttataggataagcccatgcccagggaaacctagaaaatggacat

SEQ ID NO: 140171 - DNA, 518 bp, Homo sapiens
gcatattcacttattttgtgattcttcagttacttcaggccatctgggcgtatacgtgcaagtcacgggggatgcgatggcttggcttggtctcagaggcctgacatacactcccagtcttttggtcacagggctgtgggactgaggagggaaattaaagaaaaataaaattaaaaagaaagagaaataaattttcttgtattgggctgacttgtcccagaggcttcaacaggcacagcccagaaccagkaatagtcttgataatattatctaatgtgctctggaggctctcccaacgctcccccaacatcgggaaaagaaaaacaaatttcctttttttacggaatgagtttatagattcttgttctctgtaactagtgacttcaagtattctgttttatctaagaagtacaatgtaagtcatgagaagcctgagtaggctgaactacagctgtttgggcaccatagtgagggttataggataagcccatgcccagggaaacctagaaaatggacat

SEQ ID NO: 140172 - DNA, 494 bp, Homo sapiens
acggcccgtcagtggagaaagaggcgggtctgtgtgcgtctccttcggcttgctgggagatgtattcttataaacactcccagccctttggtcaaagggctacaggactacaatcccarcatgtgccagtctcgggggcgaggtacaggcctggaagaaggggcagagtggtacacgccccacctaatatgctgggagctgtagtctgttaactgctctcagcctgtttgtcggtaggcttcagaactataatcacagcatgtaccgggacccggggtgcatagccctggagggaggggcagagcggtgtggacttcccggtgtccaaagcactgctgagttcttatgctatgccgactctttgccaaggagaatgagtacataggtggacctagaggacaggtctgcgctgagcattgaggagggtattaccctacataggcaccttacctttgcccaaatcgggcgggttgtcctcaactgattggccctat

SEQ ID NO: 140173 - DNA, 494 bp, Homo sapiens
acggcccgtcagtggagaaagaggcgggtctgtgtgcgtctccttcggcttgctgggagatgtattcttataaacactcccagccctttggtcaaagggctacaggactacaatcccaacatgtgccagtctcgggggcgaggtacaggcctggaagaaggggcmgagtggtacacgccccacctaatatgctgggagctgtagtctgttaactgctctcagcctgtttgtcggtaggcttcagaactataatcacagcatgtaccgggacccggggtgcatagccctggagggaggggcagagcggtgtggacttcccggtgtccaaagcactgctgagttcttatgctatgccgactctttgccaaggagaatgagtacataggtggacctagaggacaggtctgcgctgagcattgaggagggtattaccctacataggcaccttacctttgcccaaatcgggcgggttgtcctcaactgattggccctat

SEQ ID NO: 140174 - DNA, 494 bp, Homo sapiens
acggcccgtcagtggagaaagaggcgggtctgtgtgcgtctccttcggcttgctgggagatgtattcttataaacactcccagccctttggtcaaagggctacaggactacaatcccaacatgtgccagtctcgggggcgaggtacaggcctggaagaaggggcagagtggtacacgcccyacctaatatgctgggagctgtagtctgttaactgctctcagcctgtttgtcggtaggcttcagaactataatcacagcatgtaccgggacccggggtgcatagccctggagggaggggcagagcggtgtggacttcccggtgtccaaagcactgctgagttcttatgctatgccgactctttgccaaggagaatgagtacataggtggacctagaggacaggtctgcgctgagcattgaggagggtattaccctacataggcaccttacctttgcccaaatcgggcgggttgtcctcaactgattggccctat

SEQ ID NO: 140175 - DNA, 629 bp, Homo sapiens
acaggtgtaataatgactctcatacctcaaacctgccactaagagaaatgctgtttttcatagggaggctttggaaaaccggtaggtcttaactcttcsttttgtatgaaggacttagaggaatacaactctctcatattatataaagctcttaaatggtacaaagagtgttatcacagggatatgttgcataacctaggggaggggcccagttatatgtcacaattagcccaggggggcagggcacaggcatgagaagaatctcacctcatatgtgctggcctaagtgatacatcatcatccccactgtggacaggtcgcagtaagaacaggagagtcacatcattctaataatggtctcagatatacatcacaatgactcccctgggcagaaacaagggataaggttcacatcacctgtgggctaggcccagagatgtcactcttacttctgtgggcatgtctcaggctggagaggagaatcacattacctaagcactggatcaagaaatacttcacaatctttctcatgggcaaagcccaggtaagagaatagagccatatcaaatagttcatgggctcagagatatgttacaatgctccctgtgggcagggttcaggtaggacaa

SEQ ID NO: 140176 - DNA, 629 bp, Homo sapiens
acaggtgtaataatgactctcatacctcaaacctgccactaagagaaatgctgtttttcatagggaggctttggaaaaccggtaggtcttaactcttccttttgtatgaaggacttagaggaatacaactctctcatattatataaagctcttaaatggtacaaagagtgttatcacagggatatgttgcataacctaggggaggggcccagttatatgtcacaattagcccaggggggcagggcacaggcatgagaagaatctcacctcatatgtgctggcctaagtgatacatcatcatccccactgtggacaggtcgcagtaagaacaggagagtcacatcattctaataatggtctcagatatacatcacaatgactcccctgggcagaaacaagggataaggttcacatcacctgtgggctaggcccagagatgtcactcttacttctgtgggcatgtctcaggctggagaggagaatcacattacctaagcactggatcaagaaatacttcacaatctttctcatggscaaagcccaggtaagagaatagagccatatcaaatagttcatgggctcagagatatgttacaatgctccctgtgggcagggttcaggtaggacaa

SEQ ID NO: 140177 - DNA, 629 bp, Homo sapiens
acaggtgtaataatgactctcatacctcaaacctgccactaagagaaatgctgtttttcatagggaggctttggaaaaccggtaggtcttaactcttccttttgtatgaaggacttagaggaatacaactctctcatattatataaagctcttaaatggtacaaagagtgttatcacagggatatgttgcataacctaggggaggggcccagttatatgtcacaattagcccaggggggcagggcacaggcatgagaagaatctcacctcatatgtgctggcctaagtgatacatcatcatccccactgtggacaggtcgcagtaagaacaggagagtcacatcattctaataatggtctcagatatacatcacaatgactcccctgggcagaaacaagggataaggttcacatcacctgtgggctaggcccagagatgtcactcttacttctgtgggcatgtctcaggctggagaggagaatcacattacctaagcactggatcaagaaatacttcacaatctttctcatgggsaaagcccaggtaagagaatagagccatatcaaatagttcatgggctcagagatatgttacaatgctccctgtgggcagggttcaggtaggacaa

SEQ ID NO: 140178 - DNA, 604 bp, Homo sapiens
gttgctcagcttgttttgcttgttgaaaagccaggctgtctttctctctccagtgatattcatagtgttttctagtgactgcatgcagaggttgtaatatgttacccaagtggggaatatgatgtctccagaatccaaacaagccaatacaattttggacctccttttcagtggtagggctgcaaattctagtattttagcgttagcctttggtaaaatggactgtttccctgcagtccataggatgccaaggaactttacactttgtgcaggccattgaattttattagagttaacttcccatccttgagataggatttgggtttttaccctcttctgccctgaaaactgactagttattcagttttaccctgactgggcaactcggacagctgctttttcagcaataggctgatagctttgagcctgatcagtcaagacaggcctggcatggtaccagggtcagtctggaagtcagattaaaattttccttttccagcttacatttctcttgtaacaaccagtccctayattgacactttaacttataagaagtaagcaagcatcatcaatgctgggaaattccctcagcattacaattacc

SEQ ID NO: 140179 - DNA, 402 bp, Homo sapiens
aagcttgctgtacgaggcaaccaggtctggcttatattcaccacatcccttcttctttcccagaacagcaattgggctcaagagaaaacgtccaacttttagtatatccctcagtrtagaatgagaacagtggaacatatgttcaaaggtttggctttgtgggctaccgctgatgactagattctgtctccccaaacagggaatgctaaaggaaatggcagagtaatgagaatgataacttatgactgctgagaagagaagttacatgcttaccacagcctcagagaaacaaacactacaatcaactgcggaagcaaaggaccacagtgtctggaaaacaatgggaaaaaatatctttaccttaaaaatccacacacaagcccagagaagacacattgaaga

SEQ ID NO: 140180 - DNA, 402 bp, Homo sapiens
aagcttgctgtacgaggcaaccaggtctggcttatattcaccacatcccttcttctttcccagaacagcaattgggctcaagagaaaacgtccaacttttagtatatccctcagtatagaatgagaacagtggaacatatgttsaaaggtttggctttgtgggctaccgctgatgactagattctgtctccccaaacagggaatgctaaaggaaatggcagagtaatgagaatgataacttatgactgctgagaagagaagttacatgcttaccacagcctcagagaaacaaacactacaatcaactgcggaagcaaaggaccacagtgtctggaaaacaatgggaaaaaatatctttaccttaaaaatccacacacaagcccagagaagacacattgaaga

SEQ ID NO: 140181 - DNA, 384 bp, Homo sapiens
cacagcttgatgggaggtaggcccactccaccatcagtrgtgctgggttgccctgatctgcaccttccagatacttgctgagatatctgcatgcttctctaagggactgggtcacgagacacccctggcaaggaccagctggcagaacaggctggacactctccttcagcctccccagcagccctacctgtgctgtcatctgtgctgatgatctccgtggtaagattatgggaaacttttacagcaagttttcctttctcacttccctatcttaataacagcactgataacttttaagccctagaaagctggaactgcaagacacatgatcttctgccttagaaggtccatgtttgggcagtgtgtgcccaggtgagagcccca

SEQ ID NO: 140182 - DNA, 384 bp, Homo sapiens
cacagcttgatgggaggtaggcccactccaccatcagtagtgctgggttgccctgatctgcaccttccagatacttgctragatatctgcatgcttctctaagggactgggtcacgagacacccctggcaaggaccagctggcagaacaggctggacactctccttcagcctccccagcagccctacctgtgctgtcatctgtgctgatgatctccgtggtaagattatgggaaacttttacagcaagttttcctttctcacttccctatcttaataacagcactgataacttttaagccctagaaagctggaactgcaagacacatgatcttctgccttagaaggtccatgtttgggcagtgtgtgcccaggtgagagcccca

SEQ ID NO: 140183 - DNA, 384 bp, Homo sapiens
cacagcttgatgggaggtaggcccactccaccatcagtagtgctgggttgccctgatctgcaccttccagatacttgctgagatatctgcatgcttctctaagggactgggtcacgagacacccctggcaaggaccagctggcagaacaggctggacactctccytcagcctccccagcagccctacctgtgctgtcatctgtgctgatgatctccgtggtaagattatgggaaacttttacagcaagttttcctttctcacttccctatcttaataacagcactgataacttttaagccctagaaagctggaactgcaagacacatgatcttctgccttagaaggtccatgtttgggcagtgtgtgcccaggtgagagcccca

SEQ ID NO: 140184 - DNA, 384 bp, Homo sapiens
cacagcttgatgggaggtaggcccactccaccatcagtagtgctgggttgccctgatctgcaccttccagatacttgctgagatatctgcatgcttctctaagggactgggtcacgagacacccctggcaaggaccagctggcagaacaggctggacactctccttcagcctcyccagcagccctacctgtgctgtcatctgtgctgatgatctccgtggtaagattatgggaaacttttacagcaagttttcctttctcacttccctatcttaataacagcactgataacttttaagccctagaaagctggaactgcaagacacatgatcttctgccttagaaggtccatgtttgggcagtgtgtgcccaggtgagagcccca

SEQ ID NO: 140185 - DNA, 397 bp, Homo sapiens
ttcagcaattcttctgtctcagcctcctgagtagctggggctacaggcttgggccaccattccccgctaatttttttgtaagtttagtagagacggattttcaccaggttcgccaggctggttttgaactcctgacctcaaataatccacctgcctcatcctcccaaagtgttgaaattacaggtgcgaggcaccasagctgacctgtaaagacctcttaaaaattagttaaaaaacaaacaaaacagaaaaggagaaagaagaaacatccactcattaaaaaaaaaaaagaaaaagaaaagaaaagaaaaaaaggcaaaagacattattttacaggtctagtgccctgtgcccctcactgtaatgggggtggatatgggcttcacaggacatgaaa

SEQ ID NO: 140186 - DNA, 463 bp, Homo sapiens
gcactgtttcatcctgtagccctggaaagaaaacctggctgtgccgtgctttatgtttgcctgcactggccctgttcagaggcctgagcacgcatggacacctaagtctgcccaaactttccccatcccaatattctctgtggtattgagcatgacaccctgtcttcactgagcatgtgctcatacagttttgtagccaactcttcattttacaacaggaagactgagacctcccaaaaaggcaaagactggtccagatcccagaaattgggcagagcacagagtattagggagggatccagcttcctaggccttgcatgcaccccacccatcaggtttgctttggaaatgagagcccatgagtcctggaaaaccctgtgctctactttctacctgggctttctactcttcaatgttgtcacataggcrtgcaggcatgcacacacaaacacatcacacacac

SEQ ID NO: 140187 - DNA, 405 bp, Homo sapiens
gaaggtagcacacatgtaaacctcacacatatgagcaaatagctatttgcmtaccaatattcattgcagcattattcacaaaggccaataggtgaaagcaacacaaactttcctcatagaatgaataaataaatataatttgtaatacaaaagtaatggaatattactcagcttttaaaggcagaaaatcttgtaccatccacaataaagagaaatcttgagaacatgatgctaagtaaaattagtcacaataaaacagatactctatgattctacttatatgtaatatctaaagtattgaaacttagaaacagaaaatagaatgatttttatcaggagccaggttgtaaggaaaatgggtagttgtcatttcatgtgtcctgagtttcagttttgcaaaagaaa

SEQ ID NO: 140188 - DNA, 612 bp, Homo sapiens
tctgtcaaaaaataaataaataagtaaagacacctgaagagagagagttacaaagtttttgaaaaattatcttcaaatcgcataagtctttctttcacactaggataatataaacaatagatgttgaaattaagacaatttccatgattactcacttagacagaatcaattattgtccatcaaacaagaagaaaataacacaagtcataaacaaaataggggcaatatttatacaagcaaacaaacaattaaatcattatattaacaaaagaccatagggatgsttcatattttttgcctcacactgtcttaagctgtacagatttgaatattgtcatagaaaattatattatataaattcaaactaaaaacaataaactgatgtaaggtgccctaccctaaaacacgaaacacagaaatgcaaaattgcaaaacaaacttaaaagaaaccttccccgaattcttacttgaataatgtaattcaaaatcataataaataggtagaaagtaaaaacacaattaactgctgtgagacagcctactctaaaaaatacagaaacataaattctaaaacataattaagagaaactttgatctataaaatcctgaata

SEQ ID NO: 140189 - DNA, 612 bp, Homo sapiens
tctgtcaaaaaataaataaataagtaaagacacctgaagagagagagttacaaagtttttgaaaaattatcttcaaatcgcataagtctttctttcacactaggataatataaacaatagatgttgaaattaagacaatttccatgattactcacttagacagaatcaattattgtccatcaaacaagaagaaaataacacaagtcataaacaaaataggggcaatatttatacaagcaaacaaacaattaaatcattatattaacaaaagaccatagggatggttcatattttttgcctcacactgtcttaagctgtacagatttgaatattgtcatagaaaattatattatataaattcaaactaaaaacaataaactgatgtaaggtgccctaccctaaaacaygaaacacagaaatgcaaaattgcaaaacaaacttaaaagaaaccttccccgaattcttacttgaataatgtaattcaaaatcataataaataggtagaaagtaaaaacacaattaactgctgtgagacagcctactctaaaaaatacagaaacataaattctaaaacataattaagagaaactttgatctataaaatcctgaata

SEQ ID NO: 140190 - DNA, 497 bp, Homo sapiens
ggcaacaacatttcaaagaaaccatattataattattaaaaagagatgtgatgagaaagttttaaggaataaaaatttaagtaatactagagaaagttttaaattatgctactgatgcattgcttctttccttacacaaaagggtaaggctgtaatctagcctttaatagaaaggtcttacatttttacatatggtaacaatataaatattgtaaatacagtataaaacattgacagataaaataaaaactggaaataaattgtactattagtcaaataaaagttgggaaaactggaagaaaatgctaatagtaatattgtgcctagagtcaattaaacatacaagccaaatattttaataattaattatataattgatacataacatatacatttgagcatgctgttttacaacttctcaaactgaaattacagaaaaatgtgacaacatgatmattcagaaagtgaaaacacagtcatagtaatcttcatattaa

SEQ ID NO: 140191 - DNA, 496 bp, Homo sapiens
gaattcaatatatgttgaacaatattctaatttcccttacggaaaaagtttttgtaagaaatctgtaaaatgagtacttacaataaaccatcctacagtagaggctgttggcatacagtgtttaaatttctatgattaggtcctactaaagaaaagaaaattttaaaataaaataattagattttcctatttaataagataatttttgcctataaagtttttcagtctaatttttttgtagaattaggttttagccttcataaaacttgacattatgaagcagaaaacaggtgtcatctgtctctgttgttcctggaatttctaacccaaatgccaattcctccacaactcccctcacacacttctgaattgaagcacaacagatttattaaaaatggcataacagcggtstccagaaatgtgcagagattttcccagatccccaaaagcaatgacaaactattcagatcatttaggttctcacaagattctggga

SEQ ID NO: 140192 - DNA, 496 bp, Homo sapiens
gaattcaatatatgttgaacaatattctaatttcccttacggaaaaagtttttgtaagaaatctgtaaaatgagtacttacaataaaccatcctacagtagaggctgttggcatacagtgtttaaatttctatgattaggtcctactaaagaaaagaaaattttaaaataaaataattagattttcctatttaataagataatttttgcctataaagtttttcagtctaatttttttgtagaattaggttttagccttcataaaacttgacattatgaagcagaaaacaggtgtcatctgtctctgttgttcctggaatttctaacccaaatgccaattcctccacaactcccctcacacacttctgaattgaagcacaacagatttattaaaaatggcataacagcggtgtccagaaatgtgcagagattttcccagatcccyaaaagcaatgacaaactattcagatcatttaggttctcacaagattctggga

SEQ ID NO: 140193 - DNA, 563 bp, Homo sapiens
tttcaacttttccttattcagtataaagttagcrttgctttttcataaatggcctttattgagttaaggcacataccttctattcctaacttgttgagagttttcatcataatcaaggctgaatttcatccaattcttcttctgcatatgcaaaagctacaaaaatgaaaatacttaatgtgatggctaatacagggtgtcaaattgattggattggaggatagaaagcattgatcctgggtgtgtctgtgagggtgttgccaaaggacattaacatttgagtcagtgggctgggaaagggagatccactcttaattgggtgagcaccatctaatgagctgacagtgaatataaagcaggcagaaaaacgtgaaaaagagagactggcctaagctcccagactacatctttctcctgtgctggacacttgcagccctcaaacatcagactccaagttcttcagctttgggacatggaccgcctctccttgctcctcaaacttgcagacaaccaacctattgtgggatctcatgatctctctagggaagcccaactaatacacc

SEQ ID NO: 140194 - DNA, 564 bp, Homo sapiens
tttcaacttttccttattcagtataaagttagcattgctttttcataaatggcctttattgagttaaggcacataccttctattcctaacttgttgagagttttcatcataatsaaggctgaatttcatccaattcttcttctgcatatgcaaaagctacaaaaatgaaaatacttaatgtgatggctaatacagggtgtcaaattgattggattggaggatagaaagcattgatcctgggtgtgtctgtgagggtgttgccaaaggacattaacatttgagtcagtgggctgggaaagggagatccactcttaattgggtgagcaccatctaatgagctgacagtgaatataaagcaggcagaaaaacgtgaaaaagagagactggcctaagctcccagactacatctttctcctgtgctggacacttgcagccctcaaacatcagactccaagttcttcagctttgggacatggaccgcctctccttgctcctcaaacttgcagacaaccaacctattgtgggatctcatgatctctctagggaagcccaactaatacacct

SEQ ID NO: 140195 - DNA, 548 bp, Homo sapiens
cctcatttttgaaatctcaggctgcctgctctaaaacctggatgtgccaggaagtaaaaaatctgaaattttaaaataattgtcattatattgcttccatgtatgaataacacatatatatttttcataaatacaaataatcttacacacaaatgaaaatgcaagtattttacaggcagggccagtgtccagtgcatgaaggaagccctgccagaaaaggatccaggaaaaacctataattcttgctttattcaatccagtgtcaaatcacatatgtcactcatggcctgagggggcttggtggggaattgaactatatccagtcacgggtgctggagtggaaattatctaatcaggtgcacagctggagaagaatggrcagctttttggatctagggatgcctttgcctgtctctccactcagaggtcagtacactagagccacctcaatgcaattgcctgttttttagttgttttaatgctccaaaaaagaattcattttctcatgcattttccaaatgtgtggcaagaagagcctcaaatctacc

SEQ ID NO: 140196 - DNA, 548 bp, Homo sapiens
cctcatttttgaaatctcaggctgcctgctctaaaacctggatgtgccaggaagtaaaaaatctgaaattttaaaataattgtcattatattgcttccatgtatgaataacacatatatatttttcataaatacaaataatcttacacacaaatgaaaatgcaagtattttacaggcagggccagtgtccagtgcatgaaggaagccctgccagaaaaggatccaggaaaaacctataattcttgctttattcaatccagtgtcaaatcacatatgtcactcatggcctgagggggcttggtggggaattgaactatatccagtcacgggtgctggagtggaaattatctaatcaggtgcacagctggagaagaatgggcagctttttggatctagggatgcctttgcctgtctctccactcagaggtcagtacactagagccacctcaatgcaatygcctgttttttagttgttttaatgctccaaaaaagaattcattttctcatgcattttccaaatgtgtggcaagaagagcctcaaatctacc

SEQ ID NO: 140197 - DNA, 568 bp, Homo sapiens
aaagctttcaacttttccttattcagtataaagttagcattgctttttcataaatggcctttattgagttaaggcacataccttctattcctaacttgttgagagttttcatcataatcaaggctgaatttcatccaattcttcttctgcatatgcaaaagctacaaaaatgaaaatacttaaygtgatggctaatacagggtgtcaaattgattggattggaggatagaaagcattgatcctgggtgtgtctgtgagggtgttgccaaaggacattaacatttgagtcagtgggctgggaaagggagatccactcttaattgggtgagcaccatctaatgagctgacagtgaatataaagcaggcagaaaaacgtgaaaaagagagactggcctaagctcccagactacatctttctcctgtgctggacacttgcagccctcaaacatcagactccaagttcttcagctttgggacatggaccgcctctccttgctcctcaaacttgcagacaaccaacctattgtgggatctcatgatctctctagggaagcccaactaatacacc

SEQ ID NO: 140198 - DNA, 568 bp, Homo sapiens
aaagctttcaacttttccttattcagtataaagttagcattgctttttcataaatggcctttattgagttaaggcacataccttctattcctaacttgttgagagttttcatcataatcaaggctgaatttcatccaattcttcttctgcatatgcaaaagctacaaaaatgaaaatacttaatgtgatggctaatacagggtstcaaattgattggattggaggatagaaagcattgatcctgggtgtgtctgtgagggtgttgccaaaggacattaacatttgagtcagtgggctgggaaagggagatccactcttaattgggtgagcaccatctaatgagctgacagtgaatataaagcaggcagaaaaacgtgaaaaagagagactggcctaagctcccagactacatctttctcctgtgctggacacttgcagccctcaaacatcagactccaagttcttcagctttgggacatggaccgcctctccttgctcctcaaacttgcagacaaccaacctattgtgggatctcatgatctctctagggaagcccaactaatacacc

SEQ ID NO: 140199 - DNA, 564 bp, Homo sapiens
tttcaacttttccttattcagtataaagttagcattgctttttcataaatggcctttattgagttaaggcacataccttctattcctaacttgttgagagttttcatcataatcaaggctgaatttcatccaattcttcttctgcatatgcaaaagctacaaaaatgaaaatacttaatgtgatggctaatacagggtgtcaaattgattggattggaggataraaagcattgatcctgggtgtgtctgtgagggtgttgccaaaggacattaacatttgagtcagtgggctgggaaagggagatccactcttaattgggtgagcaccatctaatgagctgacagtgaatataaagcaggcagaaaaacgtgaaaaagagagactggcctaagctcccagactacatctttctcctgtgctggacacttgcagccctcaaacatcagactccaagttcttcagctttgggacatggaccgcctctccttgctcctcaaacttgcagacaaccaacctattgtgggatctcatgatctctctagggaagcccaactaatacacct

SEQ ID NO: 140200 - DNA, 581 bp, Homo sapiens
ttttccttattcagtataaagttagcattgctttttcataaatggcctttattgagttaaggcacataccttctattcctaacttgttgagagttttcatcataatcaaggctgaatttcatccaattcttcttctgcatatgcaaaagctacaaaaatgaaaatacttaatgtgatggctaatacagggtgtcaaattgattggattggaggatagaaagcattgatcctgggtgtgtctgtgagggtgttgccaaaggasattaacatttgagtcagtgggctgggaaagggagatccactcttaattgggtgagcaccatctaatgagctgacagtgaatataaagcaggcagaaaaacgtgaaaaagagagactggcctaagctcccagactacatctttctcctgtgctggacacttgcagccctcaaacatcagactccaagttcttcagctttgggacatggaccgcctctccttgctcctcaaacttgcagacaaccaacctattgtgggatctcatgatctctctagggaagcccaactaatacacctagcaacaaacttaactaaaaaggt

SEQ ID NO: 140201 - DNA, 590 bp, Homo sapiens
ttttccttattcagtataaagttagcattgctttttcataaatggcctttattgagttaaggcacataccttctattcctaacttgttgagagttttcatcataatcaaggctgaatttcatccaattcttcttctgcatatgcaaaagctacaaaaatgaaaatacttaatgtgatggctaatacagggtgtcaaattgattggattggaggatagaaagcattgatcctgggtgtgtctgtgagggtgttgccaaaggacattaacatttgagtcagtgggctgggaaagggagatccactcttaattgggtgagcaccatctaatgagctgacagtgaatataaagcaggcagaaaaacgtgaaaaagagagactggcctaagctcccagamtacatctttctcctgtgctggacacttgcagccctcaaacatcagactccaagttcttcagctttgggacatggaccgcctctccttgctcctcaaacttgcagacaaccaacctattgtgggatctcatgatctctctagggaagcccaactaatacacctagcaacaaacttaactaaaaaggtaaaagatct

SEQ ID NO: 140202 - DNA, 527 bp, Homo sapiens
attgctttttcataaatggcctttattgagttaaggcacataccttctattcctaacttgttgagagttttcatcataatcaaggctgaatttcatccaattcttcttctgcatatgcaaaagctacaaaaatgaaaatacttaatgtgatggctaatacagggtgtcaaattgattggattggaggatagaaagcattgatcctgggtgtgtctgtgagggtgttgccaaaggacattaacatttgagtcagtgggctgggaaagggagatccactcttaattgggtgagcaccatctaatgagctgacagtgaatataaagcaggcagaaaaacgtgaaaaagagagactggcctaagctcccagactacatctttctcctgtgctggacacttgcagycctcaaacatcagactccaagttcttcagctttgggacatggaccgcctctccttgctcctcaaacttgcagacaaccaacctattgtgggatctcatgatctctctagggaagcccaactaatac

SEQ ID NO: 140203 - DNA, 563 bp, Homo sapiens
tttcaacttttccttattcagtataaagttagcattgctttttcataaatggcctttattgagttaaggcacataccttctattcctaacttgttgagagttttcatcataatcaaggctgaatttcatccaattcttcttctgcatatgcaaaagctacaaaaatgaaaatacttaatgtgatggctaatacagggtgtcaaattgattggattggaggatagaaagcattgatcctgggtgtgtctgtgagggtgttgccaaaggacattaacatttgagtcagtgggctgggaaagggagatccactcttaattgggtgagcaccatctaatgagctgacagtgaatataaagcaggcagaaaaacgtgaaaaagagagactggcctaagctcccagactacatctttctcctgtgctggacacttgcagccctcaaacatcagactccaagttcttcagctttgggacatggaccgcctctycttgctcctcaaacttgcagacaaccaacctattgtgggatctcatgatctctctagggaagcccaactaatacacc

SEQ ID NO: 140204 - DNA, 586 bp, Homo sapiens
ttttccttattcagtataaagttagcattgctttttcataaatggcctttattgagttaaggcacataccttctattcctaacttgttgagagttttcatcataatcaaggctgaatttcatccaattcttcttctgcatatgcaaaagctacaaaaatgaaaatacttaatgtgatggctaatacagggtgtcaaattgattggattggaggatagaaagcattgatcctgggtgtgtctgtgagggtgttgccaaaggacattaacatttgagtcagtgggctgggaaagggagatccactcttaattgggtgagcaccatctaatgagctgacagtgaatataaagcaggcagaaaaacgtgaaaaagagagactggcctaagctcccagactacatctttctcctgtgctggacacttgcagccctcaaacatcagactccaagttcttcagctttgggacatggaccgcctctccttgctcctcaaacttgcagacaaccaacctattgtgggatctcatgatctctctagggaagcccaactaatayacctagcaacaaacttaactaaaaaggtaaaag

SEQ ID NO: 140205 - DNA, 420 bp, Homo sapiens
aatgaggtcagctgagaagacaatgacagttgaagcagaacctgagatcctgtttctctccattgacatatgaacttaactacaattgggtgaacaaagccagttgagtttgtagcaccccacatgagaaaaaagccaaccataaccacatttwgaagaaaatttggtcacatttgtgcactacagaacagcgcagttagataaaaatctgtccattccatgattctcctttgggaaagaaaaaagagtgaaatgcgtatgcaaacttctgacttactgagttataccggggttatctaaagactggaaattgcttcctttaacatttagtgttgatgagaatagagactgagtttaaatgacagcttgggtcaactgagaataaagataaatgcttcttacaacaacagagactgtagt

SEQ ID NO: 140206 - DNA, 600 bp, Homo sapiens
gataccattaagatggccaatatactcataatgggaattctaaaataaaaagagaaaagagagcagcaaaattatttcaagaaacaaacagtgacagagaactcagaatttgagggagaaaatgacctaaaatttaatgaaactttaccaactctaactagtaacaacacagggagacccatgacaagacacattataatcagagattcaaaagttaaaacaccgagaatcttgaagtcagcaagaaaaaagtgacttagcatgtacaagtttacccctgcaggatgaccagcagatgtctcagcaaaaaaacttacaggtaagaggttgtaggatgacatactcaaagtgctgaaaaaatggcaastaccagccaagaacactatgtctgccaaaactatcatttcaaatgaattaaaaaataaaaataaagaatattcaagatcaacaaaaactgtataaatttatacccactaggcctgtcttaaaaaatgctaaatagtcattcacattaaaaaatgaaataatgatgagagcaacacaaaattatgtaaaatatgacattttctaatagagaaaattatgtacacaatcataata

SEQ ID NO: 140207 - DNA, 467 bp, Homo sapiens
gcctttatgagctgtaacactcactgtgaaggtccacaacttcactcctgaagccagcgagaccacraacccacctggaggaatgaacaactccagatgtgccaccttaagagctgtaacactcaccgcgaacgtctgcagcttcactcctgagccagcgagaccacgagcccaccagagggaagaaactctcaacacatccgaatgtcagaaggaacaaactccagacatgccacctttaagaactgtaacactcaccgtgagggtctgtggcttcattcttgaagtcagtgagaacaagaacccaccaattccagacacattgtgatgggtgtgctggaccagtgtgaggtgttctggggttgcctagcccatgagtcacgtttgttccaccagggctgctatgtcaatgacctcagccatctggggagggacctgaggaaaactctcatcctggacaactcgcc

SEQ ID NO: 140208 - DNA, 524 bp, Homo sapiens
ttaggtatgcttttctctgaaaggggattatctcttccagattgcctccaagataaggatgaaatgtttgggggatctaggaatctatttcacaaatttggaatttcgtgctaataattcctgggtgaaatgtctttctttcccatacctgcaattctagaccagcctggcttttgtatcctctgagttgcatcccagcctagcagcagttatgggactccaacttagttctggttaagttttatgtaaatattcttgtatctgttttacctggctctactacacaaaatgtctagaaaaaagtaaagggcgactagaataaaggtgagattatagatatcggaatgagacacactgattctgtggagatagagggagaacaacaacctgraacgtgggaaatgaacaacttagacctcggaagctacggggaatggtgggacattaacaactttttttctttctgaataacccctggtgcagcccacaaaagagtctggaaatactattagaacagacggtaa

SEQ ID NO: 140209 - DNA, 367 bp, Homo sapiens
cataactgtgaaaaatacatttctgttgtttatcctttacccagtctgaggtattttgttatagcagcctggatgcactatgacactttcttaggmactttggtctatttctgaatttttagtttcagtgacatatgagtttttaatcaatcaagatttttcacagagcttgccagtcttgttttttgcttttttttcagagttttcttgtctattcttatgtgtgttttcatctatataatattttatagtaacgtgtacttccaatatttaatggtatctgtataggaacaaaattgaatttataaataaacttaaggacaattgatgttgataatattgagatttgctgcctaagaatatgata

SEQ ID NO: 140210 - DNA, 479 bp, Homo sapiens
tgagtcagaagtgaaaacggttctccaactcacacatgcagtaaaaacaaatttcacgtggatataatgagtaattatttaaaatttaaaataccctgaaaacattaacgtttatctcattactatgtaatatggaaattacaagacaaaaaaacccaaagacttatttttaaaatagaaatggagctttttatatgatgaaatggtccataatttaaatgtaaaaagtgaataggaaatayatgaaataaaataaaattatttgtaaaagtgacaatgcccgtattagatttaacaatatcttacaatgaaataagttgaaacctacaaaatagaagaaagtttaaaattaggcaaatattatgagccaggtgaagaataaatacatatatcaataagcatttaatgtattttgtcttagattttatatgaaataataaaaagtaagcaaaccaatagcaaggtaatttcaccctgat

SEQ ID NO: 140211 - DNA, 604 bp, Homo sapiens
gtgaggaagaatagctgcggatgctgggcttggtacctgggtgatgagatgatctgtgcagtaaaccacagtggtacgcatttatgtatgtaagagacctgcatactctgcacatggacccctaaacttaaaataaaagttgaaaaataaactttatcacatatggacccctgaacttaaaataaaacttgaaaaaaaatgtgtttctggtggattctctatgttagacccaaactgaggatcttgaagctctcgctgggggaatcggggatgggggcacactggggagccgctgccaaggccaaccaccctccctacaagccacctcccttcccggccagtatggaaaggagaaggggtatgtgaacagctgtggaggtcagaatctcgggaactgaatcaggccccagcccatgccccccagcccagccctcaggattgttagatggaacaaggctccatcatcacccaggcatggagggaagatgccctggtccttaccaarcaaggcctggtttccaaagtcctctccgaagaggcctcatgtttgccacatcttaaaagtcccctttctgctgttcttgcacccagcatgttggacagt

SEQ ID NO: 140212 - DNA, 561 bp, Homo sapiens
cacatttgggtagtcagaagcaggagagtctcatcacctgggtctgtgtcagggacatgttgcagtcttccctgaggacagggacaaggcaagagagtcacatccctaagagttctgccagggatatgttcttgttcyctcctgaaagcacgacacatgcagcagagtcacctcacctgggttctgggcccagtgatatgtcacaattttccctgtgaactaagcacaggcaggtgaaacacatcacctgtttgctgggcccagaagtatgctacaatttttcttgtgagcagggttcaggcagaaatgggggggatcatattttctaggtgataaatgcagagctatgtcacaaggccctcagtagtcagggtcttggcagaaacttcctattgactaggtgattggcccagtgatacatcacaatagctaaattatgtggggcccaaggcaaagagaagagttgcatcacctaagtgatgaacaaaaagatacttcatagtacccatggggaaatggcccatgcaggtgagtcacattacctacgtgttggacccagtg

SEQ ID NO: 140213 - DNA, 561 bp, Homo sapiens
cacatttgggtagtcagaagcaggagagtctcatcacctgggtctgtgtcagggacatgttgcagtcttccctgaggacagggacaaggcaagagagtcacatccctaagagttctgccagggatatgttcttgttctctcctgaaagcacgacacatgcagcagagtcacctcacctgggttctgggcccagtgatatgtcacaattttccctgtgaactaagcacaggcaggtgaaacacatcacctgtttgctgggcccagaartatgctacaatttttcttgtgagcagggttcaggcagaaatgggggggatcatattttctaggtgataaatgcagagctatgtcacaaggccctcagtagtcagggtcttggcagaaacttcctattgactaggtgattggcccagtgatacatcacaatagctaaattatgtggggcccaaggcaaagagaagagttgcatcacctaagtgatgaacaaaaagatacttcatagtacccatggggaaatggcccatgcaggtgagtcacattacctacgtgttggacccagtg

SEQ ID NO: 140214 - DNA, 561 bp, Homo sapiens
cacatttgggtagtcagaagcaggagagtctcatcacctgggtctgtgtcagggacatgttgcagtcttccctgaggacagggacaaggcaagagagtcacatccctaagagttctgccagggatatgttcttgttctctcctgaaagcacgacacatgcagcagagtcacctcacctgggttctgggcccagtgatatgtcacaattttccctgtgaactaagcacaggcaggtgaaacacatcacctgtttgctgggcccagaagtatgctacaatttttcttktgagcagggttcaggcagaaatgggggggatcatattttctaggtgataaatgcagagctatgtcacaaggccctcagtagtcagggtcttggcagaaacttcctattgactaggtgattggcccagtgatacatcacaatagctaaattatgtggggcccaaggcaaagagaagagttgcatcacctaagtgatgaacaaaaagatacttcatagtacccatggggaaatggcccatgcaggtgagtcacattacctacgtgttggacccagtg

SEQ ID NO: 140215 - DNA, 561 bp, Homo sapiens
cacatttgggtagtcagaagcaggagagtctcatcacctgggtctgtgtcagggacatgttgcagtcttccctgaggacagggacaaggcaagagagtcacatccctaagagttctgccagggatatgttcttgttctctcctgaaagcacgacacatgcagcagagtcacctcacctgggttctgggcccagtgatatgtcacaattttccctgtgaactaagcacaggcaggtgaaacacatcacctgtttgctgggcccagaagtatgctacaatttttcttgtgagcagggttcaggcagaaatgggggggatcatattttctaggtgataaatgcagagctatgtcacaaggccctcagtagtcagggtcttggcagaaacttcctattgactaggtgattggcccagtgatacatcacaatagctaaattatgtggggcccaaggcaaagagaagagttgcatcacctaagtgatgaacaaaaagatacttcatagtacccatggkgaaatggcccatgcaggtgagtcacattacctacgtgttggacccagtg

SEQ ID NO: 140216 - DNA, 426 bp, Homo sapiens
tttgtgcagctgagttggcagcagtcattgggtccatttatggatggtaaagttgaatggtggtcaaagttagagactggaaggcttcagtaaacgcgctgaagttgtctgagagccatcagagctgttgcttacattggattagatcatttaytgggaagagaagaagcactctgatggtcctctctccatttgagactttctgtaagcggatcaaattctctggccctgcatggtgtgaagctccactgtgagtaactgcagctggactggtctctattgtaactggcaaaggctgatagaggagcataaggaggagatgaaacaagcttagattctacagaagactctgatagtgtggggacgctggggattctaaagcaggtgtaggcctctgagggcccctatctggagctggtattaggc

SEQ ID NO: 140217 - DNA, 426 bp, Homo sapiens
tttgtgcagctgagttggcagcagtcattgggtccatttatggatggtaaagttgaatggtggtcaaagttagagactggaaggcttcagtaaacgcgctgaagttgtctgagagccatcagagctgttgcttacattggattagatcatttactgggaagagaasaagcactctgatggtcctctctccatttgagactttctgtaagcggatcaaattctctggccctgcatggtgtgaagctccactgtgagtaactgcagctggactggtctctattgtaactggcaaaggctgatagaggagcataaggaggagatgaaacaagcttagattctacagaagactctgatagtgtggggacgctggggattctaaagcaggtgtaggcctctgagggcccctatctggagctggtattaggc

SEQ ID NO: 140218 - DNA, 475 bp, Homo sapiens
ataattctatgttgctctcatcattattttattttttaatgtcaatgactagcatttttttatacaggcctacygtgcataaattaatacagttttcgttgatcttgaatattctttatttttattttttaattcatttgaaatgatagctttggcagacatagtgttcttggttggtacttgccatttttttcagcactttgagtatgtcatcctacaacctcttgcctgcatgctattggctgagacatctgctggtcatcctataggggtaacattgtacatgctaagtcattttttcttgctgacttcaagattctcggtgttttaacatttgaatctctgattaaaatgtgtcttgtcatgggtctccctgtgttgctactagttggtaaagtttcattaaattttaggccattttctccctcaaattttgagagttctcagccactgtttgtttcttgaaataactttg

SEQ ID NO: 140219 - DNA, 475 bp, Homo sapiens
ataattctatgttgctctcatcattattttattttttaatgtcaatgactagcatttttttatacaggcctaccgtgyataaattaatacagttttcgttgatcttgaatattctttatttttattttttaattcatttgaaatgatagctttggcagacatagtgttcttggttggtacttgccatttttttcagcactttgagtatgtcatcctacaacctcttgcctgcatgctattggctgagacatctgctggtcatcctataggggtaacattgtacatgctaagtcattttttcttgctgacttcaagattctcggtgttttaacatttgaatctctgattaaaatgtgtcttgtcatgggtctccctgtgttgctactagttggtaaagtttcattaaattttaggccattttctccctcaaattttgagagttctcagccactgtttgtttcttgaaataactttg

SEQ ID NO: 140220 - DNA, 475 bp, Homo sapiens
ataattctatgttgctctcatcattattttattttttaatgtcaatgactagcatttttttatacaggcctaccgtgcataaattaatacagttttcgttgatcttgaatatwctttatttttattttttaattcatttgaaatgatagctttggcagacatagtgttcttggttggtacttgccatttttttcagcactttgagtatgtcatcctacaacctcttgcctgcatgctattggctgagacatctgctggtcatcctataggggtaacattgtacatgctaagtcattttttcttgctgacttcaagattctcggtgttttaacatttgaatctctgattaaaatgtgtcttgtcatgggtctccctgtgttgctactagttggtaaagtttcattaaattttaggccattttctccctcaaattttgagagttctcagccactgtttgtttcttgaaataactttg

SEQ ID NO: 140221 - DNA, 475 bp, Homo sapiens
ataattctatgttgctctcatcattattttattttttaatgtcaatgactagcatttttttatacaggcctaccgtgcataaattaatacagttttcgttgatcttgaatattctttatttttattttttaattcatttgaaatgatagctttggcagacatagtgttcttggttggtacttgccatttttttcagcactttgagtatgtcatcctacaacctcttgcctgcatgctattggctgagacatctgctggtcatcctataggggtaacattgtacatgctaagtcattttttcttgctgacttcaagattctcggtgttttaacwtttgaatctctgattaaaatgtgtcttgtcatgggtctccctgtgttgctactagttggtaaagtttcattaaattttaggccattttctccctcaaattttgagagttctcagccactgtttgtttcttgaaataactttg

SEQ ID NO: 140222 - DNA, 601 bp, Homo sapiens
ctgtgccagtcatggacatatttatctatgttatctactagaaatattgttttcagctttgaccttaaaatttaaaatccacttttcattggaatttgttaataatataagataggagtgttttttctcacataaataactggttgactsaaggctatttaccgagaagactgtcttcactcctcttctgtgccttttttgtaatatacagaatgtccaaatgtgtgagtctgagttggactctcgagtttttctagttttctttgtgcctatttttgcattactaccatagatagcttttattactatagctttaatctaagtctgaatatatgtcattttaagctcacaaactttgttattcttcaggacagtttttacatttcttcgattttttatatgtatttaaattttttaaactgattagacagtttccacaagatttctgccaaaatattgtattgtgaaaatggaaatctatgaatcaatttagggagaagttacatagaaacaaagcaaaacaaaacactaataacatccaaaacaaacttaaagagaacaccacaataagaaaagaaattcccaaattggaataaatatt

SEQ ID NO: 140223 - DNA, 601 bp, Homo sapiens
ctgtgccagtcatggacatatttatctatgttatctactagaaatattgttttcagctttgaccttaaaatttaaaatccacttttcattggaatttgttaataatataagataggagtgttttttctcacataaataactggttgactcaaggctatttaccgagaagactgtcttcactcctcttctgtgcctkttttgtaatatacagaatgtccaaatgtgtgagtctgagttggactctcgagtttttctagttttctttgtgcctatttttgcattactaccatagatagcttttattactatagctttaatctaagtctgaatatatgtcattttaagctcacaaactttgttattcttcaggacagtttttacatttcttcgattttttatatgtatttaaattttttaaactgattagacagtttccacaagatttctgccaaaatattgtattgtgaaaatggaaatctatgaatcaatttagggagaagttacatagaaacaaagcaaaacaaaacactaataacatccaaaacaaacttaaagagaacaccacaataagaaaagaaattcccaaattggaataaatatt

SEQ ID NO: 140224 - DNA, 400 bp, Homo sapiens
tgctccccttggctcttcattggtaactcactgtgctttgagactctgggaagaggcttttcaggttctagaggtccttcagagaagagagaggcctagagatgtgggcagatgaggacttggaataaagcagaatgtgacaatgcactgggctctggagtgtggggcccagaraaaatactagatttttgggctgtccttgaggtcctcattcagaagtggaagaaaataatgtctctgaatgctgttaaagtgtttaatgagtgcacagcacactcaaagaggctgaggaaaataggaatcaagggaggtttccgaggttacttttatggcccttggagtcttcagatactgctccttttcccaggggtccttgaatagccactgccttgagaattcc

SEQ ID NO: 140225 - DNA, 400 bp, Homo sapiens
tgctccccttggctcttcattggtaactcactgtgctttgagactctgggaagaggcttttcaggttctagaggtccttcagagaagagagaggcctagagatgtgggcagatgaggacttggaataaagcagaatgtgacaatgcactgggctctggagtgtggggcccagaaaaaatactagwtttttgggctgtccttgaggtcctcattcagaagtggaagaaaataatgtctctgaatgctgttaaagtgtttaatgagtgcacagcacactcaaagaggctgaggaaaataggaatcaagggaggtttccgaggttacttttatggcccttggagtcttcagatactgctccttttcccaggggtccttgaatagccactgccttgagaattcc

SEQ ID NO: 140226 - DNA, 400 bp, Homo sapiens
ctgctccccttggctcttcattggtaactcactgtgctttgagactctgggaagaggcttttcaggttctagaggtccttcagagaagagagaggcctagagatgtgggcagatgaggacttggaataaagcagaatgtgacaatgcactgggctctggagtgtggggcccagaaaaaatactagatttttgggctgtccttgagktcctcattcagaagtggaagaaaataatgtctctgaatgctgttaaagtgtttaatgagtgcacagcacactcaaagaggctgaggaaaataggaatcaagggaggtttccgaggttacttttatggcccttggagtcttcagatactgctccttttcccaggggtccttgaatagccactgccttgagaattc

SEQ ID NO: 140227 - DNA, 402 bp, Homo sapiens
gaattctagatactcataagtgtctgctccccttggctcttcattggtaactcactgtgctttgagactctgggaagaggcttttcaggttctagaggtccttcagagaagagagaggcctagagatgtgggcagatgaggacttggaataaagcagaatgtgacaatgcactgggctctggagtgtggggcccagaaaaaatactagatttttgggctgtccttgaggtcctcattcagaagtggaagaaaataatgtctctgaatgctgttaaartgtttaatgagtgcacagcacactcaaagaggctgaggaaaataggaatcaagggaggtttccgaggttacttttatggcccttggagtcttcagatactgctccttttcccaggggtccttgaa

SEQ ID NO: 140228 - DNA, 400 bp, Homo sapiens
tgctccccttggctcttcattggtaactcactgtgctttgagactctgggaagaggcttttcaggttctagaggtccttcagagaagagagaggcctagagatgtgggcagatgaggacttggaataaagcagaatgtgacaatgcactgggctctggagtgtggggcccagaaaaaatactagatttttgggctgtccttgaggtcctcattcagaagtggaagaaaataatgtctctgaatgctgttaaagtgtttaatgagtgcacagcacactcaaagaggctgaggaaaatargaatcaagggaggtttccgaggttacttttatggcccttggagtcttcagatactgctccttttcccaggggtccttgaatagccactgccttgagaattcc

SEQ ID NO: 140229 - DNA, 402 bp, Homo sapiens
gaattctagatactcataagtgtctgctccccttggctcttcattggtaactcactgtgctttgagactctgggaagaggcttttcaggttctagaggtccttcagagaagagagaggcctagagatgtgggcagatgaggacttggaataaagcagaatgtgacaatgcactgggctctggagtgtggggcccagaaaaaatactagatttttgggctgtccttgaggtcctcattcagaagtggaagaaaataatgtctctgaatgctgttaaagtgtttaatgagtgcacagcacactcaaagaggctgaggaaaataggaatcaagggaggtttccgaggttacttttatggcccttggagycttcagatactgctccttttcccaggggtccttgaa

SEQ ID NO: 140230 - DNA, 400 bp, Homo sapiens
ctgctccccttggctcttcattggtaactcactgtgctttgagactctgggaagaggcttttcaggttctagaggtccttcagagaagagagaggcctagagatgtgggcagatgaggacttggaataaagcagaatgtgacaatgcactgggctctggagtgtggggcccagaaaaaatactagatttttgggctgtccttgaggtcctcattcagaagtggaagaaaataatgtctctgaatgctgttaaagtgtttaatgagtgcacagcacactcaaagaggctgaggaaaataggaatcaagggaggtttccgaggttacttttatggcccttggagtcttcagatactgctccttttcccaggggtccytgaatagccactgccttgagaattc

SEQ ID NO: 140231 - DNA, 595 bp, Homo sapiens
aaaaccttcgttttctctctcataaataggggtactcaaaaggaataataccaagaattctagatactcataagtgtctgctccccttggctcttcattggtaactcactgtgctttgagactctgggaagaggcttttcaggttctagaggtccttcagagaagagagaggcctagagatgtgggcagatgaggacttggaataaagcagaatgtgacaatgcactgggctctggagtgtggggcccagaaaaaatactagatttttgggctgtccttgaggtcctcattcagaagtggaagaaaataatgtctctgaatgctgttaaagtgtttaatgagtgcacagcacactcaaagaggctgaggaaaataggaatcaagggaggtttccgaggttacttttatggcccttggagtcttcagatactgctccttttcccaggggtccttgawtagccactgccttgagaattccccaatgcaggtgcctgttttgtgatgcttccacctgggacttcagggctagtggaggcctctaggtggcggcagaccccgtgtttcttatgcccgctgggctttactggagcagctg

SEQ ID NO: 140232 - DNA, 425 bp, Homo sapiens
atacatactggctcagcctacatccttgataccactggccattcgacaagaggcacccacaggtaacacagtttagcccagggcagktccgtccatgccaggccacctgtgtcatctaatctgggcaacccgaccctgcctaccattaccctgtgttgcaaggggagcaggaaaggagggggcttttcctcacaggggcaggttttaagacacaggaaccctggtgggtctgtcatgttcatacccaggtcacggttggtggaataaaaagttgtgagttgcggaccaagtacgtctactcagatgtgaatcccaaggccttaagctgtcctcgggtttcctcattggctgggggtctatgcagatactcctatgttcctgatctaggaaacagaatttctaatgcagatgtcacctggtggtaa

SEQ ID NO: 140233 - DNA, 425 bp, Homo sapiens
atacatactggctcagcctacatccttgataccactggccattcgacaagaggcacccacaggtaacacagtttagcccagggcaggtccgtccatgccaggccacctgtgtcatctaatctgggcaacccgaccctgcctacmattaccctgtgttgcaaggggagcaggaaaggagggggcttttcctcacaggggcaggttttaagacacaggaaccctggtgggtctgtcatgttcatacccaggtcacggttggtggaataaaaagttgtgagttgcggaccaagtacgtctactcagatgtgaatcccaaggccttaagctgtcctcgggtttcctcattggctgggggtctatgcagatactcctatgttcctgatctaggaaacagaatttctaatgcagatgtcacctggtggtaa

SEQ ID NO: 140234 - DNA, 553 bp, Homo sapiens
cccacaggtaacacagtttagcccagggcaggtccgtccatgccaggccacctgtgtcatctaatctgggcaacccgaccctgcctaccattaccctgtgttgcaaggggagcaggaaaggagggggcytttcctcacaggggcaggttttaagacacaggaaccctggtgggtctgtcatgttcatacccaggtcacggttggtggaataaaaagttgtgagttgcggaccaagtacgtctactcagatgtgaatcccaaggccttaagctgtcctcgggtttcctcattggctgggggtctatgcagatactcctatgttcctgatctaggaaacagaatttctaatgcagatgtcacctggtggtaaaaacaaagaagacaattaacttttttcgctgctgggaacactctttgtagagctgcattaaaatcagtgagcagatatttgatgggttcaagtcccccatctccttggacaactggcaggttcaccacaccccccaagcatggcatacaatgagttatgttgagagcaggcacatggggttct

SEQ ID NO: 140235 - DNA, 583 bp, Homo sapiens
attgctttaacctgggaggtggaggttgcagtgatccaagattgtgccactgcactttggcaacagggtgagagtctgtcaaaagaaaaaaaaaaaaaaaaaaagacacccgaagggacagagttacaaagtttctgaaaaattatcttcaaatcrcataaatctttccttcacactaagataatataaacaatagatgttgaaattaagacaatttccatgattactcacttagacagaataaattattggccatcaaataagaagaaaatataaaagtcataaacaaaataggggcaatatttatacaggcaaacaaacagttaaatcattgtattaacaaaagacatagggatggttcatatttgacttctgccccacactgtcttaatgcatacagagttgaatattgttatacaatattatattatacaaattaaaacttaaaacaataaactaatataaggtgccctaccctaaaacatgaaacacagaaatgtaaaattgcaaaacaaagttaaaataaacattaacccccaaattcttatttgaataatgaaattcaaaatcataataaataggt

SEQ ID NO: 140236 - DNA, 583 bp, Homo sapiens
attgctttaacctgggaggtggaggttgcagtgatccaagattgtgccactgcactttggcaacagggtgagagtctgtcaaaagaaaaaaaaaaaaaaaaaaagacacccgaagggacagagttacaaagtttctgaaaaattatcttcaaatcacataaatctttccttcacactaagataatataaacaatagatgttgaaattaagacaatttccatgattactcacttagacagaataaattattggccatcaaataagaagaaaatataaaagtcataaacaaaataggggcaatatttatacaggcaaacaaacagttaaatcattrtattaacaaaagacatagggatggttcatatttgacttctgccccacactgtcttaatgcatacagagttgaatattgttatacaatattatattatacaaattaaaacttaaaacaataaactaatataaggtgccctaccctaaaacatgaaacacagaaatgtaaaattgcaaaacaaagttaaaataaacattaacccccaaattcttatttgaataatgaaattcaaaatcataataaataggt

SEQ ID NO: 140237 - DNA, 583 bp, Homo sapiens
attgctttaacctgggaggtggaggttgcagtgatccaagattgtgccactgcactttggcaacagggtgagagtctgtcaaaagaaaaaaaaaaaaaaaaaaagacacccgaagggacagagttacaaagtttctgaaaaattatcttcaaatcacataaatctttccttcacactaagataatataaacaatagatgttgaaattaagacaatttccatgattactcacttagacagaataaattattggccatcaaataagaagaaaatataaaagtcataaacaaaataggggcaatatttatacaggcaaacaaacagttaaatcattgtattaacaaaagacatagggatggttcatatttgacttctgccccacactgtcttaatgcatacagagttgaatattgttatacaatattatattayacaaattaaaacttaaaacaataaactaatataaggtgccctaccctaaaacatgaaacacagaaatgtaaaattgcaaaacaaagttaaaataaacattaacccccaaattcttatttgaataatgaaattcaaaatcataataaataggt

SEQ ID NO: 140238 - DNA, 583 bp, Homo sapiens
attgctttaacctgggaggtggaggttgcagtgatccaagattgtgccactgcactttggcaacagggtgagagtctgtcaaaagaaaaaaaaaaaaaaaaaaagacacccgaagggacagagttacaaagtttctgaaaaattatcttcaaatcacataaatctttccttcacactaagataatataaacaatagatgttgaaattaagacaatttccatgattactcacttagacagaataaattattggccatcaaataagaagaaaatataaaagtcataaacaaaataggggcaatatttatacaggcaaacaaacagttaaatcattgtattaacaaaagacatagggatggttcatatttgacttctgccccacactgtcttaatgcatacagagttgaatattgttatacaatattatattatacaaattaaaacttaaaacaataaactaatataaggtgccctaccctaaaacatgaaacacagaaatgtaaaattgcaaaacaaakttaaaataaacattaacccccaaattcttatttgaataatgaaattcaaaatcataataaataggt

SEQ ID NO: 140239 - DNA, 545 bp, Homo sapiens
agacaaatgtgacacatgataattcagaaagtgaaaacacagtcatagtaatcttcatattaaagaagacagaatcataaaatactaagtgagaaataaagtaataattgtgaattcaatatatgttgaacaatattctaatttcccttacggaaaaagtttttgtaagaaatcagtaaaatgagtacatacaataaaccatcctacagtagaggctgttggcatatagagtttacatttctatgattaggtcctactaagaaaaaggaaattttaaaataaaatrcttagattttcctatttaataagataatttttgcctataaagtttttcagtctaattttcttgtagaattaggttttagccatcgtaaaacttgacattatgaagcagaaaacaggtgtcatctgtctctggtgttcctggaatttctaacccaaatgccaattcctccacaactcccttcacacacttctgaattgaagcacaaacagatttattaaaattggcataacagcggtctccagaaatgtgcagagatttt

SEQ ID NO: 140240 - DNA, 548 bp, Homo sapiens
tgtgaacgcactggaagattctaagagagagggagagagagagaatgtgtgtgtgttgaaatcagaaccccaccttatgtgtttattgtggaaattgaaaatgaaagcctaaagttgaaaattaaaatcacacatgatagcacgttgcaaactgttttctgtgctagatgggtcgttctagggtgtaggaccctggaaacaccgttttcccctccttccggaaagagctactcacactgctcaaagcctgcatccacatgtaccatgtcgaagascagctcaagagcctggacccatatgccaccttcagcagggttgactgcagcttcttgttcttcctgagcatcttctccaatggtgacctgagagttgcgggaggcattggggccaggattgaacagaggaaaaaggagcacggaggccaggtgctgaggaccaggccatctcacctggagagttctggccctgagacatccagaccagcatgatgtttaggtgcagacagctggccctgggtggccctgtgctgatcaccggcctcagcccct

SEQ ID NO: 140241 - DNA, 548 bp, Homo sapiens
tgtgaacgcactggaagattctaagagagagggagagagagagaatgtgtgtgtgttgaaatcagaaccccaccttatgtgtttattgtggaaattgaaaatgaaagcctaaagttgaaaattaaaatcacacatgatagcacgttgcaaactgttttctgtgctagatgggtcgttctagggtgtaggaccctggaaacaccgttttcccctccttccggaaagagctactcacactgctcaaagcctgcatccacatgtaccatgtcgaagaccagctcaagagcctggacccatatgccaccttcagcagggttgactgcagcttcttgttcttcmtgagcatcttctccaatggtgacctgagagttgcgggaggcattggggccaggattgaacagaggaaaaaggagcacggaggccaggtgctgaggaccaggccatctcacctggagagttctggccctgagacatccagaccagcatgatgtttaggtgcagacagctggccctgggtggccctgtgctgatcaccggcctcagcccct

SEQ ID NO: 140242 - DNA, 548 bp, Homo sapiens
tgtgaacgcactggaagattctaagagagagggagagagagagaatgtgtgtgtgttgaaatcagaaccccaccttatgtgtttattgtggaaattgaaaatgaaagcctaaagttgaaaattaaaatcacacatgatagcacgttgcaaactgttttctgtgctagatgggtcgttctagggtgtaggaccctggaaacaccgttttcccctccttccggaaagagctactcacactgctcaaagcctgcatccacatgtaccatgtcgaagaccagctcaagagcctggacccatatgccaccttcagcagggttgactgcagcttcttgttcttcctgagyatcttctccaatggtgacctgagagttgcgggaggcattggggccaggattgaacagaggaaaaaggagcacggaggccaggtgctgaggaccaggccatctcacctggagagttctggccctgagacatccagaccagcatgatgtttaggtgcagacagctggccctgggtggccctgtgctgatcaccggcctcagcccct

SEQ ID NO: 140243 - DNA, 594 bp, Homo sapiens
taggcaatgaccctttcagctttttttttttttttttcttaaggttggcttggctatttgggctcttttttggttccattttaattttaaaaagttttttttttctaattatctgaagaatgtcagtagttcaatgggaacagcattraatctataaattacttagggcaatatgctcatattcgtggtactgattctttctctccgtgagcatggaatgtttctccatttgttttgtgtccactctgattcctctgagtagttgtttgtagttctccttgaagatatccttcactttccttcttagctgtattccttggtatttttttctctttatagcaaatgtgaatgaaagttcattcatgatttgtctccctgcttgcctgttgcttgtgtatgggaatgctagctacttttgcagattgattttatatcctgagattttgctactgctgcttatcaccttaagaagctttggggctgagacgaagaggctttctagatatagggtcaggtcatctgtaaacaaagataatttgactttctctctttctatttgaatactgtttatttcttcctctggcctgattttcc

SEQ ID NO: 140244 - DNA, 646 bp, Homo sapiens
ttttgcctgactcagtgactatagagagaaccaagttctgcaggcctgtcacctaagtctcaggtgagtatgaattctcttgtgtttttcacagattgttgcagtggcaggaccaaggtcaaatgagttatagccaagtctacagtaagatgtggcagtattctgttttgaagccgggaccatgattggcaagcttgccacttggtcaagtgctcaccctctgaaaatgtcttccttggtctttgcctccagctgggtgccacaaactctgaactggattycaaggctttcatgaatgcacttacgtttgctgtggcagctgcattatgtcgtgggggatgtggatgcagaacctcacattctgtcgtcttgcttatgttactctcctttatgtttcactttctcaaatgaatgtcaagcaggtgattttcagattcaaaagttctaaaataaattgctcaaatttatacattatgtaagctgttaataaaatttcttgtaggtgctacatatttgttaaaatttttggttgtaattttaagctcactgtaggcagaaaggaatcattaagatttctattcttttttagtctgtatctaaatgaccatatattttaattccaaatatttactttatacttcagtaa

SEQ ID NO: 140245 - DNA, 646 bp, Homo sapiens
ttttgcctgactcagtgactatagagagaaccaagttctgcaggcctgtcacctaagtctcaggtgagtatgaattctcttgtgtttttcacagattgttgcagtggcaggaccaaggtcaaatgagttatagccaagtctacagtaagatgtggcagtattctgttttgaagccgggaccatgattggcaagcttgccacttggtcaagtgctcaccctctgaaaatgtcttccttggtctttgcctccagctgggtgccacaaactctgaactggatttcaaggctttcatgaatgcacttaygtttgctgtggcagctgcattatgtcgtgggggatgtggatgcagaacctcacattctgtcgtcttgcttatgttactctcctttatgtttcactttctcaaatgaatgtcaagcaggtgattttcagattcaaaagttctaaaataaattgctcaaatttatacattatgtaagctgttaataaaatttcttgtaggtgctacatatttgttaaaatttttggttgtaattttaagctcactgtaggcagaaaggaatcattaagatttctattcttttttagtctgtatctaaatgaccatatattttaattccaaatatttactttatacttcagtaa

SEQ ID NO: 140246 - DNA, 548 bp, Homo sapiens
tgactcagtgactatagagagaaccaagttctgcaggcctgtcacctaagtctcaggtgagtatgaattctcttgtgtttttcacagattgttgcagtggcaggaccaaggtcaaatgagttatagccaagtctacagtaagatgtggcagtattctgttttgaagccgggaccatgattggcaagcttgccacttggtcaagtgctcaccctctgaaaatgtcttccttggtctttgcctccagctgggtgccacaaactctgaactggatttcaaggctttcatgaatgcacttacgtttgctgtggcagctgcattatgtcgtgggggatgtggatgcagaacctcacattctgtcrtcttgcttatgttactctcctttatgtttcactttctcaaatgaatgtcaagcaggtgattttcagattcaaaagttctaaaataaattgctcaaatttatacattatgtaagctgttaataaaatttcttgtaggtgctacatatttgttaaaatttttggttgtaattttaagctcactgtaggca

SEQ ID NO: 140247 - DNA, 521 bp, Homo sapiens
tctgaaggccccaagtacaatgagtgaccttggaatccccctttgccttctatttgcctctaccttttgggttgtgctatttatccatgagatatcctccccttatccagtgaaattagtttctaccactttcaaatgaggaccttaagaacccaacaggagctgggattttccgtggacttcagcctcagagtccaatgctctggaacatttagctccgtctcatcttcatctacccaagatgcctctgaagtggccatgcctccctctgatttgaaggacctacagagagtggatgcatttytgcacagtctcagagcaagaatcagggctggaagacacttatgagtatgtgaaatcgtcgaggtcacccagttcaaacagccctatttatgaggaagaaaacaggctttcctgcaggcattctctacattacgctgaggtggagcatagctcattttacttccaggtgccctcagagctggatgcaaaaccccagtcctgtcatcttgaaattgaca

SEQ ID NO: 140248 - DNA, 340 bp, Homo sapiens
tattaactgaattacaaattttatttgatttttttttttaccagttttttctttttttttttttactagtttctttttcttttccaggatccaatctaggattctacactgaatttagttctcatgtcttacccttctcctattgagcattcaatatatatccttgagttttgtaaccttagyaattttgaacggtacttgtcactcattttttaaaatgtttctcaacttgagttcgtctgtagttttccagtgaataggttgaggtggtgcattatcggaaaagataccacagaagtgatatgcccttctcagtgtatcataccagatgtacatgtca

SEQ ID NO: 140249 - DNA, 340 bp, Homo sapiens
tattaactgaattacaaattttatttgatttttttttttaccagttttttctttttttttttttactagtttctttttcttttccaggatccaatctaggattctacactgaatttagttctcatgtcttacccttctcctattgagcattcaatatatatccttgagttttgtaaccttagcaattttgaacggtacttgtcactcattttktaaaatgtttctcaacttgagttcgtctgtagttttccagtgaataggttgaggtggtgcattatcggaaaagataccacagaagtgatatgcccttctcagtgtatcataccagatgtacatgtca

SEQ ID NO: 140250 - DNA, 340 bp, Homo sapiens
tattaactgaattacaaattttatttgatttttttttttaccagttttttctttttttttttttactagtttctttttcttttccaggatccaatctaggattctacactgaatttagttctcatgtcttacccttctcctattgagcattcaatatatatccttgagttttgtaaccttagcaattttgaacggtacttgtcactcattttttaaaatgtttctcaacttgagttcgtctgtagttttccagtgaataggttgaggtggtgcattatyggaaaagataccacagaagtgatatgcccttctcagtgtatcataccagatgtacatgtca

SEQ ID NO: 140251 - DNA, 631 bp, Homo sapiens
tgtgtttatttgatatcgtaacagatgcaatttgcaaagggtgtggttataacagacacatggagttttcaaattacctatcatgttcaagttaagtttatcacagacatggtagagattgagattctaagaatattcttcaaaattgaagaaatttgtaccatttgaaatccagctgaccaaggtatatcagagctggctagaaacgttcacccagattgcaaakttgttcacacaggtgaacagctcatagcatacatagaatctttatcaatgggtgtgatggaagtaatgaataggactatgccatatgtgcttgtcgtggagatctggttgaaaaacactggtagaaaataagaagtgaagctaactcaccaatcaacaaatactgaaggatcactttggcaggtaatttaaaaattgctttatcattcccctttagataaaagaagtatttatctataaagctttcttgaaaaaacaggagtttaaaggattatggcttttccatttgcctttctcgttttagatacgcttttattttaacaaacttggcatcacctttcatcttcttgcacattgaacaccctgatgagttttgtttccatgtcatcaacctggatgtaaaatg

SEQ ID NO: 140252 - DNA, 593 bp, Homo sapiens
tacatttcagccaatcagatgaccttttccactgaataactggaagaactctatataatctggtacaatgtatttactttaaagcctagtttaatacaaaccatttgttgataccaagtttcacagtaggtactggaagctctattgaatgacccaagagtccattcaccaggcaaagacagtttcaatgaaatacattgtgttcatgataatagcttgtctcagttttagcatattgttgattttgtttcttttgtagaagtcaaaggatacatgtgaagcatttgggaattttggttagttcattgagcctctgcttccagactmtattcaggttccaataatgattttgtttgagttggaggaaatgaattttgatagtacatcagagatgaaaaggtaactaagctgctactttttgtttaactaattgctttcacttcattcacttttttactttggagggggagaatgtacaaatttgttctgttttgaacagtgaaaaatatttaagagtgttctgtttaatatgctcagattcaatggtatttagatagttctttttagtgtgaataaaaattgtgatgaagaaa

SEQ ID NO: 140253 - DNA, 640 bp, Homo sapiens
aatgcactaaaaatgcatcatcaactgaaatgtaaaatcaaaatcaataaaactcttagatgaaaacataggggcaatcatcatgaccttggattaggcaatctgtttttagatatgacccaaaaaatacaggcaaacaaagaaaaatatatacattggactttataattaaaactttttgcttcaaagagtatcatcaaaaaattgaaaagatagtccatacaatttgagaaaatatttgtaaatcatgtatctgataagagaactgtatctaacatttataaataacatttttataattatatattataaaaagacataaaatcaattaaagtgggcaaaagatctgaacagacatttctccaaggaagatatacaaatggccaaaaaccacatatagagatgctcaacattattagtcatcaaagaagtgcaatttaaaaccacaatgaaatattactttactctcactaggagggctgtgataacaaagatataataaaaagttttgatggagatgtagcaaaattggagtcttcataaattgccggtggtaatgtgaaaatggsacaggtgcttttcaaaactgtctgccatttccccagaatgttaaacatagagttaatatatgacccagaaa

SEQ ID NO: 140254 - DNA, 555 bp, Homo sapiens
gattttaaatatacttggctttaaagctgtagtcttatagtttttataagcatacagagtgagattaaataagaatgctggtggctgggtacagtggctcacacctgtaatcccagcactttgggaggctgaggcgggtggatcacaaggtcaagagttcgagaccagcctggccaatatggtgaaaccccgtctctattaaaaatacaaaaattagctgggcatggtggcgtgcacctgtaatcccagctgctgggaggctggagcaggagaatcgcttgaactcaagaggcggaggttgcagtgagccgagatcatgccactgcactccaacctgggygagagagcgagactccattttaaaaaaaaaagaatgcttgtgaaaggggtatttttgattaaatgattttccagttaatcatcaactcttctttcgcccattgattctgaacatttctctttctgatctgaatgcagtttcttgccataataagtaggaagcataaaacataaatccatcctcttatgactgagtacagtgtcttgattgagggt

SEQ ID NO: 140255 - DNA, 610 bp, Homo sapiens
tgcccttataaaaaagttccactacgtaagaacacagcaaaagacagccacctaggaagcaggccttcaccctcaccaatcatcaaatctgccagaaccttgatcttggactttgcagccttcaatatgataagaaataattttctgatgtttataaaccacccaggctatggtattttactagagcagcctaaatggactaaaacacatcctctgtgacagatattctagggaaaactatctatttattgtttccatgaagttttatagtttaattgttcaaggcccaatgtggtatgacttcagttgtacttgcagtaatttggtttttcagctcagaattttctagacttcttcacaaagccatwcttccctaaaataggcccatttttgaaaagaaagggagacccaacttctcaccttatttgatgttaacattttgaagactgtgttaaatttttcacctttctttcttgcctattaacagtgatgtataataattatctattactataatctttatttatggagcaaaggagacacttttatcaaaaatcagatgtcctcaaataacaggaaaaaatggtaacagctccattttaaaactaat

SEQ ID NO: 140256 - DNA, 610 bp, Homo sapiens
tgcccttataaaaaagttccactacgtaagaacacagcaaaagacagccacctaggaagcaggccttcaccctcaccaatcatcaaatctgccagaaccttgatcttggactttgcagccttcaatatgataagaaataattttctgatgtttataaaccacccaggctatggtattttactagagcagcctaaatggactaaaacacatcctctgtgacagatattctagggaaaactatctatttattgtttccatgaagttttatagtttaattgttcaaggcccaatgtggtatgacttcagttgtacttgcagtaatttggtttttcagctcagaattttctagacttcttcacaaagccatacttccctaaaataggcccatttttgaaaagaaagggagacccaacttctcaccttatttgatgttaacattttgaagactgtgttaaatttttcacctttctttcttgcctattaacagtgatgtataataattatctattactataatctttatttatggagyaaaggagacacttttatcaaaaatcagatgtcctcaaataacaggaaaaaatggtaacagctccattttaaaactaat

SEQ ID NO: 140257 - DNA, 531 bp, Homo sapiens
ttgtcaagagcagttttgctatagtaatagggacaagaagccagactggagtaggctgaggaatgaatgacaagtgaggtcatggagacagtgtgtacattgaatcttttgagaactataaagtacaagggagcagragaaatgagacaggcaactgggaggtcctatgctgtcaaggtacttttcctattaatatgaaaaataccagggcatgtttctgaactgaaagaaatgataccatctacagggagagaatgatggtgaaagacagggaaacacctataaaatacaaactgagagaaggccagagaagataggtcctctataaaataaaattatacacaaaagcaaagggactcattcagaataagaggaaaccagagtaaacctaacattgtcagtaatatttgcaactgactagatctgtcttatgatattgcttatgtttacatcatttaacctgtcttgtatatttgtttctctccttgacttgccagaggagaacatgtctcatttatatgcatagaattc

SEQ ID NO: 140258 - DNA, 593 bp, Homo sapiens
aaaaactagattgcagatttttgttaaggttacatagtttaattactttcagaaatacacagtaactcaattagggaaccaaaaagttttcagttctgtgtagggcctgctccaatgagagaaaaacacttttataatcattgtatagattcacacataaatggcactgttaaaattcagaatcctatactaattatttacactagaaaagagataatgagcatatttattgaatgccagctacttaccagctattatgatactaatgatcacaatatccctgaaatgttagaatttcctactgccaatatttttctaataataagaaatcaaattcttagtatgctatagcagaaaaagcacagattacatttctgatttctccatctcagaaaaggagggacggggtgctgggtatattaaaaacttagcatttaatawacccagtgtgaattagtgtttaacacttaatatacaccatagagagaagagataaggggaatctgagtacaaggcagcagcagggtaagatccaagtatgtcagatgaccatgagaaggattcacacagatacaggaggcagaacctactaa

SEQ ID NO: 140259 - DNA, 564 bp, Homo sapiens
gttttagaagtataagaaaattacaagcagactttgataaattataaatctcagctgctgtatatgaccattatatccttaacacggaaaactgactaattcccacttataaaatgtttcacctaccttctattgctgactcaatggaacagttttctatactcagccccctggatgagcatttaagagactcttagtgtggtctccatttctaaaagyttctctagatttatctctagatttatggtacaaagatttttataaaatataaaacactaagaataaaatagtactagaaaaaaaatgtgagaagattatttccaaaaacactcaccctaaaactgtattacaagaatggatgatagaaaaatattgaatttctactattgcctgaggcgttgagaaaacacattttaaaagtaatcttgttataatattccaattttttttttttttttactttccattagttgacagtgaggctcagatttgcccttctcaataaatgaatatttaatagcattgtatttcacaaagaaaaaagacctggtagtttaacctata

SEQ ID NO: 140260 - DNA, 605 bp, Homo sapiens
ttttttttgtcatgcagatattcttaccactaaattgttataaatatgtgaactaattaawgtctgtaaaggctgatcagcaggttgacagtgatacccactgcagcctcctggcaaatcaaggattctatcagtgtttaatgactgtaacattcctatataatggtcctagtatttgccaaatccagatactcagaacccacacaaccatctgcagaatgtggcctgttaatatgcacataaaccaattaaaaatcacagactcattcaacagccagtcaggtcaattctgatctactgtaccaattttatttatacatgcagaaagagcaagtctattctccactaaagttcagataagttaatgagtgagagagtagttgagaaaatattcccaacttattccaacttaagaacagttagaagtagtttacttttgaaaaaagtatgggtaactatcaacacttcaatcagtatttcaattagatatgtaatcgctctgcatctaattgattaacaattagcagcacctgtagttggctataattttaattactgattgcattagggctgactacttaaaattatatctgcacaaacgccat

SEQ ID NO: 140261 - DNA, 510 bp, Homo sapiens
aagctgttccaatctctgcctgttacccagttccaaagttgcttccacatttttgggtatcttttcagcagtgccctactcccactaccaatttactgtattagtccattttcatgctgctgataaagacmtacttgagactgggcaatttacaaaagaaagaggtttattggacttacagtttcatgtggctgggagacctcacagtcatggcagaaggtgaaaggcacgtctcacatggtggcagacaagagaagagaacttgtgcagggaaacccccatttttaaaaccataagatctcatgagacgtactcactatcacaaaaacagcacgggaaagaccacccccatgattcattcacctcccaccaggttcctcccacaacatgtgggattgtgggagttacaattcaagatgagatttggatggggacacagcaaagccatatctatcctcaagttatttaaaagaacaaatacagcccatggggaaattcctggaggtttca

SEQ ID NO: 140262 - DNA, 563 bp, Homo sapiens
gctggtatctcagtctcttctgaggagaagttattcatagagaagactgcacactgctactttttctctatataaatacatattaatatttaacctgaaattacaagatagttaatctcttaggttaggtcatatgaaatgaccaataatcaactttttttacctacaaaaatggtaatttcatatagttcagtctactagaatattttttattcctcatctagtccaaccttttcgggttttaagtgaggaaacagaaacttcaaggatattttagatattttagaaaattttcatagtggttacattcagaaccaaaattgtcaggctgctccattttccagtacgttcattaatagtgattttgagaaagagaaaaaaaaatatttcataccagagaaaayctatcacagagaaagcttccgtgctggaagcttggcaagagtatgaataaaacagggtggctccataggaagaaagaaaacacccagtaactccagagcatgctccttcatcctacccaaaaaacttctcaaagaaatttaaatcaggtagacgttcaa

SEQ ID NO: 140263 - DNA, 617 bp, Homo sapiens
tgtctgtattcttgaccactgattcattaagtttttcatttctctataagaaaggggatctaaaaatggaaaactgttttatttctcaattaaatgaagcaaaagggaaattaatttttttatgaattggtttctttgctcatttataaagtaagttgggatacaaaaagtaaaatagtcgttgccagggattctgtaattgggtagaactcatcttcccaaaytaaaacttagtatctattcaccaataactccccattttctctcacattcccacataaggaatgtgatccagaatttgccttcatggagctcacagttgggtaagaaaacatgtgaaagaacgttcacttttcatctagccacacttaatctgttgcagcctttcaaagttgacattatttttctcattgataaaatgagacggctggatagagaatgtctaaaatctcgtggcttcaaacatctatgactgtgtggggaaatggggacttactggtgaatagatactaagttttagtttgggaagatggaaaatattctagagatggaagctggtgatagatgtacaacaatgtgaatgtacttaccacatttaaactgcacatttacaaatg

SEQ ID NO: 140264 - DNA, 522 bp, Homo sapiens
atcgcaccatcgcactccagcctaggcaaacaagagtgaaactccatctcaaaataaaatgaaataaaaaatacaaaaattagccgggcrtggtgttggtcacctgtagttccagctactcgggaggctgagccaggagaatcgcttgaacccaggaggcagaggttgcagtgcgtaagatcacaccactgcactccagcctgggcgatagagtaagaccctgtctcaaattaaaaaaataaataaataaataaataaaatattggccagtcaggtttttttctgcttcaagaccccagatatcactcaacccctggcccagtgtctcacacaagtcataagtaggccctgtgaaaaccctcactctcttaaacagtgacttagggtcacgtgtttaaaagaaaattagttataaaatcacccaagcccctcattttcaagactgtgtaaaatataggcacatccaaatcccttggcaatttagtgacaaacctgaaatctgactccagttttttacctaaa

SEQ ID NO: 140265 - DNA, 450 bp, Homo sapiens
ggtgcctgccaccacatttggctaatttttgtatttttagtagagacggggtttcaccatcttggccaggattatcttgaacttctgacctcgtgatccacctgccttggcctcccaaagttctgggattacaggcttgagccatcgtgcccagccaattaataaatatttatacaacamctattatgtttgaggtgtgagcctaggtgcctgtaatgttcaggatacaggaagaacaaatatggcagacattaaacctgcactattggagtttatagtctaatgagaaacaggcaagtaaaaaggcagctacgatagattatggtaaatattttgattggctaaatacaagcacatgtaacctattctttgaaaatcagggaagtattatgcaaagatatgtaagaaagaatgtgcccatccaaacttcaataagtgcttaacacagtt

SEQ ID NO: 140266 - DNA, 582 bp, Homo sapiens
tttctgtaacatgtatgtaggcatgttattctttgtaacatatgtaatatatgtagacgtgttattctctgtaacatgaatgcagacatgttacacaggtttccactaatgtgtaatgttcacatgcagcatactcggtcatgtattatattaatccctgtgacatttcaacaactactatgcatctcctatatactagttgtagttctaggtactaaaaatatagtggtgggagaggaaagacaaaacataagtcctaataaacaaataagacaatcgtgagatcttgataagtgctatgctgatgggacaataactgacccatccaggaaattctccccatttgagtctaaggtggatgacctgaaagggccagtcaagcaaacatcagagtggtgagctctgtagggagaggaaacaactactgcaaatgctgtactgcagggatgagtttggtattcagagaaaccaaagaggatcatcacatctggaacatcaagggtaagagagagaatgaaaaagataaaaagagagtcagccagtaggaatgtacartagtatacctgctataaagaaaccata

SEQ ID NO: 140267 - DNA, 524 bp, Homo sapiens
ctgggggttggggaggttggcagttattatttaatgggtacagcacttcacttttgcaagatgaaaagagttctggagatgggtggtggtgatggctgcatgacaacatgaatgtgcttaatgccactgaactgtatacttaaagattgttaggatggtaaatttaaggttttgtctatttttccataattgtaaacaattacaaaaacagaaaaaaragagtgagtcacttacagaccaggttactataggcaaggcaagtcaagataagtaagaagttaggttttattctaagtagaaggagaagatcttaaatggtcttgactggcaggaatggaggtgtgaagtgtggtctcattgatattactgaaagatcactctatttttctgggtgaaaaagaagtttggagaggaagcatagaatgaaacatggagaccataaaattgcttttgctcttgtctagatggctgttgtgaagatgatataaagtggatagatttaggacatttgtaatgtgtagtta

SEQ ID NO: 140268 - DNA, 524 bp, Homo sapiens
ctgggggttggggaggttggcagttattatttaatgggtacagcacttcacttttgcaagatgaaaagagttctggagatgggtggtggtgatggctgcatgacaacatgaatgtgcttaatgccactgaactgtatacttaaagattgttaggatggtaaatttaaggttttgtctatttttccataattgtaaacaattacaaaaacagaaaaaaaagagtgagtcacttacagaccaggttactrtaggcaaggcaagtcaagataagtaagaagttaggttttattctaagtagaaggagaagatcttaaatggtcttgactggcaggaatggaggtgtgaagtgtggtctcattgatattactgaaagatcactctatttttctgggtgaaaaagaagtttggagaggaagcatagaatgaaacatggagaccataaaattgcttttgctcttgtctagatggctgttgtgaagatgatataaagtggatagatttaggacatttgtaatgtgtagtta

SEQ ID NO: 140269 - DNA, 521 bp, Homo sapiens
gtcataggaggtgatggagagggaagtagaaacaatcagggtctgtgctggatctagagccaacaaaattggttattggattatagggcagaaggcagagcaagatcaaggatatagagtagatttttggctataaaatgtaagcagattgtggagctacttaatgagataagatttggtttaggggacaatcacttttggacattttgaattcgagatagctattaaatatacaattaggaatgtcaatcatgtagacaagttggtatatgataatagttctgatgacaggtcatgccaggagatataaatttaggagtcactgtcatattgataacacttagggagagactacagttagaaaaaatatggcagaaatttggaatacttaacatttagagattgggcagatgaggaggaatatgacagggataaaaagaggaasggtgatttcacagatgtcatggtggggaagaatgtttccaaagggtgggagctgttaactatgtcatatactaatg

SEQ ID NO: 140270 - DNA, 543 bp, Homo sapiens
cttttcaaacctaggaatatcttgagctactgccagaaacttggcaarcaaagcatatagaatggctcatgacacagctgggtagatgaagttgagcgactctgaagtggcacataaactgggtcaggacaacatacaaaccataaagcacatgacttacaatttatagatgaggtaaactaccattgcaagtgagaaaaaagaaagtaatcccttatgtagtccttttctctatgccagatactcagcgaatttccatttgaaatcatgactcacacacattataagcttcttgttcagcctacactcagagacttgaaagtaacttgtttatttattttttcttcttttctctcaggttgtcttttatgcctatataattttagcataatggccagagcacttccaaagtagattgccaaaaatcatgttttaaatatggacaaaatctctgaggcagggaatggttgaatctaacggaaagtttaacatttaccatatcattttaaaagattttgaaaagccaatatcctatgtttttct

SEQ ID NO: 140271 - DNA, 543 bp, Homo sapiens
cttttcaaacctaggaatatcttgagctactgccagaaacttggcaaacaaagcatatagaatggctcatgacacagctgggtagatgaagttgagcgactctgaagtggcacataaactgggtcaggacaacatacaaaccataaagcacatgacttacaatttatagatgaggtaaactaccattgcaagtgagaaaaaagaaagtaatcccttatgtaktccttttctctatgccagatactcagcgaatttccatttgaaatcatgactcacacacattataagcttcttgttcagcctacactcagagacttgaaagtaacttgtttatttattttttcttcttttctctcaggttgtcttttatgcctatataattttagcataatggccagagcacttccaaagtagattgccaaaaatcatgttttaaatatggacaaaatctctgaggcagggaatggttgaatctaacggaaagtttaacatttaccatatcattttaaaagattttgaaaagccaatatcctatgtttttct

SEQ ID NO: 140272 - DNA, 543 bp, Homo sapiens
cttttcaaacctaggaatatcttgagctactgccagaaacttggcaaacaaagcatatagaatggctcatgacacagctgggtagatgaagttgagcgactctgaagtggcacataaactgggtcaggacaacatacaaaccataaagcacatgacttacaatttatagatgaggtaaactaccattgcaagtgagaaaaaagaaagtaatcccttatgtagtccttttctctaygccagatactcagcgaatttccatttgaaatcatgactcacacacattataagcttcttgttcagcctacactcagagacttgaaagtaacttgtttatttattttttcttcttttctctcaggttgtcttttatgcctatataattttagcataatggccagagcacttccaaagtagattgccaaaaatcatgttttaaatatggacaaaatctctgaggcagggaatggttgaatctaacggaaagtttaacatttaccatatcattttaaaagattttgaaaagccaatatcctatgtttttct

SEQ ID NO: 140273 - DNA, 399 bp, Homo sapiens
agtttgtagcactgacatattttcaatgtagactaatgctgaaaagattcaratcaagtataaggaaggttaagtagtaacattagcaataagccacatttttgtttgtaaacatagatgggaggataattaactaggaagtatgaaaacgttagtgtccagactgaattgcttcaatactaattttttctagaaaacccattaaataatttgaacattcaacataaaagcatagactttatagacatagcatggttaactgaaatttacatataactttagaagttagatgagattgctttgctaactaaacattttacaaaacatatcttcaaaattatttatcaaaagctgggtagaagataggagatgaagagagaaggaaataaattcgaattc

SEQ ID NO: 140274 - DNA, 399 bp, Homo sapiens
agtttgtagcactgacatattttcaatgtagactaatgctgaaaagattcaaatcaagtataaggaaggttaagtagtaacatyagcaataagccacatttttgtttgtaaacatagatgggaggataattaactaggaagtatgaaaacgttagtgtccagactgaattgcttcaatactaattttttctagaaaacccattaaataatttgaacattcaacataaaagcatagactttatagacatagcatggttaactgaaatttacatataactttagaagttagatgagattgctttgctaactaaacattttacaaaacatatcttcaaaattatttatcaaaagctgggtagaagataggagatgaagagagaaggaaataaattcgaattc

SEQ ID NO: 140275 - DNA, 546 bp, Homo sapiens
  misc_feature (1)...(546): n = A,T,C or G
ggctatggaccattaactaatcacttcgtgtttgatttatttttctttctctcatttatttatttatttttttagacggggtctgctctgtatcccaggctggagtacagcagcataatctcagctcaytgcaacctctgcctcccgggttcaagctattctcctgcctcaacctcccaagtagctgggattacaggtgtgtgccaccacacctggctaatttttgcatttttagtagagatggggtttcaccatgttggccaggctggcctcgaactcaagtgatccacccgctgtggcctcccaaagtgctggaattagaggcataagccgtggctccaggcccgatttctctttaagccatcttatttaaactgattgaataagtcaaacttacctaaatggatcaaataagccaacttatttaaactgctgaatatatttttttagacacacctctgatcatgtatctggctatttgaaaatcgtttaataatcccagttcatacnnnnnnnnnnnnnnnnnnnnnnnnnnnnnnnnnnnnn

SEQ ID NO: 140276 - DNA, 546 bp, Homo sapiens
  misc_feature (1)...(546): n = A,T,C or G
ggctatggaccattaactaatcacttcgtgtttgatttatttttctttctctcatttatttatttatttttttagacggggtctgctctgtatcccaggctggagtacagcagcataatctcagctcattgcaacctctgcctcccgggttcargctattctcctgcctcaacctcccaagtagctgggattacaggtgtgtgccaccacacctggctaatttttgcatttttagtagagatggggtttcaccatgttggccaggctggcctcgaactcaagtgatccacccgctgtggcctcccaaagtgctggaattagaggcataagccgtggctccaggcccgatttctctttaagccatcttatttaaactgattgaataagtcaaacttacctaaatggatcaaataagccaacttatttaaactgctgaatatatttttttagacacacctctgatcatgtatctggctatttgaaaatcgtttaataatcccagttcatacnnnnnnnnnnnnnnnnnnnnnnnnnnnnnnnnnnnnn

SEQ ID NO: 140277 - DNA, 648 bp, Homo sapiens
atacctcaccagaattctagctattagtatatataattggccattttaatgctttcgtcaagctattttcaagttgctttgaacatctctctctggagctgtttgtttgggtttaatcctctcgatcatttcttttccactctctgcagttgactayagtttttgaggtgaaaatatttagcagagaggtaggaaataaaacatactggaaaaaggaaagaggatgtagagatgccctcaggaacttttttctatgtcatgatttcaggttttcttttatgttgtaatttcaaaaggttaaacatttgcaatttctatagaaaaatcaacaataatggtacaccaaaaataatgtaaaaaatctataacttatattaccttagcaagaacagaatatctaatagtaaaataattttagatacagttaaaacttcagggggaaataatttcctttattttgttcttcattttattttattcctattatattttaattctttcttttatcctttcatttttcaccatgtaaaattacagtgtgttagtaaagaagctcagcattacagcatagaaccagagttacaatttctctgctcactcagatttaaagtatattatgattacttgaactgctttaaaattgtggtt

SEQ ID NO: 140278 - DNA, 568 bp, Homo sapiens
atttgctgttctgaaatatttgctcttctgtagcctccgctggtgatacccaggcaaacagggtctagagtggaactccagcaaactccaacagacctgcagctgagggacctgactattagaaggaaaactaacaaacagaaaggaatagcatcaacatcaacaaaaagttcatctacatcaaaaccccatctgtacgtcaccaacatcaaagtccaaaggtagataaaaccacaaaggtgggaagaaaccagagcagaaaagctgaaaattctaaaactcagagtgcctcttctcctccaaaggactgcagctccttgccagcaacggaacaaagctggatggagaatgactttgatgagttgacagaagtaggcttcagaaggtcagtaataacaaatttctccgagctaaaggaggatgttcaaacccattgcaaggaaactaaaawccttgaaaaaagattagacgaatggctacctagaataaacagtgtagagaagaccttaaatgacctgatggagctgaaaaccatggcatgagaacttcatgacacatgcacaagctt

SEQ ID NO: 140279 - DNA, 255 bp, Homo sapiens
attagtaatcaggcccaaaacaaatkaagcaatacaatgtttttttaaaccatcaaatgaacaaatattaaatgattttttattaactacttttataaatgtccagggatatgggaactctgtaaatcattagcttaactactatttttaaccaattttaggtagaaatttgttagtgacaaagaaattctgtaattatgaatttatcatatagatgtagcatatgtgcataaatacatagacacaaggtttatc

SEQ ID NO: 140280 - DNA, 457 bp, Homo sapiens
attctgtcttagttaattatatatattcaagggtctgagatttcctttagctatagctattaggttctgtttatagtgctttctctaccttctttcccttacatattttgcaatctgagtttcgagttcattttgaaatttagaatgtgtgtttgtttatgtattgacacatttaatttccagacgatagattttttcactttcagattttttctcctaaactaattttaaatattattttattatgatcaaatagaattatctgtaactttaatttttgcctataatttaagaytttttgtaattttagtaagatgaaatgttatgaatatttcatgaggtttaatttcctgtggtaaatttcttgggttcgataaatatacattgggtctaaataatattaaccacattttatttcctcgaataaaatataaatacatattagtataaaaatgcg

SEQ ID NO: 140281 - DNA, 473 bp, Homo sapiens
gatatgatctcatggtaaaattcagacttactgtcatgacctcaggaagatttaagatgttacctcattgtctctattattttggccaaaacacttctaagaatcctaggggtatgaaacctggacctgctcaaataagtagttgtattcctaatactgtaraagtgattcacttctaaagtattcacttctaataggtaattaacctatttaaactttatgtgtaatacatggtagagaatatattgtcttggaaaaaaactgggagtgcattttgtctaactgaggtgattataatttgctaataaaaaatctcaaaaagtttttaaagtgccagatttatgtaaactaaccagagaagtctcttgtctctcaaatctctacagccagcaaatgggctgcaaaagacattctgtgaaaacatgggccacttattggggatgtgaagaatgattcacaatgtagaattaagt

SEQ ID NO: 140282 - DNA, 630 bp, Homo sapiens
ttgtcaacaacaaactgcagtgtgcttattctttattgattatggtggaacatttgtatcccttgaactggcaaaacaacatcagttttcaagaacatttaattgtattataacctgtttaattgttaaaagaaattattgatgcagacattttgcatagtgttacattattttgtttatttttagtttattaatcgtgtttgtagaacttctcctagatccacaagccatctgagaatattgtttccttccacctttaccttgtcactttttaaatattatcttctgagtttaagaatgaaatttgaggttttattatagaaaaatgtaaatatagttataattttgtctgcctcagaaactaacccagattgccaaggtaaaggagaaatagaaagtcratttagttttacataaatctaatatacatctgtaaccaaaacaggacaaaaggctgctgagaaacaaagatcaatgtagaatatgagaagataagtccagctacaaacaaacaaacaaacaaaaacaaaaaccagttcaccaaaatagaggatttatctgaaagggagagaaaaataatcatttttgcagttaaagagtaaagagtaaaggaggaaatacccagccatt

SEQ ID NO: 140283 - DNA, 583 bp, Homo sapiens
gaacattatattcattttacttataagaaagtagggctattcaattttatgtaacttgtcccaagaccacttgagtactgaaactgacactgaaagaaacagagaatccccagatgccaagtcaggcactaatctctcctggtcatggtttcaggccaagttctgggaagtgaggttcatcgtgggatcttacgaagggttagccaatcagtaaggtcactgctaacaagcaaacaggtccattaaaatactgggactttggagcaagatagaccaggttctaatcccagctccgccacttggtaactgtgagaacttgagtaagttacttaccatctctgagtctcactttccttatctatataaggcattttagtattaccccttccataggactgtcacaagaattaaaagagattttrtagtataaaatgctagaaactatttattgttacatagtaaacaaccagtttaataattcattttaaaaatgtatatgtatcacaaagttatacgtaatacaacccacattctcaaaagtgagtgctgtgaagtctttgttctctcaaagccccactaaaac

SEQ ID NO: 140284 - DNA, 554 bp, Homo sapiens
aattgcctgtgattctatagcttcctattttttaattaatttgttttgtagaggtggggtctcactgtgttgcccagactggtccaagtctcaagtgatcctcctgcctaggcgtcaattctatacctttctattcaaagaaaccatgagactgacatcagtgtgtatggaaagtatgttgttatttgtagcagaaaacagaaaaccaagagtttattctcgacagagtaccgaggcctctccaatcacgcctacttggtgaaatgacagtgtcactgtggtagcataattgtgggtttggctgagccaggtgcctgacatacttgccgttgatgacaccatctgggttgagcatgggtatgatcttgaagatgaagttttccctcaagagcctagccacagggtcactgctgaccaggaactccaargtacccttcatcacccaactggcattgctctctcctggatgaactcgagcggtgatcacctgatatggacgatgtcctgcagaaaaagggacataagaaaattaaacccaaattttaatattgctc

SEQ ID NO: 140285 - DNA, 617 bp, Homo sapiens
attgccctgtagttattttccagaaccataagcagttccttaggcactctctaaaaaaagtatttatacatccttagtctttcctcagctaatccattaaactaattaacttttggtccctattcctcattaacagctgctgctctgcctatttgcaaaataataaatttgaaatcatggttgtcaacaaatattatyactaatataagtcttcccattaacttagtgtaattgttatggcagcaaaggtcatgtctctggtcttcgtcactctatttacaatgcttagcacagtgcttgtcacctagtgggaacacattaactatgtattaaatggatggcatgagctagagtttcctggccctgaaactcttcttgcacattaagctaatcctggataagactatcattctgaacaagaaccttgctcccatacacccaacagacacacttatcccatctttatgtctatttttttccttagcttaattttatcattctccacatttacctctttcattatttattttcaatctcttctttggtgtttcatttgttgcagccctgccctttctcccccacctgactctagcaaggcacagttctgggtaggagat

SEQ ID NO: 140286 - DNA, 378 bp, Homo sapiens
ggtgcctgggagaagccatggcgcagccttgcccagatttctgctattcttgcccgggatgaatgatttggttcatcctcacttcctagctgggcttgatcctggacactctaccttgactttccagctttctctactagagaatgctgtgtccttccctgtcactgccagcttttggctgcaaacacctcagctgactgtgaatatttattgtcatgggrcttctgttctatggctcactttcactcaactcgccaggatcaccaggagcttagactgtctcctctgggctgggccaggccttttccttcccattttgaactcagctctacttttgaatgtatttaaagtcctttggtataatgacatgcagcagtg

SEQ ID NO: 140287 - DNA, 546 bp, Homo sapiens
tgtgtggcagccagacgtcatagcaaacaaacaaatttggatctacagtaaagttcagaggcacacagatttacaatttgaatatgaacacttaacaaaacttactaacctgtcaggttctattaattgacctttggagagtagagtattagcagtttatgaagtaaacatcctttaataaaagcttaaaaatgacttktatattttatataattatataaaatattaatgcaacatttgtggaaaacctgaggagcatgcattaaagattgaaaaatactgcttaaaagatagtagagaataattacatttgaggaatggtagagatacctaaattttatcagcaacatcttaaattcttggtcctcaatttcatcattactttcttctctgttttttttttttttaatagaaggtgaggtgctataaaagtaaatgataaaaattgcactgcctcctagggatattttcaagccatgaagtaaaatctatataaacatggacatggtttagtgattgcagatattttatttttctagaatagaa

SEQ ID NO: 140288 - DNA, 546 bp, Homo sapiens
tgtgtggcagccagacgtcatagcaaacaaacaaatttggatctacagtaaagttcagaggcacacagatttacaatttgaatatgaacacttaacaaaacttactaacctgtcaggttctattaattgacctttggagagtagagtattagcagtttatgaagtaaacatcctttaataaaagcttaaaaatgacttttatattttatatmattatataaaatattaatgcaacatttgtggaaaacctgaggagcatgcattaaagattgaaaaatactgcttaaaagatagtagagaataattacatttgaggaatggtagagatacctaaattttatcagcaacatcttaaattcttggtcctcaatttcatcattactttcttctctgttttttttttttttaatagaaggtgaggtgctataaaagtaaatgataaaaattgcactgcctcctagggatattttcaagccatgaagtaaaatctatataaacatggacatggtttagtgattgcagatattttatttttctagaatagaa

SEQ ID NO: 140289 - DNA, 546 bp, Homo sapiens
tgtgtggcagccagacgtcatagcaaacaaacaaatttggatctacagtaaagttcagaggcacacagatttacaatttgaatatgaacacttaacaaaacttactaacctgtcaggttctattaattgacctttggagagtagagtattagcagtttatgaagtaaacatcctttaataaaagcttaaaaatgacttttatattttatataattatataaaatattaatgcaacatttgtggaaaacctgaggagcatgcattaaagattgaaaaatactgcttaaaagatagtagagaataattacatttgaggaatggtagagatacctaaattttatcagcaacatcttaaattcttggtcctcaatttcatcattactttcttctctgttttttttttttttaatagaargtgaggtgctataaaagtaaatgataaaaattgcactgcctcctagggatattttcaagccatgaagtaaaatctatataaacatggacatggtttagtgattgcagatattttatttttctagaatagaa

SEQ ID NO: 140290 - DNA, 526 bp, Homo sapiens
tttagggcagatttttgctcgttaatttagtcaagagaattcgcaaagatagccatgatactattatgtatccttcttttaattggaagtgtccatcatttttttagaataagagctctctaaaatctttttaaattagaagtatctatcttttggccattgacagatagaattttcaatggtctactaaattccagtagtgactcaatccaaacgcctcttccattaagcccaggtggtaattgtccaggtttttagcttataagcaagaggtattcttggagaggacatagtggaggcagttcctacgaccctgaaaaattcattcccagaaataaacttaagatagcaaaagatcacaaaaatccctgtaagtatgagactttttaacataaaactctaagagcttgacaygtttggaatgaaaagtgtgctgcttaaaaacttacatgtctcgccaggcgtggtagctcacacatctgtaatctcagcactttgggaagccgaggcgagtgcatcacctgag

SEQ ID NO: 140291 - DNA, 579 bp, Homo sapiens
ccatagctaaggtcatggatatttatttatttatttattcatttattttcttaaactgaagatgtgcttaagtgagctttatcacacaacagttgtattttaggtttgcctttggctcacatacacgtgtctttaagtataagtgagacctaagcaccaataatagaggtggccctctataacagagaaaaaactctcatataaaatatcgtatgctattctcattctgtttatggaaacaagggcttttatttcacttgcttgcttctaagttaatatctactcactttaaacctttccatcaatcacttagttacagtttcctaatcccttattttcaatttctaaatgtgaacatctctgaaacattctttaagtttgaggtatatgcattgatagaaaarcatggactaaaaaaaactcagtctgtatttatatattcattgtgaattctcaaacattttatcacagaaaaatcaatgtgtttgaagagtgttgcccagacctcagacacattatggtgcacttatggttcatatatagttcattactatatatgcatattacctttctaagatc

SEQ ID NO: 140292 - DNA, 573 bp, Homo sapiens
gagatctaaatgagtaatactayacaccgcataagaggaatcactaattatatttatgtcttggtgaggaaaagtttgtaaggccagcattagggcacctaactttgcctgttgcatagttttgaaatgttcctggattttgtgctgccagttttgcatggcatcttgcacactatacctgccttttttgtttttcctgaatcatctgtaaagacagtagtggcgtgaggcaagggctcagaaacaacaatagatgcgaatttttaacaggtacagtttgtaaaaagttcaggagcttagaggctggtaaatggaaactgatattaccaacaaagtcggccattgcaacttgccaatcaagatcacaagctaacagagtatgaaattgttccttgcttaaaggtaagaaaagagtagcagggtcatatcctgacaattggatggcatccctttatgagaagagaagctattaaatctgtggtcttttgtatgtgtttagaggggttatgaggcaggtaaagccactccaaaggagacacatctgttccaacttgcccaagcatccttgtaggg

SEQ ID NO: 140293 - DNA, 558 bp, Homo sapiens
atcactaattatatttatgtcttggtgaggaaaagtttgtaaggccagcattagggcacctaactttgcctgttgcatagttttgaaatgttcctggattttgtgctgccagttttgcatggcatcttgcacactatacctgccttttttgtttttcctgaatcatctgtaaagacagtagtggcgtgaggcaagggctcagaaacaacaatagatrcgaatttttaacaggtacagtttgtaaaaagttcaggagcttagaggctggtaaatggaaactgatattaccaacaaagtcggccattgcaacttgccaatcaagatcacaagctaacagagtatgaaattgttccttgcttaaaggtaagaaaagagtagcagggtcatatcctgacaattggatggcatccctttatgagaagagaagctattaaatctgtggtcttttgtatgtgtttagaggggttatgaggcaggtaaagccactccaaaggagacacatctgttccaacttgcccaagcatccttgtagggctatgagaggtattaaaaagatct

SEQ ID NO: 140294 - DNA, 551 bp, Homo sapiens
atcactaattatatttatgtcttggtgaggaaaagtttgtaaggccagcattagggcacctaactttgcctgttgcatagttttgaaatgttcctggattttgtgctgccagttttgcatggcatcttgcacactatacctgccttttttgtttttcctgaatcatctgtaaagacagtagtggcgtgaggcaagggctcagaaacaacaatagatgcgaatttttaacaggtacagtttgtaaaaagttcaggagcttagaggctggtaaatggaaactgatattaccaacaaagtcggccattgcaacttgccaatcaagatcacaagctaacagagtatgaaattgttccttgcttaaaggtaagaaaagagtagcagggtcatatcctgacaattggatggcatccctttatgagaagagaagctattaaatctgtggtcttttgtatgkgtttagaggggttatgaggcaggtaaagccactccaaaggagacacatctgttccaacttgcccaagcatccttgtagggctatgagaggtattaaa

SEQ ID NO: 140295 - DNA, 517 bp, Homo sapiens
gagagcagaacaggtgagaagcccaggtgccaatggccaagggatggtgggaagtagcttccagagacacattttgattctgattttaatgacaagagataaagccaataatgatataccctgagctagcccctgaatttgggaagggactgtgggacaacagataaaggacaaggctttggtccaaaagaaatatgtccttagcttagctctatgaatctgggcaagtcattgagcatctctaggcctcagttttcttatctgcaaagtgggaataatcatatacatcatcactgtgtggctatcaccagtgcttcctaactgtttttatgtcatgggcacacacagakgtctgtgtgccaccctggagttaatcaacaaggctatctgcaactgaacataattgtctgtggacgtcagccctgtaccccaaaatctgatggaattaatatcttcacacacttgtaacccattcagggcacactcatgctccacagcaccatggtaaggaagatct

SEQ ID NO: 140296 - DNA, 496 bp, Homo sapiens
ctcaaattctcttaccctcgtgtttcacaagtttttctccaagtaactaagcaaaatcctctgtattaaaaaaaaaaaaaatccatggttggaaaagtaaaaagttctacatgcttctgtgtcccctcttagagccacagtacccaaggacaatgcacagacagcaatgctccataaaaagagagcttcctgcagccaaggccccctttgagctttattgaacccactaatcccaaaaccaccttgacccctgaattcttttcttgtgcagcacatattaatatcctgcattcaagccagtaacaattgaaccagagaaatgaaaataaaaattaaaaatattctgcagaactcacatttgacaaaacaatggcatcattgcctcctkcaggcaggaacctctgccaccactattgtcctgggctgggagtactttcattataacaatgattctaccatattttgaatgttttattatgaaattgttttgaaaaaa

SEQ ID NO: 140297 - DNA, 609 bp, Homo sapiens
cagtgcaaaagagagcaggactgtagatctgagagaagcctgcccatgacttttttttttctaatgccctcactttaacagaattgcccatgactcgagactcccaaaaaggggttatgaatgatgctttttttgtgtgttcctcaaggggtcttgaggttgctagaaacctcctatgtagtactgaagatggcaaggaaaaggagaagccaagtggraagaaatggaagatctttgggaggccaaggcaggtggatcacgaggtcaagagatcgagatcatcctggccaacatagtgaaaccctgtctctactaaaaatacaaaaattagctgggcatggtggcatgcacctgtagtcccagctactcaggaggctgaggcaggagaatcacttgaacccgggaggcagaggatgcagtgagccaagatcatgccactgcactccagccttgtgatagagcaagactcagggggaaaaaaaaaaacgaaaaagaaaaagaaatggaagatcaagttttaaaggaaccaatttggggagattttaagctttctcaaaggctaaagtttcacatttttctaagcaaaatcatgccaacaggaaaggaagc

SEQ ID NO: 140298 - DNA, 266 bp, Homo sapiens
ccaccaaattataggctgacacctccctgtttcctcccacccaaagcataattcatcttttcagttctactgggatattacattactttgggactttagaggtaagctgtgaatgaactctagtgcatctgtgctatggcctattaataaattctttaacaatgattcaccrtgggctttgaaacaagttaatatctattaatttgccttgccttaaatacaaattcttcctttcccaatagaacgtccctttgaaaatgattact

SEQ ID NO: 140299 - DNA, 612 bp, Homo sapiens
ataaaaaaaactaacaaatctcttaggaamaatatagaggaaagacattacattggtcttggcaccacttatgatattaatgcatgagcaacaaagaaaagaacagaaaaactgaattacgctatacttcaaaatttttacacatcaaagaaaacattcaagagagtgacaacgtcccctaggaaataagtgaaaatgtttgcaaatcacatgtgataggagctaatattcagaatatataaacaactcttcaaactgaacaataaagttgaataacttgatgagaaatgaagatatgaagaacagaaatgaagaaataattgaactttatcatataaagtttatcatataaagtatcatataaagttcaataatattgaattttaaataattgaatctttatcaagagatatatatacatgggaaaaagcatttgaaaggacagacaaaattactaacttatagagaaatgcataaaaagcacaatgaaaaacaaaatcacctcataccagttagaatagccactatacattttttaaaaggcaccaaatctgttgatgcaatgaaaataaaacccatgttattttttggtgaaaaacaaggatgtagcca

SEQ ID NO: 140300 - DNA, 612 bp, Homo sapiens
ataaaaaaaactaacaaatctcttaggaacaatatagaggaaagacattacattggtcttggcaccacttatgatattaatgcatgagcaacaaagaaaagaacagaaaaactgaattacgctatacttcaaaatttttacacatcaaagaaaacattcaagagagtgacaaygtcccctaggaaataagtgaaaatgtttgcaaatcacatgtgataggagctaatattcagaatatataaacaactcttcaaactgaacaataaagttgaataacttgatgagaaatgaagatatgaagaacagaaatgaagaaataattgaactttatcatataaagtttatcatataaagtatcatataaagttcaataatattgaattttaaataattgaatctttatcaagagatatatatacatgggaaaaagcatttgaaaggacagacaaaattactaacttatagagaaatgcataaaaagcacaatgaaaaacaaaatcacctcataccagttagaatagccactatacattttttaaaaggcaccaaatctgttgatgcaatgaaaataaaacccatgttattttttggtgaaaaacaaggatgtagcca

SEQ ID NO: 140301 - DNA, 249 bp, Homo sapiens
gtgaattcctcaaactcttgcatattyaaaattacatttttgaaccttgatgcttgaagtgtagcttgggtaacgggtgggctttaagccaattttggcatgcaaggggttgagtttattaggcatcagcacctctgaaaatcgtggggatgcaggcttaatttcaacactattctaaatacttgaaagatattatataactctttaataaactcctgtgtctacaaatggttcacattaactcaatat

SEQ ID NO: 140302 - DNA, 386 bp, Homo sapiens
gaattcctcaaactcttgcatatttaaaatkacatttttgaaccttgatgcttgaagtgtagcttgggtaacgggtgggctttaagccaattttggcatgcaaggggttgagtttattaggcatcagcacctctgaaaatcgtggggatgcaggcttaatttcaacactattctaaatacttgaaagatattatataactctttaataaactcctgtgtctacaaatggttcacattaactcaatatccatgattaaacatctataaaatcaaggcactgttatttagtggagacttgctggctattctatgagaggaggtattgttattgtaatctcatcctctcataaaagtgtatcatattactcataaccagcccttcatat

SEQ ID NO: 140303 - DNA, 414 bp, Homo sapiens
gaattcctcaaactcttgcatatttaaaattacatttttgaaccttgatgcttgaagtgtagcttgggtaacgggtgggctttmagccaattttggcatgcaaggggttgagtttattaggcatcagcacctctgaaaatcgtggggatgcaggcttaatttcaacactattctaaatacttgaaagatattatataactctttaataaactcctgtgtctacaaatggttcacattaactcaatatccatgattaaacatctataaaatcaaggcactgttatttagtggagacttgctggctattctatgagaggaggtattgttattgtaatctcatcctctcataaaagtgtatcatattactcataaccagcccttcatattctattcctattttggtatttaaaaata

SEQ ID NO: 140304 - DNA, 249 bp, Homo sapiens
gtgaattcctcaaactcttgcatatttaaaattacatttttgaaccttgatgcttgaagtgtagcttgggtaacgggtgggctttaagccaattttggcatgcaaggggttgagttwattaggcatcagcacctctgaaaatcgtggggatgcaggcttaatttcaacactattctaaatacttgaaagatattatataactctttaataaactcctgtgtctacaaatggttcacattaactcaatat

SEQ ID NO: 140305 - DNA, 388 bp, Homo sapiens
gaattcctcaaactcttgcatatttaaaattacatttttgaaccttgatgcttgaagtgtagcttgggtaacgggtgggctttaagccaattttggcatgcaaggggttgagtttattaggcatcagcacckctgaaaatcgtggggatgcaggcttaatttcaacactattctaaatacttgaaagatattatataactctttaataaactcctgtgtctacaaatggttcacattaactcaatatccatgattaaacatctataaaatcaaggcactgttatttagtggagacttgctggctattctatgagaggaggtattgttattgtaatctcatcctctcataaaagtgtatcatattactcataaccagcccttcatattc

SEQ ID NO: 140306 - DNA, 388 bp, Homo sapiens
gaattcctcaaactcttgcatatttaaaattacatttttgaaccttgatgcttgaagtgtagcttgggtaacgggtgggctttaagccaattttggcatgcaaggggttgagtttattaggcatcagcacctctgaaaatcgtggggatgcaggcttaatttcaacackattctaaatacttgaaagatattatataactctttaataaactcctgtgtctacaaatggttcacattaactcaatatccatgattaaacatctataaaatcaaggcactgttatttagtggagacttgctggctattctatgagaggaggtattgttattgtaatctcatcctctcataaaagtgtatcatattactcataaccagcccttcatattc

SEQ ID NO: 140307 - DNA, 388 bp, Homo sapiens
gaattcctcaaactcttgcatatttaaaattacatttttgaaccttgatgcttgaagtgtagcttgggtaacgggtgggctttaagccaattttggcatgcaaggggttgagtttattaggcatcagcacctctgaaaatcgtggggatgcaggcttaatttcaacactmttctaaatacttgaaagatattatataactctttaataaactcctgtgtctacaaatggttcacattaactcaatatccatgattaaacatctataaaatcaaggcactgttatttagtggagacttgctggctattctatgagaggaggtattgttattgtaatctcatcctctcataaaagtgtatcatattactcataaccagcccttcatattc

SEQ ID NO: 140308 - DNA, 388 bp, Homo sapiens
gaattcctcaaactcttgcatatttaaaattacatttttgaaccttgatgcttgaagtgtagcttgggtaacgggtgggctttaagccaattttggcatgcaaggggttgagtttattaggcatcagcacctctgaaaatcgtggggatgcaggcttaatttcaacactattctaaatacttgraagatattatataactctttaataaactcctgtgtctacaaatggttcacattaactcaatatccatgattaaacatctataaaatcaaggcactgttatttagtggagacttgctggctattctatgagaggaggtattgttattgtaatctcatcctctcataaaagtgtatcatattactcataaccagcccttcatattc

SEQ ID NO: 140309 - DNA, 388 bp, Homo sapiens
gaattcctcaaactcttgcatatttaaaattacatttttgaaccttgatgcttgaagtgtagcttgggtaacgggtgggctttaagccaattttggcatgcaaggggttgagtttattaggcatcagcacctctgaaaatcgtggggatgcaggcttaatttcaacactattctaaatacttgaaagatattrtataactctttaataaactcctgtgtctacaaatggttcacattaactcaatatccatgattaaacatctataaaatcaaggcactgttatttagtggagacttgctggctattctatgagaggaggtattgttattgtaatctcatcctctcataaaagtgtatcatattactcataaccagcccttcatattc

SEQ ID NO: 140310 - DNA, 388 bp, Homo sapiens
gaattcctcaaactcttgcatatttaaaattacatttttgaaccttgatgcttgaagtgtagcttgggtaacgggtgggctttaagccaattttggcatgcaaggggttgagtttattaggcatcagcacctctgaaaatcgtggggatgcaggcttaatttcaacactattctaaatacttgaaagatattatataaytctttaataaactcctgtgtctacaaatggttcacattaactcaatatccatgattaaacatctataaaatcaaggcactgttatttagtggagacttgctggctattctatgagaggaggtattgttattgtaatctcatcctctcataaaagtgtatcatattactcataaccagcccttcatattc

SEQ ID NO: 140311 - DNA, 414 bp, Homo sapiens
gaattcctcaaactcttgcatatttaaaattacatttttgaaccttgatgcttgaagtgtagcttgggtaacgggtgggctttaagccaattttggcatgcaaggggttgagtttattaggcatcagcacctctgaaaatcgtggggatgcaggcttaatttcaacactattctaaatacttgaaagatattatataactctttaataaactcctgtgtctacaaatggttcacattaactcaatatccatgattaaacatytataaaatcaaggcactgttatttagtggagacttgctggctattctatgagaggaggtattgttattgtaatctcatcctctcataaaagtgtatcatattactcataaccagcccttcatattctattcctattttggtatttaaaaata

SEQ ID NO: 140312 - DNA, 389 bp, Homo sapiens
cttgaagtgtagcttgggtaacgggtgggctttaagccaattttggcatgcaaggggttgagtttattaggcatcagcacctctgaaaatcgtggggatgcaggcttaatttcaacactattctaaatacttgaaagatattatataactctttaataaactcctgtgtctacaaatggttcacattaactcaatatccatgattaaacatctayaaaatcaaggcactgttatttagtggagacttgctggctattctatgagaggaggtattgttattgtaatctcatcctctcataaaagtgtatcatattactcataaccagcccttcatattctattcctattttggtatttaaaaataagatatctttgaaacacttgaattc

SEQ ID NO: 140313 - DNA, 362 bp, Homo sapiens
aagtgtagcttgggtaacgggtgggctttaagccaattttggcatgcaaggggttgagtttattaggcatcagcacctctgaaaatcgtggggatgcaggcttaatttcaacactattctaaatacttgaaagatattatataactctttaataaactcctgtgtctacaaatggttcacattaactcaatatccatgattaaacatctataaaatcaaggcactgttatttaktggagacttgctggctattctatgagaggaggtattgttattgtaatctcatcctctcataaaagtgtatcatattactcataaccagcccttcatattctattcctattttggtatttaaaaataag

SEQ ID NO: 140314 - DNA, 362 bp, Homo sapiens
aagtgtagcttgggtaacgggtgggctttaagccaattttggcatgcaaggggttgagtttattaggcatcagcacctctgaaaatcgtggggatgcaggcttaatttcaacactattctaaatacttgaaagatattatataactctttaataaactcctgtgtctacaaatggttcacattaactcaatatccatgattaaacatctataaaatcaaggcactgttatttagtggagacttgctgrctattctatgagaggaggtattgttattgtaatctcatcctctcataaaagtgtatcatattactcataaccagcccttcatattctattcctattttggtatttaaaaataag

SEQ ID NO: 140315 - DNA, 415 bp, Homo sapiens
aattcctcaaactcttgcatatttaaaattacatttttgaaccttgatgcttgaagtgtagcttgggtaacgggtgggctttaagccaattttggcatgcaaggggttgagtttattaggcatcagcacctctgaaaatcgtggggatgcaggcttaatttcaacactattctaaatacttgaaagatattatataactctttaataaactcctgtgtctacaaatggttcacattaactcaatatccatgattaaacatctataaaatcaaggcactgttatttagtggagacttgctggctattctatgagaggaggtattgttattgtaatctcrtcctctcataaaagtgtatcatattactcataaccagcccttcatattctattcctattttggtatttaaaaataag

SEQ ID NO: 140316 - DNA, 389 bp, Homo sapiens
cttgaagtgtagcttgggtaacgggtgggctttaagccaattttggcatgcaaggggttgagtttattaggcatcagcacctctgaaaatcgtggggatgcaggcttaatttcaacactattctaaatacttgaaagatattatataactctttaataaactcctgtgtctacaaatggttcacattaactcaatatccatgattaaacatctataaaatcaaggcactgttatttagtggagacttgctggctattctatgagaggaggtattgttattgtaatctcatcmtctcataaaagtgtatcatattactcataaccagcccttcatattctattcctattttggtatttaaaaataagatatctttgaaacacttgaattc

SEQ ID NO: 140317 - DNA, 388 bp, Homo sapiens
gaattcctcaaactcttgcatatttaaaattacatttttgaaccttgatgcttgaagtgtagcttgggtaacgggtgggctttaagccaattttggcatgcaaggggttgagtttattaggcatcagcacctctgaaaatcgtggggatgcaggcttaatttcaacactattctaaatacttgaaagatattatataactctttaataaactcctgtgtctacaaatggttcacattaactcaatatccatgattaaacatctataaaatcaaggcactgttatttagtggagacttgctggctattctatgagaggaggtattgttattgtaatctcatcctctcataaawgtgtatcatattactcataaccagcccttcatattc

SEQ ID NO: 140318 - DNA, 415 bp, Homo sapiens
aattcctcaaactcttgcatatttaaaattacatttttgaaccttgatgcttgaagtgtagcttgggtaacgggtgggctttaagccaattttggcatgcaaggggttgagtttattaggcatcagcacctctgaaaatcgtggggatgcaggcttaatttcaacactattctaaatacttgaaagatattatataactctttaataaactcctgtgtctacaaatggttcacattaactcaatatccatgattaaacatctataaaatcaaggcactgttatttagtggagacttgctggctattctatgagaggaggtattgttattgtaatctcatcctctcataaaaktgtatcatattactcataaccagcccttcatattctattcctattttggtatttaaaaataag

SEQ ID NO: 140319 - DNA, 362 bp, Homo sapiens
aagtgtagcttgggtaacgggtgggctttaagccaattttggcatgcaaggggttgagtttattaggcatcagcacctctgaaaatcgtggggatgcaggcttaatttcaacactattctaaatacttgaaagatattatataactctttaataaactcctgtgtctacaaatggttcacattaactcaatatccatgattaaacatctataaaatcaaggcactgttatttagtggagacttgctggctattctatgagaggaggtattgttattgtaatctcatcctctcataaaagtgtatcatattactcataaycagcccttcatattctattcctattttggtatttaaaaataag

SEQ ID NO: 140320 - DNA, 415 bp, Homo sapiens
aattcctcaaactcttgcatatttaaaattacatttttgaaccttgatgcttgaagtgtagcttgggtaacgggtgggctttaagccaattttggcatgcaaggggttgagtttattaggcatcagcacctctgaaaatcgtggggatgcaggcttaatttcaacactattctaaatacttgaaagatattatataactctttaataaactcctgtgtctacaaatggttcacattaactcaatatccatgattaaacatctataaaatcaaggcactgttatttagtggagacttgctggctattctatgagaggaggtattgttattgtaatctcatcctctcataaaagtgtatcatattactcataaccagcccttcatatyctattcctattttggtatttaaaaataag

SEQ ID NO: 140321 - DNA, 481 bp, Homo sapiens
  misc_feature (1)...(481): n = A,T,C or G
ttgcagtgagttgagatcacaccagtgcattccagcctaggtgacggagtgagaccctgtctcanagaaacaaaaaaaaaaaaaaaaaaaaaaggaagaagaagaagaagaagtagaaaaaaatcttgaatataaatggattaagttcttcaattaaaaggtacactacagcctgggcaacagagagacaccctgtctcaaagaaagaaagaaaaaaaaggtatacattggttgaatagattaaaacacaaaatctaagtatacattgcctagaagaaacacgcttcacaagcaagaatcaaaacatataccaaaacctatggtatgcaacaaaagcagttctaagagataagtatacagcaataaatggctacatcaaaaaagaagaacaatctggtttttaattttttttagggacagtttygctgttgtccaggctggagtccccaggagtttgaggttgctgtgagctatgactgtg

SEQ ID NO: 140322 - DNA, 481 bp, Homo sapiens
  misc_feature (1)...(481): n = A,T,C or G
ttgcagtgagttgagatcacaccagtgcattccagcctaggtgacggagtgagaccctgtctcanagaaacaaaaaaaaaaaaaaaaaaaaaaggaagaagaagaagaagaagtagaaaaaaatcttgaatataaatggattaagttcttcaattaaaaggtacactacagcctgggcaacagagagacaccctgtctcaaagaaagaaagaaaaaaaaggtatacattggttgaatagattaaaacacaaaatctaagtatacattgcctagaagaaacacgcttcacaagcaagaatcaaaacatataccaaaacctatggtatgcaacaaaagcagttctaagagataagtatacagcaataaatggctacatcaaaaaagaagaacaatctggtttttaattttttttagggacagtttcgctgttgtccaggmtggagtccccaggagtttgaggttgctgtgagctatgactgtg

SEQ ID NO: 140323 - DNA, 577 bp, Homo sapiens
tattttggtcctttgaatgagccatactttcccattctttgtatgccttgtaactttttttgaagactgcacattataataattataattactatgtggttactctgtaaatcagacccccccctacaaacacactaatgttttgtggttttaaattttatttacttattacattgttaaagtttttatttttagtgaaattttccaaagtgatttacaaaactgtttgctttataaggtgtggtcaccgaagtctttttgtttccttaataaatgttaagctaatgttttgacagtgattttcttgtatgtcaggaactaagcaaacaggcaaatacaacaaaaacaaaaagaaaaacaagtaatcattagccagcaaaatatgtctctaggccatgcagactggctttgtgctgggttctttaaagcctgcacaaagtgtatgttcactcttgcactgagtgaagttcaagttcactcttgcgcagagcttgcactgaggggagggatcggccaaggtaaaagtgtaggctcttcttatgacatttgwcatcatgtggcttaacctatgcataca

SEQ ID NO: 140324 - DNA, 615 bp, Homo sapiens
ttttcttcctgtgctgaaggtgatctactrtatgtgtaaactctaatttttgccctaagcgtctgtggtttcttaggtctccttgctgagtttcttaataatgtccattccttatctgttctgtattctagcaacacagaaaaaaaaagcctttcactagtccttcaggtatcccccagaccagtcagaacagacacataataatttgcgggtaagatcttctcttgttcctttgggcgatggaccaggcttcctcactgggaacgtgggcttctgacacttcagaactgccaccctcctcgggcaaaggcaagttaaaaatgtcgtaaagttttccagttgtcttttccttgagtctgctttcacttggttgttgtaatcttttgaccattttccagagttttggcaaagtttattcggacagtttctcttagttgtgtgatgtttctgtggggaaatgaaagattgcagctgtctccactgccattttgctgatgctcctcttttgtgaatttttgcttcatgttcttatgctttgttattagttcatgtattagttttctagggctgccataaccaagtaacacaaactgggtgccttgaacaacatacatt

SEQ ID NO: 140325 - DNA, 615 bp, Homo sapiens
ttttcttcctgtgctgaaggtgatctactgtatgtgtaaactctaatttttgccctaagygtctgtggtttcttaggtctccttgctgagtttcttaataatgtccattccttatctgttctgtattctagcaacacagaaaaaaaaagcctttcactagtccttcaggtatcccccagaccagtcagaacagacacataataatttgcgggtaagatcttctcttgttcctttgggcgatggaccaggcttcctcactgggaacgtgggcttctgacacttcagaactgccaccctcctcgggcaaaggcaagttaaaaatgtcgtaaagttttccagttgtcttttccttgagtctgctttcacttggttgttgtaatcttttgaccattttccagagttttggcaaagtttattcggacagtttctcttagttgtgtgatgtttctgtggggaaatgaaagattgcagctgtctccactgccattttgctgatgctcctcttttgtgaatttttgcttcatgttcttatgctttgttattagttcatgtattagttttctagggctgccataaccaagtaacacaaactgggtgccttgaacaacatacatt

SEQ ID NO: 140326 - DNA, 615 bp, Homo sapiens
ttttcttcctgtgctgaaggtgatctactgtatgtgtaaactctaatttttgccctaagcgtctgtggtttsttaggtctccttgctgagtttcttaataatgtccattccttatctgttctgtattctagcaacacagaaaaaaaaagcctttcactagtccttcaggtatcccccagaccagtcagaacagacacataataatttgcgggtaagatcttctcttgttcctttgggcgatggaccaggcttcctcactgggaacgtgggcttctgacacttcagaactgccaccctcctcgggcaaaggcaagttaaaaatgtcgtaaagttttccagttgtcttttccttgagtctgctttcacttggttgttgtaatcttttgaccattttccagagttttggcaaagtttattcggacagtttctcttagttgtgtgatgtttctgtggggaaatgaaagattgcagctgtctccactgccattttgctgatgctcctcttttgtgaatttttgcttcatgttcttatgctttgttattagttcatgtattagttttctagggctgccataaccaagtaacacaaactgggtgccttgaacaacatacatt

SEQ ID NO: 140327 - DNA, 299 bp, Homo sapiens
tggatctcttgtttctgttgagttacagattcagctggctrtttctccaaatgttagttatttggagaaaaaaatgatggtaattttggggtaacaaatacaatatttgatgaaagcaaatttattgagggttagacaaactacaagatactttaggctgcaaagtcaacacgagacttctggcccaaattgtgcagactttgggtccagctgcaaagttcaaaggaggaggccatataagacgattctcacttttagacaccaactgccggttcaggggtttccccagaacaccctca

SEQ ID NO: 140328 - DNA, 299 bp, Homo sapiens
tggatctcttgtttctgttgagttacagattcagctggctgtttctccmaatgttagttatttggagaaaaaaatgatggtaattttggggtaacaaatacaatatttgatgaaagcaaatttattgagggttagacaaactacaagatactttaggctgcaaagtcaacacgagacttctggcccaaattgtgcagactttgggtccagctgcaaagttcaaaggaggaggccatataagacgattctcacttttagacaccaactgccggttcaggggtttccccagaacaccctca

SEQ ID NO: 140329 - DNA, 299 bp, Homo sapiens
tggatctcttgtttctgttgagttacagattcagctggctgtttctccaaatgttagttatttggagaaaaaaatgatggtaattttggggtaacaaatacaatatttgatgaaagcaaatttattgagggttagacaaactacaagatactttaggctgcaaagtcaacacgagacttctggcccaaattgtgcagactttgsgtccagctgcaaagttcaaaggaggaggccatataagacgattctcacttttagacaccaactgccggttcaggggtttccccagaacaccctca

SEQ ID NO: 140330 - DNA, 551 bp, Homo sapiens
atatatatgtctatgtatgtgtgtwtatctataatatataaataaaatatgtgtttacatatgacttataactttcaagtctgtcaatacgtttttgtttgcttgaaatagataaatattgttagtatgatattatgtataatttctctgatcactgaaattgaatggtaagagcacataataaaggccagaggcatttgctaaaatcctaattttttaagcctcattcctgacctgataaatggtcacacagtacttacaagtaatggttgctgcaaaaactcttgagataatatatgagaaatgtaagtgaaaggtaatttttaaaaagcgtatccctctatgctcattatttataaattcttaaatatcttaagaattttttttcatgtctcagagttctccgggttaaagcactggtagatcatcaataaaagaatggaggatttcctgctaactcctacattctattgtggacaaagaaggtggcagtttgtcctgagccaaagcatttttttttttttttgaagaggggcacagaatgttcagaa

SEQ ID NO: 140331 - DNA, 546 bp, Homo sapiens
tatatatgtctatgtatgtgtgtttatctataatatataaataaaatatrtgtttacatatgacttataactttcaagtctgtcaatacgtttttgtttgcttgaaatagataaatattgttagtatgatattatgtataatttctctgatcactgaaattgaatggtaagagcacataataaaggccagaggcatttgctaaaatcctaattttttaagcctcattcctgacctgataaatggtcacacagtacttacaagtaatggttgctgcaaaaactcttgagataatatatgagaaatgtaagtgaaaggtaatttttaaaaagcgtatccctctatgctcattatttataaattcttaaatatcttaagaattttttttcatgtctcagagttctccgggttaaagcactggtagatcatcaataaaagaatggaggatttcctgctaactcctacattctattgtggacaaagaaggtggcagtttgtcctgagccaaagcatttttttttttttttgaagaggggcacagaatgttc

SEQ ID NO: 140332 - DNA, 552 bp, Homo sapiens
ctcctgccaccacataagacatgcctgcttctcctttgccttctaccgtgactgtaagtttcctgaggcctcccaagccatgcagaactgagagtcaattaaacttactttctttacaaattgtccagtctcaggtagttctttatagcagtgtgaaaacggactaatacaggaggcaaaagcatatcaatgcttgtctggggatgagaacttggtgacaggtaagaaagtgacactataaaagggctggaagcatttttggggggtgatrgatgttaccatcttgggctcatgggtgtatgtttatgtaaaaacacaatttttttctttaccaaaaacaaggtgaaggtaggtcaattacatttcaataaaactgttaaaattgttaaaaataaataaatgtccattcatgaaaataattcagagaaacttaaaaaatctgtcctggatgactaccatcaaaaccaaaatggtttctccttctgatgtatagtttgcacaaaagtaaacactgaaggagtaccttcccgtggtgcaaaaagcaaagaaaat

SEQ ID NO: 140333 - DNA, 482 bp, Homo sapiens
ccaatataaagatattccacaggccgtgtgcagtggctcatgcctgtaatcacacaacttcgggaggccaaggtgggtggatcatgaggtcaggagttcgagaccaacctggccaacatggtgaaactctgtctctactaaaaagatacaaaaaaaaaaaaaattagccaggagtggtctcatgtgcctgtaatcctagctactygggatgctgaggcaggagaatcgcttgaacccaggaggaggaggttccagtgagctgagattgcgccactacactgcagcctgggtgacaggacgagactccatctcaaaaaaaaaaagatattccataatttcactctatactcaatatttaacaataattaacataaatcaaatagaaaattgaaatgtatcttataaaataatggatttgaatatcctaatgtagtctataagaactgcaagggcactcaattagctgttgtagttaagaattc

SEQ ID NO: 140334 - DNA, 530 bp, Homo sapiens
tcttgcttataaatattgatgatatacagacatcagtttaccactacagaagaaattgagactcttttcagcaaacctcagatagaaagctgaaaccaggcagggaaaataattggacacatttatatttgctgcaaatgatcacttatttattttgctaaaatccaatcttcacatatattctrtgatatattgaattcaagggtttatctcaaaactttgcattttaaattatcaccacttccaacaccagaaaagtggtttaattaaaaatttaattccaaccacttatttcctaaggattatcttttgcatcatataaataacatgagaaagggattataaatttgatggatgtatgaatttactttcattttgtgaatattgatgatgtttctcagagcagggagcttatcgactctcaagattcagttgcacatacacgatgattcccagatctccactctatttctgctgtgggctgcatattgactttttaatatctctattagtatagcatcttaaattca

SEQ ID NO: 140335 - DNA, 578 bp, Homo sapiens
aggaaacagaaaaaaaatacactaaatgcacttttctattattggctgagtgagataaatcccatttcgcatcctgcacaggtgcacctcattttgttgtggtgttgcagacattgcatttttcacaaattgaagcatagtttttccaacacgttcacacttcacttctctgctttgcattgggtaatgcctgtcatatttaaaaccttttcattaatattatatctgwtatggtgacctgtggtcagcaatcattgctgtgactattataattgttttggcgtgccacaaaccacaccgatataagaaaacaaacttcatcaatacgtgtcatgtgtgttctcactgttcaacctaccaagtgttcccccacctctctctccctcttcttggacctccctattcactgaaacacagaattattaaaatcagactaattaataaacttgcaatggtcacgaagtttttacataaaaggaagagatgcacatctctcacttttaatcagaagctggaaatgattaagcttaggagggaaagcatgtcaaaagtcaagacgggccaagagctagatctct

SEQ ID NO: 140336 - DNA, 578 bp, Homo sapiens
aggaaacagaaaaaaaatacactaaatgcacttttctattattggctgagtgagataaatcccatttcgcatcctgcacaggtgcacctcattttgttgtggtgttgcagacattgcatttttcacaaattgaagcatagtttttccaacacgttcacacttcacttctctgctttgcattgggtaatgcctgtcatatttaaaaccttttcattaatattatatctgttatggtgacctgtggtcagcaatcattgctgtgactattataattgttttggcgtgccacaaaccacaccgatataagaaaacaaacttmatcaatacgtgtcatgtgtgttctcactgttcaacctaccaagtgttcccccacctctctctccctcttcttggacctccctattcactgaaacacagaattattaaaatcagactaattaataaacttgcaatggtcacgaagtttttacataaaaggaagagatgcacatctctcacttttaatcagaagctggaaatgattaagcttaggagggaaagcatgtcaaaagtcaagacgggccaagagctagatctct

SEQ ID NO: 140337 - DNA, 578 bp, Homo sapiens
aggaaacagaaaaaaaatacactaaatgcacttttctattattggctgagtgagataaatcccatttcgcatcctgcacaggtgcacctcattttgttgtggtgttgcagacattgcatttttcacaaattgaagcatagtttttccaacacgttcacacttcacttctctgctttgcattgggtaatgcctgtcatatttaaaaccttttcattaatattatatctgttatggtgacctgtggtcagcaatcattgctgtgactattataattgttttggcgtgccacaaaccacaccgatataagaaaacaaacttcatcaatacgtgtcatgtgtgttctcactgttcaacctaccaagtgttcccccacctctctctccctcttcttggacctccctattcactgaaacacagaattattaaaatcagaytaattaataaacttgcaatggtcacgaagtttttacataaaaggaagagatgcacatctctcacttttaatcagaagctggaaatgattaagcttaggagggaaagcatgtcaaaagtcaagacgggccaagagctagatctct

SEQ ID NO: 140338 - DNA, 578 bp, Homo sapiens
aggaaacagaaaaaaaatacactaaatgcacttttctattattggctgagtgagataaatcccatttcgcatcctgcacaggtgcacctcattttgttgtggtgttgcagacattgcatttttcacaaattgaagcatagtttttccaacacgttcacacttcacttctctgctttgcattgggtaatgcctgtcatatttaaaaccttttcattaatattatatctgttatggtgacctgtggtcagcaatcattgctgtgactattataattgttttggcgtgccacaaaccacaccgatataagaaaacaaacttcatcaatacgtgtcatgtgtgttctcactgttcaacctaccaagtgttcccccacctctctctccctcttcttggacctccctattcactgaaacacagaattattaaaatcagactaattaataaacttgcaatggtcacraagtttttacataaaaggaagagatgcacatctctcacttttaatcagaagctggaaatgattaagcttaggagggaaagcatgtcaaaagtcaagacgggccaagagctagatctct

SEQ ID NO: 140339 - DNA, 429 bp, Homo sapiens
ttttttaaatggatgatgtaattttaaaagtcatttttgaaaaacctgtaggaaactattatattgccatgaatttcagctagggaatgaaagtcaattgctcactgatactttacaaaataaaaatgtcccagaatatttgaaatattcgatatataatatatggggaagaagcgattctacctctyaaataagtattctgaatggacgttttggtattccattattatggactctagttacatctgaattcacgcttaagtggccataaagaatgctcaaatttcttaagaggtatgtttttaaagagcatgccaaatgtttaaaaatggctactggattaattttcattcctttcaaatttcctttggttaaatggtttgaagtgcttcatgacagtgctaaacatatattagaggactgaaaaat

SEQ ID NO: 140340 - DNA, 549 bp, Homo sapiens
actcattttaggaagtagaggtttgaagtgagaagggcagattagagcaacaatgggaaaccacrcagtccatgacaccagaaattatttggaagtttcttgctgtaaaaccaccaaaagtgcataggtggcaaaaacaaatggtagctaaaagctttgataaaaatatgacgattactggaaagtagacataaattgcatctttaaaaagtgatagggagaatatctatgagtaaaaatatatgataattgatgagtcaaaggatggggacttggctttagaaatgacatgagctgatgattcagaattgctgaataggtccaaaagtggcccagtctaagtaaaacagggagggaagactggattgacactcgcacactcatctgtctatgacaaagaacaaagaacctagaattttggcattgatgagtaatgatttaattgtctgtgccacccaatctttttctttgttatcttttttccttttcttttttttttaactaataatgaaatttgaactttaaataacaatctgaaggaggaagctt

SEQ ID NO: 140341 - DNA, 629 bp, Homo sapiens
gtgcaatagcaccatctcggctcaccacaacctccgcctcccgggttcaagtgattttcctgcctcagcctcctgagtagctgggattaaaagcatgtgccaccacacacagctaattttgtttttttagtagagacagagtttctccatgttggccaggctggtctcaaactcctgacctcaggtgatccatccacctcagcctcccttaagtgctgggattacagccatgagccaccatgcccagactacatcttagtctttatggagattacatgtataaaaatatactgaactttacacataacgtgcactgtagctatgttctaccttgatrtggtttggctgtgttcccacccaaatctcatcttgaattgtagctcccataatccccatgtgtcatgggaaggaccccttgggaggtaatcgaatcatggggacagatttttctcacgataatctcatgatagtgaataagtctcacgagatctgatggttttataaaaggtggttccttttgcacacgctctcttgcctgctgccatgtaagatgtgcctctgctcctccttcgccttctgccatgactgtgaggcctccctagccatgtggaactgtgagtccattaaac

SEQ ID NO: 140342 - DNA, 406 bp, Homo sapiens
gcatatccaaattgctcccaggagaatttccatgtttttcctatagtactcttcatgatgtagccaccaattacagatgtagcctcttccctcatctgtgtccacataactgtaccctcagatggtttgctgtcttctggttcttgcctttcacatgctagtttctctgtctcacacccatcatctcaagatgccctgggaaattcctgcttatccctcaagaccaaatggcttagaaaacatgcttcttactgaaccctgcctgatcacaccttgatcactcttttttctctaaagctgtttcttggacataactctatgtcctgagcatggacaattgccagaatctgctcactgctgaccttccccagtwcactatgtgctccatgaggacagaggcctcctt

SEQ ID NO: 140343 - DNA, 491 bp, Homo sapiens
ttcagcattattcacagtaggcaagatactaagtgtccatcaacaaatatatggatttaaaaatgtggggkgtgtgtgtgtgtgtgtgtgtgtatatatatatacactatatatatatagtatgtatgtatagtgtatatatatatacactatatatagtatgtatgtatagtgtatatatataaaatatgttatatatattatatataatatatacacacacgtacacacacaaaataggatactatacagccttaaaaaaaagaagaaaattctgtcatttgcaacatcagtggatactgcatgattatatgtggaatctaaataagtcaatctcatagaaacagagaataggaaggtggttaccagagggtagagaatagagggagagatgggaaaagcgatgatgctgataaaagggtgcaaagtttcagttaaactggaggaataagttttagtaatctattgttctcatggcgatcacagtcaat

SEQ ID NO: 140344 - DNA, 491 bp, Homo sapiens
ttcagcattattcacagtaggcaagatactaagtgtccatcaacaaatatatggatttaaaaatgtggggggtgtgtgtgtgtgtgtgtgtgtatatatatatacactatatatatatagyatgtatgtatagtgtatatatatatacactatatatagtatgtatgtatagtgtatatatataaaatatgttatatatattatatataatatatacacacacgtacacacacaaaataggatactatacagccttaaaaaaaagaagaaaattctgtcatttgcaacatcagtggatactgcatgattatatgtggaatctaaataagtcaatctcatagaaacagagaataggaaggtggttaccagagggtagagaatagagggagagatgggaaaagcgatgatgctgataaaagggtgcaaagtttcagttaaactggaggaataagttttagtaatctattgttctcatggcgatcacagtcaat

SEQ ID NO: 140345 - DNA, 572 bp, Homo sapiens
atgttctggcctggatcagagcggaagtgggtggacacttattggcccttgaacccctttttagcagtgtgggagccagagactaggagccaggaaatgtatttataaaaattacttgtctgtggacaagtttagctgctgtggtcttagcttatagtaattagctatacaaacttcccttttcccttttggaatttaggtcaggttcaaaaggctttccactataaaaataaaatattactcttcttcagagaggaaaaatagctcccctgtttarccaggagacttacttttgctaaaacttggaaagaagaatcccctgaagatcaactacaaccaaaatggaagggcccttatcaggtgtcattgagtaccccctctgctgttaaacttcagggaatacctagctgagtacatctgtccagggttaacctatgtcttacgagtcacagctacaaaagggggacaccaacacctacatctgtgaacctttgggggacctctgctatttaaagaatcaacatctcagccagaagtagtaacatgatgctgtgggtgggaatgggagctac

SEQ ID NO: 140346 - DNA, 572 bp, Homo sapiens
atgttctggcctggatcagagcggaagtgggtggacacttattggcccttgaacccctttttagcagtgtgggagccagagactaggagccaggaaatgtatttataaaaattacttgtctgtggacaagtttagctgctgtggtcttagcttatagtaattagctatacaaacttcccttttcccttttggaatttaggtcaggttcaaaaggctttccactataaaaataaaatattactcttcttcagagaggaaaaatagctcccctgtttagccaggagacttacttttgctaaaacttggaaagaagaatcccctgaagatcaactacaaccaaaatggaagggcccttatcaggtgtcattgagtaccccctctgctgttaaacttcagggaatacctagctgagtacatctgyccagggttaacctatgtcttacgagtcacagctacaaaagggggacaccaacacctacatctgtgaacctttgggggacctctgctatttaaagaatcaacatctcagccagaagtagtaacatgatgctgtgggtgggaatgggagctac

SEQ ID NO: 140347 - DNA, 572 bp, Homo sapiens
atgttctggcctggatcagagcggaagtgggtggacacttattggcccttgaacccctttttagcagtgtgggagccagagactaggagccaggaaatgtatttataaaaattacttgtctgtggacaagtttagctgctgtggtcttagcttatagtaattagctatacaaacttcccttttcccttttggaatttaggtcaggttcaaaaggctttccactataaaaataaaatattactcttcttcagagaggaaaaatagctcccctgtttagccaggagacttacttttgctaaaacttggaaagaagaatcccctgaagatcaactacaaccaaaatggaagggcccttatcaggtgtcattgagtaccccctctgctgttaaacttcagggaatacctagctgagtacatctgtccagggttaacctatgtcttacgagtcacagstacaaaagggggacaccaacacctacatctgtgaacctttgggggacctctgctatttaaagaatcaacatctcagccagaagtagtaacatgatgctgtgggtgggaatgggagctac

SEQ ID NO: 140348 - DNA, 599 bp, Homo sapiens
gttcaaatccttatcctcctctctccacctcccctttgtttgaataccagttgttactttcataaaatatcaccccttactggtcttctggatggacaggtgtcttgtttcaatgaatttcataaaatctctatcccttataatagcacatggcatacaatactgrgtatttgtttctcactagactctgagttttgggtgtgtgtgtgtgtgtgtgtgtgtgtaaattacattatctgttttaactgacagagcaaggcacattttgtgaagtgaatgtcatgcttgtgttcaaaattaaggagaattaataactgcaatacataagcagaagaatctgtttctttgctaacattcaaaagtaggaagaatgaatacctttgcaagtggctattatgttcaaagtattatggttggtactttacatatgtcacctcatttaatcctcacagcaatatgagcctttgaaaacttaagcatgctcaaggaaaatatgaaatggcaaagccaagattcaaagcgtgacctttctgactgcaatatttatgttcttttcactaatccatattgcttttgagaatctgtgaaagctgtgttgc

SEQ ID NO: 140349 - DNA, 491 bp, Homo sapiens
tgcaacctctgcgtcctgggttcaagcaattctcctgcctcagcctcctgagtagctgggattacaggtgcccrccaccttgcccagctaatttttgtatttttagtagagacagggtttctccatgttgaccaggctggtctcaaactcctgacctcaggtgatccacccacctcggcctcccaaagtgttgggattacaggcatgagccaccgtgcctggcccaaaacaattattgtcaagttacttctctaagacataggtatgagaattttgtactttatattagaaaatataaaatatgaccttattcaagtgcttaattagtaccatgtatagtgagatgcttcaatgaaattcagagattttgatgatgaagtattgtgagcacagtgttgggatgaacaagataaatagcactaaacacatggtattgaatacttactatttgccaggacctcctataagcattttcaatgcattcattcatt

SEQ ID NO: 140350 - DNA, 545 bp, Homo sapiens
ctagttgtaaagcaatgctttaagagtcaaaatttaactcagatcttggaatgtcaaagtagtagttaaaagtttttcatcattatgacctgtaaagtctgggttttacttcacttgatttttatacagaaaaaaaaggaaaaattatttcccagacagagaatctgcattctcatttcaagmctttacattgcattccatgatcaaaaattcttaacttggagttagcgcttacaactttggtcttcaaagaagaaataattgatgatagccagtggcaattataaaatgttaacctgcttgaacaatagagcacagagctatctccaaataaaactttgggcttagtttagctctatcaatcatttgttctgtgactgggctacttatttgccttgcactgccttttttaaataagcaaatattattgtattaagctatctctaaaggaccttccatctctaatattgttcaattctcacttgtaagacatgttttccatgctcaagacatttccacattgcccccaatgctgaagaacaagc

SEQ ID NO: 140351 - DNA, 537 bp, Homo sapiens
gaggtatttttaggacattctagtagaaatctagagctggaagctggcyatttgggtgtgagtatcagaaaaaatatttgggttggagatacacttgtgaacctgtattctgaatttgaagatgttggcatgccatgcatgggtgcgatttcttatggaaagagccaagagtaagagaaataatgttaggagaggataaagttaagtctcaaaattgaggaaccctaaaccttcttcttaacatgagtactaccaacaaacttgaagtccaatactagtaatcactctctctgctatttattttacagaaattggtaattttgcatgttcagttgtcactagtttttgtgtctcattgcaaaggtacaatgttgtttctataagcactattttaatattgattaattcagatacaaacctgcaggggaaagctcaatgatttattgaaggagtatgtgttgtgtagtctgcttttataagaaagaatcaagacagttggtctcagagacttatcccaaaaggcacctttcagaataa

SEQ ID NO: 140352 - DNA, 586 bp, Homo sapiens
aataaccactaaaaataatcttatttttctttttttcaatattggaatatattagcaaaacttatcctaacacatagtcaaaatttttgtctttgtaataattttattgtgtttgctaggcatgaaggaagattacagataatctgttgattaataaaaaagaccaatcaggattctaaagaataaaatcttagaagatgcctttaaaatccatgattactcattttctgaagaattgttaaagtgaaagttggacccataacagtagcactttcactttaagcagcaatttacagcctaacacatttcttgttatgtccatyatgccaaaatgtcaagttgataggatggaaagaggtcatgtattattttcaaaagtagttgagggggccaggattttctctgcaagcattagctatacaaaagtattgtatccaagcactgagaatttttataatcttcatccaaaatgttaatatacagcaacatgtgtacagctgtatgtaggtgaaatacacgtgcaactctaagtgtagagctccaatattcattccttggtattttttaaatatcagccctcattcaa

SEQ ID NO: 140353 - DNA, 586 bp, Homo sapiens
aataaccactaaaaataatcttatttttctttttttcaatattggaatatattagcaaaacttatcctaacacatagtcaaaatttttgtctttgtaataattttattgtgtttgctaggcatgaaggaagattacagataatctgttgattaataaaaaagaccaatcaggattctaaagaataaaatcttagaagatgcctttaaaatccatgattactcattttctgaagaattgttaaagtgaaagttggacccataacagtagcactttcactttaagcagcaatttacagcctaacacatttcttgttatgtccattatgccaaaatgtcaagttgataggatggaaagaggtcatgtattattttcaaaagtagttgagggggccaggattttctctgcaagcattagctatacaaaagtattgtatccaagcactgagaatttttatawtcttcatccaaaatgttaatatacagcaacatgtgtacagctgtatgtaggtgaaatacacgtgcaactctaagtgtagagctccaatattcattccttggtattttttaaatatcagccctcattcaa

SEQ ID NO: 140354 - DNA, 540 bp, Homo sapiens
aatgttcctttatatattttacaggagtaggttttgtgacccgcttttaaatataacaacttcccatgtcattaaatattgaatactactccaggagtgtgtgagagagttattcattttctattaatgctcagactgcttagttttaccagctcaacgtaggaaactrtataatacgattcatgatttaaagactggcttgaaaaaaaatagaaacctctgtgattatactgtatatgttaattataatcctaatgactattagtagtttgtgtagataatacaacatagataatatagacagaccacttataagaagtagaatgtggtgtgctatacagtttttatgtattaaatgcttcaaagcttttaattctatcagtagcaactttagttatagaagtgtgttgaagtgcttaaaactttggaaacggaattcaaatcccagttttgccacttactagggagtatatatttaaacatattattaagtctcagtattgctatctgtaaattgagtctaataataacatttaccac

SEQ ID NO: 140355 - DNA, 540 bp, Homo sapiens
aatgttcctttatatattttacaggagtaggttttgtgacccgcttttaaatataacaacttcccatgtcattaaatattgaatactactccaggagtgtgtgagagagttattcattttctattaatgctcagactgcttagttttaccagctcaacgtaggaaactatataatacgattcatgatttaaagactggcttgaaaaaaaatagaaacctctgtgattatacwgtatatgttaattataatcctaatgactattagtagtttgtgtagataatacaacatagataatatagacagaccacttataagaagtagaatgtggtgtgctatacagtttttatgtattaaatgcttcaaagcttttaattctatcagtagcaactttagttatagaagtgtgttgaagtgcttaaaactttggaaacggaattcaaatcccagttttgccacttactagggagtatatatttaaacatattattaagtctcagtattgctatctgtaaattgagtctaataataacatttaccac

SEQ ID NO: 140356 - DNA, 586 bp, Homo sapiens
catgcaatcatctaacaatactcttgacgggcttgtaatcaaaagtaaaactgcattccattaacccaaactgacttatgtttttgtaaatttagtcctaatctggttagttgtcagtcctttgaaaattgactagaagttcttttacaggctagttttacaacttttttcctatctttctttttgtaatctgtagatattttggcatgcccatgtgatatatgacatttttcccataacataatttcccccctacactcactatgagctctgtctaatagggttgctattcagcctcatccactgttgctttaacactattaagactgtgtgctaacaattcagtcaagctcaataacttaakgtatgtctttcacaaatataggttctcctctgaagaaaataagatatatttaacaaaagaaagcaaaaaaaaaaaaaacccttgaacttattcaatacactattaaaaattagcacattaccagcaatatagattttaagattctagtgatatcaaaaatgttttaaaatatataccaattaaaatatatttatgtgttttggccctacaaaaagcaaggat

SEQ ID NO: 140357 - DNA, 586 bp, Homo sapiens
catgcaatcatctaacaatactcttgacgggcttgtaatcaaaagtaaaactgcattccattaacccaaactgacttatgtttttgtaaatttagtcctaatctggttagttgtcagtcctttgaaaattgactagaagttcttttacaggctagttttacaacttttttcctatctttctttttgtaatctgtagatattttggcatgcccatgtgatatatgacatttttcccataacataatttcccccctacactcactatgagctctgtctaatagggttgctattcagcctcatccactgttgctttaacactattaagactgtgtgctaacaattcagtcaagctcaataacttaatgtatgtctttcacaaatataggttctcctctgaagaaaataagatatatttaacaaaagaaagcaaaaaaaaaaaaaacmcttgaacttattcaatacactattaaaaattagcacattaccagcaatatagattttaagattctagtgatatcaaaaatgttttaaaatatataccaattaaaatatatttatgtgttttggccctacaaaaagcaaggat

SEQ ID NO: 140358 - DNA, 564 bp, Homo sapiens
tgtgactcaaatatatagattgttttaaattttatgtgcgtagcatgtgtcttactagttttttgcagtttgattaatgtatttgctgacagtaaaatattagtggtcaaagaawacaggttaagtttaagctaaggaggtgacctaaaactaagaataagtaaatacaaatactaaacagttattttttccatggtttgtactcatcaatatgccatgtgcttgcctccattctccacagccaagcccaaaccaacaagtaagagatgaatagaataacacctgagaaatatcgcttgaccatttcagctttaacaattttgcttagtttttttaagaaaaatgttattttcagtgttgtctgtgtctaaataactgttaataataaattaatgttattgctatttaattgttagtgataaattaatgttattgctatggcattgatttaacattcttgttaaatcaatctaccaattaatgattaataattaatgattaattaaatcactactaattaatgattataactatacaaaagaaatatccagaagtctgtcactg

SEQ ID NO: 140359 - DNA, 564 bp, Homo sapiens
tgtgactcaaatatatagattgttttaaattttatgtgcgtagcatgtgtcttactagttttttgcagtttgattaatgtatttgctgacagtaaaatattagtggtcaaagaaaacaggttaagtttaagctaaggaggtgacctaaaactaagaataagtaaatacaaatactaaacagttattttttccatggtttgtactcatcaatatgccatgtgcttgcctccattctccacagccaagcccaaaccaacaagtaagagatgaatagaataacacctgagaaatatcgcttgaccatttcagctttaacaattttgcttagtttttttaagaaaaatgttattttcagtgttgtctgtgtctaaataactgttaataataaattaatgttattgctatttaattgttagtgataaattaatgttattgctatggcattgatttaacattcttgttaaatcaatctacyaattaatgattaataattaatgattaattaaatcactactaattaatgattataactatacaaaagaaatatccagaagtctgtcactg

SEQ ID NO: 140360 - DNA, 586 bp, Homo sapiens
ctaatttcctcatttgatctaatagagcagtttctgtgacataattaagcaaattatgaattttgtgaataaattcatgaaagttcagtttgttacttgtatttggaaagtttacttttttctacttttacaatgaaaattctaaaccacataatatataggctttagcgcactctwgattggtttttgatatgtttatctcacattgtagatgtagttatacagtttaatataaatataacagaaagtttctttatgaatgaattaatatagtaatttgacaaatatctgttaaaatatgttaaatctatttacagatatgtggatcagaaagattattaaatgatattatttcactgttgatcactgttgattaatcatcttaggaagaaatttggtataaaacagattatgtacaagcctttattgacattattcaataatgactgtggagctagaattgttaacaggctaaactatatagacttatagaatgtatatatagaacttatatatgtagaactatatatagttcattgtagacctctgactattgatacatatataaattctgaagctgagcctg

SEQ ID NO: 140361 - DNA, 586 bp, Homo sapiens
ctaatttcctcatttgatctaatagagcagtttctgtgacataattaagcaaattatgaattttgtgaataaattcatgaaagttcagtttgttacttgtatttggaaagtttacttttttctacttttacaatgaaaattctaaaccacataatatataggctttagcgcactctagattggtttttgatatgtttatctcacattgtagatgtagttatacagtttaatataaatataacagaaagtttctttatgaatgaattaatatagtaatttgacaaatatctgttaaaatatgttaaatctatttacagatatgtggatcagaaagattattaartgatattatttcactgttgatcactgttgattaatcatcttaggaagaaatttggtataaaacagattatgtacaagcctttattgacattattcaataatgactgtggagctagaattgttaacaggctaaactatatagacttatagaatgtatatatagaacttatatatgtagaactatatatagttcattgtagacctctgactattgatacatatataaattctgaagctgagcctg

SEQ ID NO: 140362 - DNA, 536 bp, Homo sapiens
ttttaccagcttatgagaccagatagttaaattttcagamatccttctggctggttaatttcatgttgttagcttcaaattggccttggtggaattacgtacaccacggaaatcagcaaacactataacgcagtactatttttatctccccaaaatatagctaaccagcacaccatggaatcttatgtagttattagacgaacacaggacctgaaccttgccttaactaaaaccacaatttacttcccaagtctatattattggaaaacaagggaaatgggtgggagctggggagaacatggtaaatttaaagattaggcagtgctgtccaatatggcagccaataactgtattaagctgtttaaatgcaaaattaaataatttaaagttaaataaaactgaaaatttgacttctcaataactagtcatatttcaacagctaaagagccacctgtggctagtggctgccacatgcaacagtacagacataagatatttctaccaatataggaagtttaattggatagtgctggaag

SEQ ID NO: 140363 - DNA, 522 bp, Homo sapiens
aaacatatccacctacagcagataaatataatcaggaaaataaataataaaatactaataaatcataataatatttgtaatgtaacaaggctgttatgatccttaatatattgtaaatatatcacaagagcaactatattcaagcttatgatcagttgccaggtaagttctggtgagaattcaggggctgaggtactactgaatatgtgtctagatttgtattcttgatttgttgatattgaagaatcttgctaagtaatcttttataatgaagaaatagctaccatagagcctgagggtttttttgaacttgcctcaggtcaattgctagttggtaccagagrtatgacttaaacactaaaaaacaatgtagacttggaaaggtcatacttttttttaggtcaatgctaccttctaataaaatgatagcattttagggacaatctcttaatgggggtacccagggtttggtgcaaatcagacacggggcagacccctagcttcaacattgattaacttgaa

SEQ ID NO: 140364 - DNA, 551 bp, Homo sapiens
ggtcaataagcattggcttcaacttcaagtcaccagcttcactagcctccaacaagagactcagcctgtcttttgaagctttgaagccagatattgacttttctctctagctatgaaagttctagatgacgtcttcttttaatagaaggctatttgttaagttgttgttgttcttttaaagacagggtctcactctgtcaccaggctggagtacagcttggggatcatagctcactacagcctcaaactcctgggctcaagtgatcctccctagaaggctattttgtctacattgaaagcttattgtttattgtagtcaccttggtcaattatcttagctagatctggataactttctgcagcttctgtatcggcatttgatgcttcatcttatacttttacgttacgcaggtggcttcattccttaaatttcatgaaccaacctctggtagcttccaasttttcttctgcagtttcctcacttctctcagccttcatagaattgaagggagttagggccttgctgtagattaggttttggcttagggaac

SEQ ID NO: 140365 - DNA, 601 bp, Homo sapiens
tattcaaattagacatttgtgattgaggtctataaaatatatgatatgaaatcaaatttatataagaaaaaatattttaacaaacaaaatcaaataatagacttgatgttctaatggaggtaataattggctgtgtatgatggaatatgtttcaaatagtgagtagcaatataagagtagacacacacacccatatatgtttattgtaatgatagggaytttagccttattttttattatagttattatattttctatattttccaaatttctttaattgcattaaaagcaaacaaaatgtcaatggcatgtttccatttataccctattatgcatagattaatttttaaaataaaaatataaaggtcacattcaatgaattagcaaaggaattaaaaaggaaaaatcaagtgttccaaaaacacacaataggaaaagaacaatctctttaataaacagtgccaggaaaactggatattcacatgcagagaaagaaattgggctcttatttcacagtgtatacataaaatcaactcaaaattgatagaagacttaatataagacctgaaattgtaaagctactaaaagaaaacaccggaag

SEQ ID NO: 140366 - DNA, 518 bp, Homo sapiens
ctggttcatgagtccaccactgcagtcaatacacaaaagttccttcaccagaagcatccttcctgctacactattataaccacaaccacttcccactacctctcctgtttcacattcctaacctctggcaaccactaaccagtacttcatgcctataactttgcctggtaaagttaattaattttaataacacaatttatttaacctagtatatccaaactattatcattttaacatgtatcagtatagaaatattaagacattttataacctttatataataccaagtctttaaaactgagctgtatttttataacacgtatcaatttagattaatgataatttgagcgctcaatggctacatgtgtyttatggctactgtatttagctctgatctaggagatggatttttgccctaagtcttccatgttatccaatttagaggtgtaaaattcagggaaatgtagaaaccagggaatgttggagagttaaaaacaatcttagtgtttagcattagg

SEQ ID NO: 140367 - DNA, 410 bp, Homo sapiens
tgcaatattattttctgcttatcttctgcttactgatctargtggagaaggaagtagctgacaatgacatctttaggtttcttacccaatcctcccattttttttctttgtaaattacccatttcaactcataaaataggctcctatagctgtattgtaaatatgactgtacccttactttaccactctgattagagtgaaggacacctgatgtaggaaaagcaagtccattacataggcttagccaatcagattttgtcttctggaaatttctgttgggccccccaaaatacctcagttgctatagaaaataaacttataagaatatttagtgttggagatacagtggttgtgtttgagttatgctgaaatacagtagcaagtaatctgcaggaacagagaacactgac

SEQ ID NO: 140368 - DNA, 409 bp, Homo sapiens
tattttctgcttatcttctgcttactgatctaggtggagaaggaagtagctgacaatgacatctttaggtttcttacccaatcctcccattttttttctttgtaaattacccatttcaactcataaaataggctcctatagctgtattgtaaatatgactgtacccttacttkaccactctgattagagtgaaggacacctgatgtaggaaaagcaagtccattacataggcttagccaatcagattttgtcttctggaaatttctgttgggccccccaaaatacctcagttgctatagaaaataaacttataagaatatttagtgttggagatacagtggttgtgtttgagttatgctgaaatacagtagcaagtaatctgcaggaacagagaacactgacatggagg

SEQ ID NO: 140369 - DNA, 409 bp, Homo sapiens
tattttctgcttatcttctgcttactgatctaggtggagaaggaagtagctgacaatgacatctttaggtttcttacccaatcctcccattttttttctttgtaaattacccatttcaactcataaaataggctcctatagctgtattgtaaatatgactgtacccttactttaccactctgattagagtgaaggacacctgatgtaggaaaagcaastccattacataggcttagccaatcagattttgtcttctggaaatttctgttgggccccccaaaatacctcagttgctatagaaaataaacttataagaatatttagtgttggagatacagtggttgtgtttgagttatgctgaaatacagtagcaagtaatctgcaggaacagagaacactgacatggagg

SEQ ID NO: 140370 - DNA, 393 bp, Homo sapiens
tgcacataaacttatttacatccacttgcaaacatttttctggttaatagtgaaaaatcttatttttgtttgtttgctttacatttcttttataatttcagtggacaagacactgaagaattagaaattgcatctcacttcccaatcaaccattgaagaacaakctaaaccagaaagcttgtgctggcatttggaacaagaaaaaatagaacacatttctgaaatctgttggatgaagaagaatcaggcaaggactcaagttaagggcaagggatttttccagtggggttaaattaactgcaaacctcgttctcttcaaataggatatcatacatgttctttacttttcttatataaatgtaaaatgcaaaaatataattgttctattttgtg

SEQ ID NO: 140371 - DNA, 581 bp, Homo sapiens
cgtagggtcctcacaggttctcagcactatcgtggctccctgatcttccatgctaattctcctcattaatattaataaaaggctgataggccattgcaaagcatgatacgaaaagccagcaattaattgcttgtagtagttttatgcttattttgcacaatgaaaataatgcctctggactatcagcaaatcaataatatcaactgtgttggaaatgaacacctttggtttattttttatacatgtccattaaatctcagaaacataaacatggagtgattttttttttaatttacagactgaaaaataaagtattttactttatctggcactcttctatttggggagatgaaatgccatgcacatacagatgtatatttcagattgtccaatcagttcaattagtacattctaggttgttgcgcccttatttagatgcagttgaagattagaagactgagcacrtggtgagatggataagccattttggaaattatagatcaatcttttcaattgatttgatacattaaccagttttactgatttttaaaatcttttattaatcgatcacctgatacttt

SEQ ID NO: 140372 - DNA, 629 bp, Homo sapiens
tgcaatcctgaccctcagtgctggaagttttggggtttttgtgcttgattttcctgacctggcttagaaaataatgtcccaagttccacccagcaatatttaaaaacatatcctatgcagattgttttatggagatgtgaataaaaatgaattgaaaatgtctcacagcagctgtattctctcattcagagcaaccaaagatatcagagatactgcacaaaagcagagggcttggccattgtccttattggggagctaagtttcccatcatggaagtttcttttccttaatgtgatcgagatgggtctcttggggtcaaagttgaagtacgttagtgaaagattcaaacctatcttctgcccatttatatttaacctgtccacaaaagataaaaagattttagtctatggtatgctgactcattctcattctctttctctccatgaacactgagtttatttgcagcagtatgattttcctactcaaaaactgcgtcctcattgtcatttaaatgttaaaaagggaaaccagatgctatagttattaacttttggaatcaactataakcttcctattaaattcttccatccaggtatgggcaattatttgcttgatctaaaggtgcagaa

SEQ ID NO: 140373 - DNA, 604 bp, Homo sapiens
ggttgatcagtagctgctggtctcccttttcagcacagtggcctgcttttttttttttttttttttttttatccctgccagggtctgaaacctgatagggatcatcttcatatggctcaaacaaatgttctatcatgcatggtactgtattccctccctctccctctttctctatgatccagtaactttgctgtggataaggtaggtaagacatcatctgaattaagtaatcaaattaaaaattccgagcagaggcaaatagaaataatgtgccaagtgataaattgcgattagaagaacacagtgtcytttctgtgaaattccttctaaaaatacataacctgaatattttcatgaagaaaaaaataaaaaaaactcaaattgaggacattaaacaaaataattggcttgcaaatcttcaaaaatatcaaggtcagacaagtcaaggaaagactcagggacttttctagattgaaggaaactaaagatacattacaactaaaccaactcatgatcctgcatcagagccttttgccaaaaagggaactattggtacaattggcaaaacttgaatgggcatctgtgtatttgctaatggtaatat

SEQ ID NO: 140374 - DNA, 585 bp, Homo sapiens
caagtgtagaccaacacctgaggatcatgacaacaaacttttatttagagaaaaccaactttgaatgaagcttctcaatttttggttgaatatttatttcattgtttaattgtaaaataatacttttatgtagggtaatgagactatttccagcaaagaaaaatcccataacaggtagatgaaaagtgtctggtacagataaacaaagaaataagaattactctttaatttctctccatgctcatmtccaatttgttcatccttttattaattgttaaaaaaaatcagtttctatcattttccatgaaaaaatatacagacatttatttatatatacacacataaatgtatatatttatataagtatatatacatatgtatatatttatatatagtatatatacatatatactatatatacacatatatatatttatatatagtatacatatactatatatacatatatatacataaatatatatacatgtatatgtgtgtgtatatatataaaaatatgtatatattttcctggagagtgtgtgtgtgtgtgtgtgtgtgtgtgtgtgtgtgtgtgtgtgtata

SEQ ID NO: 140375 - DNA, 585 bp, Homo sapiens
caagtgtagaccaacacctgaggatcatgacaacaaacttttatttagagaaaaccaactttgaatgaagcttctcaatttttggttgaatatttatttcattgtttaattgtaaaataatacttttatgtagggtaatgagactatttccagcaaagaaaaatcccataacaggtagatgaaaagtgtctggtacagataaacaaagaaataagaattactctttaatttctctccatgctcatatccaatttgttcatccttttattaattgttaaaaaaaatcagtttctatcattttccatgaaaaaatatacagacatttatttatatatacacacataaakgtatatatttatataagtatatatacatatgtatatatttatatatagtatatatacatatatactatatatacacatatatatatttatatatagtatacatatactatatatacatatatatacataaatatatatacatgtatatgtgtgtgtatatatataaaaatatgtatatattttcctggagagtgtgtgtgtgtgtgtgtgtgtgtgtgtgtgtgtgtgtgtgtgtata

SEQ ID NO: 140376 - DNA, 352 bp, Homo sapiens
aagtaatgagaaaagacaagtttagagtgcataaagtgggaccagggggccaacgctagtatggaggctgtgaaggccccgagctctgggagcccaccatatttattgstgatcaaagaagcaggtggtgaggatgtgggggttgaaaggaagtggtgcatcaagcacatgagctgtagctgtgatggtttagcatttcctttgaagtgtatggaacatgttctaccacttgagataatggggaacatgttctagtttaagatactatcattttatgtgcctgggagtgctagaagcaagaagccagcaagtctagacacattccagaggccatgaggggttttataccctg

SEQ ID NO: 140377 - DNA, 608 bp, Homo sapiens
attttacattatttgcatagcacagagtagatttagcataatttttaaaggccctagggtatttggaatggtaaatgaacaatggcttcaacttaaagtcaccagctgcattggtctctaacaagagagccagtctgtcctttgaagctttgaagccaagcattgacttctcctctctaactatgaaagtcctagatgttaccttcttccaatagaaggctgtttcatctgcatggaaaatctgttgtttttagtgtcgccaccttcatgaataatcttagctagatcctctggaaacatttctgcagcttctacatcagcacttgctgcttcaccttgcacttttatgttacaaaggcagcttctttccttaaacctcatgaaccaacctctgctagcttccagcttttcttttttactttaagttccaggatacatgtgcagaacatgcaggtttgttacataaataaacttgtgccatrgtggttcactgtgcctattgacccatcctctaagttccctccccttgccccctaccccccaaaaggccctgctgtgtgttgttccgctccgtgtccaagtgttctcattgttcaactcacacttat

SEQ ID NO: 140378 - DNA, 659 bp, Homo sapiens
ggtggcatgccggggtgaggcacttggtcactgtgtgtgcaggtggcataccttctgctaggagtgtcctcaaggaaaygagggacctgacattttaggttaggactttttccaactttcctttcctgcaaaaggtattgttggggtgagtacattgttacctgcagcatggtttaaaggaaggagttcaaagcaggtatcagtagacccagagtttagtcttggccttcattcattcattcattcactttgccttcattcattcattcactttgccttcactcatttgttcattcattcattcaatcaatctatatttattgagagcctattatattccaggtgaaaggccctggggttataaggcgagcaaaagagaaaaagtcatgactgatttggaaaccagtaagggagacagacactaatcgactagtcccacaagcaaatatataattacaaattgtgatgtgtgatgaaggaaaggcttcaggtctatgaacatttattagagtgagggtggaggagggaatatctagcctgagaagtcaggagtgcttttccgaaaagtaaacaaattagtaagaattaactagataaatgggacgggagccttctagacaggagaaataaaagaccctgagctagaaaagatggtatgt

SEQ ID NO: 140379 - DNA, 659 bp, Homo sapiens
ggtggcatgccggggtgaggcacttggtcactgtgtgtgcaggtggcataccttctgctaggagtgtcctcaaggaaatgagggacctgacattttaggttaggactttttccaactttcctttcctgcaaaaggtattgttggggtgagtacattgttacctgcagcatggtttaaaggaaggagttcaaagcaggtatcagtagacccagagtttagtcttggccttcattcattcattcattcactttgccttcattcattcattcactttgccttcactcatttgttcattcattcattcaatcaatctatatttattgagagcctattatattccaggtgaaaggccctggggttataaggcgagcaaaagagaaaaagtcatgactgatttggaaaccagtaagggagacagacactaatcgactagtcccacaagcaaatatataattacaaattgtgatgtgtgatgaaggaaaggcttcaggtctatgaacatttattagagtgagggtggaggagggaatatctagcctgagaagtcaggagtgcttttccgaaaagtamacaaattagtaagaattaactagataaatgggacgggagccttctagacaggagaaataaaagaccctgagctagaaaagatggtatgt

SEQ ID NO: 140380 - DNA, 552 bp, Homo sapiens
ccctcacttctaatggtattcaatataaagacccatttcatgattacactcttgtgctatgagccaatctggacctagyttcagtgccccttttaagaggtagtaaaagttgagtatgtaatagctactctttttgagcatttatgatagatatgccaaggcattgtgcaaagcaattttttgtgcatttatcccatttaattttaactgtctccccatgatttagagcttctatttctagttgatgaaaagtcagaaaaaaaatttaaatatctagtaatgagggtggtttctttcaccccattctgctttcatcaggaccaatcttaaagcctggtgctgtttctgcactattttacttatcaaaatggtattattgattgggcttgggagcaagtgctaagagtgcccccttttggtcctggagagccttacaaatcatctgggagaattaggtgtgaagcctcctctttgccagcgcattcagggttatttgtgtctcctactgttgtgtcccctggtcggtctgtatgtggcttttacattccttaa

SEQ ID NO: 140381 - DNA, 554 bp, Homo sapiens
gagataaggataagacagtaaatggttcattctcatctttccctstctacccaatcctcagtaaaataatcatgtttttccttaagaccttgcagacatgaaactgttccttgaatttgttaaaggaaagtactggattctccttcaaattggttttgctgcaggaacaatgactgttcaagagttactacattcaaacaatgtaaagtttctgaattgttcatcacaacattgttagtgggagtttgggattagaaacaacccaatgcccatcgctgaggaatgggtaagccaaaatggaaaacatccatctggatgccatttagcaggaagaagcaacaaagtatgttgtttaccagaaacagttggagaatataaaaacaaaatgatgttattaacatagtgccatttaagtaaatgtataacatgctcacagcaataaaaatactatgaattttacaagagtacataaaatttagagtttcatattcaacatattagaatagtggcttaagagtgtacagaagtagtaggatggatgaatggatggatgg

SEQ ID NO: 140382 - DNA, 617 bp, Homo sapiens
ctagtggctactacattgtacagcacaggtcagtaggacaataaacagctggcttaactaatttctttttgtgagtagattatttgggcagtgatcataccatcagaatttaaaatataatgcaaaccagtggttggatattgtgtagaaaatccagcaagatgattggatattccactttccaaggaacataaaaatgtccacccctgtagagtttatatcctgggaactggagtggggacggagacagacagtaaatcatcatcaaaatgtaaaggttattttatgttatattaacaggaaataaatgttttatgtgttgggagcgtagggaacagaaaaagtagagcaaggtaggcatgtcgagggagcttgtgggggcaggctaagtattaaataatgtggtcagaggaggcttcattagagagatgagagatgaactcaagctagactgatgtagggacgtgggcaaagaaaatgagaaaggtgctgacctctgcagagccaagggcaggtctrtatgatgacctaaactcccctacactctgtcgcaaagaaaataagccctggcggggcactgaagaagaaggacagggttttgtgtgtgtgtggttttt

SEQ ID NO: 140383 - DNA, 635 bp, Homo sapiens
aattttaaaggggacaattctccaagaagacataacaatcctcaatgtgtacacacataacaacagactgtcaaaatatgtgaggcgaaaacagttaagattgcagggagaaatagacaaatccactcttatagctggatagttcaacatcttttcaacaacagactgataaaacaatcagaaaatcagtgaggatatagctaactttaaacagcactggcaatcatcttgatataaatgatatagaattctccatccaatagagcagaatayacattattctctaggtcacatggaacattcactgagagagaccacactctaggccataaaatataccttgacaaattaagaaattaaaaatcatacaaacatattcacagaccataatggaataaagctaaaaatgaataacagaaagataattggaaaatcccaaatatttaggaataaattaaaaatgtataaataacaaagtaattgaagaagacatctcaagagaaattttaaaatattttggattaaatgaaaatgaaaagaaaactaatcaaaacttgtgggatgcagtgaaagctgtgcttagagggaaatttatagcactgaatgcatatattgcaaaagaataaagatctaaa

SEQ ID NO: 140384 - DNA, 415 bp, Homo sapiens
atgaagtaaatatgtcaaagagatatctgcactgccatgttcactgcagcattattcacaacagccaaagtatgaaatgaaactaagtgtccatcaataaagaaagaataaagaaaatgtgatgtatacatatacacggaatacctttcagccttaacaaataaaaggaaatcctgtcattttcaacaacatggacaaaactagatggcattacgttcagtgaaatcagccaggcacagaaagacaaatactgcatgatctcacttataggtagaattctataaaaattactctcatagaagtagagagtagaagggtaggtactaataacagtgttgtggggaagagactggggagctcttggtcaaaagayataaagtttcggttagataggaggaataagttcaagagatct

SEQ ID NO: 140385 - DNA, 252 bp, Homo sapiens
tttttatggtttcttggactcaactataattgtaattaagagattaatctccagtcctaacctcttatcctatgtatattcctacattttcaattacttttaaacatttatggcaaaactcatatctgccaccaagtggatggacttcctttgtgccatcatttttctagtttacataagtgaaatkttcaagtttttcctctgtactgtcgtactccttcagtcatttagacccaatgtcctttggtaata

SEQ ID NO: 140386 - DNA, 534 bp, Homo sapiens
ttgcaaactaactttacctttccaagtctcagtttcttcatccataatgccttctttgtgaggtggtagtaaactaaaaggaaaaaatttatgtaaagtttgaacctactttctagaagacgtgaacaaattgactttgccttcatttgtttcagtttcttcatctaaatgtctagtctgtaaggcagtagkaattgtatgatgaagtcattctgtaaagctagaaacaaaccttctagaaggcatagacagtgtctagtctatagtacagtgtttggggcctagggagtgctcagtagtcatttgagtgactttaggcacttaggatactgacagatattaaacaaatattatttctgtgatcttctttttccagagttctttaactggttgaattactagttaacaatagttaatcatctcagttaagtaactttttccttcaggtcttattttgtacatatataatatataatataaagtgttgtttgtcaattgtttttttttatgacttttcctaaaaacatgatttta

SEQ ID NO: 140387 - DNA, 671 bp, Homo sapiens
tttgtagtttgtctttttatttattttattgctcatgatgtaacattgatgatgtaaatgatataattataaaatatttagtttagagcaatgcttttacattttctcttaagaaaattaagaatttaccttctctagtcagaatggctgagatcaaatttttactcaaatgcttgctagatatcaggtcttggacaagtattttaacctcttgtgcctcagtttttccatttacaagatagaaattaatagcacatagcatatcttgtatcaggtcaaacagatgttattgttaatgttgttgttattattataagcattttggcctagcctcattttaaatccttsatgagatgttgcccagatctggttatccatgtgctatatcctaacctctctctttgtgtcccatgttttcacattcaaccactgacccaaatgcagtccacatacataagcagagttaagcaaacaaggctctgtggaatgaattctgtaatgagaagactgttgatttatactgtcctctctgctgtaaataacatcttcattttaacatatgtacttttcactatgaatatatgtaaaattgtctctatattttaaagaataaaactgatagaaatttggctgcaatcctagccatttgggtgagatttaattattattgc

SEQ ID NO: 140388 - DNA, 596 bp, Homo sapiens
gataagggtaagataaggagtttctaaaactgctaagatcatatgctttggctgggtcatataataggtatatatttaacattttaagaaactgacaaactgttttccaaagtggttataccattttacaattacatcaacggggtactagtgtttcagttgttccacaaccttatcagtacttastatagtcagtctttttaactttagacattctaataggtgtgatgttgtaaatcattgtcattttaatttccatttctctgataatgttgatcatcttttcatatgtttatttgcatctgtatattttctttggtgaagtgtctgttcaaatctttgtttaatttttattgggtttgttttatttttattgcattttaagagtttatactctgaatacaaatcctttatcagatatttgatttatgcaattttcttctagtctgtggcttatttttttatttccttaatacctttcaaagagcacaaatttttaattttaatgaagtccaacctaccaatttttcttttatggatcatatttttggtgtggtagctaagaaatctttgcctaaaaccaaggtcataaagat

SEQ ID NO: 140389 - DNA, 596 bp, Homo sapiens
gataagggtaagataaggagtttctaaaactgctaagatcatatgctttggctgggtcatataataggtatatatttaacattttaagaaactgacaaactgttttccaaagtggttataccattttacaattacatcaacggggtactagtgtttcagttgttccacaaccttatcagtacttactatagtcagtctttttaactttagacattctaataggtgtgatgttgtaaatcattgtcattttaatttccatttmtctgataatgttgatcatcttttcatatgtttatttgcatctgtatattttctttggtgaagtgtctgttcaaatctttgtttaatttttattgggtttgttttatttttattgcattttaagagtttatactctgaatacaaatcctttatcagatatttgatttatgcaattttcttctagtctgtggcttatttttttatttccttaatacctttcaaagagcacaaatttttaattttaatgaagtccaacctaccaatttttcttttatggatcatatttttggtgtggtagctaagaaatctttgcctaaaaccaaggtcataaagat

SEQ ID NO: 140390 - DNA, 504 bp, Homo sapiens
caggttggtgagggaatttgaaaaaacttgatataaaaatcttcactgaaatcagtgtgttccatctagggatatgacacatgaaagattctgtagcctctctactcgctatgcctcccatcaggcgcacaaatatttccagtgcatagagagaaatttcagcccaataaaagaaagaactctctaatagccagaagtgtccaacattggaaccaggagccccaggagtgaatgaacctgcaacactggtggggggctctacccggagccttaagtccctgttgatagagcagtcttgggaattgctggcttgtttatttctacttcttgcactgatactattctcttgagtgtaatacgttttctacaggcaacttttcattatytacgagcaggctattcctgatgagtggttaatgaagtctttatagagcaggcgataccctagtagtatagctagggtagtgttctggcttgggaggcaattcctgttgactttctaac

SEQ ID NO: 140391 - DNA, 562 bp, Homo sapiens
aaaaactgtgtttttcttgatgagctcwtgtgaccattcaaatgtgattgctgagaggtggagaaaaagctagaggattgctctcatcagagaaaatctaaagaaaaagaccaaagtgaattcccaggctggagtcacacagggagtagagctgttttcagtgtattgaaatggttaatggaaaggtcatatttactcactactctcacaagctccttgggcaacacagcctactaaacaattaataagcaccaaaaacccacattacattataacataacagattcgggtatttggcagataaaagctttcaaaatccatgtgggatctgtgaggtctcgggggtaggggggtggagaataaagagagtttctttgttgactggatcatgaccactaagctgaatgatctgtgctgtttctcaaagtgcacagaacactcactccagctcccaggagctcattcagtgtgtgcaagtgctggctcttctcgttcatgcccctgtcattctcccagctctttgtctgctagatgctattacaggagttcttatttttcccag

SEQ ID NO: 140392 - DNA, 562 bp, Homo sapiens
aaaaactgtgtttttcttgatgagctcttgtgaccattcaaatgtgattgytgagaggtggagaaaaagctagaggattgctctcatcagagaaaatctaaagaaaaagaccaaagtgaattcccaggctggagtcacacagggagtagagctgttttcagtgtattgaaatggttaatggaaaggtcatatttactcactactctcacaagctccttgggcaacacagcctactaaacaattaataagcaccaaaaacccacattacattataacataacagattcgggtatttggcagataaaagctttcaaaatccatgtgggatctgtgaggtctcgggggtaggggggtggagaataaagagagtttctttgttgactggatcatgaccactaagctgaatgatctgtgctgtttctcaaagtgcacagaacactcactccagctcccaggagctcattcagtgtgtgcaagtgctggctcttctcgttcatgcccctgtcattctcccagctctttgtctgctagatgctattacaggagttcttatttttcccag

SEQ ID NO: 140393 - DNA, 581 bp, Homo sapiens
taaaagctttcaaaatccatgtgggatctgtgaggtctcgggggtaggggggwggagaataaagagagtttctttgttgactggatcatgaccactaagctgaatgatctgtgctgtttctcaaagtgcacagaacactcactccagctcccaggagctcattcagtgtgtgcaagtgctggctcttctcgttcatgcccctgtcattctcccagctctttgtctgctagatgctattacaggagttcttatttttcccagagtccccaggtgcggggccgataggctgatccagaagctgatgctcaccagcacctggacttcataacaggagagaagacttctccctgatgcaggttgctcactgagttgttccactcctctctcagctgcgctggcctgcagtgatggccttggccttggatctgtggcattccacacgggcatggggacatgcctctcacagcacttaggggccagctcttcatagctgcctgaatttcagaacactattccaagttcagaatccaggaaaatgtttatcctacctgggggttctcaattctggctgcacattgcaa

SEQ ID NO: 140394 - DNA, 562 bp, Homo sapiens
aaaaactgtgtttttcttgatgagctcttgtgaccattcaaatgtgattgctgagaggtggagaaaaagctagaggattgctctcatcagagaaaatctaaagaaaaagaccaaagtgaattcccaggctggagtcacacagggagtagagctgttttcagtgtattgaaatggttaatggaaaggtcatatttactcactactctcacaagctccttgggcaacacagcctactaaacaattaataagcaccaaaaacccacattacattataacataacagattcgggtatttggcagataaaagctttcaaaatccatgtgggatctgtgaggtctcgggggtaggggggtggagaataaagagagtttctttgttgactggatcatgaccactaagctgaatgatctgtgctgtttctcaaagtgcacagaacactcactccagctcccaggagctcattcagtstgtgcaagtgctggctcttctcgttcatgcccctgtcattctcccagctctttgtctgctagatgctattacaggagttcttatttttcccag

SEQ ID NO: 140395 - DNA, 557 bp, Homo sapiens
ttttctgggatcccttctctcatgatatgcccaagaattcctgggacttaaagggtcagccttggtttctcttaccaagctattagagtcattactcaaaatacctcctagaagctgaggactccagacctctaccgagtgctgtggcacctaaacactgatgaacttggagatatttttggatgtgcmgcaactgcctctatgtgtgcagaatagcagggtgactaagagcaagaacttctgaataaaaaatatctgggcttgaatcctggctctgccactgataagctttaagaattggagcaagtttcacatcagtaaattaggataataattgggattgagagaaataaatcagatgtttataaaaagcttatcactgtgcttggcacataataaatgtttaataaatagtacctactgttacttttgctaagttacttttgctaagaattaacatggcagtggcaaaaccttagtcttggttgaaattacagtattatgaaaacattttggaggttaaaatgatcatagaaggatcacacagttgaattaca

SEQ ID NO: 140396 - DNA, 573 bp, Homo sapiens
gaattcttaccttatctttcatagtactcatcactccttttgttgtaactcattcctatctagaatgtcagcttgatgacagcagacaccttcatgtgtgcttatattataaatccagcactaacataaagactgatacatggtaatgataataaattgaaattgaataaataataaaggggcaagcccctttattatttggcctgtgtccatggtcttgctactaataccctccagccccaatwgtgcatgcaagacacacatcctttctaggccttcttgccatctgacttttgcatgtttcttttcctctatctggatgaccaccctctactttccgctatccaccacctaccacttccctacttagtctactccaattcttttgcccttcatgtcacttatatgacacttcttccagaaagcatagcataggattttggcttcaccctggtatttcccttatcacagcaccagtcactttatattataattaccttatcatttgtctctatgaaggtggggtctatgtcttattcaccccatatcccagggcctaagaagtgcccagaa

SEQ ID NO: 140397 - DNA, 489 bp, Homo sapiens
cagaatattcttttaagagttctgatggctctgatgtcaaatcatgtataatatacttaatatttgtgttatctggggaaaattgcttaatttttatttgcctctgctccttctggtgtaaatgcatacataaaaatctctgcctcagagctgttgtgaagatgtagtgmtgatgcacataaactaaagtttcaggatacaaaatcaacagtagagtttctatccactaacagcaaactatccaggaaagaaatcagtcaaaccacaccatttacaatggcaacaataaaatacttgggaataaatttaaccaaggaggtgaaagaatggtgcactgaaaactatataatctgggtgaaagaaattgaagacacaaataaatggaaagatatcacatgttcgtagattagaagaatattgttaaaatgtctatactacacaaaacaatctacagattcaatgcaatccttaaaaaaatccaattacgtt

SEQ ID NO: 140398 - DNA, 618 bp, Homo sapiens
tcctcaccccctccagtccctgtgccatttctctagtttagattctcactactttagaaactgttgttcagagttacctaactagttgccccccttcagagcctcccacctacacttcgtagtttaatcctcagctcattcaatagtttccaatgacccttcattacccacagcatgaaatctaatctctaaccttgaaatttaaggccttaacatatctccaaaattatttgccacttattgaaaggatgattgaatataatatttataatttgtttaataggcaacttttcatcagaataatacaatgtgataatgtcagaggagaaagaataatctgcaaataagacaaggggtatggcttttgagagtgatgtagtgtttaataatacaagcggaggagtcccagaakgtaatgctgaatggtagagtcgtgaagtgttctgacacatcaaagttgaagagagatttgggaagagaccaaggcaatgtaatcaagattggagggactagagtaatcagaaatctagaaaaacataaaaagcaggaaaggtgacctggcatggtggctcatgcatgtaatcccagctctttgagaggctgaggcaggtagatcac

SEQ ID NO: 140399 - DNA, 624 bp, Homo sapiens
ctttgagggactattggaaagggatgattggttttgaaatgtgaggacatcagattttggaggggacrgggcagaatgatatggtttggctgtgtccccacctaaatctcatcttgaattgtaactcccacagttcccaagtctcatgggaggaacctggtgggagataattgaatcatgggggtgggtctttcccatgctgttcttgtgatagtgaataactctcatgagatctgatggtttaaaaaaaacaggaattttcctgcacaagctctcttctcttgtctgccaccatgtgaggtgtgactttaaccttctgccatgattttgagatctctccagcgatgtggaactgtaagtccattaaacctctttctattgtaaattgcccagtcttaggtatgtctttatcagcagcatgaaaatggactaataaatatataaatcagtggggccatctggctctacatttggggtggaaagatttagagttggattttctaccattacacacacacacacacacacacacacacactattttaatggaaatagagacctaaactttaaaaattatagaagttttataatataatatatgggactatatgcttgatgtgggta

SEQ ID NO: 140400 - DNA, 624 bp, Homo sapiens
ctttgagggactattggaaagggatgattggttttgaaatgtgaggacatcagattttggaggggacagggcagaatgatatggtttggctgtgtccccacctaaatctcatcttgaattgtaactcccacagttcccaagtctcatgggaggaacctggtgggagataattgaatcatgggggtgggtctttcccatgctgttcttgtgatagtgaataactctcatgagatctgatggtttaaaaaaaacaggarttttcctgcacaagctctcttctcttgtctgccaccatgtgaggtgtgactttaaccttctgccatgattttgagatctctccagcgatgtggaactgtaagtccattaaacctctttctattgtaaattgcccagtcttaggtatgtctttatcagcagcatgaaaatggactaataaatatataaatcagtggggccatctggctctacatttggggtggaaagatttagagttggattttctaccattacacacacacacacacacacacacacacactattttaatggaaatagagacctaaactttaaaaattatagaagttttataatataatatatgggactatatgcttgatgtgggta

SEQ ID NO: 140401 - DNA, 496 bp, Homo sapiens
ataacaccagaaaaactcttctagacattggcttaggcaaagaattcatgaccaagaacccaaaagcaaatgcaacaaaaacaaaaataaataaatgggacctaattaaactaaaaagcttctgcacagcraaagaaataatcatcagagtaaacagataacccacagtgtgggagaaaatattaataacctatgaatctgacaaaggactagtatccagaatcatgagactcaaacaaatcagcaagaaaaaaattaatcccatcagaaagtaggcaaatgacataaatagacatttctcaaaagaagatatagaaatggccaacgaacatgtttagaaaatgctcaacatcactaatcatcaaggaaatgcaaattaaaaccacaatgagatactacgttacccctgtaagaatggccattattaaaaagtcaaaaaacaattggcatggatgtggtaaaaagggaacatttatacactgctggtgcaatgtaa

SEQ ID NO: 140402 - DNA, 541 bp, Homo sapiens
actcttctagacattggcttaggcaaagaattcatgaccaagaacccaaaagcaaatgcaacaaaaacaaaaataaataaatgggacctaattaaactaaaaagcttctgcacagcgaaagaaataatcatcagagtaaacagataacccacagtgtgggagaaaatattaataacctatgaatctgacaaaggactagtatccagaatcawgagactcaaacaaatcagcaagaaaaaaattaatcccatcagaaagtaggcaaatgacataaatagacatttctcaaaagaagatatagaaatggccaacgaacatgtttagaaaatgctcaacatcactaatcatcaaggaaatgcaaattaaaaccacaatgagatactacgttacccctgtaagaatggccattattaaaaagtcaaaaaacaattggcatggatgtggtaaaaagggaacatttatacactgctggtgcaatgtaaattaatacagcctctatggaaaacagcatggaggtttattaaaaaactgaaagtagatc

SEQ ID NO: 140403 - DNA, 541 bp, Homo sapiens
actcttctagacattggcttaggcaaagaattcatgaccaagaacccaaaagcaaatgcaacaaaaacaaaaataaataaatgggacctaattaaactaaaaagcttctgcacagcgaaagaaataatcatcagagtaaacagataacccacagtgtgggagaaaatattaataacctatgaatctgacaaaggactagtatccagaatcatgagactcaaacaaatcagcaagaaaaaaattaatcccatcagaaagtaggcaaatgacataaatagacatttctcaaaagaagatatagaaatggccaacgaacatgtttagaaaatgctcaacatcactaatcatcaaggaaatgcaaattaaaaccacaatgagatactacgttacccctgtaagaatggccattattaaaaagtcaaaaaacaattggcatggatgtggtaaaaagggaacatttatacactgctggtgcaatgtaaattaatacagcctctatggaaaacagcawggaggtttattaaaaaactgaaagtagatc

SEQ ID NO: 140404 - DNA, 608 bp, Homo sapiens
gaattcatctgaattttttcattttctaaatcttgcataaaattaatacactgaaacatcttttgagttttaatgaaattaagaggttgtgtttttggtgccacagtgagcagatcatgtcactcagaacctcccactgatttacattttacagagttaataaaagtcatctgtgacttccctattagctttctttttctttttctttttytttttttttttttttgagatggagttcactcttgttgcccaggttggagtgcaatggcgcaacctcggctccctgcaacctctgcctcccaggttcaagcgattctcctgtctcagcctcccgagtagctgggattacaggcacctgctaccatgcctagctaatttttttgtatttttagtagagatagggtttcactatgttggccaggctggtctcaaactcctgacctcatgatccacccgcctcggcctcccaaagtgctgggattacaggtgcgagccaccgtgcccagccggaattaacctcttatgtgatcatcaggaactgcatgtgttcaatgtcttgataatgttacaatacaagatgataagttgcttggaaactgactgcctgt

SEQ ID NO: 140405 - DNA, 624 bp, Homo sapiens
ggaatcttgtgtactctaggtccctcttaggacggcataagacatcagagcactgccgcrtctctgtattttgggaagggtcaaggtcagatgagcttatccaaatgctctgggcaacgctgggctcagcaggcaagttctaggcacagtctgtaaaggtcactataaaatgcacttggcttggagcccctgaaaccctttactatctctctcatttattggtttccttatttaggtatccatcaacagataaacggcaaaaaaaggtgtgtgtggtgcatgtgtgcacacgtgcacaatggaatattattcaaccacaaaaaagaatgaaaccctgtcatttgcagtaacatggatggaaatacaggtcattatattaggtgaaattattaggtgaaataagccagacacagaaagacaaatatcacatgttctcactcatatgcgggagctaaaaacgttgatcttatggaggtagagagtagaatagtggctaccagaggctgggaagggtgggagagaagataaaaagcgattgattaacaggtacaaacaaacagttctcatgccacctcctccttcctcttccccttcccagcctctgtgaaccaccaatctactgtc

SEQ ID NO: 140406 - DNA, 624 bp, Homo sapiens
ggaatcttgtgtactctaggtccctcttaggacggcataagacatcagagcactgccgcatctctgtattttgggaagggtcaaggtcagatgagcttatccaaatgctctgggcaacgctgggctcagcaggcaagttctaggcacagtctgtaaaggtcactataaaatgcacttggcttggagcccctgaaaccctttactatctctctcatttattggtttccttatttaggtatccatcaacagataaacggcaaaaaawggtgtgtgtggtgcatgtgtgcacacgtgcacaatggaatattattcaaccacaaaaaagaatgaaaccctgtcatttgcagtaacatggatggaaatacaggtcattatattaggtgaaattattaggtgaaataagccagacacagaaagacaaatatcacatgttctcactcatatgcgggagctaaaaacgttgatcttatggaggtagagagtagaatagtggctaccagaggctgggaagggtgggagagaagataaaaagcgattgattaacaggtacaaacaaacagttctcatgccacctcctccttcctcttccccttcccagcctctgtgaaccaccaatctactgtc

SEQ ID NO: 140407 - DNA, 624 bp, Homo sapiens
ggaatcttgtgtactctaggtccctcttaggacggcataagacatcagagcactgccgcatctctgtattttgggaagggtcaaggtcagatgagcttatccaaatgctctgggcaacgctgggctcagcaggcaagttctaggcacagtctgtaaaggtcactataaaatgcacttggcttggagcccctgaaaccctttactatctctctcatttattggtttccttatttaggtatccatcaacagataaacggcaaaaaaaggtgtgtgtggtgcatgtgtgcacacgtgcacaatggaatattattcaaccmcaaaaaagaatgaaaccctgtcatttgcagtaacatggatggaaatacaggtcattatattaggtgaaattattaggtgaaataagccagacacagaaagacaaatatcacatgttctcactcatatgcgggagctaaaaacgttgatcttatggaggtagagagtagaatagtggctaccagaggctgggaagggtgggagagaagataaaaagcgattgattaacaggtacaaacaaacagttctcatgccacctcctccttcctcttccccttcccagcctctgtgaaccaccaatctactgtc

SEQ ID NO: 140408 - DNA, 646 bp, Homo sapiens
tgagataattataaccatttatttgcctttctaagaactgccattctttaacacccctcacccaaataatattgacaatggattcttacttcaaagaggaaaactgtaataattcacatttgcatttaaaattgaaatgcaggtctggcgtgatggctcacccctgtaatcctggcactttgggaggccgaggtgggcagatcacttgaggttaggagttcaataccagcctggccaatatggcaaaagcctgtctctactaaaaatacaaaaattagctggtgtggtgacacacacctgtggtcccagctactgaggaggctgaggcaggagaatcacttgaaccggagaggcagaggttacagtgagccaagatcgtgccactgcactccagcctgggcaatagagtgagactgtgtctcaaaaaaaawaaaataaaataaataaataaataaataaataaaaatataattgaaatacataatctgattattcataatgataaaaataaacctatattaatatttcaaatgctccagaaacaatgaaattttcagcatgccaaacatacagtcataattttgaccaacgctagcttctgaattgctgatcttcatatgtaaagcaaaattgaggctgtgattac

SEQ ID NO: 140409 - DNA, 588 bp, Homo sapiens
  misc_feature (1)...(588): n = A,T,C or G
nnatctgaagtctacctttaaaacctggcctcatcctacatgaatgcagaatctaaattccgtacacatttcttccttaccatgccaacaatggtaacatgaaaagttttgctttagcttagggaacactacggwtatatgaggtgttccactgcttatcttccagagaactgagaacagtacagagctgtctaaattatcagtagggaataagaaaagtcaacatgctgaactcatcttgacagacctaatgcctgggctaacagacagggtgtgtgcacctgcacactggggagtatagcacaaaaattctcatctgaatacattgctctgtggctttagagtttttttttttttttctttttcattgaaccatttcatctcttaataacagttcctaactcaggttgtcttcaaatgtttgacaggtaattgaaagtggaacatccaactgtgaagaaagttgattggaaagcaattagaattgatcatactttcggttcttccccaggtcaagctaatgcctcctgccccaaacgatgacctggcaacgctcagcgagctcaatgatggcagcctgctctatga

SEQ ID NO: 140410 - DNA, 504 bp, Homo sapiens
aagagttaagtgacttgataaattaacatrtattttaaattattataatatatcacacatataaagggtatatataatatacatgtgttattgaaagggcaataatgaaataaatttctgtatactccacttttaaaaatatgtactcaacattttttttaatgacatcttcatgtgtttctccccaaaactatgcttctctctatttcccagagttggccactatcgtgacttttcggctaaccattaatatcttctctatatgcttagcacacacatatgaaagtatccctaagcaacatattgcttaatctgtttgtgacattcatagaaatgtaatcctatcgtatagattcttgcgtgccttgttttcatggcttaccgcgaaatttttgagtcatcagacttgatgggtttaaccaaggctcattcttttggctgcatggaatagtattgtacaaatatatcacaattgatccacctttctcccagtgagtattcaag

SEQ ID NO: 140411 - DNA, 253 bp, Homo sapiens
tgagtgccctggaaattgccttttgcactgtttttctcttgctgcatatttttatcacccttcagtgcttcaaatgttgcaagtaaagggctcattggagcttctggtmgtggtgatagctgaagttgaatttcttaaggtgagtttagcttcattctggctcagttataaggcaaattcagcacagttccaaattctggagctgagtatgaactaataccctgtggacagacacaagtactgctattaaact

SEQ ID NO: 140412 - DNA, 514 bp, Homo sapiens
tgttaaattaactttaaagtatacatgaaccaaaggtcatgattagctaacacatgtttaagaacaaacttaggggactttctatttgtcaggattgactatatagctgtaatgatcaagatatttggtgatttgtttaggaacacacggaccaatacmaaagaaaacagatcctagaaatgcacccactccctggggtcacctgtttaggacaaaggtgctgtgatcatgcagcagggagacacatgtgggaacagttttaatctggatcctcctccttcacaattgtgaaatcttttccacatgggtaatatggtagccttgggtttgggccataatcccaaaagacaccaccctaaacaacataatcctggatgctgaaatcccaagagagtgaaatacctaaagtccaaaatcctgcaagtcaaaatcatgatgcaactcttctgcatacaaccaaaaccacaataatcctttccctagaattcagctttcaggattttaacattcagaa

SEQ ID NO: 140413 - DNA, 392 bp, Homo sapiens
ttggtggtacggttgagcccatctcccaggtactgagcatagtacccaacagatagtttttcaaccccggtctccctccctcccttcctctccctctagcagtgtccagtttctattgttgccctttttatgtccatgagtaccctgtgtttaactcccatttatacgtgagaamgtgtggtatttgattttctgtttctgcattaattcgcttaagataatggctgcaagttgcatccatgttgctgcaaatagacggttttgttctttattatggctgtgtagtattccatagtgtatatgtaccatattctctttatccaatctgctgctgatgggcacttaggttgattccatatctttgctattgggaacagtgctacaatgaacat

SEQ ID NO: 140414 - DNA, 482 bp, Homo sapiens
attacttcaacatacataatataaaacctattaaaactgaaaggtaaaatagtaaaaccacagtcatccatggggatttcaacagtctcctgccagaaatttataaaatttgttaarcaaaaaattggtaagggtagagaggatctgaaaaatataattagccaacttgatctaattgaatcttttagaataatctaaggatgagggatgaggtagcagagaaagaaaaggcagacatcaacatgacattagtgtttcaaggctatgagaatacaccaataatggtgtgtgtgtgtgcagatggtaagctcaatcttaaaaatgttgagttttaactgacaattcattattaggaaagataagaggagatgatctctagtgagaggctatatgactgaactctaagagaaaggtcacagcagaaattgtgtacttgacagctctataaggaggtcagtcaaaaataagtcagtgatgaattc

SEQ ID NO: 140415 - DNA, 482 bp, Homo sapiens
attacttcaacatacataatataaaacctattaaaactgaaaggtaaaatagtaaaaccacagtcatccatggggatttcaacagtctcctgccagaaatttataaaatttgttaaacaaaaaattggtaagggtagagaggatctgaaaaatataattagccaacttgatctaattgaatcttttagaataatctaaggatgaggratgaggtagcagagaaagaaaaggcagacatcaacatgacattagtgtttcaaggctatgagaatacaccaataatggtgtgtgtgtgtgcagatggtaagctcaatcttaaaaatgttgagttttaactgacaattcattattaggaaagataagaggagatgatctctagtgagaggctatatgactgaactctaagagaaaggtcacagcagaaattgtgtacttgacagctctataaggaggtcagtcaaaaataagtcagtgatgaattc

SEQ ID NO: 140416 - DNA, 482 bp, Homo sapiens
attacttcaacatacataatataaaacctattaaaactgaaaggtaaaatagtaaaaccacagtcatccatggggatttcaacagtctcctgccagaaatttataaaatttgttaaacaaaaaattggtaagggtagagaggatctgaaaaatataattagccaacttgatctaattgaatcttttagaataatctaaggatgagggatgaggtagcagagaaagaaaaggcagacatcaacatgacattagtgtttcaagrctatgagaatacaccaataatggtgtgtgtgtgtgcagatggtaagctcaatcttaaaaatgttgagttttaactgacaattcattattaggaaagataagaggagatgatctctagtgagaggctatatgactgaactctaagagaaaggtcacagcagaaattgtgtacttgacagctctataaggaggtcagtcaaaaataagtcagtgatgaattc

SEQ ID NO: 140417 - DNA, 482 bp, Homo sapiens
attacttcaacatacataatataaaacctattaaaactgaaaggtaaaatagtaaaaccacagtcatccatggggatttcaacagtctcctgccagaaatttataaaatttgttaaacaaaaaattggtaagggtagagaggatctgaaaaatataattagccaacttgatctaattgaatcttttagaataatctaaggatgagggatgaggtagcagagaaagaaaaggcagacatcaacatgacattagtgtttcaaggctatgagaatacaccaataatggtgtgtgtgtgtgcagatggtaagctcaatcttaaaaatrttgagttttaactgacaattcattattaggaaagataagaggagatgatctctagtgagaggctatatgactgaactctaagagaaaggtcacagcagaaattgtgtacttgacagctctataaggaggtcagtcaaaaataagtcagtgatgaattc

SEQ ID NO: 140418 - DNA, 549 bp, Homo sapiens
gctagttataactgcttacatcaaaaaagaaaaaaaaaatcaaataacctaacratgagttttaaagaactagaaaagcaagagcaaaccaaacaccaaattagtagaatcaatgaaataataaagacgagagcagaaacaaacatatttgaaataaaaaacaatacaaaatttaatgaagtgaaaagttgttttttgaaaatataaataaaactggcaaatctttagtcagactaattaagaaaaagagagagagagagagaagacccaaataaataaaatcagagatgaagaagggggcattataactgacattgcaaaaagtcaaaggaacattagtggctactgttagcaactttgtgcaaacaaattaaaaaacctagatgaaatagataaattcctagaaacatgcaacctaccaggatcaagccatgaagaaattcagaacctgagcagaccaagaacaagtaatgagattgaagccataataaaaaagctcccagtaaagaaaaggccaggatctgataccttcactgctgtattctacaa

SEQ ID NO: 140419 - DNA, 590 bp, Homo sapiens
ttagagttttataccctcaagcagtattcaaacacaagtaaatcaaatctgatgtaggtaagaagttttaggacggatggtaaaaatgagatcacaccgaacgtccatggaaatgttggaattacgaattcttgcctcttttagttccaaagggccagttttcggggatggaagcaaacatatattcatgaaaatcttcaaacaggccatgtttctgtcttaaaagctccagaataaaagatctttgtgtgtgtgtgtgtgtgtgtkttttagaataatatgagtccaaggtaggaaggaacatattgtttcatgtaacaataagaatggaaattgatttgtttctcacttcctgaattttcctgaactcatctttatctagtcatctgactcatttccttgcctaaattagaatgaaacttgaacattatttataattttattcaggctaaaattaattctgtggaaaggtcaagtttcctatgacacattcctctttctttgagctggaagttgctatagtcgcatcgcttctcctgaaggaaattagaccagattggcctatcacattttcttctgtggagaagctt

SEQ ID NO: 140420 - DNA, 438 bp, Homo sapiens
tcaatgctggccacacaggtcttcgtgtcagaccagcctccacgctggggcccatcataggtttcaattcctcagccagaaaaatcatccttcagaatcaattacacagttccctctcttcctgagtactctaattctcccctgacctttgctgaaactttccctaaaatttatcccatccttctctactctctgttttatgtcagcatagttgctgtagcattccattmtcacactgctatgaagaactacctgagcctgggtaacttaaaatgaaaagaggtttaattggctcatggtttcacaggctgtacaggaagcatggctggggaggcctcaggaaaccttcaaacatggcagaagacaaagggagaccagcacatcctacagagctggagcaggaggaagagggcaaagtaggaggtgctacacagtttt

SEQ ID NO: 140421 - DNA, 557 bp, Homo sapiens
actgataaatagaggcatcttgatctaaaatacatcttaacaaaatgcaccaacatcttagaatagttcccttcgaatattggaatgaagcctgcttagtatttttttcctttttgtagctcagtaatttctgttttcaacartaaagtagatattacttttgtaatgataaaataatttttaaaagatctgagatcccaaattttgccatatgctagtcagtagtttctgtttattcttctactgttacaacaatactttgctttgtacagttaatattagagggcaaaaactatctgtaaaaaaattttcttcacctgtatcaatgtttaatgagtaaaattaaacaaaattggaattgataaaatgtatttttttattttacaaaaatatagaacgtagtttttaaatgaatgatatatcttgagttcatggttataatacaaaatgacttatttttatcgaccatccggtttgtaaaaaatgaattgcaccacagttttatagcgagagcaatacgcttctttctcttgaagaaaaatgagcggtgacacact

SEQ ID NO: 140422 - DNA, 577 bp, Homo sapiens
caagaaatacttactgaatacattaaaatggagttttatcttttattattcagatgtgaatatttgacacagatatgtaggtcctggtaaaaaaggcattggtgatggctcagattctcatggactccaggccaacaaactgttagttatattcttagctgatagagagaagtgcttggctcatggcatgagttcaataacttgctaaatgattaacaagagaaggtagtaatcacagacaaaataggctatttaatttatcttgttccataaaaatgttccataaaattttagggattataaaagattcaacaagtaagtgtggctatttcagacaagaaagaaacaaaaaaaaatgtgttggcaagaacrtagagaaatcggaaccctcgttcgttggtgatgggaatgtaaaatgatgcaaccactgtaggaaacagtatgatgctctctcagtcagttaaacagagaattaccatatgatccagcaattctacttctaagtatacgcctcaaagaattgaaaacacatcccccgcgccacccgcccctccacagagagtggaatattattcat

SEQ ID NO: 140423 - DNA, 568 bp, Homo sapiens
ctggcaccttcttctcctctctcttcctctctctcatcatgtgatatatctgctccccatttgccttccatcaattgtaagcttcctgaggccctcaccagaagcagatattggcactatgtttcatgtacagactgcagaatcatgagccaaataaacctcttttctttatcaattacccagtctcaggtattcctttacagtgatgaaaacagactaatctagttactgaaaacctctatgaatgaagactttgcccacattttcactatgtatcccagattttctagaaggtatttccgaatataattgcaaaagcaaacatatagtagtggttctgattgcagaaattttagagtagcttgtatcagactatccattagaaagagaataaataaactaaattccagcactgrcagcagagtaaaaacctgtctccaatacataaataagtcgataaataaataagtaacaaataagctttgaacaaatagagttaaaaaaagtttgaagacattggagactagacacaaatgagcaaatcctggatggagtttggcccttgaaa

SEQ ID NO: 140424 - DNA, 515 bp, Homo sapiens
gaatggcaaggatgagatctcatttgtacatcttttccctcttagggggaaaaaaagacaaaaataaaagtattggaaacagtaaatgagagaatacacaaaatttacaaaggaacaaatacataaataattgctaatgtcacattaaaaaaatgaaaataagaagaaaaggaatcttatctttaaattccttaaaataaaaacaaaaattttaaatcagcatgctgcatcaagtcaaaaataacttatttggttaaataaatatatattttaggtaaaygaaagctgagaagatatatttctcaagttctgtactataagaaatgctaaaataaatacttcagaataaagtgaaatgactatagacagtgacagagattcacaggaagaaataaagaccactaaaaataagagctttcttttaatttctttaaaagaaaattgacaatttaatgcaaaaaatataaggttgaattataaaatttataagtagatttaaaatgtatggcaccaat

SEQ ID NO: 140425 - DNA, 508 bp, Homo sapiens
tcaagttgttgtaagctaaatggctcatgtgctcctcattaggagatgaaatttcatcagttttctcaaaagttttgctttccttacctgatccacttagtaatcagttaggcaattaagacaattaattgagaagtgggtaaaaaaatactaacaatatgacttttgtgtgcgtgtgtgtgtgtgtgtgtggtagaaaatcctgattattgacaatggaaaactacctagaaaattaggaaaaatctatctaggcatttacataacagaaagtcatgtcctttttcaagccagtactttacaaggaataccttaaatttatccaaactcatacagtcccaaactaaaagtcatgactcagggttctagtgctgactctactatcgaggtggctgayatagtttgtatgtttgtcatctccagctttcctgttgagatgtgatccccagtgttggaggtgggacctagtgggaggtgtttttgtcatgggggtggatatgccatgaat

SEQ ID NO: 140426 - DNA, 536 bp, Homo sapiens
ttggttgactttctggcagctattccactaccccccattatgtagtagccataaggtttgtatatttgattgattcttcttttagttccagggatggaatccgagtgatcgctaagrcaattcatatattttacccaccttaggataactggtttaggattggacaaacaatctcagctgcttcaatcagactcactgtaagtagtgaaatggaaaactctttcctcttccgggcactgttaaagatttttttttttcatgtaaactatgcaactacttcagttattttacttggagaaaacttaagctgagaacaaattctacttgacaaggtgagaaatactgagagagaaattgggaaaccaaacagaagccctgatcaagccttccttgaagtacaacttaactgaaatttccagtcaaagtattttcttcataaggtcaattactttgaattagattttattcatttaaaacttgcaacgttttaacctattcacttttctgtgctgtctctaccatttatttccactgac

SEQ ID NO: 140427 - DNA, 560 bp, Homo sapiens
ttttacttggagaaaacttaagctgagaacaaattctacttgacaaggtgagaaatactgagagagaaattgggaaaccaaacagaagccctgatcaagccttccttgaagtacaacttaactgaaatttccagtcaaagtattttcttcataaggtcaattactttgaattagattttattcatttaaaacttgcaacgttttaacctattcacttttctgtgctgtctctaccatttatttccactgacttcttgtctttatatgttataattataatatattcttttatctaagtaaaaacagatgatagtcatttcctaaatctaaacatttcctatgaaaaatctttgggataaaaytgcacatttcctttcactcttttatagcattttcataattgtgtaatatttcaaccattttctttttattcatatttacaaaaggttaacaagaggtttttatcatgcttgctcatggcaaggggcctctactcggcccactgcactcaaccctttgcaaaagggagcacgtgagcaagtgagtatgggatctggcca

SEQ ID NO: 140428 - DNA, 560 bp, Homo sapiens
ttttacttggagaaaacttaagctgagaacaaattctacttgacaaggtgagaaatactgagagagaaattgggaaaccaaacagaagccctgatcaagccttccttgaagtacaacttaactgaaatttccagtcaaagtattttcttcataaggtcaattactttgaattagattttattcatttaaaacttgcaacgttttaacctattcacttttctgtgctgtctctaccatttatttccactgacttcttgtctttatatgttataattataatatattcttttatctaagtaaaaacagatgatagtcatttcctaaatctaaacatttcctatgaaaaatctttgggataaaattgcacatttcctttcactcttttatagcattttcataattgtgtaatatttcaaccattttctttttattcatatttacaaaaggttaacaagaggtttttatcatgcttgctcatggcaaggggcctmtactcggcccactgcactcaaccctttgcaaaagggagcacgtgagcaagtgagtatgggatctggcca

SEQ ID NO: 140429 - DNA, 553 bp, Homo sapiens
taaaatggctctcagtggagagggttgctggagaggagactggaagggcaggtagtcttccccatagttaagttgtctcttccctgaagtagggttgtttycccatctactgactgagtctggggtctttataggcacagtctggggagtgcatgctgattggtttgtgagtatgcaaaataggttaaagcaaacacaccactcaaaggtgggcataacagtgtagaaaaccaattaggaaagagtaggtatatgtaaaataggtaaagggtgggaatcaatcagagaaaagcacgccaaatgggagaacaagttctaaatctggtctgaggattaaacttgtagcttggctttcaggctttggcttggaggtgggctgttgctgtgtactcgcccctatctgcctaggcacttggctgcctcctgtcactgtcaatgggttacaattatgccattttccacttgattcttggactacttttgaaattgtatgttttcatatctttggggtttgttgccttttatttgctttgaaggataaaaatattttaag

SEQ ID NO: 140430 - DNA, 364 bp, Homo sapiens
tcttttccatttcacatggaacatttaccaagatagacaatatgtagggtaataaaacacaccttctgaaatttaaaatataagaaattatacaaagtatgttttcagattacatggaattcagcaaggaagcawtcacagacctgaaaattctcaaatattttgatgttaaaaaatagaactgctaaataaatcttgagccaagaaaagatctcaaaagaaataaaaaatagttaaaactaaatgaaactaaaaatataacatcaaaatttataaaatataatgaaaaataagtgatggttattggaaaatttctagcatgaaataaatatgctaaaaaagaaagatctaaaataaataacct

SEQ ID NO: 140431 - DNA, 364 bp, Homo sapiens
tcttttccatttcacatggaacatttaccaagatagacaatatgtagggtaataaaacacaccttctgaaatttaaaatataagaaattatacaaagtatgttttcagattacatggaattcagcaaggaagcaatcacagacctgaaaattctcaaatattttgatgttaaaaaatagaactgctaaataaatcttgagccaagaaaagatctcaaaagaaataaaaaatagttaaaactaaatgaaastaaaaatataacatcaaaatttataaaatataatgaaaaataagtgatggttattggaaaatttctagcatgaaataaatatgctaaaaaagaaagatctaaaataaataacct

SEQ ID NO: 140432 - DNA, 447 bp, Homo sapiens
aaattgatataaaacagatatacaaattttaaacacataggtgagtggagcttaaggacaaacaaataccactatgcagaacctattttattacctgcagggttgacttatagacatttcttttgtaactccacagcatttactctgcccactgttccctcagatgcttcttcttgtactttctgtggctgaaggcatgatctgtaatccttctgttggcttggagtgtatattaatttctataaagtctgtttcatattgtttccccttgmgtcatttttttccttcaggagaatatatttgagaatattcatgagacttggcaacagctcttgcacttcatgaatatgttttcctgttgatagaggcaggaggcatggaaattcttggcagacaggggagggtccccagtgaaaccccacctttaagctgaaaagcctgaaacct

SEQ ID NO: 140433 - DNA, 447 bp, Homo sapiens
aaattgatataaaacagatatacaaattttaaacacataggtgagtggagcttaaggacaaacaaataccactatgcagaacctattttattacctgcagggttgacttatagacatttcttttgtaactccacagcatttactctgcccactgttccctcagatgcttcttcttgtactttctgtggctgaaggcatgatctgtaatccttctgttggcttggagtgtatattaatttctataaagtctgtttcatattgtttccccttgagtcatttttttccttcaggagaatatatttgagaatattcatgagacttggcaacagctcttgcacttcatgaatatgttttcckgttgatagaggcaggaggcatggaaattcttggcagacaggggagggtccccagtgaaaccccacctttaagctgaaaagcctgaaacct

SEQ ID NO: 140434 - DNA, 578 bp, Homo sapiens
ggtatatactgagtaatgacattgctgagtcaaatggatgttttaagttctttaagaaatctccaaactgctttccacagtggctgaattagcttacatttccaccaacaatgtataaatgttcatttttctctacaacctaactagcatttgtcatattttagtttttaataataactattctgactggttgacatggcatctcattgtggttttgatttgcatttccctgatgaatagagatgtggggcattttttcatatgttagtggccacttgtatgtcatcttttgagaagtgtctattcatatcctttgcctattgtttaataaagttatttgttttttgcttgatttttttttagttgcttgtagattctggatattagacatttgcaggtgcatagttttgaatattttctccaattctgtgggttcctatttactctatttatactttcctttgctgtgcagaagtgctttagtttaattaggtcccacttgtctgcatttgtttttattgcaattacttttgaagacatgrccagaaattctttgccaaggccaatgccaagaaggg

SEQ ID NO: 140435 - DNA, 578 bp, Homo sapiens
gaattccttggaatgcaatgaagttacacaaaataatttaaggattagctattcctttactaaccaatcaatgaagaaatctcttttcccaagtattagacatttggatactggattgcccttaaatcaagttgacagggactaaaatgttgactttcagcttttgcgagaaccattttagcctttctggtgggatatcaaacaatcttcctgactgagatatttcaagaactttaaccaaaaagcacataactctcaacaagatgcaaaggccayggtactctgttatggacccactttccatgatgtttatagttacaacactccctgatccttgagaatataaaatgcttggttctaaatgacaagctactttgtgcccccctttgaggagtacaaatctaggcagtggacaatcgccatgcctcatttgctgtcttacctcccgctcgagggtcttcctcctgagcagcttcctgacacttgggagctgcttcttcaatagcatcgtggcttcattcattcttcttacttgagtgattaagaaagatggaacctggagaagaaaaatagcttgg

SEQ ID NO: 140436 - DNA, 571 bp, Homo sapiens
aataatttaaggattagctattcctttactaaccaatcaatgaagaaatctcttttcccaagtattagacatttggatactggattgcccttaaatcaagttgacagggactaaaatgttgactttcagcttttgcgagaaccattttagcctttctggtgggatatcaaacaatcttcctgactgagatatttcaagaactttaaccaaaaagcacataactctcaacaagatgcaaaggccacggtactctgttatggacccactttccatgatgtttatagttacaacactccctgatccttgagaatataaaatgcttggttctaaatgacaagctactttgtgcccccctttgaggartacaaatctaggcagtggacaatcgccatgcctcatttgctgtcttacctcccgctcgagggtcttcctcctgagcagcttcctgacacttgggagctgcttcttcaatagcatcgtggcttcattcattcttcttacttgagtgattaagaaagatggaacctggagaagaaaaatagcttggactggatggaaaacacttgaattc

SEQ ID NO: 140437 - DNA, 616 bp, Homo sapiens
caaggaaagtgtaacccattctcaaagaagacagagaccaaccctgagataacccaggtgttagaactgccaacaaggacttttttttcttttttgagacagagtcttgctctgtcgcccaggctggagtgcagtggcacgatctcggctcactataagctccaccgcctgggttgacaccattctcctgcctcagcatccagagtagttgggtctacaggtgcccgccaccacgcctggccaattttttgtatttttagtagagacggggtttcaccttgttagccaggatagtctcgatctcctgaactcgtgatctgcccacctcagcctcccaaagtgctgggattacaggcgtgagcccccrcgcctggccgccaacaaggattttgaagcagctattgtacctgtgctcaatgatgtgaaggaaaatatgattataatgaatgaaaagataggtcacctcaacagaaaaacagaaagtattttaaaagcaccaactgaaaattctagaactgaaaaaatacaatgtctgaaacaaaaatgaatgaaggaaattagtagctcttctctctttttcagcaagtttttctcattaaaaaaacccagtaagctt

SEQ ID NO: 140438 - DNA, 608 bp, Homo sapiens
tataaaagctgaaattgtttctggccataaaggatgaactgatattagattagccttgccaccataaacaactagataactgcataaactacataaaaaactgtttatagacattggataagaggaagcacaacagaagatgtgatgcctgagagaaagggaatgctgagtgagtcctacaggcatcccagctttccacccggatgaaccgcmcagaccagcagcacagcaaggggaagccaagaacactggggtctcactgagttaaggggacatggaacagagttcagggaggctaaggcagatggaatttggaagaaaaagtatctgacaggaagaagttatagagacaaagagctcaattaatccatatgggggtctccttgcatttgttgctaaatattaagtcactcatgtgcagcgtcaacttcatagagcagcccctgaccccccagaaaaggatcttccataagttaatcaattcccagagctcctaaagggctgggaggcatttgactttggaccaatcagaatagaaagtctttgttgagaacctggggttttactcaaaaccccagaagtctctcactttagtgaaactaaatcag

SEQ ID NO: 140439 - DNA, 614 bp, Homo sapiens
tataaaagctgaaattgtttctggccataaaggatgaactgatattagattagccttgccaccataaacaactagataactgcataaactacataaaaaactgtttatagacattggataagaggaagcacaacagaagatgtgatgcctgagagaaagggaatgctgagtgagtcctacaggcatcccagctttccacccggatgaaccgcccagaccagcagcacagcaaggggaagccaagaacactggggtctcactgagttaaggggacatggaacagagttcagggaggctaaggcagatggaatttggaagaaaaagtatctgacaggaagaagttatagagacaaagagctcaattaatccatatgggggtctccttgcatttgttgctaaatattaagtcactcatgtgcagcgtcaacttcatagagcagcccctgaccccccagaaaargatcttccataagttaatcaattcccagagctcctaaagggctgggaggcatttgactttggaccaatcagaatagaaagtctttgttgagaacctggggttttactcaaaaccccagaagtctctcactttagtgaaactaaatcagcctaag

SEQ ID NO: 140440 - DNA, 622 bp, Homo sapiens
agacttgagtaggaagagtctgggacttttgggtccccaaaagtctcagccaggcctacagagatcccccagcagaaactgcccatcagaggagctggcattggcgctgtatcagccccgtttagtaccacgctgtgctcagtcatgggccagtggcatcctggggagagcagagccactacaggaagactggcaggtcctgaagtgtggcaactgaggctgtgggctaagtattccactctttggaaaggaggtctcagcagcacaactctatggctattacaacttcagaaaaagaactaggactaaagacaaagagggatatttacttatgataaattattgaattcatcaagaaaacctaataatcctaaatgagtatgccctgagacacagygcttcaaaatatttgaagtaaaaacccttcagaactgaaaggagcgacacatgcacaattatagttggagatttcaacactcttccctcagtaagggataggacaagtagacagaacaccaggaaaaataaagaaaacaaacaatagcctcagccaaattcacttaatggatctttatagactactttcatcccacacattctttttaggttcccagggaacatc

SEQ ID NO: 140441 - DNA, 541 bp, Homo sapiens
cacagtggggcctgtccaggatcgggggagggagagcatcagtaagaacagctaatggatgcagagcttaataccaatgtgatgggttgatctgtgcagcaaaacaccatggcacatgtttacctaggtaacaaacctgcacatcctgcacatgtaccccagaacttaaaataaaagctgaagaaaaaaatgcaattctaattccaacaaagaaagatatttacctttataaaataactgatctgggcatggtggctcatgtctgtaatcccagcactttaggaaggaagaggctaggagtctgagaccagcctgggcaacataatgagayctcatctctataaaaaatttaaaaattagctgggcatggcaatgtgcagttgtagtcccagctaccagggtggctgaggtgggaggactgattgagcccaggagttccaggttacagcgagctacgactgtgcaactgcactgcagcctgggtgacagcaagacccagtctcaaaatgaaaagaaaataactgaaatgtcaaaatatttc

SEQ ID NO: 140442 - DNA, 498 bp, Homo sapiens
gctagtcattcattcagcaagtatttctgcgttgttttcctttgccacacactgtgttaataagacaaacatggttcctctatattctagtggggaaaatagacccccccaaaacaaagtaagcaaatgagtgcatgaagtgtttattattgatgaatgagaagcagggaaccccgagagctgagacagcgaataactggaggaatgctacattagrgtggcctggaaagggatcccccaagaggtggcatttacattgcaagctgaatgatgagaggcatcttgctgcagaaattgcttggggagaaagaaggttgcaggaagaaagagcagaaagagtaaatttcctaagggaagaaagaacttggctttttagagaaactgaggaaagattagcatgcccagtgctaatgccgtgggagagtgatgtaaggtaagactagcaaagaagttttgaggacagaaggtgctgaaccttgaagtcacagaacagaattc

SEQ ID NO: 140443 - DNA, 611 bp, Homo sapiens
gtgttaataagacaaacatggttcctctatattctagtggggaaaatagacccccccaaaacaaagtaagcaaatgagtgcatgaagtgtttattattgatgaatgagaagcagggaaccccgagagctgagacagcgaataactggaggaatgctacattagagtggcctggaaagggatcccccaagaggtggcatttacattgcaagctgaatgatgagaggcatcttgctgcagaaattgcttggggagaaagaaggttgcaggaagaaagagcagaaagagtaaatttcctaagggaagaaagaacttggctttttagagaaactgaggaaagattagcatgcccagtgctaatgccgtgggagagtgatgtaaggtaagactagcaaagaagttttgaggacagaaggtgctgaaccttgaagtcacagaacagaattcacatttacttataactgcaaggggaagctacgtgtccccactttgctcccagtaactctctccattgctgtgcaatgagacgtacaatactggctttggctacttcgtggggtgcatataaggatcaaatgatgtaatgygtatgacagtaactcgttatgtataa

SEQ ID NO: 140444 - DNA, 592 bp, Homo sapiens
acagtaatgtatagctattggcccatctgctttttcatactgtgttattgttgagaagtctgatgcctccctaaaacttattcctttatttatatcctgctttcatttttatatttctggaaaccttgtaggtgtatttttattgttggagaactgaatatcattaggatatgaaatctttttttttccatcatcatcagcactcagctttttgtttctgataactcttgctttcctttgaattctgaacaktctcttccaagtatttctgtaattatttctttctctccactttttctattcttcctttcactgcttggattaaactcacatatcttaaattgtcacttattttccgtatattttttctatttgtatgctagtagattttgcctgcattattcttgtagagacttaattttaatgtttatcatgcgtaattataacttggcccctgttgcatttataattcaacaatcatactgttaattcacaagaatgcctcttttttcactgatttcccctttattgttatacttagttcctgacttcttgttacaaccgcctctcagatctctctaaaattattaaa

SEQ ID NO: 140445 - DNA, 488 bp, Homo sapiens
gtggcacgaaagcctccatgcacaatatgtaaatgaaggagagtggctgtgttcctagtttcctcctagcttttcctcccacttcttgagcatctccttctcagtctccttcatagactccttcctttcagctactctttaaatactggtgttccctggagtttttgtcctcaaccctctttttatttatggacactaaaattcaaatttcatgtaattttcatgtgtcacgaaatattcttcatttgcttttttttyccctaaccatttaaaaatgtgaagaccattcttagcttttaggccatttaaaaacaggtggtaggcaagattgtgctcacagcccatagtgtgctgaatgatgctctacacgtggtcagaattggtacgaaagccccaaattaaacccacccttcaaagaagaacctcagtccccttattattggattggcaatcagttaacaaacactttgtgccagttacaccagtct

SEQ ID NO: 140446 - DNA, 487 bp, Homo sapiens
gtggcacgaaagcctccatgcacaatatgtaaatgaaggagagtggctgtgttcctagtttcctcctagcttttcctcccacttcttgagcatctccttctcagtctccttcatagactccttcctttcagctactctttaaatactggtgttccctggagtttttgtcctcaaccctctttttatttatggacactaaaattcaaatttcatgtaattttcatgtgtcacgaaatattcttcatttgctttttttttccctaaccatttaaaaatgtgaagaccattcttagcttttaggccatttaaaaacaggtggtaggcaagattgtgctcacagcccatagtgtgctgaatgatgctctacacgtggtcagaattggtacgaaagccccaaattaaacccacccttcaaagargaacctcagtccccttattattggattggcaatcagttaacaaacactttgtgccagttacaccagtc

SEQ ID NO: 140447 - DNA, 572 bp, Homo sapiens
aaatggtgctgggaacactgaataacaatatgcagaaaaatacaactacacccccatctctcatcaaatacaaaaattaaatcaaaatggattaaaaacttaaatgtaagacctgaaactataaaagttactgtaagaaaatactggggaaatgctcaagactttgagcaaacattttttggtttaagacttcaaaaggagaggcaatgaaagcaaaaatacacaaatgggattacatcaagctaaaaggcttctgccacagcaaaggaaacaatcaacagagtgaagagacaaccttcagaatgggaaaaaatatgtgcaaactatccatctgataagggwttaataaccagaatatataaggaactcaaactcaacagcaaaaatcctccaaataatcccatttgaaaatgggcaaatgatctgaatagacatttctcaaaagacatacaaatggccaacaggcatatgaaaaaattctcaacgttactaaccatcagggatatgcaaatcaaaaccacaatgagatatcatctgaatctaattaaaatggctattatcaaaaagacaca

SEQ ID NO: 140448 - DNA, 391 bp, Homo sapiens
gtgaaaccccgtgtctactaaaaatacagacactagccgggtgtggtggcaggcgcctgtaatcccagctactcgggaggctgaggcagaattgcttgaacccgggaggcagaggttgcagtaagccaagactgcgccactgcactccatcctaggccacagagcaagactccgtatcagggaaagaaaaaaacaacttcttgcaatgacacaaatgttcaataatctgtgctttcccatatgacagccactagtcacatgtggctaytgagaacttaaaatgtggctagtgtattgagacactaaatttaaaattgtattaatttaaatccaaatagccatgtgtctagcaaataatttaggagactgttggtatagctcaggtgataga

SEQ ID NO: 140449 - DNA, 524 bp, Homo sapiens
tctttaaggaaactccacactgttttccatagtggttgtaccagtttacattcccaccagcagtggaaaattgttctctgttcaccacatccttgccaacatctattattttttgattttttgattaaggccattctttcaggagtgaaatggtattgcattgtggttttgatttgcattttcctgattattagtgatgctgagcaatttttcttatgtttgttggccatttgtatgtctttttttgagaattgtctattcatgcccttaactcatattttatgggattgtttgttttttacttactaatttgtttgggttcattgtagattctggatattagtcctttgtcatatgtatagattgtgaagattttctcccactctgtgggttatctgtttactctgctgactgttccttttgccgtgcaaaagctctttagtttaattaaggtctcagctatttatctttgttcttattgcatttacttttgggttcttsgtcattaaatccttgcctaagcc

SEQ ID NO: 140450 - DNA, 602 bp, Homo sapiens
cagattagaggaaaacatttgcaatgcctaaaactgacaagggactactagcaggactatataaggatcacctgcaaatcaataagaaaatgatggaagcacatagtacaaaaatggacaatgaatgtgaacaggcaatttatagaaaaggaacccccaagtggctaatcagtcctaattatagccccaattattagtaattaaagaaatgcaaaataaaacagcatatttctttatgcacatgaaattggcaaaagttagaaaactggataatgtccagtgttgaagtccatttaggagttgcaggacaattagagtactgacaaaggaagttcagatgagtacagccattctgatgagaagatgagcagtgtttagtcaaattaaggagctgcatctccarcaaccctgcaacccctttctaggatacatacattccagggatgcaggtcaggcccacatgtatatgcagttccatgtgagatacaagcattgcttgcaatagtagagaaccaggaatgatccaggtatcccaggagcaatgtagatatgtggattaatatgatttggatatttgtcacttccaagtctcatgttgaaaa

SEQ ID NO: 140451 - DNA, 404 bp, Homo sapiens
ttctagaaacgtatcctttttatctaaattttcaaatttatatgtatagagttggtcgtaagattttgcattttaaaatgtgtataaatgtcatttacccttttcgttctgaatctcctgtattttccttaggagtcttgccagaggtctcattaaagttttcattgcctcaaaatttgattttrtcttctctatttttatatttcattgaattcagcttttgtccttattatttacatgtattttctttttgctgtttttctgcttttccatcctcttaattcacataattagctcatttgtttagtcattttactctaacaaaattgtttaacaatctgacattctatgcagcattttgaatgaacttatttcatctttctataaagactaaacatctatta

SEQ ID NO: 140452 - DNA, 409 bp, Homo sapiens
atctaaattttcaaatttatatgtatagagttggtcgtaagattttgcattttaaaatgtgtataaatgtcatttacccttttcgttctgaatctcctgtattttccttaggagtcttgccagaggtctcattaaagttttcattgcctcaaaatttgattttgtcttctctatttttatatttcattgaattcagcttttgtccttattatttacatgtattttctttttgctgtttttctgcttttccatcctcttaattcacataattagctcatttgtttagtcattttactctaacaaaattgtttaacartctgacattctatgcagcattttgaatgaacttatttcatctttctataaagactaaacatctattatgttttcagttatttcctcttcctcc

SEQ ID NO: 140453 - DNA, 457 bp, Homo sapiens
gaagatgacatttgaactgtgccttggaggataaatacaagtctactgatgcggagaagaggatgagagccttgcaaggagagaagatggcctgggcaaaggcacagaggcctcaaagtatatggtgggcaggggactgctgcatggccaagtaaaygaggagccggaggagacgaggcttaggaaacaggctggtgtcaaattgtgaaagccgcagatgtcctgctaagtaatagggttgtgccttatctatgattaatggcaagcaggcacagtttttgccttggagcccggtgaaagcaggattgacttgaattgatagaaagagaaaagaggcagcaaaccatttaattgattgactgatcaattaattaattacccaagtctccttgtgaaagttccaaaccttctcactctcctctcactccacattcagttctacatagcagcaggaatt

SEQ ID NO: 140454 - DNA, 471 bp, Homo sapiens
gagaagctagagagaagatgacatttgaactgtgccttggaggataaatacaagtctactgatgcggagaagaggatgagagccttgcaaggagagaagatggcctgggcaaaggcacagaggcctcaaagtatatggtgggcaggggactgctgcatggccaagtaaacgaggagccggaggagacgaggcttaggaaacaggctggtgtcaaattgtgaaagccgcagatgtcctgctaagtaatagggttgtgccttatctatgattaatggcaagcaggcacagtttttgccttggagcccggtgaaagcaggattgacttgaattgatagaaagagaaaagaggcagcaaaccatttaattgattgactgatcaattaattaattacccragtctccttgtgaaagttccaaaccttctcactctcctctcactccacattcagttctacatagcagcaggaattc

SEQ ID NO: 140455 - DNA, 612 bp, Homo sapiens
tttactatacttccatttcaactcacactcaaattcatcactgataatgtctactttataaaatattccttcaaagcagccattggcctaatccccagatgatgccattgatccatgacaatagggagaataatgtctccatcattactttcttctcatagtcttttaattccttatacagaggctagtttcaactgcagaagtaacatggggtcctttgtctatcaaacactccccttgtaacattcatatctgctctgggacagaaatctgtcctttggacaccagagtaggaggtttaagaaaggccaaacgttgatacaatccaactgatgtagagtgataaggaaggcagtcaggcagcatgaggaagtgggaggatgggagttacagagaatttctgatgtagacaatgagcttcttttctttttcttaagggatttccacaatcctccactttgtggtattggggacagtggtaatgacagggtgggaagggcagaagaggcttatttcaagaggaagcagtaaaaggtgggcctgtgaggacctgkttagcaggctttaacatcctatgtacaagtccttatcttttgaagtgctctcctgatc

SEQ ID NO: 140456 - DNA, 564 bp, Homo sapiens
ttcaacatagcactagaagttttagcaaaagcaactgaggcaaaagaaagaaatgaaagctgtctaaattggaaaagaagtaagtgtatctctgtttttagatgacatgatgcaatatgtaaaaatctctacagactccaccaaaaacttgttgaaactaataaatgaattcagtaaagttgctggataagaaatcaacctgcaaaatccagttgtgtttctagcaccaaaaacaaactatctgaamaagaaattaaataaaaaacaatcccactcacaataagaaaattataataccatattcaaaaacaataaaatacttaggaataaatttaaccaaaaagatgaaagacttggacttagaaaactatgacattgataaaagaaattgaagaagagacaattaaatagaaagatagctcatgttcatgaaatggaggaattaatattgtttaaatatccatactgcccaaagctatctgcagattcaatacaatacctatgaaatttccaatgatatttttcacagaaatagaaaaaaatgctcaaaatacatttggaaac

SEQ ID NO: 140457 - DNA, 591 bp, Homo sapiens
ctcaccaaggtacccaagcaacgttccaaacatggcattagcctcaaagttcaatgactctatagttctatggaatgcctacaaatatttttaaaatgtaatcacttatagaaagattcaacaggctattttttcccttcaaataaatttagaatacacacacacacacaaaaaaaacacctcgtgattatctccacaacgaatctcagtatatatgtctgttcttgctctagagatctatgtactaaataaagcaagtaccaccccgcccccccaacacacacacatgcttgcccaatatactatagtgaaactaggacagaaaaatttctataaatgcttccacataaaaagtggaaataggaaacatttatggaatctacttggtagatgttgcaagggcacctatactgaccatggaaaatattcctgtatttggcctgggttctgctccctgaaaatagctgcctggtstatagtttctatgttccttagctctactctctagaaggtccttctagttttattagatactgtgaccatatctgaatttgccattggagaatattctctcacagggagttgagagca

SEQ ID NO: 140458 - DNA, 594 bp, Homo sapiens
atgttagcaagataaacatgtattaaaatcagaaataattgatttccatgcactctactccaattggtgtgatgaacccaaagttgagtcatagtaaggaaagttgcacagttaccaagacaagaattctgtggagattatctcatttctcacaccaatcacagggtatctttttatccctaagaatatggcacaggccaggccaggccaagccaagacactgaaggccattgcattttggaggaaaatgtgcactattttttatatatacatatatatatatatatrtgtgtgtgtgtgtgtgtgtgtatatatatgtatgtatatatctatacacacacatatgtatatatataatatataattatattatgtatatattagttcaacactaatctttgaagtctgtgtacctgtttctcttgggtatgcagacaatatagtattttcaatattttgatttaaaatcaacaaatacctcctttcatccatattttattagcctttgtaagagctgtgtaatgagataggcattactgaaaacaagagaatacaaaaggcaaaccaatttctatatatattgcttcacttttt

SEQ ID NO: 140459 - DNA, 352 bp, Homo sapiens
aacaatactttgcatctttcagtctaatcaagttgacactcaatattaaccatcacaaatcttaaagctcctaaataatcaactttgactctatgtctcacatccaggtcacgctaatgcaaggagtgagctcccacaatcttgggcagctccaacccctgtggctttgcagggtaccagccccattgcggctgctttcatgggctggcattgagtgcctgtgacttttccaagcacacggttcaagctgtcagtggatctaccattctggggtctggaggatggtggccctcttctcacagctccactagggagtttcccagtsgggactctgtgtgggggctcttacccc

SEQ ID NO: 140460 - DNA, 510 bp, Homo sapiens
gtgtttgacagttgtgatccattttgagttaatttttgtgaagcttggaaggtctgtatcaagattcttcttcttcttcttttttttttttgcatgtgggtatccagttgttccaggatcatcatttgtggaaaatatttttttgttsttgttctccattgtttgtgtctttgtttctttgtcaaagatcaattacctatatttatgtgagcctccttctgggatgtttattctgttccattgatctatttttcttaactttcactaatactacactgtcttgtttactgtatttcatagtatgtcttgaagtcaggcagtgtcaatcctccaactttgttcttctcctttaatattgtgttggctcttctgggtctgtttcccttttatataaacttgatcattagtttgtcagtatccacaaaataacttgctggaattttgaatgggattgcattgaatctatagactgagctagaaagaactgacatattgataactgtgtcttcc

SEQ ID NO: 140461 - DNA, 510 bp, Homo sapiens
gtgtttgacagttgtgatccattttgagttaatttttgtgaagcttggaaggtctgtatcaagattcttcttcttcttcttttttttttttgcatgtgggtatccagttgttccaggatcatcatttgtggaaaatatttttttgttgttgttctccattgtttgtgtctttgtttctttgtcaaagatcaattacctatatttatgtgagcctccttctgggatgtttattctgttccattgatctatttttcttaactttcactaatactacactgtcttgtttactgtatttcatagtatgtcttgaagtcaggcagtgtcaatcytccaactttgttcttctcctttaatattgtgttggctcttctgggtctgtttcccttttatataaacttgatcattagtttgtcagtatccacaaaataacttgctggaattttgaatgggattgcattgaatctatagactgagctagaaagaactgacatattgataactgtgtcttcc

SEQ ID NO: 140462 - DNA, 414 bp, Homo sapiens
taaattgccttattaggccaggaaaagaggctcacatctataatctctgcactttgggaggctgaggcagaggattacttgaggccagaagttcaagacctgcctggacaatgtagtgggaccccatttcttaaagaaaacataaaaatagccaggcctggtggcacgtgcctgtagtctcagctacttggtaagctgaggcaggaagatggcttgggcccaggagttcaggattatggtaagctatgatyataccactgtacaccaacctgagtgaagagcaagactctgtctctaaaataaatagtcttattaatggaacatttgttttactgaaacacctaggtaaacattccttgattttctaaaaattagccttttttttcctgatcgaaataaggtattttaaaataa

SEQ ID NO: 140463 - DNA, 578 bp, Homo sapiens
gaaggcagcatgctccttaagagtcatcaccactccctaatctcaagtacccagggacacaaacactgaggaaggccgcagggacctctgcctaggaaagccaggtattgtccaaggtttctccccatgtgatagtctgaaatatggtctcgtgggaagggaaagacctgaccgtccccaagcccgacacccataaagggtctgtgctgaggaggattagtataagaggaaggcatgcctcttgcacttgagacaagaggaaggcatctgtctcctgcccgtccctgggcaatggaatgtctccgtataaaacccaattgtacgttccatctactgagatagggaaaaacctccttagggctggaggtgggacatgtgggcagcaatactgctttgtaaagcattgagatgtttatgtgtatgcatatctaaaagcacagcacttaatcctttaccttgtctatgatgcaaagacctttgttcayatgtttgtctgctgaccctctccccactattgtcttgtgaccctgacacatccccctcttggagaaacacccacgaatgatcaataaatacta

SEQ ID NO: 140464 - DNA, 390 bp, Homo sapiens
taaaataaaggcttagagttctcagtagactactatactatacaaatgtcttgcattaaccaagtgtcagtagaataatgcaatttaatagaaattagttttatttacactttctctccagacctcttccaatatttgagattggggcatttgacaacattgccaaaccatgcgaatctcagttatrgatatctgagggaaacaggtgtaccaagagcaattctatcttcaatgaaggaaatgtacattgctattatgaatgcatctgtgcttttcaattctgaaattcctgttcttaaacattaatttacactttaaaatgcccttaaaagtcgatgaaaaaagaaacacaaagttacctcagcattaatcaagaaatttgttgaattc

SEQ ID NO: 140465 - DNA, 525 bp, Homo sapiens
tgctactcatgagtcatatgtgcaaatttgggaggagtgagagtgaaagaatcagtgaaaattcaggctgcaaattcaggctgcaatgtcagcaagcttgttaaagtcagccatcttggttctaacaggtatcaaccagtttttgttttttttgtttttttttttttttgagatggcatcttgctttgttgcccaggctggagtgcagtggtgcaatctcggctcactgcaagctccacctcctgggttcacgccattctcctgcctcakcctcctgagcagctgggactacaggtgcccaccaccatgcccagataattttggtatcaaccagttcttttatcaaataagcaaagagagtttcagtggatttttttctttttttttttttcatctgcaattcttcaaagcaagaatttctgttagtcattatgaactctctgggacattgtttcaatagaaggccttgaagcatcacagacgtcttacagtgaaaaaattctgggcatatgattattgctatta

SEQ ID NO: 140466 - DNA, 616 bp, Homo sapiens
ggcccatctgagattgcatagctggtaagggcatggtgggatctaagtcgtttctagattccaagctcttgctttctctacatccatagtattaatctcttttcttgtactaaaataaaatattggcggtgagctttttactttcagaatcaccctcctgcctctttggcacacaggtaagaagggtagatagagacacagactcagacaccrgaatcctttctgttatttgtagttataacccaggttccctgcattaaaggagcccccttgtatgagtcagttcttgcattgctatacagaaatacccaagactgggtaatttatgaaggaaagaggtttaattggctcacagttccacagactgtaccagaagcacagcagcttattctaggaggcctcagggagcttttactcatggttaaaggcaaagtgggaggaagtgtcttacatggaaggagcaggaccaagagagagagggggaggtgccataaacttttaaacaaccagatctcatgaaaactcacccactctcatgagaacagcactgaggggataatgtcaatgtatccatgagaattctgcccccatgttccaattgcctcccaccaggccc

SEQ ID NO: 140467 - DNA, 528 bp, Homo sapiens
catttaagagggaataaactgttggtatattcagataamgtcatataatagaatactgtataggagttacacatatcatgagggataaacctcaaaacgatattgattaaacattttttgggggaggaaataaattattataccagttagactaaaataagcaaacaaactgtatatacttttaaatggataattacaaatgttttagaaaaatatatggaaacaataatccccaaattaaatattattgatacctcttgggatagatgggtctgtaatcagagatggagatttcaatcggattgttgttttattacttaagttgggtgttcactgtactgttctttgtatattttgttatatcctaaatgtttcccccttaaataaatgatcaaacagcaacagaaaagactaaatagcatactggtgaatcagatatttgcttaagtatttgctgtgaataatagttatttgttagcttaagaaaattaaaaattgaatattagaagtgtacatacatataagtct

SEQ ID NO: 140468 - DNA, 643 bp, Homo sapiens
cacaggtaccaacgtgatgctacttaaaggagacagaactgataaatgcagaccatctgcttaacaatgtgccaacctaacrtactgaaatattttaaaccttatcttaattgtcatccaagtttttgaggttggtactattattatcttcattttatagatgagggaaaaaagaaccttgagagtttagtttaccctcaagaccccttggaggttccacggtcacacagttagtaagtttagagccaagattcaaatcagcatgtctgactccagagatgaaacacttcatcacaattccgtggctttttccaaagcaggaaattttggcagctgttagcccaagggatgctaagcatctgtatgttcttaaatatataaagctttgttgttataaacatcataggacaatttattgaaatattaatgtatgcacgttctccttaaaaactttttattcccctccttccatgtttagtaagtaaccaggttgggtttagtcttttgttcgtagagaggttcatgatacagggtccaaagcaggaattatttcctgccagtctttatagaagcttacacaaattgaagggattccattaggagtactcaaaggagaggaatcaaggtatgcgaagcagagagg

SEQ ID NO: 140469 - DNA, 619 bp, Homo sapiens
catcacaattccgtggctttttccaaagcaggaaattttggcagctgttagcccaagggatgctaagcatctgtatgttcttaaatatataaagctttgttgttataaacatcataggacaatttattgaaakattaatgtatgcacgttctccttaaaaactttttattcccctccttccatgtttagtaagtaaccaggttgggtttagtcttttgttcgtagagaggttcatgatacagggtccaaagcaggaattatttcctgccagtctttatagaagcttacacaaattgaagggattccattaggagtactcaaaggagaggaatcaaggtatgcgaagcagagagggtaaagaggatttgatcaagactggggtcaacggatccattcatatctcttgatggtagctgcctggggaccgttgcaagttgcatgaacatggcttgaacgctagatactggagtttctatcctcaacatagactcctcagtctccaacataggacagagacactaggttgctggaccacagggcttgtatttaaacagtgggccaacagtgttgaccagtgtggttgtgggaccaaggaccaggagacagccctgatgttggg

SEQ ID NO: 140470 - DNA, 625 bp, Homo sapiens
atcatgaaatcattgatccttttctcacctgatctgaaatactcttcttatcgtatacaaatgagagtgcaatgttgctatctgtttccaggcttttagtttctacccacccacctctaccctgcctgttgagcttgtgttcaatttacrtatttgtttggggaagaattaatataattacaatactgaattttccccttcaaggatatggtatctccgtctttttttataaatgtcttctgtgaagtcttttataaaagttttgtagttttctttcaataggttccaaacatcttcaaaataagtttattccctaggtgtttgccatttttggttatatttagtagtaatattatttccctaatatatctcttaccgtttatagttgattattaactttactgtatgaattaaaaaattgttctttattgaatctttttatgtctaataaatttttgattacttaaatatgtaaagtggaggaaaatggaccaaaactctatttcgagtggagggatgggctcactgtcctacttgctcaattccctctctctctggtagccccaagaacagcccctccacaagtctcacttgccctccataggtcacagcttgaaacccagaa

SEQ ID NO: 140471 - DNA, 625 bp, Homo sapiens
atcatgaaatcattgatccttttctcacctgatctgaaatactcttcttatcgtatacaaatgagagtgcaatgttgctatctgtttccaggcttttagtttctacccacccacctctaccctgcctgttgagcttgtgttcaatttacgtatttgtttggggaagaattaatataattacaatactgaattttcccyttcaaggatatggtatctccgtctttttttataaatgtcttctgtgaagtcttttataaaagttttgtagttttctttcaataggttccaaacatcttcaaaataagtttattccctaggtgtttgccatttttggttatatttagtagtaatattatttccctaatatatctcttaccgtttatagttgattattaactttactgtatgaattaaaaaattgttctttattgaatctttttatgtctaataaatttttgattacttaaatatgtaaagtggaggaaaatggaccaaaactctatttcgagtggagggatgggctcactgtcctacttgctcaattccctctctctctggtagccccaagaacagcccctccacaagtctcacttgccctccataggtcacagcttgaaacccagaa

SEQ ID NO: 140472 - DNA, 625 bp, Homo sapiens
atcatgaaatcattgatccttttctcacctgatctgaaatactcttcttatcgtatacaaatgagagtgcaatgttgctatctgtttccaggcttttagtttctacccacccacctctaccctgcctgttgagcttgtgttcaatttacgtatttgtttggggaagaattaatataattacaatactgaattttccccttcaaggatatggtatctccgtctttttttataaatgtcttctgtkaagtcttttataaaagttttgtagttttctttcaataggttccaaacatcttcaaaataagtttattccctaggtgtttgccatttttggttatatttagtagtaatattatttccctaatatatctcttaccgtttatagttgattattaactttactgtatgaattaaaaaattgttctttattgaatctttttatgtctaataaatttttgattacttaaatatgtaaagtggaggaaaatggaccaaaactctatttcgagtggagggatgggctcactgtcctacttgctcaattccctctctctctggtagccccaagaacagcccctccacaagtctcacttgccctccataggtcacagcttgaaacccagaa

SEQ ID NO: 140473 - DNA, 625 bp, Homo sapiens
atcatgaaatcattgatccttttctcacctgatctgaaatactcttcttatcgtatacaaatgagagtgcaatgttgctatctgtttccaggcttttagtttctacccacccacctctaccctgcctgttgagcttgtgttcaatttacgtatttgtttggggaagaattaatataattacaatactgaattttccccttcaaggatatggtatctccgtctttttttataaatgtcttctgtgaagtcttttataaaagttttgtagttttctttcaataggttccaaacatcttcaaaataagtttattccctaggtgtttgccatttttggttatatttagtagtaatattatttccctaatatatctcttaccgtttatagttgattattaactttactgtatgaattaaaaaattgttctttattgaatctttttatgtctaataaatttttgattacttaaatatgtaaagtggaggaaaatggaccaaaactctrtttcgagtggagggatgggctcactgtcctacttgctcaattccctctctctctggtagccccaagaacagcccctccacaagtctcacttgccctccataggtcacagcttgaaacccagaa

SEQ ID NO: 140474 - DNA, 621 bp, Homo sapiens
cttgctatgctattttagtacaaacctttggctcctttccttggctctgttctgcacttgaactttagactacatcgatctccacaattccaggtgacttcctggcccagttaagacccacctcccacatccttctgcatcacagggacacaaaattggcttccttgctggatttgtccagactctagcaaaagggactcagagtctcatgaaggaagacatgttggaacttctrctgattagatatgaagtcaaggaagaggaaaaagaaaactatctgcaaggagcagtatagtattgttgataagaagaaagaaggacttggaaggagggctgctttttggagagaagacatgagtctgtacagaacatgctaatttgggggtggtgattgcctgcataaattcccagagcactgaggaatgtaggagaaaaggaagaccctgactgagtcaattactacgggccacagtttaagtcatggttgaaggtgaatgcgataaggtacaaatcataaagagggaagagcagtaggcttgggacagaatttgtggatacagtgctttttccggtaccacagaagaaaaagggtgaataaagggaacccagtgtgggtgacct

SEQ ID NO: 140475 - DNA, 610 bp, Homo sapiens
tgtgctttcattgggatgttcccctatcagaactgcagaagaaatgcagggcagaaatatttgtaaactggaccccacttggaatgacagctagggtgaaggttctaagtcaattggacttacttcagctttagagctaagtggctatccttcaccatcctgcaatggctgcattattctgatcttgtttataactggctggctcacttgaggaacacagagcttttattgagttattctgataaatcagagaaaacaatgtactattggttttatatctctgagaataactaccacgttcttgaccaattataawatgccatgtgagaacaatgtttatctctcaggtgctcaaaagcttttatggacatgctcttatttacttacatgctattccaaagaagtaggtggtggatcactgcaatggaattagaatcatcttcacgtaataagagagacacaaggacattaagcaacttgcctaaggttatgaagcgggaaaagacaggactaagttgatcctctcaaatccacataccagggttaaagcccgaaagaaacataaaagttagatctttaagacatgacaaactggaacatatttcagaaa

SEQ ID NO: 140476 - DNA, 453 bp, Homo sapiens
atgacccagcaatttcactcctaagtgtttgcccaaaacacaaaaaaacctaagtccacagagaaacttgtacaataatatgtccagcaactgtgttcaaaatatctaaaaactggaaataacccaaatgtccatcaaaaaatattaaataaattatagaatattcatataatagaatatttaacaataaaaagaatgaactatgatacaccacracatggttgagtatcaaaaatgtgttaagtaaataaagagtatgtgctctgtgatttcacttaccgtgtttgaaatctaaattcagagaaagttaatcttttatagaaattatagaaatcaaatagtggctgcctggggagagatgagaagggaagggtggggaatggactggaaggagcatgagggaactccctggaggaatacaaatgctttgcatattatttggggtagtagtac

SEQ ID NO: 140477 - DNA, 626 bp, Homo sapiens
tggggacttgatgatgaaagtggtataaatggggactttggggacacagtctggggtccatattacacgattattcacagkgcaccataggaccttcctcattgacatggagagaaaggcagcattaacctggcaggcctggtggggattccatgggcccagggctccttctctttttgttccatctggagcttttcaacctggccatggggggtggtagttttgagccccccagtgtcactataggacatttcttccatagcaatcattattattcctatttctcttagttcctctacactccatcctgaatgaccagttttctagtttagggaaaattaaacacttattgtttccaagagtatttctgggtcatttcctgggatttttgtcctctctttaaggataatattttgtttcccattaacatgcatgtcacttctataaatggaaacttcttccacttattgactgtctgaaaaattggaaaccataggataaacttattttcaaataacatgtcagtaatattttcaaacagtaggcactaaatttaaaattgtgtatttgtgtatttgttagttggaaaaaagtacaataaacacaccatagggtacccaaaagtc

SEQ ID NO: 140478 - DNA, 463 bp, Homo sapiens
gtgtcacaatcagccctgctttctgaagtgttttggaaaagaatgtctgtgacgtcacatttcaaagaaatactgtggcctcaaatcaagtagtgagctaaaacaatgctccactacacaccaataataactcgcctttcaaacagwgatgcatttctcatggacctgggaagaatgccatctccaccacataatgtcagcaaaatgtactttcacttcctctttttcttctgaagcatgacggttgtagcaggtctcttggacgaaaatatatgcaaagagttggaactttcttaattcttccctccccgcaaaatgcttgagacaaaagtctagtaggtacatttgtattttagggagcctaaagctgtgtgagtctgtgtgtatcctcttttgcatacagaagacattttctccttaatccacacctaaactttttggtagccaagcactttctattaac

SEQ ID NO: 140479 - DNA, 463 bp, Homo sapiens
gtgtcacaatcagccctgctttctgaagtgttttggaaaagaatgtctgtgacgtcacatttcaaagaaatactgtggcctcaaatcaagtagtgagctaaaacaatgctccactacacaccaataataactcgcctttcaaacagagatgcatttctcatggacctgggaagaatgccatctccaccacataatgtcagcaaaatgtactttcacttcctctttttcttctgaagcatgacggttgtagcaggtctcttggacraaaatatatgcaaagagttggaactttcttaattcttccctccccgcaaaatgcttgagacaaaagtctagtaggtacatttgtattttagggagcctaaagctgtgtgagtctgtgtgtatcctcttttgcatacagaagacattttctccttaatccacacctaaactttttggtagccaagcactttctattaac

SEQ ID NO: 140480 - DNA, 463 bp, Homo sapiens
gtgtcacaatcagccctgctttctgaagtgttttggaaaagaatgtctgtgacgtcacatttcaaagaaatactgtggcctcaaatcaagtagtgagctaaaacaatgctccactacacaccaataataactcgcctttcaaacagagatgcatttctcatggacctgggaagaatgccatctccaccacataatgtcagcaaaatgtactttcacttcctctttttcttctgaagcatgacggttgtagcaggtctcttggacgaaaatatatgcaaagagttggaactttcttaattcttccctccccgcaaaatgcttgagacaaaagtctagtaggtacatttgtattttagggagcctraagctgtgtgagtctgtgtgtatcctcttttgcatacagaagacattttctccttaatccacacctaaactttttggtagccaagcactttctattaac

SEQ ID NO: 140481 - DNA, 463 bp, Homo sapiens
gtgtcacaatcagccctgctttctgaagtgttttggaaaagaatgtctgtgacgtcacatttcaaagaaatactgtggcctcaaatcaagtagtgagctaaaacaatgctccactacacaccaataataactcgcctttcaaacagagatgcatttctcatggacctgggaagaatgccatctccaccacataatgtcagcaaaatgtactttcacttcctctttttcttctgaagcatgacggttgtagcaggtctcttggacgaaaatatatgcaaagagttggaactttcttaattcttccctccccgcaaaatgcttgagacaaaagtctagtaggtacatttgtattttagggagcctaaagctgtgtgagtctgtgtgtatcctcttttgcatacagaagacattttctcyttaatccacacctaaactttttggtagccaagcactttctattaac

SEQ ID NO: 140482 - DNA, 662 bp, Homo sapiens
aataatgaataaaaatgctttatttgctttttgatgtttaaaaatttgcaatatattaaatttttttacaaatgactaatgacatgtcaatatctactaataagtctacgtggaagtacttaaatttcccgaagagttcaatctggaaaaattctcatcgtagagaccattcatttccatagatttccccatgaataggttgtaaacgtgatgacctaagaaggccagcygcatgtgagttaatattaaatttgaactgaccaataagtcatgaaaattatctgagaaaacccagaaagtgatcatgtcaatttatctgatatcaggtggaaattataactcttaatcaagatcaagttaattttagttttcacacttttgggttttgcacactgttgtgattggaaaatccatgcatagcacatatttaacatcacatatctttgccctgaaatagatcatactgacacagtcagtccctcattcatatccttttgacttagcttggaggtccctgatacacggtgtcagctgttttctgtgtttctatgcccaagcaggttctctgaccatggggtattctctgcttctgcagtgtgggccaggtgtgctgggaaattcacatccttgagagcaactctcagccaacaagggacagaagt

SEQ ID NO: 140483 - DNA, 662 bp, Homo sapiens
aataatgaataaaaatgctttatttgctttttgatgtttaaaaatttgcaatatattaaatttttttacaaatgactaatgacatgtcaatatctactaataagtctacgtggaagtacttaaatttcccgaagagttcaatctggaaaaattctcatcgtagagaccattcatttccatagatttccccatgaataggttgtaaacgtgatgacctaagaaggccagctgcatgtgagttaatattaaatttgaactgaccaataagtcatgaaaattatctgagaamacccagaaagtgatcatgtcaatttatctgatatcaggtggaaattataactcttaatcaagatcaagttaattttagttttcacacttttgggttttgcacactgttgtgattggaaaatccatgcatagcacatatttaacatcacatatctttgccctgaaatagatcatactgacacagtcagtccctcattcatatccttttgacttagcttggaggtccctgatacacggtgtcagctgttttctgtgtttctatgcccaagcaggttctctgaccatggggtattctctgcttctgcagtgtgggccaggtgtgctgggaaattcacatccttgagagcaactctcagccaacaagggacagaagt

SEQ ID NO: 140484 - DNA, 662 bp, Homo sapiens
aataatgaataaaaatgctttatttgctttttgatgtttaaaaatttgcaatatattaaatttttttacaaatgactaatgacatgtcaatatctactaataagtctacgtggaagtacttaaatttcccgaagagttcaatctggaaaaattctcatcgtagagaccattcatttccatagatttccccatgaataggttgtaaacgtgatgacctaagaaggccagctgcatgtgagttaatattaaatttgaactgaccaataagtcatgaaaattatctgagaaaayccagaaagtgatcatgtcaatttatctgatatcaggtggaaattataactcttaatcaagatcaagttaattttagttttcacacttttgggttttgcacactgttgtgattggaaaatccatgcatagcacatatttaacatcacatatctttgccctgaaatagatcatactgacacagtcagtccctcattcatatccttttgacttagcttggaggtccctgatacacggtgtcagctgttttctgtgtttctatgcccaagcaggttctctgaccatggggtattctctgcttctgcagtgtgggccaggtgtgctgggaaattcacatccttgagagcaactctcagccaacaagggacagaagt

SEQ ID NO: 140485 - DNA, 580 bp, Homo sapiens
ggtggcctgcctcaagagttaaatcctgagacaattctggggtcttaggaaggacaaattttctaagcttccaagggcttgtggctgagcccttctgatattgacagtaaaagaggtacagtagtgtggatcctaagaggtggcaaagcactgggccttctggggggctgaatctctccaagcacagcaatcatagagatagcatctataaatcagctcacaacatagctgttgaaaaaatataactttttcttagaacttaattttaatattgaggaccccccctgcttttcactttccaccaggtggttgagataatttcagtccattggcccagtcmtaaggagcatttatgaaatcaggttgctctgggaagagcaggtttgaagcacgacaatgtctttggtcactgacatatgctcctaagcatcatctcacatttcctcttcctcctgcaccctgaagctctagtggctttctctctgctttccctgcatcatgtgggaaggcaagggaataattcagctctgttccttccctgtcaggctaggaaccagggatcagggatccctgcaagtcc

SEQ ID NO: 140486 - DNA, 538 bp, Homo sapiens
ttacatgatcccttgtgcagatttcaatctgcattaaatatgttaaatgtaaaaaaaaagggctgttgctttggtttcaagtggcagacaggatatatgctacacatttcaaaataagaaaggagatatttgtgataactgtctgtatcactaagatccactaaagaagtttggagaaagaaaccacagcacaggatgaatttaggaaggcaaagatgctgagagaagacaggaggaatgaggcccaggaccaatgaaagaatataaagctgttaaagagtttggggtaagtgttaagcattgtcactgccttggagaaggtgggtgtagggagattcccacctaatgggagctagtgctctcagtagaggaacacagcccacacagggaacaawgaaaagagagagagagagaagaaatcaatggccattttctcactcacctcttgctctctgtactctcaacagagcttcccactgtgagaccaactggaacccaaagagcaagggatgttgtagaccttaggggtcagccaggt

SEQ ID NO: 140487 - DNA, 496 bp, Homo sapiens
gtggggatcccatttgtccctgactcccactggttccataccactctgagcacccaatcccagctatgcctccctcgctgcagccagtgtcttcacagtgacagctccagatggatcgccatcaccatcaacagtaattactcagtaaagtgtttgaccaactagaagaataaggcactcattcatcactaagtcactgttcttctcaacttgactgtgttgagtttagcttgctaataagccacccaagaagtaagtgagaaaggaggaagctgagtggaggacataaaataagaaaagagtcactattttttcttggattatttgacttttatcaacaaactgtaaatctggcaaatccacagagagtttttttcctttgtggcatgggtgttgatattttcatggagtcttaactctagggatttcaccaacattcagacctccacccctcaatrtacttataactaagcaacaaagtctagctgtacactag

SEQ ID NO: 140488 - DNA, 569 bp, Homo sapiens
ggaatttttatgaagtacctatcttgtttaagatactttgcttggtkcaagaattgagatggaaaaagaagtataaggcatcacttctgtcctcatagaacattcctggttcccgtactctgtagatctctttcacaacgtttatcacgttcttggtgtttgtttccatccctgcctttcccatgagatacagttgtgcagatttttgtcttctatacctagtaaccaggacaatgcctaacactggcataaactcttagaaaattagtttaatattaaaggaagtaaatgcaccgagcgtcctacttagctagacggaaggtgagaaaagatcaaaaagaggtgagaacagaaagtctgtttggatgcagagtaaatgaagatgctaagagggtgggtgtgtgggggtaagaaaggcagacacaggtccccatgcctctcagccagcccagtctatccaaggctttccccaggaccaggcacggtgtggaggacagcatccttcagtggttaagcagccaagattcacaataaggggttccctgaggtgggactggagagtgaatgtg

SEQ ID NO: 140489 - DNA, 569 bp, Homo sapiens
ggaatttttatgaagtacctatcttgtttaagatactttgcttggtgcaagaattgagatggaaaaagaagtataaggcatcacttctgtcctcatagaacattcctggttcccgtactctgtagatctctttcacaacgtttatcacgttcttggtgtttgtttccatccytgcctttcccatgagatacagttgtgcagatttttgtcttctatacctagtaaccaggacaatgcctaacactggcataaactcttagaaaattagtttaatattaaaggaagtaaatgcaccgagcgtcctacttagctagacggaaggtgagaaaagatcaaaaagaggtgagaacagaaagtctgtttggatgcagagtaaatgaagatgctaagagggtgggtgtgtgggggtaagaaaggcagacacaggtccccatgcctctcagccagcccagtctatccaaggctttccccaggaccaggcacggtgtggaggacagcatccttcagtggttaagcagccaagattcacaataaggggttccctgaggtgggactggagagtgaatgtg

SEQ ID NO: 140490 - DNA, 569 bp, Homo sapiens
ggaatttttatgaagtacctatcttgtttaagatactttgcttggtgcaagaattgagatggaaaaagaagtataaggcatcacttctgtcctcatagaacattcctggttcccgtactctgtagatctctttcacaacgtttatcacgttcttggtgtttgtttccatccctgcctttcccatgagatacagttgtgcagatttttgtcttctatacctagtaaccaggacaatgcctaacactggcataaactcttagaaaattagtttaatattaaaggaagtaaatgcaccgagcrtcctacttagctagacggaaggtgagaaaagatcaaaaagaggtgagaacagaaagtctgtttggatgcagagtaaatgaagatgctaagagggtgggtgtgtgggggtaagaaaggcagacacaggtccccatgcctctcagccagcccagtctatccaaggctttccccaggaccaggcacggtgtggaggacagcatccttcagtggttaagcagccaagattcacaataaggggttccctgaggtgggactggagagtgaatgtg

SEQ ID NO: 140491 - DNA, 608 bp, Homo sapiens
ggcaagttgtgagcgctaagagtaaggaaattccaagaagggcagcatctccatgacctggaagacctagaacagtcttcagatgggtcaggatgggagctaaacacagccctaaagatgtacttacaccaatattaaattgcaacactcttgagagttattgtttcttgtgttgagcttttctgcacgatgagccttaggcatgcagcaagacagatgagccccaaatcacaccaagttccaggtcatgggggcccagatgctggctgggscctccatggggaggaggcctgaggatgagacatgcctctcctactctattccagccctgagaagtggggatgaggcaaaggggagcccaatggctgctgaattccattctctttccttcctccatgggaaaaggtagtcttgcccaaagttgtacagactcacaagcaggagttaccagagaatatctctcaagatcttatttcactccaagtttctggaaacaagggctaaataccgtattgtaagcaatgaacactcaacagccacttaggtctccattgtgacaaactgaaatcaacaatatatttcttgtatctagataaaaatataagctt

SEQ ID NO: 140492 - DNA, 540 bp, Homo sapiens
tgagtcctgtatgggttgggatgagcaagactctgctgtcaaaactaagcccttacaaaccttcaggggtttaaataaagtggaggtttgttttttgcttgtgtcacagtccagcacgactcaggcagctcccattgcaatctccttccatcctctccacttgcggtcctgccgcctcacctacctggcctccgtgatcgcagtggaaaggtggacagaggaggagagtggagcagaggtttctctggccaasctagaagtagtgtgtgtaacttctacccacactccattgactaaagctgataacctagtcccaacctaactacaaatgcaccgagaaaatgtattcctcctatgttctctaaatgggaaacctatctgatgagcgtgtggtccatccctgtgatacatgtctaccgcctgactgcagtgtaactgggaatattatagcccctacatccaggcccctatagcctacagggaagtcaagcagtgacaggcagtgacagctcagtacaataaatgctcttatgagaaagg

SEQ ID NO: 140493 - DNA, 522 bp, Homo sapiens
aattctaataccaagtgtgatgggattaggaggcggggacctttgggaggtgatgagattatgagggcagagtcccggtgaatgggattagtgccctgataagaggcccctgaacactgccttgcctcttccatcatgtgaggacacagccagaaggcagagttaggaggagccggccctccctggaaaccagatctgccagcgccttgatcttggacctccagccgtgtgaggaatacatttctgttgttagtgagccacccagtctttggtgttttgttacggcagtctgaggggactgagacgctcctgactcggatcctctgactctacagccagtgttctccccacccygtcaggagaaaggcactcgtttatttccacatgttcgttcatcccagggtgctggcgccttggagagactcatataggagagcacagcccgttcggaaggtgagcacctaaacgtgctgggtcaagaataaggtaggactttggattctgaaaacacaggcacggaca

SEQ ID NO: 140494 - DNA, 343 bp, Homo sapiens
tgcatttccatctgcatatactctctttctaggtggtgagctacctgctgtcaatgactgcttgactcayatttgcatgactcaaagcctaagataaggccttgaacccagaaggtgcttaacacattattggatgggtgggtgaatggataaagtggaacctttttctcaatgctttttttcaaaataatttagttaaaggcattatgacatgaggaacactaaaggctttctaaaatatggcccattttacaatagacttcaacataatgcaagttcatcttaagccttatgtatattttttattgaaagagtgtaagagaccacaacaaaacaatccttg

SEQ ID NO: 140495 - DNA, 396 bp, Homo sapiens
cattttctatgtataatttcacacatttctactggctcatcattatttttggaagatcatcaaatcaggaagtccaatggcaagttagacaaagagtggcaaaccgattgcttytgtcacaccaacttgaatggatttatagtagtgctttaagttttgtactgggaaagattctgaggccatgttcgacctaagggtaagatcatgaattagcactcatttatggactgggagagagagaagtggcagcgcaagtgctacatagttgccatccctttgtaaaccaatggtaggggagggtgacaagtaatactgccacacaggaggcttcattggtacatgctcaagcattcatccagaatgtcagagaacctggcaattagctcattgcttagg

SEQ ID NO: 140496 - DNA, 397 bp, Homo sapiens
ttctatgtataatttcacacatttctactggctcatcattatttttggaagatcatcaaatcaggaagtccaatggcaagttagacaaagagtggcaaaccgattgcttttgtcacaccaacttgaatggatttatagtagtgctttaagttttgtactgggaaagattctgaggccatgttcgacctaagggtaagatcatgaattagcactcatttatggactgggagagagagaagtggcagcgcaagtgctacatagttgccatccctttgtaaaccaatggtaggggagggtgacaagtaatactgccacacaggaggcttcattggtacatgctcaarcattcatccagaatgtcagagaacctggcaattagctcattgcttaggatgct

SEQ ID NO: 140497 - DNA, 611 bp, Homo sapiens
gatctctctcacacctctctcaactgattcaaaacccatcgtgggctaaagtgggtgctattttatcaacaccaccaaaacacaaaggctagtttcaaaataaaaaagaattaaaacatcagacttttagacattattaaagtttttttttttttgaactagtcattctctgctctgaatttgcaggtttttaaaatttatttattttttttccagtgaattctgytgtactctctgccttgtagtgtttaattctggatctattgaataaaaaggaaggaatctagctgtctggccagaattttctttggcaggaggttgttattcctcatgcattgatatttgtcctctgtcatattaggaattactttccctattaataatgacttgatgaggttaagtgaattgtccaagcttacacagccatttagcagcagaagaggggtttgaactgtccagctccaaggccagagtttttcttcaggaaaactttcactgtatcccttcctacaacccctacaccatgcccagtcctttcactgtcatgactattgcgggaagggaaaaaagaaacagaaaatggtgccccaattaaaaaaaaaacaaaaaaa

SEQ ID NO: 140498 - DNA, 611 bp, Homo sapiens
gatctctctcacacctctctcaactgattcaaaacccatcgtgggctaaagtgggtgctattttatcaacaccaccaaaacacaaaggctagtttcaaaataaaaaagaattaaaacatcagacttttagacattattaaagtttttttttttttgaactagtcattctctgctctgaatttgcaggtttttaaaatttatttattttttttccagtgaattctgctgtactctctgccttgtagtgtttaattctggatctattgaataaaaaggaaggaatctagctgtctggccagaattttctttggcaggaggttgttattcctcatgcattgatatttgtcctctgtcatattaggaattactttccctattaataaygacttgatgaggttaagtgaattgtccaagcttacacagccatttagcagcagaagaggggtttgaactgtccagctccaaggccagagtttttcttcaggaaaactttcactgtatcccttcctacaacccctacaccatgcccagtcctttcactgtcatgactattgcgggaagggaaaaaagaaacagaaaatggtgccccaattaaaaaaaaaacaaaaaaa

SEQ ID NO: 140499 - DNA, 611 bp, Homo sapiens
gatctctctcacacctctctcaactgattcaaaacccatcgtgggctaaagtgggtgctattttatcaacaccaccaaaacacaaaggctagtttcaaaataaaaaagaattaaaacatcagacttttagacattattaaagtttttttttttttgaactagtcattctctgctctgaatttgcaggtttttaaaatttatttattttttttccagtgaattctgctgtactctctgccttgtagtgtttaattctggatctattgaataaaaaggaaggaatctagctgtctggccagaattttctttggcaggaggttgttattcctcatgcattgatatttgtcctctgtcatattaggaattactttccctattaataatgacttgatgaggttaagtgaattgtccaagcttacacagccatttagcagcagaagaggggtttgaactgtccagctccaaggccrgagtttttcttcaggaaaactttcactgtatcccttcctacaacccctacaccatgcccagtcctttcactgtcatgactattgcgggaagggaaaaaagaaacagaaaatggtgccccaattaaaaaaaaaacaaaaaaa

SEQ ID NO: 140500 - DNA, 582 bp, Homo sapiens
ttacaggcatgcaccaccatgcctggctaattttgtatttttttagtagagacgagaaaaattttgtatttttctccatgttggtcaggctggtctcgaactcctgacctcaggtgatctgcccgcctcagcctcccaaagtgctgggattayaggcatgagccactgtgcccagcatccacttttagttctttaagaaatctccatactgttttccacagtggttgtattaatgtacactccaactagcattgtaaaagtgttcccttttcaccacatccgatctgaaagcccttggatgctttgctagagctggactttattctttatataatgagactacacagaatgatttttaagtcactcaatgaaattatcagttccattctatatttatatacatatatacacttgtatacacacacacacgtatgtgaatatatcagtgctagcaatataaagaacaaatatccaccaaaaatattggtgacagaggttgttttaggaatctagatgattcatgaaaacctgagttaatacaaggtagcagggatgaagaagagacccatgtaagtgaaattt

SEQ ID NO: 140501 - DNA, 579 bp, Homo sapiens
ctcgcactgtggttttcagctccatcaggtcatttaaggtcttctctacactacactgtttattctagttagccattcgtctaaccttttttcaagatttttaacctccttgtgatgggttagaacatgctcttttagctcagagaagtttgttattaccaatcttctgaagcctacttctgtcaactcatcaaagtcattctctgtccagttttgttctgttgctggcaagaagctgcgatcctttggaggagaagaggtgctctggtttttagaattttcagcttttctgctctggtttctccccatttttgtggttttatctacctttggtctttgttgttggtgacctacagatagagttttggtgtggatgtcctttttgttgatgttgatgctattcctttctgtttgttagtttttccttctaacagtcagggccctcagctayagttctgttggagtttgctggaggttcactccagaccctgttttcctgggtatcaccagcggaagctgcagaacaggaaatattgcagaacagcaaatattgctgcctgatccttcctctggaagctt

SEQ ID NO: 140502 - DNA, 579 bp, Homo sapiens
ctcgcactgtggttttcagctccatcaggtcatttaaggtcttctctacactacactgtttattctagttagccattcgtctaaccttttttcaagatttttaacctccttgtgatgggttagaacatgctcttttagctcagagaagtttgttattaccaatcttctgaagcctacttctgtcaactcatcaaagtcattctctgtccagttttgttctgttgctggcaagaagctgcgatcctttggaggagaagaggtgctctggtttttagaattttcagcttttctgctctggtttctccccatttttgtggttttatctacctttggtctttgttgttggtgacctacagatagagttttggtgtggatgtcctttttgttgatgttgatgctattcctttctgtttgttagtttttccttctaacagtcagggccctcagctatagttctgttggagtttgctggaggttcactccagaccctgtttkcctgggtatcaccagcggaagctgcagaacaggaaatattgcagaacagcaaatattgctgcctgatccttcctctggaagctt

SEQ ID NO: 140503 - DNA, 393 bp, Homo sapiens
aacattaaccaaataattgtaccaaggaatatatacttgctaacctgtataaattttataaaagaaaaacattcatgttaaaaataaaaggcttaataaattctaggctcatgcccctgtaatcccagggctttgggttayaggctgaggcaagagcatcgcttgaggccaggagtttgagaccagcctgtgcaacatagtgagtccctgtctctccaaaaaataaaaataggcatggtggggcacgcctttagtcctagctacttgggaggctgaggtgagagaatagcttgagcataggaattcgaggttgcattgagctttgatggcaccactgcactccagcctggatgacagaggagactccaaatacacacacacacacgcacacac

SEQ ID NO: 140504 - DNA, 354 bp, Homo sapiens
ctcttaatggttctggtattattgagttccttgggaaagacatttctgagttggccttttcagagctgttgcccacctacacatggtattgtgtatttcagagtggaattcctcaatatttgttgcagaaaacaagccctgtcccaatccaggcttcttttcaaagaccaacttgttaaaaatgagtgaagggtaggtacaggcggagagcagcyttcagaatgtcttgtgaattctctaagtttgtttggagctgaagtaggaatgagccatcatcccacttgtctttactggacagatcgtgatgcttaatgtggaatgcatgtgcccgtggattgacgagaaagctggtgt

SEQ ID NO: 140505 - DNA, 473 bp, Homo sapiens
attttgcaggaagtgccttgtgccaaagaatttaaaaggtaatatagtatgaatgtgtggtaattgacaatgtgaacagaataaaatcccatggctgaaatccagatactccagggcttctttttatgaattacatrtatggttgcctgtggtagtacatgaacttctgtggctgaatgctgtgagatatttctggacacttttatatcattcaaaaaaaaatccctaagcaatccctgacaatgaaaagtgaatcaaagtatttaattattttggctgatattagaacctatagactttcaatatttccctgcaaaggcattcacaaacagatgatgccttttgatatggtttggctgtgtccccatccaaatctcatcttgaattttaagccccataatccccatgtgtcatgggagggacccagtgtgaggcaatcggatcatgagggtggtttcccccatgctggtctc

SEQ ID NO: 140506 - DNA, 474 bp, Homo sapiens
cattttgcaggaagtgccttgtgccaaagaatttaaaaggtaatatagtatgaatgtgtggtaattgacaatgtgaacagaataaaatcccatggctgaaatccagatactccagggcttctttttatgaattacatatatggttgcctgtggtagtacatgaacttctgtggctgaatgctgtgagatatttctggacacttttatatcattcaaraaaaaatccctaagcaatccctgacaatgaaaagtgaatcaaagtatttaattattttggctgatattagaacctatagactttcaatatttccctgcaaaggcattcacaaacagatgatgccttttgatatggtttggctgtgtccccatccaaatctcatcttgaattttaagccccataatccccatgtgtcatgggagggacccagtgtgaggcaatcggatcatgagggtggtttcccccatgctggtctc

SEQ ID NO: 140507 - DNA, 474 bp, Homo sapiens
cattttgcaggaagtgccttgtgccaaagaatttaaaaggtaatatagtatgaatgtgtggtaattgacaatgtgaacagaataaaatcccatggctgaaatccagatactccagggcttctttttatgaattacatatatggttgcctgtggtagtacatgaacttctgtggctgaatgctgtgagatatttctggacacttttatatcattcaaaaraaaatccctaagcaatccctgacaatgaaaagtgaatcaaagtatttaattattttggctgatattagaacctatagactttcaatatttccctgcaaaggcattcacaaacagatgatgccttttgatatggtttggctgtgtccccatccaaatctcatcttgaattttaagccccataatccccatgtgtcatgggagggacccagtgtgaggcaatcggatcatgagggtggtttcccccatgctggtctc

SEQ ID NO: 140508 - DNA, 340 bp, Homo sapiens
tgtggggtcctgggagaaaagccagaggggaagaaatacctgctatgaacttcattttaactcatcatggatcatttgacaaagtcacattctagaaaactgttatccttgaaattcattttcggaggttttccaaagacccccgagtgggaaagatattaacacctgcttacctaatgataacaaaaayaactttccaggaaaactactaattagtcttatattttatgcctgtatattgtatctaatcaaaacaagctaaacatgcaactttaaaacatttatgacactgcaatcttatcttgatatatgcgcaccagaaattatggccccattctca

SEQ ID NO: 140509 - DNA, 547 bp, Homo sapiens
gtaccaacaagcatacaaatgtatgctcttggctttcaagcttacaatttagttaaagggggtaaaaaataagtaatataatgtttaagttataaaagattaaaaataaaaaaatgcagtgagtgttcagaaactagagaaatcttaaccaactgaggatgatcagaaaaaatatttatgaaagagattgttcacatttgaactggggcttgaatttatgacgggggtgtagatatatatagaaaaaggcgaggaaggaccgtcaaagtagaagaaacagcacgcccaacactcagcaggtggacaggagcaacatgggtgaagggcatggactttacagctcagatggttgaccaaggagaagacaagaaagtccttgatctaagttaagtaatttgagctttattcaatagggacattcgaggagagtgtgatcagagatgtgattccagatggttkacctgggaacaatatctgtgatgcctcattgagaagagagaagcctgggccagcaacgatgtttcaggcataagaggaagatctgagt

SEQ ID NO: 140510 - DNA, 500 bp, Homo sapiens
cctgctccctaaatatagatcctccaaccactcctagtcctgccctcgtttctctgcttctgagatttcatgtactctttgggtttcaatttgcaaccccagccagaagacttttgaatctttttctccagctctgggctgcctgcttcgctgttagactaacatctccaacagcctgctcaagccycacctatccagaatctaactccttctcttttatcctcaatttttctgataagagggttatcattttcccaatcatttacgtgtgaaatctcagactagtttatgatgtctatcatgttgattttctattatcataaccactttcattactgcagttcaggctgtttcccgtgtgtgatccaaactgcactatagctttctatttaacattgtcaaatggacctttctgtgatgacggaaatattctatatctgtaatgtccagtatggtagccactagccacatgtggctattgagcacttgaaatgtggctg

SEQ ID NO: 140511 - DNA, 567 bp, Homo sapiens
ggtactgcagatggcaaagggggaaggaggtatagggtagaagaaaagtaaatgaaataaatatwttttttttaagacaggaagcaaacacagaaagcaagtgcatgtttttgttgttgttgttgttgttttgtttgtttgttttagctgtgagaaattttggccagattagaaaggctttgttacccgtaatttggaattctcactcagattggaccaagtctggaagagtaggtcaaatctgatgggaaagcaaccagaacaaacaacaacaacaacaaaaccccaacaatatgatcactgagcactctaatggtaaaggagaaattcagaccagctggttgttaaactttagccaagacaaaaacccaactcagctacttacctagggatgggtctcaggctgaagactgctttttgtcatcctaaaagcaggaaaaaactcgaattcatcttccctgctgggagtgagctcaagctccctgaaggagttgtctgccttctatcgtcatggaaagaggaaatcttgccttccttgttggaagcaaataaaactccaaaaaaagg

SEQ ID NO: 140512 - DNA, 638 bp, Homo sapiens
ctgaacagacacgttacaggtacagtgactgtctcagagtcctgaatcsattcactcttcctagtaatcctctcaagagaattcctcttctgcccgctaccatagcctgtttgatcaggatgcaagcccccattctatcggtaacctcgagatggtatacaagcttttgtacatcactgggaggttgggtcttcattctgaaggctcccatgtatacacattaaataaatctgtatgccttttctcccattaatcaatctgcctcatgtcaatgatggttttcagcaagcctttagggggccaagggccttgcttcaaattcctattgtccttatttttgtctcctctttaaaaagaatttgtgtcttcaaatctctcagctgtaatacactgtactgaattacactggagcccttttggaatggtggtgggaggaaaccagaataatttcacaccaaaatacattgcagcagtatgatgagtattttgaattaaggctcttagagatcagcagatgcaggaatgggttttttcttagctacataaaaactggacccaccaaggagaacaattgcttcccatcccctccctgaaatctcaatgtctatgacagagatgaaggctgaggaatgtaacca

SEQ ID NO: 140513 - DNA, 638 bp, Homo sapiens
ctgaacagacacgttacaggtacagtgactgtctcagagtcctgaatcgattcactcttcctagtaatcctctcaagagaattcctcttctgcccgctaccatagcctgtttgatcaggatgcaagcccccattctatcggtaacctcgagatggtatacaagcttttgtacatcactgggaggttgggtcttcattctgaaggctcccatgtatacacattaaataaatctgtatgccttttctcccattaatcaatctgcctcatgtcaatgatggttttcagcaagcctttagggggccaagggccttgcttcaaattcctattgtccttatttttgtctcctctttaaaaagaatttgtgtcttcaaatctctcagctgtaatacactgtactgaattacactggagcccttttggaatggtggtgggaggaaaccagaataatttcacaccaaaatacattgcagcagtatgatgagtattttgaattaaggctcttagagatcagcagatgcwggaatgggttttttcttagctacataaaaactggacccaccaaggagaacaattgcttcccatcccctccctgaaatctcaatgtctatgacagagatgaaggctgaggaatgtaacca

SEQ ID NO: 140514 - DNA, 567 bp, Homo sapiens
cctcccagctcagaacccacaccctctggggccccagtcagtccttcagccttcttcagcaggcttctgtctctgtttttctacctgctcaagtagtacaatccctgcctgagtgtctcggaggcccaaggggctgctctggggggcttccttcggatgatcactcgttttcacttgcaatttcacctcatcagctattcccccagctccgccccaaaccctttgcccttatagccaaaggcagccatgttctctgtcaccagcccatctcctatgccrcagagctttcacggctaaagagctttactttgccactctcctaaccacgcccatggtggtttctcgtgcctccctctagcaaagccaaggagtcgtcgtaaggcaggtcagagaagggagcttgatgagtggccggggatggggagctgggaggttggtgacgtattgcacacagaacgggctgtaagccagtggttcttacacctgactatgcatcaatcacctgcagggcttggtaaaatggagagactgcttggccccacccccagtttctgattcagtagatct

SEQ ID NO: 140515 - DNA, 415 bp, Homo sapiens
attgtttggcaaaacttaagaactctgacaatatcatgtgttggcaaaaaaagtggataaagggcaacactaatatactgttcataggaatayaaactcatgcaaccaccttgaagaaaaatgttgtggtaactaataaatttgaaggtgtaaataccctagcccagcaaaccatccctaggtgtacaccataaataaactcttatttgtgtaagcaaacagacacatatattttaaaaaggtgacttcttagtagaattgtttataatagcaaatattggaaactaattttccattaacatgagctagataatgtattatattaaatttatataatgctatgccacagtgaaaatcaattagccaaagttacatgaatgaatatggataaatctcataaacataatgtgaaatt

SEQ ID NO: 140516 - DNA, 426 bp, Homo sapiens
ccacaatgtcctattcatgttaccacctatatttcctttagttttcattgtcacattcttgtcatagattagacttatctctctgataagaccagtgaagttccattatctgctgcctcccagtctttggaccacacctgtctctctagctagggatgatctctacctcttctccagcgcaaatctttttgatgaggttttgtggaaaaattacttgakcaatgattctatcagtcttaccccctagctctctccttcccagagagcacatgtgcccctaggcagcactgctgtgagaagagtttcaagtacaacctgttgtagtactaaaactcctgctcctctgccacatttggcactgctgctggagtcttcctctcattttacacttatgagttgtttgtgccaaggatcctgttgattctt

SEQ ID NO: 140517 - DNA, 399 bp, Homo sapiens
ggctttactaataccagattattgattttagtagttgctggtcccatagttttaatcccagtcttgacctttgcagttctaggacaagtcacttaagctcagttgtcccttctctaagaagggagataactagatctcagacgaattatgtgaggtttcctgattaatatttgcaaagtgctttagagattaaaggggttttcaaattgccaattactattacagataccagcacagtcgagtggtctaactgcaagattggtagcttgtaaaattttaggttgattgtaagagttctyctttttagactatggctgcttttagaaaatatatatttaaatattaacaacatttgaggagcaaatactcccagagataaacatataatttaaatccaca

SEQ ID NO: 140518 - DNA, 621 bp, Homo sapiens
acataacaagttccctacttccttaccagatgaaaggtttttggcaggattttctggcttctgtttgcccactgaggatgatagaatttgaagagagaggaaattggtatccctgtgtgaaaccaagaaagacagaaggtttcaaaagagaaaaagagctttctccaggttgggggtaagggacaggtctgcctgtccttgaacagaagggacttttacttcttccctggaagcactcaaaagtgtggcaggacatcagggagcatattcacatagttaactaggtaggttagatgccaagcttargttctcaggcttgttcaagatcctcttgaagcacaaagcatggcatggaaatggcacaccagtgaatctgatgatatcacatggctgcagcaaaattcagcttttaccagtgtggacagatacctctagtgattaatgtcctaatgcttagatatggcgtaaaacccagaacctcagcacaaacctgaaggtgggaaaaagcctagaaataactgaggttgaatttctcactaagttgataggaatagctactcagaattgaaattaaatgatttacagacaataatgaaatgtaattttgcttcagatttatac

SEQ ID NO: 140519 - DNA, 525 bp, Homo sapiens
gaattcacttatgaaagctaatagttttttgatggagtctttagttttttttttttaggtagaagatcatatcacaaagaggaacaatttgacttcctcttttccaatttggacgcctgttatttctttctcttgccttattactctggcagaacttccagtrcaatgttgaataggaatggtgaaagtgggcatctttgtcttgtttcagttcttttttttttttgagacagagtttttgctcctgttgcccaggcgggagtgcaatggtgcaatcttggctcactgcaacccctgcctcctgggttcaagcaattctcccacttcagcctcctgagtagctgggattacaggcatgtaccaccacacacagataattttgtatttttagtagagatgggatttaccatgttggtcaggctggtctcaaactcctgacgttgtgatccaccctcctcagcctcccaaagtgctgggattacaggcatgagccaccgtgcccagcctcagttcctaaaggaaagg

SEQ ID NO: 140520 - DNA, 611 bp, Homo sapiens
gttttttttttttaggtagaagatcatatcacaaagaggaacaatttgacttcctcttttccaatttggacgcctgttatttctttctcttgccttattactctggcagaacttccagtacaatgttgaataggaatggtgaaagtgggcatctttgtcttgtttcagttcttttttttttttgagacagagtttttgctcctgttgcccaggcgggagtgcaatggtgcaatcttggctcactgcaacccctgcctcctgggttcaagcaattctcccacttcagcctccygagtagctgggattacaggcatgtaccaccacacacagataattttgtatttttagtagagatgggatttaccatgttggtcaggctggtctcaaactcctgacgttgtgatccaccctcctcagcctcccaaagtgctgggattacaggcatgagccaccgtgcccagcctcagttcctaaaggaaaggttttcacctcttccccattcataaagacattagctgtgagtttgtcatatatgtcctttattattttgaggtatgtttcttctattcctagtttgttcagagttttcattatgaagaaatgttgaattc

SEQ ID NO: 140521 - DNA, 590 bp, Homo sapiens
tctcttttagtttgaaagtcattgccaatataataatggttataattaatggagcatctgcaatactcacgggtggtgataggcactttactcacaccattcccgtgtcatcttctctacaacttgcctgtaaartaggcattattatcaccctcattttccacgtgaggaaagtgtagctgacagttaaatagtttaccacaaatcatgaagccaccagcagcagacctggaatttgaacttatcaatctaattccaagggcgtctcccaacagccctgaaacaacttcaccttaccatttggtgagcagaaaactagtgaaaattatttttctgctcatcacttaaaatcatcatgatagttacacctgtggcgtctcttgtttagcatgtccacaactggggctctgtccgttgtaccacgtggcctctagaacacttcagttttttggtcctgatggctgaacaggtgttcagtacaatagctcccttttctccccatctgcttctccatgcacggtggggccccgagccttcacgggcggatgcttcccatatgtgcttgcagccccggtgatgagaaatggcag

SEQ ID NO: 140522 - DNA, 590 bp, Homo sapiens
tctcttttagtttgaaagtcattgccaatataataatggttataattaatggagcatctgcaatactcacgggtggtgataggcactttactcacaccattcccgtgtcatcttctctacaacttgcctgtaaagtaggcattattatcaccctcattttccacgtgaggaaagtgtagctgasagttaaatagtttaccacaaatcatgaagccaccagcagcagacctggaatttgaacttatcaatctaattccaagggcgtctcccaacagccctgaaacaacttcaccttaccatttggtgagcagaaaactagtgaaaattatttttctgctcatcacttaaaatcatcatgatagttacacctgtggcgtctcttgtttagcatgtccacaactggggctctgtccgttgtaccacgtggcctctagaacacttcagttttttggtcctgatggctgaacaggtgttcagtacaatagctcccttttctccccatctgcttctccatgcacggtggggccccgagccttcacgggcggatgcttcccatatgtgcttgcagccccggtgatgagaaatggcag

SEQ ID NO: 140523 - DNA, 469 bp, Homo sapiens
ctggctgaatgggcagaatggattaaagtgagaggcagttcatcaaggtaacaagtttggaggctagcacttctataccaacaggattggcatagatggagactagaagtgtaactgacaaatgttattgatcgaacggatattggaggagagaaaggaggcatcaaaaagtaactctagggttgggcgtggtggctcacacctctaaaccaagcactttgggaggctgaggcaggaggatcattttaggtcagaagtttgagaccagcctatccaacatggggaagccccatctctaataaaaatacaaaaattagctgggtgtggtggcacacgcctstaatcccagctactcaggaggctgaggcaggagaattgcttgaacccaggaggtggaggttgcagtgagctgagatggcaccactgcacttcagcctgggcaacagaacaagactgtctaaaaaaaaaa

SEQ ID NO: 140524 - DNA, 469 bp, Homo sapiens
ctggctgaatgggcagaatggattaaagtgagaggcagttcatcaaggtaacaagtttggaggctagcacttctataccaacaggattggcatagatggagactagaagtgtaactgacaaatgttattgatcgaacggatattggaggagagaaaggaggcatcaaaaagtaactctagggttgggcgtggtggctcacacctctaaaccaagcactttgggaggctgaggcaggaggatcattttaggtcagaagtttgagaccagcctatccaacatggggaagccccatctctaataaaaatacaaaaattagctgggtgtggtggcacacgcctctaatcccagctactcaggaggctgaggcaggagaattgcttgaacccaggaggtggaggttgcagtgagctgagatggcaccactrcacttcagcctgggcaacagaacaagactgtctaaaaaaaaaa

SEQ ID NO: 140525 - DNA, 641 bp, Homo sapiens
ctattgtatcttagtctatttcacaattgtgggagaactttaaaaactggataagaagttagtgaagtcagtcaaggtctagtcctttttgaaaaatcagttgtttacttctgtttgtaattttacacagccccataccaaaaaaacaccaaaaacaataacaaaaaaaccactttcctgtcaaacacaacctctctgaaaatagtaaacttccatattttaacatactatatatataatatatactatatacaatatataatagattacatattatatatgatatatataatatataccatagagatcagttatatatagtgtatatactgtatatatactatatatactatataccatatgtataatatatarctatatattatatataaccatagattttatatatacactatatataatattgtaacacactataaagtcaatgttatttgagaatctgagcctatgtgaaattttttattaatcaaacctaaatttttgtctttgccttcaagtgaacaagctctacaattttcatatgtaaatgatcagtgtgtaattaattccaaaaaaattcactactttttttgggccaattccataaagagccgcagagtggatagtattgagttattggg

SEQ ID NO: 140526 - DNA, 408 bp, Homo sapiens
aattcccaaaacaaaaaaaaaaattcaaaaaacatgttagaaaattagtcttttaattttaatttcatatttgggatttttattttatgtgtcttaccctagggatgttatcctaagacaaggaagtatgttagcattggttttttgtttgtttgttttgttttttacatttctyccttgctatatgagttagcattcttattcattgtctgtgacaatgctgcacgttctggagagcaaagagaaaagcaactcccagcaaatttttttctcattttatgacaaatcagtttttctcatggtcgaagtcattggcaaggtgaaagtttaaccctagacctctccattctcagtaggtaattgaggcaaatgcagatctctctagaatttttaatgatataatacaaa

SEQ ID NO: 140527 - DNA, 660 bp, Homo sapiens
tgtggctgactccatgacaccaagaatgtcaatcatatagagatgaaatccaaaacctggttaatctgcactttacctactggatttctggttgtgttttattatctctgaattgtacagaatttcaattacgaaacaaaaaatacaatagtgaataatcagtaaatcttgtcagcactcacttcttatttttcaaagccactataactgtcactatttcatttattgatgtatttttggtgccatccaatctctacaatcatcctacacatttctctacaggctatgcaactgaccctagactcaagaactgaaagatcacaaactgagctctcctaggaccccagaacatgaattgctaccaacagagattctgagaatgaggaaatggtgataaatataytccctaggtaaataaacaatggttcagtcaagacttaagatgtctttcttccaggctgcatagctcctttaatctttctcctgccttgggcccaggcacaaaaaagagttgattccctttaataaataagtcatctacttcacagagttcatatcatgaggaacgaatcagaaaacatatgtgaaaattgctttgaagtcatgttatgattttcaaatgcatgctattttgtgttctttgtctatcatcactattat

SEQ ID NO: 140528 - DNA, 623 bp, Homo sapiens
agtagatcctaaaatgaggaattgcattgttatgggatctttggggtgctgcttttctggctagaaaactctgtggttagtggtgtctttgcctgagtttttgttygggcctgctgggctcattccacccactcagcctggtgggctgcacttgactcacactaccagcctgggtcccacacctccaagggagactgtaagtcagacatggggcagtgaggggtatgtgagcaagcgtggggtccaggcactgtgcactgtcagatgcactggctattgcttcagggagggcagctccaggtgccataacgggcactggttctctgtgaggctgcagctagaccagatgcactgcaagccgtttacccagctggcaccagggaatgcactgatgcctagaaacttggagataccaggaaccacaggggcccaaagagggagtcacagccctggcttggggagttcctaggtctgggctctctgaagggctgcagctcttctctccttctctttgcccacagtgtcatgggcaaagggcatgttttagctctgtttgtgtgtgttacagctcttttagcctcgacattcagcaggtcccaagttcttgtcctgcgacttggaag

SEQ ID NO: 140529 - DNA, 623 bp, Homo sapiens
agtagatcctaaaatgaggaattgcattgttatgggatctttggggtgctgcttttctggctagaaaactctgtggttagtggtgtctttgcctgagtttttgttcgggcctgctgggctcattccacccactcagcctggtgggctgcacttgactcacactaccagcctgggtcccacacctccaagggagactgtaagtcagacatggggcagtgaggggtatgtgagcaagcgtggggtccaggcactgtgcactgtcagatgcactggctattgcttcagggagggcagctccaggtgccatmacgggcactggttctctgtgaggctgcagctagaccagatgcactgcaagccgtttacccagctggcaccagggaatgcactgatgcctagaaacttggagataccaggaaccacaggggcccaaagagggagtcacagccctggcttggggagttcctaggtctgggctctctgaagggctgcagctcttctctccttctctttgcccacagtgtcatgggcaaagggcatgttttagctctgtttgtgtgtgttacagctcttttagcctcgacattcagcaggtcccaagttcttgtcctgcgacttggaag

SEQ ID NO: 140530 - DNA, 618 bp, Homo sapiens
cagggtagagaaaagcaggtaaaagtgagaataaattactaaatctaagctttgtcttagtatttggttcctaactcattctgaccaggatttctgagcaacacaatcagctatatggtacaacaccctaggagaatccaatacttctgtctcacagcggttgttacatgtaatgacataattgtacaaagagagaaatggagggaagtttaactggtattattattattattattactattattattttctgagacagagcctcgctytgtcacccaggctgcagtgcagtggcatgatctcagctcgctgcaacctacgcctccttgattcaagcagttctcctgcctcaggctcctgagtagctaggactacaggtgtgcgccaccatgcttggctaatttttgtatttttaggagagacgaggtttcatcatgttggccaggctggtctcgaactcctgacctcgtgatccacccgccttggcctcccaaagtgctgagattacaggcgtgagccaccacgtcctgcctcattagtgttattatttccaaaggctgcaacattgaaaatgcaatagcagttttcttgtacatttacctgaaacactaatgtctg

SEQ ID NO: 140531 - DNA, 379 bp, Homo sapiens
acttctcccagtaatccccacccccccaattctatacaacactattttgcctcactaaaggaagccatcgataactagcttagaatgtaaaatgttgaggctcttgaagtgggcctttcacttcttttatttttttmattctctactcctgcttcttgtggaaagagtgtcagcctgatagaatagaggttgggagttcatgtttctgttagaaatctctcatagttttaattctctctgtcaaatggatcactactcttacagcatttaattagctttatcatccaaaaacttctactttcagagaaaatacttaaaagaggccttggttacagtatccaaatataatatattgtattgatttttgtttttatgaatt

SEQ ID NO: 140532 - DNA, 635 bp, Homo sapiens
agttgagatcgcatgactgcactctagcctgtgtgacagaatgagaatccatccacaaaaaaataaagtataaagttcttcagatagaagaaaaatgagtcttgatggaagcattgaaatgcagagaaaaatagtgctttgtgattaaacaaaaatgattatggactacaataatgtcttggtagattctaaacataggccttatttaaatatatgtcatctatgacacaacaacatctataatgcacataaaatgtgtacattaagttgaagtattctaagttctttgagtggtccaaaagttgttaaaagtactattttttattaagaatgaatgtagctatgtctaagtaatcatgaacaaaataataaaataatatatgagaaatatgctaacagagggaacatggaatattaaaaataatataaaagaaggcaaaaacagaaaacggagagaaaaactgagcagataagtaataagacataaatatacagcaaaacataacagtaatactaataataaacgttccaaataaaagatgtttgtcaagccttargaaaaaattctatatgttgtttaccagaaacacacgttaaatataagaaaacataagaaaataaaagaaaactagtgt

SEQ ID NO: 140533 - DNA, 535 bp, Homo sapiens
gtggtgggtttatttcatctaggataatgtcctcaaggttcatccttttagttgcatattgcaaaactttcttttttaaaaaactgaataacattcagttgtatgtatagaccacatcttctttatccattcatctgtggttgagcagttatattgcttctatatcttggctatagcaaagtgtgctgcaatatacatgacagtgtgaacatctctcttcaagatcctgatttcaatccttttagatagtcaggagtggaattgmtgaattatacaacagttctatttttcattttttgagaaacctccacattgtattgcatagtggctataccattttgcatcccaacattatgcaggagtcccaatttctccaaatcttcacaatcacctgttgtttctgacaatagccattctagcaggtatgagatgatatctcgttgtgcttttgatgtgaatttccctgatgattaataatattgagcatttagaaatatatactggttcattatttgaatgtcttctttggagaaaa

SEQ ID NO: 140534 - DNA, 534 bp, Homo sapiens
tacacgttcgaattttactttgttgttgacctctcaatcagacaccattaatttattcagccaatttattttgatttacctacttttatacaagctgcttttcttctcgtaagcaaaaccttttattctgggcaaaaataaattttagcacttccttaagtgaaaattaattagaaataagctctcttgctttgtgtagaaacatattttcatttcctatttggcctccaaatgataggttagcttattttcaaatcatgggttgacaattatttgtttcagaactttaaaaatattattctcctgtactctgacttctattgtcgatgttgaataatcagttgtcactttagttgtgttccttggaagataatttgtcctttccctctggaamtttaaaggttctctcattctctctttttctctccactttgtagctttactaagacaaatttgaaaattttgttggcttgtttgagtgtttgttgttgttgtagtttttgaggtggtgtgattctgcataggatttattat

SEQ ID NO: 140535 - DNA, 574 bp, Homo sapiens
aggcatataggaatacctcagagatattgagggttcagttctagaacaccacaataaagctaatactgtgggaaagagagtttctggggtgccagttgagttggtctcccctgtgtgagacacccatggggagccatgggtggcctctgaagagaaaagtctccctattgccttcatgtctttatgcccggagagaataaccactcagcggcatgccacaggttgctcagggagataacactmccttgaagcagtggagtataatcaaacatcttggctcctcctgaaacccactcccacccatttcagtcctgataagttaaagatcttaagtagtttagacacatgcctttgctcaaggaaattcacagaaaccgccactgctatacatcttattgaatgactcacgagttctccttcacatattaatccttttcctcatcggttcctccccctctcatctgccctaagaacaaagggcttataaaccaataaatcgggcagagcccgagagctctgggccgtgagcaagcctccgacgctctggtcccctggacccgccttttaaaagctt

SEQ ID NO: 140536 - DNA, 574 bp, Homo sapiens
aggcatataggaatacctcagagatattgagggttcagttctagaacaccacaataaagctaatactgtgggaaagagagtttctggggtgccagttgagttggtctcccctgtgtgagacacccatggggagccatgggtggcctctgaagagaaaagtctccctattgccttcatgtctttatgcccggagagaataaccactcagcggcatgccacaggttgctcagggagataacactcccytgaagcagtggagtataatcaaacatcttggctcctcctgaaacccactcccacccatttcagtcctgataagttaaagatcttaagtagtttagacacatgcctttgctcaaggaaattcacagaaaccgccactgctatacatcttattgaatgactcacgagttctccttcacatattaatccttttcctcatcggttcctccccctctcatctgccctaagaacaaagggcttataaaccaataaatcgggcagagcccgagagctctgggccgtgagcaagcctccgacgctctggtcccctggacccgccttttaaaagctt

SEQ ID NO: 140537 - DNA, 567 bp, Homo sapiens
gtgttaaaagttacactgcagaatggctgatggttcagcggtcaggtaagtggtcatgatgatccagcttccaaaacaggagatcagggaagaaagtcaatcartcatgcagaaggaaggcttacacacataacaatgaaagagaaaacccggaggcaacacaagggagaagaggcctttttatgttgggaggtcagagactcaggagagcaactatagccaggaaagtcacatcgcctgaaagatcaaaacaagaaggcaagaaaacaggccacaggaaaatgatacttcagagggaaattcctctctgaggtaggctcttctaggtagatatgtctatgcagaatagaacaaatctagaggtagaattgttggcaggatggttataattagataataaaggtagattcttagatagctatggtacgatatgaaaatcaaagtaaatattattttcaccaaatcataaagtacttctgtaacacataaaaatgtgccaatgaaattactcagaaatgtgaaagtagttatatataaaatgtggatatctgaataaattcacttgga

SEQ ID NO: 140538 - DNA, 608 bp, Homo sapiens
tactgacttaaagtgatctaaaatactcatttttgtatatgctatgagactgcactgattagrcaccaaagaagatactattaatcatctttaatgcaagtctaattataagataatgtcaatgacatactgcaggatgttgtcacaagataacttgtcttctctctcctgctgttacataaatgctgagacaaaactgaaatgtttattctcaaagcaggagacattgctcttgtaatcaagctctatttcagtcactttatgtctaatactgactatcagattaatgcttgtattgattctttctgtatgttggatataggtgttccagtagtagcttgaggtatctttgcataaatttttaaatttatgacctttatgtcaggattatatttgatttcagtatgaaaatggcattttttttcacctgtgacaattagtaaattcaattagatatgtacaggctgatttctatataaagcaactatatggttcagttgatcttattctttcaccaagtatacagacaagtgagaatttttattatggccttagtataatggtacattgcaaagattctaaatgaatatgttttatattatggatac

SEQ ID NO: 140539 - DNA, 608 bp, Homo sapiens
tactgacttaaagtgatctaaaatactcatttttgtatatgctatgagactgcactgattaggcaccaaagaagatactattaatcatctttaatgcaagtctaattataagataatgtcaatgacatactgcaggatgttgtcacaagataacttgtcttctctctcctgctgttacataaatgctgagacaaaactgaaatgtttattctcaaagcaggagacattgctcttgtaatcaagctctatttcagtcactttatgtctaatactgactatcagattaatgcttgtattgattctttctgtatgttggatataggtgttccagtagtagcttgaggtatctttgcataaatttttaaatttatgacctttatgtcaggaytatatttgatttcagtatgaaaatggcattttttttcacctgtgacaattagtaaattcaattagatatgtacaggctgatttctatataaagcaactatatggttcagttgatcttattctttcaccaagtatacagacaagtgagaatttttattatggccttagtataatggtacattgcaaagattctaaatgaatatgttttatattatggatac

SEQ ID NO: 140540 - DNA, 608 bp, Homo sapiens
tactgacttaaagtgatctaaaatactcatttttgtatatgctatgagactgcactgattaggcaccaaagaagatactattaatcatctttaatgcaagtctaattataagataatgtcaatgacatactgcaggatgttgtcacaagataacttgtcttctctctcctgctgttacataaatgctgagacaaaactgaaatgtttattctcaaagcaggagacattgctcttgtaatcaagctctatttcagtcactttatgtctaatactgactatcagattaatgcttgtattgattctttctgtatgttggatataggtgttccagtagtagcttgaggtatctttgcataaatttttaaatttatgacctttatgtcaggattatatttgatttcagtatgaaaatgscattttttttcacctgtgacaattagtaaattcaattagatatgtacaggctgatttctatataaagcaactatatggttcagttgatcttattctttcaccaagtatacagacaagtgagaatttttattatggccttagtataatggtacattgcaaagattctaaatgaatatgttttatattatggatac

SEQ ID NO: 140541 - DNA, 649 bp, Homo sapiens
cattctggggtatacgcccaaagggatattaataattctgccataaagacacatgcacgcatatgttcattacagcactattcacaatagcaaagacatggaatcaacctaaatgcctatcagtggtagtctgggtaaacaaaatgtggtacatatacactatggaatactatgcagccataaaaaagaatgggattatgtcctttgcagcagcatggatggaactagaggccattatcctcagcaaactaacacatgaccagaaaacaaaataatgcttgttttcacttataagtgggactaaacatcaagtacgtatgaacacagagaaaagaataacagacactgggawctctttgagggtgaagattaagaggagggtaaggatcgcaaaactacctattgggtactgtgcttattacctgggtagcaaaataatctgtatatcaaacccccatgacacacaacacataatttacctatatagcaaacctgcccatgtacccctgaacctaaaagttaaaaaaaaaagatgagaggagtactgccacatcttgtgattctttaagagatacgtgaactttaaaactttgtgtgtaatatataatacttctatttaaaaatatttgccaatctcacattaaaaaat

SEQ ID NO: 140542 - DNA, 594 bp, Homo sapiens
cacctatgaaaagagactaccttttccttgttcatgaamgctgtttcaaaatgaaatgactacattatttccaatagctggtatgagccatagccatgcatgctccctcaggtgcagccttcttaactggctgaaaaataggtcagtgctctacattgaagaactgtttccttcttatagttcagtcaacagcctacagtatagtcttccatacagtaagctcaggatctcaggatatttgtgctaaaattatactccaatcaaggccacacataaaacataaatgcttttatattgtaacataatctgaataatatcaataaaatagtcatatattatcttgtttggaaattgttatataatacaaacgtatataatacaatgtattctattataaatataatattatctgtaaacaataatgaggtatatggaatcaaattgctgctgaatatgtttcatggggaacattgtgtgttgtagtagaaagagcttaagttttagagtcagacatatcagtgtttgaatcctaactctattacttaatagctatgtgatttaatgttatttactctctctttgctaaaccctagt

SEQ ID NO: 140543 - DNA, 594 bp, Homo sapiens
cacctatgaaaagagactaccttttccttgttcatgaaagctgtttcaaaatgaaatgactacattatttccaatagctggtatgagccatagccatgcatgctccctcaggtgcagccttcttaaytggctgaaaaataggtcagtgctctacattgaagaactgtttccttcttatagttcagtcaacagcctacagtatagtcttccatacagtaagctcaggatctcaggatatttgtgctaaaattatactccaatcaaggccacacataaaacataaatgcttttatattgtaacataatctgaataatatcaataaaatagtcatatattatcttgtttggaaattgttatataatacaaacgtatataatacaatgtattctattataaatataatattatctgtaaacaataatgaggtatatggaatcaaattgctgctgaatatgtttcatggggaacattgtgtgttgtagtagaaagagcttaagttttagagtcagacatatcagtgtttgaatcctaactctattacttaatagctatgtgatttaatgttatttactctctctttgctaaaccctagt

SEQ ID NO: 140544 - DNA, 618 bp, Homo sapiens
ttacacttttgtactcttttccctgtggaatagatttttagaaatgagatggatggatcaaagggtatgcacatttttaaattttaatagatactatcacataataaaatattttaatttataagyccattacacaatatggatgtggtgatttttctatttacatcatcatgtcaataagtatgacagcatcatacttactgatttattgactgatagagatcatcagtctttgtaattttgaacaatttgaaaggcaaaatatggtaacctattgcataattttatcgttcattgttaactaaaaatattagggatttttttcatctggctattcagtatttttctattacatgcttattttttaaactggaattcaatatttaagtttattcaccctatctttattatttttgttgaaaacattttttgaaatttaaaagttaatgagttttaatatatatttttaaaatgaaagatcaagaaaacacaaccataattaccttttagattctagatttcttgctggtctctgacaagttttcctgttccggatgatagcaatttacttctatattttcttctaatataagtgtattgcttccatttgtattttta

SEQ ID NO: 140545 - DNA, 559 bp, Homo sapiens
gttttcctgttccggatgatagcaatttacttctatattttcttcyaatataagtgtattgcttccatttgtatttttaatctatttgatgtatatttcacatggctttgaagtagaaatatgaatttgtttttatttaaatgaataaccaattctgtcacttcatttattatgtattgtgcattttatccctctccaatgatttgatacttcaacatctaacaaatattaaatattctgtatctctgcactttgtttttgtctaactttatattcaattctattaatctatttttgtgccaccgtattttagttgcagaaatttggtagcatttagtacacggcaaggaaattgaccattgtaggacattatttcagaatattttaatggcatttttgttcaactgcaaattacattgaatcaaaaacaatccccagtgaccctatcagaattctcagaatcaaggaattaatatataaattaatttgggcagacttgatctcttaataatactgaatctgtccatgaaggaatgtcagaggcatttgaaccagagca

SEQ ID NO: 140546 - DNA, 495 bp, Homo sapiens
tcctgagataaggaaaggggtggaagaagggagggccgtagggatcccagacagcttcagtgtcgagggctttgggattccctctgcccaaaatgcccaggtatagatcctgaaagccccaacatcactgacttctttgaggtcagaccctgaaaacctttatgcacagtcaaccagtcacacttaggctggaatctgcgtagccaattggtattttaaagaaaaggaacccaggaaacataagacatcaaaagaggcaagatttgatggcaaaaaaacaaamaaaaaaaaagttgtaagccgagcacggtggctcatgcttgtaatcccagcactctgggaggctgaggcaggtggatcacctgaggtcaggagtttgagaccagcctggccaacgtggtgaaaccccatctctactaaaaacacaagaagttagctgggtgtcgtggcgggctttggtgatcccagctacttgggaggctgagccaggagaat

SEQ ID NO: 140547 - DNA, 572 bp, Homo sapiens
aagttttaaatttattattgccacatggaggggtatttcttaattttagtcttttcatctatttacggttaagtactgtataacacattttctatgtcctctctagatatcttatcaggatataaaacgtcatgactgacaataaccttttgttaaacatctatctgttggtagrtgttaagcccgttttctcccttgtagtttctccattattagccatgttctgtaaccttatttaccttgatcatctacagtttatcctcatttcctactctctgtatgtttagtctgttatcagggatactgacctttctaaaatattctttgaattattttatttctagagtcaagccctggtccactcttatagtatagtctcctacggattttcatagatatagcccctctctctatatccctgtttgttatttcctctgcattcagaacactttttgtaggtgtttactatatgccaagcactgtgctaagcactaggaattggtaaggtcaacgatgagacaattataatacaagtagagatatacagaggttgggagacctaacttgcctgg

SEQ ID NO: 140548 - DNA, 314 bp, Homo sapiens
agttttctgaaaaacatccaactcacaaaacctccagttctccagggagcgattaartgtttgcctgtcgtgcagaaatgaagggctgcttttactctgtagtggagggataatgagcaatgatttatttcctttggattacacacacacagactctctctctctctctgcctctctctctatctctctctctctcctggcccttctgtgagtcagttgctaaggcactgtggggagaaagcacagtgcctcccattaccctgaatctttaccaacagcggcatgaaagttcctctgctccatggctctctcct

SEQ ID NO: 140549 - DNA, 485 bp, Homo sapiens
ctcttctctttctttataatgtataactttggtttaatgaaatgcctgagggagtgaagtgtttgtgtgaactatattttctgagtaatcagagcattttttgtttcaattcttgttgacagtttttctaaaatgtaattagcctgcaaatattatcaagatttgaacttttgcattgcctctgtgtctttattctgaattatgactgtacaggacagatatgctgaatataacatagamgtttttcttgtagttcttccttttgactctgtgatatgaatgtgctttctcagtatacatttttttaaaattgttgttcaaaaatgcaaaagacatttgactcactgtgagttccactttcttggagtttgatctttgcctttgccattacatcgctttgaaatgctcattccttcactctaaattagtttctcaatccactcaaagcatggtttcaagctccatgattgcagcaaaacttttgt

SEQ ID NO: 140550 - DNA, 485 bp, Homo sapiens
ctcttctctttctttataatgtataactttggtttaatgaaatgcctgagggagtgaagtgtttgtgtgaactatattttctgagtaatcagagcattttttgtttcaattcttgttgacagtttttctaaaatgtaattagcctgcaaatattatcaagatttgaacttttgcattgcctctgtgtctttattctgaattatgactgtacaggacagatatgctgaatataacatagaagtttttcttgtagttcttccttttkactctgtgatatgaatgtgctttctcagtatacatttttttaaaattgttgttcaaaaatgcaaaagacatttgactcactgtgagttccactttcttggagtttgatctttgcctttgccattacatcgctttgaaatgctcattccttcactctaaattagtttctcaatccactcaaagcatggtttcaagctccatgattgcagcaaaacttttgt

SEQ ID NO: 140551 - DNA, 481 bp, Homo sapiens
tagaattcagttcaacaggaattacaggtattccatcttgagtgggttacttagcctctgggcctcagtttccctccctgtaaaaggtggataatgtttaccctgaagtcttgctgtattaccagaacaaggctttaagtctctgctcacgattttaaggataggtgccaaaagagtctgctgtcaaggatacggttcccattaaacttaaagataaactcagaggtrccattagcttctgtgtgatttctgctcaattcaggaagaatttataatgttacagagagtcttttaagaaaacctttatttgctgagccctcttctcaaccaggtcttgaccttaggcatctgtgttcatcttttgcagagtccagttttagcaagaaccttgctaagccagcttagagagaattcaccatccctgacatctgatcgctttggtcaaccatgctttcagcaagaatttgttaagtggtttagc

SEQ ID NO: 140552 - DNA, 389 bp, Homo sapiens
gaattcagttcaacaggaattacaggtattccatcttgagtgggttacttagcctctgggcctcagtttccctccctgtaaaaggtggataatgtttaccctgaagtcttgctgtattaccagaacaaggctttaagtctctgctcacgattttaaggataggtgccaaaagagtctgctgtcaaggatacggttcccattaaacttaaagataaactcagaggtaccattagcttctgtgtgatttctgctcaattcaggaagaatttataatgttacagagagtcttttaagaaaacctttatttgctgagccctcttctcaaccrggtcttgaccttaggcatctgtgttcatcttttgcagagtccagttttagcaagaaccttg

SEQ ID NO: 140553 - DNA, 481 bp, Homo sapiens
tagaattcagttcaacaggaattacaggtattccatcttgagtgggttacttagcctctgggcctcagtttccctccctgtaaaaggtggataatgtttaccctgaagtcttgctgtattaccagaacaaggctttaagtctctgctcacgattttaaggataggtgccaaaagagtctgctgtcaaggatacggttcccattaaacttaaagataaactcagaggtaccattagcttctgtgtgatttctgctcaattcaggaagaatttataatgttacagagagtcttttaagaaaacctttatttgctgagccctcttctcaaccaggtcttgaccttaggcatctgtgttcatcttttgcagagtccagttttagcaagaaccttgctaagccagcttagagagaattcaccatccctgacatctgatcgctttggtcarccatgctttcagcaagaatttgttaagtggtttagc

SEQ ID NO: 140554 - DNA, 626 bp, Homo sapiens
attagcactgaaatgctcacagcctagttttctattactggtggtgcagcaggaaaaagcaacagtgcagcaagggcacaaaatgaattcttttcctctttatttatcgctttctattcaacctgacagagctgactggcaggaaagaaaacagcactcccgagagagaattctccacttgctgatagggtaatttagattgaataagtgttattgatcatcttctatgtatcctggactgtattagttttcagtattaggtagttccccttctctcaaatatcctcctcttccatcttttaataaaattccatttcttggagcctggaacagagaaaaagaatattagtggaaaaatggagaaatttgaataaaacctataatttagtgatagtgttgtaacaatattaattttctagttgtgccaaggatatataagatgagggggaaattgggtgaaggatggacataagttctatgtgtattgtttgcaaatttagggggaaaatcataaccctctacatttgtggytggaacacagacttctgttacaaaagaccgattaacaagagaaaaacaaacagaagtttattaacatgtatatttcatataaacatggaagacac

SEQ ID NO: 140555 - DNA, 607 bp, Homo sapiens
gagctagttggctctgcaaagaaaaaaacaaaaaacctttctttgggatcacatgtcttttctcaaatcggccaccttaaaaatgcatgcagttaagaagtcacagagagaaaacagacacggctcagggacatctgccactgctctgggaaaaactatccaatgccaggagcaagattctgtgatctgcacgggccctcgaggcaccgaaattagacagtacattattccatgtgttcaaatgatcagtcaaaaatcatgagcrctcccaagaaaattgatgaaaagaatttttttggtcattatgtgatacaagtttgctggcctgacactgaaactagtgcaaattttcttccatatttgcaggggtcagtaaaaatcaagattatcatggcatcagcctatcagtctttcttaactttaggatttattatgattttcctaatattcaataacacttctaaacactcccaacatttctctcttctctttcattccacattttatttagtggagtcattcatgttttactcatttcagggttagaactttgaaatagtttctggaattaaatccattttcttaacctggcattgaagtctattca

SEQ ID NO: 140556 - DNA, 501 bp, Homo sapiens
tttaaagatgtcattaatgtttacaatcagttgactttaaggaaagtagattgccctccataatgtgggtggcctcatccaatcagttgaagrccttaggaacaaagactgggatttcccaaagaaggaatcctgcctccagatggcaatatagacattctgcccaagtttcaagtctttacgtttgggactgcaacattaactcttacctgaatctccagcctgctggcttgccctacagagttagttggacagccccaacaattgtatgtgccagtttttaaaaatctctctctttctacacacacacacacacacacacacacacacacagagtcttctgtatttgtgtattctgtgttacagcttcaaccaaaaattgagatcaaaaatattcaggagaaaaacattccgcaaagttttaaatttgccacgtggtgagtactatgtttaatccacatgaaagaagtgatgtataggcatcatattaggtactataag

SEQ ID NO: 140557 - DNA, 435 bp, Homo sapiens
tgtcagtgcctgctcaaaagcctgagacttctgactcccaacctagtgaaaactgacaggaccaaattctgattaatgaatttaagcagcagtaaatattgtcagagtttagtatttgggattgtaatagctaaactgataaaaaaattcagccatgagtctcttgttaattcrtaaaaattggaatttttaaaaggatacaatttcaccatgttattaggttaagcacttctaacacaaacaagcaaacagtgatgtattgtaagttagaccattttggaatttgtgcaatttgaatggttgagttattttatgttagggaagtgactgcacaatattcattagctaattttcatgatttaaaaaaaaccacacattgggccaaattacactttcagagatgccctcagaattttgattaacataataggtcca

SEQ ID NO: 140558 - DNA, 550 bp, Homo sapiens
tacatgtatacgaaggcagtacacttacaaagaaagctgcttgcatgtatcagcacgtgtttaatcaaagtaatattgtgacaaaaataaaagcttggccaagaacaataggtttttctgtagaagctgtagacgccactacagtgtaagatatatttctcgcattcaagcctgtcttttattttgtttacacaacaaagttattatgctaattacatagtaatatgctgcccctgaggagtttctacactgatagcatctacttgaggatgcagatttggagccaatatgtgattattatgatttcaaaatgatatgatcagattgacagttttgccttctaaaagggagttctctctggctctttactgctgggtgtggagtttaacaatgaatggtagaaaacattcaggagagtttgggcaatttttgttcatgttattttgaaagaaggtggagtggacaatattttggacaaacgagtcaaatctgtgtgtgtgtgtgtgtgtgtgtgtacgagcaracgtgcatgtatggaggagctcacact

SEQ ID NO: 140559 - DNA, 607 bp, Homo sapiens
tgaaacacactggagtctttaatgctcatttgccatttgaggtctcttacccagaaaatgtggccaagtagagattgcccaggcctggcaaagagtggcctgggtctgatatgccagtggttctggggaaatcccttactcagcttcatttttcaccatctgtgtttcagtttttctatttgtaaaccagccataattaaaactgcccagtgtgcctttcacaggcatgttgggaggattagcaagaggctgcaaactttcctgagctctttgacagagaggtgctataagaaattcaaggcaggagtcttgcatgcaagatgttggatgcatttacatttaaacttccatttttctaaattaactatggcattctttggcttggacacagagcacaattartcagatgggtctcaataaaaaatataattttcatggattctaggaacgcctggaagctcatgggcagtatggaactagcataatagattgacgtggtgctgggtgtcctggatggatgcaacaaatttgggttccaatcaaacaccgtcactaactagctgtgtcaaccttggcaagcaacttacctccctctgctttcccactt

SEQ ID NO: 140560 - DNA, 607 bp, Homo sapiens
tgaaacacactggagtctttaatgctcatttgccatttgaggtctcttacccagaaaatgtggccaagtagagattgcccaggcctggcaaagagtggcctgggtctgatatgccagtggttctggggaaatcccttactcagcttcatttttcaccatctgtgtttcagtttttctatttgtaaaccagccataattaaaactgcccagtgtgcctttcacaggcatgttgggaggattagcaagaggctgcaaactttcctgagctctttgacagagaggtgctataagaaattcaaggcaggagtcttgcatgcaagatgttggatgcatttacatttaaacttccatttttctaaattaactatggcattctttggcttggacacagagcacaattagtcagatgggtctcaataaaaaatataattttcatggattctaggaacgcctggaagctcatgggcagtatggractagcataatagattgacgtggtgctgggtgtcctggatggatgcaacaaatttgggttccaatcaaacaccgtcactaactagctgtgtcaaccttggcaagcaacttacctccctctgctttcccactt

SEQ ID NO: 140561 - DNA, 567 bp, Homo sapiens
acaacctttactaatccaacttttcatacttccaatcaacagttcttcctttgaagtctgctgtatcctatctaaaatatgtatcagtatttgttcctycctcactgtctcctgctgagagagagagggagagagagacagaggctcctttgcaaggctaacccttccaatatgttgcccttggccacaactctgggactttactctcttcctcttccatctctctgccattttctatctattcctgtcatttattttcttttcattagccctttgtaccctgtttatgtctttcaaaaattacctagttgtctcttcctttctttcagtttttatcaccagatgcccctgtctttccttcttgttttgtattctctcactgagtagtcacctcttcccaggatctctttggatgaattccaagacctatgtctccagtcctggcctctttcctaagcctcagacccatggctcaagcttcttcctggatctgttattcaacctcagcttaacaagcctgaaacagagttggttgtctttttctcaaatctgtttcctatctggcta

SEQ ID NO: 140562 - DNA, 633 bp, Homo sapiens
taatgttcaatcttatatttgtggaaactcgttttgttacctaacatgtaatctgtcctggaaaatgttgactgtgtgcttaagaggaatatatattttgttgctcttgggtggaatgttctgttaggtcttttaggtccatttggtttatagtgtttttcaagtctgctctttccttactgattttctgtatgattgttctattcattattgaaagtgggggattaaaatctcctcccattatcgtattgctgtttttcttttctgttctgttaaggtttgcttcatatatttatgttctatgatgataggtgcatatktatttgtaattattgtatctttctgatgaattgattcttttatcattacacaatgttttatttgtctcttgttatgatttttaagttaaactattttgtcttatatgaatagtcttttggttgccatttgccatttgcataagataactttttgcatttcttaactttcagcctatatatatccttaaatttaagtgagtcccttgtaggctgggatggtggctcatgcttgtaatcccagcacttgggaggctgaggcaggaggattgcttgaggccaggagttcaagaccagcctgagcaacatagtgaga

SEQ ID NO: 140563 - DNA, 630 bp, Homo sapiens
tactgtggcctcagtcaccaaaacaaagaatgcagtaaatcttctggggtttcccctctgtctaccagctgtattgtaaacctagacttccctcttctcatgagtcacatcctaagcaaaaactccagcatgagagaagagaacaggtgggaagtttgtcccctttttccccttgaactgataggaagactacatatgtacacaagcatgcacacatgtgtctgctatgttactattccaggcagcagtgccacattcacaaggatgacagtgtctcagaaagactatggctcagacagctgcagacaatgtaaacacccttttttgcaaggtcaggacaaggacaaatggctgatttaggcagtaataagagagggccctgtcacagaaactttcagatgtacaatgcaaaatctgcacttccccctcaaatgcaatgtgactagcagtctccctctgtccagaccaacagggtactctatgaaatatacaaatctactttgctaaccayctttaccacatattcttgagcaaacagaacagattcttccagaccacactattctttacatctccctttcccatacttgaaggtctccaatttcttaaattgctttcagtaatttgagt

SEQ ID NO: 140564 - DNA, 509 bp, Homo sapiens
caggtagtcaacaacatttattgcatgaattaacaagtaaatgaatgagacgacatggtctactatttatttgtacacttgtattttgaaaatcaattttccaatgggcttaaagtaatccaccacacycccaaatgtttctttctggcttgctaggccttcctaccttgtatcaagattatggggaaaagcttgaaactcaataggattaatgctcttaatcacattgttcattcatatgctttatctggcacctctggtttcttagaagaggagtctcatatttcccaagccctgcagagtgcgtacatgccaatcaacccagtcaatattcatatccaaacattttgtttgggtacactcatgtacatacagtgcagaaatgacattagtaattgtggccctgattaattcttacctgcaaggccactgtggaggcaagtttagtatacaaatggagacatgcctattgatttgtaaccctagacagtgtactccctgtttccccc

SEQ ID NO: 140565 - DNA, 609 bp, Homo sapiens
agacccagctgtcacacgagaatgcaatcaacaaactaatgcacaatgacactcaccatctattcagctgcctaagctaaaactgtcagtcctggttaaacctgtgtacgattgggcacacagccttgggataagtgggacaactgaagtatagacaaaggggccttgggatcacagaagaggaaactatcagctctgagtaaggaaacctggccagttcttactgagagcttagtgatagatgagaacgttagaggatcaatagaaacctggagtgctaagaaaggaagaaagttttgctggatttgattgaatgatttgagtctaaaaacaaggcagtgtgaatatgtaaacatgtctgagtacttgccaggggcctgggggttggaatggcaggtgagtcgtggattatggagaaagatggtgagcttagagtggtcgggtgatctaaagagctacacacaccataccagggagtctggacataacacgggcagcacaagagctgtggaagggctttaatctgaggaatgacwgggacagacatgcgccgtaggaagatcattctgctaactttgtggagagtggacaaaccctgacacacatagc

SEQ ID NO: 140566 - DNA, 551 bp, Homo sapiens
agggccctaactcaaactggcccctccaaatcctcattcactccatattccaccatatcttatagggccatatagagcatgaagaggttggtgcaagggatgttttctggggccttctggaagaagagataaaaccaaatcccagaaattgtaatgtagttaagaacctacgggtataaaaaaaatttggcaggtgtctgaaaacaagcaaaatccaattagctagagaattcttcctggaggtgtttgatgaacgtgccttccagctgggctagaactgctactataattttattctctaatgactctcagggagatctcagaatgttttataagcattaatgaagccttagaacctgtctttgaagaagacttgaatgagcaggatttggcattccagatacggaaggggcacrtgttaggaacaatctagtaatgatgcctttatttgagctctgttcagttctggacataaagctgcatctggtgtcttaattcatggcacactttttcatatccgcaaatcttctcagatagcagcataattccca

SEQ ID NO: 140567 - DNA, 602 bp, Homo sapiens
aatcccaatttctttgtctctgtatctcccatgatgcaagaccctgagttttatgtttacatgattagaggacaaactctatttatggatgttcagaattcagagatattgyccatatatggatttctgtccataacttggatgaatgaatgaatgaatgaatgaaatagggtttacgaatctctctttcccaatcagagaaaatttattttagcttccttagccaccaaagtgtcaatcattatctccccatgacaaatcccttcagatttcacatagagcaagattttaaaaatagaattatttcacagtctatttaacttctagagtttattaacaacaaactttctaccaagttgaatagtttcttaaagaaacatttctttttttcttcatgaacattttaaagttatttgaattgtacaaaacaatcgtgaagtgcaattttaacctaacaggcatctgaaagatctcaattcctccaaaaaggaggatatagcttgctttctataaacaacaaattaaaaattaaaatgttaaaaaaacacaaattattttgtaaatatattttgtaaatttacatatttactgatagatataaa

SEQ ID NO: 140568 - DNA, 375 bp, Homo sapiens
ctataaagaaatatctgtgactgggtaatttataaagaaaatagtttcaattggctcatggttctgcaggctgtacaggaagcatagtggcttctgcttctatggagaccccaggaaacttacagtcatggtggagggtcaagggggagcaggcaygtcttacgaggccagaggagaagagggagacggggaggtgccacacacttttaaatgacccaatctcatgataactcacttgctcactatcatgagaacaacactgaggggatgatgccaaaccactggtgagatcctgcccccatgagccaatcatttcacaccaggccccacctccaacactgggaattacaatttgacataagatttgggtggaga

SEQ ID NO: 140569 - DNA, 605 bp, Homo sapiens
atcccaccttctcttctaagcttctttattcctggagtctcatgcagagtcaggagaaaaagcaactgctgtgyaaagtaaacagcaaggcagaaaggaagagagcacagagcagtcagcttttgaggacacattaaagatttcaccgagcaccagcagtgcccagcatcacccctttcagtccacaacgcctccatcttcccccacccaaatggagagaagtgtgttaagaggcctgagagctctgcatgtgaatttcaacctgtgatttgagggttaaatgaagacccccccaacgaaccctcaaaatagactcctactgcccaactgatatgatttaccaatgtccccacccaaatttcaaattgtagctcccataattcccctgtgttgtgggagggacttggtgggaggtaattgaatcatgggggtgggcctttcccatgctgttctcatgatagtgaataagtctcatgagatctgatggttttataaagggcaattcctctgcacatgctccctcttgcctgccgccatgtaagacatacctttgctcctcatttgccttccgccatgattgagaggcctccccagccatgtggaac

SEQ ID NO: 140570 - DNA, 605 bp, Homo sapiens
atcccaccttctcttctaagcttctttattcctggagtctcatgcagagtcaggagaaaaagcaactgctgtgtaaagwaaacagcaaggcagaaaggaagagagcacagagcagtcagcttttgaggacacattaaagatttcaccgagcaccagcagtgcccagcatcacccctttcagtccacaacgcctccatcttcccccacccaaatggagagaagtgtgttaagaggcctgagagctctgcatgtgaatttcaacctgtgatttgagggttaaatgaagacccccccaacgaaccctcaaaatagactcctactgcccaactgatatgatttaccaatgtccccacccaaatttcaaattgtagctcccataattcccctgtgttgtgggagggacttggtgggaggtaattgaatcatgggggtgggcctttcccatgctgttctcatgatagtgaataagtctcatgagatctgatggttttataaagggcaattcctctgcacatgctccctcttgcctgccgccatgtaagacatacctttgctcctcatttgccttccgccatgattgagaggcctccccagccatgtggaac

SEQ ID NO: 140571 - DNA, 605 bp, Homo sapiens
atcccaccttctcttctaagcttctttattcctggagtctcatgcagagtcaggagaaaaagcaactgctgtgtaaagtaaacagcaaggcagaaaggaagagagcacagagcagtcagcttttgaggacacattaaagatttcaccgagcaccagcagtgcccagcatcacccctttcagtccacaacgcctccatcttcccccacccaaatggagagaagtgtgttaagaggcctgagagctctgcatgtgaatttcaacctgtgatttgagggttaaatgaagacccccccaacgaaccctcaaaatagactcctactgcccaactgatatgatttascaatgtccccacccaaatttcaaattgtagctcccataattcccctgtgttgtgggagggacttggtgggaggtaattgaatcatgggggtgggcctttcccatgctgttctcatgatagtgaataagtctcatgagatctgatggttttataaagggcaattcctctgcacatgctccctcttgcctgccgccatgtaagacatacctttgctcctcatttgccttccgccatgattgagaggcctccccagccatgtggaac

SEQ ID NO: 140572 - DNA, 622 bp, Homo sapiens
tctggcttgttcttatgtttcaggcttggagtctttctattagcttgtttatttggccttaactaggatcagagttgctccaataccttgggcatttgtgatcacagatccagctgaagcttcccttcatgctctaatgagaacaaaaacagctgtgtgtcctacttcattccaaatgcaactcctcctacttcttcagtgtagtagcattggccttgtgatgctttaagacaaaattactggcctggcatggtggcttacgtctgtaatctcagtactttgggaggccgaggtgggaggatcacgaggtcaagatatcaaggtcaccctggccaacatggtgaaaccccgtctctactaaaaatacaaaaattagctgggcatggtggcaggtrcctgtggtctcagctactcaggaggctgaggcaggataatcgcttgaatccgggaagcagaggttacagtgagccgagattgcactgctgcactccagcctggtgaaagagcgagactccatttcagaaaaaaagaaaaaaaagaaaaattgtaaaggatgttttgtcttcagtgtgaccagtctctgactcttttttttcctgagactgaccccaccccttccctt

SEQ ID NO: 140573 - DNA, 622 bp, Homo sapiens
tctggcttgttcttatgtttcaggcttggagtctttctattagcttgtttatttggccttaactaggatcagagttgctccaataccttgggcatttgtgatcacagatccagctgaagcttcccttcatgctctaatgagaacaaaaacagctgtgtgtcctacttcattccaaatgcaactcctcctacttcttcagtgtagtagcattggccttgtgatgctttaagacaaaattactggcctggcatggtggcttacgtctgtaatctcagtactttgggaggccgaggtgggaggatcacgaggtcaagatatcaaggtcaccctggccaacatggtgaaaccccgtctctactaaaaatacaaaaattagctgggcatggtggcaggtacctgtggtctcagctactcaggaggctgaggcaggataatcgcttgaatccgggaagcagaggttacagtgagccgagattgcactgctgcactccagcctggtgaaagagcgagactccatttcagaaaaaaagaaaaaaaagaaaaattrtaaaggatgttttgtcttcagtgtgaccagtctctgactcttttttttcctgagactgaccccaccccttccctt

SEQ ID NO: 140574 - DNA, 497 bp, Homo sapiens
gtaggcactttgtaattccatcttcatcttaaatctctgcctgcttggagccccaaaatcagccagagatgagaaattagagttttctcatgtcttttctggaaacttgtaatatctgcacatgcacattctttttgtagatgcccagcttttaaactcyaattaataccttatcccacaggtttatcttttaagatttttagtaatcttttgttttgccaacttgtattatagcctcaggcagatgcaatgttaaataattgccactgattgttcttgacacatgctcaagaataaggtgattcacacagagtaagttttaaatcaagtcaagtaaaggcagttcctgtgtatgaaatttttaatggagcttctaagcaggtaaaatagtgataattcatgggagataaaaattttgagagctccaaatatgtccttcctgttcctacagcttctaggctgctgattttcatagctaccatagttacaaagctact

SEQ ID NO: 140575 - DNA, 514 bp, Homo sapiens
ggcacagtggctcatgcctataatcccagcactttgggaggctgaggtaagaggattgcttgagctcaggagtttgagaccagccagggcaactgacctcacctctacaaaaacagggcaagaccttgcctcaacaaaaaataaaaaaattagctgggtatggtggtgtgtgcctgtggtcccagctacttgggaggctgagatgagaggattgcttgagcccaggaggttgaagctgcagtgagctatgatygtgccactgcactccagcctgggtgacagagcaaaaaaaaagaaagaaaagaaagaaagaaaaaaagtttagggttggaagtgtttgccacttatttcctttgtctcttgtcctctttccctgtttcaacctcaaatcacccttctctccctggtgagaacgcctgaccaggggcatagagtgtggtgagcaacagtttccaggaaacaagttactctgaaaattgacacctgtttctctcagttgttgtgcactggccac

SEQ ID NO: 140576 - DNA, 514 bp, Homo sapiens
ggcacagtggctcatgcctataatcccagcactttgggaggctgaggtaagaggattgcttgagctcaggagtttgagaccagccagggcaactgacctcacctctacaaaaacagggcaagaccttgcctcaacaaaaaataaaaaaattagctgggtatggtggtgtgtgcctgtggtcccagctacttgggaggctgagatgagaggattgcttgagcccaggaggttgaagctgcagtgagctatgattgtgccactgcactccagcctgggtgacagagcaaaaaaaaagaaagaaaagaaagaaagaaaaaaagtttagggttggaagtgtttgccacttatttcctttgtctcytgtcctctttccctgtttcaacctcaaatcacccttctctccctggtgagaacgcctgaccaggggcatagagtgtggtgagcaacagtttccaggaaacaagttactctgaaaattgacacctgtttctctcagttgttgtgcactggccac

SEQ ID NO: 140577 - DNA, 463 bp, Homo sapiens
ttaaaggagaatattacaatgttttcaaactcctgcagtaaatgagaagcatcttcaaatgtaacctgttggagatgaaaattaaagccatctgtgacgtccccatttaagacctccacaaccagaaccagacaatttttgaggatcaaagcaagttgaaggcaaaagtaggtgggtggtagagtttgggggaagaggaggaggtggaggggaattaatgttttccaggtcctgctgtgttctaggaaccacaatactctttatttttttattgagacaggtcttgctctgtcacccaggctggagtgcagtggcacaagcacggctcactgcagcctctacctcctgggctcaagtgattctcctgcctcagcctcctgagtagttgggactataggcatgygccaccacgcccagctaatttttgtattttttgtagagacggggttctgccacgttgccc

SEQ ID NO: 140578 - DNA, 338 bp, Homo sapiens
ctcctttcttatgatgggtgatttgtactcatggactgtgtgatggtgatgagcaggagcttctgaatttcctttctaggtgagagcaggtgctgggacccattgtgagctgtgtacagtgactgttcccaggygttcccatcagctccaaggtgcaaaatctcattttctcaggatgggtaaagcttctctcaggagaatgccacaaacctcaggcagagcctgatgctaacaatggcctagattttgaaggctgttattacagttagaggcaggactatgggtccctcaagctttctttcaacctgaagactctttgttcttctctgtatactggc

SEQ ID NO: 140579 - DNA, 430 bp, Homo sapiens
tcttaggaatgtctatcatacgatcataggtaggccagttttcccaacattttcatcagtttatgtgtctccctcattcccctcttgacccttttctttgagttatgaataagctttttttagttggttttccaattttttttttttttttttttatgagacagagtctcgctctgtcgcccaggctggagtgcagtggtgcagtctcagctcacttcaatctccacttcccggttcaagcaattctcctgtctcggcctcccgagtagctgggattaaagatgtgtgccatcatgcccagctaatttttgtatttttcgaagagacggggtttcaccatgttggccaggctggtcttaaactcccggcctcaagtgattagcccacctcagcctctcaaagtrctgggattacgggcatgagccacagc

SEQ ID NO: 140580 - DNA, 500 bp, Homo sapiens
tgggcttgggatgccccctaatccagatacagcttagatcacaatagccagtcccttcaaatacctggaaagccttcccaagacagatgggcacaaataagcccagactgtgaagactataataacagtccagacactracaaacatccacaagcatcaacacttcctaggaaaacatgacctcaccaaaaaactacataaagaaccagagaccaatcctggagaaacagagatatgtggccttttaggcacagaattcaaaatagctattttgaggaaactcaaagaaattgaagataacacaaagaaggaattcagaattctatcggataaatttaacaaaaaagatgaaatattaaaaaagaatcaagcagaaatttgagaattgaaaaatgaaactgatatattaaagaatgcatcagagtctcttaacagaattgatcaaacagaagaaagaattagtaagcttgaagacagcctatttgaaaatacacacttag

SEQ ID NO: 140581 - DNA, 577 bp, Homo sapiens
gtacctctatgagtctacaagaaccaaagcattatgggcttgggatgccccctaatccagatacagcttagatcacaatagccagtcccttcaaatacctggaaagccttcccaagacagatgggcacaaataagcccagactgtgaagactataataacagtccagacactgacaaacatccacaagcatcaacacttcctaggaaaacatgacctcaccaaaaaactacataaagaaccagagaccaatcctggagaaacagagatatgtggccttttaggcacagaattcaaaatagctattttgaggaaactcaaagaaattgaagataacacaaagaaggaattcagaattctatcggataaatttaacaaaaaagatgaaatattaaaaaagaatcaagcagaaatttgagaattgaaaaatgaaactgatatattaaagaatgcatcagagtctcttaacagaattgatcaaacagaagaaagaattagtaagcttgaagacagcctatttgaaaatacacacttagagragacaaaaacaaagaaaagaatacaaaagaatgaagcatg

SEQ ID NO: 140582 - DNA, 603 bp, Homo sapiens
ctgcccttgtgaacggaatccattcatggaatagtgggttaatggattaatgggttgccacaggaatgggattggtatttctataagaaggggaagagacacgtgagctagcgtgctcagcctccgcatcatctgatgctttgtgtggcctcaggactttgcaaagagtctccacctgtaagaaggctctcacctgatacacccctcaaccctggacttctcagcctccataactataagaaataaatcccttttctttataaattacctagyttcaggtattttgttataagcaacagaaaatggactaatacagagaatatctagtaaagaatctaaccctgcccaaaaaagagacctggcctttgcctttgacttctgagaggtcattcctaagcctttggaatgtcatgcctgatagtagtgtctttctttgtctatggtcttgggccaaggaacaatgtggttgggcgttggggatgctttgggtcatgtggtattagcttgacctcctgaagggctggaaccagatcagccacatgggcagtcaactgtgcctatgtggtggagacccaataaacacactgaacaccaaggctaatg

SEQ ID NO: 140583 - DNA, 418 bp, Homo sapiens
gccccttggtctcccaaagtattgggatcagaggcacgagcccctgtgcccagccaattattatgttccacataaatctcacatgagtgtgtagtggtcagctgtgcctttgctcagcatttcctcttgagataactgtgcctgcattgctaaccttctgtttctggcaggagccaaaaattttttatgacccttctcaccacatttgactagtttaggggtgcacatccaacccacacaagaccagtttaagttctttgcaagattttcaagctgcaactgagagaaagtttttaacatgygaagtttcagagctgtttttggccaagttcaattaagtgaaatattttagtaacctcccagtaagtaatcttttcaaaaaaaaaaaaaaaaaaaaaaacgcggagggggattgaat

SEQ ID NO: 140584 - DNA, 557 bp, Homo sapiens
ttcttgtctacgtcatcaaagctattttttttagctcccacatatgagtgagaacatgtaaaattcgtctttctgtggcggccttatttcacttaacataatgatctccagttccacccatgttgctgcaartgacaggatttcattcttttttatgaatgaataatattgcaatatacaagacgcatcatgtatatataccatattttctttatcccttaatccactgatgggcacttggattgattccatattttagctactgcaagtagtactgcaataaacataggagtgcagattatctcttcaatatattgatttcctttcttttggatattattggatattatttagattatattcctgtatatatgtatacatgatatagatagatagatacataataaactgcaactttgcctccaaagaaaaagactataagactggaatacaggaggaaaagtgactttttattattgtttgtataaattttattgtgtgcatgcattacttgttcattaacacttttaaataaaatgactaaaacactaagattt

SEQ ID NO: 140585 - DNA, 385 bp, Homo sapiens
ggtccctgagactctgttcatttttttttaacatctatttttgtttttcaggctgggtaaattctgttgttttatcctcaggttcatggatcctttcctgtgccccctcagttctgctattgagcacttccatggaaatttttattttggttattgcattttttagttctwgacttctttatttgcttcttatttacatcttctttgctgagaattcctatttcttagctcagattttctgtttttttgtgtgtttgtttctagtatgtacataattgctcattaaagtatttttataatgaccactttaaaatttttgccagataattctaacagctctgttatttaggttttgatatcagttaattgtcttttttcattctgc

SEQ ID NO: 140586 - DNA, 567 bp, Homo sapiens
cctgtccaggaatttcagaacttttttctccaaaatgcttcctctctcccctaccctcatgtatttacaacaatgatcattatttgcaatctataaacttccagttaacgtcctccaggaaaaccaccttcctgaatctccacaccagattcagctgtcatctcctatttactctcaagtccaactgagaccactgccaagatgaagctggtgtctggagcgtatgttttctcctggggtcttgattaccagtcagtttggcatcttacgagatgatggaaagagaaaagactgaatttatttttstgtgccactacaaaatctcttgacatttggctttccaagcaaacctaaaagaaatgaattaagtaattaaatcctgctaactacgtacaagacaacttccaaacattatttcatgtcatccttacaaatgtctcctaatattgataatattttttcccatttatatataaaagttaaggtcaaagatcttcagttacttgcctaaagctacagagctaacatgcaatcaagccagaacatgaacccaggtggtctgaattc

SEQ ID NO: 140587 - DNA, 564 bp, Homo sapiens
tgaattctcatttcaatcctgtccaggaatttcagaacttttttctccaaaatgcttcctctctcccctaccctcatgtatttacaacaatgatcattatttgcaatctataaacttccagttaacgtcctccaggaaaaccaccttcctgaatctccacaccagattcagctgtcatctcctatttactctcaagtccaactgagaccactgccaagatgaagctggtgtctggagcgtatgttttctcctggggtcttgattaccagtcagtttggcatcttacgagatgatggaaagagaaaagactgaatttatttttctgtgccactacaaaatctcttgacatttggctttccaagcaaacctaaaagaaatgaattaagtaattaaatcctgctaactacgtacaagacaacttccaaacattatttcatgtsatccttacaaatgtctcctaatattgataatattttttcccatttatatataaaagttaaggtcaaagatcttcagttacttgcctaaagctacagagctaacatgcaatcaagccagaacatg

SEQ ID NO: 140588 - DNA, 490 bp, Homo sapiens
gtctccttagagagagagtttatctcaccatcaaaccaatcattagtgagctttctctttataactgttttctgatttatcacagtttatcactcatattttaaaaactccttctatacccaccctgccacatatggccacagcttgtttgcaaagaatgctgatcatgctttcaaacaaaactgttcccatatgcttgtgattcatttcccccttcctgcctttgcttcatttgttttagaattggagtttaattttgaaaccatygctgtgacaggaagtgactagggagaggaagaattagaagagagggacctcagagctgagagggatgaatgaaatggtatgttgcttattcaacccacagatgggatcaaagactgttagattgaaaaagccctttaaagtaataccatattcccacttgatcctttccttccagcttaaagcagagggctgggaaaaacatgatcttatctccatttctgga

SEQ ID NO: 140589 - DNA, 507 bp, Homo sapiens
caggttcttctgaaggacagctgcactctggtcccatgctgccctctgtctttctgtttcttgctaaagatgttacagatttctttaacaagcaagctgggagaaacwgttaaaattactggaaaaattgtgtcacttcgattgaaagtcataagagctacatccaggcattcctttaaaagttgacagatgatagtaaattgtttaaacgtatgtctctcttaacatatatatattaatttgttaggagttttggttttttaccaatatttttacattttctacttttcttaatgtatcctagtttttagattagaaaaaaagcaaagattaatagtattagagctaaatctgtggcttgcaatgctttctgaagcttattacaatggaatatttatgatttaggattttttgaaaattattagagagttgtataacagcaacaaaacctacctgggactcagaaaacccagattcttgtcccagcatctttccctctaactagaa

SEQ ID NO: 140590 - DNA, 507 bp, Homo sapiens
caggttcttctgaaggacagctgcactctggtcccatgctgccctctgtctttctgtttcttgctaaagatgttacagatttctttaacaagcaagctgggagaaacagttaaaattactggaaaaattgtgtcacttcgattgaaagtcataagagctasatccaggcattcctttaaaagttgacagatgatagtaaattgtttaaacgtatgtctctcttaacatatatatattaatttgttaggagttttggttttttaccaatatttttacattttctacttttcttaatgtatcctagtttttagattagaaaaaaagcaaagattaatagtattagagctaaatctgtggcttgcaatgctttctgaagcttattacaatggaatatttatgatttaggattttttgaaaattattagagagttgtataacagcaacaaaacctacctgggactcagaaaacccagattcttgtcccagcatctttccctctaactagaa

SEQ ID NO: 140591 - DNA, 419 bp, Homo sapiens
gaattcttggagagaaagagaaagacatgttggagagggtaggcaggacaatttaacattacccatgtcactccttacccaactccaggcagcacagcatggagagaggtaccatccacttacggaagagagaggaaagtaaagtgtaggactttgcaccagcctcaaatactgtctcaccatagtaaaactcagtactacgagatccccacagcccctgactccaagctggtacacatggactgagtctctagacttgctctggcaccagaggggaacccatagtacctacaaaataaacttaagttccagctcgcatcaatgccagccaacttyagtgaccttgggctccaaataactaacccacggtgacaggcagaactcggcagctgggggcttggcttccagaccagtgctat

SEQ ID NO: 140592 - DNA, 526 bp, Homo sapiens
gctggaatgcccatagaagccttcatgaagagatatgtgatgatagagttaacctgcaggtgattttgatgcaaacatttcaaaccaatttattgactatgaaagacaagatttttccacgtcatctggagcattatttaacttcttgggtatgttttctttctccctatgtgatgggcataagataaaaagattaatgcttgcttttgaaagttggctctaaatgtcaacatttttgtgtatgtgtatgatattgagtagtgcctattattataactaaaaatcatacragaaaaaaatctttattctttgcaagtaacttgaactcagaagacatgaacactttagaacatgcatggaaagtacctgacgaccagcctaaatgcaatggagcagtcatcccccatgactctctggataagctgactttcaacaccagacccgtagccaagaatttatgatgtagaaatatttcacttaaaaataaatatttcctgaaaaacctaaaaactatgaaaagcaaaag

SEQ ID NO: 140593 - DNA, 497 bp, Homo sapiens
aggtatcttttgacaaaagaggattttacaacaaataaatcttgaaatgatgcattaatttaatttttacttcagatcatcaatagaccacaatatactatgcagaaaaaattataatgcacaaagagatataaaatattaatgtgactgaattttacaaatctgtacataagatttttaggtacttcaaagcagtcaacttgtaaggtcatgtccttattgtgatatgctctaatatactctgcatatgcatccttgacagtggcaaatcctcaacctttaagaatggaattttgtttttaaaaattggcrttacatttaatgaaattaatctcaccttgccaaaagtcttgttctcctcaaagcccaggagaacttaagtctccctcataccctgtgtcctgcaagtcaggccataccaatgtcacatgggtcacaggacccagattccttgccatgactcttgcacatcaaaggccttattccttcaaatgagg

SEQ ID NO: 140594 - DNA, 645 bp, Homo sapiens
agtagccatgtttcaactactcatacaccgttgagtgttcaaactgtattcaaataaggcaaatgtcaacctgcaaccaagacagttgtttctctatctcacttccaatttctgcacaccatgcctcttattttgtttataaatttgttctgaccaccaggcatccctggaatctttatgaatctgctgattctgagggctccctgattcacaaatgattcattgctcaattaaactcctttaaatttaattcagctaaagtttttcttttaacagaagattgtttggaaagctaagtcttccctctgtcattragtaaatgttttcctttttcaacaattttcagtcatcattttggctaaatgaatgacttatggttacctggaattctacttcataatatcaagtgttttaaacttttaatatatttgataggcttcccaaaatccaatttcagcttccaaattatcttttcctttttttcatctctttatagaaaacataatttatatgaaagggctttacaaatgagtacattttttataatctttttttatttcaataggcttttgttgaataggtggtgtttggctacaggaataagttctttagtgtaatttctgagattgaggggcacccatcacc

SEQ ID NO: 140595 - DNA, 609 bp, Homo sapiens
tgagtcaaggggacagcaagcaagaagacttgccatcttggcagaggcagttgactccacaggcatagtaaccaggtgctagcatccctaagagaaagagtctgtgcccttcatgaggtcaaccaataaaccacccatcataaaagtggaaggttagcaaaatctagatctagatcagttcataaaggaaggaaataagtatcggctgtggactcaagaccacatgtctcaacagggccactwccttttcttccaagttttttatagtttctcccaagaaaagagactattaaactcccagaggagctgctttgagaatgtaaatgagtctagtagatacaacagtactggggtatacaaccttgagtactgtgttatgagccaatcagatcccgcactgaggactagagggcttgttcccctagctttgggaatgcttgttgatgaacagctcctagctgtcagccttctagaaggaactgccccagttgaagagagacacaggcccaagggcttcccagggtagcctgaattccataactcattgacatggaatctataaagacgcagccacacccatcttgtggcaactccaaagagtaatcccaa

SEQ ID NO: 140596 - DNA, 616 bp, Homo sapiens
gccctggtttgaatccagtattctctgtgtactagctgtgttaatttctctgctcttcagtttctcctcccataaagcgaggataataataaaaagatgtaccttccccatttagggaacataagatcaaatgagtttatgtgctttaatgcaatgcccagcaaatagtaagtattatttggagattttattgttactgtgtacaataatgccaatggatacaaaaccttggatagtcatgatattagaggctattgtaccttgatattaaagttaaaatcacaatcaacaagagtattctcatatacatctaaatgcccatataaataatgttaaccatggttgtgtcttaattcgctgtcttattaattttacrtcaagcaacttggtatatctaataaatacagtgaatacctgacttagccctctcccccatgcacatacgttacaggagaatatacttcttttttaaaaaaattctggtgacgtgcattaattatcatataaaatcaacccacttcgtagttactttcaggaaatgcaaataggtatcaaacattaagtctaaaagcaaattcattgaactgaaaggcatttcccaaattaattatatttc

SEQ ID NO: 140597 - DNA, 619 bp, Homo sapiens
tggaacaaaacagaaaagaaaatgaatacaaattcattttgctttccttggagaggtgggggtaggctgagaaaacatctaggagacaaaaggcccatagtacccagcagcaagaggcccttgtgcaaaggactatgattccaatctggggtgtggagggggttcttttggggccttcctccagctcagctttggcctggctgctagacactgtccctgacagcccagcctcctcttcctcacagttactgtcttcatcrtgcagccctggcagccatattccaggcagcccagaggtgtctgagcctcagcttccaaacatcatgtggatggtatcagggaactcaattccaaagtaagctgccctggtcttgtttcaaaaaaaacttttaaatgccttctgagaagagaggcaatgagacaaatatcatgttgttcttgttccgggactcaacatttcatataaaaatattcctctttctgggaagtaaatagtttgtttattctttgctgttttttccccattgattttattttgaaggaacttgtgaaaaaaccatttttttcaccaatttcattcacactagagaaataacaataccttactttattactttgt

SEQ ID NO: 140598 - DNA, 527 bp, Homo sapiens
gtcaatgtctgggcattagagacttgtgtatttattccaatttgtgctgyctgggtttgtttgtgcgcatcatttttgagaggcctttccaagaactcaaagaggtttgagtgttgcgacctaaggctgtggttactgcagctgttttagcactaggggcacctaaacccaggaacactacaactgttgatatatggagtcctacatacacagccttggtggatttggagcagataacaagaggattccttgggttacctcctctcttccctctcttttctgcaatcaggagtctctgcctccattgggctgcctggagttgggggagggatgatgtcagcattcctgtggtcaccacagctggcactgcactgggtcataactgaggcaaatgacttttcagaccaccacagtactggggcttaaccaagtccttggaccactactgcctggctgccaatgctgtttatttaaggcccaaggccactttaggtagtgggtggcaaatcttgccaggattggcctca

SEQ ID NO: 140599 - DNA, 528 bp, Homo sapiens
agacctagcatcaggggattaaggaatctgtccggtgctttattttactgtggctgagctgatacccaagttgcaagacaaagttctctatactcttccttcttcttcccccaagcagagggagtctatcccagagctgcagttcctggagttggggaggggtgatacaggcaatcccatggcaaccacagattgtgtcacactgggtggtgccccaagttgattgcctttaagaccagtgcagcaccagggcttcctcaaagactgcagtacttgtggccctgactgscacacaaatttactcaggatccttggccaatttagtcaactggtcatgatgctggctaggacccagtttcctcctgctgaggtagaggattcctctctggtccagggttgatttaaatgctccttctgtgggcatcagcagaattctgccctctgttgtgttccactgtaacagggaaccaatgaagtacaacgcaaagtcccacgtttgcatttcactctccctctccaaatcacaca

SEQ ID NO: 140600 - DNA, 622 bp, Homo sapiens
tttcatcttcaaattggacataatttttaaatcaacagttacatgtttacatttcaaacaaaactataagctccctcaagcaaaaatgttttcatatatgacaaaaggaacataatgacagcacacatatgatatgagaggggagtttcttccaaacaccattttaacatcatgagttttgtgattggcaaactgawtaagtgaaagctgataagccccaaactggaaatgcaacaaggatacccatttgtgattggttcatgtgtcaattatatgtgtatgaacagaagcaaatagcaactctatgaccttccttcccttcccctcctccaaaagaaagaaaaggtaaggaaaaagttccaattccagagaaataggaacttctaacttattagttctatatgacaggggaaagtaagtcacaaggaaaaacctaatgtggatggctctactgaaaatgtgtcttattaactaaactggttaatcatactcctcacccccataaatattgtaaatatcacttactcatcatattcagtaatatattttcaagaaaaaattgattaattatagcttataatgacagacacagcagtggccaccactctactaggtattgctg

SEQ ID NO: 140601 - DNA, 575 bp, Homo sapiens
gcattatatttttaaatcttctcaacaacactgtaaggcatattctaatcattcctgttttacaggttaagaagctatggcttaaccagattaagtccaagattccacaattagaaataaagttgggatgtaagtccccaggcagtgtgacttccatagactgtgattttcaccaaaacacagtattatttttccatagcattcatcaatattatccactaaaatgtttctattaatgtgaaagacaaaaaaaatattgtttttactttacrtaattttattaataaggccaatattttttcataattttattttttaatttgtttatattttggatatttcatgtgaattttttatttatgttccttggtgtcttcatcatttaattatgaggagtactttcctctgaaggctagattctaaaattacatattgaatgactctctttgaggtaataataaatatggattttcaagatggtgacacattcagttgcattaattaggaaaaaattttgctaattgcattctctggtgagcattggacttcctgtctgccaatgtgtattccatttt

SEQ ID NO: 140602 - DNA, 376 bp, Homo sapiens
aattatcagaggctgggaagggttatgggragggatgaagaaaagatggttaatagatacaaacatatgggtagacagagagaataagttctaatatttaatagcaggggagggtgactataattaacaataatgtgttgtatatttcagaacagctagaaggtaagacttgaaatgttcccaacatatacaaatgataaatatttggaggtgatggatatccagtctatcattgatggacatttgggttagttccaagtcttttctattgtgaataatgctccagtaaacataggtgtgcatgtgtctttatagtagaatgatttataatactttgggtatatatgcccagtaatgggattactgggtcaaatgg

SEQ ID NO: 140603 - DNA, 376 bp, Homo sapiens
aattatcagaggctgggaagggttatggggagggatgaagaaaagatggttaatagatacaaacatatgggtagacagagagaataagttctaatatttaatagcaggggagggtgactataattaacaataatgtgttgtatatttcagaacagctagaaggtaagacttgaaatgttcccaacatatacaaatgataaatatttggaggtgatggatatccagtctatcattgatggacatttgggttagttccaagtcttttctattgtgaataatgctccagtaaacataggtgtgcatgtgtctttatagtagaatgatttataatactttgggtatatatrcccagtaatgggattactgggtcaaatgg

SEQ ID NO: 140604 - DNA, 573 bp, Homo sapiens
aataataattcaactattatgttctctgcactcaaaatgtttacaatatatttggagagacatttgaactttctagaaacatcaaattaagcaataatrccaatcacttttaaacatatgattttatttaatgctcacaaccatgtgatttaagctcatctagtattataatctgcattttagaaatgagaactctgtggctgagggaagaaaggagaagtatgaaggtcacagagcctgttaagtgggcagaatttagttgagccttaagtctgctaactcctaacctggtgctctttccacttcagttctaacataatttttgtcccatcactctttttcaaatttagaatgagaatctaattagaaagttattttttgttcatctttcagttcatgaatttcccattttattataaaattcttaaaagctgaggtaagcacataactaacataagtataaacattggacataaagtatatatgttatagattacactagtcagtagtttgctagtaaatgtttaacaacaggtacttagaggaataggggtaggtacgaaaaagtaacat

SEQ ID NO: 140605 - DNA, 573 bp, Homo sapiens
aataataattcaactattatgttctctgcactcaaaatgtttacaatatatttggagagacatttgaactttctagaaacatcaaattaagcaataatgccaatcacttttaaacatatgattttatttaatgctcacaaccatgtgatttaagctcatctagtattataatctgcattttagaaatgagaamtctgtggctgagggaagaaaggagaagtatgaaggtcacagagcctgttaagtgggcagaatttagttgagccttaagtctgctaactcctaacctggtgctctttccacttcagttctaacataatttttgtcccatcactctttttcaaatttagaatgagaatctaattagaaagttattttttgttcatctttcagttcatgaatttcccattttattataaaattcttaaaagctgaggtaagcacataactaacataagtataaacattggacataaagtatatatgttatagattacactagtcagtagtttgctagtaaatgtttaacaacaggtacttagaggaataggggtaggtacgaaaaagtaacat

SEQ ID NO: 140606 - DNA, 573 bp, Homo sapiens
aataataattcaactattatgttctctgcactcaaaatgtttacaatatatttggagagacatttgaactttctagaaacatcaaattaagcaataatgccaatcacttttaaacatatgattttatttaatgctcacaaccatgtgatttaagctcatctagtattataatctgcattttagaaatgagaactctgtggctgagggaagaaaggagawgtatgaaggtcacagagcctgttaagtgggcagaatttagttgagccttaagtctgctaactcctaacctggtgctctttccacttcagttctaacataatttttgtcccatcactctttttcaaatttagaatgagaatctaattagaaagttattttttgttcatctttcagttcatgaatttcccattttattataaaattcttaaaagctgaggtaagcacataactaacataagtataaacattggacataaagtatatatgttatagattacactagtcagtagtttgctagtaaatgtttaacaacaggtacttagaggaataggggtaggtacgaaaaagtaacat

SEQ ID NO: 140607 - DNA, 607 bp, Homo sapiens
tcttttgttactgttttttgtttgttcattttgttttataatcagaaagggaaacctatctaaaacaaagtcaaaacaaagggaagcagtgtcaaaaaatggagagagattcctacagayatagtctgtagatctggatttgtccatccttgaattttcatcaccccagactgtcagtaaaaatccataggtacatcatccttgattcagtattatttggagagcagaagggtggtaacttgggtatcctgtaatgatgtggtgcaggagtgggacacacccaagagggatattgatgtgatctaaacaaaattaatctgaatggttttggaccatatctaacttgtctcccccttgggcctgggcattccatcgcaaacacaaattaactttgtttagttaaacataatctgtgtgttgcacaccagcatatacaagcatcttttttgtgaggtttgagtttgtcagggtattattgtgttataaatcaatatcactgccactacctctcagaaactaaatccttctagtgttcctgttgtttatatccatgaggggctattttgttgactgagagaatgatatgtttttatgactgtctcaaaga

SEQ ID NO: 140608 - DNA, 657 bp, Homo sapiens
tttaataaatgatgttttacataagtacagtttaagtataggaaaaccacaagagatagtagagttttctggtygtaagggcacccttgaagtgggcagggaggtttgccacccttagatgtgaaggagaaaaagggagacagttgtgtgaggacattccctgagtggaaatttggtctttggcacaatttctttttggttcaatttgtggatcttttgtgtgttgatttgtaatataatctggtatccagcatattgatagatttggtttgaattttaatagtttgtctatagatttttacgtgtgtgtgtgtttgcgtgtgtgttcctgtatctcatcatatctgcaaacaatcacatatttattattgcttccaatctgtatacaccttatttattcttcaaaattttctgaattggacagaattcctgtgctatatcgaaaagtatacctgatagcaggcacccgtgccttgttccaactttaaacagaatgcatctaatctttccccattatgtttgttactttctgtgggtttttattagataacctcatcatctccttgctattcccaatggctcttcttagtttaatccctcgttatctctccctgggaatattgcaatagtctcctaactaatttgtctgcctccagc

SEQ ID NO: 140609 - DNA, 550 bp, Homo sapiens
tgccaatagtcagttgtgcagcccaaagtagacacccccaagactgatcccatccccaaggcagaacgttgatttctaatcctytgatttacaccaaacagcccatggtgggttcttggtaagattcccagtaccagctgttatggaaacaagaggaagtagccaaggggcactgtcataaagcctgtttatgagaaaaattaaggaaagaagtagcaggtgtgtaagttcttattgcctattatgtgctaggtgtgagcacagagatctagcaacatgaaacgtcaaactctggggagaagaccctaacccttgagctcttgagcttctcagtttcgtgataagaaaaatatcagcccatgctgatttggtgaaggaccaggatgtaatagtaacatagcatgatagaattatgcctttgtccatatctcaccgactgaactttcatggttaatgttgagaaccaacccctctcctggaatgactaagaagctagtctcaagctttgcagttgcagttatgtgacatggcatgctaacagcaaaattca

SEQ ID NO: 140610 - DNA, 633 bp, Homo sapiens
taaccgttgttgccctgtggaaatgtgggcctgatattgccaggtcttccttttatcaagaaaataagaaaaatgaaaagtttggagtttgacatcaaaattatatattgtaaaacaaaacctctctttggactggcttgagttcttggatcaaagacaatatggcttgttattaagttctaaagagcctaaaagggaaatgaggggtgggggtggaaataaggagaatgcagactaaagcttgtttcaactctccagacctctttgctttaagggattgctcagtaaagcactccatgattccctttgagtagtcccctttgtaagcctaatcagcagctactaactctgtaattctgtcgtttctttgagggatgactttrcatcttcttggaaggcttagtacattttattgctgccaagataccctgtgatatttcaaagatatcatttgctgccttcttgttgcttctgcaggttttttatgctaccataaacatgaacatgggacaaaagaacttatttagataaaggtcagctctctggagctaaatctaaaatgttattgaaaaataccataaatagtgttatttcatccttgagatggaagacggggcatggcagtgggcgtgc

SEQ ID NO: 140611 - DNA, 622 bp, Homo sapiens
tgaattgtaagaaggcaaaacaaccttattgctgatatggagaacgttttagtggtctacatagaagatcaaaccaggtacaacattcacttaatccaaaccctaatccagagcaaggtcctaactctctttaattttttgaaggctgagaaaggtgaggaagtttcaaaagagaagtttgaagctagcagaggttggttcatgagattgaaggaaataagcttgtgtccataatacaaaggtgcaaggtgaagctgcacaagttatgatgtgtagaacctgatgtagaatctgcagcaagttatctggaagatctcgctaagatcattgatgaaggcagctacaccaagtgacagattttcagtgtagatggatgaagcagccttctattggcagaagaggccatctaggactttcatagctagagaggagaagtcagtacctggcttccttcaaaggataggctgactctcttgttaggaattaatgcagctggtgactttaagttgaagcggatgctcrtttaccattttggaaatcctagggcccctgagaattctgctaaatctgctctgtctgtgctctatgagtggaataacaaagctggattacagcacacctg

SEQ ID NO: 140612 - DNA, 325 bp, Homo sapiens
ggttttccattcctgagttacttcacttagaataatagtcttcaattccatccaggttgctgcaaatgccattatttcattcccttttatggctgagtagtattccatggtgtgtgtgtgtgtgtrtatatatacatatatatatatgtatatctgtctcacaatttcttcacccacttgttgattgatgggcatttgggctggtttcatatttttgcaattgcaaattgtgctgttataaacctgcatgtgcaagtatctttttggtgcaatgacttcttttcctctgggtaaatatccagtaggggaattgttggatcaaatg

SEQ ID NO: 140613 - DNA, 558 bp, Homo sapiens
cttgaagaaggacaaaatcttaaaagagctgagattcaaaaaaagaaattcaatagtgaataaaagaacctgatgaacatatagataatattaaaatattttctatatgcaataataataattgtaatcattaaggtgtgacattgaataaaattatacaattaaatactgacttacaatggaatatatgttggaaaaatgtttattgaagttaaagttttataatattcttatatatctgagatgaggtgttggttaataggttggttaatctgttaatttcaggctcgtaagtataaatgccacagatactaagggtaaatagtaaagtataaaaatacgattataagtttcaaattggaaaagtgaaaatgatgaattaggaaaccagcaaattaattgtttaaataaaagctaagaaaggagwagtggcagcaaatttacagatgaattctgtaaatgttctaaaagtcaacccagtcttaaacaaagttttgcagataatataagaggaaatacattacaaattaactaataaaggaaattatggacaaaaaa

SEQ ID NO: 140614 - DNA, 599 bp, Homo sapiens
gtattccctcaaaattcatatgttgaaattctaatccccagtaactcagactataacattatttggaaatagggttgttgcagagtaattcgttaagagaccacactggagtagatgggccactaattcaacatgattaatgcccttataaatagaagaaatttggacacagccatgaacacagaatactgtgtgaacatgaaggtagaggtcagagagatacagcagaagccaagaaacaatggatgttggcaaaccatgaaaagtagggtgaggggcatagaatgcattctcccacacagccctcagttggaaccagccctgccagcacttgatcttagactcccagcctctggagtggggagacacattttgctgtctcgtttgtggtgctttgttacagaatcccaagcaaactaccacacgcagcacatcacaccttccgtggccagaatgcaggactcctggcacaggttagcaggtcctttgctcagtctcatgaggctccaatctgttagttgggctacattctcatgtcatctggggcagaatctgtgttrgcagaactcacttcctcgtggctgtgttactgaaggcca

SEQ ID NO: 140615 - DNA, 413 bp, Homo sapiens
atacatgtgcatgcttacacatgtacacacatctgcatatacacacctgtacatgcctatacatacaatacctattcatgcatatgactatacatgtacatatgcataacttaaacatgcatgtatcatacgtgcacatagctatacatgcctatacaatacatacatctacatgtacatgtttatgcatacacatgtatatatgtacacaactacacatgcacacacccatatgtgtacacactcatgcatacacatacctatccacgtacacagttatatacacacatacatacgcatgttgttaaattaggtttagmccaaagctacttccttacatattttaagttcagcctaaatgtttttccagacatagtgaactgtaacctaactggatgtgtaaacagactgta

SEQ ID NO: 140616 - DNA, 413 bp, Homo sapiens
atacatgtgcatgcttacacatgtacacacatctgcatatacacacctgtacatgcctatacatacaatacctattcatgcatatgactatacatgtacatatgcataacttaaacatgcatgtatcatacgtgcacatagctatacatgcctatacaatacatacatctacatgtacatgtttatgcatacacatgtatatatgtacacaactacacatgcacacacccatatgtgtacacactcatgcatacacatacctatccacgtacacagttatatacacacatacatacgcatgttgttaaattaggtttagacyaaagctacttccttacatattttaagttcagcctaaatgtttttccagacatagtgaactgtaacctaactggatgtgtaaacagactgta

SEQ ID NO: 140617 - DNA, 443 bp, Homo sapiens
taaaattttcagagtttcttaaagataaaatgccttttaacttttatctgttgacttactcaagctatgttaaggcctttttcttaaaacttacacatttccggccgggcgcggtggctcatgcctgtaatcccagcactttgggaggccgaggtgggcggatcacacacaaggtcaggagatcgagaccatcctggctaayacggtgaaaccccgtctctactaaaaatacaaaaaattagctgggcgtggtggtgagcgcctgtagtcccagctactcgggaggctgaggcaggagaatggcgtgaacccgggaggcggagcttgcagtgagctgagatcgtgccactgcactccagcctgggcaacagagcaagactccatctcaaaaaaaaaaaaccaaaaaaaaaaattatgcatttccagacctcagtgattctgaa

SEQ ID NO: 140618 - DNA, 443 bp, Homo sapiens
taaaattttcagagtttcttaaagataaaatgccttttaacttttatctgttgacttactcaagctatgttaaggcctttttcttaaaacttacacatttccggccgggcgcggtggctcatgcctgtaatcccagcactttgggaggccgaggtgggcggatcacacacaaggtcaggagatcgagaccatcctggctaacacggtgaaaccccgtctctactaaaaatacaaaaaattagctgggcgtggtggygagcgcctgtagtcccagctactcgggaggctgaggcaggagaatggcgtgaacccgggaggcggagcttgcagtgagctgagatcgtgccactgcactccagcctgggcaacagagcaagactccatctcaaaaaaaaaaaaccaaaaaaaaaaattatgcatttccagacctcagtgattctgaa

SEQ ID NO: 140619 - DNA, 443 bp, Homo sapiens
taaaattttcagagtttcttaaagataaaatgccttttaacttttatctgttgacttactcaagctatgttaaggcctttttcttaaaacttacacatttccggccgggcgcggtggctcatgcctgtaatcccagcactttgggaggccgaggtgggcggatcacacacaaggtcaggagatcgagaccatcctggctaacacggtgaaaccccgtctctactaaaaatacaaaaaattagctgggcgtggtggtgagygcctgtagtcccagctactcgggaggctgaggcaggagaatggcgtgaacccgggaggcggagcttgcagtgagctgagatcgtgccactgcactccagcctgggcaacagagcaagactccatctcaaaaaaaaaaaaccaaaaaaaaaaattatgcatttccagacctcagtgattctgaa

SEQ ID NO: 140620 - DNA, 443 bp, Homo sapiens
taaaattttcagagtttcttaaagataaaatgccttttaacttttatctgttgacttactcaagctatgttaaggcctttttcttaaaacttacacatttccggccgggcgcggtggctcatgcctgtaatcccagcactttgggaggccgaggtgggcggatcacacacaaggtcaggagatcgagaccatcctggctaacacggtgaaaccccgtctctactaaaaatacaaaaaattagctgggcgtggtggtgagcgcctgtagtcccagctactcgggaggctgaggcaggagaatggcgtgaasccgggaggcggagcttgcagtgagctgagatcgtgccactgcactccagcctgggcaacagagcaagactccatctcaaaaaaaaaaaaccaaaaaaaaaaattatgcatttccagacctcagtgattctgaa

SEQ ID NO: 140621 - DNA, 527 bp, Homo sapiens
aagttattataataattgaaataaatgttccgaggtaagtcagtggcagtagaactggaaaaggagataatctgatgcatgcatggaactaaatttttagagaattgtggaagaaggagtagcactagagggtgaatcagaggttactggaggagagtaatgataccaatagagatagcaaacacaggatgctgtgggtttgtgtgggcaaatgtgtttgacagatgtaaagatttacatgtgaagataaaaacaaagtcctggcaatgtccattgaaatctcaggaaggatctcagcaataaagactataaattttacatgaagtatgaaagctgaaggtttgggaagagctcagatggaagaggaaaaaaatgtgattagggcacgggggactagagaaagggaggggaggacagcgctataaggaacaccacmttttaggcaggcaaaagagatttaaaaagagaattgaggacattaggaaaggatcaagaggaagtcgtgttctcaaagtagaaatgctcct

SEQ ID NO: 140622 - DNA, 527 bp, Homo sapiens
aagttattataataattgaaataaatgttccgaggtaagtcagtggcagtagaactggaaaaggagataatctgatgcatgcatggaactaaatttttagagaattgtggaagaaggagtagcactagagggtgaatcagaggttactggaggagagtaatgataccaatagagatagcaaacacaggatgctgtgggtttgtgtgggcaaatgtgtttgacagatgtaaagatttacatgtgaagataaaaacaaagtcctggcaatgtccattgaaatctcaggaaggatctcagcaataaagactataaattttacatgaagtatgaaagctgaaggtttgggaagagctcagatggaagaggaaaaaaatgtgattagggcacgggggactagagaaagggaggggaggacagcgctataaggaacaccacattttaggcaggcaaaagagatttaaaaagagaattgaggacattaggaaaggatcaagaggaagtcrtgttctcaaagtagaaatgctcct

SEQ ID NO: 140623 - DNA, 582 bp, Homo sapiens
ggagtcttcgtgcatatcctatataagtaacttattaatcatgtagagcctatgtttggaaaaataaatcctctccactttccttagagggaagtctgagatccataagctctcaaaacatttcttattaattcatctgcattactctggagaatgtcaattctattttttttaactttttcaatcgtagacattgtagctcttcttttgtggttataattggtcattagtaagattataaagcagcttctgtattaatagctttggtatgtcatttcacttgtcaactttcgcccccaaaccatttgttccataycttaaaatgataatccaatacaaagcggcatggttttatgacagcaaagacatctgtaatctgagatggcatccgagggcattgtccctgaaagtgagaatgacaatacacaccaagcccctttctgttgtgtgcagcagcaaatacaaagggcgctggtaactttggccagaattcccctaaatgcagacaacatgagagagtaccgcccaaagcagggctgcaaactgccatcataaaatctcctggctttgttaatgtaccat

SEQ ID NO: 140624 - DNA, 567 bp, Homo sapiens
gaattccctgaccccttgagctttctgggtgaggygatgccttgcccagctttggctcatgctcagtgtgctgcacccactgtcctgcacccactttctgacactctccagtgagatgaacccggtacctcagttggaaatgcagaaatcacctgtcttctgtgtcgctcatgctgggaactgtagactggagctgttcctatttggccatcttggctccaccccaataaatttactgtatctagctgatgatatgctatttctctctgaaaagaaagaaaatgcagaattacatagctaaccttaagcagaaaaatgttttcccttaaagaaaatttgaattaaaaatttatgtttaaaaaaggatgcccttaattaatatacaaaataaattagtaaaattaaaggctaagaagagccagtcaaccactttcttatgcagttactgcaacctcatttgcctatagaagtatagcagttgcaaggcataaaatcacatggtttgcttttgtttgctttgtgctggagacatgtgatcatgaatatgaaatgaggtaggaaagtgtg

SEQ ID NO: 140625 - DNA, 567 bp, Homo sapiens
gaattccctgaccccttgagctttctgggtgaggtgatgccttgcccagctttggctcatgctcagtgtgctgcacccactgtcctgcacccactttctgacactcyccagtgagatgaacccggtacctcagttggaaatgcagaaatcacctgtcttctgtgtcgctcatgctgggaactgtagactggagctgttcctatttggccatcttggctccaccccaataaatttactgtatctagctgatgatatgctatttctctctgaaaagaaagaaaatgcagaattacatagctaaccttaagcagaaaaatgttttcccttaaagaaaatttgaattaaaaatttatgtttaaaaaaggatgcccttaattaatatacaaaataaattagtaaaattaaaggctaagaagagccagtcaaccactttcttatgcagttactgcaacctcatttgcctatagaagtatagcagttgcaaggcataaaatcacatggtttgcttttgtttgctttgtgctggagacatgtgatcatgaatatgaaatgaggtaggaaagtgtg

SEQ ID NO: 140626 - DNA, 567 bp, Homo sapiens
gaattccctgaccccttgagctttctgggtgaggtgatgccttgcccagctttggctcatgctcagtgtgctgcacccactgtcctgcacccactttctgacactctccagtgagatgaacccggtacctcagttggaaatgcagaaatcacctgtcttctgtgtcgctcatgctgggaactgtagactggagctgttcctattyggccatcttggctccaccccaataaatttactgtatctagctgatgatatgctatttctctctgaaaagaaagaaaatgcagaattacatagctaaccttaagcagaaaaatgttttcccttaaagaaaatttgaattaaaaatttatgtttaaaaaaggatgcccttaattaatatacaaaataaattagtaaaattaaaggctaagaagagccagtcaaccactttcttatgcagttactgcaacctcatttgcctatagaagtatagcagttgcaaggcataaaatcacatggtttgcttttgtttgctttgtgctggagacatgtgatcatgaatatgaaatgaggtaggaaagtgtg

SEQ ID NO: 140627 - DNA, 567 bp, Homo sapiens
gaattccctgaccccttgagctttctgggtgaggtgatgccttgcccagctttggctcatgctcagtgtgctgcacccactgtcctgcacccactttctgacactctccagtgagatgaacccggtacctcagttggaaatgcagaaatcacctgtcttctgtgtcgctcatgctgggaactgtagactggagctgttcctatttggccatcttggctccaccccaataaatttaytgtatctagctgatgatatgctatttctctctgaaaagaaagaaaatgcagaattacatagctaaccttaagcagaaaaatgttttcccttaaagaaaatttgaattaaaaatttatgtttaaaaaaggatgcccttaattaatatacaaaataaattagtaaaattaaaggctaagaagagccagtcaaccactttcttatgcagttactgcaacctcatttgcctatagaagtatagcagttgcaaggcataaaatcacatggtttgcttttgtttgctttgtgctggagacatgtgatcatgaatatgaaatgaggtaggaaagtgtg

SEQ ID NO: 140628 - DNA, 540 bp, Homo sapiens
attgccactgcaatctgaagatatttcaaagtcaaatctggtctgtagactactccagacattaaccttcactttcttttgtttccatagaaatgcctcttattatagatattctcctacattatatatatacatatatatacacacacacacacacatatacatatgactagctcatctacaagatcacctcctagaaggagattcaattatttaaccaaactaatctattatcatgactaagagactgatttaaaaagccatgagatgatatatttaaatttactcttttctgcttattccagtttgttttctcccgctcctttgcctatctgtacctaacaatctctaaaccaaaactctccaaaactatcaacttgactttaaactgtgaaacttttcaaagtttcaaagtagagacwcaaggatatcaaaatattttatcccaaaatatatttatttggcatattttgagatggctgttcagagacccaacaaatagaaatgaccctataaagctgtcttttgtataggaaactt

SEQ ID NO: 140629 - DNA, 342 bp, Homo sapiens
ggctactgcaatgcagaggttctagtgagacagttaaacttaatctagtgagttatttttgaataatcattttatgactggtactgaggggtgagctaacagggtgttgtgagacaatataaagactacttaactagcaaaaatgacttgcacccaaaagacttttgctagagccaacttgctcccctatccagmtatgtaactttggataagttacttcacttctctgagattccattttctgactacttctccagtcttacattcactactctatgtaccctcttgcactttatcctcttagattactggactgcttttgatagcatcattgtttttgcc

SEQ ID NO: 140630 - DNA, 394 bp, Homo sapiens
ttggcttttagaatttttaacattctcctccctgaaccttctctccagactaattagttcagttctccttggctggttaatatttaaccaygatgttcaactctctctgatccagatactgcattaaaaactcctacatccagtgttgtagttggcaattagtccttgtcttgaccctggtctttcccttgctgtttgttataaacagctatctcagtctattcccttgctcctcctcagagctgcatccctgtcccatagccatgatatgtggggaggcaagtgtgactacttgatgctggagggcagatatgacaagctctggtgaaacgctaaaaaagcagcctccttagaagacttccatggggagacatggtcatttctgcagttcctg

SEQ ID NO: 140631 - DNA, 442 bp, Homo sapiens
tatataaagtgtttctgagaatagaaaacaagggaacactctccgaatcattttattaggccagcataaccttgataccaaaacctgatgaggacattacaagaaaaaaggataatagtccaatgtttttcatgagcatagactaaaaaatcctacatcaactattatcacagaaaatgaaatagactgtggtataacaatattatacatcagtgagaaataagctattgcyaaacacaataatatggataacagattgttgaataaaagaagccatatacaagagtatatctggtattatttcatttatagaaagttttagaacaagcaaactaatctgagttgatagaatatcttgcaatcttagagagtattaattggaagaagaaaccagggagtcttctgcataaccagcaatattctatattttgatcagggtcat

SEQ ID NO: 140632 - DNA, 367 bp, Homo sapiens
ctggtggccagtaaaatgctggaagacatttactgtattgggattctttctgttttaaatggagagacccagtgtaagcaaattyattggttcacgcatctgaaaagttcagaagtgcttcaggcacagctgtatatgcaagtgtccaaatggtgttctctctctctgtttctctctctctctctctctctctctctctctctctctcatctccctttctgtctccacctctttttcttctgtattgcttcattctcaggctttttctccctgataagatgactgttagcttcaggttcacagacctcatagctcccagtctcccatatctcttgaaatatatgagcctctgccctagggcccacat

SEQ ID NO: 140633 - DNA, 584 bp, Homo sapiens
taatggatacaaaatttctgtttggcatgatacaaaaattttagaatggatacgggatggttgcataataatgaaaatgtatttaataccacataaatcatacacttagccgagattgcaccactgcactccagcctgggggacaaagagagacaccatctcaaaaaaaaagaaaaaraaattgctaaaattgtaaattttgttatgtgtattttaccacagtaaaaattttaacattatggaaaaataagataagctacttagaatatgttttaaaagtgatgagtgagaagaaaatattttgagtccttaaaagtctaaaactctttttaattttcccttagactttattgatagttcagcaaagtgtcaaaattctaggttgaaaatagtttttactcagaaatctaaagacttttcctgtgaaaaatctgaagacagagtggtttctcattttaatcttggaagttcctgggaatgtggcatgttttcttaaagtaaaacctacctactgaagacatgagaaattcagagtgaccttttcccttatattttcaacaaaggataaagcttcaaacttaact

SEQ ID NO: 140634 - DNA, 558 bp, Homo sapiens
atagattgccttaaatttctgaaaaaaagtgatacattggtccaatatattgataacttcatgttaaggagaaagtgtcaagtacactggatgctctgctaatacacttgtgtgtgagtaataataataaataaataatttaccatatttaccatgttggyaaattttgggtaagtacattgttcagagacattacaagaaaacctctctaaagtaaaggatgagttattgctctattcaccccctgccattaagagatagaatgtttgttggggatatttgtattttaagtcagcataagtcacacctgagaatattgccctaattcattttccattaggtgacttagaagactagcgttaaatagggcccaagtcaagaaaaggctttgcagcaggtccaagctgtggttcaaccttttttgccacttgggtcatacaatcttgcagatccatgagtaggggagaggacactgtttggagtctctagcaaattccagaagaagagtcacagggttctagagcaagaccacaccctcttcagcaagtaactactcat

SEQ ID NO: 140635 - DNA, 558 bp, Homo sapiens
atagattgccttaaatttctgaaaaaaagtgatacattggtccaatatattgataacttcatgttaaggagaaagtgtcaagtacactggatgctctgctaatacacttgtgtgtgagtaataataataaataaataatttaccatatttaccatgttggcaaattttgggtaagtacattgttcagagacattacaagaaaacctctctaaagtaaaggatgagttattgctctattcaccccctgccattaagagatagaatgtttgttggggatatttgtattttaagtcagcataagtcacacctgagaatattgccctaattcattttccattaggtgacttagaagactagygttaaatagggcccaagtcaagaaaaggctttgcagcaggtccaagctgtggttcaaccttttttgccacttgggtcatacaatcttgcagatccatgagtaggggagaggacactgtttggagtctctagcaaattccagaagaagagtcacagggttctagagcaagaccacaccctcttcagcaagtaactactcat

SEQ ID NO: 140636 - DNA, 509 bp, Homo sapiens
tgaattttggaagcggtctgctttgaggctgatggtatggtatcttagtcctttgggactattactacaggatatcttagacgaggtaacttatgaacagcagaaatttatttctcacagttctggaggataggaagttcaagatcaaggtgctggcagatttagtgtctggtgagggcctcttccttaaagatcatgtcttcttgctgtgtcaaggacacaggcagctgtctggggcctgttctatagacactaatcccattcatgagggccctgctctcatgacctaatcactcccaaaaggtcccacctcttaataccatcaacttgggaagcaggatttcaacataggaattctgatgggatgcaagcattcagwccatagtacatggccacctgtgtattgtgattagaatacatcaggaaagactctcacctttcccctcacatgattttcccatcccaattactgcccagcatgtatttccattattgtaggattattcctt

SEQ ID NO: 140637 - DNA, 594 bp, Homo sapiens
gttatttctagaactttatgtgttaaaaaataataagcagtatgaaatttattaaatatttctgaccaggttctaaagtaatgcaggttgcaggtttgttgaatttcttagaatagctgaaaatttccaggatcttacttttwtatatatatatatatatatatatatatatatatatctatatctatatatatatgtatatatatatatggatatatatatatatggatatatatatacatatatatatatatgaatgatagtttttaacttgctataatgttattggtttttattagtaaattttggaggtgctttcaaaaattgcagccaacaatagaattaaaaaatatacattgatttaatcttcagctaacagttacaatgcctttctcttcagatatctactgcaaatcatcttgtggttctttgaaacatagtttctacagaaacttactacttaatgctatacatgaaaatttaagaaaatgccttagagctatatatggagtgatacagacttaaaggtctcagagatgtttgtttgcagtgcctgctcagcatgttctagcaacacaaaaatgaaatgttaaa

SEQ ID NO: 140638 - DNA, 318 bp, Homo sapiens
gtggagacttgtctaagatcacctggccaggcagcggttgagtgggagccaaggctagaaccagattttctgattctgacagatctaaatgacatgcctgcccctcatccccttcccrttttagggaggccattccatgatacaaatatcacagagttgtaggagctgaggggtgagacaaaagaatgctctcaacatgcccaagaccaaaaaacctagtaaataagtgtcatttgatcccaagtaactctgatatctgggaggtgcagcaggagagtgttgagtcatgtgctatgaatgaagataatattgggactt

SEQ ID NO: 140639 - DNA, 635 bp, Homo sapiens
ttcttcctcccctgccaagcccactggtggatatcagtggggcaggaggaatctatgaacttcaggttaagaaacccttgtcagttatatataatatatacataagtagatatatatgataaaaaaataagtttatgtatcctttcttaggtgccacaacagaagcagattgggttcctctcgagctgtgctttggaattccactgttcagttccgaattaaaccggaaagtttgtaggaaaattgctgcacatggcctttgcagaaaagagaggtgagggtttatattcgctgtcatattttcatatcaatttttaagctgtcagcaaatagttaccatatcttacttttattccacacatgagcacagtaattgttctgtatatatttgttgattgaatagagatcgctagtttaagggttttgctgtatttttcaaaattaaatttcactagatcagaaattagtcacaggcaaacattttgggcacatgttttgattatatttatttagtaatctaggtgaggtgagggtgtggtgaaatgggcatgctsatatggagtatgaacctagattttaaaaaatgtatgtctacagaaaatttctctgcatttctctcactcctaacatacaca

SEQ ID NO: 140640 - DNA, 552 bp, Homo sapiens
gtgttggtatccatgcatttgaataaacagccacttctcccagtctctttgaattcaatagaaaaagacttttgtgagagcrtggctggagattctgggagcttctcaaaccttttttatggttgtgtcttctttagtcttgtgtgtgtagattcttaattagagggacttactggttgttttttttttggcaggtgatcccataatctcttgctccctctggtatctaattgctgtactgtgggccaggacgttgaaggcacgctccactatcctccctgtttccctgtatagaaacctttagttatgtaccttctcctcatcttgtagagatgtgctgggtacagaaagatgcacacctcctttcctttgctcttaatcaactccataaaactacatcagttctgtcaatgctctgggtgagacaagataggaaacagcccctcagaaagtatttgaaactacacacggcattggatgtacgccctatttttcacctgccagccccactgcccctagcatagggagaagttgtggaccagggcaacagct

SEQ ID NO: 140641 - DNA, 552 bp, Homo sapiens
gtgttggtatccatgcatttgaataaacagccacttctcccagtctctttgaattcaatagaaaaagacttttgtgagagcatggctggagattctgggagcttctcaaaccttttttatggttgtgtcttctttagtcttgtgtgtgtagattcttaattagagggacttactggttgttttttttttggcaggtgatcccataatctcttgctccctctggtatctaattgctgtactgtgggccaggacgttgaaggcacgctccactatcctccctgtttccctgtrtagaaacctttagttatgtaccttctcctcatcttgtagagatgtgctgggtacagaaagatgcacacctcctttcctttgctcttaatcaactccataaaactacatcagttctgtcaatgctctgggtgagacaagataggaaacagcccctcagaaagtatttgaaactacacacggcattggatgtacgccctatttttcacctgccagccccactgcccctagcatagggagaagttgtggaccagggcaacagct

SEQ ID NO: 140642 - DNA, 605 bp, Homo sapiens
aaagctagaagatgttagatatgatccaatctcagccccgtgtcagttgacctccaaagagaataaccaycccgtggtaacagagtcagcaggaaaaccaggagtagagctgagctatcccgagccttctactctgtccagtcagaatgtaagcacacaaggatttgtttttatgcctgtggcttgtaagagtgggaagctgggatttttcttctctgcagctgtatataatgcccatctggcctgaaaatatatttccaatttttagatgactccacaccatagagtactgaccacagacctgccttcacaagatgcagtgttggctggagcagccactgtggggcggaggcataatataacagcccccttgtaggactgcagatcccagggctttggacaaaaatattccgggtttttctcccaggccaagagctcagagcttcatttgaaaaatagttgatgtgcctcctcttagaaaatttttttcagcatgggagattaatgataagcatttattgaccgtttaaaatatgtcaggcactaatgctcagtattgacaaggattgtcacatttaattctcccaaaaaccctgtgaggtcag

SEQ ID NO: 140643 - DNA, 584 bp, Homo sapiens
tgagcacacaaatgttgcagaggtaagtttgacaacgtctcatgaaaatataatctcaagattgtaagtttgtgtaaagtaagtaaagttatttaatatggtagtatctttttaaaatctccatgtggggagatcataccattattacacttaaatgtcattattcttaacgttcttataaatgtatattaaaatttaagttaataatttatagtttggttaactttttatatgactttttgtactaaagtattgtagactatattgatctatccaggaattttattttaaatgagacgaaattaaagagtaaggaatcttaaattgttatggtcactccrtggatttgtactataaggatcttagagatagggaaagaagaaagttctgaattcaaaatttattcagtcttctaattattcataacttaaaattttgctgattatgattatattggtctattacaactgtgtaatgtgctgttaattctaagaatgtaaaaataaattttaattttatcttctagcttgcaaatgtccttgagattgacttatccctggttaaggtatgttatttttatactc

SEQ ID NO: 140644 - DNA, 509 bp, Homo sapiens
gaattctttatcagataattcataaaccctttttaaaaattgttttcttgtttttaaattttcttaattttactttaagttctaggatacaagtgcagaatgtgtaggtttgttacataggtataggtgtgccatggtggtttgctgcacctatcaacccgtcatctaggttttgagacccacattcattagctatgtgccctagtgctcttcctcccctcacccccacccaccgacaggccccggtgtgtgttgttcccctccctgtgtccatgtgttcttattgttcaactgccacttatgagtaagaacatgcagtgtttggtcttccatccctgtgttagtttgctgagggtgatggcttccagcttcatccacgttcctgcaaaggacatgatctcattcctttttaaggttgcatagtattccatggtgtatatgtaccacattttctttatccagtctctccctcccttctccataawtttttggataatttgagtagaatt

SEQ ID NO: 140645 - DNA, 599 bp, Homo sapiens
tctggagttttcaatcacacagcacttttatacctgcatgtttaaaacttgtccaactgcaaaagaaaattatgctttccttggaaacatacatctctatttctttaagattacagaatgtaaggaatacaattaggtacctgtgtaagcaaagttgaarggccgtgttagagggacatgatgcttaggtgccactgtgggatgtgagggatataagaacacaccatcatcacctagcatatccaccagctctttacgcaggctttcttccactgccttaaacttttggtatttctcattgctatatctgagcttttcttccaacaaagccagtcctacagaatgatatcatatatcaagttaaggtaataaacttcattttaattcctagtgttctttatcttttcttattcaagtaatacatgttcattatagaacactgagaaagtaagtgatggaaaaggaaactttataatcttacttttaactccttctagtttgttttagtaatgctatatataacatttctagcctctgctactgcatagttcatcataaggatttttcacataattgaaaacccattatagctgagcatg

SEQ ID NO: 140646 - DNA, 599 bp, Homo sapiens
tctggagttttcaatcacacagcacttttatacctgcatgtttaaaacttgtccaactgcaaaagaaaattatgctttccttggaaacatacatctctatttctttaagattacagaatgtaaggaatacaattaggtacctgtgtaagcaaagttgaaaggccgtgttagagggacatgatgcttaggtgccactgtgggatgtgagggatataagaacacaccatcatcacctagcatatccaccagctctttacgcaggctttcttccactgccttaaacttttggtatttctcattgctatatctgagcttttcttccaacaaagccagtcctacagaatgatawcatatatcaagttaaggtaataaacttcattttaattcctagtgttctttatcttttcttattcaagtaatacatgttcattatagaacactgagaaagtaagtgatggaaaaggaaactttataatcttacttttaactccttctagtttgttttagtaatgctatatataacatttctagcctctgctactgcatagttcatcataaggatttttcacataattgaaaacccattatagctgagcatg

SEQ ID NO: 140647 - DNA, 443 bp, Homo sapiens
cagaatatataacaagctcaactcaacaatgataaaacatttcattcacaactgggcaaaggacataaacagacatttttcaaataaaagatatacaaatggccaatatgtatatgaaaaacgctcagtatcactagctatcagagaaatgcaagtcaaaaccaatgtgagattatatcttactccagtcagaatgggcattattacaaatacagaaagtaacagatgttggcgaggatttggagamaaggaaatcttacacattgtgccaatataaacaagtgtagtctgtgaaaaacagtatggaggtttttcaaaggggtaataatagaactactatttcatctagcaatctctctactggatagctacccaaagggaaatcaattatattaaaagctacctgcacttgtatgtttatacagcattattcacaatagcag

SEQ ID NO: 140648 - DNA, 443 bp, Homo sapiens
cagaatatataacaagctcaactcaacaatgataaaacatttcattcacaactgggcaaaggacataaacagacatttttcaaataaaagatatacaaatggccaatatgtatatgaaaaacgctcagtatcactagctatcagagaaatgcaagtcaaaaccaatgtgagattatatcttactccagtcagaatgggcattattacaaatacagaaagtaacagatgttggcgaggatttggagacaaggaaatcttacacattgtgccaatataaacaagtgtagtctgtgaaaaacagtatggaggtttttcaaaggggtaataatagaactactatttcatctagcaatctctctactggatagctacccaaagggaaakcaattatattaaaagctacctgcacttgtatgtttatacagcattattcacaatagcag

SEQ ID NO: 140649 - DNA, 589 bp, Homo sapiens
tgtaaatgggattgcattttttatttggcttaccaagaatattattgaagtgtagaaatgctactgatttctgtacatgaattttgtgtcctgaaactttactaaagtcatttatcaattccaggagccttttgggagagtctttttgaatcatattgtcagcagagagagattgactttgtctttgtcctatttgaatgccctttatttctttctcatgcctaaatgctctggctagggcttccagtattatgttgaataggagtggtgagactggacacctttgtcttactgcaggtctcaaggggaattattctgtcttttgcccattcaatatgatgttggctgtgggtttgtcataattagctcttattattttgatgtatgctcttttgatgactattcttctaaggtttttatcatgaaggaatgtttgattttattgaagtmtctttctgaatctattgagatgattatatctttttttgttttaaattctgtgtatgtggtaaatcacttttttttatttgcttatgttgaattaacattgcatcccaggagtaaagcttactcaactgttgggaattaa

SEQ ID NO: 140650 - DNA, 593 bp, Homo sapiens
taacccaacttaaaatgcacaatggatttcaatagatatttccctaaagaaaacatactaattgcccataagtgcgtgagagaatggtcaatataattactcattagggaaatgcatattaaaatcacaaggagttatcaatgcacattcactaaaatagttataaaccaaaaggataagggttaatgagcatgtggagtaactgggaccctcatacatttctggtaagactgttgtcamattggtgcagactctttggaaaacaatttggcattttcttaaaatgttaaatgtaaatttgtcataagactcaactatttcattcatctttatatgtatatatatgctcaagaaatgaaaataaatattcatacaaagacataaacaaatgtgtaattatattgctgatttttgcagcataattagtaatagccaaaagtattagtccaactgtccagtaactggtgaatagataatcaaaatttggtatatttattcaatggaatagtctttgtccataaaagaaccatttatataaaccttgaaaacattgtgcagagtggaagaaatcagacaaaaaatgttacatatta

SEQ ID NO: 140651 - DNA, 535 bp, Homo sapiens
gagcaggaccccatctcaaaagaaaagaaaagaaatgttgcttcctacaaacaagaaactaataagtggttacctagagagctggaggacatgtaatttgcagtgtgctgtttctaatttttaaattatatggatgtttctcctattaacaataaaattaagttttctgaaaaaagaatgtatcgttatttgcatcagaagaacaatacctttgcatgaaaagtagattccaagtaaaagctgcttttttatcttattactttcttccaaaaacagagtacctrctgattcataatggactgcttttagacctaagaataaaaagtcaagccacatatcagccacatatctctaattccatatcaatctaagccaaattttctggagtcctttgaactttcctacattcaaaacattttttaattggattctagcagttgtttttttttaagctatgggaatgtcattttcctggacgttggagatgattataatctaggttttgaggatagatattaaagttctcatgatactt

SEQ ID NO: 140652 - DNA, 541 bp, Homo sapiens
ttgggatggaattaatacacccattagcttaacaaacaagaaacaaaccaaaaagagagagagatcccacatatgttggggaaatgaggttcataagagactttagctgtgctgtttagcctactaaaaattcatcttgtaggagcacttagctctatgtttatatctattcgcrtaaagcagatatgaattttaaatgattattacatgaatgcaagaaaatcagtatctgttctaggtatgttattctggtcctgcttatatctaaatatgttaataaacttataatatttagcagtaaatttgcctgtgcatattaaagcctggttaacataatgcttatttttctctcatgacaagaaattcagaggtgggaaagccagggctgctgcagctgctttcggctgcatttcttcttttggtcctccgcaccagcgagcatgtggcttgcatcctcgtgcctacagcatggctgctgtgcctacaggcctcacacagaagtcccgctcaccaaggaagcatttttaatcctttttaaaaa

SEQ ID NO: 140653 - DNA, 581 bp, Homo sapiens
actttgtttgttttatgtacttgacagtggcttaaaattatggaatttgctacccaagatgatatgaaggaccggcaaagaaaatgtgttggaaggtgtataaaaacctaagttgggaaataatctagccaattcctatatgtagcatacatcagctgttaaatataatgatatatgtacttggaattaaacaaaaatatatattacatgtaattaatgggtcacatctctttattattgactgaattattgattctgcaagattttgccaccctaaaactgaggcaatatgattcctacttgtaagcccagccmtccttttagcttcaagataaatcctgattttaagcagagattttaaaaatgtaacaattttgtcacctactctatttcatagctaagacttgtcaccttatgagactgagtctctgattttgtattgttattttgtagtgagattatcagaatcctttattcatatcaaaaccatgccctcttttctttatctattcaaggccttgcatttgtgattattttaggaagaaatacttgcttcaattaaactcaactaaaatatcacc

SEQ ID NO: 140654 - DNA, 559 bp, Homo sapiens
tcaaatgtgttgttctaagagggcatggtttttaatatgaaaaagagattctagtcatctcactttatctacttctttatcagctgagtagataaagaagtagataaaaacacatcatcatattaatatattattctactgtattgacttacaaacgaggaacaaattcaaaatcaagcacgcaagtcgatctaataatatgctaagtaaaattctgctttttcaactggtatattgactggaaagtatttgaaaaaattgtttaaattttatttgtctcctataaattagatatttatttttatttatttattttaacagttttttgggaaaaggtggtttttggttacatagactaagttctttagtggtaattactaagattttggtgcacacatcacccaagaagtgtacactgtattgaatacttattattttatcctttgcccccctccccyagattctccctgcatctccaaagtccattattcttatacctttgcattctcattgcttagctcccacttataagtgagaacataagatgtttggttttcca

SEQ ID NO: 140655 - DNA, 532 bp, Homo sapiens
agcatctgttgagtttttaatccaagagctattatcagtattttctaaaatgcaacctcttcttgcatgtctctgaagatatgaattacacttactgtaattacatttgtttcttgtcttaattctgattctctgaaattacttattctgtttgctaagttttgtattttgtatcttctttcttgtttttcttaaaagttgggtgacaatattttacatgggtagtttttctgttaatcatagcttatctccaatgattaggaaaataacaactatgaagtaggacaaagtaacctggkttcttgtgttttagcattgctgctccctgttccttcttggttttgttaattacctgagactctgccctgttgatgttagtcagattctaagactcaccttgccaagcaagcactgctttgttattccaaagtgaagttcattcttactttgtctggaaagcagtctctgcatcttttacctcattatttccctcctttcatattatgtttcttcctttaccaattttaatgca

SEQ ID NO: 140656 - DNA, 475 bp, Homo sapiens
gcttattcaaacttctcttctcttcttcagaggcaaacctgtataatttctttggtttgtttgtttgttttaagacgtagtcttactctgttacccaggctagagtgcagtggtacaatgtgagstcactgcaacctccgcctcccgggttcaagcgattctccggcttcagcatcccaaataactcggattaaacccttataatttctatcatgattgattttgttcatcttcaaattccaataattagaattcctacaggatgtgtgtgtgagtgtgtatctggtttattttctttagcataaataaatatttgagatttagccaaatatttgtgtgtatcatttatttttcctcatatttctgagttgcctatgtatttgtcagagtttgcttattcattagtctgttagtgaatattcagattgctttcagaattagcttttacaaataaaggacttaggtgcattctcaa

SEQ ID NO: 140657 - DNA, 382 bp, Homo sapiens
tgtgtgtgcacgtgtgcatgtctgtgtgcccacttctgtctctctcttacgtctctctctctctcccttctcgctctttccgtcgacctctctttctctctctgtccgtctgtgtgtgcgtgtgccttgggacacatgtgccctgtgcgccagagggtgggcttcttgcacgtcggcctttcttctggtcagcctctccccgcgtctctgcctgggtcgtgtggccggttggcagtcgttttccyggcgattctggtttgggggtctgtgaaggcctgggcaatgtgggcatctgcgtcggagccgcaggggttttcatcccctccccatccgaaacagcctctttgctaggctagatccagacgactgctccccaacccag

SEQ ID NO: 140658 - DNA, 493 bp, Homo sapiens
ttatttttttgtctggaccctctcctagcattctctagttgccttggaaatgatggccgtgactatctgaagactgaagtgattgcaccaagaagtcataataggcagatttccctcaatcagtgcaccgccttccatgtaaccttgtctttgaacatgtatgccttttttgagatggactaaactggtrtggtgtttagggtaacattgagatgatgaattcttcttgatcaaagaagtggaaatgtcaaaagcctattatcaaaaataccaggggttctgtctaggttctgctgcttactgcacagaaagccaatcactgagacaattagtatttccaaggaagaaggctttcattggatgctgcagcagaggagaacgagagataaagtctcaaatctgtctccctgaccaactaaaattgtggtgtttatatagcaaggaaggcaggaaaacaggaattaaggagaagtatggaagcaatcatgataga

SEQ ID NO: 140659 - DNA, 547 bp, Homo sapiens
tagaaattttttccatataaacaggaaytgaacataaaaaactgtaaggaaacagagagtgctgactacacaggacaattaccattgccattattataaattttattatattttgccacaaacccaaacaatagtctctgtgattatgaggaatactccattttttttcttgtttagcttcaagccacctggaatgacagaggtctgtgcatcccatacagcttgaaaatttttcaaattattccagggagaaatgaaaaatgacatttttcagtgcatgaaagagaggttgttcctcacagaggaaagactattcctctcttgatggaatggtgaagtacaagaaagaatgcagaaaaatactttcctttaagccatacaactcattttcttcctttcttttcacatttgttttcctgccaggccactgccagctttatgtctaggtaaaaaattcagaccaaccaaataatatgatatgaaggttgcagatcacttatttgacctaaaacagtactgtaaatttaaccattactgccatattttc

SEQ ID NO: 140660 - DNA, 618 bp, Homo sapiens
aaagtgggggagaagggaggcatgtctgacctgttatcccttcatagtcagaaacttggttttcaaggtttctctggggtctctctggccaaaagagggtctgttcagtgggtttgggggcttagaattttatttttctttcttaatagtacattttaaaaatgattaatatgaactgtaatggccagggaaagctaagtgaaacaggcaagttttaagatgaattagagtcacaattttttattttgctttgcagtttaatatcaggcttttggtgaagtcacaggtcttcctcctcagcttaatttaacttgctcactttgtcttctttcttggtctttaaatcttttaaaaattccagatgcacattacatcccatgtgttttattaatttagctaagatgatcctatttgctcttttacttatttctcatatttttttccctcggatattattgaatattcctaatttttcrcctcctgaatctgaggaggaaattcaaggttgcaccatctatcacatttccccttagaaattcctccaggactcctggtttatgcgagcatcatctacctctggcagccattttgcacttcatgcttcccttattaatgtgc

SEQ ID NO: 140661 - DNA, 642 bp, Homo sapiens
tgagctctcccagggctccttcctccattttgcagagggatgtactcaaaatagactgagcctgagcccaaagcctttgttcaagtttgacacataagtaattactttagatgagttataattttctatctttaggctcactgcctctgtagatctgaagcccacccctccacttcattccccgtactcacacctcacctgtcccttctcctattgctgtttctagttagacctgtactccatgcttttgtttttgtttttgtttttttctgtttgatttgttttccaagccaggctgctgcaaccagtttattaagaagcttcarttcggtggagagtaaatacaaaatgttatttttctcctgtcactgacttcaactatattctgtccagtgccctgtcacttactaacacctcaggcagatctcacggctttttgttcaaacttttgatcactttcaaatattaaaagttcatacctattaaaagttccaaactctgatttgatttaaaattcatgtctttcccttcccctagaggcagtcaggttgtgactcaaggaaactggagcagaggtggaggatcggtgcctgtccttttactcttcctcccgctccaggtctcctctggggagttggagcc

SEQ ID NO: 140662 - DNA, 582 bp, Homo sapiens
atggagtggaatggggagaataacaaaaatggtgttagttatgcattaattttattatttgttaaccatctcttatgttaactaggcattgttctaagctgggtaattataatgatgaagaaaacaaagtccttaattcatgggtcttgtattctgttaggtaaaatatagtactgaaagcttcagatagttttatatcagtattcaacatctgggtaataaatttaaaagtctatctrattttttcagaagaggaggaagtgattgtggtgactgatatagtagtattcttggttttcacatcgatgaaatggaagtctcatttcctatcatttcttcaatacccagaatagtttctaacacagtgagtattcactgaatatcagataaatgaaagactcatggaaaaatacctctttagtagtctatacaactaagaagggaaggattttacatagttaaataagcatttttgcactagagagacacatttcgaaatacctcttcccatgtcagttcctttaagctgaaataatcgagtccaactataattagtagacttgtaatggccctgggataagc

SEQ ID NO: 140663 - DNA, 582 bp, Homo sapiens
atggagtggaatggggagaataacaaaaatggtgttagttatgcattaattttattatttgttaaccatctcttatgttaactaggcattgttctaagctgggtaattataatgatgaagaaaacaaagtccttaattcatgggtcttgtattctgttaggtaaaatatagtactgaaagcttcagatagttttatatcagtattcaacatctgggtaataaatttaaaagtctatctgrttttttcagaagaggaggaagtgattgtggtgactgatatagtagtattcttggttttcacatcgatgaaatggaagtctcatttcctatcatttcttcaatacccagaatagtttctaacacagtgagtattcactgaatatcagataaatgaaagactcatggaaaaatacctctttagtagtctatacaactaagaagggaaggattttacatagttaaataagcatttttgcactagagagacacatttcgaaatacctcttcccatgtcagttcctttaagctgaaataatcgagtccaactataattagtagacttgtaatggccctgggataagc

SEQ ID NO: 140664 - DNA, 233 bp, Homo sapiens
caatgaattttattaggtgtcattttaaagcccaatgttagggattattttgccaccctaatatataaygtggttttgattaacttggacctgggaggattcctgactgactggggttgagctttactttcagtagttcaggagaacacttaggcatggataacctttgaattctttttttttttttttgtattcttgaatggtggaacagtccttttaaattatagtgagtt

SEQ ID NO: 140665 - DNA, 533 bp, Homo sapiens
agatctcctgcagggggacctaagagacctatctgtgactgtggggtctgtgcctactagcctcgtttatttggggtgacatcgactggaaggagagcaggttaggggtgcaacaaggtagagcttttaaggagcgcaaatctatctgcttggccagggactccagtcaggtagtcgcctggctgagtggcagaaagttgagaggataactggctcaygttaaacaaagtttatgggaagccattgttttagactgagctcctgcactaggccccagcagaccaggccaaagcagagtggagccacttgtgttcagtatcacataatcaaactgaacttggaaatgggtcactcttccaaacaacaggagcttcacagcaaccaatcggaaggggcccagtttacctgagcatgcatcataaggaagtccacttagctttaaccctgttaggagggtaactctgaaatgtccaatctgctttgtgttctctgtttctgccttcttcagccctttcctgcccataaagccaact

SEQ ID NO: 140666 - DNA, 560 bp, Homo sapiens
gtgttggcagaattagtcccctgctcttggttatacytgtccactttaaacagtagcttgtagttatttagcccttaattgcattcaggtaaaaccaatatagcaccctataattcagcaaatatttgttttcctggcagtattacagtttcagggggcagttctaaggtgattacagtttccactgcttggagctttctgtatatttatccttggattagactcaaagtaagctgattttatcaagccaccgggtaattctgaccatttcatctggcgattttagtacggtattgttgcagctgacctgtatacgtaaggaattactgggtcatcagctctggggaatgtcttttgattatgaacacattttcagcatgtgtccactgaaggtaaggggcaaagaattgcacgatctacttgaatgcctgtttaaatagataaaagtgggattttgggcacggcctggttatatcttcttaaacgtaggtagtagagccgcaactcagcgtagcaacaagagatcttttgaacaactgaacattcagatgaagcaacta

SEQ ID NO: 140667 - DNA, 617 bp, Homo sapiens
caatttctggtagccccccctctaatcttttattatgcaagtaggttttctgcctgacctgtgccatgttgtccatccctctgctgtacacatgataacacaaacagggaagatggagcctccgtgttggacatgcctggcccctaggtagcccttttctattggcacagctgccggcgttcccctgtacaagcttccagcttgcttatctatgtttgcagctcgatttttcaggctgctttttattagaaaaaaaatgatttcttgggccrctttttgttgaaagggaagctctgccaaggactcttttacactatctgcctaaataatttctttctacctcctgtatcacattcactttatcagtggttcaggagagatgatgtttcagccagtcagtcctgggctgccacacctgggctgggatgggctgaggctgtgcttatgagctcaatcagaaatttaaccaattttaaatgacagtcttcccagagagcatcaggcataatgatggtggtgagagagaaagataatgcttggctcaaggagtatagtgtacatttcaaaagggcctttagtcttggcagtttctggtatatctgtcacagagtaaagag

SEQ ID NO: 140668 - DNA, 593 bp, Homo sapiens
gagtgtggccctggaaacaccttgattttggacttctggccaggagaactgtgagagaatccatttctattgttttaaaccattcagattgtggtcattcattatggaaaatacaggaaatgaatacactgatgcttgaagattgcactaactacttcttaaaagtctccttaacgaagcttttttgagactgatttggttcacctctgctgtataaacatgggtgggaaagggtaggaaaaatggctcgccacagacatcttgaaatttctttttatcttttagttattctcactgaactgtgcrtgcctatacaggcaggtaaactcagcagttgtatggtgcttactagtagatgttaaatattactcttcatttaaaaaagtcgtaaagtttttaaaatatccctcaaaaccttaggagactgaattcataagaaagataaacagcgaattcttgttaagtggctggtaaaaaaacaagcataatatggttcactcccaccaatggatgccttacagatggacgacatgagtcatgccgctggccttgactcccttctcaccagcaaagaccttacaacaatctgactg

SEQ ID NO: 140669 - DNA, 396 bp, Homo sapiens
gcagagctctgcttcttttctgcatagtacagacgttatttatttctaacttttgcctctgggccctcaatatgtagtccaaatataccacagaaacacgagacctctaaggcagccaggcacaaaatgtcgaattgaagggaaaaaagcaaggttaaaaaacagaaatcataaattatcttcttgaaaaaatacatgcatagcaccaatcattcttcaattcctccatagcaatttgacctgatactcatttttaaaacacagctctcattctgggtatcctctcagctttmtgggataggttcctgaaacaaaagccaaacaaaagccgaacattctaatgaaacatggccacaaacactggtgcaagaagtctccaaatcactcaaaagaatg

SEQ ID NO: 140670 - DNA, 420 bp, Homo sapiens
ttttagttctttaaggaatctccacactgttttccatagggttttactagtttacactcccaccagcagtgtataagtgtgttattctacartgaaaatagtttctaaaaattaaaaattctaatcttgaagtacgaagttaaatccttctaaggatattgtttgcagttggtgcagaagtcacagttcctttatttatttatttatttacttaattaatttttgagacagagtcttgctctgttgcccaggctggagtgcagtggcacaatcgcatgatcttggcccactacaaccactgcctcctgggttcaatcgattcttatgcctcagcctcctgagtagctgcgattataggcacacgccaccaaacctggctaatttttttttttttttgtatttttaatagagacagggttt

SEQ ID NO: 140671 - DNA, 532 bp, Homo sapiens
ttttactagtttacactcccaccagcagtgtataagtgtgttattctacagtgaaaatagtttctaaaaattaaaaattctaatcttgaagtacgaagttaaatccttctaaggatattgtttgcagttggtgcagaagtcacagttcctttatttatttatttatttacttaattaatttttgagacagagtcttgctctgttgcccaggctggagtgcagtggcacaatcgcatgatcttggcccactacaaccactgcctcctgggttcaatcgattcttatgcctcagcctcctgagtagctgsgattataggcacacgccaccaaacctggctaatttttttttttttttgtatttttaatagagacagggtttcgcctagacatgttgcccaggctggtttcaaactcctggcctcaagcaatccacctgcctcggactcccaaagtgctgggattacaggcatgagccactgtgcccagcccccagaagtcacagttctgttgcggactataagtgagggccaga

SEQ ID NO: 140672 - DNA, 396 bp, Homo sapiens
atattattaaaattaattttacccatttgttttrcatcttttaatgtggctattaaacaaataaaattacatgcatggccgggcacactggctcacgcctgtaatccccgcacttcgggaggccaaggcgggtggatcacctgaggtcaggagtttgaggccagcctggccaacacggtgaaaccctgtctctaccaaaaatacaaaaatgtgttggcacacacctgtaatcccagctacttgggaggctgatgcaggagaagcacttgaacccagggggcagaggttgcagtgagcccagattgtgccaccgcactccagcctgggcaacagagccagactgtcttaaaaaaaaaaaaattacatgtatggctcacagtatatttcattggacag

SEQ ID NO: 140673 - DNA, 557 bp, Homo sapiens
gagcccaggagttcaagactagcctgggctatgtagcgagccactatctctacaaaaaawttttttttaattagctaggcatggtgccacgcgcctgtagtcccagttacttgggaggctgaggcaggaggactgctcaagcctgggaatttaaggctgcagtgagctcttgtcaggaagtaaagtttttaaacagtttgaagtccatttcacctcatatcccaacagaaacatataacatttaataaggattgtagtggtggttctcaaaatgtggtggctccagaccagaaaccttagcattgtttgggaacttgctagcagtttctactttagattttactaaatctgagactctgggatgggattcagcctacactctagcctaggtgacaggatgagactgtctcaaaagaaaaaaaatactcaatgtcattgggcaggggatgtgcttgctatttatcacaggtcttgtaattgcctcatcccagtggtcatttgtgtttagaatccctctataaagtgtggcagaaatgtttatgggttggaattttcaa

SEQ ID NO: 140674 - DNA, 598 bp, Homo sapiens
taatttttggtgagtaatacataaatatatatgcatgtgaacacagatctcacacatgctttttaaagtatcattttcaactgctacaaagcacttcttgaggtctgagtagtggggtcctgtcagactcttgaactgtaatagaattgcctttttatttctgagctcagcccttccacttgccaagtgaatcaatagtatgaatcatttatactgccctatctctctggaggcatttcacaaatttacagatgtgtacaatcttggagattaaagagacttcagtgatgtgccatgatatctccttcactttagagatgatgggtaaataatagatctaaagcaaattaacaagttcttccagcactgcaactaggactaaggtgttcctaccagcatacggatcytactgtaagttcacccttgaatctgttttagtacaatgagaaatctcagacaagaaactgagcatcagccttcactaatgcatgcagctttatgtaggaaaagaaaagttagctcaaatgtaatgttatgtttctgggcttctgaggttttcatttctgtatttctgagggaatgattactcagataaaat

SEQ ID NO: 140675 - DNA, 580 bp, Homo sapiens
ttctgcagggttaagagctaaggtggcggaatgggaaattttggagatggtggagatggaggagctggtggtgtkgttggagctggccccagataatggggaatgaaagggccaggatgctcaatggctgcctcaaatggttcccccaggagttgcttttctaattttggggaattctctctgtgcctgtctgatatgattgctaaaagagccgggctgattttgcaatgcttgcaaaggtctagcaaaaaggcaatgcccttatgtagaagaaaacaagccactttttctttaaaatctcagggtgaaaggagttccagtgcttcagaatgcaccccaggggagtgcatgctgaagatgatacccatctagaaagagaagtgagaaaaaggcatctgtttagtctccttccttttggtgtgacccagagtggaaaggaagacagtggaggcgttccccctgctgttttttgtgttttgttttttttttgtttttttcctaaatggttcctgggtcctggcatcaccaaccgtggctgcaggcatgaccctcagccatagaaccagaggaactaagccat

SEQ ID NO: 140676 - DNA, 555 bp, Homo sapiens
atacttttagaaacatctaacacactgggaatcagtatgatctcttgtttttagcttcctttactctaacagggcaccatctgtccaaagacatttagscctttcaacagtatacatgatataacaaatagtgatgatttaccttgctgggcaaatctgccacccatttcttctaggtagagtgtcagattttaaaattaaaatgtttatacgaagagtataatggggaatacattccccttaacttctcaaattcacaactcacttaacagattattggggatatgctgatttttcttgtacactaacctagagaggaacaagagaggttggaataaagccaagcaggagcagagcaattgatccaggttcagccagtcacaagcatgaaaggtcctcaagtgaatacacatggaggaagaaagatgcacatggagaaaggctgagattccagaggtcagcgtatttgggattgaatgcaagtccttggctagaaagggtgagtatgtatgcaagaagttaggatagaggcagagtttaggaataaatttggga

SEQ ID NO: 140677 - DNA, 555 bp, Homo sapiens
atacttttagaaacatctaacacactgggaatcagtatgatctcttgtttttagcttcctttactctaacagggcaccatctgtccaaagacatttaggcctttcaacagtatacatgatataacaaatagtgatgatttaccttgctgggcaaatctgccacccatttcttctaggtagagtgtcagattttaaaattaaaatgtttatacgaagagtataatggggaatacattccccttaacttctcaaattcacaactcacttaacagattattggggatatgctgatttttcttgtacactaacctagagaggaacaagagaggttggaataaagccaagcaggagcagagcaattgatccargttcagccagtcacaagcatgaaaggtcctcaagtgaatacacatggaggaagaaagatgcacatggagaaaggctgagattccagaggtcagcgtatttgggattgaatgcaagtccttggctagaaagggtgagtatgtatgcaagaagttaggatagaggcagagtttaggaataaatttggga

SEQ ID NO: 140678 - DNA, 429 bp, Homo sapiens
gcattgttttttgttgttaaaaagtaattttatgttaaataactgacataattaagaaaaatgttttttgcaatatttatatatatgtatgtattttgcctttatagaatagaacacttttcatacttgttatttccagtactttttttaagtaatcagaacatagatctagaaatamgctgacttgggttctttcatttagagaaatggtaatagtcttataaaccttgaacttgtccataacagattttttaatatgattcaaactcatcagagaagatgccttattattcacaccaagctgaactgctaattttcagagacaaatgcacctgtggaaaaagaaatcctatctttaaattgtattatccactgagaagaccacatactgttttgtccttgttgttaatacagaaatcagagggtgta

SEQ ID NO: 140679 - DNA, 585 bp, Homo sapiens
ggtagttactcagtcctcaagacattttaaggtctgatatcaaatggccacagatatttttctcttctgttgcttccttgtttatttctccctcacccttttctaattctaactttctaaaaactaattcttccagagattaaactgtaggtatttcaagstataaagagggtagccgtattactgaataatattgactgaaaacctccctatgctaaataatgacagaaaggtggaaaataaaccacatgcacacacacacatgcacacaaacacatgcaaagaagacttaaaaacaaagaacaagattagggtgtatgttgtaaagctttagaaaaaggtcttatgccagacacaacataatacaaatgttgaaataaacagacaggggactaagaattctgcaatcagtcaggtttttgtcgtggtaaaatataccccttggatagcacaaagtctagtctgaaatgttgagggcagcatagcagagctctttgctttctacagaagctctttgtgagtttcagtaatgaaaatcagcagccctgacctgtgttgaccacatctgtagattcttcccccatt

SEQ ID NO: 140680 - DNA, 585 bp, Homo sapiens
gatatcaaatggccacagatatttttctcttctgttgcttccttgtttatttctccctcacccttttctaattctaactttctaaaaactaattcttccagagattaaactgtaggtatttcaaggtataaagagggtagccgtattactgaataatattgactgaaaacctccctatgctaaataatgacagaaaggtggaaaataaaccacatgcacacacacacatgcacacaaacacatgcaaagaagacttaaaaacaaagaacaagattagggtgtatgttgtaaagctttagaaaaaggtcttatgccagacacaacataatacaaatgttgaaataaacagacaggggaytaagaattctgcaatcagtcaggtttttgtcgtggtaaaatataccccttggatagcacaaagtctagtctgaaatgttgagggcagcatagcagagctctttgctttctacagaagctctttgtgagtttcagtaatgaaaatcagcagccctgacctgtgttgaccacatctgtagattcttcccccattggcgatttaccataggtaagccttctccctgcaat

SEQ ID NO: 140681 - DNA, 406 bp, Homo sapiens
ggttttgatgggtaatctaaaatatctttgctgaaatactggcttatagaaatcagtgccattgcttttacgatcttttctagtgtgagaacagtcttgcatggtgatgctaattctctccctgttatctgttatcaggagaatggctcttgatgtaatatgtcctttttatggcactggcctgaatttaatrttcaatgtaaattttaatcttttaaatgtctgcaaaataaactcttttttatgaaagtgacaccaataagagagtgaagatgatttttaatggcaaaggaaaataataaatatgtgtttattttaaaacttagagcattgaaaaatgtgattatatggcacattataaatagaccaaaagtcaaaagaagatgtaaaataaacttctaataag

SEQ ID NO: 140682 - DNA, 501 bp, Homo sapiens
taactcttttactttctattttttaggagtatttgttacaggttttcatatctttagtataaattatctttctttatgcaggatacctttctgaaaagggtccgtttaaaatttctaggcaatgtatttttcttttagcatgttaaattagagttttttaaaaagtktatgtattgaagaaaatacactgtcaaataggagatattcatatatgcattccaatagcaatcagttgaacttttgaataagtactgtagaaaaatatttttctgaatggtgcttttacaaattaaattcatataaatgattcagattttttaccttcaaccttgtcaggatttaaagtattctctttttctgtttccttttggtttcatcttaggtagtagtctttataaaggcatttacatttttcaaaaactttcttgccttagagatggcgtgatttgtcattaaattaattggaactactatatgttgaacttgatcgtaaacatgtgt

SEQ ID NO: 140683 - DNA, 481 bp, Homo sapiens
gctgtgatgtttaatttaactatggaacacagagctcctggggagagcactgacaggcaacccaccaagcttttgtaagtcatgtgctgccaaaattcccctgccctgatgaagagggatctggatccaactcaaaataatatggtaggagccttagtcacatattcagacctgagtataaaggataaaaacaaataaatttgagcctatattttcagaagtctctgtaagctaggtgataagttatgactgttatgatactacagctgctactactcataggggattagttgccaagaaaagaacaaacaaacaaacaaacaaaaaactcaggcaatctccctatctgatgaaacaattmatttcactgcaaaaggaatgaggtcccagttttctcaccattcccaccacagtcatgagaattcatatcacaaaggtggtggtctacagattctcttacatgctttgaatcaatggggca

SEQ ID NO: 140684 - DNA, 569 bp, Homo sapiens
gtaataggcttaattaaatcatatttgcattcaatatcatctgccaaggaatatgtcagttgttaactcagaatgaaactgatttttcataattcttactagggatatttcctcacttttcagttttaagttagtatttttttttttttttttgagatggagtttcactcttcttacccaggctggagtgcagtggcacaatctyggctcactgcaaccctctgcctcccgggttcaagcaattctgctgccccagcctcccgattagctgggattacaggcgtggcccaccacgcccggctaaatttttttttttttttttcattagagacgaggtttctccatgttggccaggctgctcaaactcccaaccacaggtgatctgcccgcctcagccttccaaagtgctgggattacaggcgtgagccaccgtgcctggctttgctagtatttttaatacaaaggatactttttgtttattcttattatttctggcttcatattttatgaaagtaaatcaagataactataaacaatagtcatttaaatagaatactttaaaaatacat

SEQ ID NO: 140685 - DNA, 582 bp, Homo sapiens
gaaagggcagggtccagttttagtctaacttacatggctagacagttatcccagcaccatttattgaatagtgagtcttttccctactgcttatttttgttgactttgtcaaagaacagatggttgtaggtgcacagctttatgtctgggctttctagtctcttttgtaggtatatgtgtctgtttttatatcagtaccatgctgttttggttgctgtaggcttgtagtttgaaatcaggtagtgtgataccttcagctttgttttcttttgtttgtttgtttgtttgtttttgcgctgtttgttttttttttttttttttgctaatgatggctatattattttcccacatttgtattgttttaccactttctttggattgagtttcagactcctcttgtatctcgatgagttttcttgccatccagattctgaattctatgtctgttgttccrgccatttcagtctggtttaggatcattgctggggagctaatgtggtcatctagaggtaagaagacactctggcttttagagttgccagaattcttgtactagttctttttcatctgtatgggctgata

SEQ ID NO: 140686 - DNA, 532 bp, Homo sapiens
tctgtcagccatcttggctatttccttgtatattttcttatagctactattttagttgcatctccaagttttaatatgttgcattttcattttaatttattttaaagtattttaaaattatcttttgagttttttatttgacttctggattttcataaatatgttattttccgaatatatttgggaaattttcagagaactttgttactgatttctaaattaattatattgtggtctaaggatatactttgtatgatttttacaaatatactgaggtttgtyttatggtatataatacagtattgataaatgttccacatacaatcaaaaagaatgtatattctgctcttttttgaggtgattgttttataaatatcaatgagattaaattcaagccttctataaccttactgtttttctatttttctatcaattcttgaaaaatgatgttgaaatttgactacacttgcatattttttccgtttctctctgcagttttattagtatttacttcttcgcgtagtaatttttt

SEQ ID NO: 140687 - DNA, 532 bp, Homo sapiens
tctgtcagccatcttggctatttccttgtatattttcttatagctactattttagttgcatctccaagttttaatatgttgcattttcattttaatttattttaaagtattttaaaattatcttttgagttttttatttgacttctggattttcataaatatgttattttccgaatatatttgggaaattttcagagaactttgttactgatttctaaattaattatattgtggtctaaggatatactttgtatgatttttacaaatatactgaggtttgtcttatggtatataatacagtattgataaatgttccacatacaatcaaaaagaatgtatattctgctcttttttgaggtgattgttttataaatatcaatgagattaaattcaagccttctataaccttactgtttttctatttttctatcaattcttgaaaaatgatgttgaartttgactacacttgcatattttttccgtttctctctgcagttttattagtatttacttcttcgcgtagtaatttttt

SEQ ID NO: 140688 - DNA, 549 bp, Homo sapiens
ctgaacaagggacatttttatgattgataacctaaagctcatgaaaactaaaagaattgccagtttagttactaacctgtaacaatatcccagatcaaacttttattatctagctttatgttaatattaaaacccatttctataaaataatgtttttctcttttatatctatgtcaccttgactgttttctttgtgtagtcctttgtcttacagtattatttctcttctatttctttcactttatttcattctgtaacccacttttatgagattgtatctcaaaaactccgtaattcctcattttcattaaattgtatatttacttttaatgctgaaaatatttttatattactaargttctaacatttctttaacctgcatagattttattttctgttgtggtttatattttatttaacaactaaaaatatggtagctaaatctcatgaaatatgtagtgggcatcttttctagacatcaattaaccataattcaaataatttattcttataatagaagaaataaaatctttagctgagatttagtat

SEQ ID NO: 140689 - DNA, 531 bp, Homo sapiens
tagatgcccaggcagaagcctgctacaggagtagagccctcacagagaacctctactagggttatgcaaaagggaaatgtgggattgaaggtcctacacagagtcctcactaaggcactacctagttggacctgtgggaagggcactactgttctctagaccccagcatgttagatctactggcagcttgcactctgcacctggaaaagctgcagctactcaactcctacccctgagagcaacctcaggggccataccctgcagagacatgggggcagagctattcaaggccttgggagcccaccacttgtaccagtgtgctccagatttgggacacagagtcaaaggaagttaattttgagttttaagacttaagccttgctgggcttcagatttgcttgaggcctatagcctctttcttttggtcaatttatcccttttggaatgggaatgtttttccattgcctgtttccccattgtatcttggaagtaaatagtackttttgattttataggctcataggtgggagg

SEQ ID NO: 140690 - DNA, 601 bp, Homo sapiens
ttctaaggaaccagaaggtccttaagctttaatggatagagtttaacaaaggttcaaagctttaatggatagagtttaacaaaggttctctttgaagaggtgtgggcagggaactggaaccaatgtgggaggatgagatacctaggatgcattaggaagccatggccaccctcaaccctgaaggggaaggcaagtgatcttactggaacccagtgcaaaccaaacagaatccttgaaagaggaaccttctgagaaaagccgaggatacaaagcaacctagaggaatctaggagaatgcaaccattgcccaaacctttggcctagcggagggcaggaaggtcagggaataagtactccagcttctctctcttccttctccttcatcttctactaatgcttctgattggccaaacccaagtaaagtcaaggaggttgagagtgaagcagtccatggacgtctgcctcccaagmctcagagtggggaagagatgatggagagtaggtctggagaggcaaacggagtattagcacaggaaattaatcaatacttggtgactggaatttttctttcttccccgcttctttataccaactttataca

SEQ ID NO: 140691 - DNA, 601 bp, Homo sapiens
ttctaaggaaccagaaggtccttaagctttaatggatagagtttaacaaaggttcaaagctttaatggatagagtttaacaaaggttctctttgaagaggtgtgggcagggaactggaaccaatgtgggaggatgagatacctaggatgcattaggaagccatggccaccctcaaccctgaaggggaaggcaagtgatcttactggaacccagtgcaaaccaaacagaatccttgaaagaggaaccttctgagaaaagccgaggatacaaagcaacctagaggaatctaggagaatgcaaccattgcccaaacctttggcctagcggagggcaggaaggtcagggaataagtactccagcttctctctcttccttctccttcatcttctactaatgcttctgattggccaaacccaagtaaagtcaaggaggttgagagtgaagcagtccatggacgtctgcctcccaagactcagagtggggaagagatgatggagagtaggtctggagaggcaaacrgagtattagcacaggaaattaatcaatacttggtgactggaatttttctttcttccccgcttctttataccaactttataca

SEQ ID NO: 140692 - DNA, 586 bp, Homo sapiens
tttcattggctaaaaattagtcatatggccaaactttgctgtgctaacagaatgaaaccagggttctaagtaaaaaggaaacagtagattttgggtggggaactagcagcctctaacagaattattcagcttagaaacttgccattttcattatatcctccttcyttccctgaaccagtgtcctgtcttatctctctgacttgatatctcctgatagatttctctacatctgcctgcctgctgaccactcacctgggcctccaaacacagtctgcttcaaatgtttctattgctatgtttatcgacataattgttcaattgcttgatttctccttattgaccttccaggctgttgacaccaggctcagattactttgtctattaattcctggtaaacagtactttctagtactgccaaagatgcttacagttcccctggggagggggagataagcatattacacaagaggtaagtgtggaaaaggggccaggacaattagtcattagttcatctggttgaaacacatctactcctgggcaagagctccttaccctgcttgaactgcagcatcttcctctcttctcc

SEQ ID NO: 140693 - DNA, 586 bp, Homo sapiens
tttcattggctaaaaattagtcatatggccaaactttgctgtgctaacagaatgaaaccagggttctaagtaaaaaggaaacagtagattttgggtggggaactagcagcctctaacagaattattcagcttagaaacttgccattttcattatatcctccttccttccctgaaccagtgtcctgtcttatctctctgacttgawatctcctgatagatttctctacatctgcctgcctgctgaccactcacctgggcctccaaacacagtctgcttcaaatgtttctattgctatgtttatcgacataattgttcaattgcttgatttctccttattgaccttccaggctgttgacaccaggctcagattactttgtctattaattcctggtaaacagtactttctagtactgccaaagatgcttacagttcccctggggagggggagataagcatattacacaagaggtaagtgtggaaaaggggccaggacaattagtcattagttcatctggttgaaacacatctactcctgggcaagagctccttaccctgcttgaactgcagcatcttcctctcttctcc

SEQ ID NO: 140694 - DNA, 586 bp, Homo sapiens
tttcattggctaaaaattagtcatatggccaaactttgctgtgctaacagaatgaaaccagggttctaagtaaaaaggaaacagtagattttgggtggggaactagcagcctctaacagaattattcagcttagaaacttgccattttcattatatcctccttccttccctgaaccagtgtcctgtcttatctctctgacttgatatctcctgatagatttctctacatcygcctgcctgctgaccactcacctgggcctccaaacacagtctgcttcaaatgtttctattgctatgtttatcgacataattgttcaattgcttgatttctccttattgaccttccaggctgttgacaccaggctcagattactttgtctattaattcctggtaaacagtactttctagtactgccaaagatgcttacagttcccctggggagggggagataagcatattacacaagaggtaagtgtggaaaaggggccaggacaattagtcattagttcatctggttgaaacacatctactcctgggcaagagctccttaccctgcttgaactgcagcatcttcctctcttctcc

SEQ ID NO: 140695 - DNA, 586 bp, Homo sapiens
tttcattggctaaaaattagtcatatggccaaactttgctgtgctaacagaatgaaaccagggttctaagtaaaaaggaaacagtagattttgggtggggaactagcagcctctaacagaattattcagcttagaaacttgccattttcattatatcctccttccttccctgaaccagtgtcctgtcttatctctctgacttgatatctcctgatagatttctctacatctgcctgyctgctgaccactcacctgggcctccaaacacagtctgcttcaaatgtttctattgctatgtttatcgacataattgttcaattgcttgatttctccttattgaccttccaggctgttgacaccaggctcagattactttgtctattaattcctggtaaacagtactttctagtactgccaaagatgcttacagttcccctggggagggggagataagcatattacacaagaggtaagtgtggaaaaggggccaggacaattagtcattagttcatctggttgaaacacatctactcctgggcaagagctccttaccctgcttgaactgcagcatcttcctctcttctcc

SEQ ID NO: 140696 - DNA, 581 bp, Homo sapiens
gacatgtcaggcatttagcttcaggacctgattctagttccctgccctgtggcaacaagtagaaacagatccctggtaccctgcttaagtattacaccagctagatgtgagcagatgagaaaatcaaatccttctattttgccagggattaattcattctcaggattgtaaatattacatttcacctttcacctcacagaactgtagaattaggaggtgagctgggcagcctgcccagcaagacattatgatgtatacaatacagtgcactactaaggatgtgtctttaaaggcatttacagcacacagttttttttttccttataattttgctgctctttatttgtagtagtagataaggaattaagaaagcaaaaatgagtgctttgactaggtcttttgcctttgaaagtagcattagtaaaatcccctcttcttttttattcttataaaatttacccaattcactctgtcccccagcccatctgtgttcacttgctgttcttgctgctctcagtttttaaaagcttattctaaaattacatsaaagcaaccccattttgacaaaattagaattctgg

SEQ ID NO: 140697 - DNA, 564 bp, Homo sapiens
cctccacattaggttagagaattacaacaagcatgtttcatrtatttcctcgaattctcctgtaggattaaattctagccttccactatgattgggagggtatcatgacgcaccctttattggctggtttaccttctccgtctcacttctctctcatactagtattccttgtatctcccaaataaactacttgcacccaaatttttgtctcagagtctacttttaagagacccaaactaagataccatgtattaagataattggatatcagaagatgagtttgtttatccaaacagattttctcaatacaagtagatgaaaggaaattgtaattgaggaggatccctgtgcccgttgcctacatcagcactcacctcttcataactggccttctctctctgatcttgcttctgtcctactcagcctttggaccaagtccctaactcacgccccaagcattctctgctgtcctgcagccccagtgatttcttccacatttggaatcatgttttatttattgtttgtaccacttacctcacggttatcttaatctgaagagaaact

SEQ ID NO: 140698 - DNA, 564 bp, Homo sapiens
cctccacattaggttagagaattacaacaagcatgtttcatatatttcctcgaattctcctgtaggattaaattctagccttccactatgattgggagggtatcatgacgcaccctttattggctggtttaccttctccgtctcacttctctctcatactagtattccttgtatctcccaaayaaactacttgcacccaaatttttgtctcagagtctacttttaagagacccaaactaagataccatgtattaagataattggatatcagaagatgagtttgtttatccaaacagattttctcaatacaagtagatgaaaggaaattgtaattgaggaggatccctgtgcccgttgcctacatcagcactcacctcttcataactggccttctctctctgatcttgcttctgtcctactcagcctttggaccaagtccctaactcacgccccaagcattctctgctgtcctgcagccccagtgatttcttccacatttggaatcatgttttatttattgtttgtaccacttacctcacggttatcttaatctgaagagaaact

SEQ ID NO: 140699 - DNA, 478 bp, Homo sapiens
gtggaatttatttatgcaatgcaaaggtagttcaacacaaaaaaattaatcaatgtaataatcacgtaaacagaatgaaggggaataaaacacataatcatcccaattgatgcagaaaaaaactttygatctaatttaataccctttcttggaaaaaaaaaaaagtcaacaaagtaggaacaaaataactacctcaacatgataaaagccatatgtgaaaacccaaggcaaatatggtgaaaaactgaaaactttctctcagatcagaaacaaggcaacagtgtctgcttttaccacttccattcaacatagtactagaggttctggccaaagcaattaggcaagacaaagaaataaaggcatacaaattggaaaggaagaagtaaaatgatctctgttcacagaagacatgattttatatgaagaaacccctaaagattccacccccaaaaaactattagaactaataaatgaattc

SEQ ID NO: 140700 - DNA, 316 bp, Homo sapiens
catttctacacactaacaatgaacaattggaaaggaaattacaaaaacaatttaatttacaatarcatcagaaagaacaaaatacgtaggaattacctcatacaaggaggtgaaaaacttgtacaattaaactataaaacattgatgaaaaaatgaagacataaataaattggaatgcatatcatgttcatggattgaaagacttaatagtattaagacatccatactacctaatctacaaattcaattcaatctttatcgaaaccctaagattggcttttgaagacattgaaaaaaccatcctaaaattcaaaca

SEQ ID NO: 140701 - DNA, 452 bp, Homo sapiens
gtttcaggcagagaaaaccccacggacaaaggcccagagagagggagaatcaggcgtggtagtgaaagtgaaagagctcagtatggctggagcctagaggcatgggacagtgtgggtgggagactgtaccaggctttgaactcgagcatctgtgtagacagtggcgacacagtcagatttatttgtatccgacaagcagcaggaggagcagatttgagtgagaaaactcagtcctytttttaatattctgattttgaagtttctgtaggatgtccaattaatgatgtccaaaaaacaatatataattctaaaacacaggagaaagagctgggcaagaaaaaataaatctaagtaacagacattggtcaaatacctacaagatactaggtatcatgatatatatattaaatacgttatctcatttaattttacaacaaatgtataaggtaagt

SEQ ID NO: 140702 - DNA, 452 bp, Homo sapiens
gtttcaggcagagaaaaccccacggacaaaggcccagagagagggagaatcaggcgtggtagtgaaagtgaaagagctcagtatggctggagcctagaggcatgggacagtgtgggtgggagactgtaccaggctttgaactcgagcatctgtgtagacagtggcgacacagtcagatttatttgtatccgacaagcagcaggaggagcagatttgagtgagaaaactcagtcctttttttaatattctgattttgaagtttctgtaggatgtccaattaatgatgtccaaaaaacaatatrtaattctaaaacacaggagaaagagctgggcaagaaaaaataaatctaagtaacagacattggtcaaatacctacaagatactaggtatcatgatatatatattaaatacgttatctcatttaattttacaacaaatgtataaggtaagt

SEQ ID NO: 140703 - DNA, 452 bp, Homo sapiens
gtttcaggcagagaaaaccccacggacaaaggcccagagagagggagaatcaggcgtggtagtgaaagtgaaagagctcagtatggctggagcctagaggcatgggacagtgtgggtgggagactgtaccaggctttgaactcgagcatctgtgtagacagtggcgacacagtcagatttatttgtatccgacaagcagcaggaggagcagatttgagtgagaaaactcagtcctttttttaatattctgattttgaagtttctgtaggatgtccaattaatgatgtccaaaaaacaatatataattctaaaacacaggagaaagagctkggcaagaaaaaataaatctaagtaacagacattggtcaaatacctacaagatactaggtatcatgatatatatattaaatacgttatctcatttaattttacaacaaatgtataaggtaagt

SEQ ID NO: 140704 - DNA, 488 bp, Homo sapiens
ttacgttgggcttgcttccaagtggtaatagccatttccaacaaccacacccatgctttaaaaaaattacatgtgagggaatatttcatatgaattcctaagaaaatgtcttccatgtttgcttcaaatattagaaatagtccacataactgtgaagcatttctcagaatgttatcattaacattgttacagctataataacatgattatttaatatgtttaatatctgtctctacttgtagaccccarcattcttggagtctgagactcatggagagggtatcgataggagtacagatcccagtatgttgcacactgtaagaacttaaaagaataataaatcgagtgaacaaataaataaatgagcaaccactagccacagatggattcctagaatctacagcagagtgtccccaacaatcttttctctataaggaattgttgcagtggtaaattgtttccccaaaggaggaagccaccagcattca

SEQ ID NO: 140705 - DNA, 523 bp, Homo sapiens
agtgtaacggaagagaaaaatagaaaaaaaaaaaaaacagaactaggttttccatgatggactgcaacccacgacaggttacatctatcaagaacacagtttctctgttcacacatttaattaggaaacttgaaattgaaaggaaaggacagaaaaggacaaagagccttaaragaaaattctgtaattcactgactttttttttttttttttgagagtctggatttagagtgtttctagatgatccgcattagatatgacgaacccactgaggtcagcatgcacgatgcagatggatacacttgggagtctaaattctatctcccttcgcagctgagtgctgtgaacctcagtgaaacacaagcaagaatgtgcaacggatgagacctgtatgttgggagcctagttctttattccataaaaaaaagtcgtgcctgtggttatgaaaaaatgttcaactaacctagaagagttcagctaccaagtgaaggattatgggaaagcagtattttttcagacctgg

SEQ ID NO: 140706 - DNA, 537 bp, Homo sapiens
ataaaaactaaccagagaacacagaaggaaaactttgtgagctagagaaaccaattaacctcatgaaaaatagaaagagcggccaggaaacccagtaaagacattaagagtggacctagagagcaaaacaggtaaacgcaggtaagtcagtcttgttttaagactgttagcttggggatgagtcctcatgaggcctgcaaagggccctgagcagtggagtcaggcttcctgcatatggaaacacgtattcagcgggcactccgtgaatgcgtttccctgtctggtgtggttagtaaaatatgtttcattatgtatttcacattttttttttatcacctgtagtttgcaaagcgctgtctttggtaacaatgggagacaaaaagattaattaaatatggaatttgtctcaatgtgacttaaaacccagcaagtgtggtatacytgcagacaatgaacagaagagtaaaggggatctgaggaagagccagacaatggttagtgtaggctcagaatggaatagccatatatgtgtggtgt

SEQ ID NO: 140707 - DNA, 424 bp, Homo sapiens
agatctttaattcatgtaacattctgttacatagcactcctttctcatcaataacatatgccttggtactttattgtatgagaatataaattasattcatcaggctacaccactgccttcttagttaattgctaggtaaggtttgtcttgccaaatgcattgaaagctctttcaaatcaattcaacaaatagtttttgctctatgtgctgggtaccaaagggatcctctttaaagataaagaaaacaccaccattgatctcaaagagcttagtgtctggtgtggggaatggcatgcacacagctaattaaaacacagagctgtgtgtaacatggctgtggcagagacagaaaggaggtattgtgtatggaaggtaatgaggggaaacttcatgaaagagaagcgtttgaacacagggtgtgaac

SEQ ID NO: 140708 - DNA, 361 bp, Homo sapiens
agaaaccctgattgagataaaatgttaaattgctacaattatccataaaattcaacttcctacaaaactatttttgagaaaatatactgataaaacagtggtgatatgctgcataaactatttttggtaattaaatttgttctccatttcacttttgcttatgtgtcaatgctaataaaccagcagtttttaatttttcttttttttttttaaaccagagaccctttggaaatgcaaaatagtttagggyacttggaaccatttggttattatttgctatttcctagatgtatcactataaatttctcttcaagattatgcccttttattttattaacactgttacatactagacacctag

SEQ ID NO: 140709 - DNA, 604 bp, Homo sapiens
acaactgtatgaaaagttttggtgtttttgttccccccatataaggaaagccttcacattgcaaccgtgagaggcaccatgtagggtggttgctgtcattcctattatatgactgagaaaacaggcccagtgaaatctgaaatacctggtcggagatgtggcaggtagggatgaacagctgtgaagaaagctagttccttccagtttgaaagcctgtacttctactgctaaaatgctctgttcattcaccttgggcctgaagcagctcacaacactagttaattggtttgggcaatcataatacccatgcatgaaacaaaacattattcagtggtaacatatgaagcatatgggtaagattaaaactgaattcagtgagatccagaatacaatattggatgatagagcaaatactcccttggagaargaatacagtgactttttatagacaacttttagaaaaatctcagtacagtattaatctgagtctacttaaagcacctgacaactatttacattgtaatatgactggttccaggatattttttacttgggtaaagtaagccataaagaaagccagtttacttcggaattcatatataac

SEQ ID NO: 140710 - DNA, 572 bp, Homo sapiens
ctataaaattttctcattctrtgttgcgtgaaaaatgcagtagttaattgctcctgacatttaattggtttatgcttccctctaacacaatcttgtactgcaagagacagggaaaactagttggcatatttctgcaattgcagagtattacacaccaagaaattagtctttttgttagttctagcagtgaattacaaatgcagtttcagaagtgtaggtagagaaataaaatctgtgcgtctacattctacatatgctaaaagactgacatgggcttccctgaatgctttgtatgactttgccagaatggctgagattttttcattatcattgtacagatttaaaaatgacattttttatacccttgtgaacatgtcaggttgtttaccatttctgttacaagccatctggacccttcataaccttttcatatattttttcaaatatcatctggcataaaaagcataaggtaaccttgctgttaccaattataatacatgatggaagaagttggatttagtgcggcatagtgcctctgatttcaagagtggcgagacactctggaaagcatc

SEQ ID NO: 140711 - DNA, 516 bp, Homo sapiens
tgagccaaggctgagacatctaagcaaaccctctgcacccagagtcctcaatccrttgttcctgcatcttttttcagtctcatgggatcccagaagaatacaaattagagagaagaatctgcaaagcttttcctttcatgtttaatgtctgggcagagctgttccctgcaggacaatttctggttattttctctctctggtttgaggcatctccagggatggtttggtgactgtttcccttggggaagttttcagcagcatatcagttttactgttaaaagtttattttacaattcatctgagatagtcctgttctaaatgttctttccattacccttgtcatctggctcttgattcctgcatacccttttcagtgacactgcctcttctgggctgaaatgtgttcaataattcgagctataaatcactctcgcctccccatttggtctttacttaaccagattataaatatttaattcatttgatttttcctcataccactccagaagcttaatc

SEQ ID NO: 140712 - DNA, 516 bp, Homo sapiens
tgagccaaggctgagacatctaagcaaaccctctgcacccagagtcctcaatccattgttcctgcatcttttttcagtctcatgggatcccagaagaatayaaattagagagaagaatctgcaaagcttttcctttcatgtttaatgtctgggcagagctgttccctgcaggacaatttctggttattttctctctctggtttgaggcatctccagggatggtttggtgactgtttcccttggggaagttttcagcagcatatcagttttactgttaaaagtttattttacaattcatctgagatagtcctgttctaaatgttctttccattacccttgtcatctggctcttgattcctgcatacccttttcagtgacactgcctcttctgggctgaaatgtgttcaataattcgagctataaatcactctcgcctccccatttggtctttacttaaccagattataaatatttaattcatttgatttttcctcataccactccagaagcttaatc

SEQ ID NO: 140713 - DNA, 396 bp, Homo sapiens
gtttatttgttgttttgttggctggtttatataccctactccatcccaaaaagaatttgagaacacttagaagtgccaatccccagcactctggcagagtatctatcagatgtrtttctgtagagagcttggacatctttatcatattttgtctcctgttactatagaagagatagtgaagtacactagattgacatgaatttgcatgtagtcgagtgagtcggtgtcttctctgtgttctttttctgtcgctatgtacccaatcatttatgtttgtacatatttctgtgatgtattattatgtgaaaaatgaagatgtagaacagtatgtattatataatcttttctcccaaaagtgcatatttttatatacatagaaaaatataatttgccatg

SEQ ID NO: 140714 - DNA, 603 bp, Homo sapiens
gtgtaggttgtatgcaaatacttcaccattttctatcaaggacttgagcatcctcagattttggtatatgcagggagtcctggaacaaatcccctgagggtacagagggacaactgtattaaaaatgtattcagagaattcactttccaacatattctgattatgtcatttcaggcccaacatttccactgagaaaaacttttaaagtggaaaaacatacagacaacatttgtctgaagaaggatctaggagaagaataaagccaagrgaggtgagcccagcatttgtgttgcattcgtccttttccaaaaggaaagaccgaaggccctccttttcagtgtccctgctgtgtggggtaccaaaattggtgttctgggccaaatcatgggaagcgccccttgtgaacacaccaagctctcaaatgggaccctgaacactgctccctagcaggaaaggtgaagagacaataggctagctcaaaaaaggactgccatccagcattcagccacctgaacaccttgaccagttgatgtgatatgctgccttccagaagcaaataaacaaatacatctctttgttaggagataacattattaaaagctt

SEQ ID NO: 140715 - DNA, 593 bp, Homo sapiens
tgtaggttgtatgcaaatacttcaccattttctatcaaggacttgagcatcctcagattttggtatatgcagggagtcctggaacaaatcccctgagggtacagagggacaactgtattaaaaatgtattcagagaattcactttccaacatattctgattatgtcatttcaggcccaacatttccactgagaaaaacttttaaagtggaaaaacatacagacaacatttgtctgaagaaggatctaggagaagaataaagccaagggaggtgagcccagcatttgtgttgcattcgtccttttccaaaaggaaagaccgaaggccctccttttcagtgtccctgctgtgtggggtaccaaaattggtgttctgggccaaatcatgggaagcgccccttgtgaacacaccaagctctcaaatgggamcctgaacactgctccctagcaggaaaggtgaagagacaataggctagctcaaaaaaggactgccatccagcattcagccacctgaacaccttgaccagttgatgtgatatgctgccttccagaagcaaataaacaaatacatctctttgttaggagataacattat

SEQ ID NO: 140716 - DNA, 479 bp, Homo sapiens
aagcagtgactctttaacaaaatctatgaattaggccctttagttggtgtcaacctaaatttctgccagggctgaagtggtgggggatggttcctactaggtagaacttgaaagctctgtgagagacrtgtgtatagtatatatttttttaatagtttcaagcgaggacaagaccaagaatgatttttattttcataaagaaaactgttagaagaatgacaacaacaaaattgcatgtggcaatgacttgtattttttttttaataattccccaatgaccttatttagtatggagaatgttgaaaaccaaacatcaacttttggaaggtaaacttcaaaaaggctttcttgggtattgaaaaatgttgactacaagacagaatcaaagatatggctatttttcttcttctttttaacttagatcagaattgtattattaaatagccaacaatagacacatttggagcatatatgttttt

SEQ ID NO: 140717 - DNA, 479 bp, Homo sapiens
aagcagtgactctttaacaaaatctatgaattaggccctttagttggtgtcaacctaaatttctgccagggctgaagtggtgggggatggttcctactaggtagaacttgaaagctctgtgagagacatgtgtatagtatatatttttttaatagtttcaagcgaggacaagaccaagaatgatttttattttcataaagaaaactgttagaagaatgacaacaacaaaattgcatgtggcaaygacttgtattttttttttaataattccccaatgaccttatttagtatggagaatgttgaaaaccaaacatcaacttttggaaggtaaacttcaaaaaggctttcttgggtattgaaaaatgttgactacaagacagaatcaaagatatggctatttttcttcttctttttaacttagatcagaattgtattattaaatagccaacaatagacacatttggagcatatatgttttt

SEQ ID NO: 140718 - DNA, 580 bp, Homo sapiens
tggtctggggccactctcagcctgtaactggtctccctgtggctgctcttgcctgttcccatcagttctcacccagmccctgagggcgccgaacacctaaatcggcccacgtgctgccctcagagcattcccactgcacctggatgcagccctgcctgatatcccctcccatctgccaccttcagctcatggcctggccccatagtctcttatagtctagtgccttttctggcccttaaacgtgctattccttcccatcttcgagactttttttgtcccatttcctctggaatgttcctcctgtggctgtctctctccttcacattcagtttaaacgttgttcctttacagaggcttccagagaaatgggtgctgcgtataatcccccatcttagcccccattttcttcaaaactctgcaccctttgtctgacccccggtgtgagcctgttcacctgcttagtttttatctcacattagaattgaagtttggctggggctgggcagtggttgtcctgtccaatccacgtctatggcacttcacaagggtcattttgagactctgacgaaagctaagaact

SEQ ID NO: 140719 - DNA, 580 bp, Homo sapiens
tggtctggggccactctcagcctgtaactggtctccctgtggctgctcttgcctgttcccatcagttctcacccagcccctgagggcgccgaacacctaaatcggcccacgtgctgccctcagagcattcccactgcacctggatgcagccctgcctgatatcccctcccatctgccacctycagctcatggcctggccccatagtctcttatagtctagtgccttttctggcccttaaacgtgctattccttcccatcttcgagactttttttgtcccatttcctctggaatgttcctcctgtggctgtctctctccttcacattcagtttaaacgttgttcctttacagaggcttccagagaaatgggtgctgcgtataatcccccatcttagcccccattttcttcaaaactctgcaccctttgtctgacccccggtgtgagcctgttcacctgcttagtttttatctcacattagaattgaagtttggctggggctgggcagtggttgtcctgtccaatccacgtctatggcacttcacaagggtcattttgagactctgacgaaagctaagaact

SEQ ID NO: 140720 - DNA, 580 bp, Homo sapiens
tggtctggggccactctcagcctgtaactggtctccctgtggctgctcttgcctgttcccatcagttctcacccagcccctgagggcgccgaacacctaaatcggcccacgtgctgccctcagagcattcccactgcacctggatgcagccctgcctgatatcccctcccatctgccaccttcagctcatggcctggccccatagtctcttatagtctagtgccttttctggcccttaaacgtgctattccttcccatcttcgagactttttttgtcccatttcctctggaatgttcctcctgtggctgtctctctccttcacattcagtttaaacgttgttcctttacagaggcttccagagaaatgggtgctgcgtataatcccccatcttagcccccrttttcttcaaaactctgcaccctttgtctgacccccggtgtgagcctgttcacctgcttagtttttatctcacattagaattgaagtttggctggggctgggcagtggttgtcctgtccaatccacgtctatggcacttcacaagggtcattttgagactctgacgaaagctaagaact

SEQ ID NO: 140721 - DNA, 580 bp, Homo sapiens
tggtctggggccactctcagcctgtaactggtctccctgtggctgctcttgcctgttcccatcagttctcacccagcccctgagggcgccgaacacctaaatcggcccacgtgctgccctcagagcattcccactgcacctggatgcagccctgcctgatatcccctcccatctgccaccttcagctcatggcctggccccatagtctcttatagtctagtgccttttctggcccttaaacgtgctattccttcccatcttcgagactttttttgtcccatttcctctggaatgttcctcctgtggctgtctctctccttcacattcagtttaaacgttgttcctttacagaggcttccagagaaatgggtgctgcgtataatcccccatcttagcccccattttcttcaaaactctgcaccctttgtctgacccccggtgtgagcctgytcacctgcttagtttttatctcacattagaattgaagtttggctggggctgggcagtggttgtcctgtccaatccacgtctatggcacttcacaagggtcattttgagactctgacgaaagctaagaact

SEQ ID NO: 140722 - DNA, 471 bp, Homo sapiens
tggttcctctctgaaacagttcagcaggctggcatcagctaaagactgttaataacatgatatgcgtatctggtcaacctcattctctggagggaaatttgcagtgaargttctgtgattatgatcagagctccccagtgttcatggcaaataccaaatggaaggcagacttgccgcaggaccgtctcgtctccatccacagaactcagtgttctctggtttctcgaatgcaaaccaaaccaaataaaataatagattttcccttaagattgaacatagataggtattcttgaaaaccgaaactccatgaatttaaggaggcaggaccttaaactaagttggtcctagattaggataagggttgttatgggtttgggggacagtagatttctccgaggtcagtgaaagttggtcacactgtatggagccacagacatcctgaaaaacgtgtgcagcaagatcttggaggac

SEQ ID NO: 140723 - DNA, 471 bp, Homo sapiens
tggttcctctctgaaacagttcagcaggctggcatcagctaaagactgttaataacatgatatgcgtatctggtcaacctcattctctggagggaaatttgcagtgaaggttctgtgatyatgatcagagctccccagtgttcatggcaaataccaaatggaaggcagacttgccgcaggaccgtctcgtctccatccacagaactcagtgttctctggtttctcgaatgcaaaccaaaccaaataaaataatagattttcccttaagattgaacatagataggtattcttgaaaaccgaaactccatgaatttaaggaggcaggaccttaaactaagttggtcctagattaggataagggttgttatgggtttgggggacagtagatttctccgaggtcagtgaaagttggtcacactgtatggagccacagacatcctgaaaaacgtgtgcagcaagatcttggaggac

SEQ ID NO: 140724 - DNA, 388 bp, Homo sapiens
catcctgaaaaacgtgtgcagcaagatcttggaggactgaagatgacaagtgaatggaacttcagaacataatcctggtttttaggtccatttacatccacttaacttcgagttctgttcttatcaagtgtaaatagaagaacaatagcaatcgactttgcaatgtctttatattgagatgattgggaagaaaatcagccaagtccatatgtgcacagggatggaatatagaatgttttaaaaatatcatcaatacgacaaaagattaatatktctatacacagctcttaaataagaaagaaaaccaagagaaaaatgggcaatgcatatgaacaagcaattaatggaagaaacacaaatggctattaaatttaggaaaatgtttaaa

SEQ ID NO: 140725 - DNA, 562 bp, Homo sapiens
aaagctttaaaaacctttactattaaagaagaaatatttttaagaattaacaagaaatattcaactcaaaaagttacataaaaacaraaataagcaaaagcaggtattaatcatgatagaagaacacaataagttagaaacaaaatgcatagaaataataaatagagtgaagatccagctctttgaaaagattaacaaaatagagttgttttggggaaatgtgatcaagggaaaaaaagaaagaaattaaaacatataacatttggaattagagagtatcaccacagatagacagcaaactaaaacttttcaaataaagaacttttttttttttttgagacaaggtctcactcactcccatcacccaggctggagtgcagtggcatgatcacagctcactgcagcttcaacttcctaggctgaggtgattctcccacctcagtctcccgagtagctgggattacaggcaagagccactaagcccagctaatttttgtgtttttcgtagaatggggttttgccatgttgcctagggtggtctcgaactctggggctcaaatga

SEQ ID NO: 140726 - DNA, 562 bp, Homo sapiens
aaagctttaaaaacctttactattaaagaagaaatatttttaagaattaacaagaaatattcaactcaaaaagttacataaaaacaaaaataagcaaaagcaggtattaatcatgatagaagaacacaataagttagaaacaaaatgcatagaaataataaatagagtgaagatccagctctttgaaaagattaacaaaatagagttgttttggggaaatgtgatcaagggaaaaaaagaaagaaattaaaacatataacatttggaattagagagtatcaccacagatagacagcaaactaaaacttttcaaataaagaacttttttttttttttgagacaaggtctcactcactcccatcacccaggcyggagtgcagtggcatgatcacagctcactgcagcttcaacttcctaggctgaggtgattctcccacctcagtctcccgagtagctgggattacaggcaagagccactaagcccagctaatttttgtgtttttcgtagaatggggttttgccatgttgcctagggtggtctcgaactctggggctcaaatga

SEQ ID NO: 140727 - DNA, 592 bp, Homo sapiens
caagccttttaacaaggttggggcagtggagggggcaaaggaggagagggagaggttcagtttgagaacagtctccatgtcccatactagagaccaacaatcttgatgctagtgttgtccagagtttttgctaagtaaaggaaggggaggtggggctttgtcatagggttccattgtgaggatttgttaaaggggtcagaaggaaaagaagggcagttgcttccactaaccatggtttcagtgagcaaatacacggaagagcaaagggacgatatagcacagtgctagtgcaacgtctttatgctgtcctcccgtgattccagctctgggtggtctcaggcacctaaacctcttcattrgaagctggaggaatggctgggatggttgtggttggctagcaatagaaaaaaagcctccacagttctatgaaatgcctacataaaaactgcagatgaaaacatttaccccatctactttcttaacttaggataggtagcaaaccaggtgcagctgggatcttgattacacaactgccccgaacacacctattattgttccctagcaaaagatcctgacaccctcttcccagacc

SEQ ID NO: 140728 - DNA, 453 bp, Homo sapiens
gctacactaggctcatgtagtcctgtcacccaataaggtgacctctgtctctgtacattatagtgatatagtggcgtccatccaccgagaggccttgacccagatttctatgcttaggaacaactgcagagatagagctgaagacaaaagtgatttgacttttgaaggttggcagccagatgctgagctaaggatgccttcatttgttgtttttaaattatatatatatagttttttaaatttaaatttattttttttttcragacatggtcccactctgttgcccaggctggagtgcagtggcacaatcttggctcaaccgcagcttcctgggttcaagtgatccttccacctcagcctcctgaatagctgggaccacaggtgtgtgccaccatgcctgattaattttgcttatttttcatagagacgggatttcaccatgttgcccaggtt

SEQ ID NO: 140729 - DNA, 492 bp, Homo sapiens
agaagtgactaccacccaagccctgaaaagccttgttcaccattcagacaactgggagccatcaaatgaattcaaactgaggaaaacatatwtggctcttaatattaacataaacactcaatataactgttgcttatttgttaacagaagtttttataaatttagtcagctcttggttttaaatcctgcctcctacttaatctctgacagtgggtgaatcactctcctggcttctactgcctttttgtagagcaggctaattatacagctcacagcaggatgttaggatgaggtgagatcacacttagaaatggcttaagaaatggagatgcccatgatgtgtatgacacatcataggaagaaaggataaaagtaaagagtttatttcagttactcagctgtgacacaatgatggcctaaacaagtgattctcaatgggttgtaggtggggtttattttcccccttgtaggggacacttggctatatttgaa

SEQ ID NO: 140730 - DNA, 614 bp, Homo sapiens
ttccatcagagctgttttaacacattgatcacctaattttsttttcactctgaatgctgattaatgatatgaaacctgccattacaatggattgcggaaaatgcattgtgagatgccagttaggatattgaggacatttcacaacttttagggcagagcttgccaaaatgcaatctattcaaaagcagccaggaaaatatttcttccttgtttatggatgatgccatgtagttttactgactcataatggagctatagcctttttattctgacaattaaacaccaaaaagaaaaataaaactgctgtgtggggtcttccctcataaatggcttcatgttaagatttcctatctaagacccacaacaagtctgatgtctggaaaagcaaaactttcctttggtataataaaagatgtttataagaaaaggaagcatattaatcacagaaataagtgcaggctgagttattttgaagcaaaattaaaatttataaaatcaaagaaaaaatctgcatgttaatttttctaaatatgcaaactttatctatttagcaaaaataaaaatatgatcaccaatatgcttttcacagaaatgccatcagtgcattgattaga

SEQ ID NO: 140731 - DNA, 609 bp, Homo sapiens
atgtataagttgactactatttctgagtgggataaaaaacttcatggaaacagtttatatagagaagagggtccaagtttaaaccacaaatggctccaatctgtagaaggagagtgcaggtaaagaagacagcaaatgagactcttgaagaggatcagttgaggtattgctcctcacaagaaggcattagctgcgggggtctgcccgcagaccctgacccaaatgatggatgaataaaacatacactgacacacagatattctgttttgccagtcctgctgagtgtccaaccgcctgcccaccaagaaaggtttgtcactgtggctggccttgagcagtttgcactccaggcatttatttagtatacaattaacaacrgatgctctgagttaacacacttgtggataattaacatggttaagagaatagttctacaaatgaataaagctcaggtaccgtggtttagagtaaataccattaggcggcaacatccctggtcgacctgccccccagccccccctcccactcaagagggccatctggctcaaaggttagttaatggaagtagggtaaacagacttaactggggaagcctctattgtccctagt

SEQ ID NO: 140732 - DNA, 609 bp, Homo sapiens
atgtataagttgactactatttctgagtgggataaaaaacttcatggaaacagtttatatagagaagagggtccaagtttaaaccacaaatggctccaatctgtagaaggagagtgcaggtaaagaagacagcaaatgagactcttgaagaggatcagttgaggtattgctcctcacaagaaggcattagctgcgggggtctgcccgcagaccctgacccaaatgatggatgaataaaacatacactgacacacagatattctgttttgccagtcctgctgagtgtccaaccgcctgcccaccaagaaaggtttgtcactgtggctggccttgagcagtttgcactccaggcatttatttagtatacaattaacaacggatgctctgagttaacacacttgtggataattaacatggttaagagaatagttctacaaatgaataaagctcaggtaccgyggtttagagtaaataccattaggcggcaacatccctggtcgacctgccccccagccccccctcccactcaagagggccatctggctcaaaggttagttaatggaagtagggtaaacagacttaactggggaagcctctattgtccctagt

SEQ ID NO: 140733 - DNA, 609 bp, Homo sapiens
atgtataagttgactactatttctgagtgggataaaaaacttcatggaaacagtttatatagagaagagggtccaagtttaaaccacaaatggctccaatctgtagaaggagagtgcaggtaaagaagacagcaaatgagactcttgaagaggatcagttgaggtattgctcctcacaagaaggcattagctgcgggggtctgcccgcagaccctgacccaaatgatggatgaataaaacatacactgacacacagatattctgttttgccagtcctgctgagtgtccaaccgcctgcccaccaagaaaggtttgtcactgtggctggccttgagcagtttgcactccaggcatttatttagtatacaattaacaacggatgctctgagttaacacacttgtggataattaacatggttaagagaatagttctacaaatgaataaagctcaggtaccgtggtttagagtaaataccattaggcggcaacatccctggtcgacctgccccccagcccccsctcccactcaagagggccatctggctcaaaggttagttaatggaagtagggtaaacagacttaactggggaagcctctattgtccctagt

SEQ ID NO: 140734 - DNA, 640 bp, Homo sapiens
atagtgtgggaatcaaaataatgattcctgcaatttcaaatcatgattttttgaggactgggaattagttaccatgcaaaagctgctatgtcatcttcctggaaaaaagaaaagaagaagaaaaaagggaagggaaaggaagggaagacatcttaaggaaacrtatataacagagtttgaggttaatgaatttgtggcagaagtaaaagaaaactcacacctagtgtgacaggtgtgagaggctatggtgtgctgaagtcctcacagcttgactgtcatattataccccaggttcatggagcaccataaacctgagatcgtttgtacacattagaagaatgcttgactactacagattataagagccctatattatccttaggatagttgcataatttcctaaagtatttgacaacaaattctttgactttgctgccggtaattatagatgactttacctgggtaccattgttatgtgtggctctatgtaaatacatttcttggtcttttcctgtataattgatgttctttaaaattgttaatacatagcaaaaatgatttttaatagttctttttctatttaatttttaaagaaacacagaatgctagtttccttttttctcctcattttcatacagaa

SEQ ID NO: 140735 - DNA, 587 bp, Homo sapiens
cagaaatgtgagtttatcactctttcattaaaacatttttcagaatatttttcttaccttaataaagctagtgaatttcttaatgaaaattttagtttttatattaagtaaattaaagtcaatgctttaggttaaaaacagtatgtaggggcttcaagtttcttacatctttggagagacgttggaaatccttgctctcatccttacaacaagaaacagctggacaaacagaaaatcggtgatttttttaaagaccgctggtggcccatttctagagtcttaacaaaggaacactttgccagagcacaatttagaaaccttatccagyagtgtaagtgtaattctttcccactccagctccctctagccttcccttaagagggggaagaagtcaacaacagggcacagaacttcaaggaaatagattgggaacactggagccagagaagggagtgggcaacaggaagaatgtaatacatgtggaggagggttggaaacacttgtgaagccacaccccaatacgtaggccaactaaaacatttaattgggagatcacagaatgtaccccctacacccaccactgtgcc

SEQ ID NO: 140736 - DNA, 587 bp, Homo sapiens
cagaaatgtgagtttatcactctttcattaaaacatttttcagaatatttttcttaccttaataaagctagtgaatttcttaatgaaaattttagtttttatattaagtaaattaaagtcaatgctttaggttaaaaacagtatgtaggggcttcaagtttcttacatctttggagagacgttggaaatccttgctctcatccttacaacaagaaacagctggacaaacagaaaatcggtgatttttttaaagaccgctggtggcccatttctagagtcttaacaaaggaacactttgccagagcacaatttagaaaccttatccagtagtgtaagtgtaattctttcccactccagctccctctagccttcccttaagagggggaagaagtcaacaacagggcacagarcttcaaggaaatagattgggaacactggagccagagaagggagtgggcaacaggaagaatgtaatacatgtggaggagggttggaaacacttgtgaagccacaccccaatacgtaggccaactaaaacatttaattgggagatcacagaatgtaccccctacacccaccactgtgcc

SEQ ID NO: 140737 - DNA, 587 bp, Homo sapiens
cagaaatgtgagtttatcactctttcattaaaacatttttcagaatatttttcttaccttaataaagctagtgaatttcttaatgaaaattttagtttttatattaagtaaattaaagtcaatgctttaggttaaaaacagtatgtaggggcttcaagtttcttacatctttggagagacgttggaaatccttgctctcatccttacaacaagaaacagctggacaaacagaaaatcggtgatttttttaaagaccgctggtggcccatttctagagtcttaacaaaggaacactttgccagagcacaatttagaaaccttatccagtagtgtaagtgtaattctttcccactccagctccctctagccttcccttaagagggggaagaagtcaacaacagggcacagaacttcaaggaaatagattgggaacactggagccagagaagggagtgggcaacaggaagaatgtaatacatgtggaggagggttggaaacacttgtgaagccacaccccaatacgtaggccaactaaaacatttaaytgggagatcacagaatgtaccccctacacccaccactgtgcc

SEQ ID NO: 140738 - DNA, 587 bp, Homo sapiens
cagaaatgtgagtttatcactctttcattaaaacatttttcagaatatttttcttaccttaataaagctagtgaatttcttaatgaaaattttagtttttatattaagtaaattaaagtcaatgctttaggttaaaaacagtatgtaggggcttcaagtttcttacatctttggagagacgttggaaatccttgctctcatccttacaacaagaaacagctggacaaacagaaaatcggtgatttttttaaagaccgctggtggcccatttctagagtcttaacaaaggaacactttgccagagcacaatttagaaaccttatccagtagtgtaagtgtaattctttcccactccagctccctctagccttcccttaagagggggaagaagtcaacaacagggcacagaacttcaaggaaatagattgggaacactggagccagagaagggagtgggcaacaggaagaatgtaatacatgtggaggagggttggaaacacttgtgaagccacaccccaatacgtaggccaactaaaacatttaattgggagatcacagaatgyaccccctacacccaccactgtgcc

SEQ ID NO: 140739 - DNA, 450 bp, Homo sapiens
tagctgcagtatggaagttttgaagtaatgaaaatagtggtatcmatcaggacccatcacaaaatcaaaatttgttctagatattacaaccagagaatatacagttgacccttgaacaatgtgtgggattgaactgagtgctgccataaatatgcagatttttttcaaccaaatgccaatcaaaaatacattattttcttgatgtgaaacctatgtatatggaggactgacttttaacatatgtgagtttggcagggccaactgtgggatttcagtagtgcaggttttggtatgtgcaggggtcttggaaccaatcccctgtgtagactgagggacaactgtaattttaagggctgggttaaataggggttgaaagattgaaaaagccaaaaagagaagatcaagataacacagacccccggtaacttcagtatgtagctaccaggcctt

SEQ ID NO: 140740 - DNA, 426 bp, Homo sapiens
cctatttgtttacttttttgtctctctctttctctctttcacacacacacacacagacacacacaccactcagcaaaacatatttatttccawaaatttcaggaatccatctttatctcataaagaatgattataatgactgctttttaagtctttgataatttctggttttggcatctgtttatgtttttccccttcaaattggtgagattctcccccttcttttggattatgttctagatatttcatatcatgttgtggagctctaggtcctattaaaactcgcaaagaatgttaatgtgtgtatgtgtgtgtgtttgctgtctgtaaacccagttagatttagaatccaactctgatctcaccgtctgtgtgctgtggttataatgtcaagttcagttttcacactcagtgatatgtttttta

SEQ ID NO: 140741 - DNA, 365 bp, Homo sapiens
cacacacacacacacagacacacacaccactcagcaaaacatatttatttccataaatttcaggaatccatctttatctcataaagaatgattataatgactgctttttaagtctttgataatttctggttttggcatctgtttatgtttttccccttcaaattggtgagattctcccccttcttttggattatgttctagatatttcatatcatgttgtggagctctaggtcctattaaaactcgcaaagaatgttaatgtgtgtatgtgtgtgtgtttgctgtctgtaaacccagttagatttagratccaactctgatctcaccgtctgtgtgctgtggttataatgtcaagttcagttttc

SEQ ID NO: 140742 - DNA, 589 bp, Homo sapiens
ggactaatacatagggactaccatgaattcatgctacctgaaatcaataggctctcaatgctttttgycaaatattttatgcatctctttcctatcatagttcttgtaaaattgtcccaaatattctttgcttgtcaatagattttagttctactcccaaaaaccataccatttggagatcaaatatgatgtatgaatggaaaaaaaatcaaggccattagacaaatattccaattcattccttagcacaaacatacaaaatactcattttctttatgtttatttgcttctcttgtagcagatagataggcctactctttgtgaggtgaatactttcacatgcaacttatttataattcttctcttctaaaactctgattcataattttcttctgtcagtacatcctccaggttctacctatcagctgcatcctcccctcttatcagaaaacaagcccaaatctcagccataatgaatatacatagacaaaaatcaatcacaaccaaaataaacaaataattttttccctttaaagcaaaggctctttcctctcttacaatcaaattttgaaaaatctacctgccaact

SEQ ID NO: 140743 - DNA, 589 bp, Homo sapiens
ggactaatacatagggactaccatgaattcatgctacctgaaatcaataggctctcaatgctttttgtcaaatattttatgcatctctttcctatcatagttcttgtaaaattgtcccaaatattctttgcttgtcaatagattttagttctactcccaaaaaccataccatttggagatcaaatatgatgtatgaatggaaaaaaaatcaaggccmttagacaaatattccaattcattccttagcacaaacatacaaaatactcattttctttatgtttatttgcttctcttgtagcagatagataggcctactctttgtgaggtgaatactttcacatgcaacttatttataattcttctcttctaaaactctgattcataattttcttctgtcagtacatcctccaggttctacctatcagctgcatcctcccctcttatcagaaaacaagcccaaatctcagccataatgaatatacatagacaaaaatcaatcacaaccaaaataaacaaataattttttccctttaaagcaaaggctctttcctctcttacaatcaaattttgaaaaatctacctgccaact

SEQ ID NO: 140744 - DNA, 604 bp, Homo sapiens
agagcatggggaccaaaggcagtaaatctgaggaacatattgtgtaggagcaaaaagagaaatcttggttttgggacaatgcagtgaagtgttttcattaagcaatttaataaaaaaatcccagttattttgtttgtttttgctatttgaagtgtactgttatctgccttttatatgtcccctaaaatatcagcattgttcattaatgtttttatggaagtcagtagtgcatgtaaacaatcttaagaagatcaaaagagagtacatatttatattacacatgaaacaagtataaagagcctatgacatgcatgttttgttggatatttttcataagatgaaaaaggggtgcagagagtgttttgactcaatatggctaaattattcttatatatctccttycaatgtttccataaaattgcaagaaaactggcaatagcattgatagctaaagagaaggtcattggtggttatttgggaaactttgtgctacctccattgtggatggtgtgaatcataaaacaacacttccttgactgtatccttgtgatctatccttcaaagcagagcaaggcaggtatcttaaaatatatatatatatata

SEQ ID NO: 140745 - DNA, 472 bp, Homo sapiens
agcacatgcctgtaatcccagctacttgggaggctgaggcaggagaatcgcttgaacctgggaggcagaggctgcagcgagccgagatcacaccattgcacccaagcctgggcaacaagakcaaagctccatctaaaaaaaaaaaaaaaaaagcatgtgccatgacggtttgctgcacaggtcattccatcacctagatattaagcccagcatccattagctatttttcctgatgatcttccttcccccatcaccccagacaggacccagtttgtgatgttcccctccctgtatccacgtgttctcatcgttcaactcccacttataagtgggaacatgtgatgtttggttttctgttcctgggttagtttgctgaagataatgacttccaactccgttcacgtcctgcagaggacattatcttgttcctttttgtggctgcatagtattgcatgcatttctttagccagtc

SEQ ID NO: 140746 - DNA, 472 bp, Homo sapiens
agcacatgcctgtaatcccagctacttgggaggctgaggcaggagaatcgcttgaacctgggaggcagaggctgcagcgagccgagatcacaccattgcacccaagcctgggcaacaagagcaaagctccatctaaaaaaaaaaaaaaaaaagcatgtgccatgayggtttgctgcacaggtcattccatcacctagatattaagcccagcatccattagctatttttcctgatgatcttccttcccccatcaccccagacaggacccagtttgtgatgttcccctccctgtatccacgtgttctcatcgttcaactcccacttataagtgggaacatgtgatgtttggttttctgttcctgggttagtttgctgaagataatgacttccaactccgttcacgtcctgcagaggacattatcttgttcctttttgtggctgcatagtattgcatgcatttctttagccagtc

SEQ ID NO: 140747 - DNA, 472 bp, Homo sapiens
agcacatgcctgtaatcccagctacttgggaggctgaggcaggagaatcgcttgaacctgggaggcagaggctgcagcgagccgagatcacaccattgcacccaagcctgggcaacaagagcaaagctccatctaaaaaaaaaaaaaaaaaagcatgtgccatgacggtttgctgcacaggtcattccatcacctagatattaagcccagcatccattagctatttttcctgatgatcttccttcccccatcaccccagacaggacccagtttgtgatgttcccctccctgtatccacrtgttctcatcgttcaactcccacttataagtgggaacatgtgatgtttggttttctgttcctgggttagtttgctgaagataatgacttccaactccgttcacgtcctgcagaggacattatcttgttcctttttgtggctgcatagtattgcatgcatttctttagccagtc

SEQ ID NO: 140748 - DNA, 587 bp, Homo sapiens
ggcttcgcacatcagcagcaatcagtaactagttgttgaattgattaactatcagacattcatgatagtttttcagatattggacctctggaatgacatatgatttgagtagactggtaaaaacgttatctgaaagcatgtacgtttgcctaaaggaaaagaaatgcgtatttatttacttatttatttttatttctttctttaggcaaaaaatacacacacacatatactgtacatacacaaacacagacacattgcatacatatatatatatatacatatatatatatatatatgggcagcaaggctactagttccacttggctctggaaaacaagaacgacacaccattttggaagagaaaagggacgtctaaccttgccgctttgttttgtttttcatgcatccagaccagagtattaggacagaggmgagacaaaaggtaattgagctgcgattcgggggaagcattttgtaagtgaataaaaggccacagtgatgagttcagtggcagggggttttccaaacacatctccagagaatctggggtgaacctaaatagaaagactttctttctcaaaacgcat

SEQ ID NO: 140749 - DNA, 474 bp, Homo sapiens
tagagaatcttgtgttgcactgaagacttgatgttcacactttgaatcagacagaaaaatttatattatggctaatatgtactgtttatgaagacagagatgtatatacatgctccaaatgattaaaatgaaaagttgtaaacaacacagttaaccctcagtggctcgtaaatttttgtgacaggataaatgctggttacacacgtggtgctattctctgtgtttggcctattggaatgcattgatctatatttgtaagctgaaatgaaattaagaaatttaatttatattatagttaktgattaattacattgctctgtgactgtaccagaataatacatacagaaacatattactggttgaagtaagttttagatggttacttgtgggttattgccctattactgtttctatagaaatgtaaaagtttacttaaaagtcaccagaaggtcaggtgcagtggcatatgcctgt

SEQ ID NO: 140750 - DNA, 652 bp, Homo sapiens
tcagtaaagttgcaggatacgaaatcagcatacaaagatcagtaacatttctacatgccaacagtgaacaatctgaaacagaaatcaagaaagtaatctcacttacaatagctacaaataaaataaaatacctagaaattaacttagccaaagaagtgaaagatctccacaataaaaactgtaaaatgttgatgaaagaaacacacacaaaaaagaaagatattctatgttcatggaatgggagaataaatattgttaaaagtcayacaattcaaagcaatctacagattcgatgcaatccctatcaaaataccaatgacatatttttttaaaccctaaaattcttgtgaaaccacaaaagacccagaatggccaaagctatcctgagcaaaaagaacaaaactgaaagaatcacattacctaatttcaaattatgctacagagctatagcaaccaagacaacaaggtacaggcataaaattagacacatagaccaatgggacagaatagagaacccagaaacaaatccatacacctgcagtgaactcattttcaacaaaggtgccaataatatactttgggaaaaagacagtctctttggtaaatgatgctggaaaactgggtatccacaggcagaagaatgaaactagac

SEQ ID NO: 140751 - DNA, 606 bp, Homo sapiens
taggccaaatttatttttaaaatttctttcttcagtactaaattaactttagcttactataactttttcactttgcaaacattttaattttttaactctgactcttttgttataatacttagcttaaaacacaaacacattgcaaagctctccaaaaatactttcttcctttatattcttattctataaggtttttcctatttataaagcatatttttactttttaaacatttttattaaaaactaaggcaaaaacacacacattagcccaggtctatataaggtcaagatcatcaatatcactatctttcacctccacatcttttcccactgaaagattttcagaggtagtaacacrcatggagtgttacttcttttggaatacctcctaaaggaattgctgaaggcagctttacatttaacgttgttgtttttttttttgtaaatagaagaagtacactctaaaattacaataaaaagtataagccagtaacatagttgtttatgtacattaccaattattaggtgctgaacctaattgtatatgttagacttttatgcaactggcatcacagtaggtttattcacaccagcatcaccacaaac

SEQ ID NO: 140752 - DNA, 606 bp, Homo sapiens
taggccaaatttatttttaaaatttctttcttcagtactaaattaactttagcttactataactttttcactttgcaaacattttaattttttaactctgactcttttgttataatacttagcttaaaacacaaacacattgcaaagctctccaaaaatactttcttcctttatattcttattctataaggtttttcctatttataaagcatatttttactttttaaacatttttattaaaaactaaggcaaaaacacacacattagcccaggtctatataaggtcaagatcatcaatatcactatctttcacctccacatcttttcccactgaaagattttcagaggtagtaacacgcatggagtgttacttcttttggaatacctcctaaaggaattgctgaaggcagctttacatttaacgttgttktttttttttttgtaaatagaagaagtacactctaaaattacaataaaaagtataagccagtaacatagttgtttatgtacattaccaattattaggtgctgaacctaattgtatatgttagacttttatgcaactggcatcacagtaggtttattcacaccagcatcaccacaaac

SEQ ID NO: 140753 - DNA, 554 bp, Homo sapiens
agagctccaaaatggtggcatggctccaaaacaccacaatagctatgtgaaagatttcattataatttttttgttgttgttgccgwgaacactctatatttccccacatattttgtatatgtagacatttcatggaatggctttggcagacagccacatcaagagattgagctccacattgagggtgagcacaaagcttaagaaggagattacaccaacagatgggcactataatgctgtctaagcttggctggaggggagacaccaggccagacattcttaggaaactgcaaaaccctggaatttttggaaattacaagaccttgaaatgttcccaaagtcttagaaaagacatgaggcatctcatagaatggagggcagggagtgggtaaactggtcttgctgttttttattatcattacgtatgatgacctctgttagtattcaagttatatatcatttttgtgtttattcccaatgatgttttagaacaaaaaaatgtaaagactgtcacttcatgagttttctcctttatgtttatttttctgttcatg

SEQ ID NO: 140754 - DNA, 554 bp, Homo sapiens
agagctccaaaatggtggcatggctccaaaacaccacaatagctatgtgaaagatttcattataatttttttgttgttgttgccgtgaacactctatatttccccacatattttgtatatgtagacatttcatggaatggctttggcagacagccacatcaagagattgagctccacattgagggtgagcacaaagcttaagaaggagattacaccaacagatgggcactataatgctgtctaagcttggctggaggggagacaccaggccagacattcttaggaaactgcaaaaccctggaatttttggaaattacaagaccttgaaatgttcccaaagtcttagaaaagacatgargcatctcatagaatggagggcagggagtgggtaaactggtcttgctgttttttattatcattacgtatgatgacctctgttagtattcaagttatatatcatttttgtgtttattcccaatgatgttttagaacaaaaaaatgtaaagactgtcacttcatgagttttctcctttatgtttatttttctgttcatg

SEQ ID NO: 140755 - DNA, 547 bp, Homo sapiens
tctcaccaatgtatttttctatgctgagtgaaaagaaataacatctaggctgtttttcaggaaggactagatgttttgaaaggatgaataagtcacatgtgattaaatccacccccaactccaatattttcctaagactttggatttcttgatttatattaaaccaaagcatttctgatatcttcacttcatttgctatagactaccatytggtccagctttaataataaaaaaagtccaagaaaattactaaatctacttccagctatttgggctagtttgacctagtacgttaaatccagaatttattgtaagtgcgccaatatagacattttcaacctgatgtaaaatataatttcccctctttggtctagcatccttaggaccaattccctcatacatatccaaggtcttttgctggtgtaaaatgttgaaatgtataagtcaacatctggatttggtttgttgaatttatccccaagagcatactgggatctaccttcagatgccaggtgaagtagtagagcaaggcagggggagtcttagc

SEQ ID NO: 140756 - DNA, 567 bp, Homo sapiens
atggccctgggcaattcactcctctaggccttagttatttcaaatgaaatatgatctagaatactttataattcagaaatcaatcctttaaggcagagtttcaggactcaatggaggaaaacatgggaacatttggaaaaacttgagcaagtctcatttcatttctactatcatgacacaggcctttatattctctcacagatgaggcaggttgagtagaagcaaatataagcattatcacttacttgcaaatataagataatcctttttataacatcaacytaaaggtgacccatgacttagcaacatcactacgtggttgatgcatgggccacctttatctccctcaggaacagctggtatcactggctgaaaatagtacaagtgtccactcttctttcattttctcttggcagtgctagtaaatcactttaagcatgattcctgctgagcttacctgcacctgacaaagtaatgggacaatataatacagtgagtccattgtgggtgtcctacaaattaaacaaaatataagttgattttgcaagtccatttaaataaggccaa

SEQ ID NO: 140757 - DNA, 562 bp, Homo sapiens
gggattacaggcgtgagccactgagcccatcgttaagtagcctttgtaatcttcttcaccagcatacagggaaaggacaaaaatacatggaactcaatatattacttattaataaaggccaaaaaaagcatttatttaagtgagttttgtaaattactcccattctccatttctacccatagcatctaaagaatgtgaaaagtatcaagaaattttctctaaattatttttaaaattccaaacacttaaaaaagataaatttagctttatatctttaagaatacccagagaaacaaaacaaaaccaagttcctaattgaagactcccttataattagcatacaacatgtaaatagaagctwcataaggtactttgatttttttttttggtatcctgaatctgtctacccatataaatagcatgagaaactaggggatgggggtggacaattttcttctttaaaactgaatgtttatttaacatgatttctaaaatacagaaggaaattgttaaaaattctgttagtgggctataaagtagtaagatgtttcttactacacat

SEQ ID NO: 140758 - DNA, 441 bp, Homo sapiens
cctaggcatttaattttatttgtgctattgagattagtttttaaacttctttttcarattgttcactgtgggcatatagaaatgctactgagttttgtatgtggattttgtatcctgcaacttcattgaatttgtttataagctttaacgggtttttgtgttgtgtttgttttttgtttttttttgagacggagtctcgctctgtcgcccaggctggagtgcagtggcgggatctcggctcacagctctagcagttttatggtggagtcttcaggttctgctgaatatataataagatcatatcatctgcaaacaaagataatttgactccttcatttctaatttggatttcctttatttctttctcttatctgattgctttagctgggacttccagtactatgttgaatagcaatggtgaaagtggtcatccttgtcgta

SEQ ID NO: 140759 - DNA, 446 bp, Homo sapiens
cacttctgtggttaattcctaggcatttaattttatttgtgctattgagattagtttttaaacttctttttcaaattgttcactgtkggcatatagaaatgctactgagttttgtatgtggattttgtatcctgcaacttcattgaatttgtttataagctttaacgggtttttgtgttgtgtttgttttttgtttttttttgagacggagtctcgctctgtcgcccaggctggagtgcagtggcgggatctcggctcacagctctagcagttttatggtggagtcttcaggttctgctgaatatataataagatcatatcatctgcaaacaaagataatttgactccttcatttctaatttggatttcctttatttctttctcttatctgattgctttagctgggacttccagtactatgttgaatagcaatggtgaaagtggtc

SEQ ID NO: 140760 - DNA, 441 bp, Homo sapiens
cctaggcatttaattttatttgtgctattgagattagtttttaaacttctttttcaaattgttcactgtgggcatatagaaatgctactgagttttgtatgtkgattttgtatcctgcaacttcattgaatttgtttataagctttaacgggtttttgtgttgtgtttgttttttgtttttttttgagacggagtctcgctctgtcgcccaggctggagtgcagtggcgggatctcggctcacagctctagcagttttatggtggagtcttcaggttctgctgaatatataataagatcatatcatctgcaaacaaagataatttgactccttcatttctaatttggatttcctttatttctttctcttatctgattgctttagctgggacttccagtactatgttgaatagcaatggtgaaagtggtcatccttgtcgta

SEQ ID NO: 140761 - DNA, 554 bp, Homo sapiens
aagtgtcggaggagtatttgtgaagttaaaagagtgttctaaccaaagctatacggttattccttgtagatggtaaagaaagaatgagagcattgttggggtttaagggattgcattaacagagctctgtgtaatatggtgaagtaaaactccactgggagagaggcagttttgcaaattatggtgcagtcaggtaattactcctctccctccaagtttagttgatactctctgagatttaaagtttgtctctgtgagatatgtaagtatgtgtgttcaacagtctctccatcatgtaaaggaagctagatggcttgttcattgacttaaaaggctaattaccarcaatcacaattccttctagtctgctgttcctctcagagaggaaaatgttctaaactggaggaagtatagtgctgggcagggaaaaggacagatcgtgagttgagcctgtgataagagccaaaaagcctgcagagtttcacaccatggagattagaagaagaaatggtggagggaggtacaggtcaggtggtcaaggtcaaggtgaataa

SEQ ID NO: 140762 - DNA, 554 bp, Homo sapiens
aagtgtcggaggagtatttgtgaagttaaaagagtgttctaaccaaagctatacggttattccttgtagatggtaaagaaagaatgagagcattgttggggtttaagggattgcattaacagagctctgtgtaatatggtgaagtaaaactccactgggagagaggcagttttgcaaattatggtgcagtcaggtaattactcctctccctccaagtttagttgatactctctgagatttaaagtttgtctctgtgagatatgtaagtatgtgtgttcaacagtctctccatcatgtaaaggaagctagatggcttgttcattgacttaaaaggctaattaccaacaatcacaattccttctagtytgctgttcctctcagagaggaaaatgttctaaactggaggaagtatagtgctgggcagggaaaaggacagatcgtgagttgagcctgtgataagagccaaaaagcctgcagagtttcacaccatggagattagaagaagaaatggtggagggaggtacaggtcaggtggtcaaggtcaaggtgaataa

SEQ ID NO: 140763 - DNA, 554 bp, Homo sapiens
aagtgtcggaggagtatttgtgaagttaaaagagtgttctaaccaaagctatacggttattccttgtagatggtaaagaaagaatgagagcattgttggggtttaagggattgcattaacagagctctgtgtaatatggtgaagtaaaactccactgggagagaggcagttttgcaaattatggtgcagtcaggtaattactcctctccctccaagtttagttgatactctctgagatttaaagtttgtctctgtgagatatgtaagtatgtgtgttcaacagtctctccatcatgtaaaggaagctagatggcttgttcattgacttaaaaggctaattaccaacaatcacaattccttctagtctgctgttcctctcagagaggaaaatgttctaaactggaggaagtatagtgctgggcagggaaaaggacagatcgtgagttgagcctgtgataagrgccaaaaagcctgcagagtttcacaccatggagattagaagaagaaatggtggagggaggtacaggtcaggtggtcaaggtcaaggtgaataa

SEQ ID NO: 140764 - DNA, 469 bp, Homo sapiens
gtttgctgaggaccacacattgtaactttatcattagaattaagtctttagaaacaaatgaggaaaaactgggagtttttaatacaagcaatggtttacctaaaagaagtgcttctttcatgaaaagaaaataatctagcaatattccaccttaaagaaggaatttcctcctgatttctgtttttaggttatttgcttttagctgttctgctgccacttttaacagtctgagctaactccctctccatgtcactatcttactccaattgcttggctaccttaggaaatgcaaactaattttaatattagtctaagcaaaaatagagcaggatcaattggctkctgaaaagaaataccatgacacatacttaaatgaatgagaagaacatgggggattatcccatagtgtttattagcccagcagggctttcttagggacatgtcatctatagagaaataatactccaat

SEQ ID NO: 140765 - DNA, 506 bp, Homo sapiens
ctgacagtcctcaacgatacttttatttttatatatccactatgctcaagattagtttattaattctgtagcaggttaagggagtggaggcagctggtaatcgttgattcatttatatattttcattcaatagccatctgctgaatgtcttgtatgtgccaggtccgggttagggttggggactcaatattgaatatgactgcacagcccctgttctcagcctagtgggagaaaasataagtaaatgagcaattgcactctgtgtgaatgtgcagtaatgcggggacacaggatgctgagagagcacatagttgggacatccaacccagacatggttggtaggttagggggtggttatggggaaagtctcttgggaaaaataacttttgggagagtggcagccatggaaataaaccacttggatttcccttcaagaaagaacgtgctgttcagcttctagaaatgcagttatctgatagcatccagctgttaggctctcaggatta

SEQ ID NO: 140766 - DNA, 257 bp, Homo sapiens
cctctcattctgtgtccctctccctctctctctctggcacctgttgctttcttgctccagtgaggctgtttggaactcctaaccaggtytgcccaccgatggatgtcctatgttcctagattattcctttactcttcattgattccataaatcctcccacttcctcagcacactgatctcatgaacccatttggaggaaaaaaatctgattgaccttatttatgctatgagttgggtgacttacgcattaagatgcg

SEQ ID NO: 140767 - DNA, 565 bp, Homo sapiens
tatttgcaccaggcaaatgtccaccaaagcctcaacctccagtgctgacctctccttgcagctctagccttcatgtttaattgcccactccatgtctccactgttacctttaaactctttcttccacccaatttccctagctgtttgtagcaagtatgaattttaatcataaactcaaaaggtcaagaaacatcacattacttatttttctttaaattaatataaatctgactctgcaatccctttctcccaagctggcaggaagttcaattcatttatcataagggcaaggccccatctttttttttttttttwtttttgagatggagtctcactctgtcacccaggctggtgtgcagtggtgcgatctcggctcactgcaacttccacctcctgggctcaagtgattctcctgtctcagcttcctgagtagctgggactacaggcgcatgccaccatgcctggctaatttttatatttttagtagagacggggtttcaccatgtaggccaggctgatcttgaactcctgacctcaagtgatctgccctccttggcctcctaaa

SEQ ID NO: 140768 - DNA, 619 bp, Homo sapiens
attaagtgagatggtgcacaaaattgtccaaataattaaacttgctggctcttggactggaacacatagagtagaattggagtcagttccaggcacctgccatacatccccactgtaggaacaaagggtcttaagacactgggagaggagaagtctgctctgaaattgcctgggagaaggtggtgcaggtcgctccaggtggcgagttatgaacaggtgctcagcacacttgagaaaatgaaagaattctagtggtgcctcctttggatgagacccgaatctcatgggtgaccaccgcctgctgcagaagcccagcctgctattccccatgccgtgctggaccacatggtagtgtcagaaccgccagcccaccgggatgtcggtggtgctaagagttcagacgcagcccccgtaccacataggcatgacgtttcagcttgtcacttggtagctctgtgatgttgtaaagtttcatagcccttctatgtctcactatatttttaaccggtaaaatggaggtaataacgcatgtttcaaasgctcactgtgagagtcaatgagcctttgaaggacgtacccttattatccacattctcccgctatttcaacctccctgcac

SEQ ID NO: 140769 - DNA, 557 bp, Homo sapiens
aactctaaagtcatattatataataatacataatataataggaattatatatgcatatattatgtaatagtatccatatgtaatacaagaaaatataattcatttatattatatattgcataatataaattataaaaatattatatataattatatatatccatatgtattcatggatatatatataattggatatatatactcatatatatcaatgaatgtatataattcatattttatatatgtatatatttaattcatgaatatgmttatatatgtgtatataaatatatacatattttatgatatataaaatatgaattttgtagtcccagctactcgggaggctgaggcaggagaatggcatgaacccaggaggcagagttgcagtgagccgagatcacgccactgcactccagcctgggtgacagagcgagactccatctcaaaaaaaacaaaaaaaaaaagaatttagagttcatgttatatatacatatatacacttacatgcatatataatataaattttaaattcatatttatataagataaatata

SEQ ID NO: 140770 - DNA, 418 bp, Homo sapiens
catcaagcctgtttcaatggtgtgcatgtttccctgctattggcctcttcaaccccagaaaaggtcatgaactatatccctccagctgcccggcttgttacgtcggctgatgggacagatggcagtgccgatgataacacattaacgaagtgctgtttgccttcattaaatatcacaagcaagttgttcttttattctataaaaagggtgtgtggaaaatatagagtgaatgtagccaattaatttagcttttattcaaaacccccctgaccatgattgacacccaaacatgcttaatccattaaccatcctgggctcaggatcaatgttttgtcagcaggaaatatttcattttttagcaggaagcaaggggaaggcctctgaatgatggaytgcagacagacatgaaactgccttt

SEQ ID NO: 140771 - DNA, 522 bp, Homo sapiens
tttgctaatcacctcaaaatgtcttttattatagccagtgtgttagagtgcaaaaaaataagtattcacattgcatttagttgataaatctcttacgtcttacttggaaggcatttccctccccgctgccaccgaaccatcgtttcttcaatgaaaaggcagatttgtttttcctgtgtttttttctcccattgtgattggctgcctgcatgctagaacttttatgtaacatgttcatctctgtaccatatatcttctgtcaattggtagatagacctacagccttcattaratttggcttcattctttaggcaaaattaattcattgactgtgtttgaacttcttgttgcactgtatctggaggcaggtattatggttggccagcacggtcccatggtgccaatctcaatcctctttcaaaaaattgcctcagcatactttgctgctcctgatctaggagctactggtctaggagcaattttattcaggctttcggagttatgattttcaatttctactat

SEQ ID NO: 140772 - DNA, 535 bp, Homo sapiens
gctgtggcttttgttgactgtatgaccaacctcctatcaacttaagaatatcttgcggaaaaatgtgaggttttataatttattcatgagtttttagtcacttttaattggagacaatgaagtggttataccaaataaaaggcctayaaattaaatttacatttttctagtcattatactaatatatgcttatcaagtgctaaactttttaaatcatctgcagtaaaatgcttagagagaggagggtgatagtgctaaaactggttgaaaatctgacacatattagacattaaggtaacagacttgtccaaggtcacagaactaaaacatggtggagctccctaattccatgctacagttttaagctattgataatatcctgcaagttgttttattacatataaatccaagtggagacacttagagaaattgattaaaagaaaaactgttgagcataatcaaacagtactgttgaaaggctgttttattttatttgcagagcattttatgttagccactatcctgttataaggac

SEQ ID NO: 140773 - DNA, 535 bp, Homo sapiens
gctgtggcttttgttgactgtatgaccaacctcctatcaacttaagaatatcttgcggaaaaatgtgaggttttataatttattcatgagtttttagtcacttttaattggagacaatgaagtggttataccaaataaaaggcctacaaattaaatttacatttttctagtcattatactaatatatgcttatcaagtgctaaactttttaaatcatctgcagtaaaatgcttagagagaggagggtgatagtgctaaaactggttgaaaatctgacacatattagacattaaggtaacagacttgtccaaggtcacagaactaaaacatggtggagctccctaattccatgctacarttttaagctattgataatatcctgcaagttgttttattacatataaatccaagtggagacacttagagaaattgattaaaagaaaaactgttgagcataatcaaacagtactgttgaaaggctgttttattttatttgcagagcattttatgttagccactatcctgttataaggac

SEQ ID NO: 140774 - DNA, 584 bp, Homo sapiens
ttctgcctatggccttgcttcatagcaatcattgctaacctaacagcccaggattggaacaaaagacttttagggctgaacataaaaactaccttcaattaattcccatcttcagtatcaagcagaatagtgtaaaattaacatctcaataattacccagtcacaggtgtttaagcgagttaattcttgtcagcaggatgccctggatgaggggctagcaggaaaggagaaagggagtttaaaggctgtgtcrtatccatatccacaggtgtctgctgagacacccacctaggatgatgagaaagtgactctctaaaacataaattgatgagctacagtaatagaaagagagggccatattgcaaggctgtaaaaggtgtgggtcaaacttttaatcttctacattagataataaatatccttattaggagatctcataaaaaaaagaatttgacatccaatctccttgttatttcactttcctactctccccacagtgattcctgctgtgagattgtcaagcaaacatgtaagacttagtgacgcacttgtagcctggagcagtagagagcagtttctaacaa

SEQ ID NO: 140775 - DNA, 584 bp, Homo sapiens
ttctgcctatggccttgcttcatagcaatcattgctaacctaacagcccaggattggaacaaaagacttttagggctgaacataaaaactaccttcaattaattcccatcttcagtatcaagcagaatagtgtaaaattaacatctcaataattacccagtcacaggtgtttaagcgagttaattcttgtcagcaggatgccctggatgaggggctagcaggaaaggagaaagggagtttaaaggctgtgtcatatccatatccacaggtgtctgctgagacacccayctaggatgatgagaaagtgactctctaaaacataaattgatgagctacagtaatagaaagagagggccatattgcaaggctgtaaaaggtgtgggtcaaacttttaatcttctacattagataataaatatccttattaggagatctcataaaaaaaagaatttgacatccaatctccttgttatttcactttcctactctccccacagtgattcctgctgtgagattgtcaagcaaacatgtaagacttagtgacgcacttgtagcctggagcagtagagagcagtttctaacaa

SEQ ID NO: 140776 - DNA, 567 bp, Homo sapiens
catattgcaaggctgtaaaaggtgtgggtcaaacttttaatcttctacattagataataaatatccttattaggagatctcataaaaaaaagaatttgacatccaatctccttgttatttcactttcctactctccccacagtgattcctgctgtgagattgtcaagcaaacatgtaagacttagtgacgcacttgtagcctggagcagtagagagcagtttctaacaatctttgcagcttccatatgggagttgcaatgattagttttttttcytccgacaagctgtatttagcatagaaaaaaaagtggcactatgttgaaatagctgagaggagacaacttgggtaacagggagaatggcattaggttcgggagatgcaaggaatgtagataatgtaaaaaattgtaagtataaccagcatcagttgagtttagatgtgggggtgggaggaatcaggaagttactaaccacatgattgcagaaaataagcataagaagttcggaatagatacctggaagggtgtaaagcaaacaagaaaatatggtttttctacttaccaaaat

SEQ ID NO: 140777 - DNA, 426 bp, Homo sapiens
tggtagtggtggtggtggtggtggtggtcgtgtgaatgatccctcctgatgtctagaaagtatgaaaggtacaagctatagtagagcttttgtatccctagcaggaataagaggagcattattgcctttcttattctaagtgttgtcgcaatcatatgaaggtggcactgggctatgcctgtaagaacacttggcaagggaaagtcacaaggtcacccataagtcatgacatgaaatgtagttttagtgcaaagtccaaccctataagaaaattgagagaaactaatcacttaatagggctgacttcattgaattttttgaaccacagtrtaaggcaaatggataaactattcctcatgttagactacactagagagtggaccttttacagtgatgcccgtgactaaatggcagatgcttagcagg

SEQ ID NO: 140778 - DNA, 535 bp, Homo sapiens
cattcctcgttttcaaaattcatcacacaaacttgtcctccagggctccttaggtttttcagaaacaaagtatcttcttktgttgggtagatatgagtggtttttatttccttgaaggaaatcaaatacatttaaaacaaaatacatcgctcctttagcattatagaaaactttcaatgctgtaggtcatataagtattaataattacaaaataatcactgtcttgacaataggatggttttcaaatgtgtttttatattacatccttctatatggaaatgtgtgaagaattactactcttgtggattgcttcaaaaacactttgccaggtcattaattgtcagaaatcagaatatttaactgtatattgaaattacccaatatatgtattcagtgtacatgtatttaatatactttttagtgcaaatatgggcatacatcatttatatttgaaaggaactgagaaagacagaaacctgagtattttacagaatttatgcaaataaaagagatgactgccggaagccaaattagc

SEQ ID NO: 140779 - DNA, 501 bp, Homo sapiens
agatctttttcagacaagcaaatgctaaggaaattaattaccaayagaccagtcttacaagagttcttgaagggagtactaactatggaaaagaaagacattaccagccactaaaaaaaaaatgcacttaaatacatagaccagtgacattataaaacaatgaaacaaacaaggtttcatcatagccagataataacatgatggcagaattaaatctatacttcttattactaattttggatgtaagcagactaaatgccccaaataaaagacatagagtaacaagttggataaagaagcaagacctaagccttacagtcttcaagagactgagctcatatgtagtgacacccataggctcaaagtaaagtaataaagaaaaatctaccaagcaaacagaaaacagaaaaaaggcatgcgttgctattctaatttaagacaaaataggctttaagccaacaaagactaaaaaagagaaacaagagcactacataatggtaa

SEQ ID NO: 140780 - DNA, 504 bp, Homo sapiens
taacattttttttctaaacaagctgtttttaaaatgccagagtatttgagaggtactttagtactttaaattgtgaataataaaaatacatttatgtactttgtatatctgagtatcctcccagaactgttcattaaactttgtcaagctaccattaaaatccacacattcagaggataaaacttagagagcttttaaaacttaagtatttaatgcacttgatttggtcttttargcccaggagggggctagctaagtgcctgagatgttcaaagttaccatcataacagctaagtccctttctcccctccctagggagctggtaggagctcgatctttgcaaagggatttttaatcttttattcattattcttcacaaagcacttgcctgatagcagggtacaacctgacagtaggatgtcctttttcccaacttcaataatctgtttttttctctaccttctgtctttttctcatttaatgtgacctcctctttctcaaacc

SEQ ID NO: 140781 - DNA, 599 bp, Homo sapiens
gtctttttctcatttaatgtgacctcctctttctcaaaccctgcacactttaatttggtcattttttttttttttttgtcttctactgtggggattcagagtgttcaaaaccctacttccaacatcattgtttttccatttgttagagctaargtaaactgacattacatcttgaggtgaccatgtctacatcttttgctcatagaatttactgaaattgattaagtttttttctgggttggccaggctgcccagacatgagaagggctaagtgctgaatggtgtttgccgagtatttgcattgtatgattagcagaatcatagaatcttagaatggaaacagaacttatctgtctttggtcagtttcctatcatgattccttctccaataattctatggaaatgtttaaatctttgctttaagcctttctaagattttagagctcagtactatctactgaagccttttacattgttggacaattataatgttataaagatctttctcatattaagcagaaatatcatgagctacattttcctattcccatattcaggcaattctaataaatctaaatgcctttctaaggcatgactta

SEQ ID NO: 140782 - DNA, 508 bp, Homo sapiens
ctactcttgatatacttcatttacattgggcaaatatgaaatcattgccaccttttaaccttttaatatctactccttaggaagtattttagcttgttctatggtacacagcagaagtgggacaaatactattttgcatcaaagaaaaggatgtatattgctttgcctctttctgcacttgcacttcttactgtatattttaagaacactagtagtaatctgtgtggtaagttattyaatcaagctttgtacagtaaaatataaggtcatattgctggatgtttactagttgcaaaaatatgctaatggtacataattgcatattgctgcaccacacacttcaccctcttaaatgaggaaatagctctaacagcatttcatactctggaggggacatttcttcttgaaaggaagtttgatacacaagtttttcttccaaaaggatttcaccagaaaatatagcatactgagatgggcaaaatacagctttttgttcgctctacatata

SEQ ID NO: 140783 - DNA, 446 bp, Homo sapiens
aaatgaatgacttcaaagacttcaaaatattctcacagtgaggaagacatgcctgagcaaaaccccaaatcaaggagacatttactatgactagatatatttctaataacctatatgacaaaattttctgtatacaaaatttacaaactgtagtcagggacacaatatttgaaatacatatactagaaaacttctctatctatagttacatagtacccttatatatcaatgaggaartggcaatcatcacttagaaaatatagtaaaggctatgaagggatattttacaaaaaaagaatttcaaacggccaataaaaacatgaaactctccaacagttcagtaaatgtaaattaaacattttgagaaacaattttataccactaagggttaaaataatttttaaaaatgttatctagtgtaatgacagataggaaatagtcattct

SEQ ID NO: 140784 - DNA, 446 bp, Homo sapiens
aaatgaatgacttcaaagacttcaaaatattctcacagtgaggaagacatgcctgagcaaaaccccaaatcaaggagacatttactatgactagatatatttctaataacctatatgacaaaattttctgtatacaaaatttacaaactgtagtcagggacacaatatttgaaatacatatactagaaaacttctctatctatagttacatagtacccttatatatcaatgaggaaatggcaatcatcacttagaaaatrtagtaaaggctatgaagggatattttacaaaaaaagaatttcaaacggccaataaaaacatgaaactctccaacagttcagtaaatgtaaattaaacattttgagaaacaattttataccactaagggttaaaataatttttaaaaatgttatctagtgtaatgacagataggaaatagtcattct

SEQ ID NO: 140785 - DNA, 445 bp, Homo sapiens
tgctagtaaaactaaaccccttactaggctgaaaagtccccatccagtctgattttctttttattttttgaccacactgcagcgggttgaatggtggccccaaaaatatatgtccacctacaaatccctggaacctgtgaatattaccctacatagcaaaaatatgtgattaaaataagaatcttgacaagaggcacttatcctggattattcaggtagctctaaatgcaatcacaagcaaccttgtaggacagacacacagagaagaagacacacagagaagaggaggaggcaatgtgaccacagaggtagagactggagagatgtggtcacagtcaaagaatttctgagccaccagcagaggcaaggaacgggttctcccctggagcctttggagggagggcagcyttgtcaccttgatttcagatttctggcttccagatct

SEQ ID NO: 140786 - DNA, 528 bp, Homo sapiens
tcagggggagaaccttgaagcaaatagaagcttgcagttttaaaataaatggcacagagtcctgagtgagaagacaaacactctctaatagctaaaatgacagagtatatatagctgctttcaggtcctaaaaaaataaaattatgttaggttcgtgcctgtcaacttgagactcttccacaatctttgagaagagaaactaaggcaaaaagatgttaaatagctattccattcagttgaggaaaaataaattgtacatgkttcttgacatattactaagtgctctttagaccttagctattattatttcaaacaaggagaaaaacatgtacgaaaacactggcatgaaagagaagatactctacttaaccttgtattgcctccattccagcagtttttcagttgctttacatctctgcttccctgtttgaccatgtgtactgagctttgtacagaaatgaatgagtgaatgaataatgaagaatggagttaataccttgaatggtatctcttttttttttcaaattg

SEQ ID NO: 140787 - DNA, 558 bp, Homo sapiens
tgctttaggtggtatcattcatatcctatcttcacgaaaggaaacaagtggtcagaaatggagatttgtattggagacaccactcagtaacccacatgagtaataatttctatcacagtggcccttgatgacacaaggaaatattttgagtgattaatattggtcatgtagcatacaagatggtgtctttcagctcaatccaaaagacagtcagtcactctcaggttcatgcgggatttagatatgtagcatgtcctgattctttaaccaagctcaatgaggtgaaactagagcaacatttagtctagggctaattttgccccactactaaagctcaacccttctaagtactcttgatgctctatagattatgatgtttkttctctatgactgaaggaacaggagttcctagtattattttctatattccttccagattgttcgttccccagtttctgatcatttccgcaaatgcaagaactgatcagtactcacctgaagttgtgggaaggtgggaccctctgcagctccctggccttctctctgtgtgtggaacta

SEQ ID NO: 140788 - DNA, 558 bp, Homo sapiens
tgctttaggtggtatcattcatatcctatcttcacgaaaggaaacaagtggtcagaaatggagatttgtattggagacaccactcagtaacccacatgagtaataatttctatcacagtggcccttgatgacacaaggaaatattttgagtgattaatattggtcatgtagcatacaagatggtgtctttcagctcaatccaaaagacagtcagtcactctcaggttcatgcgggatttagatatgtagcatgtcctgattctttaaccaagctcaatgaggtgaaactagagcaacatttagtctagggctaattttgccccactactaaagctcaacccttctaagtactcttgatgctctatagattatgatgtttgttctctatgactgaaggaacaggagttcctagtattattttctatattccttccagattgttcgttccccagtttctgatcatttccgcaaatgcawgaactgatcagtactcacctgaagttgtgggaaggtgggaccctctgcagctccctggccttctctctgtgtgtggaacta

SEQ ID NO: 140789 - DNA, 481 bp, Homo sapiens
ttctcaggaacttttatactctttttcatagcagcttcaccattttacactcccaccaatagtgcacaaagcttctaatttctacacatcctagccaacacttatcattttctcttgttgtttttttttttttcatagtcgccatcctaatgggtgtgaggtgtgtgaagtggtatctcattgtggttttgatttrcatttccctaatgattagtgatgctgagcatctttcaggtgtgcttattggctagttgtatatcttctttggagaaatgtctattcaagtcctttgcccattttttaattgagttgtttggttttttgttgttgagctgtaggagttctttacagattctggctattaaccccttaccagagatatggtttgtaaatacatcctctgatttcataagttgcctttttactctgctgattgtgtcctttgattcacagaaatttgtaattttggtgtagtcaaagt

SEQ ID NO: 140790 - DNA, 481 bp, Homo sapiens
ttctcaggaacttttatactctttttcatagcagcttcaccattttacactcccaccaatagtgcacaaagcttctaatttctacacatcctagccaacacttatcattttctcttgttgtttttttttttttcatagtcgccatcctaatgggtgtgaggtgtgtgaagtggtatctcattgtggttttgatttacatttccctaatgattagtgatgctgagcatctttcaggtgtgcttattggctagttgtatatcttctttggagaaatgtctattcaagtcctttgcccattttttaattgagttgtttggttttttgttgttgagctgtaggagttctttacagattctggctattaaccccttaccagagatatggttygtaaatacatcctctgatttcataagttgcctttttactctgctgattgtgtcctttgattcacagaaatttgtaattttggtgtagtcaaagt

SEQ ID NO: 140791 - DNA, 346 bp, Homo sapiens
ttttgtgaaacaagtagattttagctgctcttatcaccaaaaaagtaacatgtgagaggacagatattaatctgcttcactattgtaaccattttactatctacacgtatctcatatcatcatgttgtaaacctcaaatatacacaataatatttatttttttaaaacaagaaatggygctttcaggactgagacttaaagtagattaacagagagaagtgttctttttgatataaaaatacaagactgtctgctaagagtggctccatcttagggggctagaagttctgtctgtcaggtatacctgtggttctgaatggctctgcatggcccatccatagaggat

SEQ ID NO: 140792 - DNA, 584 bp, Homo sapiens
attaataaatgaataattaggtgttttcaaaatgtaacattaggccattcatgtaataatggattatgtataggtctcatatagctataggtaaatatgaaatgcttggatcataaaaataaaataatttattcttcacaaactcaawtgtatgaaaattgaacatcctttcaaaaaatttatagcaaaacaatgtagaataatatataatatagataagtatgtatagaactctgtaactctcttcttctgcctatgtgtctctaaatgaaggctatgggcatatttaaatatggttgacatgatacaggagtggtttagggcctacagaggtgtccgtgtgacacaaagtagatgtggggcatgtgacatgaatgtgaggtaaggggtagttagcctgttaacaaaattgggtggagtccagagtcagcaaccttattaattagtcccagagctttatttttcttgaggcttgtgtggcctcggaaacaagactgtataagatataagaattagagcagaaaaaatgttaaggagtacacagagataaaagagatataggctttaaaattaagaatgcagat

SEQ ID NO: 140793 - DNA, 584 bp, Homo sapiens
attaataaatgaataattaggtgttttcaaaatgtaacattaggccattcatgtaataatggattatgtataggtctcatatagctataggtaaatatgaaatgcttggatcataaaaataaaataatttattcttcacaaactcaaatgtatgaaaattgaacatcctttcaaaaaatttatagcaaaacaatgtagaataatatataatatagataagtatgtatagaactctgtaactctcttcttctgcctatgtgtctctaaatgaaggctatgggcatatttaaatatggttgacatgatayaggagtggtttagggcctacagaggtgtccgtgtgacacaaagtagatgtggggcatgtgacatgaatgtgaggtaaggggtagttagcctgttaacaaaattgggtggagtccagagtcagcaaccttattaattagtcccagagctttatttttcttgaggcttgtgtggcctcggaaacaagactgtataagatataagaattagagcagaaaaaatgttaaggagtacacagagataaaagagatataggctttaaaattaagaatgcagat

SEQ ID NO: 140794 - DNA, 584 bp, Homo sapiens
attaataaatgaataattaggtgttttcaaaatgtaacattaggccattcatgtaataatggattatgtataggtctcatatagctataggtaaatatgaaatgcttggatcataaaaataaaataatttattcttcacaaactcaaatgtatgaaaattgaacatcctttcaaaaaatttatagcaaaacaatgtagaataatatataatatagataagtatgtatagaactctgtaactctcttcttctgcctatgtgtctctaaatgaaggctatgggcatatttaaatatggttgacatgatacaggagtggtttagggcctacagaggtgtccgtgtgacacaaagtagatgtggggcatgtgacatgaatgtgaggtaaggggtagttagcctgttaacaaaattgggtggagtccagagtcagcaaccttattaattagtcccagagctttatttttcttgaggcttgtgtggcctcggraacaagactgtataagatataagaattagagcagaaaaaatgttaaggagtacacagagataaaagagatataggctttaaaattaagaatgcagat

SEQ ID NO: 140795 - DNA, 442 bp, Homo sapiens
gcaagtaagctccgtgcccctttccatatgccttgccctatgcatcccttcctctgtatcctttagtcaaccrggtagaaaagtgttttcctgagttctgtgagtcactctagcaaattagtcaaaccaaggagggggttgtaggaaccccgatttatagccagtcagtcaaaagtatcacaggtaaaacaacttagggcttgcgattagcatcagaagtggtgggcagtcttggggactgagctcccaacctgtgggaactgatgctatctccagatagtgtcagaaccgaactagagaacacccagctggtatctgctgtgaaactaattgcttgcttggtagggagaagtccccattcatctgatgtcagaagtgtatgactgtgctgaattgagagtagagaataggaaaaacgtagggttttcttccatatctcaga

SEQ ID NO: 140796 - DNA, 519 bp, Homo sapiens
ctgaatagctgaacatatggagattcccggagggtagtgtgactggagagggcaagtaagctccgtgcccctttccatatgccttgccctatgcatcccttcctctgtatcctttagtcaaccaggtagaaaagtgttttcctgagttctgtgagtcactctagcaaattagtcaaaccaaggagggggttgtaggaaccycgatttatagccagtcagtcaaaagtatcacaggtaaaacaacttagggcttgcgattagcatcagaagtggtgggcagtcttggggactgagctcccaacctgtgggaactgatgctatctccagatagtgtcagaaccgaactagagaacacccagctggtatctgctgtgaaactaattgcttgcttggtagggagaagtccccattcatctgatgtcagaagtgtatgactgtgctgaattgagagtagagaataggaaaaacgtagggttttcttccatatctcagagcatagtgggaaaaactgagtttttt

SEQ ID NO: 140797 - DNA, 547 bp, Homo sapiens
tctacaaatcttactcaaatttcattaattatacgactaatgttcttcataacaaaaaaaatttctagtctaggtcaattcagcatcagatatttcatttcatgtctttttaacctcctgtacccacagcagttccttagactcttggttgtttttgaagaatacaggtcatttattttgtattaatagaatgtctctcagagttagtctgttacttatgattagattcaagttaatattttgatggatatttcagagcgatggagttgtatccttcttagtgcatcaagaaccaaattatatctttttcctttcctgatgwtgttaacattgatcatttgatgtaagattttttgctagcttcatgcaccctaatgttaccttttttttttctttctagttagtaaatatcttatgggaaaatactttgagactgtgtaaatgtttctcatctaccctacctaatacttttgcctgaaacaattattactatggtagttgtcaatgattttctaattccattattcccaatacatttattagttgg

SEQ ID NO: 140798 - DNA, 522 bp, Homo sapiens
tgaacaagttgtagtaggaagcatgctacaaaataataataataataataataataataataataaaggcctaataatatctgctaaaaccatttgactcctggttttaggcaaaagatttaaaaaggttaatgtctcatttactgcaaacatactatcacaagagagaaatattgaattttttaggtccactattcatgaattaaccatctagtgttaaaagctacaaactagatyattcaaagaaactggtaattttcttaactgccctttaacagtgaaaaatggatttgcatgctgctttagattgaagtacattaattcttttgtttatccacaggctatcaccaaccctctgaaaaagtcctactgttaatgattatatatgaagacattttcatcagctatctgccagtaacgttaggaactaaagcaattcatcaacaggccactcgttctctttttcaaattaaacaatctgttagatattattttccataggagaataaatatgatggattt

SEQ ID NO: 140799 - DNA, 565 bp, Homo sapiens
actctattgaaagtaagacaaataaaaatgtgttcaaagaacagttatgggatgggtagacttctttacaggtaaattttgccaagaactttgactttgaaataaggattttgaaataagaactttasacttcaaaataaggatgtagaatcttttaccgtaagctcctttaaaagcaatgaagagtctcagtttgtagcatttagggggacggattctacatgaaggcatggaggtggagcagttggcctacaaaagatcctgcaggttatgattttatgaaatgcttggtatgtatccctggatttatgattgagaacatgaaaccccaaaaaagttaattagcttagtcaaggttaagctgaattaacaagaagaaaacagattatttgaagatgattatttttcttctttcagttcataggttctacctgaaaagggaaaatggaagaaataaaaagaagagaaagccaggatgatctaactgcattgcaatgagtcctacattcttagaaatgtaatgctatcgttttccttttttgctcagtcatagttcagtacaaat

SEQ ID NO: 140800 - DNA, 555 bp, Homo sapiens
tcctaacgcatttcttttaagaattgtaacaggagatgaaacatagctttaccagtatgatcctgaagacaaagcacaatcaaagcaatggctaccaagaggtagaagtcatccaggcaaagcaaaagcaaaccaatcaagagcaaaagtcatggcaacggtttttttgcgatgctcaaggcattttcgctgttgactttcctgagggccaaagaatgatcacagctgcatattrtgagtgttttgagaaaaagagccaaagatttaggaagaaaactcctgggatgcttcaccagagagtccttctccaccacaacaatgctcctactcactcctcttatcagacaagagcaattttgggagagttttgatgggaaatcattaggcatccatattacagtcctgatttggcttcttctgaattctttttgtttcctaatcttaaaaaaatgtataaagggcatttaattttcttcagttataatgtaaaaaagactgcattacatggttaaattcccacaatccttaatactttagggatggactaaaatgctg

SEQ ID NO: 140801 - DNA, 555 bp, Homo sapiens
tcctaacgcatttcttttaagaattgtaacaggagatgaaacatagctttaccagtatgatcctgaagacaaagcacaatcaaagcaatggctaccaagaggtagaagtcatccaggcaaagcaaaagcaaaccaatcaagagcaaaagtcatggcaacggtttttttgcgatgctcaaggcattttcgctgttgactttcctgagggccaaagaatgatcacagctgcatattatgagtgttttgagaaaaagagccaaagatttaggaagaaaactcctgggatgcttcaccagagagtccttctccaccacaacaatgctcctrctcactcctcttatcagacaagagcaattttgggagagttttgatgggaaatcattaggcatccatattacagtcctgatttggcttcttctgaattctttttgtttcctaatcttaaaaaaatgtataaagggcatttaattttcttcagttataatgtaaaaaagactgcattacatggttaaattcccacaatccttaatactttagggatggactaaaatgctg

SEQ ID NO: 140802 - DNA, 455 bp, Homo sapiens
agtctttttctttttaatggtttctgccttcaatattatttttaggacagccctactccaagtattaataaatgtgaacattatttataattattcttactttcaaatttgaacctggctaaaatgtacattcttacaaggtgtaaggtaaagattgaaaaatttttgttgtttgaaacaactctgtttattctaataacatttgttaaataatctacactttgcccacaaatttaatattccagttttatcacatgcttctgatataattgattctctttctgaacttttatttattttcattaatctgtcttttatgctgacactagtactacttttagggatttttattaggctacattaaaattatatattattttgaaaaaatcacygttacctactttatatttttattatagatataataaaacattggcagttttctaatagcacaa

SEQ ID NO: 140803 - DNA, 527 bp, Homo sapiens
attataacatgaacaaaacaggccaaaatccttgccttcttggagcctacatttttatgggaagatacaagcaataaaaaagataaataagtgaaataaataaatctgatgttgctaagtacagtggagaattaggaagttgataggatctgtgtgtgtaagaacgtaaaaatttgagagaggattattgggaaagtcttactgtaaagatgatacttgagtaaataaagacttcccattcaaaagtcatgatctgggggcatgccaagcagggaggtagtatggctcaattaaagtgaggcagagaagaacagtaggcgaygaggttacacggatagtgaggtgggccttgtagaccactgtaaatcctttaactcttacagacacatcagaggatgtaggacagaggagagatttgatctgatccatgttttactttaattaattaatttatttatttatttattttgagacagagtctcactctgtcttctagggtgaagtgcggtggtgcagtcacactcact

SEQ ID NO: 140804 - DNA, 527 bp, Homo sapiens
attataacatgaacaaaacaggccaaaatccttgccttcttggagcctacatttttatgggaagatacaagcaataaaaaagataaataagtgaaataaataaatctgatgttgctaagtacagtggagaattaggaagttgataggatctgtgtgtgtaagaacgtaaaaatttgagagaggattattgggaaagtcttactgtaaagatgatacttgagtaaataaagacttcccattcaaaagtcatgatctgggggcatgccaagcagggaggtagtatggctcaattaaagtgaggcagagaagaacagtaggcgacgaggttacacggatagtgaggtgggccttgtagaccactgtaaatcctttaactcttacagacacatcagaggatgtaggacagaggagagatttgatctgatccatgttttactttaattaattaattwatttatttatttattttgagacagagtctcactctgtcttctagggtgaagtgcggtggtgcagtcacactcact

SEQ ID NO: 140805 - DNA, 590 bp, Homo sapiens
agtatagcttttcaattcctactttagtttttggagagggccatggaaggaaaggttacaaacatacattatcaacttcaatatgaatctagaaaccctgattcacatttttaagattgaggaaagtctttatagtttattctttcgtgatcagtgtattaaaatgccggttttytatgcctttcaatttatgagataaatggaatcattggccaatatcatggataaaatagttgtatctcagtaatagcctgtaaatgacaaaatccattttgtcctccaaactatcatctaacctaaaaccagaaaatcattaagctcattctgaactggttctgtaatctgttaattttgcataaatatcctacagaaatgagggtccagaatcagcatacctcaaatattaaacacaaactttcactcctctcctgtggatccaaatagattctcaatagtacatcagaggttcaagaaaagaaaacagctggaagttttaaatcaatagtcctccatttatatgatagaatctgggaattatatttttcttgagcaagtagcaatacacttataacagccttggtgttactgtt

SEQ ID NO: 140806 - DNA, 590 bp, Homo sapiens
agtatagcttttcaattcctactttagtttttggagagggccatggaaggaaaggttacaaacatacattatcaacttcaatatgaatctagaaaccctgattcacatttttaagattgaggaaagtctttatagtttattctttcgtgatcagtgtattaaaatgccggttttctatgcctttcaatttatgagataaatggaatcattggccaatatcatggataaaatagttgtatctcagtaatagcctgtaaatgacaaaatccattttgtcctccaaactatcatctaacctaaaaccagaaaatcattaagctcattctgaactggttctgtaatctgttamttttgcataaatatcctacagaaatgagggtccagaatcagcatacctcaaatattaaacacaaactttcactcctctcctgtggatccaaatagattctcaatagtacatcagaggttcaagaaaagaaaacagctggaagttttaaatcaatagtcctccatttatatgatagaatctgggaattatatttttcttgagcaagtagcaatacacttataacagccttggtgttactgtt

SEQ ID NO: 140807 - DNA, 433 bp, Homo sapiens
gggttaaatgctttggagtgaccttgaacatgagaggcactataatggtcatgcatttgatttatgatttgactgagatgaccatgacagggtgcgacgaagtgcccttaaggttagcacaagcattctagatccctcacccaaaaaggataagtctgagacttcaagttaagcaggattatgggggaaagcaaagcaattatataaggaaagatggaaaaaaagattggytgaggccagcacagcacacttgggccaaaagataaccttgagaagataagtaattgattaggataatagagaagaaagatgggagagcctgagaccttatatctttgtggagatattacattatctctagtctgcctaatattgaatttattttatatgatagaatatcttttaagccattgttttggggcttttctgtgat

SEQ ID NO: 140808 - DNA, 582 bp, Homo sapiens
gacttaatggcaagacagcatgaaggaacattctgaggtgatgaaaatattccatcctcacaggaatagtggttaccctggtgtgtaaattcatcaaaacatcaaattgtatgctaaaaatctgtacatttcagtacacatgaatttaatctactttttaaaaagtcactatacaatgttcacaattaaaagcagaaagagaggactgggcgcggtggctcatgcctgtaatcccagcactttgggaggatgaggtgggtggttcacgaggtcaggagatcgagaccatcctggctgacacagtgaaaccccgtcttcactaaaaatacaaaaaaaactagccaggyggggtggcacgtgcctgtaatcccagttacttgggaggctgaggcaggagaatagcttgaacccaggaggaggaggttgcagtgagctgagattgcaccattgcgctccagcctggtgacagagagagactctgtctaaaaaagagaagaagaaaaaaaaagcagaaagagaaaattaaacattaaacagttttagccatgcttttgagttattcgtgaaacttcacctttataa

SEQ ID NO: 140809 - DNA, 590 bp, Homo sapiens
atagttctcttaaaatttgtgttctgcattagtctaaagggcaatttcatctatgctctgattacataattgaaaaaatatgaatttgtaaagaaaaaaatggcaatgctaccagaccagtgcaactstaagtgctggcttctggcctgtgtgtgcactagtccacaatgaggttaaaaaaaattgagagtaaatgtttagaaaattttacaacaatttcacagagtagttctatgtctgttggatataataatgaaagacttggtggtatttccaatgctttccatttcatttgtctactcatttacttttattttactttacagaagtactgatccacaacatatttggcaaaattttcttaaaactagtcctttatttaaaaactagcactgtttaagacacactgtgccaagcatatttaccaaggcttctgaatcagcttttatttgagaggagaacaattatttcctctggtaccaaaatacttagatctcaacccaaggacaaagctgacaaacaattaactacattgacaaaaaaaaaaaaaaaatctcaaattactacaatcaggagtgaaacaggggaca

SEQ ID NO: 140810 - DNA, 598 bp, Homo sapiens
tgattattgaaagttgttttggtccaagccttcacatttagaaatcttagttactgatgttttatatcacaaaattggtcttatggtcacaaaatagaagtatagagtgaaaattccaacagaactctaattgtccaaactaaaccagatatgacagtagtaatgcattttaaattagaccctagatctactaaagaaaagtaaatcttcgagcttcaatatcagcttcatatttaacaaatactcaaatcagtatattcatttatctttaatatggaaaaatatttgaaaaacttggatctaagtgtctgtgtatgtgtgtatatgtgtacacgagtgtrtttgtgtgtgtgtgtgtgtgagtgtaggcaatatccttgcctcttcattactttaagtatagttatccacattcacatttaaataagatgccattaaaaaaacaggttttctttttactgataccaccttcttctaagaaaatatcctgacttcaatatatttatcaaatgtaaattaataaacagtgtcattcacatattacttggtagaatttagctgtttctctctcctttaaaaggtgttagatataaagtaa

SEQ ID NO: 140811 - DNA, 458 bp, Homo sapiens
aaatagaaaactttatttgtttcacattcctgatggtgtcatcatcataattcttttagctggataaaagggaaacaaacgttggaccttattgaagcaaagagctctaaacaaatctgaagacttctctaaggaaagtttatagcacaacatttattctgattgttactgataacttgaaaggggccaaatttgaggaatttactgaaaaagccttctttgtatcctttgacagcaaaatacagattattatttttgtacttatactaacattcataaacctcaacagtttttgaacttgacagataagttctctgatcatttttcctcatacttcttctctgtgtattatatgccgattarataggacttctcatgatttttttctttcaaattattttcatctttagcagtccaactcaatttttgtctcctcttggatcctttctgaacttact

SEQ ID NO: 140812 - DNA, 458 bp, Homo sapiens
aaatagaaaactttatttgtttcacattcctgatggtgtcatcatcataattcttttagctggataaaagggaaacaaacgttggaccttattgaagcaaagagctctaaacaaatctgaagacttctctaaggaaagtttatagcacaacatttattctgattgttactgataacttgaaaggggccaaatttgaggaatttactgaaaaagccttctttgtatcctttgacagcaaaatacagattattatttttgtacttatactaacattcataaacctcaacagtttttgaacttgacagataagttctctgatcatttttcctcatacttcttctctgtgtattatatgccgattaaataggacttctcatgatttttttctttcaaattattttcatckttagcagtccaactcaatttttgtctcctcttggatcctttctgaacttact

SEQ ID NO: 140813 - DNA, 507 bp, Homo sapiens
aaaatccagtcatttcatgccgtccaagactgaatctcaggagcactaacatcttttctttttctttatttcaattgaaccagtagccagaatacctccattccctggccttgccagcttagagagttctctatagttaattataataagagcttaataacttaaaatatcttaaaggtaataattatcctccttatgctgtggactcatctgtgtgttagacagtcacttggggatgggtattgtaatyggagcagggctgcagcatctgatgagctggagattggagagtggggtttctgatacacacatttagtttccaaggtgacacagaatgtgctaaggaattgaaaagatctacgcctctcttttaagcataataaactcagaactacggcaatcagtccaggggatgaaggatagcaatgggccactcagggatgacaagatggcgaaaggtttgatgagatgtggcacactgaggcaatatatccaatttacagaggt

SEQ ID NO: 140814 - DNA, 513 bp, Homo sapiens
agacagtattaatagcattctttcttcctttacaatattcttatttacacgtatataattgacacaaattactcaacagattaaaaacttgatgtaattttccaaagtcatgatgtctgtactagactgtccataccaactgtcagaaaaggaataacttgcagagagactcatgcaaagaaatgggagggcagagtggtgatgagagtgaagagatcccttcacctcatatgctggtgtcaaaaaatgccaggtttcagctcaawggcgtaacagtgttaaaaaaaacattctgatgtgtacaagacaggctccactgagacaaacatctctgttacaacttcattaattggattatctaaaggaatgtgatatcttattacttccagagaacaatctttcatatatcctgttccctaagaggcctctcttcaaattcaaataagtcacatgatattgaagaacatgccctagatttcaatcccagctctaccaattattagtgttattttg

SEQ ID NO: 140815 - DNA, 513 bp, Homo sapiens
agacagtattaatagcattctttcttcctttacaatattcttatttacacgtatataattgacacaaattactcaacagattaaaaacttgatgtaattttccaaagtcatgatgtctgtactagactgtccataccaactgtcagaaaaggaataacttgcagagagactcatgcaaagaaatgggagggcagagtggtgatgagagtgaagagatcccttcacctcatatgctggtgtcaaaaaatgccaggtttcagctcaaaggygtaacagtgttaaaaaaaacattctgatgtgtacaagacaggctccactgagacaaacatctctgttacaacttcattaattggattatctaaaggaatgtgatatcttattacttccagagaacaatctttcatatatcctgttccctaagaggcctctcttcaaattcaaataagtcacatgatattgaagaacatgccctagatttcaatcccagctctaccaattattagtgttattttg

SEQ ID NO: 140816 - DNA, 513 bp, Homo sapiens
agacagtattaatagcattctttcttcctttacaatattcttatttacacgtatataattgacacaaattactcaacagattaaaaacttgatgtaattttccaaagtcatgatgtctgtactagactgtccataccaactgtcagaaaaggaataacttgcagagagactcatgcaaagaaatgggagggcagagtggtgatgagagtgaagagatcccttcacctcatatgctggtgtcaaaaaatgccaggtttcagctcaaaggcgtaacagtgttaaaaaaaacattctgatgtgtacaagacaggctccactgagacaaacrtctctgttacaacttcattaattggattatctaaaggaatgtgatatcttattacttccagagaacaatctttcatatatcctgttccctaagaggcctctcttcaaattcaaataagtcacatgatattgaagaacatgccctagatttcaatcccagctctaccaattattagtgttattttg

SEQ ID NO: 140817 - DNA, 617 bp, Homo sapiens
ctttttttttaatatttttctttaacttttaagttcaggggtagatatacaggatgtgcaggtttgttacacaggtycttgttcttataacatttttaatcataatatttatttattatggtcataaatgcctcaattatttttctgtgaaaatatgtgttccctttagagtgttgtgagttgtattttttatgtttttggagaaaagacttgtgaaagggaaagtgtcagccttccttaagtgatgcagttttttatacatatatggaagttgtacaaagaaagtgccacctagaatctctgacctttgtggaacttagggagagaggagcaagagcctgacttccaggcatagtgaacaaaacaaggacaaaacccctgtgggcaacatagtgagactccatctctacaagaaataataataataataaaaatagctgggcatgatggcatgaacctgtagctccaagtatttggaagcctgaggcaggaagattgcttgagccagagttcaaggctgcagtgagctatgatcaggccactgcactctaaccagagggagaccctgtctctaaattaaaaatttaagaaaataaataaacaaataaaaatgtgca

SEQ ID NO: 140818 - DNA, 577 bp, Homo sapiens
agtgaaaaatcagaccttggtgatgaccttgagcaggaggatataaataactcccacatgcttagcgttccaataatggaacactaggcataagtgggctttaattaatcacaataccaaaaaatcatttttcagaactgaagaagataatgatatattcaataamttttctagttaagagagtgattttacagattaaatttttagagaaaacattactatgccactctaatatggtttcacagctttagtttatttgaagcaccatgactttcttcatgaattaccaaattgtgtcatggcagatgtgagacacaactatgaaggaaggactgaaaaatacagaaatccaaagcaagatataattgccgcatgaaacacctcataagcataccaactcactagaaatctaaatgcaaagaagattgaaattaaagttacattattttgtatctcctggagatcctgtttcaagatactgtgtatacccatcccttttgagatgcactaagtcaaagtcatgtcactgcatgattgacaggtggcagtcccggaatacaaggaccacatgggcagt

SEQ ID NO: 140819 - DNA, 647 bp, Homo sapiens
gcttcagtctgtggggtaggtcaggagtcactttattgattgctgtacaattggcatggaagggaaatgaagaggtcttctgagatggcagttttcaaatttgtatattatacgcattatatatatatacacacacacacacacacattgtgtgtgtgtaatcacctgacatcctgttaaatgcagattctcattaactgggtctgaggtagaattcaacattctgcacttctctggtaatattccctggtaatgctatggtgctgggctacaacccacaattagagaggtgaagctatttggaaccagtggtccargagaataatacatccctgtcctatatcaattactgggagatctccccttgatctcttaagctgagaatcacttttctagttttaaagacaaacttgttagtggaaaagcagtatgaatatgtcagcctaggcatttgatgtggctgccttctagcttttgtgcatatgactgtgtgtttcaagtgtttggaatcggttctgcagatacacagataattgtgccattgtttcagaaagattattatagtttctggatgctgtaaagcctggaactattttttgaagtgatactttaaattagtttaagctattaagtcatatgtattatag

SEQ ID NO: 140820 - DNA, 619 bp, Homo sapiens
aatctggaaaggatgatgttaactcagacaaataattttagggttgagagaggagaaaggtgggtatcgattttgcgtgggttggtgtggagttttgccatctagattgattgtcctctgtgtgttttatagatattcaattgctaatgattacctgcaaggcaaggattactgttatacatatttgaccrataaactaaagctgagaggttgttacttgatggttgtcacacaggagataaatttctaaaaagtgccatgttactctactgaaggatagggagattttgctttgcccaccttggcgattaggattaagctgaggaagtaaagagatcaaatggggcaaagccctatcatttctaattgcttcctatgttatttctacctctgataatgcgtttattttggaattcaatcttactaaataaagagctttttgctgcaggatttcagtgtggtatgatggaaatgaaataggatcaagacattaaatttctattcttagctctgtctccaattagtgactgttattttttctcatatactcagtaggataacaatatatttcatacttttattagaatcgtatgagattaacagatgtggaaaaattaaa

SEQ ID NO: 140821 - DNA, 562 bp, Homo sapiens
agatctttcccctttcatatagtatatttcaactataaactactaaccaacttattttatgaagccaatattgcattgctaccaaaatgacacaagaacagtaagaaaaagagaaagaaaactacaagccagtttctttcatgaatataaatgcaattatcctatgcaaaataacagcaaattacccccagtgattatrtaaatacaataatataccacgaccaggctggattaattccagaaatacaagagccatttaaatgaataaaatatataaatatcattagcacattaaacaaattaagatcatattaatagaaacagaaaaagtattagatataaattaatattaaatcacagttttaaaaaatttcaagatgcaaacagaagggaacctatcaatctaaaacagaatatttatcaaagtcctaaagaaaacattctttaatatctaaagtgctaggagccttcaagaatcaggaataagatatggatatcagtttttaccactcctattcaatattgtagccagataaataagacaaataaaagacataatgat

SEQ ID NO: 140822 - DNA, 666 bp, Homo sapiens
atactgctatctaagctactgctaatcacccattatgaagtgtgaaggctcatcagtcttctaggtcacataactggatttttcagagactcattaatctgcattgagccatgttcattcatttattcattcttcattcattcaataaatgctagctctctaccagttgccaggcactgaagaaatagttaggaatctctgccctcaaggagattacagttcatcttggagaacactggagagccaactaatggagttatttggggcagggacaggtattgacccgagggcaatgcaaaagatcttcctacagaaatactgatctgaattttgaaagatatatgggggttagctaggggaaagcattctaagaacatgggtgaatatgtgcacagagccagacgtgtaaaatagcatctgagtaggaggttagcacygaggcacatgactggtgtagtgatgggcaagagtcacaggtgaagcactggcctcagcaagagctttttctacaaactcagacctccgatttagaacccatagctggaaggcataaggaaccattaaacaatttaaataagaagcagaaaagctctgttttacattttgttttgttttctttaagatctctttgatgggggaatggaggttggcccaactcaggacacc

SEQ ID NO: 140823 - DNA, 666 bp, Homo sapiens
atactgctatctaagctactgctaatcacccattatgaagtgtgaaggctcatcagtcttctaggtcacataactggatttttcagagactcattaatctgcattgagccatgttcattcatttattcattcttcattcattcaataaatgctagctctctaccagttgccaggcactgaagaaatagttaggaatctctgccctcaaggagattacagttcatcttggagaacactggagagccaactaatggagttatttggggcagggacaggtattgacccgagggcaatgcaaaagatcttcctacagaaatactgatctgaattttgaaagatatatgggggttagctaggggaaagcattctaagaacatgggtgaatatgtgcacagagccagacgtgtaaaatagcatctgagtaggaggttagcactraggcacatgactggtgtagtgatgggcaagagtcacaggtgaagcactggcctcagcaagagctttttctacaaactcagacctccgatttagaacccatagctggaaggcataaggaaccattaaacaatttaaataagaagcagaaaagctctgttttacattttgttttgttttctttaagatctctttgatgggggaatggaggttggcccaactcaggacacc

SEQ ID NO: 140824 - DNA, 594 bp, Homo sapiens
ttgatgccatttgtcatagtaaatatatttatgttttccccacttgtactaacttcaccatttgtacacttggtgatattccttcagagtgcagaacaaaggtagttttcaactttgcccatcagtctcttctgcagatttttctgctcacccaatgaattcagcaagactgcataatccccttwacagaggcgatgaccagattataggttagaagtagttacagtcttaactggaaagtcaatataaagaaattttatagaaaatatttccaaatacactcccagatgcagccatggtaagaggttttaaaatgtttgttcaccacaacaatttatgggtcacataaccatggttctcaaattttaatctgcaggaagacatctgtctagaaaacaagcttaaaatgcaaattcctgggccccacccccatggattctacttcagcaaatccaggatggggcccaggaatctgcatttttatcagacatctcagatgtcttttacagtcagcaccagaccatacattgatcaagattgccctggatagccccatcgtctccactcctctacaatcacacagtgctgacagca

SEQ ID NO: 140825 - DNA, 605 bp, Homo sapiens
ataggctaacgtaagtgttctgtgcacatttaagtaagctaagcgataatgttccataggttaaatgtattaaatgcattctcaatttatgatattttcattttacaatgggtttatcaaaatataaccttatcataagtcaaggagcacctgtaattaaaaacattaaaaataacatttgtgttaccatattgctgtctaaattaatgtattagtatctgttatgatatattctagccaaagcttttgaaytcattagaattacaagcagattgagactcatcattacaaaagaatctgtccaatcacatgaagagacaaagccagttatacagctagatcttacaaaacttacatttttcacctctgtaaatcataatttcagtatttgcagcattgtgagtgcagacaccacaggcagtaataactggcttaaatgccttcacagtacagctgtttgcaacaatacctccattgataactctcaaaaaatgaaatgacagctacaaatcccttgaaagaatatatgctcctctttacattgtcctacaggttaactcccagggtgctctcaattctacacaacagtaactgtaaatgaaagc

SEQ ID NO: 140826 - DNA, 605 bp, Homo sapiens
ataggctaacgtaagtgttctgtgcacatttaagtaagctaagcgataatgttccataggttaaatgtattaaatgcattctcaatttatgatattttcattttacaatgggtttatcaaaatataaccttatcataagtcaaggagcacctgtaattaaaaacattaaaaataacatttgtgttaccatattgctgtctaaattaatgtattagtatctgttatgatatattctagccaaagcttttgaattcattagaattacaagcagattgagactcatcattacaaaagaatctgtccaatcacatgaaragacaaagccagttatacagctagatcttacaaaacttacatttttcacctctgtaaatcataatttcagtatttgcagcattgtgagtgcagacaccacaggcagtaataactggcttaaatgccttcacagtacagctgtttgcaacaatacctccattgataactctcaaaaaatgaaatgacagctacaaatcccttgaaagaatatatgctcctctttacattgtcctacaggttaactcccagggtgctctcaattctacacaacagtaactgtaaatgaaagc

SEQ ID NO: 140827 - DNA, 605 bp, Homo sapiens
ataggctaacgtaagtgttctgtgcacatttaagtaagctaagcgataatgttccataggttaaatgtattaaatgcattctcaatttatgatattttcattttacaatgggtttatcaaaatataaccttatcataagtcaaggagcacctgtaattaaaaacattaaaaataacatttgtgttaccatattgctgtctaaattaatgtattagtatctgttatgatatattctagccaaagcttttgaattcattagaattacaagcagattgagactcatcattacaaaagaatctgtccaatcacatgaagagacaaagccagttatacagctagatcttacaaaacttacatttttcacctctgtaaatcataatttcagtatttgcagcattgtgagtgcagacaccacaggcagtaataactggcttaaatgccttcacagtacagctgtttgcaacaatacctccattgataactctcaaaaaatgaaatgacagctacaartcccttgaaagaatatatgctcctctttacattgtcctacaggttaactcccagggtgctctcaattctacacaacagtaactgtaaatgaaagc

SEQ ID NO: 140828 - DNA, 516 bp, Homo sapiens
tgaattcaattctattattagaatctctgtccaggtgtcaacaatattttacacacattatcacaaccaactggaatccaagggttctgaggtctggcagaacctggacagaggtctgaaccctagataacatgctataaggatgtctcgccaactcacaggttaaataaataaaaaatgtmtaacaggatcatcaacttctttaacttttggtttattctaaagtgttgtcttttaatcctgacaatgttactggacatagctattagtggcttaatcgtgttgaggtctactgctacaacctcaatgtcacttaaaataccacattaatcataataaatactagacgcatttatgttcaacaaacatgtgagtgcacaaacaagttagtatgtttcatggtacacacagaaacagagctagagttacataggtatagttctggaaatacagatggattccgatataaatatgaacacagctaccagtacaaatgctaattttacagactctaca

SEQ ID NO: 140829 - DNA, 546 bp, Homo sapiens
atctctgtccaggtgtcaacaatattttacacacattatcacaaccaactggaatccaagggttctgaggtctggcagaacctggacagaggtctgaaccctagataacatgctataaggatgtctcgccaactcacaggttaaataaataaaaaatgtctaacaggatcatcaacttctttaacttttggtttattctaaagtgttgtcttttaatcctgacaatgttactggacatagctattagtggcttaatcgtgttgaggtctactgctacaacctcaatgtcacttaaaataccacattaatcataataaatactagacgcatttatgttcaacaaacatgtgagtgcacaaacaagttagtatgtttcatggtacacacasaaacagagctagagttacataggtatagttctggaaatacagatggattccgatataaatatgaacacagctaccagtacaaatgctaattttacagactctacagataaaggtcaggatttacatatgtttctgaacttggaagaaaatgtaaaga

SEQ ID NO: 140830 - DNA, 421 bp, Homo sapiens
tcatgtgtggtctgattcttctgggatgctggacaagagctcgggatatagaaagccatcacacaggtcctctgcctttgcagaagggcagtgggggcactgagctggttaacacttaagccatctgyggaagacagagctaaaagggcattgtaacactggggtctggggtcacaagcacacagccctagagactaccacggggctgcagcccgaagtgctcaccctggctcctgcacctggcggtctgtgtgctccctctcccacaaggggtttgagctcatggtggtcgaatagagagccgcacccctgtcatccaccctgtgcaggtggggggagggcagggaactctcctgtttcatcacactcaaaaacaagatgtataaaattatcattggtctcaagtctgtgattgatatgt

SEQ ID NO: 140831 - DNA, 548 bp, Homo sapiens
agagatgcagcagaagtcagcaagattcaatacccgtgcaggacttgatgtgctgttgttggttatcacagagggagcaatgtgataaggaatgtgggagatcttaaaggctgagggagtctctttgctgtcatccagcaaggaagcagggacctcagtcctacaaacacaaggaactgatcttccaacaacctgagagagtttgcaagtggattcttccctggagcttcacataagagctcagactgctcaacacctcgattttggccttgtggcatcctgagcagagggatcagccaagtcctctcaatccctacagagcttcagaaacctcgagatcatcaatttgtgtttcaagctgtcaagcttgtggtcatttgttatggtagctgtacagagcgaaaatagatctcgcttctgtttgtttactcaaggacattgaaccccygtaattctctcctctctcatgcgtcatcagcttttcttctctgttgactcattccttatcagctcatgaaatattatttcttgcatcttaaaatgtacaa

SEQ ID NO: 140832 - DNA, 548 bp, Homo sapiens
agagatgcagcagaagtcagcaagattcaatacccgtgcaggacttgatgtgctgttgttggttatcacagagggagcaatgtgataaggaatgtgggagatcttaaaggctgagggagtctctttgctgtcatccagcaaggaagcagggacctcagtcctacaaacacaaggaactgatcttccaacaacctgagagagtttgcaagtggattcttccctggagcttcacataagagctcagactgctcaacacctcgattttggccttgtggcatcctgagcagagggatcagccaagtcctctcaatccctacagagcttcagaaacctcgagatcatcaatttgtgtttcaagctgtcaagcttgtggtcatttgttatggtagctgtacagagcgaaaatagatctcgcttctgtttgtttactcaaggacattgaacccccgtaattctctcctctytcatgcgtcatcagcttttcttctctgttgactcattccttatcagctcatgaaatattatttcttgcatcttaaaatgtacaa

SEQ ID NO: 140833 - DNA, 663 bp, Homo sapiens
aatggtttcacattatagtggtacttcaggtattgattcttatgagaaaacagataaactaataaatggacaaaaacacacacatttatagactgtgaaaattatcaagagtccaccaaattttttgaagaagttttagatcaaatgtaaaatatataatctggaaaacaataatgtgtcttgtcatgttaatayaatttttgggattcatcaagtaaccattttacactaggataaataacagtaataaaaatcaaacaataaaataaaaaatatatttctcagtcttataaaaatcctcatgctgaatattttcctctcattctatttgaacttctattaacataacataccactaaatttctttaatatttataaatatataaatataaacacacatattaaccaccacaaaaattccacatatttaaagtaaattaatgtctaaggagtaacacacagagagatttaagctagttttgccactgtttctgtagtcagcctgaatttacatgacattttgatgaattgaagccctaacttaccaagagacttgccatgatttgtattaaataaacatatgtaggcagacaaagcaactgattgtgccttacctgccctcaaacaaaaagaaaaaataatcaaaaagaggttttgaatgaa

SEQ ID NO: 140834 - DNA, 398 bp, Homo sapiens
tacactctctgtatttagaagtctacaagggaagtagccacaaagcagctggagaaacatcaagaggacacctatacttgtttacatgggcaagtcatytctgaaagtagtgatagctaagatgagccttgaatgctaagtagaaatttcaaggccaaggtaagagaagagagaaaaaacaagcagtgttgaaagattaagttcacataaggtagtcttgtttatgaatttaagaaagtttgtgtggcaagaaatgaagctagggaatcaagcaaacagaagccacattttgaagggtgtagtaaaaccactccaaggatgaagagctaccagagacttttacgctggaaagtgatttaccatattgcattagtctgttttcatgctgctgttaaaga

SEQ ID NO: 140835 - DNA, 398 bp, Homo sapiens
tacactctctgtatttagaagtctacaagggaagtagccacaaagcagctggagaaacatcaagaggacacctatacttgtttacatgggcaagtcatttctgaaagtagtgatagctaagatgagccttgaatgctaagtagaaatttcaaggccaaggtaagagaagagagaaaaaacaagcagtgttgaaagattaagttcacataaggtagtcttgtttatgaatttaagaaagtttgtgtggcaagaaatgaagctagggaatcaagcaaacagaagccacattttgaagggtgtagtaaaaccactccaaggatgaagagctaccagagacttttacgctgraaagtgatttaccatattgcattagtctgttttcatgctgctgttaaaga

SEQ ID NO: 140836 - DNA, 645 bp, Homo sapiens
ggaaagctggtaaaatcgttcaattgagagaagatatcttggactctaatcattgtagtggaagcacgaagtggctggattttgaacatttcaaaggtgcaaccagtacggtttttaatatccacaatgtgagttgtacaagtaaaagaggaatcaagaattactcaaataattccctcccacccttgtcccttaaacagctggataagcagaaggcattttctaaaatgagaagcttaaaggaagaatacattcgttctgatgtaagcatgtttggtttgaggtgtccactagatatctaaatgcagatgtgtaaggggtctggagttcaggggacaaagttagataaaatggtgagctactaaatgctaacttgtaagggagaaaactcttttggccaaagtgatgttaatatcagtgcatgatgtgtgacttcactaaaaatgcttgtcacttttatttctgtccaaatatttaacttatgaattctccagtttctataatttacacattttttaaaaaatgtataattccatatttctataatattatttaaaactggatataatattttatmataagaaattcaattatctacacacagagaataaaaaatagcataaaggcattcttatataccaagaa

SEQ ID NO: 140837 - DNA, 459 bp, Homo sapiens
tgcatcgtgaattttggctccagaacaactgaaagaacaaaccaggaatcccaagaggacccacaggttctctaaaggaaggaagcagactgttcctgcaggaccygggagacaccccaaatactgtgaggccccagctgtggaagtgggaaagggagattcaccactcccgaacaaacaactccactgggaaaaccgaaggactagtttgtgggagaagtttccaaccttacctggacctgagtcaatttagagagctgagcgaaatacaggggtagaagaagcaaaggggaaggacttgggagctggctggttccccaagcaagccattcctgcctggcaacacagggatccttctggagggtggccagaggtgcgggggaaaacaccacaaggagaaggaagtctctggctgaactctgtgacaatttggactgggagagaagactcctggccaga

SEQ ID NO: 140838 - DNA, 603 bp, Homo sapiens
catgaataaatttctgtccaaaaatctgcaatgaattttaataaatcagagttttgtgcttcatctaattataagcccaaagctaacttgtgaatatatcttcatgatatagaaaaatggtgtcaccaaacttctcattcaccaaattaatgacatgcactcatgcatgcctactggaaaaacactaaaataaatggaatatggagatattttaggatagtgtatgcaggacacttttgagattatcccttatcaccaaataattgtttccataaatgtagaaattagtcatttttacccaactaatttttcaaaatcccatttttccctttttccctctgtataaagtgagattttattgctttgcattattaagtacccataaggtacatgrcattcacagtttaaggtccctgtctatagcacatttgtaatcacatttgtaatccaatccagagaatagacagctggatcaagcattttataaagcatgttataaaatatggtataaaaatatgttacttctcttgctttctctagcagataaactagttctcggcgacaaaaccaattacagagattgccagaatatcattgttgtgg

SEQ ID NO: 140839 - DNA, 543 bp, Homo sapiens
gaattcagagttattcattttctytggctttgggattctctgcactattttccttgatctctggattctatttgaaacctcctagaacttaatcttctcaggttaactatttgcattgtaagactttgtcttagtctgttttgttctgctctagcagaacaccacagaccgggtaatttataataaacagaagttgattgactttacagttgtggaggctgggaagtccaatgccagggtgctagcaactggtgagagagccttcatcatagcatggcagaagggaaaagagagagggggagtgaaagagaatgtgagcaagagaggctgaactcactcctgtgataacagcgttagtcaatttatgagggcagagccctcatgacctaaacacttattactggtcccatctcccagtactgtcacaatggcaagaaaatttcaacctgagttttaaaggggacaaacgctgaaaccatattagggttgcgttgttaccagcagtaaatctgtatgggtctttagcaacctcaattctagcct

SEQ ID NO: 140840 - DNA, 543 bp, Homo sapiens
gaattcagagttattcattttctctggctttgggattctctgcactattttccttgatctctggattctatttgaaacctcctagaacttaatcttctcaggttaactatttgcattgtaagactttgtcttagtctgttttgttctgctctagcagaacaccacagaccgggtaatttataataaacagaagttgattgactttacagttgtggaggctgggaagtccaatgccagggtgctagcaactggtgagagagccttcatcatagcatggcagaagggaaaagagagagggggagtgaaagagaatgtgagcaagagaggctgaactcactcctgtgataacagcgttagtcaatttatgagggcagagccctcatgacctaaacacttattactggtcccatctcccagtactgtcacaatggcaagaaaatttcaacctgagttttaaaggggacaaacgctgaaaccatattagggttgcrttgttaccagcagtaaatctgtatgggtctttagcaacctcaattctagcct

SEQ ID NO: 140841 - DNA, 592 bp, Homo sapiens
tgacacaaaacttgctgtaacatttattatttttatctccactacatggatgagtgaagaaagacttaaggtctttaaggctttttttgtaaagttgcgtggaaagattgttatattcacaagttycttaagtttgttcttacacaacttttttaccaactgttctattttcctacgtaattgataaggaagttgtcagtacaaagtagtgagataatttgttcaaggtcacacaactaatttgtaaggcattttgaatcctaatgctttgccttttttcttattatacctgctacttttgggattggattttttccctctgctaccaatgtgctaattcttagtgtcgaacatctgaatcttgtgacacaacataaagagctgaagattctgttcccaaattagtcctgtgtttgaatttcagctcctgcattaatgcctgtggccccttaagtgatcaagtttctaatgaaccttaggctcagattgccagcctgtaaaatggggataataacactaagttgagtggctgttattacattagaaaaaatacgtaatgcccactaaataatagactattagtgaatagtac

SEQ ID NO: 140842 - DNA, 592 bp, Homo sapiens
tgacacaaaacttgctgtaacatttattatttttatctccactacatggatgagtgaagaaagacttaaggtctttaaggctttttttgtaaagttgcgtggaaagattgttatattcacaagtttcttaagtttgttcttacacaacttttttaccaactgttctattttcctacgtaattgataaggaagttgtcagtacaaagtagtgagataatttgttcaaggtcacacaactaatttgtaaggcattttgaatcctaatgctttgccttttttcttattatacctgctacttttgggattggattttttccctctgctaccaatgtgctaattcttagygtcgaacatctgaatcttgtgacacaacataaagagctgaagattctgttcccaaattagtcctgtgtttgaatttcagctcctgcattaatgcctgtggccccttaagtgatcaagtttctaatgaaccttaggctcagattgccagcctgtaaaatggggataataacactaagttgagtggctgttattacattagaaaaaatacgtaatgcccactaaataatagactattagtgaatagtac

SEQ ID NO: 140843 - DNA, 592 bp, Homo sapiens
tgacacaaaacttgctgtaacatttattatttttatctccactacatggatgagtgaagaaagacttaaggtctttaaggctttttttgtaaagttgcgtggaaagattgttatattcacaagtttcttaagtttgttcttacacaacttttttaccaactgttctattttcctacgtaattgataaggaagttgtcagtacaaagtagtgagataatttgttcaaggtcacacaactaatttgtaaggcattttgaatcctaatgctttgccttttttcttattatacctgctacttttgggattggattttttccctctgctaccaatgtgctaattcttagtgtcgaacatctgaatcttgtgacacaacataaagagctgaagattctgttcccaaattagtcctgtgtttgaatttcagctcctgcattaatgcctgtggccccttaagtgatcaagtttctaatgaaccttaggctcagattgccagcctgtaaaatgsggataataacactaagttgagtggctgttattacattagaaaaaatacgtaatgcccactaaataatagactattagtgaatagtac

SEQ ID NO: 140844 - DNA, 388 bp, Homo sapiens
aaagtgatattttgatacatgtgtacaggtagaatgattaaatcaggctaattaatagatacatcacctagagtgaaataaatcccaatactcaatcacaaatgaagtttctcaatcagtcccatctggttactaattctttgcttgttcgtttagtcacataagaaacacttttgcacygtacaatttccctcaaataaacttctgacatttggacatgacagccaagttgggatcaatcagtgcccattaaattcgatgcttttgtttcccttgaataaagggcgttctgattacatatttacaacaaaattttcagaaagttgtttggctagagccaaagagaaagagttcatgtttaatgcaataagcaataaaaacgggctgc

SEQ ID NO: 140845 - DNA, 619 bp, Homo sapiens
cttctctctaccttcaacaggtagcagcaatcctagtctcataataaccaaggtcaataacatttgtaagcataataacttctttcttctactcctgatctactgttataagaagctcaatatgactgggagatcactttcaacataagtttagtggaacccctaccatgtcttctgatagaagaattatccctctctgagaaccaggagaggttcattggtttcaaaaattaggagaaagggaagcttatatttctcaggtaaatcacaaggaagaatgatgagcaaggactcttttcctttcaactctgggttgaagacacaagcattacactgatcagggacgtaccaccctataattagttcaaagaatatacaacatctctggaaacagctgttctatcctatagttaatccaatggagccaacatgcyggggcatctcctcaaaggaaagaacaagcagttgcatcttccagttcctaccatcaataaagaggcacatgacttggtaggcctgtttgggttttatagacagtgtacatcacaaaaagaaacattacaaaattgcttcaacttatttgctgagtaacttgaaaggctaccagacttaagtggca

SEQ ID NO: 140846 - DNA, 571 bp, Homo sapiens
accaacattaacagaagtttatgagagttagggttagttgatttcaaccctcacagaggattttgaagagttcaagactacactggagaaagtaactgcagatgtggtggaaatagcaagagaactagaattagaagtggagcctgaaaatgtgactgaatttcttcagtcttatgataaaacttgaatggatgaagagttgcttcttatggatgtgcaaagaaagtggcttcttgagatggaatctactgctggtgaagatgctgtgaacattcttgaaatgacaacaaaggattgagaatattacatcaactcagttcataaagcagcagcagggtttgaggggattgactttaattttgaaagaagttcactgtaggcaaaatgctatcaaatagagaaatctttccctaatggaagagtcaatcaatgccacaaacttcattgttgtcttattttattgyttttttagcaataaagtatttttcaattaagttagtatattttttagatatgatgctattgcatatttaacagactacaatatgatataaacgtaacattatatgca

SEQ ID NO: 140847 - DNA, 564 bp, Homo sapiens
ttgactgaaatgcttgagtacagctagctaaaaccacttttcgactaatggagacctgaatgaaaggaatgaaagtttcagccaattgtggagaaggtcacaagactttttttatcctcttcttttgaaactcataagaaaacaaaatgttttggtaatgcgtcaactttaaaaaggtatgaaagaaaagagaaaagatcacatcaaaaattgttttgtagggcacctgattgtcatgcactatgcatgatgtattatggaaaattgatattatttttaaagccttttytcagtattattatgctgtcagcacacggttatttcatgtgcataagaccaagcatattcattagtgttttcagaagttggaacaaaatattctatgaagcaagtgtttgataatctaaataagaaaattatgagaggtttttttaaataaatagtctcataaattattaaagactttaaattgattaactacaaggtaacaggtaaaataatttaaggtacattttataattatttatatgttaactttataatagcaaaaattatgttattaca

SEQ ID NO: 140848 - DNA, 612 bp, Homo sapiens
ttttgactgccgtgataaacagagtggacagaggcaacacttgttcacatttattatacaaaacttttaaaatgctggatgataaaagaaaccatcaacaaaaaagcaacaaatttgtagaaaatacttcaaacatacatgagacaaaaaattaccatgaataacatttctgaaataccttaaaaattagtagaaaaattacaaccataatttcaaaaatggaaaaattcaagaatgatcatgttacagaagaaatacatatgggcaatggaatacaaaaaatatgaaatacaaaaaaaaatcaaaaaatgaaatacaaaaatatgaagatgaaaattgaaatggcagtgaggtgtcactttggcttatgatactggcaaaaatatttttcagatttgcaatgtctagtgttagtaagagtttagtatacaaaagactgttacacatgattgattttgtgaacagcaactgatagtcyctaattaaacattaaaaggtgtaaatttcttaacgtgagttctatttgtaaaaatttattatacagaaatatttctgtgtgtgtacacatctacacaagaaagtttattagagcagtattgatgacctccggag

SEQ ID NO: 140849 - DNA, 368 bp, Homo sapiens
gcacaagctctctttgcctgccaccatccatgtaagatgtgacttgctcctccttgcctcgtctcaraaaaagaaaagaaaatcataaggaggaaaagatatatttactattcattaagtggaagtggatcattataaaggtcttcatcctcaacgtcttcacgttgagtaggctgaggaggaggtggaagaggagttgatgttgctaactcaggagtggcagaggcagaatgaaactcctcatataaagtggacccacacagttcaaacttgtgttgttcaaggatcgactgtatactgaaataatccgatgaaagggtgttcctataagctaaaaaaaaaatcatcccacagattatttaccttta

SEQ ID NO: 140850 - DNA, 575 bp, Homo sapiens
tcacactgtattgtaattatctctttttcctactagatgatgagcttgatgtaggaagctgtacttgatctccttctgtcttcagcatcataggctatactgagtatttttgcataaataagatkagatccagtacagccgaaattatcatgctttgcaaaataagttaataaggttcaactgctcgggagagcagggttcagaggaaggtggagtcagttctgattgagggatgagcaccagaggtcttgaaggattggactctccaggagagattcagagtaagttaggagaagggagtagtaagtatgagaagcagaggaatataggggctatttaggcaacagccagaatgccggttttctgaaacagatggctatctttggcctgtaactggacttttccttcctttgtttcagtgtggcttttttaaaagaaaatatcaacaactgaacttggagagcatcaggaaggcccagctgaaatcagagaatctgctcgaagaagagaattaggacctgctatccactgggagaggctatcagccagtcctgggacttggagacccagcatcc

SEQ ID NO: 140851 - DNA, 575 bp, Homo sapiens
tcacactgtattgtaattatctctttttcctactagatgatgagcttgatgtaggaagctgtacttgatctccttctgtcttcagcatcataggctatactgagtatttttgcataaataagatgagatccagtacagccgaaattatcatgctttgcaaaataagttaawaaggttcaactgctcgggagagcagggttcagaggaaggtggagtcagttctgattgagggatgagcaccagaggtcttgaaggattggactctccaggagagattcagagtaagttaggagaagggagtagtaagtatgagaagcagaggaatataggggctatttaggcaacagccagaatgccggttttctgaaacagatggctatctttggcctgtaactggacttttccttcctttgtttcagtgtggcttttttaaaagaaaatatcaacaactgaacttggagagcatcaggaaggcccagctgaaatcagagaatctgctcgaagaagagaattaggacctgctatccactgggagaggctatcagccagtcctgggacttggagacccagcatcc

SEQ ID NO: 140852 - DNA, 575 bp, Homo sapiens
tcacactgtattgtaattatctctttttcctactagatgatgagcttgatgtaggaagctgtacttgatctccttctgtcttcagcatcataggctatactgagtatttttgcataaataagatgagatccagtacagccgaaattatcatgctttgcaaaataagttaataaggttcaactgctcgggagagcagggttcagaggaaggtggagtcagttctgattgagggatgagcaccagaggtcttgaaggattggactctccaggagagattcagagtaagttaggagaagggagtagtaagtatgagaagcagaggaatataggggctatttaggcaacagccagaatgccrgttttctgaaacagatggctatctttggcctgtaactggacttttccttcctttgtttcagtgtggcttttttaaaagaaaatatcaacaactgaacttggagagcatcaggaaggcccagctgaaatcagagaatctgctcgaagaagagaattaggacctgctatccactgggagaggctatcagccagtcctgggacttggagacccagcatcc

SEQ ID NO: 140853 - DNA, 507 bp, Homo sapiens
gaattcaaagataaacctaaagcgcttgctttagtagagaagtccccctcctccttatcactttcagctcctcactgtgcctcaggttccaccactgtagagtcacctttggtctcaaggcatttgtcctttgtttaaatcaagatagacacccctacccccaaacttascacacttcaggatgagaatgtcggcccagggaagtcagcccgcctcggtgtgaatgactgtatgtagaagtggtgtctcacgtgcagcccctgctgcctacttctcagagatgccttgtttatcgttcatctgatgctctctgtggagggctgggaggtttatcagatggtttccgaagtgacagctgactgggagcaggtctggtctggtggaggggccagtggtggccaggagagaggtggttgcctgtggggtcagggaggcccagttgggggtggctgcctttggggagtggcccctggatgtagagactggagttggggaggggtgagagtt

SEQ ID NO: 140854 - DNA, 332 bp, Homo sapiens
aaaaggataaaacagcagttctcaaacttcggtgcacatgagattcatctcgggtttcatttcaaagtacacatggctgtttcccaggcctgaggcctattcgaactacaggctgagagacactgggataagggattggctgaaaattgattcctattcrttcatcagatagtttaagtactaggaagccttagaggatacaaataattacaagatactgctcaaatgtcaaacaactccggctctacatgtagagagacgacaaatatccagaaatgataaaatgtaaggctctgtgtgtcaaagcagaaaagcagccaatgagtaacacc

SEQ ID NO: 140855 - DNA, 606 bp, Homo sapiens
ttattttggttatcaaattgtcccaaattggccagtgtgagactcttcaggttggctcttttttttttttttttttgagtcggagtcttactctgtcacccaggctggagtgaagtggcacgatctcggctcactatagcctctgcctcccgggttcaagcratactcctgccttagcctcctcaatagctgggactacatgcatgcaccaccatacccatctactttttgtagttttttagtacagatggggtttcaccatgttggccaggctggtcttgaacccctggcctcaagtgatcctcccgccttggccttctaagttgctgggattacagacatgagccaccaagcctggccatgagccactgtacccagcccagattggtttttaaatgtttttgacacgtctccatctttctttgagtaatccctttctctttgacacgatagaatattctaattctggagtcagccacttatcccaggagctcttgtttctatagtggaggatagtatttataaactgggcactgaagcgcacattaccaccccatgtgtcattctttctaggctttctcagtaaacataactagtatacctatg

SEQ ID NO: 140856 - DNA, 606 bp, Homo sapiens
ttattttggttatcaaattgtcccaaattggccagtgtgagactcttcaggttggctcttttttttttttttttttgagtcggagtcttactctgtcacccaggctggagtgaagtggcacgatctcggctcactatagcctctgcctcccgggttcaagcgatactcctgccttagcctcctcartagctgggactacatgcatgcaccaccatacccatctactttttgtagttttttagtacagatggggtttcaccatgttggccaggctggtcttgaacccctggcctcaagtgatcctcccgccttggccttctaagttgctgggattacagacatgagccaccaagcctggccatgagccactgtacccagcccagattggtttttaaatgtttttgacacgtctccatctttctttgagtaatccctttctctttgacacgatagaatattctaattctggagtcagccacttatcccaggagctcttgtttctatagtggaggatagtatttataaactgggcactgaagcgcacattaccaccccatgtgtcattctttctaggctttctcagtaaacataactagtatacctatg

SEQ ID NO: 140857 - DNA, 607 bp, Homo sapiens
ttcacccttcactgtggacggttaccacccaaaatgttcactcttccacacttctgaaacttggacaagtgtgcagtggagtcaactcctgacccaagatgacacccaggagragcctgggggcagcaagtgagaagtgagaagaggcagaaagcagatattgagtgaatcaagtgagtcatggactgccacaaatggtcagccttagctgagggtgaaactgaggtgagcctgaggttgtatgtcagctttgagtgacctttccaggtctttcccccagtttacaagacagcaaagcagggcttacagatctgaaccagtttatggaaggatgtggatttttaaaacacatatattcaagtcagggcacataaaacatcaaccacttaaataagatgacatgttacttaaggtgtattatgctcattgtcatttgaaatataatgacataatcccaaagtgaagctgggtaaaatttgagaagaacaaatttgtgtctttttgctgtggcctggtgtcagttttgtgtgagtgttcttgcctttagaatttgggatttgtggtccaggatttcatgaagcccaggacccacatatctgtgcccaat

SEQ ID NO: 140858 - DNA, 569 bp, Homo sapiens
agatctcagctccaccgctagagcctaggcaagtaatttacactttctgagtctttgctctctcattgtaagctccacagctagctggacttggcacaactctcctcattgtttttaagataaactccccaggctgaggcaggagaatcscttgaacccgggagacagaggttgcagtgagccaagatcgcaccactgcactccagcctgggtgacagaacaagactccagtctcaaaaaaataaagtaaaataaaataaaaatcaataaatcaataaataaactccccaaaccttaaacacatttatttgaggttatccaaaggatcaagtgagatttaagaggagggaggggagagaaaaagaaaaagttgaatcattcaaaatcattgtggagcaccgaatatgtaccagacactggggataccgcagcgggacaagacaaacatgggccctggtattgggaattgtggtaagtcaagattagtgcttcgaggagacggacaatgtcctgtgagctgcagagtgtgcggaaatgctcaccacggggccggacacatggtagatgct

SEQ ID NO: 140859 - DNA, 443 bp, Homo sapiens
agaatgcaattgtatcctaagttattggtttaatttttccttttgtaaatcccagctcttcttttttcctaaagacacagctgttcaaattgggtttcaaagaaaatttatttcarttagtttgtacctatcttcacatgcatgtgtttctggatacatgtgtgtgtctgggtatatgaccatctctccgcatgtgtacctatatccatgtgtatggaagaacacatatgttgtagactgtatttgcctgaggttccactgcagatgctgtttctgagcatgcattggttggaatatgtttacgtgtatgtgcaaatatctacatctaagtgagactgtggatacaatacaactaatgaaatcaaacacagactacttgtggcttaacacggttcttccgactgcactttcttgttgactgtcaccttcttgcatagctccac

SEQ ID NO: 140860 - DNA, 442 bp, Homo sapiens
gaatgcaattgtatcctaagttattggtttaatttttccttttgtaaatcccagctcttcttttttcctaaagacacagctgttcaaattgggtttcaaagaaaatttatttcaattagtttgtacctatcttcacatgcatgtgtttctggatacatgtgtgtgtctgggtatatgaccatctctcygcatgtgtacctatatccatgtgtatggaagaacacatatgttgtagactgtatttgcctgaggttccactgcagatgctgtttctgagcatgcattggttggaatatgtttacgtgtatgtgcaaatatctacatctaagtgagactgtggatacaatacaactaatgaaatcaaacacagactacttgtggcttaacacggttcttccgactgcactttcttgttgactgtcaccttcttgcatagctccac

SEQ ID NO: 140861 - DNA, 377 bp, Homo sapiens
agctgttcaaattgggtttcaaagaaaatttatttcaattagtttgtacctatcttcacatgcatgtgtttctggatacatgtgtgtgtctgggtatatgaccatctctccgcatgtgtacctatatccatgtgtatggaagaacacatatgttgtagactgtatttgcctgaggttccactgcagatgctgtttctgagcatgcattggttggaatatgtttaygtgtatgtgcaaatatctacatctaagtgagactgtggatacaatacaactaatgaaatcaaacacagactacttgtggcttaacacggttcttccgactgcactttcttgttgactgtcaccttcttgcatagctccactaacatagggta

SEQ ID NO: 140862 - DNA, 442 bp, Homo sapiens
gaatgcaattgtatcctaagttattggtttaatttttccttttgtaaatcccagctcttcttttttcctaaagacacagctgttcaaattgggtttcaaagaaaatttatttcaattagtttgtacctatcttcacatgcatgtgtttctggatacatgtgtgtgtctgggtatatgaccatctctccgcatgtgtacctatatccatgtgtatggaagaacacatatgttgtagactgtatttgcctgaggttccactgcagatgctgtttctgagcatgcattggttggaatatgtttacgtgtatgtgcaaatatctacatctaagtgagactgtggatacaatacaactaatgaaatcaaacacagactacttgtggcttaacacggttcttcygactgcactttcttgttgactgtcaccttcttgcatagctccac

SEQ ID NO: 140863 - DNA, 499 bp, Homo sapiens
actgggagagcactccaggtagaggaagcagtaaattcaaaggcactgagacatgaaccacgtttgggtaagtgtaaggtakgcagcctagaactagagtgtggagtgcaggtaggtgtcaaaggggaggggaagctagaggaaaagacagagtgatatcataaaggtcttttaatccaagctcagaaatttagattttattctgatggcaaaaagaagccacaaaaggatccaaccattgacagttacagttctttagtgaagttgtagctcctaagtgagcatatatgtgtaatttgtcctcttctcttcttctgacactggtaaatttggtattcactcaagtattactactataagtcctttgatttccctaattcaagccaaattgcacaaagccaaaatttggtgatggtattagtcttctcatgctgctatgaagaaatacctgagactggataattcataaagaagagagttttaattgactcacggttct

SEQ ID NO: 140864 - DNA, 499 bp, Homo sapiens
actgggagagcactccaggtagaggaagcagtaaattcaaaggcactgagacatgaaccacgtttgggtaagtgtaaggtaggcagcctagaactagagtgtggagtgcaggtaggtgtcaaaggggaggggaagctagaggaaaagacagagtgatatcataaaggtcttttaatccaagctcagaaatttagattttattctgatggcaaaaagaagccacaaaaggatccarccattgacagttacagttctttagtgaagttgtagctcctaagtgagcatatatgtgtaatttgtcctcttctcttcttctgacactggtaaatttggtattcactcaagtattactactataagtcctttgatttccctaattcaagccaaattgcacaaagccaaaatttggtgatggtattagtcttctcatgctgctatgaagaaatacctgagactggataattcataaagaagagagttttaattgactcacggttct

SEQ ID NO: 140865 - DNA, 499 bp, Homo sapiens
actgggagagcactccaggtagaggaagcagtaaattcaaaggcactgagacatgaaccacgtttgggtaagtgtaaggtaggcagcctagaactagagtgtggagtgcaggtaggtgtcaaaggggaggggaagctagaggaaaagacagagtgatatcataaaggtcttttaatccaagctcagaaatttagattttattctgatggcaaaaagaagccacaaaaggatccaaccattgacagttacagttctttagtgaagttgtagctcctaagtgagcatatatgtgtaatttgtcctcttctcttcttctgacactggtaaatttggtattcactcaagtattactactrtaagtcctttgatttccctaattcaagccaaattgcacaaagccaaaatttggtgatggtattagtcttctcatgctgctatgaagaaatacctgagactggataattcataaagaagagagttttaattgactcacggttct

SEQ ID NO: 140866 - DNA, 249 bp, Homo sapiens
gtacacagagtctgaggttccccaccctggtttgcctctttcaaggtttcctcctttacttttcagctaccatagttgccttgaaatctattccctggctcttcaaatcagtatgacgaggtttcgacccatctaagacacctagcatgaggagtactggggtttgccctccggctaaacttattaagaaagygaaatttactcagtgcccttcccttctcccaagtgccaataaacacccacgcgaac

SEQ ID NO: 140867 - DNA, 630 bp, Homo sapiens
catctcagctgggagaggagaagcagctgcctcttggggttagagtttacctctgaagcgtcccacttcctgcagttgctcttaatatagagattatcagacaagggagggctgggtttgagtcttgcatctgcttgagatttgtcatgtcacctgtatgagctagcagtttgagctagatgatcttaatatagacacacccatctctcggagtctgaaacttctcagctccttagaccctacatgccttgtcccatggtcyaaacacatctcttgcccttttgcactaactgtcctggttgtgacctctggcctgagtctgtgagtctcaggccctgcttataggtctatggtctcttacttggcactagaagtggtccaggcagtgagagatagtggcaagaacactgggtttgaagtcaggtggctgctagattcctagttcagccatttacctctgtcaccatgttgaataagttctcaaattctttgatcctcagtttccatatctgtgaaatggagatgagacttctatattctccagtggttatgggcattcattgagaacatgagaaactttagacagaactgcaagatgatcatataatttcccaggagcctctggtcagg

SEQ ID NO: 140868 - DNA, 574 bp, Homo sapiens
agaaaacaacaaaatggcaagagtaagtccatattaatcaataataacattgaaggtaaagggaataaatgatgtaatcaaaatacatagagtggctgaatggttgagaacacaagacctaatgatctattgcctgcaagaaatacactttattataaagacacatacagactgaaaatgaaggaatggaagaagatactccatgccagtgcaaaccaaataagagcaagagtacctgtacatatatcagacaaattatattcctagacaaaacatataagaagagacaaagaaggtcactatataataataaaggggtcaacttatcaagagaaactaatgattgcaaacatatatgaatccaatactggagcatccagatgcataaacaaatattataagagccaaagagagagataggcgtcyttacagaaatcactaaagacttcaacaagccatgttcagcattggacaaatctccccgatagaagatcaacaaagaaacataagacttaatctgcactatagaacaaagatggatttaataaatatttatagaacatttcattcaatg

SEQ ID NO: 140869 - DNA, 575 bp, Homo sapiens
ctctgggtgagggcttcccgtttcgagagtgctttaaacattcatcaagagaccaacagaatctataagggagttgtgtgctttataaatgctgggggtgctttatggatgagtcgtattaaagaattataaatttcttatttgattagttggggtaggctttcctgctagaatctcagactgattttattgtgcttcatcaattttatggttgacatgttttcaatttactttgtactattaagaagctgaaatgagttttggaagtgcataatcaagcctttcctcccctccccagtgccacggggggacaaggtggtgagggctctgagcctgctgagcagaccacacgcagggaattctgttttctctcctagtcactgtctcaaagagtttgagctcatttgatcccagggaaaaagttacttgtcattttcacatctataagtttgctaattcactttgatatatatcaacaaatggtttcactatagaaacaatgggtcatacygagaaaaatttggaataattaccctgtatccttcttgttttttcttaatgtttttctcttttcc

SEQ ID NO: 140870 - DNA, 520 bp, Homo sapiens
tactggggaatctgaaaatccagatcacaggagaaggatttaaccttacccagagctgaaatgaatttagggagctgcgcaaaatatgaaagtggaagcagcagcaggaaaagccttgtaggcattctaggtccccagctcaagcccagggaagccatccctgactatattccactggggcccttggagaaggcagccaccaaaattaaagaggggtcacagggtgaaagaagcttccaattgaaatttgggataatttcgactgggcatgaattttcttaagcagaatccagaagcaaataggaactgctggagacatgagtgcaagagtccactgccaatattgtgggcagatggggagggagaggcctaaaagctgtgcttgctttcttagcagggaagcttactgtctgggggaaggtctgagcrgggcactgtggagcaaggcttcttgccaaccatgtaggaactgggtaaggcctttcattagtaactatcccccaattccctggcaaactat

SEQ ID NO: 140871 - DNA, 572 bp, Homo sapiens
ctttttttgttgttggcgaattttttattactgtttcaatygcactactttttattggactgttcagagtttgttgaggatttttgcatctatgtacatcaggaatatgagtctgttgttttcttttcttgttatgttcttcagcatatcaaaaagataatacaccataatcaagtgagtttcataccagggaggcagggatggttaaatatatgcaagtcagtaaatataatacaagacataagcagaattaaaaacaaagatcatatgatcatctcaatagatgcagaaaaagcatttgacaaaatccagcatcacattgttattaacagcctcagcaaattggcatagaagggacatacctcaaggtaataaaagccatctatgacaaacccacagccaacgttatactgaatggggaaaacttgaaagcattctccctgagaactggaacaaaacaaggctgcaacttttaccacttatattcaacatagtactggaagttctatccagagcaatcatgaaaagagaagaaataaagggtattccagatcagtaaagaggaagtcaac

SEQ ID NO: 140872 - DNA, 515 bp, Homo sapiens
cctttttataacagatgcaaagataaaataaaatacttaacaatatacctaaccaaagargtgaaagagctctgcaaggaaatttaaaatttcccatactcattgatgggtggaaacaatactgtgaaaatgattatactgccaatagctacctatagattcaatgcaatttccatcaaaatgccatcatcattctacaaagaactagaaaaaataattctaaaattcatatggaaccaaaaatgaccccatatagccaaagcaagtctaagcaaaaagaacacatcaggaggcatcacattacccaacttcaaactgtactacaaggctgaagttaccaaaacagcatgatactggtataaaaatagacacatagaccactggaacagaatagcaaaccctgaaataaagccaaatacttacaaccaactgatcttagacaaagcaaacaaaaatataaagtgaggaaagtacctcctatacaataaatggtgctgggataattggcaagccac

SEQ ID NO: 140873 - DNA, 403 bp, Homo sapiens
attttccctctctgtccaaaaagtcacagagcctcagaaatggaaacagacaaaacaaactctacgtctaacaggtgtccatagaagcatccaggaaaagcccgaattacaaaggggagccaggcctagcagagatggggcttgtttcatcaacatttttctaactctgaggtttragcactctgcttttagctgtattctggcagaaaagcattattgaacacctaccatatataaggtcttatcatgggtttaatgtatcctcccaaaattcatatgttaaagacctagctcctagtgtgtcagcatgtgaccttatttggaaacagggccattgcacacataattagttaagatgaggtcattactgtatggggtcaattgatatcaagctacagttatc

SEQ ID NO: 140874 - DNA, 415 bp, Homo sapiens
attttccctctctgtccaaaaagtcacagagcctcagaaatggaaacagacaaaacaaactctacgtctaacaggtgtccatagaagcatccaggaaaagcccgaattacaaaggggagccaggcctagcagagatggggcttgtttcatcaacatttttctaactctgaggtttgagcactctgcttttagctgtattctggcagaaaagcattattgaacacctaccatatataaggtcttatcatgggtttaatgtatcctcccaaaattcatatgttaaagacctagctcctagtgtgtcagcrtgtgaccttatttggaaacagggccattgcacacataattagttaagatgaggtcattactgtatggggtcaattgatatcaagctacagttatctgaaggactggg

SEQ ID NO: 140875 - DNA, 415 bp, Homo sapiens
attttccctctctgtccaaaaagtcacagagcctcagaaatggaaacagacaaaacaaactctacgtctaacaggtgtccatagaagcatccaggaaaagcccgaattacaaaggggagccaggcctagcagagatggggcttgtttcatcaacatttttctaactctgaggtttgagcactctgcttttagctgtattctggcagaaaagcattattgaacacctaccatatataaggtcttatcatgggtttaatgtatcctcccaaaattcatatgttaaagacctagctcctagtgtgtcagcatgtgaccttatttggaaacagggccattgcacacataattagttaagatgaggtcattactgtatggggtcaattgataycaagctacagttatctgaaggactggg

SEQ ID NO: 140876 - DNA, 490 bp, Homo sapiens
gtaggccttctgagaaaatgaggggactaagagttggtactgcttctggagatttggaaagccagtttgatgactgttttccaagttgtggtcaccatttttggcctctgtatagtcactgtagtttaayatcatgttaatcaggaaacaattatgtcatacataaagtggagttcaggaagttttatggtaaccacgttaagtatacccacttacaatcaaaactacttatgcttggatgtggtgactcgcgcctgtaaccccagctccagggaggctgaggtgggaggattcctgaggccaggagttcaaagaccagcctaagcaatgttgcgagaccctgtctctacaaaaattaaaaaggggaaaaaaaaatgttgggtgtaatggtgcatgcttgtagtcccagccacttgggagactgagacagaagattgcttgagcccaggggttcaaggctgcaatgattcattgtcacactactgcgctc

SEQ ID NO: 140877 - DNA, 508 bp, Homo sapiens
ggtgccctataaaccaaggtaggccttctgagaaaatgaggggactaagagttggtactgcttctggagatttggaaagccagtttgatgactgttttccaagttgtggtcaccatttttggcctctgtatagtcactgtagtttaacatcatgttaatcaggaaacaattatgtcatacataaagtggagttcaggaagttttatggtaaccacgttaagtatacccacttacaatcaaaactacttatgcttggatgyggtgactcgcgcctgtaaccccagctccagggaggctgaggtgggaggattcctgaggccaggagttcaaagaccagcctaagcaatgttgcgagaccctgtctctacaaaaattaaaaaggggaaaaaaaaatgttgggtgtaatggtgcatgcttgtagtcccagccacttgggagactgagacagaagattgcttgagcccaggggttcaaggctgcaatgattcattgtcacactactgcgctc

SEQ ID NO: 140878 - DNA, 523 bp, Homo sapiens
accaaggtaggccttctgagaaaatgaggggactaagagttggtactgcttctggagatttggaaagccagtttgatgactgttttccaagttgtggtcaccatttttggcctctgtatagtcactgtagtttaacatcatgttaatcaggaaacaattatgtcatacataaagtggagttcaggaagttttatggtaaccacgttaagtatacccacttacaatcaaaactacttatgcttggatgtggtgactcgcgcctgtaaccccagctccagggaggctgaggtgggaggattcctgaggccaggagttcaaagaccagcctaagcaatgttgcgagaccctgtctctacaaaaattaaaaaggggaaaaaaawatgttgggtgtaatggtgcatgcttgtagtcccagccacttgggagactgagacagaagattgcttgagcccaggggttcaaggctgcaatgattcattgtcacactactgcgctccagcagcttgggtgacagagtgaaacc

SEQ ID NO: 140879 - DNA, 504 bp, Homo sapiens
actaagtttaaagatcaaaagaacaaagactctgaagagttgttcattttttctactctatcaatcactaacccagctttctctatgtttgagacttttactatcatataaattatagaacattttgtgattagaaaacatttttaataaaaccagtaaaaatacacatataaattcaaatatatatagatgcatacaaaaagcaattgcatttattcaaatcaatttgtaaataacactaagctcttgataatatttgtartttggggttcttcctgtttcattttattttgcttttgtcttgagcaagtgattccattttgaacaaaagatgtctttttaaaaatttcttccattctttccttccacccacccaagaggttgactttgtgggttttccttcctttcactcatcatgagaagatccttcacagcagaatcagaaatttaatacaggggcactttttcaaatcttacaaattttttccacatctgctttttccc

SEQ ID NO: 140880 - DNA, 589 bp, Homo sapiens
gtgcaggggcacagcacgggactggcaggcagctccacctgcagcccctgtgcgggatccactgggtgaagccagctgggctcctgagtctagtggggacttggagaacctttatgtctagctaagggattataaatacaccaatcagcactctgtatctagctcaaggtttgtaaacaccagtcagcaccctgtgtctagctcagggtttgtggatgcaccagttggcactctgtatctagctaatctggtggggacttggagaatctttatgtctagctaagggattgtgaatacaccagtcggcactctgtatctagctcagggtttgtggatgcaccartcagcgctctgtgtctagctaatctggtggggacttggagaatctttatgtctagctaagggattgtgaatgcaccaatcgacactctgtatctagctcaaggtttgtaaatgcaccaatcagcactctgtgtctagctcagggtttgtaaatacaccaatcaacactctgtatctagctaatctagtggggaccatggagaacttttgtgtctagctcagggattgtaaacgcaccaatcagcac

SEQ ID NO: 140881 - DNA, 609 bp, Homo sapiens
aaggtctccaggtccttggcctttggatgcactctgagcggacagggaagtggaacactgaggacattccagactcagccccagcggctcccggcctgttctcctgattccagacagagtggcaccgccttggggctgactaccagaacttctgccacactttatgggccaaagtgggtcatggaagcagcccgrtttcatgggatgggaaatggactctgtgtcttcctgcaaggagcagcaggggatgtgatggagacagctttgcaatcacggccctgacagccttgtcacctcctaacctgaagcccacggtggcttctgcgtggggaggtcctgtgaagcctgcactcaaagctctgtgggcacagcagggttggtgaccacagtcatggccccacagaggggtggggaggcctctgattctttaaagcacagaagttctaccctgggaggtgaaaaattgtccattgtacccaattttcgggtcttgcaaagccctgggaatggctgtggagacagctcgtgccaccttggagaggtgtccgtggcaccaggggagtgggggacaactttgcacacttgtctggctggagataggcagggtgt

SEQ ID NO: 140882 - DNA, 598 bp, Homo sapiens
tggatcctgtcaaattccccgatactcccgcttccctttaaacacagctgaagggaagattaatgtgggcctggtgagaagggagggtggggagggagacgcaggtggaaagtgcagggcaggcgaagagttggtgatagaacagaaatgtctggaaagactggatggcagagagaactccagatagctgtggtggccaggagtgatcctcatggctgacctgcaacccaacctgccccaggaagcctgttgtgaccctccagaccctaccccacactgctgggacagaccaggggtcagccaaggggctccagacctctgaccccatcaaggccctccccagggcttccaggggatggggtccagccaaggccttgtcgacagcccagtgccccacacaacagcccagccacctgcccctgcagtgagttacaggaagcccactgctccctggatcacaccygtcctgagcagaaggggagacagaggcctactgggagtgcaggacttcagcccaggcctccaactgctgggcaactgggccccactcccccaccactcaggaaatggctggttctatagagatcccgtcactgaa

SEQ ID NO: 140883 - DNA, 416 bp, Homo sapiens
catcgctcagatctctgctttgcatggccttctcctctgtgcttcactcctcctgcatccctcctgtaaggaccattgtgattacctcaggcccacctcgataacccaggctaatctcccatggcaagatccttaatttaatcacgtctgcaaagtcccttttgccatgtgaggtaacgggcacaggttctggggattagggtgcaaatgtattggtggggggggcatgggtcattaatcagtctaccacagtctaccctctgatccttaaagattcacgcacattccccatttcaaggtcccccaacatcttaactcaytacagcttcaagtccaaaatctcagtcttctcatcagctcaaaagtcccaaatcttatcatctaaatcgggtacagatgaatctgcatataatcca

SEQ ID NO: 140884 - DNA, 396 bp, Homo sapiens
accgacgcggaagcggaccccgaccaccgaggggaagcacgatcctggcagccctctctcgcgccctccccgtgcctccccctgaggcmgggatgtcgccttccacctggccccagcaggctggaaatacgcctgcgccctcccttctgcacgggccctgggtccttagcccccgcccccggcctccgctcggtcccctgacgcccctcccgctgctggcagcgccaccactttctgccctggggaggtccccggctcctgcccgcagacaaagccatcttaaagcgcggagaaggtgacatcggcagataagatgctaattgacaactcattttcattctgccgaacagaattgtttcatttttcactcctatcacctgctcattttcggcagcc

SEQ ID NO: 140885 - DNA, 396 bp, Homo sapiens
accgacgcggaagcggaccccgaccaccgaggggaagcacgatcctggcagccctctctcgcgccctccccgtgcctccccctgaggccgggatgtcgccttccacctggccccagcaggctggaaatacgcctgcgccctcccttctgcacgggccctgggtccttagcccccgcccccggcctccgctcggtcccctgacgcccctcccgctgctggcrgcgccaccactttctgccctggggaggtccccggctcctgcccgcagacaaagccatcttaaagcgcggagaaggtgacatcggcagataagatgctaattgacaactcattttcattctgccgaacagaattgtttcatttttcactcctatcacctgctcattttcggcagcc

SEQ ID NO: 140886 - DNA, 617 bp, Homo sapiens
gtaaatgccctttgctaagcaatatttcttctctgccagcaacaaagttttgggggtcatgttttcctgtgtaataaccaagaacaacttctcccagttcccttttcttccctaccttccagccaaaggccygtccttcctcacctttcagtgagtcacactcccactacacagacagaaacgctcaaacacaatgtactcccagcccaatattgtccctcagccccaagcagttcatataatttgccaattgactccgcaaactcttcatatatgtgcattaattttcacctgcataaccactgcataattcgcaccttcatcaccttacatctgacccactccagtcatcttttctctgtcttgaatccattctcctcattcctaaaatgcatatgtgctcagggcagacatcttttgtctcaaaatcctttgtgaatccatggtttcagtgataatgtcctacccagggcatagggaagagtctccctaggggacaatgttggctggtaagaggctcacattagggtggtgaccagccactgaggctcaggcacatgatcctcgtgtagaactatctccagatatgcagatgagcacatagaaaaataacctcg

SEQ ID NO: 140887 - DNA, 603 bp, Homo sapiens
gttcaaaaaccacatgtttattcttatgcctgtgttgataaaactttgctaaatattttatatgtattaaaaatggagaatgaaagagatgtgtttcaagagccttttacagataaatyctaacaatcaaataggaaatagaacattaatgtgaataaaatgctctggcaaggtaggaagaaatgaataactggaagtagagagtccttagcattacaaagtggtaagatttctaaaacagtcatcttgtgagttttttatgcactgttaatagtaacaatacgttccatgaattatgcagttgggatgatttctccttgtgtggattgccagttctagaaatcagtaaaagtgaagaatgagttgaaaaacctatcagcctactgaatctactaaagcctctaaaatattcaatgtctaattgcagcaatttgtatttcataggtgccatatcaaaatcttctccattgaggtcatgattgagtctttaaaaaaaaatttccagatgtgaagatatatatatatacattttaagtttccagcattgtgtgtacaagaaaccaaaacctccatggagggcatgctgatgagttgcatggcaca

SEQ ID NO: 140888 - DNA, 548 bp, Homo sapiens
ggtggcttatgcctgtaatcccagcactttggaagtcagagtcaggaggatcatctaaggtcaggagttcacgagcaacctggccaacacggtgaaactccatctctactaaaaatamaaaattacctgggcgtggtagcacatgcctgtaatcccaactatttgggaggctgaggcaggagaatcgcttgaacctgggaggcagaggttgcagtgagctgagatagtgcccttgcactccagcctgggtgacagagcaagaccctgtctcaaaaatacataaataagtagataaataaataaaaataaaaataaaaatgtacccatggttattgtagtcatgggaggttgaacaactattcatgaacaaaagcacttatagcttgagctctttatatattttctttctcttattgattcgcattaatatgtaatatgcaaaaataatactagatgacacttctagcatttactgtgcattttaggtattttacatacattaatgtatttaaccttgaaaataactccataagttaaatattattatt

SEQ ID NO: 140889 - DNA, 500 bp, Homo sapiens
tttgatgaatgttgatgcaaaaatcctcaaccaaaaactaacaaaaaacacttaagactccatcaaaaaactattcaaactgataaactaattcagtgaagtttcaggatacaaacccaacatacaaaaatccgtagcacttttatatgccaacagtgaacaaactgaaaaggaaattaaaaagtaatccccatttacaatagacacacataaaattgaatacctatgaattgtgttaactgaagaaatgaaagagctctataatggaaactataaaacagtaattagagaaattgaacaagacaccaaaaattggaaaatattttatgttcatggattagaagaatcaatattgttaaaatgtscatactacccaaagcaatctgcagattcaatgtaatttctatcaaaataccaatgacattcttcacaaaaatagaaacaaaaagaattctcaaatttatatggaatgacaaaagaccccagatagccaaaaccat

SEQ ID NO: 140890 - DNA, 462 bp, Homo sapiens
tgtttgcatttgatatcatctyacatcttaaagactccaccaaaaacctattcaaactgatgaattcagtaaagttgcaggatacaaaattaacatacagaaattcgtggcatttatatttgccatttctatatgctaatattgaacaatctgaaaaaagaaatcaaaaaagtaatctcatttacaatagccacaaataaaattaaatatctaggaattgaccaaagaagtgaaaaatatctataataaaactataaaacattggtgaaagaaattgaagaggacaacaaaaaatggaaagatatttcatgtttaggaatttgaagaatcaatattgttaaaatatagtacccaaacaaatctagagtataatgcaacccctatcaaaataccaatgccatccttcacaaaaatagaaaaaaaaaatccccaaatttatacggaaccacaaaagacccctaa

SEQ ID NO: 140891 - DNA, 548 bp, Homo sapiens
tgcaggaaatcattaaattgaatgaagttaaatgatgaaaatgaaagctttctaaaagggggaaaaatgggaagcatggacaaagttatagaatagcaactaatatttttaagcgcctgataggtgccaggcactgactataaaacttatgtaaattgtctcatttaatccttactatgaccctgctgggtaactattaccaaaaccattttactggtgagaaacctattactaagaractgtaacatcccagaggttatacagctttgtggcttgaattcggatctacttaatgccaaaggaactcatgttccttttactattctctactgtgagtcaaaaacatagagaactatggttaggctctatttcttacattaatttttgttaaatattaagtattttcaaaaaaccattattcatgtgtatggagaataataataaactgaacacctgtgtactcaccaaaaaaaaaaaagattagaagaagcaactattacaccagatgtgcagaaaacaatgtaaggacatgtaatatatgaaaagtt

SEQ ID NO: 140892 - DNA, 462 bp, Homo sapiens
ttacattcactaatttgcttagatttattggtctctttccatgttccaacctgtgctaggcactgaggattgaaactgagaatcagatgagataatgacattttgaaaactgacttaaaataccaaaaaaaaaaaaaaaacccacactttaaagtatagcccacccacataatgctttgcttgcaggaaatcattaaattgaatgaagttaaatgatgaaaatgaaagctttctaaaagggggaaaaatgggaagcatggacaaagttatagaatagcaactaatatttttaagcgcctgataggtgccaggcactgactataaaacttatgtaaattgtctcatttaatccttactatgaccctgctgggtaactattaccaaaaccattttactggtgagaaacctattactaagagmctgtaacatcccagaggttatacagctttgtggcttgaattc

SEQ ID NO: 140893 - DNA, 465 bp, Homo sapiens
catctcctttacagcatagaccatggctacttcatttatgaagaaagtcgtccaccattatgggatccccagatctcacaccttgacttctgtgcctagtttttatcctttgtttctactgcatatttaaatcttgctggtgaaagtcctgcatatcaacatctttctgtctatagtcaaacacctgtagactaattaccagatcatttctattaaaccagatactagaatatgactgctgctatgactcttaktgataatccagctgggttatctattttgctattctgatatttccataaaaataaattttattatgtatattggaggtttacaacatgttatgggaaacatatagatagtaaaatggttgctatagagaaacaacttatctgttatctcacatagttttctttttgtgacagaaggagctgaaatctacttatttaacaaaatctcaagttt

SEQ ID NO: 140894 - DNA, 643 bp, Homo sapiens
gcaagcctctccccttgctgactcatagtgtccatgatggatgatgctggctaatgggagaaaacatgktgccctcattgcaggcaccacaatgtatagagcaacactggggtaaagtcaatgtcagaaggttgcccaccgaggcctgtgcaaacataacacgtgtcacaacaccaagggtgtagtggaacaagcagtcttaccaaggctggtccccaatggacgttgtgccctctgggagtttatgggtctgtggggacataggatggccatatctgccagccaattggaccgaatgttgtacctgggggtggccttatgtgcttcccacattgcctagtcgctctcacaactgggaggcattgcattcccagtttttgtgagtgtggccggccccctggtggttctactatttagcaataactatgctgtggtagcggcgtgtagatcactagctgtaaatgcaggttacagccctttcagagcacagagctcagaacctgaattgcacccatgttatcctccttttgtttactgatgaggttgatcacattatgaaggcggtgctgcaaaaccggatgtctttagacatagtcaccactgtccaaggtggcactgtgcccttgtagggacacgatgttgt

SEQ ID NO: 140895 - DNA, 609 bp, Homo sapiens
tgtgaggaatgacatggtagtttaatagaaatagcattcaatctgtaaattactttgggcagtatggccattttaatatttatttttccaatccatgagcatggaatgtttttccacttatttgtgttgtctgtgatttctttcagcagtgtttcatagttctttttgtagagaattcccatctccttgggtggctgtattcctaggtatttcattttctttatggctattgtaaatgggattgtattcttcatttgactctcagcctgggtattattggtgtataaaaatactactcattcctgttgattgattttgtatcctgaaaccttgctaaaatcacttatgagttatagcagccttctgaaagagtctttcaggttttctaagtacagaattatatagtcagtgaggagagatagtttgacttcttttcgtatttgaatgttcagrttctatttctgatttgacttctcttgctatttctaccacatctgcagttatttattccactaaaaatttaaagctctcaaagtcaaccatgaatgttagaatcaacttcttccaaagtcctgttaatattgatatttttacttcctcccatgcatc

SEQ ID NO: 140896 - DNA, 540 bp, Homo sapiens
tcaccagagaaaattacatttactaaaggaagacaagaatgaggggaagaaggaagagatgagagtgaaacaacaataaaacaacaaaatgacaaaaacaagtctttatttatcaataataacaagcaatgtaagtggactaaaccgtcctaataaaagacacagactggctggatgagtttttacaaaaggatcattgatctagtgactaaaagaaacacactttccatataaaatactgaaaataatgggatagaaaatagtattctatgatgatagtgaaaatcataaaagtccagaaatagcaatgcacgtaccaaayaaaatagatttcaagacaaaaactagaagaagaaacatagaatgtcaccatataatgataacaaggtcaatttaataagagactataatacttgtaaatatgtatgcacccaacactgaaaaatccaaatacataaagcaaatattattacagagcagttgggctccaatatattaatatctggatgttttgaaaccccgttgttagcactggacaga

SEQ ID NO: 140897 - DNA, 583 bp, Homo sapiens
tctttcctttttagggctgaataatattccattgtgcatgcgtgtgtgtgtgtgtattcatttttttatccatccatccatggatacttaagttgattcttttgactgttctgaataatgctgcaataaacatgggagtgcagatatatctttgagattctgaatttatatctttcagatacacatcaagaagtgggatatgggattgatgtatcatatggtggttctatttttaattttttaaagaaggtcaatactgttttccatgatggatctgataatttacattaccaccaacagtgcacaaaggttctcttttcttcacatccatgacaacacttgttatcttttcatgttttgatcatactcttcctaataggtgtgaggtggtatctcagtgcgtatttgatttgtagttctgtgatcaatagtgattttgagtattttttcatatacttgttgataatttttatgtcttcttttgataaatgtctrtacaagccttttgcctacttttaatactattatttgctttttggtattgaattgtatgtttcccttacatgttttggatattaactca

SEQ ID NO: 140898 - DNA, 487 bp, Homo sapiens
cacccctaaattggtaaggtacctgctctagatacctatgtggttggaagtgaacgagatttcaaatatgccagtactctcatggaagtgtaatatgtaatttgaagtcccaaaagcacctattagaagtatgaagaaattcaggaaggtactccagaaagggagtcttgttaaagggagattggtttaaagtctatctaagtcatgaagctattctatacaaaagcagaataggtatctatctatgcttatttgaagtccacagcttcatacttgcctccaaatatctttttccagtattacatcctactcttttctcataccagtctcaaatccgtatactttaaatattcttcagagtcaaasaacaaaaagcctccttccagttaaaaatgcaaaatggttttttttccccaagatggtggatttgaggctttgttagcacaccttaccctcttggaaagagcaaaaccgtgtgtagaaactt

SEQ ID NO: 140899 - DNA, 585 bp, Homo sapiens
ttgctgattgattgcatttttatagtaggaattaccatgtttctctgtcctctttgttgctgtaaactggtagttcaatccagaggtttggttagattctgattcatttgagggagttttgttttgggagtaaatagaggttttcaagactaccttgtaatattttattcttttatcagaagkcgtgaaacatctgactgtctctttgtgattgtagcagctactgatactcaatgcctacatccattagttcattaggtttgcagaagtaatctttttttaattaggcaatgttatagacacacatgtatacgtgcattcacatagacacatttctgtaagcagatatatctcaagccaactcttatctttcccttaacccctctttgttacattattacttgttcttttacctcacttgttttcaaagttctctttttatgtgtgtgaaaataagatttgtataatacaaagtagtggcccaaatgtacagtaacaactttcccaggggaacacaattattttagaggagaaacaaggagaggaaaatagcatgtataaaacaataagggggtcacagaaaag

SEQ ID NO: 140900 - DNA, 543 bp, Homo sapiens
ccgtatccattccatcatacttgctctaaggcagtcagaagatcctgcaatcgtcttatcctctgtgtagcatcctgtagcaggaaacctcatgcctctttgctaaggatgcatcatcaacgaatgcatcccatggtttacatctgaactagtataacttcatgtcaaagatstactcactgaccatctttaacgtcctcatttattactgagggagttgcactatatattagatgactatatttcccaaaacttatagaacttgctttaacaattttaagtacctacaggaatgagagagcatatatgaaatcaaatacatctaagaaaatgtggtatttctagaagccatggaaattaaggttaagagccggtatttggcataggacagaattgagtttttatcatgttgtccttctttgctgtgtaaatatgggtgataacttcagctatctaaccttggtttcattaactgtaaaatgggaatagtaatgatgctccctcatagatactgtgagaattaaatgttcactgccagctcct

SEQ ID NO: 140901 - DNA, 611 bp, Homo sapiens
cgtgatggtcaatggaagagtcacttatgatacttttgttcctcttcctacagaaatataaaaattaaaaaccttttaaaatcaggtagcctatgattgcaggggaaagaggaaactcccagatccacaatgactcctccttctttctatttctggcataaaattagctgcctaaagacaaagccttttattccacaattaaggatacaactaaaaatgcaaatccctgaaagagtaagcattatgctaatgggtctcaaaatataaatgaagaatcaaaatctattctgctttaaagaaggcaccagtttaggaggcaggctctaagtacttgaagcaataaaaggaactcccctttgcctaacaagtcccatatagcagcctccttcatacattcagtttaacgtcatcctaacaacaagcctgtgaactaggtactatgtccattttataaatgtgacactcargttttagcaaacaataagctatgcacgactatcattatccataacgataagttatgaattctggatgagaagccagatctacttggaggaaatcagtacaaagtataaaacagaagttatataatcaataggaatttaaccagt

SEQ ID NO: 140902 - DNA, 567 bp, Homo sapiens
agatcttttcatttcacattgcatttaattatcttcccttcgtctgtcttccccagcagacataagttttttgcagacaggaaacatgactgttactgctgcgtcctcagtgtccattataggtcctggcacataatatacactcaaaaaatgtttgatgaaggtctgaataaatcacagcaactgtttcttaaatccacattcaaaactcagaggttrtttgcttgaactctgaaaatcgatacgttttattaacaagtgaacagggctgagtttttcttttacattctttcctgtgacctttttctccttccccttggtggaatgatttgctttttttccttgccctccccattctcccagcatcctgggtactctagctttccttttatcaaaacaaaggattgttctttagaaatctgcacttttgtataaatttaacccccatatctttggcttctcctagtagcatttatacaaaaggtgcatccctgttagtagcaggaaaagccttgttctttctttattataccagcttttatcagctagtagataagaagggaaaag

SEQ ID NO: 140903 - DNA, 595 bp, Homo sapiens
taatctatacatatttaggagactagcatgggctggaaatacagttttgggaggtgtcatggttacaaccatgataatatatggattagacatccttcctaactcttccactgatttgatttctaccaccatagcttagttttgcctgttcttggacttacagtcattggaattatctatctgtattcttttgtgtctgccttctataatgcttttatggttcatccatgttgtttcctgcatcaatagttcagtcctttttattgttgagtagcatttcactgtatgaatataccgcaatgtattaatttacctgttgatggatattagggtagtttccagtttgaggtaattgtgaacagtcttgtaaagatacctttttgtggacatatgtttttctgttaggtaattttctaggagtgaatttctaagtcatacattagttatatgattacatttacaagaagataccaaactatttttcaaagtaactgtatcatgttgcattyccaccaatttaaatgagagttgcaagggctccatgtcttattaacacttaatattgtcagtctttaattttagctactctggtggg

SEQ ID NO: 140904 - DNA, 552 bp, Homo sapiens
tctaaattgaatttcattttttgagatcaaaagaggattagctcccacagtttcataaataatgaacccagttctcagccttcactaggctacaagtgatagtcgttgggatttgatttttccctacttttctgatctgcttctttttcttatttctaggtacargtagccccttgtgcttcatgcgagttggaattgtttttattcctggtgttagatttgaagtagtaacaaaaaaaaaaaaacagaaaaaaaactataaaaaggaaacaaacatttttcctgctattagctacttttattaagtatttttaaggcattgcattaagtgctttacaattcatcttttttcttatccttattatgaaaatttttaaacatataaaaagtagaaaaagtagaattatgaatatattttacctgttactaagcttcaacaattaccaactcatgttggtataatccgctgaattgagagaaagttgtagaaaatatgactttttatttttctgactcaggactacacattgcattctgttggtcctatttcct

SEQ ID NO: 140905 - DNA, 397 bp, Homo sapiens
cagtggtggaaagcttagtagaattacgccctgtarttatgtgaaaagaagaatctttgggggccagagggcagactgtggtaggaagaataatggttctccaaagatgttcacgcctgaatctctagagccttatgtggcaaaggaaacttgtggatgtgattaaggtcaagggtcttgagatggggagactatcctagattatgtgggtgggcccagtctaatcacatgagtccttaaaactagaagagaaaggcagaatagagatggaacatgaaaaggacttgagtgccattgctaagatttgaaaatggaggaagcaaatttgtcacggcagtaatgtaaagctaaaacagaggacaagaaacaacatgctttaatagagggcaggtagaag

SEQ ID NO: 140906 - DNA, 397 bp, Homo sapiens
cagtggtggaaagcttagtagaattacgccctgtagttatgtgaaaagaagaatctttgggggccagagggcagactgtggtaggaagaataatggttctccaaagatgttcacgcctkaatctctagagccttatgtggcaaaggaaacttgtggatgtgattaaggtcaagggtcttgagatggggagactatcctagattatgtgggtgggcccagtctaatcacatgagtccttaaaactagaagagaaaggcagaatagagatggaacatgaaaaggacttgagtgccattgctaagatttgaaaatggaggaagcaaatttgtcacggcagtaatgtaaagctaaaacagaggacaagaaacaacatgctttaatagagggcaggtagaag

SEQ ID NO: 140907 - DNA, 397 bp, Homo sapiens
cagtggtggaaagcttagtagaattacgccctgtagttatgtgaaaagaagaatctttgggggccagagggcagactgtggtaggaagaataatggttctccaaagatgttcacgcctgaatctctagagccttatgtggcaaaggaaacttgtggatgtgattaaggtcaagggtcttgagatggggagactatcctagattatgtgggtgggcccagtctaatcacatgagtccttaaaactagaagagaaaggcagaatagagatggaacatgaaaaggacttgagtgccattgctaagatttgaaaatggaggaagcaaatttgtcayggcagtaatgtaaagctaaaacagaggacaagaaacaacatgctttaatagagggcaggtagaag

SEQ ID NO: 140908 - DNA, 651 bp, Homo sapiens
ctttgtacctgggcttctgtatatgaaaaatgaggggcaagaatccctgtccgacagggtccttataagaattacacatgagagcttttagaatccagtaggtactcaatatttgttaattgagtctaaaaaaatctaaattttttcccctgtaaattctataccctggttctastgttactcactggaatataaacaacttaagcctacctctgctatccagtggcactcttttaagtgtttatggactgacaaatgataaagctagtacggtccctagctcagcagaggtgctggataaaactcgttttactcatgagtatatgaaaaacgggagaaagacattcaagagcatctgaaatgactcctccaaatccttagtaccatcatagcagctcatcagggtaagtaatgacatttacacaccacaatatcagacagttgggcaatcactttgcctgccccaatactgagtttgttattttgcctatgatttttcagaaaactggatggaaactacaggccgtactgtagcaggagaagacctgaaattagggaacttacccttctaaatctcatatgcccgtaaagtttcccattatcacctgttgactagagatagagaggacatatggttccttactcacccag

SEQ ID NO: 140909 - DNA, 651 bp, Homo sapiens
ctttgtacctgggcttctgtatatgaaaaatgaggggcaagaatccctgtccgacagggtccttataagaattacacatgagagcttttagaatccagtaggtactcaatatttgttaattgagtctaaaaaaatctaaattttttcccctgtaaattctataccctggttctagtgttactcactggaatataaacaacttaagcctacctctgctatccagtggcactcttttaagtgtttatggactgacaaatgataaagctagtacggtccctagctcagcagaggtgctggataaaactcgttttactcatgagtatatgaaaaacgggagaaagacattcaagagcatctgaaatgactcctccaaatccttagtaccatcatagcagctcatcagggtaagtratgacatttacacaccacaatatcagacagttgggcaatcactttgcctgccccaatactgagtttgttattttgcctatgatttttcagaaaactggatggaaactacaggccgtactgtagcaggagaagacctgaaattagggaacttacccttctaaatctcatatgcccgtaaagtttcccattatcacctgttgactagagatagagaggacatatggttccttactcacccag

SEQ ID NO: 140910 - DNA, 583 bp, Homo sapiens
gtgtgtgtgtgtgtgtgtgtgtgtgtgtgtgtgtgtgtatgagtaaaatctggccccctccatcaacgagattctcatctagcatggcagatgagatgtgcataaatacagggcaagacatactgtaaaagatgcataagggaatgatgaacaacatgctgctgaataaattgaagaagaagtaacatgaattccaatcatgrggaaccagacaaggcttcatggaataggtagtatttgttgcaagcctagaagaatgaatacaagttggccaaagaaagatgaaaataaaagcattagaggttgaggaaacagaatgaacaaaggcatcgacttacaaaagaatgcacttggtttaggaaattatgtattgtacagaatctctggagtctagtgggtttgcttgggtgtgcaggggggaaatctgcctggaaaagtagatggaggcctgatcagggctttcaaatttgtcattctccatgtgaagggagaattactcgcataatcttgttgttcctgttgtgtgtatcaacagccttcaggtaaataggagctttttattcctttatgcatgagattcaat

SEQ ID NO: 140911 - DNA, 444 bp, Homo sapiens
tgctgggattacatgcgtgagccaccgtgcctggccttagtattcctattctgtagataataaaactgtgattgtaagacttaaagtgactctttatatacactcttatatagttaaagtgacgctttaactcttagaatcaacacaagctttacattaattgaacatgacactaagggagcatctgtggtgcactgagactcaccccttgcaacattttgattcgcataaatgtcataactgaccctstgatgccctgggtgggggggtaccatttacccctgaccaccctggggagttgttagatggtgatgatcctagtacaggcacttagttcactgagactctggaaagaactctgagatagaaatacaaggctataattgataatcattattaaggcttttatttgaataatgagaagaataaagaacagggaaaatg

SEQ ID NO: 140912 - DNA, 619 bp, Homo sapiens
cttatatagttaaagtgacgctttaactcttagaatcaacacaagctttacattaattgaacatgacactaagggagcatctgtggtgcactgagactcaccccttgcaacattttgattcgcataaatgtcataactgaccctctgatgccctgggtgggggggtaccatttacccctgaccaccctggggagttgttagatggtgatgatcctagtacaggcactyagttcactgagactctggaaagaactctgagatagaaatacaaggctataattgataatcattattaaggcttttatttgaataatgagaagaataaagaacagggaaaatggttggattttattagtttatttttattattatgccaatagaatttatattgtttctaagcaaataggtacatatcagtacaatctgtgttttcagtatattgaaaaaatacatagctaaggaaaatatgataacttagtgaggttgaagtaggttttttctataaaattttgttgttctttcatgttactttttattctaattagaaatcaaggataaactaatatggaacaaatctggatggcaaactccacttctttacatttcttgagcgccttac

SEQ ID NO: 140913 - DNA, 409 bp, Homo sapiens
acctcagtactctgttactgagtactgagattataatatgacmgttgtgctggagaatcagttccaactgcaatctgaagctcccagaagggtggatatctgcatccttaactcacatctcaaactgttcactcagcaaacaaagcaaaaacaatatatcttctcttcttcctacttcactacctttagagttatgtaaaacactttaatttgcaccagaacactggggaaagagaaaaaggcagccaggataatataacagtatctttattaagcccttgtgcagttttaaaacgtcagtaacttgaattgagaacatggtagaggcaacctacaaatcatatttgaaagcaaactgaattttctcagaactgccagaaatttctattcagtgcagagtacacagtga

SEQ ID NO: 140914 - DNA, 409 bp, Homo sapiens
acctcagtactctgttactgagtactgagattataatatgacagttgtgctggagaatcagttccaactgcaatctgaagctcccagaagggtggatatctgcatccttaactcacatctcaaactgttcactcagcaaacaaagcaaaaacaatatatcttctcttcttcctacttcactacctttagagttatgtaaaacactttaatttgcaccagaacactggggaaagagaaaaaggcagccaggataatataacagtatctttattaagcccttgtgcagttttaaaacgtcagtaacttgaattgagaacatggtagaggcaacytacaaatcatatttgaaagcaaactgaattttctcagaactgccagaaatttctattcagtgcagagtacacagtga

SEQ ID NO: 140915 - DNA, 508 bp, Homo sapiens
ttataattttagctcttacatttaggtggttgatccatgttgagttagtatttgtacgttgtatgagttagggttctgatttcattcttttgcatatgaattgtcttcttaatttcatttttggattgttcattgcaaatgtacataaatataattatttatagaccaatcttatatcctgcaaccttgctaaagccacagttttctagtgaattcctcagagttttctatatacragatatacatgcaaaaagagagagttttgcttctttccttcaaatatggatgccttttttccttgcttaattgcaccagctagaaccttcagtataatgttagaaatggcaagagcagacatttttgtcttgttcctgacattaacagaaatgcattcggtctttcgccatgaagtgtgatgttagctgtggcttgtatagattttttaaatctattctttgaagagataatactgtatcttattgctgtgttgtaaaataactttcccatc

SEQ ID NO: 140916 - DNA, 566 bp, Homo sapiens
atgcccggcatacatacatctcttaatcaccacaagacttcaaaggaaatcatttatttcctctttatagatttaaagaaactgaggcttagagaggtgaagaaaaatwcatgtctgactgattccaaagttcacaatctgcttactatagcatgctttcttttttattgacatcatgtaacacttgtgcaatttaagaaaaataaagaagtaaattgaactgggtttagctttgtcaaaacctaacttgggcataaacttaaatcctgaggagaagctggttttcctagatgatgcacatctttctgaaggagaacattctaaagtgagctcagatatacacactttctcactgtggcctgctaaaataaaatgagggaacaagtcttgctgaatgacttcattcatttatttaataaacctttattagatccaatacaaggcagcttgataagtaatgtggaggtgtaaagacaaataaatcatggtcactttcctgacggagcaggtcttctgggggacagaatgagtgtctacagggaggaagtgattaataccaaaggaga

SEQ ID NO: 140917 - DNA, 567 bp, Homo sapiens
gctttgattgtgttttatgttcaggattgtattggtaaagctatgtttcaccttccattacaattcttcaaaaaaaaaaaaaaaaaagagaaaatgaccttgattaaaatrtcctgattaaaattgggacctttattaaaatgtccattgaaatctcttctcttgtttgcagatgatctgagtgtttctagtaattaggagttttttcttgaaaagggtgcatgtgtgtttgttcaggaatttatgccaggataaaaactatgcaaattaactctatctaggttaccaaatcaaaatagtgaaaggctggggctaagtgaagatggtcagaatctataaggcactgataaaataaagaatgaaaaacaaccatgccacccagggaagtcctgtgaactgagaatcacagaggctattgtagttacctactatatagtataggggcctgtatggtggttttaagtagagcttaacaccacatagaaaatggcttggaaccagacgagagtggaaaatatttacctttccatttgaaagtcaaagagaactgaatttacacaaagaatg

SEQ ID NO: 140918 - DNA, 591 bp, Homo sapiens
ttgacacaaacaaatgaagtgtgcaggaaatgggataaatgaaggaaattttaacatttttatagtactctagaagataatatccaaaacaaatacagttgcaacatattttaagtttacattatatgtaaaagaaaaatatatgacaggagtggcaaaaaaatggcagagaggaattgaaagtaactgttacaagattattaaactacatgcaaaatagcacaaaagtatctgaaggtagtatttgattaattaaaaggcatattttgctgaggataatggtttccagctgcacaatgagaacacatggacacagggagggaaacaacacacactgggagctgtcagggggttgaggggagggaaagtgagcatcaggacaaatagctaatgcatgtgggacttactacctaagtgatgagttgataggtccagcaaacyaccatgacacatgtttacctatgtaacaaacatgcatgatctgcgcatgtatcctggaacttaaaataatttcttttttaaaaagtgcatattttattgctaaggagtagattttcaatattctcacaacaaaaaaaaaatatatgaagt

SEQ ID NO: 140919 - DNA, 609 bp, Homo sapiens
ttcccaaaagaatagatcattttttataagtcctataactgctccttccacttaagagtttacaatttcagagcaaaaactgtgctatgacatcctgacatggtgcttgggaattagaaaagaagatggtatcacattttcatgtcctaaatttgtttttcagtgataatctcctctctgaaagaattataaaagaaaattagcaatttgaagataaatactacatagaataatatacttttaagactggagggaatctttaagatccatgtaaaaatattgcaaatgagggattttagtagtaagraaaatttgccaatttttactcgattagtttggctatttttatatattctttttcctatgataatattgtcattgtgtcagttccacaataatgctgcacccagaatcacaagaaatgtttctttttggtataaagtgaagaaaatgcccctttatcctagaggacttttgaagacataagagattaatataagtatttttaaatgaataaacttagatcaaacagacttcagcaaaatattcaggagtttcacattccagattattaccaatattcttctccaactcagtgtttattgcaac

SEQ ID NO: 140920 - DNA, 327 bp, Homo sapiens
cttttaaaacaaacagccaacaacaacatcaaaatcctgggtttaagattttgttacctaatgggaatacaaacttcaactggaatacctttgctgttatttcttacacactcattatagatgaataacatgcagttcccagcgcaatgtgaaatgctgccaatgacaatcgccgaaatgacttgtgaaatatgcctgtttcagcttcttcaacccagctgtgagcaccacttcagctccactcaagggcaggactgagacagacactctgggttccattgttaagacaarcacctcgggatgcctattctcagtctcacaaggcta

SEQ ID NO: 140921 - DNA, 552 bp, Homo sapiens
agtgtttctaactttgtacccttttatacactgtaactggataacaggtttatatatatatatatcatagttatagtatgaacatttgaaaattttaaccttaggattttctccctctgctaatgccaaagagggagagagagtgtgttaaaatagcatttcaacttgaaatctcagaaataacaccccaaaaggcctatttcacttattttgtgttggagaattctcttagatagttaatgcctatttatatggtaattgctccccaatatatggctcctttttctcttttcagctagatttccattttcacctaataacaccagtcactaacgtactgtgtgagtacaaatgatcttcatgaatagtactgaaygaatcaataaaatgttcaagtttggcttaagctgaatgcttaaccgttcatgaattaaaatgagatgagagaatacttgtgaagcatggggcatgacttttctttcagtgattctttgagaaaactagcccacatgacagttatgttctttccactgtcactgtttcactctcttc

SEQ ID NO: 140922 - DNA, 550 bp, Homo sapiens
cattcacacctgctttggcagagttccagatttggtaacactctgggagcagtattgagcycccaaagtatagcatgagtgtatgcttgtgtttgcaaggagggactgggcgtgggtgagagggaataacaggctctgctctagaaaaccaagaaagagccgctgcttttgttcaacatgagctgctccaaagtccaggtagatgaggtatcccagacagctgcgcttcttccctcctctcttttcaaggatttagctctgcctggggcttacaaaaaggattggaaattttcaggtgaacatatgtggtttaaggagaaacttgcctgccaggcaacctgggagtcttaatctgatcagacctcactcttgtcctggcaggtctagtccctgccctcgaggcctgggcctgggcccgggcccagcttccatccttcacttcagttctgcaaattctcactcccactcatgttggaagggagaaagctagtccatctcacagagtgaacctcagcagagggtgcaagaagaccctgcctgggaaggcagg

SEQ ID NO: 140923 - DNA, 623 bp, Homo sapiens
ttgaacatagacatgcaaaacacactcwcaaacatatacgaactaatcgattaaacaggcaaataaatgaatttaatttaactaatagaatatgacctcagtctagaaaaatatttaagcagcatacaaaacacactcatcatagagaaaaaatttacaaacaaaatggcattaaatgtaacatctctaaatgtaaaccaaaattcgacattaaagaggggaaaagatgttattcgcaacacatgtaatcacaaagacttattttgagaatatacagataacttcgtgtaaacaagaaagagagaaaactcatgagaacataagctaaagctccaaacaggtgtaagttaacatatacaagacacaaagtgggatattctaatgatttaaatggtcagtatacataaagaaatgtgcttcaccttatcagtaaccaaggaaatacaaattaaacagtaataaaatttattataacatccataagaatggctagaatttaaagaaccaggggatggcacacaaggagaaatcataaaattctcatatattgatagtagatatataaattgttataatcattgcagaagataggaactcttgattaattttaagatgcatatgtc

SEQ ID NO: 140924 - DNA, 481 bp, Homo sapiens
tagatctaaaatctcaagttcctsttagagagagaaattgtgccaaatcttcagaggaatgctatattcaattggaggggacagagggaagacagagaggaaagagagagaaggagataaaataaagatgtgttaaagtcatggatgctgtttactgtaaggccctaaaactaacagggtttaagtaatcagaacattttgtttcatacattgagtattctcatataatattgtattttacttttcttctggtttgaaaattaacttctcatattctttataattttatggagataaatgtcaagcatcttttttttttttttttgggttgttgtttttattttggtttcctgggagtgatttcaagtttactgtttttttaacttaatgaaaataaatgctaatgtgtgtgtgtttgtgtgtatgtgtatatatgtatatatatatagcttttatcacagctatctatatgttttatcta

SEQ ID NO: 140925 - DNA, 562 bp, Homo sapiens
cttggattaacagtcacatctgtaatctggtttgtggctgcagcacagtcagaatacattctgatggcagatccctaaggcaatggaaggcagcttagtggcacgcactgaggagatggtgacaaggagtcctctcaactctgctgcctccaaatcaacaactccagacaccgataccacactcagatctctaagcttcttcaaaaacagagcctctcagatggttcttycctaaaccttcagcttttcactcctttaattcatcgtaccctatgatctgttgcttcttgaggatgtaggtatgtcttctggtaagagcgagcagaacaatcgccggatgttaaaggacaatttgaaaagaaaacatattttggaaagctgaaatggttatgtatgtgcttaaagttagcttccaactgttggacttaaaactttactaaacgatcaaaaatacagcatacctttatattttatttctacgggagaacacttgagaaggaaatacacattgatatatcacctcatataaattttttcagatacaaaagcacaagttttttcc

SEQ ID NO: 140926 - DNA, 562 bp, Homo sapiens
cttggattaacagtcacatctgtaatctggtttgtggctgcagcacagtcagaatacattctgatggcagatccctaaggcaatggaaggcagcttagtggcacgcactgaggagatggtgacaaggagtcctctcaactctgctgcctccaaatcaacaactccagacaccgataccacactcagatctctaagcttcttcaaaaacagagcctctcagatggttctttcctaaaccttcascttttcactcctttaattcatcgtaccctatgatctgttgcttcttgaggatgtaggtatgtcttctggtaagagcgagcagaacaatcgccggatgttaaaggacaatttgaaaagaaaacatattttggaaagctgaaatggttatgtatgtgcttaaagttagcttccaactgttggacttaaaactttactaaacgatcaaaaatacagcatacctttatattttatttctacgggagaacacttgagaaggaaatacacattgatatatcacctcatataaattttttcagatacaaaagcacaagttttttcc

SEQ ID NO: 140927 - DNA, 562 bp, Homo sapiens
cttggattaacagtcacatctgtaatctggtttgtggctgcagcacagtcagaatacattctgatggcagatccctaaggcaatggaaggcagcttagtggcacgcactgaggagatggtgacaaggagtcctctcaactctgctgcctccaaatcaacaactccagacaccgataccacactcagatctctaagcttcttcaaaaacagagcctctcagatggttctttcctaaaccttcagcttttcactcctttaattcatcgtaccctatgatctgttgcttcttgaggatgtargtatgtcttctggtaagagcgagcagaacaatcgccggatgttaaaggacaatttgaaaagaaaacatattttggaaagctgaaatggttatgtatgtgcttaaagttagcttccaactgttggacttaaaactttactaaacgatcaaaaatacagcatacctttatattttatttctacgggagaacacttgagaaggaaatacacattgatatatcacctcatataaattttttcagatacaaaagcacaagttttttcc

SEQ ID NO: 140928 - DNA, 557 bp, Homo sapiens
acatctgtaatctggtttgtggctgcagcacagtcagaatacattctgatggcagatccctaaggcaatggaaggcagcttagtggcacgcactgaggagatggtgacaaggagtcctctcaactctgctgcctccaaatcaacaactccagacaccgataccacactcagatctctaagcttcttcaaaaacagagcctctcagatggttctttcctaaaccttcagcttttcactcctttaattcatcgtaccctatgatctgttgcttcttgaggatgtaggtatgtcttctggtaagagcgagcagaacaatcgccggatgttaaaggacaatttgaaaagaaaacatattttggaaagctgaaatggttatgtatgtgcttaaagttagcttccaactgttggacttaaaactttactaaacgatcaaaaatacagcatacctttatattttatttctaygggagaacacttgagaaggaaatacacattgatatatcacctcatataaattttttcagatacaaaagcacaagttttttccttaaatcatg

SEQ ID NO: 140929 - DNA, 440 bp, Homo sapiens
tttttaaaaagaaaatactcattgatttagataattatctgtcagaatttactaatgggcctcagttatagcagataaaattatgktataatagctcttgttcatcaaaaagaaggaaaagtgggtttgatagaaggtaaaaaggcatgattttcagaaacatgtaattttttatgtagaaagaaaactgaattttgctaactatagaaaaggcttctttttaataaaaggaaaaatatagagacttctgttcattttctagaactttccttttagatggcactgactcagattctctgggaatttccacttgatgactgatattcacagggacatgtctgtctcttgctgaaagtgttacagtaattacccattccaatatgattccagctggaaaggaaactgacagcttccacagcagctgagtcatatgtctctga

SEQ ID NO: 140930 - DNA, 440 bp, Homo sapiens
tttttaaaaagaaaatactcattgatttagataattatctgtcagaatttactaatgggcctcagttatagcagataaaattatgttataatagctcttgttcatcaaaaagaaggaaaagtgggtttgatagaaggtaaaaaggcatgattttcagaaacatgtaattttttatgtagaaagaaaactgaattttgctaactatagaaaaggcttctttttaataaaaggaaaaatatagagacttctgttcattttctagaactttccttttagatggcactgactcagattctctgggaatttccacttgatgactgatattcacagggacatgtctgtctcttrctgaaagtgttacagtaattacccattccaatatgattccagctggaaaggaaactgacagcttccacagcagctgagtcatatgtctctga

SEQ ID NO: 140931 - DNA, 550 bp, Homo sapiens
atcttctgccaacttttctaatcttttgaaatcctgtttcatctagaattatatttttaatctaaataacagcaatgtgttgtggcaagatttgcaaaaaaaagtttttctttcaatmttatcagtttaaaaagttgagttgatcctattttttgcagtaattgcaacaggtattttggtatactttttgaagctgagtggaacatttaaatttttttactataaaaattcctttttattgaaaatgagcaagaagcaatgttgggaactaaaattacacagttctgatgctatctgtttataatagagctggagaacatataagagtgtatgtgtgtgtgtggaggtgatattagacagttatcaaataagtaacaacacagacaaaggcatatgccacaagaaaggaacagagtttcactgggtttaccacccaaattttaacctcgtaaaatggtttttgcatttgttttatcctcattttgacatgtcagtctagattagattttctgacctcttttcttatgcacggtaatattaatcattgctg

SEQ ID NO: 140932 - DNA, 579 bp, Homo sapiens
ctgactttgaaagtctcagactccaagagctattcatgataagcctagggagaagcagcagaaaataaaatgttgcctgtggaagtggtgcactctcccagtcggcagggggcgtacccgtgccgggagcaatctcaaggaagactattcacatatttctaaaattcactgtaccatgacaactttcacagtgattgatagaaacagaatttttcatgctacttaattatttaaatacacaatgttaagtgtgaaaactcaragaaaaagaaaaagattcctccatttttgacatgaaggtaaaaatatcatcttacaagtttagattcagtcttttgtggcattcagataggaaatcttagtaagattcttagtaaggcttattctagctagcttgccacgtgtaagtgggtagcactgaaatattattgatcttgtttgggtttctgtttctgtatgttgttaaaaaattatacagtttggattggtaatctttgtgtttcctttcctcaataaaactatacgacttcatgttcatttatatttgtattatccaaacagaagagagactacgataat

SEQ ID NO: 140933 - DNA, 579 bp, Homo sapiens
ctgactttgaaagtctcagactccaagagctattcatgataagcctagggagaagcagcagaaaataaaatgttgcctgtggaagtggtgcactctcccagtcggcagggggcgtacccgtgccgggagcaatctcaaggaagactattcacatatttctaaaattcactgtaccatgacaactttcacagtgattgatagaaacagaatttttcatgctacttaattatttaaatacacaatgttaagtgtgaaaactcagagaaaaagaaaaagattcctccatttttgacatgaaggtaaaaatatcatcttacaagtttagattcagtcttttgtggcattcagataggaartcttagtaagattcttagtaaggcttattctagctagcttgccacgtgtaagtgggtagcactgaaatattattgatcttgtttgggtttctgtttctgtatgttgttaaaaaattatacagtttggattggtaatctttgtgtttcctttcctcaataaaactatacgacttcatgttcatttatatttgtattatccaaacagaagagagactacgataat

SEQ ID NO: 140934 - DNA, 585 bp, Homo sapiens
tccagctccctcccaacggcattaattcaaatttccccagtgctagtattttaccacattctctctttatctcccactttcctcctccctccacttatatatgcatgtaggtataagtacctgtgtgtacatatgtgtatatatatggctcttaatgatttttaaattttgtctmtatgggggatgatatcccattactcttaaacaagtcagcaatgcctttaaaacgtattttttccttctggtccaggatctgatttagattcacttactacatatggtgctgttcctgtttaataccctttaatatgaaatagttcctatttttcctttatttaatactgacttataaaaacacagattagctctttcacagaatgcactcaaattcggtttttctgatgttttcttatcattggattcaggttgtatatttttggctatgatatcacagacacaatgctttggttttctcattggatggcatcaaggggcacataatttctattttcctcatggctgttattagctttaatcatgtagtaaaggtagtttctcacaggtttctccattataaatttattg

SEQ ID NO: 140935 - DNA, 596 bp, Homo sapiens
ttgttgagtatcatagtgttgtgtcagcattttatggactttttcctccctttctaatgaggtacatgccaatttttatgctctaagaataactaaataatgaaaatatataacaacagagtctctactaagctgaataataatatattatagctgcaagcttcccttagaatgaaaggacaattgagragacccagagaacgcatcatgtagtcaaaatcttcaacatccaaagaggagtaagaaactaagtgaacaaacccttgcagttagaacctgagtgtcttattcaaatattattgtagttgatgggcagtgttcatgacagagttactgtgaatgagtagagagagaggatttatgagtctataagtgaaagtgaaaagggcaaagttaacttgagagggggagagaaagagagaaagaaagagaaatgcaccccttagtatatatcctcaatataacagtttataggtgactacattgcacatgtaatgaggtagctttagaaagttaattcatacaaggaaaaaccaatggtcagtagtcaagtaccttgtttaactgtcaacttccccactagggccctgctgaca

SEQ ID NO: 140936 - DNA, 584 bp, Homo sapiens
tgctactggggcctggggtcccaacccctggagcatgcagactcttaacagcctctcagatggaatctgcttaaacctatgaaactcccatgggggacagggggtgggggcaagcagcactactgtcgctgcctgctgtctaagccatttgagctgcttgagggaggagcaacagtcagcactgggtctcaaaacttcctaacgtgctaagctccctgggcagggggagggcaacacccatctctatagctccaggctgtgcttttcccctgctggagccagggagactagayagcttggtcccaagacttgcccctacagcccaacacactgactgtggcagtttgtagccagaggacctcttcaggcctgaccctgatccatccttcctcattgggcagggattccctgcaggaattccaataactccagccagaggctcagggacagaacctggatctccctgggcctgaacccctagggagaggggtggccacagtctctgtggcccagcagatttagcctttcctcctggtagttttgaggaatccagtcagcccagatgagtgggtttccccccagaa

SEQ ID NO: 140937 - DNA, 579 bp, Homo sapiens
ccagggcctgtagcggggtggagggttagggaagggaacttagaggacgggtcaataggtgcaggaaaccaccatggcacccatatacttatgtaacaaatctgcacattctgcacatggatcccctttcttttaaaagaaatttaaaaaagaaagtataatggacatatattaagaaatattattttatattcaatttaaataaatcctagaactttcacttgaacctgccatgttccacagagttgaaaataagagttaaattgatcatgaatttatacatactccaggaaacacagcaacagkatcgcacaatataacctaaatgaatatagtagtttttctgtggtgggatccagtgattctgacaaagcaattgagtaaatttctctttctctattatggagagagaacacatagagtgtaacagaaaatgccaccaagcaagactttcagatatgatattttaaaatgatttagaaaaactctattatttggaatcatttctatttatttaaaatttttaacataaatattttattctaagcaaaccataaatagtgcaattttaggagtcaa

SEQ ID NO: 140938 - DNA, 529 bp, Homo sapiens
tggggcctgtagccccttggttttggccaatttctcccatttggaatgggaacatttatccaatgcctgtactaccatctaccrttgtatctagaaagtaaccaatttgcttttgattttataggctcatgggtggaagggacttgtcttgtttcagatgagactttggatcatggacttttgagttaatgctgaaatgagttaagactttgaaggactgttggggaggcatgattgcttttgaaatgtgaggacatgaggcttttggtggggggccaggggtaaaataatatggtttggctctgtgtccccaccaaatctcaccttgaattgtaataatttccgtgtgtcatgggagggtcccagtgggaggtaattgaatcatgggggcaatttttttgccatgctgttctcatgatagtgaataagtctcatgagatctgatggttttacaaaggggagatcccctgcacatgttcacttgcctactgccacataagatgtgtcttttttcctcttcaccttcttc

SEQ ID NO: 140939 - DNA, 602 bp, Homo sapiens
ggatgataccttgagtttagccttgtgggttcctgaacagagaatctggtcaagtcatgtttggacttcttaccaaagaaccatgagataatagatggataaatttttaaaaatacgtaattattatttattattagtgtttactttttgcatgcaagttatatacaaatgcaacaatagaaaatgaatgcccatattgaacaatagaaaagtatattaaaaaagtttgaaagtcttcctttaatgatacttcaatgcctacttttctccatggagttaagcaatgttagtaaagtccatctattttataactttatatacacatttatatgcttacattttttaaaaaaagaaaaatgggatcaaactaagagtttttctataattgagctgttcacccaagtgttattgagacctttctatgtcagtatgtagagatctaccccattcattttaatggcagcacaacattctgtagaaagaaaacattttgtaatttatttaagcacacctcctttcttcctggctyccaccctactcccaaggttaaacccagtgtattgggttttactttgtatagagttttcttaatataaacactt

SEQ ID NO: 140940 - DNA, 572 bp, Homo sapiens
atcccctttgcctgaaatacaatgacttgaaaaacattttgaaagggctttagaacaataacaaataaaaaagtcaggacctaaaataaacataaaaccctgcagcttgaacagctatactatgtggcccacattttaacccttcttaacaagaacactcatagatattctgaaaagaaaagacactggaaaaaagattgtcctatattacaaaagaaaaacacaaaaaccctctattgaaatcaatgcgcattctctaaggtagaaaaaagtatccaagagcctattttaaacactcaaggtgaactaactataaatataaataattaacattttcattttctgttagatttgacttgactgttagagcctggtatatacaggtgttacactctctacattaaytaaacacccccaacttcgttcaacctcttcctcagtgtaaacacagctgtaagtattcaaataacccacagattttctctatcctccagatcctgactataaaccttggattcttgactaaaaaacactccttcctgttctgcgatatgaccacagaaaatgaaaat

SEQ ID NO: 140941 - DNA, 480 bp, Homo sapiens
tgcaatggtgtgcctttatttcaaatttccatgttgcactgtaagatgtcaattgyatgggaagaaaccatagagaaaaacaagaaagctggtttctttgatttaacagacaatgtatagaccatttgggcactggcccagggaagtttggaaaaagggattaagtcccttaaagattggtgtttcccatagggggcctcagcagaagggtaactattaaggaaggaaaagtagccccacctacaaaaaaggaggttatgatagatctttatatttctcatattaattcaaacattttctagccataccataagcaagaataaagacaaatttgcaagtttcctgttattttgtccctgtcaggctgtgagaacagcagcattgagatcctctgaagtcctggtgagagcagatgacaagtccgtgagtggccctgtgaagtgaaagcaggaagttcgactacatgaaagatttatagtt

SEQ ID NO: 140942 - DNA, 378 bp, Homo sapiens
ggcaattggtgatggaacagctgtcacatgtacaaaaagagtcaagacggagcctagaaacattgataaaatgtagagcagaaaagtgagcagagaaaaatggcaaaggacattctaaaaaatattcaaatgctcacattaaaatataagcattttatttgtataagtacaacttaaagcaagaaaccatttttcaattatcagagtggcaaagatctttttaaaatgataatactcaggcttgtaggttttggtgtaacccatgtgcccttctggcaggagtgtactgtaaatgagtccaatctttttgcagggcaataggtaggcatcakagcctttaaaattatcaaatctttaacctgctattggagttttaga

SEQ ID NO: 140943 - DNA, 354 bp, Homo sapiens
ttcagacatcagttttatttgaattacacactttccaaattaacgttgcaaggaatccctgtcaatccactgctcctagatttgtcctcaatggcactcattcttcctgatccctccttacactggaactccaggtagcacaaagtctgtttgggtggtaggtatagttatgccctcccaaagcatttttttttctccttacccttgaaaagatctacaactgcaaattttgcgccaagtaaatgtgaactggcactatttatttaaaagattatagcyttcaatacatggctggagaatgccacacagactcttgtgtagtggccaactaacaaatcactccattgccctaaa

SEQ ID NO: 140944 - DNA, 354 bp, Homo sapiens
ttcagacatcagttttatttgaattacacactttccaaattaacgttgcaaggaatccctgtcaatccactgctcctagatttgtcctcaatggcactcattcttcctgatccctccttacactggaactccaggtagcacaaagtctgtttgggtggtaggtatagttatgccctcccaaagcatttttttttctccttacccttgaaaagatctacaactgcaaattttgcgccaagtaaatgtgaactggcactatttatttaaaagattatagctttcaatacatggctggagaatgccacacagactcttgtrtagtggccaactaacaaatcactccattgccctaaa

SEQ ID NO: 140945 - DNA, 557 bp, Homo sapiens
cctccaaagcataattgcttttttaaccagaatcaaaacgtggctgaataagtccctctgcaactagaagcagcaatgtggtctgtttgttcaaagctaggaattctctcaatatcaggtcaatagattagcagaaatgaggtaggaaggagaaaggaaggagaagaaatagaaarcacgcatccactttcaggccaagaaacaaacaaaattaattccacatacttctccatgggcacagaaatgattttccatacaagctcacatatacgtatttgcatttcttgaccatgaatccgagactcgaacagattgtttgcctagagagaattcggtcttaatcatcaagctgttagccaatctcagttatattttacaggtaaaagcagacatttaatagatttctcttctcaaaaggcaaatgctctagtgtagccaaagatcatctacaatttttaaaaagcttaaagacatttacatattagcttttatgggcttaaactccaaagtctagagagttatgtaaataacaatactcagaaaaagaaatttatcta

SEQ ID NO: 140946 - DNA, 557 bp, Homo sapiens
cctccaaagcataattgcttttttaaccagaatcaaaacgtggctgaataagtccctctgcaactagaagcagcaatgtggtctgtttgttcaaagctaggaattctctcaatatcaggtcaatagattagcagaaatgaggtaggaaggagaaaggaaggagaagaaatagaaaacacgcatccactttcaggccaagaaacaaacaaaattaattccacatacttctccatgggcacagaaatgattttccatacaagctcacatatacgtatttgcatttcttgaccatgaatccgagactcgaacagatygtttgcctagagagaattcggtcttaatcatcaagctgttagccaatctcagttatattttacaggtaaaagcagacatttaatagatttctcttctcaaaaggcaaatgctctagtgtagccaaagatcatctacaatttttaaaaagcttaaagacatttacatattagcttttatgggcttaaactccaaagtctagagagttatgtaaataacaatactcagaaaaagaaatttatcta

SEQ ID NO: 140947 - DNA, 589 bp, Homo sapiens
aggcatatgatgtgtaataatcccatcagtataagtgggatatccatcacctcaagcatttatcatttctttgtgttacaaacattccaatcataattttttagttattttaaaatgtaaaataaactgttgttgactgttataaccttattttgctatcaaatactatatattattcatttgatctaactatagttttgaacccattaaccatccctccscatccgcccaacccttcacagtctctggtgaccatcattctaatctctatctctattagttcaattgttttaatttttatctcccacaaatgaataagaacattcagtgaagtttgtttttctgtgcctgacttgtttcacttaacataataaccttcagtttaatccatgttgttgcaaatgacagaatctaattctttttatggttgaatagtactccattttgtttatacgtaccacattttctttatccattcctctcttgatggacacaggttgcttccaaatcttggcaattgtgaatggtgctgcaatgaacatgggagtgcagatacttctttgatatactgatttccttattttggggt

SEQ ID NO: 140948 - DNA, 589 bp, Homo sapiens
aggcatatgatgtgtaataatcccatcagtataagtgggatatccatcacctcaagcatttatcatttctttgtgttacaaacattccaatcataattttttagttattttaaaatgtaaaataaactgttgttgactgttataaccttattttgctatcaaatactatatattattcatttgatctaactatagttttgaacccattaaccatccctccgcatccgcccaacccttcacagtctctggtgaccatcattctaatctctatctctattagttcaattgttttaatttttatctcccacaaatgaataagaacattcagtgaagtttgtttttctgtgcctgacttgtttcacttaacataataaccttcagtttaatccatgttgttgcaaatgacagaatctaattctttttatggttgaatagtactccattttgtttatacgtaccacattttctttatccattcctctcttgatggacacaggttgcttccaaaycttggcaattgtgaatggtgctgcaatgaacatgggagtgcagatacttctttgatatactgatttccttattttggggt

SEQ ID NO: 140949 - DNA, 594 bp, Homo sapiens
attctttcttattattttgtctcctccaacaagcttactaattcttttttctgtttgacgaattcttctactgagaaattgtgatgcattcttcagcatgttaattaaatttttaagtcccagaatttttttgatttttaaaaattattttaatttctttttaaatttatctgataggattttgaatttcttctctgaagtatcttctattttattgagctttttcaaaacagttatgtgtaattctctgtcttaaagattaaatatctttgtcaatctgggattgatcactggtgctttatttagtttgtttggtgaatttatgttttcctggatggtcttgatgcttttgaatgtttgtcaatgtctgttcattgaaaaattaggtattcattgcagcctttgaagtatgggcttctgtgtatcctctttcttgggaaggttttccaagtattcaaagtgaactgactgttgtaatctaagactttggtaactacaaccatatctgcattaggagatactccaagcccagtaattctrtggctcttgcaggcttatagagaagctgccttgatggtcttggctaagatacaa

SEQ ID NO: 140950 - DNA, 499 bp, Homo sapiens
ctaaaactgagctacttcaaaattcaatggtaaatattacttgaaaggaagaaaattaagcagtgttttctctataaataatgtttaaagaaataaagcctgataatgctgttaatgatgatgatactcatattcagacttttaattttgagtaacaatttttgagtaatgaaatatatccatgacctgtgttcaaggtagtgaagtccctgacattttttaagttcaaagtttttatgaatgattgggttgtgagrtgagctgatgcagcctttagcagcctacagtgaatgtaacccctggataagagtgtctgtaagacagagagagtttcttgtcctaataaggtcaagttatgcaatgctgcataactattttaactattttattctcctaggtggcgggggcctgtatagaggaaagtttgatgattgatgtacttgaaatctgaaaatatctatttgagcctgactccgctagtttgcagctaggctttgta

SEQ ID NO: 140951 - DNA, 401 bp, Homo sapiens
tgggtcatactgtactcagaataaacaggcaagagtctccttatttattggctctttagtaaattaactatacatacctaggaagaaaacctaaaaaatccaaatgatttgatttggatgcttgtcccaaccaaattcatattaaatgtgattcccagtgttggaagtaggcctggtaggagatgatgggatcatgagggtaattccctcattaatggtttagcactatccccttggtgattagtgaattctcatttagttcacacaagatctgatatttacaattctgggacctctcctgtctccctttcttgttaccactcttgctatgyggtgtgcctgctccggattgatcttccaccataattgcaagcttcctgaggcattcaccagaggctgag

SEQ ID NO: 140952 - DNA, 491 bp, Homo sapiens
tttcagttttccttgttcagtatgataccagctatgggtctgtcatatatggcttttcttgtgtaaggtatgccccttctatactcagttgcttgaaggtttttatcatgagtggatgttggatttcatcaaatgctttttcagcatcaaccgawatggtcattgggtttttgtccttcatcgtgttcatataagatattacattaatttgtatatgttgagccatctttgcatccctgaaataatccctcttggtcatgatgaataatctttttaatgtgttgttcaaatcagtttactagtattttgtcgaggatatttttttttcaacagtgttcctcagggatattggcctgtagtgttttgtttgtttgtttgtttgttttttgtttttgtttttgtttttatgtgtctttggccttataggatgagtttggaagtattatcttcgctgtttttcagaatagtttgagtataattcatattagttc

SEQ ID NO: 140953 - DNA, 528 bp, Homo sapiens
agggcccattaaaaaaattgcaagaaatctgtccctaaccatggcatgtattgtttcctcctctgctactgccttagcaacccagcaggcatctctcaactccattaggaaggttgttataggcaacagaatagctctagttattcttttagcctaactgaaaggaacatgtgcaactgccaacacttcctgctgtaccaagaaaaacacctctggcattacagagatacaaatgaaggacattcagaagcaggtccactggttgcaaaagatccttctgtgacctcttcagtaactaaactccagggcacacacctctytagcaacttctcacctgaatttctgggattcttggcttaggccactgctcctggaaggcctgacctttctgcttgtagtagtaaccttcctgggtctagtaaaatgtattctcactatggctcaataatgttgcactaagattgtgtcaatcaaagtatcatattgatttagcaagacaaacctctgtctccatatctgggaagatct

SEQ ID NO: 140954 - DNA, 565 bp, Homo sapiens
actccttataaaaccatcagatcttgtgagacttattcacaaycatgagaacagtatggggaaaactgcccgccatgattcaattatctctcctacaacgtgtgggaattacaggagtacaattcaagatgagatttgggtggggacagagccaaaccatatcaattgctgctctttgttaggttaagagagaaaccagagatagccagaaggttggatgtgtggcccactcttttgtttccatcatggggtagaaacctcggtattggaggaacacagatgagcacatacaatgttatgcattttcctgcttcttttacttggaatcctttccgggttttatattaatctaggttctgtaagttctcaattggtctatagaattcttgcagaagtgctctggtctgtgcatgattgttaaatcaatgtttctagggaaaacagagggcctgaagctctcttcatcttcctgacatctttcaggatcttgctgacatacattaaaaatttatttcccaattagtcatatatcattttcttatggtgttttcccatgccaaaaata

SEQ ID NO: 140955 - DNA, 521 bp, Homo sapiens
caaataaaaagtaaattactttgtgagaaataatgacataaaaacaatacattttttctcatttaataaacaaaaaggttgagaartcatttacaatgttcttgttggcttgatgttattattattcactgggaactagggagatagtaacaatgttcaaacatagatttaaatccttttttttatgtattcactttttttagtcatatgttagaagctaattgtgtcccagagactcttcaatagtttacaatattcattaattgaaatcttacaactgctacgtaagatagtcagcattattgtttacattcaatagacgaagaaactgaggcacaaaaaattcaaagagctcatatagtaagtaaacactgaagctaagatttaaactaatgatgctctttagtctgtactttcattattgcattatagaaaaatatctgtctaataaaaatgtattcagtgtctccagatccctaatattgttctaggtatagaaagctaatagaaaagaaaggaca

SEQ ID NO: 140956 - DNA, 526 bp, Homo sapiens
gtttgagaggtttattaaatattcaagtcaatctagggttctaatgagttgtccagtgagtagcaaggactagagttataaatttcagtcaatggactacatacagtttatacaatttatgacaggatgaaaatgtccatcccaaaggatattgatgcactaatctctggaacctaagaatgttatcatatacagcaaaaatttaaaaagrtgtcattgcatttttctttttgaaacagagtctcgctttcttgcctagcctggactgcagtggcacaatcttggctcacttcaacctctgcttcccaggttcaagctattctcttgccccagtgtcccgagcagctgggaccataggtgcaacaccatgcctggctaatttttgtatttttagtagagacggagttttgccatgttggctgggtgagtcttgaacttctgacctcaagtaattcgcctcagcttttcaaagtgatgggattacagctgtgagccaccacacccagccatcattgtgcatgtaatt

SEQ ID NO: 140957 - DNA, 583 bp, Homo sapiens
atggactacatacagtttatacaatttatgacaggatgaaaatgtccatcccaaaggatattgatgcactaatctctggaacctaagaatgttatcatatacagcaaaaatttaaaaaggtgtcattgcatttttctttttgaaacagagtctcgstttcttgcctagcctggactgcagtggcacaatcttggctcacttcaacctctgcttcccaggttcaagctattctcttgccccagtgtcccgagcagctgggaccataggtgcaacaccatgcctggctaatttttgtatttttagtagagacggagttttgccatgttggctgggtgagtcttgaacttctgacctcaagtaattcgcctcagcttttcaaagtgatgggattacagctgtgagccaccacacccagccatcattgtgcatgtaattaaaagatcttcagatggtgaggttattttgaattatccatgtaggccctaataaaatcacatgtatccttataaaagggaggcagagagagattttacacatacatagaagagaaaacaatatgagacaaaacaaagggtttttggta

SEQ ID NO: 140958 - DNA, 602 bp, Homo sapiens
ttggcactgccagtaaaggcagcaacccaatggtggctggtttttgraccccatctggtggatgcaggtgtcagtagtagcaccagagaaggtcagttctcaggccctcaggtgacatacataggtgcacataggtgcaggcagtagagatggcatccccaggtatgccagttcttggcccctgagtggtacacttaggcagattgcagaccttccactctaggagacaggattgctttgctgacagcagtcctggcaggtggctttcaggccctggggaccatgtgctttgagtctctgtgtcctaggagcagtcttcctgatttgctggtccatcttttccatggggtctagagtgctgagttagctcaagcgccaggaacaaggatgcatcactgggtccagctggtgtaatgctgccactctctgggtggatttctaccttaactcttggagcctatgttttctgtagataaaatgacagtgatgatacaatgacctcagagagttgtcttgagaattaaattatattagagtttacaacgctcatttcatgctgcctaatacaaggaaatagtaattacttactggctagtctgact

SEQ ID NO: 140959 - DNA, 602 bp, Homo sapiens
ttggcactgccagtaaaggcagcaacccaatggtggctggtttttgaaccccatctggtggatgcaggtgtcagtagtagcaccagagaaggtcagttctcaggccctcaggtgacatayataggtgcacataggtgcaggcagtagagatggcatccccaggtatgccagttcttggcccctgagtggtacacttaggcagattgcagaccttccactctaggagacaggattgctttgctgacagcagtcctggcaggtggctttcaggccctggggaccatgtgctttgagtctctgtgtcctaggagcagtcttcctgatttgctggtccatcttttccatggggtctagagtgctgagttagctcaagcgccaggaacaaggatgcatcactgggtccagctggtgtaatgctgccactctctgggtggatttctaccttaactcttggagcctatgttttctgtagataaaatgacagtgatgatacaatgacctcagagagttgtcttgagaattaaattatattagagtttacaacgctcatttcatgctgcctaatacaaggaaatagtaattacttactggctagtctgact

SEQ ID NO: 140960 - DNA, 602 bp, Homo sapiens
ttggcactgccagtaaaggcagcaacccaatggtggctggtttttgaaccccatctggtggatgcaggtgtcagtagtagcaccagagaaggtcagttctcaggccctcaggtgacatacataggtgcacataggtgcaggcagtagagatggcatccccaggtatgccagttcttggcccctgrgtggtacacttaggcagattgcagaccttccactctaggagacaggattgctttgctgacagcagtcctggcaggtggctttcaggccctggggaccatgtgctttgagtctctgtgtcctaggagcagtcttcctgatttgctggtccatcttttccatggggtctagagtgctgagttagctcaagcgccaggaacaaggatgcatcactgggtccagctggtgtaatgctgccactctctgggtggatttctaccttaactcttggagcctatgttttctgtagataaaatgacagtgatgatacaatgacctcagagagttgtcttgagaattaaattatattagagtttacaacgctcatttcatgctgcctaatacaaggaaatagtaattacttactggctagtctgact

SEQ ID NO: 140961 - DNA, 548 bp, Homo sapiens
tacagtgctggtgggagtgtgaaatgataaagccactccagaaacagtttctcagatttttacaaaacaaaaaacatcactaccatatgaccctgcaattgcattcctgggcacttgtcccagaaaaataaaaacttatgtccacacagcacctgcacatgaatgtttatagcagctttatttgtaataggccaaacatgtaaataacccagatgtgcttcagtggaggaatggttaaacaaactrtgttacttccactacttactgataaaaaggaataaactgttgatcaatgcaacaacctggatgaatctccagagaattatgtggaattaaaactatccatccctaaaggcgagcactatatgcttccatttatatgatgtttgatgtgacaaagttatagaaatggagaacacattactggttgacagggctcaagaactgaataaaggtgggaaggaagtgaatgtcactctaaaagagcaaattgagggattcttgttccaatgaaaactttctgcatttgactgtatcacctctggtat

SEQ ID NO: 140962 - DNA, 421 bp, Homo sapiens
cagagcttcagtttcatcatccatgacataggaattggaacgtctattagttttaggaacatgtaaaggaacactcttaagataaaaatttgtgtagtggtagaaggtaattttaacatagtgaataaagaataagatgaaaaatgcttctcttagcctacatttaacatagttattcaggagagaattaaagccccaggtagagttgctaaatcaaccctgactcaaggtttttgtacagatatgtacaatcatggcatttaaaaaatgcaatgacttttacctacatttaaataatttcacaaaccatgtgaccctgtgctaygattgtaaggagcacacattattgagtgtccaaggcaaagtggaattaaattcaggaaagagagtctttttgttgaactgctatttctttggatgg

SEQ ID NO: 140963 - DNA, 593 bp, Homo sapiens
aacccattttgcttggctctcattctctctttgcctgctgccatatttctcatcctgttctcctgataatgagtaagtctcatgagatctgatggttattatwagggatagttttcctgcacaagctctctttgcttgctgccatccatgtaagacaggattttctccttttcgccttttgccatgattgtgaggcttccccagccatatggaactgtaactccaattaaatctgcttttatttttttaattccccatttttggatatgtctttatcagcagtgtgaaaactgactaatacagctactttaatctaaactcatctgccaagggccgtctctgtactggttgagaactcacagattctcaggtttgaagtctaatacctcaacttattagcgatgtcacatggaccaactcacttacctttatgtacaaggtaagaggaaataatagtattttccatggagaattattgcaaggattaaatgagataataggtgtcaagaactgagaacaacggctggaacaatattgtgtcaaacaacctagaggtaaaatttgattctcaagaaacagagcactcatcctgc

SEQ ID NO: 140964 - DNA, 593 bp, Homo sapiens
aacccattttgcttggctctcattctctctttgcctgctgccatatttctcatcctgttctcctgataatgagtaagtctcatgagatctgatggttattattagggatagttttcctgcacaagctctctttgcttgctgccatccatgtaagacaggattttctccttttcgccttttgccatgattgtgaggcttccccagccayatggaactgtaactccaattaaatctgcttttatttttttaattccccatttttggatatgtctttatcagcagtgtgaaaactgactaatacagctactttaatctaaactcatctgccaagggccgtctctgtactggttgagaactcacagattctcaggtttgaagtctaatacctcaacttattagcgatgtcacatggaccaactcacttacctttatgtacaaggtaagaggaaataatagtattttccatggagaattattgcaaggattaaatgagataataggtgtcaagaactgagaacaacggctggaacaatattgtgtcaaacaacctagaggtaaaatttgattctcaagaaacagagcactcatcctgc

SEQ ID NO: 140965 - DNA, 593 bp, Homo sapiens
aacccattttgcttggctctcattctctctttgcctgctgccatatttctcatcctgttctcctgataatgagtaagtctcatgagatctgatggttattattagggatagttttcctgcacaagctctctttgcttgctgccatccatgtaagacaggattttctccttttcgccttttgccatgattgtgaggcttccccagccatatggaactgtaactccaattaaatctgcttttatttttttaattccccatttttggrtatgtctttatcagcagtgtgaaaactgactaatacagctactttaatctaaactcatctgccaagggccgtctctgtactggttgagaactcacagattctcaggtttgaagtctaatacctcaacttattagcgatgtcacatggaccaactcacttacctttatgtacaaggtaagaggaaataatagtattttccatggagaattattgcaaggattaaatgagataataggtgtcaagaactgagaacaacggctggaacaatattgtgtcaaacaacctagaggtaaaatttgattctcaagaaacagagcactcatcctgc

SEQ ID NO: 140966 - DNA, 374 bp, Homo sapiens
ttaagccattttcccaaggacacacagcaaaatggtgttagagttaggaattgaatccaggtctttctaactattctctgctgaaatacatcagcccttgtggcttctgagatttaacattgtgactttgtgtattgaagcgaagcatcaatacaagggaccaccaaatctgtatgtcattgtaagcatttaatctgagaaaacttccttcccccccycttttaccctcaccccttttgctttttcctccccttccccttctcttccctcgcttcgtccttcccttccatctccctccttccttcctatccttgatcactcagtatggacactgacaagtcagaagggatcctgctgtggcactacaggagggg

SEQ ID NO: 140967 - DNA, 374 bp, Homo sapiens
ttaagccattttcccaaggacacacagcaaaatggtgttagagttaggaattgaatccaggtctttctaactattctctgctgaaatacatcagcccttgtggcttctgagatttaacattgtgactttgtgtattgaagcgaagcatcaatacaagggaccaccaaatctgtatgtcattgtaagcatttaatctgagaaaacttccttcccccccccttttaccctcaccccttttgctttttcctccccttccccttctcttycctcgcttcgtccttcccttccatctccctccttccttcctatccttgatcactcagtatggacactgacaagtcagaagggatcctgctgtggcactacaggagggg

SEQ ID NO: 140968 - DNA, 537 bp, Homo sapiens
aacgtaggaaaagatgatcacgtggaagaaccacttaatggtgccataattcatgctctggatccgagtgactttgttcgtctcatactggaaaacatcactgcagctgcagcaggccggcatggtgacagcctccctccctgcgcggagctggaccagagctctactcttcctgacagggccacagcaagccccctcccagtaactgcaaaatgaaacgtactggtttttagcaggagtctttaacttcaagctcctccaatgactgcagagttggggcgggccctggcagtggccccacatgtggctgtgataaacaagaagcgccaagtcctacgggcctggctggcagatgacctcaccccagctggcctcccccagatgcctacacaaagatggtgttcagaggatgggcattttyagaattctcccttttcccccctttcctttcacttttttggtctcatgtctcttgggagaaaggggcagccttgcaaatgtcacaagactgggagcttccattatgcctcagaaaag

SEQ ID NO: 140969 - DNA, 413 bp, Homo sapiens
gccatcccctcttctcttcctgcaggtgggcagarccaaggtgccctccctacaccttcctggggcctccagcgatcctgagctcagcctcctgacctgcagacccctcagctctggccctcacgtcctgcttgctgtacctgctttatcccatatcaccatctccattcctcagcatagtgacaatcccagttcctacccattccactggcttctccatttggcttggagctctttagctggattgagacgactactctgatgagtgccatgtcactggctcaacaaaatgggcccaagtgagtcaatgtcattgacatgaaggtgctgtcagtttggtgggaaccaagggaatgagactgtgttttagctgcgttcgtttgaacagttacacacttagggcttcttatgcg

SEQ ID NO: 140970 - DNA, 360 bp, Homo sapiens
cccctcttctcttcctgcaggtgggcagaaccaaggtgccctccctacaccttcctggggcctccagcgatcctgagctcagcctcctgacctgcagacccctcagctctggccctcacgtcctgcttgctgtacctgctttatcccatrtcaccatctccattcctcagcatagtgacaatcccagttcctacccattccactggcttctccatttggcttggagctctttagctggattgagacgactactctgatgagtgccatgtcactggctcaacaaaatgggcccaagtgagtcaatgtcattgacatgaaggtgctgtcagtttggtgggaaccaagggaatgagactgtgt

SEQ ID NO: 140971 - DNA, 596 bp, Homo sapiens
tctgttttttgtctcatgtcctaaatgtccaactattcagcataactttattctgcttcccctctctatcctctgtagcaaaatgcactgttggaattacatttttatttttatttttatttttatttttttaagacggagtctcactcattgcctaggctggaatgcagcggtgtgatctcggctcactgcaacctccacctccaaggttcaagtgatccccttgcctcagcctcctgagtagctggaactacagatgcctaacaccatgcccagttaatttttatatttttagtagagatgggatttcaccatgttggccaaggtggtctcgaacccctgacctcagatgatctgtctgccttggcctcccaaaatgctgggattacaggcatgagccaatgtgcccagctggaattaaattaataatttttatttctgctttagcgagagaggcggtgactcactgatacaaggaagatatttccccttccaagggtgatgtattcagcttttgggtttaaaaggagatgctatcaggcacgcgtggctatcctggcagattacataaaaayacagaagaaatgttctttgtg

SEQ ID NO: 140972 - DNA, 417 bp, Homo sapiens
tgttcccctctacccaagccaaatayccatgctatccttgggaactttaaaaaatatctatttcctagtcaagacagctggccacttcacataacaacgcaggtcttctgcaaccctaaacaaaggctggagatggatggggaaacgctctcctaatggtggatgggtagagagacgtctgaggtttctggaagactgaggacctattgttttctccaccagtctaagcagaacaggtataaaaacagaatggaaggaaatttacattgatccaggactgggcttttgctgcaagttgcaaattaagttatttagggtgcttttgtctgaaagtagcagaatgcctgactcaagctggcttaaatatgaaataaattattatttcatgtattgggatatcctgggggaagatacttc

SEQ ID NO: 140973 - DNA, 436 bp, Homo sapiens
ccaagccaaatacccatgctatccttgggaactttaaaaaatatctatttcctagtcaagacagctggccacttcacataacaacgcaggtcttctgcaaccctaaacaaaggctggagatggatggggaaacgctctcctaatggtggatgggtagagagacgtctgaggtttctggargactgaggacctattgttttctccaccagtctaagcagaacaggtataaaaacagaatggaaggaaatttacattgatccaggactgggcttttgctgcaagttgcaaattaagttatttagggtgcttttgtctgaaagtagcagaatgcctgactcaagctggcttaaatatgaaataaattattatttcatgtattgggatatcctgggggaagatacttcagatggggttgatttagtggtttgacaacatc

SEQ ID NO: 140974 - DNA, 581 bp, Homo sapiens
ccatgacctccattcactgcctcaaggagcggatgatcttgtgatcctccagtccaaaggcctctggggcctggcccaggaattggtttctcaaaggttgaacctgtgccagaatctccagagtgcaggggacacaggtctgaggcccctgaaaggccttgctgggttccctgctgcaaatgctggcatctcggtgtcctggggcagatgtaagcgagtcccacaaacagtggcttgcaactacaggacttgattctctcacagttctcacagttctagaggccacaacctaaaatccaggcatcagcagggctgtgctcgctctgaaggctctggagagagtccttacttgtctctcctggcttctggtagcccacggtgttccttggcttgtggatgcatcactccagtctctgcctctcctgtcatgaggccttctgccttgtaygtgtctctgtgtcttttcttcttgtaaggatatcagtcactgaatttagggcccaccctactctagtatgacctcatcttaacaaattacgtctgccaatatcccatttccaaataaggtcacactcccaagc

SEQ ID NO: 140975 - DNA, 380 bp, Homo sapiens
gcacatagtaggtgctcaatgaatgtttgacaaccacatgaatgaatgaatcaatcaatcacagaatggatgaatcatcgaatgaatgaatgattatatagttcatttgtcatttggctgagtgcctgggacagggctgcatccgagcagctgttcattaaataggtatggacaggttcctgtaaatgttcccttctgaagcagctggggagtgaggtcctggcgggggmacacccggcctcacagctgtggttccaggtcatgataaattgctgtgggaagccacagagcagacagctcatcacacattgtaatggattcattgtcttctctcgtggccccctttatctcaaactctcagcagacaagggttaaaaggg

SEQ ID NO: 140976 - DNA, 546 bp, Homo sapiens
tggacaattagatataatgtgcaggactgcactgagactggtttaaagaaatcagccataaagaaaaatgtttaactaattaaagacatctaaatacagcatggttattatatataatgaaaatgcatgaaaacaaaaatgtgaaaattattgactgaaaaagaggttacaaagtgtatatttgatgaaaaataatatgtaaggctagagtaaaaggtactaacaatagtgctttcttgtttataggactatttcaacacattttgctcctctgcatttaaaaacttttctctgatgcacatatactgtttctgtaataataaaattatgtttaaatgattcaacatttctgaatagcaaattactatatatgtatacttyaaaatagacaatttatagggctatacccaacttgtggctgtgcactatccacttagtatacaggtacttcttacccttcttttaatatctaattataaaattctgaactcattgagggctattagcacatctacaattgtttatgcttcttctaagtttgatatt

SEQ ID NO: 140977 - DNA, 489 bp, Homo sapiens
cgtcattgctggttttgcgatgtrgaggctcacataggaagtctggagacaggttactaggagctgacaccagcaaccaccagttgacacaggcaagaaaacaatgacgtataactgtacaagatactgggaatggtgatacaactgcaaacaactaaattctgccaacaaccttaataaatctggaaatgtactcttaccagagcttcccaataagatccctgttgattgtcaccttcgtttggaccttgccggatgttgaacaggggagctggttgagcccactgcaacttcagacctacagaagtgtgagataataatttatgttgctgaagccattaatttactttaaattgtcatggtgccaatataaaacaaatactttattttataatgagactggataacgaagggcttgtgttgattttcaaggagattgaaaaatatatctcataaatctagtgaaaacatgaaagttctggggaggat

SEQ ID NO: 140978 - DNA, 489 bp, Homo sapiens
cgtcattgctggttttgcgatgtagaggctcacataggaagtctggagacaggttactaggagctgacaccagcaaccaccagttgacacaggcaagaaaacaatgacgtayaactgtacaagatactgggaatggtgatacaactgcaaacaactaaattctgccaacaaccttaataaatctggaaatgtactcttaccagagcttcccaataagatccctgttgattgtcaccttcgtttggaccttgccggatgttgaacaggggagctggttgagcccactgcaacttcagacctacagaagtgtgagataataatttatgttgctgaagccattaatttactttaaattgtcatggtgccaatataaaacaaatactttattttataatgagactggataacgaagggcttgtgttgattttcaaggagattgaaaaatatatctcataaatctagtgaaaacatgaaagttctggggaggat

SEQ ID NO: 140979 - DNA, 407 bp, Homo sapiens
tcttgtcaccattttcaggaaagagctattrcccctttctttgatcaaaggcaactccccaagtacaatgtttttttttcttgcctgaggaaggttattttttcatgttggaaagaaatgaaagattagaaaccaaaccacacacaatcttgcacactgtagtcaccaaggaggtaactttccaccattacttgagacaaatgcgtgtgtgcgtttttaatctagtctgacctcagagcctctaaatagatgaagaaatacctgtgtaattgaaaaaaaaaaaactgttctctcagccattattcaaaggacactaactcaaataagaaatcttaaagctctttaaaatgcaaaaacattttcttggtggaacatcaaatgatagcttattcacattaattccataa

SEQ ID NO: 140980 - DNA, 407 bp, Homo sapiens
tcttgtcaccattttcaggaaagagctattgcccctttctttgatcaaaggcaactccccaagtacaatgtttttttttcttgcctgaggaaggttattttttcatgttggaaagaaatgaaagattagaaaccaaaccacacacaawcttgcacactgtagtcaccaaggaggtaactttccaccattacttgagacaaatgcgtgtgtgcgtttttaatctagtctgacctcagagcctctaaatagatgaagaaatacctgtgtaattgaaaaaaaaaaaactgttctctcagccattattcaaaggacactaactcaaataagaaatcttaaagctctttaaaatgcaaaaacattttcttggtggaacatcaaatgatagcttattcacattaattccataa

SEQ ID NO: 140981 - DNA, 407 bp, Homo sapiens
tcttgtcaccattttcaggaaagagctattgcccctttctttgatcaaaggcaactccccaagtacaatgtttttttttcttgcctgaggaaggttattttttcatgttggaaagaaatgaaagattagaaaccaaaccacacacaatcttgcacactgtagtcaccaaggaggtaactttccaccattacttgagacaaatgcgtgtgtgcrtttttaatctagtctgacctcagagcctctaaatagatgaagaaatacctgtgtaattgaaaaaaaaaaaactgttctctcagccattattcaaaggacactaactcaaataagaaatcttaaagctctttaaaatgcaaaaacattttcttggtggaacatcaaatgatagcttattcacattaattccataa

SEQ ID NO: 140982 - DNA, 407 bp, Homo sapiens
tcttgtcaccattttcaggaaagagctattgcccctttctttgatcaaaggcaactccccaagtacaatgtttttttttcttgcctgaggaaggttattttttcatgttggaaagaaatgaaagattagaaaccaaaccacacacaatcttgcacactgtagtcaccaaggaggtaactttccaccattacttgagacaaatgcgtgtgtgcgtttttaatctagtctgacctcagagcctctaaatagatgaagaaatacytgtgtaattgaaaaaaaaaaaactgttctctcagccattattcaaaggacactaactcaaataagaaatcttaaagctctttaaaatgcaaaaacattttcttggtggaacatcaaatgatagcttattcacattaattccataa

SEQ ID NO: 140983 - DNA, 483 bp, Homo sapiens
tttctaagaggaagctgtgttgattcctaaatatgtttacaccatttgttcttgttcttgtagctatgcgatttaattaaatattatgttgagaggctgagacgggtgaatcactaggtcaggagatcgagaccatcctggctaactcggtgaaaccccgtctccactgaaaatacaaaaaaattagttgtgcctggtggcgggtgcctgtacacccagctactggggaggctgaggcgggacaatggcatgaatccaggagacggagcttgcagtgtgcagagatcgcaccactgcactccagcctgggtgacagattgagactctgtctgaaaataaataaataaataaatattatgtaaactgagaaaatgagtataacaagagtartattgttgtttctttgagaaataaactaaatgtgttggaaaaatgagaaactcaaacagttgctgtcagcttaactgttggcaagacaactag

SEQ ID NO: 140984 - DNA, 558 bp, Homo sapiens
ccactatgaatgctttggtgttcttaattttcttaagatttattaatatttctgaagtaactactaaatgccaagcaatatattttctaatttaatctttcattgacttttactttcacttcaattgagctactcaytttcatggctataaacttaacttttcaataacttaaaaattgatttctaatgttataaactttaatgttccactctgtgacatgctctttcagactctctcttccttactgccaactcaccttctcttctatttcttccagtgccccagtatcttgactcttccattttcttttttcttttcttttattaagtggatacatgataatttcacatgttgatgtggcacaatgtggtattttgatacatgacacattgttaaaacctctcctccctgtctttcccagtctggtaaccactcttctactctctattagatcagtgtttttagatttcacatatgaatgagatcatgtgatatttgtcttaccgtggttagcttatttcacttaccacaatgtcgtctatgctcattcatgttgt

SEQ ID NO: 140985 - DNA, 583 bp, Homo sapiens
atcccatttgtttatttttgcttttgttgtgcatgtctttcgatgtcttttctaaaaagtccttgcccagaccaatgacatataacatttcacctaagttttctcctactagtttcatagtttggggtcttacctttaaatatttaatttattttgtgttgatttttgtatatgatgagagataggggtctactttcattcttttgtatgtggatatgcactttcccagcaccatttgttgaaaagactgtcttttcccaaaattgaatgtttgcayctttgtcaaaaataagttgcatgtaaatatgtggttttatgcctgggttctctatttttgttccactggtctatgtgcctgtttttatgccaataccatgttgttttagttaagatagctttgtaatatattttgaaattagatagtgtaatacgtctagtgttgctctttttgcttaagatttattttgctatttgggatgttttgtagtttcacatgaattttaagatttttttaacatctgtgaagaatgaaattggaaatttgatagagattatattggatttatagattgattttcatagt

SEQ ID NO: 140986 - DNA, 583 bp, Homo sapiens
atcccatttgtttatttttgcttttgttgtgcatgtctttcgatgtcttttctaaaaagtccttgcccagaccaatgacatataacatttcacctaagttttctcctactagtttcatagtttggggtcttacctttaaatatttaatttattttgtgttgatttttgtatatgatgagagataggggtctactttcattcttttgtatgtggatatgcactttcccagcaccatttgttgaaaagactgtcttttcccaaaattgaatgtttgcacctttgtcaaaaataagttgcatgtaaatatgtggttttatgcctgggttctctatttttgttccactggtctatgtgcctgtttttatgccaataccatgytgttttagttaagatagctttgtaatatattttgaaattagatagtgtaatacgtctagtgttgctctttttgcttaagatttattttgctatttgggatgttttgtagtttcacatgaattttaagatttttttaacatctgtgaagaatgaaattggaaatttgatagagattatattggatttatagattgattttcatagt

SEQ ID NO: 140987 - DNA, 583 bp, Homo sapiens
atcccatttgtttatttttgcttttgttgtgcatgtctttcgatgtcttttctaaaaagtccttgcccagaccaatgacatataacatttcacctaagttttctcctactagtttcatagtttggggtcttacctttaaatatttaatttattttgtgttgatttttgtatatgatgagagataggggtctactttcattcttttgtatgtggatatgcactttcccagcaccatttgttgaaaagactgtcttttcccaaaattgaatgtttgcacctttgtcaaaaataagttgcatgtaaatatgtggttttatgcctgggttctctatttttgttccactggtctatgtgcctgtttttatgccaataccatgttgttttagttaagatagctttgtaatatattttgaaattagatagtgtaatacgtctagtgttgctctttttgcttaagatttattttgctatttgggrtgttttgtagtttcacatgaattttaagatttttttaacatctgtgaagaatgaaattggaaatttgatagagattatattggatttatagattgattttcatagt

SEQ ID NO: 140988 - DNA, 496 bp, Homo sapiens
aatgctttttctgcatctattgaaacgatkatatgtattttatccttcattgtttaatgtgatgtatcagattttattgatttacatgtattagactatccttacctccccgggtaaataccatttgattatggtggataatctttttaatgtgcttttgaaatatcattgctagaactgctggttttgaatgtttacatctatgtttatcaatgatattggcctggagttttcttttatttgctgttcttatctcattttggaatcaggaaatgctgtcttcatagaatgactttggaagagttccctccttttcatttttttgaaatagtttgtaaataatttgtataaattttttaaatgttttgtagaatttgtcagggaaaaccaccaagtcgtgaacttttctttcttcctctatttctttagagacagggtctcactctatcactgaggctggcatacagtggtgcagtcatagctgactgcagcctca

SEQ ID NO: 140989 - DNA, 496 bp, Homo sapiens
aatgctttttctgcatctattgaaacgattatatgtattttatccttcattgtttaatgtgatgtatcagattttattgatttacatgtattagactatccttacctccccgggtaaataccatttgattatggtggataatctttttaatgtgcttttgaaatatcattgctagaactgctggttttgaatgtttrcatctatgtttatcaatgatattggcctggagttttcttttatttgctgttcttatctcattttggaatcaggaaatgctgtcttcatagaatgactttggaagagttccctccttttcatttttttgaaatagtttgtaaataatttgtataaattttttaaatgttttgtagaatttgtcagggaaaaccaccaagtcgtgaacttttctttcttcctctatttctttagagacagggtctcactctatcactgaggctggcatacagtggtgcagtcatagctgactgcagcctca

SEQ ID NO: 140990 - DNA, 517 bp, Homo sapiens
atttttatttgtcttcagacatttttgaaattaattttttattgacccattggttgtttaaggatatgttgtttaatttgtatgtatttgcacaatttctgaagttcctcctgttgtttatttctagctttattccatatggttaaaaaaacacgtgayatgatttgattttttgattagctaagacttgttttgtggtctaacatatctatcatggacaatattccatgtgcaggtgaaaagacagtgaattatgcagttgttggatgaaatgttatgtaaataactgttgaattcttttgatctagagtgcagtttaaatgtttctttgttgagattctctctcaatgatctgttcattgctgaaaatgggatgtcgaagtttcttaccattattgtacagttttttatctctccttttagatctattaatgtttgctttatatatttaagttctccaatgttgagtgcagtatatatttacaattattgtattctcttgttgtactgacccctt

SEQ ID NO: 140991 - DNA, 517 bp, Homo sapiens
atttttatttgtcttcagacatttttgaaattaattttttattgacccattggttgtttaaggatatgttgtttaatttgtatgtatttgcacaatttctgaagttcctcctgttgtttatttctagctttattccatatggttaaaaaaacacgtgatatgatttgattttttgattagctaagacttgttttgtggtctaacatatctatcatggacaatattccatgtgcaggtgaaaagacagtgaattatgcarttgttggatgaaatgttatgtaaataactgttgaattcttttgatctagagtgcagtttaaatgtttctttgttgagattctctctcaatgatctgttcattgctgaaaatgggatgtcgaagtttcttaccattattgtacagttttttatctctccttttagatctattaatgtttgctttatatatttaagttctccaatgttgagtgcagtatatatttacaattattgtattctcttgttgtactgacccctt

SEQ ID NO: 140992 - DNA, 517 bp, Homo sapiens
atttttatttgtcttcagacatttttgaaattaattttttattgacccattggttgtttaaggatatgttgtttaatttgtatgtatttgcacaatttctgaagttcctcctgttgtttatttctagctttattccatatggttaaaaaaacacgtgatatgatttgattttttgattagctaagacttgttttgtggtctaacatatctatcatggacaatattccatgtgcaggtgaaaagacagtgaattatgcagttgttggatgaaatgttatgtaaataactgttgaattcttttgatctagagtgcagtttaaatgtttctttgttgagattctctctcaatgatctgttcattgctgaaaatgggatgtcgaagtttcttaccattattgtacagttttttatctctccttttagatctattaatrtttgctttatatatttaagttctccaatgttgagtgcagtatatatttacaattattgtattctcttgttgtactgacccctt

SEQ ID NO: 140993 - DNA, 348 bp, Homo sapiens
caatatcctttcattgaattcctgttttgcttaagttgtctagaatttgttattttcagtgaaaaatataaaccaattatsccctcacattaaaacacactccacttaggcatctcctgtgatctcactggagaaaagtgtggacgttatttgtaatttgactcagaatgataggattattttggtactagtaacagtggagataagtaactaactttttgtgaaacttcttcctggggtgaaacaaaaactattgtggaaactctttccaatcatctctggaaatttattaagtgacctagtatataatgataatttaccatgatatttgataaaatagttttgtgt

SEQ ID NO: 140994 - DNA, 348 bp, Homo sapiens
caatatcctttcattgaattcctgttttgcttaagttgtctagaatttgttattttcagtgaaaaatataaaccaattatgccctcacattaaaacacactccacttaggcatctcctgtgatctcactggagaaaagtgtggacgttatttgtaatttgactcagaatgataggattaktttggtactagtaacagtggagataagtaactaactttttgtgaaacttcttcctggggtgaaacaaaaactattgtggaaactctttccaatcatctctggaaatttattaagtgacctagtatataatgataatttaccatgatatttgataaaatagttttgtgt

SEQ ID NO: 140995 - DNA, 348 bp, Homo sapiens
caatatcctttcattgaattcctgttttgcttaagttgtctagaatttgttattttcagtgaaaaatataaaccaattatgccctcacattaaaacacactccacttaggcatctcctgtgatctcactggagaaaagtgtggacgttatttgtaatttgactcagaatgataggattattttggtactagtaacartggagataagtaactaactttttgtgaaacttcttcctggggtgaaacaaaaactattgtggaaactctttccaatcatctctggaaatttattaagtgacctagtatataatgataatttaccatgatatttgataaaatagttttgtgt

SEQ ID NO: 140996 - DNA, 348 bp, Homo sapiens
caatatcctttcattgaattcctgttttgcttaagttgtctagaatttgttattttcagtgaaaaatataaaccaattatgccctcacattaaaacacactccacttaggcatctcctgtgatctcactggagaaaagtgtggacgttatttgtaatttgactcagaatgataggattattttggtactagtaacagtggagataagtaactaactttttgtgaaacttcttcctggggtgaaacaaaawctattgtggaaactctttccaatcatctctggaaatttattaagtgacctagtatataatgataatttaccatgatatttgataaaatagttttgtgt

SEQ ID NO: 140997 - DNA, 600 bp, Homo sapiens
tttcttttttctttacctttgaaaataatgcgttgatagttaattttctcctaaattgtctgtttttatttccataaaaggtatttattgaatgtctccttacttttaatataactaggcattgtgtgatcaaarcaaaataaatatgttcttgtttctggaattattgaagctttgaaaatggacttatcgacctcaaaccaatgggacatattcctatgtggccttctgccctgttaggtttcccagggtaagtggtgattccttttctgtctttttaaagattttagaaatgcagcttctgctgtgggccactaggtggagtacttcagagcagggtttgtgggagtacaaagctaactgctgcttttgcttgatgcttctgcagctcccttgactactgtggatgataagtaaccattttcttcctcttctttcttttttcccctcactctttggagtgaacttgaaacatttaggaagtttattgatcaacatataccgtgtttatgaaaatccggctaagataatatggtaggactcctttggttataaataatagaattcaaactcaaactggtctaagccaaaacatatata

SEQ ID NO: 140998 - DNA, 497 bp, Homo sapiens
tagggagacacgggacttctgatagccctttcttctttacacattttgtgtctctggctgtagtctgccatatgastccatatggctaatgagcaaaatatttttcagatggatacatgtgaccaaacattgcaagttaaagatatttctgaatcttggacctcttatttacagtgaagccccctcatgcatagtaaagcagtgaggaatgtaaaaggttgctgcatcgataatcaatttctggtgagcaataattataggtaatgtaaaatgggacaattattgctttccatcatatcttgaaagaactcttacagtccatgattttgaaaaaaaatctaagttcactcttttcttttctattaaaaaaagacattatccagtagaagtttaagagtaaaatctgaaggcagcttatctgacctggccacatggtcttgccacttgttaaatataactttctacacactaacttctccagacctcagatcttcaac

SEQ ID NO: 140999 - DNA, 530 bp, Homo sapiens
aaatacaaaatgtagggagacacgggacttctgatagccctttcttctttacacattttgtgtctctggctgtagtctgccatatgagtccatatggctaatgagcaaaatatttttcagatggatacatgtgaccaaacattgcaagttaaagatatttctgaatcttggacctcttatttacagtgaagccccctcatgcatagtaaagcagtgaggaatgtaaaaggttgctgcatsgataatcaatttctggtgagcaataattataggtaatgtaaaatgggacaattattgctttccatcatatcttgaaagaactcttacagtccatgattttgaaaaaaaatctaagttcactcttttcttttctattaaaaaaagacattatccagtagaagtttaagagtaaaatctgaaggcagcttatctgacctggccacatggtcttgccacttgttaaatataactttctacacactaacttctccagacctcagatcttcaactctctaaaatggaaacctagt

SEQ ID NO: 141000 - DNA, 530 bp, Homo sapiens
aaatacaaaatgtagggagacacgggacttctgatagccctttcttctttacacattttgtgtctctggctgtagtctgccatatgagtccatatggctaatgagcaaaatatttttcagatggatacatgtgaccaaacattgcaagttaaagatatttctgaatcttggacctcttatttacagtgaagccccctcatgcatagtaaagcagtgaggaatgtaaaaggttgctgcatcgataatcaatttctggtgagcaataattataggyaatgtaaaatgggacaattattgctttccatcatatcttgaaagaactcttacagtccatgattttgaaaaaaaatctaagttcactcttttcttttctattaaaaaaagacattatccagtagaagtttaagagtaaaatctgaaggcagcttatctgacctggccacatggtcttgccacttgttaaatataactttctacacactaacttctccagacctcagatcttcaactctctaaaatggaaacctagt

SEQ ID NO: 141001 - DNA, 643 bp, Homo sapiens
gaatcttaatataagccatgarcttaataatatcaatgttggctcatcaagcttaacaaatgtaccacactaacaacatgataatagagaaagtgtatgtactgtggtgtgaggcagatattagagatcaatatcctttctggtctatttttctgtacacctacaactgttctaaaaattaagtcaattatttatttgttaattattattttttaatttattttttgagatggagtctcactctgttgcccaggttggagtgcaacagcacgatcttggcttactgcaacctctgcctcccaggttcaagtgattctgctgcctcagcctcctgagtagctggaattacaggcacgtcccaccatacccggttaattttttgtatttttagtagagatggggtttcaccgtgttagccaggatggtcttaatctgctgacctcatgatccacccaacttgccctcccaaagtgcttagattactggcatgagccatcgcaccaggtcttatttatctttttagacaggttttagctctgtcactcaggctggagtgcagtggtacaatcatggctcaatgcagccccaacctccagggctcaagtaaccctcccacctcagcttcctgagtagctgggaccac

SEQ ID NO: 141002 - DNA, 643 bp, Homo sapiens
gaatcttaatataagccatgagcttaataatatcaatgttggctcatcaagcttaacaaatgtaccacactaacaacatgataatagagaaagtgtatgtactgtrgtgtgaggcagatattagagatcaatatcctttctggtctatttttctgtacacctacaactgttctaaaaattaagtcaattatttatttgttaattattattttttaatttattttttgagatggagtctcactctgttgcccaggttggagtgcaacagcacgatcttggcttactgcaacctctgcctcccaggttcaagtgattctgctgcctcagcctcctgagtagctggaattacaggcacgtcccaccatacccggttaattttttgtatttttagtagagatggggtttcaccgtgttagccaggatggtcttaatctgctgacctcatgatccacccaacttgccctcccaaagtgcttagattactggcatgagccatcgcaccaggtcttatttatctttttagacaggttttagctctgtcactcaggctggagtgcagtggtacaatcatggctcaatgcagccccaacctccagggctcaagtaaccctcccacctcagcttcctgagtagctgggaccac

SEQ ID NO: 141003 - DNA, 643 bp, Homo sapiens
gaatcttaatataagccatgagcttaataatatcaatgttggctcatcaagcttaacaaatgtaccacactaacaacatgataatagagaaagtgtatgtactgtggtgtgaggcagatattagagatcaatatcctttctggtctatttttctgtacacctacaactgttctaaaaattaagtcaattatttatttgttaattattattttttaatttattttttgagatggagtctcactctgttgcccaggttggagtgcaacagcacgatcttggcttactgcaacctctgcctcccagsttcaagtgattctgctgcctcagcctcctgagtagctggaattacaggcacgtcccaccatacccggttaattttttgtatttttagtagagatggggtttcaccgtgttagccaggatggtcttaatctgctgacctcatgatccacccaacttgccctcccaaagtgcttagattactggcatgagccatcgcaccaggtcttatttatctttttagacaggttttagctctgtcactcaggctggagtgcagtggtacaatcatggctcaatgcagccccaacctccagggctcaagtaaccctcccacctcagcttcctgagtagctgggaccac

SEQ ID NO: 141004 - DNA, 632 bp, Homo sapiens
tcctggccttatgaaatattggcattttctactggtgtaacttttattagaagcatctcatcataactagtaggatcatctcaaaggggttrcaacacattagcaggtaatgaaatcaatgtagtgtttcctgaacggtattggatgggtggggggggaaaggaatacacacagacacacagaggaaggggtaaaagagaataagagatatcaaagtgcataacacatggataagtaagtattgttaagtacaactcttgcttcagttacacatatgtgtgtgctgggctgcaatgtaaaaatgcatttctcaatggattgggtcaaaatagttttcaagtcactgacttaagattttatcctaggggatgaggaaattagtctaagtgattacctctttctggtgggatgtttgtttaatctgtcatcttagaaaacactgctgagttcctattttcagttcattattgtatactaccaaagctgctactcaaaggctgagcttatcttctatttgcttgttctgcgtggtgcccactggtccttactgcttttgatatagttatctactttttaaagacagtttagcactcacatatttttgttcaatctttacttctcacacaaacaga

SEQ ID NO: 141005 - DNA, 450 bp, Homo sapiens
aaaatgtctcatcttagattctacaaaaaaacatgtttccaacatgctgaatcaaaacaaaaagttggctctgtgagataattccatgcctcrcaaagccttttgacagatagcttgcattaagttttcatcacgggatattccatttttctctataggcatcagtgggctccaaaatgtccctttgcagatcctacagtgaaagtgtttctaaactgctgaattaaaacaaagatttagctttgtgagataaatccagacatcacaaagcatttcactgatagtttgtttccagtttttatcacaggatagtcagtttcttactataggcctcaatttgctctgtaatatcccctcttagattccagaaaaggagagtttccagcctactgaatcacaagaaatgtttaactctgtgagataaaatcacacattggaaagcattttcag

SEQ ID NO: 141006 - DNA, 632 bp, Homo sapiens
tcctggccttatgaaatattggcattttctactggtgtaacttttattagaagcatctcatcataactagtaggatcatctcaaaggggttacaacacattagcaggtaatgaaatcaatgtagtgtttcctgaacggtattggatgggtggggggggaaaggaatacacacagacacacagaggaaggggtaaaagagaataagagatatcaaagtgcataacacatggataagtaagtattgttaagtacaactcttgcttcagttacacatatgtgtgtgctgggctgcaatgtaaaaatgcatttctcaatggattgggtcaaaatagttttcaagtcactracttaagattttatcctaggggatgaggaaattagtctaagtgattacctctttctggtgggatgtttgtttaatctgtcatcttagaaaacactgctgagttcctattttcagttcattattgtatactaccaaagctgctactcaaaggctgagcttatcttctatttgcttgttctgcgtggtgcccactggtccttactgcttttgatatagttatctactttttaaagacagtttagcactcacatatttttgttcaatctttacttctcacacaaacaga

SEQ ID NO: 141007 - DNA, 632 bp, Homo sapiens
tcctggccttatgaaatattggcattttctactggtgtaacttttattagaagcatctcatcataactagtaggatcatctcaaaggggttacaacacattagcaggtaatgaaatcaatgtagtgtttcctgaacggtattggatgggtggggggggaaaggaatacacacagacacacagaggaaggggtaaaagagaataagagatatcaaagtgcataacacatggataagtaagtattgttaagtacaactcttgcttcagttacacatatgtgtgtgctgggctgcaatgtaaaaatgcatttctcaatggattgggtcaaaatagttttcaagtcactgacttaagattttatcctaggggatgaggaaattagtctaagtgattacctctttctggtgggatgtttgtttaatctgtcatcttagaaaacactgctgagttcctattttcagttcattawtgtatactaccaaagctgctactcaaaggctgagcttatcttctatttgcttgttctgcgtggtgcccactggtccttactgcttttgatatagttatctactttttaaagacagtttagcactcacatatttttgttcaatctttacttctcacacaaacaga

SEQ ID NO: 141008 - DNA, 610 bp, Homo sapiens
tctgcgtggtgcccactggtccttactgcttttgatatagttatctactttttaaagacagtttagcactcacatatttttgttcaatctttacttctcacacaaacagaaaaaggaaattatgtattctgtatcaacaaagatttaacaaaacatccatgtactacaactgtctacttactaaaatcaagaattagtatcttttttcttcttatattaaaactrtcttttcatacgctatttttagcttatgaactgaaagtcttttagagataatttacttcaatgaactattattatttatattttataagcaaattgtcacaacttggtcttagctagctccaacgttcacttacagtctgtaatgtttctgaaagcatccatgatttcagctacaaagaagatacttaggaactattctgttttcccactctgtgacctaaaattgactggttcttcaatggaaatgagatccataactaggcactaagggtatacagaaataattgtggacaaaagtactaatgctatttttgttgcactatattttgagatctctttaaggctctatgttcttactgatttattccaatttaatatgttatac

SEQ ID NO: 141009 - DNA, 391 bp, Homo sapiens
gccccgtgctacttgggaacaggctgacaagccatgcagcttcacagcccttcccagttacagggtccctgagccaaggggaagaggctgctgtttctaaagaggatgtgatggacagttattgaaggtgcttagctgggggctccactctagtcttaatctgagccaccctcaaggaaatcataaccagctsttaaaaacatgttgagaccaaagctggtgtgtgtgtttgagttgagcttcagacagctacttaacactgggggcctctgggcttttgattcctccacttctagcctgccatctccccccagctggctggtgcttatcacccaagacgttgtttaaatcatactcatttcctataaacatttcacttgaaatgccatcc

SEQ ID NO: 141010 - DNA, 610 bp, Homo sapiens
tctgcgtggtgcccactggtccttactgcttttgatatagttatctactttttaaagacagtttagcactcacatatttttgttcaatctttacttctcacacaaacagaaaaaggaaattatgtattctgtatcaacaaagatttaacaaaacatccatgtactacaactgtctacttactaaaatcaagaattagtatcttttttcttcttatattaaaactatcttttcatacgctatttttagcttatgaactgaaagtcttttagagataatttacttcaatgaactattattatttatattttataagcaaattgtcacaacttggtcttagctagctccaacgttcacttacagtctgtaatgtttctgaaagcatccatgatttcagctacaaagaagatacttaggaactattctgttttcccactctgtgayctaaaattgactggttcttcaatggaaatgagatccataactaggcactaagggtatacagaaataattgtggacaaaagtactaatgctatttttgttgcactatattttgagatctctttaaggctctatgttcttactgatttattccaatttaatatgttatac

SEQ ID NO: 141011 - DNA, 610 bp, Homo sapiens
tctgcgtggtgcccactggtccttactgcttttgatatagttatctactttttaaagacagtttagcactcacatatttttgttcaatctttacttctcacacaaacagaaaaaggaaattatgtattctgtatcaacaaagatttaacaaaacatccatgtactacaactgtctacttactaaaatcaagaattagtatcttttttcttcttatattaaaactatcttttcatacgctatttttagcttatgaactgaaagtcttttagagataatttacttcaatgaactattattatttatattttataagcaaattgtcacaacttggtcttagctagctccaacgttcacttacagtctgtaatgtttctgaaagcatccatgatttcagctacaaagaagatacttaggaactattctgttttcccactctgtgacctaaaattgactggttcttcaatggaaatgagatccataactaggcactaagggtatacagaaataattgtggrcaaaagtactaatgctatttttgttgcactatattttgagatctctttaaggctctatgttcttactgatttattccaatttaatatgttatac

SEQ ID NO: 141012 - DNA, 511 bp, Homo sapiens
acataattggtgcgaatgtaaattagttcagccactgttgaaagcagtttgaaaatttctcaaagaattgaaaatagaattacctttcaagccaacaattccattactgttttatgacccaaataaagtcagttattctaccaaaaacacatacgcacttgcatgttcattgcagcactattcacaatagcaaagacatggagtcagcctaggtgcccatcaacrgtggatttgatcaataaaatgtggcacatccacacagtattattaggccattcttgcattgctatgaagaaatacttgagactgggtaacttataaggaaaagagatttaattggctcatagctctgcaggctgtacaggaagcatggtgacagcatctgatggcacctgtggagtctccagggagcttttactcatgatggaaggtgaagagggagtaggctcatcacatggccagagcaggagcaagagagcaatgggagtgggggtaagtaccacacaccctt

SEQ ID NO: 141013 - DNA, 511 bp, Homo sapiens
acataattggtgcgaatgtaaattagttcagccactgttgaaagcagtttgaaaatttctcaaagaattgaaaatagaattacctttcaagccaacaattccattactgttttatgacccaaataaagtcagttattctaccaaaaacacatacgcacttgcatgttcattgcagcactattcacaatagcaaagacatggagtcagcctaggtgcccatcaacggtggatttgatcaataaaatgtggcacatccacacagtattattaggccattcttgcattgctatgaagaaatacytgagactgggtaacttataaggaaaagagatttaattggctcatagctctgcaggctgtacaggaagcatggtgacagcatctgatggcacctgtggagtctccagggagcttttactcatgatggaaggtgaagagggagtaggctcatcacatggccagagcaggagcaagagagcaatgggagtgggggtaagtaccacacaccctt

SEQ ID NO: 141014 - DNA, 511 bp, Homo sapiens
acataattggtgcgaatgtaaattagttcagccactgttgaaagcagtttgaaaatttctcaaagaattgaaaatagaattacctttcaagccaacaattccattactgttttatgacccaaataaagtcagttattctaccaaaaacacatacgcacttgcatgttcattgcagcactattcacaatagcaaagacatggagtcagcctaggtgcccatcaacggtggatttgatcaataaaatgtggcacatccacacagtattattaggccattcttgcattgctatgaagaaatacttgagactgggtaacttataaggaaaagagatttaattggctcatagctctgcaggctgtacaggaagcatggtgacagcatctgatggcacctgtggwgtctccagggagcttttactcatgatggaaggtgaagagggagtaggctcatcacatggccagagcaggagcaagagagcaatgggagtgggggtaagtaccacacaccctt

SEQ ID NO: 141015 - DNA, 511 bp, Homo sapiens
acataattggtgcgaatgtaaattagttcagccactgttgaaagcagtttgaaaatttctcaaagaattgaaaatagaattacctttcaagccaacaattccattactgttttatgacccaaataaagtcagttattctaccaaaaacacatacgcacttgcatgttcattgcagcactattcacaatagcaaagacatggagtcagcctaggtgcccatcaacggtggatttgatcaataaaatgtggcacatccacacagtattattaggccattcttgcattgctatgaagaaatacttgagactgggtaacttataaggaaaagagatttaattggctcatagctctgcaggctgtacaggaagcatggtgacagcatctgatggcacctgtggagtctccagggagcttttactcatgatggaaggtgaagagggagtaggctcatcacatggccagagcagsagcaagagagcaatgggagtgggggtaagtaccacacaccctt

SEQ ID NO: 141016 - DNA, 386 bp, Homo sapiens
tttaaaagtggcagatttgtccagtgcaatggatcacacctgtaatcccagcacttagggaggctgaggtgggtggatcacttcagatcaggagttcaaaacccrctggccaacatggcaaaaccccatcactactaaaaatacaaaaaaaatagcgggtatagtggcacacgtctgtaatctcagctactcaggaggttgagacaggggaatcacttgaacctgggaggtggaggttgcagtgagccgagatcacaccactgcactccagtctgggctacacagcaagactctgtcttaaaaaaaaaaaaaaagtggcagtttttcctgctctctctctgctgccatgtaagatgtgcattgcttctcctttaccttttgtcatg

SEQ ID NO: 141017 - DNA, 386 bp, Homo sapiens
tttaaaagtggcagatttgtccagtgcaatggatcacacctgtaatcccagcacttagggaggctgaggtgggtggatcacttcagatcaggagttcaaaacccgctggccaacatggcaaaaccccatcactactaaaaatacaaaaaaaatagcgggtatagtggcacacgtctgtaatctcagctactcaggaggttgagacaggggaatcacttgaacctgggaggtggaggttgcagtgagccgagatcacaccactgcactccagtmtgggctacacagcaagactctgtcttaaaaaaaaaaaaaaagtggcagtttttcctgctctctctctgctgccatgtaagatgtgcattgcttctcctttaccttttgtcatg

SEQ ID NO: 141018 - DNA, 616 bp, Homo sapiens
tacctaaaagccctacttcctaatcttatgacattggtgattaattttagggggacacattcagagcatagcaccctatattcaatttcttaaaaattattttgttgttttgtttttctgtttttcaaatggcttaaagtgctcaaaattggattaatcataatccttggctcatagcacaccttggctcctatttcatccttgtctgtgcctgagcctctgtgtaaatgtatttgaacaatagagtaatcacttgtgaacttacaacacaaccaaagaactagggttctgaccctaccatctgctcctcctctgtcctttttcctgattttcatccttcagcccgagggtaactactaccctgaatttatgtttaggattctcttcctttaaaataaaaacattgttttattgyatacatatgattaccctaaatgacatattatttagtttttaagggtataatttatttaccaattctcctattaatttacccattctcctattaatgaacatttggtttatttccagatttttgccattatgaatggcattacatgagcattttttttttttactacttctggtacatatgggcaagagtttctccagggcc

SEQ ID NO: 141019 - DNA, 420 bp, Homo sapiens
tcagttactgcaaatatcttctctaatttatagtttatcttttcacttttttacttttattttttaatttmtattttttgtttttgagacagagtctcactctgtcattcaggctggagtgcagtggctcactgcagcctccacctcccaggttcagaccattctcgtgccttagcttcccaagtagctgggattacaggtgtctgccactaatacctggctaatttcttgtatttttagtagagatggggtttcaccatgttggccagcctggtctcaaactcctgatctcaggtgatgtactgttgggattacaggcttgagacactgtgcccagcctatctttccactttttgatgtaaaaagttcttaattttgtgatagtcaaaatgtccaatcttttttaatggttaaatggct

SEQ ID NO: 141020 - DNA, 420 bp, Homo sapiens
tcagttactgcaaatatcttctctaatttatagtttatcttttcacttttttacttttattttttaatttatattttttgtttttgagacagagtctcrctctgtcattcaggctggagtgcagtggctcactgcagcctccacctcccaggttcagaccattctcgtgccttagcttcccaagtagctgggattacaggtgtctgccactaatacctggctaatttcttgtatttttagtagagatggggtttcaccatgttggccagcctggtctcaaactcctgatctcaggtgatgtactgttgggattacaggcttgagacactgtgcccagcctatctttccactttttgatgtaaaaagttcttaattttgtgatagtcaaaatgtccaatcttttttaatggttaaatggct

SEQ ID NO: 141021 - DNA, 420 bp, Homo sapiens
tcagttactgcaaatatcttctctaatttatagtttatcttttcacttttttacttttattttttaatttatattttttgtttttgagacagagtctcactctgtcattcaggctggagtgcagtggctcactgcarcctccacctcccaggttcagaccattctcgtgccttagcttcccaagtagctgggattacaggtgtctgccactaatacctggctaatttcttgtatttttagtagagatggggtttcaccatgttggccagcctggtctcaaactcctgatctcaggtgatgtactgttgggattacaggcttgagacactgtgcccagcctatctttccactttttgatgtaaaaagttcttaattttgtgatagtcaaaatgtccaatcttttttaatggttaaatggct

SEQ ID NO: 141022 - DNA, 439 bp, Homo sapiens
gtcatcaatccaaaagcttacacatggcggattccttcacaccagttcacagtacaaagtaactccttgcttgtagaaaacattattattatcattattatttttgatatggaatttgactcttgtagcccagactggagtgcgatgttgtgatctcggctcactgcaacctctgcctcccaggttcaaaggattctcctgcctcagcctctcaagcagctgggattacccgtkcgcaccactatggcctgctaattttttgtatttttgtagagacggggattcaccatgttggccaggctggtctcaaactcctgacctcagatgatccacttgcctcaaccttccaaagtgttgggattacaggcaggagccatcacccccagactagaaaaaattattcaataacaaacagtagcagtatgcttgggggttttag

SEQ ID NO: 141023 - DNA, 440 bp, Homo sapiens
tgtcatcaatccaaaagcttacacatggcggattccttcacaccagttcacagtacaaagtaactccttgcttgtagaaaacattattattatcattattatttttgatatggaatttgactcttgtagcccagactggagtgcgatgttgtgatctcggctcactgcaacctctgcctcccaggttcaaaggattctcctgcctcagcctctcaagcagctgggattacccgtgcgcaccactatggcctgctaattttttgtatttttgtagagacggggattcaccatgttggccaggctggtctcaaactcctgacctcagatgatccacttgcctcaaccttccaaagtgttgggattacaggcaggagccatcacccccagactagaaaamattattcaataacaaacagtagcagtatgcttgggggttttag

SEQ ID NO: 141024 - DNA, 519 bp, Homo sapiens
gtagagaaaagcagccagccagagagtggcctccatgccaggggagtgtgtctgagctttgttttatttttcttatttgtctgtagttgtgtgattggtagaagagagtagatatgaagtctactgacacaggattggtcttcaggcatgtcttaccaagcatttgggggaacagaggggttccacaaataagagagcawtgatcagactttcttctaaaaggagcagccacaagctaccttaactctccaacttgcccattaatcttcacccagagttaggaagatttcaccattagctgtggcccataaaagatccttaagcttgaccaaccacagaggtccatctccttgaggaggaagtgaaaggggtatggacagaagctgtgagttttctgtcctccgccggcccccagctgtgtcttctacttcttgtacaaggtcgtctccaaatgatgttttctggctgacaatgccacagaactgatccttatctcactatggaaatgaaagatttcaa

SEQ ID NO: 141025 - DNA, 519 bp, Homo sapiens
gtagagaaaagcagccagccagagagtggcctccatgccaggggagtgtgtctgagctttgttttatttttcttatttgtctgtagttgtgtgattggtagaagagagtagatatgaagtctactgacacaggattggtcttcaggcatgtcttaccaagcatttgggggaacagaggggttccacaaataagagagcattgatcagactttcttctaaaaggagcagccacaagctaccttaactctccaacttgcccattaatcttcaccyagagttaggaagatttcaccattagctgtggcccataaaagatccttaagcttgaccaaccacagaggtccatctccttgaggaggaagtgaaaggggtatggacagaagctgtgagttttctgtcctccgccggcccccagctgtgtcttctacttcttgtacaaggtcgtctccaaatgatgttttctggctgacaatgccacagaactgatccttatctcactatggaaatgaaagatttcaa

SEQ ID NO: 141026 - DNA, 519 bp, Homo sapiens
gtagagaaaagcagccagccagagagtggcctccatgccaggggagtgtgtctgagctttgttttatttttcttatttgtctgtagttgtgtgattggtagaagagagtagatatgaagtctactgacacaggattggtcttcaggcatgtcttaccaagcatttgggggaacagaggggttccacaaataagagagcattgatcagactttcttctaaaaggagcagccacaagctaccttaactctccaacttgcccattaatcttcacccagagttaggaagatttcaccattagctgtggcccataaaagatccttaagcttgaccaaccacagaggtccatctccttgaggaggaagtgaaaggggtatggacagaagctgtgagytttctgtcctccgccggcccccagctgtgtcttctacttcttgtacaaggtcgtctccaaatgatgttttctggctgacaatgccacagaactgatccttatctcactatggaaatgaaagatttcaa

SEQ ID NO: 141027 - DNA, 420 bp, Homo sapiens
gaattctgtaaatatacacaatagggtaggaatgagaaaatctttagaagaaatattcaagwatgtttgatttctagcaaatccagatagacagttttggcaacaaccaagtcataattttgagtcttgttataggagctagaattttattcaagggacaactgatttgattagattagatgctgtgcactgcatgtttgcatcaacaaatgcacatgttgaaactctaacagtagaatggcattagaaggaggacctttgggaagtaatttggttttgatgaggatggagttcccacaatggggttagcatcctaataagaagagcaggagactacagccctcttctctcagccatgtgaagatacaacaagaacacctgcaaaccagtaagagggccttcaccagacactggctctgc

SEQ ID NO: 141028 - DNA, 417 bp, Homo sapiens
gaatgagaaaatctttagaagaaatattcaagaatgtttgatttctagcaaatccagatagayagttttggcaacaaccaagtcataattttgagtcttgttataggagctagaattttattcaagggacaactgatttgattagattagatgctgtgcactgcatgtttgcatcaacaaatgcacatgttgaaactctaacagtagaatggcattagaaggaggacctttgggaagtaatttggttttgatgaggatggagttcccacaatggggttagcatcctaataagaagagcaggagactacagccctcttctctcagccatgtgaagatacaacaagaacacctgcaaaccagtaagagggccttcaccagacactggctctgctggcccagattttaatctttgaattc

SEQ ID NO: 141029 - DNA, 420 bp, Homo sapiens
gaattctgtaaatatacacaatagggtaggaatgagaaaatctttagaagaaatattcaagaatgtttgatttctagcaaatccagatagacagttttggcaacaamcaagtcataattttgagtcttgttataggagctagaattttattcaagggacaactgatttgattagattagatgctgtgcactgcatgtttgcatcaacaaatgcacatgttgaaactctaacagtagaatggcattagaaggaggacctttgggaagtaatttggttttgatgaggatggagttcccacaatggggttagcatcctaataagaagagcaggagactacagccctcttctctcagccatgtgaagatacaacaagaacacctgcaaaccagtaagagggccttcaccagacactggctctgc

SEQ ID NO: 141030 - DNA, 420 bp, Homo sapiens
gaattctgtaaatatacacaatagggtaggaatgagaaaatctttagaagaaatattcaagaatgtttgatttctagcaaatccagatagacagttttggcaacaacmaagtcataattttgagtcttgttataggagctagaattttattcaagggacaactgatttgattagattagatgctgtgcactgcatgtttgcatcaacaaatgcacatgttgaaactctaacagtagaatggcattagaaggaggacctttgggaagtaatttggttttgatgaggatggagttcccacaatggggttagcatcctaataagaagagcaggagactacagccctcttctctcagccatgtgaagatacaacaagaacacctgcaaaccagtaagagggccttcaccagacactggctctgc

SEQ ID NO: 141031 - DNA, 417 bp, Homo sapiens
gaatgagaaaatctttagaagaaatattcaagaatgtttgatttctagcaaatccagatagacagttttggcaacaaccaagtcataatyttgagtcttgttataggagctagaattttattcaagggacaactgatttgattagattagatgctgtgcactgcatgtttgcatcaacaaatgcacatgttgaaactctaacagtagaatggcattagaaggaggacctttgggaagtaatttggttttgatgaggatggagttcccacaatggggttagcatcctaataagaagagcaggagactacagccctcttctctcagccatgtgaagatacaacaagaacacctgcaaaccagtaagagggccttcaccagacactggctctgctggcccagattttaatctttgaattc

SEQ ID NO: 141032 - DNA, 417 bp, Homo sapiens
gaatgagaaaatctttagaagaaatattcaagaatgtttgatttctagcaaatccagatagacagttttggcaacaaccaagtcataattttgagtcttgttataggagctagaattttattcaagggacaactgatttgattagatwagatgctgtgcactgcatgtttgcatcaacaaatgcacatgttgaaactctaacagtagaatggcattagaaggaggacctttgggaagtaatttggttttgatgaggatggagttcccacaatggggttagcatcctaataagaagagcaggagactacagccctcttctctcagccatgtgaagatacaacaagaacacctgcaaaccagtaagagggccttcaccagacactggctctgctggcccagattttaatctttgaattc

SEQ ID NO: 141033 - DNA, 196 bp, Homo sapiens
gaggacctttgggaagtaatttggttttgatgaggatggagttcccacaatggggttagcatcctaataagaagagcaggagactasagccctcttctctcagccatgtgaagatacaacaagaacacctgcaaaccagtaagagggccttcaccagacactggctctgctggcccagattttaatctttgaattc

SEQ ID NO: 141034 - DNA, 417 bp, Homo sapiens
gaatgagaaaatctttagaagaaatattcaagaatgtttgatttctagcaaatccagatagacagttttggcaacaaccaagtcataattttgagtcttgttataggagctagaattttattcaagggacaactgatttgattagattagatgctgtgcactgcatgtttgcatcaacaaatgcacatgttgaaactctaacagtagaatggcattagaaggaggacctttgggaagtaatttggttttgatgaggatggagttcccacaatggggttagcatcctaataagaagagcaggagactacagccctcttctctcagccatgtgaagatacaacaagaacacctgcaaacmagtaagagggccttcaccagacactggctctgctggcccagattttaatctttgaattc

SEQ ID NO: 141035 - DNA, 456 bp, Homo sapiens
attaaggtttccagagcccatgctacctctgggggctcctacccctcccacaccacacatatatcttgacagggctagttacagagaagaaaaggcctagtaaattaatatcacaatcatttccacatacccaccaaaagactcaaattaaaattttgacaaaattaagtatcaagaagaatgcgaagatttgggaagtatcagacattgtaagactgtcagttggtgtgttaacattgggatgaaaccaataatagctagtaaaatggaagatatgtttcccctgtaacctatggtttcacctcttgttttatactgttcactatacacactatacacactaatggtaaacaaatagaaatacacaaatrttcacaacagcatcatttgtaactgacaaaaatgaacacaacccacatgtctaccaacaatgaagggttacacactggtgtactg

SEQ ID NO: 141036 - DNA, 456 bp, Homo sapiens
attaaggtttccagagcccatgctacctctgggggctcctacccctcccacaccacacatatatcttgacagggctagttacagagaagaaaaggcctagtaaattaatatcacaatcatttccacatacccaccaaaagactcaaattaaaattttgacaaaattaagtatcaagaagaatgcgaagatttgggaagtatcagacattgtaagactgtcagttggtgtgttaacattgggatgaaaccaataatagctagtaaaatggaagatatgtttcccctgtaacctatggtttcacctcttgttttatactgttcactatacacactatacacactaatggtaaacaaatagaaatacacaaatattcacaacagcatcatttgtaactgrcaaaaatgaacacaacccacatgtctaccaacaatgaagggttacacactggtgtactg

SEQ ID NO: 141037 - DNA, 595 bp, Homo sapiens
gaaaccgtgtatttttggtttctagacactctgtaatttatttaatcagacctttattgagcacatttaggctgtcttcagtctctttctgttaaaatataacagtaattatccacgaataaacataatttaatgttaattttgataatgccactgttttggtgggagaggcagataagctagtagtcttcagacaggggatattttctagatccttgactttctatgtcccctttccaaaggctgatctgtctgagaattcagttgcactcaaggtgtttcctttctcaatcactcttctcccactttacaaaaggaagacatagtcattattaatctggagtcttgctgtttgtgtgcctgatgtgtgaaagcctccagattaacaagcaaaggaacaattaggactattattaggaaagtgaatgactgkgagtagcaaatccttttctaagtcagatggtttccaattcttgctttcaacaaaattgaaggcattgtcagttggtagataattaaaaataatttttgattataggtcatgacatgattttgacttgtgattctaaagatactgatattgctatagcaaaat

SEQ ID NO: 141038 - DNA, 517 bp, Homo sapiens
caatcttgctgttctgaagcctatgctggtgatacgcaggcaaacaaggtctggaatggacctccagcaaactccagcagacctgtagcagaggggcctgttagaggaaaactaacaaacagaaaggaacagcatcaacatcaacaaaaaggacatccacrcaaaaacgccatccaaaggttaccaacatcaaagaccacagatagataaatccatgaagatgaggaaaaaccagcggaaaaaggctgaaaattccaaaaaccagaacacctcttctcctccaaaggatcacaactccttgccagcaagggaacaaaactggatggagctccaagacacataattgtcagaatgaccacagtggaaatgaaggaaaaaatgttaagggcagccagagagaaaggtagggatacccacaaagggaagcccaacagactaacagtggatctctcggcagaaagtctacaagctagaagagagtgggggccgatattcaacattcttaaagaaaagaatt

SEQ ID NO: 141039 - DNA, 445 bp, Homo sapiens
ttcaactttgggttgctaagatttatttatatgtgtgtgcatatatttagtgttctaaatagatataaacataattgttcttggcaataaagcagaattggacaattcatctaaaatgaataatatgaaaagatttraaaaggaaaaaaactaaatcaaactctgactctaagagattaatatttatcagtatgcaaatttggtaccttctttattctaatggagtaactgtggggatcaaataacgacatgcaaaaaatgctttcaaaaccacagggctttacaaatttttactattactgttatgattatgttgatccacagtaggatggttctccaagtctttcttataagacctgaaagaattcactgttccgtaaggaagttaatttgcttggagaatatgctgctgtctctaagtgtctgttaaaatcacttatttcac

SEQ ID NO: 141040 - DNA, 474 bp, Homo sapiens
ttaatttgcttggagaatatgctgctgtctctaagtgtctgttaaaatcacttatttcactgctcattagaatgtgctggcaaagcaggtggccccaggggttcaaaggatttcttggcagcccatatttggatctgcattagaaggttgccataattcaaagcagcttactaggaaatcaagggagagataggagatacacagagaatagaaaaatctgcttgattgtccaagtgcttcctgattcctcaaaagcactgctccaaactaaatccttttggatccatctgatccaggaacacctatcatcacacaacaaatggctcctactctggaatccatccgattccaaagatatgagtggaaggagttccacagaagtaggaggagcgcttagtcagtgctatgtaaagaatatggrgctgagcagctgggcacagtggctcacgcctgtaatcccaacactctgagaga

SEQ ID NO: 141041 - DNA, 420 bp, Homo sapiens
ggcccctgagaatttgtgactataaagtaactggtcatcacaggaagtcccaaaaaggtgagmtgtagagaaatcaaagaaagaaggataacaagaagacagaaactgtcataaacagataataatgtaacagagggaaaaaaaccatcaacctcaaagtgaaacaaagtgaaaatcataatagaactattataattaaaatcaggttttcagaattaggaccatgaatctactataattgctcttcacttccagaatgctaaacctcaaaaaaacaatgctgtccttttaaacttgtttggcctctcgttacatttgacactattcattgcttcctccctactgagaatccgaacttctttaaggattttacttccgcatcagcccttcaaatgtttgctgttcctgggatttaatctt

SEQ ID NO: 141042 - DNA, 626 bp, Homo sapiens
tatggagcctcagattcaaaaaataatgccatgttcatgaaatcctagaacatgaaaaccctagagtatctagggagcaagaggacaatctcaacatgcctaaaatctgcacagtttgttcctttctgcctcagatagaagcacatgctgggccctgctgaaagctttgctagagtaagacagaggagcccccagtcatcactggattctgaggctctgagcttacccttcatttcagtgaatccacctgccccacccagggccctggtcgcagtagatttgcctggtttccttgaagactatttctacccacatttcaagggaaacaggcctgagccccatggggcctactaacacctcaacattaaaattcaagactgagacatgaagccatcctcccagggcttcaattctggctggccataggagatgatgaggaagtaggacrgagtgagtttaaaacacaattaactctgtagcagcagacttatgataaattactttctttccttacagaaattcagatttcctgggttggagggacctgttgaaataaggagtaagagctgggcagcttcctgtgctgtaggggaactgatggcctggatggttgagcatccctgatg

SEQ ID NO: 141043 - DNA, 535 bp, Homo sapiens
gctgtgaggtttgaataacttattaccagtaaagtgattaccctagtgtctagcatatggaaagtgtttacttcatcaagtgtttgctttccttattcctgccmtgcccaagaggactttacagctctttgcaaatgcttttgtatagaaatgacctcctgatcctcttatgacccactgaaaaccaagaatatttgcaaaatggagagacaacatgggcccaagggaacaaagcgttgaaagacctaaattttaattctggtactttggccaattggccaggtgatcttagacagactctttgtttatggtggttagcatgtctgcaatatgcagatgagggagctgaggtcctgattcatccctccaagctaaaataaatgctcaagtgtctcctacctttaaaaaccaaccaaccaaccaaccaaccaaccaaccaaccaaccaaccaatgaacgaaccagccaaccaatactcaatcaaacatttcaataaaatattttctctttttggtcatagtcaagcttcttaaaag

SEQ ID NO: 141044 - DNA, 535 bp, Homo sapiens
gctgtgaggtttgaataacttattaccagtaaagtgattaccctagtgtctagcatatggaaagtgtttacttcatcaagtgtttgctttccttattcctgccctgcccaagaggactttacagctctttgcaaatgcttttgtatagaaatgacctcctgwtcctcttatgacccactgaaaaccaagaatatttgcaaaatggagagacaacatgggcccaagggaacaaagcgttgaaagacctaaattttaattctggtactttggccaattggccaggtgatcttagacagactctttgtttatggtggttagcatgtctgcaatatgcagatgagggagctgaggtcctgattcatccctccaagctaaaataaatgctcaagtgtctcctacctttaaaaaccaaccaaccaaccaaccaaccaaccaaccaaccaaccaaccaatgaacgaaccagccaaccaatactcaatcaaacatttcaataaaatattttctctttttggtcatagtcaagcttcttaaaag

SEQ ID NO: 141045 - DNA, 614 bp, Homo sapiens
aattagccacagtttctccactgctacacacctagattctgagggaatttcagtttggggccactgtacctgatggagagggccaaaagcagtaagcttgccctgtcatgcccctgccccgaccccccaccactcagcaggctgacagtctttttaccgatttgagcaagrtggatgtgttgcgtagttcctccattacaaatcaagaacttccagtaaagatgacactgtgagatcacagtttcagcactaccacagccaccactatgcagcaaggggagatagagagagagagagagagagagagagagagagagagagagagaaatagagaaatagagataaagagaagatgacatttctaactccacttagaaaccagatatacaattccttgtgccagagacagaagagaaatctgaggtggtaaagcagactaaagcacagctattgggcccaggagtcagaaggacacagaagtggcccctgtgtcaacccctaagaggcaaagtttctacgtgaagcagagcaaccagaacctagatcactttttgagcccaggctccaccacccttgaaaggaagcaagaaaagctacaacacacagctgcttca

SEQ ID NO: 141046 - DNA, 493 bp, Homo sapiens
gtcaataactatatacaagatcaaatgatgttattctcatttaccctttctcttattcattacattcaaagctttgcctagaactggtaaaaggctggtaagattttgagatggtcactctgatgcactgctggtgaacatatatatcaagttaatttttatggaaagtttgcatcctttggacaagtagttccacttccaaaggtacaaattagggaaaaactgtcatggtaaattgaaattggccacaaactctaccaccaagggtagactctacttgatctaggtcagacttgcagcttgctttgactaayagaatatcataaaagtgatgctgtatgaattctgaacaagacttgcttctagtctcatccaaattccgactgctcctatatgaataagctcacactagacaccttgagacagagcaagcccctgtctcaaaattaaaagagtgaaattctgtcctttgcagcaacgtggctagagctga

SEQ ID NO: 141047 - DNA, 514 bp, Homo sapiens
tttcgcatgaggaccatattaagggctcagtaaacattggctggccagtaaagtggtcagtgttgggttggatgctgtccccctgcaatgcatatccttcctggaacctcagaatatgaccttatttggaaatagggtcattgcagatgtacttacttaagatgaggtcacacaggactagtagggtggggccttartccattgtaactcctcttataagaagagaagagacagagaaaaacacccagtggggtagaaggactcatgtccatgggggcagagactggagtgatgcatctgtgggccaagaagtgcaaggattgctggcaacaccagaagctgacagaaggcatagaaccgtttcccccagaccctgcagagagagcatggcccagctgatgacttgttttggactgtaggcatggtcgggtgtgagcaaggcagcagcacctcaggagacatgtccagtgctcagggaggcttcatgaaaatccctaatcaaagagccaggagt

SEQ ID NO: 141048 - DNA, 435 bp, Homo sapiens
ataatgaagagacctatcatatgcatggattggaagatgcaacatagtagagatgccagttctttccagattgatatctacacttaacaaactcctaccaaatcccagcaggatttttctgtagttacrgagaaaactattctaaaatgtatattgaaaagcatacgaactattagaagttaagatgagctaatgttgaaaaggaggaataaagaggttgaattacttgatccaatttgaagatttattatacagctatggtaataaaaattgtgggtattgacagagtgacagacacacagataaaacagagcgaaacagagaaccagaaataacccacaccagtcaagccagctgatttttgacaacttcataaaagcaattcagtcaaggaaggatagtctctccaacaaatggtgctggagtaattgggca

SEQ ID NO: 141049 - DNA, 415 bp, Homo sapiens
tatgcatggattggaagatgcaacatagtagagatgccagttctttccagattgatatctacacttaacaaactcctaccaaatcccagcaggatttttctgtagttacagagaaaactattctaaaatgtatattgaaaagcatacgaactattagaagttaagatgagctaatgttgaaaaggaggaataaagaggttgaattacttgatccaatttgaagatttattatacagctatggtaataaaaattgtgggtattgacagagtgacagacacacagataaaacagagcgaaacrgagaaccagaaataacccacaccagtcaagccagctgatttttgacaacttcataaaagcaattcagtcaaggaaggatagtctctccaacaaatggtgctggagtaattgggc

SEQ ID NO: 141050 - DNA, 593 bp, Homo sapiens
gccagaggattattcttaaaccttaagtttcaatgttatttgctccattaggtttcagatttgctgaggatytgttaactcttttttctttcctatttcttcccttggaaatggcaatgtctaatctatgtttgtccccgtctttgtattttggaagcacatacatgtctgatttcacaggttcacagctaaaaagcaatttgtctcaagatgaatcataccttgagtctcacacatatctgatttagatgatatttacatgaaactttggacttcggatctgagttgatgctggaacaatttaagactttttcagctctttatatgcaggaaggacatgaatttgggagggccaaagttggaatgctatgatccaaatgttcatgtcccccaaaattcgtatgttaaaatctaatccccaatatgagggtatttgaaggtggggcctgtgggaggtgattaggtcataaagactgagctctcataaataagattagtgcctttataaaagaggccccagagaaatcacttgctctttccaccatatgaggacatgatgagaagaggccatctgtgaaacaggaggcaggccc

SEQ ID NO: 141051 - DNA, 572 bp, Homo sapiens
ggccgggcacagtggctcaagcctgtaatcccagcactttgtgaggtcgaggcagggggatcatttgaggtcaggagttcaagaccagcctgaccaacatgatgtaaccctgcccctactaaaaacacaaaaattagccaggcatggtggtgcacacctgtagtcccagctacttgggaggttgaggtgggagaatcacttgaactcacgaggtggaggttacagtgagccaagatcatgccattgcrttccagcctggacaacagagcaagacttggtcaaagaaagaaagaaagagagagagagaagccaaacacaaaagcaaccgctatggtctgaatgtttatgtcccccaaaactaccaaggtgatggtattagaaggcgggagcctctgtgaggtgattaggtcaagagtacacagccctaataaatggaattagtgtccttataaaagaggcccaaaagaggccccttatctactatcaccttgatcttggacttcccagcatcacaactgtgagaaataaatttctgttgtttataagccacccaggttatggtattttattat

SEQ ID NO: 141052 - DNA, 498 bp, Homo sapiens
tttaaagattaaattgccttaaattgccttttcttcctttagaaaatagacacaacatggctctttgtagcaacagatctcttctgtaattgaaatgataaataaatagagctgggcaaaaccggaggtggtttggagtttgagmtgagagtattgcatttacactttccaagtttcctttcttaacttgtgactctggggctgaaataataatccttttttttcttctttaaaataaatctttccctgcttctaactaccaggggaatattatgaaaacattcagaactaacattacagaactaacatagctaaaaatggtgcatcagcattgtgaaaaggcctataatcccagagagagaaaaactccaaacattatgagcagtgcagggttcttttactgttgatcctgagaaacagtaagtttggggttcttgttgctcatttagcaaaaataaacttacaaaaaacaggaaggaaaggaaggaaggaaaggaa

SEQ ID NO: 141053 - DNA, 566 bp, Homo sapiens
tttaaattttgcctcattgccaggtgcagtggcttatgcctgtaatcccaggcataggattggtgggggagagcttgagccaggagtttgagactagcctggggaacatggcaagaccctgtctctataaaaaaattagctagttgtggtggtgggtgcctgtactcccagctactcgggaggctgaggtgagaggattgcttgagtctgagagtttggggctgcagtgagccctgattgygccactgcactcgagcctgggggacagagcaggacttcatctcaaacaaacaaacaaacaaaaatccaaactgttgccagagtatgaggaaatgttcttattttcccagatttttagttttttctcttacaatgcatgagttgggtttgattaactctcgtacacaccagcatagtcattgctctagaacaggctgtgccatctctggaatggcctattgccatggatgactaatttaactctctcttctctcatacttgccctcttcaacttcactgttcatatacatgctaagaaataaattacagaactaatctggccatgg

SEQ ID NO: 141054 - DNA, 597 bp, Homo sapiens
gctgagaggaaatgaagacagtaattgtggacaacactttgaatgggctgagttgtgaagtaagagatacacaaggaggtatctagaaaaaacagatttgggaatatttaatgctgattagaaaagccatttgcaaggggacttttgttatttatttatttatgacttctaatttaatttaattwatttatttaagagacagggtctcactttgtcacccaggctggagtgcagtggtgtgaacatgtctcacagcagcctcaaattctcagctcaaacggtcctcccgcctcagcctcccgagtagctgagactacaggcatgtgccactattcccgactttttatttaaatttttttttttttgtagaaatgggggtctcattatgttttccaggctggtcatgaacccctggcctcaagcaattctcctgtctcagcctcccaaaacactgaaattacaggcatgagtcactgtttccagcacaagtagaacttttaaagatagagaatggatggggagtattctgagtaatagaaaaaaattatgaactaaaaactcttaataagttaaaaatcaaattgttttttatatgcc

SEQ ID NO: 141055 - DNA, 597 bp, Homo sapiens
gctgagaggaaatgaagacagtaattgtggacaacactttgaatgggctgagttgtgaagtaagagatacacaaggaggtatctagaaaaaacagatttgggaatatttaatgctgattagaaaagccatttgcaaggggacttttgttatttatttatttatgacttctaatttaatttaattaatttatttaagagacagggtctcactttgtcacccaggctggagtgcagtggtgtgaacatgtctcacagcagcctcaaattctcagctcaaacggtcctcccgcctcagcctcccgagtagctgagactacaggcatgtgccactattcccgactttttatttaaatttttttttttttgtagaaatgggggtctcattatgttttccaggctggtcatgaacccctggcctcaagcaattctcctgtctcagcctcccaaaacactgaaattacaggcatgagycactgtttccagcacaagtagaacttttaaagatagagaatggatggggagtattctgagtaatagaaaaaaattatgaactaaaaactcttaataagttaaaaatcaaattgttttttatatgcc

SEQ ID NO: 141056 - DNA, 624 bp, Homo sapiens
tactttgctgagctctgagcctggtagttattgctgagattagtggattgatgaaaagtgtaataagcagagtgaacactagtatagtattcagttatgcaatatgaatagctttgaactccctagccttagcttagttttcaaaactctctagtgcctgatcttagtttgcttcttactaataattctccttctcagatctgctctagacaaacttttgtccctattgcttcataaactcaacttgcgtgttcacaggtagtcatatacctacagttttgttcatgccaattccttctgctactagtcattgacatttcagctatccttctasagtgaggtaaaatttcatctcctgcccattcgcagtggctcacacctgtaatcccagcactttgggagtccgaggtggtggatcacgaggtcaggagatcgagaccatcctggctaacatggtgaaagcccgtctgtactaaaaatacaaaaaattagctgggcgtggtggtgggcacctgtagtcccagctacttgggaggctgaggcaggagaatggcatgaacccgggaggcagagcttgcagtgagccaagatagcaccactgcactccagcctgggccacagagc

SEQ ID NO: 141057 - DNA, 624 bp, Homo sapiens
tactttgctgagctctgagcctggtagttattgctgagattagtggattgatgaaaagtgtaataagcagagtgaacactagtatagtattcagttatgcaatatgaatagctttgaactccctagccttagcttagttttcaaaactctctagtgcctgatcttagtttgcttcttactaataattctccttctcagatctgctctagacaaacttttgtccctattgcttcataaactcaacttgcgtgttcacaggtagtcatatacctacagttttgttcatgccaattccttctgctactagtcattgacatttcagctatccttctagagtgaggtaaaatttcatctcctgcccattcgcagtggctcacacctgtaatcccagcactttgggagtccgaggyggtggatcacgaggtcaggagatcgagaccatcctggctaacatggtgaaagcccgtctgtactaaaaatacaaaaaattagctgggcgtggtggtgggcacctgtagtcccagctacttgggaggctgaggcaggagaatggcatgaacccgggaggcagagcttgcagtgagccaagatagcaccactgcactccagcctgggccacagagc

SEQ ID NO: 141058 - DNA, 624 bp, Homo sapiens
tactttgctgagctctgagcctggtagttattgctgagattagtggattgatgaaaagtgtaataagcagagtgaacactagtatagtattcagttatgcaatatgaatagctttgaactccctagccttagcttagttttcaaaactctctagtgcctgatcttagtttgcttcttactaataattctccttctcagatctgctctagacaaacttttgtccctattgcttcataaactcaacttgcgtgttcacaggtagtcatatacctacagttttgttcatgccaattccttctgctactagtcattgacatttcagctatccttctagagtgaggtaaaatttcatctcctgcccattcgcagtggctcacacctgtaatcccagcactttgggagtccgaggtrgtggatcacgaggtcaggagatcgagaccatcctggctaacatggtgaaagcccgtctgtactaaaaatacaaaaaattagctgggcgtggtggtgggcacctgtagtcccagctacttgggaggctgaggcaggagaatggcatgaacccgggaggcagagcttgcagtgagccaagatagcaccactgcactccagcctgggccacagagc

SEQ ID NO: 141059 - DNA, 624 bp, Homo sapiens
tactttgctgagctctgagcctggtagttattgctgagattagtggattgatgaaaagtgtaataagcagagtgaacactagtatagtattcagttatgcaatatgaatagctttgaactccctagccttagcttagttttcaaaactctctagtgcctgatcttagtttgcttcttactaataattctccttctcagatctgctctagacaaacttttgtccctattgcttcataaactcaacttgcgtgttcacaggtagtcatatacctacagttttgttcatgccaattccttctgctactagtcattgacatttcagctatccttctagagtgaggtaaaatttcatctcctgcccattcgcagtggctcacacctgtaatcccagcactttgggagtccgaggtggtggatcacgaggtcaggagatcgagaccatcctggctaacatggtgaaagcccrtctgtactaaaaatacaaaaaattagctgggcgtggtggtgggcacctgtagtcccagctacttgggaggctgaggcaggagaatggcatgaacccgggaggcagagcttgcagtgagccaagatagcaccactgcactccagcctgggccacagagc

SEQ ID NO: 141060 - DNA, 590 bp, Homo sapiens
gttacttatggctttgttttaatatttaaatatttaatctactgatattacgtaaaaatggggaaagcaaataatcagaaaaggccctgagctcatgcctgctggsccatgttttctctccagttctacatgcttaaatgcttcataccttgaccagcttcatgtcatctaaatgcatgtttttaattttcctctcataaattaaatctagtggttagaatgggaaatgcttttgctgatgtctttaaaggttaggaatgttagcatacttatttagcatatgtgaatctttatcagaagttggctggaagaggacaagtttatcagagtaagaaaggtgctcagtagcacttcaggaatacctctgctcattaaccacatgctccaggtctgagttatcttttacctgctttgtgctaaaaatagaatgtcctaattccattctatagtcccattttactgttctgagttattctttcagtttttctactgacatcaataggctcctgagagaatcacaaagaatctttaataagagtgaatctctaataccaggatttaaaaaattgtttccaatcagggaaacaaga

SEQ ID NO: 141061 - DNA, 534 bp, Homo sapiens
acctagttgggagggaaaagtggatatgatggatgccaagcaattttgaggatactygtttttcattatttttgtgtgcttgcttttgttttttgttatgagcagtacaaagaagatttatgtcctagctgaaagggtacaggataggatatacacttgctactcttccttttgaagagtatacattttaaaaacgtttattgaaagcaaactatatattagaagctatatgaggcttttgccctcttttaaactttttaaaaaacaccaaattatgcatacttattgtaacaaaatcaaacagctataaatagataaattgtttgtgtgtgagagggagggaggatgggagaagaatgagagaaatatatagagtataaagttcttctttatctcagtatcctcttaccccgaccaaattatcttatgcagagcttccactgttaacaacaatgtcactgtttcgaagactcagaatatccatttatttggtaccaagagaggacatatttcttttctcttttccgaccactg

SEQ ID NO: 141062 - DNA, 445 bp, Homo sapiens
tataacatgttatttggacctgataatgacaacttttatcacaaagaaaagtaaaaaatatatatttttaaaataatgcccttctcttaaccaattattttaagtattgtctttaatagttttgtctttggtcttcatacttaagatgtaatgtatataccacaattatagtattagcgtatattcrtctttattatgtttaccagtgagttttatgccttcagatgttttcttgttacatgttagcattcttttctttcatattgtaaaactccctttaccatttctaagataggactggtgttgatgaactccttcagcttttgtttgtccaagagcctttatctgtttttcatgctggaaagatttgctgggtacattattcttggagggcagtttatttgcagtttgccttcagcgttttagatatatcatcccactcccc

SEQ ID NO: 141063 - DNA, 445 bp, Homo sapiens
tataacatgttatttggacctgataatgacaacttttatcacaaagaaaagtaaaaaatatatatttttaaaataatgcccttctcttaaccaattattttaagtattgtctttaatagttttgtctttggtcttcatacttaagatgtaatgtatataccacaattatagtattagcgtatattcatctttattatgtttaccagtgagttttatgccttcagatgttttcttgytacatgttagcattcttttctttcatattgtaaaactccctttaccatttctaagataggactggtgttgatgaactccttcagcttttgtttgtccaagagcctttatctgtttttcatgctggaaagatttgctgggtacattattcttggagggcagtttatttgcagtttgccttcagcgttttagatatatcatcccactcccc

SEQ ID NO: 141064 - DNA, 570 bp, Homo sapiens
gattttagaccttcaaaactgcattgagctaaagatggctgcttcagtagtcacaacataattataaattcctcagtgtctggaggaatttgttataaaacttggtattaggtgattttgagaatggactaaagaagtagtctaaatggactaaagaagtaggtcttgttttctgatagcatccaaaccaaagacaagggtaattttatgattaggtacatcaattttttatttaggaatggtaggtgcagtgtaggacgaatgccataattgataaggagaagcagttacttatgttcagtggaagaaagacatgtttgttcagttttgtcattgtacaatgctagtttttcgctgtgctcccatataataatgtgtcatcctgtttggtctcaatgcatcagaataacagagttatcttgtctgaggttaatgttctgtgacttatttctgttgaatattgaccaccgtggccaagctcttagggccaggctwggtaccagctggaagctcagaaagttggccaaattaggtggagaaatcatagtactaacctggggaaccgaagtt

SEQ ID NO: 141065 - DNA, 446 bp, Homo sapiens
ggggcctgcagcccctttgttttgtccaacttctcccatttggaatgactctatttacccaatgcccawacccccgttgtatataggaagtaactaacttgcttatgattttacaggctcatagatgaaagaaacttgccttgtctcagatgagatgttggactgtggacttttgagttcatgctgaaatgagttaagactctgggggactgttaggaaggcatgattggttttgaaatgtgtggacatgagatttgggaggggccaggctgtttccctacccaaatctcatcttgaattgtaactcccacaattcctacatgttgtgggaagaacccggtgggagatgattgaattatgggggcgggtctttcctgcactgttcttgtgaatgagtctcatgagatctgatggttttaaaatgagagtttccctgcacaagttct

SEQ ID NO: 141066 - DNA, 572 bp, Homo sapiens
aggagattgaattcataatccaacatctgctgaccaagaaaaagaaaagaaagccctaaacctgggctttttggtgaacttatttctttgttgaattawgctaaacagttaaagaagaacaccaatctttaagttttctggaaaactgaagaacaggaaatatttcccgatttactctatcaggccaacattactctgatctaagacaaggatgctaataaaattataggccaagatatcttataaacattaatgcaaaatttctcagcaatatactaacaaattcagcaatataatttaacatatgcaaattgatcaatataatagactgcattaatagaatatatatttaaaaatatatgtgtatgtaaaattttatctttgacccccaagttgtttagaattcttactaattcttaaacatgagagttttattctctctctctgttatttctaatttaattttataacaaacaatgaatatgatctggtaagataagacttaaagtgtatttttttgctgctttgtggtttagcttgtgatcaatttttatagtctgtgttgtaaaaaa

SEQ ID NO: 141067 - DNA, 572 bp, Homo sapiens
aggagattgaattcataatccaacatctgctgaccaagaaaaagaaaagaaagccctaaacctgggctttttggtgaacttatttctttgttgaattaagctaaacagttaaagaagaacaccaatctttaagttttctggaaaactgaagaacaggaaatatttcccgatttactctatcaggccaacattactctgatctaagacaaggatgctaataaaattataggccaagatatcttataaacattaatgcaaaatttctcagcaatatactaacaaattcagcaatataatttaacatatgcaaattgatcaatataatagacygcattaatagaatatatatttaaaaatatatgtgtatgtaaaattttatctttgacccccaagttgtttagaattcttactaattcttaaacatgagagttttattctctctctctgttatttctaatttaattttataacaaacaatgaatatgatctggtaagataagacttaaagtgtatttttttgctgctttgtggtttagcttgtgatcaatttttatagtctgtgttgtaaaaaa

SEQ ID NO: 141068 - DNA, 574 bp, Homo sapiens
gtatttaatggttgaaccagagtcwaattatacagggcttcaaaatctattcagctttatccctaacacaataaagaacatttttctaaagaacaagaaagaattggattgatattctagcaatcacatagagacacctagctagaatgataatattggggattcagcttcatttgaaaccagctgattacatttgttgccatgagggtttctgagctaaactcacagctttgaactctgtgtggaccagtttatttgttcagggaccctgaaattctatcaaaactatgcactaacaggcacatgtagaaccaatgtaaaagtgcatttgggggagtagggaagagcttaaggtattttcctgtcaaactcttcaatattcttggcctcagaaaatagatcagaataatatatttttttaaatgcttgctactctgcaacctccagattcttgaaaaggatagataaattgagatttacttggagatttgcttccctactattttgcctttgttagtcagtttacagaggaaatttattagcttttgtgataaaagattcttcatagttctat

SEQ ID NO: 141069 - DNA, 574 bp, Homo sapiens
gtatttaatggttgaaccagagtctaattatacagggcttcaaaatctattcagctttatccctaacacaataaagaacatttttctaaagaacaagaaagaattggattgatattctagcaatcacatagagacacctagctagaatgataatattggggattcagcttcatttgaaaccagctgattacatttgttgccatgagggtttctgagctaaactcacagctttgaactctgtgtggaccagyttatttgttcagggaccctgaaattctatcaaaactatgcactaacaggcacatgtagaaccaatgtaaaagtgcatttgggggagtagggaagagcttaaggtattttcctgtcaaactcttcaatattcttggcctcagaaaatagatcagaataatatatttttttaaatgcttgctactctgcaacctccagattcttgaaaaggatagataaattgagatttacttggagatttgcttccctactattttgcctttgttagtcagtttacagaggaaatttattagcttttgtgataaaagattcttcatagttctat

SEQ ID NO: 141070 - DNA, 574 bp, Homo sapiens
gtatttaatggttgaaccagagtctaattatacagggcttcaaaatctattcagctttatccctaacacaataaagaacatttttctaaagaacaagaaagaattggattgatattctagcaatcacatagagacacctagctagaatgataatattggggattcagcttcatttgaaaccagctgattacatttgttgccatgagggtttctgagctaaactcacagctttgaactctgtgtggaccagtttatttgttcagggaccctgaaattctatcaaaactatgcacyaacaggcacatgtagaaccaatgtaaaagtgcatttgggggagtagggaagagcttaaggtattttcctgtcaaactcttcaatattcttggcctcagaaaatagatcagaataatatatttttttaaatgcttgctactctgcaacctccagattcttgaaaaggatagataaattgagatttacttggagatttgcttccctactattttgcctttgttagtcagtttacagaggaaatttattagcttttgtgataaaagattcttcatagttctat

SEQ ID NO: 141071 - DNA, 574 bp, Homo sapiens
gtatttaatggttgaaccagagtctaattatacagggcttcaaaatctattcagctttatccctaacacaataaagaacatttttctaaagaacaagaaagaattggattgatattctagcaatcacatagagacacctagctagaatgataatattggggattcagcttcatttgaaaccagctgattacatttgttgccatgagggtttctgagctaaactcacagctttgaactctgtgtggaccagtttatttgttcagggaccctgaaattctatcaaaactatgcactaacaggcacatgtagaaccaatgtaaaagtgcatttgggggagtagggaagagcttaaggtattttcctgtcaaactcttcaatattcttggcctcagaaaatagatcagaataatatatttttttaaatgcttgctactctgcaacctccagattcttgaaaaggatagataaattgagatttacttggagatttgcttccctactattttgcctttgttagtcagtttacagaggaaayttattagcttttgtgataaaagattcttcatagttctat

SEQ ID NO: 141072 - DNA, 582 bp, Homo sapiens
cttccctactattttgcctttgttagtcagtttacagaggaaatttattagcttttgtgataaaagattcttcatagttctatctgcaatggaatgtttttacttgaatagaaatagatcaatagaaaaatatgtgattttagcttttctacctacagattctatcaattataaaacaaacatttgaagtagattgtcttctgctccccttaacagaaaaaatttcrttgacttgcaattttattgatccttgaggttgctctgcactttgctagtattaagaaccctggggaatgagaagctattagaaattctgattccatgcacgagaaatccacccatttcccctctcatatttacacctgccaatatttttctcatttgcttcagagtgtgataaatttaggcatcttttagcatgctattcttcatgtaattctatcatccacacaaacttctttttaacgtaagccattaagcattatgaagtttcaatagatggcacctacatagcagtattggactataatattaagttcactaaagaaatcatacttgctgaaactcctttatccacttgat

SEQ ID NO: 141073 - DNA, 582 bp, Homo sapiens
cttccctactattttgcctttgttagtcagtttacagaggaaatttattagcttttgtgataaaagattcttcatagttctatctgcaatggaatgtttttacttgaatagaaatagatcaatagaaaaatatgtgattttagcttttctacctacagattctatcaattataaaacaaacatttgaagtagattgtcttctgctccccttaacagaaaaaatttcattgacttgcaattttattgatccttgaggttgctctgcactttgctagtattaagaaccctggggaatgagaagctattagraattctgattccatgcacgagaaatccacccatttcccctctcatatttacacctgccaatatttttctcatttgcttcagagtgtgataaatttaggcatcttttagcatgctattcttcatgtaattctatcatccacacaaacttctttttaacgtaagccattaagcattatgaagtttcaatagatggcacctacatagcagtattggactataatattaagttcactaaagaaatcatacttgctgaaactcctttatccacttgat

SEQ ID NO: 141074 - DNA, 582 bp, Homo sapiens
cttccctactattttgcctttgttagtcagtttacagaggaaatttattagcttttgtgataaaagattcttcatagttctatctgcaatggaatgtttttacttgaatagaaatagatcaatagaaaaatatgtgattttagcttttctacctacagattctatcaattataaaacaaacatttgaagtagattgtcttctgctccccttaacagaaaaaatttcattgacttgcaattttattgatccttgaggttgctctgcactttgctagtattaagaaccctggggaatgagaagctattagaaattctgattccatgcacgagaaatccacccatttcccctctcatatttacacctgccaatayttttctcatttgcttcagagtgtgataaatttaggcatcttttagcatgctattcttcatgtaattctatcatccacacaaacttctttttaacgtaagccattaagcattatgaagtttcaatagatggcacctacatagcagtattggactataatattaagttcactaaagaaatcatacttgctgaaactcctttatccacttgat

SEQ ID NO: 141075 - DNA, 422 bp, Homo sapiens
taaccacgctgcacaaatagatcgccagagcttattcattctacctaaaactttatatcctttggctaatcactcctcattcccttcccccagcccctactctgtgcttgtctggattccacatttaagtgaggtaatatagcatttgtctgtgtctggcttattctacttagcataayatcctcaaggttcagccatgaggtcacataggactggattttctgtaaggctgaataataatatgttatatatatacatcacaattcctttatctattgctcatggacacttaagctgattatacatcttagctgttataatgttgcagtgaacatgggaatacagagatctgtttaacattcttaggctatttcgtttaggtatgtatgcaggagtaggattgctaggtaatatggtagttc

SEQ ID NO: 141076 - DNA, 422 bp, Homo sapiens
taaccacgctgcacaaatagatcgccagagcttattcattctacctaaaactttatatcctttggctaatcactcctcattcccttcccccagcccctactctgtgcttgtctggattccacatttaagtgaggtaatatagcatttgtctgtgtctggcttattctacttagcataacatcctcaaggttcagccatgaggtcacataggacwggattttctgtaaggctgaataataatatgttatatatatacatcacaattcctttatctattgctcatggacacttaagctgattatacatcttagctgttataatgttgcagtgaacatgggaatacagagatctgtttaacattcttaggctatttcgtttaggtatgtatgcaggagtaggattgctaggtaatatggtagttc

SEQ ID NO: 141077 - DNA, 649 bp, Homo sapiens
tgtccattgtcattcttctatacatagacactcagttttcccaacaccatttattgaagagactctttctttcctcattcaaaggccttggcaactttgtcaaatatcaattgacaataactgtgtatatttacttcttggctgcctattctgttccagtgacctatacatttgtttttatgtcagtacaatgttgctttcattactataactcagtatattttgaaacaatgtaatgtgatgccctaagctatgttcgtgtttctcaacattgatttggctatttgttttatgtgtgtatagttcaatataggttttagaatatttttctatttctgtgaaacatgccattagaatttgtatagggattgcaccraatgtactgactgcattaggtagtatggctgttttaacagtattatgtgttccaattcatgaacacagagtatctttccatttgtgtcttcagtatttttcatcagtttttaaatttttccacttacagcttttttttacccccttaaattcattcctaagtggttttattgtttttgatgttttgtaaattggatttctaaaaaattttttttcagatagttcattgttagtacataagggaactaatttttgcagttgattttgtaccctg

SEQ ID NO: 141078 - DNA, 422 bp, Homo sapiens
aggttttgaaagaaaggactggaagataaaaggtatgagagtaagttttgtttacactattattttatactttctgtgataatatgattagaaaatgtacttacaaatgacatttgaaagttaatgggaaaagcatgctatgttttgctaagagaaacctaaaaatctataattatgagcccattttgtttaaaacttggcatataaaagtactaaaracttggtgaatatgtgtatgtacataaatatacagagagaaatgtacagatatttgtcctatgcattttttcaaaaaaagtatcttgtttgctatataaagtaataccataaaacaaaagaaaatttaaaaatagaagaggagagtttgaaaaagtggttttcctcttagtaaaatgctgtacttctataggaagctgaagtaa

SEQ ID NO: 141079 - DNA, 422 bp, Homo sapiens
aggttttgaaagaaaggactggaagataaaaggtatgagagtaagttttgtttacactattattttatactttctgtgataatatgattagaaaatgtacttacaaatgacatttgaaagttaatgggaaaagcatgctatgttttgctaagagaaacctaaaaatctataattatgagcccattttgtttaaaacttggcatataaaagtactaaagacttggtgaatatgtgtatgtacataaatatacagagagaaaygtacagatatttgtcctatgcattttttcaaaaaaagtatcttgtttgctatataaagtaataccataaaacaaaagaaaatttaaaaatagaagaggagagtttgaaaaagtggttttcctcttagtaaaatgctgtacttctataggaagctgaagtaa

SEQ ID NO: 141080 - DNA, 422 bp, Homo sapiens
aggttttgaaagaaaggactggaagataaaaggtatgagagtaagttttgtttacactattattttatactttctgtgataatatgattagaaaatgtacttacaaatgacatttgaaagttaatgggaaaagcatgctatgttttgctaagagaaacctaaaaatctataattatgagcccattttgtttaaaacttggcatataaaagtactaaagacttggtgaatatgtgtatgtacataaatatacagagagaaatgtacagatatttgtcctatgcattttttyaaaaaaagtatcttgtttgctatataaagtaataccataaaacaaaagaaaatttaaaaatagaagaggagagtttgaaaaagtggttttcctcttagtaaaatgctgtacttctataggaagctgaagtaa

SEQ ID NO: 141081 - DNA, 537 bp, Homo sapiens
attcttcctgggttcaaatttcagttmcactgcttcctatccctaaaacttgggaggatatttcatctttctgtgcctcatttccccaggcataaacaagaaatgataatggcacctacctcctgggattgtttgaggatgaaatgggtagatatataaaacagtttaggagaatgtcaggtatacagtaagtccctatgtgttagctattgtcattcttgtgtaccccgaccccaccccaggaatcttaattttctcaagtattcagattcatcttttgttctctttggttcctcattaaaactttagagaaagtccggcacattaaagggaaaaaaactaagtaaagaattagcaccatatttaacaggcactctattaggtgactttaataagcttttaaaaataactattatgatggcactagtgttcaaacccgagagactccatcttgaataggggctgggtaaaatgaggctgaggcctctgggctgggttcccaggaggttaggcattctaagtcacaggatgagatag

SEQ ID NO: 141082 - DNA, 490 bp, Homo sapiens
ggctatttacattcaatgttactattgagatgtgaggtaccattctattcactgtgctgcttattgcctgaataccttgtttttggggttgcgtgtgtgtgtgtgtgctgttgttttataggtcttctgagatgyatgctttaaggagtatttcaaggatttatttcaaaacttagagctccttttagcagctgttatagtgctggtttggtagtggcatcttccctcagcatttgtttgtctgaaaatgactgtatctttccttcatttatgaaggttagtttccctgaatacaaagatctgggctcatcattattttgtttaaggaggctgaatatagggcccaatcccttctagtttgcagggtttctgctgaaaaatctgcagttaatctgatagattttcccttataggttacctggtgattttgcctcatgtctcttaatatttcttcctttgtcttgagtttagataacccaataactatgtg

SEQ ID NO: 141083 - DNA, 448 bp, Homo sapiens
gaaagttttttctttattattttcccaggtaggytttccaaacttttagatttctcttctttctcaggaatgccaattattcttaagtttggtcatttaacataatctcaaacttcctggaggctttataattttcttattcttttttgtctttgttggattgagttaattcaaaaatcttgtcttcaagctctgatgtttcttctgcttgtttgattctgtggctgagacattttagtgcattttgcattgctataagtttgtccttgatttccagaagttctgattgtttttcatttatgctatctatcactgaagatttcttccttcatattttgtgatatggtttggctgtgtcctcacccaaatcgcaacttgaattgtatctcccagaattttcatgtgttgtgggagtgactgaggggtaggtaattgaatcatgcgggcc

SEQ ID NO: 141084 - DNA, 448 bp, Homo sapiens
gaaagttttttctttattattttcccaggtaggttttccaaacttttagatttctcttctttctcaggaatgccaattattcttaagtttggtcatttaacataatctcaaacttcmtggaggctttataattttcttattcttttttgtctttgttggattgagttaattcaaaaatcttgtcttcaagctctgatgtttcttctgcttgtttgattctgtggctgagacattttagtgcattttgcattgctataagtttgtccttgatttccagaagttctgattgtttttcatttatgctatctatcactgaagatttcttccttcatattttgtgatatggtttggctgtgtcctcacccaaatcgcaacttgaattgtatctcccagaattttcatgtgttgtgggagtgactgaggggtaggtaattgaatcatgcgggcc

SEQ ID NO: 141085 - DNA, 537 bp, Homo sapiens
attcttcctgggttcaaatttcagttacactgcttcctatccctaaaacttgggaggatatttcatctttctgtgcctcatttccccaggcataaacaagaaatgataatggcacctacctcctgggattgtttgaggatgaaatgggtagatatataaaacagtttaggagaatgtcaggtatacagtaagtccctatgtgttagctattgtcattcttgtgtaccccgaccccaccccaggaatcttaattttctcaagtattcagattcatcttttgttctctttggttcctcattaaaactttagagaaagtccggcacattaaagggaaaaaaactaagtaaagaattagcaccatatttaacaggcactctattaggtgactttaataagcttttaaaaataactattatgatggcactagtgttcaaacccgagagactccatcttgaataggggctgggtaaaatgaggctgaggcctctgggctgsgttcccaggaggttaggcattctaagtcacaggatgagatag

SEQ ID NO: 141086 - DNA, 502 bp, Homo sapiens
tggatatattcctgaaaatatacaaccctccagcttaaaccagggagaacagaccaataacaagcagtgagattaaaatggtaataacaaaattgccaacaaaaaaatgttcaggaccagatgaattcacagctgaattctatcagacrttcaaaagagaattggtacgaatcccattgacattatttcagaagataaagagggaatcctccctaaatcattctatgaagccagcatcaccctaaaaccaaaaccagaaaagcacataacaaaacacactacagaccaatatccctgatgaatatagatgcaaaaatccctaagaaaatactagctaactgaatccaacagcatatcaaaaagataatccaccatgatcaagtgggtttcataccaaggatacagggatggtttcgcatgcacaagtcaataaatgtgatagttcacataaacagaattaaaaacaaaattcatatgaccatctcaattgatgcacaaaacg

SEQ ID NO: 141087 - DNA, 467 bp, Homo sapiens
gatatattcctgaaaatatacaaccctccagcttaaaccagggagaacagaccaataacaagcagtgagattaaaatggtaataacaaaattgccaacaaaaaaatgttcaggaccagatgaattcacagctgaattctatcagacattcaaaagagaattggtacgaatcccattgacattatttcagaagataaagagggaatcctccctaaatcattctatgaagccagcatcaccctaaaaccaaaaccagaaaagcacataacaaaacacactacagaccaatatccctgatgaatatagatgcaaaaatccctaagaaaatactagctaactgaatccaacagcatatcaaaaagataatccaccatgatcaagtgggtttcataccaaggatacagggatggtttcgcatgcacaagtcaatamatgtgatagttcacataaacagaattaaaaacaaaa

SEQ ID NO: 141088 - DNA, 575 bp, Homo sapiens
taacatctgttgaaactgaaagaaggagcatgctttcaaaaagagttttcccagcctggacagtcacatatctaaccaagrtgattaaacccacattcagtactttccccaaaggtctgtaaatgtcggtataagttccataaactgaaatacattgctgtaaggttaagagaatagcattgttaacgatgccccttagtgcacttacaatttccttctaagagttattggctgagggacattcccaagccatatggacatatattccctagtcattacggaaattccaatgtgagcactggtattctcaaatcttactgtgggctgcatgaggggcatagaatgtcctcagtttgcctttttttaaaaaaaaaatcatcttcaaagaggaccaatgtggcatacaaaatgaacttcttttaatgccaaaatttcttgggaatggttctgtactacgtttacatttattttccatttaggctggattattaggtcttttaagttgccgtcattcaagacatttttataactttgtgccaggtggctgctcctggaaaactcttggtcccacttta

SEQ ID NO: 141089 - DNA, 571 bp, Homo sapiens
tctgttgaaactgaaagaaggagcatgctttcaaaaagagttttcccagcctggacagtcacatatctaaccaagatgattaaacccacattcagtactttccccaaaggtctgtaaatgtcggtataagttccataaactgaaatacattgctgtaaggttaagagaatagcattgttaacgatgccccttagtgcacttacaatttccttctaagagttattggctgagggacattcccaagccatatggacatayattccctagtcattacggaaattccaatgtgagcactggtattctcaaatcttactgtgggctgcatgaggggcatagaatgtcctcagtttgcctttttttaaaaaaaaaatcatcttcaaagaggaccaatgtggcatacaaaatgaacttcttttaatgccaaaatttcttgggaatggttctgtactacgtttacatttattttccatttaggctggattattaggtcttttaagttgccgtcattcaagacatttttataactttgtgccaggtggctgctcctggaaaactcttggtcccactttac

SEQ ID NO: 141090 - DNA, 495 bp, Homo sapiens
tgattaaacccacattcagtactttccccaaaggtctgtaaatgtcggtataagttccataaactgaaatacattgctgtaaggttaagagaatagcattgttaacgatgccccttagtgcacttacaatttccttctaagagttattggctgagggacattcccaagccatatggacatatattccctagtcattacggaaattccaatgtgagcactggtattctcaaatcttactgtgggctgcatgaggggcatagaatgtcctmagtttgcctttttttaaaaaaaaaatcatcttcaaagaggaccaatgtggcatacaaaatgaacttcttttaatgccaaaatttcttgggaatggttctgtactacgtttacatttattttccatttaggctggattattaggtcttttaagttgccgtcattcaagacatttttataactttgtgccaggtggctgctcctggaaaactcttggtcccactttac

SEQ ID NO: 141091 - DNA, 492 bp, Homo sapiens
cccaaaggtctgtaaatgtcggtataagttccataaactgaaatacattgctgtaaggttaagagaatagcattgttaacgatgccccttagtgcacttacaatttccttctaagagttattggctgagggacattcccaagccatatggacatatattccctagtcattacggaaattccaatgtgagcactggtattctcaaatcttactgtgggctgcatgaggggcatagaatgtcctcagtttgcctttttttwaaaaaaaaatcatcttcaaagaggaccaatgtggcatacaaaatgaacttcttttaatgccaaaatttcttgggaatggttctgtactacgtttacatttattttccatttaggctggattattaggtcttttaagttgccgtcattcaagacatttttataactttgtgccaggtggctgctcctggaaaactcttggtcccactttacaccttaatatgcaaattccaatc

SEQ ID NO: 141092 - DNA, 585 bp, Homo sapiens
atacattcctgctgtagtgtcagttcttttagagattagccaaaaatataagaaggctgctatgtaattgcaaggaaaacactttttatcattagtttagtctttaggtaaatgctttaaaaataaatttcaatatctttagcccaataagataaaggtctgtatactatacccctacaaagtaaacacaactagataaaaagtaaaatacaggcgaaaccaatcttgtatttgtatkcaagatagcagttacatagcttttccagggctgaggaactgagtgttgtctctgagagttatgtttatgtccacaggccactgtggactttggtggggaataaataaggaagtccagcatgcatattctgggaaagaagaagaaaagaggaagaacatgggaaaggtaggagagaaatctccttctgtaaaaagaaagtagaagagcaatctcatttctcccaacttttctctcacaatttttagaatgctgtgtgtcaggggttcccaagaccacccctcatttccaatgatttggtaaaaggattcaaataatttagcatgtatttgtacttatggctgatatta

SEQ ID NO: 141093 - DNA, 585 bp, Homo sapiens
atacattcctgctgtagtgtcagttcttttagagattagccaaaaatataagaaggctgctatgtaattgcaaggaaaacactttttatcattagtttagtctttaggtaaatgctttaaaaataaatttcaatatctttagcccaataagataaaggtctgtatactatacccctacaaagtaaacacaactagataaaaagtaaaatacaggcgaaaccaatcttgtatttgtatgcaagatagcagttacatagcttttccagggctgaggaactgagtgttgtctctgagagttatgttyatgtccacaggccactgtggactttggtggggaataaataaggaagtccagcatgcatattctgggaaagaagaagaaaagaggaagaacatgggaaaggtaggagagaaatctccttctgtaaaaagaaagtagaagagcaatctcatttctcccaacttttctctcacaatttttagaatgctgtgtgtcaggggttcccaagaccacccctcatttccaatgatttggtaaaaggattcaaataatttagcatgtatttgtacttatggctgatatta

SEQ ID NO: 141094 - DNA, 610 bp, Homo sapiens
gctgatttttgacgatttttgaaccaaacaaatcccattttcatctgggccaatattataccttaggaaaacacaaaagagggtagctatatggtcaaatgtcgtactactagctaattataaaactgcacataaaacttggtggtcttggttaatggctaatatatatatatagattttatttaagactggtcttattgccaatcaagtaccaataaggtgttgcattgaatatttgcaaacctgcttagtgcttggctcctctgctgggtgtcagctataaaaaggtgaagaagagtttggagctgtttgtgagccacagatatgagcacagccacaatattccaaggcccagatgtcagctctattggatgttctaagtgctgtaggtgcaaccaggaaggagtgattagtttccctaggaacaaatgggaaggactggttcattctattaatactttacatgtgatgagtcttgctctmgctaagccctcttatcatgtatctcattcagcaaatactcgtggagcaccatctgtatgacaaacattgtggaatgttggtagtaggataataaaaatgaacatttatagaatacttagactatgcc

SEQ ID NO: 141095 - DNA, 490 bp, Homo sapiens
gcctggggagtcagagagccaggtccttgtccttccagggaactttaaagcatgaagatgcttaaactcatcaaaaagttaaatgtagagttcccacatgacccagaaattattttcctaggtatgtagccaagagaaacaaaaatatgcattcacacaaaacttacacataaatgttcatagtagtattattcrtaatcataaaaaattagcatgtgcctatcaatagataaatggataaacaaaattagcatctacatacaatgaaatatcatttagtcttaaaaacgaatgagggggctggcaagacggccaaataggaacagctgcgatctgcagctccaagcgagatcaatgcagttggcaggtgatttctgcatttccaactgaggtacccagctcatctcactgagactggttagacagtgggtgcagcccatggagggtaagcagaagcagggtgggccatcacctcacctgggaagtgcaa

SEQ ID NO: 141096 - DNA, 473 bp, Homo sapiens
gtttttggacctagttaggagtttggtgtcaaagcamtgcagtcgtctggattcataagcttagagaattgtcttccaacttgaagcaaacagaaagactcaagtatgagcatatggaactttatacactgcattggttagacagtcatgctgataaaattatataacaaatggcaggaatccctgttactgttaaaactgggtgtgaagaaaattgcttgtagataaaatttcataggaaatataaattattgacaggcttatcaacaatatcagctgccttaataaaatatgtcacttaaagggaaatttcattgttgctccagaatgtagatattacattatctttgccatactataggcaacacatttaggaaatgagaaaacatctaaactttcaattatttagtaaatgtttatttaacaccaccatgttccagttactgtgcgaggcactggggttacagggataa

SEQ ID NO: 141097 - DNA, 473 bp, Homo sapiens
gtttttggacctagttaggagtttggtgtcaaagcaatgcagtcgtctggattcataagcttagagaattgtcttccaacytgaagcaaacagaaagactcaagtatgagcatatggaactttatacactgcattggttagacagtcatgctgataaaattatataacaaatggcaggaatccctgttactgttaaaactgggtgtgaagaaaattgcttgtagataaaatttcataggaaatataaattattgacaggcttatcaacaatatcagctgccttaataaaatatgtcacttaaagggaaatttcattgttgctccagaatgtagatattacattatctttgccatactataggcaacacatttaggaaatgagaaaacatctaaactttcaattatttagtaaatgtttatttaacaccaccatgttccagttactgtgcgaggcactggggttacagggataa

SEQ ID NO: 141098 - DNA, 505 bp, Homo sapiens
agatttcattattaagatggttgtttttggacctagttaggagtttggtgtcaaagcaatgcagtcgtctggattcataagcttagagaattgtcttccaacttgaagcaaacagaaagactcaagtatgagcatatggaactttatacactgcattggttagacagtcatgctgataaaattatataacaaatggcaggaatccctgttactgttaaaactgggtgtgaagaaaattgcttgtagataaaatttcataggaaatataaattattgacaggcttatcaacaatatcagctgccttaataaaatatgtcacttaaagggaaatttcattgttgctccagaatgtagatattacattatctttgccatactataggcaacacatttaggaaatgagaaaayatctaaactttcaattatttagtaaatgtttatttaacaccaccatgttccagttactgtgcgaggcactggggttacagggataaattggacaga

SEQ ID NO: 141099 - DNA, 505 bp, Homo sapiens
agatttcattattaagatggttgtttttggacctagttaggagtttggtgtcaaagcaatgcagtcgtctggattcataagcttagagaattgtcttccaacttgaagcaaacagaaagactcaagtatgagcatatggaactttatacactgcattggttagacagtcatgctgataaaattatataacaaatggcaggaatccctgttactgttaaaactgggtgtgaagaaaattgcttgtagataaaatttcataggaaatataaattattgacaggcttatcaacaatatcagctgccttaataaaatatgtcacttaaagggaaatttcattgttgctccagaatgtagatattacattatctttgccatactataggcaacacatttaggaaatgagaaaacatctaaactttcaattatttagtaaatgtttatttaacaccaccatgttccagttactgtgcgaggcactgggrttacagggataaattggacaga

SEQ ID NO: 141100 - DNA, 421 bp, Homo sapiens
ctatcatgagaacagcatggaggtaaccaccctcatggttcaattacctsctaccaggtccttcccatgacacttggggattatgggaactacaattcaagataaaatttgggtggggacacagctaaaccatatcaagcacctaacatcactataatgtaagtagcacaaattctttcttcttatcaattaagaaaggccagaggtgacagtaaaatgtcagtaaggcaaatgatcaagaatttgaagggagaaggatgtttaaaaaaaatacaaaagcatggttgagatacgaatgtctgagaagagagaaagggaacaggaagatccggtaagaaagaggtgagaaaaatcagagctaggtctcgtagacttcagttctggtcacaagatgcccttttagcccacggggtgaatcaag

SEQ ID NO: 141101 - DNA, 425 bp, Homo sapiens
ctatcatgagaacagcatggaggtaaccaccctcatggttcaattacctgctaccaggtccttcccatgacacttggggattatgggaactacaattcaagataaaatttgggtggggacacagctaaaccatatcaagcacctaacrtcactataatgtaagtagcacaaattctttcttcttatcaattaagaaaggccagaggtgacagtaaaatgtcagtaaggcaaatgatcaagaatttgaagggagaaggatgtttaaaaaaaatacaaaagcatggttgagatacgaatgtctgagaagagagaaagggaacaggaagatccggtaagaaagaggtgagaaaaatcagagctaggtctcgtagacttcagttctggtcacaagatgcccttttagcccacggggtgaatcaagcaag

SEQ ID NO: 141102 - DNA, 516 bp, Homo sapiens
ggcattacttcatttaatcctcccagcaaccctatgaagaaaatcttatttctccttttacagatggcagaattggcataaagagtaagtaactcttccaaggtcacatgagtgaaagcagggttcaaagcaaggtttacctgattctaaagcatatcttcataataaaatgacactatggcagattaaaacggtaaatggcaaacccatttactcaatcagatagtccagaaagctcaatcaagtagtacagaatgcaacttcagtagacaatgggtagctacctgtctagccattacaaggacaagtgaatgttgatcttggtccgaggaagtgtgttctgggtgtagacaaaaatataatctgctgaccaataatatttcacactgccaaaataacttytcttctaatctcaaatacaagtacagttcgagaatatatgataatcattttataatgagagccctgtggtcacctagggatgcatttcagctctttcaggagatagtcatgtct

SEQ ID NO: 141103 - DNA, 457 bp, Homo sapiens
agcttcaccccagagggcacccaccagatgccagttggaactctcctgtatgaagtgtctgtcaactcctgcagggaggtgtctccaagtcaggaggcatgggggtcagggacccacttgaggagacagtctgtcccttagcagagcttgagtgctgtgctgggaggtcagctgctctcttcagagcctgcaggcaggaacgtttaagtctgctaaagctgtgaccgcagctgcgccttcccccaggtgctctgtcctagggagatgggagttttatctataagcccctgactggggctgctgcctttctttcagagatgccctgcccaaagaggagaaatctagacaggcagtctggctacagcagctttgtggcgcggtggtggactccacccagtttgaacttcccagcagctttgtktacactgtgaggggaaaacacctactcaagcctcag

SEQ ID NO: 141104 - DNA, 541 bp, Homo sapiens
actagccactatcattatcacctccaaatgatctcctagcttcctcccatgacacctagattttaaacccagcacttagaataaaatgaattaaatataaatagatcatatctctacccctctcccagctggctgcccactgcacttggaataaattcaaattcccttccacgggttccagcctctctgagctcatcttgggtcactctctctcttcctgaagtacagccccaccaacagtgctttagtctttggaacatactgtgttagttttgtgcgccatgaaggaatacctgaggctgggtaatttataaagaaattaggtttccttytttggctcatgcttctgcaggctatacaagcatggtgccagcatctgctcaacttctgttgaggcctcaggaagcttacagtcagggcaaaaggcaaaggggcagccagtgtatcacataggaagagagagagaacaagcaagagagaagtcaaaggcaccaggctcttttaaacaaccagatctcacatgaactcagagtgagaattc

SEQ ID NO: 141105 - DNA, 624 bp, Homo sapiens
tttatattaaccccatcaaccatctttaccccaataccctgctttcatttcattgtatcattgaccactgtctgaatttactgtatttatctactcattatttctctagccttggtaaaatgtaaacttttggggaacatttgtttttctgattcattgtttttctgattcattcctgcatccttatcacctaggccagtgcacaaaatgacaaatgtttggtaaatggaggaatgacagaagaagttactcgggcagtgaagacttcttggacattttaaatgacagacttgattttttggttaagcaggagtggagcagattttgaatggaaaacagaaaaataaagtatcattggcaggaaaaatttacatgcccmaaattggaaatccatgagagacttctcaagtgataagtttctttggaaaacataaattttcagagggtgaggacaaagttctctagcttacagccacaaggatggtctctgctggaagctccacacatggagccagtttactcacacaccagtggaggccagtcttcccaagtaagatcacccaagatcacacgctggttggagaaaagattcagcaatctcaaactactttttaaacacattta

SEQ ID NO: 141106 - DNA, 609 bp, Homo sapiens
tggaaagtgagtaggtgtaaaatatttggcacaatctttggcacttgaccaaatgcaaaaggacacaattatcagattacatgaaatatcgaggggataatccaagcaaagttatgacaccagtcttggagcaaaagtcagaagcctaagttgagtggtgggaaagctggcgagaagaatgagcttccatgagtacagtattctggcccttctctgtctctcccttcctaactccatgttttccacttccacggctacctcatccctctcttcttgtagtaaaaacatgcccattatttctcacctttaacctatcctcacatgcctgacttctctatgtggtttttcttccatttacagctaactttttattcagttttcattctcttctctatattttttaaagtattccattcatcaaggcagtaaaaatatgaatagccccagtggttctccaccatggaattgctacagatgtggcatactttcccatataaggcatatcagtatttcaytgggtaggagtcacagtcctctaccctggctaaacagccttacaaaatcaaaagtagtaatctcttttatttgctctctagtttatatgtgaca

SEQ ID NO: 141107 - DNA, 563 bp, Homo sapiens
aggatcactgaagttaagtgactttctcatgatcattccactagttagtggaaggaaaggaaattatcaagtggtggatacttttatagaagattttctgaacacacttacacacatgtatatatatgacctatttttcgttattcaaaacatggttttattttctgcatttaatttttgagcaaataggtcttcagaaacattctgttgctgggtttgaaaaacacatctgattctaagatgaaaccctttttaccatcccacatacttgacaagagacagtctagattcaaatgcatgtcttttgattcccaattctgacagtattttaaatgtggacactgccttgatacatttyacttctcaaataaacctacagaggtgatatatccctaaagaagcaatctggtcaatggaatatggatacatggtgtatttttacatttttgctactggcggaagtaaggactgagtttggtctcatgccttcaaaagctctagtcaaacaacagacaactccttccacattagcaggttatatttaaaagtaaacgtttgagatc

SEQ ID NO: 141108 - DNA, 548 bp, Homo sapiens
agaaattcctgagataactcaaattgagagaaatacataccaagagcaggccaaacacattcaacaattatcaaaggaagaaattaaagaacttacccttcctctgcctacactatgtaccatgaaacagtagtattttctctctacttagwcattaaggtaatactatctttaaaaaaaaatagtggacagtatatttggagagggtacctaaaacgggtgttgattctagacagcatagcccagcctgaagatagaagggcggtagccaattcagcatactctgagcactaatccctgaaatggggtccagatataagaaccccactgagcaggccttaagaatgtggcccaggtaatttactagcggaaatagaagtccctatgtgcagaacagaatcttgtcctgcactctgcttctcttcttctgtaacaacttaagcaaaggcatggtattgaaaataaaatctacatccactaacagtgatccagatgaatcaaagacaagataaaattataactcaacctaacaagaaatgaaggaaatc

SEQ ID NO: 141109 - DNA, 548 bp, Homo sapiens
agaaattcctgagataactcaaattgagagaaatacataccaagagcaggccaaacacattcaacaattatcaaaggaagaaattaaagaacttacccttcctctgcctacactatgtaccatgaaacagtagtattttctctctacttagacattaaggtaayactatctttaaaaaaaaatagtggacagtatatttggagagggtacctaaaacgggtgttgattctagacagcatagcccagcctgaagatagaagggcggtagccaattcagcatactctgagcactaatccctgaaatggggtccagatataagaaccccactgagcaggccttaagaatgtggcccaggtaatttactagcggaaatagaagtccctatgtgcagaacagaatcttgtcctgcactctgcttctcttcttctgtaacaacttaagcaaaggcatggtattgaaaataaaatctacatccactaacagtgatccagatgaatcaaagacaagataaaattataactcaacctaacaagaaatgaaggaaatc

SEQ ID NO: 141110 - DNA, 548 bp, Homo sapiens
agaaattcctgagataactcaaattgagagaaatacataccaagagcaggccaaacacattcaacaattatcaaaggaagaaattaaagaacttacccttcctctgcctacactatgtaccatgaaacagtagtattttctctctacttagacattaaggtaatactatctttaaaaaaaaatagtgracagtatatttggagagggtacctaaaacgggtgttgattctagacagcatagcccagcctgaagatagaagggcggtagccaattcagcatactctgagcactaatccctgaaatggggtccagatataagaaccccactgagcaggccttaagaatgtggcccaggtaatttactagcggaaatagaagtccctatgtgcagaacagaatcttgtcctgcactctgcttctcttcttctgtaacaacttaagcaaaggcatggtattgaaaataaaatctacatccactaacagtgatccagatgaatcaaagacaagataaaattataactcaacctaacaagaaatgaaggaaatc

SEQ ID NO: 141111 - DNA, 491 bp, Homo sapiens
aaagtcaatctgtacaagttaaaaaatattgcattcccaaattgaggtgatttgaacatggaaaaagcagaacaggaggcctgctccctctgagaatctcaccctgcttccttatcagatttcagccttctgcaaagrcattttcaagtgggctgtaattgcctgccagtatacacttcgtgccctcataaatcttcgctagcacagaaaagtaaactgtgttgtgtttgagaattctttggaaatgtattgcggctggatagtgagaggggataccagtaaggggaaggggctgtgttctcaaggtgaaagtcatcagtctgagcataagcgtcccggggggattgcaaggaaggtggaacctagttcaggagcctttgggcagctgcccttcctgtgtgcagcagcagtggtgcacggtggaattatggcaaccacacctgcagggtcccacagaggcgatttaacttgcatctattctagaagtccgc

SEQ ID NO: 141112 - DNA, 491 bp, Homo sapiens
aaagtcaatctgtacaagttaaaaaatattgcattcccaaattgaggtgatttgaacatggaaaaagcagaacaggaggcctgctccctctgagaatctcaccctgcttccttatcagatttcagccttctgcaaaggcattttcaagtgggctgtaattgcctgccagtatacacttcgtgccctcataaatcttcgctagcacagaaaagtaaactgtgttgtgtttgagaattctttggaaatgtattgyggctggatagtgagaggggataccagtaaggggaaggggctgtgttctcaaggtgaaagtcatcagtctgagcataagcgtcccggggggattgcaaggaaggtggaacctagttcaggagcctttgggcagctgcccttcctgtgtgcagcagcagtggtgcacggtggaattatggcaaccacacctgcagggtcccacagaggcgatttaacttgcatctattctagaagtccgc

SEQ ID NO: 141113 - DNA, 591 bp, Homo sapiens
taaacatcaaagttttatgatgtaatttaaaaaaaattaatctgaactactactcaaattcatgtaattagttacttccagcttctttacttgtacagtgttaattaatccagcctgccagcatgattcctggaaggaactcatataataacgatagcagggccagatgctagtgcctgacacatccacagattcatgtggactagaaaaatgtgaaggctgggtgtgatgggtcacacctgtaatcccagcaatttgggaggctgaagcgggcagatytcttgagctcaggagttcaagaccagcctgggtaacatggtgaaaccctgtctctgcatgaaatagaaacattagccaagcatggttgtgaatgcccgtagtcccagccactcaggaggctgaggtgggagtactgtttgagcccaggaagtggaggttgcagtgagctgagatcgtaccactgaactccaacctggatgacagagtgagactctgtcaaaaaaaaaaaaaaaaaaaaaagaagaagcaataaaaaatatgtaatctcctcatcccaaaccaaaattcttaggttcccacggtttgagtagg

SEQ ID NO: 141114 - DNA, 589 bp, Homo sapiens
cttgctaaacatcaaagttttatgatgtaatttaaaaaaaattaatctgaactactactcaaattcatgtaattagttacttccagcttctttacttgtacagtgttaattaatccagcctgccagcatgattcctggaaggaactcatataataacgatagcagggccagatgctagtgcctgacacatccacagattcatgtggactagaaaaatgtgaaggctgggtgtgatgggtcacacctgtaatcccagcaatttgggaggctgaagcgggcagatctcttgagctcaggagttcaagaccagcctgggtaacatggtgaaaccctgtctctgcatgaaatagaaacattagccaagcatggttgtgaatgcccgtagtcccagscactcaggaggctgaggtgggagtactgtttgagcccaggaagtggaggttgcagtgagctgagatcgtaccactgaactccaacctggatgacagagtgagactctgtcaaaaaaaaaaaaaaaaaaaaaagaagaagcaataaaaaatatgtaatctcctcatcccaaaccaaaattcttaggttcccacggttt

SEQ ID NO: 141115 - DNA, 526 bp, Homo sapiens
ttcatgtaattagttacttccagcttctttacttgtacagtgttaattaatccagcctgccagcatgattcctggaaggaactcatataataacgatagcagggccagatgctagtgcctgacacatccacagattcatgtggactagaaaaatgtgaaggctgggtgtgatgggtcacacctgtaatcccagcaatttgggaggctgaagcgggcagatctcttgagctcaggagttcaagaccagcctgggtaacatggtgaaaccctgtctctgcatgaaatagaaacattagccaagcatggttgtgaatgcccgtagtcccagccactcaggaggctgaggtgggagtactgtttgagcccaggaagtggaggttgcagtgagctgagatcgtaccactgaactccaacctggatgacagagtgagactctgtcaaaaaaaaaaaaaaaaaaaraagaagaagcaataaaaaatatgtaatctcctcatcccaaaccaaaattcttaggttcccacggttt

SEQ ID NO: 141116 - DNA, 345 bp, Homo sapiens
tagtcagatttgttgtaagatacgtaagtccttgggaaccccaaggaacaaagtgtttggtayagggccccagtgactggctgagaattgctgtcctttgactgtttgctcaggtgaagatgactaagaatttttaggactcacatttacactttagtttacaatactttgttttgtatatctgatgaaatacattccatagcttgatgatgtctctgaaaaagaaaccttttatctgaggaatgacagctcttttaaatgatcaggcccacaaaagtatttaaaatgtaatagcccctatgtctcactcccccttgagctaaagaattacctcttaagccactt

SEQ ID NO: 141117 - DNA, 345 bp, Homo sapiens
tagtcagatttgttgtaagatacgtaagtccttgggaaccccaaggaacaaagtgtttggtacagggccccagtgactggctgagaattgctgtcctttgactgtttgctcaggtgaagatgactaagaatttttaggactcacatttacactttagtttacaatactttgttttgtatatctgatgaaatacattccatagcttgatgatgtctctgaaaaagaaaccttttatctgaggaatgacagctcttttaaatgatcaggcccacaaaagtatttaaaatgtaatakcccctatgtctcactcccccttgagctaaagaattacctcttaagccactt

SEQ ID NO: 141118 - DNA, 302 bp, Homo sapiens
gtcatactttctgctagagaaaacactgaatgaaattcacagtaggtcctgtgtattcattcaattaccatcaagacaacygtgcattctatctatacagtctttggatgtgaatactagagaagaaggactaggttagactcgataaagacagtgtgtttgtctagttgtattctagataaacattgctgcgttggtttgcagtttgctcttcatcttgatttaggagtggtcctagaacatgagaagccttttttatttatgtctttgatgtcctaaaactgaaaagattaatgttgtat

SEQ ID NO: 141119 - DNA, 302 bp, Homo sapiens
gtcatactttctgctagagaaaacactgaatgaaattcacagtaggtcctgtgtattcattcaattaccatcaagacaactgtgcattctatctatacagtctttggatgtgaatactagagaagaaggactaggttagactcgataaagacagtgtgtttgtctagttgtattctagataaacattgctgygttggtttgcagtttgctcttcatcttgatttaggagtggtcctagaacatgagaagccttttttatttatgtctttgatgtcctaaaactgaaaagattaatgttgtat

SEQ ID NO: 141120 - DNA, 571 bp, Homo sapiens
ttgacattattggtttattataaaggctacaactcagtaacagacaaatagaagagatacatagggyaagttgttgggggtggagggtagtgcagagcttttgtgtcctgtctgggtgcaccgccctcccaagatttcaatgtgcttgccaactgggacactgaatctcattgtccaagagtttttataactcagtctccagccctcctcccatctcagtcggttggtgggtggaactgaaatttccaactctctaatcgtttggtctttctggtgacaaggcccatcctgaggctatctaggagccccactcaaagccatctcattagcataaattcagatgtgatcaaagggggctcttttttttcagtttaatttttaataggcagataaaagtgtttgcatttattgtgtacaaaatgatgttttgaaatatatgtatattgcagaatggctaagtctagctaatctacttatgcattatttcacaaaattatcacttttgtggtgagaacatttaaaatctattctcttagcatttttgagaattcaatatattgttattaactgt

SEQ ID NO: 141121 - DNA, 571 bp, Homo sapiens
ttgacattattggtttattataaaggctacaactcagtaacagacaaatagaagagatacatagggcragttgttgggggtggagggtagtgcagagcttttgtgtcctgtctgggtgcaccgccctcccaagatttcaatgtgcttgccaactgggacactgaatctcattgtccaagagtttttataactcagtctccagccctcctcccatctcagtcggttggtgggtggaactgaaatttccaactctctaatcgtttggtctttctggtgacaaggcccatcctgaggctatctaggagccccactcaaagccatctcattagcataaattcagatgtgatcaaagggggctcttttttttcagtttaatttttaataggcagataaaagtgtttgcatttattgtgtacaaaatgatgttttgaaatatatgtatattgcagaatggctaagtctagctaatctacttatgcattatttcacaaaattatcacttttgtggtgagaacatttaaaatctattctcttagcatttttgagaattcaatatattgttattaactgt

SEQ ID NO: 141122 - DNA, 597 bp, Homo sapiens
atctcagagctcaggaaaacactttattgacattattggtttattataaaggctacaactcagtaacagacaaatagaagagatacatagggcaagttgttgggggtggagggtagtgcagagcttttgtgtcctgtctgggtgcaccgccctcccaagatttcaatgtgctygccaactgggacactgaatctcattgtccaagagtttttataactcagtctccagccctcctcccatctcagtcggttggtgggtggaactgaaatttccaactctctaatcgtttggtctttctggtgacaaggcccatcctgaggctatctaggagccccactcaaagccatctcattagcataaattcagatgtgatcaaagggggctcttttttttcagtttaatttttaataggcagataaaagtgtttgcatttattgtgtacaaaatgatgttttgaaatatatgtatattgcagaatggctaagtctagctaatctacttatgcattatttcacaaaattatcacttttgtggtgagaacatttaaaatctattctcttagcatttttgagaattcaatatattgttattaactgt

SEQ ID NO: 141123 - DNA, 571 bp, Homo sapiens
ttgacattattggtttattataaaggctacaactcagtaacagacaaatagaagagatacatagggcaagttgttgggggtggagggtagtgcagagcttttgtgtcctgtctgggtgcaccgccctcccaagatttcaatgtgcttgccaactgggacactgaatctcattgtccaagagtttttataactcagtctccagccctcctcccatctcagtcggttggtgggtggaactgaaatttccaactctctaatcgtttggtctttctggtgacaaggcccatcctgaggctatctaggagccccactcaaagccatctcattagcataaattcagatgtgatcaaaggggrctcttttttttcagtttaatttttaataggcagataaaagtgtttgcatttattgtgtacaaaatgatgttttgaaatatatgtatattgcagaatggctaagtctagctaatctacttatgcattatttcacaaaattatcacttttgtggtgagaacatttaaaatctattctcttagcatttttgagaattcaatatattgttattaactgt

SEQ ID NO: 141124 - DNA, 633 bp, Homo sapiens
accttaagtgtgttgagttacatccttctatttctaatttgttgagtgtttgtatcatgaaaggatgtttaattctgtcaaaggttttttggtttttttttgcctctattgacatgatcatatggtctttgtccttcattctgataatgtrttgtattacatttctaggttacatatgttgaaccatttttgcatccctgggatgaatcccactggatcctgatgaaagatgtttccaatgtgctgttaaattcagttttctaacatgttttttgagaatgtttccatctattttcatcagcaatatcagcctatagttttatttgttgtattgttcttgtctggctttgatttcatgtaaagctaccctcgtaaagctagtttggaagtattctctccacttcaatttatggaaagagtttgagaagaattggtgttagttctttaactgtttggtagaatttaccagtaaaggcatcaggttctgggcttttctttggttggggatttttgtattactgatttaatatttttactcgttattgatttgttcagatattctatttcttcataattcaatcttggttggttatatatgtccaggaatttatccatttcctctaggttttagag

SEQ ID NO: 141125 - DNA, 590 bp, Homo sapiens
ggtgtgtgtgtgtttaagatatggctatagaaccagagtgtgcccacttgaaattctaatactgagagagagaacagatttccggatttgaataatttcatttagtcaataaagggataaatcattctgcaacagctatttttccttgacgcgactttggattagaaattcagtccatctcagagaagcacttatgcaaatgctggtgatagtggtgtggctgatcacattagagtctcgggttactagattacctgtgtggctgtgatgaaaagatcagtgtgtttgcatgctgagatgaaatgatgcaactcatcgtatcatgtcatcagcaaatgttattttaataagactacaaatcattgtgacatcaacaacctcaaacaaatcttctggatatktaaatacactgattcttccctaaaggccaatgaaagatgtaaaaacaacaacaaaaaaagaatgtctcaatgtctcattcatagagagcaacatccagatagtagaatgttgcatgtattttaagctataaactaacgtatacttccagagaacaagtgatactgaggcttttgtgagactgtggatga

SEQ ID NO: 141126 - DNA, 432 bp, Homo sapiens
atatttctctgtttctttagacgaagacttaaatttttaaaactattgtcacaaacataaggctggaaaaaaggttaaaggaaaactaggatgtggttgagaaagggtacagaaactctwctcctcacaaattattacaatcactgttcaataaattcagagaagagtggagagaaaaaaaaacaaaaaaaaaaaacaaagaaatggtccccagatcttttggtatatacccaagcccccttctatgaaaaatggaggagactctgagatgatcacagccagtgggaatctacaagaagccaggagagaaaacagaaatcatctccgtttgaagtctcacacagcaggatggctgtgtggtgcagttgaatcttaaaactcacaccccatttcatgaactaatgagacctgttctgaataatgagtcaggtt

SEQ ID NO: 141127 - DNA, 389 bp, Homo sapiens
caaggaataagtttttcacctgcatgctgtaacttaaacacttcctttggacaacaaagacactggagagagcagaaaacaacatwatgaagccagtactacagtcatctgggagattccggcatcctgagatacactaatcagatttgctgaaatttcttggaaggctgggctagttctacaaagagggaagggactgtgtgcacgggagcctggttttcactgaaaacgaatgtttgccttagttgtaatggggccagtagatggtagtcactgaatgatccgaggcaacagagactctcccgacatttgcgcatagaagaaaacaaaccaggctcagtaccagatcctgccatctaatagctgtgtacattgaacttgcttaaact

SEQ ID NO: 141128 - DNA, 564 bp, Homo sapiens
agcctcgacctcctgggcttaagcaatcctcccacttcagcttcccaagtagctgggactacaggcatrcaccaccatgcccagttggtttttgtatttttttgtggaggtgatagtctccttatgttgctcaggatggtcttgaactcctgggctcaagccattcacttgcctcagcctccgaaagtgcagggattacaggtgtgagccactgcacccagccttctttgtgactttcttatgtatttaccatctctacccccacttccaccctggattctctgttccccaacaccagctgcagaaaaggatatatttttcaccctcatctccctcttccttggtgtaccccaagataaacagccctttttgttatagattttactgtgaaataagagaaaaacaacaagaacacatatggggaagctaaggggccctattaaacctcagcgaatccttccagctatggtcgctggtctaggattctgactcccttcagaacactaaatgcaaacaagctggtcttctgtcctgtgtgtttcttcagggttctccaaaggctct

SEQ ID NO: 141129 - DNA, 564 bp, Homo sapiens
agcctcgacctcctgggcttaagcaatcctcccacttcagcttcccaagtagctgggactacaggcatacaccaccatgcccagttggtttttgtatttttttgtggaggtgatagtctccttatgttgctcaggatggtcttgaactcctgggctcaagccattcacttgcctcagcctccgaaagtgcagggattacaggtgtgagccactgcacccagccttctttgtgrctttcttatgtatttaccatctctacccccacttccaccctggattctctgttccccaacaccagctgcagaaaaggatatatttttcaccctcatctccctcttccttggtgtaccccaagataaacagccctttttgttatagattttactgtgaaataagagaaaaacaacaagaacacatatggggaagctaaggggccctattaaacctcagcgaatccttccagctatggtcgctggtctaggattctgactcccttcagaacactaaatgcaaacaagctggtcttctgtcctgtgtgtttcttcagggttctccaaaggctct

SEQ ID NO: 141130 - DNA, 594 bp, Homo sapiens
taattttaccatttggactctcttctctccaatgagttaaagaaattatgagtaactcagcaatatcagcccgcaaactttctttggaatagaaactgccgcctgtcaaagaagccagaggcagttataaattagttcatccctgggttcactgctctacttaggagtatttcctatataaactcttacatatktcttccctaaaagctaaaagtaagggtaattctgacttttttttggtgggatgggggttctgtgttctcttcctccaacctaaaatagagataattaagttaaagaattcaaagaaaattccctgaagaagaaaaacacatttggatccaattcgactgttgagtcctgatttcttttaaatgaaatgaaatgcaagctctgggtacagtaatttaaccactattttgatcatttctcttctacttaattagcaaaactgaaccattaagtaatctcgttaaaaatgaagagacaggtaaatggctttctggattttacaattatcagcgcttgaccttaaaaagtcagcacaatctcaaacggaatttgatcaaaagacctccaaagacatatatgctt

SEQ ID NO: 141131 - DNA, 594 bp, Homo sapiens
taattttaccatttggactctcttctctccaatgagttaaagaaattatgagtaactcagcaatatcagcccgcaaactttctttggaatagaaactgccgcctgtcaaagaagccagaggcagttataaattagttcatccctgggttcactgctctacttaggagtatttcctatataaactcttacatatgtcttccctaaaagctaaaagtaagggtaattctgacttttttttggtgggatgggggttctgtgttctcttcctccaacctaaaatagagataattaagttaaagaattcaaagaaaattccctgaagaagaaaaacacatttggatccaattcgactgttgagtcctgatttcttttaaatgaaatgaaatgcaagctctgggtacagtaatttaaccactattttgatcatttctcttctacttaattagcaaaactgaaccattaagtaatctcrttaaaaatgaagagacaggtaaatggctttctggattttacaattatcagcgcttgaccttaaaaagtcagcacaatctcaaacggaatttgatcaaaagacctccaaagacatatatgctt

SEQ ID NO: 141132 - DNA, 492 bp, Homo sapiens
ggttctcaaactttaatgtagatcagaatcacctggaggacttctttaactcagatgactgggcccacatccagagtgtctgagttgctatttgcatttcttttttttctttttctttccytttctttgagacaaggtctcattctgtagcctaggctggagtgcagtagtgctagcatgaggcttactgcagcctggacctcctgggctcaaacaattctcccactgtagcttcccacgtagctgagagtacaggtgcacaccaccacacttggctaatttttatgtgttcggtagagatgagttttcgccatgttgccggggccagtcacaaactcctgagctcaaaagatccactcgccttggcctcccaaagtgctgggattacagcagtgaaccacctcacccagcccacagtttgcatttctaacaagttcccaggtgatgctaatgctgctggtctgggggtagggaaagggaatgggaagcacg

SEQ ID NO: 141133 - DNA, 330 bp, Homo sapiens
cacagtgccttcccgccgttctagcctggctcctgcccrcccagaggcctgtcccctagcctatgtgtctgaccccgtgccaagaccacatcaactgatgggcaggcccgggcccaggtatttgcggtttccccggtcaacaatgtgggtctttactgagcaggcaagagctggctggctcttgccctcggggagctcacggctccttgtgtataacaaatctgtggcctggacagtgtgaccagatgacccaagaatgtctctccccctgaagttattggcaggggaggcctagtgcagtggctacagccagactttggagacagactg

SEQ ID NO: 141134 - DNA, 544 bp, Homo sapiens
cacccttttcctttgtttcttgctctgttcacaaaagcaaagcatctgaaatgcaggccagagataaagtgcagcctgatgcaattagctgagcgcagcccacaggtcctaatgggatacggctcccgttcctccagcaggcccttacataggcgctgtgtgtcgtctgcactatgcgtcraagccccaagtgttgcccagcctccgcatccacaccccctttctgtccctggcacagaacccaggagagccactctggtcagaggggctcagcagcaggccctgtctcccaccagctgggttcctgggtcaagtttcatcagaagtcaccgtgaggaccatggtcctcacctgagaggcctgcagatgccccggaggctcctgtgtgcttctgtgactgttcctggcaggcatccgtatccacccctcatcccacacctggttggggtctggctgtgctcctgggagctgtgctgactcttcccggggccacctctactgacacccacacctgtgcatatcccaggtatcctatcccaacctt

SEQ ID NO: 141135 - DNA, 544 bp, Homo sapiens
cacccttttcctttgtttcttgctctgttcacaaaagcaaagcatctgaaatgcaggccagagataaagtgcagcctgatgcaattagctgagcgcagcccacaggtcctaatgggatacggctcccgttcctccagcaggcccttacataggcgctgtgtgtcgtctgcactatgcgtcgaagccccaagtgttgcccagcctccgcatccacmccccctttctgtccctggcacagaacccaggagagccactctggtcagaggggctcagcagcaggccctgtctcccaccagctgggttcctgggtcaagtttcatcagaagtcaccgtgaggaccatggtcctcacctgagaggcctgcagatgccccggaggctcctgtgtgcttctgtgactgttcctggcaggcatccgtatccacccctcatcccacacctggttggggtctggctgtgctcctgggagctgtgctgactcttcccggggccacctctactgacacccacacctgtgcatatcccaggtatcctatcccaacctt

SEQ ID NO: 141136 - DNA, 544 bp, Homo sapiens
cacccttttcctttgtttcttgctctgttcacaaaagcaaagcatctgaaatgcaggccagagataaagtgcagcctgatgcaattagctgagcgcagcccacaggtcctaatgggatacggctcccgttcctccagcaggcccttacataggcgctgtgtgtcgtctgcactatgcgtcgaagccccaagtgttgcccagcctccgcatccacaccccctttctgtccctggcacagaacccaggagagccactctggtcagaggggctcagcagcaggccctgtctcccaccagctgggttcctgggtcaagtttcatcagaagtcaccgtgaggaccatggtcctcacctgagaggcctgcagatgcccyggaggctcctgtgtgcttctgtgactgttcctggcaggcatccgtatccacccctcatcccacacctggttggggtctggctgtgctcctgggagctgtgctgactcttcccggggccacctctactgacacccacacctgtgcatatcccaggtatcctatcccaacctt

SEQ ID NO: 141137 - DNA, 451 bp, Homo sapiens
aagcccgtgtcaacctgagcagggaaaggtatctcttcggacttcatattttgcaggggcctagggtgaggggtcatgaggatccatctacaggcttgtcctcccttctgggaggccgtactgggagagagggatggttcagccccttcctttggttctccagctcctcccttcctattctggcactggacytccacctcatggcacaccattcatcctcgctgctgcattcatccctgtcttcacaagtaacagtgatgagatcttgtgaaaatactttgaggcacagggaatagctgtgtgactgggacaagcctcctcacttctctaagcctctttcctcatctttaaagtgggggtgacagtaccaccctcacagggcctcagggaggattgagtgagattgcggacatgtccgtacatagcactgtgcctgcttaccccaaaagca

SEQ ID NO: 141138 - DNA, 455 bp, Homo sapiens
cccgtgtcaacctgagcagggaaaggtatctcttcggacttcatattttgcaggggcctagggtgaggggtcatgaggatccatctacaggcttgtcctcccttctgggaggccgtactgggagagagggatggttcagccccttcctttggttctccagctcctcccttcctattctggcactggacttccacctcatggcacaccattcatcctcgctgctgcattcatccctgtcttcacaagtaacagtgatgagatcttrtgaaaatactttgaggcacagggaatagctgtgtgactgggacaagcctcctcacttctctaagcctctttcctcatctttaaagtgggggtgacagtaccaccctcacagggcctcagggaggattgagtgagattgcggacatgtccgtacatagcactgtgcctgcttaccccaaaagcagctctgg

SEQ ID NO: 141139 - DNA, 636 bp, Homo sapiens
gctggaatcttcccatctcctttgaacagaattgcctcacgggaggcactggccccgtcttatttgtcaggtgggcttcgcaataacacacctcctgcccctggcctgagctccttgctttcaggattggggaaagattccacccctgggcgcccctggccttttgctgacaatctccacctgctattcagcatggggctgaggagtagacatggaaggcagagaggggggcccagctactgccagcctggactggatgatgctctggcagccgtctctgggcatcccccgtctcccgctcagtctcgtctcagcactcagatgctgggaaccagaccagcctctactatggggccttggagggctcttggcagaactggctacaattccccattgcgggattacagaatgagaccgtgacccagctcctgtgtctggggaaggagaggcctgatgggtgggagctgtgcccagrtccgagccagagaaaagcagaaaggttttctattttctctattctacttgttttcacctcattgagttccaggaagaattgcaggagacttaaaaggacacattaagacatcatgaatcaaaaggaggagacagaatcacaagtgtaggagcagggagtgt

SEQ ID NO: 141140 - DNA, 380 bp, Homo sapiens
aattccccgaaaatcaagaagtctgagatwtgagcagcagtaaatctgttttctctgaagtgccagtgtagactccattctgctgtctctaccttggcctccataccgagtgggctggaggctgcggcaccagtgaggtgccctgacatccagctggctgtgacaaatcagaacaaacacccgatcaggcaggagactactacctgggggcctcgccctgccctccctgccaagcagggagctccaggcctttggggccaaaggaagcccctctgctgaggctcaggaaggttttcggggttggggagcagactggaagaacttagtcctgccctgaccaacacccagctttctcagcgccttcgttaggacatttagga

SEQ ID NO: 141141 - DNA, 380 bp, Homo sapiens
aattccccgaaaatcaagaagtctgagatatgagcagcagtaaatctgttttctctgaagtgccagtgtagactccattctgctgtctctaccttggcctccataccgagtgggctggaggctgcggcaccagtgaggtgccctgacatccagctggctgtgacaaatcagaacaaacacccgatcaggcaggagactactacctgggggcctcgccctgccctccctgccaagcagggagctccaggcctttggggccaaaggaagcccctctgctgaggctcaggaaggttttcggggttggggagcagactggaagaacttagtcctgccctgaccaacacccagctttctcagygccttcgttaggacatttagga

SEQ ID NO: 141142 - DNA, 607 bp, Homo sapiens
ttctcacgacaaaaatgaaaagtatgtgaggtaatgcatatgttaattactagatctattaattccacaatgtatatacacttgaaaacaatatgtcgtacatggtaaatacacataattttatatgtcaagttaaaaattaaataaaataataaagataatgaacatttaaaaaaatcacttgaaagacttgttaaaacacagactgctggacccctacctgtagaggttctaattcagtggagatgctgggaaggagacaaaaatataaatttttaacaagttcccatgtgatgctgttgctgttggtctggggaccacactttgaaagccactgctttagtaaaacttttaaaatatagtattaagactatttattgatcaaacttacttcaccatgagaatattataatgaacacaaagaacagtctggatgtactgataggtggcttttatctggcataagaagaatgtgtgcaattattctatttttagatggcaatastgctatagagcattatacaaggttatagtttctatatagttaaagagaaggtgtacagtggatggggcacagcaatgatgtgcaagatcaaaaaacagaacc

SEQ ID NO: 141143 - DNA, 495 bp, Homo sapiens
tatatttgtcaggataatctagagttagatcctattttagagtttaattagaggctgaaacgtgagcttcctgatgacatacgcacagccttgaagggcagagtagaggaaaatcacctttcgcaggttcctatcatcttccacaaattcctaagaattggatgctcttctataatattggtatcctttttcctctcatagttataataccaaaatcactgcatagacggaagttataccttgtcaggagaaaccctttgtatattgtcttaaaagtctataaaattaatgtgaggtttacttgattcactatgttagttatgataattgttttatgccactagaaatcgtttttactctctgaaaaataatgtttcaaaacgaaaatggaccttgaaagattttatctttcaaattcttcattttgtaaatgagaactcastgttcaacaaagttaaataattagctcaaggtcttagcaattttattagacta

SEQ ID NO: 141144 - DNA, 592 bp, Homo sapiens
gaagtctaaaactattattatattggagtctatctctgcctttaggtctaataatatttaatttatatataccaatgttgggtgatatatatttagaatttttaaatcttcttgctgaattgatccctttattgtgttttaatgacctttttctatctatttttactgttttttgacttaaattctgttttatatgatattgatataagtayagctacttctgcttgtttttttgttttccatttgtatggaatgtctttttccatccctttacttttagtctatatatgtctttacaggtaaaatgagtttcttataggtagcatatagttgagtcatgttttaaaaaaatctattatatttagctagtctatacattttaagtggaaaatttaatttgttcacattcaaggttattattggtaagtgtggacttatccttgtcattttgttaattatcttctggttgttttctatctttttcctttcttttttcctttctttctttctcttttgttgtttatcattgtggtttggtgtttctctgtagtgataacatttgggttctttctcttccttatttgtgggtttg

SEQ ID NO: 141145 - DNA, 390 bp, Homo sapiens
gaattctaactatcttaggaaataaatcaactaacagtgtaagagacagtctactatggtggaaagagataaacttcagagtcaaacaaacttaaccctatcacttactagctttgtaayggtggatatattcattagcttctcacttgtagaatgagaataataatatattatgtctgagactgctagttttatcccaatatccattctccccttcttcatcagtaaataaccaccaaaagttagctagacacagatgcccagaaaaaagtccatgttttcagccctttcttgcagctagatgtgtttatgtggttaaatactggacactgaggtcaaaataaaagcggtgtctgtaacttccaggaagtatccttttaaaaagcaggg

SEQ ID NO: 141146 - DNA, 569 bp, Homo sapiens
cctaaacatctacatacttaataacagagcttcagaatacatgtgaatctcatccagcatatttttcattttagtcactgcatttttcatctctaaaaattcaatttgggtctttttaatatcttctcttactcttcttaaaatgctcatgctttcctttaccttcctgaacatgtgaagtgtggtggccaatctccaaagtggtcctccrtgatctccacatcctgacattcagatccatagttaattccctcctgtattctaccagggttggtctgtgtgactggtagcatgtggcacgccatttctaagattagcttataaaaaacaatgcacttccatcttggtcactctctctctttccccgttagatcatttcctctggggaaggtagctgccatgtcttgagcagtcatttggagaggcccatgtagtgaggtactgaggcttctttgccaacagccacgtgagagagtttggaatcctccagccccattccaatcttcagatgcctgctacccccgctgacagcttgatggtaccgccaggagactatgagtcagaaccac

SEQ ID NO: 141147 - DNA, 562 bp, Homo sapiens
aacaatcctaaacatctacatacttaataacagagcttcagaatacatgtgaatctcatccagcatatttttcattttagtcactgcatttttcatctctaaaaattcaatttgggtctttttaatatcttctcttactcttcttaaaatgctcatgctttcctttaccttcctgaacatgtgaagtgtggtggccaatctccaaagtggtcctccgtgatctccacatcctgacattcagatccatagttaattccctcctgtattctaccagggttggtctgtgtgactggtagcatgtggcacgccatttctaagattagcttataaaaaacaatgcacttccatcttggtcactctctctctttccccgttagatcatttccyctggggaaggtagctgccatgtcttgagcagtcatttggagaggcccatgtagtgaggtactgaggcttctttgccaacagccacgtgagagagtttggaatcctccagccccattccaatcttcagatgcctgctacccccgctgacagcttgatggtaccgccaggagactat

SEQ ID NO: 141148 - DNA, 593 bp, Homo sapiens
atatcattcatccattcatccagacagtgctttccaatagaaatataatatgagccacaggtgtgattttaaattttctaatacacacgtttaaaaagtaaaaagaagtgggtaaaattaattttaatattgcctatttaacccaatatccacaatatcatttcaacatataatcaatataaaaattattgctgagatattttacattmtttcatgctaaaactttgaaatcctgtatttattctacttttacaacacacctcaatttgaactagccttatctgaagtgttgaacatccacatgtggctagtggctactgcattgggacagcagaggtctagaattcaagttccctggaaataggaatatgggttgtcttgttcatatatgtaactgtagtattaagaacggtgtctaacacataattagccctcaaagaatatttgttgaatgaataaatgaacaaatctattggttttatacacatacttgcaaaaaattcctgtaatataaatgaaattctaattacatgattagaaaagcatataattattttaaactcaattctagcccaggcaagaatttagcaata

SEQ ID NO: 141149 - DNA, 323 bp, Homo sapiens
caactgtgaagctattttaaggaagggttatctggtaaatgaattctcaataagatgttagttatataatgtaytgtgaaattcaggaatgtttgtattttaatatagaatctgaaaatgacagttcttatatgaacttcagatgccataacaccaaagtgggaaatatattggtgagcagagggagtgtgctgccaagcaagtcacactgtaggggcagctgctgcccattttactcacacataaggccagtcttgccagaaatctgttaaatttaaaacacaggctgttgagatattctagtatatgtaatttaaagtcag

SEQ ID NO: 141150 - DNA, 562 bp, Homo sapiens
atctaggtgtggaggagatgagagcagaagttgaagcactgcatagctaccaaagaatcttgcagaaaggttaccctttctgcaaccttggaagtgttcttgttgtcttggtgttatttggccacctccctgtggaacaacttttccccgggacatcttaagggcatcacttgatctctgtcagagctgatcaaacatctctgctttgctttacaattctcataattagttctaagcattcggtagcatgaactgcttcaccctgtgttccattgggactctataatgaacctgcttttgcatgcaaaatgctgttctttcttccaccgactaacatattatctctttttatgacctcactcaattccaccactgtctcccttccttgaatggctctcrtctactcacagagtcagcactgtctgtgtaattgctctggcttaagtctggtcttctacaatctgactatctggtccaccacaatgtcctcttcattttctttcgtgttcaaatttccctggagctcactatattgcatatacaaggcttatagatcaaaaaa

SEQ ID NO: 141151 - DNA, 562 bp, Homo sapiens
atctaggtgtggaggagatgagagcagaagttgaagcactgcatagctaccaaagaatcttgcagaaaggttaccctttctgcaaccttggaagtgttcttgttgtcttggtgttatttggccacctccctgtggaacaacttttccccgggacatcttaagggcatcacttgatctctgtcagagctgatcaaacatctctgctttgctttacaattctcataattagttctaagcattcggtagcatgaactgcttcaccctgtgttccattgggactctataatgaacctgcttttgcatgcaaaatgctgttctttcttccaccgactaacatattatctctttttatgacctcactcaattccaccactgtctcccttccttgaatggctctcgtctactcacagagtcagcactgtctgtgtaattgctctggcttaagtctggtcttctacaatctgactatctggtccaccacaatgtcctcttcattttctttcrtgttcaaatttccctggagctcactatattgcatatacaaggcttatagatcaaaaaa

SEQ ID NO: 141152 - DNA, 624 bp, Homo sapiens
ccttcccaacatattagtcatttgggtttgcaatctctgacttagcccaattactcagctctttattttccccataaggtacttctttaaatgagtgtgcccctagtgaaataattcagaactcattgtcactattaccacattctttgatcaaaagagccacaagccctgctgattatgtaagagaatcaagttgaattgtgctccacctcccyctagcctctgaaaaattatgaacctgcaagtattttggatcttagaaacattctcaatgaaggtgagcattggttcttgggacaatgaaaaatactaaaatatcataatagtccatggcctttcagaagccacacatatctgtacataaacagatattcggtaaatctgtggtattaaaatttcatagtgaagggggtgaaattagggggaaaaattaaagaattctgggtggcaggcaggcaataaaaattacatatatactgaaataaaggaagaactcagaaagactaatgcctggcctgatattttcctgtcaaatgtagctccttcttataggaggaaccctgaataaatgtgtaaaggaaacagtaatccagtcagggtgggggcactggctttcatctagca

SEQ ID NO: 141153 - DNA, 603 bp, Homo sapiens
ggggcttatggtggctacctccagactccacacctctctgcttgttatgtgactgttggatcttactgcccccttyccacctcaccttgccctgctgtactcttctctgtattgtgcatgtacagatgcaaacatgatcaagacttcttggtcagtgtgttaatgttgaattctgctaatgggaggcagtgagaggagattagaaggcaatgggaaagaagaagccattctgcttccagctctagcagaacagcatcaacagcaggtgactgcaggctccagcaacttctgtgattcctccaatagatcagctaagaaagggcaccagcaatgccccagtctgtgggtaccgccaccttatccctctggctcctccagccctttcaacaccatcataaaaattccttgcattaaatccctctttgcttgaaacatctacagtaatttcctttttctaggcttgacaatgtttgatgtgcaccccatggagatgcctttggaaaggcagcaagccttccttgggaaatacctggatttgttattgtcagtcttctgaaataatagtctggaattattttctaataaatactaagcctctagagg

SEQ ID NO: 141154 - DNA, 603 bp, Homo sapiens
ggggcttatggtggctacctccagactccacacctctctgcttgttatgtgactgttggatcttactgccccctttccacctcaccttgccctgctgtactcttctctgtattgtgcatgtacagatgcaaacatgatcaagacttcttggtcagtgtgttaatgttgaattctgctaatgggaggcagtgagaggagattagaaggcaatgggaaagaagaagccattctgcttccagctctagcagaacagcatcaacagcaggtgactgcaggctccagcaacttctgtgattcctccaatagrtcagctaagaaagggcaccagcaatgccccagtctgtgggtaccgccaccttatccctctggctcctccagccctttcaacaccatcataaaaattccttgcattaaatccctctttgcttgaaacatctacagtaatttcctttttctaggcttgacaatgtttgatgtgcaccccatggagatgcctttggaaaggcagcaagccttccttgggaaatacctggatttgttattgtcagtcttctgaaataatagtctggaattattttctaataaatactaagcctctagagg

SEQ ID NO: 141155 - DNA, 551 bp, Homo sapiens
tattttctaataaatactaagcctctagaggacagagagagcattttatgttctgtgttcccctaggtagtataacacctaatgcatagcacatgaagaacatttgttgcttgcataaataaatgaatgaatgttcacagctgtctttgtgaacatataaagagcagggcaaaaatacaattttgtttagcaaagtaatactagacacayttacaagagtgaggttgctttttagccaagcatattcggatacacccaagcctcaaagaaaacattttgtcatgattttgaaatgtcatcaacctaaaatctatttacctgcacctacaaagagccataaccgagtagtgttaatgtcttttctatgtcttccaacatctctggttataaaagaatacatatattcctcagagcaatgggttggaggcctctccttccctccgtggggaagaaaacggtcatggagttgaaagaagacaggaaattaagcatccttttattgactgatagttattgatactaatcttcccttccccctcacatacacccat

SEQ ID NO: 141156 - DNA, 436 bp, Homo sapiens
agatctcgttaaaatacagattctgatataataaggctacagaggagcctgagagtctgcatttctaacaagctgatgcttctggcctgtgggttgtacttcaatagcaaaggatctgaaacttaaaacagagaacttatctatgtacatgtaatagcggaattccaagcattttctcataaagctatgcacagccagccagttcttatgatgacttagttctttgcagaatccaagacaactatggcttaggttttgccccatgattctcgtgttacccttcactcaggacatttggaatcctagaatcttaggtttaaatgatgccttccyggccccctcttcacctacccatcagtacggttactgcttctaagacaggcctcactagggcttgcccatctcttcttgccgcttccagtgacaaatgggtcac

SEQ ID NO: 141157 - DNA, 492 bp, Homo sapiens
aatacatgatgagttgttgcatttggatgtctgtcgaactgcccatactacagcaagcaactgattacgaccgtgcatgtgtgtgtgagggggtaaaattgtatagaagcagggaattaactgatagtaacacccttgaggagagaatggcagcatggattagatctagctgaaggaggagtgaattacgctggagtgattattcagagcatgcatgaaaaattctccagagcaatcctcacactcccccagtctgatcatgtctagcccgtttcagccaggacagttttcagcctttagcatccatcagaatcacctggggcacttgtggaacaatgttgggtctcacccacagagtccctgatgcagtargtctggggttgggcctgagaatttgcatttctgatagactcctgcatggtgctggtgctgcaggtctagagaccacactttaaaaaccactggtctatagaatcccctcacagcagtttt

SEQ ID NO: 141158 - DNA, 493 bp, Homo sapiens
gaatacatgatgagttgttgcatttggatgtctgtcgaactgcccatactacagcaagcaactgattacgaccgtgcatgtgtgtgtgagggggtaaaattgtatagaagcagggaattaactgatagtaacacccttgaggagagaatggcagcatggattagatctagctgaaggaggagtgaattacgctggagtgattattcagagcatgcatgaaaaattctccagagcaatcctcacactcccccagtctgatcatgtctagcccgtttcagccaggacagttttcagcctttagcatccatcagaatcacctggggcacttgtggaacaatgttgggtctcacccacagagtccctgatgcagtaggtctggggttgggcctgagaatttgcatttctgatagactcctgcatgktgctggtgctgcaggtctagagaccacactttaaaaaccactggtctatagaatcccctcacagcagtttt

SEQ ID NO: 141159 - DNA, 420 bp, Homo sapiens
caggtccttcattctcaagctcccacagcaacctttctattatctgatatcctaggtggatgaatgattaggcatgaggacttctggacaccagtggagctgtaacttgtggctccttctatttagttctccttattttctgatgggcaatatctggggcaaagcaaacagtatagctcccaaggtatcagcactgctgtagtccccagctgggcagattcacacttgtggtttcagtatgtagaaaagctctcaggctaaaacctttttttttttttttttccctgaactcctttccatttctgcmaccagcttttatggcagagattctcaagcttggtgtgcatcaggatctcctgggaaacttggcaaaattttggaggtgtaggccctgtcccgctctatgagcccagttctcca

SEQ ID NO: 141160 - DNA, 420 bp, Homo sapiens
caggtccttcattctcaagctcccacagcaacctttctattatctgatatcctaggtggatgaatgattaggcatgaggacttctggacaccagtggagctgtaacttgtggctccttctatttagttctccttattttctgatgggcaatatctggggcaaagcaaacagtatagctcccaaggtatcagcactgctgtagtccccagctgggcagattcacacttgtggtttcagtatgtagaaaagctctcaggctaaaacctttttttttttttttttccctgaactcctttccatttctgcamccagcttttatggcagagattctcaagcttggtgtgcatcaggatctcctgggaaacttggcaaaattttggaggtgtaggccctgtcccgctctatgagcccagttctcca

SEQ ID NO: 141161 - DNA, 558 bp, Homo sapiens
gtgcatttataataaaatttwaaaacttgacccacaaatctctacttgtccttctagttttatttcatttgtctctcgtcaatctctacattctgatcaccacaatcttttaattcatctgaaagctaagctctctcttaatttacattctctatacttgcaattttgtctacctagaagtgtcttcttccatctttggattgttattgcaaatccattgaatagttctcatctgaattgtttcttccttgggatgacttataaacacttcatcctacagccaaatcagaagaccaatatcaaaatctttcatcacatcctaaatttgcttatatgtaattatatggcaagaatctctttgtctttataatcattattcacttatctatgttttttaaaaactcttctaggtggtgatgctaagctccgtaatgttgggcttgttacctgtctcaactatcttccacacctaccacagtacctgctacatagatgtattcaatatatatttttagaattagtaaatgatgagcaagcgtgtacttttgttctctttca

SEQ ID NO: 141162 - DNA, 577 bp, Homo sapiens
ttgtctctcgtcaatctctacattctgatcaccacaatcttttaattcatctgaaagctaagctctytcttaatttacattctctatacttgcaattttgtctacctagaagtgtcttcttccatctttggattgttattgcaaatccattgaatagttctcatctgaattgtttcttccttgggatgacttataaacacttcatcctacagccaaatcagaagaccaatatcaaaatctttcatcacatcctaaatttgcttatatgtaattatatggcaagaatctctttgtctttataatcattattcacttatctatgttttttaaaaactcttctaggtggtgatgctaagctccgtaatgttgggcttgttacctgtctcaactatcttccacacctaccacagtacctgctacatagatgtattcaatatatatttttagaattagtaaatgatgagcaagcgtgtacttttgttctctttcattacagtgttagaaatgctattacagcattagaaaagataatcagaaagaaaatttaatagatcatcagaaaaaatcccaagacttt

SEQ ID NO: 141163 - DNA, 577 bp, Homo sapiens
ttgtctctcgtcaatctctacattctgatcaccacaatcttttaattcatctgaaagctaagctctctcttaatttacattctctatacttgcaattttgtctacctagaagtgtcttcttccatctttggattgttattgcaaatccattgaatagttctcatctgaattgtttcttccttgggatgacttataaacacytcatcctacagccaaatcagaagaccaatatcaaaatctttcatcacatcctaaatttgcttatatgtaattatatggcaagaatctctttgtctttataatcattattcacttatctatgttttttaaaaactcttctaggtggtgatgctaagctccgtaatgttgggcttgttacctgtctcaactatcttccacacctaccacagtacctgctacatagatgtattcaatatatatttttagaattagtaaatgatgagcaagcgtgtacttttgttctctttcattacagtgttagaaatgctattacagcattagaaaagataatcagaaagaaaatttaatagatcatcagaaaaaatcccaagacttt

SEQ ID NO: 141164 - DNA, 577 bp, Homo sapiens
ttgtctctcgtcaatctctacattctgatcaccacaatcttttaattcatctgaaagctaagctctctcttaatttacattctctatacttgcaattttgtctacctagaagtgtcttcttccatctttggattgttattgcaaatccattgaatagttctcatctgaattgtttcttccttgggatgacttataaacacttcatcctacagccaaatcagaagaccaatatcaaaatctttcatcacatcctaaatttgcttatatgtaattatatggcaagaatctctttgtctttataatcattattcacttatctatgttttttaaaaactcttytaggtggtgatgctaagctccgtaatgttgggcttgttacctgtctcaactatcttccacacctaccacagtacctgctacatagatgtattcaatatatatttttagaattagtaaatgatgagcaagcgtgtacttttgttctctttcattacagtgttagaaatgctattacagcattagaaaagataatcagaaagaaaatttaatagatcatcagaaaaaatcccaagacttt

SEQ ID NO: 141165 - DNA, 577 bp, Homo sapiens
ttgtctctcgtcaatctctacattctgatcaccacaatcttttaattcatctgaaagctaagctctctcttaatttacattctctatacttgcaattttgtctacctagaagtgtcttcttccatctttggattgttattgcaaatccattgaatagttctcatctgaattgtttcttccttgggatgacttataaacacttcatcctacagccaaatcagaagaccaatatcaaaatctttcatcacatcctaaatttgcttatatgtaattatatggcaagaatctctttgtctttataatcattattcacttatctatgttttttaaaaactcttctakgtggtgatgctaagctccgtaatgttgggcttgttacctgtctcaactatcttccacacctaccacagtacctgctacatagatgtattcaatatatatttttagaattagtaaatgatgagcaagcgtgtacttttgttctctttcattacagtgttagaaatgctattacagcattagaaaagataatcagaaagaaaatttaatagatcatcagaaaaaatcccaagacttt

SEQ ID NO: 141166 - DNA, 635 bp, Homo sapiens
attacatgtgttgcctccttctcatccacttcaaaactagaaaaatatctattatataaaggtataagtctgagccagggcagactatccagagataaaatatataagctttagggaggctgaggtgggcggatcgcttgaggccaggagttcaagaccagcctggctaacatgatgaaaccccatctgtactaaaaatacaaaaattggctgggcatggtggcacacacctgtaatcccagcactagggaggctgaggcacaagaatcacttgaacccagaggtggaggttgtagtgagctgagatcacgccactgcatgccagcctgggtgacagagcaagactctgtctcgaaaaaatatatatgtgtgtgtgtgtgtgtgtgtgtgtgtgtgtgtgtgtgtgtgtgtrtataatagacatataagctttaacttatatatgtaagtttaacatatatataagctttatatatatatgtataataaattatatatataatatgtatataaagcttatatatatatataagctttaactataccaagtatttcctttggggtcttagctctattccatatagctgaacttgccatatctattaatttacagatatatgacattggtgcaaaag

SEQ ID NO: 141167 - DNA, 635 bp, Homo sapiens
attacatgtgttgcctccttctcatccacttcaaaactagaaaaatatctattatataaaggtataagtctgagccagggcagactatccagagataaaatatataagctttagggaggctgaggtgggcggatcgcttgaggccaggagttcaagaccagcctggctaacatgatgaaaccccatctgtactaaaaatacaaaaattggctgggcatggtggcacacacctgtaatcccagcactagggaggctgaggcacaagaatcacttgaacccagaggtggaggttgtagtgagctgagatcacgccactgcatgccagcctgggtgacagagcaagactctgtctcgaaaaaatatatatgtgtgtgtgtgtgtgtgtgtgtgtgtgtgtgtgtgtgtgtgtgtgtataatagayatataagctttaacttatatatgtaagtttaacatatatataagctttatatatatatgtataataaattatatatataatatgtatataaagcttatatatatatataagctttaactataccaagtatttcctttggggtcttagctctattccatatagctgaacttgccatatctattaatttacagatatatgacattggtgcaaaag

SEQ ID NO: 141168 - DNA, 580 bp, Homo sapiens
aaatataaatagtttcatttgcaggtcatatagtcaattcgtctcacaaatataatattaagcaaaaaaatgtggttcaaaacactacacacactatttgattccttactggtaaaagttagaatagtgttatgttaggagggatgggtggaaatcaggtgtgtgactattacattttcttattctggatgatcatagtattttaaaactcactaagctttaaacttatgtgcatttacccatgtgtatacaatactttaatagaagcttcaaatcaatgagaaaacatgaaactgtctgatggaaaaatagcttgaggaaatgaacaggtatrgcagaaaagaagggctgcatatagtttaaaaacttgaagagatgtttaatctctttgcaaatagaaaaacatacgcatttaaattgaaataccattttcatgttccaaaattaaaattattagaaatatgatggtaaacagtgatggtaatatgggagaaaggaaacatcctaggcaatttggctaagcttttctgagaaagatttaggcaatatgccattaaaagatttaatgtgaacaaatggg

SEQ ID NO: 141169 - DNA, 580 bp, Homo sapiens
aaatataaatagtttcatttgcaggtcatatagtcaattcgtctcacaaatataatattaagcaaaaaaatgtggttcaaaacactacacacactatttgattccttactggtaaaagttagaatagtgttatgttaggagggatgggtggaaatcaggtgtgtgactattacattttcttattctggatgatcatagtattttaaaactcactaagctttaaacttatgtgcatttacccatgtgtatacaatactttaatagaagcttcaaatcaatgagaaaacatgaaactgtctgatggaaaaatagcttgaggaaatgaacaggtatggcagaaaagaagggctgcatatagtttaaaaacttgaagagatgtttaatctctttgcaaatagaaaaacatacgcatttaaattgaaataccattttcatgttccaaaattaaaattattagaaatatgatggtawacagtgatggtaatatgggagaaaggaaacatcctaggcaatttggctaagcttttctgagaaagatttaggcaatatgccattaaaagatttaatgtgaacaaatggg

SEQ ID NO: 141170 - DNA, 566 bp, Homo sapiens
acataattttcactgcgatggtcataattttaaaaggttgcatcatccatttttagttaacatatattgtactaacatcacatatctatgtaacagaaaaatagagtcaactcatgtagggacagacatgaaaatgacaaatacatatagagatagaaaggtatcttgtgcattatactgagaaagacaatagaaataaacaatttacatgggttgatttattttgattaagatatataagtggttagataaatgttaaataggtcagtatgtaattacagaaaatgacaaattgttatgtatggtacatttgtaggcataacacagacattacattttggaaaattgtgttctatgcaacagtgccaagtctaatgaaagtaagaggaagaggaattcagccaaagtaccaacccctgttatccattccttaagaaaggaacttctttatacactcaaaagaggggattctttttaaatttgtttccagaggggcatctgcatacacatacacatacacayacacacacacacacacacacacacacacatttacattatattta

SEQ ID NO: 141171 - DNA, 582 bp, Homo sapiens
gagaatactttaactttccaaaaagctattcaaaagtataattttcaaataaaatatatgtttgtatgacaacaaatgattttttataaataatatattctgcattatcaatctgccactggtttttattaaataaaaaaacctgtaagtttgtatgctcttaaaatacatataacatttgtaagaatagtttttrtgtaaaaataattatagttcactataactatgttaaaaatagacatagccaggcaagtcgctcatgcctgtaacccagcactttggtaggctgaggcgggcagatcacttgaggccaggagttcaagaccagtctggccaacatagcgaaaccccatctctaataaaaatacaaaaattagccgggcatggtggcccataccttgtaatgccagctactcaggaagctgtggcaggaagattgctggaacccgagaggcggagtctgcagtgagacaagatcatgccactgcactccaacctgggtaacagagtgagactctgtctcaaaaaaaaaaaaaaagaaaagaaaagaaaagaaaagagaaaaatagacacagatgaagg

SEQ ID NO: 141172 - DNA, 429 bp, Homo sapiens
gacaaacatggaaattaatgaagtaccttaatatctggcttcagatcttagacaggatcagagggccagctcaaatttgcaaggaggggaggtagatcccaccattttatgggtgaatggcaaaatcaaacagaaattatgtgggatgggagatactgatgcagccatcwttggaaacattctacttagctaattttatgctaggctttaggtcaagaaggagagagagagctgacatgctgtggtacacacttatagtcccagcgacttggaaagctgaggcaggaggattgcttgatcccaggagtttgaggtagtgtgcgatgatcgttcttgtgaatagccactagccactgaactccagcttgggcaacattgagacaccctgtctcttaatttaaaaaaaaaaaaaaaaaaaaaaaggaggaa

SEQ ID NO: 141173 - DNA, 358 bp, Homo sapiens
agggtggcagtaggatctacccaaaaagcatcctgctgatacaggaccaaagcatcctgttgttctcgagcctataaaaagagctaatggtcttgcttctcttaactgtggcctcctacactrtgttttggatgattggtgatgtcttggatattctgtttctttggaactttgaatatacaacacttttctagggaattagcaatggaagcagagcaaagatgtacagaggaaacaatgcgtaactctgatggaattgaagtcatgaggcagcagagagcttaaattacagctttaaaaatttttattttttagagggaatttacttgggagtaacagcagtaatagttaacggagc

SEQ ID NO: 141174 - DNA, 358 bp, Homo sapiens
agggtggcagtaggatctacccaaaaagcatcctgctgatacaggaccaaagcatcctgttgttctcgagcctataaaaagagctaatggtcttgcttctcttaactgtggcctcctacactatgttttggatgattggtgatgtcttggatattctgtttctttggaactttgaatatacaacactttwctagggaattagcaatggaagcagagcaaagatgtacagaggaaacaatgcgtaactctgatggaattgaagtcatgaggcagcagagagcttaaattacagctttaaaaatttttattttttagagggaatttacttgggagtaacagcagtaatagttaacggagc

SEQ ID NO: 141175 - DNA, 295 bp, Homo sapiens
cctgctctcctgctgaggtggagactgcagtgagctgagatcgcaccattgcactccagcctgggcaacgagtgcaaaactcagtctccagataaaaaaaagaaaaagaaaaaaaagaggccgggtgtggtggcttatgcctatratcctagcactttgggaggtcggggtggacggatcacgagatcaggagttggaggccagcctggccaacatagtgaaagcccgtctctagtaaaaatacaaaatttagtcagacatggtgggcaggagagagcatgtgcaggggaacatc

SEQ ID NO: 141176 - DNA, 295 bp, Homo sapiens
cctgctctcctgctgaggtggagactgcagtgagctgagatcgcaccattgcactccagcctgggcaacgagtgcaaaactcagtctccagataaaaaaaagaaaaagaaaaaaaagaggccgggtgtggtggcttatgcctatgatcctagcactttgggaggtcggggtggacggatcacgagatcaggagttggaggccagcctggccaacatagtgaaascccgtctctagtaaaaatacaaaatttagtcagacatggtgggcaggagagagcatgtgcaggggaacatc

SEQ ID NO: 141177 - DNA, 603 bp, Homo sapiens
tgccattgcactccagcctgagagacagagtgatactgcctcaaaaaaataaaaatttaaatttaaaacagaaacacaaaaaacctaaattatcccctaaggctggccacggtggctcacacctgtaatcccagcactttggaaggccaaggtgggtggatcacttgaggtcaggagttccgagaccagcctggtcaacatggtgtgaaaccacgtcactactaaaaatacaaaaatcagccaggcatggtggcacatgactgtagtcccagctactcgggaggctgaggcaggagaatcacttgaacccgggaggcagatgttgcagtgatccaagatcatgccactgcactctagcctggttgacagagcaagactctgtcacaaaaacaaaaacaaaaagtaaataaattaccccctargaggagtatatcccaggaaagtgtaacacctgaaacttaaaagattatctgccctgatgataaacgatagaaaagagacaggccaggccaaagtttgtcaactggtggactgaagataagttttatttagcctctgtgtttttctaaattagaggctaacatctcaaacttgggagaattc

SEQ ID NO: 141178 - DNA, 452 bp, Homo sapiens
gctggtccaagccatcacaattcccccaaagttcttaacagtgctcacagcctctcctccccaccttacccttctgattgcagctkccaccactcatcccctgctcactcctgcagtcgtcaaagaccccaatgcacttctacctcagggcctttgcacttgcagctctctttgtctgaagagcttttcccctaggtatcagtagggttaacacccttcctcattcaggtcatggcttaactgtcttcccagcgaggactcctctggccaccctattttattttttgagatgaagtctctgtcacccaggctggagtgcaaggttggctcactgcaacctgtgcctcctggattcaagcgattctcctgcctcagcctcccgagtagctgggattacaggcgcctgccagcacgcccggctaatgtttttgtatttttagtagagacggaat

SEQ ID NO: 141179 - DNA, 452 bp, Homo sapiens
gctggtccaagccatcacaattcccccaaagttcttaacagtgctcacagcctctcctccccaccttacccttctgattgcagctgccaccactcatcccctgctcactcctgcagtcgtcaaagaccccaatgcacttctacctcagggcctttgcacttgcagctctctttgtctgaagagcttttcccctaggtatcagyagggttaacacccttcctcattcaggtcatggcttaactgtcttcccagcgaggactcctctggccaccctattttattttttgagatgaagtctctgtcacccaggctggagtgcaaggttggctcactgcaacctgtgcctcctggattcaagcgattctcctgcctcagcctcccgagtagctgggattacaggcgcctgccagcacgcccggctaatgtttttgtatttttagtagagacggaat

SEQ ID NO: 141180 - DNA, 462 bp, Homo sapiens
acccccgctcggcctcccaaatcaccatgcctgggattacaggygtgaaccatcgcacccggcctggccaccctattttaaactgcaaacttttccccttcagtgcttagtttttctccacagcattatcaccatttcatatagtatatgtttttcttcatactgactccccttggagaaggaaaactccacgagagcaaggatttttgacagtttttcattgttatttcttcagtgcttagacatgcatcaggctcaaagtagatgctcaatgtttgttgaatgaacagcaagagcaatggaggagtcctgaaatacacagcaagaagcaaggataattctggctttacttctgtggccagggtccttcatcccaaccttttagaagtagaaaaaccagatcgagctcctcagaacccaggtcgatggctgcagagccttcgaccttcccgagagcgaatg

SEQ ID NO: 141181 - DNA, 462 bp, Homo sapiens
acccccgctcggcctcccaaatcaccatgcctgggattacaggtgtgaaccatcgcacccggcctggccaccctattttaaactgcaaacttytccccttcagtgcttagtttttctccacagcattatcaccatttcatatagtatatgtttttcttcatactgactccccttggagaaggaaaactccacgagagcaaggatttttgacagtttttcattgttatttcttcagtgcttagacatgcatcaggctcaaagtagatgctcaatgtttgttgaatgaacagcaagagcaatggaggagtcctgaaatacacagcaagaagcaaggataattctggctttacttctgtggccagggtccttcatcccaaccttttagaagtagaaaaaccagatcgagctcctcagaacccaggtcgatggctgcagagccttcgaccttcccgagagcgaatg

SEQ ID NO: 141182 - DNA, 516 bp, Homo sapiens
tgtgagtattcacttaaaatgccacataatgctaatcatcttcttgtgagtagcttgtctctccagtaaattaacacagtaaaaagtgttctctcatgtttctcctgtattattcatgatgtctagtgcaataccataaaccttgaataacaccttcagacctataaaaagtgctgctagtgatgctgaaagttcttccaggaaacagagaagggtcctgacattacaggaaaacaatgaattgcttgataggtaccctagattgaggyctgcagctgtgtgtgctgccatttcagaagaaggatccatcttgtaaacacaggattgtaaacttatgagagaaataaatatactgtagtactgtaaacgtattttttcttccctataattttcttaataacactttcttttctgtaactagcttcattgtaaaactacggtgtaaaatacatacagcgtatgaaatatgtgttaaggattgtccagtcaacagtaggctgttagtttagttttggg

SEQ ID NO: 141183 - DNA, 575 bp, Homo sapiens
ataaaatttctttgaactatgtctttgatgattttctatcctactttttttctttttttctcgtatcattctcattggaccttctggataattccaccagtattcttatctttactctcctatttgaacctctttattttactccttttattgtactttctggaatatttcttcaactctatcttctatagtactgggtttttcatttttactatatttaacctcaaccataagcaaataaataccaagctaaaacaatgagacttttttctttttcttttgcctgtgagttttggccaatataaaaaagtttcataatacctaatgttggctaaatgtgsgaaaacaataaatgaaagttctttgaagaacaactttacaatatctatcaaaattcacaaaacatgtaaaactcttgactcagtaattttacctctaggaatttaccatgcatttatacttgtacaaatgttcaaaaatatagatataagcattatttgttaatagcaaaaaaaaaaaatcttaaatatccaacaggaagcaattgattatataaaccataattatacctgaaa

SEQ ID NO: 141184 - DNA, 579 bp, Homo sapiens
ttgaactatgtctttgatgattttctatcctactttttttctttttttctcgtatcattctcattggaccttctggataattccaccagtattcttatctttactctcctatttgaacctctttattttactccttttattgtactttctggaatatttcttcaactctatcttctatagtactgggtttttcatttttactatatttaacctcaaccataagcaaataaataccaagctaaaacaatgagacttttttctttttcttttgcctgtgagttttggccaatataaaaaagtttcataatacctaatgttggctaaatgtgcgaaaacaataaatgaaagttctttgaagaacaactttacaatatctatcaaaattcacaaaacatgtaaaactcttgactcagtaattttacctctaggaatttaccatgcatttatacttgtacaaatgttcaaaaatatagatataagcattatttgttaatagcaaaaaaaraaaatcttaaatatccaacaggaagcaattgattatataaaccataattatacctgaaatatgcaacaatttca

SEQ ID NO: 141185 - DNA, 575 bp, Homo sapiens
ataaaatttctttgaactatgtctttgatgattttctatcctactttttttctttttttctcgtatcattctcattggaccttctggataattccaccagtattcttatctttactctcctatttgaacctctttattttactccttttattgtactttctggaatatttcttcaactctatcttctatagtactgggtttttcatttttactatatttaacctcaaccataagcaaataaataccaagctaaaacaatgagacttttttctttttcttttgcctgtgagttttggccaatataaaaaagtttcataatacctaatgttggctaaatgtgcgaaaacaataaatgaaagttctttgaagaacaactttacaatatctatcaaaattcacaaaacatgtaaaactcttgactcagtaattttacctctaggaatttaccatgcatttatacttgtacaaatgttcaaaaatatagatataagcattatttgttaatagcaaaaaaaaaaaaycttaaatatccaacaggaagcaattgattatataaaccataattatacctgaaa

SEQ ID NO: 141186 - DNA, 545 bp, Homo sapiens
ttttttttttgagacgaagtctcaactcgtcacccaggctggagtgcagtggcacagtctcggctcactgcaacctgtgcctctggggttcaggtgattctcgtgcctcagcctccagagtagctggaactacaggtgtgcaccaccacgcccggctaattttttatattttcagtagagagggggtttcaccacgttggccaggctggtcttgaactcctgaccgcaggtgatccacccgcctcggcctcccaaagagctgggattacaggcgtgaaccatcatgcccagccaagtatccaattacttttgagacattttttccacactggattatgacactgtccataagacacccactcatcttacatgggcgatttttaatgacataacatttggatcagcattagtgatcctaatcatctgcacaaaaaacaaaacaaaaaccacagcagaaggaggaagrggactatagttatatagaaggaagaacagagacaagaggaactatctttaactagactgtaatttagtgaaatgtcctc

SEQ ID NO: 141187 - DNA, 628 bp, Homo sapiens
ggctacactaaacaacaaattatcaatgtagatgaaacagccttatactggaagaagatgccatctaggactttcacagctagagaggagaagcttggtttcaaagcttcaaagggtaggtgattctcttgttagaggctaatgcagctggtgactttaaattgaagctggccgggcatggtggctcatgcttgtaatcccagcactttgggaggccaaggcaggcagatcacctgaggtcaggacttcaagatcagcctggccaacatggtaaaaccctatctctactaaaaatacaaaaattagccaggtgtggtggcacatgcctgtaattccagctacttgggaggctgaggcaggagaatcacttgaacccaggaggcggtggttgccgtgagctgagatcgcgccactgcactccagcctgggcgagacagtgagactccatctcaaaaaaaaaaaaaaaaaaaaaaaaaaatgaagccaatgctcatttaacattcccaaaatcccagcgcccttaagaatsatgctcactctactgtctgtgctgtacaaacagaacaacaaagcctagatgacagcacagctgttgacagcatggtttactgagtattttaaagcccat

SEQ ID NO: 141188 - DNA, 553 bp, Homo sapiens
tactggagcacaacacactgtttctcagggccctttgttcacgttctccctgcagcacccttcttaactacacctggctggcactcactcacctgtcaggactcaggaagccatgcctcagttcgcagaactagcaaggggcttctttgggctcctgccaagcttccatgatgcattcctccatagccctgaaatttgctctttgcttttctttctttttatggatttgtgagatccgtgagaacaaggtctatgcctcgttcgttttggaatcctcagcccctagcacagtgcttggctcagaatggccctcaataatgcagcactgaaygactctaaacaaacagcaagggtatacaatttgtttttggcagaagagcagccaaggtccctctgcacaatggatcctctgtaagccaagctctgctgctgtggatatccagccttctgcatgatcctctcttcagacaaaaatggtgcttgagccggtgcagcaagcatgcccttctgtattcctctcttgaggctgttcgcatttaatatttgtgcctag

SEQ ID NO: 141189 - DNA, 553 bp, Homo sapiens
tactggagcacaacacactgtttctcagggccctttgttcacgttctccctgcagcacccttcttaactacacctggctggcactcactcacctgtcaggactcaggaagccatgcctcagttcgcagaactagcaaggggcttctttgggctcctgccaagcttccatgatgcattcctccatagccctgaaatttgctctttgcttttctttctttttatggatttgtgagatccgtgagaacaaggtctatgcctcgttcgttttggaatcctcagcccctagcacagtgcttggctcagaatggccctcaataatgcagcactgaatgactctaaacaaacagcaagggtatacaatttgtttttggcagaagagcagccaaggtccctctgcacaatggatcctctgtaagccaagctctgctgctgtggatatccagccttctgcatgatcctctcttcagacaaaaatggtgcttgagccggtgcagcaagcaygcccttctgtattcctctcttgaggctgttcgcatttaatatttgtgcctag

SEQ ID NO: 141190 - DNA, 579 bp, Homo sapiens
atctctctttagatcttggaaacctttttccagtttcttgaatggaacaaaggtgagagtgagaaagatcaagaattaagatgatacacttggccaggtgcagtggctcacgtctgtaatcccagcactttgggaggctgaggggggcggatcacctgaggtcaggagttcgagaccagcctggccaacatggtgaaaaccccgtctctgctaaaagtacaaaaattagcygtgcttggtgacgggcactgtgatgggtgcctgtaatcccagatactcaggtggatggggcaggagaatcgcttgaacctaggaggcagaggttgcagtgagctgagattataccactgcactccagcctgggcgacagacggagactccatttcggaaaaaaaataaaaaaagataatttacttcacttactcttctattttttttaaactaaaattgattgagcctttttaaagttacaaagtataaaggagaaaataaggcccaaatgatccgtttattcttgaatttatttctcaagttggaaaagccaaacagggtggagtggaagaaaacggacagcaaaag

SEQ ID NO: 141191 - DNA, 515 bp, Homo sapiens
agatcttgagactatacttgacatcctatgggctaaacattccactgaaataggaaaaataattggagcagaacctactaaagttcagatwgatcttaccaaactgttgcaattatttccacaatatcccttgaagccaaaagcaaaagaaggactcaaatctatacttaaaagccttttatccaaagaccttcatgtatcctggactagctactacaatacgcttgttctgccaggaaagataccaagtggatgagaatattgacttgtctaagacaccaaggccaccaacaacattgttattcttcgatgtggtggcatctaacccaaataccaataatgtcgttaattccatctgaagcctcttgcttcactgtagtgtatctttgctccatatttctgcagtgtgcctctagaccagggcagccaatatctttttgcctttacttgtggaagacagcacagacctggatagttatgttctagagatttaaaaaagtaatatttttcctagg

SEQ ID NO: 141192 - DNA, 515 bp, Homo sapiens
agatcttgagactatacttgacatcctatgggctaaacattccactgaaataggaaaaataattggagcagaacctactaaagttcagatagatcttaccaaactgttgcaattatttccacaatatcccttgaagccaaaagcaaaagaaggactcaaatctatacttaaaagccttttatccaaagaccttcatgtatcctggactagctactacaatacgcttgttctgccaggaaagataccaagtggatgagaatattgacttgtctaagacaccaaggccaccaacaacattgttattcttcgatgtggtggcatctaacccaaataccaataatgtcgttaattccatctgaagcctcttgcttcactgtagtgtrtctttgctccatatttctgcagtgtgcctctagaccagggcagccaatatctttttgcctttacttgtggaagacagcacagacctggatagttatgttctagagatttaaaaaagtaatatttttcctagg

SEQ ID NO: 141193 - DNA, 630 bp, Homo sapiens
ggctgtttcagttacaagtgacagaaattcaatcgagttgactttagttgctttttaaaaatgagctttattgcctcatatattgaaacagggcacaggtagacctggcttcaaaaacatcagaagacatagaatcaaatgatgccgtgactcaccgggacgcaaatgttctctctcactgtctctgtgaccctcagagaagttctcttttctrggctcaaggcttacaaatttgcaagtctgggtctagatgtaaagtaagtgtatttgttctcagttgttgtggtttgagttccaagattgagtcttttggaccagattagaccacatgagtatctctggtctaatgtctcaagccagggggattcgatgttctgactggttgggccttgctcatgtatccacccccagagccaggagtacaatgattacacctgagccacttgaactggacgtgtggagggtgggtggtccctcaaagtaaattagggccagttatcagaagaaggggcaggaaaaagtagcaaatgcattctgagagtgtcaggagattaggtcagagggctagctcatgaagtatctagcatagcaggggctccatgactaatatcatttgattacagtgactgc

SEQ ID NO: 141194 - DNA, 630 bp, Homo sapiens
ggctgtttcagttacaagtgacagaaattcaatcgagttgactttagttgctttttaaaaatgagctttattgcctcatatattgaaacagggcacaggtagacctggcttcaaaaacatcagaagacatagaatcaaatgatgccgtgactcaccgggacgcaaatgttctctctcactgtctctgtgaccctcagagaagttctcttttctgggctcaaggcttacaaatttgcaagtctgggtctagatgtaaagtaagtgtatttgttctcagttgttgtggtttgagttccaagattgagtcttttggaccagattagaccacatgagtatcyctggtctaatgtctcaagccagggggattcgatgttctgactggttgggccttgctcatgtatccacccccagagccaggagtacaatgattacacctgagccacttgaactggacgtgtggagggtgggtggtccctcaaagtaaattagggccagttatcagaagaaggggcaggaaaaagtagcaaatgcattctgagagtgtcaggagattaggtcagagggctagctcatgaagtatctagcatagcaggggctccatgactaatatcatttgattacagtgactgc

SEQ ID NO: 141195 - DNA, 511 bp, Homo sapiens
aagcacttctcaaatgaacaattttgctctagtcaagtcttccccagagtggccactgaaaatcaaatcatccttgatgaagttatgtcgtttagagataggcacaagaattagcattgtaatgggagtaagtataagaagcaggagtttttcctagaggaggcaaggatttatacttggacaaccccacgagtgttggcagtggtcagtagaaatgtgaggcttgagcacttcatgttttgagtccccagcatgatggctgtcctcctcccaatgcaagcttgacaawctgcaccaccagcagacaaaaaaccagcgagaacactgtctgtggagccaagccaagcacttagacaaaaacttcagatggaaggagaacctcatccagttctattagtcactcacagcaaaattagtccaggtggatatcagcccagtgagaactgtacactcaccagtctgtgaggctggctcaaacaacaagcttacaggatctatgcctgcattctac

SEQ ID NO: 141196 - DNA, 337 bp, Homo sapiens
ccagccctaccaggcctgccttgcccaacctccatacctcctcctgcagcaaacgcatctcctgaaaaatagccagaagcttcctgcagagccaaagacttgggrggaatttcactgtgaggttacactcttcagtttcctcgggaggaatgcagcctgttcggaaggtgttcatcctaccggtttcagcagagcacctggtaatgctgacatacatgtgtgtttagaaggagccttttctttcccatcattctctccaccccctcctgcacttcgcttctgccctacatatacatagacttaatctaacatcgcaactgccacaggggaaagcgaa

SEQ ID NO: 141197 - DNA, 337 bp, Homo sapiens
ccagccctaccaggcctgccttgcccaacctccatacctcctcctgcagcaaacgcatctcctgaaaaatagccagaagcttcctgcagagccaaagacttggggggaatttcactgtgaggttacactcttcagtttcctcgggaggaatgcagcctgttcggaaggtgttcatcctaccggtttcagcagagcacctggtaatgctgacatacatgtgtgtttagwaggagccttttctttcccatcattctctccaccccctcctgcacttcgcttctgccctacatatacatagacttaatctaacatcgcaactgccacaggggaaagcgaa

SEQ ID NO: 141198 - DNA, 616 bp, Homo sapiens
ttttatcaaactactggtaacttaagactaccattcattttcctagttaaattttccatgattctttcaaaaactatttatctcacatttgtgaggtatcaataaataaaacctcgcagatttggggaaaacacagttatttgataataaagttacaattattaaagaccttcaaaatatgtatattgctagacagraagttttggacacattttatcaaagtgggtcagtttcaaatactggttgagctaaatgcacatggttcctccgaagataatagaaccctggcatttaggaagcaagtgcataaattctagaactcttctgaaattcacaacttctggctaggctccgaagcttgtttttatatataccctccatgaaagtaactgctctttcaacctgttaaacgctagaatcactttgaaatgagatcaccaaaatatagacttcaggcctctcataccatagtagttgattactactgatttagacttctttttatattggttattttaaaaatatttgtagtatcaacaacctatacttattacttatcaacaaaaaacattttccagagttcctatataatagatttttagcttatgtgggtcat

SEQ ID NO: 141199 - DNA, 579 bp, Homo sapiens
tacagttgagaaaatgatcttgaatgcttaacaggaaccgataaatttattaataattttattagatataactggaatgctaacaattttaaaagcctagctcagtatcctttgttgggcttccctccaaaaactgtttttatgagtttgcaaacaaccctgttgattggttaaattaagccttgggggtaacaatttcagttagcatgmgaagagttgtcccttatttagtgttcatttctgtaatggttttgctttcatgcttggacttgtaatcactgattatatatttaagttatacatttcagagacgtgtttcctcttaaggagactatttctgactgggcacagtggctcatgcctgtaattccagcactttgggagaccaaggcaggtggatcactggaggccaggaggtggagaccagcctggccaacatggtgaaacaccatctctactaaaaatacaaaactcagccagacacgatggcatgagactataatcccagttactcaggaggctgaggtgtgagaatcacttgaaccggggaggtgaggttgcagtgagcagagatcatgc

SEQ ID NO: 141200 - DNA, 578 bp, Homo sapiens
agttttatagattcaagtcttatatttaagtytttaatccgttttgatttgatttttatgtgagtaagaagtagggattatatcattattctgtagataaatatctggttttcccagaaccatttattgaagagactgtcttttttgtaatgtatgttcttggcaactgtctcaaaaatgagtttacgtgtgtgaatttttttctgggttctcaattatgttccattgacttatgtttgtcttttgatgtcattaccatgctgtataatataataatgctgtagtataatttgaagtcagataatgtgattcttccagttttgttctttttgctcaaaatatctttgattattccgggtcttttgtgacttcacgtacattttagagttttttttctatatctgtgaagaatgtaattggtattctgataggcattgcatcaaatctgtagattgattcaggaaatatgaacattttaataaaattgcttcttctaatccacgaaaattacatatctttttatattttgtgtcctcttcaatttttttgcaccagtgttttgtagtttttattgtata

SEQ ID NO: 141201 - DNA, 578 bp, Homo sapiens
agttttatagattcaagtcttatatttaagtctttaatccgttttgatttgatttttatgtragtaagaagtagggattatatcattattctgtagataaatatctggttttcccagaaccatttattgaagagactgtcttttttgtaatgtatgttcttggcaactgtctcaaaaatgagtttacgtgtgtgaatttttttctgggttctcaattatgttccattgacttatgtttgtcttttgatgtcattaccatgctgtataatataataatgctgtagtataatttgaagtcagataatgtgattcttccagttttgttctttttgctcaaaatatctttgattattccgggtcttttgtgacttcacgtacattttagagttttttttctatatctgtgaagaatgtaattggtattctgataggcattgcatcaaatctgtagattgattcaggaaatatgaacattttaataaaattgcttcttctaatccacgaaaattacatatctttttatattttgtgtcctcttcaatttttttgcaccagtgttttgtagtttttattgtata

SEQ ID NO: 141202 - DNA, 578 bp, Homo sapiens
agttttatagattcaagtcttatatttaagtctttaatccgttttgatttgatttttatgtgagtaagaagtagggattatatcattattctgtagataaatatctggttttcccagaaccatttattgaagagactgtcttttttgtaatgtatgttcttggcaactgtctcaaaaatgagtttacgtgtgtgaatttttttctgggttctcaattatgttccattgacttatgtttgtcttttgatgtcattaccatgctgtataatataataatgctgtagtataatttgaagtcagataatgtgattcttccagttttgttctttttgctcaaaatatctttgattattccgggtcttttgtgacttcacgtacattttagagttttttttctatatctgygaagaatgtaattggtattctgataggcattgcatcaaatctgtagattgattcaggaaatatgaacattttaataaaattgcttcttctaatccacgaaaattacatatctttttatattttgtgtcctcttcaatttttttgcaccagtgttttgtagtttttattgtata

SEQ ID NO: 141203 - DNA, 495 bp, Homo sapiens
cttcagctctttaaaaatatcgtgccactttctcctggcttgtaaggcttctactgaaaagtgtgccagtagactcgttgtagttctattatatgttatattttctttccttttgctgcctttaggattctttttttacccctgacctttgggaatttgataatattaaatgccttaaaatagtttttttttgggggggggaggttgttaaatctgtttggtgttctataagcttcttgaacttgaatgttcatacctttctctaggtttgggagattttctgatatcactttgaataaaacttctacctctgtttctttccctacctcctctttaaggcaaataaytttttgatttgcccttttgaggctattctctaaatcttgtagatctgctttactgctttattgatctttactccttgtttcttttgtctcctctgactgcgtattttcaattagcctatcttcaagctcaccaaagttattattatta

SEQ ID NO: 141204 - DNA, 617 bp, Homo sapiens
tgtcttaccctgtatgttatctgtcacaccagctttttctgattgctccatagagggataattatgttctctggttttctgatgacyctgcaccagaaacatgatgcattataatatgcttcataggataagcataccttattttattgcactttgttttatcatgctttgcagatatttgggtttttttttctcataagttgagggtttgtggcaatcttataatcaaacaaatctattaacatgatttttccaacagcaaatcatcaatttatatctttgtgacacattttgctaattttcataaagctttaatctttttcatcattgctatattccttatgttgagctgtgatcagtgatttttcatattactattgtaattgtttgtgggtgtcacaaattatgcccatataagatatcaaacttattacatattatttgtctactgagtgccccatgaaccactttttcccatctctctccctctcctctggcctattcctgagaaacgacaacgttaaaattaaaccagttaataatcttacaaagctctctaagtgttcaagtgaaagagaaagtaccacgtgtttcactttaaatcaaaagtcggaaat

SEQ ID NO: 141205 - DNA, 595 bp, Homo sapiens
attacatctattttgcaacccatggatcaaggtataattttgactttcaagttttatcatttaagaaatacattttttaaggatattgctatcttaaattgtaattcctgtgattgatatgggctgagtaaattgaaaacgttctgtaaagtatttaccattttagaagatatttgaagtagtcataacttatgagaccaggttaaaataacattaaaaggagttttgaagaagttgatttatttattacaattcctatgaatgactttgaagagttcaaaacttcagttaaagaaacaactgcaggtgtggtgaaaatagcaaaagtactagaactaggattagagcctgaagatgtaactgaattgttgcaatctcatgatgaaacttgaattgatgagaatttgcttctgcattggagaagaaagtggtttcctgagataaaatttgctsctggtgaaaatggtctgaacattgttgagatgacaacaaagtatttggaatgttacataaacatgcttgatcaatcagcagcagagtttgagagaatgaacttcaactctgaaagaagttctactatgggtaaaatgctgtc

SEQ ID NO: 141206 - DNA, 449 bp, Homo sapiens
ttaatatttaaaaattaacttttaactggtttgcctaaattgtcattttaactctgctcagtaaacactcaaactctgcacagcagtgtgtgaggtagctgccatcatggtgtctgagaagtgggttttcacaattctgctacctcagctctgctgtgctggctgtggattctgtgagaaggtactggggcagcactgtaacatcagccattggcttaatgtcaacaatattttggaggaactcatagagaggggtcaccaggtaacagtgttgactcacacacacaggctttttcattgactatgggaagmcttctgcattgaactttgaggtggtccaagtgccacatgacaaagtgaattttgacaatgtacataatgaatttctggacctagtcctgaatgtcttgtcaagcttgacctcctggcagtcagcaaaagaactgaat

SEQ ID NO: 141207 - DNA, 446 bp, Homo sapiens
cattatttgcccaaaagtcattcaggagtagtcattatttgcccaaaagtygttcaatgtaattgtatggttttgagtaaatttcttagtctggatttctaagttgattggactgtagtccaagagattatttgttacactttcaattctttcgtgttttctaaagagtgtttcacttctgattatgtaatcaattaaagagaaagtgtcctgtggcaatgagaaaaatgtatattcttctgtttggggtggagagttctgcagatatctatcaggtttatttgatctactgctgagttcatatcctaaatatttgctagttttctgccttgatgatatgtttaatattgccacgggggaattaaagtgtcccactattattgtgtgggagtctaagtctctttgcaggtctgtaagaacttgctttatgaatctgggtgctcctg

SEQ ID NO: 141208 - DNA, 577 bp, Homo sapiens
aaccatttattttaaggctaatcatcttgtcaaagtgtgaacattaagttacaactgtatagtttttttttgaaactatgtatctttmtttaaaaatatgagccaaattaaggttgaatgcaaatttctgtttcaacaagttctcaaaattttctagctgtaatttgcaaacatatttacctaaaaactaatattattatgaggttagcatgactcaaaagcagtagtaggtacaaggatttcagccatcatttcaaaataatcaacagttaacctgaagaaccaaagataaaagattagattaatgaatgggaaattagactatttgttagaaaattgtttttatgggtatggtagaattaattgatcacggagctcaaagagtggtttatacgtatatctgctactatcgaaggtttacaaaataaagaaatggagattaattctctatggcttgtttgtgattgtgaatatactgatgtgacatgagggatgcagttttccctcatgattctctcaccactttgcctttcttgtaaatacacatgggtaaaatatataatacataaaaattaaa

SEQ ID NO: 141209 - DNA, 418 bp, Homo sapiens
gtctggttctgtgtaactaatcttatctgtgcacctccaggcatgttgtaggcaagccccactgtgtaagttattttatctgattatgtccaaaaaaggaaagaaacatgctcactgaagcccacagcrtgtatatgtatatgtatatgtcttttgctggttacaaaagacaagggtgttttagggtcgaccttgcctgtttatctgtgcttgaaggttgtgcagcttcaggctgcccttttgttaaaaagaattttaccaacggaccttgttctaactatctgcctaactggtttcttgctttctcctctctcaatagcacctgaataaaatactatattttagttgtctaaaactggacctgattccctgccaataaataaatagaagaaaataacatcagtgaatcatgacatcc

SEQ ID NO: 141210 - DNA, 563 bp, Homo sapiens
ttcaagtgtaaggtagggagacatggaggaagatgctaatgacgtcggaaccgcaagaatgagtgaattaattcaatgaatatttcaaagtctcctgtatgtcattctaaaaacattttaatctaataagcaattsaggaccatctaaagggaaatattatgacctgattttcattttacgtaaaacacttggacagatgtggcagtagagttgagaggtgtgagactagactaatgtatcactctaggaaagatgtggtaggagcctgccctacagaagtagctgataaatggaggaaaataatgcagtatgagactacctagcaacacaattgggagagcaggtgcttacaggcaacatccacatagcagtctgtggctgggaaaagtaattcagtctccttgcacctgaacttcatttatctcatctctgacagggctactaaaaggactaaattagtttacatctgaaaggattttagaatagtgtggcccaatcaaccctgatagcgaatatgggagagtaaaaattaatattgcattgaattttggacatgctgtgt

SEQ ID NO: 141211 - DNA, 463 bp, Homo sapiens
gcggtgagtgttactgttcttcaaggcagcgcgtttggagttgttagttccttccggtgggttcatggtctcactggcttcaggagtgaagctacagacctttgcagtgagtgttacagctcttaaagacggcgcagacccaaagattgagcagcagcaagatttattgtgaagagtgaaagaacaaagcttcctcagcgtggaaggggaccccagctggctcggatggcctgcttttatttcttttttttttttctttttctgactatgtaagtatcacatttattattttaaaataagaaatgcacaaagatggcaaaataatttggaaattatttctaattctaccatgtataaattatcactgaatatttcggtaaacattcatccagagtttatattaatacamatacacacacacacacacacacacacacacaccacatcctgctgattggtccat

SEQ ID NO: 141212 - DNA, 545 bp, Homo sapiens
gtcaattcattaggtactacctatgattctgtagatctgtaacacaggccattctctgctcctccccctcccaaagaaaagacagttatttacatgtcctgcttgatattctgccctttagaaggattttgtttaattttttcttttctgttttttttctttctttcttttttttttttttttgagatggagtctccctctgtcgcccaggctggagtgcagtggggcaatcttggttcactgcaagctccacctcctgggttcacgccattctcctgcctcagcctccccagtggctgggactacaggtgcccgccaccacacccagctaatttttgtatttttagcagagatggggtttcaccatgttagctaggatggtcttgatctcytgagctcgtgatccacccgcctcggcctcccaaagtgcagggattaccagcgtgagccaccgcgcctggcctgtttaaatatttttttaagagacactcctgagtaggactgtaaccctgtgttttgttttttaaattagaaattaccctatg

SEQ ID NO: 141213 - DNA, 452 bp, Homo sapiens
tccatacactggttatacctgagaagcatctgagctgaactttaaattataggctacaacttgaaaatactgaaataaaataatttttgcaataacttcctttaaagccattgaaacatakacattcaaaatatgtttatataattcccataattttcttcccaaatttaactactctgttcatcttgtcacttttttatttagatatgcatcaatcaataaaataaagatagcagaaagtagggactgatctcatttgtctccacattctttgtacttggtgatgatctgggcacaaagaacaaatttgatacatattgactgaactaatgaataaataaaaacactcacatttactagatagaaatagactgtcatatctgataaagaagagagaagtaaaaaatatgagaaaactgtgagactatggtgagtcataaatcaaaataaga

SEQ ID NO: 141214 - DNA, 452 bp, Homo sapiens
tccatacactggttatacctgagaagcatctgagctgaactttaaattataggctacaacttgaaaatactgaaataaaataatttttgcaataacttcctttaaagccattgaaacatagacattcaaaatatgtttatataattcccataattttcttcccaaatttaactactctgttcatcttgtcacytttttatttagatatgcatcaatcaataaaataaagatagcagaaagtagggactgatctcatttgtctccacattctttgtacttggtgatgatctgggcacaaagaacaaatttgatacatattgactgaactaatgaataaataaaaacactcacatttactagatagaaatagactgtcatatctgataaagaagagagaagtaaaaaatatgagaaaactgtgagactatggtgagtcataaatcaaaataaga

SEQ ID NO: 141215 - DNA, 452 bp, Homo sapiens
tccatacactggttatacctgagaagcatctgagctgaactttaaattataggctacaacttgaaaatactgaaataaaataatttttgcaataacttcctttaaagccattgaaacatagacattcaaaatatgtttatataattcccataattttcttcccaaatttaactactctgttcatcttgtcacttttttatttagatatgcatcaatcaataaaataaagatagcagaaagtagggactgatctcatttrtctccacattctttgtacttggtgatgatctgggcacaaagaacaaatttgatacatattgactgaactaatgaataaataaaaacactcacatttactagatagaaatagactgtcatatctgataaagaagagagaagtaaaaaatatgagaaaactgtgagactatggtgagtcataaatcaaaataaga

SEQ ID NO: 141216 - DNA, 631 bp, Homo sapiens
ggctattctggtcttttgtggttccatacaaagtttagatatatatatattttttaatttgtgaagaattttattggtcttttgatagggattgcawtgaatctgtaacttgttttgggtgctatagacgttttaatgctttcgattcctctattctatgaacagaaaacattttcatttttttctgtcctgttcaatctttttcatccatattttgtagttttcattgtagatatatttctcgtatttgattcagtttattcttaggtattttattttatttgtagctgttgcaaatgggattacttccttttttaacatatggttcactgttggcatatagaaatgccactgatatttgtatgttgattttgtgtcctggaactactgaatgggtttatcagcttaaaacagtttttggtgaggttgttaggtttttctagatacaagatcatattttttgtaaataagaataattgactttattttctttataatttgaatgccctttacttctttcactcgtctaattgctctggctaggactactactatgatgttaagtaaaagttgtgaaagcacatatcctactcttcttccagatcttagaagaaaggctttcaatttgtac

SEQ ID NO: 141217 - DNA, 631 bp, Homo sapiens
ggctattctggtcttttgtggttccatacaaagtttagatatatatatattttttaatttgtgaagaattttattggtcttttgatagggattgcaatgaatctgtaacttgttttgggtgctatagacgttttaatgctttcgattcctctattctatgaacagaaaacattttcatttttttctgtcctgttcaatctttttcatccatattttgtagttttcattgtagatatatttctcgtatttgattcagtttattcttaggtattttattttatttgtagctgttgcaaatgggattacttccttttttaacatatggttcactgttggcatatagaaatgccactgatatttgtatgttgattttgtgtcctggaactactgaatgggtttatcagcttaaaacagtttttggtgaggttgttaggtttttctagatayaagatcatattttttgtaaataagaataattgactttattttctttataatttgaatgccctttacttctttcactcgtctaattgctctggctaggactactactatgatgttaagtaaaagttgtgaaagcacatatcctactcttcttccagatcttagaagaaaggctttcaatttgtac

SEQ ID NO: 141218 - DNA, 582 bp, Homo sapiens
ctacctgtgcctttatcagctaatctaaattggttgaatttataaatttgccatataagtactttggcttggttttttcatctcaggtactactctgttcagacgtaatctctatttctttataagaaaattatatataaggaaaagtcttaatatttatttgaaactgaacacttataattaagtgttcattttaattaagttaatttgaactttcaaaaaaactatgaatttattttaaaacaaaacttctgcctttatagaatgacagaaaaaacaaaagcatagtggctttcccaaatcacagcttattttaatacaccaaatttgataataaaacatggcagtgtgsctacacttaatacacatggcaatgtatattacacttgtaatataagtgaagatatattacaaatgatgttttctactttactatgtattttagagggtgagtataaaaattgatttatgattaacatcataagttctgtatcaattacaatcacatgtgtatggcataagaattaactttacaccgttactgagaggaaaataaattgttgataaaacaggtaatcactc

SEQ ID NO: 141219 - DNA, 366 bp, Homo sapiens
gagttttgtaatgaacacatgttctgatcctggtcacagcagtaggcaaagtgtcatagtaaataaagggcttaaggcaaaactttccaaagcacagtcctgtgttttttttaaagtgtttytaaattacaaaaaaaaaaaaaaatacaaaaagaaattaaaggcatacattgcatttctctgggggagctagaattaagcagccttgtacagttagacatgaaaatgtatggtgacattatgttttgtctgcactttactatttgcatttctagaacagctaacgtctaaatgttcaacaaaaattgatgtgtattgactttgattcacaattttagaaggaagaatgaagggaaaattgtcaat

SEQ ID NO: 141220 - DNA, 601 bp, Homo sapiens
aaaggagtagttggtttggctcccccatggtctccaggtctttcttcttctaaccctcctactgctcttgatcttcctgtcccttattttgtgagacatatggaggagacaagcatgatagggggtcccagggcttttcactgggcaagggctttttactagactttttttcttcctctttgagagggaacatgggggctaatttcttgatccagcagagatcataacttatcttctcttgtgaaaatggggttttattattcacataattaaagrttggcactcccaatcctcacctgagccaaacttaggccaaaagactgaaggcttatgaatggggtctttggaccagattaaatagcagtctttaccatcttttgcttctccgtgtccctgatttgagggttgtccctccaaacctgaaacattctccccaaaggactatctgggggaatgtcagagggagtctctttggctccctctttcctttatcccataggccttgaatttctgtttcccattttcagtcagtctctatgtctgagcttttccctgtgtattcaatccacactactggaggtttcttgcacaccccaagatt

SEQ ID NO: 141221 - DNA, 515 bp, Homo sapiens
taatctgaaactttatatggaaccacgaaagacccagaatagccaaagccattttgatcaaaaagaacaaaactggaaaaatcactttacctcacttcaaattatattgcagaaatatagtaaacaaaacagtatggtactggcataaacactctagacacatagaccaatgggacagaatagagtacctagaaataaatccatactattaatactccagggaactcattttcaacaaagttgcccaggacatacattggtaaaaggacagtgtcttcaataaatcatactgaggaaactggctgtccatatgcagacgartgaaatcagacccttatctcttgccatatacaaaagcaaaagaaaatggattaaagacttacatctatgacctcaggctttgaaactactaaaagaaaactttggggaagttctctgtgactttggtctggacaaagatatcttgagtaatacctcaaactcacaggtaaccacagcaaaaatggataaatgag

SEQ ID NO: 141222 - DNA, 515 bp, Homo sapiens
taatctgaaactttatatggaaccacgaaagacccagaatagccaaagccattttgatcaaaaagaacaaaactggaaaaatcactttacctcacttcaaattatattgcagaaatatagtaaacaaaacagtatggtactggcataaacactctagacacatagaccaatgggacagaatagagtacctagaaataaatccatactattaatactccagggaactcattttcaacaaagttgcccaggacatacattggtaaaaggacagtgtcttcaataaatcatactgaggaaactggctgtccatatgcagacgagtgaaatcagacccttatctcttgccatatacaaaagcaaaagaaaatggattaaagacttacatctatgacctcaggctttgaaactactaaaagaaaactttggggaagttctctgygactttggtctggacaaagatatcttgagtaatacctcaaactcacaggtaaccacagcaaaaatggataaatgag

SEQ ID NO: 141223 - DNA, 601 bp, Homo sapiens
gtactaacttgttaaaaagcaccttttccacaagcaaaaaatacccccacttaattaaataaactagttttttcctttctttgtgacatagacatgcagagcagtcccaggccctagtgcaaatcacacaacatcatcaggacccgtgtctcctccatcatgttgttctgccatccttagcatgtgaacacttattagataccttctgttttgccattcttagcatgtgaacatttacaaggtcacctcatggtccaggacagtttccagagctcagctatctcatctgtattttaaggaggaagaagtgaaaatgaagaaartcagagaagattactcccagctgaaccatctgtctttgaaaagctttgaaaagcactcccagaatccctcaagaatctctccttgcatctcattccctatgcctagctatgagggaggctgggagttttgaaataaaatcaggtctctcagttaagggagaaaagtagatggatatagagtgggcaggcaactgtagctagcagtctgccatagaaggtagcaattaaagtaatgaaaagaaagtagttaaatttatagaatatattatgagagcaag

SEQ ID NO: 141224 - DNA, 601 bp, Homo sapiens
gtactaacttgttaaaaagcaccttttccacaagcaaaaaatacccccacttaattaaataaactagttttttcctttctttgtgacatagacatgcagagcagtcccaggccctagtgcaaatcacacaacatcatcaggacccgtgtctcctccatcatgttgttctgccatccttagcatgtgaacacttattagataccttctgttttgccattcttagcatgtgaacatttacaaggtcacctcatggtccaggacagtttccagagctcagctatctcatctgtattttaaggaggaagaagtgaaaatgaagaaagtcagagaagattactcccagctgaaccatctgtctttgaaaagctttgaaaagcactcccagaatccctcaagaatctctccttgcatctcattccctatgcctagctatgagggaggctgggagttttgaaataaaatcaggtctctcagttaagggagaaaagtagatggatatagagtgggcaggcaactgtagctagcagtctgccayagaaggtagcaattaaagtaatgaaaagaaagtagttaaatttatagaatatattatgagagcaag

SEQ ID NO: 141225 - DNA, 456 bp, Homo sapiens
aatctgattctttgagattgaaacagggattactgtacacagaaaaacaatgctccactaaaaaaaaaaaaaagacagagagagaacattgggcaaacaattttcttgtcgttctttttaagggggatatgaagccttctggccgttaaacaataggtggtagcaggttaaaactaaagccctggccagggtatgttaagaatagaaaaacagaaggaggccaaacttaaaagaatttggggatggtgatcttaggtgaactttttaaaactaaaaggtgaaccgacagagcaacaawgtcatatttaacaccaccatatgagttcaagcaagttagtgagtaatataggggcctgtcagaattgactaaacatctttctagactctttggggcataattactatttacatacagagcataccagtcaagttcagaggctttatgtcaggtagtat

SEQ ID NO: 141226 - DNA, 456 bp, Homo sapiens
aatctgattctttgagattgaaacagggattactgtacacagaaaaacaatgctccactaaaaaaaaaaaaaagacagagagagaacattgggcaaacaattttcttgtcgttctttttaagggggatatgaagccttctggccgttaaacaataggtggtagcaggttaaaactaaagccctggccagggtatgttaagaatagaaaaacagaaggaggccaaacttaaaagaatttggggatggtgatcttaggtgaactttttaaaactaaaaggtgaaccgacagagcaacaatgtcatatttaacaccaccatatgagttcargcaagttagtgagtaatataggggcctgtcagaattgactaaacatctttctagactctttggggcataattactatttacatacagagcataccagtcaagttcagaggctttatgtcaggtagtat

SEQ ID NO: 141227 - DNA, 456 bp, Homo sapiens
aatctgattctttgagattgaaacagggattactgtacacagaaaaacaatgctccactaaaaaaaaaaaaaagacagagagagaacattgggcaaacaattttcttgtcgttctttttaagggggatatgaagccttctggccgttaaacaataggtggtagcaggttaaaactaaagccctggccagggtatgttaagaatagaaaaacagaaggaggccaaacttaaaagaatttggggatggtgatcttaggtgaactttttaaaactaaaaggtgaaccgacagagcaacaatgtcatatttaacaccaccatatgagttcaagcaagttagtgagtaatataggggcctgtcagaattgactaaacatctttctagactctttggggcataattactatttacatacagagcataccagtcargttcagaggctttatgtcaggtagtat

SEQ ID NO: 141228 - DNA, 417 bp, Homo sapiens
ttagagcatgggctttcaaggagaaaagccataatttattaatcttggcatcttaaaatctgacaagaagctcataatgaatatttgttgaatacatgaattcctatgttttgccacctgttattaatttttttggtggtgtaggtttcaagaaccacttcaagctagtttaagcaaataaataaagaaagagagggagggktggggaggggtgaatggagggaatgaggaagaaagaagagaaaaagaaagaaatttgcaagaaggacactgggaaaattcattgactagaacttaagtacataactagaactagcaattgtaaagctagcagttattcagagcatttcactcttatgtcctccttttctcatccccctccttctttccccttctcctcctcctcatcttcctcct

SEQ ID NO: 141229 - DNA, 303 bp, Homo sapiens
gtaagttcagggaagacacacttgataagccggatcccttarccttcttccaaaactccaaacaagtttttagtactgaaaactcttaccataaaacactcttgtgtgtagcttttttttttgttaggtgacatttcaagaatagattagaaattaaacatacttatttctaagactgtgctataaaaagcatcaatgatatcctctgagaattgtttacttatttttaaagaaaccacttccaactcagtgagaaaagatataaattttaattgtaatccacatgcaaagagaaagagaata

SEQ ID NO: 141230 - DNA, 608 bp, Homo sapiens
tggtctgacttcctagggggtgcttcttttttctgatacctccaatagcctgaagctgggcaatgggtcaatgaagacagtgttcttagcctacacaaagccacttatctgtacacaggatgcttttctgctggaacttggagtaagtgtttaaaaaacattaatgagtgattcttggatactatctctgaatgagaataaatctatgccctgttttatctcctttctttaaattctcttttttattatttattttcttccttctctcattattttctttatctctcattattcttctttctccttttcttggagatatttcatgctattagagctttcatttcaaaagtctgtattcaatgacaagtgaaagagagcagtacttgttttcattttatcaccaatgctgtatgttctgccatgttttaacacatcaaagcaatgcatatacaaagtcagaatttgtatgrtgtaaatacaagttaattctgtaatttgcttacacattagatagtcatttcactgatatattaactcatgcaattgcatcatttttagctaagcttcataaatgcatctgtcctgtgtatttactggttaaataaaat

SEQ ID NO: 141231 - DNA, 423 bp, Homo sapiens
ccctttatttgctaataaaatatagaagcaaaacttccttatcagatatggaggatttctcaacatcttctgaaataattttcaaagtacaatattcaaacattaaagagaagtttactgaatytattgcttcctaaatatactttgcctccagtctgttgagaagttaggcaaagtggggatgaggtaaaaatgacccaagacaaacttattcactcattcagcaatatgattattaaacacattatgtatgaagtatgactttagatcagatgccttaacttcctggagaggcctggccaggtaagaagtcctaaagcctaagcctcattcatataattttcaatttgcttccgtcttactcttgttatagggagtggtctcttggggagctggagtcacttttatggtccagtagtgatc

SEQ ID NO: 141232 - DNA, 578 bp, Homo sapiens
actgttttcagtattgctaagtaagcttctatcagacttactgtcaggaataaccactgcaaattctagaaaacatccataatcagctacttgaagtcattagagaaaggacaagcagcaaagtctagaaggagagtcaatacttcaatggaggtagaacatggtgtaagttttctgtttttaagctttttacatgaagaacagcatatagttgatcctatgcatggtggataaaatgccaataggaaacatatagtctttctgagatgagaaatcagagaacagagtgcaaggcaatgacagtctctgaaattgggagggagggcagcaataaaaaatatgcagagaaaggtgccctaatttttatgtakaatctctgcacaaatctctgactgatcttgatcacacaaacacatggcagacacaaaatgatgtaactgatataagagaactgaactgaaatttcaattgcagcccaagagaaacaacttgctgtttttatctagtcaagataattatctgcttaaaaaataataaatcaatcagcattcttcagagagacataaaagaattcagaa

SEQ ID NO: 141233 - DNA, 585 bp, Homo sapiens
atgttttattgtataattgactatcctgctctctcttaattttcttagcatacagtggtaaaaaatagatgacgcacatggatccacaaagacctcacatactcccttaaccaagtcacgggagatacaaaagaacttcagtatcgaagcaattcttgtcagacttgctacacaccttttcacctataaccaaaatacaaaccatgactatctcattctttctttctcaaatccagtcccagacttcttccaaagtacaactacctagattacagttgctcaacctctgatacsttgttacctcctttgcttgagttattctgtttctctgcaatatcttgctgacctgtgcaacattctactgaatttactgtaagaagttattctttttctgttaacataaacttacacagtttcctttttcaatacaatagatttccattccaattaataaccacctaatatttcactattatttttcccatagtttctacatgtctccttcatagcaactatcacagcctatatggtacttttgttcttgtttgttgacacataataaaatgtacatatttatggggtata

SEQ ID NO: 141234 - DNA, 604 bp, Homo sapiens
tacaagtagaaataaggcaaaaaataatgaaaacccactattggagaaaaaaataaaaagaatagcttttcttcattctttattttttagcccctgaaaagaaattcttcatttttttaacatctcattttgtattaagaaatagcagytaaacaaatttctatagtgtcattgttgcctatagagcttcactatttccttattatagtggtcatcatatataaatatacatggttttgtctacttgtagaccactatgtttcttatccaattttccttcaggctacataataggttctagtgacttttccttctacattttaatgtgttttctttctaagcatttagaaagtagttacctcatctctactactgcaggccacaaaaggttacactcagaagaaaaaaatgatctatatttgtgccattaagggacaaaaaaacattttgaaggaccatttgccagcacccacttaaaattttaaatgcacaaactctatgtccctgtaattttacttgatatctaccctagaaaaaaatttatatatatacaaggaggcatgttttaagaatgttcatagcagcactttttgcaataacagat

SEQ ID NO: 141235 - DNA, 482 bp, Homo sapiens
agtggaaggagcagacaggcatcaagcccaccagtatgcatgggctagttcaaagaaacctcagacagtgatgtgccgtctgtattgggatgtgtccacacatccacccagccacctatggccacctatgtgaggaaagtcctatttgtcattaacctttttcctacaatgccctaccctttttgttttttttttttttttttttttgaaaawcttgtcttctaacacgactgagttcacacctcttctctgatgattccctttcccattcttccttagcattttgagctcacttctgtagcacctaaaacattgcataatggtcttttgcagccttttccaatggttaaactgtatacttataattagtagggactgtattttattcatatttctatccttagcacttatttcttagaaagtgttcagtaagtgtatgtgtggagtgagtaaataagtgaatcctggaatccatgaagggc

SEQ ID NO: 141236 - DNA, 509 bp, Homo sapiens
gccaagtgagacagattcaggcaggtcaagcatcttagtgctctgctgcgaaatattggggaaaacctttgtgctacatcaaaaattatggacactaaaattgcttctggtctcttccgtgaggatagagaatgaatataaaaaatttccagatgcatagttcaaaatacacctactattttagttattgaacaagttcattcaatattaaaaattaaggaaaaacaacctggtattatatttagccaacagcaataactcaagattaaataagccagttgtttcaatgcatggagrtttcttaatatgtttagtttttcttatatgcacataaacaaatatcttatttctgaaaaccatgaatcaagtctcacaattcaattttaaaaggcattaataaataaacatttttaaagatataatataacctaagatggcaagcatcatctccctttatgtttttaaatataataacaataaagggagtcatctgaaaaggaattcactgt

SEQ ID NO: 141237 - DNA, 486 bp, Homo sapiens
aaataaaaaaataaataaataaataaayaaagtgtgtgtgggtgcgttttaattaattgacaaagaacaaaagtaaattcttcctggacattcacccatcattcttgtgttcattaatttttattgcttcacagaggcaaattgtagaattgttattggaagcatttgtattgggcatgctaatgctagaggtagcccttcacttaaaattaaccacctaacagatttccttctgaagaccaaagagacgcagcaagaggaaaacagtcaaagcaaagaagctggctcgggtctgagctgtgtaattccgcccttgaccacccgtgtcattgcagcccacagatccttgaatggtgcttgccagaaatctgcattgaggtgctgagctgactcccacggctttttaagagtctctgaaggggagcaaaatcgagattaatatgcgttgaaaaataaaatgcccttaccacatttttgtctgacctt

SEQ ID NO: 141238 - DNA, 486 bp, Homo sapiens
aaataaaaaaataaataaataaataaataaagtgtgtgtgggtgcgttttaattaattgacaaagaacaaaagtaaattcttcctggacattcacccatcattcttgtgttcattaatttttattgcttcacagaggcaaattgtagaattgttattggaagcatttgtattgggcatgctaatgctagaggtagcccttcacttaaaattaaccacctaacagatttccttcygaagaccaaagagacgcagcaagaggaaaacagtcaaagcaaagaagctggctcgggtctgagctgtgtaattccgcccttgaccacccgtgtcattgcagcccacagatccttgaatggtgcttgccagaaatctgcattgaggtgctgagctgactcccacggctttttaagagtctctgaaggggagcaaaatcgagattaatatgcgttgaaaaataaaatgcccttaccacatttttgtctgacctt

SEQ ID NO: 141239 - DNA, 574 bp, Homo sapiens
acccgtgctgcaggccagaccaccatcacctctcactggaccctgctacgaccacctccctgatctttctgcccttgggctcgctccatgcagccccttctccacacagcagcagccagaggcagtttctggagcccacagctgaatgcgttgttctccttgctcaggcagagaagaggacagatggggttttggtctcctgtgtgtagccagagggactgccttgcccttcgccatctccagtagttcctgagaccacagctgctgatggcaaatgcccccagtcccagccatgccccagccccctgcattgagagacccagctccacccagagggcagctgcagcctccttcatccacagccactgctgtgaccaagagggacattgtcctggaaggccagtggagcctttctgaggccttcacaggcccaatgtccaccctggtcatgacacgtayaataacacagctcttgcattaaatactatttactgcagcagaatttttttttaagtttgttataattttgaattttgtgaagagtaattattcattttggtttttaacttgaatt

SEQ ID NO: 141240 - DNA, 574 bp, Homo sapiens
acccgtgctgcaggccagaccaccatcacctctcactggaccctgctacgaccacctccctgatctttctgcccttgggctcgctccatgcagccccttctccacacagcagcagccagaggcagtttctggagcccacagctgaatgcgttgttctccttgctcaggcagagaagaggacagatggggttttggtctcctgtgtgtagccagagggactgccttgcccttcgccatctccagtagttcctgagaccacagctgctgatggcaaatgcccccagtcccagccatgccccagccccctgcattgagagacccagctccacccagagggcagctgcagcctccttcatccacagccactgctgtgaccaagagggacattgtcctggaaggccagtggagcctttctgaggccttcacaggcccaatgtccaccctggtcatgacacgtataataacacagytcttgcattaaatactatttactgcagcagaatttttttttaagtttgttataattttgaattttgtgaagagtaattattcattttggtttttaacttgaatt

SEQ ID NO: 141241 - DNA, 406 bp, Homo sapiens
ggctggccctctaccaacaccattggtgcccgaggaccatccatctggtgtcctcttccccagaaaagactcaccatagcctccatttacaactgcagcctaagccactgagaaacttacagacaccactgaaactgattacagtgaataaatcatacagagatgatactactgtgcccacccagaatcaaagccaaagcatcctaccccaccaataatatagatacatctacaggaaaaagtccctacaaaaaccaatccataaaactggaagaagtaacttttacactaaatgcacagatatgaatgtaggacacaagaatcaytaaaaaaaagaagagatgatgactccaaagggataaaataattctccagtaacagatcccaaaggaaaaaaaaatgaaat

SEQ ID NO: 141242 - DNA, 422 bp, Homo sapiens
gggctcaactgatgctttgtgtacgtgcttccttccctccttggctctgctttatgcagtacggaattcatggtaaaggaagtgaaagtagtgagcttagcaacctcaacaggaagaatatactccttctcaggtgctcacagactaatagagaagatgggttaaatctaataacagaaacatgttcagggtcaaatgagacctgagatgattagaaacctactcaacctggagaattcagagagggatactgagggttgaggtaaaaggatcaggagaagctttccagagyaggtaatgtcagacctgggtcttaaagaacgactgtgagtttgctaaggaagaatatccaagcagaagtcaccttgtatgcccgcttagacagcaacttcgttaataatgaaaataaaaattggaaaagt

SEQ ID NO: 141243 - DNA, 615 bp, Homo sapiens
caagttggtacatttggatgttcatcacattggagttgttcaatgggaagtgagacagaaagttcagttctgtttaaaatttgatttcatacttaggtttgttgcatagatgaatgttggagaaacagttggaatatgtacctggcatatagtaaccagctgaaaaatgctgcttcacattatttttttttctgtcttatttttctggttgcaaatgtttaatctccatgtaattaatattggtgttataaaattatataatattggcctgagaagataataaccaatgtcagagccctttatataaggaactaataaaagtagtaattataaaaatgataataaagtaatatttgtcaagggaatgtgctagtactgtgaaaaattctttacatgctgatttcattgaatactgacctcaaccatatgagataagttctataatccttccattttagaggtgagaaaaccaatatgtagaaggcatacataatttttccaaggttacaaatatagtaaatattgtaacttgtaagcaaatccaggtttatgcccactctmgcctccaagctcttatctccaatgatgttatgcctcctcttatcattgtttact

SEQ ID NO: 141244 - DNA, 397 bp, Homo sapiens
attgattccttgagaaagtttacatgctgaagtacatgaaagaaaaaccaagacagagcctagcaaacttcttgagttgaagagatgtatctgtcttgggagacataggtttctggagtttgcaggatgtaactgtaaaggaaagagctgcataaagatagaactctagaaacctacagagattcccccttgagtaatcagctgattacygatgagctcatgtgtgtgaagcctgggaaagagccactcaaaaggataagagatgaatatgttgccctcatgctgagctagaattagtgcttatcctgtcagactagaaaatctaatgattaatggagtactgaataaaatatacagaatggttttgccttagtattggggaataactagttctaga

SEQ ID NO: 141245 - DNA, 542 bp, Homo sapiens
tacttaggtgggaaaataactacatcttcatttcattcacctctaactgaaatttagcatttctttgaagtttgaatgtaagcaaaaaaccaaagtactattaacagtaactgtatcattgatggaaatcacaggtatttttatatcacattacaattattacaaacaccacaaaataatgtcatttaaacttattgccacttcaaaattataataattactaaacttgttgccagtcttgtttgatrcattaataaagatgtccacatattactataacataaattcttttaaaaatattttggaccaggcacggtagctcatgcctgtaatcccagcactttgggggccgaggtgggtggatcactcgaggctgagattttgagaccagcctggccaacatggcaaaaccccgtctctacagaaaatataaaaatttgctgggcgtggtggcaagtgcctgtaatctcagatacttggaaggttgaggcagaagaatagcttgaacccaggagtcagaggttgcagtgagccaagaccac

SEQ ID NO: 141246 - DNA, 564 bp, Homo sapiens
ttgtaggcaatggatcattgggtcttgttttttaatccattcagccactctatttcttttaattacaaaatttagtccatttacattcaatcttattattgctaaataaggacttactcttgctattttgttacttttttttctggttgttttgtggtctttattgttttcttccttcytgtcttcctttagtgatggggattttctctggtggcatgatttaatttcttactttttaatgttttgtgcatccattgtggtgcacatccattgtggtgcacattttttatttgagattactatgaggcttgcaaatattatcttacaacccattattttaaacagatgacaataacactgattgcaaaataaaacaaacaaaaaaaggaaaactaaataaaactctatactttggtagttgagaaaaaatggtggataggaggcaggactaatttgtagttcccactcagattgacagagcagcatgtgggcactcacattgtgaacttttgctctaagaactaccacagcaacataccaggaaagccaagagaattcacagac

SEQ ID NO: 141247 - DNA, 589 bp, Homo sapiens
accctacaatctagaagggattggggtcctatctttagcctccttaagcaaaacaattatctgccaagaattttgtmtccagctgataaagacttcagctgaattaaatttaaatgaatttaattgagcaatgaacaatttgtgaattgggcagccccccagaatcacagctgattcacagagactccaggggtgcctcattgtcagaaaaaaattatagccaaaaaagttagagtgacgtacaggaatcagaagtgaggcacagaaacagtgagattggttacagcttggtgtttggcttatttgaatgcagtttgaacattcagcagtctatgagtggttgaagtatggcctctgggattggccagcactcagctattgttacaggtgcatactattaagttaggttttcaattttgtctattaagctaggttacagtccatccacaaggactcaaatatataagtatggagtctttctcaggccatatttaatttgctttaacacagcaaaactaagcttcttaaatgaaggaaacatatagtattttacagacaaacaaatgctgagagaatttgctactaccaa

SEQ ID NO: 141248 - DNA, 482 bp, Homo sapiens
atagcacttattcagctatgttcagtaatatttcaattactatttggtcctcatgcagaatcttatgggtgaaatgatcattggttcacatgatttggaaatagctgggtcactgaccataataggactgaaagctcactctcaaactgyattacaaatatgtaatagcatctactatgtttccaggaatgatgctggatgccaatgatttaataaaaaccagagttcttcttcttaatgaaattagaaagtaagaaagacatgaaaatagataatcaaaatttggaatttggttgttctattataagggagtatgaagatttgcagaaacacagaaaacaattcagttttcctggaagaatcaaagatggtatcaaagaggcaacatttgaactgagtcataaaggatgagttctaataacagctttattgtagaacactctagaaaacataaagtatttccagatccatcctcttagcat

SEQ ID NO: 141249 - DNA, 514 bp, Homo sapiens
tattaattctcaataactttgttcatgtgaataaatgaatgaatttgtattgctatatctatacacctcaaacttcaaattgatttcaagagtttctcagtaaatcttttaagcaatttgtcaagtctattttctcctgcctgacctgaaaaaaagtcccttaagaagcttccctctgcttttagatatttttactctacttgcctgttggcagttaatttcttcctttcttgctatctcaataataataaaataattcttatgtctcttttcaaatttcccatgcttcccaattctcctgcttttcaaataactaaattcctttcaaaattgcttcttgmtctgcttttatgagcatacctctgcactggccacccctgccttagataaaggtagtctattgtgactcagtaaatatgtttatgttcctaaaatcaaacatgctttattaatatacctgccaaaagcagacctgtaagagcaaattcatttggaaaaataatgttttcatttt

SEQ ID NO: 141250 - DNA, 647 bp, Homo sapiens
taaatcctcctattctgctttcttaaaaagtgtgactatcttgtcaccatcatcttagaacaccctattatgccttaattggattacttaattgtgtctcagccttttcttctgtaagtttaaatgcctccgtggatctctagcttcctcgaagagacttattttgcagaaatgttcccaggtattagaaaatcataatggtaaatcaagcaatataccctaattcaaattattatcatcttagtaccaaggaataagttactttcttccttaaatattaaaacttattaagtcttagaaaggaaaaagggaggaataatccttaatttttacaaaattttaatgattctaaagaccctgggaagcagcccctattcccttcctcccacccttcccaattttccaattyatcacttgaattaacctcctaagcactagagccatcagatagctgaggcactatctggtccatcagtggagcccagccagtctgatgaggcaacaccaagcagtgagctcggggcctcagctgtgtgagctttgataagctgagtgagagcctcatgcatacactgcaagcaattgaaactgcaaaagggcttctctctcctcattcctctttcttattcctccaaagttgaataaaa

SEQ ID NO: 141251 - DNA, 652 bp, Homo sapiens
gtagagagtagaatagtggttaccaggggcaggaagggaagtgggcaggaaagtaaagagaagttgactaaggggtacaaaaacacagttgtgtaaaaggaataagttccaatacttgacagtacaacagggaaattatagttaataataatttattgcatatatcaaaatagctaaaagaggagaattataatattcccaacataaagaaaagataaatgtgtgaggtgatgcacagcctaattacctatttgatcattacacatcgtatacatgtatgaaagtatcacaagtactcttaaaacatgtccaactgttacatacgaataaaaaataaacaaccaaaaaagaataaagaagaaaaacattaccatagggaaaaaagacttattataaaaaggaaatgtaaaacaattgtcttcaacaagattccagagaacattttatcmacaaaacagaaatacgctgctatgcctgaaggaagcactaaatatggaaaggaacaaccggtaccagccactgcaaaaacatgccaaattgtgaagaccatcgaggctaggaagaaactgcatcaacaagcaaaataaccagctaacatcacaatgacaggctcaaattcacacataacaatattaaccttaaatgtaaatgg

SEQ ID NO: 141252 - DNA, 508 bp, Homo sapiens
tctctgccaacctaatacaatgctattattaaaatcaaacttaaaacaaggttatattttcactattgagctgctttcgcactcaggtagtggaatacgtggttctcaggtaggacatacttttattaaagagtcacactgctctttacaaatattaactcattaatttgcacaggcatccctctgtggctcctagaaactattatttttctcagtttataaggagaggaggagaaacaatggcacattttcctaagttcgcattgcaaagaggaagacagggagaagataggaacagtcacatagcccttctaacatctcattagagcaacagcattacttctcgttttgagtttgtcacaatcyaaaaagctttcccagatcatatttcaacattcactaatatacaatcttggatgaatgaattcacgtctataaactgaagtttcttcatgtgtaaaatggtgtaaatgatacatattttattaggattgcttaaagaacctaa

SEQ ID NO: 141253 - DNA, 515 bp, Homo sapiens
ctgaaagtttctttcagtttgaataccctgatgggaattagaacgttgaatttattccatctgaatgtccttctcagtcctgtgtttcagctrttcatactgacccactgtctttccttcctgttaagcagtaaggcagacagactagctctttttaagaactcgttagcttggtttgtatgtgtttgggtaagtcacaaatgtatttcaaatcttgatgatttgtggagaaggcatcaccaaccaggagagtagaatcagggaatcctgaaaggaaaggttcattacttgtcccataacatctttcattattttacttaacaaacaatgaacaatatattataaacataaagaaaaaatattaaactttgaacccttctagtgactctcagctttttatgggagacatataagcaatatgacagtagactctgtgtaataatagatgagaagtcaactgtttcaaaggcaaagaagaaaagatcttgactatgtctggggactgctaaaaggct

SEQ ID NO: 141254 - DNA, 515 bp, Homo sapiens
ctgaaagtttctttcagtttgaataccctgatgggaattagaacgttgaatttattccatctgaatgtccttctcagtcctgtgtttcagctgttcatactgacccactgtctttccttcctgttaagcagtaaggcagacagactagctctttttaagaactcgttagcttggtttgtatgtgtttgggtaagtcacaaatgtatttcaaatcttgatgatttgtggagaaggcatcaccaaccaggagagtagaatcagggaatcctgaaaggaaaggttcattacttgtcccataacatctttcattattttacttaacaaacaatgaacaatatattataaacataaagaaaaawtattaaactttgaacccttctagtgactctcagctttttatgggagacatataagcaatatgacagtagactctgtgtaataatagatgagaagtcaactgtttcaaaggcaaagaagaaaagatcttgactatgtctggggactgctaaaaggct

SEQ ID NO: 141255 - DNA, 522 bp, Homo sapiens
ggtctcacattgggaagtagtatatgtaggactcagatccaggcttggtaaaaaaaggagggatgtaggtgtgtgatgctggctggtatattgataatagtccatagagcatctgtcagtgccatatgtcagcttcatagagcatcatgaagcttccaaacaaaaaggctaattgtttttttaagaagtgtaagtttattaggccagtgagagtatttgcaatgataattcaatagatggaatgagaaagagagtgasagagaacacacatgtgagagagagagtgagagagagaataaaaagtcttttcagtcttcatcaaccaccatctgactggcgtgaatttcaacacagtttataagggaataggcattaagagtttggaggatagaaccatccttgaaacagtacataagtaaaaagctcatatgattctatagagtcttctgaactgtctttgctcactggagttgtacctaacagtgacctcgaggctgttccacaggtcccaccacagacatc

SEQ ID NO: 141256 - DNA, 522 bp, Homo sapiens
ggtctcacattgggaagtagtatatgtaggactcagatccaggcttggtaaaaaaaggagggatgtaggtgtgtgatgctggctggtatattgataatagtccatagagcatctgtcagtgccatatgtcagcttcatagagcatcatgaagcttccaaacaaaaaggctaattgtttttttaagaagtgtaagtttattaggccagtgagagtatttgcaatgataattcaatagatggaatgagaaagagagtgagagagaacacacatgtgagagagagagtgagagagagaakaaaaagtcttttcagtcttcatcaaccaccatctgactggcgtgaatttcaacacagtttataagggaataggcattaagagtttggaggatagaaccatccttgaaacagtacataagtaaaaagctcatatgattctatagagtcttctgaactgtctttgctcactggagttgtacctaacagtgacctcgaggctgttccacaggtcccaccacagacatc

SEQ ID NO: 141257 - DNA, 495 bp, Homo sapiens
gaaagaatagaggtctaactaaaaatcctatccagtgaaaaaatttctgatgaaattgtccctgcactgacttgattcaattgtattcaacatttcccatgttttgccttaatgttaaagttrctcataaagtttttgtagaacatacaaatgtatttcatattaatttctcttctattcagtcaggtccacttattgaagaatttttatctctaatatcttccaatctattgccttctttcagtccccagtgctttagttcgagccctttagtttcttatctagacaattttaatagccttccaactaatttccttaacacccgcatggcctctctccaccttgtccttccactgctgcccaagtgattattctaaaaccgaaagcttgttaaatcactttcagcttaaaatcactaagtggctcctaatagctttagcaaatatctaatagctaacaaaaacatcctttattggggccgacctatgtggtaga

SEQ ID NO: 141258 - DNA, 495 bp, Homo sapiens
gaaagaatagaggtctaactaaaaatcctatccagtgaaaaaatttctgatgaaattgtccctgcactgacttgattcaattgtattcaacatttcccatgttttgccttaatgttaaagttactcataaagtttttgtagaacatacamatgtatttcatattaatttctcttctattcagtcaggtccacttattgaagaatttttatctctaatatcttccaatctattgccttctttcagtccccagtgctttagttcgagccctttagtttcttatctagacaattttaatagccttccaactaatttccttaacacccgcatggcctctctccaccttgtccttccactgctgcccaagtgattattctaaaaccgaaagcttgttaaatcactttcagcttaaaatcactaagtggctcctaatagctttagcaaatatctaatagctaacaaaaacatcctttattggggccgacctatgtggtaga

SEQ ID NO: 141259 - DNA, 448 bp, Homo sapiens
ttcagcgtacttgggggccattttaagyagtaaaatcaccaccaaaaaacactcaacacacacacacgtgcacatgcacacccacgtgcacatgcacacgcacaaacacacacacaagtgaaaaaaaggcactaaacagaccacaaagggatacttattttcaatttaagaactggatcaaagaggcacctcaggtgggaatgctcatgtgctcaggcaactcacattttttaccaatccgagtgtgtccacagatgactatgaaaacatggcaagttttgggaagtacaaacacttcccaagctgggaagtacatctattgatgatcccaagttttgggaagaatggatagattttagcaagtaggagagtatgcaaataatgggattcgcaaataatgggattcgcaaatattgggattcacaaataattagaattgactacaatt

SEQ ID NO: 141260 - DNA, 453 bp, Homo sapiens
acttgggggccattttaagcagtaaaatcaccaccaaaaaacactcaacacacacacacgtgcacatgcacacccacgtgcacatgcacacgcacamacacacacacaagtgaaaaaaaggcactaaacagaccacaaagggatacttattttcaatttaagaactggatcaaagaggcacctcaggtgggaatgctcatgtgctcaggcaactcacattttttaccaatccgagtgtgtccacagatgactatgaaaacatggcaagttttgggaagtacaaacacttcccaagctgggaagtacatctattgatgatcccaagttttgggaagaatggatagattttagcaagtaggagagtatgcaaataatgggattcgcaaataatgggattcgcaaatattgggattcacaaataattagaattgactacaatttgtaatttagact

SEQ ID NO: 141261 - DNA, 442 bp, Homo sapiens
gtacttgggggccattttaagcagtaaaatcaccaccaaaaaacactcaacacacacacacgtgcacatgcacacccacgtgcacatgcacacgcacaaacacacacacaagtgaaaaaaaggcactaaacagaccacaaagggatacttattttcaatttaagaactggatcaaagaggcacctcaggtgggaatgctcatgtgctcaggcaactcacattttttaccaatccgagtgtgtccacagatgactatgaaaacatggcaagttttgggaagtacaaacacttcccaagctgggaagtacatctattgatgatcccaagttttgggaagaatggatagattttagcaagtaggagagtatgcaaataatgggattcgcaaataatgggattcgcaaatawtgggattcacaaataattagaattgactacaatt

SEQ ID NO: 141262 - DNA, 594 bp, Homo sapiens
tgtagtgaattagtaaccgattctagactagaaaaatcytcacactattagttcagttcttcttcctctaaacaacatcattcctgacagctagttttttcattaattcattccacacacacattgttatttcttttctacagtggaaaggctagatagagcttcctgaaagacgtgaaacccactctgggtcttcaaaaaatgcagacaggtcataataatccccatgataataaaggcatagggtgatataccagatagagggaacaaatgtgcaaaggcttggagtacgagattgcctggcaacttgcgtaggccacaggagggcagagtgaaaggtgaggcccaggaagcaggaggggctaaatcatcaagggtcttggatgctttgcaatggaattttgataaagagctcttgaaatttttcagtagggagtcgtggggtagatgggtgtgttaactgattacactttatttagagatatcactacggtagcagtgcagaggacaggcaaagaaatcagatagaagatggttatagtaactgaaacaagagatcataaacacagtataaatctcaccctcattattcat

SEQ ID NO: 141263 - DNA, 629 bp, Homo sapiens
cactacggtagcagtgcagaggacaggcaaagaaatcagatagaagatggttatagtaactgaaacaagagatcataaacacagtataaatctcaccctcattattcatgttcttccaaagaaagtgtgggcatcagccagatgaaccacaacaatgcaagtccacagatccttagcccatgaatgagcttcaggaatacctaagccccaaaagtgaaacacatctggtacatacgagtatttgtatttctgatgagagagatcggtatcatattctcaaaggaacaagacatccacattttaaacaactactgcactaaaagcctgaaagagttgaggcagtttccccagtgcctattcccacctaggaaaaccagccttcctggataattgcctcaggccttctacatagaagaaaaattgttttttgagacacatatcttttggctaaaattgatgtagyagatttgtaactctgcagaagcagtagtaattatcataagtctcccggaagaatttgagcagtaattcataaaattttagagatacagtctgttggtgatagaggtgaagaagtgttgaaaaatgcacatttggttggcaccccttgatataatcaggagttgctg

SEQ ID NO: 141264 - DNA, 631 bp, Homo sapiens
agcctcatttcagggtcctcattccttttcatgttctattgccttattaggcttatttcacccaattatctggttttatagaccatctataacccaagacattgcattttcctcttcagcttttttctgagctccagattccgatttccagttgtttatgtgacatatccccttggatcctgtggattatagatacaatccctttaatatctacctccatcactaaccacagaaactacctgagtttcaatgttaagactatttggaccattgaagatttccatgcgggaagacagctaaaagcagtgtgcatttctgagagtaaataacaatggctttgatagaaaaaaaaaaaggaagaacatttttcttctcagtgcaactctactattttccttcctccttctcataatgttcagctaggattctaatgaattttaaaaacaattaatggatcaagcaataatggaacctctcgtcrtgtttatatcttttgcatttggagaacatattgggaaagttgagaacaaatgcctccctgacaaaatacagggacacagatgcagaacatattgcagacatcacccccacccccatcgagagagagagagagagagagagagagaacagg

SEQ ID NO: 141265 - DNA, 616 bp, Homo sapiens
atagataaggttttcttgaaactcagccacacttatttgtttatgtagtgtctaaagctgcttttgtgccacaatggcagagttaagtggctgcaaaagagagcacatagcttgcaaagactaaaatatttatttaccaccttgtccttttcagaagtagtttgctgacttctcatatacatggtcaaattagatgagctcagggcccattcctggtgaggtaaaggcaacctgtaacacagcacaaggaacaaagcttcaagggagaaaagaatttagaagaaacctggtccagcctcctagcccatagaatgtcctgcaagagccatccagacatggggactaacaattccaagaatcctagctcattatcaaacaccttgactctacctattagagaaaaatgtttctaatgttgatctaaaacaatccttacccccatcccagcatgggcttttttacctataaatgttttcwacactgaaagggcattaatcacagtccttcttggtcaaacagtgcactcctaccccattccatgggttagcactttatgtctgaaggagctttaacattcattgtctaattctgccattaaaacatcttgccaggagca

SEQ ID NO: 141266 - DNA, 640 bp, Homo sapiens
caggacttggtgtcctttttagatacaggagtcaaagccttgtaactcaatgtcacaaaaactttaaaagcatacacagaaagatatacaaatgtagtaaccttaatttaaaagaaaaaaagtgttttggctgggtgtggtggctcacacctgtaatctcagcactttgagaggcctaggcaagcagatcacacgaggtcaggagtttgataccagcgtggccaamatggtgaaaccctgtctatactaaaaatacaaaaattagccagtgtggtggtgtgtacctgtaatcccagttactgtggaggctaaggcaggagaatcacttgaatccaggaggcagaggtttcagtgagccaagatcttgccattgcactccagcctgggtgacagaatgagattccatctcaaaaaataaataaataaaaataaaatttttaatctcagtttttttataagtaaactaaaactgaataataatggcacagaaatgatttcaataaaatgcaaaatctgttaggccagttaaaaaaggcaaaagaaaacatcttctgcagtgtacagaatattatgttggaagaaaacatttccttcagacaaacagaacctgaggaaaaaaacttacatgagctgaaaatga

SEQ ID NO: 141267 - DNA, 606 bp, Homo sapiens
tcaacaggtttgccagcaagcagggaaatgggacttcttcttaaagagaaaacttcccagtggaagatgggaagagatggaagcagagagtgagtctctctgccaccttgactgtggggagtccaggcaacagggcctgcacagtggaccattctatgaaaccatgaatccatagaggcaagctggagctagggaggaagtcagtcttggaggctagactacagcaaattcgttttccaggataagctctggaaggtgaaagagcctgtgagcctgggaatgacctagaaaaaggtaatttcagaaacctraattttgcaacctgttcttgtttctaatattttcctgtatgtctctgtttatgtctcacttgtaaatgaatgatccattctaaaatggatctcacttgtaaatgaatgatccattcattttgaaaaccctgacttgcctcagttgtgatcaagggagtttggagaataagatttatccctgatctgacgacaactctagtggtgctggccccttcctagaggccagccagacatgggaggcagggatcgatggacacacatcccacagggaagttgaaactcaggaaaaacggcc

SEQ ID NO: 141268 - DNA, 588 bp, Homo sapiens
atattgcaatggctgaaatcttgtaattgagttttaatgtacctcccatccacaatagagaaagcctgcaaatatgtttactgtcttaatctttgcaactcattttattgcctcttcagcctaacrataattctgaataaaaatctgaaattccatgtgttgaatcaaacatcacttacagaggacttatagggtgagtctctccacctgacaactgagttcatcatccctgccccaccagcccatattaactctagtcttatggtaaaattttcttccttttttcaaatgattcaaataaaattatgaccatagtgacttttttaaggtcaaagcagaaaggaaaaaactggaacaaaagcaaatggctggcagagaatcaagtgttcttggggcaatatgaaagaaataaagaaggtaaactgcacagctttaaattcccaaagaaattgagggagggcaaataaatacctgctgttgagaagcttttttcccaataaagtgagaaatctgttctctttaacctgatcccaacagggaaatatcacagaggctacttcaacagatggaaacattccacctgcctca

SEQ ID NO: 141269 - DNA, 588 bp, Homo sapiens
atattgcaatggctgaaatcttgtaattgagttttaatgtacctcccatccacaatagagaaagcctgcaaatatgtttactgtcttaatctttgcaactcattttattgcctcttcagcctaacaataattctgaataaaaatctgaaattccatgtgttgaatcaaacatcacttacagaggacttatagggtgagtctctccacctgacaactgagttcatcatccctgccccaccagcccatattaactctagtcttatggtaaaattttcttccttttttcaaatkattcaaataaaattatgaccatagtgacttttttaaggtcaaagcagaaaggaaaaaactggaacaaaagcaaatggctggcagagaatcaagtgttcttggggcaatatgaaagaaataaagaaggtaaactgcacagctttaaattcccaaagaaattgagggagggcaaataaatacctgctgttgagaagcttttttcccaataaagtgagaaatctgttctctttaacctgatcccaacagggaaatatcacagaggctacttcaacagatggaaacattccacctgcctca

SEQ ID NO: 141270 - DNA, 560 bp, Homo sapiens
tctattttttatgtcctttaaagcactaccacttttcaggagaagatgaactgaaagccctattttaataactggttagaagtaacctctctggaaagaacaaagctcattttctgaagacaatccctgcaccatgatagtgaaaatgatgggcaattcaggaaaataaaagctagcctagaaatcatatgcaacaaaccaaacagcttgtccacagcccattcctcagcaagtgggcagaataaacagacaggactgcagcggggaggacagctgtgtgtccctggcctgctttgggcagccaaatggstcactcaaaagctccaacttggaagctacaagttcagtgtactcagtttcaccaagtttaactgaaagaattggctagcacactgatctacaagtgaaaagacttaaagtttagtcttatctctgccaataattacctctgtgaccttgaaaaagtcatctaatgtccccagaaatcagataatcttcaagggccatctaactctaaccttctaagaataagtaaattctaacttgggttacagaagaaa

SEQ ID NO: 141271 - DNA, 580 bp, Homo sapiens
acacctgttcatgccctttacatacgttaactcctcttcttctcaataaccatataaggtaggtgttgtcattatgcccattgtttttagacagggcccaggaaggaagcctgtctcagaacacatggccaataagtggtttgggtgcccatgccctgactccttccctgctttcttgaccccagcactgtacctcctctttagcgcacaaggaaatgtattgagcagcttctgaatgtttggtttartccacttatttcccatcttttctcaggggtggtgggttgtgtttctgggtggaagaaagagcttaaaataaaaccagggaatcacattctggcattgtgtccatgggaatagaagacacttcttctaggcccttatggaaacacgcaagtgttctgtggagcccagaagctcaaggtaaaatcctcagtatgaacctgcaatctgtaatataggggtacatggagggaccactccacccctcaaagttccccgctccctcagaacttcttattttcttggctatacatccaactagaaattcaggttgacaactcttattgtcaaataccaa

SEQ ID NO: 141272 - DNA, 580 bp, Homo sapiens
acacctgttcatgccctttacatacgttaactcctcttcttctcaataaccatataaggtaggtgttgtcattatgcccattgtttttagacagggcccaggaaggaagcctgtctcagaacacatggccaataagtggtttgggtgcccatgccctgactccttccctgctttcttgaccccagcactgtacctcctctttagcgcacaaggaaatgtattgagcagcttctgaatgtttggtttaatccacttatttcccatcttttctcaggggtggtgggttgtgtttctgggtggaagaaagagcttaaaataaaaccagggaatcacattctggcattgtgtccatgggaatagaagacacttcttctaggcccttatggaaacacgcaagtgttctgtggagcccagaagctcaaggtaaaatcctcagtatgaacctgcartctgtaatataggggtacatggagggaccactccacccctcaaagttccccgctccctcagaacttcttattttcttggctatacatccaactagaaattcaggttgacaactcttattgtcaaataccaa

SEQ ID NO: 141273 - DNA, 558 bp, Homo sapiens
catcaccaataattctaaatgacaaatgtttcttctaacagtcccacaatatcaccccttaccacaaaatcttccttcagcttaatctcttccactctaggttcccacgccgcccctaatcccgctcaaagcagccctgagaaacatcgyccattatctctccataccatcccccaaaattttcaccgtcccaacattttaccactattttgttttatttttcttattaatataagaagacaggaatgtcaggcctctgagtccaagctaagccataatatcccctgtgacctgcacgtacacatccagatggccagttcctgccttaactgatgacattccaccacaaaagaagtgaaaatggcctgttcctgccttaactgatgacattatcctgtgaaattccttctcttggctcatcctggctcaaaagctcccctactgagcaccttgtgacccctacttctgcccgccagagaacaaccccgctttgactgtaatttccctttacctacccaaatcttataaaacagccccacccctgtctccccttgctga

SEQ ID NO: 141274 - DNA, 558 bp, Homo sapiens
catcaccaataattctaaatgacaaatgtttcttctaacagtcccacaatatcaccccttaccacaaaatcttccttcagcttaatctcttccactctaggttcccacgccgcccctaatcccgctcaaagcagccctgagaaacatcgcccattatctctccataccatcccccaaaattttcaccgtcccaacattttaccactattttgttttatttttcttattaatataagaagacaggaatgtcaggcctctgagtccaagctaagccataatatcccctgtgacctgcacgtacacatccagatggccagttcctgccttaactgatgacattccaccacaaaagaagtgaaaatggcctgttyctgccttaactgatgacattatcctgtgaaattccttctcttggctcatcctggctcaaaagctcccctactgagcaccttgtgacccctacttctgcccgccagagaacaaccccgctttgactgtaatttccctttacctacccaaatcttataaaacagccccacccctgtctccccttgctga

SEQ ID NO: 141275 - DNA, 590 bp, Homo sapiens
caggacaaacagcacctcctgtatgaaacatcctctgactaccctcaactctccatgacttcgctgtctttaggagctccctctacactgactttctgagttcagcactccagtatttaatgacaccctgtatggtaccatttatggtttcccattgaaataccatacttcccagagtggacatgtaaagatctgttacctgtatagcatcccttcctataagaaacagctcctccccattctaaagtaatttggcttcatctctgtggttgaagtggggctaatccccccatacctccttcmtagagtttgacagaagatgcagatttgactaatcagtagaattatcccccttcccaataagtggttctagaattgagtatcctaagttaggataatctctggaccattgtccaagagggttcaggaactgtagcaacagagtacacctgtggctgccagcagctgtgaaaaaagccaaggcaggcaaacagagatgagagacaagaagacgggaagagagagattatactgcttgataaccctggctccagccatgcctgaagctaaatacacccccctgaagttaa

SEQ ID NO: 141276 - DNA, 390 bp, Homo sapiens
ttttgttatatcatacacttgtacacattagttttaatatattttctgtctactgttacatccatttcttcctgtactcaaagtacctaatattttagrccacttgttattgactaaagttcatgagactctgtttatttttttcatatatatttttctatataattttaaaattgagtaatttctattagactgtcttcaagtttgctgatgttgctttgttgtcaccattctactattaaatccatcagatgatgttttattaaaatttcaaatactgtattttcagttattaaatttctatcattattttttacctttttttcttctgcttggctttcctgtttttttctccattgtgagccaatttctgttcacctcattgagcat

SEQ ID NO: 141277 - DNA, 631 bp, Homo sapiens
tttatgtccatggtaaggacccaaaaaatgactatttacctccttttacttctagtaccatccaaatcatgaatacctcactataacatactaaattctaatagagctatttataagcaacatatcttttcataaattataagcttttggaaacagggacaatgtctgattcttcttatcagtgaaatagaattgatatcaccattaatttcacaggattactgtgaggatttggtgcctggagcttagaggcaactcatagctgaggtaactcttggttctctccttctttctaccttatatcccgcagaacaccaacagtgttgtgtacttacttaagaacaatttaatgtatgcttcataaataaagttttgccttgtatccccttaatgtrtatgatgagcaaatagggcttagaatttaataggagttaattatataccagttacttttttttttgtcaccttcttttatgttcttaggttcttactgtcatttgttggtctaagtgtctgttcatcatgttccagattgtcatttattcctaactatgtttgctttttaatcaactttttattatgaaatttacatacgtaaaaattacaagaatagtacaatcaacatcatgta

SEQ ID NO: 141278 - DNA, 370 bp, Homo sapiens
gctataaatgaatcttttatattgctgaataaattctataacrtaactacatggtggattttgttttatgccctgtctccattctcttcattttgtttttcatacctctatcagaatatttgttctaaaacactgtttttagcattatatgctacattgatatagaactttagagtttaagaaaactgtttcatatgttacatactctacagttttctccctagtgcagtcttgtaaaataggtagagtaattgttattttctacagactcagaggctaagtgactgagctaggccaaacccaagtcttttgactctgttcctttcctgctcagaagctataataatgtttttaatgttttgtctaggtc

SEQ ID NO: 141279 - DNA, 540 bp, Homo sapiens
atatatgataaagatgtcataattaatcagtaaggaagaaacagatatatatggagttagaacagttatttttataagaagaatatatttttacctcacaaaaatttgacagattaactttttaaaagtrcaaactataaacaatgtctagaaaatgtgctgttaaataataacactttattttagctatagtagtcagaattattatggaatgcagaggttcaggtcactgtaaagaataaaacttaccaaaattattacttgtcatttctttttcccttctttatagatattcgaataccactaatgtggaaagactctgatcacttcagcaataaagaacgtatgtatgattttaatttgtaattgaaatgttttctttagtatgtagtgtatctgattattgagaaaaaagactgcttccttgctgaaataaattgatgtcatttgaaagaataagcagcatcttgaactgttttctgatttttaatataaatatgttgcagtcacttgatactaattaatatagtgcatatgtag

SEQ ID NO: 141280 - DNA, 540 bp, Homo sapiens
atatatgataaagatgtcataattaatcagtaaggaagaaacagatatatatggagttagaacagttatttttataagaagaatatatttttacctcacaaaaatttgacagattaactttttaaaagtacaaactataaacaatgtctagaaaatgtgctgttaaataataacactttattttagctatagtagtcagaattattatggaatgcagaggttcaggtcactgtaaagaataaaacttaccaaaattattacttgtcatttctttttcccttctttatagatattcgaataccactaatgtggaaagactctgatcacttcagcaataaagaacgtatgtatgattttaatttgtamttgaaatgttttctttagtatgtagtgtatctgattattgagaaaaaagactgcttccttgctgaaataaattgatgtcatttgaaagaataagcagcatcttgaactgttttctgatttttaatataaatatgttgcagtcacttgatactaattaatatagtgcatatgtag

SEQ ID NO: 141281 - DNA, 559 bp, Homo sapiens
ccagcctcccttgcagctagggtatggatatgcgacccaatcctggccaaggaaacataagaagtcaatttgggacccttggaaaagacattcytacttgattaaaagagaaaggccttaagaaaattcacttttctttcctgtctttggagatgattacatgaggctatgatgctgcagtaattggataagaggtgtgtgctgaaagccttgatttgttctactgaatcagtgctggaaaaccctatctgatgaactctttgttatatgagcaaaataaatgttcacttttaatggaatgtcttgttattcgcagccaaatgaattctaatattgttgacttgaggcatagctaggttcagaagcttaacggatattaccaaatcttttctcttcctgtcaactctgtattcctcagagctggcttcattattaggccctagttagtggccccaggcaggttcaaactattaataatatcctatttactgatatcagtgtcagcctaaagagagcttcttcctccaaaaatatttctagagcagttttaggatttagt

SEQ ID NO: 141282 - DNA, 372 bp, Homo sapiens
aattttttagaagtgagatgacctggtcttttctattagaagagatcgtcaatatgccccagtagtgtgcttttactacttaataaacagtattttgttacttttataacattttataacaattacactatatctaccctctaatatttattaagtagtagttgtttctgggcatagcaacattttaaaagcatgttttgcttcaacacttttcacatatgaatcaagtayatgattaatatacacaattcttcaaaatatttaaaactacacattaagcaacatacattgaacctgcagataaaatctcatcttttatttatatactatgctagaaaggagtgatgttgttaaataaacttccacgaattc

SEQ ID NO: 141283 - DNA, 519 bp, Homo sapiens
tagcattcaatataattattcataaggcttggtttaaatataccattttacccttttttgttgttgttccattatgctgcttttcctgccttctttttagataatctgaatatattttaggttgccaccttgacttcttactggatttttagccagatgcctttgcatttttaagtggttgctctagaataataatatctttaatttttcacaacctacaatagtggaaaattaatagagtaatccttcacataaaatgtagaaactttgcaaccacataggatcacttgttcacccttgaatgccttctaaatatgttagaaaataccaagaaatggccaggtgcagtggctcatgcctgtaatctcagactttgggaggctgaggtaggcggatcacctgaggtcaggagttcgaaactagcctggccracacagtgaaaccccatctctactaaaaatacgaaaactagctgggtgtagtggtgcatgcctgtaatcccaggtactcgggaggctg

SEQ ID NO: 141284 - DNA, 620 bp, Homo sapiens
ttttctctgtggccattgtacaaagtgtgggcatttttaggactatgagagatagaacatataaactataaaattctcagtgattaataaatagccttcaaactcaagaaaaatagtaacattattcaaaacatatttacattaaattacagaattaagaaactaaaaagctatatggaaaaggactttggcctcctggaatactgaataagacacacagacataaatataataagccttatatttattaggggattgatccgataagatgtaccaggtcataagagcctgtgggaggaaaatgtttattagcaaatgcagatattgtgtggcacaaatcaatctcatgagttggtagccaggggagtgtttgaagacttttctcatcaggtgctgttaggcctccttccttataccagattcattcttcatgatgactaaagaacacattcacaartgacaaatgaggagaacccaacctgggcctccattctgcccttaggctccagcccatctccctacaaaatgccagagcagactctctcttgtcctaagctagtccaggagaggcagattccctggaatctgctgaaaagaaacaaaaccacttggctgatgct

SEQ ID NO: 141285 - DNA, 567 bp, Homo sapiens
tgcagtattccattatatggatgacaacattttgtttatctgtttacctgttgaagaacatttgtgttgggagttaattataaataaaaattgttagaaacatttgagaacaaattttgtttggagattttttaaaatttcttttaggtagatacctaagagtgaaatttctaggtcatatactgtgtgtatatttgactttctggaaaattgcttaattttctaattggttgtgctgttttacattcccaccaacaaatatggaagatctatttggttcacactctggccatcctatagccaatctttttaattttagcaattctagtggctgtctagtggcatcccatggttgttttaatttgcacccttctctaatgactaatsatgatgagatcagtgcttatttgccatccatacatcttctcttgtaaagtatgtgttcacacatcttttgcccaaatttttacgggtttgtcttctgattttgaggttcaagagtgttactgatacaattctacagcttgttgtttcattttaaataattgaattattcaaaaaacagaa

SEQ ID NO: 141286 - DNA, 495 bp, Homo sapiens
caggttcagttgctctgccacataggccatatgattcagcagatccagtggtacttatagtgtcagtggcaggtaaggatactgttgtcaaagcaattcctataggtaaattgctcttacagttttagagcaaagccctatcacctttcaaagacaactgctcttcttttgagaaatagttcttagactgctatagagttttagtagatactgaatatttcaccatgaaccaccaagttaccatgtacyttgaggtgtccattgaaaactaatgctttctgtaattgctttatgttcttatgactttatgctctgctgatataaaaatcttagttccagagataaaaggtttctaccaagagaaacggaatttattccattgaactggaagttcaatgtaagtagggtgactttagacttctcatgcatctggatcaataggcaaagaagggagttactctgttgactggggtgattgattctgactaccaagag

SEQ ID NO: 141287 - DNA, 332 bp, Homo sapiens
aataaagatgtaggtttcatagtgacttcatgattttgtataggacagagatagttcggttagactgctgtacttgtgcatgtgtcttaaatctgcatttgaatcacaattatactaattttacttagcstgtatgtttatttgggaactgaaaagaactgataatgatttgggaattttaaaaagtcctgagccaccccttgaaccattgctgcctttttatgtactcagatccatctacaaagctcatactcttaactactgtgcaaatatctctgataaaacacatctctgtactggggaaagtcgactccaacatctcctttcagagg

SEQ ID NO: 141288 - DNA, 602 bp, Homo sapiens
tgatagagaatctagtttgttagtctttttcaattatctatttttacctccagacaatgaagaatttttccagtgagaaggagaccaggtttttgataggccagtaaggttctgtggttgtttatttgctctgaatccttggctcaactttagaagtgaagctctctatttttatttttattattattattttttttgagatggagccttgctctgtccccaggctggagtgcagtggtgccatcttggctcactgcaacctccgtctcctgggttcaagcaattctcctgcctcagcctcccaaatagctgrgactataggcatgtaccaccacgcccagctaatttttgtatttttagtagagacggggtttcatcatgttggccaggatggtctcggtctcttgacctgatgatccacccgcctcggcctcccaaagtgctgggattacaggcgtgagccaccatgcccagctgaagctctctatttttaactgtatgtatatcctgggtctatcactcagagaaggctttaccacatttaccacagaccgtatgaatgtgtagtgttttccaatctccagatgatactgatagattag

SEQ ID NO: 141289 - DNA, 601 bp, Homo sapiens
atcttcccctgaattctggccatatccagcagattcctctccaaagttatgccatcaagatgtccctctgaagtcaagccacttctctccaacgttcagatgtagtcgttccatcttctggctgagtctggggttttcataggcacaggatgggatggggtggggtcatgggtggtttaggaaaaagcagcatttgagcaggaaaacagggatataagttcttacttcgggctgtggtttcacgcttttcagcttgagggttgggtttcatcagaaacctgctcttttctgcctwgaatttctctgcccccatccctataaattatattactgaataaatacataaatacttttattatagttctataattggagcacgtcaacagttcagctcaaaacatgaaaatattactaaatattgcaatgccatggaaatgacaagagctgttacccaatgtcatattttttccagaatttgtcacaggtggtttcctttgacccttgaaacacttccaggacccagtttttatcttataggtgaggaaactgaactccaaaagaactgaagtgactcaattaaagtcaaaggactattcccaga

SEQ ID NO: 141290 - DNA, 601 bp, Homo sapiens
atcttcccctgaattctggccatatccagcagattcctctccaaagttatgccatcaagatgtccctctgaagtcaagccacttctctccaacgttcagatgtagtcgttccatcttctggctgagtctggggttttcataggcacaggatgggatggggtggggtcatgggtggtttaggaaaaagcagcatttgagcaggaaaacagggatataagttcttacttcgggctgtggtttcacgcttttcagcttgagggttgggtttcatcagaaacctgctcttttctgccttgaatttctctgcccccatccctataaattatattactgaataaatacataaatacttttattatagttctataattggagcacgtcaacagttcagctcaaaacatgaaaatattactaaatattgcaatgccatggaaatgacaagagctgttacccaatgtcatattttttccagaatttgtcacaggtggtttcctttgacccttgaaacacttccaggacccagtttttatcttatagrtgaggaaactgaactccaaaagaactgaagtgactcaattaaagtcaaaggactattcccaga

SEQ ID NO: 141291 - DNA, 580 bp, Homo sapiens
atgtgacagatggtacatgaggaagcatggcccaatgcctattctcacattaaaaggtgttttttttttaaacatgaactctgttgacatttacacatgataatgagtatggcatttcatctgcccatgcttctctgttgtagtcccacgttagttatccactgaacacgaaagaatgctgggagccatcttgaataaatggaaagttagacaaaatggcattcagcaacctttcaacaaatatcaggcttcattcatactaatgtcttcttgtcaataaaacaggcaattccagggtcataaatgacaattatctttaactgatccaattcaatatctctttacaggatgtttgttatgcatgtaacattatattaactgctatgagagatttaaaagaaagatattacatagttcctgcttaagaaaatcawtgtgagattttaaagacgcatagatgtgaagcaatctgaggactatacaaagtgctgaaatcgatgatatattcactgagacttcaccaagaaggggtacatgcagaatatgtttgtcagagcattcagagaggatgactctgcca

SEQ ID NO: 141292 - DNA, 462 bp, Homo sapiens
aatattttagcttctttcacacaaacctttctctgacaggttccagatactgggtcaaatattttatatatcctatgtttattgccacttcaaatataaatttcttccctgtcttcaaggccttctactttcttataactgtgactccccacatgtaggtaagtgtccccatttcctagtgyatccaccatctacctactgctactatcaagtagatagtctctccattgttatactgataactttttttcctcatatcatttcccagaatgaaaggctctctgtggatatctcaaatcccagtcaatctcaattctttcctgctgttttatagatcagagttacccttctcttacaaaactttatttttgttttgcccagtttcacatttattcacttaactgttagttacccatttatttaatgctgagtaccgatctacgctcagataacacaataaag

SEQ ID NO: 141293 - DNA, 515 bp, Homo sapiens
ttattctgagtcattccttcttaccttttaacctaatcttcakaggtgccggtactgaagaagtacggctcctgcccaaaatgagcctaatcttgtctctgaaaatagcacttccttgccaagaagaactttctccttttgaattgctgcaatgatgagaaaaagaagccaggattcattaatggccccgggcatggtgggtgctaagtcagagcgcccttcctctctacagagaatagcactgtctacttactgaaggtttttctttttttttttttttctttttatccttacaatgactgttggcagaaagctttgaaacagctcattactgacttctaattcaataagctaaaagggtgaggtgcagggcaatgcagattcagatttaactataattttttggaatgcctactatgtggcaggctctgcattaggcattgccatgacaacaccaaaattgggagatatgaacctggttaagtaaataaaagaggacagctcagatactgtca

SEQ ID NO: 141294 - DNA, 503 bp, Homo sapiens
ttattctgagtcattccttcttaccttttaacctaatcttcagaggtgccggtactgaagaagtacggctcctgcccaaaatgagcctaatcttgtctctgaaaatagcacttccttgccaagaagaactttctccttttgaattgctgcaatgatgagaaaaagaagccaggattcattaatggccccgggcatggtgggtgctaagtcagagcgcccttcctctctacagagaatagcactgtctacttactgaaggtttttctttttttttttttttctttttatccttacaatgactgttggcagaaagctttgaaacagctcattactgacttctaattcaataagctaaaagggtgaggtgcagggcaatgcarattcagatttaactataattttttggaatgcctactatgtggcaggctctgcattaggcattgccatgacaacaccaaaattgggagatatgaacctggttaagtaaataaaagaggacagct

SEQ ID NO: 141295 - DNA, 642 bp, Homo sapiens
ctttataagctcttttcccttttcctcatgcactcagtgtgcaatctagctctcagttctataaggtcttaagtctgaaggaggcttaggaggatttgatattatatccatttgataactcttaaagagtattatcgtcctaatcatgctccccgtcccccttgctttctgtttgatttgccctccctggatatcccacttatcccaggccttcggctcctggcttataatgatcgttttcaactcttcttatccacttggagatatcttttccctgtgcttaaatctgtgcccatgaatttcccacaggccactcaaacctactttcagacctcaggctgggccattctcttactacctccttcatcatcaccttaggaaggcccttgttcatgcaggcaacacatccagaaacctccccatttctgtctcctcactccaatatttagttggttcactgattctatctctgaaatatatctcaaactcactcttctttacaatcaatctgaggtcaaaaattcatgatctcttatcaggggaaaaatctaaattcttarcatcacatgaagggacttaataattcagccaaattaatgtttctttttaaccttgattctgctacttcttacttgcacacag

SEQ ID NO: 141296 - DNA, 561 bp, Homo sapiens
ttcaggctgacagcatttctttctcaagttctgtctgtgttcaggctctgggcatcttgggtctttttatctgaacagaaagcaaatcctagtgcagcatcagaatgttctagccccttgcaatggcatttagattcgtctgctgctatttccaaagatgcccaaatctataaatattaagctacattttggaccctaaccttgagaaagggcagctaccatttaatattgccagggaaagagaaaaggtgtaggggtaggcaaaggagagaaacraaacaacacaaatgtcaaatctgattgattaaaaactaggtaggcaaatcagcaagggctggtccagcatcactggagaatgaggtcagaaagggctgtttcaaaattatttggtattttcagaaattgattactgagggagagcattaagaagtagctgtgaacattcatttaatgggccactgcctcttgtacagggctggagttgtcacattcagtctcatctactccttgttaagttgtgcttcttctggagcatgtttatttattacagatactgtaagc

SEQ ID NO: 141297 - DNA, 561 bp, Homo sapiens
ttcaggctgacagcatttctttctcaagttctgtctgtgttcaggctctgggcatcttgggtctttttatctgaacagaaagcaaatcctagtgcagcatcagaatgttctagccccttgcaatggcatttagattcgtctgctgctatttccaaagatgcccaaatctataaatattaagctacattttggaccctaaccttgagaaagggcagctaccatttaatattgccagggaaagagaaaaggtgtaggggtaggcaaaggagagaaacaaaacaacacaaatgtcaaatctgattgattaaaaactaggtaggcaaatcagcaagggctggtccagcatcactggagaatgaggtcagaaagggctgtttcaaaattatttggtattttcagaaattgattactgagggagagcattaagaagtagctgtgaacattcatttaatggrccactgcctcttgtacagggctggagttgtcacattcagtctcatctactccttgttaagttgtgcttcttctggagcatgtttatttattacagatactgtaagc

SEQ ID NO: 141298 - DNA, 602 bp, Homo sapiens
agcactagggggattatcaggggaacctgcccccaatatttcaacgtaggttctttctatttttccataagtgtcagctggctaagaaataaagagaaagagtataaacagaagaattttacagctgggtcgccaggggtgacatcacatatcggtaggaccgtgatgcccacctgagcctcaaaccagcaagttttttattaagggtttcagaaggggagggggtgtaagaacagagtaggtacaaagatcacatgcttcaaagggcaaaaagcagaacaaagatcacatgcttctgagggaacaggccaaagggcaaaagcagaactactgctactgataagggtccaacaaagatcacaaggcaaagggcaaaagcagaactactgataagggtctmtgttcagtggtgcatgtattgtcttgataaacatcttaaacaatagaaaacagggttcaagagcagagaaccggtttgaccacaaatttaccagggcggagttttttccccatcctagtaagctgagggtactgcaggagaccagggcgtatctcagtccttatctcaaccgcataagacagacactcacagagtggccgtt

SEQ ID NO: 141299 - DNA, 601 bp, Homo sapiens
agcactagggggattatcaggggaacctgcccccaatatttcaacgtaggttctttctatttttccataagtgtcagctggctaagaaataaagagaaagagtataaacagaagaattttacagctgggtcgccaggggtgacatcacatatcggtaggaccgtgatgcccacctgagcctcaaaccagcaagttttttattaagggtttcagaaggggagggggtgtaagaacagagtaggtacaaagatcacatgcttcaaagggcaaaaagcagaacaaagatcacatgcttctgagggaacaggccaaagggcaaaagcagaactactgctactgataagggtccaacaaagatcacaaggcaaagggcaaaagcagaactactgataagggtctctgttcagtggtgcatgtattgtcttgataaacatcttaaacaatagaaaacagggttcaagagcagagaacyggtttgaccacaaatttaccagggcggagttttttccccatcctagtaagctgagggtactgcaggagaccagggcgtatctcagtccttatctcaaccgcataagacagacactcacagagtggccgt

SEQ ID NO: 141300 - DNA, 553 bp, Homo sapiens
tgtgtttctaacactcaagcctctgctgtcctgcgtctcctggtcagcaaacatttggaaaagtgagccccatcctcaaaccacaggctgctggagcaagactctgctctgatggcagccgccttcctgcctgtttttgacccccatttatggctgtggagtgacattgccccctcaatccctacctacccgatgcatasagatatgcacacacaaacacacacacacacacacgtataccatattttgaccccgattgctgctcttgcttaaactacaccctaattctgtctcacttcttggacaccatgcttttgctgagtcttccctgagcatctgcagttctaactatcccctcttgcctgctccaccctaggggggggcccagattcttcatcctctgtcctcccagtctggccattctgaaataatgtttagtcctttccacattgcaggatggcagaaggaacagagaaggaggcactgcatgggtaactggaagtgtggcaggaagaggagagcaaacaagtgacaacagatttgcagctcttga

SEQ ID NO: 141301 - DNA, 553 bp, Homo sapiens
tgtgtttctaacactcaagcctctgctgtcctgcgtctcctggtcagcaaacatttggaaaagtgagccccatcctcaaaccacaggctgctggagcaagactctgctctgatggcagccgccttcctgcctgtttttgacccccatttatggctgtggagtgacattgccccctcaatccctacctacccgatgcatagagatatgcacacacaaacacacacacacacacacgtataccatattttgaccccgattgctgctcttgcttaaactacaycctaattctgtctcacttcttggacaccatgcttttgctgagtcttccctgagcatctgcagttctaactatcccctcttgcctgctccaccctaggggggggcccagattcttcatcctctgtcctcccagtctggccattctgaaataatgtttagtcctttccacattgcaggatggcagaaggaacagagaaggaggcactgcatgggtaactggaagtgtggcaggaagaggagagcaaacaagtgacaacagatttgcagctcttga

SEQ ID NO: 141302 - DNA, 452 bp, Homo sapiens
gacttaacagacatatatagaacactataccctcaaacaacaagataacacattcatttcaaatgcacatagaccattctccaggacagaccatgtgttagtcaaaacacaagtctcaataaaattaaaaggactgaaaatatattaaatatgtacaactatagtagcatgaaattacaaataagtaaaagaaaggaggttggaaatttacaaacgtgaaaactaagcaatatattcttatataaccaatgataaaagagaaattagaaaatacttggagatgaatgaaaatggaaacataatatacraacacatttgggaagcagcaaaaacagtactcagaggaaatttatacttataagtgcctatattaacaaagaggaattattctaaatcaattaactgttttaggatcaagaatgaaagagggggtattactaccaaatttacaa

SEQ ID NO: 141303 - DNA, 563 bp, Homo sapiens
aaaatgacatgtgaatagtaatactttgtaatagtatctaatggtgtttccactatggggcaaggattcagaaacaatgagaacacagaagcaaacaacttggccgcagcagaaatggatatataataataggtataccattgagtgctaatgtggccccttgtcctgcttactggtatgcgtcaatgagctcatagttcatttcctgttatttcaggatgtgtttgtcactctgtaggttgcaactaatgatgaatataggcagagccttggtgaggagctagctagggaggcacagcagggcaggggtggggggtattctgttccttttcatttgtatctttattaaaaaatttttacattgcttgacttgttgatttgttagggaatctaggagaaagcaatttaagctaaatctgcggcaccattattaagaatcttcttggcctggtttagctaacttatcacatcagcaaaaggcaagagagagttattgttttatgtggggaaygtagaaaaataaaataaagatgagaattaatgtattcgcatgcacacacaca

SEQ ID NO: 141304 - DNA, 393 bp, Homo sapiens
tcagtataggtaaataaaatatttaaaaatcattcagagcaattccatagaactactctagtgaattttatacacacaactaaaacagcaacaataagtcaaaatttatatgaggccamatgcttttaattactttccagatataattatgcatatacacagatggcagatagaacagcttagttatacaaaagaaggtgcatgaataattgctatagcttgagcaacaaaagtaagttgttttacatataaaatgataggataactaccatcagagaatactacaaacacctctacgcaaataaactagaaaatctagaagaaatggatacattcctcgacacatacattctcccaagactaaaccaggaataagttgaagctctgaataga

SEQ ID NO: 141305 - DNA, 459 bp, Homo sapiens
atacttacttgtaactcctgggctaattgttctaaatgagtactttgccaaattggaacatgagactatgctacaggaaataragaagccggttttcaattattttaattgataattagtgactgtatcttctttataataggtgatacatatatacaaaaaattctaatatgtaatgttaaagagtatagtgactttttatttaaaaaattattttatggcagcaagagcacataatatgagttctaccctgttaataaatttttaagtatacattattactataggtatagtattgcacagcaaatctccatagcttattcatttcgcttaactaaaactttatgcttgtcgattagtaactcccaatttccttctccccccatcccctggcaatcatcattccactctttgattctatgaatttgaatattttagatgcttatataagtggactca

SEQ ID NO: 141306 - DNA, 618 bp, Homo sapiens
ggtaaaaagtggatggatcagatagataaacatttttaatggataagcttcaaaggcagcatggttgaatttaatttgatctgtaaactaatgctaaggcattttctaatatgtgtttataaaagcaaaattgagattgaaaacaaggaagcttaaaaatgaacaccatgtaaagtaattcattaaaaaatacatttctttttctaatttatctaacaacttctctcacttgggtttattttaaaggtattttggcttatattctctttgtcacatgtctttgtgttagaaacwatataatattgataaaatcggatttattacatagatgaatatgcgcttataaatcatttttcttgaaaaatacacatctatacatttctgccttgtgtaacttgtgttcaatagcattgaattctgtagctaattccaaagttatcaaattagaaatagaataaaatggagaataaaaagtaaagttaaacttagtatgtttttaaatcacttcagtttaatgtaatgatgtcatgtttaaaggtaaaaatctattattaaatttgttagttaacatctagaatcctcttgatcatcttacatatgatcacataaaaacattct

SEQ ID NO: 141307 - DNA, 680 bp, Homo sapiens
taattattttcacattgagttggttcccaatcagttcttagggcatttttcctcatataatctaaaatagctgaacaaaagcaatatattatgtgtcttaaaaccattaaagataaaagatgttttcaatctgcaatggtaaataagaaaaaggcaaaacatagtggattgaaaggtggaatactaatgtaatattgatctcggtttttttaactgtgggttaatttcatcaaaaccagaatgctttgagtaagcctaatatgcaacaaatattacggtgtatagagatatttaattcaactcagaagttgataaagtttatacaaaataaatatgctaacatataattgtttttcatgcataacaacttctcttataatagtgaataattaaaaaagaatacgtacattaagtgtgtaaataaaataaacctatgtatcaaagtaaggtatgattagttaattgagttctaaaataacttgaatttccagatttttgattttaggtcttaaaataccttataacatgtgatggcttatatgtgcctttgtctctacttttttccacttctcacttactcagaatcagtattttaaagcakaaagtaactggccatattatttaatagactagcttctccattagaatagactaagaatccaataattaactcacactat

SEQ ID NO: 141308 - DNA, 538 bp, Homo sapiens
tgactttaaacccctaatcccacaatttcctgttcccttatccattcttttttttttgagacagggtctcactctgtcgccaggctggggtgcagtagtgtgatcttggctcactgcggcctccgcctcctgggttcaagtgattcccctgcctcagcctcctgagtagttgagactacaggcatgcaccactatgcccagctaatttttgtacttttggtagagacggggtttcaccatgttggccaggatggtctcgatctcctgaactcatgatccgcccacctyggcctcccaaagtgctgggtgagccaccgcacccggcccccttatccattcttgtcattcagacaattactatttcacacacactcgtacattaatacaacattttaattaaaaataatgccatataaaatacagttttctaaaattccctgttttacttaacatcctgtaaagattgtaatatgttttgtggattgttttcattcatgattctatgtaggtacttctatctcacctttttaatagttac

SEQ ID NO: 141309 - DNA, 622 bp, Homo sapiens
agatctacccggatagtttgcactcagagtgaagatattgaaaagaaggcgcatgaagagatgtgactgaaactttttcaacatgaggcatgtgccaaagcagcacagggtctgaaaaacgaagtagacctatcatcagtctccagggcatggaagaaaaaatcartctcagggcctgctacggtagaagggacatggcaaattctccaggctttcagatgtgaccaattacataccaggagtaacgacgcatcaaaacaggcaaatgctacaaccactgaaacagagctacgagtaagctcaattcctcattggaataagctaagctttcctctggagaaagttagtattcagagtcacaaattactcccagcttttttttttttcttttaacacaaaaggactggcattcagtaaaaagtaacaatgataccagaatgtaaaattaaattattaaaaaccagaaaaaacataagaaacagtagaaatggacctccaggatagttgtataatagatgacaagacggacacttttattggaggaattgaaatccagaaaaaacagaaatagaaacttcagacattcctctgtagcagtaaaagtaaatatgatggatccaaa

SEQ ID NO: 141310 - DNA, 554 bp, Homo sapiens
gaaatgtggttattttgattaacatggcatgtcaccattcacaaaataaaatgcacaacatcgcactcgctgtttatctgcagttactacagagtcattttcctatccctgtctggcatgagtgtaatagtttggctcaaataggatggataaataattgagacatgttgatagatatttgatcaatgcctgtaacacatgctttcccactcgttgtaaagttccatgcagtgcattaagagataagtaaatacatgcctaattccaaggtcgcaamttctctacacactttatgctgtgtgaagtctcttgcctaggactggctacttttgatctgttgtttcatacacagtcttcatctgtgctgagcctgtagattaaagcctcacttaaatgtctgcctgactattgttgctgcttttgtttcccccagacactgattttccagaataaatgatctcatgtctccaaagtgagcttcccttatacacaaatttcattttttaatcttcttaattttctgaaacttaaaaaaaataaaaaagacaaagctg

SEQ ID NO: 141311 - DNA, 533 bp, Homo sapiens
gttgaggcacagaatattctattaacatytgtaatatggaggaagatgtaaactgatttatgttgctgcaatgagcagaagtaagactaatgaatagcagttattgttaaatttctagtcaacctaataattatttttctaatagctacaactgtttagacaataggacaggtaaattaaactgagttcctctttctctccagaagtaactaagtagatacttaatgctatgcctcaggaatgccttaaaaataatttctactttcaacaaaaaatgaaagttaactttaaattctatgatcatatgatattctctgtcgggattctaataaactaatcagtgtattaagatggacacaattatgtcaccttcactaagcaatgcattaacatataagagaagcattttagagttacaaaaaataaggaccatatggctttaagaacatttgccatggtgccataagcggcaggacaagaggagaaagatttaacatcaagggtactttcaaaaagtgagcagcactattttt

SEQ ID NO: 141312 - DNA, 400 bp, Homo sapiens
gaacaagctggctcttggtaagcacataattcagccagtgggtgctgaagcgagtgggtatgacagagagcagcctgcctgcagtgcattcagcatgctgtgggcattgctcaagagtgtttcatccagggaactgaaaagtgttcatcactcctgtgagttggttaacaggaaggtggtaagagtttccactgtgtttcactggatttcattgggtttcaaattgaagtcccgggaggtgaagcatgtcagtgacaattgtgtggggtggctgaagtgacacaggtgacaagataggccttcattatacatcatcatgttggtgttcctgccaacacacacaccccagttctgagcttaaaagayagagtaagcataatctgctcttccttcacaccct

SEQ ID NO: 141313 - DNA, 625 bp, Homo sapiens
aatgtccatatggattcaagagagaagtaaaaacccatttaggggtaggagaacagcaatctgaatcatcatcaataggaggggtggggagagtgaaattcagatatcatggagagattatcatgggcttctctcactggtcttcttgtgccttattcctggaaattactgatggaggtagagaacagaacaaaacctggctgctgatgctaaggcatgaaagtgttycaagagttctaggagctgaaaggaaacctgtgtgtcccaggtgtagcgggaaaagggaaaatgacatgagtgaagactgaggtgcagatggggcagtagtggtgatagtgagagccttgggcctcattctgagtgcactgagaagttttaaaaagaggagtggcataatacagttttcattttcaaaatatcatgttggctgatttgtgaaaaataaaatagagaaagataggatttatattaaatgacatggaacacagcatacacattattattaaatctgacatttcatttcagggatagaaataattcccacctacagatactatcttgtttggattcaattgtggctgcaatgctgcgcttcagaaatgatgtcagttgtttataagaagct

SEQ ID NO: 141314 - DNA, 625 bp, Homo sapiens
aatgtccatatggattcaagagagaagtaaaaacccatttaggggtaggagaacagcaatctgaatcatcatcaataggaggggtggggagagtgaaattcagatatcatggagagattatcatgggcttctctcactggtcttcttgtgccttattcctggaaattactgatggaggtagagaacagaacaaaacctggctgctgatgctaaggcatgaaagtgttccaagagttctaggagctgaaaggaaacctgtgtgtcccaggtgtagcgggaaaagggaaaatgacatgagtgaagactgaggtgcagatggggcagtagtggtgatagtgagagccttgggcctcattctgagtgcactgagaagttttaaaaagaggagtggcataatacagttttcattttcaaaatatcatgttggctgatttgtgaaaaataaaatagagaaagayaggatttatattaaatgacatggaacacagcatacacattattattaaatctgacatttcatttcagggatagaaataattcccacctacagatactatcttgtttggattcaattgtggctgcaatgctgcgcttcagaaatgatgtcagttgtttataagaagct

SEQ ID NO: 141315 - DNA, 643 bp, Homo sapiens
gtgtcttagtatgtatataatatgtgtgtctgttgatttctagagtcgcttggatgtgtatctatcacataatccagcaggaacttctgttcaaaacatgttccattggacccaggtattcttttccaaatgctgttaaaatgtattttgtgagtctcaacccttttcactttacctaaacacattcttaaaatatcctgctgagtacacctggaaggtaatttttctggcactgactaccatacaaaaataactatgaatttatttcaaagaagaaaatgctttttawtttattttattattattatactttaagttttaaggtacatgtgtacaacgtgcaggtttgttacatatgtatacatgtgccatgttggtgtgctgcacccactaactcgtcatttagcattaggtatatctcctaatgctatccctccccccagcaaatgctttttatgacttggtatgcaagaaaaattattttgagtgaagctgcatttaaacttacataaataccttgtcctagattattaataatcttttggaatgagaaaaatgtttcttaataattgtttaaattgaaaataaactgcttggaaatgtttgaattttatttttcacaatataataatttttatttgtt

SEQ ID NO: 141316 - DNA, 603 bp, Homo sapiens
gtggttttctctgtgcaatcattgctagaattcacttataaaaccgccagttaatgttatacactctacttgaatagtaagtactgggtttaaagtgtggttacctaaactctggttctttctcttgtgttttctagtcccarcctccctactacaatgtgacagccatgaatgtaccaattgcagtgtggaacggtggcaaggacctgttggctgacccccaagatgttggccttttgcttccaaaactccccaatcttatttaccacaaggagattcctttttacaatcacttggactttatctgggcaatggatgcccctcaagaagtttacaatgacattgtttctatgatatcagaagataaaaagtagttctggatttaaagaattatccgtttgtttttccaaaatactttattctctcatacatagtattttcataatgtttgacatgcagtgcttctttctgtaattttgactttagaaatatattggcatcaacaaacttccatttgtcattttgaatttttttaatttaaagaaatttgatttttcacctggaaatttatctagaaatacttgagagaatatatttctgggg

SEQ ID NO: 141317 - DNA, 600 bp, Homo sapiens
gtattggaggatgtttagcagtatctctagctagatcccagcagcacacacatcccaagttgtaacagtcaactatgtctcctgacattgccaaatatcatcttgatggcaaaatgcccaccctactaagttaagaaccagtactgtaaattataaccttaataagattaagatttaaaaaaaaaaatattttatagaccgtatggtgttctactataatgaggctgacaatgcacagctgtttctcttttttagaatgtcagagactactgcttttcaatacacaaacccaagagttaattaggagattaaaaatggtggcattccaatttgatcagttcttcrtttattaactgaatacttccataaagaggaattgttgtcacatatatttaagttatccaaaatccatgattctttccctttatttatgaatttccaaaattggtttttcttcgtttagtattataataaatatatggttctatgcatatttgatgtttcaaatctgtaaggattattatccttactgatattaaaattataccctctgtttcttgtgagagcttctataagttggctccaaagttcttttaccaa

SEQ ID NO: 141318 - DNA, 513 bp, Homo sapiens
tgatggttaagctgctggagtagctactgctgtgtaaacttcccaagcatggggtaaatgctggcaacattctcatttcatccctaactctgagatgccagaatgaatcacagagyttccagaagcaaataatcagtcacaggaggtgaattgatttctttctgcagcatcacccagttattctaacaggttttctttctcactatggaatgaaatttcactgctcccagtgtcttactgggtgtttttcaaccctctagactcttccctgtttccaaaaagaaaggggctttccctagcatccacgatggcccagtaaggaccaggcatctccatttgctttgctctttcagcagtagcattgcacccctttgtatatctgtgaggatggagattagcacaacactgggtaggctagggagaatatccatataatttggtttccagaggtcccttcctgggcctccactagcatgtgtgtgtgtgtgtgtgtgtgtgtgtgtgtgtgtgtat

SEQ ID NO: 141319 - DNA, 513 bp, Homo sapiens
tgatggttaagctgctggagtagctactgctgtgtaaacttcccaagcatggggtaaatgctggcaacattctcatttcatccctaactctgagatgccagaatgaatcacagagcttccagaagcaaataatcagtcacaggaggtgaattgatttctttctgcagcatcacccagttattctaacaggttttctttctcactatggaatgaaatttcactgctcccagtgtcttactgggtgtttttcaaccctctagactcttccctgtttccaaaaagaaaggggctttccctagcatccacgatggcccagtaaggaccaggcatctccatttgctttgctctttcagcagtagcattgcacccctttgtatatctgtgaggatggagattagcacaacactgggtaggctagggagaatatccatataatttggtttccagaggtcccttcctgggcctccactrgcatgtgtgtgtgtgtgtgtgtgtgtgtgtgtgtgtgtgtat

SEQ ID NO: 141320 - DNA, 600 bp, Homo sapiens
tctgtcagcttgctatttgtggactttaggcctcttaacataaccggttgtgccttaatttcatcatttgtgaaatggtgactattagtggtacccatctcatattgttgatgagaagtttaactgatataaagtatttagaacattacatctaatgaatgatctttaattctaaatctttccaaaattatctctccttaagccaaatctttcccataaaagttttctccttttatatttcacagctccttcacacatgtgcctgggattgccagatttagcaaaaaataaaaacaaaagtaagcaaaaagwtccaggatgctctacaaaattttataaatagtgataatagtgaataaataatgactttttagtattatcttaaaatgagacttatacaaaattatttgttgtttatctgaccttcaaatttaactgggtgtttcatattttaactagtaaaactactcatatctcactctcatttttcattctgaaactggagataaaagagggagagaatgtcaaacatgacttcagctgctccttaatatgtgtggtgggaaaaaagatgcaaaatgaacacggtaagcagctgcc

SEQ ID NO: 141321 - DNA, 600 bp, Homo sapiens
tctgtcagcttgctatttgtggactttaggcctcttaacataaccggttgtgccttaatttcatcatttgtgaaatggtgactattagtggtacccatctcatattgttgatgagaagtttaactgatataaagtatttagaacattacatctaatgaatgatctttaattctaaatctttccaaaattatctctccttaagccaaatctttcccataaaagttttctccttttatatttcacagctccttcacacatgtgcctgggattgccagatttagcaaaaaataaaaacaaaagtaagcaaaaagatccaggatgctctacaaaattttataaatagtgataatagtgaataaataatgactttttagtattatcttaaaatgagacttatacaaaattatttgttgtttatctgaccttcaaatttaactgggtgtttcatattttaactagtaaaactactcatatctcactctcatttttcattctgaaactggagataaaagagggagagaatgtcaaacatgacytcagctgctccttaatatgtgtggtgggaaaaaagatgcaaaatgaacacggtaagcagctgcc

SEQ ID NO: 141322 - DNA, 417 bp, Homo sapiens
atggtggatgtttagcactataagctttcctcttaacactcctttagctgtgtcccagagattctggtatattgtatctttgttttcattagtttcaaagaatttcttgatttctgcctgtgtttcattatttacccaaaagtcattcaggagaaggttgtctaattgcatggttttgatggatcatcttggtattgatttctacttttattgtactgtgattcatgagtgtacatagtataatttcagttttttttaatttgttgagaattgctttatggttgagtgtgtggtcgattttagagtatatgccatgtgcacatgagaagaatatgtattctgctgttattgggtcgagtgttctctagatgtctgctcagtctattyggttaggtgtcaagtttaggtcccaaatat

SEQ ID NO: 141323 - DNA, 442 bp, Homo sapiens
ctgccaaggaatatttggcaatgtatggagaaatgtctggttgtaattactaggagagtgctgctggcatttagtggtagaagccaaggatgttgctaaacatcctaaaatgcacaagacaggccccccacaagaaattatctgtcctaaaatgtcaatcgtgctgaggttgagaaatcttggaatcatcacagtatataaatactggtcataaaaaaatttacttaataaaggtatttaaacatgtttttaaggtatttaaaattattagcctttagtatctgttgataaatcttccaaaagttgtttgcatataagcttgccattgtgagttagtagatgtccattttccaggtgagaaaaagatgtgagcttttctcattgtctcaggagcaatgwtacttcatttctatgagatgctccctgttcttcatgacactga

SEQ ID NO: 141324 - DNA, 460 bp, Homo sapiens
ctgggggaagtctgccctgccaaggaatatttggcaatgtatggagaaatgtctggttgtaattactaggagagtgctgctggcatttagtggtagaagccaaggatgttgctaaacatcctaaaatgcacaagacaggccccccacaagaaattatctgtcctaaaatgtcaatcgtgctgaggttgagaaatcttggaatcatcacagtatataaatactggtcataaaaaaatttacttaataaaggtatttaaacatgtttttaaggtatttaaaattattagcctttagtatctgttgataaatcttccaaaagttgtttgcatataagcttgccattgtgagttagtagatgtccattttccaggtgagaaaaagatgtgagcttttctcattgtctcaggagcaatgttacttcatttctatgmgatgctccctgttcttcatgacactgaaa

SEQ ID NO: 141325 - DNA, 555 bp, Homo sapiens
tcacccttcttgatgtcctttaccctcatctgcttacatttggttcccaggggaatctttctaaaaaggggcattatgcgtgtcattccyctgtgcaaatatttccatgctccccaattacttatataatacattccaaattcattaatttggcgctcaaatccctttatcatctgcctctacatttccaacatgatttctcatactctccttcacaaatactaacataaatctccagtaaagtgagttatgtgtggttctccatggcctgagcttcaccacttcaatgttgctcatgtttctctcttgtttcagaaagcctttctataccacactctataatgaaatcatatccttaagcccaaactaaaatgccatcttatccaaaaagtattttgtgattccaacagctagcagtatttttcttttctctgagtttgcctagcaatgtttttactctgtcattataatactggaatttctactaggaattagtaggtcatatgtggcagttcttctattggtactatagttcctctattggagttataattt

SEQ ID NO: 141326 - DNA, 555 bp, Homo sapiens
tcacccttcttgatgtcctttaccctcatctgcttacatttggttcccaggggaatctttctaaaaaggggcattatgcgtgtcattcctctgtgcaaatatttccatgctccccaattacttatataatacattccaaattcattaatttggcgctcaaatccctttatcatctgcctctacatttccaacatgatttctcatactctccttcacaaatactaayataaatctccagtaaagtgagttatgtgtggttctccatggcctgagcttcaccacttcaatgttgctcatgtttctctcttgtttcagaaagcctttctataccacactctataatgaaatcatatccttaagcccaaactaaaatgccatcttatccaaaaagtattttgtgattccaacagctagcagtatttttcttttctctgagtttgcctagcaatgtttttactctgtcattataatactggaatttctactaggaattagtaggtcatatgtggcagttcttctattggtactatagttcctctattggagttataattt

SEQ ID NO: 141327 - DNA, 590 bp, Homo sapiens
gcacagtaaatatatattagctctatcactgttacttatattaatagcattatatttttcaagagtcatcgagttgaaaacgtagagtttttcgaaatagataaatcgactccttaaaatgccatttgttgaatgctcattgaatgtcaagcactatgctaagttttataggcactgcttcatttcatttgaattgttagaaagcaaaaaacaaggttgtaagtagaaatttacagtttaaaattgttaatatgatacaaaaatcctattcccaatgtaaaataggaacatttcaactaaaaaagagaaaggaaaaagaaagaagtgagaaagtgtggaaaaagagagaagagagggaagaagtgactagayttttcctgtgctttataagtggtttgtgatgctgtgttgttatctcaggactctacctcaggtcacttttggaactagagtggcttcctgagagtgagtaagttgtactctcagagagccttcagccatcgggaccaaggaactaagagtctatgtccatttttccaccatttggaatagagggaaagaagtggtgttactaactctgccaaagttaa

SEQ ID NO: 141328 - DNA, 590 bp, Homo sapiens
gcacagtaaatatatattagctctatcactgttacttatattaatagcattatatttttcaagagtcatcgagttgaaaacgtagagtttttcgaaatagataaatcgactccttaaaatgccatttgttgaatgctcattgaatgtcaagcactatgctaagttttataggcactgcttcatttcatttgaattgttagaaagcaaaaaacaaggttgtaagtagaaatttacagtttaaaattgttaatatgatacaaaaatcctattcccaatgtaaaataggaacatttcaactaaaaaagagaaaggaaaaagaaagaagtgagaaagtgtggaaaaagagagaagagagggaagaagtgactagatttttcctgtgctttataagtggtttgtgatgctgtgttgttatctcaggactctacctcaggtcacttttggaactagagtggcttcctgagagtgagtaagttgtactctcagagagccttcagccatcgggaccaaggaactaagagtctatgtccatttttccaccatttggaatagagggaaagaagwggtgttactaactctgccaaagttaa

SEQ ID NO: 141329 - DNA, 544 bp, Homo sapiens
gtttgggtaggaagtggcacttgagagtgggttaattgagctaagctgaaaatagagcacaacatacataagaatgtgtatttttattaaccttatcaacagtctgtccttctgaatacaggcaacatataagtgaaaatacgattgccgaagtagcgtgttggggcaggaataaacctaaattctaaaaatttcagccaaactttagcttttctgcataagtgtacctttttctgttctcacaaatcaggtgcgtgtgggaaccttatgttggccaaggatgtacaaatgaatcatggtcttaagggtggaagacactggaaagagaggttttactatctgatgtactccttggagacagtgtcaatagccctctactcattttcataaagtcagccatgcctgcacttaataatgggttgtctataaatgtgttaacttctaaawtgctactctgaaacttgcaacacattttgctatgaaaatggtgctgtaggtcagagcttttcagactttaccatgcccagaaatctcctggagatct

SEQ ID NO: 141330 - DNA, 537 bp, Homo sapiens
cctgtggaaaggaagtagagaatcaggagtaaggaaagagataaatcaaactgtgatacagacttcaaaacagccagrctcaactccatgaggagctatggagctaaaactgctcttcagagatgtcctacgttgggctgagatgaccaggcctttagaccgcaaacaggtcagtcactggatgtggcaggaagggacgtgaacttggaggaagtggctttctacagctaaggccattcctacagaaaatgacagccaagggtgatctgtagacagcacttccagtggatgggaccagtcctttattgcctgcataaattttcctgccaagtatagcatgttgaccatcttgccacctgtagacaatgtttgcagcatttgtagttctttttcttctcagatgtccatgtccctatccctacctccttggctcttttgagcaacttctattcaatcctcaaggcccagttcaaattcttcctccataagaccttgcctgtccagccctgctcattttgctcctcctgctcagaattc

SEQ ID NO: 141331 - DNA, 535 bp, Homo sapiens
tgtggaaaggaagtagagaatcaggagtaaggaaagagataaatcaaactgtgatacagacttcaaaacagccaggctcaactccatgaggagctatggagctaaaactgctcttcagagatgtcctacgttgggctgagatgaccaggcctttagaccgcaaacaggtcagtcactggatgtggcaggaagggacgtgaacttggaggaagtggctttctacagctaaggccattcctacagaaaatgacagccaagggtgatctgtwgacagcacttccagtggatgggaccagtcctttattgcctgcataaattttcctgccaagtatagcatgttgaccatcttgccacctgtagacaatgtttgcagcatttgtagttctttttcttctcagatgtccatgtccctatccctacctccttggctcttttgagcaacttctattcaatcctcaaggcccagttcaaattcttcctccataagaccttgcctgtccagccctgctcattttgctcctcctgctcagaattc

SEQ ID NO: 141332 - DNA, 540 bp, Homo sapiens
aaaatgtcaacatggtagatttaaaatcccaaatataaatacttatattaaatgtaaatgatctaaatacatcaattaaaagtacctcttatcagattaaacaaggcaaggtagaattatttgctgtctaaaggatacattttaaataaaaagggaagttaaaaacaaaatgataaaaatatatattatgccattcgctaatcaaaggaaatacgagttgtgagataactatcagaaaagtagtcttcaggacaaagaattataccagagataaaagtgggtcattctgtaatgataagggtmaattcatgtagaagacattacaatcttaaatgttcaaaatgcatgaaacaaaaactgacagaaccaaaaggagaaatagacaaatttacaattgtagttggagatgttaatgctcctctcagcaactaatactgacagaacaaaaagattaaaatgaataacgatagagaatacatgaactacattatcgaccaactggtcctaattgacctctataaaataccacatccattctat

SEQ ID NO: 141333 - DNA, 540 bp, Homo sapiens
aaaatgtcaacatggtagatttaaaatcccaaatataaatacttatattaaatgtaaatgatctaaatacatcaattaaaagtacctcttatcagattaaacaaggcaaggtagaattatttgctgtctaaaggatacattttaaataaaaagggaagttaaaaacaaaatgataaaaatatatattatgccattcgctaatcaaaggaaatacgagttgtgagataactatcagaaaagtagtcttcaggacaaagaattataccagagataaaagtgggtcattctgtaatgataagggtaaattcatgtagaagacattrcaatcttaaatgttcaaaatgcatgaaacaaaaactgacagaaccaaaaggagaaatagacaaatttacaattgtagttggagatgttaatgctcctctcagcaactaatactgacagaacaaaaagattaaaatgaataacgatagagaatacatgaactacattatcgaccaactggtcctaattgacctctataaaataccacatccattctat

SEQ ID NO: 141334 - DNA, 428 bp, Homo sapiens
gggattacaggcgtgagccaccgcacccagccaaacatttctaatactgcacacaaacagcataagccataaaagactgcaagagacaccacaaggaaaagaaagacaagccacatattgggagaaaacatttgataaggactgttagccagactagataaagaattcttataaattaataataaaggcaaacaaccacatttttaatggcragaagatttgaactaacattttattttaaatgatatacaaatgtccaataaccacataaaatgtgctctgtgtcattggttgtcaggcaaaagcaaattaaaattatagtgagataccacttcacatacctcagaataactaaaaataaaaagactgaaaatacaaaatgttagcaaggacgttagagcaaccagagagctcacacattgtcagtg

SEQ ID NO: 141335 - DNA, 399 bp, Homo sapiens
tgccaaatatgaatcagaaagtgagccctccacagacactaatcttcatatttttccattcyttactctttgctgcagtctgaatgtttgtgccccaaacaaaattcatatgttgaaattctatcccccaaagtgatgttattaagaggtggggcctttgggaggtgattcagtcttggggcagagaccttgtgaatgggattcttaaccttataaaagggatccagaaagaaccctccctccttccatcacatgagcatacagtgaggaggtgccattctatgaacctaaaagtgggtctttacaagatctgcagcaccttcatcttgaacttctcagctttcagaactgtgagaaatatatttttgttctttgtaagctacccagtttatggaattc

SEQ ID NO: 141336 - DNA, 434 bp, Homo sapiens
tttgttaagtacctatcaccaaaaactactaaagattattttttggaggaattttctacaaaacccaaaagaaaggataatcccaattccatttaagctgttgcggaggataaaacaaaaaggaagtccacaatcattgttatttaataattttataacctacacaattagagtatagaggaaaaatgagttataagctttgaagayagttttacatatctatttgcaaattatatgactggggattgctattttggaggtaaattaagtgtaattaacaaaaatcactacaataaataagagaatttggcaagtaagccatagaaaataattattataattaaagcaaatgatttcatgtatacaacttgttagaaagtatgacaaaatgaaaaataaaatttctaaaagcaagaaaagtacttagcaataaa

SEQ ID NO: 141337 - DNA, 564 bp, Homo sapiens
acaaagaataacttaaaaatcaatatgaggcatagactgtcttcatttaaacttagccatttaaatcacaccttatgtgtagacgtgttttttatgtggactgctttctccattaaatatatgataygtcctagccgggcagagaaattctccctgcttctctatactttgttacatctatcttgccattcaccccacagcctaccttccacagtgctaagaatctcagcttcttgcagacatcttagccttcagtttacaactagccactgctgagaggagttagcagcagaaagaaactatgtgcgatgaagggtggggtgggaaaaagcactctcttattaaaatatttgttatgtaacttcaaccaatacacgtcacctactgagtaaaggatattgttcattctgagcaattactcaaattgtttcacagtgtgttctatttatttgtatgagcatggttaatatgcaaactggatcatcccttggaaacctgaaagtgaattttgtgataatacaaggaatcctagggtaatcataccagatgtcttctgcatgcctt

SEQ ID NO: 141338 - DNA, 558 bp, Homo sapiens
agattttattgtttccttgtcccccttttaaccaagcagaagcatattaatcaaatcctcacttcttttcagatttcttgtctagaatcacttacttttcattttatcaawgaattttaatattttattgtatgtatctgtgacatggtttggctctgtgtccccacccaaatttcatcttgtagctcccataattcccaggtgttgtgggagggatctggtgggagataattgaatcatgggggccaatctttcctgtgctgttctcatgatagcgaataactctcatgaaatctgatgctttaaaaatgtgaatttccctgcacaagctctctctttgcctgctgccatccatgtaaaatgtgacttgctcctccttgccttctgccatgattgtgaggcctccccagccaagtggaactgtaagtccattagacctctttcttttgtaaattgcatgtctttttcaggagcatgaaaatagactaatataatctagatgcagcttttcttattcattctgtttactaaattgtcctttcagtatggaaaataaaa

SEQ ID NO: 141339 - DNA, 382 bp, Homo sapiens
tttatcaaagaattttaatattttattgtatgtatctgtgacatggtttggctctgtgtccccacccaaatttcatcttgtagctcccataattcccakgtgttgtgggagggatctggtgggagataattgaatcatgggggccaatctttcctgtgctgttctcatgatagcgaataactctcatgaaatctgatgctttaaaaatgtgaatttccctgcacaagctctctctttgcctgctgccatccatgtaaaatgtgacttgctcctccttgccttctgccatgattgtgaggcctccccagccaagtggaactgtaagtccattagacctctttcttttgtaaattgcatgtctttttcaggagcatgaaaatag

SEQ ID NO: 141340 - DNA, 382 bp, Homo sapiens
tttatcaaagaattttaatattttattgtatgtatctgtgacatggtttggctctgtgtccccacccaaatttcatcttgtagctcccataattcccaggtgttgtgggagggatctggtgggagataattgaatcatgggggccaatctttcctgtgctgttctcatgatagygaataactctcatgaaatctgatgctttaaaaatgtgaatttccctgcacaagctctctctttgcctgctgccatccatgtaaaatgtgacttgctcctccttgccttctgccatgattgtgaggcctccccagccaagtggaactgtaagtccattagacctctttcttttgtaaattgcatgtctttttcaggagcatgaaaatag

SEQ ID NO: 141341 - DNA, 597 bp, Homo sapiens
tggttatagccatgcctggctaatttttgtattttttagtagagatggggtttcacaatgttggccaggctggtctcgaactcctgacctcaagtgatccacctgcctcggcctcccaaagtgctgggattacaggcatgagccactgtgcccagccggggtgagtaatttcttaatgggtataatgaacagtattcaggtgatggtgacacaaaaaagtaatatttaaaaatatattagtcattaaagttataagtttataaatgtcataaacacaatgttaagtgaaagaagcaagaaagtagtccatcacataagattctacttataggaagttccaaaaggagcaaaactaatctattgcacaggaagtcagtatactgyagtttttaaagaaaattttagtttagactcttatgaactctatactgcactaaaccttacttagttcccaaggcaaatttgcagacaaattgtctccaatctagtttaggtttttaccatccattcaaagaatcctttttgtgtctaaaactcctggggttcttgctggttacttagctaaaaaacattttatatgaggacagtgagacctag

SEQ ID NO: 141342 - DNA, 621 bp, Homo sapiens
tacaatgttgagaagggcagtataacccttgtttactcgaccctaatgattactcaatgaccttactgaagacaacagggtgccctgtgtgcatttgtctatacgtaagtaataaaaccattagatgattaagagaatgactacatttcaatgatttacttttgtgcaatactggttagccacgtggaaacaggttagtactgtcatgctgaacccagcacttactttcatcagtaactgctagctcatttcaattaacttctctgacactaatttgaaggtaccaccattacagatctgagaggcacacaaaaattacttgaaagagagcagatgtgtttttaaaaaggggagctgttatgctgaacagcaatcagaaacataagagacktcttttttctctacatctaattgaatcagagctgagaacagcgtctatgattgatgataataatatcaatgatggtgatgtaaaagttattaaatacccaaaaaattatacgagtcgtgcggtacatgttgcattgaaagacaatgtctttcccatcagggatttttacctctaaaaatagatgagacagattatgacatatccataaaacattcatcaaaaatatactc

SEQ ID NO: 141343 - DNA, 621 bp, Homo sapiens
tacaatgttgagaagggcagtataacccttgtttactcgaccctaatgattactcaatgaccttactgaagacaacagggtgccctgtgtgcatttgtctatacgtaagtaataaaaccattagatgattaagagaatgactacatttcaatgatttacttttgtgcaatactggttagccacgtggaaacaggttagtactgtcatgctgaacccagcacttactttcatcagtaactgctagctcatttcaattaacttctctgacactaatttgaaggtaccaccattacagatctgagaggcacacaaaaattacttgaaagagagcagatgtgtttttaaaaaggggagctgttatgctgaacagcaatcagaaacataagagacgtcttttttctctacatctaattgaatcagagctgagaacagcgtctatgattgatgataataatatcaatgatggtgatgtaaaagttattaaatacccaaaaaattatacgagtcgtgcggtacatgttgcattgaaagacaatgtctttcccatcagggatttttacctctaaaaayagatgagacagattatgacatatccataaaacattcatcaaaaatatactc

SEQ ID NO: 141344 - DNA, 584 bp, Homo sapiens
cttattgttaattacatttcctttaaacagcacatatctgaattttacacagtctcaataattggcttacatgttaggctatatataattatacattatatataatttcagttaacttcaaattaggtaatattgctgttttatattttcccagttgtttaccaatttctttttttattttttcatctagcacccttagatcttctttattgaatattttttcttatttgtaaatacatccktcagtgctttctgttataggatttgctgttggtatgtgatctcaatttctatttgtgtgaaaattgtaaactgtagcacttacctacaggaagcaagtttcctttagcttttttcatagacagcactgtcattaggccgtttcgctaagcaccttaaatactgtttgaagtgtctgtgcatggtagagatgatgggtaagtcccaccagcttagcttgcaaatggctttatgcaatatggctgtgctttctggaagtggattattattgtattaccaccccacctggacttggccctaaagagcagcagagtaaatttccttataggcaaaatataaatttt

SEQ ID NO: 141345 - DNA, 615 bp, Homo sapiens
ttcttacagcaaagtttcttacacaggaaaagaaaagaaaagtaaagaaaaaagccaggggagttaaaaaatttgacccagaaaaataacaatggcactgaaaattaaagaaraatggagataagaccaagaatgaaggaatcactgtacttcctcaactaaagctgaaaccttcaaccaaacactgcttttatactttctgattgaaagccttgagcccagtttatttctgggaacttatttaacaaaaaattaaattgtggattaaaatatattaactatatatcatggatatttattatttctttatggagaatcagtatcttaacttcctatgcttatagacctacctcccacaaccttgtgagttttgatgagtttgactggaaagagtgtgcttttcatcatagaagctaaagttacttatacacccttgcagctaggattcaggcaaatccactaggttttgcaaatcagatgaaaccaaccaatacacagggatttttgaacatgatggactgaagaaactctctggtaaaggggaaaattaaaacaagattaaatgccaagagcagacagaacaggaatgctaatgtgaatgtcatatgctcaggg

SEQ ID NO: 141346 - DNA, 598 bp, Homo sapiens
tactcaatatttaagctacaaaagttaccttgcacaaagctcatccttctagtagagatatgagctgctttctgtacctactgcttttggcagcccacactttgattgtggtcaaatattcagcaattttatcatacatccttgatgccccawatatttcccctgacattgccttccccatagcttcaggctctaaacttttccctcgacttattttcctcatctctgtccattccaacatcctcttgagtctgactaacctgataaagaaatttaatccaaaatgttcttccaaatttttatttgggctttgttaactccaaggaatagctaatatgataactataagcacacaaacagaagctttaaggcatatatatttggacaagaaaatatttttcaaattctacctcacaggtgaatgcttgttcctgaaaagtataacagtggctctgagactcttaagttaaaataaatctcctatttcctcagcattttagccattatcaattgtcattccaacaatatttgatataccctgactttgaaaatgagtgcctttttaaaactatttatttaacaaatacttgttaaatat

SEQ ID NO: 141347 - DNA, 621 bp, Homo sapiens
aaggaaggaagacacggtctagtgtccacacataccagcaaaacaaaacaaaacaccaattgtgatatttgtttctgaaaaaatctgtatttttctgttttttcacaatgcctccatttttctctcccctctcttctattctctcatggccccatcttctttcttgctctcttctcttgcctcttccattcctgcaacttttagcctatgttcartatctactaaggttttccaacatttttcttcttttagtggattagttcattttcacactgctaataaagacgtactggagattgagtaatttataaagaaaagagatttaatggactcacagctccacatggctggggaggtctcacaatcatggcagaaggcaatggaggaggaaggcacgtcttacacggtggcaggcaagagagagcatatgcaggggaactgccctttatagaaccatcagatctcatgagacttattcactatcacgagaacaacttgggaaaaatttgctcccatgattcaattacctccctccaggtcccctcatgatacatggggattattataattcaaaatgagatttgggtgggtacacagagccaaaccatatcatttagtcat

SEQ ID NO: 141348 - DNA, 622 bp, Homo sapiens
attgaagatgtcttgagagccccactatacccaaatcgtgagtctggtcactcctctagcagagcttggtgcagtgacagctagaaaagctgagttccaattgagtctgttgcaccagagttcttttgaagatgctcagcaaagtaattattttcttttgagcagatgtacagcacatccatgagaaggccaagtaaaggatgctctccagcccagtcaaatgatccaatccccctactatctcagacccctctgagtttcttcctatggccgccctcactgtacagaaatagcggagcagcatcagggtgagtcatcaatggtgggcagccagaagaccatgctggaacacgcactggcaaaagtcatgaacttggggttgaactgcaaacaggtaattgggccggtgtgtttaccatccaacacagctacttttataccactctctccattccagacatggatcttgccatcctctgaaccaatcataataaactgagaatctggagtaaatgaagcctccagtgtgacagctttgctrttggcataaccctcaaacgtgtgcatcaccactcctttgaaagcatcaatgagggaaatgaagctgccgttggtggaaatg

SEQ ID NO: 141349 - DNA, 549 bp, Homo sapiens
agctcaaaaattcaggagtattcaggggtcttttttattttgtaagttgtcagggtttaccaagtattaagaaatgtgtctaattttgagcagttttgcttcctgcagtaaaatgtgtgtgtgtatgtgtgtgtctcctatcatagcacggatgattttttatgtgactctattggaatcctataattgttgaaatgaagaaaacacatgctttatggcctggctgcttttgtatagtaaaacttaaccattgaatcaatcttaatttatgaaattatacttggaattttgtctcaagtaagctagagatccacaagtcttgtgtgtatgataagcaacctggcaaatgcaaatgcctggaatctatgctcagagttctgacattttggccatgtatttggcctagacatctgcattttagttttctgtccatgcaagaaatcctgacgtaggtggctagtagagaacttcctgagcagcactaccctatgcygtcagatgagagcagggttctggctatcttacctactgccatatctacagcaactt

SEQ ID NO: 141350 - DNA, 569 bp, Homo sapiens
agcatttggattccaggaaggttgcagttctgattatttgtatagtttttagtagtgtctcaactctgatctagtatcacatcagaatcatctagggatcttgttaaaaatgaatatcttgggcaacatcaattccaagtgtaatataatgaataggggcatagaacatttaacaagtttttcaagtaatactatgcacaaaaayttaagaaacagtgccaaatgaaccctgagaaaacaactcccccttcctttttatctcccatttactgaatgagctgcatatggaggtacttggatttgtaagtgattgcatgggcatctcttccgggatccaggtaacaggtttcactatcaagtcatcacaaatttggaactggtttatgtttgaactttggtgcttcttgtaaatttttctctcccctttggctattttcactcttactggagacaacaaaaacagcaataccgtatttgtgcttttcttaatatccaagggagtgataaagttggtcaagctgacctcacaatattttgataggttttgttgctgttgtttttaaaagaac

SEQ ID NO: 141351 - DNA, 461 bp, Homo sapiens
tctagctaaaggggaagaaaatgatagtgtctacctcataagtttgttgtcaggactaaattgattcattcataaattcataggtcctggcacattttaagtgctacatatctattaatagtatttcattaatatacaagtttttgtgatattttctatacaaaatatacatataatccamattttttcacttcttttaaagaaaaaaaaaaacttcttaaaaaatagtccactaatgtgaccctcccatcttattacattctgtcctcaactttttaattgtaaagaagaaaactcctacagccattgttaaatcttttcctttttccacaccgatatttcactcatgaagaattactttgggctgtatattcaatactcacttcttcaattcctcccactctatttctcttgaatccattcgagttgactttttctggtactattccacaaaaacctat

SEQ ID NO: 141352 - DNA, 479 bp, Homo sapiens
tcgactgatctatgccaaaaactttcagacagaaaccccaaacactctgtcctctcactgtgtaaaactgatatattttcagatggatgtgttttggaattagcctaaataattaargctaaaatgaccaactattcctgtacaattgatttttaaaagctggtactggtaaatgctaagaaaaaagcagtgaacaagcaaagaggaagttagttcaatttatatgcatccttatattctcaccattaatcatgatcttaagacttgttatttttatttcctctgagataatttgaatattccaagtaagctagaaaacttttcttggctttgccaataagtgacagggaatcactcagaatcttctttgaaataggacaaaatatacacatgtaaataaatagtaattagctcaagatttatctatttaaataaaaaaatatagattggcaatcttactgatgttaaatatgaaaatc

SEQ ID NO: 141353 - DNA, 479 bp, Homo sapiens
tcgactgatctatgccaaaaactttcagacagaaaccccaaacactctgtcctctcactgtgtaaaactgatatattttcagatggatgtgttttggaattagcctaaataattaaagctaaaatgaccaactattcctgtacaattgatttttaaaagctggtactggtaaatgctaagaaaaaagcagtgaacaagcaaagaggaagttagttcaatttakatgcatccttatattctcaccattaatcatgatcttaagacttgttatttttatttcctctgagataatttgaatattccaagtaagctagaaaacttttcttggctttgccaataagtgacagggaatcactcagaatcttctttgaaataggacaaaatatacacatgtaaataaatagtaattagctcaagatttatctatttaaataaaaaaatatagattggcaatcttactgatgttaaatatgaaaatc

SEQ ID NO: 141354 - DNA, 479 bp, Homo sapiens
tcgactgatctatgccaaaaactttcagacagaaaccccaaacactctgtcctctcactgtgtaaaactgatatattttcagatggatgtgttttggaattagcctaaataattaaagctaaaatgaccaactattcctgtacaattgatttttaaaagctggtactggtaaatgctaagaaaaaagcagtgaacaagcaaagaggaagttagttcaatttatakgcatccttatattctcaccattaatcatgatcttaagacttgttatttttatttcctctgagataatttgaatattccaagtaagctagaaaacttttcttggctttgccaataagtgacagggaatcactcagaatcttctttgaaataggacaaaatatacacatgtaaataaatagtaattagctcaagatttatctatttaaataaaaaaatatagattggcaatcttactgatgttaaatatgaaaatc

SEQ ID NO: 141355 - DNA, 479 bp, Homo sapiens
tcgactgatctatgccaaaaactttcagacagaaaccccaaacactctgtcctctcactgtgtaaaactgatatattttcagatggatgtgttttggaattagcctaaataattaaagctaaaatgaccaactattcctgtacaattgatttttaaaagctggtactggtaaatgctaagaaaaaagcagtgaacaagcaaagaggaagttagttcaatttatatgcatccttatattctcaccattaatcatgatcttaagacttgttatttttatttcctctgagataatttgaatattccargtaagctagaaaacttttcttggctttgccaataagtgacagggaatcactcagaatcttctttgaaataggacaaaatatacacatgtaaataaatagtaattagctcaagatttatctatttaaataaaaaaatatagattggcaatcttactgatgttaaatatgaaaatc

SEQ ID NO: 141356 - DNA, 632 bp, Homo sapiens
aatgcagactaaaatagtgatgagagatcctatcatttggttgctcttattaacagggaagtagcagttattgctgttataaaaggtgacagtcctttagacacaagatcccagtgttcattatagtaccctacgggtctattttgatcagaatgtttttgattcaaaatgtccaaggcatttccatgaattccatgaacaatcaatgaaaatgaaacatgatttcaatgttgtattagtcagggttctctgaagggacagaactaattggatctatacatataaaagggagtttattaggtagtatcaactcacatgatcacaaggtcccacaataggccctctgcaagctgaggggcaaggaaaccagtcagagtcccaaagcagaagaaactggagtccaatgttcaagggcaggaagcatccaaagtgggagaaatatgtaggctcagyggctaagccagtctagccttttcacatttttctgcctgcttttatattctagctgcactggcagctgactagatggttcctacccaggttaaggttgggtctacctttccgagcccactgactcaaaggttaatctcctttggcaacaccttcccatacatacccaggatcaatacttt

SEQ ID NO: 141357 - DNA, 595 bp, Homo sapiens
ttaatgctacactatgaatttaatgacatattttaaaattgaaaataattagtttttgctatttctatgcatactgggtattttaaaatattacatatgactactctcaatgtcctctcacaaaaatgaaaattcaaaatatttttatttgcctctttcctccaaccaatactcagtaccactgccatttggataataaactttaacagataaaaygtttataaaagacataataaataactcttaatatccaacactcataattttaaattatagatcattttctggtagtatgacattacagaatgagtatgagtcagttccagaaaattaaatggcatgtcattgattatgtttaatttaaaagcaaactctcatttcctttcatccttaatgcttgctcagtcttagagtgggatgaacgtctcagtcactactaactcctcactttcttaaagtatatagcagtggatggggtgagatttgaaggcccatagaagcacattctaagggacacttggtattctattttgggcaatataactgaaggctgcaatgtgaattgtcttcttagatcgactgttattacatagca

SEQ ID NO: 141358 - DNA, 595 bp, Homo sapiens
ttaatgctacactatgaatttaatgacatattttaaaattgaaaataattagtttttgctatttctatgcatactgggtattttaaaatattacatatgactactctcaatgtcctctcacaaaaatgaaaattcaaaatatttttatttgcctctttcctccaaccaatactcagtaccactgccatttggataataaactttaacagataaaatgtttataaaagacataataaataactcttaatatccaacactcataattttaaattatagatcattttctggtagtatgacattacagaatgagtatgagtcagttccagaaaattaaatggcatgtcattgattatgtttaatttaaaagcaaactctcatttcctttcatccttaatgcttgctcagtcttagagtgggatgaacgtctcagtcactactaactcytcactttcttaaagtatatagcagtggatggggtgagatttgaaggcccatagaagcacattctaagggacacttggtattctattttgggcaatataactgaaggctgcaatgtgaattgtcttcttagatcgactgttattacatagca

SEQ ID NO: 141359 - DNA, 592 bp, Homo sapiens
gatcagcccattgagtgtggtgacagagacctcccagtaaacaaggatgaagtatatacccatccacattggcagcagctggactttaactatcattgccatctactggcctgtaggttgaactgcgcaggccaataaaaagcctgctgacagaaawgaatagagctgtagaagcaaaaccaaaatactctagctgacattctctaataggatacacagggatgaaggggaagaaaataataataataatagtaatatataataaataataatattaaaacttggaaagaaaagaaaacaattttatctgcatgaaaataatcacaaaaattagaagttttagcatctccagataagaaagaaccagcacaaaaattttgacatcattaaaaatctgaatgttttgaaatcaccaaaggattacactagctcttcaaagcatgggttgcaaggaaactcaataggatccaggacaatgtgtaaaataacacatagaaacttctaaggcaatctaggaaatgaaggaggagaaaaacattttaaaaataaatcagttagagcttctgaaattaaaaaattcacttaaggaatt

SEQ ID NO: 141360 - DNA, 592 bp, Homo sapiens
gatcagcccattgagtgtggtgacagagacctcccagtaaacaaggatgaagtatatacccatccacattggcagcagctggactttaactatcattgccatctactggcctgtaggttgaactgcgcaggccaataaaaagcctgctgacagaaaagaatagagctgtagaagcaaaaccaaaatactctagcygacattctctaataggatacacagggatgaaggggaagaaaataataataataatagtaatatataataaataataatattaaaacttggaaagaaaagaaaacaattttatctgcatgaaaataatcacaaaaattagaagttttagcatctccagataagaaagaaccagcacaaaaattttgacatcattaaaaatctgaatgttttgaaatcaccaaaggattacactagctcttcaaagcatgggttgcaaggaaactcaataggatccaggacaatgtgtaaaataacacatagaaacttctaaggcaatctaggaaatgaaggaggagaaaaacattttaaaaataaatcagttagagcttctgaaattaaaaaattcacttaaggaatt

SEQ ID NO: 141361 - DNA, 592 bp, Homo sapiens
gatcagcccattgagtgtggtgacagagacctcccagtaaacaaggatgaagtatatacccatccacattggcagcagctggactttaactatcattgccatctactggcctgtaggttgaactgcgcaggccaataaaaagcctgctgacagaaaagaatagagctgtagaagcaaaaccaaaatactctagctgacattctctaataggatacrcagggatgaaggggaagaaaataataataataatagtaatatataataaataataatattaaaacttggaaagaaaagaaaacaattttatctgcatgaaaataatcacaaaaattagaagttttagcatctccagataagaaagaaccagcacaaaaattttgacatcattaaaaatctgaatgttttgaaatcaccaaaggattacactagctcttcaaagcatgggttgcaaggaaactcaataggatccaggacaatgtgtaaaataacacatagaaacttctaaggcaatctaggaaatgaaggaggagaaaaacattttaaaaataaatcagttagagcttctgaaattaaaaaattcacttaaggaatt

SEQ ID NO: 141362 - DNA, 584 bp, Homo sapiens
caagtctcagagttgtaaatgaaccaccaagtaggtaaaaattacaacagaataaagtcaacatttcttgcactctgaacatctcactgtactccacaacactcaccctttcttagttcctcactttkgaagatgctgtttcttgtatctggaatgctttcattggatttcctactttaggctctatcccattcactgtctgacatctccttcactggcattaaccagttgtacctaatatgtgagttagacaaggaatctgaaggcggtacagagcaaaaggagcccgccatgctcaacatttaatttgatccatccttaggcacttatgaagagcaagttcaaatggtaattgttccttggctccccaggatgacatctctttgttgcttgagcaatctggccatataatttttatggtacttaaataattgctttatattcacctatttgcatgtcttttacttctcatggtgtaacaatttttcactgtccttgggggttatttttggtcctctaggaagcagatcccccaaataggattagacatacaagagatttactggggaggaatacctatgaag

SEQ ID NO: 141363 - DNA, 614 bp, Homo sapiens
aaaacccagggtgccctttcccatattctgggaaattcttaactgtgattgaatgaatgatcctgggatgagggtacagcatccataagacacatttaaagtatacatataaaaattttgttatggaattcataaaaatgtaagtttgaatgaaaaaattttaatgaaatcctggagacagatttatcttctaaaggctgaacacactgcagagccccagctccctcatggtgctatccttgatcccgccagccatgtgctcactctccctctgaactctctcctgtggagccatgattagccatactacctggtgttggattccacagcacccgataccatttctgatatggatggctcacagaacttatcacacctatagaatgctatgagtggaaaagaggcatcccatacatattttctggatgagtagaatttctgggttacttcsctgtccaagggcaagaaagtctctagggaaatttgaagctgaaaaataaatatggtagcctctgtagtaagattaggaatcacaaatacctacataaataggatgataagatgaatatagaaaatgtgtaaacatgtaaatctaatttaaaaaaaaattgagg

SEQ ID NO: 141364 - DNA, 431 bp, Homo sapiens
atgttttaaaataaatctcattgttttgtactttcttgtaactaatctagcacatctaatttatatacatttcaataaattccagtagtattacaaatatttatagacaagcaaaataagtttcttcaactctattttttctttgtttttaaacaaggtgttttaatgtaaragcatttaaaagtttttattaaatcaaatgaagaagaaatgattcaagctctatcaaagtaaaaggggtagggaagagacaaatttgcaaggagtttttttttaacctccaaataaaaatgcttttttaatcttaaatgttgttctacctatttctatttttgaataaaaatagaacattattgagttagagaatgaaaaaggctatgactaggctacaggctaacgtcaaggatgcagagatagttctaaagaggttt

SEQ ID NO: 141365 - DNA, 546 bp, Homo sapiens
aaccctaaggcaaccactaaaatactaaaataacactaatattaaaatactaaaaatgccactaaaataccactaatgctattaaaatactaaaattaaatcagttattgctaataagccacaacattttaaaaaacggaatcataaaaattactcagttaatctgaaagaagccattaaaaatagaaaaaaaggaaatcagacaaatagaacacaacaaaatgatatacttaatactaattatagcaatactcacatttaatgtaaataccccaaataaaactcactgagcattacattagatgaaaaagcaagaccaactaaattctgcatacagaaaatcaactttaaatgtaaaagcaacaaaaaagttaatcataaaagaatggaaaaatatawacatactctaacaccaatttttaaaaaacttctggagtgtcagtattaggcaaagcagatataagggcaaagattactaccaggaataatggttatttcataataataaagaggccaattcatcaaagggatataagaattctaatc

SEQ ID NO: 141366 - DNA, 541 bp, Homo sapiens
gctagaattctgttggctttatggatatttaaagagatttgacatttgaacaacattgaattctttaagttatgaacaaaatatacttatttatgcctttaaaaatttctgtcattgggaggctgaggcgggtggatcacaaggtcaggagatcgagatcctcctggctaacacggtgaaaccccgtctctactaaaaatacaaaaaattagccgggcatggtggcrggtgcctgtagtcccagctacttgggaggctgaggcaggagaatggcatgaacccaggaggcggaggttgcagtgagccgagattgcgtcactgcactccagcctcggtgacagagcgagactccatctcaaaaaaaaaaaaaaaaaaaatttctgtcagtgacattttacagttttcagtgtgtaggtcttgcacatcttttgtcctatttatattcctaagtattttacatattttatgctgttgtaaatggttttgttttttagtttaaatgtcttactgttcatttttcttcagaaataaaattgatttt

SEQ ID NO: 141367 - DNA, 541 bp, Homo sapiens
gctagaattctgttggctttatggatatttaaagagatttgacatttgaacaacattgaattctttaagttatgaacaaaatatacttatttatgcctttaaaaatttctgtcattgggaggctgaggcgggtggatcacaaggtcaggagatcgagatcctcctggctaacacggtgaaaccccgtctctactaaaaatacaaaaaattagccgggcatggtggcgggtgcctgtagtcccagctacttgggaggctgaggcaggagaatggcatgaacccaggaggcggaggttgcagtgagccgagattgcgtcactgcactccagcctcggtgacagagcgagactccatctcaaaaaaaaaaaaaaaaaaaatttctgtcagtgacattttacagttttcagtgtgtaggtcttgcacatcttttgtcctatttatattcctaagtattttacatattttatgctgttgtaaatggttttgttttttartttaaatgtcttactgttcatttttcttcagaaataaaattgatttt

SEQ ID NO: 141368 - DNA, 607 bp, Homo sapiens
tggccctgcattgcaggttgagttgtaagtctgacttctgtctccatggattaagcagcatggagtctgtgttactacctgagagtaaaagcgattcaaagctcttggctctgtctatgaatgaatgcaaaggcaattctctcccaggacctcttggaaatgctatgggagattagagccccattgcacaatcatgccttaactcagcctctatggccctgggacctctctaacccctctctaacccctctcagctatgttgaaagctctgctggtgaaggaaaatgtagtgaagcatggcaagctactttactcacaccaagaaatgcaaagccctgacaatgtagaggggttccagaataagwctttgaatcctttttctgatattctcaaatacttgtgttgagaattgggcaggatgctgaggggtggggagtaggcaaaagatggcgaaagacatccacttcagcgaacctctaatgtttcccattcagttgggaatctaatgtttcagattcagttgggaatctgtcaaaaaacgggctacatcttgggggaaaaaatccatcttttaaaagtttccaacaacaacaaacttctctcattt

SEQ ID NO: 141369 - DNA, 607 bp, Homo sapiens
tggccctgcattgcaggttgagttgtaagtctgacttctgtctccatggattaagcagcatggagtctgtgttactacctgagagtaaaagcgattcaaagctcttggctctgtctatgaatgaatgcaaaggcaattctctcccaggacctcttggaaatgctatgggagattagagccccattgcacaatcatgccttaactcagcctctatggccctgggacctctctaacccctctctaacccctctcagctatgttgaaagctctgctggtgaaggaaaatgtagtgaagcatggcaagctactttactcacaccaagaaatgcaaagccctgacaatgtagaggggttccagaataagactttgaatcctttttctgatattctcaaatacttgtgttgagaattgggcaggatgctgaggggtggggagtaggcaaaagatggcgaaagacatccacttcagcgaacctctaatgtttcccattcagttgggaatctaatgtttcagattcagttgggaatctgtcaaaaaacgggctacatcttgggggaaawaatccatcttttaaaagtttccaacaacaacaaacttctctcattt

SEQ ID NO: 141370 - DNA, 607 bp, Homo sapiens
tggccctgcattgcaggttgagttgtaagtctgacttctgtctccatggattaagcagcatggagtctgtgttactacctgagagtaaaagcgattcaaagctcttggctctgtctatgaatgaatgcaaaggcaattctctcccaggacctcttggaaatgctatgggagattagagccccattgcacaatcatgccttaactcagcctctatggccctgggacctctctaacccctctctaacccctctcagctatgttgaaagctctgctggtgaaggaaaatgtagtgaagcatggcaagctactttactcacaccaagaaatgcaaagccctgacaatgtagaggggttccagaataagactttgaatcctttttctgatattctcaaatacttgtgttgagaattgggcaggatgctgaggggtggggagtaggcaaaagatggcgaaagacatccacttcagcgaacctctaatgtttcccattcagttgggaatctaatgtttcagattcagttgggaatctgtcaaaaaacgggctacatcttgggggaaaaaatccatcttttaaaagtttccawcaacaacaaacttctctcattt

SEQ ID NO: 141371 - DNA, 462 bp, Homo sapiens
tgaaaatcatagccttgatcaaaataaaataatcagtaaaggctgaaatattatgactcataccttagggtttgtttgtttgtttttggaaaagttaaaaaaatacaaagtattccacaaaataatgcatgagtttcctattttaaagatggtggtggaaggtgggtgtttctgtctttctttcctaagaataaartcaaaactcagaatgcaaacttcatttttggtaaaaatagaaaacagctgaagtgccaaactacaaaataggtctagaggactgttcacatcttgttaagggcagtgcagaaagaatcaggtggagggactcacagcagtaggtctagggggaaaaaacagtaaagatattttcttgaaagagaagaacacaacctgagtcccagttgctaaatcctttgtttttaacagctggacaatggtacacacactgggggcagcagcaaa

SEQ ID NO: 141372 - DNA, 462 bp, Homo sapiens
tgaaaatcatagccttgatcaaaataaaataatcagtaaaggctgaaatattatgactcataccttagggtttgtttgtttgtttttggaaaagttaaaaaaatacaaagtattccacaaaataatgcatgagtttcctattttaaagatggtggtggaaggtgggtgtttctgtctttctttcctaagaataaagtcaaaactcagaatgcaaacttcatttttggtaaaaatagaaaacagctgaagtgccaaactacaaaataggtctagaggactgttcacrtcttgttaagggcagtgcagaaagaatcaggtggagggactcacagcagtaggtctagggggaaaaaacagtaaagatattttcttgaaagagaagaacacaacctgagtcccagttgctaaatcctttgtttttaacagctggacaatggtacacacactgggggcagcagcaaa

SEQ ID NO: 141373 - DNA, 464 bp, Homo sapiens
agtatatagaaacacataatccaaccaaggaaatcatgaaagcctccgtgggtaccttcataggaggtttccagggctcattcataaaaatgagtaggaatacatagaagaaaggaggaaaagggaggtatggtatcaataaaggcataaaattaaaaaattacatggtttctggatgagggacataagcaatactgcacaactgaggcatgaagtgagaggcagagtgctktaagataaaggtcaagaggttcatagggatggcctgctgggccatgttaagaagattgtattttaactgctaggcaatggaaagctattgaaaatactgaaaatagcaaaacataagtttaattttcctttttagtatagtggtgagtgaaaaaaaggtccaataaaatcagatttgtgtttttgataccgatactatgatatatgtacagaaaatgtgatttaaaggaata

SEQ ID NO: 141374 - DNA, 458 bp, Homo sapiens
tttggtctgctcacagtgcatcaatacatgtaataatctcccttcttggcatcaacaatttcagcttagaaactaggacggtaagtatcacacatgctccaaaatacaagcatacagcctcttatcaaataatwtggcttttaaagaatttagcagcacaaatggcttaatgtaaactaagctcaatatggcaaaatcctacgcagcttgaaaactcagtggtaggagttgaagtcagcctgcccagttgacaagtgactcaatactgaagtttaattgtctttgctgtttgccagtaactctaagaagatacttatcttggtcttgctgtgctggttcaccagcatttttcagttgggaaagtaactatgtgaaccacagtggctctgctagataaaaataggtgtattatcattggcattttagacaagccttcggagtttcactgctctggaacg

SEQ ID NO: 141375 - DNA, 603 bp, Homo sapiens
gctacttccctaaaaggattagttctagggtccagatccttcctcagtgaagggcttgttgacccagctgtttggagacatgtcagcaggcagctgttagctatcagccccttcaaggattgcctcagctgcagaaccctcttgtttaaggtcatgctctttcccagggacacacacatccaacaactgattagtgcagaagaataaagacctgatgatcttcatctggctcaggatacctctgaaggaccattttagcaccaagtgtccctgcagtgttggctgaggctgctgtcaagcctgcatttcagctaacttctccttctccttttgcctaatcctgttttcttatctccctttccatatgtgtctatccatagggcgttctttaataaatatgtagcatgttctaatccccatctcagagtctgcttcctgggaaactgtaacctgtgacagttggtacccggagtactctragaattgtaggaaagaagatggggtttggagccggatcacttgtggctttgctggcaatgagaaccacatcacttgtggtagggcacaggcagtcctgatactaggtaaggttcctattggtca

SEQ ID NO: 141376 - DNA, 408 bp, Homo sapiens
cagaattctatcctgtgacttgtctcttgaaccccaaaatgatcmgataatatttctgtcttcttagacaaggagcagtgctatgaacatcatttgcatctttcccattattaggtctaaacagtgacacacagagagggtttggccttcttcctcctctttccttcttcctcctaaggggtgtggaaccttctccatgacctccaagccttcctcttccacctccatcatctgacatccagtggatgaccttgcctttcgcttcacaggaacagtgggatcacaggcagaaataggctcagcttccccagcatttccactctagaatcatatctaccttgacctacattgcattgtttgctgaatagcccactactccaaaacttagtggcacagaactgcaataaa

SEQ ID NO: 141377 - DNA, 645 bp, Homo sapiens
tgctctgccacttgtctataagtgacacacctgcctgcccttgccaagtcctccagggtggatggtaagtgcatccttttcttgtagattggatgaaagcagggaccaacatctcaggggagaactttcatcatttataattgtacccattttacctattcatggtattggagttggtgcacaatattttgcaccaatgttttgcacaatattttgcactaaatggggaggcttggagaaagcagtttgtgtgcaacactgcaaggcatgtgaaatgtggtggttatcaccccttcctccaaaaacagggctgctggtgcccataattggtatctgtaggcaacattcctgtctacaccagggtgactgctgagctcacatagagactctaaagataacttcacacctgaattcttccctcacagcagttagatgagcttggagaaattccttacactctgttgacccccaatgtcctctgctwtgatgataattgtgtccagtctgttagtttcccagggctgccataacaaagtaccacaaactgggtggcttagaaccacaaaaattggttgcaccactgtcctggaggctggaaatccaaaatgaagatggcgtcagggctgcgctccctctaaaacccgt

SEQ ID NO: 141378 - DNA, 559 bp, Homo sapiens
gtattctactgctaaaattttattctagatattcttgcactgtgtgcaaaaaaatggtcatagtaaatataattttaaaaataaaatatgagaagtagaaaagtgaaaaaaactacatgttcataactaaagtatttgtatccaaaaaaytatgcaaccgtgaaaaacaataaattataagtaatgacatgaaaaaaagtttccaactgttatgcttcttcttgtgtagatgatactgccatttgtgaagaacattctggaagaatacacttaatctggaaatgacagactgaggatctgggtgtctacaatgagagagaaacttaactttttctgtatataccttggaattaattgaatttgtttttattatgtgcatttattatatgcataattccttcaaattaacaaagtaattaaaataaattaaaagtcatactagaagaaatgtaaaacatactagaacaaaaaagaataaccactgaagaggatactgccaaggacatggtagataggcttgaagatttgtacaaaatgaaaacagacaagaacagggata

SEQ ID NO: 141379 - DNA, 559 bp, Homo sapiens
gtattctactgctaaaattttattctagatattcttgcactgtgtgcaaaaaaatggtcatagtaaatataattttaaaaataaaatatgagaagtagaaaagtgaaaaaaactacatgttcataactaaagtatttgtatccaaaaaactatgcaaccgtgaaaaacaataaattataagtaatgacatgaaaaaaagtttccaaytgttatgcttcttcttgtgtagatgatactgccatttgtgaagaacattctggaagaatacacttaatctggaaatgacagactgaggatctgggtgtctacaatgagagagaaacttaactttttctgtatataccttggaattaattgaatttgtttttattatgtgcatttattatatgcataattccttcaaattaacaaagtaattaaaataaattaaaagtcatactagaagaaatgtaaaacatactagaacaaaaaagaataaccactgaagaggatactgccaaggacatggtagataggcttgaagatttgtacaaaatgaaaacagacaagaacagggata

SEQ ID NO: 141380 - DNA, 559 bp, Homo sapiens
gtattctactgctaaaattttattctagatattcttgcactgtgtgcaaaaaaatggtcatagtaaatataattttaaaaataaaatatgagaagtagaaaagtgaaaaaaactacatgttcataactaaagtatttgtatccaaaaaactatgcaaccgtgaaaaacaataaattataagtaatgacatgaaaaaaagtttccaactgttatgcttcttcttgtgtagatgatactgccatttgtgaagaacattctggaagaatayacttaatctggaaatgacagactgaggatctgggtgtctacaatgagagagaaacttaactttttctgtatataccttggaattaattgaatttgtttttattatgtgcatttattatatgcataattccttcaaattaacaaagtaattaaaataaattaaaagtcatactagaagaaatgtaaaacatactagaacaaaaaagaataaccactgaagaggatactgccaaggacatggtagataggcttgaagatttgtacaaaatgaaaacagacaagaacagggata

SEQ ID NO: 141381 - DNA, 559 bp, Homo sapiens
gtattctactgctaaaattttattctagatattcttgcactgtgtgcaaaaaaatggtcatagtaaatataattttaaaaataaaatatgagaagtagaaaagtgaaaaaaactacatgttcataactaaagtatttgtatccaaaaaactatgcaaccgtgaaaaacaataaattataagtaatgacatgaaaaaaagtttccaactgttatgcttcttcttgtgtagatgatactgccatttgtgaagaacattctggaagaatacacttaatctggaaatgacagactgaggatctgggtgtctacaatgagagagaaacttaactttttctgtatataccttggaattaattgartttgtttttattatgtgcatttattatatgcataattccttcaaattaacaaagtaattaaaataaattaaaagtcatactagaagaaatgtaaaacatactagaacaaaaaagaataaccactgaagaggatactgccaaggacatggtagataggcttgaagatttgtacaaaatgaaaacagacaagaacagggata

SEQ ID NO: 141382 - DNA, 624 bp, Homo sapiens
taaatggctatgcatagttgtgtactgaataccagattttaacctctttttcttttaatgtatcatatgcatatgtttgaaactgtcagaaattatatacctgttaaatccatattgtaggacattcaacttagtctgaagtcttattttaaarcaattaatcagtcttatacctaagccttttgctgacattcttaatgtttccttagcataaatcattgcagtgggatttctgtgtgaaagtacttttgatgcatattgacacgtttctgttgggaaagtttgcaccattccacatagctctcatttcccagacctcatcagaactgagtgttatatgcctttaatctttccatctaacgagtggaaaacacatccatttttaagtttgcatttctttggttactgaacaaaattaaatcttttcaatgctttatctatgtgcatttattattgcatgaataacttattcatgttcccttatcattttgagaagcctcctattatacgaaagatcccaattatttgtcatatatactacaaagccttcccaatgcattttttactttaaaattgttgtgggttatttttaacatctagaatgcttgtaatttctaagtttga

SEQ ID NO: 141383 - DNA, 457 bp, Homo sapiens
tcaatcccaactcctcttgaatgtgagttggacctcatgactctcttctgctgaacagaatgcagcagaagtgatgatgtcctaggctgcgtcataagaggcatgactgcttgtttcctgctctctcttggatcctttattctgggggaagcagctgccatatcatgaaggtacrtaagaagccctatggagagacagacctgtgtgccaaggagctgaggctgccagcaaacagccagcaaggaaccgaggtgcctgccaactgcttcaagtgagctccagagtggatcatccgccccattcacgccttcagatgactgtagttccagccaacatctccagggcagcctcgagccatggcctcccagccaagctgctctgggattcccaatgcacagaaacaatgaggaaaaaatgtttattgttttaagctgctccatttagtggtaattggtac

SEQ ID NO: 141384 - DNA, 457 bp, Homo sapiens
tcaatcccaactcctcttgaatgtgagttggacctcatgactctcttctgctgaacagaatgcagcagaagtgatgatgtcctaggctgcgtcataagaggcatgactgcttgtttcctgctctctcttggatcctttattctgggggaagcagctgccatatcatgaaggtacataagaagccctatggagagacagacctgtgtgccaaggagctgaggctgccagcaaacagccagcaaggaacygaggtgcctgccaactgcttcaagtgagctccagagtggatcatccgccccattcacgccttcagatgactgtagttccagccaacatctccagggcagcctcgagccatggcctcccagccaagctgctctgggattcccaatgcacagaaacaatgaggaaaaaatgtttattgttttaagctgctccatttagtggtaattggtac

SEQ ID NO: 141385 - DNA, 472 bp, Homo sapiens
ttcaataaatgtaaacattaactgttgctattatcctagttctgttttagaagaatcatatttactatacctattaatagttcacatgaagcaagaaacctaatatttatattttacaataaatattatgaatatctctctcagggaaagaaactgtttagataatctgcttttcacatagaaaaatcttgtttctaaatcttagagactacagtttttgtcttaactttytcatgttagagacagtttttactgtaaaagtaaaatagtgccttgtagctatagttagcaaccctttttttgctttgtttttgcaaaagggggaaattatggaagctataaataagtaatgattgccaaagatcagaggaattttacataagaccaaagcaatttaatctggtgctttgatacaagtatttaataattcagcacaacgacaataatggcatcttgagaatttccaacaact

SEQ ID NO: 141386 - DNA, 296 bp, Homo sapiens
tcataccaatcattctaaatgataatattcttttaaacatccatgtcagtaaataaactatgatttctttgaagataagaatcatgttttgtgtttgtgcctccacaagaratgcattttacattctgaatacccaataaatgagtgataaataagagtcaattaaacagttaataattcaagagtatattaatgaaaagaatattggggacataagcttgacattatggtatcaattctgttaattattaatttctcattcttgtatgaatcatttcaatttactgagcctcttt

SEQ ID NO: 141387 - DNA, 404 bp, Homo sapiens
ggggtaggaagtctagttaaatggtacaccagtatgaggcagttacctactgaagcaagcaataatctccattaatttttagaatggcaattatagtagtaacctccacaagattctcctttagagaccccttgtacactgttggtgggcgtgttagataggatagccatttatggaaaatggatcaaggttcttcaaaaaactaaaaatataacaaccatatgatccagcaatcccacttctgggtatatatccaaaggaattgaagtcagtatatagaagaggtatatgttctttcacattaattgcagcattgttcacaatagccaagatgtggaagcaaccttaatgtccagtgatgcatgaatggataaagaaaatayggtatatatactcaatggaat

SEQ ID NO: 141388 - DNA, 594 bp, Homo sapiens
tgtcaatgagcatactattttgaaaggaatctcttttttttttgttagagcagtaggtcttaacagtgagtttaaaatatttagtaaaccatgatataagcagatgtactgtcatccaggctttgttcttgcatttacagagcactagcagagtagatttagcataactattaagggccctagaatttttggaatggtaaatgggtattgccttcaacttaaagtcaccagttgcattaatccctaatgaaagagtcagcctgttttttgaagctttgaagccaggtattgacttctcctctctaactacaaatgtcctagatggcatcttcttcccatataaggttgttttatctacaacaaaaaaatctgttatttagtggttaccttcatctattatactagcaagatcttcttgataacttgctgcagcttctrcatctacccttggaacttcacattgcactctcatgttatgaaaatggcttattttcctaaatgccatgaaccagtctctgctaccttcaaacattttttctgaagcttcttcatgtctcttagccttcagagaattaaaggaagttaaggctttgt

SEQ ID NO: 141389 - DNA, 617 bp, Homo sapiens
gaaaattcatgtttggaattgtcatataaaacttatcaccatgggcaaagaaaaaggaaaatggcagaagcatttctaatttctgtttgacaactggacaaggtgcatggcatgtattatttcaccctctcaacaatcctataaaactgtatactagtaattagtatccacactttacaaatgaggaaactgagaccctaaaatgttaaatgatagcttgtttcaaatatacacaaatctgcactctcaagtgatatggaaagattttaataataactattgcaatagaaaaaattgtccagtatagactgaactcagctttaatttgtatagaagaaaaagtctccagtgtagactgaactcagcttcaatttgtatagaaattagtgagtrtttaaattaagaatgagggaatagggagaggagagagttagggatcagttgaatcagggaagtgaaaaattacaaagggtcacccagagtaaatggtattaagctagctctgtctgccagcaagcaattatcaaagttagtattctatcctcacacagagacgggaagacagaggccctatcctcaggtgttggctgaaatcaactgtaaaattttggggccag

SEQ ID NO: 141390 - DNA, 422 bp, Homo sapiens
tgaattctttctctatattgttttaaattttaaattttaatctataaaattaagaaatttatagctttcttaaaccagctattttgaattttctatctgaaaagtcacatatctccatcactctgggattggccactggtgccttatttagtttgtttagtgaagtcatgttcctagatagtcttgatacttgtggatgtttttcaatgcctggacattgaagagttaggtatttattgtagtctttgcagtctaggcttgtttgtgcccatccttttttaagaaggctttccaggtattccaaaggaattaagtgttgtaatctaagtytttgatcactgcagctgtatctgcatcagggggcccttcaaacccagtaacattgtttctcttacccactcatagagataccaccatggtgg

SEQ ID NO: 141391 - DNA, 403 bp, Homo sapiens
taaaattaagaaatttatagctttcttaaaccagctattttgaattttctatctgaaaagtcacatatctccatcactctgggattggccactggtgccttatttagtttgtttagtgaagtcatgttcctagatagtcttgatacttgtggatgtttttcaatgcctggacattgaagagttaggtatttattgtagtctttgcagtctaggcttgtttgtgcccatccttttttaagaaggctttccaggtattccaaaggaattaagtgttgtaatctaagtctttgatcactgcagctgtatctgcatcagggggcccttcaaacccaktaacattgtttctcttacccactcatagagataccaccatggtggtctttggtaagatctggaagaattc

SEQ ID NO: 141392 - DNA, 292 bp, Homo sapiens
tgttgtgtatagtattcttggttgacagtttgctrtcgcactttgaatataccatctcagtcacttttagcctgcaagatttcttgggaaaaatctgctgatagtcttatagtcattttattgtatgtaaaaagtctctttctcttgcttctttcataattccatgtatttaacttttgacaatttgattataatgtatctcagtgtgggtttctttagatttttcttatttggcatcatttgggcttactagatctgcctatgtattttcttctgcatatttaggaaatat

SEQ ID NO: 141393 - DNA, 334 bp, Homo sapiens
aattcaacttctttctaatttttcagtcttctctcattcagttgatgacattgtcctgtcttgtcaaaggtgtgagaataatccattccatcaaggaaagacatttaatcttatttcttcacacaatagtgtacagtgattggcagayggtataaattattagaatctctcccattttaatgaataccttttcttgtttgtccttctgggattaaggatttgctaaagtaagcattgtcaagcttcctgcaaatgatgtgttgaagaatatttttattaataaattcatgtgagatctataatttaataaattatatgttccaaaaacacaaaa

SEQ ID NO: 141394 - DNA, 334 bp, Homo sapiens
aattcaacttctttctaatttttcagtcttctctcattcagttgatgacattgtcctgtcttgtcaaaggtgtgagaataatccattccatcaaggaaagacatttaatcttatttcttcacacaatagtgtacagtgattggcagatggtataaattattagaatctctcccattttaatgaataccttttcttgtttgtccttctgggattaaggatttgctaaagtaagcattgtcaagcttcctgcaaatratgtgttgaagaatatttttattaataaattcatgtgagatctataatttaataaattatatgttccaaaaacacaaaa

SEQ ID NO: 141395 - DNA, 497 bp, Homo sapiens
ttagctactccattttcatgagctaaattctcttcttggatgagttttaaatgttccttttcaagtcagtaggggtgatgaatgcccagccaaagagttggccccttgattctacggtaaagcagatgtccatgttagacatcaagaaaaataacattggttgggaatgttgtaacatttatataaattatatgggttaaacatactggaaaaaatgaggcatataatttatgtacagtgtgattattgtaaaagcagactatgcatatttatagatagttaaaaataaataatagcagaaaaggaaaagaattgaagagtcatagrttagtggcatatgtgtaaaggccttattggaagccaagacaatgaaattagttgatattaaaatagtaccagaaaatatttttgtaccagtaaaatttagctgcagttgataattactgattaatttataaaatgatgtttctaaacatttattattctttgctagagct

SEQ ID NO: 141396 - DNA, 491 bp, Homo sapiens
gttatctggaaaaggaggccaacaaagtgggatttgatacttcccaaatatctctagtggtctggaaaactatatggcatacctagtagagaatggagagggccctagctatccatacatccctagataaatgtgatacactctgcatttgcatatgaaatatgaaagaattcagtgcaatgtgaaaagktgggaagacttgcaaattgcttgaactctaattgtgctcctcaacttgcatacagattcatcagcaaagagtgaatgcctgaatatataaggatatgtatttaatactaataataatccaggtattgaacactaagctatgctgacagaggaataactcctgagaatataggcttaaaactaaaactaagaataaaaaaaaaaattgaacagagacttcagatgctacacaacatcacagagaattagtctaggcaatttagcataaaacaaactgaaatagaaaacagctcaacaatctc

SEQ ID NO: 141397 - DNA, 579 bp, Homo sapiens
aaactttaaaacattgatgaaagaaattaaagaatacacaaatgagtgaaaatacattctgttcatgtattggaagatttaaaattgttagaatgtcaacactacctaaataatctacactttcaatgcaattcctatcaaaattctaacagctttttttttacagagataaaaaataaacaatcctaaaattcatatggaaccaccaacaaccccaaatagccaaagcaattctgagaaagaacaaagataaagtaatcacattttctgatttcaaaatatattaccaagctatactaattaatatggtttgattctgacataaaaacaaacatayagaccaacgaaacagaaaacggagtccagaaataaactgacacatatagagtcaacagatgtttaacataggtgccaagaatccacagtcagaaaaagtctgtccagcaaatttacatgagaaaaacaaccccattaaaaagtgggcaaaggacatgaacagacatttctcaaaagaagacatacatatggccaaccagcatatggataaaagctcaatattactgatcatcagagaaatgc

SEQ ID NO: 141398 - DNA, 579 bp, Homo sapiens
aaactttaaaacattgatgaaagaaattaaagaatacacaaatgagtgaaaatacattctgttcatgtattggaagatttaaaattgttagaatgtcaacactacctaaataatctacactttcaatgcaattcctatcaaaattctaacagctttttttttacagagataaaaaataaacaatcctaaaattcatatggaaccaccaacaaccccaaatagccaaagcaattctgagaaagaacaaagataaagtaatcacattttctgatttcaaaatatattaccaagctatactaattaatatggtttgattctgacataaaaacaaacatacagaccaacgaaacagaaaacrgagtccagaaataaactgacacatatagagtcaacagatgtttaacataggtgccaagaatccacagtcagaaaaagtctgtccagcaaatttacatgagaaaaacaaccccattaaaaagtgggcaaaggacatgaacagacatttctcaaaagaagacatacatatggccaaccagcatatggataaaagctcaatattactgatcatcagagaaatgc

SEQ ID NO: 141399 - DNA, 368 bp, Homo sapiens
tactaaggagaatccagtgtggggasggagagaaaggagatgagcagctgccacgtgctcagaactgggactgagcatctactatcctgcttttctagtcggttttgtaaagtttttcaggttttccttgttcaccccatatcctgatggtgttttttggtttctttggttgttactgttagctcaaccaccattgtggggttacacattgctgatgcactaagacgatcaaatacaaaaggctccatgagtgatgggtcctattccccagactactcccttgcagcagtggacctgaagagtttcaagaacaacctggtggacatcattcagcagaacaaagagaggtggaaagagttagctgcaca

SEQ ID NO: 141400 - DNA, 624 bp, Homo sapiens
gactataactgtctaagtctcttgaatcttccaactcttttctcccttacaccttacttttggtttcatagggggtgaaaaatatgtcactggaagggtaaggagttaarcttttccctcctccaatttgaatggcaccttcatacccctttttgcttctcttagggaaaacctagatccatgtccagggagtgagaaacctggatctcctctggaagtatgggtgggaaggtagaacttgattaagtattttccaaaaaccttttagccatgcatggatgtggcttttgaatttgaagacaaaggatagatgcctttgtttttggggtagcttagtaacaacccctgtgtctccttgtctaaataggcatgagcctgttataacaaacaagtagaaacaaaaccagatcagctaatgattcactgtatcagctcatcgagacacacaaaataagcttttgtagttgtttcagaagagaaatgaaaaacaatatttgattactaaattaagtgtatttaaaatactattattcaaagaacatttatcaagtatgtttcctcactttacagaaaaagaaagattagaagcttatttttttctttgaatttaagtgatttaatgtg

SEQ ID NO: 141401 - DNA, 602 bp, Homo sapiens
tctcattctggtgccgctctcatctagtagcagtttgatgtgtgaccagaatttgactgggttcatgtgtaatgctcacaccaaggacagactcaagactttgttatatacccccaataattagccccgctccaagtgctgaaaatacttccaaattattggaagctctgttgtcttaaccttacaccttgaagaacagaaatcccttcttttgttaccactcatctcctctctctccaaaacctataggcttccgttcctcttgattccaggtctctatctatctctcttctcattctgcttctaaaatactcccaatttttcagaacaatttagttctgatcaaaagattaatcaattcaacaaagcaaaagcctgatggtttccctaaaatgacgtctatagttcttcaaacaaaaatcacgtaccatacataatatgcaatactgcatattgtctgggttgatcatggtttgtctgttattttcaatttcattagaattcctataaaaacttaatttcctcattaccctcaggacatttttcaaaatsttaatcactgtacctatgacctacatttgtaattagaaaatatcacgagt

SEQ ID NO: 141402 - DNA, 564 bp, Homo sapiens
aaaaccagtaacctgtatcatgttctagaagttaattatgatgggttggtttagttaaattctctaaacttccctccagagcaaaaagtgtgctcaaaatctactgatggaaggattctgacagcagcataacttaaggatattttaagtaatattgtgtgtgtgagtgtgtgtgtgtgtgtgtgtgtatgaaagagaaagagagagagggagagtgtgtgtgtgtgtgtgcgtgtgtgtgtgtgtgtgtgtgtgtgtgtgtctcctgtccactgtatttgcatggacaacaaaagtaagaaggaaggtagagggagcatgcctgcattcccatagagattattagctggcttggtgatgataaaatgttttcccaagaggggcaggactaggacaagaaaggatctgggttggtaggaagatgarttatcagatgatgtactctttactaaatttgaaagtaggggtggtctgtgaagctcatctgtcttggagtaactcttagatgtttactcatagttagatacagtcaggatattagaagttatttccagaagactccac

SEQ ID NO: 141403 - DNA, 630 bp, Homo sapiens
aatctctctctgtatctaattaatatatatgtataatttagccttcctctcaagcaaggacataagtggtaaattaatgataatataatctttactatggaatggctggtctactctgcatggagcaacctctccatcatgtggacttttaagatattgctactaaagttaaagccatgctatgctcttgaaactgtaaatatcaattaattttaaaagaaagggrtgaagctctaggtaggtttttatttgtatagctcatattatttctgtttttctatgtgtcaggtgatattctcagcaccttgtatagaacatttcacttaatcattccaaaagtacctattagataggcactttaattatttccattttatagatgaaaaaatttaggcttgtccaagaccacagcactggtaagtgacaaagtgaagtccaaaattgaactgaaggccaaatttcatgagctatcttgggtgagatatttcttgcctcaagtcttccacataaaatgtaacaaatttaatggtatctggataaatacaaaataatattattttctgttcatcaagggccaaaaaatgggtcagatactgtctggaccctttaaatattctttgtcattatttt

SEQ ID NO: 141404 - DNA, 630 bp, Homo sapiens
aatctctctctgtatctaattaatatatatgtataatttagccttcctctcaagcaaggacataagtggtaaattaatgataatataatctttactatggaatggctggtctactctgcatggagcaacctctccatcatgtggacttttaagatattgctactaaagttaaagccatgctatgctcttgaaactgtaaatatcaattaattttaaaagaaaggggtgaagctctaggtaggtttttatttgtatagctcatattatttctgtttttctatgtgtcaggtgatattctcagcaccttgtatagaacatttcacttaatcattccaaaagtacctattagataggcactttaattatttccattttatagatgaaaaaatttaggcttgtccaagaccacagcactggtaagtgacaaagtgaagtccaaaattgaactgaaggccaaatttcatgagmtatcttgggtgagatatttcttgcctcaagtcttccacataaaatgtaacaaatttaatggtatctggataaatacaaaataatattattttctgttcatcaagggccaaaaaatgggtcagatactgtctggaccctttaaatattctttgtcattatttt

SEQ ID NO: 141405 - DNA, 589 bp, Homo sapiens
taattttttcttccatacgtatgagatcaggaagattttatatatatgtgtgtgtttctgtgtgtgtgtgtgtatacacttcagctgtgtatttcaagatataatatcagttagtggctattactatttaccttccagaagtttattaaacatgccttgggtcactctgttatcttaaaatttaaaattacagcacatagattaatactacagcccctcgattttgtacctcctcacaggtttagttcccattacctttggagcatctgacttctgaataggttggtgcacgtctacctctgtgctctgaaagcragaaacacctgaaagcatgacattgccacattagtagggctttctgagcctggctttgcctagagaaaagctgaatgttgtgagttttgtatttatttaatttagaagtccttcagtcaggggaggttcctgagaatcctgtgcatgcttcagcctcttcaaggtgcaaatccaaaacagaaaataagacacccaaacaagaaacaattacactgttggttggcttatgatgggatgtaaatacaggacccaaaaagacagaaagttgtaccat

SEQ ID NO: 141406 - DNA, 589 bp, Homo sapiens
taattttttcttccatacgtatgagatcaggaagattttatatatatgtgtgtgtttctgtgtgtgtgtgtgtatacacttcagctgtgtatttcaagatataatatcagttagtggctattactatttaccttccagaagtttattaaacatgccttgggtcactctgttatcttaaaatttaaaattacagcacatagattaatactacagcccctcgattttgtacctcctcacaggtttagttcccattacctttggagcatctgacttctgaataggttggtgcacgtctacctctgtgctctgaaagcaagaaacacctgaaagcatgacattgccacattagtagggctttctgagcctggctttgcctagagaaaagctgaatgttgtgagttttgtatttatttaatttaraagtccttcagtcaggggaggttcctgagaatcctgtgcatgcttcagcctcttcaaggtgcaaatccaaaacagaaaataagacacccaaacaagaaacaattacactgttggttggcttatgatgggatgtaaatacaggacccaaaaagacagaaagttgtaccat

SEQ ID NO: 141407 - DNA, 581 bp, Homo sapiens
attactgtgaggatttgagataatattgttaagcattgacatggaggccacacatggaaaataggcaatgtttataaacttgtttttatttactaaatgccaactgatgcaccacttagtcctgaaagctctgaagacagaagcagttttttacctcctcaaatatacataggtgcattttatttgcaactggttacttttttatgtggcattctagttattaggtataaattacagtctgtgtagattatctcctttataagacttgaaatttctagaggaaatattgccatatkcatatatgcaccatgcttccagccaggagcttatgaataataggtataataataagtaattcaatcagtatttatttaatggaacaaaaagcactttcttaccaaactcatatcaatttttaagttggtctcctttgggtttcccccaatttctccaacttttcaatgcctcactaaattgaattgcataaaacaccaaatgtttcacaatgttttccctcaaatatgatttatttagcaatcacatgtaataagaaacacagaaaaatacagcataataaaaac

SEQ ID NO: 141408 - DNA, 486 bp, Homo sapiens
cactcaaactctgcccatgtacttcatggagctcccttctccctgtgtgcacctttcagccctgatcttccacccacayttgttttcccacaatgctcacaaatgcctttggcctgtatttccacctgtaccttcaacctcagtcatgttcccatccacaaaacttctccacctaagtattaatcagcacatcccaaacagaattcaacatatctttctaaaacaatattctcagcacaccattccctgcttaaggccttcttatcaacaaacataccaaatagaaacatgcctgtctcaaattcaagacttctgtccatctgtcttttctggacaatcttgctttccatgacttcaacacatcaaccttccttctcaaaagcatccaatgcacccaaacacaccatgtccaaagttgctctgggcctgttcccacattattttaggagcctagaatatctgcttttcacctgtcctaatctgaca

SEQ ID NO: 141409 - DNA, 486 bp, Homo sapiens
cactcaaactctgcccatgtacttcatggagctcccttctccctgtgtgcacctttcagccctgatcttccacccacacttgttttcccacaatgctcacaaatgcctttggcctgtatttccacctgtaccttcaacctcagtcatgttcccatccacaaaacttctccacctaagtattaatcagcacatcccaaacagaattcaacatatctttctaaaacaatattctcagcacaccattccctgcttaaggccttcttatcaacaaacayaccaaatagaaacatgcctgtctcaaattcaagacttctgtccatctgtcttttctggacaatcttgctttccatgacttcaacacatcaaccttccttctcaaaagcatccaatgcacccaaacacaccatgtccaaagttgctctgggcctgttcccacattattttaggagcctagaatatctgcttttcacctgtcctaatctgaca

SEQ ID NO: 141410 - DNA, 536 bp, Homo sapiens
ccacagaccatatcggtgaagaagatgaataggattcctgtttaacccagagacacctatgttaaatgtttacatacagactaacccaaatatgcaattaaaccacaccactaaatggcaagatgaccatggatttaaacaaaatgtatcagggggaaaaggcaacacgtttaaacccatgtgaggagctggacttctgagacagccattctccttgcatagcactgtctgctgctacagctcatagaagtcaacaattttcttcaacactggtaggcagcctctaaatggccctgatcaccctcacctcctgccattcacacccttgtaaaattccacccctggacctagtgactcacttctaacaaagagaatacagcaaaagtaacatcgcttctgaggtgaggctacaaggagactacgatgcctgccttrgtcacccttctcctgctctttccattgctccctctgatggaagccagttgccatgtgatgaggtgccctatggagaggcccacgtgacaaggtattgtaaa

SEQ ID NO: 141411 - DNA, 368 bp, Homo sapiens
gggactcatttcactgcacatgttcttaagaaactagcccaagtactagatataacatgggactaccataacccctggcacccaccttcatcaggaagagtagaaagaatgaatcagactctgaaaaaccacctaaccaaattagtcctagagactcggttgccatggactaaatgcctccccatggycttgtgaagattccaaactgcccctaggaaagatgtcggctgacctccttatgaaatgctctatgagttgccttatctacactccactgctgacattcctcgttcgaaacaaaagatctgtttctcaagaactatatacttggtctatcctccactttctctttccttaggactaaaggc

SEQ ID NO: 141412 - DNA, 368 bp, Homo sapiens
gggactcatttcactgcacatgttcttaagaaactagcccaagtactagatataacatgggactaccataacccctggcacccaccttcatcaggaagagtagaaagaatgaatcagactctgaaaaaccacctaaccaaattagtcctagagactcggttgccatggactaaatgcctccccatggccttgtgaagattccaaactgcccctaggaaagatgtcggctsacctccttatgaaatgctctatgagttgccttatctacactccactgctgacattcctcgttcgaaacaaaagatctgtttctcaagaactatatacttggtctatcctccactttctctttccttaggactaaaggc

SEQ ID NO: 141413 - DNA, 368 bp, Homo sapiens
gggactcatttcactgcacatgttcttaagaaactagcccaagtactagatataacatgggactaccataacccctggcacccaccttcatcaggaagagtagaaagaatgaatcagactctgaaaaaccacctaaccaaattagtcctagagactcggttgccatggactaaatgcctccccatggccttgtgaagattccaaactgcccctaggaaagatgtcggctgacctccttatgaaatgctstatgagttgccttatctacactccactgctgacattcctcgttcgaaacaaaagatctgtttctcaagaactatatacttggtctatcctccactttctctttccttaggactaaaggc

SEQ ID NO: 141414 - DNA, 387 bp, Homo sapiens
cactttctctttccttaggactaaaggcctcttggcacatacaccaccccttgaatttccagttcaccaccaccagcccggacagtgaccacattctcatcaaaggtyagaaagaagggaagctcaagcccacctgggagggaccttatccttatccagtgtttctaatgactgagacagtcttccacaccaccaaaaaagaatggactcaccatacctgagtcaaaagagcaccacccactccagaatcatggacagctatttcagggccaactccaaccaagttaaagctaaaacgggcttgatcctcttatgctgtatttcttttccccttctattgctagtcctctcgttattaatgtaactaggtcgagctcaccccaaact

SEQ ID NO: 141415 - DNA, 387 bp, Homo sapiens
cactttctctttccttaggactaaaggcctcttggcacatacaccaccccttgaatttccagttcaccaccaccagcccggacagtgaccacattctcatcaaaggttagaaagaarggaagctcaagcccacctgggagggaccttatccttatccagtgtttctaatgactgagacagtcttccacaccaccaaaaaagaatggactcaccatacctgagtcaaaagagcaccacccactccagaatcatggacagctatttcagggccaactccaaccaagttaaagctaaaacgggcttgatcctcttatgctgtatttcttttccccttctattgctagtcctctcgttattaatgtaactaggtcgagctcaccccaaact

SEQ ID NO: 141416 - DNA, 387 bp, Homo sapiens
cactttctctttccttaggactaaaggcctcttggcacatacaccaccccttgaatttccagttcaccaccaccagcccggacagtgaccacattctcatcaaaggttagaaagaagggaagctcaagcccacctgggagggacmttatccttatccagtgtttctaatgactgagacagtcttccacaccaccaaaaaagaatggactcaccatacctgagtcaaaagagcaccacccactccagaatcatggacagctatttcagggccaactccaaccaagttaaagctaaaacgggcttgatcctcttatgctgtatttcttttccccttctattgctagtcctctcgttattaatgtaactaggtcgagctcaccccaaact

SEQ ID NO: 141417 - DNA, 387 bp, Homo sapiens
cactttctctttccttaggactaaaggcctcttggcacatacaccaccccttgaatttccagttcaccaccaccagcccggacagtgaccacattctcatcaaaggttagaaagaagggaagctcaagcccacctgggagggaccttatccttatccagtgtttctaatgactgagacagtcttccacaccaccaaaaaagaatggactcaccatacctgagtcaaaagagcaccacccactccagaatcatggacagctatttcagggccaaytccaaccaagttaaagctaaaacgggcttgatcctcttatgctgtatttcttttccccttctattgctagtcctctcgttattaatgtaactaggtcgagctcaccccaaact

SEQ ID NO: 141418 - DNA, 382 bp, Homo sapiens
ttcagccttcaaaatgttttcatcaaaaattactatgtaccataaaaataacacgctcactgtaaacacttaagcgattcaaagataaagtagaaagtcaaagtctccacctacctgccctctaagatgttaatacttatgcttaacatattttattttttaaaaggaggggaaatcacatcataactactttaaaaggcctttacaacttctttgtaattacacacacacacacacacacacacacacacacacagagtggggaaggagagggagggggtgggggaaggagggagrgacagacagacacatacacttcaatgtaaggcttattataaaacgtacaaaaaaggtgagaaaacagagatgggtgggagacggg

SEQ ID NO: 141419 - DNA, 443 bp, Homo sapiens
gaggggctggtgaacgtccagagacagagtttgagaarggcccaccccccttctgccagtttgtgatttagaaacgtgcattcattcaacaaacatttactgagcatgtacaggccaggtacagttcttcatagcagagatataaaacagcaaaggacagacaggagcccttggccctgaggtttccattctaggggcctttaaatctctgactttcagagctaaccaagacctttgatactctctacctcctccagaaacacgagcataaagaggagagatggcttgtccagactcaaaaagcaaattagggactgaggcagggcagaaatatggacccctgacaaccagtcaggctagtgcttcccagagaggtgacaaccccagggcatgtgtggcaaggactagagcaggggtgtctggagaagagagagtcagcaaag

SEQ ID NO: 141420 - DNA, 579 bp, Homo sapiens
accccaggttgagacgatatgaggaagattcaagctgtcaagttcagtttcccaagatctattccacagaagatgagcaaatctcacttcagaggccactgactgaagggcagtctggtcccagaaccgtggagaactcagaaaaaaatgttaaagtctctctggaaagtagaagcctgggaaaaaaccaaaccaaacccattctcccattgccacccagagatactgtgaacattttgagctcacaggggaagtgtaggcttttcccactgtcaatgtctatgttaagggagtaaggcagcctgaaacctcttgctcctaggtcccatagtctccactccccttccagctggaaatttgtgctgcaaccagaggaaccagaaatggggtgagaaaacttaggggactgggttgtaagatcaaaggcyggtcttgcagcagtaatgacagttcctaggggcactgtgacatcattgcattccactcctcccaggggaggggaccacatcagcgcgatgcccgagtcgctgctccacgatgggggagggaaacacacggtttcgacccaggtcctcagag

SEQ ID NO: 141421 - DNA, 623 bp, Homo sapiens
cagcctctgacccccaataagcatgagggctgtgctgaagagttttctgccaatgatgatgtggccctgggcttctctgggtcccactctctggctgccttgcctgcctggggcactcaggatgaaggaaccctggagtttacactcaccacacagagctggcaggcacccttggccttccaggcagcaggctggcatggggacttcatccatgtggacatatttgagggccacctgtggtccatggttgagaagggccagggtactgtattgctcctcaacagtgtgcctgtgactgacgcacagccccacaaggtcagcatccacatcaacattcaccagctagaaatctccatggaccagtaccccacacgaacygaggagtcctcagctacctggagccacgtgacagtctccttcttggggagctggttgcagaggcctctcatcacctccaggaacaccgctcaggcctgacaccaggggctgccaatgcctccctgctgggctggctgcatggaagacctcagtgtcaatggctagaggcaggggctgtgggaagccttgctgacgcacaacatggtggctggctgcagactggaggaggtagacaatgcctatgg

SEQ ID NO: 141422 - DNA, 623 bp, Homo sapiens
cagcctctgacccccaataagcatgagggctgtgctgaagagttttctgccaatgatgatgtggccctgggcttctctgggtcccactctctggctgccttgcctgcctggggcactcaggatgaaggaaccctggagtttacactcaccacacagagctggcaggcacccttggccttccaggcagcaggctggcatggggacttcatccatgtggacatatttgagggccacctgtggtccatggttgagaagggccagggtactgtattgctcctcaacagtgtgcctgtgactgacgcacagccccacaaggtcagcatccacatcaacattcaccagctagaaatctccatggaccagtaccccacacgaactgaggagtcctcagctacctggagccacgtgacagtctccttcttggggagctggttgcagaggcctctcrtcacctccaggaacaccgctcaggcctgacaccaggggctgccaatgcctccctgctgggctggctgcatggaagacctcagtgtcaatggctagaggcaggggctgtgggaagccttgctgacgcacaacatggtggctggctgcagactggaggaggtagacaatgcctatgg

SEQ ID NO: 141423 - DNA, 623 bp, Homo sapiens
cagcctctgacccccaataagcatgagggctgtgctgaagagttttctgccaatgatgatgtggccctgggcttctctgggtcccactctctggctgccttgcctgcctggggcactcaggatgaaggaaccctggagtttacactcaccacacagagctggcaggcacccttggccttccaggcagcaggctggcatggggacttcatccatgtggacatatttgagggccacctgtggtccatggttgagaagggccagggtactgtattgctcctcaacagtgtgcctgtgactgacgcacagccccacaaggtcagcatccacatcaacattcaccagctagaaatctccatggaccagtaccccacacgaactgaggagtcctcagctacctggagccacgtgacagtctccttcttggggagctggttgcagaggcctctcatcacctccaggaacaccgctcaggcctgacaccaggggctgccaatgcctccctgctgggctggctgcatggaagacctcagtgtcaatggctagaggcrggggctgtgggaagccttgctgacgcacaacatggtggctggctgcagactggaggaggtagacaatgcctatgg

SEQ ID NO: 141424 - DNA, 545 bp, Homo sapiens
agatctacatcttccagggagaggcagctgagatcagaagggaccagctggaggtgaggagctggaggtggtgagcggggtgtggaccaggtagagggccttcctcccagcctccatgccgggaacacatgtgacttgggctgtacctgtggtggtcccagcttgtgtgtgtgcacgtgcctcagatrtgctcccatatatgttgtgttcccaagagtttctggggagcttgctgtacacccatcctcctgggagtggtgtgtgcctctagagctggtgtccactcatgtccatggcatggctgagcatgcagattcctggacgccacccagccctacagaatctctgaagtggagcccgagaatctgcattgcagtcagttccctgggagggcatcacgggtcctgaacttttgggattgctggccgtggagacaggccgctgcctctcagacccctgtgtaccccgctctcttctcagagcccagaccaggaccaggagggtctgtcaagggcttctgctcacccaggaaccccacagagcag

SEQ ID NO: 141425 - DNA, 412 bp, Homo sapiens
ctcccccggcggcggcagcagcggctgcggctaaagcggcggcaaccgaggcgagcaatgggcacggcggtctcggccgagccgaggggcttcaccgctgctgttccggctccgcgacagctctgcacgtagccccagccaccccgcgcaccggctacaagccgcccgggggtggccggggcacgcaagarggcagtaacgtctgcgagtcctcccgtgagtacacgcggagcaagggctgcgagctgggattgcacggcagagctgcccatcccgctccacgagaccaatagtaaggcacctgggcggggcgctcaggttgctaagggaggctgaggttgaccgccggggctgctctgtggcaaagtgatcacagcagggtggctggcagagactgctctgggaaatgccc

SEQ ID NO: 141426 - DNA, 529 bp, Homo sapiens
aaaactattggaaagatggaataaaatacacagaaatgtccttaacaggtaaatatttatttttctttcttattattatactttaagttctggggtatatgtgcagaacgtgcaggtttgttgcataggtacacacgtgccatggtggtttgctgcacccatcaactcgtcatctacactaggtatttctcctaatgctatccctcccctagccccccaacccccaacaggccccagtgtgtgatgttccccmctccctgtgtccgtgtgttctcactgttcaactcccactacaggtaaatatttctagaatgtatctactccatcagctagtgtaagtattctaaactgtgctagtatagctgctttaaatcactgctttcttctgcaaatggtggcacctttaaagtgttatcttgaaggggaagtgagtgatttgctcatgtctctactgaactaacactgttaacacccagtccagttctaccttaaacaagtcggagaaatacagacataatccatacttgtt

SEQ ID NO: 141427 - DNA, 529 bp, Homo sapiens
aaaactattggaaagatggaataaaatacacagaaatgtccttaacaggtaaatatttatttttctttcttattattatactttaagttctggggtatatgtgcagaacgtgcaggtttgttgcataggtacacacgtgccatggtggtttgctgcacccatcaactcgtcatctacactaggtatttctcctaatgctatccctcccctagccccccaacccccaacaggccccagtgtgtgatgttcccccctccctgtgtccrtgtgttctcactgttcaactcccactacaggtaaatatttctagaatgtatctactccatcagctagtgtaagtattctaaactgtgctagtatagctgctttaaatcactgctttcttctgcaaatggtggcacctttaaagtgttatcttgaaggggaagtgagtgatttgctcatgtctctactgaactaacactgttaacacccagtccagttctaccttaaacaagtcggagaaatacagacataatccatacttgtt

SEQ ID NO: 141428 - DNA, 529 bp, Homo sapiens
aaaactattggaaagatggaataaaatacacagaaatgtccttaacaggtaaatatttatttttctttcttattattatactttaagttctggggtatatgtgcagaacgtgcaggtttgttgcataggtacacacgtgccatggtggtttgctgcacccatcaactcgtcatctacactaggtatttctcctaatgctatccctcccctagccccccaacccccaacaggccccagtgtgtgatgttcccccctccctgtgtccgtgtgttctcactgttcaactcccactacaggtaaatatttctagaatgtatctactccatcagctagtgtaagtattctaaactgtgctagtatagctgctttaaatcactgctttcttctgcaaatggtggcacctttaaagtgttatcttgaaggggaagtgagtgatttgctcatgtctctrctgaactaacactgttaacacccagtccagttctaccttaaacaagtcggagaaatacagacataatccatacttgtt

SEQ ID NO: 141429 - DNA, 485 bp, Homo sapiens
atttttattctttgtgtatttgatttctgaaacatttgaaatctctctctcactccttaaatctgccactgggctaagagagtattgtatataatgtgcactcattgatttaacagaattagaacatccaggcactcactcagattttggttccacaactgctcaaagtctagtcatttagttaatgrgttaacaccacacttgatcttcaaattttggagatgctgatggtagacaggaacttgttttgggaaaaggaagtatatggcagacattgtcacccattatccaaccaacaccacctttcctttaaagtaccccactcttcctttaaggttgcagagtctcagaaagtaggaagaaagtttttgcattttcaggtcaaaagacagtacatttgtacaaccgcataatacctatgcaaatgtttgttgaaatctaaacagaagacagaagtagttctagtaccttcactacataagtaa

SEQ ID NO: 141430 - DNA, 485 bp, Homo sapiens
atttttattctttgtgtatttgatttctgaaacatttgaaatctctctctcactccttaaatctgccactgggctaagagagtattgtatataatgtgcactcattgatttaacagaattagaacatccaggcactcactcagattttggttccacaactgctcaaagtctagtcatttagttaatgagttaacaccacacttgatcttcaaattttggagatgctgatggtagacaggaacttgttttgggaaaaggaagtatatkgcagacattgtcacccattatccaaccaacaccacctttcctttaaagtaccccactcttcctttaaggttgcagagtctcagaaagtaggaagaaagtttttgcattttcaggtcaaaagacagtacatttgtacaaccgcataatacctatgcaaatgtttgttgaaatctaaacagaagacagaagtagttctagtaccttcactacataagtaa

SEQ ID NO: 141431 - DNA, 485 bp, Homo sapiens
atttttattctttgtgtatttgatttctgaaacatttgaaatctctctctcactccttaaatctgccactgggctaagagagtattgtatataatgtgcactcattgatttaacagaattagaacatccaggcactcactcagattttggttccacaactgctcaaagtctagtcatttagttaatgagttaacaccacacttgatcttcaaattttggagatgctgatggtagacaggaacttgttttgggaaaaggaagtatatggyagacattgtcacccattatccaaccaacaccacctttcctttaaagtaccccactcttcctttaaggttgcagagtctcagaaagtaggaagaaagtttttgcattttcaggtcaaaagacagtacatttgtacaaccgcataatacctatgcaaatgtttgttgaaatctaaacagaagacagaagtagttctagtaccttcactacataagtaa

SEQ ID NO: 141432 - DNA, 485 bp, Homo sapiens
atttttattctttgtgtatttgatttctgaaacatttgaaatctctctctcactccttaaatctgccactgggctaagagagtattgtatataatgtgcactcattgatttaacagaattagaacatccaggcactcactcagattttggttccacaactgctcaaagtctagtcatttagttaatgagttaacaccacacttgatcttcaaattttggagatgctgatggtagacaggaacttgttttgggaaaaggaagtatatggcagacattgtcacccattatccaaccawcaccacctttcctttaaagtaccccactcttcctttaaggttgcagagtctcagaaagtaggaagaaagtttttgcattttcaggtcaaaagacagtacatttgtacaaccgcataatacctatgcaaatgtttgttgaaatctaaacagaagacagaagtagttctagtaccttcactacataagtaa

SEQ ID NO: 141433 - DNA, 625 bp, Homo sapiens
tactatgtgtgcgtgtgcttcccgcttcatgaatattcatagctcctcctaaattctgttcaatatgtgtatgtagacaacctgttcagcatagattcctctcccacttcccactgttaaagtgcctttttccagtttctgccagagcgtatgcttcccagcctgcgatggccaggctgcaggctgcaacccttcgtaagaaatgaagctctcctctcaaaatcaagaagcctgtgatccgtcagctggcacacaatactgaggaacaaagttggaggactcacatgacctgacttcctgacttactgtaaggcttacatagtcaggatcatgcaggattcacaagactggtcmtatcggtgcaccaaacagagtaatagggagcccagaggagacccacaccaatggcgccaactggtccaaaggagcaaaggcaagtgagtggagacggggagtctttccagcagaaggtgctccgacaaacggatgcccacatgcagaaggaggcacacacaaagcaccagaaggatgtggtcacagacctcccaccttctacagaggttcagccaaaaggaatcccagacctaaacgtaaaacgcaaaactacaaaaccgttagaagaaaa

SEQ ID NO: 141434 - DNA, 625 bp, Homo sapiens
tactatgtgtgcgtgtgcttcccgcttcatgaatattcatagctcctcctaaattctgttcaatatgtgtatgtagacaacctgttcagcatagattcctctcccacttcccactgttaaagtgcctttttccagtttctgccagagcgtatgcttcccagcctgcgatggccaggctgcaggctgcaacccttcgtaagaaatgaagctctcctctcaaaatcaagaagcctgtgatccgtcagctggcacacaatactgaggaacaaagttggaggactcacatgacctgacttcctgacttactgtaaggcttacatagtcaggatcatgcaggattcacaagactggtcctatcggtgcaccaaacagagtaatagggagcccagaggagacccacaccaatggcgccaactggtccaaaggagcaaaggcaagtgagtggagacggggagtctttccagcagaaggtgctcygacaaacggatgcccacatgcagaaggaggcacacacaaagcaccagaaggatgtggtcacagacctcccaccttctacagaggttcagccaaaaggaatcccagacctaaacgtaaaacgcaaaactacaaaaccgttagaagaaaa

SEQ ID NO: 141435 - DNA, 625 bp, Homo sapiens
tactatgtgtgcgtgtgcttcccgcttcatgaatattcatagctcctcctaaattctgttcaatatgtgtatgtagacaacctgttcagcatagattcctctcccacttcccactgttaaagtgcctttttccagtttctgccagagcgtatgcttcccagcctgcgatggccaggctgcaggctgcaacccttcgtaagaaatgaagctctcctctcaaaatcaagaagcctgtgatccgtcagctggcacacaatactgaggaacaaagttggaggactcacatgacctgacttcctgacttactgtaaggcttacatagtcaggatcatgcaggattcacaagactggtcctatcggtgcaccaaacagagtaatagggagcccagaggagacccacaccaatggcgccaactggtccaaaggagcaaaggcaagtgagtggagacggggagtctttccagcagaaggtgctccgacaaacggatgcccacatgcagaaggaggcacacacaaagcaccagaaggatgtggtcacagacctcccrccttctacagaggttcagccaaaaggaatcccagacctaaacgtaaaacgcaaaactacaaaaccgttagaagaaaa

SEQ ID NO: 141436 - DNA, 625 bp, Homo sapiens
tactatgtgtgcgtgtgcttcccgcttcatgaatattcatagctcctcctaaattctgttcaatatgtgtatgtagacaacctgttcagcatagattcctctcccacttcccactgttaaagtgcctttttccagtttctgccagagcgtatgcttcccagcctgcgatggccaggctgcaggctgcaacccttcgtaagaaatgaagctctcctctcaaaatcaagaagcctgtgatccgtcagctggcacacaatactgaggaacaaagttggaggactcacatgacctgacttcctgacttactgtaaggcttacatagtcaggatcatgcaggattcacaagactggtcctatcggtgcaccaaacagagtaatagggagcccagaggagacccacaccaatggcgccaactggtccaaaggagcaaaggcaagtgagtggagacggggagtctttccagcagaaggtgctccgacaaacggatgcccacatgcagaaggaggcacacacaaagcaccagaaggatgtggtcacagacctcccaccttctacagaggttcagccaraaggaatcccagacctaaacgtaaaacgcaaaactacaaaaccgttagaagaaaa

SEQ ID NO: 141437 - DNA, 501 bp, Homo sapiens
gggtttggggagagtcatgggcaggctgggcatggcctgtataaagggcaaccragggctcgggcccctgaggagggggagatgagcagggaaccccatagggaggccttccaagcagagggtagcctgagaggcttagtggggttgaggtgagctcctcgtgggtggggtggcagcaggcctggtcctggctaggcagtgtgccccgtgatggtgaatgcaggaacagaagggggagggtggggagaggctggtgccgtgaccacaggccacaccgcagggctggacacagccaggcccgggagccaggtgtacggttttcaagaccccctcattccatgcggatggttgtggggaggtggggagagggagccgctggaatgggccaggactggatgcgtgtgcagtggcaggggcagacccccaggacctgggtaccagaaaacgatgggggctctgatacagttgtggtgtttcctgactttggtctttgaggatcac

SEQ ID NO: 141438 - DNA, 504 bp, Homo sapiens
tgaatttattgatttgggctgaatttattaatttcccaagcagggattctgcatttaatattgtagctcgaygagttaaaaaaaggttctaatcgtttatttgcttagttagctgaaacatggattaaaagatggcccactgtgagaaagctggaaatgcctgatctccctttgtttaatgtagaggaaggatccaaaggcttagggagattgcggtgctggagtggattagtcactttagacttattcatcccagctgggagggtccagaagacatacccttgaccaatgctttgcgaaatagatttgtgaggggagcacctgcatctttgaagagctctgtgattgctcttctctgtatgccagatctaacagagggaactgtggttactcaactacaaaatttaaattcagtgggaataattggatcccaaggtggtaggggccaagtggcagcactcagccttcaaaggcaaggtgggcagcagaggcaaagcagcaatc

SEQ ID NO: 141439 - DNA, 504 bp, Homo sapiens
tgaatttattgatttgggctgaatttattaatttcccaagcagggattctgcatttaatattgtagctcgatgagttaaaaaaaggttctaatcgtttatttgcttagttagctgaaacatggattaaaagatggcccactgtgagaaagctggaaatgcctgatctccctttgtttaatgtagaggaaggatccaaaggcttagggagattgyggtgctggagtggattagtcactttagacttattcatcccagctgggagggtccagaagacatacccttgaccaatgctttgcgaaatagatttgtgaggggagcacctgcatctttgaagagctctgtgattgctcttctctgtatgccagatctaacagagggaactgtggttactcaactacaaaatttaaattcagtgggaataattggatcccaaggtggtaggggccaagtggcagcactcagccttcaaaggcaaggtgggcagcagaggcaaagcagcaatc

SEQ ID NO: 141440 - DNA, 486 bp, Homo sapiens
tgaaatctttaggatttcctaaacacaagatcaacaatacaaagaggaacgatacaaacaggaacaatttgactttccagtgctatggatttccagtactatgttaagtaacagtgataaaaatgggcattcttttcatgttccagttcttgtttttttgtttgtttgttttgtgtgtgtgtgttttttttkttttttttttttttgagtcagagtctcactctgtttcccaggctggagtgcagtggcacaatctcggctcactgaaacctcggcctcccaggttcaagcgattctcctgcctcagcctctcaagtgagattataggcacgtacccccacacctggctaatttttgtatttttagtagagacggagttttgcaatgttggccaggctgatcttgaactcctgacctcaggtgatctgcccacctcagcctctcaaagtgatgggattacaggtgtgagccactgtgcccggctta

SEQ ID NO: 141441 - DNA, 506 bp, Homo sapiens
tatatttctcagagtgaaattaataggtcatagagcaggcacatttttacctttcccagatgttattaaaatgcttctcaaagtggatataccaatttatactctggagtcatgcaatgcagcctggcctaccagtgctctctgagagttctcattccctcatattcaactaaaayttagtactgttaaattttaaattcaggcagtttgatagttttaaaatatcttgttttccttttcatgtatatgcccttaattattagtggagtagcatttcatatatttattagttattccacttcaattttctgtaattttctgtaatttgtctgctcacatcctctgcttatttttaccgaattctttgtcatttttattggagtttcttatgtattctcgatactaatagtcttattccacaagggtataatgctttctttgattttataccaagatttcattcatgtaaatcctatggtttaagtgtaccaaaaaatagaacaatg

SEQ ID NO: 141442 - DNA, 506 bp, Homo sapiens
tatatttctcagagtgaaattaataggtcatagagcaggcacatttttacctttcccagatgttattaaaatgcttctcaaagtggatataccaatttatactctggagtcatgcaatgcagcctggcctaccagtgctctctgagagttctcattccctcatattcaactaaaacttagtaytgttaaattttaaattcaggcagtttgatagttttaaaatatcttgttttccttttcatgtatatgcccttaattattagtggagtagcatttcatatatttattagttattccacttcaattttctgtaattttctgtaatttgtctgctcacatcctctgcttatttttaccgaattctttgtcatttttattggagtttcttatgtattctcgatactaatagtcttattccacaagggtataatgctttctttgattttataccaagatttcattcatgtaaatcctatggtttaagtgtaccaaaaaatagaacaatg

SEQ ID NO: 141443 - DNA, 593 bp, Homo sapiens
gaagctaaataaaaaaagtaaaggctcaagttgagaggcctattatacaactcaaataagaattccagaaacagagaagatatataaacatatatatatatatttcttttttcatgaaaatgtttcattactgagacatattctttaagaataaaacagctactgaaaacccaacatattaaatgaaagaaagattacagtaagatgtgctattatgaaatttcagaatgcaaagatcaaaaagaagattctaaagatttctgagccacaaacaaaagattatrtgcaacatatcagtaactataaggccactagatttctcaacaactaaaaactgtatagtgttcaatacctacatcaaaaagtctgaaagatcacaaattgatgacctaatgtcacacctcaaggaactagggaaacaagaacacactaagcccaaaactagcagaagaaaataacaaagatcatagcagaactaaatgaatttgaaacaaaaattacaaaagatcaatgaaacaaaaattagacattggaaaagacaaagttgatagactattagctaaattaatcaagaagagaggattcaaataagc

SEQ ID NO: 141444 - DNA, 286 bp, Homo sapiens
tagaagttaaaaaagtatttgatgtgaatgataaagtgacacaayatatcaaaacccctgggatacagcaaaagtagtatataccaatcctactgacactattccaaaagatagagaaaggagaaatcctccttaagtcattcaatgaagccagtattaccctaatatgaaaaccaggaaaggacataacaaaacaggaaaactacagaccaatatccctgatgaacatgaatgctaaaatcctcaaaaaaatgctagctactcaaatccaataaaatataaaaag

SEQ ID NO: 141445 - DNA, 567 bp, Homo sapiens
gcaaataaatgatgtgctttactaacacaatgcagcaaactaataaattgaaagaagaaaaatcaactaactatctcaaataggagataatttttctaaaaatccaggataatgatataaagaagttccaggacaacagccatgaataatcccaaccagtttataagaatacaggaagaattccaaaagatgaccacaagaaaaaacataaaacagataagttaytgtatctgatcatttagagagaaggcttgtatgtctatcatggaatttatgaagattagactcattaaaagttaagaagcaaacacaacaattattagattcaagaaaaaatatgagtaataaaggaaatgtaatcacagtaaactacacagttcaacagtaaacttactatttagctataataaaatcctgagcattcaaagtttattacatatatatattgataaagttggtggaggaggaagtgtttttgattgttggaggaaatataaggaagctaaatcctactatgatattatgagaagtcaataatcaacaataacaacaacaaagtaaagaaat

SEQ ID NO: 141446 - DNA, 542 bp, Homo sapiens
agctgctctgcacataaactgtctaagaaatgaataaagcagacagaaaaagaaaggaaagactttctgcacctgcctttttgttctgaatgttccccaaactacttcctgccaatatcttagagtgggagggtagatagtaacattgaagtaccagcacactgtctggtaaatatgtgcatcttcacttcaagcttactttctgtgcattgtccctgtattccatcgttcctgyattccaagtcctgggttttgtccaaactttgtcctccgttacaacttcttgaagccacttatcacagtaattctaagaattctaaaagttctatgacagcagcctattttcttttcggctagagaaatcagagcaaggaaacattttttttttttttttgcttaaacttccctcaccaattttcacttcaataagaaaagacacccttggcagatgtcccccttattggtaatctaaaaacttcattgcaggctgaaaaaaacactttggagaaataaaaacgtggcagtgtttgttgtttgttggg

SEQ ID NO: 141447 - DNA, 519 bp, Homo sapiens
cataaactgtctaagaaatgaataaagcagacagaaaaagaaaggaaagactttctgcacctgcctttttgttctgaatgttccccaaactacttcctgccaatatcttagagtgggagggtagatagtaacattgaagtaccagcacactgtctggtaaatatgtgcatcttcacttcaagcttactttctgtgcattgtccctgtattccatcgttcctgcattccaagtcctgggttttgtccaaactttgtcctccgttacaacttcttgaagccacttatcacagtaattytaagaattctaaaagttctatgacagcagcctattttcttttcggctagagaaatcagagcaaggaaacattttttttttttttttgcttaaacttccctcaccaattttcacttcaataagaaaagacacccttggcagatgtcccccttattggtaatctaaaaacttcattgcaggctgaaaaaaacactttggagaaataaaaacgtggcagtgtttgt

SEQ ID NO: 141448 - DNA, 519 bp, Homo sapiens
cataaactgtctaagaaatgaataaagcagacagaaaaagaaaggaaagactttctgcacctgcctttttgttctgaatgttccccaaactacttcctgccaatatcttagagtgggagggtagatagtaacattgaagtaccagcacactgtctggtaaatatgtgcatcttcacttcaagcttactttctgtgcattgtccctgtattccatcgttcctgcattccaagtcctgggttttgtccaaactttgtcctccgttacaacttcttgaagccacttatcacagtaattctaagaattmtaaaagttctatgacagcagcctattttcttttcggctagagaaatcagagcaaggaaacattttttttttttttttgcttaaacttccctcaccaattttcacttcaataagaaaagacacccttggcagatgtcccccttattggtaatctaaaaacttcattgcaggctgaaaaaaacactttggagaaataaaaacgtggcagtgtttgt

SEQ ID NO: 141449 - DNA, 519 bp, Homo sapiens
cataaactgtctaagaaatgaataaagcagacagaaaaagaaaggaaagactttctgcacctgcctttttgttctgaatgttccccaaactacttcctgccaatatcttagagtgggagggtagatagtaacattgaagtaccagcacactgtctggtaaatatgtgcatcttcacttcaagcttactttctgtgcattgtccctgtattccatcgttcctgcattccaagtcctgggttttgtccaaactttgtcctccgttacaacttcttgaagccacttatcacagtaattctaagaattctaaaagttytatgacagcagcctattttcttttcggctagagaaatcagagcaaggaaacattttttttttttttttgcttaaacttccctcaccaattttcacttcaataagaaaagacacccttggcagatgtcccccttattggtaatctaaaaacttcattgcaggctgaaaaaaacactttggagaaataaaaacgtggcagtgtttgt

SEQ ID NO: 141450 - DNA, 539 bp, Homo sapiens
cataaactgtctaagaaatgaataaagcagacagaaaaagaaaggaaagactttctgcacctgcctttttgttctgaatgttccccaaactacttcctgccaatatcttagagtgggagggtagatagtaacattgaagtaccagcacactgtctggtaaatatgtgcatcttcacttcaagcttactttctgtgcattgtccctgtattccatcgttcctgcattccaagtcctgggttttgtccaaactttgtcctccgttacaacttcttgaagccacttatcacagtaattctaagaattctaaaagttctatgacagcagcctattttcttttcggctagagaaatcagagcaaggaaacattttttttttttttttgcttaaacttccctcaccaattttcacttcaataagaaaagacacccttggcagatgtcccccttattggtaatctaaaaacttcaytgcaggctgaaaaaaacactttggagaaataaaaacgtggcagtgtttgttgtttgttgggcagggtgga

SEQ ID NO: 141451 - DNA, 611 bp, Homo sapiens
caggtccttctgggtcttagattaaaagaaacatggaataggtctacacccacctgcagtctagagcagagctgcagcacacttcttgcagmccttatgtaaaaagagcaagaaataaacatttgtttttataagtcattgatatttttacagttgattgttactgcagcaaaaactaatacatagacggattaccttatatataacatgtatgtcacatatatgtgacatacatatatttcatatttatatatgatacagaaaataatactcataagtttatgataaaaatatgtaatatatagtatatatcacatatgtgtgtaatgtgtaatacatatgtgatatatactatatgttacatatatgatatatatcttacatattaaatatatagtaatgtgccgtatatccacctttggtcaattacggaccacatataagatagtggtctcataagtataaaatactgtatgtttagtgtatatcttgtctatgttaagatatgtttagatacacaaatatcattgtgttacagttgcctatagtagtgagtacagtaacatgctgtacaggtttgtagcttaggagcaaaaggctatatcatatag

SEQ ID NO: 141452 - DNA, 611 bp, Homo sapiens
caggtccttctgggtcttagattaaaagaaacatggaataggtctacacccacctgcagtctagagcagagctgcagcacacttcttgcagaccttatgtaaaaagagcaagaaataaacatttgtttttataagtcattgatatttttacagttgattgttactgcagcaaaaactaatacatagacggattaccttatatataacatgtatgtcacatatatgtgacatacatatatttcatatttatatatgatacagaaaataatactcataagtttatgataaaaatatgtaatatatagtatatatcacatatgtgtgtaatgtgtaatacatatgtgatatatactatatgttacatatatgatatatatcttacatattaaatatatagtaatgtgccgtatatccacctttggtcaattacggaccacatataagatagtggtctcataagtataaaatactgtatgtttagtgtatatcttgtctatgttaagatatgtttagatacacaaatatcattgtgttacagttgcctatagyagtgagtacagtaacatgctgtacaggtttgtagcttaggagcaaaaggctatatcatatag

SEQ ID NO: 141453 - DNA, 644 bp, Homo sapiens
agaaaataatactcataagtttatgataaaaatatgtaatatatagtatatatcacatatgtgtgtaatgtgtaatacatatgtgatatatactatatgttacatatatgatatatatcttacatattaaatatatagtaatgtgccgtatatccacctttggtcaattacggaccacatataagatagtggtctcataagtataaaatactgtatgtttagtgtatatcttgtctatgttaagatatgtttagatacacaaatatcattgtgttacagttgcctatagtagtgagtacagtaacatgctgtacaggtttgtagcttaggagcaaaaggctatatcatataggctaggcatgtagtaggatgcaygatctaggtttctgtaagtgtactctgtggtgttcacatagtgacagaatcacctagaacacatttctcagaatgtatctccatgttaagctttgcatgattgcattacatgtatatgtatgtttgtatatgtatcttatatatgtaatacatataacaattttttatgtaatttataagttatatatatattcttaaaaactccatgagttggatatgattttcaatttaatagaagaaaaagctgagaatttaaatgtttattgttt

SEQ ID NO: 141454 - DNA, 552 bp, Homo sapiens
ggaggccaaggttgcagtgacctgagatcggtccactacaccgcagcctggtgacagagcaagactccatctcaaaaacaaacaaacaaaaaaataaaaaagaaagagtaaggctctttaggggtttagaaagcccactgaagttattgatgaaaaatttaaaacaatttcaatccattatgttaagtaattttctcaaagcaatgtttgactttctaggtacaagaacagagaaaacaagtttaaacagggatgtgatgatgctagatgagttttatttgaaaaaaaaataggaggggtgggagaaagtaaggtttggcaagagagttttgaattgaagactatgagtcctaagcttggggtgaaagtaaaaaaatgcaggaggagaggaaaaatttatagttgaagttaattaaatagaggtgctgatgtaatccacatgattttgaaygggcaaggtaggaagatagaagaccatggtgagaaagcaagaaacctgaatgagcagtttgggggatggagagatttggatgagagaaaagcacagttatg

SEQ ID NO: 141455 - DNA, 553 bp, Homo sapiens
ctactgcatgttcaactaattaaacccatgcttgggtgaataaaatcacaacccattagtctatagtgagaatatgggctttggtcaaaacaagtaggatatctgggtccagaaagagagtcagcaagtgtgtctctcatattcattccagcggtgtgctaacaagactaattcacttgctggtgcttttcttgtgatatagagttgatgaagattaacagaccctgagtttcaggaaacattttctccctccaaatcacactagcctgaaaagcaaaaggaactcttatgaacaactgaaaaacaattaaatgcacactatgctcatgagctgtagatgcaattatattgtagacggcagataaggatgaytagaagtcaggaaagtcttcatgtataagatggatcatatgcttgactttgagtggtgagaagtatttagataaaccccgagaagcgcataggacttgtaaggcaatcagtgaaatggtgctgtatcctctatcatgggatacctttagtacattcttactgatttatacccggagggttg

SEQ ID NO: 141456 - DNA, 578 bp, Homo sapiens
aacacaaaggaccaggtttgccagtcagacaagcaaaaattagagtgaagcttgtaacagtttccttcttttagatacaattttacgtgaactcataaaaccatagactgtaagacaaactttaaaagaatcactttttggcctctgggaaaaaaaaagttatcagataagaacgcaatattatgggcagctgagtagttcttatcaagtctgcacaggacaggaaaagagaactcagatctttcacaaacaaaagagtggttctgagtccattggttagcaggagtccagartctatttccctggcaccccagcctcccacagaccaccccccaacctgctaaacatctgcaggttttctgaagacgtccatacttgtgacctggggtttccatagaattccaagggcagccaagccaagctacacactgtacaggcgtgctgcattccaggccacgtcctgtccaatgaacactaggacagccctgtcttcacctcggaggacagcgaaggcttggtctccttccttccagccattgtaaatggtcatggtttccactcctgatactataccctgc

SEQ ID NO: 141457 - DNA, 514 bp, Homo sapiens
tttgcatattaagacccagagttcaaagaattgaacaaagtatggatcccagaatacaaagaatagtatattatgtaaagaaaattcctgcctcaaagggaaggaaaataactgttgctagatgctggaaagtaagagaaaaaaattaagagtaaaggattatatatgagtgatctgattttcctccctcatgattaaaactagaactgggggtggtgytggtggtagacgttcaaagatagaaacatttaagggactcacaagcagagggcacgttcttccctttacagaacatagaccatgaaaattgcaagatgctgaggaatgacccacatttagcatagccctggagagccttggtgccatcgtgcaggtacaggaggaggctaagagcatggctacaatgccacatggtctgcacctagcacaaaagaggattcagaatttctttggagttttggcatggggaggggtagaaagcagggtatgaaactgcccaaaagaccaatagatc

SEQ ID NO: 141458 - DNA, 367 bp, Homo sapiens
ttagcataaattctgagccagattaataaaaataatttcataggctcatagaaataaaaaacaaattataaatatttatatacatattttaatataaatattataattttacataaatatttatatataattttacttatattatttttatataaatatatattatataagtatataatatatatttatttaatataaatatattatttatatataaatatttatattatatataattatatatattatattaatataagtagatatatacaaaaaataattmtaattaaaaatgtggccaaaattaaaccattttcagaaaaagaaaaacggggtcattttgctgctagcagatctgacagaattc

SEQ ID NO: 141459 - DNA, 623 bp, Homo sapiens
gtgcatgtaggtaacattgattgctggagaaggtgtttggtaatatgccgaagtggagaccttggtacagaaatgtgaagactgaattgaattttaacctaatgtgaaatcttggtagagaattttgtaataagttaatgcctaaagaatatttaaaatatgcttccatattcaaaatatcaaatgtaacacatcagaacatcttatgtgtttgacattgtatgttggaaggaagggccagacatcagaacctttggaacctggtgtcatcacaggccttacagggctgcttgcaacctcacaggcctagactttggccccaaaggaaagttctaaatgttgctctgtaaatccatttggtgtcattgaccaactgcatccmggctaaaaagcaagaggtattgttgcctggatgaacacagggtgtgtttcagccctgagatttttgggttgaagagctctattttcattgaggatttctctggaaatttttccaattatctctgaaatttctatgtattacgcttttttgggaaatgaggtgtgtccaattctttcatctaacaacgcttttggggatttgctcacatctctgagatttgaatggaggttgtttcccattt

SEQ ID NO: 141460 - DNA, 606 bp, Homo sapiens
atgaaatttaaaaccttcacgtaatatatgtcatatagaactctcataaaatatcagtatgatgtgataacaaaggtcagaacaaatggaagaaaaaccaatgtatgatttctgaaaaccttatcctgggaaatgagaaacagactataattctttacttacatctacattaygcaaaagtatctttgatgtgaaaaaatactcagtgttgttcattcgatgttttatatgttttggtaaaacattttgtgttcacccttttaaatattccaagacacactcactggctagaatcaatgggagagaaagaggtgactctataactaatataatgttaaggaaactgcacatatcttggtatgtttctgatagtgcataattccagaaaatgtcttaagcattgcataattgttagaaacatgaaatctgcagccagcaagcatgagttccacatctgaccctactctttccagttgtgagaacttatttgtattttaaactactgaatttcaggatgcctctgtttattcctgtttctttattttttaagttgacagtatttgtacatattcatggggtacatagtgatatttcaatacatataac

SEQ ID NO: 141461 - DNA, 598 bp, Homo sapiens
tatagaacatgttattatgatctttaagtgtcttgctcatattattagataattagatatcatagtgtgaggacagagcttgaaggttctcataaaagtcgtatgtatcatcttccatatgaatgcccattttactctttgattggtctaataacaatgtactgttttctaaaacacagaataaaatggagaattgtttttcaagattatcttcatgatattgaagctcaattaagcagtaacatgataattactttttaagtttatatgcaacttccacatactttgcgcccttctaggcggcasgtgcagccgcatctgctgaatcaagagacttcagtggtgctggtgggataggagttttttcagagagttcttcagtagcatctaagttgagctccaaaagtgaaaaagagctgaaaaacagaagaaagaaaaagaaacagaaagaacagtctggagaagaagagaaaaatgacagagtccgaaaatcggaatctgaagacagcataagaagaaaaggtttccgtttttccttggaaggaagtaggctgacatatgaaaagagattttcttctccacaccaggtaaaaatatt

SEQ ID NO: 141462 - DNA, 598 bp, Homo sapiens
tatagaacatgttattatgatctttaagtgtcttgctcatattattagataattagatatcatagtgtgaggacagagcttgaaggttctcataaaagtcgtatgtatcatcttccatatgaatgcccattttactctttgattggtctaataacaatgtactgttttctaaaacacagaataaaatggagaattgtttttcaagattatcttcatgatattgaagctcaattaagcagtaacatgataattactttttaagtttatatgcaacttccacatactttgcgcccttctaggcggcacstgcagccgcatctgctgaatcaagagacttcagtggtgctggtgggataggagttttttcagagagttcttcagtagcatctaagttgagctccaaaagtgaaaaagagctgaaaaacagaagaaagaaaaagaaacagaaagaacagtctggagaagaagagaaaaatgacagagtccgaaaatcggaatctgaagacagcataagaagaaaaggtttccgtttttccttggaaggaagtaggctgacatatgaaaagagattttcttctccacaccaggtaaaaatatt

SEQ ID NO: 141463 - DNA, 628 bp, Homo sapiens
aaaactggtttacatcttactctcctactttctagctgtggttctttggtcaaaatacctagattattgtgaggattaaagagtataacttggctgrgtgcagtggctcatgcctgccatcccagcactttgggaggccgaggagggcagattatgaggttaggagttcaagaccagcctggccaacatggtgaaaacctgtctctactaaaaatataaaaattagccaggcgtggtggcgggtgcctgtaatcccagctacttgggaggctgacgcaggagaattgcttcaacccaggaggcggaggttgcagtgagccgagatcacaccactgcactccagcctgggcaacagagcaagactctgtcttggaaaaaaaaaagggtataactcaagtaaaacatccagtatacataacagatactactaatgctcttttctctgtctttcaagctcttacatatagcactgtactaagcacaatgaatgaaaccaaatcaaaaacaataaacctaatctttcagtatttacaatccagctaatcatttaacaaaaattttgaaatgtctactaagggccagtcttcttccagatgcttgggatacagtaatgaaccaaacagacaaa

SEQ ID NO: 141464 - DNA, 628 bp, Homo sapiens
aaaactggtttacatcttactctcctactttctagctgtggttctttggtcaaaatacctagattattgtgaggattaaagagtataacttggctgagtgcagtggctcatgcctgccatcccagcactttgggaggccgaggagggcagattatgaggttaggagttcaagaccagcctggccaacatggtgaaaacctgtctctactaaaaatataaaaattagccaggcgtggtggcgggtgcctgtaatcccagctacttgggaggctgasgcaggagaattgcttcaacccaggaggcggaggttgcagtgagccgagatcacaccactgcactccagcctgggcaacagagcaagactctgtcttggaaaaaaaaaagggtataactcaagtaaaacatccagtatacataacagatactactaatgctcttttctctgtctttcaagctcttacatatagcactgtactaagcacaatgaatgaaaccaaatcaaaaacaataaacctaatctttcagtatttacaatccagctaatcatttaacaaaaattttgaaatgtctactaagggccagtcttcttccagatgcttgggatacagtaatgaaccaaacagacaaa

SEQ ID NO: 141465 - DNA, 614 bp, Homo sapiens
tgctttctcccaggcttcatggggcctagcactgaaagtagttaccataatttaaaatacctctgtttgaaagatgtttattctcccatagatcataaaccaaccagaatatgatttcagtgtgttatgaataatacttgaaagaatttttttgtttttgtttttgatccataatttgttttgatccataatttcagaggggtggaaggtgagaaaacatacaaacaccaccacagtatttaccagacgatgtggaatcgaaaataataccaaagcagaaagagttaccaaattttatatttttttatttttaaaatttactttttaaatagagatgtggtctcattatgttgcccaagctggtctcgaactcctggcctcaggtgatcttcccaccttttttagagacagggtcttgctctgtcatccaarctggagtacagtggtgggatcatagttcactgtagcctcaaactcctgagctcaagcaatcctcctgcctaagccttccaagtagctaggacaacaggtgcgtgccaccataccccattcttttttttttaaacttttggtaaaggtggggtctcacatgtttcccagactggtctcaaact

SEQ ID NO: 141466 - DNA, 600 bp, Homo sapiens
ttgtctaataaaatgtgtcaacatcaaggacattcatttaactcaatgaatgaatattttctaaatgacraagcatgatgttacaaaacaatgcattgtaaaatatgtgttcaaagtgcaagagagacgaaaagattttaatgtagcagagtgcaaagatttcattgatataatttcaaatttcacattgcagctaacctttaaaaaaaactacccttgtcaatttttgtaatagtaataaaataatattcacaataatctacaaaggttattaacatatttctcactttttcaactacatatcaatgtgagataatttttattaatataattcaactagaacaacatatttcaacactttaaatccagaaactggtatgagaatccaactgtcttctattaaggctgacattaaagagatttgcaaaaataaaaaccaatgccatttttctcacttgttttgaaaaacagcgacttttttttttttacacacagaaaattatttataccaacacatattcagttcattgttgttattttaaatagattttaaaataaatattttacaattatctcagttttaatttctgatacagtaaa

SEQ ID NO: 141467 - DNA, 600 bp, Homo sapiens
ttgtctaataaaatgtgtcaacatcaaggacattcatttaactcaatgaatgaatattttctaaatgacgaagcatgatgttacaaaacaatgcattgtaaaatatgtgttcaaagtgcaagagagaygaaaagattttaatgtagcagagtgcaaagatttcattgatataatttcaaatttcacattgcagctaacctttaaaaaaaactacccttgtcaatttttgtaatagtaataaaataatattcacaataatctacaaaggttattaacatatttctcactttttcaactacatatcaatgtgagataatttttattaatataattcaactagaacaacatatttcaacactttaaatccagaaactggtatgagaatccaactgtcttctattaaggctgacattaaagagatttgcaaaaataaaaaccaatgccatttttctcacttgttttgaaaaacagcgacttttttttttttacacacagaaaattatttataccaacacatattcagttcattgttgttattttaaatagattttaaaataaatattttacaattatctcagttttaatttctgatacagtaaa

SEQ ID NO: 141468 - DNA, 600 bp, Homo sapiens
ttgtctaataaaatgtgtcaacatcaaggacattcatttaactcaatgaatgaatattttctaaatgacgaagcatgatgttacaaaacaatgcattgtaaaatatgtgttcaaagtgcaagagagacgaaaagattttaatgtagcagagtgcaaagatttcattgatataatttcaaatttcacattgcagctaacctttaaaaaaaactacccttgtcaatttttgtaatagtamtaaaataatattcacaataatctacaaaggttattaacatatttctcactttttcaactacatatcaatgtgagataatttttattaatataattcaactagaacaacatatttcaacactttaaatccagaaactggtatgagaatccaactgtcttctattaaggctgacattaaagagatttgcaaaaataaaaaccaatgccatttttctcacttgttttgaaaaacagcgacttttttttttttacacacagaaaattatttataccaacacatattcagttcattgttgttattttaaatagattttaaaataaatattttacaattatctcagttttaatttctgatacagtaaa

SEQ ID NO: 141469 - DNA, 579 bp, Homo sapiens
gccacaggtgccagcaccatgcgaggctgtggatggaccaggtgtaccacaaacagcttccactgtgggtactggggaacatggtggctcccagaagcttgcagacaccaggaatcacagagccccaaagacagtatcacagccctggctcagggagmtcctaggtctgggctcgtttaagggctgcagctcttttctcctcatcatcagcaatgtggtgagtggggggcatgtttcagctgtttgcattacaggtctttcagtcccaccatctggcagatcctgggttgtcgtcccacatccaggaagaatgaggtacatggacaactagagggtaagcaaggtggagaggggtgtcactgagcaacggaacagctctcaggagacctgaaatgggtagcttcttcctgcagctggtagtcctgatgtctgtctgagtttggttgagtctgggtttttatggggtcagagggagtaaatgtgtgcttactggtccatgggcagctatggacaggcccagaaagagcactataagttctcaccctaggccaaggacttaatctggaaatggcagcccag

SEQ ID NO: 141470 - DNA, 556 bp, Homo sapiens
actatctctctcattttaacgtaaaatgtctttaagacattggttccaaaccagggtaagtaagttctctatttcctgatcccttaggcatgsaagatggatacctatctcaagggcaaccacccaaagtggcctgacaggaagtgctctaaacacaagtaagtagctatgtcagccagattccttctctagaatttaaaccgggaaacagaatttgcaagagcagggcgtgtggtagcagaagctgagaggaactccaggaggcatgtggtggcgagacctgtggaagccatgagggaggtaaagatatgaagaagctgaagctgcaagggagaagaatgagctgattgggggaaggcaagatcaaaagatgagttccataattgcccaggaatgatgcactcagtcaagaagacaaccaaatcaatggaaccccaatactgtgtggacaattccactacttatgttccatttccacgagcatcaaacatttgttcatcagttcctgggttcctatggggtcttgcctcccttgtttgccacatatatcttttta

SEQ ID NO: 141471 - DNA, 399 bp, Homo sapiens
gccggtgagtttacgtgcccccacccatatccttagcgaagactgactattgcagtcttgtgaaagtacagatcccttgcttcatatagggacaaactcaaatacataatttgtactccaaagttgtcctgtgggatcataataaagccacttctgtagggctttgttkggaattacaccttagcttggctccttccccatccagacctgcagctttacccactcctttcctgattgatcctaggagtacctccttaactaatcactttcccattaagccacatctcagtgtctgtctctggggaacctgacctaagacatgtagtttacattgcaatgtacagagacaaataataaacaatataaataattattaataagtttcatactaggccgggc

SEQ ID NO: 141472 - DNA, 561 bp, Homo sapiens
aaaattatgtaatttgaggtatggatcagttatatattgtaatagcaatgctgtgtatcaaaccaccaaaaaccctgggctctaagctgcttttctagttttgactcctatttccttctgtgtaactcacagactttcttgtcactaagttttacttgtatcattgtttctcyattcttacagcttcattttctacatatgtctcttatatatccttcaagatctagtctcaaatccatttcctccataaagctcagaaattaaagtttaccagaaaactctcataatactttgttttgtgataattgttgctttccataactatagaattgtagacaaattgccccaacttaaaatgtacattctttgaggacaaggctatgttttacatgttatagtattacaatttgttctatgcaattttttgacaatagtagatactcaataagtatttgttgaagagcctttgatctagcaatccagaaattatacaaaggtgtttattggattgttattgataatggccagatttaaagcaaacgaagtattcaataatggtgg

SEQ ID NO: 141473 - DNA, 390 bp, Homo sapiens
ttctctctaatgtccaactgtagtctctgatgtccagctgttcctcctgtctgcctgctgagttctgggctttatataggcacaggatgggggcagggtgcaccatgggtggttttggaaaaggcaacatttaagtgagaaaacagggatgtatattctcactttgggccacggttccaggcttgagggtggagccctcgccrggtacccgtcctcttctgcccagaatttctctgcctcttgttcctgtcaaaattgcttaacataaactccatgctgcaggggactcctctgtcttcttcacactgattcgctattgccaaccacagtgaatgataagaagtagactcacttaattactgactagcaaaaaaatgatggcattacaaa

SEQ ID NO: 141474 - DNA, 498 bp, Homo sapiens
tagtgactagtacctttgctgtaggagctctttgttctcagttacacccagtcagtgctcaccaaattgcacaacgtgctggcacagtggctggctcctcaggggtttacagcttcagctataagcaaagcccagaaacctttaggtccttgtatggagctctggttacaagccctgattcttgttatctaaaaaagaaaatgttcctttgtctttaatccaggctgycaggttttcctgataatttttccgataagaagatcaagttagataaatagtcttttcattctggaagcctcaggagttcctgcaaatgagttacccactctttcccaagggctctggaaaattctgtcaaagggaatttccaaacgtacacccacccgcctccacacacacacagacacacagagagagggagagagacaagaaagtgagcaatgacaatcctttcctttttctgtaggctgagggacctccctgctttatatctgcatt

SEQ ID NO: 141475 - DNA, 576 bp, Homo sapiens
gatactatttcttttctctattttctgtatgtacttatcataggttggtaaatccataataaaaatatctgatacttgatatatctatgttaggataaaagtatcaagtcagcactgcttgaatataaggaaactcttmagagaaatctagttgtcctgcagctaatgatcatattacccaaagtactctgatatttacctttttagatttaagaaaactattatgatagtatatgaaactgatcaacactttgccttaaatcaaatatgcttattgctcatctatttcattatgaaagatacaaatataaataagtcatttttctagtcctgcagtagcttacagttgaaaagtgaggacagctgcgtacacagtaagtcgacacctgtattacaagtgccacctctttacttgaggaaggaggaaaggcttcaatagggaagtggagtgtgagctggagcttgagagatgtgaatgctagcaggcacagctgagggaggaacacggattcgttaaaacgttggtgcatgacatgcagggcgggttccagaaacaagtagatagggtgaggtaag

SEQ ID NO: 141476 - DNA, 576 bp, Homo sapiens
gatactatttcttttctctattttctgtatgtacttatcataggttggtaaatccataataaaaatatctgatacttgatatatctatgttaggataaaagtatcaagtcagcactgcttgaatataaggaaactcttcagagaaatctagttgtcctgcagctaatgatcatattacccaaagtactctgatatttacctttttagatttaagaaaactattatgatagtatatgaaactgatcaacactttgccttaaatcaaatatgcttattgctcatctatttcrttatgaaagatacaaatataaataagtcatttttctagtcctgcagtagcttacagttgaaaagtgaggacagctgcgtacacagtaagtcgacacctgtattacaagtgccacctctttacttgaggaaggaggaaaggcttcaatagggaagtggagtgtgagctggagcttgagagatgtgaatgctagcaggcacagctgagggaggaacacggattcgttaaaacgttggtgcatgacatgcagggcgggttccagaaacaagtagatagggtgaggtaag

SEQ ID NO: 141477 - DNA, 616 bp, Homo sapiens
attttccatgatgtgtaattaaaatgagtctaaagtttttcttcctcataatgagatatccacctgttagaatggctattatcaaacagataaatgacaataaatgctggcaagaatgtgaagaaaagggaacccttgtrcattgttggcagggatgtaaattagtatagcttttatggaaaacagtatggaggtttctcaaaaaactaaaaatagaaccactatgtgatccaacaattccattactgggtatatatacaaaggaaattaaatcaacatgtcaaagagatgtctgcactctcacactcactgcagcactattcacaatagccaaaatatggaaacaacctaattgtccatcaacagatatgtggataaagaaaagtgtgtgtgtgtgtgtgtgtgtgtacatatatgtatatgtatatatatacacacacgtatttctatatacacacgtatagatatacactgtatatgtatatatctatacacatatatagacatacacagaaacagtgtttgtgtatgtgtgcgtgtatatagaagtagtcagggaaggggcagagcctgtggcactaagaaactgagaaaatgtacaagacttttgttttca

SEQ ID NO: 141478 - DNA, 616 bp, Homo sapiens
attttccatgatgtgtaattaaaatgagtctaaagtttttcttcctcataatgagatatccacctgttagaatggctattatcaaacagataaatgacaataaatgctggcaagaatgtgaagaaaagggaacccttgtacattgttggcagggatgtaaattagtatagcttttatggaaaacagtatggaggtttctcaaaaaactaaaaatagaaccactatgtgatccaacaattccattactgggtatatatacaaaggaaattaaatcaacatgtcaaagagatgtctgcactctcacactcactgcagcactattcacaatagccaaaatatggaaacaacctaattgtccatcaacagatatgtggataaagaaaagtgtgtgtgtgtgtgtgtgtgtgtacatatatgtatatgtatatatatacacacacgtatttctatatacacacgtatagatatacactgtatatgtatatatctatacacatatatagacatacacagaarcagtgtttgtgtatgtgtgcgtgtatatagaagtagtcagggaaggggcagagcctgtggcactaagaaactgagaaaatgtacaagacttttgttttca

SEQ ID NO: 141479 - DNA, 614 bp, Homo sapiens
gtgttccacacatgagcatgcacgacacttcctgtgttactctcttaaaacccttggccacaggatctctggtatatgatgagttaattattttattcctgatgcaccttcaagaaatgtagctttactaagtgatgaattatttctgaattagagacagaatttaagacacgtgctgagttagacaaccaaattttgccgtgctcatgaaaatgtggataaacactttcaagactctcaagwacttatagtgataaagttacttgaaactctctattgatatgaatacttcaacactttgctcattcagttttatgttagtcgctgagatcctttccattaaccatgtctttaggttcataatttgctcatgtttgtttaatttttgcactatgagatctatgcccaaggaaagaaatcttttctcagtacaaatgcttcacaaactgttttttcttgaagagacacattcaaatgtaaacattatttttccagcaatgtttccaaagtggatatttactttaattgttttacacctaaaatagttgcaaaataagcagaaaatgtatttgcaaggctaactgcccttcttccaccagccgaatttacgagtc

SEQ ID NO: 141480 - DNA, 464 bp, Homo sapiens
aattgtacattgtaaatgggtgaattgtatgatatatgaattacatcttaataaagttcttactaaaaatgacagagagagggagagagatcattctctttaaatatggaatattaattaaaccactcatttatatctcttgaaaatctcaataaaatggtgataaaaattttttaaaaggcataatccaacatgtacaaataatagagaggaacagactacaaatacggcaaagggaagacgtcaacaccattttggaagctggaaagaagatatgtaagtaacayagtgacctaactgacctgggaaagctaaagcctgtgggggatgacaagagggaggcctaatggcactgcaaaaagctccagaaagtttccaaaattagaagcattagttacttctgaaggccagggtatgggatgaggctaaaaatagaagtgttggttcaaagtttacatgagatg

SEQ ID NO: 141481 - DNA, 214 bp, Homo sapiens
ttttggcactgtcccaagcacattgtgtgcttagtaaatatttctttataatgacaatggtgatgttaccttttttatatagtacatggtgatctttggccccctaaagcaaaaatctgtgcaaagatatatgacttttagttctctgcagttgttgcttggagcctcaggagagacaatattctttgwgtattagtggtgtgttttatacacg

SEQ ID NO: 141482 - DNA, 542 bp, Homo sapiens
gtaacagttaactagcacgtgttttattgtttccaactgcttttcctggggtatttgcaggtggtgggagatgctttcttaaagaggggtcataacctcgtgaactttcagatgttgcaacaaattggggaacaaaacatttttcctttttcaaatatattaagtaaatcttattacatagcattttcaagacagatgcagcccaacagtttttcctttttgccattatttccagatgttatcaattttaaagtcagcattccattttaagaacaggatctataggaaggtgatattagtaatacgtatagcagcagagtattattttgccctttttggaggtgtgttctggttttacattttgctataaaatgtgagatcaaaccrtaaaatgtgagtgtatttttaattggccttttaatcgtttgtatattttgccttttcattaattaactcaatgtttttgcctttactggtcgttttctttgtcatttttaatgcaccagaaaaattatagtatttttataaaatacaagactaaa

SEQ ID NO: 141483 - DNA, 571 bp, Homo sapiens
aaggccacaaagagagttgaatgagtctggccaagtctattatattatttgagatgggccttccaaccacaggtacctggggggttagcaaacagaatcctggccctaaccataccagaatcgcaccaaacgagtaataaactaactgcagagagcagatgggtaaacaagaagcccaagagctggatttcattgttagttaacagaatttccaacacatgtcccttcatttaaaaagtttatttctactaaatgtaaacttcccaagttctaatgaaagctgataatgcttcccagtatgagattaatttcctatcaacatctggagttaaaattcataggttcatatattcatggataaaactcatgttggcatcttatgctgtgacagaaaaacatatcttctcattgtaaggaagagtcttcagtgaacgcctactatggtttatattctccttcatcggtggttaaaatttcactgatgaagtaccccttaaagagaaaatcaatgtctgagcttaaccacctgctttgttttagcaccacamattattttaaaaactgattaaca

SEQ ID NO: 141484 - DNA, 627 bp, Homo sapiens
ctgtgatatttacctttgaggtagaacagtgaaggtgtattgctatccttgccagttgaaagcaaactgcttctgggggtcttcactaataggcattgagaaaaatctgtttgacagatcaatagctgcatgagaaataccagggaatgtgttaccttgctcaagcaataaaaccatatctagtacaacagctgcagttagagtcatcacttgctcaagtttatgattatccactgtcattctccaggatccatctgtcttctgtacaggacaaataggaaaaatgaatggggatgtggtaggagtcatcacctccgcatctttcaagtccttaatggtggtgctaatctctgaaatctctctagggatgtggtattgcttttggcttactactttcctaggtatgggtagttctagtggcttctgtttggccttttccaccataatagcccttactccagagttcagggaactaatgtggggattctgccagttgctgagtatgtctattccaaatacgcattccaaaatggagaaaaamaccacaggatggctttgggcacccactggacacactgtgagataggcctgaattaaactgatttctcctaagcccctagcctgact

SEQ ID NO: 141485 - DNA, 484 bp, Homo sapiens
ctccgcatctttcaagtccttaatggtggtgctaatctctgaaatctctctagggatgtggtattgcttttggcttactactttcctaggtatgggtagttctagtggcttctgtttggccttttccaccataatagcccttactccagagttcagggaactaatgtggggattctgccagttgctgagtatgtctattccaaatacgcattccaaaatggagaaaaacaccacaggatggctttgggcacccactggacacactgtgagataggcctgaattaaactgatttctcctaagcccctagcctgactagtgggctacagtgacttttggatctcctggaattaatgtcagttcagagcctatgtctggtaattcccraaagatctgattatttccttttcccaaattcacagttcccttggtaaaaggccatggatccctttggggtaggctgagagaaatattattaatttttgg

SEQ ID NO: 141486 - DNA, 446 bp, Homo sapiens
ttgcaagccagaaaatatgtaaagattaagagggaagaaatgaatttaagaaaagggtaaagactgtgaaaaataaacacagggtacccggtgatgcaaaatcaaggaagcgaggggatagaggcggaaaggcagattgtatgtaagtggcaataatggatcatgtgtgaggatgtggtggaacaggaggaaagtagataatgagcttctcacaccccttctgctctttactcagggacccagctaaagagcaggggaaaaaaagagccctatcataaaaggaaataatwaaaaatcactttctttgagaaatctcagcagcactgtgtcttgaaagagatttagggtgacaactgctcaccaccttaaatctgctctgaatttggaattcattaagagaagacatgaggcaaatagtgaaaagcacagtatcagttcataagact

SEQ ID NO: 141487 - DNA, 441 bp, Homo sapiens
atcctcacacagaatatagtgctaatgtggtatctactgaggaatattactaacttagcaaatacacaattttacattctaaattctttttgttttttgaggaagcactccaaaaacatttggaatggattaatgaaaagacatcaatttaaaattagcctttagatcaggtgtggtractcacgcctgtaatcccaacactttgggaggccgaggcaggaggatcatctgcggtcaggagttcgagaccagcctggccaacatggtgagaccccatctctactaaaatacaaaaaaaaaaaaaaaatagccaggcatggtggcaggcatctgtaatcccacctacttgggaggctgagacaggagaatcgcttgaacccgggaggcggaggttgcagtgaaccaagatcacaccactgcactccatcctgggtgacagaa

SEQ ID NO: 141488 - DNA, 441 bp, Homo sapiens
atcctcacacagaatatagtgctaatgtggtatctactgaggaatattactaacttagcaaatacacaattttacattctaaattctttttgttttttgaggaagcactccaaaaacatttggaatggattaatgaaaagacatcaatttaaaattagcctttagatcaggtgtggtaactcacgcctgtaatcccaacactttgggaggccgaggcaggaggatcatctgcggtcaggagttcgagaccagcctggccaacatggtgagaccccatctctactaaaatacaaaaaaaaaaaaaaaatagccaggcatggtggcaggcatctgtaatcccayctacttgggaggctgagacaggagaatcgcttgaacccgggaggcggaggttgcagtgaaccaagatcacaccactgcactccatcctgggtgacagaa

SEQ ID NO: 141489 - DNA, 594 bp, Homo sapiens
tttttctttaagattctgctttcaagtaaacatgcttttgttagtaaaagccagattcttgtcaacttagtttctaacagaaactctctttctctctctctctctctmtatatataataattttatgtattttgtaatatatagagagatatatattataaaaatatacaaattgtaggtctcgtcactaagaacacctacatcatcaatgttcttgcaggaagaaaggcaagtatttaaagaacagaaaattaaagtaagcatttaagggcggtggtaaaacaagtacttacaaactgctgatgtgcaatttggtatagaaccccatataagcaaattgacaatatatattaagatgtaaaatggttataccccagatccaaaaattccactttgagggagatattattttaaatacaattacaataggaaaaattttgtgcacaaagatatttactgcagcattatttttaatagaaaaacagaaacagcatatatgttgaacagcaggaaaatgattaaggaaaaaattatataatctctcaatagattactatgtagccatgagaaatacctatgaacattggtaataac

SEQ ID NO: 141490 - DNA, 443 bp, Homo sapiens
cttgggggcattttgcctccatttccatgcatatcactgaaggcctttctaatagcgtgttaycagaagaccttgcacgagtcagtgttctggactgtgagcaacaactcaggcagggagtggagaagggcaggaccatgagatggactggaggagcaggagggtaagctgacaagagggtgctctgtcaatgttacctgaggcaggactgattgtaggagagcaatggagcttagaggaaactgcagatgcaagcactgtgatgatattcttggatccatcagagacaatttccaggggaagcaaaagatccaaggaagcaatgtcacaaaaaggcagatgtctctgcattgtgatccatgccagggtctcagaccttgctggttgattacatcatccctgtgataaagcagtcaagcaaatgtgtagtcaccagaattcag

SEQ ID NO: 141491 - DNA, 575 bp, Homo sapiens
ataataatgggggtgggggaagacgaaggtaaggataaagtaggggctttattatttttatagtgcttacattaataaaaagtacttgtcatgctagaaaagagaagccataattaacatcttttaaaaagctctgaacagatcagtgaacaaagattgctatgacatttttgatatgcccaacagcaataacagcctcttaatgctattattatatttctaacataaatgggtgaaataaagtgagcatctcagaagttttagtaaamgaaacacaaaattagaaaaatattttcatgtgcaaaaggaacctattgagattttgcaaatcgaatgctaatctcttaaaagcatgacgtcgaatataatgtgtattgtttttattggtttacaggagtttcaataataaaacatatgctatgttttgcacagcctttcaaatatttcatttttttccagagtgccatatattcaattacttgctttgatttataaaaaacagtccaccagaaggtgttttacctttaattctagtctatttttttttccagtttctctaaactcttatctatttt

SEQ ID NO: 141492 - DNA, 655 bp, Homo sapiens
ctactctaattggtccaatttttatttattagaaacaaattgttgaagaactaaygccagtttttaatgatccaaaacagaaataaatgttctagtctattaccgtcctatatggaataagtcaatattaaagctaattaacccttttcaaaggcattttgtcccaggtttttatttaatggttcagtgctgcttcaagcatggatcaagctggataagctccatttaaaaaatggcccattttgaaaacagtttagcagctcactatgacaactatatttatcaggataaacttgactttttcaactgtataaataagtgaccacagtttcttaaaagatccaacaataaaatagatgatggtttcttaaaagatctgacaataaaacagagattaaggaaaatagccaaatctctttagtaacattataacattataaaaactgatttcatttattgctttttaaaaatatttagctttagaaatattttcaggtttttacttttgggggtattcctaatgggggttcagggtggtccccatataagttatttcattctaggtcacatgtgaaatgaaaacctaagatttgtcctttttggaagaagccatgattttttaatagtgttcaaacacatagtgcgaagcacatac

SEQ ID NO: 141493 - DNA, 655 bp, Homo sapiens
ctactctaattggtccaatttttatttattagaaacaaattgttgaagaactaatgccagtttttaatgatccaaaacagaaataaatgttctagtctattaccgtcctatatggaataagtcaatattaaagctaattaacccttttcaaaggyattttgtcccaggtttttatttaatggttcagtgctgcttcaagcatggatcaagctggataagctccatttaaaaaatggcccattttgaaaacagtttagcagctcactatgacaactatatttatcaggataaacttgactttttcaactgtataaataagtgaccacagtttcttaaaagatccaacaataaaatagatgatggtttcttaaaagatctgacaataaaacagagattaaggaaaatagccaaatctctttagtaacattataacattataaaaactgatttcatttattgctttttaaaaatatttagctttagaaatattttcaggtttttacttttgggggtattcctaatgggggttcagggtggtccccatataagttatttcattctaggtcacatgtgaaatgaaaacctaagatttgtcctttttggaagaagccatgattttttaatagtgttcaaacacatagtgcgaagcacatac

SEQ ID NO: 141494 - DNA, 604 bp, Homo sapiens
atcacagattttttaaagcccacattaccgaagctttaaaagatctagattattcttaaaacagaatttgggaacacttgacattcatttattaattcacttccaaatcaaagatgtaacaaaagacaagaaagggcggctacacaaataaagaggtaagccacaaagacaactaacaaaacaaaacaaaaaaaaacaacaacaagaaaatctgggtagtagatgctggagttgtccaagaaattmaagcaagcagatggataatggcccatgtaatatgccttctctttcccaggtctttctttctctctctctctctctctctctccccacccccctctctttcctaggtctctctctctccccgcccccccccaggtctttttctctttctcgctctctctctctttctttctttctctctcttcgctctctctctctttcccaggtctttttctctttctttctctctctttctctctctctctctcacctgggattccttcccatcagcataaaatctcatctaatgccctcctattaatcattcagttttctgcaccctgagtacctgtatcaaatgctgtttgcattcactggatgc

SEQ ID NO: 141495 - DNA, 604 bp, Homo sapiens
atcacagattttttaaagcccacattaccgaagctttaaaagatctagattattcttaaaacagaatttgggaacacttgacattcatttattaattcacttccaaatcaaagatgtaacaaaagacaagaaagggcggctacacaaataaagaggtaagccacaaagacaactaacaaaacaaaacaaaaaaaaacaacaacaagaaaatctgggtagtagatgctggagttgtccaagaaattaaagcaagcagatggataatggcccatgtaatatgccttctctttcccaggtctttctttctctctctctctctctctctcyccccacccccctctctttcctaggtctctctctctccccgcccccccccaggtctttttctctttctcgctctctctctctttctttctttctctctcttcgctctctctctctttcccaggtctttttctctttctttctctctctttctctctctctctctcacctgggattccttcccatcagcataaaatctcatctaatgccctcctattaatcattcagttttctgcaccctgagtacctgtatcaaatgctgtttgcattcactggatgc

SEQ ID NO: 141496 - DNA, 604 bp, Homo sapiens
atcacagattttttaaagcccacattaccgaagctttaaaagatctagattattcttaaaacagaatttgggaacacttgacattcatttattaattcacttccaaatcaaagatgtaacaaaagacaagaaagggcggctacacaaataaagaggtaagccacaaagacaactaacaaaacaaaacaaaaaaaaacaacaacaagaaaatctgggtagtagatgctggagttgtccaagaaattaaagcaagcagatggataatggcccatgtaatatgccttctctttcccaggtctttctttctctctctctctctctctctctccccacccccctctctttcctaggtctctctctctccccgcccccccccaggtctttttctctttctcgctctctctctctttctttctttctctctcttckctctctctctctttcccaggtctttttctctttctttctctctctttctctctctctctctcacctgggattccttcccatcagcataaaatctcatctaatgccctcctattaatcattcagttttctgcaccctgagtacctgtatcaaatgctgtttgcattcactggatgc

SEQ ID NO: 141497 - DNA, 604 bp, Homo sapiens
atcacagattttttaaagcccacattaccgaagctttaaaagatctagattattcttaaaacagaatttgggaacacttgacattcatttattaattcacttccaaatcaaagatgtaacaaaagacaagaaagggcggctacacaaataaagaggtaagccacaaagacaactaacaaaacaaaacaaaaaaaaacaacaacaagaaaatctgggtagtagatgctggagttgtccaagaaattaaagcaagcagatggataatggcccatgtaatatgccttctctttcccaggtctttctttctctctctctctctctctctctccccacccccctctctttcctaggtctctctctctccccgcccccccccaggtctttttctctttctcgctctctctctctttctttctttctctctcttcgctctctctctctttcccaggtctttttctctttctttctctctctttctctctctctctctcacctgggattccttcccatcagcataaaatctcatctaatgccctcctattartcattcagttttctgcaccctgagtacctgtatcaaatgctgtttgcattcactggatgc

SEQ ID NO: 141498 - DNA, 554 bp, Homo sapiens
gtgagccacagtgttcagccatagatatttgaattctttaattagagtttgtagtttttttctgtatgacctggcacatattttatgagatttatacccaagtatttcatttttggtgttgctaatgtaaatgttgtgctttaattttaattcccattgctcattaatgatatataggaaagtaagtgactcgtrtattattaacatcatgccctgaaaccttacaacaattgcttatttgtttcaagagttttttggtccagtttttggggttttctatgtagacaattttgccaacttcacatcccaaactttgtaccttttattttattgtcttgtcttattgcattagcaaggacttctagtatgatgttgagtaggggtggtgagaagggaaatccttgtcttcattctgatcttagggccaaacttgtagtttttcacaattaaatatgatgtcagctatgggtgttttatagatttttttaatcaagttgaggaagttcccttctatctcctgtttgttgggatattttcacatgaataggtcatga

SEQ ID NO: 141499 - DNA, 554 bp, Homo sapiens
gtgagccacagtgttcagccatagatatttgaattctttaattagagtttgtagtttttttctgtatgacctggcacatattttatgagatttatacccaagtatttcatttttggtgttgctaatgtaaatgttgtgctttaattttaattcccattgctcattaatgatatataggaaagtaagtgactcgtgtattattaacatcatgccctgaaaccttacaacaattgcttatttgtttcaagagttttttggtccagtttttggggttttctatgtagacaattttgccaacttcacatcccaaactttgtaccttttattttattgtcttgtcttattgcattagcaaggacttctagtatgatgttgagtaggggtggtgagaagggaaatcsttgtcttcattctgatcttagggccaaacttgtagtttttcacaattaaatatgatgtcagctatgggtgttttatagatttttttaatcaagttgaggaagttcccttctatctcctgtttgttgggatattttcacatgaataggtcatga

SEQ ID NO: 141500 - DNA, 645 bp, Homo sapiens
tgagaggacacacacccaaggactgagaatgatgacatgcccaaaggaaaaataggacccttgctgctgtcccagggactcattctgtaccagccctcattcccatttcattaatctcacaaaaacagcattttactaaatctaattttttttttttttaaagacrgagtcttgctcttattgaccaggctggagtgcaatggtgtgattttggctcactgcaacctccgcctcctgggttcaagtgattctcccgcctcagcctcccgagtagctgggattacaggtgcccaccaacatgcccagctaatttttacacttttagtagagacagggtttcaccatgttatccaggctggtcttgaactcctgacctcaggtgatccacctgcctgggcctcccaaaatactgggattacaggcgtgaatttttaggcaaaacttatagtttaatgaggagctttaccatattattacttccattttgcagataaggagtcttagacaaatgtagcctaaggctacatacctagagtactaaagatttggagcacgagcccaggtatcctatgcaggtatggaactgcatagtctgaattcttaaccctcaccacctgcctcttttgggcatagcagttttaagca

SEQ ID NO: 141501 - DNA, 561 bp, Homo sapiens
gttaagtaaattggttaaaactgagtctgaattatgctgtggttttgtttgtgtaattgctttgctatctgagtcttctaatcactagactccatttaacaattttaataaggatggcatttattaaaataagaagagatcaatggccagcccagctttagaaacacaccatgaaaattagaaattctcagatgagtattcctaagatgcacaactcaagcaacttgaacagaatcaaaactcacagagaatctttaagaataccataaccgtttctatataagcaaagtggatgattaataattttattcaaatgagttacgrttaaataactgaaaaatacatacaataaaaagaaatgagagatcgtgtggcgagaacatctctttaaaatggaaggaagcaatctccctaattgtaatcatgtcatcaacgtgatcattttcaattaccaggtaatacaaacgcactactttttactcttccctgatccacctaatgccttacacagaataaattctcaataaatattttaaaactgatatgtctactcttccaatt

SEQ ID NO: 141502 - DNA, 530 bp, Homo sapiens
aaggagggaaggaagcaaggtttgaaaatctaactattgggtactatgctcagtacctgggtgacaggaggaatcataccccaaacctcagcatcacgtactacacccaggtaacctgcacatgtaccccctgaatctaaaataaaagttgaaattataagaaaaagtcaacttctaataaaatagaagctatggaataaaggtcttagrtaagaattaagttttcagataatcattactgcttgtattattaacttgcatttatagagctctttatactttttaagagcataaaatgcactggtgcttccggaaatctggaaagacagcagatggaccttcgtttggcagataaggaactgaaaacagaaaaaagatgagcaccttgcccaaggtcatgggtgagggtaggagtcagtgatggaggcaagaatcaaagcaggtctccagactctaaggcaacctcttctcaagcttcagaagcatgcaagtcgcccagggatcttcttaaaatgaaaatctgaatccac

SEQ ID NO: 141503 - DNA, 539 bp, Homo sapiens
acatcactgtatttggaattctgcctgctagtgatagctcacacatcacatcccagaatcccactcccaatgcattatttcctgaggcaagaacttaaggtcctcacctaattcctccatcacaaccattaactcttattggacaagctcctcctgtgagtrgggcctgtactcacttcctcttagatcataattccatcttcaagagactgatttccagaatagtaatctttttccagcgttctctcttctccaatgccctggttgttatttttcccacctctcctaatattgatcttcttgtcttttggttagaactgcaacttcggagttgagttcatttcctattgctgctcaattcagtagcaacatagctggcttgttcccagacccaggaagtataagtcattgacagtttcctgagtggctctgccaatccataccacccttggtactgtgaaaaggcttcttggcagccaggtggcattgaggatggtattcagggcgctttccttctgtcatatagttgtgggatctct

SEQ ID NO: 141504 - DNA, 601 bp, Homo sapiens
ctccctgttgagaaccactggtttcaatgcattgccttcttagtgtctttgttccttgagaattcttgaaactgattcctacccaggccacacagttaattttcagttattagcaagaattgaaagcagcagatgacccaaaaatatttgtgtttgcttttaagcaaataataagtggtctgtctggagaattacatccatgtctgtgttctggttagggcagcattaacactgactgggagccaggaccaaggcagcatgtaaattcaatttccccgtgtctgatccacaacattagggacttgctggatgctataatatcatctattcattcattcaacaaatatttatcaaaaggctttctctagccaggaaccgttctaggtgcttggaatacaataatgtgcaaaacaaacaaaaatccctaccttaaaggagtttacaaactttactttcaactaggcaagacattcggaatagtaagtagtcttacccaccctarctaatcacaaggacttgggagtggcagacaacaagagttgtttcattgtaagacattctaagagcttttgaataaaaacttgaactggaaatggcaatt

SEQ ID NO: 141505 - DNA, 494 bp, Homo sapiens
tggcctatgtgtgggagtgkgggttgtggggtgggcaattaggcaatggaaatgtggtgggacaggggagacagggagagggagatggagagggagagggagagggaaggaagccaggctctgctgagatgctatgggcaggagtagctcccgatgttggagctcagcttggaaggcctctagggctgctctgtttactatgctgagctgctgtgaattctcctaacatctgcaaaatttcaccatatgacactcctatctccttgatcccactcatacagaaccatttatttcatagtctttttcactaagcacagagataccctttgatgtttgttaacactgccatgtttcaaaagaggaaactgagatacaggagagcaatgcacttgcctcaaggcctctcatccattggcaggttcagcccacacctttactgaacatctacaaagagtcaggccgtaaggactggtaggttgtgcgatgggtcttga

SEQ ID NO: 141506 - DNA, 542 bp, Homo sapiens
aagggcactcaccacgaatagagcttgcaggacaggaggttgctgtgggtgagtcaatgagtgagtggtgagtgaatgtgaaggcctaggacattactgtagaccactgtagacttaataaacactgtacacttaggctacactaaatttttataaaaatattttatttcttcaataataaattaaccttagcttactgccactttttaatttataaacatttaaattttttttttttttgagatggagtcttgctctgttrcccaggctggagtgcagtggtgcaatgtcagctcactgcaagctccgcctcctgggttcacgccattctcctgcctcatcctcccgagtagctgggactacaggcgcccaccaccacgcctgactgattttttgtatttttagtagagatggggtttcaccacattagccaggatggtctcgatctcctgacctcgtgatctgcccgctgttttaaaaactttttgactgtcataataacacagcttaaaatgcaaaaacactgtacagctgcacaagac

SEQ ID NO: 141507 - DNA, 542 bp, Homo sapiens
aagggcactcaccacgaatagagcttgcaggacaggaggttgctgtgggtgagtcaatgagtgagtggtgagtgaatgtgaaggcctaggacattactgtagaccactgtagacttaataaacactgtacacttaggctacactaaatttttataaaaatattttatttcttcaataataaattaaccttagcttactgccactttttaatttataaacatttaaattttttttttttttgagatggagtcttgctctgttacccaggctggagtgcagtggtgcaatgtcrgctcactgcaagctccgcctcctgggttcacgccattctcctgcctcatcctcccgagtagctgggactacaggcgcccaccaccacgcctgactgattttttgtatttttagtagagatggggtttcaccacattagccaggatggtctcgatctcctgacctcgtgatctgcccgctgttttaaaaactttttgactgtcataataacacagcttaaaatgcaaaaacactgtacagctgcacaagac

SEQ ID NO: 141508 - DNA, 542 bp, Homo sapiens
aagggcactcaccacgaatagagcttgcaggacaggaggttgctgtgggtgagtcaatgagtgagtggtgagtgaatgtgaaggcctaggacattactgtagaccactgtagacttaataaacactgtacacttaggctacactaaatttttataaaaatattttatttcttcaataataaattaaccttagcttactgccactttttaatttataaacatttaaattttttttttttttgagatggagtcttgctctgttacccaggctggagtgcagtggtgcaatgtcagctcactgcaagctccgcctcctgggttcacgccattctcctgcctcatcctcccgagtagctgggactacaggcgcccaccaccacgccygactgattttttgtatttttagtagagatggggtttcaccacattagccaggatggtctcgatctcctgacctcgtgatctgcccgctgttttaaaaactttttgactgtcataataacacagcttaaaatgcaaaaacactgtacagctgcacaagac

SEQ ID NO: 141509 - DNA, 553 bp, Homo sapiens
cgaggctatggcctatgtgtgggagtgggggttgtggggtgggcaattaggcaatggaaatgtggtgggacaggggagacagggagagggagatggagagggagagggagagggaaggaagccaggctctgctgagatgctatgggcaggagtagctcccgatgttggagctcagcttggaaggcctctagggctgctctgtttactatgctgagctgctgtgaattctcctaacatctgcaaaatttcaccatatgacactcctatctccttgatcccactcatacagaaccatttatttcatagtctttttcactaagcacagagataccctttgatgtttgttaacactgccatgtttcaaaagaggaaactgaratacaggagagcaatgcacttgcctcaaggcctctcatccattggcaggttcagcccacacctttactgaacatctacaaagagtcaggccgtaaggactggtaggttgtgcgatgggtcttgaacccaggtctgtacaacttcaaagcctttccgctatagcaaggcagcatac

SEQ ID NO: 141510 - DNA, 354 bp, Homo sapiens
gctctgtttactatgctgagctgctgtgaattctcctaacatctgcaaaatttcaccatatgacactcctatctccttgatcccactcatacagaaccatttatttcatagtctttttcactaagcacagagataccctttgatgtttgttaacactgccatgtttcaaaagaggaaactgagatacaggagagcaatgcacttgcctcaaggcctctcatccattggcaggttcagcccacacctttactgaacatctacaaagagtcaggccgtaaggactggtaggttgtgcgatgggtcttgaacccaggtctgtacaacttcaaagsctttccgctatagcaaggcagc

SEQ ID NO: 141511 - DNA, 358 bp, Homo sapiens
aacattaaaaaattttaaagtaaacaatgccaaatgtaattgggagttgggggtagttaaatkatgtttttgttgctcagactgtttggagaattgggtttttaaagtgcaattggcccattccaccacagcctgtccctgaggattgtaagggattccagtaatatgggaaattccccactgttgcataaataaatcaaaagccttactgacatatccaggggtgttgtctgtctttatttgatatggaagccccataactgcaaagcaagaatacagatgtttttaacatgggccgtgcctcccctgtttggtaagtagcccagataaaacctgagaaggtatctacagagacctg

SEQ ID NO: 141512 - DNA, 646 bp, Homo sapiens
ggaacattaaaaaattttaaagtaaacaatgccaaatgtaattgggagttgggggtagttaaatgatgtttttgttgctcagactgtttggasaattgggtttttaaagtgcaattggcccattccaccacagcctgtccctgaggattgtaagggattccagtaatatgggaaattccccactgttgcataaataaatcaaaagccttactgacatatccaggggtgttgtctgtctttatttgatatggaagccccataactgcaaagcaagaatacagatgtttttaacatgggccgtgcctcccctgtttggtaagtagcccagataaaacctgagaaggtatctacagagacctgcacatatgacagtctgccaaaggagctaacatgggtcacatccatttgccataaatcattaggagttaggcctctgggattaatgccaggttcctgatttggaagtacaaaaacttggcactgagggcagcagtggataataagcttagcctgtttccaggtaagagcaaatttatcttttaatccagcagcattgacatgagtgagattatggaactcctgagcttcttgggttgcaaaagagaccaaacagtcaactttatgattaccagcagacaggggtcct

SEQ ID NO: 141513 - DNA, 492 bp, Homo sapiens
attcttctatcttcactttgttctttttcttactagtctgatctccagggtcatccttattgtgaaattttaatgcataatattaattggacatgttcacaaacatgagcaatagtaaatggatttttgctaactagcaacctattgctcttctaacttttattctgaatacaaaccaaagagaaacagttgtgaatacctactagcacacagcttagcttaagtcatatagtgcagtgtcaatgaggaaagcttatcatccacaaacaaacactaaacatagcacagccagcggggacaaacaatgtgcaaaattagttttattataggcaaaaaaaaagaatgcgagcgcattttgatcattcattcattgttgcattcattttatgtgccaagcacactgtacaaaatttgggracagagcggcaagcaaaaataaatgaggtctctactgatacgggtcttgtggaaaagaaagacttaaaccaaaga

SEQ ID NO: 141514 - DNA, 531 bp, Homo sapiens
ttccctgtggttctgagctttcattgcatttgttccaggggtgtctgcaatttgtcacagaggtccctgactttctaggcagagggagaaaaggaaagcgastggggtggtgactgtggaagggctctctaaacatctccagggccatgcaaactgtcaacattaagggaggtgaggtggtgaccatagtggttattccagaatgcctgtggtctgtctcctctcacctcactctctgacactcttactcttggagtaggtagctgtgtagtgtcctggcaataagaataacagtcatgaaaactgtcatttatcaaatgccatatgctggatggctattatttcatatcctcattgtaactctgcaagacacaggaaacctccattttacaggttaggctcagacagagtacagaatttgttcaagttcacagaactgtgggtggctgagctagcaatcaaggccaggcacgaccatctttccactaggctgcaccacttgtccacaaagacaagcacaccttctgctag

SEQ ID NO: 141515 - DNA, 249 bp, Homo sapiens
gaattccctgtggttctgagctttcattgcatttgttccaggggtgtctgcaatttgtcacagaggtccctgactttctaggcagagggagaaaaggaaagcgactggggtggtgactgtggaagkgctctctaaacatctccagggccatgcaaactgtcaacattaagggaggtgaggtggtgaccatagtggttattccagaatgcctgtggtctgtctcctctcacctcactctctgacactctt

SEQ ID NO: 141516 - DNA, 512 bp, Homo sapiens
ggggtgtctgcaatttgtcacagaggtccctgactttctaggcagagggagaaaaggaaagcgactggggtggtgactgtggaagggctctctaaacatctccagggccatgcaaactgtcaacattaagggaggtgaggtggtgaccatagtggttattccagaatgcctgtggtctgtctcctctcacctcacyctctgacactcttactcttggagtaggtagctgtgtagtgtcctggcaataagaataacagtcatgaaaactgtcatttatcaaatgccatatgctggatggctattatttcatatcctcattgtaactctgcaagacacaggaaacctccattttacaggttaggctcagacagagtacagaatttgttcaagttcacagaactgtgggtggctgagctagcaatcaaggccaggcacgaccatctttccactaggctgcaccacttgtccacaaagacaagcacaccttctgctagcctcgggcaacagaattc

SEQ ID NO: 141517 - DNA, 643 bp, Homo sapiens
gatctgtgggtgcacctgcctttccagatttcagggtagtggtttactctgcaaactcagctgtatagtgagtccaagaaaagtcattgattttcagtttgtccagcttcattttgttgtaagggcaatagcgacaacttctaagctctttacatgttagagaggaaacacaaagtcttgattccagacttttacagtccattccaagaatyctggattcatgtggaagaggaatggacacagtttcagtcctccctgcctcattatgtaagtcccagttcctgttcctttatggggttaacacccaagcccctaggtaatggaagcaggcaccattctatctccacagctggcacagcatcatctcatgcattttctactctggcttccagtttcctttttgtttttggcctttgggaattttctttactttctactattctcaaatgaaaatgtataaggatgtgaatttatgttctcttggcatttcttggtagatggacaattttcagattatttagtctgtaacattgctaaaactagcctcttaccaatttttctattcaaatatttggtgagctggtgggtgctgtgactcctgaaatcccactggcccaggcaaagccctaggcagggaattggg

SEQ ID NO: 141518 - DNA, 480 bp, Homo sapiens
agcttcaataatggcttcaataaaatctgagctgaagtgagcatgattattttatatgacattgaaaaaactcaatgtcaaatatggctgctgtttttaggcttaaaacagaaaagaagctcatgtgtggagatagatgtgtagccactcacagtctagarcaagaggaatgttgacactaaagttctggcagttttaaatcgtttctgatgatggagatttcagtggcattttctcaaaatataacagtaggctaaaatattcatttccacaccaactgaatgactactatgtgtaggcaaagcattatgaaggaagaaagatcaaaaagtacttctcttttctccataagcttatggtttggtgcaatgatttctggatttttaaaattgtacacccacatttaattatacacccatgagctagagtatgacctaatcctaaaaaataaattcaaaatgatgaaaattgagtgaattc

SEQ ID NO: 141519 - DNA, 609 bp, Homo sapiens
actcatcatgcagggctcagactatctctgagaaggtgctcatttccactgccacacaacactggtttgtacaggaaattacctgccatgtataaacccctatttttctgcattctcctccagtcacaagggctagaaacctgcaaactacatttctcagacttctctgctagagggtttcagtttagattatgcctacggcatgagagcaggaggcaggtagagggaytctcattctggctgcagcctgggcagcgacagtctaatgccagctcctgcagagggggtggtggcagcagcgtgattctccaggccgtggctgatgatggctggcttctgaagcagctaagcaggcagcaggaatgcagagtcccatcagctcaggggcaagtgacttcacacagggatcaaacaggtaaactgcaggcctgatctccaggcagcaatactaccctcactcccatttgtgttcctcctttccttataacaacttgggagcttcactccttatattcaatccctccttgcttgaaatacctagagagacttttattttcttgaatgaatctataaccaatacatcagtcctctgcaaagcacagaggccat

SEQ ID NO: 141520 - DNA, 609 bp, Homo sapiens
actcatcatgcagggctcagactatctctgagaaggtgctcatttccactgccacacaacactggtttgtacaggaaattacctgccatgtataaacccctatttttctgcattctcctccagtcacaagggctagaaacctgcaaactacatttctcagacttctctgctagagggtttcagtttagattatgcctacggcatgagagcaggaggcaggtagagggattctcattctggctgcagcctgggcagcgacagtctaatgccagctcctgcagagggggtggtggcagcagygtgattctccaggccgtggctgatgatggctggcttctgaagcagctaagcaggcagcaggaatgcagagtcccatcagctcaggggcaagtgacttcacacagggatcaaacaggtaaactgcaggcctgatctccaggcagcaatactaccctcactcccatttgtgttcctcctttccttataacaacttgggagcttcactccttatattcaatccctccttgcttgaaatacctagagagacttttattttcttgaatgaatctataaccaatacatcagtcctctgcaaagcacagaggccat

SEQ ID NO: 141521 - DNA, 609 bp, Homo sapiens
actcatcatgcagggctcagactatctctgagaaggtgctcatttccactgccacacaacactggtttgtacaggaaattacctgccatgtataaacccctatttttctgcattctcctccagtcacaagggctagaaacctgcaaactacatttctcagacttctctgctagagggtttcagtttagattatgcctacggcatgagagcaggaggcaggtagagggattctcattctggctgcagcctgggcagcgacagtctaatgccagctcctgcagagggggtggtggcagcagcgtgattctccaggccgtggctgatgatggctggcttctgaagcagctaagcaggcagcaggaatgcagagtcccatcagctcaggggcaagtgacttcacacagggatcaaacaggtaaactgcaggcctgatctccaggcagcaatactaycctcactcccatttgtgttcctcctttccttataacaacttgggagcttcactccttatattcaatccctccttgcttgaaatacctagagagacttttattttcttgaatgaatctataaccaatacatcagtcctctgcaaagcacagaggccat

SEQ ID NO: 141522 - DNA, 572 bp, Homo sapiens
ctaactctatagtatggtagggatggagacataaaggaacatgatttggggttctgatgtaagattcgtggactgcaaactaaaatttctgactttcaaatgctgaagaaccatccaaagaaccaaggaaggtcaatactgtttttgctcacggagcaaatttaagagagatgaaatccccacaagcatctatttcaaagattacatcaaatgtcattgatgggccataataatgtaacaaaacattactgaattatttcacctccattccatcatgtgatcctcacaaaccactgsagtaagattaatcccatcttatagacaagcaaagtaaggcccagaagcagctacatgatgtggctgagttcccaaaaagttgctgtactgaaacaatttattcttcatggaatgggataaatacttgtctccactgagtccatttacggagaatatgtcaatgatgtgtttgccttagtacttacagttcagacttgtgtcttaaaaaatctatcttaaaattaccagtgatattggctagtacattcaaaagcaatggtagtatacattgttaa

SEQ ID NO: 141523 - DNA, 615 bp, Homo sapiens
tttgactgcatcaccttccccacaatgtgagaccagagaccactggaacaggtccatcctgacactgagggacaactagcctaacttcaagatagttgatcaatgatgctttcagaaaaagatcttgaccaagaggaggagatrtgaaaatggataatatatgttgcagttatctcgtcataaccaattaaattacagtcaagaccacagggaaaaaacagttggggcacaagagcctactcagggattatatcgcaatccagttgctgaaatgacctcctataaccttaagactaaatttacctagtagcagcttaagtgaactgctgtgattctgagactagttttacctactgctatcactcatcaatcagagtttgccagttccccaaaactttgctagcaccaaggagctttccttccaaacaatatgtaacatttatctttctagtaaaacccccaactttccttgttattggacatatcaaagactgcctggtttgtgtgtatgcctccaattgcaagtttgttttcccaaataaaagctcttctttagagattcatctctatatttttatttgactttgacagtatgattccctttatgtaaaacat

SEQ ID NO: 141524 - DNA, 485 bp, Homo sapiens
aaaggaggtgcagatccggaggggctcataaattgctggaggaaggtcatcaaaagaggaagggagagttatgatgaaccaccatagaataaacatatagactttttgcactgtggaagtagatttgagaaggtaaagtcatttattaactcaacaaatatttactgagtgcctattatgtgtaaactctaccctggctgctgatgttctgatgaccaataggtacaacttctgtcttttgtctgctcatgacattgaagtaaagtcagagactactcaaacaaagaaacccaccaacaaacagatagaagtacaacacagtaagtgctgaagacaaggcagcagaagttagaaacagctaattgaccacatwgaaagagaaaatcatgtaccacatattctggttaatatattgtagagtggatatcaactatttttaaacgaatcagggggttgaaaaatactcattggaatatggtttctat

SEQ ID NO: 141525 - DNA, 592 bp, Homo sapiens
taccacccaccttaagctgctgtgagtgcgttctggctttccctggtggactgagaaaaatgcagtacccttagtatcgacatgacgtttatggacacagggagaaaaagaagaaatcagaaggcccatgtgacacctggctctgccagctttatggaaacagaccgcaagctgatctctcagggagtggtctcaagttcaggccccctgctttctcctggcttgcatcagatcatatcactattctcatattttttctaggccactgggtgaattttttatttttaccaaatgtgggctctaatgtaagctgctccagtccttgcgttttcagggtgctgcctgccaaaatagttatttattccttttggggagagctattcctgtgcatggtcagggtggtgaactcctgttgactctgaccaaaattctctttggcctccatttggaagtcgtctatgggcctttaattgtaccctctggkaagggagaaagagcacttgaaacaggcatgaattctgtacatatttctaaggctgggctgttttaaaaatgttgtctgtctgtctgtcttcttttttttttgcctttg

SEQ ID NO: 141526 - DNA, 592 bp, Homo sapiens
taccacccaccttaagctgctgtgagtgcgttctggctttccctggtggactgagaaaaatgcagtacccttagtatcgacatgacgtttatggacacagggagaaaaagaagaaatcagaaggcccatgtgacacctggctctgccagctttatggaaacagaccgcaagctgatctctcagggagtggtctcaagttcaggccccctgctttctcctggcttgcatcagatcatatcactattctcatattttttctaggccactgggtgaattttttatttttaccaaatgtgggctctaatgtaagctgctccagtccttgcgttttcagggtgctgcctgccaaaatagttatttattccttttggggagagctattcctgtgcatggtcagggtggtgaactcctgttgactctgaccaaaattctctttggcctccatttggaagtcgtctatgggcctttaattgtaccctctgggaagggagaargagcacttgaaacaggcatgaattctgtacatatttctaaggctgggctgttttaaaaatgttgtctgtctgtctgtcttcttttttttttgcctttg

SEQ ID NO: 141527 - DNA, 601 bp, Homo sapiens
aagcttagagaagttaaatgacttggccaaggtcacacagttaggaaatgaactgaaagtgagttcatcccctgaatccacacgcaagattagtataaatgagaaaccaagtacacatttatattcctaacagtcctattcattttttaatttttttttttttttttttttttttttatgagacggagtctggctctgtcacccaggctggagtggagtggtgcaatctcggctcactgccagctccgcctcccgggttcacgctattctcctgcctcagcctcccaagtagctgggactacaggcgcctgccaccacgcccggctaattttttgtatttttagtagagatggggtttcaccgtgttcgccaggatggtctcaatctcctgacctyttgatctgcccgcctcggcctcccaaagtgctgggattacaggcgtgagccactgcgcccggcccattttttaatgttttaaggcagggtctgcaaattttgtaaatggtcagataggaaatactttaggctttgtgggctgtctggtctctgtcacagtcattcaactctgccccccatgggggaaggcagtcacagacaaaat

SEQ ID NO: 141528 - DNA, 305 bp, Homo sapiens
ccattcgatgattgcattcaattcattcgatgacgattccattcaattctgttcaatgattccatcagattccatttgatgatgattccattcgattccatttgatgatgattccatgcgattccattagatgatgacccctttcatttccattcaatgaggattccattcggttccatttgatgatgwttcctttgaattccatttgatgacaattccattcaataccaattgatgatggttatttttgattccatttgatgatgattacattcgattccatttgatcataattccattcgatt

SEQ ID NO: 141529 - DNA, 578 bp, Homo sapiens
ttttcaaacaacaagcaaagtaagcatctacacaagcattcctgaacgtttaaccattaaaaaatttataagcctcttaaaaccaccaaattaaataaactatttttaccacgccaactcaaggwaaaaaaaaaaacacgcagagttgcgggctaattcagaattcactccccccgcccccaacttcctgtttatccatacaccagaaggaaaaaaaaaaaaagacagatttttctgctttttcaatccaaaatcagttctcaatttgttagaagaagaaagtgttttctccttccgtaggaattattactaggaaaaggtagattgtcatttcagctgtcttgaggttcctcgatatggaggtagattctctaagctgagatttttcttaaagcactaacagccctcagtactcttccacgtcagtatatcattccaggcactagttcttaagagtttgcctaaagatagtatcagagaggacatacgttttgcaatgaaggttaactgaggtagaaggcagaaattactaagaaatgagctagactttggtcaccaaagaccttgtcctgtttata

SEQ ID NO: 141530 - DNA, 563 bp, Homo sapiens
tcttttgtcaaaatgtgattttcaaaaagttaaaaagcaaaaaactctttcaagtgtttgtttagtaaacacatgccaaaaatttatttaactcattgatgaagggaatagtaggatgacaaagctggtttaaaggaggatatgagaaagatattcaggtagatagaaaacgagagagaaaggagggaaggaaaagagaataccggaataagattgcaaagctagatacaaaatggttcatttcctacagggcaataaaacaataatatttggggttattgttcatctggtcagaaatgttttgcacctacactagacaaaaattatgtgtaatttaccaattttctacagtctgtatagaatctgggtccaatcaatagtaaawagtaagtcaaacaaagttatatttcctgtgagtgttagatgacacttcgatgggcttgtcagtcagtgctgtagtacattactacccggtaacgctttctgcaatgatgaaaatattttgtatatgtggtgtttaatatggtagctatgggccagatgtggctcttcagcatttgaaa

SEQ ID NO: 141531 - DNA, 563 bp, Homo sapiens
tcttttgtcaaaatgtgattttcaaaaagttaaaaagcaaaaaactctttcaagtgtttgtttagtaaacacatgccaaaaatttatttaactcattgatgaagggaatagtaggatgacaaagctggtttaaaggaggatatgagaaagatattcaggtagatagaaaacgagagagaaaggagggaaggaaaagagaataccggaataagattgcaaagctagatacaaaatggttcatttcctacagggcaataaaacaataatatttggggttattgttcatctggtcagaaatgttttgcacctacactagacaaaaattatgtgtaatttaccaattttctacagtctgtatagaatctgggtccaatcaatagtaaaaagtaagtcaaacaaagttatatttcctgtgagtgttagatgacacttcgatgggcttgtcagtcagtgctgtagtacattactacccggtarcgctttctgcaatgatgaaaatattttgtatatgtggtgtttaatatggtagctatgggccagatgtggctcttcagcatttgaaa

SEQ ID NO: 141532 - DNA, 389 bp, Homo sapiens
gaattcttgaggttagggagaaggacatttgctttaaattcgtgcttttcagactatcaayggtgaagcaccatttcttagtctttcccccaatccctcatggattgatcaaattcaatacaaatgaatctccaggaaataggagttaaggaaaaacaacgacgtccaaagcacaagctccaactctttaaaaaaaattagatttaatggacataaaattaccctgtcaaattgctccaaaagttttgaaacacttgctctcaatgtctgaacttctctccttgcggacgggcacaggtctccggattgcattttgagaaacagtcctctaaaaggacttcaaactcagaggttgtttgcagacaaaacaaaaacaaagctaaacaaaa

SEQ ID NO: 141533 - DNA, 399 bp, Homo sapiens
catttgctttaaattcgtgcttttcagactatcaatggtgaagcaccatttcttagtctttcccccaatccctcatggattgatcaaattcaatacaaatgaatctccaggaaataggagttaaggaaaaacaacgacgtccaaagcacaagctccaactctttaaaaaaaattagatttaatggacataaaattaccctgtcaaaytgctccaaaagttttgaaacacttgctctcaatgtctgaacttctctccttgcggacgggcacaggtctccggattgcattttgagaaacagtcctctaaaaggacttcaaactcagaggttgtttgcagacaaaacaaaaacaaagctaaacaaaatctccaccgactgggatggtacaaaagcagaattc

SEQ ID NO: 141534 - DNA, 550 bp, Homo sapiens
ccgtggttctaatttggtttttgtttgtttgttggctgagttttttatttgtttgtctttagacagcatcttgctctgtcactccaggctaatgtttttgttttgttttgttttttgacacaaaatctcactcttatcccccaggctggagtgcaatggcgtgatctcagctcactgcaacctccacctcccaggttcaagcgattctcctgcctccgcctccygagtagctgggattactggtgcccaccaccacacctggctaatttttgtatttttagtagagacagggtttcaccatgttggccaggctggtctcgaactcctgacctcaggtgattctcccgcctcggcctcccaaagttctgggattatggcataagccaccatgccagaccctcgggctaatgttttttatgtagagacgaggtctcactacgttgcccaggccagtccctaactcctggcttcaagtgatcctcccacttcccatgtttctaatcttgatggtggtcacgtgaactaagtttgagaagctaggaaatgaaca

SEQ ID NO: 141535 - DNA, 416 bp, Homo sapiens
agatctcttggattccactagtcacagccaacactactctatggaaacattgtcctcttttcttctgtgcctgaactcccaaattaatttctagtttgaaaatattctgacsgggtgcagtggctcacacctgtaatccacacactttgagagactgagatggggggatcacttgaggccaagagttcaagaccagcctgggcaatgtaatgagacctctctataaaaaacacaaaaattagccaggtgtggtggtgcacacctgtagtctcaactactcagggggctgagcgagaaccctgtctcaaaaaaataaaaaataaaaaacttgttttctgtcctaccagattcccatgtgggcggtggctggggaaaggcattgatgatgggagcctggagagaattcttattggaga

SEQ ID NO: 141536 - DNA, 388 bp, Homo sapiens
agccaacactactctatggaaacattgtcctcttttcttctgtgcctgaactcccaaattaatttctagtttgaaaatattctgaccgggtgcagtggctcacacctgtaatccacacactttgagagactgagatggggggatcacttgaggccaagagttcaagaccagcctgggcaatgtaatgagacctctctataaaaaacacaaaaattagccaggtgtggtggtgcacacctgtagtctcaactactcagggggctgagcgrgaaccctgtctcaaaaaaataaaaaataaaaaacttgttttctgtcctaccagattcccatgtgggcggtggctggggaaaggcattgatgatgggagcctggagagaattcttattgg

SEQ ID NO: 141537 - DNA, 528 bp, Homo sapiens
gacccctatctcctagtaatccctttcccttgagtgagctggatttacagatgcaattttgaataatagaaccttgtagaagggatgagttgtcacttctgagattaggttatataaagactgtcacttctttctaagggctctttctcacttggatggtcyccagaaagtcagctgccatgtcacgaagtgccctgtgagaaggacctgtaaggagggacggagggaggcctctaaatgacagccttcgaggaactgaatcctgctggtgaccatgtgagggagcttggactccggtccccctgtgttgagccttcagatgagttggcagccccagctggtggcatgactgtaacgtcctgaaacaccttcagccagaaagcattcagctaaaccacacctgtatttctgacccaaagaaattgtgagataataaacatttcttctcttgaactgctataccttaagctaattcgttacacagcaatagataacaaatactacctctggacccctgcctgccaccat

SEQ ID NO: 141538 - DNA, 545 bp, Homo sapiens
cagtgacccctatctcctagtaatccctttcccttgagtgagctggatttacagatgcaattttgaataatagaaccttgtagaagggatgagttgtcacttctgagattaggttatataaagactgtcacttctttctaagggctctttctcacttggatggtctccagaaagtcagctgccatgtcacgaagtgccctgtgagaaggacctgtaaggagggayggagggaggcctctaaatgacagccttcgaggaactgaatcctgctggtgaccatgtgagggagcttggactccggtccccctgtgttgagccttcagatgagttggcagccccagctggtggcatgactgtaacgtcctgaaacaccttcagccagaaagcattcagctaaaccacacctgtatttctgacccaaagaaattgtgagataataaacatttcttctcttgaactgctataccttaagctaattcgttacacagcaatagataacaaatactacctctggacccctgcctgccaccataccaaattccatg

SEQ ID NO: 141539 - DNA, 483 bp, Homo sapiens
ttactactagacctaagaaatgagatagatggcaacacaataatagtaggggacttcaatactccactgacagcactagatagattatcaagacagaaagtcaacaaagaaacaatggactataccctagataaaatgaacctaacagatatttacagaacattccacccaagaactgcagaatatacattcttttcatcagcakatggaacatgctccaagatagaccatatgataggccacaaaacgtctcaataaatttgaaaaaatagaaattatattcaatactccctcagaccacagtggaataaaattggaaattaactccaaaaggaaccctcaaaactatacaaatacatagaaattaaatagtctgctcctgaatgatctttgggtcacaataaaatcaaaatggaaaataaaaaattatttgaactgaacaataatagtggcacaacctatcaaaacctctgggatacagca

SEQ ID NO: 141540 - DNA, 483 bp, Homo sapiens
ttactactagacctaagaaatgagatagatggcaacacaataatagtaggggacttcaatactccactgacagcactagatagattatcaagacagaaagtcaacaaagaaacaatggactataccctagataaaatgaacctaacagatatttacagaacattccacccaagaactgcagaatatacattcttttcatcagcagatggaacatgctccaagatagaccatatgataggccacaaaacgtctcaataaatttgaaaaaatagaaattatattcaatactccctcagaccacagtggaataaaattggaaattaactccaaaaggaaccctcaaaactatacaaatacatagaaattaaatagtctgctcctgaatgatctttgggtcacaataaaatcaaaatggaaawtaaaaaattatttgaactgaacaataatagtggcacaacctatcaaaacctctgggatacagca

SEQ ID NO: 141541 - DNA, 580 bp, Homo sapiens
aagcttgtgaatattttcccctatgctttcttctagacatcttacattttaaatttgtatatttaagtctatgatccacttgttaattattttatatagtgtgatacaaacactaatgtctgctttttttcccatagagaatccatgttatggagcaatatttgttgaaaagatttatttctgcccttgaattgcctcagctcatttgtagagtatcaaacaatcatatatgtgttgttttatttctgatttccttatttttccacctcccattttcagaagaagaattttcarttcttaccattgatttctatgtctgtcttttcaccaattaatcttaaaatcagatagtgttaagtcctccaaatttttcttagaaaaatggcttttttaaaaggtcctttacatttccaaataaattcttaaatcagcttgccaatttatattttttaaaagatcattagaatgttgagaccatgataaatctataagtcactttgaggagaatagccatcttaataatactgggtctgccagttcctgaacatggtatatctctaaatttatttaggtcttcttt

SEQ ID NO: 141542 - DNA, 635 bp, Homo sapiens
tatctttttgggttacacaattcaaccyatgacagccaccaaacgttgctttgtattttttcacccatcaatatgtcttgggtactagtccacatttatgcatagaaaactgccctttcagtgactacataagggtccagtgtatggacttcctgcaattttttaaccagccctctctctgttgatggatattgaggctttatcaactttctgcgatttcatatgcattttgagttgttctctttttttcatttttagagaataagcaaacaacatggggaaagaaatcgctccccatatattcatatgactagattccttagagtcaggaatgatctgtgagcaccttttctagatcgtccagaaatatcttttgtttcccgggatggatgagtctagcttcacaaacattgactgagtgatgactgtaacagtttaaacctttgctgtacatcaccaccacttgaggagctacttaaaaatacagatttgagagatggtttgggttggggccaaaactgtctctcaaggaggtgtggtcctgggagatatattttaaataaacttcacagatagctaggattgagtgccaccagaatgtgtgccttttactgtgctaagtgtctggaatatgg

SEQ ID NO: 141543 - DNA, 584 bp, Homo sapiens
aagcttctcaagtggttctggttctgtaggcttgagaactattacygttctcattagaacacaggccaggcgcggtggcttatacctgcaatcccagcactttgggaggcccgggtgggcgaattacttgaagtcagaagtttgagaccagcctgggcaacatggtgaaaccccatctctattaaaaatacaaaaattagctgggtatggtggcaggagcctgtaatcccagctactcgggaggctgaggcaggagacttgattgaaccagggaggcggaggttgcagtgagctgagatcgcaccactgcactccagcctgggagacagagtgagactccgtctcaaaaataaaaaaagaactcagagtttgtgtgtttgctcccctgaactgtatctcaacacaaattacttgcttgttccctcttttcttctgttcctgcctttttgtctctttccctcacacatcattctttctttggctatcattaaattaagtgctttggttaggcagtctctcaaacagtcctgagcctcagtttcctgatgtgcataattgatgggcctacactctataattctgct

SEQ ID NO: 141544 - DNA, 297 bp, Homo sapiens
aagaacaaagttagaagacttaggacttactgtgaagctaagcaatcaatacaagatagtaccagcataggatacacaaacaaatcaatgcaacakaattcagtccagatgatagacaactgatttttcaacaatggtatcaaaaacaactcaataagaaacagatagctgtttcaaaaaatggtgccaaaacaagtggatatgtgtacaaggatgggggcaagaagggtagggagaaaaacaactacactctccatctcacattatactccaaaattaatttgagattgtccacag

SEQ ID NO: 141545 - DNA, 623 bp, Homo sapiens
aacactctgtattggcagacttaattttgggtcagtctaatggatatggaataagagtatattgtgcttttaatttttatttctgtcatttagttttcctctctgttcatatctttcgctttttttctgttactgacatrgtatttctgtctgtactctggaccatatcttttgttgattacatgttaggatcaccatcttcccttggtctatgcttcctttatttattttcatgttttctttagaatctcaaaattttaaactacaaaactactgaactcaacttttggtgcctcattcttccctagctaaaggtcataaaattgttttagaattttttctaaaaacaaaacaaatttgccttttaaatttaggtatttaatccatctggagatgtgttttgtgtggtttttataaggatctagtattttttttcatgttaataatgatttattctggcccatgctttcaatagcacctttgtcatatatgttaagtttctgatacgggtagctctatttcctctgttttgtgccattcgtctaactgtctatcgctatattcaacaccacaatgtcttaattactacagttttttgacagggctttctttcctataaagca

SEQ ID NO: 141546 - DNA, 623 bp, Homo sapiens
aacactctgtattggcagacttaattttgggtcagtctaatggatatggaataagagtatattgtgcttttaatttttatttctgtcatttagttttcctctctgttcatatctttcgctttttttctgttactgacatggtatttctgtctgtactctggaccatatcttttgttgattacatgttaggatcaccatcttcccttggtctatgcttcctttatttattttcatgttttctttagaatctcaaaattttaaactacaaaactactgaactcaacttttggtgcctcattcttccctagctaaaggtcataaaattgttttagaattttttctaaaaacaaaacaaatttgccttttaaatttaggtatttaatccatctggagatgtgttttgtgtggtttttataaggatctagtattttttttcatgttaataatgatttattctggcccatgctttcaatagcacctttgtcatatatgttaagtttctgatacgggtagctctatttcctctgttttgtgccattcgtctaaytgtctatcgctatattcaacaccacaatgtcttaattactacagttttttgacagggctttctttcctataaagca

SEQ ID NO: 141547 - DNA, 536 bp, Homo sapiens
gttgctttttatattctgtccatagtttatagttattatttctgggaggattgatgtctgctaggacttaactcaccatactgtaagcaraattccacgctcattcttaaagaaaaagtagttctttttgcagaaagtatgggcaagggcctctaaggcaaaaagatcagcatgacaaaggcatgaaaacagtgtgataagctcatgcttctcttatgatatctttccttcaaataaatatacaagagaaaatgcttgcaaacagatacagctacagtttctggcatctcaacagcctgccttttccccttgagagaagaactgagataatgagggctttaaattcatctttctgaatatagaccaaatcttactgcctatgttgtcttccacacagtccctcagctagaagccctgaagggcaatgacacactttggacccattgttggagatgaggtcaggaaacttatttctggcatttggatattgtcaaaaggaatatatcttttcctgtctctttaaaatgccttgccga

SEQ ID NO: 141548 - DNA, 456 bp, Homo sapiens
caaacatgtgaaccttgatgttatagcacaaattataggtcataatgcatgtagcacacatgcctgttctgaagggttgcccttaattatctccctggagcatgtaccccctttccccatggcatttaagccctaggtctggggaataacagtgcagagatctacctgccttgcagccacccaggactacacttctgtctgtaagtttctccaataaaacacccattactgacaaactggatttgtctgtctcattctttggtttcttggttcctgtagsatttggggatcactttgcatatacggccctttcacagaacacggattctctttaattgagtcttctctttttttcttattctagctaagagtttgtcaattttgttgctcttaaaaaaaaacacaacaacaaacaaacaaacgaacaaacaaaaaaatgggccaggcacagtggct

SEQ ID NO: 141549 - DNA, 568 bp, Homo sapiens
tctctttttttcttattctagctaagagtttgtcaattttgttgctcttaaaaaaaaacacaacaacaaacaaacaaacgaacaaacaaaaaaatgggccaggcacagtggctcatgcccattatcccagtactttgggaggccaaagtgggaggatcgcttgaagccagaagtttgagaacagcctggacagcaaaatgagactccatctctacaaaaactttttaaaattagctaggcgtggtggtgtgggcctgcagttccagctacttggaaggctgaggtgggaggatcacttgagcccaggagttcgaggctgctatgagctatgatagtgccactacattccacactgggcaacagagtgagactccatctttaaaaaattgtttcaaaccaactcttagtctcactgatttattatattgtttttctatyctctatttcatttatttctgctctgatcttcattatttcctcccttctgctaactttgggtttagttgtcctttttttagttctttgaggcataaagttaggctgttgctttgagatccttctttttaat

SEQ ID NO: 141550 - DNA, 587 bp, Homo sapiens
actaattagtgaattgtttcacaatacatacattaataatttgtgtataattttttaagttttataagtgagtgtttatataatctatgcataattaaagcttcttcctttctattccttacaactctcatttcttttccttgccttgtgtactggtttagacctgcagcataaagactgctcactggtagagatggtagtcttccttgttttatttcaaattaaaaaggcatgcttttaacattttaccttcgagtaggacattttgttgttgtttttctaaacttcatcaggcaaaggaagttaccctttatttccactataaaattgttgtttcgtttttaacccatttatgcctgaggttgcaatttttttgaatttttgcaatcagaccttagtgatgaccttgagmagtaggatataaataactcccacgtgcttagcgttccaataatggaacactaggcataagtataaactttggcttagctttgtcaaatccttctcctgtgtactaatatgattatcagacaaatttttccccttttaatctggtaatcttgtaatttagataaataggtttttct

SEQ ID NO: 141551 - DNA, 579 bp, Homo sapiens
tgggaatcatcccagcagagcaaatgagcagctgcatagggtggtgctgcctctccaggcattcccttctcaacaaccagtctcagtaactggttagttcattctttttctcagtagcctgttcactggagrttctaatgccaggcagacctggtttggaaccccagctttgctaccatgggcaaggtgctcagcccctaagcccccatttctgtacctgcaaatggagttaacaatacctcaatggttgctatgaggattaggtgagatgaggtctgtgaagtcctctgaataatggttggtacagaatgagggcttaataaataagagatggatggatggctggatggacggatggatggatggaaggatgatgaatggatggatggatgatgaatggatggattgatggatggatggaaaatggatgatgaatggatgactggatgaatggatggatggatggatgatggcttgatagatgattaatggatggatggatggatattgatggatgtatgatgaatggatggatggatggataatgaatggattgatggatggatgggtggatggatg

SEQ ID NO: 141552 - DNA, 532 bp, Homo sapiens
cctgcagggctctggggaaatccttctgaaacctgcagagaaagtttcttcctggcctcttccagctcctggctaattgctaacaacctttgtcattcagtggcttgcagctgccacccttcaatcctcacccccaattctcacgtggagttctcccctcccrggcctgtggcttcccatggcattttccccttcttataaggacaccagcccttttggattacggccatcctaatgacttcattttaacttgatcatgcgtaaagaccctcttgtcaaataagatgatattcacaggtgccagggataaggacctctgcaaatctttttggccagggttggggagggggtcacaattcaacctatgacgtgtgtgtctaatatcagagttgtttttgacccaaattagcaggaatctgtaggccaaaagatacagccttgatgctggccaggaagaaaagttaaagacctgtgagagctgtttttgacatattctaagcacaagcattcgcctttaaggcctcgtcaaaac

SEQ ID NO: 141553 - DNA, 599 bp, Homo sapiens
ccttcaatcctcacccccaattctcacgtggagttctcccctcccaggcctgtggcttcccatggcattttccccttcttataaggacaccagcccttttggattacggccatcctaatgacttcattttaacttgatcatgcgtaaagaccctcttgtcaaataagatgatattcacaggtgccagggatraggacctctgcaaatctttttggccagggttggggagggggtcacaattcaacctatgacgtgtgtgtctaatatcagagttgtttttgacccaaattagcaggaatctgtaggccaaaagatacagccttgatgctggccaggaagaaaagttaaagacctgtgagagctgtttttgacatattctaagcacaagcattcgcctttaaggcctcgtcaaaacagtacctggtggggtttgttgcctgactccaaagagctgccaccttcctgctgattcttatgaatcaatgatctttactcaaggactgtaaaacccctgagactgcaccttcctaggatgcccaatggtcccaaactgagggaagggtttcatggaatgtggtacttccggtgttcaaactggg

SEQ ID NO: 141554 - DNA, 569 bp, Homo sapiens
acatcacattgtaatagattaaatgaagaatcagatgagaatcaagctatcctctattaagccagatgttgaagagataagcaaacataaaataatgccattttctgaatatatttttttaattttgaaacattttcataaggaaatgtcaattatgttcccatgtcatgggtgtatttttgttactttcatatgaattaaagcgataactttaaattttatgttttaacttcttatttggtaaatatcactagatggaatctacatgaatgaaatctatgtgtagttctcaatcatctttttaagagggtaaagaggyctaagaccaagaagctttagaaccactgctgtaaatgtttgagagagagatggagagcaaaagagggtaaagagaagttcccgtgctaagcataggaagtgacaggcctgttgtgtgctctgttcctcagctcacaccaggaacactctggagttccctgtccaacacagagccccacatcttagcagggatactgacaaactgaacattattccaaaaagggtaactggaggataaaaattatgtcccc

SEQ ID NO: 141555 - DNA, 389 bp, Homo sapiens
aacataaaaatgtgttttttttgtaattggaagtaatgagagatgttttataaaaataaaagaatcaacccatcaggaagaattgtaaatctatatatttacaagtataaatgaatgcaactaataatagcacccaamtacatgaagcaaaagctgacaagaatgaagagagaaatacacaactcaactataatagttgtagactttaatatcccgttttaaaaattgactataacaactaggctgaagatcaacaaagaaacagacttgaaatacactattaactagctagacctaatagctatttataggacacccaacaaattaggagtatatattcttcttgagtgcacatgtaacattctccatgatagattatatgccaggac

SEQ ID NO: 141556 - DNA, 584 bp, Homo sapiens
tttcttgttgaattccaagatttcttttagaaatcagccatcgcataaattactcatgaatgacagtctcccaatctattccactttctagtatacctggcttctattacagtgagtttccttacaagatcctcaattaggcatcatttttcacctgagaaaaaataaatcttaagttgtgacagtcaatattcaataaatagctgctaaatgaattagtccttcagtccacctcccactttttacggaaaaactgtatcttcagtgggaacttatcaattagaatttgtcttcaaaagaagagtctcttgggttactatattggtccacaaacattaatatttaaatattatytcaaaaaatagagaattttgattttcaaaaggatctcctactctcattcttataccttcaaacttttcaatgtggttggagatttttttgtactttttcttacagttgaaatcccctgagattcaaaattgattatatgatcaaaagtatttcttattagtttttcaacagccatatctcacagcaaaagccaaagtaagtcaccaaatcctgtgagacctcctgaggca

SEQ ID NO: 141557 - DNA, 584 bp, Homo sapiens
tttcttgttgaattccaagatttcttttagaaatcagccatcgcataaattactcatgaatgacagtctcccaatctattccactttctagtatacctggcttctattacagtgagtttccttacaagatcctcaattaggcatcatttttcacctgagaaaaaataaatcttaagttgtgacagtcaatattcaataaatagctgctaaatgaattagtccttcagtccacctcccactttttacggaaaaactgtatcttcagtgggaacttatcaattagaatttgtcttcaaaagaagagtctcttgggttactatattggtccacaaacattaatatttaaatattatctcaaaaaatagagaattttgattttcaaaaggatctcctactctcattcttataccttcaaacttttcaatgtggttggagatttttttgtactttttcttacagttgaaatcccctgagattcaaaattgattatatgatcaaaagyatttcttattagtttttcaacagccatatctcacagcaaaagccaaagtaagtcaccaaatcctgtgagacctcctgaggca

SEQ ID NO: 141558 - DNA, 617 bp, Homo sapiens
ttgttcatttcttcttctcctactattttcctttgtttgatgattttttttatagtgataaactttgattgttttctctatcttttctgaatctgctacaggatttttttgtgtggttaccatgtggcatgtataaaacttattgttataacaggattttttgaggtgataacaacttcagctgcatatgaaagctataattttacttcctcctcccacacactttatgttattaatgtcagaatttactttttatattttgtattaattaactattttttgtggttatagccattcttaatacttttgtctcttaatgtttactccaaggttaaaagtgatttttgcactaccattatgacattacattattctgtatttgtccatatatttacatttaccagtgagatttatactttcatrtgcttttgtgttgtttagtgttctctcatttcaacttgaaggactctatttagcacttcttgtaaggcagattctaatggtgataaactgcttcaagtgtttgtttgtctgggaaagtctttctcgccttcatttttaaataatagttttgccagggttggcagagttttttttttctttcagcattttgaata

SEQ ID NO: 141559 - DNA, 405 bp, Homo sapiens
gaattccccttcttttctttttccaaatgagatcttatgtagaattttatcatataaagcagataaaggataactgctctggatgaaatgggggtctcctakgcagtgcctgctcatgttccctaatgcccaacccctacatctgtgccttgttgtgttttgagatggcttaaaataaaggagtcatataatctattgttaaaactgagacagttttgagcatataaggagaccctgttaataattatgctgcaacaacgggtgtaaactgggactatcataaataaattagaaagcatggaaccctagttttaaggaatatagtatgaaaactgttggctcagtccaaactctgcatgtaagggatgaggactctaggggaaagaacttgcccaaagtcacata

SEQ ID NO: 141560 - DNA, 649 bp, Homo sapiens
catctgtctggggtggagcccccaggagacaagcaaaagatccttggccacaaccactactaaggtccgttcctctgctcccttcaagatggggaagaaacataaacactgagataccccagagcagccgttggcagccaaggagtgccaagccacaatctacagccagaactcaaggggagaggaacccacactttcagagcattgagagggaacacagctgcaactgttaggaaacagaggggagccatacaactgagcaagagtctactgtctgaccagtgagcctaagtgccacttactggatcataccccaaagcttctcacttataagtgtgagctgaatggtgagaacttgtgaacacaaagaaggaaacaacagacaccgggrtctacctgagagagaagggtgggaggagggagatgagcagaaaaggtaactactgggtactgagcttaattaaaaataacctgtacaacaaacccccgaaacatgagtttgcctgtgtgacaaaccttcacgtgtaaccctgaaactaaaataaaagttttttttaaaccaacaaaaaaaaaaatacaaaataatatgattaaattaaaagacaatattcccaacataaagagataataaatgttggagatgatggat

SEQ ID NO: 141561 - DNA, 649 bp, Homo sapiens
catctgtctggggtggagcccccaggagacaagcaaaagatccttggccacaaccactactaaggtccgttcctctgctcccttcaagatggggaagaaacataaacactgagataccccagagcagccgttggcagccaaggagtgccaagccacaatctacagccagaactcaaggggagaggaacccacactttcagagcattgagagggaacacagctgcaactgttaggaaacagaggggagccatacaactgagcaagagtctactgtctgaccagtgagcctaagtgccacttactggatcataccccaaagcttctcacttataagtgtgagctgaatggtgagaacttgtgaacacaaagaaggaaacaacagacaccggggtctacytgagagagaagggtgggaggagggagatgagcagaaaaggtaactactgggtactgagcttaattaaaaataacctgtacaacaaacccccgaaacatgagtttgcctgtgtgacaaaccttcacgtgtaaccctgaaactaaaataaaagttttttttaaaccaacaaaaaaaaaaatacaaaataatatgattaaattaaaagacaatattcccaacataaagagataataaatgttggagatgatggat

SEQ ID NO: 141562 - DNA, 649 bp, Homo sapiens
catctgtctggggtggagcccccaggagacaagcaaaagatccttggccacaaccactactaaggtccgttcctctgctcccttcaagatggggaagaaacataaacactgagataccccagagcagccgttggcagccaaggagtgccaagccacaatctacagccagaactcaaggggagaggaacccacactttcagagcattgagagggaacacagctgcaactgttaggaaacagaggggagccatacaactgagcaagagtctactgtctgaccagtgagcctaagtgccacttactggatcataccccaaagcttctcacttataagtgtgagctgaatggtgagaacttgtgaacacaaagaaggaaacaacagacaccggggtctacctgagagagaagggtgggaggagggagakgagcagaaaaggtaactactgggtactgagcttaattaaaaataacctgtacaacaaacccccgaaacatgagtttgcctgtgtgacaaaccttcacgtgtaaccctgaaactaaaataaaagttttttttaaaccaacaaaaaaaaaaatacaaaataatatgattaaattaaaagacaatattcccaacataaagagataataaatgttggagatgatggat

SEQ ID NO: 141563 - DNA, 649 bp, Homo sapiens
catctgtctggggtggagcccccaggagacaagcaaaagatccttggccacaaccactactaaggtccgttcctctgctcccttcaagatggggaagaaacataaacactgagataccccagagcagccgttggcagccaaggagtgccaagccacaatctacagccagaactcaaggggagaggaacccacactttcagagcattgagagggaacacagctgcaactgttaggaaacagaggggagccatacaactgagcaagagtctactgtctgaccagtgagcctaagtgccacttactggatcataccccaaagcttctcacttataagtgtgagctgaatggtgagaacttgtgaacacaaagaaggaaacaacagacaccggggtctacctgagagagaagggtgggaggagggagatgagcagaaaaggtaactactgggtactgagcttaattaaaaataacctgtacaacaaacccccgaaacatgagtttgcctgtgtgacaaaccttcacgtgtaaccctgaaactaaaataaaagttttttttaaaccaacaaaaaaaaaaatacaaaataatrtgattaaattaaaagacaatattcccaacataaagagataataaatgttggagatgatggat

SEQ ID NO: 141564 - DNA, 660 bp, Homo sapiens
agatcttacatccttcacaaaaagtaacttaaagtggaccatagacctaaatgtaaaatgcaaaactataaaactcctagatgataacataggagaaaacctggagaccttgggtttagcaatgagtttttaaataaaacaccgagggcattctgtataaaagaaataagccagacttccttaaaattaaaaacgagtagggcaggtgcggtggctcatgcctgtaatctcagcactttgggaggcrgaggcgggtggatcacctgaggtcaggagttcaagaccagcctggccaacatggcgaaaccctgtctctactaaaaatacaagaattagctgggtgtggtggtgggcacctgtaatcccagctactcaggaggctgaggtgggagaattgcttgaacccaggaggtagaggttgcagtaagtcgagactgtgccactgcacttcagcctgggcaacagagtgagactctgtcaaaaaaaaaaaaagttaaaaacctatgctttgtaaaagacagtgtcaagaagacaaggcacagactgagaaaatattttcaaaggcatatctgataaaatactgttttctaaaatatacaaagaactcttaatactcaacattgagaaaacaaaccagtttaaaaatgagccaaacatctt

SEQ ID NO: 141565 - DNA, 536 bp, Homo sapiens
tatgaccagtgattgtttttgattcactcatttgttcaacaaatgtatttaagcactatcttataaatggaacaaaacagttctaggtaagaagggaagatttcctgaagtaaattatgtggttcctaccctccagaggcttgtagtctgtgtaaggaaaaagaaatgtgggaagagaagccggggaacaagataagagaccagtagtgggagacacccataagaagaaagtgtcatgagctaggagtacaccctcagtgctcagagagagaggaactttaaagattctcttgtcggctgtgccagatgagaaacgcacatgagagataggagcaaagaaggcttcaggagaaggtgagataaactagagcagggygtggagatgagtttggaggtgggaagtatttgcaaatttctcgttatggtaactcttcagtgtttggagggaaatattatgtttgttttctacatttaaatgtaggaaattgatactatcaagggctaaaaattcttaaaaaaaaaaaaaaaagaaccac

SEQ ID NO: 141566 - DNA, 436 bp, Homo sapiens
gaattccccaaacagaatgcagtccagggcagccagtgagggctggcagtggcaggggatggtgggctagagtgaagtgggctggtttaagagataagtaagagggagaatccacactgtgacccattagtttttaaaaatatccagtgctcctaggtttccatcctccctccacgtaccagcagttgggcaggttgagggttatgctgccttggatattagctccaaattgcaggtaccccagacaccccaggctgatgtagaggatggtgacgatgaccatgcccaggtacaggatgagtgggaacttccgaggatccttcattttgttttccaggggcagaacctatgagagagtagtgagagaggagagaaagtgcagaaaaaagmaaagttaatggccaagaaaaaaaaaaacctcagaaaaaaagtaact

SEQ ID NO: 141567 - DNA, 653 bp, Homo sapiens
taacatccacattccatcccctccccagtccctgttaacaaccatttgactttatgtctctatgaatttaactactctatgtacctcatataaatggaacatataagatttgttcttttgcatctggtttatttcatttagcatatatttttaaggttcatccatgttgcagcatgtgtcaagattctctttctttttaagtctgagtcgtattccattgtatggatataccacattttgtttatcttttcattagttgacattgattgtcctcaccttttgatttttgtgaataaggctgctataaacattggtgtgcaaatrtctgttcaagtccctgttttcaattcttttgggtatatacctagtagtggaagcactggatcatataattccttgtttgactctctgaggaaccatcatactgtcttctacctaattatgctttgtgttttagtaatgggacacagcctggcatgatgggctagagtattggaaaggcatgcacaggttcaagtctcagctgtgccacgtgccagtaatctacatgtttctatgagaagagtcaaagaggatatagcctggtcaaccattatcagacactggagtcagtttgactaattatatggtgttctaaggaaacttgaggtacc

SEQ ID NO: 141568 - DNA, 653 bp, Homo sapiens
taacatccacattccatcccctccccagtccctgttaacaaccatttgactttatgtctctatgaatttaactactctatgtacctcatataaatggaacatataagatttgttcttttgcatctggtttatttcatttagcatatatttttaaggttcatccatgttgcagcatgtgtcaagattctctttctttttaagtctgagtcgtattccattgtatggatataccacattttgtttatcttttcattagttgacattgattgtcctcaccttttgatttttgtgaataaggctgctataaacattggtgtgcaaatgtctgttcaagtccctgttttcaattcttytgggtatatacctagtagtggaagcactggatcatataattccttgtttgactctctgaggaaccatcatactgtcttctacctaattatgctttgtgttttagtaatgggacacagcctggcatgatgggctagagtattggaaaggcatgcacaggttcaagtctcagctgtgccacgtgccagtaatctacatgtttctatgagaagagtcaaagaggatatagcctggtcaaccattatcagacactggagtcagtttgactaattatatggtgttctaaggaaacttgaggtacc

SEQ ID NO: 141569 - DNA, 653 bp, Homo sapiens
taacatccacattccatcccctccccagtccctgttaacaaccatttgactttatgtctctatgaatttaactactctatgtacctcatataaatggaacatataagatttgttcttttgcatctggtttatttcatttagcatatatttttaaggttcatccatgttgcagcatgtgtcaagattctctttctttttaagtctgagtcgtattccattgtatggatataccacattttgtttatcttttcattagttgacattgattgtcctcaccttttgatttttgtgaataaggctgctataaacattggtgtgcaaatgtctgttcaagtccctgttttcaattctttwgggtatatacctagtagtggaagcactggatcatataattccttgtttgactctctgaggaaccatcatactgtcttctacctaattatgctttgtgttttagtaatgggacacagcctggcatgatgggctagagtattggaaaggcatgcacaggttcaagtctcagctgtgccacgtgccagtaatctacatgtttctatgagaagagtcaaagaggatatagcctggtcaaccattatcagacactggagtcagtttgactaattatatggtgttctaaggaaacttgaggtacc

SEQ ID NO: 141570 - DNA, 653 bp, Homo sapiens
taacatccacattccatcccctccccagtccctgttaacaaccatttgactttatgtctctatgaatttaactactctatgtacctcatataaatggaacatataagatttgttcttttgcatctggtttatttcatttagcatatatttttaaggttcatccatgttgcagcatgtgtcaagattctctttctttttaagtctgagtcgtattccattgtatggatataccacattttgtttatcttttcattagttgacattgattgtcctcaccttttgatttttgtgaataaggctgctataaacattggtgtgcaaatgtctgttcaagtccctgttttcaattcttttgggtatatacctagwagtggaagcactggatcatataattccttgtttgactctctgaggaaccatcatactgtcttctacctaattatgctttgtgttttagtaatgggacacagcctggcatgatgggctagagtattggaaaggcatgcacaggttcaagtctcagctgtgccacgtgccagtaatctacatgtttctatgagaagagtcaaagaggatatagcctggtcaaccattatcagacactggagtcagtttgactaattatatggtgttctaaggaaacttgaggtacc

SEQ ID NO: 141571 - DNA, 606 bp, Homo sapiens
ttatttaatggccacacaacctaaattcaattaaatggttacaacctgtaacgcatttaaaatatgactaggcagaatttgcttcctactaaagacatttattcgattgaggagcatccaacagttgatgttgatccccccatcctgccccactgttctactttgcaatttgtttgaaagaaattgtcaatatatttctgacttctgagcaaatccatgaatcgggatccagcaacaggaaaagaagctgttgctgcccattgcttggttttggcaccaggaatggataaatcccagacttcctggggcacgtgttttataaaagggaagtgctgacagtgcaaacagctgccatcaattggccttggagactacttccctggagaagctccaattatattcttaaaggacccaycaagctcttcaagtgttagtggcaaccatttgctgccaaccatttgaaatgatgaagtaatttttttttattagtggatcctaagtgataggctctagaactgatcttcaaccttaactaatatcatggcatcagagggctacagattaaatcagtggttcccagtcactctctgtggacaagtagcaact

SEQ ID NO: 141572 - DNA, 514 bp, Homo sapiens
agaatttctctttctttcattccacttttatagttcaatattttcatttgttaaaaatgtaagtcactttcatactcaggaatgtacaaaatgataagttcaacagaattttagaaaacaaaaacagtacaagtacctctgaagactaacagcactctttcttggatgtgcatcaaatagagatgtgatttgtggagcaaagtacagcattttacccttaatttcatggatactttcctagtttgacttataccctagattgtttcatatttgccttttctaagcttctcaatgaaatggcctccaaaagtagaaaaactcacagctctggagaaaatatctacttaaagcatggatagaccagactgagaaacagtttgtgtgtaagcagggtaakttttaaagggaaaaattactattcctagaacttcctaactttagaaacaagatttcagagtaatacacaccaaatgaaacttaatcttcaccctacacctgaaaaatgtatatttat

SEQ ID NO: 141573 - DNA, 431 bp, Homo sapiens
ctggggttcttgtgtattcttatagcttagtttkatttatttgctaagacctggctaagtgagaactgcaaagagttatgccttcaactacctaagccaggaattttctgaggtggcaggggaaccagggtgagcagaaggacatatcatccccaccctcattaagcttatgctatagtggatgaaataaactcagaagtcaaggagtttcagaagagaagtcattcccttgagtaactatgttaagtacgtaaacagctttagtagtgctttcttagtacaaggtgttttcttctgatctaggagagtcagtccaatttttttcttttgagaaaatggaggctcaaagagtctgtcatttatctccagtctcttcattattttgagtccaagtacaggattatttgtaatatacatgctgcctcacatga

SEQ ID NO: 141574 - DNA, 513 bp, Homo sapiens
gaaaaaataagataaatccattaatctaaagcaatttctatccaaattaaagatgatttggaaaaaaaataaaatgccaatgaatcactctttattataaaagaaaaacattgctttggcctttacttatagaaatacacaataaaaaatgtaaaagtcactcagaatctcaatattctaaatagactacattttaaatggtaacttcctctatgttatggctcgaatgtgtctccaaawtttatctgttagaaacttcactgccaaagccacactgttgggaggtggggtctaatgggaggtgcttaggtcataagggttctgccctcaaaaatagactaatgccactataaaaaggacctgtggtagtgggttcactctcttttgcccttcttcctttcgccatgtaaggaacagcaagaaggccttcactagatgctagcaccttgaaattaaacttcccagtctccagaactgtgaaggaactcatttctctgcttttaaaattagtca

SEQ ID NO: 141575 - DNA, 600 bp, Homo sapiens
tcttaaaattaatacagaaaggcaaagaaactaaaatagctgaagtaattttgagaatgaagaataaagttagataaatcaaactaattttaaaacttactatgaagctatagtaatcaagacagtgtggtattgccaaagggacaaacacatagatcaatgtaacagaaatagagtccagaaatagatgaactcaaatatgaccattttattttatttgcacttaaataattttatgttaaaaataaacttttttaagaacaattttagatttacagaaaaactgagaagaaaataagataattctcattataccttgcacccaatttattctattattaacatattaatatgatacttacattaaaattaatcagtattaatacattattattaactaatgtccatactttttgcagattttttaaagcattttcctaaagttctttttctgttctaggattccagtaggatacattacaaatttagttgtcatatctccttaggcttctctttgctgtgrcagtatctcagaccttctttgtttgtgatgaccttgacagttttaagagtactggttatgtattttgtagaatgacc

SEQ ID NO: 141576 - DNA, 600 bp, Homo sapiens
agcacaaaataattagtctgatgcatatagatagtggcttcttacagcaagtgactttaattgtggtgagtaatatatatggagtttgaaatcttatatatttccctcccaagaagacaccagttactaattcagttgacaaagtaacaatgtttcagaatatttaatggaaactgaacatcctagtcaatagccactgtaaaatgtccattttatggccttatttttgcctgagcttaatttatggtaatttggtggttgcatatagcctgaaagtatgctgttggcttgagagttagtacttggatgttgcataaatcatagctgaatgtgttggcttcatctaatgctcttctttctcctacagttggagtccttttcatcttgtcatttccccagcttctttcctgtcttcaattcatggggctctgagagatcagtatttaggagatcttcataacatggcatcttcccaatgctaggtagagtgttcctgggtttcatagggagggaattcagcaaatctttttgtgggatagagatsgtaacagtatttatgttgcactagcccaccgttaagcactttaaaagaaaatataa

SEQ ID NO: 141577 - DNA, 532 bp, Homo sapiens
taatatcaaagcgaaggacaagctggcttatccgtctctgaagttttcaatcattctccctctctctttatgacattttccccaagctttttagcaggacttgtctttgtggttacagaaaacatgaacaggtgaaaagaaggtaatgcatcacttgcagtcttcccacctatagctaaccactgataagctttggtgtgtattctttgttctttggtgctgcattctaacacacacatagagaggcacaaaattggattagatagcatattgacccgttgtttattttttaattggtcatatattctaagcatctgtcctggacaataaatagagacctatgtcatcatagtcaatggctwtgatataatctcttggttagataggctgtaattcatttcatcatgttgttagaggtttagaaacaagtgtttcttacttaattgtttacagagccttaagttaacttcattatttgcatgagtaatagtaatactagaaaatagtaatactagaaaaagaaaattgctag

SEQ ID NO: 141578 - DNA, 454 bp, Homo sapiens
tttttgttctcatccaccagaaaactcctaagacaccataaaaatatataacataaactttggatttgctcttaagataattgattctctcracctagccttcctgaggacggacagaggcccagccacatgctacggggagcatccctatgcctggctcatagtaagtacttaatgcatgttaatttttaacctccctttcccttaaaaagaagaaaccttgcttctccaaatgtaccttagttcctgcctacagagaaatgcaccatttccattctgggcctcaatagctaagtagcatccagggaaagtaggaatctcaaacctctgtcacagtacttgctggaaactagattagcaacagtgtgcctaatccagtttccaagaagtactgcaacagaggcttgagattcccttttttctctttttattcatgcatttcctattttctcaa

SEQ ID NO: 141579 - DNA, 378 bp, Homo sapiens
caaactataaggtcactgtttgaggtttaatccttaagtacaacaaccaggaaacaagagtatatatcaccactgattatctgytgtagcaactccttttttctttggccctactttctctgactattgagaaactagttgaacaagagtcagataacatttcccctcttcctttttcttcttcattatggaattgtgctatgaagaatggatttaccatttgggttttgaacgattcctgctgaagtggttcatctggagcagtgactttccttgttcattcttcccagatcctctgggagaatccagatggttcttgcatttttagtgaatgaacacttgctgtcttgcataaactaattgtctaaaactgcccac

SEQ ID NO: 141580 - DNA, 378 bp, Homo sapiens
caaactataaggtcactgtttgaggtttaatccttaagtacaacaaccaggaaacaagagtatatatcaccactgattatctgttgtagcaactccttttttctttggccctactttctctgactattgagaaactagttgaacaagagtcagataacatttcccctcttcctttttcttcttcattatggaattgtgctatgaagaatggatttaccatttgggttttgaacgattcctgctgaagtggttcatctggagcagtgactttccttgttcattcttcccagatcctctgggagaatccagatggttcttgcrtttttagtgaatgaacacttgctgtcttgcataaactaattgtctaaaactgcccac

SEQ ID NO: 141581 - DNA, 409 bp, Homo sapiens
atcatctccattccaaccaactattaaggtgaaaagaatatagatagagtactatccaggaggtttttatgtggcagatctggaagttgcagtcattaattttgttcacatgtatcacaaagctgccatgaatggtaarggtaactgggaaatgtagtccctggctggccaatgactcccctgagacaactctacactatggggaaagtctaacaggtttttggtgatctgctagccatctttgccctagtctgtccttctggctgccaaattgctaagagtacttttcttctcatattattttctaagaaagacaatctagatttccattagttatcatatccaggtcaaggctctctgggtaatgcactgccctacatcaagtgtggatagatgtgattccttgtgt

SEQ ID NO: 141582 - DNA, 409 bp, Homo sapiens
atcatctccattccaaccaactattaaggtgaaaagaatatagatagagtactatccaggaggtttttatgtggcagatctggaagttgcagtcattaattttgttcacatgtatcacaaagctgccatgaatggtaagggtaactgggaaatgtagtccctggctggccaatgactcccctgagacaactctacactatggggaaagtctaacaggtttttggtgatctgctagccatctttgccctagtctgtccttctggctrccaaattgctaagagtacttttcttctcatattattttctaagaaagacaatctagatttccattagttatcatatccaggtcaaggctctctgggtaatgcactgccctacatcaagtgtggatagatgtgattccttgtgt

SEQ ID NO: 141583 - DNA, 462 bp, Homo sapiens
gaaattgattttaattctcccaaaatcagtggctaagtgtgatagattcttccattttactatttcttccatccattctgacatctccattcatctgctgctaccacagcctcatttttaagcattatattacaatcctaatggtatggaacagattttgctacttccagtccttctcagcccaaatccgtcttctatagtagttcctgactaattttcctaaatcattgtttcygtgaggccaatcctctcccacagactaatgatctacaatgtagtttattaaaagcattatggaaacttgcctcaagttagaaagagcttagatgtccaacaatagagtattgttaatataatttggggtatcaataaagtaaaattatatacagtcgttaagaatatgttatagaaaaaatattgatctgaagaaaatatttgcaaattattgaatataaacatgaa

SEQ ID NO: 141584 - DNA, 462 bp, Homo sapiens
gaaattgattttaattctcccaaaatcagtggctaagtgtgatagattcttccattttactatttcttccatccattctgacatctccattcatctgctgctaccacagcctcatttttaagcattatattacaatcctaatggtatggaacagattttgctacttccagtccttctcagcccaaatccgtcttctatagtagttcctgactaattttcctaaatcattgtttccgtgaggccaatcctctcccacagactaatgatctacartgtagtttattaaaagcattatggaaacttgcctcaagttagaaagagcttagatgtccaacaatagagtattgttaatataatttggggtatcaataaagtaaaattatatacagtcgttaagaatatgttatagaaaaaatattgatctgaagaaaatatttgcaaattattgaatataaacatgaa

SEQ ID NO: 141585 - DNA, 618 bp, Homo sapiens
agttcaaactttctttgcaccagtcacattcgctgacctctgtgaccaggccaaccccgtactaaaaatattcttcctccaagcatttccagttatcactttgcatttcttcctttgatgtttttgatttatgtctacatcccccaccyagctgtaagctcctagatgaaaaagacttgttctctttaacctgctcattattcccctagcacctccaagtatagttggcccatcacacagcaggtgcttaataaatatttgatgatttctttaatgagtgagtgaatgaacctgttgatttcattcaccttagtctccctcaaattttttccaaaagagttactaatagtgtgaaagctcttctgatgaagaatgccactctgtagttttaactcagtaagtaagaaagaatcataaaactcaactagggcattgacaaaatgaaagtacagtcaatgaccaaaatcgtcccttttaatttttcttctaggaatttaagaaaagaaggcaaatttagcaccagtggtccctgtaagtgagccctaggccatatctgatgctttttattttaggatcatttccaaaactagttacaatgattttatttgataaagtgaa

SEQ ID NO: 141586 - DNA, 414 bp, Homo sapiens
attaaattgttacatcaaagaaacatgataacatttaaatcaaagaatcagaaaagataggacatgtttcaccacaaatatagaaatagagaagggaaagaaatgagttgacctgactgatattggtgaaaaaagaaaggacagaaaggaggaaagaaaataggaaagaggatgggagaaacttatttgaatatacaaaggaataaaattagaacactcaataaatatgtcttattgagtaagtaaataattttatggataataktatattagacaataaaaccacttcctggatgaaatcctggagaggatgctatggaacatagtcgttttaggtcaaattttgaaagataatgatcttgtatgcctgctttttgtttccatttgagttataagcatagtaagaaaatattc

SEQ ID NO: 141587 - DNA, 551 bp, Homo sapiens
attacattgtatcatttaatctatctgaaattgttattcctctttaggttgcatatttagtatcaagaactaaatcagaccatgagaaggattacctatttagggagggtcctttgatgatggctgctgggcttagcattgtaaagggaatattcctttatcgatcccactcacaaattagttcataatatttgaacacaytttggaaatatgttttccatgtcttcctcctcactctcaacagtagaagtctctattcaactgtctggtttgatttcttttccatagtgacccaagttatggctcttaggtgatggtgtggaaaagccacatcaattttgcatgattgttattgctgctatgaatttttatggtgtgatatctacacatgcttgggaattttaaatattttatttttcatgcagtttgcatgtctttctaagtcaaaatttatcagtaaacacactgtcagtggaccacctaaattttcctgtgccagccagcccaagggagactggattatcagcatgagaactgaagcatgaaaaatt

SEQ ID NO: 141588 - DNA, 374 bp, Homo sapiens
tcaattatatgagtctctgcttgacactctacaggaaaatgtagtcttggcataataaaacaacaaaacaagcagcagtcctgacttaaaatcaaagagaacttgacccacaggtttagcataacacaatgttacagggactccagaaagctactatagtgaatcttatgtcagaactcatttcttttctccttttacataatagtgccagagtatcacaagagaaaaaaawttttatactgtaatatacccagggaaattaaaaaatggtgtggcaacagagagaacaatttaaagaaggttcacagggaatctacaagcagggagatgtactctcaggctataatattcatttccttaacatatgcacacat

SEQ ID NO: 141589 - DNA, 589 bp, Homo sapiens
tgacacagtgatacatagtaggtactaatcaaatattcttggatatatgaatgaagaaattaattatacttatttgtgtcactcacaatctagaatgrtgctaatctgtttggaacaggaagaggcaagacatcaactcatgaaatttcaactcatgaaatctcactcagcagatgttttagtaactattaggtgctcaggcttgtgctgggaatagattaatgagcaaaattaggaacgttctctgcttttactgagctgatcatctggttgtggaaacagatcctagtcagaaaatcacatgcagtaaagcacacctcagacaaatgccataaaattgctggatagtggctcatttagatttcagtagctgtaagcaagaggctgccagtggaaaagtgaagacggtcacctgcccataagaatgcaggtatagtttggatttctctctttactactcaatagctacctctttgttcatgcccataggcaacatagaacatgctgctacattttacccactaaaatactcttcttatgctctatatcccaccacccttttcaatatttcttcctgatttttattcag

SEQ ID NO: 141590 - DNA, 442 bp, Homo sapiens
ttgtcgttgtgtatttacctaggaatgaaactgctgggtcatatagtaattctacatttaagtttttgaggaactgccaaacattttttcagagtggctgcaacattttatattcccatcagccatgtcatgtatgaggcttttaatttctccatgtccttgccaacacttgtattttattttttaaaaatttgtacccggccaggcacagtggctcatgcctgtaatgccagtactttgggagggccgaggtgggtgaattgcttgagcccacgagtttgagaccagcctggacaacatgacgaaaccgcatctctacaaaaaattaaccaggggtagtggmacatgcctgcaatcccagctactggagaggctgaggtgggatgatcccttgaagctggaaggtagaggctgcagtgagccgtgattgcaccactgcact

SEQ ID NO: 141591 - DNA, 548 bp, Homo sapiens
agtccctggaaaaataggcccaactcaatttcacactcagtcctcttgagctaatagcctggttacyacatcaaggggcctggatacacagaaggcaatcacctcagcccctcactcctaggcacacgtaatcagttttggctgccttggggctccatgctgctttcccattggtcctcacttacccttatccaagactgacacgacccagcccctctcacctgctgggtagaactggcctcccggaaagagtgggtaagcgcttctttctcctgttcatatgaggcccggaggactgtagggaaaggagaactccataagctcaagacacttctccccaaagccttctgcaggccccttggtggccaggaaggtccagatatttaactggggcccatagaggccaggagtctaggaacggtcttattcatccttctgtctcctaggcttgcttgggggctgtgccagaaatgtactaggtatttaataaaacctcaaggaaattgaaataaactatagcctgggaggaacgctaccagattgcgggt

SEQ ID NO: 141592 - DNA, 560 bp, Homo sapiens
agtccctggaaaaataggcccaactcaatttcacactcagtcctcttgagctaatagcctggttactacatcaaggggcctggatacacagaaggcaatcacctcagcccctcactcctaggcacacgtaatcagttttggctgccttggggctccatgctgctttcccattggtcctcacttacccttatccaagactgacacgacccagcccctctcacctgctgggtagaactggcctcccggaaagagtgggtaagcgcttctttctcctgttcatatgaggcccggaggactgtagggaaaggagaactccataagctcaagacacttctccccaaagccttctgcaggccccttggtggccaggaaggtccagatatttaactggggcccatagaggccaggagtctaggaacrgtcttattcatccttctgtctcctaggcttgcttgggggctgtgccagaaatgtactaggtatttaataaaacctcaaggaaattgaaataaactatagcctgggaggaacgctaccagattgcgggtgccatccacacc

SEQ ID NO: 141593 - DNA, 415 bp, Homo sapiens
gaattcagcaaaggtgactgggaaggagattgtagtaagatgggaggaaactaccccaggagaatgtggcagcaaagtgaaaaataagggagtgatcaggtgtgtcaaatgctgcttttaggtaaagtaggacaaggtctacaaatctatcattgggtttagcaatgtgaaagccaacttatctcttgctgtgaattgcagaatgttgggggtaaaggcctgatgggaacggtgtaagataaaaagcctaaactacttattctgggagttttgctgcgaaggccagcaagggaatgaggcagtgtctggcaagggaattggtgtcaagagaagggcttttgtttgatttttttaaagattgaagacataacagcatatttgtaygctggtgggagttatcatatagaaggtaaaa

SEQ ID NO: 141594 - DNA, 478 bp, Homo sapiens
taaggggtgatgagaatggcaggcctcaagagcaggactcttgcaaagggmgagtggtgagcggtgggtgaaactaacactcccagtattagactgctagggagaagggggcacaggcccattcgtccccaactaatcaaccagaatgatcttcccaccccatgggacacagatgagtgtccctgcccacccaaatcacataaatgcataagctgtagcctcagcccttggaagccaagccaaggggcagactgtgagcccagagcctgaaaatagagttaatcctacactctcgagtctggacctccccatccacaaagctttcacctgagcccagctgatatctccagcagctcccagccctcccaggaagaccttcccagctcccactctggcgccagcccttgggtgaaccgcaggtggctgggatgacttattttcttagctgatcggtagcagcagcccagctggctcatac

SEQ ID NO: 141595 - DNA, 567 bp, Homo sapiens
gaggttatgcacttcaaataccatataatacgctctactccgtagaatccaggccagcacatcagagtcaagcatattcacagttctgtctccacacatgtaaatatttacacttggagggataaattaaggaggcagatagcttcccatcggtttaggtcaaattttgctacaaaaactgtaaatttgtatcaaaaataaactgatgtgtgccgaacttgtttttttttaacattcagttttcagaatgtttggaatttcagtgttatggagaggaattgtaaacaaattaattttagttcgtgatacaataaaagagggcartatagtcatgcatgaggtagggatagagcaacatcaggggagagggccactcactatgcagggcccctcacacgcattctctcgtgtcagctctctagccccaggaaggtgatgttgtcactgtcattttacagacaaggaaaaggagaactactaccattaagaacctcattccaagccagcattccctatgctccttttagcacaacagagcatcagacaagcaccatcatgattttgcca

SEQ ID NO: 141596 - DNA, 473 bp, Homo sapiens
aaaactcacagcacaacttccctaccacaaaacaatttctcccatttcaatttggaaatattcaggatatatttaaataaaacatatgctaaaattaatccacagagcgacttgtaaattaaaaaaaaaaaaacactgtgagatgcaaaaggggtactgaagtgtccyttaaaaataggcccatggtaggagggaaaagggcctttacagtttaccacataattaataaggtgctgacacattcacacaggcaaggggacagacaagcctgccaaatcttcaaccttcctaaattttgtcaataaaacacagcctaaatttgagacagataaacattaaaaatgattttacctttggacacaacaacactttccttctttctccccttttccactcccctgcccagagaaacagatgatgagaatacgaaggaaaagatatgtttagaatttcacgatatctgttataattac

SEQ ID NO: 141597 - DNA, 523 bp, Homo sapiens
acccaacatgttgaaatttgtatctttaagcatttctccaacaaacacagaatcagagcaaagattagaccataaatatatttttgwaatttaaatttagaatattgtgacagttaagtatttccttccaaaaaataaactcttcctcacgttaattttgaatgattatttaaaaattccaaatcttggttttcagtgctgatacatggtaactcagtaaaaggaaatcagtgttaaagttagtctgttctatgcttcctaacctctctgttttttgcttgttgtacttttgcattaatttagggcccctaatcacaaagctttaaaaatattaacttgaagtacactaaatgaaaagcactgggcagcatttcatggaataatactcagcaataaaaaggaacaaactattgatatcccagggaattatgttgagggtaaaaagccagtaaccaggggatacatactgcatgttaagggctgaattgttcctcccccagaaattcatgcattgaaggcctga

SEQ ID NO: 141598 - DNA, 523 bp, Homo sapiens
acccaacatgttgaaatttgtatctttaagcatttctccaacaaacacagaatcagagcaaagattagaccataaatatatttttgtaatttaaatttagaatattgtgacagttaagtatttccttccaaaaaataaactcttcctcacgttaattttgaatgattatttaaaaattccaaatcttggttttcagtgctgatacatggtaactcagtaaaaggaaatcagtgttaaagttagtcwgttctatgcttcctaacctctctgttttttgcttgttgtacttttgcattaatttagggcccctaatcacaaagctttaaaaatattaacttgaagtacactaaatgaaaagcactgggcagcatttcatggaataatactcagcaataaaaaggaacaaactattgatatcccagggaattatgttgagggtaaaaagccagtaaccaggggatacatactgcatgttaagggctgaattgttcctcccccagaaattcatgcattgaaggcctga

SEQ ID NO: 141599 - DNA, 585 bp, Homo sapiens
tacctctgtgttttccacatgttgacaggctcagttcaaacaccaggcccatcagcttctggagagtcacggcaaagctcggctctgatttgggtgtctgcttcagagattttccaaaggatatcctgtagtagataaatcatttcattaggccaggttccctgttcaaaccaggaagcagaaggcctgccatgtaggaaaacccagataatattgttatggctgtactcagagcatttgtaaatattgttgtcagtgtctttcacgcaggttccatcaagattggatttaaacatagacaggttaattatgtgttttaaagctttgtttatggagagctattaggaagactgtgaagttttaactattgcaatgacaatttttccccccaaatgtctcctccagttgatcactcctcatgccatccgtgtgcagacccctcctcggcacatccctggtgttgtggaagtcacactgtcctacaaatctaagcagttctgcaaaggaacaccaggcagattcatttayacaggtaagaaccacagcacatggtgagcacagaactgccgtggtcttgtggggtct

SEQ ID NO: 141600 - DNA, 536 bp, Homo sapiens
aggaataaaaaccaatgtgctgtttatatacgactattatgctaaatggactgattgggtgaaggaggtctttctaaacaggtgacatctgagctgatacaaagatgaacagaaggagccctcaatgaaaacacctaataatgcattttacaggacttagtgaggactttagattgtattccagatgcaacaggaaaccaatgggaaatcctttgtgaagaggtggagcgatttgacattttgaagactactttggctacaatttgtataatgaagctaaaagggtaaggcagcagacagcgaagagactgttgcaatggtgcaggtgagaacagacagtggcttgacctaaggtgtggtgtgtgatgcagaagagtgaaygaatttgggcacaggtttcaggtagagctcacatgacttacggattttattatgtatgcatatctgtgtattttctccttcagttagaagatacttcttttgttgttagaaacatgtaaggctataaaactttactatttttgaaaaaaagttat

SEQ ID NO: 141601 - DNA, 584 bp, Homo sapiens
gcatcagacatactcccagtctttcaggtgtgtcaccaatttatgcaattatgtttagccttaactaaagagaagcagtagtggtccagaggagacatctattgctgttctcttgcttgcacttgtaagctctaatatccttcccatatttcatccatgtgttctcagaacagaacagtggataccgcatgcrgaaatcactgcacctgtggagactcctgattgctcagtgaaaaaagacatgactttctctcctccccacttttcccagagcatcacacaggcagagctataaagcgccctaaagaagaatgaggcagagtaggaagagagagggtaggatatacttaagactggaggtccaataagttgtctctaagaatcccagatgaagtgaggaagccaggcctgggaaggtctgagtacagggagaatgagtatggtacatttgaggatcaccaagaatggcatcagccaatgtgatcagagttgaatcacaccccctctacacaaggtagggaggaataggagatgaattcagaaaagtgggaaggaagaaggatcaatagagcatcttgaagaag

SEQ ID NO: 141602 - DNA, 594 bp, Homo sapiens
agtgactgtcgaattttcaccatgtgccaagtactgttctaggcattaaagatacactcccctgcccccgcaaaaccctgccctgttcccktgaacacacacatccaaggagagaggcaaggaataatgtactggatcgtgattgtgagagtgagaatatggatgatcataggagaagattctgggagaaagagtgtgcatatttgagtgtgtagggaagggttgtgatgagatagacaaaagctaaaaaggcaaataatatgttcagtgggaataagtcctaggaaaaaaataaaatggcatttgttgggaatggcatagttttcatagaaaagatgttctgaaattgtggtaattttggcagagatctggataaagtgaaggatgagacaggtggatatctcaactaaaataccacaggtagcaagaacaagaagtgcaaaggtcttgaggtaagagatgactgtgttagaggggcaagggctaaagagctgacagggcgagtgtggcaacaaggtcagaaaagatacaggggaggatcctgttgagtatgaggaatgagtatatgtaggaatattggaagactgagacagc

SEQ ID NO: 141603 - DNA, 550 bp, Homo sapiens
tatcacattttgcttattcattaatctattattgggcatttgtattgtttccgccctttgattattatgaatagtgctactatgagcatttgtgtacaagtttttgtttgaatatctgtttccaattctttctggtatatacttaggagtagagttgctgagtaatatgggaattccacgcttaacttattgaggaactgacaagctgtttttcatagcagtcgcacccttttacattcccaccagcagtgtatgagggttccagtttctctacattcttgccaatatatgttattttctgttttttttctattataattattctagtgggtgtsaagaattacccaatttttagcctcattttaacttaccgggtttccatttgttgttgttgttgttagcctaacattgctgtgggcttggagcaaaagagtcaatcaaaacatgacctgatctctccaacctgaagtcttttatcaattctggccatatttcttaagtagacaattgaatgaagcacccataagccaaagtatctgatcatatagcc

SEQ ID NO: 141604 - DNA, 488 bp, Homo sapiens
gtgaaataaactgcccttggtacatagggactacataaggacttgtttttattattactattgctttacaatgatatcattattattttattatccttattgttatcatcaccatcatcataattatcattgctctgttactttctcttgctacagataggaaaatttacattacctgggagaaaaacaaccttgataggaggtgtaaatcaattttatttgaagccactgaatgaaaaaatatagctgctcagatctcataagacatcattctcttctttgaatcttacaattactatgattcaactatgacttcaggcaaatgatcctgrtcttatcttttctatgacctcagctccagttctagagctccagtctcctgctagaccctgtatctgaattttctaccatcatcttacaatatagagatctaaaactcaaacaagcatctctcaccacaggccagctcctcttccctatttcaggcc

SEQ ID NO: 141605 - DNA, 626 bp, Homo sapiens
atatttagacactgttagtaagaatgtaaattagtacaacttctgttgaaacagtatagagattttcaaagaactaaaaagaaaactacaattcaattcagcaattccggtactaggtatctacaaaaaagaaatcattatatcaaaaagatacctgcacttatatgtttatcacagcagtattcacaataacaaagttatggaatcaaccatcaacctaagtgtctataagtgtatrtccacataaagaaaatggactactacttaggcataaaaaatgaaatcatgtattttgcagcaacaggagctggagaccattatcttaagtgaaatcattcaggaacagaaagtcaaatactgcaagttctcatgttctcaattataagtgagagctaaataatatgtacacacggatatagggagtggaataatagacattgaagtctcagaaaagtgggagggtgagagagaggtaaagtataagaagttaactaatggatacaatgtacagtattggggtggtggttacattgaaagcccagactttatcactatgcaaaaactcacataacaaaaatgcaggtgtaccccctatatctatttttaaaagtgaatagtctccttta

SEQ ID NO: 141606 - DNA, 699 bp, Homo sapiens
atgccttcccctagtggaaaagcatgagtttctaaagcagcagagatacatggactgaacctagttcacatgttttctgttctatctttgctgctatggtttttgtcttaatggggcacttagtttacaggtcaccacatttcttataatttctaatatcctatcaccaggtactttacaccagactggactccagacatctgatttttgaaaaaactttactatagaggcyaaagttgttaaccattaaatataacaaatctccaataacattccaatgtaaatttggctataatttaagttcttgatcccacatcccatttattagcactaaatatgtgtcactcattgccttacagattgaggatacaaaaaataaaagactaagaatactcctactctaaagatacccctacccaaaagagataaagaaaaaataaaaggtaaaagttattagttctttgggaaaaatagaactatttataaaatgtttgtcactagccaagcattcataacaagattggtagttatgaaatatctatgttggtacattaaaaaaaaaagatgaactcaaatcaattaccaagctgtataacttaaatgactagacaaagaaggcaatctaaatccaaagctaactgaagaaaggaaaaaagtaatgatgaaagtaaagatacatgaaatagagactagaaaaac

SEQ ID NO: 141607 - DNA, 538 bp, Homo sapiens
ggtggctgtcctttttttatttaacaaaaaaagcctctatttcatgccctatgctaaatggtggaagggttcaggggtttgagagaaaatagagtacatagctgtctgagaaatgacatttcaaaataatacattttacaatatatataagcaatggtgggaaaaggaaaatgtatatgaacaagtaaaatgtgaaaacacacaggcacagatatatgtatctccttggattcagagctaagcattctgaaagcaatgaagctgcatttcaataaatgaaataatattatatatatagttggcagcaaaaaatgacagaattaaaatttaccttaaattctcttgcatgtgtattaaatgaaatgcagatgattttatatgctaccatgaatagtaattttttaataaatgtataatgtttatataataaattttacattgaaaatatattcttacagggtttgtgtctttacataaaaatgtatgcmtagctatattttggaagaccactgtacgtatgttgggactgcattctagt

SEQ ID NO: 141608 - DNA, 353 bp, Homo sapiens
tgtttttctagctattttgactcctcttcccataaaggattcaagaaaattttaaatatagtttttaaggtttttcagtagtgtctttgaatacttttaacatctgacctacatctttctgtaaaggactttaagatgatttccctcatgatattttcaatagcagtttatgatttgaggtagacgttcttgttatcactacaaccattcttttttgttgctgtttcctgaaagaaggttgtggcatcrcactctttgatctatcttgcaattaaattggccatgaaagataatgtgattcatctaacttttatatgaaaagtaaaaggaaatatattgctcatttcaaaaat

SEQ ID NO: 141609 - DNA, 523 bp, Homo sapiens
aaatggtgaacataaagctgattgaaagacacatgttctgaaggagaaaggaaacatctgttttagggatggaaatggaaagaaagttggctacagataatatgtatagagatggaagtgagaagaataaagtggggctcacgtctgccagccttttcctgtctggaaagttgatggcgttatccgtaaagtgaagctggaaaattaggamtaaagtacttggtgtgaaaaaataagtttataatgagcattgagcagagccagtttgattcatcagaaaaccatttaaaggaattgggggtagaatgaagtctcaattcaaataattcagactttatgatttagaaatggggcaagttggattgatcctctaatttttgaaaaccatgtagtacagtaaagaaaacaaaggaggaacccaaatattcaggatatgaggaagaatgagaagattctatcttggggcttggttaaaaaatcaagaaagcattaaaaacatactatatcttggacaaatgttgtt

SEQ ID NO: 141610 - DNA, 523 bp, Homo sapiens
aaatggtgaacataaagctgattgaaagacacatgttctgaaggagaaaggaaacatctgttttagggatggaaatggaaagaaagttggctacagataatatgtatagagatggaagtgagaagaataaagtggggctcacgtctgccagccttttcctgtctggaaagttgatggcgttatccgtaaagtgaagctggaaaattaggactaaagtacttggtgtgaaaaaataagtttataatgagcattgagcagagccagtttgattcatcagaaaaccatttaaaggaattgggggtagaatgaagtctcaattcaaataattcagactttatgatttagaaatggggcaagttggattgatcctctaatttttgaaawccatgtagtacagtaaagaaaacaaaggaggaacccaaatattcaggatatgaggaagaatgagaagattctatcttggggcttggttaaaaaatcaagaaagcattaaaaacatactatatcttggacaaatgttgtt

SEQ ID NO: 141611 - DNA, 523 bp, Homo sapiens
aaatggtgaacataaagctgattgaaagacacatgttctgaaggagaaaggaaacatctgttttagggatggaaatggaaagaaagttggctacagataatatgtatagagatggaagtgagaagaataaagtggggctcacgtctgccagccttttcctgtctggaaagttgatggcgttatccgtaaagtgaagctggaaaattaggactaaagtacttggtgtgaaaaaataagtttataatgagcattgagcagagccagtttgattcatcagaaaaccatttaaaggaattgggggtagaatgaagtctcaattcaaataattcagactttatgatttagaaatggggcaagttggattgatcctctaatttttgaaaaccatrtagtacagtaaagaaaacaaaggaggaacccaaatattcaggatatgaggaagaatgagaagattctatcttggggcttggttaaaaaatcaagaaagcattaaaaacatactatatcttggacaaatgttgtt

SEQ ID NO: 141612 - DNA, 523 bp, Homo sapiens
aaatggtgaacataaagctgattgaaagacacatgttctgaaggagaaaggaaacatctgttttagggatggaaatggaaagaaagttggctacagataatatgtatagagatggaagtgagaagaataaagtggggctcacgtctgccagccttttcctgtctggaaagttgatggcgttatccgtaaagtgaagctggaaaattaggactaaagtacttggtgtgaaaaaataagtttataatgagcattgagcagagccagtttgattcatcagaaaaccatttaaaggaattgggggtagaatgaagtctcaattcaaataattcagactttatgatttagaaatggggcaagttggattgatcctctaatttttgaaaaccatgtagtacagtaaagaaaacaaaggaggaacccaaatattcaggatatgaggaagaaygagaagattctatcttggggcttggttaaaaaatcaagaaagcattaaaaacatactatatcttggacaaatgttgtt

SEQ ID NO: 141613 - DNA, 634 bp, Homo sapiens
agtatagacattttcacattgattcttccaatccatgaacataaaatgcctttccattttttagtgtcctatttaatttcttgcaccaatgttttatagtttttattgtagagatctttcacttctttggctaagttaatacctaggtatttaatttgtaactaaggtaaattgaattactttcttgatttgtttttcagattgttcactatgggyatacaaaatgctactgatttttctgtgttgatttcctttcctgcaactttactgaatttgtttatcagttcaaatagctttttggtggagtctttaggtttttccaaatataagatcagattatgtgcaaacaaggataatttggcctcttgttttccaacttggatgccctttatgtctctcttgtttaattgcttcaggaggacttacattactgtgttgaataaaacttgtgaaagtgggcatccttgttgtgttcccaatcttggaggaaagggttttggttttccctcatttagtttaatactagctgtgagtctgttgtacactgcctttattttgttgaggtataatctttctatatccagatttctaaggctttttatcataaagggatgttgaattttatcaaatgctt

SEQ ID NO: 141614 - DNA, 634 bp, Homo sapiens
agtatagacattttcacattgattcttccaatccatgaacataaaatgcctttccattttttagtgtcctatttaatttcttgcaccaatgttttatagtttttattgtagagatctttcacttctttggctaagttaatacctaggtatttaatttgtaactaaggtaaattgaattactttcttgatttgtttttcagattgttcactatgggtatacaaaatgctactgatttttctgtgttgatttcctttcctgcaactttactgaatttgtttatcagttcaaatagctttttggtggagtctttaggtttttccaaatataagatcagattatgtgcaaacaaggataatttggcctcttgttttccaacttggatgccctttatgtctctcttgtytaattgcttcaggaggacttacattactgtgttgaataaaacttgtgaaagtgggcatccttgttgtgttcccaatcttggaggaaagggttttggttttccctcatttagtttaatactagctgtgagtctgttgtacactgcctttattttgttgaggtataatctttctatatccagatttctaaggctttttatcataaagggatgttgaattttatcaaatgctt

SEQ ID NO: 141615 - DNA, 634 bp, Homo sapiens
agtatagacattttcacattgattcttccaatccatgaacataaaatgcctttccattttttagtgtcctatttaatttcttgcaccaatgttttatagtttttattgtagagatctttcacttctttggctaagttaatacctaggtatttaatttgtaactaaggtaaattgaattactttcttgatttgtttttcagattgttcactatgggtatacaaaatgctactgatttttctgtgttgatttcctttcctgcaactttactgaatttgtttatcagttcaaatagctttttggtggagtctttaggtttttccaaatataagatcagattatgtgcaaacaaggataatttggcctcttgttttccaacttggatgccctttatgtctctcttgtttaattgcttyaggaggacttacattactgtgttgaataaaacttgtgaaagtgggcatccttgttgtgttcccaatcttggaggaaagggttttggttttccctcatttagtttaatactagctgtgagtctgttgtacactgcctttattttgttgaggtataatctttctatatccagatttctaaggctttttatcataaagggatgttgaattttatcaaatgctt

SEQ ID NO: 141616 - DNA, 557 bp, Homo sapiens
ttggttatttacttgaaggctttcttcttttttgatgtaggtccttatagctacaaacttacctcttagtaatgcttttactgtatcccataggttttggtatgttgtgtttccattatcacttgtttcaagaaaatttttaattttatttttaattttttcatggactcactcgttactcaggtatattttgtttaatttccatgtgtttgaatagttttcaaaattcatcttattaatgatttctagttttattacactgtggtcagagaagatgcttaatattgttgcaatattttttgaatattttaagactttctttgtgagctaacatatggtytatccttgagaataatttatctgctgaggagaacagtgtgtattctgcagccattgaatgaaatgtgtaaatatttattagttttatcggttctatagtgtagattaaatacaatatttcttcttgtgtcttctgtatggaagatctgtctaatgctgaaagcgtggtgttaagtctccagctattattgtattgggatctctctctctttagctct

SEQ ID NO: 141617 - DNA, 593 bp, Homo sapiens
tcctgtgttgggtgcatatatagttaggctagttaggtcttcttgctgaattgaaccctttaccattatgtaatcccctttttttgtcttagttaatctttattggtttaaagtctgttttctttgaaattagggttaaaaccattgcttttttctggtttctttcattyctttatttggagtctgtgggtgtcattgcatgtgacattggtctcttgaagacagcataccattgggtcttgcttttttatccatcctggccctctgtgccttttaaatgaagtatttagcacatttacattaaaggttagtatcgatatgtgtggattttatcctgtcattgtgttgctagctggttattatgctgacttgtttgtgtggttggtttgtagtggcagtggtctgtgtgcttaaagggtgtttttgtatagactggtaacagtcttttctttccatattcagtgctcctttcaagatctcccgtaaggcaggtttgatggttaaaacaaaacaaaaacaaaaacaaagaacctccctcagcatttgcttatctaaaaacaatctcattgctctttggctaaggaagcttagtt

SEQ ID NO: 141618 - DNA, 583 bp, Homo sapiens
cctgtaagccatttcaagatatccaatcttttaggccaaaccaatatatacagttcatgtattaatttatgactttgcctgtaacttctactttcctaaactgtaaaaaacagagttgtgacctaactgcctcaagacatcacactcaaggcttcttaggtttgtgttgccctctggctgtggtcactcatgttggctcacaataaacctcyctaaaatattttacatcgtttgggttttccctgaacaagtcaagtaataagagtgctccctactgaattaataaatatataagtattttgcatcactcaatttatttgagaaaagaagatattttacactgaatattgccttaatcactcttccattcaggagtcctagtgacttcttcattgtctaaatttcaatctagggaacatgaggatggtagcctaaatttattgaacactgattattcaccaggccttgcaaaaagtgttttaaatctgttattacacttacttttctcaaaactagtttgaaaaaatacagttctcttctcttctttctatatgagaaaactgaggtttgaagaggctaaaaa

SEQ ID NO: 141619 - DNA, 583 bp, Homo sapiens
cctgtaagccatttcaagatatccaatcttttaggccaaaccaatatatacagttcatgtattaatttatgactttgcctgtaacttctactttcctaaactgtaaaaaacagagttgtgacctaactgcctcaagacatcacactcaaggcttcttaggtttgtgttgccctctggctgtggtcactcatgttggctcacaataaacctctctaaaatattttacatcgtttgggttttccctgaacaagtcaagtaataagagtgctccctactgaattaataaatatataagtattttgcatcactcaatttatttgagaaaagaagatattttacactgaatattgccttaatcactcttccattcaggagtcctagtgacttcttcattgtctaaatttcaatctagggaacatgaggatggtagcctaaatttattgaacactgattattcaccaggccttgcaaaaagtgttttaaatctgttattacacttacttttctcaaaactagtttgaaaaaatacagttctcttctcttctttctayatgagaaaactgaggtttgaagaggctaaaaa

SEQ ID NO: 141620 - DNA, 568 bp, Homo sapiens
cctaaatttattgaacactgattattcaccaggccttgcaaaaagtgttttaaatctgttattacacttacttttctcaaaactagtttgaaaaaatacagttctcttctcttctttctatatgagaaaactgaggtttgaagaggctaaaaatgtttcttaattccagaaarttggttaatgatggtgctgttcctgacctcattcttctgactttagagtccatgtaattacttgctgcagtctacaatatgggtatgtgaaaactccttttctccttgcagctggattgtgagaaatataattcaaggcacaggaacatcttgacattctgagctaatcctcatctctgtgtgtggtacagatagaacaaatcaggataatcctagccaactgtccatggaaatcaagtgaggatattaataggagtatgatgtacagtataggctaattatgcatgtgtacttagaattcttgctttttagagcaggaagagagcaagtcaaccaccccattttacagatggacacactgagctccagagagggaaatgattccttactcatat

SEQ ID NO: 141621 - DNA, 568 bp, Homo sapiens
cctaaatttattgaacactgattattcaccaggccttgcaaaaagtgttttaaatctgttattacacttacttttctcaaaactagtttgaaaaaatacagttctcttctcttctttctatatgagaaaactgaggtttgaagaggctaaaaatgtttcttaattccagaaaattggttaatgatggtgctgttcctgacctcattcttctgactttagagtccatgtaattacttgctgcagtctacaatatgggtatgtgaaaactccttttctccttgcagctggattgtgagaaatataattcaaggcacaggaacatcttgacattctgagctaatcctcatctctgtgtgtggtacagatagaacaaatcaggataatcctagccaactgtccatggaaatcaagtgaggatattaataggagtatgatgtacagtataggctaattatgcatgtstacttagaattcttgctttttagagcaggaagagagcaagtcaaccaccccattttacagatggacacactgagctccagagagggaaatgattccttactcatat

SEQ ID NO: 141622 - DNA, 610 bp, Homo sapiens
agatctaagagagagtggaagaggaaaggccactgttcaaatctaacacatcaggctaaaattatgtttcttctgcttaactgcattcctccttgggaggaaagaaagtggaggtggaagacagagaacaagggaggaaaaaaagaaagcatctttgagcaagttactggacagctttgagtctcggacccatgaagtgaggattccarattagagcagtggttaatcagtgcttcaaggagccctgagtttcacagaatctcccttaggggcagggaacaaggggcaggcaaagtgggttgacttcagaccctgccctgctttaggcaacagtacatcttttataaagattccaggtaacatgtcgtgtgcaaaaagtgttccaatgcttaccaattgtttaaaacaactggggtggttaatcttgaaagcagtcattctcaaatttggctgtatattggactcaccctttggagctttgaaaatactgatgcatacgatgtaaccatgaattcatttcactggttttgggtgtggcctggaaacccagatatgcaactctctattgatttccacgtgtagctgacatcaaggaccatcaccctagagt

SEQ ID NO: 141623 - DNA, 583 bp, Homo sapiens
aaaggccactgttcaaatctaacacatcaggctaaaattatgtttcttctgcttaactgcattcctccttgggaggaaagaaagtggaggtggaagacagagaacaagggaggaaaaaaagaaagcatctttgagcaagttactggacagctttgagtctcggacccatgaagtgaggattccaaattagagcagtggttaatcagtgcttcaaggagccctgagtttcacagaatctcccttaggggcagggaacaaggggcaggcaaagtgggttgacttcagaycctgccctgctttaggcaacagtacatcttttataaagattccaggtaacatgtcgtgtgcaaaaagtgttccaatgcttaccaattgtttaaaacaactggggtggttaatcttgaaagcagtcattctcaaatttggctgtatattggactcaccctttggagctttgaaaatactgatgcatacgatgtaaccatgaattcatttcactggttttgggtgtggcctggaaacccagatatgcaactctctattgatttccacgtgtagctgacatcaaggaccatcaccctag

SEQ ID NO: 141624 - DNA, 583 bp, Homo sapiens
aaaggccactgttcaaatctaacacatcaggctaaaattatgtttcttctgcttaactgcattcctccttgggaggaaagaaagtggaggtggaagacagagaacaagggaggaaaaaaagaaagcatctttgagcaagttactggacagctttgagtctcggacccatgaagtgaggattccaaattagagcagtggttaatcagtgcttcaaggagccctgagtttcacagaatctcccttaggggcagggaacaaggggcaggcaaagtgggttgacttcagaccctgccctgctttaggcaacagtacatcttttataaagattccaggtaacatgtcgtgtgcaaaaagtgttccaatgcttaccaattgtttaaaacaactggggtggttaatcttgaaagcagtcattctcaaatttggctgtatattggactcaccctttggagctttgaaaatactgatgcatacgatgtaacmatgaattcatttcactggttttgggtgtggcctggaaacccagatatgcaactctctattgatttccacgtgtagctgacatcaaggaccatcaccctag

SEQ ID NO: 141625 - DNA, 583 bp, Homo sapiens
aaaggccactgttcaaatctaacacatcaggctaaaattatgtttcttctgcttaactgcattcctccttgggaggaaagaaagtggaggtggaagacagagaacaagggaggaaaaaaagaaagcatctttgagcaagttactggacagctttgagtctcggacccatgaagtgaggattccaaattagagcagtggttaatcagtgcttcaaggagccctgagtttcacagaatctcccttaggggcagggaacaaggggcaggcaaagtgggttgacttcagaccctgccctgctttaggcaacagtacatcttttataaagattccaggtaacatgtcgtgtgcaaaaagtgttccaatgcttaccaattgtttaaaacaactggggtggttaatcttgaaagcagtcattctcaaatttggctgtatattggactcaccctttggagctttgaaaatactgatgcatacgatgtaaccatgaattcatttcactggttttgggtgtggcctggaaacccagatatgcaactctctattgatttccaygtgtagctgacatcaaggaccatcaccctag

SEQ ID NO: 141626 - DNA, 467 bp, Homo sapiens
ccaaatcttgaatgttttgctgcttagaaatttcatccaccggataccctaaatcatcactgtcaaattcaaagttccacagatcccaaggacaagggcacaatgcagccaacctctttactaatgcatagcaaaagtgaccttttctctggtttccaaaagttcctcatttctatctgagacctcctcagcctggacttcgctgtcaatatcactatcagcattttggccacaagaacttaataagtctctargatgttccaaatattccctcatcttcctgtctttttctgagccctccaaattgttccaactcctgcccattacctagttccaaagctgctacgttttcagatgcttttatagcaatgccccacttcttgataccaattttctgtattagtctgttctcacattgttgtaaagaaatacttgagactggttaatttataaagaaaagaggttta

SEQ ID NO: 141627 - DNA, 497 bp, Homo sapiens
tctgcctgccttggcctcccaaagtgctggtattacaggtatggctaccacacccagactgaaacatcattttaataagtctaaggctgttattaaaattatattagagattcttcccttcattaagcaaataattacaagattctggccatgatttttataatgaaagaataaactagatatagaaataatttttaaaattctcacacatgtatgtgtgtgtgtgtatatatatatacatacatacatacattcacttatttgtgtatcwactctctttttacctggctatatatggatcaaaatactaatatctgtatttttaaattaatttatttatgccctgcctgattaaaaattttttgaagcaattaaaaaattgttgtagagttcaaaagtttaagtatctctgggttaaagcattctcagcattttacctaaactaaaagagagaaataagaactgctgtttgtgtaaaaatagtacagttgaaatga

SEQ ID NO: 141628 - DNA, 600 bp, Homo sapiens
tatatatacaccatggaatcctatgcagccataaaaaagaacaacatcatgtttaatgtgggaacatggatgaaggtggagactatcatcctaagcaaaccaacacaggaacagaaaaccaaatacctcacgttctcacttataagtggaagctaaattatgagaactcatgaacacaaagaagggaacaacagacactggkgtgtacttgagggtggagagttgagggagggagaggagcagaaaaaaataactatagggtactaggcttaatacctgggtgatgaactaatctgtacagcaaacccctgtgacgctagtttacctacataacaaagcttcgcatgtacccttgaacctaaaataaaagttcaaaagaaaaagatggggtcataggcacttatgccaaatgagtagtaacatgatgattaagccaggccttggagtcagatggactgacacttgaattcagcttctgtgaccaagccgtatgatttggagcaaattgcttaacttttctcagtatcagtttctacatctgtacattaggaataatgatacctatcccagagagttgtttcaaggatcaaatgagtttat

SEQ ID NO: 141629 - DNA, 600 bp, Homo sapiens
tatatatacaccatggaatcctatgcagccataaaaaagaacaacatcatgtttaatgtgggaacatggatgaaggtggagactatcatcctaagcaaaccaacacaggaacagaaaaccaaatacctcacgttctcacttataagtggaagctaaattatgagaactcatgaacacaaagaagggaacaacagacactggtgtgtacttgagggtggagagttgagggagggagaggagcagaaaaaaataactatagggyactaggcttaatacctgggtgatgaactaatctgtacagcaaacccctgtgacgctagtttacctacataacaaagcttcgcatgtacccttgaacctaaaataaaagttcaaaagaaaaagatggggtcataggcacttatgccaaatgagtagtaacatgatgattaagccaggccttggagtcagatggactgacacttgaattcagcttctgtgaccaagccgtatgatttggagcaaattgcttaacttttctcagtatcagtttctacatctgtacattaggaataatgatacctatcccagagagttgtttcaaggatcaaatgagtttat

SEQ ID NO: 141630 - DNA, 600 bp, Homo sapiens
tatatatacaccatggaatcctatgcagccataaaaaagaacaacatcatgtttaatgtgggaacatggatgaaggtggagactatcatcctaagcaaaccaacacaggaacagaaaaccaaatacctcacgttctcacttataagtggaagctaaattatgagaactcatgaacacaaagaagggaacaacagacactggtgtgtacttgagggtggagagttgagggagggagaggagcagaaaaaaataactatagggtactaggcttaatacctgggtgatgaactaatctgtacagcaaacccctgtgacgctagtttacctacataacaaagcttcgcatgtacccttgaacctaaaayaaaagttcaaaagaaaaagatggggtcataggcacttatgccaaatgagtagtaacatgatgattaagccaggccttggagtcagatggactgacacttgaattcagcttctgtgaccaagccgtatgatttggagcaaattgcttaacttttctcagtatcagtttctacatctgtacattaggaataatgatacctatcccagagagttgtttcaaggatcaaatgagtttat

SEQ ID NO: 141631 - DNA, 546 bp, Homo sapiens
atatttatatgtacatgtttttgtatgtgtataaggatgtatttatatgcacgcaaatgcatactttgttgattagtgtctatcrttactgtgataattatcatttgaactagaaaaaataatcgagaccttttgacttcaacttagagtctgctccagcatggatataaaataaatacaaagacaactcccctaaagaccttaaggaataacaaaattttgtcaaagtctcctgtggacactgtaaatatgaataaacagtgtattacacagcaccacttctttactcatcttgttacctgaagtcttttattacataagtatctacccccatttctcttttctttctagctgagacacctgcacaaacatctctgcatgctttgtctttgccctctgaccacctctttattatatagacaatgcaggcttccttcagtttctaccattgtatctttacctgtggtaacacatcccataagtgatggtatcttttcaagatagaaaagatctttcctttaagagacaaagtaaagagaagaaggt

SEQ ID NO: 141632 - DNA, 603 bp, Homo sapiens
atgtcttaaatcaccagtgtctgcatgggagagtgctaatcatagaggtaggtggcatctctgcctgtcaggcggccttgaacgcttcagggaatctgtcatttttcaaaaggtatcaattagtggttgctctgatggcagagtgtgaaccacacctctctaatggttaggttgtgttaaaaatgattcctgtgagcataaagcacacacagacacgggtttcacagataccctggcaccaagacagactcccaagagaggtgggcatcccgagaaggcaaaaccagggagagtgggagcagcagaaggtattagcaactctaagtgggtcttaagatttttgagcagaagtgtgctgggggaaaggatgaactatggatccaaatgtatctaatgaygaatttaaatttaaaactatgccaacagatttgggtcctactgggaattaaagaagcattgctgtaaagatttacctcttaagaagtgtgatcgtggagataccatataggtatacacacctacacacagcattcctgttgccaacaatgcttcccaatatgtgtattactctatttgcatagaaggaaattgagtttggagaca

SEQ ID NO: 141633 - DNA, 253 bp, Homo sapiens
actttggaaaaaatgtcactgaatgttaaaatgaggctttaggaaatttcccggcacctgggctaattgctgatttatagccttcttggmtagttaatgaaatatgtgtctctcataaacttttaaacatgggttgggcattgctggtgtgcaagtagtaaaagtagatgtgcttttagaattgaatgtacacagaatagatgcccgccctgactcttctctgtgtgcatccacccagcacctcttcaagtct

SEQ ID NO: 141634 - DNA, 253 bp, Homo sapiens
actttggaaaaaatgtcactgaatgttaaaatgaggctttaggaaatttcccggcacctgggctaattgctgatttatagccttcttggctagttaatgaaatatgtgtctctcataaacttttaaacatgggytgggcattgctggtgtgcaagtagtaaaagtagatgtgcttttagaattgaatgtacacagaatagatgcccgccctgactcttctctgtgtgcatccacccagcacctcttcaagtct

SEQ ID NO: 141635 - DNA, 504 bp, Homo sapiens
gtgcttttagaattgaatgtacacagaatagatgcccgccctgactcttctctgtgtgcatccacccagcacctcttcaagtctgacattttctaatttagctgtctagaaatacaggtcccccctttgccttaagaaattgctctttgttaccagggaagtggtccccattcctagccaaaacagtaagagtatgtatgatttccctaaatacatccactctttctaggattcacacattcagacaccacaccccrtaagcttccatgcatgccagtgcaccaacacaccatgtacataccaacaaaattctcagggcagcatgctatcccacacagcctcaaatctagacagtgggccctctgtgctgtctcgaaaccaggcaatggctgacttcactacactctccttacttgctagtgtgaaggaagaattggaccacatacttagacagatgggtgattaaattaccaggggctatttttgctagctttccatatatct

SEQ ID NO: 141636 - DNA, 606 bp, Homo sapiens
cacacacaaacgatattaatcctaaaatatcttaggtaggcagcatgctgaggctgatattctgtacctcaaaagccactcaactgtaagatctctgaggtcaggaattttgtagtgcttgctgtattcccagtccctgaaacagtactggaacatagtatgttctcattcaatgtgtgccagataaataaataaataaatgcaaaggaaaaaaatcttccctccagttttgyagcagagagttcttaggtcaaaaacaagtgaaatgaagacttttcttagggactatattgtttgaaaaataagtatttttaaacaatagaatctcattcaggcaaagtcctcccctataaaaagtgtgaaggcctgggacagagaaagaaaagtagaatctcttctcttactctggggcatgggctcaccgcatagaagaggggacaagatcttctacatgatttaaacagttttcttttatttgctatgcacgtaaagttgaatttacataaattaaatgcacataagctgagattccactataattgcaaaaccattgcattggaaataagccttcattgaaatcacattagaaaccagaaagattaaatt

SEQ ID NO: 141637 - DNA, 620 bp, Homo sapiens
gaaatatgacatttcactgcatgtacccaaataggtttcaatctgtgtgccttaaattgattagctggagatgaagcttcgccaggccagcccactgtctgctcttgcactttattttcaggaaggcagttagtgttcagtgcttttcctctgtcacartcaaactacagaataccatagattgggtgatgtaaacaacagaattttatatctcatggttctgaagtctggaagaccaagatcagggtgctagtataattgagttttggcaattgccctcattctggcttctcactgtatccttaggtagcagagacagagatcatctttctcatgtctcttcttataggtgcacaaatcccattcatgagggctccactctccaggcctaataacatcccagagtccccacctccaaataccatcatattagggggatttaggctttgacaaataaacatgtaaatgtggggagggcacacaagcatttggttctcagcagcatccaaaatcaaggtacggtaggtagatcatgctagtctttgccttaactgctagtgtatacaccactttgaaatatcaaaggtattcaaataaaatttaaaaatgcatgtattaca

SEQ ID NO: 141638 - DNA, 435 bp, Homo sapiens
tgctcttgcactttattttcaggaaggcagttagtgttcagtgcttttcctctgtcacagtcaaactacagaataccatagattgggtgatgtaaacaacagaattttatatctcatggttctgaagtctggaagaccaagatcagggtgctagtataattgagttttggcaattgccctcattctggcttctcactgtatccttaggtagcagagacagagatcatctttctcatgtctcttcttatagrtgcacaaatcccattcatgagggctccactctccaggcctaataacatcccagagtccccacctccaaataccatcatattagggggatttaggctttgacaaataaacatgtaaatgtggggagggcacacaagcatttggttctcagcagcatccaaaatcaaggtacggtaggtagatcat

SEQ ID NO: 141639 - DNA, 479 bp, Homo sapiens
ttatgggtgcatttggagaactgcaagtcctgggtatggctggagtttgggttcatgtggaacccaacaagggacaggcttcagaagtagactgaggccagatcctcaaagccctcgaatgccaggataagaaatttcaacttcatcccatagggtatgggcaatagggagccatggaagatttcagcagagaagagtcactgtcagatcwatgctgggggataggcagggaatagatgcttctatgagaaaagagtgaagcgtctggaaatttgccctcttattcaacacctgaggggctccacagttaatattcaccttcagcagagctgacctcctggacctcattttaccctagccctgtttctttgccactgggtgcagctcagcatgaagagtgcatgagtgagagccacgggcctccttaggggaaaaagaacaagtactgcccaagttgctacattgctcatatgcattgt

SEQ ID NO: 141640 - DNA, 596 bp, Homo sapiens
gagcttttgctaactctaattttcttcctttctgggttcagcacacaccattctgtcctcagttcctataagggatggttaatccagcatggcttaaatggagcccttttctgcatcctcctctgctcctctgacctgggcccttgtttcttttaaacaaccctctttacacaccaaactgtcatccaatccccttcctccttccttctctaactctcacttatgctttccacaccaacaaacctagtgtccacttttacccccgaatttagtggtgcttcagaaagaagctcctggtcccttgaaatcatagttggattatttcattcatgcctggagagggtctcccatcycccttcaaagaagcagaacaatgtagaaaagaaaaatggctgaacaccctgcacgattatggataaagggaaaagtcagtaaaatcctttcctgatatacacggtaaaacctggagtaaaagaaagcagcagagtgtgggattcggggtaatggaattttccggatacttaagacttaatctttctacagcgtacgaatcctctttcttgtatctgtaagagtagcactacagccataatgac

SEQ ID NO: 141641 - DNA, 538 bp, Homo sapiens
agaatgtaatacattaggttgccttgtaattaaagaagtgacattggatttctgttcaagtaggaatattaaaacaatyacctctttgacagattaaaatatatttaaaatgtaataatcaactatccagttcatgagaaataacattttcattattgaattctttaaaacataatgtgaagggggatgaaagtatctcacagcttcctaacctctaataacactgtctcctttcagtaatgctgtttctatatttatggagtgaagaaacttcactcaggagcttcttgataaaatacctccatacatatttccctggaagcaggctctctgctgtgccagcaacatatgctaaaggccaatttagaacattttaaatatgcaccatacccttccttttccagctactaaaatgaaatgcattttggctttagcaaatgaggatggaatgaaaggaggaagactgcagggcaaagtggctaaagatgaactcagagaaggaggattatggtgctgctcctctgcagcctgaagccca

SEQ ID NO: 141642 - DNA, 538 bp, Homo sapiens
agaatgtaatacattaggttgccttgtaattaaagaagtgacattggatttctgttcaagtaggaatattaaaacaattacctctttgacagattaaaatatatttaaaatgtaataatcaactatccagttcatgagaaataacattttcattattgaattctttaaaacataatgtgaagggggatgaaagtatctcacagcttcctaacctctaataacactgtctcctttcagtaatgctgtttctatatttatggagtgaagaaacttcactcaggagcttcttgataaaatacctccatacatatttccctggaagcaggytctctgctgtgccagcaacatatgctaaaggccaatttagaacattttaaatatgcaccatacccttccttttccagctactaaaatgaaatgcattttggctttagcaaatgaggatggaatgaaaggaggaagactgcagggcaaagtggctaaagatgaactcagagaaggaggattatggtgctgctcctctgcagcctgaagccca

SEQ ID NO: 141643 - DNA, 347 bp, Homo sapiens
aattccatgatatgttcttggagttattaataaaaataactgctggttgacaggaaaggcatatggcaaatttaagatgcatggccacagtattttatttaaaaaaaaaattctttcctacaccaggggtgagwgtgtgtgtgtgtgtgtgtgtgtgtgtgtgtgtgtgttttacgcaccagaaaaaccttcaactctgacaagccattgacgaggtgtttcagtcttcactagcttcctatttcattgctctgccattgagcccttgtaatactacgatgaataaagtaatcaaagcaattggctgcctgagatcttttttaatgcactgcttcggacgcagtaca

SEQ ID NO: 141644 - DNA, 594 bp, Homo sapiens
ttcactctactctgagctttgccgttaatgaacttggcaatgttagccaagtgacttcacctttctgggtgtcagttactcaactataaaacatgaacataggataaatgatcttcaggcccacttcactttaaccatctatttttctgtagttctagcctttgttctgctttgttgttctacatttctttttttttttttttycatgtgttccaattgattttttttgagatggagtcttgctctgtcacccaggctggagtgtggtgacgtgatctcaactcactgcaacctccacctcccaggttcaagctattcccaattcctccacctaattttttgtatttttggtagagatggggttttgccatgttggccaggctggtctcaaacttcagacctcaggtgatccacctgcctcagcctctcaaagtgctgggattacaggcgtgagccagtagcctccaattgatattttgaggtcctaaaataaaacagttaatttaaacgtaaatttgaaggaagaaatgctccttaagttaaagaacaaagaattgtcaggtatacgtttatggaaaagtatattttggtgtc

SEQ ID NO: 141645 - DNA, 383 bp, Homo sapiens
tcagcaatatcctgaagttttcaataaaaaaagactaaaattattctgtctcttcccctgatgtacaatggatgattaaagtttctcttgcacacaataagaaaatacttcttaaaaaccactgaagtgatttggttactgtaacaattgttttaaatggtgttgtgagatagacagcggttcaatgcatagtttcccttacgatttaagcaaataattgaggatacccatacggaggttttcagcactctgttttctgtatcacaatttttttttataatgatgtactagtttataactgcagtttattgtctcacsacttccaaaaaggctttagcactccaggttccaggcaccttgtttctcacctttgtaccttttgg

SEQ ID NO: 141646 - DNA, 615 bp, Homo sapiens
cccttgtatttgaatataaaaataaagcctacaaattaaaaaaaaaggcagcgcaaaaaaaattgggctgaaaacttgatcagacacttcataaaccagagtatcgtaatgagaatacacatatttagaagatgtgcaattttattagttaccatggaaatgcaaatttaaatcacaaaaagatgctatgcaccctcactagagtgactaaaatgaagaaggcaggcaatatcaagtgttagcaagaacagaacacaatagaaacttctatacattgtctatagaattacaaattggtagaaaaggcatgttctgtgatcaagttactccacttttcttacttttctggtgtatatataatggcaaggtgaacatatrttaaccaaaacacatgtaggtactcatagaagcatttctagtaataatcataattttgaaacaatccacatatttttaaataatagagtggctaaataattcatgacatatttataaaatacaatgacacacagtattagttctcagttgggagtgatcttgctccccactcctcaggacatttggcaatgtctggtagacatgttttattgtcacaactggtgtaaatgctaatgg

SEQ ID NO: 141647 - DNA, 545 bp, Homo sapiens
agcactgagtagaaataaacataaagatgagaacaataagcactggagaatacaagagggaagaggcagggggttgggcaacggctgaaaagctacctgttgggtcctatgctgactacctgggagacagattcactcatactccaaacctcagcatcacagaatatacctttgtaacaagcctgcacacatacccccagaacctatcataaaagttgaaaaaaaagtggagttgcaaacaaaatagaataaaataaaagagttaagttgtgaacactttggaagtgttatattcctgggtgcttataagtctggatatcatgccccatagtagttggatatgggagtgaggaggtcagaatacaaatawgtgagaaagatgcatcggagctttgtgagtctttggtgtgtaaatgataatttaatcaataggtatggttgaaatattccagggaatgtatagagcaagacaaaaattaggacccattacaagggaacagctacctgaaacaatagacatttaaagaagagtttgcaaagaaggc

SEQ ID NO: 141648 - DNA, 397 bp, Homo sapiens
tttcatatctcttttgtacagatgagaacaccgaggctaggtgaaatttaaaaaaaaaaaaaatctgccaaaggaagacagcttaataatgtgccatgtacgtgacagacctggggttcagaatggtttatctgatggcaacgcccaggctctaaacaactacactgtgctataaccttgggtgagggagtcagtatccacatctataaaatgggtataakgacaatgttcctaactcacagggtcattataatgactgaaaaagatgaaaatcattttacaagttgcaaagaaaaaaaatcatttatacaattgtgaggagagagtagagttagcataaaaagaaagttaacatcaaatgactgagttgaagtatattcattaattcatacaacaa

SEQ ID NO: 141649 - DNA, 511 bp, Homo sapiens
ggaaattgcataacagttatgttaatgtctatacagttttcctaaaaaaagatggaacttttttggtgaagaatgagattacagaggaaaccttaataactttcctcaaagtcttagaaataccatggtttttggacccagacctggataagaataaggcccattcacccactcatttctgatctygagcaggttacttgacttctcccaggctcagtttctttgtctgtaaaatgggtattagagtatccatctgccagagggagagaaacatcctaaagaagtacttttgaaaacgattgcaatcaaggtaagttaaagaacaagcatggcagagatgaaggtgggacccatattcaactctctgtcttctaactgcagcaggtacatgtttgtcctgagcagagagagctcctgtagtcactctgatttagtgactcagcagaagagatactggagagagagagattgagagttcagagtttacaagcttataagctctatgaacttg

SEQ ID NO: 141650 - DNA, 511 bp, Homo sapiens
ggaaattgcataacagttatgttaatgtctatacagttttcctaaaaaaagatggaacttttttggtgaagaatgagattacagaggaaaccttaataactttcctcaaagtcttagaaataccatggtttttggacccagacctggataagaataaggcccattcacccactcatttctgatctcgagcaggttacttgacttctcccaggctcagtttctttgtctgtaaaatgggtattagagtatccatctgccagagggagagaaacatcytaaagaagtacttttgaaaacgattgcaatcaaggtaagttaaagaacaagcatggcagagatgaaggtgggacccatattcaactctctgtcttctaactgcagcaggtacatgtttgtcctgagcagagagagctcctgtagtcactctgatttagtgactcagcagaagagatactggagagagagagattgagagttcagagtttacaagcttataagctctatgaacttg

SEQ ID NO: 141651 - DNA, 511 bp, Homo sapiens
ggaaattgcataacagttatgttaatgtctatacagttttcctaaaaaaagatggaacttttttggtgaagaatgagattacagaggaaaccttaataactttcctcaaagtcttagaaataccatggtttttggacccagacctggataagaataaggcccattcacccactcatttctgatctcgagcaggttacttgacttctcccaggctcagtttctttgtctgtaaaatgggtattagagtatccatctgccagagggagagaaacatcctaaagaagtacttttgaaaacgattgcaatcaaggtaagttaaagaacaagcatggcagagatgaaggtgggacccatattcaactytctgtcttctaactgcagcaggtacatgtttgtcctgagcagagagagctcctgtagtcactctgatttagtgactcagcagaagagatactggagagagagagattgagagttcagagtttacaagcttataagctctatgaacttg

SEQ ID NO: 141652 - DNA, 511 bp, Homo sapiens
ggaaattgcataacagttatgttaatgtctatacagttttcctaaaaaaagatggaacttttttggtgaagaatgagattacagaggaaaccttaataactttcctcaaagtcttagaaataccatggtttttggacccagacctggataagaataaggcccattcacccactcatttctgatctcgagcaggttacttgacttctcccaggctcagtttctttgtctgtaaaatgggtattagagtatccatctgccagagggagagaaacatcctaaagaagtacttttgaaaacgattgcaatcaaggtaagttaaagaacaagcatggcagagatgaaggtgggacccatattcaactctctgtcttctaactgcagcaggtacatgtttgtcctgagcagagagagctcctgtrgtcactctgatttagtgactcagcagaagagatactggagagagagagattgagagttcagagtttacaagcttataagctctatgaacttg

SEQ ID NO: 141653 - DNA, 441 bp, Homo sapiens
tttgtttttttaagtttgtaatctccaaaagggcttataataccagtttttgcaatgaagcagtttacccgagaggaatcaataaatactaattaatgataataattaaggaggaataagtaggtggaagactgaactagaatgactaagtaggtttctttcatctgaggcaaatccctctctgcaatgcaagttttgtacyattggccctgcctgttgcattataattattttccacagtggaaaaacacaggccaataagtggaaaaacagatgtgcatgtcgtaactcaatcatgtactagcaatgtgaccttgggagaggcacttaatctttttgaacttgcatatctttgtctataagaagaaaagattggcatagatgatattcatgtccacttctagctctaaaattctactctgttctgtcttatgttatttt

SEQ ID NO: 141654 - DNA, 624 bp, Homo sapiens
acttctcgctgctggatttcttacactgcttcttttactaaaatctgtcactagaatccttcaactttattatttaaaagaagaatatgatgatttaagtcctctccattttcctttyaatagctgattttcaaactttcttatttagtaaaggaaaaattttttaaaagacatattaggtagaatgtcaacacataaaatagtaaaaaataacactatgttagtcgaggacattggggagggggctgggaaggtagtgatggcagatctaggccacctacacacatttcccatcctcacccaactatgcacctctgtaccttccagagaacaaaatttaaaaaccacaaattcataatacaatacaacctctgtcttaaggaatagttgagtattttccattagaaaaaaaatgagcctacaagatatcatcagccttccattaatatggttatcacttgtcttttgctcccagactattaaaacagtatattgtaatttactaccaacaatattcattctctaggaatagtttgtaaattacaagatgttatcttgaattctctttaaaaaacccttgaatgttaaattttgaaaaaaaaaattggtcttcatctgttaagc

SEQ ID NO: 141655 - DNA, 394 bp, Homo sapiens
gtctattttctgtgcccaaaagcatccattctctgggactggaaattgactcctccttcccatagtttctgttatttcttctgtgtcatgcctcctggagaaaacaacagcagaagcagaagcagaatgccttgatgatgaatgaagaagagctgggagagagaaggaaaccctgagaacaaaaacatgtctgtggatatttcaacaatatctttctgccctcatcaatatcagtgtcatcatcatcacygttatcacaatctgcaccatcatcaccatcacacatgtgcatttattgaaggcctattgggggcctattgacaattagggtgattaaataacttgcctaacacaatggttctcaatcaaggactattttgtccccaggagacat

SEQ ID NO: 141656 - DNA, 477 bp, Homo sapiens
gtgtgtctttgtaggtgaaaaataaagatattccatgccaatggaagccaaaaaaagagcaggagttactatacttactatatcagaaaaagtagatttcaagaaaaaacctgtaagaagagacaaaagagtcactctataataataaaggaatcaattcagtaagtggataaaacaattatatatatgcccaacttgggagcacccagatayatagaggaaatattagtagagctaaagagagaggccccaatacaataatagctggagacttcaacaccccatttttggcattgaacagaccttctagacagaaaataaagaaacattagagctaatctgcaccatagaccaaagggatctaacagatatttatagaacatttcattcaagagctgcagcacgcacattcttttcctcagcacatggatcattctcaagacaagtcaaaatgagatatcatcaccccagttaaaa

SEQ ID NO: 141657 - DNA, 477 bp, Homo sapiens
gtgtgtctttgtaggtgaaaaataaagatattccatgccaatggaagccaaaaaaagagcaggagttactatacttactatatcagaaaaagtagatttcaagaaaaaacctgtaagaagagacaaaagagtcactctataataataaaggaatcaattcagtaagtggataaaacaattatatatatgcccaacttgggagcacccagatacatagaggaaatattagtagagctaaagagagaggccccaatacaataatagctggagacttcaacaccccatttttggcattgaacagaccttctagacagaaaataaakaaacattagagctaatctgcaccatagaccaaagggatctaacagatatttatagaacatttcattcaagagctgcagcacgcacattcttttcctcagcacatggatcattctcaagacaagtcaaaatgagatatcatcaccccagttaaaa

SEQ ID NO: 141658 - DNA, 625 bp, Homo sapiens
atctcaaattattgagccttatctaattccaaaggtttgaacacccagagagggttgcttttactaattcatccatccaaaatggttgcgtatttgtgatttatacaaatgttcatatccatattccttttcacacaaaggcatgagatgtgctagggtagctcagaatttgacttgattttttgttttcttcagtcggacatcccttgttgtgaactcacgacttgaatgctcttagcacatacaatctctatcgaatgttgctcagtctccactattttttacgtggttatgcttggtccttggtacctttgcattcatgatggtactgtactttgtgtttttctgaactgaaattcttccacggaccatagcaaaacactttgtgccgtacttttttttttctaagtaggctcagcgggatattctagaaagaacactgcagcaggagtcaagaaacctcacagggaactgctcgttacttgagggagtytggaaaagttgctttgccaatctgggcattgtttctcctcactgtatattaaatgtgtcaaatccaaacactggaagcagggaaaggaaagaagaagatgaaagactccatgttctgaaatgatgtcaatga

SEQ ID NO: 141659 - DNA, 625 bp, Homo sapiens
atctcaaattattgagccttatctaattccaaaggtttgaacacccagagagggttgcttttactaattcatccatccaaaatggttgcgtatttgtgatttatacaaatgttcatatccatattccttttcacacaaaggcatgagatgtgctagggtagctcagaatttgacttgattttttgttttcttcagtcggacatcccttgttgtgaactcacgacttgaatgctcttagcacatacaatctctatcgaatgttgctcagtctccactattttttacgtggttatgcttggtccttggtacctttgcattcatgatggtactgtactttgtgtttttctgaactgaaattcttccacggaccatagcaaaacactttgtgccgtacttttttttttctaagtaggctcagcgggatattctagaaagaacactgcagcaggagtcaagaaacctcacagggaactgctcgttacttgagggagtttggaaaagttgytttgccaatctgggcattgtttctcctcactgtatattaaatgtgtcaaatccaaacactggaagcagggaaaggaaagaagaagatgaaagactccatgttctgaaatgatgtcaatga

SEQ ID NO: 141660 - DNA, 484 bp, Homo sapiens
cataccttttgggagtgtctctaacttttggaagtacaacccgcttatatattgagaagaggcagtctgctgctccattgctaaaactcctrggttttgattggcatgaaaaaagctacaggacacttttcaccgtacctcttgtgtgagatcgttttgggacagtaaaacatcttttgtttcttggccaagcaagataattaaaacgttaaaaataaaagcccctcaaatgttggcacatcaaattgtagtgcctaaaactgaagaacaggatcttctctgccacctgtactcatcactaacaacaacaaaaaaagaaaagataatagaacaatgcagttgggatcagttactttgtcaatgggtcatttttaatagcattgcaatatcaaagttacagtcattctttcctggattcccaacaacataggatgacacctattcttggtaactttgagaatgttatataatgctgggtgcaaat

SEQ ID NO: 141661 - DNA, 389 bp, Homo sapiens
atctttatggtttcaggtctcagakttaagtctttgattcatcttgagttgctttttgtgtaaggtgacagatgaggatccagttttattcttctacatgtggcttgccaattatcccagcaccatgtgttaaatagggtgtcctttccacactttatgtttttgtttgctttgttggagatcagttggctttaagtatctgggtttatttctggtttctacattctgttccattggtctatgtgcctattttcatgccagcaccatgctattttggtgacaatggccttatagtattgtttgaagtcgagtaatgtgatgcctccagatttattctttttacttagtctccctttggctatgtgggccctttttttttggttccatat

SEQ ID NO: 141662 - DNA, 466 bp, Homo sapiens
attgctcacaaggagctacaggcaagagacctggcagtgcttatgactaatggggctgatcacatggacacaagagtcctccagctgggtcctgaggccatggaggaatagcaactaaaaaactgaatgtgactgagtagtaattacaaaatagtatttaaaatataagctcatttttataaatatatacctgtgttatctctggatagtggtatgataaattttgcacacgcccccccttttatttgcttctttgtattttctgatttttctacaacgtacatgtatgacacattttcttttctttttttttttttttttttttttttttgagacagagtcttactctgtcatgcaggccggagtgcagcagtgcaatctccactcactgcaacatctgcctcccgggctcaagccatgctcccacctcagcctcccaagwagctgggactacaggtgtgcacca

SEQ ID NO: 141663 - DNA, 364 bp, Homo sapiens
agatctttatgtaccagcatatatatctagttcattctttgaactacagcataaaatgtcattgtacattagactaatttattgaatttatatacacatattcctatggtgagcatttatkttggatagatgccacatacaactgtttgtttacacaaatggagacatgctactcacacttgtacaattcacttttttacttcttgatgtattttaaatattgcttcagatcagctggcacagagccacctttctaaaaaaataatagacttccagcctgagcaatatggtgaaaccccatctctacaaaaaatacaaaattagctggatgcagtggtcccagctactcaggaggctgaggtgg

SEQ ID NO: 141664 - DNA, 532 bp, Homo sapiens
cagaagtaacagtttatctactgggcctaaatgacaagaagaagccatccatgggacactcatagggagaaacatttctggagcatgactagcacacgcaaaggctttaaggtggaagccagtgtggtgggtgtgaagtacagaaaccagtgtggatgggcagtggtgagtgaagtgggagcagaatgaggtcagagaagaagacaggcatccaatcatgtgggtggttgtaagctggggtgggaagtttggatttcattctaagtgggatggaagcattggatgatttttaagtaggagagtaacttgattggatttaagttccaaaaagttcactggctattctgcagaaaatggattttagtaagattggaatcagggagatcagttagaaagtatagcaatggtctaggcaagaggygatggcagctcagattagggtagtagaagtaaagaggagaaatggctgttgggattcatttgaagacaagttaactagatttgctattgcattgattttgggggataagga

SEQ ID NO: 141665 - DNA, 598 bp, Homo sapiens
caacactcttctatgacctcctactttctaagtgaaaatgaaattttcttgattcaaattctaagcatgatttttgttctgttaaattgtgtactggtagttggaaaattacttctaaaagcgggcagatggcaggtatygatcctcttgaatgcttgggttcaggaaattaaaagggtttgagctgagggtcaaggggtgtaaacaaagataagtgaaattgcagagtatagcttcatggtatgtgtggcagagattacttattgtctattctaatattatcctcttagaaacagaaccctgtgtgcttagctgaatgcatggccacctgaataaattctctgttcctcaacctcccttgcagagaggtgcagcaatgtgtttaagttctggtgtatgagttgtaagcagagatgtcttatgacagcttctgggaaacctctgtaaagaaccttcttttttatcccttattcatttctgctacttggcatgcagatgaaatggcgtgagcctcagcgacattttggaccaggcagtgatgttaagagtgtcactcttgtagaacagtaagaacaaaagtgtctgagccctggcatca

SEQ ID NO: 141666 - DNA, 562 bp, Homo sapiens
atcaaaatttcaatgttgcttttcatgataaaatctaatgtcagagctcaggagaagacctcaggaacaattttattttgggaattatttagagggtggtgaagaaaaagagaagagaattgaaagaggatacatgggagagaggaagagataaaaggaagagagaaggaaaagaggagagaaagagagaccgagactttgagttcatctatttcaattatcttactttacaaatttattcaagttgggaccaattcttgccctcaaggagtttacaggcaagcagacgagacaggctctgaacagttattacaagaagaagyatagggtgctaggcgggagtataacaggggacccagactcgtgtgctggctcagaatgagcatctcagaagaagcaatgtttccgctgagaaataaaggaaaagtggaacttaaatagaggaatgcacgcaaagatttcaacttacaaaaagtcagtggtggtacaactaaaatccctggatgttatttatttaaaaaaaaaacaaaaacaaaaaaaataagaagactgtgaaatgtgg

SEQ ID NO: 141667 - DNA, 562 bp, Homo sapiens
atcaaaatttcaatgttgcttttcatgataaaatctaatgtcagagctcaggagaagacctcaggaacaattttattttgggaattatttagagggtggtgaagaaaaagagaagagaattgaaagaggatacatgggagagaggaagagataaaaggaagagagaaggaaaagaggagagaaagagagaccgagactttgagttcatctatttcaattatcttactttacaaatttattcaagttgggaccaattcttgccctcaaggagtttacaggcaagcagacgagacaggctctgaacagttattacaagaagaagcatagggtgctaggcgggagtataacaggggacccagactcgtgtgctggctcagaatgagcatctcagaagaagcaatgyttccgctgagaaataaaggaaaagtggaacttaaatagaggaatgcacgcaaagatttcaacttacaaaaagtcagtggtggtacaactaaaatccctggatgttatttatttaaaaaaaaaacaaaaacaaaaaaaataagaagactgtgaaatgtgg

SEQ ID NO: 141668 - DNA, 562 bp, Homo sapiens
atcaaaatttcaatgttgcttttcatgataaaatctaatgtcagagctcaggagaagacctcaggaacaattttattttgggaattatttagagggtggtgaagaaaaagagaagagaattgaaagaggatacatgggagagaggaagagataaaaggaagagagaaggaaaagaggagagaaagagagaccgagactttgagttcatctatttcaattatcttactttacaaatttattcaagttgggaccaattcttgccctcaaggagtttacaggcaagcagacgagacaggctctgaacagttattacaagaagaagcatagggtgctaggcgggagtataacaggggacccagactcgtgtgctggctcagaatgagcatctcagaagaagcaatgtttccgctgagaaataaaggaaaagtggaacttaaatagaggaatgcacgcaaagatttcaacttmcaaaaagtcagtggtggtacaactaaaatccctggatgttatttatttaaaaaaaaaacaaaaacaaaaaaaataagaagactgtgaaatgtgg

SEQ ID NO: 141669 - DNA, 574 bp, Homo sapiens
cataaatttgaatcacccatgctaatgaggatgaggttggttggaagaagtacaaaagcaagtttgttacctgtgagtgagcctagataactactcagcatccacatcacatcatatcacatcgcaactttgttctgacagagcaggagcatcgccatcttggacaagcccctcattctaaagttcaccttaataaaaaaaaaactgcctaaatccaaagggcatcagtctaatgactaaggtcggcatgaccataaaccacaaataacatctctaaccagaaacattccaaactcctccccagccagagacaggctagcccyaagataaaccccctccagctgggaagatgccagtctcgagatgacatccctctggccggaaagatgcctgccccaaggcaaactcccctccacccagagacattccaaccccaccataaaacttctccctcaaacagtaacattcgaagcttctgataagccccctcaccctaaaactaatacatactcttaatctgtaagagaaagcactcctgatagaaattggccaggagtgtctctcaggttttaac

SEQ ID NO: 141670 - DNA, 574 bp, Homo sapiens
cataaatttgaatcacccatgctaatgaggatgaggttggttggaagaagtacaaaagcaagtttgttacctgtgagtgagcctagataactactcagcatccacatcacatcatatcacatcgcaactttgttctgacagagcaggagcatcgccatcttggacaagcccctcattctaaagttcaccttaataaaaaaaaaactgcctaaatccaaagggcatcagtctaatgactaaggtcggcatgaccataaaccacaaataacatctctaaccagaaacattccaaactcctccccagccagagacaggctagccctragataaaccccctccagctgggaagatgccagtctcgagatgacatccctctggccggaaagatgcctgccccaaggcaaactcccctccacccagagacattccaaccccaccataaaacttctccctcaaacagtaacattcgaagcttctgataagccccctcaccctaaaactaatacatactcttaatctgtaagagaaagcactcctgatagaaattggccaggagtgtctctcaggttttaac

SEQ ID NO: 141671 - DNA, 574 bp, Homo sapiens
cataaatttgaatcacccatgctaatgaggatgaggttggttggaagaagtacaaaagcaagtttgttacctgtgagtgagcctagataactactcagcatccacatcacatcatatcacatcgcaactttgttctgacagagcaggagcatcgccatcttggacaagcccctcattctaaagttcaccttaataaaaaaaaaactgcctaaatccaaagggcatcagtctaatgactaaggtcggcatgaccataaaccacaaataacatctctaaccagaaacattccaaactcctccccagccagagacaggctagccctaagataaaccccctccagctgggaagatgccagtctcgagatgacatccctctggccrgaaagatgcctgccccaaggcaaactcccctccacccagagacattccaaccccaccataaaacttctccctcaaacagtaacattcgaagcttctgataagccccctcaccctaaaactaatacatactcttaatctgtaagagaaagcactcctgatagaaattggccaggagtgtctctcaggttttaac

SEQ ID NO: 141672 - DNA, 543 bp, Homo sapiens
ccaatggtccattgagtgcaggcttcttgtcttatctgcatccctgttccacgtagcttccctgcccttccttacacayagtgggtgcatcagttcatggtgtttactccaaagccatgacccacaagaaagcgttatttccagtgggggtctttaacaccaatcttttatcactgataattgaatgagcaattctgttttgttaagagctccctgtggatgcaccttttgagaactgctttagaaaatttttgtttggtctaatattactctcttccaagcctcctacataaatcagagcttctcaaggaaggattagttttatagcaaagtaaatatactgtttgaatttagccacctttagtttcaacttattcctgctcctcttaagacaagtttgtgtttttagtaataatcagctatttctgagactcttagagtggagaatttgtgaagtgtttagaatctgactctgagactcctttgtggggatacatttggtcagcacagctctggtattagggaaatgaacctgcgagatag

SEQ ID NO: 141673 - DNA, 543 bp, Homo sapiens
ccaatggtccattgagtgcaggcttcttgtcttatctgcatccctgttccacgtagcttccctgcccttccttacacacagtgggtgcatcagttcatggtgtttactccaaagccatgacccacaagaaagcgttatttccagtgggggtctttaacaccaatcttttatcactgataattgaatgagcaattctgttttgttaagagctccctgtggatgcaccttttgagaactgctttagaaaatttttgtttggtctaatattactctcttccaagcctcctacataaatcagagcttctcaaggaaggatyagttttatagcaaagtaaatatactgtttgaatttagccacctttagtttcaacttattcctgctcctcttaagacaagtttgtgtttttagtaataatcagctatttctgagactcttagagtggagaatttgtgaagtgtttagaatctgactctgagactcctttgtggggatacatttggtcagcacagctctggtattagggaaatgaacctgcgagatag

SEQ ID NO: 141674 - DNA, 543 bp, Homo sapiens
ccaatggtccattgagtgcaggcttcttgtcttatctgcatccctgttccacgtagcttccctgcccttccttacacacagtgggtgcatcagttcatggtgtttactccaaagccatgacccacaagaaagcgttatttccagtgggggtctttaacaccaatcttttatcactgataattgaatgagcaattctgttttgttaagagctccctgtggatgcaccttttgagaactgctttagaaaatttttgtttggtctaatattactctcttccaagcctcctacataaatcagagcttctcaaggaaggattagttttatagcaaagtaaatatactgtttgaatttagccacctttagtttcaacttattcctgctcctcttaagacaagtttgtgtttttagtaataatcagctatttctgagactcttagagtggagaatttgtgaagtgtttagaatctgactctgagactcctttgtggggatacatttggycagcacagctctggtattagggaaatgaacctgcgagatag

SEQ ID NO: 141675 - DNA, 571 bp, Homo sapiens
tactttggtgttaaatatattttattgtcttctctagcgatgcctttgattaccctcygtccccatccctgggcttagatcccaagtaggaagtccctgcctttttcctgcaggcccacgtggtgttcacagccctgcctaatcataagaggatcatatgggtgcctcttaagggcatagagctctggtgcctgcttgagtcccattaaatcagaattttcctgggaggggcctggggatctgtattttaagttccccttatcattattcttctctgcaagaattctcaggctcagatctctgaaaatagcagctccctttcccatggatccaactttgatgtcctggagacctcagtttataattgcatcataaccctgtcttcccacttgaaggtttatcctctggtctgtaaaacttgtcctttaaggaggaaaggaattcatgctttcttctttcttccaaggtagaatttttctggacaggatgctgagtagataggtgggtatggacagtagaaaaatgaacattgcaagaaggttcatggaggcctttgaaaaggaagagggtg

SEQ ID NO: 141676 - DNA, 571 bp, Homo sapiens
tactttggtgttaaatatattttattgtcttctctagcgatgcctttgattaccctccgtccccatccctgggcttagatcccaagtaggaagtccctgcctttttcctgcaggcccacgtggtgttcacagccctgcctaatcataagaggatcatatgggtgcctcttaagggcatagagctctggtgcctgcttgagtcccattaaatcagaattttcctgggaggggcctggggatctgtattttaagttccccttatcattattcttctctgcaagaattctcaggctcagatctctgaaaatagcagctccctttcccatggatccaactttgatgtcctggagacctcagtttataattgcatcataaccctgtcttcccacttgaaggtttatcctctggtctgtaaaacttgtcctttaaggaggaaaggaattcatgctttcttctttcttccaaggtagaatttttctggacaggatgctgagtagataggtgsgtatggacagtagaaaaatgaacattgcaagaaggttcatggaggcctttgaaaaggaagagggtg

SEQ ID NO: 141677 - DNA, 587 bp, Homo sapiens
catttcatttcttgagtgatgggtaactttggtgtatgttatatcctcttctaaactttatagcagtctgaaatatttcatgatttaaaaaataaagtgagtgctctcttttgggttttcctggataacataatgcttctggctgttaatggctgtcctagtaggcaagaaagcacagcttcccacatatccacattcctggctctgtaagcttgagctcagccagtaatcgttttgtaataatacctagtggtattattgaacatttatgctatgccaggcactgtgcccagtgctttcagagggtgatcttgtttaatcctcataacaatcctacggggaggagggtgtcattattatcctctgtttacagctaagaaaactgaggctcagaagtttggtaacatggccaacttctcacagctaggaaggtgcagagccaggatttgaaagcaggcctctaggatttgtgttctcacaaccataccattgcttcctagttgggagagtgagggatgccttcggcttggtttggatgctgtcrgtttgcctgttccctcccacaagatactctcacccagacacca

SEQ ID NO: 141678 - DNA, 548 bp, Homo sapiens
attaactttattgcaaggagaaggatttaattgcagagagtgattagccaaatgcttagatcaatagaatgcaggtcaaactgtgctcagaaatatccatggctcttattacatagaaagttgaggacacagaaaccatttggggaccctgagccatttgtgcatgaagtcatctgcaaacctttccctagaccgcagaagcatccttctctttacccagcaatgatggcatgctgactcaaggaacattcacccctccccccaactcttggcattagagaaagtcaataaaacagctgggatccttgaatgytgttttcaaaagtagagaaaggatcctgcctggtctagctctttgttgtctaattgcaacaaaaatcaatggttttgaaaatggaaagcagatagatcattcctcatttatccaagatatttgagcagaagatggagtgacattgtctaacatgctttaatttttgctctcaccaaagccctctttattcaatgagtctgtgtttgcactgttcttatgaagaaattcattgata

SEQ ID NO: 141679 - DNA, 535 bp, Homo sapiens
ccttatcagaactcaaggaaacacatctcagccatatccttgcatgcaataaatctcttttatttctctaaaggacaaattgaacactaaatacaatgcatatttttgttaaactgtaggtkggcctaaagaaatgaatgaagaatatgataggcaaggatttgattttttcctcctaaaacatgaggtcccgatgtcaaacaaaataaatatgttgctaatagttcacaaggtattattatgttacgatggtttttcaagggtcttagcaaataaaatggaaagtattagaaacaagcgtgccagttataataccatgaatcacttagtattttttctctttctccctccctccttctagtttctggctaggagttgtggtattttgaagaatattataaagtatgctctcttttggataatatgcatattttaaagcactgaatgcaatactgtacacacagtaggtaagagtaaaatacagaatgaataaactagtgttgattttcatcagcagcaggacccaatctttaat

SEQ ID NO: 141680 - DNA, 535 bp, Homo sapiens
ccttatcagaactcaaggaaacacatctcagccatatccttgcatgcaataaatctcttttatttctctaaaggacaaattgaacactaaatacaatgcatatttttgttaaactgtaggtgggcctaaagaaatgaatgaagaatatgataggcaaggatttgattttttcctcctaaaacatgaggtcccgatgtcaaacaaaataaatatgttgctaatagttcacaaggtattattatgttacgatggtttttcaagggtcttagcaaataaaatggaaagtattagaaacaagcgtgccarttataataccatgaatcacttagtattttttctctttctccctccctccttctagtttctggctaggagttgtggtattttgaagaatattataaagtatgctctcttttggataatatgcatattttaaagcactgaatgcaatactgtacacacagtaggtaagagtaaaatacagaatgaataaactagtgttgattttcatcagcagcaggacccaatctttaat

SEQ ID NO: 141681 - DNA, 431 bp, Homo sapiens
cttcttcttgtgtaattgaaatgttatatgctttgaatgacatcttcccatacccaattgctyccccttcccctatctcaacccccaactccgaaaaccagccccgggtaaccaccattttactttatacttctatgagtttgactttttttagattccacatataagtgagatcatgcagtatttgtgtgcttggatggagtttaaaattttacttttgctcttttgagataattctatttctcagttttctgtaataagcatgtataattttaaataccacaaagtaactcactcactttaaaaaacttttagtttctctgaatatgatggctagggaaacacttacttttttttttttttttttttttttcagatgcaatgatttcccagcaaaaggaaagcaaggacagggaatggagagataccaa

SEQ ID NO: 141682 - DNA, 447 bp, Homo sapiens
aatttccatgttgaagatagaagcacctccattatcctgagtcccagatggtcgaaaagaaaaggctaccctactcacttgttactgtaaagtgagcaagaaataaacttcatagtatttaagaccctattatctttggtattgggtctacttgttacagcagctagtgttatactaactaatacacttaagcaagttactacacctttctgagcctcgcttttctcatcttaacctargatagaagcatgttcttacaaaaatgcatatgtattggttagggtctcttttacagcaacagaactcatgttagacaatgtggagatccatttatgtctcacatgagaattcaggcataagcaattctgggctgttatggtggctccatggtgtcacgatcctagattccttccctcttgtttgttctgctatctctaaggcattgct

SEQ ID NO: 141683 - DNA, 440 bp, Homo sapiens
agtgcctgacgctgaaggcagaagaaagattccttgaaagataaattcaggactgtggctggtgctcagcctacatgtactacatgtagtacatgtaggcatttcacattaatcaaggtgattatttaagcctcagttcctatrtctacaaatagagaaagggttatggtgagaattacataaaaccacatttgcaaaatgcttaccagtgagctcagcacttagtgctcaataaatgataacaatgaccatcactactcaggaattaccaacgagccccttctgttgcaaaggccatctctgaaatgtagtttgagaaagtaactaaaagactataagcataaaattaaggttctttgagaaaataacccatatcagacatccagagttacagccatattaacagattcacaagctctggccagtagtactgatgcttt

SEQ ID NO: 141684 - DNA, 377 bp, Homo sapiens
gctcagcctacatgtactacatgtagtacatgtaggcatttcacattaatcaaggtgattatttaagcctcagttcctatatctacaaatagagaaagggttatggtgagaattacataaaaccacatttgcaaaatgcttaccagtgagctcagcacttagtgctcaataaatgataacaatgaccatcactactcaggaattaccaacgagccccttctgttgcaaaggccatctctgaaatgtagtttgagaaagtaactaaaagactataagcataaaattaaggttctttgagaaaataacccatatcagwcatccagagttacagccatattaacagattcacaagctctggccagtagtactgatgcttt

SEQ ID NO: 141685 - DNA, 526 bp, Homo sapiens
tgaattcgtactatgtgtcaggcgtgatgccaggggctggcacgacgtggtgccccacagaggcagggagctgggtctcctgctgaggctrcgccatcttttatagtctcagggacgtctttccctgtccaggcctccgtttgtagacctgtcaagtcaagtgacaagatcaaatggccaatgggctctttcacttctgacagctaaggctgaccctgtaggtaaagtccagctgaaaccgaatcccgccactctttaatttcctcatctgtgaaatggccttgtcacaaacagcacctacttcacagggtgcttgtgatgattaaatgaaagaatagatgtaaattactaagtatgtgcctggcatcctctcaatgctgtctgttcaacaagctcctcattcttgctactgtgattctatctgacacctgccgcgtgcccttccttgtgccagacactaagcctggctctgtggaaagagcataaaagaccctccagggtacaccctccaggagtgctgcatgga

SEQ ID NO: 141686 - DNA, 369 bp, Homo sapiens
gaattcgtactatgtgtcaggcgtgatgccaggggctggcacgacgtggtgccccacagaggcagggagctgggtctcctgctgaggctgcgccatcytttatagtctcagggacgtctttccctgtccaggcctccgtttgtagacctgtcaagtcaagtgacaagatcaaatggccaatgggctctttcacttctgacagctaaggctgaccctgtaggtaaagtccagctgaaaccgaatcccgccactctttaatttcctcatctgtgaaatggccttgtcacaaacagcacctacttcacagggtgcttgtgatgattaaatgaaagaatagatgtaaattactaagtatgtgcctggcatcct

SEQ ID NO: 141687 - DNA, 369 bp, Homo sapiens
gaattcgtactatgtgtcaggcgtgatgccaggggctggcacgacgtggtgccccacagaggcagggagctgggtctcctgctgaggctgcgccatcttttatagtctcagggacgtctttccctgtccaggcctccgtttgtagacctgtcaagtcaagtgacaagatcaaatggccaatgggctctttcacttctgacagctaaggctraccctgtaggtaaagtccagctgaaaccgaatcccgccactctttaatttcctcatctgtgaaatggccttgtcacaaacagcacctacttcacagggtgcttgtgatgattaaatgaaagaatagatgtaaattactaagtatgtgcctggcatcct

SEQ ID NO: 141688 - DNA, 319 bp, Homo sapiens
tgaattcatggcctttgataagactcacctttttcctataattcatgatgatgatagtggtggtaatgatgatggtggtgggaatagtgattttgatgctcacgttgtaacttaatcttaaaaggcatattattgttttaaaaaattggagagackaaactacagtgtttaggagtgcacatttgggtgataatactataaaaacgacaatgaagtcattactatttgagtgacgatatgcagaaagaaatggggatgtggttgggatgaggctcagggaaggggcttatggggtgggcagcaaagttctatatttttg

SEQ ID NO: 141689 - DNA, 319 bp, Homo sapiens
tgaattcatggcctttgataagactcacctttttcctataattcatgatgatgatagtggtggtaatgatgatggtggtgggaatagtgattttgatgctcacgttgtaacttaatcttaaaaggcatattattgttttaaaaaattggagagactaaactacagtgtttaggagtgcacatttgggtgataayactataaaaacgacaatgaagtcattactatttgagtgacgatatgcagaaagaaatggggatgtggttgggatgaggctcagggaaggggcttatggggtgggcagcaaagttctatatttttg

SEQ ID NO: 141690 - DNA, 483 bp, Homo sapiens
aaatatgggattatgtgaagtcaccaaatctataaattactggcattcctgagagagaagcagaaaaagcaaacaacctggaaagtatatttgaaaaaataattcaagagaactgaaggagaaataaaatattttccagtcaagcaagcactgagggaatttgttaccactagaccagtcttataagagacctttaagggagttttaaacatggaagcaaaagaatgatacctgttaccacaaaaacacagctaaacacatagcctgcagaccctgtagagcaaaaacaccatagaaatacaaagcagacaactaacaacttcatgatatgctcaaaatttcacatgttaatattrattttgaatgcagatggtctaaacaccccgtttaaaagtcacagaagggcaagttgaattaaaaaaaaaaaaagactcattgacctgctgtcttcaaaagacctgtctcacacataatgacacccat

SEQ ID NO: 141691 - DNA, 387 bp, Homo sapiens
tccagcttgatcagagtccatgaaagaagcaataaggagtaactagaagctttctagatgtacagacatgtatggtcaagttggcccttaaacaattcacactctttttctctgtcctgatgcttagtctgcatcatraacccaaattcctccccagatcatctcacaagtacaaattgggcacataggcaggtaaatcaagttggcacatactatatattttatttgcatgtgtttattttctcattataatatccttaatggggtagacttcttattattatatttagggcatcctggactgatttactgaaatataactttatttttttacagctttattgaagtataactgacataaaataaactgcacatatttaaagtgca

SEQ ID NO: 141692 - DNA, 461 bp, Homo sapiens
atagagggataatggcatggaagcagcaatgaggaccaaggaggtcactgattcccatctccaggccagtggaatggcaggagtgggagagaaaacagccattatttagagagcagcagaggaaggagtgtccttaactgaggttcagatattactagagcaaaaaagtgaggaaaatgctcagagaaatggatgaggacacaggggattttgttagaaaatactttgagtactagaaagcacatgaaagtctttcaaaagccakggaggcttttcatttcaaaaggcatggaggcataaaagacggggtcagaaaaggcaacagacaaccctctagagattagtggtgaatgagagatgacttgaagtcttcctttcttgtggcagtttacacctacaagaatgagaatgggatattaggtcctatgttcctagggcagatagtggtgagaggctgtgag

SEQ ID NO: 141693 - DNA, 461 bp, Homo sapiens
atagagggataatggcatggaagcagcaatgaggaccaaggaggtcactgattcccatctccaggccagtggaatggcaggagtgggagagaaaacagccattatttagagagcagcagaggaaggagtgtccttaactgaggttcagatattactagagcaaaaaagtgaggaaaatgctcagagaaatggatgaggacacaggggattttgttagaaaatactttgagtactagaaagcacatgaaagtctttcaaaagccatggaggcttttcatttcaaaaggcatggaggcataaaagacggggtcagaaaaggcaacagacaacccwctagagattagtggtgaatgagagatgacttgaagtcttcctttcttgtggcagtttacacctacaagaatgagaatgggatattaggtcctatgttcctagggcagatagtggtgagaggctgtgag

SEQ ID NO: 141694 - DNA, 461 bp, Homo sapiens
atagagggataatggcatggaagcagcaatgaggaccaaggaggtcactgattcccatctccaggccagtggaatggcaggagtgggagagaaaacagccattatttagagagcagcagaggaaggagtgtccttaactgaggttcagatattactagagcaaaaaagtgaggaaaatgctcagagaaatggatgaggacacaggggattttgttagaaaatactttgagtactagaaagcacatgaaagtctttcaaaagccatggaggcttttcatttcaaaaggcatggaggcataaaagacggggtcagaaaaggcaacagacaaccctctagagattagtggtgaatgagagatgacttgaagtcttcctttcttgtggcagtttacacctacaagaatgagaatgggatattaggtccwatgttcctagggcagatagtggtgagaggctgtgag

SEQ ID NO: 141695 - DNA, 416 bp, Homo sapiens
gtgagtgtgtgataaaataggaggcctctttgacaacattttaagaaattaaactacaatagtaaaagtgacagggacaccttcctggagaacagtcctcatttttggtgcctctcacatggtatggaaaataatgatgaaaagtctcacctgggcacctagaggaatgtggccatcaaactttccacttccaatttctgttcatarggactcctgtctcttctcagcctggatcaataagaattgagttccccatgagcagacagaatgtgaacatctgaacttgaaagcgttgcctattctttatatatacatggtggtcccttgcattgtaacatttccaaatatgtgtggggaaagtggagatctaagtccctcacacaaaacctgttaggaagacccaagggcaggttaga

SEQ ID NO: 141696 - DNA, 527 bp, Homo sapiens
tcacaacaaaacttaaaaaacctgattttcctttttggggggaaggcaggtctggtgccattcacaaataacttatctattgctctattgctgatgtagtctttcaatgttggtttccaagtaacttcgttcataatcggcctagcaaaacatatattcatccaggaaaacttatggttgctaccaaaattattattatcttaaactgatttaactctccttccttatattttatgttataatgtctagtttaattttatgttgtttattgtgctatttttctgaaacataattaatgcttgttatttgcacctgatactgtttcactgcttttgtttccactgtcctctctctttaatattctctgtsatcattgtagacttgcattttcatctcctataaattcattctttttgaatctcttattttttctagctaattttacaatattcacactgcttaaacacttttcaaactttaataaattttgaaaaacgtataaataagttcttgatatatagcttatt

SEQ ID NO: 141697 - DNA, 493 bp, Homo sapiens
gaaaggcagatggatatgtggatacatggagaaagagaaagagatgacagaaccatgaatgctgctgtattatttggattaccagaatctctatgaaatatttcctggcaaaacgttgcaagactacatcttaaatttcaaaacaaatgcaccctgctgcagcctattaattcactgtaaccctctcagtggttcatctagatgactgctcagcttctctggtttctgcaaaaatctttcatttggaacaaaacctaattgatctgaactayttagcttttttgctgatctgctatgatcaaataatttacacctaaaaggcaagaaaatggatattctcactcacactgttaaagtaggattagtttcatgaacaagtaaggtcaagctcagaatggctcagcttaatggacatttattttccattacctttagcaatttggctgggtcagtgaaagggtgtggttgttcatgaacccaaaaaggtggagat

SEQ ID NO: 141698 - DNA, 493 bp, Homo sapiens
gaaaggcagatggatatgtggatacatggagaaagagaaagagatgacagaaccatgaatgctgctgtattatttggattaccagaatctctatgaaatatttcctggcaaaacgttgcaagactacatcttaaatttcaaaacaaatgcaccctgctgcagcctattaattcactgtaaccctctcagtggttcatctagatgactgctcagcttctctggtttctgcaaaaatctttcatttggaacaaaacctaattgatctgaactatttagcttttttgctgatctgctatgatcaaataatttacacctaaaaggcaagaaaatggatattctcactcacactgttaaagtaggattagtttcatkaacaagtaaggtcaagctcagaatggctcagcttaatggacatttattttccattacctttagcaatttggctgggtcagtgaaagggtgtggttgttcatgaacccaaaaaggtggagat

SEQ ID NO: 141699 - DNA, 531 bp, Homo sapiens
ctttctttcttttttttttttttaaagtgagtttcttggagacagtgtatctctcttcttatccatggtgccaatctctgtcttttaattggagggttaaatttattttcatggaagtaattacagataaggagggacttctgttatttcactacttgtttttataggctttactccttttttgtttctcatttcctgcattattttcttattttgtgtttagttgattttttgaattgaagtgtttaaatgtttcctcctttttctttgtgcatatactacagctatatttttatggttactatgggagttacatttgacattctaaaattatcacactctaatttgaatttatatagcttaacttcaataacacaaaactctgcctctttacagcttcattgccaacacattcarttgtttggtattcttatgaaatacatatagcatgtacaaggttttctgatatctcatcctcctttctcaactaccatcagcaatattgatagaagaattatgctttactgcatc

SEQ ID NO: 141700 - DNA, 673 bp, Homo sapiens
gtccactgtcaaagctaatttttgcatatactataacttcattgaacttcaggagaactcacagaacagtttgtaaagcattttgtgcttagagacctctagcagggaacttactacctcacaaagcattccattccattttggaccactgaaattgtcaactctccaaatgtggggttagcttgctataacctctgcttatcggccctggctctccactgaggagccatgttgaaatattatcacctttcccctgagagttcttcaaatacctgaagggctattgggttcacatctcgtcttttatttcyaggactaaacaatcccagtactagattcatttttttcttgttttctataatcagatcagcaatggcctgtggtctcaacccaaagcaaatgctgaattaggtaatggtacattggcaccacctttcctcaggtttcttcagcgattgcaaagtacaagaagccctgaaatatcaagagttcctgcactagttatgtttcttcacttgggcattgcaaacagtagcagtggcggaattctttggatctttgactgacctccatccccaacctattgtcaatctgctttggaagatacgctatcccttgtcagctctctaattaacttggctcccatctcaatgggactttgtaacctcatgga

SEQ ID NO: 141701 - DNA, 436 bp, Homo sapiens
cctatctggatctgtagcctgattgatagaaaggtctcagaaaagcatcagaaacacttatagaagactatgccaccaataaacttagtgaccctggactgcctgggttcagatgctgggctttgacacatacaagctctgtgaccttggcaagctatggaatatctcaaccatggttcagagagtagatgttactcacccaggttcacacagaaaactggcaaagcttggtctggaacccacagctcatgaccaaaggttgtgaaatagctgcccatgggctgggcccartttgcacatggacttagtttagacatcacagtgttttgaaaaatacttgattccactgccataatttaaatgaattgggagattttacttaaaactctagaatccagctcttctctgtatccttgttaatgaaacaagggtaatt

SEQ ID NO: 141702 - DNA, 364 bp, Homo sapiens
tgtgccaggccaaatagtaatcttttgaaaaaatttttttattttctttttctgagtagtaggtctcaacagcaggcctaaaatattcagtaaaccatgccataaacagatgtgctatcctctaggctttgttgtcctaatttacagaacacaagcagagtagatttagcataattcttaaagaccctaggattttaggaatggtaaatgagcattggcttcaagttagagtcactagctgcattattctctaactagagagtcagyctgttctttgatattttgaagccaggcattgagttctctccagctatgaaagttgtagatggcatcttcttccaatataaggttgtttgtctacatt

SEQ ID NO: 141703 - DNA, 512 bp, Homo sapiens
tttggcaccattgacattttggcccatattattctttgtgacgggggctgtcctgtagggtatttagcagcatctctggcctctacccacaagatgcattarcaccccccaccaagtgagataacccaaatttctcaagacgttgccaaatgtcctctggggagtaaaatcactcctggtgagagcaatggtccagaattctcatttcacccttgacattatcaacgggtaaaacagggcctcagagtcaaaggcccaaaaaggccaaggtgagatttacagaagaaagaggtccaatgtagaggtgtgtgctcctcacagcaaacactgagtcccaacttaccagaaactaatttagtactttgtgtgtattgatttattttcccacttcatacaccacaatcatctcccattttttagatgaggaattgaagtacaaagaggatcactcacccaaagtcacatgcctcctgagttgaactctatgcaacccaaggtcaagtatccacaga

SEQ ID NO: 141704 - DNA, 513 bp, Homo sapiens
tcacctttggcaccattgacattttggcccatattattctttgtgacgggggctgtcctgtagggtatttagcagcatctctggcctctacccacaagatgcattagcaccccccaccaagtgagataacccaaatttctcaagacgttgccaaatgtcctctggggagtaaaatcactcctggtgagagcaatggtccagaattctcatttcacccttgacattatcaacgggtaaaacagggcctcagagtcaaaggcccaaaaaggccaaggtgagatttacagaagaaagaggtccaatgtagaggtgtgtgctcctcacagcaaacactgagtcccaacttaccagaaactaatttagtactttgtgtgtattgatttattttcccacttcatacaccacaatcatctcccattttttagatgaggaattgaagtacaaagaggatcactcacccaaagtcacatgcctcctgagttgaactctmtgcaacccaaggtcaagtatcca

SEQ ID NO: 141705 - DNA, 389 bp, Homo sapiens
tgtgggctcatctgtctgcatttggaaatgtcccgctttaagtgtgggatttgaaaccaaactaatatcccacatgtggtctttctaactgagcccagctggcttgaagctgggtgcctctgaaggcagccagacygggagaagcaagctttcctttgctgggcttcttcactgatgctgagcccctctgggcatgttcttgtttctgtttctgctggaatctgagctgcactgggcatgacacatctactcttccacagagaaagagttgtgaatagaattccagttttctcctttgacatcacaaaagtccctgaggaggaagagggttttggtgtcttcctcccctcctggaggccctctggagaatctcagacaagtcttcctaa

SEQ ID NO: 141706 - DNA, 640 bp, Homo sapiens
caaattgagaaggcagtaatgagtcggatgctagttcaagtgtttatagtggggggtaataatcttacctctgaagtttcttcaaatctttagagtgcatatacgtcaccttcgaatcatgttaaaatgcagactttgggtcagtwgtttggaatgataccacaaactccgcatttgtaacaagcttgaaggtgatgttgatgctgctgatcccaaaatctaagcctcatgtgacactcaacgccatcagtccacttgatttttattcttatcctgtgatgagttgctttgtctcattatgtgaatcaggaaactgagccgtaggaagcttatgtttgagctgtgtgaccttgggcaggcagctaggctcatttcctcatctgtaaaatggggttgggggtacttctgcctgcattagaggactgctggggagagcaaatgaactaaagcacatcctgttcttagcacagcgcctggcacacagcagggactcagtatttggtcatttgtttattttctaggacttgatctaggttttcagcctccaaagctggggttctctctcccaggttagtagaaactaggggtcagctcagctagaggatgaggttaggaatgaaaatacttagcaataattgaa

SEQ ID NO: 141707 - DNA, 640 bp, Homo sapiens
caaattgagaaggcagtaatgagtcggatgctagttcaagtgtttatagtggggggtaataatcttacctctgaagtttcttcaaatctttagagtgcatatacgtcaccttcgaatcatgttaaaatgcagactttgggtcagttgtttggaatgataccacaaactccgcatttgtaacaagcttgaaggtgatgttgatgctgctgatcccaaaatctaagcctcatgtgacactcaacgccatcagtccacttgatttttattcttatcctgtgatgagttgctttgtctcattatgtgaatcaggaaactgagccgtaggaagcttatgtttgagctgtgtgaccttgggcaggcagctaggctcatttcctcatctgtaaaatggggttgggggtacttctgcctgcattagaggactgctggggagagcaaatgaactaaagcacatcctgttcttagcacagcgcctggcacacagcagggactcagtatttggtcatttgtttattttctaggacttgatctaggttttcagcctccaaagctgkggttctctctcccaggttagtagaaactaggggtcagctcagctagaggatgaggttaggaatgaaaatacttagcaataattgaa

SEQ ID NO: 141708 - DNA, 480 bp, Homo sapiens
attggaaaacagttattggtcatctactaagttcaaagtactgaaatagatgtgaacttggtgctagtgtgtgtgttttaaactatagggaactaatcttgagtaagatcgaagtagctgctcaacatagtcaatagcaaagttccagatgttttattgcatgtatttggaaaagagttaaagaaagaaatagagaaattatctgcttatagcaacctaaggctgcagcgttttctagaaggtaaagaaggacattgggatgcagcrtcagttccactgtggtgggaaatggttcacctgccttctccagacagaacaacttataatggggaagttaaagtgaagccaaacaaaacaacaggccacctaatttgatggatgttttatatctcccagaaaatgctgggctccatgccgacatacacaaggacagattttgtgcaggggtggagggtcaagatgactcatgactggaaaaca

SEQ ID NO: 141709 - DNA, 599 bp, Homo sapiens
taggtattttgtagcactgcagacttcaaaggcaatgtgtctagagaccagaacttcaaattcctttcatacttccttccctgaaaaatccaaggggcttacttttctgtaacaggtgaactgggctgctaagccttgtctgtgtctctgaagcctcctctgacctcctgggggaggttatgggtcccccttgtgcttccacaaagtttgcccttctggtcacacctacaagtctgtattgtaattgcctgcttatttgtagatcttcccaaataggctgtgggtaggaaaggacccagtcactgttgtgtccccagtgcctggcacagtacctgccacacaggaggtgctcagtaaataagtgtggaatgaaaaaacaaatgaataagcatggcccaaagtsagggccaggcatcctgtgctctcagctgcacctgcccctgcccctgaaagatcaagtaaaacagccaaatggtgatgctaggacagtgtccaggaggacacctggaatcttcccgtggtcactgccaaagaaaccaaggcagaggtgcaggaggatacacaaggagtgagaacacaggactcctgacgtccatgcc

SEQ ID NO: 141710 - DNA, 447 bp, Homo sapiens
taaattgaggtccacacagcagaaaaatcttatctaaggtattgagtattatttttagggcaagatctgaaacccaggacttctgacatactgtgaagactcttgataatttacctacaaatccctccatttctttttgtaggaagaaaccaaagagaaagaaaattagattttaaggcttggtgagggtggcggtttgcacgaacagsatggatttcccctgctcttgtaccagggtcctaatcaaactcacatttgaagtcccagaaccacagtgttcacagagccctgcataggtgtcaaagcagagtggagtccagattctagtggctgactctagtgcgtgtgatgagagaccttaggaaggaggagaggccagacagacccagagctgtgggctggctcttcctaactggtccaacatggcagacaacctatgcaccgttg

SEQ ID NO: 141711 - DNA, 508 bp, Homo sapiens
tatctcaagatcttcatagtgtaggggaarggtgtgatcaaggaaaagagttgaaagacaggccaacagaataggaaagctaatgggtaagtttgtagatagtggctggaatgggcaaggccacgcagcatgctgtgaggcagggcttccagagatgtttgttccccttttcatctgaatacaaatatacggcatataatcattttccaaaaattgatataaagcagaaaagcaagatatgtctgtctaaaagcaagatatgtctatataaaatgtaaactcatctactaatatagagcaatccctgaaagcttggacttttagaaacaaatttagtaattctaaaaaagtcaaatgctaccctctgaggccacacacagcactgagattcagaacgcctgattctgccatttaccactgggtgattttatttttatcatttaacttagctctaactctcactttcctaatttaggaaatggagataactcagcaatttcatgagaaa

SEQ ID NO: 141712 - DNA, 576 bp, Homo sapiens
tctggctttgttccacactcttggagtaattcctcaccactccagtgagtagccagaacacttcctgattaatcttctatactccagaagcaataacgtgcatatataccaatcctccaaaccaaattagttcttcctaaccrttggtgtttccccaaattaaccacacaacagaatgagttggggcacctctaatcaacatagattcttgggtcctatcccaaatctacacaatcttgagaggtggggtcctgaaaatgcaaagctgaaaagcctccccaggtgaatttcatggagttagccgcacactgctccatgaccctgtgccgggaagtgccaccccagacatccaatcttatagagaaaacagagctccctttagaatcaaaagataaactttaccttttaactacctttgcattagaaaaacaagattcagtttcaaagacattttgatgggagtcttctaaaaggaaacaatgtcatggatattaaggacttcaagaatttaaaaactgtgtagtttactgtccttagaaagataaggaagtttatagaagagttgtggttcactac

SEQ ID NO: 141713 - DNA, 587 bp, Homo sapiens
gaccccaaaaactctttaaaacaacccaaaactctcttttaaaatggcacactcaccttagaagccaagaaagtaatacatatttaatattaaagacagatactctattgcacagcagttcctccccactgtacctagctgagatgtacataatggtgagcccaggaggcacacaccagcatgttcactgcatactggcactaggaacaaaaaaatgggaagacatactagatgcccttcaacagggaaatgaataaataaaatcacatacacccatgttatggaatgctgtgtcacaaatgagaagaatgaggtaactgtctctcttggcagagaaacatcagaagaaaaaagctaaatgtagcatttgtatagcatgataaactatgctgaaaatcgacacaaacacaatactatacttttctacagttgtaagaccgtgtggtgcaygtatgcttgcacatatatctgaattcctctcctgaagagtggatggagacagacacagatgccagaggaattttactttatatctgtaatgtgtgaagtcagaagagtacacatatatattatttatacctgtattt

SEQ ID NO: 141714 - DNA, 594 bp, Homo sapiens
ctgcagtgagctgtgatcacaccactgcattccggcctgggtgatgtagtgagaccctgtttcaaaatagtaataataaccatctagtacccctagagtcaactggataatcaagcacacacagttgatagagacctgtgagttaacactaacattctagttggtagttgatacagatgagtagttaatgggcatgagtatagtagtataatggtaggtctatggtatccagaaaaacccaagctatcttttacaccatttcctctctcttactctccttcagtgtttcaggaaataggtaaacactatctggatgactaatacaatctatttaayaggacatttgtttttataaatgtcacattaactacactgtgtcatatcagatagtaaagatatgcaaaccagattttgttttaaattcaatattactgtgatttagagagtatgactggcagttctgaagcatgagaaaaacaccaaggatttaaaaaattgtttctaaattcctgttatttattccatctgttctctgagttgcacatgtatatttttaacatggttctagttttgtcaattcactgatagttttct

SEQ ID NO: 141715 - DNA, 406 bp, Homo sapiens
atatccatagctttctgcctaaaggaggaggaaccaaaccaaaatatattaccccaccttctggtaatatagtaatccttaaatggttattgaaagaaattatttctgcatcattatgagagcaagatttgttaaggatggcatagccaaggaaaataatcgctagatcacttgtctgtatgcctcagcccacaatcagctccaaaacagataaattctcatctgcaaacatagagkagttgttcaaactaaaggagaaactgctaaaaatactacaatagactggaaaagggctatggcaactctatagtgtacatctgtttgagtgacacatatttatgggttttttaatcttggcatatttattgttcttacttcatttatcaaaatgttcaaaactgaattc

SEQ ID NO: 141716 - DNA, 586 bp, Homo sapiens
gagtgggggagaggagacatatagatttaaacagactgaagagacatacaccgaactagaaatttaggrtttcaattttcaattgccattcaaataataagctgtatttttttaaatttcaatagactttttgggtgaaatttacttgagaaatgtatcttagaaacagaagaacaaagaagatttatgagaattttgaagaacaacaatgaagtgtgaggaattattcccaatatataaacagcactaatcaggcagaaaggcattagcactggtctcataatcccccatgaatgctgaatgttaatcctttaatttctagatcatggatgggttcgaggagatgggcagagggacagttggggaaatggagagagaagcagaggagactcagaggtgtcagaatagtgacattttatcaaaaaaagtcactatctgtacagaagttttgtattatcttaataattaatagggctatactagtacaactcagctaaatataatcgttagatatcagcgcatacaatgaaatgaatgaaaccagaatagagagctgagaaaggtatacatacatatgagaactgag

SEQ ID NO: 141717 - DNA, 640 bp, Homo sapiens
tttatgttgtcattttctgtgcttttccgttttaaattttttgtaatgttttgaaaatttagaaagggaagaaaataattcctagtgtggtaaagataagagcaattgacatcatttattaagcacttaccacatgcctgataacatattaagcactttacatgggttacctcctttaatcctctccataactctacgagagaagtactccaggatccccttctcacaaatgaaaaaattaagaccagacactttgctcaaaattctagttggttagattcagagcagtccaaactacaaatcattccctccaggatgacaaaaaagaacaacgaaatcacatgaagttattttaacttttttgaattcacscatccggttatgcaatctctcagtcatttttccctacttatgtctaagctccatcccttacaatatgtgtaaggttggaaaaattatccaaatcatctttaatttggttacctcatctgttaatggaaacttacttttgagtttttagccagattaaaagcatttaaaatatttagaacagtgtacagaacaagcactcaataaatctcagtaaatctgtacttactcattcacatattcatttgcaattaactatttaccattggac

SEQ ID NO: 141718 - DNA, 618 bp, Homo sapiens
gcttcactgtatttcaaattgaggtttccaatacagttttgttctcttcttgaaagggctaattatactgatgtttccaaagaaacacgtgattgttacagtggttttattagcaagttttccagagagctggtatgaattaaaagcaggaccagttccattcaaaaaatatttggtcgttttattttcaaactctgaaagtaggagcactcatatttatagatccctctgtacacatagaaatgtgcagagaagcagccaatgtctgcctttggctttacttccaaggaaactggaggaattactcatgcacaaataagtacaaataactgtctttgcaatcatacagaacaaacttatgaaaatacagagatttcaagtggtatcaatgcacaraggcatgtatttgtttagttgtttattagatttatgaaattgtgcttttctgtgatgcatactcttcagggagccagtgcaaaataatgtttaattaaaatagatagcaaacaacattgagtgccatatattagcatcagtgactcactgtaataaaaagaaagtttttctcactagggctttgcaatcagggcaggcagagaaatttctacaaatgaggac

SEQ ID NO: 141719 - DNA, 417 bp, Homo sapiens
gactgtgagtggtctcatctaggtgaacagcactgtctagggctccctttcctgttatacttcctgtgttacatttcagagtgagaggatgtgctcagaaccagggtgggcacagaacttctggctcactgcttagccgttctgatgggtaacatttagtggcttattttctacctctctaatgggacctgatgacagtgtcaagtgtctcatttttatcaytggggtgggagagtgccattaaaatggtctttaacaaagtaggtcaataatttatatttcaagaagggaaatttggggacatggaatgagagcatgttatttgggttagttgaacagctccagaaataattacgtatttttaatgcctattagggacctagaaacctatttggggaggtcaggaaactgggtatg

SEQ ID NO: 141720 - DNA, 552 bp, Homo sapiens
agatcttggcaaaattctgtttttttttttcaccctctccctctgaccagccttagtgctttgtgttcacttctgctttcctcttctaccacccaccctgggttcctcgtagtgaacacgtcattcgaacttggtatcttgttactctcacgtctcacttgagcttcacttggcratgataagaaggcctggtttttaggcttgcagtggccagttgtgcctgcttctcctgccttgtgccctgtacttgccctttggtactttgtgcagctgcggagcttaagggtgagctagtcctatcttttccctgcagtagaagatacttttgaatgtgaaatcagtattgagtatttcgtaagatccctgattcttcttgttcctttttgggcatcatggtttatgagattctggatcgtcagccttggtagaatagttatatatttatactccagctcattctcttttcttaggactaactcaaacaatacaaaacagttttgcccctcacattgcttcagatgaaagcagaagaaaagaatagttatttatgta

SEQ ID NO: 141721 - DNA, 530 bp, Homo sapiens
cagctctcgcatgaactaatagagtaagaactcactcattatggcaaggagggcaccaagccattcatgagagatttgcctctgtgacccaaacacttcccactaggccctacttccaacattgggggatcacatttcaacatgagattyggtggggacaaatattcaaactgtatcataccttatcccatttttatttctgcaatgttcttttcctatatcagatcctatggaaatttgatgatgtagtgggcctccaagttggttgtaagcagaatcacacaagaagcttattaaaaatacagatgccccagccctatgccaaacctagcttctctatttttagcaagctccacaggtaattctgatgcactgccaagtctctgaaccactgctttagccaactggatggaataagggaaattcccatttggctggtaggagtcagaacatttcctttctgccactacctgtggctcctgggcaaactactttaattcagttcctcagttgtccctttaagtaaagtg

SEQ ID NO: 141722 - DNA, 522 bp, Homo sapiens
gaattcttggacttgttagaacaaccaggccaaaagtaatcttagctgaacttgaagctggatggatatacacctagagctgatgtggaccactgctgccatagcacactgggcatcatggggaaagactcagaatgaagcaaacacagaggaargatgagctgagagatgaagaaagagagagagaccaaggactgaagacagtcttcgagatcctgtctctgaccatccctaaagctagcatattgccatactcctcaaatatgtgagcctataagtgccctttttaagatttggtcaattttttttttttagcttttccactgcttgcaaccagtaagtccaggttatagacatcatttgatctctattttctctgcctcatctaccaacagggactcaagtgtccaagttcatgcttcttcccagctagcctattgtgccttccacactgtgctcaacattttcaggtcagccccttgttaccttctatatcaggcccactctccactactttgtgat

SEQ ID NO: 141723 - DNA, 495 bp, Homo sapiens
gcctacatttggaagtgctatgtgacttaatgtcacacatatgaaatgtactcaaacgccaatttaaatatagtttttctgctgtaaaatttttgaaatgtttcaaataatttaggttttgaacttcttyggtaatgagtaactcatttgatatatgattgcttgagaatgtgagtcttgctcagggattattaacaagtgagaaaaacctaaaccacaaattgttttcaaacataaatcaatttttaagagtataaaatgaaacaatacataaaattgatacaatgctatgttttgtagacatttaattaaacattgattaattttgattttatggatttcatcctgcattcagtagccactgatttatattttttcttctaggccctatgtctactattctggggccttgtatatagctcatccatctttcagttttatcattatatatttagtcaaggattactttaaaccatgcgttttcaatgggggaaa

SEQ ID NO: 141724 - DNA, 579 bp, Homo sapiens
ttgctgcctgcttcccaatttcatgttttatctacccaactatacgccatgctctttaagatcgaagaccatctctgggctytccttccatggggctctctctggctaagcattcagtgcctgattaaaatagatgtggaagagaagaaacaggtgccaagaggctgatgatccattgtgatgaaagttctcctgctatagcaagacatcccctcctctgtgctgacaataaactatttgatgaattcaggtgcctttgtcccccattcaggtcctcctcctccttgttctgtcttcttttgtgcatttgtgatgagtatttcctcctaggtttgctatgactagatatgtttgggttgggtaaaaattgtaaagttgttctggatttctttcaactatgttttctttctatatcaaaaggaagacaataacaagaaggacaaggaaaagaggtaagactgccatggaataaaagttgaagtatttattttttgggtcaccagagagcactgtattcatcatctacactgccttgctctttccctgcaatgtgagacactgaaaaacaccccaggcaag

SEQ ID NO: 141725 - DNA, 579 bp, Homo sapiens
ttgctgcctgcttcccaatttcatgttttatctacccaactatacgccatgctctttaagatcgaagaccatctctgggctctccttccatggggctctctctggctaagcattcagtgcctgattaaaatagatgtggaagagaagaaacaggtgccaagaggctgatgatccattgtgatgaaagttctcctgctatagcaagacatcccytcctctgtgctgacaataaactatttgatgaattcaggtgcctttgtcccccattcaggtcctcctcctccttgttctgtcttcttttgtgcatttgtgatgagtatttcctcctaggtttgctatgactagatatgtttgggttgggtaaaaattgtaaagttgttctggatttctttcaactatgttttctttctatatcaaaaggaagacaataacaagaaggacaaggaaaagaggtaagactgccatggaataaaagttgaagtatttattttttgggtcaccagagagcactgtattcatcatctacactgccttgctctttccctgcaatgtgagacactgaaaaacaccccaggcaag

SEQ ID NO: 141726 - DNA, 579 bp, Homo sapiens
ttgctgcctgcttcccaatttcatgttttatctacccaactatacgccatgctctttaagatcgaagaccatctctgggctctccttccatggggctctctctggctaagcattcagtgcctgattaaaatagatgtggaagagaagaaacaggtgccaagaggctgatgatccattgtgatgaaagttctcctgctatagcaagacatcccctcctctgtgctgacaataaactatttgatgaattcaggtgcctttgtcccccattcaggtcctcctcctccttgttctgtcttcttttgtgcattwgtgatgagtatttcctcctaggtttgctatgactagatatgtttgggttgggtaaaaattgtaaagttgttctggatttctttcaactatgttttctttctatatcaaaaggaagacaataacaagaaggacaaggaaaagaggtaagactgccatggaataaaagttgaagtatttattttttgggtcaccagagagcactgtattcatcatctacactgccttgctctttccctgcaatgtgagacactgaaaaacaccccaggcaag

SEQ ID NO: 141727 - DNA, 396 bp, Homo sapiens
ttcatatctcttttgtacagatgagaacaccgaggctaggtgaaatttaaaaaaaaaaaaaaatctgccaaaggaagacagcttaataatgtgccatgtacgtgacagacctggggttcagaatggtttatctgatggcaacgcccaggctctaaacaactacactgtgctataaccttgggtgagggagtcagtatccacatctataaaatgggtataatracaatgttcctaactcacagggtcattataatgactgaaaaagatgaaaatcattttacaagttgcaaagaaaaaaaatcatttatacaattgtgaggagagagtagagttagcataaaaagaaagttaacatcaaatgactgagttgaagtatattcattaattcatacaaca

SEQ ID NO: 141728 - DNA, 410 bp, Homo sapiens
tgggttgtcaacagtgaatgacaagctcggaggggagaaagatccatttaggtgtagatgtgtgtattgtggggatgygtttcgttatcagaaaagctcttaaaatcccagaccatgatttatttggtgaataaaacctaccgatattatcattctctaaaggtattttgatcacatgggtcctttcttggagaaagaaaagcttttatttcttaaccaggaaaaaaattgcagcaggaacggggtggtctgcggtgggaaacgacactctgtgcggctaatggctccaggcttgtgtttatctgcatgaggctgagctgacttggtggacaataggatgcctgactagcattgccagtcaggtgcattcctggccaccccgcacaaggaaaagaaagtggctgtgagca

SEQ ID NO: 141729 - DNA, 577 bp, Homo sapiens
tcaacttctaagcagcggccgtcaccagcgccccacgtgtgaaactagaaccacgcactgctcgtccgtaatcattatgatttgcaagtaggtgactcatagtccctaggtacttaataaaatggttgttawcttcctggccctgccctaagcattatctcatgtcatccttataacctccctgaatgttaggtgtgattattccctggtatgaaaaccaagaagaaggtaaaagtagatttgcccaacatcaaagaacagtaagtgacagagtcagaattcaaacccaggtttgtctgatggcaaagcctttgtgtttaagattatagagtcttttgttttcagtgatcacatttcaggtggaaaaactagcgattctgacgacgggaaaggcacattaggagattcctggagtttcattctgtgaagttcgtaaaaggggttatagttgatgtctgtaacccataaaaacctttttatggaagggaaagtggagagattgcttaatcctacagtggtggttttcatcggctaaaacctacactttgaatgttctctggaagtcagcatgcaagtg

SEQ ID NO: 141730 - DNA, 625 bp, Homo sapiens
gtgtggtcccttgatatggcagcccttgcaaactaatacactctccttcagagtgccaccctggacaagtatgtaagagagatttcccagaagtagctgttgcatctatttccagaaaagcagaaacttggctttttgttttgttttgttttgttttgttttgttttgttgagacagagtcttgctttgtcacccaggcaggagtgcagtggcacgatctcggctcactgcagtctctgcttactgggttccagtgattctcctgcctcagcctcctgggtagctgggattacaggcatgtgccaccaggcctggctaatttttgtatatttagtagagatggggtttcaccatgttggccaggctggtctygaactcctgacctcaggtgatccgcctgcttcagtctcccaaagtgctaggattacaggtgtgagccaccgtgcccagctgaaacttggcttttgaatattcaagtactctaatcagacactgttgatttttggcggcatcagacaattccaaccctcgtttcccttatcatcttcaaagggtctagaaaacctttcctagactcttttgaaacaagggatagacatataacacagttctgattaataagatt

SEQ ID NO: 141731 - DNA, 583 bp, Homo sapiens
gttacttacgactattttgtctttcagtcactggatgtcatcattttgatacaaactatgtaggaattgaaaatagtcacttctactagaaaattaacagaatgttttttaatgtgtgacagatatacaaatgataacagaagaaacagaggcatccatgattatttagaacagagtcatatgaagaaagacgctgcatcaaaattagccttaattacctgggagaaatgtgaattcgatttaatacttcaagaaatatatttcaagtctgccagatagaaaagtttgagtccctttgttgagccattctaggtgctatggaattcataatyatggaattgcagagttagaaaaggtttgaagtcatctagtccaacatctcttttgatgtgtttaatttagggaggattcctcttttggaagggcttagggtttataacaggttgcatattaaatagaatataattatctttttagtgctactggatatattttaagtattagagttgaattgaggtagctcttcccccggggaaatatattgtccttcagtgaaatcacattgtgaatatctgttcctggg

SEQ ID NO: 141732 - DNA, 407 bp, Homo sapiens
tcttctccccactccttcagtgcggttggcttagggggaagggagtgtcatcygcccttccccggggacactggaagaggagaggtctgggagagggacggacggatgctgccttcctcatcatgccacccctccttctccccagcccctggtgggcaccagcccgggcattctagcctacagcccaagacagatcaggcggacagcagctgaggctggggagagggggccagtgctgtggacacccatgcctgaggaagccccagcctggcaggggagagggtgggggtgagaggtggggagatgtggccgttcgctctgaagttgcgatgacttttgtgaacaagcaggttttcttgatgcaggtacagaagtgacggtggtggggtgatgacatgggagaattc

SEQ ID NO: 141733 - DNA, 544 bp, Homo sapiens
ggcagggaggatgagtaatgtcacaagccttttgaacacagcatgggtaattcctatgatcagaaaccacctgtcattttatttcctctgtaacattaagatctgcctgtgccctgagatgtgccagccttgaaatgctcttgtcctttcctgtatgctcacctacctctgctcaatctggaggaaccagatcaaatgttgcctcctctggaaagcctatcctaacccttcactcaggtccagtgagcaattcccacagcactttgtgtatctaaccatagcattaaccacctagtcagaaatatttcctaacaaagcaggaattttacagtcatctgaataaatgaatgaatgaatgaacgagcatgttaataatataataaggtaagattgactcatgttttaaaagccttaatgtaaaagagagaaaatagagtgaagaatcagaaaaatagttcataatctttctgattcttcttggaagaaagactattctttgttttraagcaaagtaccttttatttttgaacctggggtacaagat

SEQ ID NO: 141734 - DNA, 558 bp, Homo sapiens
gttggaaattttaacgcttttctatcagaaatggacagatcatgggcaggacgtggtggttcatgtctgtrattccagcaatttgggaggtggaagcaggggaatcatttgagtttgagagtttgagaccagcctgagaaacatagggagacagcatctctacaaaaaatttaacaattagctggatgtgctggtgcacacgtgtggtcccatctactcaggaggctgtggtgggagggaagatcacttgggcctaggaagtcacagctgcaagccatgatcatgctactgcactccagcctgggtgacagagcgagactctgtctaaaaaaaaagaaagaaaggaaggaagaaagaaataaagaaagaaggaaaaatggacagatccagcagacagaaaattaataagattaataaagacatagttaaaatggacatctatagactacttcatccaacaaaagcagattacacatttttctgaggcacagatgaactgttcaacaagagaagtaacattccggggtataaaacacatcttaacatatttaaaagaat

SEQ ID NO: 141735 - DNA, 570 bp, Homo sapiens
tcaaatgctggtgaagatgtggagcaacaagaatactcattcattgctactaagaatgcagattggtagcaccactttggaagacaatttggcagtttcttagaaaactaaatgtgctctcaccatgcgatccagcaacagtgctccttggtatttacctaaatgaactgaagacttatgttcatacaaaacgtatgtgcccacgaatgtttatagcagctttattcataaccaacaaatcctggaagcaaccacgacatccttcagtaggtaagtgaataaataaacggccgcacatccaaatattcagcaagaaaaagaaatgagctatcaagccatgtagagacgtggggaaaatgtatgtgcwtgtcaccaagtgaaagaagccaatctgaaaagtctacatactgtgtgattcccactatatgacactctgaaaaagacaaaactatggaggcagtaaaaagatcagtggttgccaggagttgagggcagaagagaatgatgaacagagagagcacagaagatttttagggcagtaaaactaattcctataagatattacaatgg

SEQ ID NO: 141736 - DNA, 582 bp, Homo sapiens
gaattcttttaaatttttcactttacttcacagaataataagccctattaggattttagaagcttctgaaatactcaagaaaatgtaatgaagcaagagcccacaaattctagtctttgtcaaggtcatttgttgtcattttaagggtatggaaactgagtstctgagactacctaacttgtctaagctgacaagtactgagataataatcaaacccaagtcccttaccttttagtacaataagtatttatggaccaggcgtggtggctcatgcctgtactcccagcactttgggaggctgaggcaggtggatcacctgaggtcagcagttgagaccagcctgaccaacatggagaaaccccatctctactaaaaatacaaaactagccaggtgtggtggtgcatgcctgtaatcccagctactcaggaggctgaggcaggagagttgcttgaacccgggaggtagaggttgcggtgagccgagattgcaccattgcactccagcctgggcaacaggagcaaaactctgtctctaaataaataaataaataaagtatttatggtagggttagaattttggaa

SEQ ID NO: 141737 - DNA, 354 bp, Homo sapiens
agatcttcttttaacctgtttgatttttcaatcttcagtttcttcttttgcaaaatcaggataatcataatatatacctcaaaggattattatgaattttaaataataaaaataaatcacttggcatagtgccatgacatattaaaaatattagctattattatttttcctatccagtaccaaaagttatatgttgtgtgttccattcctttagttcttgttgcatgaaataaaataaactgctaatctgatttttaaaaaatccttactaatctcttagtaggtatgaaatatttttcttttgtgggagtagggaagattycaattccttttaagctttaatttcctgagtgt

SEQ ID NO: 141738 - DNA, 617 bp, Homo sapiens
ctagcccaataaaaatatgatcaagaatatgcagtaaaaggatataattgggagagtgaattgattacctcttggaagatgtatgcttaccattcaggaaatctgacttagaggtcagtaactcagccagggctaggtccacttgaagtattcactgatagtcagtggctctccatttactctttgactcatgtattctttcatccayttacggacccaacagatgtttactcagtgtccaccatgagtctcttcagggttaatagcagtcagaaatctattaggtacttgaagggatcatgttgaagaggtgatggcagctacagaaatgagtgctcagaagggcactgactggcccctttcagtccagaggagggagaaggcacggaatcgatattcatgaaaagatttctccatcataaggcattcatccaactagactatagatagaaactctgagctagaagcaatttcaagattattttgtcctacccttttcactctacaaataggaaaactgaggacttgagaggtgataaggatgaaaaataaaaatttttgagcatttattatatgccaggcattgctttttaaaagttgttgtaaaatactcataa

SEQ ID NO: 141739 - DNA, 617 bp, Homo sapiens
ctagcccaataaaaatatgatcaagaatatgcagtaaaaggatataattgggagagtgaattgattacctcttggaagatgtatgcttaccattcaggaaatctgacttagaggtcagtaactcagccagggctaggtccacttgaagtattcactgatagtcagtggctctccatttactctttgactcatgtattctttcatccacttacggacccaacagatgtttactcagtgtccaccatgagtctcttcagggttaatagcagtcagaaatctattaggtacttgaagggatcatgttgaagaggtgatggcagctacagaaatgagtgctcagaagggcactgactggcccctttcagtccagaggagggagaaggcacggaatcgatattcatgaaaagatttctccatcataaggcattcatccaactagactatagatagaaactctgagctagaagcaatttcaagattattttgtcctacccttttcactytacaaataggaaaactgaggacttgagaggtgataaggatgaaaaataaaaatttttgagcatttattatatgccaggcattgctttttaaaagttgttgtaaaatactcataa

SEQ ID NO: 141740 - DNA, 619 bp, Homo sapiens
ccacactcacctaatgagcaacgatgtaaatgaggggacggagcagaggaccctctgaccaggcagcagatttcagggtgcccataaagtctggaagcatagacagcattattttaatttttgagattgaacccccttgactccttctggggcaggctaaaggctcagatttgttcagtgaaaaccaaacacaaatcatcagaggaggcatgtcatggatgcktgtacagggttggctgaccaactgtcccagttggcctgggacttgaggggtttcccaggatgcagaactttcaataactgtgacagtcccaagaaaaccagaatggctggtcaccctagttgagggaactgctgcatgactgcactgcatgcgtcgcatacacagggtaggtgccaagtgagtgtcgtccaccttagaagaccagtctcaagagaggattcagcccactggggacagttggctgatggactggttacattgtgacacgttcagtgactatgaagtgcaaactgttcttccaggttgaggcccctttacactgcattctccttggggaaggtcacagagcaggatgagaatggaaccgggagacaggaacaaagcagagaccctgaa

SEQ ID NO: 141741 - DNA, 397 bp, Homo sapiens
taatgcaagaaatgtgtagggccttatttattatgttcacagtcatcaaataattgattcttctctcttcctcctagagtgggtatcatctcacagcaccttgaagtgttcctycctaagactggtcataattataattattaattatttgtgtgacttattttatattggctctcctactaagataagccatgggtctgtcttgctcactgccctggcgcctgggtccaggacagtgcctggcacagaaaagaagctcattgcctatctgctgaatgaatgaatgaatcttcattttgaattcatagatgagaactgctgcttactggaggactaagtattagccccaacccattcatagatacagtccagtggaagggcgcttagagatcactga

SEQ ID NO: 141742 - DNA, 327 bp, Homo sapiens
gacctacctgcccgtgaggtagaacaccaatttaaggaaaggagtcagattagaaggctaagatatcctgttttctcccccttggccgaccacagtgcctgatattccaccactacccattgattaacaaattatcttctgaaatccatctcttcctgaaaggggcgatgtcataagcattttccagtgtaggtctgcaaaagacagaaatcytcccttgcccctttttctgttcctgggcggcccctgcaagaccacctgaggcaacaggaaaatgccatctatccttccgctggctgggggcagggagctcacagaggagaattc

SEQ ID NO: 141743 - DNA, 582 bp, Homo sapiens
ccttttgacaccatgccattgtgagcttccaaaacaagatccgctctcaggcaagcctctgaatgggttacaaagttcaaaatggagccaagcacaagaagagttgccaagagtgatacagaacgctctgtggggagctggtgtggaaaatcagcacacccagcgcctgtagtaatttaaccaatacagcagaaaaacgtagcttgcgtgtctttcgaagaaacctttacagaaaccctgaaaagctagaatcctccctgtgtctgatcataatttaatatttctggaataaaatccttctagaatatatgtcctttagaattcctccaagaagcttcctatggagctccagataaagaggacaatctaaaagttaatatgaaagattaaattaaaaatgccatccrgaaaacaagattcccctgcaagggacgcatataacagattttgcaaatgtgtggtagatcttactcctgccatcagcacctactgaattcccgatgctattgttatcgtcattttcactacttagtttctagtggccacaacatcaactgagagtgacttgatgggctgtcacca

SEQ ID NO: 141744 - DNA, 471 bp, Homo sapiens
gatttgggtgagacacaggattgagtggtctctaactggctttggtgttagacacacacgtgtttgaattctggcttcccctcttttcagctatctgaatgtcgccttgcatcagtcctatcatctgtctgagcctcagtttcctcatttgtaaattggggacaatacatccaccttgcagggctgttgaaaggactggaaatagtgtatgtaatgtacctcctayggatttaagataggtgctcaaaaatggcagttatttttttaaagcctgattctgcattggaaccagttctcaagagccaattctgatgagtgtcttcacagcaggacctaagccctgatgaattaatttgtctgaaaccaacattttctcttcatttcatcttgatatgctaattttggggggtcaataattcaatggttaccaattaagcaaggatggtatttgctattctgttctatatagtt

SEQ ID NO: 141745 - DNA, 509 bp, Homo sapiens
tggcaggacataaggagaagatgtaaagagctggtagggtcagtggattggaagcttgatgctgagaacacttgagtaaagacactatgaagaaagcaccagaaccttaataggagtggtcagcaggaaagtttattgaaaataaggtttttgcagccaggtgcagtgcctcacacctgtaatcccaccagtttgagaggcctagtaggcaggtggatcacctgaggtcaggagtttgagaccagcctggccaacatggtgaaaccccatctctactaaaaatatagaaattagctgagcacggtggcgggtacctgtaatcctagctactcaggaggctgagacaggagaattgtttgagcctgggaggtggaggttgcagtaagcygagattgtgcctgaactccagcctaggtgacaaagcgagactgtcttgaaaaaaaaaaggaaacaaataaaataagttttttggaagttgatgacaaattagctgaagacatactatagac

SEQ ID NO: 141746 - DNA, 607 bp, Homo sapiens
actttctagggctgctggaacacagtaccacaaactggggagcttaaacaacaggaatgtatggcctcacagctctggaggctaaaagttcaagatcaaggtgtcagcaggattggttccttctgaaggcctgtccgcaagctctggtggtttgctggctctctagatgctccttggtttctgctgcatcacctaatctctgcctccatcttcacatggtcttctccctatgtgtgcaaatttcccctttttgtaaaaacaccaggcatactgagtctgagacactgtggaacatgcaagcggaaatatctactcagtagctatatatgtaggtctggagtttaggaaagacaaatgtgtgagtcattgccacttcagtggcagttgacagtcatggggatgggtgaaatcacccactaagatcgccctgtaacatgatataaaaagagagccaaggaaagaattctaggaactccaataaacttacaggatgattggagggtaagaaggtcastaatgttgcataattagacctgggcttcaggaagtcagcactgggagcgatattatggaatagttggaattagaaagaaagaggagacatgtc

SEQ ID NO: 141747 - DNA, 581 bp, Homo sapiens
tgttgagcatctttttacgtgcttattggctatttttatattttctttggataaatgtgcattcatctcctttattcatttttaattgggttgtctttatgttgttgtaagagttctttatatattctgggtactaaataaacctttattagatttctgatttgcagatatgttctcccattctgtgggttgtcttttcactttcttaataatgtcctttgatgcataaaagtttttacatttgatgaagtccaagttttttctttttcttttcttgtgcctctagtgtaatatttaagaaaccactgcctaatccaaggtcatgaagattaacatctatgttattaaaatgaagttctgaagaagctggatttatrtggctatggtaaatgtatctttaaaaactcttgaaggaaaaagcaataaaatctacactaaattattgaagaagtcaaaataacaaatgcacttatggataatgttaaaagtctcaaaaatgtactagcttcattgcagtctgaaaaatccagtttgaaagtgagatttcagagcttcagcagaaacttagtcattactaaact

SEQ ID NO: 141748 - DNA, 623 bp, Homo sapiens
tttcattgctattaagtgatcattccttgcttcaaatgaaagctagagagaattacaattcttatgatactgttttataactgtagattacctatatgtgaatttttaagcaaattgtttccattttattctatttktatgtaattatactatttttgttgttaagtccactaaaataattcagaaacacagcaaaaactttgtcttctaagatatttttgaatattttctcttttagttttattgctcttaagtgattatataagtactcaaatgggaacatgatagaattataattctcaggagagtgttttacaaacacacatcatataaatggaagttttgttagtaaattgcctccattttatttgatttctgcataaagtacattcttttcaacattgctatttaacaagtctcttctgttagtccagaaaaatggcaatagttttatcttctaaagtatttttcaatttctcttctttagtttctctgtagtagttatgggattacacaattgctcaaatggaagctcaatagaactatcatttttaagatagtatttatgaatttatttttaagtgaattttattttcttcaatctctagataacatgaagacag

SEQ ID NO: 141749 - DNA, 602 bp, Homo sapiens
ccttcggtgcgtgggcgggagacataagcctagccaagcccatacagcccggctcgggtggctatggagaggcgtactgcagagacacctggacgcgcactgtgacaggcgccattctgacacacgtgctctctcactcccaaacaccacgggccgcaagcgctcacacccacactcacctgcagggaccacgtgggagaatttgaagggctgatcctgtcccggtgcattcgcagtagcaatgatgcgagaattcgttttaacctcgtcactgactggactagactgtaaactccttggcgtctgggatggctcagccgtgcccagcaccaagtgcaggcactcaaacccctgtggagtaagtgactggatgaatgaatgcattggaactgttcactgagtatctgtaacaattttgatcccatggtttggtacaaagaattttattgyagtatgaaattaaatggtgtttgtgtgtttgtcttgtcttggtctaaggttcaaaacaggctaatgtatgttttcccctccccaacgtagaggagttccactttgtctctgtgccagtctctatcacagaatgcgcaatcctaccctaattt

SEQ ID NO: 141750 - DNA, 476 bp, Homo sapiens
agggttcctacaacaagtgcttcctattggctaggttaaaaagaagccacacctggtctggtccagatttgtcctaagtctctccctrtgtgtcagcctccatgctgcaggagccaagcagctcaggacctttcactctgctgtagctgtgagcctttaaagacggcagcacgtggctcagaggtagcaacaataattgtaggtaacagactgggcaggggcctcctggctcctcctagaccacgccaacaatgggtcgagcatgggtgtccctggctagccaggctgaagaagggactcctttctcttgttctaacaggctggtaggccagaagtcctctctctgttcctgctggtctctcactgcctctgattccccaaagtcccactctgctccctactctgttattcagggtccttttgtcttgtccagagatgggtaaaaggaagacaaagtttaaccaaagtcttcacag

SEQ ID NO: 141751 - DNA, 579 bp, Homo sapiens
ccagattggcaggcagagagcaaggccactggttctagtgtgagataatrggggactgggcctgggactgagcaggggtgggcggggcagggagtagagccaaactctgctaagcagtgactaggactctcccgattgaggcaaagctctccagatcttgaggccccagagggccataaatactttcatgcgcatctgttctcttggagggcttgtcacacctgaaggctcctaggccctggctcccagggattcagaagtgataggtctaggatgaagcccaggaatctgcatacataaaaagtgacactctccactctgatgcgggtggactccataccttccaggctggggaggggagggggcaggacaagcacactctcatctggactgtggctgaagcagctcagagaatcgaaggtagcatctaaaataaggacctggatgcactgggaacaaaggtagtgtgtgtctccactgctgcagctaaagaattgcagtggagtggccctggtcatcatgcagaaaaatgactcctgatcaccagtccaaggagccacagaaataagagatggggcc

SEQ ID NO: 141752 - DNA, 572 bp, Homo sapiens
agatctccagattggcaggcagagagcaaggccactggttctagtgtgagataatgggggactgggcctgggactgagcaggggtgggcggggcagggagtagagccaaactctgctaagcagtgactaggactctcccgattgaggcaaagctctccagakcttgaggccccagagggccataaatactttcatgcgcatctgttctcttggagggcttgtcacacctgaaggctcctaggccctggctcccagggattcagaagtgataggtctaggatgaagcccaggaatctgcatacataaaaagtgacactctccactctgatgcgggtggactccataccttccaggctggggaggggagggggcaggacaagcacactctcatctggactgtggctgaagcagctcagagaatcgaaggtagcatctaaaataaggacctggatgcactgggaacaaaggtagtgtgtgtctccactgctgcagctaaagaattgcagtggagtggccctggtcatcatgcagaaaaatgactcctgatcaccagtccaaggagccacagaaat

SEQ ID NO: 141753 - DNA, 453 bp, Homo sapiens
gagccaactcaaactactgcataactaaaaatactgagatcagttccagtgtactggtagactttgaactcatgacgtggtaaggacctagactgtgggccatgtggctcttgtgagtgaggcagggactgcccactgtagccatctgcccctgcctagaaggatgttggtgctgctcatagttcccagccagccttccctccctgtgtctcaggccctgtaggggcagcatgtggagaaagcctgtaccctgcactttaggaacttagastctagttagggaatatgggaacactgacaataagccagccacttctgagacagtcctattttctttgttctattctaatagcagaagtaaaaaggaaaacatcacgggcatacagaataaaagtctcctattcttacccccaaaactctgttcttctggacactgtacatatcctggcctgt

SEQ ID NO: 141754 - DNA, 564 bp, Homo sapiens
ctctagccccagactgcagagaggctcagaaacacagcctgtccagtcaggagagagttctttatagttccaaatttccaaaaccttctccctcagcaggccatcagaaaaagtcatgtatttttcagctgctcatgaagcttattaggaagaccttttccttcactgggttcaaaagcaatggctcacttaaaattttaattaaggccaggtgcagtggctcacacctgtaatcccagtactttgggaggccgaggcgggcagatggtttgagcccaggaactcaagaccagcctgtgtaacagagcgagamcctgtctctacaaaaaatacaaaaattagctgggcatcgtggtgcatacctgtggtcctggctactcaggtggctaaggtgggattatttgagccttgggaggcagaggttggagtgagccaaagttgcaccactgcactccaacctgggcaacagagcaagaccctatttcaaaaaaaaaaaagaagaaaaataaattttcttaaattaagactctatggcagtggttctcaaaggaggggtgatgttgg

SEQ ID NO: 141755 - DNA, 404 bp, Homo sapiens
tctaaatgtaccaaaggtctaaggggagaaaataaaatccttcaaacaagatttgcacatgctgatactgctcattatttcattataacagcccttccaaatcttgaatttgcatttttaaccagtgttagcaaatcctgtatttccctctttgggaaatatgggaagcatgagccatggcatattcttgaagctaaatctcagggcatcacccctcacaaacaagagatcaagatgctttctgtatttatttaaaaaaaaaaaaattccagaatgggtaagagaacaatcatcaaggatgtaggtgccagacasagggcagaaggtagctagaaaagtatgccttagggaagttaaaggtctagcctcattcctaccttgttttaatagctgtacctaatata

SEQ ID NO: 141756 - DNA, 548 bp, Homo sapiens
gggttgaactgaactcataaacaaagcaaagagcaatctgaacaaagaatttctcaatatcccaacgtctacatattaaccacattggtaactcacctctctcttgaactccttcacaatgtgccgtagcaaggcctggtcaaagtcttccccacctaagaaggtatccccatttgtggatttcacctcaaatactcctttctgaatttccaggatagaaatatcaaaagttccaccacctaaatcatatacagcaatgctgtaaatgatttgtgaaaaaaaaagaaaagaaatccttaagaacaaaacctatcaccaggatataaatttcaataaccaaatacagataatctaagctatttccctgagatatgtactagttaaattaccatggcccaaaagaaaagaaaagaatggttttgaaatgaaaaaacaaagacaatacagacttaaaatcagtaaaagcactgtaaaaggctcaattactaaraaattaagtgacactttagtttcacacatccaggtgagaaatttactgcacaaactta

SEQ ID NO: 141757 - DNA, 531 bp, Homo sapiens
ctattagtctgtaatttcagtgttctgctttgagattttaccattctgtgattccaacattttaagcttcctgaatcaggattacagcacctcatgatcccatctttctaaaattccagtcctgtggttccaacaccttaagatgtcaacattctaagcttacatctttctgacttgcccagcactggggagggccatccgcatccagccgagtaccctacctggtgtcactttctggggtcacctgctctactacttccatctgaggagcagcgaaggctgggagagaagctagagaggaggttctcatgagccaggccctcagctgccagttgctcctcagtctgccaagtcctgaagcctcctctggggccccttggyccctgttccctccgagcccacgaagaccttggctcagttgagcacttgctgtgtgacttcaaatatgcccctgcccctctctgggcctcagggtctcctgccccatgtgtcctagacggacgaacctaatggggctcagggcctgagact

SEQ ID NO: 141758 - DNA, 552 bp, Homo sapiens
ctttttccactatactgcaatgctgtgaattggagattacatttttcccctctccagattttcaacgtaaagcctctcttgactttttgcactgatgtagataccatacttctgcgtctatcaccacacacctacctgtctaacaagagctgtgggaatgtcataggacacattcgtattatatagtctgccacgctgttctgttgaatgtgtatggtaattatttgacacttctaagagatgacaactatcttgaaataataaaattgcaattatcttatcaaatttaatattctgtattcttcagaactgattttttttattgaagattgccacttcagcgtacctgattaaacttgaattcttacattattgtacctttcgttacttttattcttagagttttgttattgtattaactccttcttctccattaccatgctttttatttttattttattcctttttaraaaactgctacagattattcctcttttacaaatattcagagaactctacttaattacacagccatagcttgggaaagaatgt

SEQ ID NO: 141759 - DNA, 638 bp, Homo sapiens
tggatgaagcctaattctgctttttaacgagctcccaagtaaggctggtgctacctatgagaagattaactggctgcatgtcataatcatctagaaagctttcaaaaaaataccagaggcataaatgtaccctcctcctccagaccaattaaatcaaagtcactgatggtgggaaccccaggtcattgctattttcgaaacagttccccaagaaaatcgaacatgaggattaaacccctctcttactacataagaatttttacacgctcacaaatgatggggtaaaaagaaatgccagttctctctattacaaattaaactctcatcccacctggaagaagttagcagcataaactgtaacacatctgaagtggtgcccacrgttactcttgcaagcttcttatgggaaacacaatattttggtatttcccaacctggtgctgttaacaagaatcatcccttgtttgtgtttgttaatcagcttgatgagcagtttctgtgttgatcttcccaaactgtgttggccagttgccaaatcaagtgcataaattacacactgccctctctccaagctgctcccaaccctgcagaacatcagaaagaatttcctttgaatgcgcaaatctgtgtaagccgat

SEQ ID NO: 141760 - DNA, 546 bp, Homo sapiens
attttacatgacagatacataaggcaataatttgagaaataaaatcacaatcatagaaagcatataatcatattcctgaaatataaatagcaattgctttaggggattgttagagttggggcagaacaagaaaagctagtgtcctgaaagtttaatcaatggtcattgactaaatggtcatgccgccattttagtcaayggtcactctgtgtactcaacatgcctactcagtctggaagtatcctgggcagtgggcaagttgtattcagagaagggccagacatggggaatgaccttgaatcagatggaaggatttgccaccaattgcataaggtaagccagaagcccttgaggtctctcaccaggaggttttccctccaccttccaaaagccagaagagaaggaagaaagaaagtgattataacaaaaaatgccataagtcagtcactaagaaggcgctttgtattgaagagaaggatggtttaacacatacctttcaagagcttctcttgaaaacaagtgaacttcatgaagatttataaacat

SEQ ID NO: 141761 - DNA, 428 bp, Homo sapiens
tcttaacaaaaatttaaatacacaatgcagtaatattaactatattaactataggtgctatggtgaacagaggtctagaacttattcatcttgcataactgaagttttatacctgttgaagagcaactccctatttcccccatccctcagcacttgacaagcaccattctcgtttctgtttctatgagtctatttcagataattggtgtaaggagaacagtgcagtttgtgcttctgtgactgtcttatttcacctagtataatgtaccccaaattcatccatgttgtcatatatgacagaattttcttctttttaaggccaaataatattttattgtatgtatatgccatgtttgctgtatttgcttatctattgatgggcattagtttccatatcatgtgtaytgtaaataatgcaataatcagga

SEQ ID NO: 141762 - DNA, 530 bp, Homo sapiens
tgggggctctgaagggaataaagaggaggtggtataagataatgataatggattggatttaatattaaataggtggtcagggctgacctctctgaggagtgacaactgagcctaaatgtgaaggataaaaagaggccagacataagaatgtctgtggataaacctttccaagaagaaaaaagagagatgtgcaaatggccggatgtagcagatggtcaggcaggcaggggccagatcagggagacagagaacataactaggtctgcarggataatgggtagaggggcaaagtctcagggaagttgactgaaatgcagaggtaaaatgtaatcacaacacaagggccttgacatgccccatctctgggggaaatgttctcaaacactagccctccagggggcaggaaataatgtagtctagttaattgcccttcgggactgctctgtgtatgaatgtaaaactagggattatccagccccagatgcaaatgaaaagggcacagtgggtcactggttttcctgaagactctt

SEQ ID NO: 141763 - DNA, 565 bp, Homo sapiens
ttgggcacggtggctcatgcctgtaatcccagcactttgggaggcygaggcaggcagatcacaaggtcaggagataaagaccatcctggctaatacggtgaaaccccgtctctactagaaataaaaaaaattagacgggcgtggtggccagtgcctgtagtcccagctacttgggaggctgagggagaagaatcgcttgaacccgggaggtggaggttgcagcgagcagagatcatgccactgcactccagcctgggtgacagagggagactctgtctcaaaaaaaaaaaattatattatataattataattattgctaacatttattgagcactacttcctatgcactaggcattgttataggcattttaagatacattatttaatcctcacaataacccaatgaagtaggtactttcatctctgtttttaaagatgagaggaatccgatgcttagagaagaccagtgacttgctccaggtgtcactactagcatctggcagacccgggactggaacccaaggccatctgtgtacaaagtttgtagttctgttgcctgccctct

SEQ ID NO: 141764 - DNA, 394 bp, Homo sapiens
caagctgaaagggaaggtggcaaaagaaggaatgaactttgattaccttcaggctctgtatcatccaatccactcaccctataatctgtcagacaatgtttatttttgtagataggccataattcattattttgtgcatgtgctaatacaatggagaatgcattctgtttcaaccaratactaaaagtggagttgtagaattgtgaggccatttccactgctttaattcaaatctagatcataataaaccacagtctgaaagaagagcatgaagcctggctctgctttgtgcaagccttttgaaaagatgaaatgaaaaagtcaaaggagaaaagacaccagctccccagaattatatcagacatattaatcatggaaggtccaaacggaattc

SEQ ID NO: 141765 - DNA, 383 bp, Homo sapiens
tcattgttctcctctacataaaacatgagaaataataatggtacttacctccatggacttactatgagaatgaaatggattatgtatataaagcacctaggaccttgtctagtatggtgtatgccctcaatacatgttactatttctattgttaaaagataagtaatttatcataaataacaagaatcctttttagcattcaaggtatcataaaagtatatttttccaaagaatcattagacaatccatagtttaatgtaatyggagaagcagtaagaacatttgccaaggacattttagagccacgttaggtaacccctaggatgtgcatggaagtggcagtcacttcttaatcataaagagagaacctgattcacatgatg

SEQ ID NO: 141766 - DNA, 383 bp, Homo sapiens
tcattgttctcctctacataaaacatgagaaataataatggtacttacctccatggacttactatgagaatgaaatggattatgtatataaagcacctaggaccttgtctagtatggtgtatgccctcaatacatgttactatttctattgttaaaagataagtaatttatcataaataacaagaatcctttttagcattcaaggtatcataaaagtatatttttccaaagaatcattagacaatccatagtttaatgtaatcggagaagcagtaagaacatttgccaaggacattttagagccacgttaggtaacccctaggatgkgcatggaagtggcagtcacttcttaatcataaagagagaacctgattcacatgatg

SEQ ID NO: 141767 - DNA, 372 bp, Homo sapiens
accttgtgtcttcttccattatagccccatctagtggcacccaggagacacgcactgaatatgaatgctgttgtcagcgcctccagctccctccacactaagccccgtggctcccaacaccctctctcacctcctcatgttccctattctggacyttagcatctctctcctgaatcttaactctagctttctaattggtcactcctgagcctaaaaccagccagtggttgcccctgcccccaggatggagcccccacccctcagaatggcccacagggccggccacagtcgggtccccctgcacctgtccggccccttgcactccatcgcactttgtgcactgttgaagacacaccaagaacatatgccagg

SEQ ID NO: 141768 - DNA, 440 bp, Homo sapiens
tcagacctgaaatttgcttccttcatggccctgagctgacccctaggtcttctacaacaccacgacacctctgcaaaagacaatcagcactccccaggccaacctgaaactagcctgccgtggcaactttctacccatgagagatcacttyacctctcccaacctcagttttcttctttattaaattgcaagaacaacccacaacttagaccaagaataatgctgcctactggggcactgggttgactgttacatttgcagaatctctctttttattatcaataatagctggaactgcttgacctgttcaacattcacgttaacagtatccaggctccgtttaaaaaatataaaaaagctctttataaagggaattggaggcccctaaagacaacactggcactaagtgggctatgagtggccccaggctggctccccag

SEQ ID NO: 141769 - DNA, 422 bp, Homo sapiens
gtgggaggcaaagtcgtcttctacagtagaatcagacaatgtcagtgatgtgatttggatgtttgtcccctccaaatctcatgttgaatgtgatctccartgttggaggtggggcctagtgggaggcgtttgggtcatggaggttgatccctcatgaatgtcttggtgctattcccatggtaatgggtgagttcttgccctgagtttacctgagagctggcggtttaaaagagcctggcacctccccacaaccttgcttcttctcttgccatgtgatgtgaaggctcccccttcaccttctgcaatgattgtaaactccctgaggccctcaccaaaagcagatgcttgcaccacacttcctgtacagcctgcagaactgtgcacaaaaataaacctcttttatttcctaacctcaggaattc

SEQ ID NO: 141770 - DNA, 590 bp, Homo sapiens
tgagttgacccagctggaagatcccaattctgagtgccatgtcacttcctttctccttcccaggatgcagctaaaagttctccctttgctgtctatgaaagatgtagccctgtacaaggcttccttcctgttgcccagcaacccagagtgggggaggcaaattggcctggagactcggggcgtgactagttgtcaatgcagggtgctaatgggcacctcagcagagagaggcaaaactgcattccgagtgaccttgagacagccactgcaggagttcctagggaaaggagtcccagacagccgtcagcgtgttcccgttccaaagatgtagtcaaaacagaaggaaaaggaaaactgccatcagaccccctgcatttccctagaaatagccagtcatctaccagagttgtcggagatattttaaattcccttcgcaagaagactgcaaagcattgaagagtgaagagcaaatcaatacagtgtttccacagttcaccacccaactcggagataagacagagaaaaaaattacccaaakatttctttttctggtagacgataggactcttgcgctcacgcctgatttctcg

SEQ ID NO: 141771 - DNA, 578 bp, Homo sapiens
tgtcacttcctttctccttcccaggatgcagctaaaagttctccctttgctgtctatgaaagatgtagccctgtacaaggcttccttcctgttgcccagcaacccagagtgggggaggcaaattggcctggagactcggggcgtgactagttgtcaatgcagggtgctaatgggcacctcagcagagagaggcaaaactgcattccgagtgaccttgagacagccactgcaggagttcctagggaaaggagtcccagacagccgtcagcgtgttcccgttccaaagatgtagtcaaaacagaaggaaaaggaaaactgccatcagaccccctgcatttccctagaaatagccagtcatctaccagagttgtcggagatattttaaattcccttcgcaagaagactgcaaagcattgaagagtgaagagcaaatcaatacagtgtttccacagttcaccacccaactcggagataagacagagaaaaaaattacccaaagatttctttttctggtagacgataggactcttgcsctcacgcctgatttctcggcatggaaatgtgcccttagctgtgaa

SEQ ID NO: 141772 - DNA, 568 bp, Homo sapiens
  misc_feature (1)...(568): n = A,T,C or G
nntggttttcttataagcctacaatacaaagaaccttgatgacagaaaaggaacatgatcatatcccagggcccagagaacttatctgtacaagaggaactgaaggctccaggacagaagagaaataaaatagagacagaatcatttattacatttacccaaccagaagtgaaattctgcctctgttctcccttccctgtctgcttgcacataacagatcagtctcttaacagaatgtctgcagatcagtaacattagagtcacctgcagtacatattataagtgcagattcctgcccactccctgctgccaccyctccactctcatccctgaaagatctactaattctaaatctctgggcaatgaagctcagatatatgcattttaagcaagttttttccaataactctaaagctcattaatatttgagaaccattgctctatactgtgctaaacttagctctttgggggatgccatggggcacttttctagagtcatttctctacgtattgagttccctgatgaaggtttgtctcatttagataacacagagtaacacagagtaac

SEQ ID NO: 141773 - DNA, 407 bp, Homo sapiens
catttccttggcaatgcaaagatcccaaacagcccatgccccacgcctgccttttatgctattgttttcatgcattttaatcctacatatatttgaaaacccacaagacattaatattattgttattttaatagtcaaygttctcttacactatccacatatttatcatttccagtgctctgcactctgtcctgcattatggtgtttcaatctgggattattttctttttgactgaaaaattcccataaaagtcacaatacaaaaacctgatgtggaaaaattcccttcgtttttgtttgcctgaaaacgtcttaatatcatcttaatgtttaaagcatattttcattgggtatagaattctaagttgtagattttcaacatgtcattccattgtcttctcacttct

SEQ ID NO: 141774 - DNA, 407 bp, Homo sapiens
catttccttggcaatgcaaagatcccaaacagcccatgccccacgcctgccttttatgctattgttttcatgcattttaatcctacatatatttgaaaacccacaagacattaatattattgttattttaatagtcaacgttctcttacactatccacatatttatcatttccagtgctctgcactctgtcctgcattatggtgtttcaatctgggattattttctttttgactgaaaaattcccataaaagtcacaatacaaaaacctgatgtggaaaaattcccttcgtttttgtttgcctgaaaacktcttaatatcatcttaatgtttaaagcatattttcattgggtatagaattctaagttgtagattttcaacatgtcattccattgtcttctcacttct

SEQ ID NO: 141775 - DNA, 407 bp, Homo sapiens
catttccttggcaatgcaaagatcccaaacagcccatgccccacgcctgccttttatgctattgttttcatgcattttaatcctacatatatttgaaaacccacaagacattaatattattgttattttaatagtcaacgttctcttacactatccacatatttatcatttccagtgctctgcactctgtcctgcattatggtgtttcaatctgggattattttctttttgactgaaaaattcccataaaagtcacaatacaaaaacctgatgtggaaaaattcccttcgtttttgtttgcctgaaaacgtcttaatatcatcttaatktttaaagcatattttcattgggtatagaattctaagttgtagattttcaacatgtcattccattgtcttctcacttct

SEQ ID NO: 141776 - DNA, 538 bp, Homo sapiens
atgggttcaagcgattcttctgcctcggtctcctgagtagctgggattaaaggcacattccaccatgcctggctaatttttgtattattagtagagatggggttttaccatattggccaggctggtcttgaactcctgacctcatgatctgcccgccttggcctcccaaagtgctgggattacaggcgtgagccaccgcacctggccaaaaattccctttttttttttgtagatgctccttatctaattactccattatctagattgcctatgagactgtttctcttgtctttctgtgttcatggtttttggccatttagtcttgcttcctacarggtctggtgacttaattaaaggacacacattgtgtataaaaaagtacagttgctctggatggtagtagcctattccagaaataatttaattttcttctggcaagcagatagaatatgaaaagaacacctcaatcatgtttaggttatgtttaatgcattactttcaatggcaaaaaccacaattacttttacacagaccttat

SEQ ID NO: 141777 - DNA, 611 bp, Homo sapiens
ttgttttcttcctcactggctgttccttccaactgtcctttactgcccttcgttccttagacctcttctattctgtatctacctgcattcctcaggtgatttcatctagtcatatggatttaaatggcatctaatctttgagaatggtccacttttttttttctttctgatcgggacctcctaggaactgcagaatttgatatcaagctccttactggacatctccaattgcatatctaataggtatctcaaataagtaaaaaagccaagtgtttgactctccacaccctataaacttacacacagtattctcatctcgattgatggttactcactctaatcttctagttgctctgtccaaaattttgggtcatgtttgrcttaggttttcctttcacattcctcttctaatttttcaaaaaaaaaaaaaaatcctgttggttaaatcctcaaaatagatccagattctaaattacaatctcgattgttatcactgaggttggagtaccattgtctctcacctgtcagattacttcaatagactcccttacagtctgctttttaacagaaaaaccagaaagattctttaacaatataattcaggtcatgtt

SEQ ID NO: 141778 - DNA, 591 bp, Homo sapiens
tacaatctgcccattcaacagtctggcctctaacttctagaccgttcctgcatgttactctggccttggagatcacctcttccatgcccaggcatggcatggaatttcacaacaggcagaatgctacagtagatctatcattcatttctctttgggagagtacaaaatagaawtgcaaaaagagcctggaggctgtctattctttaaggttttataccatttaatgatgaaccaccctcatacacccctcattttatgcagttcactttgttaatttttcccacctcttcttttcttttcttaattcaaagcctaactaacaaaacaatggctatattctttgaagaggtggtagtaggatgggttgagagagagggtggaatgaggagagccccgtgttggagcacgaggagcaggtgcctcaggagcagggagaggagaaatacccgctttcctacaaggcactgaggagcagctgacgacattgtgccaaaagctccttgtagctggcaagcttggtggggtgtcctgatctgggccagagtgcaagaaacaacaaatcaaagaatgggagactgtcttgctccgaaa

SEQ ID NO: 141779 - DNA, 609 bp, Homo sapiens
acctttatttcagacttctagcctttagagcagtgagacaacaagtgtgtattgttctaagccatccagtgtgtggtacctgttatgacagctttagcaaactaatacagttggctaataacaatctcttgcttgcaagaaaagtataccacttcacacagagcagtaaaactggcttgaatgccagatatatctttcatagtatacttaagtaagaatatcttttgtttcattcaatatactttcagatcatagctcaagttttggcatcctttcttctattatcccaaaaaggcaatagagggataaatgaagaatgaattctgccctatctttgttgygtaatcaatataatttttgaggtttagaatgaggtgccgagatgttgccaagtaaagagcagatttcagaaattttggttggatctctaacgtcacaaaaatccaaaagttcaaaaacacaaggccaaattaagtatcctataggacactgttcaccacaaccaaggtatggaacctacctaagcatttattagtggataaatgagtatagaaaatgtggtatatatatacatgatgggatattattccatcataaaaaaaataaaat

SEQ ID NO: 141780 - DNA, 469 bp, Homo sapiens
ataatgacaagtcctgctcattttctttcctaaagagatcctagtctatttctctctatcattcatcsaaagtaatatcatttcttgaagaaatcactcaacactttcctaattattccctccaaatatgttttattccctccccatccacttgtcgctcacaagatcaaaagccatccttttaaaatgctgctctaatactgttgctcctttgcttaaaacccttcagtggctattcattgcattgaagatcaagaccagactcatacaaggtttttcaccctctgtttcctgtccatgtccccagcttcccttcacccccttcctaacctcacctccaggcccgagttgctttggccttctttctagttctccagggctctctgctcagccacctgaggccttggcttttccctctgcctgaaaacttcctctgcccctcctctcctgcatgtctttcagattttag

SEQ ID NO: 141781 - DNA, 573 bp, Homo sapiens
taatgtcagtacggtgcctgacatataggattgaatgaatgatacttcttctacaaaccagccagcatctattttctatgtgtaggcagtagagacgactataacatttactgtgtggtaattctgttaagcccttttttttcaygtggaaaaattgaggtccagggaggtgaaatatcccaccctaggtcacaaagaaggcaagtggcagatccaatgatggtggggtgggcgccagcgtggctccctgtcatagctttgggtaaagagtgcccttttatgctactcacaggttagacagaccaaggctgagcggacagacaggtctacaaacagtgcccagctctctgacacttgggagatggcaaacgggatgatgatctcagctgggacgtggaactggagggcataggtgaagaagatgccgatagagtacatcagcttgactgactggtacaacctgcagacacatgaattggatgtgaaaggtgatgtggctccccggaagggccattgaggactcacttactgctcagaagctggtatgggttgagtatccctaatccaaaacaa

SEQ ID NO: 141782 - DNA, 573 bp, Homo sapiens
taatgtcagtacggtgcctgacatataggattgaatgaatgatacttcttctacaaaccagccagcatctattttctatgtgtaggcagtagagacgactataacatttactgtgtggtaattctgttaagcccttttttttcacgtggaaaaattgaggtccagggaggtgaaatatcccaccctaggtcacaaagaaggcaagtggcagatccaatgatggtggggtgggcgccagcgtggctccctgtcatagctttgggtaaagagtgcccttttatgctactcacaggttagacagaccaaggctgagcggacagacaggtctacaaacagtgcccagctctctgacacttgggagatggcaaacgggatgatgatctcagctgggacgtggaactggagggcataggtgaagaagatgccgatagagtacatcagcttgactgactggtacaacctgcagacacatgaattggatgtgraaggtgatgtggctccccggaagggccattgaggactcacttactgctcagaagctggtatgggttgagtatccctaatccaaaacaa

SEQ ID NO: 141783 - DNA, 573 bp, Homo sapiens
taatgtcagtacggtgcctgacatataggattgaatgaatgatacttcttctacaaaccagccagcatctattttctatgtgtaggcagtagagacgactataacatttactgtgtggtaattctgttaagcccttttttttcacgtggaaaaattgaggtccagggaggtgaaatatcccaccctaggtcacaaagaaggcaagtggcagatccaatgatggtggggtgggcgccagcgtggctccctgtcatagctttgggtaaagagtgcccttttatgctactcacaggttagacagaccaaggctgagcggacagacaggtctacaaacagtgcccagctctctgacacttgggagatggcaaacgggatgatgatctcagctgggacgtggaactggagggcataggtgaagaagatgccgatagagtacatcagcttgactgactggtacaacctgcagacacatgaattggatgtgaaaggtgatgtggctccccggaaggrccattgaggactcacttactgctcagaagctggtatgggttgagtatccctaatccaaaacaa

SEQ ID NO: 141784 - DNA, 471 bp, Homo sapiens
aataactttaactttatatctgtggtttagcaatatggatagaaagcaagatttctttccccattagtctccatttcagtctcaggtgggctcagaaaagtccaattagagagcatgtgcttgtctctcagccaacggctgtggccagtggtggggttcaacttcatctgagtcatctgaactcaaggttgacttaaaggagcagcaaacaaaaggaattccagattttgttaccaggaaagaatgttaggcaggcagaaattcagttatctactacataagaacacaattttttaaagaatgttgacaagatatactgaattcagtgaactatggatagatggaattagaaaagatttgtaaaccatgtcatataaaarattagggaaaattagtcatgttttgcttgaacaagaaaagaatgagacaagggctaaggcagtaaatgagggttaattttatgcgttatat

SEQ ID NO: 141785 - DNA, 507 bp, Homo sapiens
gaattcattgcttattaatcacaaactgggttttataatggtgtattacttgtttcaaagttctgtttttccaacccccaagttagcagtgtcttttcctaattaaattggatttcttccaatatgcctcagaatagtcaccaagatttattcttcttcttttttccgtgtggcaagagtaatataaatagcaggtgtaaagattttccttcaaccatccttaaaattttaactgaagggttcctccctgtattaatgtattccagccagttgacaagataatgctccactgatgttgtatatctaatctaaccttttgtctttgtcaggaaaagaaagatttttcttggagatagctgagtgcaaaagaatgcagtttgtcactttaatagtaggtccgggagttgtrgcatggtttgtgctatattttggcacaggcacatgccattaaaaatgaagtggctcctttataaagtaataagaacacaaactaaatttgtgttccta

SEQ ID NO: 141786 - DNA, 552 bp, Homo sapiens
cccccaatcacacttcttggtatttatgccctgtgtgtattcctcttcgagagtcagctggatgtagtaaccaacttctaacaaacagaataaaacaaaagtgatctcatggtatttctgagattatggcacaaagaccgtgatctctctctctttctctctctggcacggaatcttccaagttgtgaatagccctatttagagctccacatggcaagaaactgatttctctagctaacagccgcaagaacgkaagtcttgccaatagcaatgtgagtgagcttggaagtggatggtcccccagccgtctttagatgactgaagcctcagtcaactatttgattgcagctcttctaggacgggaaaccagaggaccctggtcagagcttctggactcttggcccacagaaacacccagtattaaatgcttattattttttgtcataaagatttgggataatttgatacatatcacagataactacacaaaacagataatgattccttctacttctaagatagttgttgttgttgttgttgttgttgttttcc

SEQ ID NO: 141787 - DNA, 552 bp, Homo sapiens
cccccaatcacacttcttggtatttatgccctgtgtgtattcctcttcgagagtcagctggatgtagtaaccaacttctaacaaacagaataaaacaaaagtgatctcatggtatttctgagattatggcacaaagaccgtgatctctctctctttctctctctggcacggaatcttccaagttgtgaatagccctatttagagctccacatggcaagaaactgatttctctagctaacagccgcaagaacggaagtcttgccaatrgcaatgtgagtgagcttggaagtggatggtcccccagccgtctttagatgactgaagcctcagtcaactatttgattgcagctcttctaggacgggaaaccagaggaccctggtcagagcttctggactcttggcccacagaaacacccagtattaaatgcttattattttttgtcataaagatttgggataatttgatacatatcacagataactacacaaaacagataatgattccttctacttctaagatagttgttgttgttgttgttgttgttgttttcc

SEQ ID NO: 141788 - DNA, 602 bp, Homo sapiens
taatggccataatttcaataatgttttccaaaccaagccaaaacttacacaggccacaaaaacattaatgagggaaacagctctgtatatttgaagtgggcaccatttccctcccaatgtttagtatttataattatcatatgcatcctttttcagtataaaaaagctagatatatacttgtaaaatagatttattcaaagtgctaaaaataagttctagctcttcaaagatcacattccagtttttcaaacagtcttgaaaaagagacatttcagggcaggctcagttccaccactaactgtgttactttaggcagatccacacagtctggttgggtcttaggttttacttataaacaataacgctatgtaggctggttagatatctgtgtgtgttctgtattgttactttctctcctttgcccttctatccttagtttttcttttctttgtctctctactcttcttttatttctgtttctcccatgatttttattttttatgttgcctstaagacaggatctcctagagtttctaaatctttaaggagtatttaggtttaaaagagtgaaaatgcagtgaacatgatttatcgtgataat

SEQ ID NO: 141789 - DNA, 409 bp, Homo sapiens
acataaccttaaaattaacatcgtgaccctacaaggaaacattaaatgggttgaaaagtaatggtcttgaaaaggaaagccctgcctttagaatacaagctttttttttttttwaaaaaaaaaaaaggaaaaggaaaaaaaaaagccactaatgaataattactttaatgagcctctggtctcagagctgcttacgttcattggcattaatgctgtgaaatgttggatgctgtgaacacattaaaattttcattttagtgcttttttgttcaacaaagcaatgaaatatcccaaattcctccatgaggtgcctctttggcagttgaccttgtcatcaaaatactaatgctgtccaggggatccttctagctaccacctggcagagtgccctgaaacactaataggacca

SEQ ID NO: 141790 - DNA, 454 bp, Homo sapiens
gcctcttcattctctatctccttcctgggcataaatatatagacaaatctccatgtgttacaacagaacatgctgttgccctccctctggccaatcttcctccttcctctgaattagagtttcaaatcccaaaattcagcctgggacattgatggatggagcatgtgagctgtgcatctcccctacctggctcatttgattagtggagacagctgaaataggaaattcaggccccaaagtatgttttgagtctggatgattccatttggctgaatcccyagacagagaaactggagagcaatcaaatacccacttttctttgtgttgggcacatgtagcaggctgagaattctgatgcctttgtagttaaataaccttgtacacttccttgttatcccagactagaattagcctttatgtatcccagtgattgcttaattgtatgcgaaaagaa

SEQ ID NO: 141791 - DNA, 594 bp, Homo sapiens
gggctttagcgaaagggttgcgcttggctctaggcacctgggctgagtctttttcccaccatcgcagggcgggaaccagcggagggggctggctcggatggggagaaaagcaactggagggcgccgaggggaagagggagcccggatctgtcagggcgtcctcttggactaagggatgttcccctaaaccacaccaccccacctcgttcagattctgggaaacccggcacgcacataccctgcacaataacaggcagggtgaggtctctaagccccgaagatcgctctctcagcggaggcagtggccctgacgagggggtacagctgcacgcgcggggtttctctccgaaccggagtgcagcgtagtcgmggtccaggattccccatccattattcacgatgtttactagagcggggcaagggagaggaaagaagagggaagtagagagaaaaagaggctaggggaggtggaggcgggcagtgctaacctcgagagccctcaagttccgaaactttgagaaggaagaccaagaggctaaggcgcctgggaagcagcaggccgtcagtaaatatttgtaagatggatggataact

SEQ ID NO: 141792 - DNA, 552 bp, Homo sapiens
cataaaataaatagaatgattaaaatgattatgaggctgatcatgcttgtaatcccagcactttgggaggctgaggtgggtgaatcacctcaggtcaggagttcgagacttggccaacagggcgaaactcagtctccactaaaaatacaaaaattagccaggcatggtggcgggcgcctgtaatcccagctactcgggaggctgaggcaggagaatcatttgaactcasaaggcagcggttgcagtgagctgaaattgcgccactgcactccagccttggtgacagagtgagagtctgtttcaaaataaataaataaaatgattatgaataccctgaagtgcacatttatttatttcttttaattggcccccagattatagatatgtatgatgtacgacgtgatattttgaaatatgtatgcattgtggaatggccaaatagaactaaataatgtctgtgtgacctcatatacttaccattttctgtagtgagaacactttaaaatccactctcttaaagagattttcaagaataaaatacattgttatgag

SEQ ID NO: 141793 - DNA, 552 bp, Homo sapiens
cataaaataaatagaatgattaaaatgattatgaggctgatcatgcttgtaatcccagcactttgggaggctgaggtgggtgaatcacctcaggtcaggagttcgagacttggccaacagggcgaaactcagtctccactaaaaatacaaaaattagccaggcatggtggcgggcgcctgtaatcccagctactcgggaggctgaggcaggagaatcatttgaactcagaaggcagcggttgcagtgagctgaaattgcgccactgcactccagccttggtgacrgagtgagagtctgtttcaaaataaataaataaaatgattatgaataccctgaagtgcacatttatttatttcttttaattggcccccagattatagatatgtatgatgtacgacgtgatattttgaaatatgtatgcattgtggaatggccaaatagaactaaataatgtctgtgtgacctcatatacttaccattttctgtagtgagaacactttaaaatccactctcttaaagagattttcaagaataaaatacattgttatgag

SEQ ID NO: 141794 - DNA, 552 bp, Homo sapiens
cataaaataaatagaatgattaaaatgattatgaggctgatcatgcttgtaatcccagcactttgggaggctgaggtgggtgaatcacctcaggtcaggagttcgagacttggccaacagggcgaaactcagtctccactaaaaatacaaaaattagccaggcatggtggcgggcgcctgtaatcccagctactcgggaggctgaggcaggagaatcatttgaactcagaaggcagcggttgcagtgagctgaaattgcgccactgcactccagccttggtgacagagtgagagtctgtttcaaaataaataaataaaatgattatgaatrccctgaagtgcacatttatttatttcttttaattggcccccagattatagatatgtatgatgtacgacgtgatattttgaaatatgtatgcattgtggaatggccaaatagaactaaataatgtctgtgtgacctcatatacttaccattttctgtagtgagaacactttaaaatccactctcttaaagagattttcaagaataaaatacattgttatgag

SEQ ID NO: 141795 - DNA, 553 bp, Homo sapiens
aatcttaattttggttatattaatattcagtgttcatgttttctgtgcaagcaacatttactgctgagtcatgtaaaatgctatagttgcttttcctttgctgcatgatatttaatttttctgggaattaataattagggcttttaatatttgttttgttttttttgtatgcttgttattaattaaccccaaacactcaccatttatgtaaatctyctctcaagactttctttctttttttcttttctttcttttttttttttttagacagagtctcactctgttgcccaggctggagtgcagtggcgtgatcttggctcactgcaacctctgcctcccgggttcaagcaattctctccctcagcctcccgagtagctgggattacaggtgcctaccaccatgcctggctagtttttttgtatttttagtagagacagggtttcaccaacttggccaggctggtcttgaactcctgacctcgtgatccacccacgttggcctcccaaatgctggtattacaggcatgagccaccgcgcccagccaagactttc

SEQ ID NO: 141796 - DNA, 468 bp, Homo sapiens
gaagagagctccagacctggtcagagagccttttaaataagtcaggtggcaagctggccaggacacattcttaagtcaaaaaggcagattgtaaaacaataaaggtcccatcttttgggggaaaaaatatgtgtgtgaatgcacaccaagaagtttggaaggcaatactctgtaatatttaaaatctcttcttatatctttattgtctgaactttttgtttacaaagatcctatatattacttttagaaygagaaaaaaatacggtttgtataaaatttgaaaataaaaaagataacaaagctgagttcctattccctcagtacccacaggctcctggaacagaacgtagcaagtccaccattgcccaggcagcttggctgagtgcttaaatctccagatacagttccaggggcttgttcatccaaaaaggtacctggcacaacgtgagcagcagttctgccacagct

SEQ ID NO: 141797 - DNA, 570 bp, Homo sapiens
atattaaaaagacttaatgccaatcttacttaaactctttcaaaaaacagaaaaggaggaaacatcttctttcttgtgtgtgtgtgtgtgtgtgtgtgtgtgtgtgtgttttgtttttttttgagacagagtctcgctctgtaacccaggctggagtgcaacgacgagatctcagctcactgcaacctctgcctcctggatgcaagcgattctcctgcctcagcctcccaagtagctgggattacaggcacccaccaccatgcccagctaatttttgtatttttagtagaaatggggtttcactgtgttggtcaggctggtctcgaactcctgacctcaggtgatscacccgcctcagcctcccaaagcactaggattacaggcgtgaaccaccacacctggcctaaagatgccacttttaccacttatatttactaccgtaccagaagttttagccagagaaactaggcaagaaaaataaataaataaaggcatccaatttggaaaggaagaagtaaaattgtatttgcatatgatatgattctataaatagaaagtctcatagaattc

SEQ ID NO: 141798 - DNA, 373 bp, Homo sapiens
gaattcacaaaaaaactattggggataataaattaagcagtttcagactacaagatcaacacacaaaaattagttgtttctatgcaatagcaatttaaaatccagaaaggaaattaagagaataatttcatttacatgttttcaaaaagaataaaattccttggaatacaattaccaragaggttaaaaccttataaaatgaaaactagaaaacattgctgaaataaattaaagaagacctaaataaatggaaagacatcccttcaatgtttatgcattggaagacttaatattgacacagaacaactgtataggattagagcctggaaataacccaaacatctataaccaactgatttttgataatgaagcc

SEQ ID NO: 141799 - DNA, 500 bp, Homo sapiens
acctcccccaattggaacagagagactggcccgaattcggcaaggagggtctgttgcacaagccccggcggggaccagttttgtcgctcccgttggacacagtggaatctggtcatttggtgtcaatgctgtgtcaggtacaattgccttgctctctctctggagggatatcttaagtaagctgtaggtttgccattaaaacttagttccttagaaaaaacaaacaaaaaaaacttagttcctatgtttaacactcaattagggaagggtgtttatatctttgaggagttcagtccaatttcagagtctggaatattggttgaggtaatacatagagttaatcagaaacaaaagattcaaagtgtgtgtcctttctctcttaaataatcatttgagttctttcagwgagtacttaatcttttaaaagacagggtaaagtggagtattcagaggactttacctagtttttcaggaactggttttttttggctagcaagact

SEQ ID NO: 141800 - DNA, 601 bp, Homo sapiens
attttatgaggacttggggaggggaggaggggtcaggggaaggcttcatccaagagaaacagcctcctaggaggatccagccaagaaaaccctaaccggggggcctggggggttctctgagcgtggccagggatgggagcmtgaggggatacaggagccagaagaggggcggagcactgcagatggggaagagacccctcaggctggtccttcccccgccagctagtgcctccttttctgctgccgctgctgaaccagggaccacccagaagccccagctcccccatcactcccacttgggcgcgttcattcattccttcatgcactcattgactcattcactcattcacacaggcagtcactgttcctgctcattctttccctctttcattcattccccctctggttcattcattcactcactgaggcactggctcaaaggtgaacagtcaagggccctgccttcaaggcattctttggttagtacaggacagtccctgaggaggagcatgcctgaggctgtaagaggccaggggaccctccccaggaaggggtgagttcaggtaacatgagtgtggggcactaggtggtaaagggagag

SEQ ID NO: 141801 - DNA, 601 bp, Homo sapiens
attttatgaggacttggggaggggaggaggggtcaggggaaggcttcatccaagagaaacagcctcctaggaggatccagccaagaaaaccctaaccggggggcctggggggttctctgagcgtggccagggatgggagcatgaggggatacaggagccagaagaggggcggagcactgcagatggggaagagacccctcaggctggtccttcccccgccagctagtgcctccttttctgctgccgctgctgamccagggaccacccagaagccccagctcccccatcactcccacttgggcgcgttcattcattccttcatgcactcattgactcattcactcattcacacaggcagtcactgttcctgctcattctttccctctttcattcattccccctctggttcattcattcactcactgaggcactggctcaaaggtgaacagtcaagggccctgccttcaaggcattctttggttagtacaggacagtccctgaggaggagcatgcctgaggctgtaagaggccaggggaccctccccaggaaggggtgagttcaggtaacatgagtgtggggcactaggtggtaaagggagag

SEQ ID NO: 141802 - DNA, 355 bp, Homo sapiens
agagtgaaggtgccacacacttttaaatgaccagatctcatagaacttactatcatgaagacagcaccaagccacgagggatctgcccctgtgatccaaatgcctcccaccaggccccacttctaccactggggattataattcaacatgagatttgrgtagggacaaatatctaaactatatcatgatggaaaaatagaaaacaaatgaatcaatgaaacacaagagggagtctagaaataggcccaaatataaacaaacaactgaggatttggggtttttttttgagacaaggtctcactctgtcacccaggctggagtgaagtggtctgatcacagattactgcagcctaaa

SEQ ID NO: 141803 - DNA, 361 bp, Homo sapiens
ggggctcttcctggacagcagggttgtggggtctgcttgttgccttccagccacagaatgaattaaagacccttggaaatctcttccagccccacattctagaatctttctgaagattggtcacatgtgcctgtgggcagggtagccataatttattgttctgaaatacttttttttttttttttgagacggagtctcgctcaactgttgctcagggtggagtgcagtgatgcgatcrtagctcactgcagcctcaaccttgtgggctcaagtgatcctcccacctcagcctcccaagtagctgggactacaggcgtgtaccaccacggctggctagtttttgtattttttgtagaaacag

SEQ ID NO: 141804 - DNA, 368 bp, Homo sapiens
tgtgtagaccagagctctgggcctttgcagtctctgatttgctctggccccctggctcccacttttatgaactctaaacctgtctcttctcattcctttgtcgccactggacttcaggtaccctacgggtggtgttgaggctggtccccaacattggtggaagaagcacctttatggaccagacagccatgtactcggtcagccccactgcagatacgccggarggaggtccaaaagccgttttcagggagaggactctttgccccttgttagttaaaccttggcagacatgctgggcaggaatgacataccctatgtgtaagtacctggaaaaccccacggtgctcccacacactcaaccggaagca

SEQ ID NO: 141805 - DNA, 390 bp, Homo sapiens
tgaattccagagaaatgtggcactaaatgtcatgaagctgactctgtattataccagagtggcctccagattgctttcacaactgggtagttcatcagctaatgtgattctccaaactttaaatgattagaaaactggggaaaaatgtagaaaaccagaggaaaacactccttctaatccaaatataaattcttcacttcttttcaatgttcttccaggagaaggattcgttgggctctttgccttctgcttttatttctgtgcaagggtttatgcaagaggtacttgagaatgctgtactgtagagctttgtttctcatgggaacacacggggaagtggaaaaccctccaaattgtttrgtgagaaaacataacatttatccctttctt

SEQ ID NO: 141806 - DNA, 618 bp, Homo sapiens
gctttgcaggctgtacaagaagcatgacaccagcatctgcttccagtgagggccttaggaagcttccactcatgcgggaaggtgcaggggagcaagtatcacatggtgagagaggarggagaggaggaggagccaggctccttttaacagtcaaatctcacagaaatgaatagagcaagaactccttcattatcgtgaggacagttcatgacagatctgcctccatgacccaaacaccttctaccaggccccatctccaacattaaggatcaaatttcaacatgagatttgaaggggacaaatacgcaactagatcatgcaaggaatttaaaaaaatcaaaaataaaacattagggatgtttatagtttgggacaatgtgattttaaaaaagcttcatagaacatggggcatttgaactttacttataaggatggttatatattatgtatttaattaattatgcatttatttaattatgtattaattacacattaattaattatgtatttcttttgtcttatttgacaaaagaaaagaagacattccaagtggaaaaaacaaggtgagcaaaggcaggtggaaagactaggttacagtcagggaaaattttattagtt

SEQ ID NO: 141807 - DNA, 618 bp, Homo sapiens
gctttgcaggctgtacaagaagcatgacaccagcatctgcttccagtgagggccttaggaagcttccactcatgcgggaaggtgcaggggagcaagtatcacatggtgagagaggagggagaggaggaggagccaggctccttttaacagtcaaatctcacagaaatgaatagagcaagaactccttcattatcgtgaggacagttcatgacagatctgcctccatgacccaaacaccttctaccaggccccatctccaacattaaggatcaaatttcaacatgagatttgaaggggacaaatacgcaactagatcatgcaaggaattwaaaaaaatcaaaaataaaacattagggatgtttatagtttgggacaatgtgattttaaaaaagcttcatagaacatggggcatttgaactttacttataaggatggttatatattatgtatttaattaattatgcatttatttaattatgtattaattacacattaattaattatgtatttcttttgtcttatttgacaaaagaaaagaagacattccaagtggaaaaaacaaggtgagcaaaggcaggtggaaagactaggttacagtcagggaaaattttattagtt

SEQ ID NO: 141808 - DNA, 618 bp, Homo sapiens
gctttgcaggctgtacaagaagcatgacaccagcatctgcttccagtgagggccttaggaagcttccactcatgcgggaaggtgcaggggagcaagtatcacatggtgagagaggagggagaggaggaggagccaggctccttttaacagtcaaatctcacagaaatgaatagagcaagaactccttcattatcgtgaggacagttcatgacagatctgcctccatgacccaaacaccttctaccaggccccatctccaacattaaggatcaaatttcaacatgagatttgaaggggacaaatacgcaactagatcatgcaaggaatttaaaaaaatcaaaaataaaacattagggatgtttatagtttgggacaatgtgattttaaaaaagcttcatagaacatggggcatttgaactttacttataargatggttatatattatgtatttaattaattatgcatttatttaattatgtattaattacacattaattaattatgtatttcttttgtcttatttgacaaaagaaaagaagacattccaagtggaaaaaacaaggtgagcaaaggcaggtggaaagactaggttacagtcagggaaaattttattagtt

SEQ ID NO: 141809 - DNA, 623 bp, Homo sapiens
gatctgtctcacatgtttatgagccagctttctggctgataaactcatatcctgtatttacattttattactatttgatttctttcttacagttgatccaaagtgtgaaattgggagcctggagcttgccaacacttccatgttagaaaaaatgtacaatgaaagagtttgagttttgtgttttgtgttttgtgtggytttttgttttgttttgttttgttttccctgccaaggacacaaaaccttgtgagctaatctctgagatctctgtgtccgctcgctgccccactgcctcctcatgggacattttgcttaacatgtccttggctttagctactgctacaagctgaaggtctttctcatgagatgcctgaaactagtgggtttattcctgaattaaggctttggaagaaaggcagggccaagccaagagagaaggatttagacttcagggcagcagatttcctcatattaactcttttaaacctcttttaccctaagtccaaattccttcttgtttctcatcatccatttctctttctaatacatttctgaattcttaataaaactccaatccatttctcaaataaatctattaaactcttaactctggctgaagtata

SEQ ID NO: 141810 - DNA, 527 bp, Homo sapiens
acagcacttctgtctacagcatggtttattgaatattttaaacycaatattgagaattactgctcaaaaaagtgatccctttcaaaatatttctactcactaataaggtacccagttacccaagagctctgatgaagatgtacaaggagattaacgttgtttttcatgattgttaacataatgttcattttcaacctatggttcagggagtcattttgactttcaagtcttattatttaattcatttcacaaggctatagctatcatagatagtgattcttgggaaggatctgtgtaaagtgaaagtctcctggaaaggattcattattctggatgccatgaagatcattcgacattcatggaaggaagtcaaaagatcaacattagtaggagttttgaagaacttgattctacccttatgaatgattttgaggattcaagacttcaatggaggaaataactgcagttatggtggaaatagcaagagcactggaattagaagtagactctgaagatgtgcctgtatt

SEQ ID NO: 141811 - DNA, 575 bp, Homo sapiens
aaacctgtaacttcactaaagtatgcccatatatagggttcagtactttctgcagcattaggcatccactgaggctgttggaacatatcccccagattaggggatagagggggctactgtatctctctaatcaagtgatcaaagttaacatcaccaagagtagaatgaacagacatcctatatatctctctctctttgtttttttgtttttgtttgtttgtttgtttgtttgttttgacagaatctaactctgtcgcccaggctggagtgcagtggcatgaacttggctcactgcaatctctgcctcctgggttcaagtgataagtgattttcctgccttagcctcctgagtagctgggactacaggtgcatgccaccacactaggctaatttttgtatttttagtaaagacggggtctccccatgttggcccggatggccttgaactcccgacctcaggtgatctgcctgcctcagcctcccaaagtgctgrgattacaggcgtgagccaccacgcctggccctgtgtctccttaacatcatgcactcaaaaggacacagcatcacttctgagg

SEQ ID NO: 141812 - DNA, 526 bp, Homo sapiens
gactgctttttcattgtgaatcactgtttctctgggtgagatggtcagcycaatttcccaaacaatattccagtctagcgtggaaaattgtgactagaaagagcaaacaaccttggaaaatagttttattacacattatataaatgagagattcatatctatgtcagttagtgccaagcccagaaatcagaggtcattctaaatatttcaagcaaagagggatttaatgcagacaattggttacagtgctcttagaaacacagaaagaacacaaaaaagaagagtgttataaagacactggaagctgcgattgaacctggactgaagcctagctgcccttgccctctgtctgctggaggtgctgccattgatgctgaaactgcatccgggcaactgagcaggaaagttaggagtttatcttcctgctgctgcggctgaatgcatgactgctgcttttacagctggatccacaccactgcagctgagcaggaaatgcaggagtttatgatcctgctgttgctgctga

SEQ ID NO: 141813 - DNA, 585 bp, Homo sapiens
gcaggagtttatgatcctgctgttgctgctgaatgcattgctgctacttcttcagttggattcataccattgcagctgagcagaaagtcaggagattacacttctactgatrttgctgccacatcttgatgtaccattaataatagaaaataaaatggtttccctcttcttttatactatattctctcagactccactgtcaatgaaacctggaaaaaatggttttcaggctcccatttctgccagttattcagaaaagagcattacagagtaggggtagagctggcaattaatagacatagagtcaacatagttcacctgctgcttatacagtgtccatttgcctcccttgtacccttatttaaatttcattcaacaacaatcacaacaatatggtgcttttacctaacataattaacaattttgcatacaaacagaaaagctgtcactctggatattctgtaatttaaacactaaattgcacaatagccatcatcccactttatatgtaaaataggataagaaagggaaagacgaaaaaggaaacagctgattaacatacacaaatattgcataacagacgag

SEQ ID NO: 141814 - DNA, 391 bp, Homo sapiens
gaggttactaaattactgaaaatcaaacattcagcagyaaaaaagcagaaatgaattttgacgttagttctgcttaattaaaaattcatatactttacctgatttttttctttttactgtatattcctccttcaatgggctgaaggggggctcatattcgtatttttaatttagtttacaaaagggctttcctgtgcttcacactatttaataatttccaaaatgccatgttagctacgtaagacaaatgttttattattgaagtgatttttgacatatatgaaagcaaagactgaaaaaggttgttttctttgagctgtagctcactgccttaggaactagcagacctggttcttgaacccaaacctcctgaaaccaaatcttatctttt

SEQ ID NO: 141815 - DNA, 591 bp, Homo sapiens
ccttgatcactttgctggtgtttgctctattctcctaatctctgaaaattttattcatactttcattttctccattaaaactcttttaattttaataaacatgagctagttctgcctctttcattataccccttgtaatatgttgtttttcccttatggtacttacatttttgccttgtaatatagttctcttagcacttaygttatatctatgagctttgctatcactttttcagtatcagctaggattctttagttatgggtaatagaaaccatctatggctagcttaaaaggaagagagggaggagggaaggagggagagaaggaagggggggatggagggagagagagagagaaagaaaaaaataaaatacaacccctatggaaaaatggtatgtagattcctcaaagaactaaaattagatctaccagtagatccagcaatcacactagtgtgtatctactcaaaggaaaagaagtcattatgaaagaaagcaaacacctgcacacagcacaagtcacaactgaatacatggaatcagcctaagtgcccatcaacctatgagtggataaagaaatgtgacacatat

SEQ ID NO: 141816 - DNA, 591 bp, Homo sapiens
ccttgatcactttgctggtgtttgctctattctcctaatctctgaaaattttattcatactttcattttctccattaaaactcttttaattttaataaacatgagctagttctgcctctttcattataccccttgtaatatgttgtttttcccttatggtacttacatttttgccttgtaatatagttctcttagcacttacgttatatctatgagctttgctatcactttttcagtatcagctaggattctttagttatrggtaatagaaaccatctatggctagcttaaaaggaagagagggaggagggaaggagggagagaaggaagggggggatggagggagagagagagagaaagaaaaaaataaaatacaacccctatggaaaaatggtatgtagattcctcaaagaactaaaattagatctaccagtagatccagcaatcacactagtgtgtatctactcaaaggaaaagaagtcattatgaaagaaagcaaacacctgcacacagcacaagtcacaactgaatacatggaatcagcctaagtgcccatcaacctatgagtggataaagaaatgtgacacatat

SEQ ID NO: 141817 - DNA, 600 bp, Homo sapiens
ctaatgaaattaagacattggtataaaagtaattttattattagctcctggggagaagataccctatcctaatgttgcttgaattgtttgttctcataaatctcagtttggagaagcatgacttccttttcttaaaactgtatgcatctctgtcgttattccagatagttttttaagttgaacagttttagaaatttagaaataaagagtctccctgataaaaattagagtccattaaaacagaatggggaaaacagacttgtaagattaatggcttctgaagataattttaaatgcaagaaggattgaccatccacatattggttgaaatcatgaatagatgaaggcaggatgtgtacaatcatgcaccccatgagtctataatcttatggaaccgcatgtagaatgttggtmccataagattataatggagctgaaaaattcccgtcacttagtgacatcatagccattataactcataatgcaactcattacttacatgtttgtggtgatgccagtgtaaacaaaccaactgtgctgctagttgtattaagtctagcacatataattatatacagtgcataatacttgataatcaat

SEQ ID NO: 141818 - DNA, 709 bp, Homo sapiens
tatttggtggtctaaaaatataattattatactatttgttttagagacagggtcttgttctgtcacccatgttggagtgcaatggcgagaacatggttcactctagcccccaactcccgggctcaagtgatccccctgcctcaccctcctgagtagctgggactgtaggtatgtgtcaccatgccaggctatttttttcatattttgtagagatagggtctcactatgttgccatgctggtctcaaactcctcaagtgatcctcccaccttggcccctcaaggtgctgggattacaggtgtgtgccaccacaccttgcctagaaacagaattactgaatgaactaaatcatagttctgctgaatagaactgaaaatagttcagttcaggttaacaaactgataaacrttagttgttatcctagtattatccctagtatgtgataatacatagaaattatattgtatccttttgtacttgtaaaacatcatattatgccaaattttaaatgctatcactaatcgtccattaagttatagtcatattatagcatccaactaaaagaaataactgcttctcagtctaaaacctccaaaacaaataatgtagtcaaacaataacatttaaaattttcaaaatttattttatggtttcagccatcaatgtaacaaacatgtaccattacgcatatcgtatattatgtgccatta

SEQ ID NO: 141819 - DNA, 558 bp, Homo sapiens
tagtggcataagcaactgtaccttaatgtgaatctggattaaaataaattttgaaattaaagaaaaatatgaaaacatagaaaagcaaagacttgtgattgtatacttgatatcacactgcacatacaactttatatcttacttatttcaccaaatattgttgcctttggagaatgttatgcttatgatggggtttcacaaaagtttctaatgyggctgcatgcttcatgaatccctaggtccaacgatactcttaacaataagaaagaggacaaatctcaagttcttgtttgcacagggtaggaaatgacagcaaagcctctctggttgatgtagaaggctatttctcctttagtatgatgttgctgctgctttcaccggagcttcaagcattctatcaaattggggcatgagacactgatggttgtaggattttttattataggagggtaacctaggatgattaaaaactcagtttcccactgaatcccctagagcagggattgacaagattttctgtaaaggttcagagagtaaataattttgtatttgtaggcc

SEQ ID NO: 141820 - DNA, 558 bp, Homo sapiens
tagtggcataagcaactgtaccttaatgtgaatctggattaaaataaattttgaaattaaagaaaaatatgaaaacatagaaaagcaaagacttgtgattgtatacttgatatcacactgcacatacaactttatatcttacttatttcaccaaatattgttgcctttggagaatgttatgcttatgatggggtttcacaaaagtttctaatgcggctgcatgcttcatgaatccctaggtccaacgatactcttaacaataagaaagaggacaaatctcaagttcttgtttgcacagggtaggaaatgacagcaaagcctctctggttgatgtagaaggctatttctcctttagtatgatgttgctgctgctttcaccrgagcttcaagcattctatcaaattggggcatgagacactgatggttgtaggattttttattataggagggtaacctaggatgattaaaaactcagtttcccactgaatcccctagagcagggattgacaagattttctgtaaaggttcagagagtaaataattttgtatttgtaggcc

SEQ ID NO: 141821 - DNA, 558 bp, Homo sapiens
tagtggcataagcaactgtaccttaatgtgaatctggattaaaataaattttgaaattaaagaaaaatatgaaaacatagaaaagcaaagacttgtgattgtatacttgatatcacactgcacatacaactttatatcttacttatttcaccaaatattgttgcctttggagaatgttatgcttatgatggggtttcacaaaagtttctaatgcggctgcatgcttcatgaatccctaggtccaacgatactcttaacaataagaaagaggacaaatctcaagttcttgtttgcacagggtaggaaatgacagcaaagcctctctggttgatgtagaaggctatttctcctttagtatgatgttgctgctgctttcaccggagcttcaagcattctatcaaattggrgcatgagacactgatggttgtaggattttttattataggagggtaacctaggatgattaaaaactcagtttcccactgaatcccctagagcagggattgacaagattttctgtaaaggttcagagagtaaataattttgtatttgtaggcc

SEQ ID NO: 141822 - DNA, 422 bp, Homo sapiens
aatataaccaaattgttccaatagaaaggacgttgcttaacatggcaaatgaacagccatagagcttaaaaattttgcacgttgagaaatcttttaaaaattaagctctcctaggaacttattctgttaaaaagataggcttttatgacarccatctctccacacctaggcaaaaagggcagattagagaaatataatagagtaagacaaagaaaccatccctaagcagaagctagagcgagaaaagaaaatgcaacacttaaatcagaaaaaaggaaacacctttggtttcaggcaatgtacttcctgagatttcagagcccaggcagactcaataattaaataccgaacaataagtcgtagaagacagtcactgaaaaacctttaccattaataccaaagattctgacttttaagaaaag

SEQ ID NO: 141823 - DNA, 433 bp, Homo sapiens
ccaaccagtgaatgcctctgctgcaattaatgacagcatctaccagctaagggactaaggactggcctgcttagtacccctatgcccatcaaagccacatcacagctttcacaaaccaccgccacttagccactaagaagcttacacacactgctgacactgatgaaaggtagttatatggaatctacactagaatgcctacccagaactaaagccaaaagtactccacttaactgacattatatatacatctatttttcccwacgaaagctaatccataaaattagaaatgaccattacaccaaatgtgcagatatcaatgtaagaacaaaagaagcatgaaatagcaaggaaacatatctccaaaggactacaataattatccaaagaaaatgaattcatgaaatgaaatgcctgaaaacaagtttaaaaa

SEQ ID NO: 141824 - DNA, 476 bp, Homo sapiens
gagttcaagttagacaaattgtctctaagtcaccagtgatatgtgcaagagaaatacccaagcaatttatataattagagkttgacaattcaagggaggaatcccagctataaataaatatttggaagatgtcagcatgtagagcactactgatccattctctggaaaatatgtagagtgagttggaagaagtataatagatttctaagcataagaaacatttaaggactgggcaaagaagtaagagatcctctccctctaaaagcagagattctgagatgaagaaatttaatggtataagaaaaatcagaaaagttaatttggggggggcagagaaggaaaataaacatagcttaatattcagagaattcaattacataaatcctaatacattttggctgaaaaagggtttgccattggcatgttcatattttgatagagaaaacaggcaaaggtcactggtgttgaggaaatgg

SEQ ID NO: 141825 - DNA, 615 bp, Homo sapiens
atagtttgcccatcggtaatcttctttgacagtctttattttcccttctaattcctattagtattgtgtttgtttttctcyctcatttgtatcaccatctcctttttttttttttttttaacttcttggcatctgttgagataactgcactacaatcataatctgtgtcacaataattacttgataggtatttctccatggatatttatgttagaaatgcttaggatccaaacaaaatgaaccagcagcatctattgtagaacctctcctgtgatctctctgatttagtggtgggagaaatttgggctggcttaattaactgaaagagagggcaagtgaggcagagtgtcatgtgatctgaatcaaacctttgtatttaaatgacatatacagctagcaaatgcagatggagaaaatatgtggaattctatcaccatcaacagatatatggtggattactaggaggactaggaagtgttataatatcatgaaaatattattcacatgtattctttcaatataccatgaccaacagcctatctgaccaggtgcttgttttttcttcttcaaaaatattacagggaaatgaatcaattcataataagtggacaagtg

SEQ ID NO: 141826 - DNA, 596 bp, Homo sapiens
gaacccgttttggttgcatttcatttttggagaacttaattaacgtgagattggcaattgaaatgcaggtgcagttttctgttaatgtcatgctgttgtttaggtaataagaaatattaagtaattggctttagattttgtaatttttttccctgagttcctgctagatttcgtattctagtagtcaatgtattttcagtgaaatgcaaaaatattcccrttatctttgaccagtattaatttttgagatcttactgcttgtcacttgaatcccgtgattgtcatacatctctggtataagcaacatttgatttttgaagtgtgtagaccatctcttcatattttcaagatgtaattttacatttctgcatttttaaaacagtttggccataatcctagatgcacgcttctaattcatgtacctgcacatgtgacctttgtgaacagaaatttgcatgtataatttgtgtttacttgtaactttctggttatatactgcttatatctgtggattcaagttactgaagtgaataccaataaaaagaaaaccctaggccatgttaattggttatacatgtttggaatgttaaccaacg

SEQ ID NO: 141827 - DNA, 566 bp, Homo sapiens
gagggcacagcccttggcagggctgacaagctgccggaggacccgaaattgtggattctgcaaatggccactctctggccttcctgtatcttcccagggccagagcccttgccctgcctgccccagactggcccttccaactgcccatccctgactgctactcctgcagcctgcagggcttagcctggccatcaccagctctgggaggcctttccttggcttcacccagctcagcagacttctcagctccaactgcctgacacacacgactgctcaacagccacagtgtgaatgaaakaatgaatgaacaagtgaactcataaaaccacagctgctgagggatggggtgaggacctacgcccaccaccctccctgccatcctcccacactagggcccgggtcagcccagcccaggagcagggacccaataatcactgagggcctgtgggtgtcagcccagcacacctctcagcccatcccaagacagtgaggacaggaaagcaggctccagccccacaggaggaagtcccacctcccccgtcaccactccctgcctcacttcgagc

SEQ ID NO: 141828 - DNA, 566 bp, Homo sapiens
gagggcacagcccttggcagggctgacaagctgccggaggacccgaaattgtggattctgcaaatggccactctctggccttcctgtatcttcccagggccagagcccttgccctgcctgccccagactggcccttccaactgcccatccctgactgctactcctgcagcctgcagggcttagcctggccatcaccagctctgggaggcctttccttggcttcacccagctcagcagacttctcagctccaactgcctgacacacacgactgctcaacagccacagtgtgaatgaaataatgaatgaacaagtgaactcataaaaccacagctgctgagggatggggtgaggacctacgcccaccaccctccctgccatcctcccacactagggcccgggtcagcccagcccaggagcagggacccaataatcactgagggcctgtgggtgtcagcccrgcacacctctcagcccatcccaagacagtgaggacaggaaagcaggctccagccccacaggaggaagtcccacctcccccgtcaccactccctgcctcacttcgagc

SEQ ID NO: 141829 - DNA, 557 bp, Homo sapiens
cagccctttcaggacacttactcagaccctccctggaattacatgtgtctggagggtacagcaggagaccctgccggggaaggccttggaggagcctaagaaagcagtgggtgtgcaggcaagggctggtgtggctgagtccaagtccttgatgctccacaaatgcctgcrtgatgccagctaagtcacattgtctctctgggcctcactttcctcacttgtaaaacactagaccaggaattggcaaactctttctgtaaagagccagacagtaaatgtttgacgttttacagcctacatagtccctactgcaaagactgagctctgccactgcgatgtgagagcagccgtagataagcacagcatggataagcagggccagctcgtccattcaacagagcaccgagggcccacgatattctccagggcccatgaaaatatttcaatttctttcaagatgagcaggaaaaaaggacataacaggaatgaatatgtaagaatgaattcagtctggattatatttgtcttcataccaacacaatcataaaatataattt

SEQ ID NO: 141830 - DNA, 559 bp, Homo sapiens
gcagagggctatgtggagaactgcattactgcctttaaaaaccaacatccagagagggggagtgatttgcccaaggtgatcaaagaagtctttgtcaraaccaccaggagaatctcagggaacagtggatcctggaagaaagagccaagtgtttaaccaagtgatcagtgtttacacttccagtaatgggacagactgccattgtgcctccgcatgtaaagcacaaagaaaaacacatcacctctgtgctgctcctgccggaaatgtgtgacctgcatctaattatgaagaaatatcagacaagcccaaatgaaaggacatttctgcaaaagatttgatttgtacccttcaaaaatgtcagcaccgtggaaaacaaagacagactgaggaacagtcccagattcaaggagactcaaaagacagcgctacatcggtgtctgagacaactgacagaaactgaatatgaactgtttattagatcatggtgttgcatcttttttttctttattttttagcaatttttttcttttttccttttcacccagccgattggatggta

SEQ ID NO: 141831 - DNA, 559 bp, Homo sapiens
gcagagggctatgtggagaactgcattactgcctttaaaaaccaacatccagagagggggagtgatttgcccaaggtgatcaaagaagtctttgtcagaaccaccaggagaatctcagggaacagtggatcctggaagaaagagccaagtgtttaaccaagtgatcagtgtttacacttccagtaatgggacagactgccattgtgcctccrcatgtaaagcacaaagaaaaacacatcacctctgtgctgctcctgccggaaatgtgtgacctgcatctaattatgaagaaatatcagacaagcccaaatgaaaggacatttctgcaaaagatttgatttgtacccttcaaaaatgtcagcaccgtggaaaacaaagacagactgaggaacagtcccagattcaaggagactcaaaagacagcgctacatcggtgtctgagacaactgacagaaactgaatatgaactgtttattagatcatggtgttgcatcttttttttctttattttttagcaatttttttcttttttccttttcacccagccgattggatggta

SEQ ID NO: 141832 - DNA, 559 bp, Homo sapiens
gcagagggctatgtggagaactgcattactgcctttaaaaaccaacatccagagagggggagtgatttgcccaaggtgatcaaagaagtctttgtcagaaccaccaggagaatctcagggaacagtggatcctggaagaaagagccaagtgtttaaccaagtgatcagtgtttacacttccagtaatgggacagactgccattgtgcctccgcaygtaaagcacaaagaaaaacacatcacctctgtgctgctcctgccggaaatgtgtgacctgcatctaattatgaagaaatatcagacaagcccaaatgaaaggacatttctgcaaaagatttgatttgtacccttcaaaaatgtcagcaccgtggaaaacaaagacagactgaggaacagtcccagattcaaggagactcaaaagacagcgctacatcggtgtctgagacaactgacagaaactgaatatgaactgtttattagatcatggtgttgcatcttttttttctttattttttagcaatttttttcttttttccttttcacccagccgattggatggta

SEQ ID NO: 141833 - DNA, 561 bp, Homo sapiens
aagcttctatgcatgagcctaaaactgccactgtcttgcttcctcctatgcactagtgttccaatcaccagtccatgaaaatatcaagcagcctttgcccttggggcctttgctcattgcccaacctcaaatgacaccttatataaatcggtcccttcctagatacaatatataaaacagaggccaggcacagtggttcatgtctgtaatcccagcgctttgagaggccaaggcaggaagatcactttgaggccagragttcgagaccagcctgggtaacatagcaagatcttgtctccacaaaaaaaaaaaaaaaaaaaaaaaaaaagttaaacaaatatgcaaaatagcaggccgggtgcaggggctcatgcctgtaatcctagcactttggggggccaaggcaggtggatcacctgaggccaggagttcgagaccagcctggccaacatggtgaaaccccctctctactaaaaaatacaaaaaattaggccaggcgcggtggctcacgcttgtaatcccagtactttgggaggcggaggcaggcggatcacgaggtca

SEQ ID NO: 141834 - DNA, 394 bp, Homo sapiens
attgtgggcacaaagccctgacaaactccagacagccctgttttggatggagacaacaatcgcacatgacaactaaagaggagtaaggcatggagctagtgaaggctkagcgtgctgttctgactctgtgtcagcagcctcaagcctccggggcacagcccatgtgtgtctgcagcctcccagatgccgccagctcccaccaagttcctactgatcccctaccagcctgttccgcacccaagccttccatcttggtttggccttatcacaattttcacagcacacctgtcttgctcaagattctcaggattttgaactccaccaaagacttgaggggtaatagagtcaagtgccatctggccctctgccatcttgctcaatcccattccccaga

SEQ ID NO: 141835 - DNA, 394 bp, Homo sapiens
attgtgggcacaaagccctgacaaactccagacagccctgttttggatggagacaacaatcgcacatgacaactaaagaggagtaaggcatggagctagtgaaggcttagcgtgctgttctgactctgtgtcagcagcctcaagcctccggggcacagcccatgtgtgtctgcagcctcccagatgccgccagctcccaccaagttcctactgatcccctaccagcctgttccgcacccaagccttccatcttggtttggccttatcacaattttcacagcacacctgtcttgctcargattctcaggattttgaactccaccaaagacttgaggggtaatagagtcaagtgccatctggccctctgccatcttgctcaatcccattccccaga

SEQ ID NO: 141836 - DNA, 551 bp, Homo sapiens
ttgcaaattgaactttaaaaaatttttcaaattccaatcattcatttttggagtattgaagttaaatcgatttttatgtattgactttgtatgctatgacctggctaaattcaccagttagttcaagttgctttttcatggatactttggaattttccacagagccactgtggcactgcaaatcaggatgttgaacccttatatttctgtatatccttgtatttgcaggactgtcatcataaagtgtagctgtggagagcacggttttgcagtcagacatgggttggattttggtcctccatttcccagctgtgtgactatggcctagttatttggcctctctgagcctccrtcccatcacttgtaaaatgggaaaaaaatcaccccctctaagattacattagagaatcgttagttttcagaagtggaattgcaggttagcaggcagtcacaatttaaggttcttggtatctatcgccaaaatgtttgaattggagtgcaactcttcaccaaccccagtaatattgccactgctatagtctgaaggtttg

SEQ ID NO: 141837 - DNA, 443 bp, Homo sapiens
ctgctggcgccccggcaggcccgctgctgcccacctgtgctttgcagtgggatggtgagtggcagctggactccgagggccaggtggcagaggggcgggtctctcccctgggcattgcagccactctagttaccctcttggatttcctcactctccaggctgcacgctgggtgggcctttaggggctagtgaagtgttcagcatcttccccgtaccttgctgtttctgaggaccaggggkgctgccggagctgggccctttaccagggccaccatgcagcgagcaggtccccagagaacctctccccacatgccgtgtgggggttgcgagaccctgtccctgcggagtgagctgaaggccgggagctgccagcagctgcaaggtagggaaagcctcccaggcccagcagagagctgtccccaacatacatgcctgggtgctcc

SEQ ID NO: 141838 - DNA, 443 bp, Homo sapiens
ctgctggcgccccggcaggcccgctgctgcccacctgtgctttgcagtgggatggtgagtggcagctggactccgagggccaggtggcagaggggcgggtctctcccctgggcattgcagccactctagttaccctcttggatttcctcactctccaggctgcacgctgggtgggcctttaggggctagtgaagtgttcagcatcttccccgtaccttgctgtttctgaggaccaggggtgctgccggagctgggccctttaccagggccaccatgcagcgagcaggtccccagagaacctctccccacatgccrtgtgggggttgcgagaccctgtccctgcggagtgagctgaaggccgggagctgccagcagctgcaaggtagggaaagcctcccaggcccagcagagagctgtccccaacatacatgcctgggtgctcc

SEQ ID NO: 141839 - DNA, 586 bp, Homo sapiens
ccttcgtttgtaatcaggtgaaaatcagcctgagcatgctattttgcaaaccagctttagctatttaatatgcttgtgatagaagatggaacacagttttaccatcttgatggtattctagctcatggatatagcacrttttatctttgcatctctactgatgcacttttaagtagttaccaaccttttatgatcataaatgatactaggtttgtacactcctaatatagtttaccattatcaaacctcaattacatgctaggcccctttaactctcacattagccctatgaaattggaactatttttatcctcattttatagatgaggaaactgaggcacagaggcttgtctgaggtcacacagttggtaggtggcagagcagggatttgaacccaagctgtctgatgtactttctcagcccactagaggcgcagaatggcattgattcaaagtctgaactaaagtgacatttaaataatttgaagatatgactgctccacctcctttgaccctgagacacctgcagcagcacagagtgcaccagagcaggctgggacttctcccattgaggatgaccggccagg

SEQ ID NO: 141840 - DNA, 544 bp, Homo sapiens
cagataattggatcttcatgacaatttcccaactggccactttccctgtaacaagaccaagcctgtctcttccatatgggtcagccatatcccacccactcctcctgggatttgacttggggaatgtggacagaatcacacagtcagtagaagttggaaagtaggcggaagtggccacatggggtagggacatatcagagttatgatgaatcagaagcagaagccccaagttgaagaagagatacaaagcttggaagcaggaagagatggagcrgacacacaaaggaatccaacactggagaacggcaacgtaaaggtggcgtgctaggggaaagctccagaattcctgcagctgggcgctggagccaccctgaactttcaaagacctccctattccagtctccacaatcccaggtcctggtatgtccctggatttggggggagattctggctcctttgtagcaccacaataaacccttattgcctgagttatcccaagtgactccctgttctttatgggctcacaagccaacacaccaaaagt

SEQ ID NO: 141841 - DNA, 370 bp, Homo sapiens
tttccgaacttttagattgctcttctgcctcaggaatgccaattattcttaggttggtatcaggggaaattcagccagatattgggcgaaattcacccccgatatttcacgtaggttcttttctatactccctaagtgtcrgccggtctgagaaataaagggacaaggtacaaaagagagaaattttaaagctgggtgtccaggggagacatcacatgttggcaggttctgtgatgccccccaagccgtaaaaccagcaagtttttattagtgattttcaaaaggggagggagtgtacaaatagggtgtgggtcacagagatcatgtgcttcacaaggtaatagaatatcacaaggcaaatggaggcagg

SEQ ID NO: 141842 - DNA, 370 bp, Homo sapiens
tttccgaacttttagattgctcttctgcctcaggaatgccaattattcttaggttggtatcaggggaaattcagccagatattgggcgaaattcacccccgatatttcacgtaggttcttttctatactccctaagtgtcggccggtctgagaaataaagggacaaggtacaaaagagagaaattttaaagctgggtgtccaggggagacatcacatgttggcaggttctgtgatgcccccmaagccgtaaaaccagcaagtttttattagtgattttcaaaaggggagggagtgtacaaatagggtgtgggtcacagagatcatgtgcttcacaaggtaatagaatatcacaaggcaaatggaggcagg

SEQ ID NO: 141843 - DNA, 370 bp, Homo sapiens
tttccgaacttttagattgctcttctgcctcaggaatgccaattattcttaggttggtatcaggggaaattcagccagatattgggcgaaattcacccccgatatttcacgtaggttcttttctatactccctaagtgtcggccggtctgagaaataaagggacaaggtacaaaagagagaaattttaaagctgggtgtccaggggagacatcacatgttggcaggttctgtgatgccccccaagccgtaaaaccagcaagtttttattagtgattttcaaaaggggagggartgtacaaatagggtgtgggtcacagagatcatgtgcttcacaaggtaatagaatatcacaaggcaaatggaggcagg

SEQ ID NO: 141844 - DNA, 581 bp, Homo sapiens
caggaaagggggagaagccaaaaaaggtttgggacatgacatctctgctgatgcataaataatacctagagttacccagttaaaagggtagaagatgtcaatgttcttagcaaaagaaactgtacatttaatggcctgatcatgacagagcatgacacattggaagaacttaaggaagacccatgtacctagagcgtaaggtgcaaacttgcaaacgaygcaactataaaatcaggcaggaggcaaaggtatggaccttcttctaaaggcaatgggaagccaatattaattttctatcagaatgatcttcaggcttcattggaataatggcaagacaattcaggtagactgagactgtttcaatcagtctagtcaagaaataaaaactgcaccagttattttaacaaaaataattgaatgtaaagaattgttagcaaggtattggacaattgggagatccaaaaggagatactgagatatcataagcatagcaactacaggaagcagctactacttcaatggctgggaaaacaaagagaagaggttggtattattaaaaagtataaatttggaaaagggcc

SEQ ID NO: 141845 - DNA, 480 bp, Homo sapiens
aatatagggatgctacatcaacatggagagcacaaaatccagaaatgggtcctggtgccgtcatttgaggtccaagctgtaactgaagccaaacgtactgtcaggccttttcagtagggtgattactgcatttccttttttatttaagccacgtgaagtgagattttctttcactcactatgaaaagatgcagtccaaaaagatatakcccctgtttcttgcacttgtctctctgctctttccctatgtgcaagataacctttccttgccctgcttttagatcacagtgctagcaggaacatgacttcacgcaataggaaataacaatattaagcaaatgaaaattgttcagcctcactagcaatcaaagaaatgcaaattacaatgatctcatcctgattagattgtctccctaaaaaaaaaaaactttaaaaattataatagccaactccaacaaagttatgatgaaataggtacatt

SEQ ID NO: 141846 - DNA, 560 bp, Homo sapiens
aatactgggtttgtgcaaaagtaattatagtatttgccattactttcaataataataataataataataataataataawaaattggtgtatgtgcctacaatgcaataccatacagcactaaaaatgaaaaatctatagccacacgtgacaaaacaaatccttccaaaacacctaattttgagtaaataaccagattgtagaagaactcataaagcaagattccatgtatgtaacatttaaaagtagaaaaaattgaacaacatagtagttagagatatatatgtgcttaaactataaagaaaagcaagagattggttaataaaaacttaagagcagtgactgccaatggcagggagggaggtgcctgaagtcaggaatggacacacagggtgcttcagagctaggagatgggacatgtctcctctttctttctaattccaactattccataatatcgctcccagtgctgacttcctgaagcccaggtctaattatgcaacattactgaccttcttaccctccaatcatcctgtaagtttattggagttcctagaattc

SEQ ID NO: 141847 - DNA, 587 bp, Homo sapiens
ggacatgtctcctctttctttctaattccaactattccataatatcgctcccagtgctgacttcctgaagcccaggtctaattatgcaacattastgaccttcttaccctccaatcatcctgtaagtttattggagttcctagaattctttccttggctctctttttatatcatgttacagggcgatcttagtgggtgatttcacccatccccatgactgtcaactgccactgaagtggcaatgactcacacatttgtctttcctaaactccagacctacatatatagctactgagtagatatttccgcttgcatgttccacagtgtctcagactcagtatgcctggtgtttttacaaaaaggggaaatttgcacacatagggagaagaccatgtgaagatggaggcagagattaggtgatgcagcagaaaccaaggagcatctagagagccagcaaaccaccagagcttgcggacaggccttcagaaggaaccaatcctgctgacaccttgatcttgaacttttagcctccagagctgtgaggccatacattcctgttgtttaagctccccagtttgtggtactgt

SEQ ID NO: 141848 - DNA, 581 bp, Homo sapiens
gtgatcccatgatggtcaaggaataattttggaggagacgtttaactttaaaaaaaaaaatacaatcattagtttcatgtttgtttaaaagaaactttgttttcstaaccaacatttgagctccattcatctcttgatgcagggagagatgttattgtaaatgtctagttctttatgttactttacagtagggtttttaaaagactgtactcagtagacccactgaaggaattcctaaaaatacgtatgtccccatcccctaaattctaattccagaggtagatttagacactccacaggctgtccttgtgtgtcttttattgaaaacctcttttttataaaattaatctacccaagataacacttcatgaaaacctcttttaaggttaaagattaaaggttaagattaagattaaagatctgcccacgtcggcatagaaacaggtggggttttctgacagggtcttgctctgtcacccaggctggagtgcagtggcatgatcagagctcattgcagcctcgacttcccttgctccagtgatcctcacatgtcagcctcccaagtaactgggactacaggc

SEQ ID NO: 141849 - DNA, 614 bp, Homo sapiens
gtctagttctttatgttactttacagtagggtttttaaaagactgtactcagtagacccactgaaggaattcctaaaaatacgtatgtccccatcccctaaattctaattccagaggtagatttagacactccacaggctgtccttgtgtgtcttttattgaaaacctcttttttataaaattaatctacccaagataacacttcatgaaaacctcttttaaggttaaagattaaaggttaagattaagattaaagatctgcccacgtyggcatagaaacaggtggggttttctgacagggtcttgctctgtcacccaggctggagtgcagtggcatgatcagagctcattgcagcctcgacttcccttgctccagtgatcctcacatgtcagcctcccaagtaactgggactacaggcgcacgttaccacacctggctaatttttgtatttttggtagagacaaggtttcgccatgttgcctaggctggtctcgaggtcctgcactcaagcgatccacctatctcggcctctcaaagtgcaggattacaggcatgagccactgcgcccagcccagaaagagttctaaaatggagaaatatcctcaaatgctgt

SEQ ID NO: 141850 - DNA, 469 bp, Homo sapiens
attagtccatgttcacactgctgataatgacatacctgagactggacaatttacaaaagaaaggtttattggtcttacagttccacatggctggggaggcctcacattcatggcagaaggcaaggaggaacaagccacatcttatgtggatggaagcaggcaaagagagcttgtgcagagaaactcatgtttttaaaaccatcagatctcawgagactcattcactatcaagagaacaacatgggaatgacccactccatgattcaatcatcttccaccaggtccctcccatgatacatgggaattatgggagctacaagatgagatatgggtggggacacagagccaaaccatatcactagtcatgctggcatctgctaagatctccaaaatctgccctggaccttggccactgatccacataggtcactgctacaccatcccttgttctaagtcaggtcgatgaatg

SEQ ID NO: 141851 - DNA, 571 bp, Homo sapiens
tgaaattttctctttttgtggatcttaggtggaatgtaatgtaagggagaaaacctttctctctaccctcttaaggtttgatcattgagtctgggaagtaaatagacagtagatagattaacaggaaaaaacaattttaattatgtgcataggcatgggaatctcacaaaagatgagactcaaagaagggctagatgattaaagtttatatagcatcctgagctacagaaaggaattggggcttggagcttaatttgggggtggggcatgacacaaattatgggagggaaaggagaggaaatgcatggtgaataaaagttgtcttgttatgcagataaacagtctccagagtaataaaggttgtcttggagcacccctcagaacaggtgatagtttgtgataatgtctgggcttggcaattaccttcagtctgttctcctcctgtgatacagttaatttttcctaattaatgagattcctggggaggaaactcatgrcaattgagtgcctttttggaagatctatctttaggcagacgaggcaagttcagagaccacccttccctgtgctt

SEQ ID NO: 141852 - DNA, 587 bp, Homo sapiens
tgggataccagtagagtcgattccaggatagagggtggaataagtgagagcttccacccctaaaaaaggcacaatgcagttcagtgcccttgcaaaggatccttccttgtcagattacagggacatcccctgagctcaggaagacactgactttggaaatactataaggggaaagagcaactctgcaaaatttggaatgggatcacttcaagaaagggcaatgcttaaatgataggggaaaaaatgcacccctggtagacttgcaagcagagtactcaaatcagctgagaatgcccaaaatatgattacaaagaagagtttttattagttcagcctcagaatgcaaaaataaataaataaataaacaaacaggaaacaaatgtaatcactttacagagcgcacatacattacttaaaagtagcaccttcatggagccatattttctggtcataattgtgtatcaggttcattcatgctaatgagaaagggattccagattttctttgcatctgtctgcttctcacakggctgttaagaagccacctgccattctgacaatttcatgtccttagccataactacttgt

SEQ ID NO: 141853 - DNA, 601 bp, Homo sapiens
cacatttagctctgggagcatggaaaatcatgttgcttctctgtgtcagactcaaacttcagagaaacaaataaacaattttattatttgaaaactcactctaggctttataaaacagaaactaaaaattgtaggaaatagattcttttctaattaatgaggttaatcatcagataattcagaacatctaaaaatcctttaaatatttctgaagttcatcttgctttaccagtacaatggagacctaacacatttatcacttaggcaaatgtccaaacaaagtttgagaaatatgaataaagtagcatagtttttatgtcagtgggagctttataagatttattatggttccactctagtacagacaggtgaattcactgcacagctggcaactttttacttcactttgtgtagtgaagacctggcatcaaccaaaggttcccattttcttcatccaaatggataattttgcccaaagagatcactttgtcatatgwgctttcatgtggtgagctggcagaattgctgctgccttatatgatcaaacaacaacaataaaaatcacaggggatgcagtgtataggcaaagtacaattagagc

SEQ ID NO: 141854 - DNA, 524 bp, Homo sapiens
agatctatacataccaaatagagtgagataaattttagtttcctattgctgtaacaagtgaccacaaaattactggcttaaaacaacacaaatttattctacagttctggaggtcagagtctgaaagggtttcatgsgactaaaatcaagacattggcaggattacattccttatggaggctctagggaataatacctttcttttccttttctagcttctagaggctgcccacatcctctgctttgtagcctccttcctccatcttcaaagccagcaacagagggtgagacttgacattgcatcactctgaccttctcttctgcctttttcttttgcttttaatgaccctgtgattacattgggcctacctggataatccacgataaattcagctgattagcaatctttttttttttttttttttgagatggggtctcgctctgtctccaaggctggagtgcagtggcgcaatctcagctcactgcaacctctgccttgagcaatcttaattacatctgcaacc

SEQ ID NO: 141855 - DNA, 524 bp, Homo sapiens
agatctatacataccaaatagagtgagataaattttagtttcctattgctgtaacaagtgaccacaaaattactggcttaaaacaacacaaatttattctacagttctggaggtcagagtctgaaagggtttcatgggactaaaatcaagacattggcaggattacattccttatggaggctctagggaataatacctttcttttccttttctagcttctagaggctgcccacatcctctgctttrtagcctccttcctccatcttcaaagccagcaacagagggtgagacttgacattgcatcactctgaccttctcttctgcctttttcttttgcttttaatgaccctgtgattacattgggcctacctggataatccacgataaattcagctgattagcaatctttttttttttttttttttgagatggggtctcgctctgtctccaaggctggagtgcagtggcgcaatctcagctcactgcaacctctgccttgagcaatcttaattacatctgcaacc

SEQ ID NO: 141856 - DNA, 563 bp, Homo sapiens
ctcagtagtctgtggtaccatatcaagcagtctaatatatgtgcaattggaatcccagacaaagaggaagaaaagaataggggagaaaaatatttgagaaaacagtagccaaccccctgttacctggaggaacctaaacccccagctcttgcttgccagcatctgcagagctgaactacattttaaattttttcagccttccaattgctgcttccaccaggctctctataacctcccccatgcatgcacagaacaggaggcagcaaaagattcgtgggaagcttatatgcagattctgattagtctctaatttctaggattttccctacccaatttccagtctcatggacaaccccaaatccattccctgacccttcaagtctgtaagatagcagcattctgctcaggttctaaccttcccagtaccttctagactggggagtaccctcaagggaaatgccatataaaagtggatctcacccaataagtgtggctcctttctttaaawggtcgaatccccttcaatagctgctcactttttgttgttctccagtgacttcaag

SEQ ID NO: 141857 - DNA, 428 bp, Homo sapiens
tttctttgtgtgtttctacatgctgcttctctttaccagattttaagatatactggtttcctgcacccatgttcaaagagaaattgtattttctcatattaattattatttagaattttctttgttatggcagggattatccaagaacctcctttcctagggtagccttaatattttaaacaggttttcagatggtgagaaatgcagtcatttttaaatatcatttgccattcttaaaatatttggatatttggtatctaaatgccagaggaggtcagttataagaggaggtgaatttaaragagtaattgccaacatgatctgaaaaaagccatgtgcaacctcgttcactcttgcttcttaacttcttggaacacatgtagaataccagtcagcatatggcaagaaaaagagttggttgagtgtca

SEQ ID NO: 141858 - DNA, 552 bp, Homo sapiens
aagggaataaaatttgtgtaagaaaaaagctgtttaacattaataaactatatttcttcttacacattgaactgtatcattttcatatccacttccccaccactgaaatatcttatttcacaatattttaactgatttttaatccaaaactaatttataagacagtatgtatagtaatagtagcttgagtgaatatgcaaaagtttaatttttatatatgtcatactatattttaaatagttaaaaaagacaaaagaagggagagccatctatgatatagatggtaccatttcagttcaaagttgtaataacctttggagtgttacagtttggttgtcaaatggtttcagaatgtataattgatttttttaaatgttgcattgtttgaatctaaagtacagcactataacatgctttagcttggggggktgggggtggggtggggacttgcacttattctctaaaatgttgactaatccagaaagcctgatgcaacataatctggaaaactgctttggtacatttgtagaaatccgtagaaataccatatcc

SEQ ID NO: 141859 - DNA, 552 bp, Homo sapiens
aagggaataaaatttgtgtaagaaaaaagctgtttaacattaataaactatatttcttcttacacattgaactgtatcattttcatatccacttccccaccactgaaatatcttatttcacaatattttaactgatttttaatccaaaactaatttataagacagtatgtatagtaatagtagcttgagtgaatatgcaaaagtttaatttttatatatgtcatactatattttaaatagttaaaaaagacaaaagaagggagagccatctatgatatagatggtaccatttcagttcaaagttgtaataacctttggagtgttacagtttggttgtcaaatggtttcagaatgtataattgatttttttaaatgttgcattgtttgaatctaaagtacagcactataacatgctttagcttgggggggtgggkgtggggtggggacttgcacttattctctaaaatgttgactaatccagaaagcctgatgcaacataatctggaaaactgctttggtacatttgtagaaatccgtagaaataccatatcc

SEQ ID NO: 141860 - DNA, 555 bp, Homo sapiens
tccaatgcttgaagaaatgaaaacaccttggagaagaggaaatggttccttgttgtgtcattcactagttggtgtgtcaaaaaaaaaaattagacagtaggtaataaggctggaaataaatattggagttagattatttaagatttttcagcaaaggttgaatttcttttaggaaagtaattccagcaacagagtttaaaataaacaaagaaactagcagtagggaggtcagttttaaaattgatgaaattrtaatcactgggattgaaatacattgagtactttttgcatgcccaggggagagtcaggagtatacattttaacataaaaaggacatggttccataaggatgaaaaaataagaaaagatcttggaatctgtgattagatcatcgactggctttgaagaaactttattagaagaatggaggaaagtgagcagaggtggatcaacagaagtgggacatgggaaaaggacatgatggtcacagcatgttttcttgttggttggtttttgggatatgagacttatatagctaatgcagagagacagatt

SEQ ID NO: 141861 - DNA, 246 bp, Homo sapiens
gttgtggaatactctttggaatttctcaagacattcactttccttcttttaaatacggtatatgtttccatttttattggattgtctaatgcactaatatatttaattycctgtgatcttttttatataagggagttatcttattctactgatgtttctgttggacaggctaggctgccctccaggtgccaattgcctggttagaggtcatctggaaattgtacgggacatctcactggccattcc

SEQ ID NO: 141862 - DNA, 246 bp, Homo sapiens
gttgtggaatactctttggaatttctcaagacattcactttccttcttttaaatacggtatatgtttccatttttattggattgtctaatgcactaatatatttaatttcctgtgatcttttttatataagggagttatcttattctactgatgtttctgttggacaggctrggctgccctccaggtgccaattgcctggttagaggtcatctggaaattgtacgggacatctcactggccattcc

SEQ ID NO: 141863 - DNA, 451 bp, Homo sapiens
aattgggtgtctgcactcagtttggcgtcaatatagtgacctcatgtgggtggaggatcaccaggttgcctaaggaggagtgaaccagtccaggtcagaaatggagcaggtcaaagctccagtgctggttaatagtgggatggtgcctgtaagtagccactgcatcccaacttgagcacacagcatacccggtgtcttttttttttttwaaaaaaagaagagctccagggtatgttttagaataggaaagaatgggggagaaaagaaagggaggaaatttaatttggattatagtaatcactcaagagtaaacccaaaatgcatttttaacataattacctggctttagtacaaggaatccatggatttgtgttatcaaagacttttcatttacctgcatttcatttcctgccacattctgatcccacccattttcccaccacaggctgat

SEQ ID NO: 141864 - DNA, 451 bp, Homo sapiens
aattgggtgtctgcactcagtttggcgtcaatatagtgacctcatgtgggtggaggatcaccaggttgcctaaggaggagtgaaccagtccaggtcagaaatggagcaggtcaaagctccagtgctggttaatagtgggatggtgcctgtaagtagccactgcatcccaacttgagcacacagcatacccggtgtcttttttttttttaaaaaaaagaagagctccagggtatgttttagaataggaaagaatgggggagaaaagaaagggaggaaatttaatttggattatagtaatcactcaagagtaaacccaaaatgcatttttmacataattacctggctttagtacaaggaatccatggatttgtgttatcaaagacttttcatttacctgcatttcatttcctgccacattctgatcccacccattttcccaccacaggctgat

SEQ ID NO: 141865 - DNA, 406 bp, Homo sapiens
ttaggtcgcctaggtttcaacaaaaccaatttgtggtatactgttaaatgctctttaaataaaacaacagatcaatttcaataaatttaaaattatttatacacttgaccaggtgttagacaatcgacatgcagaagttagtgaattgaatatataaatattatgtaacaaatatgtataccaacaagagtatttatcaactatatgcttataaccaatgraaaaaacacaaacaaaactataaaatatgtcatcagaagagcaaacgctcaataacaaaagttatttgattatggtaaatgtttctatagactttctaaagtcagaagacattcttgctaaaatttgatttaccacaactgcataaatcattaagattatttaaaaaaaaagggaaaccaaaaca

SEQ ID NO: 141866 - DNA, 427 bp, Homo sapiens
agatctcggagcactgggatttcaagggggcggggaaaggtgtctctcaagaatctttacaaggaaacatagaggctcttgggcaacgagtctggagaatgttggggacctctgaagggataatgggaaaagggggccccctgagaaaggtctctgagttgacttcagaggaaagagaatggggaaatgagagggtgtaaatagcaattctaaagttagtgggtaaatctgatagggtcctaaataatgtttcttggggatgtcagaagtggaatmtgagggaaagttctgaggaagtctcaggaagcgctgggagtgggtggctgatggagggcaatttgggagaaaattctctaaaaagtgtctgaggaaggtgtggtcttctgagactggtcctggagtgggatgacagagggatgtttttagg

SEQ ID NO: 141867 - DNA, 468 bp, Homo sapiens
caaaattaaatatgaataagccatatgtctattaccaatataattatttctgtttcttttcctgtataaatattatccctgtagttttgtgtcacttgtgtgtttgttgtgtaggtttgttgtaacggttttttattttwttttcttttttttttctcctttgagagggagtttcactcatgttacccaggctggagtacaatggcaggatctcagctcactatacaacctctgcctcctgggttcaagcccttctcctgcctcagccttccaagtagctgggattacattcgtgcactacaacgcccgcctaatttcattcatactttagtagagacagggtttcactatgttggtcaggctggtcttgaactcctgacctcaggtgatctgcccaccttggcctcccaaagtgctgggatacaggcgtaagccaccgcacgcagcttgtaacagtgtttttaatcc

SEQ ID NO: 141868 - DNA, 586 bp, Homo sapiens
gccaggcacggtggctcatgcctctaatcccagcactttgggaggctgaggcaggcggatcatgaggtcaggagttcgagaccagcctggccaatatggtgaaaccccatctctactaaaaatacaaaaattagctgggcatrgtggtgtgtacctgtagtcccagctacttgtgaggctgaggcagaagaattgtttgaacccaggaggtggaggttgcagtgagctgagatcgtgccactgcacactacagcctgggcaacagagcgtaaccccatctcaaaaaaaaaaaaaaaaaaaagaaatcagcagaaatgatagatatttgagagaagtggcattcacccaattcacccaaggggagaaatatctggagagagatcccataccttgtgtgaagcttggtacttaagacttcccatgaatgttcattccaacatgtataactagacatttgagtttttaaaataacttcatgaaaagctacaggaatcttgccaagattagagcagatgacataggattcttacagtagggttccattattcaagttgaaggaaatccaaaaggtagaaactatatgcat

SEQ ID NO: 141869 - DNA, 540 bp, Homo sapiens
atgtcccttcttaatttctgctattagtaatttgtgtcttctctgttktttctttgttagcctgatgagaggtttattttattcatcctttcaaagaaccagcttttggtattgttgattttactctattttctgttttcaatttcactgacttttgcttgaggttttttgtttgagacagtgtcttgctttgttgtccaggcaggagtgcagtggcatgatcatggctcactgcagcctcaaactcctggactcaagggatgcttccacctcagtcacccaaatagaggggagtacaggcatgtgccaccatgcctggcttttaaaatttttgtagaaatggagtctagctgtgttgcccaggctggtctcaaaactcctggccctcaagtgatcctcccacactggcctccaaaagtgctgagattacaggcataagccaccatgtctggccttgaatttttattatttcttttcttctgcttactttggatttaatttgctttttttttttttttttagtttcctaaggtggaagct

SEQ ID NO: 141870 - DNA, 541 bp, Homo sapiens
tgatgtcccttcttaatttctgctattagtaatttgtgtcttctctgttgtttctttgttagcctgatgagaggtttattttattcatcctttcaaagaaccagcttttggtattgttgattttactstattttctgttttcaatttcactgacttttgcttgaggttttttgtttgagacagtgtcttgctttgttgtccaggcaggagtgcagtggcatgatcatggctcactgcagcctcaaactcctggactcaagggatgcttccacctcagtcacccaaatagaggggagtacaggcatgtgccaccatgcctggcttttaaaatttttgtagaaatggagtctagctgtgttgcccaggctggtctcaaaactcctggccctcaagtgatcctcccacactggcctccaaaagtgctgagattacaggcataagccaccatgtctggccttgaatttttattatttcttttcttctgcttactttggatttaatttgctttttttttttttttttagtttcctaaggtggaagc

SEQ ID NO: 141871 - DNA, 440 bp, Homo sapiens
actcataactctttgtttgggagcttaattttagctcacttaagagcagttatctgatgtacttctaagaacagagacaccctagaaaaaatggaaatcacacagaaagaaggaggactggctcagaaaatgccatgtctcaggctcagttgggaggccgtggcattcaggagttggcagctcggagtaaccagctaaccgcagataattgctgccgggcggtggtgcaggkcacggattctacatcccagcccttccaacccttctctggctaccctggcgttgtctccacatgggcatgaacttcataaggctaaattctgtggtctccttaatggaatccctttggcggctgctcctaacctcccttcatattttagattcaaccgcacaatctttctgtccctacctccctcgccccaggggatctgtggtttcct

SEQ ID NO: 141872 - DNA, 441 bp, Homo sapiens
cactcataactctttgtttgggagcttaattttagctcacttaagagcagttatctgatgtacttctaagaacagagacaccctagaaaaaatggaaatcacacagaaagaaggaggactggctcagaaaatgccatgtctcaggctcagttgggaggccgtggcattcaggagttggcagctcggagtaaccagctaaccgcagataattgctgccgggcggtggtgcagggcacggattctacatcccagcccttccaacccttctctggctaccctggcgttgtctccacatgggcatgaacttcataaggctaaattctgtggtctccttaatggaatccctttggyggctgctcctaacctcccttcatattttagattcaaccgcacaatctttctgtccctacctccctcgccccaggggatctgtggtttcct

SEQ ID NO: 141873 - DNA, 407 bp, Homo sapiens
aacagagaaagaggagaagtccctagcatttttttattttataagttccagtttatactaagggcagctgaactaaagattaaagtaaaggaaaaaaagcaaattagcaggcttctcttctcttctctctactcaacacaaccttaacccccctgcagctaacccctaggaagtagattcaggcaacagtaagtgcttaggaaggagtaaaaccttcccctgcacagcacctgcctcaatggagatggagtccttccttgaacacctctgaggtcccccattgaatatctaccaagatatctttgaggagggaaatccctgggaggagttgggatcccagcagccatttgagaaatcttaggtaaaacatatcagaaacagcaagmcttctttcctctctaattctg

SEQ ID NO: 141874 - DNA, 591 bp, Homo sapiens
ctacagtttggtaccaattctgaaaaagaaaagaatatataggcatagaaaataaagaaagaaaaaataacaaaatgttatttctgggtggcaggaccaacactcttctgaatgctattgtgtattttccaaattagttcatggacacgcatcgtttctctaatcagaaaatataaagttatttctgaagggaaaattaaaataaaagaaaatccatcctcatttagcagagaccaatctttaatacttaatttttaaaagaaaatttttggtaactggccatatatctagtctgcaccagaattatgtaaatragagtttaaaataataataaccattataacaattcaagtatcttaattgcataatttggaagaaaatgactcccagaggtgaaggtttagtgatggtggcatgaaggaaatgggtacctcttgagacgggcacatcatcatagacacccttccaaccccggccaaccccaccttcagaggagccacctctgtcccatctttgcagatccctaggcagaatgcccagtacacatgtaggtgttccaaaaatgtaattgaagtgagtaaagatgctatt

SEQ ID NO: 141875 - DNA, 426 bp, Homo sapiens
agagggtggagggtgggaggagggagaggatcaggaaaaacatctaatgggtagtaacctaaatacctgggtgacaactaatctatacaacaaacttccagaacacaagtttacctatgtaacaaacctgcacaggtacccctgaacttaaaacaaaagttataaataaataaaattttagaaaaagaataaaatttggtctaaatatatgatttgtcagcgtttcctagtagcagaatccttttcccgaggaaatcttctyccatatgagctgataatagcacagttgctttgcccatagctgcggagaagaaccctgagcccttcccttctcctggctcccaaggtgtctccttggaaacccttggggtcccttggaagccagtttgagaaccactgtcctacagcctttccgatggcagtgaa

SEQ ID NO: 141876 - DNA, 593 bp, Homo sapiens
ttcatgtggaagtcttaaccctgggtatctgtgaatgtgcctttatttggaaatagagtctttgcagattgattgattaatttttagagactcgatcttgctctatggcccaggagtgcagtggtgtaatcatagctcactgtagcctccaactacaagaatcaagctgtcctcctgcctcagcctcccgagtagctgggactacaggagcacaccaccacgcctggctaattttaaaaaatttttgtcaaatgggtggggcacagtggctcacgcctgtaatcccagtactttggcaggctgaggtgggcggatcacttgaggccaggagttcgagaccagcctggccaacacggcaaaaccctgtctccactaaaaatacaaaaattagctgagcgtggtggcaggcacctgcactaaggaggctgaggcaggagaatcgcttgaacctgggaggtggaggttgcagtgagccaagattgtgccaccgcactccagcatgggcaacaagagygaaactccatctcaaaaacaaacaaacaaacaaacaaacaaaaagaccatgggaagctaggaaggacccagctatgaat

SEQ ID NO: 141877 - DNA, 524 bp, Homo sapiens
atgacatttaaacaaatcagcacccacatgcagcaaggtgcaygtgcctacatggggagaggtgtagggattggaaatgaagaagaaaatgatggtagggccttccagagcagggctgggaggtgctgttggaactgaggagatgattcgctcaagtctctgcaccagttcctcctccagagcttccagaaccttctaccagtgcaggtggggtcagaagagaaagctgaggccacatgaggggactcagctgatttcccctcccttctcccatcgtgacagatccacgccctggaaggcggggaggtgaagatcttcagcaggaatcaggaagacaacactgggaagtacccggacatcatcagccgcatccccaaggtgggcgtctgccacacacttgcactctgccagggtctgtggtcaggggtgcaaaggcctgaggcccatctaggccagtgtggcacagtgcggggtttattgggaggagatcaggttgcgtttggctgcaaatgacagagcactca

SEQ ID NO: 141878 - DNA, 519 bp, Homo sapiens
gcagcaaggtgcatgtgcctacatggggagaggtgtagggattggaaatgaagaagaaaatgatggtagggccttccagagcagggctgggaggtgctgttggaactgaggagatgattcgctcaagtctctgcaccagttcctcctccagagcttccagaaccttctaccagtgcaggtggggtcagaagagaaagctgaggccacatgaggggactcagctgatttcccctcccttctcccatcgtgacagatccacgccctggaaggcggggaggtgaagatcttcagcaggaatcaggaagacaacactgggaagtacccggacatcatcagccgcatccccaaggtgggcgtctgccwcacacttgcactctgccagggtctgtggtcaggggtgcaaaggcctgaggcccatctaggccagtgtggcacagtgcggggtttattgggaggagatcaggttgcgtttggctgcaaatgacagagcactcagtcctgcgtggtgtaagcccatat

SEQ ID NO: 141879 - DNA, 517 bp, Homo sapiens
ctgaaaaatttacacaacttattctgtatgatgtaaatgtagcactcaaaaatgtacatgttagtgttaatgccctcaattttatacttcatcatccraagaagtatcatacttacctcgatgttgtggatcttatgccactctcttttctcagagttagagaatgcattagagaatatacttctgtgctgaaagttatttattaaatatatcagtcactcctataagtaagaaccagttctctttactcttgttttaccttgagtcaaattaaaaattctgttcatggccacttggtaaatatgtatgtgtgtttgtatgtttttcagggagtgttgacatttagggatgtggccatagaattctctctggaggagtggcaatgcctggacaccgcacagcagaatttatataggaatgtgatgttagagaactacagaaacctggtcttcgtgggtgaggataacttcaatatacaattccctaatataccctataaattttatttctctttttt

SEQ ID NO: 141880 - DNA, 517 bp, Homo sapiens
ctgaaaaatttacacaacttattctgtatgatgtaaatgtagcactcaaaaatgtacatgttagtgttaatgccctcaattttatacttcatcatccgaaraagtatcatacttacctcgatgttgtggatcttatgccactctcttttctcagagttagagaatgcattagagaatatacttctgtgctgaaagttatttattaaatatatcagtcactcctataagtaagaaccagttctctttactcttgttttaccttgagtcaaattaaaaattctgttcatggccacttggtaaatatgtatgtgtgtttgtatgtttttcagggagtgttgacatttagggatgtggccatagaattctctctggaggagtggcaatgcctggacaccgcacagcagaatttatataggaatgtgatgttagagaactacagaaacctggtcttcgtgggtgaggataacttcaatatacaattccctaatataccctataaattttatttctctttttt

SEQ ID NO: 141881 - DNA, 230 bp, Homo sapiens
gtgtgtttgtatgtttttcagggagtgttgacatttagggatgtggccatagaattctctctggaggagtggcaatgcctggacaccgcacagcagaatttatataggaatgtgatgttagagaactacagaaacctggtcttygtgggtgaggataacttcaatatacaattccctaatataccctataaattttatttctcttttttgtagaatggtttttggtaatt

SEQ ID NO: 141882 - DNA, 434 bp, Homo sapiens
catgtgaccatatatgtgagagtttatatatgtgctgcattctattttattagtctactttttcacctttatastcataccaaattgttttaattctgtagctttgtgttttgaaatcaggaactgtaatgcctccaacattgttttgttttgtttttaatatttttgggtactttattgtatgtagagattctgtatactcgagggattgctgtttctgtttcttcaaaaatgcagtgagaaatttgaaaaacattgcattaaatctgtagattgcattgagcaggatggacatctttacagtattacctttttcagcctttcacaagagcatgctcaagagtgtgttgtttaatttctatatatttgttaatttttcagattttttttctcgttgtatactcatttcattttggtgatagaaagtaatttat

SEQ ID NO: 141883 - DNA, 434 bp, Homo sapiens
catgtgaccatatatgtgagagtttatatatgtgctgcattctattttattagtctactttttcacctttatagtcataccaaattgttttaattctgtagctttgtgttttgaaatcaggaactgtaatgcctccaacattgttttgttttgtttttaatatttttgggtactttattgtatgtagagattctgtatactcgagggattgctgtttctgtttcttcaaaaatgcartgagaaatttgaaaaacattgcattaaatctgtagattgcattgagcaggatggacatctttacagtattacctttttcagcctttcacaagagcatgctcaagagtgtgttgtttaatttctatatatttgttaatttttcagattttttttctcgttgtatactcatttcattttggtgatagaaagtaatttat

SEQ ID NO: 141884 - DNA, 434 bp, Homo sapiens
catgtgaccatatatgtgagagtttatatatgtgctgcattctattttattagtctactttttcacctttatagtcataccaaattgttttaattctgtagctttgtgttttgaaatcaggaactgtaatgcctccaacattgttttgttttgtttttaatatttttgggtactttattgtatgtagagattctgtatactcgagggattgctgtttctgtttcttcaaaaatgcagtgagaaattygaaaaacattgcattaaatctgtagattgcattgagcaggatggacatctttacagtattacctttttcagcctttcacaagagcatgctcaagagtgtgttgtttaatttctatatatttgttaatttttcagattttttttctcgttgtatactcatttcattttggtgatagaaagtaatttat

SEQ ID NO: 141885 - DNA, 491 bp, Homo sapiens
tttgggtactttattgtatgtagagattctgtatactcgagggattgctgtttctgtttcttcaaaaatgcagtgagaaatttgaaaaacattgcattaaatctgtagattgcattgagcaggatggacatctttacagtattacctttttcagcctttcacaagagcatgctcaagagtgtgttgtttaatttctatatatttgttaatttttcagattttttttctcgttgtatactcatttcattttggtgatagaaagtaatttataaaatttcagttttaaaaaawctggtaagacttaattttcttctttttgtaataagaggaggtctatcaaggaaaatgttgtattagctattgagaaccatgtgtgtcctggtgttgaggggtgttttctatacctctgttagaaataattgtcttacactgcctggaagtcctctattcccttactaatattctcatttaatttttattacggaaaatgc

SEQ ID NO: 141886 - DNA, 491 bp, Homo sapiens
tttgggtactttattgtatgtagagattctgtatactcgagggattgctgtttctgtttcttcaaaaatgcagtgagaaatttgaaaaacattgcattaaatctgtagattgcattgagcaggatggacatctttacagtattacctttttcagcctttcacaagagcatgctcaagagtgtgttgtttaatttctatatatttgttaatttttcagattttttttctcgttgtatactcatttcattttggtgatagaaagtaatttataaaatttcagttttaaaaaaaytggtaagacttaattttcttctttttgtaataagaggaggtctatcaaggaaaatgttgtattagctattgagaaccatgtgtgtcctggtgttgaggggtgttttctatacctctgttagaaataattgtcttacactgcctggaagtcctctattcccttactaatattctcatttaatttttattacggaaaatgc

SEQ ID NO: 141887 - DNA, 491 bp, Homo sapiens
tttgggtactttattgtatgtagagattctgtatactcgagggattgctgtttctgtttcttcaaaaatgcagtgagaaatttgaaaaacattgcattaaatctgtagattgcattgagcaggatggacatctttacagtattacctttttcagcctttcacaagagcatgctcaagagtgtgttgtttaatttctatatatttgttaatttttcagattttttttctcgttgtatactcatttcattttggtgatagaaagtaatttataaaatttcagttttaaaaaaactggtaagacttaattttcttytttttgtaataagaggaggtctatcaaggaaaatgttgtattagctattgagaaccatgtgtgtcctggtgttgaggggtgttttctatacctctgttagaaataattgtcttacactgcctggaagtcctctattcccttactaatattctcatttaatttttattacggaaaatgc

SEQ ID NO: 141888 - DNA, 491 bp, Homo sapiens
tttgggtactttattgtatgtagagattctgtatactcgagggattgctgtttctgtttcttcaaaaatgcagtgagaaatttgaaaaacattgcattaaatctgtagattgcattgagcaggatggacatctttacagtattacctttttcagcctttcacaagagcatgctcaagagtgtgttgtttaatttctatatatttgttaatttttcagattttttttctcgttgtatactcatttcattttggtgatagaaagtaatttataaaatttcagttttaaaaaaactggtaagacttaattttcttctttttgtaataagaggaggtctatcaaggaaaatgttgtattagctattgagaaccatgtgtgtcctggtgttgaggrgtgttttctatacctctgttagaaataattgtcttacactgcctggaagtcctctattcccttactaatattctcatttaatttttattacggaaaatgc

SEQ ID NO: 141889 - DNA, 405 bp, Homo sapiens
tttgtggtataatgaaatgttatatttctgtagttccaagttaatagttggaattagcagtgaaagaattatttactccttaaggcataggggtaaatgtttctatacccagtctccccacattttgtaagctatcttctctgaaagctcttggcctatagcccaagatgtcttttattcccaagtgtgcagttaaaatagatgactctggatttaagggaggttccaagatggccaaataggaacagctccagtctacagctcccagcttgagtgacacagaagatgggtgattttctgcatttccaactgaggtactgggttcatctcactggggcttgtyggacagtgggtgcagcccacggagagtgagccgaagcagggcggggcaccacctcacccggg

SEQ ID NO: 141890 - DNA, 581 bp, Homo sapiens
tatctgacttcaggatttattataacasagtgtaattctggtgaaaagacagacatgtagattaatgaaatagaatagatactagaaatacagtaactatacacaggcaatttttcacaaaaatgcaaaatgcaattcaatagagaaagtataggtttttaacaaatggtgctggaacaattggacatctgtatataaaaaaaagagttttaattcataccttgtatcatataccaaaactaaaatagatcgtattcataaatataaaactataaaacacatagaggagaacctacaataaaaatctttgtgaccttaacttagacaaaaatttcttggacatgacaccaaaaatatgatccataaaattatgataaattagacattatcataatttaaaagtttttgtccaaaagatactgttagaataaaaacacaaaccagaaacttggagaaaacatttgcaaaacacaaatctaataaagggcttgtatccaggttatgtaaagacctcttgagctcaataataaggaaacaaataatttcataaaaatacataggcaacagatttgagtatagag

SEQ ID NO: 141891 - DNA, 540 bp, Homo sapiens
catctgctctcaactccattttgattggagctccatcatgctcagagttccaccctactctgagctccatctgctccaagctccatcttgttttgagctccaccttctttggagctttatcttgctctgaactccatctggcttggagttccatctgctttgagcaccatcttgctccaaaatccttttactccttgctccatcttgcttgaagcttgactttgctcagagctccatctgctccaatctccatctgtttgagttccatctgctcggagctccatcttgctaagaattcagagctcctgctctgagctgcatcttgctcggaactccatctactcmtcttgcacagagctccatctgctcagagctctgacttgctgggagttccatcttgctcggagctgcatctgctcagagatccaacttggttgaagctccatctgttcagaactccatcttcctgagagttccacctgctctgagctccatcttgccagcagctccatcttgctcaaagctccatcttgccagagt

SEQ ID NO: 141892 - DNA, 308 bp, Homo sapiens
atcttcctcatatctcaacctaggtgactttgagtgccacagggtaatatggggcatctttctgaagcatcagtttcccttgattctcttgagagagaaaaaacgttcatggacttagggatgacagccccatagatttctaagagtataccaaaattcactctgaaaagaggcttgggttgtcctctttctgttcaattcccagatgtaacagaaaggctgccttctgccatgaggactcattgatgtaagagtttgagaggggstgctgcacttcctacactaacagacatgtgatgatgtgtgac

SEQ ID NO: 141893 - DNA, 401 bp, Homo sapiens
gaattctctgatgtattgcaaggttrtaactttgactaaaggacttgccacattcattacatttgtacggtttctctccagtgtgacttctccggtgatttacaagatctgaattttgtctgaagatcttgccacatacaccacattgatatggcttcccccttgtatggactatctgatgtatagttagtagtgagccccgatgaaaggctttgccacattcattgcatttgtaaggtttctctgtagtatgtaccatctgatggttaataagacttgaagacactctaaaggctttgccacaccctttacacatataaggtttttccctaatgtgtgttttctcaagttgggtgggtaatgacagctgcaaaaactcattctcatattttttagaaatg

SEQ ID NO: 141894 - DNA, 401 bp, Homo sapiens
gaattctctgatgtattgcaaggttataactttgactaaaggacttgccacattcattacatttgtacggtttctctccagtgtgacttctccggtgatttacaagatctgaattttgtctgaagatcttgccacatacaccacattgatatggcttcccccttgtatggactatctgatgtatagttagtagtgagccccgatgaaaggctttgccacattcattgcatttgtaaggtttctctgtagtatgtaccatctgatggttaataagacttgaagacactctaaaggctttgccacaccctttacayatataaggtttttccctaatgtgtgttttctcaagttgggtgggtaatgacagctgcaaaaactcattctcatattttttagaaatg

SEQ ID NO: 141895 - DNA, 428 bp, Homo sapiens
ccgaattctgtcatagttaagagcacaggctctggagtcagaccttgggtttgaatgctagctcctctcttcacttgccttaagtaatctgccttgggcaagtaatctaccacccctgagcctcagcttcttcacctgccagagtgaggcaatgcatcaattatcaataaggatgcctttggtcgtaagtgacaaaagtctgaccccaaatggcttaagcaacaaacaaacaaaaagataatctgttggaccatgcaactacagttcagggcgtggatttcaggcatggctggaaccaggggctcaaagaatgtgcccaggctctattttcctttctctatttcttggctccgctccagccttgctttctcacatagtcctgagatggttcagcagctcytagagctacatcttgactcattcacata

SEQ ID NO: 141896 - DNA, 609 bp, Homo sapiens
aaagccacctggggagacgtatggccttctatcactgcagctatctcttcagagaagaaaagaaggactcagtttccaagcttcccttttcccttggcatagtgagtctggggccctaagattggattttcctttcacatgtctgtcccttgagccccgcactcatcccccagcattctgcaaacttccccaggccagaccctacggtaaggacttggacccaagcaggcagtgtagatggtgatcctgggaaacacccacgcgggaggaaagggacagcagccaggacaggtgtgacaatgagcaggctgctgctgagggcatactggggaggtgggcagggcaggccttaggctgtccccctgggggcaggtgggctggaggatgcatggacccgctctggtccatccttggctcctgggggcatggagtcaccaaaactcmtgggctgccccacacagaccaagcccactcttgttccaaaagaggcccttgggagaaagggccacagtgggcatgggaatgatgggtgccaagcagatgtgggcatggtggggacagggtctgcagtgtgctgagtgcttggccgtggggttacaatgagtcaca

SEQ ID NO: 141897 - DNA, 512 bp, Homo sapiens
aagccagcaaagtccagtgcagcttgttaagccactccaggctagacacagcaaagcctcgtgttgtcattgtgctgaataggtcttcagactttccagtatacagtgtgacaataatgaagagacttctgtggctgagtgtggggtcctcataaccctgaatgcattttcatgtcagtgatggtcagtggtaaacatctcctgccattagctggatgagacaccttattacaaaaattgcagcagaatcttcattgttttctatttccactattacaaaattcattttaagagatgtttgtctttctttttgctttttgatgtgcagcacagttgtctaatagctcatctcatctctgataagaygtcatcctcacgtaatcattcttccaggatcctgctggttttacatcctcttacagtaggtacatttctcgcaaattaagtgccggtaatatatgtctacctgtctagtggtgtcaccataaacagcctgtaaccgtcgccccaac

SEQ ID NO: 141898 - DNA, 563 bp, Homo sapiens
cacaaacctcatttcagatgctttttctgtagacctgagctaagaaggcattttatatgctttggctctgtgtccccactcaaatctcatgtcaaattgtaatccccagtgttggaggagggacctggagggaggtgactggatcatggaagcagatttcccccttgcttttctcatgatagtgagtgagttctcagaagagctggttgtttgaaactgtgtagcacttccccctttattttctctctgtctcctgccagccatgtgaataagtgcctgcttcccctttgcctttctccatgattggaagtttcctgaggcctcctcagaagcagaagcctgtacagcctgcagaactttgtgccaattaaacmttttttctttataaattacccagtctcgcatatgtctttataacagcatgagaacaaactaatactacatcattactttttgtttgtttgttttctcaccctaacggagtggaaaatgttttcgaggagatgtaggggactgggagagtgaacaacagggctgagcctcccatgtatcagaatgaaggc

SEQ ID NO: 141899 - DNA, 435 bp, Homo sapiens
attacaggtgggtgggcctccagcaggagtctgcagtgggctgtctgtgctgggagggaggcaggctcacatgggcgtgaggggtggagacaggcaggaggggccctggcttcctggcctggccggcagyctgcttacactcccagcacatcccagaggtggtatctctgtcctgcattcttctcactagcctcggtgccaagtggcacctttattagcaatctctgggcacagtgagccacggaaagggaagctggggtggatgcgaacatgaaaagcaaaatgcaggaacgcaagtggaagaaccagcacatgtcctgagcctgtaacggtggcgtgagtccccaaaaggcccatccctgtggggcactccctgacataggtggctctcactctctctctcactctatctctgtaaaggccccagtgatgggg

SEQ ID NO: 141900 - DNA, 423 bp, Homo sapiens
tgggcctccagcaggagtctgcagtgggctgtctgtgctgggagggaggcaggctcacatgggcgtgaggggtggagacaggcaggaggggccctggcttcctggcctggccggcagcctgcttacactcccagcacatcccagaggtggtatctctgtcctgcattcttctcactagcctcggtgccaagtggcacctttattagcaatctctgggcacagtgagccacggaaagggaagctggggtggatgygaacatgaaaagcaaaatgcaggaacgcaagtggaagaaccagcacatgtcctgagcctgtaacggtggcgtgagtccccaaaaggcccatccctgtggggcactccctgacataggtggctctcactctctctctcactctatctctgtaaaggccccagtgatgggg

SEQ ID NO: 141901 - DNA, 541 bp, Homo sapiens
ccagtgagctgactgatacacaaaggccattccatttggtgtggacttctccaaccttgggaaggagagagggggcatctgaaagctttccaaggtctgacctaattgggaggacttcagcctcaggtgcttctttcaagctgtaagtcacacaccacctacaggaagcctctcctgattgcctcagctggattagtgctggcacagcacagactgctttgtcctggaattacctgggtgccctggctcctytaagtttgggtccacactgccatctctggttcccccttatggcaagcgtggggctgggcccagaaggctcccagtgactggctgctgggggagaggatgccatgtcgctgataatggcgtaagattgctgctgttagggatgaagcaggcattgcttgccagctgtgaggctcagccatttcctttatgaaatcctttaattttctttttcaggatgctcagagagcctcgccctctcttctctgggacatcccttgccagatttgttttcttcttaattataattctc

SEQ ID NO: 141902 - DNA, 541 bp, Homo sapiens
ccagtgagctgactgatacacaaaggccattccatttggtgtggacttctccaaccttgggaaggagagagggggcatctgaaagctttccaaggtctgacctaattgggaggacttcagcctcaggtgcttctttcaagctgtaagtcacacaccacctacaggaagcctctcctgattgcctcagctggattagtgctggcacagcacagactgctttgtcctggaattacctgggtgccctggctcctttaagtttgggtccacactgccatctctggttccccctyatggcaagcgtggggctgggcccagaaggctcccagtgactggctgctgggggagaggatgccatgtcgctgataatggcgtaagattgctgctgttagggatgaagcaggcattgcttgccagctgtgaggctcagccatttcctttatgaaatcctttaattttctttttcaggatgctcagagagcctcgccctctcttctctgggacatcccttgccagatttgttttcttcttaattataattctc

SEQ ID NO: 141903 - DNA, 591 bp, Homo sapiens
atggctcactgcagcctcgaactcctattaaaatttttgttgttgttgttagagataggggctcatggccgggcascggtggctcatgccataatcccagcactttgggaagccaaagtgggcggattacgagatcaagagatcgagatcatcctggccaacattgtgaaaccccgtctctactaaaaatacaaatattagctggccctggtagtgcgtgcctgtagtcccagctactcagaaggctgaggcaggagaatcgcttgaaccccggaggcaggagttgcagtgagccgagatagtgccactgcactccagcctgggtgacagtgcgagactgtctcgaaaaaaaaaagaaaaaagaaaaaacgagataggggttcactatattgcccaggctggtcttgaactcatgaccttaagtgatcctcgtgccttggcctcccaaggtgctggggttacaggcatgagctactatgcccaacccatagccacacttttgtgggtctctctctcctccaacccccaggtattctgcgaatacttcaaggagctggaggaggagagcatccgggacaactttgtcatcgt

SEQ ID NO: 141904 - DNA, 591 bp, Homo sapiens
atggctcactgcagcctcgaactcctattaaaatttttgttgttgttgttagagataggggctcatggccgggcacyggtggctcatgccataatcccagcactttgggaagccaaagtgggcggattacgagatcaagagatcgagatcatcctggccaacattgtgaaaccccgtctctactaaaaatacaaatattagctggccctggtagtgcgtgcctgtagtcccagctactcagaaggctgaggcaggagaatcgcttgaaccccggaggcaggagttgcagtgagccgagatagtgccactgcactccagcctgggtgacagtgcgagactgtctcgaaaaaaaaaagaaaaaagaaaaaacgagataggggttcactatattgcccaggctggtcttgaactcatgaccttaagtgatcctcgtgccttggcctcccaaggtgctggggttacaggcatgagctactatgcccaacccatagccacacttttgtgggtctctctctcctccaacccccaggtattctgcgaatacttcaaggagctggaggaggagagcatccgggacaactttgtcatcgt

SEQ ID NO: 141905 - DNA, 591 bp, Homo sapiens
atggctcactgcagcctcgaactcctattaaaatttttgttgttgttgttagagataggggctcatggccgggcaccggtggctcatgccataatcccagcactttgggaagccaaagtgggcggattacgagatcaagagatcgagatcatcctggccaacattgtgaaaccccgtctctactaaaaatacaaatattagctggccctggtagtgcgtgcctrtagtcccagctactcagaaggctgaggcaggagaatcgcttgaaccccggaggcaggagttgcagtgagccgagatagtgccactgcactccagcctgggtgacagtgcgagactgtctcgaaaaaaaaaagaaaaaagaaaaaacgagataggggttcactatattgcccaggctggtcttgaactcatgaccttaagtgatcctcgtgccttggcctcccaaggtgctggggttacaggcatgagctactatgcccaacccatagccacacttttgtgggtctctctctcctccaacccccaggtattctgcgaatacttcaaggagctggaggaggagagcatccgggacaactttgtcatcgt

SEQ ID NO: 141906 - DNA, 591 bp, Homo sapiens
atggctcactgcagcctcgaactcctattaaaatttttgttgttgttgttagagataggggctcatggccgggcaccggtggctcatgccataatcccagcactttgggaagccaaagtgggcggattacgagatcaagagatcgagatcatcctggccaacattgtgaaaccccgtctctactaaaaatacaaatattagctggccctggtagtgcgtgcctgtagtcccagctactcagaaggctgaggcaggagaatcgcttgaaccccggaggcaggagttgcagtgagccgagatagtgccactgcactccagcctgggtgacagtgcgagactgtctcgaaaaaaaaaagaaaaaagaaaaaamgagataggggttcactatattgcccaggctggtcttgaactcatgaccttaagtgatcctcgtgccttggcctcccaaggtgctggggttacaggcatgagctactatgcccaacccatagccacacttttgtgggtctctctctcctccaacccccaggtattctgcgaatacttcaaggagctggaggaggagagcatccgggacaactttgtcatcgt

SEQ ID NO: 141907 - DNA, 405 bp, Homo sapiens
aaggaacacatcacgtgcccctccatctgtcagggacaggagccaacgggcatccgatgtgcactggtgcagcacccactgaggcacaggcagtgcccccgcggctcatccacatatccctggagggacacatcaccaaaggccaaataaaaacgcagctggaaacgccagcatccccggcacagctgcttcttattaaaagaaaaatggcacggggcgcctacatgcctgtggagtctgcttactgagaaaactgagttgaagctggaaatcaaaggagagagccctcagcttggccaggtccagagggacagcagtagcgccaccagctttacttccctctgctcagacagcctccctgcccacaatgttcctagaggcctsgtcccaccctaatatctccca

SEQ ID NO: 141908 - DNA, 517 bp, Homo sapiens
ccctcaaaatagcgtctttcagatctttttgaatgaatccacaagatgaaataartgtcctattactgagtgcccgtgaactttcgccaaaccacacttagcctcaccacctgtgaacactgatattttattactctatttcactttttaaaacttctggctacaaccctctgaactgatcttgatgtcccactatagactgtagcccacaccttgaagcactgccctcgagggcgcaggaggggcgcatgctgtccagggaggaccaagaccttccggggttggaggggcttaaccgagtccttgtggcgtccatgacgcttctcctctcgtggttctgtgctctctgcatcttgaaggggtggtgggagggcgctctaggtcaggccttgcaccgcctgccctgggcttttctgtcaagtctccaacacacccctgtgtgggaacggggacagagaactgcccggctgaatttggccttcaggcccaatcctgctgcctcctgtgggtgttcctt

SEQ ID NO: 141909 - DNA, 504 bp, Homo sapiens
tagcgtctttcagatctttttgaatgaatccacaagatgaaataaatgtcctattactgagtgcccgtgaactttcgccaaaccacacttagcctcaccacctgtgaacactgatattttattactctatttcactttttaaaacttctggctacaaccctctgaactgatcttgatgtcccactatagactgtagcccacaccttgaagcactgccctcgagggcgcaggaggggcgcatgctgtccagggaggaccaagaccttccggggttggaggggcttaaccgagtccttgtggcgtccatgacgcttctcctctcgtggttctgtgctctctgcatcttgaaggggtggtgggagggcgctctaggtcaggccttgcacygcctgccctgggcttttctgtcaagtctccaacacacccctgtgtgggaacggggacagagaactgcccggctgaatttggccttcaggcccaatcctgctgcctcctgtgggtgtt

SEQ ID NO: 141910 - DNA, 579 bp, Homo sapiens
tcagaagattttgggactcggcttgagttgagttagtatagcatcaatgttagcaagatattcgttggcagactttattttagagtttttgtaaaatgaagagtcaaagttgtgtggtgagctggagaaataaaaatggaactgggaaaagaattggggatggaaatgagaatgggattttaggtagcaattgggttgaggatgagaataggggtgggatggggtgagagtgttagaattggtgttggatgtgagggaatgggttcatgggggaggatatgaatgtgggcttcctagaatatgatggraatggagactaatgtctgaattatcccgtggcaggcttgatactcaggctatggtgacattcactgctcaggtcaaggttgagtttggcttatggctaatggttcagggttaaggtcaagggtcaggagggttaagtttgattgaggtctggatcctagcctgagttgatatttggagtcaagaactcagtcaagatttaggttattggttgagatacaaattggggttcatcaaggataaagcagaatttgaggttcaggattgggtaca

SEQ ID NO: 141911 - DNA, 579 bp, Homo sapiens
tcagaagattttgggactcggcttgagttgagttagtatagcatcaatgttagcaagatattcgttggcagactttattttagagtttttgtaaaatgaagagtcaaagttgtgtggtgagctggagaaataaaaatggaactgggaaaagaattggggatggaaatgagaatgggattttaggtagcaattgggttgaggatgagaataggggtgggatggggtgagagtgttagaattggtgttggatgtgagggaatgggttcatgggggaggatatgaatgtgggcttcctagaatatgatgggaatggagactaatgtctgaattatcccgtggcaggcttgatactcaggctatggtgacattcactgctcaggtcaaggttgagtttggcttatggctaatggttcagggttaaggtcaagggtcaggagggttaagkttgattgaggtctggatcctagcctgagttgatatttggagtcaagaactcagtcaagatttaggttattggttgagatacaaattggggttcatcaaggataaagcagaatttgaggttcaggattgggtaca

SEQ ID NO: 141912 - DNA, 477 bp, Homo sapiens
acaaatttctcccctgttctttgcttttcaaaagcaagaactaagacaaattttgaggccaggggcagtggctcatgcttgtaattccagcactttgcgaggctgctgtgagagaatcgcttgaggctgagttcaagatcagcctgagcaacagagtgagaccccgtctccacaacaacaacaaaaaaracagaacagccaggcgtgatggcatgcacctgtggtcccagctattcgggaagctaagatgggaggatcacttgagcccggggaggttggggctgcagtgagccatgatcatgcaactgagctctagcctgggcgctctagcctgcctccaaaaaaaaaaaaaaaaaaattaaacttcgagattatggagagcttcctgtttgttaaatatatcctcagacggggatggtggtgcaccccaactctatgccgatagaagctcctgtacttacaacccttccagacctc

SEQ ID NO: 141913 - DNA, 477 bp, Homo sapiens
acaaatttctcccctgttctttgcttttcaaaagcaagaactaagacaaattttgaggccaggggcagtggctcatgcttgtaattccagcactttgcgaggctgctgtgagagaatcgcttgaggctgagttcaagatcagcctgagcaacagagtgagaccccgtctccacaacaacaacaaaaaaaacagaacagccaggcgtgatggcatgcacctgtggtcccagctattcgggaagctaagatgggaggatcacttgagccyggggaggttggggctgcagtgagccatgatcatgcaactgagctctagcctgggcgctctagcctgcctccaaaaaaaaaaaaaaaaaaattaaacttcgagattatggagagcttcctgtttgttaaatatatcctcagacggggatggtggtgcaccccaactctatgccgatagaagctcctgtacttacaacccttccagacctc

SEQ ID NO: 141914 - DNA, 477 bp, Homo sapiens
acaaatttctcccctgttctttgcttttcaaaagcaagaactaagacaaattttgaggccaggggcagtggctcatgcttgtaattccagcactttgcgaggctgctgtgagagaatcgcttgaggctgagttcaagatcagcctgagcaacagagtgagaccccgtctccacaacaacaacaaaaaaaacagaacagccaggcgtgatggcatgcacctgtggtcccagctattcgggaagctaagatgggaggatcacttgagcccggggaggttggggctgcagtgagccatgatcatgcaactgagctctagcctgggcgctctagcctgcctccaaaaaaaaaaaaaaaaaaattaaacttcgagattatggagagcttcctgwttgttaaatatatcctcagacggggatggtggtgcaccccaactctatgccgatagaagctcctgtacttacaacccttccagacctc

SEQ ID NO: 141915 - DNA, 477 bp, Homo sapiens
acaaatttctcccctgttctttgcttttcaaaagcaagaactaagacaaattttgaggccaggggcagtggctcatgcttgtaattccagcactttgcgaggctgctgtgagagaatcgcttgaggctgagttcaagatcagcctgagcaacagagtgagaccccgtctccacaacaacaacaaaaaaaacagaacagccaggcgtgatggcatgcacctgtggtcccagctattcgggaagctaagatgggaggatcacttgagcccggggaggttggggctgcagtgagccatgatcatgcaactgagctctagcctgggcgctctagcctgcctccaaaaaaaaaaaaaaaaaaattaaacttcgagattatggagagcttcctgtttgttaaatatatcctcagacggggatggtggtgcacyccaactctatgccgatagaagctcctgtacttacaacccttccagacctc

SEQ ID NO: 141916 - DNA, 562 bp, Homo sapiens
ttccttggacctttgccaagaaagatatgatagggatggtttttgtagttgggcctttgcccagtaggacatgatgagaatgtttctttaattgggtctttgttcgccttgtggtcaggtggttaggcaggatatttctcactgcctgaacccctgtgaaatgtttcactttgaccaaggtctgcaaaagagcagggggcttccgaaatggtgcaatttagacaaacactggggtgtgagatgctttgccctaaaaaatatatgctgttgttgggagagaatcattggtgggtgtgactggatttgtgattgtgtggactcatcagggagcctcctggagctcaggtaagggagggcgcctgtgaggtttttggccttsattatgacatggatgagattgtatgtttctatgaacgtgtgggtaagactactgtatagagtacccttgacataagtaactccatcttagaaaaagactccatcttgcattccacagggcactttgccaacagggacaagatgttttgcttaataaataaataataaagactgcatccaacca

SEQ ID NO: 141917 - DNA, 147 bp, Homo sapiens
catagagtagttgctggatatatatttactgaataggtgagtggatggctgagtgggaagatggatgggtggrtggatggatgtttgggtgaatggatggatgtttgggtgaatggatgggtagatggatgggtggtgggtggatag

SEQ ID NO: 141918 - DNA, 444 bp, Homo sapiens
tgtgcagaagctgttagggcgggagcagccggggcgcagtcccaccgccggtcactagagggcggcagagaccagtgggccctgcccgacctctggctaaggccccaggcacgcatgcgctctcccaccccagccttcggcgcgaggcccctgcagagattcaggctaacctcggtctccaaggcaacggcttggcgaggcgaccctaggragtgcgcagcagaggggcaggggggcggcctgcggccaggggaagcagtgcgcatgcgtgggaaaacaggttccaccccttccccaacatttaagcccccctaagattggggccttggggactgtccccactgacctcgtggatgccaaagtgtgcgtaggagtcaaagtagtaatctttggatgtcatgtcctcagcgttgggcttctcactgctttccgcctggccacagg

SEQ ID NO: 141919 - DNA, 368 bp, Homo sapiens
ggcaaggatggatgatggatgggggtggtgtcagtgggggctgagggctcttgggggtgactgcggggagcctggtccccacratggcccctctccctgtctctgcagtcctggacaccgcgggccaggaagagttcggggccatgagagagcagtacatgcgtgctggccacggcttcctgctggtgttcgccattaacgaccggcagaggtgacaggggttgctggtggcggagcagtgggtgggtgtggggaggacctgggctctgcagctggctggacctcatgcctccggcttcactcgcagtttcaacgaggtgggcaagctcttcacgcagattctgcgggtcaaggaccgcgacgacttc

SEQ ID NO: 141920 - DNA, 368 bp, Homo sapiens
ggcaaggatggatgatggatgggggtggtgtcagtgggggctgagggctcttgggggtgactgcggggagcctggtccccacgatggcccctctccctgtctctgcagtcctggacaccgcgggccaggaagagttcggggccatgagagagcagtacatgcgtgctggccacggcttcctgctggtgttcgccattaacgaccggcagaggtgacaggggttrctggtggcggagcagtgggtgggtgtggggaggacctgggctctgcagctggctggacctcatgcctccggcttcactcgcagtttcaacgaggtgggcaagctcttcacgcagattctgcgggtcaaggaccgcgacgacttc

SEQ ID NO: 141921 - DNA, 624 bp, Homo sapiens
tatactgtaaatatctgtctttgttactcargggtgtcttagatgttttttatattgggatggaaagatggagctctttttaacagctgcgtgatatcccatggtgtggacatgctgtaggttacagagctgttttctcagttctgctgtttctgtgcttggctttcacaaaatgattgttcccttgagcttccttctacaagtggccttgggctgttaaggagaatgaggtcttggtagctcaaggcaatgcgtgcgttcttattttcccagcttgcactctctcatgcttgggccaattggaggttttctcttttcccccctgcctccgctcccctgctgtcaggttttagcggcttatctggtctgggcttagaaattagataccctttagtataaaatcagagtccataggctctgagaggattatctgagaaagggtgcaggaattttcatgcccacacatagtgagctctgtcgcgactccttgggattgtcggtttttgtgttttggcttccttctgggatcctggatcacgtttttggcagttgagggtgctgtctgaccgggctccagctgggtagaatgtgggagtgttgcatagaattttgagagtgagatct

SEQ ID NO: 141922 - DNA, 615 bp, Homo sapiens
tatactgtaaatatctgtctttgttactcaagggtgtcttagatgttttttatattgggatggaaagatggagctctttttaacagctgcgtgatatcccatggtgtggacatgctgtaggttacagagctgttttctcagttctgytgtttctgtgcttggctttcacaaaatgattgttcccttgagcttccttctacaagtggccttgggctgttaaggagaatgaggtcttggtagctcaaggcaatgcgtgcgttcttattttcccagcttgcactctctcatgcttgggccaattggaggttttctcttttcccccctgcctccgctcccctgctgtcaggttttagcggcttatctggtctgggcttagaaattagataccctttagtataaaatcagagtccataggctctgagaggattatctgagaaagggtgcaggaattttcatgcccacacatagtgagctctgtcgcgactccttgggattgtcggtttttgtgttttggcttccttctgggatcctggatcacgtttttggcagttgagggtgctgtctgaccgggctccagctgggtagaatgtgggagtgttgcatagaattttgaga

SEQ ID NO: 141923 - DNA, 480 bp, Homo sapiens
acaggcaccgaccaccagacctggctaatttctgaatttttagtagagacggggtttcgccatgttggccaggctggtctcgaactcctgacctcaggtgatccacccacctcagcttcccaaatagctgggattataggtgtgagccaccatgcccagcctctaataccacctttctcayggggcttcttggggtaattaaataaatgcatgcctaggaaatgctgaagcccggctctagcctgtacttagtgttctgtggaggttatcacttatgcatttccacaagtattgagcacctactgtatgccaggctgtgcagtttcagtagtgaatagaacacgcagattgctgtccttgtagagctgacattcaaatggtgagagagagtaaacctaattttaaaaaagtgaacattggggctgggcacagtggctcacgcctgtaattccagcactttgggaggctgagaggggagga

SEQ ID NO: 141924 - DNA, 519 bp, Homo sapiens
gtcacagctcactgtagccttgacctcctgggccctagtgatcctcccacctcagcctcccaagtagcatgtcgcaccacactcagctaattattattattattattttttagagatggggtctggctgtgttgccccgtctggtcttgaactggcctcaagagatcctcctgcctcagtctcccaaagtactgggatcacagrtgtgagccacctcgcccagcctccttggaactattttataagtgggggctcttgctgggacattcgttcagctgatttgttgagcacctactgtgtgccaggccccatgctgggcactggagtcacagcagtaactgagacagacccctgcccttgtggagccaatatttttatcctcatctttcacaggaggaaacaagctcagagatgggagggttctaacccaaggcaacacagcagtcacgacagttaactaagcacctatcatgggttgctcatttacccctcatgagaagccgatgtggatggttatca

SEQ ID NO: 141925 - DNA, 621 bp, Homo sapiens
ttcaatagacatttcagttgttcctctcccagcatcccactttttttcactacaaagaatatgaatagaccaggtgcagtggctcacacctgtaatccctgcacttcaggaggccaagaacaggaggaatgcttgagcccaggagtttgagaccagcctgggcaacacagcaagacctcactcatctctaaaaagatagacaaaattggctgggcatggtggcacacgcctgtaatcctaggtacttgggaggctgaggtgggggtatcacttgatctcagaggtggaggctgcagtgagccaggcttgcactgctgcactccaccctgggtgacggagcgagaccctgtctcaaaaaaaaamccaaaaaactgtgaatagcccccatcacggcaaagtgactgggctacagttcacattcaacagatctgcactgagtgagtgagtactgcaatgagcacgattatgcttggtccttgtgggaatggagggagctcccctgggacatatatcttggaacagaattgctgggcaatacggcagcctcctcagctttgatgtgattaacattttgggctggtaactctttattgttgatgagggctgtgctgtgcattgcag

SEQ ID NO: 141926 - DNA, 621 bp, Homo sapiens
ttcaatagacatttcagttgttcctctcccagcatcccactttttttcactacaaagaatatgaatagaccaggtgcagtggctcacacctgtaatccctgcacttcaggaggccaagaacaggaggaatgcttgagcccaggagtttgagaccagcctgggcaacacagcaagacctcactcatctctaaaaagatagacaaaattggctgggcatggtggcacacgcctgtaatcctaggtacttgggaggctgaggtgggggtatcacttgatctcagaggtggaggctgcagtgagccaggcttgcactgctgcactccaccctgggtgacggagcgagaccctgtctcaaaaaaaaacccaaaaaactgtgaatagcccccatcacggcaaagtgactgggctacagttcacattcaacagatctgcactgagtgagtgagtactgcaatgagcacgattatgcttggtccttgtgggaatggagggagctcccctgggacatatatcttggaacagaattgctgggcaatacggcagcctcctcagctttgatgtgattracattttgggctggtaactctttattgttgatgagggctgtgctgtgcattgcag

SEQ ID NO: 141927 - DNA, 398 bp, Homo sapiens
ctgctgaggggttgaggatgtgcttctccacctgcctagatattgtcaaattacattctcaagtggaagtttctttatgtctttctcccatcaaaatgaaatttccagaattcagaaaactcgtctttctccccgccccccgccatatttctgggtctcacagtgttcttgatgtgtagagttgctcaataagatttctagtcctgtgttgtccaatacggtrtccaccagccatatggagctactaaacccttgaaatggggccagtgccatatgttgaaataatattttgcatatattgggttaaacaaaatatatcattaaaattattttcccccttttttacatttttaaatatgactactagaaaatttaacatacgtagcttgcattacatt

SEQ ID NO: 141928 - DNA, 595 bp, Homo sapiens
cactatgttgcccaggctggtctcgaactcctggactcaagtgatcatcctgccttggcctcccaaagtgctgggattaccggcctgagccactcggcctggcctgtaagtaatattttgacactggaagtttgggggtttcccaaaaccacctttaggtttgataattcccagagctcattgaaatctgttatattcacagtcatgcttattacaggcaaaggacacagattagaagagatgtataaggcacaatctgggatggggagggttccaaatgtgaagttcctgtgttcctagggatgtgttaccctttgtcgtccatgtgtggcaataagtgtgggggtagtgctaacataggactctcacccaggctttggtgtccagagtttttaytggggttttactacctaggcatgcttgattaaaccatcgtccattttgttgaagtcaatctccagcctcctacctgatatcacatggctccaagccccaactctctaatgatatggttagcctttctgtgtggctagctctgatcctgatgataacccaaaacgtgaaagtctatgttccatttaaaatcagtcagctg

SEQ ID NO: 141929 - DNA, 595 bp, Homo sapiens
cactatgttgcccaggctggtctcgaactcctggactcaagtgatcatcctgccttggcctcccaaagtgctgggattaccggcctgagccactcggcctggcctgtaagtaatattttgacactggaagtttgggggtttcccaaaaccacctttaggtttgataattcccagagctcattgaaatctgttatattcacagtcatgcttattacaggcaaaggacacagattagaagagatgtataaggcacaatctgggatggggagggttccaaatgtgaagttcctgtgttcctagggatgtgttaccctttgtcgtccatgtgtggcaataagtgtgggggtagtgctaacataggactctcacccaggctttggtgtccagagtttttactggggttttactacctaggcatgcttgattaaaccatcgwccattttgttgaagtcaatctccagcctcctacctgatatcacatggctccaagccccaactctctaatgatatggttagcctttctgtgtggctagctctgatcctgatgataacccaaaacgtgaaagtctatgttccatttaaaatcagtcagctg

SEQ ID NO: 141930 - DNA, 532 bp, Homo sapiens
aaatgttaacctttggctttacccatttgaaaagwtcaggaaggttggaaatattatttattactaaagctataaaacagtcaattttcagatgttaatttataatatttaaaatgcatacaattttgagccagttatttcatttctttgtaattattctttaatacaactactgggaatttgatttaaaaaagttgattagaaagcttaatacagcatcatttgtgagagcaaaatactggaaacagcctaaatgtccatcaaaagagtcaaattcaataatttttgataaccattctacaggaatattatgcagtgtttaaaaactgaggcagcaccatgaatagatgactttgcaaaatacagtgtttgacaaccagtccagtccaattcctaaagtacatttgttcagaaagaaaagaaaacatagatctgtatatttctgtaaacagattatctccataatttgagtagagaagccagtaatattattgtactggggaataaaattggggctcaatactgagggaaa

SEQ ID NO: 141931 - DNA, 482 bp, Homo sapiens
tttttctatttctctataattacttctttgatcctttatcttatccattaggcaatgagcctaaaacctcttccctatttggctttctgtgagcatgagatcatatagaaaatgtgaaagyccgctgaatcctccagcacagatcctggaatagagaaagtgctctggtcatcacaaaaaaaacttgcccactcacccaaatcccccacctcacccctacttccaatcacctgtggagattcagatagaccatggggaggtaaacattaacactccttggagtgagtccagatcttggaatcagagatcagcgacagcactagctcctgctcccctttcctactaattcacaggaggacaggtggttttgaagcaatagatggccgagggggtggtcctccccccagcctctcgggtagaacagcagcctaatatgtgtctcccgagatcacaaagagcagcaggtttcacacgggcttcaa

SEQ ID NO: 141932 - DNA, 482 bp, Homo sapiens
tttttctatttctctataattacttctttgatcctttatcttatccattaggcaatgagcctaaaacctcttccctatttggctttctgtgagcatgagatcatatagaaaatgtgaaagcccgctgaatcctccagcacagatcctggaatagagaaagtgctctggtcatcacaaaaaaaacttgcccactcacccaaatcccccacctcacccctacttccaatcacctgtggagattcagrtagaccatggggaggtaaacattaacactccttggagtgagtccagatcttggaatcagagatcagcgacagcactagctcctgctcccctttcctactaattcacaggaggacaggtggttttgaagcaatagatggccgagggggtggtcctccccccagcctctcgggtagaacagcagcctaatatgtgtctcccgagatcacaaagagcagcaggtttcacacgggcttcaa

SEQ ID NO: 141933 - DNA, 482 bp, Homo sapiens
tttttctatttctctataattacttctttgatcctttatcttatccattaggcaatgagcctaaaacctcttccctatttggctttctgtgagcatgagatcatatagaaaatgtgaaagcccgctgaatcctccagcacagatcctggaatagagaaagtgctctggtcatcacaaaaaaaacttgcccactcacccaaatcccccacctcacccctacttccaatcacctgtggagattcagatagaccatggggaggtaaacattaacactccttggagtgagtccagatcttggaatcagagatcagcgacagcactagctcctgctcccctttcctactaattcacaggaggacaggtggtwttgaagcaatagatggccgagggggtggtcctccccccagcctctcgggtagaacagcagcctaatatgtgtctcccgagatcacaaagagcagcaggtttcacacgggcttcaa

SEQ ID NO: 141934 - DNA, 482 bp, Homo sapiens
tttttctatttctctataattacttctttgatcctttatcttatccattaggcaatgagcctaaaacctcttccctatttggctttctgtgagcatgagatcatatagaaaatgtgaaagcccgctgaatcctccagcacagatcctggaatagagaaagtgctctggtcatcacaaaaaaaacttgcccactcacccaaatcccccacctcacccctacttccaatcacctgtggagattcagatagaccatggggaggtaaacattaacactccttggagtgagtccagatcttggaatcagagatcagcgacagcactagctcctgctcccctttcctactaattcacaggaggacaggtggttttgaagcaatagatggccgagggggtggtcctycccccagcctctcgggtagaacagcagcctaatatgtgtctcccgagatcacaaagagcagcaggtttcacacgggcttcaa

SEQ ID NO: 141935 - DNA, 529 bp, Homo sapiens
ccgacagaggagggaagggtagcagtgttaggaacagcaggtcctctgaggacaagagggtaactcacaccctccagcgtttccatgacggtaggggctgcagtgtggctgctgtcattctgccagaagaggtgggggaaccacagccacgaccctgccattccaaatcctctgatggagctcagttgtttattgtggttcaggcattagctaatattccattcacaaaggtcataccctccaccccatgtctactttgtgttstttggtgtaactaatcttgcagtattaaaatctagtaagagtcccttactcagcacctgctcagttctcaactgacacttttgttgtagggagacgccacgtctatgcgggatgggtccttcctgtagccccaggcacccaggtgtggtaggagccttagaaagaagaaatggggagaatcttctgagcacagggagggaggggcagctcaacatactcctctctgaggcggcatctccttctccccaaggtggtcaggacaagc

SEQ ID NO: 141936 - DNA, 431 bp, Homo sapiens
ctgaattccaatcatcatttttctattyctctataattacttctttgatcctttatcttatccattagaaaatcagcctaaaacctcttccatatttggctttctgtgaacatgagatcatatggaaaatatgaaagccccctgaacccaccagcacaggccctgaaatagggaaagtgctctgttcatcacaagaaactttccccctcacccaaatcccccacctcacccctacttccaatcacctgtggagatacagatagatcatggggaggtaaacgctaatactccttggagtgagttcagatcttggaatcagagatcagcaccagcactagctcctgctcccctttcctactaattcacaggaggacaggtggttttgaagcaatagatggtggagggggtggtctttcccccagcctctcagg

SEQ ID NO: 141937 - DNA, 431 bp, Homo sapiens
ctgaattccaatcatcatttttctattcctctataattacttctttgatcctttatcttatccattagaaaatcagcctaaaacctcttccatatttggctttctgtgaacatgagatcatatggaaaatatgaaagccccctgaacccaccagcacaggccctgaaatagggaaagtgctctgttcatcacaagaaacttkccccctcacccaaatcccccacctcacccctacttccaatcacctgtggagatacagatagatcatggggaggtaaacgctaatactccttggagtgagttcagatcttggaatcagagatcagcaccagcactagctcctgctcccctttcctactaattcacaggaggacaggtggttttgaagcaatagatggtggagggggtggtctttcccccagcctctcagg

SEQ ID NO: 141938 - DNA, 444 bp, Homo sapiens
ctttttgggggttgtatattttatttgaaacctgtaaatataactacagtgttctgctgagttctgtgagtagctctatcagattattgaatttcagaaaggttatgggagtccccaatttttaaacagtaggtcagaagcatagatgagcccatgaagtttgtgactggcatctgcagtgaggacaatgttgtgggactgagccctgaatcagggtctgtgctgactctcaacctctcaggctcaagcartcctcttctacttaagcttcccaagtagctaagactaaagtcttgtgccaccatgcctagctaatttttctttatgttttttttttttttatagatgggattttgctatgttgtccatgccggtctcaaactcctgagctcaggcaatccacctggcttggcccccaaagtgctggattacaggcatgtgcca

SEQ ID NO: 141939 - DNA, 355 bp, Homo sapiens
cattttctgcattgtgagatatcaacatagacattttaaattcctcttttgagagtgtggctttttgaccttttcacatcttcttcattaatctgccacaggtatgtgagaggctccmggagtaaatagaatctgatggcagaatctctaagtgtaaacaagcatcttaaggccacaaagtatccagagccatgaccacaactatatctacctgtaaaatgtgatactggagtaaagtattcttgtccttctacttacccaccagctagcaaatcaggacagctagcaaatcaggatggatgacccaggtttgggagttcaaccaaggcagttccattttttatttagaatcatc

SEQ ID NO: 141940 - DNA, 498 bp, Homo sapiens
gtctcaaacttcggacattacacttaatcagattgctgagtataggaaaaaatccaaaactaaagttggtaaaaaaaaattatttgtatgtaactttaaaagaagtagatctttgaagagttataatttcatttaaagtacacttttgtcttgaaaatacagatttttttttgtcagacacagtggcttacatctgtaaggccaacactttgggatgccgaggtgggtagatcacctgagttcaagaccagcctggccaacttggtgaaaccccatgtctactaaaaggaaataaaaaaaattagcgaagcatggtggtgyacatctgtagtcccggctacttgggaggctgaggcatgagaatcacttgaacctgggagccagaggttgcagtaagctgagatgctgctactgcattgcagcctgggtgacagagcaagactctgtctcaaaagaaaaaaaaaaacagcttatttggaaactgaataatgatggaat

SEQ ID NO: 141941 - DNA, 552 bp, Homo sapiens
ggattcaaataatatagttaaaatggtcattctgcctaaagcaacctacggattaagtgctatttttatcagactatctatgatgcttttttatagaattagaaaaagaaaatattccaaaatatatacaagagaattaaagagctcaaatagccaagactgcttcagactaaaagaataaatctgtgtcgagcgtgatggctcacacctgtcatctttgggaggctaaggtggatggatcacctgaggtcagaagtttgacaccagcctggccaacayggtgaaaccagtgtctactaaatacaaaaaattagccaggtgtggtggtgcgtgcctgtaatctcagctgcttgggaggctgaggcaagagaactacttgaacctgggaggtggaggttgcagtgagccaagattgcagcagagtagccagtataacatggttctggtacaaaaatatacatatagaccaatgaaataggagagagtcctgagctaagctacactttacaaccaggttatttttacaaagccaacagaaataaaaggggaatt

SEQ ID NO: 141942 - DNA, 419 bp, Homo sapiens
gcatctttttctagtttcgcacagctgcagaggcttcaggaaactaacaatcatggaaggcaaaggggaagcaaagactttctggttgtggctggagaaagagctacaatgtactgactggtctcactcaggatgttcctgacattcaggataggtggggtgacccagcaatcatttggacactatccattccagtgacgctcaaacttcagtgtgcatcagaatttctgcaaggcttgctaagacacagactgctgagcccacctscaagacttctttctttttaaggaataaagagcattccattgtgtaaatataccactttttaaaatttattcacctgttgatggacacttaggttgatttcataccttagctattgtgagtaatccacttttttccttttcttattttttata

SEQ ID NO: 141943 - DNA, 436 bp, Homo sapiens
gggcttttgggtgtgcatctttttctagtttcgcacagctgcagaggcttcaggaaactaacaatcatggaaggcaaaggggaagcaaagactttctggttgtggctggagaaagagctacaatgtactgactggtctcactcaggatgttcctgacattcaggataggtggggtgacccagcaatcatttggacactatccattccagtgacgctcaaacttcagtgtgcatcagaatttctgcaaggcttgctaagacacagactgctgagcccacctgcaagacttctttctttttaaggaataaagagcattccattgtgtaaatataccactttttaaaawttattcacctgttgatggacacttaggttgatttcataccttagctattgtgagtaatccacttttttccttttcttattttttatatat

SEQ ID NO: 141944 - DNA, 567 bp, Homo sapiens
agcctcgatccaaaggtgtcaatgaatactaataaatatttaaaccctttacatggggtcatctgagtatagtctatttgccartcttcaccagggtatgttcgtctatgctgaataggccttactaaaggaggaggtaaacattggtcatttgggttattccagacacatccttcacaggctcaagtaacctagtttactgttttaagtaatcctttttctataaaaagccaagacattatttgaaacagggaatctcttcccaaatgggtagagtcatgcaaatgtttaactattttttattgattagcacctcatatcagtagtttatcaggagtgtctagcaaaatgcctgctatttcaataagcgtccccctgtcatccactggtgtcctttagcttctaggactccttgtacttggtgtgggttttaacttccaggtgttgttctaaagccagtttattggattcatctaccaaaagagaagttgctgcaactgccctgaggtatccaggcatgataagaaagttgtgtaagaaaaccaaggtctctgaaaaacagcatgg

SEQ ID NO: 141945 - DNA, 594 bp, Homo sapiens
atacagatcctgccaagttaaagtataggtcagagttaacttttcaaactcatctatgaatttttctggatcttcagagaaatgaccaaacttgtcttattatagagccaaaccagacatagaaaaggggacatgtcctctcacaatgacttcttccccatttgcaacctctctaagtggacaaagatttccttttggaggttgataggcagccccactactagtagtacccactgagytccattcttcagggcgtggtgggtgtagagaggaactagaagggtaaggaggagggacaaagggttctcaatagaactttcaggtgaactaggggcagataggaccgacacatctgaaccttcagacctgacagaaagaggttccacttcacccaaaaatgctcactgaatcaagtggcagggggcttgcaataaatgatcatattgtctaactctttttattctatttctctcatgaaacatgcccatgcctgctgcagggtttcattctgactgagcagcaaaaatgcttgaacttacgatattttatcccattttccctaccatgtacagaacaaatcgagttgaactatag

SEQ ID NO: 141946 - DNA, 598 bp, Homo sapiens
catgctgtggtaaggtttggtgtgtcacgctggaatccaaagaggctgaggggttgtgaacmcaagcatatcctcttcccaacattaacaaataatttggaccacactatacattactatttgccgagaccagctcagtcatggagaccctaacccagtggcactagaggaattaaagacacacgcacagaaatatagcatgtggactgggaaatcaggggtctcacagacttcagaactgacagccccaaacagagatttacccacatatttattggcagcaagccagtgataagcattgtttctatagattatagattaactaaaaatattccttgtgagaaataaagagatgtgctctggctagttatctgcagcaggaatcagtccttaaggcacagattgctcatgctattgtttgtggttcaggaatgcctttaaatggttttcccaccctaggtgggccaagtgttccttgccctcgttccagtaaacccacaactttcagcatgggcatcatggccatcacgagcatgtcacagtgcttcaaagattttgtttatggccagttttggggccagtttatggccagatttgg

SEQ ID NO: 141947 - DNA, 598 bp, Homo sapiens
catgctgtggtaaggtttggtgtgtcacgctggaatccaaagaggctgaggggttgtgaacccaagcatatcctcttcccaacattaacaaataatttggaccacactatacattactatttgccgagaccagctcagtcatggagaccctaacccagtggcactagaggaattaaagacacacgcacagaaatatagcatgtggactgggaaatcaggggtctcacagacttcagaactgacagccccaaacagagatttacccacatatttattggcagcaagccagtgataagcattgtttctatagattatagattaactaaaaatattccttgtgagaaataaagagatgtgctctggctagttatctgcagcaggaatcrgtccttaaggcacagattgctcatgctattgtttgtggttcaggaatgcctttaaatggttttcccaccctaggtgggccaagtgttccttgccctcgttccagtaaacccacaactttcagcatgggcatcatggccatcacgagcatgtcacagtgcttcaaagattttgtttatggccagttttggggccagtttatggccagatttgg

SEQ ID NO: 141948 - DNA, 559 bp, Homo sapiens
gtgaggaatgcagagacatgccacaatgtcccctgtaggaaggtcccaagtaggagactcccatcccttaggagttgagttcagcaatatgtcacaatacccaaatgtgtagagcctgagaaaaagaggagagtcacatcacctagatgctaggccagtaatctgtcacaatttctctgtgagcagagaccaggcaggagaagagagtaacrtcagtatggtgatggacattgagttatgtcacaaggtcccctgcaggcagtcccagaaaaaaaagttacatcacctgggtgttgaacccagcaatatgtaacaatgtctaatgtgatatattgagccccaatacggcacaacatgtaaggcacatttgggagagtcatataacatgggtgcaggattcagccaaaattgacaatacttaaaatttgtggggtccccaaaaaaagaagagtcaaatcaccgaggtgctggatccagtgatgaatcacaatcttaccttcagactgggaccatgcagcaaaatcaaatcactcagggctgaacataggcatatgtaata

SEQ ID NO: 141949 - DNA, 430 bp, Homo sapiens
gggtctaagttcatgagtaacaatctcaatagctgacagaatttttgcaaaagagctaccatttcttctgcagactgtgttctgttagtgcagtcacagcctcatatgtgtgctgaattcttggtctgaagttcaccagcccacctgtggcccaggccatataggagagtcaattctccaactttcacagcctccatgtctgagattcagaacctcaacagtgggatatgtttatgtgggagaatgacaatctttaytgtcacttgggcatgcattcaagacacattatctcacctgtgtgctgtgaactcctatgacactcaccatgtcacctgagggctttatacaatatgcaagagtggtgatcctctgtgaccttcgtacaagaagggaatccagaatcttttctatggttctaagcccagagtca

SEQ ID NO: 141950 - DNA, 188 bp, Homo sapiens
tccaaatgatttgttaacaggggaagatgatatgcttgtgttcactttccctcaggtcctctttggattctagtgtgatgcatcaagtcatactacgatgtggctgaaaccaaacytggtaccaaaaataaaataaccctgctggacccacagccccagatgatgtggcttcctcagacaatacaggc

SEQ ID NO: 141951 - DNA, 621 bp, Homo sapiens
ctgtccaccagccaacaagattgatccctggcctcccttggcggggctggcaggacagtgtagcaaggcagctggccaaactctccccaaggctcgccgagcttttagctagtgatcaggtctgtaaagcctgacctttatcgtaggataaaagtaggctttgttcattcatttcatcttccctaaaggtaccattagcgatttattgatttttctttttagagaaaatcttaaagtttctttttaagacagagatttgagcctgtgcatctaaccctccccaacttccaccttcctgctggcatacaaaacagggaaagactgtgtcagtgctgaagctccggaggaaagagagccccttggcagaaacactgtagacttctgctgggccaagagctggggaaggcagactgcaaggaggacctaccttacataggagaccacgtttgcctggaaggcgagtrgaggaaaacccaggggacgccactagtgcctcagacttaaagggagagctggactgcagatgacgatggacagaggggttgcctggggtgcacaggaatcccaccaatatgcacttatgcaaagtggctccaaactgcacccagtcaagatccaaca

SEQ ID NO: 141952 - DNA, 449 bp, Homo sapiens
acctagtgagagagagagagagaggaagtttttgttttgttttgttttgttttgagatggagtctcacyctatcaccaggctagagtgcagtggtacaatctcgactcactgcaagctccgcctcctgggttcaagtgattctcctgcctcagcctcccaagtagctggaactacaggcgtgcaccaccatgctcagctaattttttttgtgtgtgtgtatttttagtataggcggggtttcaccatgttggccgagctggtctcgaactcctaacctcaagtgatctgcctgcctcggcctcccaaagtggattacgagcatgaaccaccatgcctggccgtgagagagatatttaacatgggggactggttcacatgactgtggagcctagggagccctcacagtctgccacctacaagctggaggcccaggaaaactagggtgtag

SEQ ID NO: 141953 - DNA, 449 bp, Homo sapiens
acctagtgagagagagagagagaggaagtttttgttttgttttgttttgttttgagatggagtctcactctatcaccaggctagagtgcagtggtacaatctcgactcactgcaagctccgcctcctgkgttcaagtgattctcctgcctcagcctcccaagtagctggaactacaggcgtgcaccaccatgctcagctaattttttttgtgtgtgtgtatttttagtataggcggggtttcaccatgttggccgagctggtctcgaactcctaacctcaagtgatctgcctgcctcggcctcccaaagtggattacgagcatgaaccaccatgcctggccgtgagagagatatttaacatgggggactggttcacatgactgtggagcctagggagccctcacagtctgccacctacaagctggaggcccaggaaaactagggtgtag

SEQ ID NO: 141954 - DNA, 402 bp, Homo sapiens
cacgcgcctctacttggctctggttctttggacagatctggggttccctggtcctctgccttccatctggggtcagacaactgagaggagatggatggcaggaygggagtgaattcagcttcaagcctgtcctgagaacaggtcactcacctgacccagagccatggtttctggggatggcaacatctgcccagtgtcccagggtgctagggttgtgattgaagccttttaaaatttttatgtatttagttagttattgtttgtttgttagtttgttattgacacagagtctcaccctgtcacccaggctggagtgcagcagcaaaatcatggctcactgcagcctcaacctcctgggctcaggcgatcctcccacctcagcctcccgagtagctgggagta

SEQ ID NO: 141955 - DNA, 416 bp, Homo sapiens
acttggctctggttctttggacagatctggggttccctggtcctctgccttccatctggggtcagacaactgagaggagatggatggcaggacgggagtgaattcagcttcaagcctgtcctgagaacaggtcactcacctgacccagagccatggtttctggggatggcaacatctgcccagtgtcccagggtgctagggttgtgattgaagccttttaaaatttttatgtatttagttagttattgtttgtttgttagtttgttattgacacagagtctcaccctgtcacccaggctggagtgcagcagcaaaatcatggctcactgcagcctcaacctcctgggctcaggcgatcctcccacctcagcctcccgagtagytgggagtacaggtgcaggtcaccacacccagct

SEQ ID NO: 141956 - DNA, 488 bp, Homo sapiens
actagactaacaacgggaggcaagttgtaaaggacacggcctccccttcccttgggtagtccgcggccgccttgctctatggtcgggtacctgacgtggaacgggcgctctgcacgcgaccatagagccttcccctcccgaaagacatccagaagttcaccgaccgctctcccgaatcctctaatcggctgttcccgtaaatcgggctgtctggcgtctgtaccgacaagctcaaccccacggatccgtcattaaccttcgcgctcaggaatacaaaagccacagagcttcccagtgtctaacgctgcaccacctgtcgcctctaactcaaaacaaaactcgagtaagacgcaatcgggatacatgatgcagackcccactgcctcctgagccacacgttaagcccgcaaaagccacacactatctctactcagacaaaggcacaccccgcagtcgtaaacaaacaggcgtgcgtcagatcagacgca

SEQ ID NO: 141957 - DNA, 589 bp, Homo sapiens
aatagagccatatttttcttcttgcaaagagcctataaatggacgtgagagtagaagaaatatcagtaaattcttctcctagcaaggaatattgaatattaagrccctaggaaaagaattgcattcctggggggaggtctataagtggccactctgggggtgtctgtcttatgcggttgagataaggactgaaatatgccccggtctcctgcagtaccctcaggcttagtaggattgagaaattccagctggtaaattttggtcagacaggctctctgctctcaaaccctgtttcctgttaagatgtttatcaagacaatatgtacacagcgggacatagaccctcatcagtaattctaattttgcctttgccttgtgatctttgttgccctttgaagcatgtgatctttgtgacctaatccctgttcatgcaccccctccccttttaaaatccctagtaaaaacttgctggttttgcatctcagggaacatcatgaacctacctatatgtgatgttacccctggaggccaagctgtaaaatttatctctttgtactctttctctttatttctcagacaggctgacgct

SEQ ID NO: 141958 - DNA, 588 bp, Homo sapiens
agatctccagtttattttacacattaacatgtgagcagtattttctaactgaatatgtcttttccatctgaaaaatttacacaacttattctgtatgatgtaaatgtagcactcaaaagtgtacatgttagtgttaatgccctcagttttatacttcatcatccaaaaaagtatcatctatacctcgatgttgtggatcttatgccactctcttttctcagagttagagaatacattagagaatacttctgtgctgaaagttatttattaaatatatcagtcactcctataagtaagaaccagttctctttactcttgttttaccttgagtcaaattaaaaattctgtttatggccacttggtaaatatgtatgtgtgtttgtatgtttttcagggagtgttgacatttagggatgtggccttagaattctctctggaggagtggcaatgcctggacaccgcacmgcagaatttatataggaatgtgatgttagagaactacagaaacctggtctttgtgggtgaggataacttcaatatacaattccctaatataccctataaattttatttctcttttttgtagaa

SEQ ID NO: 141959 - DNA, 498 bp, Homo sapiens
gtggcaatgcctggacaccgcacagcagaatttatataggaatgtgatgttagagaactacagaaacctggtcttygtgggtgaggataacttcaatatacaattccctaatataccctataaattttatttctcttttttgtagaatggtttttttggtagtttatgctttcagatctctgttttttttttttgttttttttttttaacttcaagatttgtctatgtagaaaagaatttcaagatgtttcattttgatctgaactttccacactcctgagctgatctgtgttcttcactctagattagtgttaattttagaaatttagtggcataacatactgttgcccacatcttaaaatctaattgccactaccagtttttgatttagtagtatcaggtagtgaaattaagaacttacaaaattaaaatatttcctaaatatttaaaattttttgttgtgtattagtattttggaatcaatttactagaatattc

SEQ ID NO: 141960 - DNA, 498 bp, Homo sapiens
gtggcaatgcctggacaccgcacagcagaatttatataggaatgtgatgttagagaactacagaaacctggtctttgtgggtgaggataacttcaatatacaattccctaatataccctataaattttatttctcttttttgtagaatggtttttttggtagtttatgctttcagatctctgttttttttttttgttttttktttttaacttcaagatttgtctatgtagaaaagaatttcaagatgtttcattttgatctgaactttccacactcctgagctgatctgtgttcttcactctagattagtgttaattttagaaatttagtggcataacatactgttgcccacatcttaaaatctaattgccactaccagtttttgatttagtagtatcaggtagtgaaattaagaacttacaaaattaaaatatttcctaaatatttaaaattttttgttgtgtattagtattttggaatcaatttactagaatattc

SEQ ID NO: 141961 - DNA, 498 bp, Homo sapiens
gtggcaatgcctggacaccgcacagcagaatttatataggaatgtgatgttagagaactacagaaacctggtctttgtgggtgaggataacttcaatatacaattccctaatataccctataaattttatttctcttttttgtagaatggtttttttggtagtttatgctttcagatctctgttttttttttttgttttttttttttaacttcaagatttgtctatgtagaaaagaatttcaagatgtttcattttgayctgaactttccacactcctgagctgatctgtgttcttcactctagattagtgttaattttagaaatttagtggcataacatactgttgcccacatcttaaaatctaattgccactaccagtttttgatttagtagtatcaggtagtgaaattaagaacttacaaaattaaaatatttcctaaatatttaaaattttttgttgtgtattagtattttggaatcaatttactagaatattc

SEQ ID NO: 141962 - DNA, 498 bp, Homo sapiens
gtggcaatgcctggacaccgcacagcagaatttatataggaatgtgatgttagagaactacagaaacctggtctttgtgggtgaggataacttcaatatacaattccctaatataccctataaattttatttctcttttttgtagaatggtttttttggtagtttatgctttcagatctctgttttttttttttgttttttttttttaacttcaagatttgtctatgtagaaaagaatttcaagatgtttcattttgatctgaactttccacactcctgagctgatctgtgttcttcactctagattagtgttaattttagaaatttagtggcataacrtactgttgcccacatcttaaaatctaattgccactaccagtttttgatttagtagtatcaggtagtgaaattaagaacttacaaaattaaaatatttcctaaatatttaaaattttttgttgtgtattagtattttggaatcaatttactagaatattc

SEQ ID NO: 141963 - DNA, 641 bp, Homo sapiens
cccagggtgatgggatgtcctatgggtttgtagtggagaggggtaggtagcttgtttacaaaggctgctgggtctgcattagggtccacctttagttggcttgttacaaggggcttaggtagttgtaattcccattttatttttggacagagtgagtatccttcaggactttgctctgtagggcagacgctagggcagatttctgcacttgggtctgcatatggtaggctttatattaggatgtagatgagtttggctttcactgagtaccagagaggatttcccaaggtcactgtgtgggtttctacataggcagaacttgccatgaactgtggctcagggtgataaaactgagtcatgaaacygcttcagggaccacagtaatggccaaggtctgcaggcctgctgcgtggctataaaggggtgtctctctccagacctctgaaagggcaagacctctcccagactgtggctgggaggagtttgggatgattgcagggtaagttcagaattctcagtgggaccaagtttggtgggccattttctggtctgtagccaagaacaggggtcctgtagtttgccacctgaatgaaagcctgccttctgaagagaatattcctcaatcttgggcattagcagag

SEQ ID NO: 141964 - DNA, 446 bp, Homo sapiens
ggattacttgaacctggaagtttgaggctgcagtgagctgtaattgtgccatgcaccccagcttgggtgacagagtgagaccctgactcaaaaacactgtacatttcaggcatgttaagtatatttacattattttataaaagatttctagaaaktttacaatacacattaaacaactaccaatttttcccatttcctggcacttttcaaatgccattctgttttctgtttctaagagtataactgctttgtatatctcataaaatctgtttgtggctggctcattttattttgcataaagtcatcaggatttacctttatagttgttagaatatttcctgctttttttcaaactgagtaatattttggcatttttgtatttcaaattatatctgctgaacgatttggtgaccgaaatttgccttgcttttacctactggctttta

SEQ ID NO: 141965 - DNA, 446 bp, Homo sapiens
ggattacttgaacctggaagtttgaggctgcagtgagctgtaattgtgccatgcaccccagcttgggtgacagagtgagaccctgactcaaaaacactgtacatttcaggcatgttaagtatatttacattattttataaaagatttctagaaagtttacaatacacattaaacaactaccaatttttcccatttcctggcacttttcaaatgccattctgttttctgtttctaagagtataactgctttgtatatctcataaaatctgtttgtggctggctcattttattttgcataaagtcatcaggatttacctttatagttgttagaatatttcctgctttttttcaaactgagtaatattttggcatttttgtatttcaaattatatctgctgaaygatttggtgaccgaaatttgccttgcttttacctactggctttta

SEQ ID NO: 141966 - DNA, 437 bp, Homo sapiens
cttcatgtgaccatatatgtgagagtttatatatgtgctgcattctattttattagtctactttttcacctttatactcataccaaattgttttaattctgtagctttgtgttttgaaatcaggaactgtaatgcctccaacattgttttgttttgtttttaatatttttgggtacttyattgtatgtagagattctgtatactcgagggattgctgtttctgtttcttcaaaaatgcagtgagaaatttgaaaaacattgcattaaatctgtagattgcattgagcaggatggacatctttacagtattacctttttcagcctttcacaagagcatgctcaagagtgtgttgtttaatttctatatatttgttaatttttcagattttttttctcgttgtatactcatttcattttggtgatagaaagtaatttat

SEQ ID NO: 141967 - DNA, 488 bp, Homo sapiens
tttgggtacttcattgtatgtagagattctgtatactcgagggattgctgtttctgtttcttcaaaaatgcagtgagaaatttgaaaaacattgcattaaatctgtagattgcattgagcaggatggacatctttacagtattacctttttcagcctttcacaagagcatgctcaagagtgtgttgtttaatttctatatatttgttaatttttcagattttttttctcgttgtatactcatttcattttggtgatagaaagtaatttataaaatttcagttttaaaaaaactggtaagacttaattttcttttttttgtaataagaggaggtctatsaaggaaaatgttgtattagctattgagaaccatgtgtgtcctggtgttgaggggtgttttctatacctctgttagaaataattgtcttacactgcctggaagtcctctattcccttactaatattctcatttaatttttattacggcaag

SEQ ID NO: 141968 - DNA, 612 bp, Homo sapiens
  misc_feature (1)...(612): n = A,T,C or G
gccaattactngagaaaacaattattgccaagggagaaggctttaatcgggtgttgcagccatggagatgggaggtcagtctcaaattcctctccctggctgtctaaaattagaggcttatgcagcagggaagaaatgtaacaagtgttggaaaataggaactggggaatggtgaggaggcaatcatgatgagtgaggggtctggcatctccttgtctggatgtggtgatctggtgagtttcagttctttcatactttttgwggggtctgggagtgttttcctgaggaaggaattcagattaaacaaatgaccagaaataccatttgacccagaaatcccatgactaggtagaaacccagaggaatataaatcattattttacaaagatacaggcacacatatgttcattgcagcgctattcacaatagcaaagacatggaaccaacccaaatgcccatcaatgatagactggataaagaaaatgtggtacatatacaccatggaatactatgcagccataaaaaggaatgagaacatgtcctttgcagggacatggatgaagctggaaatcaccactctcagcaaactaacacaggaacagaaaaccaaac

SEQ ID NO: 141969 - DNA, 612 bp, Homo sapiens
  misc_feature (1)...(612): n = A,T,C or G
gccaattactngagaaaacaattattgccaagggagaaggctttaatcgggtgttgcagccatggagatgggaggtcagtctcaaattcctctccctggctgtctaaaattagaggcttatgcagcagggaagaaatgtaacaagtgttggaaaataggaactggggaatggtgaggaggcaatcatgatgagtgaggggtctggcatctccttgtctggatgtggtgatctggtgagtttcagttctttcatactttttgtggggtctgggagtgttttcctgaggaaggaattcagattaaacaaatgaccagaaataccatttgacccagaaatcccatgactaggtagaaacccaraggaatataaatcattattttacaaagatacaggcacacatatgttcattgcagcgctattcacaatagcaaagacatggaaccaacccaaatgcccatcaatgatagactggataaagaaaatgtggtacatatacaccatggaatactatgcagccataaaaaggaatgagaacatgtcctttgcagggacatggatgaagctggaaatcaccactctcagcaaactaacacaggaacagaaaaccaaac

SEQ ID NO: 141970 - DNA, 473 bp, Homo sapiens
gagtgactgggtctatggagggaaggaggtggatgtcagggttcaggaagaggctgactcaggctrcagagcctctgcctcatccttgagggcaacaggagctggtgtggggtggctggatgcctggccacccctagacctgtttactgagcacctcctgtgggctgggcactgttggaagcactttacgtagttggacccatttaatcatctcagcaagcccatgaggagcatcagcatccccattttatagatgaggaaagtgaggccccgagagatcacgtggctcgcctgagctccccagccaggaagtggcagccgcaggattcggacccaggtagcctggccccacaggtatgcacttgataactggactctacacccttgatggaggctgggagacgatttcccagttctggaagaaaatggggctgcgaagtcaggagcctgggtccctgaggaggataagggct

SEQ ID NO: 141971 - DNA, 573 bp, Homo sapiens
aggtgcaatgctttgtaaggacgcccaggtggtcccctccccctgcaaatacccgccaggcagggaccaacccctcttaggaaatccaacagtcccagtcccctctaaatccctctctccagaattctagattcctccaaggttgtgccacacaaagagaggaaaaaaaaaaaaaggaacaatttctccgtggtttctggaggccctgtgcttccggccagatctgccctgggcttagagccagaagagaggggtggcagtggggagctgcaggggggcagaaccgagggggctgtctcagagctgaggctgggtctcagggactcagccctccggatgagagcagagaagggtgtgactcagtctttgaggattgaatggtagtttctacattcttccagatctggggttggggttgattgaagttggtttctaggrcaacaccaggtgggtaggaagggaaggggagggggcactctctagaggctagatgtctttttctagacaccacacacacacacccacacacacacacacacacacacacacctgaagaactatttttgatgtgaa

SEQ ID NO: 141972 - DNA, 573 bp, Homo sapiens
aggtgcaatgctttgtaaggacgcccaggtggtcccctccccctgcaaatacccgccaggcagggaccaacccctcttaggaaatccaacagtcccagtcccctctaaatccctctctccagaattctagattcctccaaggttgtgccacacaaagagaggaaaaaaaaaaaaaggaacaatttctccgtggtttctggaggccctgtgcttccggccagatctgccctgggcttagagccagaagagaggggtggcagtggggagctgcaggggggcagaaccgagggggctgtctcagagctgaggctgggtctcagggactcagccctccggatgagagcagagaagggtgtgactcagtctttgaggattgaatggtagtttctacattcttccagatctggggttggggttgattgaagttggtttctaggacaacaccaggtgggtaggaagggaaggggagggggcactctctagaggctagatgtctttttctagacaccacacacacacacmcacacacacacacacacacacacacacctgaagaactatttttgatgtgaa

SEQ ID NO: 141973 - DNA, 517 bp, Homo sapiens
aatttcaacttactttgggtgtgagatccagaacctaaacagtggcctgtgtttatccrgaagaatgacaatatttactgtcagcttggtgtatatatgagtgtcacaatctcacctgcgtgctgtgctctgttaggacaccctctgtaccaccaaagggctttctacaatatacattaaagtcacaatatgctctgagacatttgtgctcatatagacccatgatccttcctgtggccccaagcccagtaatgagagtcaacatctctccagttggatatgtccagatagaagagatttaacctgccagaattagaaatacatcaccatcccaattgtagctgggtgttcacatatgacagtcacaatctgaactgtgggctgtgtcaacgtgtgaaattcaggacctctccaatgggctctgtccttgtgtcagggtgacagtcttaacagttgatgggattcacatacaagaaacacaatctcacttttattgtgccctgtgatgacattttct

SEQ ID NO: 141974 - DNA, 416 bp, Homo sapiens
acttttcacttggtttctctctacacccaagtcctgtgcccatacgtgggttgtgaaggtctggccacagttgattttcatccagcctcaataacaaatactgtgccatctctgtaaccaaatgcaaggagacaagaggcgggaagcctcatgaacccactgggatttcgaggcaccttggtgcccamtccagaatgagagtctcagagaatgcttgttggctgcggggcttgaacgcatgaaccctgcttagtgaggcttccctcccttaaccagcactccgtggttatctgatgcctttctccacaatacctggttctgagaaatcaaattaaatataaagtccctctgccgctgagcagttcattggaaccctcctaataaaaattcttttgaatgtgccactcagcggaatt

SEQ ID NO: 141975 - DNA, 416 bp, Homo sapiens
acttttcacttggtttctctctacacccaagtcctgtgcccatacgtgggttgtgaaggtctggccacagttgattttcatccagcctcaataacaaatactgtgccatctctgtaaccaaatgcaaggagacaagaggcgggaagcctcatgaacccactgggatttcgaggcaccttggtgcccactccagaatgagagtctcagmgaatgcttgttggctgcggggcttgaacgcatgaaccctgcttagtgaggcttccctcccttaaccagcactccgtggttatctgatgcctttctccacaatacctggttctgagaaatcaaattaaatataaagtccctctgccgctgagcagttcattggaaccctcctaataaaaattcttttgaatgtgccactcagcggaatt

SEQ ID NO: 141976 - DNA, 512 bp, Homo sapiens
ctctttggcataagcattattttgagccaactatttttgagaaacagcagacaccggagaaacagagtagaagttactcttttgcaaggaagacttacttctataatgaaaatctccttttgtaaygataccttcctttcagtaccaggaaggaaaggatggctaaatcacaaaagactcatctatggagaaagcaccaatttaaatctgcataacaaacctcacccttttctatcatgctttccctggtcacctccccaggactggcttcccccccagtcttctttctttgttttagatgaagatggtatttaagcctaaattctaagccatttcttttatatttccccttttttcctgagtatctcccatgcacacctaaagaatacatgtcaataaacttctgtttgttttgtcctttttttgtttgtttgttttacaggggatcctagctaaatagaagagtagaggaaaaacgactgtttcaacccttaccgtaatcaactttattg

SEQ ID NO: 141977 - DNA, 400 bp, Homo sapiens
accacgggctctgaagctttaaaccctcccctgactccccaggtcaagttgtggctttgccttccaggtctggacgaagggagcctttctgaccacaaagacaagatttccatgtgttataccagctgctaacaccctctacttccctctcccactctgtccccgtwggtcctttttctttgactggagcatgtgtttgtctaatgtccatctcccttggggactgtgagctctcctaggggtggaaccctctctctgttgttctcctcacataaataatattaataataacagaaaatgtgtagatagtgcttactatgtatctggtaccgttttaagtgctatgtgtgcatatttttatatatgcattacatatctaaaaactttttattctgaaaac

SEQ ID NO: 141978 - DNA, 400 bp, Homo sapiens
accacgggctctgaagctttaaaccctcccctgactccccaggtcaagttgtggctttgccttccaggtctggacgaagggagcctttctgaccacaaagacaagatttccatgtgttataccagctgctaacaccctctacttccctctcccactctgtccccgtaggtcctttttctttgactggagcatgtgtttgtctaatgtccatctcccttggggactgtgagctctcctaggggtggaaccctctctctgttgttctcctcacatraataatattaataataacagaaaatgtgtagatagtgcttactatgtatctggtaccgttttaagtgctatgtgtgcatatttttatatatgcattacatatctaaaaactttttattctgaaaac

SEQ ID NO: 141979 - DNA, 400 bp, Homo sapiens
accacgggctctgaagctttaaaccctcccctgactccccaggtcaagttgtggctttgccttccaggtctggacgaagggagcctttctgaccacaaagacaagatttccatgtgttataccagctgctaacaccctctacttccctctcccactctgtccccgtaggtcctttttctttgactggagcatgtgtttgtctaatgtccatctcccttggggactgtgagctctcctaggggtggaaccctctctctgttgttctcctcacataaataatawtaataataacagaaaatgtgtagatagtgcttactatgtatctggtaccgttttaagtgctatgtgtgcatatttttatatatgcattacatatctaaaaactttttattctgaaaac

SEQ ID NO: 141980 - DNA, 582 bp, Homo sapiens
gtttttgtcaattcttccattattgcttagtagtattaggagcagagcccagaggcagaacttgatatccagcctggctagcaggggaaagttttcaggcttttaggacagagagtcctagcctgctgagagagctggtgacaatatgtgaaggcagatgatgacacctagacatgttcagtcaatgaattttcccttcactcacttcttattttctctgaattatcatttttttcaaacatcttcacttcctggatgtttgctcttctgttccctaattcctaccctccagtccagtccagggagttgtaaaggagacctgggggtaaaagtcatctatctctttctagaatacctgcatcattcatccattcagtcttcattcagcaaactcttccacatgtcttwccaatgccagttctgttcccagcacctttctgttccctggatacctggaaagaacactgtccagggatgtgtctttcaggtactcccagcctagtgggaagagtctcaggtaggacttctctgtccacatggacaaggatggtattgagaacaagagaagcagactgagaatat

SEQ ID NO: 141981 - DNA, 582 bp, Homo sapiens
gtttttgtcaattcttccattattgcttagtagtattaggagcagagcccagaggcagaacttgatatccagcctggctagcaggggaaagttttcaggcttttaggacagagagtcctagcctgctgagagagctggtgacaatatgtgaaggcagatgatgacacctagacatgttcagtcaatgaattttcccttcactcacttcttattttctctgaattatcatttttttcaaacatcttcacttcctggatgtttgctcttctgttccctaattcctaccctccagtccagtccagggagttgtaaaggagacctgggggtaaaagtcatctatctctttctagaatacctgcatcattcatccattcagtcttcattcagcaaactcttccacatgtcttaccaatgycagttctgttcccagcacctttctgttccctggatacctggaaagaacactgtccagggatgtgtctttcaggtactcccagcctagtgggaagagtctcaggtaggacttctctgtccacatggacaaggatggtattgagaacaagagaagcagactgagaatat

SEQ ID NO: 141982 - DNA, 582 bp, Homo sapiens
gtttttgtcaattcttccattattgcttagtagtattaggagcagagcccagaggcagaacttgatatccagcctggctagcaggggaaagttttcaggcttttaggacagagagtcctagcctgctgagagagctggtgacaatatgtgaaggcagatgatgacacctagacatgttcagtcaatgaattttcccttcactcacttcttattttctctgaattatcatttttttcaaacatcttcacttcctggatgtttgctcttctgttccctaattcctaccctccagtccagtccagggagttgtaaaggagacctgggggtaaaagtcatctatctctttctagaatacctgcatcattcatccattcagtcttcattcagcaaactcttccacatgtcttaccaatgccagttctgttyccagcacctttctgttccctggatacctggaaagaacactgtccagggatgtgtctttcaggtactcccagcctagtgggaagagtctcaggtaggacttctctgtccacatggacaaggatggtattgagaacaagagaagcagactgagaatat

SEQ ID NO: 141983 - DNA, 554 bp, Homo sapiens
ctatcactgtctagcacagacttgaacacaggaggggaggcaggcagaagcatgagactgagatgtagctctggccaaaggagaacgacagaggtgtagctctggccaatggagaatgatggaagattctttgatgcttctccaggaagccagctacctactggaggagttccagaagaccaagggcttgggggccacagggggagggctactaggtgactatgtggttatggagaactcagtcatgagaagatgggccttactgggagaaagctttggaatgggagaaaagggaaaatattaagaattcactgagctttctggccaggtttcatattaaacttaacgtaagctgggtgcagtggcacacacttgtagtcccagctactcaggaagatgaggcaagakgatcacttgagcctgggaggtcaaggctgcagtgagctatgaatgtgctattgtacttcagcctgggagatagagtgagacccagtctcaaaaacaaacaaacaaaaacaaacaaaaaacataccagttaatgtggaagagactta

SEQ ID NO: 141984 - DNA, 420 bp, Homo sapiens
ccagccagaaaaagagcagaagaggaggcccagcgaaacctaagagcttggcgaggaacaggaagagcctccaggagggggaagcccggctcttggggcatcgccagccgctccgaggtgccacgttaggggcctactgggcttgcccaggcagcatggactgtttagctgacttgttgattagcaggacaggaaataggaaggagagtcataaacgccactcaagctcacagagaggtggggctaggagcctccgtctgcctagaaacagatcayacagggaagagatgggcctggccctcgccccggcctcccacggctcagagcaggactgggaggcacatggagacccaggaacacccagctccagacccgcgtgccctggtccctgaatccctcctgatgtggctgaaacaaggc

SEQ ID NO: 141985 - DNA, 531 bp, Homo sapiens
ctagaaatatgtcccaatctctgtgtgggtaaagaacaaaatgaagaggraagttatataacctaataggtgggctgatctatgtgtcccaatcactctagtggcaagagctcaaacatggaaggagagtcacacacataggtgccgaatattttgcaatacagaatgtgtgcagagcccagaaaggagaggacagtcacatcacctaggtgttgtgcccagcaatacattgcaatctcttttagggcaaagcccaaacagtagaggtaatccttgttgctggacccaaaaatatggcataacacaccctgaaaaagggcccaggcagaagaatcacatcgcctcaggagggttccaggaatatgtcaaaaggcctactgtgggtaaggctcaggaagaagagaagagaaaagtaacctaggggctggggccagccatatgttacaacaacctcagtgagcagggcccaggcatgagaggagggtcacataatgtagatgatgtgccaagtgatatgtcataactcacact

SEQ ID NO: 141986 - DNA, 519 bp, Homo sapiens
cccaatctctgtgtgggtaaagaacaaaatgaagagggaagttatataacctaataggtgggctgatctatgtgtcccaatcactctagtggcaagagctcaaacatggaaggagagtcacacacataggtgccgaatattttgcaatacagaatgtgtgcagagcccagaaaggagaggacagtcacatcacctaggtgttgtgcccagcaatacattgcaatctcttttagggcaaagcccaaacagtagaggtaatccttgytgctggacccaaaaatatggcataacacaccctgaaaaagggcccaggcagaagaatcacatcgcctcaggagggttccaggaatatgtcaaaaggcctactgtgggtaaggctcaggaagaagagaagagaaaagtaacctaggggctggggccagccatatgttacaacaacctcagtgagcagggcccaggcatgagaggagggtcacataatgtagatgatgtgccaagtgatatgtcataactcacact

SEQ ID NO: 141987 - DNA, 531 bp, Homo sapiens
ctagaaatatgtcccaatctctgtgtgggtaaagaacaaaatgaagagggaagttatataacctaataggtgggctgatctatgtgtcccaatcactctagtggcaagagctcaaacatggaaggagagtcacacacataggtgccgaatattttgcaatacagaatgtgtgcagagcccagaaaggagaggacagtcacatcacctaggtgttgtgcccagcaatacattgcaatctcttttagggcaaagcccaaacagtagaggtaatccttgttgctggacccaaaaatatggcataacacaccytgaaaaagggcccaggcagaagaatcacatcgcctcaggagggttccaggaatatgtcaaaaggcctactgtgggtaaggctcaggaagaagagaagagaaaagtaacctaggggctggggccagccatatgttacaacaacctcagtgagcagggcccaggcatgagaggagggtcacataatgtagatgatgtgccaagtgatatgtcataactcacact

SEQ ID NO: 141988 - DNA, 519 bp, Homo sapiens
cccaatctctgtgtgggtaaagaacaaaatgaagagggaagttatataacctaataggtgggctgatctatgtgtcccaatcactctagtggcaagagctcaaacatggaaggagagtcacacacataggtgccgaatattttgcaatacagaatgtgtgcagagcccagaaaggagaggacagtcacatcacctaggtgttgtgcccagcaatacattgcaatctcttttagggcaaagcccaaacagtagaggtaatccttgttgctggacccaaaaatatggcataacacaccctgaaaaagggcccaggcagaagaatcacatcgcctcaggarggttccaggaatatgtcaaaaggcctactgtgggtaaggctcaggaagaagagaagagaaaagtaacctaggggctggggccagccatatgttacaacaacctcagtgagcagggcccaggcatgagaggagggtcacataatgtagatgatgtgccaagtgatatgtcataactcacact

SEQ ID NO: 141989 - DNA, 562 bp, Homo sapiens
agacagcatattccattttaagaactctgttagagttttttcctttacggacacttctgggtgaacatagagacaacacacctgggcctgctgtgactgcctcttcccaaatttttatgaaataatcctgaagatacaaacaacagactgcagctggcccttgcagaaaaaaaaaatgacaaaaatcctggggaaatttttactaactgcactgatgaaaggcatggatggaaaggcacaatttttgaaatacacaccatatgtactaccctttcattcataacagcataaatgccctccaacacacacaaaggtaggcaacacaccagcccctcagtctgttaaattttacttcatgcccttattcctgcacttctcaggaaagaaatggaagccaacctccaggaacacccttctgagatacccagaactagggtcagggcggtccctttctccttccccatcaattgctcttccttatctccattcatttyaagaaaataacactggcatgtgctgtgatgataattaggtttcattttaagatacttcactacctgag

SEQ ID NO: 141990 - DNA, 601 bp, Homo sapiens
ctgatttgactcataggccatggttttccaattcctggcctacatggctgattgtacccctaagtaagccatggactgagccggcaaaagtctccattacagtgatatgagggaagattggctacgtttatgactgatacaaagctagaagaaatatccagtatgatggatgacaaagtcaagttttaaaatcatgctgaggagccaaaactattagtctaaattaacttatattgttatttgattaacaaaacattatcacaaccaagctaagctacattctaccaamaaagtaaagagtaagttggatttagcaataattgctcaaaaacaacctggtgttggcaatatgcttcactaattattcattcactaattcatttattcattcactcagtcacttagttttcaacactaagccttaattgtttagtatgatctctgcatagtgctggagtgattttgatgatacataaaacagccttagtccttgaggacacataatatggtctattggacaggactggtgccttttatttcattcatttattctttttcttttcccagcaaatcaatattacagccaataatgtggcaagtc

SEQ ID NO: 141991 - DNA, 601 bp, Homo sapiens
ctgatttgactcataggccatggttttccaattcctggcctacatggctgattgtacccctaagtaagccatggactgagccggcaaaagtctccattacagtgatatgagggaagattggctacgtttatgactgatacaaagctagaagaaatatccagtatgatggatgacaaagtcaagttttaaaatcatgctgaggagccaaaactattagtctaaattaacttatattgttatttgattaacaaaacattatcacaaccaagctaagctacattctaccaaaaaagtaaagagtaagttggatttagcaataattgctcaaaaacaacctggtgttggcaatatgcttcactaattattcattcactaattcattyattcattcactcagtcacttagttttcaacactaagccttaattgtttagtatgatctctgcatagtgctggagtgattttgatgatacataaaacagccttagtccttgaggacacataatatggtctattggacaggactggtgccttttatttcattcatttattctttttcttttcccagcaaatcaatattacagccaataatgtggcaagtc

SEQ ID NO: 141992 - DNA, 499 bp, Homo sapiens
gctctggtaggctagcattattaaaaatccacaaatttctattcaaattttattataatctgtacagctttccagaggtttcatctcctagtagatgagcaattgggtctgtgtacttagtgtgagtctcgaggacttttggctaattaatcattttggaacatctccttctacttggtcatttacacatgaccatcagtgctgacctgtsctgcctgaactttcaacataatctgcttcgttatttttggagttatttgacttatgcacatttgtctagcttattctttcttaattactctgataaaagcaagtacatatttctatgtcatattcaagtacttgattgaagaaaataaaaatattcatttgtgtgggaagtgctctagttttgtaataaaaggacagaccctggagccaacagcctaggttcaaatttagggtccctcactcaccagctgtatggacttggaaaagtcacttaatctctatgaacttc

SEQ ID NO: 141993 - DNA, 590 bp, Homo sapiens
atatataaaatttaatgatactcctattaaaacatgaatagcatttttctttgctttgaaggtaaaattaacttcagttcacatagatttgaaaattgctcaagaatactaaaatttgcgtacacatatataaaagttaagatgaaggatttgccttaccagacactaaaactcactatgaaacctctctaaacaaatcaatataataatagcataagaatcaaaaaattaatcagtggaaaagaagatccagaaatagatcctaatgaatataaagtttctaaatatggcaacagagatatcttcatccaatgaggaaaatgtagtttatttagtaaataaccatgcccaaatggctattggattaaaagaataaggaggtrgactctctcataccacataaaaaataaattcacatggattaaacaaagctctctctataaaaagttatacaaaaaattgcaaaaaacttatatttacttacactctaggggtgaaaggccttcataaccaagaggggatcactaaattttaaaggggaaacacaatgcacatgtctatgtaaacatcaaccacaaactatatattat

SEQ ID NO: 141994 - DNA, 571 bp, Homo sapiens
gaattcgtctcctcctggttctgcggagagccatgagagactagaacacaatcaccagttaggatcaatacacttataaatgcagagggtcttagcatccatttgggtgccagcttcccttgtgtgattggttactggtgtcaacggagattgtatgggagaggaactaaagaatgcaggctcggcttttcccagaggcagcagtgcgatgcatgggtcacagaatatgccagagaacaacgaggccagtcgctcactgactatggaagatgagtccattatttaatcactctggccttcggyttttcagctctaaaaatgagaatattcctttcctcaatgattattgttatgattcccggagataacgtgcatgaaagattttagtgcaggcctttcttccttccgttgacaacccagaatgttgcttgatgcacaggggaaatagagtgatcaagaagagcctttataaatgagagttgatgttgagtaatcattttgggtattatcaatacccatggccataacacccccaccatgtggaacaacacagggaacacgacttcttact

SEQ ID NO: 141995 - DNA, 388 bp, Homo sapiens
ccagtaaggtgtgaagtggttttgtccttcccgctcccatgacacrgagtggtaacttctcacatctcaacacacaatcgcagagtactcaccaggtccagcagtataaaggactcttctaacaacacagaggaagcagcagtaggaagatggaggagtcctcagtccccagggcacccatagaagaggacctctgatgctaaggtgcctacttctgctcattccactccctctcttcatgtctgcaaagaagacccaggtctcaacagagtttcagttaggatgagtaagtcagtgcttccccaagtgtaatgaacagcctggaaatcagggtgaaatgcaggttttactttagcaggtccagagtggggcctgagattctgaattc

SEQ ID NO: 141996 - DNA, 582 bp, Homo sapiens
aagttagaataattataatttttgaaatatagggagacatttttgaaagattctgggacttarcatttgcttcagtttagatctggcaataattacatacgtgagagccaatttagtgtggtgagtaagaacataaattctgaaaccagccaacctcagttatttttcttgctttgccacctgcagctttgagacattggataatctcttcatgcttgtttcctcatctccaaaatgaagatgataagagcatccacttcacatgaggattagaggagataatacacatatagtatttgaaatggtttctggcatatggtcaagggttaaaaactacaaaagtgatcctatgaatatgacttgcctctatgcatcatggtttttccaactacaaaataagagcttgaataagacaaattttgaatgtaattttcagtcttcaaatcttgactatttttgtttacactcgctgaaaatacttgaaatcagtagaaaaaaagtgtattcattcatttattcattcattcaatacacatttatcttgtccctactatattctaggtggtgtactagatgctgata

SEQ ID NO: 141997 - DNA, 582 bp, Homo sapiens
aagttagaataattataatttttgaaatatagggagacatttttgaaagattctgggacttaacattygcttcagtttagatctggcaataattacatacgtgagagccaatttagtgtggtgagtaagaacataaattctgaaaccagccaacctcagttatttttcttgctttgccacctgcagctttgagacattggataatctcttcatgcttgtttcctcatctccaaaatgaagatgataagagcatccacttcacatgaggattagaggagataatacacatatagtatttgaaatggtttctggcatatggtcaagggttaaaaactacaaaagtgatcctatgaatatgacttgcctctatgcatcatggtttttccaactacaaaataagagcttgaataagacaaattttgaatgtaattttcagtcttcaaatcttgactatttttgtttacactcgctgaaaatacttgaaatcagtagaaaaaaagtgtattcattcatttattcattcattcaatacacatttatcttgtccctactatattctaggtggtgtactagatgctgata

SEQ ID NO: 141998 - DNA, 470 bp, Homo sapiens
tttgaaggtagtaaatgatggggccagtgagaggtgtggggcagatcatataagacctcctggtaagaattcagattttattcctatgtaatgagaagttgtaggaggattttaaggggggaaatgacattcttattcatttaaattacattaagccaatacctttatatgagaggagtgctattaaaagaaagctcaatgtgaaatggtacagtcaggggtaaggaagaactgtaattgcccatagaaactcatagaaaaggacctacttgtcatagccctaaaacctgagctctctcaatggagacagtttaccaaaaggctgttataacactaactgcctaacttctgggkctgaaagggttttttttggatcttttgattctaaaatgtaacaagcaaccaataataccgaactatttgttgaaaagttaatacagattctgaagggctcttacttggcttgaaaa

SEQ ID NO: 141999 - DNA, 449 bp, Homo sapiens
attaaataaactggactcaagaaacctaataaactggacctccatagctcgtattgctttgttgttcttgaagaaatttatctactaaatttatatttgtaaagcctttaaagaataaaatatttgtgtattgatcacacgtgagcacaatgttgactttcatgtaatagttaacaattgctgttatgacattttgtctctgttctcatgaagtgtttttattygtttcttccaaaataagcagtcacttattttgcctgtgttcttaacccccaatactctacgatctgaagtttacctagggaaaacaacagtaacgaatcgtcactcttctcatatgactcacagaggctttggaggtactgattataccctttgattatatcacgtacatggattctatatctttcacaaagaaaccatgaagttttaaaacaatttcttcttat

SEQ ID NO: 142000 - DNA, 575 bp, Homo sapiens
ctttcacaaggacaagtaaagagaagaagtggtcaagtgaatattttgaaggtgaggccaagaggatttcctggcggcttgtacacaaggtgtgagagatgtctcaaggttttggcttaactaaatgacaagatgagtttcgctgagatggaaaacactgggaggactagatttgggaaaagggagagaccagaagctttgattcagacatgttaagtttgagatacttattgaagagctagctagtaagcagttggatatatgatctagaattcaggagaatggttcataatagagatataaatctggggattattgctgggtatatagatggtattggaagtcatgagagtgcagaccacatcaagggagtaagggtagacagggaggaggaaaagtcgacaactgggctttgagagcccctagtgttaagatattaggaaaacgwagataaatcagcaaagaagcctacaaaggagtagtcagtgaggtaggaaaaaaccagaaaggtgtgtgtcctggaagccaagtgaagtgtatgtttcaagaaggaggatgttcactatagcaaatgt

SEQ ID NO: 142001 - DNA, 558 bp, Homo sapiens
ttttcacattcttgcctgatttttatattaaaaaataccttccaatcccatgatagggttatccaacacctgtaagggaattggagatcttcagaataaatccctacctggcaaaccaaataaaacatggctataaataatcatggccataaaaactggactcacttgcctagggcgtaagagaaatcagatcagtaaaagaaattagagagaagatacagatggggtcatataagggcaaaaggcagcatgatctgttgttcttttcatatccctccacttctggggcrtgtgggtgaggggggtgggagctttgtggtagggagaatggtgattctactttccaccatcagtattatatttgtaatctctcacctgaacaatttgaaatctattaaagtacagaaagaattcatgggctaggcatggtggctcacgcctataatctcagcactttgggaggctgaggcgggtggatagcctgaggtcagcagttcgagatcagcctggccaacatagccaaaccccatctctactaaaaatacaaaaattaaccag

SEQ ID NO: 142002 - DNA, 376 bp, Homo sapiens
cccttttatgttatgaaaatggcttctttccttaaayctcatgagccacaacctctgctagatgcaaacttttcttctgcagctctctcacctctctcagccttcatagaattgaagagagttaagccttgctctggactaggttttggcttaaggtaatgtcgtggctggtttgatagtctatccaaactactaaaactttcttcatattagtaataagcctattttgttttcttaatatttgtgtattcactggaatagtattttaatttccttcaagaacttttcttttgcattcagaacttggctaactgcttgttgcaagaagcctagctctcagcctgtcttggtttctgacatgccttcttcactatgc

SEQ ID NO: 142003 - DNA, 404 bp, Homo sapiens
tgatgcagtttctacatcagcacttgctgcctcaccttgcccttttatgttatgaaaatggcttctttccttaaatctcatgagccacaacctctgctagatgcaaacttttcttctgcagctctctcacctctctcagccttcatagaattgaagagagttamgccttgctctggactaggttttggcttaaggtaatgtcgtggctggtttgatagtctatccaaactactaaaactttcttcatattagtaataagcctattttgttttcttaatatttgtgtattcactggaatagtattttaatttccttcaagaacttttcttttgcattcagaacttggctaactgcttgttgcaagaagcctagctctcagcctgtcttggtttctgacatgcctt

SEQ ID NO: 142004 - DNA, 376 bp, Homo sapiens
cccttttatgttatgaaaatggcttctttccttaaatctcatgagccacaacctctgctagatgcaaacttttcttctgcagctctctcacctctctcagccttcatagaattgaagagagttaagccttgctctggactaggttttggcttaaggtaatgtcgtggctggtttgatagtctatccaaactactaaaactttcttcatattagtaataagcctattttgttttcttaayatttgtgtattcactggaatagtattttaatttccttcaagaacttttcttttgcattcagaacttggctaactgcttgttgcaagaagcctagctctcagcctgtcttggtttctgacatgccttcttcactatgc

SEQ ID NO: 142005 - DNA, 516 bp, Homo sapiens
ggaaaacaatattatatgagagaactttccaagaaagatgattaaggatagatagacarcacttgcttggaaggtaatcaattttctgtcggttgacttacttaattataagctgtgtaatcatttgaaagactattaccagaaacaaatcaaagccaaaactcatagcttaatgaatttgctttattctggctactgtcagttgaataaactgtgtagttaaagttatcaagataatgattgagtgattttctaaataaacaactgaaacctgaaagcattgccatggttggtttctgctagatttatttcctttcctttggttttatccaagtacataaaaggtgatttggaaagagtatctcttttctctagttaagagtgtccacattagacattttaagttaagcatatgacatggcaggatcaactttaaaaaacagaaatatcatatatcttcaaattgaagtttagaaaatattctatattacctactggttattctgacttacttct

SEQ ID NO: 142006 - DNA, 516 bp, Homo sapiens
ggaaaacaatattatatgagagaactttccaagaaagatgattaaggatagatagacaacacttgcttggaaggtaatcaattttctgtcggttgacttacttaattataagctgtgtaatcatttgaaagactattaccagaaacaaatcaaagccaaaactcatagcttaatgaatttgctttattctggctactgtcagttgaataaactgtgtagttaaagttatcaagataatgattgagtgattttctaaataaacaactgaaacctgaaagcattgccatggttggtttctgctagatttatttcctttcctttggttttatccaagtacataaaaggtgatttggaaagagtatctcttttctctagttwagagtgtccacattagacattttaagttaagcatatgacatggcaggatcaactttaaaaaacagaaatatcatatatcttcaaattgaagtttagaaaatattctatattacctactggttattctgacttacttct

SEQ ID NO: 142007 - DNA, 585 bp, Homo sapiens
attttaaggcaatttgtttgtctgttagtttccccaaaaaccaaatttgcctgagaaagaagtgagaaatagaatgacactataggaagtgacatgaataattcctcctacaaaccccttcatattgtactcttggaaagaggaacttgaaggccaagagatattggtacaaactgataacagagtgagaaaaacactgcaagccagactaagggggaaggaaaaggcatggtggtggtttctgattcttgccaccatggccagcagagttattcagatgtggtcattactggtatctttcctgatcatgacacttttttgagcacaagaggatcttaaaatgccattggcatgaacctgtggctttctgcattttgttaagtcataaatctagaaggtcagcagaagattagaaagcaataagttaattatttcataacatcatcatgtgaaagctagtgcattaaaatatattggaaagacattgtcatgagttcctgaaataaactgaggacctgaagtcagttttaggaaaagcaacacttaccastgtgaagccaagttagatgaatataggaggaaaac

SEQ ID NO: 142008 - DNA, 612 bp, Homo sapiens
taataagctttatttaataagtgacatggggactttcagaaatgaagacccaaagaaacaagtaagcacatatttttatgcttaggttgatgaagagtggaaagtcatggraaaatgtgattggaggacaaaagggtatgatctaatggtaacaaactggggggacctagcaaaacctgtttatgcagattcatcctggcatttatagctttgaggataaggatgttcctttccttccctctgggtacagaatgggcacctctggaatgaaagttttatgacctacttcagagaaagggtcagagagaattcttttaaagcctgcttcaggggagaagggcaagagaaggtcagagaaaccttcttgcttctgctgtttcctcaaatggctagaagctgtgttttgaaccctatcaaaataggagtttcactgagtcctgaaccccatcatctccctgtctctgaatcctccccactgtctttcttcatctgtgtgcatgacaggctgaagggggatcatgaccgattttagacctagaaaatatactattgatacatgtacacatatcagtttgttcttggctttaggatactggtttaactttctgtatc

SEQ ID NO: 142009 - DNA, 628 bp, Homo sapiens
tcatggaatgaccaaagcagatgaattaacataggcatcacctcaaataatcattattcctttgtattgagaacatttaaaatcttcttttgactattttgaaatatacaatacataataatgcattgtagctagcctacttttaaatctctggatcaatgtggactgccagaagctgtgcacttggattcccttgtttgggggcccacttactccttcccatcctgatcccaaagaactgctatccttgagcattctcccttcagtgtatatttagggttcctagcagaacgattaatgctgttcaaggtatcataaaccctatacccatggatcaagggccctctgcaatcatgaacagawgaagattttcaggtactgcaatctcaacttgaccttcatttttcctgaatttatttcaccaccaccaaacccacttttcttcctatgtttcctttcccaataactggtgagcattcaccacatctagccaaccactcattcttaccatcttacctacaacatatctctaaattccatcctccttctgcaagactaactgccctgccatcatattacaaattattttctttcccgctctaatgtggctcaccaagtcatggtcact

SEQ ID NO: 142010 - DNA, 568 bp, Homo sapiens
tggtatctttcctgatcatgacacttttttgagcacaagaggatcttaaaatgccattggcatgaacctgtggctttctgcattttgttaagtcataaatctagaaggtcagcagaagattagaaagcaataagttaattatttcataacatcatcatgtgaaagctagtgcattaaaatatattggaaagacattgtcatgagttcctgaaataaactgaggacctgaagtcagttttaggaaaagcaacacttaccactgtgaagccaagttagatgaatataggaggaaaaccatgagagcatgcctggatagcacagaaggatctactggttttataaatgcttattataaatgaatagagtgtatgraggttaaggaataattcaggattacttttgtaaacttggctctgaatcaggatttgagttcacttgagtgattatgtctaagcagaacatgtcctgttgcaatagttcaaataagtagcacgagggtatacatttacatataacaggttcgaagcatcacagctacaaatagcataagcaattggaagacatgaaa

SEQ ID NO: 142011 - DNA, 502 bp, Homo sapiens
aagactgaatggtttgggcaataaaaatcacatagatttattctgcacttcaggatatgtggataaatagcgttagtgacaatctgctaatccaagatggctcctatcatgttacctccagatagcctacattttcacaagtgagaaaaagcaggcgctttgtcatgatatctcttaagcttagtctccttccctccccscagctccttattctgactctgaaaactaactcctctgggataaactctgataacattaaatctgtaggtaccatcagggctatttcaatagatcactgtgctgaacctcctggccttctgtctggaactgagactggggctggctttctgcaaaaatgctcattaatcttttcttgcctcttacctctggtctctgagagacagcctagtttcttgcttgtatattctagtaagagtcaactagaagagttttccctaaaatgcattgatcaaaactagagaaagtgggaatgacaacactg

SEQ ID NO: 142012 - DNA, 600 bp, Homo sapiens
ttttattgttgaaggcttataaataaacactcttaggaaatcagtttaaatttgttggaggatttaaattctcatgattaattgagtcatgatgaatatcagtgttattcttcctacattataaggtggaaaatcttttttttttttcactttaaaagaaactaaatctaccagaaatgaggaaaagaaagcagcaaaactatttgtcatttattgtgttttgggggccagagttttttttagaagctgattatacgattaccattgtctgagaagcaaaagatagaagctcaccattggtaactcagggtgaaattaaagcccaacacagaactgatggggaatgaaagtagtttgtacagaaaacttaaaaggttaactctccagacaacagtccctttgctttggctttctcgtagwttcagaatagaaaagtaaatagcaaaagagaaatctcctaggtgtatgtcatgtcatctcatagagatgtgtaaaaggtgcaaatgccgctatctttcagaatgacatttcaactatttgcttctctgagaaattaactgtatccagcttcttgctcattttccacttccccagtcccct

SEQ ID NO: 142013 - DNA, 619 bp, Homo sapiens
tgttcatttttatctggtgaggtttttgagttgtttatatattttagataaaaatctttatttgaataagaggtttgcatttctttctttcccagactgtaggttatcttttcaattctcttaagagggcttttcatggagcaagggtttttaattttgatgaagtccaatttatcactgttttttccttttatgctttgtacttttggtgtcaagcctaagaagtctttgcctaactgcggttacaaagattktctcctacttttcacaaaaagatagtcttatattttgcgttgaaatacaagatacgtttatttatattaacttttgcataaggcatgaggttaaggtcaagactttttttttggcctatggatatcttgttgcagcgataccatttatttgaaaagctatgctggatggatgtggtggtttatgcctgtaatcccagaacttttggaagccaaggtggaaggattgcttgaagccaagatttcaagaccaaacttgccaacatagtgagacccttatttctacaataattttttttaaaaataaattaatcaggtgtggtggcatgaacctatagtcccagctatttaggggactgcagtgagag

SEQ ID NO: 142014 - DNA, 619 bp, Homo sapiens
tgttcatttttatctggtgaggtttttgagttgtttatatattttagataaaaatctttatttgaataagaggtttgcatttctttctttcccagactgtaggttatcttttcaattctcttaagagggcttttcatggagcaagggtttttaattttgatgaagtccaatttatcactgttttttccttttatgctttgtacttttggtgtcaagcctaagaagtctttgcctaactgcggttacaaagattttctcctacttttcacaaaaagatagtcttatattttgcgttgaaatacaagatacgtttatttatattaacttttgcataaggcatgaggttaaggtcaagactttttttttggcctatggatatcttgttgcagcgataccatttatttgaaaagctatgctggatggatgtggtggtttatgcctgtaatcccagaacttttggaagccaaggtggaaggattgcttgaagccaagatttcaagaccaaacttgccaacatagtgagacccttatttctacaataatttttttwaaaaataaattaatcaggtgtggtggcatgaacctatagtcccagctatttaggggactgcagtgagag

SEQ ID NO: 142015 - DNA, 508 bp, Homo sapiens
tttttcaaaatttgagatcatgtcatctacaaataaggataatttgacttcttcctttccaatttggatgccctttatttctttttcttgcctaattgctctaactagaatttctagtactatatggtctaaaagtaatgaaagtggatatctttggtttgcttcagatcttagttttcaatttttattttccattcagtatattaactgtgggattgtcatatatgccctttattgtgtgatgtgtcttcatttgatgaagaaaacaaactctgmcaattatttagagagttttatactgagtcaactatgagtgaccagggcccaaatcacattctcaggaggtcctgagaacatgtatcgaaggtgtttgggttacaactttgtttcatatattttagggagacgtaagacatcaatcaattcatataaattatacattaatttggttcagaaagataggacaactcaaagcaagggttacatgtcataagtggattcaaagatt

SEQ ID NO: 142016 - DNA, 508 bp, Homo sapiens
tttttcaaaatttgagatcatgtcatctacaaataaggataatttgacttcttcctttccaatttggatgccctttatttctttttcttgcctaattgctctaactagaatttctagtactatatggtctaaaagtaatgaaagtggatatctttggtttgcttcagatcttagttttcaatttttattttccattcagtatattaactgtgggattgtcatatatgccctttattgtgtgatgtgtcttcatttgatgaagaaaacaaactctgacaattatttagagagttttatactgagtcaactatgagtraccagggcccaaatcacattctcaggaggtcctgagaacatgtatcgaaggtgtttgggttacaactttgtttcatatattttagggagacgtaagacatcaatcaattcatataaattatacattaatttggttcagaaagataggacaactcaaagcaagggttacatgtcataagtggattcaaagatt

SEQ ID NO: 142017 - DNA, 568 bp, Homo sapiens
atggagtgaatgtattttgcattaggaatggatctgaattttgytggaccagtggacagactctattaggctaattagtgacccccaacatatccatgaactaatcctcataatctatcaatatgttactttaagtagcaataggaactttacagatgtgattaaatatcttgagatggggagattctaccagataggactgatgcatctaatacaacgacaagtatccttataatagaaagataaagagatttagctgcagaaaaatgatgtgttgagggaaccagagattggagcaatgcactttgaagatggaggaaagatcatgaataatggaatgtagatgggctctagacactggaaaaaacaaagtcagggattctcccctaagatgtccaaaaggaatgaaatcctgcaaacatcatgattttagacctctgacctccagaaatataagacaaattcatgttgttttaagctactaagtttgtggcaatttgtttcaacagcctgggaaactcataaaattaccttaattaccagaaagcaaattggtaactttacaccc

SEQ ID NO: 142018 - DNA, 568 bp, Homo sapiens
atggagtgaatgtattttgcattaggaatggatctgaattttgctggaccagtggacagactctattaggctaattagtgacccccaacatatccatgaactaatcctcataatctatcaatatgttacttkaagtagcaataggaactttacagatgtgattaaatatcttgagatggggagattctaccagataggactgatgcatctaatacaacgacaagtatccttataatagaaagataaagagatttagctgcagaaaaatgatgtgttgagggaaccagagattggagcaatgcactttgaagatggaggaaagatcatgaataatggaatgtagatgggctctagacactggaaaaaacaaagtcagggattctcccctaagatgtccaaaaggaatgaaatcctgcaaacatcatgattttagacctctgacctccagaaatataagacaaattcatgttgttttaagctactaagtttgtggcaatttgtttcaacagcctgggaaactcataaaattaccttaattaccagaaagcaaattggtaactttacaccc

SEQ ID NO: 142019 - DNA, 497 bp, Homo sapiens
aatttgtttcaacagcctgggaaactcataaaattaccttaattaccagaaagcaaattggtaactttacaccccttaaggacaaagtccaaaggtatcatgactctaagatatttataccctagtccaaaaatacctcacaaatcatgtttataattaaatgcacttatgaactacactctaatttccattggttttctaacatgacctatcaatgttagataaatatatcatgaatatttttctatttcttaagtgctttctgtgaactttatcacttgctaaatcatccttttctctaattattagcttaaatttcacttaccctctgtactctcctttaactctaaaagagggatgacctactcctctcatgtaagcactatcatggccatacttgaactatacaaattgttttctgtcatttgcwtcagaaattacacatctggttctcctacaagattgagaaattcttcataaggaggtctgtgccctaa

SEQ ID NO: 142020 - DNA, 412 bp, Homo sapiens
ctcctttagctcaaaggagtttgttattacccaccttctgaagcctacttctgtcaatttgtcaaactcatgctctgtccagttttgttcccttgctggcaaggagttgtgatcctttggaggagaagaggtgttctggtttttggaactttcagcctttttgcgctggtttttcctcatcttcatggatttatctacctttggtccttgatattggtgaccttcagatgaggtttctgtgtggacgtcctttttgttgaagttgacrctattcctttctgtttgttagttttccttctaacgttcagtctccgcagctgcaggtctgctcgagtttgctggaggtccactccagatcctgtttgcctgggtattaccagcagaggctgcagaacagcaaagattgctgcct

SEQ ID NO: 142021 - DNA, 515 bp, Homo sapiens
ctgggaagctggcaagctccgattggtggccaatggctgtaggcaaaattagtcctagagttgcagcaaattatctcagcattaataggtaaaactagtttcaggttacagcaagcagttttagtagccagtctcagcagataatttcattcttcgagctatgttatgttccctaagtgctcctcccccttggcttcttgactctgtttagtttggtttaacaaaaatgacccaattcctgtcatcagctttcacagttgcttctatacttctgagkatttctttccccagcctcagatagtttctgcacatgattgtcctgatcattattcagcttaatactcaagaaagatcctctgctgatgtccaggattttgtttctttgcagctctctcttcttcagtactctgctgtaaaatttaagtctcttggtggtctctccatactctcagtttcatctcatcagctcaagggtttctctggttctacctgtgtttccccttactgcaccatgg

SEQ ID NO: 142022 - DNA, 526 bp, Homo sapiens
ttgaactcgtttgatattaatatttgtatttcttttcacttactctgaaataaaaatccctaaagatattaacataattatttawggataaagtaaataagtaattaagtgaatgaatgacatgaaaacccaatacagatatatattaattataaaatggcagtgccaatatgattattaagttttctttacattctcacttttgcttttctgccttaaagatatatcttctgggaatatacattcaaattactgagctttcaagttacttgaaaaatttattctctgtgtgactaagtcaccaacttgacatataatttcttttttttgcttttttaattttaaaggaatttctttgttttatagattactttgacctaaattgattatacataccttctttatatgattgtcttttaaaaatagacttattgagatacaattcacataacatacatttcatatatttaaagtgtagagtaaaattatttttagtactttcacatgattgtccaatcatcaccac

SEQ ID NO: 142023 - DNA, 491 bp, Homo sapiens
ggaattctttttttgacttttatagttcagttaaaacattgcctcctccatgaagttgtgttgacaatgcctattttatgcctccagaagaagtcaaactgcttttattactaaacaagaaagaataaaaataatcatgtaggtacccaactcaagatatcattaaaaaggaatctagtgaaagaaaagaggtgttaaagaaaaatagaatcaattagtttaaaagaatgtgaaactgattcttttcaggaagcaattttggtatggcttttaaaaccaggttactgataaagctagggctgctttgtgaagttacatttgattgtcgtataaataagacttttatgtttatttctttcactcagatttttcaaccttgaaacctagagcttctctctgaattactgtataatttcactttcttggtcaatattatatctcagttattttatattttatgcctratttattaatgcttccttatactcagt

SEQ ID NO: 142024 - DNA, 530 bp, Homo sapiens
tgagtgaagctataaacacagtgtgcgatgataacctctgctgcactccatgtgtcccaaaatctgctaagaccttcacttcagtctgcaacaaggtagaaaaatatttgaggtcaataaattggggrcagggtgcagggagtgatgagagaagctcaggggtagaaaaggaggcaagggagcacagttccttgtttaaggaaagtggtaggaccacttaccacctatattatctaaagctcattacataatccctcaaagctacctcactcatagaactaatagtaaaactatctaatgcacaaagtacataaaataatctaagcaaagaagtgattggtacccagtaattattctcacgcattaaatgcattctaaaagccaagattatgaggcaaaatgtaaacctgaggtggacttcagttccagagactcaagctcttctgaatctttctaaatcaagtaatttattcttgaactcttcatttggacaattatggattcatgtgctcacattataagatattaat

SEQ ID NO: 142025 - DNA, 310 bp, Homo sapiens
ggtgcttgtcctcctgtctcatcatgacttccctcttttctcaacttctcagtgctcactcttcctggtgctgacattctcatgccttgtcataacatcaaggctatataccaacctggctctcattctgtagctatgactccacctactgctaagctccttttgtaaattctgcagtggacacctttgggattgtctaccagcamcacatccccttattctgataactgcccttcaccctattgctttagcttcctaaggttgccacagtaaatgaccacaaactgggtgatttattacagcagaaatt

SEQ ID NO: 142026 - DNA, 570 bp, Homo sapiens
ctgcataagttaagagtttggtaaagtgtacacaaaagcagtcaatgagcactcatttttgaaagatgcatgaaactcttataattttttgaggcatgaatttaaaaggaagttctttatatgaagacagagggttaagtgtgtgtaaaggagtagaactgctattgctcaatgaacagtatgaccagcccatctaatttaactgtatttatttgtataaaggatactgaaagcaaattcttggcctgagttgcttgaagtcctggaccttcagggcacccatcaagagggaagaacttgtcctgccccttatccttgttggctttgacctaatcagggaaggtgctgaccctctcactgggcttgcaggcaaatttccacctgtaytcatcatacacacttgtccactactctgaaaatatggagagagatagagacagagagaaaaagagagcagtagatagagggaatagccactacctcccacactacttagcagtatagtttaagagacttagctcaagctgtactacctttgttaatgccatcaagaaatgtctatctcaagct

SEQ ID NO: 142027 - DNA, 548 bp, Homo sapiens
ggcattgggaaaatactgtcattccaaaagggagaaattggccaaaataaagggccaaaggccccatgcaagtctgaaatccagcagtacagtcattaaatcttaaagctccaaaataatctcctttgacttcatgtctcacatccagggcatgctgatgcaagmagagagctcccaaggccttgggcagctccacccctttggctgtgtatggtagagcccccccccagctgctttcacaggttggcatttagtgtctgcagcttttccaggcacacagtgcaagctgtcggtggatctaccattctggggtctggaggatggtggccttcttcttatagctccactaggcagtgccccagtggggactctgtgtggggactccaaccccacatttccactctgcactgccctagcagaagttctccgtgaggtctgcacccctgcagcagacatctgcctgaacatccaggcatttccatagatcctctggaatctagatggaggttcccaaatctcaactcttgccttctgcatatctacaaccc

SEQ ID NO: 142028 - DNA, 548 bp, Homo sapiens
ggcattgggaaaatactgtcattccaaaagggagaaattggccaaaataaagggccaaaggccccatgcaagtctgaaatccagcagtacagtcattaaatcttaaagctccaaaataatctcctttgacttcatgtctcacatccagggcatgctgatgcaagaagagagctcccaaggccttgggcagctccacccctttggctgtgtatggtagagcccccccccagctgctttcacaggttggcatttagtgtctgcagcttttccaggcacacagtgcaagctgtcggtggatctaccattctggggtctggaggatggtggccttcttcttatagctccactargcagtgccccagtggggactctgtgtggggactccaaccccacatttccactctgcactgccctagcagaagttctccgtgaggtctgcacccctgcagcagacatctgcctgaacatccaggcatttccatagatcctctggaatctagatggaggttcccaaatctcaactcttgccttctgcatatctacaaccc

SEQ ID NO: 142029 - DNA, 485 bp, Homo sapiens
tgctcagttaatttaggatttatattcggtcagttcaatgatccatactcaaatccattgctgctaagattgcctgtccctccctcctcatcctcaggatgatgtttggattcatggggcatttatataacagcctggggaggatgaagctgggagcttgtcctactcagtttccagcctggttttgacctggtccattcactgccaggattcctgggctggtctcagcttctgccctgcctgaccccagaagatcaacctgatagatcagattgaagggttggcttgggcaaggattcggtcctttagcctctgagtttctaaggccatccctggagaatgggctgtgggatccttggtgggattcatgaccaggctgtgggcttgtttcaggtattatttttaagtatttagatacatggtaagtgagttttcacttstacttcataaatggtgagagcaggcatgagaagaaaaaaataaaa

SEQ ID NO: 142030 - DNA, 589 bp, Homo sapiens
gacctgagagatggggaaaatatttgagaccaactctgaatgagcctgtcaatgaagagatttattttcaaggaagaggtcatagggttacaaaagaaaaataaggatcatttccatgaaacagctccagccaactcctaccaaatcagactgaaaataactacaagtcaaagttgcaatgaaattaatgtaacttctagccattttctctttgcccttaaatactgctgtaattgagttgtagagtaagtcagcaaaacatctaccatggcaaatcattttcttgaatatcagtctgcacaatgataagataattaaattactgtgttatcaaacataatttccaggaaatttaacttytttcttttccaactgacaaagcccaaaataaaaaattgagcattaaattgagcattacttagtaatttgaaaaaaaatccattttctccaaaaacaattaattttcagaaatttctattaccattattaagccattaataggcacttcctaataattggataaatacagaatagatatttctcacttaatctttttattcttttcattaattgcttttaaagttgcatc

SEQ ID NO: 142031 - DNA, 609 bp, Homo sapiens
aaaaaaaaaaagctgtatctaatctctaacttaataatgatgtctctacatatgtgcactgtatttggtgatgagtgtcatttatcagaagtggggatgtgtctgtgtgcatgccgcatcattaattttccatgggtcaatgtattccttcctatttcccatatcatctcttaatgaaaagtgcttaaatgacatttgaatatcagactttatgttattaccattattarataagcttaaacttttcttcatcttttgtaattaccagttgcaataaagtctccattaaaacattcttccttccctactgcctaaaccttgatttatttagtagaagctggcaacatcaaagtgtaactaatgaactataagacaattttaacaccttcatggactaattgctaaatggcttttatttaattcttcaaggactgatctctgaggaaattataacctggtgacaacaggaacagaaaatttaatgttaagcctttattgtaacagactagcaaatactggttgcttggctgatcctagcaagtctgaatcaaattaatagttatccagttcaattataacatttgtctaaaaactgctttattggtatga

SEQ ID NO: 142032 - DNA, 381 bp, Homo sapiens
tccttgatctgatattacactgaaaatataatggtctagtggttggttttttaatatttaaaacttgaacaaaagccaaatatastttttaaattacctttacttctcttacaattatcataatatgtgattattcaagtgtgcaagttgatttcacctctctgtatgttacatgtgtaacaaatgtttacagttataatttgtccttgcgcatagattattgtgttcaccaaggcattgatataaccaaataatgtacttcaatttcagactataaacagaatgtacagttcacagcacctgggaaagtttgcacatctactgagagtctgtcagacagcctgaagtactggaaaattctcaaaatatcctcctcagttc

SEQ ID NO: 142033 - DNA, 588 bp, Homo sapiens
ctttgtacctcctgtttctgcctcatcccagcccctggaaaccattattccactctctgcttcttttagtttgactcttttagattcatcacataagtagtttagtatttgtttttctgtgcgtggcctccctcacttagtataatgtcctccaggttcatccacgttgtcataaatggcaggactttcttcttttttaaggttgaattratattcctgtgtgtgtttgtatggtcgtttctgtatccattcatctctggatggacatttaattgcttctatatcttggctattgtgaataatgctgccatgaatatgcgggtgtagatatctttttgacatattgattttatttcctttgaatatagactcagaagtgggattgccagatcatatgatagttttgtttttaatgttaaggcaccttcatactgttttctatagtggctacaccaatctatatttccactaacagtgtgcaaggggggaaaaagaaatgtacaaatatcataaatgtcttaacccatttggggtgctataacaaaataccataaactgagtggcttataaacagtagaaaatattagg

SEQ ID NO: 142034 - DNA, 564 bp, Homo sapiens
atcttgtataactaaaactttgtacctcctgtttctgcctcatcccagcccctggaaaccattattccactctctgcttcttttagtttgactcttttagattcatcacataagtagtttagtatttgtttttctgtgcgtggcctccctcacttagtataatgtcctccaggttcatccacgttgtcataaatggcaggactttcttcttttttaaggttgaattgatattcctgtgtgtgtttgtatggtcktttctgtatccattcatctctggatggacatttaattgcttctatatcttggctattgtgaataatgctgccatgaatatgcgggtgtagatatctttttgacatattgattttatttcctttgaatatagactcagaagtgggattgccagatcatatgatagttttgtttttaatgttaaggcaccttcatactgttttctatagtggctacaccaatctatatttccactaacagtgtgcaaggggggaaaaagaaatgtacaaatatcataaatgtcttaacccatttggggtgctataacaaaat

SEQ ID NO: 142035 - DNA, 626 bp, Homo sapiens
ggacctccccacacactctctgcctggcagctgcgctgagcatcctctcgcttcgtggggcaggagggatgctggacgagggcagggcctagagcaggagaaggcgaagcgaggtgtcacctcttcaaaagctcgtcggctcctgggaacaaaagagaaacgtgggagggcgacgaggtggccccagcaccgagagttctcggactgtcggggcggggcaggagtgggaggaccctggtctcgaattccctgccgaagatcttggctgtggcagctcgggggcggggcgaggcctggactcgctggacctagtagcccacagccttgaccgtgaactcagaccctcaggatgccctggttatggcttacaaaagttctcatttgcaacaccctgttcaaacggccacggaggccttttcatgctcgggcacccagccggactagcctgagggtttttgcccgatcacctgatycagtctggaaggacctagtgttttttttgttgttgttgttgttgtttttcccccgaaaataaaaacccagcaatgatctggtgtcgggaggggggaagtggaggggaacttcttccggtccagttctgagctgccagtgaaaaacagaaaccg

SEQ ID NO: 142036 - DNA, 564 bp, Homo sapiens
agatgaacatgtaattttgttaaatattgccagatttccttccaggggagttgtgccattttgcaatcccaacagcaatgtgtggaaatacctgtttctccccaggcttaccaacagcgtatgttgtcaagcttttgtacttctgcctaagaactgtgaggtgtctgagatttttgccctccttgcaaggtggatgccttgccctggtgggcttgtgtcagagctaaagaacactgaaattaggaaacccccagtcttataaggagctactaaaaacctacctaacctttgacctggaggaaaatgttgtttttattstcttggtcaggagaggaatctaccctctgtccttccagaatgtttgcagcacaaaagacattgagaacagaagctgtcacaagacgtatagaaacaccatgaaggattgtctctcaacactgccaatctgataagggaagaacagtatttgaatatacgctgtccagtacctcctgtgaataccaaaatccatgaatgctcaggtcctttatgtaaaatgtggtaatatttgcatataacctatgc

SEQ ID NO: 142037 - DNA, 513 bp, Homo sapiens
atcttctctcctttctgacctgcctccctttcttttttttttaaggtttttttttttttaaatcaatgttgaccaggttggccttgaacatgtagcctcgccttcccgagtgccagggcaaccggcctgagccacggtggctcccctgcctccctttcataagcacccttgtgattacactcatattcagggtggaagtaaggaggtctttaaatcaatcacttcttcagaattccttttgaatacaaggtaacatattcacactttgttgggattagtacatggacatctttttggggagcattattctgtctaccacatcctttgacttagcatatccacttctaggaatctatcatgcagatatatctgcatatacgaggatatcttagtggcattgcttatartaaaagattggaaacaattcaaggtgtccagcaataggggactagttaaataagcagcggtatatccacaaaatacagtgctaagcagctgtaaaagagaatgagg

SEQ ID NO: 142038 - DNA, 520 bp, Homo sapiens
taacaaactcttgtcaaaagcaaagataagtgagggtgattttccaattatttctgaatattcctaaggaacagattataaattcctgcctactttgaggataaatgtacacaaaatgccagttttactgcaatggagagactttttatttactctccttctcccaaaaagagatagtctcagcttaacagaactgagttctatgaaaacataattgtttttaggaaaagaaagaataaaagatgaaattagctgaatatctgttataggaaattaaaattattctttgaaagctcaatacaattttgtgagctattgtatacctagtgtccaacacatattaggcacacaatacatatttactgagtaaatcgtaaacaaatgaatgcatgattttttttttcaatgtaggtaggtagagaggccagtgagaaaatagaaaaaaaatattgaaaaataactagaagtccttatacatacccaatacaagttgaygggtttaattttcttttggcaaatt

SEQ ID NO: 142039 - DNA, 567 bp, Homo sapiens
gagtttatacaagggtattggtcattagtggtcatcttagaattctgactgccagaaaagtagttactgtaaaaaggaaaagtctttatgaccatccttaagaggcaagagaattaatttcatatgacaaggttatgagtttgcgtccccaccaaaatttatatgttgaagtcctaatcccttatgccttagaatgttattatatctagagatatttaatgaggtcattaagttggcataatatcattaatccaatgattaattagattaatttgacttgtcatgaatccaataggaccttataagaagaggaaatgtggacataatacacaaaagaaagattatgtaaagacagtgagaagactgctgtctacaagccaaggaaacatgcttcagaagaatccactgcttccaagagyttaatctcaggctaatggactccagaattatgataaaataaaattctgtagtctacaccaaccagtctgtggtactttgttgtgacagccttagaaaactaatacagccagtttccaatgcactgatctttacaattttttttaggaa

SEQ ID NO: 142040 - DNA, 574 bp, Homo sapiens
gtaggaactagtaataatttctgaaacattctttgactggaagacttatgttaaatttaggtgaaaaaytgatctgtcacttgcaacaccatgtcaacgtccatgtgacacagtgaaatgacccaaagaggtaactaattaatggtgttattaattaatttcatcaatcataatatttaaaatgtcgatttaatcttaatgtcataccctgactacaaatttttataataattcaaaattcaagaattaaatatttgattatagtcttagctcaggctgcaattacaaaatatcatatcctgggtgactcacaattctggatactgggaaattcaaaatcaaggttctggaagattcagtgtctggtaggggttccctttctggcttgtagatatctaccttcttgctgtattctcatatggtggggagcaaagaagggctctggcttctcttcttcttcttataggagcattaatctaattatagaagctccagactcatgatctcatctaaacttaattatttattgtatcagagagctattactttctgtttttatgattcaagttaggct

SEQ ID NO: 142041 - DNA, 212 bp, Homo sapiens
ttctaaaacaactctttaaatttaagtattacaagtttcaaattaacgtaatgtaaatttgtttaaattttactttggaagctcttttaattcagcttctattatccatattaaaaatattgmagataaatctgatatcactgtgatatgtaattctttttaagaagtatctatatttaagtagaagaagatcatatataaaccacaaaggg

SEQ ID NO: 142042 - DNA, 541 bp, Homo sapiens
gagttttcactgttgttaaatttgcagatgattattaggtagggaggtaggtatataaacagctaatttatgaaactcttcacataaaccttacaaatactgttgttaaagatgactttgaaataaaaaccactgtacatatctatgtatagaaaatgttaactctcccttaatttgttacttttgcattctatttttgcaaagaagtctctttctttggaaaacttttagttgtaaaaattttcctgaatagtgatgttttcagtaaatcaaaactctttggcactgaaacacataaaaatacatcttttcacagatttcactcttctgttaaatagatggaaactcaaattttaacccatacatatgatcttttccagttaaatttttctttcttcagtgagattaataaaaagcaatttaaacatattgaaacatctggggctttattaattttctacattgaattacattaaaatgaacattttttcttgcctaaatgatttcagtcwctgttgatattagtgctataagacattga

SEQ ID NO: 142043 - DNA, 352 bp, Homo sapiens
cttaatgcctgacagttatatattgctgcattgaaaactctttctgacttagtrggttaagatgaaaatttattgcttattacttctcatgctttggtgggctgcctgggtgattcctgcaggacttccatgggttcactcttgcagctgcaatcagcaaaagagtcagatgaaatgaaaagtcctgtattttttattcacgtgtgtggcagttggttctggctagatgtcagctggcatcacttggatcctatgtatgtggccttttatcctcaaatgatctaggtcaccatccttgcatggtggtctcaggtcagtattccaaatggatgttgacaaaatcagcaagagc

SEQ ID NO: 142044 - DNA, 391 bp, Homo sapiens
aatgatttataaatacagtggtattataaaaataaaacgttaattacttccgtataattgttttaaattttctttaaatataaatatcttaaaatacctgaataaaaccatgatatagagaaggaatattaatcatttgartcattgtataattccagttgcagtaaaatttactcccaggacatcttgtttcatggtgagaattctttagcctcaattttataagatatttcattatgcatttaaatatattataatacacactaatttattactctgataatctctatggcctattaaaattcaatttattataaagcatgtaaatgctgcttgtttttctttaacttaaatgttcccagacagtaagcagacttactgttctgtctct

SEQ ID NO: 142045 - DNA, 502 bp, Homo sapiens
gtcagcatctgtaatctattcattgtagggaaacttaaacatgttgtaattatttcaaactcaaatgtagaaatgttttcccttactctccttatctctgtagttgattctatgcctcaaagcttatgaaaaacgtctgtatttttggaagggagaaaactccacttgttggttttaatctgttctgtactcgtatccagagagatgcacagctgtttggctyccaatttcactggcatttgttgcagtggcattttgccacacagtccaagctactgtttctggatgcgtatcttcattgagttaaagatcatcttcccaagtgaattttatgtcattctcctagcttcaggtaaggtttgattgtttgactgaatatctctgagactgagggtcctcatcagatattgtctgccactgaaatcccaggagccatcgtgattctttttttctttttttctttttccgagacggagtcttgcactgtcgcccaggctggaat

SEQ ID NO: 142046 - DNA, 530 bp, Homo sapiens
attatgaatttcatatatatgtgtattttaaggaatactgatataattaaatttgacaaaggatactcacttaaatagttaagaatctagtcctattttatgaagtaacagaaaattattgaaaacaaaacaaaataacctagcttctggcaaaaaggaggatggcataattgaatgaaaaagttacaaattargcaaaaaggggcattttgcattgtgagatggtatacctgagaaatagattttaaaagagttgacatggtttattattttgtgaaaaattgaaatatttaaggtgtatacatgcatatatacatgtaattggttatggtattacatatgtctgaagaaaatgagtaaacagtacatgttgaatgcctgctctgtatatctcaggatgaaataatatttatatatgaaaattaaatataatatcctattaaataggataaaataaggtttatttatatatgaaaattaaatataagtcactttatttttttctatttgatttcataattataagtgga

SEQ ID NO: 142047 - DNA, 558 bp, Homo sapiens
gaccacaccaacttggaaacataaacagtaagttcggatctatgttttggagaaagaaaacatgaggtttctggacgagatatacacagaccatagtgaaaagagccttttgtccctccacctttatgttctcacataagaaaagcaaacattgatgagaaggatcagacataaaggaacacagttatctggagctctctacactatgagataaagtgagttctggtggacaaagggacatttgccatgaatagcaactgwttaagagcaaggatgaaacagttatatttgccaggaggccaagacaggcactgttcttcaaaataggggaaaaggggcaaatgtcctcctgctcctaattgagaatctctaaggtagcattttgttttacattttatgtcacaggtcacatccttgtaagactcaaaacttatagagggtagattgagcattgaaggcattcaataagtgttactatctctactgtccccacttaaaattcacacgacccactacccaaagatagtgaaaacaagtagagggtaactctgaagaaca

SEQ ID NO: 142048 - DNA, 558 bp, Homo sapiens
gaccacaccaacttggaaacataaacagtaagttcggatctatgttttggagaaagaaaacatgaggtttctggacgagatatacacagaccatagtgaaaagagccttttgtccctccacctttatgttctcacataagaaaagcaaacattgatgagaaggatcagacataaaggaacacagttatctggagctctctacactatgagataaagtgagttctggtggacaaagggacatttgccatgaatagcaactgattaagagcaaggatgaaacagttatatttgccaggaggccaagacaggcactgttcttcaaaataggggaaaaggggcaaatgtcctcctgctcctaattgagaatctctaaggtagcattttgttttayattttatgtcacaggtcacatccttgtaagactcaaaacttatagagggtagattgagcattgaaggcattcaataagtgttactatctctactgtccccacttaaaattcacacgacccactacccaaagatagtgaaaacaagtagagggtaactctgaagaaca

SEQ ID NO: 142049 - DNA, 524 bp, Homo sapiens
gggttgttttcttttactataaatatcattattcttgttactgatatcatattgttattaaatttttctcaaaatttctagtctgtcaattaaacagaccttgaggaagaatattamgaattgtaaagattttcaatgacttgctttgcatgacttctggcagatactaggggatgactcaatatttattttatttacttctcattccagtacttcatagccgtgggttccaagcaggtgctgtgtcttctgcaaaacgaacaatagttagcaaaagattgccttggagcaggggctgggggtgctgcagaactatgcccaacatttctcagagcatagaatcgaaggagctcttgaagaggagtcttgaatttgttctcctcagaggtctctggcactatttattattgccgtgatggtacaagtaacaggtgacatcctcagagtcccgaaaggacagatttcctaacaagtggcagataaaagctggagcaaaatgatgagaattattctaaaagccggag

SEQ ID NO: 142050 - DNA, 524 bp, Homo sapiens
gggttgttttcttttactataaatatcattattcttgttactgatatcatattgttattaaatttttctcaaaatttctagtctgtcaattaaacagaccttgaggaagaatattacgaattgtaaagattttcaatgacttgctttgcatgacttctggcagatactaggggatgamtcaatatttattttatttacttctcattccagtacttcatagccgtgggttccaagcaggtgctgtgtcttctgcaaaacgaacaatagttagcaaaagattgccttggagcaggggctgggggtgctgcagaactatgcccaacatttctcagagcatagaatcgaaggagctcttgaagaggagtcttgaatttgttctcctcagaggtctctggcactatttattattgccgtgatggtacaagtaacaggtgacatcctcagagtcccgaaaggacagatttcctaacaagtggcagataaaagctggagcaaaatgatgagaattattctaaaagccggag

SEQ ID NO: 142051 - DNA, 574 bp, Homo sapiens
ctcactaatgaaaggcatttgtaataagtcagaaagggacatasgattcacatatcagactgttagggggagagtaatttatcagttctttggtctttctatttgtcattcatactatgtgatgaagatgtaagtgcaagggcatttataacactatactgcattcattaagataataggatcatgatttttcattaactcatttgattgatattatctccatgcattttttatttcttttagaaatgtaattatttgctctagcaatcattgctaacctctagtttgtagaaaatcaacactttataaatacataattatgatattatttttcattgtatcactgttctaaaaataccatatgattatagctgccactccatcaggagcaaattcttctgttaaaagctaactgatcaaccttgaccacttttttgacatgtgagatcaaagtgtcaagttggctgaggttttttggaaagctttagaactaataagctgctggtggcagctttgtaacgtatgattatctaagctgattttgatgctaaattatcttagtgatctaaggggc

SEQ ID NO: 142052 - DNA, 574 bp, Homo sapiens
ctcactaatgaaaggcatttgtaataagtcagaaagggacatacgattcacatatcagactgttagggggagagtaatttatcagttctttggtctttctatttgtcattcatactatgtgatgaagatgtaagtgcaagggcatttataacactatactgcattcattaagataataggatcatgatttttcattaactcatttgattgatattatctccatgcattttttatttcttttagaaatgtaattatttgytctagcaatcattgctaacctctagtttgtagaaaatcaacactttataaatacataattatgatattatttttcattgtatcactgttctaaaaataccatatgattatagctgccactccatcaggagcaaattcttctgttaaaagctaactgatcaaccttgaccacttttttgacatgtgagatcaaagtgtcaagttggctgaggttttttggaaagctttagaactaataagctgctggtggcagctttgtaacgtatgattatctaagctgattttgatgctaaattatcttagtgatctaaggggc

SEQ ID NO: 142053 - DNA, 452 bp, Homo sapiens
agttagttaacaccctatccaacatgcactatgtgccaggaactgtgtagaaaacttcacagtcaccatctcagttaaccatcacagtaatagtaagaaactattccttatatatgattagcagcagcagaaacatctcccttataaagatatgaaaatcaaggcagatagttaaataacttgcccaaggttgtacaactagtaaataggaaaaatttgagttccaacctatgcccaaatccctgttctccatctccaaactacttagtctctctaagcctcagtttacttatctataaaaagggatgaragcattatgctccaggtcataattaaaaacagggaccagtcctatctcactgtaaacagtttgaaaaatgaacggctatttcacacagtagacaagaagaagagctgaactgggattcatgagcaaagagaaacaaaacaaa

SEQ ID NO: 142054 - DNA, 597 bp, Homo sapiens
gctgtaaacagtaaacaaattgtggtatagtcatacaattgaataccactcaccaataaaatgaaactattgatataccctgagttaaatggctacatctcaaaaacattatgcattgtgctgcacaaaagtggctagtcacagtggagtacacacttcatggcttcatgataygaaatgctagaaaagaaatgagaccactggctgcccagagctcagggatggagaactgccaggaaagaagcacaagggaactatttggtatgataaaatattccgtagtttgattttggtgttggttacatgggtgtatatatttgccgaaactcaagctatacacataaactaggtatgtttttgtatgtaagatatattttaatagaattgactttaaaaaatatttttagaaactcacaaggggggaaggatattactaactttctgttatgggccaaattgtgtcctcccattacctcagaatgtgactgcagagataaggtctttgcagagataaggtctttaaagagataactaaggctaaatgaggtcattagagggagtcttaatccaacatgactgatgtctgtgtaagacgag

SEQ ID NO: 142055 - DNA, 597 bp, Homo sapiens
gctgtaaacagtaaacaaattgtggtatagtcatacaattgaataccactcaccaataaaatgaaactattgatataccctgagttaaatggctacatctcaaaaacattatgcattgtgctgcacaaaagtggctagtcacagtggagtacacacttcatggcttcatgatatgaaatgctagaaaagaaatgagaccactggctgcccagagctcagggatggagaaytgccaggaaagaagcacaagggaactatttggtatgataaaatattccgtagtttgattttggtgttggttacatgggtgtatatatttgccgaaactcaagctatacacataaactaggtatgtttttgtatgtaagatatattttaatagaattgactttaaaaaatatttttagaaactcacaaggggggaaggatattactaactttctgttatgggccaaattgtgtcctcccattacctcagaatgtgactgcagagataaggtctttgcagagataaggtctttaaagagataactaaggctaaatgaggtcattagagggagtcttaatccaacatgactgatgtctgtgtaagacgag

SEQ ID NO: 142056 - DNA, 625 bp, Homo sapiens
tgtggcttcctgtgagctgaagtgcagtgattgttgtctctttactgggtctagccacccagcaagtctacctggctctggaccggtactgagggttgtctgcacagagtcctgtgatgtgaaccatctatgggtctctcagccatggatactagcacctgttcaggtggaggtggttaagggttgcaatggactccatgagagttcttagctttggtggtttaatgctctatttttatgcttgttggcctactcctgggaagtggcactttccagagagcacagctgtgatagtaggaagaggaactagtgrtgggcaagtccctagaactcccaagattatatgccctttgtctttcactaccagggtgggtagggaaggactatcaggtgggggcagggctaggcgtgtctgaggtcagattgttcttgggcaggtcttgctgcggctgctgtgagggatgggagtgagatacccaagtccatggagttatgtacctgggaggaattttgctgcctctgctgagtcatgcaggttgtcagggaagtgggggaaagccagcctcgcccagcttccatgcaaaccgaagggctggtctcactctcaccattcccctgccccaat

SEQ ID NO: 142057 - DNA, 571 bp, Homo sapiens
cttttttcacatatcaaattagagattattaaaaacttgatataataacatttagtgttggcaaagataaagatagacactcacatatacttccattgtggaakatagtttagcctatgtatgaaaacttgtaaaaaaaaatttgaccctgaaattctccttttggaaatttaactagagaaaataactctaattgtacgcaaatatttgtctacagaaatgttcacatagcattgtttacaatgtagacaaagttattgttaaagaaattgttaaatgaattatggtgcatttatgctatggaatactatagttagtatttaatgacacgggaaaatgtgatacattttaaatgaagtgtcactcacaaataagtaatgtcatatatcctaattatttttaatacatactagtgcataggaaatgtgtgtaaggatatagtctaaaagtttaacagaggtttaaacagttatatgtgatttttattttattatttttatttccataatgttcacaatgaacatatattacttttataataaaaagtaatgttcaaaaaataaaatacttt

SEQ ID NO: 142058 - DNA, 563 bp, Homo sapiens
ataaaacaaattacaccaatcagtttgggggcagggagaaatagcacaagggaaaacattacatcacaaataaaatgtttagaaaaacttgagtttaaaaaaatgcagaccaggagaacatataaggacatgtctaagtgttctgtgactaaggtgagtggagccagctctagcgaatgtataaaagcctgtgaaattgccctctgtcctctgccctgaaacccactgttcttgatctgtttctgttgtcagtgtgacctctcccagaagtacaaaatgtcttctcttactttctaacaaaatctggtcatagtatccaaaaagatgaccttagaaaccacagttaacaatytaaaatgctatcattccaattagtgctcgtatttgccacccttagttttagactgaatgttttttggataatggagcaatagaaattgaagatcgttgggcaggggaagatggcaatgttgagtcttcctgttcagaaatcatagtgatctgagggatttttatctttctacatcctacctggtacttatacaaatgacaaatctcataag

SEQ ID NO: 142059 - DNA, 651 bp, Homo sapiens
tgaaattggaccctatcttaaacgatgcacaaaaatcaactgaaaatggatgaaagactgaaaggtaagaccagaaactataaaactcctagaagacaacataggggaaaatctgctgggcattggcctcagaaatgatttttttttttatatcagaccaaaagctcaggccacaaaatcaaaaataaataaatgggactacatcaaactaaaaagcttctgcacagcaaaggaaataatcagcaaaataaaacagcatgctacaaattggggaaaaatatttgcaaaccatatacctgataaggggttaagatgcaaatgtagaaagacaaatagcatgattaaaaaatgggcaaaataccctgaatagacattttgtgaaagaagacatgaaaattgccaacatgtgcatgcaaatgtggtcaacatcattaatcatcagggaaatataaatcaaaactactatgtgatactacctcacacccattagggtgkatattatcaaaaagtcaaaagataacacattttggcaagggtatgaagacaagggaattctttttttcccccaactttcattttaagttccagagtgtatgtgcaggatgtgcagatgtgcaggtttgttacacagataaacgtgtgccgtgatgg

SEQ ID NO: 142060 - DNA, 593 bp, Homo sapiens
atttgaaacttaacgagaagaagggctttagtcaagaacataaatcactagtcatgttacaataaacatgggggagctgctggaaagtgaggtgaatgagcgagtgacttcccccataaattaaccctcaccgtgattctcttactctcacacacaaaccaactcttttgtggttttgcccccaaattactctggactrtattattttagagcaatatatgaaaagctatctcaaaatcaactatagaatagaccacatctctagaatttaggaaagttatacctctttccatttatgccttcttataccagggatggctggaggtgaggccagtaaaatctgttagtagtcgttgataggttacgtttattgaatcaagcctgcccatgccaaagaattttcatatataattgatctttaaagtagtttacatttatttcccctccagaggtcactttcacaagtcaaaaagtggcttaggcagagtgcatagcttaccctccccatgcttgaaataaaccagtagaaacttggagagccctgtttctggccctgactttggacatacacatttatgagaattttcattatg

SEQ ID NO: 142061 - DNA, 613 bp, Homo sapiens
gaaaaaatcataatacatagaaacattttctgagggtttcagatgttggacttacaaaaggtctttaaaacagtgtttaaacagcttttaattaaaaaaaaaattaaaagttaaagaaaattttgtatgcctattacttacacccaaagaaggttgataaaaatatacatcataaaaaggatgatgtgtgtattgtgacattgaaaagtctagtacatttgagacaccagaagaaaaaagtcaaygaagttcatgatacactaatagaaattatctgatctccagaacagagagaaaattcacaaatgaaaatgaacagagcctcagggatctgagtagcaccattaactgtaccaaatatgtggaatgggaattccagaagaggagagagagaaaggaagggaagaacacaggaagcagtaatagcaggaaaagaagctcaacaaagtccaagaagaaatccacacaagacaccccatggtcaaactgttgaaagccaaagacaatcagaaaatcttgaaaccagcattaaaaacatggctcatgaacagaggaaatgttagtgtttttataggttggtgcagaagtaattgcagttttgccattgaaagta

SEQ ID NO: 142062 - DNA, 626 bp, Homo sapiens
agaattacaaaggaccacaggtttataatcagaaaatatgcaatccacaagataaaaaataatatttttaaagtaataaaataagtaaagttgtatatctagaaaaatgctttttawaaaaaatagaattttcagacaaaaaacttgaaataatattttcctggagaacttcaatacagaaaaggttaaaatagtttttgggtgttaaattaaaggatgttggatggaaacttggactataaaaagaaatgaagagtgagagaaaagagaagtatatgtgcaaattttttaaagtgtttttaattgtgaaattatgagctacttgataatttaaaacaaaaataagaacaaggtttaaaggcttacaatatatgcataaatataatatatgcagaaataaaatatataatatttgcagaaatataaaataatgggagagggaaaatgaaagtacacaatgtaagcttatattttgtgtgaattggtggaatacgatttgaaggtagaaagtgagatattagaatacacattagaaaccttaaatcaactacaaaaagagatgtaattagtaagataataatacagtaaaattatttaataatacatttaatgtgaaagaagagaca

SEQ ID NO: 142063 - DNA, 407 bp, Homo sapiens
ggctggcaaggccagcagtatacttttactgtcctacctcagtgatatatcaactctctggctttgcgtcgtaatatcatttggagggaacttgatcactgtttgcttctgcaaaatatcacactggtccattacattgatggcattatgctgattgcatccagtgagcatgaaatagcaaacacactggacttattggtgagacatttgcaygccagagtataggaaataaatctgactaaaattcatggtctttctacctcagtaaaatttctaggggtcgaatgatgtggggccagtcaagatgtttcttctaaggtgaaggttaagttactgcatttggggcctcctacaaccaagaaagacgcacaatgcctagtagtcctatttggattttggaggctaca

SEQ ID NO: 142064 - DNA, 407 bp, Homo sapiens
ggctggcaaggccagcagtatacttttactgtcctacctcagtgatatatcaactctctggctttgcgtcgtaatatcatttggagggaacttgatcactgtttgcttctgcaaaatatcacactggtccattacattgatggcattatgctgattgcatccagtgagcatgaaatagcaaacacactggacttattggtgagacatttgcacgccagagtataggaaataaatctgactaaaattcatggtctttctacctcastaaaatttctaggggtcgaatgatgtggggccagtcaagatgtttcttctaaggtgaaggttaagttactgcatttggggcctcctacaaccaagaaagacgcacaatgcctagtagtcctatttggattttggaggctaca

SEQ ID NO: 142065 - DNA, 233 bp, Homo sapiens
agaattccctgccccttcccggaaaactcatgaataatccacccctcatttagcatatgatcaagaaataaccataaaaatagccaaccagcagccctcagggctgctctgcytatggagtagccaccctttcattcctttactttcttaataaacttgctttcactttactctggtggctaactcttcaattccttcctgcatgaagccaagaacccagatggcctcccagg

SEQ ID NO: 142066 - DNA, 597 bp, Homo sapiens
tactattttaatttgcctgcaaagccttcatttcaatattgtttcttataagttgtaacttggtgggtgtcataatcctgatagaattttagctacttgatagcctgagacattttggaggaatcattcccaacagaaaatcagtttaatgagcacttctggtgttaactgtgaacagctatttcccacactcttgaagtacatgactaaaccaggggcttatgccaccttttaaaatgtaacacctggtgttctgttcctccccactcctgaccttaacaatcatctttgagtaatgcctagccaatttatggaattgatggactacagaaaaaaacagaggcgctgagcaagcttcctgaaatagcaaattctgagatgaatttttagaacaaccacgttaagatgcaatacaatgaaacgttctcttataattttcaaccagccaagmctttgccaaaagggtattatttgttggagaaaatgacatccctggggatgcagaaagcaaatcgctgatagtaatggaaatatctaaccgctcactacattatctcttcaacaaaaactggtgaaaacctgggacacactgttctg

SEQ ID NO: 142067 - DNA, 366 bp, Homo sapiens
taatacacatgcatgttcatgaagctgccacattaaaggraaatatccctcagactcagaggatcaattagcagatgcgttcatgacgaacttgtttactctgctctcgtcaacttttctttgttgaaactgaccttccctgcttgtatgagaatcattagtgcccaacaggaaagacagggctttccatttcacaagtctgtgagcgttcatttctgagtagggcccaggctcaacaatattttcacagagtgacagtcgtaatcaagtcctaacaaaggatggtcctgcacgatagaactgcaaataaaactctacatgttgaatgtgcttattgttcctccttgtttgcaaacatgtacacag

SEQ ID NO: 142068 - DNA, 376 bp, Homo sapiens
tcttagccttgaaagtgtagctataatacacatgcatgttcatgaagctgccacattaaaggaaaatatccctcagactcagaggatcaattagcagatgcgttcatgacgaacttgtttactctgctctygtcaacttttctttgttgaaactgaccttccctgcttgtatgagaatcattagtgcccaacaggaaagacagggctttccatttcacaagtctgtgagcgttcatttctgagtagggcccaggctcaacaatattttcacagagtgacagtcgtaatcaagtcctaacaaaggatggtcctgcacgatagaactgcaaataaaactctacatgttgaatgtgcttattgttcctccttgtttgca

SEQ ID NO: 142069 - DNA, 584 bp, Homo sapiens
ttcccagtttattatataatattttgtagtatgtatttactattcaataattatttatacagtttccattctttttaaataatggcatttacaacaatttagacttagctgtgtatggaggtgatgagacgtcactgtcaggtaacttttctccaccttgatttctctattcctgagttcctgatttcaatctgtctcatggttacctagaatatgtctctaaattgttttttaaagrtaagtaacatatgtttgctttatgagggtatttgagaatgctttgttgtataatatgtgaaacattcagttttgtttgttctagaatttctgtttataacgttttacttctcacaaatctgtagtcttgtttcatagtgttcttacaaataataaagcagaagagtctatggcgagtttttatatttttcttttgtttttctgcatggttgcttgtatgacttttttttggatttgatgctaaagttttatttaccagggtatgttaggttttttcccctattttttaaattttgtttctggaaagttgaaagttttttgagatatgaagattgtagccttcatct

SEQ ID NO: 142070 - DNA, 576 bp, Homo sapiens
attctgcattacatgctggtatcaaagtatctcacgtaccccataaatatataaaacaatgtacccactaaaattaaaaattaaaaaaatactttataaatactataaaatcaaatgctttgaatatattcatatgctgttctaattccatccattgcaggcagttaaaaatttactgtgataaataatgtatcctaatctccctaaatgggcagatagaattacatactttttaccctttaaccctggaagaatagacrtgtctattggcaatttagaggacaaagaaagaagtgtgcagaaaccctgaagcccttactgtccaattctttatggcaccaagagatgttctcacagtctgcatcaagatggctggtggctggtaataagttttatgctagtaagtacttccgtgaaattagttatttgctggatccaaaacttcattagcttatgttaagggagaattatcttcaaagcaccctctcaactagcagggtatgccccatagacgtttgggccagaaagctcatggctgagtctatccaccccattcccttcccctacatttgcatt

SEQ ID NO: 142071 - DNA, 519 bp, Homo sapiens
taggagctttttgggtcatgattacagcattaaactgtctgtatttcctctgattttgaaccaaagaaaattatttaccttatgtaatgatatggttgggcatatgaagtataaaagtgaattagtacagaaaattaaaactaatgtgagcctgttatgaactaaacatttgtcctccacccttcaaattcatatgttgaaatcctaacctccaaggtgatggtagtgagagaaggagacgttggaggttattaagtcataggagtaaagtcctcatgaatagaattagtgccttgataaaagtaacccagagagctctgtcgctccctttctaycatgtgagaatacaagaatgtagaagtctgcaatgggaagggagctctcaccagaatccaaccatgctggcaccctgatctcagacgtccagcctccaaaactgccagaagtaattttttgtggtttgtaagccacccactctacggtactttgttataacagaccaaactgattaagacagag

SEQ ID NO: 142072 - DNA, 519 bp, Homo sapiens
taggagctttttgggtcatgattacagcattaaactgtctgtatttcctctgattttgaaccaaagaaaattatttaccttatgtaatgatatggttgggcatatgaagtataaaagtgaattagtacagaaaattaaaactaatgtgagcctgttatgaactaaacatttgtcctccacccttcaaattcatatgttgaaatcctaacctccaaggtgatggtagtgagagaaggagacgttggaggttattaagtcataggagtaaagtcctcatgaatagaattagtgccttgataaaagtaacccagagagctctgtcgctccctttctaccatgtgagaatacaagaatgtagaagtctgcaatgggaagggagctctcaccagaatccaaccatgctggcaccctgatctcagacgtccagcctccaaaactgcmagaagtaattttttgtggtttgtaagccacccactctacggtactttgttataacagaccaaactgattaagacagag

SEQ ID NO: 142073 - DNA, 588 bp, Homo sapiens
aaaatttactagcattttgccatattctcatgaaggatttggagttaaaaatcactgatagaaagtcagtttactacactgacagtatgagaattgcctcttcagagaaagatcaggttgagctaaagaagagaggcacctaaatgaaaaacagaggctggctgataaatcctgctaaaatttaagcgggatttattaaattaaataaaatttaatttatttattccaacccatgaaattctgaagaatgtatatagacaggagaaaccagagatagttcttctactttgagaaataaattactggttctctcatatactggaaataggcaggaaacttagagactggcagggcttttggggttttggttgaatcatatttatctattaatcctgttggcctgaaccrtaatgtcactaaaaataaatctgaatttgagtggggcttttgcagaaacaagtgttaaagatataccaagggtgttggcacagatattttcactggacacttacgatccatctactcagataatatttgaagttgttgtaaccagtacatatgcagattgcaggaatttgcagaaattga

SEQ ID NO: 142074 - DNA, 470 bp, Homo sapiens
atataccaagggtgttggcacagatattttcactggacacttacgatccatctactcagataatatttgaagttgttgtaaccagtacatatgcagattgcaggaatttgcagaaattgaatagggctattcagtgagttctcttgaagtttggctaaaactgctgagttgtttagcatatacaactcaggagagaaaagtgagattgttactgagggttggttcaaaccactcccactactgaagggcatcagaaaattctgaggacagaaatactgattgcgccatgggtgatatcagagagacattcagataggaggagtgcagcatagcaaagcttgttcacaaggtagagacagtatattagaaagatgctaagagggtaacttcaggggagcctacagtttatattagcagttgcttcrctgactatagaaccaaaaatagagcccactaaggatactgtgtag

SEQ ID NO: 142075 - DNA, 552 bp, Homo sapiens
tgtatggttctcataatacagtacatcaaatgtgtcttatgttgtatgtggttatactgtcaccctcaaaagactgagtgacttgagtagagaaatatggactgttatattttctatgttttaaaagtgtcttacatatattatgtagttagaattcaattaatatatgctcaaaagcagaaactttaggtgcatttctgcatcaaaaaagaggttaaattaaaaataayacattttattccctcaccagctaagtaggatgtttttaatatcaaatggtatagcaaattaagcatattatttatgtgtgctgatttatatctgctcccaaattacaccccattttgaggatttacttaaagtctaatagcaccgaaaagaaaattttaaaacatagcatttttttcaatctgtattatagaaacttccagagaatgtataatttacataagcattgctgtagtgaactggtttggtagagaaaaagtctaaaaacatttacagcataaattgttgttgctgaccattcatgattactgttactgacatttt

SEQ ID NO: 142076 - DNA, 552 bp, Homo sapiens
tgtatggttctcataatacagtacatcaaatgtgtcttatgttgtatgtggttatactgtcaccctcaaaagactgagtgacttgagtagagaaatatggactgttatattttctatgttttaaaagtgtcttacatatattatgtagttagaattcaattaatatatgctcaaaagcagaaactttaggtgcatttctgcatcaaaaaagaggttaaattaaaaataatacattttattccctcaccagctargtaggatgtttttaatatcaaatggtatagcaaattaagcatattatttatgtgtgctgatttatatctgctcccaaattacaccccattttgaggatttacttaaagtctaatagcaccgaaaagaaaattttaaaacatagcatttttttcaatctgtattatagaaacttccagagaatgtataatttacataagcattgctgtagtgaactggtttggtagagaaaaagtctaaaaacatttacagcataaattgttgttgctgaccattcatgattactgttactgacatttt

SEQ ID NO: 142077 - DNA, 499 bp, Homo sapiens
gttaactttcttttctgagaaatgaattcattcattctttctacaaccagaagtaaggaagattcatcagttttaggtggagtagagaggaagattcaggtgaatttcttttggacaggtgagaaatttctaaagcagggcctcaaattggaacttgtgtatgttgctktgcagggaggtgtaagcaagctgggtggtcagcctgggaaagtcaggtcttttgttgcatcacaatttatagccctgactttgggatatgtgtaataatttcgcaagtattttcagtctcttgggcacagtggctctaaatgaaagcgtgaagaaggtagttacatcagcatactcccacctgctttaaaatattttctcctttccccactttggcaaatggcctaaaggtgctgctagtttccatgtcccacctggtatcctaaaacttttcaccagctctctttgatctacgttcctcagtgtcttttgaagcctgctttaaatcctg

SEQ ID NO: 142078 - DNA, 609 bp, Homo sapiens
ggaagataaaaattttgttagttctattatttcttaaatctttaattttgttgatctagatcttgctgcctggttcattccagaagcaaaaggaagagggcctctttaatatttaagtcataaaatagagctcattcatccagaagtagtgatgcagaatgtgcagtgggaatagctatcaggaaacgcaatgatattacatttatcccttttaaaagataattccgatctacttgacacaattaggggagaaatgaaagtaagtacaggcttagaaattctatcagtaagataaatgctttaaatgaagatcaattaagagccaggtagagtgctcaaaacaagtgtcgggaagtgggcaaattgatagwatcaaagctatgaaaatcactaggaaaagttaataggttggcaaagataagcaagccaatatttggaaaagctaaatagttgtgctaagaacagagtgactcactgaagtacagaattcttatttcttttaatatttttctcactgtttgtttctattaatactggttagagaggaggcagatatactcctgggaaaaggtaagaggatctctggagtaaatgataggaaggagggcc

SEQ ID NO: 142079 - DNA, 601 bp, Homo sapiens
ggaagtgccttagataataaagacagagttaaaataacagcttatctcctaaaagagaaaataagcaattgagaattttttgagaaaaacttaaaagaattgtaactgaaaactacaatattgttactgaaaatatcaaakaatttttttgcttttcttttttttttttttttgagatggggcctcgctctgtcacccaggctgtagtgcagtggtgtgatcatagctcactgcagcctccaccttctgggctcaagcaatcctcccacctcagccttcctggtaactgggactacaggtgcataccacgatgcctggctaattttttaaattttttgtaggatgggctctttccgtgttgcccacccaggctgatttcaaactcccgggctcaagtgatcctcccaccttggcctctcaaagtgttaggattagaggcatgagccactgcaccgagctcaaggatagtttttatgagaagaagaaatgcaaatgaagaaaaattcatgaagaaaaaaatatataaaaggtatcacatatgaatgaaaagataagaaaccctaagttttgtagttagagttgagaaaaaccagatgaatgc

SEQ ID NO: 142080 - DNA, 649 bp, Homo sapiens
agagagcaagtaacacttttcagagctctagtgggctgatttgcatccaaatagcaactcgagacaagcaatccattcttttaatatatattatttgtcttttggggcataggaggctatactaagaaaccatgaatttcattcctcaaaaagtttaccatcaaagaaaattataggaaataaaaattactaggtacctaaayaaacaaacaaacaaacaaaaaacagcaaaaaaagaggctcaagaaaaataaatttgttggatcaaaattttacatattagaaaaatatatatttgtgcaaatagtaaacccaatctaatgtacaaaaactttaaaatattaaggacatccaattggtaacacaatatgttgctattaaaaataatagagtacttctagactaactataactttggtacgaggatcttactgtttccttcaaatcccaataaaagtgatgaaagaaaaataaaatagaggagtaattgcagaacattgaacagaaaatcaaggtgacattcacgtggcgcaatctttgaggtagttccacataaattcctaaagatctagcaaattctttgaaaatcatacatttacataatgaatcctggggggacaggaagaatatggaactgagagcaaacagt

SEQ ID NO: 142081 - DNA, 649 bp, Homo sapiens
agagagcaagtaacacttttcagagctctagtgggctgatttgcatccaaatagcaactcgagacaagcaatccattcttttaatatatattatttgtcttttggggcataggaggctatactaagaaaccatgaatttcattcctcaaaaagtttaccatcaaagaaaattataggaaataaaaattactaggtacctaaacaaacaaacaaacaaacaaaaaacagcaaaaaaagaggctcaagaaaaataaatttgttggatcaaaattttacatattagaaaaatatatatttgtgcaaatagtaaacccaatctaatgtacaaaaactttaaaatattaaggacatccaattggtaacacaatatgttgctattaaaaataatagagtacttctagactaactataactttggtacraggatcttactgtttccttcaaatcccaataaaagtgatgaaagaaaaataaaatagaggagtaattgcagaacattgaacagaaaatcaaggtgacattcacgtggcgcaatctttgaggtagttccacataaattcctaaagatctagcaaattctttgaaaatcatacatttacataatgaatcctggggggacaggaagaatatggaactgagagcaaacagt

SEQ ID NO: 142082 - DNA, 557 bp, Homo sapiens
ttgcctacttggagatcatcttttgtaaagtgcctgttcaaatgttattcttctcttttagattgactgtagttttctttgcagaaatcatttttatatatcgtttgcaagttctttgtgagatatacgtactgcatatgcatcctccaaatttttagtttgcctttcctcttttaatgttatcttttggtgaacataatttaaatacaaaaattatcgtttttcttttatgagtaatatattctgtctagtttcagaaatatttgcataatgcataggcataaagatatccacctatgttttattataaaagttttattgtttgatctttcacattcagatcagaaattgatttgtgtaaaagatgcagggaaagtttgtwttttgtctgcatatagatagacatctaattgactcagctttgtttatcaaaaagacaatctttcatcattgccacttataaaacaggagactgtatttatttatattggtttctggcctctttattctatttgtttattttttgccaacatcatgcatgttaatatctacagttc

SEQ ID NO: 142083 - DNA, 603 bp, Homo sapiens
aggctgaggtgggaggatcacttgacccaaggagttcagagttgcaatgagctatgatctcttctcaggagaccaccaagaaatacatgaattattggggtaaaaggactatttcagggaaatccagaaaactaatgagttttgctttttaattaaattggtttgatgaatgggctctgtgttcagaaacaggagctcagcaggagaggccatgaagcagtgaagtgctaggaatgggaacataccttgcttgggaggccaaaggggcacacaccaaatcagtgaagataggaacaaaatacacctgggtccccaaagggcaagaggaactttgatgatatatgagttccacacatttaatatatgatgtgcccacccaaattaaggaaaagtaaagaaatggatgaattaatcaaaaatgtttgcttgggatgagtggttaacaaatcagttcataataatgataatattaaaactgttagaacccgaaacaatwtacataataacttccataatcattgagaattttataagaaagcacaaacaacctagatgagagtacaggggaatatttatgtaaccttagcccttcattaaacaaag

SEQ ID NO: 142084 - DNA, 364 bp, Homo sapiens
ccctgcaaaatccattcatctttgwtccatctattttatctagcattcttattttctggtttatttccagtttaaatgaaatctgtaaaccagctactaaggccagacattccacttatgcataggaattattttctctttatctactcaataaatttgttcttgtgtggctatcttctctctcctgcatcatcaatttttcctttcttacttgctgactgaaatacattaacagtaaaaggatctctaatgtctattatatttgaattgcataaatttttcagtggcccctataatgttcttattccctttatttttttacaaggctcttgcttacagatgttatatagttttttgcttataa

SEQ ID NO: 142085 - DNA, 581 bp, Homo sapiens
ctacccatgggtacaagaaaatggccaagtgaggagtcatcactgatgataaagcagaaatcactcaaaaggggagatattaaggcattttgcaactactgcatagctttggaaaaagtaaggttttctcttaatttcgcactggttttatctgtatttgtgcccccagcctgatcratggcaggtctgctttgctctttcaggccatgctgattttcactctttccatctcagataggcctgtaccacttcactctttatatattgaaattttatatttcaaaaaatgctgacaattatttttaacgtgaaacataattttaaaactctacttcttggttggatgtggtggctcaagcctgtaatcccagcactttgggaggccaaggcagagggatcacttgagtccaggagttgagaccagcctggacaacacagtgaaaccctgtctctacaaaggagaaagaaaaaaaaaattagctggatgtgatcacatgcacctgtggtcccagctactcaggaggctgaggtgggaggatcacctgagcccaggaggtcgaggctgcagtgagccgttatca

SEQ ID NO: 142086 - DNA, 526 bp, Homo sapiens
ataaaggcttaacattaccatataaagagaattagcattgtttatatcagataactgcaaaacaaattagtaaatttcaagtgtggtttccrtaatgcttttatcattaatgtaaaaatgagtattttactaaaacatcaacattttgaagaagaatagaattttatttaatcaagaatagtttctgcacaacagtagactgatattttattttcttctacccctatatttaatatttgaaacaaatttatcatttcccctttctgtccagcattttaatgccagcataaaattctggttaagcaattatcttgggtgttttagagacagactatatatgaaagaaggttttatacacccacaagtacttctttaccagatgtgtttcatttctcatttatgacctaactatatatttttatgggaatgcttttaatgcaatgttactggaaattttaaatttaacttttctaatttccccgtaactgttggttgcctcatttatattaaatctatgtctacagta

SEQ ID NO: 142087 - DNA, 557 bp, Homo sapiens
tcaataactgccacacaaactagacagagagtcaataaggaaataaaagacttgaacaatattatagaccaaaagaacttaacagacaggtacacaacattccactcaacagctacagaacacacacacttctcaagtgctcrgggaatattctcaaggttagatcacatgttaaatcacaaaacaagattttttttttatttttgaaataatatgcttaggttttgtattttattttaattgacacattgacaattgacaaatatctatacggcagaataggaagacccagaccattcttcctgccacagagactctgatccaacaacaacacacttaccaaattcttcggtaagaaatccagaaaccagttaaaagtactctacacctgaggaaagcatgataccagcttcataaaagccaataggacaatttgttgtacattcttgccatagtgtttcccaccagcatggtgctacatgatcaggagaaaaattccagctcctggctttttcctgagaaggaaaagagaagactagactatacatctgatattt

SEQ ID NO: 142088 - DNA, 170 bp, Homo sapiens
aaaattccagctcctggctttttcctgagaaggaaaagagaagactagactatacatctgatatttggaccttttttggggggaatggggaagctgcctaaaggaatggtttctttcttgcgtgtcttgaaatgcytatgggacatagaatactctagatgtctggggcc

SEQ ID NO: 142089 - DNA, 441 bp, Homo sapiens
cttgtttaacactaaggaaaaaacaaaaacaaaaaaaataaaccttgtggcagttagaacatggtttattctttaagygtaggggtgcgtaaattaacccttgcctggcatagacgtaggtcctgtttataacgtggagtcttattgccacaaagagtctgctctgttagtcttgtgatttctattttaacattcattctggtcagttgttgtgtgtaaaccacaaaagggaggaggttttaacaaggcatgtccaacctcccatcccatcatgaccaggaactcagtattaaggttttcctggggtccctttggccaaaggggagtccatccagtcacggggttttaggattttatttttagtttatgcattctacctgagtcagcataataggaaactcccctctgctttaccacctacaaaaaagtaacctgaagtaa

SEQ ID NO: 142090 - DNA, 585 bp, Homo sapiens
tgggtgctccagatgcctagaaatctccctgggcatggagcagaaagggggcctctgctctaatatctctgcacaggaaggatagggtgactcagactgctgaaccaggtgagcaggtgctctggagatcagcctgggcatgcagcagagaggccctccctgccactaccctgcatgaggatctctgcacaggaagggtgaggtggcttaggctgctgatccaggtgagctggtgctccaaatacctggaaatctgcttcagcatgaagtgaagtgggcctcattgcaccataatctatgtctaggaagggtggggcarctcagggcgcagaaccaaatgagcaggtgctctgaatgcctggcgatctgcctgggcatgaagcaaggagggctcccctgatccaagatctctgcacaggaggggtggggtaactcaggctactggaccaaccaagcaagtgctctgatatgattaaatatttggatggatatttaataggcacattcttatgccttccagatagtacaagctaaagtgggttctgaagtaagaattaggttaaattatctccacgagggaatgaa

SEQ ID NO: 142091 - DNA, 551 bp, Homo sapiens
actccgaggccggtgcaggagctgagacgcagcctgccctgccacctggtggagagatgaggaaggtgcgcgggtccgcgttcaggcaggtaatgccccgccacctggtggaaagctgccggcagagggttccggcgcttgcaatcagcccagccgcgtggcagcccacagtcctagcctagaacatgaaggatatagtgttctagggctcagaggccttgccatattcttctgacccaagaagcagactctggccctgagccagtgctaggaaagggccattctaatttaacccgccaagattaaggccaacatatctggcttttaataacttgttatgactctgacacagtttcctgaagcttttctgaagcaagttctagatttggcaaaaggaaataagaaataatagctatcttgaaatatctatagggctgttatckggaagaaagactaaatttattttgtgtagctcagagggacagacataaggctaacaggtaaaagtcaaggcaaagcagattctgcctccatgaaaggagcgtttctac

SEQ ID NO: 142092 - DNA, 473 bp, Homo sapiens
gatttggtgtgtgagtatggtggaagagaagagagacatgccaggaaaagatgcaagaagaaaatacaccttaaaacttattatctctaggtggttgagatgccaacagatcctttaaatttttcttcttttatacttctctgtttcttctatattttctccaacaaacatgttacttttcaaacaaggaaaattcatagtccccattatagagaggctcattaacctgccctagggtcttccgtgagtcagaagtgaaatcaaaaataaagaccatggttctcaaaagcctagttcatcacacaagctgcctacatgtgtgctgtggtaactctagaatagtggtccttaactggggtgattttgccccgcagggacgatttccatgtttagagacatttttgtttgtggtaaygggggaaggtggatgctactggcatctagtggaggggccaaggatgctactaaatatc

SEQ ID NO: 142093 - DNA, 533 bp, Homo sapiens
acatacttgtaatattgatttgaaaggatttctttttatgtcttttatatttttaaatttattttattttatttttatgagacagagtctcactctgtcacccaggctggagtgcagtggcacaatctcagctcactgcaacctctgccttctgggtcccagagattctcctgcctcagcctccsgcgtggctggggttacaggcatgcaccatcacaaccagctaatttttgtactttttagtagagacggggtttcaccatgttggccaggctggtctcaaactcttgacctcaggtgatcagccagccttggccacccaaagtgctgggagtacaggtgtgagccaccacacctggcctaaaggatttctttagtgtctcacctggtgctgtctgtcatttgagatacaaatctttgttaatcaagttagagaaagatacttctatatctattttactgtgaaaattcaggaaaagcttttaaaattttgttaaatgttaaataattatagtaatagaagacacctgtgt

SEQ ID NO: 142094 - DNA, 591 bp, Homo sapiens
gtagtgtgttggaggccttggtaagtcatatgtgagccagagttagggagacaaagcctatgaaaattcaggagtctgctgcatcagtaaacatttttaagagttcagtggtcaaggaaatattacaacattgcctccaaactaaagaagaaatgattgcacattgcatctcctgctgtgaaaaaggaatcacaattagctgggcgtggtggcacatgcctctaatcccagctattccggaggctgaggcgggacaatcacttgaactagggaggtggaggttgcagtgagccaagagccaagatcatgccattgcactccatcccrggcgacagagtgagactttgtctcacaaaacaaacacataacaataacaacaacaaaaaacaaggaagcacaatggctggtaggttctctgtttctctggattctggaagcaacaaaatgtatacctatactgcgctgacccaggtgacttgaaaggctgccagatttgaatgggacctagaacaagaaagaactctataacaggttttggctacaggtgtgagcagccctgccatttgggctataaaactcagcagacccatt

SEQ ID NO: 142095 - DNA, 591 bp, Homo sapiens
gtagtgtgttggaggccttggtaagtcatatgtgagccagagttagggagacaaagcctatgaaaattcaggagtctgctgcatcagtaaacatttttaagagttcagtggtcaaggaaatattacaacattgcctccaaactaaagaagaaatgattgcacattgcatctcctgctgtgaaaaaggaatcacaattagctgggcgtggtggcacatgcctctaatcccagctattccggaggctgaggcgggacaatcacttgaactagggaggtggaggttgcagtgagccaagagccaagatcatgccattgcactccatcccgggcgacagagtgagactttgtctcacaaaacaaacacataacaataacaacaacaaaaaacaaggaagcacaatggctggtaggttctctgtttctctggattctggaagcaacaaaatgtatacctatactgcgctgacccaggtgacttgaaaggctgccagatttgaatgggacctagaacaagaaagaactctataacaggttytggctacaggtgtgagcagccctgccatttgggctataaaactcagcagacccatt

SEQ ID NO: 142096 - DNA, 591 bp, Homo sapiens
gtagtgtgttggaggccttggtaagtcatatgtgagccagagttagggagacaaagcctatgaaaattcaggagtctgctgcatcagtaaacatttttaagagttcagtggtcaaggaaatattacaacattgcctccaaactaaagaagaaatgattgcacattgcatctcctgctgtgaaaaaggaatcacaattagctgggcgtggtggcacatgcctctaatcccagctattccggaggctgaggcgggacaatcacttgaactagggaggtggaggttgcagtgagccaagagccaagatcatgccattgcactccatcccgggcgacagagtgagactttgtctcacaaaacaaacacataacaataacaacaacaaaaaacaaggaagcacaatggctggtaggttctctgtttctctggattctggaagcaacaaaatgtatacctatactgcgctgacccaggtgacttgaaaggctgccagatttgaatgggacctagaacaagaaagaactctataacaggttttgkctacaggtgtgagcagccctgccatttgggctataaaactcagcagacccatt

SEQ ID NO: 142097 - DNA, 513 bp, Homo sapiens
gatttgcatttctctgatgattagtgatgcattatatcatatgcttgttggctgcttatatgtcttcttttggaacatgtctgtttatgtctttcattcattttttaaggggcttatttgttttttagtccagaaatttctgagtcttggttgcaaatgtcagaaaccaatttcaaggtggtttagggtaagtggatttatcaagaacatcctccaggtgccccatagagcsaaacagagcagtgggctggatcacaggagccctaggaggcaaagcattcagggctctcacactctcttaccacttcttcccactccctctctctgccaaggtgagagcaccatggtgagggcaccaaggtgagggcaccatggcagccaaacactcccaagattctactgctgaaaagaaagtctctctggatcccaaatccaaaaaattataatttttgagtatccaccactgaacttaacaatggtgccaggagatcattggaatcatagctaatcacc

SEQ ID NO: 142098 - DNA, 513 bp, Homo sapiens
gatttgcatttctctgatgattagtgatgcattatatcatatgcttgttggctgcttatatgtcttcttttggaacatgtctgtttatgtctttcattcattttttaaggggcttatttgttttttagtccagaaatttctgagtcttggttgcaaatgtcagaaaccaatttcaaggtggtttagggtaagtggatttatcaagaacatcctccaggtgccccatagagcgaaacagagcagtgggctggatcacaggagccctaggaggcaaagcattcagggctctcacactctcttaccacttcttcccmctccctctctctgccaaggtgagagcaccatggtgagggcaccaaggtgagggcaccatggcagccaaacactcccaagattctactgctgaaaagaaagtctctctggatcccaaatccaaaaaattataatttttgagtatccaccactgaacttaacaatggtgccaggagatcattggaatcatagctaatcacc

SEQ ID NO: 142099 - DNA, 473 bp, Homo sapiens
agtgtgagggagggaaaaaaaaggcagcaactggggaactggtttctcactgcagcatgatggtaccccaggggaccatttgaaaaaagaggagtttctttctgccacaccaggggtcgctgcacaagacttcacccccatagctcccacttcacatcatacctttcatcagtggggctgtgacttcagagcttccaggaatgcmgctcccataaccggtcttctcccagctccttgtgctcgggatttgaatgtgtttcctcctccaacctgctggcttcctaagagtagagtcattctccttaaagattggccagcccatcactgatgtgatctagctcagagtgggtcctggaggccactgccggggactgggcctggagtgtggtttctgtgttcgtagccactgtactattccattcttgtgctgctaataaagacatacgcaagtctgggtaatttctgaagaaaaa

SEQ ID NO: 142100 - DNA, 532 bp, Homo sapiens
gtggtgggtggggagaatcaataactttatagtggggaaacctgacacccaacttcaacaacgttatgaaagtcagcatcaataacaatagaacatgttgatagtatgtactgttgacatgatgtgatgaaaatggccctctacctctgtggtcttcttccccaaaacccattttaattgtgataaaagctacccaggcaaatcatgataaaaayacagaacaatttccaatagaggagcatttgacaaaattcttgacaaggacttctgcaagctgtcaaggtcatcaaaacaagaaaagcctgagaaacttttatatccaaagaaatcctaaggagacaggatgactacatgtaacatggtattttggatgaaacagaagaaattttataaaacctaagaatatatgaatatagcatgggctttaattaataatactgtatcaatattcatttactaattataacaaatgtaccatactaatgcaagatgttaatgacagaggaaactgggtattaggtacgtggaaact

SEQ ID NO: 142101 - DNA, 532 bp, Homo sapiens
gtggtgggtggggagaatcaataactttatagtggggaaacctgacacccaacttcaacaacgttatgaaagtcagcatcaataacaatagaacatgttgatagtatgtactgttgacatgatgtgatgaaaatggccctctacctctgtggtcttcttccccaaaacccattttaattgtgataaaagctacccaggcaaatcatgataaaaacacagaacaatttccaatagaggagcatttgacaaaattcttgacaaggacttctgcaagctgtcaaggtcatcaaaacaagaaaagcctgagaaacttttatatccaaagaaatcctaaggagacaggatgactacatgtaacatggtattttggatgaaacagaagaaattttataaaacctaagaatatatgaatatagcatgggctttaattaataatactgtatcaatattcatttastaattataacaaatgtaccatactaatgcaagatgttaatgacagaggaaactgggtattaggtacgtggaaact

SEQ ID NO: 142102 - DNA, 509 bp, Homo sapiens
gccacaactgacttcaatcagatgtgaccagagattatcctttgccaagaatcattttggcttgtagggttcccagcaacctgcccattccctgtcatggaccctccctggaacccagagctcagtctgttggtggagccattcctagtctttcaggtttctgattctcttcctttttttctggttctgggcaataaattagcagtgcagtctcctaggtctcagccctcccagatgtaagcatttttgtgagcatgtcaagcacagaatctctgacaatgggaaacgcagtgggattccaaaacgctggtgccattttccagttggcrttgaatacccacctccctcttcctcattactcacccttgccccatcttccttcatttcaaaaaaaaaaaaaaatcaaatcatatatttaaacagaaaagtcttccttaatagcaaatcctgaaggaagcctccaacaaaatagcaatgttctctccgctttaggagtttggcacacaaga

SEQ ID NO: 142103 - DNA, 503 bp, Homo sapiens
gagagagcctctttcacattcacttgcattcggcccatgaaaaygcaggatgaatgggctttgtgaagtcgtaggaactcacttacatattgaactgtcaggaaggatgtcaccatcagaaattaatacttgtgttaaaaaagttaatatttcacccacccaccttccaaaaagagtaagaagatacctgggtgtgaggaaacggagagagggtaggcaaagggagagaggaagagactatttgagaaggaggtgaggcacctgtttcagccaatgtcgtgtttcggggctggggtcgagggttggagacaggtgcagtttcctccctaccctctatccctctgtgcctggcgtgctcaggccaggacctccccttcctggctggctgccttcttccttccctgacattccttaacacttggttctctgagaactgtaatggagaaatgacaatggtattaacttttcaaaaattgctttaataaactgccaattaataagtg

SEQ ID NO: 142104 - DNA, 579 bp, Homo sapiens
tgctgcctcatggcaaccttcaacttgctcctgtatcttaaagataccagtagattaaaagatagattcgaaggctttattagattcaagttaaaatatgttctggttgaggagaagacttggctgttggtgccatgtatgacacactacatcacatcagtagctatatgatgtctggttatctaacatttgttgggctaaaatatgtcattattttataaatatgtaacaatatttttgtttagtgtttattatacctacattggtatatacgcttttctttcttttattacacttatgtgacaaaggtgacatactacatacatttttctattttctgcttttattttactttggaatatatcctgcaaataattccattcagtgtatggaaatctctttcctcatttttcaaatgtccatagtactcgcccgtgtagacagacatttgaatttataatcttttgttgataaaaataatgtcgyatttaataaaattatacattcattccattttatttttgcagatgtattttggggattgattcctagaatcagtattgctgaattaaagcagga

SEQ ID NO: 142105 - DNA, 418 bp, Homo sapiens
gtgttttcctttccattttggactcctctggaaaataggagaacatgttattactaaaggcaaggcttacaaaaacaaaatacagacgtgtctccagggggtccgtaatgaatactgagatgattaagagagtaaaggcattagaaatyaatggatcaggctgtagggacctgaagaatgaccagtctatgctgaaggccaaatacataaactgaattttgtgcacaacttgctgactgtgtctgattcttgcttgataactaagggtcaaggagtctaatcaaatttgtgctattctattatgcactcagatggaggagattccctttgccggcatttgaaatctgtatggaagtacaccatcagcaaatcccctcgtcatctgtctgctcttctctcctgcctttgcccctaagtg

SEQ ID NO: 142106 - DNA, 418 bp, Homo sapiens
gtgttttcctttccattttggactcctctggaaaataggagaacatgttattactaaaggcaaggcttacaaaaacaaaatacagacgtgtctccagggggtccgtaatgaatactgagatgattaagagagtaaaggcattagaaattaatggatcaggctgtagggacctgaagaatgaccagtctatgctgaaggccaaatacataaactgaattttgtgcacaacttgctgactgtgtctgattcttgcttgataactaagggtcaaggagtctaatcaaatttgtgctattctattatrcactcagatggaggagattccctttgccggcatttgaaatctgtatggaagtacaccatcagcaaatcccctcgtcatctgtctgctcttctctcctgcctttgcccctaagtg

SEQ ID NO: 142107 - DNA, 568 bp, Homo sapiens
gtccatcaatttctgagacacacagaaatcctgagcagtgaggcaatgtactctctgtcttcatgcataatacataccaaataggtgaagtagtatgtaaagtgaattttaattggttataattgtcatttcatttagtaaagtattgtctggagaccaggatatcaattagcactctatggactctgttacttatgaaaatatgcatatagagagatgatgtgctcaagcagcagatatactttaattaagaaaatggtacaataatttaaatacctttaaaatatcaattaattgctaaatagatagattttgagtatcaacctggtaaagtcaaaatcactgtgtctgatttaaatgaacttgaaaaatatgttttagttttgctacctgatttctttttctcaaggcattcacttgatatgctgtaagaaaaattccaacattaaaaaaatgcaccaaaaaacccagagatgtttgataacgatgaaaattttcttttttaactttaagcctcgatatgtatgcakttcatgaaaacagaaaaaaaaacaatattaagccaaga

SEQ ID NO: 142108 - DNA, 606 bp, Homo sapiens
tttattttatgatcagtagaaacaaaaataaaaacaaatctgaaaatacaaaagaagataataaattagaaagcaattgaggtggtgcaacatctgactaatggaatttcagaaaatgaagagatcgttagcaaaaaaaaaaaaaaaaaaaaaaaaagacatttcccctactaaaaaccataaactccagaaataaagggtacaagactttagatttaaaatcctaaggacaaagatcaataactgataaatttcaggacccagggcatgaagacgatttcccaaaattccagaggggtcagggaaaacagctttactagagatatttggaaccaggtggctctaaatttctcaagtgatgatatctgctttgggaatgtcaaaaactatctttacattttttagaaaaaaagtttttcccagagatttcatattcaaacagtaaaacaaggatgctatagtttgaataactgtgtcccctccaacatttaccataaaatatgatcctctgtgtgatggtatgaagaggygtaacctttctgaggggattaagacatgggagcttagtccctgggaatgagattagcacccttataaaaggcttag

SEQ ID NO: 142109 - DNA, 606 bp, Homo sapiens
tttattttatgatcagtagaaacaaaaataaaaacaaatctgaaaatacaaaagaagataataaattagaaagcaattgaggtggtgcaacatctgactaatggaatttcagaaaatgaagagatcgttagcaaaaaaaaaaaaaaaaaaaaaaaaagacatttcccctactaaaaaccataaactccagaaataaagggtacaagactttagatttaaaatcctaaggacaaagatcaataactgataaatttcaggacccagggcatgaagacgatttcccaaaattccagaggggtcagggaaaacagctttactagagatatttggaaccaggtggctctaaatttctcaagtgatgatatctgctttgggaatgtcaaaaactatctttacattttttagaaaaaaagtttttcccagagatttcatattcaaacagtaaaacaaggatgctatagtttgaataactgtgtcccctccaacatttaccataaaatatgatcctctgtgtgatggtatgaagaggtgtracctttctgaggggattaagacatgggagcttagtccctgggaatgagattagcacccttataaaaggcttag

SEQ ID NO: 142110 - DNA, 574 bp, Homo sapiens
cgctttaaactgataaagggattacttctccaagcagtcacagcaatccttaaggagtatgtagctaacaagagtatcaaaatacgagaggcaaaaattggtataactacaagaaaaatagacaagcctacagttatagtggaagactgccaatgcttctattttagtaattgatagatcagacagacataatatgagtaaggttatagttgacctgaagagcaccggcatcaattttatctaactgacatctataggcactaaattcaacaacagcagrgtatacgttgttctcaagttcaaatggaacattcacaggaaaaaccacaatctgggaaactcaacacacattacaaattttaaaagaagataaatcatataaagcatattcttagaccacaatgtaattaaactggaaattaataccagaaagcaagccagagaattcccaaattttggaggaagaaagtatacttctaataacacattagtcaaagaagtctcgagaaaaattaaaacatattttaaacaaaaaataaaagtgctttttatcaaaacttgtggaatagcagaa

SEQ ID NO: 142111 - DNA, 550 bp, Homo sapiens
aaattggactcttctgaatgggtttcatagactttccagaaaaatttcaaaatggagtaggaattgaagagtaccctgaatattcacaatatttgcatgctgcctgttggtcgacatattagataggacatcctgccaccgggaagggagagcaccaagcgtggagcggttctattcttcacttctttctattatttttcaagcaatttgaaaatacctcatttgtatgcatttcctgaatgtcgtatatgttaagattggctacatataagagatcagcctcaaactaaatgacagctttgccaatataagaattgatccaaatccttctatgaaaaacaaaaattgcatttaatgaaaagttaagtgcctagttttatccatctgtaattggaaatggaattaaaacaaattgctacaaacaaggagttgtagtaaaaatgtcaactcagcattacattttttttttccctgagataccaccatccactcataagtggaatcatctgtattgmaggagctgaggggaatgacagaggagtggagagga

SEQ ID NO: 142112 - DNA, 435 bp, Homo sapiens
tcaaagggacaattgtggatgcaaacttcttttattcatttagttttatttaattaatttatttatttttgaaatagggtcttgctctgtcatccaggctggagtgaagtagcaggatcattgctcactgcagcctcaatctamtgagctcaagtggtcctcccacttcagcctcccaagtagctggggccacagccatgcaccaccatacccacttaatttctttctttcttttttttttgagagatcaggtcttgccgtgttgcctaggttggttctgaacttttggactcaagcaatcctcctgcttcatcctcccaaagtggtagctcacttctgagtggccagtatactgacagcaaaaataagcactgatctttaatatagggtgggatgattcactttatttgtcaacttggacagaatatggcaccc

SEQ ID NO: 142113 - DNA, 466 bp, Homo sapiens
gggctcagcagcatggactttttctcaaagggacaattgtggatgcaaacttcttttattcatttagttttatttaattaatttatttatttttgaaatagggtcttgctctgtcatccaggctggagtgaagtagcaggatcattgctcactgcagcctcaatctactgagctcaagtggtcctcccacttcagcctcccaagtagctggggccacagccatgcaccaccatacccacttaatttctttctttcttttttttttgagagatcaggtcttgccrtgttgcctaggttggttctgaacttttggactcaagcaatcctcctgcttcatcctcccaaagtggtagctcacttctgagtggccagtatactgacagcaaaaataagcactgatctttaatatagggtgggatgattcactttatttgtcaacttggacagaatatggcacccttttggc

SEQ ID NO: 142114 - DNA, 435 bp, Homo sapiens
tcaaagggacaattgtggatgcaaacttcttttattcatttagttttatttaattaatttatttatttttgaaatagggtcttgctctgtcatccaggctggagtgaagtagcaggatcattgctcactgcagcctcaatctactgagctcaagtggtcctcccacttcagcctcccaagtagctggggccacagccatgcaccaccatacccacttaatttctttctttcttttttttttgagagatcaggtcttgccgtgttgcmtaggttggttctgaacttttggactcaagcaatcctcctgcttcatcctcccaaagtggtagctcacttctgagtggccagtatactgacagcaaaaataagcactgatctttaatatagggtgggatgattcactttatttgtcaacttggacagaatatggcaccc

SEQ ID NO: 142115 - DNA, 574 bp, Homo sapiens
ccaaactgtgtggcagagtgagactctgtcaaaaaaaaaaaaaacacgggcaacatggtgaaacccgtctctacaaaaaaaaaaattacctgggcatggtggcttgtgtctgtaaccccagctacttgggaggctgagtcaggagggttgcttgagcccaggaggcagaggttgcagtgagccaagatcatgccactgcactccagcctgggagatagaatgatactgtctaaaaaacaaaataaatgctctatgcaaaacttgtatttaaatgttcatagcattattattcataacagccaaaaattggaaacaagtcaaatgtttatcaaatgatatgaatggataaacaaaatgtggtatacccatacaatggaatattatttgtcaataaaaaagaaatgcagtactgattatggtgtaatatggaagaaccttaagaacaytgtgttaggtgaaacaatccagacatagaaggccacatgttgtacatattgtgtgatttcatttacatgcaacatccagaataggcaaatccatagagacagagagtagatcagtggttgcttaggaa

SEQ ID NO: 142116 - DNA, 551 bp, Homo sapiens
cagggagaaagcatcagaaccctccaggcaagatcaggtgagggcctgaatgaaggcaaaggtggtcaggcaggggtagatttggagggggaagaaagaacacagatatgaatgactgactgactgggaaggtggaaaaaaaggacagaagaggggagaaagagaggtaggcaggtgtcagtaatakatctggctggacaactgggcagatgatggtgctttttgctgctagggagtgcagaggaggaagtttagtgaagcatggatgagaaaaggagaaacttcgtttggaaaatgttgaatttggcatgttcatggggcagtagtaacaaggcactctatagatcagaagagacactgggctggagatatgcaatttggctttaatgaccaagctactttaacaactgtttactttcagaccaaaccatgattaaagattaccaatatactgcggaagagcaacactggccgtaaacctccctaagggatagagattagcaattactctcacgcacacttcttacatacctagatgatcacatcttagc

SEQ ID NO: 142117 - DNA, 486 bp, Homo sapiens
ttgcttcctctggcattaggagtgcaggttactgtccacacagccatcactgacttggggtgtgggggatggtgggcaggcaacttaggatgcgatagcactctctttaccacaaagcagcaacttctttctttaccaagccttgccctagattttataagttttttttttttactagattccagagttctgcaaaagttgagtctgacagtatttaccagctcattaattgcattcattgctttttgcagggacagtgccttggagttccttactctactatttttggtggtatcaccccaaatgtagggatttctcygaaggctatcattaaccggaagtaagaaaattaggaaggaagaagttgatttaggggtatagactggattatttttatttggacatgagtgttgggtttgaggtactgatggcacaatctgtgggtgtctagtgacagttggaattgtaatgcctgaattccagaaa

SEQ ID NO: 142118 - DNA, 619 bp, Homo sapiens
ctctttcattggctaccctctactgacttggtcaagcttcgtgtcaaagcccttcaccacatgatcaactgcttccctaccccctgcccatcagcccttgcctctcctgttccgcaaacacacatgtccttttatacaatgaccagtgcttgtactcagccacatttggccacctatctggattcctctattacttctttctcaatccttttccaggtactactccaaaagaaaagttatttatttcccacagaagtcattacagaagggcaattttctggtggctctgttaagtgtataaatcctcttgcacaacaaagctgcttacgtgggcagtaaatatgcagttaatgaggcctcaagtgggaggcacaatttatggaggcacaatcagagtagggagcagcagtcctggtgccacctcttcacttccagagcagctttccttccaggttcccaatgtcagcatccccaacacctgcacaccctgacacagacagtcaggaatgacttgmgtagtcaaagggcatgacagagagcagcatgtagaaagcagttggcaatttttcaaatataccagtaagggttgtttgtgttcacaatactctggctttgcagg

SEQ ID NO: 142119 - DNA, 582 bp, Homo sapiens
ttaattttgcggatggtacaattttacccggtttcccataattagaaaatgggacgaggaaatgccataaggttaagctcgttcctctgagcagattcttttctgcagcagcaggtccccctataaatatgggtctgtgataatctgagtaatggcccccaaaagatgtctgtgtctcagtccctggaacctgttactttacatggtcaaagagactctgcggatgtgattaaatgaaggatcttgagatggggagatgagcctggatgggttctccartcctcacaggagaccccacacccctttccacttccagaccacgaggggaggggctcacagactagaaagccctctgcaaatgctaccctgagcccatatcactattgcaatcactggtaagaatctggggacaaaggtgagtgggatctcagacagatatctctccaagttgggatataactgaaatcggcactgattacacctgacattggatacccatataaccaatggtttatgatcacagaacagcaaactctcccatcaaaatcagggtaaatataccaagatatttgtagaattcaa

SEQ ID NO: 142120 - DNA, 428 bp, Homo sapiens
atgtccctgggaacagccatttatctttctatgcctctgtttgcycatttgtaaaatgaacaataacagcacctccctcacaggttggctgttgagaattaaatgagataatacacaaaaagttgtcagcacagagcctggaacacagccccaaaagtgtaagattaagtgaccccatctccactctttgattacctgggtcattataaactgtaacaacaaagcaaaatcacttgaggtcaggagtttgagaccagcctgccccatatggtgaaacccccatctctactaaacatacaaaaattagctgggcctggtggcatgcgcctataatcccagttactcgggaggctgaggcaggagaattgcttgaacatgggaggcagagattgcagtgaatcaagatcgcgccactgcactccagcctg

SEQ ID NO: 142121 - DNA, 428 bp, Homo sapiens
atgtccctgggaacagccatttatctttctatgcctctgtttgctcatttgtaaaatgaacaataacagcacctccctcacaggttggctgttgagaattaaatgagataatacacaaaaagttgtyagcacagagcctggaacacagccccaaaagtgtaagattaagtgaccccatctccactctttgattacctgggtcattataaactgtaacaacaaagcaaaatcacttgaggtcaggagtttgagaccagcctgccccatatggtgaaacccccatctctactaaacatacaaaaattagctgggcctggtggcatgcgcctataatcccagttactcgggaggctgaggcaggagaattgcttgaacatgggaggcagagattgcagtgaatcaagatcgcgccactgcactccagcctg

SEQ ID NO: 142122 - DNA, 428 bp, Homo sapiens
atgtccctgggaacagccatttatctttctatgcctctgtttgctcatttgtaaaatgaacaataacagcacctccctcacaggttggctgttgagaattaaatgagataatacacaaaaagttgtcagcasagagcctggaacacagccccaaaagtgtaagattaagtgaccccatctccactctttgattacctgggtcattataaactgtaacaacaaagcaaaatcacttgaggtcaggagtttgagaccagcctgccccatatggtgaaacccccatctctactaaacatacaaaaattagctgggcctggtggcatgcgcctataatcccagttactcgggaggctgaggcaggagaattgcttgaacatgggaggcagagattgcagtgaatcaagatcgcgccactgcactccagcctg

SEQ ID NO: 142123 - DNA, 465 bp, Homo sapiens
acaaaaagttgtcagcacagagcctggaacacagccccaaaagtgtaagattaagtgaccccatcyccactctttgattacctgggtcattataaactgtaacaacaaagcaaaatcacttgaggtcaggagtttgagaccagcctgccccatatggtgaaacccccatctctactaaacatacaaaaattagctgggcctggtggcatgcgcctataatcccagttactcgggaggctgaggcaggagaattgcttgaacatgggaggcagagattgcagtgaatcaagatcgcgccactgcactccagcctgggggacaaagtgagactctgtctcaaaaaaagaaaaaaaaaaaagaaatgggaatcaggagccaaaagttaatctgtaagaacataagctctacccctccctgaagctttggatagattgttggattttcttcaactgtgaaggggagagg

SEQ ID NO: 142124 - DNA, 465 bp, Homo sapiens
acaaaaagttgtcagcacagagcctggaacacagccccaaaagtgtaagattaagtgaccccatctccactctttgattacctgggtcattataaactgtaacaacaaagcaaaatcacttgaggtcaggagtttgagaccagcctgccccatatggtgaaacccccrtctctactaaacatacaaaaattagctgggcctggtggcatgcgcctataatcccagttactcgggaggctgaggcaggagaattgcttgaacatgggaggcagagattgcagtgaatcaagatcgcgccactgcactccagcctgggggacaaagtgagactctgtctcaaaaaaagaaaaaaaaaaaagaaatgggaatcaggagccaaaagttaatctgtaagaacataagctctacccctccctgaagctttggatagattgttggattttcttcaactgtgaaggggagagg

SEQ ID NO: 142125 - DNA, 465 bp, Homo sapiens
acaaaaagttgtcagcacagagcctggaacacagccccaaaagtgtaagattaagtgaccccatctccactctttgattacctgggtcattataaactgtaacaacaaagcaaaatcacttgaggtcaggagtttgagaccagcctgccccatatggtgaaacccccatctctactaaacatacaaaaattagctgggcctggtggcatgcgcctataatcccagytactcgggaggctgaggcaggagaattgcttgaacatgggaggcagagattgcagtgaatcaagatcgcgccactgcactccagcctgggggacaaagtgagactctgtctcaaaaaaagaaaaaaaaaaaagaaatgggaatcaggagccaaaagttaatctgtaagaacataagctctacccctccctgaagctttggatagattgttggattttcttcaactgtgaaggggagagg

SEQ ID NO: 142126 - DNA, 448 bp, Homo sapiens
ctgaaaacagaaacaaaaacaaaacttctggacctgaaagcatgtaaastttttaaacaaaattcaattgctttctatataccagtcataaataattataatttgaaactttaagaaaattaataccatttataatagtaccaaaatttgaaatacttaggtataaatctaaaacaagaacgttgtctgtatatgaaaaactataaaactcttatgaaataaatttttaaagctctaaataaatggaaagatactccatgaatgaagtttggaagaatcaatatttttaggatgtcagttctttccaattttattgacatgttcaatgaaattccaatcaaaattctagcaagttattatgaaggtatcaagaaactgactcttaagtttatctggaattataacaactaaactagccatcacaatactgagaacagagttgggagtt

SEQ ID NO: 142127 - DNA, 577 bp, Homo sapiens
ttgttactgttaagcttttaagagttctttgtttattttgaattatattactttatcagatacaaattttgcaattattttctcacagcctgtggcttgtgttctcattctctttttgacatatttttcatttaaagatcaatttttttcctcatagattatgactttgctgttgtatctaaacagtcattgccaaaccaaaggtcagctagattttctcccakgttatctcccaggagttttatttggtttttgatccattttaagatcttcatgaacggtccaagacctatgtctagattcacgtctttgcatttggatatctacttgttctagcaccatttgtttaagagtttatccttttcccattggattctgtttactgatttgtcagagataattgactatgtttgtatctctccctttcatggctctttattctgatacattgctctttttgtcttttcttttgccagtacaaatctgtcttgattactgtagctttatagttagtcttgtggttttgtagcatcagtcttctgacttagttcttcaatattgggttcgctactgtgag

SEQ ID NO: 142128 - DNA, 622 bp, Homo sapiens
atgtttactactcccttaagaacctcttgtaaagcttgtctagttgtaacaaataccatcagcatttgcttmtctgaacaggattttatttctccttcacttatgaagcttagtgatatggtttgtccccacccaaatctcatctcaaattgtagttcccacaatccccatgtgttgtgtaagggacccagtgggaggttactgaatcatggaggtggttacccccacactgctgttctcatgatactgtgttcctatgagatctgatggttttataagggttataaggggcttttatctctttgccgggcacttctcttcctgccaccatgtcaagaatgatgtgtttgcttcccctgctgccatgattgtaagtttcctgaggccttcccagccatgctgaactataggtcaattaaacctcttttctttataaattactcagtctcagatatgcccttattagcagtgtgagaatgggctaatacacttagtttgaaaggaagtgaaattgttgattggaatttcttttaattatgctgaaaataggcctccaatctctcccagcttgtaatatttctgctgagaggttcactgccagcctgagcagggtccctttgaa

SEQ ID NO: 142129 - DNA, 569 bp, Homo sapiens
gatttcacttttctgactactgagccctcactcacccagcctccctattaccccaattttcctttaacattctccattacctctgtacaaggttcagttcatactgggcttttcccaattacaaaggtattactgattaaaatctgtccttaccactaaaactgtggggtttggctttatcttttttgtttattattatggttatataatagttatactctgtgcctacacagcacacagtatcgttatagtgattttcacactgtgttgaaattatatgcatgactatatctacagctggattatgagctacttatggaaagtagctacatcacatatttctgaactgtcagggtttgatacagtggccaagatayagtaggcttttagtgaaagtcacaggttgagcccaaactggaattcaaacatgtctggtacactgatgaggtaatctcaggtttacctgcatcatcaaatatctcgtttactggcaagatcaaaggtttctttcttaaggaaatcggaaatcaatgagacaaactacccagaaaaagaattcaccagagtga

SEQ ID NO: 142130 - DNA, 643 bp, Homo sapiens
aatagctacagaaactcataaaatttattgaaattatattcttaacttaccagattcaaaaatttaatgcaaaaaccagttaagaaagttctaaagaatttttttctgaagatttagttaattataatctcccatcagagaaaattgccttcatttattcyttacaaaggtttgactctttttgtgtgttgttctatattcctgcatggttaagagtttagcagcacaatgtgaagctaaatcttctgaggaaagcatttcgaagtttaatattattacctgcagatttaaattacaatcatttcctaagagtttcacatttatttccatattctttaggcaaattacctatcccaatgtttgaatgagggaaaacaagatatgaaaaagacaaggaaggacaaacttagcaaagatcttcctcatacagaagaaaaatctccctttttccatggatggccatccccgaaatggtgtttctccaaggaagtagtaaaatagagttaccaaaatgtaggcatatgtgtcctgccgtttagttaactgctatttttcttcaactcagctgttactttcttaggaaatactttcctattctctgtgactatattatgttcttgaatattgttctcttataacacca

SEQ ID NO: 142131 - DNA, 529 bp, Homo sapiens
tgaataagttcgtccctgaggagagaaaagggagtattgaaaacaatttgagcagaagtgaaaaattgcagatgattattttgtaaaattaaagcataataatttttttattagataaatttacttctgggtgggaagttttaggaacaaacatcaaaatgtcttctaagaaatataaaatacaaacatagtggcagcctagatatcttggctraaaggactctgtctcctcaaatgacactaagaccttatttcatctgattcttttattccctcatgctccttggaagtggtactatgagttggacatttgtccccaaacatgtacagctttctgtcttttgggtatatggcagaacttctttttttatttatatcctttaaagctgacaatggcaaaaattcttcctttggccaatagaatgtgattggaaacaatacatattctttcccagaagagactctaaaagcagatatgtgatttgttcattttctgcctcttgcttcagcaattatggaggcattgaga

SEQ ID NO: 142132 - DNA, 564 bp, Homo sapiens
ttaataattttatatggttgaaagtaattttactccagatggtgataggtgcaaatgaagtgatacaaggaaaaataggaaggtaacagaattgctgttatttgagcaaatatgggaaaaaatatagggaagttttaagtatctaggtgaagacaatcccaggaagaagaatgacaagtacagtggtcttgaagtgggaaaaggtccgatctgtttaaacaggaaaaggcaaacaaggtcaaagtgagtaaggagatttgtagtagatgctgagattagagaggtaataagtgggtgacagactcaatatatttgtgatgttcagtacattagctactactgagaatctgaaatgcagctagctcaatatgagatattacatacatgtaaaatacacaccaaattttgaaggtgtgaaaaaaagygttacatatttaaataatttttgtgctgattacatgtagaaatgataatattttgcattgagtgggttaaagtgtattacaattaatttcatcattttctgtttactttttaaaaaatatggctattaacatgactcat

SEQ ID NO: 142133 - DNA, 436 bp, Homo sapiens
aattgaataatacattcatttatatgggcaaagagcttaattcttgttattaaattgtaaattgccaacatttaaagacccatggtattcaattttcttaaactaattaaaaacaaataggagttattttgttttcaccatctttataaaaatccctgattaacatgccagatgccacagctcttcaagcctgatgaaggctccctggagttcgtgtcctttgatcagttgttgccaaagaagtgaagcagattgtgcaagcctgcagaatcatatgatctcattcttcttggggaattgctgctataagaaaagtcaactgccttgataaaaaaaatttacaattataaaatatccagatactgacaaattttaaacgcasgtcagtgatatggtattccatgacattctagttataaagcctccatctcaattc

SEQ ID NO: 142134 - DNA, 557 bp, Homo sapiens
ttgttgacattgttgacaagattaaattggttgccatatgtaaagtgcctagcacaaggcctggaatatagcaagcacccaatatgcttcctaacaattcctctttcatctcctctcttcttcccttccttccttaaagacatatgtatggatttaagagaaaggaatcctgaaaaaataagatgacaagtattttctacttcaaagaaaaatggcaagtctgtgcaagttttcccatgtttgccttaagaatagattttagttacggaaaatttattgtaccaaacccttggcctagtttgtaaaaccaaaggacaaaattgaatactttgcaggcattttagttatctactgctgtatagcaaaagaccctcaaatttagcagcttaaattaaaaaacacttattatctcacaagacaattgatgagggtcagacatcaaacagggtttagctgattggttctggctcagaatctctyatgagctgcagtcaagccagccagggttgcagtagtataaaggggctgagaatctatgtccaagttcactgaagttc

SEQ ID NO: 142135 - DNA, 368 bp, Homo sapiens
gtatctggtggaagaaatttctaagcagcaaagcattcaagaggtaacctgacttatgctgaaagcatccaattataygcgttcacaaagagatgctttgaattggaacttagcaaagcataaaggtttgaaaaatttgcagcctgaccatgtggtagaaaagaaaaacccattttctggggaggaattcaattttgctgcagaagtttggataagtaacaaggagccaaatgttaatagccaagacaatggggaaacatgtctgcagcatatgacaaagaccttcacagcagccccttccatcacaggcccagaggcctatgaaggacaaatggcttcatgggccaggcccagggtcccactgccct

SEQ ID NO: 142136 - DNA, 429 bp, Homo sapiens
aaacacagttttaacattctgcataaaataatgattataatatctaatttgaagagttaaaatggaattaaatgaaaaaatagaataggtgtgaacgatatgattagaggtaaattactctaaaatccttatgttgtttgggaggagaatgatgttgattatattaaactttttgaagttaagcatgcatgttaaaattctaggtaacttctgaataaatacttctaatatagtagaaggaaaatgaggagaaactcctatttaaaacatttgctaaaattcagcattacttcataataaaagccctcaacaaactaggcaaacaaggaacatacctcaaaatatgccatctatgacaaacccacagccarcatcatactgaatatgcaaaagttggaaccattccccctgagaaatggaaaaagacaa

SEQ ID NO: 142137 - DNA, 542 bp, Homo sapiens
ccatctttgcagccttttgggtcactcaataaataggccacagtaacactcccaaatgaggaatgtgtgttctcctaaatccaaataggcccacgaggcactgtgcctctttcctgttgtaggaagggccaaatgcagcaatttacccttcaccttagaaggaatatcttgacaggtcccacaacactggacccctagaaattttactgagttagcatgtccctgtattttagttgaatttatttcccatcctctggcacacaaacrtctcaccaataagtccagtgtgtttgcactccttgatcactggatccaatcagcatcatgacgttaatgtaatgaaccagtgggacatcttgcaaaagcaaaaagcaatcaaagtctctccaaataagactgtaacagaaagccagagagttgatatacccatgaggtaggacaataaaggtatattactggccttacaggtgaaggcaaattgctctggtaggccttatgaacaggaaaggagaaaaaggcatttgccaagtcaatggctgtat

SEQ ID NO: 142138 - DNA, 602 bp, Homo sapiens
atctgcaagctgaggagcaaagagagctagtctgagtcccaaaactgaagaacttggattatgatgttcgagggcagaatgyatccagcacagtaaaagatgtaggctgggaggctaagcctatctaatcttttcacatttttctgcctgctttatattctagtcattctagcagctgattagatggtgcccacccagattaagggtagacttgtctttcccagcccactgactcaaacgttaatctcctttggcaataccctcacagacacacccaggatcaatactttgcatccttcaatccaatcaagttgacactcagtattagctatcacagttaccatataaaatatattgccttttatctagccaccagctcataagtgaatatcatatattactttttagtttttatggaagatctctacttccttgttcaaattcctgtgtatgtgaaaatcgactaatttttacatgaggccctaatcagagtaatttaaagcaaaggcttatttttcactcatgctgcacattcatcttgggtcagccggcagtttttctgtactttaacctcttttagggttgtaggctgctagagattc

SEQ ID NO: 142139 - DNA, 602 bp, Homo sapiens
atctgcaagctgaggagcaaagagagctagtctgagtcccaaaactgaagaacttggattatgatgttcgagggcagaatgtatccagcacagtaaaagatgtaggctgggaggctaagcctatctaatcttttcacatttttctgcctgctttatattctagtcattctagcagctgattagatggtgcccacccagattaagggtagacttgtctttcccagcccactgamtcaaacgttaatctcctttggcaataccctcacagacacacccaggatcaatactttgcatccttcaatccaatcaagttgacactcagtattagctatcacagttaccatataaaatatattgccttttatctagccaccagctcataagtgaatatcatatattactttttagtttttatggaagatctctacttccttgttcaaattcctgtgtatgtgaaaatcgactaatttttacatgaggccctaatcagagtaatttaaagcaaaggcttatttttcactcatgctgcacattcatcttgggtcagccggcagtttttctgtactttaacctcttttagggttgtaggctgctagagattc

SEQ ID NO: 142140 - DNA, 576 bp, Homo sapiens
agatagaaaatgaaagtttttaccacaggctgggcatggggaaagaaatagagagatgaagattgaaagatacaaaatagcaggtatgtaggatraacaaatctacagatctaatgtataaaatgaggactaaagttaataaaacaatttcactggagatttttgttaaataaatagattttaacttctcttgtcatttaaaaacagtagttatatgagacgatagataggttaatccactttactatagtaaccaccttactttctctacatattccataacataatgttataaatctcaaatatacacaataacatttattttaaaaaataaagtgaagtatgagagacatgctctcctgttggcctagaagaaaatggaacttgtcatgagttctacagctacaaaaaaatgaattctgccagaaaattaaatgaatttcaagaggtcctcaagttgaagataagaatgcagccccagataacactttgattcctaacagttttatttcagctgtatgagaactgagcagaaaatccagccaatctatgccatgactattgacccatggaaac

SEQ ID NO: 142141 - DNA, 576 bp, Homo sapiens
agatagaaaatgaaagtttttaccacaggctgggcatggggaaagaaatagagagatgaagattgaaagatacaaaatagcaggtatgtaggataaacaaatctacagatctaatgtataaaatgaggactaaagttaataaaacaatttcactggagatttttgttaaataaatagattttaacttctcttgtcatttaaaaacagtagttatatgagacgatagataggttaatccactttactatagtaaccaccttactttctctacatattccataacataatgttataaatctcaaatatacacaataacatttattttaaaaaataaagtgaagtatgagagacatgctctcctgttggcctagaagaaaatggaacttgtcatgagttctacagctacaaaaaaatgaattctgccagmaaattaaatgaatttcaagaggtcctcaagttgaagataagaatgcagccccagataacactttgattcctaacagttttatttcagctgtatgagaactgagcagaaaatccagccaatctatgccatgactattgacccatggaaac

SEQ ID NO: 142142 - DNA, 477 bp, Homo sapiens
tatattgtacttataatatagttcatagttgggtaatgtgatacctccagatttgttctttttgcttagtcttgttttgactatgtgggttgtttttggttccaaaaaaaatttaggactgttatttctagttctgtgaygaatgattgtagtattttgatgggaattgcactgaatttgtagattgtttttgggagtatggtcattttcacaatattgattctatccatccatgagcatgggatgtgtttccatttgtttatgtcatctatgatttctttcaacagtgtttagtagttttccttgtagaggtctttcacctcctgggttaggtatattcccaagtttttttttgttttttgttttttgttttttgcagctattgtaaaaggggttgagttattgatttgattctcaggttggttgctgttggtgtctagcagagctactgatttgtgtacattaattttgtatcct

SEQ ID NO: 142143 - DNA, 317 bp, Homo sapiens
agagaaatgcaaaatgtactggaaagtctcagcaatagaattgaacaagccaaagaaagaaattcagagctcgaagacaagttttcaaaataacccacatcaacaaagacaaagaaaaaagaataaataaaaatgaacaaagcctccaagaagtttgggagtatgttaaatgactgaacataagaataattttttttttaatttttttttattttattttttttttttttaatttttttttttaattgttcctaagaagagaaatctaaaagcttggaaaacayatttgggggaataattgaggaaaacttccccag

SEQ ID NO: 142144 - DNA, 477 bp, Homo sapiens
aataaaaaccacagtgagatatcacttcacaccttttagaatgaatgctataaaaaggcaagagataagaaggatagagagaaaagggaacccttgtacactgttgatgaagtgtaaattagtacagccattatggaaaacagtacgaagtttcctcaactagccatagaactaccagatgatccagcaattccacttctggatatatayatttaaaggatatgatatcagtatttcaaagagctatctacacttccatgttcattgcagcattgttcacaacagacaatataatggaattggcctaagtgttcactgatagatgaagagataaaatgtggcatatataaacaatggaatactaatcagatttgaaaaataaggaaatcctgtaatttgtgacacagggatggaccggaaggacattatgctaagtgaaataagctaggtacaggaagataaatatttaatgatctc

SEQ ID NO: 142145 - DNA, 604 bp, Homo sapiens
aatgttgattgagaaccgattataacagaacaggtctgtcatagaaacaggagatgaggcaatcaaaagacaaactagctcactccttcaaggagtttacattcatcagaggaaaccaaacagtcaataggtaaactaagaaataaactagttgttgtaatcagttttataacataaataaaagaataatgtgatggagaacgattgcatgaggtcacaggaaagtagtctaatataggctaaatgttcagcaaagycctcttaaaaggtgtatttaagccaaatttgaataaggagaaagaactagccatttaaagattcaaggggaaggtttcatgaaagggaggagtaagtgcacatgtttgagagggaacaaatattggctactagaagaatagaaggaagaactctattagtcccagataacaagggacatagtgccaggaggtgaagtcagaggaggaggtaggtatcaggccagggaagaattacaagtcatgacactgagttagagtttattctaaatgcactgggaagctattggagggttctaggcagtggaaatggtttatccaccattttggagaagttagttcctccacaa

SEQ ID NO: 142146 - DNA, 619 bp, Homo sapiens
gaatctcagcaatggatagcaatagttaaggtccagagatcaacaagcacattttttttttcctctctggctatgaaaagaagaagcactttttttttcctctctggctatgaaaagaagtaaccttaaaaatttgctacaaataaaaattgcaagcatctgaaatattcattcacattcccccaagataatttcacatagagcataataatttgtatttgaccctctgcctctgaggagttctacttacagcttattaactaataatcaacttgcagaaagctgaaggtattgtgtgccttgttggcaattatttcatttctaataaattcctaattaataattttctgcagttgaagacattgtctaaactcamccaagactcaagcttatataacaggattttttcccacattttatctattgagatgtagttgatacacaaaaaattgcacgcattgactgtgcaattgatgagttaggacatatgcatagacctatgaaaccatgaccataacaaagatagtaaatatatatatcacctccaaaacttttcttgtgttcttttgtgggttttgttttttgcttctttttttctttttcaaaagaacaaaacatg

SEQ ID NO: 142147 - DNA, 410 bp, Homo sapiens
ttctgaaatctctgctatcagactgaggctcaatttgggagctggggtgttctgtctgttattcctggcttttggccttcatcttaaccaagggttcacactttcttcccccaacaccaaagaggaaagtagcttggtgggggcagatttatctgcctcactttccataactctctgcccatcaggttgctgacattgatagctctcccagtaaggaggaggaggaagaagatgatgacaccatgcagaataccgtggttctcttctccaacacagacaaatttgtcytaatgcaggtaccatacagtgagacctggcacactgaacattgtgtatgtgtgtgtttggtgagaggatagatgggaaaactggacctactttggggatacccagctaatgagaaaacagac

SEQ ID NO: 142148 - DNA, 553 bp, Homo sapiens
gccaataaaagtcttgcttccgctgttcttcatgtctccaagtccattctttgggtttggatgagtaaatgagtgtttctcacaggcgtgaaccaacatcccaccagaaygttattggtagtaacccgtcatggtttctttgagccccaggaacaattattatagcctagaatttcagatgacaacaaatcacagctccatacatacggctgcacacatacagcccctcagggcatattttccttatggactgtacccctagttcagttttaagcaatctggagactgctccaacattcactagagagttaaagactaacgtgttgaaattttgccaaaaaaaaaaaaccaagaaggtgtatgagtctgttctcatgctgctaataaagacatacccaagactggtaatttacaaaggaaagaggtttaattgactcacagttccacatggctggggaggcctcacaatcacggcacaagatgaagaaagagtaaaggggcttcttacatggtggtgggctagagagaagtgagagccatgcaaaaggggttt

SEQ ID NO: 142149 - DNA, 553 bp, Homo sapiens
gccaataaaagtcttgcttccgctgttcttcatgtctccaagtccattctttgggtttggatgagtaaatgagtgtttctcacaggcgtgaaccaacatcccaccagaatgttattggtagtaacccgtcatggtttctttgagccccaggaacaattattatagcctagaatttcagatgacaacaaatcacagctccatacatacggctgcacacatacagcccctcagggcatattttccttatggactgtacccctagttcagttttaagcaatctggagactgctccaacattcactagagagttaaagactaacgtgttgaaattttgccaaaaaaaaaaaaccaagaaggtgtatgagtctgttctcatgctgctaataaagacatacccaagactggtaatttacaaaggaaagaggtttaattgactcacagttccacatggctggggaggcctcacaatcacggcacaagatgaagaaagagtaaaggggcttcttacatgstggtgggctagagagaagtgagagccatgcaaaaggggttt

SEQ ID NO: 142150 - DNA, 506 bp, Homo sapiens
cctaggatagcctgtcactgggagagctgacttttcaagcctctgtgatttggtttggtttgggttgggttgggttgcgttttttcttacctttcttgccatagatcagggtctcacgaacctcttaagagtcaatggcccgtccactatcagtgaagcartatatatatttttttattttgtttatttgttgttgtttgagacagagtcttgatttgtcactcaggctgcagtgccgtgtctcgatcttggctcactgcaacctccgcctccctggttcaatccattctcttgtcccagcctctccagtagctggtattacaggtgcataccaccacgctcagctaattttttttttttttttgtatttttaatagagacaatgtttcaccatgttggccaggctggtctcgaactcctgacctcaagtgacccgcccgccttgtcctcgaatagtgctgggattacaggtgcgacccaccacacccggctgcaatgtttgtttt

SEQ ID NO: 142151 - DNA, 459 bp, Homo sapiens
tgaagcaaactctcaatcattcattcatggttgcatgcattcatgaacctgcactgtctcacatggtagctgccagccatgtgtggccaccgagcacttgaaatgtggctgctgctgggtactgaaatactatttgggacatattggmttaactaacatattaatattattaaaattaattacacctgtatcttttttgctttgtagacaatttcaaattacctatgtggctcgcattttatttctattggcaatggcattaaactaacatttgcgaatgcatgcagggttgcaagggcagtagcggctaccgttgacagagtgcggtgactcagttcatcctgacaaaccctgagaagtgcattctgtgcgtatttttatttgacaggtaagaaaaaggaggctcggagaaggggagcggcttgcccaaaggcacacagctctggattgtggcaggcg

SEQ ID NO: 142152 - DNA, 551 bp, Homo sapiens
tagtttacttttttaactggtgagtttggatatttctttatataytctagcagccagtatttggtcagacatgcggttggcaaatatgttttcccagactgtagcttgtcttttttatcatcttcatagggtctctcacagagtaaaagtgtttaaccttgataagttttaactgataaggtccaatgtatctatttttctttgaatggactgtacctttggtatcatctaaaaactctttgctcagccctagatcccaaagattttgccatattttttttcctaaaagttttatgtttagcatttaactctgtgacctgttttttttaaaaaattcattaatttaaaaaaatcaatgaaaatttcttttttaaattgtatgttacgtttttatttatttttaattgtgataaaatatacttggcatgaaacttgccatgttaggcattcttgggtgtgcaccccagtggcatcaagcacactctcactgttgtgctgccatccccactttccatctccagaactttaccatcttcccaaacgaagactct

SEQ ID NO: 142153 - DNA, 551 bp, Homo sapiens
tagtttacttttttaactggtgagtttggatatttctttatatactctagcagccagtatttggtcagacatgcggttggcaaatatgttttcccagactgtagcttgtcttttttatcatcttcatagggtctctcacagagtaaaagtgtttaaccttgataagttttaactgataaggtccaatgtatctatttttctttgaatggactgtacctytggtatcatctaaaaactctttgctcagccctagatcccaaagattttgccatattttttttcctaaaagttttatgtttagcatttaactctgtgacctgttttttttaaaaaattcattaatttaaaaaaatcaatgaaaatttcttttttaaattgtatgttacgtttttatttatttttaattgtgataaaatatacttggcatgaaacttgccatgttaggcattcttgggtgtgcaccccagtggcatcaagcacactctcactgttgtgctgccatccccactttccatctccagaactttaccatcttcccaaacgaagactct

SEQ ID NO: 142154 - DNA, 459 bp, Homo sapiens
ggaattccaagccattgggtctcaacctgtgagatgccatggaaatggggcctgcaraatgatgccacttggctccccagactcagcccccttcctagggacatgcacagatgaatcttctgccttgccacagatcctggggctggagtatgcaaaactcctgggtgtctgtgtgtgcctgagtggccactctgccaagactccacacaggccatgtatcgagcccaagaccctggtattgtggctcatgaggggatctcctgatccacagcttgcagagatccatgggatgagtgtaatttctggggaagggtcacgcattgactcaccacttcccttggctgggggtgggggttcccttggcttggtgctgctcccaagtgggtcatcaccccaccccacttcttttcattctctgtgggtcaagctatttgcttagtcagtcccaatatgagaacc

SEQ ID NO: 142155 - DNA, 620 bp, Homo sapiens
taggagtattaatttaagctgaccaaaaaaagaggacccagatactcgtttccaaagatgttttgaatccacctattttcaaaaggccaaatttcattttacagctcttgtgaaaccaggcaagcagtgtaaattttaaaatgcagcagtgggatatcttcaaatgtagcagtgagatttttaaaatgtagttgtttcaaaactgatcagtgaccgtctaaaatacgggctccttgaggacatcctgcgcctggttcatcctttttgcactctcaaagtctagccttcccagatgggacctcagtcccagcccccctacactgccatcccccagatctttagggcagtrgggttcattgacaaggttgcaggctacaaacttggcaaagtttatactaacacctcattccatcccacctcccatcttaaaaaggaaaccgttaagtatcttattctagtgacttcaataaaggaactaatttataagacagccaagaacaattaaagtcataaagggccaaacattttattttcatctaagaaccgtttgcaggggtggtccgatcttttggcttccctgggccacactagaactgtcttgggccacacgtaaaatacat

SEQ ID NO: 142156 - DNA, 579 bp, Homo sapiens
ttagaaaactagccaacaaaatcattgctttggtaaacaaatttgaaatggctaattgaaagtacattttacagctggcaatataaagttatctatcagcagcactggacagttcattttcttctcttggataaagtttatcacttggcttcaaggacatcactcagttttcctttacatctccagtgtctcctctatgaggtgctttctcttctctccaaacttttaatgttggaatgccccaagtctttgtctttggctctcttctttatctacactcattcccttgttgatatccagtctcatcacttttaataacatctatatgccagagtcccaaatttatacccccaacttatatccaactgcttactgccgaagaataaaacactgaagttaaaaaataataaacataccaggcaagggaacacttactagtaaagccatttactgagtagttcactaraggtttaagtctgaggggattttaggtcataggaaaaaaaaaaaaaaactgaaaaagaacactcggatggtcagaggagtctgtaattcatacacaataggttttaacaaatt

SEQ ID NO: 142157 - DNA, 616 bp, Homo sapiens
ttgtagctatattgtgtactgtaaggtacacaaattcaatgtgtgtatgtatggatatatatacaatgaaatattacaaccatcatttctgcatgaaggggatcaacaagccctgtctattgtaagtcctctagaaccagtatggtgatgataaaaaaaactagtgcttcctatttgtagcagaatatgttttctaaagagagctgcattaatatacatcccatttcacatactcttacaatgtgatgttggcactcctcaattgagaggtgggggtctagcttctcttccttagcacataaatgagccattgattacagcaatgattcagtgtgacttcaaggttagatcagaaaaggtgataaagcacctgcttgcatctctctcgagaatgctcatccttggtctccagacagtattctacaaggaaacccaaactggcccataatgagagatcacatgaaaggcctatgtggagaggacctcagactatattcttctctgtgtcctttataaatttctgacccacagaatttgtgaacataggccaggcgcagtggctcacacytgtaatcctagagccttcggaggccaaggcagggggactgcttgaacc

SEQ ID NO: 142158 - DNA, 576 bp, Homo sapiens
aagcttaatttctgttttgtgtgctctggcacagaaattacacatcagtgacaatactaattattcttacatgacttcagcaaataattaaaaaacaaaacgagagtgagacagagagaaagacagatggagggagggagaggtaagggtgttttactctcccccatgaatgcaarcccccatccagagatgggtgctggtatgagacaattctaatccatggcaaaatcacaagagaaaaagacaacacaggtttttcataaagctagatttatttaattttaaagtgcccgtcctttattctacatagaatgatggaacagggtaggaagtatttaaaaataatcagggaacataaaactgagatgaaaacaagcagagaagtaactgaccaggcaaatgcttgaaggaaaagcagtcagttcagagggtcagtaaacccctcactggtatggctcaggcagcatgaacttaggtggtgaagggtaggaactcatgtcagagagactggttggggctagaccatatagtacacctcgagagcctgagagactttggattttattctttgttaga

SEQ ID NO: 142159 - DNA, 616 bp, Homo sapiens
ttgtagctatattgtgtactgtaaggtacacaaattcaatgtgtgtatgtatggatatatatacaatgaaatattacaaccatcatttctgcatgaaggggatcaacaagccctgtctattgtaagtcctctagaaccagtatggtgatgataaaaaaaactrgtgcttcctatttgtagcagaatatgttttctaaagagagctgcattaatatacatcccatttcacatactcttacaatgtgatgttggcactcctcaattgagaggtgggggtctagcttctcttccttagcacataaatgagccattgattacagcaatgattcagtgtgacttcaaggttagatcagaaaaggtgataaagcacctgcttgcatctctctcgagaatgctcatccttggtctccagacagtattctacaaggaaacccaaactggcccataatgagagatcacatgaaaggcctatgtggagaggacctcagactatattcttctctgtgtcctttataaatttctgacccacagaatttgtgaacataggccaggcgcagtggctcacacttgtaatcctagagccttcggaggccaaggcagggggactgcttgaacc

SEQ ID NO: 142160 - DNA, 459 bp, Homo sapiens
atcagaataaaaatgaaaaaggtgcaaatgaaacttctctcactggtccacaccaccctccctgaaccttgtatctgaaaagatattttagttcagaaaaaaaaagtctccagcggggcacagtggctcatgcctgtaatcccaacacattgggaggctgaggcgggtggatcacctgaggtcaggagttcgagaccagcctggccaacatggtgaaaccccatctctactaaaaacacacacacamaaaaaatagccaagaatggtggtgcacacctgtaatcccagctacttgggaggctgaggcaggagaatcacttgaacctgagagtgagccgagatcatgtcactgcactccagcctgggtgacagagcaagattcatctcaaaaaaaaaaaaaaaaaaaaaaatctcctaactggctcaggtcccttttcagctaaattgggaagaaaagca

SEQ ID NO: 142161 - DNA, 386 bp, Homo sapiens
cctccccacacagtctctccctcacagtcaactgcccggcagtgaacaagctccgtatcttctaccctcttctatctcgacctacacagatactcccactacctgggattttttttttttcccttctttgctttccctgatcatggaggcgggtcttcggtgggcttcgaagagcacagaattgtgcacaatcccctccgaycatccatttctcaaaaggcctatgttccaaagaggttaagagacactatctaattacaaatggtatctacaccagaatttcccataacgattttaaagaatgatagatccataggatgctaagcagtgggaggaaaagagcttcacagttaaatgaatgtgggtgacattaggtcaaagagaat

SEQ ID NO: 142162 - DNA, 393 bp, Homo sapiens
caaataaccaatgggtttaagaggaaatcacaagggagagtagaaaataatttgagatgattagaaatgaagatacaacataccaaaacttaagtgacacagctaaggctgtgctacctaaagagaagtgtatagctgtaaatgcatatattaaaaaagaaaawgatttcgcatcaataacttaaccttccacctgaagacagcggaacaaaaaaagcaagtcaaacctaaattaattaattaacctaaattaattaactaatgaactagagaatagaaaaataacagagaaactgaacaaaaccaaaagttggctctttgaaaggatcaacaaaattgacaaaactttagctaaactggccaaacaaaaaagaaagaagactgactgaattc

SEQ ID NO: 142163 - DNA, 434 bp, Homo sapiens
attttagtaccatatgtatcgtataataagctcccactggaaggtcagctccgcaaggacaggggatggtttgtctgttttattcatgctctatmcctggggactggcacatggcaggcattcaatacatactcgttgactgcagaaataaaatgtttgtatgggaagaaaggtttgtatatgaaatgtatatatgcaaatatattcaacagtggttaactgtgggtgtcaggtttgtggttattttctggtggacctgaatttttctcattctgcaaggaagacaaattgcttttgtattgggaaaaagaaggcttatcagtcataatgatagctaggttgctaccatcccacccatctcacgtctggagggaaaacagtcctctgaggtaccatcaccacactttcctcccctttccagtatttccaaggtc

SEQ ID NO: 142164 - DNA, 443 bp, Homo sapiens
atcgtataataagctcccactggaaggtcagctccgcaaggacaggggatggtttgtctgttttattcatgctctatccctggggactggcacatggcaggcattcaatacatactcgttgactgcagaaataaaatgtttgtatgggaagaaaggtttgtatatgaaatgtatatatgcaaatatattcaacagtggttaactgtgggtgtcaggtttgtggttattttctggtggacctgaatttttctcattctgcaaggaagacaaattgctttkgtattgggaaaaagaaggcttatcagtcataatgatagctaggttgctaccatcccacccatctcacgtctggagggaaaacagtcctctgaggtaccatcaccacactttcctcccctttccagtatttccaaggtcaaagccaccctcccccatttccagaa

SEQ ID NO: 142165 - DNA, 573 bp, Homo sapiens
gcagagggtgtctgacaactcctgttgaagggtctcactcaaytgggtaacacagggaactggaccagtttaatgaagtactttgactgtctcttggtggagggtttgtgctttactcggggggaaatccactcatctgggctacctggattcctcacaactagcaggacgaaagactatatcttctggtcagtggagactggccacccctctcactaggggctcagggccagggagatcaaagttttgtccctgagcccctggctggagttgctggagttcctgcagggaggcctcacccagtgagcagggatgggtcagggccatgcctggagaggcactctggccacagtctgccacagctgatgtgttgggcttgaaccaagccatccagcctccctggctccagcaggggaaaagtgtggcctggaactataaagatggctgccacccttcccccaccctgggagcttagtgtgttaggcagctttaggtctgagtgttggctgctgcccctccccaaggagctcagatgactcagatagcaggaagctgcagctgtggtgatgccac

SEQ ID NO: 142166 - DNA, 483 bp, Homo sapiens
gaactataaagatggctgccacccttcccccaccctgggagcttagtgtgttaggcagctttaggtctgagtgttggctgctgcccctccccaaggagctcagatgactyagatagcaggaagctgcagctgtggtgatgccacccctcccaccaggaactcggcaggcttaagcagattctagctgagtggctattgaaaatctgactggctccctgattgggaccctaggctccagtgacatgggttcacaagtgggatcttccaacccatgggtcacacagttttatggaaaaagcatggtttccaaggctgagtagcacactcactcaccacctcccttggccgggggcatggggggtccctgccctgtgtggctctcaggtgggctgccataccacactgctcttccttcttctctgtggatcacgccagccacctgaacttggatttttaacaggcatgtctaaaaaaatgcaagga

SEQ ID NO: 142167 - DNA, 609 bp, Homo sapiens
ttcatcaaaacacattttctgataagactcctatatagcactaatagggtagtgtgggagagttgagaattatccacttcccaaaagtttctcagctatattttctagccagttatttactgctctacccaagcagttttaagaaggtagaagtatgataagaccatccaaaaaggctttggcrctttagcagttgtgaaagactaagcaacttgacaactgatggtaaatcacttcccttgttttgctggtggagacacgccagaacaaaatcccaccttggatatttgaggtggttcacaagttctattttggaatttttcagttgtcgttccaaatcactaaagcatgcttatttgttcttaaatatctccttcatctgcaataattcacacttctttaacatgtgagaaccattgtacatactcgtatattccaatttatgtgtttttctttaggcatattcagaataaactacctatgaaatggtaggcaaccttctgaatttttctttgataataaagggaatttgactgaagggattaattgacactgtgggtaacataagatgctgcaatttttttttctagaggacccatgagagaggaa

SEQ ID NO: 142168 - DNA, 611 bp, Homo sapiens
aattttgttgaagatgaccatcttctgtgttccctaattacagaacatttttatttctaggtttataaacacaaattatgatgattaatttaatttgattttcatttgacatcacttatttccctctagttacttatgtgtacccatatactttcagcatctgtctacttaggaaccttacgattgcaaaagatgaaaggatatggtcacatgtttttttagccaaacagtatagtccaagttcctgtctttaactattacattacaaagttctttgttaaatgactaagtgaataagaatactagatttatttctcttttgttcttaaaatattgttcatctgtcaatcttgaatttgaggcaattcatataggatattgtcatctgaagacacatagtctgagatttcacttataccatcaatttcattatcatcattctagtctagaaygctgcagttcatcactttgtattcatcttctgatttacctaataaacgtgaatcattatcttctgacaattttcttctctttgtcagtatgacgagaaaacaaaatttctgcattctcaactgtcttcaatgaaaccttaaagcagtctacaaagattg

SEQ ID NO: 142169 - DNA, 527 bp, Homo sapiens
acatgcacaataagaaaatattttttacaatgcctcattataagttaaaagagtgctgtagcatccctgtacaatttgggcaagtgtttctctgcctgtggatgtgtatttttaatagcaaccagtgcagtctacttgtctattctgaaagttcattaccattcttttaccttccctgtttagagtatcgtatttcctgtacttttaattttggtatttcttagcacctataaagggtagcaggtggcctcttttggagcctgaattctattcatgtgcaagtaaattcagagagctatcttgtctcttctgtagcccctttctagagggagctgatttcagtggtgggagattatttgatgtctcttcttgtttggtctctagtgattccattgaacctgcatctgagactgtgggtcttgaaataaaaatcctgtttatggagaaatgttcaagatggttatttcatcacctataaactattaggrgtttatgagaacctacatttagcacaacctaaaactgaa

SEQ ID NO: 142170 - DNA, 637 bp, Homo sapiens
tgcttattaaatacaaaacccattgccctgaagaatctgttcacaatctctgcaacagtggcacctgcagaggggagctccagccacttgaaactcattaaaacatacttgagattgacaatgagtagagaacatctgtcagacttggccaagatttcaatcaaatgtgatgttgccgtgttacttgactacattgacttaataaatgagttggctgctgtcagcacaagacaagttgggttgtaattactatcctgtcctccttttttctgaaatattctttcacttaaatactcctgttctatgtgaatgtatgaaaatggagttgatggaataatataccatttacaaaagaaatataaggtacatttttagcttactgaatttaccaatgtgaccatatcttttaattagcttgtgtgtctatacacaccyttgaaaggtaaataaaatcacactcatctttactctctggaagtgtcttcaactacacatttggaagaatggcaccttcactttgatctctagattgaatggctataataaatgtccctatgtgtaagatttgggaaaatagaaaaacacttctaattatcaaagagcttttgatcttcaataaataataccttatcctata

SEQ ID NO: 142171 - DNA, 388 bp, Homo sapiens
gggccaggagtttggatttaattagaaagttaaggagaaactcattgatgatttttaatcaatggagcaaaatatctagattagccctttgaatagattaatwttggcagaaagaaaggggtaggataaggtggggttggctttacttgagaacccacacagtctggggcgcagagaggctgttataacaatatgggccagcactgcccaggagaactttctgaaataacagaaatgttctgtatctgttctgtccaatacagtaaccacaagccacatgttgcttttaagaacttgaaatgtagctagtacaaccaaggacctgaatgtataatttcactgaatttaaatttaaatagccatatgtggctaatgactgtcttagtgg

SEQ ID NO: 142172 - DNA, 370 bp, Homo sapiens
taaacttcatcagtttataatgtgcaaatccaccttcttttttctgaacaatctaaatctaatttgtttgtctctagtaagccarttcctctcttgttctctgactattcaaatcttaaagggttttatgtgaataatcctaaataacccccagatataaaaaatcagccaggccagaagctatagacacatttagacctgtgacttaaagtcctttcgaaaagcattggcattttgaaaatggttttcaccctaagattattccatctgctagaggaatcaggaggataatataaactgaacatttctataacaaaaaaaatgagtgtctaatttttgttagagattgtcttatttagacaaataagac

SEQ ID NO: 142173 - DNA, 530 bp, Homo sapiens
tatttaagtgtccattgtgctctttttgtatcagacttggaccaaaatctaatttcccccctagtctccataaactcccactcatcccaagaaaatgtaggcattttggatctcctggtattagtgtcacctcagacctagaatttagccctctttgtaatattggatattctttcttctccagtgcattattatcatgtcaaatgggaggatcaaaggaatagacttgtaattacattgcaggggtcatcctcaaggcaacaggccttctctttaaccaacagattctacaaacttacttagatcttaaactggttgagggactgccattgtcaattttggtggtcratatgagtcatatgatcaccagctcttgatatttatgctcatataaattgaacaataccaataagctgtcaatctatgtttcctctggagcaccaagatatattagctgccactgcagataacttagatcaagatattctgattgtcactctagccttattacaatttgataattatgttca

SEQ ID NO: 142174 - DNA, 544 bp, Homo sapiens
gataacactttttttccagaatctctaactacactgccatatcagaaaatatactcattatttcacacrtttatttgtactaatttatgttgcgatgattgacaatactttatttattttattttattcatgtgtagggatttttttcttctttttaccaattaatatagcctatctctgcctatctctatgccggcaataaatatacataaaatatgaggattgttgatataaaatagtatcttcttaattgtattcttaatatatagtaagaggactattctaaatattttattaagctagtatatatagtcacaggctcttaagttatatttagatctgagagctgctagacatcacccgacattagagaaatagggaagtcaattaatagttatattactccacttctcaaaaagaatccatatctttgtatgagtgcaattaagaattatttaatctttttactcaaaatgataatttgcagtgataagaagttaatttacagagtttctactttgcttattatcaatagccagttata

SEQ ID NO: 142175 - DNA, 607 bp, Homo sapiens
aattttggatgccttttcaaagtttagtttggaggatcctgtccctcccttagtcttccccctcatagcatattttatacgtctagttgcttaggccaaaaatcttagaatcatcctgactcctctatttatttcacaaatctagttaagattatcatttgttcaccaataatttttgtagggaggaaacaaattttcaatcaaaataaaagttaaaaaccatgttcctaatgtatagtcaagttattaaatttaaagggactactttgtgttatgttataaagcaattaaatgagcactctttttatgttgttggcttcagagaaaattaaattaaagcaattattgtagacaatgatttgccaatatataaaaaagtcttccaaatcaatattctgcacttccaagccaacacatttttataaggcagtragcaaccatgtatgcaaacttcaggtacaaatatgttcttttcagtgttacctatccattttagaaaatttaaaaaatacagaagagtataaagaagaaagtaaaaataaaaaatgctgccaatggtttggtttatttatttgtttatgaataaattaatttattttgcccaata

SEQ ID NO: 142176 - DNA, 529 bp, Homo sapiens
aaactgtggatatttgtctttaataatttggtgatgtcttttcaaccaatgtatttggttgcatcagcgagagatagacatgtgtactcttcytcattcccatactcttcctggctgacttactgatccactacctaatgaggtattgaccaaccatggtgacctaaccctacgcagcatgccttttaatgaccaccaagcccagtgaatagctcatgtgggcagcaatattgttttctccctgaaaattccattcactcctacaccttctacttccaaatcaatatctccaactctgttctctcctctgagtctaaacaaacatttctagctgccggcttgacatttctacctagatattctttttagaacttcaaatataatgcattttaaaaccaaatttatttccgtctatctttagatcttcacactgttctcttgtctattttcagaaataacatcaccacaagagcacaggtggaaaactttagatttacatttaaagtctccatcactgatgctggaaacc

SEQ ID NO: 142177 - DNA, 535 bp, Homo sapiens
cgggcctgttgtccatttcctggcacgtgctcagtcaatacaaataaagacgatgagccgacactgcgcgtggtcgtgaccatgttcccctggattgccctggacttggtcttcctttagacacttccctcttcattaacctcacgtctgcatcctttctttattacacataagtgaaaatattgctattgaaggattcagcagagaaaatttccaaagaccaacatgtggcatctccagggttccccttcattttctaaattggtacttcactcaaaacatttctggcataacttcttttcaaaaaatgtgtgcttccattccaagcaacataataatagaccaatcccatcagtgagcagaggagggccatggattcctttggctcccctgctgccattcagtgctaaaacactgtccaacaaagccacatccacctcartgaactgggtgggatccccctgcctttgttctttctctgcaaatgcctggcttagaaactaagcctgattgaaaacctgcagaccaacttaag

SEQ ID NO: 142178 - DNA, 556 bp, Homo sapiens
gggcctgttgtccatttcctggcacgtgctcagtcaatacaaataaagacgatgagccgacactgcgcgtggtcgtgaccatgttcccctggattgccctggacttggtcttcctttagacacttccctcttcattaacctcacgtctgcatcctttctttattacacataagtgaaaatattgctattgaaggattcagcagagaaaatttccaaagaccaacatgtggcatctccagggttccccttcattttctaaattggtacttcactcaaaacatttctggcataacttcttttcaaaaaatgtgtgcttccattccaagcaacataataatagaccaatcccatcagtgagcagaggagggccatggattcctttggctcccctgctgccattcagtgctaaaacactgtccaacaaagccacatccacctcagtgaactgggtgggawccccctgcctttgttctttctctgcaaatgcctggcttagaaactaagcctgattgaaaacctgcagaccaacttaagaacattgtcttgctgaatttca

SEQ ID NO: 142179 - DNA, 568 bp, Homo sapiens
ctgccaccgggcctgttgtccatttcctggcacgtgctcagtcaatacaaataaagacgatgagccgacactgcgcgtggtcgtgaccatgttcccctggattgccctggacttggtcttcctttagacacttccctcttcattaacctcacgtctgcatcctttctttattacacataagtgaaaatattgctattgaaggattcagcagagaaaatttccaaagaccaacatgtggcatctccagggttccccttcattttctaaattggtacttcactcaaaacatttctggcataacttcttttcaaaaaatgtgtgcttccattccaagcaacataataatagaccaatcccatcagtgagcagaggagggccatggattcctttggctcccctgctgccattcagtgctaaaacactgtccaacaaagccacatccacctcagtgaactgggtgggatccccctgcctttgttctttctcygcaaatgcctggcttagaaactaagcctgattgaaaacctgcagaccaacttaagaacattgtcttgctgaatttcagcct

SEQ ID NO: 142180 - DNA, 556 bp, Homo sapiens
gggcctgttgtccatttcctggcacgtgctcagtcaatacaaataaagacgatgagccgacactgcgcgtggtcgtgaccatgttcccctggattgccctggacttggtcttcctttagacacttccctcttcattaacctcacgtctgcatcctttctttattacacataagtgaaaatattgctattgaaggattcagcagagaaaatttccaaagaccaacatgtggcatctccagggttccccttcattttctaaattggtacttcactcaaaacatttctggcataacttcttttcaaaaaatgtgtgcttccattccaagcaacataataatagaccaatcccatcagtgagcagaggagggccatggattcctttggctcccctgctgccattcagtgctaaaacactgtccaacaaagccacatccacctcagtgaactgggtgggatccccctgcctttgttctttctctgcaaatgcctggcttasaaactaagcctgattgaaaacctgcagaccaacttaagaacattgtcttgctgaatttca

SEQ ID NO: 142181 - DNA, 601 bp, Homo sapiens
gtatcttcattcattcaaaaccagcatattgagtgaatgcctattctggcatcatgccagaggaaaatcaggcacaggatatcagacacatacagacatcaagtctctatgcggttagtaccctgacagcagggacattactcctcttctgcacccagcacccagcaccgcatgaggcacacaggagaagctcaggaaatgctgagtgaattagtaaatcaatgtgcaagatggaaatggttaagtagcacaaggcagatcaaatcctatgcaagcagagaggagggagaattaggtccagctgaggaagccaagaaagggccaatgacagagggggcagttgagctaagcctgacaagatgagtcggattagggtatgcacagttggggcacagagaaagaggagagaaaaattccagccagaaagaacaactagcaaggcatgatggtgtctataagaacatgcatagctgaggttgcagtcttyatgcctcttgaggagtaatagcttgagtgctaacaacccagagttaagctgtttctagattgttgagggccaagaaagtcaggcaaaagagtttaaacatctgtaggtggtagg

SEQ ID NO: 142182 - DNA, 568 bp, Homo sapiens
aataaacacctttttattgattgagattggtcaaataaatgggaaactagaaacttctataaatatataatataaaaacaagggacacgcaggaaagagtagaggctttgatgtcaaacagacctgatttttaatcttgtttcagctatttactagctttgtgacttggtgtcaattacttagacyctgaatttcaatttcctcatctgtaagcaatgataaccctactctttaaagccattgaaaggaatcacaacctgtgttgtttagatattgattttttttcttcccagaatacattcatacctttgtggtaatagggtagggtgccctgtgatgatagccaaggtgccaaggttgggaagccctgctgcagaggaaacagcacagcacactgtaatctccaagaagtaagtggcattatttagagtaattaatacatgtgttttgaatcagttaatttactccagaaggaaaataaataagacaatgattgccacaaaggataagaagtatttgaattctttctcagcaatgtgcctaccaatggctgatcaatgtgcttaag

SEQ ID NO: 142183 - DNA, 568 bp, Homo sapiens
aataaacacctttttattgattgagattggtcaaataaatgggaaactagaaacttctataaatatataatataaaaacaagggacacgcaggaaagagtagaggctttgatgtcaaacagacctgatttttaatcttgtttcagctatttactagctttgtgacttggtgtcaattacttagaccctgaatttcaatttcctcatctgtaagcaatgataaccctactctttaaagccattgaaaggaatcacaacctgtgttgtttagatattgattttttttcttcccagaatacattcatacctttgtggtaatagggtagggtgccctgtgatgatagccaaggtgccaaggttgggaagccctgctgcagaggaaacagcacagcacactgtaatctccaagaagtaagtggcattatttagagtaattaatacatgtgttttgaatcagttamtttactccagaaggaaaataaataagacaatgattgccacaaaggataagaagtatttgaattctttctcagcaatgtgcctaccaatggctgatcaatgtgcttaag

SEQ ID NO: 142184 - DNA, 563 bp, Homo sapiens
atatgacataatagaaagagcaatgggcttggattgcaggcccaactctgcccctagtttgctgtgttactttgaccaattcatctcatctttgtctctgcccccacaactattgctagaaaagggatrgtttcctcttctatgaaataaagtggttggattagaaaaagggtcagaaaataaaaagaactgattgggttccaagtattccaccagggcatgagacacctgtctacaggaggcgaggactctcatcggtggcctactgctgccatatgacaacaaaatctgttctaatttttcaagaaagggtggccatctgtattcttatatgatactaattatttttcttttttgagacaggtatattactctgttctcatgctgctaataaagacatacccaagattgggtaatttataaaggaaagaggcttaatgaactcacaattccacattgctggggaggcctcacaatcatggtggaagacaaaggaagagcaaagagaattcttacatggtagcaggcgagaagagcttgtgcaggggcagtcccatttataa

SEQ ID NO: 142185 - DNA, 466 bp, Homo sapiens
tcattctcttcaccctccttctcctcccagctgcaaattatttaatatcaatattcctctccattcacagattatttctctctcccagcctaccttccactgagacctttaaaatgcatggtattcatgtgcacactataagatctgagcaaattcaatttcttcttttctctctttcacacttkgtgtgtggccattaatacaaatttttctcctctttctcttatcaaataggaatacctgatatacctataatacctgatgtaaggtattatatgtttcttctttccattttcattgccctgttatttattctccttgctttctttctggtaactagctccactgacaatctctttccctaggtccttattcagccagtctgataacagcctcctgggaagagcaaactgaatcaattttttttaatagctgattattttccaaagcttgcactagtcaataa

SEQ ID NO: 142186 - DNA, 466 bp, Homo sapiens
tcattctcttcaccctccttctcctcccagctgcaaattatttaatatcaatattcctctccattcacagattatttctctctcccagcctaccttccactgagacctttaaaatgcatggtattcatgtgcacactataagatctgagcaaattcaatttcttcttttctctctttcacacttgktgtgtggccattaatacaaatttttctcctctttctcttatcaaataggaatacctgatatacctataatacctgatgtaaggtattatatgtttcttctttccattttcattgccctgttatttattctccttgctttctttctggtaactagctccactgacaatctctttccctaggtccttattcagccagtctgataacagcctcctgggaagagcaaactgaatcaattttttttaatagctgattattttccaaagcttgcactagtcaataa

SEQ ID NO: 142187 - DNA, 457 bp, Homo sapiens
tctgagcaaattcaatttcttcttttctctctttcacacttggtgtgtggccattaatacaaatttttctcctctttctcttatcaaataggaatacctgatatacctataatacctgatgtaaggtattatatgtttcttctttccattttcattgccctgttatttattctccttgctttctttctggtaactagctccactgacaatctctttccctaggtccttattcagccagtctgataacagcctcctgggaagagcaaactgaatcaattttttttaatagctgattattttccaaagcttgcactagtcaataagacaatrtctccatctctcctgggaccacccattcagtcttcaacacagcttatttgacttctttccagccatctgttttacttgggcaaagagagtcagttttaatgtctacatgtttttccttttatgtata

SEQ ID NO: 142188 - DNA, 417 bp, Homo sapiens
tagagttgttactaggaagtggctccatatccaggaactaaatttycagtcctccttgcatctaggtggtgtcacgtgactagcttctgtcaatggaatagaaatagaagacgtggtagctcaggtcagcgtaggtgagaagtagatatcatttctctacctcttcttccccatttgccaagtaaatgcagaagacccaatctgacaacttagtcacaagatggaacaagtgtaggtctctcaatcttgtggaagcccaccagaaactctgttacatgaataaggaatgagcctttgtaaccaaatacaccattttcctaaaaattatttttaccccttctcttttcccctgtgcactcacctacctcttacttagcaccttagaaatgcaattgtaacctttacctcctctccacc

SEQ ID NO: 142189 - DNA, 227 bp, Homo sapiens
ttaacaatttcaaaaaggcagaaattatgctagccacatcttctaatcactatataataaaagttaacaaaagtaaaatatatacacatagtcataaattttaaaatatctttctaagtatttttcattaaagagaaaataaattgaaattaaaaccacttaggcatattccaaaaatgggatarttcaaataaaaagtgctgtaacacatgaaattagcccttaat

SEQ ID NO: 142190 - DNA, 659 bp, Homo sapiens
cagtgacttaaactaacaatttattatttatcacaattctgttctttgactgtgcaattctcctcacttcacctggcccactcatgcagctgagttaccttcaggagaagggtcagtgggctagaagtttcacttgttggctggggtgacttgattttcctccatgtggcctcccatcatccaggaggctagaattagtttccttaaatggcagccttcgggcagaattccaagaygacaaaaacatatgctgcatggcctcttgaaaactaggctctggaactagcaactgccacttcactcacattctatcggtgaaggcaaaacaccaagctagcccaggtggaagaagtagggttatagttgttatctcttaaaggaaagagctgcaaaagtagtgtggccatttttttcaatctaccataaactcaactgtctttggagctgaaaccagctacatgctcatcaatcctatatccacttcctggacattaaacagaagtacatttctgagtctctttgtaggcaagttgagtccaagtggatggattcatggcacttccaggtgcagcattaaactccctgggcagtactctgtgctctgtcttccactgtgtcagcaacagtgatggtatgagttgaagatggcaccaacacaa

SEQ ID NO: 142191 - DNA, 659 bp, Homo sapiens
cagtgacttaaactaacaatttattatttatcacaattctgttctttgactgtgcaattctcctcacttcacctggcccactcatgcagctgagttaccttcaggagaagggtcagtgggctagaagtttcacttgttggctggggtgacttgattttcctccatgtggcctcccatcatccaggaggctagaattagtttccttaaatggcagccttcgggcagaattccaagatgacaaaaacatatgctgcatggcctcttgaaaactaggctctggaactagcaactgccacttcastcacattctatcggtgaaggcaaaacaccaagctagcccaggtggaagaagtagggttatagttgttatctcttaaaggaaagagctgcaaaagtagtgtggccatttttttcaatctaccataaactcaactgtctttggagctgaaaccagctacatgctcatcaatcctatatccacttcctggacattaaacagaagtacatttctgagtctctttgtaggcaagttgagtccaagtggatggattcatggcacttccaggtgcagcattaaactccctgggcagtactctgtgctctgtcttccactgtgtcagcaacagtgatggtatgagttgaagatggcaccaacacaa

SEQ ID NO: 142192 - DNA, 659 bp, Homo sapiens
cagtgacttaaactaacaatttattatttatcacaattctgttctttgactgtgcaattctcctcacttcacctggcccactcatgcagctgagttaccttcaggagaagggtcagtgggctagaagtttcacttgttggctggggtgacttgattttcctccatgtggcctcccatcatccaggaggctagaattagtttccttaaatggcagccttcgggcagaattccaagatgacaaaaacatatgctgcatggcctcttgaaaactaggctctggaactagcaactgccacttcactcacattctatcggtgaaggcaaaacaccaagctagcccaggtggaagaagtagggttatagttgttatctcttaaaggaaagagctgcaaaartagtgtggccatttttttcaatctaccataaactcaactgtctttggagctgaaaccagctacatgctcatcaatcctatatccacttcctggacattaaacagaagtacatttctgagtctctttgtaggcaagttgagtccaagtggatggattcatggcacttccaggtgcagcattaaactccctgggcagtactctgtgctctgtcttccactgtgtcagcaacagtgatggtatgagttgaagatggcaccaacacaa

SEQ ID NO: 142193 - DNA, 554 bp, Homo sapiens
agaccccaccttcataaagtgtttcatcagcactacctctaatagctagcctgacttcaactctctgatagggttttgctaaatgtagaaaaaaaagaaaagaagctagctcacatcaacagtgtaactttttccaacaagcatggctagatatggtctgcctttctaaagcatttcagatgagagtttatcaaatgtcttattcaagtataacagggatctctggctttcaagcctaaaatgtgtgtgtcttaccccttacaaayaaatgctaagacaatggcatgtgttttccatacctgttaggacagtagtggtccaactctaagagacaaactctgtattaattgtagaaaacaaaatcagtgcataagacccaaaatacaatgcttaagcaagagacaaatttatttcttacatagcagttcaagattttgagagcagctttgacattttcaatgtggaactttcaactctaggtctaaaggtgacggctccccttctcatttcccaagtggtagaaacaagggaaggggcaagaggagcaatgatgc

SEQ ID NO: 142194 - DNA, 510 bp, Homo sapiens
taattaacataatatttaacattaaagatatagtagttctatttctaaagcactgaggtaataataataataataataataataataataataaatgattatgaagcaactactatttccacaggctttggaataagcactttacaacattgtttaactcccatgcaatcctrtggcgaagggaatattatgcctgttttataaatgaggaggttaggtcattggccagaattcacatatggagatagagcagcctattggataagtatataggctctggagtcaaggaggtctgtagtcaaatctctaatacatcccttgctagctgtggaattttgagcttgtaacttaacttaattgaagcttcattacctaatctgcaatttgaggttaagagctcttataaaatcaacatatgaatgaaacaatataaatatacatagcagagtcctatcacatagttggtgcccaataaatgcaagcttaaaaacactaaaaactatacagtaa

SEQ ID NO: 142195 - DNA, 480 bp, Homo sapiens
attttttcaggcataaatccacaaagatgagaagtaggagaagagaaaatgatgataaaatattagaaggtgggagacagattagttgtaaatgacttactgagttcaagaaaactaaatcttaatataaaactgtcaacagccatgatacaacttgattttccctgaattttctaaaggctaagaactagtaaaagtttctgaaaataggagcaaagagggtagcgtaaggaggttgatagaaagttgatttaaggagtaaatatccagaaccggtccctaattgtacgcagctggggagtatygggatcttggagtttaattctcaagaaagaatagtatccagggtaagaaacaacaagtacatttgtgagcagaggtactattctcaaaagaggaggatttagtgaatatgtctttacctcatcgaacaagtcttagagagattcagagatctacacaataaacaagtaggcttct

SEQ ID NO: 142196 - DNA, 540 bp, Homo sapiens
gaagaaaggacccaacatcccattggagcaaaaaattcagagaatagatgcattaaagagtgcaaaaataatttcacttacccatcttacctctccttcaaagtggcacagctcattgccaagagagactccctcagcctgtgatttttcccatggggaatrgtgagggtgcagtgaggacccagctcctccatttgttcaggatgcttcccaagaggtccatttctttctatcccacccataatactgaggggcttggcatggctaggggcagctaggagcagtgaaaagacatgggtgaatcccagcaacccaagtgagaaattcaagggcagcgatttctactaattgcttcacagactccaccaaaaagcctgcccataaacattgtagggcacattacctgtggatccccccaggtagcccatgcaaacccctagcattctgtatgcccaaccccatagccatcacccagcattcccccacggatggtgtacatatgccactccaggtcatgcacaagcacacacagcctgttca

SEQ ID NO: 142197 - DNA, 540 bp, Homo sapiens
gaagaaaggacccaacatcccattggagcaaaaaattcagagaatagatgcattaaagagtgcaaaaataatttcacttacccatcttacctctccttcaaagtggcacagctcattgccaagagagactccctcagcctgtgatttttcccatggggaatggtgagggtgcagtgaggacccagctcctccatttgttcaggatgcttcccaagaggtccatttctttctatcccacccataatactgaggggcttggcatggctaggggcagctaggagcagtgaaaagacatgggtgaatcccagcaacccaagtgagaaattcaagggcagcgatttctactaattgcttcacagactccaccaaaaagcctgcccataaacattgtagggcacattacctgtggatccccccaggtagcccatgcaaacccctagcattctgtatgcccaaccccrtagccatcacccagcattcccccacggatggtgtacatatgccactccaggtcatgcacaagcacacacagcctgttca

SEQ ID NO: 142198 - DNA, 633 bp, Homo sapiens
accctgtcggtgcagaaaaaaagtaaaaataatttaaaaagtaaagaaagcctacaggatttatgggacaccatcaaatgaaccaattatggaagtcaacgaagaaaaagagagaaaagaaaaggaagctatttaaagaagtaatgactgaaaactccccaaatcttggaaggagtatggacattctggtttatgaatcttaaaaattcccaaagaggataaacctaaagaagattacactgagacccattaaaaagtcaaggagaatttagatagcaacaagggaaaagtgactcatcacatacaaagaaacttttataagactatcagccactttattagatgaaactttgcaggccaggagagagcgggataatatattcaaagtgctgaaagaaaaaaaatacaataaaaatactatacccagaaaagctgccctttagaaatgaaagaaaggtcaagacatttccagacaaaygaaatttatgtgagtttatcaccactatacctgccttacaagaaatgccacaggaagttctttaagttgaaatgaaaggatactaaatagtaacatgaaaacataaaagtataaaacatgtcagtaaaggtaggtataaatcaaattaagaatat

SEQ ID NO: 142199 - DNA, 520 bp, Homo sapiens
ggttctgggtttgcagactgccagcttctcactatactctcacatggtagaaagaaagtgagctggctttctgagatccatttcatatgggcactaatcccattcatgagggctccatcctcatgacctaaatacctcccacagacctcatctcctaatactatcacattggggttagatttcaatatataaattttgagggcacacaaacattctacccacaacatatattcatttcaamgaataaaatacttagagtatacagatcaaaactacagagaaatgctagatgtgtttctgcctgagtgttttctgctcatggtctgagcttgggtaaaccctgttaaattcaccacaaccctttcatgcaaactagctatttttcaagacctaaggattattaatttaatttgcttttagcaataatctcactaccaattttggttattggataaacataatattttccagtcaagtcagccttgaggatcatttctagatattgttttcaaggaagccc

SEQ ID NO: 142200 - DNA, 482 bp, Homo sapiens
atctcactaccaattttggttattggataaacataatattttccagtcaagtcagccttgaggatcatttctagatattgttttcaaggaagcccatattctcatcatgtgtcaaatcttatctgacactataaatacattgctatataaaaaatgcagtacttttaaacaggtaaggtaggaaatcatttttaaggatgcagggaggaaattgtgtcattgtaacaacagcaaaaaattaaaatgcacttattatattttagactctgaggcacacatgacagtttctcatgaagtttctacataatttataagtctggcttgtatggctctacccattcttcatggccaatatmctttctgattcatcagtgcctgtgctatgttggttactacatgttttgaatagcagccttggaagtagctacatattagaatttccattttacagcaaagaagctgaggacttgttagattaagta

SEQ ID NO: 142201 - DNA, 482 bp, Homo sapiens
atctcactaccaattttggttattggataaacataatattttccagtcaagtcagccttgaggatcatttctagatattgttttcaaggaagcccatattctcatcatgtgtcaaatcttatctgacactataaatacattgctatataaaaaatgcagtacttttaaacaggtaaggtaggaaatcatttttaaggatgcagggaggaaattgtgtcattgtaacaacagcaaaaaattaaaatgcacttattatattttagactctgaggcacacatgacagtttctcatgaagtttctacataatttataagtctggcttgtatggctctacccattcttcatggccaatatactttctgattcatcagtgcctgtgctmtgttggttactacatgttttgaatagcagccttggaagtagctacatattagaatttccattttacagcaaagaagctgaggacttgttagattaagta

SEQ ID NO: 142202 - DNA, 599 bp, Homo sapiens
  misc_feature (1)...(599): n = A,T,C or G
nnnnnnnnnnnnnnnnngaattcttaactctaccaccagtgtggacttggcaaacctgtaaaatacggctaatgaaacacatcctgaagggagatgaaagaggtgataaaaaacatatgggaaataayagccgccactgtgtattggatgctatggtcctccctcaggtccccactgcaagaatgagagatccatttcagttgcttgtagtgctggaacctgagtccctcgccaggaattgccctaagctgaagagagccactttgctctaggtcacattctgtggagcacgctctatatggcactggctgaggcccttgctgcaactacatggaagctcaactcctgtctctgaccaatccacctctttctactaccccagaggtatttgtcctataggcactctccaacaaacttcctgcttgcaggtctctcacagcctatttctggaactgacctaagacatacttgtcaaaagaaaatgattcctgtgactcaaatagagatgaaagactttattgatggagctcctaaagaccaggtggcttccaactgaagcagtcagggtttttataggatagtgggcacttgagtacctg

SEQ ID NO: 142203 - DNA, 590 bp, Homo sapiens
tgagcactgtaaaacacattttgtaaattttctttaaaagttaaacatacatatatcatataatccaatcgttttactgctgggtattaagctaatagaaatgaaaaaaatatgaccttaaatacttttacacmaatgtttgtagcagcttatttgtgatatccaaaagttggaaatagcccagatgtctattaacaggtgaatgcataagcaaactggaataacccataatagaatatgtctagacaaaaaagaatgaattattcatatacattaaaaaatagatgaatctcaaaacgaatgaataaaagaaggcagaataagaaagtacatagtgtataatttcatctatataatatccttaaaaagtcaaaccaatatataataacagaaagtagatcagaggttgattttggtctcaagattaggagcagagagttcttaagattagaagtagaaagaacagagaatattggaaataagaaaatttgatgtgatggatgatgctcattttcttgattatggtgacattttcatgtttgtgtattttattagtccattctcattctgctataaagaattacccgaaa

SEQ ID NO: 142204 - DNA, 468 bp, Homo sapiens
tgccatttttcttttatagggcccttgaaaagctgtccctttctaataatcattaggtgcaaaagagttggaatataaatttttagtaaaatatcttgagcatttcttaaattttaaaatgtaaattataaattggctaaaggttgaatcactctgaattgaggtggtatggctgactattatggattctgtttaagttgaatggytccagagtcccagttttacgacgtgaaggtttttttccattgtgattctaaatgcctgcattccacatctatgaaatagtatttcctggaggtatgaactaaaacccacctgccttacaatttgtctttacttattaggtatctctgtaattttgacttttgcttgacctatccatctgaagaagaaagccaaaggcaagtaccaataggaagataagtaaagcctgaactcttttagggctcataattcaagtccccctag

SEQ ID NO: 142205 - DNA, 521 bp, Homo sapiens
tttgcacatcagtcttcagagtaataattataaagcactaattatgttactcttatggttaaaacttttcaaaagcatttcatcaaatgaaatatcatccagttccttattatgttcttaccctctgtcttctattcacatcctacttttcctctgtagaggataatatctgtactttaccctgattcyctcagttccctcttaccttgtctgtgtcctggaaatactttttaaatagtttgcataataatctcttctcaaggtctgtttctggggaatgagtcctgaagatattctgtttgcatgatgcagctatactgcatttaaaaaaaatcttcagataaacaaagtcaatcccacatccagagacgttacatatagtcttacttctccttggaacatgctttctccagatctttgcatggctgatcccttatgattcaatcttagctcaatggcacattctcatcgaagccttcctaagtaagtcagctccaagtacacctttaccaattaccaat

SEQ ID NO: 142206 - DNA, 460 bp, Homo sapiens
gttctggaactcaaacatgctttctttactatgcctttgcacccttcatcccagcctctcttcgctttcacttggactgaccctgacacccatcaggctcagcaaattacctgggctgtactgctgcaaggcttcacagacagcccccattacttcagtcaagcccaaatttcttcctcatccattacctatctcagcataattcttcataaaaacacaygtgctctcccggctgatcatgtctggttaatctcctaaacttcaacctcttctacagaacaacaactcatttccttgctaggcacggttaggtacttctgcctttggatacctagttttacgatcctgagtaaaccattatataaactcacaaaaggatacctagctgaccccatagaccctaaatcctttccccactcccctttccattccttacaaaacaaccctagaagctgctccc

SEQ ID NO: 142207 - DNA, 597 bp, Homo sapiens
cttttttattacagtttaaccacatggtgttcacatgtggctggcttttagtttttagccccttctggaggtttgttcttcaattcctctgaagatcataactgatatgtcatgttccaaaggccccattatgaggcgcattgtaagactacccattgaccaaaacacctgggcaaacagagacactttttcggataggtcatttcaggggcctagagaccacctcccagtagcttaaggcaaatgccatgtctccctttggataaagtcaattctttaatacacagcagaatcattttacaaacccaggtacttayacagatgcttgtatttgtacatagtcctgaacttgaatccaagcctggaattgtaaacacacctgaacttgtgcatgagtctgcaccggccttcaagaatttcaagtaagagtttgtagttaacatttatctgtttcttttacttctctgtgaagagagtatttctttatacagtttgtttggaaaagcccattttattaatcatctgatataatttgtgaaatatgctttaatttcaattgacacatataattgtcaattgacaaatataattaagcac

SEQ ID NO: 142208 - DNA, 559 bp, Homo sapiens
ttatccttgcgaaatgactttcttacaatgtattacacttgagttggtattttagcactttttagcactgttagtatcagtgaatatgtgctaagttgtatccacagtctgtaacacacacacacacacacacatacacacacacacacacacataattattaactacggaccctttaaatgcagttacaagtacaactacaaaaacacttgttttaagagtagcagtcttcattacagaaaagagagccctcaatcattaagatactaaatgtcatgttttactatgtaacactttcatatcaaaacattcctgrtcataacccaataaaactcagggcatcttcctctgaattattcagtctttactgattttttggctctgaattaaaggataaagcataattcagcaactaattagatgtgtacttctatttctctcttatgcttcataagtttttcatctttctggctagattataagtaccttgaaagaagagattgccacaaactcctttttatgttctaaagattatttagtataggtcatggtgcatatt

SEQ ID NO: 142209 - DNA, 506 bp, Homo sapiens
aggcaaaaattatgtctttctgaatggtgagcccaggtgcctaaagatgggaaacagagtcccaacatttatactagaaatcattcttataggagaaactagaagagcaccagagacagggagtgggtttcagaagcaggactagcctcgagraagagaggccggaggatgtttgtctaacaggcattaggacccaggaggcaagggtccagatagaatagatgggccagtctctcttgggtgacataactttgagagttccgctcatggctggagggtcaaccaaccttttgtcaggaccctggagccaaatggctttcctctctgttgaccctcggctcagcccagaaatgcaggaaaaccagaagctggttccaggcaaaccaacattcccaactctgaagaatcaggggttgttagagagccctttcccagaaagcctaacacccgtgtctttagtctggctgctgtgctagtcacttttaactggccgacagatgtccagt

SEQ ID NO: 142210 - DNA, 520 bp, Homo sapiens
ccgaaggggcttcaggcaaaaattatgtctttctgaatggtgagcccaggtgcctaaagatgggaaacagagtcccaacatttatactagaaatcattcttataggagaaactagaagagcaccagagacagggagtgggtttcagaagcaggactagcctcgaggaagagaggccggaggatgtttgtctaacaggcattaggacccaggaggcaagggtccagatagaatagatgggccagtctctcttgggtgacataactttgagagttccgctcatggctggagggtcaaccaaccttttgtcaggaccctggagccaaatggctttcctctctgttgaccctcrgctcagcccagaaatgcaggaaaaccagaagctggttccaggcaaaccaacattcccaactctgaagaatcaggggttgttagagagccctttcccagaaagcctaacacccgtgtctttagtctggctgctgtgctagtcacttttaactggccgacagatgtccagtg

SEQ ID NO: 142211 - DNA, 552 bp, Homo sapiens
tttagtaagaaatttaatttgatatataaggtagagtgctaacctaagaagagtttaggattaagatttatttatttattcccaaaacttcttgtttgctacctatgagaatttagaaaacttaatgtctgtgaatgccagcattctcattaacttgataaatataagcatatccatctgaaaacwttgctgagggaattaaagaaactcatctatgtgaaagagatgggctggcatatcaccaacatgcatctctcatttctgtataatactgaaaatccaaaacttctcagtttatttgacttccataaattttccacttatgactttatatctagaccaattcgtacctcaagtctctgaagcccaattatggaggatgaaagctaaggatatggatttaaatgtaatcaaattctcttaaactacattataaatggtgaaacagcagcaaaaacacacccactctgaccacaggcatctaatcatcttgaagataacgagatttacctggcaagtttatctggcccaataaagcaatttttctccagc

SEQ ID NO: 142212 - DNA, 352 bp, Homo sapiens
aagtactggagactagaactggcaacacaaagcatcaatcaaccccaggacagcctaacatttaataaactgctgacattgatgagcatacgagatttccaggttcataattaaacaaacaaaaactgagctgagattatgtcacactgggrtccttaactataactttccctttctgagatcaaacaaaacatagtagtttagaacaaccattctggagttagaagttttacattttaattctagcttcacagtgtactagctgagagacctcgttcaagtgacttgatctaaaatcttagttactcatatgaaaaataatgatcctaatggtaactttcttataagactg

SEQ ID NO: 142213 - DNA, 436 bp, Homo sapiens
tgatttaagtgctcaataaaggtttaaattttttaaatgagcaggttaattatagtcagactgtttcttagtgaattaggttaaaggaatgagagagaactatttccaaggtggggacatatctaccactcaaattagagagtttctgcggagagtttttatccctagttcatagtatcatcaaccatgtcaagtattagacaagtttttctaaattctttttctatttcatagcagaacaaccagttcgtactggtttctttagacagggtacgatggatcaaactgtatcatctcaaaattartatattgaagttctaactcctagtaccttaaaatgtgaccttatttagaaatatggagtagggttggtccctaattccatacaagtgtttccttataataagggatatttggagataggcatgcacagagt

SEQ ID NO: 142214 - DNA, 631 bp, Homo sapiens
ttaacctaacctaaatttcaaaaaagcatttgcacatgaatatatgtcattaagcatcaaactttgtgacatttacatgagtcactgccttcttttttactttttttcaacttcctgacttggatttatattagaagaatggaaacagctggacatctgagtttttctagatttctaactttatttttcyggtgtatatgataatgaagttaaatatctattctatgtatttttcttctaagcagtgaagtaatccaaaaagggaaaagtctatacttacagttgaatgtaaacataatcttgtttattatttagatattttcttatggatcaatctttattctttttgataaatcaatgtttctgtttctcttctctctctatctgtgtatctcacctttattgttttccacagagtaaagtcagctttgtaatttaaaattagagaaactgtaatttctgaacagaaaacactagcatcctgcagatcttgcatgttagggtacactttcccactcttttttctctcccattaaaactttcttgccatactccctgttcaggaaggcttcccacctgactcatgggtcaacttgaactaaattttaaattaataataccatttgtaatt

SEQ ID NO: 142215 - DNA, 638 bp, Homo sapiens
aacaaccaagtgggatcacttttaatattttcattttataagagaaaattacaattcagagaagatacgaaatttgttcccagaactcatattatcagttcaagagttagcaccagaattggttatctgctctgatgctgtgttcccctaggattactcaacactagctttatgagwcatacagattggaagttcatatagtttggatctgtgtccccacccaaatttcataataaaatgtaattcccagtgttgcaggtggggactggtgggagataatttcatggtgggagtggatttctcctaaatagtttacaccttccctctcagtactgtcctcatggtagcaagtgagttcccatgagatctggttgttttaaagtgtgttgcacctccccgctctctctcttgctccttctgtggccatgtgacacccctgctgccccttcacctcctgccatgattgtaagtttcctgaggcttcccaaaaacccaagcagatgccagcatcatgcttcctgtatatcctgcagaaccatgagccaattaaacctcttttctgtataaattatccagtctcaggtacttctttatagcaatgtgagaacagagtaacacagaagtcggctggttaactg

SEQ ID NO: 142216 - DNA, 476 bp, Homo sapiens
ttcatgaattagaaatttggtccctagtgtggcagtgttgggaagcagggcctttaagatgtgattaggtcattaaggtggattaatgccactctttacaaactgagctaattctcctgggagtgagcaagttctcactctcacagagctgaattagttaccacaaaagagggttgcaagtcaaagccamcacccatgttttgcttctttcacacatgttcactcacacttccacttttctgccatgttatgacacagtatgaaagccctcgccagaagctgccactatgccttggacttctctgccctagatccacgaaccaaataaattattttctttataaattaccaggtctcaggtactttattatagcaacagaaaaacagaccaaaatattgccctactagaattattagagcactaattacctactgtaaccttgttgtataccttttcctgtgtattttctgatcga

SEQ ID NO: 142217 - DNA, 568 bp, Homo sapiens
ctggggtcagctctttttttttgtaaaacttcttgtccttttttcactcctttctctcatttttccaatttcctattgcagctaagccagctctacctcttgttcctcaaatgttccttgaatgtctttcatctaaggtcacctcagtgtacctttgctccttcttcatttctttgctagaaattctgtcacctttctctcccattgattcacttaattttatgtaacaactctgcaaagtacttactacctgctatggtttgagagttgagtgtatctcataaaattcatgaattagaaatttggtccctagtgtggcagtgttgggaagcagggcctttaagatgtgattaggtcattaaggtggattaatgccactctttacaaactgagctaattctcctgggagtgagcaagttctcactctcacagagctgaattagttaccacaaaagagggttgcaagtcaaagccaccacccatgttttkcttctttcacacatgttcactcacacttccacttttctgccatgttatgacacagtatgaaagccctcgccagaagctg

SEQ ID NO: 142218 - DNA, 569 bp, Homo sapiens
ttttctagtaaaccacagctactcagtcaagtgggcaaaatatrtaatggatgtatataaaacagacagaatttgagccaggctgtcacatagtccccatcgtggcagttctcatcgtaaagtaagaattcactagacatcagacttggactcacgagtggggtcctaatacctgggagaaaaaatacctcgtcatagcaaggtaagaacccagaaaacaaacaagacttctaacaagtgtcagagataggcagcaagagataaaacttagaaagaaagaataatactgaattctgaatcttgaaggataatcaatattatttccttattcctcattgactgaagtctggaattcagacaattaatcaaggctcgactatagagacccacaaccttagaataaagagacaccaggaaagagaaaaaatataattttatttggaaatattgccattgggatatcatttctgtcaggaaatagccacttaattttatctttaaacttatgtgatatggaagctgacattcagattttcttgataaaagtgaattgtgtttcatgttgacag

SEQ ID NO: 142219 - DNA, 569 bp, Homo sapiens
ttttctagtaaaccacagctactcagtcaagtgggcaaaatatataatggatgtatataaaacagacagaatttgagccaggctgtcacatagtcsccatcgtggcagttctcatcgtaaagtaagaattcactagacatcagacttggactcacgagtggggtcctaatacctgggagaaaaaatacctcgtcatagcaaggtaagaacccagaaaacaaacaagacttctaacaagtgtcagagataggcagcaagagataaaacttagaaagaaagaataatactgaattctgaatcttgaaggataatcaatattatttccttattcctcattgactgaagtctggaattcagacaattaatcaaggctcgactatagagacccacaaccttagaataaagagacaccaggaaagagaaaaaatataattttatttggaaatattgccattgggatatcatttctgtcaggaaatagccacttaattttatctttaaacttatgtgatatggaagctgacattcagattttcttgataaaagtgaattgtgtttcatgttgacag

SEQ ID NO: 142220 - DNA, 551 bp, Homo sapiens
acatcaatcttataactactcattccaagggaatagtgktacctatctttcagtggtttcaccaaaacaccacagaagcattcatccatactagttgttttggttttatttgctttctcttaaactactgcagccaggaatgtactgttctgactggccatggcttagtcatgtgcccagacttatggcattgggtctgaactactcggaacaaattcatcataaagaaagaaaatatctattaccaaaagaaggaaagaggagaaattcaaagtggccaaacagataattttagtcatcacaatggctattaaaataatgtcttcagagtcatttaactgagattagaaaattgggatagatttaaatgaatagatgagatattgtattgtgcacgtctataaataacatatttatctttattgataggaaaatagatgggtaaataaatatatacataaatggatagaccatggatgttgacttttaaaaggatatagagatatactaagatgatagaattctctaaaatattaacagatattctgtct

SEQ ID NO: 142221 - DNA, 515 bp, Homo sapiens
cagtgctggtaccccatgttcagttattctgatccagagtgagttccttcaggtagcagcctgtgaggttctggattgaatatcatttaaagcaagtgaaatgtccttacatgtgcacatgtaccacagaacttaaagtataatgcaaaaaaaaaaaatacagtgtctcaaagactcaatacaggaagatagggtctggaaatctrgtccagatgtataaacatctaggtatgacatataaacatatgtctagtgaaacgtaacaatccagttatgacatataaagtcaaactccattatatactgtggcatccaagaaaaacattagattgttggcctgtctgaagtccaaagccaagacaatttccaaaagaagccaaaaaagaacaactgtcagtgtgtccccaactctgcccaagtgacggtgaaggatgctgtcctgaacatactcacagggtcagcaagagcatcccagatagagctagatgggtcatctgcctctgatctgctccctt

SEQ ID NO: 142222 - DNA, 635 bp, Homo sapiens
attacaactgtgtacagcctttgcatctctttaaaattttgattgaactttatcatcatcttttagtagacaaatgtaggttataagaagtacatatttagaattttatgcaatttttttgcaaatgagatacctttgagttccagctctatgaatgaaatataaattcttagtcaaataaattgttccattccatcctgagcaatacaatgagatactcagacttaaaaaaaaaaaaattcctgagcctagatgtatatcagaataacctggytaacctttaaaaaatacagcttcttgggcctcactccaggtttgttgaatagcagtaacccacaagaaatacctagaatctatatttttcaaaagctcccatagagaatctcatgcagttattccttgcctgcagacttgtttttgagacccaatggttaagctatactcacaaagaaagaaaagctattatttactgagcatctactaccaggtactaactagatgcttcaaaatgctatcataatgattcttcttaatgcagggacactgtagtgtactgaatagtgtcccgcaatattcttatccaaccagacccttacaatgtaaccatttttggaaataaggtatttgcagatgta

SEQ ID NO: 142223 - DNA, 497 bp, Homo sapiens
ataaaataaaggattgacatactatagacctgtttactacaaactatagatgatgatcggtatgtcttctgaytatatatttttaattgtcatctcattcaggaattaacagattcaattttccatgcataacataaagactagtctatggtgtgtcacttggaagtagtgaagtggtaaaatccagcaaagagaccaaaaggcgtgaaggagttacattgatacaacttagggaaaaattcttacagatcaactagaacttgtggagaaagacagataaatcaagaactatggattgacttgcaatctttttaacacaagagtaaaaagagcccaaattaagaggaaatttgagttagagtgaattagagttagagtttgagctagagctaaagttagaactagtgttagagctggagtttgtgtggagttaggattagaggtctaggtcaaatctaccctgcttctgttcactttcagatgccagagactagaaa

SEQ ID NO: 142224 - DNA, 614 bp, Homo sapiens
agttatgtgctttccacaacacattgcacaatcattcagacctcaggactggcccaacttaactcaaaaaacagacacgttttccttccaacttgagttgttgcaagatactacctgctctcctttagaaactagtaatcacgggatacaagaaaacgaagcacaggaagtggaacaccttaagtctctgccatgtcccagaccagagtcagtgaggatacatgcatatgtatgtgaatattcacctttatgtatgcacatacgcataggcaagtgtattcatcagtctgcatgtgggtgtttctgcacaagcatatgcatktgtgtgactatttgcgtgggaatgtgtatgtgggcatatgtgcattttagtttgtgtattcatgtgttggtatatgtgggtgtggatataagggtagatgtacatatatatctgcagatatttgttggttgaatttgcatagatttctgaatatgtcatcagggtggaagtgggaagaaggagaaaatggaaatagaatgaaattctctcattgaacctacagtgggaatttaaggaaacagcatgctattaaccaaatcaggagctggtctacagtcacctcactgaggaa

SEQ ID NO: 142225 - DNA, 542 bp, Homo sapiens
aagtaaaaatgctacataacttttctaccatttttaaatggtctttttcttgattcagcatttgcttggttattgtaattcttttatgattttcaggattctgacagttgattctgacaactttgcttgatttttctgtttctgtttgaagaatgaattgttagagttgcctactcccctacttctgctgacatcatctctatttttacttatttgttttctggacattactagtagataacaaaagagcaatagagatgaaatatgaaacaaaacccctgcaattctttcctgctcctggactgcactttgcaataggcaacaacatgaacttttacaaattcaaaggtgaaatccaggagaaggtgtcctgaagggatttgtgggcatgctgttgctagacttraatacgttcgattccttttacatatctccattctaatgagaagaccctacattttcataattagtgtgccaatcttaccagcagaaagaagactaaaaataattttgtccctgcagtgtagcaatgtgcccaataa

SEQ ID NO: 142226 - DNA, 594 bp, Homo sapiens
aatttttgcttttactgcgattgcttttggtgtctttgttatgaaatctttgtctgttcctatgtctagcatggtattgcctaggttgtcttccaggattttttacagttttgggttttacaattaagtctttaattcatcttgtgttgatttttgtttatggtataaggaagaggtccagcttcaatcttctrcatatggctagccagttatccaagcaccatttattgactagggaggcttttccccattacttgtttttgtcagagaagaaatattttaatagtcctgataacattcccgtatcttgaatgtcctgctaacattcccctatctacaaagcatagcacctggggtggtgttgagtctggattccttggaagtgtcaatatacaccagataatggccagttttccacaagaatatagatgactagcacttcctgtcacaatacctggcacagtgagtaatttacttttgttttttttcttgtttatctgttgttctctctctctttctctctctgtcacacacacacacacacacacacacacatacatacacactgctgtttacaatttggcaatgcatttg

SEQ ID NO: 142227 - DNA, 594 bp, Homo sapiens
aatttttgcttttactgcgattgcttttggtgtctttgttatgaaatctttgtctgttcctatgtctagcatggtattgcctaggttgtcttccaggattttttacagttttgggttttacaattaagtctttaattcatcttgtgttgatttttgtttatggtataaggaagaggtccagcttcaatcttctacatatggctagccagttatccaagcaccatttattgactagggaggcttttccccattacttgtttttgtcagagaagaaatattttaatagtcctgataacattcccgtatcttgaatgtcctgctaacattcccctatctacaaagcatagcacctggggtggtgytgagtctggattccttggaagtgtcaatatacaccagataatggccagttttccacaagaatatagatgactagcacttcctgtcacaatacctggcacagtgagtaatttacttttgttttttttcttgtttatctgttgttctctctctctttctctctctgtcacacacacacacacacacacacacacatacatacacactgctgtttacaatttggcaatgcatttg

SEQ ID NO: 142228 - DNA, 594 bp, Homo sapiens
aatttttgcttttactgcgattgcttttggtgtctttgttatgaaatctttgtctgttcctatgtctagcatggtattgcctaggttgtcttccaggattttttacagttttgggttttacaattaagtctttaattcatcttgtgttgatttttgtttatggtataaggaagaggtccagcttcaatcttctacatatggctagccagttatccaagcaccatttattgactagggaggcttttccccattacttgtttttgtcagagaagaaatattttaatagtcctgataacattcccgtatcttgaatgtcctgctaacattcccctatctacaaagcatagcacctggggtggtgttgagtctggattccttggaagtgtcaatatacaccagataatggccagttttccacaagaatatagatgactagcacttcctgtcacaatacctggcacagtgagtaatttacttttgttttttttcttgtttatctgttgttctctctctctttctctctctgtcacacacacacacacacacacacacacayacatacacactgctgtttacaatttggcaatgcatttg

SEQ ID NO: 142229 - DNA, 441 bp, Homo sapiens
gtagaggttattttggcagcccatggaaaaagggaacttactattttcctcaccatgtatctggtacccagaagtaaccacaataataaataactacactattaaaaggcaacatttattgtgtgcttactttgagccagatactgttgaagtactgtattaaccagctccaggggctataatcttaatcatgacatcctattgacccygtaacttataaatataacatagtatgcagttaataaatatttattttagccatctccaagaactttgggagacagttttgttctgctatttactttttttttttaacctatataaggtttgaaatggagaaataagataatagcaaggaggaagtctgtaagcacagaacatactggcttgtttattctgcctctctctggttcagatgagggaatatagttgaagattcac

SEQ ID NO: 142230 - DNA, 409 bp, Homo sapiens
ggtccatattcataagggatatttactgttgttttcttgtgacatctttctctggttttggcatcagtctaatactggcctcgtagtatgagttgggatcaagtcctattttgcttggcacatcttctcagcaaatattcacatgagccctatttccctctcttagaatggaatcctatggtgcttcaagtacatatatgtgattcgtcatcgacctagttcaggatgatctctattgatgcttctctggaactaccactttggtctgtagatattttcttccctcttgatgatttcctacaatattccttcaccagcctagtcacttatcactaccacaacatcatatggaaatgtatgctaaatgtccctgggaagtctggccrtggaaaatgactgttctgaattc
